(19) United States
(12) Patent Application Publication
(10) Pub. No.: US 2007/0048756 A1
(43) Pub. Date: Mar. 1, 2007

(54) Methods for whole genome association studies

(75) Inventors: Rui Mei, Santa Clara, CA (US); Sean Walsh, Danville, CA (US); Hajime Matsuzaki, Palo Alto, CA (US); Michael H. Shapero, Redwood City, CA (US); Keith W. Jones, Sunnyvale, CA (US)

Correspondence Address: AFFYMETRIX, INC;ATTN: CHIEF IP COUNSEL, LEGAL DEPT., 3420 CENTRAL EXPRESSWAY, SANTA CLARA, CA, 95051, US

(73) Assignee: Affymetrix, INC., Santa Clara, CA (US)

(21) Appl. No.: 11/406,880

(22) Filed: Apr. 18, 2006

Related U.S. Application Data
(60) Provisional application No. 60/672,744, filed on Apr. 18, 2005.
(60) Provisional application No. 60/690,308, filed on Jun. 13, 2005.

(51) Int. Cl. C12Q 1/68; G06F 19/00

(52) U.S. Cl. 435/6; 702/20

(57) ABSTRACT

Methods for determining the genotype of more than 400,000 Single Nucleotide Polymorphisms (SNPs) in samples of genomic DNA are provided. A collection of SNPs that may be interrogated by the methods is disclosed in SEQ ID NO: 1-1,074,930. Each sequence is the sequence of a human SNP allele and the 16 bases flanking the SNP on either side. A sequence for each allele is included. In some aspects arrays of probes to interrogate the genotype of a collection of SNPs are disclosed. In preferred aspects the probes are 17 or more contiguous nucleotides from a sequence in SEQ ID NO: 1-1,074,930 or its complement.

### RELATED APPLICATIONS

[0001] This application is related to U.S. Provisional Application No. 60/672,744, filed Apr. 18, 2005 and 60/690,308 filed Jun. 13, 2005. The entire teachings of the above applications are incorporated herein by reference in their entirety for all purposes.

### FIELD OF THE INVENTION

[0002] The methods and kits of the invention relate generally to genotyping greater than 500,000 Single Nucleotide Polymorphisms (SNPs) in samples of genomic DNA.

### REFERENCE TO SEQUENCE LISTING

[0003] The Sequence Listing submitted on compact disc is hereby incorporated by reference. The machine format for the discs is IBM-PC, the operating system compatibility is MS-WINDOWS XP, the file on the disc is titled “3732.2seqlist.txt”, the file is 158 MB and the compact discs were created on Apr. 18, 2006.

### BACKGROUND OF THE INVENTION

[0004] Single nucleotide polymorphisms (SNPs) have emerged as the marker of choice for genome wide association studies and genetic linkage studies. Building SNP maps of the genome will provide the framework for new studies to identify the underlying genetic basis of complex diseases such as cancer, mental illness and diabetes. Identification of the genetic polymorphisms that contribute to susceptibility for common diseases will facilitate the development of diagnostics and therapeutics, see Carlson et al., Nature 429:446-452 (2004). Whole-genome association studies may be used to identify polymorphisms with disease associations. These studies require the analysis of much denser panels of markers than are required for linkage analysis in families and benefit from technologies that facilitate the analysis of hundreds of thousands of polymorphisms, see, The International HapMap Consortium, Nature 426, 789-796 (2003).

### SUMMARY OF INVENTION

[0005] A method for detection of greater than about 500,000 Single Nucleotide Polymorphisms (SNPs) in samples of genomic DNA is disclosed. The methods include a method for amplifying genomic DNA sequences after fragmentation with a selected restriction enzyme, ligation to adaptors, dilution of the DNA fragments, and amplification using one or a few common primers. The amplified fragments are purified, labeled, for example, using fluorescent or chemiluminescent labels, hybridized to an array of probes, washed, and stained. Hybridization patterns are analyzed using computer systems and genotypes that are characteristic of the sample are detected. The genotype information may be used for example, in studies of whole genome association, for example for disease or drug response, linkage studies, and copy number analysis.

[0006] In one aspect the more than 500,000 SNPs represented by the sequence listing are useful for whole genome association studies over a variety of populations.

[0007] In on aspect the polymorphisms are interrogated by hybridization to an array of probes, wherein each probe is at least 17, 18-21, 21-25 or 26-33 consecutive bases from one sequence selected from SEQ ID NO: 1-1,074,930 or the complements of SEQ ID NO: 1-1,074,930.

[0008] In one aspect a collection or probes for interrogating the genotype of a plurality of SNPs is disclosed. The sequence listing includes each allele of the SNPs to be interrogated with 16 bases flanking the polymorphic position on either side. Arrays of probes can be designed using the sequences in the sequence listing. Probes may be 17, 18, 19, 20, 21, 22, 23, 24, 25 or 26-33 bases in length.

[0009] Kits including adaptor sequences, primers, ligase, restriction enzymes, DNA polymerase, which may be thermal stable, dNTPs, DNA labeling reagent, terminal deoxytransferase and buffers, which may include additives such as Betaine or DMSO, may be provided. The kits may include an array for interrogating the genotype of a plurality of SNPs.

### DETAILED DESCRIPTION OF THE PREFERRED EMBODIMENTS

[0010] The present invention has many preferred embodiments and relies on many patents, applications and other references for details known to those of the art. Therefore, when a patent, application, or other reference is cited or repeated below, it should be understood that it is incorporated by reference in its entirety for all purposes as well as for the proposition that is recited.

[0011] As used in this application, the singular form “a,” “an,” and “the” include plural references unless the context clearly dictates otherwise. For example, the term “an agent” includes a plurality of agents, including mixtures thereof.

[0012] An individual is not limited to a human being but may also be other organisms including but not limited to mammals, plants, bacteria, or cells derived from any of the above.

[0013] Throughout this disclosure, various aspects of this invention can be presented in a range format. It should be understood that the description in range format is merely for convenience and brevity and should not be construed as an inflexible limitation on the scope of the invention. Accordingly, the description of a range should be considered to have specifically disclosed all the possible subranges as well as individual numerical values within that range. For example, description of a range such as from 1 to 6 should be considered to have specifically disclosed subranges such as from 1 to 3, from 1 to 4, from 1 to 5, from 2 to 4, from 2 to 6, from 3 to 6 etc., as well as individual numbers within that range, for example, 1, 2, 3, 4, 5, and 6. This applies regardless of the breadth of the range.

[0014] The practice of the present invention may employ, unless otherwise indicated, conventional techniques and descriptions of organic chemistry, polymer technology, molecular biology (including recombinant techniques), cell biology, biochemistry, and immunology, which are within the skill of the art. Such conventional techniques include polymer array synthesis, hybridization, ligation, and detection of hybridization using a label. Specific illustrations of suitable techniques can be had by reference to the example herein below. However, other equivalent conventional procedures can, of course, also be used. Such conventional techniques and descriptions can be found in standard laboratory manuals such as Genome Analysis: A Laboratory Manual Series (Vols. I-IV), Using Antibodies: A Laboratory Manual, Cells: A Laboratory Manual, PCR Primer: A Laboratory Manual, and Molecular Cloning: A Laboratory Manual (all from Cold Spring Harbor Laboratory Press), Stryer, L. (1995) Biochemistry (4th Ed.) Freeman, New York, Gait, “Oligonucleotide Synthesis: A Practical Approach” 1984, IRL Press, London, Nelson and Cox (2000), Lehninger, Principles of Biochemistry 3^{rd} Ed., W.H. Freeman Pub., New York, N.Y. and Berg et al. (2002) Biochemistry, 5^{th} Ed., W.H. Freeman Pub., New York, N.Y., all of which are herein incorporated in their entirety by reference for all purposes.

[0015] The present invention can employ solid substrates, including arrays in some preferred embodiments. Methods and techniques applicable to polymer (including protein) array synthesis have been described in U.S. Ser. No. 09/536,841, WO 00/58516, U.S. Pat. Nos. 5,143,854, 5,242,974, 5,252,743, 5,324,633, 5,384,261, 5,405,783, 5,424,186, 5,451,683, 5,482,867, 5,491,074, 5,527,681, 5,550,215, 5,571,639, 5,578,832, 5,593,839, 5,599,695, 5,624,711, 5,631,734, 5,795,716, 5,831,070, 5,837,832, 5,856,101, 5,858,659, 5,936,324, 5,968,740, 5,974,164, 5,981,185, 5,981,956, 6,025,601, 6,033,860, 6,040,193, 6,090,555, 6,136,269, 6,269,846 and 6,428,752, in PCT Applications Nos. PCT/US99/00730 (International Publication Number WO 99/36760) and PCT/US01/04285, which are all incorporated herein by reference in their entirety for all purposes. See also, Fodor et al., Science 251(4995), 767-73, 1991, Fodor et al., Nature 364(6437), 555-6, 1993 and Pease et al. PNAS USA 91(11), 5022-6, 1994 for methods of synthesizing and using microarrays.

[0016] Patents that describe synthesis techniques in specific embodiments include U.S. Pat. Nos. 5,412,087, 6,147,205, 6,262,216, 6,310,189, 5,889,165, and 5,959,098. Nucleic acid arrays are described in many of the above patents, but the same techniques are applied to polypeptide arrays.

[0017] Nucleic acid arrays that are useful in the present invention include those that are commercially available from Affymetrix (Santa Clara, Calif.) under the brand name GENECHIP. Example arrays are shown on the website at affymetrix.com.

[0018] The present invention also contemplates many uses for polymers attached to solid substrates. These uses include gene expression monitoring, profiling, library screening, genotyping and diagnostics. Gene expression monitoring, and profiling methods are shown in U.S. Pat. Nos. 5,800,992, 6,013,449, 6,020,135, 6,033,860, 6,040,138, 6,177,248 and 6,309,822. Genotyping and uses therefore are shown in U.S. Ser. Nos. 60/319,253, 10/013,598, and U.S. Pat. Nos. 5,856,092, 6,300,063, 5,858,659, 6,284,460, 6,361,947, 6,368,799 and 6,333,179. Additional methods of genotyping, complexity reduction and nucleic acid amplification are disclosed in U.S. Patent Application Nos. 60/508,418, 60/468,925, 60/493,085, 09/920,491, 10/442,021, 10/654,281, 10/316,811, 10/646,674, 10/272,155, 10/681,773, 10/712,616, 10/880,143, 10/891,260 and 10/918,501 and U.S. Pat. No. 6,582,938. Other uses are embodied in U.S. Pat. Nos. 5,871,928, 5,902,723, 6,045,996, 5,541,061, and 6,197,506.

[0019] The present invention also contemplates sample preparation methods in certain preferred embodiments. Prior to or concurrent with genotyping, the genomic sample may be amplified by a variety of mechanisms, some of which may employ PCR. See, e.g., PCR Technology: Principles and Applications for DNA Amplification (Ed. H. A. Erlich, Freeman Press, NY, N.Y., 1992); PCR Protocols: A Guide to Methods and Applications (Eds. Innis, et al., Academic Press, San Diego, Calif., 1990); Mattila et al., Nucleic Acids Res. 19, 4967 (1991); Eckert et al., PCR Methods and Applications 1, 17 (1991); PCR (Eds. McPherson et al., IRL Press, Oxford); and U.S. Pat. Nos. 4,683,202, 4,683,195, 4,800,159 4,965,188,and 5,333,675, and each of which is incorporated herein by reference in their entireties for all purposes. Modifications to PCR may also be used, for example, the inclusion of Betaine or trimethylglycine, which has been disclosed, for example, in Rees et al. Biochemistry 32:137-144 (1993), and in U.S. Pat. Nos. 6,270,962 and 5,545,539. The sample may be amplified on the array. See, for example, U.S. Pat. No. 6,300,070.

[0020] Additional methods of sample preparation and techniques for reducing the complexity of a nucleic sample are described in Dong et al., Genome Research 11, 1418 (2001), in U.S. Pat. Nos. 6,361,947, 6,391,592 and U.S. Ser. Nos. 09/916,135, 09/920,491, 09/910,292, and 10/013,598.

[0021] Other suitable amplification methods include the ligase chain reaction (LCR) (for example, Wu and Wallace, Genomics 4, 560 (1989), Landegren et al., Science 241, 1077 (1988) and Barringer et al. Gene 89:117 (1990)), transcription amplification (Kwoh et al., Proc. Natl. Acad. Sci. USA 86, 1173 (1989) and WO88/10315), self-sustained sequence replication (Guatelli et al., Proc. Nat. Acad. Sci. USA, 87, 1874 (1990) and WO90/06995), selective amplification of target polynucleotide sequences (U.S. Pat. No. 6,410,276), consensus sequence primed polymerase chain reaction (CP-PCR) (U.S. Pat. No. 4,437,975), arbitrarily primed polymerase chain reaction (AP-PCR) (U.S. Pat. Nos. 5, 413,909, 5,861,245), nucleic acid based sequence amplification (NABSA), rolling circle amplification (RCA), multiple displacement amplification (MDA) (U.S. Pat. Nos. 6,124,120 and 6,323,009) and circle-to-circle amplification (C2CA) (Dahl et al. Proc. Natl. Acad. Sci 101:4548-4553 (2004). Other amplification methods that may be used are described in, U.S. Pat. Nos. 5,242,794, 5,494,810, 5,409,818, 4,988,617, 6,063,603 and 5,554,517 and in U.S. Ser. No. 09/854,317, each of which is incorporated herein by reference.

[0022] Additional methods of sample preparation and techniques for reducing the complexity of a nucleic sample are described in Dong et al., Genome Research 11, 1418 (2001), in U.S. Pat. Nos. 6,361,947, 6,391,592 and U.S. Ser. Nos. 09/916,135, 09/920,491 (U.S. Patent Application Publication 20030096235), U.S. Ser. No. 09/910,292 (U.S. Patent Application Publication 20030082543), and U.S. Ser. No. 10/013,598.

[0023] Methods for conducting polynucleotide hybridization assays have been well developed in the art. Hybridization assay procedures and conditions will vary depending on the application and are selected in accordance with the general binding methods known including those referred to in: Maniatis et al. Molecular Cloning: A Laboratory Manual (2^{nd} Ed. Cold Spring Harbor, N.Y, 1989); Berger and Kimmel Methods in Enzymology, Vol. 152, Guide to Molecular Cloning Techniques (Academic Press, Inc., San Diego, Calif., 1987); Young and Davism, P.N.A.S, 80: 1194 (1983). Methods and apparatus for carrying out repeated and controlled hybridization reactions have been described in U.S. Pat. Nos. 5,871,928, 5,874,219, 6,045,996 and 6,386,749, 6,391,623 each of which are incorporated herein by reference

[0024] The present invention also contemplates signal detection of hybridization between ligands in certain preferred embodiments. See U.S. Pat. Nos. 5,143,854, 5,578,832; 5,631,734; 5,834,758; 5,936,324; 5,981,956; 6,025,601; 6,141,096; 6,185,030; 6,201,639; 6,218,803; and 6,225,625, in U.S. Ser. No. 60/364,731 and in PCT Application PCT/US99/06097 (published as WO99/47964), each of which also is hereby incorporated by reference in its entirety for all purposes.

[0025] Methods and apparatus for signal detection and processing of intensity data are disclosed in, for example, U.S. Pat. Nos. 5,143,854, 5,547,839, 5,578,832, 5,631,734, 5,800,992, 5,834,758; 5,856,092, 5,902,723, 5,936,324, 5,981,956, 6,025,601, 6,090,555, 6,141,096, 6,185,030, 6,201,639; 6,218,803; and 6,225,625, in U.S. Ser. No. 60/364,731 and in PCT Application PCT/US99/06097 (published as WO99/47964), each of which also is hereby incorporated by reference in its entirety for all purposes.

[0026] The practice of the present invention may also employ conventional biology methods, software and systems. Computer software products of the invention typically include computer readable medium having computer-executable instructions for performing the logic steps of the method of the invention. Suitable computer readable medium include floppy disk, CD-ROM/DVD/DVD-ROM, hard-disk drive, flash memory, ROM/RAM, magnetic tapes and etc. The computer executable instructions may be written in a suitable computer language or combination of several languages. Basic computational biology methods are described in, e.g. Setubal and Meidanis et al., Introduction to Computational Biology Methods (PWS Publishing Company, Boston, 1997); Salzberg, Searles, Kasif, (Ed.), Computational Methods in Molecular Biology, (Elsevier, Amsterdam, 1998); Rashidi and Buehler, Bioinformatics Basics: Application in Biological Science and Medicine (CRC Press, London, 2000) and Ouelette and Bzevanis Bioinformatics: A Practical Guide for Analysis of Gene and Proteins (Wiley & Sons, Inc., 2^{nd} ed., 2001). See U.S. Pat. No. 6,420,108.

[0027] The present invention may also make use of various computer program products and software for a variety of purposes, such as probe design, management of data, analysis, and instrument operation. See, U.S. Pat. Nos. 5,593,839, 5,795,716, 5,733,729, 5,974,164, 6,066,454, 6,090,555, 6,185,561, 6,188,783, 6,223,127, 6,229,911 and 6,308,170.

[0028] The whole genome sampling assay (WGSA) is described, for example in Kennedy et al., Nat. Biotech. 21, 1233-1237 (2003), Matsuzaki et al., Gen. Res. 14: 414-425, (2004), and Matsuzaki, et al. Nature Methods 1:109-111 (2004). Algorithms for use with mapping assays are described, for example, in Liu et al., Bioinformatics 19: 2397-2403 (2003) and Di et al. Bioinformatics 21:1958 (2005). Additional methods related to WGSA and arrays useful for WGSA and applications of WGSA are disclosed, for example, in U.S. Patent Application No. 60/676,058 filed 4/29/2005, 60/616,273 filed Oct. 5, 2004, U.S. Ser. No. 10/912,445, 11/044,831, 10/442,021, 10/650,332 and 10/463,991. Genome wide association studies using mapping assays are described in, for example, Hu et al., Cancer Res.;65(7):2542-6 (2005), Mitra et al., Cancer Res., 64(21):8116-25 (2004), Butcher et al., Hum Mol Genet., 14(10):1315-25 (2005), and Klein et al., Science, 308(5720):385-9 (2005). Each of these references is incorporated herein by reference in its entirety for all purposes.

[0029] Additionally, the present invention may have preferred embodiments that include methods for providing genetic information over networks such as the Internet as shown in U.S. Ser. No. 10/063,559 (United States Publication No. US20020183936), 60/349,546, 60/376,003, 60/394,574 and 60/403,381.

[0030] The term “adaptor” refers to an oligonucleotide of at least 5, 10, or 15 bases and preferably no more than 100 to 200 bases in length and more preferably no more than 50 to 60 bases in length, that may be attached to the end of a nucleic acid. Adaptor sequences may be synthesized using any methods known to those of skill in the art. For the purposes of this invention they may comprise, for example, priming sites, the complement of a priming site, recognition sites for endonucleases, common sequences and promoters. The adaptor may be entirely or substantially double stranded. A double stranded adaptor may comprise two oligonucleotides that are at least partially complementary. The adaptor may be phosphorylated or unphosphorylated on one or both strands. Adaptors may be more efficiently ligated to fragments if they comprise a substantially double stranded region and a short single stranded region which is complementary to the single stranded region created by digestion with a restriction enzyme. For example, when DNA is digested with the restriction enzyme EcoRI the resulting double stranded fragments are flanked at either end by the single stranded overhang 5′-AATT-3′, an adaptor that carries a single stranded overhang 5′-AATT-3′ will hybridize to the fragment through complementarity between the overhanging regions. This “sticky end” hybridization of the adaptor to the fragment may facilitate ligation of the adaptor to the fragment but blunt ended ligation is also possible. Blunt ends can be converted to sticky ends using the exonuclease activity of the Klenow fragment. For example when DNA is digested with PvuII the blunt ends can be converted to a two base pair overhang by incubating the fragments with Klenow in the presence of dTTP and dCTP. Overhangs may also be converted to blunt ends by filling in an overhang or removing an overhang.

[0031] In many aspects adaptors may be ligated to restriction fragments. Methods of ligation will be known to those of skill in the art and are described, for example, in Sambrook et at. (2001) and the New England BioLabs catalog both of which are incorporated herein by reference for all purposes. Methods include using T4 DNA Ligase which catalyzes the formation of a phosphodiester bond between juxtaposed 5′ phosphate and 3′ hydroxyl termini in duplex DNA or RNA with blunt and sticky ends; Taq DNA Ligase which catalyzes the formation of a phosphodiester bond between juxtaposed 5′ phosphate and 3′ hydroxyl termini of two adjacent oligonucleotides which are hybridized to a complementary target DNA; E. coli DNA ligase which catalyzes the formation of a phosphodiester bond between juxtaposed 5′-phosphate and 3′-hydroxyl termini in duplex DNA containing cohesive ends; and T4 RNA ligase which catalyzes ligation of a 5′ phosphoryl-terminated nucleic acid donor to a 3′ hydroxyl-terminated nucleic acid acceptor through the formation of a 3′ to 5′ phosphodiester bond, substrates include single-stranded RNA and DNA as well as dinucleoside pyrophosphates; or any other methods described in the art. Different enzymes generate different overhangs and the overhang of the adaptor can be targeted to ligated to fragments generated by selected restriction enzymes.

[0032] In some embodiments a double stranded adaptor is used and only one strand is ligated to the fragments. Ligation of one strand of an adaptor may be selectively blocked. Any known method to block ligation of one strand may be employed. For example, one strand of the adaptor can be designed to introduce a gap of one or more nucleotides between the 5′ end of that strand of the adaptor and the 3′ end of the target nucleic acid. Absence of a phosphate from the 5′ end of an adaptor will block ligation of that 5′ end to an available 3′OH. For additional adaptor methods for selectively blocking ligation see U.S. Pat. No. 6,197,557 and U.S. Ser. No. 09/910,292 which are incorporated by reference herein in their entirety for all purposes.

[0033] Adaptors may also incorporate modified nucleotides that modify the properties of the adaptor sequence. For example, phosphorothioate groups may be incorporated in one of the adaptor strands. A phosphorothioate group is a modified phosphate group with one of the oxygen atoms replaced by a sulfur atom. In a phosphorothioated oligo (often called an “S-Oligo”), some or all of the internucleotide phosphate groups are replaced by phosphorothioate groups. The modified backbone of an S-Oligo is resistant to the action of most exonucleases and endonucleases. Phosphorothioates may be incorporated between all residues of an adaptor strand, or at specified locations within a sequence. A useful option is to sulfurize only the last few residues at each end of the oligo. This results in an oligo that is resistant to exonucleases, but has a natural DNA center.

[0034] The term “admixture” refers to the phenomenon of gene flow between populations resulting from migration. Admixture can create linkage disequilibrium (LD).

[0035] The term “allele” as used herein is any one of a number of alternative forms a given locus (position) on a chromosome. An allele may be used to indicate one form of a polymorphism, for example, a biallelic SNP may have possible alleles A and B. An allele may also be used to indicate a particular combination of alleles of two or more SNPs in a given gene or chromosomal segment. The frequency of an allele in a population is the number of times that specific allele appears divided by the total number of alleles of that locus.

[0036] The term “array” as used herein refers to an intentionally created collection of molecules which can be prepared either synthetically or biosynthetically. The molecules in the array can be identical or different from each other. The array can assume a variety of formats, for example, libraries of soluble molecules; libraries of compounds tethered to resin beads, silica chips, or other solid supports.

[0037] The term “biomonomer” as used herein refers to a single unit of biopolymer, which can be linked with the same or other biomonomers to form a biopolymer (for example, a single amino acid or nucleotide with two linking groups one or both of which may have removable protecting groups) or a single unit which is not part of a biopolymer. Thus, for example, a nucleotide is a biomonomer within an oligonucleotide biopolymer, and an amino acid is a biomonomer within a protein or peptide biopolymer; avidin, biotin, antibodies, antibody fragments, etc., for example, are also biomonomers.

[0038] The term “biopolymer” or sometimes refer by “biological polymer” as used herein is intended to mean repeating units of biological or chemical moieties. Representative biopolymers include, but are not limited to, nucleic acids, oligonucleotides, amino acids, proteins, peptides, hormones, oligosaccharides, lipids, glycolipids, lipopolysaccharides, phospholipids, synthetic analogues of the foregoing, including, but not limited to, inverted nucleotides, peptide nucleic acids, Meta-DNA, and combinations of the above.

[0039] The term “biopolymer synthesis” as used herein is intended to encompass the synthetic production, both organic and inorganic, of a biopolymer. Related to a biopolymer is a “biomonomer”.

[0040] The term “combinatorial synthesis strategy” as used herein refers to a combinatorial synthesis strategy is an ordered strategy for parallel synthesis of diverse polymer sequences by sequential addition of reagents which may be represented by a reactant matrix and a switch matrix, the product of which is a product matrix. A reactant matrix is a 1 column by m row matrix of the building blocks to be added. The switch matrix is all or a subset of the binary numbers, preferably ordered, between 1 and m arranged in columns. A “binary strategy” is one in which at least two successive steps illuminate a portion, often half, of a region of interest on the substrate. In a binary synthesis strategy, all possible compounds which can be formed from an ordered set of reactants are formed. In most preferred embodiments, binary synthesis refers to a synthesis strategy which also factors a previous addition step. For example, a strategy in which a switch matrix for a masking strategy halves regions that were previously illuminated, illuminating about half of the previously illuminated region and protecting the remaining half (while also protecting about half of previously protected regions and illuminating about half of previously protected regions). It will be recognized that binary rounds may be interspersed with non-binary rounds and that only a portion of a substrate may be subjected to a binary scheme. A combinatorial “masking” strategy is a synthesis which uses light or other spatially selective deprotecting or activating agents to remove protecting groups from materials for addition of other materials such as amino acids.

[0041] The term “complementary” as used herein refers to the hybridization or base pairing between nucleotides or nucleic acids, such as, for instance, between the two strands of a double stranded DNA molecule or between an oligonucleotide primer and a primer binding site on a single stranded nucleic acid to be sequenced or amplified. Complementary nucleotides are, generally, A and T (or A and U), or C and G. Two single stranded RNA or DNA molecules are said to be complementary when the nucleotides of one strand, optimally aligned and compared and with appropriate nucleotide insertions or deletions, pair with at least about 80% of the nucleotides of the other strand, usually at least about 90% to 95%, and more preferably from about 98 to 100%. Alternatively, complementarity exists when an RNA or DNA strand will hybridize under selective hybridization conditions to its complement. Typically, selective hybridization will occur when there is at least about 65% complementary over a stretch of at least 14 to 25 nucleotides, preferably at least about 75%, more preferably at least about 90% complementary. See, M. Kanehisa Nucleic Acids Res. 12:203 (1984), incorporated herein by reference.

[0042] The term “genome” as used herein is all the genetic material in the chromosomes of an organism. DNA derived from the genetic material in the chromosomes of a particular organism is genomic DNA. A genomic library is a collection of clones made from a set of randomly generated overlapping DNA fragments representing the entire genome of an organism.

[0043] The term “genotype” as used herein refers to the genetic information an individual carries at one or more positions in the genome. A genotype may refer to the information present at a single polymorphism, for example, a single SNP. For example, if a SNP is biallelic and can be either an A or a C then if an individual is homozygous for A at that position the genotype of the SNP is homozygous A or AA. Genotype may also refer to the information present at a plurality of polymorphic positions.

[0044] The term “Hardy-Weinberg equilibrium” (HWE) as used herein refers to the principle that an allele when homozygous leads to a disorder that prevents the individual from reproducing does not disappear from the population but remains present in a population in the undetectable heterozygous state at a constant allele frequency.

[0045] The term “hybridization” as used herein refers to the process in which two single-stranded polynucleotides bind non-covalently to form a stable double-stranded polynucleotide; triple-stranded hybridization is also theoretically possible. The resulting (usually) double-stranded polynucleotide is a “hybrid.” The proportion of the population of polynucleotides that forms stable hybrids is referred to herein as the “degree of hybridization.” Hybridizations are usually performed under stringent conditions, for example, at a salt concentration of no more than about 1 M and a temperature of at least 25° C. For example, conditions of 5×SSPE (750 mM NaCl, 50 mM NaPhosphate, 5 mM EDTA, pH 7.4) and a temperature of 25-30° C. are suitable for allele-specific probe hybridizations or conditions of 100 mM MES, 1 M [Na⁺], 20 mM EDTA, 0.01% Tween-20 and a temperature of 30-50° C., preferably at about 45-50° C. Hybridizations may be performed in the presence of agents such as herring sperm DNA at about 0.1 mg/ml, acetylated BSA at about 0.5 mg/ml. As other factors may affect the stringency of hybridization, including base composition and length of the complementary strands, presence of organic solvents and extent of base mismatching, the combination of parameters is more important than the absolute measure of any one alone. Hybridization conditions suitable for microarrays are described in the Gene Expression Technical Manual, 2004 and the GENECHIP Mapping Assay Manual, 2004.

[0046] The term “hybridization probes” as used herein are oligonucleotides capable of binding in a base-specific manner to a complementary strand of nucleic acid. Such probes include peptide nucleic acids, as described in Nielsen et al., Science 254, 1497-1500 (1991), LNAs, as described in Koshkin et al. Tetrahedron 54:3607-3630, 1998, and U.S. Pat. No. 6,268,490 and other nucleic acid analogs and nucleic acid mimetics.

[0047] The term “hybridizing specifically to” as used herein refers to the binding, duplexing, or hybridizing of a molecule only to a particular nucleotide sequence or sequences under stringent conditions when that sequence is present in a complex mixture (for example, total cellular) DNA or RNA.

[0048] The term “initiation biomonomer” or “initiator biomonomer” as used herein is meant to indicate the first biomonomer which is covalently attached via reactive nucleophiles to the surface of the polymer, or the first biomonomer which is attached to a linker or spacer arm attached to the polymer, the linker or spacer arm being attached to the polymer via reactive nucleophiles.

[0049] The term “isolated nucleic acid” as used herein mean an object species invention that is the predominant species present (i.e., on a molar basis it is more abundant than any other individual species in the composition). Preferably, an isolated nucleic acid comprises at least about 50, 80 or 90% (on a molar basis) of all macromolecular species present. Most preferably, the object species is purified to essential homogeneity (contaminant species cannot be detected in the composition by conventional detection methods).

[0050] The term “ligand” as used herein refers to a molecule that is recognized by a particular receptor. The agent bound by or reacting with a receptor is called a “ligand,” a term which is definitionally meaningful only in terms of its counterpart receptor. The term “ligand” does not imply any particular molecular size or other structural or compositional feature other than that the substance in question is capable of binding or otherwise interacting with the receptor. Also, a ligand may serve either as the natural ligand to which the receptor binds, or as a functional analogue that may act as an agonist or antagonist. Examples of ligands that can be investigated by this invention include, but are not restricted to, agonists and antagonists for cell membrane receptors, toxins and venoms, viral epitopes, hormones (for example, opiates, steroids, etc.), hormone receptors, peptides, enzymes, enzyme substrates, substrate analogs, transition state analogs, cofactors, drugs, proteins, and antibodies.

[0051] The term “linkage analysis” as used herein refers to a method of genetic analysis in which data are collected from affected families, and regions of the genome are identified that co-segregated with the disease in many independent families or over many generations of an extended pedigree. A disease locus may be identified because it lies in a region of the genome that is shared by all affected members of a pedigree.

[0052] The term “linkage disequilibrium” (LD) or sometimes referred to as “allelic association” as used herein refers to the preferential association of a particular allele or genetic marker with a specific allele, or genetic marker at a nearby chromosomal location more frequently than expected by chance for any particular allele frequency in the population. For example, if locus X has alleles A and B, which occur equally frequently, and linked locus Y has alleles C and D, which occur equally frequently, one would expect the combination AC to occur with a frequency of 0.25. If AC occurs more frequently, then alleles A and C are in linkage disequilibrium. Linkage disequilibrium may result from natural selection of certain combination of alleles or because an allele has been introduced into a population too recently to have reached equilibrium with linked alleles. The genetic interval around a disease locus may be narrowed by detecting disequilibrium between nearby markers and the disease locus. For additional information on linkage disequilibrium see Ardlie et al., Nat. Rev. Gen. 3:299-309, 2002.

[0053] The term “lod score” or “LOD” is the log of the odds ratio of the probability of the data occurring under the specific hypothesis relative to the null hypothesis. LOD=log [probability assuming linkage/probability assuming no linkage].

[0054] The term “mixed population” or sometimes refer by “complex population” as used herein refers to any sample containing both desired and undesired nucleic acids. As a non-limiting example, a complex population of nucleic acids may be total genomic DNA, total genomic RNA or a combination thereof. Moreover, a complex population of nucleic acids may have been enriched for a given population but includes other undesirable populations. For example, a complex population of nucleic acids may be a sample which has been enriched for desired messenger RNA (mRNA) sequences but still includes some undesired ribosomal RNA sequences (rRNA).

[0055] The term “monomer” as used herein refers to any member of the set of molecules that can be joined together to form an oligomer or polymer. The set of monomers useful in the present invention includes, but is not restricted to, for the example of (poly)peptide synthesis, the set of L-amino acids, D-amino acids, or synthetic amino acids. As used herein, “monomer” refers to any member of a basis set for synthesis of an oligomer. For example, dimers of L-amino acids form a basis set of 400 “monomers” for synthesis of polypeptides. Different basis sets of monomers may be used at successive steps in the synthesis of a polymer. The term “monomer” also refers to a chemical subunit that can be combined with a different chemical subunit to form a compound larger than either subunit alone.

[0056] The term “mRNA” or sometimes refer by “mRNA transcripts” as used herein, include, but not limited to pre-mRNA transcript(s), transcript processing intermediates, mature mRNA(s) ready for translation and transcripts of the gene or genes, or nucleic acids derived from the mRNA transcript(s). Transcript processing may include splicing, editing and degradation. As used herein, a nucleic acid derived from an mRNA transcript refers to a nucleic acid for whose synthesis the mRNA transcript or a subsequence thereof has ultimately served as a template. Thus, a cDNA reverse transcribed from an mRNA, an RNA transcribed from that cDNA, a DNA amplified from the cDNA, an RNA transcribed from the amplified DNA, etc., are all derived from the mRNA transcript and detection of such derived products is indicative of the presence and/or abundance of the original transcript in a sample. Thus, mRNA derived samples include, but are not limited to, mRNA transcripts of the gene or genes, cDNA reverse transcribed from the mRNA, cRNA transcribed from the cDNA, DNA amplified from the genes, RNA transcribed from amplified DNA, and the like.

[0057] The term “nucleic acid library” or sometimes refer by “array” as used herein refers to an intentionally created collection of nucleic acids which can be prepared either synthetically or biosynthetically and screened for biological activity in a variety of different formats (for example, libraries of soluble molecules; and libraries of oligos tethered to resin beads, silica chips, or other solid supports). Additionally, the term “array” is meant to include those libraries of nucleic acids which can be prepared by spotting nucleic acids of essentially any length (for example, from 1 to about 1000 nucleotide monomers in length) onto a substrate. The term “nucleic acid” as used herein refers to a polymeric form of nucleotides of any length, either ribonucleotides, deoxyribonucleotides or peptide nucleic acids (PNAs), that comprise purine and pyrimidine bases, or other natural, chemically or biochemically modified, non-natural, or derivatized nucleotide bases. The backbone of the polynucleotide can comprise sugars and phosphate groups, as may typically be found in RNA or DNA, or modified or substituted sugar or phosphate groups. A polynucleotide may comprise modified nucleotides, such as methylated nucleotides and nucleotide analogs. The sequence of nucleotides may be interrupted by non-nucleotide components. Thus the terms nucleoside, nucleotide, deoxynucleoside and deoxynucleotide generally include analogs such as those described herein. These analogs are those molecules having some structural features in common with a naturally occurring nucleoside or nucleotide such that when incorporated into a nucleic acid or oligonucleoside sequence, they allow hybridization with a naturally occurring nucleic acid sequence in solution. Typically, these analogs are derived from naturally occurring nucleosides and nucleotides by replacing and/or modifying the base, the ribose or the phosphodiester moiety. The changes can be tailor made to stabilize or destabilize hybrid formation or enhance the specificity of hybridization with a complementary nucleic acid sequence as desired.

[0058] The term “nucleic acids” as used herein may include any polymer or oligomer of pyrimidine and purine bases, preferably cytosine, thymine, and uracil, and adenine and guanine, respectively. See Albert L. Lehninger, PRINCIPLES OF BIOCHEMISTRY, at 793-800 (Worth Pub. 1982). Indeed, the present invention contemplates any deoxyribonucleotide, ribonucleotide or peptide nucleic acid component, and any chemical variants thereof, such as methylated, hydroxymethylated or glycosylated forms of these bases, and the like. The polymers or oligomers may be heterogeneous or homogeneous in composition, and may be isolated from naturally-occurring sources or may be artificially or synthetically produced. In addition, the nucleic acids may be DNA or RNA, or a mixture thereof, and may exist permanently or transitionally in single-stranded or double-stranded form, including homoduplex, heteroduplex, and hybrid states.

[0059] The term “oligonucleotide” or sometimes refer by “polynucleotide” as used herein refers to a nucleic acid ranging from at least 2, preferable at least 8, and more preferably at least 20 nucleotides in length or a compound that specifically hybridizes to a polynucleotide. Polynucleotides of the present invention include sequences of deoxyribonucleic acid (DNA) or ribonucleic acid (RNA) which may be isolated from natural sources, recombinantly produced or artificially synthesized and mimetics thereof. A further example of a polynucleotide of the present invention may be peptide nucleic acid (PNA). The invention also encompasses situations in which there is a nontraditional base pairing such as Hoogsteen base pairing which has been identified in certain tRNA molecules and postulated to exist in a triple helix. “Polynucleotide” and “oligonucleotide” are used interchangeably in this application.

[0060] The term “polymorphism” as used herein refers to the occurrence of two or more genetically determined alternative sequences or alleles in a population. A polymorphic marker or site is the locus at which divergence occurs. Preferred markers have at least two alleles, each occurring at frequency of greater than 1%, and more preferably greater than 10% or 20% of a selected population. A polymorphism may comprise one or more base changes, an insertion, a repeat, or a deletion. A polymorphic locus may be as small as one base pair. Polymorphic markers include restriction fragment length polymorphisms, variable number of tandem repeats (VNTR's), hypervariable regions, minisatellites, dinucleotide repeats, trinucleotide repeats, tetranucleotide repeats, simple sequence repeats, and insertion elements such as Alu. The first identified allelic form is arbitrarily designated as the reference form and other allelic forms are designated as alternative or variant alleles. The allelic form occurring most frequently in a selected population is sometimes referred to as the wildtype form. Diploid organisms may be homozygous or heterozygous for allelic forms. A diallelic polymorphism has two forms. A triallelic polymorphism has three forms. Single nucleotide polymorphisms (SNPs) are included in polymorphisms.

[0061] The term “primer” as used herein refers to a single-stranded oligonucleotide capable of acting as a point of initiation for template-directed DNA synthesis under suitable conditions for example, buffer and temperature, in the presence of four different nucleoside triphosphates and an agent for polymerization, such as, for example, DNA or RNA polymerase or reverse transcriptase. The length of the primer, in any given case, depends on, for example, the intended use of the primer, and generally ranges from 15 to 30 nucleotides. Short primer molecules generally require cooler temperatures to form sufficiently stable hybrid complexes with the template. A primer need not reflect the exact sequence of the template but should be sufficiently complementary to hybridize with such template. The primer site is the area of the template to which a primer hybridizes. The primer pair is a set of primers including a 5′ upstream primer that hybridizes with the 5′ end of the sequence to be amplified and a 3′ downstream primer that hybridizes with the complement of the 3′ end of the sequence to be amplified.

[0062] The term “probe” as used herein refers to a surface-immobilized molecule that can be recognized by a particular target. See U.S. Pat. No. 6,582,908 for an example of arrays having all possible combinations of probes with 10, 12, and more bases. Examples of probes that can be investigated by this invention include, but are not restricted to, agonists and antagonists for cell membrane receptors, toxins and venoms, viral epitopes, hormones (for example, opioid peptides, steroids, etc.), hormone receptors, peptides, enzymes, enzyme substrates, cofactors, drugs, lectins, sugars, oligonucleotides, nucleic acids, oligosaccharides, proteins, and monoclonal antibodies.

[0063] The term “receptor” as used herein refers to a molecule that has an affinity for a given ligand. Receptors may be naturally-occurring or manmade molecules. Also, they can be employed in their unaltered state or as aggregates with other species. Receptors may be attached, covalently or noncovalently, to a binding member, either directly or via a specific binding substance. Examples of receptors which can be employed by this invention include, but are not restricted to, antibodies, cell membrane receptors, monoclonal antibodies and antisera reactive with specific antigenic determinants (such as on viruses, cells or other materials), drugs, polynucleotides, nucleic acids, peptides, cofactors, lectins, sugars, polysaccharides, cells, cellular membranes, and organelles. Receptors are sometimes referred to in the art as anti-ligands. As the term receptor is used herein, no difference in meaning is intended. A “Ligand Receptor Pair” is formed when two macromolecules have combined through molecular recognition to form a complex. Other examples of receptors which can be investigated by this invention include but are not restricted to those molecules shown in U.S. Pat. No. 5,143,854, which is hereby incorporated by reference in its entirety.

[0064] A number of methods disclosed herein require the use of one or more “restriction enzymes or endonucleases” to fragment the nucleic acid sample. In general, a restriction enzyme recognizes a specific nucleotide sequence of four to eight nucleotides and cuts the DNA at a site within or a specific distance from the recognition sequence. For example, the restriction enzyme EcoRI recognizes the sequence GAATTC and will cut a DNA molecule between the G and the first A. The length of the recognition sequence is roughly proportional to the frequency of occurrence of the site in the genome. A simplistic theoretical estimate is that a six base pair recognition sequence will occur once in every 4096 (4⁶) base pairs while a four base pair recognition sequence will occur once every 256 (4⁴) base pairs. If an enzyme with a variable position in the recognition site is used this changes the frequency of occurrence. For example, Sty1 has recognition site CCWWGG where W can be A or T so a theoretical estimate for the frequency of occurrence of the site is once every 1024 (4⁴×2²) bases. In silico digestions of sequences from the Human Genome Project show that the actual occurrences may be more or less frequent, depending on the sequence of the restriction site. Because the restriction sites are rare, the appearance of shorter restriction fragments, for example those less than 1000 base pairs, is much less frequent than the appearance of longer fragments. Many different restriction enzymes are known and appropriate restriction enzymes can be selected for a desired result. For a comprehensive list of many commercially available restriction enzymes, their recognition sites and reaction conditions see, New England BioLabs Catalog which is herein incorporated by reference in its entirety for all purposes.

[0065] The term “solid support”, “support”, and “substrate” as used herein are used interchangeably and refer to a material or group of materials having a rigid or semi-rigid surface or surfaces. In many embodiments, at least one surface of the solid support will be substantially flat, although in some embodiments it may be desirable to physically separate synthesis regions for different compounds with, for example, wells, raised regions, pins, etched trenches, or the like. According to other embodiments, the solid support(s) will take the form of beads, resins, gels, microspheres, or other geometric configurations. See U.S. Pat. No. 5,744,305 for exemplary substrates.

[0066] The term “target” as used herein refers to a molecule that has an affinity for a given probe. Targets may be naturally-occurring or man-made molecules. Also, they can be employed in their unaltered state or as aggregates with other species. Targets may be attached, covalently or noncovalently, to a binding member, either directly or via a specific binding substance. Examples of targets which can be employed by this invention include, but are not restricted to, antibodies, cell membrane receptors, monoclonal antibodies and antisera reactive with specific antigenic determinants (such as on viruses, cells or other materials), drugs, oligonucleotides, nucleic acids, peptides, cofactors, lectins, sugars, polysaccharides, cells, cellular membranes, and organelles. Targets are sometimes referred to in the art as anti-probes. As the term target is used herein, no difference in meaning is intended. A “Probe Target Pair” is formed when two macromolecules have combined through molecular recognition to form a complex. c) Methods for genotyping individuals on a genome wide scale

[0067] A Single Nucleotide Polymorphism, or SNP, is a small genetic change, or variation, that can occur within a person's DNA sequence. The genetic code is specified by A (adenine), C (cytosine), T (thymine), and G (guanine). SNP variation occurs when a single nucleotide is replaced by one of the other three nucleotides.

[0068] On average, SNPs occur in the human population more than 1 percent of the time. Because only about 4 percent of a person's DNA sequence codes for the production of proteins, most SNPs are found outside of “coding sequences”. SNPs found within a coding sequence are of particular interest to researchers because they are more likely to alter the biological function of a protein.

[0069] Genetic factors may also confer susceptibility or resistance to a disease and determine the severity or progression of disease. By studying stretches of DNA that have been found to harbor a SNP associated with a disease trait, researchers may begin to reveal relevant genes associated with a disease. Defining and understanding the role of genetic factors in disease will also allow researchers to better evaluate the role non-genetic factors—such as behavior, diet, lifestyle, and physical activity—have on disease.

[0070] The sequence listing provides a 33 base sequence for each of two alleles for more than 500,000 human SNPs. Each sequence in SEQ ID NO: 1-1,074,930, is 33 bases in length and includes a SNP base at position 17 plus the 16 bases immediately 5′ of the SNP and the 16 bases immediately 3′ of the SNP. Each allele of the SNP is represented. For example, SEQ ID NO: 1 is identical to SEQ ID NO: 2 except for position 17 which is an A in SEQ ID NO: I and a G in SEQ ID NO: 2:
[0071] (SEQ ID NO: 1) GTGACAAGGA TACCAGAAAG TGCACAGGTC TGA
[0072] (SEQ ID NO: 2) GTGACAAGGA TACCAGGAAG TGCACAGGTC TGA
   These two sequences represent the two alleles of a biallelic human SNP that can be either an A or a G (T or C on the opposite strand). The sequence of one strand is provided for each. Human genomic DNA is double stranded and one of skill in the art would be able to derive the opposite strand from the sequences provided in the sequence listing. Either strand may be interrogated. The approximately 537,465 SNPs represented by SEQ ID NO: 1-1,074,930 can all be interrogated in a whole genome sampling assay (WGSA) using either Sty I or Nsp I as the restriction enzyme, so each SNP is present on a fragment that is between 200 and 2,000 base pairs when the human genome is digested with Sty I or with Nsp I. The SNPs were selected using information in NCBI build 34. Each SNP can be identified by a SNP ID number, for example, the first SNP represented by SEQ ID NOs: 1 and 2 corresponds to RS ID: 940549.

[0073] To interrogate the polymorphism probes are designed to be complementary to one or more regions within the 33 bases provided in SEQ ID NO: 1-1,074,930. In one aspect the probes in a probe set contain a base that corresponds to the polymorphic position and bases up and downstream, for example, in a preferred embodiment a probe set is designed for each SNP and the probe set includes a plurality of 25 base probes that are perfectly complementary to one or the other allele and include the polymorphic position. Probes may be complementary to either strand. A probe set may, for example, perfect match probes that are perfectly complementary to one or the other allele of a SNP and mismatch probes which are perfectly complementary to one or the other allele of a SNP, but for a single mismatch base in the center of the probe. Perfect match probes in a probe set may vary by the position of the probe with reference to the polymorphic position. For example, if the polymorphic position is in the center of the probe the probe is at position 0 in reference to the polymorphism and if the probe is shifted so that the central position of the probe is 4 bases upstream of the SNP the SNP is at position −4. In one aspect the probes in a probe set may be shifted between 1 and 4 bases upstream or downstream of the SNP and may interrogate either strand. There would be 9 different probes possible from each of the 33 base sequences in the sequence listing and 9 possible for the opposite strand, for a total of 36 possible perfect match probes (18×2 alleles). The best performing probes may be selected and a subset of 10-28 perfect match probes may be used, mismatch probes may also be included.

[0074] In a particularly preferred embodiment probe sets are designed from at least 800,000 sequences from SEQ ID NOS: 1-1,074,930. In a preferred embodiment the probes of the at least 800,000 probe sets are present on a solid support or a plurality of solid supports so that the location of each probe is known or determinable. The probes of the array include the polymorphic position.

[0075] In another aspect a magnesium pyrophosphate precipitate is generated during the extension with TITANIUM Taq Polymerase. The precipitate may interfere with quantification of DNA by optical density analysis and may result in clogging or obstruction of membranes used for purification of nucleic acids. In some aspects it is preferably to treat the PCR amplicon with EDTA to reduce the precipitate prior to taking OD measurements or purification of the DNA. This may be particularly useful when performing the method in an automated fashion, for example, using a robotic system.

[0076] In another aspect methods for processing genomic samples in high throughput for hybridization to the disclosed genotyping arrays are disclosed. Methods and workflows for sample preparation in 96 well plates are disclosed.

[0077] The disclosed arrays, kits and collections of SNPs may be used, for example, performing association studies to identify genomic regions that are associated with a selected phenotype or phenotypes. In one aspect a set of two arrays to interrogate a set of 500,568 human SNPs is disclosed. The SNPs in the set have an average minor allele frequency (MAF) of 0.21 and an average heterozygosity of 0.29 and about 85% of the human genome is within 10 kb of a SNP in the set, based on analysis in three populations. In one aspect 250 ng of starting genomic DNA is used for each array in the two array set. Whole-genome amplified material prepared by the Qiagen REPLI-G kits may also be used. See U.S. Pat. Nos. 6,617,137 and 6,323,009. Each array in the set includes more than 6.5 million features. Features consist of more than a million copies of a 25 base oligonucleotide probe of known sequence. Each SNP is interrogated by 6 to 10 probe quartets with each probe quartet having a perfect match (PM) and a mistmatch (MM) probe for each allele. In one aspect there are 24 to 40 probes per SNP.

[0078] The SNPs were selected for inclusion to optimize coverage of the genome with minimal bias. SNPs were ranked for selection based on LD information and selection was biased toward SNPs with higher MAF. Selection also took into account accuracy, reproducibility and call rate. About 2.2 million SNPs were used for the initial selection, from Caucasian, African and Asian populations (16 each, all from HapMap samples). This resulted in 650,000 SNPs. Using these 650K SNPs 400 individuals were genotyped to maximize for genotyping performance, including call rates, HW and Mendelian error and reproducibility. The final SNPs were selected from this list based on LD and HapMap information and extra SNPs of known genetic importance were included. The median intermarker distance is 2.8 kb, the mean intermarker distance is 5.8 kb. There are more than 225,000 SNPs that are within 10 kb of genes and more than 25,000 SNPs that are in predicted exons or ESTs. There are more than 30,000 human genes that are within 10 kb from at least 1 SNP in the set, that is about 90% of all predicted genes, and more than 18,000 predicted genes are within 10 kb from at least 5 SNPs in the set (about 56% of predicted genes). The set provides more than 80% coverage at r²>0.8 using multi-marker approaches and more than 90% coverage at r²>0.5.

[0079] In one aspect the SNPs selected for the whole genome association panel and included in the sequence listing may be supplemented with additional SNPs to increase the genetic power of a genotyping study. For example, the genotype information of the disclosed SNPs may be supplemented in a study with genotype information for a panel of 10,000 to 25,000 or 25,000 to 50,000 tagSNPs or coding SNPs (cSNPs) or a combination of tagSNPs, coding SNPs or genic SNPs. For a discussion of tagSNPs see, for example, Carlson et al., Am J Hum Genet. 2004; 74(1): 106-120. The add on panel of SNPs may be genotyped using any available method. In a preferred aspect the add on panel are genotyped using target specific probes, for example, the MIP assay (see, Hardenbol et al., Genome Res. 15(2):269-75 (2005) and Moorhead et al., Eur. J. Hum Genet 14(2):207-15 (2006). In another aspect an assay based on single base extension (SBE), allele specific primer extension (ASPE), or an oligo ligation based assay (OLA) may be used. For a review of genotyping methods see, for example, Syvanen Nat Rev Genet. (2001) 2(12):930-42.

[0080] In another embodiment genotype information obtained using the 500K panel of SNPs disclosed herein may be supplemented with genotype information for a panel of SNPs selected from a genomic region, for example, a chromosome or a region of a chromosome that has been associated with a phenotype.

[0081] In another aspect the genotyping arrays include only PM probes, allowing for the same number of SNPs to be interrogated using fewer probes. For example, if a SNP is interrogated with 6 probe quartets, where each quartet includes two PM and two MM probes, if the MM probes are omitted from the array so that the SNP is interrogated by 6 probe pairs (each pair has a PM probe for each allele), the total number of probes for the SNP are 12 instead of 24. The array can thus interrogate the same number of SNPs using about half of the features. In a preferred aspect the array may be a 64 format array. In one aspect the disclosed SNPs are ranked based on performance to identify SNPs that can be reproducibly genotyped using only 12 PM probes. For lower performing SNPs more PM probes may be included, for example, 13 to 24, or 13 to 20 PM probes. In another aspect some SNPs may be interrogated by a mixture of PM and MM probes. For example, some SNPs may be interrogated by about 10, 12, 14, 16, 18 or 20 PM probes and about 2, 4, 6, 8, 10 or 12 MM probes. In some aspects the genotype calls may be made using an algorithm such RLMM which is described in Rabbee and Speed, Bioinformatics 22(1):7-12 (2006), which is incorporated by reference in its entirety. In another aspect an extension of the RLMM algorithm may be used. The BRLMM algorithm has been developed by adding a Bayesian step to RLMM. The Bayesian step provides improved estimates of cluster centers and variances relative to the RLMM algorithm.

[0082] The arrays and methods disclosed enable high-powered whole genome association studies, (for example, drug response and disease genetics), cancer studies, linkage studies and population genetics studies. SNPs are the most frequent form of polymorphism in the human genome and it hs been estimated that common SNPs with MAF greater than 10% occur about every 600 bp (Kruglyak and Nickerson, Nat Genet 27:234-236, 2001) resulting in about 5 million common SNPs. Because of the tendency of SNPs that are close together to be correlated because of LD, a subset of all possible common SNPs can be genotyped and that information can be used to infer information about other SNPs that were not genotyped. Statistics for describing LD include D′ and r². See Devlin and Risch Genomics 29:311-322, 1995). If two SNPs are perfectly correlated, meaning there has been no recombination between the two SNPs, then r²=1 and the SNPs are in perfect LD. If two SNPs are in perfect LD, determining the genotype of 1 will give you the genotype of the other. Using an r² threshold of r²>0.8 Carlson et al., were able to use LD-selected tagSNPs to resolve more than 80% of the genome. See Carlson et al., Am J Hum Genet 74:106-20 (2004).

[0083] In some aspects the arrays may be used to identify regions of copy number variation, including LOH, amplification and deletion in either the germ line or in tumors. Chromosomal aberrations are frequently identified in tumors. Methods for copy number analysis using genotyping arrays are described, for example, in Huang et al., Bioinformatics, 7:83 (2006), Huang et al., Hum Genomics, 1(4):287-99 (2004) and Bignell et al., Genome Res. 14(2):287-95 (2004). Copy number polymorphisms in the germline may also contribute to genomic variation between normal humans and may be detected using genotyping arrays. See, for example, Sebat et al., Science 305:525-528 (2004). Genotyping arrays provide an advantage to copy number analysis as they can provide allele specific copy number information.

[0084] Aspects of the method are further described in the following non-limiting examples.

### EXAMPLES

### Example 1

### GENECHIP 500K-EA Array Protocol

[0085] The following reagents and materials were used: reduced EDTA TE Buffer (10 mM Tris HCl, 0.1 mM EDTA, pH 8.0) (TEKNova P/N T0223); Reference Genomic DNA, 103 (50 ng/μl) (Affymetrix P/N 900421); 250 ng Genomic DNA per array at working stock concentration (50 ng/μl); Sty I (10,000 U/ml) obtained from New England Biolab (P/N R0500S) also including NE Buffer 3 from New England Biolab (P/N B7003S to order separately) and BSA from New England Biolab (P/N B9001S to order separately); Nsp I (10,000 U/ml) obtained from New England Biolab (P/N R0602L) including NE Buffer 2 from New England Biolab (P/NB7002S to order separately); Adaptor Nsp 1 (50 μM) Affymetrix P/N 900596 for 30 reactions or 900697 for 100 reactions; Adaptor Sty 1 (50 μM) Affymetrix P/N 900597 for 30 reactions or 900698 for 100 reactions; Molecular Biology Water from BioWhittaker Molecular Applications (Cambrex) (P/N 51200); 96 Well Plate: Bio-Rad (P/N MLP-9601) or Applied Biosystems (P/N 403083); 96-well PLT Clear Adhesive Films obtained from Applied Biosystems (P/N 4306311); 8-Tube Strips, thin wall (0.2 ml) obtained from Bio-Rad (P/N TBS-0201); Strip of 8 Caps obtained from Bio-Rad (P/N TCS-0801); Thermal Cycler; Oligo Control Reagent, 0100 (Affymetrix P/N 900582 or 900581); T4 DNA Ligase obtained from New England Biolab (P/N M0202L) including: T4 DNA Ligase Buffer (P/N B0202S to order separately); Betaine (5M) from Sigma (P/N B0300) or G-C Melt (5M) from Clontech, P/N 639238; dNTP (2.5 mM each) obtained from Takara (P/N 4030), Fisher Scientific, or Invitrogen (P/N R72501); PCR Primer, 002 (100 μM) available at Affymetrix (P/N 900702) (if running Nsp Array), PCR Primer 002 (100 μM) available at Affymetrix (P/N 900595) (if running Sty I Array); Clontech TITANIUM Taq DNA Polymerase (50×) obtained from Clontech (P/N 639209 or 8434-1 containing 50× BD Clontech TITANIUM Taq DNA Polymerase and 10× TITANIUM Taq PCR Buffer; 2% TBE Gel: BMA Reliant precast (2% SEAKEM Gold), Cambrex Bio Science (P/N 54939); All Purpose Hi-Lo DNA Marker: Bionexus Inc. (P/N BN2050) or Direct Load Wide Range DNA Marker from Sigma (P/N D7058); Gel Loading Solution from Sigma (P/N G2526); PCR Tubes (should be comparable and qualified with Bio-Rad DNA ENgine Tetrad, or ABI GeneAmp PCR System). Suitable examples include: individual tubes, Bio-Rad P/N TWI-0201, 8 tube strips, thin-wall (0.2 mL), Bio-Rad P/N TCS-081, 96 well plate, Bio-Rad P/N MLP-9601); and 96 Well PLT Clear Adhesive Films from Applied Biosystems (P/N 4306311).

[0086] For PCR purification and elution the following equipment and reagents may be used. Manifold—QIAvac multiwell unit (Qiagen P/N 9014579); EDTA (0.5 M, pH 8.0) Ambion P/N 9260G, DNA Amplification Clean-Up kit, to be used with Affymetrix products, Clontech P/N 636974 (1 plate) or P/N 636975 (4 plates), Biomek Seal and sample aluminum foil lids, Beckman P/N 538619 and a vacuum regulator for use during the PCR clean up step from QIAGEN, P/N 19530. In one embodiment the miniElute 96 UF PCR Purification Kit (Qiagen P/N 28051 or 28053) and Buffer EB (250 ml) (Qiagen P/N 19086); may be used in place of the DNA Amplification Clean-up Kit from Clontech.

[0087] The following reagents may be used for the fragmentation and labeling steps: GENECHIP Fragmentation Reagent (DNase I) (Affymetrix P/N 900131); 10× Fragmentation Buffer (Affymetrix P/N 900422 or 900695); 4% TBE Gel: BMA Reliant Precast (4% NuSieve 3:1 Plus Agarose) (Cambrex P/N 54929); GENECHIP DNA Labeling Reagent (30 mM) (Affymetrix P/N 900778 or 900699); Terminal Deoxynucleotidyl Transferase (30 U/μl) (Affymetrix P/N 900508 or 900703); 5× Terminal Deoxynucleotidyl Transferase Buffer (Affymetrix P/N 900425 or 900696); 5M TMACl (Tetramethyl Ammonium Chloride) (Sigma P/N T3411); 10% Tween-20: Pierce (Catalog#: 28320); DMSO (Sigma P/N D5879); MES hydrate SigmaUltra, Sigma (P/N M5287); MES Sodium Salt, Sigma (P/N M5057); 0.5 M EDTA (Ambion, P/N 9260G); 50× Denhardts (Sigma; P/N D2532); HSDNA (Promega P/N D1815); Human Cot-1 (Invitrogen, P/N 15279-011); Oligo Control Reagent, 0100 (OCR, 0100) (Affymetrix P/N 900541); 20×SSPE (Bio Whittaker Molecular Applications, Cambrex, P/N 51214); Acetylated BSA (Invitrogen); SAPE (Streptavidin, R-phycoerythrin conjugate) (Molecular Probes, P/N S866); Biotinylated Anti-Streptavidin (Vector; P/N: BA-0500, 0.5 mg/mL); Distilled Water (Invitrogen P/N 15230147); Acetylated Bovine Serum Albumin (Invitrogen P/N 15561-020); Bleach (5.25% Sodium Hypochlorite) (VWR P/N 21899-504).

[0088] Examples of equipment that has been used in the protocol included GENECHIP Fluidics Station 450/250 Affymetrix P/N 00-0079; GENECHIP Hybridization Oven (Affymetrix P/N 800139); GENECHIP Scanner 3000 7G (Affymetrix P/N 00-0205); Affymetrix GENECHIP Operating Software version 1.4 (P/N 690031); Affymetrix GENECHIP Genotyping Analysis Software 4.0 (P/N 690051); GENECHIP Mapping 250K Nsp Array (Affymetrix P/N 520330); and GENECHIP Mapping 250K Sty Array (Affymetrix P/N 520331). PCR thermal cyclers that have been tested include the MJ Research DNA Engine Tetrad PTC-225 with 96 well block (now available from Bio-Rad) and the ABI GENEAMP PCR System 9700 Gold plated 96 well block. The JITTERBUG from Boekel Scientific, model 130000 was also used.

[0089] Reagents can also be purchased in a kit form for either the Nsp array (900766 or 900753) or the Sty array (900765 or 900754). The kits each contain the adaptor, the PCR primer, the reference genomic DNA 103, fragmentation reagent, fragmentation buffer, DNA labeling reagent, TdT, and oligo control reagent 0100.

[0090] Briefly the method steps used in this example are as follows. A genomic DNA sample concentration is first determined. The sample is then digested into smaller fragments by a restriction enzyme. Then adaptor molecules are then ligated onto the smaller fragments. The ligated fragments are then diluted with water. The diluted fragments are amplified to obtain amplification products. The amplification products are then pooled and purified. The purified amplification product is treated with DNase I for fragmentation, and labeled with Affymetrix DNA Labeling reagent using TdT. Labeled fragments are hybridized overnight (16-18 hours), and then stained with streptavidin/biotinylated anti-streptavidin antibody/SAPE solutions. Then the array is scanned and analyzed for the results.

[0091] The first step in the GENECHIP Mapping Assay is determining the genomic DNA concentration for the sample to be genotyped. Then the genomic DNA is diluted to 50 ng/μl using reduced EDTA TE Buffer (0.1 mM EDTA, 10 mM Tris HCl, pH 8.0).

[0092] The next step in the process is digestion of the genomic DNA with a restriction enzym. 250 ng genomic DNA is digested with a restriction enzyme. Examples of restriction enzymes used include Nsp I, Sty I, Eco RI, Xba I, Bgl II, Bsr GI, Basj I, and Tsp45. In our example, Nsp I or Sty I restriction enzymes are used in the assay. For the digestion procedure, the following digestion master mix is prepared on ice depending on the restriction enzyme being used. For multiple samples, about 5% excess may be prepared. For the Nsp I restriction enzyme, the digestion master mix is prepared on ice by mixing 9.75 μl of water, 2 μl of NE buffer 2 (10×), 2 μl of BSA (10×(1 mg/ml)), and 1 μl Nsp I (10 U/μl). For the Sty I restriction enzyme, the digestion master mix is prepared on ice by mixing 9.75 μl of water, 2 μl of NE buffer 3 (10×), 2 μl BSA (10×(1 mg/ml)), and 2 μl Sty I (10U/μL). After the digestion master mix for either restriction enzyme is made, 15 μl of the master mix is added to 5 μl of genomic DNA (50 ng/μl).

[0093] The next step in the process is the ligation step. The smaller fragments of genomic DNA are ligated to adaptor sequences. For the ligation procedure, a ligation master mix on ice is prepared. For multiple samples, prepare a 5% excess. For the Nsp I restriction enzyme, the Ligation Master Mix on ice consists of 0.5 μl of Adaptor Nsp I (50 μM), 2.5 μl of T4 DNA Ligase buffer (10×) kept on ice, 2 μl of T4 DNA Ligase (400 U/μL) and mixed well. For the Sty I restriction enzyme, the Ligation Master Mix on ice consists of 0.5 μl of Adaptor Sty I (50 μM), 2.5 μl of T4 DNA Ligase buffer (10×) kept on ice, 2 μl of T4 DNA Ligase (400 U/μl) and mixed well. After the Ligation Master Mix for either restriction enzyme is made, add 5 μl of the Ligation Master Mix to 20 μl of digested DNA.

[0094] The next step in the process is the dilution step. The ligated DNA is then diluted with water. For the dilution step, dilute 25 μl of the ligated DNA with 75 μl of water.

[0095] The next step in the process is the amplification step. For the PCR procedure, prepare a PCR Master Mix on Ice (3 PCR reactions per sample) for Nsp I or Sty I ligation reactions. For multiple samples, prepare a 5% excess. The PCR Master Mix On Ice for 1 PCR reaction consists of 46 μl of water, 10 μl of BD Titanium Taq PCR Buffer (10×), 24 μl of Betaine (5M), 10 μl dNTP (2.5 mM each), 4 μl of PCR Primer (100 μM), and 1 μl Titanium Taq DNA Polymerase (50X). Then add 5 μl of diluted ligated DNA from the ligation step to 95 μl of the PCR Master Mix. Three PCR reactions are needed to produce sufficient product for hybridization to one array (each reaction=100 μl). Then the amplification products are purified to obtain a Purified PCR product.

[0096] The next step in the process is the fragmentation step. For the fragmentation step, add 5 μL of 10× Fragmentation Buffer to 45 μl of Purified PCR product (60 μg in EB Buffer) on the fragmentation plate on ice.

[0097] The next step in the process is the dilution step. The fragmentation reagent should be diluted to 0.04 U/μl. There are two examples of dilution listed for two different concentrations of Fragmentation reagent. The first example is for 2 U/μl and this dilution consists of 3 μl of Fragmentation Reagent, 15 μl of 10× Fragmentation Buffer, and 132 μl of water mixed well. The second example is for 3 U/μl and this dilution consists of 2 μl of Fragmentation Reagent, 15 μl of 10× Fragmentation Buffer, and 133 μl of water mixed well. Finally, the Fragmentation Mix needs to be mixed with the diluted Fragmentation Reagent. This fragmentation dilution consists of 50 μl of Fragmentation Mix and 5 μl of Diluted Fragmentation Reagent (0.04 U/μl).

[0098] The next step in the process is the labeling step. For the Labeling step, prepare a Labeling Mix as Master Mix on ice. For multiple samples, prepare a 5% excess. The Labeling Mix consists of 14 μl of 5× TdT Buffer, 2 μl GENECHIP DNA Labeling Reagent (15 mM), and 3.5 μl of TdT (30 U/μL) and mixed well. Then 19.5 μl of the Labeling Mix is added to 50.5 μl fragmented DNA from the fragmentation step.

[0099] The next step in the process is the hybridization step. For the hybridization step, prepare a Hybridization Cocktail Master Mix. For multiple samples, prepare a 5% excess. Before the Hybridization Master can be prepared, a 12× MES Stock Buffer needs to be prepared first. The 12× MES Stock Buffer (1.25 M MES, 0.89M [NA+]) is prepared by mixing 70.4 g MES hydrate, 193.3. MES Sodium Salt, 800 ml Molecular Biology Grade Water and adjusting volume to 1,000 ml. The pH should be 6.5-6.7 and the mixture is filtered through a 0.2 μm filter. The Hybridization Cocktail Master Mix consists of 12 μl of MES (12×; 1.22M), 13 μl DMSO (100%), 13 μl of Denhardt's Solution (50×), 3 μl of EDTA (0.5M), 3 μl of HSDNA (10 mg/ml), 2 μl of OCR (0100), 3 μl Human Cot-1 (1 mg/ml), 1 μl Tween-20 (3%), and 140 μl TMACl (5M) and mixed well. Then 190 μl of the Hybridization Mix is added to 70 μl of the labeled DNA.

[0100] The next step in the process is the washing and staining steps. Before these steps can be performed, two wash buffers, an Anti-Streptavidin antibody, a stock buffer, array buffers, a stain buffer, SAPE solution, and an antibody solution need to be prepared first. For Wash Buffer A (Non-Stringent Buffer Wash Buffer) (6×SSPE, 0.01% Tween 20), prepare 300 ml of 20×SSPE, 1.0 ml of 10% Tween-20, and 699 ml of water. Filter Wash A Buffer through a 0.2 μm filter and store at room temperature. For Wash Buffer B (Stringent Wash Buffer) (0.6×SSPE, 0.01% Tween-20), prepare 30 ml of 20×SSPE, 1.0 ml of 10% Tween-20, and 969 ml of water. Filter Wash B Buffer through a 0.2 μm filter and store at room temperature. For the Anti-Streptavidin Antibody, resuspend 0.5 mg in 1 ml of water and store at 4° C. For the 12×MES Stock Buffer (1.25M MES, 0.89M [Na+]), prepare 70.4 g of MES hydrate, 193.3 g of MES Sodium Salt, 800 ml of Molecular Biology Grade Water, mix well and adjust volume to 1,000 ml. The pH should be between 6.5-6.7. Filter mixture through a 0.2 μm filter. For the 1× Array Holding Buffer (Final 1× concentration is 100 mM MES, 1M [NA+], 0.01% Tween-20), prepare 8.3 mL of 12× MES Stock Buffer, 18.5 ml of 5M NaCl, 0.1 ml of 10% Tween-20, 73.1 ml of water. Store at 2° C.-8° C. and shield the mixture from light. The Stain Buffer consists of 666.7 μl of water, 300 μl SSPE (20×), 3.3 Tween-20 (3%), and 20 μl Denhardt's (50×) and then split this mixture by one-half (½). To prepare the SAPE Stain Solution, add 5 μl of 1 mg/mL Streptavidin Phycoerythrin (SAPE) with 495 μl of Stain Buffer. To prepare the Antibody Stain Solution, add 5 μl 0.5 mg/ml biotinylated antibody to 495 μl of Stain Buffer. To prepare the Array Holding Buffer, add 8.3 ml of MES Stock Buffer (12×) Buffer, 18.5 ml of 5M NaCl, 0.1 mL of Tween-20 (10%), and 73.1 ml of water.

[0101] After the solutions are prepared, the washing and staining steps occur in the following order. First, a post hybridization wash is performed for 6 cycles of 5 mixes/cycle with Wash Buffer A at 25° C. Then a second post hybridization wash is performed for 24 cycles of 5 mixes/cycle with Wash Buffer B at 45° C. The probe array is stained for 10 minutes in SAPE solution at 25° C. Then the array is washed with 6 cycles of 5 mixes/cycle with Wash Buffer A at 25° C. The array is stained for 10 minutes in antibody solution at 25° C. The probe array is then stained for 10 minutes in SAPE solution at 25° C. Then the array goes through a final wash for 10 cycles of 6 mixes/cycle with Wash Buffer A at 30° C. Then the array is filled with Array Holding Buffer.

[0102] The final step in the process is the detection step. The array is scanned and analyzed onto a GENECHIP array using GENECHIP Operating Software (GCOS) and GENECHIP DNA Analysis Software (GDAS).

[0103] There are many variables in the GENECHIP 500K-EA Assay protocol which can affect the efficacy of the process. Some of these variables include adaptor concentration, amount of DNA, PCR Primer concentration and PCR extension time. Additionally, some of the variables of the hybridization process which can affect the process include the percent of DMSO in the cocktail master mix, the percent of Denhardt's Solution in the cocktail master mix, the percent of Human Cot-1 in the cocktail master mix, and the temperature. Some of the variables of the stringent washing process include the numbers of cycles, the temperature, and the salt concentration.

[0104] Some of the SNP selection factors include the Call Rate, minor allele frequency (MAF), pHW, Nsp I or StyI Fragment Type, and Proximity to Nearby SNPs. The GENECHIP 500K-EA Set has been optimized to accurately detect greater than 500,000 SNPs in each sample. The assay reduces the complexity of the genome by preferentially amplifying approximately 200-1100 bp Nsp I fragments and approximately 200-1100 bp Sty I fragments using a single PCR primer from only 250 ng DNA per restriction enzyme. Two assays using the protocol above were performed. The first assay performed for the detection greater than 500,000 SNPs set featured a 5 micron feature size, 550 mB assay complexity, 24 probes/SNP, 1.09 pixel size, and used a prototype grid software. The second assay performed for the detection greater than 500,000 SNPs set featured a 5 micron feature size, 550 megabase assay complexity, 56 probes/SNP, 0.7 pixel size, and GCOS 1.3 for alignment size. The second assay also illustrated that Titanium Polymerase may function better than the Taq Gold Polymerase in the amplification step. For the second test, the following changes were introduced: hybridization temperature was increased from 48° C. to 49° C., stringent wash was increased from 6 to 24 cycles, and labeling was reduced from 4 to 2 hours.

[0105] Oligonucleotide sequences that are preferably used in the assay include:

| | |
|---|---|
| 5′ ATTATGAGCACGACAGACGCCTGATC | (SEQ ID NO: 1074931) |
| T 3′ | |
| (PCR PRIMER 002 and Adaptor | |
| Sty I top PN 100485); | |
| 5′-[Phos] AGATCAGGCGTCTGTCGTG | (SEQ ID NO: 1074932) |
| CTCATAA-3′ | |
| PN 100520 Adaptor Nsp I | |
| bottom; | |
| 5′-[Phos] CWWGAGATCAGGCGTCTGT | (SEQ ID NO: 1074933) |
| CGTGCTCATAA-3′ | |
| PN 100521 Adaptor Sty I | |
| bottom | |
| and | |
| 5′-ATTATGAGCACGACAGACGCCTGATC | (SEQ ID NO: 1074934) |
| TCATG-3′, | |
| Nsp I top PN 100522 | |

[0106] SEQ ID NOS: 1074932 and 1074934 are complementary over the length of SEQ ID NO: 1074932 and can hybridize to form a double stranded adaptor with a 3′ overhang (3′-GTAC-5′) that is complementary to the overhang left by Nsp I digestion. This Nsp I adaptor with sticky end can be efficiently ligated to the ends of fragments digested with Nsp I. In a preferred aspect the 5′ end of SEQ ID NO: 1074932 is phosophorylated to facilitate ligation.

[0107] SEQ ID NOS: 1074931 and 1074933 are complementary and can be hybridized to form an adaptor that is partially double stranded and has a single stranded 5′ overhang that is complementary to the 5′ overhang resulting from digestion with Sty I. The overhang is preferably phosophorylated at the 5′ end to facilitate ligation. SEQ ID NO: 1074933 includes two positions that are partially degenerate, represented by “W”, and can be either A or T. The oligo is a mixture of different sequences that have one of the following combinations at the WW position: AT, AA, TT, or TA.

### Example 2

### Human Mapping 500K 96-Well Plate Protocol

[0108] The protocol described below involves enzymatic reactions that are optimized for the reaction conditions provided, thus it is important to control and monitor variables such as pH, salt concentration, time and temperature. For additional details of the protocol please see the GENECHIP Mapping 500K Assay Manual (P/N 701930 Rev. 3) which is incorporated herein by reference in its entirety.

[0109] Stage 1-Genomic DNA Plate Preparation. This protocol has been optimized using UV absorbance to determine genomic DNA concentrations. Other quantitation methods such as PicoGreen will give different readings. Therefore, you should convert readings from other methods to the equivalent UV absorbance reading. To prepare the genomic DNA plate: Thoroughly mix the genomic DNA by vortexing at high speed for 3 sec. Determine the concentration of each genomic DNA sample. Based on OD measurements, dilute each sample to 50 ng/μL using reduced EDTA TE buffer (10 mM Tris HCL, 0.1 mM EDTA, pH 8.0). Apply the convention that 1 absorbance unit at 260 nm equals 50 μg/mL for double-stranded DNA. This convention assumes a path length of 1 cm. Consult your spectrophotometer handbook for more information. If using a quantitation method other than UV absorbance, convert the reading to the equivalent UV absorbance reading. Thoroughly mix the diluted DNA by vortexing at high speed for 3 sec.

[0110] To aliquot the prepared genomic DNA: Vortex the plate of genomic DNA at high speed for 10 sec, then spin down at 2000 rpm for 30 sec. Aliquot 5 μL of each DNA to the corresponding wells of a 96-well reaction plate. 5 μL of the 50 ng/μL working stock is equivalent to 250 ng genomic DNA per well. For this protocol, one plate is required to process Nsp samples; a second plate is required to process Sty samples. For best results, do not process Nsp and Sty samples on the same day. If continuing immediately to the next stage, place the plate with prepared genomic DNA in a double cooling chamber on ice. Otherwise, seal each plate with adhesive film. Do one of the following: Proceed to the next stage, processing one plate of samples, one enzyme at a time. Store the sealed plates of diluted genomic DNA at −20° C.

[0111] Stage 2-Restriction Enzyme Digestion During this stage, the genomic DNA is digested by one of two restriction enzymes: Nsp I or Sty I. You will prepare the Digestion Master Mix, then add it to the samples. The samples are then placed onto a thermal cycler and the 500K Digest program is run. The input required from Stage 1: Genomic DNA Plate Preparation is: 1 Plate, 96-well Genomic DNA prepared as instructed in the previous stage (5 μL at 50 ng/uL in each well). Keep in a cooling chamber on ice.

[0112] Allow the following reagents to thaw on ice: NE Buffer and BSA. If the plate of genomic DNA from stage 1 was frozen, allow it to thaw in a cooling chamber on ice. To prepare the work area: Place a double cooling chamber and a cooler on ice. Label the following tubes, then place in the cooling chamber: One strip of 12 tubes labeled Dig A 2.0 mL Eppendorf tube labeled Dig MM Place the ACCUGENE water on ice. Place the plate of prepared genomic DNA from Stage 1 in the cooling chamber. To prepare the reagents (except for the enzyme): Vortex 3 times, 1 sec each time. Pulse spin for 3 sec. Place in the cooling chamber. Power on the thermal cycler to preheat the lid. Leave the block at room temperature. For best results, the same team or individual operator should not process samples with both Nsp and Sty enzymes on the same day. Best practice is to process samples for either Nsp or Sty on a given day. Keeping all reagents and tubes on ice, prepare the Digestion Master Mix as follows: To the 2.0 mL Eppendorf tube, add the appropriate volumes of the following reagents based on the enzyme you are using, ACCUGENE Water, NE Buffer, and BSA. Remove the appropriate enzyme (Nsp I or Sty I) from the freezer and immediately place in a cooler. Pulse spin the enzyme for 3 sec. Immediately add the enzyme to the master mix, then place remaining enzyme back in the cooler. Vortex the master mix at high speed 3 times, 1 sec each time. Pulse spin for 3 sec. Place in the cooling chamber. Return any remaining enzyme to the freezer. Proceed immediately to Add Digestion Master Mix to Samples. The master mix for each enzyme is given per reaction and for a mix for 96 samples with an extra 15%. For Nsp I Digestion Master Mix use ACCUGENE Water 11.55 μL for 1 sample or 1275.1 μL for 96 samples, NE Buffer 2 (10×) 2 μL for 1 sample or 220.8 μL for 96 samples, BSA (100×; 10 mg/mL) 0.2 μL for 1 sample or 22.1 μL for 96 samples, Nsp I (10 U/μL) 1 μL per sample or 110.4 μL for 96 samples for a Total per reaction of 14.75 μL and total for 96 samles of 1628.4 μL. For Sty I Digestion Master Mix Reagent: ACCUGENE Water 11.55 μL per reaction, 1275.1 μL for 96 reaction mix, NE Buffer 3 (10×) 2 μL per reaction, 220.8 μL for 96 reaction mix, BSA (100×; 10 mg/mL) 0.2 μL per reaction or 22.1 μL for 96 reaction mix, Sty I (10 U/μL) 1 μL per reaction or 110.4 μL for 96 reaction mix. The Total per reaction is 14.75 μL and the total for the 96 reaction mix is 1628.4 μL.

[0113] To add Digestion Master Mix to samples: Using a single channel P200 pipette, aliquot 135 μL of Digestion Master Mix to each tube of the strip tubes labeled Dig. Using a 12-channel P20 pipette, add 14.75 μL of Digestion Master Mix to each DNA sample in the cooling chamber on ice. The total volume in each well is now 19.75 μL. Genomic DNA (50 ng/μL) 5 μL Digestion Master Mix 14.75 μL Total Volume 19.75 μL. Seal the plate tightly with adhesive film. Vortex the center of the plate at high speed for 3 sec. Spin down the plate at 2000 rpm for 30 sec. Ensure that the lid of thermal cycler is preheated. Load the plate onto the thermal cycler and run the 500K Digest program. 37° C. 120 minutes 65° C. 20 minutes 4° C. Hold When the program is finished, remove the plate and spin it down at 2000 rpm for 30 sec. Do one of the following: If proceeding directly to the next step, place the plate in a cooling chamber on ice. If not proceeding directly to the next step, store the samples at −20° C.

[0114] Stage 3-Ligation. During this stage, the digested samples are ligated using either the Nsp or Sty Adaptor. Prepare the Ligation Master Mix, then add it to the samples. The samples are then placed onto a thermal cycler and the 500K Ligate program is run. When the program is finished, dilute the ligated samples with ACCUGENE water. The input required from Stage 2: Restriction Enzyme Digestion is: 1 Plate of digested samples in a cooling chamber on ice. 1 vial T4 DNA Ligase (400 U/μL; NEB) 1 vial T4 DNA Ligase Buffer (10×) 1 vial Adaptor, Nsp or Sty as appropriate (50 μM) 10 mL ACCUGENE water, molecular biology-grade Aliquot the T4 DNA Ligase Buffer (10×) after thawing for the first time to avoid multiple freeze-thaw cycles. See vendor instructions. Be sure to use the correct adaptor (Nsp or Sty). To thaw the reagents and Digestion Stage Plate: Allow the following reagents to thaw on ice: Adaptor Nsp I or Sty I as appropriate T4 DNA Ligase Buffer (10×) Takes approximately 20 minutes to thaw. If the Digestion Stage plate was frozen, allow to thaw in a cooling chamber on ice. To prepare the work area: Place a double cooling chamber and a cooler on ice. Label the following tubes, then place in the cooling chamber: One strip of 12 tubes labeled Lig, a 2.0 mL Eppendorf tube labeled Lig MM and a solution basin Prepare the Digestion Stage plate as follows: A. Vortex the center of the plate at high speed for 3 sec. B. Spin down the plate at 2000 rpm for 30 sec. C. Place back in the cooling chamber on ice. To prepare the reagents: Vortex at high speed 3 times, 1 sec each time (except for the enzyme). Pulse spin for 3 sec. Place in the cooling chamber. T4 DNA Ligase Buffer (10×) contains ATP and should be thawed on ice. Vortex the buffer as long as necessary before use to ensure precipitate is re-suspended and that the buffer is clear. Avoid multiple freeze-thaw cycles per vendor instructions. Power on the thermal cycler to preheat the lid. Leave the block at room temperature. The lid should be preheated before samples are loaded. Keeping all reagents and tubes on ice, prepare the Ligation Master Mix as follows: To the 2.0 mL Eppendorf tube, add the following reagents based on the volumes shown below depending on the enzyme: Adaptor (Nsp or Sty) and T4 DNA Ligase Buffer (10×) Remove the T4 DNA Ligase from the freezer and immediately place in the cooler on ice. Pulse spin the T4 DNA Ligase for 3 sec. Immediately add the T4 DNA Ligase to the master mix; then place back in the cooler. Vortex the master mix at high speed 3 times, 1 sec each time. Pulse spin for 3 sec. Place the master mix on ice. Proceed immediately to Add Ligation Master Mix to Reactions. Nsp I Ligation Master Mix given for 1 Sample or for 96 Sample mix (15% extra). Adaptor Nsp 1 (50 μM) 0.75 μL or 82.8 μL, T4 DNA Ligase Buffer (10×) 2.5 μL or 276 μL, T4 DNA Ligase (400 U/μL) 2 μL or 220.8 μL. The total is 5.25 μL or 579.6 μL. For Sty I Ligation Master Mix mix Adaptor Sty 1 (50 μM) 0.75 μL or 82.8 μL, T4 Ligase Buffer (10×) 2.5 μL or 276 μL, T4 DNA Ligase (400U/μL) 2 μL or 220.8 μL for a Total 5.25 μL 579.6 μL To add Ligation Master Mix to samples: Using a single channel P100 pipette, aliquot 48 μL of Ligation Master Mix to each tube of the strip tubes on ice. Using a 12-channel P20 pipette, aliquot 5.25 μL of Ligation Master Mix to each reaction on the Digestion Stage Plate. Digested DNA 19.75 μL Ligation Master Mix* 5.25 μL Contains ATP and DTT. Keep on ice. Total 25 μL. Seal the plate tightly with adhesive film. Vortex the center of the plate at high speed for 3 sec. Spin down the plate at 2000 rpm for 30 sec. Ensure that the thermal cycler lid is preheated. Load the plate onto the thermal cycler and run the 500K Ligate program. 16° C. 180 minutes 70° C. 20 minutes 4° C. Hold To dilute the samples: Place the ACCUGENE Water on ice 20 minutes prior to use. When the 500K Ligate program is finished, remove the plate and spin it down at 2000 rpm for 30 sec. Place the plate in a cooling chamber on ice. Dilute each reaction as follows: Pour 10 mL ACCUGENE water into the solution basin. Using a 12-channel P200 pipette, add 75 μL of the water to each reaction. The total volume in each well is 100 μL. Ligated DNA 25 μL ACCUGENE water 75 μL Total 100 μL Seal the plate tightly with adhesive film. Vortex the center of the plate at high speed for 3 sec. Spin down the plate at 2000 rpm for 30 sec. Do one of the following: If proceeding to the next step, store the plate in a cooling chamber on ice for up to 60 minutes. If not proceeding directly to the next step, store the plate at −20° C.

[0115] Stage 4: During this stage, equal amounts of each ligated sample are transferred into three new 96-well plates. Then prepare the PCR Master Mix, and add it to each sample. Each plate is placed onto a thermal cycler and the 500K PCR program is run. When the program is finished, check the results of this stage by running 3 μL of each PCR product on a 2% TBE gel. Samples can be held overnight. The input required from Stage 3: Ligation is: 1 Plate of diluted ligated samples in a cooling chamber on ice. Equipment and Consumables Required for Stage 4: PCR: 1 Cooler, chilled to −20° C. 2 double or 4 single Cooling chambers, chilled to 4° C. (do not freeze) 1 Ice bucket, filled with ice 1 Marker, fine point, permanent 1 Microcentrifuge 1 Pipette, single channel P20 1 Pipette, single channel P100 1 Pipette, single channel P200 1 Pipette, single channel P1000 1 Pipette, 12-channel P20 1 Pipette, 12-channel P200 As needed Pipette tips for pipettes listed above; full racks 6 Plates, 96-well reaction** 1 Plate centrifuge 7 Plate seal, 1 Solution basin, 55 mL 3 Thermal cycler, 1 Falcon 50 mL tube, 1 Vortexer

[0116] The following reagents are required for this stage. The amounts listed are sufficient to process one full 96-well reaction plate. Reagents Required for Stage 4: PCR: 15 mL ACCUGENE water, molecular biology-grade 875 μL (2 vials) PCR Primer 002 (100 μM). The following reagents from the TITANIUM™ DNA Amplification Kit: 1.28 mL (4 vials) dNTPs (2.5 mM each), 1 mL (7 vials) GC-Melt (5M), 100 μL (7 vials) TITANIUM Taq DNA Polymerase (50×), and 600 μL (6 vials) TITANIUM Taq PCR Buffer (10×)

[0117] The following gels and related materials are required for this stage. The amounts listed are sufficient to process one full 96-well reaction plate. To help ensure the best results, carefully read the information below before beginning this stage of the protocol. Make sure the ligated DNA was diluted to 100 μL with ACCUGENE water. Prepare PCR Master Mix immediately prior to use, and prepare in Pre-PCR Clean room. To help ensure the correct distribution of fragments, be sure to add the correct amount of primer to the master mix. Mix the master mix well to ensure the even distribution of primers. Set up the PCRs in PCR Staging Area. To ensure consistent results, take 3 μL aliquots from each PCR to run on gels before adding EDTA. Gels and Related Materials Required for Stage 4: PCR: 50 μL DNA Marker 5 Gels, 2% TBE As needed Gel loading solution and 3 96-well reaction plates. A PCR negative control can be included in the experiment to assess the presence of contamination.

[0118] Allow the following reagents to thaw on ice. TITANIUM Taq PCR Buffer dNTPs, PCR Primer 002 If the Ligation Stage plate was frozen, allow to thaw in a cooling chamber on ice. To prepare the work area: place two double or four single cooling chambers and one cooler on ice. Label the following, then place in a cooling chamber: Three 96-well reaction plates labeled P1, P2, P3. A 50 mL Falcon tube labeled PCR MM. Place on ice: ACCUGENE water, GC-Melt, and a solution basin. Leave the TITANIUM Taq DNA Polymerase at −20° C. until ready to use. Prepare the Ligation Stage plate as follows: Vortex the center of the plate at high speed for 3 sec. Spin down the plate at 2000 rpm for 30 sec. Place back in the cooling chamber on ice. Label the plate Lig. To prepare the reagents: Vortex at high speed 3 times, 1 sec each time (except for the enzyme). Pulse spin for 3 sec. Place in a cooling chamber. Preheat the Thermal Cycler Lids (Main Lab). The lids should be preheated before loading samples; leave the blocks at room temperature. If preparing the plates for PCR, it is best not to go from the Pre-PCR Room or Staging Area to the Main Lab and then back again. To add DNA to the reaction plates: Working one row at a time and using a 12-channel P20 pipette, transfer 10 μL of sample from each well of the Ligation Plate to the corresponding well of each reaction plate. Transfer 10 μL of sample from each well of row A on the Ligation Plate to the corresponding wells of row A on reaction plates P1, P2 and P3. Seal each plate with adhesive film, and leave in cooling chambers on ice.

[0119] Transferring Equal Aliquots of Diluted, Ligated Samples to Three Reaction Plates P1 P2 P3 B Ligation Stage Plate An equal aliquot of each sample from the Ligation Stage Plate is transferred to the corresponding well of each PCR Plate. For example, an equal aliquot of each sample from row A on the Ligation Stage Plate is transferred to the corresponding wells of row A on PCR Plates P1, P2 and P3. Reaction Plate P1 Reaction Plate P2 Reaction Plate P3.

[0120] Prepare enough PCR Master Mix to run three PCR reactions per sample. Location Pre-PCR Clean Room Prepare the PCR Master Mix To prepare the PCR Master Mix: Keeping the 50 mL Falcon tube in the cooling chamber, add the reagents in the order shown. Remove the TITANIUM Taq DNA Polymerase from the freezer and immediately place in a cooler. Pulse spin the Taq DNA polymerase for 3 sec. Immediately add the Taq DNA polymerase to the master mix; then return the tube to the cooler on ice. Vortex the master mix at high speed 3 times, 1 sec each time. Pour the mix into the solution basin, keeping the basin on ice. The PCR reaction is sensitive to the concentration of primer used. It is critical that the correct amount of primer be added to the PCR Master Mix to achieve the correct distribution of fragments (200 to 1100 bp) in the products. Check the PCR reactions on a gel to ensure that the distribution is correct (see FIG. 4.3). 90 μg of PCR product is needed for fragmentation.

[0121] To add PCR Master Mix to samples: Using a 12-channel P200 pipette, add 90 μL PCR Master Mix to each sample. The total volume in each well is 100 μL. Seal each reaction plate tightly with adhesive film. Vortex the center of each reaction plate at high speed for 3 sec. Spin down the plates at 2000 rpm for 30 sec. Keep the reaction plates in cooling chambers on ice until loaded onto the thermal cyclers. Master Mix Reagent For 1 Reaction or For 3 PCR Plates (15% extra) ACCUGENE water 39.5 μL 13.082 mL TITANIUM Taq PCR Buffer (10×) 10 μL 3.312 mL GC-Melt (5M) 20 μL 6.624 mL dNTP (2.5 mM each) 14 μL 4.637 mL PCR Primer 002 (100 μM) 4.5 μL 1.490 mL TITANIUM Taq DNA Polymerase (50×) 2 μL 0.663 mL Total 90 μL 29.808 mL

[0122] To load the plates and run the 500K PCR program: transfer the reaction plates to the Main Lab. Ensure that the thermal cycler lids are preheated. The block should be at room temperature. Load each reaction plate onto a thermal cycler. Run the 500K PCR program. The program varies depending upon the thermal cyclers being used. PCR protocols for the MJ Tetrad PTC-225 and Applied Biosystems thermal cyclers are different. If using GENEAMP PCR System 9700 thermal cyclers, be sure the blocks are silver or gold-plated silver. For best results, do not use thermal cyclers with aluminum blocks. It is not easy to visually distinguish between silver and aluminum blocks.

[0123] 500K PCR Thermal Cycler Program for the GENEAMP PCR System 9700 (silver or gold-plated silver blocks) 500K PCR Program for a GENEAMP PCR System 970: 94° C. for 3 minutes; 94° C. for 30 sec, 60° C. for 45 sec, and 68° C. for 15 sec for 30 cycles, then 68° C. for 7 minutes and 4° C. HOLD (can be held overnight) Volume: 100 μL Specify Maximum mode. 500K PCR Program for MJ Tetrad PTC-225 94° C. for 3 minutes; 94° C. for 30 sec, 60° C. for 30 sec, and 68° C. for 15 sec for 30 cycles, then 68° C. for 7 minutes, then 4° C. HOLD (can be held overnight) Volume: 100 μL Use Heated Lid and Calculated Temperature.

[0124] To ensure consistent results, take 3 μL aliquot from each PCR before adding EDTA. Run the Gels When the 500K PCR program is finished: Remove each plate from the thermal cycler. Spin down plates at 2000 rpm for 30 sec. Place plates in cooling chambers on ice or keep at 4° C. Label three fresh 96-well reaction plates P1Gel, P2Gel and P3Gel. Aliquot 3 μL of 2× Gel Loading Dye to each well of the three plates. Using a 12-channel P20 pipette, transfer 3 μL of each PCR product from plates P1, P2 and P3 to the corresponding plate, row and wells of plates P1Gel, P2Gel and P3Gel. Example: 3 μL of each PCR product from each well of row A on plate P1 is transferred to the corresponding wells of row A on plate P1Gel. Seal plates P1Gel, P2Gel and P3Gel. Vortex the center of plates P1Gel, P2Gel and P3Gel, then spin down at 2000 rpm for 30 sec. Load all 6 μL from each well of plates P1Gel, P2Gel and P3Gel onto 2% TBE gels. Run the gels at 120V for 40 minutes to 1 hour. Verify that the PCR product distribution is between ˜250 bp to 1100 bp. 90 μg of PCR product is needed for fragmentation. Wear the appropriate personal protective equipment when handling ethidium bromide. Proceed to the next stage within 60 minutes or seal the plates with PCR product and store at −20° C. Average product distribution is between ˜250 to 1100 bp.

[0125] Stage 5: PCR Product Purification and Elution: The input required from Stage 4: PCR is: 3 Plates of PCR product in cooling chambers on ice. The following equipment and consumables are required for this stage: PCR Product Purification and Elution, 1 JITTERBUG, Kimwipes, 1 Manifold, QIAvac Multiwell, 1 Marker, fine point, permanent, 1 Pipette, single channel P200, 1 Pipette, single channel P1000, 1 Pipette, 12-channel P20, 1 Pipette, 12-channel P200, Pipette tips for pipettes listed above; full racks, 1 Plate, 96-well PCR, 1 Plate centrifuge, 1 Plate, Clontech Clean-Up 4 Plate holders, 5 Plate seal, 4 Plate supports, 1 Regulator (QIAGEN), 1 Solution basin, 55 mL and 1 Vortexer.

[0126] The following reagents are used for this stage. The amounts listed are sufficient to process one full 96-well reaction plate. For best results, carefully read the information below before beginning this stage of the protocol. The working stock of EDTA should be diluted to 0.1 M before use. For best results the ACCUGENE water should be used for this stage. Using in-house ddH2O is can negatively impact downstream stages, particularly Stage 7: Fragmentation. The fragmentation reaction is very sensitive to pH and metal ion contamination. To avoid cross-contamination and the introduction of air bubbles, pipette very careful when pooling the three PCR reactions for each sample onto the Clontech Clean-Up Plate. Maintain the vacuum at 600 mbar. Reagents Required for Stage 5: PCR Product Purification and Elution: 1 Clean-Up Plate (Clontech) 3 mL EDTA, diluted to 0.1M (working stock is 0.5 M, pH 8.0) 5 mL RB Buffer 75 mL ACCUGENE water, molecular biology-grade. The PCR reactions contain significant contaminants including EDTA. These contaminants can affect subsequent steps unless removed by washing. Therefore, be sure to perform three water washes. After the third wash, the wells should be completely dry before eluting the samples with RB Buffer. Any extra water carried with the RB Buffer to the next stage can result in over-fragmentation. Immediately upon removal from the manifold, blot the bottom of the plate and wipe the bottom of each well. Any remaining liquid will quickly seep back into the wells.

[0127] To prepare the PCR Product Plates from the previous stage: Place the three PCR product plates on the bench top in plate holders. If frozen, allow them to thaw to room temperature. Once at room temperature, vortex the center of each plate at high speed for 3 sec. Spin down each plate at 2000 rpm for 30 sec. Dilute the Working Solution of EDTA Dilute the working stock of EDTA to a concentration of 0.1 M. A higher concentration may interfere with downstream steps. To set up the manifold: Connect the manifold and regulator to a suitable vacuum source able to maintain 600 mbar. Place the waste tray inside the base of the manifold. Do not turn on the vacuum at this time.

[0128] To add diluted EDTA to the PCR products: Add 3 mL of diluted EDTA (0.1M) to a solution basin. Using a 12-channel P20 pipette, aliquot 8 μL of diluted EDTA to each well with PCR product on each PCR product plate. Tightly seal each plate and vortex the center of each plate at high speed for 3 sec. Spin down each plate at 2000 rpm for 30 sec. Place each plate back in a plate holder. PREPARE THE CLEAN-UP PLATE Follow the steps as described below. Consult the Clontech Clean-Up Plate Handbook for the general procedure. To prepare the Clean-Up Plate: Label the plate to indicate its orientation CUP BL (Clean-Up Plate bottom left). If not processing a full plate of samples, cover the wells that will not be used with adhesive film as follows: Apply pressure around the edges of the plate to make the film stick. B. Cut the film between the used and unused wells. Remove the portion that covers the wells to be used.

[0129] Working one row at a time, pool the PCR products as follows: Cut the adhesive film from the first row of each reaction plate. Using a 12-channel P200 pipette, transfer and pool the samples from the same row and well of each PCR product plate to the corresponding row and well of the Clean-Up Plate. Transfer each sample from row A of plates P1, P2 and P3 to the corresponding wells of row A on the Clean-Up Plate. To avoid piercing the membrane, do not pipette up and down in the Clean-Up Plate. Change the pipette tips after each of the three corresponding rows of sample are pooled onto the Clean-Up Plate. Repeat these steps until all of the PCR products are pooled. Examine the three PCR product plates to be sure that the full volume of each well was transferred and that the plates are empty. The final volume in each well on the Clontech Clean-Up Plate should be approximately 320 μL. To avoid piercing the Clean-Up Plate membrane, do not pipette up and down in the plate, and do not touch the bottom of the plate. Be very careful when pooling the third set of PCR products, as the wells are very full. Avoid cross-contaminating neighboring wells with small droplets. Also, pipette very carefully to avoid the formation of air bubbles. Air bubbles will slow drying.

[0130] To purify the PCR products: Load the Clontech Clean-Up Plate with samples onto the manifold. Cover the plate to protect the samples from environmental contaminants. For example, the lid from a pipette tip box may be used. Turn on the vacuum and slowly bring it up to 600 mbar. Three water washes should be performed to properly purify the PCR products. Be sure to completely dry the membrane after the third wash. P1 P2 P3 CUP—BL Clean-Up Plate Transfer and pool each PCR product from plates P1, P2 and P3 to the corresponding well of the Clean-Up Plate. For example, transfer and pool the PCR product from well A1 of plates P1, P2 and P3 to the corresponding row and well on the Clean-Up Plate. P1, P2 and P3=PCR Product Plates=Pooled PCR product from row A of plate BL=bottom left. Check the vacuum by gently trying to lift the middle section of the manifold off the base. Be very careful not to lose any sample. You should not be able to lift the middle section off the base. Maintain the vacuum at 600 mbar until all of the wells are dry (approximately 1.5 to 2 hours). The vacuum regulator may sound like it is leaking. This sound is the pressure release working to limit the vacuum to 600 mbar. Wash the PCR products three times as follows, keeping the vacuum on the entire time: Add 75 mL ACCUGENE Water to a solution basin. Using a 12-channel P200 pipette, add 50 μL water to each well. Dry the wells (15 to 20 minutes). The top and bottom rows may take longer to filter and dry. D. Repeat steps B and C two additional times for a total of 3 water washes. After the third wash, tap the manifold firmly on the bench to force any drops on the sides of the wells to move to the bottom and be pulled through the plate. Allow the samples to dry completely. Drying after the third wash may take 45 to 75 minutes. Tilt and inspect the plate to confirm that the top and bottom rows are completely dry. For best results, do not allow the plate to sit on the manifold or the bench top for more than 90 minutes after the wells are completely dried. To prevent the dilution of DNA with water, ensure that every well is completely dry before adding RB Buffer.

[0131] To elute the PCR products: When the wells are completely dry after the third wash, turn off the vacuum. Carefully remove the plate from the manifold and immediately: A. Blot the bottom of the plate on a thick stack of clean absorbent paper to remove any remaining liquid. Dry the bottom of each well with an absorbent wipe. Aliquot 5 mL RB Buffer to a solution basin. Using a 12-channel P200 pipette, add 45 μL RB buffer to each well of the plate. Tightly seal the plate. Load the plate onto a Jitterbug plate shaker. Set the Jitterbug to setting 5 and moderately shake the plate for 10 minutes at room temperature. This setting (approximately 1000 rpm) allows as much movement as possible without losing liquid to the sides of the wells and film. Transfer 45 μL of each eluted sample from the Clontech Clean-Up Plate to the corresponding well of a fresh 96-well plate following these guidelines: Use a 12-channel P200 pipette set to 60 μL. Tilt the Clontech Clean-Up Plate at a 30 to 45 degree angle to move the liquid to one side of the well. Optional: use a plate support to keep the plate tilted at an angle (Well Plate Stand: Diversified Biotech, P/N WPST-1000). Pipette up and down 3 to 4 times before removing and transferring the eluate to a fresh 96-well reaction plate. Immediately blot the bottom of the plate and dry the bottom of each well. Any remaining liquid will quickly seep back into the wells. Go back into the well a second time and remove any remaining liquid. It is OK to touch the bottom of the filter. Do one of the following: Proceed immediately to the next step. If not proceeding immediately to the next step: A. Seal the plate with the eluted samples. B. Store the plate at −20° C.

[0132] Stage 6: Quantitation and Normalization. During this stage, three independent dilutions of each PCR product will be prepared in optical plates. The diluted PCR products are quantitated and the OD measurements from each plate are averaged. Once the concentration of each reaction is determined, normalize each reaction to 2 μg/μL in RB Buffer. The following equipment and consumables are required for this stage: 1 Plate of purified PCR product. The following reagents and equipment are used for this stage: 1 cooling chamber, double, chilled to 4° C. (do not freeze), 1 ice bucket, filled with ice, 1 marker, fine point, permanent, 1, single channel P20 pipette, 1 single channel P100 pipette, 1 single channel P1000 pipette, 1 12-channel P20 (accurate to within ±5%) pipette, 1 12-channel P200 pipette, full racks of tips for pipettes listed above; and 4 optical Plates, for example, the UV Star Transparent, 96-well. Use the optical plate recommended for use with your plate reader. Also used are 1 96-well reaction plate, 1 centrifuge plate, 5 Plate seals, 1 Spectrophotometer plate reader, 1 100 mL Solution basin, and 1 Vortexer. Prepare three independent dilutions of each sample for accurate concentration measurement. Average the results for each individual sample before normalizing. The sample in each well should be normalized to 2 μg/μL in RB Buffer (90 μg in 45 μL RB Buffer). For best results, do not determine an average concentration to use for every well. The amount of DNA added to the arrays has been optimized for the best performance. Since not all wells will contain the same amount of DNA after purification, the eluted PCR products should be carefully normalized to 2 μg/μL before continuing to Stage 7: Fragmentation. Normalize samples using RB Buffer (not water) to maintain the correct pH for subsequent steps. The accuracy of the OD measurement is critical. Carefully follow the steps below and be sure the OD measurement is within the quantitative linear range of the instrument (0.2 to 0.8 OD). The spectrophotometer plate reader should be calibrated regularly to ensure correct readings. This protocol has been optimized using a UV spectrophotometer plate reader for quantitation. NOTE: The NanoDrop will give different quantitation results. This protocol has not been optimized for use with this instrument. Reagents Required for Stage 6: Quantitation and Normalization: as needed RB Buffer (from Clontech DNA Amplification Clean-Up Kit) 75 mL ACCUGENE water, molecular biology-grade addition, the NanoDrop quantifies a single sample at a time and is not amenable to 96-well plate processing. When normalizing samples, be sure to use a 96-well plate that is compatible with the thermal cycler on which the 500K Fragment thermal cycler program will be run (Stage 7: Fragmentation). Turn on the Spectrophotometer Plate Reader Turn on the spectrophotometer now and allow it to warm for 10 minutes before use. To prepare the work area place a double cooling chamber on ice. Label the 96-well reaction plate Fragment as this plate will also be used for the next stage), and place on the cooling chamber. Place the following on the bench top: Optical plates, Solution basin and ACCUGENE water. Label each optical plate as follows: OP1, OP2, OP3, OP4. Vortex the RB Buffer and place on the bench top. Prepare the purified, eluted PCR product plate as follows: If the plate was frozen, allow it to thaw in a cooling chamber on ice. Vortex the center of the plate at high speed for 3 sec. Spin down the plate at 2000 rpm for 30 sec. Place the plate on the bench top.

[0133] To prepare three diluted aliquots of the purified samples: Pour 75 mL of room temperature ACCUGENE water into the solution basin. Using a 12-channel P200 pipette, aliquot 198 μL of water to: Each well of optical plates 1, 2 and 3 and the first four rows of optical plate 4. Using a 12-channel P20 pipette transfer 2 μL of each purified PCR product from rows A through G of the purified sample plate to the corresponding rows and wells of optical plates 1, 2 and 3. Pipette up and down 2 times after each transfer to ensure that all of the product is dispensed. Examine the pipette tips and aliquots before and after each dispense to ensure that exactly 2 μL has been transferred. Transfer 2 μL of each purified PCR product from row H of the purified sample plate to the corresponding rows and wells of optical plate 4. Again, pipette up and down 2 times after each transfer, and examine the pipette tips and aliquots before and after each dispense. The result is a 100-fold dilution. Two of the wells containing water only will serve as blanks. Set a 12-channel P200 pipette to 180 μL. Mix each sample by pipetting up and down 5 to 10 times. Be careful not to scratch the bottom of the plate, or to introduce air bubbles. Two of the wells on each optical plate should be set up as blanks containing ACCUGENE water only. The 12-channel P20 pipette should be accurate to within ±5%. Repeat this procedure and prepare three plates of diluted PCR product to test. Be sure to keep two wells as blanks (water only) on each plate.

[0134] To quantitate the diluted PCR product: measure the OD of each PCR product at 260, 280 and 320 nm. OD280 and OD320 are used as process controls. Their use is described under Process Control Metrics below. Determine the OD260 measurement for the water blank. Determine the concentration of each PCR product as follows: A. Take 3 OD readings for every sample (1 from each optical plate; P1, P2, P3 and P4). OD1=(sample OD)−(water blank OD) OD2=(sample OD)−(water blank OD) OD3=(sample OD)−(water blank OD) B. Average the 3 readings for each sample to obtain an Average Sample OD: Average Sample OD=(OD1+OD2+OD3)÷3 C. Calculate the undiluted sample concentration for each sample using the Average Sample OD: Sample concentration in μg/μL=Average Sample OD □ [symbol] (0.05 μg/μL) □ [symbol] 100 Apply the convention that 1 absorbance unit at 260 nm equals 50 μg/mL (equivalent to 0.05 μg/μL) for double-stranded PCR products. This convention assumes a path length of 1 cm. Consult your spectrophotometer handbook for further information. ASSESS THE OD READINGS Follow the guidelines below for assessing and troubleshooting OD readings. Average Sample OD A typical average sample OD is 0.5 to 0.7. This OD range is equivalent to a final PCR product concentration of 2.5 to 3.5 μg/μL. It is based on the use of a conventional UV spectrophotometer plate reader and assumes a path length of 1 cm. Process Control Metrics Evaluate the process control metrics as follows: the OD260/OD280 ratio should be between 1.8 and 2.0. For best results, do not proceed if this metric falls outside of this range. The OD320 measurement should be very close to zero (0±0.005). Troubleshooting: Average Sample OD is greater than 0.7 (3.5 μg/μL) If the average sample OD of three independent measurements is greater than 0.7 (calculated concentration greater than 3.5 μg/μL), a problem exists with either the elution of PCR products or the OD reading. The limit on PCR yield is approximately 3.5 μg/μL, as observed in practice and as predicted by the mass of dNTPs in the reaction. Possible causes include: The purified PCR product was eluted in a volume less than 45 μL. The purified PCR product was not mixed adequately before making the 1:100 dilution. The diluted PCR product was not mixed adequately before taking the OD reading. The water blank reading was not subtracted from each sample OD reading. The spectrophotometer plate reader may require calibration. Pipettes may require calibration. There may be air bubbles or dust in the OD plate. There may be defects in the plastic of the plate. The settings on the spectrophotometer plate reader or the software may be incorrect. OD calculations may be incorrect and should be checked. Reliance on any single OD reading may give an outlier result. Make three independent dilutions and take three independent OD readings per dilution. Troubleshooting: Average Sample OD is Less Than 0.5 (2.5 μg/μL) If the average sample OD of three independent measurements is less than 0.5 (calculated concentration less than 2.5 μg/μL), a problem exists with either the genomic DNA, the PCR reaction, the elution of purified PCR products, or the OD readings. Possible problems with input genomic DNA that would lead to reduced yield include: The presence of inhibitors (heme, EDTA, etc.). Severely degraded genomic DNA. Inaccurate concentration of genomic DNA. NOTE: Check the OD reading for the PCR products derived from RefDNA 103 as a control for these issues. To prevent problems with the PCR reaction that would lead to reduced yield: use the recommended reagents and vendors (including ACCUGENE water) for all PCR mix components. Thoroughly mix all components before making the PCR Master Mix. Pipette all reagents carefully, particularly the PCR Primer, when making the master mix. Check all volume calculations for making the master mix. Store all components and mixes on ice when working at the bench. For best results, do not allow reagents to sit at room temperature for extended periods of time. Be sure to use the recommended PCR plates. Plates from other vendors may not fit correctly in the thermal cycler block. Differences in plastic thickness and fit with the thermal cycler may lead to variance in temperatures and ramp times. Be sure to use the correct cycling mode when programming the thermal cycler (maximum mode on the GeneAmp PCR System 9700; calculated mode on the MJ Tetrad PTC-225). Be sure to use silver or gold-plated silver blocks on the GENEAMP PCR System 9700 (other blocks are not capable of maximum mode, which will affect ramp times). Use the recommended plate seal. Make sure the seal is tight and that no significant evaporation occurs during the PCR. NOTE: The Mapping 500K PCR reaction amplifies a size range of fragments that represents 15-20% of the genome. The Mapping 500K arrays are designed to detect the SNPs that are amplified in this complex fragment population. Subtle changes in the PCR conditions may not affect the PCR yield, but may shift the amplified size range up or down very slightly. This can lead to reduced amplification of SNPs that are assayed on the array set, subsequently leading to lower call rates. Troubleshooting Possible Problems with the Elution or OD Readings—possible causes include: The purified PCR product was eluted in a volume greater than 45 μL. The purified PCR product was not mixed adequately before making the 1:100 dilution. The diluted PCR product was not mixed adequately before taking the OD reading. The water blank reading was not subtracted from each sample OD reading. The spectrophotometer plate reader may require calibration. Pipettes may require calibration. There may be air bubbles or dust in the OD plate. There may be defects in the plastic of the plate. The settings on the spectrophotometer plate reader or the software may be incorrect. OD calculations may be incorrect and should be checked. Reliance on any single OD reading may give an outlier result. Make three independent dilutions and take three independent OD readings per dilution. Trouble shooting: problem: OD260/OD280 ratio is not between 1.8 and 2.0-possible causes include: The PCR product may be not be sufficiently purified. Be sure to perform three water washes and check to be sure the vacuum manifold is working properly. An error may have been made while taking the OD readings. Trouble shooting: problem: Average Sample OD is less than 0.5 (2.5 μg/μL). To normalize the samples: Calculate the volume of RB Buffer required to normalize each sample. Using a single-channel P20 pipette, add the calculated volume of RB Buffer to each well (the value of X). Using a single-channel P100 pipette, add the calculated volume of purified PCR product (the value of Y) to the corresponding well with RB Buffer. The total volume of each well is now 45 μL. After normalization, each well should contain 90 μg of purified PCR product in a volume of 45 μL (or 2 μg/μL). Seal the plate with adhesive film. Vortex the center of the plate at high speed for 3 sec. Trouble shooting: problem: The OD320 measurement is significantly larger than zero (0±0.005). Possible causes include: Precipitate may be present in the eluted samples. Be sure to add diluted EDTA to PCR products before purification. There may be defects in the OD plate. Air bubbles in the OD plate or in solutions. Formula X μL RB Buffer=45 μL−(Y μL purified PCR product) Where: Y=The volume of purified PCR product that contains 90 μg The value of Y is calculated as: Y μL purified PCR product=(90 μg)÷(Z μg/μL) Z=the concentration of purified PCR product in μg/μL Spin down the plate at 2000 rpm for 30 sec and place back in the cooling chamber. Proceed immediately to the next stage. Because the DNA concentration in each sample is different, the volume transferred to each well will differ. For optimal performance, it is critical that the contents of each well be normalized to 2 μg of DNA/μL before proceeding to the next step.

[0135] Stage 7: Fragmentation: During this stage the purified, normalized PCR products will be fragmented using Fragmentation Reagent. First dilute the Fragmentation Reagent by adding the appropriate amount of Fragmentation Buffer and ACCUGENE water. Quickly add the diluted reagent to each reaction, place the plate onto a thermal cycler, and run the 500K Fragment program. Once the program is finished, check the results of this stage by running 4 μL of each reaction on a 4% TBE gel. The input required from Stage 6: Quantitation and Normalization is: 1 Plate of quantitated, normalized PCR product in a cooling chamber on ice. For best results, use the PCR plate, adhesive film and thermal cyclers listed. Equipment and Consumables Required for Stage 7: Fragmentation: 1 Cooler, chilled to −20° C. 1 Cooling chamber, double, chilled to 4° C. (do not freeze) 1 Ice bucket, filled with ice, 1 Marker, fine point, permanent, 1 Microcentrifuge, 1 Pipette, single channel P20 1 Pipette, single channel P100 1 Pipette, single channel P1000, 1 Pipette, 12-channel P20 (accurate to within±5%), as needed Pipette tips for pipettes listed above; full racks 1 Plate centrifuge 1 Plate seal, 1 Thermal cycler, 2 Eppendorf 1.5 mL tubes, and 2 strips of 12 tubes cut from the Bio-Rad 96-well unskirted PCR plate, P/N MLP-9601. For this stage, the strip tubes should be cut from this particular plate and 1 vortexer. The amounts listed are sufficient to process one full 96-well reaction plate. The following gels and related materials are required for this stage. The amounts listed are sufficient to process one full 96-well reaction plate. Reagents Required for Stage 7: Fragmentation: 1 vial Fragmentation Buffer (10×), 1 vial Fragmentation Reagent (DNase I), 2 mL ACCUGENE water, molecular biology-grade. 5 4% TBE Gel 10 DNA Markers, 5 μL each as needed Gel loading solution

[0136] Purified PCR product should be normalized to 90 μg DNA in 45 μL RB Buffer. The degree of fragmentation is critical. Perform this stage carefully to ensure uniform, reproducible fragmentation. The Fragmentation Reagent is extremely temperature sensitive. It rapidly loses activity at higher temperatures. To avoid loss of activity:—Dilute the Fragmentation Reagent immediately prior to use.—Keep at −20° C. until ready to use. Transport and hold in a −20° C. cooler. Return to the cooler immediately after use.—Perform these steps rapidly and without interruption. The Fragmentation Reagent (DNase I) may adhere to the walls of some microfuge tubes and 96-well plates. To ensure the accurate amount of DNase I in the fragmentation reaction (Stage 7: Fragmentation), the strip tubes used for this stage should be cut from Bio-Rad 96-well unskirted PCR plates, P/N MLP-9601. The Fragmentation Reagent is viscous and requires extra care when pipetting. Follow these guidelines:—When aspirating, allow enough time for the correct volume of solution to enter the pipette tip.—Avoid excess solution on the outside of the pipette tip. Using in-house ddH2O or other water can negatively affect the results. The reaction in Stage 7: Fragmentation is particularly sensitive to pH and metal ion contamination. All additions, dilutions and mixing should be performed on ice. Thaw Reagents Thaw the Fragmentation Buffer (10×) on ice. To prepare the work area: Place a double cooling chamber and a cooler on ice. Place the ACCUGENE Water on ice. Prepare the Fragmentation Buffer as follows: Vortex 3 times, 1 sec each time. Pulse spin for 3 sec. Place the buffer in the cooling chamber on ice. Cut two strips of 12 tubes from a Bio-Rad 96-well unskirted PCR plate (P/N MLP-9601). Strip tubes should be cut from this particular plate. Label and place the following in the cooling chamber on ice: two strips of 12 tubes labeled Buffer and FR. One 1.5 mL Eppendorf tube labeled Frag MM. Plate of purified, normalized PCR product from the previous stage. Leave the Fragmentation Reagent at −20° C. until ready to use. Preheat the Thermal Cycler Block The block should be heated to 37° C. before samples are loaded. To preheat the thermal cycler: Power on the thermal cycler and preheat the block to 37° C. Allow it to heat for 10 minutes before loading samples. Add Fragmentation Buffer to Samples To prepare the samples for Fragmentation: Aliquot 50 μL of 10× Fragmentation Buffer to each tube of the 12-tube strip labeled Buffer. Using a 12-channel P20 pipette, add 5 μL of Fragmentation Buffer to each sample in the 96-well reaction plate. Check the pipette tips each time to ensure that all of the buffer has been dispensed. The total volume in each well is now 50 μL. Dilute the Fragmentation Reagent To dilute the Fragmentation Reagent: Read the Fragmentation Reagent tube label and record the concentration. All of the additions in this procedure should be performed on ice. The concentration of stock Fragmentation Reagent (U/μL) may vary from lot-to-lot. Therefore, read the label on the tube and record the stock concentration before diluting this reagent. Use the formula provided to accurately calculate the dilution required. If the concentration is 2 or 3 U/μL, dilute the Fragmentation Reagent using the volumes show. If the concentration is not 2 or 3 U/μL, use the formula below to calculate the dilution required to bring the reagent to a final concentration of 0.05 U/μL. Dilute the Fragmentation Reagent to 0.05 U/μL as follows or the dilution formula calculation: To the 1.5 mL Eppendorf tube on ice: 1) Add the ACCUGENE water and Fragmentation Buffer. Dilution Recipes for Fragmentation Reagent Concentrations of 2 or 3 U/μL: ACCUGENE water 525 μL or 530 μL, Fragmentation Buffer 60 μL or 60 μL, Fragmentation Reagent 15 μL or 10 μL. Total (enough for 96 samples) is 600 μL for both. Formula Y=0.05 U/μL 600 μL X U/μL Where: Y=number of μL of stock Fragmentation Reagent X=number of U of stock Fragmentation Reagent per μL (per label on tube) 0.05 U/μL=final concentration of Fragmentation Reagent 600 μL=final volume of diluted Fragmentation Reagent (enough for 96 reactions). Allow to cool on ice. Remove the Fragmentation Reagent from the freezer and: Immediately pulse spin for 3 sec. Spinning is required because the Fragmentation Reagent tends to cling to the top of the tube, making it warm quicker. Immediately place in a cooler. Add the Fragmentation Reagent to the 1.5 mL Eppendorf tube. Vortex the diluted Fragmentation Reagent at high speed 3 times, 1 sec each time. Pulse spin for 3 sec and immediately place on ice. Proceed immediately to the next set of steps, Add Diluted Fragmentation Reagent to the Samples. Add Diluted Fragmentation Reagent to the Samples To add diluted Fragmentation Reagent to the samples: Quickly and on ice, aliquot 50 μL of diluted Fragmentation Reagent to each tube of the 12 tube strip labeled FR. Using a 12-channel P20 pipette, add 5 μL of diluted Fragmentation Reagent to each sample. For best results, do not pipette up and down. Seal the plate and inspect the edges to ensure that it is tightly sealed. Reagent Volume/Sample Sample with Fragmentation Buffer 50 μL Diluted Fragmentation Reagent (0.05 U/μL) 5 μL Total 55 μL. Vortex the center of the plate at high speed for 3 sec. Place the plate in a chilled plastic plate holder and spin it down at 4° C. at 2000 rpm for 30 sec. Immediately load the plate onto the pre-heated block of the thermal cycler (37° C.) and run the 500K Fragment program. Discard any remaining diluted Fragmentation Reagent. Diluted Fragmentation Reagent should not be reused. Proceed directly to the next stage. Concurrently, check the fragmentation reaction by running gels as described below. To minimize solution loss due to evaporation, make sure that the plate is tightly sealed prior to loading onto the thermal cycler. The MJ thermal cyclers are more prone to evaporation. 500K Fragment Program Temperature Time 37° C. 35 minutes 95° C. 15 minutes 4° C. Hold. To ensure that fragmentation was successful: When the 500K Fragment program is finished: Remove the plate from the thermal cycler. Spin down the plate at 2000 rpm for 30 sec, and place in a cooling chamber on ice. Dilute 4 μL of each fragmented PCR product with 4 μL gel loading dye. Run on 4% TBE gel with the BioNexus All Purpose Hi-Lo ladder at 120V for 30 minutes to 1 hour. Inspect the gel. Average fragment size is <180 bp.

[0137] Stage 8: Labeling. During this stage, the fragmented samples will be labeled using the GENECHIP DNA Labeling Reagent. Prepare the Labeling Master Mix, add the mix to each sample, place the samples onto a thermal cycler and run the 500K Label program. The following equipment and consumables are required for this stage: 1 Plate of fragmented DNA. Use only the PCR plate, adhesive film and thermal cyclers listed in Equipment and Consumables Required for Stage 8. 1 Cooler, chilled to −20° C., 1 Cooling chamber, double, chilled to 4° C. (do not freeze), 1 Ice bucket, filled with ice, 1 Marker, fine point, permanent, 1 Microcentrifuge, 1 Pipette, single channel P200, 1 Pipette, single channel P1000, 1 Pipette, 12-channel P20 (accurate to within ±5%), as needed Pipette tips for pipettes listed above in full racks, 1 Plate centrifuge, 1 Plate seal, 1 Thermal cycler, 1 15 mL centrifuge tube, 1 strip of 12 tubes, and 1 Vortexer The following reagents are required for this stage. The amounts listed are sufficient to process one full 96-well reaction plate. To minimize sample loss due to evaporation, tightly seal the plate before running the 500K Label thermal cycler program. Thaw Reagents Thaw the following reagents on ice: 1 vial GENECHIP DNA Labeling Reagent (30 mM), 1 vial Terminal Deoxynucleotidyl Transferase (TdT; 30 U/μL), and 2 vials Terminal Deoxynucleotidyl Transferase Buffer (TdT Buffer; 5×). Leave the TdT enzyme at −20° C. until ready to use. Place a double cooling chamber and a cooler on ice. Prepare the reagents as follows: vortex each reagent at high speed 3 times, 1 sec each time. Pulse spin for 3 sec. C. Place in the cooling chamber. Label and place the following in the cooling chamber: One strip of 12 tubes labeled MM One 15 mL centrifuge tube labeled MM, and the plate of fragmented reactions from the previous stage. The thermal cycler block should be heated to 37° C. before samples are loaded. Keep all reagents and tubes on ice while preparing the Labeling Master Mix. To prepare the Labeling Master Mix: Add the following to the 15 mL centrifuge tube on ice using the volumes listed. 5× TdT Buffer GENECHIP DNA Labeling Reagent. Remove the TdT enzyme from the freezer and immediately place in the cooler. Pulse spin the enzyme for 3 sec; then immediately place back in the cooler. Add the TdT enzyme to the master mix. Vortex the master mix at high speed 3 times, 1 sec each time. Pulse spin for 3 sec. Immediately proceed to the next set of steps. To add the Labeling Master Mix to the samples: Keep samples in the cooling chamber and all tubes on ice when making additions. Aliquot 178 μL of Labeling Master Mix to each tube of the strip tubes. Add the Labeling Master Mix as follows: using a 12-channel P20 pipette, aliquot 19.5 μL of Labeling Master Mix to each sample. Pipette up and down one time to ensure that all of the mix is added to the samples. The total volume in each well is now 70 μL. Labeling Master Mix for 1 Sample or for 96 Samples (15% extra): TdT Buffer (5×) 14 μL or 1545.6 μL, GENECHIP DNA Labeling Reagent (30 mM) 2 μL or 220.8 μL, TdT enzyme (30 U/μL) 3.5 μL or 386.4 μL. Seal the plate tightly with adhesive film. Vortex the center of the plate at high speed for 3 sec. Spin down the plate at 2000 rpm for 30 sec. Place the plate on the pre-heated thermal cycler block, and run the 500K Label program. Samples can remain at 4° C. overnight. When the 500K labeling program is finished: remove the plate from the thermal cycler. Spin down the plate at 2000 rpm for 30 sec. Reagent Volume/Rx Fragmented DNA (less the 4 μL used for gel analysis) 50.5 μL Labeling Mix 19.5 μL Total 70 μL. Check to ensure that the plate is tightly sealed to minimize evaporation while on the thermal cycler, particularly around the wells on the edge of the plate. 500K Label Program is 37° C. for 4 hours, 95° C. for 15 minutes and hold at 4° C. Samples can remain at 4° C. overnight. Either proceed to the next stage or freeze the samples at −20° C.

[0138] Stage 9: Target Hybridization ABOUT THIS STAGE During this stage, each sample is loaded onto either a GENECHIP Human Mapping 250K Sty Array or a 250K Nsp Array. Three methods for performing this stage are presented. Method 1—Using a GeneAmp® PCR System 9700 Requires the use of a GENEAMP PCR System 9700 thermal cycler located cycler adjacent to the hybridization ovens. Samples are on a 96-well reaction plate. Method 2—Using an Applied Biosystems 2720 Thermal Cycler or an MJ Tetrad PTC-225 Thermal Cycler. Requires the use of an Applied Biosystems 2720 Thermal Cycler or an MJ Tetrad PTC-225 Thermal Cycler located adjacent to the hybridization ovens. Samples are on a 96-well reaction plate. Method 3—Using Heat Blocks Requires the use of two heat blocks and Eppendorf tubes, one per sample. First, prepare a Hybridization Master Mix and add the mix to each sample. Then, based on the method you are using, denature the samples on a thermal cycler (methods 1 and 2) or on a heat block (method 3). After denaturation, load each sample onto the appropriate GENECHIP Human Mapping 250K Array (Nsp or Sty)—one sample per array. The arrays are then placed into a hybridization oven that has been preheated to 49° C. Samples are left to hybridize for 16 to 18 hours. Two operators are required for all of the methods. Location is main lab and ands-on time is approximately 2 hours Hybridization time is 16 to 18 hours. The following equipment and consumables are required for this stage. 1 Plate of labeled DNA. Equipment and consumables required for Stage 9: Target Hybridization using a thermal cycler: 1 cooling chamber, chilled to 4° C. (do not freeze), 96 GENECHIP 500K Arrays (one array per sample) 1 GENECHIP Hybridization Oven 640 1 Ice bucket, filled with ice 1 Pipette, single channel P200 1 Pipette, single channel P1000 As needed Pipette tips for pipettes listed above; full racks 1 Plate, Bio-Rad 96-well, P/N MLP-9601 1 Plate centrifuge, 2 Plate holders, centrifuge 1 Plate seal, 1 55 mL Solution basin, 1 Thermal cycler, 2 TOUGH-SPOTS per array, 1 centrifuge tube 50 mL, and 1 Vortexer. Hybridizing Samples Using Heat Blocks. Equipment and Consumables Required for Stage 9: Target Hybridization Using Heat Blocks: 1 Cooling chamber, chilled to 4° C. (do not freeze), 96 GENECHIP Human Mapping 250K Sty Arrays or GENECHIP Human Mapping 250K Nsp Arrays, one array per sample is required, 1 GENECHIP Hybridization Oven 640, 2 Heat blocks, 1 Ice bucket, filled with ice, 1 single channel P200 pipette, 1 single channel P1000 pipette and full racks of pipette tips for pipettes listed above; 1 Plate centrifuge 1 Plate seal, 1 55 mL Solution basin, 4 Timers, 1 50 mL centrifuge tube, 96 1.5 mL EPPENDORF Safe-Lock tubes, (one tube per sample), 2 TOUGH-SPOTS per array and 1 Vortexer. The following reagents are required for this stage. The amounts listed are sufficient to process one full 96-well reaction plate. To help ensure the best results, carefully read the information below before beginning this stage of the protocol. This procedure requires two operators working simultaneously when loading samples onto arrays and placing arrays in the hybridization ovens. If using a thermal cycler, it is critical that the samples remain at 49° C. after denaturation and while being loaded onto arrays.

[0139] Reagents Required for Stage 9: Target Hybridization: 5 mL (1 tube) Denhart's Solution, 1.5 mL (1 tube) DMSO, 0.5 mL (1 vial) EDTA, 1 mL (1 vial) Herring Sperm DNA (HSDNA), 500 μL (1 vial) Human Cot-1 DNA, 80 g MES Hydrate SigmaUltra, 200 g MES Sodium Salt, 16 mL (1 tube) Tetramethyl Ammonium Chloride (TMACL; 5M), 10 mL (1 vial) Tween-20, 10%, and 250 μL (1 vial) Oligo Control Reagent (OCR). When adding to the Hybridization Master Mix, pipette DMSO into the middle of the tube. For best results, do not touch the sides of the tube as the DMSO can leach particles out of the plastic which, in turn, may cause high background. DMSO is light sensitive and should be stored in a dark glass bottle. For best results, do not store in a plastic container and be sure to allow the arrays to equilibrate to room temperature; otherwise, the rubber septa may crack and the array may leak. An accurate hybridization temperature is critical for this assay. Therefore, we recommend that the hybridization ovens be serviced at least once per year to ensure that they are operating within manufacture specifications. Gloves, safety glasses, and lab coats should be worn when preparing the Hybridization Master Mix. Prepare a 12× MES Stock Solution The 12× MES stock solution can be prepared in bulk and kept for at least one month if properly stored. Proper storage: Protect from light using aluminum foil Keep at 4° C. To prepare 1000 mL of 12× MES Stock Solution: (1.25 M MES, 0.89 M [Na+]), combine: 70.4 g MES hydrate 193.3 g MES sodium salt 800 mL ACCUGENE water. Mix and adjust volume to 1,000 mL. The pH should be between 6.5 and 6.7. Filter the solution through a 0.2 μm filter. Protect from light using aluminum foil and store at 4° C. Preheat the Hybridization Ovens To preheat the hybridization ovens: Turn each oven on and set the temperature to 49° C. Set the rpm to 60. Turn the rotation on and allow to preheat for 1 hour before loading arrays. Do not autoclave. Store between 2° C. and 8° C., and shield from light using aluminum foil. Discard solution if it turns yellow. Thaw Reagents If the labeled samples from the previous stage were frozen: Thaw the plate on the bench top. Vortex the center of the plate at high speed for 3 sec. Spin down the plate at 2000 rpm for 30 sec. Place in a cooling chamber on ice. If hybridizing samples using Method 1 or 2, the labeled samples should be placed in a Bio-Rad unskirted 96-well plate (P/N MLP-9601). For Method 2, the plate will be cut into 4 strips of 24 wells each. Preheat the Thermal Cycler Lid A thermal cycler is required only if hybridizing samples using Method 1 or 2. Power on the thermal cycler to preheat the lid. Leave the block at room temperature. Heat blocks are required only if hybridizing samples using Method 3. To prepare the heat blocks preheat one to 99° C. and the other to 49° C. An accurate hybridization temperature is important for this assay. To prepare the arrays: unwrap the arrays and place on the bench top, septa-side up. Mark each array with a meaningful designation (e.g., a number) to ensure that you know which sample is loaded onto each array. Insert a 200 μL pipette tip into the upper right septum of each array. Allow the arrays to warm to room temperature by leaving on the bench top 10 to 15 minutes. As an option, you can prepare a larger volume of Hybridization Master Mix than required. The extra mix can be aliquoted and stored at −20° C. for up to one week. To prepare the Hybridization Master Mix add the reagents to the 50 mL centrifuge tube in the order listed. Mix well. If making a larger volume, aliquot out 20.9 mL, and store the remainder at −20° C. for up to one week. To ensure that the data collected during scanning is associated with the correct sample, number the arrays in a meaningful way. To prepare stored Hybridization Master Mix: Place the stored Hybridization Master Mix on the bench top, and allow to warm to room temperature. Vortex at high speed until the mixture is homogeneous and without precipitates (up to 5 minutes). Pulse spin for 3 sec. Hybridization Master Mix: for 1 Array or 96 Arrays with (15% extra): MES (12×; 1.25 M) 12 μL or 1320 μL, Denhardt's Solution (50×) 13 μL or 1430 μL, EDTA (0.5 M) 3 μL or 330 μL, HSDNA (10 mg/mL) 3 μL or 330 μL, OCR, 0100 2 μL or 220 μL, Human Cot-1 DNA (1 mg/mL) 3 μL or 330 μL, Tween-20 (3%) 1 μL or 110 μL, DMSO (100%) 13 μL or 1430 μL, and TMACL (5 M) 140 μL or 1540 mL, for a total of 190 μL per array or 20.9 mL for 96 arrays.

[0140] Method 1—Using a GENEAMP PCR System 9700 The thermal cycler used for this method should be a GENEAMP PCR System 9700 located adjacent to the hybridization ovens. This particular thermal cycler is recommended because of the way the lid operates. You can slide it back one row at a time as samples are loaded onto arrays. Keeping the remaining rows covered prevents condensation in the wells. To add Hybridization Master Mix and denature the samples: Pour 20.9 mL Hybridization Master Mix into a solution basin. Using a 12-channel P200 pipette, add 190 μL of Hybridization Master Mix to each sample on the Label Plate. Total volume in each well is 260 μL. Seal the plate tightly with adhesive film. Vortex the center of the plate for 3 minutes. Spin down the plate at 2000 rpm for 30 sec. Cut the adhesive film between each row of samples. Do not remove the film. Place the plate onto the thermal cycler and close the lid. Run the 500K Hyb program. 500K Hyb Program: 95° C. 10 minutes and 49° C. Hold.

[0141] Load the Samples onto Arrays. This procedure uses 2 operators working simultaneously. Operator 1 loads the samples onto the arrays; Operator 2 covers the septa with TOUGH-SPOTS and loads the arrays into the hybridization ovens. To load the samples onto arrays: Operator 1: When the plate reaches 49° C., slide back the lid on the thermal cycler enough to expose the first row of samples only. Remove the film from the first row. Using a single-channel P200 pipette, remove 200 μL of denatured sample from the first well. Immediately inject the sample into an array. Pass the array to Operator 2. Remove 200 μL of sample from the next well and immediately inject it into an array. Pass the array to Operator 2. Repeat this process one sample at a time until the entire row is loaded. Place a fresh strip of adhesive film over the completed row. Slide the thermal cycler lid back to expose the next row of samples. Repeat steps 3 through 10 until all of the samples have been loaded onto arrays. Operator 2: Cover the septa on each array with a Tough-Spot. When 4 arrays are loaded and the septa are covered: Load the arrays into an oven tray evenly spaced. Immediately place the tray into the hybridization oven. For best results, do not allow loaded arrays to sit at room temperature for more than approximately 1 minute. Ensure that the oven is balanced as the trays are loaded, and ensure that the trays are rotating at 60 rpm at all times. Because you are loading 4 arrays per tray, each hybridization oven will have a total of 32 arrays. Operators 1 and 2: Load no more than 32 arrays in one hybridization oven at a time. All 96 samples should be loaded within 1 hour. Store the remaining samples and any samples not yet hybridized in a tightly sealed plate at −20° C. Allow the arrays to rotate at 49° C., 60 rpm for 16 to 18 hours. This temperature is optimized for this product.

[0142] Method 2—Using an Applied Biosystems 2720 Thermal Cycler or an MJ Tetrad PTC-225 Thermal Cycler For this method, you can use an Applied Biosystems 2720 Thermal Cycler or an MJ Tetrad PTC-225 Thermal Cycler. The thermal cycler should be located adjacent to the hybridization ovens. Because the lids on these thermal cyclers do not slide back, you will process 24 samples at a time. Add Hybridization Master Mix and Denature To add Hybridization Master Mix and denature the samples: Pour 20.9 mL Hybridization Master Mix into a solution basin. Using a 12-channel P200 pipette, add 190 μL of Hybridization Master Mix to each sample on the Label Plate. Total volume in each well is 260 μL. Seal the plate tightly with adhesive film. Vortex the center of the plate for 3 minutes. 5 Cut the plate into 4 strips of two rows each. Put each strip of 24 samples into a plate holder, 2 strips per holder. Spin down the strips at 2000 rpm for 30 sec. Cut the adhesive film between each row of samples. Do not remove the film. Place one set of 24 wells onto the thermal cycler and close the lid. Keep the remaining sets of wells in a cooling chamber on ice. Run the 500K Hyb program. Load the Samples onto Arrays This procedure requires 2 operators working simultaneously. Operator 1 loads the samples onto the arrays; Operator 2 covers the septa with TOUGH-SPOTS and loads the arrays into the hybridization ovens. To load the samples onto arrays: Operator 1 When the plate reaches 49° C., open the lid on the thermal cycler. Remove the film from the first row. Using a single-channel P200 pipette, remove 200 μL of denatured sample from the first well. Immediately inject the sample into an array. Pass the array to Operator 2. Remove 200 μL of denatured sample and immediately inject it into an array. Pass the array to Operator 2. Repeat this process one sample at a time until all 24 samples are loaded onto arrays. 500K Hyb Program: 95° C. 10 minutes 49° C. Hold. Cover the wells with a fresh strip of adhesive film and place in the cooling chamber on ice. Remove the next strip of 24 wells and place it on the thermal cycler. Run the 500K Hyb program. Repeat steps 1 through 11 until all of the samples have been loaded onto arrays. Operator 2: Cover the septa on each array with a Tough-Spot. When 4 arrays are loaded and the septa are covered: Load the arrays into an oven tray evenly spaced. Immediately place the tray into the hybridization oven. For best results, do not allow loaded arrays to sit at room temperature for more than approximately 1 minute. Ensure that the oven is balanced as the trays are loaded, and ensure that the trays are rotating at 60 rpm at all times. Because you are loading 4 arrays per tray, each hybridization oven will have a total of 32 arrays. Operators 1 and 2: Load no more than 32 arrays in one hybridization oven at a time. All 96 samples should be loaded within 1 hour. Store the remaining samples and any samples not yet hybridized in a tightly sealed plate at −20° C. Allow the arrays to rotate at 49° C., 60 rpm for 16 to 18 hours.

[0143] Method-3. The following instructions require 2 operators working simultaneously, each processing two samples at a time. Batches of sixteen samples at a time are denatured and loaded onto arrays. Two heat blocks are required: one set to 99° C.; the other set to 49° C. Load Samples Onto a Heat Block. If the heat blocks are not turned on, preheat them now (set one to 99° C.; the other to 49° C.). Add 190 μL of Hybridization Master Mix to each 1.5 mL Eppendorf Safe-Lock tube. Transfer the labeled sample from the reaction plate to a tube containing Hybridization Master Mix (one sample per tube). The total volume is now 260 μL. Vortex at high speed 3 times, 1 sec each time. Pulse spin for 3 sec. Do one of the following: If denaturing and loading samples onto arrays now, place the tubes on ice. If not proceeding to denature and hybridization at this time, store the samples at −20° C. (the mix will not freeze). Place the tubes in batches of 16 at a time onto a heat block as follows: Reagent Volume/Sample Hybridization Master Mix 190 μL Labeled DNA 70 μL Total 260 ρL. Place four tubes onto a heat block at 99° C. and set a timer for 10 minutes. Wait 3 to 4 minutes, then place another 4 tubes onto the heat block and set another timer for 10 minutes. Repeat this procedure until there are 16 samples loaded onto the heat block. Remove Samples from heat block and load onto arrays. Two operators will perform this procedure at the same time, two samples per person. To load samples onto arrays, 16 samples at a time: When the first timer indicates 10 minutes has transpired: immediately remove the first samples (two per operator). Cool on crushed ice for 10 sec, then remove immediately. Pulse spin for 3 sec. Place the tubes back on the heat block at 49° C. for 1 minute. Remove tubes from the heat block, and check for precipitate. Using a single-channel P200 pipette, remove 200 μL of denatured sample from one tube. Immediately inject the sample into an array. Cover each septa with a Tough-Spot. Repeat steps 5 through 7 for the next sample. Immediately load the arrays into a hybridization oven tray, 4 arrays per tray evenly spaced. Cool for 10 sec only. If left on ice longer, aggregates may form. These aggregates will not break apart at 49° C. and will reduce your call rate. Cooling on ice is required for this method only due to the loose fit of the tubes on the heat blocks. This step helps to ensure that the samples cool quickly to 49° C.

### CONCLUSION

[0144] A method for detection of greater than about 500,000 Single Nucleotide Polymorphisms (SNPs) in samples of genomic DNA is disclosed. It is to be understood that the above description is intended to be illustrative and not restrictive. Many variations of the invention will be apparent to those of skill in the art upon reviewing the above description. The scope of the invention should be determined with reference to the appended claims, along with the full scope of equivalents to which such claims are entitled. All cited references, including patent and non-patent literature, are incorporated herewith by reference in their entireties for all purposes.

We Claim:

1. A method for determining the genotype of more than 200,000 SNPs in a nucleic acid sample comprising:
(a.) obtaining a nucleic acid sample;
(b.) fragmenting said nucleic acid in a first fragmentation step to produce fragments;
(c.) ligating an adaptor to at least some of the fragments from step (b) to generate adapter-ligated fragments;
(d.) amplifying at least some of the adapter-ligated fragments from step (c) to obtain amplified fragments;
(e.) fragmenting the amplified fragments of step (d) in a second fragmentation step to produce sub-fragments;
(f.) labeling the sub-fragments;
(g.) hybridizing the labeled sub-fragments from step (f) to an array of probes, wherein said array comprises probes to interrogate the genotype of more than 200,000 different single nucleotide polymorphisms; and
(h.) detecting a hybridization pattern; and
(i.) analyzing the hybridization pattern to determime the genotype of at least 500,000 single nucleotide polymorphisms in said sample.

2. The method of claim 1, wherein said nucleic acid sample comprises genomic DNA or an amplification product of genomic DNA.

3. The method of claim 1, wherein said nucleic acid sample comprises cDNA or RNA.

4. The method of claim 1, wherein the more than 200,000 single nucleotide polymorphisms have an average minor allele frequency greater than 15% in a population.

5. The method of claim 1, wherein said first fragmentation step comprises fragmenting by a restriction enzyme.

6. The method of claim 5, wherein the restriction enzymes includes at least one variable nucleotide position in the enzyme recognition site.

7. A method of claim 5, wherein said restriction enzyme is selected from the group consisting of Nsp I and Sty I.

8. The method of claim 1 wherein different adaptor sequences are ligated to the different overhangs so that the ends are not self complementary.

9. A method for determining the genotype of more than 400,000 different single nucleotide polymorphisms in a nucleic acid sample comprising:
(a.) obtaining a nucleic acid sample and dividing the sample into a first aliquot and a second aliquot;
(b.) fragmenting said first aliquot and said second aliquot in a first fragmentation step to produce fragments, wherein said first aliquot is fragmented with a first restriction enzyme and said second aliquot is fragmented with a second restriction enzyme;
(c.) ligating an adaptor to at least some of the fragments from step (b) to generate adapter-ligated fragments;
(d.) amplifying at least some of the adapter-ligated fragments from step (c) to obtain amplified fragments;
(e.) fragmenting the amplified fragments of step (d) in a second fragmentation step to produce sub-fragments;
(f.) labeling the sub-fragments;
(g.) hybridizing the labeled sub-fragments from step (f) to a first and a second array of probes, wherein the labeled sub-fragments from said first aliquot are hybridized to said first array and the labeled sub-fragments from said second array are hybridized to said second array and wherein said first array comprises probes to interrogate the genotype of a first collection of more than 200,000 different single nucleotide polymorphisms and said second array comprises probes to interrogate the genotype of a second collection of more than 200,000 different single nucleotide polymorphisms and wherein the polymorphisms in the first collection are all different from the polymorphisms in the second collection; and
(h.) detecting a hybridization pattern; and
(i.) analyzing the hybridization pattern to determime the genotype of at least 400,000 different single nucleotide polymorphisms in said sample.

10. The method of claim 9 wherein the first restriction enzyme is Nsp I and the second restriction enzyme is Sty I.

11. The method of claim 1, wherein said amplification is done with a thermal stable polymerase.

12. The method of claim 1, wherein said thermal stable polymerase is a Taq polymerase with a N-terminal mutation that inactivates the 5′ exonuclease activity of Taq.

13. The method of claim 1, wherein said labeling is done with Terminal Deoxynucleotidyl Transferase.

14. The method of claim 1 wherein uracil is incorporated into the PCR amplification and the fragmentation is by incubation with a uracil DNA glycosidase and an AP endonuclease.

15. A kit comprising SEQ ID NOS 1074931 and 1074933.

16. The kit of claim 15 further comprising SEQ ID NOS: 1074932 and 1074934.

17. The kit of claim 15 wherein SEQ ID NOS: 1074931 and 1074933 are included as a mixture in a single tube.

18. The kit of claim 16 wherein SEQ ID NOS: 1074932 and 1074934 are included as a mixture in a single tube.

19. The kit of claim 16 further comprising a ligase and a ligase buffer.

20. The kit of claim 19 further comprising dNTPs and a buffer for PCR.

21. The kit of claim 20 further comprising a DNA polymerase.

22. The kit of claim 21 wherein the DNA polymerase is a thermal stable DNA polymerase.

23. The kit of claim 21 wherein the DNA polymerase is a Taq DNA polymerase with an N-terminal mutation that inactivates the 5′ exonuclease activity of Taq.

24. The kit of claim 21 wherein the DNA polymerase is selected from the group consisting of PLATINIM Taq, TITANIUM Taq and AMPLITAQ GOLD.

25. The kit of claim 21 wherein the DNA polymerase activity includes a heat inactivatable activity that inhibits the polymerase activity.

26. The kit of claim 20 further comprising Betaine.

27. The kit of claim 20 further comprising an array comprising a plurality of 25 nucleotide probes wherein each probe is 25 nucleotides of a sequence from SEQ ID NO: 1-1,074,930 and wherein there are at least 800,000 different probes each corresponding to a different sequence from SEQ ID NO: 1-1,074,930.

28. An array of probes for interrogating the genotype of more than 400,000 different human single nucleotide polymorphisms, that array comprising at least 400,000 different probe sets, wherein a probe set comprises at least a first and a second probe, wherein said first probe is at least 20 bases and is perfectly complementary to a first allele of a human single nucleotide polymorphism and said second probe is at least 20 bases and is perfectly complementary to a second allele of said human single nucleotide polymorphism; and wherein each probe on the array is 20 contiguous bases of a sequence from SEQ ID NO: 1-1,074,930 or its complement.

29. A collection of probes for interrogating the genotype of a plurality of at least 400,000 human single nucleotide polymorphisms distributed throughout the human genome; said collection of probes comprising a probe comprising at least 17 contiguous bases from each of at least 400,000 sequences from SEQ ID NO: 1-1,074,930 or the complements of SEQ ID NO: 1-1,074,930.

30. The collection of probes of claim 29 wherein each different probe sequence is attached to a solid support in a known or determinable location.

31. The collection of probes of claim 30 wherein the solid support is selected from the group consisting of a bead and a glass substrate.

32. The collection of probes of claim 29 wherein said collection of probes comprises a probe comprising at least 17 contiguous bases from each of at least 800,000 sequences from SEQ ID NO: 1-1,074,930 or the complements of SEQ ID NO: 1-1,074,930.

33. The array of claim 28 wherein each single nucleotide polymorphism39 is interrogated by at least 6 perfect match probes.

34. The array of claim 28 wherein the array comprises two distinct solid supports, each having probe sets to interrogate each of at least 200,000 human single nucleotide polymorphisms.

35. The array of claim 28 wherein the array comprises a first array and a second array, wherein the first array interrogates single nucleotide polymorphisms that are on fragments that are 200 to 2000 basepairs when the genome is digested with a first enzyme and the second array interrogates single nucleotide polymorphisms that are on fragments that are 200 to 2000 basepairs when the genome is digested with a second enzyme.

36. The array of claim 35 wherein the first enzyme is NspI and the second enzyme is StyI.

The application's sequence listing, which the Patent Office published only in electronic form, follows.

SEQUENCE LISTING (1074934 sequences)

SEQ ID NO: 1 - DNA, 33 bp, Homo sapien
gtgacaaggataccagaaagtgcacaggtctga

SEQ ID NO: 2 - DNA, 33 bp, Homo sapien
gtgacaaggataccaggaagtgcacaggtctga

SEQ ID NO: 3 - DNA, 33 bp, Homo sapien
acgcaaactaaacaacaacaatgaaacagaaca

SEQ ID NO: 4 - DNA, 33 bp, Homo sapien
acgcaaactaaacaaccacaatgaaacagaaca

SEQ ID NO: 5 - DNA, 33 bp, Homo sapien
catatttcacctccgccaccataatcatcgcta

SEQ ID NO: 6 - DNA, 33 bp, Homo sapien
catatttcacctccgctaccataatcatcgcta

SEQ ID NO: 7 - DNA, 33 bp, Homo sapien
tgtattctctgtcaaacgtttctcttgctgtgc

SEQ ID NO: 8 - DNA, 33 bp, Homo sapien
tgtattctctgtcaaatgtttctcttgctgtgc

SEQ ID NO: 9 - DNA, 33 bp, Homo sapien; identical to SEQ ID NO: 7

SEQ ID NO: 10 - DNA, 33 bp, Homo sapien; identical to SEQ ID NO: 8

SEQ ID NO: 11 - DNA, 33 bp, Homo sapien
aaatacagagatcatacaaaggaatagaggaag

SEQ ID NO: 12 - DNA, 33 bp, Homo sapien
aaatacagagatcatataaaggaatagaggaag

SEQ ID NO: 13 - DNA, 33 bp, Homo sapien
acgtcaccactaaagaactggaagtcatgaaaa

SEQ ID NO: 14 - DNA, 33 bp, Homo sapien
acgtcaccactaaagatctggaagtcatgaaaa

SEQ ID NO: 15 - DNA, 33 bp, Homo sapien
actgttttaagctttaagggccatgcagtttct

SEQ ID NO: 16 - DNA, 33 bp, Homo sapien
actgttttaagctttacgggccatgcagtttct

SEQ ID NO: 17 - DNA, 33 bp, Homo sapien
ctctcacctgctgcacaagccctagtgcttcac

SEQ ID NO: 18 - DNA, 33 bp, Homo sapien
ctctcacctgctgcacgagccctagtgcttcac

SEQ ID NO: 19 - DNA, 33 bp, Homo sapien
gctgtgagagagaacaatgtcccaattttgccc

SEQ ID NO: 20 - DNA, 33 bp, Homo sapien
gctgtgagagagaacagtgtcccaattttgccc

SEQ ID NO: 21 - DNA, 33 bp, Homo sapien
tgacttcactaactcaaagagacacagtcattc

SEQ ID NO: 22 - DNA, 33 bp, Homo sapien
tgacttcactaactcagagagacacagtcattc

SEQ ID NO: 23 - DNA, 33 bp, Homo sapien
ctcgatttgtgttcaacatatttcatttgtacc

SEQ ID NO: 24 - DNA, 33 bp, Homo sapien
ctcgatttgtgttcaatatatttcatttgtacc

SEQ ID NO: 25 - DNA, 33 bp, Homo sapien
cctctgtaagagtttcgaatctccccatagcaa

SEQ ID NO: 26 - DNA, 33 bp, Homo sapien
cctctgtaagagtttctaatctccccatagcaa

SEQ ID NO: 27 - DNA, 33 bp, Homo sapien; identical to SEQ ID NO: 25

SEQ ID NO: 28 - DNA, 33 bp, Homo sapien; identical to SEQ ID NO: 26

SEQ ID NO: 29 - DNA, 33 bp, Homo sapien
ttggattgggctttaaagtatgactaggagctt

SEQ ID NO: 30 - DNA, 33 bp, Homo sapien
ttggattgggctttaaggtatgactaggagctt

SEQ ID NO: 31 - DNA, 33 bp, Homo sapien
ccagtgctttcaaccacactcacttttcactgt

SEQ ID NO: 32 - DNA, 33 bp, Homo sapien
ccagtgctttcaaccatactcacttttcactgt

SEQ ID NO: 33 - DNA, 33 bp, Homo sapien
aggtaatctgcccggaacagaaatgggcgtctc

SEQ ID NO: 34 - DNA, 33 bp, Homo sapien
aggtaatctgcccggagcagaaatgggcgtctc

SEQ ID NO: 35 - DNA, 33 bp, Homo sapien
agcaggccgtagtcccaagacctcgaatgtgac

SEQ ID NO: 36 - DNA, 33 bp, Homo sapien
agcaggccgtagtcccgagacctcgaatgtgac

SEQ ID NO: 37 - DNA, 33 bp, Homo sapien
cattatgggctcttccgctgggagatgcgagaa

SEQ ID NO: 38 - DNA, 33 bp, Homo sapien
cattatgggctcttcctctgggagatgcgagaa

SEQ ID NO: 39 - DNA, 33 bp, Homo sapien
tggcctatctgcaaacaattcaaatctgctgtt

SEQ ID NO: 40 - DNA, 33 bp, Homo sapien
tggcctatctgcaaaccattcaaatctgctgtt

SEQ ID NO: 41 - DNA, 33 bp, Homo sapien
gcagaaaagacccaaacaaagtggcaccaagga

SEQ ID NO: 42 - DNA, 33 bp, Homo sapien
gcagaaaagacccaaataaagtggcaccaagga

SEQ ID NO: 43 - DNA, 33 bp, Homo sapien
aggaactcaaagtggacgaggaaagtgagtgct

SEQ ID NO: 44 - DNA, 33 bp, Homo sapien
aggaactcaaagtggatgaggaaagtgagtgct

SEQ ID NO: 45 - DNA, 33 bp, Homo sapien
gcacatgtgtgtaatacgtgcatgcgtgagtgt

SEQ ID NO: 46 - DNA, 33 bp, Homo sapien
gcacatgtgtgtaatatgtgcatgcgtgagtgt

SEQ ID NO: 47 - DNA, 33 bp, Homo sapien
acctctatgttataggcagattcaaaatgatcc

SEQ ID NO: 48 - DNA, 33 bp, Homo sapien
acctctatgttataggtagattcaaaatgatcc

SEQ ID NO: 49 - DNA, 33 bp, Homo sapien
agtaaatatctccgaggctcccccaaaattaaa

SEQ ID NO: 50 - DNA, 33 bp, Homo sapien
agtaaatatctccgagtctcccccaaaattaaa

SEQ ID NO: 51 - DNA, 33 bp, Homo sapien
cagggattcgggacccagagtccatgtcgagaa

SEQ ID NO: 52 - DNA, 33 bp, Homo sapien
cagggattcgggacccggagtccatgtcgagaa

SEQ ID NO: 53 - DNA, 33 bp, Homo sapien
ggatagttcaacgtacaaaaatcaatcaatgtt

SEQ ID NO: 54 - DNA, 33 bp, Homo sapien
ggatagttcaacgtacgaaaatcaatcaatgtt

SEQ ID NO: 55 - DNA, 33 bp, Homo sapien
ctgaacagatgaggaagtggacggaggatttag

SEQ ID NO: 56 - DNA, 33 bp, Homo sapien
ctgaacagatgaggaattggacggaggatttag

SEQ ID NO: 57 - DNA, 33 bp, Homo sapien
tcccagaagttattgcacgatttctgcttgggt

SEQ ID NO: 58 - DNA, 33 bp, Homo sapien
tcccagaagttattgcgcgatttctgcttgggt

SEQ ID NO: 59 - DNA, 33 bp, Homo sapien
gattcctaagggactcacaaaggtccaactgcc

SEQ ID NO: 60 - DNA, 33 bp, Homo sapien
gattcctaagggactcgcaaaggtccaactgcc

SEQ ID NO: 61 - DNA, 33 bp, Homo sapien
tgaaataaaattgtcaaaaggaattgtagttaa

SEQ ID NO: 62 - DNA, 33 bp, Homo sapien
tgaaataaaattgtcagaaggaattgtagttaa

SEQ ID NO: 63 - DNA, 33 bp, Homo sapien
tgaataatgaaaataaaccatctcgtggcaaaa

SEQ ID NO: 64 - DNA, 33 bp, Homo sapien
tgaataatgaaaataagccatctcgtggcaaaa

SEQ ID NO: 65 - DNA, 33 bp, Homo sapien
ggcatagctggggaataacacactcgcgttgac

SEQ ID NO: 66 - DNA, 33 bp, Homo sapien
ggcatagctggggaatgacacactcgcgttgac

SEQ ID NO: 67 - DNA, 33 bp, Homo sapien
acaggagagtgaatgaacaaaaattgttggggg

SEQ ID NO: 68 - DNA, 33 bp, Homo sapien
acaggagagtgaatgagcaaaaattgttggggg

SEQ ID NO: 69 - DNA, 33 bp, Homo sapien
tggaagacaggtgagcagatgtacagatgtgca

SEQ ID NO: 70 - DNA, 33 bp, Homo sapien
tggaagacaggtgagcggatgtacagatgtgca

SEQ ID NO: 71 - DNA, 33 bp, Homo sapien
aacttcccctactgaaaggcataaaaaggttaa

SEQ ID NO: 72 - DNA, 33 bp, Homo sapien
aacttcccctactgaatggcataaaaaggttaa

SEQ ID NO: 73 - DNA, 33 bp, Homo sapien; identical to SEQ ID NO: 71

SEQ ID NO: 74 - DNA, 33 bp, Homo sapien; identical to SEQ ID NO: 72

SEQ ID NO: 75 - DNA, 33 bp, Homo sapien
caagcccaggagaccaccatgagttccagaaaa

SEQ ID NO: 76 - DNA, 33 bp, Homo sapien
caagcccaggagaccatcatgagttccagaaaa

SEQ ID NO: 77 - DNA, 33 bp, Homo sapien
aaaaatacacatggacaccactgagacacatac

SEQ ID NO: 78 - DNA, 33 bp, Homo sapien
aaaaatacacatggacgccactgagacacatac

SEQ ID NO: 79 - DNA, 33 bp, Homo sapien
acgctgaaacttcatcaccaacgcgccaggagg

SEQ ID NO: 80 - DNA, 33 bp, Homo sapien
acgctgaaacttcatcgccaacgcgccaggagg

SEQ ID NO: 81 - DNA, 33 bp, Homo sapien
tgtcgcccaggcggaacgcactttgataatcac

SEQ ID NO: 82 - DNA, 33 bp, Homo sapien
tgtcgcccaggcggaatgcactttgataatcac

SEQ ID NO: 83 - DNA, 33 bp, Homo sapien
ttttccttgtttgggccgaagctctccccggct

SEQ ID NO: 84 - DNA, 33 bp, Homo sapien
ttttccttgtttgggctgaagctctccccggct

SEQ ID NO: 85 - DNA, 33 bp, Homo sapien
ctcctctttagcacgcagatggctaggcagtgt

SEQ ID NO: 86 - DNA, 33 bp, Homo sapien
ctcctctttagcacgcggatggctaggcagtgt

SEQ ID NO: 87 - DNA, 33 bp, Homo sapien
acctggtattctatcacatttctgcttaacaag

SEQ ID NO: 88 - DNA, 33 bp, Homo sapien
acctggtattctatcatatttctgcttaacaag

SEQ ID NO: 89 - DNA, 33 bp, Homo sapien
cctgccttggtatcccaaagtactgggattaac

SEQ ID NO: 90 - DNA, 33 bp, Homo sapien
cctgccttggtatcccgaagtactgggattaac

SEQ ID NO: 91 - DNA, 33 bp, Homo sapien
ttaacgtccacaaatcacagtcgctaggattta

SEQ ID NO: 92 - DNA, 33 bp, Homo sapien
ttaacgtccacaaatcgcagtcgctaggattta

SEQ ID NO: 93 - DNA, 33 bp, Homo sapien
gttaatgtgttaagcaataagagtgccaggaca

SEQ ID NO: 94 - DNA, 33 bp, Homo sapien
gttaatgtgttaagcagtaagagtgccaggaca

SEQ ID NO: 95 - DNA, 33 bp, Homo sapien
gagctcactcacccatcagacgctggcaactgg

SEQ ID NO: 96 - DNA, 33 bp, Homo sapien
gagctcactcacccattagacgctggcaactgg

SEQ ID NO: 97 - DNA, 33 bp, Homo sapien
cggaggcttgtcaggtaaattaggagatgatta

SEQ ID NO: 98 - DNA, 33 bp, Homo sapien
cggaggcttgtcaggtcaattaggagatgatta

SEQ ID NO: 99 - DNA, 33 bp, Homo sapien
aacaaatatttaccaaatacttactttgagcaa

SEQ ID NO: 100 - DNA, 33 bp, Homo sapien
aacaaatatttaccaagtacttactttgagcaa

SEQ ID NO: 101 - DNA, 33 bp, Homo sapien
tttgcatcgagggtacagcaggccttatacttt

SEQ ID NO: 102 - DNA, 33 bp, Homo sapien
tttgcatcgagggtacggcaggccttatacttt

SEQ ID NO: 103 - DNA, 33 bp, Homo sapien
tcaccaggtcttatcaatcgtcaacctggtcca

SEQ ID NO: 104 - DNA, 33 bp, Homo sapien
tcaccaggtcttatcagtcgtcaacctggtcca

SEQ ID NO: 105 - DNA, 33 bp, Homo sapien
agggctccagaaatgacgcggacaggtgaagtg

SEQ ID NO: 106 - DNA, 33 bp, Homo sapien
agggctccagaaatgatgcggacaggtgaagtg

SEQ ID NO: 107 - DNA, 33 bp, Homo sapien
gtacacgattcaacccagaaatcaggtgtgtat

SEQ ID NO: 108 - DNA, 33 bp, Homo sapien
gtacacgattcaacccggaaatcaggtgtgtat

SEQ ID NO: 109 - DNA, 33 bp, Homo sapien
tgtagacgccaggaacacggttgtacggacttc

SEQ ID NO: 110 - DNA, 33 bp, Homo sapien
tgtagacgccaggaacgcggttgtacggacttc

SEQ ID NO: 111 - DNA, 33 bp, Homo sapien
cacctgatctcaggacaattcagtgaggaggac

SEQ ID NO: 112 - DNA, 33 bp, Homo sapien
cacctgatctcaggacgattcagtgaggaggac

SEQ ID NO: 113 - DNA, 33 bp, Homo sapien
tttgtctcagtttcccagcgcgcagcccctctg

SEQ ID NO: 114 - DNA, 33 bp, Homo sapien
tttgtctcagtttcccggcgcgcagcccctctg

SEQ ID NO: 115 - DNA, 33 bp, Homo sapien
atagatctttctatacacacaccctattggttt

SEQ ID NO: 116 - DNA, 33 bp, Homo sapien
atagatctttctatacgcacaccctattggttt

SEQ ID NO: 117 - DNA, 33 bp, Homo sapien
ccactctttcatcctcacttcaccaacaaagag

SEQ ID NO: 118 - DNA, 33 bp, Homo sapien
ccactctttcatcctcgcttcaccaacaaagag

SEQ ID NO: 119 - DNA, 33 bp, Homo sapien
agagcaggtgttacaacgtagcttctgtaaaca

SEQ ID NO: 120 - DNA, 33 bp, Homo sapien
agagcaggtgttacaatgtagcttctgtaaaca

SEQ ID NO: 121 - DNA, 33 bp, Homo sapien
gaagaagccctttcgccgcagtaacggaaatac

SEQ ID NO: 122 - DNA, 33 bp, Homo sapien
gaagaagccctttcgctgcagtaacggaaatac

SEQ ID NO: 123 - DNA, 33 bp, Homo sapien
gggatgtgggatctggaaacgcggctgtctccg

SEQ ID NO: 124 - DNA, 33 bp, Homo sapien
gggatgtgggatctgggaacgcggctgtctccg

SEQ ID NO: 125 - DNA, 33 bp, Homo sapien
taggtgtgagtaaaaacggacgattcacagaac

SEQ ID NO: 126 - DNA, 33 bp, Homo sapien
taggtgtgagtaaaaatggacgattcacagaac

SEQ ID NO: 127 - DNA, 33 bp, Homo sapien
tcagggtctctttcacagactgcggggaaggca

SEQ ID NO: 128 - DNA, 33 bp, Homo sapien
tcagggtctctttcacggactgcggggaaggca

SEQ ID NO: 129 - DNA, 33 bp, Homo sapien
ccctgccaagctcaggaagaaaagtggaccctg

SEQ ID NO: 130 - DNA, 33 bp, Homo sapien
ccctgccaagctcagggagaaaagtggaccctg

SEQ ID NO: 131 - DNA, 33 bp, Homo sapien
tgagcctgcttatttacgaaaatgaagaaccag

SEQ ID NO: 132 - DNA, 33 bp, Homo sapien
tgagcctgcttatttatgaaaatgaagaaccag

SEQ ID NO: 133 - DNA, 33 bp, Homo sapien
tgctggtggaatagcacgggccattggcatttg

SEQ ID NO: 134 - DNA, 33 bp, Homo sapien
tgctggtggaatagcatgggccattggcatttg

SEQ ID NO: 135 - DNA, 33 bp, Homo sapien
attacttctggttaaaatcgcaaataatcagta

SEQ ID NO: 136 - DNA, 33 bp, Homo sapien
attacttctggttaaagtcgcaaataatcagta

SEQ ID NO: 137 - DNA, 33 bp, Homo sapien
gaaggtagcgctttgtaaatggcactggttttg

SEQ ID NO: 138 - DNA, 33 bp, Homo sapien
gaaggtagcgctttgtcaatggcactggttttg

SEQ ID NO: 139 - DNA, 33 bp, Homo sapien
ttgtcatcaacagcgccaaagtaacagcaaaga

SEQ ID NO: 140 - DNA, 33 bp, Homo sapien
ttgtcatcaacagcgctaaagtaacagcaaaga

SEQ ID NO: 141 - DNA, 33 bp, Homo sapien
gcctttatgcaaagtgaacttggtctcctgggg

SEQ ID NO: 142 - DNA, 33 bp, Homo sapien
gcctttatgcaaagtggacttggtctcctgggg

SEQ ID NO: 143 - DNA, 33 bp, Homo sapien
gccttgctgtctggaacggatgcctgggtgtct

SEQ ID NO: 144 - DNA, 33 bp, Homo sapien
gccttgctgtctggaatggatgcctgggtgtct

SEQ ID NO: 145 - DNA, 33 bp, Homo sapien
gagaacaggctttgccagaccccaggacccacg

SEQ ID NO: 146 - DNA, 33 bp, Homo sapien
gagaacaggctttgccggaccccaggacccacg

SEQ ID NO: 147 - DNA, 33 bp, Homo sapien
gagcgggcagagcttacggagagttcccgatgg

SEQ ID NO: 148 - DNA, 33 bp, Homo sapien
gagcgggcagagcttatggagagttcccgatgg

SEQ ID NO: 149 - DNA, 33 bp, Homo sapien
tgaacactgaacactccgactccgcggccaggt

SEQ ID NO: 150 - DNA, 33 bp, Homo sapien
tgaacactgaacactctgactccgcggccaggt

SEQ ID NO: 151 - DNA, 33 bp, Homo sapien
gtgtccagcacatggaagactcaaggcagcagg

SEQ ID NO: 152 - DNA, 33 bp, Homo sapien
gtgtccagcacatggaggactcaaggcagcagg

SEQ ID NO: 153 - DNA, 33 bp, Homo sapien
gttccttcttgtccccacttctttgtgtccaca

SEQ ID NO: 154 - DNA, 33 bp, Homo sapien
gttccttcttgtccccccttctttgtgtccaca

SEQ ID NO: 155 - DNA, 33 bp, Homo sapien
cttttcttctcaacgaaatgcaaatccttattt

SEQ ID NO: 156 - DNA, 33 bp, Homo sapien
cttttcttctcaacgacatgcaaatccttattt

SEQ ID NO: 157 - DNA, 33 bp, Homo sapien
acgactgccgttcccccagatccaatgtccaca

SEQ ID NO: 158 - DNA, 33 bp, Homo sapien
acgactgccgttccccgagatccaatgtccaca

SEQ ID NO: 159 - DNA, 33 bp, Homo sapien
ttgagctcttatgggagcgagaagtcaccgtgg

SEQ ID NO: 160 - DNA, 33 bp, Homo sapien
ttgagctcttatgggatcgagaagtcaccgtgg

SEQ ID NO: 161 - DNA, 33 bp, Homo sapien
taggatgagatgtggccacttttagcaaacaac

SEQ ID NO: 162 - DNA, 33 bp, Homo sapien
taggatgagatgtggctacttttagcaaacaac

SEQ ID NO: 163 - DNA, 33 bp, Homo sapien
tgtgctggagaatttacggctggacactcacat

SEQ ID NO: 164 - DNA, 33 bp, Homo sapien
tgtgctggagaatttatggctggacactcacat

SEQ ID NO: 165 - DNA, 33 bp, Homo sapien
atcaaaatcacgaggaactatcacttcacaccc

SEQ ID NO: 166 - DNA, 33 bp, Homo sapien
atcaaaatcacgaggagctatcacttcacaccc

SEQ ID NO: 167 - DNA, 33 bp, Homo sapien
ctcatccgctgctggccatcgcagttgtttgta

SEQ ID NO: 168 - DNA, 33 bp, Homo sapien
ctcatccgctgctggctatcgcagttgtttgta

SEQ ID NO: 169 - DNA, 33 bp, Homo sapien
ctcaagagatgccaatcaaatgcgttggactct

SEQ ID NO: 170 - DNA, 33 bp, Homo sapien
ctcaagagatgccaatgaaatgcgttggactct

SEQ ID NO: 171 - DNA, 33 bp, Homo sapien
ggtgttatcgactttacacttgctttttttgtt

SEQ ID NO: 172 - DNA, 33 bp, Homo sapien
ggtgttatcgactttatacttgctttttttgtt

SEQ ID NO: 173 - DNA, 33 bp, Homo sapien
acctgctactttttcccgaacaattcatggtaa

SEQ ID NO: 174 - DNA, 33 bp, Homo sapien
acctgctactttttcctgaacaattcatggtaa

SEQ ID NO: 175 - DNA, 33 bp, Homo sapien
aacatccccacaaacaccacgcccaggtaacgt

SEQ ID NO: 176 - DNA, 33 bp, Homo sapien
aacatccccacaaacatcacgcccaggtaacgt

SEQ ID NO: 177 - DNA, 33 bp, Homo sapien
cagttttattgcgttcaaaaccaagctcgtgcc

SEQ ID NO: 178 - DNA, 33 bp, Homo sapien
cagttttattgcgttcgaaaccaagctcgtgcc

SEQ ID NO: 179 - DNA, 33 bp, Homo sapien
atttcatttcctttggaagtatatgcaggagtg

SEQ ID NO: 180 - DNA, 33 bp, Homo sapien
atttcatttcctttgggagtatatgcaggagtg

SEQ ID NO: 181 - DNA, 33 bp, Homo sapien
ttagaagcaagaagggaaagcttagtgccaggt

SEQ ID NO: 182 - DNA, 33 bp, Homo sapien
ttagaagcaagaaggggaagcttagtgccaggt

SEQ ID NO: 183 - DNA, 33 bp, Homo sapien
agccagcacacaaccaagttgccaagaacttta

SEQ ID NO: 184 - DNA, 33 bp, Homo sapien
agccagcacacaaccaggttgccaagaacttta

SEQ ID NO: 185 - DNA, 33 bp, Homo sapien
gagaagaggcgaacccacagctgttgccctgca

SEQ ID NO: 186 - DNA, 33 bp, Homo sapien
gagaagaggcgaacccgcagctgttgccctgca

SEQ ID NO: 187 - DNA, 33 bp, Homo sapien
caggcttcaccaactacaccaggagccctgctg

SEQ ID NO: 188 - DNA, 33 bp, Homo sapien
caggcttcaccaactataccaggagccctgctg

SEQ ID NO: 189 - DNA, 33 bp, Homo sapien
caatgaagtcacgcccaatgggatcgtggtccc

SEQ ID NO: 190 - DNA, 33 bp, Homo sapien
caatgaagtcacgcccgatgggatcgtggtccc

SEQ ID NO: 191 - DNA, 33 bp, Homo sapien
actggtgatgtactcaaactcaggtggccacgg

SEQ ID NO: 192 - DNA, 33 bp, Homo sapien
actggtgatgtactcagactcaggtggccacgg

SEQ ID NO: 193 - DNA, 33 bp, Homo sapien
gggcctacaagttcaaagacctcatcgaagaga

SEQ ID NO: 194 - DNA, 33 bp, Homo sapien
gggcctacaagttcaaggacctcatcgaagaga

SEQ ID NO: 195 - DNA, 33 bp, Homo sapien
gactcatcaaaagtcactataaacaaactctca

SEQ ID NO: 196 - DNA, 33 bp, Homo sapien
gactcatcaaaagtcagtataaacaaactctca

SEQ ID NO: 197 - DNA, 33 bp, Homo sapien
ctcggtcaggagtaacaaacaaaaggtctctca

SEQ ID NO: 198 - DNA, 33 bp, Homo sapien
ctcggtcaggagtaaccaacaaaaggtctctca

SEQ ID NO: 199 - DNA, 33 bp, Homo sapien
tggaagcaagtcgggactaaatgtttctgaaat

SEQ ID NO: 200 - DNA, 33 bp, Homo sapien
tggaagcaagtcgggattaaatgtttctgaaat

SEQ ID NO: 201 - DNA, 33 bp, Homo sapien
gtgggaccagtgcttacgaagagggcccagcag

SEQ ID NO: 202 - DNA, 33 bp, Homo sapien
gtgggaccagtgcttatgaagagggcccagcag

SEQ ID NO: 203 - DNA, 33 bp, Homo sapien
ttctccaatgtttttcacaggaagtcttatagt

SEQ ID NO: 204 - DNA, 33 bp, Homo sapien
ttctccaatgtttttcgcaggaagtcttatagt

SEQ ID NO: 205 - DNA, 33 bp, Homo sapien
agctgattggaacctaaacgagagaaccaaatg

SEQ ID NO: 206 - DNA, 33 bp, Homo sapien
agctgattggaacctatacgagagaaccaaatg

SEQ ID NO: 207 - DNA, 33 bp, Homo sapien
ggtcagtgtcatgagacgggtgatggcagactg

SEQ ID NO: 208 - DNA, 33 bp, Homo sapien
ggtcagtgtcatgagatgggtgatggcagactg

SEQ ID NO: 209 - DNA, 33 bp, Homo sapien
tgcaaacaatgattctaacatcagtaaagagcc

SEQ ID NO: 210 - DNA, 33 bp, Homo sapien
tgcaaacaatgattctgacatcagtaaagagcc

SEQ ID NO: 211 - DNA, 33 bp, Homo sapien
cctgcggctttcagacagggagtacaatccaaa

SEQ ID NO: 212 - DNA, 33 bp, Homo sapien
cctgcggctttcagacggggagtacaatccaaa

SEQ ID NO: 213 - DNA, 33 bp, Homo sapien
tctgactctaagaacaggcgacaactcgggtcc

SEQ ID NO: 214 - DNA, 33 bp, Homo sapien
tctgactctaagaacatgcgacaactcgggtcc

SEQ ID NO: 215 - DNA, 33 bp, Homo sapien
ctgagggagggcccaacgtctggatttgtaaca

SEQ ID NO: 216 - DNA, 33 bp, Homo sapien
ctgagggagggcccaatgtctggatttgtaaca

SEQ ID NO: 217 - DNA, 33 bp, Homo sapien
gctgaaataccaacaccggtcctgcggccttgg

SEQ ID NO: 218 - DNA, 33 bp, Homo sapien
gctgaaataccaacactggtcctgcggccttgg

SEQ ID NO: 219 - DNA, 33 bp, Homo sapien
cttcctcagaagctcacgattcggtgtgacttt

SEQ ID NO: 220 - DNA, 33 bp, Homo sapien
cttcctcagaagctcatgattcggtgtgacttt

SEQ ID NO: 221 - DNA, 33 bp, Homo sapien
gtgtaatgggcaagacaataattataccaatgg

SEQ ID NO: 222 - DNA, 33 bp, Homo sapien
gtgtaatgggcaagacgataattataccaatgg

SEQ ID NO: 223 - DNA, 33 bp, Homo sapien
cactggttcacgtgtcaaagtgcacgcgatctc

SEQ ID NO: 224 - DNA, 33 bp, Homo sapien
cactggttcacgtgtccaagtgcacgcgatctc

SEQ ID NO: 225 - DNA, 33 bp, Homo sapien
ggcatgattctatttacgtaaaattcagagagg

SEQ ID NO: 226 - DNA, 33 bp, Homo sapien
ggcatgattctatttatgtaaaattcagagagg

SEQ ID NO: 227 - DNA, 33 bp, Homo sapien
cgggatgctatgtatcaaaggtgacaagtcaca

SEQ ID NO: 228 - DNA, 33 bp, Homo sapien
cgggatgctatgtatcgaaggtgacaagtcaca

SEQ ID NO: 229 - DNA, 33 bp, Homo sapien
gtgcacttttgttaagactgtctctgtaactcc

SEQ ID NO: 230 - DNA, 33 bp, Homo sapien
gtgcacttttgttaagcctgtctctgtaactcc

SEQ ID NO: 231 - DNA, 33 bp, Homo sapien
aacagaaactgtacgccgagcttgctgagatct

SEQ ID NO: 232 - DNA, 33 bp, Homo sapien
aacagaaactgtacgctgagcttgctgagatct

SEQ ID NO: 233 - DNA, 33 bp, Homo sapien
ggctgcaggatgggaacgggtgtgagtgagtgc

SEQ ID NO: 234 - DNA, 33 bp, Homo sapien
ggctgcaggatgggaatgggtgtgagtgagtgc

SEQ ID NO: 235 - DNA, 33 bp, Homo sapien
ccctgcctttcaaggacggcaaagacgtttccg

SEQ ID NO: 236 - DNA, 33 bp, Homo sapien
ccctgcctttcaaggatggcaaagacgtttccg

SEQ ID NO: 237 - DNA, 33 bp, Homo sapien
acctagcttcgtgaagcctcagtttccttgtct

SEQ ID NO: 238 - DNA, 33 bp, Homo sapien
acctagcttcgtgaaggctcagtttccttgtct

SEQ ID NO: 239 - DNA, 33 bp, Homo sapien
ccatgccctattagtacaagctccatttattac

SEQ ID NO: 240 - DNA, 33 bp, Homo sapien
ccatgccctattagtataagctccatttattac

SEQ ID NO: 241 - DNA, 33 bp, Homo sapien
cagagattaaacctaccccaacaatcgccctag

SEQ ID NO: 242 - DNA, 33 bp, Homo sapien
cagagattaaacctacgccaacaatcgccctag

SEQ ID NO: 243 - DNA, 33 bp, Homo sapien
ttctgcaatgtaaagcaacactatatcaaatca

SEQ ID NO: 244 - DNA, 33 bp, Homo sapien
ttctgcaatgtaaagcgacactatatcaaatca

SEQ ID NO: 245 - DNA, 33 bp, Homo sapien
aggggctgaccaggccacggttgctggtcccag

SEQ ID NO: 246 - DNA, 33 bp, Homo sapien
aggggctgaccaggccgcggttgctggtcccag

SEQ ID NO: 247 - DNA, 33 bp, Homo sapien
gccaggacttgctaagacggattttcaggccag

SEQ ID NO: 248 - DNA, 33 bp, Homo sapien
gccaggacttgctaaggcggattttcaggccag

SEQ ID NO: 249 - DNA, 33 bp, Homo sapien
tcactcaaaatgtggcaagtgagaccgtgccca

SEQ ID NO: 250 - DNA, 33 bp, Homo sapien
tcactcaaaatgtggcgagtgagaccgtgccca

SEQ ID NO: 251 - DNA, 33 bp, Homo sapien
gcaagatgaagaagacagcattcgcgcagaaat

SEQ ID NO: 252 - DNA, 33 bp, Homo sapien
gcaagatgaagaagacggcattcgcgcagaaat

SEQ ID NO: 253 - DNA, 33 bp, Homo sapien
aggtcggggggctgcactccagagaagagatca

SEQ ID NO: 254 - DNA, 33 bp, Homo sapien
aggtcggggggctgcattccagagaagagatca

SEQ ID NO: 255 - DNA, 33 bp, Homo sapien
agtcactctgttttcaagccaaaccggtgcttg

SEQ ID NO: 256 - DNA, 33 bp, Homo sapien
agtcactctgttttcatgccaaaccggtgcttg

SEQ ID NO: 257 - DNA, 33 bp, Homo sapien
ggtgaccccatttctaactacctctttaaagac

SEQ ID NO: 258 - DNA, 33 bp, Homo sapien
ggtgaccccatttctatctacctctttaaagac

SEQ ID NO: 259 - DNA, 33 bp, Homo sapien
ggtccctttctgtgcgcagtttcctcctttcca

SEQ ID NO: 260 - DNA, 33 bp, Homo sapien
ggtccctttctgtgcgtagtttcctcctttcca

SEQ ID NO: 261 - DNA, 33 bp, Homo sapien
cgcatcctctccagcccatctaacccttacgat

SEQ ID NO: 262 - DNA, 33 bp, Homo sapien
cgcatcctctccagcctatctaacccttacgat

SEQ ID NO: 263 - DNA, 33 bp, Homo sapien
aatgatggcggtgagcagatactcttcagggca

SEQ ID NO: 264 - DNA, 33 bp, Homo sapien
aatgatggcggtgagcggatactcttcagggca

SEQ ID NO: 265 - DNA, 33 bp, Homo sapien
tctttgcaaatgtaaccggttaagatgaggtgt

SEQ ID NO: 266 - DNA, 33 bp, Homo sapien
tctttgcaaatgtaactggttaagatgaggtgt

SEQ ID NO: 267 - DNA, 33 bp, Homo sapien
atcttctgttccttcccgagaacaaactcatac

SEQ ID NO: 268 - DNA, 33 bp, Homo sapien
atcttctgttccttcctgagaacaaactcatac

SEQ ID NO: 269 - DNA, 33 bp, Homo sapien
ataaacatagctcctaccctcgaagagcctccg

SEQ ID NO: 270 - DNA, 33 bp, Homo sapien
ataaacatagctcctagcctcgaagagcctccg

SEQ ID NO: 271 - DNA, 33 bp, Homo sapien
gctatgagtggaccccaaccaaccaggcccttg

SEQ ID NO: 272 - DNA, 33 bp, Homo sapien
gctatgagtggaccccgaccaaccaggcccttg

SEQ ID NO: 273 - DNA, 33 bp, Homo sapien
aaagtggacatacccacgtattcagcaaccagg

SEQ ID NO: 274 - DNA, 33 bp, Homo sapien
aaagtggacatacccatgtattcagcaaccagg

SEQ ID NO: 275 - DNA, 33 bp, Homo sapien
ctgtttctgcgtgttgcacttggccacttgtgt

SEQ ID NO: 276 - DNA, 33 bp, Homo sapien
ctgtttctgcgtgttgtacttggccacttgtgt

SEQ ID NO: 277 - DNA, 33 bp, Homo sapien
gctcagtctgtctcccaatcttttcattttctt

SEQ ID NO: 278 - DNA, 33 bp, Homo sapien
gctcagtctgtctcccgatcttttcattttctt

SEQ ID NO: 279 - DNA, 33 bp, Homo sapien
atctcagagcctgcacagagactcagacacacc

SEQ ID NO: 280 - DNA, 33 bp, Homo sapien
atctcagagcctgcacggagactcagacacacc

SEQ ID NO: 281 - DNA, 33 bp, Homo sapien
ctgtgtgattttgtgaagatgccctcaatggca

SEQ ID NO: 282 - DNA, 33 bp, Homo sapien
ctgtgtgattttgtgaggatgccctcaatggca

SEQ ID NO: 283 - DNA, 33 bp, Homo sapien
atgaggaaacaccttcgaccctctgactacttg

SEQ ID NO: 284 - DNA, 33 bp, Homo sapien
atgaggaaacaccttctaccctctgactacttg

SEQ ID NO: 285 - DNA, 33 bp, Homo sapien
agacacgaggtacagacgcatatggatgtgccg

SEQ ID NO: 286 - DNA, 33 bp, Homo sapien
agacacgaggtacagatgcatatggatgtgccg

SEQ ID NO: 287 - DNA, 33 bp, Homo sapien
catgctcaggccttgaactttaatggcctggtc

SEQ ID NO: 288 - DNA, 33 bp, Homo sapien
catgctcaggccttgacctttaatggcctggtc

SEQ ID NO: 289 - DNA, 33 bp, Homo sapien
gcatgtttaatccgcacgctttagactccccgg

SEQ ID NO: 290 - DNA, 33 bp, Homo sapien
gcatgtttaatccgcatgctttagactccccgg

SEQ ID NO: 291 - DNA, 33 bp, Homo sapien
ctccagctcaccaagacataataattttctccc

SEQ ID NO: 292 - DNA, 33 bp, Homo sapien
ctccagctcaccaagatataataattttctccc

SEQ ID NO: 293 - DNA, 33 bp, Homo sapien
aaaatgtgagcctcaactgcagagcggagctgg

SEQ ID NO: 294 - DNA, 33 bp, Homo sapien
aaaatgtgagcctcaattgcagagcggagctgg

SEQ ID NO: 295 - DNA, 33 bp, Homo sapien
agcaagccgggcaacaagtccaaaatgctcacg

SEQ ID NO: 296 - DNA, 33 bp, Homo sapien
agcaagccgggcaacacgtccaaaatgctcacg

SEQ ID NO: 297 - DNA, 33 bp, Homo sapien
tccccagtacttgtcacgggcttcaacgttatg

SEQ ID NO: 298 - DNA, 33 bp, Homo sapien
tccccagtacttgtcatgggcttcaacgttatg

SEQ ID NO: 299 - DNA, 33 bp, Homo sapien
ccgacgatgcctcgcaaagttcccaggccttga

SEQ ID NO: 300 - DNA, 33 bp, Homo sapien
ccgacgatgcctcgcacagttcccaggccttga

SEQ ID NO: 301 - DNA, 33 bp, Homo sapien
caatcaaaatttcatcagagcttttaaaggaca

SEQ ID NO: 302 - DNA, 33 bp, Homo sapien
caatcaaaatttcatcggagcttttaaaggaca

SEQ ID NO: 303 - DNA, 33 bp, Homo sapien
ctcctccgtctacacccagaatggtagtttgtg

SEQ ID NO: 304 - DNA, 33 bp, Homo sapien
ctcctccgtctacacctagaatggtagtttgtg

SEQ ID NO: 305 - DNA, 33 bp, Homo sapien
tgcttctttgctacccagaggaacaaggtgggg

SEQ ID NO: 306 - DNA, 33 bp, Homo sapien
tgcttctttgctacccggaggaacaaggtgggg

SEQ ID NO: 307 - DNA, 33 bp, Homo sapien
tcagtaggaatgagctcacagcacttacaatcc

SEQ ID NO: 308 - DNA, 33 bp, Homo sapien
tcagtaggaatgagcttacagcacttacaatcc

SEQ ID NO: 309 - DNA, 33 bp, Homo sapien
tcttattcctggaaaacccgatgcgtttctgaa

SEQ ID NO: 310 - DNA, 33 bp, Homo sapien
tcttattcctggaaaagccgatgcgtttctgaa

SEQ ID NO: 311 - DNA, 33 bp, Homo sapien
gggcccagtaagaagactccagggaacacagtg

SEQ ID NO: 312 - DNA, 33 bp, Homo sapien
gggcccagtaagaagattccagggaacacagtg

SEQ ID NO: 313 - DNA, 33 bp, Homo sapien
gaaggtcaacccaggccgcagaaagagacctgg

SEQ ID NO: 314 - DNA, 33 bp, Homo sapien
gaaggtcaacccaggcggcagaaagagacctgg

SEQ ID NO: 315 - DNA, 33 bp, Homo sapien
catctcaaggtggtgaaaaaaagaagagtaaaa

SEQ ID NO: 316 - DNA, 33 bp, Homo sapien
catctcaaggtggtgagaaaaagaagagtaaaa

SEQ ID NO: 317 - DNA, 33 bp, Homo sapien
tgctgcatgggacacaactgtttttcaaaatat

SEQ ID NO: 318 - DNA, 33 bp, Homo sapien
tgctgcatgggacacacctgtttttcaaaatat

SEQ ID NO: 319 - DNA, 33 bp, Homo sapien
actgtctaatactaaacgctcctgggaggccct

SEQ ID NO: 320 - DNA, 33 bp, Homo sapien
actgtctaatactaaatgctcctgggaggccct

SEQ ID NO: 321 - DNA, 33 bp, Homo sapien
ggcaggggaatttccaacccgtctgtgtgcttg

SEQ ID NO: 322 - DNA, 33 bp, Homo sapien
ggcaggggaatttccatcccgtctgtgtgcttg

SEQ ID NO: 323 - DNA, 33 bp, Homo sapien
ctgccactctggtccaactgaaaggcctttgtt

SEQ ID NO: 324 - DNA, 33 bp, Homo sapien
ctgccactctggtccagctgaaaggcctttgtt

SEQ ID NO: 325 - DNA, 33 bp, Homo sapien
cattctgcctgtaaaccgatacagatgctcagg

SEQ ID NO: 326 - DNA, 33 bp, Homo sapien
cattctgcctgtaaactgatacagatgctcagg

SEQ ID NO: 327 - DNA, 33 bp, Homo sapien
ctgtaatgggctcttgaaaattaagaaactgaa

SEQ ID NO: 328 - DNA, 33 bp, Homo sapien
ctgtaatgggctcttggaaattaagaaactgaa

SEQ ID NO: 329 - DNA, 33 bp, Homo sapien
aaggacggtggtaaccagcttctggtggtggag

SEQ ID NO: 330 - DNA, 33 bp, Homo sapien
aaggacggtggtaaccggcttctggtggtggag

SEQ ID NO: 331 - DNA, 33 bp, Homo sapien
tggggctgctctcagacggccctatgtttgttt

SEQ ID NO: 332 - DNA, 33 bp, Homo sapien
tggggctgctctcagatggccctatgtttgttt

SEQ ID NO: 333 - DNA, 33 bp, Homo sapien
actgaggtttgtacagcatccaaaacaagacca

SEQ ID NO: 334 - DNA, 33 bp, Homo sapien
actgaggtttgtacaggatccaaaacaagacca

SEQ ID NO: 335 - DNA, 33 bp, Homo sapien
ctactctgggctggacagtcagaggtgctcact

SEQ ID NO: 336 - DNA, 33 bp, Homo sapien
ctactctgggctggaccgtcagaggtgctcact

SEQ ID NO: 337 - DNA, 33 bp, Homo sapien
cgaacagtgtaataggaaatttgagaaggcaaa

SEQ ID NO: 338 - DNA, 33 bp, Homo sapien
cgaacagtgtaataggcaatttgagaaggcaaa

SEQ ID NO: 339 - DNA, 33 bp, Homo sapien
tggatgtcagccgtgacgttgggccgacagctt

SEQ ID NO: 340 - DNA, 33 bp, Homo sapien
tggatgtcagccgtgaggttgggccgacagctt

SEQ ID NO: 341 - DNA, 33 bp, Homo sapien
ccttgttccgggtaaaaagcctctttgtttcag

SEQ ID NO: 342 - DNA, 33 bp, Homo sapien
ccttgttccgggtaaagagcctctttgtttcag

SEQ ID NO: 343 - DNA, 33 bp, Homo sapien
cccttattgaccctgacgtttttcaagttaagt

SEQ ID NO: 344 - DNA, 33 bp, Homo sapien
cccttattgaccctgaggtttttcaagttaagt

SEQ ID NO: 345 - DNA, 33 bp, Homo sapien
ggtgcctcaggctacaatctggtatagtttcgg

SEQ ID NO: 346 - DNA, 33 bp, Homo sapien
ggtgcctcaggctacactctggtatagtttcgg

SEQ ID NO: 347 - DNA, 33 bp, Homo sapien
ctgaactaagcaatgacagagtgcccagttttt

SEQ ID NO: 348 - DNA, 33 bp, Homo sapien
ctgaactaagcaatgagagagtgcccagttttt

SEQ ID NO: 349 - DNA, 33 bp, Homo sapien
tgccatcggactgaaccgggtctcagcacttgg

SEQ ID NO: 350 - DNA, 33 bp, Homo sapien
tgccatcggactgaactgggtctcagcacttgg

SEQ ID NO: 351 - DNA, 33 bp, Homo sapien
agcgttgcagaaggccagacgagtgctttggga

SEQ ID NO: 352 - DNA, 33 bp, Homo sapien
agcgttgcagaaggccggacgagtgctttggga

SEQ ID NO: 353 - DNA, 33 bp, Homo sapien
ggggacagcagcttctaagaaaaagtggggctg

SEQ ID NO: 354 - DNA, 33 bp, Homo sapien
ggggacagcagcttctgagaaaaagtggggctg

SEQ ID NO: 355 - DNA, 33 bp, Homo sapien
ctttcctgtcgtttggaacatatgtgagtagaa

SEQ ID NO: 356 - DNA, 33 bp, Homo sapien
ctttcctgtcgtttgggacatatgtgagtagaa

SEQ ID NO: 357 - DNA, 33 bp, Homo sapien
tcagcaaagcaacagacgacgaggttctcagag

SEQ ID NO: 358 - DNA, 33 bp, Homo sapien
tcagcaaagcaacagatgacgaggttctcagag

SEQ ID NO: 359 - DNA, 33 bp, Homo sapien
ctgtttgaagagcgaacgccaagtacgggtgtc

SEQ ID NO: 360 - DNA, 33 bp, Homo sapien
ctgtttgaagagcgaatgccaagtacgggtgtc

SEQ ID NO: 361 - DNA, 33 bp, Homo sapien
gcagtgtccacctgaaagttgagatatgcacag

SEQ ID NO: 362 - DNA, 33 bp, Homo sapien
gcagtgtccacctgaaggttgagatatgcacag

SEQ ID NO: 363 - DNA, 33 bp, Homo sapien
ttgattgtctctgttacgctgaaccggaggctc

SEQ ID NO: 364 - DNA, 33 bp, Homo sapien
ttgattgtctctgttatgctgaaccggaggctc

SEQ ID NO: 365 - DNA, 33 bp, Homo sapien
cttttgcatcttctggaaaaaagtcccacgtac

SEQ ID NO: 366 - DNA, 33 bp, Homo sapien
cttttgcatcttctgggaaaaagtcccacgtac

SEQ ID NO: 367 - DNA, 33 bp, Homo sapien
gagaagtctggcttccaatgaacgtcatgcact

SEQ ID NO: 368 - DNA, 33 bp, Homo sapien
gagaagtctggcttccgatgaacgtcatgcact

SEQ ID NO: 369 - DNA, 33 bp, Homo sapien
gcttctagcagccaaacgataacaggcatcgta

SEQ ID NO: 370 - DNA, 33 bp, Homo sapien
gcttctagcagccaaatgataacaggcatcgta

SEQ ID NO: 371 - DNA, 33 bp, Homo sapien
ccaagcagacctgaaccgtaatgaaggcgctcc

SEQ ID NO: 372 - DNA, 33 bp, Homo sapien
ccaagcagacctgaactgtaatgaaggcgctcc

SEQ ID NO: 373 - DNA, 33 bp, Homo sapien
tgcagctttattttgcaccatctttccttgctt

SEQ ID NO: 374 - DNA, 33 bp, Homo sapien
tgcagctttattttgcgccatctttccttgctt

SEQ ID NO: 375 - DNA, 33 bp, Homo sapien
acttccctggatattcaacctcctctgggatgg

SEQ ID NO: 376 - DNA, 33 bp, Homo sapien
acttccctggatattcgacctcctctgggatgg

SEQ ID NO: 377 - DNA, 33 bp, Homo sapien
gaggcttttggtccgcaagtcatggcagtcttg

SEQ ID NO: 378 - DNA, 33 bp, Homo sapien
gaggcttttggtccgcgagtcatggcagtcttg

SEQ ID NO: 379 - DNA, 33 bp, Homo sapien
cataaggaatgtttccaatctgttgcagggaca

SEQ ID NO: 380 - DNA, 33 bp, Homo sapien
cataaggaatgtttccgatctgttgcagggaca

SEQ ID NO: 381 - DNA, 33 bp, Homo sapien
ccccaggccattagcaaatttgtggtccttgac

SEQ ID NO: 382 - DNA, 33 bp, Homo sapien
ccccaggccattagcatatttgtggtccttgac

SEQ ID NO: 383 - DNA, 33 bp, Homo sapien
aggtcttcctgcacccacgtttgactggagcaa

SEQ ID NO: 384 - DNA, 33 bp, Homo sapien
aggtcttcctgcacccgcgtttgactggagcaa

SEQ ID NO: 385 - DNA, 33 bp, Homo sapien
atgctacaggtcataaaagtcgtctgatagccc

SEQ ID NO: 386 - DNA, 33 bp, Homo sapien
atgctacaggtcataacagtcgtctgatagccc

SEQ ID NO: 387 - DNA, 33 bp, Homo sapien
aggagaggagacatccagataagagaagataaa

SEQ ID NO: 388 - DNA, 33 bp, Homo sapien
aggagaggagacatccggataagagaagataaa

SEQ ID NO: 389 - DNA, 33 bp, Homo sapien
gaaagcagcaaattagaccagaaggaaggcctg

SEQ ID NO: 390 - DNA, 33 bp, Homo sapien
gaaagcagcaaattaggccagaaggaaggcctg

SEQ ID NO: 391 - DNA, 33 bp, Homo sapien
cagacatcaagggaccagaagaccccagaagct

SEQ ID NO: 392 - DNA, 33 bp, Homo sapien
cagacatcaagggaccggaagaccccagaagct

SEQ ID NO: 393 - DNA, 33 bp, Homo sapien
ctaaccgccctaatacgaccacgcctctcactg

SEQ ID NO: 394 - DNA, 33 bp, Homo sapien
ctaaccgccctaatactaccacgcctctcactg

SEQ ID NO: 395 - DNA, 33 bp, Homo sapien
ttccagtttgagacccactgggttggacatagc

SEQ ID NO: 396 - DNA, 33 bp, Homo sapien
ttccagtttgagacccgctgggttggacatagc

SEQ ID NO: 397 - DNA, 33 bp, Homo sapien
agtgacagcatcttccactccttaaatcagtag

SEQ ID NO: 398 - DNA, 33 bp, Homo sapien
agtgacagcatcttccgctccttaaatcagtag

SEQ ID NO: 399 - DNA, 33 bp, Homo sapien
gccgacaccagcctgggaaatgagcttcgttgc

SEQ ID NO: 400 - DNA, 33 bp, Homo sapien
gccgacaccagcctggtaaatgagcttcgttgc

SEQ ID NO: 401 - DNA, 33 bp, Homo sapien
cccctgtgtgcctgggaacaccctggatgtctg

SEQ ID NO: 402 - DNA, 33 bp, Homo sapien
cccctgtgtgcctgggtacaccctggatgtctg

SEQ ID NO: 403 - DNA, 33 bp, Homo sapien
gcctaaaaacagtgtacatactttaatttacaa

SEQ ID NO: 404 - DNA, 33 bp, Homo sapien
gcctaaaaacagtgtagatactttaatttacaa

SEQ ID NO: 405 - DNA, 33 bp, Homo sapien
gtctctcgacacaaacacttgtcttgggacggt

SEQ ID NO: 406 - DNA, 33 bp, Homo sapien
gtctctcgacacaaacgcttgtcttgggacggt

SEQ ID NO: 407 - DNA, 33 bp, Homo sapien
aagccattggatgacccggtaatgccattccta

SEQ ID NO: 408 - DNA, 33 bp, Homo sapien
aagccattggatgacctggtaatgccattccta

SEQ ID NO: 409 - DNA, 33 bp, Homo sapien
ggccacaggggcggcacggtgtcctgagaccac

SEQ ID NO: 410 - DNA, 33 bp, Homo sapien
ggccacaggggcggcatggtgtcctgagaccac

SEQ ID NO: 411 - DNA, 33 bp, Homo sapien
tcccacatgcaggtaacgatgttggctgaaact

SEQ ID NO: 412 - DNA, 33 bp, Homo sapien
tcccacatgcaggtaatgatgttggctgaaact

SEQ ID NO: 413 - DNA, 33 bp, Homo sapien
tgcatgcctcatctccacagactgctggcagct

SEQ ID NO: 414 - DNA, 33 bp, Homo sapien
tgcatgcctcatctccgcagactgctggcagct

SEQ ID NO: 415 - DNA, 33 bp, Homo sapien
gacaggctcaggtctcacatcccgggaagaatt

SEQ ID NO: 416 - DNA, 33 bp, Homo sapien
gacaggctcaggtctcgcatcccgggaagaatt

SEQ ID NO: 417 - DNA, 33 bp, Homo sapien
tgacgctggaattgaaacttacacaaatactcc

SEQ ID NO: 418 - DNA, 33 bp, Homo sapien
tgacgctggaattgaagcttacacaaatactcc

SEQ ID NO: 419 - DNA, 33 bp, Homo sapien
tcactctaaatgtcacaccatgtttgtagccat

SEQ ID NO: 420 - DNA, 33 bp, Homo sapien
tcactctaaatgtcacgccatgtttgtagccat

SEQ ID NO: 421 - DNA, 33 bp, Homo sapien
agagaggaggaatcaacaatgtggacctgccta

SEQ ID NO: 422 - DNA, 33 bp, Homo sapien
agagaggaggaatcaataatgtggacctgccta

SEQ ID NO: 423 - DNA, 33 bp, Homo sapien
taaggaaaactctcacactgttggaaagcccag

SEQ ID NO: 424 - DNA, 33 bp, Homo sapien
taaggaaaactctcacgctgttggaaagcccag

SEQ ID NO: 425 - DNA, 33 bp, Homo sapien
ccatgaggaagggcacacgtttcgtctccctcg

SEQ ID NO: 426 - DNA, 33 bp, Homo sapien
ccatgaggaagggcacgcgtttcgtctccctcg

SEQ ID NO: 427 - DNA, 33 bp, Homo sapien
tgcgacgtgctaacgcaaccgggctaaggacgt

SEQ ID NO: 428 - DNA, 33 bp, Homo sapien
tgcgacgtgctaacgcgaccgggctaaggacgt

SEQ ID NO: 429 - DNA, 33 bp, Homo sapien
caccgcttcctccatcaaaggcacccaactgct

SEQ ID NO: 430 - DNA, 33 bp, Homo sapien
caccgcttcctccatcgaaggcacccaactgct

SEQ ID NO: 431 - DNA, 33 bp, Homo sapien
cctgtcactgtcacaacgggcttcttcctgctt

SEQ ID NO: 432 - DNA, 33 bp, Homo sapien
cctgtcactgtcacaatgggcttcttcctgctt

SEQ ID NO: 433 - DNA, 33 bp, Homo sapien
gtctggaacattccgaaggaaaataaaacaatt

SEQ ID NO: 434 - DNA, 33 bp, Homo sapien
gtctggaacattccgagggaaaataaaacaatt

SEQ ID NO: 435 - DNA, 33 bp, Homo sapien
ttagaaggtggcacccaacaagggcttccaatg

SEQ ID NO: 436 - DNA, 33 bp, Homo sapien
ttagaaggtggcacccgacaagggcttccaatg

SEQ ID NO: 437 - DNA, 33 bp, Homo sapien
tgccgcaaccatgaccacccgttgtgagcccga

SEQ ID NO: 438 - DNA, 33 bp, Homo sapien
tgccgcaaccatgaccgcccgttgtgagcccga

SEQ ID NO: 439 - DNA, 33 bp, Homo sapien
ggcttaattgagagagacatgcttttcctccaa

SEQ ID NO: 440 - DNA, 33 bp, Homo sapien
ggcttaattgagagaggcatgcttttcctccaa

SEQ ID NO: 441 - DNA, 33 bp, Homo sapien
ccgcttattctctggacaggccagtgctatgca

SEQ ID NO: 442 - DNA, 33 bp, Homo sapien
ccgcttattctctggagaggccagtgctatgca

SEQ ID NO: 443 - DNA, 33 bp, Homo sapien
tgagcccgggttggtcacttgcatgcatctgtt

SEQ ID NO: 444 - DNA, 33 bp, Homo sapien
tgagcccgggttggtcgcttgcatgcatctgtt

SEQ ID NO: 445 - DNA, 33 bp, Homo sapien
tggcttgcacaggctacgcgggaatgttccgtg

SEQ ID NO: 446 - DNA, 33 bp, Homo sapien
tggcttgcacaggctatgcgggaatgttccgtg

SEQ ID NO: 447 - DNA, 33 bp, Homo sapien
gctcactttactagacaaagctatttaagaatg

SEQ ID NO: 448 - DNA, 33 bp, Homo sapien
gctcactttactagacgaagctatttaagaatg

SEQ ID NO: 449 - DNA, 33 bp, Homo sapien
atttaggccattgagaaaagaaaaatcaattgc

SEQ ID NO: 450 - DNA, 33 bp, Homo sapien
atttaggccattgagagaagaaaaatcaattgc

SEQ ID NO: 451 - DNA, 33 bp, Homo sapien
ggaaagaacgctggcactgagctctttcccaaa

SEQ ID NO: 452 - DNA, 33 bp, Homo sapien
ggaaagaacgctggcattgagctctttcccaaa

SEQ ID NO: 453 - DNA, 33 bp, Homo sapien
tgtcagcgaatcaccaccttgtcttttgcctct

SEQ ID NO: 454 - DNA, 33 bp, Homo sapien
tgtcagcgaatcaccagcttgtcttttgcctct

SEQ ID NO: 455 - DNA, 33 bp, Homo sapien
tgtcctctgtgggaacgaaggccactgtgctta

SEQ ID NO: 456 - DNA, 33 bp, Homo sapien
tgtcctctgtgggaactaaggccactgtgctta

SEQ ID NO: 457 - DNA, 33 bp, Homo sapien
gccccgctctctaaaaatgggagagaacaaccc

SEQ ID NO: 458 - DNA, 33 bp, Homo sapien
gccccgctctctaaaactgggagagaacaaccc

SEQ ID NO: 459 - DNA, 33 bp, Homo sapien
aacagtaggagggtgaacgcctgcttgcttttt

SEQ ID NO: 460 - DNA, 33 bp, Homo sapien
aacagtaggagggtgagcgcctgcttgcttttt

SEQ ID NO: 461 - DNA, 33 bp, Homo sapien
tggctctggcaaagccacgttccaaatctgtgc

SEQ ID NO: 462 - DNA, 33 bp, Homo sapien
tggctctggcaaagccgcgttccaaatctgtgc

SEQ ID NO: 463 - DNA, 33 bp, Homo sapien
aaagacaagagatagacacgtggcccatctgtg

SEQ ID NO: 464 - DNA, 33 bp, Homo sapien
aaagacaagagatagagacgtggcccatctgtg

SEQ ID NO: 465 - DNA, 33 bp, Homo sapien
ttccaaatcactggtcaaggacagcggcagaca

SEQ ID NO: 466 - DNA, 33 bp, Homo sapien
ttccaaatcactggtcgaggacagcggcagaca

SEQ ID NO: 467 - DNA, 33 bp, Homo sapien
aagcttattcaggttaccattgctatgtcttac

SEQ ID NO: 468 - DNA, 33 bp, Homo sapien
aagcttattcaggttatcattgctatgtcttac

SEQ ID NO: 469 - DNA, 33 bp, Homo sapien
aaaaagaatgggaatcaaattgacctcagacta

SEQ ID NO: 470 - DNA, 33 bp, Homo sapien
aaaaagaatgggaatcgaattgacctcagacta

SEQ ID NO: 471 - DNA, 33 bp, Homo sapien
ctctctataccagagaaagtgaacaggcctcgc

SEQ ID NO: 472 - DNA, 33 bp, Homo sapien
ctctctataccagagacagtgaacaggcctcgc

SEQ ID NO: 473 - DNA, 33 bp, Homo sapien
gggctcaccctcatccagaacaatctcatctcg

SEQ ID NO: 474 - DNA, 33 bp, Homo sapien
gggctcaccctcatccggaacaatctcatctcg

SEQ ID NO: 475 - DNA, 33 bp, Homo sapien
cttttctcctttctccactctgaggactgtgca

SEQ ID NO: 476 - DNA, 33 bp, Homo sapien
cttttctcctttctcccctctgaggactgtgca

SEQ ID NO: 477 - DNA, 33 bp, Homo sapien
agcaagaaagcaccaaaataagcactcgcccgg

SEQ ID NO: 478 - DNA, 33 bp, Homo sapien
agcaagaaagcaccaatataagcactcgcccgg

SEQ ID NO: 479 - DNA, 33 bp, Homo sapien
agacattttagaagaacgcactttgctgacgga

SEQ ID NO: 480 - DNA, 33 bp, Homo sapien
agacattttagaagaatgcactttgctgacgga

SEQ ID NO: 481 - DNA, 33 bp, Homo sapien
taagtacactgtgatgcatagtttgcaatgttg

SEQ ID NO: 482 - DNA, 33 bp, Homo sapien
taagtacactgtgatgtatagtttgcaatgttg

SEQ ID NO: 483 - DNA, 33 bp, Homo sapien
ctggcgttgggacgcacatctcaccgctcactc

SEQ ID NO: 484 - DNA, 33 bp, Homo sapien
ctggcgttgggacgcatatctcaccgctcactc

SEQ ID NO: 485 - DNA, 33 bp, Homo sapien
acaccaggtgtaaacacacttgcaactgcaggc

SEQ ID NO: 486 - DNA, 33 bp, Homo sapien
acaccaggtgtaaacatacttgcaactgcaggc

SEQ ID NO: 487 - DNA, 33 bp, Homo sapien
gcttcgtggtaatctcactgatgagtatttcaa

SEQ ID NO: 488 - DNA, 33 bp, Homo sapien
gcttcgtggtaatctcgctgatgagtatttcaa

SEQ ID NO: 489 - DNA, 33 bp, Homo sapien
agacacaacattttagaattatagttgcttgca

SEQ ID NO: 490 - DNA, 33 bp, Homo sapien
agacacaacattttaggattatagttgcttgca

SEQ ID NO: 491 - DNA, 33 bp, Homo sapien
tcagaatttgatattacggctgcatataatgtt

SEQ ID NO: 492 - DNA, 33 bp, Homo sapien
tcagaatttgatattatggctgcatataatgtt

SEQ ID NO: 493 - DNA, 33 bp, Homo sapien
cgggcggtcagcgcaccagaatgaagccaggca

SEQ ID NO: 494 - DNA, 33 bp, Homo sapien
cgggcggtcagcgcacgagaatgaagccaggca

SEQ ID NO: 495 - DNA, 33 bp, Homo sapien
catgcaatacgcaggcaaggatatgtgcagatg

SEQ ID NO: 496 - DNA, 33 bp, Homo sapien
catgcaatacgcaggcgaggatatgtgcagatg

SEQ ID NO: 497 - DNA, 33 bp, Homo sapien
cttgtccacattcttgaatgatctgaggaaggt

SEQ ID NO: 498 - DNA, 33 bp, Homo sapien
cttgtccacattcttgtatgatctgaggaaggt

SEQ ID NO: 499 - DNA, 33 bp, Homo sapien
tgcctccacgttggacggcactcagtggaggac

SEQ ID NO: 500 - DNA, 33 bp, Homo sapien
tgcctccacgttggactgcactcagtggaggac

SEQ ID NO: 501 - DNA, 33 bp, Homo sapien
gaggcatcccagctgacgagcacaaagccaaaa

SEQ ID NO: 502 - DNA, 33 bp, Homo sapien
gaggcatcccagctgatgagcacaaagccaaaa

SEQ ID NO: 503 - DNA, 33 bp, Homo sapien
atctgcctaagctctcaagagtcaaatcatcgc

SEQ ID NO: 504 - DNA, 33 bp, Homo sapien
atctgcctaagctctcgagagtcaaatcatcgc

SEQ ID NO: 505 - DNA, 33 bp, Homo sapien
aaaaaggctcaaatgaccagttcagcatccgga

SEQ ID NO: 506 - DNA, 33 bp, Homo sapien
aaaaaggctcaaatgatcagttcagcatccgga

SEQ ID NO: 507 - DNA, 33 bp, Homo sapien
ctgagtcaatttacaccgcccaatccctgacct

SEQ ID NO: 508 - DNA, 33 bp, Homo sapien
ctgagtcaatttacactgcccaatccctgacct

SEQ ID NO: 509 - DNA, 33 bp, Homo sapien
ttccacctgaaattggcatatcatctgcactga

SEQ ID NO: 510 - DNA, 33 bp, Homo sapien
ttccacctgaaattgggatatcatctgcactga

SEQ ID NO: 511 - DNA, 33 bp, Homo sapien
atttaatattggcttcgctatcgatcaaattgt

SEQ ID NO: 512 - DNA, 33 bp, Homo sapien
atttaatattggcttctctatcgatcaaattgt

SEQ ID NO: 513 - DNA, 33 bp, Homo sapien
aaggctggggagacaaatcataatcatagtggc

SEQ ID NO: 514 - DNA, 33 bp, Homo sapien
aaggctggggagacaagtcataatcatagtggc

SEQ ID NO: 515 - DNA, 33 bp, Homo sapien
aagaaatgtgggtagaagacggagtgagagtgc

SEQ ID NO: 516 - DNA, 33 bp, Homo sapien
aagaaatgtgggtagaggacggagtgagagtgc

SEQ ID NO: 517 - DNA, 33 bp, Homo sapien
cttcttgggtaaaggcaaatgatagtgttgtcc

SEQ ID NO: 518 - DNA, 33 bp, Homo sapien
cttcttgggtaaaggcgaatgatagtgttgtcc

SEQ ID NO: 519 - DNA, 33 bp, Homo sapien
gagctgctgtctccaccatggtcacttagggga

SEQ ID NO: 520 - DNA, 33 bp, Homo sapien
gagctgctgtctccactatggtcacttagggga

SEQ ID NO: 521 - DNA, 33 bp, Homo sapien
acgatggaaaccccaccgatgccgctctcctcc

SEQ ID NO: 522 - DNA, 33 bp, Homo sapien
acgatggaaaccccactgatgccgctctcctcc

SEQ ID NO: 523 - DNA, 33 bp, Homo sapien
cagcagtatgaagagacgcaattctgccaattc

SEQ ID NO: 524 - DNA, 33 bp, Homo sapien
cagcagtatgaagagatgcaattctgccaattc

SEQ ID NO: 525 - DNA, 33 bp, Homo sapien
taaaacttttccccccaagattatgatcactgc

SEQ ID NO: 526 - DNA, 33 bp, Homo sapien
taaaacttttccccccgagattatgatcactgc

SEQ ID NO: 527 - DNA, 33 bp, Homo sapien
gatacccaacagcgcacggtatggataaaatgc

SEQ ID NO: 528 - DNA, 33 bp, Homo sapien
gatacccaacagcgcatggtatggataaaatgc

SEQ ID NO: 529 - DNA, 33 bp, Homo sapien
aatcaagctgctcagacacgggtaagggcagca

SEQ ID NO: 530 - DNA, 33 bp, Homo sapien
aatcaagctgctcagagacgggtaagggcagca

SEQ ID NO: 531 - DNA, 33 bp, Homo sapien
gtgctctactgtgccccgaccggcttgttttgg

SEQ ID NO: 532 - DNA, 33 bp, Homo sapien
gtgctctactgtgcccggaccggcttgttttgg

SEQ ID NO: 533 - DNA, 33 bp, Homo sapien
aagtaggacggtgacgaacaatggttttagctt

SEQ ID NO: 534 - DNA, 33 bp, Homo sapien
aagtaggacggtgacggacaatggttttagctt

SEQ ID NO: 535 - DNA, 33 bp, Homo sapien
agacacccagcaacaacgtcccaggcccatgct

SEQ ID NO: 536 - DNA, 33 bp, Homo sapien
agacacccagcaacaatgtcccaggcccatgct

SEQ ID NO: 537 - DNA, 33 bp, Homo sapien
tccttctccacctgcaaactggctgtgcagtgc

SEQ ID NO: 538 - DNA, 33 bp, Homo sapien
tccttctccacctgcatactggctgtgcagtgc

SEQ ID NO: 539 - DNA, 33 bp, Homo sapien
ctaaggaaccagaacacgaagacaggcttggat

SEQ ID NO: 540 - DNA, 33 bp, Homo sapien
ctaaggaaccagaacatgaagacaggcttggat

SEQ ID NO: 541 - DNA, 33 bp, Homo sapien
tttgacttattcaaaaaagcatccccgtccagg

SEQ ID NO: 542 - DNA, 33 bp, Homo sapien
tttgacttattcaaaagagcatccccgtccagg

SEQ ID NO: 543 - DNA, 33 bp, Homo sapien
aagtcctgtcaccaggcaagcctgcatctcgca

SEQ ID NO: 544 - DNA, 33 bp, Homo sapien
aagtcctgtcaccagggaagcctgcatctcgca

SEQ ID NO: 545 - DNA, 33 bp, Homo sapien
tggctgttgaaaggccaagtcaaaaagctgtcc

SEQ ID NO: 546 - DNA, 33 bp, Homo sapien
tggctgttgaaaggccgagtcaaaaagctgtcc

SEQ ID NO: 547 - DNA, 33 bp, Homo sapien
tttttcctaagacacaaaaacagtgaggtcagg

SEQ ID NO: 548 - DNA, 33 bp, Homo sapien
tttttcctaagacacagaaacagtgaggtcagg

SEQ ID NO: 549 - DNA, 33 bp, Homo sapien
tctcaaactcaaccacggactgtggaaaacaca

SEQ ID NO: 550 - DNA, 33 bp, Homo sapien
tctcaaactcaaccactgactgtggaaaacaca

SEQ ID NO: 551 - DNA, 33 bp, Homo sapien
gtcactgcgtctggccaagagtatgattttaga

SEQ ID NO: 552 - DNA, 33 bp, Homo sapien
gtcactgcgtctggccgagagtatgattttaga

SEQ ID NO: 553 - DNA, 33 bp, Homo sapien
atgacgggatgggatggatttttctcttttttt

SEQ ID NO: 554 - DNA, 33 bp, Homo sapien
atgacgggatgggatgtatttttctcttttttt

SEQ ID NO: 555 - DNA, 33 bp, Homo sapien
caaacataaaacctcacggatctaccgtctcat

SEQ ID NO: 556 - DNA, 33 bp, Homo sapien
caaacataaaacctcatggatctaccgtctcat

SEQ ID NO: 557 - DNA, 33 bp, Homo sapien
aatgagtagggttttcactcgttctcagcttta

SEQ ID NO: 558 - DNA, 33 bp, Homo sapien
aatgagtagggttttccctcgttctcagcttta

SEQ ID NO: 559 - DNA, 33 bp, Homo sapien
taggaccctgagcccaatgggaaaataggaaaa

SEQ ID NO: 560 - DNA, 33 bp, Homo sapien
taggaccctgagcccagtgggaaaataggaaaa

SEQ ID NO: 561 - DNA, 33 bp, Homo sapien
aaaccagttactaaaagccgtgaagttagtgtg

SEQ ID NO: 562 - DNA, 33 bp, Homo sapien
aaaccagttactaaaatccgtgaagttagtgtg

SEQ ID NO: 563 - DNA, 33 bp, Homo sapien
gtattgcctttggagaaaacagttcctaattta

SEQ ID NO: 564 - DNA, 33 bp, Homo sapien
gtattgcctttggagagaacagttcctaattta

SEQ ID NO: 565 - DNA, 33 bp, Homo sapien
ttttaacatagcctcaaaatgagacatccacgt

SEQ ID NO: 566 - DNA, 33 bp, Homo sapien
ttttaacatagcctcataatgagacatccacgt

SEQ ID NO: 567 - DNA, 33 bp, Homo sapien
gaaaaccaagacaacaaccaggtcattgctggt

SEQ ID NO: 568 - DNA, 33 bp, Homo sapien
gaaaaccaagacaacagccaggtcattgctggt

SEQ ID NO: 569 - DNA, 33 bp, Homo sapien
ccctcccaacgtgcacaaggtaaattccctggt

SEQ ID NO: 570 - DNA, 33 bp, Homo sapien
ccctcccaacgtgcacgaggtaaattccctggt

SEQ ID NO: 571 - DNA, 33 bp, Homo sapien
cacaaattgggaaaccaagcaacttttgaaatg

SEQ ID NO: 572 - DNA, 33 bp, Homo sapien
cacaaattgggaaaccgagcaacttttgaaatg

SEQ ID NO: 573 - DNA, 33 bp, Homo sapien
aactatctaaagcagcactttactgacatgaaa

SEQ ID NO: 574 - DNA, 33 bp, Homo sapien
aactatctaaagcagccctttactgacatgaaa

SEQ ID NO: 575 - DNA, 33 bp, Homo sapien
aagaaaaccaagacaaccggcaaagctttgaag

SEQ ID NO: 576 - DNA, 33 bp, Homo sapien
aagaaaaccaagacaatcggcaaagctttgaag

SEQ ID NO: 577 - DNA, 33 bp, Homo sapien
agtgagggtcaggggaaagttggcgcattgatc

SEQ ID NO: 578 - DNA, 33 bp, Homo sapien
agtgagggtcaggggagagttggcgcattgatc

SEQ ID NO: 579 - DNA, 33 bp, Homo sapien
aaaaatgttttctccccgccatccaaatgctct

SEQ ID NO: 580 - DNA, 33 bp, Homo sapien
aaaaatgttttctcccggccatccaaatgctct

SEQ ID NO: 581 - DNA, 33 bp, Homo sapien
cttggctccattctaccagtacggtttaagcct

SEQ ID NO: 582 - DNA, 33 bp, Homo sapien
cttggctccattctacgagtacggtttaagcct

SEQ ID NO: 583 - DNA, 33 bp, Homo sapien
ctctgcttttcaccgacgcaggcccggtggaga

SEQ ID NO: 584 - DNA, 33 bp, Homo sapien
ctctgcttttcaccgatgcaggcccggtggaga

SEQ ID NO: 585 - DNA, 33 bp, Homo sapien
agcttgctcattcacacctggtgggagaaggac

SEQ ID NO: 586 - DNA, 33 bp, Homo sapien
agcttgctcattcacagctggtgggagaaggac

SEQ ID NO: 587 - DNA, 33 bp, Homo sapien
ctaggctggccaatcacagaggtgagaaggact

SEQ ID NO: 588 - DNA, 33 bp, Homo sapien
ctaggctggccaatcagagaggtgagaaggact

SEQ ID NO: 589 - DNA, 33 bp, Homo sapien
gaaacttattctctccccgtcccggaggccaga

SEQ ID NO: 590 - DNA, 33 bp, Homo sapien
gaaacttattctctcctcgtcccggaggccaga

SEQ ID NO: 591 - DNA, 33 bp, Homo sapien
gatcttgaaaagtgcccccatctctgttggttt

SEQ ID NO: 592 - DNA, 33 bp, Homo sapien
gatcttgaaaagtgcctccatctctgttggttt

SEQ ID NO: 593 - DNA, 33 bp, Homo sapien
ttgcgtcctggcgtcacggggggcctcagggtg

SEQ ID NO: 594 - DNA, 33 bp, Homo sapien
ttgcgtcctggcgtcatggggggcctcagggtg

SEQ ID NO: 595 - DNA, 33 bp, Homo sapien
gaaatcttcaatgagccgctaacaaaaagtgtc

SEQ ID NO: 596 - DNA, 33 bp, Homo sapien
gaaatcttcaatgagctgctaacaaaaagtgtc

SEQ ID NO: 597 - DNA, 33 bp, Homo sapien
agggtgttttttcaccagctccgcttcccagaa

SEQ ID NO: 598 - DNA, 33 bp, Homo sapien
agggtgttttttcaccggctccgcttcccagaa

SEQ ID NO: 599 - DNA, 33 bp, Homo sapien
cacaatctactgtctaaccccgtgagatccacc

SEQ ID NO: 600 - DNA, 33 bp, Homo sapien
cacaatctactgtctacccccgtgagatccacc

SEQ ID NO: 601 - DNA, 33 bp, Homo sapien
ctgcagcaaatcaacagcctctctgcccctcag

SEQ ID NO: 602 - DNA, 33 bp, Homo sapien
ctgcagcaaatcaacatcctctctgcccctcag

SEQ ID NO: 603 - DNA, 33 bp, Homo sapien
cgctaagcttgtgggaataatttatatctggct

SEQ ID NO: 604 - DNA, 33 bp, Homo sapien
cgctaagcttgtgggagtaatttatatctggct

SEQ ID NO: 605 - DNA, 33 bp, Homo sapien
gacagcctctactatcaccctccactgagcgag

SEQ ID NO: 606 - DNA, 33 bp, Homo sapien
gacagcctctactatcgccctccactgagcgag

SEQ ID NO: 607 - DNA, 33 bp, Homo sapien
aataggtagggatgaaaattgcactgtgagcct

SEQ ID NO: 608 - DNA, 33 bp, Homo sapien
aataggtagggatgaagattgcactgtgagcct

SEQ ID NO: 609 - DNA, 33 bp, Homo sapien
caagccccaggacttaactacctggaggaactc

SEQ ID NO: 610 - DNA, 33 bp, Homo sapien
caagccccaggacttagctacctggaggaactc

SEQ ID NO: 611 - DNA, 33 bp, Homo sapien
gatttaattacagtcccgattttcagcaccatc

SEQ ID NO: 612 - DNA, 33 bp, Homo sapien
gatttaattacagtcctgattttcagcaccatc

SEQ ID NO: 613 - DNA, 33 bp, Homo sapien
aaagtaatacccttcacaggtgagctgctgaaa

SEQ ID NO: 614 - DNA, 33 bp, Homo sapien
aaagtaatacccttcataggtgagctgctgaaa

SEQ ID NO: 615 - DNA, 33 bp, Homo sapien
ggcagcaggaaagaccaaaaagccgaaaccgcc

SEQ ID NO: 616 - DNA, 33 bp, Homo sapien
ggcagcaggaaagaccgaaaagccgaaaccgcc

SEQ ID NO: 617 - DNA, 33 bp, Homo sapien
ttggtcatttgttagacagtgagcagaagctca

SEQ ID NO: 618 - DNA, 33 bp, Homo sapien
ttggtcatttgttagatagtgagcagaagctca

SEQ ID NO: 619 - DNA, 33 bp, Homo sapien
cctggcgggacctcacgacatgtttattgagct

SEQ ID NO: 620 - DNA, 33 bp, Homo sapien
cctggcgggacctcactacatgtttattgagct

SEQ ID NO: 621 - DNA, 33 bp, Homo sapien
gggaagcaattgagctaaaggttggttctgagt

SEQ ID NO: 622 - DNA, 33 bp, Homo sapien
gggaagcaattgagctgaaggttggttctgagt

SEQ ID NO: 623 - DNA, 33 bp, Homo sapien
tctatctaaaccatgaagactgtcacagagagg

SEQ ID NO: 624 - DNA, 33 bp, Homo sapien
tctatctaaaccatgaggactgtcacagagagg

SEQ ID NO: 625 - DNA, 33 bp, Homo sapien
taagctgaagatatgacatatgtagagaactta

SEQ ID NO: 626 - DNA, 33 bp, Homo sapien
taagctgaagatatgagatatgtagagaactta

SEQ ID NO: 627 - DNA, 33 bp, Homo sapien
taatttgtcaaggttacggcatcttagtacaaa

SEQ ID NO: 628 - DNA, 33 bp, Homo sapien
taatttgtcaaggttatggcatcttagtacaaa

SEQ ID NO: 629 - DNA, 33 bp, Homo sapien
acgcaagaccagctcacaaatccatgacttcca

SEQ ID NO: 630 - DNA, 33 bp, Homo sapien
acgcaagaccagctcagaaatccatgacttcca

SEQ ID NO: 631 - DNA, 33 bp, Homo sapien
ttcctttgttgaacaaaagcatcatggcacaac

SEQ ID NO: 632 - DNA, 33 bp, Homo sapien
ttcctttgttgaacaacagcatcatggcacaac

SEQ ID NO: 633 - DNA, 33 bp, Homo sapien
ggtctgttcctgacaaccacatggcattataca

SEQ ID NO: 634 - DNA, 33 bp, Homo sapien
ggtctgttcctgacaagcacatggcattataca

SEQ ID NO: 635 - DNA, 33 bp, Homo sapien
acattcacattcacaggctgcctctgaagatag

SEQ ID NO: 636 - DNA, 33 bp, Homo sapien
acattcacattcacagtctgcctctgaagatag

SEQ ID NO: 637 - DNA, 33 bp, Homo sapien
tatctagaggagaacccatatggcccctatggc

SEQ ID NO: 638 - DNA, 33 bp, Homo sapien
tatctagaggagaaccgatatggcccctatggc

SEQ ID NO: 639 - DNA, 33 bp, Homo sapien
tttctgttatagcagccaaaatgggctaaggca

SEQ ID NO: 640 - DNA, 33 bp, Homo sapien
tttctgttatagcagctaaaatgggctaaggca

SEQ ID NO: 641 - DNA, 33 bp, Homo sapien
taggagatttggccccaccctgcagtgaacagc

SEQ ID NO: 642 - DNA, 33 bp, Homo sapien
taggagatttggccccgccctgcagtgaacagc

SEQ ID NO: 643 - DNA, 33 bp, Homo sapien
acattagcgagattaaccaataagagaagagag

SEQ ID NO: 644 - DNA, 33 bp, Homo sapien
acattagcgagattaatcaataagagaagagag

SEQ ID NO: 645 - DNA, 33 bp, Homo sapien
ccctttcagtacattcaagctgctatggaggaa

SEQ ID NO: 646 - DNA, 33 bp, Homo sapien
ccctttcagtacattcgagctgctatggaggaa

SEQ ID NO: 647 - DNA, 33 bp, Homo sapien
tattcactcgttagaacctggagctgaaaatag

SEQ ID NO: 648 - DNA, 33 bp, Homo sapien
tattcactcgttagaatctggagctgaaaatag

SEQ ID NO: 649 - DNA, 33 bp, Homo sapien
atgtggtaacagctccaatgctgagcagctgcc

SEQ ID NO: 650 - DNA, 33 bp, Homo sapien
atgtggtaacagctccgatgctgagcagctgcc

SEQ ID NO: 651 - DNA, 33 bp, Homo sapien
agaagctaatctgttacgaagatcagcagtgag

SEQ ID NO: 652 - DNA, 33 bp, Homo sapien
agaagctaatctgttatgaagatcagcagtgag

SEQ ID NO: 653 - DNA, 33 bp, Homo sapien
gtagggaaaattccaaaaagatcatatttctgg

SEQ ID NO: 654 - DNA, 33 bp, Homo sapien
gtagggaaaattccaacaagatcatatttctgg

SEQ ID NO: 655 - DNA, 33 bp, Homo sapien
gactccaattagtcaacgaaagccccacctctc

SEQ ID NO: 656 - DNA, 33 bp, Homo sapien
gactccaattagtcaatgaaagccccacctctc

SEQ ID NO: 657 - DNA, 33 bp, Homo sapien
gagcacaacatttattcaagtgtttattacttt

SEQ ID NO: 658 - DNA, 33 bp, Homo sapien
gagcacaacatttattgaagtgtttattacttt

SEQ ID NO: 659 - DNA, 33 bp, Homo sapien
gctctgggtttcataaatctcggagaagtttct

SEQ ID NO: 660 - DNA, 33 bp, Homo sapien
gctctgggtttcataagtctcggagaagtttct

SEQ ID NO: 661 - DNA, 33 bp, Homo sapien
acttaatcacatgtaacgcagaagcaggaggac

SEQ ID NO: 662 - DNA, 33 bp, Homo sapien
acttaatcacatgtaaggcagaagcaggaggac

SEQ ID NO: 663 - DNA, 33 bp, Homo sapien
caaagttgcattagcacgtaaaggatctctaga

SEQ ID NO: 664 - DNA, 33 bp, Homo sapien
caaagttgcattagcatgtaaaggatctctaga

SEQ ID NO: 665 - DNA, 33 bp, Homo sapien
gcaaggacgatggccacggtgagtcccatgagg

SEQ ID NO: 666 - DNA, 33 bp, Homo sapien
gcaaggacgatggccatggtgagtcccatgagg

SEQ ID NO: 667 - DNA, 33 bp, Homo sapien
cggctatacaaatatcagacaagtagattttag

SEQ ID NO: 668 - DNA, 33 bp, Homo sapien
cggctatacaaatatccgacaagtagattttag

SEQ ID NO: 669 - DNA, 33 bp, Homo sapien
agtcttgcaggaaaaccgtctgatagaaaggcc

SEQ ID NO: 670 - DNA, 33 bp, Homo sapien
agtcttgcaggaaaactgtctgatagaaaggcc

SEQ ID NO: 671 - DNA, 33 bp, Homo sapien
atttcagttttgccagaagagcttgacccctcc

SEQ ID NO: 672 - DNA, 33 bp, Homo sapien
atttcagttttgccagcagagcttgacccctcc

SEQ ID NO: 673 - DNA, 33 bp, Homo sapien
cactggccactgcagaagatacatcagggagaa

SEQ ID NO: 674 - DNA, 33 bp, Homo sapien
cactggccactgcagaggatacatcagggagaa

SEQ ID NO: 675 - DNA, 33 bp, Homo sapien
ccctggcggcacatcacgtttctgtcccagaga

SEQ ID NO: 676 - DNA, 33 bp, Homo sapien
ccctggcggcacatcatgtttctgtcccagaga

SEQ ID NO: 677 - DNA, 33 bp, Homo sapien
taaatgtaatgcactcaaatcatccagaaacca

SEQ ID NO: 678 - DNA, 33 bp, Homo sapien
taaatgtaatgcactcgaatcatccagaaacca

SEQ ID NO: 679 - DNA, 33 bp, Homo sapien
ccaggcaatctccggcccttagcgaggcacact

SEQ ID NO: 680 - DNA, 33 bp, Homo sapien
ccaggcaatctccggctcttagcgaggcacact

SEQ ID NO: 681 - DNA, 33 bp, Homo sapien
gggaagtgagtgaaaacgcctcttacgtctgtg

SEQ ID NO: 682 - DNA, 33 bp, Homo sapien
gggaagtgagtgaaaatgcctcttacgtctgtg

SEQ ID NO: 683 - DNA, 33 bp, Homo sapien
cacccttgaagcaggcgctgaggcatctctgtc

SEQ ID NO: 684 - DNA, 33 bp, Homo sapien
cacccttgaagcaggctctgaggcatctctgtc

SEQ ID NO: 685 - DNA, 33 bp, Homo sapien
gggtgattcatgcacccgagctccctttataat

SEQ ID NO: 686 - DNA, 33 bp, Homo sapien
gggtgattcatgcacctgagctccctttataat

SEQ ID NO: 687 - DNA, 33 bp, Homo sapien
ccaccaggtagaacagaatgatccactgtctcc

SEQ ID NO: 688 - DNA, 33 bp, Homo sapien
ccaccaggtagaacaggatgatccactgtctcc

SEQ ID NO: 689 - DNA, 33 bp, Homo sapien
cttgatctcaagtcaccggacagaggatactca

SEQ ID NO: 690 - DNA, 33 bp, Homo sapien
cttgatctcaagtcactggacagaggatactca

SEQ ID NO: 691 - DNA, 33 bp, Homo sapien
ggcagaaccgaccccaccatgcacagctgggtc

SEQ ID NO: 692 - DNA, 33 bp, Homo sapien
ggcagaaccgaccccatcatgcacagctgggtc

SEQ ID NO: 693 - DNA, 33 bp, Homo sapien
acctggagatgtgactcaataacaagagaaaat

SEQ ID NO: 694 - DNA, 33 bp, Homo sapien
acctggagatgtgacttaataacaagagaaaat

SEQ ID NO: 695 - DNA, 33 bp, Homo sapien
acctgtgaatacgtgaccttacgtggccaaagg

SEQ ID NO: 696 - DNA, 33 bp, Homo sapien
acctgtgaatacgtgatcttacgtggccaaagg

SEQ ID NO: 697 - DNA, 33 bp, Homo sapien
aaaaaaaggagatggaacgagtctggcctcctg

SEQ ID NO: 698 - DNA, 33 bp, Homo sapien
aaaaaaaggagatggagcgagtctggcctcctg

SEQ ID NO: 699 - DNA, 33 bp, Homo sapien
tctgagagaaacaaccaactgatgaaggctgct

SEQ ID NO: 700 - DNA, 33 bp, Homo sapien
tctgagagaaacaaccgactgatgaaggctgct

SEQ ID NO: 701 - DNA, 33 bp, Homo sapien
tttctcagtgcgcaacaccccaattctgcaaac

SEQ ID NO: 702 - DNA, 33 bp, Homo sapien
tttctcagtgcgcaacgccccaattctgcaaac

SEQ ID NO: 703 - DNA, 33 bp, Homo sapien
tgaggttccagaacgcaacgtgctcacatccac

SEQ ID NO: 704 - DNA, 33 bp, Homo sapien
tgaggttccagaacgcgacgtgctcacatccac

SEQ ID NO: 705 - DNA, 33 bp, Homo sapien
agacaatgcaatcaggaataatgaggaccagga

SEQ ID NO: 706 - DNA, 33 bp, Homo sapien
agacaatgcaatcagggataatgaggaccagga

SEQ ID NO: 707 - DNA, 33 bp, Homo sapien
ggttcactgattgtaacaagtgcacccctggtg

SEQ ID NO: 708 - DNA, 33 bp, Homo sapien
ggttcactgattgtaagaagtgcacccctggtg

SEQ ID NO: 709 - DNA, 33 bp, Homo sapien
tgtggtcatttgttataaaagttccaagagatt

SEQ ID NO: 710 - DNA, 33 bp, Homo sapien
tgtggtcatttgttatgaaagttccaagagatt

SEQ ID NO: 711 - DNA, 33 bp, Homo sapien
gtcttcttaaacggacacccgtcacagtgcagg

SEQ ID NO: 712 - DNA, 33 bp, Homo sapien
gtcttcttaaacggacgcccgtcacagtgcagg

SEQ ID NO: 713 - DNA, 33 bp, Homo sapien
attatctttcaataccaggactcaatggaagag

SEQ ID NO: 714 - DNA, 33 bp, Homo sapien
attatctttcaataccgggactcaatggaagag

SEQ ID NO: 715 - DNA, 33 bp, Homo sapien
agcagctgcgggaaccaaatatgccttcccttt

SEQ ID NO: 716 - DNA, 33 bp, Homo sapien
agcagctgcgggaaccgaatatgccttcccttt

SEQ ID NO: 717 - DNA, 33 bp, Homo sapien
aggtcatcagtagataagagacaaatggttgca

SEQ ID NO: 718 - DNA, 33 bp, Homo sapien
aggtcatcagtagatacgagacaaatggttgca

SEQ ID NO: 719 - DNA, 33 bp, Homo sapien
gggccattgtgtctgacggggaatcctgccttg

SEQ ID NO: 720 - DNA, 33 bp, Homo sapien
gggccattgtgtctgatggggaatcctgccttg

SEQ ID NO: 721 - DNA, 33 bp, Homo sapien
gtgatgtcactcggccacctaggaccagcagct

SEQ ID NO: 722 - DNA, 33 bp, Homo sapien
gtgatgtcactcggccgcctaggaccagcagct

SEQ ID NO: 723 - DNA, 33 bp, Homo sapien
ttgatccctgttaaaacgcatcactgactgtcc

SEQ ID NO: 724 - DNA, 33 bp, Homo sapien
ttgatccctgttaaaatgcatcactgactgtcc

SEQ ID NO: 725 - DNA, 33 bp, Homo sapien
taaaaaaaccaacaacagggcatgagaggttat

SEQ ID NO: 726 - DNA, 33 bp, Homo sapien
taaaaaaaccaacaacggggcatgagaggttat

SEQ ID NO: 727 - DNA, 33 bp, Homo sapien
taaaacaatggagtacaacgtcaaggagagaga

SEQ ID NO: 728 - DNA, 33 bp, Homo sapien
taaaacaatggagtaccacgtcaaggagagaga

SEQ ID NO: 729 - DNA, 33 bp, Homo sapien
ctctgggtgtgccataaacttctaggacctatg

SEQ ID NO: 730 - DNA, 33 bp, Homo sapien
ctctgggtgtgccatatacttctaggacctatg

SEQ ID NO: 731 - DNA, 33 bp, Homo sapien
tttggatatctctgaaatgaggtagtctcagcc

SEQ ID NO: 732 - DNA, 33 bp, Homo sapien
tttggatatctctgaactgaggtagtctcagcc

SEQ ID NO: 733 - DNA, 33 bp, Homo sapien
tggggtacacaggacccgaaatgagctctggtc

SEQ ID NO: 734 - DNA, 33 bp, Homo sapien
tggggtacacaggacctgaaatgagctctggtc

SEQ ID NO: 735 - DNA, 33 bp, Homo sapien
tgagggtaaccacagacagtaaggtgctgctat

SEQ ID NO: 736 - DNA, 33 bp, Homo sapien
tgagggtaaccacagagagtaaggtgctgctat

SEQ ID NO: 737 - DNA, 33 bp, Homo sapien
taatccttttgttttcaccagtttcttctattt

SEQ ID NO: 738 - DNA, 33 bp, Homo sapien
taatccttttgttttcgccagtttcttctattt

SEQ ID NO: 739 - DNA, 33 bp, Homo sapien
ttgataatgatgataaataggtgatgaaagtca

SEQ ID NO: 740 - DNA, 33 bp, Homo sapien
ttgataatgatgataagtaggtgatgaaagtca

SEQ ID NO: 741 - DNA, 33 bp, Homo sapien
aagaaagttgcagatcactcttatctacatagg

SEQ ID NO: 742 - DNA, 33 bp, Homo sapien
aagaaagttgcagatcgctcttatctacatagg

SEQ ID NO: 743 - DNA, 33 bp, Homo sapien
ctgtctttgttcttaacggaagctgcttctctc

SEQ ID NO: 744 - DNA, 33 bp, Homo sapien
ctgtctttgttcttaatggaagctgcttctctc

SEQ ID NO: 745 - DNA, 33 bp, Homo sapien
aaggcgtggagtggaacggggaacaccagcagc

SEQ ID NO: 746 - DNA, 33 bp, Homo sapien
aaggcgtggagtggaatggggaacaccagcagc

SEQ ID NO: 747 - DNA, 33 bp, Homo sapien
cccgcccacatctaaccggaccagaggcagtcg

SEQ ID NO: 748 - DNA, 33 bp, Homo sapien
cccgcccacatctaactggaccagaggcagtcg

SEQ ID NO: 749 - DNA, 33 bp, Homo sapien
cctggcttatcatggaagtgctgttgaataggc

SEQ ID NO: 750 - DNA, 33 bp, Homo sapien
cctggcttatcatggaggtgctgttgaataggc

SEQ ID NO: 751 - DNA, 33 bp, Homo sapien
cagactgagggtcgagcatctgaggatctgagg

SEQ ID NO: 752 - DNA, 33 bp, Homo sapien
cagactgagggtcgaggatctgaggatctgagg

SEQ ID NO: 753 - DNA, 33 bp, Homo sapien
ttttgcaaataagaaactcacagctcagagaag

SEQ ID NO: 754 - DNA, 33 bp, Homo sapien
ttttgcaaataagaaagtcacagctcagagaag

SEQ ID NO: 755 - DNA, 33 bp, Homo sapien
tttccccttcttcacaaccagaaagaatatttg

SEQ ID NO: 756 - DNA, 33 bp, Homo sapien
tttccccttcttcacacccagaaagaatatttg

SEQ ID NO: 757 - DNA, 33 bp, Homo sapien
attctgcaggcaggaacggacctcttgttcagc

SEQ ID NO: 758 - DNA, 33 bp, Homo sapien
attctgcaggcaggaatggacctcttgttcagc

SEQ ID NO: 759 - DNA, 33 bp, Homo sapien
aaatccctgccctgaggaagatctccagaaaga

SEQ ID NO: 760 - DNA, 33 bp, Homo sapien
aaatccctgccctgagtaagatctccagaaaga

SEQ ID NO: 761 - DNA, 33 bp, Homo sapien
aaaagattcccaagccacttgcttatgacccca

SEQ ID NO: 762 - DNA, 33 bp, Homo sapien
aaaagattcccaagccgcttgcttatgacccca

SEQ ID NO: 763 - DNA, 33 bp, Homo sapien
tggaaataacagactacatgttgaactaatggg

SEQ ID NO: 764 - DNA, 33 bp, Homo sapien
tggaaataacagactagatgttgaactaatggg

SEQ ID NO: 765 - DNA, 33 bp, Homo sapien
ccttggggaaaatctcaaagaacacaagctttc

SEQ ID NO: 766 - DNA, 33 bp, Homo sapien
ccttggggaaaatctcgaagaacacaagctttc

SEQ ID NO: 767 - DNA, 33 bp, Homo sapien
ccagtctacagggatcacatccaagtgtaggac

SEQ ID NO: 768 - DNA, 33 bp, Homo sapien
ccagtctacagggatcgcatccaagtgtaggac

SEQ ID NO: 769 - DNA, 33 bp, Homo sapien
gtgtggacagcccagaaaggcttctcagtccct

SEQ ID NO: 770 - DNA, 33 bp, Homo sapien
gtgtggacagcccagagaggcttctcagtccct

SEQ ID NO: 771 - DNA, 33 bp, Homo sapien
tgtgctggcatcactgaaggtctttcatctcgg

SEQ ID NO: 772 - DNA, 33 bp, Homo sapien
tgtgctggcatcactggaggtctttcatctcgg

SEQ ID NO: 773 - DNA, 33 bp, Homo sapien
tcctgcagggatggccacgatttggatatttca

SEQ ID NO: 774 - DNA, 33 bp, Homo sapien
tcctgcagggatggccgcgatttggatatttca

SEQ ID NO: 775 - DNA, 33 bp, Homo sapien
tgcccaacacattctccccagtcccttccagct

SEQ ID NO: 776 - DNA, 33 bp, Homo sapien
tgcccaacacattctctccagtcccttccagct

SEQ ID NO: 777 - DNA, 33 bp, Homo sapien
caagcatcctgaaccaacaagacacctccaata

SEQ ID NO: 778 - DNA, 33 bp, Homo sapien
caagcatcctgaaccagcaagacacctccaata

SEQ ID NO: 779 - DNA, 33 bp, Homo sapien
gttctggggggctcaaatagtggtccgcctgag

SEQ ID NO: 780 - DNA, 33 bp, Homo sapien
gttctggggggctcaactagtggtccgcctgag

SEQ ID NO: 781 - DNA, 33 bp, Homo sapien
tgggacagtccagcacactgcttattgtcaaat

SEQ ID NO: 782 - DNA, 33 bp, Homo sapien
tgggacagtccagcacgctgcttattgtcaaat

SEQ ID NO: 783 - DNA, 33 bp, Homo sapien
ccaaatacttgtccaaaaatgtacgttcatagc

SEQ ID NO: 784 - DNA, 33 bp, Homo sapien
ccaaatacttgtccaagaatgtacgttcatagc

SEQ ID NO: 785 - DNA, 33 bp, Homo sapien
cttgtcaattcctaacaaaaattctgctggaat

SEQ ID NO: 786 - DNA, 33 bp, Homo sapien
cttgtcaattcctaaccaaaattctgctggaat

SEQ ID NO: 787 - DNA, 33 bp, Homo sapien
gtttgtctgttcagtccctcaactgtatcaaaa

SEQ ID NO: 788 - DNA, 33 bp, Homo sapien
gtttgtctgttcagtctctcaactgtatcaaaa

SEQ ID NO: 789 - DNA, 33 bp, Homo sapien
gtgtgagaatttactactaaggctcacagaact

SEQ ID NO: 790 - DNA, 33 bp, Homo sapien
gtgtgagaatttactattaaggctcacagaact

SEQ ID NO: 791 - DNA, 33 bp, Homo sapien
ttcagggattttcatcacgtaagcacgattcat

SEQ ID NO: 792 - DNA, 33 bp, Homo sapien
ttcagggattttcatctcgtaagcacgattcat

SEQ ID NO: 793 - DNA, 33 bp, Homo sapien
ggaaactttgagtgccaaacctgggaaattgca

SEQ ID NO: 794 - DNA, 33 bp, Homo sapien
ggaaactttgagtgcccaacctgggaaattgca

SEQ ID NO: 795 - DNA, 33 bp, Homo sapien
ggccccagttacaaaccaacttttctctaggag

SEQ ID NO: 796 - DNA, 33 bp, Homo sapien
ggccccagttacaaactaacttttctctaggag

SEQ ID NO: 797 - DNA, 33 bp, Homo sapien
cttggtgggtctcctaccttttatcagggatac

SEQ ID NO: 798 - DNA, 33 bp, Homo sapien
cttggtgggtctcctagcttttatcagggatac

SEQ ID NO: 799 - DNA, 33 bp, Homo sapien
acatcacgaggcaagacgggagccctgcagcct

SEQ ID NO: 800 - DNA, 33 bp, Homo sapien
acatcacgaggcaagatgggagccctgcagcct

SEQ ID NO: 801 - DNA, 33 bp, Homo sapien
agaggctgtatcagaccctgccgttcttcatgt

SEQ ID NO: 802 - DNA, 33 bp, Homo sapien
agaggctgtatcagacgctgccgttcttcatgt

SEQ ID NO: 803 - DNA, 33 bp, Homo sapien
ctagaacccgggtccacgcctgaagcacatgtc

SEQ ID NO: 804 - DNA, 33 bp, Homo sapien
ctagaacccgggtccatgcctgaagcacatgtc

SEQ ID NO: 805 - DNA, 33 bp, Homo sapien
tggggcaggtttgccacaatccaggtgagaggt

SEQ ID NO: 806 - DNA, 33 bp, Homo sapien
tggggcaggtttgccagaatccaggtgagaggt

SEQ ID NO: 807 - DNA, 33 bp, Homo sapien
tcagaggatttcagggacagattggccacaggt

SEQ ID NO: 808 - DNA, 33 bp, Homo sapien
tcagaggatttcaggggcagattggccacaggt

SEQ ID NO: 809 - DNA, 33 bp, Homo sapien
tcttcgaagtgacaaaagtccccgtctgcgagt

SEQ ID NO: 810 - DNA, 33 bp, Homo sapien
tcttcgaagtgacaaaggtccccgtctgcgagt

SEQ ID NO: 811 - DNA, 33 bp, Homo sapien
ttccacaatgcaaaagccatcttcgaagtgaca

SEQ ID NO: 812 - DNA, 33 bp, Homo sapien
ttccacaatgcaaaagtcatcttcgaagtgaca

SEQ ID NO: 813 - DNA, 33 bp, Homo sapien
ttagtggtaatgtcaacggtaacggtggtgatg

SEQ ID NO: 814 - DNA, 33 bp, Homo sapien
ttagtggtaatgtcaatggtaacggtggtgatg

SEQ ID NO: 815 - DNA, 33 bp, Homo sapien
ttctgcaggagctgagaccagaccacaaggcgg

SEQ ID NO: 816 - DNA, 33 bp, Homo sapien
ttctgcaggagctgaggccagaccacaaggcgg

SEQ ID NO: 817 - DNA, 33 bp, Homo sapien
tcaccaaagcctctaacgtaccagctgctcctt

SEQ ID NO: 818 - DNA, 33 bp, Homo sapien
tcaccaaagcctctaatgtaccagctgctcctt

SEQ ID NO: 819 - DNA, 33 bp, Homo sapien
cccctccaaaatcaaaaataggtgagggcacct

SEQ ID NO: 820 - DNA, 33 bp, Homo sapien
cccctccaaaatcaaagataggtgagggcacct

SEQ ID NO: 821 - DNA, 33 bp, Homo sapien
gagaaaggcgcacgaacctcggtgggcagagcc

SEQ ID NO: 822 - DNA, 33 bp, Homo sapien
gagaaaggcgcacgaatctcggtgggcagagcc

SEQ ID NO: 823 - DNA, 33 bp, Homo sapien
ctaactcgacaactgactaataggacagccttg

SEQ ID NO: 824 - DNA, 33 bp, Homo sapien
ctaactcgacaactgattaataggacagccttg

SEQ ID NO: 825 - DNA, 33 bp, Homo sapien
cacctgcacaaaggcacataaaagagtattcgc

SEQ ID NO: 826 - DNA, 33 bp, Homo sapien
cacctgcacaaaggcatataaaagagtattcgc

SEQ ID NO: 827 - DNA, 33 bp, Homo sapien
ggaacctcaagaaaaactggtgcccttgctgct

SEQ ID NO: 828 - DNA, 33 bp, Homo sapien
ggaacctcaagaaaaattggtgcccttgctgct

SEQ ID NO: 829 - DNA, 33 bp, Homo sapien
tagcttgtgaggcagacgtgactctgtggattt

SEQ ID NO: 830 - DNA, 33 bp, Homo sapien
tagcttgtgaggcagatgtgactctgtggattt

SEQ ID NO: 831 - DNA, 33 bp, Homo sapien
ggatggtataggattcaatgagttagtcaccct

SEQ ID NO: 832 - DNA, 33 bp, Homo sapien
ggatggtataggattccatgagttagtcaccct

SEQ ID NO: 833 - DNA, 33 bp, Homo sapien
cattgagtgcccggtacataataaaatcttgat

SEQ ID NO: 834 - DNA, 33 bp, Homo sapien
cattgagtgcccggtatataataaaatcttgat

SEQ ID NO: 835 - DNA, 33 bp, Homo sapien
acggcagcctgggtaacggatacgtcttctgat

SEQ ID NO: 836 - DNA, 33 bp, Homo sapien
acggcagcctgggtaatggatacgtcttctgat

SEQ ID NO: 837 - DNA, 33 bp, Homo sapien
aaaagaaacgatttgaataaaggcaactgcgtg

SEQ ID NO: 838 - DNA, 33 bp, Homo sapien
aaaagaaacgatttgagtaaaggcaactgcgtg

SEQ ID NO: 839 - DNA, 33 bp, Homo sapien
gtactgaagatgctcacaatttagcaaacggcc

SEQ ID NO: 840 - DNA, 33 bp, Homo sapien
gtactgaagatgctcataatttagcaaacggcc

SEQ ID NO: 841 - DNA, 33 bp, Homo sapien
agggcttactgtgcaccggtgtagttctgagta

SEQ ID NO: 842 - DNA, 33 bp, Homo sapien
agggcttactgtgcactggtgtagttctgagta

SEQ ID NO: 843 - DNA, 33 bp, Homo sapien
aggctgggcctagcgaccgtcttcctttccttg

SEQ ID NO: 844 - DNA, 33 bp, Homo sapien
aggctgggcctagcgatcgtcttcctttccttg

SEQ ID NO: 845 - DNA, 33 bp, Homo sapien
gtgagtagggacagagaatggcggttggagtgc

SEQ ID NO: 846 - DNA, 33 bp, Homo sapien
gtgagtagggacagagcatggcggttggagtgc

SEQ ID NO: 847 - DNA, 33 bp, Homo sapien
cacaggaagagggccacgcgaggacaaaggtag

SEQ ID NO: 848 - DNA, 33 bp, Homo sapien
cacaggaagagggccatgcgaggacaaaggtag

SEQ ID NO: 849 - DNA, 33 bp, Homo sapien
ctcatgttccctttcacgctgatgctgatctga

SEQ ID NO: 850 - DNA, 33 bp, Homo sapien
ctcatgttccctttcatgctgatgctgatctga

SEQ ID NO: 851 - DNA, 33 bp, Homo sapien
tctatgagttatttcaagtgagatgtggttgtt

SEQ ID NO: 852 - DNA, 33 bp, Homo sapien
tctatgagttatttcaggtgagatgtggttgtt

SEQ ID NO: 853 - DNA, 33 bp, Homo sapien
ctcagaaataaaggagaaaactatgactcacac

SEQ ID NO: 854 - DNA, 33 bp, Homo sapien
ctcagaaataaaggagcaaactatgactcacac

SEQ ID NO: 855 - DNA, 33 bp, Homo sapien
ttgagtgtttaaaaaactaactggtcactcttt

SEQ ID NO: 856 - DNA, 33 bp, Homo sapien
ttgagtgtttaaaaaattaactggtcactcttt

SEQ ID NO: 857 - DNA, 33 bp, Homo sapien
tgggaactcctctgaaacaactcaaatctagct

SEQ ID NO: 858 - DNA, 33 bp, Homo sapien
tgggaactcctctgaagcaactcaaatctagct

SEQ ID NO: 859 - DNA, 33 bp, Homo sapien
ggcttctgcaaggtgaactctaactattggggg

SEQ ID NO: 860 - DNA, 33 bp, Homo sapien
ggcttctgcaaggtgacctctaactattggggg

SEQ ID NO: 861 - DNA, 33 bp, Homo sapien
tttaagttcagccacacgaccagtggttaagtc

SEQ ID NO: 862 - DNA, 33 bp, Homo sapien
tttaagttcagccacatgaccagtggttaagtc

SEQ ID NO: 863 - DNA, 33 bp, Homo sapien
tggcacatattttcacaagtcccttctgggaga

SEQ ID NO: 864 - DNA, 33 bp, Homo sapien
tggcacatattttcacgagtcccttctgggaga

SEQ ID NO: 865 - DNA, 33 bp, Homo sapien
ctcatgtcagagggtgaatcacaaaactcaggg

SEQ ID NO: 866 - DNA, 33 bp, Homo sapien
ctcatgtcagagggtggatcacaaaactcaggg

SEQ ID NO: 867 - DNA, 33 bp, Homo sapien
tagtttaatatttctacggatcagtgcatatgg

SEQ ID NO: 868 - DNA, 33 bp, Homo sapien
tagtttaatatttctatggatcagtgcatatgg

SEQ ID NO: 869 - DNA, 33 bp, Homo sapien
gggattttttctattgaagcatgttacaggttg

SEQ ID NO: 870 - DNA, 33 bp, Homo sapien
gggattttttctattggagcatgttacaggttg

SEQ ID NO: 871 - DNA, 33 bp, Homo sapien
tggtttattttctctaacactgttcccttccaa

SEQ ID NO: 872 - DNA, 33 bp, Homo sapien
tggtttattttctctagcactgttcccttccaa

SEQ ID NO: 873 - DNA, 33 bp, Homo sapien
ctggtgactcagtccacgcatctatcttcttaa

SEQ ID NO: 874 - DNA, 33 bp, Homo sapien
ctggtgactcagtccatgcatctatcttcttaa

SEQ ID NO: 875 - DNA, 33 bp, Homo sapien
tacagaaggcaagtaaacatatgcaaagatgtc

SEQ ID NO: 876 - DNA, 33 bp, Homo sapien
tacagaaggcaagtaagcatatgcaaagatgtc

SEQ ID NO: 877 - DNA, 33 bp, Homo sapien
gtcattctcgggactgccagcttggatctgaaa

SEQ ID NO: 878 - DNA, 33 bp, Homo sapien
gtcattctcgggactgtcagcttggatctgaaa

SEQ ID NO: 879 - DNA, 33 bp, Homo sapien
tttctctccatttcaaactactaatttccttaa

SEQ ID NO: 880 - DNA, 33 bp, Homo sapien
tttctctccatttcaagctactaatttccttaa

SEQ ID NO: 881 - DNA, 33 bp, Homo sapien
acacgaagagaagttacataagattggcaaagt

SEQ ID NO: 882 - DNA, 33 bp, Homo sapien
acacgaagagaagttagataagattggcaaagt

SEQ ID NO: 883 - DNA, 33 bp, Homo sapien
atgcaactttgactgcaatgttaatgttatccc

SEQ ID NO: 884 - DNA, 33 bp, Homo sapien
atgcaactttgactgcgatgttaatgttatccc

SEQ ID NO: 885 - DNA, 33 bp, Homo sapien
gctctgagttcctgggccatcgttctccctgga

SEQ ID NO: 886 - DNA, 33 bp, Homo sapien
gctctgagttcctgggtcatcgttctccctgga

SEQ ID NO: 887 - DNA, 33 bp, Homo sapien
tgaaacactgactttccaatggtatttaattcg

SEQ ID NO: 888 - DNA, 33 bp, Homo sapien
tgaaacactgactttctaatggtatttaattcg

SEQ ID NO: 889 - DNA, 33 bp, Homo sapien
aaatgccttttaccaacgtccagctctagaagc

SEQ ID NO: 890 - DNA, 33 bp, Homo sapien
aaatgccttttaccaatgtccagctctagaagc

SEQ ID NO: 891 - DNA, 33 bp, Homo sapien
tgtgatccaatttttcaatacgttgggcaagaa

SEQ ID NO: 892 - DNA, 33 bp, Homo sapien
tgtgatccaatttttcgatacgttgggcaagaa

SEQ ID NO: 893 - DNA, 33 bp, Homo sapien
aggtggctctccgagagacggatggggagcagg

SEQ ID NO: 894 - DNA, 33 bp, Homo sapien
aggtggctctccgagatacggatggggagcagg

SEQ ID NO: 895 - DNA, 33 bp, Homo sapien
atcttacgttgttctgaatttacttcttgcatt

SEQ ID NO: 896 - DNA, 33 bp, Homo sapien
atcttacgttgttctggatttacttcttgcatt

SEQ ID NO: 897 - DNA, 33 bp, Homo sapien
cacgacccaaaaggaacgcaaagctgggaggac

SEQ ID NO: 898 - DNA, 33 bp, Homo sapien
cacgacccaaaaggaatgcaaagctgggaggac

SEQ ID NO: 899 - DNA, 33 bp, Homo sapien
cctcactggtgtcagacgttttcactgtttcag

SEQ ID NO: 900 - DNA, 33 bp, Homo sapien
cctcactggtgtcagatgttttcactgtttcag

SEQ ID NO: 901 - DNA, 33 bp, Homo sapien
agcaaacaaaacagaacgctgacaaaccagaaa

SEQ ID NO: 902 - DNA, 33 bp, Homo sapien
agcaaacaaaacagaatgctgacaaaccagaaa

SEQ ID NO: 903 - DNA, 33 bp, Homo sapien
gctctaaagcttttgaataaactttcactcctg

SEQ ID NO: 904 - DNA, 33 bp, Homo sapien
gctctaaagcttttgagtaaactttcactcctg

SEQ ID NO: 905 - DNA, 33 bp, Homo sapien
gcaggtgtctccacataagaagcatcctatgta

SEQ ID NO: 906 - DNA, 33 bp, Homo sapien
gcaggtgtctccacattagaagcatcctatgta

SEQ ID NO: 907 - DNA, 33 bp, Homo sapien
aataaataaaaagaggaagacgcgaaactgcag

SEQ ID NO: 908 - DNA, 33 bp, Homo sapien
aataaataaaaagaggtagacgcgaaactgcag

SEQ ID NO: 909 - DNA, 33 bp, Homo sapien
cagtagaggccatatacatacacatatttttgt

SEQ ID NO: 910 - DNA, 33 bp, Homo sapien
cagtagaggccatatatatacacatatttttgt

SEQ ID NO: 911 - DNA, 33 bp, Homo sapien
caaccaatctggcctcaaaagggtcagaggtgg

SEQ ID NO: 912 - DNA, 33 bp, Homo sapien
caaccaatctggcctcgaaagggtcagaggtgg

SEQ ID NO: 913 - DNA, 33 bp, Homo sapien
acaaaggcttcagcaacggttggtggaatgtga

SEQ ID NO: 914 - DNA, 33 bp, Homo sapien
acaaaggcttcagcaatggttggtggaatgtga

SEQ ID NO: 915 - DNA, 33 bp, Homo sapien
atcactttaaatcgaacgaaataaatgtctctt

SEQ ID NO: 916 - DNA, 33 bp, Homo sapien
atcactttaaatcgaaggaaataaatgtctctt

SEQ ID NO: 917 - DNA, 33 bp, Homo sapien
gcagaattgagacccaaattcaaccagtgacag

SEQ ID NO: 918 - DNA, 33 bp, Homo sapien
gcagaattgagacccagattcaaccagtgacag

SEQ ID NO: 919 - DNA, 33 bp, Homo sapien
ctagaagaactccctgaaactcaagctctgtaa

SEQ ID NO: 920 - DNA, 33 bp, Homo sapien
ctagaagaactccctggaactcaagctctgtaa

SEQ ID NO: 921 - DNA, 33 bp, Homo sapien
gattaatagggttgaaagattacaaatttcaga

SEQ ID NO: 922 - DNA, 33 bp, Homo sapien
gattaatagggttgaaggattacaaatttcaga

SEQ ID NO: 923 - DNA, 33 bp, Homo sapien
taatattcacatggaaacaattagcccagaacc

SEQ ID NO: 924 - DNA, 33 bp, Homo sapien
taatattcacatggaagcaattagcccagaacc

SEQ ID NO: 925 - DNA, 33 bp, Homo sapien
ccacataagcaccttcaccctgaaaacatcttt

SEQ ID NO: 926 - DNA, 33 bp, Homo sapien
ccacataagcaccttcgccctgaaaacatcttt

SEQ ID NO: 927 - DNA, 33 bp, Homo sapien
ctgttatgactgacaacgcacaagacccaagag

SEQ ID NO: 928 - DNA, 33 bp, Homo sapien
ctgttatgactgacaatgcacaagacccaagag

SEQ ID NO: 929 - DNA, 33 bp, Homo sapien
acaaaagtctattgtaagtgcatatatgagcac

SEQ ID NO: 930 - DNA, 33 bp, Homo sapien
acaaaagtctattgtaggtgcatatatgagcac

SEQ ID NO: 931 - DNA, 33 bp, Homo sapien
agattcaaattcacacccatgcaacgtcgggag

SEQ ID NO: 932 - DNA, 33 bp, Homo sapien
agattcaaattcacactcatgcaacgtcgggag

SEQ ID NO: 933 - DNA, 33 bp, Homo sapien
agcagtaagtcaaatccctctcacacttcacct

SEQ ID NO: 934 - DNA, 33 bp, Homo sapien
agcagtaagtcaaatctctctcacacttcacct

SEQ ID NO: 935 - DNA, 33 bp, Homo sapien
aaaaccaggacatatacgggcatgctggaatga

SEQ ID NO: 936 - DNA, 33 bp, Homo sapien
aaaaccaggacatatatgggcatgctggaatga

SEQ ID NO: 937 - DNA, 33 bp, Homo sapien
aaaaggttttgtggataaagttatcttatgcac

SEQ ID NO: 938 - DNA, 33 bp, Homo sapien
aaaaggttttgtggatgaagttatcttatgcac

SEQ ID NO: 939 - DNA, 33 bp, Homo sapien
ttcttccttagcttggccagttcctctgcatcc

SEQ ID NO: 940 - DNA, 33 bp, Homo sapien
ttcttccttagcttggtcagttcctctgcatcc

SEQ ID NO: 941 - DNA, 33 bp, Homo sapien
agaaagcacttctgaccgcaatgggccaggagc

SEQ ID NO: 942 - DNA, 33 bp, Homo sapien
agaaagcacttctgactgcaatgggccaggagc

SEQ ID NO: 943 - DNA, 33 bp, Homo sapien
ttttctatatttccagcctagaacagctgagcc

SEQ ID NO: 944 - DNA, 33 bp, Homo sapien
ttttctatatttccagtctagaacagctgagcc

SEQ ID NO: 945 - DNA, 33 bp, Homo sapien
cactaagagcctagaagtcttaaaagcaacctc

SEQ ID NO: 946 - DNA, 33 bp, Homo sapien
cactaagagcctagaattcttaaaagcaacctc

SEQ ID NO: 947 - DNA, 33 bp, Homo sapien
aaatctttctgtttccagagcccattttcttca

SEQ ID NO: 948 - DNA, 33 bp, Homo sapien
aaatctttctgtttccggagcccattttcttca

SEQ ID NO: 949 - DNA, 33 bp, Homo sapien
acttgtgtttctccagaatttaagactgtgcat

SEQ ID NO: 950 - DNA, 33 bp, Homo sapien
acttgtgtttctccaggatttaagactgtgcat

SEQ ID NO: 951 - DNA, 33 bp, Homo sapien
gccgtaggctccagacactactttgttccaatc

SEQ ID NO: 952 - DNA, 33 bp, Homo sapien
gccgtaggctccagacgctactttgttccaatc

SEQ ID NO: 953 - DNA, 33 bp, Homo sapien
acatgaattatgaatacgtaaatgatgcttctg

SEQ ID NO: 954 - DNA, 33 bp, Homo sapien
acatgaattatgaatatgtaaatgatgcttctg

SEQ ID NO: 955 - DNA, 33 bp, Homo sapien
caagtagtcagacagagagagatcgaattcttc

SEQ ID NO: 956 - DNA, 33 bp, Homo sapien
caagtagtcagacagatagagatcgaattcttc

SEQ ID NO: 957 - DNA, 33 bp, Homo sapien
ggagaagacgaatgtcccaactcaagtagtcag

SEQ ID NO: 958 - DNA, 33 bp, Homo sapien
ggagaagacgaatgtcgcaactcaagtagtcag

SEQ ID NO: 959 - DNA, 33 bp, Homo sapien
gagaaccagggagccaatcgaagggtaggagaa

SEQ ID NO: 960 - DNA, 33 bp, Homo sapien
gagaaccagggagccagtcgaagggtaggagaa

SEQ ID NO: 961 - DNA, 33 bp, Homo sapien
tcttttgtctcttgaaagtgggttgttttgttc

SEQ ID NO: 962 - DNA, 33 bp, Homo sapien
tcttttgtctcttgaaggtgggttgttttgttc

SEQ ID NO: 963 - DNA, 33 bp, Homo sapien
agggaacaccaagctacgaatgagttcctggct

SEQ ID NO: 964 - DNA, 33 bp, Homo sapien
agggaacaccaagctatgaatgagttcctggct

SEQ ID NO: 965 - DNA, 33 bp, Homo sapien
tgaagataaagatggtaaacaacacatcctggg

SEQ ID NO: 966 - DNA, 33 bp, Homo sapien
tgaagataaagatggtgaacaacacatcctggg

SEQ ID NO: 967 - DNA, 33 bp, Homo sapien
catctttatcttcaggaatttcgctttaattct

SEQ ID NO: 968 - DNA, 33 bp, Homo sapien
catctttatcttcagggatttcgctttaattct

SEQ ID NO: 969 - DNA, 33 bp, Homo sapien
gatttctgtgctagtggattttcccgaattggc

SEQ ID NO: 970 - DNA, 33 bp, Homo sapien
gatttctgtgctagtgtattttcccgaattggc

SEQ ID NO: 971 - DNA, 33 bp, Homo sapien
gcaaagatccattcacgctcatcgatcaaaaga

SEQ ID NO: 972 - DNA, 33 bp, Homo sapien
gcaaagatccattcactctcatcgatcaaaaga

SEQ ID NO: 973 - DNA, 33 bp, Homo sapien
gggaagtggacagggactcatttgcagcctgct

SEQ ID NO: 974 - DNA, 33 bp, Homo sapien
gggaagtggacagggattcatttgcagcctgct

SEQ ID NO: 975 - DNA, 33 bp, Homo sapien
ttatgctgctggcgcccgagaagggaagtggac

SEQ ID NO: 976 - DNA, 33 bp, Homo sapien
ttatgctgctggcgcctgagaagggaagtggac

SEQ ID NO: 977 - DNA, 33 bp, Homo sapien
cgagtctattgcagacaatgacatctgtgtcga

SEQ ID NO: 978 - DNA, 33 bp, Homo sapien
cgagtctattgcagacgatgacatctgtgtcga

SEQ ID NO: 979 - DNA, 33 bp, Homo sapien
tgttgagtgaataaatgaatgtcggatggagga

SEQ ID NO: 980 - DNA, 33 bp, Homo sapien
tgttgagtgaataaattaatgtcggatggagga

SEQ ID NO: 981 - DNA, 33 bp, Homo sapien
tccactctgatcctaaacataggaggccttcaa

SEQ ID NO: 982 - DNA, 33 bp, Homo sapien
tccactctgatcctaagcataggaggccttcaa

SEQ ID NO: 983 - DNA, 33 bp, Homo sapien
tcttttaagctttgaaagtttagttatgaatcc

SEQ ID NO: 984 - DNA, 33 bp, Homo sapien
tcttttaagctttgaaggtttagttatgaatcc

SEQ ID NO: 985 - DNA, 33 bp, Homo sapien
aggtcagtcatgtggacgctccctgcttccatg

SEQ ID NO: 986 - DNA, 33 bp, Homo sapien
aggtcagtcatgtggatgctccctgcttccatg

SEQ ID NO: 987 - DNA, 33 bp, Homo sapien
gcatttagtcacctggccaagcattcaatcaac

SEQ ID NO: 988 - DNA, 33 bp, Homo sapien
gcatttagtcacctggtcaagcattcaatcaac

SEQ ID NO: 989 - DNA, 33 bp, Homo sapien
cttggtgaatgcctgaaagatttgatataaagg

SEQ ID NO: 990 - DNA, 33 bp, Homo sapien
cttggtgaatgcctgagagatttgatataaagg

SEQ ID NO: 991 - DNA, 33 bp, Homo sapien
agaaagtacaatgaaacatctctgtggttctgc

SEQ ID NO: 992 - DNA, 33 bp, Homo sapien
agaaagtacaatgaaatatctctgtggttctgc

SEQ ID NO: 993 - DNA, 33 bp, Homo sapien
ttccacaagatcgccaactcctacattgggata

SEQ ID NO: 994 - DNA, 33 bp, Homo sapien
ttccacaagatcgccacctcctacattgggata

SEQ ID NO: 995 - DNA, 33 bp, Homo sapien
cattgcatttcatggacacgtctcctttgtcta

SEQ ID NO: 996 - DNA, 33 bp, Homo sapien
cattgcatttcatggatacgtctcctttgtcta

SEQ ID NO: 997 - DNA, 33 bp, Homo sapien
gatattatcacactaacgcaaaaggtcagcatg

SEQ ID NO: 998 - DNA, 33 bp, Homo sapien
gatattatcacactaatgcaaaaggtcagcatg

SEQ ID NO: 999 - DNA, 33 bp, Homo sapien
cttgactgcaaggaaaagaagctcactcaaagt

SEQ ID NO: 1000 - DNA, 33 bp, Homo sapien
cttgactgcaaggaaaggaagctcactcaaagt

SEQ ID NO: 1001 - DNA, 33 bp, Homo sapien
gcaacagtggactacacgacaccaccttccaca

SEQ ID NO: 1002 - DNA, 33 bp, Homo sapien
gcaacagtggactacatgacaccaccttccaca

SEQ ID NO: 1003 - DNA, 33 bp, Homo sapien
agacttcggtcgggacaaggcggcgcccattca

SEQ ID NO: 1004 - DNA, 33 bp, Homo sapien
agacttcggtcgggactaggcggcgcccattca

SEQ ID NO: 1005 - DNA, 33 bp, Homo sapien
tcacttccaccaataacgcgttaatcattcatc

SEQ ID NO: 1006 - DNA, 33 bp, Homo sapien
tcacttccaccaataatgcgttaatcattcatc

SEQ ID NO: 1007 - DNA, 33 bp, Homo sapien
tgggttgggagaaagtaaagttatatggaaaca

SEQ ID NO: 1008 - DNA, 33 bp, Homo sapien
tgggttgggagaaagtgaagttatatggaaaca

SEQ ID NO: 1009 - DNA, 33 bp, Homo sapien
gctcagagcatcccagactgaagagcctcactc

SEQ ID NO: 1010 - DNA, 33 bp, Homo sapien
gctcagagcatcccagcctgaagagcctcactc

SEQ ID NO: 1011 - DNA, 33 bp, Homo sapien
acttggctttcaacctaactccagctctatagt

SEQ ID NO: 1012 - DNA, 33 bp, Homo sapien
acttggctttcaaccttactccagctctatagt

SEQ ID NO: 1013 - DNA, 33 bp, Homo sapien
gagacgtagagtcagcgcctggtgtctacccca

SEQ ID NO: 1014 - DNA, 33 bp, Homo sapien
gagacgtagagtcagctcctggtgtctacccca

SEQ ID NO: 1015 - DNA, 33 bp, Homo sapien
acagaggcagcgatgtaaagacacagggaggag

SEQ ID NO: 1016 - DNA, 33 bp, Homo sapien
acagaggcagcgatgtgaagacacagggaggag

SEQ ID NO: 1017 - DNA, 33 bp, Homo sapien
ctggcccagaaagcccccaagtagagattgacg

SEQ ID NO: 1018 - DNA, 33 bp, Homo sapien
ctggcccagaaagcccgcaagtagagattgacg

SEQ ID NO: 1019 - DNA, 33 bp, Homo sapien
agtcaaacgcgcatggccagtcagttctggagg

SEQ ID NO: 1020 - DNA, 33 bp, Homo sapien
agtcaaacgcgcatggtcagtcagttctggagg

SEQ ID NO: 1021 - DNA, 33 bp, Homo sapien
aaaatctttctacataaaaactcaacacaaaag

SEQ ID NO: 1022 - DNA, 33 bp, Homo sapien
aaaatctttctacatacaaactcaacacaaaag

SEQ ID NO: 1023 - DNA, 33 bp, Homo sapien
cctgttttgccaatcaacttgcttttgagtgag

SEQ ID NO: 1024 - DNA, 33 bp, Homo sapien
cctgttttgccaatcagcttgcttttgagtgag

SEQ ID NO: 1025 - DNA, 33 bp, Homo sapien
acagccttcccagaaacaggaccattcacatct

SEQ ID NO: 1026 - DNA, 33 bp, Homo sapien
acagccttcccagaaataggaccattcacatct

SEQ ID NO: 1027 - DNA, 33 bp, Homo sapien
atgtcaccttgaaccaccttggcacagccggtt

SEQ ID NO: 1028 - DNA, 33 bp, Homo sapien
atgtcaccttgaaccatcttggcacagccggtt

SEQ ID NO: 1029 - DNA, 33 bp, Homo sapien
ctaaagaaggaataaacacaatttgcaacaact

SEQ ID NO: 1030 - DNA, 33 bp, Homo sapien
ctaaagaaggaataaatacaatttgcaacaact

SEQ ID NO: 1031 - DNA, 33 bp, Homo sapien
tacctcataaggtaagccgtgaggagtggacag

SEQ ID NO: 1032 - DNA, 33 bp, Homo sapien
tacctcataaggtaagtcgtgaggagtggacag

SEQ ID NO: 1033 - DNA, 33 bp, Homo sapien
cagagaagtggcaaaagtcttccaggcactctg

SEQ ID NO: 1034 - DNA, 33 bp, Homo sapien
cagagaagtggcaaaattcttccaggcactctg

SEQ ID NO: 1035 - DNA, 33 bp, Homo sapien
cgcaccagagaaaaacacccagagaagtggcaa

SEQ ID NO: 1036 - DNA, 33 bp, Homo sapien
cgcaccagagaaaaacgcccagagaagtggcaa

SEQ ID NO: 1037 - DNA, 33 bp, Homo sapien
ttttgtcttaagcgtgaagaaccatatgggcac

SEQ ID NO: 1038 - DNA, 33 bp, Homo sapien
ttttgtcttaagcgtggagaaccatatgggcac

SEQ ID NO: 1039 - DNA, 33 bp, Homo sapien
gggagatggcagaatcaacttttggagaaggga

SEQ ID NO: 1040 - DNA, 33 bp, Homo sapien
gggagatggcagaatctacttttggagaaggga

SEQ ID NO: 1041 - DNA, 33 bp, Homo sapien
atagattcaattattcaagcaacaatggtactt

SEQ ID NO: 1042 - DNA, 33 bp, Homo sapien
atagattcaattattcgagcaacaatggtactt

SEQ ID NO: 1043 - DNA, 33 bp, Homo sapien
gcatcaactcaagcagaccactaaggtgccagc

SEQ ID NO: 1044 - DNA, 33 bp, Homo sapien
gcatcaactcaagcaggccactaaggtgccagc

SEQ ID NO: 1045 - DNA, 33 bp, Homo sapien
acatggccaaccttacaaattcccaggagcctc

SEQ ID NO: 1046 - DNA, 33 bp, Homo sapien
acatggccaaccttacgaattcccaggagcctc

SEQ ID NO: 1047 - DNA, 33 bp, Homo sapien
atgctgataatggcaacaatggtagctattggg

SEQ ID NO: 1048 - DNA, 33 bp, Homo sapien
atgctgataatggcaataatggtagctattggg

SEQ ID NO: 1049 - DNA, 33 bp, Homo sapien
gaagagaatgaaccaaaccattctgagaagtca

SEQ ID NO: 1050 - DNA, 33 bp, Homo sapien
gaagagaatgaaccaacccattctgagaagtca

SEQ ID NO: 1051 - DNA, 33 bp, Homo sapien
taatttaaattgggtaataaattctgaccctaa

SEQ ID NO: 1052 - DNA, 33 bp, Homo sapien
taatttaaattgggtagtaaattctgaccctaa

SEQ ID NO: 1053 - DNA, 33 bp, Homo sapien
aggcaagcgtcttggacgaaattttgatgagta

SEQ ID NO: 1054 - DNA, 33 bp, Homo sapien
aggcaagcgtcttggatgaaattttgatgagta

SEQ ID NO: 1055 - DNA, 33 bp, Homo sapien
cactcccatcaccacaacgatttcggtgtagag

SEQ ID NO: 1056 - DNA, 33 bp, Homo sapien
cactcccatcaccacagcgatttcggtgtagag

SEQ ID NO: 1057 - DNA, 33 bp, Homo sapien
tactcctattgagaacaaataatctagattagt

SEQ ID NO: 1058 - DNA, 33 bp, Homo sapien
tactcctattgagaacgaataatctagattagt

SEQ ID NO: 1059 - DNA, 33 bp, Homo sapien
tgccatgtatagtgtaaaatgttcagtagcatc

SEQ ID NO: 1060 - DNA, 33 bp, Homo sapien
tgccatgtatagtgtagaatgttcagtagcatc

SEQ ID NO: 1061 - DNA, 33 bp, Homo sapien
gagcaggggatgaatgaacacccgcaagtgggt

SEQ ID NO: 1062 - DNA, 33 bp, Homo sapien
gagcaggggatgaatgcacacccgcaagtgggt

SEQ ID NO: 1063 - DNA, 33 bp, Homo sapien
catgccaatgagtccacatttacatcttcaggc

SEQ ID NO: 1064 - DNA, 33 bp, Homo sapien
catgccaatgagtccatatttacatcttcaggc

SEQ ID NO: 1065 - DNA, 33 bp, Homo sapien
aatctctggtaccagcactcatactgggaaaat

SEQ ID NO: 1066 - DNA, 33 bp, Homo sapien
aatctctggtaccagcgctcatactgggaaaat

SEQ ID NO: 1067 - DNA, 33 bp, Homo sapien
gtgaaagggatcataaaaggtgagatggaaact

SEQ ID NO: 1068 - DNA, 33 bp, Homo sapien
gtgaaagggatcataagaggtgagatggaaact

SEQ ID NO: 1069 - DNA, 33 bp, Homo sapien
tgctataaaaacagcaagagcatttgaacaaga

SEQ ID NO: 1070 - DNA, 33 bp, Homo sapien
tgctataaaaacagcaggagcatttgaacaaga

SEQ ID NO: 1071 - DNA, 33 bp, Homo sapien
tggggccaacgcgtgacgatgggcctgaaattg

SEQ ID NO: 1072 - DNA, 33 bp, Homo sapien
tggggccaacgcgtgatgatgggcctgaaattg

SEQ ID NO: 1073 - DNA, 33 bp, Homo sapien
gccagtcacctgcttgcaatgaaagcttgtgtc

SEQ ID NO: 1074 - DNA, 33 bp, Homo sapien
gccagtcacctgcttgtaatgaaagcttgtgtc

SEQ ID NO: 1075 - DNA, 33 bp, Homo sapien
ataaatgatgcgttgagcctgcccaggactcca

SEQ ID NO: 1076 - DNA, 33 bp, Homo sapien
ataaatgatgcgttgatcctgcccaggactcca

SEQ ID NO: 1077 - DNA, 33 bp, Homo sapien
acaatacccacctgcaacatttatttaaatcat

SEQ ID NO: 1078 - DNA, 33 bp, Homo sapien
acaatacccacctgcagcatttatttaaatcat

SEQ ID NO: 1079 - DNA, 33 bp, Homo sapien
tgacataattgtgaaaaggtgactgtgaaaaag

SEQ ID NO: 1080 - DNA, 33 bp, Homo sapien
tgacataattgtgaaatggtgactgtgaaaaag

SEQ ID NO: 1081 - DNA, 33 bp, Homo sapien
ctaatccactttcctacgcccatcttgttgtcc

SEQ ID NO: 1082 - DNA, 33 bp, Homo sapien
ctaatccactttcctatgcccatcttgttgtcc

SEQ ID NO: 1083 - DNA, 33 bp, Homo sapien
taaggtatggaggaaacagcttggggtgacacc

SEQ ID NO: 1084 - DNA, 33 bp, Homo sapien
taaggtatggaggaaagagcttggggtgacacc

SEQ ID NO: 1085 - DNA, 33 bp, Homo sapien
tgctagagaaacagccacatctacttccaaaga

SEQ ID NO: 1086 - DNA, 33 bp, Homo sapien
tgctagagaaacagccgcatctacttccaaaga

SEQ ID NO: 1087 - DNA, 33 bp, Homo sapien
agcagagttgtccaccaagtgttggccacagtg

SEQ ID NO: 1088 - DNA, 33 bp, Homo sapien
agcagagttgtccacccagtgttggccacagtg

SEQ ID NO: 1089 - DNA, 33 bp, Homo sapien
gctattcttcagcttacatttatatttattccc

SEQ ID NO: 1090 - DNA, 33 bp, Homo sapien
gctattcttcagcttagatttatatttattccc

SEQ ID NO: 1091 - DNA, 33 bp, Homo sapien
ggatggaaaagtctacccagagctaggcaaact

SEQ ID NO: 1092 - DNA, 33 bp, Homo sapien
ggatggaaaagtctactcagagctaggcaaact

SEQ ID NO: 1093 - DNA, 33 bp, Homo sapien
tggatgaaagaaaacaaggtcatgagctggaga

SEQ ID NO: 1094 - DNA, 33 bp, Homo sapien
tggatgaaagaaaacagggtcatgagctggaga

SEQ ID NO: 1095 - DNA, 33 bp, Homo sapien
ggggtccacggatggaaagtgactaggaggaaa

SEQ ID NO: 1096 - DNA, 33 bp, Homo sapien
ggggtccacggatggagagtgactaggaggaaa

SEQ ID NO: 1097 - DNA, 33 bp, Homo sapien
cctccgacaaattaacagaaaacatagtgactt

SEQ ID NO: 1098 - DNA, 33 bp, Homo sapien
cctccgacaaattaacggaaaacatagtgactt

SEQ ID NO: 1099 - DNA, 33 bp, Homo sapien
atggtcaccgtcttctaaagggctgtaggatcg

SEQ ID NO: 1100 - DNA, 33 bp, Homo sapien
atggtcaccgtcttctgaagggctgtaggatcg

SEQ ID NO: 1101 - DNA, 33 bp, Homo sapien
gccagagctgtgtcacaatcaactctaggtata

SEQ ID NO: 1102 - DNA, 33 bp, Homo sapien
gccagagctgtgtcacgatcaactctaggtata

SEQ ID NO: 1103 - DNA, 33 bp, Homo sapien
ggggtgagttttagtccgaactagagtgaacca

SEQ ID NO: 1104 - DNA, 33 bp, Homo sapien
ggggtgagttttagtctgaactagagtgaacca

SEQ ID NO: 1105 - DNA, 33 bp, Homo sapien
gcaattgacagatcctaaattacgttccttttg

SEQ ID NO: 1106 - DNA, 33 bp, Homo sapien
gcaattgacagatcctgaattacgttccttttg

SEQ ID NO: 1107 - DNA, 33 bp, Homo sapien
ggtcaaacttcaaaagaaccaacagaactattt

SEQ ID NO: 1108 - DNA, 33 bp, Homo sapien
ggtcaaacttcaaaaggaccaacagaactattt

SEQ ID NO: 1109 - DNA, 33 bp, Homo sapien
gcacacttacagaaaacctcctgtgctgacatc

SEQ ID NO: 1110 - DNA, 33 bp, Homo sapien
gcacacttacagaaaatctcctgtgctgacatc

SEQ ID NO: 1111 - DNA, 33 bp, Homo sapien
agtccacaaacattgcgctccgggtgaatcctg

SEQ ID NO: 1112 - DNA, 33 bp, Homo sapien
agtccacaaacattgctctccgggtgaatcctg

SEQ ID NO: 1113 - DNA, 33 bp, Homo sapien
caactgttcactgatacgttgcatacacaggcc

SEQ ID NO: 1114 - DNA, 33 bp, Homo sapien
caactgttcactgatatgttgcatacacaggcc

SEQ ID NO: 1115 - DNA, 33 bp, Homo sapien
gggtctgttacagtgacggaagactttgttttt

SEQ ID NO: 1116 - DNA, 33 bp, Homo sapien
gggtctgttacagtgatggaagactttgttttt

SEQ ID NO: 1117 - DNA, 33 bp, Homo sapien
cctggcctgtgatgcacactctaaaagaccaac

SEQ ID NO: 1118 - DNA, 33 bp, Homo sapien
cctggcctgtgatgcagactctaaaagaccaac

SEQ ID NO: 1119 - DNA, 33 bp, Homo sapien
aggtccctggctaaaccacgacaataaaagcag

SEQ ID NO: 1120 - DNA, 33 bp, Homo sapien
aggtccctggctaaactacgacaataaaagcag

SEQ ID NO: 1121 - DNA, 33 bp, Homo sapien
ccatgaaggagcgccaagcatatcagacaaaaa

SEQ ID NO: 1122 - DNA, 33 bp, Homo sapien
ccatgaaggagcgccaggcatatcagacaaaaa

SEQ ID NO: 1123 - DNA, 33 bp, Homo sapien
ttggccagatgagggcaagtcctggctctggct

SEQ ID NO: 1124 - DNA, 33 bp, Homo sapien
ttggccagatgagggcgagtcctggctctggct

SEQ ID NO: 1125 - DNA, 33 bp, Homo sapien
ctctcctaaaatttccacccacaccatcttcag

SEQ ID NO: 1126 - DNA, 33 bp, Homo sapien
ctctcctaaaatttccgcccacaccatcttcag

SEQ ID NO: 1127 - DNA, 33 bp, Homo sapien
aggagccctacaaagcaagaacttgcaggcaac

SEQ ID NO: 1128 - DNA, 33 bp, Homo sapien
aggagccctacaaagcgagaacttgcaggcaac

SEQ ID NO: 1129 - DNA, 33 bp, Homo sapien
aatgcaggagggcttccacaggagctggccagc

SEQ ID NO: 1130 - DNA, 33 bp, Homo sapien
aatgcaggagggcttctacaggagctggccagc

SEQ ID NO: 1131 - DNA, 33 bp, Homo sapien
tgggtccactctgtgacgccaagcagatgacag

SEQ ID NO: 1132 - DNA, 33 bp, Homo sapien
tgggtccactctgtgatgccaagcagatgacag

SEQ ID NO: 1133 - DNA, 33 bp, Homo sapien
ttgtaacatccatctcactagggtactctctcc

SEQ ID NO: 1134 - DNA, 33 bp, Homo sapien
ttgtaacatccatctcgctagggtactctctcc

SEQ ID NO: 1135 - DNA, 33 bp, Homo sapien
acaaatagcaggcacacgagaaatatctgagtg

SEQ ID NO: 1136 - DNA, 33 bp, Homo sapien
acaaatagcaggcacaggagaaatatctgagtg

SEQ ID NO: 1137 - DNA, 33 bp, Homo sapien
ctactggcttcaaggaagacgtgaggatgaggc

SEQ ID NO: 1138 - DNA, 33 bp, Homo sapien
ctactggcttcaaggaggacgtgaggatgaggc

SEQ ID NO: 1139 - DNA, 33 bp, Homo sapien
tggcgtgggcttatgcactcccgcagaattagt

SEQ ID NO: 1140 - DNA, 33 bp, Homo sapien
tggcgtgggcttatgcgctcccgcagaattagt

SEQ ID NO: 1141 - DNA, 33 bp, Homo sapien
ccacctgccttgtgaacgaggcctcacttttcc

SEQ ID NO: 1142 - DNA, 33 bp, Homo sapien
ccacctgccttgtgaatgaggcctcacttttcc

SEQ ID NO: 1143 - DNA, 33 bp, Homo sapien
cacgctcctccctttacgtagctggaatagcac

SEQ ID NO: 1144 - DNA, 33 bp, Homo sapien
cacgctcctccctttatgtagctggaatagcac

SEQ ID NO: 1145 - DNA, 33 bp, Homo sapien
gggctggaggcaaacgcaatgggctgggacccc

SEQ ID NO: 1146 - DNA, 33 bp, Homo sapien
gggctggaggcaaacgtaatgggctgggacccc

SEQ ID NO: 1147 - DNA, 33 bp, Homo sapien
ctgggccccagcggaccctggctgagcacgggg

SEQ ID NO: 1148 - DNA, 33 bp, Homo sapien
ctgggccccagcggactctggctgagcacgggg

SEQ ID NO: 1149 - DNA, 33 bp, Homo sapien
tccttaggtctctgaacgttcatacagggaaca

SEQ ID NO: 1150 - DNA, 33 bp, Homo sapien
tccttaggtctctgaatgttcatacagggaaca

SEQ ID NO: 1151 - DNA, 33 bp, Homo sapien
tctcagtgctgtaactgactgtcaatgagagtg

SEQ ID NO: 1152 - DNA, 33 bp, Homo sapien
tctcagtgctgtaacttactgtcaatgagagtg

SEQ ID NO: 1153 - DNA, 33 bp, Homo sapien
ggcagccaaatcaactcaacccctgtcctcaca

SEQ ID NO: 1154 - DNA, 33 bp, Homo sapien
ggcagccaaatcaactgaacccctgtcctcaca

SEQ ID NO: 1155 - DNA, 33 bp, Homo sapien
agcgatcacgtaccgactattgacttggctcag

SEQ ID NO: 1156 - DNA, 33 bp, Homo sapien
agcgatcacgtaccgagtattgacttggctcag

SEQ ID NO: 1157 - DNA, 33 bp, Homo sapien
aggaaggaagagattaccgctggccacagagga

SEQ ID NO: 1158 - DNA, 33 bp, Homo sapien
aggaaggaagagattatcgctggccacagagga

SEQ ID NO: 1159 - DNA, 33 bp, Homo sapien
actggtggatgtcccactcaaacacatgtggga

SEQ ID NO: 1160 - DNA, 33 bp, Homo sapien
actggtggatgtcccattcaaacacatgtggga

SEQ ID NO: 1161 - DNA, 33 bp, Homo sapien
agagaggaattgaaaacgctgtcagcttttata

SEQ ID NO: 1162 - DNA, 33 bp, Homo sapien
agagaggaattgaaaaggctgtcagcttttata

SEQ ID NO: 1163 - DNA, 33 bp, Homo sapien
aggaaagagccaaaatcactctgtggggcccca

SEQ ID NO: 1164 - DNA, 33 bp, Homo sapien
aggaaagagccaaaatgactctgtggggcccca

SEQ ID NO: 1165 - DNA, 33 bp, Homo sapien
atccttccaaggacgcgctgtctgagggcttcc

SEQ ID NO: 1166 - DNA, 33 bp, Homo sapien
atccttccaaggacgctctgtctgagggcttcc

SEQ ID NO: 1167 - DNA, 33 bp, Homo sapien
aagactgaaagcagtcaactcgcccccagcaac

SEQ ID NO: 1168 - DNA, 33 bp, Homo sapien
aagactgaaagcagtcgactcgcccccagcaac

SEQ ID NO: 1169 - DNA, 33 bp, Homo sapien
atacttacttattctacgagactatgtcttttg

SEQ ID NO: 1170 - DNA, 33 bp, Homo sapien
atacttacttattctatgagactatgtcttttg

SEQ ID NO: 1171 - DNA, 33 bp, Homo sapien
agagatgattcatggcactaaatcagacattga

SEQ ID NO: 1172 - DNA, 33 bp, Homo sapien
agagatgattcatggctctaaatcagacattga

SEQ ID NO: 1173 - DNA, 33 bp, Homo sapien
ggtctgtaaaacctaaactattgactctctggc

SEQ ID NO: 1174 - DNA, 33 bp, Homo sapien
ggtctgtaaaacctaagctattgactctctggc

SEQ ID NO: 1175 - DNA, 33 bp, Homo sapien
gtttgttttcggtgacagggcctcagtcttgtg

SEQ ID NO: 1176 - DNA, 33 bp, Homo sapien
gtttgttttcggtgacggggcctcagtcttgtg

SEQ ID NO: 1177 - DNA, 33 bp, Homo sapien
gtcacaggtgcacttgcatgagtatttgtgatt

SEQ ID NO: 1178 - DNA, 33 bp, Homo sapien
gtcacaggtgcacttgtatgagtatttgtgatt

SEQ ID NO: 1179 - DNA, 33 bp, Homo sapien
tacatcaaacctctaaacaaatggcaaggctcc

SEQ ID NO: 1180 - DNA, 33 bp, Homo sapien
tacatcaaacctctaagcaaatggcaaggctcc

SEQ ID NO: 1181 - DNA, 33 bp, Homo sapien
tgtggcaaacagaaacacttagacacattgctg

SEQ ID NO: 1182 - DNA, 33 bp, Homo sapien
tgtggcaaacagaaacgcttagacacattgctg

SEQ ID NO: 1183 - DNA, 33 bp, Homo sapien
agtgctgagattttgccaagaagatggccctga

SEQ ID NO: 1184 - DNA, 33 bp, Homo sapien
agtgctgagattttgctaagaagatggccctga

SEQ ID NO: 1185 - DNA, 33 bp, Homo sapien
gtgctgttttctgagtaaccccgcagagtcttc

SEQ ID NO: 1186 - DNA, 33 bp, Homo sapien
gtgctgttttctgagtgaccccgcagagtcttc

SEQ ID NO: 1187 - DNA, 33 bp, Homo sapien
attagtatacagtggcaattaacagaagcagaa

SEQ ID NO: 1188 - DNA, 33 bp, Homo sapien
attagtatacagtggcgattaacagaagcagaa

SEQ ID NO: 1189 - DNA, 33 bp, Homo sapien
aaccgatcatccaaaaataagaatatgctttta

SEQ ID NO: 1190 - DNA, 33 bp, Homo sapien
aaccgatcatccaaaactaagaatatgctttta

SEQ ID NO: 1191 - DNA, 33 bp, Homo sapien
gctgaactaggttaccactttgctctaggcagc

SEQ ID NO: 1192 - DNA, 33 bp, Homo sapien
gctgaactaggttaccgctttgctctaggcagc

SEQ ID NO: 1193 - DNA, 33 bp, Homo sapien
ccacgaacgcctcgacaggataaaagctgtggt

SEQ ID NO: 1194 - DNA, 33 bp, Homo sapien
ccacgaacgcctcgacgggataaaagctgtggt

SEQ ID NO: 1195 - DNA, 33 bp, Homo sapien
gcactgggtgtaatgaacactgtctgcttttgc

SEQ ID NO: 1196 - DNA, 33 bp, Homo sapien
gcactgggtgtaatgaccactgtctgcttttgc

SEQ ID NO: 1197 - DNA, 33 bp, Homo sapien
gagggcagaatttatcccagatcccgatctgga

SEQ ID NO: 1198 - DNA, 33 bp, Homo sapien
gagggcagaatttatctcagatcccgatctgga

SEQ ID NO: 1199 - DNA, 33 bp, Homo sapien
gactgggacccccacaagcagcacccccgcatg

SEQ ID NO: 1200 - DNA, 33 bp, Homo sapien
gactgggacccccacacgcagcacccccgcatg

SEQ ID NO: 1201 - DNA, 33 bp, Homo sapien
gacaatgcaaacatccaccactggcatttggcc

SEQ ID NO: 1202 - DNA, 33 bp, Homo sapien
gacaatgcaaacatccgccactggcatttggcc

SEQ ID NO: 1203 - DNA, 33 bp, Homo sapien
ggggccctgttggttcactgatcatgagaacct

SEQ ID NO: 1204 - DNA, 33 bp, Homo sapien
ggggccctgttggttcgctgatcatgagaacct

SEQ ID NO: 1205 - DNA, 33 bp, Homo sapien
ataagatggaagtggacgaaaactggggaaccc

SEQ ID NO: 1206 - DNA, 33 bp, Homo sapien
ataagatggaagtggatgaaaactggggaaccc

SEQ ID NO: 1207 - DNA, 33 bp, Homo sapien
gcgtcgtaacaactgcaatgtcttatcttcagt

SEQ ID NO: 1208 - DNA, 33 bp, Homo sapien
gcgtcgtaacaactgcgatgtcttatcttcagt

SEQ ID NO: 1209 - DNA, 33 bp, Homo sapien
acaatccgggtaccaaaagtcagttagtaaagg

SEQ ID NO: 1210 - DNA, 33 bp, Homo sapien
acaatccgggtaccaagagtcagttagtaaagg

SEQ ID NO: 1211 - DNA, 33 bp, Homo sapien
aggcaaaacatttcaaagggcctccagtatcag

SEQ ID NO: 1212 - DNA, 33 bp, Homo sapien
aggcaaaacatttcaaggggcctccagtatcag

SEQ ID NO: 1213 - DNA, 33 bp, Homo sapien
catgtggaggagagaggccctcaggtcttggtg

SEQ ID NO: 1214 - DNA, 33 bp, Homo sapien
catgtggaggagagagtccctcaggtcttggtg

SEQ ID NO: 1215 - DNA, 33 bp, Homo sapien
atattttaaggtctggaaattccactgggtgct

SEQ ID NO: 1216 - DNA, 33 bp, Homo sapien
atattttaaggtctggtaattccactgggtgct

SEQ ID NO: 1217 - DNA, 33 bp, Homo sapien
attattgaagaagaaccaaactgaaagaatgac

SEQ ID NO: 1218 - DNA, 33 bp, Homo sapien
attattgaagaagaacgaaactgaaagaatgac

SEQ ID NO: 1219 - DNA, 33 bp, Homo sapien
tctctcttgaccaagaagaggccacatgtgtct

SEQ ID NO: 1220 - DNA, 33 bp, Homo sapien
tctctcttgaccaagaggaggccacatgtgtct

SEQ ID NO: 1221 - DNA, 33 bp, Homo sapien
attcttgaatcgggtaacctccagaatcacagc

SEQ ID NO: 1222 - DNA, 33 bp, Homo sapien
attcttgaatcgggtagcctccagaatcacagc

SEQ ID NO: 1223 - DNA, 33 bp, Homo sapien
ttttgcttttaagagaagttactatttattcct

SEQ ID NO: 1224 - DNA, 33 bp, Homo sapien
ttttgcttttaagagaggttactatttattcct

SEQ ID NO: 1225 - DNA, 33 bp, Homo sapien
tggaaagagtcagaaaatgggtaggtagcttcc

SEQ ID NO: 1226 - DNA, 33 bp, Homo sapien
tggaaagagtcagaaattgggtaggtagcttcc

SEQ ID NO: 1227 - DNA, 33 bp, Homo sapien
gccatgttctagggaaatgagctgtcgctgata

SEQ ID NO: 1228 - DNA, 33 bp, Homo sapien
gccatgttctagggaactgagctgtcgctgata

SEQ ID NO: 1229 - DNA, 33 bp, Homo sapien
gaattctagataggagcctccaaattcagtatg

SEQ ID NO: 1230 - DNA, 33 bp, Homo sapien
gaattctagataggagtctccaaattcagtatg

SEQ ID NO: 1231 - DNA, 33 bp, Homo sapien
ggtcttcctcttttgccgactggagtacagtaa

SEQ ID NO: 1232 - DNA, 33 bp, Homo sapien
ggtcttcctcttttgcggactggagtacagtaa

SEQ ID NO: 1233 - DNA, 33 bp, Homo sapien
gtaggcaaaattctaacatgacctccacaattg

SEQ ID NO: 1234 - DNA, 33 bp, Homo sapien
gtaggcaaaattctaagatgacctccacaattg

SEQ ID NO: 1235 - DNA, 33 bp, Homo sapien
taaaatataacgcaccactcaatggatgagtta

SEQ ID NO: 1236 - DNA, 33 bp, Homo sapien
taaaatataacgcacccctcaatggatgagtta

SEQ ID NO: 1237 - DNA, 33 bp, Homo sapien
ctgaggcttcatgaggaacagaaaaaaggcacc

SEQ ID NO: 1238 - DNA, 33 bp, Homo sapien
ctgaggcttcatgaggtacagaaaaaaggcacc

SEQ ID NO: 1239 - DNA, 33 bp, Homo sapien
attctgccttaagctgaatacatcccaagattt

SEQ ID NO: 1240 - DNA, 33 bp, Homo sapien
attctgccttaagctggatacatcccaagattt

SEQ ID NO: 1241 - DNA, 33 bp, Homo sapien
gttctgtaaccgtagtaaatgagcaggttgctc

SEQ ID NO: 1242 - DNA, 33 bp, Homo sapien
gttctgtaaccgtagtgaatgagcaggttgctc

SEQ ID NO: 1243 - DNA, 33 bp, Homo sapien
ggttcaccaattttgcgactttgacatcctggt

SEQ ID NO: 1244 - DNA, 33 bp, Homo sapien
ggttcaccaattttgctactttgacatcctggt

SEQ ID NO: 1245 - DNA, 33 bp, Homo sapien
cctcaagattcatcacggtcataccctggagat

SEQ ID NO: 1246 - DNA, 33 bp, Homo sapien
cctcaagattcatcactgtcataccctggagat

SEQ ID NO: 1247 - DNA, 33 bp, Homo sapien
catcacaggaagtgaacgtgagaattcttacca

SEQ ID NO: 1248 - DNA, 33 bp, Homo sapien
catcacaggaagtgaatgtgagaattcttacca

SEQ ID NO: 1249 - DNA, 33 bp, Homo sapien
ctagtgcataagctagcccatgagttattgaaa

SEQ ID NO: 1250 - DNA, 33 bp, Homo sapien
ctagtgcataagctagtccatgagttattgaaa

SEQ ID NO: 1251 - DNA, 33 bp, Homo sapien
gttttatatcctgggtaaaacatgacttgtggg

SEQ ID NO: 1252 - DNA, 33 bp, Homo sapien
gttttatatcctgggtgaaacatgacttgtggg

SEQ ID NO: 1253 - DNA, 33 bp, Homo sapien
cagaaaatatagaacacggtaaaatgggtttta

SEQ ID NO: 1254 - DNA, 33 bp, Homo sapien
cagaaaatatagaacatggtaaaatgggtttta

SEQ ID NO: 1255 - DNA, 33 bp, Homo sapien
ttagctgcaatatggcactaataaagagaatag

SEQ ID NO: 1256 - DNA, 33 bp, Homo sapien
ttagctgcaatatggccctaataaagagaatag

SEQ ID NO: 1257 - DNA, 33 bp, Homo sapien
actccattttgcagaaaatttaagatgccagtg

SEQ ID NO: 1258 - DNA, 33 bp, Homo sapien
actccattttgcagaagatttaagatgccagtg

SEQ ID NO: 1259 - DNA, 33 bp, Homo sapien
ctcttatatcccttgcaatttttctaagactgc

SEQ ID NO: 1260 - DNA, 33 bp, Homo sapien
ctcttatatcccttgcgatttttctaagactgc

SEQ ID NO: 1261 - DNA, 33 bp, Homo sapien
tcatcctaccacaagaacaaagttgacgagtgc

SEQ ID NO: 1262 - DNA, 33 bp, Homo sapien
tcatcctaccacaagaccaaagttgacgagtgc

SEQ ID NO: 1263 - DNA, 33 bp, Homo sapien
caaatacaaaaaatagacgaacatggttgcatg

SEQ ID NO: 1264 - DNA, 33 bp, Homo sapien
caaatacaaaaaatagccgaacatggttgcatg

SEQ ID NO: 1265 - DNA, 33 bp, Homo sapien
aaatgttggcaagaaaatggatcacccagaact

SEQ ID NO: 1266 - DNA, 33 bp, Homo sapien
aaatgttggcaagaaactggatcacccagaact

SEQ ID NO: 1267 - DNA, 33 bp, Homo sapien
aattgcccctctgtaacgcacacctgcaggatg

SEQ ID NO: 1268 - DNA, 33 bp, Homo sapien
aattgcccctctgtaatgcacacctgcaggatg

SEQ ID NO: 1269 - DNA, 33 bp, Homo sapien
ttagcaagtattgtaccatgtggcaggattact

SEQ ID NO: 1270 - DNA, 33 bp, Homo sapien
ttagcaagtattgtactatgtggcaggattact

SEQ ID NO: 1271 - DNA, 33 bp, Homo sapien
tgttaacaatttgttccaaatgtggcccactct

SEQ ID NO: 1272 - DNA, 33 bp, Homo sapien
tgttaacaatttgttctaaatgtggcccactct

SEQ ID NO: 1273 - DNA, 33 bp, Homo sapien
cccattcccagtctcacctttttgttgactagt

SEQ ID NO: 1274 - DNA, 33 bp, Homo sapien
cccattcccagtctcatctttttgttgactagt

SEQ ID NO: 1275 - DNA, 33 bp, Homo sapien
acatccctgagagcgcaccagaaaaaaaatccc

SEQ ID NO: 1276 - DNA, 33 bp, Homo sapien
acatccctgagagcgcgccagaaaaaaaatccc

SEQ ID NO: 1277 - DNA, 33 bp, Homo sapien
ggctggttttatgtccacagctatgtcttcctt

SEQ ID NO: 1278 - DNA, 33 bp, Homo sapien
ggctggttttatgtccgcagctatgtcttcctt

SEQ ID NO: 1279 - DNA, 33 bp, Homo sapien
ggtccagcctagcttaacgtatgcaagtgtctc

SEQ ID NO: 1280 - DNA, 33 bp, Homo sapien
ggtccagcctagcttagcgtatgcaagtgtctc

SEQ ID NO: 1281 - DNA, 33 bp, Homo sapien
tcctttaaagtctaaaagttatacatgtgtcag

SEQ ID NO: 1282 - DNA, 33 bp, Homo sapien
tcctttaaagtctaaacgttatacatgtgtcag

SEQ ID NO: 1283 - DNA, 33 bp, Homo sapien
gaaaaatgctgactacaaaattattgatggtat

SEQ ID NO: 1284 - DNA, 33 bp, Homo sapien
gaaaaatgctgactacgaaattattgatggtat

SEQ ID NO: 1285 - DNA, 33 bp, Homo sapien
catctgttcaagcccccagatcacacataaacc

SEQ ID NO: 1286 - DNA, 33 bp, Homo sapien
catctgttcaagcccctagatcacacataaacc

SEQ ID NO: 1287 - DNA, 33 bp, Homo sapien
aagttaatactatccaaaaacacattcatctta

SEQ ID NO: 1288 - DNA, 33 bp, Homo sapien
aagttaatactatccagaaacacattcatctta

SEQ ID NO: 1289 - DNA, 33 bp, Homo sapien
tttaaagctacctttacgagattttcgtgatag

SEQ ID NO: 1290 - DNA, 33 bp, Homo sapien
tttaaagctacctttatgagattttcgtgatag

SEQ ID NO: 1291 - DNA, 33 bp, Homo sapien
catgaactctaaactacgaataaggattccagc

SEQ ID NO: 1292 - DNA, 33 bp, Homo sapien
catgaactctaaactatgaataaggattccagc

SEQ ID NO: 1293 - DNA, 33 bp, Homo sapien
ccccagagtctttgtgaacttgttttcaactca

SEQ ID NO: 1294 - DNA, 33 bp, Homo sapien
ccccagagtctttgtggacttgttttcaactca

SEQ ID NO: 1295 - DNA, 33 bp, Homo sapien
tccaggctcccatcaaacacaccattacaagac

SEQ ID NO: 1296 - DNA, 33 bp, Homo sapien
tccaggctcccatcaagcacaccattacaagac

SEQ ID NO: 1297 - DNA, 33 bp, Homo sapien
gaagataatttctgagcccttaggatattttgc

SEQ ID NO: 1298 - DNA, 33 bp, Homo sapien
gaagataatttctgagtccttaggatattttgc

SEQ ID NO: 1299 - DNA, 33 bp, Homo sapien
ccagaccaaggacaagaaaagataagatgagat

SEQ ID NO: 1300 - DNA, 33 bp, Homo sapien
ccagaccaaggacaagcaaagataagatgagat

SEQ ID NO: 1301 - DNA, 33 bp, Homo sapien
ggcacctcatggtccaatccagttgacacatag

SEQ ID NO: 1302 - DNA, 33 bp, Homo sapien
ggcacctcatggtccagtccagttgacacatag

SEQ ID NO: 1303 - DNA, 33 bp, Homo sapien
gactgagtaactaaggccaggcaagtgggtgct

SEQ ID NO: 1304 - DNA, 33 bp, Homo sapien
gactgagtaactaaggtcaggcaagtgggtgct

SEQ ID NO: 1305 - DNA, 33 bp, Homo sapien
ttaagcactatcttgcaactccactatgagaga

SEQ ID NO: 1306 - DNA, 33 bp, Homo sapien
ttaagcactatcttgcgactccactatgagaga

SEQ ID NO: 1307 - DNA, 33 bp, Homo sapien
gttttgattatcaagaactaatgtatgaacata

SEQ ID NO: 1308 - DNA, 33 bp, Homo sapien
gttttgattatcaagagctaatgtatgaacata

SEQ ID NO: 1309 - DNA, 33 bp, Homo sapien
ctcctacagaagctaacagccagtgtggggaaa

SEQ ID NO: 1310 - DNA, 33 bp, Homo sapien
ctcctacagaagctaatagccagtgtggggaaa

SEQ ID NO: 1311 - DNA, 33 bp, Homo sapien
tgtcatagaactctcaaccctgacttaacccaa

SEQ ID NO: 1312 - DNA, 33 bp, Homo sapien
tgtcatagaactctcacccctgacttaacccaa

SEQ ID NO: 1313 - DNA, 33 bp, Homo sapien
tgtctgtcatggacacaggataggaatagtggc

SEQ ID NO: 1314 - DNA, 33 bp, Homo sapien
tgtctgtcatggacacgggataggaatagtggc

SEQ ID NO: 1315 - DNA, 33 bp, Homo sapien
gcaatgaattaagtcacctctattgaaggaatt

SEQ ID NO: 1316 - DNA, 33 bp, Homo sapien
gcaatgaattaagtcatctctattgaaggaatt

SEQ ID NO: 1317 - DNA, 33 bp, Homo sapien
ccttccagatcgctaaaacattctgaagactct

SEQ ID NO: 1318 - DNA, 33 bp, Homo sapien
ccttccagatcgctaacacattctgaagactct

SEQ ID NO: 1319 - DNA, 33 bp, Homo sapien
gtgaggggattgcagaacagcgaagggcatccc

SEQ ID NO: 1320 - DNA, 33 bp, Homo sapien
gtgaggggattgcagagcagcgaagggcatccc

SEQ ID NO: 1321 - DNA, 33 bp, Homo sapien
gcttcacctctgtccacagggcaattggaatta

SEQ ID NO: 1322 - DNA, 33 bp, Homo sapien
gcttcacctctgtccatagggcaattggaatta

SEQ ID NO: 1323 - DNA, 33 bp, Homo sapien
ggacagcagctcgaagccattcgggcccccgtt

SEQ ID NO: 1324 - DNA, 33 bp, Homo sapien
ggacagcagctcgaaggcattcgggcccccgtt

SEQ ID NO: 1325 - DNA, 33 bp, Homo sapien
tccggaaacggtgaccacagaaaagagagagaa

SEQ ID NO: 1326 - DNA, 33 bp, Homo sapien
tccggaaacggtgaccgcagaaaagagagagaa

SEQ ID NO: 1327 - DNA, 33 bp, Homo sapien
aacctgctgccttacaaaagaggagaagactcc

SEQ ID NO: 1328 - DNA, 33 bp, Homo sapien
aacctgctgccttacagaagaggagaagactcc

SEQ ID NO: 1329 - DNA, 33 bp, Homo sapien
agttcagtcagcttaaatgtggatgagcaaaga

SEQ ID NO: 1330 - DNA, 33 bp, Homo sapien
agttcagtcagcttaagtgtggatgagcaaaga

SEQ ID NO: 1331 - DNA, 33 bp, Homo sapien
agaacacaacacatgaagcaattgggccaccat

SEQ ID NO: 1332 - DNA, 33 bp, Homo sapien
agaacacaacacatgaggcaattgggccaccat

SEQ ID NO: 1333 - DNA, 33 bp, Homo sapien
ggaaaatgcaaacatacggcagatggagaaggg

SEQ ID NO: 1334 - DNA, 33 bp, Homo sapien
ggaaaatgcaaacatatggcagatggagaaggg

SEQ ID NO: 1335 - DNA, 33 bp, Homo sapien
ccctccactaggaacaaaggcagtaagcttcct

SEQ ID NO: 1336 - DNA, 33 bp, Homo sapien
ccctccactaggaacagaggcagtaagcttcct

SEQ ID NO: 1337 - DNA, 33 bp, Homo sapien
agagaccacatcttaacgagttttgtttgatca

SEQ ID NO: 1338 - DNA, 33 bp, Homo sapien
agagaccacatcttaatgagttttgtttgatca

SEQ ID NO: 1339 - DNA, 33 bp, Homo sapien
gggtgaaggaaacacaaggccggaacctggaga

SEQ ID NO: 1340 - DNA, 33 bp, Homo sapien
gggtgaaggaaacacagggccggaacctggaga

SEQ ID NO: 1341 - DNA, 33 bp, Homo sapien
agcttttatgaagcacccaaatcttgcaggagc

SEQ ID NO: 1342 - DNA, 33 bp, Homo sapien
agcttttatgaagcactcaaatcttgcaggagc

SEQ ID NO: 1343 - DNA, 33 bp, Homo sapien
caagactctagtctgaagcagtggttctcatac

SEQ ID NO: 1344 - DNA, 33 bp, Homo sapien
caagactctagtctgaggcagtggttctcatac

SEQ ID NO: 1345 - DNA, 33 bp, Homo sapien
agaggaagaacaaaacactactctgcaagtaac

SEQ ID NO: 1346 - DNA, 33 bp, Homo sapien
agaggaagaacaaaacgctactctgcaagtaac

SEQ ID NO: 1347 - DNA, 33 bp, Homo sapien
tgaacctcaaagtgccacgttctcatgctcatt

SEQ ID NO: 1348 - DNA, 33 bp, Homo sapien
tgaacctcaaagtgcctcgttctcatgctcatt

SEQ ID NO: 1349 - DNA, 33 bp, Homo sapien
tcagaggataaacacacagacccaaaataggaa

SEQ ID NO: 1350 - DNA, 33 bp, Homo sapien
tcagaggataaacacatagacccaaaataggaa

SEQ ID NO: 1351 - DNA, 33 bp, Homo sapien
cttaaagtaatagcccaggaacatctaaaatgg

SEQ ID NO: 1352 - DNA, 33 bp, Homo sapien
cttaaagtaatagcccgggaacatctaaaatgg

SEQ ID NO: 1353 - DNA, 33 bp, Homo sapien
gccctaaggatctaaacgtgatgctctaggtgc

SEQ ID NO: 1354 - DNA, 33 bp, Homo sapien
gccctaaggatctaaatgtgatgctctaggtgc

SEQ ID NO: 1355 - DNA, 33 bp, Homo sapien
ctctccaaaccggcgcactccggggctggaatc

SEQ ID NO: 1356 - DNA, 33 bp, Homo sapien
ctctccaaaccggcgcgctccggggctggaatc

SEQ ID NO: 1357 - DNA, 33 bp, Homo sapien
agccgctgtatgtaaactcccccggtaaatgct

SEQ ID NO: 1358 - DNA, 33 bp, Homo sapien
agccgctgtatgtaaattcccccggtaaatgct

SEQ ID NO: 1359 - DNA, 33 bp, Homo sapien
tcccaccagatctttcccatgacacacaggaat

SEQ ID NO: 1360 - DNA, 33 bp, Homo sapien
tcccaccagatctttctcatgacacacaggaat

SEQ ID NO: 1361 - DNA, 33 bp, Homo sapien
tcgtttttcggagacaacggcagactgaaaacc

SEQ ID NO: 1362 - DNA, 33 bp, Homo sapien
tcgtttttcggagacagcggcagactgaaaacc

SEQ ID NO: 1363 - DNA, 33 bp, Homo sapien
ccatggaggagatgagaaacccaacagaattag

SEQ ID NO: 1364 - DNA, 33 bp, Homo sapien
ccatggaggagatgagcaacccaacagaattag

SEQ ID NO: 1365 - DNA, 33 bp, Homo sapien
aaccttgagtcataacagagtccagtatagaat

SEQ ID NO: 1366 - DNA, 33 bp, Homo sapien
aaccttgagtcataacggagtccagtatagaat

SEQ ID NO: 1367 - DNA, 33 bp, Homo sapien
gttctagcccctggtaccccaaatgagacctta

SEQ ID NO: 1368 - DNA, 33 bp, Homo sapien
gttctagcccctggtatcccaaatgagacctta

SEQ ID NO: 1369 - DNA, 33 bp, Homo sapien
gaatctttgcttccacagtagatgggagttagg

SEQ ID NO: 1370 - DNA, 33 bp, Homo sapien
gaatctttgcttccacggtagatgggagttagg

SEQ ID NO: 1371 - DNA, 33 bp, Homo sapien
catctaccctgtttccagccaatctattgattt

SEQ ID NO: 1372 - DNA, 33 bp, Homo sapien
catctaccctgtttccggccaatctattgattt

SEQ ID NO: 1373 - DNA, 33 bp, Homo sapien
gcccaagtgtcccttcaaaagaaagttcccagc

SEQ ID NO: 1374 - DNA, 33 bp, Homo sapien
gcccaagtgtcccttcgaaagaaagttcccagc

SEQ ID NO: 1375 - DNA, 33 bp, Homo sapien
aagtgtggaaggtcaacagaagtgccagcagcc

SEQ ID NO: 1376 - DNA, 33 bp, Homo sapien
aagtgtggaaggtcaagagaagtgccagcagcc

SEQ ID NO: 1377 - DNA, 33 bp, Homo sapien
tgtggactctctgctccgaatgggaaagtgact

SEQ ID NO: 1378 - DNA, 33 bp, Homo sapien
tgtggactctctgctctgaatgggaaagtgact

SEQ ID NO: 1379 - DNA, 33 bp, Homo sapien
gatgaccaaggtgcccagagggattccatcagt

SEQ ID NO: 1380 - DNA, 33 bp, Homo sapien
gatgaccaaggtgcccggagggattccatcagt

SEQ ID NO: 1381 - DNA, 33 bp, Homo sapien
tttatgacggaaagagcaagtctgattcacaac

SEQ ID NO: 1382 - DNA, 33 bp, Homo sapien
tttatgacggaaagaggaagtctgattcacaac

SEQ ID NO: 1383 - DNA, 33 bp, Homo sapien
gcactcttctaagcaccgaggatgtcgtagtga

SEQ ID NO: 1384 - DNA, 33 bp, Homo sapien
gcactcttctaagcactgaggatgtcgtagtga

SEQ ID NO: 1385 - DNA, 33 bp, Homo sapien
ggtctccaccggggcacgatggaaatgagcaga

SEQ ID NO: 1386 - DNA, 33 bp, Homo sapien
ggtctccaccggggcatgatggaaatgagcaga

SEQ ID NO: 1387 - DNA, 33 bp, Homo sapien
aaagtagcaattgaaacgatgagaagctaaagg

SEQ ID NO: 1388 - DNA, 33 bp, Homo sapien
aaagtagcaattgaaatgatgagaagctaaagg

SEQ ID NO: 1389 - DNA, 33 bp, Homo sapien
taacataaacagatgacggaaggaaaagaacta

SEQ ID NO: 1390 - DNA, 33 bp, Homo sapien
taacataaacagatgatggaaggaaaagaacta

SEQ ID NO: 1391 - DNA, 33 bp, Homo sapien
atagatgatagatagacgaatggatagcaatgg

SEQ ID NO: 1392 - DNA, 33 bp, Homo sapien
atagatgatagatagatgaatggatagcaatgg

SEQ ID NO: 1393 - DNA, 33 bp, Homo sapien
aggcagattggtctgacatctgtaatgggggtt

SEQ ID NO: 1394 - DNA, 33 bp, Homo sapien
aggcagattggtctgatatctgtaatgggggtt

SEQ ID NO: 1395 - DNA, 33 bp, Homo sapien
attcatgaataggtcccgagagtgactgtgaaa

SEQ ID NO: 1396 - DNA, 33 bp, Homo sapien
attcatgaataggtcctgagagtgactgtgaaa

SEQ ID NO: 1397 - DNA, 33 bp, Homo sapien
gagtgagggttccataccatgttctgccatatt

SEQ ID NO: 1398 - DNA, 33 bp, Homo sapien
gagtgagggttccatatcatgttctgccatatt

SEQ ID NO: 1399 - DNA, 33 bp, Homo sapien
actatgcctttaacacgctagagcagcctcaac

SEQ ID NO: 1400 - DNA, 33 bp, Homo sapien
actatgcctttaacactctagagcagcctcaac

SEQ ID NO: 1401 - DNA, 33 bp, Homo sapien
acactttatgaagaccgctatgtccctctgaat

SEQ ID NO: 1402 - DNA, 33 bp, Homo sapien
acactttatgaagacctctatgtccctctgaat

SEQ ID NO: 1403 - DNA, 33 bp, Homo sapien
cttgcctgccatcatggaagacgttctcacgaa

SEQ ID NO: 1404 - DNA, 33 bp, Homo sapien
cttgcctgccatcatgtaagacgttctcacgaa

SEQ ID NO: 1405 - DNA, 33 bp, Homo sapien
gaagattcaaattccaatcaggtgtttggggcc

SEQ ID NO: 1406 - DNA, 33 bp, Homo sapien
gaagattcaaattccagtcaggtgtttggggcc

SEQ ID NO: 1407 - DNA, 33 bp, Homo sapien
gcttgggcactctctgcaggtacaaaaagaaga

SEQ ID NO: 1408 - DNA, 33 bp, Homo sapien
gcttgggcactctctgtaggtacaaaaagaaga

SEQ ID NO: 1409 - DNA, 33 bp, Homo sapien
aaatgccataggaaaactttactccaaatgcta

SEQ ID NO: 1410 - DNA, 33 bp, Homo sapien
aaatgccataggaaaattttactccaaatgcta

SEQ ID NO: 1411 - DNA, 33 bp, Homo sapien
gaggacagaaattagggaagactgtaggcaggg

SEQ ID NO: 1412 - DNA, 33 bp, Homo sapien
gaggacagaaattaggtaagactgtaggcaggg

SEQ ID NO: 1413 - DNA, 33 bp, Homo sapien
aaatatgacttgtatcaatcattggggacatca

SEQ ID NO: 1414 - DNA, 33 bp, Homo sapien
aaatatgacttgtatccatcattggggacatca

SEQ ID NO: 1415 - DNA, 33 bp, Homo sapien
accatgggctcaaaagaatcagggcagagtttg

SEQ ID NO: 1416 - DNA, 33 bp, Homo sapien
accatgggctcaaaaggatcagggcagagtttg

SEQ ID NO: 1417 - DNA, 33 bp, Homo sapien
cggtgacaccacaatgcaaaagcgtgaggtttc

SEQ ID NO: 1418 - DNA, 33 bp, Homo sapien
cggtgacaccacaatgtaaaagcgtgaggtttc

SEQ ID NO: 1419 - DNA, 33 bp, Homo sapien
gagcaggtaacacagaagatctctctgaaaaca

SEQ ID NO: 1420 - DNA, 33 bp, Homo sapien
gagcaggtaacacagacgatctctctgaaaaca

SEQ ID NO: 1421 - DNA, 33 bp, Homo sapien
gtgagtaatttttatacagaggatggtatatat

SEQ ID NO: 1422 - DNA, 33 bp, Homo sapien
gtgagtaatttttatagagaggatggtatatat

SEQ ID NO: 1423 - DNA, 33 bp, Homo sapien
cttcaatgtcaggatacggaacttagtgtttcg

SEQ ID NO: 1424 - DNA, 33 bp, Homo sapien
cttcaatgtcaggatatggaacttagtgtttcg

SEQ ID NO: 1425 - DNA, 33 bp, Homo sapien
atctttttcaacaaaacggtttggacacagatt

SEQ ID NO: 1426 - DNA, 33 bp, Homo sapien
atctttttcaacaaaatggtttggacacagatt

SEQ ID NO: 1427 - DNA, 33 bp, Homo sapien
acactaccacacctacagattaagcctaaatgc

SEQ ID NO: 1428 - DNA, 33 bp, Homo sapien
acactaccacacctacggattaagcctaaatgc

SEQ ID NO: 1429 - DNA, 33 bp, Homo sapien
aaaatgagatgagaaaatgagttctgttttgac

SEQ ID NO: 1430 - DNA, 33 bp, Homo sapien
aaaatgagatgagaaagtgagttctgttttgac

SEQ ID NO: 1431 - DNA, 33 bp, Homo sapien
tgcctaagtctgggaaatcataatcttaatatg

SEQ ID NO: 1432 - DNA, 33 bp, Homo sapien
tgcctaagtctgggaagtcataatcttaatatg

SEQ ID NO: 1433 - DNA, 33 bp, Homo sapien
atgggacttatcacaaaatggtaaatgatttct

SEQ ID NO: 1434 - DNA, 33 bp, Homo sapien
atgggacttatcacaagatggtaaatgatttct

SEQ ID NO: 1435 - DNA, 33 bp, Homo sapien
ctgaacataaaattaacgatttgctccctgggt

SEQ ID NO: 1436 - DNA, 33 bp, Homo sapien
ctgaacataaaattaatgatttgctccctgggt

SEQ ID NO: 1437 - DNA, 33 bp, Homo sapien
tgtccttgaatcggaaaccccaagaagaagggg

SEQ ID NO: 1438 - DNA, 33 bp, Homo sapien
tgtccttgaatcggaagccccaagaagaagggg

SEQ ID NO: 1439 - DNA, 33 bp, Homo sapien
ctgaatgtgattcagacggaaaggtacacaaca

SEQ ID NO: 1440 - DNA, 33 bp, Homo sapien
ctgaatgtgattcagatggaaaggtacacaaca

SEQ ID NO: 1441 - DNA, 33 bp, Homo sapien
tagcgctcataggcaacatttttgcagtggaca

SEQ ID NO: 1442 - DNA, 33 bp, Homo sapien
tagcgctcataggcaatatttttgcagtggaca

SEQ ID NO: 1443 - DNA, 33 bp, Homo sapien
gataggactactgatacccagattgtacactga

SEQ ID NO: 1444 - DNA, 33 bp, Homo sapien
gataggactactgatatccagattgtacactga

SEQ ID NO: 1445 - DNA, 33 bp, Homo sapien
gagtttgtagattgaacgttccagaagatggca

SEQ ID NO: 1446 - DNA, 33 bp, Homo sapien
gagtttgtagattgaatgttccagaagatggca

SEQ ID NO: 1447 - DNA, 33 bp, Homo sapien
gtttctcttttgacagaactcttgtttattctg

SEQ ID NO: 1448 - DNA, 33 bp, Homo sapien
gtttctcttttgacaggactcttgtttattctg

SEQ ID NO: 1449 - DNA, 33 bp, Homo sapien
gacagaatcactatccaacaccttgtctcctgc

SEQ ID NO: 1450 - DNA, 33 bp, Homo sapien
gacagaatcactatcccacaccttgtctcctgc

SEQ ID NO: 1451 - DNA, 33 bp, Homo sapien
aggactgtgtgccctccacacatcacttgctga

SEQ ID NO: 1452 - DNA, 33 bp, Homo sapien
aggactgtgtgccctctacacatcacttgctga

SEQ ID NO: 1453 - DNA, 33 bp, Homo sapien
ttaaaccaatgacaggaagttgtatcgttatct

SEQ ID NO: 1454 - DNA, 33 bp, Homo sapien
ttaaaccaatgacaggtagttgtatcgttatct

SEQ ID NO: 1455 - DNA, 33 bp, Homo sapien
gatggtccagggttggaagaacctgaagacctc

SEQ ID NO: 1456 - DNA, 33 bp, Homo sapien
gatggtccagggttgggagaacctgaagacctc

SEQ ID NO: 1457 - DNA, 33 bp, Homo sapien
gaactcagaggaaggcaatgcagcggtttctaa

SEQ ID NO: 1458 - DNA, 33 bp, Homo sapien
gaactcagaggaaggcgatgcagcggtttctaa

SEQ ID NO: 1459 - DNA, 33 bp, Homo sapien
aagcagagaaacctgacgtcaattaagtctgtg

SEQ ID NO: 1460 - DNA, 33 bp, Homo sapien
aagcagagaaacctgatgtcaattaagtctgtg

SEQ ID NO: 1461 - DNA, 33 bp, Homo sapien
acccaagccaaaagccagagctcacagcaggca

SEQ ID NO: 1462 - DNA, 33 bp, Homo sapien
acccaagccaaaagccggagctcacagcaggca

SEQ ID NO: 1463 - DNA, 33 bp, Homo sapien
gcatcctgcgtattcaaaatgagtgacagggag

SEQ ID NO: 1464 - DNA, 33 bp, Homo sapien
gcatcctgcgtattcacaatgagtgacagggag

SEQ ID NO: 1465 - DNA, 33 bp, Homo sapien
cagctttgctcctgcactcatttttctttctct

SEQ ID NO: 1466 - DNA, 33 bp, Homo sapien
cagctttgctcctgcattcatttttctttctct

SEQ ID NO: 1467 - DNA, 33 bp, Homo sapien
cccacccttgctaggcaaaattttccacttccc

SEQ ID NO: 1468 - DNA, 33 bp, Homo sapien
cccacccttgctaggctaaattttccacttccc

SEQ ID NO: 1469 - DNA, 33 bp, Homo sapien
catttacaaaattagaactttaaacaggactgg

SEQ ID NO: 1470 - DNA, 33 bp, Homo sapien
catttacaaaattagacctttaaacaggactgg

SEQ ID NO: 1471 - DNA, 33 bp, Homo sapien
tcataaatatgcattaagtgcctatcatttaca

SEQ ID NO: 1472 - DNA, 33 bp, Homo sapien
tcataaatatgcattaggtgcctatcatttaca

SEQ ID NO: 1473 - DNA, 33 bp, Homo sapien
ttctagacttagccaaacaaaaacaatttctcc

SEQ ID NO: 1474 - DNA, 33 bp, Homo sapien
ttctagacttagccaagcaaaaacaatttctcc

SEQ ID NO: 1475 - DNA, 33 bp, Homo sapien
tggctttgctattggtcaattgtaagatcttga

SEQ ID NO: 1476 - DNA, 33 bp, Homo sapien
tggctttgctattggttaattgtaagatcttga

SEQ ID NO: 1477 - DNA, 33 bp, Homo sapien
aatgtttctaaatgaaaaatccttgagcttata

SEQ ID NO: 1478 - DNA, 33 bp, Homo sapien
aatgtttctaaatgaagaatccttgagcttata

SEQ ID NO: 1479 - DNA, 33 bp, Homo sapien
tagaaatgtgtttggacgaaagggtagaatctt

SEQ ID NO: 1480 - DNA, 33 bp, Homo sapien
tagaaatgtgtttggatgaaagggtagaatctt

SEQ ID NO: 1481 - DNA, 33 bp, Homo sapien
ctcccagttgggctccagcattgctctgtgctc

SEQ ID NO: 1482 - DNA, 33 bp, Homo sapien
ctcccagttgggctccggcattgctctgtgctc

SEQ ID NO: 1483 - DNA, 33 bp, Homo sapien
tgggaatctttaggaacctgtgttgagttgcat

SEQ ID NO: 1484 - DNA, 33 bp, Homo sapien
tgggaatctttaggaatctgtgttgagttgcat

SEQ ID NO: 1485 - DNA, 33 bp, Homo sapien
gtttccattcataaccaactgcaggctccgctc

SEQ ID NO: 1486 - DNA, 33 bp, Homo sapien
gtttccattcataaccgactgcaggctccgctc

SEQ ID NO: 1487 - DNA, 33 bp, Homo sapien
aagttcctcgtggataaagaagtgagagcggag

SEQ ID NO: 1488 - DNA, 33 bp, Homo sapien
aagttcctcgtggatagagaagtgagagcggag

SEQ ID NO: 1489 - DNA, 33 bp, Homo sapien
caggaaggccccaggaactacctctctttatgc

SEQ ID NO: 1490 - DNA, 33 bp, Homo sapien
caggaaggccccaggagctacctctctttatgc

SEQ ID NO: 1491 - DNA, 33 bp, Homo sapien
ccctgtgtttgcaagactaactggccactttat

SEQ ID NO: 1492 - DNA, 33 bp, Homo sapien
ccctgtgtttgcaagattaactggccactttat

SEQ ID NO: 1493 - DNA, 33 bp, Homo sapien
ctaagaatccagtgtcaaagccaaggtcataaa

SEQ ID NO: 1494 - DNA, 33 bp, Homo sapien
ctaagaatccagtgtcgaagccaaggtcataaa

SEQ ID NO: 1495 - DNA, 33 bp, Homo sapien
acccaggactaaggaacttaaagagcagttggt

SEQ ID NO: 1496 - DNA, 33 bp, Homo sapien
acccaggactaaggaatttaaagagcagttggt

SEQ ID NO: 1497 - DNA, 33 bp, Homo sapien
caggtggtagctgacacccaatggtataagaaa

SEQ ID NO: 1498 - DNA, 33 bp, Homo sapien
caggtggtagctgacatccaatggtataagaaa

SEQ ID NO: 1499 - DNA, 33 bp, Homo sapien
tgacacactgcattaggcaaagagagcttctat

SEQ ID NO: 1500 - DNA, 33 bp, Homo sapien
tgacacactgcattagtcaaagagagcttctat

SEQ ID NO: 1501 - DNA, 33 bp, Homo sapien
gcaggaagactgagtgacaattctgctgaggcc

SEQ ID NO: 1502 - DNA, 33 bp, Homo sapien
gcaggaagactgagtggcaattctgctgaggcc

SEQ ID NO: 1503 - DNA, 33 bp, Homo sapien
agttccacagcgttaccgaactccaagtcctct

SEQ ID NO: 1504 - DNA, 33 bp, Homo sapien
agttccacagcgttactgaactccaagtcctct

SEQ ID NO: 1505 - DNA, 33 bp, Homo sapien
gtggtttaatgccttccattgtttttagaaaaa

SEQ ID NO: 1506 - DNA, 33 bp, Homo sapien
gtggtttaatgccttctattgtttttagaaaaa

SEQ ID NO: 1507 - DNA, 33 bp, Homo sapien
catgtcagggtgctcaaactctaagaatgatgt

SEQ ID NO: 1508 - DNA, 33 bp, Homo sapien
catgtcagggtgctcagactctaagaatgatgt

SEQ ID NO: 1509 - DNA, 33 bp, Homo sapien
gaataagcaatgccaaaaaaggaactgggcatg

SEQ ID NO: 1510 - DNA, 33 bp, Homo sapien
gaataagcaatgccaacaaaggaactgggcatg

SEQ ID NO: 1511 - DNA, 33 bp, Homo sapien
tccagttctcctcaccaacgtttcactgatctc

SEQ ID NO: 1512 - DNA, 33 bp, Homo sapien
tccagttctcctcaccgacgtttcactgatctc

SEQ ID NO: 1513 - DNA, 33 bp, Homo sapien
gaaggacccttttgtcaccgcatcctgggatcc

SEQ ID NO: 1514 - DNA, 33 bp, Homo sapien
gaaggacccttttgtcgccgcatcctgggatcc

SEQ ID NO: 1515 - DNA, 33 bp, Homo sapien
tgtccttacctacaaagttaccctccatgcaga

SEQ ID NO: 1516 - DNA, 33 bp, Homo sapien
tgtccttacctacaaatttaccctccatgcaga

SEQ ID NO: 1517 - DNA, 33 bp, Homo sapien
gggaaggaaggtctccagcagccaagggacccc

SEQ ID NO: 1518 - DNA, 33 bp, Homo sapien
gggaaggaaggtctccggcagccaagggacccc

SEQ ID NO: 1519 - DNA, 33 bp, Homo sapien
gtgacaaaggctgccaagtaggcccattgaact

SEQ ID NO: 1520 - DNA, 33 bp, Homo sapien
gtgacaaaggctgccaggtaggcccattgaact

SEQ ID NO: 1521 - DNA, 33 bp, Homo sapien
ctgagcaaagcagatacggtgcttgccccacca

SEQ ID NO: 1522 - DNA, 33 bp, Homo sapien
ctgagcaaagcagatatggtgcttgccccacca

SEQ ID NO: 1523 - DNA, 33 bp, Homo sapien
gctgctacccaagaacaagtaagaggagtcagc

SEQ ID NO: 1524 - DNA, 33 bp, Homo sapien
gctgctacccaagaaccagtaagaggagtcagc

SEQ ID NO: 1525 - DNA, 33 bp, Homo sapien
gctggacccctggcccacagatacggacagatg

SEQ ID NO: 1526 - DNA, 33 bp, Homo sapien
gctggacccctggcccgcagatacggacagatg

SEQ ID NO: 1527 - DNA, 33 bp, Homo sapien
ttgtagaattaatggacgatccctttgttggtt

SEQ ID NO: 1528 - DNA, 33 bp, Homo sapien
ttgtagaattaatggatgatccctttgttggtt

SEQ ID NO: 1529 - DNA, 33 bp, Homo sapien
tcgagatggaagtgacaataaaactctggttag

SEQ ID NO: 1530 - DNA, 33 bp, Homo sapien
tcgagatggaagtgacgataaaactctggttag

SEQ ID NO: 1531 - DNA, 33 bp, Homo sapien
tgaggatccgcgcaggaccatgagtgataggct

SEQ ID NO: 1532 - DNA, 33 bp, Homo sapien
tgaggatccgcgcaggcccatgagtgataggct

SEQ ID NO: 1533 - DNA, 33 bp, Homo sapien
ttcctcctcaggtccacgtgaatgccaggcagc

SEQ ID NO: 1534 - DNA, 33 bp, Homo sapien
ttcctcctcaggtccatgtgaatgccaggcagc

SEQ ID NO: 1535 - DNA, 33 bp, Homo sapien
agaacagactaatacaacaactgattatggact

SEQ ID NO: 1536 - DNA, 33 bp, Homo sapien
agaacagactaatacagcaactgattatggact

SEQ ID NO: 1537 - DNA, 33 bp, Homo sapien
cgtacagaggcaggcaaaattgaatcggctgat

SEQ ID NO: 1538 - DNA, 33 bp, Homo sapien
cgtacagaggcaggcacaattgaatcggctgat

SEQ ID NO: 1539 - DNA, 33 bp, Homo sapien
agggcgctaatgaagaaccccacgcctgctgct

SEQ ID NO: 1540 - DNA, 33 bp, Homo sapien
agggcgctaatgaagacccccacgcctgctgct

SEQ ID NO: 1541 - DNA, 33 bp, Homo sapien
tgtcctcagctataaacgaaccagccttctttc

SEQ ID NO: 1542 - DNA, 33 bp, Homo sapien
tgtcctcagctataaaggaaccagccttctttc

SEQ ID NO: 1543 - DNA, 33 bp, Homo sapien
gaccttgcagacagcccggaccttcttgctctt

SEQ ID NO: 1544 - DNA, 33 bp, Homo sapien
gaccttgcagacagcctggaccttcttgctctt

SEQ ID NO: 1545 - DNA, 33 bp, Homo sapien
tccacacttgggtttaaaatccctctcaaactc

SEQ ID NO: 1546 - DNA, 33 bp, Homo sapien
tccacacttgggtttacaatccctctcaaactc

SEQ ID NO: 1547 - DNA, 33 bp, Homo sapien
tctttcaccattcgacaccagaacaccagtgag

SEQ ID NO: 1548 - DNA, 33 bp, Homo sapien
tctttcaccattcgacgccagaacaccagtgag

SEQ ID NO: 1549 - DNA, 33 bp, Homo sapien
gtccgtgagaaagaaacggtagagtcagcgtag

SEQ ID NO: 1550 - DNA, 33 bp, Homo sapien
gtccgtgagaaagaaatggtagagtcagcgtag

SEQ ID NO: 1551 - DNA, 33 bp, Homo sapien
attcaacgaatgtctccctgtttcccagcctcc

SEQ ID NO: 1552 - DNA, 33 bp, Homo sapien
attcaacgaatgtctctctgtttcccagcctcc

SEQ ID NO: 1553 - DNA, 33 bp, Homo sapien
ctcctccaatatcaagacctaactttcccagct

SEQ ID NO: 1554 - DNA, 33 bp, Homo sapien
ctcctccaatatcaagccctaactttcccagct

SEQ ID NO: 1555 - DNA, 33 bp, Homo sapien
cacagagtgatgatagcaaaatccggggcagcc

SEQ ID NO: 1556 - DNA, 33 bp, Homo sapien
cacagagtgatgataggaaaatccggggcagcc

SEQ ID NO: 1557 - DNA, 33 bp, Homo sapien
gggcaacaagagtccacgggtaagaatgtttta

SEQ ID NO: 1558 - DNA, 33 bp, Homo sapien
gggcaacaagagtccatgggtaagaatgtttta

SEQ ID NO: 1559 - DNA, 33 bp, Homo sapien
cctttttcttttactcaagctaaccctataccc

SEQ ID NO: 1560 - DNA, 33 bp, Homo sapien
cctttttcttttactctagctaaccctataccc

SEQ ID NO: 1561 - DNA, 33 bp, Homo sapien
ggcctcataggaagacacttggtcattctatga

SEQ ID NO: 1562 - DNA, 33 bp, Homo sapien
ggcctcataggaagacgcttggtcattctatga

SEQ ID NO: 1563 - DNA, 33 bp, Homo sapien
cctattgcttaaggataagtggagttcagaccc

SEQ ID NO: 1564 - DNA, 33 bp, Homo sapien
cctattgcttaaggatgagtggagttcagaccc

SEQ ID NO: 1565 - DNA, 33 bp, Homo sapien
aggaataagttttggacgaagagaaacgtccat

SEQ ID NO: 1566 - DNA, 33 bp, Homo sapien
aggaataagttttggatgaagagaaacgtccat

SEQ ID NO: 1567 - DNA, 33 bp, Homo sapien
accccaaagccagaaaagaattctccatgaagc

SEQ ID NO: 1568 - DNA, 33 bp, Homo sapien
accccaaagccagaaaggaattctccatgaagc

SEQ ID NO: 1569 - DNA, 33 bp, Homo sapien
ctcttcttaacccagacgtgctgtgtcaaatac

SEQ ID NO: 1570 - DNA, 33 bp, Homo sapien
ctcttcttaacccagatgtgctgtgtcaaatac

SEQ ID NO: 1571 - DNA, 33 bp, Homo sapien
cagaaaactcttacacactccaagctgggttaa

SEQ ID NO: 1572 - DNA, 33 bp, Homo sapien
cagaaaactcttacaccctccaagctgggttaa

SEQ ID NO: 1573 - DNA, 33 bp, Homo sapien
ttgggagaaaggtagaaatttgaattccttact

SEQ ID NO: 1574 - DNA, 33 bp, Homo sapien
ttgggagaaaggtagatatttgaattccttact

SEQ ID NO: 1575 - DNA, 33 bp, Homo sapien
ctctctgggtgagttcccataggtgctttgcag

SEQ ID NO: 1576 - DNA, 33 bp, Homo sapien
ctctctgggtgagttctcataggtgctttgcag

SEQ ID NO: 1577 - DNA, 33 bp, Homo sapien
taactccaccccaacacaatcagtaccataaag

SEQ ID NO: 1578 - DNA, 33 bp, Homo sapien
taactccaccccaacataatcagtaccataaag

SEQ ID NO: 1579 - DNA, 33 bp, Homo sapien
ttccaagtcccggcaccactgtttaccagccct

SEQ ID NO: 1580 - DNA, 33 bp, Homo sapien
ttccaagtcccggcacgactgtttaccagccct

SEQ ID NO: 1581 - DNA, 33 bp, Homo sapien
ttatagaggaggaaaccgagtttgagagaggtc

SEQ ID NO: 1582 - DNA, 33 bp, Homo sapien
ttatagaggaggaaactgagtttgagagaggtc

SEQ ID NO: 1583 - DNA, 33 bp, Homo sapien
ggagtttgcaaggacacatctgctgtgtatgct

SEQ ID NO: 1584 - DNA, 33 bp, Homo sapien
ggagtttgcaaggacatatctgctgtgtatgct

SEQ ID NO: 1585 - DNA, 33 bp, Homo sapien
ccaggagcccagcacacaatcgccaagcagcct

SEQ ID NO: 1586 - DNA, 33 bp, Homo sapien
ccaggagcccagcacataatcgccaagcagcct

SEQ ID NO: 1587 - DNA, 33 bp, Homo sapien
aatcgccaagcagcctcaaattcaccaaccaga

SEQ ID NO: 1588 - DNA, 33 bp, Homo sapien
aatcgccaagcagcctgaaattcaccaaccaga

SEQ ID NO: 1589 - DNA, 33 bp, Homo sapien
ctttggaccacacataactccttggaagaagca

SEQ ID NO: 1590 - DNA, 33 bp, Homo sapien
ctttggaccacacatagctccttggaagaagca

SEQ ID NO: 1591 - DNA, 33 bp, Homo sapien
gggtctgcctgtcaccacgcagggaaagctggc

SEQ ID NO: 1592 - DNA, 33 bp, Homo sapien
gggtctgcctgtcaccgcgcagggaaagctggc

SEQ ID NO: 1593 - DNA, 33 bp, Homo sapien
cccaaaatatcaagcaccatgtggaaaatctga

SEQ ID NO: 1594 - DNA, 33 bp, Homo sapien
cccaaaatatcaagcatcatgtggaaaatctga

SEQ ID NO: 1595 - DNA, 33 bp, Homo sapien
tttcattcagattttcactattcaaaatgaaac

SEQ ID NO: 1596 - DNA, 33 bp, Homo sapien
tttcattcagattttcgctattcaaaatgaaac

SEQ ID NO: 1597 - DNA, 33 bp, Homo sapien
atacagtaatacacagcatgctcaactaaatta

SEQ ID NO: 1598 - DNA, 33 bp, Homo sapien
atacagtaatacacaggatgctcaactaaatta

SEQ ID NO: 1599 - DNA, 33 bp, Homo sapien
ttctgcaagcacagaacgagcagcctttcccct

SEQ ID NO: 1600 - DNA, 33 bp, Homo sapien
ttctgcaagcacagaatgagcagcctttcccct

SEQ ID NO: 1601 - DNA, 33 bp, Homo sapien
tttaaagactcgcctgaaaacattagggttgat

SEQ ID NO: 1602 - DNA, 33 bp, Homo sapien
tttaaagactcgcctgcaaacattagggttgat

SEQ ID NO: 1603 - DNA, 33 bp, Homo sapien
tccgggaggaatggagcacaaatatcatgacgg

SEQ ID NO: 1604 - DNA, 33 bp, Homo sapien
tccgggaggaatggaggacaaatatcatgacgg

SEQ ID NO: 1605 - DNA, 33 bp, Homo sapien
acgtgctgagcatttccagaagagaggagaatc

SEQ ID NO: 1606 - DNA, 33 bp, Homo sapien
acgtgctgagcatttctagaagagaggagaatc

SEQ ID NO: 1607 - DNA, 33 bp, Homo sapien
ccctacctgttcgacacctcctggcgcgttcct

SEQ ID NO: 1608 - DNA, 33 bp, Homo sapien
ccctacctgttcgacatctcctggcgcgttcct

SEQ ID NO: 1609 - DNA, 33 bp, Homo sapien
aaacacccattttcccagcttgccaagtcagcc

SEQ ID NO: 1610 - DNA, 33 bp, Homo sapien
aaacacccattttcccggcttgccaagtcagcc

SEQ ID NO: 1611 - DNA, 33 bp, Homo sapien
catatttcatgcctgaaacaagaaaatgtccag

SEQ ID NO: 1612 - DNA, 33 bp, Homo sapien
catatttcatgcctgacacaagaaaatgtccag

SEQ ID NO: 1613 - DNA, 33 bp, Homo sapien
cactctggtagattagaaaaaattgtactaacc

SEQ ID NO: 1614 - DNA, 33 bp, Homo sapien
cactctggtagattaggaaaaattgtactaacc

SEQ ID NO: 1615 - DNA, 33 bp, Homo sapien
atgccagagggaagaactatggtcccaaggtta

SEQ ID NO: 1616 - DNA, 33 bp, Homo sapien
atgccagagggaagaagtatggtcccaaggtta

SEQ ID NO: 1617 - DNA, 33 bp, Homo sapien
cacatttaattgctgcacggggagttgataacc

SEQ ID NO: 1618 - DNA, 33 bp, Homo sapien
cacatttaattgctgcgcggggagttgataacc

SEQ ID NO: 1619 - DNA, 33 bp, Homo sapien
gagactgggaacaagcaattagagccgaccagt

SEQ ID NO: 1620 - DNA, 33 bp, Homo sapien
gagactgggaacaagcgattagagccgaccagt

SEQ ID NO: 1621 - DNA, 33 bp, Homo sapien
acctatttcccccgaaccctagaagtctctgga

SEQ ID NO: 1622 - DNA, 33 bp, Homo sapien
acctatttcccccgaatcctagaagtctctgga

SEQ ID NO: 1623 - DNA, 33 bp, Homo sapien
ataggtgccccataaaagcacacaggatagaat

SEQ ID NO: 1624 - DNA, 33 bp, Homo sapien
ataggtgccccataaacgcacacaggatagaat

SEQ ID NO: 1625 - DNA, 33 bp, Homo sapien
gaacaggttcctaagtaaacgcattgtcaggaa

SEQ ID NO: 1626 - DNA, 33 bp, Homo sapien
gaacaggttcctaagtgaacgcattgtcaggaa

SEQ ID NO: 1627 - DNA, 33 bp, Homo sapien
ggaccttatcttaccaataattgcaatgtctcc

SEQ ID NO: 1628 - DNA, 33 bp, Homo sapien
ggaccttatcttaccagtaattgcaatgtctcc

SEQ ID NO: 1629 - DNA, 33 bp, Homo sapien
atcactccacactgacaatgtaacagtcatggg

SEQ ID NO: 1630 - DNA, 33 bp, Homo sapien
atcactccacactgacgatgtaacagtcatggg

SEQ ID NO: 1631 - DNA, 33 bp, Homo sapien
gagccttcatatgaaaccaatcccagttgctat

SEQ ID NO: 1632 - DNA, 33 bp, Homo sapien
gagccttcatatgaaatcaatcccagttgctat

SEQ ID NO: 1633 - DNA, 33 bp, Homo sapien
actcactctctgagaacgatggcagcagctggg

SEQ ID NO: 1634 - DNA, 33 bp, Homo sapien
actcactctctgagaatgatggcagcagctggg

SEQ ID NO: 1635 - DNA, 33 bp, Homo sapien
tataagatgatataaaatctagagcttgctctc

SEQ ID NO: 1636 - DNA, 33 bp, Homo sapien
tataagatgatataaagtctagagcttgctctc

SEQ ID NO: 1637 - DNA, 33 bp, Homo sapien
ggactttgtgttgcagaaaacccactcttcagt

SEQ ID NO: 1638 - DNA, 33 bp, Homo sapien
ggactttgtgttgcaggaaacccactcttcagt

SEQ ID NO: 1639 - DNA, 33 bp, Homo sapien
aaaatctttgcatagaccaatgtgtttttcagg

SEQ ID NO: 1640 - DNA, 33 bp, Homo sapien
aaaatctttgcatagatcaatgtgtttttcagg

SEQ ID NO: 1641 - DNA, 33 bp, Homo sapien
aaggcgatggctctgcaaagatctgagaagacc

SEQ ID NO: 1642 - DNA, 33 bp, Homo sapien
aaggcgatggctctgcgaagatctgagaagacc

SEQ ID NO: 1643 - DNA, 33 bp, Homo sapien
aggattaccttgctgaaacaggaacaaacattc

SEQ ID NO: 1644 - DNA, 33 bp, Homo sapien
aggattaccttgctgacacaggaacaaacattc

SEQ ID NO: 1645 - DNA, 33 bp, Homo sapien
gctatgctcttttgggaagaacccattttcttt

SEQ ID NO: 1646 - DNA, 33 bp, Homo sapien
gctatgctcttttggggagaacccattttcttt

SEQ ID NO: 1647 - DNA, 33 bp, Homo sapien
ttatagtattctcttcactttggacaatttctc

SEQ ID NO: 1648 - DNA, 33 bp, Homo sapien
ttatagtattctcttcgctttggacaatttctc

SEQ ID NO: 1649 - DNA, 33 bp, Homo sapien
gcagaaggcgtctagaataccttttactatgtg

SEQ ID NO: 1650 - DNA, 33 bp, Homo sapien
gcagaaggcgtctagagtaccttttactatgtg

SEQ ID NO: 1651 - DNA, 33 bp, Homo sapien
gatttttaaaaaacaactcagtttgcccagttc

SEQ ID NO: 1652 - DNA, 33 bp, Homo sapien
gatttttaaaaaacaattcagtttgcccagttc

SEQ ID NO: 1653 - DNA, 33 bp, Homo sapien
ctgtctaatttggggcaaaaagttaattggaac

SEQ ID NO: 1654 - DNA, 33 bp, Homo sapien
ctgtctaatttggggcgaaaagttaattggaac

SEQ ID NO: 1655 - DNA, 33 bp, Homo sapien
cctaacactcctctaaatggagcagagacttgg

SEQ ID NO: 1656 - DNA, 33 bp, Homo sapien
cctaacactcctctaattggagcagagacttgg

SEQ ID NO: 1657 - DNA, 33 bp, Homo sapien
atctcacttcctaggaacccgagcctcagacca

SEQ ID NO: 1658 - DNA, 33 bp, Homo sapien
atctcacttcctaggagcccgagcctcagacca

SEQ ID NO: 1659 - DNA, 33 bp, Homo sapien
ttcctgcaactattcacgcacagtgctcggggt

SEQ ID NO: 1660 - DNA, 33 bp, Homo sapien
ttcctgcaactattcatgcacagtgctcggggt

SEQ ID NO: 1661 - DNA, 33 bp, Homo sapien
agaggatggtaattaaggatgagcatgatgaga

SEQ ID NO: 1662 - DNA, 33 bp, Homo sapien
agaggatggtaattaatgatgagcatgatgaga

SEQ ID NO: 1663 - DNA, 33 bp, Homo sapien
gcacctagaccctgaacagtcaaggatgtttca

SEQ ID NO: 1664 - DNA, 33 bp, Homo sapien
gcacctagaccctgaagagtcaaggatgtttca

SEQ ID NO: 1665 - DNA, 33 bp, Homo sapien
ccttaatttattgagacggagtatcttaattat

SEQ ID NO: 1666 - DNA, 33 bp, Homo sapien
ccttaatttattgagatggagtatcttaattat

SEQ ID NO: 1667 - DNA, 33 bp, Homo sapien
gtggaattgtcccccaaagcaaagttaaattta

SEQ ID NO: 1668 - DNA, 33 bp, Homo sapien
gtggaattgtcccccagagcaaagttaaattta

SEQ ID NO: 1669 - DNA, 33 bp, Homo sapien
agctttgtgagcagtcaacgcaggtgagcaatt

SEQ ID NO: 1670 - DNA, 33 bp, Homo sapien
agctttgtgagcagtcgacgcaggtgagcaatt

SEQ ID NO: 1671 - DNA, 33 bp, Homo sapien
ctctttttataaggacaacagttactgggttag

SEQ ID NO: 1672 - DNA, 33 bp, Homo sapien
ctctttttataaggaccacagttactgggttag

SEQ ID NO: 1673 - DNA, 33 bp, Homo sapien
tataatttgtgaatacaaaggtggggatcatga

SEQ ID NO: 1674 - DNA, 33 bp, Homo sapien
tataatttgtgaatacgaaggtggggatcatga

SEQ ID NO: 1675 - DNA, 33 bp, Homo sapien
ctcgggaaagaggctacggggcttgctcctgac

SEQ ID NO: 1676 - DNA, 33 bp, Homo sapien
ctcgggaaagaggctatggggcttgctcctgac

SEQ ID NO: 1677 - DNA, 33 bp, Homo sapien
aacagcattctgattgcaactggccccctctgt

SEQ ID NO: 1678 - DNA, 33 bp, Homo sapien
aacagcattctgattgtaactggccccctctgt

SEQ ID NO: 1679 - DNA, 33 bp, Homo sapien
atttaacttgggagaaactgatgcttacatctc

SEQ ID NO: 1680 - DNA, 33 bp, Homo sapien
atttaacttgggagaacctgatgcttacatctc

SEQ ID NO: 1681 - DNA, 33 bp, Homo sapien
gcacacatcgagatagcagcagaacagtcagca

SEQ ID NO: 1682 - DNA, 33 bp, Homo sapien
gcacacatcgagatagtagcagaacagtcagca

SEQ ID NO: 1683 - DNA, 33 bp, Homo sapien
cggccagagacccagccataatggtattcatgt

SEQ ID NO: 1684 - DNA, 33 bp, Homo sapien
cggccagagacccagctataatggtattcatgt

SEQ ID NO: 1685 - DNA, 33 bp, Homo sapien
gtacaatctttagcagacatactctcataatat

SEQ ID NO: 1686 - DNA, 33 bp, Homo sapien
gtacaatctttagcagtcatactctcataatat

SEQ ID NO: 1687 - DNA, 33 bp, Homo sapien
tgtgaaaattggcagacaggaattcaagagagg

SEQ ID NO: 1688 - DNA, 33 bp, Homo sapien
tgtgaaaattggcagagaggaattcaagagagg

SEQ ID NO: 1689 - DNA, 33 bp, Homo sapien
atgtgtctttccagacggcttaggtttctatct

SEQ ID NO: 1690 - DNA, 33 bp, Homo sapien
atgtgtctttccagactgcttaggtttctatct

SEQ ID NO: 1691 - DNA, 33 bp, Homo sapien
cagcggccaccctgaacagtcaacgataaggag

SEQ ID NO: 1692 - DNA, 33 bp, Homo sapien
cagcggccaccctgaagagtcaacgataaggag

SEQ ID NO: 1693 - DNA, 33 bp, Homo sapien
tcttgtttgcggttgaggttctgggatcacgtg

SEQ ID NO: 1694 - DNA, 33 bp, Homo sapien
tcttgtttgcggttgatgttctgggatcacgtg

SEQ ID NO: 1695 - DNA, 33 bp, Homo sapien
agatgcaattagttcacgattgagatacaaaca

SEQ ID NO: 1696 - DNA, 33 bp, Homo sapien
agatgcaattagttcatgattgagatacaaaca

SEQ ID NO: 1697 - DNA, 33 bp, Homo sapien
ttggattctagcacaaacttgaaggcagaaaca

SEQ ID NO: 1698 - DNA, 33 bp, Homo sapien
ttggattctagcacaatcttgaaggcagaaaca

SEQ ID NO: 1699 - DNA, 33 bp, Homo sapien
gacattgggctcagatcaaatgaattcagcctc

SEQ ID NO: 1700 - DNA, 33 bp, Homo sapien
gacattgggctcagatgaaatgaattcagcctc

SEQ ID NO: 1701 - DNA, 33 bp, Homo sapien
aggggagaggaaagcacgccagccacaccccga

SEQ ID NO: 1702 - DNA, 33 bp, Homo sapien
aggggagaggaaagcatgccagccacaccccga

SEQ ID NO: 1703 - DNA, 33 bp, Homo sapien
ctccgtctgtgccacagtaggcaatgggaggtg

SEQ ID NO: 1704 - DNA, 33 bp, Homo sapien
ctccgtctgtgccacattaggcaatgggaggtg

SEQ ID NO: 1705 - DNA, 33 bp, Homo sapien
tcaaagtcccacaaatcatgaggttttccagtc

SEQ ID NO: 1706 - DNA, 33 bp, Homo sapien
tcaaagtcccacaaatgatgaggttttccagtc

SEQ ID NO: 1707 - DNA, 33 bp, Homo sapien
ttgtaaaaaaaaagcccacaagttatccatata

SEQ ID NO: 1708 - DNA, 33 bp, Homo sapien
ttgtaaaaaaaaagcctacaagttatccatata

SEQ ID NO: 1709 - DNA, 33 bp, Homo sapien
ggctgtgcaaggtatgaattgaaggttattttg

SEQ ID NO: 1710 - DNA, 33 bp, Homo sapien
ggctgtgcaaggtatggattgaaggttattttg

SEQ ID NO: 1711 - DNA, 33 bp, Homo sapien
ggacacactactcatccaatatctctgtgatga

SEQ ID NO: 1712 - DNA, 33 bp, Homo sapien
ggacacactactcatctaatatctctgtgatga

SEQ ID NO: 1713 - DNA, 33 bp, Homo sapien
gggggataaaactcagcagtcagccagtcattc

SEQ ID NO: 1714 - DNA, 33 bp, Homo sapien
gggggataaaactcaggagtcagccagtcattc

SEQ ID NO: 1715 - DNA, 33 bp, Homo sapien
tagagtcaatcatgtacgcccctgagcaatgcc

SEQ ID NO: 1716 - DNA, 33 bp, Homo sapien
tagagtcaatcatgtatgcccctgagcaatgcc

SEQ ID NO: 1717 - DNA, 33 bp, Homo sapien
ttgcctttggttcccgaagcatctggcttaatc

SEQ ID NO: 1718 - DNA, 33 bp, Homo sapien
ttgcctttggttcccgcagcatctggcttaatc

SEQ ID NO: 1719 - DNA, 33 bp, Homo sapien
atcctctgcacaatgaactgcatctgaaggatt

SEQ ID NO: 1720 - DNA, 33 bp, Homo sapien
atcctctgcacaatgagctgcatctgaaggatt

SEQ ID NO: 1721 - DNA, 33 bp, Homo sapien
gctttagcttgactacgggagggctttggacta

SEQ ID NO: 1722 - DNA, 33 bp, Homo sapien
gctttagcttgactactggagggctttggacta

SEQ ID NO: 1723 - DNA, 33 bp, Homo sapien
ggcaggaggaggtgacagcactggttaaccaaa

SEQ ID NO: 1724 - DNA, 33 bp, Homo sapien
ggcaggaggaggtgacggcactggttaaccaaa

SEQ ID NO: 1725 - DNA, 33 bp, Homo sapien
ccaggagaaggataaacgcaaaggccctgagac

SEQ ID NO: 1726 - DNA, 33 bp, Homo sapien
ccaggagaaggataaatgcaaaggccctgagac

SEQ ID NO: 1727 - DNA, 33 bp, Homo sapien
cacaggtgtttcaaacccatcatcatgtcccaa

SEQ ID NO: 1728 - DNA, 33 bp, Homo sapien
cacaggtgtttcaaactcatcatcatgtcccaa

SEQ ID NO: 1729 - DNA, 33 bp, Homo sapien
tgattgtttgggcctcacaaagacctctctccc

SEQ ID NO: 1730 - DNA, 33 bp, Homo sapien
tgattgtttgggcctcgcaaagacctctctccc

SEQ ID NO: 1731 - DNA, 33 bp, Homo sapien
caaagtcacagagcccagaagaggcagcatgtt

SEQ ID NO: 1732 - DNA, 33 bp, Homo sapien
caaagtcacagagccccgaagaggcagcatgtt

SEQ ID NO: 1733 - DNA, 33 bp, Homo sapien
atgtgttaatcaatgcgatctccttgggtaatt

SEQ ID NO: 1734 - DNA, 33 bp, Homo sapien
atgtgttaatcaatgctatctccttgggtaatt

SEQ ID NO: 1735 - DNA, 33 bp, Homo sapien
gagccaggcctgtaataagaacctcaggaccaa

SEQ ID NO: 1736 - DNA, 33 bp, Homo sapien
gagccaggcctgtaatgagaacctcaggaccaa

SEQ ID NO: 1737 - DNA, 33 bp, Homo sapien
gctgggcctgtgcaagaagaaacaggtgtgtgc

SEQ ID NO: 1738 - DNA, 33 bp, Homo sapien
gctgggcctgtgcaaggagaaacaggtgtgtgc

SEQ ID NO: 1739 - DNA, 33 bp, Homo sapien
cccaggaaaaggaatacctgcctgtaaaacaga

SEQ ID NO: 1740 - DNA, 33 bp, Homo sapien
cccaggaaaaggaatatctgcctgtaaaacaga

SEQ ID NO: 1741 - DNA, 33 bp, Homo sapien
gcttgtagtattgaataagggaattgaatgtgg

SEQ ID NO: 1742 - DNA, 33 bp, Homo sapien
gcttgtagtattgaatgagggaattgaatgtgg

SEQ ID NO: 1743 - DNA, 33 bp, Homo sapien
catgcacctctcctgagaaggaaacagaccctc

SEQ ID NO: 1744 - DNA, 33 bp, Homo sapien
catgcacctctcctgataaggaaacagaccctc

SEQ ID NO: 1745 - DNA, 33 bp, Homo sapien
cagggtataactatttaaaagcgatctgattca

SEQ ID NO: 1746 - DNA, 33 bp, Homo sapien
cagggtataactatttcaaagcgatctgattca

SEQ ID NO: 1747 - DNA, 33 bp, Homo sapien
ggctcattttgcctaacgtgtttctgtgctctg

SEQ ID NO: 1748 - DNA, 33 bp, Homo sapien
ggctcattttgcctaatgtgtttctgtgctctg

SEQ ID NO: 1749 - DNA, 33 bp, Homo sapien
tcacatgtggctaagaagagaacggagaaagca

SEQ ID NO: 1750 - DNA, 33 bp, Homo sapien
tcacatgtggctaagaggagaacggagaaagca

SEQ ID NO: 1751 - DNA, 33 bp, Homo sapien
gtacagtgaaagcacacgaaactagaataaaaa

SEQ ID NO: 1752 - DNA, 33 bp, Homo sapien
gtacagtgaaagcacatgaaactagaataaaaa

SEQ ID NO: 1753 - DNA, 33 bp, Homo sapien
gtgggcgtccatgtacaggcacgagtgtgtgtg

SEQ ID NO: 1754 - DNA, 33 bp, Homo sapien
gtgggcgtccatgtacgggcacgagtgtgtgtg

SEQ ID NO: 1755 - DNA, 33 bp, Homo sapien
ttcttcccattctagacgaggaaacaaagctgg

SEQ ID NO: 1756 - DNA, 33 bp, Homo sapien
ttcttcccattctagatgaggaaacaaagctgg

SEQ ID NO: 1757 - DNA, 33 bp, Homo sapien
tttctgggagaggcaaatcctcctgtaacaagg

SEQ ID NO: 1758 - DNA, 33 bp, Homo sapien
tttctgggagaggcaattcctcctgtaacaagg

SEQ ID NO: 1759 - DNA, 33 bp, Homo sapien
acatttcaaagtctacacccatttggaagtggc

SEQ ID NO: 1760 - DNA, 33 bp, Homo sapien
acatttcaaagtctacgcccatttggaagtggc

SEQ ID NO: 1761 - DNA, 33 bp, Homo sapien
gggcagagagataatacgctgatactctaatgg

SEQ ID NO: 1762 - DNA, 33 bp, Homo sapien
gggcagagagataataggctgatactctaatgg

SEQ ID NO: 1763 - DNA, 33 bp, Homo sapien
ttataggtggagaatacgcgtgtatctgatgtg

SEQ ID NO: 1764 - DNA, 33 bp, Homo sapien
ttataggtggagaatatgcgtgtatctgatgtg

SEQ ID NO: 1765 - DNA, 33 bp, Homo sapien
agtgagattaggcaaaccacttgtgtttccaaa

SEQ ID NO: 1766 - DNA, 33 bp, Homo sapien
agtgagattaggcaaatcacttgtgtttccaaa

SEQ ID NO: 1767 - DNA, 33 bp, Homo sapien
ttattttgtcatagcccgcggatctagttaaat

SEQ ID NO: 1768 - DNA, 33 bp, Homo sapien
ttattttgtcatagcctgcggatctagttaaat

SEQ ID NO: 1769 - DNA, 33 bp, Homo sapien
ccttcttcattcacccaaagtgctaagcagcct

SEQ ID NO: 1770 - DNA, 33 bp, Homo sapien
ccttcttcattcacccgaagtgctaagcagcct

SEQ ID NO: 1771 - DNA, 33 bp, Homo sapien
ctgtgtccggcaataacgatggagcgcccagga

SEQ ID NO: 1772 - DNA, 33 bp, Homo sapien
ctgtgtccggcaataatgatggagcgcccagga

SEQ ID NO: 1773 - DNA, 33 bp, Homo sapien
taaaaatacgcgagaacggccaggagcggtggc

SEQ ID NO: 1774 - DNA, 33 bp, Homo sapien
taaaaatacgcgagaatggccaggagcggtggc

SEQ ID NO: 1775 - DNA, 33 bp, Homo sapien
tgaaatacatcaaaacaaatctcaacgcaactc

SEQ ID NO: 1776 - DNA, 33 bp, Homo sapien
tgaaatacatcaaaacgaatctcaacgcaactc

SEQ ID NO: 1777 - DNA, 33 bp, Homo sapien
cgctgtaaaacagagacgactcaaagcccagaa

SEQ ID NO: 1778 - DNA, 33 bp, Homo sapien
cgctgtaaaacagagatgactcaaagcccagaa

SEQ ID NO: 1779 - DNA, 33 bp, Homo sapien
tcactcagaagccccaatgccagatcgggcctg

SEQ ID NO: 1780 - DNA, 33 bp, Homo sapien
tcactcagaagccccagtgccagatcgggcctg

SEQ ID NO: 1781 - DNA, 33 bp, Homo sapien
cgtcagcccctgcacactgcggatcacatcacg

SEQ ID NO: 1782 - DNA, 33 bp, Homo sapien
cgtcagcccctgcacattgcggatcacatcacg

SEQ ID NO: 1783 - DNA, 33 bp, Homo sapien
gatccaacgaaataacacatgcaaagaacttag

SEQ ID NO: 1784 - DNA, 33 bp, Homo sapien
gatccaacgaaataacgcatgcaaagaacttag

SEQ ID NO: 1785 - DNA, 33 bp, Homo sapien
gtcctgccaccaacgacaagcaagtgaatgagg

SEQ ID NO: 1786 - DNA, 33 bp, Homo sapien
gtcctgccaccaacgagaagcaagtgaatgagg

SEQ ID NO: 1787 - DNA, 33 bp, Homo sapien
acccataacatctttccagaaggagcgcttgtc

SEQ ID NO: 1788 - DNA, 33 bp, Homo sapien
acccataacatctttctagaaggagcgcttgtc

SEQ ID NO: 1789 - DNA, 33 bp, Homo sapien
gaaagcatcgctcaaacccgcaaatgtggactc

SEQ ID NO: 1790 - DNA, 33 bp, Homo sapien
gaaagcatcgctcaaatccgcaaatgtggactc

SEQ ID NO: 1791 - DNA, 33 bp, Homo sapien
ggtcctgggatctggacgaaatgctggtgggtc

SEQ ID NO: 1792 - DNA, 33 bp, Homo sapien
ggtcctgggatctggaggaaatgctggtgggtc

SEQ ID NO: 1793 - DNA, 33 bp, Homo sapien
tggagagttgatttacagaacataaccgtcctc

SEQ ID NO: 1794 - DNA, 33 bp, Homo sapien
tggagagttgatttacggaacataaccgtcctc

SEQ ID NO: 1795 - DNA, 33 bp, Homo sapien
acataaccgtcctcccagcagggattctgttca

SEQ ID NO: 1796 - DNA, 33 bp, Homo sapien
acataaccgtcctcccggcagggattctgttca

SEQ ID NO: 1797 - DNA, 33 bp, Homo sapien
ctccaggatttaggggcatggaattgtttttac

SEQ ID NO: 1798 - DNA, 33 bp, Homo sapien
ctccaggatttaggggtatggaattgtttttac

SEQ ID NO: 1799 - DNA, 33 bp, Homo sapien
cctgctaagaactcaacggtcagtataggaagg

SEQ ID NO: 1800 - DNA, 33 bp, Homo sapien
cctgctaagaactcaatggtcagtataggaagg

SEQ ID NO: 1801 - DNA, 33 bp, Homo sapien
cgggtggaaaccagcccgagttcatgctgtagg

SEQ ID NO: 1802 - DNA, 33 bp, Homo sapien
cgggtggaaaccagccggagttcatgctgtagg

SEQ ID NO: 1803 - DNA, 33 bp, Homo sapien
ccgcccgggcgtgctaagttctcacttctgtgg

SEQ ID NO: 1804 - DNA, 33 bp, Homo sapien
ccgcccgggcgtgctatgttctcacttctgtgg

SEQ ID NO: 1805 - DNA, 33 bp, Homo sapien
ggcacaactaccatccaattcaacagatgaaga

SEQ ID NO: 1806 - DNA, 33 bp, Homo sapien
ggcacaactaccatcccattcaacagatgaaga

SEQ ID NO: 1807 - DNA, 33 bp, Homo sapien
acctggcccagactccacttctttccagctggc

SEQ ID NO: 1808 - DNA, 33 bp, Homo sapien
acctggcccagactccgcttctttccagctggc

SEQ ID NO: 1809 - DNA, 33 bp, Homo sapien
ccaagtcaaaacgtcaaaccacgcacttgatct

SEQ ID NO: 1810 - DNA, 33 bp, Homo sapien
ccaagtcaaaacgtcagaccacgcacttgatct

SEQ ID NO: 1811 - DNA, 33 bp, Homo sapien
tacagatgtgtgagcaataataaatgactgttg

SEQ ID NO: 1812 - DNA, 33 bp, Homo sapien
tacagatgtgtgagcagtaataaatgactgttg

SEQ ID NO: 1813 - DNA, 33 bp, Homo sapien
ctgtgtcttacaaccaggcgcttaggaactgca

SEQ ID NO: 1814 - DNA, 33 bp, Homo sapien
ctgtgtcttacaaccatgcgcttaggaactgca

SEQ ID NO: 1815 - DNA, 33 bp, Homo sapien
ggtcaacgtgagaagcaagggtgtaggggaagg

SEQ ID NO: 1816 - DNA, 33 bp, Homo sapien
ggtcaacgtgagaagcgagggtgtaggggaagg

SEQ ID NO: 1817 - DNA, 33 bp, Homo sapien
ggccacagtctattaacggtcctgcgcagggtt

SEQ ID NO: 1818 - DNA, 33 bp, Homo sapien
ggccacagtctattaagggtcctgcgcagggtt

SEQ ID NO: 1819 - DNA, 33 bp, Homo sapien
gacaaaaatcaatgaacatttggaaacaggctg

SEQ ID NO: 1820 - DNA, 33 bp, Homo sapien
gacaaaaatcaatgaagatttggaaacaggctg

SEQ ID NO: 1821 - DNA, 33 bp, Homo sapien
gactaatcaggctcgaagtgtagtctagggtgg

SEQ ID NO: 1822 - DNA, 33 bp, Homo sapien
gactaatcaggctcgaggtgtagtctagggtgg

SEQ ID NO: 1823 - DNA, 33 bp, Homo sapien
caagtctctgattcacacgttaaccatgttaaa

SEQ ID NO: 1824 - DNA, 33 bp, Homo sapien
caagtctctgattcacccgttaaccatgttaaa

SEQ ID NO: 1825 - DNA, 33 bp, Homo sapien
atccatgttgactagagaggtcagagccctccc

SEQ ID NO: 1826 - DNA, 33 bp, Homo sapien
atccatgttgactagataggtcagagccctccc

SEQ ID NO: 1827 - DNA, 33 bp, Homo sapien
tcaaaggactcttgccagaacaaatccttccat

SEQ ID NO: 1828 - DNA, 33 bp, Homo sapien
tcaaaggactcttgccggaacaaatccttccat

SEQ ID NO: 1829 - DNA, 33 bp, Homo sapien
agtttcctgtaagcaacattgccctgttaggaa

SEQ ID NO: 1830 - DNA, 33 bp, Homo sapien
agtttcctgtaagcaagattgccctgttaggaa

SEQ ID NO: 1831 - DNA, 33 bp, Homo sapien
agatgagcacccaggaaagaagtgagctctgtc

SEQ ID NO: 1832 - DNA, 33 bp, Homo sapien
agatgagcacccaggagagaagtgagctctgtc

SEQ ID NO: 1833 - DNA, 33 bp, Homo sapien
gctgatcaccaaggtgcatttttgctgagcatg

SEQ ID NO: 1834 - DNA, 33 bp, Homo sapien
gctgatcaccaaggtgtatttttgctgagcatg

SEQ ID NO: 1835 - DNA, 33 bp, Homo sapien
tctgcccgtccagcagaatgttcctgtctaggg

SEQ ID NO: 1836 - DNA, 33 bp, Homo sapien
tctgcccgtccagcaggatgttcctgtctaggg

SEQ ID NO: 1837 - DNA, 33 bp, Homo sapien
aacgaacacaaggatgaaagcagagaaacgggt

SEQ ID NO: 1838 - DNA, 33 bp, Homo sapien
aacgaacacaaggatgcaagcagagaaacgggt

SEQ ID NO: 1839 - DNA, 33 bp, Homo sapien
cctcctcatggcctgaaaggaccttgttttgca

SEQ ID NO: 1840 - DNA, 33 bp, Homo sapien
cctcctcatggcctgacaggaccttgttttgca

SEQ ID NO: 1841 - DNA, 33 bp, Homo sapien
aggccaccaggctgagaagccatccctgatgca

SEQ ID NO: 1842 - DNA, 33 bp, Homo sapien
aggccaccaggctgagtagccatccctgatgca

SEQ ID NO: 1843 - DNA, 33 bp, Homo sapien
caggaagcctctgacaatgcgccagcagacact

SEQ ID NO: 1844 - DNA, 33 bp, Homo sapien
caggaagcctctgacactgcgccagcagacact

SEQ ID NO: 1845 - DNA, 33 bp, Homo sapien
ctccagctactaaagagacaacgggcccaccca

SEQ ID NO: 1846 - DNA, 33 bp, Homo sapien
ctccagctactaaagatacaacgggcccaccca

SEQ ID NO: 1847 - DNA, 33 bp, Homo sapien
agagcctgctgcttcacagtcaaatggggctgg

SEQ ID NO: 1848 - DNA, 33 bp, Homo sapien
agagcctgctgcttcatagtcaaatggggctgg

SEQ ID NO: 1849 - DNA, 33 bp, Homo sapien
gtgagaatcctttcaaactggtgtgagctcgga

SEQ ID NO: 1850 - DNA, 33 bp, Homo sapien
gtgagaatcctttcaagctggtgtgagctcgga

SEQ ID NO: 1851 - DNA, 33 bp, Homo sapien
tcactaacctttgccacgtttgcctcgccactc

SEQ ID NO: 1852 - DNA, 33 bp, Homo sapien
tcactaacctttgccatgtttgcctcgccactc

SEQ ID NO: 1853 - DNA, 33 bp, Homo sapien
agaagatgctagaaaacgtcaatccattagatt

SEQ ID NO: 1854 - DNA, 33 bp, Homo sapien
agaagatgctagaaaatgtcaatccattagatt

SEQ ID NO: 1855 - DNA, 33 bp, Homo sapien
gctcactcaagaagggaacaagcggcaaaggca

SEQ ID NO: 1856 - DNA, 33 bp, Homo sapien
gctcactcaagaaggggacaagcggcaaaggca

SEQ ID NO: 1857 - DNA, 33 bp, Homo sapien
tatttgttggctgttccctaaaggagacttctc

SEQ ID NO: 1858 - DNA, 33 bp, Homo sapien
tatttgttggctgttctctaaaggagacttctc

SEQ ID NO: 1859 - DNA, 33 bp, Homo sapien
tgatgatcatcagggcagagtcttagcctaatt

SEQ ID NO: 1860 - DNA, 33 bp, Homo sapien
tgatgatcatcagggcggagtcttagcctaatt

SEQ ID NO: 1861 - DNA, 33 bp, Homo sapien
aggttgctggggaccaaatatttgcatgaagcc

SEQ ID NO: 1862 - DNA, 33 bp, Homo sapien
aggttgctggggaccagatatttgcatgaagcc

SEQ ID NO: 1863 - DNA, 33 bp, Homo sapien
gcacagtgctggggggaagaaaccagttttgaa

SEQ ID NO: 1864 - DNA, 33 bp, Homo sapien
gcacagtgctgggggggagaaaccagttttgaa

SEQ ID NO: 1865 - DNA, 33 bp, Homo sapien
tttaattcctctctggaaaattcatcatggaaa

SEQ ID NO: 1866 - DNA, 33 bp, Homo sapien
tttaattcctctctgggaaattcatcatggaaa

SEQ ID NO: 1867 - DNA, 33 bp, Homo sapien
gaaaggggtttatattcaagtcaggagcatctc

SEQ ID NO: 1868 - DNA, 33 bp, Homo sapien
gaaaggggtttatattgaagtcaggagcatctc

SEQ ID NO: 1869 - DNA, 33 bp, Homo sapien
gtctacaaagcaacgaaatggtgctacagtttc

SEQ ID NO: 1870 - DNA, 33 bp, Homo sapien
gtctacaaagcaacgagatggtgctacagtttc

SEQ ID NO: 1871 - DNA, 33 bp, Homo sapien
caggtgggagataccgccctccaacgggaactc

SEQ ID NO: 1872 - DNA, 33 bp, Homo sapien
caggtgggagataccggcctccaacgggaactc

SEQ ID NO: 1873 - DNA, 33 bp, Homo sapien
cacacattggattgccacgtgaaatataggatg

SEQ ID NO: 1874 - DNA, 33 bp, Homo sapien
cacacattggattgccgcgtgaaatataggatg

SEQ ID NO: 1875 - DNA, 33 bp, Homo sapien
attccagttaagaccaaagatgcagtttgcagg

SEQ ID NO: 1876 - DNA, 33 bp, Homo sapien
attccagttaagaccagagatgcagtttgcagg

SEQ ID NO: 1877 - DNA, 33 bp, Homo sapien
atgaggacaaattgccagaaatggctccattat

SEQ ID NO: 1878 - DNA, 33 bp, Homo sapien
atgaggacaaattgccggaaatggctccattat

SEQ ID NO: 1879 - DNA, 33 bp, Homo sapien
tatagctagctttcagaaaaaatatgactacct

SEQ ID NO: 1880 - DNA, 33 bp, Homo sapien
tatagctagctttcaggaaaaatatgactacct

SEQ ID NO: 1881 - DNA, 33 bp, Homo sapien
tcagagaatcctgaaacaccatgtttattatgt

SEQ ID NO: 1882 - DNA, 33 bp, Homo sapien
tcagagaatcctgaaagaccatgtttattatgt

SEQ ID NO: 1883 - DNA, 33 bp, Homo sapien
ttactgtacagctacactgattaatataattag

SEQ ID NO: 1884 - DNA, 33 bp, Homo sapien
ttactgtacagctacattgattaatataattag

SEQ ID NO: 1885 - DNA, 33 bp, Homo sapien
aagctgtcagttctgcacaagattgatctagag

SEQ ID NO: 1886 - DNA, 33 bp, Homo sapien
aagctgtcagttctgcccaagattgatctagag

SEQ ID NO: 1887 - DNA, 33 bp, Homo sapien
atagaattcatagtgaataggcctgaatatttc

SEQ ID NO: 1888 - DNA, 33 bp, Homo sapien
atagaattcatagtgagtaggcctgaatatttc

SEQ ID NO: 1889 - DNA, 33 bp, Homo sapien
gcacatgtatattcaactcagcattattagcac

SEQ ID NO: 1890 - DNA, 33 bp, Homo sapien
gcacatgtatattcaattcagcattattagcac

SEQ ID NO: 1891 - DNA, 33 bp, Homo sapien
ccctgggagcgaaggacgaggcaagactccagt

SEQ ID NO: 1892 - DNA, 33 bp, Homo sapien
ccctgggagcgaaggaggaggcaagactccagt

SEQ ID NO: 1893 - DNA, 33 bp, Homo sapien
tcagaactaccgctcaccaaaagatagtgtaac

SEQ ID NO: 1894 - DNA, 33 bp, Homo sapien
tcagaactaccgctcatcaaaagatagtgtaac

SEQ ID NO: 1895 - DNA, 33 bp, Homo sapien
gctcaggaggatgcccacttattcagacatgaa

SEQ ID NO: 1896 - DNA, 33 bp, Homo sapien
gctcaggaggatgcccgcttattcagacatgaa

SEQ ID NO: 1897 - DNA, 33 bp, Homo sapien
ataccaggaaactggacgaagatcaaatacata

SEQ ID NO: 1898 - DNA, 33 bp, Homo sapien
ataccaggaaactggatgaagatcaaatacata

SEQ ID NO: 1899 - DNA, 33 bp, Homo sapien
ccaattccctggacgacgatggagaggtgctca

SEQ ID NO: 1900 - DNA, 33 bp, Homo sapien
ccaattccctggacgatgatggagaggtgctca

SEQ ID NO: 1901 - DNA, 33 bp, Homo sapien
gaataggattgaaacaccaacatccgtttcctt

SEQ ID NO: 1902 - DNA, 33 bp, Homo sapien
gaataggattgaaacagcaacatccgtttcctt

SEQ ID NO: 1903 - DNA, 33 bp, Homo sapien
tctggtgatcatcagcaaaggcgcaggcaaggg

SEQ ID NO: 1904 - DNA, 33 bp, Homo sapien
tctggtgatcatcagcgaaggcgcaggcaaggg

SEQ ID NO: 1905 - DNA, 33 bp, Homo sapien
tgggaaattatagcacactcattgctctgacga

SEQ ID NO: 1906 - DNA, 33 bp, Homo sapien
tgggaaattatagcacgctcattgctctgacga

SEQ ID NO: 1907 - DNA, 33 bp, Homo sapien
gctcagatatcagcaccctggtttccttattgg

SEQ ID NO: 1908 - DNA, 33 bp, Homo sapien
gctcagatatcagcacgctggtttccttattgg

SEQ ID NO: 1909 - DNA, 33 bp, Homo sapien
aaacaagggaagttgaacgacaaaaatagccca

SEQ ID NO: 1910 - DNA, 33 bp, Homo sapien
aaacaagggaagttgagcgacaaaaatagccca

SEQ ID NO: 1911 - DNA, 33 bp, Homo sapien
actggctgagcggagacggtgtatcccttaata

SEQ ID NO: 1912 - DNA, 33 bp, Homo sapien
actggctgagcggagatggtgtatcccttaata

SEQ ID NO: 1913 - DNA, 33 bp, Homo sapien
ccatgctggttgtagacaaaacaggattgggaa

SEQ ID NO: 1914 - DNA, 33 bp, Homo sapien
ccatgctggttgtagataaaacaggattgggaa

SEQ ID NO: 1915 - DNA, 33 bp, Homo sapien
agcaagaaccacttcccgatgatgactgcgttt

SEQ ID NO: 1916 - DNA, 33 bp, Homo sapien
agcaagaaccacttccggatgatgactgcgttt

SEQ ID NO: 1917 - DNA, 33 bp, Homo sapien
atgatggctaattaagcctctggagttgggcac

SEQ ID NO: 1918 - DNA, 33 bp, Homo sapien
atgatggctaattaaggctctggagttgggcac

SEQ ID NO: 1919 - DNA, 33 bp, Homo sapien
gccccggctgcctctccagtgctctctctcctc

SEQ ID NO: 1920 - DNA, 33 bp, Homo sapien
gccccggctgcctctctagtgctctctctcctc

SEQ ID NO: 1921 - DNA, 33 bp, Homo sapien
cttgcagcttggagacaaacccagccaagccag

SEQ ID NO: 1922 - DNA, 33 bp, Homo sapien
cttgcagcttggagacgaacccagccaagccag

SEQ ID NO: 1923 - DNA, 33 bp, Homo sapien
ggcctttggggacaaaccatttcaattgccaag

SEQ ID NO: 1924 - DNA, 33 bp, Homo sapien
ggcctttggggacaaatcatttcaattgccaag

SEQ ID NO: 1925 - DNA, 33 bp, Homo sapien
acattctttttagtgcgcttgtctttgaattca

SEQ ID NO: 1926 - DNA, 33 bp, Homo sapien
acattctttttagtgctcttgtctttgaattca

SEQ ID NO: 1927 - DNA, 33 bp, Homo sapien
gcccttgtgagagccagtcagccaaagaggacc

SEQ ID NO: 1928 - DNA, 33 bp, Homo sapien
gcccttgtgagagccattcagccaaagaggacc

SEQ ID NO: 1929 - DNA, 33 bp, Homo sapien
gtcagccttcaatccaatgactgggtttttgtt

SEQ ID NO: 1930 - DNA, 33 bp, Homo sapien
gtcagccttcaatccagtgactgggtttttgtt

SEQ ID NO: 1931 - DNA, 33 bp, Homo sapien
cttgatggttatgacaaagatggcccaaggaag

SEQ ID NO: 1932 - DNA, 33 bp, Homo sapien
cttgatggttatgacacagatggcccaaggaag

SEQ ID NO: 1933 - DNA, 33 bp, Homo sapien
caataccatcattttcacagggaaacaagttga

SEQ ID NO: 1934 - DNA, 33 bp, Homo sapien
caataccatcattttcgcagggaaacaagttga

SEQ ID NO: 1935 - DNA, 33 bp, Homo sapien
agggaaacgaggccaagtcaggcaaggctgatt

SEQ ID NO: 1936 - DNA, 33 bp, Homo sapien
agggaaacgaggccaattcaggcaaggctgatt

SEQ ID NO: 1937 - DNA, 33 bp, Homo sapien
gttaaattcataaataccagagaatgatgggtg

SEQ ID NO: 1938 - DNA, 33 bp, Homo sapien
gttaaattcataaatatcagagaatgatgggtg

SEQ ID NO: 1939 - DNA, 33 bp, Homo sapien
cgggcagtcattcatccatcttgcccatgaggc

SEQ ID NO: 1940 - DNA, 33 bp, Homo sapien
cgggcagtcattcatcgatcttgcccatgaggc

SEQ ID NO: 1941 - DNA, 33 bp, Homo sapien
ttgtccagtgtttctccaacggcacatactccc

SEQ ID NO: 1942 - DNA, 33 bp, Homo sapien
ttgtccagtgtttctctaacggcacatactccc

SEQ ID NO: 1943 - DNA, 33 bp, Homo sapien
ggtgtattcagttgtacctcattgaatctttcc

SEQ ID NO: 1944 - DNA, 33 bp, Homo sapien
ggtgtattcagttgtatctcattgaatctttcc

SEQ ID NO: 1945 - DNA, 33 bp, Homo sapien
actgggtcgaacagtacccccacagaattcatg

SEQ ID NO: 1946 - DNA, 33 bp, Homo sapien
actgggtcgaacagtatccccacagaattcatg

SEQ ID NO: 1947 - DNA, 33 bp, Homo sapien
cgccatagtccctcgccctgcaaagctcagagg

SEQ ID NO: 1948 - DNA, 33 bp, Homo sapien
cgccatagtccctcgctctgcaaagctcagagg

SEQ ID NO: 1949 - DNA, 33 bp, Homo sapien
aatccaagagatggcaggaaaagagaaaaaagg

SEQ ID NO: 1950 - DNA, 33 bp, Homo sapien
aatccaagagatggcatgaaaagagaaaaaagg

SEQ ID NO: 1951 - DNA, 33 bp, Homo sapien
tttcttctttattttaaggtgtcaattactcca

SEQ ID NO: 1952 - DNA, 33 bp, Homo sapien
tttcttctttattttagggtgtcaattactcca

SEQ ID NO: 1953 - DNA, 33 bp, Homo sapien
gtaggtgagactgccacgtgcataggacagagg

SEQ ID NO: 1954 - DNA, 33 bp, Homo sapien
gtaggtgagactgccatgtgcataggacagagg

SEQ ID NO: 1955 - DNA, 33 bp, Homo sapien
gggatgatactgttacagggtgatcctgaatca

SEQ ID NO: 1956 - DNA, 33 bp, Homo sapien
gggatgatactgttacggggtgatcctgaatca

SEQ ID NO: 1957 - DNA, 33 bp, Homo sapien
cttgaacatctgtgacacgggagaaacctaagc

SEQ ID NO: 1958 - DNA, 33 bp, Homo sapien
cttgaacatctgtgacccgggagaaacctaagc

SEQ ID NO: 1959 - DNA, 33 bp, Homo sapien
cacacacagacaagaaatgtactgaaaccagaa

SEQ ID NO: 1960 - DNA, 33 bp, Homo sapien
cacacacagacaagaactgtactgaaaccagaa

SEQ ID NO: 1961 - DNA, 33 bp, Homo sapien
aggagaggaactgaacagagtaattattctact

SEQ ID NO: 1962 - DNA, 33 bp, Homo sapien
aggagaggaactgaacggagtaattattctact

SEQ ID NO: 1963 - DNA, 33 bp, Homo sapien
gttggcgagatcttacaaagcctgatcggctaa

SEQ ID NO: 1964 - DNA, 33 bp, Homo sapien
gttggcgagatcttaccaagcctgatcggctaa

SEQ ID NO: 1965 - DNA, 33 bp, Homo sapien
taaatctgttcttcatcagttactgcgtcttaa

SEQ ID NO: 1966 - DNA, 33 bp, Homo sapien
taaatctgttcttcatgagttactgcgtcttaa

SEQ ID NO: 1967 - DNA, 33 bp, Homo sapien
caggtaacctggaaggaagcccagatattgagc

SEQ ID NO: 1968 - DNA, 33 bp, Homo sapien
caggtaacctggaagggagcccagatattgagc

SEQ ID NO: 1969 - DNA, 33 bp, Homo sapien
aagtcccagtcaccaacagagagcccagtttcc

SEQ ID NO: 1970 - DNA, 33 bp, Homo sapien
aagtcccagtcaccaagagagagcccagtttcc

SEQ ID NO: 1971 - DNA, 33 bp, Homo sapien
acctggcgtgtcacacagaggtcaggatgcttc

SEQ ID NO: 1972 - DNA, 33 bp, Homo sapien
acctggcgtgtcacacggaggtcaggatgcttc

SEQ ID NO: 1973 - DNA, 33 bp, Homo sapien
aaagggacatgcggcacatgagacacggaggca

SEQ ID NO: 1974 - DNA, 33 bp, Homo sapien
aaagggacatgcggcagatgagacacggaggca

SEQ ID NO: 1975 - DNA, 33 bp, Homo sapien
ggatggctgcaatcctaaagtcacagaacagca

SEQ ID NO: 1976 - DNA, 33 bp, Homo sapien
ggatggctgcaatcctgaagtcacagaacagca

SEQ ID NO: 1977 - DNA, 33 bp, Homo sapien
tctcacatactccagtaaacaatgtgtctcccc

SEQ ID NO: 1978 - DNA, 33 bp, Homo sapien
tctcacatactccagttaacaatgtgtctcccc

SEQ ID NO: 1979 - DNA, 33 bp, Homo sapien
cttctgacgctggaagccactgtctccctttca

SEQ ID NO: 1980 - DNA, 33 bp, Homo sapien
cttctgacgctggaagtcactgtctccctttca

SEQ ID NO: 1981 - DNA, 33 bp, Homo sapien
agccctcggttcaacaacctctcccgtctcttg

SEQ ID NO: 1982 - DNA, 33 bp, Homo sapien
agccctcggttcaacaccctctcccgtctcttg

SEQ ID NO: 1983 - DNA, 33 bp, Homo sapien
aacctcaaaatgcaaacgctccaaaaaccaggt

SEQ ID NO: 1984 - DNA, 33 bp, Homo sapien
aacctcaaaatgcaaatgctccaaaaaccaggt

SEQ ID NO: 1985 - DNA, 33 bp, Homo sapien
tcttcaatgtggaagaacctcactataaagcag

SEQ ID NO: 1986 - DNA, 33 bp, Homo sapien
tcttcaatgtggaagatcctcactataaagcag

SEQ ID NO: 1987 - DNA, 33 bp, Homo sapien
aagcaaccaatgtatcaccatttattggcaccg

SEQ ID NO: 1988 - DNA, 33 bp, Homo sapien
aagcaaccaatgtatcgccatttattggcaccg

SEQ ID NO: 1989 - DNA, 33 bp, Homo sapien
gacagggaaccattcacaaataggggagtgtaa

SEQ ID NO: 1990 - DNA, 33 bp, Homo sapien
gacagggaaccattcataaataggggagtgtaa

SEQ ID NO: 1991 - DNA, 33 bp, Homo sapien
gaacccccagaaactacgaatgtcaccttactt

SEQ ID NO: 1992 - DNA, 33 bp, Homo sapien
gaacccccagaaactatgaatgtcaccttactt

SEQ ID NO: 1993 - DNA, 33 bp, Homo sapien
gtgattaggagaggtcaaatctcatttccacgt

SEQ ID NO: 1994 - DNA, 33 bp, Homo sapien
gtgattaggagaggtcgaatctcatttccacgt

SEQ ID NO: 1995 - DNA, 33 bp, Homo sapien
agagtgggcctcgcagccaacccgaaaaggatg

SEQ ID NO: 1996 - DNA, 33 bp, Homo sapien
agagtgggcctcgcagtcaacccgaaaaggatg

SEQ ID NO: 1997 - DNA, 33 bp, Homo sapien
ggtggttactcaagaaccagtgaccttgtcata

SEQ ID NO: 1998 - DNA, 33 bp, Homo sapien
ggtggttactcaagaatcagtgaccttgtcata

SEQ ID NO: 1999 - DNA, 33 bp, Homo sapien
ccacgcaccctatcttcaaacagctgacaccgg

SEQ ID NO: 2000 - DNA, 33 bp, Homo sapien
ccacgcaccctatcttgaaacagctgacaccgg

SEQ ID NO: 2001 - DNA, 33 bp, Homo sapien
ccttcctgtggccgacagtcaacagagccttcc

SEQ ID NO: 2002 - DNA, 33 bp, Homo sapien
ccttcctgtggccgacggtcaacagagccttcc

SEQ ID NO: 2003 - DNA, 33 bp, Homo sapien
gaacccacaatatcatcagtctgccttgatctc

SEQ ID NO: 2004 - DNA, 33 bp, Homo sapien
gaacccacaatatcattagtctgccttgatctc

SEQ ID NO: 2005 - DNA, 33 bp, Homo sapien
gctggggcacaggtcacgtggataccgtggcag

SEQ ID NO: 2006 - DNA, 33 bp, Homo sapien
gctggggcacaggtcatgtggataccgtggcag

SEQ ID NO: 2007 - DNA, 33 bp, Homo sapien
gggccacacagagctacgaagagggagagccag

SEQ ID NO: 2008 - DNA, 33 bp, Homo sapien
gggccacacagagctaggaagagggagagccag

SEQ ID NO: 2009 - DNA, 33 bp, Homo sapien
ctgggcccggagacccaaagatttgcctctcgt

SEQ ID NO: 2010 - DNA, 33 bp, Homo sapien
ctgggcccggagaccctaagatttgcctctcgt

SEQ ID NO: 2011 - DNA, 33 bp, Homo sapien
tggtataatacataggacaccggcagatgttag

SEQ ID NO: 2012 - DNA, 33 bp, Homo sapien
tggtataatacatagggcaccggcagatgttag

SEQ ID NO: 2013 - DNA, 33 bp, Homo sapien
ctcgctcggcctgggacgaccccacagcatgtg

SEQ ID NO: 2014 - DNA, 33 bp, Homo sapien
ctcgctcggcctgggatgaccccacagcatgtg

SEQ ID NO: 2015 - DNA, 33 bp, Homo sapien
cgatcccacgctgaaacggaaacacagagaatg

SEQ ID NO: 2016 - DNA, 33 bp, Homo sapien
cgatcccacgctgaaatggaaacacagagaatg

SEQ ID NO: 2017 - DNA, 33 bp, Homo sapien
aatcacttgaacccacaaagtggagattacagt

SEQ ID NO: 2018 - DNA, 33 bp, Homo sapien
aatcacttgaacccacgaagtggagattacagt

SEQ ID NO: 2019 - DNA, 33 bp, Homo sapien
tggagattacagtgagccaaaattgtgccactg

SEQ ID NO: 2020 - DNA, 33 bp, Homo sapien
tggagattacagtgagtcaaaattgtgccactg

SEQ ID NO: 2021 - DNA, 33 bp, Homo sapien
tcctaaccactacataactcctcgctcatttaa

SEQ ID NO: 2022 - DNA, 33 bp, Homo sapien
tcctaaccactacatagctcctcgctcatttaa

SEQ ID NO: 2023 - DNA, 33 bp, Homo sapien
atgagtaatcagatgaataaggtgagtgatcaa

SEQ ID NO: 2024 - DNA, 33 bp, Homo sapien
atgagtaatcagatgagtaaggtgagtgatcaa

SEQ ID NO: 2025 - DNA, 33 bp, Homo sapien
attccactcctcggtaaacacctgaaagaactg

SEQ ID NO: 2026 - DNA, 33 bp, Homo sapien
attccactcctcggtatacacctgaaagaactg

SEQ ID NO: 2027 - DNA, 33 bp, Homo sapien
ttctttttgatggctgaatgttattcaattgta

SEQ ID NO: 2028 - DNA, 33 bp, Homo sapien
ttctttttgatggctggatgttattcaattgta

SEQ ID NO: 2029 - DNA, 33 bp, Homo sapien
aataatcagaggacaacttctacttcctctggc

SEQ ID NO: 2030 - DNA, 33 bp, Homo sapien
aataatcagaggacaatttctacttcctctggc

SEQ ID NO: 2031 - DNA, 33 bp, Homo sapien
tgaatagatagaaacaagatggttccagctctg

SEQ ID NO: 2032 - DNA, 33 bp, Homo sapien
tgaatagatagaaacaggatggttccagctctg

SEQ ID NO: 2033 - DNA, 33 bp, Homo sapien
agttccagggtacatacgcagggtgtgcagatt

SEQ ID NO: 2034 - DNA, 33 bp, Homo sapien
agttccagggtacatatgcagggtgtgcagatt

SEQ ID NO: 2035 - DNA, 33 bp, Homo sapien
tactttatatttttaaactaagatcatacccca

SEQ ID NO: 2036 - DNA, 33 bp, Homo sapien
tactttatatttttaacctaagatcatacccca

SEQ ID NO: 2037 - DNA, 33 bp, Homo sapien
ggatgcttgctttcaaatactctgctggggtaa

SEQ ID NO: 2038 - DNA, 33 bp, Homo sapien
ggatgcttgctttcaagtactctgctggggtaa

SEQ ID NO: 2039 - DNA, 33 bp, Homo sapien
ctgccctgtagctctcacttaacttcctagggg

SEQ ID NO: 2040 - DNA, 33 bp, Homo sapien
ctgccctgtagctctcgcttaacttcctagggg

SEQ ID NO: 2041 - DNA, 33 bp, Homo sapien
gtctcccactttttaactactggctgctaataa

SEQ ID NO: 2042 - DNA, 33 bp, Homo sapien
gtctcccactttttaattactggctgctaataa

SEQ ID NO: 2043 - DNA, 33 bp, Homo sapien
tagggagagcaggagaagttgggagagagcctg

SEQ ID NO: 2044 - DNA, 33 bp, Homo sapien
tagggagagcaggagaggttgggagagagcctg

SEQ ID NO: 2045 - DNA, 33 bp, Homo sapien
gtgctatctgataccactgggacatgcagcccc

SEQ ID NO: 2046 - DNA, 33 bp, Homo sapien
gtgctatctgataccattgggacatgcagcccc

SEQ ID NO: 2047 - DNA, 33 bp, Homo sapien
ttccacaatttttcaacatctttcagtcccagg

SEQ ID NO: 2048 - DNA, 33 bp, Homo sapien
ttccacaatttttcaatatctttcagtcccagg

SEQ ID NO: 2049 - DNA, 33 bp, Homo sapien
acacatcctgtaacctcaagattccactgtaca

SEQ ID NO: 2050 - DNA, 33 bp, Homo sapien
acacatcctgtaaccttaagattccactgtaca

SEQ ID NO: 2051 - DNA, 33 bp, Homo sapien
tactccagtctacacactgcttgatgttgttgt

SEQ ID NO: 2052 - DNA, 33 bp, Homo sapien
tactccagtctacacagtgcttgatgttgttgt

SEQ ID NO: 2053 - DNA, 33 bp, Homo sapien
aaaggttactttatcaccttttgcactagcacc

SEQ ID NO: 2054 - DNA, 33 bp, Homo sapien
aaaggttactttatcatcttttgcactagcacc

SEQ ID NO: 2055 - DNA, 33 bp, Homo sapien
catctgcagaaattgacatgtaaaaggctcaac

SEQ ID NO: 2056 - DNA, 33 bp, Homo sapien
catctgcagaaattgatatgtaaaaggctcaac

SEQ ID NO: 2057 - DNA, 33 bp, Homo sapien
ggcttcccaggagacccgcttatgaagggcaac

SEQ ID NO: 2058 - DNA, 33 bp, Homo sapien
ggcttcccaggagacctgcttatgaagggcaac

SEQ ID NO: 2059 - DNA, 33 bp, Homo sapien
cccttttcctgagtaacgctcctgagagcagag

SEQ ID NO: 2060 - DNA, 33 bp, Homo sapien
cccttttcctgagtaatgctcctgagagcagag

SEQ ID NO: 2061 - DNA, 33 bp, Homo sapien
tgatgggatgagcaaagaattcaagaatgagtg

SEQ ID NO: 2062 - DNA, 33 bp, Homo sapien
tgatgggatgagcaaataattcaagaatgagtg

SEQ ID NO: 2063 - DNA, 33 bp, Homo sapien
tcagaacaccaagaatgaaagcaatgcttccaa

SEQ ID NO: 2064 - DNA, 33 bp, Homo sapien
tcagaacaccaagaattaaagcaatgcttccaa

SEQ ID NO: 2065 - DNA, 33 bp, Homo sapien
catgtgatgtactttggatgggcgttttcttgt

SEQ ID NO: 2066 - DNA, 33 bp, Homo sapien
catgtgatgtactttgtatgggcgttttcttgt

SEQ ID NO: 2067 - DNA, 33 bp, Homo sapien
ccagaagaatagcttcaaacatgcacatggagc

SEQ ID NO: 2068 - DNA, 33 bp, Homo sapien
ccagaagaatagcttcgaacatgcacatggagc

SEQ ID NO: 2069 - DNA, 33 bp, Homo sapien
tccggatgccctaggacggatgtttgtggccca

SEQ ID NO: 2070 - DNA, 33 bp, Homo sapien
tccggatgccctaggatggatgtttgtggccca

SEQ ID NO: 2071 - DNA, 33 bp, Homo sapien
tgtgtgacagtgacagcatttcgctctgtcatc

SEQ ID NO: 2072 - DNA, 33 bp, Homo sapien
tgtgtgacagtgacaggatttcgctctgtcatc

SEQ ID NO: 2073 - DNA, 33 bp, Homo sapien
agaccctatctcaaaacaagcatgagcaaaact

SEQ ID NO: 2074 - DNA, 33 bp, Homo sapien
agaccctatctcaaaagaagcatgagcaaaact

SEQ ID NO: 2075 - DNA, 33 bp, Homo sapien
ttataaatgtagcagaaatccatttgtagaaat

SEQ ID NO: 2076 - DNA, 33 bp, Homo sapien
ttataaatgtagcagatatccatttgtagaaat

SEQ ID NO: 2077 - DNA, 33 bp, Homo sapien
aatgtgcttaatgccaccatgctgcacacttat

SEQ ID NO: 2078 - DNA, 33 bp, Homo sapien
aatgtgcttaatgccatcatgctgcacacttat

SEQ ID NO: 2079 - DNA, 33 bp, Homo sapien
catgcatgtcacataaacttctattaaagaaat

SEQ ID NO: 2080 - DNA, 33 bp, Homo sapien
catgcatgtcacataagcttctattaaagaaat

SEQ ID NO: 2081 - DNA, 33 bp, Homo sapien
aggatgagaactgatacatttttcctctctgga

SEQ ID NO: 2082 - DNA, 33 bp, Homo sapien
aggatgagaactgatagatttttcctctctgga

SEQ ID NO: 2083 - DNA, 33 bp, Homo sapien
atttttcctctctggacgtgggtagaaatgata

SEQ ID NO: 2084 - DNA, 33 bp, Homo sapien
atttttcctctctggatgtgggtagaaatgata

SEQ ID NO: 2085 - DNA, 33 bp, Homo sapien
ctaagcactaggcacaaaacattgactgtgaca

SEQ ID NO: 2086 - DNA, 33 bp, Homo sapien
ctaagcactaggcacacaacattgactgtgaca

SEQ ID NO: 2087 - DNA, 33 bp, Homo sapien
aattaaagtttcttgaagaatgagtgtgtaaca

SEQ ID NO: 2088 - DNA, 33 bp, Homo sapien
aattaaagtttcttgacgaatgagtgtgtaaca

SEQ ID NO: 2089 - DNA, 33 bp, Homo sapien
tggaagagatactgcacggtctgctgaacgaat

SEQ ID NO: 2090 - DNA, 33 bp, Homo sapien
tggaagagatactgcatggtctgctgaacgaat

SEQ ID NO: 2091 - DNA, 33 bp, Homo sapien
gagctctttccaggtagaagcatgaagcccagg

SEQ ID NO: 2092 - DNA, 33 bp, Homo sapien
gagctctttccaggtataagcatgaagcccagg

SEQ ID NO: 2093 - DNA, 33 bp, Homo sapien
agaatctgatcgtatgcattctgtgagaatctt

SEQ ID NO: 2094 - DNA, 33 bp, Homo sapien
agaatctgatcgtatgtattctgtgagaatctt

SEQ ID NO: 2095 - DNA, 33 bp, Homo sapien
gagtatccttgaggtcagaaaccactggtcagg

SEQ ID NO: 2096 - DNA, 33 bp, Homo sapien
gagtatccttgaggtcggaaaccactggtcagg

SEQ ID NO: 2097 - DNA, 33 bp, Homo sapien
gccatccacacaaaggaagctgagagatcatgg

SEQ ID NO: 2098 - DNA, 33 bp, Homo sapien
gccatccacacaaagggagctgagagatcatgg

SEQ ID NO: 2099 - DNA, 33 bp, Homo sapien
ctattccagcctttccaaaaatatatttcctgt

SEQ ID NO: 2100 - DNA, 33 bp, Homo sapien
ctattccagcctttccgaaaatatatttcctgt

SEQ ID NO: 2101 - DNA, 33 bp, Homo sapien
aaagagtgacagaagacgacttctctcatatct

SEQ ID NO: 2102 - DNA, 33 bp, Homo sapien
aaagagtgacagaagatgacttctctcatatct

SEQ ID NO: 2103 - DNA, 33 bp, Homo sapien
ccaacctaatacctagcagcacaaatctgatct

SEQ ID NO: 2104 - DNA, 33 bp, Homo sapien
ccaacctaatacctagtagcacaaatctgatct

SEQ ID NO: 2105 - DNA, 33 bp, Homo sapien
tgtgttgaaggaataactacttgttcattttgt

SEQ ID NO: 2106 - DNA, 33 bp, Homo sapien
tgtgttgaaggaataattacttgttcattttgt

SEQ ID NO: 2107 - DNA, 33 bp, Homo sapien
tgaaggaatgaatgaactgcaagtttaaatgtt

SEQ ID NO: 2108 - DNA, 33 bp, Homo sapien
tgaaggaatgaatgaattgcaagtttaaatgtt

SEQ ID NO: 2109 - DNA, 33 bp, Homo sapien
aggtttgtttggaaatcagtcccaaatttggga

SEQ ID NO: 2110 - DNA, 33 bp, Homo sapien
aggtttgtttggaaatgagtcccaaatttggga

SEQ ID NO: 2111 - DNA, 33 bp, Homo sapien
actcacaacccgcccaatctgggatttctgaag

SEQ ID NO: 2112 - DNA, 33 bp, Homo sapien
actcacaacccgcccagtctgggatttctgaag

SEQ ID NO: 2113 - DNA, 33 bp, Homo sapien
catcagtagttcaagccagaatctcaggcctgt

SEQ ID NO: 2114 - DNA, 33 bp, Homo sapien
catcagtagttcaagctagaatctcaggcctgt

SEQ ID NO: 2115 - DNA, 33 bp, Homo sapien
gagtaggatggcacggaattcataaatcaattt

SEQ ID NO: 2116 - DNA, 33 bp, Homo sapien
gagtaggatggcacggtattcataaatcaattt

SEQ ID NO: 2117 - DNA, 33 bp, Homo sapien
tcctgggggagtttcaaatgaaggcaactgaag

SEQ ID NO: 2118 - DNA, 33 bp, Homo sapien
tcctgggggagtttcacatgaaggcaactgaag

SEQ ID NO: 2119 - DNA, 33 bp, Homo sapien
catgaggggacaattacaggccattctggagct

SEQ ID NO: 2120 - DNA, 33 bp, Homo sapien
catgaggggacaattataggccattctggagct

SEQ ID NO: 2121 - DNA, 33 bp, Homo sapien
agactgaagtagaaatcagaatcagttacagaa

SEQ ID NO: 2122 - DNA, 33 bp, Homo sapien
agactgaagtagaaattagaatcagttacagaa

SEQ ID NO: 2123 - DNA, 33 bp, Homo sapien
gctccagagcaggggccgagccttactcctcat

SEQ ID NO: 2124 - DNA, 33 bp, Homo sapien
gctccagagcaggggctgagccttactcctcat

SEQ ID NO: 2125 - DNA, 33 bp, Homo sapien
ttgcatccaaattcaaaagcatccccctctcct

SEQ ID NO: 2126 - DNA, 33 bp, Homo sapien
ttgcatccaaattcaagagcatccccctctcct

SEQ ID NO: 2127 - DNA, 33 bp, Homo sapien
tataaaaagtgttgcaaaattggttgtgctgat

SEQ ID NO: 2128 - DNA, 33 bp, Homo sapien
tataaaaagtgttgcagaattggttgtgctgat

SEQ ID NO: 2129 - DNA, 33 bp, Homo sapien
gaaagataggtctagtcaagatggcttatccct

SEQ ID NO: 2130 - DNA, 33 bp, Homo sapien
gaaagataggtctagttaagatggcttatccct

SEQ ID NO: 2131 - DNA, 33 bp, Homo sapien
ttaaaattggcaaagaatctaacagacatttcc

SEQ ID NO: 2132 - DNA, 33 bp, Homo sapien
ttaaaattggcaaagattctaacagacatttcc

SEQ ID NO: 2133 - DNA, 33 bp, Homo sapien
ccttgcacctggtacacagtagcccgagtggtg

SEQ ID NO: 2134 - DNA, 33 bp, Homo sapien
ccttgcacctggtacatagtagcccgagtggtg

SEQ ID NO: 2135 - DNA, 33 bp, Homo sapien
ataaaacagagcctccaagaagtgcatgaagcg

SEQ ID NO: 2136 - DNA, 33 bp, Homo sapien
ataaaacagagcctccgagaagtgcatgaagcg

SEQ ID NO: 2137 - DNA, 33 bp, Homo sapien
gtgaagtgaccttacaagagcaacgtaacccgg

SEQ ID NO: 2138 - DNA, 33 bp, Homo sapien
gtgaagtgaccttacacgagcaacgtaacccgg

SEQ ID NO: 2139 - DNA, 33 bp, Homo sapien
cacccaggacactgaacctacccagatcctcaa

SEQ ID NO: 2140 - DNA, 33 bp, Homo sapien
cacccaggacactgaatctacccagatcctcaa

SEQ ID NO: 2141 - DNA, 33 bp, Homo sapien
cttgttggatcagcccaagccatgctaaatcag

SEQ ID NO: 2142 - DNA, 33 bp, Homo sapien
cttgttggatcagcccgagccatgctaaatcag

SEQ ID NO: 2143 - DNA, 33 bp, Homo sapien
taactatggtctacacccattgctgaggaatgt

SEQ ID NO: 2144 - DNA, 33 bp, Homo sapien
taactatggtctacactcattgctgaggaatgt

SEQ ID NO: 2145 - DNA, 33 bp, Homo sapien
acattttaatcgccccaaaaggaagccttgtac

SEQ ID NO: 2146 - DNA, 33 bp, Homo sapien
acattttaatcgccccgaaaggaagccttgtac

SEQ ID NO: 2147 - DNA, 33 bp, Homo sapien
ccagacatgtcaggcaaatagcaagcacagggt

SEQ ID NO: 2148 - DNA, 33 bp, Homo sapien
ccagacatgtcaggcagatagcaagcacagggt

SEQ ID NO: 2149 - DNA, 33 bp, Homo sapien
agcaagtcacagaggacacgagattgagcctag

SEQ ID NO: 2150 - DNA, 33 bp, Homo sapien
agcaagtcacagaggatacgagattgagcctag

SEQ ID NO: 2151 - DNA, 33 bp, Homo sapien
tggtgtatttacgtctcactgcagaaatatcag

SEQ ID NO: 2152 - DNA, 33 bp, Homo sapien
tggtgtatttacgtcttactgcagaaatatcag

SEQ ID NO: 2153 - DNA, 33 bp, Homo sapien
gtgtccccaaaagaaaccagcaggagtgcgtca

SEQ ID NO: 2154 - DNA, 33 bp, Homo sapien
gtgtccccaaaagaaagcagcaggagtgcgtca

SEQ ID NO: 2155 - DNA, 33 bp, Homo sapien
gattatgaaatggtgaaaagtgctctgaaaatg

SEQ ID NO: 2156 - DNA, 33 bp, Homo sapien
gattatgaaatggtgagaagtgctctgaaaatg

SEQ ID NO: 2157 - DNA, 33 bp, Homo sapien
atagatttgttatatccgaattgcattttgcag

SEQ ID NO: 2158 - DNA, 33 bp, Homo sapien
atagatttgttatatctgaattgcattttgcag

SEQ ID NO: 2159 - DNA, 33 bp, Homo sapien
cttaaaaccagacaccaaggagagattatcttt

SEQ ID NO: 2160 - DNA, 33 bp, Homo sapien
cttaaaaccagacacccaggagagattatcttt

SEQ ID NO: 2161 - DNA, 33 bp, Homo sapien
cttagaggctctgcacagaccaactcatcagca

SEQ ID NO: 2162 - DNA, 33 bp, Homo sapien
cttagaggctctgcacggaccaactcatcagca

SEQ ID NO: 2163 - DNA, 33 bp, Homo sapien
acgatttctcccatctcaaagaccctctctaga

SEQ ID NO: 2164 - DNA, 33 bp, Homo sapien
acgatttctcccatcttaaagaccctctctaga

SEQ ID NO: 2165 - DNA, 33 bp, Homo sapien
cccatcctaaccccccaaaatcactcatctctg

SEQ ID NO: 2166 - DNA, 33 bp, Homo sapien
cccatcctaaccccccgaaatcactcatctctg

SEQ ID NO: 2167 - DNA, 33 bp, Homo sapien
aacaagaaagaagtcacggaggcagtgaatgaa

SEQ ID NO: 2168 - DNA, 33 bp, Homo sapien
aacaagaaagaagtcatggaggcagtgaatgaa

SEQ ID NO: 2169 - DNA, 33 bp, Homo sapien
agaggtaggtggatagacaaaaatctctgcact

SEQ ID NO: 2170 - DNA, 33 bp, Homo sapien
agaggtaggtggataggcaaaaatctctgcact

SEQ ID NO: 2171 - DNA, 33 bp, Homo sapien
tggtcttgctgtttaacgcagtcttgcagtctc

SEQ ID NO: 2172 - DNA, 33 bp, Homo sapien
tggtcttgctgtttaatgcagtcttgcagtctc

SEQ ID NO: 2173 - DNA, 33 bp, Homo sapien
cacctcagatgttagcagaatggaaaaagcaca

SEQ ID NO: 2174 - DNA, 33 bp, Homo sapien
cacctcagatgttagcggaatggaaaaagcaca

SEQ ID NO: 2175 - DNA, 33 bp, Homo sapien
acgccacactccaacaatatattaaatggcgta

SEQ ID NO: 2176 - DNA, 33 bp, Homo sapien
acgccacactccaacagtatattaaatggcgta

SEQ ID NO: 2177 - DNA, 33 bp, Homo sapien
cacccatcagtgcttcccaagctcagaaagacc

SEQ ID NO: 2178 - DNA, 33 bp, Homo sapien
cacccatcagtgcttctcaagctcagaaagacc

SEQ ID NO: 2179 - DNA, 33 bp, Homo sapien
catcatgcacatcttcacctttttttgattctc

SEQ ID NO: 2180 - DNA, 33 bp, Homo sapien
catcatgcacatcttcgcctttttttgattctc

SEQ ID NO: 2181 - DNA, 33 bp, Homo sapien
cccttgctgcagttcaagtcacagtctgttgcg

SEQ ID NO: 2182 - DNA, 33 bp, Homo sapien
cccttgctgcagttcaggtcacagtctgttgcg

SEQ ID NO: 2183 - DNA, 33 bp, Homo sapien
caccaaatccaatgacaccattctcttatctca

SEQ ID NO: 2184 - DNA, 33 bp, Homo sapien
caccaaatccaatgacgccattctcttatctca

SEQ ID NO: 2185 - DNA, 33 bp, Homo sapien
atgcagaagaaagcccactttaggagtgaggtc

SEQ ID NO: 2186 - DNA, 33 bp, Homo sapien
atgcagaagaaagcccgctttaggagtgaggtc

SEQ ID NO: 2187 - DNA, 33 bp, Homo sapien
gagtcaactgcttacaaattagatgctgcttcc

SEQ ID NO: 2188 - DNA, 33 bp, Homo sapien
gagtcaactgcttacatattagatgctgcttcc

SEQ ID NO: 2189 - DNA, 33 bp, Homo sapien
caggagacagtccctccactggcaggctgcttt

SEQ ID NO: 2190 - DNA, 33 bp, Homo sapien
caggagacagtccctctactggcaggctgcttt

SEQ ID NO: 2191 - DNA, 33 bp, Homo sapien
atgctgcacagcaaccactgcttggcgctgaga

SEQ ID NO: 2192 - DNA, 33 bp, Homo sapien
atgctgcacagcaaccgctgcttggcgctgaga

SEQ ID NO: 2193 - DNA, 33 bp, Homo sapien
aagtggcagtggttaaaactgtaaggatccaag

SEQ ID NO: 2194 - DNA, 33 bp, Homo sapien
aagtggcagtggttaagactgtaaggatccaag

SEQ ID NO: 2195 - DNA, 33 bp, Homo sapien
aatgacttctaaccaacatgtttacggtgaaag

SEQ ID NO: 2196 - DNA, 33 bp, Homo sapien
aatgacttctaaccaatatgtttacggtgaaag

SEQ ID NO: 2197 - DNA, 33 bp, Homo sapien
gacatcacaggaacccacaaacacatatgcctc

SEQ ID NO: 2198 - DNA, 33 bp, Homo sapien
gacatcacaggaacccgcaaacacatatgcctc

SEQ ID NO: 2199 - DNA, 33 bp, Homo sapien
ctcttttccctactaaatccctgtgtgtttccc

SEQ ID NO: 2200 - DNA, 33 bp, Homo sapien
ctcttttccctactaagtccctgtgtgtttccc

SEQ ID NO: 2201 - DNA, 33 bp, Homo sapien
ttgtgaagttctcttccaaaggatgtcacctca

SEQ ID NO: 2202 - DNA, 33 bp, Homo sapien
ttgtgaagttctcttctaaaggatgtcacctca

SEQ ID NO: 2203 - DNA, 33 bp, Homo sapien
caaccatctagctccacacattttcatcacccc

SEQ ID NO: 2204 - DNA, 33 bp, Homo sapien
caaccatctagctccagacattttcatcacccc

SEQ ID NO: 2205 - DNA, 33 bp, Homo sapien
cggtattagaacctcactcctttctatggctga

SEQ ID NO: 2206 - DNA, 33 bp, Homo sapien
cggtattagaacctcattcctttctatggctga

SEQ ID NO: 2207 - DNA, 33 bp, Homo sapien
gggcttcctactgctacggcccgccgaagggga

SEQ ID NO: 2208 - DNA, 33 bp, Homo sapien
gggcttcctactgctatggcccgccgaagggga

SEQ ID NO: 2209 - DNA, 33 bp, Homo sapien
cattacttccacctccaaaaggatctgctaaca

SEQ ID NO: 2210 - DNA, 33 bp, Homo sapien
cattacttccacctccgaaaggatctgctaaca

SEQ ID NO: 2211 - DNA, 33 bp, Homo sapien
actggggggctaactcaaattcagagggcagtg

SEQ ID NO: 2212 - DNA, 33 bp, Homo sapien
actggggggctaactccaattcagagggcagtg

SEQ ID NO: 2213 - DNA, 33 bp, Homo sapien
gaaagaggctggaaaaggctgttgattatctaa

SEQ ID NO: 2214 - DNA, 33 bp, Homo sapien
gaaagaggctggaaaatgctgttgattatctaa

SEQ ID NO: 2215 - DNA, 33 bp, Homo sapien
aagcctcagttgacagcctgattggaaggggag

SEQ ID NO: 2216 - DNA, 33 bp, Homo sapien
aagcctcagttgacagtctgattggaaggggag

SEQ ID NO: 2217 - DNA, 33 bp, Homo sapien
cacctggggtttcataagagaattaagccgtac

SEQ ID NO: 2218 - DNA, 33 bp, Homo sapien
cacctggggtttcatacgagaattaagccgtac

SEQ ID NO: 2219 - DNA, 33 bp, Homo sapien
gatttgttcacatacgaccagcaggaacgtcca

SEQ ID NO: 2220 - DNA, 33 bp, Homo sapien
gatttgttcacatacggccagcaggaacgtcca

SEQ ID NO: 2221 - DNA, 33 bp, Homo sapien
caacagcttagatgtaccacattgtcttattca

SEQ ID NO: 2222 - DNA, 33 bp, Homo sapien
caacagcttagatgtatcacattgtcttattca

SEQ ID NO: 2223 - DNA, 33 bp, Homo sapien
ggacaaagaaggagcaatctctgaggaaggagc

SEQ ID NO: 2224 - DNA, 33 bp, Homo sapien
ggacaaagaaggagcagtctctgaggaaggagc

SEQ ID NO: 2225 - DNA, 33 bp, Homo sapien
catccccgaaggttcacagaacagtcatgctac

SEQ ID NO: 2226 - DNA, 33 bp, Homo sapien
catccccgaaggttcatagaacagtcatgctac

SEQ ID NO: 2227 - DNA, 33 bp, Homo sapien
tcctgaagaaataacacaaaccgacggggacaa

SEQ ID NO: 2228 - DNA, 33 bp, Homo sapien
tcctgaagaaataacataaaccgacggggacaa

SEQ ID NO: 2229 - DNA, 33 bp, Homo sapien
aaccatatcagccctcaatggagatttgctgca

SEQ ID NO: 2230 - DNA, 33 bp, Homo sapien
aaccatatcagccctcgatggagatttgctgca

SEQ ID NO: 2231 - DNA, 33 bp, Homo sapien
agccctgcaaagattacagggaaggacagccct

SEQ ID NO: 2232 - DNA, 33 bp, Homo sapien
agccctgcaaagattagagggaaggacagccct

SEQ ID NO: 2233 - DNA, 33 bp, Homo sapien
ggcagtatagtaaagcaatgacaatgtgaattg

SEQ ID NO: 2234 - DNA, 33 bp, Homo sapien
ggcagtatagtaaagcgatgacaatgtgaattg

SEQ ID NO: 2235 - DNA, 33 bp, Homo sapien
ctctgggcatagaaagcattttggaaccaaagc

SEQ ID NO: 2236 - DNA, 33 bp, Homo sapien
ctctgggcatagaaagtattttggaaccaaagc

SEQ ID NO: 2237 - DNA, 33 bp, Homo sapien
cccttactttctggtcaaaatttttccaggctc

SEQ ID NO: 2238 - DNA, 33 bp, Homo sapien
cccttactttctggtccaaatttttccaggctc

SEQ ID NO: 2239 - DNA, 33 bp, Homo sapien
gactaatcctatcaagaagacagtaattggcat

SEQ ID NO: 2240 - DNA, 33 bp, Homo sapien
gactaatcctatcaaggagacagtaattggcat

SEQ ID NO: 2241 - DNA, 33 bp, Homo sapien
tctgaattggatcctacaacagactattgtttt

SEQ ID NO: 2242 - DNA, 33 bp, Homo sapien
tctgaattggatcctagaacagactattgtttt

SEQ ID NO: 2243 - DNA, 33 bp, Homo sapien
catgaaagacaaagacggaagaattgattgatg

SEQ ID NO: 2244 - DNA, 33 bp, Homo sapien
catgaaagacaaagactgaagaattgattgatg

SEQ ID NO: 2245 - DNA, 33 bp, Homo sapien
ggattgttgactttgaccattggttaggatggt

SEQ ID NO: 2246 - DNA, 33 bp, Homo sapien
ggattgttgactttgatcattggttaggatggt

SEQ ID NO: 2247 - DNA, 33 bp, Homo sapien
cggttgctgctgaagacgatggagaaagaactg

SEQ ID NO: 2248 - DNA, 33 bp, Homo sapien
cggttgctgctgaagatgatggagaaagaactg

SEQ ID NO: 2249 - DNA, 33 bp, Homo sapien
agcgctcaaagaatgacgggtgcaaagaaccac

SEQ ID NO: 2250 - DNA, 33 bp, Homo sapien
agcgctcaaagaatgatgggtgcaaagaaccac

SEQ ID NO: 2251 - DNA, 33 bp, Homo sapien
tacttctttttattgccgagtgatgtaccatag

SEQ ID NO: 2252 - DNA, 33 bp, Homo sapien
tacttctttttattgctgagtgatgtaccatag

SEQ ID NO: 2253 - DNA, 33 bp, Homo sapien
agacgtcgagcatggacagtttaggaataaatt

SEQ ID NO: 2254 - DNA, 33 bp, Homo sapien
agacgtcgagcatggagagtttaggaataaatt

SEQ ID NO: 2255 - DNA, 33 bp, Homo sapien
cacactatggaaacccaaaagccggagcaatgg

SEQ ID NO: 2256 - DNA, 33 bp, Homo sapien
cacactatggaaaccccaaagccggagcaatgg

SEQ ID NO: 2257 - DNA, 33 bp, Homo sapien
ggcctgacccaagctccctccatgaagaccaat

SEQ ID NO: 2258 - DNA, 33 bp, Homo sapien
ggcctgacccaagctctctccatgaagaccaat

SEQ ID NO: 2259 - DNA, 33 bp, Homo sapien
ccacacctgctgagcacgaagtgagagtcagga

SEQ ID NO: 2260 - DNA, 33 bp, Homo sapien
ccacacctgctgagcatgaagtgagagtcagga

SEQ ID NO: 2261 - DNA, 33 bp, Homo sapien
ggctcaggccctcaaacgatggcaaagaggaat

SEQ ID NO: 2262 - DNA, 33 bp, Homo sapien
ggctcaggccctcaaatgatggcaaagaggaat

SEQ ID NO: 2263 - DNA, 33 bp, Homo sapien
taagtgttcttatacacgtctttttgggcacat

SEQ ID NO: 2264 - DNA, 33 bp, Homo sapien
taagtgttcttatacatgtctttttgggcacat

SEQ ID NO: 2265 - DNA, 33 bp, Homo sapien
gttgagaatcagccaacgtgacttgaagcaaca

SEQ ID NO: 2266 - DNA, 33 bp, Homo sapien
gttgagaatcagccaatgtgacttgaagcaaca

SEQ ID NO: 2267 - DNA, 33 bp, Homo sapien
gttctcttcacatctgaaaatgacagtcagacg

SEQ ID NO: 2268 - DNA, 33 bp, Homo sapien
gttctcttcacatctgcaaatgacagtcagacg

SEQ ID NO: 2269 - DNA, 33 bp, Homo sapien
atggcagtggtggtaacgaggttatgttttgag

SEQ ID NO: 2270 - DNA, 33 bp, Homo sapien
atggcagtggtggtaatgaggttatgttttgag

SEQ ID NO: 2271 - DNA, 33 bp, Homo sapien
ttttagtaaaaaatcacgtgtctcacgaacaga

SEQ ID NO: 2272 - DNA, 33 bp, Homo sapien
ttttagtaaaaaatcatgtgtctcacgaacaga

SEQ ID NO: 2273 - DNA, 33 bp, Homo sapien
agcagaacgaggcacaaaaattcagatgatgaa

SEQ ID NO: 2274 - DNA, 33 bp, Homo sapien
agcagaacgaggcacagaaattcagatgatgaa

SEQ ID NO: 2275 - DNA, 33 bp, Homo sapien
agttttaacttgttagcataccagcagaacgag

SEQ ID NO: 2276 - DNA, 33 bp, Homo sapien
agttttaacttgttagtataccagcagaacgag

SEQ ID NO: 2277 - DNA, 33 bp, Homo sapien
atgaaatgaggatgacaatagtatctacctgat

SEQ ID NO: 2278 - DNA, 33 bp, Homo sapien
atgaaatgaggatgacgatagtatctacctgat

SEQ ID NO: 2279 - DNA, 33 bp, Homo sapien
tataggactcaacagcccttggatcaaattgca

SEQ ID NO: 2280 - DNA, 33 bp, Homo sapien
tataggactcaacagctcttggatcaaattgca

SEQ ID NO: 2281 - DNA, 33 bp, Homo sapien
ttttcaaaagaatgaaagattttgaatgaatgg

SEQ ID NO: 2282 - DNA, 33 bp, Homo sapien
ttttcaaaagaatgaatgattttgaatgaatgg

SEQ ID NO: 2283 - DNA, 33 bp, Homo sapien
tccatcataaactgtacgtaaattgtggcagca

SEQ ID NO: 2284 - DNA, 33 bp, Homo sapien
tccatcataaactgtaggtaaattgtggcagca

SEQ ID NO: 2285 - DNA, 33 bp, Homo sapien
ttagacctaattgtcaacataatgccatattaa

SEQ ID NO: 2286 - DNA, 33 bp, Homo sapien
ttagacctaattgtcatcataatgccatattaa

SEQ ID NO: 2287 - DNA, 33 bp, Homo sapien
tctcttgccaatctaccggatctgcataagcaa

SEQ ID NO: 2288 - DNA, 33 bp, Homo sapien
tctcttgccaatctactggatctgcataagcaa

SEQ ID NO: 2289 - DNA, 33 bp, Homo sapien
tcaataaatggatgcagggaagaattaaattat

SEQ ID NO: 2290 - DNA, 33 bp, Homo sapien
tcaataaatggatgcatggaagaattaaattat

SEQ ID NO: 2291 - DNA, 33 bp, Homo sapien
gatgagagttttcttcccggcttgtaggtggcg

SEQ ID NO: 2292 - DNA, 33 bp, Homo sapien
gatgagagttttcttctcggcttgtaggtggcg

SEQ ID NO: 2293 - DNA, 33 bp, Homo sapien
gtcattagtccatggagaaccttttgaaataat

SEQ ID NO: 2294 - DNA, 33 bp, Homo sapien
gtcattagtccatggataaccttttgaaataat

SEQ ID NO: 2295 - DNA, 33 bp, Homo sapien
tgtggtgctgaagccacgctctttaagaaggaa

SEQ ID NO: 2296 - DNA, 33 bp, Homo sapien
tgtggtgctgaagccatgctctttaagaaggaa

SEQ ID NO: 2297 - DNA, 33 bp, Homo sapien
agacatagagtatagcccagcttcataaacata

SEQ ID NO: 2298 - DNA, 33 bp, Homo sapien
agacatagagtatagctcagcttcataaacata

SEQ ID NO: 2299 - DNA, 33 bp, Homo sapien
catgattaattacttacgtacatttgtggtggg

SEQ ID NO: 2300 - DNA, 33 bp, Homo sapien
catgattaattacttatgtacatttgtggtggg

SEQ ID NO: 2301 - DNA, 33 bp, Homo sapien
cccaaatagtttgtcacgggcctcctgctgtca

SEQ ID NO: 2302 - DNA, 33 bp, Homo sapien
cccaaatagtttgtcatgggcctcctgctgtca

SEQ ID NO: 2303 - DNA, 33 bp, Homo sapien
gtctgttgtctattcacgggactgtattgtctt

SEQ ID NO: 2304 - DNA, 33 bp, Homo sapien
gtctgttgtctattcatgggactgtattgtctt

SEQ ID NO: 2305 - DNA, 33 bp, Homo sapien
ggtgattatgagcttccctgtcgaggttgggct

SEQ ID NO: 2306 - DNA, 33 bp, Homo sapien
ggtgattatgagcttctctgtcgaggttgggct

SEQ ID NO: 2307 - DNA, 33 bp, Homo sapien
ctaggaaaaggcgacccgaaggcctcagacacc

SEQ ID NO: 2308 - DNA, 33 bp, Homo sapien
ctaggaaaaggcgaccggaaggcctcagacacc

SEQ ID NO: 2309 - DNA, 33 bp, Homo sapien
aaccatttagcagggaaaggactggaatcctgc

SEQ ID NO: 2310 - DNA, 33 bp, Homo sapien
aaccatttagcagggagaggactggaatcctgc

SEQ ID NO: 2311 - DNA, 33 bp, Homo sapien
gagcctcaattcccacacaggaaaccatttagc

SEQ ID NO: 2312 - DNA, 33 bp, Homo sapien
gagcctcaattcccacgcaggaaaccatttagc

SEQ ID NO: 2313 - DNA, 33 bp, Homo sapien
cctttctttagcttaactcccaaatgcaactgc

SEQ ID NO: 2314 - DNA, 33 bp, Homo sapien
cctttctttagcttaattcccaaatgcaactgc

SEQ ID NO: 2315 - DNA, 33 bp, Homo sapien
agatccagagacaatcagaaagaggagaatctg

SEQ ID NO: 2316 - DNA, 33 bp, Homo sapien
agatccagagacaatcggaaagaggagaatctg

SEQ ID NO: 2317 - DNA, 33 bp, Homo sapien
tgctatgggcttaagacggcaaatccgagctgt

SEQ ID NO: 2318 - DNA, 33 bp, Homo sapien
tgctatgggcttaagatggcaaatccgagctgt

SEQ ID NO: 2319 - DNA, 33 bp, Homo sapien
ccatcctggacctggcactttcccgatggtttc

SEQ ID NO: 2320 - DNA, 33 bp, Homo sapien
ccatcctggacctggcgctttcccgatggtttc

SEQ ID NO: 2321 - DNA, 33 bp, Homo sapien
aacagagggacaggcccacggtgcctcctcctt

SEQ ID NO: 2322 - DNA, 33 bp, Homo sapien
aacagagggacaggcctacggtgcctcctcctt

SEQ ID NO: 2323 - DNA, 33 bp, Homo sapien
ggcagagatgaggaaaagctggctccccactga

SEQ ID NO: 2324 - DNA, 33 bp, Homo sapien
ggcagagatgaggaaaggctggctccccactga

SEQ ID NO: 2325 - DNA, 33 bp, Homo sapien
cctcaccccattcgacagcaccttttcttgaag

SEQ ID NO: 2326 - DNA, 33 bp, Homo sapien
cctcaccccattcgacggcaccttttcttgaag

SEQ ID NO: 2327 - DNA, 33 bp, Homo sapien
ctcttttgtagcaggaaatgttctggagcattg

SEQ ID NO: 2328 - DNA, 33 bp, Homo sapien
ctcttttgtagcaggagatgttctggagcattg

SEQ ID NO: 2329 - DNA, 33 bp, Homo sapien
aaggaaactcggtttacgttacttgctaaacag

SEQ ID NO: 2330 - DNA, 33 bp, Homo sapien
aaggaaactcggtttatgttacttgctaaacag

SEQ ID NO: 2331 - DNA, 33 bp, Homo sapien
gtgtggctggtgatgaaggactgagagtcatcc

SEQ ID NO: 2332 - DNA, 33 bp, Homo sapien
gtgtggctggtgatgagggactgagagtcatcc

SEQ ID NO: 2333 - DNA, 33 bp, Homo sapien
ttttattgttgaataccgaaatctcattacttt

SEQ ID NO: 2334 - DNA, 33 bp, Homo sapien
ttttattgttgaatactgaaatctcattacttt

SEQ ID NO: 2335 - DNA, 33 bp, Homo sapien
gagccgacttgactggacaaataaaaatatcca

SEQ ID NO: 2336 - DNA, 33 bp, Homo sapien
gagccgacttgactgggcaaataaaaatatcca

SEQ ID NO: 2337 - DNA, 33 bp, Homo sapien
tcctctccggcctccaaactctcccctctagtc

SEQ ID NO: 2338 - DNA, 33 bp, Homo sapien
tcctctccggcctccacactctcccctctagtc

SEQ ID NO: 2339 - DNA, 33 bp, Homo sapien
gcttctattttctaccacacaaaacgctttcta

SEQ ID NO: 2340 - DNA, 33 bp, Homo sapien
gcttctattttctaccgcacaaaacgctttcta

SEQ ID NO: 2341 - DNA, 33 bp, Homo sapien
cgtgattgggcatctcacgttattacgtagcct

SEQ ID NO: 2342 - DNA, 33 bp, Homo sapien
cgtgattgggcatctcgcgttattacgtagcct

SEQ ID NO: 2343 - DNA, 33 bp, Homo sapien
aatgaagattccatgcactgagaacaatgaaat

SEQ ID NO: 2344 - DNA, 33 bp, Homo sapien
aatgaagattccatgcgctgagaacaatgaaat

SEQ ID NO: 2345 - DNA, 33 bp, Homo sapien
gaatataatgatgaacaaaaccagaccatctcc

SEQ ID NO: 2346 - DNA, 33 bp, Homo sapien
gaatataatgatgaacgaaaccagaccatctcc

SEQ ID NO: 2347 - DNA, 33 bp, Homo sapien
cacatcgactcatatcaatcatcacacacagta

SEQ ID NO: 2348 - DNA, 33 bp, Homo sapien
cacatcgactcatatcgatcatcacacacagta

SEQ ID NO: 2349 - DNA, 33 bp, Homo sapien
atttccagaacaaataaagctgcttagacattt

SEQ ID NO: 2350 - DNA, 33 bp, Homo sapien
atttccagaacaaatacagctgcttagacattt

SEQ ID NO: 2351 - DNA, 33 bp, Homo sapien
caccatccattaaagccctgtgtcatttcactt

SEQ ID NO: 2352 - DNA, 33 bp, Homo sapien
caccatccattaaagctctgtgtcatttcactt

SEQ ID NO: 2353 - DNA, 33 bp, Homo sapien
ttcagatgacacctgacatgggccagaggacca

SEQ ID NO: 2354 - DNA, 33 bp, Homo sapien
ttcagatgacacctgagatgggccagaggacca

SEQ ID NO: 2355 - DNA, 33 bp, Homo sapien
ctttgtgctcagcaagcacttggcacagaacag

SEQ ID NO: 2356 - DNA, 33 bp, Homo sapien
ctttgtgctcagcaaggacttggcacagaacag

SEQ ID NO: 2357 - DNA, 33 bp, Homo sapien
gatgaactagatgatcaccattgtcctctcggc

SEQ ID NO: 2358 - DNA, 33 bp, Homo sapien
gatgaactagatgatctccattgtcctctcggc

SEQ ID NO: 2359 - DNA, 33 bp, Homo sapien
agatgacggaagtccaacctgcatgccctgagt

SEQ ID NO: 2360 - DNA, 33 bp, Homo sapien
agatgacggaagtccagcctgcatgccctgagt

SEQ ID NO: 2361 - DNA, 33 bp, Homo sapien
agagagagctgcacggcccgaagctcagagcat

SEQ ID NO: 2362 - DNA, 33 bp, Homo sapien
agagagagctgcacggtccgaagctcagagcat

SEQ ID NO: 2363 - DNA, 33 bp, Homo sapien
agttctggagaacaagacataaacctgggaaga

SEQ ID NO: 2364 - DNA, 33 bp, Homo sapien
agttctggagaacaaggcataaacctgggaaga

SEQ ID NO: 2365 - DNA, 33 bp, Homo sapien
ggcttaaaagagaatacggatgctcctggcacc

SEQ ID NO: 2366 - DNA, 33 bp, Homo sapien
ggcttaaaagagaatatggatgctcctggcacc

SEQ ID NO: 2367 - DNA, 33 bp, Homo sapien
cagaacctatgcacgaagaaaggcaggtgctgg

SEQ ID NO: 2368 - DNA, 33 bp, Homo sapien
cagaacctatgcacgacgaaaggcaggtgctgg

SEQ ID NO: 2369 - DNA, 33 bp, Homo sapien
atttcctgtgatgagaactactgtcattcatta

SEQ ID NO: 2370 - DNA, 33 bp, Homo sapien
atttcctgtgatgagacctactgtcattcatta

SEQ ID NO: 2371 - DNA, 33 bp, Homo sapien
tcttcctaagcgatgaacatctcaatttgctgc

SEQ ID NO: 2372 - DNA, 33 bp, Homo sapien
tcttcctaagcgatgagcatctcaatttgctgc

SEQ ID NO: 2373 - DNA, 33 bp, Homo sapien
ctggaagccgattcaaaaacctcgtttgaactt

SEQ ID NO: 2374 - DNA, 33 bp, Homo sapien
ctggaagccgattcaagaacctcgtttgaactt

SEQ ID NO: 2375 - DNA, 33 bp, Homo sapien
gtctggcttagtgcccaaacttccaccaggcac

SEQ ID NO: 2376 - DNA, 33 bp, Homo sapien
gtctggcttagtgcccgaacttccaccaggcac

SEQ ID NO: 2377 - DNA, 33 bp, Homo sapien
aaatcactctttctgcaatagtggacacaggag

SEQ ID NO: 2378 - DNA, 33 bp, Homo sapien
aaatcactctttctgccatagtggacacaggag

SEQ ID NO: 2379 - DNA, 33 bp, Homo sapien
gtcactgcggctgttcaaattcaaatttaaatg

SEQ ID NO: 2380 - DNA, 33 bp, Homo sapien
gtcactgcggctgttcgaattcaaatttaaatg

SEQ ID NO: 2381 - DNA, 33 bp, Homo sapien
acccttcccgagcaccagagacagaagaagaat

SEQ ID NO: 2382 - DNA, 33 bp, Homo sapien
acccttcccgagcaccggagacagaagaagaat

SEQ ID NO: 2383 - DNA, 33 bp, Homo sapien
gagcctgttttccacacgtgccttgtaactaac

SEQ ID NO: 2384 - DNA, 33 bp, Homo sapien
gagcctgttttccacatgtgccttgtaactaac

SEQ ID NO: 2385 - DNA, 33 bp, Homo sapien
tgttcaaggcagcaaacccctggaccttgatgg

SEQ ID NO: 2386 - DNA, 33 bp, Homo sapien
tgttcaaggcagcaaatccctggaccttgatgg

SEQ ID NO: 2387 - DNA, 33 bp, Homo sapien
ggctgggcagagccgacggatagagggccctgt

SEQ ID NO: 2388 - DNA, 33 bp, Homo sapien
ggctgggcagagccgatggatagagggccctgt

SEQ ID NO: 2389 - DNA, 33 bp, Homo sapien
ggcagagccagggaaactgatgacagggtgagg

SEQ ID NO: 2390 - DNA, 33 bp, Homo sapien
ggcagagccagggaaattgatgacagggtgagg

SEQ ID NO: 2391 - DNA, 33 bp, Homo sapien
ttggacctcggcagggaacactgagccagcccg

SEQ ID NO: 2392 - DNA, 33 bp, Homo sapien
ttggacctcggcaggggacactgagccagcccg

SEQ ID NO: 2393 - DNA, 33 bp, Homo sapien
catcctgtcaccagtaacaataacaacagtcat

SEQ ID NO: 2394 - DNA, 33 bp, Homo sapien
catcctgtcaccagtagcaataacaacagtcat

SEQ ID NO: 2395 - DNA, 33 bp, Homo sapien
ggtcttcagaggtcacagtaaggttttggacat

SEQ ID NO: 2396 - DNA, 33 bp, Homo sapien
ggtcttcagaggtcacggtaaggttttggacat

SEQ ID NO: 2397 - DNA, 33 bp, Homo sapien
tttctctcactttctgaaaaaggccaaaactaa

SEQ ID NO: 2398 - DNA, 33 bp, Homo sapien
tttctctcactttctggaaaaggccaaaactaa

SEQ ID NO: 2399 - DNA, 33 bp, Homo sapien
tgcttgtaattatttaacgctctgcctttttcc

SEQ ID NO: 2400 - DNA, 33 bp, Homo sapien
tgcttgtaattatttagcgctctgcctttttcc

SEQ ID NO: 2401 - DNA, 33 bp, Homo sapien
acaacttctcagtgaacaggataaaaggaaggc

SEQ ID NO: 2402 - DNA, 33 bp, Homo sapien
acaacttctcagtgaagaggataaaaggaaggc

SEQ ID NO: 2403 - DNA, 33 bp, Homo sapien
ctcatgtgcacaccccagctgaggatcccagac

SEQ ID NO: 2404 - DNA, 33 bp, Homo sapien
ctcatgtgcacaccccggctgaggatcccagac

SEQ ID NO: 2405 - DNA, 33 bp, Homo sapien
gaacattaaactcatcacccaagataagcagaa

SEQ ID NO: 2406 - DNA, 33 bp, Homo sapien
gaacattaaactcatcgcccaagataagcagaa

SEQ ID NO: 2407 - DNA, 33 bp, Homo sapien
ctggggatcgctgaacaaaacagccattctggg

SEQ ID NO: 2408 - DNA, 33 bp, Homo sapien
ctggggatcgctgaacgaaacagccattctggg

SEQ ID NO: 2409 - DNA, 33 bp, Homo sapien
catgcttaaatgccacaaagatgccaagtgatt

SEQ ID NO: 2410 - DNA, 33 bp, Homo sapien
catgcttaaatgccacgaagatgccaagtgatt

SEQ ID NO: 2411 - DNA, 33 bp, Homo sapien
ggaacctcagaagaaactgagaaaacaaagaga

SEQ ID NO: 2412 - DNA, 33 bp, Homo sapien
ggaacctcagaagaaattgagaaaacaaagaga

SEQ ID NO: 2413 - DNA, 33 bp, Homo sapien
aatcttcagggtcagaaacacttagagcaacca

SEQ ID NO: 2414 - DNA, 33 bp, Homo sapien
aatcttcagggtcagagacacttagagcaacca

SEQ ID NO: 2415 - DNA, 33 bp, Homo sapien
ctctgcctcgaatcaacagacttaatatttaat

SEQ ID NO: 2416 - DNA, 33 bp, Homo sapien
ctctgcctcgaatcaatagacttaatatttaat

SEQ ID NO: 2417 - DNA, 33 bp, Homo sapien
gaagccagatggcccacgtcctgtcccccaagg

SEQ ID NO: 2418 - DNA, 33 bp, Homo sapien
gaagccagatggcccatgtcctgtcccccaagg

SEQ ID NO: 2419 - DNA, 33 bp, Homo sapien
ggccagcaattaggcccatacgtccaggttggt

SEQ ID NO: 2420 - DNA, 33 bp, Homo sapien
ggccagcaattaggcctatacgtccaggttggt

SEQ ID NO: 2421 - DNA, 33 bp, Homo sapien
cagcctagctctggagacaagggaacgatgctt

SEQ ID NO: 2422 - DNA, 33 bp, Homo sapien
cagcctagctctggaggcaagggaacgatgctt

SEQ ID NO: 2423 - DNA, 33 bp, Homo sapien
tgcaggtgtggaatgcactcaattcgtctgcct

SEQ ID NO: 2424 - DNA, 33 bp, Homo sapien
tgcaggtgtggaatgcgctcaattcgtctgcct

SEQ ID NO: 2425 - DNA, 33 bp, Homo sapien
cagaggtgagagaaagactcttgcctgtaaact

SEQ ID NO: 2426 - DNA, 33 bp, Homo sapien
cagaggtgagagaaagcctcttgcctgtaaact

SEQ ID NO: 2427 - DNA, 33 bp, Homo sapien
tagctccttcctactagcaggcaaggtccatga

SEQ ID NO: 2428 - DNA, 33 bp, Homo sapien
tagctccttcctactatcaggcaaggtccatga

SEQ ID NO: 2429 - DNA, 33 bp, Homo sapien
gaagggtttactcctgaacaagactcaagttct

SEQ ID NO: 2430 - DNA, 33 bp, Homo sapien
gaagggtttactcctggacaagactcaagttct

SEQ ID NO: 2431 - DNA, 33 bp, Homo sapien
ggcactctgagggttaagtagggtgctttgcca

SEQ ID NO: 2432 - DNA, 33 bp, Homo sapien
ggcactctgagggttacgtagggtgctttgcca

SEQ ID NO: 2433 - DNA, 33 bp, Homo sapien
gcgtcgagaggaagctaaataaacagcccgtgt

SEQ ID NO: 2434 - DNA, 33 bp, Homo sapien
gcgtcgagaggaagctgaataaacagcccgtgt

SEQ ID NO: 2435 - DNA, 33 bp, Homo sapien
attcagcaaagaataaacacaaaggcatcagct

SEQ ID NO: 2436 - DNA, 33 bp, Homo sapien
attcagcaaagaataaccacaaaggcatcagct

SEQ ID NO: 2437 - DNA, 33 bp, Homo sapien
agacagatcttcattaacaaattccctgtatct

SEQ ID NO: 2438 - DNA, 33 bp, Homo sapien
agacagatcttcattagcaaattccctgtatct

SEQ ID NO: 2439 - DNA, 33 bp, Homo sapien
ttcaactatagttttgaaaatgatgatctaggc

SEQ ID NO: 2440 - DNA, 33 bp, Homo sapien
ttcaactatagttttggaaatgatgatctaggc

SEQ ID NO: 2441 - DNA, 33 bp, Homo sapien
tctccatgtgagagaacggacactgttgcttag

SEQ ID NO: 2442 - DNA, 33 bp, Homo sapien
tctccatgtgagagaagggacactgttgcttag

SEQ ID NO: 2443 - DNA, 33 bp, Homo sapien
gaccacacttggagaacagggctcttttacacc

SEQ ID NO: 2444 - DNA, 33 bp, Homo sapien
gaccacacttggagaagagggctcttttacacc

SEQ ID NO: 2445 - DNA, 33 bp, Homo sapien
tcgaccctgaggacacggactctctcttcttcc

SEQ ID NO: 2446 - DNA, 33 bp, Homo sapien
tcgaccctgaggacactgactctctcttcttcc

SEQ ID NO: 2447 - DNA, 33 bp, Homo sapien
atggagggcacccaacaagttcccagccatgag

SEQ ID NO: 2448 - DNA, 33 bp, Homo sapien
atggagggcacccaacgagttcccagccatgag

SEQ ID NO: 2449 - DNA, 33 bp, Homo sapien
aaataagatagaaagaatacaccaatctgttat

SEQ ID NO: 2450 - DNA, 33 bp, Homo sapien
aaataagatagaaagagtacaccaatctgttat

SEQ ID NO: 2451 - DNA, 33 bp, Homo sapien
agaagattcaatctctcaacagaagaaaaacct

SEQ ID NO: 2452 - DNA, 33 bp, Homo sapien
agaagattcaatctcttaacagaagaaaaacct

SEQ ID NO: 2453 - DNA, 33 bp, Homo sapien
cgctttaatgttgaataagcctccacatggaac

SEQ ID NO: 2454 - DNA, 33 bp, Homo sapien
cgctttaatgttgaatgagcctccacatggaac

SEQ ID NO: 2455 - DNA, 33 bp, Homo sapien
aacattaaagcgttccggaaccatttcatttat

SEQ ID NO: 2456 - DNA, 33 bp, Homo sapien
aacattaaagcgttcctgaaccatttcatttat

SEQ ID NO: 2457 - DNA, 33 bp, Homo sapien
ggactctatcctcgacacaaaatagaacatttt

SEQ ID NO: 2458 - DNA, 33 bp, Homo sapien
ggactctatcctcgacgcaaaatagaacatttt

SEQ ID NO: 2459 - DNA, 33 bp, Homo sapien
ggttctgcgttgtcatcaccaattgatcacagc

SEQ ID NO: 2460 - DNA, 33 bp, Homo sapien
ggttctgcgttgtcattaccaattgatcacagc

SEQ ID NO: 2461 - DNA, 33 bp, Homo sapien
gatcattttttaggaactaaggctcatgggcga

SEQ ID NO: 2462 - DNA, 33 bp, Homo sapien
gatcattttttaggaattaaggctcatgggcga

SEQ ID NO: 2463 - DNA, 33 bp, Homo sapien
gtgctctcatgcaggaactccacggtttgggtt

SEQ ID NO: 2464 - DNA, 33 bp, Homo sapien
gtgctctcatgcaggatctccacggtttgggtt

SEQ ID NO: 2465 - DNA, 33 bp, Homo sapien
gaaaacaaaaggcgcactgaacatacaacccca

SEQ ID NO: 2466 - DNA, 33 bp, Homo sapien
gaaaacaaaaggcgcattgaacatacaacccca

SEQ ID NO: 2467 - DNA, 33 bp, Homo sapien
cccagcctggtaacaacgccgcttcgcacatca

SEQ ID NO: 2468 - DNA, 33 bp, Homo sapien
cccagcctggtaacaatgccgcttcgcacatca

SEQ ID NO: 2469 - DNA, 33 bp, Homo sapien
cacctgctggaatcgacgcttggccttcctttg

SEQ ID NO: 2470 - DNA, 33 bp, Homo sapien
cacctgctggaatcgatgcttggccttcctttg

SEQ ID NO: 2471 - DNA, 33 bp, Homo sapien
ctccttatgttgtgaacgttataaaatgaagac

SEQ ID NO: 2472 - DNA, 33 bp, Homo sapien
ctccttatgttgtgaaggttataaaatgaagac

SEQ ID NO: 2473 - DNA, 33 bp, Homo sapien
atctgaaatgccaggaaactctgccagccaggg

SEQ ID NO: 2474 - DNA, 33 bp, Homo sapien
atctgaaatgccaggagactctgccagccaggg

SEQ ID NO: 2475 - DNA, 33 bp, Homo sapien
gcccagaaaaggtgcacataatttgcttccaat

SEQ ID NO: 2476 - DNA, 33 bp, Homo sapien
gcccagaaaaggtgcatataatttgcttccaat

SEQ ID NO: 2477 - DNA, 33 bp, Homo sapien
gcagaaagatggacacaatttattttagttcct

SEQ ID NO: 2478 - DNA, 33 bp, Homo sapien
gcagaaagatggacacgatttattttagttcct

SEQ ID NO: 2479 - DNA, 33 bp, Homo sapien
gtcgttggacggtaagaacagtgcttgggtcgt

SEQ ID NO: 2480 - DNA, 33 bp, Homo sapien
gtcgttggacggtaaggacagtgcttgggtcgt

SEQ ID NO: 2481 - DNA, 33 bp, Homo sapien
agcagtaatctgctgaaactttgcacctgttgt

SEQ ID NO: 2482 - DNA, 33 bp, Homo sapien
agcagtaatctgctgagactttgcacctgttgt

SEQ ID NO: 2483 - DNA, 33 bp, Homo sapien
aatgtgcaagtgttaacgtatcagtctgttttc

SEQ ID NO: 2484 - DNA, 33 bp, Homo sapien
aatgtgcaagtgttaatgtatcagtctgttttc

SEQ ID NO: 2485 - DNA, 33 bp, Homo sapien
cacggcatcaagagaaagtacccattctcatca

SEQ ID NO: 2486 - DNA, 33 bp, Homo sapien
cacggcatcaagagaacgtacccattctcatca

SEQ ID NO: 2487 - DNA, 33 bp, Homo sapien
atctgttcaaccataaacacaataatcaagtga

SEQ ID NO: 2488 - DNA, 33 bp, Homo sapien
atctgttcaaccataagcacaataatcaagtga

SEQ ID NO: 2489 - DNA, 33 bp, Homo sapien
agctacacagcttttacatggcagagccagggc

SEQ ID NO: 2490 - DNA, 33 bp, Homo sapien
agctacacagcttttatatggcagagccagggc

SEQ ID NO: 2491 - DNA, 33 bp, Homo sapien
aagagagtgaaagagccgctatacccgccagtg

SEQ ID NO: 2492 - DNA, 33 bp, Homo sapien
aagagagtgaaagagctgctatacccgccagtg

SEQ ID NO: 2493 - DNA, 33 bp, Homo sapien
atcccaaagtatctccaaaacatgccatgtgtc

SEQ ID NO: 2494 - DNA, 33 bp, Homo sapien
atcccaaagtatctccgaaacatgccatgtgtc

SEQ ID NO: 2495 - DNA, 33 bp, Homo sapien
ttgtctctaatcggaacgtagcatcatatacgt

SEQ ID NO: 2496 - DNA, 33 bp, Homo sapien
ttgtctctaatcggaatgtagcatcatatacgt

SEQ ID NO: 2497 - DNA, 33 bp, Homo sapien
caaagccaacagcatacgttaaagatgtataca

SEQ ID NO: 2498 - DNA, 33 bp, Homo sapien
caaagccaacagcatatgttaaagatgtataca

SEQ ID NO: 2499 - DNA, 33 bp, Homo sapien
gccacatgaaattttcccaacgattgctttgtc

SEQ ID NO: 2500 - DNA, 33 bp, Homo sapien
gccacatgaaattttctcaacgattgctttgtc

SEQ ID NO: 2501 - DNA, 33 bp, Homo sapien
gcagggcaaaaggcaaaagtctcccagaagcaa

SEQ ID NO: 2502 - DNA, 33 bp, Homo sapien
gcagggcaaaaggcaacagtctcccagaagcaa

SEQ ID NO: 2503 - DNA, 33 bp, Homo sapien
tttgcattgaaaagcaacttctgaaaatgtgct

SEQ ID NO: 2504 - DNA, 33 bp, Homo sapien
tttgcattgaaaagcaccttctgaaaatgtgct

SEQ ID NO: 2505 - DNA, 33 bp, Homo sapien
taactttcagaggtaacttaacatctatatggt

SEQ ID NO: 2506 - DNA, 33 bp, Homo sapien
taactttcagaggtaagttaacatctatatggt

SEQ ID NO: 2507 - DNA, 33 bp, Homo sapien
gggaaaatattcaaagaaaagacgtgaccctac

SEQ ID NO: 2508 - DNA, 33 bp, Homo sapien
gggaaaatattcaaaggaaagacgtgaccctac

SEQ ID NO: 2509 - DNA, 33 bp, Homo sapien
ggagtttcttttgccgccaatcctcaaaacggt

SEQ ID NO: 2510 - DNA, 33 bp, Homo sapien
ggagtttcttttgccgtcaatcctcaaaacggt

SEQ ID NO: 2511 - DNA, 33 bp, Homo sapien
atattcgaaattaagactcataaccaagaaaaa

SEQ ID NO: 2512 - DNA, 33 bp, Homo sapien
atattcgaaattaagattcataaccaagaaaaa

SEQ ID NO: 2513 - DNA, 33 bp, Homo sapien
taaagtgaggtttagaaagtcaacacagctggc

SEQ ID NO: 2514 - DNA, 33 bp, Homo sapien
taaagtgaggtttagagagtcaacacagctggc

SEQ ID NO: 2515 - DNA, 33 bp, Homo sapien
tccctttagtaggtggaacagtcttggaaatta

SEQ ID NO: 2516 - DNA, 33 bp, Homo sapien
tccctttagtaggtgggacagtcttggaaatta

SEQ ID NO: 2517 - DNA, 33 bp, Homo sapien
ggtccgagtcctaaaaatgccattccttgctgc

SEQ ID NO: 2518 - DNA, 33 bp, Homo sapien
ggtccgagtcctaaaactgccattccttgctgc

SEQ ID NO: 2519 - DNA, 33 bp, Homo sapien
aaaccactatacaatacgctggtaatgaaataa

SEQ ID NO: 2520 - DNA, 33 bp, Homo sapien
aaaccactatacaatatgctggtaatgaaataa

SEQ ID NO: 2521 - DNA, 33 bp, Homo sapien
atttatttaataatcacgtgggtcaagaactag

SEQ ID NO: 2522 - DNA, 33 bp, Homo sapien
atttatttaataatcatgtgggtcaagaactag

SEQ ID NO: 2523 - DNA, 33 bp, Homo sapien
acagaagggaaatatcacagtaatcagtaatca

SEQ ID NO: 2524 - DNA, 33 bp, Homo sapien
acagaagggaaatatcgcagtaatcagtaatca

SEQ ID NO: 2525 - DNA, 33 bp, Homo sapien
ttgcaagtctgaaatccactgaagcaataatta

SEQ ID NO: 2526 - DNA, 33 bp, Homo sapien
ttgcaagtctgaaatctactgaagcaataatta

SEQ ID NO: 2527 - DNA, 33 bp, Homo sapien
ctcatcactgaagctgcagacgaaattggttct

SEQ ID NO: 2528 - DNA, 33 bp, Homo sapien
ctcatcactgaagctggagacgaaattggttct

SEQ ID NO: 2529 - DNA, 33 bp, Homo sapien
acaatcgtagccattcgatgtgtaatgtgctct

SEQ ID NO: 2530 - DNA, 33 bp, Homo sapien
acaatcgtagccattctatgtgtaatgtgctct

SEQ ID NO: 2531 - DNA, 33 bp, Homo sapien
gcgtgcctaacacatacgctgaacatttcagaa

SEQ ID NO: 2532 - DNA, 33 bp, Homo sapien
gcgtgcctaacacatatgctgaacatttcagaa

SEQ ID NO: 2533 - DNA, 33 bp, Homo sapien
ggctgatagtgttgtacggatcatctgtttctt

SEQ ID NO: 2534 - DNA, 33 bp, Homo sapien
ggctgatagtgttgtatggatcatctgtttctt

SEQ ID NO: 2535 - DNA, 33 bp, Homo sapien
aaccccataataaggaaaaaaggcaccgagaaa

SEQ ID NO: 2536 - DNA, 33 bp, Homo sapien
aaccccataataaggagaaaaggcaccgagaaa

SEQ ID NO: 2537 - DNA, 33 bp, Homo sapien
ggtaaagggatgaaaaattaaaggaagcagacc

SEQ ID NO: 2538 - DNA, 33 bp, Homo sapien
ggtaaagggatgaaaagttaaaggaagcagacc

SEQ ID NO: 2539 - DNA, 33 bp, Homo sapien
cagacattgacctgaacgatgtacagaaggccg

SEQ ID NO: 2540 - DNA, 33 bp, Homo sapien
cagacattgacctgaatgatgtacagaaggccg

SEQ ID NO: 2541 - DNA, 33 bp, Homo sapien
aaaaaaatgctaaaaacgtgaagtaatacacat

SEQ ID NO: 2542 - DNA, 33 bp, Homo sapien
aaaaaaatgctaaaaatgtgaagtaatacacat

SEQ ID NO: 2543 - DNA, 33 bp, Homo sapien
aaacaggcctaatacaatcccaccccagggcct

SEQ ID NO: 2544 - DNA, 33 bp, Homo sapien
aaacaggcctaatacagtcccaccccagggcct

SEQ ID NO: 2545 - DNA, 33 bp, Homo sapien
gtgccaatggccagaagactggtttctaacaaa

SEQ ID NO: 2546 - DNA, 33 bp, Homo sapien
gtgccaatggccagaatactggtttctaacaaa

SEQ ID NO: 2547 - DNA, 33 bp, Homo sapien
gcctccagatgggcgagccaggtcatcttagac

SEQ ID NO: 2548 - DNA, 33 bp, Homo sapien
gcctccagatgggcgatccaggtcatcttagac

SEQ ID NO: 2549 - DNA, 33 bp, Homo sapien
ttggatgagggaccaaatgattgaccccatttt

SEQ ID NO: 2550 - DNA, 33 bp, Homo sapien
ttggatgagggaccaactgattgaccccatttt

SEQ ID NO: 2551 - DNA, 33 bp, Homo sapien
tgggggagcttaaataacagagacttacttttc

SEQ ID NO: 2552 - DNA, 33 bp, Homo sapien
tgggggagcttaaatagcagagacttacttttc

SEQ ID NO: 2553 - DNA, 33 bp, Homo sapien
cctgggacaccttcataaatgttaataacatca

SEQ ID NO: 2554 - DNA, 33 bp, Homo sapien
cctgggacaccttcatgaatgttaataacatca

SEQ ID NO: 2555 - DNA, 33 bp, Homo sapien
ctttatcaccgggaacacaatatgtgctcaata

SEQ ID NO: 2556 - DNA, 33 bp, Homo sapien
ctttatcaccgggaacgcaatatgtgctcaata

SEQ ID NO: 2557 - DNA, 33 bp, Homo sapien
tagaaactggaaaaggcaagaacactgatgctc

SEQ ID NO: 2558 - DNA, 33 bp, Homo sapien
tagaaactggaaaagggaagaacactgatgctc

SEQ ID NO: 2559 - DNA, 33 bp, Homo sapien
ttatgcacaaagccgacgaagaagatacaaatt

SEQ ID NO: 2560 - DNA, 33 bp, Homo sapien
ttatgcacaaagccgatgaagaagatacaaatt

SEQ ID NO: 2561 - DNA, 33 bp, Homo sapien
agcaggctattggaagactactgcagtaatcca

SEQ ID NO: 2562 - DNA, 33 bp, Homo sapien
agcaggctattggaaggctactgcagtaatcca

SEQ ID NO: 2563 - DNA, 33 bp, Homo sapien
aataagtcaattgttgaaagcaaaaggaatctc

SEQ ID NO: 2564 - DNA, 33 bp, Homo sapien
aataagtcaattgttggaagcaaaaggaatctc

SEQ ID NO: 2565 - DNA, 33 bp, Homo sapien
aaaatacttctgccggcattgatctttgtagca

SEQ ID NO: 2566 - DNA, 33 bp, Homo sapien
aaaatacttctgccggtattgatctttgtagca

SEQ ID NO: 2567 - DNA, 33 bp, Homo sapien
ggtgggtgtattcaggaatgtaaaggtgatgcg

SEQ ID NO: 2568 - DNA, 33 bp, Homo sapien
ggtgggtgtattcagggatgtaaaggtgatgcg

SEQ ID NO: 2569 - DNA, 33 bp, Homo sapien
catggtgctttgggttaaaattttgctctcaaa

SEQ ID NO: 2570 - DNA, 33 bp, Homo sapien
catggtgctttgggttgaaattttgctctcaaa

SEQ ID NO: 2571 - DNA, 33 bp, Homo sapien
gccacagtggtggacactagtttgattgacttc

SEQ ID NO: 2572 - DNA, 33 bp, Homo sapien
gccacagtggtggacattagtttgattgacttc

SEQ ID NO: 2573 - DNA, 33 bp, Homo sapien
atagcagcgagtaagcacgtagtaaagggctta

SEQ ID NO: 2574 - DNA, 33 bp, Homo sapien
atagcagcgagtaagcgcgtagtaaagggctta

SEQ ID NO: 2575 - DNA, 33 bp, Homo sapien
taggtgttcagctaaaaggggaagagtgattat

SEQ ID NO: 2576 - DNA, 33 bp, Homo sapien
taggtgttcagctaaagggggaagagtgattat

SEQ ID NO: 2577 - DNA, 33 bp, Homo sapien
attagtgcatcacaaactggcttttaaaatatt

SEQ ID NO: 2578 - DNA, 33 bp, Homo sapien
attagtgcatcacaaattggcttttaaaatatt

SEQ ID NO: 2579 - DNA, 33 bp, Homo sapien
tctaatggaaatctaaacctaacatttcttccc

SEQ ID NO: 2580 - DNA, 33 bp, Homo sapien
tctaatggaaatctaagcctaacatttcttccc

SEQ ID NO: 2581 - DNA, 33 bp, Homo sapien
tccccatctataaaacagggatcacagaacctg

SEQ ID NO: 2582 - DNA, 33 bp, Homo sapien
tccccatctataaaacggggatcacagaacctg

SEQ ID NO: 2583 - DNA, 33 bp, Homo sapien
caggagtgacatcagaataggatgataccatca

SEQ ID NO: 2584 - DNA, 33 bp, Homo sapien
caggagtgacatcagagtaggatgataccatca

SEQ ID NO: 2585 - DNA, 33 bp, Homo sapien
tgtgcatctcactgtcactctggaagacctagc

SEQ ID NO: 2586 - DNA, 33 bp, Homo sapien
tgtgcatctcactgtcgctctggaagacctagc

SEQ ID NO: 2587 - DNA, 33 bp, Homo sapien
acattctgttcaaccactacataaacaaagtgg

SEQ ID NO: 2588 - DNA, 33 bp, Homo sapien
acattctgttcaaccattacataaacaaagtgg

SEQ ID NO: 2589 - DNA, 33 bp, Homo sapien
cttattttcctaaggacaagaatacctcgaaac

SEQ ID NO: 2590 - DNA, 33 bp, Homo sapien
cttattttcctaaggataagaatacctcgaaac

SEQ ID NO: 2591 - DNA, 33 bp, Homo sapien
agtccttattgctggcacatcataatattgtga

SEQ ID NO: 2592 - DNA, 33 bp, Homo sapien
agtccttattgctggcccatcataatattgtga

SEQ ID NO: 2593 - DNA, 33 bp, Homo sapien
tacttgcagttcacaagatatactggtcactct

SEQ ID NO: 2594 - DNA, 33 bp, Homo sapien
tacttgcagttcacaatatatactggtcactct

SEQ ID NO: 2595 - DNA, 33 bp, Homo sapien
ctgtcacataggaggaaccatatatatatatgt

SEQ ID NO: 2596 - DNA, 33 bp, Homo sapien
ctgtcacataggaggagccatatatatatatgt

SEQ ID NO: 2597 - DNA, 33 bp, Homo sapien
tatgtcgtacatggatcacaacttaacttctcc

SEQ ID NO: 2598 - DNA, 33 bp, Homo sapien
tatgtcgtacatggattacaacttaacttctcc

SEQ ID NO: 2599 - DNA, 33 bp, Homo sapien
tggacaaccgagagcaaattcttggccagtgtg

SEQ ID NO: 2600 - DNA, 33 bp, Homo sapien
tggacaaccgagagcacattcttggccagtgtg

SEQ ID NO: 2601 - DNA, 33 bp, Homo sapien
agaccttaaactccagacagtgaagacattatt

SEQ ID NO: 2602 - DNA, 33 bp, Homo sapien
agaccttaaactccaggcagtgaagacattatt

SEQ ID NO: 2603 - DNA, 33 bp, Homo sapien
ggaataaacttggaaacgtggagataggttcaa

SEQ ID NO: 2604 - DNA, 33 bp, Homo sapien
ggaataaacttggaaatgtggagataggttcaa

SEQ ID NO: 2605 - DNA, 33 bp, Homo sapien
acctggaactatcgtacgtttacggtcgtcatt

SEQ ID NO: 2606 - DNA, 33 bp, Homo sapien
acctggaactatcgtatgtttacggtcgtcatt

SEQ ID NO: 2607 - DNA, 33 bp, Homo sapien
gggaagcatgagtgaccggataaatattaatga

SEQ ID NO: 2608 - DNA, 33 bp, Homo sapien
gggaagcatgagtgactggataaatattaatga

SEQ ID NO: 2609 - DNA, 33 bp, Homo sapien
aagttaagaacagaaactctgcacggcctgaga

SEQ ID NO: 2610 - DNA, 33 bp, Homo sapien
aagttaagaacagaaagtctgcacggcctgaga

SEQ ID NO: 2611 - DNA, 33 bp, Homo sapien
ttcctgtgacttggaaaagtgtgcgatactgag

SEQ ID NO: 2612 - DNA, 33 bp, Homo sapien
ttcctgtgacttggaagagtgtgcgatactgag

SEQ ID NO: 2613 - DNA, 33 bp, Homo sapien
catatttgccagcagaatcaaggaaggtgcagg

SEQ ID NO: 2614 - DNA, 33 bp, Homo sapien
catatttgccagcagagtcaaggaaggtgcagg

SEQ ID NO: 2615 - DNA, 33 bp, Homo sapien
aaccctgcgttgagcaagtctcttggtaccatt

SEQ ID NO: 2616 - DNA, 33 bp, Homo sapien
aaccctgcgttgagcatgtctcttggtaccatt

SEQ ID NO: 2617 - DNA, 33 bp, Homo sapien
tattaaaaagtttgaaatagtgtgagaattagc

SEQ ID NO: 2618 - DNA, 33 bp, Homo sapien
tattaaaaagtttgaagtagtgtgagaattagc

SEQ ID NO: 2619 - DNA, 33 bp, Homo sapien
ttccttttacataatgaaatcctcttgtatata

SEQ ID NO: 2620 - DNA, 33 bp, Homo sapien
ttccttttacataatggaatcctcttgtatata

SEQ ID NO: 2621 - DNA, 33 bp, Homo sapien
tcatgtcactaggtcaagcccactgagtatttt

SEQ ID NO: 2622 - DNA, 33 bp, Homo sapien
tcatgtcactaggtcaggcccactgagtatttt

SEQ ID NO: 2623 - DNA, 33 bp, Homo sapien
tttctgaaatctcaaacattcttctgatcctgc

SEQ ID NO: 2624 - DNA, 33 bp, Homo sapien
tttctgaaatctcaaatattcttctgatcctgc

SEQ ID NO: 2625 - DNA, 33 bp, Homo sapien
gagcatttggcgattaaagtttttaaagataat

SEQ ID NO: 2626 - DNA, 33 bp, Homo sapien
gagcatttggcgattagagtttttaaagataat

SEQ ID NO: 2627 - DNA, 33 bp, Homo sapien
aacaattcagttctaacatcatgaagggttggt

SEQ ID NO: 2628 - DNA, 33 bp, Homo sapien
aacaattcagttctaatatcatgaagggttggt

SEQ ID NO: 2629 - DNA, 33 bp, Homo sapien
gaagaagaacgtgaagaagacagggagaccatt

SEQ ID NO: 2630 - DNA, 33 bp, Homo sapien
gaagaagaacgtgaagtagacagggagaccatt

SEQ ID NO: 2631 - DNA, 33 bp, Homo sapien
taaaactatttgccacaatcaagtcggtgaaca

SEQ ID NO: 2632 - DNA, 33 bp, Homo sapien
taaaactatttgccaccatcaagtcggtgaaca

SEQ ID NO: 2633 - DNA, 33 bp, Homo sapien
aaaaaagtgaaactcaaagaagtggttaggctc

SEQ ID NO: 2634 - DNA, 33 bp, Homo sapien
aaaaaagtgaaactcagagaagtggttaggctc

SEQ ID NO: 2635 - DNA, 33 bp, Homo sapien
ttgcttgtcgattctcaagtgcctccagctcag

SEQ ID NO: 2636 - DNA, 33 bp, Homo sapien
ttgcttgtcgattctcgagtgcctccagctcag

SEQ ID NO: 2637 - DNA, 33 bp, Homo sapien
agattaaaagagacggaacagtcagcggcaacc

SEQ ID NO: 2638 - DNA, 33 bp, Homo sapien
agattaaaagagacgggacagtcagcggcaacc

SEQ ID NO: 2639 - DNA, 33 bp, Homo sapien
atgtcatgggaaaagacggagcaggaagtgtgg

SEQ ID NO: 2640 - DNA, 33 bp, Homo sapien
atgtcatgggaaaagatggagcaggaagtgtgg

SEQ ID NO: 2641 - DNA, 33 bp, Homo sapien
catgtcctttgttaaacagagaacctagagttg

SEQ ID NO: 2642 - DNA, 33 bp, Homo sapien
catgtcctttgttaaatagagaacctagagttg

SEQ ID NO: 2643 - DNA, 33 bp, Homo sapien
ttggcttgagggaatacggattgagcagatgat

SEQ ID NO: 2644 - DNA, 33 bp, Homo sapien
ttggcttgagggaatatggattgagcagatgat

SEQ ID NO: 2645 - DNA, 33 bp, Homo sapien
tttcaactcttagcaaattattctgatagttac

SEQ ID NO: 2646 - DNA, 33 bp, Homo sapien
tttcaactcttagcaagttattctgatagttac

SEQ ID NO: 2647 - DNA, 33 bp, Homo sapien
atcagtgtgttggtcacgtagaaccattcagac

SEQ ID NO: 2648 - DNA, 33 bp, Homo sapien
atcagtgtgttggtcatgtagaaccattcagac

SEQ ID NO: 2649 - DNA, 33 bp, Homo sapien
ctctttactcttagctaaaagtttcaccaatcc

SEQ ID NO: 2650 - DNA, 33 bp, Homo sapien
ctctttactcttagctgaaagtttcaccaatcc

SEQ ID NO: 2651 - DNA, 33 bp, Homo sapien
cctcccaaaggcagaaagaatatttattaacct

SEQ ID NO: 2652 - DNA, 33 bp, Homo sapien
cctcccaaaggcagaaggaatatttattaacct

SEQ ID NO: 2653 - DNA, 33 bp, Homo sapien
gaggtgcatcctataacccagatttattgtagg

SEQ ID NO: 2654 - DNA, 33 bp, Homo sapien
gaggtgcatcctataatccagatttattgtagg

SEQ ID NO: 2655 - DNA, 33 bp, Homo sapien
ctcatctgcaaaaagcaaagagataacatgatt

SEQ ID NO: 2656 - DNA, 33 bp, Homo sapien
ctcatctgcaaaaagcgaagagataacatgatt

SEQ ID NO: 2657 - DNA, 33 bp, Homo sapien
ctctgcaagcttgaaacgtttgttcactctctt

SEQ ID NO: 2658 - DNA, 33 bp, Homo sapien
ctctgcaagcttgaaatgtttgttcactctctt

SEQ ID NO: 2659 - DNA, 33 bp, Homo sapien
caatctttcccaggacaaatttcagtgtgtcac

SEQ ID NO: 2660 - DNA, 33 bp, Homo sapien
caatctttcccaggaccaatttcagtgtgtcac

SEQ ID NO: 2661 - DNA, 33 bp, Homo sapien
aagcagaagaatctaacggagaaactgggctag

SEQ ID NO: 2662 - DNA, 33 bp, Homo sapien
aagcagaagaatctaatggagaaactgggctag

SEQ ID NO: 2663 - DNA, 33 bp, Homo sapien
cacaaatttaagaggacgtgggtgtctgacctt

SEQ ID NO: 2664 - DNA, 33 bp, Homo sapien
cacaaatttaagaggatgtgggtgtctgacctt

SEQ ID NO: 2665 - DNA, 33 bp, Homo sapien
aacctcactagttggacgtatgtaataatttgt

SEQ ID NO: 2666 - DNA, 33 bp, Homo sapien
aacctcactagttggatgtatgtaataatttgt

SEQ ID NO: 2667 - DNA, 33 bp, Homo sapien
gaccccagctgctgaacctaagagggtagagga

SEQ ID NO: 2668 - DNA, 33 bp, Homo sapien
gaccccagctgctgaatctaagagggtagagga

SEQ ID NO: 2669 - DNA, 33 bp, Homo sapien
ggaagaggcataggaaagcatgtgccactgggg

SEQ ID NO: 2670 - DNA, 33 bp, Homo sapien
ggaagaggcataggaaggcatgtgccactgggg

SEQ ID NO: 2671 - DNA, 33 bp, Homo sapien
cagataccagaataaaaaggctcttagtggagc

SEQ ID NO: 2672 - DNA, 33 bp, Homo sapien
cagataccagaataaagaggctcttagtggagc

SEQ ID NO: 2673 - DNA, 33 bp, Homo sapien
ctctgaaacctctgaccggtgagtccctacttc

SEQ ID NO: 2674 - DNA, 33 bp, Homo sapien
ctctgaaacctctgactggtgagtccctacttc

SEQ ID NO: 2675 - DNA, 33 bp, Homo sapien
caagcaaaagccaaaaccaaacaagtcaacaga

SEQ ID NO: 2676 - DNA, 33 bp, Homo sapien
caagcaaaagccaaaatcaaacaagtcaacaga

SEQ ID NO: 2677 - DNA, 33 bp, Homo sapien
taggtctcagggtgaaattcacatcctccaagg

SEQ ID NO: 2678 - DNA, 33 bp, Homo sapien
taggtctcagggtgaagttcacatcctccaagg

SEQ ID NO: 2679 - DNA, 33 bp, Homo sapien
gctgtgcaacttctccactacccaactgcagag

SEQ ID NO: 2680 - DNA, 33 bp, Homo sapien
gctgtgcaacttctccgctacccaactgcagag

SEQ ID NO: 2681 - DNA, 33 bp, Homo sapien
attagctgatgccttcacttttgtctgaaacgt

SEQ ID NO: 2682 - DNA, 33 bp, Homo sapien
attagctgatgccttctcttttgtctgaaacgt

SEQ ID NO: 2683 - DNA, 33 bp, Homo sapien
gcatctgtggaaatagaaagctggtgaaggcag

SEQ ID NO: 2684 - DNA, 33 bp, Homo sapien
gcatctgtggaaatagcaagctggtgaaggcag

SEQ ID NO: 2685 - DNA, 33 bp, Homo sapien
tggacctttgcaacagaaatctcaggttaggtg

SEQ ID NO: 2686 - DNA, 33 bp, Homo sapien
tggacctttgcaacaggaatctcaggttaggtg

SEQ ID NO: 2687 - DNA, 33 bp, Homo sapien
tgtccttagaaaaagacggtgtgtggctgggcg

SEQ ID NO: 2688 - DNA, 33 bp, Homo sapien
tgtccttagaaaaagatggtgtgtggctgggcg

SEQ ID NO: 2689 - DNA, 33 bp, Homo sapien
ccaaggctggtgaccacgtccttcccgggctgc

SEQ ID NO: 2690 - DNA, 33 bp, Homo sapien
ccaaggctggtgaccatgtccttcccgggctgc

SEQ ID NO: 2691 - DNA, 33 bp, Homo sapien
gaaagtgacagttttgaacagttttgccttttt

SEQ ID NO: 2692 - DNA, 33 bp, Homo sapien
gaaagtgacagttttgtacagttttgccttttt

SEQ ID NO: 2693 - DNA, 33 bp, Homo sapien
ttctcagaggggttacaggaccttagatatctg

SEQ ID NO: 2694 - DNA, 33 bp, Homo sapien
ttctcagaggggttacgggaccttagatatctg

SEQ ID NO: 2695 - DNA, 33 bp, Homo sapien
ctattatcaagacatacctgagactaaataatt

SEQ ID NO: 2696 - DNA, 33 bp, Homo sapien
ctattatcaagacatagctgagactaaataatt

SEQ ID NO: 2697 - DNA, 33 bp, Homo sapien
tccctgaggtgctgaagctcatcagttgatggc

SEQ ID NO: 2698 - DNA, 33 bp, Homo sapien
tccctgaggtgctgaatctcatcagttgatggc

SEQ ID NO: 2699 - DNA, 33 bp, Homo sapien
agggtccaactcataacgcttggtgtcatgtga

SEQ ID NO: 2700 - DNA, 33 bp, Homo sapien
agggtccaactcataatgcttggtgtcatgtga

SEQ ID NO: 2701 - DNA, 33 bp, Homo sapien
aaaaaggtggcactaaatagaccacacaaaaaa

SEQ ID NO: 2702 - DNA, 33 bp, Homo sapien
aaaaaggtggcactaactagaccacacaaaaaa

SEQ ID NO: 2703 - DNA, 33 bp, Homo sapien
aatgatcaaagtggtgcattctcatagacgggc

SEQ ID NO: 2704 - DNA, 33 bp, Homo sapien
aatgatcaaagtggtgtattctcatagacgggc

SEQ ID NO: 2705 - DNA, 33 bp, Homo sapien
ataaactacactctaaagagaaaggaaacagaa

SEQ ID NO: 2706 - DNA, 33 bp, Homo sapien
ataaactacactctaaggagaaaggaaacagaa

SEQ ID NO: 2707 - DNA, 33 bp, Homo sapien
acaacaacgaaataacaagctcccctgaccaga

SEQ ID NO: 2708 - DNA, 33 bp, Homo sapien
acaacaacgaaataacgagctcccctgaccaga

SEQ ID NO: 2709 - DNA, 33 bp, Homo sapien
ggctgccagcagcctcaacggcatacaaggggc

SEQ ID NO: 2710 - DNA, 33 bp, Homo sapien
ggctgccagcagcctcgacggcatacaaggggc

SEQ ID NO: 2711 - DNA, 33 bp, Homo sapien
taatctgatcttcttaaaaccaaaagtgcaatg

SEQ ID NO: 2712 - DNA, 33 bp, Homo sapien
taatctgatcttcttacaaccaaaagtgcaatg

SEQ ID NO: 2713 - DNA, 33 bp, Homo sapien
gtctgctgaacctctacgaccttgttgctaccc

SEQ ID NO: 2714 - DNA, 33 bp, Homo sapien
gtctgctgaacctctatgaccttgttgctaccc

SEQ ID NO: 2715 - DNA, 33 bp, Homo sapien
ctcctaacagagctgaactcttgctccatgatg

SEQ ID NO: 2716 - DNA, 33 bp, Homo sapien
ctcctaacagagctgacctcttgctccatgatg

SEQ ID NO: 2717 - DNA, 33 bp, Homo sapien
ttgtcactggtatttccaagactaaatctatgg

SEQ ID NO: 2718 - DNA, 33 bp, Homo sapien
ttgtcactggtatttctaagactaaatctatgg

SEQ ID NO: 2719 - DNA, 33 bp, Homo sapien
tgttgctatttattgaaaaagtagtgccttact

SEQ ID NO: 2720 - DNA, 33 bp, Homo sapien
tgttgctatttattgacaaagtagtgccttact

SEQ ID NO: 2721 - DNA, 33 bp, Homo sapien
ccctagctcagacttgcacctacactttctatt

SEQ ID NO: 2722 - DNA, 33 bp, Homo sapien
ccctagctcagacttgtacctacactttctatt

SEQ ID NO: 2723 - DNA, 33 bp, Homo sapien
acttagcagctcacacacactctgttaccattg

SEQ ID NO: 2724 - DNA, 33 bp, Homo sapien
acttagcagctcacacgcactctgttaccattg

SEQ ID NO: 2725 - DNA, 33 bp, Homo sapien
tctccagtttgactcaacgtctcttaatatata

SEQ ID NO: 2726 - DNA, 33 bp, Homo sapien
tctccagtttgactcagcgtctcttaatatata

SEQ ID NO: 2727 - DNA, 33 bp, Homo sapien
gtttgaacgaagaacacctaatggttttgtcag

SEQ ID NO: 2728 - DNA, 33 bp, Homo sapien
gtttgaacgaagaacatctaatggttttgtcag

SEQ ID NO: 2729 - DNA, 33 bp, Homo sapien
atgctttctgatattcacccagtggcagtactt

SEQ ID NO: 2730 - DNA, 33 bp, Homo sapien
atgctttctgatattcgcccagtggcagtactt

SEQ ID NO: 2731 - DNA, 33 bp, Homo sapien
cagggggtgtggttcccaagggtcattgacctt

SEQ ID NO: 2732 - DNA, 33 bp, Homo sapien
cagggggtgtggttcctaagggtcattgacctt

SEQ ID NO: 2733 - DNA, 33 bp, Homo sapien
ctctcatgccagtgcagaccctactcgttctcc

SEQ ID NO: 2734 - DNA, 33 bp, Homo sapien
ctctcatgccagtgcataccctactcgttctcc

SEQ ID NO: 2735 - DNA, 33 bp, Homo sapien
aagaaatgctaaaaagaaagaacataatctagt

SEQ ID NO: 2736 - DNA, 33 bp, Homo sapien
aagaaatgctaaaaaggaagaacataatctagt

SEQ ID NO: 2737 - DNA, 33 bp, Homo sapien
aaaatggataaaataacaacatcaacctcttag

SEQ ID NO: 2738 - DNA, 33 bp, Homo sapien
aaaatggataaaataataacatcaacctcttag

SEQ ID NO: 2739 - DNA, 33 bp, Homo sapien
ctaactgatcaaacggcaagtggatgtttttat

SEQ ID NO: 2740 - DNA, 33 bp, Homo sapien
ctaactgatcaaacggtaagtggatgtttttat

SEQ ID NO: 2741 - DNA, 33 bp, Homo sapien
ttgatattactttctacatcaaatgtttgccag

SEQ ID NO: 2742 - DNA, 33 bp, Homo sapien
ttgatattactttctatatcaaatgtttgccag

SEQ ID NO: 2743 - DNA, 33 bp, Homo sapien
catgtcaggctagtctaaagagtttcagtgtca

SEQ ID NO: 2744 - DNA, 33 bp, Homo sapien
catgtcaggctagtctgaagagtttcagtgtca

SEQ ID NO: 2745 - DNA, 33 bp, Homo sapien
agctttcttctttgatgaataacaacagtagct

SEQ ID NO: 2746 - DNA, 33 bp, Homo sapien
agctttcttctttgattaataacaacagtagct

SEQ ID NO: 2747 - DNA, 33 bp, Homo sapien
cattacttgcagagtaggctcaccacagaagta

SEQ ID NO: 2748 - DNA, 33 bp, Homo sapien
cattacttgcagagtatgctcaccacagaagta

SEQ ID NO: 2749 - DNA, 33 bp, Homo sapien
tagatttaaggctctcacatttttcacaatctc

SEQ ID NO: 2750 - DNA, 33 bp, Homo sapien
tagatttaaggctctctcatttttcacaatctc

SEQ ID NO: 2751 - DNA, 33 bp, Homo sapien
cctctatgaactgataagagcaattcccacaat

SEQ ID NO: 2752 - DNA, 33 bp, Homo sapien
cctctatgaactgataggagcaattcccacaat

SEQ ID NO: 2753 - DNA, 33 bp, Homo sapien
gtagattaaagccagagaaggattcttaaactg

SEQ ID NO: 2754 - DNA, 33 bp, Homo sapien
gtagattaaagccagataaggattcttaaactg

SEQ ID NO: 2755 - DNA, 33 bp, Homo sapien
ggatagctaaggtcaacaattcaaaactaacag

SEQ ID NO: 2756 - DNA, 33 bp, Homo sapien
ggatagctaaggtcaagaattcaaaactaacag

SEQ ID NO: 2757 - DNA, 33 bp, Homo sapien
tcagtaatttctaaaactgtgtctctagtgctt

SEQ ID NO: 2758 - DNA, 33 bp, Homo sapien
tcagtaatttctaaaagtgtgtctctagtgctt

SEQ ID NO: 2759 - DNA, 33 bp, Homo sapien
gatatgagcatctgcacgagagaaaacagaatc

SEQ ID NO: 2760 - DNA, 33 bp, Homo sapien
gatatgagcatctgcatgagagaaaacagaatc

SEQ ID NO: 2761 - DNA, 33 bp, Homo sapien
cctggtagctattttacggtcctcctgatctta

SEQ ID NO: 2762 - DNA, 33 bp, Homo sapien
cctggtagctattttatggtcctcctgatctta

SEQ ID NO: 2763 - DNA, 33 bp, Homo sapien
cagaataacacccctacagacaaggacagtaca

SEQ ID NO: 2764 - DNA, 33 bp, Homo sapien
cagaataacacccctatagacaaggacagtaca

SEQ ID NO: 2765 - DNA, 33 bp, Homo sapien
cagcaagtatagacccacaaacaaaagccagct

SEQ ID NO: 2766 - DNA, 33 bp, Homo sapien
cagcaagtatagacccgcaaacaaaagccagct

SEQ ID NO: 2767 - DNA, 33 bp, Homo sapien
atatgttactattaaccatgacattattattca

SEQ ID NO: 2768 - DNA, 33 bp, Homo sapien
atatgttactattaactatgacattattattca

SEQ ID NO: 2769 - DNA, 33 bp, Homo sapien
tacattaaagtttgtccgaatttttcttgtgtg

SEQ ID NO: 2770 - DNA, 33 bp, Homo sapien
tacattaaagtttgtctgaatttttcttgtgtg

SEQ ID NO: 2771 - DNA, 33 bp, Homo sapien
ctccttatgttgcttacgttgaggatgtggaac

SEQ ID NO: 2772 - DNA, 33 bp, Homo sapien
ctccttatgttgcttatgttgaggatgtggaac

SEQ ID NO: 2773 - DNA, 33 bp, Homo sapien
ctaactgtaaacaaaaacaatgccactaatcag

SEQ ID NO: 2774 - DNA, 33 bp, Homo sapien
ctaactgtaaacaaaaccaatgccactaatcag

SEQ ID NO: 2775 - DNA, 33 bp, Homo sapien; identical to SEQ ID NO: 2773

SEQ ID NO: 2776 - DNA, 33 bp, Homo sapien; identical to SEQ ID NO: 2774

SEQ ID NO: 2777 - DNA, 33 bp, Homo sapien
ttactctgtttatcaactgttatcaaaatcagc

SEQ ID NO: 2778 - DNA, 33 bp, Homo sapien
ttactctgtttatcaattgttatcaaaatcagc

SEQ ID NO: 2779 - DNA, 33 bp, Homo sapien
atttatttccatgccaccacttgtaaatctgaa

SEQ ID NO: 2780 - DNA, 33 bp, Homo sapien
atttatttccatgccagcacttgtaaatctgaa

SEQ ID NO: 2781 - DNA, 33 bp, Homo sapien
ttaattagacttacaaatgaaacagccctaaaa

SEQ ID NO: 2782 - DNA, 33 bp, Homo sapien
ttaattagacttacaagtgaaacagccctaaaa

SEQ ID NO: 2783 - DNA, 33 bp, Homo sapien
catgaaccagcataaactgcacattctattgac

SEQ ID NO: 2784 - DNA, 33 bp, Homo sapien
catgaaccagcataaagtgcacattctattgac

SEQ ID NO: 2785 - DNA, 33 bp, Homo sapien
taaagccaagaatgaacggacatttgcataaaa

SEQ ID NO: 2786 - DNA, 33 bp, Homo sapien
taaagccaagaatgaatggacatttgcataaaa

SEQ ID NO: 2787 - DNA, 33 bp, Homo sapien
tattctaaaatgcactaaactctgtgtgtgtgt

SEQ ID NO: 2788 - DNA, 33 bp, Homo sapien
tattctaaaatgcactcaactctgtgtgtgtgt

SEQ ID NO: 2789 - DNA, 33 bp, Homo sapien
gagctcctgacaaaaacattaagagaaagactc

SEQ ID NO: 2790 - DNA, 33 bp, Homo sapien
gagctcctgacaaaaatattaagagaaagactc

SEQ ID NO: 2791 - DNA, 33 bp, Homo sapien
gccggccaaaattttacaagcaaatggctcaaa

SEQ ID NO: 2792 - DNA, 33 bp, Homo sapien
gccggccaaaattttataagcaaatggctcaaa

SEQ ID NO: 2793 - DNA, 33 bp, Homo sapien
ctagctagccatatgcagaactggaccgctacc

SEQ ID NO: 2794 - DNA, 33 bp, Homo sapien
ctagctagccatatgcggaactggaccgctacc

SEQ ID NO: 2795 - DNA, 33 bp, Homo sapien
atgcagccaagtgagcggacatctgactttatc

SEQ ID NO: 2796 - DNA, 33 bp, Homo sapien
atgcagccaagtgagctgacatctgactttatc

SEQ ID NO: 2797 - DNA, 33 bp, Homo sapien
tttgcagtaataaacaagaatgggatgttaatg

SEQ ID NO: 2798 - DNA, 33 bp, Homo sapien
tttgcagtaataaacaggaatgggatgttaatg

SEQ ID NO: 2799 - DNA, 33 bp, Homo sapien
gcgtctttcctgaaaactggaagacaatagagt

SEQ ID NO: 2800 - DNA, 33 bp, Homo sapien
gcgtctttcctgaaaattggaagacaatagagt

SEQ ID NO: 2801 - DNA, 33 bp, Homo sapien
ttcagtccgatgcctacgtcttaaaaagattga

SEQ ID NO: 2802 - DNA, 33 bp, Homo sapien
ttcagtccgatgcctatgtcttaaaaagattga

SEQ ID NO: 2803 - DNA, 33 bp, Homo sapien
aagcaccctccttactcactttactctagggaa

SEQ ID NO: 2804 - DNA, 33 bp, Homo sapien
aagcaccctccttactgactttactctagggaa

SEQ ID NO: 2805 - DNA, 33 bp, Homo sapien
gtcttgaactttagacaaaattatgtgtagttg

SEQ ID NO: 2806 - DNA, 33 bp, Homo sapien
gtcttgaactttagacgaaattatgtgtagttg

SEQ ID NO: 2807 - DNA, 33 bp, Homo sapien
ccaaaggtgtggacttaaagcatttcaaggacc

SEQ ID NO: 2808 - DNA, 33 bp, Homo sapien
ccaaaggtgtggactttaagcatttcaaggacc

SEQ ID NO: 2809 - DNA, 33 bp, Homo sapien
ttaccttgatattgaaacattcatttattgaac

SEQ ID NO: 2810 - DNA, 33 bp, Homo sapien
ttaccttgatattgaagcattcatttattgaac

SEQ ID NO: 2811 - DNA, 33 bp, Homo sapien
atattcttgtactaaaccatagctcaggaacat

SEQ ID NO: 2812 - DNA, 33 bp, Homo sapien
atattcttgtactaaagcatagctcaggaacat

SEQ ID NO: 2813 - DNA, 33 bp, Homo sapien
aataatgtaaaaagaacgtgtttctggagtctt

SEQ ID NO: 2814 - DNA, 33 bp, Homo sapien
aataatgtaaaaagaatgtgtttctggagtctt

SEQ ID NO: 2815 - DNA, 33 bp, Homo sapien
gataagaactttacaacggctttgaggaactca

SEQ ID NO: 2816 - DNA, 33 bp, Homo sapien
gataagaactttacaatggctttgaggaactca

SEQ ID NO: 2817 - DNA, 33 bp, Homo sapien
gattgcagtgatctgagatcgtgctactacact

SEQ ID NO: 2818 - DNA, 33 bp, Homo sapien
gattgcagtgatctgatatcgtgctactacact

SEQ ID NO: 2819 - DNA, 33 bp, Homo sapien
caacagacggaagccaatgctagaagacagaac

SEQ ID NO: 2820 - DNA, 33 bp, Homo sapien
caacagacggaagccagtgctagaagacagaac

SEQ ID NO: 2821 - DNA, 33 bp, Homo sapien
agtgtggggtgaaataagtttataatgcacatg

SEQ ID NO: 2822 - DNA, 33 bp, Homo sapien
agtgtggggtgaaatacgtttataatgcacatg

SEQ ID NO: 2823 - DNA, 33 bp, Homo sapien
aggaggagtttgtggcaccttaccctagtgcca

SEQ ID NO: 2824 - DNA, 33 bp, Homo sapien
aggaggagtttgtggcgccttaccctagtgcca

SEQ ID NO: 2825 - DNA, 33 bp, Homo sapien
aaagcaacagatactgaaacatttaaagcaccc

SEQ ID NO: 2826 - DNA, 33 bp, Homo sapien
aaagcaacagatactggaacatttaaagcaccc

SEQ ID NO: 2827 - DNA, 33 bp, Homo sapien
tgacacagcaagacaacgtttcaaaaaatattt

SEQ ID NO: 2828 - DNA, 33 bp, Homo sapien
tgacacagcaagacaatgtttcaaaaaatattt

SEQ ID NO: 2829 - DNA, 33 bp, Homo sapien
agacacagaggccccaaataaggaaagccaact

SEQ ID NO: 2830 - DNA, 33 bp, Homo sapien
agacacagaggccccagataaggaaagccaact

SEQ ID NO: 2831 - DNA, 33 bp, Homo sapien
gacaaggggggaaccacgatggctttgatatat

SEQ ID NO: 2832 - DNA, 33 bp, Homo sapien
gacaaggggggaaccatgatggctttgatatat

SEQ ID NO: 2833 - DNA, 33 bp, Homo sapien
acagacttttggtgataataacgtgttcacgca

SEQ ID NO: 2834 - DNA, 33 bp, Homo sapien
acagacttttggtgatgataacgtgttcacgca

SEQ ID NO: 2835 - DNA, 33 bp, Homo sapien
cccacaagacacctccccaaacttgatctggtt

SEQ ID NO: 2836 - DNA, 33 bp, Homo sapien
cccacaagacacctcctcaaacttgatctggtt

SEQ ID NO: 2837 - DNA, 33 bp, Homo sapien
cagggagagtctcagacgatgatgcagaaccgt

SEQ ID NO: 2838 - DNA, 33 bp, Homo sapien
cagggagagtctcagatgatgatgcagaaccgt

SEQ ID NO: 2839 - DNA, 33 bp, Homo sapien
gccccagacatttggcacaaacttaaaaaggtc

SEQ ID NO: 2840 - DNA, 33 bp, Homo sapien
gccccagacatttggcgcaaacttaaaaaggtc

SEQ ID NO: 2841 - DNA, 33 bp, Homo sapien
agtacagacagtgaaaagttgggtgatatcagg

SEQ ID NO: 2842 - DNA, 33 bp, Homo sapien
agtacagacagtgaaaggttgggtgatatcagg

SEQ ID NO: 2843 - DNA, 33 bp, Homo sapien
acagctccaggcatcaaacctaattttaggacc

SEQ ID NO: 2844 - DNA, 33 bp, Homo sapien
acagctccaggcatcagacctaattttaggacc

SEQ ID NO: 2845 - DNA, 33 bp, Homo sapien
tgccaaaaacagaaaactctctccaactcattt

SEQ ID NO: 2846 - DNA, 33 bp, Homo sapien
tgccaaaaacagaaaagtctctccaactcattt

SEQ ID NO: 2847 - DNA, 33 bp, Homo sapien
gcataactgaactgtacacctcaaaatgattag

SEQ ID NO: 2848 - DNA, 33 bp, Homo sapien
gcataactgaactgtatacctcaaaatgattag

SEQ ID NO: 2849 - DNA, 33 bp, Homo sapien
acttattcactctcaaaagaaagagcacgggaa

SEQ ID NO: 2850 - DNA, 33 bp, Homo sapien
acttattcactctcaagagaaagagcacgggaa

SEQ ID NO: 2851 - DNA, 33 bp, Homo sapien
tcatgttcaaaggtgacggaaaatttcaggttt

SEQ ID NO: 2852 - DNA, 33 bp, Homo sapien
tcatgttcaaaggtgatggaaaatttcaggttt

SEQ ID NO: 2853 - DNA, 33 bp, Homo sapien
ctgacacctgcagggcgcttgggcacacctaag

SEQ ID NO: 2854 - DNA, 33 bp, Homo sapien
ctgacacctgcagggctcttgggcacacctaag

SEQ ID NO: 2855 - DNA, 33 bp, Homo sapien
tgcagacgcccacaccagcttgaatggcataaa

SEQ ID NO: 2856 - DNA, 33 bp, Homo sapien
tgcagacgcccacaccggcttgaatggcataaa

SEQ ID NO: 2857 - DNA, 33 bp, Homo sapien
atcaacctacagaggacgaaggtgcggtacaac

SEQ ID NO: 2858 - DNA, 33 bp, Homo sapien
atcaacctacagaggatgaaggtgcggtacaac

SEQ ID NO: 2859 - DNA, 33 bp, Homo sapien
agcagggagttgagtcaaaagatggatgctgcc

SEQ ID NO: 2860 - DNA, 33 bp, Homo sapien
agcagggagttgagtcgaaagatggatgctgcc

SEQ ID NO: 2861 - DNA, 33 bp, Homo sapien
gatctctatgggcaacacttgctgagtgcgggc

SEQ ID NO: 2862 - DNA, 33 bp, Homo sapien
gatctctatgggcaacgcttgctgagtgcgggc

SEQ ID NO: 2863 - DNA, 33 bp, Homo sapien
caaatcctaccaaaatcaagatggccacgagag

SEQ ID NO: 2864 - DNA, 33 bp, Homo sapien
caaatcctaccaaaatgaagatggccacgagag

SEQ ID NO: 2865 - DNA, 33 bp, Homo sapien
atggtggagggcaggccgatctgcactggagag

SEQ ID NO: 2866 - DNA, 33 bp, Homo sapien
atggtggagggcaggctgatctgcactggagag

SEQ ID NO: 2867 - DNA, 33 bp, Homo sapien
atgtagtggttcaatgccagctgctttccagac

SEQ ID NO: 2868 - DNA, 33 bp, Homo sapien
atgtagtggttcaatgtcagctgctttccagac

SEQ ID NO: 2869 - DNA, 33 bp, Homo sapien
atgttattttagacacagtatttttcatctaca

SEQ ID NO: 2870 - DNA, 33 bp, Homo sapien
atgttattttagacacggtatttttcatctaca

SEQ ID NO: 2871 - DNA, 33 bp, Homo sapien
caccttgaaggaattccgaagccctagctgtgg

SEQ ID NO: 2872 - DNA, 33 bp, Homo sapien
caccttgaaggaattctgaagccctagctgtgg

SEQ ID NO: 2873 - DNA, 33 bp, Homo sapien
gacctcttcttgcagaaaacttggtcaacaatt

SEQ ID NO: 2874 - DNA, 33 bp, Homo sapien
gacctcttcttgcagataacttggtcaacaatt

SEQ ID NO: 2875 - DNA, 33 bp, Homo sapien
aatgtgagacccaaagaaagatattgaggtggg

SEQ ID NO: 2876 - DNA, 33 bp, Homo sapien
aatgtgagacccaaaggaagatattgaggtggg

SEQ ID NO: 2877 - DNA, 33 bp, Homo sapien
aatagaggagtgtcaaaaaaatttgcagagata

SEQ ID NO: 2878 - DNA, 33 bp, Homo sapien
aatagaggagtgtcaagaaaatttgcagagata

SEQ ID NO: 2879 - DNA, 33 bp, Homo sapien
tggagaaaggaagccacgtcgccaggaaggcaa

SEQ ID NO: 2880 - DNA, 33 bp, Homo sapien
tggagaaaggaagccatgtcgccaggaaggcaa

SEQ ID NO: 2881 - DNA, 33 bp, Homo sapien
ttcaacatccattggcagaatacctgtttacac

SEQ ID NO: 2882 - DNA, 33 bp, Homo sapien
ttcaacatccattggcggaatacctgtttacac

SEQ ID NO: 2883 - DNA, 33 bp, Homo sapien
gactgtgaagactctaataacattccctgaaga

SEQ ID NO: 2884 - DNA, 33 bp, Homo sapien
gactgtgaagactctagtaacattccctgaaga

SEQ ID NO: 2885 - DNA, 33 bp, Homo sapien
ggccctgaatacagaccatgaggaaccttagtc

SEQ ID NO: 2886 - DNA, 33 bp, Homo sapien
ggccctgaatacagactatgaggaaccttagtc

SEQ ID NO: 2887 - DNA, 33 bp, Homo sapien
tgggtgacttcagccactgcttgatccctgagg

SEQ ID NO: 2888 - DNA, 33 bp, Homo sapien
tgggtgacttcagccattgcttgatccctgagg

SEQ ID NO: 2889 - DNA, 33 bp, Homo sapien
cggttagtttggctgaagtccgttgacccggtt

SEQ ID NO: 2890 - DNA, 33 bp, Homo sapien
cggttagtttggctgaggtccgttgacccggtt

SEQ ID NO: 2891 - DNA, 33 bp, Homo sapien
aagagagagcttgtgcagaaatactcttcctta

SEQ ID NO: 2892 - DNA, 33 bp, Homo sapien
aagagagagcttgtgcggaaatactcttcctta

SEQ ID NO: 2893 - DNA, 33 bp, Homo sapien
cttgcctgtaggaggcaccatcttgcctttggg

SEQ ID NO: 2894 - DNA, 33 bp, Homo sapien
cttgcctgtaggaggcgccatcttgcctttggg

SEQ ID NO: 2895 - DNA, 33 bp, Homo sapien
cagtggccttccgacacattcagaatagaatct

SEQ ID NO: 2896 - DNA, 33 bp, Homo sapien
cagtggccttccgacagattcagaatagaatct

SEQ ID NO: 2897 - DNA, 33 bp, Homo sapien
caagtagacttggagaacttggtatgaactcac

SEQ ID NO: 2898 - DNA, 33 bp, Homo sapien
caagtagacttggagaccttggtatgaactcac

SEQ ID NO: 2899 - DNA, 33 bp, Homo sapien
ttcagaagtagtccagacattacagaaatccca

SEQ ID NO: 2900 - DNA, 33 bp, Homo sapien
ttcagaagtagtccaggcattacagaaatccca

SEQ ID NO: 2901 - DNA, 33 bp, Homo sapien
taattctctcttcggacgtaataaacctgctac

SEQ ID NO: 2902 - DNA, 33 bp, Homo sapien
taattctctcttcggatgtaataaacctgctac

SEQ ID NO: 2903 - DNA, 33 bp, Homo sapien
gtgtccttaagatgtcacgctcccccgtataaa

SEQ ID NO: 2904 - DNA, 33 bp, Homo sapien
gtgtccttaagatgtcgcgctcccccgtataaa

SEQ ID NO: 2905 - DNA, 33 bp, Homo sapien
aaagggcagtatgagcagaagcaagtcctgggt

SEQ ID NO: 2906 - DNA, 33 bp, Homo sapien
aaagggcagtatgagccgaagcaagtcctgggt

SEQ ID NO: 2907 - DNA, 33 bp, Homo sapien
ctgttaggacacccaacgaaataacctgggcac

SEQ ID NO: 2908 - DNA, 33 bp, Homo sapien
ctgttaggacacccaatgaaataacctgggcac

SEQ ID NO: 2909 - DNA, 33 bp, Homo sapien
atccatagtcttgagactactccattccttgaa

SEQ ID NO: 2910 - DNA, 33 bp, Homo sapien
atccatagtcttgagattactccattccttgaa

SEQ ID NO: 2911 - DNA, 33 bp, Homo sapien
gtgaatatggagtgaacacccagtcttttctgt

SEQ ID NO: 2912 - DNA, 33 bp, Homo sapien
gtgaatatggagtgaatacccagtcttttctgt

SEQ ID NO: 2913 - DNA, 33 bp, Homo sapien
catgtggccatctgaaacatttcctttcgcaat

SEQ ID NO: 2914 - DNA, 33 bp, Homo sapien
catgtggccatctgaatcatttcctttcgcaat

SEQ ID NO: 2915 - DNA, 33 bp, Homo sapien
catcttgaatagggaccgagtaaagtgaggctg

SEQ ID NO: 2916 - DNA, 33 bp, Homo sapien
catcttgaatagggacggagtaaagtgaggctg

SEQ ID NO: 2917 - DNA, 33 bp, Homo sapien
ttagcggatttggaagacctaaagcggggtcct

SEQ ID NO: 2918 - DNA, 33 bp, Homo sapien
ttagcggatttggaaggcctaaagcggggtcct

SEQ ID NO: 2919 - DNA, 33 bp, Homo sapien
ttccaggatcctgcccacagaagggcaacttca

SEQ ID NO: 2920 - DNA, 33 bp, Homo sapien
ttccaggatcctgcccgcagaagggcaacttca

SEQ ID NO: 2921 - DNA, 33 bp, Homo sapien
gtaattgttactagacacgcatgcttcattcag

SEQ ID NO: 2922 - DNA, 33 bp, Homo sapien
gtaattgttactagacccgcatgcttcattcag

SEQ ID NO: 2923 - DNA, 33 bp, Homo sapien
agatgtgggtccctcaaattgtaaacagtgctg

SEQ ID NO: 2924 - DNA, 33 bp, Homo sapien
agatgtgggtccctcagattgtaaacagtgctg

SEQ ID NO: 2925 - DNA, 33 bp, Homo sapien
tgcaccagaagcccccactattgatgctctcgg

SEQ ID NO: 2926 - DNA, 33 bp, Homo sapien
tgcaccagaagcccccgctattgatgctctcgg

SEQ ID NO: 2927 - DNA, 33 bp, Homo sapien
aggacactagcagacacaggataaaaacgataa

SEQ ID NO: 2928 - DNA, 33 bp, Homo sapien
aggacactagcagacataggataaaaacgataa

SEQ ID NO: 2929 - DNA, 33 bp, Homo sapien
agccgctgcagtggaacggccaccaggaccagg

SEQ ID NO: 2930 - DNA, 33 bp, Homo sapien
agccgctgcagtggaatggccaccaggaccagg

SEQ ID NO: 2931 - DNA, 33 bp, Homo sapien
taagtgactgccggccaagaaagacaaccccct

SEQ ID NO: 2932 - DNA, 33 bp, Homo sapien
taagtgactgccggccgagaaagacaaccccct

SEQ ID NO: 2933 - DNA, 33 bp, Homo sapien
acacagtggcagaaaaattccttcaaggggact

SEQ ID NO: 2934 - DNA, 33 bp, Homo sapien
acacagtggcagaaaacttccttcaaggggact

SEQ ID NO: 2935 - DNA, 33 bp, Homo sapien
gaatcagcagagggacagcattctaacacatca

SEQ ID NO: 2936 - DNA, 33 bp, Homo sapien
gaatcagcagagggacggcattctaacacatca

SEQ ID NO: 2937 - DNA, 33 bp, Homo sapien
actgaagaatagaaacagcaaggccaagaggag

SEQ ID NO: 2938 - DNA, 33 bp, Homo sapien
actgaagaatagaaaccgcaaggccaagaggag

SEQ ID NO: 2939 - DNA, 33 bp, Homo sapien
taccagtctgctgtgacgatgacgggatgatga

SEQ ID NO: 2940 - DNA, 33 bp, Homo sapien
taccagtctgctgtgatgatgacgggatgatga

SEQ ID NO: 2941 - DNA, 33 bp, Homo sapien
ttagttcaagaatatacggtgcagggctgagca

SEQ ID NO: 2942 - DNA, 33 bp, Homo sapien
ttagttcaagaatatatggtgcagggctgagca

SEQ ID NO: 2943 - DNA, 33 bp, Homo sapien
cctggagtccactgcaagcacaagcaggcaaag

SEQ ID NO: 2944 - DNA, 33 bp, Homo sapien
cctggagtccactgcaggcacaagcaggcaaag

SEQ ID NO: 2945 - DNA, 33 bp, Homo sapien
tgcacagatgaactgaggaatcaataaataagt

SEQ ID NO: 2946 - DNA, 33 bp, Homo sapien
tgcacagatgaactgatgaatcaataaataagt

SEQ ID NO: 2947 - DNA, 33 bp, Homo sapien
taacttacaagccacagtcaagagggctttgga

SEQ ID NO: 2948 - DNA, 33 bp, Homo sapien
taacttacaagccacattcaagagggctttgga

SEQ ID NO: 2949 - DNA, 33 bp, Homo sapien
aggcctggagcgttccaagatcagcaaggaggc

SEQ ID NO: 2950 - DNA, 33 bp, Homo sapien
aggcctggagcgttccgagatcagcaaggaggc

SEQ ID NO: 2951 - DNA, 33 bp, Homo sapien
aatacctgccgattgacaaggccttttcagatc

SEQ ID NO: 2952 - DNA, 33 bp, Homo sapien
aatacctgccgattgataaggccttttcagatc

SEQ ID NO: 2953 - DNA, 33 bp, Homo sapien
agtagctagtaagacaagagcggacctcggacg

SEQ ID NO: 2954 - DNA, 33 bp, Homo sapien
agtagctagtaagacaggagcggacctcggacg

SEQ ID NO: 2955 - DNA, 33 bp, Homo sapien
aaagaaattttagatcgcaccataaatcactca

SEQ ID NO: 2956 - DNA, 33 bp, Homo sapien
aaagaaattttagatctcaccataaatcactca

SEQ ID NO: 2957 - DNA, 33 bp, Homo sapien
ctccttgtgatccctcccaaagcaaaagggtat

SEQ ID NO: 2958 - DNA, 33 bp, Homo sapien
ctccttgtgatccctcgcaaagcaaaagggtat

SEQ ID NO: 2959 - DNA, 33 bp, Homo sapien
cctgtttgcacctccaatcgtggcgatgagaag

SEQ ID NO: 2960 - DNA, 33 bp, Homo sapien
cctgtttgcacctccagtcgtggcgatgagaag

SEQ ID NO: 2961 - DNA, 33 bp, Homo sapien
atcacaaagtcaaacgcaggtcatgattcgtaa

SEQ ID NO: 2962 - DNA, 33 bp, Homo sapien
atcacaaagtcaaacgtaggtcatgattcgtaa

SEQ ID NO: 2963 - DNA, 33 bp, Homo sapien
catttatgggtttgctaaatatcccaagagcca

SEQ ID NO: 2964 - DNA, 33 bp, Homo sapien
catttatgggtttgctgaatatcccaagagcca

SEQ ID NO: 2965 - DNA, 33 bp, Homo sapien
tatgcggtgcaagcaaaactttagtttcattca

SEQ ID NO: 2966 - DNA, 33 bp, Homo sapien
tatgcggtgcaagcaacactttagtttcattca

SEQ ID NO: 2967 - DNA, 33 bp, Homo sapien
catcttagcaaagacacaggaacgatctatgcg

SEQ ID NO: 2968 - DNA, 33 bp, Homo sapien
catcttagcaaagacataggaacgatctatgcg

SEQ ID NO: 2969 - DNA, 33 bp, Homo sapien
gcccagactttagacaccaactattcccagtag

SEQ ID NO: 2970 - DNA, 33 bp, Homo sapien
gcccagactttagacatcaactattcccagtag

SEQ ID NO: 2971 - DNA, 33 bp, Homo sapien
ctgttaaaccactttccctaatcacagactttc

SEQ ID NO: 2972 - DNA, 33 bp, Homo sapien
ctgttaaaccactttctctaatcacagactttc

SEQ ID NO: 2973 - DNA, 33 bp, Homo sapien
ggtgaatggattaataccgcatagttgtcacct

SEQ ID NO: 2974 - DNA, 33 bp, Homo sapien
ggtgaatggattaatatcgcatagttgtcacct

SEQ ID NO: 2975 - DNA, 33 bp, Homo sapien
ttgattgctggtgagaaatttggttgtgcggtt

SEQ ID NO: 2976 - DNA, 33 bp, Homo sapien
ttgattgctggtgagacatttggttgtgcggtt

SEQ ID NO: 2977 - DNA, 33 bp, Homo sapien
ctgtactcaaggtcgacgtttcttgccttaagc

SEQ ID NO: 2978 - DNA, 33 bp, Homo sapien
ctgtactcaaggtcgatgtttcttgccttaagc

SEQ ID NO: 2979 - DNA, 33 bp, Homo sapien
tttgctttctttccatcatgaagacgattaggt

SEQ ID NO: 2980 - DNA, 33 bp, Homo sapien
tttgctttctttccattatgaagacgattaggt

SEQ ID NO: 2981 - DNA, 33 bp, Homo sapien
atctgtaaggaggctaataacagcgcccacctc

SEQ ID NO: 2982 - DNA, 33 bp, Homo sapien
atctgtaaggaggctagtaacagcgcccacctc

SEQ ID NO: 2983 - DNA, 33 bp, Homo sapien
cggggccagcaaaagcaaaaaggatggagtaag

SEQ ID NO: 2984 - DNA, 33 bp, Homo sapien
cggggccagcaaaagcgaaaaggatggagtaag

SEQ ID NO: 2985 - DNA, 33 bp, Homo sapien
agagaggagggaaatgaaatccggcacaggggc

SEQ ID NO: 2986 - DNA, 33 bp, Homo sapien
agagaggagggaaatgcaatccggcacaggggc

SEQ ID NO: 2987 - DNA, 33 bp, Homo sapien
gctagtagctttgttacgtatttccggaagccc

SEQ ID NO: 2988 - DNA, 33 bp, Homo sapien
gctagtagctttgttatgtatttccggaagccc

SEQ ID NO: 2989 - DNA, 33 bp, Homo sapien
ctcttacccgagctataagtcagctgttgtggg

SEQ ID NO: 2990 - DNA, 33 bp, Homo sapien
ctcttacccgagctatgagtcagctgttgtggg

SEQ ID NO: 2991 - DNA, 33 bp, Homo sapien
ccatagaaatcaggacagcctagtgaacagaaa

SEQ ID NO: 2992 - DNA, 33 bp, Homo sapien
ccatagaaatcaggacggcctagtgaacagaaa

SEQ ID NO: 2993 - DNA, 33 bp, Homo sapien
cctgacactactggaccccgagaaatttcacta

SEQ ID NO: 2994 - DNA, 33 bp, Homo sapien
cctgacactactggactccgagaaatttcacta

SEQ ID NO: 2995 - DNA, 33 bp, Homo sapien
ggaatacccaggtagacggtaaagcattgatta

SEQ ID NO: 2996 - DNA, 33 bp, Homo sapien
ggaatacccaggtagatggtaaagcattgatta

SEQ ID NO: 2997 - DNA, 33 bp, Homo sapien
ccccctttgggcctgacatgtcttggaaaacac

SEQ ID NO: 2998 - DNA, 33 bp, Homo sapien
ccccctttgggcctgatatgtcttggaaaacac

SEQ ID NO: 2999 - DNA, 33 bp, Homo sapien
acttccccaagcttcacaaatgcaaggcaacct

SEQ ID NO: 3000 - DNA, 33 bp, Homo sapien
acttccccaagcttcataaatgcaaggcaacct

SEQ ID NO: 3001 - DNA, 33 bp, Homo sapien
cctgtgtgattttacgaaacttgtcctgacccg

SEQ ID NO: 3002 - DNA, 33 bp, Homo sapien
cctgtgtgattttacggaacttgtcctgacccg

SEQ ID NO: 3003 - DNA, 33 bp, Homo sapien
ccctgtgggggacaacaacaatgtctgttttat

SEQ ID NO: 3004 - DNA, 33 bp, Homo sapien
ccctgtgggggacaaccacaatgtctgttttat

SEQ ID NO: 3005 - DNA, 33 bp, Homo sapien
gagacgatgctggtaccctactcagcctgatgc

SEQ ID NO: 3006 - DNA, 33 bp, Homo sapien
gagacgatgctggtactctactcagcctgatgc

SEQ ID NO: 3007 - DNA, 33 bp, Homo sapien
gagaatctgctgaaaacgtgcaaaaatgagagc

SEQ ID NO: 3008 - DNA, 33 bp, Homo sapien
gagaatctgctgaaaatgtgcaaaaatgagagc

SEQ ID NO: 3009 - DNA, 33 bp, Homo sapien
caaaaatagaaatgaaactggatgagataaaaa

SEQ ID NO: 3010 - DNA, 33 bp, Homo sapien
caaaaatagaaatgaagctggatgagataaaaa

SEQ ID NO: 3011 - DNA, 33 bp, Homo sapien
cacatgcttctgtatcaatagattacatacatt

SEQ ID NO: 3012 - DNA, 33 bp, Homo sapien
cacatgcttctgtatcgatagattacatacatt

SEQ ID NO: 3013 - DNA, 33 bp, Homo sapien
cctgttttagttatgcacttgcctggcgatcga

SEQ ID NO: 3014 - DNA, 33 bp, Homo sapien
cctgttttagttatgcgcttgcctggcgatcga

SEQ ID NO: 3015 - DNA, 33 bp, Homo sapien
aacacactcatcagccgctgggttaccccgaac

SEQ ID NO: 3016 - DNA, 33 bp, Homo sapien
aacacactcatcagcctctgggttaccccgaac

SEQ ID NO: 3017 - DNA, 33 bp, Homo sapien
ctactgggacaaaagcaaaaaaatgagaaggaa

SEQ ID NO: 3018 - DNA, 33 bp, Homo sapien
ctactgggacaaaagcgaaaaaatgagaaggaa

SEQ ID NO: 3019 - DNA, 33 bp, Homo sapien
accatagaattgcctaataaagctccaggcaca

SEQ ID NO: 3020 - DNA, 33 bp, Homo sapien
accatagaattgcctactaaagctccaggcaca

SEQ ID NO: 3021 - DNA, 33 bp, Homo sapien
ccgattatactgtttcaaaattacagattttaa

SEQ ID NO: 3022 - DNA, 33 bp, Homo sapien
ccgattatactgtttcgaaattacagattttaa

SEQ ID NO: 3023 - DNA, 33 bp, Homo sapien
agggcttttgccgtcaaaggatgtaagggacat

SEQ ID NO: 3024 - DNA, 33 bp, Homo sapien
agggcttttgccgtcacaggatgtaagggacat

SEQ ID NO: 3025 - DNA, 33 bp, Homo sapien
taggaaataaatgaaactggaaatgcaataacg

SEQ ID NO: 3026 - DNA, 33 bp, Homo sapien
taggaaataaatgaaagtggaaatgcaataacg

SEQ ID NO: 3027 - DNA, 33 bp, Homo sapien
tccatctgtccattcactcatgaggcaccgtta

SEQ ID NO: 3028 - DNA, 33 bp, Homo sapien
tccatctgtccattcattcatgaggcaccgtta

SEQ ID NO: 3029 - DNA, 33 bp, Homo sapien
caattcattatacacgcatccatccattattca

SEQ ID NO: 3030 - DNA, 33 bp, Homo sapien
caattcattatacacgtatccatccattattca

SEQ ID NO: 3031 - DNA, 33 bp, Homo sapien
atgagtcccttctaccacctgcaagtcccacgt

SEQ ID NO: 3032 - DNA, 33 bp, Homo sapien
atgagtcccttctaccgcctgcaagtcccacgt

SEQ ID NO: 3033 - DNA, 33 bp, Homo sapien
ccacatctattttccaatctggaacctctaaag

SEQ ID NO: 3034 - DNA, 33 bp, Homo sapien
ccacatctattttccagtctggaacctctaaag

SEQ ID NO: 3035 - DNA, 33 bp, Homo sapien
gtcgttcttgggacaccgagcaaaacattggag

SEQ ID NO: 3036 - DNA, 33 bp, Homo sapien
gtcgttcttgggacactgagcaaaacattggag

SEQ ID NO: 3037 - DNA, 33 bp, Homo sapien
aagctgttacaaaataaaagaatggaccttagg

SEQ ID NO: 3038 - DNA, 33 bp, Homo sapien
aagctgttacaaaatagaagaatggaccttagg

SEQ ID NO: 3039 - DNA, 33 bp, Homo sapien
gcctccatgggacaaggaccgattccaacacag

SEQ ID NO: 3040 - DNA, 33 bp, Homo sapien
gcctccatgggacaagtaccgattccaacacag

SEQ ID NO: 3041 - DNA, 33 bp, Homo sapien
tcagggtgaaatccccaattcggtcctggtact

SEQ ID NO: 3042 - DNA, 33 bp, Homo sapien
tcagggtgaaatccccgattcggtcctggtact

SEQ ID NO: 3043 - DNA, 33 bp, Homo sapien
aggcagaaatttcacaaacagctttgcaatgag

SEQ ID NO: 3044 - DNA, 33 bp, Homo sapien
aggcagaaatttcacagacagctttgcaatgag

SEQ ID NO: 3045 - DNA, 33 bp, Homo sapien
atgtatctggcacagaaaaaagggtcatgatat

SEQ ID NO: 3046 - DNA, 33 bp, Homo sapien
atgtatctggcacagagaaaagggtcatgatat

SEQ ID NO: 3047 - DNA, 33 bp, Homo sapien
ctgatcattttcactcaaccaacatgtgcttat

SEQ ID NO: 3048 - DNA, 33 bp, Homo sapien
ctgatcattttcactccaccaacatgtgcttat

SEQ ID NO: 3049 - DNA, 33 bp, Homo sapien
ctggaatggattgttacggatgattaccatgtt

SEQ ID NO: 3050 - DNA, 33 bp, Homo sapien
ctggaatggattgttatggatgattaccatgtt

SEQ ID NO: 3051 - DNA, 33 bp, Homo sapien
aggctcaaaaaggtcaagttatcccggcaccag

SEQ ID NO: 3052 - DNA, 33 bp, Homo sapien
aggctcaaaaaggtcaggttatcccggcaccag

SEQ ID NO: 3053 - DNA, 33 bp, Homo sapien
tggcttctcaggctgtaaacttagagttcttca

SEQ ID NO: 3054 - DNA, 33 bp, Homo sapien
tggcttctcaggctgtgaacttagagttcttca

SEQ ID NO: 3055 - DNA, 33 bp, Homo sapien
atttatcaacaatacaagttcacttctcaagag

SEQ ID NO: 3056 - DNA, 33 bp, Homo sapien
atttatcaacaatacaggttcacttctcaagag

SEQ ID NO: 3057 - DNA, 33 bp, Homo sapien
tgtgcactcaagttacaggttcttcaggctctg

SEQ ID NO: 3058 - DNA, 33 bp, Homo sapien
tgtgcactcaagttacgggttcttcaggctctg

SEQ ID NO: 3059 - DNA, 33 bp, Homo sapien
cccagtggagcaaacacctgggttcctaagtca

SEQ ID NO: 3060 - DNA, 33 bp, Homo sapien
cccagtggagcaaacatctgggttcctaagtca

SEQ ID NO: 3061 - DNA, 33 bp, Homo sapien
acgcctggccgagacacgttttcaagccttgag

SEQ ID NO: 3062 - DNA, 33 bp, Homo sapien
acgcctggccgagacatgttttcaagccttgag

SEQ ID NO: 3063 - DNA, 33 bp, Homo sapien
ctaccttcagcaaatagaatggaacaagacgtt

SEQ ID NO: 3064 - DNA, 33 bp, Homo sapien
ctaccttcagcaaatataatggaacaagacgtt

SEQ ID NO: 3065 - DNA, 33 bp, Homo sapien
tgaggacggggaacacactcatgtaaggatgtg

SEQ ID NO: 3066 - DNA, 33 bp, Homo sapien
tgaggacggggaacacgctcatgtaaggatgtg

SEQ ID NO: 3067 - DNA, 33 bp, Homo sapien
taacagctcaatccagcagatgtggactgtgcc

SEQ ID NO: 3068 - DNA, 33 bp, Homo sapien
taacagctcaatccaggagatgtggactgtgcc

SEQ ID NO: 3069 - DNA, 33 bp, Homo sapien
aggagcctgagggcaactgctgcgaggaaccac

SEQ ID NO: 3070 - DNA, 33 bp, Homo sapien
aggagcctgagggcaagtgctgcgaggaaccac

SEQ ID NO: 3071 - DNA, 33 bp, Homo sapien
tctttcactagtgatacgcactcaagcttcctt

SEQ ID NO: 3072 - DNA, 33 bp, Homo sapien
tctttcactagtgatatgcactcaagcttcctt

SEQ ID NO: 3073 - DNA, 33 bp, Homo sapien
ctgcattctcttgacactgacttacacagagta

SEQ ID NO: 3074 - DNA, 33 bp, Homo sapien
ctgcattctcttgacagtgacttacacagagta

SEQ ID NO: 3075 - DNA, 33 bp, Homo sapien
cagcggtggatgcgccaaatttgtttttgtttt

SEQ ID NO: 3076 - DNA, 33 bp, Homo sapien
cagcggtggatgcgccgaatttgtttttgtttt

SEQ ID NO: 3077 - DNA, 33 bp, Homo sapien
cacccaggctgaagtacagtagtgtcatctcac

SEQ ID NO: 3078 - DNA, 33 bp, Homo sapien
cacccaggctgaagtatagtagtgtcatctcac

SEQ ID NO: 3079 - DNA, 33 bp, Homo sapien
ccaattaaaagcgactcagaaaatcctgaaagg

SEQ ID NO: 3080 - DNA, 33 bp, Homo sapien
ccaattaaaagcgacttagaaaatcctgaaagg

SEQ ID NO: 3081 - DNA, 33 bp, Homo sapien
tacactccctgtcttacggctccccagaactaa

SEQ ID NO: 3082 - DNA, 33 bp, Homo sapien
tacactccctgtcttatggctccccagaactaa

SEQ ID NO: 3083 - DNA, 33 bp, Homo sapien
aatagttaacactgaactgcaaactgattacct

SEQ ID NO: 3084 - DNA, 33 bp, Homo sapien
aatagttaacactgaattgcaaactgattacct

SEQ ID NO: 3085 - DNA, 33 bp, Homo sapien
ctcactgtgccacacactgcagctgtcctcagg

SEQ ID NO: 3086 - DNA, 33 bp, Homo sapien
ctcactgtgccacacattgcagctgtcctcagg

SEQ ID NO: 3087 - DNA, 33 bp, Homo sapien
gatgctggccccagaacagcaggaggaacaagg

SEQ ID NO: 3088 - DNA, 33 bp, Homo sapien
gatgctggccccagaatagcaggaggaacaagg

SEQ ID NO: 3089 - DNA, 33 bp, Homo sapien
gagaccaaatggcttccaaagcttaaaatacta

SEQ ID NO: 3090 - DNA, 33 bp, Homo sapien
gagaccaaatggcttctaaagcttaaaatacta

SEQ ID NO: 3091 - DNA, 33 bp, Homo sapien
ggacagcacactatgaaccgtggaggagctgcc

SEQ ID NO: 3092 - DNA, 33 bp, Homo sapien
ggacagcacactatgacccgtggaggagctgcc

SEQ ID NO: 3093 - DNA, 33 bp, Homo sapien
aactcagctcaagtacaaaactaatttttctgt

SEQ ID NO: 3094 - DNA, 33 bp, Homo sapien
aactcagctcaagtacgaaactaatttttctgt

SEQ ID NO: 3095 - DNA, 33 bp, Homo sapien
ccactctggaccccacagaagacacctatggtg

SEQ ID NO: 3096 - DNA, 33 bp, Homo sapien
ccactctggaccccacggaagacacctatggtg

SEQ ID NO: 3097 - DNA, 33 bp, Homo sapien
tctctaaggctccttaacaacctaaagatgggt

SEQ ID NO: 3098 - DNA, 33 bp, Homo sapien
tctctaaggctccttatcaacctaaagatgggt

SEQ ID NO: 3099 - DNA, 33 bp, Homo sapien
gtgatggtctgtggcaatctatctgggcggttg

SEQ ID NO: 3100 - DNA, 33 bp, Homo sapien
gtgatggtctgtggcattctatctgggcggttg

SEQ ID NO: 3101 - DNA, 33 bp, Homo sapien
acaaaaaccctgaagacaacggttgaggttgag

SEQ ID NO: 3102 - DNA, 33 bp, Homo sapien
acaaaaaccctgaagataacggttgaggttgag

SEQ ID NO: 3103 - DNA, 33 bp, Homo sapien
caagtagtttctccagaatcccagctctttccg

SEQ ID NO: 3104 - DNA, 33 bp, Homo sapien
caagtagtttctccaggatcccagctctttccg

SEQ ID NO: 3105 - DNA, 33 bp, Homo sapien
ggagggcagtggttcaatcacggttttctgcag

SEQ ID NO: 3106 - DNA, 33 bp, Homo sapien
ggagggcagtggttcactcacggttttctgcag

SEQ ID NO: 3107 - DNA, 33 bp, Homo sapien
tgacacctctgtaagacacacttgccagcaacc

SEQ ID NO: 3108 - DNA, 33 bp, Homo sapien
tgacacctctgtaagagacacttgccagcaacc

SEQ ID NO: 3109 - DNA, 33 bp, Homo sapien
gaaagggctttccttacgatcctgtctcatttc

SEQ ID NO: 3110 - DNA, 33 bp, Homo sapien
gaaagggctttccttatgatcctgtctcatttc

SEQ ID NO: 3111 - DNA, 33 bp, Homo sapien
ctctactcagttatccaattattcatgactaga

SEQ ID NO: 3112 - DNA, 33 bp, Homo sapien
ctctactcagttatccgattattcatgactaga

SEQ ID NO: 3113 - DNA, 33 bp, Homo sapien
acctaccagaaactcacgcttctcctcccaccg

SEQ ID NO: 3114 - DNA, 33 bp, Homo sapien
acctaccagaaactcatgcttctcctcccaccg

SEQ ID NO: 3115 - DNA, 33 bp, Homo sapien
cattcatcctcacctacgactttgtccatgtga

SEQ ID NO: 3116 - DNA, 33 bp, Homo sapien
cattcatcctcacctatgactttgtccatgtga

SEQ ID NO: 3117 - DNA, 33 bp, Homo sapien
catcttactaaagccccagaacttccccatgtt

SEQ ID NO: 3118 - DNA, 33 bp, Homo sapien
catcttactaaagcccgagaacttccccatgtt

SEQ ID NO: 3119 - DNA, 33 bp, Homo sapien
ctcaagttgacttcaaccctgtgctcctctata

SEQ ID NO: 3120 - DNA, 33 bp, Homo sapien
ctcaagttgacttcaatcctgtgctcctctata

SEQ ID NO: 3121 - DNA, 33 bp, Homo sapien
gtgtgcagaaggggccaagaggcttaggagatt

SEQ ID NO: 3122 - DNA, 33 bp, Homo sapien
gtgtgcagaaggggccgagaggcttaggagatt

SEQ ID NO: 3123 - DNA, 33 bp, Homo sapien
gcagggccctgcaggaagagaacatccgtgcca

SEQ ID NO: 3124 - DNA, 33 bp, Homo sapien
gcagggccctgcaggacgagaacatccgtgcca

SEQ ID NO: 3125 - DNA, 33 bp, Homo sapien
cagtcttaccaccttacgttggcagcccctcgg

SEQ ID NO: 3126 - DNA, 33 bp, Homo sapien
cagtcttaccaccttatgttggcagcccctcgg

SEQ ID NO: 3127 - DNA, 33 bp, Homo sapien
acttctcaggaaggtcaccctgctgggaagggg

SEQ ID NO: 3128 - DNA, 33 bp, Homo sapien
acttctcaggaaggtcgccctgctgggaagggg

SEQ ID NO: 3129 - DNA, 33 bp, Homo sapien
tgaaaggtccacacaacgggagaactggccttg

SEQ ID NO: 3130 - DNA, 33 bp, Homo sapien
tgaaaggtccacacaatgggagaactggccttg

SEQ ID NO: 3131 - DNA, 33 bp, Homo sapien
agcaatcactggcctcacggtgcacaaccaatc

SEQ ID NO: 3132 - DNA, 33 bp, Homo sapien
agcaatcactggcctcgcggtgcacaaccaatc

SEQ ID NO: 3133 - DNA, 33 bp, Homo sapien
ccagaagatgtaaacaaatgcctcatgccaatc

SEQ ID NO: 3134 - DNA, 33 bp, Homo sapien
ccagaagatgtaaacagatgcctcatgccaatc

SEQ ID NO: 3135 - DNA, 33 bp, Homo sapien
ctcagtctctggagcaactagggctacaggcgt

SEQ ID NO: 3136 - DNA, 33 bp, Homo sapien
ctcagtctctggagcagctagggctacaggcgt

SEQ ID NO: 3137 - DNA, 33 bp, Homo sapien
gcctcgtgtaatatgacaatttagtagtgacca

SEQ ID NO: 3138 - DNA, 33 bp, Homo sapien
gcctcgtgtaatatgataatttagtagtgacca

SEQ ID NO: 3139 - DNA, 33 bp, Homo sapien
gattagaaagcaaagcaagaaataaatagggga

SEQ ID NO: 3140 - DNA, 33 bp, Homo sapien
gattagaaagcaaagcgagaaataaatagggga

SEQ ID NO: 3141 - DNA, 33 bp, Homo sapien
tagaactgaatgttacaagtttccagactgaaa

SEQ ID NO: 3142 - DNA, 33 bp, Homo sapien
tagaactgaatgttacgagtttccagactgaaa

SEQ ID NO: 3143 - DNA, 33 bp, Homo sapien
catggtagaagttgcaaattcacattgaaaagg

SEQ ID NO: 3144 - DNA, 33 bp, Homo sapien
catggtagaagttgcagattcacattgaaaagg

SEQ ID NO: 3145 - DNA, 33 bp, Homo sapien
agttatggaaaaggcaactttcaagagggcaaa

SEQ ID NO: 3146 - DNA, 33 bp, Homo sapien
agttatggaaaaggcacctttcaagagggcaaa

SEQ ID NO: 3147 - DNA, 33 bp, Homo sapien
cagtaacagagctacacctaatgcctaaaactc

SEQ ID NO: 3148 - DNA, 33 bp, Homo sapien
cagtaacagagctacatctaatgcctaaaactc

SEQ ID NO: 3149 - DNA, 33 bp, Homo sapien
tgattcatagcaaaaaatataatactgttgttc

SEQ ID NO: 3150 - DNA, 33 bp, Homo sapien
tgattcatagcaaaaattataatactgttgttc

SEQ ID NO: 3151 - DNA, 33 bp, Homo sapien
ttttcaaggaatacatcatctgcactgttaatc

SEQ ID NO: 3152 - DNA, 33 bp, Homo sapien
ttttcaaggaatacattatctgcactgttaatc

SEQ ID NO: 3153 - DNA, 33 bp, Homo sapien
acttgtcataaaactcactggtggctccggtat

SEQ ID NO: 3154 - DNA, 33 bp, Homo sapien
acttgtcataaaactcgctggtggctccggtat

SEQ ID NO: 3155 - DNA, 33 bp, Homo sapien
caggtttgtcttcgccaatcagcatagctgaaa

SEQ ID NO: 3156 - DNA, 33 bp, Homo sapien
caggtttgtcttcgcccatcagcatagctgaaa

SEQ ID NO: 3157 - DNA, 33 bp, Homo sapien
atttttcctgtgttaacggatgaaaaaggccca

SEQ ID NO: 3158 - DNA, 33 bp, Homo sapien
atttttcctgtgttaatggatgaaaaaggccca

SEQ ID NO: 3159 - DNA, 33 bp, Homo sapien
tgtttgttctcaactaataagacctggttccta

SEQ ID NO: 3160 - DNA, 33 bp, Homo sapien
tgtttgttctcaactagtaagacctggttccta

SEQ ID NO: 3161 - DNA, 33 bp, Homo sapien
caagtgtagacccaaaataactgaaaacaggtg

SEQ ID NO: 3162 - DNA, 33 bp, Homo sapien
caagtgtagacccaaagtaactgaaaacaggtg

SEQ ID NO: 3163 - DNA, 33 bp, Homo sapien
agtcgctcaggccacaaaccttcgagtcatcct

SEQ ID NO: 3164 - DNA, 33 bp, Homo sapien
agtcgctcaggccacagaccttcgagtcatcct

SEQ ID NO: 3165 - DNA, 33 bp, Homo sapien
ggaatagcaagggataccaaggttaggtgaata

SEQ ID NO: 3166 - DNA, 33 bp, Homo sapien
ggaatagcaagggatagcaaggttaggtgaata

SEQ ID NO: 3167 - DNA, 33 bp, Homo sapien
tcgcccaggctgtagcacaatggtatcatcttg

SEQ ID NO: 3168 - DNA, 33 bp, Homo sapien
tcgcccaggctgtagcgcaatggtatcatcttg

SEQ ID NO: 3169 - DNA, 33 bp, Homo sapien
ggactgagagatgcaaaatgtgatataaggagg

SEQ ID NO: 3170 - DNA, 33 bp, Homo sapien
ggactgagagatgcaagatgtgatataaggagg

SEQ ID NO: 3171 - DNA, 33 bp, Homo sapien
gtgaggaatcagtcgaataattttatggagcaa

SEQ ID NO: 3172 - DNA, 33 bp, Homo sapien
gtgaggaatcagtcgagtaattttatggagcaa

SEQ ID NO: 3173 - DNA, 33 bp, Homo sapien
ttaaaaagaacaagacaaaggacacagtgggga

SEQ ID NO: 3174 - DNA, 33 bp, Homo sapien
ttaaaaagaacaagacgaaggacacagtgggga

SEQ ID NO: 3175 - DNA, 33 bp, Homo sapien
taggagataaaagatcacagtgaaagtggtaga

SEQ ID NO: 3176 - DNA, 33 bp, Homo sapien
taggagataaaagatcgcagtgaaagtggtaga

SEQ ID NO: 3177 - DNA, 33 bp, Homo sapien
ttcatcatcagaaatccatgagtcccagtatct

SEQ ID NO: 3178 - DNA, 33 bp, Homo sapien
ttcatcatcagaaatcgatgagtcccagtatct

SEQ ID NO: 3179 - DNA, 33 bp, Homo sapien
caacatcatatatcctcaaagtgcttggaccat

SEQ ID NO: 3180 - DNA, 33 bp, Homo sapien
caacatcatatatcctgaaagtgcttggaccat

SEQ ID NO: 3181 - DNA, 33 bp, Homo sapien
gacagcaaattttctaaaggctaggagtgttta

SEQ ID NO: 3182 - DNA, 33 bp, Homo sapien
gacagcaaattttctagaggctaggagtgttta

SEQ ID NO: 3183 - DNA, 33 bp, Homo sapien
tagtccttttcttgatcaatctacaaaatcaga

SEQ ID NO: 3184 - DNA, 33 bp, Homo sapien
tagtccttttcttgatgaatctacaaaatcaga

SEQ ID NO: 3185 - DNA, 33 bp, Homo sapien
aaagggcctagagttacggcatttcactttgta

SEQ ID NO: 3186 - DNA, 33 bp, Homo sapien
aaagggcctagagttatggcatttcactttgta

SEQ ID NO: 3187 - DNA, 33 bp, Homo sapien
cctaactcacagtcctaaagtatcttcgagata

SEQ ID NO: 3188 - DNA, 33 bp, Homo sapien
cctaactcacagtcctgaagtatcttcgagata

SEQ ID NO: 3189 - DNA, 33 bp, Homo sapien
ggtaatctcaagtgtaagagctaaggctttaat

SEQ ID NO: 3190 - DNA, 33 bp, Homo sapien
ggtaatctcaagtgtatgagctaaggctttaat

SEQ ID NO: 3191 - DNA, 33 bp, Homo sapien
aagacactgggttacccgaatcttgaagagtct

SEQ ID NO: 3192 - DNA, 33 bp, Homo sapien
aagacactgggttacctgaatcttgaagagtct

SEQ ID NO: 3193 - DNA, 33 bp, Homo sapien
caggtctgcccgaaagaaattctcaccattcac

SEQ ID NO: 3194 - DNA, 33 bp, Homo sapien
caggtctgcccgaaaggaattctcaccattcac

SEQ ID NO: 3195 - DNA, 33 bp, Homo sapien
ctttggtctcacgtcacatctgtctgcatctct

SEQ ID NO: 3196 - DNA, 33 bp, Homo sapien
ctttggtctcacgtcatatctgtctgcatctct

SEQ ID NO: 3197 - DNA, 33 bp, Homo sapien
agaaaaacctgaccagaagaattgtagcgaaaa

SEQ ID NO: 3198 - DNA, 33 bp, Homo sapien
agaaaaacctgaccaggagaattgtagcgaaaa

SEQ ID NO: 3199 - DNA, 33 bp, Homo sapien
atagtgcttggtatcactgagacagaagcaatt

SEQ ID NO: 3200 - DNA, 33 bp, Homo sapien
atagtgcttggtatcattgagacagaagcaatt

SEQ ID NO: 3201 - DNA, 33 bp, Homo sapien
aacacttgactcaatacggactcatagaggcac

SEQ ID NO: 3202 - DNA, 33 bp, Homo sapien
aacacttgactcaatatggactcatagaggcac

SEQ ID NO: 3203 - DNA, 33 bp, Homo sapien
ttgtggtactgcaggaatcagaggacaaaagta

SEQ ID NO: 3204 - DNA, 33 bp, Homo sapien
ttgtggtactgcaggagtcagaggacaaaagta

SEQ ID NO: 3205 - DNA, 33 bp, Homo sapien
gacaccagtattaggaacatgtgcatagagagt

SEQ ID NO: 3206 - DNA, 33 bp, Homo sapien
gacaccagtattaggatcatgtgcatagagagt

SEQ ID NO: 3207 - DNA, 33 bp, Homo sapien
ctgcaaatgaacattaaatcagatgaaataatg

SEQ ID NO: 3208 - DNA, 33 bp, Homo sapien
ctgcaaatgaacattacatcagatgaaataatg

SEQ ID NO: 3209 - DNA, 33 bp, Homo sapien
gagtgactttaattgcgctatgcttcagtcatc

SEQ ID NO: 3210 - DNA, 33 bp, Homo sapien
gagtgactttaattgctctatgcttcagtcatc

SEQ ID NO: 3211 - DNA, 33 bp, Homo sapien
cctctcttactttagagagcagacatggttagc

SEQ ID NO: 3212 - DNA, 33 bp, Homo sapien
cctctcttactttagatagcagacatggttagc

SEQ ID NO: 3213 - DNA, 33 bp, Homo sapien
ttcacatagccagacaagagaaaccgaatcagc

SEQ ID NO: 3214 - DNA, 33 bp, Homo sapien
ttcacatagccagacacgagaaaccgaatcagc

SEQ ID NO: 3215 - DNA, 33 bp, Homo sapien
tttaggatgattgacaatggcagtacctggact

SEQ ID NO: 3216 - DNA, 33 bp, Homo sapien
tttaggatgattgacagtggcagtacctggact

SEQ ID NO: 3217 - DNA, 33 bp, Homo sapien
cttacgtaaatcaaacaaggattccaccctggg

SEQ ID NO: 3218 - DNA, 33 bp, Homo sapien
cttacgtaaatcaaactaggattccaccctggg

SEQ ID NO: 3219 - DNA, 33 bp, Homo sapien
aaagggcacagactgtaaaactgtataaaaaag

SEQ ID NO: 3220 - DNA, 33 bp, Homo sapien
aaagggcacagactgttaaactgtataaaaaag

SEQ ID NO: 3221 - DNA, 33 bp, Homo sapien
agaagtagccctataacctggccactagatgtc

SEQ ID NO: 3222 - DNA, 33 bp, Homo sapien
agaagtagccctataatctggccactagatgtc

SEQ ID NO: 3223 - DNA, 33 bp, Homo sapien
tgtaatgaatacctcaaccctcgacctatttct

SEQ ID NO: 3224 - DNA, 33 bp, Homo sapien
tgtaatgaatacctcagccctcgacctatttct

SEQ ID NO: 3225 - DNA, 33 bp, Homo sapien
cacgtcacagaggacaaaagtacaacacgggaa

SEQ ID NO: 3226 - DNA, 33 bp, Homo sapien
cacgtcacagaggacagaagtacaacacgggaa

SEQ ID NO: 3227 - DNA, 33 bp, Homo sapien
cttggggcctccttgccgacaattgggtgaaac

SEQ ID NO: 3228 - DNA, 33 bp, Homo sapien
cttggggcctccttgctgacaattgggtgaaac

SEQ ID NO: 3229 - DNA, 33 bp, Homo sapien
caggagtcaggaaaccactgggctgagtctcac

SEQ ID NO: 3230 - DNA, 33 bp, Homo sapien
caggagtcaggaaaccgctgggctgagtctcac

SEQ ID NO: 3231 - DNA, 33 bp, Homo sapien
ataacctcaacaataccgaactcacaatatcca

SEQ ID NO: 3232 - DNA, 33 bp, Homo sapien
ataacctcaacaatactgaactcacaatatcca

SEQ ID NO: 3233 - DNA, 33 bp, Homo sapien
ccaacacaacagtcaacagttttcacactgggg

SEQ ID NO: 3234 - DNA, 33 bp, Homo sapien
ccaacacaacagtcaatagttttcacactgggg

SEQ ID NO: 3235 - DNA, 33 bp, Homo sapien
gtgtccttgtattaaacatgatgtcaacaggtg

SEQ ID NO: 3236 - DNA, 33 bp, Homo sapien
gtgtccttgtattaaatatgatgtcaacaggtg

SEQ ID NO: 3237 - DNA, 33 bp, Homo sapien
agaatgctgtttttcacccacctggctggttgt

SEQ ID NO: 3238 - DNA, 33 bp, Homo sapien
agaatgctgtttttcatccacctggctggttgt

SEQ ID NO: 3239 - DNA, 33 bp, Homo sapien
cagcgcttcctacaacactacgatcactggggc

SEQ ID NO: 3240 - DNA, 33 bp, Homo sapien
cagcgcttcctacaacgctacgatcactggggc

SEQ ID NO: 3241 - DNA, 33 bp, Homo sapien
caataataaaggccacagtaatgcaagagccga

SEQ ID NO: 3242 - DNA, 33 bp, Homo sapien
caataataaaggccacggtaatgcaagagccga

SEQ ID NO: 3243 - DNA, 33 bp, Homo sapien
tccctgttctttctcaagtctacacgctctctt

SEQ ID NO: 3244 - DNA, 33 bp, Homo sapien
tccctgttctttctcaggtctacacgctctctt

SEQ ID NO: 3245 - DNA, 33 bp, Homo sapien
ctagtgtagtgatgtcgatgctgttaaatatgt

SEQ ID NO: 3246 - DNA, 33 bp, Homo sapien
ctagtgtagtgatgtctatgctgttaaatatgt

SEQ ID NO: 3247 - DNA, 33 bp, Homo sapien
aggtttctttcctgacaatggagcggcaagatg

SEQ ID NO: 3248 - DNA, 33 bp, Homo sapien
aggtttctttcctgacgatggagcggcaagatg

SEQ ID NO: 3249 - DNA, 33 bp, Homo sapien
atgctttgatgagagaactgaaatccctaagct

SEQ ID NO: 3250 - DNA, 33 bp, Homo sapien
atgctttgatgagagagctgaaatccctaagct

SEQ ID NO: 3251 - DNA, 33 bp, Homo sapien
ggcaaagggatgggccaaagatgactctcaggg

SEQ ID NO: 3252 - DNA, 33 bp, Homo sapien
ggcaaagggatgggccgaagatgactctcaggg

SEQ ID NO: 3253 - DNA, 33 bp, Homo sapien
tttggaaagtggaaataaggcagaggactgctg

SEQ ID NO: 3254 - DNA, 33 bp, Homo sapien
tttggaaagtggaaatgaggcagaggactgctg

SEQ ID NO: 3255 - DNA, 33 bp, Homo sapien
tggtacctaattcccacccagaactctagctgc

SEQ ID NO: 3256 - DNA, 33 bp, Homo sapien
tggtacctaattcccatccagaactctagctgc

SEQ ID NO: 3257 - DNA, 33 bp, Homo sapien
cttgggcctttgttagcaactgtaatgatatac

SEQ ID NO: 3258 - DNA, 33 bp, Homo sapien
cttgggcctttgttagtaactgtaatgatatac

SEQ ID NO: 3259 - DNA, 33 bp, Homo sapien
attgtctttagtaatacggtggtcttaaatttt

SEQ ID NO: 3260 - DNA, 33 bp, Homo sapien
attgtctttagtaatatggtggtcttaaatttt

SEQ ID NO: 3261 - DNA, 33 bp, Homo sapien
gctagcgttttagaaaactctctcaaaggtagg

SEQ ID NO: 3262 - DNA, 33 bp, Homo sapien
gctagcgttttagaaagctctctcaaaggtagg

SEQ ID NO: 3263 - DNA, 33 bp, Homo sapien
aagcttgttctttgacaccgacattgttaagtg

SEQ ID NO: 3264 - DNA, 33 bp, Homo sapien
aagcttgttctttgacgccgacattgttaagtg

SEQ ID NO: 3265 - DNA, 33 bp, Homo sapien
gttctttttcctctcacgcactttgtcggtctc

SEQ ID NO: 3266 - DNA, 33 bp, Homo sapien
gttctttttcctctcatgcactttgtcggtctc

SEQ ID NO: 3267 - DNA, 33 bp, Homo sapien
tttgtcggtctctgtgaagggtttctattatac

SEQ ID NO: 3268 - DNA, 33 bp, Homo sapien
tttgtcggtctctgtgcagggtttctattatac

SEQ ID NO: 3269 - DNA, 33 bp, Homo sapien
ttttggcctctcttggaactgttgagtcttacc

SEQ ID NO: 3270 - DNA, 33 bp, Homo sapien
ttttggcctctcttgggactgttgagtcttacc

SEQ ID NO: 3271 - DNA, 33 bp, Homo sapien
aaggcagttactaaaactgatgctagagatctg

SEQ ID NO: 3272 - DNA, 33 bp, Homo sapien
aaggcagttactaaaattgatgctagagatctg

SEQ ID NO: 3273 - DNA, 33 bp, Homo sapien
agttgctataattgtgaaaaatgaagataatca

SEQ ID NO: 3274 - DNA, 33 bp, Homo sapien
agttgctataattgtgtaaaatgaagataatca

SEQ ID NO: 3275 - DNA, 33 bp, Homo sapien
agcaacgcagagtggaccaggggaggcgagact

SEQ ID NO: 3276 - DNA, 33 bp, Homo sapien
agcaacgcagagtggagcaggggaggcgagact

SEQ ID NO: 3277 - DNA, 33 bp, Homo sapien
ttttttaagtaatcagcaatttatttcagtgta

SEQ ID NO: 3278 - DNA, 33 bp, Homo sapien
ttttttaagtaatcaggaatttatttcagtgta

SEQ ID NO: 3279 - DNA, 33 bp, Homo sapien
tgaaatatcatgtggcacgtaactatatatttt

SEQ ID NO: 3280 - DNA, 33 bp, Homo sapien
tgaaatatcatgtggcgcgtaactatatatttt

SEQ ID NO: 3281 - DNA, 33 bp, Homo sapien
attttattcatctgacagaggtcttgtatctaa

SEQ ID NO: 3282 - DNA, 33 bp, Homo sapien
attttattcatctgacggaggtcttgtatctaa

SEQ ID NO: 3283 - DNA, 33 bp, Homo sapien
aaaaacttgaagaaaacgaggaagcaaaccatg

SEQ ID NO: 3284 - DNA, 33 bp, Homo sapien
aaaaacttgaagaaaatgaggaagcaaaccatg

SEQ ID NO: 3285 - DNA, 33 bp, Homo sapien
cttgcacgtggggtcactattaagtaacataga

SEQ ID NO: 3286 - DNA, 33 bp, Homo sapien
cttgcacgtggggtcattattaagtaacataga

SEQ ID NO: 3287 - DNA, 33 bp, Homo sapien
cacttctgtcttgttcaccagttatactactcc

SEQ ID NO: 3288 - DNA, 33 bp, Homo sapien
cacttctgtcttgttcgccagttatactactcc

SEQ ID NO: 3289 - DNA, 33 bp, Homo sapien
atgacactcaaggaagcctatgacaggcatttg

SEQ ID NO: 3290 - DNA, 33 bp, Homo sapien
atgacactcaaggaagtctatgacaggcatttg

SEQ ID NO: 3291 - DNA, 33 bp, Homo sapien
tctaatattctaacccgaaatcaagtccaaatg

SEQ ID NO: 3292 - DNA, 33 bp, Homo sapien
tctaatattctaaccctaaatcaagtccaaatg

SEQ ID NO: 3293 - DNA, 33 bp, Homo sapien
cctaccacagctagtcaaaggaaaatgcccgaa

SEQ ID NO: 3294 - DNA, 33 bp, Homo sapien
cctaccacagctagtcgaaggaaaatgcccgaa

SEQ ID NO: 3295 - DNA, 33 bp, Homo sapien
ctttcttctagcccccaagagcactggtttatg

SEQ ID NO: 3296 - DNA, 33 bp, Homo sapien
ctttcttctagcccccgagagcactggtttatg

SEQ ID NO: 3297 - DNA, 33 bp, Homo sapien
aaacatcaggttaagtcaaagaggccaggtaca

SEQ ID NO: 3298 - DNA, 33 bp, Homo sapien
aaacatcaggttaagtgaaagaggccaggtaca

SEQ ID NO: 3299 - DNA, 33 bp, Homo sapien
gcactttgtgaactgggcatgggaaagagtgaa

SEQ ID NO: 3300 - DNA, 33 bp, Homo sapien
gcactttgtgaactggtcatgggaaagagtgaa

SEQ ID NO: 3301 - DNA, 33 bp, Homo sapien
ttcaagtatgaattcaaaaaggagttctcggcc

SEQ ID NO: 3302 - DNA, 33 bp, Homo sapien
ttcaagtatgaattcagaaaggagttctcggcc

SEQ ID NO: 3303 - DNA, 33 bp, Homo sapien
gctagcacctactcccaagacgcgaggggaacg

SEQ ID NO: 3304 - DNA, 33 bp, Homo sapien
gctagcacctactcccgagacgcgaggggaacg

SEQ ID NO: 3305 - DNA, 33 bp, Homo sapien
cacaggtgcgcgccgcactcacattcactcttg

SEQ ID NO: 3306 - DNA, 33 bp, Homo sapien
cacaggtgcgcgccgcgctcacattcactcttg

SEQ ID NO: 3307 - DNA, 33 bp, Homo sapien
cccacttctcgatcaccgcccgtctcttgtctt

SEQ ID NO: 3308 - DNA, 33 bp, Homo sapien
cccacttctcgatcactgcccgtctcttgtctt

SEQ ID NO: 3309 - DNA, 33 bp, Homo sapien
acacagccggaaggaaaccctcatgaggcgact

SEQ ID NO: 3310 - DNA, 33 bp, Homo sapien
acacagccggaaggaagccctcatgaggcgact

SEQ ID NO: 3311 - DNA, 33 bp, Homo sapien
cctacatcctgttgcagatccttaatcagctgg

SEQ ID NO: 3312 - DNA, 33 bp, Homo sapien
cctacatcctgttgcatatccttaatcagctgg

SEQ ID NO: 3313 - DNA, 33 bp, Homo sapien
ttgcaggtgggtggaacgcactccgacttgtct

SEQ ID NO: 3314 - DNA, 33 bp, Homo sapien
ttgcaggtgggtggaatgcactccgacttgtct

SEQ ID NO: 3315 - DNA, 33 bp, Homo sapien
ggcccccttagatcaccgaaagagccccataag

SEQ ID NO: 3316 - DNA, 33 bp, Homo sapien
ggcccccttagatcactgaaagagccccataag

SEQ ID NO: 3317 - DNA, 33 bp, Homo sapien
acgtgtcttctccccaagtacgctggcagctcc

SEQ ID NO: 3318 - DNA, 33 bp, Homo sapien
acgtgtcttctccccaggtacgctggcagctcc

SEQ ID NO: 3319 - DNA, 33 bp, Homo sapien
gctaaccattatttccacgagtcctcaacagca

SEQ ID NO: 3320 - DNA, 33 bp, Homo sapien
gctaaccattatttccgcgagtcctcaacagca

SEQ ID NO: 3321 - DNA, 33 bp, Homo sapien
cagcagaagcgaagcccggagtcattatcacat

SEQ ID NO: 3322 - DNA, 33 bp, Homo sapien
cagcagaagcgaagcctggagtcattatcacat

SEQ ID NO: 3323 - DNA, 33 bp, Homo sapien
tgctggcacagcagcacgtgaagaacgaggggt

SEQ ID NO: 3324 - DNA, 33 bp, Homo sapien
tgctggcacagcagcatgtgaagaacgaggggt

SEQ ID NO: 3325 - DNA, 33 bp, Homo sapien
tggacacagaggtttaactggtcggacatgcca

SEQ ID NO: 3326 - DNA, 33 bp, Homo sapien
tggacacagaggtttagctggtcggacatgcca

SEQ ID NO: 3327 - DNA, 33 bp, Homo sapien
aatctcttttttccaccgtgagctctgctagac

SEQ ID NO: 3328 - DNA, 33 bp, Homo sapien
aatctcttttttccactgtgagctctgctagac

SEQ ID NO: 3329 - DNA, 33 bp, Homo sapien
gctggccacttttactctgagcatgaagagctg

SEQ ID NO: 3330 - DNA, 33 bp, Homo sapien
gctggccacttttactttgagcatgaagagctg

SEQ ID NO: 3331 - DNA, 33 bp, Homo sapien
acatctcgcaagacctcaagtgtggggctcgca

SEQ ID NO: 3332 - DNA, 33 bp, Homo sapien
acatctcgcaagaccttaagtgtggggctcgca

SEQ ID NO: 3333 - DNA, 33 bp, Homo sapien
cctctggggagaaaaggatccagaccagatctg

SEQ ID NO: 3334 - DNA, 33 bp, Homo sapien
cctctggggagaaaagtatccagaccagatctg

SEQ ID NO: 3335 - DNA, 33 bp, Homo sapien
agtaaggtgattccacagatgacagatagggat

SEQ ID NO: 3336 - DNA, 33 bp, Homo sapien
agtaaggtgattccacggatgacagatagggat

SEQ ID NO: 3337 - DNA, 33 bp, Homo sapien
cagaaatcattagctaaaatacagcctccccca

SEQ ID NO: 3338 - DNA, 33 bp, Homo sapien
cagaaatcattagctagaatacagcctccccca

SEQ ID NO: 3339 - DNA, 33 bp, Homo sapien
aggcctgctgtggaaacgctccctgagtctact

SEQ ID NO: 3340 - DNA, 33 bp, Homo sapien
aggcctgctgtggaaatgctccctgagtctact

SEQ ID NO: 3341 - DNA, 33 bp, Homo sapien
gagtgacagaaaatccaggaagtcccagaagga

SEQ ID NO: 3342 - DNA, 33 bp, Homo sapien
gagtgacagaaaatccgggaagtcccagaagga

SEQ ID NO: 3343 - DNA, 33 bp, Homo sapien
attccaatctactcataagaaaaacaacaggca

SEQ ID NO: 3344 - DNA, 33 bp, Homo sapien
attccaatctactcatgagaaaaacaacaggca

SEQ ID NO: 3345 - DNA, 33 bp, Homo sapien
cataatctagtcattccacatcccagaacccca

SEQ ID NO: 3346 - DNA, 33 bp, Homo sapien
cataatctagtcattctacatcccagaacccca

SEQ ID NO: 3347 - DNA, 33 bp, Homo sapien
ccttttccaggcactacgataaacccacagtct

SEQ ID NO: 3348 - DNA, 33 bp, Homo sapien
ccttttccaggcactatgataaacccacagtct

SEQ ID NO: 3349 - DNA, 33 bp, Homo sapien
ggatgtgtagagtcccacaggacggcccaagat

SEQ ID NO: 3350 - DNA, 33 bp, Homo sapien
ggatgtgtagagtcccgcaggacggcccaagat

SEQ ID NO: 3351 - DNA, 33 bp, Homo sapien
tctgtcattggttgaaagtcacagggggccaag

SEQ ID NO: 3352 - DNA, 33 bp, Homo sapien
tctgtcattggttgaaggtcacagggggccaag

SEQ ID NO: 3353 - DNA, 33 bp, Homo sapien
gaagagacacttaacacagctcaagctacttcc

SEQ ID NO: 3354 - DNA, 33 bp, Homo sapien
gaagagacacttaacatagctcaagctacttcc

SEQ ID NO: 3355 - DNA, 33 bp, Homo sapien
catttctggcccttcagagcaaatactacctcc

SEQ ID NO: 3356 - DNA, 33 bp, Homo sapien
catttctggcccttcatagcaaatactacctcc

SEQ ID NO: 3357 - DNA, 33 bp, Homo sapien
aaatattcaacatcaccggtctttaagtaaatg

SEQ ID NO: 3358 - DNA, 33 bp, Homo sapien
aaatattcaacatcactggtctttaagtaaatg

SEQ ID NO: 3359 - DNA, 33 bp, Homo sapien
tttcagaagcattttacagtttcagttttacaa

SEQ ID NO: 3360 - DNA, 33 bp, Homo sapien
tttcagaagcattttatagtttcagttttacaa

SEQ ID NO: 3361 - DNA, 33 bp, Homo sapien
acattctacatctccgaatgcccagggccaggg

SEQ ID NO: 3362 - DNA, 33 bp, Homo sapien
acattctacatctccgtatgcccagggccaggg

SEQ ID NO: 3363 - DNA, 33 bp, Homo sapien
atcttaggcactaacagccaggaaacataaatt

SEQ ID NO: 3364 - DNA, 33 bp, Homo sapien
atcttaggcactaacatccaggaaacataaatt

SEQ ID NO: 3365 - DNA, 33 bp, Homo sapien
gccccactctgatccccaaccatgttacctcct

SEQ ID NO: 3366 - DNA, 33 bp, Homo sapien
gccccactctgatccctaaccatgttacctcct

SEQ ID NO: 3367 - DNA, 33 bp, Homo sapien
ccctctaagtggagcaacctcgcttagctggag

SEQ ID NO: 3368 - DNA, 33 bp, Homo sapien
ccctctaagtggagcagcctcgcttagctggag

SEQ ID NO: 3369 - DNA, 33 bp, Homo sapien
cacctaaaatagcaaaaaacaaggggcatagtg

SEQ ID NO: 3370 - DNA, 33 bp, Homo sapien
cacctaaaatagcaaacaacaaggggcatagtg

SEQ ID NO: 3371 - DNA, 33 bp, Homo sapien
gatggtatgtatgtcacggagtcccgctgggca

SEQ ID NO: 3372 - DNA, 33 bp, Homo sapien
gatggtatgtatgtcatggagtcccgctgggca

SEQ ID NO: 3373 - DNA, 33 bp, Homo sapien
agactcgatgtctacaaaaagattttaaaatta

SEQ ID NO: 3374 - DNA, 33 bp, Homo sapien
agactcgatgtctacagaaagattttaaaatta

SEQ ID NO: 3375 - DNA, 33 bp, Homo sapien
caggtgggtgtcaacactctcagcttctcccca

SEQ ID NO: 3376 - DNA, 33 bp, Homo sapien
caggtgggtgtcaacattctcagcttctcccca

SEQ ID NO: 3377 - DNA, 33 bp, Homo sapien
aaaatgaagattacgtgaatgaccaagaatgca

SEQ ID NO: 3378 - DNA, 33 bp, Homo sapien
aaaatgaagattacgttaatgaccaagaatgca

SEQ ID NO: 3379 - DNA, 33 bp, Homo sapien
aaagtaaagttgcacaagaaaagataaaacttg

SEQ ID NO: 3380 - DNA, 33 bp, Homo sapien
aaagtaaagttgcacatgaaaagataaaacttg

SEQ ID NO: 3381 - DNA, 33 bp, Homo sapien
tgcctcctggaaattcaagcctacagagaagct

SEQ ID NO: 3382 - DNA, 33 bp, Homo sapien
tgcctcctggaaattcgagcctacagagaagct

SEQ ID NO: 3383 - DNA, 33 bp, Homo sapien
aaaaatatctgaataaactttgccaagttgatg

SEQ ID NO: 3384 - DNA, 33 bp, Homo sapien
aaaaatatctgaataagctttgccaagttgatg

SEQ ID NO: 3385 - DNA, 33 bp, Homo sapien
gcacactacttcaaaacgctgaaattaggtatt

SEQ ID NO: 3386 - DNA, 33 bp, Homo sapien
gcacactacttcaaaatgctgaaattaggtatt

SEQ ID NO: 3387 - DNA, 33 bp, Homo sapien
tattgtcaaagaacacactttggaagcctgagg

SEQ ID NO: 3388 - DNA, 33 bp, Homo sapien
tattgtcaaagaacacgctttggaagcctgagg

SEQ ID NO: 3389 - DNA, 33 bp, Homo sapien
ttgttgaaaaatctcaaagcctatgacatgaac

SEQ ID NO: 3390 - DNA, 33 bp, Homo sapien
ttgttgaaaaatctcacagcctatgacatgaac

SEQ ID NO: 3391 - DNA, 33 bp, Homo sapien
ctgtgtcctacaaaaacgttgcattctagagaa

SEQ ID NO: 3392 - DNA, 33 bp, Homo sapien
ctgtgtcctacaaaaatgttgcattctagagaa

SEQ ID NO: 3393 - DNA, 33 bp, Homo sapien
atgttcttgtctcctcagaagtcataaattgga

SEQ ID NO: 3394 - DNA, 33 bp, Homo sapien
atgttcttgtctcctcggaagtcataaattgga

SEQ ID NO: 3395 - DNA, 33 bp, Homo sapien
gaaaagcagcgctacgaagattccctgccacgg

SEQ ID NO: 3396 - DNA, 33 bp, Homo sapien
gaaaagcagcgctacggagattccctgccacgg

SEQ ID NO: 3397 - DNA, 33 bp, Homo sapien
agcatgcttgtaagagaagacacacagaagaga

SEQ ID NO: 3398 - DNA, 33 bp, Homo sapien
agcatgcttgtaagaggagacacacagaagaga

SEQ ID NO: 3399 - DNA, 33 bp, Homo sapien
atgcctatcagatgaacggtagctcccttcctc

SEQ ID NO: 3400 - DNA, 33 bp, Homo sapien
atgcctatcagatgaatggtagctcccttcctc

SEQ ID NO: 3401 - DNA, 33 bp, Homo sapien
taccattgatcaaaccaatgaatgtgatcacag

SEQ ID NO: 3402 - DNA, 33 bp, Homo sapien
taccattgatcaaaccgatgaatgtgatcacag

SEQ ID NO: 3403 - DNA, 33 bp, Homo sapien
atgctgaattaactgcaatggcaggagagagtt

SEQ ID NO: 3404 - DNA, 33 bp, Homo sapien
atgctgaattaactgcgatggcaggagagagtt

SEQ ID NO: 3405 - DNA, 33 bp, Homo sapien
gcttagaagcactacaatcttttcctcactgag

SEQ ID NO: 3406 - DNA, 33 bp, Homo sapien
gcttagaagcactacattcttttcctcactgag

SEQ ID NO: 3407 - DNA, 33 bp, Homo sapien
gaaagtagggataacccactagtcgggaggtag

SEQ ID NO: 3408 - DNA, 33 bp, Homo sapien
gaaagtagggataacctactagtcgggaggtag

SEQ ID NO: 3409 - DNA, 33 bp, Homo sapien
aaggtagcatggctcacacattatcaacatcct

SEQ ID NO: 3410 - DNA, 33 bp, Homo sapien
aaggtagcatggctcatacattatcaacatcct

SEQ ID NO: 3411 - DNA, 33 bp, Homo sapien
aagtcgtgtgctttgacattctggggttgtgca

SEQ ID NO: 3412 - DNA, 33 bp, Homo sapien
aagtcgtgtgctttgatattctggggttgtgca

SEQ ID NO: 3413 - DNA, 33 bp, Homo sapien
aacctgtaagctctgcaaaagcaaagaacatgt

SEQ ID NO: 3414 - DNA, 33 bp, Homo sapien
aacctgtaagctctgcgaaagcaaagaacatgt

SEQ ID NO: 3415 - DNA, 33 bp, Homo sapien
acaagattttttcaccacaaatgaatgatttag

SEQ ID NO: 3416 - DNA, 33 bp, Homo sapien
acaagattttttcaccgcaaatgaatgatttag

SEQ ID NO: 3417 - DNA, 33 bp, Homo sapien
ctccataacatggaaacagcaatcgtatgttcc

SEQ ID NO: 3418 - DNA, 33 bp, Homo sapien
ctccataacatggaaatagcaatcgtatgttcc

SEQ ID NO: 3419 - DNA, 33 bp, Homo sapien
ccagccactggctcaactctatcagcaagcagg

SEQ ID NO: 3420 - DNA, 33 bp, Homo sapien
ccagccactggctcaagtctatcagcaagcagg

SEQ ID NO: 3421 - DNA, 33 bp, Homo sapien
ttatctattttctctacggcttaggctatgtga

SEQ ID NO: 3422 - DNA, 33 bp, Homo sapien
ttatctattttctctatggcttaggctatgtga

SEQ ID NO: 3423 - DNA, 33 bp, Homo sapien
ctccaaacactttatcacttttcccattgccga

SEQ ID NO: 3424 - DNA, 33 bp, Homo sapien
ctccaaacactttatcgcttttcccattgccga

SEQ ID NO: 3425 - DNA, 33 bp, Homo sapien
ttttgtagtgattccccatacaaatatgtatag

SEQ ID NO: 3426 - DNA, 33 bp, Homo sapien
ttttgtagtgattccctatacaaatatgtatag

SEQ ID NO: 3427 - DNA, 33 bp, Homo sapien
tgcctcttcttccttaccctttcacatgtgttc

SEQ ID NO: 3428 - DNA, 33 bp, Homo sapien
tgcctcttcttccttagcctttcacatgtgttc

SEQ ID NO: 3429 - DNA, 33 bp, Homo sapien
cacgttatcagtgtgactcaacatatttaacac

SEQ ID NO: 3430 - DNA, 33 bp, Homo sapien
cacgttatcagtgtgattcaacatatttaacac

SEQ ID NO: 3431 - DNA, 33 bp, Homo sapien
gagaaaaaccatatgactattacagactaaaga

SEQ ID NO: 3432 - DNA, 33 bp, Homo sapien
gagaaaaaccatatgattattacagactaaaga

SEQ ID NO: 3433 - DNA, 33 bp, Homo sapien
tgcccacgttccttaacgtcattcgagtctgtg

SEQ ID NO: 3434 - DNA, 33 bp, Homo sapien
tgcccacgttccttaatgtcattcgagtctgtg

SEQ ID NO: 3435 - DNA, 33 bp, Homo sapien
gcctctcaccatcaagaagtaaacggtttttgg

SEQ ID NO: 3436 - DNA, 33 bp, Homo sapien
gcctctcaccatcaaggagtaaacggtttttgg

SEQ ID NO: 3437 - DNA, 33 bp, Homo sapien
gaacaatcactgagacgcggtttagaggagaca

SEQ ID NO: 3438 - DNA, 33 bp, Homo sapien
gaacaatcactgagactcggtttagaggagaca

SEQ ID NO: 3439 - DNA, 33 bp, Homo sapien
cttcaggcacatcatcacagatgtttggaaagg

SEQ ID NO: 3440 - DNA, 33 bp, Homo sapien
cttcaggcacatcatcgcagatgtttggaaagg

SEQ ID NO: 3441 - DNA, 33 bp, Homo sapien
caagcaagtacagaaaacctgaacatgctgtct

SEQ ID NO: 3442 - DNA, 33 bp, Homo sapien
caagcaagtacagaaagcctgaacatgctgtct

SEQ ID NO: 3443 - DNA, 33 bp, Homo sapien
aggcaatgcaggtggacgccacagtcttcactt

SEQ ID NO: 3444 - DNA, 33 bp, Homo sapien
aggcaatgcaggtggatgccacagtcttcactt

SEQ ID NO: 3445 - DNA, 33 bp, Homo sapien
atacccatctgtggtagccctgcctgagtaacc

SEQ ID NO: 3446 - DNA, 33 bp, Homo sapien
atacccatctgtggtatccctgcctgagtaacc

SEQ ID NO: 3447 - DNA, 33 bp, Homo sapien
gtactgccttcttgtccctgatgaacacattgt

SEQ ID NO: 3448 - DNA, 33 bp, Homo sapien
gtactgccttcttgtctctgatgaacacattgt

SEQ ID NO: 3449 - DNA, 33 bp, Homo sapien
aaacaaaaaaacagtacagtcgtgtgccactta

SEQ ID NO: 3450 - DNA, 33 bp, Homo sapien
aaacaaaaaaacagtatagtcgtgtgccactta

SEQ ID NO: 3451 - DNA, 33 bp, Homo sapien
tgctcctgtgagataactattcctctaaatttt

SEQ ID NO: 3452 - DNA, 33 bp, Homo sapien
tgctcctgtgagataagtattcctctaaatttt

SEQ ID NO: 3453 - DNA, 33 bp, Homo sapien
aatatgcaatatagtcactattcaaatctcaaa

SEQ ID NO: 3454 - DNA, 33 bp, Homo sapien
aatatgcaatatagtcgctattcaaatctcaaa

SEQ ID NO: 3455 - DNA, 33 bp, Homo sapien
acacttgagactcttaacaattccatgactgag

SEQ ID NO: 3456 - DNA, 33 bp, Homo sapien
acacttgagactcttagcaattccatgactgag

SEQ ID NO: 3457 - DNA, 33 bp, Homo sapien
actgatacagttaccaatgccctttgttgagtc

SEQ ID NO: 3458 - DNA, 33 bp, Homo sapien
actgatacagttaccagtgccctttgttgagtc

SEQ ID NO: 3459 - DNA, 33 bp, Homo sapien
agaagttctgcaacagaaaggtgaaataggttc

SEQ ID NO: 3460 - DNA, 33 bp, Homo sapien
agaagttctgcaacaggaaggtgaaataggttc

SEQ ID NO: 3461 - DNA, 33 bp, Homo sapien
tcaggggcaatctaagaactttgttccacctgc

SEQ ID NO: 3462 - DNA, 33 bp, Homo sapien
tcaggggcaatctaagtactttgttccacctgc

SEQ ID NO: 3463 - DNA, 33 bp, Homo sapien
attaagggagcggaataaccacaggctaagggg

SEQ ID NO: 3464 - DNA, 33 bp, Homo sapien
attaagggagcggaattaccacaggctaagggg

SEQ ID NO: 3465 - DNA, 33 bp, Homo sapien
agttaagcctcatcacggcaaattcttcttttc

SEQ ID NO: 3466 - DNA, 33 bp, Homo sapien
agttaagcctcatcactgcaaattcttcttttc

SEQ ID NO: 3467 - DNA, 33 bp, Homo sapien
ctcaaacaaagcaaagccttctgtgtcgagtgg

SEQ ID NO: 3468 - DNA, 33 bp, Homo sapien
ctcaaacaaagcaaaggcttctgtgtcgagtgg

SEQ ID NO: 3469 - DNA, 33 bp, Homo sapien
tgataatatttcagcaaaaactttcatgaagtg

SEQ ID NO: 3470 - DNA, 33 bp, Homo sapien
tgataatatttcagcagaaactttcatgaagtg

SEQ ID NO: 3471 - DNA, 33 bp, Homo sapien
tctgaaattagggggacgcttgttactgcagcg

SEQ ID NO: 3472 - DNA, 33 bp, Homo sapien
tctgaaattagggggatgcttgttactgcagcg

SEQ ID NO: 3473 - DNA, 33 bp, Homo sapien
gttatttgcaaccaaaaatatcccagtggatat

SEQ ID NO: 3474 - DNA, 33 bp, Homo sapien
gttatttgcaaccaaagatatcccagtggatat

SEQ ID NO: 3475 - DNA, 33 bp, Homo sapien
ccctctttcatccacccgattccttctgggccc

SEQ ID NO: 3476 - DNA, 33 bp, Homo sapien
ccctctttcatccacctgattccttctgggccc

SEQ ID NO: 3477 - DNA, 33 bp, Homo sapien
gtgagttttgtgaccacgagcaggagctgggtt

SEQ ID NO: 3478 - DNA, 33 bp, Homo sapien
gtgagttttgtgaccatgagcaggagctgggtt

SEQ ID NO: 3479 - DNA, 33 bp, Homo sapien
caaatagtcgaacaaacccaacaaggcttggag

SEQ ID NO: 3480 - DNA, 33 bp, Homo sapien
caaatagtcgaacaaatccaacaaggcttggag

SEQ ID NO: 3481 - DNA, 33 bp, Homo sapien
tatttctatgctggtgcatctgccctctggtta

SEQ ID NO: 3482 - DNA, 33 bp, Homo sapien
tatttctatgctggtggatctgccctctggtta

SEQ ID NO: 3483 - DNA, 33 bp, Homo sapien
ataatgcatgattttccactacagatggcatgg

SEQ ID NO: 3484 - DNA, 33 bp, Homo sapien
ataatgcatgattttctactacagatggcatgg

SEQ ID NO: 3485 - DNA, 33 bp, Homo sapien
ggctgctgatggctcacggcgaagtccctcctc

SEQ ID NO: 3486 - DNA, 33 bp, Homo sapien
ggctgctgatggctcatggcgaagtccctcctc

SEQ ID NO: 3487 - DNA, 33 bp, Homo sapien
atctccaagatattcacggagggtctggtgaag

SEQ ID NO: 3488 - DNA, 33 bp, Homo sapien
atctccaagatattcatggagggtctggtgaag

SEQ ID NO: 3489 - DNA, 33 bp, Homo sapien
tgcatttgttacaatcaatgggcctctctggac

SEQ ID NO: 3490 - DNA, 33 bp, Homo sapien
tgcatttgttacaatcgatgggcctctctggac

SEQ ID NO: 3491 - DNA, 33 bp, Homo sapien
tggacctggactggtcactacagaggtcccaaa

SEQ ID NO: 3492 - DNA, 33 bp, Homo sapien
tggacctggactggtcgctacagaggtcccaaa

SEQ ID NO: 3493 - DNA, 33 bp, Homo sapien
gtcagtaaatgatggagtcaagattccagccca

SEQ ID NO: 3494 - DNA, 33 bp, Homo sapien
gtcagtaaatgatggattcaagattccagccca

SEQ ID NO: 3495 - DNA, 33 bp, Homo sapien
gcccagaacgtgtaaaacctcattccttgtgtc

SEQ ID NO: 3496 - DNA, 33 bp, Homo sapien
gcccagaacgtgtaaagcctcattccttgtgtc

SEQ ID NO: 3497 - DNA, 33 bp, Homo sapien
aattgtttccaaatacacatcctaatgattatg

SEQ ID NO: 3498 - DNA, 33 bp, Homo sapien
aattgtttccaaatacgcatcctaatgattatg

SEQ ID NO: 3499 - DNA, 33 bp, Homo sapien
ctaaaattgtgcctaacacagtaggtgctcaaa

SEQ ID NO: 3500 - DNA, 33 bp, Homo sapien
ctaaaattgtgcctaatacagtaggtgctcaaa

SEQ ID NO: 3501 - DNA, 33 bp, Homo sapien
cacttgctgactacacaagtaaatgggcaaagc

SEQ ID NO: 3502 - DNA, 33 bp, Homo sapien
cacttgctgactacacgagtaaatgggcaaagc

SEQ ID NO: 3503 - DNA, 33 bp, Homo sapien
ttctccgctcatgatcaccgggatgctgagcct

SEQ ID NO: 3504 - DNA, 33 bp, Homo sapien
ttctccgctcatgatcgccgggatgctgagcct

SEQ ID NO: 3505 - DNA, 33 bp, Homo sapien
caaggctgcttgcagaacacactttctctgtcc

SEQ ID NO: 3506 - DNA, 33 bp, Homo sapien
caaggctgcttgcagagcacactttctctgtcc

SEQ ID NO: 3507 - DNA, 33 bp, Homo sapien
cagcaaaccacaaatcacgtttcaagtgaaccc

SEQ ID NO: 3508 - DNA, 33 bp, Homo sapien
cagcaaaccacaaatcgcgtttcaagtgaaccc

SEQ ID NO: 3509 - DNA, 33 bp, Homo sapien
aaacccagcttcagccagagtagctttgctttc

SEQ ID NO: 3510 - DNA, 33 bp, Homo sapien
aaacccagcttcagccggagtagctttgctttc

SEQ ID NO: 3511 - DNA, 33 bp, Homo sapien
ggtgcttctttgtgcaaggtttgtggggagcag

SEQ ID NO: 3512 - DNA, 33 bp, Homo sapien
ggtgcttctttgtgcacggtttgtggggagcag

SEQ ID NO: 3513 - DNA, 33 bp, Homo sapien
atcaggctcctgcagaaggaaaggaaggtttcc

SEQ ID NO: 3514 - DNA, 33 bp, Homo sapien
atcaggctcctgcagatggaaaggaaggtttcc

SEQ ID NO: 3515 - DNA, 33 bp, Homo sapien
agctgggtgtgccagcaagagtcgggggagagg

SEQ ID NO: 3516 - DNA, 33 bp, Homo sapien
agctgggtgtgccagcgagagtcgggggagagg

SEQ ID NO: 3517 - DNA, 33 bp, Homo sapien
cccttcttgtaaggacaccagtcgtattaggac

SEQ ID NO: 3518 - DNA, 33 bp, Homo sapien
cccttcttgtaaggactccagtcgtattaggac

SEQ ID NO: 3519 - DNA, 33 bp, Homo sapien
atatccacaaagcaccgggccctgagagaggag

SEQ ID NO: 3520 - DNA, 33 bp, Homo sapien
atatccacaaagcacctggccctgagagaggag

SEQ ID NO: 3521 - DNA, 33 bp, Homo sapien
ggtttaattggtctgaactaccgcctgagcatc

SEQ ID NO: 3522 - DNA, 33 bp, Homo sapien
ggtttaattggtctgagctaccgcctgagcatc

SEQ ID NO: 3523 - DNA, 33 bp, Homo sapien
tgccgagtactgacaacgataccagcagcttct

SEQ ID NO: 3524 - DNA, 33 bp, Homo sapien
tgccgagtactgacaatgataccagcagcttct

SEQ ID NO: 3525 - DNA, 33 bp, Homo sapien
tagattcctagagccaaggatgcttagaatcat

SEQ ID NO: 3526 - DNA, 33 bp, Homo sapien
tagattcctagagccagggatgcttagaatcat

SEQ ID NO: 3527 - DNA, 33 bp, Homo sapien
cccctttgattggattaaaaatgatgacaacca

SEQ ID NO: 3528 - DNA, 33 bp, Homo sapien
cccctttgattggattgaaaatgatgacaacca

SEQ ID NO: 3529 - DNA, 33 bp, Homo sapien
tggagaggatttgaacccaacgttgctgatgcg

SEQ ID NO: 3530 - DNA, 33 bp, Homo sapien
tggagaggatttgaactcaacgttgctgatgcg

SEQ ID NO: 3531 - DNA, 33 bp, Homo sapien
agattcctgactgggacgatgccagaaaagctc

SEQ ID NO: 3532 - DNA, 33 bp, Homo sapien
agattcctgactgggatgatgccagaaaagctc

SEQ ID NO: 3533 - DNA, 33 bp, Homo sapien
tgtgaaggcaggcacagaaatagttaagccaca

SEQ ID NO: 3534 - DNA, 33 bp, Homo sapien
tgtgaaggcaggcacataaatagttaagccaca

SEQ ID NO: 3535 - DNA, 33 bp, Homo sapien
tgagctcatgtcctgacctgtaagctgggggca

SEQ ID NO: 3536 - DNA, 33 bp, Homo sapien
tgagctcatgtcctgatctgtaagctgggggca

SEQ ID NO: 3537 - DNA, 33 bp, Homo sapien
gacagcacttgaatagaaatcaatttgcatcat

SEQ ID NO: 3538 - DNA, 33 bp, Homo sapien
gacagcacttgaataggaatcaatttgcatcat

SEQ ID NO: 3539 - DNA, 33 bp, Homo sapien
aagcttaataaaatcaccaacatggccggtcac

SEQ ID NO: 3540 - DNA, 33 bp, Homo sapien
aagcttaataaaatcagcaacatggccggtcac

SEQ ID NO: 3541 - DNA, 33 bp, Homo sapien
cacacagaggtccagacgatgttatttcctcca

SEQ ID NO: 3542 - DNA, 33 bp, Homo sapien
cacacagaggtccagatgatgttatttcctcca

SEQ ID NO: 3543 - DNA, 33 bp, Homo sapien
atacttctggaacataaccattgctcctagtcc

SEQ ID NO: 3544 - DNA, 33 bp, Homo sapien
atacttctggaacatacccattgctcctagtcc

SEQ ID NO: 3545 - DNA, 33 bp, Homo sapien
ggggacagaggaagacacatcccgctagaccag

SEQ ID NO: 3546 - DNA, 33 bp, Homo sapien
ggggacagaggaagacgcatcccgctagaccag

SEQ ID NO: 3547 - DNA, 33 bp, Homo sapien
cccagggctctgtccccaactccgaggactggg

SEQ ID NO: 3548 - DNA, 33 bp, Homo sapien
cccagggctctgtcccgaactccgaggactggg

SEQ ID NO: 3549 - DNA, 33 bp, Homo sapien
cagcccccccgagtcacgtgtcttgtctctgtc

SEQ ID NO: 3550 - DNA, 33 bp, Homo sapien
cagcccccccgagtcatgtgtcttgtctctgtc

SEQ ID NO: 3551 - DNA, 33 bp, Homo sapien
tgggtgccatgctgcgaacttgcccggggtgtg

SEQ ID NO: 3552 - DNA, 33 bp, Homo sapien
tgggtgccatgctgcgtacttgcccggggtgtg

SEQ ID NO: 3553 - DNA, 33 bp, Homo sapien
gcctctacaagggctacgagaacctttagctcc

SEQ ID NO: 3554 - DNA, 33 bp, Homo sapien
gcctctacaagggctatgagaacctttagctcc

SEQ ID NO: 3555 - DNA, 33 bp, Homo sapien
acacaaactgggagtaaatatgttgccccaaat

SEQ ID NO: 3556 - DNA, 33 bp, Homo sapien
acacaaactgggagtagatatgttgccccaaat

SEQ ID NO: 3557 - DNA, 33 bp, Homo sapien
agaaatgggcacaacaatacaggcttttcatac

SEQ ID NO: 3558 - DNA, 33 bp, Homo sapien
agaaatgggcacaacagtacaggcttttcatac

SEQ ID NO: 3559 - DNA, 33 bp, Homo sapien
ggcaccttctggaatccagctccggagacatca

SEQ ID NO: 3560 - DNA, 33 bp, Homo sapien
ggcaccttctggaatctagctccggagacatca

SEQ ID NO: 3561 - DNA, 33 bp, Homo sapien
tctaacgagatgtgtaataaacttttcctcaat

SEQ ID NO: 3562 - DNA, 33 bp, Homo sapien
tctaacgagatgtgtagtaaacttttcctcaat

SEQ ID NO: 3563 - DNA, 33 bp, Homo sapien
tggggcttaaccatccaaaaactcagcagcgtg

SEQ ID NO: 3564 - DNA, 33 bp, Homo sapien
tggggcttaaccatccgaaaactcagcagcgtg

SEQ ID NO: 3565 - DNA, 33 bp, Homo sapien
caattaaaggcaatccaccagaacaggtgagag

SEQ ID NO: 3566 - DNA, 33 bp, Homo sapien
caattaaaggcaatccgccagaacaggtgagag

SEQ ID NO: 3567 - DNA, 33 bp, Homo sapien
catatatggcccttccaaagaacacggcctcta

SEQ ID NO: 3568 - DNA, 33 bp, Homo sapien
catatatggcccttccgaagaacacggcctcta

SEQ ID NO: 3569 - DNA, 33 bp, Homo sapien
ctcccaaacctactcaactaggtagagggccct

SEQ ID NO: 3570 - DNA, 33 bp, Homo sapien
ctcccaaacctactcatctaggtagagggccct

SEQ ID NO: 3571 - DNA, 33 bp, Homo sapien
ccccaacctgtgtggacgtttacatagatcaat

SEQ ID NO: 3572 - DNA, 33 bp, Homo sapien
ccccaacctgtgtggatgtttacatagatcaat

SEQ ID NO: 3573 - DNA, 33 bp, Homo sapien
tgaaactggaacacacaccttgagaccaaaggc

SEQ ID NO: 3574 - DNA, 33 bp, Homo sapien
tgaaactggaacacacgccttgagaccaaaggc

SEQ ID NO: 3575 - DNA, 33 bp, Homo sapien
caatgttcttcattcccatccaccaattttcca

SEQ ID NO: 3576 - DNA, 33 bp, Homo sapien
caatgttcttcattcctatccaccaattttcca

SEQ ID NO: 3577 - DNA, 33 bp, Homo sapien
tatctcccagtctgtaagtttgcagtggcgcgc

SEQ ID NO: 3578 - DNA, 33 bp, Homo sapien
tatctcccagtctgtacgtttgcagtggcgcgc

SEQ ID NO: 3579 - DNA, 33 bp, Homo sapien
acttggtggtgacgaaaaacaagatttaattcc

SEQ ID NO: 3580 - DNA, 33 bp, Homo sapien
acttggtggtgacgaagaacaagatttaattcc

SEQ ID NO: 3581 - DNA, 33 bp, Homo sapien
tattctccttgttcagcagagtcaacacaagat

SEQ ID NO: 3582 - DNA, 33 bp, Homo sapien
tattctccttgttcagtagagtcaacacaagat

SEQ ID NO: 3583 - DNA, 33 bp, Homo sapien
tttttccggccatctccaagtggattctggcct

SEQ ID NO: 3584 - DNA, 33 bp, Homo sapien
tttttccggccatctctaagtggattctggcct

SEQ ID NO: 3585 - DNA, 33 bp, Homo sapien
ccctttcctgtaacaacatggtcctatcccagc

SEQ ID NO: 3586 - DNA, 33 bp, Homo sapien
ccctttcctgtaacaatatggtcctatcccagc

SEQ ID NO: 3587 - DNA, 33 bp, Homo sapien
agtccaggatgatcaacgcaccagtatgccagt

SEQ ID NO: 3588 - DNA, 33 bp, Homo sapien
agtccaggatgatcaatgcaccagtatgccagt

SEQ ID NO: 3589 - DNA, 33 bp, Homo sapien
ggaggaagatgcctctcaccgcgaggatgagcg

SEQ ID NO: 3590 - DNA, 33 bp, Homo sapien
ggaggaagatgcctcttaccgcgaggatgagcg

SEQ ID NO: 3591 - DNA, 33 bp, Homo sapien
ggaaaaatgagatgtgaatgaaagaaagaaacg

SEQ ID NO: 3592 - DNA, 33 bp, Homo sapien
ggaaaaatgagatgtggatgaaagaaagaaacg

SEQ ID NO: 3593 - DNA, 33 bp, Homo sapien
tcgaagcagccacagacagtgtgtaaatgaatt

SEQ ID NO: 3594 - DNA, 33 bp, Homo sapien
tcgaagcagccacagagagtgtgtaaatgaatt

SEQ ID NO: 3595 - DNA, 33 bp, Homo sapien
gtaggacaggcaggcaagccagaaactcaggca

SEQ ID NO: 3596 - DNA, 33 bp, Homo sapien
gtaggacaggcaggcaggccagaaactcaggca

SEQ ID NO: 3597 - DNA, 33 bp, Homo sapien
cttctttttacaatgaagaaatagatactgaga

SEQ ID NO: 3598 - DNA, 33 bp, Homo sapien
cttctttttacaatgatgaaatagatactgaga

SEQ ID NO: 3599 - DNA, 33 bp, Homo sapien
atgggctgtgttttgaaccaccttcaatctcct

SEQ ID NO: 3600 - DNA, 33 bp, Homo sapien
atgggctgtgttttgagccaccttcaatctcct

SEQ ID NO: 3601 - DNA, 33 bp, Homo sapien
atggcctggaaatgccaactctcacactgtgtc

SEQ ID NO: 3602 - DNA, 33 bp, Homo sapien
atggcctggaaatgccgactctcacactgtgtc

SEQ ID NO: 3603 - DNA, 33 bp, Homo sapien
ggatgtgacagaagccactgagcaatctcctcc

SEQ ID NO: 3604 - DNA, 33 bp, Homo sapien
ggatgtgacagaagccgctgagcaatctcctcc

SEQ ID NO: 3605 - DNA, 33 bp, Homo sapien
tttcttcaacaaataacgtgcaatcaaaaaaat

SEQ ID NO: 3606 - DNA, 33 bp, Homo sapien
tttcttcaacaaataatgtgcaatcaaaaaaat

SEQ ID NO: 3607 - DNA, 33 bp, Homo sapien
ctcagtgctggtatcccagatcctgcccagaag

SEQ ID NO: 3608 - DNA, 33 bp, Homo sapien
ctcagtgctggtatcctagatcctgcccagaag

SEQ ID NO: 3609 - DNA, 33 bp, Homo sapien
tgggctccgaattccagcagtgaccatcttgtg

SEQ ID NO: 3610 - DNA, 33 bp, Homo sapien
tgggctccgaattccatcagtgaccatcttgtg

SEQ ID NO: 3611 - DNA, 33 bp, Homo sapien
tattgtaaaaccaagcagaggacacagaatggc

SEQ ID NO: 3612 - DNA, 33 bp, Homo sapien
tattgtaaaaccaagcggaggacacagaatggc

SEQ ID NO: 3613 - DNA, 33 bp, Homo sapien
agaatcttctctaaaacgtattctttgtggcat

SEQ ID NO: 3614 - DNA, 33 bp, Homo sapien
agaatcttctctaaaatgtattctttgtggcat

SEQ ID NO: 3615 - DNA, 33 bp, Homo sapien
atatggcttactggagcctcaacctctcggact

SEQ ID NO: 3616 - DNA, 33 bp, Homo sapien
atatggcttactggaggctcaacctctcggact

SEQ ID NO: 3617 - DNA, 33 bp, Homo sapien
taactcacctgagataataaacaggcaagcgct

SEQ ID NO: 3618 - DNA, 33 bp, Homo sapien
taactcacctgagatagtaaacaggcaagcgct

SEQ ID NO: 3619 - DNA, 33 bp, Homo sapien
gacttttacaggcaacagagaagttgcagatca

SEQ ID NO: 3620 - DNA, 33 bp, Homo sapien
gacttttacaggcaacggagaagttgcagatca

SEQ ID NO: 3621 - DNA, 33 bp, Homo sapien
attaggattatttgtaagtcagcattcataatg

SEQ ID NO: 3622 - DNA, 33 bp, Homo sapien
attaggattatttgtacgtcagcattcataatg

SEQ ID NO: 3623 - DNA, 33 bp, Homo sapien
ccagacaatagtttcaagtcagccaaacacatg

SEQ ID NO: 3624 - DNA, 33 bp, Homo sapien
ccagacaatagtttcacgtcagccaaacacatg

SEQ ID NO: 3625 - DNA, 33 bp, Homo sapien
aaacccatgctatctgcaaggtaggcctatgtt

SEQ ID NO: 3626 - DNA, 33 bp, Homo sapien
aaacccatgctatctgtaaggtaggcctatgtt

SEQ ID NO: 3627 - DNA, 33 bp, Homo sapien
agtctttcttggtctcacatctttttctgcacc

SEQ ID NO: 3628 - DNA, 33 bp, Homo sapien
agtctttcttggtctcgcatctttttctgcacc

SEQ ID NO: 3629 - DNA, 33 bp, Homo sapien
ggcacacccataactcaaaatccattggttctc

SEQ ID NO: 3630 - DNA, 33 bp, Homo sapien
ggcacacccataactcgaaatccattggttctc

SEQ ID NO: 3631 - DNA, 33 bp, Homo sapien
cggggggtgtggttaacgctttcactgaaggtc

SEQ ID NO: 3632 - DNA, 33 bp, Homo sapien
cggggggtgtggttaatgctttcactgaaggtc

SEQ ID NO: 3633 - DNA, 33 bp, Homo sapien
ggtacaacttccagggacacatctcacccatta

SEQ ID NO: 3634 - DNA, 33 bp, Homo sapien
ggtacaacttccaggggcacatctcacccatta

SEQ ID NO: 3635 - DNA, 33 bp, Homo sapien
aaggatgaacccaacacatctattagttctcaa

SEQ ID NO: 3636 - DNA, 33 bp, Homo sapien
aaggatgaacccaacatatctattagttctcaa

SEQ ID NO: 3637 - DNA, 33 bp, Homo sapien
ccccgccaggtgaaacaggctgggcaatataga

SEQ ID NO: 3638 - DNA, 33 bp, Homo sapien
ccccgccaggtgaaacgggctgggcaatataga

SEQ ID NO: 3639 - DNA, 33 bp, Homo sapien
cccttgggtaccaggaagaaggagcactggccc

SEQ ID NO: 3640 - DNA, 33 bp, Homo sapien
cccttgggtaccaggaggaaggagcactggccc

SEQ ID NO: 3641 - DNA, 33 bp, Homo sapien
tagttcaaggccagaaatacaaaatccgggtgt

SEQ ID NO: 3642 - DNA, 33 bp, Homo sapien
tagttcaaggccagaagtacaaaatccgggtgt

SEQ ID NO: 3643 - DNA, 33 bp, Homo sapien
tctccacctgcgtagggatttgcgcattagatg

SEQ ID NO: 3644 - DNA, 33 bp, Homo sapien
tctccacctgcgtaggtatttgcgcattagatg

SEQ ID NO: 3645 - DNA, 33 bp, Homo sapien
tcaactctgagagtgccgaaggggcatttgccc

SEQ ID NO: 3646 - DNA, 33 bp, Homo sapien
tcaactctgagagtgctgaaggggcatttgccc

SEQ ID NO: 3647 - DNA, 33 bp, Homo sapien
gttctctttgcagtaccgaagataacagccagg

SEQ ID NO: 3648 - DNA, 33 bp, Homo sapien
gttctctttgcagtactgaagataacagccagg

SEQ ID NO: 3649 - DNA, 33 bp, Homo sapien
aggtctgcgttggacacggcattgtacatggga

SEQ ID NO: 3650 - DNA, 33 bp, Homo sapien
aggtctgcgttggacatggcattgtacatggga

SEQ ID NO: 3651 - DNA, 33 bp, Homo sapien
gattctttctcctcgacgctggtacccgtgcgg

SEQ ID NO: 3652 - DNA, 33 bp, Homo sapien
gattctttctcctcgatgctggtacccgtgcgg

SEQ ID NO: 3653 - DNA, 33 bp, Homo sapien
ccgtttgcagtgctccacccgttgtatgactaa

SEQ ID NO: 3654 - DNA, 33 bp, Homo sapien
ccgtttgcagtgctccgcccgttgtatgactaa

SEQ ID NO: 3655 - DNA, 33 bp, Homo sapien
cacctgggatagtctcaaggaacactgagcccc

SEQ ID NO: 3656 - DNA, 33 bp, Homo sapien
cacctgggatagtctcgaggaacactgagcccc

SEQ ID NO: 3657 - DNA, 33 bp, Homo sapien
tcttctgtgacccttaaacttcctccaaaagcc

SEQ ID NO: 3658 - DNA, 33 bp, Homo sapien
tcttctgtgacccttagacttcctccaaaagcc

SEQ ID NO: 3659 - DNA, 33 bp, Homo sapien
aggtcctggtccaatacggctgatgtccttgta

SEQ ID NO: 3660 - DNA, 33 bp, Homo sapien
aggtcctggtccaatatggctgatgtccttgta

SEQ ID NO: 3661 - DNA, 33 bp, Homo sapien
tcacagaattgaagatgagattagattagatta

SEQ ID NO: 3662 - DNA, 33 bp, Homo sapien
tcacagaattgaagattagattagattagatta

SEQ ID NO: 3663 - DNA, 33 bp, Homo sapien
gctttgttcccgaggacgtagagggctactcgc

SEQ ID NO: 3664 - DNA, 33 bp, Homo sapien
gctttgttcccgaggatgtagagggctactcgc

SEQ ID NO: 3665 - DNA, 33 bp, Homo sapien
tgaatttatcaccgtccagaaggccccacaaat

SEQ ID NO: 3666 - DNA, 33 bp, Homo sapien
tgaatttatcaccgtctagaaggccccacaaat

SEQ ID NO: 3667 - DNA, 33 bp, Homo sapien
tgctgttcaggtaccaatcctaacaatggcctt

SEQ ID NO: 3668 - DNA, 33 bp, Homo sapien
tgctgttcaggtaccagtcctaacaatggcctt

SEQ ID NO: 3669 - DNA, 33 bp, Homo sapien
agtgtgtctatgcagaaacaggaagacataaga

SEQ ID NO: 3670 - DNA, 33 bp, Homo sapien
agtgtgtctatgcagagacaggaagacataaga

SEQ ID NO: 3671 - DNA, 33 bp, Homo sapien
cctgcaaagtgcttcactcatctgggtctcagt

SEQ ID NO: 3672 - DNA, 33 bp, Homo sapien
cctgcaaagtgcttcattcatctgggtctcagt

SEQ ID NO: 3673 - DNA, 33 bp, Homo sapien
ggtggagcatgtgacacgaagatttctgtaggt

SEQ ID NO: 3674 - DNA, 33 bp, Homo sapien
ggtggagcatgtgacatgaagatttctgtaggt

SEQ ID NO: 3675 - DNA, 33 bp, Homo sapien
ttctgtttccttaggacgtattcccacatgtga

SEQ ID NO: 3676 - DNA, 33 bp, Homo sapien
ttctgtttccttaggatgtattcccacatgtga

SEQ ID NO: 3677 - DNA, 33 bp, Homo sapien
gtcactgtttttcaccaggtctcaatttgcact

SEQ ID NO: 3678 - DNA, 33 bp, Homo sapien
gtcactgtttttcaccgggtctcaatttgcact

SEQ ID NO: 3679 - DNA, 33 bp, Homo sapien
taaagaagcaaaacccaaggggcttcctggttt

SEQ ID NO: 3680 - DNA, 33 bp, Homo sapien
taaagaagcaaaacccgaggggcttcctggttt

SEQ ID NO: 3681 - DNA, 33 bp, Homo sapien
ttcctcctcagcatgaagccacagctatgagag

SEQ ID NO: 3682 - DNA, 33 bp, Homo sapien
ttcctcctcagcatgacgccacagctatgagag

SEQ ID NO: 3683 - DNA, 33 bp, Homo sapien
gtaagaaccagcttcaaaaccaggcagtgttgc

SEQ ID NO: 3684 - DNA, 33 bp, Homo sapien
gtaagaaccagcttcagaaccaggcagtgttgc

SEQ ID NO: 3685 - DNA, 33 bp, Homo sapien
atttgactattctagacgtctcacgtaagtgga

SEQ ID NO: 3686 - DNA, 33 bp, Homo sapien
atttgactattctagatgtctcacgtaagtgga

SEQ ID NO: 3687 - DNA, 33 bp, Homo sapien
tgcccttatccagattaaaatgggtcacaactt

SEQ ID NO: 3688 - DNA, 33 bp, Homo sapien
tgcccttatccagattgaaatgggtcacaactt

SEQ ID NO: 3689 - DNA, 33 bp, Homo sapien
tttgagacagagtcgcactccgtaacccaggct

SEQ ID NO: 3690 - DNA, 33 bp, Homo sapien
tttgagacagagtcgcgctccgtaacccaggct

SEQ ID NO: 3691 - DNA, 33 bp, Homo sapien
accctgggctgaggaaagaagcacagagggaca

SEQ ID NO: 3692 - DNA, 33 bp, Homo sapien
accctgggctgaggaaggaagcacagagggaca

SEQ ID NO: 3693 - DNA, 33 bp, Homo sapien
acagagcctgaaccaccggttttaagaaaagat

SEQ ID NO: 3694 - DNA, 33 bp, Homo sapien
acagagcctgaaccactggttttaagaaaagat

SEQ ID NO: 3695 - DNA, 33 bp, Homo sapien
acaggagttatttgccaccacacaaagagggtc

SEQ ID NO: 3696 - DNA, 33 bp, Homo sapien
acaggagttatttgccgccacacaaagagggtc

SEQ ID NO: 3697 - DNA, 33 bp, Homo sapien
agtgctggtccctggaatacaaggaagggaccc

SEQ ID NO: 3698 - DNA, 33 bp, Homo sapien
agtgctggtccctggagtacaaggaagggaccc

SEQ ID NO: 3699 - DNA, 33 bp, Homo sapien
tgtgttgaagcatgaccgggctgccctctgaag

SEQ ID NO: 3700 - DNA, 33 bp, Homo sapien
tgtgttgaagcatgactgggctgccctctgaag

SEQ ID NO: 3701 - DNA, 33 bp, Homo sapien
ttggaggaagtccctgaatttcctgaaccaagt

SEQ ID NO: 3702 - DNA, 33 bp, Homo sapien
ttggaggaagtccctgtatttcctgaaccaagt

SEQ ID NO: 3703 - DNA, 33 bp, Homo sapien
gaaaaagagatgagtacggaagctcttcactgt

SEQ ID NO: 3704 - DNA, 33 bp, Homo sapien
gaaaaagagatgagtatggaagctcttcactgt

SEQ ID NO: 3705 - DNA, 33 bp, Homo sapien
cctaatctaatctgaccggtgttctcatgaaaa

SEQ ID NO: 3706 - DNA, 33 bp, Homo sapien
cctaatctaatctgactggtgttctcatgaaaa

SEQ ID NO: 3707 - DNA, 33 bp, Homo sapien
gtagtagagagtgcatgaagtgagcaatgtact

SEQ ID NO: 3708 - DNA, 33 bp, Homo sapien
gtagtagagagtgcattaagtgagcaatgtact

SEQ ID NO: 3709 - DNA, 33 bp, Homo sapien
ctgttgtgacacttgccactcagctggccagcc

SEQ ID NO: 3710 - DNA, 33 bp, Homo sapien
ctgttgtgacacttgcgactcagctggccagcc

SEQ ID NO: 3711 - DNA, 33 bp, Homo sapien
catggagggctattcaataataaaatgggacta

SEQ ID NO: 3712 - DNA, 33 bp, Homo sapien
catggagggctattcagtaataaaatgggacta

SEQ ID NO: 3713 - DNA, 33 bp, Homo sapien
cttccttccattttcccgctctgatctggctca

SEQ ID NO: 3714 - DNA, 33 bp, Homo sapien
cttccttccattttcctgctctgatctggctca

SEQ ID NO: 3715 - DNA, 33 bp, Homo sapien
gtggcagtagtgctccagccagagtttctgaaa

SEQ ID NO: 3716 - DNA, 33 bp, Homo sapien
gtggcagtagtgctccggccagagtttctgaaa

SEQ ID NO: 3717 - DNA, 33 bp, Homo sapien
taaacgaattacttcaccatcctgtgccttagg

SEQ ID NO: 3718 - DNA, 33 bp, Homo sapien
taaacgaattacttcatcatcctgtgccttagg

SEQ ID NO: 3719 - DNA, 33 bp, Homo sapien
attagcatcttaagccagcatcgttcatttgtc

SEQ ID NO: 3720 - DNA, 33 bp, Homo sapien
attagcatcttaagccggcatcgttcatttgtc

SEQ ID NO: 3721 - DNA, 33 bp, Homo sapien
gacacaggattacaaacgaaagcccacactgtg

SEQ ID NO: 3722 - DNA, 33 bp, Homo sapien
gacacaggattacaaatgaaagcccacactgtg

SEQ ID NO: 3723 - DNA, 33 bp, Homo sapien
ggcatccgggcatctaactcatcctggagcaag

SEQ ID NO: 3724 - DNA, 33 bp, Homo sapien
ggcatccgggcatctagctcatcctggagcaag

SEQ ID NO: 3725 - DNA, 33 bp, Homo sapien
atacaatgattctcaacgcacaacctctatctt

SEQ ID NO: 3726 - DNA, 33 bp, Homo sapien
atacaatgattctcaatgcacaacctctatctt

SEQ ID NO: 3727 - DNA, 33 bp, Homo sapien
caagaaagagaaaatcaaagtccagctggagtc

SEQ ID NO: 3728 - DNA, 33 bp, Homo sapien
caagaaagagaaaatcgaagtccagctggagtc

SEQ ID NO: 3729 - DNA, 33 bp, Homo sapien
aacttcagatctgttaaggaaggagtcagattt

SEQ ID NO: 3730 - DNA, 33 bp, Homo sapien
aacttcagatctgttagggaaggagtcagattt

SEQ ID NO: 3731 - DNA, 33 bp, Homo sapien
ttttctttgaaggcaacagcttccatctgatac

SEQ ID NO: 3732 - DNA, 33 bp, Homo sapien
ttttctttgaaggcaatagcttccatctgatac

SEQ ID NO: 3733 - DNA, 33 bp, Homo sapien
ccaggtacttacgataaagaatgaagggatgga

SEQ ID NO: 3734 - DNA, 33 bp, Homo sapien
ccaggtacttacgatacagaatgaagggatgga

SEQ ID NO: 3735 - DNA, 33 bp, Homo sapien
accactgtcaggactaaagggtttctaccactc

SEQ ID NO: 3736 - DNA, 33 bp, Homo sapien
accactgtcaggactatagggtttctaccactc

SEQ ID NO: 3737 - DNA, 33 bp, Homo sapien
gatccagcagtcctacgccagagaaattcaaac

SEQ ID NO: 3738 - DNA, 33 bp, Homo sapien
gatccagcagtcctactccagagaaattcaaac

SEQ ID NO: 3739 - DNA, 33 bp, Homo sapien
gtaagcaactaataccagagtaagtgttatgct

SEQ ID NO: 3740 - DNA, 33 bp, Homo sapien
gtaagcaactaataccggagtaagtgttatgct

SEQ ID NO: 3741 - DNA, 33 bp, Homo sapien
cactgcctctgctgtcactgagttttaccatat

SEQ ID NO: 3742 - DNA, 33 bp, Homo sapien
cactgcctctgctgtccctgagttttaccatat

SEQ ID NO: 3743 - DNA, 33 bp, Homo sapien
cctcaagaccaatgggaccaacagactgtctgc

SEQ ID NO: 3744 - DNA, 33 bp, Homo sapien
cctcaagaccaatgggtccaacagactgtctgc

SEQ ID NO: 3745 - DNA, 33 bp, Homo sapien
cctggtcttaggacaccgtattgtggcaaaggc

SEQ ID NO: 3746 - DNA, 33 bp, Homo sapien
cctggtcttaggacactgtattgtggcaaaggc

SEQ ID NO: 3747 - DNA, 33 bp, Homo sapien
cccacagggggtggaacgacaagcaagtaacca

SEQ ID NO: 3748 - DNA, 33 bp, Homo sapien
cccacagggggtggaaggacaagcaagtaacca

SEQ ID NO: 3749 - DNA, 33 bp, Homo sapien
ccctgccagtctgcacagatgatggctggggag

SEQ ID NO: 3750 - DNA, 33 bp, Homo sapien
ccctgccagtctgcactgatgatggctggggag

SEQ ID NO: 3751 - DNA, 33 bp, Homo sapien
agcagataccttataaacatgacatgaatgaat

SEQ ID NO: 3752 - DNA, 33 bp, Homo sapien
agcagataccttataatcatgacatgaatgaat

SEQ ID NO: 3753 - DNA, 33 bp, Homo sapien
cctgcatgtcaatgctaagagatagttcctgtt

SEQ ID NO: 3754 - DNA, 33 bp, Homo sapien
cctgcatgtcaatgctgagagatagttcctgtt

SEQ ID NO: 3755 - DNA, 33 bp, Homo sapien
gagtcacccatgaagacaggacagtgcttcagc

SEQ ID NO: 3756 - DNA, 33 bp, Homo sapien
gagtcacccatgaagagaggacagtgcttcagc

SEQ ID NO: 3757 - DNA, 33 bp, Homo sapien
caccgcctccaaatgccaacttgtccttttgta

SEQ ID NO: 3758 - DNA, 33 bp, Homo sapien
caccgcctccaaatgctaacttgtccttttgta

SEQ ID NO: 3759 - DNA, 33 bp, Homo sapien
cccctgctctgctagacaatttcatgccttctc

SEQ ID NO: 3760 - DNA, 33 bp, Homo sapien
cccctgctctgctagataatttcatgccttctc

SEQ ID NO: 3761 - DNA, 33 bp, Homo sapien
cctgagggatgagcagcagttttccagaacaaa

SEQ ID NO: 3762 - DNA, 33 bp, Homo sapien
cctgagggatgagcaggagttttccagaacaaa

SEQ ID NO: 3763 - DNA, 33 bp, Homo sapien
tatgttacacatctcaacctgaactagccatgt

SEQ ID NO: 3764 - DNA, 33 bp, Homo sapien
tatgttacacatctcagcctgaactagccatgt

SEQ ID NO: 3765 - DNA, 33 bp, Homo sapien
agggccccatgtgtaacggctgcaaacagcttc

SEQ ID NO: 3766 - DNA, 33 bp, Homo sapien
agggccccatgtgtaatggctgcaaacagcttc

SEQ ID NO: 3767 - DNA, 33 bp, Homo sapien
tgtatatgtacaggtcacgtatcccttatctga

SEQ ID NO: 3768 - DNA, 33 bp, Homo sapien
tgtatatgtacaggtcgcgtatcccttatctga

SEQ ID NO: 3769 - DNA, 33 bp, Homo sapien
gtgtgtcacaagaacaactgctctgctccgaat

SEQ ID NO: 3770 - DNA, 33 bp, Homo sapien
gtgtgtcacaagaacacctgctctgctccgaat

SEQ ID NO: 3771 - DNA, 33 bp, Homo sapien
tttgacagtaagtagacgccactgagaagaaag

SEQ ID NO: 3772 - DNA, 33 bp, Homo sapien
tttgacagtaagtagatgccactgagaagaaag

SEQ ID NO: 3773 - DNA, 33 bp, Homo sapien
gtaatattttaagataagtaccgattcaaaggt

SEQ ID NO: 3774 - DNA, 33 bp, Homo sapien
gtaatattttaagataggtaccgattcaaaggt

SEQ ID NO: 3775 - DNA, 33 bp, Homo sapien
atccctatagagagagaatctgaattgactttt

SEQ ID NO: 3776 - DNA, 33 bp, Homo sapien
atccctatagagagagtatctgaattgactttt

SEQ ID NO: 3777 - DNA, 33 bp, Homo sapien
atatatctaagtcccaaaaggagaataactttc

SEQ ID NO: 3778 - DNA, 33 bp, Homo sapien
atatatctaagtcccataaggagaataactttc

SEQ ID NO: 3779 - DNA, 33 bp, Homo sapien
aatcagaaccattggccgatgacctcaggcttg

SEQ ID NO: 3780 - DNA, 33 bp, Homo sapien
aatcagaaccattggctgatgacctcaggcttg

SEQ ID NO: 3781 - DNA, 33 bp, Homo sapien
gggaatatacggcaaaagttcatgaccctcaag

SEQ ID NO: 3782 - DNA, 33 bp, Homo sapien
gggaatatacggcaaaggttcatgaccctcaag

SEQ ID NO: 3783 - DNA, 33 bp, Homo sapien
tggcataggtctgttcacagtagtttaggactg

SEQ ID NO: 3784 - DNA, 33 bp, Homo sapien
tggcataggtctgttcgcagtagtttaggactg

SEQ ID NO: 3785 - DNA, 33 bp, Homo sapien
tctagcacaatctgtaccattccttttcagtca

SEQ ID NO: 3786 - DNA, 33 bp, Homo sapien
tctagcacaatctgtatcattccttttcagtca

SEQ ID NO: 3787 - DNA, 33 bp, Homo sapien
actcccttctcgggaacgaaacgattaagtcag

SEQ ID NO: 3788 - DNA, 33 bp, Homo sapien
actcccttctcgggaatgaaacgattaagtcag

SEQ ID NO: 3789 - DNA, 33 bp, Homo sapien
cttatgtgcctaactagaaaatgtccttgttct

SEQ ID NO: 3790 - DNA, 33 bp, Homo sapien
cttatgtgcctaactataaaatgtccttgttct

SEQ ID NO: 3791 - DNA, 33 bp, Homo sapien
ttgcctgctgtccagcaaccctggaagaacttg

SEQ ID NO: 3792 - DNA, 33 bp, Homo sapien
ttgcctgctgtccagcgaccctggaagaacttg

SEQ ID NO: 3793 - DNA, 33 bp, Homo sapien
gactttgctctaactccacacatcgagctgact

SEQ ID NO: 3794 - DNA, 33 bp, Homo sapien
gactttgctctaactctacacatcgagctgact

SEQ ID NO: 3795 - DNA, 33 bp, Homo sapien
gggtcagagttgcagaatagcaagagaaacttg

SEQ ID NO: 3796 - DNA, 33 bp, Homo sapien
gggtcagagttgcagagtagcaagagaaacttg

SEQ ID NO: 3797 - DNA, 33 bp, Homo sapien
gttaaatcttgccaataaatgctgaaggaggca

SEQ ID NO: 3798 - DNA, 33 bp, Homo sapien
gttaaatcttgccaatgaatgctgaaggaggca

SEQ ID NO: 3799 - DNA, 33 bp, Homo sapien
gatttactgttaggaacggcatttgctgaatta

SEQ ID NO: 3800 - DNA, 33 bp, Homo sapien
gatttactgttaggaatggcatttgctgaatta

SEQ ID NO: 3801 - DNA, 33 bp, Homo sapien
gctgtatcatttttacaattagaaaacatagag

SEQ ID NO: 3802 - DNA, 33 bp, Homo sapien
gctgtatcatttttacgattagaaaacatagag

SEQ ID NO: 3803 - DNA, 33 bp, Homo sapien
gaggaagtggcattcaaggagggcctgcccagt

SEQ ID NO: 3804 - DNA, 33 bp, Homo sapien
gaggaagtggcattcacggagggcctgcccagt

SEQ ID NO: 3805 - DNA, 33 bp, Homo sapien
aaaactcagggattaacagccaggatttcgcaa

SEQ ID NO: 3806 - DNA, 33 bp, Homo sapien
aaaactcagggattaagagccaggatttcgcaa

SEQ ID NO: 3807 - DNA, 33 bp, Homo sapien
aatctgggtaggaaagcatcacaagtcaccgga

SEQ ID NO: 3808 - DNA, 33 bp, Homo sapien
aatctgggtaggaaaggatcacaagtcaccgga

SEQ ID NO: 3809 - DNA, 33 bp, Homo sapien
cacaaagagcttgtgagccgctctggcaccagg

SEQ ID NO: 3810 - DNA, 33 bp, Homo sapien
cacaaagagcttgtgatccgctctggcaccagg

SEQ ID NO: 3811 - DNA, 33 bp, Homo sapien
attcctttgtcatcacaatgatgattctttttt

SEQ ID NO: 3812 - DNA, 33 bp, Homo sapien
attcctttgtcatcacgatgatgattctttttt

SEQ ID NO: 3813 - DNA, 33 bp, Homo sapien
atgaccagctctaggacacatcagactttgtga

SEQ ID NO: 3814 - DNA, 33 bp, Homo sapien
atgaccagctctaggatacatcagactttgtga

SEQ ID NO: 3815 - DNA, 33 bp, Homo sapien
tataattggcagccccggaaagatctgagaccc

SEQ ID NO: 3816 - DNA, 33 bp, Homo sapien
tataattggcagcccctgaaagatctgagaccc

SEQ ID NO: 3817 - DNA, 33 bp, Homo sapien
tttttaacctccgaagcctcttcactgtcccac

SEQ ID NO: 3818 - DNA, 33 bp, Homo sapien
tttttaacctccgaaggctcttcactgtcccac

SEQ ID NO: 3819 - DNA, 33 bp, Homo sapien
ggctgacacctcacaacctttgcccttttcccc

SEQ ID NO: 3820 - DNA, 33 bp, Homo sapien
ggctgacacctcacaatctttgcccttttcccc

SEQ ID NO: 3821 - DNA, 33 bp, Homo sapien
catccagcaaatccaaaaagggtccatcgagga

SEQ ID NO: 3822 - DNA, 33 bp, Homo sapien
catccagcaaatccaagaagggtccatcgagga

SEQ ID NO: 3823 - DNA, 33 bp, Homo sapien
gagcttgaagtcgaaacgagaattagcagaagg

SEQ ID NO: 3824 - DNA, 33 bp, Homo sapien
gagcttgaagtcgaaatgagaattagcagaagg

SEQ ID NO: 3825 - DNA, 33 bp, Homo sapien
gggtgcactgaaaatgaacttgactcagagtca

SEQ ID NO: 3826 - DNA, 33 bp, Homo sapien
gggtgcactgaaaatgtacttgactcagagtca

SEQ ID NO: 3827 - DNA, 33 bp, Homo sapien
tgaaagcccaaatagaaaagttggtgaatttag

SEQ ID NO: 3828 - DNA, 33 bp, Homo sapien
tgaaagcccaaatagacaagttggtgaatttag

SEQ ID NO: 3829 - DNA, 33 bp, Homo sapien
atttcatgacgtgtgaaagttgcatgaaattca

SEQ ID NO: 3830 - DNA, 33 bp, Homo sapien
atttcatgacgtgtgagagttgcatgaaattca

SEQ ID NO: 3831 - DNA, 33 bp, Homo sapien
atcacatctatgcaacaaaatattattcagtag

SEQ ID NO: 3832 - DNA, 33 bp, Homo sapien
atcacatctatgcaacgaaatattattcagtag

SEQ ID NO: 3833 - DNA, 33 bp, Homo sapien
ggtgactgtacacaggaccaaggctgcaccacc

SEQ ID NO: 3834 - DNA, 33 bp, Homo sapien
ggtgactgtacacaggtccaaggctgcaccacc

SEQ ID NO: 3835 - DNA, 33 bp, Homo sapien
tttttgaaaacagtagaacaattagcctgcagt

SEQ ID NO: 3836 - DNA, 33 bp, Homo sapien
tttttgaaaacagtaggacaattagcctgcagt

SEQ ID NO: 3837 - DNA, 33 bp, Homo sapien
gagtcagaaaatggtgaaagtacggagatttat

SEQ ID NO: 3838 - DNA, 33 bp, Homo sapien
gagtcagaaaatggtggaagtacggagatttat

SEQ ID NO: 3839 - DNA, 33 bp, Homo sapien
attaatagtatgccagcaatccagtcaatgtta

SEQ ID NO: 3840 - DNA, 33 bp, Homo sapien
attaatagtatgccagtaatccagtcaatgtta

SEQ ID NO: 3841 - DNA, 33 bp, Homo sapien
acagtatacctttacagtctcacctcagggcta

SEQ ID NO: 3842 - DNA, 33 bp, Homo sapien
acagtatacctttacattctcacctcagggcta

SEQ ID NO: 3843 - DNA, 33 bp, Homo sapien
gattgatcttggagaacgtttgtgggtgattct

SEQ ID NO: 3844 - DNA, 33 bp, Homo sapien
gattgatcttggagaatgtttgtgggtgattct

SEQ ID NO: 3845 - DNA, 33 bp, Homo sapien
gcctggcctcatcaacaaatttttgtgggaaga

SEQ ID NO: 3846 - DNA, 33 bp, Homo sapien
gcctggcctcatcaactaatttttgtgggaaga

SEQ ID NO: 3847 - DNA, 33 bp, Homo sapien
tttataactattacaccatcacaaacatatagg

SEQ ID NO: 3848 - DNA, 33 bp, Homo sapien
tttataactattacactatcacaaacatatagg

SEQ ID NO: 3849 - DNA, 33 bp, Homo sapien
tcatctggggaatgcaaagtaaaaccagtgtga

SEQ ID NO: 3850 - DNA, 33 bp, Homo sapien
tcatctggggaatgcagagtaaaaccagtgtga

SEQ ID NO: 3851 - DNA, 33 bp, Homo sapien
ttctgcagttgcaatcaagatgtctgcaataag

SEQ ID NO: 3852 - DNA, 33 bp, Homo sapien
ttctgcagttgcaatcgagatgtctgcaataag

SEQ ID NO: 3853 - DNA, 33 bp, Homo sapien
taaagcaagagaaaccacttatgagtattttga

SEQ ID NO: 3854 - DNA, 33 bp, Homo sapien
taaagcaagagaaaccgcttatgagtattttga

SEQ ID NO: 3855 - DNA, 33 bp, Homo sapien
ttgactcatcccagcacgtttcctaacagagaa

SEQ ID NO: 3856 - DNA, 33 bp, Homo sapien
ttgactcatcccagcaggtttcctaacagagaa

SEQ ID NO: 3857 - DNA, 33 bp, Homo sapien
acagggaaacttaaccaggaggaaccacgtgtg

SEQ ID NO: 3858 - DNA, 33 bp, Homo sapien
acagggaaacttaacctggaggaaccacgtgtg

SEQ ID NO: 3859 - DNA, 33 bp, Homo sapien
cgacaggttcttggaaatgtaacttggagtgaa

SEQ ID NO: 3860 - DNA, 33 bp, Homo sapien
cgacaggttcttggaactgtaacttggagtgaa

SEQ ID NO: 3861 - DNA, 33 bp, Homo sapien
actcacacctacaaccacattcacttggaccgg

SEQ ID NO: 3862 - DNA, 33 bp, Homo sapien
actcacacctacaaccgcattcacttggaccgg

SEQ ID NO: 3863 - DNA, 33 bp, Homo sapien
ttagtccattcacttcactttgtgaaacttgag

SEQ ID NO: 3864 - DNA, 33 bp, Homo sapien
ttagtccattcacttccctttgtgaaacttgag

SEQ ID NO: 3865 - DNA, 33 bp, Homo sapien
caggttttgaaaaaaaaagtagcagatgaaact

SEQ ID NO: 3866 - DNA, 33 bp, Homo sapien
caggttttgaaaaaaacagtagcagatgaaact

SEQ ID NO: 3867 - DNA, 33 bp, Homo sapien
gtcaagtcaaatggacaaaagtcacacacagtc

SEQ ID NO: 3868 - DNA, 33 bp, Homo sapien
gtcaagtcaaatggacgaaagtcacacacagtc

SEQ ID NO: 3869 - DNA, 33 bp, Homo sapien
tagcacaagggcatcacgtacttcacgaggctt

SEQ ID NO: 3870 - DNA, 33 bp, Homo sapien
tagcacaagggcatcatgtacttcacgaggctt

SEQ ID NO: 3871 - DNA, 33 bp, Homo sapien
ccactatccttcctgcaatacatccacgagact

SEQ ID NO: 3872 - DNA, 33 bp, Homo sapien
ccactatccttcctgcgatacatccacgagact

SEQ ID NO: 3873 - DNA, 33 bp, Homo sapien
aattaaggtatgtacacgctttttaaagacata

SEQ ID NO: 3874 - DNA, 33 bp, Homo sapien
aattaaggtatgtacatgctttttaaagacata

SEQ ID NO: 3875 - DNA, 33 bp, Homo sapien
attgggtgttcatgtacgtgtgtgagatgtacc

SEQ ID NO: 3876 - DNA, 33 bp, Homo sapien
attgggtgttcatgtatgtgtgtgagatgtacc

SEQ ID NO: 3877 - DNA, 33 bp, Homo sapien
atcaacattcattaaacagtagcagactttaac

SEQ ID NO: 3878 - DNA, 33 bp, Homo sapien
atcaacattcattaaatagtagcagactttaac

SEQ ID NO: 3879 - DNA, 33 bp, Homo sapien
taaacatttgtatatacggtcaaatgactcttg

SEQ ID NO: 3880 - DNA, 33 bp, Homo sapien
taaacatttgtatatatggtcaaatgactcttg

SEQ ID NO: 3881 - DNA, 33 bp, Homo sapien
ctgggatgtgtttgaaagtgggatgcctcagag

SEQ ID NO: 3882 - DNA, 33 bp, Homo sapien
ctgggatgtgtttgaatgtgggatgcctcagag

SEQ ID NO: 3883 - DNA, 33 bp, Homo sapien
atctttaattgttggacggaaaagaaaggaacc

SEQ ID NO: 3884 - DNA, 33 bp, Homo sapien
atctttaattgttggatggaaaagaaaggaacc

SEQ ID NO: 3885 - DNA, 33 bp, Homo sapien
gctcctcagcactggacgtggcaggatttttct

SEQ ID NO: 3886 - DNA, 33 bp, Homo sapien
gctcctcagcactggatgtggcaggatttttct

SEQ ID NO: 3887 - DNA, 33 bp, Homo sapien
cccgctggcttattggaatggatgtgtgacacc

SEQ ID NO: 3888 - DNA, 33 bp, Homo sapien
cccgctggcttattgggatggatgtgtgacacc

SEQ ID NO: 3889 - DNA, 33 bp, Homo sapien
cctgctcaatgtgaaccggaaaggaaaggggat

SEQ ID NO: 3890 - DNA, 33 bp, Homo sapien
cctgctcaatgtgaacgggaaaggaaaggggat

SEQ ID NO: 3891 - DNA, 33 bp, Homo sapien; identical to SEQ ID NO: 3889

SEQ ID NO: 3892 - DNA, 33 bp, Homo sapien; identical to SEQ ID NO: 3890

SEQ ID NO: 3893 - DNA, 33 bp, Homo sapien
cacactttgtaacaggaaattcacacgtgcacc

SEQ ID NO: 3894 - DNA, 33 bp, Homo sapien
cacactttgtaacaggcaattcacacgtgcacc

SEQ ID NO: 3895 - DNA, 33 bp, Homo sapien
cactgggcacgccttccctagcagcaaagatgg

SEQ ID NO: 3896 - DNA, 33 bp, Homo sapien
cactgggcacgccttctctagcagcaaagatgg

SEQ ID NO: 3897 - DNA, 33 bp, Homo sapien
tggttgtggtcgagcccggatgctgtcacagcc

SEQ ID NO: 3898 - DNA, 33 bp, Homo sapien
tggttgtggtcgagcctggatgctgtcacagcc

SEQ ID NO: 3899 - DNA, 33 bp, Homo sapien
ctccagtctgatgctgaaaaaaccccagactca

SEQ ID NO: 3900 - DNA, 33 bp, Homo sapien
ctccagtctgatgctggaaaaaccccagactca

SEQ ID NO: 3901 - DNA, 33 bp, Homo sapien
gttctaatctttcatacacataaattacaacac

SEQ ID NO: 3902 - DNA, 33 bp, Homo sapien
gttctaatctttcatatacataaattacaacac

SEQ ID NO: 3903 - DNA, 33 bp, Homo sapien
gtaacttatctctatgaataggaaacattagtg

SEQ ID NO: 3904 - DNA, 33 bp, Homo sapien
gtaacttatctctatgcataggaaacattagtg

SEQ ID NO: 3905 - DNA, 33 bp, Homo sapien
taatcataaatattacccaaccgtgtgtgagag

SEQ ID NO: 3906 - DNA, 33 bp, Homo sapien
taatcataaatattactcaaccgtgtgtgagag

SEQ ID NO: 3907 - DNA, 33 bp, Homo sapien; identical to SEQ ID NO: 3905

SEQ ID NO: 3908 - DNA, 33 bp, Homo sapien; identical to SEQ ID NO: 3906

SEQ ID NO: 3909 - DNA, 33 bp, Homo sapien
gaacaaaactccattcgatctccttccattgac

SEQ ID NO: 3910 - DNA, 33 bp, Homo sapien
gaacaaaactccattctatctccttccattgac

SEQ ID NO: 3911 - DNA, 33 bp, Homo sapien
gaacccctggttacacagtcagagctaaaatgt

SEQ ID NO: 3912 - DNA, 33 bp, Homo sapien
gaacccctggttacacggtcagagctaaaatgt

SEQ ID NO: 3913 - DNA, 33 bp, Homo sapien
gctgatgccatagtcacagtgaataaatgatta

SEQ ID NO: 3914 - DNA, 33 bp, Homo sapien
gctgatgccatagtcatagtgaataaatgatta

SEQ ID NO: 3915 - DNA, 33 bp, Homo sapien; identical to SEQ ID NO: 3913

SEQ ID NO: 3916 - DNA, 33 bp, Homo sapien; identical to SEQ ID NO: 3914

SEQ ID NO: 3917 - DNA, 33 bp, Homo sapien
gaaaatcatcccaacaatgggtagttcctctct

SEQ ID NO: 3918 - DNA, 33 bp, Homo sapien
gaaaatcatcccaacagtgggtagttcctctct

SEQ ID NO: 3919 - DNA, 33 bp, Homo sapien
ataacagtgtcacataactttcaaagcttctca

SEQ ID NO: 3920 - DNA, 33 bp, Homo sapien
ataacagtgtcacatagctttcaaagcttctca

SEQ ID NO: 3921 - DNA, 33 bp, Homo sapien
tctgaaaccagttggaaagatgatgcaagcttg

SEQ ID NO: 3922 - DNA, 33 bp, Homo sapien
tctgaaaccagttggagagatgatgcaagcttg

SEQ ID NO: 3923 - DNA, 33 bp, Homo sapien
tttgagacttctcttcacagtgtatgtgctagt

SEQ ID NO: 3924 - DNA, 33 bp, Homo sapien
tttgagacttctcttcgcagtgtatgtgctagt

SEQ ID NO: 3925 - DNA, 33 bp, Homo sapien
tcccggtcagaaaaataactctgcaggctgcgc

SEQ ID NO: 3926 - DNA, 33 bp, Homo sapien
tcccggtcagaaaaatgactctgcaggctgcgc

SEQ ID NO: 3927 - DNA, 33 bp, Homo sapien
cctgatggcaggcattcaacagaggcagtgact

SEQ ID NO: 3928 - DNA, 33 bp, Homo sapien
cctgatggcaggcatttaacagaggcagtgact

SEQ ID NO: 3929 - DNA, 33 bp, Homo sapien
tcctgtttgcatcaataaattacaccagatggt

SEQ ID NO: 3930 - DNA, 33 bp, Homo sapien
tcctgtttgcatcaatgaattacaccagatggt

SEQ ID NO: 3931 - DNA, 33 bp, Homo sapien
gaagtggggagcagtacgaatcaaaagagaaaa

SEQ ID NO: 3932 - DNA, 33 bp, Homo sapien
gaagtggggagcagtatgaatcaaaagagaaaa

SEQ ID NO: 3933 - DNA, 33 bp, Homo sapien
gtaactggaatgcacagacttgctgatcttctc

SEQ ID NO: 3934 - DNA, 33 bp, Homo sapien
gtaactggaatgcacatacttgctgatcttctc

SEQ ID NO: 3935 - DNA, 33 bp, Homo sapien
tgtcgtgagaggtcccagactttgccagcctgc

SEQ ID NO: 3936 - DNA, 33 bp, Homo sapien
tgtcgtgagaggtcccggactttgccagcctgc

SEQ ID NO: 3937 - DNA, 33 bp, Homo sapien
cagaggggacgctccactgaagggctctgttgg

SEQ ID NO: 3938 - DNA, 33 bp, Homo sapien
cagaggggacgctccattgaagggctctgttgg

SEQ ID NO: 3939 - DNA, 33 bp, Homo sapien
tctctcaatggcaaaagggaagtgatggaattg

SEQ ID NO: 3940 - DNA, 33 bp, Homo sapien
tctctcaatggcaaaatggaagtgatggaattg

SEQ ID NO: 3941 - DNA, 33 bp, Homo sapien
caaatggtttgccacactagctaccccacaaac

SEQ ID NO: 3942 - DNA, 33 bp, Homo sapien
caaatggtttgccacattagctaccccacaaac

SEQ ID NO: 3943 - DNA, 33 bp, Homo sapien
aagcagactcattaaacgggaattcacccacta

SEQ ID NO: 3944 - DNA, 33 bp, Homo sapien
aagcagactcattaaatgggaattcacccacta

SEQ ID NO: 3945 - DNA, 33 bp, Homo sapien
tctgtgtgtttttggacgggattaacattggaa

SEQ ID NO: 3946 - DNA, 33 bp, Homo sapien
tctgtgtgtttttggatgggattaacattggaa

SEQ ID NO: 3947 - DNA, 33 bp, Homo sapien
tcacagatggtggccaatgcttttccattttca

SEQ ID NO: 3948 - DNA, 33 bp, Homo sapien
tcacagatggtggccagtgcttttccattttca

SEQ ID NO: 3949 - DNA, 33 bp, Homo sapien
ggatgaagacgaggacaaggatgactgagccac

SEQ ID NO: 3950 - DNA, 33 bp, Homo sapien
ggatgaagacgaggacgaggatgactgagccac

SEQ ID NO: 3951 - DNA, 33 bp, Homo sapien
tgactgatacacaatacgagctatgtgcaaatt

SEQ ID NO: 3952 - DNA, 33 bp, Homo sapien
tgactgatacacaatatgagctatgtgcaaatt

SEQ ID NO: 3953 - DNA, 33 bp, Homo sapien
taacttagacagctgaagggataggtcaggaaa

SEQ ID NO: 3954 - DNA, 33 bp, Homo sapien
taacttagacagctgacgggataggtcaggaaa

SEQ ID NO: 3955 - DNA, 33 bp, Homo sapien
attatactgtacattcacaaaatgatttttttc

SEQ ID NO: 3956 - DNA, 33 bp, Homo sapien
attatactgtacattcgcaaaatgatttttttc

SEQ ID NO: 3957 - DNA, 33 bp, Homo sapien
gaagaaactggactcagataggaaagacgggag

SEQ ID NO: 3958 - DNA, 33 bp, Homo sapien
gaagaaactggactcatataggaaagacgggag

SEQ ID NO: 3959 - DNA, 33 bp, Homo sapien
ggtaatatatatctcaccagctttgggggagga

SEQ ID NO: 3960 - DNA, 33 bp, Homo sapien
ggtaatatatatctcatcagctttgggggagga

SEQ ID NO: 3961 - DNA, 33 bp, Homo sapien
gggacccctccccatacagaagtttctagaatg

SEQ ID NO: 3962 - DNA, 33 bp, Homo sapien
gggacccctccccatatagaagtttctagaatg

SEQ ID NO: 3963 - DNA, 33 bp, Homo sapien
tatagccaactgattcacgcagaatattattgc

SEQ ID NO: 3964 - DNA, 33 bp, Homo sapien
tatagccaactgattcgcgcagaatattattgc

SEQ ID NO: 3965 - DNA, 33 bp, Homo sapien
aagacaagagcggtgacagatttgctcaaaatg

SEQ ID NO: 3966 - DNA, 33 bp, Homo sapien
aagacaagagcggtgagagatttgctcaaaatg

SEQ ID NO: 3967 - DNA, 33 bp, Homo sapien
aaggtaatggaaggtacaattctcttttattgt

SEQ ID NO: 3968 - DNA, 33 bp, Homo sapien
aaggtaatggaaggtataattctcttttattgt

SEQ ID NO: 3969 - DNA, 33 bp, Homo sapien
caaggcaagtgtcacccatcaacagctcccgaa

SEQ ID NO: 3970 - DNA, 33 bp, Homo sapien
caaggcaagtgtcacctatcaacagctcccgaa

SEQ ID NO: 3971 - DNA, 33 bp, Homo sapien
gcaagccatgtcagcaatctaagcctcagcctc

SEQ ID NO: 3972 - DNA, 33 bp, Homo sapien
gcaagccatgtcagcactctaagcctcagcctc

SEQ ID NO: 3973 - DNA, 33 bp, Homo sapien
aaggcattagtgcctccactcaacttgttggct

SEQ ID NO: 3974 - DNA, 33 bp, Homo sapien
aaggcattagtgcctctactcaacttgttggct

SEQ ID NO: 3975 - DNA, 33 bp, Homo sapien
agttaatgatggcaaacggattaaattttgttg

SEQ ID NO: 3976 - DNA, 33 bp, Homo sapien
agttaatgatggcaaatggattaaattttgttg

SEQ ID NO: 3977 - DNA, 33 bp, Homo sapien
cccatggtacctcatcaaaacatcctcctggga

SEQ ID NO: 3978 - DNA, 33 bp, Homo sapien
cccatggtacctcatcgaaacatcctcctggga

SEQ ID NO: 3979 - DNA, 33 bp, Homo sapien
gttttctggacggcacagggaaagacagtttca

SEQ ID NO: 3980 - DNA, 33 bp, Homo sapien
gttttctggacggcacggggaaagacagtttca

SEQ ID NO: 3981 - DNA, 33 bp, Homo sapien
taaaatgcctaatcacagagctgtatctcttgc

SEQ ID NO: 3982 - DNA, 33 bp, Homo sapien
taaaatgcctaatcacggagctgtatctcttgc

SEQ ID NO: 3983 - DNA, 33 bp, Homo sapien
tagaaaggggttcacacacgctaagcactcagt

SEQ ID NO: 3984 - DNA, 33 bp, Homo sapien
tagaaaggggttcacatacgctaagcactcagt

SEQ ID NO: 3985 - DNA, 33 bp, Homo sapien
aactttagtgagcaaacgatttaaacaaacata

SEQ ID NO: 3986 - DNA, 33 bp, Homo sapien
aactttagtgagcaaaggatttaaacaaacata

SEQ ID NO: 3987 - DNA, 33 bp, Homo sapien
ttgcaagagggagaaaagaagcccctttgcatc

SEQ ID NO: 3988 - DNA, 33 bp, Homo sapien
ttgcaagagggagaaacgaagcccctttgcatc

SEQ ID NO: 3989 - DNA, 33 bp, Homo sapien
tggagcggtttagtacaatcacttacttatttg

SEQ ID NO: 3990 - DNA, 33 bp, Homo sapien
tggagcggtttagtacgatcacttacttatttg

SEQ ID NO: 3991 - DNA, 33 bp, Homo sapien
ttattcagccttgaaaatgaaaatgcagacaca

SEQ ID NO: 3992 - DNA, 33 bp, Homo sapien
ttattcagccttgaaagtgaaaatgcagacaca

SEQ ID NO: 3993 - DNA, 33 bp, Homo sapien
ttaaaggaacagaaaaggagtatgaagtatgac

SEQ ID NO: 3994 - DNA, 33 bp, Homo sapien
ttaaaggaacagaaaatgagtatgaagtatgac

SEQ ID NO: 3995 - DNA, 33 bp, Homo sapien
aaacagtgctgaggaacagtgtttagtgctttc

SEQ ID NO: 3996 - DNA, 33 bp, Homo sapien
aaacagtgctgaggaatagtgtttagtgctttc

SEQ ID NO: 3997 - DNA, 33 bp, Homo sapien
gggcactccacctctccgacgtcatctcctacc

SEQ ID NO: 3998 - DNA, 33 bp, Homo sapien
gggcactccacctctctgacgtcatctcctacc

SEQ ID NO: 3999 - DNA, 33 bp, Homo sapien
ctcttccgtaccatctaacagtcttctgattaa

SEQ ID NO: 4000 - DNA, 33 bp, Homo sapien
ctcttccgtaccatctcacagtcttctgattaa

SEQ ID NO: 4001 - DNA, 33 bp, Homo sapien
aatcctagttgcataacagtaaccggggttgag

SEQ ID NO: 4002 - DNA, 33 bp, Homo sapien
aatcctagttgcataatagtaaccggggttgag

SEQ ID NO: 4003 - DNA, 33 bp, Homo sapien
gcaaccaataagggagcatgtcatgcaggccaa

SEQ ID NO: 4004 - DNA, 33 bp, Homo sapien
gcaaccaataagggagtatgtcatgcaggccaa

SEQ ID NO: 4005 - DNA, 33 bp, Homo sapien
aagctgccggcgcctacggccataccattctgg

SEQ ID NO: 4006 - DNA, 33 bp, Homo sapien
aagctgccggcgcctatggccataccattctgg

SEQ ID NO: 4007 - DNA, 33 bp, Homo sapien
tcacatttgtacctccactgtagtcaagtgaaa

SEQ ID NO: 4008 - DNA, 33 bp, Homo sapien
tcacatttgtacctccgctgtagtcaagtgaaa

SEQ ID NO: 4009 - DNA, 33 bp, Homo sapien
gatggttgtttggaaggcatattcatttcctag

SEQ ID NO: 4010 - DNA, 33 bp, Homo sapien
gatggttgtttggaagtcatattcatttcctag

SEQ ID NO: 4011 - DNA, 33 bp, Homo sapien
gcgctgccagagttaccgattttatggcatgga

SEQ ID NO: 4012 - DNA, 33 bp, Homo sapien
gcgctgccagagttactgattttatggcatgga

SEQ ID NO: 4013 - DNA, 33 bp, Homo sapien
gccttcagaacgggtgaaattgcctttgtccag

SEQ ID NO: 4014 - DNA, 33 bp, Homo sapien
gccttcagaacgggtggaattgcctttgtccag

SEQ ID NO: 4015 - DNA, 33 bp, Homo sapien
tgctaccatcatcaaccaacactcttctcattt

SEQ ID NO: 4016 - DNA, 33 bp, Homo sapien
tgctaccatcatcaactaacactcttctcattt

SEQ ID NO: 4017 - DNA, 33 bp, Homo sapien
cagacttgtcattcataaagagaggtgacaatc

SEQ ID NO: 4018 - DNA, 33 bp, Homo sapien
cagacttgtcattcatgaagagaggtgacaatc

SEQ ID NO: 4019 - DNA, 33 bp, Homo sapien
ttttaaaatgacaataataaacccattgcatat

SEQ ID NO: 4020 - DNA, 33 bp, Homo sapien
ttttaaaatgacaatagtaaacccattgcatat

SEQ ID NO: 4021 - DNA, 33 bp, Homo sapien
tgcaatggagactatacggcccataaagcttaa

SEQ ID NO: 4022 - DNA, 33 bp, Homo sapien
tgcaatggagactatatggcccataaagcttaa

SEQ ID NO: 4023 - DNA, 33 bp, Homo sapien
ccttacacgataaaccaaagttaactcaaaatg

SEQ ID NO: 4024 - DNA, 33 bp, Homo sapien
ccttacacgataaacccaagttaactcaaaatg

SEQ ID NO: 4025 - DNA, 33 bp, Homo sapien
gtatatgttttattcacgttctcggtggcgtat

SEQ ID NO: 4026 - DNA, 33 bp, Homo sapien
gtatatgttttattcatgttctcggtggcgtat

SEQ ID NO: 4027 - DNA, 33 bp, Homo sapien
gtgatgatgataccgacgattcttgtgagaggg

SEQ ID NO: 4028 - DNA, 33 bp, Homo sapien
gtgatgatgataccgatgattcttgtgagaggg

SEQ ID NO: 4029 - DNA, 33 bp, Homo sapien
taggaatggctttatcgcaggaatggttccatt

SEQ ID NO: 4030 - DNA, 33 bp, Homo sapien
taggaatggctttatctcaggaatggttccatt

SEQ ID NO: 4031 - DNA, 33 bp, Homo sapien
ccacaagctcattccactgacttaaggaaatgc

SEQ ID NO: 4032 - DNA, 33 bp, Homo sapien
ccacaagctcattccagtgacttaaggaaatgc

SEQ ID NO: 4033 - DNA, 33 bp, Homo sapien
acccagaataagcagaatagaagtcatcaagca

SEQ ID NO: 4034 - DNA, 33 bp, Homo sapien
acccagaataagcagagtagaagtcatcaagca

SEQ ID NO: 4035 - DNA, 33 bp, Homo sapien
ttatctcatttaaccccatgtagcaggcttatt

SEQ ID NO: 4036 - DNA, 33 bp, Homo sapien
ttatctcatttaaccctatgtagcaggcttatt

SEQ ID NO: 4037 - DNA, 33 bp, Homo sapien
tgaaggggtgatggaacagactctgggaaatat

SEQ ID NO: 4038 - DNA, 33 bp, Homo sapien
tgaaggggtgatggaatagactctgggaaatat

SEQ ID NO: 4039 - DNA, 33 bp, Homo sapien
atgtagaaacctacatcagtatttttggattat

SEQ ID NO: 4040 - DNA, 33 bp, Homo sapien
atgtagaaacctacatgagtatttttggattat

SEQ ID NO: 4041 - DNA, 33 bp, Homo sapien
gacaacttggtatttcgttcattcttagaattc

SEQ ID NO: 4042 - DNA, 33 bp, Homo sapien
gacaacttggtatttctttcattcttagaattc

SEQ ID NO: 4043 - DNA, 33 bp, Homo sapien
gcacccccccttctaactgtgacaatccaaagt

SEQ ID NO: 4044 - DNA, 33 bp, Homo sapien
gcacccccccttctaattgtgacaatccaaagt

SEQ ID NO: 4045 - DNA, 33 bp, Homo sapien
aactgcacctgtagccactatttactagatgct

SEQ ID NO: 4046 - DNA, 33 bp, Homo sapien
aactgcacctgtagcctctatttactagatgct

SEQ ID NO: 4047 - DNA, 33 bp, Homo sapien
cacctcacctcactgacgtctttgctgttcttt

SEQ ID NO: 4048 - DNA, 33 bp, Homo sapien
cacctcacctcactgatgtctttgctgttcttt

SEQ ID NO: 4049 - DNA, 33 bp, Homo sapien
ttgaagactgctcagaagtaacacctgccatgc

SEQ ID NO: 4050 - DNA, 33 bp, Homo sapien
ttgaagactgctcagaggtaacacctgccatgc

SEQ ID NO: 4051 - DNA, 33 bp, Homo sapien
tttccagcaaaacatcacggagcctgcacgtga

SEQ ID NO: 4052 - DNA, 33 bp, Homo sapien
tttccagcaaaacatcgcggagcctgcacgtga

SEQ ID NO: 4053 - DNA, 33 bp, Homo sapien
aatcaattcctggtaaatggaaaaacttggtct

SEQ ID NO: 4054 - DNA, 33 bp, Homo sapien
aatcaattcctggtaagtggaaaaacttggtct

SEQ ID NO: 4055 - DNA, 33 bp, Homo sapien
gtagggaaaaaagtgcaaaactgctccttggtg

SEQ ID NO: 4056 - DNA, 33 bp, Homo sapien
gtagggaaaaaagtgcgaaactgctccttggtg

SEQ ID NO: 4057 - DNA, 33 bp, Homo sapien
tgccgttgatgaaccacatggctctataaaagc

SEQ ID NO: 4058 - DNA, 33 bp, Homo sapien
tgccgttgatgaaccagatggctctataaaagc

SEQ ID NO: 4059 - DNA, 33 bp, Homo sapien
tatactttaaaaataacgtatcggcagaacgta

SEQ ID NO: 4060 - DNA, 33 bp, Homo sapien
tatactttaaaaataaggtatcggcagaacgta

SEQ ID NO: 4061 - DNA, 33 bp, Homo sapien
atgtttatggtctccacaatgtccacctgaatt

SEQ ID NO: 4062 - DNA, 33 bp, Homo sapien
atgtttatggtctccagaatgtccacctgaatt

SEQ ID NO: 4063 - DNA, 33 bp, Homo sapien
aaaacatctttcaacaaccaatctgaatcatca

SEQ ID NO: 4064 - DNA, 33 bp, Homo sapien
aaaacatctttcaacagccaatctgaatcatca

SEQ ID NO: 4065 - DNA, 33 bp, Homo sapien
gttcttccaacgtgggccagggaagccaaaaga

SEQ ID NO: 4066 - DNA, 33 bp, Homo sapien
gttcttccaacgtgggtcagggaagccaaaaga

SEQ ID NO: 4067 - DNA, 33 bp, Homo sapien
ggtacctggggagctccagacattgattctcct

SEQ ID NO: 4068 - DNA, 33 bp, Homo sapien
ggtacctggggagctctagacattgattctcct

SEQ ID NO: 4069 - DNA, 33 bp, Homo sapien
aattcaagcttggtaccacagaaagggtgaccc

SEQ ID NO: 4070 - DNA, 33 bp, Homo sapien
aattcaagcttggtactacagaaagggtgaccc

SEQ ID NO: 4071 - DNA, 33 bp, Homo sapien
caggtgtcaggagatgaaattcaagcttggtac

SEQ ID NO: 4072 - DNA, 33 bp, Homo sapien
caggtgtcaggagatggaattcaagcttggtac

SEQ ID NO: 4073 - DNA, 33 bp, Homo sapien
actaagacacttataaagggaatctgagtacaa

SEQ ID NO: 4074 - DNA, 33 bp, Homo sapien
actaagacacttataaggggaatctgagtacaa

SEQ ID NO: 4075 - DNA, 33 bp, Homo sapien
tctttgctacccaagaagtcaaaaccagcttgt

SEQ ID NO: 4076 - DNA, 33 bp, Homo sapien
tctttgctacccaagaggtcaaaaccagcttgt

SEQ ID NO: 4077 - DNA, 33 bp, Homo sapien
ctttagtcccagcagacgggctgttataccctt

SEQ ID NO: 4078 - DNA, 33 bp, Homo sapien
ctttagtcccagcagatgggctgttataccctt

SEQ ID NO: 4079 - DNA, 33 bp, Homo sapien
tgaggaattagtacacactggcccatgcgctgt

SEQ ID NO: 4080 - DNA, 33 bp, Homo sapien
tgaggaattagtacacgctggcccatgcgctgt

SEQ ID NO: 4081 - DNA, 33 bp, Homo sapien
atcggtccggatactacgccttgtgcgttccag

SEQ ID NO: 4082 - DNA, 33 bp, Homo sapien
atcggtccggatactaggccttgtgcgttccag

SEQ ID NO: 4083 - DNA, 33 bp, Homo sapien
tgtgccgagtccctgaggcaagaatgggccact

SEQ ID NO: 4084 - DNA, 33 bp, Homo sapien
tgtgccgagtccctgatgcaagaatgggccact

SEQ ID NO: 4085 - DNA, 33 bp, Homo sapien
acttttacaagcctgcagatgatgagcagcaga

SEQ ID NO: 4086 - DNA, 33 bp, Homo sapien
acttttacaagcctgccgatgatgagcagcaga

SEQ ID NO: 4087 - DNA, 33 bp, Homo sapien
cctgggtcaaaccaaaatccccataatggcaaa

SEQ ID NO: 4088 - DNA, 33 bp, Homo sapien
cctgggtcaaaccaaagtccccataatggcaaa

SEQ ID NO: 4089 - DNA, 33 bp, Homo sapien
cccagtgcaacgttctaaagagtcaccagagac

SEQ ID NO: 4090 - DNA, 33 bp, Homo sapien
cccagtgcaacgttctgaagagtcaccagagac

SEQ ID NO: 4091 - DNA, 33 bp, Homo sapien
gactgattttggcatcaactggtaggattttca

SEQ ID NO: 4092 - DNA, 33 bp, Homo sapien
gactgattttggcatcgactggtaggattttca

SEQ ID NO: 4093 - DNA, 33 bp, Homo sapien
tattttctagttagaaaatgtacatggttatta

SEQ ID NO: 4094 - DNA, 33 bp, Homo sapien
tattttctagttagaagatgtacatggttatta

SEQ ID NO: 4095 - DNA, 33 bp, Homo sapien
ggtagaggttcagggagatttgacagtgatggc

SEQ ID NO: 4096 - DNA, 33 bp, Homo sapien
ggtagaggttcagggatatttgacagtgatggc

SEQ ID NO: 4097 - DNA, 33 bp, Homo sapien
aatgtacctcacagtacgagaaccccatatgca

SEQ ID NO: 4098 - DNA, 33 bp, Homo sapien
aatgtacctcacagtatgagaaccccatatgca

SEQ ID NO: 4099 - DNA, 33 bp, Homo sapien
catctatatcagggaacggcaaacttgttttgt

SEQ ID NO: 4100 - DNA, 33 bp, Homo sapien
catctatatcagggaatggcaaacttgttttgt

SEQ ID NO: 4101 - DNA, 33 bp, Homo sapien
tttccacttgattgaccgccattaagcatctcc

SEQ ID NO: 4102 - DNA, 33 bp, Homo sapien
tttccacttgattgactgccattaagcatctcc

SEQ ID NO: 4103 - DNA, 33 bp, Homo sapien
agaaaaatgaagccaaatggaagctcagagcca

SEQ ID NO: 4104 - DNA, 33 bp, Homo sapien
agaaaaatgaagccaagtggaagctcagagcca

SEQ ID NO: 4105 - DNA, 33 bp, Homo sapien
catgtggaactctatacgcattgaaaatatcct

SEQ ID NO: 4106 - DNA, 33 bp, Homo sapien
catgtggaactctatatgcattgaaaatatcct

SEQ ID NO: 4107 - DNA, 33 bp, Homo sapien
tagaggtgagagctaaagtgtacgggtatcttt

SEQ ID NO: 4108 - DNA, 33 bp, Homo sapien
tagaggtgagagctaaggtgtacgggtatcttt

SEQ ID NO: 4109 - DNA, 33 bp, Homo sapien
gagaggtcaaaagaaagtcacacaggagaagtc

SEQ ID NO: 4110 - DNA, 33 bp, Homo sapien
gagaggtcaaaagaaattcacacaggagaagtc

SEQ ID NO: 4111 - DNA, 33 bp, Homo sapien
cagagacattgcagtacctgaacacgtctctgt

SEQ ID NO: 4112 - DNA, 33 bp, Homo sapien
cagagacattgcagtatctgaacacgtctctgt

SEQ ID NO: 4113 - DNA, 33 bp, Homo sapien
gaaccctaccgaataccagatataaaaataagc

SEQ ID NO: 4114 - DNA, 33 bp, Homo sapien
gaaccctaccgaatacgagatataaaaataagc

SEQ ID NO: 4115 - DNA, 33 bp, Homo sapien
tactggcaatcacctcgctaggcagcaacacac

SEQ ID NO: 4116 - DNA, 33 bp, Homo sapien
tactggcaatcacctctctaggcagcaacacac

SEQ ID NO: 4117 - DNA, 33 bp, Homo sapien
ggggcctgtggcagaactggatgtcgccagcgt

SEQ ID NO: 4118 - DNA, 33 bp, Homo sapien
ggggcctgtggcagaattggatgtcgccagcgt

SEQ ID NO: 4119 - DNA, 33 bp, Homo sapien
ggctcacgttttatacagaagggaaagattggc

SEQ ID NO: 4120 - DNA, 33 bp, Homo sapien
ggctcacgttttataccgaagggaaagattggc

SEQ ID NO: 4121 - DNA, 33 bp, Homo sapien
cttgtgagtttgagcacggtgactatttgcacc

SEQ ID NO: 4122 - DNA, 33 bp, Homo sapien
cttgtgagtttgagcatggtgactatttgcacc

SEQ ID NO: 4123 - DNA, 33 bp, Homo sapien
attggctttatggttcacatggtttcactcatg

SEQ ID NO: 4124 - DNA, 33 bp, Homo sapien
attggctttatggttcgcatggtttcactcatg

SEQ ID NO: 4125 - DNA, 33 bp, Homo sapien
acaaccaagataggccaggcacactttgggagg

SEQ ID NO: 4126 - DNA, 33 bp, Homo sapien
acaaccaagataggccgggcacactttgggagg

SEQ ID NO: 4127 - DNA, 33 bp, Homo sapien
tgagaaagagaatgaaaataaccgcaattttgc

SEQ ID NO: 4128 - DNA, 33 bp, Homo sapien
tgagaaagagaatgaacataaccgcaattttgc

SEQ ID NO: 4129 - DNA, 33 bp, Homo sapien
ttggcctctggaatttcaaacctttcattggta

SEQ ID NO: 4130 - DNA, 33 bp, Homo sapien
ttggcctctggaattttaaacctttcattggta

SEQ ID NO: 4131 - DNA, 33 bp, Homo sapien
aatctcgggtccaaaaatgaaatgcctcagagc

SEQ ID NO: 4132 - DNA, 33 bp, Homo sapien
aatctcgggtccaaaactgaaatgcctcagagc

SEQ ID NO: 4133 - DNA, 33 bp, Homo sapien
caactcctgcctctccaaaaacgaagcccgccc

SEQ ID NO: 4134 - DNA, 33 bp, Homo sapien
caactcctgcctctccgaaaacgaagcccgccc

SEQ ID NO: 4135 - DNA, 33 bp, Homo sapien
tttcctcacacctataagcacctacgcctcaac

SEQ ID NO: 4136 - DNA, 33 bp, Homo sapien
tttcctcacacctataggcacctacgcctcaac

SEQ ID NO: 4137 - DNA, 33 bp, Homo sapien
ctggttttgctaaaaacgacaaggaaagctact

SEQ ID NO: 4138 - DNA, 33 bp, Homo sapien
ctggttttgctaaaaatgacaaggaaagctact

SEQ ID NO: 4139 - DNA, 33 bp, Homo sapien
aacctggggattaggagtactgacatcttcctc

SEQ ID NO: 4140 - DNA, 33 bp, Homo sapien
aacctggggattaggattactgacatcttcctc

SEQ ID NO: 4141 - DNA, 33 bp, Homo sapien
cttttccagttctagccatctttggatgataaa

SEQ ID NO: 4142 - DNA, 33 bp, Homo sapien
cttttccagttctagctatctttggatgataaa

SEQ ID NO: 4143 - DNA, 33 bp, Homo sapien
tactctttctttccccaaaatatgcccatgtat

SEQ ID NO: 4144 - DNA, 33 bp, Homo sapien
tactctttctttcccccaaatatgcccatgtat

SEQ ID NO: 4145 - DNA, 33 bp, Homo sapien
ataaagaaggtgtcgcaatgatggatggctgca

SEQ ID NO: 4146 - DNA, 33 bp, Homo sapien
ataaagaaggtgtcgccatgatggatggctgca

SEQ ID NO: 4147 - DNA, 33 bp, Homo sapien
aggctcaaggctagcaccaaagccccaggctga

SEQ ID NO: 4148 - DNA, 33 bp, Homo sapien
aggctcaaggctagcatcaaagccccaggctga

SEQ ID NO: 4149 - DNA, 33 bp, Homo sapien
ccttctctgcattggaccttttcccagaaaata

SEQ ID NO: 4150 - DNA, 33 bp, Homo sapien
ccttctctgcattggatcttttcccagaaaata

SEQ ID NO: 4151 - DNA, 33 bp, Homo sapien
aattcactaacattaactggcaaaattgaattc

SEQ ID NO: 4152 - DNA, 33 bp, Homo sapien
aattcactaacattaattggcaaaattgaattc

SEQ ID NO: 4153 - DNA, 33 bp, Homo sapien
cagctgtaatggtccaagtacatggctatgatt

SEQ ID NO: 4154 - DNA, 33 bp, Homo sapien
cagctgtaatggtccaggtacatggctatgatt

SEQ ID NO: 4155 - DNA, 33 bp, Homo sapien
tccatctactaccccacgctgtaaactgtaata

SEQ ID NO: 4156 - DNA, 33 bp, Homo sapien
tccatctactaccccatgctgtaaactgtaata

SEQ ID NO: 4157 - DNA, 33 bp, Homo sapien
catgtcccttaccacactatgccttgctgcctc

SEQ ID NO: 4158 - DNA, 33 bp, Homo sapien
catgtcccttaccacagtatgccttgctgcctc

SEQ ID NO: 4159 - DNA, 33 bp, Homo sapien
gtagatgaggataagacgagctagtccacgcaa

SEQ ID NO: 4160 - DNA, 33 bp, Homo sapien
gtagatgaggataagatgagctagtccacgcaa

SEQ ID NO: 4161 - DNA, 33 bp, Homo sapien
atacagacaaaattaacacaattcatacaatta

SEQ ID NO: 4162 - DNA, 33 bp, Homo sapien
atacagacaaaattaatacaattcatacaatta

SEQ ID NO: 4163 - DNA, 33 bp, Homo sapien
atgttttcatgtttgaaagtcaaagattctaga

SEQ ID NO: 4164 - DNA, 33 bp, Homo sapien
atgttttcatgtttgagagtcaaagattctaga

SEQ ID NO: 4165 - DNA, 33 bp, Homo sapien
agagctgagtttttaaatggttcccaggtggct

SEQ ID NO: 4166 - DNA, 33 bp, Homo sapien
agagctgagtttttaagtggttcccaggtggct

SEQ ID NO: 4167 - DNA, 33 bp, Homo sapien
gccaccactgagggaaatgagaccaactgaaag

SEQ ID NO: 4168 - DNA, 33 bp, Homo sapien
gccaccactgagggaactgagaccaactgaaag

SEQ ID NO: 4169 - DNA, 33 bp, Homo sapien
ttcgtgaagaataatccatacaggtacaaataa

SEQ ID NO: 4170 - DNA, 33 bp, Homo sapien
ttcgtgaagaataatctatacaggtacaaataa

SEQ ID NO: 4171 - DNA, 33 bp, Homo sapien
tgctcaaaggcaggggaatagaggatttgatct

SEQ ID NO: 4172 - DNA, 33 bp, Homo sapien
tgctcaaaggcagggggatagaggatttgatct

SEQ ID NO: 4173 - DNA, 33 bp, Homo sapien
ataagaacacatccaaattaggctggtggagaa

SEQ ID NO: 4174 - DNA, 33 bp, Homo sapien
ataagaacacatccaagttaggctggtggagaa

SEQ ID NO: 4175 - DNA, 33 bp, Homo sapien
tgatagtattagtgacaccaattattgaacctc

SEQ ID NO: 4176 - DNA, 33 bp, Homo sapien
tgatagtattagtgaccccaattattgaacctc

SEQ ID NO: 4177 - DNA, 33 bp, Homo sapien
ccttgggctacaaacactggaaagctggtaaca

SEQ ID NO: 4178 - DNA, 33 bp, Homo sapien
ccttgggctacaaacattggaaagctggtaaca

SEQ ID NO: 4179 - DNA, 33 bp, Homo sapien
ctacacatggttctaaatgcagaggaaagagtc

SEQ ID NO: 4180 - DNA, 33 bp, Homo sapien
ctacacatggttctaagtgcagaggaaagagtc

SEQ ID NO: 4181 - DNA, 33 bp, Homo sapien
taaaagtagattagacacagtaaatatgactat

SEQ ID NO: 4182 - DNA, 33 bp, Homo sapien
taaaagtagattagactcagtaaatatgactat

SEQ ID NO: 4183 - DNA, 33 bp, Homo sapien
acagtgtttgaaggtgaagtacaatagaaggtg

SEQ ID NO: 4184 - DNA, 33 bp, Homo sapien
acagtgtttgaaggtggagtacaatagaaggtg

SEQ ID NO: 4185 - DNA, 33 bp, Homo sapien
tccagaatattataaaaccatgtgtgctgtgaa

SEQ ID NO: 4186 - DNA, 33 bp, Homo sapien
tccagaatattataaacccatgtgtgctgtgaa

SEQ ID NO: 4187 - DNA, 33 bp, Homo sapien
agtgttgaaactgtaacgtatcattttaatttc

SEQ ID NO: 4188 - DNA, 33 bp, Homo sapien
agtgttgaaactgtaatgtatcattttaatttc

SEQ ID NO: 4189 - DNA, 33 bp, Homo sapien
tgaagactggggaagaaaacatcctacgtgaaa

SEQ ID NO: 4190 - DNA, 33 bp, Homo sapien
tgaagactggggaagagaacatcctacgtgaaa

SEQ ID NO: 4191 - DNA, 33 bp, Homo sapien
gtttgcatcacctgacaacaaaaaccaccatgc

SEQ ID NO: 4192 - DNA, 33 bp, Homo sapien
gtttgcatcacctgacgacaaaaaccaccatgc

SEQ ID NO: 4193 - DNA, 33 bp, Homo sapien
ctctgggggtattccacgatgggaccaatgatt

SEQ ID NO: 4194 - DNA, 33 bp, Homo sapien
ctctgggggtattccatgatgggaccaatgatt

SEQ ID NO: 4195 - DNA, 33 bp, Homo sapien
ttcctgacaccgtaataaaactgaaattgtgcc

SEQ ID NO: 4196 - DNA, 33 bp, Homo sapien
ttcctgacaccgtaatcaaactgaaattgtgcc

SEQ ID NO: 4197 - DNA, 33 bp, Homo sapien
gaaggaggaatgcttcaatttaaaccatgacaa

SEQ ID NO: 4198 - DNA, 33 bp, Homo sapien
gaaggaggaatgcttccatttaaaccatgacaa

SEQ ID NO: 4199 - DNA, 33 bp, Homo sapien
tttaactctgagttcacctcttacgtgatgccc

SEQ ID NO: 4200 - DNA, 33 bp, Homo sapien
tttaactctgagttcatctcttacgtgatgccc

SEQ ID NO: 4201 - DNA, 33 bp, Homo sapien
tttacagtcaatgtccacccaaggaagaagcgc

SEQ ID NO: 4202 - DNA, 33 bp, Homo sapien
tttacagtcaatgtccgcccaaggaagaagcgc

SEQ ID NO: 4203 - DNA, 33 bp, Homo sapien
tgtatcttgaagataacaaggaatgctaccgac

SEQ ID NO: 4204 - DNA, 33 bp, Homo sapien
tgtatcttgaagataataaggaatgctaccgac

SEQ ID NO: 4205 - DNA, 33 bp, Homo sapien
tgaaataatacactgacgtgatttgaaaatatt

SEQ ID NO: 4206 - DNA, 33 bp, Homo sapien
tgaaataatacactgatgtgatttgaaaatatt

SEQ ID NO: 4207 - DNA, 33 bp, Homo sapien
ttcttgtattctccaacagctgtatagaatgct

SEQ ID NO: 4208 - DNA, 33 bp, Homo sapien
ttcttgtattctccaatagctgtatagaatgct

SEQ ID NO: 4209 - DNA, 33 bp, Homo sapien
aacagagaaaacaataagtagtagacaaagaaa

SEQ ID NO: 4210 - DNA, 33 bp, Homo sapien
aacagagaaaacaataggtagtagacaaagaaa

SEQ ID NO: 4211 - DNA, 33 bp, Homo sapien
aatagcacctccctccaagttgatgtgaggatt

SEQ ID NO: 4212 - DNA, 33 bp, Homo sapien
aatagcacctccctccgagttgatgtgaggatt

SEQ ID NO: 4213 - DNA, 33 bp, Homo sapien
atacactgatatataactggaacactggctctg

SEQ ID NO: 4214 - DNA, 33 bp, Homo sapien
atacactgatatataattggaacactggctctg

SEQ ID NO: 4215 - DNA, 33 bp, Homo sapien
atccatcaaattggaaacagggaacatggattc

SEQ ID NO: 4216 - DNA, 33 bp, Homo sapien
atccatcaaattggaatcagggaacatggattc

SEQ ID NO: 4217 - DNA, 33 bp, Homo sapien
gtgtgtaggaaaataacagcattgtggaaatag

SEQ ID NO: 4218 - DNA, 33 bp, Homo sapien
gtgtgtaggaaaataatagcattgtggaaatag

SEQ ID NO: 4219 - DNA, 33 bp, Homo sapien
catcctgctcaataaacccccaccattcagggt

SEQ ID NO: 4220 - DNA, 33 bp, Homo sapien
catcctgctcaataaagccccaccattcagggt

SEQ ID NO: 4221 - DNA, 33 bp, Homo sapien
ggtcctggacactgtacgcctccatcctgctca

SEQ ID NO: 4222 - DNA, 33 bp, Homo sapien
ggtcctggacactgtatgcctccatcctgctca

SEQ ID NO: 4223 - DNA, 33 bp, Homo sapien
ctggaccctgatcataacctcttcctgagaaac

SEQ ID NO: 4224 - DNA, 33 bp, Homo sapien
ctggaccctgatcataccctcttcctgagaaac

SEQ ID NO: 4225 - DNA, 33 bp, Homo sapien
ttcaaaaggctcataaagtgccccaggcaccct

SEQ ID NO: 4226 - DNA, 33 bp, Homo sapien
ttcaaaaggctcataaggtgccccaggcaccct

SEQ ID NO: 4227 - DNA, 33 bp, Homo sapien
gcgtggtagatgaacaagaattaaaaataaaga

SEQ ID NO: 4228 - DNA, 33 bp, Homo sapien
gcgtggtagatgaacaggaattaaaaataaaga

SEQ ID NO: 4229 - DNA, 33 bp, Homo sapien
tgtgctttacccttaacagagcaggcgtggtag

SEQ ID NO: 4230 - DNA, 33 bp, Homo sapien
tgtgctttacccttaagagagcaggcgtggtag

SEQ ID NO: 4231 - DNA, 33 bp, Homo sapien
tcactcaggttgttggaaaaattccatttctca

SEQ ID NO: 4232 - DNA, 33 bp, Homo sapien
tcactcaggttgttggcaaaattccatttctca

SEQ ID NO: 4233 - DNA, 33 bp, Homo sapien
aggtgaagataaggaccactgatatctagtgag

SEQ ID NO: 4234 - DNA, 33 bp, Homo sapien
aggtgaagataaggactactgatatctagtgag

SEQ ID NO: 4235 - DNA, 33 bp, Homo sapien
gcttgccttttagatacatcacatctgtgcgga

SEQ ID NO: 4236 - DNA, 33 bp, Homo sapien
gcttgccttttagatatatcacatctgtgcgga

SEQ ID NO: 4237 - DNA, 33 bp, Homo sapien
acctacctgaaacctccatataagtcccaccgt

SEQ ID NO: 4238 - DNA, 33 bp, Homo sapien
acctacctgaaacctctatataagtcccaccgt

SEQ ID NO: 4239 - DNA, 33 bp, Homo sapien
gagtttgggaagtggaaatcctgagtcagtgga

SEQ ID NO: 4240 - DNA, 33 bp, Homo sapien
gagtttgggaagtggacatcctgagtcagtgga

SEQ ID NO: 4241 - DNA, 33 bp, Homo sapien
tttgcaactgaatgcaacaagaaccacatttga

SEQ ID NO: 4242 - DNA, 33 bp, Homo sapien
tttgcaactgaatgcagcaagaaccacatttga

SEQ ID NO: 4243 - DNA, 33 bp, Homo sapien
cttctctctgggcctcgattttatcatcaatta

SEQ ID NO: 4244 - DNA, 33 bp, Homo sapien
cttctctctgggcctctattttatcatcaatta

SEQ ID NO: 4245 - DNA, 33 bp, Homo sapien
tcttctctcctaaaaacgtcttctgcaaaaaat

SEQ ID NO: 4246 - DNA, 33 bp, Homo sapien
tcttctctcctaaaaatgtcttctgcaaaaaat

SEQ ID NO: 4247 - DNA, 33 bp, Homo sapien
ggtttcacattttcaaatggtttgcaatagcca

SEQ ID NO: 4248 - DNA, 33 bp, Homo sapien
ggtttcacattttcaagtggtttgcaatagcca

SEQ ID NO: 4249 - DNA, 33 bp, Homo sapien
atgaataaaattctaccggtacatatccacaac

SEQ ID NO: 4250 - DNA, 33 bp, Homo sapien
atgaataaaattctactggtacatatccacaac

SEQ ID NO: 4251 - DNA, 33 bp, Homo sapien
actgggttcaggagaaagtctttgaaattaatg

SEQ ID NO: 4252 - DNA, 33 bp, Homo sapien
actgggttcaggagaaggtctttgaaattaatg

SEQ ID NO: 4253 - DNA, 33 bp, Homo sapien
gtggaagttgagatgaacaggagtgaccccctg

SEQ ID NO: 4254 - DNA, 33 bp, Homo sapien
gtggaagttgagatgatcaggagtgaccccctg

SEQ ID NO: 4255 - DNA, 33 bp, Homo sapien
tttttcagcagacttacactcaaatactcagaa

SEQ ID NO: 4256 - DNA, 33 bp, Homo sapien
tttttcagcagacttagactcaaatactcagaa

SEQ ID NO: 4257 - DNA, 33 bp, Homo sapien
agaacctatcattgtcaatcatgcctccaagaa

SEQ ID NO: 4258 - DNA, 33 bp, Homo sapien
agaacctatcattgtcgatcatgcctccaagaa

SEQ ID NO: 4259 - DNA, 33 bp, Homo sapien
gaccctcacccttgtacgatcacttctccattc

SEQ ID NO: 4260 - DNA, 33 bp, Homo sapien
gaccctcacccttgtatgatcacttctccattc

SEQ ID NO: 4261 - DNA, 33 bp, Homo sapien
aaattctgtctttacacaggtcgtgacaagtaa

SEQ ID NO: 4262 - DNA, 33 bp, Homo sapien
aaattctgtctttacataggtcgtgacaagtaa

SEQ ID NO: 4263 - DNA, 33 bp, Homo sapien
taaatcttgccttttcaccattctttgagaaac

SEQ ID NO: 4264 - DNA, 33 bp, Homo sapien
taaatcttgccttttctccattctttgagaaac

SEQ ID NO: 4265 - DNA, 33 bp, Homo sapien
tgttgtctctgaaaaagattcagaatcctggct

SEQ ID NO: 4266 - DNA, 33 bp, Homo sapien
tgttgtctctgaaaaatattcagaatcctggct

SEQ ID NO: 4267 - DNA, 33 bp, Homo sapien
ctgagcttatgagtcccgataaaagtctacgga

SEQ ID NO: 4268 - DNA, 33 bp, Homo sapien
ctgagcttatgagtcctgataaaagtctacgga

SEQ ID NO: 4269 - DNA, 33 bp, Homo sapien
ctttttttttaagctgcattcatgctgtgttga

SEQ ID NO: 4270 - DNA, 33 bp, Homo sapien
ctttttttttaagctgtattcatgctgtgttga

SEQ ID NO: 4271 - DNA, 33 bp, Homo sapien
tatgacgacttttccccccatttccaagatgca

SEQ ID NO: 4272 - DNA, 33 bp, Homo sapien
tatgacgacttttccctccatttccaagatgca

SEQ ID NO: 4273 - DNA, 33 bp, Homo sapien
aagtaaaggaaacataccaggaaagaacatctg

SEQ ID NO: 4274 - DNA, 33 bp, Homo sapien
aagtaaaggaaacatatcaggaaagaacatctg

SEQ ID NO: 4275 - DNA, 33 bp, Homo sapien
ttatttatttatggacccacttcccttgctcaa

SEQ ID NO: 4276 - DNA, 33 bp, Homo sapien
ttatttatttatggactcacttcccttgctcaa

SEQ ID NO: 4277 - DNA, 33 bp, Homo sapien
agttggaggccagataatacagaagccggacac

SEQ ID NO: 4278 - DNA, 33 bp, Homo sapien
agttggaggccagatagtacagaagccggacac

SEQ ID NO: 4279 - DNA, 33 bp, Homo sapien
ggatgaagccacaagaaaagcatgagatgacca

SEQ ID NO: 4280 - DNA, 33 bp, Homo sapien
ggatgaagccacaagagaagcatgagatgacca

SEQ ID NO: 4281 - DNA, 33 bp, Homo sapien
ccaattttctcatctgcatgcctagattctgct

SEQ ID NO: 4282 - DNA, 33 bp, Homo sapien
ccaattttctcatctgtatgcctagattctgct

SEQ ID NO: 4283 - DNA, 33 bp, Homo sapien
aaattgaagctcaaaaaattaaatgacctgccc

SEQ ID NO: 4284 - DNA, 33 bp, Homo sapien
aaattgaagctcaaaagattaaatgacctgccc

SEQ ID NO: 4285 - DNA, 33 bp, Homo sapien
acagctactaaataaacgtgcacagtcatgaat

SEQ ID NO: 4286 - DNA, 33 bp, Homo sapien
acagctactaaataaaggtgcacagtcatgaat

SEQ ID NO: 4287 - DNA, 33 bp, Homo sapien
tgtaggcttactcaccaccagatactgttgtca

SEQ ID NO: 4288 - DNA, 33 bp, Homo sapien
tgtaggcttactcaccgccagatactgttgtca

SEQ ID NO: 4289 - DNA, 33 bp, Homo sapien
aaggcaggaacaaagaaaacaaccttgcttcta

SEQ ID NO: 4290 - DNA, 33 bp, Homo sapien
aaggcaggaacaaagagaacaaccttgcttcta

SEQ ID NO: 4291 - DNA, 33 bp, Homo sapien
atgagggcgcaggaagaatacaagatctaaacc

SEQ ID NO: 4292 - DNA, 33 bp, Homo sapien
atgagggcgcaggaaggatacaagatctaaacc

SEQ ID NO: 4293 - DNA, 33 bp, Homo sapien
gaaaagaaaagataaaaccaagagtgtagctat

SEQ ID NO: 4294 - DNA, 33 bp, Homo sapien
gaaaagaaaagataaatccaagagtgtagctat

SEQ ID NO: 4295 - DNA, 33 bp, Homo sapien
gagttggccttggtaacgctgggaacctacaaa

SEQ ID NO: 4296 - DNA, 33 bp, Homo sapien
gagttggccttggtaatgctgggaacctacaaa

SEQ ID NO: 4297 - DNA, 33 bp, Homo sapien
tagcatcatctccatccactgttgccatgagga

SEQ ID NO: 4298 - DNA, 33 bp, Homo sapien
tagcatcatctccatcgactgttgccatgagga

SEQ ID NO: 4299 - DNA, 33 bp, Homo sapien
cagggagaaccagaggaccatagagcacttcac

SEQ ID NO: 4300 - DNA, 33 bp, Homo sapien
cagggagaaccagagggccatagagcacttcac

SEQ ID NO: 4301 - DNA, 33 bp, Homo sapien
tggctgtccattccagcagagtttccatgttat

SEQ ID NO: 4302 - DNA, 33 bp, Homo sapien
tggctgtccattccaggagagtttccatgttat

SEQ ID NO: 4303 - DNA, 33 bp, Homo sapien
ccagagttacatttgtgaataaaaccaccatgt

SEQ ID NO: 4304 - DNA, 33 bp, Homo sapien
ccagagttacatttgttaataaaaccaccatgt

SEQ ID NO: 4305 - DNA, 33 bp, Homo sapien
tatgctaaatgaaaaccggacacaaaagaccac

SEQ ID NO: 4306 - DNA, 33 bp, Homo sapien
tatgctaaatgaaaactggacacaaaagaccac

SEQ ID NO: 4307 - DNA, 33 bp, Homo sapien
tacttccacatattcaacttgcattaattatgt

SEQ ID NO: 4308 - DNA, 33 bp, Homo sapien
tacttccacatattcagcttgcattaattatgt

SEQ ID NO: 4309 - DNA, 33 bp, Homo sapien
tgtccagtgcttcacaaccattgaaaacataat

SEQ ID NO: 4310 - DNA, 33 bp, Homo sapien
tgtccagtgcttcacacccattgaaaacataat

SEQ ID NO: 4311 - DNA, 33 bp, Homo sapien
tgtgaagcactggacaagttgtaactgagggta

SEQ ID NO: 4312 - DNA, 33 bp, Homo sapien
tgtgaagcactggacaggttgtaactgagggta

SEQ ID NO: 4313 - DNA, 33 bp, Homo sapien
tgcttttcactctaagcaggctagcggatttgg

SEQ ID NO: 4314 - DNA, 33 bp, Homo sapien
tgcttttcactctaagtaggctagcggatttgg

SEQ ID NO: 4315 - DNA, 33 bp, Homo sapien
agggaagccaaactgaactagatctaattgtca

SEQ ID NO: 4316 - DNA, 33 bp, Homo sapien
agggaagccaaactgagctagatctaattgtca

SEQ ID NO: 4317 - DNA, 33 bp, Homo sapien
atgaaggctctctaatcaattaggcactcggtg

SEQ ID NO: 4318 - DNA, 33 bp, Homo sapien
atgaaggctctctaatgaattaggcactcggtg

SEQ ID NO: 4319 - DNA, 33 bp, Homo sapien
ccaaatcgatgactgcaagaatgttctccttta

SEQ ID NO: 4320 - DNA, 33 bp, Homo sapien
ccaaatcgatgactgctagaatgttctccttta

SEQ ID NO: 4321 - DNA, 33 bp, Homo sapien
ttcttctctcaattccaaagacaaatgattgta

SEQ ID NO: 4322 - DNA, 33 bp, Homo sapien
ttcttctctcaattccgaagacaaatgattgta

SEQ ID NO: 4323 - DNA, 33 bp, Homo sapien
ggcttctcactgaatagctctacttggaggtct

SEQ ID NO: 4324 - DNA, 33 bp, Homo sapien
ggcttctcactgaatatctctacttggaggtct

SEQ ID NO: 4325 - DNA, 33 bp, Homo sapien
ggtgcattaacagctcactgcagatttgcaact

SEQ ID NO: 4326 - DNA, 33 bp, Homo sapien
ggtgcattaacagctcgctgcagatttgcaact

SEQ ID NO: 4327 - DNA, 33 bp, Homo sapien
atgctaactgctgtcacagataaactgaaatct

SEQ ID NO: 4328 - DNA, 33 bp, Homo sapien
atgctaactgctgtcagagataaactgaaatct

SEQ ID NO: 4329 - DNA, 33 bp, Homo sapien
gccctgtatcagctggaataaggagctatgaag

SEQ ID NO: 4330 - DNA, 33 bp, Homo sapien
gccctgtatcagctgggataaggagctatgaag

SEQ ID NO: 4331 - DNA, 33 bp, Homo sapien
acagggctgagatacaatggtttcttctccact

SEQ ID NO: 4332 - DNA, 33 bp, Homo sapien
acagggctgagatacagtggtttcttctccact

SEQ ID NO: 4333 - DNA, 33 bp, Homo sapien
gagataatctaggtaaacagtagacccaatgcc

SEQ ID NO: 4334 - DNA, 33 bp, Homo sapien
gagataatctaggtaagcagtagacccaatgcc

SEQ ID NO: 4335 - DNA, 33 bp, Homo sapien
gtctatgctctgaacactggaccatacagcctg

SEQ ID NO: 4336 - DNA, 33 bp, Homo sapien
gtctatgctctgaacattggaccatacagcctg

SEQ ID NO: 4337 - DNA, 33 bp, Homo sapien
cttttatctgctgatacagtttgtgtataagaa

SEQ ID NO: 4338 - DNA, 33 bp, Homo sapien
cttttatctgctgatatagtttgtgtataagaa

SEQ ID NO: 4339 - DNA, 33 bp, Homo sapien
tttctgtaactgcccaatgagggagacaaaaga

SEQ ID NO: 4340 - DNA, 33 bp, Homo sapien
tttctgtaactgcccagtgagggagacaaaaga

SEQ ID NO: 4341 - DNA, 33 bp, Homo sapien
acttttgaattaaagaaaaacagttgcagaagg

SEQ ID NO: 4342 - DNA, 33 bp, Homo sapien
acttttgaattaaagagaaacagttgcagaagg

SEQ ID NO: 4343 - DNA, 33 bp, Homo sapien
atattttctagacttacagagtttggagattcc

SEQ ID NO: 4344 - DNA, 33 bp, Homo sapien
atattttctagacttagagagtttggagattcc

SEQ ID NO: 4345 - DNA, 33 bp, Homo sapien
tgaacctgtactagagaaggcataaccaaaaca

SEQ ID NO: 4346 - DNA, 33 bp, Homo sapien
tgaacctgtactagaggaggcataaccaaaaca

SEQ ID NO: 4347 - DNA, 33 bp, Homo sapien
ttcccaagtcccatacagcattttaacaaccca

SEQ ID NO: 4348 - DNA, 33 bp, Homo sapien
ttcccaagtcccatactgcattttaacaaccca

SEQ ID NO: 4349 - DNA, 33 bp, Homo sapien
gcatgctgcctagccacgtgagccacctttcac

SEQ ID NO: 4350 - DNA, 33 bp, Homo sapien
gcatgctgcctagccatgtgagccacctttcac

SEQ ID NO: 4351 - DNA, 33 bp, Homo sapien
tgttatcaccgttttcaatttctacactcctga

SEQ ID NO: 4352 - DNA, 33 bp, Homo sapien
tgttatcaccgttttcgatttctacactcctga

SEQ ID NO: 4353 - DNA, 33 bp, Homo sapien
tgggacagagcatttcaatgacccgcatggctg

SEQ ID NO: 4354 - DNA, 33 bp, Homo sapien
tgggacagagcatttcgatgacccgcatggctg

SEQ ID NO: 4355 - DNA, 33 bp, Homo sapien
cttgaaatctgttaagcagacatctcttgttag

SEQ ID NO: 4356 - DNA, 33 bp, Homo sapien
cttgaaatctgttaaggagacatctcttgttag

SEQ ID NO: 4357 - DNA, 33 bp, Homo sapien
ggacttgctatcttcaacccctcagagccttcc

SEQ ID NO: 4358 - DNA, 33 bp, Homo sapien
ggacttgctatcttcagcccctcagagccttcc

SEQ ID NO: 4359 - DNA, 33 bp, Homo sapien
caccataaactgataaaggagtttcttaccagt

SEQ ID NO: 4360 - DNA, 33 bp, Homo sapien
caccataaactgataagggagtttcttaccagt

SEQ ID NO: 4361 - DNA, 33 bp, Homo sapien
cgtctgtaacagcaagaaaaggccctaacccac

SEQ ID NO: 4362 - DNA, 33 bp, Homo sapien
cgtctgtaacagcaagcaaaggccctaacccac

SEQ ID NO: 4363 - DNA, 33 bp, Homo sapien
agacttgggacactcacctttttattttgcagc

SEQ ID NO: 4364 - DNA, 33 bp, Homo sapien
agacttgggacactcatctttttattttgcagc

SEQ ID NO: 4365 - DNA, 33 bp, Homo sapien
ggctattgttaatgcaaccagaatagttcagtg

SEQ ID NO: 4366 - DNA, 33 bp, Homo sapien
ggctattgttaatgcatccagaatagttcagtg

SEQ ID NO: 4367 - DNA, 33 bp, Homo sapien
aggggaaagccatttaaagtatgctacagggaa

SEQ ID NO: 4368 - DNA, 33 bp, Homo sapien
aggggaaagccatttagagtatgctacagggaa

SEQ ID NO: 4369 - DNA, 33 bp, Homo sapien
caaattttgtaagccacgatatacacttcaaag

SEQ ID NO: 4370 - DNA, 33 bp, Homo sapien
caaattttgtaagccatgatatacacttcaaag

SEQ ID NO: 4371 - DNA, 33 bp, Homo sapien
attgcaaaagaagagagcttacccatggacttc

SEQ ID NO: 4372 - DNA, 33 bp, Homo sapien
attgcaaaagaagagatcttacccatggacttc

SEQ ID NO: 4373 - DNA, 33 bp, Homo sapien
ctgcttgcttaatcctaacaaacttggtagagg

SEQ ID NO: 4374 - DNA, 33 bp, Homo sapien
ctgcttgcttaatcctgacaaacttggtagagg

SEQ ID NO: 4375 - DNA, 33 bp, Homo sapien
aactaactccaggagacagtttagaggctgtca

SEQ ID NO: 4376 - DNA, 33 bp, Homo sapien
aactaactccaggagatagtttagaggctgtca

SEQ ID NO: 4377 - DNA, 33 bp, Homo sapien
aataatgactcagaggaaaataggtgttcagga

SEQ ID NO: 4378 - DNA, 33 bp, Homo sapien
aataatgactcagagggaaataggtgttcagga

SEQ ID NO: 4379 - DNA, 33 bp, Homo sapien
tgggatcttctgaaagaccgtgatgaccacata

SEQ ID NO: 4380 - DNA, 33 bp, Homo sapien
tgggatcttctgaaagtccgtgatgaccacata

SEQ ID NO: 4381 - DNA, 33 bp, Homo sapien
agagtggtttgcagtcaatactcagtggtttgg

SEQ ID NO: 4382 - DNA, 33 bp, Homo sapien
agagtggtttgcagtcgatactcagtggtttgg

SEQ ID NO: 4383 - DNA, 33 bp, Homo sapien
ccaccatagacacctcacaggtaaatcttagtg

SEQ ID NO: 4384 - DNA, 33 bp, Homo sapien
ccaccatagacacctcgcaggtaaatcttagtg

SEQ ID NO: 4385 - DNA, 33 bp, Homo sapien
ttctgaagcgagaaaagcagtttcccctctttc

SEQ ID NO: 4386 - DNA, 33 bp, Homo sapien
ttctgaagcgagaaaatcagtttcccctctttc

SEQ ID NO: 4387 - DNA, 33 bp, Homo sapien
ctagagccactacaacaatcgaatgggataatg

SEQ ID NO: 4388 - DNA, 33 bp, Homo sapien
ctagagccactacaacgatcgaatgggataatg

SEQ ID NO: 4389 - DNA, 33 bp, Homo sapien
gcttgcctcctgccatcaaatcacgcaacaccg

SEQ ID NO: 4390 - DNA, 33 bp, Homo sapien
gcttgcctcctgccatgaaatcacgcaacaccg

SEQ ID NO: 4391 - DNA, 33 bp, Homo sapien
agtctgatgcaagcaacagaaaagaggagtgtt

SEQ ID NO: 4392 - DNA, 33 bp, Homo sapien
agtctgatgcaagcaatagaaaagaggagtgtt

SEQ ID NO: 4393 - DNA, 33 bp, Homo sapien
gtaattttgtactccaagggacatttgataatg

SEQ ID NO: 4394 - DNA, 33 bp, Homo sapien
gtaattttgtactccaggggacatttgataatg

SEQ ID NO: 4395 - DNA, 33 bp, Homo sapien
cttgctgaaattccataaacgtcttatgtgttt

SEQ ID NO: 4396 - DNA, 33 bp, Homo sapien
cttgctgaaattccatgaacgtcttatgtgttt

SEQ ID NO: 4397 - DNA, 33 bp, Homo sapien
gtgcagcaattatgagacattgcattgaactca

SEQ ID NO: 4398 - DNA, 33 bp, Homo sapien
gtgcagcaattatgagccattgcattgaactca

SEQ ID NO: 4399 - DNA, 33 bp, Homo sapien
acatctgaagactgaccggccaactaggaaccg

SEQ ID NO: 4400 - DNA, 33 bp, Homo sapien
acatctgaagactgactggccaactaggaaccg

SEQ ID NO: 4401 - DNA, 33 bp, Homo sapien
cgtattccttcaaataacaaggaaatacacgct

SEQ ID NO: 4402 - DNA, 33 bp, Homo sapien
cgtattccttcaaatatcaaggaaatacacgct

SEQ ID NO: 4403 - DNA, 33 bp, Homo sapien
aatgatggaaagtctaaataccttgatagtcat

SEQ ID NO: 4404 - DNA, 33 bp, Homo sapien
aatgatggaaagtctagataccttgatagtcat

SEQ ID NO: 4405 - DNA, 33 bp, Homo sapien
agatggttacgtgactaaacccagtacacgccc

SEQ ID NO: 4406 - DNA, 33 bp, Homo sapien
agatggttacgtgactgaacccagtacacgccc

SEQ ID NO: 4407 - DNA, 33 bp, Homo sapien
agctgtgacccaggacagagagttttgagatgg

SEQ ID NO: 4408 - DNA, 33 bp, Homo sapien
agctgtgacccaggactgagagttttgagatgg

SEQ ID NO: 4409 - DNA, 33 bp, Homo sapien
tttcccacatgacttaacggagtgacttttgtg

SEQ ID NO: 4410 - DNA, 33 bp, Homo sapien
tttcccacatgacttatcggagtgacttttgtg

SEQ ID NO: 4411 - DNA, 33 bp, Homo sapien
agtgtgtgtgaataaacccacctcctgaataca

SEQ ID NO: 4412 - DNA, 33 bp, Homo sapien
agtgtgtgtgaataaatccacctcctgaataca

SEQ ID NO: 4413 - DNA, 33 bp, Homo sapien
tctttggaacttgtaaacctccataatcttgtg

SEQ ID NO: 4414 - DNA, 33 bp, Homo sapien
tctttggaacttgtaagcctccataatcttgtg

SEQ ID NO: 4415 - DNA, 33 bp, Homo sapien
cctagagttagatgtaaggtgacacataatcag

SEQ ID NO: 4416 - DNA, 33 bp, Homo sapien
cctagagttagatgtagggtgacacataatcag

SEQ ID NO: 4417 - DNA, 33 bp, Homo sapien
caaatacattgtagaccgagcagctgaaattgg

SEQ ID NO: 4418 - DNA, 33 bp, Homo sapien
caaatacattgtagactgagcagctgaaattgg

SEQ ID NO: 4419 - DNA, 33 bp, Homo sapien
ggtaactctgtatggaccatctcctgggagggg

SEQ ID NO: 4420 - DNA, 33 bp, Homo sapien
ggtaactctgtatggatcatctcctgggagggg

SEQ ID NO: 4421 - DNA, 33 bp, Homo sapien
gggtctggcaatgcaacggattgaaaataaaaa

SEQ ID NO: 4422 - DNA, 33 bp, Homo sapien
gggtctggcaatgcaatggattgaaaataaaaa

SEQ ID NO: 4423 - DNA, 33 bp, Homo sapien
agcagggagaacagtgaatcagagctctgaaga

SEQ ID NO: 4424 - DNA, 33 bp, Homo sapien
agcagggagaacagtggatcagagctctgaaga

SEQ ID NO: 4425 - DNA, 33 bp, Homo sapien
accagcttcacaagagcagaatgagacacagtt

SEQ ID NO: 4426 - DNA, 33 bp, Homo sapien
accagcttcacaagaggagaatgagacacagtt

SEQ ID NO: 4427 - DNA, 33 bp, Homo sapien
tttaaagaattcagccacaaagaaggtactctg

SEQ ID NO: 4428 - DNA, 33 bp, Homo sapien
tttaaagaattcagccgcaaagaaggtactctg

SEQ ID NO: 4429 - DNA, 33 bp, Homo sapien
tctggtatcctagtggaaacccataattcttct

SEQ ID NO: 4430 - DNA, 33 bp, Homo sapien
tctggtatcctagtgggaacccataattcttct

SEQ ID NO: 4431 - DNA, 33 bp, Homo sapien
ttttctgagcttccaaatgatttgaggaatagg

SEQ ID NO: 4432 - DNA, 33 bp, Homo sapien
ttttctgagcttccaactgatttgaggaatagg

SEQ ID NO: 4433 - DNA, 33 bp, Homo sapien
aatctcatcccaaaacagcgtccaatctgccaa

SEQ ID NO: 4434 - DNA, 33 bp, Homo sapien
aatctcatcccaaaacggcgtccaatctgccaa

SEQ ID NO: 4435 - DNA, 33 bp, Homo sapien
cttacacacattcaacaccatttagtatttatt

SEQ ID NO: 4436 - DNA, 33 bp, Homo sapien
cttacacacattcaaccccatttagtatttatt

SEQ ID NO: 4437 - DNA, 33 bp, Homo sapien
gaactttctgaagacagattttgctgaaaaaga

SEQ ID NO: 4438 - DNA, 33 bp, Homo sapien
gaactttctgaagacatattttgctgaaaaaga

SEQ ID NO: 4439 - DNA, 33 bp, Homo sapien
gtttaaaatgcctcatgaaaagtgcatgagcat

SEQ ID NO: 4440 - DNA, 33 bp, Homo sapien
gtttaaaatgcctcattaaaagtgcatgagcat

SEQ ID NO: 4441 - DNA, 33 bp, Homo sapien
catatcttgtaagaacaggtataaacgtctaca

SEQ ID NO: 4442 - DNA, 33 bp, Homo sapien
catatcttgtaagaacgggtataaacgtctaca

SEQ ID NO: 4443 - DNA, 33 bp, Homo sapien
gtgaagcctcatgaaccactttgtggaagcctt

SEQ ID NO: 4444 - DNA, 33 bp, Homo sapien
gtgaagcctcatgaactactttgtggaagcctt

SEQ ID NO: 4445 - DNA, 33 bp, Homo sapien
cttagctcactgtggaaaagcaaaagatgctgg

SEQ ID NO: 4446 - DNA, 33 bp, Homo sapien
cttagctcactgtggagaagcaaaagatgctgg

SEQ ID NO: 4447 - DNA, 33 bp, Homo sapien
cttcctttctattgtgaaaataccacccaatga

SEQ ID NO: 4448 - DNA, 33 bp, Homo sapien
cttcctttctattgtgcaaataccacccaatga

SEQ ID NO: 4449 - DNA, 33 bp, Homo sapien
aattagaatttaagtgcaattagtttatttgct

SEQ ID NO: 4450 - DNA, 33 bp, Homo sapien
aattagaatttaagtggaattagtttatttgct

SEQ ID NO: 4451 - DNA, 33 bp, Homo sapien
ctcagaatgaaacttcccagaattaacagaact

SEQ ID NO: 4452 - DNA, 33 bp, Homo sapien
ctcagaatgaaacttcgcagaattaacagaact

SEQ ID NO: 4453 - DNA, 33 bp, Homo sapien
ttgccagacttttcaaaagcagtcagatttcat

SEQ ID NO: 4454 - DNA, 33 bp, Homo sapien
ttgccagacttttcaagagcagtcagatttcat

SEQ ID NO: 4455 - DNA, 33 bp, Homo sapien
aacttaggcacacacaagcggctataccataca

SEQ ID NO: 4456 - DNA, 33 bp, Homo sapien
aacttaggcacacacaggcggctataccataca

SEQ ID NO: 4457 - DNA, 33 bp, Homo sapien
agacagtaaactgtaacaatcccagtattcatc

SEQ ID NO: 4458 - DNA, 33 bp, Homo sapien
agacagtaaactgtaagaatcccagtattcatc

SEQ ID NO: 4459 - DNA, 33 bp, Homo sapien
ttagactactggctaaataatgtcaataggaaa

SEQ ID NO: 4460 - DNA, 33 bp, Homo sapien
ttagactactggctaagtaatgtcaataggaaa

SEQ ID NO: 4461 - DNA, 33 bp, Homo sapien
tttccatccacctagacagattcattcttccat

SEQ ID NO: 4462 - DNA, 33 bp, Homo sapien
tttccatccacctagatagattcattcttccat

SEQ ID NO: 4463 - DNA, 33 bp, Homo sapien
ctgtgtgagacattacaaaggcagtagccatgg

SEQ ID NO: 4464 - DNA, 33 bp, Homo sapien
ctgtgtgagacattacgaaggcagtagccatgg

SEQ ID NO: 4465 - DNA, 33 bp, Homo sapien
aaatgaatgatgcagacagcaaaccactagcag

SEQ ID NO: 4466 - DNA, 33 bp, Homo sapien
aaatgaatgatgcagagagcaaaccactagcag

SEQ ID NO: 4467 - DNA, 33 bp, Homo sapien
tccactctttgcaaggaacatcttaaaagcttg

SEQ ID NO: 4468 - DNA, 33 bp, Homo sapien
tccactctttgcaagggacatcttaaaagcttg

SEQ ID NO: 4469 - DNA, 33 bp, Homo sapien
tgcaaagatggacaagaaatgaatcctgtcctc

SEQ ID NO: 4470 - DNA, 33 bp, Homo sapien
tgcaaagatggacaagtaatgaatcctgtcctc

SEQ ID NO: 4471 - DNA, 33 bp, Homo sapien
tccactgactccctgaagataaatgatggagaa

SEQ ID NO: 4472 - DNA, 33 bp, Homo sapien
tccactgactccctgatgataaatgatggagaa

SEQ ID NO: 4473 - DNA, 33 bp, Homo sapien
gctcggcagcgactctaagaatactactgggct

SEQ ID NO: 4474 - DNA, 33 bp, Homo sapien
gctcggcagcgactctgagaatactactgggct

SEQ ID NO: 4475 - DNA, 33 bp, Homo sapien
tctatgaaagagaaggccacaaaggcaaaagca

SEQ ID NO: 4476 - DNA, 33 bp, Homo sapien
tctatgaaagagaaggtcacaaaggcaaaagca

SEQ ID NO: 4477 - DNA, 33 bp, Homo sapien
tggtataaagtcaacaacagaggtgcaagaatt

SEQ ID NO: 4478 - DNA, 33 bp, Homo sapien
tggtataaagtcaacagcagaggtgcaagaatt

SEQ ID NO: 4479 - DNA, 33 bp, Homo sapien
tttctaccactcaagcacatggtctttccacca

SEQ ID NO: 4480 - DNA, 33 bp, Homo sapien
tttctaccactcaagcgcatggtctttccacca

SEQ ID NO: 4481 - DNA, 33 bp, Homo sapien
gcttgacaaatggaaaaatctagagtctcagct

SEQ ID NO: 4482 - DNA, 33 bp, Homo sapien
gcttgacaaatggaaacatctagagtctcagct

SEQ ID NO: 4483 - DNA, 33 bp, Homo sapien
gaacaaattctaagtacggcagaactaaacaaa

SEQ ID NO: 4484 - DNA, 33 bp, Homo sapien
gaacaaattctaagtatggcagaactaaacaaa

SEQ ID NO: 4485 - DNA, 33 bp, Homo sapien
actttaataaaaagcccgagaaaagaacaaatg

SEQ ID NO: 4486 - DNA, 33 bp, Homo sapien
actttaataaaaagcctgagaaaagaacaaatg

SEQ ID NO: 4487 - DNA, 33 bp, Homo sapien
atgaagagcgagagaacctttgaagaaaagttt

SEQ ID NO: 4488 - DNA, 33 bp, Homo sapien
atgaagagcgagagaatctttgaagaaaagttt

SEQ ID NO: 4489 - DNA, 33 bp, Homo sapien
gctgagataggaaagtcactcaaactctctaaa

SEQ ID NO: 4490 - DNA, 33 bp, Homo sapien
gctgagataggaaagtgactcaaactctctaaa

SEQ ID NO: 4491 - DNA, 33 bp, Homo sapien
ttgaatcaggcttttcaaagtttaggggaaggg

SEQ ID NO: 4492 - DNA, 33 bp, Homo sapien
ttgaatcaggcttttcgaagtttaggggaaggg

SEQ ID NO: 4493 - DNA, 33 bp, Homo sapien
ccctcctttctccttcacagaatccagaattct

SEQ ID NO: 4494 - DNA, 33 bp, Homo sapien
ccctcctttctccttcgcagaatccagaattct

SEQ ID NO: 4495 - DNA, 33 bp, Homo sapien
atgttggtcctggaaacctcaggatgagacatg

SEQ ID NO: 4496 - DNA, 33 bp, Homo sapien
atgttggtcctggaaatctcaggatgagacatg

SEQ ID NO: 4497 - DNA, 33 bp, Homo sapien
ctaagactcagcacaactagccgtgcccatcag

SEQ ID NO: 4498 - DNA, 33 bp, Homo sapien
ctaagactcagcacaattagccgtgcccatcag

SEQ ID NO: 4499 - DNA, 33 bp, Homo sapien
ggtgctcaacaaatgacggttgaatgaatgtag

SEQ ID NO: 4500 - DNA, 33 bp, Homo sapien
ggtgctcaacaaatgatggttgaatgaatgtag

SEQ ID NO: 4501 - DNA, 33 bp, Homo sapien
gatgggggacactgaccggtgttgagtagagga

SEQ ID NO: 4502 - DNA, 33 bp, Homo sapien
gatgggggacactgactggtgttgagtagagga

SEQ ID NO: 4503 - DNA, 33 bp, Homo sapien
agacatgcctacatacaaatgtaagtatataat

SEQ ID NO: 4504 - DNA, 33 bp, Homo sapien
agacatgcctacatacgaatgtaagtatataat

SEQ ID NO: 4505 - DNA, 33 bp, Homo sapien
gcttcttggtgtggagaaaaatcagttttgggc

SEQ ID NO: 4506 - DNA, 33 bp, Homo sapien
gcttcttggtgtggagcaaaatcagttttgggc

SEQ ID NO: 4507 - DNA, 33 bp, Homo sapien
aggaaccagccttgggccagtgacttggataga

SEQ ID NO: 4508 - DNA, 33 bp, Homo sapien
aggaaccagccttgggtcagtgacttggataga

SEQ ID NO: 4509 - DNA, 33 bp, Homo sapien
aaggccactccacagaaaggagcaagaaggcat

SEQ ID NO: 4510 - DNA, 33 bp, Homo sapien
aaggccactccacagagaggagcaagaaggcat

SEQ ID NO: 4511 - DNA, 33 bp, Homo sapien
aatgtctctcaaaagacggactggctagctcac

SEQ ID NO: 4512 - DNA, 33 bp, Homo sapien
aatgtctctcaaaagatggactggctagctcac

SEQ ID NO: 4513 - DNA, 33 bp, Homo sapien
gacagggaaaaacaaccacagccaagcaaaata

SEQ ID NO: 4514 - DNA, 33 bp, Homo sapien
gacagggaaaaacaacgacagccaagcaaaata

SEQ ID NO: 4515 - DNA, 33 bp, Homo sapien
ggtcttcagtgtttcccgaagcgaagatgaaga

SEQ ID NO: 4516 - DNA, 33 bp, Homo sapien
ggtcttcagtgtttcctgaagcgaagatgaaga

SEQ ID NO: 4517 - DNA, 33 bp, Homo sapien
aagatcagacaatgtacgtagaggctggtgacc

SEQ ID NO: 4518 - DNA, 33 bp, Homo sapien
aagatcagacaatgtaggtagaggctggtgacc

SEQ ID NO: 4519 - DNA, 33 bp, Homo sapien
taggaaagtcaagtcccctctgcgattctcttt

SEQ ID NO: 4520 - DNA, 33 bp, Homo sapien
taggaaagtcaagtcctctctgcgattctcttt

SEQ ID NO: 4521 - DNA, 33 bp, Homo sapien
ttttgctaaaaatgagccataaccccactaaga

SEQ ID NO: 4522 - DNA, 33 bp, Homo sapien
ttttgctaaaaatgagtcataaccccactaaga

SEQ ID NO: 4523 - DNA, 33 bp, Homo sapien
aacataccgtggctgccaaacttgtcattttct

SEQ ID NO: 4524 - DNA, 33 bp, Homo sapien
aacataccgtggctgctaaacttgtcattttct

SEQ ID NO: 4525 - DNA, 33 bp, Homo sapien
tgacatgactttggacgaatcactttgccattc

SEQ ID NO: 4526 - DNA, 33 bp, Homo sapien
tgacatgactttggactaatcactttgccattc

SEQ ID NO: 4527 - DNA, 33 bp, Homo sapien
ctgctgtgccttttaacgaatctctattctgct

SEQ ID NO: 4528 - DNA, 33 bp, Homo sapien
ctgctgtgccttttaatgaatctctattctgct

SEQ ID NO: 4529 - DNA, 33 bp, Homo sapien
tatttctgcacataataacagaacttgagaata

SEQ ID NO: 4530 - DNA, 33 bp, Homo sapien
tatttctgcacataatgacagaacttgagaata

SEQ ID NO: 4531 - DNA, 33 bp, Homo sapien
tattaaaccacataaaatgccttcgcttttact

SEQ ID NO: 4532 - DNA, 33 bp, Homo sapien
tattaaaccacataaagtgccttcgcttttact

SEQ ID NO: 4533 - DNA, 33 bp, Homo sapien
gcgttgctgttaattcaatgaggtggtggaatg

SEQ ID NO: 4534 - DNA, 33 bp, Homo sapien
gcgttgctgttaattcgatgaggtggtggaatg

SEQ ID NO: 4535 - DNA, 33 bp, Homo sapien
agagatggtaaaaaaaaaaattgctgaagttta

SEQ ID NO: 4536 - DNA, 33 bp, Homo sapien
agagatggtaaaaaaagaaattgctgaagttta

SEQ ID NO: 4537 - DNA, 33 bp, Homo sapien
aatcctgggagtcggcaaggttcacagctgctc

SEQ ID NO: 4538 - DNA, 33 bp, Homo sapien
aatcctgggagtcggcgaggttcacagctgctc

SEQ ID NO: 4539 - DNA, 33 bp, Homo sapien
cactttcccgtacctaagaggtcagagaaggtg

SEQ ID NO: 4540 - DNA, 33 bp, Homo sapien
cactttcccgtacctatgaggtcagagaaggtg

SEQ ID NO: 4541 - DNA, 33 bp, Homo sapien
gaggagaggagtttcacgcaaaatagcccccgc

SEQ ID NO: 4542 - DNA, 33 bp, Homo sapien
gaggagaggagtttcatgcaaaatagcccccgc

SEQ ID NO: 4543 - DNA, 33 bp, Homo sapien
cttagctgctgcgacagatatagattagaacaa

SEQ ID NO: 4544 - DNA, 33 bp, Homo sapien
cttagctgctgcgacatatatagattagaacaa

SEQ ID NO: 4545 - DNA, 33 bp, Homo sapien
gtgacagtttccggtcccagaagccttagttcc

SEQ ID NO: 4546 - DNA, 33 bp, Homo sapien
gtgacagtttccggtctcagaagccttagttcc

SEQ ID NO: 4547 - DNA, 33 bp, Homo sapien
gctgtgtagctgctccaaacctggttctctgac

SEQ ID NO: 4548 - DNA, 33 bp, Homo sapien
gctgtgtagctgctccgaacctggttctctgac

SEQ ID NO: 4549 - DNA, 33 bp, Homo sapien
ctgggttagacaagaaagacctgacattttgca

SEQ ID NO: 4550 - DNA, 33 bp, Homo sapien
ctgggttagacaagaaggacctgacattttgca

SEQ ID NO: 4551 - DNA, 33 bp, Homo sapien
aattccatttttcttacgcactggagtatttgt

SEQ ID NO: 4552 - DNA, 33 bp, Homo sapien
aattccatttttcttatgcactggagtatttgt

SEQ ID NO: 4553 - DNA, 33 bp, Homo sapien
agtaaatgagaaacaggcccagcgagggaaagt

SEQ ID NO: 4554 - DNA, 33 bp, Homo sapien
agtaaatgagaaacagtcccagcgagggaaagt

SEQ ID NO: 4555 - DNA, 33 bp, Homo sapien
gagtgaggtcaagttacccattgccctggctcc

SEQ ID NO: 4556 - DNA, 33 bp, Homo sapien
gagtgaggtcaagttatccattgccctggctcc

SEQ ID NO: 4557 - DNA, 33 bp, Homo sapien
ctacaactagaaccaccgtatgatccagcaatc

SEQ ID NO: 4558 - DNA, 33 bp, Homo sapien
ctacaactagaaccactgtatgatccagcaatc

SEQ ID NO: 4559 - DNA, 33 bp, Homo sapien
aaatagaaaaggaataccttctagcgttctata

SEQ ID NO: 4560 - DNA, 33 bp, Homo sapien
aaatagaaaaggaatatcttctagcgttctata

SEQ ID NO: 4561 - DNA, 33 bp, Homo sapien
acaggaggctgtgagagtcatctgtgcctgaga

SEQ ID NO: 4562 - DNA, 33 bp, Homo sapien
acaggaggctgtgagattcatctgtgcctgaga

SEQ ID NO: 4563 - DNA, 33 bp, Homo sapien
tctgtgcctgagatgcagatggcctggtccagg

SEQ ID NO: 4564 - DNA, 33 bp, Homo sapien
tctgtgcctgagatgctgatggcctggtccagg

SEQ ID NO: 4565 - DNA, 33 bp, Homo sapien
tctcctccttcattacactagcacaggcttgtt

SEQ ID NO: 4566 - DNA, 33 bp, Homo sapien
tctcctccttcattacgctagcacaggcttgtt

SEQ ID NO: 4567 - DNA, 33 bp, Homo sapien
aataatcatgacctacacacttattttgcaaac

SEQ ID NO: 4568 - DNA, 33 bp, Homo sapien
aataatcatgacctactcacttattttgcaaac

SEQ ID NO: 4569 - DNA, 33 bp, Homo sapien
tttcaagtcatcttcaactctttcctctccctc

SEQ ID NO: 4570 - DNA, 33 bp, Homo sapien
tttcaagtcatcttcagctctttcctctccctc

SEQ ID NO: 4571 - DNA, 33 bp, Homo sapien
ggttcatgaccatagtcaacacatttacgctga

SEQ ID NO: 4572 - DNA, 33 bp, Homo sapien
ggttcatgaccatagtgaacacatttacgctga

SEQ ID NO: 4573 - DNA, 33 bp, Homo sapien
aaccagacctcgaacacgaacaaggctgccttc

SEQ ID NO: 4574 - DNA, 33 bp, Homo sapien
aaccagacctcgaacatgaacaaggctgccttc

SEQ ID NO: 4575 - DNA, 33 bp, Homo sapien
tataataacttaatgaactgagaatgctgtaat

SEQ ID NO: 4576 - DNA, 33 bp, Homo sapien
tataataacttaatgacctgagaatgctgtaat

SEQ ID NO: 4577 - DNA, 33 bp, Homo sapien
aagctgcaagccctgcaaagattatggtgtccc

SEQ ID NO: 4578 - DNA, 33 bp, Homo sapien
aagctgcaagccctgctaagattatggtgtccc

SEQ ID NO: 4579 - DNA, 33 bp, Homo sapien
tcggttaaaggagtttcaaacgaacactgagtc

SEQ ID NO: 4580 - DNA, 33 bp, Homo sapien
tcggttaaaggagtttgaaacgaacactgagtc

SEQ ID NO: 4581 - DNA, 33 bp, Homo sapien
gaatggaaatccaccacaggacactgcccgtct

SEQ ID NO: 4582 - DNA, 33 bp, Homo sapien
gaatggaaatccaccagaggacactgcccgtct

SEQ ID NO: 4583 - DNA, 33 bp, Homo sapien
ctcctcttcactattacatgtgcccacttctct

SEQ ID NO: 4584 - DNA, 33 bp, Homo sapien
ctcctcttcactattatatgtgcccacttctct

SEQ ID NO: 4585 - DNA, 33 bp, Homo sapien
gaatgaaggaatgagcaaatgaaaaaaaaacca

SEQ ID NO: 4586 - DNA, 33 bp, Homo sapien
gaatgaaggaatgagcgaatgaaaaaaaaacca

SEQ ID NO: 4587 - DNA, 33 bp, Homo sapien
ttaaattaagttatccaagttcaaaatcaccca

SEQ ID NO: 4588 - DNA, 33 bp, Homo sapien
ttaaattaagttatcccagttcaaaatcaccca

SEQ ID NO: 4589 - DNA, 33 bp, Homo sapien
actagggagttgaaaccaatttgatgttccagg

SEQ ID NO: 4590 - DNA, 33 bp, Homo sapien
actagggagttgaaactaatttgatgttccagg

SEQ ID NO: 4591 - DNA, 33 bp, Homo sapien
tcctaaggggtcttggaagtcgtatcacctctc

SEQ ID NO: 4592 - DNA, 33 bp, Homo sapien
tcctaaggggtcttgggagtcgtatcacctctc

SEQ ID NO: 4593 - DNA, 33 bp, Homo sapien
agccacaaacatcatccaacaacgtgactataa

SEQ ID NO: 4594 - DNA, 33 bp, Homo sapien
agccacaaacatcatcgaacaacgtgactataa

SEQ ID NO: 4595 - DNA, 33 bp, Homo sapien
ggatttgcataatcgccgactgtttcctgctca

SEQ ID NO: 4596 - DNA, 33 bp, Homo sapien
ggatttgcataatcgctgactgtttcctgctca

SEQ ID NO: 4597 - DNA, 33 bp, Homo sapien
cagaggacattgaacactcccaatttttataac

SEQ ID NO: 4598 - DNA, 33 bp, Homo sapien
cagaggacattgaacattcccaatttttataac

SEQ ID NO: 4599 - DNA, 33 bp, Homo sapien
tgggcttgcctgagacagaaacagctcctcaac

SEQ ID NO: 4600 - DNA, 33 bp, Homo sapien
tgggcttgcctgagacggaaacagctcctcaac

SEQ ID NO: 4601 - DNA, 33 bp, Homo sapien
taccattatggtgcaactgggggcaacttccag

SEQ ID NO: 4602 - DNA, 33 bp, Homo sapien
taccattatggtgcaattgggggcaacttccag

SEQ ID NO: 4603 - DNA, 33 bp, Homo sapien
taaatgaacgaatgaacgaccagtgttaatttc

SEQ ID NO: 4604 - DNA, 33 bp, Homo sapien
taaatgaacgaatgaaggaccagtgttaatttc

SEQ ID NO: 4605 - DNA, 33 bp, Homo sapien
gaaccaagaaaaggtaagcattgtgagggtgag

SEQ ID NO: 4606 - DNA, 33 bp, Homo sapien
gaaccaagaaaaggtaggcattgtgagggtgag

SEQ ID NO: 4607 - DNA, 33 bp, Homo sapien
tgatcaaaagcagacacggtcctgccctcatgg

SEQ ID NO: 4608 - DNA, 33 bp, Homo sapien
tgatcaaaagcagacatggtcctgccctcatgg

SEQ ID NO: 4609 - DNA, 33 bp, Homo sapien
ggttagacatctcggacagcaccttaaagttca

SEQ ID NO: 4610 - DNA, 33 bp, Homo sapien
ggttagacatctcggagagcaccttaaagttca

SEQ ID NO: 4611 - DNA, 33 bp, Homo sapien
aggcatagtgaggttgaataactggctcaaagt

SEQ ID NO: 4612 - DNA, 33 bp, Homo sapien
aggcatagtgaggttggataactggctcaaagt

SEQ ID NO: 4613 - DNA, 33 bp, Homo sapien
gagggacagctgtctaagaatccgcaatagccc

SEQ ID NO: 4614 - DNA, 33 bp, Homo sapien
gagggacagctgtctaggaatccgcaatagccc

SEQ ID NO: 4615 - DNA, 33 bp, Homo sapien
agaacaagtgagtagacaatctggctcttttct

SEQ ID NO: 4616 - DNA, 33 bp, Homo sapien
agaacaagtgagtagataatctggctcttttct

SEQ ID NO: 4617 - DNA, 33 bp, Homo sapien
ggttgtcctgaaaccaggttgtgcctgcccaga

SEQ ID NO: 4618 - DNA, 33 bp, Homo sapien
ggttgtcctgaaaccatgttgtgcctgcccaga

SEQ ID NO: 4619 - DNA, 33 bp, Homo sapien
caagacagaggatgtaaagcatttgggttgctg

SEQ ID NO: 4620 - DNA, 33 bp, Homo sapien
caagacagaggatgtagagcatttgggttgctg

SEQ ID NO: 4621 - DNA, 33 bp, Homo sapien
agggtcacgaagcagtcaacagaatttggagag

SEQ ID NO: 4622 - DNA, 33 bp, Homo sapien
agggtcacgaagcagttaacagaatttggagag

SEQ ID NO: 4623 - DNA, 33 bp, Homo sapien
ccaaatggaggccaaaactcattgcagggaagg

SEQ ID NO: 4624 - DNA, 33 bp, Homo sapien
ccaaatggaggccaaagctcattgcagggaagg

SEQ ID NO: 4625 - DNA, 33 bp, Homo sapien
tgggtccctgcatgacagaaagttaccttagcc

SEQ ID NO: 4626 - DNA, 33 bp, Homo sapien
tgggtccctgcatgacggaaagttaccttagcc

SEQ ID NO: 4627 - DNA, 33 bp, Homo sapien
tcatggccacctgctacggctcagggaaagcct

SEQ ID NO: 4628 - DNA, 33 bp, Homo sapien
tcatggccacctgctatggctcagggaaagcct

SEQ ID NO: 4629 - DNA, 33 bp, Homo sapien
atctgatgacccaggcactctctcccactttta

SEQ ID NO: 4630 - DNA, 33 bp, Homo sapien
atctgatgacccaggcgctctctcccactttta

SEQ ID NO: 4631 - DNA, 33 bp, Homo sapien
tctcctgatgctcagaaaagattatgctgcaca

SEQ ID NO: 4632 - DNA, 33 bp, Homo sapien
tctcctgatgctcagagaagattatgctgcaca

SEQ ID NO: 4633 - DNA, 33 bp, Homo sapien
tttcatgtgtttcctaaatcttggattattctc

SEQ ID NO: 4634 - DNA, 33 bp, Homo sapien
tttcatgtgtttcctagatcttggattattctc

SEQ ID NO: 4635 - DNA, 33 bp, Homo sapien
gcactcaatgaatgaaataacaaacattagtgg

SEQ ID NO: 4636 - DNA, 33 bp, Homo sapien
gcactcaatgaatgaagtaacaaacattagtgg

SEQ ID NO: 4637 - DNA, 33 bp, Homo sapien
gcaaaccaggacacagaaccaatttcaccagtt

SEQ ID NO: 4638 - DNA, 33 bp, Homo sapien
gcaaaccaggacacaggaccaatttcaccagtt

SEQ ID NO: 4639 - DNA, 33 bp, Homo sapien
ccacattgatggcaaacgcgagaacagcagtgc

SEQ ID NO: 4640 - DNA, 33 bp, Homo sapien
ccacattgatggcaaatgcgagaacagcagtgc

SEQ ID NO: 4641 - DNA, 33 bp, Homo sapien
acatccccccaactcaggctgtagttctgcagg

SEQ ID NO: 4642 - DNA, 33 bp, Homo sapien
acatccccccaactcatgctgtagttctgcagg

SEQ ID NO: 4643 - DNA, 33 bp, Homo sapien
acccctactttagagcactttgcacatagatga

SEQ ID NO: 4644 - DNA, 33 bp, Homo sapien
acccctactttagagcgctttgcacatagatga

SEQ ID NO: 4645 - DNA, 33 bp, Homo sapien
cctggagcctggcatgaagttaacatacaagaa

SEQ ID NO: 4646 - DNA, 33 bp, Homo sapien
cctggagcctggcatgcagttaacatacaagaa

SEQ ID NO: 4647 - DNA, 33 bp, Homo sapien
tggtgcctggtctaagcctagtgcagtttttgt

SEQ ID NO: 4648 - DNA, 33 bp, Homo sapien
tggtgcctggtctaagtctagtgcagtttttgt

SEQ ID NO: 4649 - DNA, 33 bp, Homo sapien
acaagggaaaaatcaccgagtagaacagatgca

SEQ ID NO: 4650 - DNA, 33 bp, Homo sapien
acaagggaaaaatcactgagtagaacagatgca

SEQ ID NO: 4651 - DNA, 33 bp, Homo sapien
ctcgaacccaatcagaatcaatatttctctcct

SEQ ID NO: 4652 - DNA, 33 bp, Homo sapien
ctcgaacccaatcagagtcaatatttctctcct

SEQ ID NO: 4653 - DNA, 33 bp, Homo sapien
gactcttgttcctcaaacagaaggttcatggaa

SEQ ID NO: 4654 - DNA, 33 bp, Homo sapien
gactcttgttcctcaagcagaaggttcatggaa

SEQ ID NO: 4655 - DNA, 33 bp, Homo sapien
agcatctaacagttgaacactctcttccggaca

SEQ ID NO: 4656 - DNA, 33 bp, Homo sapien
agcatctaacagttgatcactctcttccggaca

SEQ ID NO: 4657 - DNA, 33 bp, Homo sapien
tccaatggtacgggtcacagaaagtttatttcc

SEQ ID NO: 4658 - DNA, 33 bp, Homo sapien
tccaatggtacgggtcgcagaaagtttatttcc

SEQ ID NO: 4659 - DNA, 33 bp, Homo sapien
atactggggataagatgactattttctgtgtat

SEQ ID NO: 4660 - DNA, 33 bp, Homo sapien
atactggggataagattactattttctgtgtat

SEQ ID NO: 4661 - DNA, 33 bp, Homo sapien
caggtgagaagctaacacatggaagagtcttta

SEQ ID NO: 4662 - DNA, 33 bp, Homo sapien
caggtgagaagctaacgcatggaagagtcttta

SEQ ID NO: 4663 - DNA, 33 bp, Homo sapien
tgttcatctctggaagaaaagacataccataat

SEQ ID NO: 4664 - DNA, 33 bp, Homo sapien
tgttcatctctggaagcaaagacataccataat

SEQ ID NO: 4665 - DNA, 33 bp, Homo sapien
caagggtcttcgggcactatttcagaaggcgtc

SEQ ID NO: 4666 - DNA, 33 bp, Homo sapien
caagggtcttcgggcattatttcagaaggcgtc

SEQ ID NO: 4667 - DNA, 33 bp, Homo sapien
gtattcttgaggacaacccaagaggcggttcta

SEQ ID NO: 4668 - DNA, 33 bp, Homo sapien
gtattcttgaggacaagccaagaggcggttcta

SEQ ID NO: 4669 - DNA, 33 bp, Homo sapien
agatctctgtgctacccgcaaatagtaattagg

SEQ ID NO: 4670 - DNA, 33 bp, Homo sapien
agatctctgtgctaccggcaaatagtaattagg

SEQ ID NO: 4671 - DNA, 33 bp, Homo sapien
cactggaggttcttaaactgggaacaggaatcc

SEQ ID NO: 4672 - DNA, 33 bp, Homo sapien
cactggaggttcttaagctgggaacaggaatcc

SEQ ID NO: 4673 - DNA, 33 bp, Homo sapien
cctgtttggtgaaatgaaatcatagtgtcagcc

SEQ ID NO: 4674 - DNA, 33 bp, Homo sapien
cctgtttggtgaaatgcaatcatagtgtcagcc

SEQ ID NO: 4675 - DNA, 33 bp, Homo sapien
tcaataaaccatcttaaatactgtgtgcaatac

SEQ ID NO: 4676 - DNA, 33 bp, Homo sapien
tcaataaaccatcttagatactgtgtgcaatac

SEQ ID NO: 4677 - DNA, 33 bp, Homo sapien
gctcagtcactgtcacagctctcaatatcccaa

SEQ ID NO: 4678 - DNA, 33 bp, Homo sapien
gctcagtcactgtcacggctctcaatatcccaa

SEQ ID NO: 4679 - DNA, 33 bp, Homo sapien
caagccacataaacaccgcagcttgtgatgctt

SEQ ID NO: 4680 - DNA, 33 bp, Homo sapien
caagccacataaacactgcagcttgtgatgctt

SEQ ID NO: 4681 - DNA, 33 bp, Homo sapien
acgcgtctgttcactacggagatctgaagatgt

SEQ ID NO: 4682 - DNA, 33 bp, Homo sapien
acgcgtctgttcactatggagatctgaagatgt

SEQ ID NO: 4683 - DNA, 33 bp, Homo sapien
agaggagaagtaggtgaacgggggctcagctga

SEQ ID NO: 4684 - DNA, 33 bp, Homo sapien
agaggagaagtaggtgcacgggggctcagctga

SEQ ID NO: 4685 - DNA, 33 bp, Homo sapien
gcttcagatgaaaaaaatggccaggtcccccag

SEQ ID NO: 4686 - DNA, 33 bp, Homo sapien
gcttcagatgaaaaaattggccaggtcccccag

SEQ ID NO: 4687 - DNA, 33 bp, Homo sapien
cggaagagcctctgcacggaagacggtttcaac

SEQ ID NO: 4688 - DNA, 33 bp, Homo sapien
cggaagagcctctgcagggaagacggtttcaac

SEQ ID NO: 4689 - DNA, 33 bp, Homo sapien
cacacaagtacagaacagaggaggtgccctagt

SEQ ID NO: 4690 - DNA, 33 bp, Homo sapien
cacacaagtacagaaccgaggaggtgccctagt

SEQ ID NO: 4691 - DNA, 33 bp, Homo sapien
cctctgagaaagaaacacaagtcttccaacggc

SEQ ID NO: 4692 - DNA, 33 bp, Homo sapien
cctctgagaaagaaacgcaagtcttccaacggc

SEQ ID NO: 4693 - DNA, 33 bp, Homo sapien
ttgaagagtattgatcaagaggagaaaattcca

SEQ ID NO: 4694 - DNA, 33 bp, Homo sapien
ttgaagagtattgatcgagaggagaaaattcca

SEQ ID NO: 4695 - DNA, 33 bp, Homo sapien
tgatggtccctgcatccgaaggttttggtggct

SEQ ID NO: 4696 - DNA, 33 bp, Homo sapien
tgatggtccctgcatctgaaggttttggtggct

SEQ ID NO: 4697 - DNA, 33 bp, Homo sapien
agacaataaagctttgcaaccttctttccactt

SEQ ID NO: 4698 - DNA, 33 bp, Homo sapien
agacaataaagctttggaaccttctttccactt

SEQ ID NO: 4699 - DNA, 33 bp, Homo sapien
ctgtccctgggacacaaaatgggaaaggtgatt

SEQ ID NO: 4700 - DNA, 33 bp, Homo sapien
ctgtccctgggacacagaatgggaaaggtgatt

SEQ ID NO: 4701 - DNA, 33 bp, Homo sapien
agaggctcacttacaccaccatccccagctcct

SEQ ID NO: 4702 - DNA, 33 bp, Homo sapien
agaggctcacttacactaccatccccagctcct

SEQ ID NO: 4703 - DNA, 33 bp, Homo sapien
gctcgctcgcccctcaactcctgctgtgcagcc

SEQ ID NO: 4704 - DNA, 33 bp, Homo sapien
gctcgctcgcccctcacctcctgctgtgcagcc

SEQ ID NO: 4705 - DNA, 33 bp, Homo sapien
aagcttccctaccccaaagcttgtgccgatgcc

SEQ ID NO: 4706 - DNA, 33 bp, Homo sapien
aagcttccctaccccagagcttgtgccgatgcc

SEQ ID NO: 4707 - DNA, 33 bp, Homo sapien
agtcttccatttatccagagaacaacggaaagg

SEQ ID NO: 4708 - DNA, 33 bp, Homo sapien
agtcttccatttatcctgagaacaacggaaagg

SEQ ID NO: 4709 - DNA, 33 bp, Homo sapien
tgctagttttccatcaatagacatcgttttaat

SEQ ID NO: 4710 - DNA, 33 bp, Homo sapien
tgctagttttccatcagtagacatcgttttaat

SEQ ID NO: 4711 - DNA, 33 bp, Homo sapien
cagaccagcttagagaggaacgttctaatttca

SEQ ID NO: 4712 - DNA, 33 bp, Homo sapien
cagaccagcttagagatgaacgttctaatttca

SEQ ID NO: 4713 - DNA, 33 bp, Homo sapien
gtccaggcgaacgctccctccccgtggccttcc

SEQ ID NO: 4714 - DNA, 33 bp, Homo sapien
gtccaggcgaacgctctctccccgtggccttcc

SEQ ID NO: 4715 - DNA, 33 bp, Homo sapien
ggctggctgtgttctacggagcatctggattgt

SEQ ID NO: 4716 - DNA, 33 bp, Homo sapien
ggctggctgtgttctatggagcatctggattgt

SEQ ID NO: 4717 - DNA, 33 bp, Homo sapien
acctggtctttttctgcaattcaagcaggtggc

SEQ ID NO: 4718 - DNA, 33 bp, Homo sapien
acctggtctttttctggaattcaagcaggtggc

SEQ ID NO: 4719 - DNA, 33 bp, Homo sapien
tggggatgagtaatgacggttgcctggttacgc

SEQ ID NO: 4720 - DNA, 33 bp, Homo sapien
tggggatgagtaatgatggttgcctggttacgc

SEQ ID NO: 4721 - DNA, 33 bp, Homo sapien
aaggccacgttttaaaagctcagagaaacttca

SEQ ID NO: 4722 - DNA, 33 bp, Homo sapien
aaggccacgttttaaaggctcagagaaacttca

SEQ ID NO: 4723 - DNA, 33 bp, Homo sapien
ttctgggtccccaacacacgcgaagctcattcc

SEQ ID NO: 4724 - DNA, 33 bp, Homo sapien
ttctgggtccccaacatacgcgaagctcattcc

SEQ ID NO: 4725 - DNA, 33 bp, Homo sapien
ggaacagaaaaggcaacgtgactaagcttcctg

SEQ ID NO: 4726 - DNA, 33 bp, Homo sapien
ggaacagaaaaggcaatgtgactaagcttcctg

SEQ ID NO: 4727 - DNA, 33 bp, Homo sapien
aggttatcccataccaatgatatctcagtaaag

SEQ ID NO: 4728 - DNA, 33 bp, Homo sapien
aggttatcccataccagtgatatctcagtaaag

SEQ ID NO: 4729 - DNA, 33 bp, Homo sapien
ggcagggacattttacagcacacctggggaaga

SEQ ID NO: 4730 - DNA, 33 bp, Homo sapien
ggcagggacattttacggcacacctggggaaga

SEQ ID NO: 4731 - DNA, 33 bp, Homo sapien
ggggtgccatggccgaacttcatcccaaaacac

SEQ ID NO: 4732 - DNA, 33 bp, Homo sapien
ggggtgccatggccgatcttcatcccaaaacac

SEQ ID NO: 4733 - DNA, 33 bp, Homo sapien
attccaacaaggtacaaaatttatgagtcaata

SEQ ID NO: 4734 - DNA, 33 bp, Homo sapien
attccaacaaggtacagaatttatgagtcaata

SEQ ID NO: 4735 - DNA, 33 bp, Homo sapien
tgagaaaacatttgccaatcttagaagcaccct

SEQ ID NO: 4736 - DNA, 33 bp, Homo sapien
tgagaaaacatttgcccatcttagaagcaccct

SEQ ID NO: 4737 - DNA, 33 bp, Homo sapien
ccacagtagagaagcgccagcctccagaggctt

SEQ ID NO: 4738 - DNA, 33 bp, Homo sapien
ccacagtagagaagcgtcagcctccagaggctt

SEQ ID NO: 4739 - DNA, 33 bp, Homo sapien
agtacacttgtcccagaatgatctcatctcgag

SEQ ID NO: 4740 - DNA, 33 bp, Homo sapien
agtacacttgtcccaggatgatctcatctcgag

SEQ ID NO: 4741 - DNA, 33 bp, Homo sapien
ctgagggcttaaaacaaatgcattctcaaggct

SEQ ID NO: 4742 - DNA, 33 bp, Homo sapien
ctgagggcttaaaacacatgcattctcaaggct

SEQ ID NO: 4743 - DNA, 33 bp, Homo sapien
agaagactcaagtggaccaaagtttctgctaat

SEQ ID NO: 4744 - DNA, 33 bp, Homo sapien
agaagactcaagtggatcaaagtttctgctaat

SEQ ID NO: 4745 - DNA, 33 bp, Homo sapien
agccttgccaggtggaaacgatcatgcacagct

SEQ ID NO: 4746 - DNA, 33 bp, Homo sapien
agccttgccaggtggagacgatcatgcacagct

SEQ ID NO: 4747 - DNA, 33 bp, Homo sapien
gctaaaaggaagctcacagactccaacaccctc

SEQ ID NO: 4748 - DNA, 33 bp, Homo sapien
gctaaaaggaagctcatagactccaacaccctc

SEQ ID NO: 4749 - DNA, 33 bp, Homo sapien
gagctcctgaccttgcaacatccaggattgggc

SEQ ID NO: 4750 - DNA, 33 bp, Homo sapien
gagctcctgaccttgcgacatccaggattgggc

SEQ ID NO: 4751 - DNA, 33 bp, Homo sapien
tcctttcttcctcataactctgcttttttctct

SEQ ID NO: 4752 - DNA, 33 bp, Homo sapien
tcctttcttcctcatagctctgcttttttctct

SEQ ID NO: 4753 - DNA, 33 bp, Homo sapien
gactctgccaggctaacgaccaagacaacacaa

SEQ ID NO: 4754 - DNA, 33 bp, Homo sapien
gactctgccaggctaatgaccaagacaacacaa

SEQ ID NO: 4755 - DNA, 33 bp, Homo sapien
ggaaacgaagaccacacagctggttaatggcac

SEQ ID NO: 4756 - DNA, 33 bp, Homo sapien
ggaaacgaagaccacatagctggttaatggcac

SEQ ID NO: 4757 - DNA, 33 bp, Homo sapien
ggtatggcctaaggacggagggatctgagctcc

SEQ ID NO: 4758 - DNA, 33 bp, Homo sapien
ggtatggcctaaggactgagggatctgagctcc

SEQ ID NO: 4759 - DNA, 33 bp, Homo sapien
attcatgtggcatttacattttactaggtattg

SEQ ID NO: 4760 - DNA, 33 bp, Homo sapien
attcatgtggcatttatattttactaggtattg

SEQ ID NO: 4761 - DNA, 33 bp, Homo sapien
aacctacacaatccccccatacactttatctct

SEQ ID NO: 4762 - DNA, 33 bp, Homo sapien
aacctacacaatcccctcatacactttatctct

SEQ ID NO: 4763 - DNA, 33 bp, Homo sapien
ctcctccaaagattaaacatcaacttaccatac

SEQ ID NO: 4764 - DNA, 33 bp, Homo sapien
ctcctccaaagattaagcatcaacttaccatac

SEQ ID NO: 4765 - DNA, 33 bp, Homo sapien
aaagaaaatacagataaatcggaattcatcaaa

SEQ ID NO: 4766 - DNA, 33 bp, Homo sapien
aaagaaaatacagatagatcggaattcatcaaa

SEQ ID NO: 4767 - DNA, 33 bp, Homo sapien
ctgccctgcgtaggcaacttggtcacagccctt

SEQ ID NO: 4768 - DNA, 33 bp, Homo sapien
ctgccctgcgtaggcaccttggtcacagccctt

SEQ ID NO: 4769 - DNA, 33 bp, Homo sapien
tcctggttttatttcacctcttccaagatcttg

SEQ ID NO: 4770 - DNA, 33 bp, Homo sapien
tcctggttttatttcatctcttccaagatcttg

SEQ ID NO: 4771 - DNA, 33 bp, Homo sapien
caaggcatgagaaagaactgggagaacaggggc

SEQ ID NO: 4772 - DNA, 33 bp, Homo sapien
caaggcatgagaaagacctgggagaacaggggc

SEQ ID NO: 4773 - DNA, 33 bp, Homo sapien
cgttgcagctgagaacaggcacaagggacatag

SEQ ID NO: 4774 - DNA, 33 bp, Homo sapien
cgttgcagctgagaacgggcacaagggacatag

SEQ ID NO: 4775 - DNA, 33 bp, Homo sapien
ggcacactgcgccaaacgggcactgagcgggca

SEQ ID NO: 4776 - DNA, 33 bp, Homo sapien
ggcacactgcgccaaatgggcactgagcgggca

SEQ ID NO: 4777 - DNA, 33 bp, Homo sapien
catctgctgaaggacccggtagaggattcggtt

SEQ ID NO: 4778 - DNA, 33 bp, Homo sapien
catctgctgaaggacctggtagaggattcggtt

SEQ ID NO: 4779 - DNA, 33 bp, Homo sapien
gacttcacacgcgtcacctgcagttcctctcca

SEQ ID NO: 4780 - DNA, 33 bp, Homo sapien
gacttcacacgcgtcatctgcagttcctctcca

SEQ ID NO: 4781 - DNA, 33 bp, Homo sapien
aaggagagagaagaaccaacagaaaaagcaagc

SEQ ID NO: 4782 - DNA, 33 bp, Homo sapien
aaggagagagaagaacgaacagaaaaagcaagc

SEQ ID NO: 4783 - DNA, 33 bp, Homo sapien
cggggagcagggatcacgattaaaggtcaccta

SEQ ID NO: 4784 - DNA, 33 bp, Homo sapien
cggggagcagggatcaggattaaaggtcaccta

SEQ ID NO: 4785 - DNA, 33 bp, Homo sapien
gctcaccactggcttaagaaactcccgggaggc

SEQ ID NO: 4786 - DNA, 33 bp, Homo sapien
gctcaccactggcttaggaaactcccgggaggc

SEQ ID NO: 4787 - DNA, 33 bp, Homo sapien
taggagaatttacaagccctttacctctaagcc

SEQ ID NO: 4788 - DNA, 33 bp, Homo sapien
taggagaatttacaaggcctttacctctaagcc

SEQ ID NO: 4789 - DNA, 33 bp, Homo sapien
aaatagaattagaaagaccaacttatatctaac

SEQ ID NO: 4790 - DNA, 33 bp, Homo sapien
aaatagaattagaaagtccaacttatatctaac

SEQ ID NO: 4791 - DNA, 33 bp, Homo sapien
aaaccgtgttcccagcaaaaccctttgaagcac

SEQ ID NO: 4792 - DNA, 33 bp, Homo sapien
aaaccgtgttcccagcgaaaccctttgaagcac

SEQ ID NO: 4793 - DNA, 33 bp, Homo sapien
aagggtaatcattaagaccgtggttctagaact

SEQ ID NO: 4794 - DNA, 33 bp, Homo sapien
aagggtaatcattaaggccgtggttctagaact

SEQ ID NO: 4795 - DNA, 33 bp, Homo sapien
taaaacggggatgataagaacgcttaatctcac

SEQ ID NO: 4796 - DNA, 33 bp, Homo sapien
taaaacggggatgataggaacgcttaatctcac

SEQ ID NO: 4797 - DNA, 33 bp, Homo sapien
gtgttaaaaacaagaaaaatgacagcttctact

SEQ ID NO: 4798 - DNA, 33 bp, Homo sapien
gtgttaaaaacaagaacaatgacagcttctact

SEQ ID NO: 4799 - DNA, 33 bp, Homo sapien
tccttctttccaacaaccccctattgggcacgg

SEQ ID NO: 4800 - DNA, 33 bp, Homo sapien
tccttctttccaacaatcccctattgggcacgg

SEQ ID NO: 4801 - DNA, 33 bp, Homo sapien
ctcagcctctctaccccatgtgagcaaagcatc

SEQ ID NO: 4802 - DNA, 33 bp, Homo sapien
ctcagcctctctacccgatgtgagcaaagcatc

SEQ ID NO: 4803 - DNA, 33 bp, Homo sapien
gactctcctgagtcaacgtagagaaccctgggc

SEQ ID NO: 4804 - DNA, 33 bp, Homo sapien
gactctcctgagtcaatgtagagaaccctgggc

SEQ ID NO: 4805 - DNA, 33 bp, Homo sapien
gctttcaaattttgccaaccccactgatgtttc

SEQ ID NO: 4806 - DNA, 33 bp, Homo sapien
gctttcaaattttgccgaccccactgatgtttc

SEQ ID NO: 4807 - DNA, 33 bp, Homo sapien
gaacccgtgactgtgacactttacatggcagag

SEQ ID NO: 4808 - DNA, 33 bp, Homo sapien
gaacccgtgactgtgatactttacatggcagag

SEQ ID NO: 4809 - DNA, 33 bp, Homo sapien
taagcattaattacataatcaggaactttccac

SEQ ID NO: 4810 - DNA, 33 bp, Homo sapien
taagcattaattacatgatcaggaactttccac

SEQ ID NO: 4811 - DNA, 33 bp, Homo sapien
actctggtactaaaaaacagctagctcattggg

SEQ ID NO: 4812 - DNA, 33 bp, Homo sapien
actctggtactaaaaaccagctagctcattggg

SEQ ID NO: 4813 - DNA, 33 bp, Homo sapien
gtcctgaccaagtagacgtctgtgaaatgtaga

SEQ ID NO: 4814 - DNA, 33 bp, Homo sapien
gtcctgaccaagtagatgtctgtgaaatgtaga

SEQ ID NO: 4815 - DNA, 33 bp, Homo sapien
caatacctagaatagcacagggcacataggaag

SEQ ID NO: 4816 - DNA, 33 bp, Homo sapien
caatacctagaatagcgcagggcacataggaag

SEQ ID NO: 4817 - DNA, 33 bp, Homo sapien
ccactctgctgcagacccaactgggcaggtctt

SEQ ID NO: 4818 - DNA, 33 bp, Homo sapien
ccactctgctgcagactcaactgggcaggtctt

SEQ ID NO: 4819 - DNA, 33 bp, Homo sapien
ccctggcatggaaaagcacagcagctctttgtc

SEQ ID NO: 4820 - DNA, 33 bp, Homo sapien
ccctggcatggaaaagtacagcagctctttgtc

SEQ ID NO: 4821 - DNA, 33 bp, Homo sapien
tccctgatgaatattccaatactcttttcttag

SEQ ID NO: 4822 - DNA, 33 bp, Homo sapien
tccctgatgaatattctaatactcttttcttag

SEQ ID NO: 4823 - DNA, 33 bp, Homo sapien
gttgttgttgcttttgaaaaaatagagacaagg

SEQ ID NO: 4824 - DNA, 33 bp, Homo sapien
gttgttgttgcttttggaaaaatagagacaagg

SEQ ID NO: 4825 - DNA, 33 bp, Homo sapien
ggaagcacgtgagacccacaggttagatcctgc

SEQ ID NO: 4826 - DNA, 33 bp, Homo sapien
ggaagcacgtgagacctacaggttagatcctgc

SEQ ID NO: 4827 - DNA, 33 bp, Homo sapien
atgctcaaatccactaataagtggctgtccatt

SEQ ID NO: 4828 - DNA, 33 bp, Homo sapien
atgctcaaatccactagtaagtggctgtccatt

SEQ ID NO: 4829 - DNA, 33 bp, Homo sapien
tatgaatgtgcaggaccacagtttacttatccc

SEQ ID NO: 4830 - DNA, 33 bp, Homo sapien
tatgaatgtgcaggacgacagtttacttatccc

SEQ ID NO: 4831 - DNA, 33 bp, Homo sapien
aatctgaaaattctcaactgaagacaaagtaaa

SEQ ID NO: 4832 - DNA, 33 bp, Homo sapien
aatctgaaaattctcacctgaagacaaagtaaa

SEQ ID NO: 4833 - DNA, 33 bp, Homo sapien
gtgtctgtcaccttgacgttagttgtcacctta

SEQ ID NO: 4834 - DNA, 33 bp, Homo sapien
gtgtctgtcaccttgatgttagttgtcacctta

SEQ ID NO: 4835 - DNA, 33 bp, Homo sapien
agccctttcttgatcactctgtcaaaagaaccc

SEQ ID NO: 4836 - DNA, 33 bp, Homo sapien
agccctttcttgatcattctgtcaaaagaaccc

SEQ ID NO: 4837 - DNA, 33 bp, Homo sapien
ttctgttttcttttccagacatcttgtgatagg

SEQ ID NO: 4838 - DNA, 33 bp, Homo sapien
ttctgttttcttttccggacatcttgtgatagg

SEQ ID NO: 4839 - DNA, 33 bp, Homo sapien
gaatttaggccagagacgccagattttcaagtt

SEQ ID NO: 4840 - DNA, 33 bp, Homo sapien
gaatttaggccagagatgccagattttcaagtt

SEQ ID NO: 4841 - DNA, 33 bp, Homo sapien
agcgcgtatgggttagaagacttcgcgtgacgt

SEQ ID NO: 4842 - DNA, 33 bp, Homo sapien
agcgcgtatgggttagcagacttcgcgtgacgt

SEQ ID NO: 4843 - DNA, 33 bp, Homo sapien
ctcctcttctgtaaaacgaagacagtggccgta

SEQ ID NO: 4844 - DNA, 33 bp, Homo sapien
ctcctcttctgtaaaatgaagacagtggccgta

SEQ ID NO: 4845 - DNA, 33 bp, Homo sapien
caaggtgctattcttacctgcagagcaaaaacc

SEQ ID NO: 4846 - DNA, 33 bp, Homo sapien
caaggtgctattcttatctgcagagcaaaaacc

SEQ ID NO: 4847 - DNA, 33 bp, Homo sapien
ggttacaatgggtgacaaaagggacattcttag

SEQ ID NO: 4848 - DNA, 33 bp, Homo sapien
ggttacaatgggtgacgaaagggacattcttag

SEQ ID NO: 4849 - DNA, 33 bp, Homo sapien
tcccatcttttggagaccacctgtcacagcact

SEQ ID NO: 4850 - DNA, 33 bp, Homo sapien
tcccatcttttggagatcacctgtcacagcact

SEQ ID NO: 4851 - DNA, 33 bp, Homo sapien
agtctgtgaacttgaactctgtagtctgggaag

SEQ ID NO: 4852 - DNA, 33 bp, Homo sapien
agtctgtgaacttgaattctgtagtctgggaag

SEQ ID NO: 4853 - DNA, 33 bp, Homo sapien
tttgagttcaggctcacacgtggaatgctgtag

SEQ ID NO: 4854 - DNA, 33 bp, Homo sapien
tttgagttcaggctcatacgtggaatgctgtag

SEQ ID NO: 4855 - DNA, 33 bp, Homo sapien
ttgagcaggaagtaaccggatagaaaatggcta

SEQ ID NO: 4856 - DNA, 33 bp, Homo sapien
ttgagcaggaagtaactggatagaaaatggcta

SEQ ID NO: 4857 - DNA, 33 bp, Homo sapien
aggaataacagtctaccccagaatggcagcagt

SEQ ID NO: 4858 - DNA, 33 bp, Homo sapien
aggaataacagtctacgccagaatggcagcagt

SEQ ID NO: 4859 - DNA, 33 bp, Homo sapien
tgtcaaggttatgatccacatccagcaaacaga

SEQ ID NO: 4860 - DNA, 33 bp, Homo sapien
tgtcaaggttatgatctacatccagcaaacaga

SEQ ID NO: 4861 - DNA, 33 bp, Homo sapien
gcttcacagatgaatcacaacccacaggcctag

SEQ ID NO: 4862 - DNA, 33 bp, Homo sapien
gcttcacagatgaatcgcaacccacaggcctag

SEQ ID NO: 4863 - DNA, 33 bp, Homo sapien
ccatgctagagtcacaaacactcgagcccagag

SEQ ID NO: 4864 - DNA, 33 bp, Homo sapien
ccatgctagagtcacagacactcgagcccagag

SEQ ID NO: 4865 - DNA, 33 bp, Homo sapien
tctgagattactaccacctagggcttgctatat

SEQ ID NO: 4866 - DNA, 33 bp, Homo sapien
tctgagattactaccagctagggcttgctatat

SEQ ID NO: 4867 - DNA, 33 bp, Homo sapien
ctacggcagctgaaggaaaggaccctggtgtgc

SEQ ID NO: 4868 - DNA, 33 bp, Homo sapien
ctacggcagctgaaggcaaggaccctggtgtgc

SEQ ID NO: 4869 - DNA, 33 bp, Homo sapien
gaagccacggaaagccaagcatcagcttactat

SEQ ID NO: 4870 - DNA, 33 bp, Homo sapien
gaagccacggaaagccgagcatcagcttactat

SEQ ID NO: 4871 - DNA, 33 bp, Homo sapien
ttctggagattaggacaccgtttgagaaagttt

SEQ ID NO: 4872 - DNA, 33 bp, Homo sapien
ttctggagattaggacgccgtttgagaaagttt

SEQ ID NO: 4873 - DNA, 33 bp, Homo sapien
tggcggtgctcctctaccaagtttacattttaa

SEQ ID NO: 4874 - DNA, 33 bp, Homo sapien
tggcggtgctcctctatcaagtttacattttaa

SEQ ID NO: 4875 - DNA, 33 bp, Homo sapien
taaaatttactttgtacagatgacagagctgag

SEQ ID NO: 4876 - DNA, 33 bp, Homo sapien
taaaatttactttgtatagatgacagagctgag

SEQ ID NO: 4877 - DNA, 33 bp, Homo sapien
gtgggatccctgttcaacgccctgcacgccaca

SEQ ID NO: 4878 - DNA, 33 bp, Homo sapien
gtgggatccctgttcagcgccctgcacgccaca

SEQ ID NO: 4879 - DNA, 33 bp, Homo sapien
acgcctctgtcaaaacagtttatcattttacaa

SEQ ID NO: 4880 - DNA, 33 bp, Homo sapien
acgcctctgtcaaaacggtttatcattttacaa

SEQ ID NO: 4881 - DNA, 33 bp, Homo sapien
tttctacacatttgtcagaattaacgccaatag

SEQ ID NO: 4882 - DNA, 33 bp, Homo sapien
tttctacacatttgtcggaattaacgccaatag

SEQ ID NO: 4883 - DNA, 33 bp, Homo sapien
gatggactgagatacaacaagattaaatgactt

SEQ ID NO: 4884 - DNA, 33 bp, Homo sapien
gatggactgagatacatcaagattaaatgactt

SEQ ID NO: 4885 - DNA, 33 bp, Homo sapien
cctaggaagtcttaaacagcttgcccctcaatt

SEQ ID NO: 4886 - DNA, 33 bp, Homo sapien
cctaggaagtcttaaatagcttgcccctcaatt

SEQ ID NO: 4887 - DNA, 33 bp, Homo sapien
ctcacaagcaaaagacagggagagtatatacag

SEQ ID NO: 4888 - DNA, 33 bp, Homo sapien
ctcacaagcaaaagacggggagagtatatacag

SEQ ID NO: 4889 - DNA, 33 bp, Homo sapien
tacaaacttggtgaccaataacaacagagactt

SEQ ID NO: 4890 - DNA, 33 bp, Homo sapien
tacaaacttggtgacccataacaacagagactt

SEQ ID NO: 4891 - DNA, 33 bp, Homo sapien
tttgttataggaaaccaatacagagctcaatct

SEQ ID NO: 4892 - DNA, 33 bp, Homo sapien
tttgttataggaaaccgatacagagctcaatct

SEQ ID NO: 4893 - DNA, 33 bp, Homo sapien
aggcactgagtaagcagtcgtggaaatggatgg

SEQ ID NO: 4894 - DNA, 33 bp, Homo sapien
aggcactgagtaagcattcgtggaaatggatgg

SEQ ID NO: 4895 - DNA, 33 bp, Homo sapien
acccagtttctccagcagatcagtggtatgaaa

SEQ ID NO: 4896 - DNA, 33 bp, Homo sapien
acccagtttctccagccgatcagtggtatgaaa

SEQ ID NO: 4897 - DNA, 33 bp, Homo sapien
acctcggcatcatgcagtattcccatgtacaaa

SEQ ID NO: 4898 - DNA, 33 bp, Homo sapien
acctcggcatcatgcattattcccatgtacaaa

SEQ ID NO: 4899 - DNA, 33 bp, Homo sapien
gtagattggtaccagcactttggaaaaatgttt

SEQ ID NO: 4900 - DNA, 33 bp, Homo sapien
gtagattggtaccagcgctttggaaaaatgttt

SEQ ID NO: 4901 - DNA, 33 bp, Homo sapien
ttactgactttgatgaagcaagccaacttccag

SEQ ID NO: 4902 - DNA, 33 bp, Homo sapien
ttactgactttgatgaggcaagccaacttccag

SEQ ID NO: 4903 - DNA, 33 bp, Homo sapien
aggcttcggaatttacaaacataaactatctgg

SEQ ID NO: 4904 - DNA, 33 bp, Homo sapien
aggcttcggaatttacgaacataaactatctgg

SEQ ID NO: 4905 - DNA, 33 bp, Homo sapien
aacaacatcatacttaaaatgaatgaaataacc

SEQ ID NO: 4906 - DNA, 33 bp, Homo sapien
aacaacatcatacttagaatgaatgaaataacc

SEQ ID NO: 4907 - DNA, 33 bp, Homo sapien
gctcattgacaaccaaagaagttgaaagaagga

SEQ ID NO: 4908 - DNA, 33 bp, Homo sapien
gctcattgacaaccaaggaagttgaaagaagga

SEQ ID NO: 4909 - DNA, 33 bp, Homo sapien
aggtgttaaaatgttcactattatgcgcagaag

SEQ ID NO: 4910 - DNA, 33 bp, Homo sapien
aggtgttaaaatgttcgctattatgcgcagaag

SEQ ID NO: 4911 - DNA, 33 bp, Homo sapien
tatgcagcataaaccccgcccattttaagcgta

SEQ ID NO: 4912 - DNA, 33 bp, Homo sapien
tatgcagcataaaccctgcccattttaagcgta

SEQ ID NO: 4913 - DNA, 33 bp, Homo sapien
cacccctctgtaaatacactgaaatgtgttgaa

SEQ ID NO: 4914 - DNA, 33 bp, Homo sapien
cacccctctgtaaatatactgaaatgtgttgaa

SEQ ID NO: 4915 - DNA, 33 bp, Homo sapien
aagcagaagctaaaacacaccgtagaataatca

SEQ ID NO: 4916 - DNA, 33 bp, Homo sapien
aagcagaagctaaaacgcaccgtagaataatca

SEQ ID NO: 4917 - DNA, 33 bp, Homo sapien
gctcatcctttgctaacatgtctttttgcaaag

SEQ ID NO: 4918 - DNA, 33 bp, Homo sapien
gctcatcctttgctaatatgtctttttgcaaag

SEQ ID NO: 4919 - DNA, 33 bp, Homo sapien
tgacttgacttctgaaatgctccagctgcagca

SEQ ID NO: 4920 - DNA, 33 bp, Homo sapien
tgacttgacttctgaagtgctccagctgcagca

SEQ ID NO: 4921 - DNA, 33 bp, Homo sapien
agaccagaagtaagcccgaatggtttaatttga

SEQ ID NO: 4922 - DNA, 33 bp, Homo sapien
agaccagaagtaagcctgaatggtttaatttga

SEQ ID NO: 4923 - DNA, 33 bp, Homo sapien
ggctgctgggaatgaacggaaaagatcaggagg

SEQ ID NO: 4924 - DNA, 33 bp, Homo sapien
ggctgctgggaatgaatggaaaagatcaggagg

SEQ ID NO: 4925 - DNA, 33 bp, Homo sapien
gtgcccttgccttaaccactcggcctctgggcc

SEQ ID NO: 4926 - DNA, 33 bp, Homo sapien
gtgcccttgccttaactactcggcctctgggcc

SEQ ID NO: 4927 - DNA, 33 bp, Homo sapien
gggcataattcacttcgcctgagtcccagcagt

SEQ ID NO: 4928 - DNA, 33 bp, Homo sapien
gggcataattcacttctcctgagtcccagcagt

SEQ ID NO: 4929 - DNA, 33 bp, Homo sapien
aaccttctcaacaatacccttagaacagtaaca

SEQ ID NO: 4930 - DNA, 33 bp, Homo sapien
aaccttctcaacaatatccttagaacagtaaca

SEQ ID NO: 4931 - DNA, 33 bp, Homo sapien
aaaataataactaacagagagtccactgagcac

SEQ ID NO: 4932 - DNA, 33 bp, Homo sapien
aaaataataactaacatagagtccactgagcac

SEQ ID NO: 4933 - DNA, 33 bp, Homo sapien
acagagtaaatttcacaagggtgtggcgttgga

SEQ ID NO: 4934 - DNA, 33 bp, Homo sapien
acagagtaaatttcacgagggtgtggcgttgga

SEQ ID NO: 4935 - DNA, 33 bp, Homo sapien
atagatagatggatagacaacttctaaaataat

SEQ ID NO: 4936 - DNA, 33 bp, Homo sapien
atagatagatggataggcaacttctaaaataat

SEQ ID NO: 4937 - DNA, 33 bp, Homo sapien
atctacaaatgaaaaccgttcccaacatcccac

SEQ ID NO: 4938 - DNA, 33 bp, Homo sapien
atctacaaatgaaaacggttcccaacatcccac

SEQ ID NO: 4939 - DNA, 33 bp, Homo sapien
gaaacactggtccagacgagagtgccatagaag

SEQ ID NO: 4940 - DNA, 33 bp, Homo sapien
gaaacactggtccagaggagagtgccatagaag

SEQ ID NO: 4941 - DNA, 33 bp, Homo sapien
tcattctcagccaataactggcagcagggcagt

SEQ ID NO: 4942 - DNA, 33 bp, Homo sapien
tcattctcagccaatacctggcagcagggcagt

SEQ ID NO: 4943 - DNA, 33 bp, Homo sapien
ttgactttacaaatacactagaaaatctcagaa

SEQ ID NO: 4944 - DNA, 33 bp, Homo sapien
ttgactttacaaatactctagaaaatctcagaa

SEQ ID NO: 4945 - DNA, 33 bp, Homo sapien
cacaaatacatagacccgactacagtggtttaa

SEQ ID NO: 4946 - DNA, 33 bp, Homo sapien
cacaaatacatagacctgactacagtggtttaa

SEQ ID NO: 4947 - DNA, 33 bp, Homo sapien
acaagccccagtgcacaagcacttttcaagttt

SEQ ID NO: 4948 - DNA, 33 bp, Homo sapien
acaagccccagtgcacgagcacttttcaagttt

SEQ ID NO: 4949 - DNA, 33 bp, Homo sapien
agcacactttggaatgaagatctggaagctatt

SEQ ID NO: 4950 - DNA, 33 bp, Homo sapien
agcacactttggaatgcagatctggaagctatt

SEQ ID NO: 4951 - DNA, 33 bp, Homo sapien
gcctcctaaagcaggacggagggcaccagtgag

SEQ ID NO: 4952 - DNA, 33 bp, Homo sapien
gcctcctaaagcaggatggagggcaccagtgag

SEQ ID NO: 4953 - DNA, 33 bp, Homo sapien
tcactccaattgccccagatgaatattggtgct

SEQ ID NO: 4954 - DNA, 33 bp, Homo sapien
tcactccaattgccccggatgaatattggtgct

SEQ ID NO: 4955 - DNA, 33 bp, Homo sapien
gagtagaggggaaacgaaagacagaatctaacc

SEQ ID NO: 4956 - DNA, 33 bp, Homo sapien
gagtagaggggaaacggaagacagaatctaacc

SEQ ID NO: 4957 - DNA, 33 bp, Homo sapien
gtaaggatttgtataacgtggggaaggtgcaca

SEQ ID NO: 4958 - DNA, 33 bp, Homo sapien
gtaaggatttgtataatgtggggaaggtgcaca

SEQ ID NO: 4959 - DNA, 33 bp, Homo sapien; identical to SEQ ID NO: 4957

SEQ ID NO: 4960 - DNA, 33 bp, Homo sapien; identical to SEQ ID NO: 4958

SEQ ID NO: 4961 - DNA, 33 bp, Homo sapien
gtccctgggttggggccactgcaaggtttcact

SEQ ID NO: 4962 - DNA, 33 bp, Homo sapien
gtccctgggttggggctactgcaaggtttcact

SEQ ID NO: 4963 - DNA, 33 bp, Homo sapien
ggacactcctcaggtacgttaagagtgagttcc

SEQ ID NO: 4964 - DNA, 33 bp, Homo sapien
ggacactcctcaggtatgttaagagtgagttcc

SEQ ID NO: 4965 - DNA, 33 bp, Homo sapien
gcgggcaaggatgcgcactgcaaggaggcctgc

SEQ ID NO: 4966 - DNA, 33 bp, Homo sapien
gcgggcaaggatgcgcgctgcaaggaggcctgc

SEQ ID NO: 4967 - DNA, 33 bp, Homo sapien
ccacatgagacgcaaccagactgtgggctctgt

SEQ ID NO: 4968 - DNA, 33 bp, Homo sapien
ccacatgagacgcaacgagactgtgggctctgt

SEQ ID NO: 4969 - DNA, 33 bp, Homo sapien
ttgcatgtcaaactcacgtgcctctaggggcca

SEQ ID NO: 4970 - DNA, 33 bp, Homo sapien
ttgcatgtcaaactcatgtgcctctaggggcca

SEQ ID NO: 4971 - DNA, 33 bp, Homo sapien
gagtccacattcttcacgagctctagggaccat

SEQ ID NO: 4972 - DNA, 33 bp, Homo sapien
gagtccacattcttcatgagctctagggaccat

SEQ ID NO: 4973 - DNA, 33 bp, Homo sapien
ggacagatcacagttacaagctggggcctggag

SEQ ID NO: 4974 - DNA, 33 bp, Homo sapien
ggacagatcacagttataagctggggcctggag

SEQ ID NO: 4975 - DNA, 33 bp, Homo sapien
gggtaagggcttaatcacagtgacaaatacgta

SEQ ID NO: 4976 - DNA, 33 bp, Homo sapien
gggtaagggcttaatcgcagtgacaaatacgta

SEQ ID NO: 4977 - DNA, 33 bp, Homo sapien
gcagatttggtgagtccccatgaaatttgggcc

SEQ ID NO: 4978 - DNA, 33 bp, Homo sapien
gcagatttggtgagtctccatgaaatttgggcc

SEQ ID NO: 4979 - DNA, 33 bp, Homo sapien
acagccccccaagaacagagcagcgagaactca

SEQ ID NO: 4980 - DNA, 33 bp, Homo sapien
acagccccccaagaacggagcagcgagaactca

SEQ ID NO: 4981 - DNA, 33 bp, Homo sapien
tggccatgtgcattaccatcctgtaaaggaggc

SEQ ID NO: 4982 - DNA, 33 bp, Homo sapien
tggccatgtgcattactatcctgtaaaggaggc

SEQ ID NO: 4983 - DNA, 33 bp, Homo sapien
gcagtcagaactagacacacatgcaaggctaac

SEQ ID NO: 4984 - DNA, 33 bp, Homo sapien
gcagtcagaactagacgcacatgcaaggctaac

SEQ ID NO: 4985 - DNA, 33 bp, Homo sapien
aagccaggctcaagagcatataagactatatag

SEQ ID NO: 4986 - DNA, 33 bp, Homo sapien
aagccaggctcaagagtatataagactatatag

SEQ ID NO: 4987 - DNA, 33 bp, Homo sapien
ccttttgcttgtccttaaacttcaatataaatc

SEQ ID NO: 4988 - DNA, 33 bp, Homo sapien
ccttttgcttgtccttgaacttcaatataaatc

SEQ ID NO: 4989 - DNA, 33 bp, Homo sapien
gagcaccgacatcaccaaatcctccagaaccaa

SEQ ID NO: 4990 - DNA, 33 bp, Homo sapien
gagcaccgacatcaccgaatcctccagaaccaa

SEQ ID NO: 4991 - DNA, 33 bp, Homo sapien
taaatgagataaaaagcatagaaccaggagatt

SEQ ID NO: 4992 - DNA, 33 bp, Homo sapien
taaatgagataaaaagtatagaaccaggagatt

SEQ ID NO: 4993 - DNA, 33 bp, Homo sapien
cacaagtgcagtttgaaacctgattgttactaa

SEQ ID NO: 4994 - DNA, 33 bp, Homo sapien
cacaagtgcagtttgagacctgattgttactaa

SEQ ID NO: 4995 - DNA, 33 bp, Homo sapien
tttacatgactataataaatgaaactttgaaac

SEQ ID NO: 4996 - DNA, 33 bp, Homo sapien
tttacatgactataattaatgaaactttgaaac

SEQ ID NO: 4997 - DNA, 33 bp, Homo sapien
tcacaaagctggacacaatacctcgtaagcctt

SEQ ID NO: 4998 - DNA, 33 bp, Homo sapien
tcacaaagctggacacgatacctcgtaagcctt

SEQ ID NO: 4999 - DNA, 33 bp, Homo sapien
attcaatattaaaggccgataaatgtacatttt

SEQ ID NO: 5000 - DNA, 33 bp, Homo sapien
attcaatattaaaggctgataaatgtacatttt

SEQ ID NO: 5001 - DNA, 33 bp, Homo sapien
gggtgggttatatgaccgctctaagcctcagta

SEQ ID NO: 5002 - DNA, 33 bp, Homo sapien
gggtgggttatatgactgctctaagcctcagta

SEQ ID NO: 5003 - DNA, 33 bp, Homo sapien
tctatcctctgaggtcaataggcctaattccat

SEQ ID NO: 5004 - DNA, 33 bp, Homo sapien
tctatcctctgaggtcgataggcctaattccat

SEQ ID NO: 5005 - DNA, 33 bp, Homo sapien
attttaatgtagacaaacttatggaattaggcc

SEQ ID NO: 5006 - DNA, 33 bp, Homo sapien
attttaatgtagacaagcttatggaattaggcc

SEQ ID NO: 5007 - DNA, 33 bp, Homo sapien
aggaattgccttttcacagtattctaggaaaat

SEQ ID NO: 5008 - DNA, 33 bp, Homo sapien
aggaattgccttttcagagtattctaggaaaat

SEQ ID NO: 5009 - DNA, 33 bp, Homo sapien
ctaggattgactgtcccaagcatcactgattct

SEQ ID NO: 5010 - DNA, 33 bp, Homo sapien
ctaggattgactgtccgaagcatcactgattct

SEQ ID NO: 5011 - DNA, 33 bp, Homo sapien
cgaggtccgaatctgcagaaggaagaatcatcc

SEQ ID NO: 5012 - DNA, 33 bp, Homo sapien
cgaggtccgaatctgcggaaggaagaatcatcc

SEQ ID NO: 5013 - DNA, 33 bp, Homo sapien
tgattccgtgtcgcggcattgcataatggaatg

SEQ ID NO: 5014 - DNA, 33 bp, Homo sapien
tgattccgtgtcgcggtattgcataatggaatg

SEQ ID NO: 5015 - DNA, 33 bp, Homo sapien
attgtatcattttctacgtatgccatgacagga

SEQ ID NO: 5016 - DNA, 33 bp, Homo sapien
attgtatcattttctatgtatgccatgacagga

SEQ ID NO: 5017 - DNA, 33 bp, Homo sapien
ttttagatggcatttcgctttgcccaaggaggt

SEQ ID NO: 5018 - DNA, 33 bp, Homo sapien
ttttagatggcatttctctttgcccaaggaggt

SEQ ID NO: 5019 - DNA, 33 bp, Homo sapien
atcccagtatccaagaagtactctgtgttgtac

SEQ ID NO: 5020 - DNA, 33 bp, Homo sapien
atcccagtatccaagatgtactctgtgttgtac

SEQ ID NO: 5021 - DNA, 33 bp, Homo sapien
aggcagtagtgcgctcacaggtcactgtagcct

SEQ ID NO: 5022 - DNA, 33 bp, Homo sapien
aggcagtagtgcgctcgcaggtcactgtagcct

SEQ ID NO: 5023 - DNA, 33 bp, Homo sapien
cttggggccacagttaaactttagaaagaagtt

SEQ ID NO: 5024 - DNA, 33 bp, Homo sapien
cttggggccacagttagactttagaaagaagtt

SEQ ID NO: 5025 - DNA, 33 bp, Homo sapien
taatcccattggcaaacacagagaaatccaaag

SEQ ID NO: 5026 - DNA, 33 bp, Homo sapien
taatcccattggcaaagacagagaaatccaaag

SEQ ID NO: 5027 - DNA, 33 bp, Homo sapien
tctacataggccaacccgccgtgtacatgtttc

SEQ ID NO: 5028 - DNA, 33 bp, Homo sapien
tctacataggccaacctgccgtgtacatgtttc

SEQ ID NO: 5029 - DNA, 33 bp, Homo sapien
gttcaatctggttacaactagcctatatgcatt

SEQ ID NO: 5030 - DNA, 33 bp, Homo sapien
gttcaatctggttacagctagcctatatgcatt

SEQ ID NO: 5031 - DNA, 33 bp, Homo sapien
ctcttcttttgccaccaatccagttaaaaattg

SEQ ID NO: 5032 - DNA, 33 bp, Homo sapien
ctcttcttttgccaccgatccagttaaaaattg

SEQ ID NO: 5033 - DNA, 33 bp, Homo sapien
ctaaaaccaccagggacgcttgtgaagtatgca

SEQ ID NO: 5034 - DNA, 33 bp, Homo sapien
ctaaaaccaccagggatgcttgtgaagtatgca

SEQ ID NO: 5035 - DNA, 33 bp, Homo sapien
agagttacctggttccacttcagagcagactgg

SEQ ID NO: 5036 - DNA, 33 bp, Homo sapien
agagttacctggttccgcttcagagcagactgg

SEQ ID NO: 5037 - DNA, 33 bp, Homo sapien
tctatttcacagccccccttgcttctggcatgg

SEQ ID NO: 5038 - DNA, 33 bp, Homo sapien
tctatttcacagccccgcttgcttctggcatgg

SEQ ID NO: 5039 - DNA, 33 bp, Homo sapien
gagagaactaaggacaaatgtaaggttgcttct

SEQ ID NO: 5040 - DNA, 33 bp, Homo sapien
gagagaactaaggacagatgtaaggttgcttct

SEQ ID NO: 5041 - DNA, 33 bp, Homo sapien
catttttgaatcagcacgtggttctactaaata

SEQ ID NO: 5042 - DNA, 33 bp, Homo sapien
catttttgaatcagcatgtggttctactaaata

SEQ ID NO: 5043 - DNA, 33 bp, Homo sapien
atactggtagagttcaaagaaagagaagaagca

SEQ ID NO: 5044 - DNA, 33 bp, Homo sapien
atactggtagagttcagagaaagagaagaagca

SEQ ID NO: 5045 - DNA, 33 bp, Homo sapien
tctgcataccgctgaagcctgcgtttgtgtcca

SEQ ID NO: 5046 - DNA, 33 bp, Homo sapien
tctgcataccgctgaatcctgcgtttgtgtcca

SEQ ID NO: 5047 - DNA, 33 bp, Homo sapien
ctgtccaacggaagcaatagagcttttctcatg

SEQ ID NO: 5048 - DNA, 33 bp, Homo sapien
ctgtccaacggaagcagtagagcttttctcatg

SEQ ID NO: 5049 - DNA, 33 bp, Homo sapien
gtgtcttgtcagttttaaaaaaagctgcagctg

SEQ ID NO: 5050 - DNA, 33 bp, Homo sapien
gtgtcttgtcagtttttaaaaaagctgcagctg

SEQ ID NO: 5051 - DNA, 33 bp, Homo sapien
gaaatcaatggcttaaagtagtaaattcaaaga

SEQ ID NO: 5052 - DNA, 33 bp, Homo sapien
gaaatcaatggcttaaggtagtaaattcaaaga

SEQ ID NO: 5053 - DNA, 33 bp, Homo sapien
taatcataataaagccaagtttggtgttctaat

SEQ ID NO: 5054 - DNA, 33 bp, Homo sapien
taatcataataaagccgagtttggtgttctaat

SEQ ID NO: 5055 - DNA, 33 bp, Homo sapien
agaagaggggctaagacggtacatgatgttatg

SEQ ID NO: 5056 - DNA, 33 bp, Homo sapien
agaagaggggctaagagggtacatgatgttatg

SEQ ID NO: 5057 - DNA, 33 bp, Homo sapien
aggctaaaggcaatgaatagctctgccagaaaa

SEQ ID NO: 5058 - DNA, 33 bp, Homo sapien
aggctaaaggcaatgagtagctctgccagaaaa

SEQ ID NO: 5059 - DNA, 33 bp, Homo sapien
cctgggacagtaacgacggggagagtgttaacc

SEQ ID NO: 5060 - DNA, 33 bp, Homo sapien
cctgggacagtaacgatggggagagtgttaacc

SEQ ID NO: 5061 - DNA, 33 bp, Homo sapien
acacacctgacaggcacaaaaacttagaatcaa

SEQ ID NO: 5062 - DNA, 33 bp, Homo sapien
acacacctgacaggcataaaaacttagaatcaa

SEQ ID NO: 5063 - DNA, 33 bp, Homo sapien
ggaaacagctgaaggacgcacaatgctgaccag

SEQ ID NO: 5064 - DNA, 33 bp, Homo sapien
ggaaacagctgaaggatgcacaatgctgaccag

SEQ ID NO: 5065 - DNA, 33 bp, Homo sapien
gccatccatggcactcagaattctaatggaaca

SEQ ID NO: 5066 - DNA, 33 bp, Homo sapien
gccatccatggcactcggaattctaatggaaca

SEQ ID NO: 5067 - DNA, 33 bp, Homo sapien
cgcgcaaattgtcccccctgttattctctagca

SEQ ID NO: 5068 - DNA, 33 bp, Homo sapien
cgcgcaaattgtcccctctgttattctctagca

SEQ ID NO: 5069 - DNA, 33 bp, Homo sapien
gcttcatcttgtgaaccctgaaattctctagcc

SEQ ID NO: 5070 - DNA, 33 bp, Homo sapien
gcttcatcttgtgaacgctgaaattctctagcc

SEQ ID NO: 5071 - DNA, 33 bp, Homo sapien
tgtgacattgagctgcccaagtgcaggtgagat

SEQ ID NO: 5072 - DNA, 33 bp, Homo sapien
tgtgacattgagctgcgcaagtgcaggtgagat

SEQ ID NO: 5073 - DNA, 33 bp, Homo sapien
aagaggaggcaaggataagccaaaacatttttt

SEQ ID NO: 5074 - DNA, 33 bp, Homo sapien
aagaggaggcaaggatgagccaaaacatttttt

SEQ ID NO: 5075 - DNA, 33 bp, Homo sapien
ctcctctttttatcaaccccaggttcaacctac

SEQ ID NO: 5076 - DNA, 33 bp, Homo sapien
ctcctctttttatcaatcccaggttcaacctac

SEQ ID NO: 5077 - DNA, 33 bp, Homo sapien
caaactttttggactcccggcaacgaggatcag

SEQ ID NO: 5078 - DNA, 33 bp, Homo sapien
caaactttttggactcgcggcaacgaggatcag

SEQ ID NO: 5079 - DNA, 33 bp, Homo sapien
ccttagctaaagtgacccagatgctgacttcca

SEQ ID NO: 5080 - DNA, 33 bp, Homo sapien
ccttagctaaagtgacgcagatgctgacttcca

SEQ ID NO: 5081 - DNA, 33 bp, Homo sapien
gaaagatatttgcaaacgttaatcatggttaat

SEQ ID NO: 5082 - DNA, 33 bp, Homo sapien
gaaagatatttgcaaatgttaatcatggttaat

SEQ ID NO: 5083 - DNA, 33 bp, Homo sapien
acaaatattggtaaaccgcattagtaattctta

SEQ ID NO: 5084 - DNA, 33 bp, Homo sapien
acaaatattggtaaactgcattagtaattctta

SEQ ID NO: 5085 - DNA, 33 bp, Homo sapien
atgggtagtttgataaaaatgtgatcttttgga

SEQ ID NO: 5086 - DNA, 33 bp, Homo sapien
atgggtagtttgataagaatgtgatcttttgga

SEQ ID NO: 5087 - DNA, 33 bp, Homo sapien
cagatattcttcattggagagattctaattctt

SEQ ID NO: 5088 - DNA, 33 bp, Homo sapien
cagatattcttcattgtagagattctaattctt

SEQ ID NO: 5089 - DNA, 33 bp, Homo sapien
aattctatgcagaaaaaaaagtggaacaagatt

SEQ ID NO: 5090 - DNA, 33 bp, Homo sapien
aattctatgcagaaaagaaagtggaacaagatt

SEQ ID NO: 5091 - DNA, 33 bp, Homo sapien
tctagtgtaaggtttacatcaatgaaaacgatt

SEQ ID NO: 5092 - DNA, 33 bp, Homo sapien
tctagtgtaaggtttatatcaatgaaaacgatt

SEQ ID NO: 5093 - DNA, 33 bp, Homo sapien
agggacaacacaactgacacttggaccatgtac

SEQ ID NO: 5094 - DNA, 33 bp, Homo sapien
agggacaacacaactggcacttggaccatgtac

SEQ ID NO: 5095 - DNA, 33 bp, Homo sapien
atgatatttggtttaactggattcaagatgatc

SEQ ID NO: 5096 - DNA, 33 bp, Homo sapien
atgatatttggtttaattggattcaagatgatc

SEQ ID NO: 5097 - DNA, 33 bp, Homo sapien
gaagcatctagactgaacattccaacactggaa

SEQ ID NO: 5098 - DNA, 33 bp, Homo sapien
gaagcatctagactgagcattccaacactggaa

SEQ ID NO: 5099 - DNA, 33 bp, Homo sapien
ccatgtccctgaatccaaccaagctcaaggtga

SEQ ID NO: 5100 - DNA, 33 bp, Homo sapien
ccatgtccctgaatccgaccaagctcaaggtga

SEQ ID NO: 5101 - DNA, 33 bp, Homo sapien
aaggagatttttgtcacggacactgaacttaac

SEQ ID NO: 5102 - DNA, 33 bp, Homo sapien
aaggagatttttgtcatggacactgaacttaac

SEQ ID NO: 5103 - DNA, 33 bp, Homo sapien
cagggtgcatattcacacctccttttctccatg

SEQ ID NO: 5104 - DNA, 33 bp, Homo sapien
cagggtgcatattcacgcctccttttctccatg

SEQ ID NO: 5105 - DNA, 33 bp, Homo sapien
cactggggcaccaacacgaggcagccgcctccg

SEQ ID NO: 5106 - DNA, 33 bp, Homo sapien
cactggggcaccaacatgaggcagccgcctccg

SEQ ID NO: 5107 - DNA, 33 bp, Homo sapien
ctgtccacccatccaactaagaaagactgactc

SEQ ID NO: 5108 - DNA, 33 bp, Homo sapien
ctgtccacccatccaagtaagaaagactgactc

SEQ ID NO: 5109 - DNA, 33 bp, Homo sapien
ataagaagtagccccaccttgcagtgagtttat

SEQ ID NO: 5110 - DNA, 33 bp, Homo sapien
ataagaagtagccccagcttgcagtgagtttat

SEQ ID NO: 5111 - DNA, 33 bp, Homo sapien
agtttatttgccaagcggataaatgtctaaatt

SEQ ID NO: 5112 - DNA, 33 bp, Homo sapien
agtttatttgccaagctgataaatgtctaaatt

SEQ ID NO: 5113 - DNA, 33 bp, Homo sapien
cctctgtgagctgaataagtcgtaattgtctta

SEQ ID NO: 5114 - DNA, 33 bp, Homo sapien
cctctgtgagctgaatgagtcgtaattgtctta

SEQ ID NO: 5115 - DNA, 33 bp, Homo sapien
ctaacgccccctcaaaactcagttactattcac

SEQ ID NO: 5116 - DNA, 33 bp, Homo sapien
ctaacgccccctcaaagctcagttactattcac

SEQ ID NO: 5117 - DNA, 33 bp, Homo sapien
gtctacagggtggccaactgcttaaaaagttat

SEQ ID NO: 5118 - DNA, 33 bp, Homo sapien
gtctacagggtggccatctgcttaaaaagttat

SEQ ID NO: 5119 - DNA, 33 bp, Homo sapien
tctctctgatgctgaaatccatacacttaaacc

SEQ ID NO: 5120 - DNA, 33 bp, Homo sapien
tctctctgatgctgaagtccatacacttaaacc

SEQ ID NO: 5121 - DNA, 33 bp, Homo sapien
cacagaacacgatgtaagtcttcattggtgggg

SEQ ID NO: 5122 - DNA, 33 bp, Homo sapien
cacagaacacgatgtaggtcttcattggtgggg

SEQ ID NO: 5123 - DNA, 33 bp, Homo sapien
aggagactccatcccagaaggcagcccaggtgg

SEQ ID NO: 5124 - DNA, 33 bp, Homo sapien
aggagactccatcccataaggcagcccaggtgg

SEQ ID NO: 5125 - DNA, 33 bp, Homo sapien
tgagtcttaatcctgacaaaggagagcaatggt

SEQ ID NO: 5126 - DNA, 33 bp, Homo sapien
tgagtcttaatcctgagaaaggagagcaatggt

SEQ ID NO: 5127 - DNA, 33 bp, Homo sapien
cccttgagaatcagacaatgcgtagatggtatt

SEQ ID NO: 5128 - DNA, 33 bp, Homo sapien
cccttgagaatcagacgatgcgtagatggtatt

SEQ ID NO: 5129 - DNA, 33 bp, Homo sapien
aaatcttctcccgtgcaccggccctgctgacag

SEQ ID NO: 5130 - DNA, 33 bp, Homo sapien
aaatcttctcccgtgcgccggccctgctgacag

SEQ ID NO: 5131 - DNA, 33 bp, Homo sapien
cacaataaaccccaaacttgcaaggttctgggg

SEQ ID NO: 5132 - DNA, 33 bp, Homo sapien
cacaataaaccccaaatttgcaaggttctgggg

SEQ ID NO: 5133 - DNA, 33 bp, Homo sapien
actcccttcccctctcactgaagacagtgggac

SEQ ID NO: 5134 - DNA, 33 bp, Homo sapien
actcccttcccctctcgctgaagacagtgggac

SEQ ID NO: 5135 - DNA, 33 bp, Homo sapien
tgggctcgggttcatgcagagcggcaaccccca

SEQ ID NO: 5136 - DNA, 33 bp, Homo sapien
tgggctcgggttcatgtagagcggcaaccccca

SEQ ID NO: 5137 - DNA, 33 bp, Homo sapien
gacaccagctgggaaacggcaaagtcagagccc

SEQ ID NO: 5138 - DNA, 33 bp, Homo sapien
gacaccagctgggaaatggcaaagtcagagccc

SEQ ID NO: 5139 - DNA, 33 bp, Homo sapien
tggcttcgctggttaactcctagtagtccctga

SEQ ID NO: 5140 - DNA, 33 bp, Homo sapien
tggcttcgctggttaattcctagtagtccctga

SEQ ID NO: 5141 - DNA, 33 bp, Homo sapien
tggtgccgggcatacaatggtgcccagtaaacg

SEQ ID NO: 5142 - DNA, 33 bp, Homo sapien
tggtgccgggcatacagtggtgcccagtaaacg

SEQ ID NO: 5143 - DNA, 33 bp, Homo sapien
gtgaggctgtgttcagcaaaactattattcaga

SEQ ID NO: 5144 - DNA, 33 bp, Homo sapien
gtgaggctgtgttcagtaaaactattattcaga

SEQ ID NO: 5145 - DNA, 33 bp, Homo sapien
gcctctcctgtcagacgggacactgctaagggt

SEQ ID NO: 5146 - DNA, 33 bp, Homo sapien
gcctctcctgtcagactggacactgctaagggt

SEQ ID NO: 5147 - DNA, 33 bp, Homo sapien
actgtggaaagccaacactcaagaacgtgaata

SEQ ID NO: 5148 - DNA, 33 bp, Homo sapien
actgtggaaagccaacgctcaagaacgtgaata

SEQ ID NO: 5149 - DNA, 33 bp, Homo sapien
cctctggcctaaacatcaccttatgcccaaacc

SEQ ID NO: 5150 - DNA, 33 bp, Homo sapien
cctctggcctaaacattaccttatgcccaaacc

SEQ ID NO: 5151 - DNA, 33 bp, Homo sapien
gtagaaccgcaattgccctaaaaaaataaaatg

SEQ ID NO: 5152 - DNA, 33 bp, Homo sapien
gtagaaccgcaattgctctaaaaaaataaaatg

SEQ ID NO: 5153 - DNA, 33 bp, Homo sapien
ggcccataattagtcaagagaagtggtggcttt

SEQ ID NO: 5154 - DNA, 33 bp, Homo sapien
ggcccataattagtcacgagaagtggtggcttt

SEQ ID NO: 5155 - DNA, 33 bp, Homo sapien
tgctgtggcagatcaacacttgcagaacctttc

SEQ ID NO: 5156 - DNA, 33 bp, Homo sapien
tgctgtggcagatcaatacttgcagaacctttc

SEQ ID NO: 5157 - DNA, 33 bp, Homo sapien
catccttcaggggtcaaatgttaattgccaggg

SEQ ID NO: 5158 - DNA, 33 bp, Homo sapien
catccttcaggggtcagatgttaattgccaggg

SEQ ID NO: 5159 - DNA, 33 bp, Homo sapien
aatacctccctgggaaataggcttctctgttac

SEQ ID NO: 5160 - DNA, 33 bp, Homo sapien
aatacctccctgggaactaggcttctctgttac

SEQ ID NO: 5161 - DNA, 33 bp, Homo sapien
tgggagacagaaatcaatcctgaaagttgatga

SEQ ID NO: 5162 - DNA, 33 bp, Homo sapien
tgggagacagaaatcagtcctgaaagttgatga

SEQ ID NO: 5163 - DNA, 33 bp, Homo sapien
aaaacccgctctgctgcataacctgtgaaataa

SEQ ID NO: 5164 - DNA, 33 bp, Homo sapien
aaaacccgctctgctgtataacctgtgaaataa

SEQ ID NO: 5165 - DNA, 33 bp, Homo sapien
gagactaaaattcttaagtaagatggacaaggt

SEQ ID NO: 5166 - DNA, 33 bp, Homo sapien
gagactaaaattcttacgtaagatggacaaggt

SEQ ID NO: 5167 - DNA, 33 bp, Homo sapien
gtatattagaaacctgaaagtacagaatctcaa

SEQ ID NO: 5168 - DNA, 33 bp, Homo sapien
gtatattagaaacctggaagtacagaatctcaa

SEQ ID NO: 5169 - DNA, 33 bp, Homo sapien
tgtttcatagtactgacgatttccaagttagag

SEQ ID NO: 5170 - DNA, 33 bp, Homo sapien
tgtttcatagtactgatgatttccaagttagag

SEQ ID NO: 5171 - DNA, 33 bp, Homo sapien
tttgcctgacctctcaaccaaagaaccctgaca

SEQ ID NO: 5172 - DNA, 33 bp, Homo sapien
tttgcctgacctctcatccaaagaaccctgaca

SEQ ID NO: 5173 - DNA, 33 bp, Homo sapien
atgtaattaggatcagaccagtttctcaagttc

SEQ ID NO: 5174 - DNA, 33 bp, Homo sapien
atgtaattaggatcaggccagtttctcaagttc

SEQ ID NO: 5175 - DNA, 33 bp, Homo sapien
cacctcatccctaacaacctctcaaggtccacg

SEQ ID NO: 5176 - DNA, 33 bp, Homo sapien
cacctcatccctaacaccctctcaaggtccacg

SEQ ID NO: 5177 - DNA, 33 bp, Homo sapien
atagcatacagaaacactgtcttagggcatctt

SEQ ID NO: 5178 - DNA, 33 bp, Homo sapien
atagcatacagaaacattgtcttagggcatctt

SEQ ID NO: 5179 - DNA, 33 bp, Homo sapien
agttcctgttctttccacctacattaggcaaat

SEQ ID NO: 5180 - DNA, 33 bp, Homo sapien
agttcctgttctttccgcctacattaggcaaat

SEQ ID NO: 5181 - DNA, 33 bp, Homo sapien
aaagcttgccaaaaaacctagcagaatacttta

SEQ ID NO: 5182 - DNA, 33 bp, Homo sapien
aaagcttgccaaaaaatctagcagaatacttta

SEQ ID NO: 5183 - DNA, 33 bp, Homo sapien
gaaagaaaatacacaaataactgctgtgaaaat

SEQ ID NO: 5184 - DNA, 33 bp, Homo sapien
gaaagaaaatacacaagtaactgctgtgaaaat

SEQ ID NO: 5185 - DNA, 33 bp, Homo sapien
aagaggcaatgactatcagaagggctgttaccc

SEQ ID NO: 5186 - DNA, 33 bp, Homo sapien
aagaggcaatgactatgagaagggctgttaccc

SEQ ID NO: 5187 - DNA, 33 bp, Homo sapien
cttattcatttccacacctacacagtgaggatg

SEQ ID NO: 5188 - DNA, 33 bp, Homo sapien
cttattcatttccacagctacacagtgaggatg

SEQ ID NO: 5189 - DNA, 33 bp, Homo sapien
aactctacagaaacaacggacacggtggcacct

SEQ ID NO: 5190 - DNA, 33 bp, Homo sapien
aactctacagaaacaatggacacggtggcacct

SEQ ID NO: 5191 - DNA, 33 bp, Homo sapien
cctagctgtaaaaatcagaatcagaaacaccag

SEQ ID NO: 5192 - DNA, 33 bp, Homo sapien
cctagctgtaaaaatcggaatcagaaacaccag

SEQ ID NO: 5193 - DNA, 33 bp, Homo sapien
agtcttttggcttgtacactgaggcacagagtg

SEQ ID NO: 5194 - DNA, 33 bp, Homo sapien
agtcttttggcttgtatactgaggcacagagtg

SEQ ID NO: 5195 - DNA, 33 bp, Homo sapien
actgggattttcaaagaagtccatcacttgcaa

SEQ ID NO: 5196 - DNA, 33 bp, Homo sapien
actgggattttcaaaggagtccatcacttgcaa

SEQ ID NO: 5197 - DNA, 33 bp, Homo sapien
gtgactggcacctaccaaaaggcttagagtaaa

SEQ ID NO: 5198 - DNA, 33 bp, Homo sapien
gtgactggcacctaccgaaaggcttagagtaaa

SEQ ID NO: 5199 - DNA, 33 bp, Homo sapien
atctgttatccgttgtaaataatactgctatga

SEQ ID NO: 5200 - DNA, 33 bp, Homo sapien
atctgttatccgttgtgaataatactgctatga

SEQ ID NO: 5201 - DNA, 33 bp, Homo sapien
tgtttaattcacatgaaaaatgcctaaaaaaaa

SEQ ID NO: 5202 - DNA, 33 bp, Homo sapien
tgtttaattcacatgagaaatgcctaaaaaaaa

SEQ ID NO: 5203 - DNA, 33 bp, Homo sapien
aattggcaccgtgtcacactgtttcctgggatt

SEQ ID NO: 5204 - DNA, 33 bp, Homo sapien
aattggcaccgtgtcatactgtttcctgggatt

SEQ ID NO: 5205 - DNA, 33 bp, Homo sapien
ggtgctggaagccagacggaacagtgttggggc

SEQ ID NO: 5206 - DNA, 33 bp, Homo sapien
ggtgctggaagccagatggaacagtgttggggc

SEQ ID NO: 5207 - DNA, 33 bp, Homo sapien
gtccttctgtggtacaacccttcagttaagcca

SEQ ID NO: 5208 - DNA, 33 bp, Homo sapien
gtccttctgtggtacaccccttcagttaagcca

SEQ ID NO: 5209 - DNA, 33 bp, Homo sapien
caatacatccaacaagacttctagcaaaaatgt

SEQ ID NO: 5210 - DNA, 33 bp, Homo sapien
caatacatccaacaaggcttctagcaaaaatgt

SEQ ID NO: 5211 - DNA, 33 bp, Homo sapien
ctctgcagcaagactcaaataggctggtggtga

SEQ ID NO: 5212 - DNA, 33 bp, Homo sapien
ctctgcagcaagactcgaataggctggtggtga

SEQ ID NO: 5213 - DNA, 33 bp, Homo sapien
ctttcttaacccatcagcttattcaagccgtcc

SEQ ID NO: 5214 - DNA, 33 bp, Homo sapien
ctttcttaacccatcatcttattcaagccgtcc

SEQ ID NO: 5215 - DNA, 33 bp, Homo sapien
atcttcattttatggacggtaaactgaggcaca

SEQ ID NO: 5216 - DNA, 33 bp, Homo sapien
atcttcattttatggatggtaaactgaggcaca

SEQ ID NO: 5217 - DNA, 33 bp, Homo sapien
gtgccaggctcttggccgagtgttttatacata

SEQ ID NO: 5218 - DNA, 33 bp, Homo sapien
gtgccaggctcttggctgagtgttttatacata

SEQ ID NO: 5219 - DNA, 33 bp, Homo sapien
agccactgtacctggcgctattaaaatttaatt

SEQ ID NO: 5220 - DNA, 33 bp, Homo sapien
agccactgtacctggctctattaaaatttaatt

SEQ ID NO: 5221 - DNA, 33 bp, Homo sapien
ctaactaaaatgttctcaacgcactaaatgaaa

SEQ ID NO: 5222 - DNA, 33 bp, Homo sapien
ctaactaaaatgttcttaacgcactaaatgaaa

SEQ ID NO: 5223 - DNA, 33 bp, Homo sapien
cacagtcccctctgaacactcccgtgaagcagg

SEQ ID NO: 5224 - DNA, 33 bp, Homo sapien
cacagtcccctctgaagactcccgtgaagcagg

SEQ ID NO: 5225 - DNA, 33 bp, Homo sapien
tcatgccagactttaacagcaaaaagttagaaa

SEQ ID NO: 5226 - DNA, 33 bp, Homo sapien
tcatgccagactttaatagcaaaaagttagaaa

SEQ ID NO: 5227 - DNA, 33 bp, Homo sapien
ctggacagatggttacaatatattaagtgaaag

SEQ ID NO: 5228 - DNA, 33 bp, Homo sapien
ctggacagatggttacgatatattaagtgaaag

SEQ ID NO: 5229 - DNA, 33 bp, Homo sapien
agttttcctagaattccatgtcaaagtgaaaaa

SEQ ID NO: 5230 - DNA, 33 bp, Homo sapien
agttttcctagaattctatgtcaaagtgaaaaa

SEQ ID NO: 5231 - DNA, 33 bp, Homo sapien
gaggaggcagactttcccttcatggtgccttca

SEQ ID NO: 5232 - DNA, 33 bp, Homo sapien
gaggaggcagactttctcttcatggtgccttca

SEQ ID NO: 5233 - DNA, 33 bp, Homo sapien
tttggtgaaaatgtgaacctttcatgttctgct

SEQ ID NO: 5234 - DNA, 33 bp, Homo sapien
tttggtgaaaatgtgagcctttcatgttctgct

SEQ ID NO: 5235 - DNA, 33 bp, Homo sapien
gtagtctggccagaatcattcctaggtcggtgg

SEQ ID NO: 5236 - DNA, 33 bp, Homo sapien
gtagtctggccagaatgattcctaggtcggtgg

SEQ ID NO: 5237 - DNA, 33 bp, Homo sapien
ttatgtatttgtcagcagcgtgaaaacggacta

SEQ ID NO: 5238 - DNA, 33 bp, Homo sapien
ttatgtatttgtcagcggcgtgaaaacggacta

SEQ ID NO: 5239 - DNA, 33 bp, Homo sapien
gaaagggagaagcgcacgaaagacagaaaagca

SEQ ID NO: 5240 - DNA, 33 bp, Homo sapien
gaaagggagaagcgcatgaaagacagaaaagca

SEQ ID NO: 5241 - DNA, 33 bp, Homo sapien
cctctgcgtaacaaccacctgcaggataacaga

SEQ ID NO: 5242 - DNA, 33 bp, Homo sapien
cctctgcgtaacaaccgcctgcaggataacaga

SEQ ID NO: 5243 - DNA, 33 bp, Homo sapien; identical to SEQ ID NO: 5241

SEQ ID NO: 5244 - DNA, 33 bp, Homo sapien; identical to SEQ ID NO: 5242

SEQ ID NO: 5245 - DNA, 33 bp, Homo sapien
ataaaagcaatcacatgaattattcagtaatta

SEQ ID NO: 5246 - DNA, 33 bp, Homo sapien
ataaaagcaatcacattaattattcagtaatta

SEQ ID NO: 5247 - DNA, 33 bp, Homo sapien
ctgaagaggagggataacaaatcatgtatttgg

SEQ ID NO: 5248 - DNA, 33 bp, Homo sapien
ctgaagaggagggatagcaaatcatgtatttgg

SEQ ID NO: 5249 - DNA, 33 bp, Homo sapien
actaatctaccttctccatatattgatgtactt

SEQ ID NO: 5250 - DNA, 33 bp, Homo sapien
actaatctaccttctctatatattgatgtactt

SEQ ID NO: 5251 - DNA, 33 bp, Homo sapien
catgtttcaaaagtgacggagaatatggaattc

SEQ ID NO: 5252 - DNA, 33 bp, Homo sapien
catgtttcaaaagtgatggagaatatggaattc

SEQ ID NO: 5253 - DNA, 33 bp, Homo sapien
cacacatacggtaaaaataattagagaggacct

SEQ ID NO: 5254 - DNA, 33 bp, Homo sapien
cacacatacggtaaaagtaattagagaggacct

SEQ ID NO: 5255 - DNA, 33 bp, Homo sapien
atgcgatcatatttaaatctgtcaactatcctg

SEQ ID NO: 5256 - DNA, 33 bp, Homo sapien
atgcgatcatatttaagtctgtcaactatcctg

SEQ ID NO: 5257 - DNA, 33 bp, Homo sapien; identical to SEQ ID NO: 5255

SEQ ID NO: 5258 - DNA, 33 bp, Homo sapien; identical to SEQ ID NO: 5256

SEQ ID NO: 5259 - DNA, 33 bp, Homo sapien
tataaagacacagtaactaaaagagtataacag

SEQ ID NO: 5260 - DNA, 33 bp, Homo sapien
tataaagacacagtaattaaaagagtataacag

SEQ ID NO: 5261 - DNA, 33 bp, Homo sapien
aaacttgcgtgttacaaattgtatcatcttaaa

SEQ ID NO: 5262 - DNA, 33 bp, Homo sapien
aaacttgcgtgttacatattgtatcatcttaaa

SEQ ID NO: 5263 - DNA, 33 bp, Homo sapien
tgcaaagtcttgggacggcttagaaacttaaga

SEQ ID NO: 5264 - DNA, 33 bp, Homo sapien
tgcaaagtcttgggactgcttagaaacttaaga

SEQ ID NO: 5265 - DNA, 33 bp, Homo sapien
acccagagtaggagaacagagaggaagaggagt

SEQ ID NO: 5266 - DNA, 33 bp, Homo sapien
acccagagtaggagaagagagaggaagaggagt

SEQ ID NO: 5267 - DNA, 33 bp, Homo sapien
tgagtggtggttatcacgcttctccatcagggg

SEQ ID NO: 5268 - DNA, 33 bp, Homo sapien
tgagtggtggttatcatgcttctccatcagggg

SEQ ID NO: 5269 - DNA, 33 bp, Homo sapien
gcccagtgtttatcataaacagcttagcctcct

SEQ ID NO: 5270 - DNA, 33 bp, Homo sapien
gcccagtgtttatcatgaacagcttagcctcct

SEQ ID NO: 5271 - DNA, 33 bp, Homo sapien
gggacaaggtgctccacgagaaggacctgtccc

SEQ ID NO: 5272 - DNA, 33 bp, Homo sapien
gggacaaggtgctccatgagaaggacctgtccc

SEQ ID NO: 5273 - DNA, 33 bp, Homo sapien
agagtctaggactaggcacagccttttttctgg

SEQ ID NO: 5274 - DNA, 33 bp, Homo sapien
agagtctaggactaggtacagccttttttctgg

SEQ ID NO: 5275 - DNA, 33 bp, Homo sapien
tctcaggccgactgcccacagatatgtgcagtc

SEQ ID NO: 5276 - DNA, 33 bp, Homo sapien
tctcaggccgactgccgacagatatgtgcagtc

SEQ ID NO: 5277 - DNA, 33 bp, Homo sapien
agtctgccttccgtacgctgcttcttcctgtct

SEQ ID NO: 5278 - DNA, 33 bp, Homo sapien
agtctgccttccgtactctgcttcttcctgtct

SEQ ID NO: 5279 - DNA, 33 bp, Homo sapien
cgaagctagaagtctgaaggcatacggcgagct

SEQ ID NO: 5280 - DNA, 33 bp, Homo sapien
cgaagctagaagtctgcaggcatacggcgagct

SEQ ID NO: 5281 - DNA, 33 bp, Homo sapien; identical to SEQ ID NO: 5279

SEQ ID NO: 5282 - DNA, 33 bp, Homo sapien; identical to SEQ ID NO: 5280

SEQ ID NO: 5283 - DNA, 33 bp, Homo sapien
gcaccaagtctttcaacgtgatgttcccgatgg

SEQ ID NO: 5284 - DNA, 33 bp, Homo sapien
gcaccaagtctttcaatgtgatgttcccgatgg

SEQ ID NO: 5285 - DNA, 33 bp, Homo sapien
acccagccactcagggcagagatcatgcttagt

SEQ ID NO: 5286 - DNA, 33 bp, Homo sapien
acccagccactcagggtagagatcatgcttagt

SEQ ID NO: 5287 - DNA, 33 bp, Homo sapien
tgccctctagacacaccaaagcctccagtgctt

SEQ ID NO: 5288 - DNA, 33 bp, Homo sapien
tgccctctagacacacgaaagcctccagtgctt

SEQ ID NO: 5289 - DNA, 33 bp, Homo sapien
ttcaaagctagtcaaaaatcccgggttttgttg

SEQ ID NO: 5290 - DNA, 33 bp, Homo sapien
ttcaaagctagtcaaacatcccgggttttgttg

SEQ ID NO: 5291 - DNA, 33 bp, Homo sapien
agactaacgagggtcacccatcagagtaaccca

SEQ ID NO: 5292 - DNA, 33 bp, Homo sapien
agactaacgagggtcatccatcagagtaaccca

SEQ ID NO: 5293 - DNA, 33 bp, Homo sapien
cctgtctgtccaatatgaatcttactacgtccc

SEQ ID NO: 5294 - DNA, 33 bp, Homo sapien
cctgtctgtccaatattaatcttactacgtccc

SEQ ID NO: 5295 - DNA, 33 bp, Homo sapien
agattattgactctacaagttccagatgcagat

SEQ ID NO: 5296 - DNA, 33 bp, Homo sapien
agattattgactctacgagttccagatgcagat

SEQ ID NO: 5297 - DNA, 33 bp, Homo sapien
tgtgaactttaagaacaggcaattgtaacctgt

SEQ ID NO: 5298 - DNA, 33 bp, Homo sapien
tgtgaactttaagaaccggcaattgtaacctgt

SEQ ID NO: 5299 - DNA, 33 bp, Homo sapien
cgtgtggggtaggccaatccctggtctgaactt

SEQ ID NO: 5300 - DNA, 33 bp, Homo sapien
cgtgtggggtaggccagtccctggtctgaactt

SEQ ID NO: 5301 - DNA, 33 bp, Homo sapien
agggtttagaagaatgacatacattgcagagtt

SEQ ID NO: 5302 - DNA, 33 bp, Homo sapien
agggtttagaagaatggcatacattgcagagtt

SEQ ID NO: 5303 - DNA, 33 bp, Homo sapien
tggatcagtcataaatgagtggcttgggacttc

SEQ ID NO: 5304 - DNA, 33 bp, Homo sapien
tggatcagtcataaattagtggcttgggacttc

SEQ ID NO: 5305 - DNA, 33 bp, Homo sapien
gctcccgtgaaagacacatttgcagaatggact

SEQ ID NO: 5306 - DNA, 33 bp, Homo sapien
gctcccgtgaaagacatatttgcagaatggact

SEQ ID NO: 5307 - DNA, 33 bp, Homo sapien
tcacgaggcaagaataactggtgaccttgcagc

SEQ ID NO: 5308 - DNA, 33 bp, Homo sapien
tcacgaggcaagaatagctggtgaccttgcagc

SEQ ID NO: 5309 - DNA, 33 bp, Homo sapien
gtgggagaagcgtcaaaaagcatcaggagtatc

SEQ ID NO: 5310 - DNA, 33 bp, Homo sapien
gtgggagaagcgtcaagaagcatcaggagtatc

SEQ ID NO: 5311 - DNA, 33 bp, Homo sapien
gctggcaatagaactcgctgagatgacagaaat

SEQ ID NO: 5312 - DNA, 33 bp, Homo sapien
gctggcaatagaactctctgagatgacagaaat

SEQ ID NO: 5313 - DNA, 33 bp, Homo sapien
ttatcatggagttaaacgagagaactgaattgc

SEQ ID NO: 5314 - DNA, 33 bp, Homo sapien
ttatcatggagttaaatgagagaactgaattgc

SEQ ID NO: 5315 - DNA, 33 bp, Homo sapien
aaagcataggctggaaagagtcgaggtgcacag

SEQ ID NO: 5316 - DNA, 33 bp, Homo sapien
aaagcataggctggaaggagtcgaggtgcacag

SEQ ID NO: 5317 - DNA, 33 bp, Homo sapien
acataggaggtgctcaatcagtgtccgaaggag

SEQ ID NO: 5318 - DNA, 33 bp, Homo sapien
acataggaggtgctcagtcagtgtccgaaggag

SEQ ID NO: 5319 - DNA, 33 bp, Homo sapien
actgggggcagcccaacggaaggatgccttgaa

SEQ ID NO: 5320 - DNA, 33 bp, Homo sapien
actgggggcagcccaatggaaggatgccttgaa

SEQ ID NO: 5321 - DNA, 33 bp, Homo sapien
acttgaagacgctgaacgaagtgtcaagggaac

SEQ ID NO: 5322 - DNA, 33 bp, Homo sapien
acttgaagacgctgaatgaagtgtcaagggaac

SEQ ID NO: 5323 - DNA, 33 bp, Homo sapien
ctagtggatagcatctaaacactgggtggttcc

SEQ ID NO: 5324 - DNA, 33 bp, Homo sapien
ctagtggatagcatcttaacactgggtggttcc

SEQ ID NO: 5325 - DNA, 33 bp, Homo sapien
atgctgcacctctcacactcctaagcactttgc

SEQ ID NO: 5326 - DNA, 33 bp, Homo sapien
atgctgcacctctcacgctcctaagcactttgc

SEQ ID NO: 5327 - DNA, 33 bp, Homo sapien
acttcccagggggaccactgtttacatactggg

SEQ ID NO: 5328 - DNA, 33 bp, Homo sapien
acttcccagggggaccgctgtttacatactggg

SEQ ID NO: 5329 - DNA, 33 bp, Homo sapien
tggctgtctagacacacagtaaagtggggtttc

SEQ ID NO: 5330 - DNA, 33 bp, Homo sapien
tggctgtctagacacatagtaaagtggggtttc

SEQ ID NO: 5331 - DNA, 33 bp, Homo sapien
cataatgcctgagacaaatgcttgttgaatcag

SEQ ID NO: 5332 - DNA, 33 bp, Homo sapien
cataatgcctgagacagatgcttgttgaatcag

SEQ ID NO: 5333 - DNA, 33 bp, Homo sapien
gggagttaaggatgcacaggaacccatgagcag

SEQ ID NO: 5334 - DNA, 33 bp, Homo sapien
gggagttaaggatgcagaggaacccatgagcag

SEQ ID NO: 5335 - DNA, 33 bp, Homo sapien
agtggtatttatgtaaagttcaacctccctaca

SEQ ID NO: 5336 - DNA, 33 bp, Homo sapien
agtggtatttatgtaacgttcaacctccctaca

SEQ ID NO: 5337 - DNA, 33 bp, Homo sapien
aagccagctattgaagaagagttcttgatttga

SEQ ID NO: 5338 - DNA, 33 bp, Homo sapien
aagccagctattgaaggagagttcttgatttga

SEQ ID NO: 5339 - DNA, 33 bp, Homo sapien
ctttcccaacagtatcactctttatattcatcg

SEQ ID NO: 5340 - DNA, 33 bp, Homo sapien
ctttcccaacagtatcgctctttatattcatcg

SEQ ID NO: 5341 - DNA, 33 bp, Homo sapien
cttgaaccacttgctcaatcccactcctactct

SEQ ID NO: 5342 - DNA, 33 bp, Homo sapien
cttgaaccacttgctcgatcccactcctactct

SEQ ID NO: 5343 - DNA, 33 bp, Homo sapien
tactccgtaagccctaacaatcactaatctgtt

SEQ ID NO: 5344 - DNA, 33 bp, Homo sapien
tactccgtaagccctagcaatcactaatctgtt

SEQ ID NO: 5345 - DNA, 33 bp, Homo sapien
aaatgaccgaatttgaaaagtagagaacagatt

SEQ ID NO: 5346 - DNA, 33 bp, Homo sapien
aaatgaccgaatttgagaagtagagaacagatt

SEQ ID NO: 5347 - DNA, 33 bp, Homo sapien
aagccaattccaaaagactacataccagatgat

SEQ ID NO: 5348 - DNA, 33 bp, Homo sapien
aagccaattccaaaaggctacataccagatgat

SEQ ID NO: 5349 - DNA, 33 bp, Homo sapien
agcatagcccagaaaaaaatttttgctctacaa

SEQ ID NO: 5350 - DNA, 33 bp, Homo sapien
agcatagcccagaaaataatttttgctctacaa

SEQ ID NO: 5351 - DNA, 33 bp, Homo sapien
agaagaggggcttggaactctctcgttagtggg

SEQ ID NO: 5352 - DNA, 33 bp, Homo sapien
agaagaggggcttggagctctctcgttagtggg

SEQ ID NO: 5353 - DNA, 33 bp, Homo sapien
tttccactctcacagccgatgtggatgctactg

SEQ ID NO: 5354 - DNA, 33 bp, Homo sapien
tttccactctcacagctgatgtggatgctactg

SEQ ID NO: 5355 - DNA, 33 bp, Homo sapien
ccagtcctgggtcagcaccagtgaaagtcaagg

SEQ ID NO: 5356 - DNA, 33 bp, Homo sapien
ccagtcctgggtcagcgccagtgaaagtcaagg

SEQ ID NO: 5357 - DNA, 33 bp, Homo sapien
ggggcctcttgggtcaaccaaactggctgagat

SEQ ID NO: 5358 - DNA, 33 bp, Homo sapien
ggggcctcttgggtcacccaaactggctgagat

SEQ ID NO: 5359 - DNA, 33 bp, Homo sapien
atggctgtgtctctgacagaaaacagtgctcaa

SEQ ID NO: 5360 - DNA, 33 bp, Homo sapien
atggctgtgtctctgatagaaaacagtgctcaa

SEQ ID NO: 5361 - DNA, 33 bp, Homo sapien
cctgtgcatgagacatgatctaatccctcaagg

SEQ ID NO: 5362 - DNA, 33 bp, Homo sapien
cctgtgcatgagacattatctaatccctcaagg

SEQ ID NO: 5363 - DNA, 33 bp, Homo sapien
agcccacccactgagcacctgctcttgactaca

SEQ ID NO: 5364 - DNA, 33 bp, Homo sapien
agcccacccactgagcgcctgctcttgactaca

SEQ ID NO: 5365 - DNA, 33 bp, Homo sapien
gaattagatgagatgacgaatgcaaagcattag

SEQ ID NO: 5366 - DNA, 33 bp, Homo sapien
gaattagatgagatgatgaatgcaaagcattag

SEQ ID NO: 5367 - DNA, 33 bp, Homo sapien
ttgattaaaaggacacaacatcacccagagcaa

SEQ ID NO: 5368 - DNA, 33 bp, Homo sapien
ttgattaaaaggacacgacatcacccagagcaa

SEQ ID NO: 5369 - DNA, 33 bp, Homo sapien
ttgtgacaagttctgccgcaaccagaagaggga

SEQ ID NO: 5370 - DNA, 33 bp, Homo sapien
ttgtgacaagttctgctgcaaccagaagaggga

SEQ ID NO: 5371 - DNA, 33 bp, Homo sapien
ataaatcacttgttcccgaatgctcatctcagg

SEQ ID NO: 5372 - DNA, 33 bp, Homo sapien
ataaatcacttgttcctgaatgctcatctcagg

SEQ ID NO: 5373 - DNA, 33 bp, Homo sapien
ccaggggcatctttacacattgaactctcaggt

SEQ ID NO: 5374 - DNA, 33 bp, Homo sapien
ccaggggcatctttacgcattgaactctcaggt

SEQ ID NO: 5375 - DNA, 33 bp, Homo sapien
tgtcacggttccagtccaggcagcgctgggtag

SEQ ID NO: 5376 - DNA, 33 bp, Homo sapien
tgtcacggttccagtctaggcagcgctgggtag

SEQ ID NO: 5377 - DNA, 33 bp, Homo sapien
attttcttatgggtacaacttcataccctggaa

SEQ ID NO: 5378 - DNA, 33 bp, Homo sapien
attttcttatgggtacgacttcataccctggaa

SEQ ID NO: 5379 - DNA, 33 bp, Homo sapien
acagctcaagtgttcaatagtcacataaggcta

SEQ ID NO: 5380 - DNA, 33 bp, Homo sapien
acagctcaagtgttcagtagtcacataaggcta

SEQ ID NO: 5381 - DNA, 33 bp, Homo sapien
gagtgaatggggtagcagcaaaccaatatatta

SEQ ID NO: 5382 - DNA, 33 bp, Homo sapien
gagtgaatggggtagcggcaaaccaatatatta

SEQ ID NO: 5383 - DNA, 33 bp, Homo sapien
caacgatagaaagaataacagggagtcaggtca

SEQ ID NO: 5384 - DNA, 33 bp, Homo sapien
caacgatagaaagaatgacagggagtcaggtca

SEQ ID NO: 5385 - DNA, 33 bp, Homo sapien
attctttctatcgttgcaagtccctccatttca

SEQ ID NO: 5386 - DNA, 33 bp, Homo sapien
attctttctatcgttgtaagtccctccatttca

SEQ ID NO: 5387 - DNA, 33 bp, Homo sapien
atgtggctcggaggaaactggcggccaaatcct

SEQ ID NO: 5388 - DNA, 33 bp, Homo sapien
atgtggctcggaggaacctggcggccaaatcct

SEQ ID NO: 5389 - DNA, 33 bp, Homo sapien
cgctagagtaaggaagacataaagaagcagagt

SEQ ID NO: 5390 - DNA, 33 bp, Homo sapien
cgctagagtaaggaaggcataaagaagcagagt

SEQ ID NO: 5391 - DNA, 33 bp, Homo sapien
acaacctagtgtgtgaagttagaaccgaaacca

SEQ ID NO: 5392 - DNA, 33 bp, Homo sapien
acaacctagtgtgtgaggttagaaccgaaacca

SEQ ID NO: 5393 - DNA, 33 bp, Homo sapien
atccagtttctccccaaagcaagagcaaggctg

SEQ ID NO: 5394 - DNA, 33 bp, Homo sapien
atccagtttctccccagagcaagagcaaggctg

SEQ ID NO: 5395 - DNA, 33 bp, Homo sapien
gcgtggagtgtgtcagaaaacattgcccacagg

SEQ ID NO: 5396 - DNA, 33 bp, Homo sapien
gcgtggagtgtgtcaggaaacattgcccacagg

SEQ ID NO: 5397 - DNA, 33 bp, Homo sapien
tcctatcagccgttcacgagagagcttgcttat

SEQ ID NO: 5398 - DNA, 33 bp, Homo sapien
tcctatcagccgttcatgagagagcttgcttat

SEQ ID NO: 5399 - DNA, 33 bp, Homo sapien
tggctgggcggaaagacaggttcctccagggct

SEQ ID NO: 5400 - DNA, 33 bp, Homo sapien
tggctgggcggaaagataggttcctccagggct

SEQ ID NO: 5401 - DNA, 33 bp, Homo sapien
agctgaggctccagcaacagatagatctcttca

SEQ ID NO: 5402 - DNA, 33 bp, Homo sapien
agctgaggctccagcagcagatagatctcttca

SEQ ID NO: 5403 - DNA, 33 bp, Homo sapien
cagctcaggagactaaagcccaagacaggctcc

SEQ ID NO: 5404 - DNA, 33 bp, Homo sapien
cagctcaggagactaaggcccaagacaggctcc

SEQ ID NO: 5405 - DNA, 33 bp, Homo sapien
tgaagtcatcttatgcaaccccctgcctcaaca

SEQ ID NO: 5406 - DNA, 33 bp, Homo sapien
tgaagtcatcttatgcgaccccctgcctcaaca

SEQ ID NO: 5407 - DNA, 33 bp, Homo sapien
gctacgaggtccacacagtgtctgctgacggtc

SEQ ID NO: 5408 - DNA, 33 bp, Homo sapien
gctacgaggtccacacggtgtctgctgacggtc

SEQ ID NO: 5409 - DNA, 33 bp, Homo sapien
ccctcttggtctgagggcacctgtgagtctaga

SEQ ID NO: 5410 - DNA, 33 bp, Homo sapien
ccctcttggtctgaggtcacctgtgagtctaga

SEQ ID NO: 5411 - DNA, 33 bp, Homo sapien
caggctgcccccacacaaagagttatttggctc

SEQ ID NO: 5412 - DNA, 33 bp, Homo sapien
caggctgcccccacacgaagagttatttggctc

SEQ ID NO: 5413 - DNA, 33 bp, Homo sapien
ttgagttggagacggacgaggtcgagtagggat

SEQ ID NO: 5414 - DNA, 33 bp, Homo sapien
ttgagttggagacggatgaggtcgagtagggat

SEQ ID NO: 5415 - DNA, 33 bp, Homo sapien
ctgctttaatggactcaccacaaggagtcccaa

SEQ ID NO: 5416 - DNA, 33 bp, Homo sapien
ctgctttaatggactcgccacaaggagtcccaa

SEQ ID NO: 5417 - DNA, 33 bp, Homo sapien
acaaaaaacagaataaaagacagtcattcaatt

SEQ ID NO: 5418 - DNA, 33 bp, Homo sapien
acaaaaaacagaataagagacagtcattcaatt

SEQ ID NO: 5419 - DNA, 33 bp, Homo sapien
ctccccaagatacaaccaactcccgagccagcc

SEQ ID NO: 5420 - DNA, 33 bp, Homo sapien
ctccccaagatacaactaactcccgagccagcc

SEQ ID NO: 5421 - DNA, 33 bp, Homo sapien
tgcagctctagacacacagtaggcctgcaataa

SEQ ID NO: 5422 - DNA, 33 bp, Homo sapien
tgcagctctagacacagagtaggcctgcaataa

SEQ ID NO: 5423 - DNA, 33 bp, Homo sapien
taaagttcataattacagaacccagaaaggaga

SEQ ID NO: 5424 - DNA, 33 bp, Homo sapien
taaagttcataattacggaacccagaaaggaga

SEQ ID NO: 5425 - DNA, 33 bp, Homo sapien
tctgaattcttaacaaccttcctagtgcctctg

SEQ ID NO: 5426 - DNA, 33 bp, Homo sapien
tctgaattcttaacaagcttcctagtgcctctg

SEQ ID NO: 5427 - DNA, 33 bp, Homo sapien
atccaatccctaccttcaaggagtgaactgcca

SEQ ID NO: 5428 - DNA, 33 bp, Homo sapien
atccaatccctaccttgaaggagtgaactgcca

SEQ ID NO: 5429 - DNA, 33 bp, Homo sapien
atcagtggaggcaaacaatgacgtctgccttca

SEQ ID NO: 5430 - DNA, 33 bp, Homo sapien
atcagtggaggcaaaccatgacgtctgccttca

SEQ ID NO: 5431 - DNA, 33 bp, Homo sapien
aaacaaggaggaggcaagcctgaaacataagta

SEQ ID NO: 5432 - DNA, 33 bp, Homo sapien
aaacaaggaggaggcacgcctgaaacataagta

SEQ ID NO: 5433 - DNA, 33 bp, Homo sapien
tcattttttaagcttgacaagaattgagcaaag

SEQ ID NO: 5434 - DNA, 33 bp, Homo sapien
tcattttttaagcttgtcaagaattgagcaaag

SEQ ID NO: 5435 - DNA, 33 bp, Homo sapien
aaagctcttaacccctcaatgggctcaatgact

SEQ ID NO: 5436 - DNA, 33 bp, Homo sapien
aaagctcttaaccccttaatgggctcaatgact

SEQ ID NO: 5437 - DNA, 33 bp, Homo sapien
ctgagactgaggctctaagacttgaagggattt

SEQ ID NO: 5438 - DNA, 33 bp, Homo sapien
ctgagactgaggctctgagacttgaagggattt

SEQ ID NO: 5439 - DNA, 33 bp, Homo sapien
ggaagtatttacagaaagactgtttgggcaaga

SEQ ID NO: 5440 - DNA, 33 bp, Homo sapien
ggaagtatttacagaatgactgtttgggcaaga

SEQ ID NO: 5441 - DNA, 33 bp, Homo sapien
cctagtgtagtaagataatatttggggaatcta

SEQ ID NO: 5442 - DNA, 33 bp, Homo sapien
cctagtgtagtaagatgatatttggggaatcta

SEQ ID NO: 5443 - DNA, 33 bp, Homo sapien
tttcaggaccaagctcacagcctctagttttca

SEQ ID NO: 5444 - DNA, 33 bp, Homo sapien
tttcaggaccaagctcgcagcctctagttttca

SEQ ID NO: 5445 - DNA, 33 bp, Homo sapien
ggaacctgtgaacgtgacaagaggacctttgca

SEQ ID NO: 5446 - DNA, 33 bp, Homo sapien
ggaacctgtgaacgtggcaagaggacctttgca

SEQ ID NO: 5447 - DNA, 33 bp, Homo sapien
tatgtttttagattcaaatgtggtagaacagaa

SEQ ID NO: 5448 - DNA, 33 bp, Homo sapien
tatgtttttagattcatatgtggtagaacagaa

SEQ ID NO: 5449 - DNA, 33 bp, Homo sapien
catggctttgtggttgaactttccctgccagta

SEQ ID NO: 5450 - DNA, 33 bp, Homo sapien
catggctttgtggttgcactttccctgccagta

SEQ ID NO: 5451 - DNA, 33 bp, Homo sapien
cagctagagaatggtgaaacaaggtctagatcc

SEQ ID NO: 5452 - DNA, 33 bp, Homo sapien
cagctagagaatggtggaacaaggtctagatcc

SEQ ID NO: 5453 - DNA, 33 bp, Homo sapien
ctagctgggtcactaaggccaaatcacccctcc

SEQ ID NO: 5454 - DNA, 33 bp, Homo sapien
ctagctgggtcactaatgccaaatcacccctcc

SEQ ID NO: 5455 - DNA, 33 bp, Homo sapien
acaactgaaagttgcacgtatcacttcctctca

SEQ ID NO: 5456 - DNA, 33 bp, Homo sapien
acaactgaaagttgcatgtatcacttcctctca

SEQ ID NO: 5457 - DNA, 33 bp, Homo sapien
ggcatggggaactgcgacgagcatcttcctaat

SEQ ID NO: 5458 - DNA, 33 bp, Homo sapien
ggcatggggaactgcggcgagcatcttcctaat

SEQ ID NO: 5459 - DNA, 33 bp, Homo sapien
acggccgacaacatcaaggtctggacggccgca

SEQ ID NO: 5460 - DNA, 33 bp, Homo sapien
acggccgacaacatcagggtctggacggccgca

SEQ ID NO: 5461 - DNA, 33 bp, Homo sapien
aaaatttattgaactgaaagaactggacaaatt

SEQ ID NO: 5462 - DNA, 33 bp, Homo sapien
aaaatttattgaactgcaagaactggacaaatt

SEQ ID NO: 5463 - DNA, 33 bp, Homo sapien
caaccaacctaatgccacacacataaaagcccc

SEQ ID NO: 5464 - DNA, 33 bp, Homo sapien
caaccaacctaatgccgcacacataaaagcccc

SEQ ID NO: 5465 - DNA, 33 bp, Homo sapien
aaagtaattacatttacaggaggcagcattgac

SEQ ID NO: 5466 - DNA, 33 bp, Homo sapien
aaagtaattacatttagaggaggcagcattgac

SEQ ID NO: 5467 - DNA, 33 bp, Homo sapien
tcataccactagtaaagctcctttctgctattt

SEQ ID NO: 5468 - DNA, 33 bp, Homo sapien
tcataccactagtaaatctcctttctgctattt

SEQ ID NO: 5469 - DNA, 33 bp, Homo sapien
gactctcttcctctccaagccacgctttcctca

SEQ ID NO: 5470 - DNA, 33 bp, Homo sapien
gactctcttcctctccgagccacgctttcctca

SEQ ID NO: 5471 - DNA, 33 bp, Homo sapien
gagaaaaggagggaggaccagcacgctgactca

SEQ ID NO: 5472 - DNA, 33 bp, Homo sapien
gagaaaaggagggagggccagcacgctgactca

SEQ ID NO: 5473 - DNA, 33 bp, Homo sapien
gacctcaactctagccccgggttggctgacatt

SEQ ID NO: 5474 - DNA, 33 bp, Homo sapien
gacctcaactctagccgcgggttggctgacatt

SEQ ID NO: 5475 - DNA, 33 bp, Homo sapien
tgcttgtggcaaggaacgcagtaagcctggggt

SEQ ID NO: 5476 - DNA, 33 bp, Homo sapien
tgcttgtggcaaggaatgcagtaagcctggggt

SEQ ID NO: 5477 - DNA, 33 bp, Homo sapien
gggtggcaggtatcaaacaagcctggaatgcca

SEQ ID NO: 5478 - DNA, 33 bp, Homo sapien
gggtggcaggtatcaatcaagcctggaatgcca

SEQ ID NO: 5479 - DNA, 33 bp, Homo sapien
ccaggctaatcaggtcacagggtgaaatttaaa

SEQ ID NO: 5480 - DNA, 33 bp, Homo sapien
ccaggctaatcaggtcgcagggtgaaatttaaa

SEQ ID NO: 5481 - DNA, 33 bp, Homo sapien
ccaacacccaggtgaaagttcctgaagggctct

SEQ ID NO: 5482 - DNA, 33 bp, Homo sapien
ccaacacccaggtgaaggttcctgaagggctct

SEQ ID NO: 5483 - DNA, 33 bp, Homo sapien
caaaagttgacatctccaagtcacagcccccta

SEQ ID NO: 5484 - DNA, 33 bp, Homo sapien
caaaagttgacatctctaagtcacagcccccta

SEQ ID NO: 5485 - DNA, 33 bp, Homo sapien
cgtcaccccacaggaactatctggaagctgtcc

SEQ ID NO: 5486 - DNA, 33 bp, Homo sapien
cgtcaccccacaggaagtatctggaagctgtcc

SEQ ID NO: 5487 - DNA, 33 bp, Homo sapien
ccagatggttgtgccacagtgaattcctgcatc

SEQ ID NO: 5488 - DNA, 33 bp, Homo sapien
ccagatggttgtgccatagtgaattcctgcatc

SEQ ID NO: 5489 - DNA, 33 bp, Homo sapien
taagaggatcctggtacgtagcgacaggtagag

SEQ ID NO: 5490 - DNA, 33 bp, Homo sapien
taagaggatcctggtatgtagcgacaggtagag

SEQ ID NO: 5491 - DNA, 33 bp, Homo sapien
tgcctggaactcaataagtaacggtgggtgctg

SEQ ID NO: 5492 - DNA, 33 bp, Homo sapien
tgcctggaactcaatacgtaacggtgggtgctg

SEQ ID NO: 5493 - DNA, 33 bp, Homo sapien
gtggaatcctggaatcaaagactcggcaaccta

SEQ ID NO: 5494 - DNA, 33 bp, Homo sapien
gtggaatcctggaatctaagactcggcaaccta

SEQ ID NO: 5495 - DNA, 33 bp, Homo sapien
gaatcttaggagaaaactcacacgcttgtggcc

SEQ ID NO: 5496 - DNA, 33 bp, Homo sapien
gaatcttaggagaaaagtcacacgcttgtggcc

SEQ ID NO: 5497 - DNA, 33 bp, Homo sapien
cacgcttgtggcctgcaatcttttggcctacct

SEQ ID NO: 5498 - DNA, 33 bp, Homo sapien
cacgcttgtggcctgcgatcttttggcctacct

SEQ ID NO: 5499 - DNA, 33 bp, Homo sapien
taatgggagaagtcaacgagtctattcctctgt

SEQ ID NO: 5500 - DNA, 33 bp, Homo sapien
taatgggagaagtcaatgagtctattcctctgt

SEQ ID NO: 5501 - DNA, 33 bp, Homo sapien
agcaggttggaactaactggaaaaatgtattga

SEQ ID NO: 5502 - DNA, 33 bp, Homo sapien
agcaggttggaactaattggaaaaatgtattga

SEQ ID NO: 5503 - DNA, 33 bp, Homo sapien
gatttcttccttcaagacccaattcagggctgg

SEQ ID NO: 5504 - DNA, 33 bp, Homo sapien
gatttcttccttcaaggcccaattcagggctgg

SEQ ID NO: 5505 - DNA, 33 bp, Homo sapien
gcagctaatcactggccctggcggagataatag

SEQ ID NO: 5506 - DNA, 33 bp, Homo sapien
gcagctaatcactggctctggcggagataatag

SEQ ID NO: 5507 - DNA, 33 bp, Homo sapien
actgtgtgacttgagcaaatggcttgccctctc

SEQ ID NO: 5508 - DNA, 33 bp, Homo sapien
actgtgtgacttgagcgaatggcttgccctctc

SEQ ID NO: 5509 - DNA, 33 bp, Homo sapien
atgcaggatgtctgggaaacagtctctggaccg

SEQ ID NO: 5510 - DNA, 33 bp, Homo sapien
atgcaggatgtctggggaacagtctctggaccg

SEQ ID NO: 5511 - DNA, 33 bp, Homo sapien
actcagccatgagtcaaatgtaaatttctcttt

SEQ ID NO: 5512 - DNA, 33 bp, Homo sapien
actcagccatgagtcagatgtaaatttctcttt

SEQ ID NO: 5513 - DNA, 33 bp, Homo sapien
ggtcatctccaattcacggaaaggcaagaagat

SEQ ID NO: 5514 - DNA, 33 bp, Homo sapien
ggtcatctccaattcatggaaaggcaagaagat

SEQ ID NO: 5515 - DNA, 33 bp, Homo sapien
tccatgttgggagagacgtagatgtccacgcca

SEQ ID NO: 5516 - DNA, 33 bp, Homo sapien
tccatgttgggagagatgtagatgtccacgcca

SEQ ID NO: 5517 - DNA, 33 bp, Homo sapien
acctatagaggtagagaccttttcccattttgc

SEQ ID NO: 5518 - DNA, 33 bp, Homo sapien
acctatagaggtagaggccttttcccattttgc

SEQ ID NO: 5519 - DNA, 33 bp, Homo sapien
gagtagcccaagaaataaaacactaccagaacc

SEQ ID NO: 5520 - DNA, 33 bp, Homo sapien
gagtagcccaagaaatgaaacactaccagaacc

SEQ ID NO: 5521 - DNA, 33 bp, Homo sapien
agtgtctagggctaaacgttaagaaggtgggat

SEQ ID NO: 5522 - DNA, 33 bp, Homo sapien
agtgtctagggctaaatgttaagaaggtgggat

SEQ ID NO: 5523 - DNA, 33 bp, Homo sapien
gcattgttataaaatcaaaacactgcaaaccac

SEQ ID NO: 5524 - DNA, 33 bp, Homo sapien
gcattgttataaaatcgaaacactgcaaaccac

SEQ ID NO: 5525 - DNA, 33 bp, Homo sapien
ttgtttaaagagcagacaaaagagtaccattaa

SEQ ID NO: 5526 - DNA, 33 bp, Homo sapien
ttgtttaaagagcagagaaaagagtaccattaa

SEQ ID NO: 5527 - DNA, 33 bp, Homo sapien
aagtgtccatgcctcaactgcaacccatgtggt

SEQ ID NO: 5528 - DNA, 33 bp, Homo sapien
aagtgtccatgcctcacctgcaacccatgtggt

SEQ ID NO: 5529 - DNA, 33 bp, Homo sapien
gcaactttgagaggcaatctgtttccagggctt

SEQ ID NO: 5530 - DNA, 33 bp, Homo sapien
gcaactttgagaggcattctgtttccagggctt

SEQ ID NO: 5531 - DNA, 33 bp, Homo sapien
ttctctgcaagacctacgaatcagtgtaaatcc

SEQ ID NO: 5532 - DNA, 33 bp, Homo sapien
ttctctgcaagacctatgaatcagtgtaaatcc

SEQ ID NO: 5533 - DNA, 33 bp, Homo sapien
gaagcaagagctaggccatctgctgtaagaaca

SEQ ID NO: 5534 - DNA, 33 bp, Homo sapien
gaagcaagagctaggctatctgctgtaagaaca

SEQ ID NO: 5535 - DNA, 33 bp, Homo sapien
ttcctgctgaaaggcagaatcaccagcccagct

SEQ ID NO: 5536 - DNA, 33 bp, Homo sapien
ttcctgctgaaaggcataatcaccagcccagct

SEQ ID NO: 5537 - DNA, 33 bp, Homo sapien
tgtggttatttgcagggatgttgtagattcatc

SEQ ID NO: 5538 - DNA, 33 bp, Homo sapien
tgtggttatttgcaggtatgttgtagattcatc

SEQ ID NO: 5539 - DNA, 33 bp, Homo sapien
caaacaaaaaacaaacacaagatatccaaccca

SEQ ID NO: 5540 - DNA, 33 bp, Homo sapien
caaacaaaaaacaaacgcaagatatccaaccca

SEQ ID NO: 5541 - DNA, 33 bp, Homo sapien
atccaacccacgaaacactctatgttcacgcca

SEQ ID NO: 5542 - DNA, 33 bp, Homo sapien
atccaacccacgaaacgctctatgttcacgcca

SEQ ID NO: 5543 - DNA, 33 bp, Homo sapien
gaactttgaatctctaaaagaggatacaggata

SEQ ID NO: 5544 - DNA, 33 bp, Homo sapien
gaactttgaatctctagaagaggatacaggata

SEQ ID NO: 5545 - DNA, 33 bp, Homo sapien
cctccatcctaaactacgccttcagaaattgcc

SEQ ID NO: 5546 - DNA, 33 bp, Homo sapien
cctccatcctaaactatgccttcagaaattgcc

SEQ ID NO: 5547 - DNA, 33 bp, Homo sapien
gtcagcagtcctatccacaatgttattcaaggg

SEQ ID NO: 5548 - DNA, 33 bp, Homo sapien
gtcagcagtcctatccgcaatgttattcaaggg

SEQ ID NO: 5549 - DNA, 33 bp, Homo sapien
tgtgctaccactggccactttcatcgtcagggt

SEQ ID NO: 5550 - DNA, 33 bp, Homo sapien
tgtgctaccactggccgctttcatcgtcagggt

SEQ ID NO: 5551 - DNA, 33 bp, Homo sapien
ggacctcattttctgcaaacaacaggaagccaa

SEQ ID NO: 5552 - DNA, 33 bp, Homo sapien
ggacctcattttctgcgaacaacaggaagccaa

SEQ ID NO: 5553 - DNA, 33 bp, Homo sapien
tatgtttagaaggtcacctgggtcagtctcatg

SEQ ID NO: 5554 - DNA, 33 bp, Homo sapien
tatgtttagaaggtcatctgggtcagtctcatg

SEQ ID NO: 5555 - DNA, 33 bp, Homo sapien
catcttcttgttggcaaatctgttttataggtg

SEQ ID NO: 5556 - DNA, 33 bp, Homo sapien
catcttcttgttggcagatctgttttataggtg

SEQ ID NO: 5557 - DNA, 33 bp, Homo sapien
ttgtgttggaagatcaaatgagttaatcattcc

SEQ ID NO: 5558 - DNA, 33 bp, Homo sapien
ttgtgttggaagatcagatgagttaatcattcc

SEQ ID NO: 5559 - DNA, 33 bp, Homo sapien
tgaagtgaggaaacatcatccacctgcgctgga

SEQ ID NO: 5560 - DNA, 33 bp, Homo sapien
tgaagtgaggaaacattatccacctgcgctgga

SEQ ID NO: 5561 - DNA, 33 bp, Homo sapien
tggcatcgggccaggccaactacatgcaacttg

SEQ ID NO: 5562 - DNA, 33 bp, Homo sapien
tggcatcgggccaggctaactacatgcaacttg

SEQ ID NO: 5563 - DNA, 33 bp, Homo sapien
tgtgccccgtgcctggaatcaacctggcaccta

SEQ ID NO: 5564 - DNA, 33 bp, Homo sapien
tgtgccccgtgcctgggatcaacctggcaccta

SEQ ID NO: 5565 - DNA, 33 bp, Homo sapien
agttgcatttattgagaatgagttgtgtgttag

SEQ ID NO: 5566 - DNA, 33 bp, Homo sapien
agttgcatttattgagcatgagttgtgtgttag

SEQ ID NO: 5567 - DNA, 33 bp, Homo sapien
ggctggttcgccccaacgctgctgaaacaggat

SEQ ID NO: 5568 - DNA, 33 bp, Homo sapien
ggctggttcgccccaatgctgctgaaacaggat

SEQ ID NO: 5569 - DNA, 33 bp, Homo sapien
atttgagttggaatacacagatgtgcttagctg

SEQ ID NO: 5570 - DNA, 33 bp, Homo sapien
atttgagttggaatacccagatgtgcttagctg

SEQ ID NO: 5571 - DNA, 33 bp, Homo sapien
tgttgggctgtctagaatcggaagcaggaaggc

SEQ ID NO: 5572 - DNA, 33 bp, Homo sapien
tgttgggctgtctagagtcggaagcaggaaggc

SEQ ID NO: 5573 - DNA, 33 bp, Homo sapien
gtacagggccatgcaaacctgtatagagcaccc

SEQ ID NO: 5574 - DNA, 33 bp, Homo sapien
gtacagggccatgcaagcctgtatagagcaccc

SEQ ID NO: 5575 - DNA, 33 bp, Homo sapien
atgatctcaagccatcaagttttattttctaca

SEQ ID NO: 5576 - DNA, 33 bp, Homo sapien
atgatctcaagccatcgagttttattttctaca

SEQ ID NO: 5577 - DNA, 33 bp, Homo sapien
atttcccatagcgtaacgtgctcaaagcatatt

SEQ ID NO: 5578 - DNA, 33 bp, Homo sapien
atttcccatagcgtaatgtgctcaaagcatatt

SEQ ID NO: 5579 - DNA, 33 bp, Homo sapien
aagtcaccttctaccacattttgctcttgtttt

SEQ ID NO: 5580 - DNA, 33 bp, Homo sapien
aagtcaccttctaccatattttgctcttgtttt

SEQ ID NO: 5581 - DNA, 33 bp, Homo sapien
aaaactcttgccttcaacccagaaaggcgaagc

SEQ ID NO: 5582 - DNA, 33 bp, Homo sapien
aaaactcttgccttcaccccagaaaggcgaagc

SEQ ID NO: 5583 - DNA, 33 bp, Homo sapien
gttacttcttgagactaaagagaaagggaaaaa

SEQ ID NO: 5584 - DNA, 33 bp, Homo sapien
gttacttcttgagactgaagagaaagggaaaaa

SEQ ID NO: 5585 - DNA, 33 bp, Homo sapien
tacaacttcctgagtcccttgccctgatctttt

SEQ ID NO: 5586 - DNA, 33 bp, Homo sapien
tacaacttcctgagtcgcttgccctgatctttt

SEQ ID NO: 5587 - DNA, 33 bp, Homo sapien
accccatcccgctaccaacactgcagaagttac

SEQ ID NO: 5588 - DNA, 33 bp, Homo sapien
accccatcccgctaccgacactgcagaagttac

SEQ ID NO: 5589 - DNA, 33 bp, Homo sapien
ggaggggacggctcccaaatcctcattctcctt

SEQ ID NO: 5590 - DNA, 33 bp, Homo sapien
ggaggggacggctcccgaatcctcattctcctt

SEQ ID NO: 5591 - DNA, 33 bp, Homo sapien
tcctctgagctccaaaaggttctgagaaggaac

SEQ ID NO: 5592 - DNA, 33 bp, Homo sapien
tcctctgagctccaaagggttctgagaaggaac

SEQ ID NO: 5593 - DNA, 33 bp, Homo sapien
gcctgggctgatcaaaccttttgtcctgagttg

SEQ ID NO: 5594 - DNA, 33 bp, Homo sapien
gcctgggctgatcaaatcttttgtcctgagttg

SEQ ID NO: 5595 - DNA, 33 bp, Homo sapien
cagattactaccaccacgttgccctttattgca

SEQ ID NO: 5596 - DNA, 33 bp, Homo sapien
cagattactaccaccatgttgccctttattgca

SEQ ID NO: 5597 - DNA, 33 bp, Homo sapien
agctctcacagccttaaccaaaggtatcagagc

SEQ ID NO: 5598 - DNA, 33 bp, Homo sapien
agctctcacagccttagccaaaggtatcagagc

SEQ ID NO: 5599 - DNA, 33 bp, Homo sapien
gccagctctgaggtgacagtctttgtcatgtgg

SEQ ID NO: 5600 - DNA, 33 bp, Homo sapien
gccagctctgaggtgatagtctttgtcatgtgg

SEQ ID NO: 5601 - DNA, 33 bp, Homo sapien
caaaagatgcgcagcactcaactgacaaagcgg

SEQ ID NO: 5602 - DNA, 33 bp, Homo sapien
caaaagatgcgcagcagtcaactgacaaagcgg

SEQ ID NO: 5603 - DNA, 33 bp, Homo sapien
ctggcttagattgaaaaatgggcttcctaatgg

SEQ ID NO: 5604 - DNA, 33 bp, Homo sapien
ctggcttagattgaaacatgggcttcctaatgg

SEQ ID NO: 5605 - DNA, 33 bp, Homo sapien; identical to SEQ ID NO: 5603

SEQ ID NO: 5606 - DNA, 33 bp, Homo sapien; identical to SEQ ID NO: 5604

SEQ ID NO: 5607 - DNA, 33 bp, Homo sapien
taatacgctgagaataagcgattctgtagctac

SEQ ID NO: 5608 - DNA, 33 bp, Homo sapien
taatacgctgagaatacgcgattctgtagctac

SEQ ID NO: 5609 - DNA, 33 bp, Homo sapien
agccagatgcttagaacacaaatacgagatagg

SEQ ID NO: 5610 - DNA, 33 bp, Homo sapien
agccagatgcttagaatacaaatacgagatagg

SEQ ID NO: 5611 - DNA, 33 bp, Homo sapien
acacagtatgttaggacgaaactaaaaagaaag

SEQ ID NO: 5612 - DNA, 33 bp, Homo sapien
acacagtatgttaggatgaaactaaaaagaaag

SEQ ID NO: 5613 - DNA, 33 bp, Homo sapien
tttgcagggacatcagcagttacagcatttgga

SEQ ID NO: 5614 - DNA, 33 bp, Homo sapien
tttgcagggacatcaggagttacagcatttgga

SEQ ID NO: 5615 - DNA, 33 bp, Homo sapien
ttatttttgagacgaacccttctgtcacccagg

SEQ ID NO: 5616 - DNA, 33 bp, Homo sapien
ttatttttgagacgaagccttctgtcacccagg

SEQ ID NO: 5617 - DNA, 33 bp, Homo sapien
gtgtgtggttgagatcactgactctgatatcag

SEQ ID NO: 5618 - DNA, 33 bp, Homo sapien
gtgtgtggttgagatcgctgactctgatatcag

SEQ ID NO: 5619 - DNA, 33 bp, Homo sapien
ggaccatgaccatttcactataattggccatat

SEQ ID NO: 5620 - DNA, 33 bp, Homo sapien
ggaccatgaccatttcgctataattggccatat

SEQ ID NO: 5621 - DNA, 33 bp, Homo sapien
ggcaaaatagtgagaccgccatctctgaaaaga

SEQ ID NO: 5622 - DNA, 33 bp, Homo sapien
ggcaaaatagtgagactgccatctctgaaaaga

SEQ ID NO: 5623 - DNA, 33 bp, Homo sapien
ataaaatctaagccaacagatatatcacctcat

SEQ ID NO: 5624 - DNA, 33 bp, Homo sapien
ataaaatctaagccaagagatatatcacctcat

SEQ ID NO: 5625 - DNA, 33 bp, Homo sapien
ccatttgctccctttcactgtgggacaaattgc

SEQ ID NO: 5626 - DNA, 33 bp, Homo sapien
ccatttgctccctttcgctgtgggacaaattgc

SEQ ID NO: 5627 - DNA, 33 bp, Homo sapien
ctgcatgaatgcagaacgggaactcttatccgc

SEQ ID NO: 5628 - DNA, 33 bp, Homo sapien
ctgcatgaatgcagaatgggaactcttatccgc

SEQ ID NO: 5629 - DNA, 33 bp, Homo sapien
ccaatcgcagtcctccaggaagggagcacaagt

SEQ ID NO: 5630 - DNA, 33 bp, Homo sapien
ccaatcgcagtcctccgggaagggagcacaagt

SEQ ID NO: 5631 - DNA, 33 bp, Homo sapien
ttaactagttaatgccagacactgtgttaaatg

SEQ ID NO: 5632 - DNA, 33 bp, Homo sapien
ttaactagttaatgccggacactgtgttaaatg

SEQ ID NO: 5633 - DNA, 33 bp, Homo sapien
ggcctgggcctagagaaagacttcagtgacact

SEQ ID NO: 5634 - DNA, 33 bp, Homo sapien
ggcctgggcctagagagagacttcagtgacact

SEQ ID NO: 5635 - DNA, 33 bp, Homo sapien
gacagaccgtggacaaattaagtagcttggggc

SEQ ID NO: 5636 - DNA, 33 bp, Homo sapien
gacagaccgtggacaagttaagtagcttggggc

SEQ ID NO: 5637 - DNA, 33 bp, Homo sapien
ggaaactaccaagaaaactcaaagatttttagg

SEQ ID NO: 5638 - DNA, 33 bp, Homo sapien
ggaaactaccaagaaacctcaaagatttttagg

SEQ ID NO: 5639 - DNA, 33 bp, Homo sapien
gctattaagcgtctcaccttatcgaagcggaaa

SEQ ID NO: 5640 - DNA, 33 bp, Homo sapien
gctattaagcgtctcatcttatcgaagcggaaa

SEQ ID NO: 5641 - DNA, 33 bp, Homo sapien
atgtgacctgttaatcaaatcctgcaccagccc

SEQ ID NO: 5642 - DNA, 33 bp, Homo sapien
atgtgacctgttaatcgaatcctgcaccagccc

SEQ ID NO: 5643 - DNA, 33 bp, Homo sapien
acacgtagcaaggaaacggttgggtcagactaa

SEQ ID NO: 5644 - DNA, 33 bp, Homo sapien
acacgtagcaaggaaatggttgggtcagactaa

SEQ ID NO: 5645 - DNA, 33 bp, Homo sapien
catttggcaatggcaggagacactttggttgcc

SEQ ID NO: 5646 - DNA, 33 bp, Homo sapien
catttggcaatggcagtagacactttggttgcc

SEQ ID NO: 5647 - DNA, 33 bp, Homo sapien
gctgctctttcaaccacgactcccccagcgaga

SEQ ID NO: 5648 - DNA, 33 bp, Homo sapien
gctgctctttcaaccatgactcccccagcgaga

SEQ ID NO: 5649 - DNA, 33 bp, Homo sapien
cacatccacactgtgaacaaattggtttcagca

SEQ ID NO: 5650 - DNA, 33 bp, Homo sapien
cacatccacactgtgagcaaattggtttcagca

SEQ ID NO: 5651 - DNA, 33 bp, Homo sapien
aggatccaaaaaatgcaaactatatatcaaatt

SEQ ID NO: 5652 - DNA, 33 bp, Homo sapien
aggatccaaaaaatgcgaactatatatcaaatt

SEQ ID NO: 5653 - DNA, 33 bp, Homo sapien
ggcacaaaatttcagccgatgtcaaaaatctca

SEQ ID NO: 5654 - DNA, 33 bp, Homo sapien
ggcacaaaatttcagctgatgtcaaaaatctca

SEQ ID NO: 5655 - DNA, 33 bp, Homo sapien
cttgcaaacatgtgtgcaccaaacgcttactga

SEQ ID NO: 5656 - DNA, 33 bp, Homo sapien
cttgcaaacatgtgtgtaccaaacgcttactga

SEQ ID NO: 5657 - DNA, 33 bp, Homo sapien
catcttttcaccctcacgccaatttgcatacca

SEQ ID NO: 5658 - DNA, 33 bp, Homo sapien
catcttttcaccctcaggccaatttgcatacca

SEQ ID NO: 5659 - DNA, 33 bp, Homo sapien
ttaaaaacaaaactaaactgaaatccagccggg

SEQ ID NO: 5660 - DNA, 33 bp, Homo sapien
ttaaaaacaaaactaatctgaaatccagccggg

SEQ ID NO: 5661 - DNA, 33 bp, Homo sapien
caagtaggccttactggaggaattgttaacttt

SEQ ID NO: 5662 - DNA, 33 bp, Homo sapien
caagtaggccttactgtaggaattgttaacttt

SEQ ID NO: 5663 - DNA, 33 bp, Homo sapien
ctgcttgatagctccactcgggtgtgtctaatt

SEQ ID NO: 5664 - DNA, 33 bp, Homo sapien
ctgcttgatagctccattcgggtgtgtctaatt

SEQ ID NO: 5665 - DNA, 33 bp, Homo sapien
tctcatctgacacaagccttgcaacagccaaga

SEQ ID NO: 5666 - DNA, 33 bp, Homo sapien
tctcatctgacacaaggcttgcaacagccaaga

SEQ ID NO: 5667 - DNA, 33 bp, Homo sapien
ttgatacaaaatgggaccctgaggcccaaagga

SEQ ID NO: 5668 - DNA, 33 bp, Homo sapien
ttgatacaaaatgggatcctgaggcccaaagga

SEQ ID NO: 5669 - DNA, 33 bp, Homo sapien
ggagggctgttccagacgctttctgtggttctg

SEQ ID NO: 5670 - DNA, 33 bp, Homo sapien
ggagggctgttccagatgctttctgtggttctg

SEQ ID NO: 5671 - DNA, 33 bp, Homo sapien
ttgctgtacctgacatgaggctagaggtactga

SEQ ID NO: 5672 - DNA, 33 bp, Homo sapien
ttgctgtacctgacattaggctagaggtactga

SEQ ID NO: 5673 - DNA, 33 bp, Homo sapien
gcaccaacacccctcaaggcccctgctggccac

SEQ ID NO: 5674 - DNA, 33 bp, Homo sapien
gcaccaacacccctcacggcccctgctggccac

SEQ ID NO: 5675 - DNA, 33 bp, Homo sapien
gagctggtctggaggaagaaagaagttcagggt

SEQ ID NO: 5676 - DNA, 33 bp, Homo sapien
gagctggtctggaggaggaaagaagttcagggt

SEQ ID NO: 5677 - DNA, 33 bp, Homo sapien
tcagggaaggctctccactgccgcattcccccg

SEQ ID NO: 5678 - DNA, 33 bp, Homo sapien
tcagggaaggctctccgctgccgcattcccccg

SEQ ID NO: 5679 - DNA, 33 bp, Homo sapien
agaagaaccagataaactgtggaagtcacataa

SEQ ID NO: 5680 - DNA, 33 bp, Homo sapien
agaagaaccagataaattgtggaagtcacataa

SEQ ID NO: 5681 - DNA, 33 bp, Homo sapien
tagaacgccaagtgccagaaatgagtgagggcc

SEQ ID NO: 5682 - DNA, 33 bp, Homo sapien
tagaacgccaagtgccggaaatgagtgagggcc

SEQ ID NO: 5683 - DNA, 33 bp, Homo sapien
tatgaggctctctctgccaatgtagtcacattg

SEQ ID NO: 5684 - DNA, 33 bp, Homo sapien
tatgaggctctctctgtcaatgtagtcacattg

SEQ ID NO: 5685 - DNA, 33 bp, Homo sapien
caagggagggaaccagaaaaagcattatcatga

SEQ ID NO: 5686 - DNA, 33 bp, Homo sapien
caagggagggaaccagcaaaagcattatcatga

SEQ ID NO: 5687 - DNA, 33 bp, Homo sapien
aaacattgggctggaaagaagtgaacccccagt

SEQ ID NO: 5688 - DNA, 33 bp, Homo sapien
aaacattgggctggaaggaagtgaacccccagt

SEQ ID NO: 5689 - DNA, 33 bp, Homo sapien
tgttaggcatggtcagaaatgctacgaggttct

SEQ ID NO: 5690 - DNA, 33 bp, Homo sapien
tgttaggcatggtcaggaatgctacgaggttct

SEQ ID NO: 5691 - DNA, 33 bp, Homo sapien
gcagcctgttaacacaacagtttctgcgtgaac

SEQ ID NO: 5692 - DNA, 33 bp, Homo sapien
gcagcctgttaacacatcagtttctgcgtgaac

SEQ ID NO: 5693 - DNA, 33 bp, Homo sapien
gactggtctgacctgacatctgtgctcttaccc

SEQ ID NO: 5694 - DNA, 33 bp, Homo sapien
gactggtctgacctgagatctgtgctcttaccc

SEQ ID NO: 5695 - DNA, 33 bp, Homo sapien
tgcagcgctaaccttcactgtggaccttgtgca

SEQ ID NO: 5696 - DNA, 33 bp, Homo sapien
tgcagcgctaaccttcgctgtggaccttgtgca

SEQ ID NO: 5697 - DNA, 33 bp, Homo sapien
gggttgaaatctaagaacctgaaggaccagcaa

SEQ ID NO: 5698 - DNA, 33 bp, Homo sapien
gggttgaaatctaagaccctgaaggaccagcaa

SEQ ID NO: 5699 - DNA, 33 bp, Homo sapien
tagaagttaacactccaacaagtagccacctaa

SEQ ID NO: 5700 - DNA, 33 bp, Homo sapien
tagaagttaacactccgacaagtagccacctaa

SEQ ID NO: 5701 - DNA, 33 bp, Homo sapien
cagcgtgtccctagaaagtgccagagcagagag

SEQ ID NO: 5702 - DNA, 33 bp, Homo sapien
cagcgtgtccctagaatgtgccagagcagagag

SEQ ID NO: 5703 - DNA, 33 bp, Homo sapien
gaggggaccaaagtggacatcgcttagggagag

SEQ ID NO: 5704 - DNA, 33 bp, Homo sapien
gaggggaccaaagtgggcatcgcttagggagag

SEQ ID NO: 5705 - DNA, 33 bp, Homo sapien
aaatgacccaaaagggaaactgtcatgttaaca

SEQ ID NO: 5706 - DNA, 33 bp, Homo sapien
aaatgacccaaaagggcaactgtcatgttaaca

SEQ ID NO: 5707 - DNA, 33 bp, Homo sapien
gctctgcagatatagccatgaacaagacaacag

SEQ ID NO: 5708 - DNA, 33 bp, Homo sapien
gctctgcagatatagctatgaacaagacaacag

SEQ ID NO: 5709 - DNA, 33 bp, Homo sapien
ttagccctgtttacacagccgggatgtcgagcg

SEQ ID NO: 5710 - DNA, 33 bp, Homo sapien
ttagccctgtttacacggccgggatgtcgagcg

SEQ ID NO: 5711 - DNA, 33 bp, Homo sapien
cttagtgttttatgtacgttaactcactaaaac

SEQ ID NO: 5712 - DNA, 33 bp, Homo sapien
cttagtgttttatgtatgttaactcactaaaac

SEQ ID NO: 5713 - DNA, 33 bp, Homo sapien
atcactggagaacgcacggctctctgggtatag

SEQ ID NO: 5714 - DNA, 33 bp, Homo sapien
atcactggagaacgcagggctctctgggtatag

SEQ ID NO: 5715 - DNA, 33 bp, Homo sapien
gctaaattccgactgcaaagcctttattagtgg

SEQ ID NO: 5716 - DNA, 33 bp, Homo sapien
gctaaattccgactgccaagcctttattagtgg

SEQ ID NO: 5717 - DNA, 33 bp, Homo sapien
tgggtggttttcttacacatgtgggctttccct

SEQ ID NO: 5718 - DNA, 33 bp, Homo sapien
tgggtggttttcttacccatgtgggctttccct

SEQ ID NO: 5719 - DNA, 33 bp, Homo sapien
gactatgcaatgactacggtgtttgataaaata

SEQ ID NO: 5720 - DNA, 33 bp, Homo sapien
gactatgcaatgactatggtgtttgataaaata

SEQ ID NO: 5721 - DNA, 33 bp, Homo sapien
aggctcagtaatgcgaaacctcactacagctcc

SEQ ID NO: 5722 - DNA, 33 bp, Homo sapien
aggctcagtaatgcgagacctcactacagctcc

SEQ ID NO: 5723 - DNA, 33 bp, Homo sapien
aatgtgactgtatgtaaagataaggccttttaa

SEQ ID NO: 5724 - DNA, 33 bp, Homo sapien
aatgtgactgtatgtagagataaggccttttaa

SEQ ID NO: 5725 - DNA, 33 bp, Homo sapien
ccctattacctcggccccttgagatgtcctaat

SEQ ID NO: 5726 - DNA, 33 bp, Homo sapien
ccctattacctcggcctcttgagatgtcctaat

SEQ ID NO: 5727 - DNA, 33 bp, Homo sapien
aaggaggtgactgcagcaagcacggcaaggtgg

SEQ ID NO: 5728 - DNA, 33 bp, Homo sapien
aaggaggtgactgcaggaagcacggcaaggtgg

SEQ ID NO: 5729 - DNA, 33 bp, Homo sapien
gcagggaacagtgggacctttaggcatttgtgg

SEQ ID NO: 5730 - DNA, 33 bp, Homo sapien
gcagggaacagtgggatctttaggcatttgtgg

SEQ ID NO: 5731 - DNA, 33 bp, Homo sapien
aggacagaattttgacagatttatccctgcact

SEQ ID NO: 5732 - DNA, 33 bp, Homo sapien
aggacagaattttgactgatttatccctgcact

SEQ ID NO: 5733 - DNA, 33 bp, Homo sapien
tgggaagaacagcatacgaggtgaagacgctgg

SEQ ID NO: 5734 - DNA, 33 bp, Homo sapien
tgggaagaacagcatatgaggtgaagacgctgg

SEQ ID NO: 5735 - DNA, 33 bp, Homo sapien
attgtaacaaccaaaaatggttccaggcactgc

SEQ ID NO: 5736 - DNA, 33 bp, Homo sapien
attgtaacaaccaaaattggttccaggcactgc

SEQ ID NO: 5737 - DNA, 33 bp, Homo sapien
agggtgtttagtagcaaccctggcctctaccca

SEQ ID NO: 5738 - DNA, 33 bp, Homo sapien
agggtgtttagtagcatccctggcctctaccca

SEQ ID NO: 5739 - DNA, 33 bp, Homo sapien
gaaagtgcaagagctacgcaggtggcagctgtg

SEQ ID NO: 5740 - DNA, 33 bp, Homo sapien
gaaagtgcaagagctatgcaggtggcagctgtg

SEQ ID NO: 5741 - DNA, 33 bp, Homo sapien
catttctcaacaagaaaccgctgctgcagagtg

SEQ ID NO: 5742 - DNA, 33 bp, Homo sapien
catttctcaacaagaagccgctgctgcagagtg

SEQ ID NO: 5743 - DNA, 33 bp, Homo sapien
ggtgcctttcctgagccaggcttgcttttctgg

SEQ ID NO: 5744 - DNA, 33 bp, Homo sapien
ggtgcctttcctgagctaggcttgcttttctgg

SEQ ID NO: 5745 - DNA, 33 bp, Homo sapien
gggaatcaactaataacgcagtcatcccaagga

SEQ ID NO: 5746 - DNA, 33 bp, Homo sapien
gggaatcaactaataatgcagtcatcccaagga

SEQ ID NO: 5747 - DNA, 33 bp, Homo sapien
cttaatagttttaatgcagtcccagaccttgta

SEQ ID NO: 5748 - DNA, 33 bp, Homo sapien
cttaatagttttaatggagtcccagaccttgta

SEQ ID NO: 5749 - DNA, 33 bp, Homo sapien
ggtgaggacatgaaaacgctgcctcaaggtttg

SEQ ID NO: 5750 - DNA, 33 bp, Homo sapien
ggtgaggacatgaaaatgctgcctcaaggtttg

SEQ ID NO: 5751 - DNA, 33 bp, Homo sapien
cagtggtatgaacacaagccctggacatcctac

SEQ ID NO: 5752 - DNA, 33 bp, Homo sapien
cagtggtatgaacacaggccctggacatcctac

SEQ ID NO: 5753 - DNA, 33 bp, Homo sapien
actgatgaggagccaacatctactccgtacagc

SEQ ID NO: 5754 - DNA, 33 bp, Homo sapien
actgatgaggagccaatatctactccgtacagc

SEQ ID NO: 5755 - DNA, 33 bp, Homo sapien
acagtccaaagtcaaacagaaccaatgttgtaa

SEQ ID NO: 5756 - DNA, 33 bp, Homo sapien
acagtccaaagtcaaatagaaccaatgttgtaa

SEQ ID NO: 5757 - DNA, 33 bp, Homo sapien
acactgactgtaaatacgtaagttttctctcta

SEQ ID NO: 5758 - DNA, 33 bp, Homo sapien
acactgactgtaaatatgtaagttttctctcta

SEQ ID NO: 5759 - DNA, 33 bp, Homo sapien
accaacatccactccaccaagcaagtctgaaca

SEQ ID NO: 5760 - DNA, 33 bp, Homo sapien
accaacatccactccatcaagcaagtctgaaca

SEQ ID NO: 5761 - DNA, 33 bp, Homo sapien
caacttcagtgccttacgtatttctgctggtct

SEQ ID NO: 5762 - DNA, 33 bp, Homo sapien
caacttcagtgccttatgtatttctgctggtct

SEQ ID NO: 5763 - DNA, 33 bp, Homo sapien
gagttcaggaacataactgcattgtacagtgtg

SEQ ID NO: 5764 - DNA, 33 bp, Homo sapien
gagttcaggaacataattgcattgtacagtgtg

SEQ ID NO: 5765 - DNA, 33 bp, Homo sapien
ggacataagggtttgacgacattgatggtaaca

SEQ ID NO: 5766 - DNA, 33 bp, Homo sapien
ggacataagggtttgatgacattgatggtaaca

SEQ ID NO: 5767 - DNA, 33 bp, Homo sapien
aattcgtacagcatccaagttcactgcagtgcc

SEQ ID NO: 5768 - DNA, 33 bp, Homo sapien
aattcgtacagcatccgagttcactgcagtgcc

SEQ ID NO: 5769 - DNA, 33 bp, Homo sapien
ccatgagctaatttaacccttacagcaactttg

SEQ ID NO: 5770 - DNA, 33 bp, Homo sapien
ccatgagctaatttaatccttacagcaactttg

SEQ ID NO: 5771 - DNA, 33 bp, Homo sapien
agttcagatgaaacaccatgccctgtcctgttc

SEQ ID NO: 5772 - DNA, 33 bp, Homo sapien
agttcagatgaaacactatgccctgtcctgttc

SEQ ID NO: 5773 - DNA, 33 bp, Homo sapien
ccagggacagctcccaatctccatctcaagaaa

SEQ ID NO: 5774 - DNA, 33 bp, Homo sapien
ccagggacagctcccattctccatctcaagaaa

SEQ ID NO: 5775 - DNA, 33 bp, Homo sapien
ccacctccaagctctccctttcataagtgtccc

SEQ ID NO: 5776 - DNA, 33 bp, Homo sapien
ccacctccaagctctctctttcataagtgtccc

SEQ ID NO: 5777 - DNA, 33 bp, Homo sapien
caagccttttattctacaaggctgtgcctgagt

SEQ ID NO: 5778 - DNA, 33 bp, Homo sapien
caagccttttattctagaaggctgtgcctgagt

SEQ ID NO: 5779 - DNA, 33 bp, Homo sapien
acggtggttttgtgcaaggtcaatttaactaag

SEQ ID NO: 5780 - DNA, 33 bp, Homo sapien
acggtggttttgtgcagggtcaatttaactaag

SEQ ID NO: 5781 - DNA, 33 bp, Homo sapien
ataggatttgttaacaatagctaaccttatcat

SEQ ID NO: 5782 - DNA, 33 bp, Homo sapien
ataggatttgttaacagtagctaaccttatcat

SEQ ID NO: 5783 - DNA, 33 bp, Homo sapien
cattccttctttgggaactgagacctctggacc

SEQ ID NO: 5784 - DNA, 33 bp, Homo sapien
cattccttctttgggagctgagacctctggacc

SEQ ID NO: 5785 - DNA, 33 bp, Homo sapien
tttggggggaaagtacaacattctctgaaaata

SEQ ID NO: 5786 - DNA, 33 bp, Homo sapien
tttggggggaaagtacgacattctctgaaaata

SEQ ID NO: 5787 - DNA, 33 bp, Homo sapien
acccaggctggactcagcttttgctctcagtga

SEQ ID NO: 5788 - DNA, 33 bp, Homo sapien
acccaggctggactcatcttttgctctcagtga

SEQ ID NO: 5789 - DNA, 33 bp, Homo sapien
ctcatgaagctcggaccgctattctcccaaatt

SEQ ID NO: 5790 - DNA, 33 bp, Homo sapien
ctcatgaagctcggactgctattctcccaaatt

SEQ ID NO: 5791 - DNA, 33 bp, Homo sapien
gcaaactttcggtaaaaagctgggcaggacata

SEQ ID NO: 5792 - DNA, 33 bp, Homo sapien
gcaaactttcggtaaagagctgggcaggacata

SEQ ID NO: 5793 - DNA, 33 bp, Homo sapien
caaaaccaaaggcatcaactcctcgggccccca

SEQ ID NO: 5794 - DNA, 33 bp, Homo sapien
caaaaccaaaggcatcgactcctcgggccccca

SEQ ID NO: 5795 - DNA, 33 bp, Homo sapien
cgccttaaacattctcaagcctgtgtgacccac

SEQ ID NO: 5796 - DNA, 33 bp, Homo sapien
cgccttaaacattctcgagcctgtgtgacccac

SEQ ID NO: 5797 - DNA, 33 bp, Homo sapien
caagtggcttaaagtaaaagtctatttctctcc

SEQ ID NO: 5798 - DNA, 33 bp, Homo sapien
caagtggcttaaagtagaagtctatttctctcc

SEQ ID NO: 5799 - DNA, 33 bp, Homo sapien
ttgatcagtatgtgtcaaacaataacagtaaga

SEQ ID NO: 5800 - DNA, 33 bp, Homo sapien
ttgatcagtatgtgtcgaacaataacagtaaga

SEQ ID NO: 5801 - DNA, 33 bp, Homo sapien
gcgtggaaggccaaagcctcagaactgcaccca

SEQ ID NO: 5802 - DNA, 33 bp, Homo sapien
gcgtggaaggccaaagtctcagaactgcaccca

SEQ ID NO: 5803 - DNA, 33 bp, Homo sapien
ttgaaaaagtcacttaccctttctggagttcag

SEQ ID NO: 5804 - DNA, 33 bp, Homo sapien
ttgaaaaagtcacttatcctttctggagttcag

SEQ ID NO: 5805 - DNA, 33 bp, Homo sapien
agtctccagttgtatcgctgaatggtcccatca

SEQ ID NO: 5806 - DNA, 33 bp, Homo sapien
agtctccagttgtatctctgaatggtcccatca

SEQ ID NO: 5807 - DNA, 33 bp, Homo sapien
gccaggtgcaatgccaaggagtcagttttcttg

SEQ ID NO: 5808 - DNA, 33 bp, Homo sapien
gccaggtgcaatgccagggagtcagttttcttg

SEQ ID NO: 5809 - DNA, 33 bp, Homo sapien
actatgcaaatcatgaacattcaatttcagtcc

SEQ ID NO: 5810 - DNA, 33 bp, Homo sapien
actatgcaaatcatgagcattcaatttcagtcc

SEQ ID NO: 5811 - DNA, 33 bp, Homo sapien
agaatggtgcattgaccgattatttgtgtgtcc

SEQ ID NO: 5812 - DNA, 33 bp, Homo sapien
agaatggtgcattgactgattatttgtgtgtcc

SEQ ID NO: 5813 - DNA, 33 bp, Homo sapien
caccatggtgttcatccatgaagactctcatgg

SEQ ID NO: 5814 - DNA, 33 bp, Homo sapien
caccatggtgttcatctatgaagactctcatgg

SEQ ID NO: 5815 - DNA, 33 bp, Homo sapien
actgttacagattgagccctgtggaaataaatt

SEQ ID NO: 5816 - DNA, 33 bp, Homo sapien
actgttacagattgaggcctgtggaaataaatt

SEQ ID NO: 5817 - DNA, 33 bp, Homo sapien
tagcaactgttgttaacacagtcatgattatta

SEQ ID NO: 5818 - DNA, 33 bp, Homo sapien
tagcaactgttgttaatacagtcatgattatta

SEQ ID NO: 5819 - DNA, 33 bp, Homo sapien
atgcaatatatacctgacaagtttgactagtga

SEQ ID NO: 5820 - DNA, 33 bp, Homo sapien
atgcaatatatacctggcaagtttgactagtga

SEQ ID NO: 5821 - DNA, 33 bp, Homo sapien
caaggagttcttcaaaaggaaggatagagtgat

SEQ ID NO: 5822 - DNA, 33 bp, Homo sapien
caaggagttcttcaaagggaaggatagagtgat

SEQ ID NO: 5823 - DNA, 33 bp, Homo sapien
gagctgtcacatctggaagaccctgaaatttgc

SEQ ID NO: 5824 - DNA, 33 bp, Homo sapien
gagctgtcacatctgggagaccctgaaatttgc

SEQ ID NO: 5825 - DNA, 33 bp, Homo sapien
gcctgtctgtcacctaaacaaaggaaggaagga

SEQ ID NO: 5826 - DNA, 33 bp, Homo sapien
gcctgtctgtcacctatacaaaggaaggaagga

SEQ ID NO: 5827 - DNA, 33 bp, Homo sapien
tgcaacaagcaagccaatgagctctgacaagga

SEQ ID NO: 5828 - DNA, 33 bp, Homo sapien
tgcaacaagcaagccagtgagctctgacaagga

SEQ ID NO: 5829 - DNA, 33 bp, Homo sapien
taaaaataaaaatagacggctctcactgaccag

SEQ ID NO: 5830 - DNA, 33 bp, Homo sapien
taaaaataaaaatagatggctctcactgaccag

SEQ ID NO: 5831 - DNA, 33 bp, Homo sapien
tcccagcaccattaaaacaggacctagcaaatg

SEQ ID NO: 5832 - DNA, 33 bp, Homo sapien
tcccagcaccattaaagcaggacctagcaaatg

SEQ ID NO: 5833 - DNA, 33 bp, Homo sapien
ggaatcctcacttgagaacataacttgtccctg

SEQ ID NO: 5834 - DNA, 33 bp, Homo sapien
ggaatcctcacttgagcacataacttgtccctg

SEQ ID NO: 5835 - DNA, 33 bp, Homo sapien
ctggagttctttcccccactctttctgccgaca

SEQ ID NO: 5836 - DNA, 33 bp, Homo sapien
ctggagttctttccccgactctttctgccgaca

SEQ ID NO: 5837 - DNA, 33 bp, Homo sapien
gatctttctctctccactgcttggctctgcgtt

SEQ ID NO: 5838 - DNA, 33 bp, Homo sapien
gatctttctctctccattgcttggctctgcgtt

SEQ ID NO: 5839 - DNA, 33 bp, Homo sapien
ctgcccagaatgcatcccctttacttcccataa

SEQ ID NO: 5840 - DNA, 33 bp, Homo sapien
ctgcccagaatgcatctcctttacttcccataa

SEQ ID NO: 5841 - DNA, 33 bp, Homo sapien
gcatttatcagccagacggttgactacagcaca

SEQ ID NO: 5842 - DNA, 33 bp, Homo sapien
gcatttatcagccagagggttgactacagcaca

SEQ ID NO: 5843 - DNA, 33 bp, Homo sapien
atggtgtagaagttgaagatggaggaaattaat

SEQ ID NO: 5844 - DNA, 33 bp, Homo sapien
atggtgtagaagttgaggatggaggaaattaat

SEQ ID NO: 5845 - DNA, 33 bp, Homo sapien
tacttttcatatctcccccattggcagcagaaa

SEQ ID NO: 5846 - DNA, 33 bp, Homo sapien
tacttttcatatctcctccattggcagcagaaa

SEQ ID NO: 5847 - DNA, 33 bp, Homo sapien
tctgctgacaataccaatgaatttttacaaaat

SEQ ID NO: 5848 - DNA, 33 bp, Homo sapien
tctgctgacaataccagtgaatttttacaaaat

SEQ ID NO: 5849 - DNA, 33 bp, Homo sapien
ggcagcttcccaaatgccacttataccggagag

SEQ ID NO: 5850 - DNA, 33 bp, Homo sapien
ggcagcttcccaaatgtcacttataccggagag

SEQ ID NO: 5851 - DNA, 33 bp, Homo sapien
cttggcaaggtgatgacgaccatggagcattag

SEQ ID NO: 5852 - DNA, 33 bp, Homo sapien
cttggcaaggtgatgatgaccatggagcattag

SEQ ID NO: 5853 - DNA, 33 bp, Homo sapien
taacaatctatgccaaccttgcagaaaaccctc

SEQ ID NO: 5854 - DNA, 33 bp, Homo sapien
taacaatctatgccaatcttgcagaaaaccctc

SEQ ID NO: 5855 - DNA, 33 bp, Homo sapien
accaaaccttctgcaccgcaactcataaccagc

SEQ ID NO: 5856 - DNA, 33 bp, Homo sapien
accaaaccttctgcactgcaactcataaccagc

SEQ ID NO: 5857 - DNA, 33 bp, Homo sapien
tgcatcactgccagcaacttccttatttctttg

SEQ ID NO: 5858 - DNA, 33 bp, Homo sapien
tgcatcactgccagcaccttccttatttctttg

SEQ ID NO: 5859 - DNA, 33 bp, Homo sapien
attggcctgtgcgagacggatctggacatcatc

SEQ ID NO: 5860 - DNA, 33 bp, Homo sapien
attggcctgtgcgagatggatctggacatcatc

SEQ ID NO: 5861 - DNA, 33 bp, Homo sapien
gaagctgagactcagaaaggtgagatgcacacc

SEQ ID NO: 5862 - DNA, 33 bp, Homo sapien
gaagctgagactcagagaggtgagatgcacacc

SEQ ID NO: 5863 - DNA, 33 bp, Homo sapien
tgctcatgaccttctacagattgagttcctggg

SEQ ID NO: 5864 - DNA, 33 bp, Homo sapien
tgctcatgaccttctatagattgagttcctggg

SEQ ID NO: 5865 - DNA, 33 bp, Homo sapien
tgaactagtgaagttgaaaagaggtagccatgc

SEQ ID NO: 5866 - DNA, 33 bp, Homo sapien
tgaactagtgaagttgcaaagaggtagccatgc

SEQ ID NO: 5867 - DNA, 33 bp, Homo sapien
aagaaaccaggtgcaaccaagcagagtacagct

SEQ ID NO: 5868 - DNA, 33 bp, Homo sapien
aagaaaccaggtgcaatcaagcagagtacagct

SEQ ID NO: 5869 - DNA, 33 bp, Homo sapien
tgcttaagtgatggggacaccaacatttcggaa

SEQ ID NO: 5870 - DNA, 33 bp, Homo sapien
tgcttaagtgatgggggcaccaacatttcggaa

SEQ ID NO: 5871 - DNA, 33 bp, Homo sapien
ggtcagtgaaaacttacgaacaataatgctatc

SEQ ID NO: 5872 - DNA, 33 bp, Homo sapien
ggtcagtgaaaacttatgaacaataatgctatc

SEQ ID NO: 5873 - DNA, 33 bp, Homo sapien
acactcccaaactcaacggtgcagaaagctgtg

SEQ ID NO: 5874 - DNA, 33 bp, Homo sapien
acactcccaaactcaatggtgcagaaagctgtg

SEQ ID NO: 5875 - DNA, 33 bp, Homo sapien
ttcaggtcaaccatgaagaaagcaaaatgatgg

SEQ ID NO: 5876 - DNA, 33 bp, Homo sapien
ttcaggtcaaccatgaggaaagcaaaatgatgg

SEQ ID NO: 5877 - DNA, 33 bp, Homo sapien
cctctccagtcccccaatggatacgtctacagt

SEQ ID NO: 5878 - DNA, 33 bp, Homo sapien
cctctccagtcccccagtggatacgtctacagt

SEQ ID NO: 5879 - DNA, 33 bp, Homo sapien
aacacttctgagttcaacttttacagaagcctt

SEQ ID NO: 5880 - DNA, 33 bp, Homo sapien
aacacttctgagttcagcttttacagaagcctt

SEQ ID NO: 5881 - DNA, 33 bp, Homo sapien
acacagtcagccacacaaggtgaagccaggatt

SEQ ID NO: 5882 - DNA, 33 bp, Homo sapien
acacagtcagccacacgaggtgaagccaggatt

SEQ ID NO: 5883 - DNA, 33 bp, Homo sapien
cctgtgtgagcccatactacaattctgcatagc

SEQ ID NO: 5884 - DNA, 33 bp, Homo sapien
cctgtgtgagcccatattacaattctgcatagc

SEQ ID NO: 5885 - DNA, 33 bp, Homo sapien
ccccatgttactaatacaagaaggacaatacct

SEQ ID NO: 5886 - DNA, 33 bp, Homo sapien
ccccatgttactaatataagaaggacaatacct

SEQ ID NO: 5887 - DNA, 33 bp, Homo sapien
gatgatctgcaggtaacagagaagtgctggtgc

SEQ ID NO: 5888 - DNA, 33 bp, Homo sapien
gatgatctgcaggtaatagagaagtgctggtgc

SEQ ID NO: 5889 - DNA, 33 bp, Homo sapien
gcctggataaggacaccgcccaccagatactca

SEQ ID NO: 5890 - DNA, 33 bp, Homo sapien
gcctggataaggacactgcccaccagatactca

SEQ ID NO: 5891 - DNA, 33 bp, Homo sapien
tgcagggagaacccagacattaggacctgatgg

SEQ ID NO: 5892 - DNA, 33 bp, Homo sapien
tgcagggagaacccagtcattaggacctgatgg

SEQ ID NO: 5893 - DNA, 33 bp, Homo sapien
cctgctcccagccccaaattagctcagtttata

SEQ ID NO: 5894 - DNA, 33 bp, Homo sapien
cctgctcccagccccagattagctcagtttata

SEQ ID NO: 5895 - DNA, 33 bp, Homo sapien
aaaagtaggatatggaaaaaaggagtacaaagg

SEQ ID NO: 5896 - DNA, 33 bp, Homo sapien
aaaagtaggatatggagaaaaggagtacaaagg

SEQ ID NO: 5897 - DNA, 33 bp, Homo sapien
atccaagaatatagtacgtagagtcaaactatc

SEQ ID NO: 5898 - DNA, 33 bp, Homo sapien
atccaagaatatagtatgtagagtcaaactatc

SEQ ID NO: 5899 - DNA, 33 bp, Homo sapien
atctgtaaaatgcagacgatgacaacacccacc

SEQ ID NO: 5900 - DNA, 33 bp, Homo sapien
atctgtaaaatgcagatgatgacaacacccacc

SEQ ID NO: 5901 - DNA, 33 bp, Homo sapien
gtagacattgagaagacgttgtttgttattgct

SEQ ID NO: 5902 - DNA, 33 bp, Homo sapien
gtagacattgagaagatgttgtttgttattgct

SEQ ID NO: 5903 - DNA, 33 bp, Homo sapien
ctagaactttctgggagcctgtagcaataacaa

SEQ ID NO: 5904 - DNA, 33 bp, Homo sapien
ctagaactttctgggatcctgtagcaataacaa

SEQ ID NO: 5905 - DNA, 33 bp, Homo sapien
tccagtgccttaaaaacagtatgggctggagtc

SEQ ID NO: 5906 - DNA, 33 bp, Homo sapien
tccagtgccttaaaaagagtatgggctggagtc

SEQ ID NO: 5907 - DNA, 33 bp, Homo sapien
ctggccatgaatgggcaccatgatggattctaa

SEQ ID NO: 5908 - DNA, 33 bp, Homo sapien
ctggccatgaatgggcgccatgatggattctaa

SEQ ID NO: 5909 - DNA, 33 bp, Homo sapien
ctcagccagtataagggcatctattgactaaac

SEQ ID NO: 5910 - DNA, 33 bp, Homo sapien
ctcagccagtataaggtcatctattgactaaac

SEQ ID NO: 5911 - DNA, 33 bp, Homo sapien
cttgcttaaggccaacagataatggattggaat

SEQ ID NO: 5912 - DNA, 33 bp, Homo sapien
cttgcttaaggccaacggataatggattggaat

SEQ ID NO: 5913 - DNA, 33 bp, Homo sapien
aggacagaaatatggccagtgttaggcaaggag

SEQ ID NO: 5914 - DNA, 33 bp, Homo sapien
aggacagaaatatggctagtgttaggcaaggag

SEQ ID NO: 5915 - DNA, 33 bp, Homo sapien
gcagaaagaggtgataccaaaacccctggccat

SEQ ID NO: 5916 - DNA, 33 bp, Homo sapien
gcagaaagaggtgatatcaaaacccctggccat

SEQ ID NO: 5917 - DNA, 33 bp, Homo sapien
cactttaataacctggcagtttgcgcggccaaa

SEQ ID NO: 5918 - DNA, 33 bp, Homo sapien
cactttaataacctggtagtttgcgcggccaaa

SEQ ID NO: 5919 - DNA, 33 bp, Homo sapien
tgtgggcaagtcacacacatgcaaatatgtgag

SEQ ID NO: 5920 - DNA, 33 bp, Homo sapien
tgtgggcaagtcacactcatgcaaatatgtgag

SEQ ID NO: 5921 - DNA, 33 bp, Homo sapien
acagacattaagtgaacgatatctactaatatg

SEQ ID NO: 5922 - DNA, 33 bp, Homo sapien
acagacattaagtgaatgatatctactaatatg

SEQ ID NO: 5923 - DNA, 33 bp, Homo sapien
ggagggttggtgcaccaggagaatgaagaaagg

SEQ ID NO: 5924 - DNA, 33 bp, Homo sapien
ggagggttggtgcaccgggagaatgaagaaagg

SEQ ID NO: 5925 - DNA, 33 bp, Homo sapien
catctcctgagaatgaagtctaccctgatacac

SEQ ID NO: 5926 - DNA, 33 bp, Homo sapien
catctcctgagaatgatgtctaccctgatacac

SEQ ID NO: 5927 - DNA, 33 bp, Homo sapien
agggctccaaggatgacgaagcatcttctgggg

SEQ ID NO: 5928 - DNA, 33 bp, Homo sapien
agggctccaaggatgatgaagcatcttctgggg

SEQ ID NO: 5929 - DNA, 33 bp, Homo sapien
gatgaagagaaggaaaccggaggtggatttgtg

SEQ ID NO: 5930 - DNA, 33 bp, Homo sapien
gatgaagagaaggaaagcggaggtggatttgtg

SEQ ID NO: 5931 - DNA, 33 bp, Homo sapien
tatttagccatgaaaccctcttgcaagaaatgt

SEQ ID NO: 5932 - DNA, 33 bp, Homo sapien
tatttagccatgaaactctcttgcaagaaatgt

SEQ ID NO: 5933 - DNA, 33 bp, Homo sapien
ccaaaggaaaaggtcacgcgggacagccctggg

SEQ ID NO: 5934 - DNA, 33 bp, Homo sapien
ccaaaggaaaaggtcatgcgggacagccctggg

SEQ ID NO: 5935 - DNA, 33 bp, Homo sapien
cctctgctactttatcggagaaactgcagaaag

SEQ ID NO: 5936 - DNA, 33 bp, Homo sapien
cctctgctactttatctgagaaactgcagaaag

SEQ ID NO: 5937 - DNA, 33 bp, Homo sapien
aataatgggcgtggaagtgttttgtgcattttc

SEQ ID NO: 5938 - DNA, 33 bp, Homo sapien
aataatgggcgtggaattgttttgtgcattttc

SEQ ID NO: 5939 - DNA, 33 bp, Homo sapien
ggccagtaagctttgacctcaagtgtgcactgt

SEQ ID NO: 5940 - DNA, 33 bp, Homo sapien
ggccagtaagctttgatctcaagtgtgcactgt

SEQ ID NO: 5941 - DNA, 33 bp, Homo sapien
aagtaacttgttccccagatcacagaacataga

SEQ ID NO: 5942 - DNA, 33 bp, Homo sapien
aagtaacttgttccccggatcacagaacataga

SEQ ID NO: 5943 - DNA, 33 bp, Homo sapien
tccaccctatttcacaaggagacgttctttctc

SEQ ID NO: 5944 - DNA, 33 bp, Homo sapien
tccaccctatttcacacggagacgttctttctc

SEQ ID NO: 5945 - DNA, 33 bp, Homo sapien
atgaggactcattttccagttgaataaggggac

SEQ ID NO: 5946 - DNA, 33 bp, Homo sapien
atgaggactcattttctagttgaataaggggac

SEQ ID NO: 5947 - DNA, 33 bp, Homo sapien
gcacactgtcatataaagtgaacggatgaagga

SEQ ID NO: 5948 - DNA, 33 bp, Homo sapien
gcacactgtcatataaggtgaacggatgaagga

SEQ ID NO: 5949 - DNA, 33 bp, Homo sapien
aagatctcttaaataaaggatttagctcatttt

SEQ ID NO: 5950 - DNA, 33 bp, Homo sapien
aagatctcttaaataagggatttagctcatttt

SEQ ID NO: 5951 - DNA, 33 bp, Homo sapien
cctccccatgctgctcactgctgtctccaaagc

SEQ ID NO: 5952 - DNA, 33 bp, Homo sapien
cctccccatgctgctcgctgctgtctccaaagc

SEQ ID NO: 5953 - DNA, 33 bp, Homo sapien
ctgaattattttctcacagtctgcatctcgggg

SEQ ID NO: 5954 - DNA, 33 bp, Homo sapien
ctgaattattttctcagagtctgcatctcgggg

SEQ ID NO: 5955 - DNA, 33 bp, Homo sapien
atctgtaaaatggagacgagcctcctacatagg

SEQ ID NO: 5956 - DNA, 33 bp, Homo sapien
atctgtaaaatggagatgagcctcctacatagg

SEQ ID NO: 5957 - DNA, 33 bp, Homo sapien
gtcccaaatctgatgaaagagtcatagctccag

SEQ ID NO: 5958 - DNA, 33 bp, Homo sapien
gtcccaaatctgatgagagagtcatagctccag

SEQ ID NO: 5959 - DNA, 33 bp, Homo sapien
gaagaacaagggccccagcaggaatctcactct

SEQ ID NO: 5960 - DNA, 33 bp, Homo sapien
gaagaacaagggccccggcaggaatctcactct

SEQ ID NO: 5961 - DNA, 33 bp, Homo sapien
aatgtggcaggttcataaggaatgcgcagggca

SEQ ID NO: 5962 - DNA, 33 bp, Homo sapien
aatgtggcaggttcatgaggaatgcgcagggca

SEQ ID NO: 5963 - DNA, 33 bp, Homo sapien
cgtcatccagatgcagaatgtattgggggaaga

SEQ ID NO: 5964 - DNA, 33 bp, Homo sapien
cgtcatccagatgcaggatgtattgggggaaga

SEQ ID NO: 5965 - DNA, 33 bp, Homo sapien
gcctctgaaccgtgccaggatggccaccccctc

SEQ ID NO: 5966 - DNA, 33 bp, Homo sapien
gcctctgaaccgtgccgggatggccaccccctc

SEQ ID NO: 5967 - DNA, 33 bp, Homo sapien
ctgatcctgccccgaaagaagcctcagaaaaac

SEQ ID NO: 5968 - DNA, 33 bp, Homo sapien
ctgatcctgccccgaaggaagcctcagaaaaac

SEQ ID NO: 5969 - DNA, 33 bp, Homo sapien
tgatccatctctagaccctggctccataatttt

SEQ ID NO: 5970 - DNA, 33 bp, Homo sapien
tgatccatctctagactctggctccataatttt

SEQ ID NO: 5971 - DNA, 33 bp, Homo sapien
cccctgctttttttcccgatggcactaagctgg

SEQ ID NO: 5972 - DNA, 33 bp, Homo sapien
cccctgctttttttcctgatggcactaagctgg

SEQ ID NO: 5973 - DNA, 33 bp, Homo sapien
actgtcagttttcaccaatatccatgagcttct

SEQ ID NO: 5974 - DNA, 33 bp, Homo sapien
actgtcagttttcaccgatatccatgagcttct

SEQ ID NO: 5975 - DNA, 33 bp, Homo sapien
ttgcagtcttgcttaacgtgtgtaccagaccgg

SEQ ID NO: 5976 - DNA, 33 bp, Homo sapien
ttgcagtcttgcttaaggtgtgtaccagaccgg

SEQ ID NO: 5977 - DNA, 33 bp, Homo sapien
ggaggatattaacaagccgtccatccaattagg

SEQ ID NO: 5978 - DNA, 33 bp, Homo sapien
ggaggatattaacaaggcgtccatccaattagg

SEQ ID NO: 5979 - DNA, 33 bp, Homo sapien
tcagaatacagggcacaatgttggaatcaggca

SEQ ID NO: 5980 - DNA, 33 bp, Homo sapien
tcagaatacagggcacgatgttggaatcaggca

SEQ ID NO: 5981 - DNA, 33 bp, Homo sapien
tggggaaaccgagaccaatgtacctgaaatgta

SEQ ID NO: 5982 - DNA, 33 bp, Homo sapien
tggggaaaccgagaccgatgtacctgaaatgta

SEQ ID NO: 5983 - DNA, 33 bp, Homo sapien
ggtttaggactaataaatagcagagttgagatt

SEQ ID NO: 5984 - DNA, 33 bp, Homo sapien
ggtttaggactaataagtagcagagttgagatt

SEQ ID NO: 5985 - DNA, 33 bp, Homo sapien
attatatataagttaacggccagatgctcttcc

SEQ ID NO: 5986 - DNA, 33 bp, Homo sapien
attatatataagttaatggccagatgctcttcc

SEQ ID NO: 5987 - DNA, 33 bp, Homo sapien
agcagcagagccagaacgaaaactttctgacgc

SEQ ID NO: 5988 - DNA, 33 bp, Homo sapien
agcagcagagccagaatgaaaactttctgacgc

SEQ ID NO: 5989 - DNA, 33 bp, Homo sapien
gtggatgaagaggcgccgagattggtgagttta

SEQ ID NO: 5990 - DNA, 33 bp, Homo sapien
gtggatgaagaggcgctgagattggtgagttta

SEQ ID NO: 5991 - DNA, 33 bp, Homo sapien
acttcctcttctgtaaatggagaacatacagct

SEQ ID NO: 5992 - DNA, 33 bp, Homo sapien
acttcctcttctgtaagtggagaacatacagct

SEQ ID NO: 5993 - DNA, 33 bp, Homo sapien
atccgcctcttaccacaataccatgtgatatca

SEQ ID NO: 5994 - DNA, 33 bp, Homo sapien
atccgcctcttaccactataccatgtgatatca

SEQ ID NO: 5995 - DNA, 33 bp, Homo sapien
gcagcatgctagagcaatgaaaggacagaactc

SEQ ID NO: 5996 - DNA, 33 bp, Homo sapien
gcagcatgctagagcagtgaaaggacagaactc

SEQ ID NO: 5997 - DNA, 33 bp, Homo sapien
tcccctggcggaggcacgatcttaccttgccct

SEQ ID NO: 5998 - DNA, 33 bp, Homo sapien
tcccctggcggaggcatgatcttaccttgccct

SEQ ID NO: 5999 - DNA, 33 bp, Homo sapien
catttgaatctcattccaggaaaatgattaaag

SEQ ID NO: 6000 - DNA, 33 bp, Homo sapien
catttgaatctcattcgaggaaaatgattaaag

SEQ ID NO: 6001 - DNA, 33 bp, Homo sapien
ttagatctcaagccataaaatataaccatgaat

SEQ ID NO: 6002 - DNA, 33 bp, Homo sapien
ttagatctcaagccatgaaatataaccatgaat

SEQ ID NO: 6003 - DNA, 33 bp, Homo sapien
atcaccttcctgggaaaacagcatcttccagag

SEQ ID NO: 6004 - DNA, 33 bp, Homo sapien
atcaccttcctgggaacacagcatcttccagag

SEQ ID NO: 6005 - DNA, 33 bp, Homo sapien
ttttaaggtctggctacgtggtttttctatgct

SEQ ID NO: 6006 - DNA, 33 bp, Homo sapien
ttttaaggtctggctatgtggtttttctatgct

SEQ ID NO: 6007 - DNA, 33 bp, Homo sapien
ctgggctgggtcatccaatggcagagtgacgcc

SEQ ID NO: 6008 - DNA, 33 bp, Homo sapien
ctgggctgggtcatccgatggcagagtgacgcc

SEQ ID NO: 6009 - DNA, 33 bp, Homo sapien
caagcccaggaacaccaaacaccaagaattgca

SEQ ID NO: 6010 - DNA, 33 bp, Homo sapien
caagcccaggaacaccgaacaccaagaattgca

SEQ ID NO: 6011 - DNA, 33 bp, Homo sapien
tagggcttaggatttcaatgtatcttttagagg

SEQ ID NO: 6012 - DNA, 33 bp, Homo sapien
tagggcttaggatttcgatgtatcttttagagg

SEQ ID NO: 6013 - DNA, 33 bp, Homo sapien
cactcaagttaggaagacttagccaaaaggtag

SEQ ID NO: 6014 - DNA, 33 bp, Homo sapien
cactcaagttaggaaggcttagccaaaaggtag

SEQ ID NO: 6015 - DNA, 33 bp, Homo sapien
tctgatggtttcacaaatagctcttcccccttg

SEQ ID NO: 6016 - DNA, 33 bp, Homo sapien
tctgatggtttcacaattagctcttcccccttg

SEQ ID NO: 6017 - DNA, 33 bp, Homo sapien
atgatgggagctacctaaaggcttggcacaaag

SEQ ID NO: 6018 - DNA, 33 bp, Homo sapien
atgatgggagctacctgaaggcttggcacaaag

SEQ ID NO: 6019 - DNA, 33 bp, Homo sapien
aagaagtttggctgaaagtcaggtgttaggcat

SEQ ID NO: 6020 - DNA, 33 bp, Homo sapien
aagaagtttggctgaatgtcaggtgttaggcat

SEQ ID NO: 6021 - DNA, 33 bp, Homo sapien
ggggagtgcccagctacgagcatttctcctcct

SEQ ID NO: 6022 - DNA, 33 bp, Homo sapien
ggggagtgcccagctatgagcatttctcctcct

SEQ ID NO: 6023 - DNA, 33 bp, Homo sapien
tgtagaacctgagccaagaatgggagcgaatac

SEQ ID NO: 6024 - DNA, 33 bp, Homo sapien
tgtagaacctgagccaggaatgggagcgaatac

SEQ ID NO: 6025 - DNA, 33 bp, Homo sapien
ggagagaaagttaagaaaagtcctgaagggaag

SEQ ID NO: 6026 - DNA, 33 bp, Homo sapien
ggagagaaagttaagagaagtcctgaagggaag

SEQ ID NO: 6027 - DNA, 33 bp, Homo sapien
ggtctgacaaagccacaaccacaaccaaccggt

SEQ ID NO: 6028 - DNA, 33 bp, Homo sapien
ggtctgacaaagccacgaccacaaccaaccggt

SEQ ID NO: 6029 - DNA, 33 bp, Homo sapien
agcacaaagaaggtggaaaccagatcagtcctg

SEQ ID NO: 6030 - DNA, 33 bp, Homo sapien
agcacaaagaaggtggcaaccagatcagtcctg

SEQ ID NO: 6031 - DNA, 33 bp, Homo sapien
ctttcttcaaatgaaacggatggatagcacagt

SEQ ID NO: 6032 - DNA, 33 bp, Homo sapien
ctttcttcaaatgaaatggatggatagcacagt

SEQ ID NO: 6033 - DNA, 33 bp, Homo sapien
ccctgccggtttccaacagaacttccattaaag

SEQ ID NO: 6034 - DNA, 33 bp, Homo sapien
ccctgccggtttccaatagaacttccattaaag

SEQ ID NO: 6035 - DNA, 33 bp, Homo sapien
aaggccatgttactgccgatctcaatgcacccc

SEQ ID NO: 6036 - DNA, 33 bp, Homo sapien
aaggccatgttactgctgatctcaatgcacccc

SEQ ID NO: 6037 - DNA, 33 bp, Homo sapien
tctttactagacaaaacctcaaggccatgttac

SEQ ID NO: 6038 - DNA, 33 bp, Homo sapien
tctttactagacaaaatctcaaggccatgttac

SEQ ID NO: 6039 - DNA, 33 bp, Homo sapien
ctagaatcccctaaaccctctcggctgccactt

SEQ ID NO: 6040 - DNA, 33 bp, Homo sapien
ctagaatcccctaaacgctctcggctgccactt

SEQ ID NO: 6041 - DNA, 33 bp, Homo sapien
cagttgcccatcatcaagttgttaagttctgtt

SEQ ID NO: 6042 - DNA, 33 bp, Homo sapien
cagttgcccatcatcaggttgttaagttctgtt

SEQ ID NO: 6043 - DNA, 33 bp, Homo sapien
gtgtgaaatgtgtaggacatctcattatctcca

SEQ ID NO: 6044 - DNA, 33 bp, Homo sapien
gtgtgaaatgtgtagggcatctcattatctcca

SEQ ID NO: 6045 - DNA, 33 bp, Homo sapien
atacctgtttcctcccacttaactacaagctcc

SEQ ID NO: 6046 - DNA, 33 bp, Homo sapien
atacctgtttcctcccgcttaactacaagctcc

SEQ ID NO: 6047 - DNA, 33 bp, Homo sapien
tttgcattctgggagacagacattcaactatta

SEQ ID NO: 6048 - DNA, 33 bp, Homo sapien
tttgcattctgggagagagacattcaactatta

SEQ ID NO: 6049 - DNA, 33 bp, Homo sapien
tgtttacagaacccaaatgaggctggtgtggtg

SEQ ID NO: 6050 - DNA, 33 bp, Homo sapien
tgtttacagaacccaagtgaggctggtgtggtg

SEQ ID NO: 6051 - DNA, 33 bp, Homo sapien
ttgtaaatgttctgacaatgctctcaggtgcca

SEQ ID NO: 6052 - DNA, 33 bp, Homo sapien
ttgtaaatgttctgacgatgctctcaggtgcca

SEQ ID NO: 6053 - DNA, 33 bp, Homo sapien
gaaatgacttaagccaactccagactggcccat

SEQ ID NO: 6054 - DNA, 33 bp, Homo sapien
gaaatgacttaagccacctccagactggcccat

SEQ ID NO: 6055 - DNA, 33 bp, Homo sapien
ctctcctagtcaggaacattgggagagcctcca

SEQ ID NO: 6056 - DNA, 33 bp, Homo sapien
ctctcctagtcaggaagattgggagagcctcca

SEQ ID NO: 6057 - DNA, 33 bp, Homo sapien
atgcccaaattcaaacagtgtacttatgacaaa

SEQ ID NO: 6058 - DNA, 33 bp, Homo sapien
atgcccaaattcaaactgtgtacttatgacaaa

SEQ ID NO: 6059 - DNA, 33 bp, Homo sapien
tgtgtgtggtgacagaaaaacctgggttaaaac

SEQ ID NO: 6060 - DNA, 33 bp, Homo sapien
tgtgtgtggtgacagacaaacctgggttaaaac

SEQ ID NO: 6061 - DNA, 33 bp, Homo sapien
gcagcacaaagataagacaaagctctcctgcca

SEQ ID NO: 6062 - DNA, 33 bp, Homo sapien
gcagcacaaagataaggcaaagctctcctgcca

SEQ ID NO: 6063 - DNA, 33 bp, Homo sapien
ggagaggtcaatggtgaaaaatacggagggcca

SEQ ID NO: 6064 - DNA, 33 bp, Homo sapien
ggagaggtcaatggtggaaaatacggagggcca

SEQ ID NO: 6065 - DNA, 33 bp, Homo sapien
ggatgctactcagagccagtttcgggaaggact

SEQ ID NO: 6066 - DNA, 33 bp, Homo sapien
ggatgctactcagagcgagtttcgggaaggact

SEQ ID NO: 6067 - DNA, 33 bp, Homo sapien
atgttgagtgattacacagtgattctttggacc

SEQ ID NO: 6068 - DNA, 33 bp, Homo sapien
atgttgagtgattacatagtgattctttggacc

SEQ ID NO: 6069 - DNA, 33 bp, Homo sapien
acctgggagctatcatcaagagtgaggtgggcc

SEQ ID NO: 6070 - DNA, 33 bp, Homo sapien
acctgggagctatcatgaagagtgaggtgggcc

SEQ ID NO: 6071 - DNA, 33 bp, Homo sapien
catgccaatgacacagaatcaaggctgtctgga

SEQ ID NO: 6072 - DNA, 33 bp, Homo sapien
catgccaatgacacaggatcaaggctgtctgga

SEQ ID NO: 6073 - DNA, 33 bp, Homo sapien
cacggtcaggtaaatactacagcagtcaaaggt

SEQ ID NO: 6074 - DNA, 33 bp, Homo sapien
cacggtcaggtaaatattacagcagtcaaaggt

SEQ ID NO: 6075 - DNA, 33 bp, Homo sapien
caggggcctcttcttaaaaaccgattacaaatt

SEQ ID NO: 6076 - DNA, 33 bp, Homo sapien
caggggcctcttcttagaaaccgattacaaatt

SEQ ID NO: 6077 - DNA, 33 bp, Homo sapien
tgggcatctgtcccatcatgagcccttgctgga

SEQ ID NO: 6078 - DNA, 33 bp, Homo sapien
tgggcatctgtcccatgatgagcccttgctgga

SEQ ID NO: 6079 - DNA, 33 bp, Homo sapien
accgctcagcatggatgagtccaaaagaaggga

SEQ ID NO: 6080 - DNA, 33 bp, Homo sapien
accgctcagcatggattagtccaaaagaaggga

SEQ ID NO: 6081 - DNA, 33 bp, Homo sapien
gagggacacagaaaaacagatggtccagaaagg

SEQ ID NO: 6082 - DNA, 33 bp, Homo sapien
gagggacacagaaaaagagatggtccagaaagg

SEQ ID NO: 6083 - DNA, 33 bp, Homo sapien
gaacctgagaggtcaacgccggtatgggggagg

SEQ ID NO: 6084 - DNA, 33 bp, Homo sapien
gaacctgagaggtcaatgccggtatgggggagg

SEQ ID NO: 6085 - DNA, 33 bp, Homo sapien
aggtgcttgaaacatgccaaagtgcattcaaca

SEQ ID NO: 6086 - DNA, 33 bp, Homo sapien
aggtgcttgaaacatgtcaaagtgcattcaaca

SEQ ID NO: 6087 - DNA, 33 bp, Homo sapien
ttgacttaattattcactcgtccttttagaagt

SEQ ID NO: 6088 - DNA, 33 bp, Homo sapien
ttgacttaattattcattcgtccttttagaagt

SEQ ID NO: 6089 - DNA, 33 bp, Homo sapien
cagagatgagcaggacaggtaagttctctgtcc

SEQ ID NO: 6090 - DNA, 33 bp, Homo sapien
cagagatgagcaggactggtaagttctctgtcc

SEQ ID NO: 6091 - DNA, 33 bp, Homo sapien
attgctgatatggcaaatcatttctatgtctgc

SEQ ID NO: 6092 - DNA, 33 bp, Homo sapien
attgctgatatggcaagtcatttctatgtctgc

SEQ ID NO: 6093 - DNA, 33 bp, Homo sapien
atgctttttctctgccagatacattcttcttct

SEQ ID NO: 6094 - DNA, 33 bp, Homo sapien
atgctttttctctgccggatacattcttcttct

SEQ ID NO: 6095 - DNA, 33 bp, Homo sapien
acctgcttcgttgtaacattgtgaggatagatg

SEQ ID NO: 6096 - DNA, 33 bp, Homo sapien
acctgcttcgttgtaatattgtgaggatagatg

SEQ ID NO: 6097 - DNA, 33 bp, Homo sapien
caccaatccatgcctaccaatgttctcaatgct

SEQ ID NO: 6098 - DNA, 33 bp, Homo sapien
caccaatccatgcctagcaatgttctcaatgct

SEQ ID NO: 6099 - DNA, 33 bp, Homo sapien
gagcgtgttgacaggccgattctgggctgtgag

SEQ ID NO: 6100 - DNA, 33 bp, Homo sapien
gagcgtgttgacaggctgattctgggctgtgag

SEQ ID NO: 6101 - DNA, 33 bp, Homo sapien
caaggtatctcaatgaaccagaaatacatggtg

SEQ ID NO: 6102 - DNA, 33 bp, Homo sapien
caaggtatctcaatgagccagaaatacatggtg

SEQ ID NO: 6103 - DNA, 33 bp, Homo sapien
tgtccagtcaagaaaactaaagacagggaggtg

SEQ ID NO: 6104 - DNA, 33 bp, Homo sapien
tgtccagtcaagaaaattaaagacagggaggtg

SEQ ID NO: 6105 - DNA, 33 bp, Homo sapien
ttcttcccagtggaaaagcaaaaccaggaaagg

SEQ ID NO: 6106 - DNA, 33 bp, Homo sapien
ttcttcccagtggaaaggcaaaaccaggaaagg

SEQ ID NO: 6107 - DNA, 33 bp, Homo sapien
taccagggatagaaagcccagtaaacctctgcc

SEQ ID NO: 6108 - DNA, 33 bp, Homo sapien
taccagggatagaaagtccagtaaacctctgcc

SEQ ID NO: 6109 - DNA, 33 bp, Homo sapien
cctttttcataaagcaacaatcccggtgtaccc

SEQ ID NO: 6110 - DNA, 33 bp, Homo sapien
cctttttcataaagcagcaatcccggtgtaccc

SEQ ID NO: 6111 - DNA, 33 bp, Homo sapien
gcctctggaaatggccacgttagaatgtgctgg

SEQ ID NO: 6112 - DNA, 33 bp, Homo sapien
gcctctggaaatggccgcgttagaatgtgctgg

SEQ ID NO: 6113 - DNA, 33 bp, Homo sapien
ttctggaagcttccaaatgaggttggcagatga

SEQ ID NO: 6114 - DNA, 33 bp, Homo sapien
ttctggaagcttccaagtgaggttggcagatga

SEQ ID NO: 6115 - DNA, 33 bp, Homo sapien
ccagaggcttctctcacaaagctgcaagtatgg

SEQ ID NO: 6116 - DNA, 33 bp, Homo sapien
ccagaggcttctctcataaagctgcaagtatgg

SEQ ID NO: 6117 - DNA, 33 bp, Homo sapien
ctcaacagttaacatcaacacagggaggtaatg

SEQ ID NO: 6118 - DNA, 33 bp, Homo sapien
ctcaacagttaacatcgacacagggaggtaatg

SEQ ID NO: 6119 - DNA, 33 bp, Homo sapien
cactttgcaggcactacgttactgaatcttcac

SEQ ID NO: 6120 - DNA, 33 bp, Homo sapien
cactttgcaggcactatgttactgaatcttcac

SEQ ID NO: 6121 - DNA, 33 bp, Homo sapien
gttggtcaaaaaggaacttcctctctcttccct

SEQ ID NO: 6122 - DNA, 33 bp, Homo sapien
gttggtcaaaaaggaatttcctctctcttccct

SEQ ID NO: 6123 - DNA, 33 bp, Homo sapien
gcttttttagtagcaccaggacccttttggtct

SEQ ID NO: 6124 - DNA, 33 bp, Homo sapien
gcttttttagtagcacgaggacccttttggtct

SEQ ID NO: 6125 - DNA, 33 bp, Homo sapien
aagcctacgggttctaaagaggtgcttcaggtg

SEQ ID NO: 6126 - DNA, 33 bp, Homo sapien
aagcctacgggttctacagaggtgcttcaggtg

SEQ ID NO: 6127 - DNA, 33 bp, Homo sapien
gtctagactactatgccctggaagaactggcat

SEQ ID NO: 6128 - DNA, 33 bp, Homo sapien
gtctagactactatgctctggaagaactggcat

SEQ ID NO: 6129 - DNA, 33 bp, Homo sapien
tgtcaggtgttctagagagcttctgtttcatct

SEQ ID NO: 6130 - DNA, 33 bp, Homo sapien
tgtcaggtgttctagatagcttctgtttcatct

SEQ ID NO: 6131 - DNA, 33 bp, Homo sapien
cactctgggtgagacaatgggacggattagatg

SEQ ID NO: 6132 - DNA, 33 bp, Homo sapien
cactctgggtgagacagtgggacggattagatg

SEQ ID NO: 6133 - DNA, 33 bp, Homo sapien
tggtgagacaagaactcagaagaggcacaaaca

SEQ ID NO: 6134 - DNA, 33 bp, Homo sapien
tggtgagacaagaactgagaagaggcacaaaca

SEQ ID NO: 6135 - DNA, 33 bp, Homo sapien
caagtgcgtttgcagcagatggtccctgactcc

SEQ ID NO: 6136 - DNA, 33 bp, Homo sapien
caagtgcgtttgcagccgatggtccctgactcc

SEQ ID NO: 6137 - DNA, 33 bp, Homo sapien
ttttccacccttagaagatgtttacacagagta

SEQ ID NO: 6138 - DNA, 33 bp, Homo sapien
ttttccacccttagaatatgtttacacagagta

SEQ ID NO: 6139 - DNA, 33 bp, Homo sapien
tacaagccagtgccatcagggacaagatcagag

SEQ ID NO: 6140 - DNA, 33 bp, Homo sapien
tacaagccagtgccatgagggacaagatcagag

SEQ ID NO: 6141 - DNA, 33 bp, Homo sapien
gggtgtatataggacacgattcctgctcttggg

SEQ ID NO: 6142 - DNA, 33 bp, Homo sapien
gggtgtatataggacatgattcctgctcttggg

SEQ ID NO: 6143 - DNA, 33 bp, Homo sapien
ctctgctgttctggaacggggttgggtctgcag

SEQ ID NO: 6144 - DNA, 33 bp, Homo sapien
ctctgctgttctggaatggggttgggtctgcag

SEQ ID NO: 6145 - DNA, 33 bp, Homo sapien
tcttatggtagaccacaaaagctcaagaagaaa

SEQ ID NO: 6146 - DNA, 33 bp, Homo sapien
tcttatggtagaccaccaaagctcaagaagaaa

SEQ ID NO: 6147 - DNA, 33 bp, Homo sapien
cttctctctgagttaacagctgaatggcgtgat

SEQ ID NO: 6148 - DNA, 33 bp, Homo sapien
cttctctctgagttaatagctgaatggcgtgat

SEQ ID NO: 6149 - DNA, 33 bp, Homo sapien
tttgtagggatgtcccggattctttaagacatt

SEQ ID NO: 6150 - DNA, 33 bp, Homo sapien
tttgtagggatgtccctgattctttaagacatt

SEQ ID NO: 6151 - DNA, 33 bp, Homo sapien
gaactcactcacccccaacctggaaggagattc

SEQ ID NO: 6152 - DNA, 33 bp, Homo sapien
gaactcactcacccccgacctggaaggagattc

SEQ ID NO: 6153 - DNA, 33 bp, Homo sapien
taatgagggaaaaggaaggaagtagctaggagg

SEQ ID NO: 6154 - DNA, 33 bp, Homo sapien
taatgagggaaaaggagggaagtagctaggagg

SEQ ID NO: 6155 - DNA, 33 bp, Homo sapien
cagaatttgtccttggaagggatgtaatgaggg

SEQ ID NO: 6156 - DNA, 33 bp, Homo sapien
cagaatttgtccttggcagggatgtaatgaggg

SEQ ID NO: 6157 - DNA, 33 bp, Homo sapien
gggttcatctaaacaccattaaacagccattag

SEQ ID NO: 6158 - DNA, 33 bp, Homo sapien
gggttcatctaaacacgattaaacagccattag

SEQ ID NO: 6159 - DNA, 33 bp, Homo sapien
gccattaggcctctgcaattgggaaatggagat

SEQ ID NO: 6160 - DNA, 33 bp, Homo sapien
gccattaggcctctgcgattgggaaatggagat

SEQ ID NO: 6161 - DNA, 33 bp, Homo sapien
tgccctgctagtggggaactcagaggtgagaat

SEQ ID NO: 6162 - DNA, 33 bp, Homo sapien
tgccctgctagtgggggactcagaggtgagaat

SEQ ID NO: 6163 - DNA, 33 bp, Homo sapien
atacattgttctcatacgcggtatcctgggtgc

SEQ ID NO: 6164 - DNA, 33 bp, Homo sapien
atacattgttctcatatgcggtatcctgggtgc

SEQ ID NO: 6165 - DNA, 33 bp, Homo sapien
tccatacattaactaacttaaccttcacaacaa

SEQ ID NO: 6166 - DNA, 33 bp, Homo sapien
tccatacattaactaatttaaccttcacaacaa

SEQ ID NO: 6167 - DNA, 33 bp, Homo sapien
attctactagttatagccctgcccagactcaag

SEQ ID NO: 6168 - DNA, 33 bp, Homo sapien
attctactagttataggcctgcccagactcaag

SEQ ID NO: 6169 - DNA, 33 bp, Homo sapien
cctcaaccaggaaatgaagatgataataatact

SEQ ID NO: 6170 - DNA, 33 bp, Homo sapien
cctcaaccaggaaatggagatgataataatact

SEQ ID NO: 6171 - DNA, 33 bp, Homo sapien
caaatttgttctctagaagcatggtgccaattt

SEQ ID NO: 6172 - DNA, 33 bp, Homo sapien
caaatttgttctctaggagcatggtgccaattt

SEQ ID NO: 6173 - DNA, 33 bp, Homo sapien
cattcattcaacaagacgtattgagaattgttt

SEQ ID NO: 6174 - DNA, 33 bp, Homo sapien
cattcattcaacaagatgtattgagaattgttt

SEQ ID NO: 6175 - DNA, 33 bp, Homo sapien
cccacctcccggtagcactcaatctaattaatg

SEQ ID NO: 6176 - DNA, 33 bp, Homo sapien
cccacctcccggtagcgctcaatctaattaatg

SEQ ID NO: 6177 - DNA, 33 bp, Homo sapien
ctaggagagccagagcaacaccattttaaaatc

SEQ ID NO: 6178 - DNA, 33 bp, Homo sapien
ctaggagagccagagcgacaccattttaaaatc

SEQ ID NO: 6179 - DNA, 33 bp, Homo sapien
tctaggaagtgggaacagaatgaacaagttata

SEQ ID NO: 6180 - DNA, 33 bp, Homo sapien
tctaggaagtgggaacggaatgaacaagttata

SEQ ID NO: 6181 - DNA, 33 bp, Homo sapien
ccaaagttaatattgacactgcacgcatatgac

SEQ ID NO: 6182 - DNA, 33 bp, Homo sapien
ccaaagttaatattgatactgcacgcatatgac

SEQ ID NO: 6183 - DNA, 33 bp, Homo sapien
ccagctctgccatctccaagctgtggaacttgg

SEQ ID NO: 6184 - DNA, 33 bp, Homo sapien
ccagctctgccatctctaagctgtggaacttgg

SEQ ID NO: 6185 - DNA, 33 bp, Homo sapien
ttactgtcctctcgtcactgctgtaacacgggc

SEQ ID NO: 6186 - DNA, 33 bp, Homo sapien
ttactgtcctctcgtccctgctgtaacacgggc

SEQ ID NO: 6187 - DNA, 33 bp, Homo sapien
gggaatcaggtttgcaagaaaggccagcaggag

SEQ ID NO: 6188 - DNA, 33 bp, Homo sapien
gggaatcaggtttgcaggaaaggccagcaggag

SEQ ID NO: 6189 - DNA, 33 bp, Homo sapien
tgtctctcttagcctcaatgtcctgatctgtaa

SEQ ID NO: 6190 - DNA, 33 bp, Homo sapien
tgtctctcttagcctcgatgtcctgatctgtaa

SEQ ID NO: 6191 - DNA, 33 bp, Homo sapien
cgtccgaatggaggagaatttcatacagaaggc

SEQ ID NO: 6192 - DNA, 33 bp, Homo sapien
cgtccgaatggaggagcatttcatacagaaggc

SEQ ID NO: 6193 - DNA, 33 bp, Homo sapien
tgcagccggtggccggcaccaatttcttccata

SEQ ID NO: 6194 - DNA, 33 bp, Homo sapien
tgcagccggtggccgggaccaatttcttccata

SEQ ID NO: 6195 - DNA, 33 bp, Homo sapien
ccaaataagatgctacaggttccgctgatgctc

SEQ ID NO: 6196 - DNA, 33 bp, Homo sapien
ccaaataagatgctacgggttccgctgatgctc

SEQ ID NO: 6197 - DNA, 33 bp, Homo sapien
gcaacattctggtaacaacactggctctcactc

SEQ ID NO: 6198 - DNA, 33 bp, Homo sapien
gcaacattctggtaacgacactggctctcactc

SEQ ID NO: 6199 - DNA, 33 bp, Homo sapien
tttgttagttctcacaatatcttcttgaggctg

SEQ ID NO: 6200 - DNA, 33 bp, Homo sapien
tttgttagttctcacagtatcttcttgaggctg

SEQ ID NO: 6201 - DNA, 33 bp, Homo sapien
aaataatagagggaaaactcccggcccaggaac

SEQ ID NO: 6202 - DNA, 33 bp, Homo sapien
aaataatagagggaaagctcccggcccaggaac

SEQ ID NO: 6203 - DNA, 33 bp, Homo sapien
ttttaaagcttaaaaccgcaaagcaaatgcacc

SEQ ID NO: 6204 - DNA, 33 bp, Homo sapien
ttttaaagcttaaaactgcaaagcaaatgcacc

SEQ ID NO: 6205 - DNA, 33 bp, Homo sapien
aggggaggccagagaacgcttccttcgtctgtt

SEQ ID NO: 6206 - DNA, 33 bp, Homo sapien
aggggaggccagagaatgcttccttcgtctgtt

SEQ ID NO: 6207 - DNA, 33 bp, Homo sapien
tattctgatctccttcaatttcaagtggaacta

SEQ ID NO: 6208 - DNA, 33 bp, Homo sapien
tattctgatctccttcgatttcaagtggaacta

SEQ ID NO: 6209 - DNA, 33 bp, Homo sapien
tgggataactcaggtaggctttgcactggctcc

SEQ ID NO: 6210 - DNA, 33 bp, Homo sapien
tgggataactcaggtatgctttgcactggctcc

SEQ ID NO: 6211 - DNA, 33 bp, Homo sapien
tagcagttgtacaccactgaagctggtacctct

SEQ ID NO: 6212 - DNA, 33 bp, Homo sapien
tagcagttgtacaccattgaagctggtacctct

SEQ ID NO: 6213 - DNA, 33 bp, Homo sapien
ggaaaaacggccccacacattggaatagtggcg

SEQ ID NO: 6214 - DNA, 33 bp, Homo sapien
ggaaaaacggccccacgcattggaatagtggcg

SEQ ID NO: 6215 - DNA, 33 bp, Homo sapien
ctcagaagattaaggcccttgcccaaggttcca

SEQ ID NO: 6216 - DNA, 33 bp, Homo sapien
ctcagaagattaaggctcttgcccaaggttcca

SEQ ID NO: 6217 - DNA, 33 bp, Homo sapien
aacttcggtagttacaagacacgtgaaatcaaa

SEQ ID NO: 6218 - DNA, 33 bp, Homo sapien
aacttcggtagttacatgacacgtgaaatcaaa

SEQ ID NO: 6219 - DNA, 33 bp, Homo sapien
aaaaacagattgaaaaaaagaaacagtggaaaa

SEQ ID NO: 6220 - DNA, 33 bp, Homo sapien
aaaaacagattgaaaacaagaaacagtggaaaa

SEQ ID NO: 6221 - DNA, 33 bp, Homo sapien
gagatgtcttcctctaagcttctgcaggcagcc

SEQ ID NO: 6222 - DNA, 33 bp, Homo sapien
gagatgtcttcctctatgcttctgcaggcagcc

SEQ ID NO: 6223 - DNA, 33 bp, Homo sapien
atctctaaaatggagacgataggcatacctact

SEQ ID NO: 6224 - DNA, 33 bp, Homo sapien
atctctaaaatggagatgataggcatacctact

SEQ ID NO: 6225 - DNA, 33 bp, Homo sapien
gacatctaagtaaccaataatttctggaagaac

SEQ ID NO: 6226 - DNA, 33 bp, Homo sapien
gacatctaagtaaccagtaatttctggaagaac

SEQ ID NO: 6227 - DNA, 33 bp, Homo sapien
ggtggcgacattcgctaagccccaaagcacagg

SEQ ID NO: 6228 - DNA, 33 bp, Homo sapien
ggtggcgacattcgctgagccccaaagcacagg

SEQ ID NO: 6229 - DNA, 33 bp, Homo sapien
cagcctgaccttgagacggttgccctggaagac

SEQ ID NO: 6230 - DNA, 33 bp, Homo sapien
cagcctgaccttgagatggttgccctggaagac

SEQ ID NO: 6231 - DNA, 33 bp, Homo sapien
tttgagatacacagatcatatgtttgaggtaga

SEQ ID NO: 6232 - DNA, 33 bp, Homo sapien
tttgagatacacagattatatgtttgaggtaga

SEQ ID NO: 6233 - DNA, 33 bp, Homo sapien
cctcacagggttctcacgtggattaaaagacat

SEQ ID NO: 6234 - DNA, 33 bp, Homo sapien
cctcacagggttctcatgtggattaaaagacat

SEQ ID NO: 6235 - DNA, 33 bp, Homo sapien
gaaagctgcattgagcaatttcaggggtgggcc

SEQ ID NO: 6236 - DNA, 33 bp, Homo sapien
gaaagctgcattgagcgatttcaggggtgggcc

SEQ ID NO: 6237 - DNA, 33 bp, Homo sapien
gaacatcttgtcagcacatggagcctgagaatg

SEQ ID NO: 6238 - DNA, 33 bp, Homo sapien
gaacatcttgtcagcatatggagcctgagaatg

SEQ ID NO: 6239 - DNA, 33 bp, Homo sapien
agggtaccagtatccaaggcagagtctggtatg

SEQ ID NO: 6240 - DNA, 33 bp, Homo sapien
agggtaccagtatccagggcagagtctggtatg

SEQ ID NO: 6241 - DNA, 33 bp, Homo sapien
aatcagactgaaaccacgaagagactccactgg

SEQ ID NO: 6242 - DNA, 33 bp, Homo sapien
aatcagactgaaaccatgaagagactccactgg

SEQ ID NO: 6243 - DNA, 33 bp, Homo sapien
ggtccagtctggcaagcattggtccagcagcag

SEQ ID NO: 6244 - DNA, 33 bp, Homo sapien
ggtccagtctggcaaggattggtccagcagcag

SEQ ID NO: 6245 - DNA, 33 bp, Homo sapien
agaacaagtggttgaaatgttagcaacctctaa

SEQ ID NO: 6246 - DNA, 33 bp, Homo sapien
agaacaagtggttgaactgttagcaacctctaa

SEQ ID NO: 6247 - DNA, 33 bp, Homo sapien
tgtgacacatttaaaacgctaagccttgagagt

SEQ ID NO: 6248 - DNA, 33 bp, Homo sapien
tgtgacacatttaaaatgctaagccttgagagt

SEQ ID NO: 6249 - DNA, 33 bp, Homo sapien
gtgttggacaactggaaagacacctggaaaaaa

SEQ ID NO: 6250 - DNA, 33 bp, Homo sapien
gtgttggacaactggatagacacctggaaaaaa

SEQ ID NO: 6251 - DNA, 33 bp, Homo sapien
gaagaccgtagagcaacgccaatgagagctaat

SEQ ID NO: 6252 - DNA, 33 bp, Homo sapien
gaagaccgtagagcaatgccaatgagagctaat

SEQ ID NO: 6253 - DNA, 33 bp, Homo sapien
actgcaacacctctgacggaatgaactttggcc

SEQ ID NO: 6254 - DNA, 33 bp, Homo sapien
actgcaacacctctgatggaatgaactttggcc

SEQ ID NO: 6255 - DNA, 33 bp, Homo sapien
cctattactatcttcacagtgcaggtgagggag

SEQ ID NO: 6256 - DNA, 33 bp, Homo sapien
cctattactatcttcatagtgcaggtgagggag

SEQ ID NO: 6257 - DNA, 33 bp, Homo sapien
ccagagtggttggtacactaagtctcccttact

SEQ ID NO: 6258 - DNA, 33 bp, Homo sapien
ccagagtggttggtacgctaagtctcccttact

SEQ ID NO: 6259 - DNA, 33 bp, Homo sapien
ttctttacatatattaagctaggaaagtctttg

SEQ ID NO: 6260 - DNA, 33 bp, Homo sapien
ttctttacatatattaggctaggaaagtctttg

SEQ ID NO: 6261 - DNA, 33 bp, Homo sapien
ccccagatgaaagaaaactggggactagtgtgg

SEQ ID NO: 6262 - DNA, 33 bp, Homo sapien
ccccagatgaaagaaacctggggactagtgtgg

SEQ ID NO: 6263 - DNA, 33 bp, Homo sapien
agaggctcctgagtacccctagactggccacct

SEQ ID NO: 6264 - DNA, 33 bp, Homo sapien
agaggctcctgagtacgcctagactggccacct

SEQ ID NO: 6265 - DNA, 33 bp, Homo sapien
taaggtaattgtccaaaggcaatgtctacaacc

SEQ ID NO: 6266 - DNA, 33 bp, Homo sapien
taaggtaattgtccaagggcaatgtctacaacc

SEQ ID NO: 6267 - DNA, 33 bp, Homo sapien
tgccggaacaaaagaccaagtgtcagacggtgt

SEQ ID NO: 6268 - DNA, 33 bp, Homo sapien
tgccggaacaaaagacgaagtgtcagacggtgt

SEQ ID NO: 6269 - DNA, 33 bp, Homo sapien
aagagctgaaattcaccaggacctgatatttac

SEQ ID NO: 6270 - DNA, 33 bp, Homo sapien
aagagctgaaattcactaggacctgatatttac

SEQ ID NO: 6271 - DNA, 33 bp, Homo sapien
gctctcttatcatccaactttctaggttaactt

SEQ ID NO: 6272 - DNA, 33 bp, Homo sapien
gctctcttatcatccagctttctaggttaactt

SEQ ID NO: 6273 - DNA, 33 bp, Homo sapien
tcatttttgcaatgccaacctggtaccagatac

SEQ ID NO: 6274 - DNA, 33 bp, Homo sapien
tcatttttgcaatgcctacctggtaccagatac

SEQ ID NO: 6275 - DNA, 33 bp, Homo sapien
gaggccagcacaatcccatacagtcattaacac

SEQ ID NO: 6276 - DNA, 33 bp, Homo sapien
gaggccagcacaatccgatacagtcattaacac

SEQ ID NO: 6277 - DNA, 33 bp, Homo sapien
tgggagaagctgagtcccagaaaggtaacgtga

SEQ ID NO: 6278 - DNA, 33 bp, Homo sapien
tgggagaagctgagtcgcagaaaggtaacgtga

SEQ ID NO: 6279 - DNA, 33 bp, Homo sapien
tgagaatacagctctacggattttgtcaagtgt

SEQ ID NO: 6280 - DNA, 33 bp, Homo sapien
tgagaatacagctctatggattttgtcaagtgt

SEQ ID NO: 6281 - DNA, 33 bp, Homo sapien
gggaggagtctgatcgaagtgcagtcatgggtc

SEQ ID NO: 6282 - DNA, 33 bp, Homo sapien
gggaggagtctgatcgcagtgcagtcatgggtc

SEQ ID NO: 6283 - DNA, 33 bp, Homo sapien
acatatacacccgcgaagagctggcgcagagga

SEQ ID NO: 6284 - DNA, 33 bp, Homo sapien
acatatacacccgcgaggagctggcgcagagga

SEQ ID NO: 6285 - DNA, 33 bp, Homo sapien
tttccatccagggaaacgaacaagctgagtcac

SEQ ID NO: 6286 - DNA, 33 bp, Homo sapien
tttccatccagggaaatgaacaagctgagtcac

SEQ ID NO: 6287 - DNA, 33 bp, Homo sapien
tcaaacaaaagcacaacgtccagtcaatcaggg

SEQ ID NO: 6288 - DNA, 33 bp, Homo sapien
tcaaacaaaagcacaatgtccagtcaatcaggg

SEQ ID NO: 6289 - DNA, 33 bp, Homo sapien
acatggagctggaatccacatctaggtatttgg

SEQ ID NO: 6290 - DNA, 33 bp, Homo sapien
acatggagctggaatctacatctaggtatttgg

SEQ ID NO: 6291 - DNA, 33 bp, Homo sapien
tttccctctctgtaaacgggcagctcatacgag

SEQ ID NO: 6292 - DNA, 33 bp, Homo sapien
tttccctctctgtaaatgggcagctcatacgag

SEQ ID NO: 6293 - DNA, 33 bp, Homo sapien
agtgacatgagtacaaatgtgcgtgtgagtgcg

SEQ ID NO: 6294 - DNA, 33 bp, Homo sapien
agtgacatgagtacaagtgtgcgtgtgagtgcg

SEQ ID NO: 6295 - DNA, 33 bp, Homo sapien
tttctgcctgtggtcactactcctaagagcctg

SEQ ID NO: 6296 - DNA, 33 bp, Homo sapien
tttctgcctgtggtcattactcctaagagcctg

SEQ ID NO: 6297 - DNA, 33 bp, Homo sapien
gagctctgttccaagaaagggctgtgcttccac

SEQ ID NO: 6298 - DNA, 33 bp, Homo sapien
gagctctgttccaagagagggctgtgcttccac

SEQ ID NO: 6299 - DNA, 33 bp, Homo sapien
ccaaacctgagcctgtcaaaaatctcaatttgc

SEQ ID NO: 6300 - DNA, 33 bp, Homo sapien
ccaaacctgagcctgttaaaaatctcaatttgc

SEQ ID NO: 6301 - DNA, 33 bp, Homo sapien
cccattttgcagactcagagaggtgagccccgt

SEQ ID NO: 6302 - DNA, 33 bp, Homo sapien
cccattttgcagactcggagaggtgagccccgt

SEQ ID NO: 6303 - DNA, 33 bp, Homo sapien
agagtcataactagggacattgcatggtttggg

SEQ ID NO: 6304 - DNA, 33 bp, Homo sapien
agagtcataactaggggcattgcatggtttggg

SEQ ID NO: 6305 - DNA, 33 bp, Homo sapien
aaggaagcagctggaagcattctagggtttcca

SEQ ID NO: 6306 - DNA, 33 bp, Homo sapien
aaggaagcagctggaatcattctagggtttcca

SEQ ID NO: 6307 - DNA, 33 bp, Homo sapien
atgggcactgagagggaaatcgaagatgattgg

SEQ ID NO: 6308 - DNA, 33 bp, Homo sapien
atgggcactgagaggggaatcgaagatgattgg

SEQ ID NO: 6309 - DNA, 33 bp, Homo sapien
gtgaattgctacacacacgtaataccatgacac

SEQ ID NO: 6310 - DNA, 33 bp, Homo sapien
gtgaattgctacacacgcgtaataccatgacac

SEQ ID NO: 6311 - DNA, 33 bp, Homo sapien
ggcttatgttacttaacaaaatgacctgcagtt

SEQ ID NO: 6312 - DNA, 33 bp, Homo sapien
ggcttatgttacttaataaaatgacctgcagtt

SEQ ID NO: 6313 - DNA, 33 bp, Homo sapien
ggacagatcgcttacactgcctggagcagaaca

SEQ ID NO: 6314 - DNA, 33 bp, Homo sapien
ggacagatcgcttacattgcctggagcagaaca

SEQ ID NO: 6315 - DNA, 33 bp, Homo sapien
tgtgaccagttttcaaactaccagccctgggca

SEQ ID NO: 6316 - DNA, 33 bp, Homo sapien
tgtgaccagttttcaagctaccagccctgggca

SEQ ID NO: 6317 - DNA, 33 bp, Homo sapien
ttcagatggaagtaaaatctgtcccactgtgtc

SEQ ID NO: 6318 - DNA, 33 bp, Homo sapien
ttcagatggaagtaaagtctgtcccactgtgtc

SEQ ID NO: 6319 - DNA, 33 bp, Homo sapien
aaaggagcttgaaatgcagattgaactggaacc

SEQ ID NO: 6320 - DNA, 33 bp, Homo sapien
aaaggagcttgaaatggagattgaactggaacc

SEQ ID NO: 6321 - DNA, 33 bp, Homo sapien
atattttttctgtatccatctcttactcttcct

SEQ ID NO: 6322 - DNA, 33 bp, Homo sapien
atattttttctgtatcgatctcttactcttcct

SEQ ID NO: 6323 - DNA, 33 bp, Homo sapien
ttctattctgctattaaactcattcagtgatct

SEQ ID NO: 6324 - DNA, 33 bp, Homo sapien
ttctattctgctattagactcattcagtgatct

SEQ ID NO: 6325 - DNA, 33 bp, Homo sapien
attgagagtctcacaacgtaatattcagaaagt

SEQ ID NO: 6326 - DNA, 33 bp, Homo sapien
attgagagtctcacaatgtaatattcagaaagt

SEQ ID NO: 6327 - DNA, 33 bp, Homo sapien
tgtccactccatgcgaggtcctgtagttaagaa

SEQ ID NO: 6328 - DNA, 33 bp, Homo sapien
tgtccactccatgcgatgtcctgtagttaagaa

SEQ ID NO: 6329 - DNA, 33 bp, Homo sapien
ataaaatctctaagcacctgtcaagccaaaagt

SEQ ID NO: 6330 - DNA, 33 bp, Homo sapien
ataaaatctctaagcatctgtcaagccaaaagt

SEQ ID NO: 6331 - DNA, 33 bp, Homo sapien
caagactcctttgacaagacaagcaggagttgt

SEQ ID NO: 6332 - DNA, 33 bp, Homo sapien
caagactcctttgacaggacaagcaggagttgt

SEQ ID NO: 6333 - DNA, 33 bp, Homo sapien
ctctgaccggtatgtaccaggtataagctggaa

SEQ ID NO: 6334 - DNA, 33 bp, Homo sapien
ctctgaccggtatgtatcaggtataagctggaa

SEQ ID NO: 6335 - DNA, 33 bp, Homo sapien
cccagagaggttcaggaattttcgtaagatcac

SEQ ID NO: 6336 - DNA, 33 bp, Homo sapien
cccagagaggttcagggattttcgtaagatcac

SEQ ID NO: 6337 - DNA, 33 bp, Homo sapien
gtctgactatgactccaagttttgctacttgct

SEQ ID NO: 6338 - DNA, 33 bp, Homo sapien
gtctgactatgactcccagttttgctacttgct

SEQ ID NO: 6339 - DNA, 33 bp, Homo sapien
agatctgcatccaaaacacttacaggcagacct

SEQ ID NO: 6340 - DNA, 33 bp, Homo sapien
agatctgcatccaaaatacttacaggcagacct

SEQ ID NO: 6341 - DNA, 33 bp, Homo sapien
aaaccactactaccaaccgccagaaaagttata

SEQ ID NO: 6342 - DNA, 33 bp, Homo sapien
aaaccactactaccaatcgccagaaaagttata

SEQ ID NO: 6343 - DNA, 33 bp, Homo sapien
gtttctccatctgaaacgtaaggcctgttgggt

SEQ ID NO: 6344 - DNA, 33 bp, Homo sapien
gtttctccatctgaaatgtaaggcctgttgggt

SEQ ID NO: 6345 - DNA, 33 bp, Homo sapien
gaattagaggcacagacaaattaggcaactttc

SEQ ID NO: 6346 - DNA, 33 bp, Homo sapien
gaattagaggcacagagaaattaggcaactttc

SEQ ID NO: 6347 - DNA, 33 bp, Homo sapien
ctagtagctttgactgcacccctaactaacaca

SEQ ID NO: 6348 - DNA, 33 bp, Homo sapien
ctagtagctttgactgtacccctaactaacaca

SEQ ID NO: 6349 - DNA, 33 bp, Homo sapien
ccttcctgggggctgacattttggtgggagaat

SEQ ID NO: 6350 - DNA, 33 bp, Homo sapien
ccttcctgggggctgatattttggtgggagaat

SEQ ID NO: 6351 - DNA, 33 bp, Homo sapien
atatcctagttgggcaaacaggcaataaacaag

SEQ ID NO: 6352 - DNA, 33 bp, Homo sapien
atatcctagttgggcagacaggcaataaacaag

SEQ ID NO: 6353 - DNA, 33 bp, Homo sapien
tggctggggaagatgaaaagcacggcagaacag

SEQ ID NO: 6354 - DNA, 33 bp, Homo sapien
tggctggggaagatgacaagcacggcagaacag

SEQ ID NO: 6355 - DNA, 33 bp, Homo sapien
gcttggaagcatgagcaagtccaactccaacag

SEQ ID NO: 6356 - DNA, 33 bp, Homo sapien
gcttggaagcatgagcgagtccaactccaacag

SEQ ID NO: 6357 - DNA, 33 bp, Homo sapien
aaggcagagaacaaacaatttcaataaggaatg

SEQ ID NO: 6358 - DNA, 33 bp, Homo sapien
aaggcagagaacaaacgatttcaataaggaatg

SEQ ID NO: 6359 - DNA, 33 bp, Homo sapien
agtcacttctcccctacgtgtgccaggccctgt

SEQ ID NO: 6360 - DNA, 33 bp, Homo sapien
agtcacttctcccctatgtgtgccaggccctgt

SEQ ID NO: 6361 - DNA, 33 bp, Homo sapien
agggacactgccaggaataccgggctgggtaca

SEQ ID NO: 6362 - DNA, 33 bp, Homo sapien
agggacactgccaggagtaccgggctgggtaca

SEQ ID NO: 6363 - DNA, 33 bp, Homo sapien
ctgtagttaagcctcaaggtaattaggcaaggc

SEQ ID NO: 6364 - DNA, 33 bp, Homo sapien
ctgtagttaagcctcagggtaattaggcaaggc

SEQ ID NO: 6365 - DNA, 33 bp, Homo sapien
ttgctcggatacctacagcctctttgcttgttt

SEQ ID NO: 6366 - DNA, 33 bp, Homo sapien
ttgctcggatacctacggcctctttgcttgttt

SEQ ID NO: 6367 - DNA, 33 bp, Homo sapien
ctattaactgtttataaaatcaaaaagctatga

SEQ ID NO: 6368 - DNA, 33 bp, Homo sapien
ctattaactgtttatagaatcaaaaagctatga

SEQ ID NO: 6369 - DNA, 33 bp, Homo sapien
tcatcagcatcacttcaccctgtcaactgcccc

SEQ ID NO: 6370 - DNA, 33 bp, Homo sapien
tcatcagcatcacttcgccctgtcaactgcccc

SEQ ID NO: 6371 - DNA, 33 bp, Homo sapien
tgtagaatccctgagaactgggaaagcctgtaa

SEQ ID NO: 6372 - DNA, 33 bp, Homo sapien
tgtagaatccctgagacctgggaaagcctgtaa

SEQ ID NO: 6373 - DNA, 33 bp, Homo sapien
cccccaatgtgtaagcacagcagaagttatttc

SEQ ID NO: 6374 - DNA, 33 bp, Homo sapien
cccccaatgtgtaagcgcagcagaagttatttc

SEQ ID NO: 6375 - DNA, 33 bp, Homo sapien
caatggtttacaggaaaaaagatggatttctct

SEQ ID NO: 6376 - DNA, 33 bp, Homo sapien
caatggtttacaggaacaaagatggatttctct

SEQ ID NO: 6377 - DNA, 33 bp, Homo sapien
gaggcattcaaccactgactcaaagaatgcatt

SEQ ID NO: 6378 - DNA, 33 bp, Homo sapien
gaggcattcaaccacttactcaaagaatgcatt

SEQ ID NO: 6379 - DNA, 33 bp, Homo sapien
tatgttgtcccgcaaaactaaagaggtttataa

SEQ ID NO: 6380 - DNA, 33 bp, Homo sapien
tatgttgtcccgcaaatctaaagaggtttataa

SEQ ID NO: 6381 - DNA, 33 bp, Homo sapien
ggacaaactagagcacactttgaactgggcatc

SEQ ID NO: 6382 - DNA, 33 bp, Homo sapien
ggacaaactagagcaccctttgaactgggcatc

SEQ ID NO: 6383 - DNA, 33 bp, Homo sapien
ggaatgctctatgaacgcctgctgcctctagac

SEQ ID NO: 6384 - DNA, 33 bp, Homo sapien
ggaatgctctatgaactcctgctgcctctagac

SEQ ID NO: 6385 - DNA, 33 bp, Homo sapien
catggccttcgtagatcagatcccacttgtaga

SEQ ID NO: 6386 - DNA, 33 bp, Homo sapien
catggccttcgtagattagatcccacttgtaga

SEQ ID NO: 6387 - DNA, 33 bp, Homo sapien
tcacttctataaacgacagtcattgctattatg

SEQ ID NO: 6388 - DNA, 33 bp, Homo sapien
tcacttctataaacgatagtcattgctattatg

SEQ ID NO: 6389 - DNA, 33 bp, Homo sapien
agtgaaatcacttgacccagtgcatcggtagca

SEQ ID NO: 6390 - DNA, 33 bp, Homo sapien
agtgaaatcacttgactcagtgcatcggtagca

SEQ ID NO: 6391 - DNA, 33 bp, Homo sapien
catattagtaccttaaaatttgccattgcagga

SEQ ID NO: 6392 - DNA, 33 bp, Homo sapien
catattagtaccttaacatttgccattgcagga

SEQ ID NO: 6393 - DNA, 33 bp, Homo sapien
tgaaaaccctgctttcaccgtccacaccccata

SEQ ID NO: 6394 - DNA, 33 bp, Homo sapien
tgaaaaccctgctttcgccgtccacaccccata

SEQ ID NO: 6395 - DNA, 33 bp, Homo sapien
atgcccctgggttacaatgccacggtcagatgc

SEQ ID NO: 6396 - DNA, 33 bp, Homo sapien
atgcccctgggttacagtgccacggtcagatgc

SEQ ID NO: 6397 - DNA, 33 bp, Homo sapien
gaaaaggagggtatacacaggctccgaataaac

SEQ ID NO: 6398 - DNA, 33 bp, Homo sapien
gaaaaggagggtatacgcaggctccgaataaac

SEQ ID NO: 6399 - DNA, 33 bp, Homo sapien
cctgccccttcccagccagtgaggaccatgacg

SEQ ID NO: 6400 - DNA, 33 bp, Homo sapien
cctgccccttcccagctagtgaggaccatgacg

SEQ ID NO: 6401 - DNA, 33 bp, Homo sapien
aggcacagtctctcagcaagtggagaaaaggga

SEQ ID NO: 6402 - DNA, 33 bp, Homo sapien
aggcacagtctctcaggaagtggagaaaaggga

SEQ ID NO: 6403 - DNA, 33 bp, Homo sapien
tcctggcttttgatcgcattgagaggtgaaggc

SEQ ID NO: 6404 - DNA, 33 bp, Homo sapien
tcctggcttttgatcgtattgagaggtgaaggc

SEQ ID NO: 6405 - DNA, 33 bp, Homo sapien
atttgttccttctcaaaccctgggagagcaaca

SEQ ID NO: 6406 - DNA, 33 bp, Homo sapien
atttgttccttctcaatccctgggagagcaaca

SEQ ID NO: 6407 - DNA, 33 bp, Homo sapien
atgtgtttgtgtcataaatgcctttaagaaaat

SEQ ID NO: 6408 - DNA, 33 bp, Homo sapien
atgtgtttgtgtcatagatgcctttaagaaaat

SEQ ID NO: 6409 - DNA, 33 bp, Homo sapien
ggtattgtgaggattcaattgttaaaaatgtag

SEQ ID NO: 6410 - DNA, 33 bp, Homo sapien
ggtattgtgaggattcgattgttaaaaatgtag

SEQ ID NO: 6411 - DNA, 33 bp, Homo sapien
aatggcagagacccacacctatccgattccaac

SEQ ID NO: 6412 - DNA, 33 bp, Homo sapien
aatggcagagacccacgcctatccgattccaac

SEQ ID NO: 6413 - DNA, 33 bp, Homo sapien
ttccaacattctcctaagaggactgttttccca

SEQ ID NO: 6414 - DNA, 33 bp, Homo sapien
ttccaacattctcctatgaggactgttttccca

SEQ ID NO: 6415 - DNA, 33 bp, Homo sapien
tttttacctttaaaagaccacttagatatttat

SEQ ID NO: 6416 - DNA, 33 bp, Homo sapien
tttttacctttaaaaggccacttagatatttat

SEQ ID NO: 6417 - DNA, 33 bp, Homo sapien
taacagggttattgccacaaacagactcctcca

SEQ ID NO: 6418 - DNA, 33 bp, Homo sapien
taacagggttattgccgcaaacagactcctcca

SEQ ID NO: 6419 - DNA, 33 bp, Homo sapien
ggcagggagagttggaatcactgctgtgccctg

SEQ ID NO: 6420 - DNA, 33 bp, Homo sapien
ggcagggagagttggagtcactgctgtgccctg

SEQ ID NO: 6421 - DNA, 33 bp, Homo sapien
acaccttgggaggtccaattattacccgcccct

SEQ ID NO: 6422 - DNA, 33 bp, Homo sapien
acaccttgggaggtccgattattacccgcccct

SEQ ID NO: 6423 - DNA, 33 bp, Homo sapien
tgctccaaaattccataatagtaccatcctgtc

SEQ ID NO: 6424 - DNA, 33 bp, Homo sapien
tgctccaaaattccatgatagtaccatcctgtc

SEQ ID NO: 6425 - DNA, 33 bp, Homo sapien
gcttggaactctctgcacgtacacttccccttg

SEQ ID NO: 6426 - DNA, 33 bp, Homo sapien
gcttggaactctctgcgcgtacacttccccttg

SEQ ID NO: 6427 - DNA, 33 bp, Homo sapien
aaatcgctgaacaaaaatgacgggtgcaaaaac

SEQ ID NO: 6428 - DNA, 33 bp, Homo sapien
aaatcgctgaacaaaactgacgggtgcaaaaac

SEQ ID NO: 6429 - DNA, 33 bp, Homo sapien
gttctttaccgaaaataaaggtcagaagcattt

SEQ ID NO: 6430 - DNA, 33 bp, Homo sapien
gttctttaccgaaaatgaaggtcagaagcattt

SEQ ID NO: 6431 - DNA, 33 bp, Homo sapien
tttgtctcttgggatacggtggcttctctactg

SEQ ID NO: 6432 - DNA, 33 bp, Homo sapien
tttgtctcttgggatatggtggcttctctactg

SEQ ID NO: 6433 - DNA, 33 bp, Homo sapien
gataagaccctctttcaccaagccgatttaaga

SEQ ID NO: 6434 - DNA, 33 bp, Homo sapien
gataagaccctctttcgccaagccgatttaaga

SEQ ID NO: 6435 - DNA, 33 bp, Homo sapien
agaacatggcgatcaacagcttagggcagccgg

SEQ ID NO: 6436 - DNA, 33 bp, Homo sapien
agaacatggcgatcaagagcttagggcagccgg

SEQ ID NO: 6437 - DNA, 33 bp, Homo sapien
gtttgtcactttggacagagtggcctcagtttc

SEQ ID NO: 6438 - DNA, 33 bp, Homo sapien
gtttgtcactttggacggagtggcctcagtttc

SEQ ID NO: 6439 - DNA, 33 bp, Homo sapien
ttgtatttcagagaaacggtgagtcatgttttt

SEQ ID NO: 6440 - DNA, 33 bp, Homo sapien
ttgtatttcagagaaatggtgagtcatgttttt

SEQ ID NO: 6441 - DNA, 33 bp, Homo sapien
aaggaaggctcgcggactagggcacagtcttgt

SEQ ID NO: 6442 - DNA, 33 bp, Homo sapien
aaggaaggctcgcggagtagggcacagtcttgt

SEQ ID NO: 6443 - DNA, 33 bp, Homo sapien
tttctgggaagaacgcaaggcatgtgctaaggt

SEQ ID NO: 6444 - DNA, 33 bp, Homo sapien
tttctgggaagaacgcgaggcatgtgctaaggt

SEQ ID NO: 6445 - DNA, 33 bp, Homo sapien
aaattcccacaacgaacgccataaaaaaatgaa

SEQ ID NO: 6446 - DNA, 33 bp, Homo sapien
aaattcccacaacgaatgccataaaaaaatgaa

SEQ ID NO: 6447 - DNA, 33 bp, Homo sapien
ggctggtctttaatcccgaactgaatcattgga

SEQ ID NO: 6448 - DNA, 33 bp, Homo sapien
ggctggtctttaatcctgaactgaatcattgga

SEQ ID NO: 6449 - DNA, 33 bp, Homo sapien
aagctgcttagtggtacgcacgtgctaggtgaa

SEQ ID NO: 6450 - DNA, 33 bp, Homo sapien
aagctgcttagtggtatgcacgtgctaggtgaa

SEQ ID NO: 6451 - DNA, 33 bp, Homo sapien
cccagctctaatacaactccaagcaactactgg

SEQ ID NO: 6452 - DNA, 33 bp, Homo sapien
cccagctctaatacaattccaagcaactactgg

SEQ ID NO: 6453 - DNA, 33 bp, Homo sapien
gccttcgttagaacagcctcttccagatgagcg

SEQ ID NO: 6454 - DNA, 33 bp, Homo sapien
gccttcgttagaacagtctcttccagatgagcg

SEQ ID NO: 6455 - DNA, 33 bp, Homo sapien
ggtatgtttttaaaagcccaggtctggagtctg

SEQ ID NO: 6456 - DNA, 33 bp, Homo sapien
ggtatgtttttaaaaggccaggtctggagtctg

SEQ ID NO: 6457 - DNA, 33 bp, Homo sapien
aagtctgtgctttggaaaaggagcttgtaggac

SEQ ID NO: 6458 - DNA, 33 bp, Homo sapien
aagtctgtgctttggagaaggagcttgtaggac

SEQ ID NO: 6459 - DNA, 33 bp, Homo sapien
cctgctccagcttatgcaggttcgggatggaat

SEQ ID NO: 6460 - DNA, 33 bp, Homo sapien
cctgctccagcttatgtaggttcgggatggaat

SEQ ID NO: 6461 - DNA, 33 bp, Homo sapien
tctctcacttcaattacgataaaagcctgtcaa

SEQ ID NO: 6462 - DNA, 33 bp, Homo sapien
tctctcacttcaattatgataaaagcctgtcaa

SEQ ID NO: 6463 - DNA, 33 bp, Homo sapien
aaatggtttaacaggaacacatatttgggcata

SEQ ID NO: 6464 - DNA, 33 bp, Homo sapien
aaatggtttaacaggatcacatatttgggcata

SEQ ID NO: 6465 - DNA, 33 bp, Homo sapien
ctaattcctatcccacagctgatttgcagtttc

SEQ ID NO: 6466 - DNA, 33 bp, Homo sapien
ctaattcctatcccacggctgatttgcagtttc

SEQ ID NO: 6467 - DNA, 33 bp, Homo sapien
cccactgtggaaacaaggatggtcatataggga

SEQ ID NO: 6468 - DNA, 33 bp, Homo sapien
cccactgtggaaacaatgatggtcatataggga

SEQ ID NO: 6469 - DNA, 33 bp, Homo sapien
agctgagaaacacaaggcatgtgaggggaagtc

SEQ ID NO: 6470 - DNA, 33 bp, Homo sapien
agctgagaaacacaagtcatgtgaggggaagtc

SEQ ID NO: 6471 - DNA, 33 bp, Homo sapien
cttggaaagataaacccaggctattttagagag

SEQ ID NO: 6472 - DNA, 33 bp, Homo sapien
cttggaaagataaacctaggctattttagagag

SEQ ID NO: 6473 - DNA, 33 bp, Homo sapien
tccatctcaaaacaaagccgtcttatgttttat

SEQ ID NO: 6474 - DNA, 33 bp, Homo sapien
tccatctcaaaacaaatccgtcttatgttttat

SEQ ID NO: 6475 - DNA, 33 bp, Homo sapien
tttgcatataagatcaagtcaagattcatttta

SEQ ID NO: 6476 - DNA, 33 bp, Homo sapien
tttgcatataagatcaggtcaagattcatttta

SEQ ID NO: 6477 - DNA, 33 bp, Homo sapien
atgtgagtgagtgaccaagaaaggaaagtgttt

SEQ ID NO: 6478 - DNA, 33 bp, Homo sapien
atgtgagtgagtgaccgagaaaggaaagtgttt

SEQ ID NO: 6479 - DNA, 33 bp, Homo sapien
caaaccatgtaattccaaaagaaaggtctgaga

SEQ ID NO: 6480 - DNA, 33 bp, Homo sapien
caaaccatgtaattcccaaagaaaggtctgaga

SEQ ID NO: 6481 - DNA, 33 bp, Homo sapien
caattcaacaggctctaaactctgtctgcttac

SEQ ID NO: 6482 - DNA, 33 bp, Homo sapien
caattcaacaggctctgaactctgtctgcttac

SEQ ID NO: 6483 - DNA, 33 bp, Homo sapien
acaggaggctggaaaaaagagccaaaagcttgg

SEQ ID NO: 6484 - DNA, 33 bp, Homo sapien
acaggaggctggaaaacagagccaaaagcttgg

SEQ ID NO: 6485 - DNA, 33 bp, Homo sapien
ggcaccttcatttgtacaattctccgtggggtg

SEQ ID NO: 6486 - DNA, 33 bp, Homo sapien
ggcaccttcatttgtataattctccgtggggtg

SEQ ID NO: 6487 - DNA, 33 bp, Homo sapien
tttctctgtatcctacaagtaaaatcgtacaaa

SEQ ID NO: 6488 - DNA, 33 bp, Homo sapien
tttctctgtatcctacgagtaaaatcgtacaaa

SEQ ID NO: 6489 - DNA, 33 bp, Homo sapien
aggtttgtgggaacaacgtgaaatacgaaggga

SEQ ID NO: 6490 - DNA, 33 bp, Homo sapien
aggtttgtgggaacaatgtgaaatacgaaggga

SEQ ID NO: 6491 - DNA, 33 bp, Homo sapien
gaccgtatgtagcttacagatttgtcttattgt

SEQ ID NO: 6492 - DNA, 33 bp, Homo sapien
gaccgtatgtagcttatagatttgtcttattgt

SEQ ID NO: 6493 - DNA, 33 bp, Homo sapien
aagaaactttttccaccgatatatagccctcct

SEQ ID NO: 6494 - DNA, 33 bp, Homo sapien
aagaaactttttccactgatatatagccctcct

SEQ ID NO: 6495 - DNA, 33 bp, Homo sapien
cgccatcaatgaggaaaatgccaataaaggtgc

SEQ ID NO: 6496 - DNA, 33 bp, Homo sapien
cgccatcaatgaggaagatgccaataaaggtgc

SEQ ID NO: 6497 - DNA, 33 bp, Homo sapien
cacctggccccaaacccgactccgctagcatgt

SEQ ID NO: 6498 - DNA, 33 bp, Homo sapien
cacctggccccaaaccggactccgctagcatgt

SEQ ID NO: 6499 - DNA, 33 bp, Homo sapien
catccaagatgctaaaagaaggtttctgggtgc

SEQ ID NO: 6500 - DNA, 33 bp, Homo sapien
catccaagatgctaaaggaaggtttctgggtgc

SEQ ID NO: 6501 - DNA, 33 bp, Homo sapien
tctggctatggtactcaatcccaccaggccaca

SEQ ID NO: 6502 - DNA, 33 bp, Homo sapien
tctggctatggtactcgatcccaccaggccaca

SEQ ID NO: 6503 - DNA, 33 bp, Homo sapien
gatttacataagtacacgctacaacgtttgcac

SEQ ID NO: 6504 - DNA, 33 bp, Homo sapien
gatttacataagtacatgctacaacgtttgcac

SEQ ID NO: 6505 - DNA, 33 bp, Homo sapien
cagttcttccagtttcaatagttgtcaggggcc

SEQ ID NO: 6506 - DNA, 33 bp, Homo sapien
cagttcttccagtttccatagttgtcaggggcc

SEQ ID NO: 6507 - DNA, 33 bp, Homo sapien
ccaaccgcacaaaggaagaggtgaatgagtaag

SEQ ID NO: 6508 - DNA, 33 bp, Homo sapien
ccaaccgcacaaaggaggaggtgaatgagtaag

SEQ ID NO: 6509 - DNA, 33 bp, Homo sapien
agatggctgaattcaaagtgaccatcaaataca

SEQ ID NO: 6510 - DNA, 33 bp, Homo sapien
agatggctgaattcaaggtgaccatcaaataca

SEQ ID NO: 6511 - DNA, 33 bp, Homo sapien
gctttcatgaaatacaaatagaacaatgtgggc

SEQ ID NO: 6512 - DNA, 33 bp, Homo sapien
gctttcatgaaatacagatagaacaatgtgggc

SEQ ID NO: 6513 - DNA, 33 bp, Homo sapien
caaatcacatatctgtaaagaaacttgtagctg

SEQ ID NO: 6514 - DNA, 33 bp, Homo sapien
caaatcacatatctgttaagaaacttgtagctg

SEQ ID NO: 6515 - DNA, 33 bp, Homo sapien
ttgggacattcgtgagcaaccaaatgccaggct

SEQ ID NO: 6516 - DNA, 33 bp, Homo sapien
ttgggacattcgtgagtaaccaaatgccaggct

SEQ ID NO: 6517 - DNA, 33 bp, Homo sapien
gtttatcaactttagcaatgtgtttatagaact

SEQ ID NO: 6518 - DNA, 33 bp, Homo sapien
gtttatcaactttagcgatgtgtttatagaact

SEQ ID NO: 6519 - DNA, 33 bp, Homo sapien
actgtagggacacatcactatgacaacagtgtt

SEQ ID NO: 6520 - DNA, 33 bp, Homo sapien
actgtagggacacatcgctatgacaacagtgtt

SEQ ID NO: 6521 - DNA, 33 bp, Homo sapien
tcgggacactctgagacacacctgatccctgaa

SEQ ID NO: 6522 - DNA, 33 bp, Homo sapien
tcgggacactctgagatacacctgatccctgaa

SEQ ID NO: 6523 - DNA, 33 bp, Homo sapien
acccattcagtgtacaatcattggttttagtat

SEQ ID NO: 6524 - DNA, 33 bp, Homo sapien
acccattcagtgtacagtcattggttttagtat

SEQ ID NO: 6525 - DNA, 33 bp, Homo sapien
agttaacataggacccagaaattctactcctag

SEQ ID NO: 6526 - DNA, 33 bp, Homo sapien
agttaacataggacccggaaattctactcctag

SEQ ID NO: 6527 - DNA, 33 bp, Homo sapien
cctccaaaggggccgagaaggcttctgaggatc

SEQ ID NO: 6528 - DNA, 33 bp, Homo sapien
cctccaaaggggccgataaggcttctgaggatc

SEQ ID NO: 6529 - DNA, 33 bp, Homo sapien
aggtaggggctgtatcacctccatcacacaggg

SEQ ID NO: 6530 - DNA, 33 bp, Homo sapien
aggtaggggctgtatcgcctccatcacacaggg

SEQ ID NO: 6531 - DNA, 33 bp, Homo sapien
aactgagttaatccacagtggaaggtaacccac

SEQ ID NO: 6532 - DNA, 33 bp, Homo sapien
aactgagttaatccacggtggaaggtaacccac

SEQ ID NO: 6533 - DNA, 33 bp, Homo sapien
gccatttgaaaaaataccaaatgtgccattaag

SEQ ID NO: 6534 - DNA, 33 bp, Homo sapien
gccatttgaaaaaatatcaaatgtgccattaag

SEQ ID NO: 6535 - DNA, 33 bp, Homo sapien
tgttgttgttgttgtccagagccgttttttgtt

SEQ ID NO: 6536 - DNA, 33 bp, Homo sapien
tgttgttgttgttgtctagagccgttttttgtt

SEQ ID NO: 6537 - DNA, 33 bp, Homo sapien
gaaattgtgactgcgacgtatgacaggcctgat

SEQ ID NO: 6538 - DNA, 33 bp, Homo sapien
gaaattgtgactgcgatgtatgacaggcctgat

SEQ ID NO: 6539 - DNA, 33 bp, Homo sapien
tccccagaagcaaaaaggggcaaatggaagtga

SEQ ID NO: 6540 - DNA, 33 bp, Homo sapien
tccccagaagcaaaaatgggcaaatggaagtga

SEQ ID NO: 6541 - DNA, 33 bp, Homo sapien
cttcctgtgacttgtaaggattcggtagccaga

SEQ ID NO: 6542 - DNA, 33 bp, Homo sapien
cttcctgtgacttgtagggattcggtagccaga

SEQ ID NO: 6543 - DNA, 33 bp, Homo sapien
agtcctgggaagatacgcagaaacgtgtatttc

SEQ ID NO: 6544 - DNA, 33 bp, Homo sapien
agtcctgggaagatactcagaaacgtgtatttc

SEQ ID NO: 6545 - DNA, 33 bp, Homo sapien
cctgcctgcacgttgcactctgctgtctcggag

SEQ ID NO: 6546 - DNA, 33 bp, Homo sapien
cctgcctgcacgttgcgctctgctgtctcggag

SEQ ID NO: 6547 - DNA, 33 bp, Homo sapien
tatatgcagtgcacaaatggttctgtttttggt

SEQ ID NO: 6548 - DNA, 33 bp, Homo sapien
tatatgcagtgcacaattggttctgtttttggt

SEQ ID NO: 6549 - DNA, 33 bp, Homo sapien
gctgcagatgttccacaaggtggttccaatggc

SEQ ID NO: 6550 - DNA, 33 bp, Homo sapien
gctgcagatgttccacgaggtggttccaatggc

SEQ ID NO: 6551 - DNA, 33 bp, Homo sapien
gcctctccttgcaagacatatggtagtagcagt

SEQ ID NO: 6552 - DNA, 33 bp, Homo sapien
gcctctccttgcaagatatatggtagtagcagt

SEQ ID NO: 6553 - DNA, 33 bp, Homo sapien
aggacgaattaagaccaaaacagttgtggcatg

SEQ ID NO: 6554 - DNA, 33 bp, Homo sapien
aggacgaattaagaccgaaacagttgtggcatg

SEQ ID NO: 6555 - DNA, 33 bp, Homo sapien
ttgagcatgtcattcaacctcttgactgtgggg

SEQ ID NO: 6556 - DNA, 33 bp, Homo sapien
ttgagcatgtcattcagcctcttgactgtgggg

SEQ ID NO: 6557 - DNA, 33 bp, Homo sapien
aaacgctgcaaaggaacgagagctgggtcctgc

SEQ ID NO: 6558 - DNA, 33 bp, Homo sapien
aaacgctgcaaaggaatgagagctgggtcctgc

SEQ ID NO: 6559 - DNA, 33 bp, Homo sapien
acccctgctgcactcacgccttgcgtccagcca

SEQ ID NO: 6560 - DNA, 33 bp, Homo sapien
acccctgctgcactcatgccttgcgtccagcca

SEQ ID NO: 6561 - DNA, 33 bp, Homo sapien
ctttgtcttttcttgccgactgactgggcgagt

SEQ ID NO: 6562 - DNA, 33 bp, Homo sapien
ctttgtcttttcttgctgactgactgggcgagt

SEQ ID NO: 6563 - DNA, 33 bp, Homo sapien
gcactgccttcttccaaagatgattactcccat

SEQ ID NO: 6564 - DNA, 33 bp, Homo sapien
gcactgccttcttccacagatgattactcccat

SEQ ID NO: 6565 - DNA, 33 bp, Homo sapien
ctctctaccaagccccaagatggttttctgcct

SEQ ID NO: 6566 - DNA, 33 bp, Homo sapien
ctctctaccaagccccgagatggttttctgcct

SEQ ID NO: 6567 - DNA, 33 bp, Homo sapien
atagtcactgtaaggactcagtgattattctga

SEQ ID NO: 6568 - DNA, 33 bp, Homo sapien
atagtcactgtaaggattcagtgattattctga

SEQ ID NO: 6569 - DNA, 33 bp, Homo sapien
ggagaactgaggcatcaattgtgggcggcacgc

SEQ ID NO: 6570 - DNA, 33 bp, Homo sapien
ggagaactgaggcatcgattgtgggcggcacgc

SEQ ID NO: 6571 - DNA, 33 bp, Homo sapien
taggtgctgagcaacccgaagagaagatgacag

SEQ ID NO: 6572 - DNA, 33 bp, Homo sapien
taggtgctgagcaacctgaagagaagatgacag

SEQ ID NO: 6573 - DNA, 33 bp, Homo sapien
tgaccttgtgtgaaaaaccaatcttgccaagta

SEQ ID NO: 6574 - DNA, 33 bp, Homo sapien
tgaccttgtgtgaaaacccaatcttgccaagta

SEQ ID NO: 6575 - DNA, 33 bp, Homo sapien
cacacaaggtcaacgcaaacggaacctctcata

SEQ ID NO: 6576 - DNA, 33 bp, Homo sapien
cacacaaggtcaacgcgaacggaacctctcata

SEQ ID NO: 6577 - DNA, 33 bp, Homo sapien
tccccaccagtgtcgacgtgcagatgaatatca

SEQ ID NO: 6578 - DNA, 33 bp, Homo sapien
tccccaccagtgtcgatgtgcagatgaatatca

SEQ ID NO: 6579 - DNA, 33 bp, Homo sapien
ctcagcaagtctccttcaaagccctcacttttg

SEQ ID NO: 6580 - DNA, 33 bp, Homo sapien
ctcagcaagtctccttgaaagccctcacttttg

SEQ ID NO: 6581 - DNA, 33 bp, Homo sapien
atcaggcagaaacccacctgctcctgctcagtc

SEQ ID NO: 6582 - DNA, 33 bp, Homo sapien
atcaggcagaaacccagctgctcctgctcagtc

SEQ ID NO: 6583 - DNA, 33 bp, Homo sapien
gcctcagcgtctggaacagctggaactactggc

SEQ ID NO: 6584 - DNA, 33 bp, Homo sapien
gcctcagcgtctggaatagctggaactactggc

SEQ ID NO: 6585 - DNA, 33 bp, Homo sapien
ggggggagactagagacgtaggttcaagaaggg

SEQ ID NO: 6586 - DNA, 33 bp, Homo sapien
ggggggagactagagatgtaggttcaagaaggg

SEQ ID NO: 6587 - DNA, 33 bp, Homo sapien
aaatgaggaaccattacgctgcatgtaacagaa

SEQ ID NO: 6588 - DNA, 33 bp, Homo sapien
aaatgaggaaccattatgctgcatgtaacagaa

SEQ ID NO: 6589 - DNA, 33 bp, Homo sapien
cttctttttaagtagcaagagcagccctctaga

SEQ ID NO: 6590 - DNA, 33 bp, Homo sapien
cttctttttaagtagccagagcagccctctaga

SEQ ID NO: 6591 - DNA, 33 bp, Homo sapien
ttatatgagcatcgcacgtagcgaggagttcaa

SEQ ID NO: 6592 - DNA, 33 bp, Homo sapien
ttatatgagcatcgcatgtagcgaggagttcaa

SEQ ID NO: 6593 - DNA, 33 bp, Homo sapien
ctgttgagcaggagcacgggagccggtgaggga

SEQ ID NO: 6594 - DNA, 33 bp, Homo sapien
ctgttgagcaggagcaggggagccggtgaggga

SEQ ID NO: 6595 - DNA, 33 bp, Homo sapien
catggtgaacacactccagtagcggattacttt

SEQ ID NO: 6596 - DNA, 33 bp, Homo sapien
catggtgaacacactctagtagcggattacttt

SEQ ID NO: 6597 - DNA, 33 bp, Homo sapien
cagaacacagaagggactaactagaaaactgag

SEQ ID NO: 6598 - DNA, 33 bp, Homo sapien
cagaacacagaagggattaactagaaaactgag

SEQ ID NO: 6599 - DNA, 33 bp, Homo sapien
aacaggaaacggtaccagagaatgaagcagatg

SEQ ID NO: 6600 - DNA, 33 bp, Homo sapien
aacaggaaacggtaccggagaatgaagcagatg

SEQ ID NO: 6601 - DNA, 33 bp, Homo sapien
cagctacaagcaacaacgtaagtgacccaggaa

SEQ ID NO: 6602 - DNA, 33 bp, Homo sapien
cagctacaagcaacaatgtaagtgacccaggaa

SEQ ID NO: 6603 - DNA, 33 bp, Homo sapien
ctctcgggaatgtaaacgagtgaaggtcttgat

SEQ ID NO: 6604 - DNA, 33 bp, Homo sapien
ctctcgggaatgtaaatgagtgaaggtcttgat

SEQ ID NO: 6605 - DNA, 33 bp, Homo sapien
tgctcctgtcttccaaataacagttaaaagaaa

SEQ ID NO: 6606 - DNA, 33 bp, Homo sapien
tgctcctgtcttccaagtaacagttaaaagaaa

SEQ ID NO: 6607 - DNA, 33 bp, Homo sapien
gccttctgccaacctccagaaaacagtgctgga

SEQ ID NO: 6608 - DNA, 33 bp, Homo sapien
gccttctgccaacctctagaaaacagtgctgga

SEQ ID NO: 6609 - DNA, 33 bp, Homo sapien
actgcgggtacacagagtccagcactgttttct

SEQ ID NO: 6610 - DNA, 33 bp, Homo sapien
actgcgggtacacagattccagcactgttttct

SEQ ID NO: 6611 - DNA, 33 bp, Homo sapien
gcatgctgagtgaagacaggagcctttctcaag

SEQ ID NO: 6612 - DNA, 33 bp, Homo sapien
gcatgctgagtgaagagaggagcctttctcaag

SEQ ID NO: 6613 - DNA, 33 bp, Homo sapien
ttcccagtgagactcaccagaggacacacgagg

SEQ ID NO: 6614 - DNA, 33 bp, Homo sapien
ttcccagtgagactcagcagaggacacacgagg

SEQ ID NO: 6615 - DNA, 33 bp, Homo sapien
catcagttgggattcagtcttacatgttgtaaa

SEQ ID NO: 6616 - DNA, 33 bp, Homo sapien
catcagttgggattcattcttacatgttgtaaa

SEQ ID NO: 6617 - DNA, 33 bp, Homo sapien
gataacttccaagagacgtgttgcttcctgtcc

SEQ ID NO: 6618 - DNA, 33 bp, Homo sapien
gataacttccaagagatgtgttgcttcctgtcc

SEQ ID NO: 6619 - DNA, 33 bp, Homo sapien
gaaaagctgtccaagccaaagggttttttggtg

SEQ ID NO: 6620 - DNA, 33 bp, Homo sapien
gaaaagctgtccaagcgaaagggttttttggtg

SEQ ID NO: 6621 - DNA, 33 bp, Homo sapien
tgcctactccacgttacacaaatacacctcctc

SEQ ID NO: 6622 - DNA, 33 bp, Homo sapien
tgcctactccacgttatacaaatacacctcctc

SEQ ID NO: 6623 - DNA, 33 bp, Homo sapien
caggctgcactgccagactcgctttaaagccag

SEQ ID NO: 6624 - DNA, 33 bp, Homo sapien
caggctgcactgccaggctcgctttaaagccag

SEQ ID NO: 6625 - DNA, 33 bp, Homo sapien
ggtgaaaagccatcggcaaaagttaaagtgagt

SEQ ID NO: 6626 - DNA, 33 bp, Homo sapien
ggtgaaaagccatcggtaaaagttaaagtgagt

SEQ ID NO: 6627 - DNA, 33 bp, Homo sapien
cctggggcagcgtccccagtcacgtcatgtttc

SEQ ID NO: 6628 - DNA, 33 bp, Homo sapien
cctggggcagcgtccctagtcacgtcatgtttc

SEQ ID NO: 6629 - DNA, 33 bp, Homo sapien
atgaaaaccatctggccagctgcttgggtcaga

SEQ ID NO: 6630 - DNA, 33 bp, Homo sapien
atgaaaaccatctggctagctgcttgggtcaga

SEQ ID NO: 6631 - DNA, 33 bp, Homo sapien
gcgagatgcgagtcacagtcaggcatggagctg

SEQ ID NO: 6632 - DNA, 33 bp, Homo sapien
gcgagatgcgagtcacggtcaggcatggagctg

SEQ ID NO: 6633 - DNA, 33 bp, Homo sapien
ccaggttgtaagtctaacagtcacaagaagctg

SEQ ID NO: 6634 - DNA, 33 bp, Homo sapien
ccaggttgtaagtctagcagtcacaagaagctg

SEQ ID NO: 6635 - DNA, 33 bp, Homo sapien
aaattattcagtttaaagtatttgttccaggag

SEQ ID NO: 6636 - DNA, 33 bp, Homo sapien
aaattattcagtttaaggtatttgttccaggag

SEQ ID NO: 6637 - DNA, 33 bp, Homo sapien
aagtgtaagggaacaaagatttaaacccaggca

SEQ ID NO: 6638 - DNA, 33 bp, Homo sapien
aagtgtaagggaacaaggatttaaacccaggca

SEQ ID NO: 6639 - DNA, 33 bp, Homo sapien
tgcagcagatggaagagaatttaatggggacac

SEQ ID NO: 6640 - DNA, 33 bp, Homo sapien
tgcagcagatggaagataatttaatggggacac

SEQ ID NO: 6641 - DNA, 33 bp, Homo sapien
tttatataaattgccaataagtggcagagtcag

SEQ ID NO: 6642 - DNA, 33 bp, Homo sapien
tttatataaattgccagtaagtggcagagtcag

SEQ ID NO: 6643 - DNA, 33 bp, Homo sapien
taaagaacatctgttgaaatcactaacataaag

SEQ ID NO: 6644 - DNA, 33 bp, Homo sapien
taaagaacatctgttgcaatcactaacataaag

SEQ ID NO: 6645 - DNA, 33 bp, Homo sapien
cctggggtagtatagcaaaaggagcctcccaga

SEQ ID NO: 6646 - DNA, 33 bp, Homo sapien
cctggggtagtatagcgaaaggagcctcccaga

SEQ ID NO: 6647 - DNA, 33 bp, Homo sapien
ggagcatctaaaggcaccatactttggctgcct

SEQ ID NO: 6648 - DNA, 33 bp, Homo sapien
ggagcatctaaaggcatcatactttggctgcct

SEQ ID NO: 6649 - DNA, 33 bp, Homo sapien
gtaggtgttctgattgcacagtttatcattgac

SEQ ID NO: 6650 - DNA, 33 bp, Homo sapien
gtaggtgttctgattggacagtttatcattgac

SEQ ID NO: 6651 - DNA, 33 bp, Homo sapien
gggcaggtagaaattcaaggaggctggcagagc

SEQ ID NO: 6652 - DNA, 33 bp, Homo sapien
gggcaggtagaaattcgaggaggctggcagagc

SEQ ID NO: 6653 - DNA, 33 bp, Homo sapien
atcctcatgcgacggaacaggaaaactgagacc

SEQ ID NO: 6654 - DNA, 33 bp, Homo sapien
atcctcatgcgacggaccaggaaaactgagacc

SEQ ID NO: 6655 - DNA, 33 bp, Homo sapien
aattgtacagcactcaaacagtggtaagattat

SEQ ID NO: 6656 - DNA, 33 bp, Homo sapien
aattgtacagcactcagacagtggtaagattat

SEQ ID NO: 6657 - DNA, 33 bp, Homo sapien
attcaaataggggataaacgtaacaataagcag

SEQ ID NO: 6658 - DNA, 33 bp, Homo sapien
attcaaataggggatacacgtaacaataagcag

SEQ ID NO: 6659 - DNA, 33 bp, Homo sapien
aagatcagagaaaggcaatcaccaagtaaaagg

SEQ ID NO: 6660 - DNA, 33 bp, Homo sapien
aagatcagagaaaggcgatcaccaagtaaaagg

SEQ ID NO: 6661 - DNA, 33 bp, Homo sapien
ctgaagtgagcagacccatgcttcagaggtaga

SEQ ID NO: 6662 - DNA, 33 bp, Homo sapien
ctgaagtgagcagacctatgcttcagaggtaga

SEQ ID NO: 6663 - DNA, 33 bp, Homo sapien
ctcctgccacatggaaacttgaagccagagcaa

SEQ ID NO: 6664 - DNA, 33 bp, Homo sapien
ctcctgccacatggaagcttgaagccagagcaa

SEQ ID NO: 6665 - DNA, 33 bp, Homo sapien
caggaataagaaccacgcagcagaaccactccc

SEQ ID NO: 6666 - DNA, 33 bp, Homo sapien
caggaataagaaccactcagcagaaccactccc

SEQ ID NO: 6667 - DNA, 33 bp, Homo sapien
agcacagcagcttaaaacaatatttatttatct

SEQ ID NO: 6668 - DNA, 33 bp, Homo sapien
agcacagcagcttaaagcaatatttatttatct

SEQ ID NO: 6669 - DNA, 33 bp, Homo sapien
ggagccaagtacagggaagggtatttcctggct

SEQ ID NO: 6670 - DNA, 33 bp, Homo sapien
ggagccaagtacagggtagggtatttcctggct

SEQ ID NO: 6671 - DNA, 33 bp, Homo sapien
ctggaacactaactgccaaactggatttgatat

SEQ ID NO: 6672 - DNA, 33 bp, Homo sapien
ctggaacactaactgcgaaactggatttgatat

SEQ ID NO: 6673 - DNA, 33 bp, Homo sapien
tgtttttgacccattacaaacccagacttagaa

SEQ ID NO: 6674 - DNA, 33 bp, Homo sapien
tgtttttgacccattataaacccagacttagaa

SEQ ID NO: 6675 - DNA, 33 bp, Homo sapien
tcaccattgccatgagcatccctttagcaagcg

SEQ ID NO: 6676 - DNA, 33 bp, Homo sapien
tcaccattgccatgagtatccctttagcaagcg

SEQ ID NO: 6677 - DNA, 33 bp, Homo sapien
aacaataactgtccacaagaatgttcatcagtt

SEQ ID NO: 6678 - DNA, 33 bp, Homo sapien
aacaataactgtccaccagaatgttcatcagtt

SEQ ID NO: 6679 - DNA, 33 bp, Homo sapien
acacttggagtcttgacgtgagggcagttctgg

SEQ ID NO: 6680 - DNA, 33 bp, Homo sapien
acacttggagtcttgatgtgagggcagttctgg

SEQ ID NO: 6681 - DNA, 33 bp, Homo sapien
tgttgtttcaacgttccattgtccttatttatt

SEQ ID NO: 6682 - DNA, 33 bp, Homo sapien
tgttgtttcaacgttctattgtccttatttatt

SEQ ID NO: 6683 - DNA, 33 bp, Homo sapien
gcctggcacacagcaaatagaaacaccagaagt

SEQ ID NO: 6684 - DNA, 33 bp, Homo sapien
gcctggcacacagcaagtagaaacaccagaagt

SEQ ID NO: 6685 - DNA, 33 bp, Homo sapien
aagtgagcaaggagcccgcacataaagggtcac

SEQ ID NO: 6686 - DNA, 33 bp, Homo sapien
aagtgagcaaggagccggcacataaagggtcac

SEQ ID NO: 6687 - DNA, 33 bp, Homo sapien
ccactgccttcctctacaccagctgttcttaac

SEQ ID NO: 6688 - DNA, 33 bp, Homo sapien
ccactgccttcctctataccagctgttcttaac

SEQ ID NO: 6689 - DNA, 33 bp, Homo sapien
ttatactagtcagtaaatatctgaggctcttgt

SEQ ID NO: 6690 - DNA, 33 bp, Homo sapien
ttatactagtcagtaagtatctgaggctcttgt

SEQ ID NO: 6691 - DNA, 33 bp, Homo sapien
gcctcagccgctgacaagggatctgcgagacta

SEQ ID NO: 6692 - DNA, 33 bp, Homo sapien
gcctcagccgctgacacgggatctgcgagacta

SEQ ID NO: 6693 - DNA, 33 bp, Homo sapien
gtgtgtttgagagagactaggaggagaggggct

SEQ ID NO: 6694 - DNA, 33 bp, Homo sapien
gtgtgtttgagagagagtaggaggagaggggct

SEQ ID NO: 6695 - DNA, 33 bp, Homo sapien
gggattatagaagtaagccacagcacctggtat

SEQ ID NO: 6696 - DNA, 33 bp, Homo sapien
gggattatagaagtaatccacagcacctggtat

SEQ ID NO: 6697 - DNA, 33 bp, Homo sapien
actaccctgcctacccacattgatttctctatc

SEQ ID NO: 6698 - DNA, 33 bp, Homo sapien
actaccctgcctacccgcattgatttctctatc

SEQ ID NO: 6699 - DNA, 33 bp, Homo sapien
ccacctgtttgctgtaagatgactattataatc

SEQ ID NO: 6700 - DNA, 33 bp, Homo sapien
ccacctgtttgctgtacgatgactattataatc

SEQ ID NO: 6701 - DNA, 33 bp, Homo sapien
cctcttcctacaggacaaaatcatatgataatt

SEQ ID NO: 6702 - DNA, 33 bp, Homo sapien
cctcttcctacaggacgaaatcatatgataatt

SEQ ID NO: 6703 - DNA, 33 bp, Homo sapien
acattccagggagaagaaacaatcaagtaaaga

SEQ ID NO: 6704 - DNA, 33 bp, Homo sapien
acattccagggagaaggaacaatcaagtaaaga

SEQ ID NO: 6705 - DNA, 33 bp, Homo sapien
aatatgggcagagaacagtctacaaaattctca

SEQ ID NO: 6706 - DNA, 33 bp, Homo sapien
aatatgggcagagaacggtctacaaaattctca

SEQ ID NO: 6707 - DNA, 33 bp, Homo sapien
atgtcactcttcagctaaccattcaatgaattt

SEQ ID NO: 6708 - DNA, 33 bp, Homo sapien
atgtcactcttcagcttaccattcaatgaattt

SEQ ID NO: 6709 - DNA, 33 bp, Homo sapien
ctctactcttcagcgaaagcctccagtttttat

SEQ ID NO: 6710 - DNA, 33 bp, Homo sapien
ctctactcttcagcgacagcctccagtttttat

SEQ ID NO: 6711 - DNA, 33 bp, Homo sapien
tgccaatactaagtgtcaattaagctgtggaac

SEQ ID NO: 6712 - DNA, 33 bp, Homo sapien
tgccaatactaagtgttaattaagctgtggaac

SEQ ID NO: 6713 - DNA, 33 bp, Homo sapien
gtaagacaggttaaaacgattgtgaatactatt

SEQ ID NO: 6714 - DNA, 33 bp, Homo sapien
gtaagacaggttaaaatgattgtgaatactatt

SEQ ID NO: 6715 - DNA, 33 bp, Homo sapien
atgaatccaaatgcgccgaggcctataaactgc

SEQ ID NO: 6716 - DNA, 33 bp, Homo sapien
atgaatccaaatgcgctgaggcctataaactgc

SEQ ID NO: 6717 - DNA, 33 bp, Homo sapien
ctagtccagatagccaaaggaagggtaaggtct

SEQ ID NO: 6718 - DNA, 33 bp, Homo sapien
ctagtccagatagccacaggaagggtaaggtct

SEQ ID NO: 6719 - DNA, 33 bp, Homo sapien
tctgtcaatgctattacaatcatcaaatgcatg

SEQ ID NO: 6720 - DNA, 33 bp, Homo sapien
tctgtcaatgctattataatcatcaaatgcatg

SEQ ID NO: 6721 - DNA, 33 bp, Homo sapien
cagcatcagtgctctaaccactcactcagcagg

SEQ ID NO: 6722 - DNA, 33 bp, Homo sapien
cagcatcagtgctctagccactcactcagcagg

SEQ ID NO: 6723 - DNA, 33 bp, Homo sapien
tgttctcaccatgccacagatcataaagcttta

SEQ ID NO: 6724 - DNA, 33 bp, Homo sapien
tgttctcaccatgccatagatcataaagcttta

SEQ ID NO: 6725 - DNA, 33 bp, Homo sapien
cttttggctttgtgaacacttgttactacccag

SEQ ID NO: 6726 - DNA, 33 bp, Homo sapien
cttttggctttgtgaagacttgttactacccag

SEQ ID NO: 6727 - DNA, 33 bp, Homo sapien
tttaagctgtgaagtacgaaatatataaaaaca

SEQ ID NO: 6728 - DNA, 33 bp, Homo sapien
tttaagctgtgaagtatgaaatatataaaaaca

SEQ ID NO: 6729 - DNA, 33 bp, Homo sapien
tggacaagtcaatcaccctttttgggctggcct

SEQ ID NO: 6730 - DNA, 33 bp, Homo sapien
tggacaagtcaatcactctttttgggctggcct

SEQ ID NO: 6731 - DNA, 33 bp, Homo sapien
gaatgaaagttctctacctcattagctgttagg

SEQ ID NO: 6732 - DNA, 33 bp, Homo sapien
gaatgaaagttctctatctcattagctgttagg

SEQ ID NO: 6733 - DNA, 33 bp, Homo sapien
ggcatttatttggatgaatccctttggcacctt

SEQ ID NO: 6734 - DNA, 33 bp, Homo sapien
ggcatttatttggatggatccctttggcacctt

SEQ ID NO: 6735 - DNA, 33 bp, Homo sapien
agcacgcaacaggaaaacatttgtgtctcagta

SEQ ID NO: 6736 - DNA, 33 bp, Homo sapien
agcacgcaacaggaaaccatttgtgtctcagta

SEQ ID NO: 6737 - DNA, 33 bp, Homo sapien
tgtccacctcttagccaacatactagaaaatac

SEQ ID NO: 6738 - DNA, 33 bp, Homo sapien
tgtccacctcttagccgacatactagaaaatac

SEQ ID NO: 6739 - DNA, 33 bp, Homo sapien
ggagaagaggaagtcacgtctggaacagtggcg

SEQ ID NO: 6740 - DNA, 33 bp, Homo sapien
ggagaagaggaagtcatgtctggaacagtggcg

SEQ ID NO: 6741 - DNA, 33 bp, Homo sapien
gcatgtggttggagaccggctctctagtagaac

SEQ ID NO: 6742 - DNA, 33 bp, Homo sapien
gcatgtggttggagactggctctctagtagaac

SEQ ID NO: 6743 - DNA, 33 bp, Homo sapien
caattctgctactgaacagaaaaacctattaca

SEQ ID NO: 6744 - DNA, 33 bp, Homo sapien
caattctgctactgaatagaaaaacctattaca

SEQ ID NO: 6745 - DNA, 33 bp, Homo sapien
agtgagatcctgttacaaataaaaacataaaga

SEQ ID NO: 6746 - DNA, 33 bp, Homo sapien
agtgagatcctgttacgaataaaaacataaaga

SEQ ID NO: 6747 - DNA, 33 bp, Homo sapien
gttgtgcaaagcctctcaaattctctgctgcta

SEQ ID NO: 6748 - DNA, 33 bp, Homo sapien
gttgtgcaaagcctcttaaattctctgctgcta

SEQ ID NO: 6749 - DNA, 33 bp, Homo sapien
gggactttctcttgacacacctagaagagctgg

SEQ ID NO: 6750 - DNA, 33 bp, Homo sapien
gggactttctcttgacgcacctagaagagctgg

SEQ ID NO: 6751 - DNA, 33 bp, Homo sapien
ttcctgctttcaaatccactcggctccttaagt

SEQ ID NO: 6752 - DNA, 33 bp, Homo sapien
ttcctgctttcaaatctactcggctccttaagt

SEQ ID NO: 6753 - DNA, 33 bp, Homo sapien
tgctctgagtcaccacactgcggctcagatgct

SEQ ID NO: 6754 - DNA, 33 bp, Homo sapien
tgctctgagtcaccacgctgcggctcagatgct

SEQ ID NO: 6755 - DNA, 33 bp, Homo sapien
tgcaacatctggacacaactaacagagcatggt

SEQ ID NO: 6756 - DNA, 33 bp, Homo sapien
tgcaacatctggacaccactaacagagcatggt

SEQ ID NO: 6757 - DNA, 33 bp, Homo sapien
actaaagaataaacggcagagtgagttgtagcc

SEQ ID NO: 6758 - DNA, 33 bp, Homo sapien
actaaagaataaacgggagagtgagttgtagcc

SEQ ID NO: 6759 - DNA, 33 bp, Homo sapien
gatcatataggaacataatatcaaaagctagca

SEQ ID NO: 6760 - DNA, 33 bp, Homo sapien
gatcatataggaacatcatatcaaaagctagca

SEQ ID NO: 6761 - DNA, 33 bp, Homo sapien
gatacttgataataaccgcagtagccaacaact

SEQ ID NO: 6762 - DNA, 33 bp, Homo sapien
gatacttgataataactgcagtagccaacaact

SEQ ID NO: 6763 - DNA, 33 bp, Homo sapien
ttagttccaccattgacggcccaatagacggtg

SEQ ID NO: 6764 - DNA, 33 bp, Homo sapien
ttagttccaccattgatggcccaatagacggtg

SEQ ID NO: 6765 - DNA, 33 bp, Homo sapien
agctgcttcctgcagacagactagactcctttc

SEQ ID NO: 6766 - DNA, 33 bp, Homo sapien
agctgcttcctgcagatagactagactcctttc

SEQ ID NO: 6767 - DNA, 33 bp, Homo sapien
tcagaccttgttcaaacacctccctgtggccca

SEQ ID NO: 6768 - DNA, 33 bp, Homo sapien
tcagaccttgttcaaagacctccctgtggccca

SEQ ID NO: 6769 - DNA, 33 bp, Homo sapien
gttgatctattgcccaaacttcccagtgaccac

SEQ ID NO: 6770 - DNA, 33 bp, Homo sapien
gttgatctattgcccagacttcccagtgaccac

SEQ ID NO: 6771 - DNA, 33 bp, Homo sapien
accacatggtaggaagacatttactggcccctc

SEQ ID NO: 6772 - DNA, 33 bp, Homo sapien
accacatggtaggaaggcatttactggcccctc

SEQ ID NO: 6773 - DNA, 33 bp, Homo sapien
gtctcctactgaggaaacatacgttgatatgga

SEQ ID NO: 6774 - DNA, 33 bp, Homo sapien
gtctcctactgaggaaccatacgttgatatgga

SEQ ID NO: 6775 - DNA, 33 bp, Homo sapien
agttgaatgttatcagcattcacagtgtatcag

SEQ ID NO: 6776 - DNA, 33 bp, Homo sapien
agttgaatgttatcagtattcacagtgtatcag

SEQ ID NO: 6777 - DNA, 33 bp, Homo sapien
tcctagctttgccactaactggctgtcggacct

SEQ ID NO: 6778 - DNA, 33 bp, Homo sapien
tcctagctttgccactgactggctgtcggacct

SEQ ID NO: 6779 - DNA, 33 bp, Homo sapien
ctaggatgaacagtaaaaattatagactctgca

SEQ ID NO: 6780 - DNA, 33 bp, Homo sapien
ctaggatgaacagtaagaattatagactctgca

SEQ ID NO: 6781 - DNA, 33 bp, Homo sapien
aaaccagagaggtacaagatggacatgttggct

SEQ ID NO: 6782 - DNA, 33 bp, Homo sapien
aaaccagagaggtacaggatggacatgttggct

SEQ ID NO: 6783 - DNA, 33 bp, Homo sapien
tcttcttttcaaatcaacaaatgcttacaaact

SEQ ID NO: 6784 - DNA, 33 bp, Homo sapien
tcttcttttcaaatcagcaaatgcttacaaact

SEQ ID NO: 6785 - DNA, 33 bp, Homo sapien
tgtaattgtttatgcaacgttagggactctcag

SEQ ID NO: 6786 - DNA, 33 bp, Homo sapien
tgtaattgtttatgcagcgttagggactctcag

SEQ ID NO: 6787 - DNA, 33 bp, Homo sapien
cgagggcactatgacgcccgggccagagtcctc

SEQ ID NO: 6788 - DNA, 33 bp, Homo sapien
cgagggcactatgacggccgggccagagtcctc

SEQ ID NO: 6789 - DNA, 33 bp, Homo sapien
atgcttccaccagcaacgtctttgggcatccat

SEQ ID NO: 6790 - DNA, 33 bp, Homo sapien
atgcttccaccagcaatgtctttgggcatccat

SEQ ID NO: 6791 - DNA, 33 bp, Homo sapien
gaatttatggctaagagaatttatggctaagtg

SEQ ID NO: 6792 - DNA, 33 bp, Homo sapien
gaatttatggctaagataatttatggctaagtg

SEQ ID NO: 6793 - DNA, 33 bp, Homo sapien
cccaacatccttgagactcatacagtttataat

SEQ ID NO: 6794 - DNA, 33 bp, Homo sapien
cccaacatccttgagattcatacagtttataat

SEQ ID NO: 6795 - DNA, 33 bp, Homo sapien
aagatgggtgggcgacacttctttggagaatga

SEQ ID NO: 6796 - DNA, 33 bp, Homo sapien
aagatgggtgggcgacgcttctttggagaatga

SEQ ID NO: 6797 - DNA, 33 bp, Homo sapien
ccactgctgtctaccactccaggatgcctgcat

SEQ ID NO: 6798 - DNA, 33 bp, Homo sapien
ccactgctgtctaccattccaggatgcctgcat

SEQ ID NO: 6799 - DNA, 33 bp, Homo sapien
gagagtcacttagaaggcgattataccactccc

SEQ ID NO: 6800 - DNA, 33 bp, Homo sapien
gagagtcacttagaagtcgattataccactccc

SEQ ID NO: 6801 - DNA, 33 bp, Homo sapien
tgatagcctcctcaaacatcgcctgcagcggtt

SEQ ID NO: 6802 - DNA, 33 bp, Homo sapien
tgatagcctcctcaaagatcgcctgcagcggtt

SEQ ID NO: 6803 - DNA, 33 bp, Homo sapien
tccttctctacaattcactttttttcttctgat

SEQ ID NO: 6804 - DNA, 33 bp, Homo sapien
tccttctctacaattcgctttttttcttctgat

SEQ ID NO: 6805 - DNA, 33 bp, Homo sapien
gaggccaatggtggccaacaaaagcagtccatt

SEQ ID NO: 6806 - DNA, 33 bp, Homo sapien
gaggccaatggtggccgacaaaagcagtccatt

SEQ ID NO: 6807 - DNA, 33 bp, Homo sapien
actcccttctgtcgcacaccaggtcagagcttg

SEQ ID NO: 6808 - DNA, 33 bp, Homo sapien
actcccttctgtcgcataccaggtcagagcttg

SEQ ID NO: 6809 - DNA, 33 bp, Homo sapien
atagtgagatttgtaagagtgattcataatagt

SEQ ID NO: 6810 - DNA, 33 bp, Homo sapien
atagtgagatttgtaatagtgattcataatagt

SEQ ID NO: 6811 - DNA, 33 bp, Homo sapien
tgccttctttccaccacgtctgcttcttaacac

SEQ ID NO: 6812 - DNA, 33 bp, Homo sapien
tgccttctttccaccatgtctgcttcttaacac

SEQ ID NO: 6813 - DNA, 33 bp, Homo sapien
atgcaataacaaagacagtaacatccataaaga

SEQ ID NO: 6814 - DNA, 33 bp, Homo sapien
atgcaataacaaagacggtaacatccataaaga

SEQ ID NO: 6815 - DNA, 33 bp, Homo sapien
atataacttgatgaaaatattgcagtattgatg

SEQ ID NO: 6816 - DNA, 33 bp, Homo sapien
atataacttgatgaaagtattgcagtattgatg

SEQ ID NO: 6817 - DNA, 33 bp, Homo sapien
gatgggatggtgagagaattggatttcagagat

SEQ ID NO: 6818 - DNA, 33 bp, Homo sapien
gatgggatggtgagagtattggatttcagagat

SEQ ID NO: 6819 - DNA, 33 bp, Homo sapien
tcttaacggtggttgcccaatgatgttaaaagg

SEQ ID NO: 6820 - DNA, 33 bp, Homo sapien
tcttaacggtggttgctcaatgatgttaaaagg

SEQ ID NO: 6821 - DNA, 33 bp, Homo sapien
atcagcccaagcacataaggttgccaaactagc

SEQ ID NO: 6822 - DNA, 33 bp, Homo sapien
atcagcccaagcacatgaggttgccaaactagc

SEQ ID NO: 6823 - DNA, 33 bp, Homo sapien
actggacattttaagcaatataatgtggcaatg

SEQ ID NO: 6824 - DNA, 33 bp, Homo sapien
actggacattttaagccatataatgtggcaatg

SEQ ID NO: 6825 - DNA, 33 bp, Homo sapien
gataatctaaatgaaacggacaatctcttagga

SEQ ID NO: 6826 - DNA, 33 bp, Homo sapien
gataatctaaatgaaatggacaatctcttagga

SEQ ID NO: 6827 - DNA, 33 bp, Homo sapien
ttcctgggggattagcaaattaggctggagaga

SEQ ID NO: 6828 - DNA, 33 bp, Homo sapien
ttcctgggggattagcgaattaggctggagaga

SEQ ID NO: 6829 - DNA, 33 bp, Homo sapien
atacctgatggtgaagaaattcaatacacaccc

SEQ ID NO: 6830 - DNA, 33 bp, Homo sapien
atacctgatggtgaaggaattcaatacacaccc

SEQ ID NO: 6831 - DNA, 33 bp, Homo sapien
aacacaatgcaaaacggaacagagcctttgatt

SEQ ID NO: 6832 - DNA, 33 bp, Homo sapien
aacacaatgcaaaacgtaacagagcctttgatt

SEQ ID NO: 6833 - DNA, 33 bp, Homo sapien
gtaattccagttgtaccaatgaaactatgtttg

SEQ ID NO: 6834 - DNA, 33 bp, Homo sapien
gtaattccagttgtactaatgaaactatgtttg

SEQ ID NO: 6835 - DNA, 33 bp, Homo sapien
tttgatatatgtgtaaatctttcactgtatggt

SEQ ID NO: 6836 - DNA, 33 bp, Homo sapien
tttgatatatgtgtaactctttcactgtatggt

SEQ ID NO: 6837 - DNA, 33 bp, Homo sapien
atgagcatcactcttacgaccacctggacagtt

SEQ ID NO: 6838 - DNA, 33 bp, Homo sapien
atgagcatcactcttatgaccacctggacagtt

SEQ ID NO: 6839 - DNA, 33 bp, Homo sapien
accaaactagcaataactatgatctgatgagca

SEQ ID NO: 6840 - DNA, 33 bp, Homo sapien
accaaactagcaataagtatgatctgatgagca

SEQ ID NO: 6841 - DNA, 33 bp, Homo sapien
tctatacatcagcttaaccatgtatatcatcat

SEQ ID NO: 6842 - DNA, 33 bp, Homo sapien
tctatacatcagcttatccatgtatatcatcat

SEQ ID NO: 6843 - DNA, 33 bp, Homo sapien
agaagtaagaatctgggatttgaaacagttaca

SEQ ID NO: 6844 - DNA, 33 bp, Homo sapien
agaagtaagaatctggtatttgaaacagttaca

SEQ ID NO: 6845 - DNA, 33 bp, Homo sapien
gccaggtgttccaaaacttgttcacatcttctt

SEQ ID NO: 6846 - DNA, 33 bp, Homo sapien
gccaggtgttccaaaagttgttcacatcttctt

SEQ ID NO: 6847 - DNA, 33 bp, Homo sapien
atcatttgactcaatacctagcctcagaaataa

SEQ ID NO: 6848 - DNA, 33 bp, Homo sapien
atcatttgactcaatatctagcctcagaaataa

SEQ ID NO: 6849 - DNA, 33 bp, Homo sapien
cttcatggagctaaccaccttctgttcacaagt

SEQ ID NO: 6850 - DNA, 33 bp, Homo sapien
cttcatggagctaaccgccttctgttcacaagt

SEQ ID NO: 6851 - DNA, 33 bp, Homo sapien
tgtcaaaacaacaacacgagtcaagacctttca

SEQ ID NO: 6852 - DNA, 33 bp, Homo sapien
tgtcaaaacaacaacatgagtcaagacctttca

SEQ ID NO: 6853 - DNA, 33 bp, Homo sapien
cagccgcttcttacaaatcccaagaggccaaag

SEQ ID NO: 6854 - DNA, 33 bp, Homo sapien
cagccgcttcttacaactcccaagaggccaaag

SEQ ID NO: 6855 - DNA, 33 bp, Homo sapien
caaaagctatgcatgaagtgcaaaggtaaagac

SEQ ID NO: 6856 - DNA, 33 bp, Homo sapien
caaaagctatgcatgacgtgcaaaggtaaagac

SEQ ID NO: 6857 - DNA, 33 bp, Homo sapien
tgcgtatctagagaacacttgatacccagcagc

SEQ ID NO: 6858 - DNA, 33 bp, Homo sapien
tgcgtatctagagaacccttgatacccagcagc

SEQ ID NO: 6859 - DNA, 33 bp, Homo sapien
gggtgaatgagtgacactgtagtagatagaaga

SEQ ID NO: 6860 - DNA, 33 bp, Homo sapien
gggtgaatgagtgacattgtagtagatagaaga

SEQ ID NO: 6861 - DNA, 33 bp, Homo sapien
atacaggcaggaaaaccgaggttccaagcaagg

SEQ ID NO: 6862 - DNA, 33 bp, Homo sapien
atacaggcaggaaaactgaggttccaagcaagg

SEQ ID NO: 6863 - DNA, 33 bp, Homo sapien
ctgggggttccaactacgtgataggcctaatta

SEQ ID NO: 6864 - DNA, 33 bp, Homo sapien
ctgggggttccaactatgtgataggcctaatta

SEQ ID NO: 6865 - DNA, 33 bp, Homo sapien
aggcctaattaaaggcagaaatgggacatatgc

SEQ ID NO: 6866 - DNA, 33 bp, Homo sapien
aggcctaattaaaggcggaaatgggacatatgc

SEQ ID NO: 6867 - DNA, 33 bp, Homo sapien
accactaaccgcaagtaacctgatggtggctat

SEQ ID NO: 6868 - DNA, 33 bp, Homo sapien
accactaaccgcaagtcacctgatggtggctat

SEQ ID NO: 6869 - DNA, 33 bp, Homo sapien
tcactactgtgggcaaaaaaaaaactcagaata

SEQ ID NO: 6870 - DNA, 33 bp, Homo sapien
tcactactgtgggcaacaaaaaaactcagaata

SEQ ID NO: 6871 - DNA, 33 bp, Homo sapien
cctgatagaaatctaacgccagtctgagtctta

SEQ ID NO: 6872 - DNA, 33 bp, Homo sapien
cctgatagaaatctaatgccagtctgagtctta

SEQ ID NO: 6873 - DNA, 33 bp, Homo sapien
catgagatctgtaagacagcgttttggagttcc

SEQ ID NO: 6874 - DNA, 33 bp, Homo sapien
catgagatctgtaagatagcgttttggagttcc

SEQ ID NO: 6875 - DNA, 33 bp, Homo sapien
aagcatcggaattacacggagccttgtaaaaaa

SEQ ID NO: 6876 - DNA, 33 bp, Homo sapien
aagcatcggaattacatggagccttgtaaaaaa

SEQ ID NO: 6877 - DNA, 33 bp, Homo sapien
ttggatttctgacctccagagctgtaagataat

SEQ ID NO: 6878 - DNA, 33 bp, Homo sapien
ttggatttctgacctcgagagctgtaagataat

SEQ ID NO: 6879 - DNA, 33 bp, Homo sapien
atatgaacagaagacagcaacagctcattgact

SEQ ID NO: 6880 - DNA, 33 bp, Homo sapien
atatgaacagaagacatcaacagctcattgact

SEQ ID NO: 6881 - DNA, 33 bp, Homo sapien
ctctctccttggcatacagatgctgtcttacct

SEQ ID NO: 6882 - DNA, 33 bp, Homo sapien
ctctctccttggcatatagatgctgtcttacct

SEQ ID NO: 6883 - DNA, 33 bp, Homo sapien
tcctggaaactagaaagctcagatcaagccatt

SEQ ID NO: 6884 - DNA, 33 bp, Homo sapien
tcctggaaactagaaatctcagatcaagccatt

SEQ ID NO: 6885 - DNA, 33 bp, Homo sapien
atcacattgtgaactcacctgtatccatcaacc

SEQ ID NO: 6886 - DNA, 33 bp, Homo sapien
atcacattgtgaactcgcctgtatccatcaacc

SEQ ID NO: 6887 - DNA, 33 bp, Homo sapien
ttctggtatggtttgaaccagaggcacctgttt

SEQ ID NO: 6888 - DNA, 33 bp, Homo sapien
ttctggtatggtttgatccagaggcacctgttt

SEQ ID NO: 6889 - DNA, 33 bp, Homo sapien
cttgctcctgtagcaaacatcaccttcactcaa

SEQ ID NO: 6890 - DNA, 33 bp, Homo sapien
cttgctcctgtagcaaccatcaccttcactcaa

SEQ ID NO: 6891 - DNA, 33 bp, Homo sapien
aaccaacaataacagaacgtgatgaagtgaagc

SEQ ID NO: 6892 - DNA, 33 bp, Homo sapien
aaccaacaataacagagcgtgatgaagtgaagc

SEQ ID NO: 6893 - DNA, 33 bp, Homo sapien
gccatgggcaggagtccacgctttttccaaatc

SEQ ID NO: 6894 - DNA, 33 bp, Homo sapien
gccatgggcaggagtctacgctttttccaaatc

SEQ ID NO: 6895 - DNA, 33 bp, Homo sapien
gaatgatcaagttgaccacaggaaaggaagccg

SEQ ID NO: 6896 - DNA, 33 bp, Homo sapien
gaatgatcaagttgacgacaggaaaggaagccg

SEQ ID NO: 6897 - DNA, 33 bp, Homo sapien
tggcactatcaggtaagtacgagagtgtgtgta

SEQ ID NO: 6898 - DNA, 33 bp, Homo sapien
tggcactatcaggtaattacgagagtgtgtgta

SEQ ID NO: 6899 - DNA, 33 bp, Homo sapien
tactcattcattcagccgctcaatcattcattc

SEQ ID NO: 6900 - DNA, 33 bp, Homo sapien
tactcattcattcagctgctcaatcattcattc

SEQ ID NO: 6901 - DNA, 33 bp, Homo sapien
gttcacaaaggaacataaggaaacagtagcaga

SEQ ID NO: 6902 - DNA, 33 bp, Homo sapien
gttcacaaaggaacattaggaaacagtagcaga

SEQ ID NO: 6903 - DNA, 33 bp, Homo sapien
caagtagaggagtggcaaaaacaaggaaagtct

SEQ ID NO: 6904 - DNA, 33 bp, Homo sapien
caagtagaggagtggcgaaaacaaggaaagtct

SEQ ID NO: 6905 - DNA, 33 bp, Homo sapien
tgagttgattttcatacgtggtgtgagataagg

SEQ ID NO: 6906 - DNA, 33 bp, Homo sapien
tgagttgattttcatatgtggtgtgagataagg

SEQ ID NO: 6907 - DNA, 33 bp, Homo sapien
gaaaggacgccttgtccaacaaattgttctggg

SEQ ID NO: 6908 - DNA, 33 bp, Homo sapien
gaaaggacgccttgtctaacaaattgttctggg

SEQ ID NO: 6909 - DNA, 33 bp, Homo sapien
tacccctgatctttgacgaatctcctataggtg

SEQ ID NO: 6910 - DNA, 33 bp, Homo sapien
tacccctgatctttgatgaatctcctataggtg

SEQ ID NO: 6911 - DNA, 33 bp, Homo sapien
ttcttctttctttgtgaaatttcgagagtcatg

SEQ ID NO: 6912 - DNA, 33 bp, Homo sapien
ttcttctttctttgtggaatttcgagagtcatg

SEQ ID NO: 6913 - DNA, 33 bp, Homo sapien
attaatttgaaagaataaggctcatccaggaaa

SEQ ID NO: 6914 - DNA, 33 bp, Homo sapien
attaatttgaaagaatgaggctcatccaggaaa

SEQ ID NO: 6915 - DNA, 33 bp, Homo sapien
gagtttatgtaaaatgaaagtagtatggtcttt

SEQ ID NO: 6916 - DNA, 33 bp, Homo sapien
gagtttatgtaaaatggaagtagtatggtcttt

SEQ ID NO: 6917 - DNA, 33 bp, Homo sapien
tgctagatcttaaacaatgtcagtaattaaagc

SEQ ID NO: 6918 - DNA, 33 bp, Homo sapien
tgctagatcttaaacactgtcagtaattaaagc

SEQ ID NO: 6919 - DNA, 33 bp, Homo sapien
ataaatgaaaggattactaactgtggaggttat

SEQ ID NO: 6920 - DNA, 33 bp, Homo sapien
ataaatgaaaggattattaactgtggaggttat

SEQ ID NO: 6921 - DNA, 33 bp, Homo sapien
gagagcaatggagagaagaggccaatctgggag

SEQ ID NO: 6922 - DNA, 33 bp, Homo sapien
gagagcaatggagagatgaggccaatctgggag

SEQ ID NO: 6923 - DNA, 33 bp, Homo sapien
cagctggcctcagagacatttgactggagaaga

SEQ ID NO: 6924 - DNA, 33 bp, Homo sapien
cagctggcctcagagatatttgactggagaaga

SEQ ID NO: 6925 - DNA, 33 bp, Homo sapien
tggatttcttcttcaacgaatggtctgttggta

SEQ ID NO: 6926 - DNA, 33 bp, Homo sapien
tggatttcttcttcaatgaatggtctgttggta

SEQ ID NO: 6927 - DNA, 33 bp, Homo sapien
gtgaaaacaatgatacacaattttatactcatc

SEQ ID NO: 6928 - DNA, 33 bp, Homo sapien
gtgaaaacaatgatacgcaattttatactcatc

SEQ ID NO: 6929 - DNA, 33 bp, Homo sapien
ctcagcctgttcataactctccctggttttgcc

SEQ ID NO: 6930 - DNA, 33 bp, Homo sapien
ctcagcctgttcataattctccctggttttgcc

SEQ ID NO: 6931 - DNA, 33 bp, Homo sapien
gaagggacattaaccacgtggaaaaacaagtag

SEQ ID NO: 6932 - DNA, 33 bp, Homo sapien
gaagggacattaaccatgtggaaaaacaagtag

SEQ ID NO: 6933 - DNA, 33 bp, Homo sapien
agacctggaggataaagaatcaaggactaagta

SEQ ID NO: 6934 - DNA, 33 bp, Homo sapien
agacctggaggataaataatcaaggactaagta

SEQ ID NO: 6935 - DNA, 33 bp, Homo sapien
ggcattatgatcccaacgtgtaagcaaggaaac

SEQ ID NO: 6936 - DNA, 33 bp, Homo sapien
ggcattatgatcccaatgtgtaagcaaggaaac

SEQ ID NO: 6937 - DNA, 33 bp, Homo sapien
gggctcccggaagaaccctgtgaattcaactca

SEQ ID NO: 6938 - DNA, 33 bp, Homo sapien
gggctcccggaagaactctgtgaattcaactca

SEQ ID NO: 6939 - DNA, 33 bp, Homo sapien
ccaagggtttagcccagaactgtgaatctattt

SEQ ID NO: 6940 - DNA, 33 bp, Homo sapien
ccaagggtttagcccataactgtgaatctattt

SEQ ID NO: 6941 - DNA, 33 bp, Homo sapien
gttatgtggctggcaaatgtaggaggcagattt

SEQ ID NO: 6942 - DNA, 33 bp, Homo sapien
gttatgtggctggcaagtgtaggaggcagattt

SEQ ID NO: 6943 - DNA, 33 bp, Homo sapien
gcagcggctgcctccaccatcagactgggagtc

SEQ ID NO: 6944 - DNA, 33 bp, Homo sapien
gcagcggctgcctccatcatcagactgggagtc

SEQ ID NO: 6945 - DNA, 33 bp, Homo sapien
caggagctgtctcctgcactgaaacctcaccct

SEQ ID NO: 6946 - DNA, 33 bp, Homo sapien
caggagctgtctcctggactgaaacctcaccct

SEQ ID NO: 6947 - DNA, 33 bp, Homo sapien
tctccgaaacagaaggaaagattagtaaatgca

SEQ ID NO: 6948 - DNA, 33 bp, Homo sapien
tctccgaaacagaagggaagattagtaaatgca

SEQ ID NO: 6949 - DNA, 33 bp, Homo sapien
aaagaggttcagtaaccggtccaagaccacaca

SEQ ID NO: 6950 - DNA, 33 bp, Homo sapien
aaagaggttcagtaacgggtccaagaccacaca

SEQ ID NO: 6951 - DNA, 33 bp, Homo sapien
agtggatagaggatacaaagttctcttatccat

SEQ ID NO: 6952 - DNA, 33 bp, Homo sapien
agtggatagaggataccaagttctcttatccat

SEQ ID NO: 6953 - DNA, 33 bp, Homo sapien
cttggcacccatatgcacctctcccaaataaag

SEQ ID NO: 6954 - DNA, 33 bp, Homo sapien
cttggcacccatatgcgcctctcccaaataaag

SEQ ID NO: 6955 - DNA, 33 bp, Homo sapien
ggggggccgtatgggccactcacacatgctatt

SEQ ID NO: 6956 - DNA, 33 bp, Homo sapien
ggggggccgtatgggcgactcacacatgctatt

SEQ ID NO: 6957 - DNA, 33 bp, Homo sapien
aattacacagagctaccgattggctgttacttt

SEQ ID NO: 6958 - DNA, 33 bp, Homo sapien
aattacacagagctactgattggctgttacttt

SEQ ID NO: 6959 - DNA, 33 bp, Homo sapien
tagtccttgtagatgccgcacccctgggtcttc

SEQ ID NO: 6960 - DNA, 33 bp, Homo sapien
tagtccttgtagatgctgcacccctgggtcttc

SEQ ID NO: 6961 - DNA, 33 bp, Homo sapien
gcaagtgtctagtgcacaggaatcgctcaaaaa

SEQ ID NO: 6962 - DNA, 33 bp, Homo sapien
gcaagtgtctagtgcataggaatcgctcaaaaa

SEQ ID NO: 6963 - DNA, 33 bp, Homo sapien
ggagtccatgttgccacgcctgtttgacatggt

SEQ ID NO: 6964 - DNA, 33 bp, Homo sapien
ggagtccatgttgccatgcctgtttgacatggt

SEQ ID NO: 6965 - DNA, 33 bp, Homo sapien
tcacacatgagcttgactattgtggaacgtcgt

SEQ ID NO: 6966 - DNA, 33 bp, Homo sapien
tcacacatgagcttgagtattgtggaacgtcgt

SEQ ID NO: 6967 - DNA, 33 bp, Homo sapien
ctttctttctactacacggccttggttgctcat

SEQ ID NO: 6968 - DNA, 33 bp, Homo sapien
ctttctttctactacatggccttggttgctcat

SEQ ID NO: 6969 - DNA, 33 bp, Homo sapien
cacttaccatgtgccaatcatgctacctgtaat

SEQ ID NO: 6970 - DNA, 33 bp, Homo sapien
cacttaccatgtgccagtcatgctacctgtaat

SEQ ID NO: 6971 - DNA, 33 bp, Homo sapien
agtcactttgcctgaacgcaaccagccctctct

SEQ ID NO: 6972 - DNA, 33 bp, Homo sapien
agtcactttgcctgaatgcaaccagccctctct

SEQ ID NO: 6973 - DNA, 33 bp, Homo sapien
tccttcccaatgacagaagatttgagtgtcttt

SEQ ID NO: 6974 - DNA, 33 bp, Homo sapien
tccttcccaatgacaggagatttgagtgtcttt

SEQ ID NO: 6975 - DNA, 33 bp, Homo sapien
ctccttccacatttcacgtccggtctgccagcg

SEQ ID NO: 6976 - DNA, 33 bp, Homo sapien
ctccttccacatttcatgtccggtctgccagcg

SEQ ID NO: 6977 - DNA, 33 bp, Homo sapien
gtgagacaaacgggtacggaggacatggccaga

SEQ ID NO: 6978 - DNA, 33 bp, Homo sapien
gtgagacaaacgggtatggaggacatggccaga

SEQ ID NO: 6979 - DNA, 33 bp, Homo sapien
ctccccccatcttcacaagctcagtatttggtg

SEQ ID NO: 6980 - DNA, 33 bp, Homo sapien
ctccccccatcttcacgagctcagtatttggtg

SEQ ID NO: 6981 - DNA, 33 bp, Homo sapien
atgtgccaagcactggaactggcgattggcata

SEQ ID NO: 6982 - DNA, 33 bp, Homo sapien
atgtgccaagcactgggactggcgattggcata

SEQ ID NO: 6983 - DNA, 33 bp, Homo sapien
tgaaaagacatgagacagcggagacgtgtataa

SEQ ID NO: 6984 - DNA, 33 bp, Homo sapien
tgaaaagacatgagactgcggagacgtgtataa

SEQ ID NO: 6985 - DNA, 33 bp, Homo sapien
aatgtgtgtgggtaaacgctgtatagaggatgt

SEQ ID NO: 6986 - DNA, 33 bp, Homo sapien
aatgtgtgtgggtaaaggctgtatagaggatgt

SEQ ID NO: 6987 - DNA, 33 bp, Homo sapien
gggaagtcacaagtcccgcagaaaagaatcagg

SEQ ID NO: 6988 - DNA, 33 bp, Homo sapien
gggaagtcacaagtcctgcagaaaagaatcagg

SEQ ID NO: 6989 - DNA, 33 bp, Homo sapien
ccatctgatgaaacctcaagccaaaccagtcca

SEQ ID NO: 6990 - DNA, 33 bp, Homo sapien
ccatctgatgaaacctgaagccaaaccagtcca

SEQ ID NO: 6991 - DNA, 33 bp, Homo sapien
gcacagaagattctaactccttcaagcttgctc

SEQ ID NO: 6992 - DNA, 33 bp, Homo sapien
gcacagaagattctaattccttcaagcttgctc

SEQ ID NO: 6993 - DNA, 33 bp, Homo sapien
aaatgttaatacttaacagtaatcagcagcatg

SEQ ID NO: 6994 - DNA, 33 bp, Homo sapien
aaatgttaatacttaatagtaatcagcagcatg

SEQ ID NO: 6995 - DNA, 33 bp, Homo sapien
ctgtctagagtcctcaatcccatcctccaagaa

SEQ ID NO: 6996 - DNA, 33 bp, Homo sapien
ctgtctagagtcctcagtcccatcctccaagaa

SEQ ID NO: 6997 - DNA, 33 bp, Homo sapien
cctccaagaagtccaaagtgtgagtcacaggca

SEQ ID NO: 6998 - DNA, 33 bp, Homo sapien
cctccaagaagtccaaggtgtgagtcacaggca

SEQ ID NO: 6999 - DNA, 33 bp, Homo sapien
attaggggaaatgcagaaagtcaccagcaaatc

SEQ ID NO: 7000 - DNA, 33 bp, Homo sapien
attaggggaaatgcaggaagtcaccagcaaatc

SEQ ID NO: 7001 - DNA, 33 bp, Homo sapien
ctggtcaggcaccaacagcagccctccagggta

SEQ ID NO: 7002 - DNA, 33 bp, Homo sapien
ctggtcaggcaccaacggcagccctccagggta

SEQ ID NO: 7003 - DNA, 33 bp, Homo sapien
tgcctctccttcagtgcaacatttgagccagct

SEQ ID NO: 7004 - DNA, 33 bp, Homo sapien
tgcctctccttcagtggaacatttgagccagct

SEQ ID NO: 7005 - DNA, 33 bp, Homo sapien
ctcaggagacagatacaaataaaacggacaggc

SEQ ID NO: 7006 - DNA, 33 bp, Homo sapien
ctcaggagacagatacgaataaaacggacaggc

SEQ ID NO: 7007 - DNA, 33 bp, Homo sapien
gctagttttagtcaacaaaatatcagtggaggt

SEQ ID NO: 7008 - DNA, 33 bp, Homo sapien
gctagttttagtcaacgaaatatcagtggaggt

SEQ ID NO: 7009 - DNA, 33 bp, Homo sapien
caaggcatgggagttaccttctcaaatactagg

SEQ ID NO: 7010 - DNA, 33 bp, Homo sapien
caaggcatgggagttatcttctcaaatactagg

SEQ ID NO: 7011 - DNA, 33 bp, Homo sapien
gcagggaccttaaaaacgatgtgtagtccacta

SEQ ID NO: 7012 - DNA, 33 bp, Homo sapien
gcagggaccttaaaaatgatgtgtagtccacta

SEQ ID NO: 7013 - DNA, 33 bp, Homo sapien
tgtagccctttaagccacttgaaggattttggg

SEQ ID NO: 7014 - DNA, 33 bp, Homo sapien
tgtagccctttaagcctcttgaaggattttggg

SEQ ID NO: 7015 - DNA, 33 bp, Homo sapien
taaataattgtacgggcccccatttcctgctaa

SEQ ID NO: 7016 - DNA, 33 bp, Homo sapien
taaataattgtacgggtccccatttcctgctaa

SEQ ID NO: 7017 - DNA, 33 bp, Homo sapien
gacagacagagcattaagtaacatggaatagca

SEQ ID NO: 7018 - DNA, 33 bp, Homo sapien
gacagacagagcattaggtaacatggaatagca

SEQ ID NO: 7019 - DNA, 33 bp, Homo sapien
ctttgggtaagtcaagaaacctggccaagttca

SEQ ID NO: 7020 - DNA, 33 bp, Homo sapien
ctttgggtaagtcaagtaacctggccaagttca

SEQ ID NO: 7021 - DNA, 33 bp, Homo sapien
gaatgttagtttctcaaactgagttcaaaagat

SEQ ID NO: 7022 - DNA, 33 bp, Homo sapien
gaatgttagtttctcatactgagttcaaaagat

SEQ ID NO: 7023 - DNA, 33 bp, Homo sapien
ctcatggctctaactgaagctttctgccagcct

SEQ ID NO: 7024 - DNA, 33 bp, Homo sapien
ctcatggctctaactgcagctttctgccagcct

SEQ ID NO: 7025 - DNA, 33 bp, Homo sapien
tggaaattttaaggcactctttttatgatgatt

SEQ ID NO: 7026 - DNA, 33 bp, Homo sapien
tggaaattttaaggcattctttttatgatgatt

SEQ ID NO: 7027 - DNA, 33 bp, Homo sapien
aggattgctgacgggacgcacgctgttcctctc

SEQ ID NO: 7028 - DNA, 33 bp, Homo sapien
aggattgctgacgggatgcacgctgttcctctc

SEQ ID NO: 7029 - DNA, 33 bp, Homo sapien
caggtttggaagataaatagacttgtttgaatt

SEQ ID NO: 7030 - DNA, 33 bp, Homo sapien
caggtttggaagataagtagacttgtttgaatt

SEQ ID NO: 7031 - DNA, 33 bp, Homo sapien
ttggttccacctatcccagtaagaatcatagat

SEQ ID NO: 7032 - DNA, 33 bp, Homo sapien
ttggttccacctatcctagtaagaatcatagat

SEQ ID NO: 7033 - DNA, 33 bp, Homo sapien
tgccctactttcttaccgaaccaactgataatt

SEQ ID NO: 7034 - DNA, 33 bp, Homo sapien
tgccctactttcttactgaaccaactgataatt

SEQ ID NO: 7035 - DNA, 33 bp, Homo sapien
acagaagttagagtgtcaattatcagttggttc

SEQ ID NO: 7036 - DNA, 33 bp, Homo sapien
acagaagttagagtgttaattatcagttggttc

SEQ ID NO: 7037 - DNA, 33 bp, Homo sapien
cgttgtttagcattaaatgtttcatcgtctgat

SEQ ID NO: 7038 - DNA, 33 bp, Homo sapien
cgttgtttagcattaagtgtttcatcgtctgat

SEQ ID NO: 7039 - DNA, 33 bp, Homo sapien
ttatgaggaaacaaaaagctcaacaggaaaaca

SEQ ID NO: 7040 - DNA, 33 bp, Homo sapien
ttatgaggaaacaaaaggctcaacaggaaaaca

SEQ ID NO: 7041 - DNA, 33 bp, Homo sapien
tatgatgaagtggttaagatgagaaatttcaaa

SEQ ID NO: 7042 - DNA, 33 bp, Homo sapien
tatgatgaagtggttaggatgagaaatttcaaa

SEQ ID NO: 7043 - DNA, 33 bp, Homo sapien
cggagtttgaaagttcccactgttgtctggaga

SEQ ID NO: 7044 - DNA, 33 bp, Homo sapien
cggagtttgaaagttctcactgttgtctggaga

SEQ ID NO: 7045 - DNA, 33 bp, Homo sapien
gctcccttgaagctccaatgccatacgacccag

SEQ ID NO: 7046 - DNA, 33 bp, Homo sapien
gctcccttgaagctccgatgccatacgacccag

SEQ ID NO: 7047 - DNA, 33 bp, Homo sapien
gctgttgttttcctgagaaaaggtcagccccag

SEQ ID NO: 7048 - DNA, 33 bp, Homo sapien
gctgttgttttcctgataaaaggtcagccccag

SEQ ID NO: 7049 - DNA, 33 bp, Homo sapien
ccagtgatgcaataaacagccataagggatctg

SEQ ID NO: 7050 - DNA, 33 bp, Homo sapien
ccagtgatgcaataaagagccataagggatctg

SEQ ID NO: 7051 - DNA, 33 bp, Homo sapien
tagctggtttaggatcagagagacacagattgg

SEQ ID NO: 7052 - DNA, 33 bp, Homo sapien
tagctggtttaggatcggagagacacagattgg

SEQ ID NO: 7053 - DNA, 33 bp, Homo sapien
atgtgcattttccttacgttgctaatacaaggc

SEQ ID NO: 7054 - DNA, 33 bp, Homo sapien
atgtgcattttccttatgttgctaatacaaggc

SEQ ID NO: 7055 - DNA, 33 bp, Homo sapien
tatctaaagttgcaccagaaataagagtatcaa

SEQ ID NO: 7056 - DNA, 33 bp, Homo sapien
tatctaaagttgcaccggaaataagagtatcaa

SEQ ID NO: 7057 - DNA, 33 bp, Homo sapien
ggttgtgaggaacgagaaaagggtggatgcctc

SEQ ID NO: 7058 - DNA, 33 bp, Homo sapien
ggttgtgaggaacgaggaaagggtggatgcctc

SEQ ID NO: 7059 - DNA, 33 bp, Homo sapien
taagtcttgtgcaatgaagatggaggaagattt

SEQ ID NO: 7060 - DNA, 33 bp, Homo sapien
taagtcttgtgcaatgcagatggaggaagattt

SEQ ID NO: 7061 - DNA, 33 bp, Homo sapien
tgagagttcactggggaatatataaagagggca

SEQ ID NO: 7062 - DNA, 33 bp, Homo sapien
tgagagttcactgggggatatataaagagggca

SEQ ID NO: 7063 - DNA, 33 bp, Homo sapien
aggaattaagcctgaggcagggtcctctcagat

SEQ ID NO: 7064 - DNA, 33 bp, Homo sapien
aggaattaagcctgagtcagggtcctctcagat

SEQ ID NO: 7065 - DNA, 33 bp, Homo sapien
aaccagattttgtcccacacaacagttccctga

SEQ ID NO: 7066 - DNA, 33 bp, Homo sapien
aaccagattttgtccctcacaacagttccctga

SEQ ID NO: 7067 - DNA, 33 bp, Homo sapien
cctcagcctatgacagcagttttgcttctctct

SEQ ID NO: 7068 - DNA, 33 bp, Homo sapien
cctcagcctatgacagtagttttgcttctctct

SEQ ID NO: 7069 - DNA, 33 bp, Homo sapien
gggagtaagaggtggaagaaggtgagattctag

SEQ ID NO: 7070 - DNA, 33 bp, Homo sapien
gggagtaagaggtggaggaaggtgagattctag

SEQ ID NO: 7071 - DNA, 33 bp, Homo sapien
tggctggattcaaaaaaagctctccctgtgcgc

SEQ ID NO: 7072 - DNA, 33 bp, Homo sapien
tggctggattcaaaaacagctctccctgtgcgc

SEQ ID NO: 7073 - DNA, 33 bp, Homo sapien
agactttgaaggcaaaagaggcaaagggaggca

SEQ ID NO: 7074 - DNA, 33 bp, Homo sapien
agactttgaaggcaaaggaggcaaagggaggca

SEQ ID NO: 7075 - DNA, 33 bp, Homo sapien
ctcttttggacaaaatcaatgggaagccattac

SEQ ID NO: 7076 - DNA, 33 bp, Homo sapien
ctcttttggacaaaatgaatgggaagccattac

SEQ ID NO: 7077 - DNA, 33 bp, Homo sapien
tgcaaaacccagaaataaccagcctggcattgt

SEQ ID NO: 7078 - DNA, 33 bp, Homo sapien
tgcaaaacccagaaatgaccagcctggcattgt

SEQ ID NO: 7079 - DNA, 33 bp, Homo sapien
ccttgtcttcaaaggacgactctgactgctcca

SEQ ID NO: 7080 - DNA, 33 bp, Homo sapien
ccttgtcttcaaaggatgactctgactgctcca

SEQ ID NO: 7081 - DNA, 33 bp, Homo sapien
gggaagacactcagcagaatctactctggtcct

SEQ ID NO: 7082 - DNA, 33 bp, Homo sapien
gggaagacactcagcataatctactctggtcct

SEQ ID NO: 7083 - DNA, 33 bp, Homo sapien
caaacctgtatatgtaccccctaaatctaaaag

SEQ ID NO: 7084 - DNA, 33 bp, Homo sapien
caaacctgtatatgtatcccctaaatctaaaag

SEQ ID NO: 7085 - DNA, 33 bp, Homo sapien
ctgcaaagcagaaagaatctcaccattttatag

SEQ ID NO: 7086 - DNA, 33 bp, Homo sapien
ctgcaaagcagaaagagtctcaccattttatag

SEQ ID NO: 7087 - DNA, 33 bp, Homo sapien
tggatgagtgcaccacagtgatcggctttgagg

SEQ ID NO: 7088 - DNA, 33 bp, Homo sapien
tggatgagtgcaccacggtgatcggctttgagg

SEQ ID NO: 7089 - DNA, 33 bp, Homo sapien
gagggtgcttttttgacgggtgctccataaacg

SEQ ID NO: 7090 - DNA, 33 bp, Homo sapien
gagggtgcttttttgatgggtgctccataaacg

SEQ ID NO: 7091 - DNA, 33 bp, Homo sapien
ggagtttgtgagaatacgggctatttgcataac

SEQ ID NO: 7092 - DNA, 33 bp, Homo sapien
ggagtttgtgagaatatgggctatttgcataac

SEQ ID NO: 7093 - DNA, 33 bp, Homo sapien
tagagagagaaggatcaattcaggcagagtgaa

SEQ ID NO: 7094 - DNA, 33 bp, Homo sapien
tagagagagaaggatcgattcaggcagagtgaa

SEQ ID NO: 7095 - DNA, 33 bp, Homo sapien
attcaggcagagtgaacgtatgtcatatatccc

SEQ ID NO: 7096 - DNA, 33 bp, Homo sapien
attcaggcagagtgaatgtatgtcatatatccc

SEQ ID NO: 7097 - DNA, 33 bp, Homo sapien
atagcacctggcggaaagggagaagagaggctg

SEQ ID NO: 7098 - DNA, 33 bp, Homo sapien
atagcacctggcggaaggggagaagagaggctg

SEQ ID NO: 7099 - DNA, 33 bp, Homo sapien
gggcaagagagcctcaaactgtgatgccctggc

SEQ ID NO: 7100 - DNA, 33 bp, Homo sapien
gggcaagagagcctcagactgtgatgccctggc

SEQ ID NO: 7101 - DNA, 33 bp, Homo sapien
atcctagggcaggccaaaaatgcccggctagcc

SEQ ID NO: 7102 - DNA, 33 bp, Homo sapien
atcctagggcaggccagaaatgcccggctagcc

SEQ ID NO: 7103 - DNA, 33 bp, Homo sapien
aagttgtggatggccacgtcctgcggttgaagc

SEQ ID NO: 7104 - DNA, 33 bp, Homo sapien
aagttgtggatggccatgtcctgcggttgaagc

SEQ ID NO: 7105 - DNA, 33 bp, Homo sapien
tttaatggggaagcacagtccgcctcctaataa

SEQ ID NO: 7106 - DNA, 33 bp, Homo sapien
tttaatggggaagcacggtccgcctcctaataa

SEQ ID NO: 7107 - DNA, 33 bp, Homo sapien
ttcacctgcacaggctaaatctcaacaagtcca

SEQ ID NO: 7108 - DNA, 33 bp, Homo sapien
ttcacctgcacaggctgaatctcaacaagtcca

SEQ ID NO: 7109 - DNA, 33 bp, Homo sapien
gtatgtactaattaccaaaggttcttatctttt

SEQ ID NO: 7110 - DNA, 33 bp, Homo sapien
gtatgtactaattaccgaaggttcttatctttt

SEQ ID NO: 7111 - DNA, 33 bp, Homo sapien
atgagaaactgtgctacgggcaaagatgttgag

SEQ ID NO: 7112 - DNA, 33 bp, Homo sapien
atgagaaactgtgctatgggcaaagatgttgag

SEQ ID NO: 7113 - DNA, 33 bp, Homo sapien
gctgtggctgatgaatagactagctgcttccaa

SEQ ID NO: 7114 - DNA, 33 bp, Homo sapien
gctgtggctgatgaatggactagctgcttccaa

SEQ ID NO: 7115 - DNA, 33 bp, Homo sapien
gctttgagctgataaaaattgttgaacctgatc

SEQ ID NO: 7116 - DNA, 33 bp, Homo sapien
gctttgagctgataaagattgttgaacctgatc

SEQ ID NO: 7117 - DNA, 33 bp, Homo sapien
cagtccccggcacaccacgacaattagtcacct

SEQ ID NO: 7118 - DNA, 33 bp, Homo sapien
cagtccccggcacaccgcgacaattagtcacct

SEQ ID NO: 7119 - DNA, 33 bp, Homo sapien
gagcccttagcacatcactgcaatgtttctggc

SEQ ID NO: 7120 - DNA, 33 bp, Homo sapien
gagcccttagcacatcgctgcaatgtttctggc

SEQ ID NO: 7121 - DNA, 33 bp, Homo sapien
taatagaactgtcaacaggccataaaatctgct

SEQ ID NO: 7122 - DNA, 33 bp, Homo sapien
taatagaactgtcaaccggccataaaatctgct

SEQ ID NO: 7123 - DNA, 33 bp, Homo sapien
ggtttaggattgtttccaccaattactggttga

SEQ ID NO: 7124 - DNA, 33 bp, Homo sapien
ggtttaggattgtttctaccaattactggttga

SEQ ID NO: 7125 - DNA, 33 bp, Homo sapien
tgctgctgttagatgaagtgtactcctaaagtc

SEQ ID NO: 7126 - DNA, 33 bp, Homo sapien
tgctgctgttagatgatgtgtactcctaaagtc

SEQ ID NO: 7127 - DNA, 33 bp, Homo sapien
ccctgacttggggtcagaagttagaacagaacc

SEQ ID NO: 7128 - DNA, 33 bp, Homo sapien
ccctgacttggggtcataagttagaacagaacc

SEQ ID NO: 7129 - DNA, 33 bp, Homo sapien
ttgctacagagaaaaacgaactaggataaggaa

SEQ ID NO: 7130 - DNA, 33 bp, Homo sapien
ttgctacagagaaaaatgaactaggataaggaa

SEQ ID NO: 7131 - DNA, 33 bp, Homo sapien
ctcttgggacactgacagccagacttataccct

SEQ ID NO: 7132 - DNA, 33 bp, Homo sapien
ctcttgggacactgacggccagacttataccct

SEQ ID NO: 7133 - DNA, 33 bp, Homo sapien
ttgcaatggatcctgcaaattttccaaccggtc

SEQ ID NO: 7134 - DNA, 33 bp, Homo sapien
ttgcaatggatcctgccaattttccaaccggtc

SEQ ID NO: 7135 - DNA, 33 bp, Homo sapien
atacctaatatgcataaataaactcgtgcaagg

SEQ ID NO: 7136 - DNA, 33 bp, Homo sapien
atacctaatatgcatagataaactcgtgcaagg

SEQ ID NO: 7137 - DNA, 33 bp, Homo sapien
ctgggggccagttagacgagcgtgggctgagca

SEQ ID NO: 7138 - DNA, 33 bp, Homo sapien
ctgggggccagttagatgagcgtgggctgagca

SEQ ID NO: 7139 - DNA, 33 bp, Homo sapien
agaaggcatcctgaagacatcactagagaaagc

SEQ ID NO: 7140 - DNA, 33 bp, Homo sapien
agaaggcatcctgaaggcatcactagagaaagc

SEQ ID NO: 7141 - DNA, 33 bp, Homo sapien
actactaggggacaaccggtatactctacaaca

SEQ ID NO: 7142 - DNA, 33 bp, Homo sapien
actactaggggacaactggtatactctacaaca

SEQ ID NO: 7143 - DNA, 33 bp, Homo sapien
atgcagtgggtgactggaaatcgaatttgtcct

SEQ ID NO: 7144 - DNA, 33 bp, Homo sapien
atgcagtgggtgactgtaaatcgaatttgtcct

SEQ ID NO: 7145 - DNA, 33 bp, Homo sapien
tctctcaggaagggccaggagacttatttatac

SEQ ID NO: 7146 - DNA, 33 bp, Homo sapien
tctctcaggaagggcctggagacttatttatac

SEQ ID NO: 7147 - DNA, 33 bp, Homo sapien
ggctggcccagatgccaagtcaggaattcccca

SEQ ID NO: 7148 - DNA, 33 bp, Homo sapien
ggctggcccagatgccgagtcaggaattcccca

SEQ ID NO: 7149 - DNA, 33 bp, Homo sapien
ctgatgtctaagctgggacacaaggagtgagtc

SEQ ID NO: 7150 - DNA, 33 bp, Homo sapien
ctgatgtctaagctggtacacaaggagtgagtc

SEQ ID NO: 7151 - DNA, 33 bp, Homo sapien
cctcacagaaaactcaccatttaaggtaggtag

SEQ ID NO: 7152 - DNA, 33 bp, Homo sapien
cctcacagaaaactcatcatttaaggtaggtag

SEQ ID NO: 7153 - DNA, 33 bp, Homo sapien
gtggaggtgcaggaaacgggtttgtgcttggca

SEQ ID NO: 7154 - DNA, 33 bp, Homo sapien
gtggaggtgcaggaaatgggtttgtgcttggca

SEQ ID NO: 7155 - DNA, 33 bp, Homo sapien
ttacataccacagactaaacatcattcaatctc

SEQ ID NO: 7156 - DNA, 33 bp, Homo sapien
ttacataccacagactgaacatcattcaatctc

SEQ ID NO: 7157 - DNA, 33 bp, Homo sapien
tccctggaggccgcagcagcttgattgtcaccc

SEQ ID NO: 7158 - DNA, 33 bp, Homo sapien
tccctggaggccgcaggagcttgattgtcaccc

SEQ ID NO: 7159 - DNA, 33 bp, Homo sapien
gaagcaaacagggcacgattaaggatgtgattc

SEQ ID NO: 7160 - DNA, 33 bp, Homo sapien
gaagcaaacagggcactattaaggatgtgattc

SEQ ID NO: 7161 - DNA, 33 bp, Homo sapien
agagaaggcacgaatgaatcaacgagcaaatac

SEQ ID NO: 7162 - DNA, 33 bp, Homo sapien
agagaaggcacgaatggatcaacgagcaaatac

SEQ ID NO: 7163 - DNA, 33 bp, Homo sapien
gaatccatatcagtggaatacatacattaaaca

SEQ ID NO: 7164 - DNA, 33 bp, Homo sapien
gaatccatatcagtggcatacatacattaaaca

SEQ ID NO: 7165 - DNA, 33 bp, Homo sapien
tgcaaaagtaactgtgaagattggctatgataa

SEQ ID NO: 7166 - DNA, 33 bp, Homo sapien
tgcaaaagtaactgtgcagattggctatgataa

SEQ ID NO: 7167 - DNA, 33 bp, Homo sapien
taatcacttacaaccacctagatattaagaaga

SEQ ID NO: 7168 - DNA, 33 bp, Homo sapien
taatcacttacaaccatctagatattaagaaga

SEQ ID NO: 7169 - DNA, 33 bp, Homo sapien
ttggcagtgtttaagacagatgcattccctgcc

SEQ ID NO: 7170 - DNA, 33 bp, Homo sapien
ttggcagtgtttaagatagatgcattccctgcc

SEQ ID NO: 7171 - DNA, 33 bp, Homo sapien
aagactgcaacccaacaagaaccagcccagcca

SEQ ID NO: 7172 - DNA, 33 bp, Homo sapien
aagactgcaacccaacgagaaccagcccagcca

SEQ ID NO: 7173 - DNA, 33 bp, Homo sapien
caagaactcactattacgacacagtactaagga

SEQ ID NO: 7174 - DNA, 33 bp, Homo sapien
caagaactcactattatgacacagtactaagga

SEQ ID NO: 7175 - DNA, 33 bp, Homo sapien
aaaatgaaccccgaatcagtggtcaggtggttc

SEQ ID NO: 7176 - DNA, 33 bp, Homo sapien
aaaatgaaccccgaattagtggtcaggtggttc

SEQ ID NO: 7177 - DNA, 33 bp, Homo sapien
aaaatgagaatggagcagaccagtgcttttcaa

SEQ ID NO: 7178 - DNA, 33 bp, Homo sapien
aaaatgagaatggagcggaccagtgcttttcaa

SEQ ID NO: 7179 - DNA, 33 bp, Homo sapien
ccagtgcttttcaaaccacattcctcctgtcct

SEQ ID NO: 7180 - DNA, 33 bp, Homo sapien
ccagtgcttttcaaacgacattcctcctgtcct

SEQ ID NO: 7181 - DNA, 33 bp, Homo sapien
aaagccctctgttgccaccgcgtttgagaatct

SEQ ID NO: 7182 - DNA, 33 bp, Homo sapien
aaagccctctgttgccgccgcgtttgagaatct

SEQ ID NO: 7183 - DNA, 33 bp, Homo sapien
tgatcttctcccccacaaatagccatccgtctg

SEQ ID NO: 7184 - DNA, 33 bp, Homo sapien
tgatcttctcccccacgaatagccatccgtctg

SEQ ID NO: 7185 - DNA, 33 bp, Homo sapien
agtttcaattaagtcccgctggctctggttgtg

SEQ ID NO: 7186 - DNA, 33 bp, Homo sapien
agtttcaattaagtcctgctggctctggttgtg

SEQ ID NO: 7187 - DNA, 33 bp, Homo sapien
tccagatctgcccttgaagttttcagctccttg

SEQ ID NO: 7188 - DNA, 33 bp, Homo sapien
tccagatctgcccttggagttttcagctccttg

SEQ ID NO: 7189 - DNA, 33 bp, Homo sapien
gaatgggagtgagcagaacccagtctgatttta

SEQ ID NO: 7190 - DNA, 33 bp, Homo sapien
gaatgggagtgagcaggacccagtctgatttta

SEQ ID NO: 7191 - DNA, 33 bp, Homo sapien
tcggaacatacattaacagggaacggtctaata

SEQ ID NO: 7192 - DNA, 33 bp, Homo sapien
tcggaacatacattaagagggaacggtctaata

SEQ ID NO: 7193 - DNA, 33 bp, Homo sapien
cctcaagggagttaacagcaaaaggatagggct

SEQ ID NO: 7194 - DNA, 33 bp, Homo sapien
cctcaagggagttaacggcaaaaggatagggct

SEQ ID NO: 7195 - DNA, 33 bp, Homo sapien
atctgattgtttttcacgtaagacacagaaagg

SEQ ID NO: 7196 - DNA, 33 bp, Homo sapien
atctgattgtttttcatgtaagacacagaaagg

SEQ ID NO: 7197 - DNA, 33 bp, Homo sapien
ctattttgaaatgtacaatagattaacgttaac

SEQ ID NO: 7198 - DNA, 33 bp, Homo sapien
ctattttgaaatgtacgatagattaacgttaac

SEQ ID NO: 7199 - DNA, 33 bp, Homo sapien
ctctccgtcttcatgaactctactttttttttt

SEQ ID NO: 7200 - DNA, 33 bp, Homo sapien
ctctccgtcttcatgagctctactttttttttt

SEQ ID NO: 7201 - DNA, 33 bp, Homo sapien
ttcttaaagaacaggaatcaatatatcaaagat

SEQ ID NO: 7202 - DNA, 33 bp, Homo sapien
ttcttaaagaacaggagtcaatatatcaaagat

SEQ ID NO: 7203 - DNA, 33 bp, Homo sapien
tcttcatttttggaacgctctatgttggccttt

SEQ ID NO: 7204 - DNA, 33 bp, Homo sapien
tcttcatttttggaactctctatgttggccttt

SEQ ID NO: 7205 - DNA, 33 bp, Homo sapien
attagacatccaagtgcagaggtcaagtggaca

SEQ ID NO: 7206 - DNA, 33 bp, Homo sapien
attagacatccaagtgtagaggtcaagtggaca

SEQ ID NO: 7207 - DNA, 33 bp, Homo sapien
gtattgctatgagacccagtacctaatctcatt

SEQ ID NO: 7208 - DNA, 33 bp, Homo sapien
gtattgctatgagaccgagtacctaatctcatt

SEQ ID NO: 7209 - DNA, 33 bp, Homo sapien
agggaaagaaccccaactgctcaatgagtgtct

SEQ ID NO: 7210 - DNA, 33 bp, Homo sapien
agggaaagaaccccaattgctcaatgagtgtct

SEQ ID NO: 7211 - DNA, 33 bp, Homo sapien
gaaagtttcagagctcaaaatcacagagctggg

SEQ ID NO: 7212 - DNA, 33 bp, Homo sapien
gaaagtttcagagctcgaaatcacagagctggg

SEQ ID NO: 7213 - DNA, 33 bp, Homo sapien
actcgttctcaggatcacaggcattcatgtcca

SEQ ID NO: 7214 - DNA, 33 bp, Homo sapien
actcgttctcaggatcgcaggcattcatgtcca

SEQ ID NO: 7215 - DNA, 33 bp, Homo sapien
aaaaggcaatttacaaacagtgatacagatgga

SEQ ID NO: 7216 - DNA, 33 bp, Homo sapien
aaaaggcaatttacaagcagtgatacagatgga

SEQ ID NO: 7217 - DNA, 33 bp, Homo sapien
taaaagggctaatttacgtgcttggatcctgaa

SEQ ID NO: 7218 - DNA, 33 bp, Homo sapien
taaaagggctaatttatgtgcttggatcctgaa

SEQ ID NO: 7219 - DNA, 33 bp, Homo sapien
atttgttaaattgagaacgtttgtggatttaga

SEQ ID NO: 7220 - DNA, 33 bp, Homo sapien
atttgttaaattgagagcgtttgtggatttaga

SEQ ID NO: 7221 - DNA, 33 bp, Homo sapien
gggacccagtggggcaatctcatctgtctgtga

SEQ ID NO: 7222 - DNA, 33 bp, Homo sapien
gggacccagtggggcagtctcatctgtctgtga

SEQ ID NO: 7223 - DNA, 33 bp, Homo sapien
tcttcacttcattccacacatgtcgaccaaaat

SEQ ID NO: 7224 - DNA, 33 bp, Homo sapien
tcttcacttcattccagacatgtcgaccaaaat

SEQ ID NO: 7225 - DNA, 33 bp, Homo sapien
cgtttgccaacatccaatctgtttggagaaaac

SEQ ID NO: 7226 - DNA, 33 bp, Homo sapien
cgtttgccaacatccagtctgtttggagaaaac

SEQ ID NO: 7227 - DNA, 33 bp, Homo sapien
acaaatgaggactgaacgggttcatatatgtca

SEQ ID NO: 7228 - DNA, 33 bp, Homo sapien
acaaatgaggactgaatgggttcatatatgtca

SEQ ID NO: 7229 - DNA, 33 bp, Homo sapien
attagctttgcaaagacagttgagtttggggaa

SEQ ID NO: 7230 - DNA, 33 bp, Homo sapien
attagctttgcaaagagagttgagtttggggaa

SEQ ID NO: 7231 - DNA, 33 bp, Homo sapien
atatcagatctctcccactgccataattttctc

SEQ ID NO: 7232 - DNA, 33 bp, Homo sapien
atatcagatctctccctctgccataattttctc

SEQ ID NO: 7233 - DNA, 33 bp, Homo sapien
cagaagctaaggatggaaaatttgactaatcct

SEQ ID NO: 7234 - DNA, 33 bp, Homo sapien
cagaagctaaggatgggaaatttgactaatcct

SEQ ID NO: 7235 - DNA, 33 bp, Homo sapien
tggtcgacgtggaccacgccttgctgcacctct

SEQ ID NO: 7236 - DNA, 33 bp, Homo sapien
tggtcgacgtggaccatgccttgctgcacctct

SEQ ID NO: 7237 - DNA, 33 bp, Homo sapien
taaaaattgcctgtgacgagaaaagaatgcacc

SEQ ID NO: 7238 - DNA, 33 bp, Homo sapien
taaaaattgcctgtgatgagaaaagaatgcacc

SEQ ID NO: 7239 - DNA, 33 bp, Homo sapien
agtcttgagtccttccaagagttgagagtaggg

SEQ ID NO: 7240 - DNA, 33 bp, Homo sapien
agtcttgagtccttccgagagttgagagtaggg

SEQ ID NO: 7241 - DNA, 33 bp, Homo sapien
ggttcctttttgctccagctgtactgtaaacac

SEQ ID NO: 7242 - DNA, 33 bp, Homo sapien
ggttcctttttgctccggctgtactgtaaacac

SEQ ID NO: 7243 - DNA, 33 bp, Homo sapien
aaatgcctccagtaagcacaggctgcaaaatcc

SEQ ID NO: 7244 - DNA, 33 bp, Homo sapien
aaatgcctccagtaagtacaggctgcaaaatcc

SEQ ID NO: 7245 - DNA, 33 bp, Homo sapien
tgggcgggcagcgtgacgtctcacccactgctt

SEQ ID NO: 7246 - DNA, 33 bp, Homo sapien
tgggcgggcagcgtgatgtctcacccactgctt

SEQ ID NO: 7247 - DNA, 33 bp, Homo sapien
attctagccctgaagaatctgaagttagacaag

SEQ ID NO: 7248 - DNA, 33 bp, Homo sapien
attctagccctgaagactctgaagttagacaag

SEQ ID NO: 7249 - DNA, 33 bp, Homo sapien
gacacagaggatgccaagttcttttagtaattc

SEQ ID NO: 7250 - DNA, 33 bp, Homo sapien
gacacagaggatgccatgttcttttagtaattc

SEQ ID NO: 7251 - DNA, 33 bp, Homo sapien
tctggaccagctactgaattattaatctcactt

SEQ ID NO: 7252 - DNA, 33 bp, Homo sapien
tctggaccagctactgcattattaatctcactt

SEQ ID NO: 7253 - DNA, 33 bp, Homo sapien
ggctagtcaggagggaaaccctcaagtttaaat

SEQ ID NO: 7254 - DNA, 33 bp, Homo sapien
ggctagtcaggagggacaccctcaagtttaaat

SEQ ID NO: 7255 - DNA, 33 bp, Homo sapien
accgaggggtgggaatcactgaaatggaaaatc

SEQ ID NO: 7256 - DNA, 33 bp, Homo sapien
accgaggggtgggaattactgaaatggaaaatc

SEQ ID NO: 7257 - DNA, 33 bp, Homo sapien
gagaaccatcatttcacagttaaaagaaagaca

SEQ ID NO: 7258 - DNA, 33 bp, Homo sapien
gagaaccatcatttcatagttaaaagaaagaca

SEQ ID NO: 7259 - DNA, 33 bp, Homo sapien
ttgcctaacaaattcaacctaatgacctatttc

SEQ ID NO: 7260 - DNA, 33 bp, Homo sapien
ttgcctaacaaattcatcctaatgacctatttc

SEQ ID NO: 7261 - DNA, 33 bp, Homo sapien
ttgtgcagatgacaagaaaccagccatatcttt

SEQ ID NO: 7262 - DNA, 33 bp, Homo sapien
ttgtgcagatgacaagcaaccagccatatcttt

SEQ ID NO: 7263 - DNA, 33 bp, Homo sapien
cagaggattcccagcacagtgaacaccaggtgc

SEQ ID NO: 7264 - DNA, 33 bp, Homo sapien
cagaggattcccagcatagtgaacaccaggtgc

SEQ ID NO: 7265 - DNA, 33 bp, Homo sapien
ccagtctgaaacgtcaagaatgcacctgttgag

SEQ ID NO: 7266 - DNA, 33 bp, Homo sapien
ccagtctgaaacgtcacgaatgcacctgttgag

SEQ ID NO: 7267 - DNA, 33 bp, Homo sapien
ctgttggtgggagaaacgacagagagtgtaaaa

SEQ ID NO: 7268 - DNA, 33 bp, Homo sapien
ctgttggtgggagaaatgacagagagtgtaaaa

SEQ ID NO: 7269 - DNA, 33 bp, Homo sapien
caccagttactgcaccaaagcccagtcatcaga

SEQ ID NO: 7270 - DNA, 33 bp, Homo sapien
caccagttactgcaccgaagcccagtcatcaga

SEQ ID NO: 7271 - DNA, 33 bp, Homo sapien
tctatcgcttggagctaaaagcattctgacata

SEQ ID NO: 7272 - DNA, 33 bp, Homo sapien
tctatcgcttggagctgaaagcattctgacata

SEQ ID NO: 7273 - DNA, 33 bp, Homo sapien
ggacctggatgaacacgctgagcaagagggagg

SEQ ID NO: 7274 - DNA, 33 bp, Homo sapien
ggacctggatgaacactctgagcaagagggagg

SEQ ID NO: 7275 - DNA, 33 bp, Homo sapien
tcatatggcaaaaataccataaagcacagtaaa

SEQ ID NO: 7276 - DNA, 33 bp, Homo sapien
tcatatggcaaaaatatcataaagcacagtaaa

SEQ ID NO: 7277 - DNA, 33 bp, Homo sapien
tggacataaatagtctcaacaatgtattgtgca

SEQ ID NO: 7278 - DNA, 33 bp, Homo sapien
tggacataaatagtcttaacaatgtattgtgca

SEQ ID NO: 7279 - DNA, 33 bp, Homo sapien
agggagagaaggggacagagaataattcagatg

SEQ ID NO: 7280 - DNA, 33 bp, Homo sapien
agggagagaaggggacggagaataattcagatg

SEQ ID NO: 7281 - DNA, 33 bp, Homo sapien
aattcagatgtaaccacgcattctttagtacat

SEQ ID NO: 7282 - DNA, 33 bp, Homo sapien
aattcagatgtaaccatgcattctttagtacat

SEQ ID NO: 7283 - DNA, 33 bp, Homo sapien
agcggaaaagagcaaacgtggcttctaacatct

SEQ ID NO: 7284 - DNA, 33 bp, Homo sapien
agcggaaaagagcaaatgtggcttctaacatct

SEQ ID NO: 7285 - DNA, 33 bp, Homo sapien
cttctggtccgttctgcaaagagcttcccaaag

SEQ ID NO: 7286 - DNA, 33 bp, Homo sapien
cttctggtccgttctggaaagagcttcccaaag

SEQ ID NO: 7287 - DNA, 33 bp, Homo sapien
gaaaacccagacatcacggagacccgggttcaa

SEQ ID NO: 7288 - DNA, 33 bp, Homo sapien
gaaaacccagacatcagggagacccgggttcaa

SEQ ID NO: 7289 - DNA, 33 bp, Homo sapien
ttgttcaaggtctcaccgccgctaattggtgga

SEQ ID NO: 7290 - DNA, 33 bp, Homo sapien
ttgttcaaggtctcactgccgctaattggtgga

SEQ ID NO: 7291 - DNA, 33 bp, Homo sapien
ggacttcgagctctgaggtctaggttctttctg

SEQ ID NO: 7292 - DNA, 33 bp, Homo sapien
ggacttcgagctctgatgtctaggttctttctg

SEQ ID NO: 7293 - DNA, 33 bp, Homo sapien
gatgtcccttctcctcccatgatgtcctggtgg

SEQ ID NO: 7294 - DNA, 33 bp, Homo sapien
gatgtcccttctcctctcatgatgtcctggtgg

SEQ ID NO: 7295 - DNA, 33 bp, Homo sapien
cagtctcaacttggccaataaaggctcagtctc

SEQ ID NO: 7296 - DNA, 33 bp, Homo sapien
cagtctcaacttggccgataaaggctcagtctc

SEQ ID NO: 7297 - DNA, 33 bp, Homo sapien
agacccggaggcgacactagaggcaggctctgg

SEQ ID NO: 7298 - DNA, 33 bp, Homo sapien
agacccggaggcgacattagaggcaggctctgg

SEQ ID NO: 7299 - DNA, 33 bp, Homo sapien
ccctgtctgctggtgcacatccctttctgcaca

SEQ ID NO: 7300 - DNA, 33 bp, Homo sapien
ccctgtctgctggtgcgcatccctttctgcaca

SEQ ID NO: 7301 - DNA, 33 bp, Homo sapien
gcagggctgtttctcacatgtatctgagagtga

SEQ ID NO: 7302 - DNA, 33 bp, Homo sapien
gcagggctgtttctcatatgtatctgagagtga

SEQ ID NO: 7303 - DNA, 33 bp, Homo sapien
gagtccagtgacaagaaggaacaagatggttta

SEQ ID NO: 7304 - DNA, 33 bp, Homo sapien
gagtccagtgacaagagggaacaagatggttta

SEQ ID NO: 7305 - DNA, 33 bp, Homo sapien
gccactgaagttaacaatcttgtggaaaagaac

SEQ ID NO: 7306 - DNA, 33 bp, Homo sapien
gccactgaagttaacagtcttgtggaaaagaac

SEQ ID NO: 7307 - DNA, 33 bp, Homo sapien
attttcatggtggaacagatggtcactcacttc

SEQ ID NO: 7308 - DNA, 33 bp, Homo sapien
attttcatggtggaactgatggtcactcacttc

SEQ ID NO: 7309 - DNA, 33 bp, Homo sapien
tctgttcaaagcttcaaaggtattcggcaagga

SEQ ID NO: 7310 - DNA, 33 bp, Homo sapien
tctgttcaaagcttcagaggtattcggcaagga

SEQ ID NO: 7311 - DNA, 33 bp, Homo sapien
gttcaaaacagcctaaaagaccatactgaacac

SEQ ID NO: 7312 - DNA, 33 bp, Homo sapien
gttcaaaacagcctaagagaccatactgaacac

SEQ ID NO: 7313 - DNA, 33 bp, Homo sapien
ctgtatttagaagatgaatctttggcatcaaaa

SEQ ID NO: 7314 - DNA, 33 bp, Homo sapien
ctgtatttagaagatggatctttggcatcaaaa

SEQ ID NO: 7315 - DNA, 33 bp, Homo sapien
accttagctatacttaggaaactcagataaaga

SEQ ID NO: 7316 - DNA, 33 bp, Homo sapien
accttagctatacttatgaaactcagataaaga

SEQ ID NO: 7317 - DNA, 33 bp, Homo sapien
gagagtagcattctggacataaagtgtcatggg

SEQ ID NO: 7318 - DNA, 33 bp, Homo sapien
gagagtagcattctgggcataaagtgtcatggg

SEQ ID NO: 7319 - DNA, 33 bp, Homo sapien
acaacagaaacgttaacaacgaagggagtgagc

SEQ ID NO: 7320 - DNA, 33 bp, Homo sapien
acaacagaaacgttaataacgaagggagtgagc

SEQ ID NO: 7321 - DNA, 33 bp, Homo sapien
gttttctggtaaaaatcagaaaacgaattctaa

SEQ ID NO: 7322 - DNA, 33 bp, Homo sapien
gttttctggtaaaaattagaaaacgaattctaa

SEQ ID NO: 7323 - DNA, 33 bp, Homo sapien
ccaatattccaaactacatccactacgtcattt

SEQ ID NO: 7324 - DNA, 33 bp, Homo sapien
ccaatattccaaactatatccactacgtcattt

SEQ ID NO: 7325 - DNA, 33 bp, Homo sapien
tcacggaatatttgaccacctgcttggtatggg

SEQ ID NO: 7326 - DNA, 33 bp, Homo sapien
tcacggaatatttgactacctgcttggtatggg

SEQ ID NO: 7327 - DNA, 33 bp, Homo sapien
ctgcagctggtcctccaatcgtctctctaccct

SEQ ID NO: 7328 - DNA, 33 bp, Homo sapien
ctgcagctggtcctcctatcgtctctctaccct

SEQ ID NO: 7329 - DNA, 33 bp, Homo sapien
aaaactcacattcttactaactttgatgtgtag

SEQ ID NO: 7330 - DNA, 33 bp, Homo sapien
aaaactcacattcttattaactttgatgtgtag

SEQ ID NO: 7331 - DNA, 33 bp, Homo sapien
cccactcacatccaaacgtaggaatacttgaga

SEQ ID NO: 7332 - DNA, 33 bp, Homo sapien
cccactcacatccaaatgtaggaatacttgaga

SEQ ID NO: 7333 - DNA, 33 bp, Homo sapien
agcacacgttttacaactgtagagatctgaaag

SEQ ID NO: 7334 - DNA, 33 bp, Homo sapien
agcacacgttttacaattgtagagatctgaaag

SEQ ID NO: 7335 - DNA, 33 bp, Homo sapien
ctctgggcttcatgaaaccttaattccaacttt

SEQ ID NO: 7336 - DNA, 33 bp, Homo sapien
ctctgggcttcatgaatccttaattccaacttt

SEQ ID NO: 7337 - DNA, 33 bp, Homo sapien
tatcttcatggctccaatgaaatggcctctcta

SEQ ID NO: 7338 - DNA, 33 bp, Homo sapien
tatcttcatggctccagtgaaatggcctctcta

SEQ ID NO: 7339 - DNA, 33 bp, Homo sapien
aatgtttaaagtgaaaattgcattggtaaaaaa

SEQ ID NO: 7340 - DNA, 33 bp, Homo sapien
aatgtttaaagtgaaatttgcattggtaaaaaa

SEQ ID NO: 7341 - DNA, 33 bp, Homo sapien
tgttaccttacttacaacatgatagagatctaa

SEQ ID NO: 7342 - DNA, 33 bp, Homo sapien
tgttaccttacttacatcatgatagagatctaa

SEQ ID NO: 7343 - DNA, 33 bp, Homo sapien
ggatcacatgggccaactactctatcagctggt

SEQ ID NO: 7344 - DNA, 33 bp, Homo sapien
ggatcacatgggccaattactctatcagctggt

SEQ ID NO: 7345 - DNA, 33 bp, Homo sapien
tgtggaaagcagatgacgattacactgttaaga

SEQ ID NO: 7346 - DNA, 33 bp, Homo sapien
tgtggaaagcagatgatgattacactgttaaga

SEQ ID NO: 7347 - DNA, 33 bp, Homo sapien
acaagggttttgatagcaatccttatggatgca

SEQ ID NO: 7348 - DNA, 33 bp, Homo sapien
acaagggttttgatagtaatccttatggatgca

SEQ ID NO: 7349 - DNA, 33 bp, Homo sapien
ttatccattctactatcaacaggcattttttca

SEQ ID NO: 7350 - DNA, 33 bp, Homo sapien
ttatccattctactattaacaggcattttttca

SEQ ID NO: 7351 - DNA, 33 bp, Homo sapien
tttacaaacgtgaaacaacaagaactctcgcat

SEQ ID NO: 7352 - DNA, 33 bp, Homo sapien
tttacaaacgtgaaaccacaagaactctcgcat

SEQ ID NO: 7353 - DNA, 33 bp, Homo sapien
attactaggtgtataaccaaaagaatataaatc

SEQ ID NO: 7354 - DNA, 33 bp, Homo sapien
attactaggtgtataatcaaaagaatataaatc

SEQ ID NO: 7355 - DNA, 33 bp, Homo sapien
gacctcatgtacctaaactattcccctttctgg

SEQ ID NO: 7356 - DNA, 33 bp, Homo sapien
gacctcatgtacctaagctattcccctttctgg

SEQ ID NO: 7357 - DNA, 33 bp, Homo sapien
taaaaaaaaatattcaccaggatatagagcact

SEQ ID NO: 7358 - DNA, 33 bp, Homo sapien
taaaaaaaaatattcatcaggatatagagcact

SEQ ID NO: 7359 - DNA, 33 bp, Homo sapien
acatagagagaagacaaagaatctccctaaagc

SEQ ID NO: 7360 - DNA, 33 bp, Homo sapien
acatagagagaagacagagaatctccctaaagc

SEQ ID NO: 7361 - DNA, 33 bp, Homo sapien
tgcgaagactttccaactatagacacttcacta

SEQ ID NO: 7362 - DNA, 33 bp, Homo sapien
tgcgaagactttccaagtatagacacttcacta

SEQ ID NO: 7363 - DNA, 33 bp, Homo sapien
ctagttgggagagaggaatattacctttgttta

SEQ ID NO: 7364 - DNA, 33 bp, Homo sapien
ctagttgggagagagggatattacctttgttta

SEQ ID NO: 7365 - DNA, 33 bp, Homo sapien
gccacagcacctagccacaagtttatcttaaac

SEQ ID NO: 7366 - DNA, 33 bp, Homo sapien
gccacagcacctagccgcaagtttatcttaaac

SEQ ID NO: 7367 - DNA, 33 bp, Homo sapien
catgcacctgtacttccagctatacgggaggct

SEQ ID NO: 7368 - DNA, 33 bp, Homo sapien
catgcacctgtacttctagctatacgggaggct

SEQ ID NO: 7369 - DNA, 33 bp, Homo sapien
atttacaggatatgtaccttaatttgagaggca

SEQ ID NO: 7370 - DNA, 33 bp, Homo sapien
atttacaggatatgtagcttaatttgagaggca

SEQ ID NO: 7371 - DNA, 33 bp, Homo sapien
ctaacttatcctagaacagctgataagcctcag

SEQ ID NO: 7372 - DNA, 33 bp, Homo sapien
ctaacttatcctagaatagctgataagcctcag

SEQ ID NO: 7373 - DNA, 33 bp, Homo sapien
tatgccattatatgcccagattatcatttcttt

SEQ ID NO: 7374 - DNA, 33 bp, Homo sapien
tatgccattatatgcctagattatcatttcttt

SEQ ID NO: 7375 - DNA, 33 bp, Homo sapien
tggagcccagtttacaaacaagtgatatggatg

SEQ ID NO: 7376 - DNA, 33 bp, Homo sapien
tggagcccagtttacagacaagtgatatggatg

SEQ ID NO: 7377 - DNA, 33 bp, Homo sapien
aggtgaagtggtgtgaatataagggaagaataa

SEQ ID NO: 7378 - DNA, 33 bp, Homo sapien
aggtgaagtggtgtgactataagggaagaataa

SEQ ID NO: 7379 - DNA, 33 bp, Homo sapien
ttctttccagtagaatcatcagcttgtaaagaa

SEQ ID NO: 7380 - DNA, 33 bp, Homo sapien
ttctttccagtagaattatcagcttgtaaagaa

SEQ ID NO: 7381 - DNA, 33 bp, Homo sapien
gtaaactgttagtagaaggaattaacgttacca

SEQ ID NO: 7382 - DNA, 33 bp, Homo sapien
gtaaactgttagtagagggaattaacgttacca

SEQ ID NO: 7383 - DNA, 33 bp, Homo sapien
gacaaacatgaaaatcaagtatgctgtatgtaa

SEQ ID NO: 7384 - DNA, 33 bp, Homo sapien
gacaaacatgaaaatccagtatgctgtatgtaa

SEQ ID NO: 7385 - DNA, 33 bp, Homo sapien
tcgacaggccatacacagtatatagcttgtgaa

SEQ ID NO: 7386 - DNA, 33 bp, Homo sapien
tcgacaggccatacactgtatatagcttgtgaa

SEQ ID NO: 7387 - DNA, 33 bp, Homo sapien
ttttaattagactccacgaacacaggtaatgga

SEQ ID NO: 7388 - DNA, 33 bp, Homo sapien
ttttaattagactccaggaacacaggtaatgga

SEQ ID NO: 7389 - DNA, 33 bp, Homo sapien
ttaatacaccttaataataagttgagaggttgt

SEQ ID NO: 7390 - DNA, 33 bp, Homo sapien
ttaatacaccttaatagtaagttgagaggttgt

SEQ ID NO: 7391 - DNA, 33 bp, Homo sapien
tacaataatcgacttacaaaacaaccaaaccaa

SEQ ID NO: 7392 - DNA, 33 bp, Homo sapien
tacaataatcgacttagaaaacaaccaaaccaa

SEQ ID NO: 7393 - DNA, 33 bp, Homo sapien
tctgaggagttgtcaaatgttcctgcttctgac

SEQ ID NO: 7394 - DNA, 33 bp, Homo sapien
tctgaggagttgtcaagtgttcctgcttctgac

SEQ ID NO: 7395 - DNA, 33 bp, Homo sapien
catcaataaaagagcacggggttgtttctacca

SEQ ID NO: 7396 - DNA, 33 bp, Homo sapien
catcaataaaagagcatggggttgtttctacca

SEQ ID NO: 7397 - DNA, 33 bp, Homo sapien
cagattttggaacacccgcaaacagttaccagt

SEQ ID NO: 7398 - DNA, 33 bp, Homo sapien
cagattttggaacacctgcaaacagttaccagt

SEQ ID NO: 7399 - DNA, 33 bp, Homo sapien
tgtcatgcagtttacaggaaatatttgaatcta

SEQ ID NO: 7400 - DNA, 33 bp, Homo sapien
tgtcatgcagtttacatgaaatatttgaatcta

SEQ ID NO: 7401 - DNA, 33 bp, Homo sapien
tctaagaaaagaaatacgtcccaccacatacac

SEQ ID NO: 7402 - DNA, 33 bp, Homo sapien
tctaagaaaagaaatatgtcccaccacatacac

SEQ ID NO: 7403 - DNA, 33 bp, Homo sapien
aatgaatagtccacacagaatattttcatcaaa

SEQ ID NO: 7404 - DNA, 33 bp, Homo sapien
aatgaatagtccacaccgaatattttcatcaaa

SEQ ID NO: 7405 - DNA, 33 bp, Homo sapien
actgtagtgttgtaatcactaagtaagcaggat

SEQ ID NO: 7406 - DNA, 33 bp, Homo sapien
actgtagtgttgtaattactaagtaagcaggat

SEQ ID NO: 7407 - DNA, 33 bp, Homo sapien
aaaattactgagtcaacaggtgtgaacactagg

SEQ ID NO: 7408 - DNA, 33 bp, Homo sapien
aaaattactgagtcaagaggtgtgaacactagg

SEQ ID NO: 7409 - DNA, 33 bp, Homo sapien
cacataggaagtattcaataaacattagcttat

SEQ ID NO: 7410 - DNA, 33 bp, Homo sapien
cacataggaagtattcgataaacattagcttat

SEQ ID NO: 7411 - DNA, 33 bp, Homo sapien
gaccacagcttctccaatagcagactcatgggc

SEQ ID NO: 7412 - DNA, 33 bp, Homo sapien
gaccacagcttctccagtagcagactcatgggc

SEQ ID NO: 7413 - DNA, 33 bp, Homo sapien
tgacatctgcaacctgaagcactggggcaaaga

SEQ ID NO: 7414 - DNA, 33 bp, Homo sapien
tgacatctgcaacctggagcactggggcaaaga

SEQ ID NO: 7415 - DNA, 33 bp, Homo sapien
tggtatatagtcatgaggtatttggcatttcaa

SEQ ID NO: 7416 - DNA, 33 bp, Homo sapien
tggtatatagtcatgatgtatttggcatttcaa

SEQ ID NO: 7417 - DNA, 33 bp, Homo sapien
aaggagttcaagacaacgcactctacagactcc

SEQ ID NO: 7418 - DNA, 33 bp, Homo sapien
aaggagttcaagacaatgcactctacagactcc

SEQ ID NO: 7419 - DNA, 33 bp, Homo sapien
aaactttaagatattcaaaggcaggtacaatag

SEQ ID NO: 7420 - DNA, 33 bp, Homo sapien
aaactttaagatattccaaggcaggtacaatag

SEQ ID NO: 7421 - DNA, 33 bp, Homo sapien
gtgggggaatgatgaccgcattggctcaggagg

SEQ ID NO: 7422 - DNA, 33 bp, Homo sapien
gtgggggaatgatgactgcattggctcaggagg

SEQ ID NO: 7423 - DNA, 33 bp, Homo sapien
ctgcagtcttggtccaaagtggtcccaggccca

SEQ ID NO: 7424 - DNA, 33 bp, Homo sapien
ctgcagtcttggtccagagtggtcccaggccca

SEQ ID NO: 7425 - DNA, 33 bp, Homo sapien
ccggctcacggagaacaggtacgagcagctgga

SEQ ID NO: 7426 - DNA, 33 bp, Homo sapien
ccggctcacggagaacgggtacgagcagctgga

SEQ ID NO: 7427 - DNA, 33 bp, Homo sapien
gtaaagtgcttagcacagaacctagaatgaagt

SEQ ID NO: 7428 - DNA, 33 bp, Homo sapien
gtaaagtgcttagcacggaacctagaatgaagt

SEQ ID NO: 7429 - DNA, 33 bp, Homo sapien
gatttgtatgtatccccagtagaaaaccctccc

SEQ ID NO: 7430 - DNA, 33 bp, Homo sapien
gatttgtatgtatccctagtagaaaaccctccc

SEQ ID NO: 7431 - DNA, 33 bp, Homo sapien
ttctggagtcagtcaacctgggtaccggctgta

SEQ ID NO: 7432 - DNA, 33 bp, Homo sapien
ttctggagtcagtcaatctgggtaccggctgta

SEQ ID NO: 7433 - DNA, 33 bp, Homo sapien
tacaccaacgatagccaatcagctaaaaaacaa

SEQ ID NO: 7434 - DNA, 33 bp, Homo sapien
tacaccaacgatagccgatcagctaaaaaacaa

SEQ ID NO: 7435 - DNA, 33 bp, Homo sapien
tgcaaccagtctcaacacccctctattgtgtaa

SEQ ID NO: 7436 - DNA, 33 bp, Homo sapien
tgcaaccagtctcaacccccctctattgtgtaa

SEQ ID NO: 7437 - DNA, 33 bp, Homo sapien
tctgcaaaagcaaccacgttgggtattaggagg

SEQ ID NO: 7438 - DNA, 33 bp, Homo sapien
tctgcaaaagcaaccatgttgggtattaggagg

SEQ ID NO: 7439 - DNA, 33 bp, Homo sapien
ccagtgctggaaggaacagctcatgtgtgtaat

SEQ ID NO: 7440 - DNA, 33 bp, Homo sapien
ccagtgctggaaggaatagctcatgtgtgtaat

SEQ ID NO: 7441 - DNA, 33 bp, Homo sapien
ccggttgtactcaaaccaccctgcagcaggcac

SEQ ID NO: 7442 - DNA, 33 bp, Homo sapien
ccggttgtactcaaactaccctgcagcaggcac

SEQ ID NO: 7443 - DNA, 33 bp, Homo sapien
tctgtcatttagccagaacgtgttgaacactta

SEQ ID NO: 7444 - DNA, 33 bp, Homo sapien
tctgtcatttagccaggacgtgttgaacactta

SEQ ID NO: 7445 - DNA, 33 bp, Homo sapien
cagtactgaagcaaagcactctcacttgggtta

SEQ ID NO: 7446 - DNA, 33 bp, Homo sapien
cagtactgaagcaaaggactctcacttgggtta

SEQ ID NO: 7447 - DNA, 33 bp, Homo sapien
ccacatagaattgtgagaatcactcagataatg

SEQ ID NO: 7448 - DNA, 33 bp, Homo sapien
ccacatagaattgtgataatcactcagataatg

SEQ ID NO: 7449 - DNA, 33 bp, Homo sapien
tttcttcccatccttcccctgtctgatatccca

SEQ ID NO: 7450 - DNA, 33 bp, Homo sapien
tttcttcccatccttctcctgtctgatatccca

SEQ ID NO: 7451 - DNA, 33 bp, Homo sapien
atgtaatttcagggcccggattggtttgtgcct

SEQ ID NO: 7452 - DNA, 33 bp, Homo sapien
atgtaatttcagggcctggattggtttgtgcct

SEQ ID NO: 7453 - DNA, 33 bp, Homo sapien
ttttatactttcacaaatgaaatgatttcacat

SEQ ID NO: 7454 - DNA, 33 bp, Homo sapien
ttttatactttcacaactgaaatgatttcacat

SEQ ID NO: 7455 - DNA, 33 bp, Homo sapien
aattaataaggagaacaagaacagccaacatta

SEQ ID NO: 7456 - DNA, 33 bp, Homo sapien
aattaataaggagaacgagaacagccaacatta

SEQ ID NO: 7457 - DNA, 33 bp, Homo sapien
cgcccagccataacagcaccggccattaacatg

SEQ ID NO: 7458 - DNA, 33 bp, Homo sapien
cgcccagccataacagtaccggccattaacatg

SEQ ID NO: 7459 - DNA, 33 bp, Homo sapien
tagcagcagcctcagacgaaccaagaaggaaat

SEQ ID NO: 7460 - DNA, 33 bp, Homo sapien
tagcagcagcctcagatgaaccaagaaggaaat

SEQ ID NO: 7461 - DNA, 33 bp, Homo sapien
aatggggaatcgtttaactcattttatgaggca

SEQ ID NO: 7462 - DNA, 33 bp, Homo sapien
aatggggaatcgtttagctcattttatgaggca

SEQ ID NO: 7463 - DNA, 33 bp, Homo sapien
gacctctcgcaaatcaatgagaaaaggaacaaa

SEQ ID NO: 7464 - DNA, 33 bp, Homo sapien
gacctctcgcaaatcagtgagaaaaggaacaaa

SEQ ID NO: 7465 - DNA, 33 bp, Homo sapien
ggcaattcacagacagaaaatccaaatgattaa

SEQ ID NO: 7466 - DNA, 33 bp, Homo sapien
ggcaattcacagacaggaaatccaaatgattaa

SEQ ID NO: 7467 - DNA, 33 bp, Homo sapien
tgcaaagtaaaacaacagccggcattatcctat

SEQ ID NO: 7468 - DNA, 33 bp, Homo sapien
tgcaaagtaaaacaacggccggcattatcctat

SEQ ID NO: 7469 - DNA, 33 bp, Homo sapien
taggtagtagtaggtacagtcagacaagaacag

SEQ ID NO: 7470 - DNA, 33 bp, Homo sapien
taggtagtagtaggtatagtcagacaagaacag

SEQ ID NO: 7471 - DNA, 33 bp, Homo sapien
gaggacacgaaaaaaaaccacgtctgttctgtg

SEQ ID NO: 7472 - DNA, 33 bp, Homo sapien
gaggacacgaaaaaaagccacgtctgttctgtg

SEQ ID NO: 7473 - DNA, 33 bp, Homo sapien
ttaccctggtttcattcaacctaaccccattct

SEQ ID NO: 7474 - DNA, 33 bp, Homo sapien
ttaccctggtttcattgaacctaaccccattct

SEQ ID NO: 7475 - DNA, 33 bp, Homo sapien
ttactcatttgaggaacaggacgtcagcttggc

SEQ ID NO: 7476 - DNA, 33 bp, Homo sapien
ttactcatttgaggaataggacgtcagcttggc

SEQ ID NO: 7477 - DNA, 33 bp, Homo sapien
ggtatacttaattagcaagaaaactttatggat

SEQ ID NO: 7478 - DNA, 33 bp, Homo sapien
ggtatacttaattagcgagaaaactttatggat

SEQ ID NO: 7479 - DNA, 33 bp, Homo sapien
aatggtgttagtccaacccaacgaaatagatat

SEQ ID NO: 7480 - DNA, 33 bp, Homo sapien
aatggtgttagtccaatccaacgaaatagatat

SEQ ID NO: 7481 - DNA, 33 bp, Homo sapien
actgactgtcaggacactgaacacaagacgggc

SEQ ID NO: 7482 - DNA, 33 bp, Homo sapien
actgactgtcaggacattgaacacaagacgggc

SEQ ID NO: 7483 - DNA, 33 bp, Homo sapien; identical to SEQ ID NO: 7481

SEQ ID NO: 7484 - DNA, 33 bp, Homo sapien; identical to SEQ ID NO: 7482

SEQ ID NO: 7485 - DNA, 33 bp, Homo sapien
atctctacgctggaaacttgctgcctcaatgtt

SEQ ID NO: 7486 - DNA, 33 bp, Homo sapien
atctctacgctggaaatttgctgcctcaatgtt

SEQ ID NO: 7487 - DNA, 33 bp, Homo sapien
accagcaggggactgacagcagagtgagcctgc

SEQ ID NO: 7488 - DNA, 33 bp, Homo sapien
accagcaggggactgatagcagagtgagcctgc

SEQ ID NO: 7489 - DNA, 33 bp, Homo sapien
gcactggggatactggaaaatcaggaaacagtg

SEQ ID NO: 7490 - DNA, 33 bp, Homo sapien
gcactggggatactgggaaatcaggaaacagtg

SEQ ID NO: 7491 - DNA, 33 bp, Homo sapien
tggctgcttggtctataagcagcctctatctaa

SEQ ID NO: 7492 - DNA, 33 bp, Homo sapien
tggctgcttggtctatgagcagcctctatctaa

SEQ ID NO: 7493 - DNA, 33 bp, Homo sapien
gcacttcttaaaggcaccacccctcaatactgc

SEQ ID NO: 7494 - DNA, 33 bp, Homo sapien
gcacttcttaaaggcatcacccctcaatactgc

SEQ ID NO: 7495 - DNA, 33 bp, Homo sapien
ggtccaatcaaccacaaatgggggctgaatcat

SEQ ID NO: 7496 - DNA, 33 bp, Homo sapien
ggtccaatcaaccacagatgggggctgaatcat

SEQ ID NO: 7497 - DNA, 33 bp, Homo sapien
ttcatctgtgaaatggaaatgttaacaacttcc

SEQ ID NO: 7498 - DNA, 33 bp, Homo sapien
ttcatctgtgaaatgggaatgttaacaacttcc

SEQ ID NO: 7499 - DNA, 33 bp, Homo sapien
tctaggttcatgctagaaagtgtaaatgcaaaa

SEQ ID NO: 7500 - DNA, 33 bp, Homo sapien
tctaggttcatgctaggaagtgtaaatgcaaaa

SEQ ID NO: 7501 - DNA, 33 bp, Homo sapien
ttgctgggatgtagacagtaaacaagaggccaa

SEQ ID NO: 7502 - DNA, 33 bp, Homo sapien
ttgctgggatgtagacggtaaacaagaggccaa

SEQ ID NO: 7503 - DNA, 33 bp, Homo sapien
cttcctgaggaccaccaaagcaggaaaaaagct

SEQ ID NO: 7504 - DNA, 33 bp, Homo sapien
cttcctgaggaccaccgaagcaggaaaaaagct

SEQ ID NO: 7505 - DNA, 33 bp, Homo sapien
ctcgctgagccttgacaggtagatgctctatca

SEQ ID NO: 7506 - DNA, 33 bp, Homo sapien
ctcgctgagccttgaccggtagatgctctatca

SEQ ID NO: 7507 - DNA, 33 bp, Homo sapien
accctgtgctccctaacagccctgtgcatcagt

SEQ ID NO: 7508 - DNA, 33 bp, Homo sapien
accctgtgctccctaatagccctgtgcatcagt

SEQ ID NO: 7509 - DNA, 33 bp, Homo sapien
aagctgttgagaggaaacctgcttatctctgat

SEQ ID NO: 7510 - DNA, 33 bp, Homo sapien
aagctgttgagaggaaccctgcttatctctgat

SEQ ID NO: 7511 - DNA, 33 bp, Homo sapien
gcttgccagcaaacaacgtggaactgcaggaat

SEQ ID NO: 7512 - DNA, 33 bp, Homo sapien
gcttgccagcaaacaatgtggaactgcaggaat

SEQ ID NO: 7513 - DNA, 33 bp, Homo sapien
ggaaggaaccttgcaaatcaaaaggtacaatgc

SEQ ID NO: 7514 - DNA, 33 bp, Homo sapien
ggaaggaaccttgcaattcaaaaggtacaatgc

SEQ ID NO: 7515 - DNA, 33 bp, Homo sapien
caggaagctgcgatcacgggaaagtacacaggg

SEQ ID NO: 7516 - DNA, 33 bp, Homo sapien
caggaagctgcgatcatgggaaagtacacaggg

SEQ ID NO: 7517 - DNA, 33 bp, Homo sapien
cactctcctgacttcacaggatgttttaggaga

SEQ ID NO: 7518 - DNA, 33 bp, Homo sapien
cactctcctgacttcataggatgttttaggaga

SEQ ID NO: 7519 - DNA, 33 bp, Homo sapien
gtgaacgtaaagaccaacatcttacccatctct

SEQ ID NO: 7520 - DNA, 33 bp, Homo sapien
gtgaacgtaaagaccatcatcttacccatctct

SEQ ID NO: 7521 - DNA, 33 bp, Homo sapien
aatgtaaagaatcaaacgcagtgtatgtaagtg

SEQ ID NO: 7522 - DNA, 33 bp, Homo sapien
aatgtaaagaatcaaatgcagtgtatgtaagtg

SEQ ID NO: 7523 - DNA, 33 bp, Homo sapien
cgggtacttaatccaccatgctgggaaaagggc

SEQ ID NO: 7524 - DNA, 33 bp, Homo sapien
cgggtacttaatccactatgctgggaaaagggc

SEQ ID NO: 7525 - DNA, 33 bp, Homo sapien
cactcgaataagaatcagaccatttacagagcg

SEQ ID NO: 7526 - DNA, 33 bp, Homo sapien
cactcgaataagaatcggaccatttacagagcg

SEQ ID NO: 7527 - DNA, 33 bp, Homo sapien
tacagaggacaacagaacttcagagcaggggtc

SEQ ID NO: 7528 - DNA, 33 bp, Homo sapien
tacagaggacaacagagcttcagagcaggggtc

SEQ ID NO: 7529 - DNA, 33 bp, Homo sapien
gggtgcttacccaggaactcggtctagacctct

SEQ ID NO: 7530 - DNA, 33 bp, Homo sapien
gggtgcttacccaggagctcggtctagacctct

SEQ ID NO: 7531 - DNA, 33 bp, Homo sapien
ctgcaggctggaggcaaactgactgatggattt

SEQ ID NO: 7532 - DNA, 33 bp, Homo sapien
ctgcaggctggaggcagactgactgatggattt

SEQ ID NO: 7533 - DNA, 33 bp, Homo sapien
gtctccttccacaacccattctcctaaagggac

SEQ ID NO: 7534 - DNA, 33 bp, Homo sapien
gtctccttccacaacctattctcctaaagggac

SEQ ID NO: 7535 - DNA, 33 bp, Homo sapien
ggaaggatcacaggaccggttcttgccaatgca

SEQ ID NO: 7536 - DNA, 33 bp, Homo sapien
ggaaggatcacaggactggttcttgccaatgca

SEQ ID NO: 7537 - DNA, 33 bp, Homo sapien
tgactccactaaaagccgcaattagagcccaat

SEQ ID NO: 7538 - DNA, 33 bp, Homo sapien
tgactccactaaaagctgcaattagagcccaat

SEQ ID NO: 7539 - DNA, 33 bp, Homo sapien
ttttcagaccaatctacaccaaatgcttgctat

SEQ ID NO: 7540 - DNA, 33 bp, Homo sapien
ttttcagaccaatctataccaaatgcttgctat

SEQ ID NO: 7541 - DNA, 33 bp, Homo sapien
acagacccttagtaaacgaaagtcaaaagacac

SEQ ID NO: 7542 - DNA, 33 bp, Homo sapien
acagacccttagtaaatgaaagtcaaaagacac

SEQ ID NO: 7543 - DNA, 33 bp, Homo sapien
tacacaggacatcgggcaaatcgcttaacttct

SEQ ID NO: 7544 - DNA, 33 bp, Homo sapien
tacacaggacatcgggtaaatcgcttaacttct

SEQ ID NO: 7545 - DNA, 33 bp, Homo sapien
tgagaagccggttccaagaggtgaaatagcttg

SEQ ID NO: 7546 - DNA, 33 bp, Homo sapien
tgagaagccggttccaggaggtgaaatagcttg

SEQ ID NO: 7547 - DNA, 33 bp, Homo sapien
cattaggcctccagccaagcagtgacctactct

SEQ ID NO: 7548 - DNA, 33 bp, Homo sapien
cattaggcctccagccgagcagtgacctactct

SEQ ID NO: 7549 - DNA, 33 bp, Homo sapien
ggctaccagggctaccactattacgaatgacag

SEQ ID NO: 7550 - DNA, 33 bp, Homo sapien
ggctaccagggctaccgctattacgaatgacag

SEQ ID NO: 7551 - DNA, 33 bp, Homo sapien
cagctacaaaatgggaaagtaacaccaactttg

SEQ ID NO: 7552 - DNA, 33 bp, Homo sapien
cagctacaaaatgggagagtaacaccaactttg

SEQ ID NO: 7553 - DNA, 33 bp, Homo sapien
agtggcattactgtcaatcttggttcacccctc

SEQ ID NO: 7554 - DNA, 33 bp, Homo sapien
agtggcattactgtcagtcttggttcacccctc

SEQ ID NO: 7555 - DNA, 33 bp, Homo sapien
tctgaacgaaggatgcacttgagggaagactca

SEQ ID NO: 7556 - DNA, 33 bp, Homo sapien
tctgaacgaaggatgcgcttgagggaagactca

SEQ ID NO: 7557 - DNA, 33 bp, Homo sapien
ttgccctggccccatacagacctctcaggacca

SEQ ID NO: 7558 - DNA, 33 bp, Homo sapien
ttgccctggccccatatagacctctcaggacca

SEQ ID NO: 7559 - DNA, 33 bp, Homo sapien
cctgcgtgtgggatgtgaatgcttcatcacccg

SEQ ID NO: 7560 - DNA, 33 bp, Homo sapien
cctgcgtgtgggatgttaatgcttcatcacccg

SEQ ID NO: 7561 - DNA, 33 bp, Homo sapien
gagaaaaggtgaataaaggggaatagcaggaaa

SEQ ID NO: 7562 - DNA, 33 bp, Homo sapien
gagaaaaggtgaataagggggaatagcaggaaa

SEQ ID NO: 7563 - DNA, 33 bp, Homo sapien
agaggatgggtagagagatggtgcttaaaagga

SEQ ID NO: 7564 - DNA, 33 bp, Homo sapien
agaggatgggtagagatatggtgcttaaaagga

SEQ ID NO: 7565 - DNA, 33 bp, Homo sapien
aaaacaccagagcaccagggaaaggaaaaccca

SEQ ID NO: 7566 - DNA, 33 bp, Homo sapien
aaaacaccagagcaccggggaaaggaaaaccca

SEQ ID NO: 7567 - DNA, 33 bp, Homo sapien
tcaagggtagagtacacgaaacaggtatttctt

SEQ ID NO: 7568 - DNA, 33 bp, Homo sapien
tcaagggtagagtacatgaaacaggtatttctt

SEQ ID NO: 7569 - DNA, 33 bp, Homo sapien
tgttcagcatactacactggtacagattgtcac

SEQ ID NO: 7570 - DNA, 33 bp, Homo sapien
tgttcagcatactacagtggtacagattgtcac

SEQ ID NO: 7571 - DNA, 33 bp, Homo sapien
aaccattcaatacaagcatacgtttctttgcaa

SEQ ID NO: 7572 - DNA, 33 bp, Homo sapien
aaccattcaatacaaggatacgtttctttgcaa

SEQ ID NO: 7573 - DNA, 33 bp, Homo sapien
tgaagctttattaccaaggcaggagctcaggcc

SEQ ID NO: 7574 - DNA, 33 bp, Homo sapien
tgaagctttattaccagggcaggagctcaggcc

SEQ ID NO: 7575 - DNA, 33 bp, Homo sapien
agtaggctgactgtaaacaatagtggttttgta

SEQ ID NO: 7576 - DNA, 33 bp, Homo sapien
agtaggctgactgtaagcaatagtggttttgta

SEQ ID NO: 7577 - DNA, 33 bp, Homo sapien
tttaaaaatgtctttaggcacaggggctctttc

SEQ ID NO: 7578 - DNA, 33 bp, Homo sapien
tttaaaaatgtctttatgcacaggggctctttc

SEQ ID NO: 7579 - DNA, 33 bp, Homo sapien
agattgtcctgacaacagtatttcccttggttg

SEQ ID NO: 7580 - DNA, 33 bp, Homo sapien
agattgtcctgacaacggtatttcccttggttg

SEQ ID NO: 7581 - DNA, 33 bp, Homo sapien
atgagtagaaactaacaagactttcttagcagg

SEQ ID NO: 7582 - DNA, 33 bp, Homo sapien
atgagtagaaactaacgagactttcttagcagg

SEQ ID NO: 7583 - DNA, 33 bp, Homo sapien
agaccagcaatagccactagggtagccattagc

SEQ ID NO: 7584 - DNA, 33 bp, Homo sapien
agaccagcaatagccagtagggtagccattagc

SEQ ID NO: 7585 - DNA, 33 bp, Homo sapien
aagatctaaaaacatacgtcaaagttactagtg

SEQ ID NO: 7586 - DNA, 33 bp, Homo sapien
aagatctaaaaacatatgtcaaagttactagtg

SEQ ID NO: 7587 - DNA, 33 bp, Homo sapien
tgctcaatctgaaaaccatctccagtcaagcac

SEQ ID NO: 7588 - DNA, 33 bp, Homo sapien
tgctcaatctgaaaactatctccagtcaagcac

SEQ ID NO: 7589 - DNA, 33 bp, Homo sapien
atttcccgtgagtctacgaaaacttattctaac

SEQ ID NO: 7590 - DNA, 33 bp, Homo sapien
atttcccgtgagtctatgaaaacttattctaac

SEQ ID NO: 7591 - DNA, 33 bp, Homo sapien
tagtgactggcttttaagtgggatgagtgtttt

SEQ ID NO: 7592 - DNA, 33 bp, Homo sapien
tagtgactggcttttacgtgggatgagtgtttt

SEQ ID NO: 7593 - DNA, 33 bp, Homo sapien
agtttctgttaaaaccactttctggaggtgtgc

SEQ ID NO: 7594 - DNA, 33 bp, Homo sapien
agtttctgttaaaaccgctttctggaggtgtgc

SEQ ID NO: 7595 - DNA, 33 bp, Homo sapien
aaccaaatcaaactccaagaaatggaaatcaca

SEQ ID NO: 7596 - DNA, 33 bp, Homo sapien
aaccaaatcaaactccgagaaatggaaatcaca

SEQ ID NO: 7597 - DNA, 33 bp, Homo sapien
aggactgcttaaggccataagtccgaaaccagc

SEQ ID NO: 7598 - DNA, 33 bp, Homo sapien
aggactgcttaaggccgtaagtccgaaaccagc

SEQ ID NO: 7599 - DNA, 33 bp, Homo sapien
tgggaacagtgacaagaatatactaggaaggtt

SEQ ID NO: 7600 - DNA, 33 bp, Homo sapien
tgggaacagtgacaaggatatactaggaaggtt

SEQ ID NO: 7601 - DNA, 33 bp, Homo sapien
aatttagtaatagtcacatgatgtttccctaat

SEQ ID NO: 7602 - DNA, 33 bp, Homo sapien
aatttagtaatagtcatatgatgtttccctaat

SEQ ID NO: 7603 - DNA, 33 bp, Homo sapien
gggttcggaaccggtccaggctcaagttaaatc

SEQ ID NO: 7604 - DNA, 33 bp, Homo sapien
gggttcggaaccggtctaggctcaagttaaatc

SEQ ID NO: 7605 - DNA, 33 bp, Homo sapien
acttccatgttaccaaattcagtggtcttcttt

SEQ ID NO: 7606 - DNA, 33 bp, Homo sapien
acttccatgttaccaacttcagtggtcttcttt

SEQ ID NO: 7607 - DNA, 33 bp, Homo sapien
aagtgaactaaaagacagagaagacttataaca

SEQ ID NO: 7608 - DNA, 33 bp, Homo sapien
aagtgaactaaaagacggagaagacttataaca

SEQ ID NO: 7609 - DNA, 33 bp, Homo sapien
ctagtgagaaaaattacgcatgttggtgggggc

SEQ ID NO: 7610 - DNA, 33 bp, Homo sapien
ctagtgagaaaaattatgcatgttggtgggggc

SEQ ID NO: 7611 - DNA, 33 bp, Homo sapien
ctgtagctggatgggacgctccccgcacagcca

SEQ ID NO: 7612 - DNA, 33 bp, Homo sapien
ctgtagctggatgggatgctccccgcacagcca

SEQ ID NO: 7613 - DNA, 33 bp, Homo sapien
ggctgccatccagctgcaaatgcactagcactg

SEQ ID NO: 7614 - DNA, 33 bp, Homo sapien
ggctgccatccagctgtaaatgcactagcactg

SEQ ID NO: 7615 - DNA, 33 bp, Homo sapien
ggcagcaccaagacacaagaaggaccaggtcaa

SEQ ID NO: 7616 - DNA, 33 bp, Homo sapien
ggcagcaccaagacacgagaaggaccaggtcaa

SEQ ID NO: 7617 - DNA, 33 bp, Homo sapien
gttgctgttgttatgacgggtcgtctagtccaa

SEQ ID NO: 7618 - DNA, 33 bp, Homo sapien
gttgctgttgttatgatgggtcgtctagtccaa

SEQ ID NO: 7619 - DNA, 33 bp, Homo sapien
gaaagagacaggtcagaacatggaaagaaactg

SEQ ID NO: 7620 - DNA, 33 bp, Homo sapien
gaaagagacaggtcagtacatggaaagaaactg

SEQ ID NO: 7621 - DNA, 33 bp, Homo sapien
ttttgcttatagacgaactgggcagtggggacc

SEQ ID NO: 7622 - DNA, 33 bp, Homo sapien
ttttgcttatagacgacctgggcagtggggacc

SEQ ID NO: 7623 - DNA, 33 bp, Homo sapien
gccagtcagccaggagaaatacggacgccccca

SEQ ID NO: 7624 - DNA, 33 bp, Homo sapien
gccagtcagccaggaggaatacggacgccccca

SEQ ID NO: 7625 - DNA, 33 bp, Homo sapien
ccctctgctgggttcacgcttctgtatttggct

SEQ ID NO: 7626 - DNA, 33 bp, Homo sapien
ccctctgctgggttcatgcttctgtatttggct

SEQ ID NO: 7627 - DNA, 33 bp, Homo sapien
tgtcctgttgaattctcacggcagccttgtgag

SEQ ID NO: 7628 - DNA, 33 bp, Homo sapien
tgtcctgttgaattctgacggcagccttgtgag

SEQ ID NO: 7629 - DNA, 33 bp, Homo sapien
aaagacatggcttctcaaccaactgggactgtt

SEQ ID NO: 7630 - DNA, 33 bp, Homo sapien
aaagacatggcttctcgaccaactgggactgtt

SEQ ID NO: 7631 - DNA, 33 bp, Homo sapien
cccaccacttgaagtacgaagtaaaggtggccc

SEQ ID NO: 7632 - DNA, 33 bp, Homo sapien
cccaccacttgaagtatgaagtaaaggtggccc

SEQ ID NO: 7633 - DNA, 33 bp, Homo sapien
ataggtcaccagtcaacgttccctgagtgctga

SEQ ID NO: 7634 - DNA, 33 bp, Homo sapien
ataggtcaccagtcaatgttccctgagtgctga

SEQ ID NO: 7635 - DNA, 33 bp, Homo sapien
tagagcctcgtactgaataggtgctcaaatgag

SEQ ID NO: 7636 - DNA, 33 bp, Homo sapien
tagagcctcgtactgagtaggtgctcaaatgag

SEQ ID NO: 7637 - DNA, 33 bp, Homo sapien
cacttgaattttttcacagtgatacacttgaat

SEQ ID NO: 7638 - DNA, 33 bp, Homo sapien
cacttgaattttttcatagtgatacacttgaat

SEQ ID NO: 7639 - DNA, 33 bp, Homo sapien
agcactgacaatagaacccaggactccagacgc

SEQ ID NO: 7640 - DNA, 33 bp, Homo sapien
agcactgacaatagaatccaggactccagacgc

SEQ ID NO: 7641 - DNA, 33 bp, Homo sapien
aacttcccacatttcaaccagagcagagggtcc

SEQ ID NO: 7642 - DNA, 33 bp, Homo sapien
aacttcccacatttcagccagagcagagggtcc

SEQ ID NO: 7643 - DNA, 33 bp, Homo sapien
ggtgacagtcccaaccagcctagaaagatgaat

SEQ ID NO: 7644 - DNA, 33 bp, Homo sapien
ggtgacagtcccaaccggcctagaaagatgaat

SEQ ID NO: 7645 - DNA, 33 bp, Homo sapien
atgactgtaactgtctcaaaagcggatattgtg

SEQ ID NO: 7646 - DNA, 33 bp, Homo sapien
atgactgtaactgtcttaaaagcggatattgtg

SEQ ID NO: 7647 - DNA, 33 bp, Homo sapien
cctgggagacaggcaagcgtggtttccattctg

SEQ ID NO: 7648 - DNA, 33 bp, Homo sapien
cctgggagacaggcaatcgtggtttccattctg

SEQ ID NO: 7649 - DNA, 33 bp, Homo sapien
aaatcgttcttaaggcagagcaaatttttttat

SEQ ID NO: 7650 - DNA, 33 bp, Homo sapien
aaatcgttcttaaggctgagcaaatttttttat

SEQ ID NO: 7651 - DNA, 33 bp, Homo sapien
tcgcctcactccctcccgctggtgacatccttc

SEQ ID NO: 7652 - DNA, 33 bp, Homo sapien
tcgcctcactccctccggctggtgacatccttc

SEQ ID NO: 7653 - DNA, 33 bp, Homo sapien
atgcttcaagacataaactggatcatgttctcc

SEQ ID NO: 7654 - DNA, 33 bp, Homo sapien
atgcttcaagacataagctggatcatgttctcc

SEQ ID NO: 7655 - DNA, 33 bp, Homo sapien
agcccctgttctcaaaactcaacagcaaagacc

SEQ ID NO: 7656 - DNA, 33 bp, Homo sapien
agcccctgttctcaaacctcaacagcaaagacc

SEQ ID NO: 7657 - DNA, 33 bp, Homo sapien
tatttaaagatagctcgcttagtctgtgttcat

SEQ ID NO: 7658 - DNA, 33 bp, Homo sapien
tatttaaagatagctctcttagtctgtgttcat

SEQ ID NO: 7659 - DNA, 33 bp, Homo sapien
gtcctcccagtcagcacgtccatttcttggaat

SEQ ID NO: 7660 - DNA, 33 bp, Homo sapien
gtcctcccagtcagcatgtccatttcttggaat

SEQ ID NO: 7661 - DNA, 33 bp, Homo sapien
accaccctcatgatgcagaagtctctgttcagc

SEQ ID NO: 7662 - DNA, 33 bp, Homo sapien
accaccctcatgatgcggaagtctctgttcagc

SEQ ID NO: 7663 - DNA, 33 bp, Homo sapien
atgttctacaggttgacgattgggaggtatagc

SEQ ID NO: 7664 - DNA, 33 bp, Homo sapien
atgttctacaggttgatgattgggaggtatagc

SEQ ID NO: 7665 - DNA, 33 bp, Homo sapien
ggcttctcactctccaaatctcagctcgaatca

SEQ ID NO: 7666 - DNA, 33 bp, Homo sapien
ggcttctcactctccagatctcagctcgaatca

SEQ ID NO: 7667 - DNA, 33 bp, Homo sapien
ttgaagatcaagggctaaaaatccactcagtac

SEQ ID NO: 7668 - DNA, 33 bp, Homo sapien
ttgaagatcaagggctgaaaatccactcagtac

SEQ ID NO: 7669 - DNA, 33 bp, Homo sapien
catgcaaagaagactgcactcagaaactaagaa

SEQ ID NO: 7670 - DNA, 33 bp, Homo sapien
catgcaaagaagactggactcagaaactaagaa

SEQ ID NO: 7671 - DNA, 33 bp, Homo sapien
caattgaagattgaaaatggcctgtttggtaaa

SEQ ID NO: 7672 - DNA, 33 bp, Homo sapien
caattgaagattgaaagtggcctgtttggtaaa

SEQ ID NO: 7673 - DNA, 33 bp, Homo sapien
caaactcctatttgccaacccaggtctgggact

SEQ ID NO: 7674 - DNA, 33 bp, Homo sapien
caaactcctatttgccgacccaggtctgggact

SEQ ID NO: 7675 - DNA, 33 bp, Homo sapien
cttgtatgatgcactccagtctcactctacttc

SEQ ID NO: 7676 - DNA, 33 bp, Homo sapien
cttgtatgatgcactctagtctcactctacttc

SEQ ID NO: 7677 - DNA, 33 bp, Homo sapien
tagaatgtaggaattcaaaactttgtgctttga

SEQ ID NO: 7678 - DNA, 33 bp, Homo sapien
tagaatgtaggaattctaaactttgtgctttga

SEQ ID NO: 7679 - DNA, 33 bp, Homo sapien
aaccatttctgtagcaagagtttattattacat

SEQ ID NO: 7680 - DNA, 33 bp, Homo sapien
aaccatttctgtagcaggagtttattattacat

SEQ ID NO: 7681 - DNA, 33 bp, Homo sapien
aaatcagaaacagcagaaaattctttaaaagca

SEQ ID NO: 7682 - DNA, 33 bp, Homo sapien
aaatcagaaacagcagtaaattctttaaaagca

SEQ ID NO: 7683 - DNA, 33 bp, Homo sapien
gactcagcattggtggcacttaggacccaggtc

SEQ ID NO: 7684 - DNA, 33 bp, Homo sapien
gactcagcattggtggtacttaggacccaggtc

SEQ ID NO: 7685 - DNA, 33 bp, Homo sapien
tattctggagaaggaacagtccagagtaacagt

SEQ ID NO: 7686 - DNA, 33 bp, Homo sapien
tattctggagaaggaagagtccagagtaacagt

SEQ ID NO: 7687 - DNA, 33 bp, Homo sapien
ctgattgagatcccaacgtctgggaaaagcagg

SEQ ID NO: 7688 - DNA, 33 bp, Homo sapien
ctgattgagatcccaatgtctgggaaaagcagg

SEQ ID NO: 7689 - DNA, 33 bp, Homo sapien
aggggatagagggtacaagagcagcaaataagt

SEQ ID NO: 7690 - DNA, 33 bp, Homo sapien
aggggatagagggtaccagagcagcaaataagt

SEQ ID NO: 7691 - DNA, 33 bp, Homo sapien
tagaatagggagaagaaacttggagaaggtcat

SEQ ID NO: 7692 - DNA, 33 bp, Homo sapien
tagaatagggagaagagacttggagaaggtcat

SEQ ID NO: 7693 - DNA, 33 bp, Homo sapien
tgtggatgaaagctgagccaactgtcgccacag

SEQ ID NO: 7694 - DNA, 33 bp, Homo sapien
tgtggatgaaagctgatccaactgtcgccacag

SEQ ID NO: 7695 - DNA, 33 bp, Homo sapien
cagagcataaaatctcagacctgaaacttagag

SEQ ID NO: 7696 - DNA, 33 bp, Homo sapien
cagagcataaaatctccgacctgaaacttagag

SEQ ID NO: 7697 - DNA, 33 bp, Homo sapien
taagggctgaaatgaacctggtgcccttgacct

SEQ ID NO: 7698 - DNA, 33 bp, Homo sapien
taagggctgaaatgaatctggtgcccttgacct

SEQ ID NO: 7699 - DNA, 33 bp, Homo sapien
acggacacagataacaactgagtggtcagtggc

SEQ ID NO: 7700 - DNA, 33 bp, Homo sapien
acggacacagataacagctgagtggtcagtggc

SEQ ID NO: 7701 - DNA, 33 bp, Homo sapien
cttcgtgacagcctcacgaggtgggcctatgtg

SEQ ID NO: 7702 - DNA, 33 bp, Homo sapien
cttcgtgacagcctcatgaggtgggcctatgtg

SEQ ID NO: 7703 - DNA, 33 bp, Homo sapien
agggagaactaattccaaaaatgggccgctcag

SEQ ID NO: 7704 - DNA, 33 bp, Homo sapien
agggagaactaattccgaaaatgggccgctcag

SEQ ID NO: 7705 - DNA, 33 bp, Homo sapien
gatctctacaatgggaactgtgacctcattcaa

SEQ ID NO: 7706 - DNA, 33 bp, Homo sapien
gatctctacaatgggacctgtgacctcattcaa

SEQ ID NO: 7707 - DNA, 33 bp, Homo sapien
tgttttaagcagagggaacagaactaccatgaa

SEQ ID NO: 7708 - DNA, 33 bp, Homo sapien
tgttttaagcagaggggacagaactaccatgaa

SEQ ID NO: 7709 - DNA, 33 bp, Homo sapien
atgtgtgttttaaagacagacaggcctgggttt

SEQ ID NO: 7710 - DNA, 33 bp, Homo sapien
atgtgtgttttaaagagagacaggcctgggttt

SEQ ID NO: 7711 - DNA, 33 bp, Homo sapien
gtgagcatcagttcaacttccacatggccacca

SEQ ID NO: 7712 - DNA, 33 bp, Homo sapien
gtgagcatcagttcaatttccacatggccacca

SEQ ID NO: 7713 - DNA, 33 bp, Homo sapien
accctctgcagtgaacaaatggcagatgcttat

SEQ ID NO: 7714 - DNA, 33 bp, Homo sapien
accctctgcagtgaacgaatggcagatgcttat

SEQ ID NO: 7715 - DNA, 33 bp, Homo sapien
taaggagagaaaagacagctttgtgagagcatc

SEQ ID NO: 7716 - DNA, 33 bp, Homo sapien
taaggagagaaaagacggctttgtgagagcatc

SEQ ID NO: 7717 - DNA, 33 bp, Homo sapien
ccttcctgccttcttccagcctacaatgacatc

SEQ ID NO: 7718 - DNA, 33 bp, Homo sapien
ccttcctgccttcttctagcctacaatgacatc

SEQ ID NO: 7719 - DNA, 33 bp, Homo sapien
ggagcaccacgctgcaccagaactcatcccaga

SEQ ID NO: 7720 - DNA, 33 bp, Homo sapien
ggagcaccacgctgcatcagaactcatcccaga

SEQ ID NO: 7721 - DNA, 33 bp, Homo sapien
caagacagtagcaaacacccaggacaacggggg

SEQ ID NO: 7722 - DNA, 33 bp, Homo sapien
caagacagtagcaaacgcccaggacaacggggg

SEQ ID NO: 7723 - DNA, 33 bp, Homo sapien
agaagtggcggcagcaaaagcttatgctcacat

SEQ ID NO: 7724 - DNA, 33 bp, Homo sapien
agaagtggcggcagcacaagcttatgctcacat

SEQ ID NO: 7725 - DNA, 33 bp, Homo sapien
ctcctcaccttctacacacaggaaacccaggag

SEQ ID NO: 7726 - DNA, 33 bp, Homo sapien
ctcctcaccttctacatacaggaaacccaggag

SEQ ID NO: 7727 - DNA, 33 bp, Homo sapien
aagaatttgaaacacaataccatttacatttgc

SEQ ID NO: 7728 - DNA, 33 bp, Homo sapien
aagaatttgaaacacactaccatttacatttgc

SEQ ID NO: 7729 - DNA, 33 bp, Homo sapien
ttggatgacacagacccgggatgcacagtctag

SEQ ID NO: 7730 - DNA, 33 bp, Homo sapien
ttggatgacacagacctgggatgcacagtctag

SEQ ID NO: 7731 - DNA, 33 bp, Homo sapien
aactaattactgttgcaaagctgcattcccaca

SEQ ID NO: 7732 - DNA, 33 bp, Homo sapien
aactaattactgttgcgaagctgcattcccaca

SEQ ID NO: 7733 - DNA, 33 bp, Homo sapien
ctatcaccagcacctacgttcagcctgacattc

SEQ ID NO: 7734 - DNA, 33 bp, Homo sapien
ctatcaccagcacctatgttcagcctgacattc

SEQ ID NO: 7735 - DNA, 33 bp, Homo sapien
taatccacgcagcaaaatcctaggaagacagta

SEQ ID NO: 7736 - DNA, 33 bp, Homo sapien
taatccacgcagcaaactcctaggaagacagta

SEQ ID NO: 7737 - DNA, 33 bp, Homo sapien
tgagacctagagaggccgagccacttgttcaag

SEQ ID NO: 7738 - DNA, 33 bp, Homo sapien
tgagacctagagaggctgagccacttgttcaag

SEQ ID NO: 7739 - DNA, 33 bp, Homo sapien
acgaggctcctttggacgatctcattcaatccc

SEQ ID NO: 7740 - DNA, 33 bp, Homo sapien
acgaggctcctttggatgatctcattcaatccc

SEQ ID NO: 7741 - DNA, 33 bp, Homo sapien
ggttattgtgaggattaaaggtgatcacacaga

SEQ ID NO: 7742 - DNA, 33 bp, Homo sapien
ggttattgtgaggattgaaggtgatcacacaga

SEQ ID NO: 7743 - DNA, 33 bp, Homo sapien
ctgaggccctaaaacacgacagcagtggtgagt

SEQ ID NO: 7744 - DNA, 33 bp, Homo sapien
ctgaggccctaaaacatgacagcagtggtgagt

SEQ ID NO: 7745 - DNA, 33 bp, Homo sapien
ttgcagcaattctcaccatatttgccttctctg

SEQ ID NO: 7746 - DNA, 33 bp, Homo sapien
ttgcagcaattctcactatatttgccttctctg

SEQ ID NO: 7747 - DNA, 33 bp, Homo sapien
taatctttagtgtgaaatcaagacaaaggcttt

SEQ ID NO: 7748 - DNA, 33 bp, Homo sapien
taatctttagtgtgaactcaagacaaaggcttt

SEQ ID NO: 7749 - DNA, 33 bp, Homo sapien
catcaacagtagattacgatatagtcccaggat

SEQ ID NO: 7750 - DNA, 33 bp, Homo sapien
catcaacagtagattatgatatagtcccaggat

SEQ ID NO: 7751 - DNA, 33 bp, Homo sapien
aaaagaagctgcaccaaacaacacatactgtgt

SEQ ID NO: 7752 - DNA, 33 bp, Homo sapien
aaaagaagctgcaccagacaacacatactgtgt

SEQ ID NO: 7753 - DNA, 33 bp, Homo sapien
cagattctctcacggccatcttaactttccctg

SEQ ID NO: 7754 - DNA, 33 bp, Homo sapien
cagattctctcacggctatcttaactttccctg

SEQ ID NO: 7755 - DNA, 33 bp, Homo sapien
aaataaaactgagacaaggggtgacatgacaga

SEQ ID NO: 7756 - DNA, 33 bp, Homo sapien
aaataaaactgagacacggggtgacatgacaga

SEQ ID NO: 7757 - DNA, 33 bp, Homo sapien
tccctgtgctcctggccgaagactcagagacgg

SEQ ID NO: 7758 - DNA, 33 bp, Homo sapien
tccctgtgctcctggctgaagactcagagacgg

SEQ ID NO: 7759 - DNA, 33 bp, Homo sapien
tttaagcaaagcagaacccctcgctctatttgt

SEQ ID NO: 7760 - DNA, 33 bp, Homo sapien
tttaagcaaagcagaatccctcgctctatttgt

SEQ ID NO: 7761 - DNA, 33 bp, Homo sapien
tcacttctctttctacacctgtacacctgcttt

SEQ ID NO: 7762 - DNA, 33 bp, Homo sapien
tcacttctctttctacgcctgtacacctgcttt

SEQ ID NO: 7763 - DNA, 33 bp, Homo sapien
atggctttgtaatttgcaacaagtggcgggtag

SEQ ID NO: 7764 - DNA, 33 bp, Homo sapien
atggctttgtaatttgtaacaagtggcgggtag

SEQ ID NO: 7765 - DNA, 33 bp, Homo sapien
ctcgagcctgccaacaatgggaggtggggatca

SEQ ID NO: 7766 - DNA, 33 bp, Homo sapien
ctcgagcctgccaacactgggaggtggggatca

SEQ ID NO: 7767 - DNA, 33 bp, Homo sapien
gttattttgtgttttgaaaaagcgagtaagaaa

SEQ ID NO: 7768 - DNA, 33 bp, Homo sapien
gttattttgtgttttgtaaaagcgagtaagaaa

SEQ ID NO: 7769 - DNA, 33 bp, Homo sapien
catgtcagcacttaaaccaaaccttaaatcaca

SEQ ID NO: 7770 - DNA, 33 bp, Homo sapien
catgtcagcacttaaatcaaaccttaaatcaca

SEQ ID NO: 7771 - DNA, 33 bp, Homo sapien
gccagccctggatccaccttttcattaactggt

SEQ ID NO: 7772 - DNA, 33 bp, Homo sapien
gccagccctggatccagcttttcattaactggt

SEQ ID NO: 7773 - DNA, 33 bp, Homo sapien
tcctgcattttccacactaccaggaggcccaat

SEQ ID NO: 7774 - DNA, 33 bp, Homo sapien
tcctgcattttccacagtaccaggaggcccaat

SEQ ID NO: 7775 - DNA, 33 bp, Homo sapien
gttgggtttcattccaagcaaaaaaaatgttaa

SEQ ID NO: 7776 - DNA, 33 bp, Homo sapien
gttgggtttcattccaggcaaaaaaaatgttaa

SEQ ID NO: 7777 - DNA, 33 bp, Homo sapien
cgcatgccagactggaaggtttctggaccacca

SEQ ID NO: 7778 - DNA, 33 bp, Homo sapien
cgcatgccagactggagggtttctggaccacca

SEQ ID NO: 7779 - DNA, 33 bp, Homo sapien
catggagaatgtaaaactcaagcctgagagtgg

SEQ ID NO: 7780 - DNA, 33 bp, Homo sapien
catggagaatgtaaaagtcaagcctgagagtgg

SEQ ID NO: 7781 - DNA, 33 bp, Homo sapien
caaagacgtgacaatactacagctaatgcttaa

SEQ ID NO: 7782 - DNA, 33 bp, Homo sapien
caaagacgtgacaatagtacagctaatgcttaa

SEQ ID NO: 7783 - DNA, 33 bp, Homo sapien
ggtctgtctgctcactcaccttcacctaactct

SEQ ID NO: 7784 - DNA, 33 bp, Homo sapien
ggtctgtctgctcacttaccttcacctaactct

SEQ ID NO: 7785 - DNA, 33 bp, Homo sapien
gggcacaaaattaccaagctggagcaatggaca

SEQ ID NO: 7786 - DNA, 33 bp, Homo sapien
gggcacaaaattaccaggctggagcaatggaca

SEQ ID NO: 7787 - DNA, 33 bp, Homo sapien
ctctgatacaactggccgagtacctttctaagc

SEQ ID NO: 7788 - DNA, 33 bp, Homo sapien
ctctgatacaactggctgagtacctttctaagc

SEQ ID NO: 7789 - DNA, 33 bp, Homo sapien
ttatcactaccaacagaagtaggcggttatagc

SEQ ID NO: 7790 - DNA, 33 bp, Homo sapien
ttatcactaccaacaggagtaggcggttatagc

SEQ ID NO: 7791 - DNA, 33 bp, Homo sapien
cccggttcttctcagacaaatcctgtgacttgg

SEQ ID NO: 7792 - DNA, 33 bp, Homo sapien
cccggttcttctcagataaatcctgtgacttgg

SEQ ID NO: 7793 - DNA, 33 bp, Homo sapien
aaggattagggtcaacacatggcaacagagggc

SEQ ID NO: 7794 - DNA, 33 bp, Homo sapien
aaggattagggtcaacgcatggcaacagagggc

SEQ ID NO: 7795 - DNA, 33 bp, Homo sapien
acaactctggcatcaccgaattaagggcatgtt

SEQ ID NO: 7796 - DNA, 33 bp, Homo sapien
acaactctggcatcactgaattaagggcatgtt

SEQ ID NO: 7797 - DNA, 33 bp, Homo sapien
aagttaaagtcaaaaagatctgggcttaaatcc

SEQ ID NO: 7798 - DNA, 33 bp, Homo sapien
aagttaaagtcaaaaatatctgggcttaaatcc

SEQ ID NO: 7799 - DNA, 33 bp, Homo sapien
tttggtgcattgccacaccaaaatgtgctaact

SEQ ID NO: 7800 - DNA, 33 bp, Homo sapien
tttggtgcattgccacgccaaaatgtgctaact

SEQ ID NO: 7801 - DNA, 33 bp, Homo sapien
aatccaatgataatgaaatgaactggggacact

SEQ ID NO: 7802 - DNA, 33 bp, Homo sapien
aatccaatgataatgacatgaactggggacact

SEQ ID NO: 7803 - DNA, 33 bp, Homo sapien
gcaagacttgaaatgacggaactgttttccagc

SEQ ID NO: 7804 - DNA, 33 bp, Homo sapien
gcaagacttgaaatgatggaactgttttccagc

SEQ ID NO: 7805 - DNA, 33 bp, Homo sapien
catccacgtgtcaaaacgcatctaactgtacaa

SEQ ID NO: 7806 - DNA, 33 bp, Homo sapien
catccacgtgtcaaaatgcatctaactgtacaa

SEQ ID NO: 7807 - DNA, 33 bp, Homo sapien
gattctaggagctgaactcttgcagggatccag

SEQ ID NO: 7808 - DNA, 33 bp, Homo sapien
gattctaggagctgaagtcttgcagggatccag

SEQ ID NO: 7809 - DNA, 33 bp, Homo sapien
cttcttctcgtttattaaagggacacaaaagag

SEQ ID NO: 7810 - DNA, 33 bp, Homo sapien
cttcttctcgtttattgaagggacacaaaagag

SEQ ID NO: 7811 - DNA, 33 bp, Homo sapien
ttattatgtagcaatgaacaactagagtgccac

SEQ ID NO: 7812 - DNA, 33 bp, Homo sapien
ttattatgtagcaatggacaactagagtgccac

SEQ ID NO: 7813 - DNA, 33 bp, Homo sapien
atgtctgctttccccaaccgtttagattgtctt

SEQ ID NO: 7814 - DNA, 33 bp, Homo sapien
atgtctgctttccccagccgtttagattgtctt

SEQ ID NO: 7815 - DNA, 33 bp, Homo sapien
atcgttgtgaaaggacacctcgcattctgggta

SEQ ID NO: 7816 - DNA, 33 bp, Homo sapien
atcgttgtgaaaggacgcctcgcattctgggta

SEQ ID NO: 7817 - DNA, 33 bp, Homo sapien
gttacaagtgagcaaacggaggctcaaaatata

SEQ ID NO: 7818 - DNA, 33 bp, Homo sapien
gttacaagtgagcaaatggaggctcaaaatata

SEQ ID NO: 7819 - DNA, 33 bp, Homo sapien
agaaatttgagatgcaaggccaaaccaaaaagc

SEQ ID NO: 7820 - DNA, 33 bp, Homo sapien
agaaatttgagatgcagggccaaaccaaaaagc

SEQ ID NO: 7821 - DNA, 33 bp, Homo sapien
cagagaggggacgcaaggtgcccacggccggag

SEQ ID NO: 7822 - DNA, 33 bp, Homo sapien
cagagaggggacgcaatgtgcccacggccggag

SEQ ID NO: 7823 - DNA, 33 bp, Homo sapien
tgctccagcaactgagccagctcccaaatgctc

SEQ ID NO: 7824 - DNA, 33 bp, Homo sapien
tgctccagcaactgagtcagctcccaaatgctc

SEQ ID NO: 7825 - DNA, 33 bp, Homo sapien
gagataataatgatccccctctacacaacataa

SEQ ID NO: 7826 - DNA, 33 bp, Homo sapien
gagataataatgatcctcctctacacaacataa

SEQ ID NO: 7827 - DNA, 33 bp, Homo sapien
tttccaaagtggttacaccattttacattcgca

SEQ ID NO: 7828 - DNA, 33 bp, Homo sapien
tttccaaagtggttacgccattttacattcgca

SEQ ID NO: 7829 - DNA, 33 bp, Homo sapien
tgctaattatgtgttgaactccagtgtaagcat

SEQ ID NO: 7830 - DNA, 33 bp, Homo sapien
tgctaattatgtgttggactccagtgtaagcat

SEQ ID NO: 7831 - DNA, 33 bp, Homo sapien
gacccaggcacagtggaagctggcagaggtgag

SEQ ID NO: 7832 - DNA, 33 bp, Homo sapien
gacccaggcacagtgggagctggcagaggtgag

SEQ ID NO: 7833 - DNA, 33 bp, Homo sapien
tttgaaacacctactacgtgtaaaatcaggatg

SEQ ID NO: 7834 - DNA, 33 bp, Homo sapien
tttgaaacacctactatgtgtaaaatcaggatg

SEQ ID NO: 7835 - DNA, 33 bp, Homo sapien
gttgagtaagctctagcagttgccagcagtttt

SEQ ID NO: 7836 - DNA, 33 bp, Homo sapien
gttgagtaagctctagtagttgccagcagtttt

SEQ ID NO: 7837 - DNA, 33 bp, Homo sapien
ataaattactcattcaaataggattgtgtataa

SEQ ID NO: 7838 - DNA, 33 bp, Homo sapien
ataaattactcattcagataggattgtgtataa

SEQ ID NO: 7839 - DNA, 33 bp, Homo sapien
cctgctaataacaccggccatttacgttgaatg

SEQ ID NO: 7840 - DNA, 33 bp, Homo sapien
cctgctaataacaccgtccatttacgttgaatg

SEQ ID NO: 7841 - DNA, 33 bp, Homo sapien
acaccgtacatttaacacagggctttcgtatcc

SEQ ID NO: 7842 - DNA, 33 bp, Homo sapien
acaccgtacatttaacgcagggctttcgtatcc

SEQ ID NO: 7843 - DNA, 33 bp, Homo sapien
tccattatgaagatgaaggttcaaggctcagag

SEQ ID NO: 7844 - DNA, 33 bp, Homo sapien
tccattatgaagatgagggttcaaggctcagag

SEQ ID NO: 7845 - DNA, 33 bp, Homo sapien
gggtcaggctgtggtacggaatccaggccaact

SEQ ID NO: 7846 - DNA, 33 bp, Homo sapien
gggtcaggctgtggtatggaatccaggccaact

SEQ ID NO: 7847 - DNA, 33 bp, Homo sapien
aagacatacgggtccacacctccaaaggactaa

SEQ ID NO: 7848 - DNA, 33 bp, Homo sapien
aagacatacgggtccatacctccaaaggactaa

SEQ ID NO: 7849 - DNA, 33 bp, Homo sapien
atctgcaaaatgggagaaatgttcagagtctac

SEQ ID NO: 7850 - DNA, 33 bp, Homo sapien
atctgcaaaatgggagtaatgttcagagtctac

SEQ ID NO: 7851 - DNA, 33 bp, Homo sapien
gccaaatgactcagaaaggtcaactgcctgcct

SEQ ID NO: 7852 - DNA, 33 bp, Homo sapien
gccaaatgactcagaagggtcaactgcctgcct

SEQ ID NO: 7853 - DNA, 33 bp, Homo sapien
cacattatccagatgacggctttggaaggcaga

SEQ ID NO: 7854 - DNA, 33 bp, Homo sapien
cacattatccagatgatggctttggaaggcaga

SEQ ID NO: 7855 - DNA, 33 bp, Homo sapien
taaggaccactagaaaggtttgttttcaaaact

SEQ ID NO: 7856 - DNA, 33 bp, Homo sapien
taaggaccactagaaatgtttgttttcaaaact

SEQ ID NO: 7857 - DNA, 33 bp, Homo sapien
gcaacttgactctaacaatgcctaaagagaatt

SEQ ID NO: 7858 - DNA, 33 bp, Homo sapien
gcaacttgactctaactatgcctaaagagaatt

SEQ ID NO: 7859 - DNA, 33 bp, Homo sapien
cctatatctattaaagaaggtgaatcaacaata

SEQ ID NO: 7860 - DNA, 33 bp, Homo sapien
cctatatctattaaagtaggtgaatcaacaata

SEQ ID NO: 7861 - DNA, 33 bp, Homo sapien
cttaaagcctttcaaacgcctcaatggctgctc

SEQ ID NO: 7862 - DNA, 33 bp, Homo sapien
cttaaagcctttcaaatgcctcaatggctgctc

SEQ ID NO: 7863 - DNA, 33 bp, Homo sapien
gggtgttggccacagaaggatatataggccatg

SEQ ID NO: 7864 - DNA, 33 bp, Homo sapien
gggtgttggccacagagggatatataggccatg

SEQ ID NO: 7865 - DNA, 33 bp, Homo sapien
tagcacaaaaactgaaaaaaagtatgagtctgg

SEQ ID NO: 7866 - DNA, 33 bp, Homo sapien
tagcacaaaaactgaagaaaagtatgagtctgg

SEQ ID NO: 7867 - DNA, 33 bp, Homo sapien
accacaagaaccatccactccttgcatttggca

SEQ ID NO: 7868 - DNA, 33 bp, Homo sapien
accacaagaaccatccgctccttgcatttggca

SEQ ID NO: 7869 - DNA, 33 bp, Homo sapien
gctgttgagaatcagacgaatggataataagga

SEQ ID NO: 7870 - DNA, 33 bp, Homo sapien
gctgttgagaatcagaggaatggataataagga

SEQ ID NO: 7871 - DNA, 33 bp, Homo sapien
atcccctggcgacatacacagtgtggatctgca

SEQ ID NO: 7872 - DNA, 33 bp, Homo sapien
atcccctggcgacatatacagtgtggatctgca

SEQ ID NO: 7873 - DNA, 33 bp, Homo sapien
taaagcagagtcttcacatttgttgctgtacac

SEQ ID NO: 7874 - DNA, 33 bp, Homo sapien
taaagcagagtcttcagatttgttgctgtacac

SEQ ID NO: 7875 - DNA, 33 bp, Homo sapien
gtagtggcttctcaataaatatgtagttgcctt

SEQ ID NO: 7876 - DNA, 33 bp, Homo sapien
gtagtggcttctcaatgaatatgtagttgcctt

SEQ ID NO: 7877 - DNA, 33 bp, Homo sapien
aagtgctaaccatgtacagagtgggcaggcggt

SEQ ID NO: 7878 - DNA, 33 bp, Homo sapien
aagtgctaaccatgtatagagtgggcaggcggt

SEQ ID NO: 7879 - DNA, 33 bp, Homo sapien
ctgtttgctgagagaactgcccagaagggatca

SEQ ID NO: 7880 - DNA, 33 bp, Homo sapien
ctgtttgctgagagaattgcccagaagggatca

SEQ ID NO: 7881 - DNA, 33 bp, Homo sapien
ctgggctcttgtggtacggcaagaggcacttca

SEQ ID NO: 7882 - DNA, 33 bp, Homo sapien
ctgggctcttgtggtagggcaagaggcacttca

SEQ ID NO: 7883 - DNA, 33 bp, Homo sapien
gtgctggcaacacagaaagagagtgagctatgt

SEQ ID NO: 7884 - DNA, 33 bp, Homo sapien
gtgctggcaacacagagagagagtgagctatgt

SEQ ID NO: 7885 - DNA, 33 bp, Homo sapien
tgattctggcaagaagactaacctctctgatcc

SEQ ID NO: 7886 - DNA, 33 bp, Homo sapien
tgattctggcaagaagcctaacctctctgatcc

SEQ ID NO: 7887 - DNA, 33 bp, Homo sapien
aataccttctcccagccagtggctttaacaaat

SEQ ID NO: 7888 - DNA, 33 bp, Homo sapien
aataccttctcccagctagtggctttaacaaat

SEQ ID NO: 7889 - DNA, 33 bp, Homo sapien
gcacaactactttggacagcaatttgaaaatgc

SEQ ID NO: 7890 - DNA, 33 bp, Homo sapien
gcacaactactttggagagcaatttgaaaatgc

SEQ ID NO: 7891 - DNA, 33 bp, Homo sapien
aaacacctgcaggccaatcaatactctcacccc

SEQ ID NO: 7892 - DNA, 33 bp, Homo sapien
aaacacctgcaggccagtcaatactctcacccc

SEQ ID NO: 7893 - DNA, 33 bp, Homo sapien
ggggtgttcaggctacaagagaggcaaggctct

SEQ ID NO: 7894 - DNA, 33 bp, Homo sapien
ggggtgttcaggctacgagagaggcaaggctct

SEQ ID NO: 7895 - DNA, 33 bp, Homo sapien
gaagtcatggccgctaactcattgccaaggaag

SEQ ID NO: 7896 - DNA, 33 bp, Homo sapien
gaagtcatggccgctacctcattgccaaggaag

SEQ ID NO: 7897 - DNA, 33 bp, Homo sapien
tctgctgtatccgtcaagagaagctcggttatg

SEQ ID NO: 7898 - DNA, 33 bp, Homo sapien
tctgctgtatccgtcaggagaagctcggttatg

SEQ ID NO: 7899 - DNA, 33 bp, Homo sapien
ggacaggctctgggaacatggcccggctgcagg

SEQ ID NO: 7900 - DNA, 33 bp, Homo sapien
ggacaggctctgggaatatggcccggctgcagg

SEQ ID NO: 7901 - DNA, 33 bp, Homo sapien
cattacctgtcagcaccgcacactgcatcattg

SEQ ID NO: 7902 - DNA, 33 bp, Homo sapien
cattacctgtcagcacggcacactgcatcattg

SEQ ID NO: 7903 - DNA, 33 bp, Homo sapien
tggtgttctgtgcttcgctggttctcagaacct

SEQ ID NO: 7904 - DNA, 33 bp, Homo sapien
tggtgttctgtgcttctctggttctcagaacct

SEQ ID NO: 7905 - DNA, 33 bp, Homo sapien
agtgggcctgactccaggttgcggaaagggact

SEQ ID NO: 7906 - DNA, 33 bp, Homo sapien
agtgggcctgactccatgttgcggaaagggact

SEQ ID NO: 7907 - DNA, 33 bp, Homo sapien
tataaagtggggataaggctactctctccctca

SEQ ID NO: 7908 - DNA, 33 bp, Homo sapien
tataaagtggggataatgctactctctccctca

SEQ ID NO: 7909 - DNA, 33 bp, Homo sapien
ttcttgctgaaagccccgagttatgccagacac

SEQ ID NO: 7910 - DNA, 33 bp, Homo sapien
ttcttgctgaaagccctgagttatgccagacac

SEQ ID NO: 7911 - DNA, 33 bp, Homo sapien
aaaaatcacccagcaaactattctaacagcagg

SEQ ID NO: 7912 - DNA, 33 bp, Homo sapien
aaaaatcacccagcaagctattctaacagcagg

SEQ ID NO: 7913 - DNA, 33 bp, Homo sapien
atctcttaccattaaactcaggtggagagggag

SEQ ID NO: 7914 - DNA, 33 bp, Homo sapien
atctcttaccattaaattcaggtggagagggag

SEQ ID NO: 7915 - DNA, 33 bp, Homo sapien
ggaaatgtgactcagtcaaggtgacaccactac

SEQ ID NO: 7916 - DNA, 33 bp, Homo sapien
ggaaatgtgactcagttaaggtgacaccactac

SEQ ID NO: 7917 - DNA, 33 bp, Homo sapien
aactgcagaggctcgacaatgtgaactcctgag

SEQ ID NO: 7918 - DNA, 33 bp, Homo sapien
aactgcagaggctcgagaatgtgaactcctgag

SEQ ID NO: 7919 - DNA, 33 bp, Homo sapien
gaccgcccccaaccagaagttatctgccctaaa

SEQ ID NO: 7920 - DNA, 33 bp, Homo sapien
gaccgcccccaaccaggagttatctgccctaaa

SEQ ID NO: 7921 - DNA, 33 bp, Homo sapien
ttcctttctcactgaggccctggatgcttctcc

SEQ ID NO: 7922 - DNA, 33 bp, Homo sapien
ttcctttctcactgagtccctggatgcttctcc

SEQ ID NO: 7923 - DNA, 33 bp, Homo sapien
ccaaaatataaggccgccacatgtggaatttta

SEQ ID NO: 7924 - DNA, 33 bp, Homo sapien
ccaaaatataaggccgtcacatgtggaatttta

SEQ ID NO: 7925 - DNA, 33 bp, Homo sapien
gcttgtaactaatggaataaagtagaagtgatg

SEQ ID NO: 7926 - DNA, 33 bp, Homo sapien
gcttgtaactaatggagtaaagtagaagtgatg

SEQ ID NO: 7927 - DNA, 33 bp, Homo sapien
gaaaccgaggttctgaaaagtccgatgtctcac

SEQ ID NO: 7928 - DNA, 33 bp, Homo sapien
gaaaccgaggttctgagaagtccgatgtctcac

SEQ ID NO: 7929 - DNA, 33 bp, Homo sapien
taaatgttgtagaatcagaaagccagttgactt

SEQ ID NO: 7930 - DNA, 33 bp, Homo sapien
taaatgttgtagaatcggaaagccagttgactt

SEQ ID NO: 7931 - DNA, 33 bp, Homo sapien
taatggttacggaaaccaataaagaatggacac

SEQ ID NO: 7932 - DNA, 33 bp, Homo sapien
taatggttacggaaactaataaagaatggacac

SEQ ID NO: 7933 - DNA, 33 bp, Homo sapien
cagacaatctggtttcacagggcccacattccc

SEQ ID NO: 7934 - DNA, 33 bp, Homo sapien
cagacaatctggtttcgcagggcccacattccc

SEQ ID NO: 7935 - DNA, 33 bp, Homo sapien
tcaaggcttctcttaacggactcaaacctctcc

SEQ ID NO: 7936 - DNA, 33 bp, Homo sapien
tcaaggcttctcttaatggactcaaacctctcc

SEQ ID NO: 7937 - DNA, 33 bp, Homo sapien
agaaagtatggactgtaaacttccttagaggcc

SEQ ID NO: 7938 - DNA, 33 bp, Homo sapien
agaaagtatggactgtgaacttccttagaggcc

SEQ ID NO: 7939 - DNA, 33 bp, Homo sapien
atgtcattctcatccacaaactataggtttcat

SEQ ID NO: 7940 - DNA, 33 bp, Homo sapien
atgtcattctcatccataaactataggtttcat

SEQ ID NO: 7941 - DNA, 33 bp, Homo sapien
gccatactgcaattcaatcattcattatcgagc

SEQ ID NO: 7942 - DNA, 33 bp, Homo sapien
gccatactgcaattcagtcattcattatcgagc

SEQ ID NO: 7943 - DNA, 33 bp, Homo sapien
cagacaccaaacaatacatacccgactggtttc

SEQ ID NO: 7944 - DNA, 33 bp, Homo sapien
cagacaccaaacaatagatacccgactggtttc

SEQ ID NO: 7945 - DNA, 33 bp, Homo sapien
catgttaggccctccaatacacatctctaaatc

SEQ ID NO: 7946 - DNA, 33 bp, Homo sapien
catgttaggccctccagtacacatctctaaatc

SEQ ID NO: 7947 - DNA, 33 bp, Homo sapien
atcagctgctgcttaccagaaacccaggcaaac

SEQ ID NO: 7948 - DNA, 33 bp, Homo sapien
atcagctgctgcttactagaaacccaggcaaac

SEQ ID NO: 7949 - DNA, 33 bp, Homo sapien
tgggcacactgaggtcggaagaaagaagcctca

SEQ ID NO: 7950 - DNA, 33 bp, Homo sapien
tgggcacactgaggtctgaagaaagaagcctca

SEQ ID NO: 7951 - DNA, 33 bp, Homo sapien
taattgcccaaggtcacgtggccatttcagggc

SEQ ID NO: 7952 - DNA, 33 bp, Homo sapien
taattgcccaaggtcatgtggccatttcagggc

SEQ ID NO: 7953 - DNA, 33 bp, Homo sapien
aatcatgataatgagacggattacaatagtggc

SEQ ID NO: 7954 - DNA, 33 bp, Homo sapien
aatcatgataatgagatggattacaatagtggc

SEQ ID NO: 7955 - DNA, 33 bp, Homo sapien
caggcatttagctacaggaaatttactgtttat

SEQ ID NO: 7956 - DNA, 33 bp, Homo sapien
caggcatttagctacatgaaatttactgtttat

SEQ ID NO: 7957 - DNA, 33 bp, Homo sapien
aacacagttgtgaaaagagatggatgtgggttc

SEQ ID NO: 7958 - DNA, 33 bp, Homo sapien
aacacagttgtgaaaatagatggatgtgggttc

SEQ ID NO: 7959 - DNA, 33 bp, Homo sapien
atataccttctcatctgaacaccccgcctgtca

SEQ ID NO: 7960 - DNA, 33 bp, Homo sapien
atataccttctcatcttaacaccccgcctgtca

SEQ ID NO: 7961 - DNA, 33 bp, Homo sapien
aatgcatcttttcaaaccacatcctcttagaga

SEQ ID NO: 7962 - DNA, 33 bp, Homo sapien
aatgcatcttttcaaagcacatcctcttagaga

SEQ ID NO: 7963 - DNA, 33 bp, Homo sapien
taagagcttctccacaatgatgttatagctctg

SEQ ID NO: 7964 - DNA, 33 bp, Homo sapien
taagagcttctccacagtgatgttatagctctg

SEQ ID NO: 7965 - DNA, 33 bp, Homo sapien
tcctgctaaggtggaaatgggtgcaacaagtat

SEQ ID NO: 7966 - DNA, 33 bp, Homo sapien
tcctgctaaggtggaagtgggtgcaacaagtat

SEQ ID NO: 7967 - DNA, 33 bp, Homo sapien
ctgctgaatccttacaatccccagaagctgggt

SEQ ID NO: 7968 - DNA, 33 bp, Homo sapien
ctgctgaatccttacagtccccagaagctgggt

SEQ ID NO: 7969 - DNA, 33 bp, Homo sapien
cggtggctgggataaaaatgaagggatgtcagc

SEQ ID NO: 7970 - DNA, 33 bp, Homo sapien
cggtggctgggataaagatgaagggatgtcagc

SEQ ID NO: 7971 - DNA, 33 bp, Homo sapien
gaaccaaataacccaactgggccatcatttccc

SEQ ID NO: 7972 - DNA, 33 bp, Homo sapien
gaaccaaataacccaagtgggccatcatttccc

SEQ ID NO: 7973 - DNA, 33 bp, Homo sapien
ggcagattctctagacacatctctcaaagcctg

SEQ ID NO: 7974 - DNA, 33 bp, Homo sapien
ggcagattctctagactcatctctcaaagcctg

SEQ ID NO: 7975 - DNA, 33 bp, Homo sapien
acatacagcaggtgctcaataaaagccatttct

SEQ ID NO: 7976 - DNA, 33 bp, Homo sapien
acatacagcaggtgcttaataaaagccatttct

SEQ ID NO: 7977 - DNA, 33 bp, Homo sapien
tacacacatgggctacagatcattcatctttcc

SEQ ID NO: 7978 - DNA, 33 bp, Homo sapien
tacacacatgggctacggatcattcatctttcc

SEQ ID NO: 7979 - DNA, 33 bp, Homo sapien
ccaactttaccattcacgtgctgtgtcacctgg

SEQ ID NO: 7980 - DNA, 33 bp, Homo sapien
ccaactttaccattcatgtgctgtgtcacctgg

SEQ ID NO: 7981 - DNA, 33 bp, Homo sapien
aggactgggattgtgaacagccagaaacttcca

SEQ ID NO: 7982 - DNA, 33 bp, Homo sapien
aggactgggattgtgaccagccagaaacttcca

SEQ ID NO: 7983 - DNA, 33 bp, Homo sapien
attcagtgagtttacacatgtcaggaacaaaca

SEQ ID NO: 7984 - DNA, 33 bp, Homo sapien
attcagtgagtttacatatgtcaggaacaaaca

SEQ ID NO: 7985 - DNA, 33 bp, Homo sapien
ttacacacaggataaaagtcaaactccttccta

SEQ ID NO: 7986 - DNA, 33 bp, Homo sapien
ttacacacaggataaaggtcaaactccttccta

SEQ ID NO: 7987 - DNA, 33 bp, Homo sapien
gcggtggccggagatgaagtttcaaggcagaat

SEQ ID NO: 7988 - DNA, 33 bp, Homo sapien
gcggtggccggagatggagtttcaaggcagaat

SEQ ID NO: 7989 - DNA, 33 bp, Homo sapien
agagtatctcgtaaaccgactgtccgagcagga

SEQ ID NO: 7990 - DNA, 33 bp, Homo sapien
agagtatctcgtaaactgactgtccgagcagga

SEQ ID NO: 7991 - DNA, 33 bp, Homo sapien
aatgattgcaacattccataattctatgattac

SEQ ID NO: 7992 - DNA, 33 bp, Homo sapien
aatgattgcaacattctataattctatgattac

SEQ ID NO: 7993 - DNA, 33 bp, Homo sapien
ccatccgtcatccctacggagccaaattctgcc

SEQ ID NO: 7994 - DNA, 33 bp, Homo sapien
ccatccgtcatccctatggagccaaattctgcc

SEQ ID NO: 7995 - DNA, 33 bp, Homo sapien
aggctctcggaggcacaaagatgaaccagacaa

SEQ ID NO: 7996 - DNA, 33 bp, Homo sapien
aggctctcggaggcacgaagatgaaccagacaa

SEQ ID NO: 7997 - DNA, 33 bp, Homo sapien
ccatttgggcactggaataggatctcccctggc

SEQ ID NO: 7998 - DNA, 33 bp, Homo sapien
ccatttgggcactggactaggatctcccctggc

SEQ ID NO: 7999 - DNA, 33 bp, Homo sapien
agtttttatggagtaaatctatcctcaaatcaa

SEQ ID NO: 8000 - DNA, 33 bp, Homo sapien
agtttttatggagtaagtctatcctcaaatcaa

SEQ ID NO: 8001 - DNA, 33 bp, Homo sapien
caggtgatcctcaaaacctcaatggctggcctg

SEQ ID NO: 8002 - DNA, 33 bp, Homo sapien
caggtgatcctcaaaatctcaatggctggcctg

SEQ ID NO: 8003 - DNA, 33 bp, Homo sapien
agacacattcataagcaagtaattaaaataggc

SEQ ID NO: 8004 - DNA, 33 bp, Homo sapien
agacacattcataagcgagtaattaaaataggc

SEQ ID NO: 8005 - DNA, 33 bp, Homo sapien
gatgtggtagaatagaagaggacactacttttg

SEQ ID NO: 8006 - DNA, 33 bp, Homo sapien
gatgtggtagaatagaggaggacactacttttg

SEQ ID NO: 8007 - DNA, 33 bp, Homo sapien
ggacctcagcttaaacaccacctcctcagagaa

SEQ ID NO: 8008 - DNA, 33 bp, Homo sapien
ggacctcagcttaaacgccacctcctcagagaa

SEQ ID NO: 8009 - DNA, 33 bp, Homo sapien
gaagtaggtgagtacacgttcatgccagttcca

SEQ ID NO: 8010 - DNA, 33 bp, Homo sapien
gaagtaggtgagtacatgttcatgccagttcca

SEQ ID NO: 8011 - DNA, 33 bp, Homo sapien
ttatgcctgagaccacaaggttcgagagggaga

SEQ ID NO: 8012 - DNA, 33 bp, Homo sapien
ttatgcctgagaccacgaggttcgagagggaga

SEQ ID NO: 8013 - DNA, 33 bp, Homo sapien
cgagtgacccggagcacatgaactacaaaccta

SEQ ID NO: 8014 - DNA, 33 bp, Homo sapien
cgagtgacccggagcagatgaactacaaaccta

SEQ ID NO: 8015 - DNA, 33 bp, Homo sapien
atataagccaacatgacataagcagaggcttgc

SEQ ID NO: 8016 - DNA, 33 bp, Homo sapien
atataagccaacatgatataagcagaggcttgc

SEQ ID NO: 8017 - DNA, 33 bp, Homo sapien
tcctatcttctgacacacttcacacatgagaaa

SEQ ID NO: 8018 - DNA, 33 bp, Homo sapien
tcctatcttctgacacgcttcacacatgagaaa

SEQ ID NO: 8019 - DNA, 33 bp, Homo sapien
ctgggatttgaacctacggcttctcactcttag

SEQ ID NO: 8020 - DNA, 33 bp, Homo sapien
ctgggatttgaacctatggcttctcactcttag

SEQ ID NO: 8021 - DNA, 33 bp, Homo sapien
acacatcacagagtgcacggagcccttgaaaac

SEQ ID NO: 8022 - DNA, 33 bp, Homo sapien
acacatcacagagtgcgcggagcccttgaaaac

SEQ ID NO: 8023 - DNA, 33 bp, Homo sapien
ctgccctatgccttgaagagttaagcgtaagag

SEQ ID NO: 8024 - DNA, 33 bp, Homo sapien
ctgccctatgccttgatgagttaagcgtaagag

SEQ ID NO: 8025 - DNA, 33 bp, Homo sapien
tgctcattcttacgtacccacatccagtcctgc

SEQ ID NO: 8026 - DNA, 33 bp, Homo sapien
tgctcattcttacgtatccacatccagtcctgc

SEQ ID NO: 8027 - DNA, 33 bp, Homo sapien
aagataatttaggcaactattaaccaatacaga

SEQ ID NO: 8028 - DNA, 33 bp, Homo sapien
aagataatttaggcaagtattaaccaatacaga

SEQ ID NO: 8029 - DNA, 33 bp, Homo sapien
accaatgaaatatataccaagatagaccacacc

SEQ ID NO: 8030 - DNA, 33 bp, Homo sapien
accaatgaaatatatagcaagatagaccacacc

SEQ ID NO: 8031 - DNA, 33 bp, Homo sapien
agttctgctgagttaaacctcaacccagctggc

SEQ ID NO: 8032 - DNA, 33 bp, Homo sapien
agttctgctgagttaagcctcaacccagctggc

SEQ ID NO: 8033 - DNA, 33 bp, Homo sapien
aactcagcagaactgaaaaacctgccgaagttg

SEQ ID NO: 8034 - DNA, 33 bp, Homo sapien
aactcagcagaactgagaaacctgccgaagttg

SEQ ID NO: 8035 - DNA, 33 bp, Homo sapien
tcccacaaactctccaaagtgacaatgaagcca

SEQ ID NO: 8036 - DNA, 33 bp, Homo sapien
tcccacaaactctccatagtgacaatgaagcca

SEQ ID NO: 8037 - DNA, 33 bp, Homo sapien
gcccagaaggtgataaacacccggtttgctcct

SEQ ID NO: 8038 - DNA, 33 bp, Homo sapien
gcccagaaggtgataatcacccggtttgctcct

SEQ ID NO: 8039 - DNA, 33 bp, Homo sapien
caggactggagtccacactaggctgattttctt

SEQ ID NO: 8040 - DNA, 33 bp, Homo sapien
caggactggagtccacgctaggctgattttctt

SEQ ID NO: 8041 - DNA, 33 bp, Homo sapien
atgggagacatggagacgagtgaaacatgatca

SEQ ID NO: 8042 - DNA, 33 bp, Homo sapien
atgggagacatggagatgagtgaaacatgatca

SEQ ID NO: 8043 - DNA, 33 bp, Homo sapien
cttcaccgttcctctcacttccagattagtaat

SEQ ID NO: 8044 - DNA, 33 bp, Homo sapien
cttcaccgttcctctcgcttccagattagtaat

SEQ ID NO: 8045 - DNA, 33 bp, Homo sapien
tcctcattttatacacaaggacatcgaggcaca

SEQ ID NO: 8046 - DNA, 33 bp, Homo sapien
tcctcattttatacacgaggacatcgaggcaca

SEQ ID NO: 8047 - DNA, 33 bp, Homo sapien
aatgaataacccagaactgtagttagctaactg

SEQ ID NO: 8048 - DNA, 33 bp, Homo sapien
aatgaataacccagaattgtagttagctaactg

SEQ ID NO: 8049 - DNA, 33 bp, Homo sapien
gtggctaagttgaagacggctgtaccttgctac

SEQ ID NO: 8050 - DNA, 33 bp, Homo sapien
gtggctaagttgaagatggctgtaccttgctac

SEQ ID NO: 8051 - DNA, 33 bp, Homo sapien
gcttggttagcgtgcaagttaaatggaatgcgc

SEQ ID NO: 8052 - DNA, 33 bp, Homo sapien
gcttggttagcgtgcaggttaaatggaatgcgc

SEQ ID NO: 8053 - DNA, 33 bp, Homo sapien
tcaaacatgggactcaccaaatataagcatgcc

SEQ ID NO: 8054 - DNA, 33 bp, Homo sapien
tcaaacatgggactcatcaaatataagcatgcc

SEQ ID NO: 8055 - DNA, 33 bp, Homo sapien
gctggcaagtaatacactctccatgagcaccag

SEQ ID NO: 8056 - DNA, 33 bp, Homo sapien
gctggcaagtaatacattctccatgagcaccag

SEQ ID NO: 8057 - DNA, 33 bp, Homo sapien
catggcttctattaaccgctttcagtaaagtcc

SEQ ID NO: 8058 - DNA, 33 bp, Homo sapien
catggcttctattaactgctttcagtaaagtcc

SEQ ID NO: 8059 - DNA, 33 bp, Homo sapien
aacatatcaggcatgcaaaaaggtaaataatac

SEQ ID NO: 8060 - DNA, 33 bp, Homo sapien
aacatatcaggcatgcgaaaaggtaaataatac

SEQ ID NO: 8061 - DNA, 33 bp, Homo sapien
tgtgggtgtgagagtccacagggaactttagtt

SEQ ID NO: 8062 - DNA, 33 bp, Homo sapien
tgtgggtgtgagagtctacagggaactttagtt

SEQ ID NO: 8063 - DNA, 33 bp, Homo sapien
catataagtaacaaaacaggcgccagatatcca

SEQ ID NO: 8064 - DNA, 33 bp, Homo sapien
catataagtaacaaaataggcgccagatatcca

SEQ ID NO: 8065 - DNA, 33 bp, Homo sapien
gaaccagaataaaggaaaatgcactaacaggaa

SEQ ID NO: 8066 - DNA, 33 bp, Homo sapien
gaaccagaataaaggacaatgcactaacaggaa

SEQ ID NO: 8067 - DNA, 33 bp, Homo sapien
atgctattgtcatactaagtataggaagctcct

SEQ ID NO: 8068 - DNA, 33 bp, Homo sapien
atgctattgtcatactgagtataggaagctcct

SEQ ID NO: 8069 - DNA, 33 bp, Homo sapien
gggctctcattttgataaaggcagtcagtaaaa

SEQ ID NO: 8070 - DNA, 33 bp, Homo sapien
gggctctcattttgatgaaggcagtcagtaaaa

SEQ ID NO: 8071 - DNA, 33 bp, Homo sapien
ataagggagactcttcaatagaatgatgaatag

SEQ ID NO: 8072 - DNA, 33 bp, Homo sapien
ataagggagactcttcgatagaatgatgaatag

SEQ ID NO: 8073 - DNA, 33 bp, Homo sapien
taaggaacctaaccaacttatttacgtggcttt

SEQ ID NO: 8074 - DNA, 33 bp, Homo sapien
taaggaacctaaccaatttatttacgtggcttt

SEQ ID NO: 8075 - DNA, 33 bp, Homo sapien
agatctgaaagttaaccaaatacaacagctaga

SEQ ID NO: 8076 - DNA, 33 bp, Homo sapien
agatctgaaagttaactaaatacaacagctaga

SEQ ID NO: 8077 - DNA, 33 bp, Homo sapien
ccgccggaagtattgacggaaagcttgaattac

SEQ ID NO: 8078 - DNA, 33 bp, Homo sapien
ccgccggaagtattgatggaaagcttgaattac

SEQ ID NO: 8079 - DNA, 33 bp, Homo sapien
taagaaaattgctcaaatagagatacagacaaa

SEQ ID NO: 8080 - DNA, 33 bp, Homo sapien
taagaaaattgctcaagtagagatacagacaaa

SEQ ID NO: 8081 - DNA, 33 bp, Homo sapien
tttcatcctggatggccattcttgcttttgatg

SEQ ID NO: 8082 - DNA, 33 bp, Homo sapien
tttcatcctggatggctattcttgcttttgatg

SEQ ID NO: 8083 - DNA, 33 bp, Homo sapien
tctagaagcctttgatcacaagaaaggaagtaa

SEQ ID NO: 8084 - DNA, 33 bp, Homo sapien
tctagaagcctttgattacaagaaaggaagtaa

SEQ ID NO: 8085 - DNA, 33 bp, Homo sapien
tctagagtctgttatagtaagtcttgttttaca

SEQ ID NO: 8086 - DNA, 33 bp, Homo sapien
tctagagtctgttatattaagtcttgttttaca

SEQ ID NO: 8087 - DNA, 33 bp, Homo sapien
ttacacaaatattatacggtagagctggaattc

SEQ ID NO: 8088 - DNA, 33 bp, Homo sapien
ttacacaaatattatatggtagagctggaattc

SEQ ID NO: 8089 - DNA, 33 bp, Homo sapien
cctatcatccccaaaacggcatgattttaagtt

SEQ ID NO: 8090 - DNA, 33 bp, Homo sapien
cctatcatccccaaaatggcatgattttaagtt

SEQ ID NO: 8091 - DNA, 33 bp, Homo sapien
caaaaaacacctggagcatttgtagcacagtgc

SEQ ID NO: 8092 - DNA, 33 bp, Homo sapien
caaaaaacacctggagtatttgtagcacagtgc

SEQ ID NO: 8093 - DNA, 33 bp, Homo sapien
caaagtggtgaagaagaatgtatgcttgctcaa

SEQ ID NO: 8094 - DNA, 33 bp, Homo sapien
caaagtggtgaagaaggatgtatgcttgctcaa

SEQ ID NO: 8095 - DNA, 33 bp, Homo sapien
atttttccctgcattaaactctcagggaatgta

SEQ ID NO: 8096 - DNA, 33 bp, Homo sapien
atttttccctgcattacactctcagggaatgta

SEQ ID NO: 8097 - DNA, 33 bp, Homo sapien
gaaatgaacagaagtacggatgagctttcacac

SEQ ID NO: 8098 - DNA, 33 bp, Homo sapien
gaaatgaacagaagtatggatgagctttcacac

SEQ ID NO: 8099 - DNA, 33 bp, Homo sapien
caagtgcaaggcctggaacctgactagttttgg

SEQ ID NO: 8100 - DNA, 33 bp, Homo sapien
caagtgcaaggcctggcacctgactagttttgg

SEQ ID NO: 8101 - DNA, 33 bp, Homo sapien
aggtcatccaggacaaccccaatcagatctcta

SEQ ID NO: 8102 - DNA, 33 bp, Homo sapien
aggtcatccaggacaatcccaatcagatctcta

SEQ ID NO: 8103 - DNA, 33 bp, Homo sapien
catcttgacgcatcctaagctacttaacttcgg

SEQ ID NO: 8104 - DNA, 33 bp, Homo sapien
catcttgacgcatcctgagctacttaacttcgg

SEQ ID NO: 8105 - DNA, 33 bp, Homo sapien
gaaaccaaacgctcaacatagtcaatggtttct

SEQ ID NO: 8106 - DNA, 33 bp, Homo sapien
gaaaccaaacgctcaatatagtcaatggtttct

SEQ ID NO: 8107 - DNA, 33 bp, Homo sapien
tattacaaatcctaaacgcgaggcactgtgttg

SEQ ID NO: 8108 - DNA, 33 bp, Homo sapien
tattacaaatcctaaatgcgaggcactgtgttg

SEQ ID NO: 8109 - DNA, 33 bp, Homo sapien
taccagctgcccgtctaaaatatcacccctttg

SEQ ID NO: 8110 - DNA, 33 bp, Homo sapien
taccagctgcccgtcttaaatatcacccctttg

SEQ ID NO: 8111 - DNA, 33 bp, Homo sapien
ctgctcacattcacatcactctcaccaaaaaga

SEQ ID NO: 8112 - DNA, 33 bp, Homo sapien
ctgctcacattcacattactctcaccaaaaaga

SEQ ID NO: 8113 - DNA, 33 bp, Homo sapien
ctatgcaattgtttaacagtaatcagagcaaaa

SEQ ID NO: 8114 - DNA, 33 bp, Homo sapien
ctatgcaattgtttaatagtaatcagagcaaaa

SEQ ID NO: 8115 - DNA, 33 bp, Homo sapien
aatacctatctcataaaattgctacaatgttta

SEQ ID NO: 8116 - DNA, 33 bp, Homo sapien
aatacctatctcataagattgctacaatgttta

SEQ ID NO: 8117 - DNA, 33 bp, Homo sapien
gggagccgcggcttaacgtgcagatatggccaa

SEQ ID NO: 8118 - DNA, 33 bp, Homo sapien
gggagccgcggcttaaggtgcagatatggccaa

SEQ ID NO: 8119 - DNA, 33 bp, Homo sapien
tctgtctccccacttacagtgcaagcttgttga

SEQ ID NO: 8120 - DNA, 33 bp, Homo sapien
tctgtctccccacttagagtgcaagcttgttga

SEQ ID NO: 8121 - DNA, 33 bp, Homo sapien
atcctattatcccctagtacagatgaagtaatt

SEQ ID NO: 8122 - DNA, 33 bp, Homo sapien
atcctattatcccctattacagatgaagtaatt

SEQ ID NO: 8123 - DNA, 33 bp, Homo sapien
atctgaagatataaagaaggcacgatcagggcc

SEQ ID NO: 8124 - DNA, 33 bp, Homo sapien
atctgaagatataaaggaggcacgatcagggcc

SEQ ID NO: 8125 - DNA, 33 bp, Homo sapien
agaagaggaggctttaaatgatcagactcccaa

SEQ ID NO: 8126 - DNA, 33 bp, Homo sapien
agaagaggaggctttagatgatcagactcccaa

SEQ ID NO: 8127 - DNA, 33 bp, Homo sapien
ggctgttgtttgtttaagttgctgtattccatc

SEQ ID NO: 8128 - DNA, 33 bp, Homo sapien
ggctgttgtttgtttaggttgctgtattccatc

SEQ ID NO: 8129 - DNA, 33 bp, Homo sapien
ttagttgagcaagtacggagcaccttacatatg

SEQ ID NO: 8130 - DNA, 33 bp, Homo sapien
ttagttgagcaagtactgagcaccttacatatg

SEQ ID NO: 8131 - DNA, 33 bp, Homo sapien
aacagtaaataacagcccaacttacctttacat

SEQ ID NO: 8132 - DNA, 33 bp, Homo sapien
aacagtaaataacagctcaacttacctttacat

SEQ ID NO: 8133 - DNA, 33 bp, Homo sapien
cactttaattaaaccaccagttttgaagggagt

SEQ ID NO: 8134 - DNA, 33 bp, Homo sapien
cactttaattaaaccatcagttttgaagggagt

SEQ ID NO: 8135 - DNA, 33 bp, Homo sapien
actatgagtacaatagaaagtaaattacctacc

SEQ ID NO: 8136 - DNA, 33 bp, Homo sapien
actatgagtacaataggaagtaaattacctacc

SEQ ID NO: 8137 - DNA, 33 bp, Homo sapien
ttacttctgcacaaagcctaatgtgttttttaa

SEQ ID NO: 8138 - DNA, 33 bp, Homo sapien
ttacttctgcacaaagtctaatgtgttttttaa

SEQ ID NO: 8139 - DNA, 33 bp, Homo sapien
tatttagtcattgagccatcattcaaatcataa

SEQ ID NO: 8140 - DNA, 33 bp, Homo sapien
tatttagtcattgagctatcattcaaatcataa

SEQ ID NO: 8141 - DNA, 33 bp, Homo sapien
actattaagatttcaactggtgggatcaaaagg

SEQ ID NO: 8142 - DNA, 33 bp, Homo sapien
actattaagatttcaattggtgggatcaaaagg

SEQ ID NO: 8143 - DNA, 33 bp, Homo sapien
agttggtatggaaaacaatttgatctaaataca

SEQ ID NO: 8144 - DNA, 33 bp, Homo sapien
agttggtatggaaaacgatttgatctaaataca

SEQ ID NO: 8145 - DNA, 33 bp, Homo sapien
cagtcatccaatctaccggtttcctcagaacaa

SEQ ID NO: 8146 - DNA, 33 bp, Homo sapien
cagtcatccaatctactggtttcctcagaacaa

SEQ ID NO: 8147 - DNA, 33 bp, Homo sapien
tgctgttatactcttacccgttcatttgtggct

SEQ ID NO: 8148 - DNA, 33 bp, Homo sapien
tgctgttatactcttatccgttcatttgtggct

SEQ ID NO: 8149 - DNA, 33 bp, Homo sapien
atatctctaacaattaccgaaatcagtaaaaca

SEQ ID NO: 8150 - DNA, 33 bp, Homo sapien
atatctctaacaattatcgaaatcagtaaaaca

SEQ ID NO: 8151 - DNA, 33 bp, Homo sapien
acagtcatgacctccaagaatactgcttacatt

SEQ ID NO: 8152 - DNA, 33 bp, Homo sapien
acagtcatgacctccatgaatactgcttacatt

SEQ ID NO: 8153 - DNA, 33 bp, Homo sapien
gccaagacttgcaataagagaaactttatcaaa

SEQ ID NO: 8154 - DNA, 33 bp, Homo sapien
gccaagacttgcaataggagaaactttatcaaa

SEQ ID NO: 8155 - DNA, 33 bp, Homo sapien
aaagggctcaagataccgtactcccaaattcct

SEQ ID NO: 8156 - DNA, 33 bp, Homo sapien
aaagggctcaagatactgtactcccaaattcct

SEQ ID NO: 8157 - DNA, 33 bp, Homo sapien
acttggtgttaaaggaaccagtggtctctctgg

SEQ ID NO: 8158 - DNA, 33 bp, Homo sapien
acttggtgttaaaggagccagtggtctctctgg

SEQ ID NO: 8159 - DNA, 33 bp, Homo sapien
ttaacaccaagtcctaaaaagctatggcaaaac

SEQ ID NO: 8160 - DNA, 33 bp, Homo sapien
ttaacaccaagtcctagaaagctatggcaaaac

SEQ ID NO: 8161 - DNA, 33 bp, Homo sapien
ttcctttccaaccgtaccttcagttagccttca

SEQ ID NO: 8162 - DNA, 33 bp, Homo sapien
ttcctttccaaccgtatcttcagttagccttca

SEQ ID NO: 8163 - DNA, 33 bp, Homo sapien
ggtcccgctgcagtaccaactgttcttcaatgc

SEQ ID NO: 8164 - DNA, 33 bp, Homo sapien
ggtcccgctgcagtactaactgttcttcaatgc

SEQ ID NO: 8165 - DNA, 33 bp, Homo sapien
ccataggatcttcaaccaccctccattcttcca

SEQ ID NO: 8166 - DNA, 33 bp, Homo sapien
ccataggatcttcaacgaccctccattcttcca

SEQ ID NO: 8167 - DNA, 33 bp, Homo sapien
cagcatcaaaagcaagccgaggccaggtgcagt

SEQ ID NO: 8168 - DNA, 33 bp, Homo sapien
cagcatcaaaagcaagtcgaggccaggtgcagt

SEQ ID NO: 8169 - DNA, 33 bp, Homo sapien
caaatggtgtatcaacagttctgcacgtgtgac

SEQ ID NO: 8170 - DNA, 33 bp, Homo sapien
caaatggtgtatcaactgttctgcacgtgtgac

SEQ ID NO: 8171 - DNA, 33 bp, Homo sapien
ctctgttccttcaggacacttggcaggaaggag

SEQ ID NO: 8172 - DNA, 33 bp, Homo sapien
ctctgttccttcaggagacttggcaggaaggag

SEQ ID NO: 8173 - DNA, 33 bp, Homo sapien
ggttcaaaggaaataccatctgtggaagcactt

SEQ ID NO: 8174 - DNA, 33 bp, Homo sapien
ggttcaaaggaaatactatctgtggaagcactt

SEQ ID NO: 8175 - DNA, 33 bp, Homo sapien
gatcttttgtaacagacctctcttctcttgcct

SEQ ID NO: 8176 - DNA, 33 bp, Homo sapien
gatcttttgtaacagatctctcttctcttgcct

SEQ ID NO: 8177 - DNA, 33 bp, Homo sapien
caataagaagaatcagactcatggcggctgaag

SEQ ID NO: 8178 - DNA, 33 bp, Homo sapien
caataagaagaatcagtctcatggcggctgaag

SEQ ID NO: 8179 - DNA, 33 bp, Homo sapien
actttctcccctgtcaacatggtatcctccgtg

SEQ ID NO: 8180 - DNA, 33 bp, Homo sapien
actttctcccctgtcaccatggtatcctccgtg

SEQ ID NO: 8181 - DNA, 33 bp, Homo sapien
ggatgtctacccaaaagtagcataaatcatcaa

SEQ ID NO: 8182 - DNA, 33 bp, Homo sapien
ggatgtctacccaaaattagcataaatcatcaa

SEQ ID NO: 8183 - DNA, 33 bp, Homo sapien
atttttgtccttaggaactataaagattatacg

SEQ ID NO: 8184 - DNA, 33 bp, Homo sapien
atttttgtccttaggagctataaagattatacg

SEQ ID NO: 8185 - DNA, 33 bp, Homo sapien
ttctttggctcaaccacatgttagactcacaag

SEQ ID NO: 8186 - DNA, 33 bp, Homo sapien
ttctttggctcaaccagatgttagactcacaag

SEQ ID NO: 8187 - DNA, 33 bp, Homo sapien
gagctgacacttgtcacgtcctctgacagcaac

SEQ ID NO: 8188 - DNA, 33 bp, Homo sapien
gagctgacacttgtcatgtcctctgacagcaac

SEQ ID NO: 8189 - DNA, 33 bp, Homo sapien
gctctttggtgaacacaggataataattctgta

SEQ ID NO: 8190 - DNA, 33 bp, Homo sapien
gctctttggtgaacacgggataataattctgta

SEQ ID NO: 8191 - DNA, 33 bp, Homo sapien
ggaggagaatagccataagcctggattgtagct

SEQ ID NO: 8192 - DNA, 33 bp, Homo sapien
ggaggagaatagccatgagcctggattgtagct

SEQ ID NO: 8193 - DNA, 33 bp, Homo sapien
agaaaatgctcccccaagacttgtggctcagtt

SEQ ID NO: 8194 - DNA, 33 bp, Homo sapien
agaaaatgctcccccatgacttgtggctcagtt

SEQ ID NO: 8195 - DNA, 33 bp, Homo sapien
tgtgatctgtagacaactgtaatggtcatatag

SEQ ID NO: 8196 - DNA, 33 bp, Homo sapien
tgtgatctgtagacaattgtaatggtcatatag

SEQ ID NO: 8197 - DNA, 33 bp, Homo sapien
aaagaaccgccatcagccctaacagggaaaggc

SEQ ID NO: 8198 - DNA, 33 bp, Homo sapien
aaagaaccgccatcagtcctaacagggaaaggc

SEQ ID NO: 8199 - DNA, 33 bp, Homo sapien
gcaatagtggaaccagaatatggacatagattt

SEQ ID NO: 8200 - DNA, 33 bp, Homo sapien
gcaatagtggaaccaggatatggacatagattt

SEQ ID NO: 8201 - DNA, 33 bp, Homo sapien
ctgacttctctgagcacccattgatttccacac

SEQ ID NO: 8202 - DNA, 33 bp, Homo sapien
ctgacttctctgagcatccattgatttccacac

SEQ ID NO: 8203 - DNA, 33 bp, Homo sapien
agttctgctcttaggaagatgccagtctgatgg

SEQ ID NO: 8204 - DNA, 33 bp, Homo sapien
agttctgctcttaggaggatgccagtctgatgg

SEQ ID NO: 8205 - DNA, 33 bp, Homo sapien
accaatcagtttaatcagagaagaataactttg

SEQ ID NO: 8206 - DNA, 33 bp, Homo sapien
accaatcagtttaatcggagaagaataactttg

SEQ ID NO: 8207 - DNA, 33 bp, Homo sapien
catttgtgtagacaccaagggttgcaatgtaaa

SEQ ID NO: 8208 - DNA, 33 bp, Homo sapien
catttgtgtagacaccgagggttgcaatgtaaa

SEQ ID NO: 8209 - DNA, 33 bp, Homo sapien
tggaaaggatttaagaacacaggtgccttcaat

SEQ ID NO: 8210 - DNA, 33 bp, Homo sapien
tggaaaggatttaagagcacaggtgccttcaat

SEQ ID NO: 8211 - DNA, 33 bp, Homo sapien
aggtagcatctggaaaattgccagaaaccagca

SEQ ID NO: 8212 - DNA, 33 bp, Homo sapien
aggtagcatctggaaagttgccagaaaccagca

SEQ ID NO: 8213 - DNA, 33 bp, Homo sapien
cgtgctctgggaagaacggacaaggacaggaac

SEQ ID NO: 8214 - DNA, 33 bp, Homo sapien
cgtgctctgggaagaatggacaaggacaggaac

SEQ ID NO: 8215 - DNA, 33 bp, Homo sapien
ccttccttcaagagaaccacagacttaagaaca

SEQ ID NO: 8216 - DNA, 33 bp, Homo sapien
ccttccttcaagagaagcacagacttaagaaca

SEQ ID NO: 8217 - DNA, 33 bp, Homo sapien
atcttagtgtaagagacacgtctgagcttggaa

SEQ ID NO: 8218 - DNA, 33 bp, Homo sapien
atcttagtgtaagagagacgtctgagcttggaa

SEQ ID NO: 8219 - DNA, 33 bp, Homo sapien
catgagcactactgaccagtataaaaatgtttc

SEQ ID NO: 8220 - DNA, 33 bp, Homo sapien
catgagcactactgacgagtataaaaatgtttc

SEQ ID NO: 8221 - DNA, 33 bp, Homo sapien
ttctcggtatatggcacccttccatcagaaatt

SEQ ID NO: 8222 - DNA, 33 bp, Homo sapien
ttctcggtatatggcatccttccatcagaaatt

SEQ ID NO: 8223 - DNA, 33 bp, Homo sapien
agagagaatagtaatacggaagtggagacaagc

SEQ ID NO: 8224 - DNA, 33 bp, Homo sapien
agagagaatagtaatagggaagtggagacaagc

SEQ ID NO: 8225 - DNA, 33 bp, Homo sapien
caccaagtcactaagaagtgagatacaggcttg

SEQ ID NO: 8226 - DNA, 33 bp, Homo sapien
caccaagtcactaagaggtgagatacaggcttg

SEQ ID NO: 8227 - DNA, 33 bp, Homo sapien
aaggccaaagggaaccccagattcttcctcttg

SEQ ID NO: 8228 - DNA, 33 bp, Homo sapien
aaggccaaagggaacctcagattcttcctcttg

SEQ ID NO: 8229 - DNA, 33 bp, Homo sapien
gaactcctgaataaccaaagagaagatccttct

SEQ ID NO: 8230 - DNA, 33 bp, Homo sapien
gaactcctgaataaccgaagagaagatccttct

SEQ ID NO: 8231 - DNA, 33 bp, Homo sapien
tgtgagggcagaaggaaaagcataggtgcagga

SEQ ID NO: 8232 - DNA, 33 bp, Homo sapien
tgtgagggcagaaggagaagcataggtgcagga

SEQ ID NO: 8233 - DNA, 33 bp, Homo sapien
attcatggccatttaccgagctctttaagctat

SEQ ID NO: 8234 - DNA, 33 bp, Homo sapien
attcatggccatttacggagctctttaagctat

SEQ ID NO: 8235 - DNA, 33 bp, Homo sapien
cccctgggccgtcaagaatttattttggaaggt

SEQ ID NO: 8236 - DNA, 33 bp, Homo sapien
cccctgggccgtcaaggatttattttggaaggt

SEQ ID NO: 8237 - DNA, 33 bp, Homo sapien
ttagtgcggtttttgcagaaaggaatgggcgag

SEQ ID NO: 8238 - DNA, 33 bp, Homo sapien
ttagtgcggtttttgcggaaaggaatgggcgag

SEQ ID NO: 8239 - DNA, 33 bp, Homo sapien
aagcaaagccctaaaacgatttgcaaccatcac

SEQ ID NO: 8240 - DNA, 33 bp, Homo sapien
aagcaaagccctaaaatgatttgcaaccatcac

SEQ ID NO: 8241 - DNA, 33 bp, Homo sapien
agtttggtggctcaagaaactaaaaagccagcg

SEQ ID NO: 8242 - DNA, 33 bp, Homo sapien
agtttggtggctcaaggaactaaaaagccagcg

SEQ ID NO: 8243 - DNA, 33 bp, Homo sapien
aacaggtgaaagcaacaatctaacatctctgag

SEQ ID NO: 8244 - DNA, 33 bp, Homo sapien
aacaggtgaaagcaacgatctaacatctctgag

SEQ ID NO: 8245 - DNA, 33 bp, Homo sapien
caggcctatggctaaacggcaggaagatgaggt

SEQ ID NO: 8246 - DNA, 33 bp, Homo sapien
caggcctatggctaaatggcaggaagatgaggt

SEQ ID NO: 8247 - DNA, 33 bp, Homo sapien
atgcagcttagagcaccgatcctggacctggaa

SEQ ID NO: 8248 - DNA, 33 bp, Homo sapien
atgcagcttagagcactgatcctggacctggaa

SEQ ID NO: 8249 - DNA, 33 bp, Homo sapien
gaggagagaagttctacaaggaggtaatggtca

SEQ ID NO: 8250 - DNA, 33 bp, Homo sapien
gaggagagaagttctataaggaggtaatggtca

SEQ ID NO: 8251 - DNA, 33 bp, Homo sapien
aaccccattttacagacggaaagcttggttcag

SEQ ID NO: 8252 - DNA, 33 bp, Homo sapien
aaccccattttacagatggaaagcttggttcag

SEQ ID NO: 8253 - DNA, 33 bp, Homo sapien
aaaccggggtatccaaataagaagagggaatgc

SEQ ID NO: 8254 - DNA, 33 bp, Homo sapien
aaaccggggtatccaagtaagaagagggaatgc

SEQ ID NO: 8255 - DNA, 33 bp, Homo sapien
tagggtacggtgggtgaaagcgtgtctcccaaa

SEQ ID NO: 8256 - DNA, 33 bp, Homo sapien
tagggtacggtgggtggaagcgtgtctcccaaa

SEQ ID NO: 8257 - DNA, 33 bp, Homo sapien
cctcctggttctactacagcataggtcagactt

SEQ ID NO: 8258 - DNA, 33 bp, Homo sapien
cctcctggttctactagagcataggtcagactt

SEQ ID NO: 8259 - DNA, 33 bp, Homo sapien
gggagctttagaagtagaggtaggccaggtgca

SEQ ID NO: 8260 - DNA, 33 bp, Homo sapien
gggagctttagaagtataggtaggccaggtgca

SEQ ID NO: 8261 - DNA, 33 bp, Homo sapien
acacagccaaaccatacgagtggcatcccatca

SEQ ID NO: 8262 - DNA, 33 bp, Homo sapien
acacagccaaaccatatgagtggcatcccatca

SEQ ID NO: 8263 - DNA, 33 bp, Homo sapien
tgttgtggaaactaacagattcattgaagtaca

SEQ ID NO: 8264 - DNA, 33 bp, Homo sapien
tgttgtggaaactaacggattcattgaagtaca

SEQ ID NO: 8265 - DNA, 33 bp, Homo sapien
agccccatgcaaaggaagtgaccctgatcatct

SEQ ID NO: 8266 - DNA, 33 bp, Homo sapien
agccccatgcaaaggaggtgaccctgatcatct

SEQ ID NO: 8267 - DNA, 33 bp, Homo sapien
ctgtgggctcttctaacctggctctcagatcct

SEQ ID NO: 8268 - DNA, 33 bp, Homo sapien
ctgtgggctcttctaatctggctctcagatcct

SEQ ID NO: 8269 - DNA, 33 bp, Homo sapien
tagcctataatctgctcaagaagaggatttata

SEQ ID NO: 8270 - DNA, 33 bp, Homo sapien
tagcctataatctgcttaagaagaggatttata

SEQ ID NO: 8271 - DNA, 33 bp, Homo sapien
ggctaaccacagagataaagacgaggaagagag

SEQ ID NO: 8272 - DNA, 33 bp, Homo sapien
ggctaaccacagagatgaagacgaggaagagag

SEQ ID NO: 8273 - DNA, 33 bp, Homo sapien
agtttcctcacaagtaaaatgggcttagtaatt

SEQ ID NO: 8274 - DNA, 33 bp, Homo sapien
agtttcctcacaagtataatgggcttagtaatt

SEQ ID NO: 8275 - DNA, 33 bp, Homo sapien
taaaaactagtgctgaaataatatttgagcagg

SEQ ID NO: 8276 - DNA, 33 bp, Homo sapien
taaaaactagtgctgagataatatttgagcagg

SEQ ID NO: 8277 - DNA, 33 bp, Homo sapien
ggaaaagcaagtgttacccatgactgccagatg

SEQ ID NO: 8278 - DNA, 33 bp, Homo sapien
ggaaaagcaagtgttatccatgactgccagatg

SEQ ID NO: 8279 - DNA, 33 bp, Homo sapien
tcacagatcagaacacaaactgctgagatccgg

SEQ ID NO: 8280 - DNA, 33 bp, Homo sapien
tcacagatcagaacacgaactgctgagatccgg

SEQ ID NO: 8281 - DNA, 33 bp, Homo sapien
gataaatatactacaacgaggcaaagcggaagg

SEQ ID NO: 8282 - DNA, 33 bp, Homo sapien
gataaatatactacaatgaggcaaagcggaagg

SEQ ID NO: 8283 - DNA, 33 bp, Homo sapien
tgtgtggtcttgcacaatacttttccttttctg

SEQ ID NO: 8284 - DNA, 33 bp, Homo sapien
tgtgtggtcttgcacagtacttttccttttctg

SEQ ID NO: 8285 - DNA, 33 bp, Homo sapien
tggcttctgaactgaaggataaagtgagtcacc

SEQ ID NO: 8286 - DNA, 33 bp, Homo sapien
tggcttctgaactgaatgataaagtgagtcacc

SEQ ID NO: 8287 - DNA, 33 bp, Homo sapien
tccctactggtccatgcagactagactcagact

SEQ ID NO: 8288 - DNA, 33 bp, Homo sapien
tccctactggtccatgtagactagactcagact

SEQ ID NO: 8289 - DNA, 33 bp, Homo sapien
cacgaaacaatgcagcaccatggattcaaagcc

SEQ ID NO: 8290 - DNA, 33 bp, Homo sapien
cacgaaacaatgcagcgccatggattcaaagcc

SEQ ID NO: 8291 - DNA, 33 bp, Homo sapien
aggtcggtgtgactccaatgccctcgttcacca

SEQ ID NO: 8292 - DNA, 33 bp, Homo sapien
aggtcggtgtgactccgatgccctcgttcacca

SEQ ID NO: 8293 - DNA, 33 bp, Homo sapien
tgagttgtgctttcaacgcaaggtccagagatc

SEQ ID NO: 8294 - DNA, 33 bp, Homo sapien
tgagttgtgctttcaaggcaaggtccagagatc

SEQ ID NO: 8295 - DNA, 33 bp, Homo sapien
ttttcttcctagtcagcaaggctctgtttgctc

SEQ ID NO: 8296 - DNA, 33 bp, Homo sapien
ttttcttcctagtcagtaaggctctgtttgctc

SEQ ID NO: 8297 - DNA, 33 bp, Homo sapien
atccttcctgtcccgaatcctagactgttgggg

SEQ ID NO: 8298 - DNA, 33 bp, Homo sapien
atccttcctgtcccgactcctagactgttgggg

SEQ ID NO: 8299 - DNA, 33 bp, Homo sapien
gtggaccagccttgaacgagatcctagtggctc

SEQ ID NO: 8300 - DNA, 33 bp, Homo sapien
gtggaccagccttgaatgagatcctagtggctc

SEQ ID NO: 8301 - DNA, 33 bp, Homo sapien
atctccttgttgttgaagattagatgtagctca

SEQ ID NO: 8302 - DNA, 33 bp, Homo sapien
atctccttgttgttgaggattagatgtagctca

SEQ ID NO: 8303 - DNA, 33 bp, Homo sapien
ggcagccaggctagaaaccaagtcctctttgaa

SEQ ID NO: 8304 - DNA, 33 bp, Homo sapien
ggcagccaggctagaatccaagtcctctttgaa

SEQ ID NO: 8305 - DNA, 33 bp, Homo sapien
agagatgaccagaatgaaccatttagtaacagt

SEQ ID NO: 8306 - DNA, 33 bp, Homo sapien
agagatgaccagaatggaccatttagtaacagt

SEQ ID NO: 8307 - DNA, 33 bp, Homo sapien
gtaacaatggcaaagaataagatactaacaaat

SEQ ID NO: 8308 - DNA, 33 bp, Homo sapien
gtaacaatggcaaagagtaagatactaacaaat

SEQ ID NO: 8309 - DNA, 33 bp, Homo sapien
atgaatgggtttgaaaactgcatatcctcctgc

SEQ ID NO: 8310 - DNA, 33 bp, Homo sapien
atgaatgggtttgaaacctgcatatcctcctgc

SEQ ID NO: 8311 - DNA, 33 bp, Homo sapien
tgcagaaaatggaaacgaatccacataacattc

SEQ ID NO: 8312 - DNA, 33 bp, Homo sapien
tgcagaaaatggaaactaatccacataacattc

SEQ ID NO: 8313 - DNA, 33 bp, Homo sapien
tatcaggaaacaaagaagtcacttgaagcatta

SEQ ID NO: 8314 - DNA, 33 bp, Homo sapien
tatcaggaaacaaagatgtcacttgaagcatta

SEQ ID NO: 8315 - DNA, 33 bp, Homo sapien
catccgaggtgcgggccacatccctggtgctgc

SEQ ID NO: 8316 - DNA, 33 bp, Homo sapien
catccgaggtgcgggctacatccctggtgctgc

SEQ ID NO: 8317 - DNA, 33 bp, Homo sapien
gtcagcctctgtcagactccaagactcaagcag

SEQ ID NO: 8318 - DNA, 33 bp, Homo sapien
gtcagcctctgtcagattccaagactcaagcag

SEQ ID NO: 8319 - DNA, 33 bp, Homo sapien
ctgacctgacacaaaactcgtactccttccccg

SEQ ID NO: 8320 - DNA, 33 bp, Homo sapien
ctgacctgacacaaaattcgtactccttccccg

SEQ ID NO: 8321 - DNA, 33 bp, Homo sapien
tgaggatttgtttcacaaggtggtagtgtatca

SEQ ID NO: 8322 - DNA, 33 bp, Homo sapien
tgaggatttgtttcacgaggtggtagtgtatca

SEQ ID NO: 8323 - DNA, 33 bp, Homo sapien
ctctgattatccaaacaggcctctcttttcaca

SEQ ID NO: 8324 - DNA, 33 bp, Homo sapien
ctctgattatccaaacgggcctctcttttcaca

SEQ ID NO: 8325 - DNA, 33 bp, Homo sapien
ggggacaagctcaggtaaatcctaactgtgtga

SEQ ID NO: 8326 - DNA, 33 bp, Homo sapien
ggggacaagctcaggtgaatcctaactgtgtga

SEQ ID NO: 8327 - DNA, 33 bp, Homo sapien
ccagtgtcatgtcataacttcaggctgctgggg

SEQ ID NO: 8328 - DNA, 33 bp, Homo sapien
ccagtgtcatgtcatagcttcaggctgctgggg

SEQ ID NO: 8329 - DNA, 33 bp, Homo sapien
taaggtgccttctatacgtcagcaagaagtagc

SEQ ID NO: 8330 - DNA, 33 bp, Homo sapien
taaggtgccttctatatgtcagcaagaagtagc

SEQ ID NO: 8331 - DNA, 33 bp, Homo sapien
ttggcccaggtgggaacgcaaatcatgatggtg

SEQ ID NO: 8332 - DNA, 33 bp, Homo sapien
ttggcccaggtgggaatgcaaatcatgatggtg

SEQ ID NO: 8333 - DNA, 33 bp, Homo sapien
cacttgtgcctggaaaattataagctaccaata

SEQ ID NO: 8334 - DNA, 33 bp, Homo sapien
cacttgtgcctggaaatttataagctaccaata

SEQ ID NO: 8335 - DNA, 33 bp, Homo sapien
tttctgtgctactgaacgaaccatgatggatag

SEQ ID NO: 8336 - DNA, 33 bp, Homo sapien
tttctgtgctactgaatgaaccatgatggatag

SEQ ID NO: 8337 - DNA, 33 bp, Homo sapien
tgaggaagctgaggacaagaggctaagggaccc

SEQ ID NO: 8338 - DNA, 33 bp, Homo sapien
tgaggaagctgaggacgagaggctaagggaccc

SEQ ID NO: 8339 - DNA, 33 bp, Homo sapien
acctccttctcagaaacggtccagagacagcaa

SEQ ID NO: 8340 - DNA, 33 bp, Homo sapien
acctccttctcagaaatggtccagagacagcaa

SEQ ID NO: 8341 - DNA, 33 bp, Homo sapien
ttctaaggaccacaacagtcaaccaagagtcta

SEQ ID NO: 8342 - DNA, 33 bp, Homo sapien
ttctaaggaccacaacggtcaaccaagagtcta

SEQ ID NO: 8343 - DNA, 33 bp, Homo sapien
tgactgagagcacttaacattcagcttgtctca

SEQ ID NO: 8344 - DNA, 33 bp, Homo sapien
tgactgagagcacttaccattcagcttgtctca

SEQ ID NO: 8345 - DNA, 33 bp, Homo sapien
tttttttttgtagggacaatgtttcaccatgtt

SEQ ID NO: 8346 - DNA, 33 bp, Homo sapien
tttttttttgtagggataatgtttcaccatgtt

SEQ ID NO: 8347 - DNA, 33 bp, Homo sapien
cagagagccgcccttaccagaacggagtcaggt

SEQ ID NO: 8348 - DNA, 33 bp, Homo sapien
cagagagccgcccttatcagaacggagtcaggt

SEQ ID NO: 8349 - DNA, 33 bp, Homo sapien
tagccaggtgtggttacgctggcctgtaatccc

SEQ ID NO: 8350 - DNA, 33 bp, Homo sapien
tagccaggtgtggttatgctggcctgtaatccc

SEQ ID NO: 8351 - DNA, 33 bp, Homo sapien
ttacttagctgtcttacacgttttcatttgtgt

SEQ ID NO: 8352 - DNA, 33 bp, Homo sapien
ttacttagctgtcttatacgttttcatttgtgt

SEQ ID NO: 8353 - DNA, 33 bp, Homo sapien
gaagagatatatgaaaagaattggtaagccaaa

SEQ ID NO: 8354 - DNA, 33 bp, Homo sapien
gaagagatatatgaaaggaattggtaagccaaa

SEQ ID NO: 8355 - DNA, 33 bp, Homo sapien
ggcctcacaaacctcaataacaaatgtggactt

SEQ ID NO: 8356 - DNA, 33 bp, Homo sapien
ggcctcacaaacctcagtaacaaatgtggactt

SEQ ID NO: 8357 - DNA, 33 bp, Homo sapien
tgacatcaaatctttcaatacatctcactggtt

SEQ ID NO: 8358 - DNA, 33 bp, Homo sapien
tgacatcaaatctttcgatacatctcactggtt

SEQ ID NO: 8359 - DNA, 33 bp, Homo sapien
aaccaagtggagatgacacaaaaacgaaaactc

SEQ ID NO: 8360 - DNA, 33 bp, Homo sapien
aaccaagtggagatgatacaaaaacgaaaactc

SEQ ID NO: 8361 - DNA, 33 bp, Homo sapien
aggactggaattaagacctagaaacaggcagag

SEQ ID NO: 8362 - DNA, 33 bp, Homo sapien
aggactggaattaagatctagaaacaggcagag

SEQ ID NO: 8363 - DNA, 33 bp, Homo sapien
aattgatgcccactcaagttgttcctggttttt

SEQ ID NO: 8364 - DNA, 33 bp, Homo sapien
aattgatgcccactcaggttgttcctggttttt

SEQ ID NO: 8365 - DNA, 33 bp, Homo sapien
aggttgcagagagggtcaaacaaaaactgattt

SEQ ID NO: 8366 - DNA, 33 bp, Homo sapien
aggttgcagagagggtgaaacaaaaactgattt

SEQ ID NO: 8367 - DNA, 33 bp, Homo sapien
ggcattgagaggcaaacttcttcatctgaaatc

SEQ ID NO: 8368 - DNA, 33 bp, Homo sapien
ggcattgagaggcaaatttcttcatctgaaatc

SEQ ID NO: 8369 - DNA, 33 bp, Homo sapien
tgaagtgaatatcacaatacacttgagtcacac

SEQ ID NO: 8370 - DNA, 33 bp, Homo sapien
tgaagtgaatatcacagtacacttgagtcacac

SEQ ID NO: 8371 - DNA, 33 bp, Homo sapien
ttcaaaatgattcgaaaggctgagggagcaagt

SEQ ID NO: 8372 - DNA, 33 bp, Homo sapien
ttcaaaatgattcgaagggctgagggagcaagt

SEQ ID NO: 8373 - DNA, 33 bp, Homo sapien
gcagaaaatagggagacagccaggcaaggcttg

SEQ ID NO: 8374 - DNA, 33 bp, Homo sapien
gcagaaaatagggagagagccaggcaaggcttg

SEQ ID NO: 8375 - DNA, 33 bp, Homo sapien
cacttactccattccacctttgagcacctagag

SEQ ID NO: 8376 - DNA, 33 bp, Homo sapien
cacttactccattccatctttgagcacctagag

SEQ ID NO: 8377 - DNA, 33 bp, Homo sapien
cgtcctggcagtctaacgtttagggagccgtct

SEQ ID NO: 8378 - DNA, 33 bp, Homo sapien
cgtcctggcagtctaatgtttagggagccgtct

SEQ ID NO: 8379 - DNA, 33 bp, Homo sapien
gttgcttcttgggaacagggacactggaacact

SEQ ID NO: 8380 - DNA, 33 bp, Homo sapien
gttgcttcttgggaacggggacactggaacact

SEQ ID NO: 8381 - DNA, 33 bp, Homo sapien
gtctttagcaagccacaaagatctgccagccac

SEQ ID NO: 8382 - DNA, 33 bp, Homo sapien
gtctttagcaagccaccaagatctgccagccac

SEQ ID NO: 8383 - DNA, 33 bp, Homo sapien
gtattacatttctgcaactaccttcctctttcc

SEQ ID NO: 8384 - DNA, 33 bp, Homo sapien
gtattacatttctgcagctaccttcctctttcc

SEQ ID NO: 8385 - DNA, 33 bp, Homo sapien
tgggtctgcttgccaccgtccaacattgagctc

SEQ ID NO: 8386 - DNA, 33 bp, Homo sapien
tgggtctgcttgccactgtccaacattgagctc

SEQ ID NO: 8387 - DNA, 33 bp, Homo sapien
attagtcctgtcagtaccttatgcacaggaaga

SEQ ID NO: 8388 - DNA, 33 bp, Homo sapien
attagtcctgtcagtatcttatgcacaggaaga

SEQ ID NO: 8389 - DNA, 33 bp, Homo sapien
gacacgtattccttgacctactatgcaccaggc

SEQ ID NO: 8390 - DNA, 33 bp, Homo sapien
gacacgtattccttgatctactatgcaccaggc

SEQ ID NO: 8391 - DNA, 33 bp, Homo sapien
tggtgaattattaccaaatattgattgaagcag

SEQ ID NO: 8392 - DNA, 33 bp, Homo sapien
tggtgaattattaccacatattgattgaagcag

SEQ ID NO: 8393 - DNA, 33 bp, Homo sapien
actacattgaatgaaaaaagccttacatgagag

SEQ ID NO: 8394 - DNA, 33 bp, Homo sapien
actacattgaatgaaagaagccttacatgagag

SEQ ID NO: 8395 - DNA, 33 bp, Homo sapien
atccattcagggttgacaatgttgaggaacctg

SEQ ID NO: 8396 - DNA, 33 bp, Homo sapien
atccattcagggttgagaatgttgaggaacctg

SEQ ID NO: 8397 - DNA, 33 bp, Homo sapien
aggatgctggaatcccagaattgccttcccagt

SEQ ID NO: 8398 - DNA, 33 bp, Homo sapien
aggatgctggaatcccggaattgccttcccagt

SEQ ID NO: 8399 - DNA, 33 bp, Homo sapien
cacagggtcctgggccaatgatgataatagtaa

SEQ ID NO: 8400 - DNA, 33 bp, Homo sapien
cacagggtcctgggccgatgatgataatagtaa

SEQ ID NO: 8401 - DNA, 33 bp, Homo sapien
ttagcatggatcccacggggttatggttaacag

SEQ ID NO: 8402 - DNA, 33 bp, Homo sapien
ttagcatggatcccactgggttatggttaacag

SEQ ID NO: 8403 - DNA, 33 bp, Homo sapien
cctgctctgggcttcaataactaactcttgatc

SEQ ID NO: 8404 - DNA, 33 bp, Homo sapien
cctgctctgggcttcagtaactaactcttgatc

SEQ ID NO: 8405 - DNA, 33 bp, Homo sapien
gggcatcttccactcccagtcatttatcacagg

SEQ ID NO: 8406 - DNA, 33 bp, Homo sapien
gggcatcttccactccgagtcatttatcacagg

SEQ ID NO: 8407 - DNA, 33 bp, Homo sapien
tgtaagggactagcccacatgttctagctggga

SEQ ID NO: 8408 - DNA, 33 bp, Homo sapien
tgtaagggactagcccgcatgttctagctggga

SEQ ID NO: 8409 - DNA, 33 bp, Homo sapien
tgttctagctgggattcaagtttggctctgaga

SEQ ID NO: 8410 - DNA, 33 bp, Homo sapien
tgttctagctgggattgaagtttggctctgaga

SEQ ID NO: 8411 - DNA, 33 bp, Homo sapien
atgtctgtttgccttccctaccacataagagct

SEQ ID NO: 8412 - DNA, 33 bp, Homo sapien
atgtctgtttgccttcgctaccacataagagct

SEQ ID NO: 8413 - DNA, 33 bp, Homo sapien
agataagcgtgccatacaatgagaggacagagc

SEQ ID NO: 8414 - DNA, 33 bp, Homo sapien
agataagcgtgccatataatgagaggacagagc

SEQ ID NO: 8415 - DNA, 33 bp, Homo sapien
aggctaaaaagcgaagcctgcatcacaaaggga

SEQ ID NO: 8416 - DNA, 33 bp, Homo sapien
aggctaaaaagcgaaggctgcatcacaaaggga

SEQ ID NO: 8417 - DNA, 33 bp, Homo sapien
aaactggctcagggaaagaagatgacttgcctg

SEQ ID NO: 8418 - DNA, 33 bp, Homo sapien
aaactggctcagggaaggaagatgacttgcctg

SEQ ID NO: 8419 - DNA, 33 bp, Homo sapien
catcagtcaattcagaagcccctggcagttttg

SEQ ID NO: 8420 - DNA, 33 bp, Homo sapien
catcagtcaattcagaggcccctggcagttttg

SEQ ID NO: 8421 - DNA, 33 bp, Homo sapien
cctggctcaaccattcactacttgtgtgacctt

SEQ ID NO: 8422 - DNA, 33 bp, Homo sapien
cctggctcaaccattctctacttgtgtgacctt

SEQ ID NO: 8423 - DNA, 33 bp, Homo sapien
ccaggatacagactcacgtagactggctctaaa

SEQ ID NO: 8424 - DNA, 33 bp, Homo sapien
ccaggatacagactcatgtagactggctctaaa

SEQ ID NO: 8425 - DNA, 33 bp, Homo sapien
caggcagtcaccctcaaagctgacgttctttag

SEQ ID NO: 8426 - DNA, 33 bp, Homo sapien
caggcagtcaccctcagagctgacgttctttag

SEQ ID NO: 8427 - DNA, 33 bp, Homo sapien
gtgtactgaacaatgacggcaccatttaccaga

SEQ ID NO: 8428 - DNA, 33 bp, Homo sapien
gtgtactgaacaatgatggcaccatttaccaga

SEQ ID NO: 8429 - DNA, 33 bp, Homo sapien
aatctttgtcaatgtactaatccaggtaggccc

SEQ ID NO: 8430 - DNA, 33 bp, Homo sapien
aatctttgtcaatgtagtaatccaggtaggccc

SEQ ID NO: 8431 - DNA, 33 bp, Homo sapien
gttcagcccaggtcgacggaagaggagtttgaa

SEQ ID NO: 8432 - DNA, 33 bp, Homo sapien
gttcagcccaggtcgatggaagaggagtttgaa

SEQ ID NO: 8433 - DNA, 33 bp, Homo sapien
gctggaagaatcttaacggcttaactactggca

SEQ ID NO: 8434 - DNA, 33 bp, Homo sapien
gctggaagaatcttaatggcttaactactggca

SEQ ID NO: 8435 - DNA, 33 bp, Homo sapien
ctcctggctgccaggcactcagtcccggctgct

SEQ ID NO: 8436 - DNA, 33 bp, Homo sapien
ctcctggctgccaggcgctcagtcccggctgct

SEQ ID NO: 8437 - DNA, 33 bp, Homo sapien
gcatttccttcctttaagggtacagctccgcac

SEQ ID NO: 8438 - DNA, 33 bp, Homo sapien
gcatttccttcctttaggggtacagctccgcac

SEQ ID NO: 8439 - DNA, 33 bp, Homo sapien
acccgcagcagaagtcaatcttcaagtaacgtt

SEQ ID NO: 8440 - DNA, 33 bp, Homo sapien
acccgcagcagaagtcgatcttcaagtaacgtt

SEQ ID NO: 8441 - DNA, 33 bp, Homo sapien
gcctgtcccagggaaaaagctctgtaagacgtc

SEQ ID NO: 8442 - DNA, 33 bp, Homo sapien
gcctgtcccagggaaacagctctgtaagacgtc

SEQ ID NO: 8443 - DNA, 33 bp, Homo sapien
ttctgtacattaaccccgccagataccgagagg

SEQ ID NO: 8444 - DNA, 33 bp, Homo sapien
ttctgtacattaaccctgccagataccgagagg

SEQ ID NO: 8445 - DNA, 33 bp, Homo sapien
gccacaggtccgcagcaagttcgtggcgggcag

SEQ ID NO: 8446 - DNA, 33 bp, Homo sapien
gccacaggtccgcagcgagttcgtggcgggcag

SEQ ID NO: 8447 - DNA, 33 bp, Homo sapien
gcagctggtgactcaaaattaacacagattttt

SEQ ID NO: 8448 - DNA, 33 bp, Homo sapien
gcagctggtgactcaatattaacacagattttt

SEQ ID NO: 8449 - DNA, 33 bp, Homo sapien
aaagttgaaaagatcaatctgaagctgaataac

SEQ ID NO: 8450 - DNA, 33 bp, Homo sapien
aaagttgaaaagatcagtctgaagctgaataac

SEQ ID NO: 8451 - DNA, 33 bp, Homo sapien
cctgtcagggctggaacgaggtgactttgatca

SEQ ID NO: 8452 - DNA, 33 bp, Homo sapien
cctgtcagggctggaatgaggtgactttgatca

SEQ ID NO: 8453 - DNA, 33 bp, Homo sapien
ctcttgagtaaagcatgaactggtcagtaattt

SEQ ID NO: 8454 - DNA, 33 bp, Homo sapien
ctcttgagtaaagcattaactggtcagtaattt

SEQ ID NO: 8455 - DNA, 33 bp, Homo sapien
ttcatttctgctgcggcagctcatcgggctttc

SEQ ID NO: 8456 - DNA, 33 bp, Homo sapien
ttcatttctgctgcgggagctcatcgggctttc

SEQ ID NO: 8457 - DNA, 33 bp, Homo sapien
ccatcaccacgcacgacgttgcctgctactgcc

SEQ ID NO: 8458 - DNA, 33 bp, Homo sapien
ccatcaccacgcacgatgttgcctgctactgcc

SEQ ID NO: 8459 - DNA, 33 bp, Homo sapien
ctagaccagggatgttcaaatgaaagaggttca

SEQ ID NO: 8460 - DNA, 33 bp, Homo sapien
ctagaccagggatgtttaaatgaaagaggttca

SEQ ID NO: 8461 - DNA, 33 bp, Homo sapien
tcagcaagtttctgaaaaggccttagcaacaca

SEQ ID NO: 8462 - DNA, 33 bp, Homo sapien
tcagcaagtttctgaagaggccttagcaacaca

SEQ ID NO: 8463 - DNA, 33 bp, Homo sapien
ggtgggtgacacaggaatatgataacacattgt

SEQ ID NO: 8464 - DNA, 33 bp, Homo sapien
ggtgggtgacacaggagtatgataacacattgt

SEQ ID NO: 8465 - DNA, 33 bp, Homo sapien
agaaggtttgagcagaaagtctcgtgaattttg

SEQ ID NO: 8466 - DNA, 33 bp, Homo sapien
agaaggtttgagcagagagtctcgtgaattttg

SEQ ID NO: 8467 - DNA, 33 bp, Homo sapien
gcactgtggccccttcgcagtcaagaatgcctt

SEQ ID NO: 8468 - DNA, 33 bp, Homo sapien
gcactgtggccccttctcagtcaagaatgcctt

SEQ ID NO: 8469 - DNA, 33 bp, Homo sapien
ccagtgaggtgtttgcagaataccctgttcagt

SEQ ID NO: 8470 - DNA, 33 bp, Homo sapien
ccagtgaggtgtttgcggaataccctgttcagt

SEQ ID NO: 8471 - DNA, 33 bp, Homo sapien
gacaaaggcatgatagaacttgtttttaactgc

SEQ ID NO: 8472 - DNA, 33 bp, Homo sapien
gacaaaggcatgataggacttgtttttaactgc

SEQ ID NO: 8473 - DNA, 33 bp, Homo sapien
gttatctgagaagagaataccattcagataaaa

SEQ ID NO: 8474 - DNA, 33 bp, Homo sapien
gttatctgagaagagactaccattcagataaaa

SEQ ID NO: 8475 - DNA, 33 bp, Homo sapien
gctctgcattggctaacagatatgtatggggtc

SEQ ID NO: 8476 - DNA, 33 bp, Homo sapien
gctctgcattggctaatagatatgtatggggtc

SEQ ID NO: 8477 - DNA, 33 bp, Homo sapien
cccactttagagacaaagagactgagacagaga

SEQ ID NO: 8478 - DNA, 33 bp, Homo sapien
cccactttagagacaaggagactgagacagaga

SEQ ID NO: 8479 - DNA, 33 bp, Homo sapien
agtctgatacccttcccaacagagccctagatg

SEQ ID NO: 8480 - DNA, 33 bp, Homo sapien
agtctgatacccttcctaacagagccctagatg

SEQ ID NO: 8481 - DNA, 33 bp, Homo sapien
atcacacacccagagacgacagagctggcccaa

SEQ ID NO: 8482 - DNA, 33 bp, Homo sapien
atcacacacccagagatgacagagctggcccaa

SEQ ID NO: 8483 - DNA, 33 bp, Homo sapien
ggctagaaacccagaacgtgcattttgtaaaac

SEQ ID NO: 8484 - DNA, 33 bp, Homo sapien
ggctagaaacccagaatgtgcattttgtaaaac

SEQ ID NO: 8485 - DNA, 33 bp, Homo sapien
ctgtatgcataccatacgtcaataaaaaggcta

SEQ ID NO: 8486 - DNA, 33 bp, Homo sapien
ctgtatgcataccatatgtcaataaaaaggcta

SEQ ID NO: 8487 - DNA, 33 bp, Homo sapien
attccattctgctttcaatattcagagtctaca

SEQ ID NO: 8488 - DNA, 33 bp, Homo sapien
attccattctgctttcgatattcagagtctaca

SEQ ID NO: 8489 - DNA, 33 bp, Homo sapien
gtgctccatcaataccagcctttattatcatag

SEQ ID NO: 8490 - DNA, 33 bp, Homo sapien
gtgctccatcaataccggcctttattatcatag

SEQ ID NO: 8491 - DNA, 33 bp, Homo sapien
ctcatcgggtgagtcaaaatcagttcccagctc

SEQ ID NO: 8492 - DNA, 33 bp, Homo sapien
ctcatcgggtgagtcagaatcagttcccagctc

SEQ ID NO: 8493 - DNA, 33 bp, Homo sapien
ccaactgaaatcactacggatagctgtccttaa

SEQ ID NO: 8494 - DNA, 33 bp, Homo sapien
ccaactgaaatcactatggatagctgtccttaa

SEQ ID NO: 8495 - DNA, 33 bp, Homo sapien
ttttaaaagcctcaccaatgattctgaggtgtg

SEQ ID NO: 8496 - DNA, 33 bp, Homo sapien
ttttaaaagcctcaccgatgattctgaggtgtg

SEQ ID NO: 8497 - DNA, 33 bp, Homo sapien
tacttgttttctcacaaatctatccatctctct

SEQ ID NO: 8498 - DNA, 33 bp, Homo sapien
tacttgttttctcacatatctatccatctctct

SEQ ID NO: 8499 - DNA, 33 bp, Homo sapien
ttgtccaaaatttctacagtaaccatttcaaac

SEQ ID NO: 8500 - DNA, 33 bp, Homo sapien
ttgtccaaaatttctatagtaaccatttcaaac

SEQ ID NO: 8501 - DNA, 33 bp, Homo sapien
ccaggaaactttgttaaactgtcgaggaaagag

SEQ ID NO: 8502 - DNA, 33 bp, Homo sapien
ccaggaaactttgttacactgtcgaggaaagag

SEQ ID NO: 8503 - DNA, 33 bp, Homo sapien
cgtctggccatcttccactgtttagagtaattc

SEQ ID NO: 8504 - DNA, 33 bp, Homo sapien
cgtctggccatcttccgctgtttagagtaattc

SEQ ID NO: 8505 - DNA, 33 bp, Homo sapien
catgggaaacctttgaagtaaaagagagataca

SEQ ID NO: 8506 - DNA, 33 bp, Homo sapien
catgggaaacctttgaggtaaaagagagataca

SEQ ID NO: 8507 - DNA, 33 bp, Homo sapien
aagggaggctgaataaaagcaggtagtatttta

SEQ ID NO: 8508 - DNA, 33 bp, Homo sapien
aagggaggctgaataacagcaggtagtatttta

SEQ ID NO: 8509 - DNA, 33 bp, Homo sapien
cagggcctggggtttcacagatacagtcttgta

SEQ ID NO: 8510 - DNA, 33 bp, Homo sapien
cagggcctggggtttcgcagatacagtcttgta

SEQ ID NO: 8511 - DNA, 33 bp, Homo sapien
gccttacataagaggaataaccataaccaaact

SEQ ID NO: 8512 - DNA, 33 bp, Homo sapien
gccttacataagaggagtaaccataaccaaact

SEQ ID NO: 8513 - DNA, 33 bp, Homo sapien
taacttagccttaaaaggtaggaagcgaaagtg

SEQ ID NO: 8514 - DNA, 33 bp, Homo sapien
taacttagccttaaaatgtaggaagcgaaagtg

SEQ ID NO: 8515 - DNA, 33 bp, Homo sapien
tttctgagcacttaaactgtgttgcatacccct

SEQ ID NO: 8516 - DNA, 33 bp, Homo sapien
tttctgagcacttaaattgtgttgcatacccct

SEQ ID NO: 8517 - DNA, 33 bp, Homo sapien
tcttttaaaaatgtcacgattacaaagtgaaaa

SEQ ID NO: 8518 - DNA, 33 bp, Homo sapien
tcttttaaaaatgtcatgattacaaagtgaaaa

SEQ ID NO: 8519 - DNA, 33 bp, Homo sapien
ctgtggtaaatatcataaaaactctctgtctga

SEQ ID NO: 8520 - DNA, 33 bp, Homo sapien
ctgtggtaaatatcatgaaaactctctgtctga

SEQ ID NO: 8521 - DNA, 33 bp, Homo sapien
ttacaatgtattttaaatgcaaaatgcccatgg

SEQ ID NO: 8522 - DNA, 33 bp, Homo sapien
ttacaatgtattttaagtgcaaaatgcccatgg

SEQ ID NO: 8523 - DNA, 33 bp, Homo sapien
tggctatttgagcctcggaaatgtggctgctgt

SEQ ID NO: 8524 - DNA, 33 bp, Homo sapien
tggctatttgagcctctgaaatgtggctgctgt

SEQ ID NO: 8525 - DNA, 33 bp, Homo sapien
tctctggagaactccgacatataccatgtccca

SEQ ID NO: 8526 - DNA, 33 bp, Homo sapien
tctctggagaactccgccatataccatgtccca

SEQ ID NO: 8527 - DNA, 33 bp, Homo sapien
ctctgtcacctttaaaatcactgttgtagacaa

SEQ ID NO: 8528 - DNA, 33 bp, Homo sapien
ctctgtcacctttaaactcactgttgtagacaa

SEQ ID NO: 8529 - DNA, 33 bp, Homo sapien
gccaagccacacttggcatttgcaagctcatca

SEQ ID NO: 8530 - DNA, 33 bp, Homo sapien
gccaagccacacttggtatttgcaagctcatca

SEQ ID NO: 8531 - DNA, 33 bp, Homo sapien
gactatgaagtgactcagaaacctcagttcgag

SEQ ID NO: 8532 - DNA, 33 bp, Homo sapien
gactatgaagtgactcggaaacctcagttcgag

SEQ ID NO: 8533 - DNA, 33 bp, Homo sapien
ccaaaccgtcctcggcaatcctggtccccggga

SEQ ID NO: 8534 - DNA, 33 bp, Homo sapien
ccaaaccgtcctcggcgatcctggtccccggga

SEQ ID NO: 8535 - DNA, 33 bp, Homo sapien
tcatctgtaaaacgaaatgcctctccctttccc

SEQ ID NO: 8536 - DNA, 33 bp, Homo sapien
tcatctgtaaaacgaactgcctctccctttccc

SEQ ID NO: 8537 - DNA, 33 bp, Homo sapien
gagagaagacccagacactttatctgaggaagg

SEQ ID NO: 8538 - DNA, 33 bp, Homo sapien
gagagaagacccagacgctttatctgaggaagg

SEQ ID NO: 8539 - DNA, 33 bp, Homo sapien
ccagtgagttcttcaacgaccccctcttttttg

SEQ ID NO: 8540 - DNA, 33 bp, Homo sapien
ccagtgagttcttcaatgaccccctcttttttg

SEQ ID NO: 8541 - DNA, 33 bp, Homo sapien
agagcatttactaaaggctgagggatactgcca

SEQ ID NO: 8542 - DNA, 33 bp, Homo sapien
agagcatttactaaagtctgagggatactgcca

SEQ ID NO: 8543 - DNA, 33 bp, Homo sapien
tatggacactcagtaaggtactgctactagaat

SEQ ID NO: 8544 - DNA, 33 bp, Homo sapien
tatggacactcagtaatgtactgctactagaat

SEQ ID NO: 8545 - DNA, 33 bp, Homo sapien
cacagcacttggtagaatccttggatgactcag

SEQ ID NO: 8546 - DNA, 33 bp, Homo sapien
cacagcacttggtagagtccttggatgactcag

SEQ ID NO: 8547 - DNA, 33 bp, Homo sapien
ttcctataaagaactgaataatctgtgagcgag

SEQ ID NO: 8548 - DNA, 33 bp, Homo sapien
ttcctataaagaactggataatctgtgagcgag

SEQ ID NO: 8549 - DNA, 33 bp, Homo sapien
taccagttgcttgacagtcatgtaggtgttaaa

SEQ ID NO: 8550 - DNA, 33 bp, Homo sapien
taccagttgcttgacattcatgtaggtgttaaa

SEQ ID NO: 8551 - DNA, 33 bp, Homo sapien
aaattcagaaatcataaagcatcgatattgcac

SEQ ID NO: 8552 - DNA, 33 bp, Homo sapien
aaattcagaaatcatacagcatcgatattgcac

SEQ ID NO: 8553 - DNA, 33 bp, Homo sapien
cggtgtagccaggtagaacatttgacctaggac

SEQ ID NO: 8554 - DNA, 33 bp, Homo sapien
cggtgtagccaggtaggacatttgacctaggac

SEQ ID NO: 8555 - DNA, 33 bp, Homo sapien
gagggaggtgaagtcacgtgcccaggtctcaca

SEQ ID NO: 8556 - DNA, 33 bp, Homo sapien
gagggaggtgaagtcatgtgcccaggtctcaca

SEQ ID NO: 8557 - DNA, 33 bp, Homo sapien
gcactcatctgttttcaatcacataacactccc

SEQ ID NO: 8558 - DNA, 33 bp, Homo sapien
gcactcatctgttttcgatcacataacactccc

SEQ ID NO: 8559 - DNA, 33 bp, Homo sapien
gtttttcttaatctcaaagcaggagccagggca

SEQ ID NO: 8560 - DNA, 33 bp, Homo sapien
gtttttcttaatctcagagcaggagccagggca

SEQ ID NO: 8561 - DNA, 33 bp, Homo sapien
gccagggcaggaagtaagcaggctgattagggc

SEQ ID NO: 8562 - DNA, 33 bp, Homo sapien
gccagggcaggaagtaggcaggctgattagggc

SEQ ID NO: 8563 - DNA, 33 bp, Homo sapien
catccagtctgatggacattcaagtcactggac

SEQ ID NO: 8564 - DNA, 33 bp, Homo sapien
catccagtctgatggatattcaagtcactggac

SEQ ID NO: 8565 - DNA, 33 bp, Homo sapien
ctgtgaacaacctgaaatgtccaccttccttca

SEQ ID NO: 8566 - DNA, 33 bp, Homo sapien
ctgtgaacaacctgaattgtccaccttccttca

SEQ ID NO: 8567 - DNA, 33 bp, Homo sapien
gataaaagaactagaaatattaggatatgggca

SEQ ID NO: 8568 - DNA, 33 bp, Homo sapien
gataaaagaactagaagtattaggatatgggca

SEQ ID NO: 8569 - DNA, 33 bp, Homo sapien
ccaccaactttaagccaggctctgtgttacatg

SEQ ID NO: 8570 - DNA, 33 bp, Homo sapien
ccaccaactttaagccgggctctgtgttacatg

SEQ ID NO: 8571 - DNA, 33 bp, Homo sapien
ttccataacaacaccacgaagtataattagcat

SEQ ID NO: 8572 - DNA, 33 bp, Homo sapien
ttccataacaacaccatgaagtataattagcat

SEQ ID NO: 8573 - DNA, 33 bp, Homo sapien
taaaaagacctgttcaagtgtggtcacgtctta

SEQ ID NO: 8574 - DNA, 33 bp, Homo sapien
taaaaagacctgttcaggtgtggtcacgtctta

SEQ ID NO: 8575 - DNA, 33 bp, Homo sapien
tacaaactcagataccgcttggcaggttaacac

SEQ ID NO: 8576 - DNA, 33 bp, Homo sapien
tacaaactcagatacctcttggcaggttaacac

SEQ ID NO: 8577 - DNA, 33 bp, Homo sapien
ctctacaaaaactattaaaaaaattgccaggca

SEQ ID NO: 8578 - DNA, 33 bp, Homo sapien
ctctacaaaaactatttaaaaaattgccaggca

SEQ ID NO: 8579 - DNA, 33 bp, Homo sapien
ttaagtgggaaattaaatgagataattgattta

SEQ ID NO: 8580 - DNA, 33 bp, Homo sapien
ttaagtgggaaattaagtgagataattgattta

SEQ ID NO: 8581 - DNA, 33 bp, Homo sapien
tgaggcagacaatctactaaatatcgtggtgga

SEQ ID NO: 8582 - DNA, 33 bp, Homo sapien
tgaggcagacaatctagtaaatatcgtggtgga

SEQ ID NO: 8583 - DNA, 33 bp, Homo sapien
aattaccagggctagaagaaactccaggacaga

SEQ ID NO: 8584 - DNA, 33 bp, Homo sapien
aattaccagggctagatgaaactccaggacaga

SEQ ID NO: 8585 - DNA, 33 bp, Homo sapien
gagggataacatagatgaattctgccactttat

SEQ ID NO: 8586 - DNA, 33 bp, Homo sapien
gagggataacatagattaattctgccactttat

SEQ ID NO: 8587 - DNA, 33 bp, Homo sapien
catttttttcaaatcacagagtgagctgctaag

SEQ ID NO: 8588 - DNA, 33 bp, Homo sapien
catttttttcaaatcatagagtgagctgctaag

SEQ ID NO: 8589 - DNA, 33 bp, Homo sapien
tgtggtatttttcgcaatatttcaaaacttttc

SEQ ID NO: 8590 - DNA, 33 bp, Homo sapien
tgtggtatttttcgcagtatttcaaaacttttc

SEQ ID NO: 8591 - DNA, 33 bp, Homo sapien
ctgtgtgtgctgtgtacagactattgtgtatcc

SEQ ID NO: 8592 - DNA, 33 bp, Homo sapien
ctgtgtgtgctgtgtatagactattgtgtatcc

SEQ ID NO: 8593 - DNA, 33 bp, Homo sapien
tatggggccggttacaatgactcatgcctgtaa

SEQ ID NO: 8594 - DNA, 33 bp, Homo sapien
tatggggccggttacagtgactcatgcctgtaa

SEQ ID NO: 8595 - DNA, 33 bp, Homo sapien
ctggtgttggttccacaagaggctcagggacac

SEQ ID NO: 8596 - DNA, 33 bp, Homo sapien
ctggtgttggttccacgagaggctcagggacac

SEQ ID NO: 8597 - DNA, 33 bp, Homo sapien
tctgatgcgcggcctcaccgggggcctgagaac

SEQ ID NO: 8598 - DNA, 33 bp, Homo sapien
tctgatgcgcggcctcgccgggggcctgagaac

SEQ ID NO: 8599 - DNA, 33 bp, Homo sapien
gggttcatttactggacggaggctcagagaggc

SEQ ID NO: 8600 - DNA, 33 bp, Homo sapien
gggttcatttactggatggaggctcagagaggc

SEQ ID NO: 8601 - DNA, 33 bp, Homo sapien
gcaataacattcggaaaagaatactaagggtgt

SEQ ID NO: 8602 - DNA, 33 bp, Homo sapien
gcaataacattcggaagagaatactaagggtgt

SEQ ID NO: 8603 - DNA, 33 bp, Homo sapien
atagcagcttttttcacgctgccaaaagaagaa

SEQ ID NO: 8604 - DNA, 33 bp, Homo sapien
atagcagcttttttcatgctgccaaaagaagaa

SEQ ID NO: 8605 - DNA, 33 bp, Homo sapien
atctgaaacaaggtaaatcccttctgcctatgc

SEQ ID NO: 8606 - DNA, 33 bp, Homo sapien
atctgaaacaaggtaactcccttctgcctatgc

SEQ ID NO: 8607 - DNA, 33 bp, Homo sapien
aacaactccgtcctaaatcactgacgcctgaaa

SEQ ID NO: 8608 - DNA, 33 bp, Homo sapien
aacaactccgtcctaactcactgacgcctgaaa

SEQ ID NO: 8609 - DNA, 33 bp, Homo sapien
tggcttttacactgagaaatggatgtcctggca

SEQ ID NO: 8610 - DNA, 33 bp, Homo sapien
tggcttttacactgagcaatggatgtcctggca

SEQ ID NO: 8611 - DNA, 33 bp, Homo sapien
aatggcttcctcaatccgaactggcttctacat

SEQ ID NO: 8612 - DNA, 33 bp, Homo sapien
aatggcttcctcaatctgaactggcttctacat

SEQ ID NO: 8613 - DNA, 33 bp, Homo sapien
tgggcttggaaatcagcaaactcttcaaatctg

SEQ ID NO: 8614 - DNA, 33 bp, Homo sapien
tgggcttggaaatcagtaaactcttcaaatctg

SEQ ID NO: 8615 - DNA, 33 bp, Homo sapien
ggcctcatacactagcaccctgatgccacattc

SEQ ID NO: 8616 - DNA, 33 bp, Homo sapien
ggcctcatacactagcgccctgatgccacattc

SEQ ID NO: 8617 - DNA, 33 bp, Homo sapien
agggaaacacgtctgactagcacttcccctggg

SEQ ID NO: 8618 - DNA, 33 bp, Homo sapien
agggaaacacgtctgattagcacttcccctggg

SEQ ID NO: 8619 - DNA, 33 bp, Homo sapien
cagcgaccacagaacacgaaaccaagcatgagg

SEQ ID NO: 8620 - DNA, 33 bp, Homo sapien
cagcgaccacagaacatgaaaccaagcatgagg

SEQ ID NO: 8621 - DNA, 33 bp, Homo sapien
tgttcaaaaatcagtaagaatttcaggacagcg

SEQ ID NO: 8622 - DNA, 33 bp, Homo sapien
tgttcaaaaatcagtaggaatttcaggacagcg

SEQ ID NO: 8623 - DNA, 33 bp, Homo sapien
aagaatataaaataaaggttacctgccatcatg

SEQ ID NO: 8624 - DNA, 33 bp, Homo sapien
aagaatataaaataaatgttacctgccatcatg

SEQ ID NO: 8625 - DNA, 33 bp, Homo sapien
accttcggaaaggatacagtgactgacctctct

SEQ ID NO: 8626 - DNA, 33 bp, Homo sapien
accttcggaaaggatatagtgactgacctctct

SEQ ID NO: 8627 - DNA, 33 bp, Homo sapien
ggaccaagcttggctccaattcaccacattgcc

SEQ ID NO: 8628 - DNA, 33 bp, Homo sapien
ggaccaagcttggctctaattcaccacattgcc

SEQ ID NO: 8629 - DNA, 33 bp, Homo sapien
ctcttgttctccactgaaaaaaacttaaatcag

SEQ ID NO: 8630 - DNA, 33 bp, Homo sapien
ctcttgttctccactgcaaaaaacttaaatcag

SEQ ID NO: 8631 - DNA, 33 bp, Homo sapien
tttctttaacgtggaacatgaacgtaaagatgc

SEQ ID NO: 8632 - DNA, 33 bp, Homo sapien
tttctttaacgtggaatatgaacgtaaagatgc

SEQ ID NO: 8633 - DNA, 33 bp, Homo sapien
ttgcatggctatagaacgtcattggagattatg

SEQ ID NO: 8634 - DNA, 33 bp, Homo sapien
ttgcatggctatagaatgtcattggagattatg

SEQ ID NO: 8635 - DNA, 33 bp, Homo sapien
agagaagggcctgccagctgagggcatccattg

SEQ ID NO: 8636 - DNA, 33 bp, Homo sapien
agagaagggcctgccatctgagggcatccattg

SEQ ID NO: 8637 - DNA, 33 bp, Homo sapien
ctcttagtgcattctcactacaaacctagtaat

SEQ ID NO: 8638 - DNA, 33 bp, Homo sapien
ctcttagtgcattctcgctacaaacctagtaat

SEQ ID NO: 8639 - DNA, 33 bp, Homo sapien
gaaagtgatgtgttggcacagtagataggggac

SEQ ID NO: 8640 - DNA, 33 bp, Homo sapien
gaaagtgatgtgttggtacagtagataggggac

SEQ ID NO: 8641 - DNA, 33 bp, Homo sapien
ttgcccctgataactcaccagcggatcctggtc

SEQ ID NO: 8642 - DNA, 33 bp, Homo sapien
ttgcccctgataactcgccagcggatcctggtc

SEQ ID NO: 8643 - DNA, 33 bp, Homo sapien
tatcagttattcaaacaattctaatagccattc

SEQ ID NO: 8644 - DNA, 33 bp, Homo sapien
tatcagttattcaaacgattctaatagccattc

SEQ ID NO: 8645 - DNA, 33 bp, Homo sapien
cataggaggttaaaacaccttaatcatgatgtc

SEQ ID NO: 8646 - DNA, 33 bp, Homo sapien
cataggaggttaaaacgccttaatcatgatgtc

SEQ ID NO: 8647 - DNA, 33 bp, Homo sapien
atgagccatcaaaagcacatgtctgatcagctc

SEQ ID NO: 8648 - DNA, 33 bp, Homo sapien
atgagccatcaaaagcgcatgtctgatcagctc

SEQ ID NO: 8649 - DNA, 33 bp, Homo sapien
ccggtgcccaagacacagagatccagtccttca

SEQ ID NO: 8650 - DNA, 33 bp, Homo sapien
ccggtgcccaagacacggagatccagtccttca

SEQ ID NO: 8651 - DNA, 33 bp, Homo sapien
agcaaatgtccactgaagaaagtgaacctgtga

SEQ ID NO: 8652 - DNA, 33 bp, Homo sapien
agcaaatgtccactgacgaaagtgaacctgtga

SEQ ID NO: 8653 - DNA, 33 bp, Homo sapien
ttagtatgagccattaaaagaccagactttaga

SEQ ID NO: 8654 - DNA, 33 bp, Homo sapien
ttagtatgagccattagaagaccagactttaga

SEQ ID NO: 8655 - DNA, 33 bp, Homo sapien
tttgtctccaggattcacagtaggcgcaagtga

SEQ ID NO: 8656 - DNA, 33 bp, Homo sapien
tttgtctccaggattcgcagtaggcgcaagtga

SEQ ID NO: 8657 - DNA, 33 bp, Homo sapien
cataggtaaaaacagaaaatgtgttgaagtgtg

SEQ ID NO: 8658 - DNA, 33 bp, Homo sapien
cataggtaaaaacagagaatgtgttgaagtgtg

SEQ ID NO: 8659 - DNA, 33 bp, Homo sapien
ctagatgctttcccaccagcctgagcagtgctg

SEQ ID NO: 8660 - DNA, 33 bp, Homo sapien
ctagatgctttcccacgagcctgagcagtgctg

SEQ ID NO: 8661 - DNA, 33 bp, Homo sapien
tttcaccctggaaaaacgatggtttggattaag

SEQ ID NO: 8662 - DNA, 33 bp, Homo sapien
tttcaccctggaaaaatgatggtttggattaag

SEQ ID NO: 8663 - DNA, 33 bp, Homo sapien
caattgcccttaggtcccatccatttcagagga

SEQ ID NO: 8664 - DNA, 33 bp, Homo sapien
caattgcccttaggtcgcatccatttcagagga

SEQ ID NO: 8665 - DNA, 33 bp, Homo sapien
ccagaagggacgtaagacagaagccaagccagg

SEQ ID NO: 8666 - DNA, 33 bp, Homo sapien
ccagaagggacgtaaggcagaagccaagccagg

SEQ ID NO: 8667 - DNA, 33 bp, Homo sapien
gagaagaccttgccccaagatcggtggccatct

SEQ ID NO: 8668 - DNA, 33 bp, Homo sapien
gagaagaccttgccccgagatcggtggccatct

SEQ ID NO: 8669 - DNA, 33 bp, Homo sapien
caagatttgaactcagacatcccaacacgcaga

SEQ ID NO: 8670 - DNA, 33 bp, Homo sapien
caagatttgaactcaggcatcccaacacgcaga

SEQ ID NO: 8671 - DNA, 33 bp, Homo sapien
ggaaagggattcgagacggcagagcactgtgca

SEQ ID NO: 8672 - DNA, 33 bp, Homo sapien
ggaaagggattcgagatggcagagcactgtgca

SEQ ID NO: 8673 - DNA, 33 bp, Homo sapien
gccgcagagacaacagaataacctgcctgcaga

SEQ ID NO: 8674 - DNA, 33 bp, Homo sapien
gccgcagagacaacaggataacctgcctgcaga

SEQ ID NO: 8675 - DNA, 33 bp, Homo sapien
attgtcacacagctacagaggtcaagatttcag

SEQ ID NO: 8676 - DNA, 33 bp, Homo sapien
attgtcacacagctacggaggtcaagatttcag

SEQ ID NO: 8677 - DNA, 33 bp, Homo sapien
agctcatctgggaaaacgttaacggtggagtgt

SEQ ID NO: 8678 - DNA, 33 bp, Homo sapien
agctcatctgggaaaaggttaacggtggagtgt

SEQ ID NO: 8679 - DNA, 33 bp, Homo sapien
cagttttatgtaccacgcagaaagacaccgcca

SEQ ID NO: 8680 - DNA, 33 bp, Homo sapien
cagttttatgtaccactcagaaagacaccgcca

SEQ ID NO: 8681 - DNA, 33 bp, Homo sapien
ccaccctcatgccccagctgtggactggcatgg

SEQ ID NO: 8682 - DNA, 33 bp, Homo sapien
ccaccctcatgccccatctgtggactggcatgg

SEQ ID NO: 8683 - DNA, 33 bp, Homo sapien
ctttttctcttaaacaaatgggatcgggtacag

SEQ ID NO: 8684 - DNA, 33 bp, Homo sapien
ctttttctcttaaacagatgggatcgggtacag

SEQ ID NO: 8685 - DNA, 33 bp, Homo sapien
ccctgagaagccactgaaaaagagtgcagggcc

SEQ ID NO: 8686 - DNA, 33 bp, Homo sapien
ccctgagaagccactggaaaagagtgcagggcc

SEQ ID NO: 8687 - DNA, 33 bp, Homo sapien
ctgggtgatttggatccatgttcctgatggcaa

SEQ ID NO: 8688 - DNA, 33 bp, Homo sapien
ctgggtgatttggatctatgttcctgatggcaa

SEQ ID NO: 8689 - DNA, 33 bp, Homo sapien
ccttgtgaatgcgccacctgggaagaggaccct

SEQ ID NO: 8690 - DNA, 33 bp, Homo sapien
ccttgtgaatgcgccatctgggaagaggaccct

SEQ ID NO: 8691 - DNA, 33 bp, Homo sapien
gagatggtttgggagcacaagtgagagcatgta

SEQ ID NO: 8692 - DNA, 33 bp, Homo sapien
gagatggtttgggagcgcaagtgagagcatgta

SEQ ID NO: 8693 - DNA, 33 bp, Homo sapien
caaacacgcaaagacaatagagtgctccgtgtt

SEQ ID NO: 8694 - DNA, 33 bp, Homo sapien
caaacacgcaaagacagtagagtgctccgtgtt

SEQ ID NO: 8695 - DNA, 33 bp, Homo sapien
gtttgctctcactcttaatacaatcgccaaaat

SEQ ID NO: 8696 - DNA, 33 bp, Homo sapien
gtttgctctcactcttcatacaatcgccaaaat

SEQ ID NO: 8697 - DNA, 33 bp, Homo sapien
tttggatttagattgcagactaatttatggaga

SEQ ID NO: 8698 - DNA, 33 bp, Homo sapien
tttggatttagattgctgactaatttatggaga

SEQ ID NO: 8699 - DNA, 33 bp, Homo sapien
cttgggcctcaactcaatcacatgtgtgaagtc

SEQ ID NO: 8700 - DNA, 33 bp, Homo sapien
cttgggcctcaactcactcacatgtgtgaagtc

SEQ ID NO: 8701 - DNA, 33 bp, Homo sapien
agggaggcaggtgtacagagtcagcgagaacag

SEQ ID NO: 8702 - DNA, 33 bp, Homo sapien
agggaggcaggtgtacggagtcagcgagaacag

SEQ ID NO: 8703 - DNA, 33 bp, Homo sapien
tggccttcagtaagacaatcatggctttgcaga

SEQ ID NO: 8704 - DNA, 33 bp, Homo sapien
tggccttcagtaagacgatcatggctttgcaga

SEQ ID NO: 8705 - DNA, 33 bp, Homo sapien
aaacacagtacctgtacattctttactccccat

SEQ ID NO: 8706 - DNA, 33 bp, Homo sapien
aaacacagtacctgtatattctttactccccat

SEQ ID NO: 8707 - DNA, 33 bp, Homo sapien
gtactgtagaccaggcgctgaggcactagcaga

SEQ ID NO: 8708 - DNA, 33 bp, Homo sapien
gtactgtagaccaggctctgaggcactagcaga

SEQ ID NO: 8709 - DNA, 33 bp, Homo sapien
tctctgctcacggggaacgggacgtcaagatga

SEQ ID NO: 8710 - DNA, 33 bp, Homo sapien
tctctgctcacggggatcgggacgtcaagatga

SEQ ID NO: 8711 - DNA, 33 bp, Homo sapien
gctgcaaagtttctcaagcagcacctatgagac

SEQ ID NO: 8712 - DNA, 33 bp, Homo sapien
gctgcaaagtttctcaggcagcacctatgagac

SEQ ID NO: 8713 - DNA, 33 bp, Homo sapien
agagtgatgtccctccccagtacagattctcat

SEQ ID NO: 8714 - DNA, 33 bp, Homo sapien
agagtgatgtccctcctcagtacagattctcat

SEQ ID NO: 8715 - DNA, 33 bp, Homo sapien
ctcatggcagactccaatcccaaaggaactgtc

SEQ ID NO: 8716 - DNA, 33 bp, Homo sapien
ctcatggcagactccactcccaaaggaactgtc

SEQ ID NO: 8717 - DNA, 33 bp, Homo sapien
ctgtagcaaattaccacaaacatagtggcataa

SEQ ID NO: 8718 - DNA, 33 bp, Homo sapien
ctgtagcaaattaccagaaacatagtggcataa

SEQ ID NO: 8719 - DNA, 33 bp, Homo sapien
gagtatagggatgggaagaatctggcttacttc

SEQ ID NO: 8720 - DNA, 33 bp, Homo sapien
gagtatagggatgggaggaatctggcttacttc

SEQ ID NO: 8721 - DNA, 33 bp, Homo sapien
cccatccctatactcacgccccttctcaacatg

SEQ ID NO: 8722 - DNA, 33 bp, Homo sapien
cccatccctatactcatgccccttctcaacatg

SEQ ID NO: 8723 - DNA, 33 bp, Homo sapien
tgatggaaggggttgcaaagtcatgttgagaag

SEQ ID NO: 8724 - DNA, 33 bp, Homo sapien
tgatggaaggggttgcgaagtcatgttgagaag

SEQ ID NO: 8725 - DNA, 33 bp, Homo sapien
caagggctcttccgcaggggtatggtcacaggg

SEQ ID NO: 8726 - DNA, 33 bp, Homo sapien
caagggctcttccgcatgggtatggtcacaggg

SEQ ID NO: 8727 - DNA, 33 bp, Homo sapien
tgtgacttgtttttctcacccgtaaaatgggaa

SEQ ID NO: 8728 - DNA, 33 bp, Homo sapien
tgtgacttgtttttctgacccgtaaaatgggaa

SEQ ID NO: 8729 - DNA, 33 bp, Homo sapien
tgttggaggctccaccaagtacataaacatagg

SEQ ID NO: 8730 - DNA, 33 bp, Homo sapien
tgttggaggctccaccgagtacataaacatagg

SEQ ID NO: 8731 - DNA, 33 bp, Homo sapien
aatgcccagaagaatcaagtaacttagaagcat

SEQ ID NO: 8732 - DNA, 33 bp, Homo sapien
aatgcccagaagaatcgagtaacttagaagcat

SEQ ID NO: 8733 - DNA, 33 bp, Homo sapien
ctcttataaaatgctcaaactctattatcacaa

SEQ ID NO: 8734 - DNA, 33 bp, Homo sapien
ctcttataaaatgctcgaactctattatcacaa

SEQ ID NO: 8735 - DNA, 33 bp, Homo sapien
gctcctggcatgacaccgaacaatggtagatat

SEQ ID NO: 8736 - DNA, 33 bp, Homo sapien
gctcctggcatgacactgaacaatggtagatat

SEQ ID NO: 8737 - DNA, 33 bp, Homo sapien
ctattctaagctatgcagaaaagactaaaataa

SEQ ID NO: 8738 - DNA, 33 bp, Homo sapien
ctattctaagctatgcggaaaagactaaaataa

SEQ ID NO: 8739 - DNA, 33 bp, Homo sapien
caatgagcccataaagaattttcctcttcattt

SEQ ID NO: 8740 - DNA, 33 bp, Homo sapien
caatgagcccataaaggattttcctcttcattt

SEQ ID NO: 8741 - DNA, 33 bp, Homo sapien
tcagtccatgcgaaaacgttgacctggactttc

SEQ ID NO: 8742 - DNA, 33 bp, Homo sapien
tcagtccatgcgaaaatgttgacctggactttc

SEQ ID NO: 8743 - DNA, 33 bp, Homo sapien
tgaaaagaatcatgtcagaaaaatgacttagtc

SEQ ID NO: 8744 - DNA, 33 bp, Homo sapien
tgaaaagaatcatgtctgaaaaatgacttagtc

SEQ ID NO: 8745 - DNA, 33 bp, Homo sapien
tatatctctctgattccaccttctgagcccttt

SEQ ID NO: 8746 - DNA, 33 bp, Homo sapien
tatatctctctgattctaccttctgagcccttt

SEQ ID NO: 8747 - DNA, 33 bp, Homo sapien
ggctgttcttttgctacaagaactccaagtgga

SEQ ID NO: 8748 - DNA, 33 bp, Homo sapien
ggctgttcttttgctagaagaactccaagtgga

SEQ ID NO: 8749 - DNA, 33 bp, Homo sapien
acacactgaaaaagagaaaatagtaacgtctgg

SEQ ID NO: 8750 - DNA, 33 bp, Homo sapien
acacactgaaaaagaggaaatagtaacgtctgg

SEQ ID NO: 8751 - DNA, 33 bp, Homo sapien
gagagacaagcaagtaagagagatcggacagtc

SEQ ID NO: 8752 - DNA, 33 bp, Homo sapien
gagagacaagcaagtaggagagatcggacagtc

SEQ ID NO: 8753 - DNA, 33 bp, Homo sapien
caaaaaaatgccattaacaccccaaaaatgaaa

SEQ ID NO: 8754 - DNA, 33 bp, Homo sapien
caaaaaaatgccattagcaccccaaaaatgaaa

SEQ ID NO: 8755 - DNA, 33 bp, Homo sapien
tgtgtccagctattctaacaccatttttaatca

SEQ ID NO: 8756 - DNA, 33 bp, Homo sapien
tgtgtccagctattcttacaccatttttaatca

SEQ ID NO: 8757 - DNA, 33 bp, Homo sapien
tgcaaaagtcatatccaataaaatactgttatc

SEQ ID NO: 8758 - DNA, 33 bp, Homo sapien
tgcaaaagtcatatccgataaaatactgttatc

SEQ ID NO: 8759 - DNA, 33 bp, Homo sapien
gtgacatgggaactacaggagtctttgaacaaa

SEQ ID NO: 8760 - DNA, 33 bp, Homo sapien
gtgacatgggaactactggagtctttgaacaaa

SEQ ID NO: 8761 - DNA, 33 bp, Homo sapien
gccagctcgtcagacactacctgccagtccttt

SEQ ID NO: 8762 - DNA, 33 bp, Homo sapien
gccagctcgtcagacattacctgccagtccttt

SEQ ID NO: 8763 - DNA, 33 bp, Homo sapien
cttcaagaactgtttacagaagcttgagaatgg

SEQ ID NO: 8764 - DNA, 33 bp, Homo sapien
cttcaagaactgtttatagaagcttgagaatgg

SEQ ID NO: 8765 - DNA, 33 bp, Homo sapien
ttttctgtgattcttacagggcaggaacaaagc

SEQ ID NO: 8766 - DNA, 33 bp, Homo sapien
ttttctgtgattcttatagggcaggaacaaagc

SEQ ID NO: 8767 - DNA, 33 bp, Homo sapien
ttatcctgtatcctccacaattccctgaacaac

SEQ ID NO: 8768 - DNA, 33 bp, Homo sapien
ttatcctgtatcctccgcaattccctgaacaac

SEQ ID NO: 8769 - DNA, 33 bp, Homo sapien
ctgtagtgaggaccaaatgaactaaatggccat

SEQ ID NO: 8770 - DNA, 33 bp, Homo sapien
ctgtagtgaggaccaagtgaactaaatggccat

SEQ ID NO: 8771 - DNA, 33 bp, Homo sapien
aggattaactgacatccgaaaggtttctttcct

SEQ ID NO: 8772 - DNA, 33 bp, Homo sapien
aggattaactgacatctgaaaggtttctttcct

SEQ ID NO: 8773 - DNA, 33 bp, Homo sapien
ttctcttaagggaagcggctataatttacttga

SEQ ID NO: 8774 - DNA, 33 bp, Homo sapien
ttctcttaagggaagctgctataatttacttga

SEQ ID NO: 8775 - DNA, 33 bp, Homo sapien
cacctgatcccagaaacgtcaaggctgcaatga

SEQ ID NO: 8776 - DNA, 33 bp, Homo sapien
cacctgatcccagaaatgtcaaggctgcaatga

SEQ ID NO: 8777 - DNA, 33 bp, Homo sapien
ttccttctggttccagcacaagtcctgccattg

SEQ ID NO: 8778 - DNA, 33 bp, Homo sapien
ttccttctggttccagtacaagtcctgccattg

SEQ ID NO: 8779 - DNA, 33 bp, Homo sapien
gaagagaaagagttaccgagaactgctatccac

SEQ ID NO: 8780 - DNA, 33 bp, Homo sapien
gaagagaaagagttactgagaactgctatccac

SEQ ID NO: 8781 - DNA, 33 bp, Homo sapien
aaggtaaccaggtgacgaaattatgtcagggtt

SEQ ID NO: 8782 - DNA, 33 bp, Homo sapien
aaggtaaccaggtgactaaattatgtcagggtt

SEQ ID NO: 8783 - DNA, 33 bp, Homo sapien
agggctcaatcgcataataagttctccatccat

SEQ ID NO: 8784 - DNA, 33 bp, Homo sapien
agggctcaatcgcatagtaagttctccatccat

SEQ ID NO: 8785 - DNA, 33 bp, Homo sapien
acctttgtgtccaaaactagtgcaataccttgc

SEQ ID NO: 8786 - DNA, 33 bp, Homo sapien
acctttgtgtccaaaagtagtgcaataccttgc

SEQ ID NO: 8787 - DNA, 33 bp, Homo sapien
atcaggagagagagaaagtgataaatgagcatg

SEQ ID NO: 8788 - DNA, 33 bp, Homo sapien
atcaggagagagagaaggtgataaatgagcatg

SEQ ID NO: 8789 - DNA, 33 bp, Homo sapien
ccttatcacaatctacactgaaataatacatca

SEQ ID NO: 8790 - DNA, 33 bp, Homo sapien
ccttatcacaatctaccctgaaataatacatca

SEQ ID NO: 8791 - DNA, 33 bp, Homo sapien
tttgtgagctctggaactcgaagtcgacttgcc

SEQ ID NO: 8792 - DNA, 33 bp, Homo sapien
tttgtgagctctggaattcgaagtcgacttgcc

SEQ ID NO: 8793 - DNA, 33 bp, Homo sapien
acatttaaaagactacaggctatacagaatcca

SEQ ID NO: 8794 - DNA, 33 bp, Homo sapien
acatttaaaagactacgggctatacagaatcca

SEQ ID NO: 8795 - DNA, 33 bp, Homo sapien
ctggtgccagctggaacagaacttgagaacaca

SEQ ID NO: 8796 - DNA, 33 bp, Homo sapien
ctggtgccagctggaatagaacttgagaacaca

SEQ ID NO: 8797 - DNA, 33 bp, Homo sapien
cacacgagtagtcacaacacaacacaaaaagat

SEQ ID NO: 8798 - DNA, 33 bp, Homo sapien
cacacgagtagtcacagcacaacacaaaaagat

SEQ ID NO: 8799 - DNA, 33 bp, Homo sapien
cagctcttaagaccaacggcctctgtgatgtga

SEQ ID NO: 8800 - DNA, 33 bp, Homo sapien
cagctcttaagaccaatggcctctgtgatgtga

SEQ ID NO: 8801 - DNA, 33 bp, Homo sapien
ccagtaataacttactaaggccaaagcccccat

SEQ ID NO: 8802 - DNA, 33 bp, Homo sapien
ccagtaataacttactgaggccaaagcccccat

SEQ ID NO: 8803 - DNA, 33 bp, Homo sapien
tcaacatagcacatcaatacaacaatggctcat

SEQ ID NO: 8804 - DNA, 33 bp, Homo sapien
tcaacatagcacatcagtacaacaatggctcat

SEQ ID NO: 8805 - DNA, 33 bp, Homo sapien
gagaccattacagacaatcagatgacagccaga

SEQ ID NO: 8806 - DNA, 33 bp, Homo sapien
gagaccattacagacagtcagatgacagccaga

SEQ ID NO: 8807 - DNA, 33 bp, Homo sapien
tacctgcagagaaagacgccaaaatgggaatgg

SEQ ID NO: 8808 - DNA, 33 bp, Homo sapien
tacctgcagagaaagatgccaaaatgggaatgg

SEQ ID NO: 8809 - DNA, 33 bp, Homo sapien
acgataatttcatacaaagcagtctctaaggct

SEQ ID NO: 8810 - DNA, 33 bp, Homo sapien
acgataatttcatacagagcagtctctaaggct

SEQ ID NO: 8811 - DNA, 33 bp, Homo sapien
cctgaagtcaggaaccaaataactgagtctgag

SEQ ID NO: 8812 - DNA, 33 bp, Homo sapien
cctgaagtcaggaaccgaataactgagtctgag

SEQ ID NO: 8813 - DNA, 33 bp, Homo sapien
ggtcacacaaccaggaagtagtaaagtctgaat

SEQ ID NO: 8814 - DNA, 33 bp, Homo sapien
ggtcacacaaccaggacgtagtaaagtctgaat

SEQ ID NO: 8815 - DNA, 33 bp, Homo sapien
acaagcacagagaagaggcctgaacatcagatc

SEQ ID NO: 8816 - DNA, 33 bp, Homo sapien
acaagcacagagaagatgcctgaacatcagatc

SEQ ID NO: 8817 - DNA, 33 bp, Homo sapien
ccaggaaagcagtcccacagtgtttcaggccca

SEQ ID NO: 8818 - DNA, 33 bp, Homo sapien
ccaggaaagcagtcccgcagtgtttcaggccca

SEQ ID NO: 8819 - DNA, 33 bp, Homo sapien
ggaagcagtagcgacacctgggcatcacttggc

SEQ ID NO: 8820 - DNA, 33 bp, Homo sapien
ggaagcagtagcgacatctgggcatcacttggc

SEQ ID NO: 8821 - DNA, 33 bp, Homo sapien
gcacgtgcttgctagagaatccctgatggctgt

SEQ ID NO: 8822 - DNA, 33 bp, Homo sapien
gcacgtgcttgctagataatccctgatggctgt

SEQ ID NO: 8823 - DNA, 33 bp, Homo sapien
gaagctgtcagatggtaaacacctgaagtgtca

SEQ ID NO: 8824 - DNA, 33 bp, Homo sapien
gaagctgtcagatggtgaacacctgaagtgtca

SEQ ID NO: 8825 - DNA, 33 bp, Homo sapien
gtgtaaagattagtgaaccaaattaagacactc

SEQ ID NO: 8826 - DNA, 33 bp, Homo sapien
gtgtaaagattagtgacccaaattaagacactc

SEQ ID NO: 8827 - DNA, 33 bp, Homo sapien
tcatatgaatcaggaaagcttagggcccaacag

SEQ ID NO: 8828 - DNA, 33 bp, Homo sapien
tcatatgaatcaggaaggcttagggcccaacag

SEQ ID NO: 8829 - DNA, 33 bp, Homo sapien
ctctgggttggtgttacagacataatcagtttc

SEQ ID NO: 8830 - DNA, 33 bp, Homo sapien
ctctgggttggtgttatagacataatcagtttc

SEQ ID NO: 8831 - DNA, 33 bp, Homo sapien
gcagtgttgttaaacccggttcacagaggagga

SEQ ID NO: 8832 - DNA, 33 bp, Homo sapien
gcagtgttgttaaacctggttcacagaggagga

SEQ ID NO: 8833 - DNA, 33 bp, Homo sapien
gagcctggagtcggggccaaggccattttgtcc

SEQ ID NO: 8834 - DNA, 33 bp, Homo sapien
gagcctggagtcgggggcaaggccattttgtcc

SEQ ID NO: 8835 - DNA, 33 bp, Homo sapien
ccatttcgcccccccgacagggatttccttggt

SEQ ID NO: 8836 - DNA, 33 bp, Homo sapien
ccatttcgcccccccgtcagggatttccttggt

SEQ ID NO: 8837 - DNA, 33 bp, Homo sapien
cccagcactgtgtacacgatattgtatgtctct

SEQ ID NO: 8838 - DNA, 33 bp, Homo sapien
cccagcactgtgtacatgatattgtatgtctct

SEQ ID NO: 8839 - DNA, 33 bp, Homo sapien
tctgccatattaatgacgatgatgtttttatgt

SEQ ID NO: 8840 - DNA, 33 bp, Homo sapien
tctgccatattaatgatgatgatgtttttatgt

SEQ ID NO: 8841 - DNA, 33 bp, Homo sapien
tctgataaatacaacccatatgcttggcacaga

SEQ ID NO: 8842 - DNA, 33 bp, Homo sapien
tctgataaatacaacctatatgcttggcacaga

SEQ ID NO: 8843 - DNA, 33 bp, Homo sapien
gtgctctcgggggccgaagaaatcccagtctcg

SEQ ID NO: 8844 - DNA, 33 bp, Homo sapien
gtgctctcgggggccggagaaatcccagtctcg

SEQ ID NO: 8845 - DNA, 33 bp, Homo sapien
caagtgcaagtgggcccatagcctgtgttctct

SEQ ID NO: 8846 - DNA, 33 bp, Homo sapien
caagtgcaagtgggcctatagcctgtgttctct

SEQ ID NO: 8847 - DNA, 33 bp, Homo sapien
atataacggatctggcgcaaaggaactgaaaaa

SEQ ID NO: 8848 - DNA, 33 bp, Homo sapien
atataacggatctggctcaaaggaactgaaaaa

SEQ ID NO: 8849 - DNA, 33 bp, Homo sapien
attaaaacactgaaacacctgttaggacatggg

SEQ ID NO: 8850 - DNA, 33 bp, Homo sapien
attaaaacactgaaacgcctgttaggacatggg

SEQ ID NO: 8851 - DNA, 33 bp, Homo sapien
ctgtcactgccagttccagctgaccatgaccat

SEQ ID NO: 8852 - DNA, 33 bp, Homo sapien
ctgtcactgccagttctagctgaccatgaccat

SEQ ID NO: 8853 - DNA, 33 bp, Homo sapien
tggggacactgtggcgaagcagctgaggccttt

SEQ ID NO: 8854 - DNA, 33 bp, Homo sapien
tggggacactgtggcgcagcagctgaggccttt

SEQ ID NO: 8855 - DNA, 33 bp, Homo sapien
atttcactttaatgaacactcactttgctcatc

SEQ ID NO: 8856 - DNA, 33 bp, Homo sapien
atttcactttaatgaagactcactttgctcatc

SEQ ID NO: 8857 - DNA, 33 bp, Homo sapien
accctagcctctctaaccttttcaaatggtgta

SEQ ID NO: 8858 - DNA, 33 bp, Homo sapien
accctagcctctctaatcttttcaaatggtgta

SEQ ID NO: 8859 - DNA, 33 bp, Homo sapien
gtcctgcttggaattacccatggaggaggggtg

SEQ ID NO: 8860 - DNA, 33 bp, Homo sapien
gtcctgcttggaattatccatggaggaggggtg

SEQ ID NO: 8861 - DNA, 33 bp, Homo sapien
gcataagcttcaaagcgctgtcactagcctgct

SEQ ID NO: 8862 - DNA, 33 bp, Homo sapien
gcataagcttcaaagctctgtcactagcctgct

SEQ ID NO: 8863 - DNA, 33 bp, Homo sapien
ctaagcttgtggccatcataagggcaggaacct

SEQ ID NO: 8864 - DNA, 33 bp, Homo sapien
ctaagcttgtggccatgataagggcaggaacct

SEQ ID NO: 8865 - DNA, 33 bp, Homo sapien
caatgggttccacagcagagacttaactgcaga

SEQ ID NO: 8866 - DNA, 33 bp, Homo sapien
caatgggttccacagctgagacttaactgcaga

SEQ ID NO: 8867 - DNA, 33 bp, Homo sapien
catttgtccagtctctcaactttctgggcctcc

SEQ ID NO: 8868 - DNA, 33 bp, Homo sapien
catttgtccagtctctgaactttctgggcctcc

SEQ ID NO: 8869 - DNA, 33 bp, Homo sapien
gcctggtcccatggaaaatgatggcctgggctt

SEQ ID NO: 8870 - DNA, 33 bp, Homo sapien
gcctggtcccatggaatatgatggcctgggctt

SEQ ID NO: 8871 - DNA, 33 bp, Homo sapien
ggaggtctttctctgcactgcaaatctcagcca

SEQ ID NO: 8872 - DNA, 33 bp, Homo sapien
ggaggtctttctctgcgctgcaaatctcagcca

SEQ ID NO: 8873 - DNA, 33 bp, Homo sapien
ttgcaccttgctttacactttgaagatgtgttt

SEQ ID NO: 8874 - DNA, 33 bp, Homo sapien
ttgcaccttgctttacgctttgaagatgtgttt

SEQ ID NO: 8875 - DNA, 33 bp, Homo sapien
agcttttcttggtaacacttcttaaacaatcct

SEQ ID NO: 8876 - DNA, 33 bp, Homo sapien
agcttttcttggtaacgcttcttaaacaatcct

SEQ ID NO: 8877 - DNA, 33 bp, Homo sapien
ctgttgaattagtaacaaagtattcattcaaaa

SEQ ID NO: 8878 - DNA, 33 bp, Homo sapien
ctgttgaattagtaaccaagtattcattcaaaa

SEQ ID NO: 8879 - DNA, 33 bp, Homo sapien
attgggagaataggtagatagctgctgattgta

SEQ ID NO: 8880 - DNA, 33 bp, Homo sapien
attgggagaataggtatatagctgctgattgta

SEQ ID NO: 8881 - DNA, 33 bp, Homo sapien
ttcactaggaggacaccggaagatttaggcttg

SEQ ID NO: 8882 - DNA, 33 bp, Homo sapien
ttcactaggaggacactggaagatttaggcttg

SEQ ID NO: 8883 - DNA, 33 bp, Homo sapien
tgagaactgttctaaaattagattcggtgataa

SEQ ID NO: 8884 - DNA, 33 bp, Homo sapien
tgagaactgttctaaagttagattcggtgataa

SEQ ID NO: 8885 - DNA, 33 bp, Homo sapien
tactgtgacagtagccacctctttgttttttgt

SEQ ID NO: 8886 - DNA, 33 bp, Homo sapien
tactgtgacagtagccgcctctttgttttttgt

SEQ ID NO: 8887 - DNA, 33 bp, Homo sapien
ctccagcagctcagaaaccctggagagcacgag

SEQ ID NO: 8888 - DNA, 33 bp, Homo sapien
ctccagcagctcagaagccctggagagcacgag

SEQ ID NO: 8889 - DNA, 33 bp, Homo sapien
ggcatatagtataagcactgagtgaaatctgtg

SEQ ID NO: 8890 - DNA, 33 bp, Homo sapien
ggcatatagtataagcgctgagtgaaatctgtg

SEQ ID NO: 8891 - DNA, 33 bp, Homo sapien
gtacttctaggtatcacgtctctgttccaggaa

SEQ ID NO: 8892 - DNA, 33 bp, Homo sapien
gtacttctaggtatcatgtctctgttccaggaa

SEQ ID NO: 8893 - DNA, 33 bp, Homo sapien
acctagatcctgaatcgaaccatgaccctccac

SEQ ID NO: 8894 - DNA, 33 bp, Homo sapien
acctagatcctgaatctaaccatgaccctccac

SEQ ID NO: 8895 - DNA, 33 bp, Homo sapien
ccttcaaagagcctccactgcttagaataaaaa

SEQ ID NO: 8896 - DNA, 33 bp, Homo sapien
ccttcaaagagcctccgctgcttagaataaaaa

SEQ ID NO: 8897 - DNA, 33 bp, Homo sapien
tctgtgacaatgttccaagctcctcacagctgc

SEQ ID NO: 8898 - DNA, 33 bp, Homo sapien
tctgtgacaatgttccgagctcctcacagctgc

SEQ ID NO: 8899 - DNA, 33 bp, Homo sapien
gcatagtggtgagggacagagaggttagtcaag

SEQ ID NO: 8900 - DNA, 33 bp, Homo sapien
gcatagtggtgagggagagagaggttagtcaag

SEQ ID NO: 8901 - DNA, 33 bp, Homo sapien
gttaggtttttcttctcaaaggcaatgtggttg

SEQ ID NO: 8902 - DNA, 33 bp, Homo sapien
gttaggtttttcttcttaaaggcaatgtggttg

SEQ ID NO: 8903 - DNA, 33 bp, Homo sapien
gtacaggtttgagcaaatctactgccttttctg

SEQ ID NO: 8904 - DNA, 33 bp, Homo sapien
gtacaggtttgagcaagtctactgccttttctg

SEQ ID NO: 8905 - DNA, 33 bp, Homo sapien
gtagcttatagatcccccaggctctgaccagcc

SEQ ID NO: 8906 - DNA, 33 bp, Homo sapien
gtagcttatagatccctcaggctctgaccagcc

SEQ ID NO: 8907 - DNA, 33 bp, Homo sapien
aaaagaagagctcagaaaacgtcttacaggctc

SEQ ID NO: 8908 - DNA, 33 bp, Homo sapien
aaaagaagagctcagagaacgtcttacaggctc

SEQ ID NO: 8909 - DNA, 33 bp, Homo sapien
acatcagagaaagtaaacattgagtatgtcttt

SEQ ID NO: 8910 - DNA, 33 bp, Homo sapien
acatcagagaaagtaagcattgagtatgtcttt

SEQ ID NO: 8911 - DNA, 33 bp, Homo sapien
tgttcaggacattgtaactggattggagaataa

SEQ ID NO: 8912 - DNA, 33 bp, Homo sapien
tgttcaggacattgtacctggattggagaataa

SEQ ID NO: 8913 - DNA, 33 bp, Homo sapien
tttcacttacttctcacggtaaccccaccagct

SEQ ID NO: 8914 - DNA, 33 bp, Homo sapien
tttcacttacttctcatggtaaccccaccagct

SEQ ID NO: 8915 - DNA, 33 bp, Homo sapien
tatcccatcatagccaagtgcagagggcagctg

SEQ ID NO: 8916 - DNA, 33 bp, Homo sapien
tatcccatcatagccaggtgcagagggcagctg

SEQ ID NO: 8917 - DNA, 33 bp, Homo sapien
ccacaaggtcaagacacggagttggaatccatc

SEQ ID NO: 8918 - DNA, 33 bp, Homo sapien
ccacaaggtcaagacagggagttggaatccatc

SEQ ID NO: 8919 - DNA, 33 bp, Homo sapien
actgggtaaatttgagcaaatggtattctcttt

SEQ ID NO: 8920 - DNA, 33 bp, Homo sapien
actgggtaaatttgagtaaatggtattctcttt

SEQ ID NO: 8921 - DNA, 33 bp, Homo sapien
gggtgcaaatccaggaacacttcagtgaagggc

SEQ ID NO: 8922 - DNA, 33 bp, Homo sapien
gggtgcaaatccaggaccacttcagtgaagggc

SEQ ID NO: 8923 - DNA, 33 bp, Homo sapien
ctccactaagattaaaagcaaacattgtgttgt

SEQ ID NO: 8924 - DNA, 33 bp, Homo sapien
ctccactaagattaaaggcaaacattgtgttgt

SEQ ID NO: 8925 - DNA, 33 bp, Homo sapien
gaccagtttataaggcagagattctagaggatg

SEQ ID NO: 8926 - DNA, 33 bp, Homo sapien
gaccagtttataaggcggagattctagaggatg

SEQ ID NO: 8927 - DNA, 33 bp, Homo sapien
agctagccgatcaccaaatcttttcctcttctt

SEQ ID NO: 8928 - DNA, 33 bp, Homo sapien
agctagccgatcaccagatcttttcctcttctt

SEQ ID NO: 8929 - DNA, 33 bp, Homo sapien
agagggtagagccataagagattataaaaggag

SEQ ID NO: 8930 - DNA, 33 bp, Homo sapien
agagggtagagccatatgagattataaaaggag

SEQ ID NO: 8931 - DNA, 33 bp, Homo sapien
gacagccctgtggttaggtagttagagtcagaa

SEQ ID NO: 8932 - DNA, 33 bp, Homo sapien
gacagccctgtggttatgtagttagagtcagaa

SEQ ID NO: 8933 - DNA, 33 bp, Homo sapien
gcagtgagccgaggccaagatagtcccattgta

SEQ ID NO: 8934 - DNA, 33 bp, Homo sapien
gcagtgagccgaggccgagatagtcccattgta

SEQ ID NO: 8935 - DNA, 33 bp, Homo sapien
aaatcctaagaggaaaaaaagcagaggtaggga

SEQ ID NO: 8936 - DNA, 33 bp, Homo sapien
aaatcctaagaggaaacaaagcagaggtaggga

SEQ ID NO: 8937 - DNA, 33 bp, Homo sapien
atgtggaccagaacacagtatatactcagtaag

SEQ ID NO: 8938 - DNA, 33 bp, Homo sapien
atgtggaccagaacacggtatatactcagtaag

SEQ ID NO: 8939 - DNA, 33 bp, Homo sapien
cataaacaacttcatagaacatcaacagcagac

SEQ ID NO: 8940 - DNA, 33 bp, Homo sapien
cataaacaacttcatataacatcaacagcagac

SEQ ID NO: 8941 - DNA, 33 bp, Homo sapien
aacttccagtttctcaaagaagttcagactgaa

SEQ ID NO: 8942 - DNA, 33 bp, Homo sapien
aacttccagtttctcagagaagttcagactgaa

SEQ ID NO: 8943 - DNA, 33 bp, Homo sapien
tagaggaaggtctaccaaaatgaggcagaaatc

SEQ ID NO: 8944 - DNA, 33 bp, Homo sapien
tagaggaaggtctaccgaaatgaggcagaaatc

SEQ ID NO: 8945 - DNA, 33 bp, Homo sapien
gcctaatcctcagcaaatgttctaccactcgca

SEQ ID NO: 8946 - DNA, 33 bp, Homo sapien
gcctaatcctcagcaactgttctaccactcgca

SEQ ID NO: 8947 - DNA, 33 bp, Homo sapien
agtcatcatctgagtccacctttttggttgtac

SEQ ID NO: 8948 - DNA, 33 bp, Homo sapien
agtcatcatctgagtctacctttttggttgtac

SEQ ID NO: 8949 - DNA, 33 bp, Homo sapien
ggcttagcgcctaggacatacagaatattcagt

SEQ ID NO: 8950 - DNA, 33 bp, Homo sapien
ggcttagcgcctaggagatacagaatattcagt

SEQ ID NO: 8951 - DNA, 33 bp, Homo sapien
ctgattttatgatgataagataagaggatgttt

SEQ ID NO: 8952 - DNA, 33 bp, Homo sapien
ctgattttatgatgatcagataagaggatgttt

SEQ ID NO: 8953 - DNA, 33 bp, Homo sapien
cacgcaggagcaggagaaaaagcttagcttcat

SEQ ID NO: 8954 - DNA, 33 bp, Homo sapien
cacgcaggagcaggaggaaaagcttagcttcat

SEQ ID NO: 8955 - DNA, 33 bp, Homo sapien
gggcagggaataaagaccctacagaacgtgacc

SEQ ID NO: 8956 - DNA, 33 bp, Homo sapien
gggcagggaataaagagcctacagaacgtgacc

SEQ ID NO: 8957 - DNA, 33 bp, Homo sapien
cacagctatttagtacgccagtgatatttggag

SEQ ID NO: 8958 - DNA, 33 bp, Homo sapien
cacagctatttagtactccagtgatatttggag

SEQ ID NO: 8959 - DNA, 33 bp, Homo sapien
acccagcagcttgggcaaatcctgggaactggc

SEQ ID NO: 8960 - DNA, 33 bp, Homo sapien
acccagcagcttgggcgaatcctgggaactggc

SEQ ID NO: 8961 - DNA, 33 bp, Homo sapien
ctgcacacaataggtaaccaataaatggttgat

SEQ ID NO: 8962 - DNA, 33 bp, Homo sapien
ctgcacacaataggtacccaataaatggttgat

SEQ ID NO: 8963 - DNA, 33 bp, Homo sapien
acaggagatgatcctgaatggtccttccacatc

SEQ ID NO: 8964 - DNA, 33 bp, Homo sapien
acaggagatgatcctggatggtccttccacatc

SEQ ID NO: 8965 - DNA, 33 bp, Homo sapien
aatccttactataagaacctaagagtgcagagc

SEQ ID NO: 8966 - DNA, 33 bp, Homo sapien
aatccttactataagaccctaagagtgcagagc

SEQ ID NO: 8967 - DNA, 33 bp, Homo sapien
ttttcattcttccacccgagctaacaaattata

SEQ ID NO: 8968 - DNA, 33 bp, Homo sapien
ttttcattcttccacctgagctaacaaattata

SEQ ID NO: 8969 - DNA, 33 bp, Homo sapien
agaatcagaggaagcccaagctttaacacttca

SEQ ID NO: 8970 - DNA, 33 bp, Homo sapien
agaatcagaggaagccgaagctttaacacttca

SEQ ID NO: 8971 - DNA, 33 bp, Homo sapien
gcccacaaaggtcttgcaccaggtataacatta

SEQ ID NO: 8972 - DNA, 33 bp, Homo sapien
gcccacaaaggtcttgtaccaggtataacatta

SEQ ID NO: 8973 - DNA, 33 bp, Homo sapien
gtagttagaagtagataagtgtctgccaagaat

SEQ ID NO: 8974 - DNA, 33 bp, Homo sapien
gtagttagaagtagatcagtgtctgccaagaat

SEQ ID NO: 8975 - DNA, 33 bp, Homo sapien
aggcagaatgcaaatacgttggctctttcactg

SEQ ID NO: 8976 - DNA, 33 bp, Homo sapien
aggcagaatgcaaatatgttggctctttcactg

SEQ ID NO: 8977 - DNA, 33 bp, Homo sapien
accagctgttgcagaaatagctgttcctgtagt

SEQ ID NO: 8978 - DNA, 33 bp, Homo sapien
accagctgttgcagaattagctgttcctgtagt

SEQ ID NO: 8979 - DNA, 33 bp, Homo sapien
aactcttggggagttacgtaaaacaaggaactg

SEQ ID NO: 8980 - DNA, 33 bp, Homo sapien
aactcttggggagttatgtaaaacaaggaactg

SEQ ID NO: 8981 - DNA, 33 bp, Homo sapien
gttatagattgaaaaactgcatcctctcattta

SEQ ID NO: 8982 - DNA, 33 bp, Homo sapien
gttatagattgaaaaattgcatcctctcattta

SEQ ID NO: 8983 - DNA, 33 bp, Homo sapien
ttcctgataccacttcgcccacgggctcttcct

SEQ ID NO: 8984 - DNA, 33 bp, Homo sapien
ttcctgataccacttctcccacgggctcttcct

SEQ ID NO: 8985 - DNA, 33 bp, Homo sapien
cccatttcactcgagagaaagacaaatccttag

SEQ ID NO: 8986 - DNA, 33 bp, Homo sapien
cccatttcactcgagataaagacaaatccttag

SEQ ID NO: 8987 - DNA, 33 bp, Homo sapien
tgcagggatctttgaccggagtgtccctaggaa

SEQ ID NO: 8988 - DNA, 33 bp, Homo sapien
tgcagggatctttgactggagtgtccctaggaa

SEQ ID NO: 8989 - DNA, 33 bp, Homo sapien
gataaaatcagttccacactcaactgctatgtg

SEQ ID NO: 8990 - DNA, 33 bp, Homo sapien
gataaaatcagttccatactcaactgctatgtg

SEQ ID NO: 8991 - DNA, 33 bp, Homo sapien
gcttaaccactcagagccaattactcaccaatt

SEQ ID NO: 8992 - DNA, 33 bp, Homo sapien
gcttaaccactcagagtcaattactcaccaatt

SEQ ID NO: 8993 - DNA, 33 bp, Homo sapien
agttggtacggagagcaatggtgatggcattga

SEQ ID NO: 8994 - DNA, 33 bp, Homo sapien
agttggtacggagagcgatggtgatggcattga

SEQ ID NO: 8995 - DNA, 33 bp, Homo sapien
acacacaaatgtcatgcaaatgaacgctgctga

SEQ ID NO: 8996 - DNA, 33 bp, Homo sapien
acacacaaatgtcatgtaaatgaacgctgctga

SEQ ID NO: 8997 - DNA, 33 bp, Homo sapien
ggtcccactttctggaataaactggaaagaaat

SEQ ID NO: 8998 - DNA, 33 bp, Homo sapien
ggtcccactttctggagtaaactggaaagaaat

SEQ ID NO: 8999 - DNA, 33 bp, Homo sapien
ggtgcttagtagagagcagctattgagacagga

SEQ ID NO: 9000 - DNA, 33 bp, Homo sapien
ggtgcttagtagagagtagctattgagacagga

SEQ ID NO: 9001 - DNA, 33 bp, Homo sapien
ccaatgaaggcaccgacggtgatgaagatggta

SEQ ID NO: 9002 - DNA, 33 bp, Homo sapien
ccaatgaaggcaccgatggtgatgaagatggta

SEQ ID NO: 9003 - DNA, 33 bp, Homo sapien
cgaccagccacaggaacccgttgcgaggggaga

SEQ ID NO: 9004 - DNA, 33 bp, Homo sapien
cgaccagccacaggaatccgttgcgaggggaga

SEQ ID NO: 9005 - DNA, 33 bp, Homo sapien
ctctgcgcctcgacgtcaacttagaggagcccg

SEQ ID NO: 9006 - DNA, 33 bp, Homo sapien
ctctgcgcctcgacgtgaacttagaggagcccg

SEQ ID NO: 9007 - DNA, 33 bp, Homo sapien
gacagaatctgtgctcaagggtataaaagcaca

SEQ ID NO: 9008 - DNA, 33 bp, Homo sapien
gacagaatctgtgctcgagggtataaaagcaca

SEQ ID NO: 9009 - DNA, 33 bp, Homo sapien
ggttctgttctcctttcaaacaattttcctgtc

SEQ ID NO: 9010 - DNA, 33 bp, Homo sapien
ggttctgttctcctttgaaacaattttcctgtc

SEQ ID NO: 9011 - DNA, 33 bp, Homo sapien
caatacagattccatacggtcctagaacccttc

SEQ ID NO: 9012 - DNA, 33 bp, Homo sapien
caatacagattccatatggtcctagaacccttc

SEQ ID NO: 9013 - DNA, 33 bp, Homo sapien
cttttttctctcttcaatagtatctcattcaga

SEQ ID NO: 9014 - DNA, 33 bp, Homo sapien
cttttttctctcttcagtagtatctcattcaga

SEQ ID NO: 9015 - DNA, 33 bp, Homo sapien
gaaaagtattaccacccctattttacagagggg

SEQ ID NO: 9016 - DNA, 33 bp, Homo sapien
gaaaagtattaccacctctattttacagagggg

SEQ ID NO: 9017 - DNA, 33 bp, Homo sapien
aaggtgttttaccttgaaagattctcgagggac

SEQ ID NO: 9018 - DNA, 33 bp, Homo sapien
aaggtgttttaccttggaagattctcgagggac

SEQ ID NO: 9019 - DNA, 33 bp, Homo sapien
gacccactggaggaaaacattggttagagtcag

SEQ ID NO: 9020 - DNA, 33 bp, Homo sapien
gacccactggaggaaaccattggttagagtcag

SEQ ID NO: 9021 - DNA, 33 bp, Homo sapien
ctgttttcttggcacacacagtctggggcaaag

SEQ ID NO: 9022 - DNA, 33 bp, Homo sapien
ctgttttcttggcacatacagtctggggcaaag

SEQ ID NO: 9023 - DNA, 33 bp, Homo sapien
tatatagtccaagccaacggtgatattgtctga

SEQ ID NO: 9024 - DNA, 33 bp, Homo sapien
tatatagtccaagccagcggtgatattgtctga

SEQ ID NO: 9025 - DNA, 33 bp, Homo sapien
ggcaggttttccatcccgagctttctcagtgcc

SEQ ID NO: 9026 - DNA, 33 bp, Homo sapien
ggcaggttttccatcctgagctttctcagtgcc

SEQ ID NO: 9027 - DNA, 33 bp, Homo sapien
gccacacctggtcctcaaactgggcaggtcagt

SEQ ID NO: 9028 - DNA, 33 bp, Homo sapien
gccacacctggtcctcgaactgggcaggtcagt

SEQ ID NO: 9029 - DNA, 33 bp, Homo sapien
tgtgcttgactcacaacattcttcttcacacct

SEQ ID NO: 9030 - DNA, 33 bp, Homo sapien
tgtgcttgactcacaatattcttcttcacacct

SEQ ID NO: 9031 - DNA, 33 bp, Homo sapien
atgaaaaattcaaggcagatcacactgtgacgt

SEQ ID NO: 9032 - DNA, 33 bp, Homo sapien
atgaaaaattcaaggcggatcacactgtgacgt

SEQ ID NO: 9033 - DNA, 33 bp, Homo sapien
acagaagacacaaacacatggatacatgcagcc

SEQ ID NO: 9034 - DNA, 33 bp, Homo sapien
acagaagacacaaacagatggatacatgcagcc

SEQ ID NO: 9035 - DNA, 33 bp, Homo sapien
ggctggcagcgtccaagaatcagtggccctgca

SEQ ID NO: 9036 - DNA, 33 bp, Homo sapien
ggctggcagcgtccaataatcagtggccctgca

SEQ ID NO: 9037 - DNA, 33 bp, Homo sapien
gcctgctgaagtgctagaatttatttactttat

SEQ ID NO: 9038 - DNA, 33 bp, Homo sapien
gcctgctgaagtgctataatttatttactttat

SEQ ID NO: 9039 - DNA, 33 bp, Homo sapien
gtgcatccagatacagaagtggtgcggggatgg

SEQ ID NO: 9040 - DNA, 33 bp, Homo sapien
gtgcatccagatacaggagtggtgcggggatgg

SEQ ID NO: 9041 - DNA, 33 bp, Homo sapien
gtgtatgcttgttcaccactgtatccctgatgc

SEQ ID NO: 9042 - DNA, 33 bp, Homo sapien
gtgtatgcttgttcactactgtatccctgatgc

SEQ ID NO: 9043 - DNA, 33 bp, Homo sapien
ggagcacagaaaaacaccataccatgagaggca

SEQ ID NO: 9044 - DNA, 33 bp, Homo sapien
ggagcacagaaaaacagcataccatgagaggca

SEQ ID NO: 9045 - DNA, 33 bp, Homo sapien
tttccttacctgtgaccggatgaataatgccca

SEQ ID NO: 9046 - DNA, 33 bp, Homo sapien
tttccttacctgtgactggatgaataatgccca

SEQ ID NO: 9047 - DNA, 33 bp, Homo sapien
ctgcagaggaataagaaagatgagggtcagagg

SEQ ID NO: 9048 - DNA, 33 bp, Homo sapien
ctgcagaggaataagagagatgagggtcagagg

SEQ ID NO: 9049 - DNA, 33 bp, Homo sapien
gggaaactcgacacccactcctttggcttccag

SEQ ID NO: 9050 - DNA, 33 bp, Homo sapien
gggaaactcgacacccgctcctttggcttccag

SEQ ID NO: 9051 - DNA, 33 bp, Homo sapien
tgtatcaatgtaccacaattttggatgttaatg

SEQ ID NO: 9052 - DNA, 33 bp, Homo sapien
tgtatcaatgtaccacgattttggatgttaatg

SEQ ID NO: 9053 - DNA, 33 bp, Homo sapien
aatgtaaatctagtcacgcatccagtggctgcc

SEQ ID NO: 9054 - DNA, 33 bp, Homo sapien
aatgtaaatctagtcatgcatccagtggctgcc

SEQ ID NO: 9055 - DNA, 33 bp, Homo sapien
gtgagggaggttggaactaagtatttggccatt

SEQ ID NO: 9056 - DNA, 33 bp, Homo sapien
gtgagggaggttggaattaagtatttggccatt

SEQ ID NO: 9057 - DNA, 33 bp, Homo sapien
ttttttctaacagagaagttgtgcaaggtgttc

SEQ ID NO: 9058 - DNA, 33 bp, Homo sapien
ttttttctaacagagaggttgtgcaaggtgttc

SEQ ID NO: 9059 - DNA, 33 bp, Homo sapien
tccgcacttcccaacccactctggtgatcatgg

SEQ ID NO: 9060 - DNA, 33 bp, Homo sapien
tccgcacttcccaacctactctggtgatcatgg

SEQ ID NO: 9061 - DNA, 33 bp, Homo sapien
gaggaagcctcttggccgagggtaaaaagaagt

SEQ ID NO: 9062 - DNA, 33 bp, Homo sapien
gaggaagcctcttggctgagggtaaaaagaagt

SEQ ID NO: 9063 - DNA, 33 bp, Homo sapien
ctgtaaacgtcgcaaaagcagtgagcaccaaga

SEQ ID NO: 9064 - DNA, 33 bp, Homo sapien
ctgtaaacgtcgcaaacgcagtgagcaccaaga

SEQ ID NO: 9065 - DNA, 33 bp, Homo sapien
gtggcattgggttagaacttgtatacgattttg

SEQ ID NO: 9066 - DNA, 33 bp, Homo sapien
gtggcattgggttagaccttgtatacgattttg

SEQ ID NO: 9067 - DNA, 33 bp, Homo sapien
actctgattgaaaggaatatacaaggaggccag

SEQ ID NO: 9068 - DNA, 33 bp, Homo sapien
actctgattgaaaggagtatacaaggaggccag

SEQ ID NO: 9069 - DNA, 33 bp, Homo sapien
taaaatcaataaatgaaggaacagacatgcatg

SEQ ID NO: 9070 - DNA, 33 bp, Homo sapien
taaaatcaataaatgatggaacagacatgcatg

SEQ ID NO: 9071 - DNA, 33 bp, Homo sapien
tttcccaattgctctacatcctaaggtgaagcc

SEQ ID NO: 9072 - DNA, 33 bp, Homo sapien
tttcccaattgctctagatcctaaggtgaagcc

SEQ ID NO: 9073 - DNA, 33 bp, Homo sapien
gacaagctgggcaagcaaatgaagctggaattg

SEQ ID NO: 9074 - DNA, 33 bp, Homo sapien
gacaagctgggcaagcgaatgaagctggaattg

SEQ ID NO: 9075 - DNA, 33 bp, Homo sapien
tccatgtttactgctaaaaaccaaagctttgtg

SEQ ID NO: 9076 - DNA, 33 bp, Homo sapien
tccatgtttactgctagaaaccaaagctttgtg

SEQ ID NO: 9077 - DNA, 33 bp, Homo sapien; identical to SEQ ID NO: 9075

SEQ ID NO: 9078 - DNA, 33 bp, Homo sapien; identical to SEQ ID NO: 9076

SEQ ID NO: 9079 - DNA, 33 bp, Homo sapien; identical to SEQ ID NO: 9075

SEQ ID NO: 9080 - DNA, 33 bp, Homo sapien; identical to SEQ ID NO: 9076

SEQ ID NO: 9081 - DNA, 33 bp, Homo sapien
aaagacttattggtacgcaaactgtcatcccct

SEQ ID NO: 9082 - DNA, 33 bp, Homo sapien
aaagacttattggtactcaaactgtcatcccct

SEQ ID NO: 9083 - DNA, 33 bp, Homo sapien
atttaagtcatatggaccctgaaacattgcaaa

SEQ ID NO: 9084 - DNA, 33 bp, Homo sapien
atttaagtcatatggatcctgaaacattgcaaa

SEQ ID NO: 9085 - DNA, 33 bp, Homo sapien
tgctctgtctctaggccctgcccaatgtgtccc

SEQ ID NO: 9086 - DNA, 33 bp, Homo sapien
tgctctgtctctaggcgctgcccaatgtgtccc

SEQ ID NO: 9087 - DNA, 33 bp, Homo sapien
tttacttagagcccaaacatctggtgacttttc

SEQ ID NO: 9088 - DNA, 33 bp, Homo sapien
tttacttagagcccaagcatctggtgacttttc

SEQ ID NO: 9089 - DNA, 33 bp, Homo sapien
aagtatttgttgttcacgtcattgaataaaagt

SEQ ID NO: 9090 - DNA, 33 bp, Homo sapien
aagtatttgttgttcatgtcattgaataaaagt

SEQ ID NO: 9091 - DNA, 33 bp, Homo sapien
tcacctggttctcgcacataaattggtgagatt

SEQ ID NO: 9092 - DNA, 33 bp, Homo sapien
tcacctggttctcgcagataaattggtgagatt

SEQ ID NO: 9093 - DNA, 33 bp, Homo sapien
cactgctccatcactgccacccactgtgtgcac

SEQ ID NO: 9094 - DNA, 33 bp, Homo sapien
cactgctccatcactgtcacccactgtgtgcac

SEQ ID NO: 9095 - DNA, 33 bp, Homo sapien
ctatcagcataaagtcactccccagcctctccc

SEQ ID NO: 9096 - DNA, 33 bp, Homo sapien
ctatcagcataaagtctctccccagcctctccc

SEQ ID NO: 9097 - DNA, 33 bp, Homo sapien
agctctttctcttcctgaagtggcattcgagac

SEQ ID NO: 9098 - DNA, 33 bp, Homo sapien
agctctttctcttccttaagtggcattcgagac

SEQ ID NO: 9099 - DNA, 33 bp, Homo sapien
tattgacttcattttacgccctcctgtgaacaa

SEQ ID NO: 9100 - DNA, 33 bp, Homo sapien
tattgacttcattttaggccctcctgtgaacaa

SEQ ID NO: 9101 - DNA, 33 bp, Homo sapien
tttctctccgtagcataacgagatgagcacgtc

SEQ ID NO: 9102 - DNA, 33 bp, Homo sapien
tttctctccgtagcatgacgagatgagcacgtc

SEQ ID NO: 9103 - DNA, 33 bp, Homo sapien
gaggagactctccagacacgggctgagataaac

SEQ ID NO: 9104 - DNA, 33 bp, Homo sapien
gaggagactctccagatacgggctgagataaac

SEQ ID NO: 9105 - DNA, 33 bp, Homo sapien
aataaaagcagaagtaagaagagtaacggggcc

SEQ ID NO: 9106 - DNA, 33 bp, Homo sapien
aataaaagcagaagtaggaagagtaacggggcc

SEQ ID NO: 9107 - DNA, 33 bp, Homo sapien
attctttgtaaactggaagttcacttgtgcagg

SEQ ID NO: 9108 - DNA, 33 bp, Homo sapien
attctttgtaaactgggagttcacttgtgcagg

SEQ ID NO: 9109 - DNA, 33 bp, Homo sapien
ggcacagataggcggacgctcttggccaggggt

SEQ ID NO: 9110 - DNA, 33 bp, Homo sapien
ggcacagataggcggatgctcttggccaggggt

SEQ ID NO: 9111 - DNA, 33 bp, Homo sapien
attctctacagagcaaacggagtgatcttttat

SEQ ID NO: 9112 - DNA, 33 bp, Homo sapien
attctctacagagcaatcggagtgatcttttat

SEQ ID NO: 9113 - DNA, 33 bp, Homo sapien
ataaatttggaagtcactagcttggagaaagtt

SEQ ID NO: 9114 - DNA, 33 bp, Homo sapien
ataaatttggaagtcattagcttggagaaagtt

SEQ ID NO: 9115 - DNA, 33 bp, Homo sapien
cagaagacacaaatgaagtcaaatctcaacagc

SEQ ID NO: 9116 - DNA, 33 bp, Homo sapien
cagaagacacaaatgaggtcaaatctcaacagc

SEQ ID NO: 9117 - DNA, 33 bp, Homo sapien
cattttaactttcaaaaggctttctctgcactg

SEQ ID NO: 9118 - DNA, 33 bp, Homo sapien
cattttaactttcaaagggctttctctgcactg

SEQ ID NO: 9119 - DNA, 33 bp, Homo sapien
ctttctggcttgaacactgacttctgaaacttc

SEQ ID NO: 9120 - DNA, 33 bp, Homo sapien
ctttctggcttgaacattgacttctgaaacttc

SEQ ID NO: 9121 - DNA, 33 bp, Homo sapien
gcacttatctgcaaatcagtttaacatggaaga

SEQ ID NO: 9122 - DNA, 33 bp, Homo sapien
gcacttatctgcaaattagtttaacatggaaga

SEQ ID NO: 9123 - DNA, 33 bp, Homo sapien
gctattaagtgttttacagtagaggaagtagag

SEQ ID NO: 9124 - DNA, 33 bp, Homo sapien
gctattaagtgttttatagtagaggaagtagag

SEQ ID NO: 9125 - DNA, 33 bp, Homo sapien
ccttttggccacctgacggggaagacacaggag

SEQ ID NO: 9126 - DNA, 33 bp, Homo sapien
ccttttggccacctgatggggaagacacaggag

SEQ ID NO: 9127 - DNA, 33 bp, Homo sapien
ggcacacccagactggcaaagaaagtccttgtg

SEQ ID NO: 9128 - DNA, 33 bp, Homo sapien
ggcacacccagactggtaaagaaagtccttgtg

SEQ ID NO: 9129 - DNA, 33 bp, Homo sapien
tatgcttatttataataactggattggccaatc

SEQ ID NO: 9130 - DNA, 33 bp, Homo sapien
tatgcttatttataattactggattggccaatc

SEQ ID NO: 9131 - DNA, 33 bp, Homo sapien
cgatgcaggcttctgacacctccacatgcttca

SEQ ID NO: 9132 - DNA, 33 bp, Homo sapien
cgatgcaggcttctgagacctccacatgcttca

SEQ ID NO: 9133 - DNA, 33 bp, Homo sapien
cctgagtcctcatttgaaaaacagggaaaataa

SEQ ID NO: 9134 - DNA, 33 bp, Homo sapien
cctgagtcctcatttggaaaacagggaaaataa

SEQ ID NO: 9135 - DNA, 33 bp, Homo sapien
gacatgctttccctcaatctcggtcttgcactg

SEQ ID NO: 9136 - DNA, 33 bp, Homo sapien
gacatgctttccctcagtctcggtcttgcactg

SEQ ID NO: 9137 - DNA, 33 bp, Homo sapien
gacaccatggctgttgcactaccagatggctcc

SEQ ID NO: 9138 - DNA, 33 bp, Homo sapien
gacaccatggctgttgtactaccagatggctcc

SEQ ID NO: 9139 - DNA, 33 bp, Homo sapien
tggccagtccagtgtgacaagccttctgctgca

SEQ ID NO: 9140 - DNA, 33 bp, Homo sapien
tggccagtccagtgtggcaagccttctgctgca

SEQ ID NO: 9141 - DNA, 33 bp, Homo sapien
cactctgtcatagacaaattacctaagagtagg

SEQ ID NO: 9142 - DNA, 33 bp, Homo sapien
cactctgtcatagacacattacctaagagtagg

SEQ ID NO: 9143 - DNA, 33 bp, Homo sapien
agttggcctactgttacacattaaaacgatttg

SEQ ID NO: 9144 - DNA, 33 bp, Homo sapien
agttggcctactgttatacattaaaacgatttg

SEQ ID NO: 9145 - DNA, 33 bp, Homo sapien
catggagattttgtaccatgtcctgttcttagt

SEQ ID NO: 9146 - DNA, 33 bp, Homo sapien
catggagattttgtactatgtcctgttcttagt

SEQ ID NO: 9147 - DNA, 33 bp, Homo sapien
ccaaggagggttgtgcaaactggtgacaacatg

SEQ ID NO: 9148 - DNA, 33 bp, Homo sapien
ccaaggagggttgtgcgaactggtgacaacatg

SEQ ID NO: 9149 - DNA, 33 bp, Homo sapien
agcccagctgtgggacacgctcacctttccatg

SEQ ID NO: 9150 - DNA, 33 bp, Homo sapien
agcccagctgtgggacgcgctcacctttccatg

SEQ ID NO: 9151 - DNA, 33 bp, Homo sapien
ccacaacaatatcccaaagttattccatcagga

SEQ ID NO: 9152 - DNA, 33 bp, Homo sapien
ccacaacaatatcccagagttattccatcagga

SEQ ID NO: 9153 - DNA, 33 bp, Homo sapien
tcctcatccttcttcaaacacagagcccctcat

SEQ ID NO: 9154 - DNA, 33 bp, Homo sapien
tcctcatccttcttcagacacagagcccctcat

SEQ ID NO: 9155 - DNA, 33 bp, Homo sapien
tgcacagggactaatacaggattaggggcaatt

SEQ ID NO: 9156 - DNA, 33 bp, Homo sapien
tgcacagggactaatataggattaggggcaatt

SEQ ID NO: 9157 - DNA, 33 bp, Homo sapien
atacaatgggtcgcagaaacactcacaggacag

SEQ ID NO: 9158 - DNA, 33 bp, Homo sapien
atacaatgggtcgcagtaacactcacaggacag

SEQ ID NO: 9159 - DNA, 33 bp, Homo sapien
tcacagagaaggaaacagtcacttttcctgcac

SEQ ID NO: 9160 - DNA, 33 bp, Homo sapien
tcacagagaaggaaacggtcacttttcctgcac

SEQ ID NO: 9161 - DNA, 33 bp, Homo sapien
ttcagtgacttcccaccgcccttttggtcttcc

SEQ ID NO: 9162 - DNA, 33 bp, Homo sapien
ttcagtgacttcccactgcccttttggtcttcc

SEQ ID NO: 9163 - DNA, 33 bp, Homo sapien
catggctgtcagggaacaagttctgggcccagt

SEQ ID NO: 9164 - DNA, 33 bp, Homo sapien
catggctgtcagggaataagttctgggcccagt

SEQ ID NO: 9165 - DNA, 33 bp, Homo sapien
gaggtgggagagagaacttcgtacctgggaaga

SEQ ID NO: 9166 - DNA, 33 bp, Homo sapien
gaggtgggagagagaatttcgtacctgggaaga

SEQ ID NO: 9167 - DNA, 33 bp, Homo sapien
cttgttctctgctagcaaccctgcctgctatct

SEQ ID NO: 9168 - DNA, 33 bp, Homo sapien
cttgttctctgctagcgaccctgcctgctatct

SEQ ID NO: 9169 - DNA, 33 bp, Homo sapien
ggctatgccaagactcaaacagacaataaatag

SEQ ID NO: 9170 - DNA, 33 bp, Homo sapien
ggctatgccaagactcgaacagacaataaatag

SEQ ID NO: 9171 - DNA, 33 bp, Homo sapien
ggtgcctctaatttgacagatccaggagctggg

SEQ ID NO: 9172 - DNA, 33 bp, Homo sapien
ggtgcctctaatttgatagatccaggagctggg

SEQ ID NO: 9173 - DNA, 33 bp, Homo sapien
aggatgaaaaggccaccgtatgtcaagcatagt

SEQ ID NO: 9174 - DNA, 33 bp, Homo sapien
aggatgaaaaggccactgtatgtcaagcatagt

SEQ ID NO: 9175 - DNA, 33 bp, Homo sapien
tagctatctgggggaaacagtaagctcaaaggc

SEQ ID NO: 9176 - DNA, 33 bp, Homo sapien
tagctatctgggggaagcagtaagctcaaaggc

SEQ ID NO: 9177 - DNA, 33 bp, Homo sapien
tccagcttgaccttcccagacctagctcattta

SEQ ID NO: 9178 - DNA, 33 bp, Homo sapien
tccagcttgaccttcctagacctagctcattta

SEQ ID NO: 9179 - DNA, 33 bp, Homo sapien
ctagaagcaattattgcattaggtagatattta

SEQ ID NO: 9180 - DNA, 33 bp, Homo sapien
ctagaagcaattattgtattaggtagatattta

SEQ ID NO: 9181 - DNA, 33 bp, Homo sapien
ccagaaacaaagaactgacaacctctcaaagta

SEQ ID NO: 9182 - DNA, 33 bp, Homo sapien
ccagaaacaaagaacttacaacctctcaaagta

SEQ ID NO: 9183 - DNA, 33 bp, Homo sapien
cacttaatttgtcaaacaactttctcaagctca

SEQ ID NO: 9184 - DNA, 33 bp, Homo sapien
cacttaatttgtcaaagaactttctcaagctca

SEQ ID NO: 9185 - DNA, 33 bp, Homo sapien
ttacagaccacactccaatggcccagttcattc

SEQ ID NO: 9186 - DNA, 33 bp, Homo sapien
ttacagaccacactccgatggcccagttcattc

SEQ ID NO: 9187 - DNA, 33 bp, Homo sapien
ataatctcttagactagaggttcctgaactttc

SEQ ID NO: 9188 - DNA, 33 bp, Homo sapien
ataatctcttagactataggttcctgaactttc

SEQ ID NO: 9189 - DNA, 33 bp, Homo sapien
ggactgtccagtcttcagaactgtgagaaatac

SEQ ID NO: 9190 - DNA, 33 bp, Homo sapien
ggactgtccagtcttcggaactgtgagaaatac

SEQ ID NO: 9191 - DNA, 33 bp, Homo sapien
gcccctgccagcagaactagaccctctttctgg

SEQ ID NO: 9192 - DNA, 33 bp, Homo sapien
gcccctgccagcagaagtagaccctctttctgg

SEQ ID NO: 9193 - DNA, 33 bp, Homo sapien
ttttcaccagaggatcaataagctacgaaaact

SEQ ID NO: 9194 - DNA, 33 bp, Homo sapien
ttttcaccagaggatcgataagctacgaaaact

SEQ ID NO: 9195 - DNA, 33 bp, Homo sapien
tgggaaatgaatgtgccaccagactcctgaccc

SEQ ID NO: 9196 - DNA, 33 bp, Homo sapien
tgggaaatgaatgtgctaccagactcctgaccc

SEQ ID NO: 9197 - DNA, 33 bp, Homo sapien
ttgccctgacaatgcaaattcatctaccaggaa

SEQ ID NO: 9198 - DNA, 33 bp, Homo sapien
ttgccctgacaatgcacattcatctaccaggaa

SEQ ID NO: 9199 - DNA, 33 bp, Homo sapien
agcagtcaccagtccagaatttctaaacttaca

SEQ ID NO: 9200 - DNA, 33 bp, Homo sapien
agcagtcaccagtccataatttctaaacttaca

SEQ ID NO: 9201 - DNA, 33 bp, Homo sapien
ctgataatctccacaacgaaatcaagctgccaa

SEQ ID NO: 9202 - DNA, 33 bp, Homo sapien
ctgataatctccacaatgaaatcaagctgccaa

SEQ ID NO: 9203 - DNA, 33 bp, Homo sapien
accaattcatcaaacacgaacaattctgtgatg

SEQ ID NO: 9204 - DNA, 33 bp, Homo sapien
accaattcatcaaacatgaacaattctgtgatg

SEQ ID NO: 9205 - DNA, 33 bp, Homo sapien
ctgtgcacattcaggcaacccgaaacacacaaa

SEQ ID NO: 9206 - DNA, 33 bp, Homo sapien
ctgtgcacattcaggcgacccgaaacacacaaa

SEQ ID NO: 9207 - DNA, 33 bp, Homo sapien
aaaagacagaaaatgcccccaaaatgatcaaag

SEQ ID NO: 9208 - DNA, 33 bp, Homo sapien
aaaagacagaaaatgctcccaaaatgatcaaag

SEQ ID NO: 9209 - DNA, 33 bp, Homo sapien
gggactggcttttctacggtcaaaatacctttg

SEQ ID NO: 9210 - DNA, 33 bp, Homo sapien
gggactggcttttctagggtcaaaatacctttg

SEQ ID NO: 9211 - DNA, 33 bp, Homo sapien
ccctgggctatgacaaagagttgtgactccctc

SEQ ID NO: 9212 - DNA, 33 bp, Homo sapien
ccctgggctatgacaaggagttgtgactccctc

SEQ ID NO: 9213 - DNA, 33 bp, Homo sapien
tcatctgtgtgtctgacgttccacaccctgtgt

SEQ ID NO: 9214 - DNA, 33 bp, Homo sapien
tcatctgtgtgtctgatgttccacaccctgtgt

SEQ ID NO: 9215 - DNA, 33 bp, Homo sapien
ttgctgaatgagagcaataagatggagagaagc

SEQ ID NO: 9216 - DNA, 33 bp, Homo sapien
ttgctgaatgagagcagtaagatggagagaagc

SEQ ID NO: 9217 - DNA, 33 bp, Homo sapien
cacacagtaggtgcccagcaaaggttagcatct

SEQ ID NO: 9218 - DNA, 33 bp, Homo sapien
cacacagtaggtgccctgcaaaggttagcatct

SEQ ID NO: 9219 - DNA, 33 bp, Homo sapien
ataaactatttagacgccaactgtgtgctggtc

SEQ ID NO: 9220 - DNA, 33 bp, Homo sapien
ataaactatttagacgtcaactgtgtgctggtc

SEQ ID NO: 9221 - DNA, 33 bp, Homo sapien
ggcttccctgaggagacggcacttcaattgaag

SEQ ID NO: 9222 - DNA, 33 bp, Homo sapien
ggcttccctgaggagatggcacttcaattgaag

SEQ ID NO: 9223 - DNA, 33 bp, Homo sapien
ctataaagtggctgcacggatgagggacattat

SEQ ID NO: 9224 - DNA, 33 bp, Homo sapien
ctataaagtggctgcatggatgagggacattat

SEQ ID NO: 9225 - DNA, 33 bp, Homo sapien
agctttggggcttccaagtaaggaccaggtcaa

SEQ ID NO: 9226 - DNA, 33 bp, Homo sapien
agctttggggcttccaggtaaggaccaggtcaa

SEQ ID NO: 9227 - DNA, 33 bp, Homo sapien
tccttcctgtagcggacaaggcccaccagcgtg

SEQ ID NO: 9228 - DNA, 33 bp, Homo sapien
tccttcctgtagcggagaaggcccaccagcgtg

SEQ ID NO: 9229 - DNA, 33 bp, Homo sapien
aaatggactaagataccatgtcttatcagtctg

SEQ ID NO: 9230 - DNA, 33 bp, Homo sapien
aaatggactaagatacgatgtcttatcagtctg

SEQ ID NO: 9231 - DNA, 33 bp, Homo sapien
cttgggtacaaggccaagaacaaccacagtcat

SEQ ID NO: 9232 - DNA, 33 bp, Homo sapien
cttgggtacaaggccaggaacaaccacagtcat

SEQ ID NO: 9233 - DNA, 33 bp, Homo sapien
atattacaaatgctccagatgaagagatgcata

SEQ ID NO: 9234 - DNA, 33 bp, Homo sapien
atattacaaatgctccggatgaagagatgcata

SEQ ID NO: 9235 - DNA, 33 bp, Homo sapien
tgtggtataaaggaaaaagcataggttcatgaa

SEQ ID NO: 9236 - DNA, 33 bp, Homo sapien
tgtggtataaaggaaagagcataggttcatgaa

SEQ ID NO: 9237 - DNA, 33 bp, Homo sapien
tacaggtgcaatatcaacgatctgtggccttaa

SEQ ID NO: 9238 - DNA, 33 bp, Homo sapien
tacaggtgcaatatcagcgatctgtggccttaa

SEQ ID NO: 9239 - DNA, 33 bp, Homo sapien
gcgtggccacagcacacgttttcctcacagagc

SEQ ID NO: 9240 - DNA, 33 bp, Homo sapien
gcgtggccacagcacaggttttcctcacagagc

SEQ ID NO: 9241 - DNA, 33 bp, Homo sapien
ttggtctaaaaaaggcaagtaagatattaggtt

SEQ ID NO: 9242 - DNA, 33 bp, Homo sapien
ttggtctaaaaaaggcgagtaagatattaggtt

SEQ ID NO: 9243 - DNA, 33 bp, Homo sapien
tttccaaagatggtcactatcaaattcttccct

SEQ ID NO: 9244 - DNA, 33 bp, Homo sapien
tttccaaagatggtcattatcaaattcttccct

SEQ ID NO: 9245 - DNA, 33 bp, Homo sapien
ttctaaaatgtcttgccctatgttctagaaaca

SEQ ID NO: 9246 - DNA, 33 bp, Homo sapien
ttctaaaatgtcttgctctatgttctagaaaca

SEQ ID NO: 9247 - DNA, 33 bp, Homo sapien
atgttatttgcctgctgaaaaactgtcactggc

SEQ ID NO: 9248 - DNA, 33 bp, Homo sapien
atgttatttgcctgcttaaaaactgtcactggc

SEQ ID NO: 9249 - DNA, 33 bp, Homo sapien
attgtactttgagcaaactccatatccatggca

SEQ ID NO: 9250 - DNA, 33 bp, Homo sapien
attgtactttgagcaagctccatatccatggca

SEQ ID NO: 9251 - DNA, 33 bp, Homo sapien
accacctggtgattcccgacgaggcctgacttc

SEQ ID NO: 9252 - DNA, 33 bp, Homo sapien
accacctggtgattcctgacgaggcctgacttc

SEQ ID NO: 9253 - DNA, 33 bp, Homo sapien
gctacacagatgtctacgtttgtaaaacttgat

SEQ ID NO: 9254 - DNA, 33 bp, Homo sapien
gctacacagatgtctatgtttgtaaaacttgat

SEQ ID NO: 9255 - DNA, 33 bp, Homo sapien
agtaaaactcttagaacggaatctggtacatga

SEQ ID NO: 9256 - DNA, 33 bp, Homo sapien
agtaaaactcttagaatggaatctggtacatga

SEQ ID NO: 9257 - DNA, 33 bp, Homo sapien
aaaatacacacgaagacggatagatggatacat

SEQ ID NO: 9258 - DNA, 33 bp, Homo sapien
aaaatacacacgaagatggatagatggatacat

SEQ ID NO: 9259 - DNA, 33 bp, Homo sapien
taaactagaatggggcaagaccataatcagaga

SEQ ID NO: 9260 - DNA, 33 bp, Homo sapien
taaactagaatggggcgagaccataatcagaga

SEQ ID NO: 9261 - DNA, 33 bp, Homo sapien
catttgacaggtaatagaattattcatacaacc

SEQ ID NO: 9262 - DNA, 33 bp, Homo sapien
catttgacaggtaatataattattcatacaacc

SEQ ID NO: 9263 - DNA, 33 bp, Homo sapien
gcatgaactactgttaaaatggcattggccttg

SEQ ID NO: 9264 - DNA, 33 bp, Homo sapien
gcatgaactactgttataatggcattggccttg

SEQ ID NO: 9265 - DNA, 33 bp, Homo sapien
aggccatcagagtacactgacatattgagaaca

SEQ ID NO: 9266 - DNA, 33 bp, Homo sapien
aggccatcagagtacattgacatattgagaaca

SEQ ID NO: 9267 - DNA, 33 bp, Homo sapien
ttcactttacaggaacagttccagaatgattat

SEQ ID NO: 9268 - DNA, 33 bp, Homo sapien
ttcactttacaggaaccgttccagaatgattat

SEQ ID NO: 9269 - DNA, 33 bp, Homo sapien
aaatctttagtgtggcagccaaaaaagtaagac

SEQ ID NO: 9270 - DNA, 33 bp, Homo sapien
aaatctttagtgtggcggccaaaaaagtaagac

SEQ ID NO: 9271 - DNA, 33 bp, Homo sapien
tcaataatggggccttaaacctaaattctagct

SEQ ID NO: 9272 - DNA, 33 bp, Homo sapien
tcaataatggggccttgaacctaaattctagct

SEQ ID NO: 9273 - DNA, 33 bp, Homo sapien
ttgtgaggatttagcacaatgcccagcacccag

SEQ ID NO: 9274 - DNA, 33 bp, Homo sapien
ttgtgaggatttagcagaatgcccagcacccag

SEQ ID NO: 9275 - DNA, 33 bp, Homo sapien
tgacagtgagaggaggccaacagtaaaaggagt

SEQ ID NO: 9276 - DNA, 33 bp, Homo sapien
tgacagtgagaggagggcaacagtaaaaggagt

SEQ ID NO: 9277 - DNA, 33 bp, Homo sapien
gaggtggcctggatgccctacggtctttgctag

SEQ ID NO: 9278 - DNA, 33 bp, Homo sapien
gaggtggcctggatgctctacggtctttgctag

SEQ ID NO: 9279 - DNA, 33 bp, Homo sapien
gtgttcttgaagccaaattcccacattaatcca

SEQ ID NO: 9280 - DNA, 33 bp, Homo sapien
gtgttcttgaagccaagttcccacattaatcca

SEQ ID NO: 9281 - DNA, 33 bp, Homo sapien
tggcacgcagtcagaacttaataaatgataccg

SEQ ID NO: 9282 - DNA, 33 bp, Homo sapien
tggcacgcagtcagaatttaataaatgataccg

SEQ ID NO: 9283 - DNA, 33 bp, Homo sapien
tatgtagggattctcccatgagcaggctggacc

SEQ ID NO: 9284 - DNA, 33 bp, Homo sapien
tatgtagggattctcctatgagcaggctggacc

SEQ ID NO: 9285 - DNA, 33 bp, Homo sapien
gacctatcaggtggacaacaaatgcccaagatg

SEQ ID NO: 9286 - DNA, 33 bp, Homo sapien
gacctatcaggtggaccacaaatgcccaagatg

SEQ ID NO: 9287 - DNA, 33 bp, Homo sapien
tgactttggtgaaaacagtttcagaggtgtact

SEQ ID NO: 9288 - DNA, 33 bp, Homo sapien
tgactttggtgaaaacggtttcagaggtgtact

SEQ ID NO: 9289 - DNA, 33 bp, Homo sapien
gaagcccagggaggaacacatttcaagaggagt

SEQ ID NO: 9290 - DNA, 33 bp, Homo sapien
gaagcccagggaggaatacatttcaagaggagt

SEQ ID NO: 9291 - DNA, 33 bp, Homo sapien
tagaaagagaaagttacgaagtagaagagttaa

SEQ ID NO: 9292 - DNA, 33 bp, Homo sapien
tagaaagagaaagttatgaagtagaagagttaa

SEQ ID NO: 9293 - DNA, 33 bp, Homo sapien
aggttagtagatttgactatataccttcccaat

SEQ ID NO: 9294 - DNA, 33 bp, Homo sapien
aggttagtagatttgattatataccttcccaat

SEQ ID NO: 9295 - DNA, 33 bp, Homo sapien
gaattcaccaaaatgaataggtcagagtggggg

SEQ ID NO: 9296 - DNA, 33 bp, Homo sapien
gaattcaccaaaatgagtaggtcagagtggggg

SEQ ID NO: 9297 - DNA, 33 bp, Homo sapien
atggagctcctggggaaatggagtaagagcttg

SEQ ID NO: 9298 - DNA, 33 bp, Homo sapien
atggagctcctggggagatggagtaagagcttg

SEQ ID NO: 9299 - DNA, 33 bp, Homo sapien
ttaaaacctacatttacggaccacctacagtga

SEQ ID NO: 9300 - DNA, 33 bp, Homo sapien
ttaaaacctacatttatggaccacctacagtga

SEQ ID NO: 9301 - DNA, 33 bp, Homo sapien
gaaatagagactgagaccattgtgtggtgtggg

SEQ ID NO: 9302 - DNA, 33 bp, Homo sapien
gaaatagagactgagatcattgtgtggtgtggg

SEQ ID NO: 9303 - DNA, 33 bp, Homo sapien
gtacatcacctgttcaacaaagctgtttgcttc

SEQ ID NO: 9304 - DNA, 33 bp, Homo sapien
gtacatcacctgttcaccaaagctgtttgcttc

SEQ ID NO: 9305 - DNA, 33 bp, Homo sapien
ggtgattctggatccaaggtgtggctcaagcag

SEQ ID NO: 9306 - DNA, 33 bp, Homo sapien
ggtgattctggatccagggtgtggctcaagcag

SEQ ID NO: 9307 - DNA, 33 bp, Homo sapien
ttactccttaaaatcacgagttatgagcgcttt

SEQ ID NO: 9308 - DNA, 33 bp, Homo sapien
ttactccttaaaatcatgagttatgagcgcttt

SEQ ID NO: 9309 - DNA, 33 bp, Homo sapien
tgcaggagcatctctcaacctctgggcagattg

SEQ ID NO: 9310 - DNA, 33 bp, Homo sapien
tgcaggagcatctctcgacctctgggcagattg

SEQ ID NO: 9311 - DNA, 33 bp, Homo sapien
ctatctgatggttggaaaatgtaccacatttaa

SEQ ID NO: 9312 - DNA, 33 bp, Homo sapien
ctatctgatggttggagaatgtaccacatttaa

SEQ ID NO: 9313 - DNA, 33 bp, Homo sapien
tgaccgcaactctatacccgttgaacaattccc

SEQ ID NO: 9314 - DNA, 33 bp, Homo sapien
tgaccgcaactctatatccgttgaacaattccc

SEQ ID NO: 9315 - DNA, 33 bp, Homo sapien
tgccactgtgctataacctaggtgacagaatga

SEQ ID NO: 9316 - DNA, 33 bp, Homo sapien
tgccactgtgctataatctaggtgacagaatga

SEQ ID NO: 9317 - DNA, 33 bp, Homo sapien
aagtacttgataaataccaccaacccatgtcac

SEQ ID NO: 9318 - DNA, 33 bp, Homo sapien
aagtacttgataaatatcaccaacccatgtcac

SEQ ID NO: 9319 - DNA, 33 bp, Homo sapien
gcagttcaaaacctgcacaagactaaaactgga

SEQ ID NO: 9320 - DNA, 33 bp, Homo sapien
gcagttcaaaacctgcgcaagactaaaactgga

SEQ ID NO: 9321 - DNA, 33 bp, Homo sapien
accttcagaactcggaacctggatggcatctta

SEQ ID NO: 9322 - DNA, 33 bp, Homo sapien
accttcagaactcggaccctggatggcatctta

SEQ ID NO: 9323 - DNA, 33 bp, Homo sapien
atgcggaacagacataaaatggagtattattga

SEQ ID NO: 9324 - DNA, 33 bp, Homo sapien
atgcggaacagacatacaatggagtattattga

SEQ ID NO: 9325 - DNA, 33 bp, Homo sapien
atacaaaattatgtcacgcaaaaagagattctg

SEQ ID NO: 9326 - DNA, 33 bp, Homo sapien
atacaaaattatgtcatgcaaaaagagattctg

SEQ ID NO: 9327 - DNA, 33 bp, Homo sapien
atctattctgtgaaaacaagcaccctttgttgt

SEQ ID NO: 9328 - DNA, 33 bp, Homo sapien
atctattctgtgaaaataagcaccctttgttgt

SEQ ID NO: 9329 - DNA, 33 bp, Homo sapien
cctagattgaaaagccaagaagacagagaattt

SEQ ID NO: 9330 - DNA, 33 bp, Homo sapien
cctagattgaaaagccgagaagacagagaattt

SEQ ID NO: 9331 - DNA, 33 bp, Homo sapien
gactggtttataccaacggaggcagtaaatggt

SEQ ID NO: 9332 - DNA, 33 bp, Homo sapien
gactggtttataccaatggaggcagtaaatggt

SEQ ID NO: 9333 - DNA, 33 bp, Homo sapien
ggagacctccaagacactaacagggagtaagtg

SEQ ID NO: 9334 - DNA, 33 bp, Homo sapien
ggagacctccaagacagtaacagggagtaagtg

SEQ ID NO: 9335 - DNA, 33 bp, Homo sapien
atagatacagacggtacaataaaggttcccaga

SEQ ID NO: 9336 - DNA, 33 bp, Homo sapien
atagatacagacggtagaataaaggttcccaga

SEQ ID NO: 9337 - DNA, 33 bp, Homo sapien
tgtaactaagtactcaacactggaaaatgtata

SEQ ID NO: 9338 - DNA, 33 bp, Homo sapien
tgtaactaagtactcaccactggaaaatgtata

SEQ ID NO: 9339 - DNA, 33 bp, Homo sapien
aaaacagagatgtcaaataaatggaggaataag

SEQ ID NO: 9340 - DNA, 33 bp, Homo sapien
aaaacagagatgtcaactaaatggaggaataag

SEQ ID NO: 9341 - DNA, 33 bp, Homo sapien
gattatttgctatttaccactgttgtggaaata

SEQ ID NO: 9342 - DNA, 33 bp, Homo sapien
gattatttgctatttatcactgttgtggaaata

SEQ ID NO: 9343 - DNA, 33 bp, Homo sapien
taacacattattgggacagaggaggttatttca

SEQ ID NO: 9344 - DNA, 33 bp, Homo sapien
taacacattattgggatagaggaggttatttca

SEQ ID NO: 9345 - DNA, 33 bp, Homo sapien
cctcccttaattcgtccctcaaatccttctgca

SEQ ID NO: 9346 - DNA, 33 bp, Homo sapien
cctcccttaattcgtcgctcaaatccttctgca

SEQ ID NO: 9347 - DNA, 33 bp, Homo sapien
ggacaccagcaggactcaggaactcccaggctg

SEQ ID NO: 9348 - DNA, 33 bp, Homo sapien
ggacaccagcaggactgaggaactcccaggctg

SEQ ID NO: 9349 - DNA, 33 bp, Homo sapien
gacagatgtaaacaccaggagagatgagaggaa

SEQ ID NO: 9350 - DNA, 33 bp, Homo sapien
gacagatgtaaacaccgggagagatgagaggaa

SEQ ID NO: 9351 - DNA, 33 bp, Homo sapien
tccctgctgtttctcacgtaagaggctggtggc

SEQ ID NO: 9352 - DNA, 33 bp, Homo sapien
tccctgctgtttctcaggtaagaggctggtggc

SEQ ID NO: 9353 - DNA, 33 bp, Homo sapien
cttacagactcaggaaataggctcagaaaacat

SEQ ID NO: 9354 - DNA, 33 bp, Homo sapien
cttacagactcaggaagtaggctcagaaaacat

SEQ ID NO: 9355 - DNA, 33 bp, Homo sapien
agcatctgtgctttgacaatatccactgggctg

SEQ ID NO: 9356 - DNA, 33 bp, Homo sapien
agcatctgtgctttgagaatatccactgggctg

SEQ ID NO: 9357 - DNA, 33 bp, Homo sapien
gccaagaaaggtaaataagtagtctgtttcaaa

SEQ ID NO: 9358 - DNA, 33 bp, Homo sapien
gccaagaaaggtaaatgagtagtctgtttcaaa

SEQ ID NO: 9359 - DNA, 33 bp, Homo sapien
ctggttccttttggcaaagaatgatatatagaa

SEQ ID NO: 9360 - DNA, 33 bp, Homo sapien
ctggttccttttggcagagaatgatatatagaa

SEQ ID NO: 9361 - DNA, 33 bp, Homo sapien
cccatttgaggtgagccgattgatgttgctagg

SEQ ID NO: 9362 - DNA, 33 bp, Homo sapien
cccatttgaggtgagctgattgatgttgctagg

SEQ ID NO: 9363 - DNA, 33 bp, Homo sapien
acttctgtccactctgaagagcagtgaggaatt

SEQ ID NO: 9364 - DNA, 33 bp, Homo sapien
acttctgtccactctggagagcagtgaggaatt

SEQ ID NO: 9365 - DNA, 33 bp, Homo sapien
cttgcttagacattacaggttatgctttgagat

SEQ ID NO: 9366 - DNA, 33 bp, Homo sapien
cttgcttagacattacgggttatgctttgagat

SEQ ID NO: 9367 - DNA, 33 bp, Homo sapien
ctgcaccagactttaacactcttgggccaggca

SEQ ID NO: 9368 - DNA, 33 bp, Homo sapien
ctgcaccagactttaagactcttgggccaggca

SEQ ID NO: 9369 - DNA, 33 bp, Homo sapien
tcctcatatccgaaagcagggtcttccacaaag

SEQ ID NO: 9370 - DNA, 33 bp, Homo sapien
tcctcatatccgaaagtagggtcttccacaaag

SEQ ID NO: 9371 - DNA, 33 bp, Homo sapien
tagaatgagtacaagcacctttttacccttatc

SEQ ID NO: 9372 - DNA, 33 bp, Homo sapien
tagaatgagtacaagctcctttttacccttatc

SEQ ID NO: 9373 - DNA, 33 bp, Homo sapien
ttgcatacaccatccaatcatgtacacagtagt

SEQ ID NO: 9374 - DNA, 33 bp, Homo sapien
ttgcatacaccatccagtcatgtacacagtagt

SEQ ID NO: 9375 - DNA, 33 bp, Homo sapien
cttatgtatcaagtcaacatgaaattgaaatac

SEQ ID NO: 9376 - DNA, 33 bp, Homo sapien
cttatgtatcaagtcagcatgaaattgaaatac

SEQ ID NO: 9377 - DNA, 33 bp, Homo sapien; identical to SEQ ID NO: 9375

SEQ ID NO: 9378 - DNA, 33 bp, Homo sapien; identical to SEQ ID NO: 9376

SEQ ID NO: 9379 - DNA, 33 bp, Homo sapien
tgggatgaccatagtaacagcaacccagtcaca

SEQ ID NO: 9380 - DNA, 33 bp, Homo sapien
tgggatgaccatagtaccagcaacccagtcaca

SEQ ID NO: 9381 - DNA, 33 bp, Homo sapien
agtgaccagctctcaactgctgtaatgattaga

SEQ ID NO: 9382 - DNA, 33 bp, Homo sapien
agtgaccagctctcaagtgctgtaatgattaga

SEQ ID NO: 9383 - DNA, 33 bp, Homo sapien
aaaaatggttaatagggagtgggattatgcata

SEQ ID NO: 9384 - DNA, 33 bp, Homo sapien
aaaaatggttaataggtagtgggattatgcata

SEQ ID NO: 9385 - DNA, 33 bp, Homo sapien
aaggatgtattaacaaagtgttcactgctgtgg

SEQ ID NO: 9386 - DNA, 33 bp, Homo sapien
aaggatgtattaacaaggtgttcactgctgtgg

SEQ ID NO: 9387 - DNA, 33 bp, Homo sapien
accattagagaaatgcaaatcgaaatgacaatg

SEQ ID NO: 9388 - DNA, 33 bp, Homo sapien
accattagagaaatgccaatcgaaatgacaatg

SEQ ID NO: 9389 - DNA, 33 bp, Homo sapien
tgggcaacacagcagcaaaaaaccctgtctgta

SEQ ID NO: 9390 - DNA, 33 bp, Homo sapien
tgggcaacacagcagcgaaaaaccctgtctgta

SEQ ID NO: 9391 - DNA, 33 bp, Homo sapien
aatattagaattggaaagtatcagatggctggc

SEQ ID NO: 9392 - DNA, 33 bp, Homo sapien
aatattagaattggaaggtatcagatggctggc

SEQ ID NO: 9393 - DNA, 33 bp, Homo sapien
cctcctacctcaaggaccttccattttatttat

SEQ ID NO: 9394 - DNA, 33 bp, Homo sapien
cctcctacctcaaggatcttccattttatttat

SEQ ID NO: 9395 - DNA, 33 bp, Homo sapien
gtgtaaggtggaaaaacgttggctagagagaca

SEQ ID NO: 9396 - DNA, 33 bp, Homo sapien
gtgtaaggtggaaaaatgttggctagagagaca

SEQ ID NO: 9397 - DNA, 33 bp, Homo sapien
ggatcaccggaaatcaggagttcaaaaccagcc

SEQ ID NO: 9398 - DNA, 33 bp, Homo sapien
ggatcaccggaaatcatgagttcaaaaccagcc

SEQ ID NO: 9399 - DNA, 33 bp, Homo sapien
cctctgctatagttgccacaactctgactacta

SEQ ID NO: 9400 - DNA, 33 bp, Homo sapien
cctctgctatagttgctacaactctgactacta

SEQ ID NO: 9401 - DNA, 33 bp, Homo sapien
tggagatgatgggcaaacagctggagaaccgtg

SEQ ID NO: 9402 - DNA, 33 bp, Homo sapien
tggagatgatgggcaagcagctggagaaccgtg

SEQ ID NO: 9403 - DNA, 33 bp, Homo sapien
atgccttacacagtaactcttaacgataacata

SEQ ID NO: 9404 - DNA, 33 bp, Homo sapien
atgccttacacagtaattcttaacgataacata

SEQ ID NO: 9405 - DNA, 33 bp, Homo sapien
ggtaatgaatagctaacggcacacgagggaggc

SEQ ID NO: 9406 - DNA, 33 bp, Homo sapien
ggtaatgaatagctaagggcacacgagggaggc

SEQ ID NO: 9407 - DNA, 33 bp, Homo sapien
aacataaattgttagcagaaggtttcagacatt

SEQ ID NO: 9408 - DNA, 33 bp, Homo sapien
aacataaattgttagcggaaggtttcagacatt

SEQ ID NO: 9409 - DNA, 33 bp, Homo sapien
gaagataaaaatctacaaggccaggagcagtgg

SEQ ID NO: 9410 - DNA, 33 bp, Homo sapien
gaagataaaaatctacgaggccaggagcagtgg

SEQ ID NO: 9411 - DNA, 33 bp, Homo sapien
tttaccaagttctgaaagccattgatataattc

SEQ ID NO: 9412 - DNA, 33 bp, Homo sapien
tttaccaagttctgaaggccattgatataattc

SEQ ID NO: 9413 - DNA, 33 bp, Homo sapien
tgcaactaaacttaagcctgatgagacagaaat

SEQ ID NO: 9414 - DNA, 33 bp, Homo sapien
tgcaactaaacttaaggctgatgagacagaaat

SEQ ID NO: 9415 - DNA, 33 bp, Homo sapien
tgctgacaccgttagtcacctgaattgaagccc

SEQ ID NO: 9416 - DNA, 33 bp, Homo sapien
tgctgacaccgttagttacctgaattgaagccc

SEQ ID NO: 9417 - DNA, 33 bp, Homo sapien
ctcttctaactcctaaattactctcttctcctt

SEQ ID NO: 9418 - DNA, 33 bp, Homo sapien
ctcttctaactcctaagttactctcttctcctt

SEQ ID NO: 9419 - DNA, 33 bp, Homo sapien
gaatggtaagtgataacgctggagagattggtt

SEQ ID NO: 9420 - DNA, 33 bp, Homo sapien
gaatggtaagtgataatgctggagagattggtt

SEQ ID NO: 9421 - DNA, 33 bp, Homo sapien
gatcacttgaacctagaagttggagaccagcat

SEQ ID NO: 9422 - DNA, 33 bp, Homo sapien
gatcacttgaacctaggagttggagaccagcat

SEQ ID NO: 9423 - DNA, 33 bp, Homo sapien
gttttgattagtctcaataattctccacttacc

SEQ ID NO: 9424 - DNA, 33 bp, Homo sapien
gttttgattagtctcagtaattctccacttacc

SEQ ID NO: 9425 - DNA, 33 bp, Homo sapien
gtttccttatgtatacaatgggggcaacacact

SEQ ID NO: 9426 - DNA, 33 bp, Homo sapien
gtttccttatgtatacgatgggggcaacacact

SEQ ID NO: 9427 - DNA, 33 bp, Homo sapien
acaattgggattttccaaagtgagagagaggca

SEQ ID NO: 9428 - DNA, 33 bp, Homo sapien
acaattgggattttccgaagtgagagagaggca

SEQ ID NO: 9429 - DNA, 33 bp, Homo sapien
taagttcatcctcttacaggcgtgtggtttgtg

SEQ ID NO: 9430 - DNA, 33 bp, Homo sapien
taagttcatcctcttataggcgtgtggtttgtg

SEQ ID NO: 9431 - DNA, 33 bp, Homo sapien
tgtgctccataacccactgaatccgcacaaccg

SEQ ID NO: 9432 - DNA, 33 bp, Homo sapien
tgtgctccataacccattgaatccgcacaaccg

SEQ ID NO: 9433 - DNA, 33 bp, Homo sapien
ttttccatcaagaatacagaatgttagcctaga

SEQ ID NO: 9434 - DNA, 33 bp, Homo sapien
ttttccatcaagaatatagaatgttagcctaga

SEQ ID NO: 9435 - DNA, 33 bp, Homo sapien
gctactatgacatttacagagatcacctcattt

SEQ ID NO: 9436 - DNA, 33 bp, Homo sapien
gctactatgacatttatagagatcacctcattt

SEQ ID NO: 9437 - DNA, 33 bp, Homo sapien
gaacggagtatattgagggacactgcctagtgg

SEQ ID NO: 9438 - DNA, 33 bp, Homo sapien
gaacggagtatattgatggacactgcctagtgg

SEQ ID NO: 9439 - DNA, 33 bp, Homo sapien
cccctccctaaggtcacagatttcaagaggcca

SEQ ID NO: 9440 - DNA, 33 bp, Homo sapien
cccctccctaaggtcatagatttcaagaggcca

SEQ ID NO: 9441 - DNA, 33 bp, Homo sapien
ctccagcttgggcgacagaatgggacttgtcta

SEQ ID NO: 9442 - DNA, 33 bp, Homo sapien
ctccagcttgggcgacggaatgggacttgtcta

SEQ ID NO: 9443 - DNA, 33 bp, Homo sapien
tattaagtgaggctgacgatcgtattagagatg

SEQ ID NO: 9444 - DNA, 33 bp, Homo sapien
tattaagtgaggctgatgatcgtattagagatg

SEQ ID NO: 9445 - DNA, 33 bp, Homo sapien
atagccctattttatggatgagttcaatgaggc

SEQ ID NO: 9446 - DNA, 33 bp, Homo sapien
atagccctattttatgtatgagttcaatgaggc

SEQ ID NO: 9447 - DNA, 33 bp, Homo sapien
aacaggtcagtgaagcacccggcacgtatataa

SEQ ID NO: 9448 - DNA, 33 bp, Homo sapien
aacaggtcagtgaagcgcccggcacgtatataa

SEQ ID NO: 9449 - DNA, 33 bp, Homo sapien
agatgcaaagaatcacccacctgtatgcaacag

SEQ ID NO: 9450 - DNA, 33 bp, Homo sapien
agatgcaaagaatcactcacctgtatgcaacag

SEQ ID NO: 9451 - DNA, 33 bp, Homo sapien
tgcagttcattatcacaccctgctggctctgcc

SEQ ID NO: 9452 - DNA, 33 bp, Homo sapien
tgcagttcattatcacgccctgctggctctgcc

SEQ ID NO: 9453 - DNA, 33 bp, Homo sapien
tgattaaagggatcaaaccaactaaaatttttg

SEQ ID NO: 9454 - DNA, 33 bp, Homo sapien
tgattaaagggatcaatccaactaaaatttttg

SEQ ID NO: 9455 - DNA, 33 bp, Homo sapien
acttctcattattaaaagtttgtctctcatatc

SEQ ID NO: 9456 - DNA, 33 bp, Homo sapien
acttctcattattaaaggtttgtctctcatatc

SEQ ID NO: 9457 - DNA, 33 bp, Homo sapien
tgaattagaattgaaacaaggtctacatattgc

SEQ ID NO: 9458 - DNA, 33 bp, Homo sapien
tgaattagaattgaaataaggtctacatattgc

SEQ ID NO: 9459 - DNA, 33 bp, Homo sapien
taactacgtaagatgaaaatgagatctaactaa

SEQ ID NO: 9460 - DNA, 33 bp, Homo sapien
taactacgtaagatgacaatgagatctaactaa

SEQ ID NO: 9461 - DNA, 33 bp, Homo sapien
ctgattccatatgtcaaggtcgagtctgagatt

SEQ ID NO: 9462 - DNA, 33 bp, Homo sapien
ctgattccatatgtcagggtcgagtctgagatt

SEQ ID NO: 9463 - DNA, 33 bp, Homo sapien
ggtatttgtacaagaactaaggaattttccttc

SEQ ID NO: 9464 - DNA, 33 bp, Homo sapien
ggtatttgtacaagaattaaggaattttccttc

SEQ ID NO: 9465 - DNA, 33 bp, Homo sapien
tgtaatgtgaagagtgaataggattgtggttga

SEQ ID NO: 9466 - DNA, 33 bp, Homo sapien
tgtaatgtgaagagtggataggattgtggttga

SEQ ID NO: 9467 - DNA, 33 bp, Homo sapien
ttacttctctagagaactcaggcatatacttaa

SEQ ID NO: 9468 - DNA, 33 bp, Homo sapien
ttacttctctagagaattcaggcatatacttaa

SEQ ID NO: 9469 - DNA, 33 bp, Homo sapien
caagtaaatttacttcaaatgcatgatactaat

SEQ ID NO: 9470 - DNA, 33 bp, Homo sapien
caagtaaatttacttcgaatgcatgatactaat

SEQ ID NO: 9471 - DNA, 33 bp, Homo sapien
tcctcaattttagcaacgtagccttacaaactg

SEQ ID NO: 9472 - DNA, 33 bp, Homo sapien
tcctcaattttagcaatgtagccttacaaactg

SEQ ID NO: 9473 - DNA, 33 bp, Homo sapien
agtacaaagtcctgaaagtaggaatgagcttgc

SEQ ID NO: 9474 - DNA, 33 bp, Homo sapien
agtacaaagtcctgaaggtaggaatgagcttgc

SEQ ID NO: 9475 - DNA, 33 bp, Homo sapien
tattgatctttgtgtacccttgtgtcaatacca

SEQ ID NO: 9476 - DNA, 33 bp, Homo sapien
tattgatctttgtgtatccttgtgtcaatacca

SEQ ID NO: 9477 - DNA, 33 bp, Homo sapien
gatcttcaaagattaaatgccatcttttcacaa

SEQ ID NO: 9478 - DNA, 33 bp, Homo sapien
gatcttcaaagattaagtgccatcttttcacaa

SEQ ID NO: 9479 - DNA, 33 bp, Homo sapien
ttctaataaatccctaagcacatgtttctttca

SEQ ID NO: 9480 - DNA, 33 bp, Homo sapien
ttctaataaatccctatgcacatgtttctttca

SEQ ID NO: 9481 - DNA, 33 bp, Homo sapien
agacacactgaacacaagaacttcaggccagct

SEQ ID NO: 9482 - DNA, 33 bp, Homo sapien
agacacactgaacacaggaacttcaggccagct

SEQ ID NO: 9483 - DNA, 33 bp, Homo sapien
tgtaatatggtcaaagcctcttaccaagatttc

SEQ ID NO: 9484 - DNA, 33 bp, Homo sapien
tgtaatatggtcaaaggctcttaccaagatttc

SEQ ID NO: 9485 - DNA, 33 bp, Homo sapien
cccccagaaaatcagaagcaatcgatgtttgct

SEQ ID NO: 9486 - DNA, 33 bp, Homo sapien
cccccagaaaatcagaggcaatcgatgtttgct

SEQ ID NO: 9487 - DNA, 33 bp, Homo sapien
gaattttagcactcaggcccagaaattatctag

SEQ ID NO: 9488 - DNA, 33 bp, Homo sapien
gaattttagcactcagtcccagaaattatctag

SEQ ID NO: 9489 - DNA, 33 bp, Homo sapien
acgctgtggctaaaccgcatggcgccaagcccg

SEQ ID NO: 9490 - DNA, 33 bp, Homo sapien
acgctgtggctaaacctcatggcgccaagcccg

SEQ ID NO: 9491 - DNA, 33 bp, Homo sapien
tggcaaaggagctatcagaagcagtcacagaat

SEQ ID NO: 9492 - DNA, 33 bp, Homo sapien
tggcaaaggagctatcggaagcagtcacagaat

SEQ ID NO: 9493 - DNA, 33 bp, Homo sapien
aaaggctgaacaagcccggaaacctgaactacc

SEQ ID NO: 9494 - DNA, 33 bp, Homo sapien
aaaggctgaacaagcctggaaacctgaactacc

SEQ ID NO: 9495 - DNA, 33 bp, Homo sapien
ttttagccgtgtgccacgcttttttgggcggga

SEQ ID NO: 9496 - DNA, 33 bp, Homo sapien
ttttagccgtgtgccaggcttttttgggcggga

SEQ ID NO: 9497 - DNA, 33 bp, Homo sapien
catgccagtttgaacacggactcccagcataat

SEQ ID NO: 9498 - DNA, 33 bp, Homo sapien
catgccagtttgaacatggactcccagcataat

SEQ ID NO: 9499 - DNA, 33 bp, Homo sapien
gtgtaacagagtgaaaacttcgggttcagctag

SEQ ID NO: 9500 - DNA, 33 bp, Homo sapien
gtgtaacagagtgaaagcttcgggttcagctag

SEQ ID NO: 9501 - DNA, 33 bp, Homo sapien
ctgcctttgtgttttccctggagctgtgttatg

SEQ ID NO: 9502 - DNA, 33 bp, Homo sapien
ctgcctttgtgttttctctggagctgtgttatg

SEQ ID NO: 9503 - DNA, 33 bp, Homo sapien
tatgagacagtgataaaggacgtacaccagagg

SEQ ID NO: 9504 - DNA, 33 bp, Homo sapien
tatgagacagtgataagggacgtacaccagagg

SEQ ID NO: 9505 - DNA, 33 bp, Homo sapien
tgtgctcgattctagagggcctatcctgtgggt

SEQ ID NO: 9506 - DNA, 33 bp, Homo sapien
tgtgctcgattctagatggcctatcctgtgggt

SEQ ID NO: 9507 - DNA, 33 bp, Homo sapien
aatactgacgtccatgcaatagtgcagtgcagt

SEQ ID NO: 9508 - DNA, 33 bp, Homo sapien
aatactgacgtccatgtaatagtgcagtgcagt

SEQ ID NO: 9509 - DNA, 33 bp, Homo sapien
cagagccaacacacagcctgacaatgccaacat

SEQ ID NO: 9510 - DNA, 33 bp, Homo sapien
cagagccaacacacagtctgacaatgccaacat

SEQ ID NO: 9511 - DNA, 33 bp, Homo sapien
tgcagatgaaacagtaaagcctcctaaaagtga

SEQ ID NO: 9512 - DNA, 33 bp, Homo sapien
tgcagatgaaacagtagagcctcctaaaagtga

SEQ ID NO: 9513 - DNA, 33 bp, Homo sapien
tgtgattgcacataaaacacctgatctaaaccc

SEQ ID NO: 9514 - DNA, 33 bp, Homo sapien
tgtgattgcacataaagcacctgatctaaaccc

SEQ ID NO: 9515 - DNA, 33 bp, Homo sapien
cccatctctactaaaaacgcaaaaataagccgg

SEQ ID NO: 9516 - DNA, 33 bp, Homo sapien
cccatctctactaaaagcgcaaaaataagccgg

SEQ ID NO: 9517 - DNA, 33 bp, Homo sapien
ggctttgtcttgctgccgcacgtgcacagtttt

SEQ ID NO: 9518 - DNA, 33 bp, Homo sapien
ggctttgtcttgctgctgcacgtgcacagtttt

SEQ ID NO: 9519 - DNA, 33 bp, Homo sapien
taggccaatgctgtgcagaacagaaaactgtgc

SEQ ID NO: 9520 - DNA, 33 bp, Homo sapien
taggccaatgctgtgcggaacagaaaactgtgc

SEQ ID NO: 9521 - DNA, 33 bp, Homo sapien
caaaaggcaggacacacattgaggatgtagggc

SEQ ID NO: 9522 - DNA, 33 bp, Homo sapien
caaaaggcaggacacatattgaggatgtagggc

SEQ ID NO: 9523 - DNA, 33 bp, Homo sapien
gatcaaaatttgccagcctttttcacttctgcc

SEQ ID NO: 9524 - DNA, 33 bp, Homo sapien
gatcaaaatttgccagtctttttcacttctgcc

SEQ ID NO: 9525 - DNA, 33 bp, Homo sapien
tcaggtctctttttccatgaaatgcctgttcat

SEQ ID NO: 9526 - DNA, 33 bp, Homo sapien
tcaggtctctttttccgtgaaatgcctgttcat

SEQ ID NO: 9527 - DNA, 33 bp, Homo sapien
agacttaaatagcctcaataattagaccgtgtg

SEQ ID NO: 9528 - DNA, 33 bp, Homo sapien
agacttaaatagcctcgataattagaccgtgtg

SEQ ID NO: 9529 - DNA, 33 bp, Homo sapien
tctggactctgacatcacccttatcctaatcta

SEQ ID NO: 9530 - DNA, 33 bp, Homo sapien
tctggactctgacatcgcccttatcctaatcta

SEQ ID NO: 9531 - DNA, 33 bp, Homo sapien
atgctgggagaccccaatgccgactacattaat

SEQ ID NO: 9532 - DNA, 33 bp, Homo sapien
atgctgggagaccccagtgccgactacattaat

SEQ ID NO: 9533 - DNA, 33 bp, Homo sapien
gtggtaaagaaaggacgcaaatctcagcctgtc

SEQ ID NO: 9534 - DNA, 33 bp, Homo sapien
gtggtaaagaaaggactcaaatctcagcctgtc

SEQ ID NO: 9535 - DNA, 33 bp, Homo sapien
acgggcacagtgaggaactttactagctgacca

SEQ ID NO: 9536 - DNA, 33 bp, Homo sapien
acgggcacagtgaggatctttactagctgacca

SEQ ID NO: 9537 - DNA, 33 bp, Homo sapien
tgctgcggttcttgtcacggttccggggcaaca

SEQ ID NO: 9538 - DNA, 33 bp, Homo sapien
tgctgcggttcttgtcgcggttccggggcaaca

SEQ ID NO: 9539 - DNA, 33 bp, Homo sapien
gctattcagaattgagacctgcttccccaggac

SEQ ID NO: 9540 - DNA, 33 bp, Homo sapien
gctattcagaattgagtcctgcttccccaggac

SEQ ID NO: 9541 - DNA, 33 bp, Homo sapien
ctgcccccatctctgccatgtttgtaaagtaag

SEQ ID NO: 9542 - DNA, 33 bp, Homo sapien
ctgcccccatctctgcgatgtttgtaaagtaag

SEQ ID NO: 9543 - DNA, 33 bp, Homo sapien
cagataaagtgtggaaatggaacgactaagtgg

SEQ ID NO: 9544 - DNA, 33 bp, Homo sapien
cagataaagtgtggaagtggaacgactaagtgg

SEQ ID NO: 9545 - DNA, 33 bp, Homo sapien
ctgtggtctggggataaagaataagccaagtcc

SEQ ID NO: 9546 - DNA, 33 bp, Homo sapien
ctgtggtctggggatacagaataagccaagtcc

SEQ ID NO: 9547 - DNA, 33 bp, Homo sapien
attaaatggtgagagaagacatgatccattttt

SEQ ID NO: 9548 - DNA, 33 bp, Homo sapien
attaaatggtgagagatgacatgatccattttt

SEQ ID NO: 9549 - DNA, 33 bp, Homo sapien
cctgttaatagaagggaaggttcctggacaaac

SEQ ID NO: 9550 - DNA, 33 bp, Homo sapien
cctgttaatagaagggcaggttcctggacaaac

SEQ ID NO: 9551 - DNA, 33 bp, Homo sapien
ttggccattgtgagaacttaagcaagttattta

SEQ ID NO: 9552 - DNA, 33 bp, Homo sapien
ttggccattgtgagaatttaagcaagttattta

SEQ ID NO: 9553 - DNA, 33 bp, Homo sapien
aggctctagaccgacaatgggtttgatttccac

SEQ ID NO: 9554 - DNA, 33 bp, Homo sapien
aggctctagaccgacactgggtttgatttccac

SEQ ID NO: 9555 - DNA, 33 bp, Homo sapien
tttgtgatttttcctgaattcatctcccctagc

SEQ ID NO: 9556 - DNA, 33 bp, Homo sapien
tttgtgatttttcctggattcatctcccctagc

SEQ ID NO: 9557 - DNA, 33 bp, Homo sapien
tctatagcacttaccacagtctattcaaatgtt

SEQ ID NO: 9558 - DNA, 33 bp, Homo sapien
tctatagcacttaccatagtctattcaaatgtt

SEQ ID NO: 9559 - DNA, 33 bp, Homo sapien
ggggcagcatgggaaaactggggggtgatagca

SEQ ID NO: 9560 - DNA, 33 bp, Homo sapien
ggggcagcatgggaaacctggggggtgatagca

SEQ ID NO: 9561 - DNA, 33 bp, Homo sapien
attgacaaggcttagcagcagggaaacagtgta

SEQ ID NO: 9562 - DNA, 33 bp, Homo sapien
attgacaaggcttagcggcagggaaacagtgta

SEQ ID NO: 9563 - DNA, 33 bp, Homo sapien
atgatagatacgagaacggaaggtgtgtgtggg

SEQ ID NO: 9564 - DNA, 33 bp, Homo sapien
atgatagatacgagaatggaaggtgtgtgtggg

SEQ ID NO: 9565 - DNA, 33 bp, Homo sapien
gggaagtacagtcacaagaaggagatggaaaaa

SEQ ID NO: 9566 - DNA, 33 bp, Homo sapien
gggaagtacagtcacaggaaggagatggaaaaa

SEQ ID NO: 9567 - DNA, 33 bp, Homo sapien
tatgatccactttgcccaggacagtctagttta

SEQ ID NO: 9568 - DNA, 33 bp, Homo sapien
tatgatccactttgcctaggacagtctagttta

SEQ ID NO: 9569 - DNA, 33 bp, Homo sapien
atccataaattctactcagatgcttcctcctca

SEQ ID NO: 9570 - DNA, 33 bp, Homo sapien
atccataaattctactgagatgcttcctcctca

SEQ ID NO: 9571 - DNA, 33 bp, Homo sapien
gtgtggataaaaaccagatcaacaaacgcatat

SEQ ID NO: 9572 - DNA, 33 bp, Homo sapien
gtgtggataaaaaccatatcaacaaacgcatat

SEQ ID NO: 9573 - DNA, 33 bp, Homo sapien
gtgtaagctcaataagaacaaggctttggttag

SEQ ID NO: 9574 - DNA, 33 bp, Homo sapien
gtgtaagctcaataaggacaaggctttggttag

SEQ ID NO: 9575 - DNA, 33 bp, Homo sapien
tgcacacaaatagttacggatcatctattgtgt

SEQ ID NO: 9576 - DNA, 33 bp, Homo sapien
tgcacacaaatagttatggatcatctattgtgt

SEQ ID NO: 9577 - DNA, 33 bp, Homo sapien
agcaatttttcaatacagggcattatctctctc

SEQ ID NO: 9578 - DNA, 33 bp, Homo sapien
agcaatttttcaatacggggcattatctctctc

SEQ ID NO: 9579 - DNA, 33 bp, Homo sapien
acttagtcactcatccaacacctcactcaaacc

SEQ ID NO: 9580 - DNA, 33 bp, Homo sapien
acttagtcactcatccgacacctcactcaaacc

SEQ ID NO: 9581 - DNA, 33 bp, Homo sapien
cccagagctttaggcactgactgaatggcttct

SEQ ID NO: 9582 - DNA, 33 bp, Homo sapien
cccagagctttaggcattgactgaatggcttct

SEQ ID NO: 9583 - DNA, 33 bp, Homo sapien
ttttctagcatttgcccgaagtctgagtcttca

SEQ ID NO: 9584 - DNA, 33 bp, Homo sapien
ttttctagcatttgcctgaagtctgagtcttca

SEQ ID NO: 9585 - DNA, 33 bp, Homo sapien
tttatggggacagtgaacttctaggatttgttt

SEQ ID NO: 9586 - DNA, 33 bp, Homo sapien
tttatggggacagtgaccttctaggatttgttt

SEQ ID NO: 9587 - DNA, 33 bp, Homo sapien
tgctaaatagataagcaaggttaaaagggagcc

SEQ ID NO: 9588 - DNA, 33 bp, Homo sapien
tgctaaatagataagcgaggttaaaagggagcc

SEQ ID NO: 9589 - DNA, 33 bp, Homo sapien
agccacataggctgcacccagaaaagccataga

SEQ ID NO: 9590 - DNA, 33 bp, Homo sapien
agccacataggctgcatccagaaaagccataga

SEQ ID NO: 9591 - DNA, 33 bp, Homo sapien
aaatggactaatcaaacccttcacaatgtgact

SEQ ID NO: 9592 - DNA, 33 bp, Homo sapien
aaatggactaatcaaagccttcacaatgtgact

SEQ ID NO: 9593 - DNA, 33 bp, Homo sapien
gctctggacagactcaactcatctcagctggac

SEQ ID NO: 9594 - DNA, 33 bp, Homo sapien
gctctggacagactcatctcatctcagctggac

SEQ ID NO: 9595 - DNA, 33 bp, Homo sapien
gccaaaattctctcacactttgggtttgggtat

SEQ ID NO: 9596 - DNA, 33 bp, Homo sapien
gccaaaattctctcacgctttgggtttgggtat

SEQ ID NO: 9597 - DNA, 33 bp, Homo sapien
gccactgcagaacctcaaagctcaaggcttgag

SEQ ID NO: 9598 - DNA, 33 bp, Homo sapien
gccactgcagaacctcgaagctcaaggcttgag

SEQ ID NO: 9599 - DNA, 33 bp, Homo sapien
gtctccgccctacaagcatgcaagctccgtagg

SEQ ID NO: 9600 - DNA, 33 bp, Homo sapien
gtctccgccctacaaggatgcaagctccgtagg

SEQ ID NO: 9601 - DNA, 33 bp, Homo sapien
gatttctaataaggaaggagggagcctggtctc

SEQ ID NO: 9602 - DNA, 33 bp, Homo sapien
gatttctaataaggaatgagggagcctggtctc

SEQ ID NO: 9603 - DNA, 33 bp, Homo sapien
acctcgtccattctcaaagttgctattgcatcc

SEQ ID NO: 9604 - DNA, 33 bp, Homo sapien
acctcgtccattctcagagttgctattgcatcc

SEQ ID NO: 9605 - DNA, 33 bp, Homo sapien
ggctatacttgtgagtgaatgttaaatcagacc

SEQ ID NO: 9606 - DNA, 33 bp, Homo sapien
ggctatacttgtgagttaatgttaaatcagacc

SEQ ID NO: 9607 - DNA, 33 bp, Homo sapien
tgcatttctgggtttgaaattttgtgattctga

SEQ ID NO: 9608 - DNA, 33 bp, Homo sapien
tgcatttctgggtttggaattttgtgattctga

SEQ ID NO: 9609 - DNA, 33 bp, Homo sapien
caggaaaccagaattgccaaaataccagggtgc

SEQ ID NO: 9610 - DNA, 33 bp, Homo sapien
caggaaaccagaattggcaaaataccagggtgc

SEQ ID NO: 9611 - DNA, 33 bp, Homo sapien
cagccccaggatggacacagagataaaatccac

SEQ ID NO: 9612 - DNA, 33 bp, Homo sapien
cagccccaggatggacccagagataaaatccac

SEQ ID NO: 9613 - DNA, 33 bp, Homo sapien
ctggccatttgaccaacatcttctttaatatct

SEQ ID NO: 9614 - DNA, 33 bp, Homo sapien
ctggccatttgaccaagatcttctttaatatct

SEQ ID NO: 9615 - DNA, 33 bp, Homo sapien
cttgagaagaaaaacaaaacaaggcgagtcaca

SEQ ID NO: 9616 - DNA, 33 bp, Homo sapien
cttgagaagaaaaacagaacaaggcgagtcaca

SEQ ID NO: 9617 - DNA, 33 bp, Homo sapien
gaccaagatatacactcaccccacacaatcaca

SEQ ID NO: 9618 - DNA, 33 bp, Homo sapien
gaccaagatatacactgaccccacacaatcaca

SEQ ID NO: 9619 - DNA, 33 bp, Homo sapien
ttttcacttgtttcaaaatcatccataattgct

SEQ ID NO: 9620 - DNA, 33 bp, Homo sapien
ttttcacttgtttcaagatcatccataattgct

SEQ ID NO: 9621 - DNA, 33 bp, Homo sapien
taggtaggttgaaatgaaaagaatggaaagaga

SEQ ID NO: 9622 - DNA, 33 bp, Homo sapien
taggtaggttgaaatggaaagaatggaaagaga

SEQ ID NO: 9623 - DNA, 33 bp, Homo sapien
aaacaactccacctaactgatattcatagacca

SEQ ID NO: 9624 - DNA, 33 bp, Homo sapien
aaacaactccacctaattgatattcatagacca

SEQ ID NO: 9625 - DNA, 33 bp, Homo sapien
ctgtgccctgcaggtcaaaggccaacagagcag

SEQ ID NO: 9626 - DNA, 33 bp, Homo sapien
ctgtgccctgcaggtcgaaggccaacagagcag

SEQ ID NO: 9627 - DNA, 33 bp, Homo sapien
agggagaggtgaataactccaacccagcagctg

SEQ ID NO: 9628 - DNA, 33 bp, Homo sapien
agggagaggtgaataagtccaacccagcagctg

SEQ ID NO: 9629 - DNA, 33 bp, Homo sapien
gtgtttttaaaaacacacagagcaaacatacat

SEQ ID NO: 9630 - DNA, 33 bp, Homo sapien
gtgtttttaaaaacacgcagagcaaacatacat

SEQ ID NO: 9631 - DNA, 33 bp, Homo sapien
ggggaggggagatcaaaaagtagacattttaca

SEQ ID NO: 9632 - DNA, 33 bp, Homo sapien
ggggaggggagatcaagaagtagacattttaca

SEQ ID NO: 9633 - DNA, 33 bp, Homo sapien
taattaaaatatgttcaagagacctgggctcaa

SEQ ID NO: 9634 - DNA, 33 bp, Homo sapien
taattaaaatatgttcgagagacctgggctcaa

SEQ ID NO: 9635 - DNA, 33 bp, Homo sapien
gcctacttgccactcacacctcaccaggtgctc

SEQ ID NO: 9636 - DNA, 33 bp, Homo sapien
gcctacttgccactcatacctcaccaggtgctc

SEQ ID NO: 9637 - DNA, 33 bp, Homo sapien
ggtagattttaatgcacggccacaagttcctcc

SEQ ID NO: 9638 - DNA, 33 bp, Homo sapien
ggtagattttaatgcatggccacaagttcctcc

SEQ ID NO: 9639 - DNA, 33 bp, Homo sapien
aggtatgaatgaacgcgctccttttttgcatat

SEQ ID NO: 9640 - DNA, 33 bp, Homo sapien
aggtatgaatgaacgctctccttttttgcatat

SEQ ID NO: 9641 - DNA, 33 bp, Homo sapien
atgtatttaaaatgtacaattggctatgttttg

SEQ ID NO: 9642 - DNA, 33 bp, Homo sapien
atgtatttaaaatgtataattggctatgttttg

SEQ ID NO: 9643 - DNA, 33 bp, Homo sapien
ctgtctttggaggataagacagcaaagttaaag

SEQ ID NO: 9644 - DNA, 33 bp, Homo sapien
ctgtctttggaggataggacagcaaagttaaag

SEQ ID NO: 9645 - DNA, 33 bp, Homo sapien
ttggcagagccttatccatctatggtgactact

SEQ ID NO: 9646 - DNA, 33 bp, Homo sapien
ttggcagagccttatctatctatggtgactact

SEQ ID NO: 9647 - DNA, 33 bp, Homo sapien
gtgggtctcatcagaaacgtgccagagggttag

SEQ ID NO: 9648 - DNA, 33 bp, Homo sapien
gtgggtctcatcagaaccgtgccagagggttag

SEQ ID NO: 9649 - DNA, 33 bp, Homo sapien
tggttggagaggagcagagaatagtggggctgt

SEQ ID NO: 9650 - DNA, 33 bp, Homo sapien
tggttggagaggagcatagaatagtggggctgt

SEQ ID NO: 9651 - DNA, 33 bp, Homo sapien
tggagatgatgatgataataagttgaattgtgt

SEQ ID NO: 9652 - DNA, 33 bp, Homo sapien
tggagatgatgatgattataagttgaattgtgt

SEQ ID NO: 9653 - DNA, 33 bp, Homo sapien
tcccacttagatgagtcaatgcatttcctttta

SEQ ID NO: 9654 - DNA, 33 bp, Homo sapien
tcccacttagatgagttaatgcatttcctttta

SEQ ID NO: 9655 - DNA, 33 bp, Homo sapien
tttctcatgaattatcacgttcagtccatgtaa

SEQ ID NO: 9656 - DNA, 33 bp, Homo sapien
tttctcatgaattatcgcgttcagtccatgtaa

SEQ ID NO: 9657 - DNA, 33 bp, Homo sapien
aatgcccagcagtacacacagtctctgttcagt

SEQ ID NO: 9658 - DNA, 33 bp, Homo sapien
aatgcccagcagtacatacagtctctgttcagt

SEQ ID NO: 9659 - DNA, 33 bp, Homo sapien
ggtttgggaaagggtgaacatatccctgtatcc

SEQ ID NO: 9660 - DNA, 33 bp, Homo sapien
ggtttgggaaagggtgcacatatccctgtatcc

SEQ ID NO: 9661 - DNA, 33 bp, Homo sapien
gaatagagaagggatccgaaactcattttatgg

SEQ ID NO: 9662 - DNA, 33 bp, Homo sapien
gaatagagaagggatctgaaactcattttatgg

SEQ ID NO: 9663 - DNA, 33 bp, Homo sapien
gatagattctcagttacacttgactttcagcta

SEQ ID NO: 9664 - DNA, 33 bp, Homo sapien
gatagattctcagttatacttgactttcagcta

SEQ ID NO: 9665 - DNA, 33 bp, Homo sapien
aagtacaataaaatctcactaatgaaaactgat

SEQ ID NO: 9666 - DNA, 33 bp, Homo sapien
aagtacaataaaatctgactaatgaaaactgat

SEQ ID NO: 9667 - DNA, 33 bp, Homo sapien
aaggcttgttaaaccacagcacatggagcgcag

SEQ ID NO: 9668 - DNA, 33 bp, Homo sapien
aaggcttgttaaaccatagcacatggagcgcag

SEQ ID NO: 9669 - DNA, 33 bp, Homo sapien
acagggtgccagaaaacgtgcaagacactagtg

SEQ ID NO: 9670 - DNA, 33 bp, Homo sapien
acagggtgccagaaaatgtgcaagacactagtg

SEQ ID NO: 9671 - DNA, 33 bp, Homo sapien
tcctataactggaaaagctgtcctttaaaaggt

SEQ ID NO: 9672 - DNA, 33 bp, Homo sapien
tcctataactggaaaatctgtcctttaaaaggt

SEQ ID NO: 9673 - DNA, 33 bp, Homo sapien
tttggaggccagaagaaaataagctgatatatt

SEQ ID NO: 9674 - DNA, 33 bp, Homo sapien
tttggaggccagaagagaataagctgatatatt

SEQ ID NO: 9675 - DNA, 33 bp, Homo sapien
aaaacagtgaggaaaactgaatagaacctaagg

SEQ ID NO: 9676 - DNA, 33 bp, Homo sapien
aaaacagtgaggaaaagtgaatagaacctaagg

SEQ ID NO: 9677 - DNA, 33 bp, Homo sapien
agagaaaggcttagacagtaaatggcagtcagc

SEQ ID NO: 9678 - DNA, 33 bp, Homo sapien
agagaaaggcttagacggtaaatggcagtcagc

SEQ ID NO: 9679 - DNA, 33 bp, Homo sapien
tcttagttcttctacacaccagctgtggggctg

SEQ ID NO: 9680 - DNA, 33 bp, Homo sapien
tcttagttcttctacataccagctgtggggctg

SEQ ID NO: 9681 - DNA, 33 bp, Homo sapien
acatggacaataagaacagttataacattattt

SEQ ID NO: 9682 - DNA, 33 bp, Homo sapien
acatggacaataagaagagttataacattattt

SEQ ID NO: 9683 - DNA, 33 bp, Homo sapien
atctgaatctgcacctgaatgagtttcccaggt

SEQ ID NO: 9684 - DNA, 33 bp, Homo sapien
atctgaatctgcaccttaatgagtttcccaggt

SEQ ID NO: 9685 - DNA, 33 bp, Homo sapien
ctgacatgtttctctgaaaaatttagatgtatc

SEQ ID NO: 9686 - DNA, 33 bp, Homo sapien
ctgacatgtttctctggaaaatttagatgtatc

SEQ ID NO: 9687 - DNA, 33 bp, Homo sapien
caagggtgagcatgtaactgagggctgactgat

SEQ ID NO: 9688 - DNA, 33 bp, Homo sapien
caagggtgagcatgtatctgagggctgactgat

SEQ ID NO: 9689 - DNA, 33 bp, Homo sapien
tggcttcccagagggcaaaggacagagtgggag

SEQ ID NO: 9690 - DNA, 33 bp, Homo sapien
tggcttcccagagggcgaaggacagagtgggag

SEQ ID NO: 9691 - DNA, 33 bp, Homo sapien
ctgagaaggacagaaacatgcgggcaggatgta

SEQ ID NO: 9692 - DNA, 33 bp, Homo sapien
ctgagaaggacagaaatatgcgggcaggatgta

SEQ ID NO: 9693 - DNA, 33 bp, Homo sapien
aaaagacacaacctcacgctggtcaccactgac

SEQ ID NO: 9694 - DNA, 33 bp, Homo sapien
aaaagacacaacctcatgctggtcaccactgac

SEQ ID NO: 9695 - DNA, 33 bp, Homo sapien
catctcctgactcatacccgatgctctgtctgc

SEQ ID NO: 9696 - DNA, 33 bp, Homo sapien
catctcctgactcatatccgatgctctgtctgc

SEQ ID NO: 9697 - DNA, 33 bp, Homo sapien
agacacacgaataaaaatggctgaggcagtcac

SEQ ID NO: 9698 - DNA, 33 bp, Homo sapien
agacacacgaataaaagtggctgaggcagtcac

SEQ ID NO: 9699 - DNA, 33 bp, Homo sapien
ggacctgggttggcaccacttacgcctatggga

SEQ ID NO: 9700 - DNA, 33 bp, Homo sapien
ggacctgggttggcactacttacgcctatggga

SEQ ID NO: 9701 - DNA, 33 bp, Homo sapien
tattcctgcacatctcaattttgcattcttcct

SEQ ID NO: 9702 - DNA, 33 bp, Homo sapien
tattcctgcacatctcgattttgcattcttcct

SEQ ID NO: 9703 - DNA, 33 bp, Homo sapien
gcacctagtacagtaaatgctcaaatctttgtg

SEQ ID NO: 9704 - DNA, 33 bp, Homo sapien
gcacctagtacagtaagtgctcaaatctttgtg

SEQ ID NO: 9705 - DNA, 33 bp, Homo sapien
ggcacagactcacaacgaagggcccatgtttat

SEQ ID NO: 9706 - DNA, 33 bp, Homo sapien
ggcacagactcacaactaagggcccatgtttat

SEQ ID NO: 9707 - DNA, 33 bp, Homo sapien
acagcagctactgcaaaatttggatttggtttg

SEQ ID NO: 9708 - DNA, 33 bp, Homo sapien
acagcagctactgcaatatttggatttggtttg

SEQ ID NO: 9709 - DNA, 33 bp, Homo sapien
acatgttgatagggccaaatgagctttagtgcc

SEQ ID NO: 9710 - DNA, 33 bp, Homo sapien
acatgttgatagggccgaatgagctttagtgcc

SEQ ID NO: 9711 - DNA, 33 bp, Homo sapien
ccttttttgagattgtaaagcagagtctcagaa

SEQ ID NO: 9712 - DNA, 33 bp, Homo sapien
ccttttttgagattgtgaagcagagtctcagaa

SEQ ID NO: 9713 - DNA, 33 bp, Homo sapien
accaccaccatctccaaaatttttcatcttccc

SEQ ID NO: 9714 - DNA, 33 bp, Homo sapien
accaccaccatctccagaatttttcatcttccc

SEQ ID NO: 9715 - DNA, 33 bp, Homo sapien
ggccataaactggctccgaaactggccataaac

SEQ ID NO: 9716 - DNA, 33 bp, Homo sapien
ggccataaactggctctgaaactggccataaac

SEQ ID NO: 9717 - DNA, 33 bp, Homo sapien
aggcagagcttttggacgaataagtggtggatc

SEQ ID NO: 9718 - DNA, 33 bp, Homo sapien
aggcagagcttttggatgaataagtggtggatc

SEQ ID NO: 9719 - DNA, 33 bp, Homo sapien
tgagccaagcaaatcaccccagctcaaaggcag

SEQ ID NO: 9720 - DNA, 33 bp, Homo sapien
tgagccaagcaaatcagcccagctcaaaggcag

SEQ ID NO: 9721 - DNA, 33 bp, Homo sapien
gtctccagcaactactaaaaacgctgcatgcca

SEQ ID NO: 9722 - DNA, 33 bp, Homo sapien
gtctccagcaactactgaaaacgctgcatgcca

SEQ ID NO: 9723 - DNA, 33 bp, Homo sapien
ctggggttggatgcagaagttgagaaggacaga

SEQ ID NO: 9724 - DNA, 33 bp, Homo sapien
ctggggttggatgcaggagttgagaaggacaga

SEQ ID NO: 9725 - DNA, 33 bp, Homo sapien
tcaactccccaacaacaactttcattgctcctc

SEQ ID NO: 9726 - DNA, 33 bp, Homo sapien
tcaactccccaacaacgactttcattgctcctc

SEQ ID NO: 9727 - DNA, 33 bp, Homo sapien
gttgcatatctacaaaacgatgtgtcctttggg

SEQ ID NO: 9728 - DNA, 33 bp, Homo sapien
gttgcatatctacaaagcgatgtgtcctttggg

SEQ ID NO: 9729 - DNA, 33 bp, Homo sapien
atattctgcagtgcccccaaccccaaaggacac

SEQ ID NO: 9730 - DNA, 33 bp, Homo sapien
atattctgcagtgcccgcaaccccaaaggacac

SEQ ID NO: 9731 - DNA, 33 bp, Homo sapien
agccctttgacctaaaaaaccagcacagggatg

SEQ ID NO: 9732 - DNA, 33 bp, Homo sapien
agccctttgacctaaacaaccagcacagggatg

SEQ ID NO: 9733 - DNA, 33 bp, Homo sapien
gtatgtcttgaaagtaacgattgcattttccta

SEQ ID NO: 9734 - DNA, 33 bp, Homo sapien
gtatgtcttgaaagtaccgattgcattttccta

SEQ ID NO: 9735 - DNA, 33 bp, Homo sapien
cctgagtgaaaatgagcccttgtggtttcaagc

SEQ ID NO: 9736 - DNA, 33 bp, Homo sapien
cctgagtgaaaatgagtccttgtggtttcaagc

SEQ ID NO: 9737 - DNA, 33 bp, Homo sapien
agatggatattgatacaaagatcagtgcttagg

SEQ ID NO: 9738 - DNA, 33 bp, Homo sapien
agatggatattgatacgaagatcagtgcttagg

SEQ ID NO: 9739 - DNA, 33 bp, Homo sapien
cagacttgaacttggcacttcccgtcccacagc

SEQ ID NO: 9740 - DNA, 33 bp, Homo sapien
cagacttgaacttggcccttcccgtcccacagc

SEQ ID NO: 9741 - DNA, 33 bp, Homo sapien
tagagagctgggcacacggttaagcactcaagg

SEQ ID NO: 9742 - DNA, 33 bp, Homo sapien
tagagagctgggcacatggttaagcactcaagg

SEQ ID NO: 9743 - DNA, 33 bp, Homo sapien
gttctggggctgcttcaacctctgtcactccac

SEQ ID NO: 9744 - DNA, 33 bp, Homo sapien
gttctggggctgcttcgacctctgtcactccac

SEQ ID NO: 9745 - DNA, 33 bp, Homo sapien
tgggagtaagtgggaaaggtcaagactggacca

SEQ ID NO: 9746 - DNA, 33 bp, Homo sapien
tgggagtaagtgggaagggtcaagactggacca

SEQ ID NO: 9747 - DNA, 33 bp, Homo sapien
ctgtgaggaaaggcacaatgaataaacattcat

SEQ ID NO: 9748 - DNA, 33 bp, Homo sapien
ctgtgaggaaaggcacgatgaataaacattcat

SEQ ID NO: 9749 - DNA, 33 bp, Homo sapien
ggcattgcctatagaacaggtaactcgcttgcc

SEQ ID NO: 9750 - DNA, 33 bp, Homo sapien
ggcattgcctatagaagaggtaactcgcttgcc

SEQ ID NO: 9751 - DNA, 33 bp, Homo sapien
ctggactgattcttgcccatccctctaggttcc

SEQ ID NO: 9752 - DNA, 33 bp, Homo sapien
ctggactgattcttgctcatccctctaggttcc

SEQ ID NO: 9753 - DNA, 33 bp, Homo sapien
aacaaagaagagatgtaacaaaaagacaataaa

SEQ ID NO: 9754 - DNA, 33 bp, Homo sapien
aacaaagaagagatgtgacaaaaagacaataaa

SEQ ID NO: 9755 - DNA, 33 bp, Homo sapien
ttcagtgacttatatacattcctattgttatgc

SEQ ID NO: 9756 - DNA, 33 bp, Homo sapien
ttcagtgacttatatagattcctattgttatgc

SEQ ID NO: 9757 - DNA, 33 bp, Homo sapien
gttctggattctaaggcatgctggggttcatgc

SEQ ID NO: 9758 - DNA, 33 bp, Homo sapien
gttctggattctaaggtatgctggggttcatgc

SEQ ID NO: 9759 - DNA, 33 bp, Homo sapien
tctccagtatgtccttaaagatgaccttgaagg

SEQ ID NO: 9760 - DNA, 33 bp, Homo sapien
tctccagtatgtccttgaagatgaccttgaagg

SEQ ID NO: 9761 - DNA, 33 bp, Homo sapien
ccctgaccaggcaaagcctctagacagttaaag

SEQ ID NO: 9762 - DNA, 33 bp, Homo sapien
ccctgaccaggcaaagtctctagacagttaaag

SEQ ID NO: 9763 - DNA, 33 bp, Homo sapien
tcttcttgtactgcaccgtaggcacctggagcc

SEQ ID NO: 9764 - DNA, 33 bp, Homo sapien
tcttcttgtactgcactgtaggcacctggagcc

SEQ ID NO: 9765 - DNA, 33 bp, Homo sapien
caagtctgccgtttacagaaggacctgacgctc

SEQ ID NO: 9766 - DNA, 33 bp, Homo sapien
caagtctgccgtttacggaaggacctgacgctc

SEQ ID NO: 9767 - DNA, 33 bp, Homo sapien
aaatggccacttgtcaacaaagccggtctccac

SEQ ID NO: 9768 - DNA, 33 bp, Homo sapien
aaatggccacttgtcagcaaagccggtctccac

SEQ ID NO: 9769 - DNA, 33 bp, Homo sapien
gccaaatctcatcctaacttgtcctgacagtct

SEQ ID NO: 9770 - DNA, 33 bp, Homo sapien
gccaaatctcatcctagcttgtcctgacagtct

SEQ ID NO: 9771 - DNA, 33 bp, Homo sapien
aataagggtgaaaaatcatctttgtggttttag

SEQ ID NO: 9772 - DNA, 33 bp, Homo sapien
aataagggtgaaaaatgatctttgtggttttag

SEQ ID NO: 9773 - DNA, 33 bp, Homo sapien
aggagaagatgagaacaagtcatgtagccaaat

SEQ ID NO: 9774 - DNA, 33 bp, Homo sapien
aggagaagatgagaacgagtcatgtagccaaat

SEQ ID NO: 9775 - DNA, 33 bp, Homo sapien
taggctggattatttaagaaaacagacttgtag

SEQ ID NO: 9776 - DNA, 33 bp, Homo sapien
taggctggattatttaggaaaacagacttgtag

SEQ ID NO: 9777 - DNA, 33 bp, Homo sapien
catgcggggaaagtaacttacagagcggaaaac

SEQ ID NO: 9778 - DNA, 33 bp, Homo sapien
catgcggggaaagtaatttacagagcggaaaac

SEQ ID NO: 9779 - DNA, 33 bp, Homo sapien
cctctggctggtgacgaccttacttgggtcttg

SEQ ID NO: 9780 - DNA, 33 bp, Homo sapien
cctctggctggtgacgcccttacttgggtcttg

SEQ ID NO: 9781 - DNA, 33 bp, Homo sapien
aaaaaactcttggttcaataccctcatttaaca

SEQ ID NO: 9782 - DNA, 33 bp, Homo sapien
aaaaaactcttggttcgataccctcatttaaca

SEQ ID NO: 9783 - DNA, 33 bp, Homo sapien
accccgagtatgcatgaacagaacgaacctgtt

SEQ ID NO: 9784 - DNA, 33 bp, Homo sapien
accccgagtatgcatgcacagaacgaacctgtt

SEQ ID NO: 9785 - DNA, 33 bp, Homo sapien
ttcctgcttgtaatgcaacattaagtcccatta

SEQ ID NO: 9786 - DNA, 33 bp, Homo sapien
ttcctgcttgtaatgcgacattaagtcccatta

SEQ ID NO: 9787 - DNA, 33 bp, Homo sapien
gcatctttactatgacaagtcttccaaactaag

SEQ ID NO: 9788 - DNA, 33 bp, Homo sapien
gcatctttactatgacgagtcttccaaactaag

SEQ ID NO: 9789 - DNA, 33 bp, Homo sapien
agtaacttactgaaggacacacagttagtaagc

SEQ ID NO: 9790 - DNA, 33 bp, Homo sapien
agtaacttactgaaggtcacacagttagtaagc

SEQ ID NO: 9791 - DNA, 33 bp, Homo sapien
ggaggggcctggacaccggagcaaattgatgac

SEQ ID NO: 9792 - DNA, 33 bp, Homo sapien
ggaggggcctggacactggagcaaattgatgac

SEQ ID NO: 9793 - DNA, 33 bp, Homo sapien
tattagagaggcaaaacacaaattctaggtact

SEQ ID NO: 9794 - DNA, 33 bp, Homo sapien
tattagagaggcaaaatacaaattctaggtact

SEQ ID NO: 9795 - DNA, 33 bp, Homo sapien
gagggtggttggacaagccttgttttccagagc

SEQ ID NO: 9796 - DNA, 33 bp, Homo sapien
gagggtggttggacaatccttgttttccagagc

SEQ ID NO: 9797 - DNA, 33 bp, Homo sapien
ggagagaatatctctgcagacccaacttggcag

SEQ ID NO: 9798 - DNA, 33 bp, Homo sapien
ggagagaatatctctgtagacccaacttggcag

SEQ ID NO: 9799 - DNA, 33 bp, Homo sapien
ggggcatgtgggcttaaaaatcagggtgcctac

SEQ ID NO: 9800 - DNA, 33 bp, Homo sapien
ggggcatgtgggcttacaaatcagggtgcctac

SEQ ID NO: 9801 - DNA, 33 bp, Homo sapien
acccagaatcccacagacagtcagtggcacagc

SEQ ID NO: 9802 - DNA, 33 bp, Homo sapien
acccagaatcccacagccagtcagtggcacagc

SEQ ID NO: 9803 - DNA, 33 bp, Homo sapien
catcttagagtctggaccgaaggactgagtgtg

SEQ ID NO: 9804 - DNA, 33 bp, Homo sapien
catcttagagtctggatcgaaggactgagtgtg

SEQ ID NO: 9805 - DNA, 33 bp, Homo sapien
ctaccctaaggaccaacttaaaatgatgcctcc

SEQ ID NO: 9806 - DNA, 33 bp, Homo sapien
ctaccctaaggaccaagttaaaatgatgcctcc

SEQ ID NO: 9807 - DNA, 33 bp, Homo sapien
aaatgattgtggatgacgaaagcaaaataagtt

SEQ ID NO: 9808 - DNA, 33 bp, Homo sapien
aaatgattgtggatgatgaaagcaaaataagtt

SEQ ID NO: 9809 - DNA, 33 bp, Homo sapien
aggagaccaggaaagaacctcttccgcattttc

SEQ ID NO: 9810 - DNA, 33 bp, Homo sapien
aggagaccaggaaagagcctcttccgcattttc

SEQ ID NO: 9811 - DNA, 33 bp, Homo sapien
ttgatgtgtagtagcccagaagcacattctaag

SEQ ID NO: 9812 - DNA, 33 bp, Homo sapien
ttgatgtgtagtagccgagaagcacattctaag

SEQ ID NO: 9813 - DNA, 33 bp, Homo sapien
gctactacacatcaagacaactgaaaacagcag

SEQ ID NO: 9814 - DNA, 33 bp, Homo sapien
gctactacacatcaagtcaactgaaaacagcag

SEQ ID NO: 9815 - DNA, 33 bp, Homo sapien
tgagcagctgtatcctcacagggctgacaccgg

SEQ ID NO: 9816 - DNA, 33 bp, Homo sapien
tgagcagctgtatcctgacagggctgacaccgg

SEQ ID NO: 9817 - DNA, 33 bp, Homo sapien
gagaaatactagaagaaaggttaggaccgtgga

SEQ ID NO: 9818 - DNA, 33 bp, Homo sapien
gagaaatactagaagagaggttaggaccgtgga

SEQ ID NO: 9819 - DNA, 33 bp, Homo sapien
ttgtgttttaatcatcaacatatttgcctgtag

SEQ ID NO: 9820 - DNA, 33 bp, Homo sapien
ttgtgttttaatcatcgacatatttgcctgtag

SEQ ID NO: 9821 - DNA, 33 bp, Homo sapien
tgaattgataattctcactaagcacattgctag

SEQ ID NO: 9822 - DNA, 33 bp, Homo sapien
tgaattgataattctcgctaagcacattgctag

SEQ ID NO: 9823 - DNA, 33 bp, Homo sapien
agcagagtggtaaagaacgtgctggctggagtc

SEQ ID NO: 9824 - DNA, 33 bp, Homo sapien
agcagagtggtaaagagcgtgctggctggagtc

SEQ ID NO: 9825 - DNA, 33 bp, Homo sapien
ccagtgtttctacgacaggctgtttggctttat

SEQ ID NO: 9826 - DNA, 33 bp, Homo sapien
ccagtgtttctacgacgggctgtttggctttat

SEQ ID NO: 9827 - DNA, 33 bp, Homo sapien
ggaagctcctacagcaagtttgaaaaataaaga

SEQ ID NO: 9828 - DNA, 33 bp, Homo sapien
ggaagctcctacagcaggtttgaaaaataaaga

SEQ ID NO: 9829 - DNA, 33 bp, Homo sapien
cagggaggtcaaaccacgtcttgctgttgtttg

SEQ ID NO: 9830 - DNA, 33 bp, Homo sapien
cagggaggtcaaaccaggtcttgctgttgtttg

SEQ ID NO: 9831 - DNA, 33 bp, Homo sapien
agagaacaggcgatgcaatcacttctatgaaaa

SEQ ID NO: 9832 - DNA, 33 bp, Homo sapien
agagaacaggcgatgcgatcacttctatgaaaa

SEQ ID NO: 9833 - DNA, 33 bp, Homo sapien
ggtgagaagacatggcactaggaaaagtcattc

SEQ ID NO: 9834 - DNA, 33 bp, Homo sapien
ggtgagaagacatggcgctaggaaaagtcattc

SEQ ID NO: 9835 - DNA, 33 bp, Homo sapien
catcttctgcaaaaagaaaacaagaggcaggag

SEQ ID NO: 9836 - DNA, 33 bp, Homo sapien
catcttctgcaaaaagcaaacaagaggcaggag

SEQ ID NO: 9837 - DNA, 33 bp, Homo sapien
taaaattcaatatgtgcagtgagagataagaag

SEQ ID NO: 9838 - DNA, 33 bp, Homo sapien
taaaattcaatatgtgtagtgagagataagaag

SEQ ID NO: 9839 - DNA, 33 bp, Homo sapien
aatgaggtacaattacaaagctattaacatcat

SEQ ID NO: 9840 - DNA, 33 bp, Homo sapien
aatgaggtacaattacgaagctattaacatcat

SEQ ID NO: 9841 - DNA, 33 bp, Homo sapien
catgataggctctaaacgccaggatagaggggt

SEQ ID NO: 9842 - DNA, 33 bp, Homo sapien
catgataggctctaaatgccaggatagaggggt

SEQ ID NO: 9843 - DNA, 33 bp, Homo sapien
ctttgaaatatgggacaaggatagcagaagata

SEQ ID NO: 9844 - DNA, 33 bp, Homo sapien
ctttgaaatatgggactaggatagcagaagata

SEQ ID NO: 9845 - DNA, 33 bp, Homo sapien
cacacttaggaccaacaaacagatagagaaact

SEQ ID NO: 9846 - DNA, 33 bp, Homo sapien
cacacttaggaccaaccaacagatagagaaact

SEQ ID NO: 9847 - DNA, 33 bp, Homo sapien
aacatggtcctgatgaacttagctgatgcagcc

SEQ ID NO: 9848 - DNA, 33 bp, Homo sapien
aacatggtcctgatgagcttagctgatgcagcc

SEQ ID NO: 9849 - DNA, 33 bp, Homo sapien
caggaggaaaacatcccgaggagcccataggtg

SEQ ID NO: 9850 - DNA, 33 bp, Homo sapien
caggaggaaaacatcctgaggagcccataggtg

SEQ ID NO: 9851 - DNA, 33 bp, Homo sapien
gtttgggtatttacaacaaaaaggcatgtgttt

SEQ ID NO: 9852 - DNA, 33 bp, Homo sapien
gtttgggtatttacaataaaaaggcatgtgttt

SEQ ID NO: 9853 - DNA, 33 bp, Homo sapien
agcacttgacctctccaagtcacggtttctcca

SEQ ID NO: 9854 - DNA, 33 bp, Homo sapien
agcacttgacctctccgagtcacggtttctcca

SEQ ID NO: 9855 - DNA, 33 bp, Homo sapien
gagttaagggttccaacgtctatttgagcacat

SEQ ID NO: 9856 - DNA, 33 bp, Homo sapien
gagttaagggttccaatgtctatttgagcacat

SEQ ID NO: 9857 - DNA, 33 bp, Homo sapien
acacagagaaataggaactctcccttattcttg

SEQ ID NO: 9858 - DNA, 33 bp, Homo sapien
acacagagaaataggagctctcccttattcttg

SEQ ID NO: 9859 - DNA, 33 bp, Homo sapien
tttacaggcaacaaaaaattgacacatttctaa

SEQ ID NO: 9860 - DNA, 33 bp, Homo sapien
tttacaggcaacaaaatattgacacatttctaa

SEQ ID NO: 9861 - DNA, 33 bp, Homo sapien
cattccagaatcatggaaactcaagagttgagg

SEQ ID NO: 9862 - DNA, 33 bp, Homo sapien
cattccagaatcatggtaactcaagagttgagg

SEQ ID NO: 9863 - DNA, 33 bp, Homo sapien
agggaatgagtaggagacacagctaaacaaatg

SEQ ID NO: 9864 - DNA, 33 bp, Homo sapien
agggaatgagtaggagtcacagctaaacaaatg

SEQ ID NO: 9865 - DNA, 33 bp, Homo sapien
ccaaatacctaaagggaaatgaggcctggaact

SEQ ID NO: 9866 - DNA, 33 bp, Homo sapien
ccaaatacctaaagggcaatgaggcctggaact

SEQ ID NO: 9867 - DNA, 33 bp, Homo sapien
cttgtaaggtttctgccaacagatccattgtta

SEQ ID NO: 9868 - DNA, 33 bp, Homo sapien
cttgtaaggtttctgctaacagatccattgtta

SEQ ID NO: 9869 - DNA, 33 bp, Homo sapien
gatggaaaagacaacaaaggaaaatcaagggga

SEQ ID NO: 9870 - DNA, 33 bp, Homo sapien
gatggaaaagacaacagaggaaaatcaagggga

SEQ ID NO: 9871 - DNA, 33 bp, Homo sapien
atggtggaaatatctacaccacagaaactggca

SEQ ID NO: 9872 - DNA, 33 bp, Homo sapien
atggtggaaatatctataccacagaaactggca

SEQ ID NO: 9873 - DNA, 33 bp, Homo sapien
gaccagtaactgagggcaataaagctccaggag

SEQ ID NO: 9874 - DNA, 33 bp, Homo sapien
gaccagtaactgagggtaataaagctccaggag

SEQ ID NO: 9875 - DNA, 33 bp, Homo sapien
tcatcttccctgctgccagtttgtgagttcacc

SEQ ID NO: 9876 - DNA, 33 bp, Homo sapien
tcatcttccctgctgctagtttgtgagttcacc

SEQ ID NO: 9877 - DNA, 33 bp, Homo sapien
tacctttattttccacaaagtctcctaatggtg

SEQ ID NO: 9878 - DNA, 33 bp, Homo sapien
tacctttattttccaccaagtctcctaatggtg

SEQ ID NO: 9879 - DNA, 33 bp, Homo sapien
cacttacttgggcaacccacttcctctgagcct

SEQ ID NO: 9880 - DNA, 33 bp, Homo sapien
cacttacttgggcaactcacttcctctgagcct

SEQ ID NO: 9881 - DNA, 33 bp, Homo sapien
ctggagcctctggaaccgtctgagcccaactct

SEQ ID NO: 9882 - DNA, 33 bp, Homo sapien
ctggagcctctggaactgtctgagcccaactct

SEQ ID NO: 9883 - DNA, 33 bp, Homo sapien
aaagaccaggaagaaacgatgtcagagaaaagc

SEQ ID NO: 9884 - DNA, 33 bp, Homo sapien
aaagaccaggaagaaatgatgtcagagaaaagc

SEQ ID NO: 9885 - DNA, 33 bp, Homo sapien
cctggccaagagtcgacatgtctattcaacatg

SEQ ID NO: 9886 - DNA, 33 bp, Homo sapien
cctggccaagagtcgatatgtctattcaacatg

SEQ ID NO: 9887 - DNA, 33 bp, Homo sapien
tgcatttatcctacacagagtttgttgagcttc

SEQ ID NO: 9888 - DNA, 33 bp, Homo sapien
tgcatttatcctacacggagtttgttgagcttc

SEQ ID NO: 9889 - DNA, 33 bp, Homo sapien
ataccaacatacacataatgggacttccagaat

SEQ ID NO: 9890 - DNA, 33 bp, Homo sapien
ataccaacatacacatgatgggacttccagaat

SEQ ID NO: 9891 - DNA, 33 bp, Homo sapien
agctcagaagcttatacggcactatcaagcata

SEQ ID NO: 9892 - DNA, 33 bp, Homo sapien
agctcagaagcttatatggcactatcaagcata

SEQ ID NO: 9893 - DNA, 33 bp, Homo sapien
ccagcttcaggatttccatttgactattttaaa

SEQ ID NO: 9894 - DNA, 33 bp, Homo sapien
ccagcttcaggatttctatttgactattttaaa

SEQ ID NO: 9895 - DNA, 33 bp, Homo sapien
ctttttgttgtctggacgtatttataatagcta

SEQ ID NO: 9896 - DNA, 33 bp, Homo sapien
ctttttgttgtctggatgtatttataatagcta

SEQ ID NO: 9897 - DNA, 33 bp, Homo sapien
ttaagtaggactcttaccttatactgtatataa

SEQ ID NO: 9898 - DNA, 33 bp, Homo sapien
ttaagtaggactcttatcttatactgtatataa

SEQ ID NO: 9899 - DNA, 33 bp, Homo sapien
acccgtgcaacaggaaaagccgtgttacccgcc

SEQ ID NO: 9900 - DNA, 33 bp, Homo sapien
acccgtgcaacaggaagagccgtgttacccgcc

SEQ ID NO: 9901 - DNA, 33 bp, Homo sapien
gtctttgatatatggaagctgtcaccacacaga

SEQ ID NO: 9902 - DNA, 33 bp, Homo sapien
gtctttgatatatggaggctgtcaccacacaga

SEQ ID NO: 9903 - DNA, 33 bp, Homo sapien
gattgtggtgaacagaaaatttgatctccggcc

SEQ ID NO: 9904 - DNA, 33 bp, Homo sapien
gattgtggtgaacagagaatttgatctccggcc

SEQ ID NO: 9905 - DNA, 33 bp, Homo sapien
ggctgctagaaatgcaaaaatgcttctcaggag

SEQ ID NO: 9906 - DNA, 33 bp, Homo sapien
ggctgctagaaatgcagaaatgcttctcaggag

SEQ ID NO: 9907 - DNA, 33 bp, Homo sapien
ttaaatgacactgtggaaactgttttatttgca

SEQ ID NO: 9908 - DNA, 33 bp, Homo sapien
ttaaatgacactgtggtaactgttttatttgca

SEQ ID NO: 9909 - DNA, 33 bp, Homo sapien
atggggatggagctaactgattcatgaagatcc

SEQ ID NO: 9910 - DNA, 33 bp, Homo sapien
atggggatggagctaagtgattcatgaagatcc

SEQ ID NO: 9911 - DNA, 33 bp, Homo sapien
agccagtgtggcataactgtggggatttccata

SEQ ID NO: 9912 - DNA, 33 bp, Homo sapien
agccagtgtggcataagtgtggggatttccata

SEQ ID NO: 9913 - DNA, 33 bp, Homo sapien
caaataatgccagtgaacctgcagcacagtgga

SEQ ID NO: 9914 - DNA, 33 bp, Homo sapien
caaataatgccagtgagcctgcagcacagtgga

SEQ ID NO: 9915 - DNA, 33 bp, Homo sapien
aaaattcaagacagaacgcaagaataccaagat

SEQ ID NO: 9916 - DNA, 33 bp, Homo sapien
aaaattcaagacagaatgcaagaataccaagat

SEQ ID NO: 9917 - DNA, 33 bp, Homo sapien
ctatacagaggaacaaattatttattcatacac

SEQ ID NO: 9918 - DNA, 33 bp, Homo sapien
ctatacagaggaacaagttatttattcatacac

SEQ ID NO: 9919 - DNA, 33 bp, Homo sapien
gccagctgtcgctagaatccctgacatagtgca

SEQ ID NO: 9920 - DNA, 33 bp, Homo sapien
gccagctgtcgctagagtccctgacatagtgca

SEQ ID NO: 9921 - DNA, 33 bp, Homo sapien
gtatatggctataacaacaagcaattctctctt

SEQ ID NO: 9922 - DNA, 33 bp, Homo sapien
gtatatggctataacagcaagcaattctctctt

SEQ ID NO: 9923 - DNA, 33 bp, Homo sapien
ctatcactcctgtcacccttgctttgggaaggt

SEQ ID NO: 9924 - DNA, 33 bp, Homo sapien
ctatcactcctgtcactcttgctttgggaaggt

SEQ ID NO: 9925 - DNA, 33 bp, Homo sapien
agaagctaagaaaaggacataaattagcaagtg

SEQ ID NO: 9926 - DNA, 33 bp, Homo sapien
agaagctaagaaaagggcataaattagcaagtg

SEQ ID NO: 9927 - DNA, 33 bp, Homo sapien
ttccagcgggtttcaaagcataattccagccca

SEQ ID NO: 9928 - DNA, 33 bp, Homo sapien
ttccagcgggtttcaacgcataattccagccca

SEQ ID NO: 9929 - DNA, 33 bp, Homo sapien
ctgtaatccagaaggaaaggggccttaaattac

SEQ ID NO: 9930 - DNA, 33 bp, Homo sapien
ctgtaatccagaaggacaggggccttaaattac

SEQ ID NO: 9931 - DNA, 33 bp, Homo sapien
ttgttcagtccaatgacgagggacttgcaaaga

SEQ ID NO: 9932 - DNA, 33 bp, Homo sapien
ttgttcagtccaatgatgagggacttgcaaaga

SEQ ID NO: 9933 - DNA, 33 bp, Homo sapien
ctctggacctcatttcacgtgagaaaaataaac

SEQ ID NO: 9934 - DNA, 33 bp, Homo sapien
ctctggacctcatttcgcgtgagaaaaataaac

SEQ ID NO: 9935 - DNA, 33 bp, Homo sapien
gcttacctgctcatccgaacagcaggagacgag

SEQ ID NO: 9936 - DNA, 33 bp, Homo sapien
gcttacctgctcatcctaacagcaggagacgag

SEQ ID NO: 9937 - DNA, 33 bp, Homo sapien
ctcttcccttttgataccagaagtctcggtgga

SEQ ID NO: 9938 - DNA, 33 bp, Homo sapien
ctcttcccttttgatagcagaagtctcggtgga

SEQ ID NO: 9939 - DNA, 33 bp, Homo sapien
gttgaatcgttttacaccatgaagagggagtat

SEQ ID NO: 9940 - DNA, 33 bp, Homo sapien
gttgaatcgttttacagcatgaagagggagtat

SEQ ID NO: 9941 - DNA, 33 bp, Homo sapien
taggttcttccctcaacatttggaattacaatt

SEQ ID NO: 9942 - DNA, 33 bp, Homo sapien
taggttcttccctcaatatttggaattacaatt

SEQ ID NO: 9943 - DNA, 33 bp, Homo sapien
gcattcaaaatgcttcacgtgcgcacatatttt

SEQ ID NO: 9944 - DNA, 33 bp, Homo sapien
gcattcaaaatgcttcgcgtgcgcacatatttt

SEQ ID NO: 9945 - DNA, 33 bp, Homo sapien
ctgagggctcaactgccacaccccagatagagc

SEQ ID NO: 9946 - DNA, 33 bp, Homo sapien
ctgagggctcaactgctacaccccagatagagc

SEQ ID NO: 9947 - DNA, 33 bp, Homo sapien
tgaaaagcattttcaacactgactagaaacact

SEQ ID NO: 9948 - DNA, 33 bp, Homo sapien
tgaaaagcattttcaatactgactagaaacact

SEQ ID NO: 9949 - DNA, 33 bp, Homo sapien
ggtcttactgttttacaaagagctctggagaag

SEQ ID NO: 9950 - DNA, 33 bp, Homo sapien
ggtcttactgttttacgaagagctctggagaag

SEQ ID NO: 9951 - DNA, 33 bp, Homo sapien
aattctttgaaacctcaagtcttttccctcttg

SEQ ID NO: 9952 - DNA, 33 bp, Homo sapien
aattctttgaaacctcgagtcttttccctcttg

SEQ ID NO: 9953 - DNA, 33 bp, Homo sapien
gaccatttttaatgttcgagtgtttctgcttcc

SEQ ID NO: 9954 - DNA, 33 bp, Homo sapien
gaccatttttaatgtttgagtgtttctgcttcc

SEQ ID NO: 9955 - DNA, 33 bp, Homo sapien
ggccacttgtcaataaactaagtgcaaatcacc

SEQ ID NO: 9956 - DNA, 33 bp, Homo sapien
ggccacttgtcaataatctaagtgcaaatcacc

SEQ ID NO: 9957 - DNA, 33 bp, Homo sapien
ctccctttaagtgcccagaaggatgagagagca

SEQ ID NO: 9958 - DNA, 33 bp, Homo sapien
ctccctttaagtgcccggaaggatgagagagca

SEQ ID NO: 9959 - DNA, 33 bp, Homo sapien
gatcccacgttggagtcaaggattacccagctc

SEQ ID NO: 9960 - DNA, 33 bp, Homo sapien
gatcccacgttggagttaaggattacccagctc

SEQ ID NO: 9961 - DNA, 33 bp, Homo sapien
aaaacagtgaggacaacggacatggaagacaga

SEQ ID NO: 9962 - DNA, 33 bp, Homo sapien
aaaacagtgaggacaagggacatggaagacaga

SEQ ID NO: 9963 - DNA, 33 bp, Homo sapien
atttgatgatcatacactggaacaaaaatccca

SEQ ID NO: 9964 - DNA, 33 bp, Homo sapien
atttgatgatcatacagtggaacaaaaatccca

SEQ ID NO: 9965 - DNA, 33 bp, Homo sapien
tgatagacttgagaaacgagtcacagtaattga

SEQ ID NO: 9966 - DNA, 33 bp, Homo sapien
tgatagacttgagaaatgagtcacagtaattga

SEQ ID NO: 9967 - DNA, 33 bp, Homo sapien
atgaagaatcaaaaaacacactcaaatatgtgc

SEQ ID NO: 9968 - DNA, 33 bp, Homo sapien
atgaagaatcaaaaaatacactcaaatatgtgc

SEQ ID NO: 9969 - DNA, 33 bp, Homo sapien
cacataacgatgatatgatatcaaaatcagggg

SEQ ID NO: 9970 - DNA, 33 bp, Homo sapien
cacataacgatgatattatatcaaaatcagggg

SEQ ID NO: 9971 - DNA, 33 bp, Homo sapien
aatgtaattatcataaatcaccataggcactgt

SEQ ID NO: 9972 - DNA, 33 bp, Homo sapien
aatgtaattatcataagtcaccataggcactgt

SEQ ID NO: 9973 - DNA, 33 bp, Homo sapien
acaggttttttcccctaaaatgtcaagtagatc

SEQ ID NO: 9974 - DNA, 33 bp, Homo sapien
acaggttttttcccctgaaatgtcaagtagatc

SEQ ID NO: 9975 - DNA, 33 bp, Homo sapien
cggagagcgatctgcgacagctgaagggcatgg

SEQ ID NO: 9976 - DNA, 33 bp, Homo sapien
cggagagcgatctgcggcagctgaagggcatgg

SEQ ID NO: 9977 - DNA, 33 bp, Homo sapien
gttctctttctcctcaaatcatcaaagctacca

SEQ ID NO: 9978 - DNA, 33 bp, Homo sapien
gttctctttctcctcagatcatcaaagctacca

SEQ ID NO: 9979 - DNA, 33 bp, Homo sapien
taaagccatcataatcaaaagagtgtggaattg

SEQ ID NO: 9980 - DNA, 33 bp, Homo sapien
taaagccatcataatccaaagagtgtggaattg

SEQ ID NO: 9981 - DNA, 33 bp, Homo sapien
actcacgttggaagccactttaggtatgtgttt

SEQ ID NO: 9982 - DNA, 33 bp, Homo sapien
actcacgttggaagccgctttaggtatgtgttt

SEQ ID NO: 9983 - DNA, 33 bp, Homo sapien
tgttaaagctatttccaattatgtgcaagttcc

SEQ ID NO: 9984 - DNA, 33 bp, Homo sapien
tgttaaagctatttccgattatgtgcaagttcc

SEQ ID NO: 9985 - DNA, 33 bp, Homo sapien
ctgaagataattatcactcctgcttcatctaag

SEQ ID NO: 9986 - DNA, 33 bp, Homo sapien
ctgaagataattatcattcctgcttcatctaag

SEQ ID NO: 9987 - DNA, 33 bp, Homo sapien
atgggacaaaagccaaagaaacatgatggatgg

SEQ ID NO: 9988 - DNA, 33 bp, Homo sapien
atgggacaaaagccaaggaaacatgatggatgg

SEQ ID NO: 9989 - DNA, 33 bp, Homo sapien
tattctccagagaagccgaggatgctttgctgg

SEQ ID NO: 9990 - DNA, 33 bp, Homo sapien
tattctccagagaagctgaggatgctttgctgg

SEQ ID NO: 9991 - DNA, 33 bp, Homo sapien
attctccacttaggagacaaagcttgaaattgc

SEQ ID NO: 9992 - DNA, 33 bp, Homo sapien
attctccacttaggaggcaaagcttgaaattgc

SEQ ID NO: 9993 - DNA, 33 bp, Homo sapien
ctgctcagggaactgagaattcgatggtgaaga

SEQ ID NO: 9994 - DNA, 33 bp, Homo sapien
ctgctcagggaactgataattcgatggtgaaga

SEQ ID NO: 9995 - DNA, 33 bp, Homo sapien
gacagtgggggtaagacaggggttgtattctag

SEQ ID NO: 9996 - DNA, 33 bp, Homo sapien
gacagtgggggtaagagaggggttgtattctag

SEQ ID NO: 9997 - DNA, 33 bp, Homo sapien
cacagatgcccagaatcagtcactgcagccctg

SEQ ID NO: 9998 - DNA, 33 bp, Homo sapien
cacagatgcccagaatgagtcactgcagccctg

SEQ ID NO: 9999 - DNA, 33 bp, Homo sapien
ctcaatttgtctggtacgtggacccatggctcc

SEQ ID NO: 10000 - DNA, 33 bp, Homo sapien
ctcaatttgtctggtatgtggacccatggctcc

SEQ ID NO: 10001 - DNA, 33 bp, Homo sapien
agagggagaaagaggcccatattgcagggctta

SEQ ID NO: 10002 - DNA, 33 bp, Homo sapien
agagggagaaagaggctcatattgcagggctta

SEQ ID NO: 10003 - DNA, 33 bp, Homo sapien
cgtcttgctctcataccgcatgtcacatctatc

SEQ ID NO: 10004 - DNA, 33 bp, Homo sapien
cgtcttgctctcatactgcatgtcacatctatc

SEQ ID NO: 10005 - DNA, 33 bp, Homo sapien
tcatctcggttaaagcaactcaggccaaaaacc

SEQ ID NO: 10006 - DNA, 33 bp, Homo sapien
tcatctcggttaaagcgactcaggccaaaaacc

SEQ ID NO: 10007 - DNA, 33 bp, Homo sapien
tggtagagaaatgctaaaagatggtgaaaaaaa

SEQ ID NO: 10008 - DNA, 33 bp, Homo sapien
tggtagagaaatgctagaagatggtgaaaaaaa

SEQ ID NO: 10009 - DNA, 33 bp, Homo sapien
ctttattgagtcaaccactatgctaggcacttt

SEQ ID NO: 10010 - DNA, 33 bp, Homo sapien
ctttattgagtcaaccgctatgctaggcacttt

SEQ ID NO: 10011 - DNA, 33 bp, Homo sapien
catgtagccacccttacgtgatgtgatgagttg

SEQ ID NO: 10012 - DNA, 33 bp, Homo sapien
catgtagccacccttatgtgatgtgatgagttg

SEQ ID NO: 10013 - DNA, 33 bp, Homo sapien
cctacatcctgcattaactgagagaatttgtgg

SEQ ID NO: 10014 - DNA, 33 bp, Homo sapien
cctacatcctgcattagctgagagaatttgtgg

SEQ ID NO: 10015 - DNA, 33 bp, Homo sapien
ctatatctgatgaagaagtcacttagattcatt

SEQ ID NO: 10016 - DNA, 33 bp, Homo sapien
ctatatctgatgaagatgtcacttagattcatt

SEQ ID NO: 10017 - DNA, 33 bp, Homo sapien
acctattttgtgcgcaatatgtgctgagcactg

SEQ ID NO: 10018 - DNA, 33 bp, Homo sapien
acctattttgtgcgcagtatgtgctgagcactg

SEQ ID NO: 10019 - DNA, 33 bp, Homo sapien
taatgtaagctcctaacatgacacataaagaag

SEQ ID NO: 10020 - DNA, 33 bp, Homo sapien
taatgtaagctcctaatatgacacataaagaag

SEQ ID NO: 10021 - DNA, 33 bp, Homo sapien
gaaacagctttcaaaaatgcagtagaactgaaa

SEQ ID NO: 10022 - DNA, 33 bp, Homo sapien
gaaacagctttcaaaattgcagtagaactgaaa

SEQ ID NO: 10023 - DNA, 33 bp, Homo sapien
tttttccacaaattgcaaggcaggcatatagtt

SEQ ID NO: 10024 - DNA, 33 bp, Homo sapien
tttttccacaaattgcgaggcaggcatatagtt

SEQ ID NO: 10025 - DNA, 33 bp, Homo sapien
ttatttaatggtgagcacatattttttcaggtt

SEQ ID NO: 10026 - DNA, 33 bp, Homo sapien
ttatttaatggtgagcgcatattttttcaggtt

SEQ ID NO: 10027 - DNA, 33 bp, Homo sapien
gctgctgggagaatcaccatccacaacccctct

SEQ ID NO: 10028 - DNA, 33 bp, Homo sapien
gctgctgggagaatcatcatccacaacccctct

SEQ ID NO: 10029 - DNA, 33 bp, Homo sapien
tatgtaggaacacagacggtgtgagtccacttg

SEQ ID NO: 10030 - DNA, 33 bp, Homo sapien
tatgtaggaacacagatggtgtgagtccacttg

SEQ ID NO: 10031 - DNA, 33 bp, Homo sapien
acctcttagtaacagcaccacaaggtcacattt

SEQ ID NO: 10032 - DNA, 33 bp, Homo sapien
acctcttagtaacagcgccacaaggtcacattt

SEQ ID NO: 10033 - DNA, 33 bp, Homo sapien
gatttatcaggtaatcacaaggtttatttttaa

SEQ ID NO: 10034 - DNA, 33 bp, Homo sapien
gatttatcaggtaatcgcaaggtttatttttaa

SEQ ID NO: 10035 - DNA, 33 bp, Homo sapien
gagccccagccatgcaaagggatccacgctctg

SEQ ID NO: 10036 - DNA, 33 bp, Homo sapien
gagccccagccatgcagagggatccacgctctg

SEQ ID NO: 10037 - DNA, 33 bp, Homo sapien
cccgggtgctgacgacaccttctgaatccaggc

SEQ ID NO: 10038 - DNA, 33 bp, Homo sapien
cccgggtgctgacgactccttctgaatccaggc

SEQ ID NO: 10039 - DNA, 33 bp, Homo sapien
tgacccaaagtctcagaacctgactcactcagg

SEQ ID NO: 10040 - DNA, 33 bp, Homo sapien
tgacccaaagtctcaggacctgactcactcagg

SEQ ID NO: 10041 - DNA, 33 bp, Homo sapien
cttcaaacgtggctcaccctttcctgatgctgt

SEQ ID NO: 10042 - DNA, 33 bp, Homo sapien
cttcaaacgtggctcatcctttcctgatgctgt

SEQ ID NO: 10043 - DNA, 33 bp, Homo sapien
gtgctgagatatcagtaacatttttggaaaagg

SEQ ID NO: 10044 - DNA, 33 bp, Homo sapien
gtgctgagatatcagtcacatttttggaaaagg

SEQ ID NO: 10045 - DNA, 33 bp, Homo sapien
aagattacaaaaaacaatctcacttcagttcac

SEQ ID NO: 10046 - DNA, 33 bp, Homo sapien
aagattacaaaaaacagtctcacttcagttcac

SEQ ID NO: 10047 - DNA, 33 bp, Homo sapien
ctcaattcaatcttcaactcacagcctctctcc

SEQ ID NO: 10048 - DNA, 33 bp, Homo sapien
ctcaattcaatcttcatctcacagcctctctcc

SEQ ID NO: 10049 - DNA, 33 bp, Homo sapien
agtatcaaggatgagacgggggtggtcctatcc

SEQ ID NO: 10050 - DNA, 33 bp, Homo sapien
agtatcaaggatgagaggggggtggtcctatcc

SEQ ID NO: 10051 - DNA, 33 bp, Homo sapien
gggccatcactgtgagacctgcaaactgcatgg

SEQ ID NO: 10052 - DNA, 33 bp, Homo sapien
gggccatcactgtgagtcctgcaaactgcatgg

SEQ ID NO: 10053 - DNA, 33 bp, Homo sapien
caggcttgagacaaaaaaggctgcttagcacca

SEQ ID NO: 10054 - DNA, 33 bp, Homo sapien
caggcttgagacaaaagaggctgcttagcacca

SEQ ID NO: 10055 - DNA, 33 bp, Homo sapien
aaaacctcacactagaagcctatctaccctagt

SEQ ID NO: 10056 - DNA, 33 bp, Homo sapien
aaaacctcacactagaggcctatctaccctagt

SEQ ID NO: 10057 - DNA, 33 bp, Homo sapien
gtaagcacttaccagcaattccagatttaatgt

SEQ ID NO: 10058 - DNA, 33 bp, Homo sapien
gtaagcacttaccagcgattccagatttaatgt

SEQ ID NO: 10059 - DNA, 33 bp, Homo sapien
gatggattcgcagacacagatgcccttgagaga

SEQ ID NO: 10060 - DNA, 33 bp, Homo sapien
gatggattcgcagacatagatgcccttgagaga

SEQ ID NO: 10061 - DNA, 33 bp, Homo sapien
tgacctatctttgaaaataactgggggcttctg

SEQ ID NO: 10062 - DNA, 33 bp, Homo sapien
tgacctatctttgaaagtaactgggggcttctg

SEQ ID NO: 10063 - DNA, 33 bp, Homo sapien
atcctcaagtgtcaaccgcgggactaggtgggg

SEQ ID NO: 10064 - DNA, 33 bp, Homo sapien
atcctcaagtgtcaacggcgggactaggtgggg

SEQ ID NO: 10065 - DNA, 33 bp, Homo sapien
cattgttattgtcacactctattcatgagaagc

SEQ ID NO: 10066 - DNA, 33 bp, Homo sapien
cattgttattgtcacattctattcatgagaagc

SEQ ID NO: 10067 - DNA, 33 bp, Homo sapien
atgttgcagaggtccaaagagcaaagaactgag

SEQ ID NO: 10068 - DNA, 33 bp, Homo sapien
atgttgcagaggtccacagagcaaagaactgag

SEQ ID NO: 10069 - DNA, 33 bp, Homo sapien
aatttctgttgttgaacgaatgcatcagtcagg

SEQ ID NO: 10070 - DNA, 33 bp, Homo sapien
aatttctgttgttgaaggaatgcatcagtcagg

SEQ ID NO: 10071 - DNA, 33 bp, Homo sapien
gagatctttggcccaacgtcctcctgcagattc

SEQ ID NO: 10072 - DNA, 33 bp, Homo sapien
gagatctttggcccaatgtcctcctgcagattc

SEQ ID NO: 10073 - DNA, 33 bp, Homo sapien
ctggtaggcggccttcactgagaggagttttct

SEQ ID NO: 10074 - DNA, 33 bp, Homo sapien
ctggtaggcggccttcgctgagaggagttttct

SEQ ID NO: 10075 - DNA, 33 bp, Homo sapien
ggctccacttcgtcaccggttaagtggggatca

SEQ ID NO: 10076 - DNA, 33 bp, Homo sapien
ggctccacttcgtcactggttaagtggggatca

SEQ ID NO: 10077 - DNA, 33 bp, Homo sapien
tatgtgatcagccaaagaaactgcctagtgaga

SEQ ID NO: 10078 - DNA, 33 bp, Homo sapien
tatgtgatcagccaaataaactgcctagtgaga

SEQ ID NO: 10079 - DNA, 33 bp, Homo sapien
tgtattagcatcgtccccattttaggctgtgga

SEQ ID NO: 10080 - DNA, 33 bp, Homo sapien
tgtattagcatcgtcctcattttaggctgtgga

SEQ ID NO: 10081 - DNA, 33 bp, Homo sapien
tatggaagagtaatgacgcacactcagaggctg

SEQ ID NO: 10082 - DNA, 33 bp, Homo sapien
tatggaagagtaatgatgcacactcagaggctg

SEQ ID NO: 10083 - DNA, 33 bp, Homo sapien
agagaaacacaaattacagaacactcagaattc

SEQ ID NO: 10084 - DNA, 33 bp, Homo sapien
agagaaacacaaattatagaacactcagaattc

SEQ ID NO: 10085 - DNA, 33 bp, Homo sapien
tgctagttggacaaaaatgaatttcaagtctag

SEQ ID NO: 10086 - DNA, 33 bp, Homo sapien
tgctagttggacaaaagtgaatttcaagtctag

SEQ ID NO: 10087 - DNA, 33 bp, Homo sapien
aagagaaggaactccaactactgtttccatggg

SEQ ID NO: 10088 - DNA, 33 bp, Homo sapien
aagagaaggaactccatctactgtttccatggg

SEQ ID NO: 10089 - DNA, 33 bp, Homo sapien
tggggttgggacttgaaatctgatgtctggagc

SEQ ID NO: 10090 - DNA, 33 bp, Homo sapien
tggggttgggacttgagatctgatgtctggagc

SEQ ID NO: 10091 - DNA, 33 bp, Homo sapien
tgttccaccgagtcaacgagctcagatgtactt

SEQ ID NO: 10092 - DNA, 33 bp, Homo sapien
tgttccaccgagtcaatgagctcagatgtactt

SEQ ID NO: 10093 - DNA, 33 bp, Homo sapien
ttttagaccatgttaacagaggtatggagtcta

SEQ ID NO: 10094 - DNA, 33 bp, Homo sapien
ttttagaccatgttaatagaggtatggagtcta

SEQ ID NO: 10095 - DNA, 33 bp, Homo sapien
gagaaataaatctagaaggtcatcgatagcctg

SEQ ID NO: 10096 - DNA, 33 bp, Homo sapien
gagaaataaatctagagggtcatcgatagcctg

SEQ ID NO: 10097 - DNA, 33 bp, Homo sapien
cattagtatgacaaagaataaaagccacatgat

SEQ ID NO: 10098 - DNA, 33 bp, Homo sapien
cattagtatgacaaaggataaaagccacatgat

SEQ ID NO: 10099 - DNA, 33 bp, Homo sapien
tgagcagtgtttgtaaatctgattgtacagatc

SEQ ID NO: 10100 - DNA, 33 bp, Homo sapien
tgagcagtgtttgtaattctgattgtacagatc

SEQ ID NO: 10101 - DNA, 33 bp, Homo sapien
aactaatactgatacacagcaattaaccaaagt

SEQ ID NO: 10102 - DNA, 33 bp, Homo sapien
aactaatactgatacatagcaattaaccaaagt

SEQ ID NO: 10103 - DNA, 33 bp, Homo sapien
tccaccaaatatgtcaagaagagcagtgatatt

SEQ ID NO: 10104 - DNA, 33 bp, Homo sapien
tccaccaaatatgtcaggaagagcagtgatatt

SEQ ID NO: 10105 - DNA, 33 bp, Homo sapien
taataagagcaatttaagatataaacacaggag

SEQ ID NO: 10106 - DNA, 33 bp, Homo sapien
taataagagcaatttaggatataaacacaggag

SEQ ID NO: 10107 - DNA, 33 bp, Homo sapien
ggttttaaaatgagtcacaaagttccaccccac

SEQ ID NO: 10108 - DNA, 33 bp, Homo sapien
ggttttaaaatgagtcgcaaagttccaccccac

SEQ ID NO: 10109 - DNA, 33 bp, Homo sapien
ccttgataatgagaataaccttatgaactcccc

SEQ ID NO: 10110 - DNA, 33 bp, Homo sapien
ccttgataatgagaatcaccttatgaactcccc

SEQ ID NO: 10111 - DNA, 33 bp, Homo sapien
tgaggaattaaccaaagatttctgtgccttggt

SEQ ID NO: 10112 - DNA, 33 bp, Homo sapien
tgaggaattaaccaaatatttctgtgccttggt

SEQ ID NO: 10113 - DNA, 33 bp, Homo sapien
tggaatctttgagaccaacagcgtcagctctcc

SEQ ID NO: 10114 - DNA, 33 bp, Homo sapien
tggaatctttgagaccgacagcgtcagctctcc

SEQ ID NO: 10115 - DNA, 33 bp, Homo sapien
gtggttgttggactgaccaatgaacagtctcag

SEQ ID NO: 10116 - DNA, 33 bp, Homo sapien
gtggttgttggactgagcaatgaacagtctcag

SEQ ID NO: 10117 - DNA, 33 bp, Homo sapien
gaaggagaaagaggagacaacccagccaggatg

SEQ ID NO: 10118 - DNA, 33 bp, Homo sapien
gaaggagaaagaggagtcaacccagccaggatg

SEQ ID NO: 10119 - DNA, 33 bp, Homo sapien
atgactcaggggaaccagacccagctgcccagt

SEQ ID NO: 10120 - DNA, 33 bp, Homo sapien
atgactcaggggaaccggacccagctgcccagt

SEQ ID NO: 10121 - DNA, 33 bp, Homo sapien
acacttgactctgagacgccctctagttcctga

SEQ ID NO: 10122 - DNA, 33 bp, Homo sapien
acacttgactctgagatgccctctagttcctga

SEQ ID NO: 10123 - DNA, 33 bp, Homo sapien
ccctgaaggaaggggaaatttgtgaatcagaga

SEQ ID NO: 10124 - DNA, 33 bp, Homo sapien
ccctgaaggaaggggatatttgtgaatcagaga

SEQ ID NO: 10125 - DNA, 33 bp, Homo sapien
ggaggagaatccgacaatctgaagccccaggga

SEQ ID NO: 10126 - DNA, 33 bp, Homo sapien
ggaggagaatccgacattctgaagccccaggga

SEQ ID NO: 10127 - DNA, 33 bp, Homo sapien
agaagtgtgcaggcccaaagcattgccatattc

SEQ ID NO: 10128 - DNA, 33 bp, Homo sapien
agaagtgtgcaggcccgaagcattgccatattc

SEQ ID NO: 10129 - DNA, 33 bp, Homo sapien
cccacactgtacactacgcttcctgttttacac

SEQ ID NO: 10130 - DNA, 33 bp, Homo sapien
cccacactgtacactaggcttcctgttttacac

SEQ ID NO: 10131 - DNA, 33 bp, Homo sapien
tctgtctccaagcaccacttctgcttgtgcacc

SEQ ID NO: 10132 - DNA, 33 bp, Homo sapien
tctgtctccaagcaccgcttctgcttgtgcacc

SEQ ID NO: 10133 - DNA, 33 bp, Homo sapien
cgacttacatcaagatgatcccttttccttctt

SEQ ID NO: 10134 - DNA, 33 bp, Homo sapien
cgacttacatcaagattatcccttttccttctt

SEQ ID NO: 10135 - DNA, 33 bp, Homo sapien
ggccaaatgggagacaaaaaactcaagtgtagg

SEQ ID NO: 10136 - DNA, 33 bp, Homo sapien
ggccaaatgggagacagaaaactcaagtgtagg

SEQ ID NO: 10137 - DNA, 33 bp, Homo sapien
tttacatacatctgaaaccttgaaacaagtcag

SEQ ID NO: 10138 - DNA, 33 bp, Homo sapien
tttacatacatctgaacccttgaaacaagtcag

SEQ ID NO: 10139 - DNA, 33 bp, Homo sapien
gtgtgatctcaggcaaatgactctgtgagcctc

SEQ ID NO: 10140 - DNA, 33 bp, Homo sapien
gtgtgatctcaggcaagtgactctgtgagcctc

SEQ ID NO: 10141 - DNA, 33 bp, Homo sapien
cacctagaaagcactcagaaatggcagcttatt

SEQ ID NO: 10142 - DNA, 33 bp, Homo sapien
cacctagaaagcactcggaaatggcagcttatt

SEQ ID NO: 10143 - DNA, 33 bp, Homo sapien
tggtatgagtctggggaatctgtattttgttgt

SEQ ID NO: 10144 - DNA, 33 bp, Homo sapien
tggtatgagtctggggtatctgtattttgttgt

SEQ ID NO: 10145 - DNA, 33 bp, Homo sapien
ctgtatggtttctgccaaaaagtctgttgccag

SEQ ID NO: 10146 - DNA, 33 bp, Homo sapien
ctgtatggtttctgccgaaaagtctgttgccag

SEQ ID NO: 10147 - DNA, 33 bp, Homo sapien
ttggtcaagtcacttaacactgctaaccctggt

SEQ ID NO: 10148 - DNA, 33 bp, Homo sapien
ttggtcaagtcacttagcactgctaaccctggt

SEQ ID NO: 10149 - DNA, 33 bp, Homo sapien
cttccaaacttacaacccactcgaggcccctcc

SEQ ID NO: 10150 - DNA, 33 bp, Homo sapien
cttccaaacttacaactcactcgaggcccctcc

SEQ ID NO: 10151 - DNA, 33 bp, Homo sapien
acccattcctaatacacgcttccttgacttttc

SEQ ID NO: 10152 - DNA, 33 bp, Homo sapien
acccattcctaatacatgcttccttgacttttc

SEQ ID NO: 10153 - DNA, 33 bp, Homo sapien
cccctccacatctcagaatcagagtagtggaag

SEQ ID NO: 10154 - DNA, 33 bp, Homo sapien
cccctccacatctcaggatcagagtagtggaag

SEQ ID NO: 10155 - DNA, 33 bp, Homo sapien
gtgctcctgaccatgaactctgaggcctgcctg

SEQ ID NO: 10156 - DNA, 33 bp, Homo sapien
gtgctcctgaccatgacctctgaggcctgcctg

SEQ ID NO: 10157 - DNA, 33 bp, Homo sapien
cctgattgggacacataatatatcccaggcagc

SEQ ID NO: 10158 - DNA, 33 bp, Homo sapien
cctgattgggacacatcatatatcccaggcagc

SEQ ID NO: 10159 - DNA, 33 bp, Homo sapien
taggccacaaattacgcatctgccattgcactg

SEQ ID NO: 10160 - DNA, 33 bp, Homo sapien
taggccacaaattacgtatctgccattgcactg

SEQ ID NO: 10161 - DNA, 33 bp, Homo sapien
tggaggccatagatgacgtggaggccatagatg

SEQ ID NO: 10162 - DNA, 33 bp, Homo sapien
tggaggccatagatgatgtggaggccatagatg

SEQ ID NO: 10163 - DNA, 33 bp, Homo sapien
gaataagaagtaaagacgcatccaaagggcatg

SEQ ID NO: 10164 - DNA, 33 bp, Homo sapien
gaataagaagtaaagaggcatccaaagggcatg

SEQ ID NO: 10165 - DNA, 33 bp, Homo sapien
gtaagaagtcatcccaaaatgtatagcttacaa

SEQ ID NO: 10166 - DNA, 33 bp, Homo sapien
gtaagaagtcatcccagaatgtatagcttacaa

SEQ ID NO: 10167 - DNA, 33 bp, Homo sapien
cacatggcagtgccaactaacctggatcacagg

SEQ ID NO: 10168 - DNA, 33 bp, Homo sapien
cacatggcagtgccaattaacctggatcacagg

SEQ ID NO: 10169 - DNA, 33 bp, Homo sapien
aactcattcatctggaagaaaataatagagaaa

SEQ ID NO: 10170 - DNA, 33 bp, Homo sapien
aactcattcatctggaggaaaataatagagaaa

SEQ ID NO: 10171 - DNA, 33 bp, Homo sapien
ttcccagtgaagccataaggtcaagttcacccg

SEQ ID NO: 10172 - DNA, 33 bp, Homo sapien
ttcccagtgaagccatgaggtcaagttcacccg

SEQ ID NO: 10173 - DNA, 33 bp, Homo sapien
tgctgaggaatgcaaagaatatagttccaacag

SEQ ID NO: 10174 - DNA, 33 bp, Homo sapien
tgctgaggaatgcaaataatatagttccaacag

SEQ ID NO: 10175 - DNA, 33 bp, Homo sapien
gggtgagtgtgagaaccgtactgataatttgtc

SEQ ID NO: 10176 - DNA, 33 bp, Homo sapien
gggtgagtgtgagaactgtactgataatttgtc

SEQ ID NO: 10177 - DNA, 33 bp, Homo sapien
agggaccttcaaattaaatctatcattatgatt

SEQ ID NO: 10178 - DNA, 33 bp, Homo sapien
agggaccttcaaattagatctatcattatgatt

SEQ ID NO: 10179 - DNA, 33 bp, Homo sapien
caccaaactcaaaaaagttggtaaccagcacat

SEQ ID NO: 10180 - DNA, 33 bp, Homo sapien
caccaaactcaaaaaatttggtaaccagcacat

SEQ ID NO: 10181 - DNA, 33 bp, Homo sapien
gtacagtttaatgaccaaaactgctggttagat

SEQ ID NO: 10182 - DNA, 33 bp, Homo sapien
gtacagtttaatgacccaaactgctggttagat

SEQ ID NO: 10183 - DNA, 33 bp, Homo sapien
tcttgccttagtgacaagaatcatttcctatct

SEQ ID NO: 10184 - DNA, 33 bp, Homo sapien
tcttgccttagtgacaggaatcatttcctatct

SEQ ID NO: 10185 - DNA, 33 bp, Homo sapien
tgatatcctgcaaaaaaccagggagggcagcag

SEQ ID NO: 10186 - DNA, 33 bp, Homo sapien
tgatatcctgcaaaaagccagggagggcagcag

SEQ ID NO: 10187 - DNA, 33 bp, Homo sapien
tctctgatactaaccccgattcggcctctgttg

SEQ ID NO: 10188 - DNA, 33 bp, Homo sapien
tctctgatactaaccctgattcggcctctgttg

SEQ ID NO: 10189 - DNA, 33 bp, Homo sapien
tgctcctccactagaacgtgaacactgtgggac

SEQ ID NO: 10190 - DNA, 33 bp, Homo sapien
tgctcctccactagaatgtgaacactgtgggac

SEQ ID NO: 10191 - DNA, 33 bp, Homo sapien
atttatttgaggaaagaccaattttctcctctc

SEQ ID NO: 10192 - DNA, 33 bp, Homo sapien
atttatttgaggaaaggccaattttctcctctc

SEQ ID NO: 10193 - DNA, 33 bp, Homo sapien
gaaacattcttttcaacgcttccctgtgcctga

SEQ ID NO: 10194 - DNA, 33 bp, Homo sapien
gaaacattcttttcaatgcttccctgtgcctga

SEQ ID NO: 10195 - DNA, 33 bp, Homo sapien
gggtcttgaagcgtgagtaggagtttcctggat

SEQ ID NO: 10196 - DNA, 33 bp, Homo sapien
gggtcttgaagcgtgattaggagtttcctggat

SEQ ID NO: 10197 - DNA, 33 bp, Homo sapien
tgcagagggattctgaagccgcatagaaagctt

SEQ ID NO: 10198 - DNA, 33 bp, Homo sapien
tgcagagggattctgacgccgcatagaaagctt

SEQ ID NO: 10199 - DNA, 33 bp, Homo sapien
caataaatttatgtcacggtgttccagccacag

SEQ ID NO: 10200 - DNA, 33 bp, Homo sapien
caataaatttatgtcatggtgttccagccacag

SEQ ID NO: 10201 - DNA, 33 bp, Homo sapien
accatgtcctccaggaagtcacggagtctctct

SEQ ID NO: 10202 - DNA, 33 bp, Homo sapien
accatgtcctccaggatgtcacggagtctctct

SEQ ID NO: 10203 - DNA, 33 bp, Homo sapien
ttttatcttatttaacgctcatatggctgaggc

SEQ ID NO: 10204 - DNA, 33 bp, Homo sapien
ttttatcttatttaactctcatatggctgaggc

SEQ ID NO: 10205 - DNA, 33 bp, Homo sapien
ggatgttgcttgttgaaaaatgttgttacaaac

SEQ ID NO: 10206 - DNA, 33 bp, Homo sapien
ggatgttgcttgttgagaaatgttgttacaaac

SEQ ID NO: 10207 - DNA, 33 bp, Homo sapien
gtgagcatgtgagccactcctgaccaatcaacg

SEQ ID NO: 10208 - DNA, 33 bp, Homo sapien
gtgagcatgtgagccagtcctgaccaatcaacg

SEQ ID NO: 10209 - DNA, 33 bp, Homo sapien
ggaacagattggctcacggaactgggaagtctc

SEQ ID NO: 10210 - DNA, 33 bp, Homo sapien
ggaacagattggctcatggaactgggaagtctc

SEQ ID NO: 10211 - DNA, 33 bp, Homo sapien
agacaatgagtccaaaagagaagactggacttc

SEQ ID NO: 10212 - DNA, 33 bp, Homo sapien
agacaatgagtccaaaggagaagactggacttc

SEQ ID NO: 10213 - DNA, 33 bp, Homo sapien
atattctgcactaaaaagctccagggtgcagag

SEQ ID NO: 10214 - DNA, 33 bp, Homo sapien
atattctgcactaaaaggctccagggtgcagag

SEQ ID NO: 10215 - DNA, 33 bp, Homo sapien
gtccacaattcacagacgaggaaacggaagtaa

SEQ ID NO: 10216 - DNA, 33 bp, Homo sapien
gtccacaattcacagatgaggaaacggaagtaa

SEQ ID NO: 10217 - DNA, 33 bp, Homo sapien
agcttccttcttccacgagttattccatatttc

SEQ ID NO: 10218 - DNA, 33 bp, Homo sapien
agcttccttcttccactagttattccatatttc

SEQ ID NO: 10219 - DNA, 33 bp, Homo sapien
ccacattattctacacacatttgaacactggtg

SEQ ID NO: 10220 - DNA, 33 bp, Homo sapien
ccacattattctacacgcatttgaacactggtg

SEQ ID NO: 10221 - DNA, 33 bp, Homo sapien
ttctggctggtgaaacaacacaccaaagacccc

SEQ ID NO: 10222 - DNA, 33 bp, Homo sapien
ttctggctggtgaaacgacacaccaaagacccc

SEQ ID NO: 10223 - DNA, 33 bp, Homo sapien
cagatctgtttgtgaccgctatggtttgaaggt

SEQ ID NO: 10224 - DNA, 33 bp, Homo sapien
cagatctgtttgtgactgctatggtttgaaggt

SEQ ID NO: 10225 - DNA, 33 bp, Homo sapien
cgtgcagactaaacgcaaattcaccagaaaaga

SEQ ID NO: 10226 - DNA, 33 bp, Homo sapien
cgtgcagactaaacgcgaattcaccagaaaaga

SEQ ID NO: 10227 - DNA, 33 bp, Homo sapien
taggtcaggttctgtcaagtgaccagcagaagc

SEQ ID NO: 10228 - DNA, 33 bp, Homo sapien
taggtcaggttctgtcgagtgaccagcagaagc

SEQ ID NO: 10229 - DNA, 33 bp, Homo sapien
gtattagcaacatcacagacattttcttattta

SEQ ID NO: 10230 - DNA, 33 bp, Homo sapien
gtattagcaacatcacggacattttcttattta

SEQ ID NO: 10231 - DNA, 33 bp, Homo sapien
tgggctctgaaaggaacgcaggaatggtgaaga

SEQ ID NO: 10232 - DNA, 33 bp, Homo sapien
tgggctctgaaaggaatgcaggaatggtgaaga

SEQ ID NO: 10233 - DNA, 33 bp, Homo sapien
actaccacggtcactaaagcagagcctcgccca

SEQ ID NO: 10234 - DNA, 33 bp, Homo sapien
actaccacggtcactagagcagagcctcgccca

SEQ ID NO: 10235 - DNA, 33 bp, Homo sapien
ctggctaaagcaattaccacccagcaaaaccct

SEQ ID NO: 10236 - DNA, 33 bp, Homo sapien
ctggctaaagcaattatcacccagcaaaaccct

SEQ ID NO: 10237 - DNA, 33 bp, Homo sapien
aatatttacattgtggaaaaggaaacacaaaca

SEQ ID NO: 10238 - DNA, 33 bp, Homo sapien
aatatttacattgtgggaaaggaaacacaaaca

SEQ ID NO: 10239 - DNA, 33 bp, Homo sapien
tgccggttgctaagacaatgggaatagcacagt

SEQ ID NO: 10240 - DNA, 33 bp, Homo sapien
tgccggttgctaagactatgggaatagcacagt

SEQ ID NO: 10241 - DNA, 33 bp, Homo sapien
cttctgcgtcgacctcactgggagagcgcagac

SEQ ID NO: 10242 - DNA, 33 bp, Homo sapien
cttctgcgtcgacctcgctgggagagcgcagac

SEQ ID NO: 10243 - DNA, 33 bp, Homo sapien
acacatcctcctgctgaaacagtaacaggctgt

SEQ ID NO: 10244 - DNA, 33 bp, Homo sapien
acacatcctcctgctgcaacagtaacaggctgt

SEQ ID NO: 10245 - DNA, 33 bp, Homo sapien
tgctacatgaccctggacaagtggcttcatgta

SEQ ID NO: 10246 - DNA, 33 bp, Homo sapien
tgctacatgaccctgggcaagtggcttcatgta

SEQ ID NO: 10247 - DNA, 33 bp, Homo sapien
tctgtcacatcctcataacagtcttccctgact

SEQ ID NO: 10248 - DNA, 33 bp, Homo sapien
tctgtcacatcctcatgacagtcttccctgact

SEQ ID NO: 10249 - DNA, 33 bp, Homo sapien
gaaaaacattataaaccaattggaccaacagac

SEQ ID NO: 10250 - DNA, 33 bp, Homo sapien
gaaaaacattataaactaattggaccaacagac

SEQ ID NO: 10251 - DNA, 33 bp, Homo sapien
acaacaacacaataaacatgaaacattctccag

SEQ ID NO: 10252 - DNA, 33 bp, Homo sapien
acaacaacacaataaatatgaaacattctccag

SEQ ID NO: 10253 - DNA, 33 bp, Homo sapien
cctgataccaaagtcagaaaaatacactataag

SEQ ID NO: 10254 - DNA, 33 bp, Homo sapien
cctgataccaaagtcataaaaatacactataag

SEQ ID NO: 10255 - DNA, 33 bp, Homo sapien
atgtggtatatggtaaaggtccaactttattct

SEQ ID NO: 10256 - DNA, 33 bp, Homo sapien
atgtggtatatggtaagggtccaactttattct

SEQ ID NO: 10257 - DNA, 33 bp, Homo sapien
agtggggtgattgcacactgatggaagcgatcc

SEQ ID NO: 10258 - DNA, 33 bp, Homo sapien
agtggggtgattgcacgctgatggaagcgatcc

SEQ ID NO: 10259 - DNA, 33 bp, Homo sapien
cttcctgagtcattgacgtccctgtctccatgg

SEQ ID NO: 10260 - DNA, 33 bp, Homo sapien
cttcctgagtcattgatgtccctgtctccatgg

SEQ ID NO: 10261 - DNA, 33 bp, Homo sapien
gaatgagtgactttaactggatggtcttcaagt

SEQ ID NO: 10262 - DNA, 33 bp, Homo sapien
gaatgagtgactttaattggatggtcttcaagt

SEQ ID NO: 10263 - DNA, 33 bp, Homo sapien
cacagggcctctcagaacctttattgcagccag

SEQ ID NO: 10264 - DNA, 33 bp, Homo sapien
cacagggcctctcagagcctttattgcagccag

SEQ ID NO: 10265 - DNA, 33 bp, Homo sapien
gctcctgcctttttccaagaccaaatcctaatc

SEQ ID NO: 10266 - DNA, 33 bp, Homo sapien
gctcctgcctttttccgagaccaaatcctaatc

SEQ ID NO: 10267 - DNA, 33 bp, Homo sapien
ctcagggaggcttccacagagcggtgaggtgac

SEQ ID NO: 10268 - DNA, 33 bp, Homo sapien
ctcagggaggcttccatagagcggtgaggtgac

SEQ ID NO: 10269 - DNA, 33 bp, Homo sapien
cagcagaactgttgtaagatgaagatcttgagg

SEQ ID NO: 10270 - DNA, 33 bp, Homo sapien
cagcagaactgttgtaggatgaagatcttgagg

SEQ ID NO: 10271 - DNA, 33 bp, Homo sapien
tggaagcctttatgtacgttttacatgtaccat

SEQ ID NO: 10272 - DNA, 33 bp, Homo sapien
tggaagcctttatgtatgttttacatgtaccat

SEQ ID NO: 10273 - DNA, 33 bp, Homo sapien
atttgggtctgttgtcaccacaaaagggctgcc

SEQ ID NO: 10274 - DNA, 33 bp, Homo sapien
atttgggtctgttgtcgccacaaaagggctgcc

SEQ ID NO: 10275 - DNA, 33 bp, Homo sapien
agaacacataggtcccaaagtaatgcctccctg

SEQ ID NO: 10276 - DNA, 33 bp, Homo sapien
agaacacataggtccccaagtaatgcctccctg

SEQ ID NO: 10277 - DNA, 33 bp, Homo sapien
agacgtccagctcagacgaagtagtggggaact

SEQ ID NO: 10278 - DNA, 33 bp, Homo sapien
agacgtccagctcagatgaagtagtggggaact

SEQ ID NO: 10279 - DNA, 33 bp, Homo sapien
tttattatttctgcaactatttgcttagtgctg

SEQ ID NO: 10280 - DNA, 33 bp, Homo sapien
tttattatttctgcaattatttgcttagtgctg

SEQ ID NO: 10281 - DNA, 33 bp, Homo sapien
acatatcatggggggaagaaagaatgcctgaaa

SEQ ID NO: 10282 - DNA, 33 bp, Homo sapien
acatatcatggggggaggaaagaatgcctgaaa

SEQ ID NO: 10283 - DNA, 33 bp, Homo sapien
ccctctttaggtgataaggagattgacacaaag

SEQ ID NO: 10284 - DNA, 33 bp, Homo sapien
ccctctttaggtgatagggagattgacacaaag

SEQ ID NO: 10285 - DNA, 33 bp, Homo sapien
gtctgtaaaatccaagcctcagttcaaacatag

SEQ ID NO: 10286 - DNA, 33 bp, Homo sapien
gtctgtaaaatccaagtctcagttcaaacatag

SEQ ID NO: 10287 - DNA, 33 bp, Homo sapien
gattatacaagtgataaaacgctgacatctcac

SEQ ID NO: 10288 - DNA, 33 bp, Homo sapien
gattatacaagtgatataacgctgacatctcac

SEQ ID NO: 10289 - DNA, 33 bp, Homo sapien
caccccaatcgtatacgctttgtaaaatacaac

SEQ ID NO: 10290 - DNA, 33 bp, Homo sapien
caccccaatcgtatactctttgtaaaatacaac

SEQ ID NO: 10291 - DNA, 33 bp, Homo sapien
aacaaacaaaaactgagctctctttagattcag

SEQ ID NO: 10292 - DNA, 33 bp, Homo sapien
aacaaacaaaaactgatctctctttagattcag

SEQ ID NO: 10293 - DNA, 33 bp, Homo sapien
tcggttctgttctaaacgctagggatgcaaaag

SEQ ID NO: 10294 - DNA, 33 bp, Homo sapien
tcggttctgttctaaatgctagggatgcaaaag

SEQ ID NO: 10295 - DNA, 33 bp, Homo sapien
gacagagaaatgggacaaaattgatccttctat

SEQ ID NO: 10296 - DNA, 33 bp, Homo sapien
gacagagaaatgggaccaaattgatccttctat

SEQ ID NO: 10297 - DNA, 33 bp, Homo sapien
acacaaggtaggtgccactattattccatctgg

SEQ ID NO: 10298 - DNA, 33 bp, Homo sapien
acacaaggtaggtgccgctattattccatctgg

SEQ ID NO: 10299 - DNA, 33 bp, Homo sapien
tattccttaggatttaagtttctcaatatttta

SEQ ID NO: 10300 - DNA, 33 bp, Homo sapien
tattccttaggatttaggtttctcaatatttta

SEQ ID NO: 10301 - DNA, 33 bp, Homo sapien
tgccctttccagaagacgctgtgtagtttcctg

SEQ ID NO: 10302 - DNA, 33 bp, Homo sapien
tgccctttccagaagatgctgtgtagtttcctg

SEQ ID NO: 10303 - DNA, 33 bp, Homo sapien
ttttccaagtaaagaaaggagtggggagaaagc

SEQ ID NO: 10304 - DNA, 33 bp, Homo sapien
ttttccaagtaaagaagggagtggggagaaagc

SEQ ID NO: 10305 - DNA, 33 bp, Homo sapien
ctaaacaggttgtgtacgtagtattcattttct

SEQ ID NO: 10306 - DNA, 33 bp, Homo sapien
ctaaacaggttgtgtatgtagtattcattttct

SEQ ID NO: 10307 - DNA, 33 bp, Homo sapien
aagagctgtaattgacagaataaacatggaaag

SEQ ID NO: 10308 - DNA, 33 bp, Homo sapien
aagagctgtaattgaccgaataaacatggaaag

SEQ ID NO: 10309 - DNA, 33 bp, Homo sapien
acagtggtgtcctaaaaaacaaatgagtgctta

SEQ ID NO: 10310 - DNA, 33 bp, Homo sapien
acagtggtgtcctaaagaacaaatgagtgctta

SEQ ID NO: 10311 - DNA, 33 bp, Homo sapien
gaactttcttggaccactcctgcaagacactgt

SEQ ID NO: 10312 - DNA, 33 bp, Homo sapien
gaactttcttggaccattcctgcaagacactgt

SEQ ID NO: 10313 - DNA, 33 bp, Homo sapien
agaaatgtcaaaatgaagttaaatcacaggatg

SEQ ID NO: 10314 - DNA, 33 bp, Homo sapien
agaaatgtcaaaatgatgttaaatcacaggatg

SEQ ID NO: 10315 - DNA, 33 bp, Homo sapien
aaagttgaaatgttgtaaagttgtcactttgta

SEQ ID NO: 10316 - DNA, 33 bp, Homo sapien
aaagttgaaatgttgtgaagttgtcactttgta

SEQ ID NO: 10317 - DNA, 33 bp, Homo sapien
ccactaatgaatgaaccgattttcttgcctcct

SEQ ID NO: 10318 - DNA, 33 bp, Homo sapien
ccactaatgaatgaactgattttcttgcctcct

SEQ ID NO: 10319 - DNA, 33 bp, Homo sapien
gaagtgagatgctcaaagaaaaaggatgactta

SEQ ID NO: 10320 - DNA, 33 bp, Homo sapien
gaagtgagatgctcaaggaaaaaggatgactta

SEQ ID NO: 10321 - DNA, 33 bp, Homo sapien
gaatgaatgtagtaacaaatggtgtgaatgggt

SEQ ID NO: 10322 - DNA, 33 bp, Homo sapien
gaatgaatgtagtaacgaatggtgtgaatgggt

SEQ ID NO: 10323 - DNA, 33 bp, Homo sapien
ctccatcatagcagcacatagtagatgttcagc

SEQ ID NO: 10324 - DNA, 33 bp, Homo sapien
ctccatcatagcagcatatagtagatgttcagc

SEQ ID NO: 10325 - DNA, 33 bp, Homo sapien
cagcaaaaagcatgaaagtgtcagagaagctgc

SEQ ID NO: 10326 - DNA, 33 bp, Homo sapien
cagcaaaaagcatgaacgtgtcagagaagctgc

SEQ ID NO: 10327 - DNA, 33 bp, Homo sapien
cccataagaaattagcacattgaagccttgatt

SEQ ID NO: 10328 - DNA, 33 bp, Homo sapien
cccataagaaattagcgcattgaagccttgatt

SEQ ID NO: 10329 - DNA, 33 bp, Homo sapien
ggagagtggctgaaagacacttgcagtactcag

SEQ ID NO: 10330 - DNA, 33 bp, Homo sapien
ggagagtggctgaaaggcacttgcagtactcag

SEQ ID NO: 10331 - DNA, 33 bp, Homo sapien
cagtttttcttccttacgcctccctaattctta

SEQ ID NO: 10332 - DNA, 33 bp, Homo sapien
cagtttttcttccttatgcctccctaattctta

SEQ ID NO: 10333 - DNA, 33 bp, Homo sapien
tatttttggcttgaagacacttatattctgatt

SEQ ID NO: 10334 - DNA, 33 bp, Homo sapien
tatttttggcttgaaggcacttatattctgatt

SEQ ID NO: 10335 - DNA, 33 bp, Homo sapien
tgtgtaggaatgtccacctgtctgactccaggc

SEQ ID NO: 10336 - DNA, 33 bp, Homo sapien
tgtgtaggaatgtccatctgtctgactccaggc

SEQ ID NO: 10337 - DNA, 33 bp, Homo sapien
agccacttcctgtccacgtgacactttacatct

SEQ ID NO: 10338 - DNA, 33 bp, Homo sapien
agccacttcctgtccatgtgacactttacatct

SEQ ID NO: 10339 - DNA, 33 bp, Homo sapien
cagtacaacagcacaaatacacaagcgcgactt

SEQ ID NO: 10340 - DNA, 33 bp, Homo sapien
cagtacaacagcacaactacacaagcgcgactt

SEQ ID NO: 10341 - DNA, 33 bp, Homo sapien
aacggtacccaagagccacatcagtacaacagc

SEQ ID NO: 10342 - DNA, 33 bp, Homo sapien
aacggtacccaagagctacatcagtacaacagc

SEQ ID NO: 10343 - DNA, 33 bp, Homo sapien
ataattagggctaacacgtaccttcactgttag

SEQ ID NO: 10344 - DNA, 33 bp, Homo sapien
ataattagggctaacatgtaccttcactgttag

SEQ ID NO: 10345 - DNA, 33 bp, Homo sapien
aagctacactgagacaacagcatggctgagagc

SEQ ID NO: 10346 - DNA, 33 bp, Homo sapien
aagctacactgagacagcagcatggctgagagc

SEQ ID NO: 10347 - DNA, 33 bp, Homo sapien
gggggacagaagtggaaatggagttaaaggatt

SEQ ID NO: 10348 - DNA, 33 bp, Homo sapien
gggggacagaagtggagatggagttaaaggatt

SEQ ID NO: 10349 - DNA, 33 bp, Homo sapien
tccccaggtataacccacaacctgcagggatca

SEQ ID NO: 10350 - DNA, 33 bp, Homo sapien
tccccaggtataacccgcaacctgcagggatca

SEQ ID NO: 10351 - DNA, 33 bp, Homo sapien
tttgctccttatcagacccccaagcagttggtg

SEQ ID NO: 10352 - DNA, 33 bp, Homo sapien
tttgctccttatcagatccccaagcagttggtg

SEQ ID NO: 10353 - DNA, 33 bp, Homo sapien
ttccaggaggcgcagaaaaaactaagatgccac

SEQ ID NO: 10354 - DNA, 33 bp, Homo sapien
ttccaggaggcgcagagaaaactaagatgccac

SEQ ID NO: 10355 - DNA, 33 bp, Homo sapien
gatgagggttggaacaaaagaaatgtgttctct

SEQ ID NO: 10356 - DNA, 33 bp, Homo sapien
gatgagggttggaacagaagaaatgtgttctct

SEQ ID NO: 10357 - DNA, 33 bp, Homo sapien
ctaccatttgtggcaccggaaaaatggcagctg

SEQ ID NO: 10358 - DNA, 33 bp, Homo sapien
ctaccatttgtggcactggaaaaatggcagctg

SEQ ID NO: 10359 - DNA, 33 bp, Homo sapien
caagagcttgggccggacaagttaccctaatga

SEQ ID NO: 10360 - DNA, 33 bp, Homo sapien
caagagcttgggccgggcaagttaccctaatga

SEQ ID NO: 10361 - DNA, 33 bp, Homo sapien
ggattgaggtgaggatcaaaggagtgaatccag

SEQ ID NO: 10362 - DNA, 33 bp, Homo sapien
ggattgaggtgaggatgaaaggagtgaatccag

SEQ ID NO: 10363 - DNA, 33 bp, Homo sapien
agtcagcctcagttaaaatccttgcaccttcat

SEQ ID NO: 10364 - DNA, 33 bp, Homo sapien
agtcagcctcagttaacatccttgcaccttcat

SEQ ID NO: 10365 - DNA, 33 bp, Homo sapien
ccactgcactgtgtcaactttctatgatgtcag

SEQ ID NO: 10366 - DNA, 33 bp, Homo sapien
ccactgcactgtgtcacctttctatgatgtcag

SEQ ID NO: 10367 - DNA, 33 bp, Homo sapien
gtaggaaatcgtcaaacggcttctgtgcacaat

SEQ ID NO: 10368 - DNA, 33 bp, Homo sapien
gtaggaaatcgtcaaatggcttctgtgcacaat

SEQ ID NO: 10369 - DNA, 33 bp, Homo sapien
aggaagctggactgaaaaggtggtcctcaacct

SEQ ID NO: 10370 - DNA, 33 bp, Homo sapien
aggaagctggactgaacaggtggtcctcaacct

SEQ ID NO: 10371 - DNA, 33 bp, Homo sapien
gagcaccaagccggaaatcagctgttttacttg

SEQ ID NO: 10372 - DNA, 33 bp, Homo sapien
gagcaccaagccggaagtcagctgttttacttg

SEQ ID NO: 10373 - DNA, 33 bp, Homo sapien
ggaagtgtgagaattgacaaatactacgaatca

SEQ ID NO: 10374 - DNA, 33 bp, Homo sapien
ggaagtgtgagaattggcaaatactacgaatca

SEQ ID NO: 10375 - DNA, 33 bp, Homo sapien
actcaaccagagccaaacttgaatgcgctgaag

SEQ ID NO: 10376 - DNA, 33 bp, Homo sapien
actcaaccagagccaaccttgaatgcgctgaag

SEQ ID NO: 10377 - DNA, 33 bp, Homo sapien
cctccagcacccgtgggattcttggatgacaaa

SEQ ID NO: 10378 - DNA, 33 bp, Homo sapien
cctccagcacccgtggtattcttggatgacaaa

SEQ ID NO: 10379 - DNA, 33 bp, Homo sapien
tctcagcacattgaacacacaaattcatttaat

SEQ ID NO: 10380 - DNA, 33 bp, Homo sapien
tctcagcacattgaacgcacaaattcatttaat

SEQ ID NO: 10381 - DNA, 33 bp, Homo sapien
tttgtgatcctcaataaaacctgatatgaggca

SEQ ID NO: 10382 - DNA, 33 bp, Homo sapien
tttgtgatcctcaatagaacctgatatgaggca

SEQ ID NO: 10383 - DNA, 33 bp, Homo sapien
aagtctgcctccaacacccttacccagggcacg

SEQ ID NO: 10384 - DNA, 33 bp, Homo sapien
aagtctgcctccaacatccttacccagggcacg

SEQ ID NO: 10385 - DNA, 33 bp, Homo sapien
tgaagtttagggccacaagaagtctttacacca

SEQ ID NO: 10386 - DNA, 33 bp, Homo sapien
tgaagtttagggccacgagaagtctttacacca

SEQ ID NO: 10387 - DNA, 33 bp, Homo sapien
cggtgcatgataaaaaataactgaccaaataac

SEQ ID NO: 10388 - DNA, 33 bp, Homo sapien
cggtgcatgataaaaattaactgaccaaataac

SEQ ID NO: 10389 - DNA, 33 bp, Homo sapien
ttccagtctgacatctaagagcaagcattgtga

SEQ ID NO: 10390 - DNA, 33 bp, Homo sapien
ttccagtctgacatctgagagcaagcattgtga

SEQ ID NO: 10391 - DNA, 33 bp, Homo sapien
tgtgaacaacacaagactactgataaatgtaga

SEQ ID NO: 10392 - DNA, 33 bp, Homo sapien
tgtgaacaacacaagattactgataaatgtaga

SEQ ID NO: 10393 - DNA, 33 bp, Homo sapien
ggagtcagcactccaaacggtagccaccatcat

SEQ ID NO: 10394 - DNA, 33 bp, Homo sapien
ggagtcagcactccaagcggtagccaccatcat

SEQ ID NO: 10395 - DNA, 33 bp, Homo sapien
ggtaaatcagatatttgaaagtcagcattgtat

SEQ ID NO: 10396 - DNA, 33 bp, Homo sapien
ggtaaatcagatattttaaagtcagcattgtat

SEQ ID NO: 10397 - DNA, 33 bp, Homo sapien
atgtattaacatcctacgaactgaagcttggcc

SEQ ID NO: 10398 - DNA, 33 bp, Homo sapien
atgtattaacatcctatgaactgaagcttggcc

SEQ ID NO: 10399 - DNA, 33 bp, Homo sapien
atgtcagtttttcagaacattcttgcctttcat

SEQ ID NO: 10400 - DNA, 33 bp, Homo sapien
atgtcagtttttcagagcattcttgcctttcat

SEQ ID NO: 10401 - DNA, 33 bp, Homo sapien
acttcctggtttggcaaagaaaaaatctgtgcc

SEQ ID NO: 10402 - DNA, 33 bp, Homo sapien
acttcctggtttggcagagaaaaaatctgtgcc

SEQ ID NO: 10403 - DNA, 33 bp, Homo sapien
tgagcattccttgacacaagagatcatatctca

SEQ ID NO: 10404 - DNA, 33 bp, Homo sapien
tgagcattccttgacataagagatcatatctca

SEQ ID NO: 10405 - DNA, 33 bp, Homo sapien
tgaaaagtctcagcacagcgtcaagcacagggt

SEQ ID NO: 10406 - DNA, 33 bp, Homo sapien
tgaaaagtctcagcacggcgtcaagcacagggt

SEQ ID NO: 10407 - DNA, 33 bp, Homo sapien
ggtatgctcatcttcacgtttgtccttccctcc

SEQ ID NO: 10408 - DNA, 33 bp, Homo sapien
ggtatgctcatcttcatgtttgtccttccctcc

SEQ ID NO: 10409 - DNA, 33 bp, Homo sapien
tcctactggacaagataagcgagcagagggtag

SEQ ID NO: 10410 - DNA, 33 bp, Homo sapien
tcctactggacaagatgagcgagcagagggtag

SEQ ID NO: 10411 - DNA, 33 bp, Homo sapien
ccagaactctgtgaagcagggatgaagcctgtc

SEQ ID NO: 10412 - DNA, 33 bp, Homo sapien
ccagaactctgtgaagtagggatgaagcctgtc

SEQ ID NO: 10413 - DNA, 33 bp, Homo sapien
gcaacttccatttccactcctgaggccacacct

SEQ ID NO: 10414 - DNA, 33 bp, Homo sapien
gcaacttccatttccagtcctgaggccacacct

SEQ ID NO: 10415 - DNA, 33 bp, Homo sapien
tcccctcctcacatgagaatgttttcctgtgta

SEQ ID NO: 10416 - DNA, 33 bp, Homo sapien
tcccctcctcacatgataatgttttcctgtgta

SEQ ID NO: 10417 - DNA, 33 bp, Homo sapien
caacacggaatgacaacagcttaacaagacaga

SEQ ID NO: 10418 - DNA, 33 bp, Homo sapien
caacacggaatgacaatagcttaacaagacaga

SEQ ID NO: 10419 - DNA, 33 bp, Homo sapien
cacagttagccacagcaagttcttcttaggtca

SEQ ID NO: 10420 - DNA, 33 bp, Homo sapien
cacagttagccacagctagttcttcttaggtca

SEQ ID NO: 10421 - DNA, 33 bp, Homo sapien
cctgcccattttcaaggctctggccaagtctag

SEQ ID NO: 10422 - DNA, 33 bp, Homo sapien
cctgcccattttcaagtctctggccaagtctag

SEQ ID NO: 10423 - DNA, 33 bp, Homo sapien
cctgaccacaatccggaatgagccagaggttcc

SEQ ID NO: 10424 - DNA, 33 bp, Homo sapien
cctgaccacaatccgggatgagccagaggttcc

SEQ ID NO: 10425 - DNA, 33 bp, Homo sapien
aaggttcagtgcttccaccgggcacgctcgctg

SEQ ID NO: 10426 - DNA, 33 bp, Homo sapien
aaggttcagtgcttccgccgggcacgctcgctg

SEQ ID NO: 10427 - DNA, 33 bp, Homo sapien
ataaggactgaagcaccggttcccacacacagt

SEQ ID NO: 10428 - DNA, 33 bp, Homo sapien
ataaggactgaagcactggttcccacacacagt

SEQ ID NO: 10429 - DNA, 33 bp, Homo sapien
cagacaagacataggaaacacacgacacaactg

SEQ ID NO: 10430 - DNA, 33 bp, Homo sapien
cagacaagacataggacacacacgacacaactg

SEQ ID NO: 10431 - DNA, 33 bp, Homo sapien
agcagctcatttccaaatcacaacatccctgtg

SEQ ID NO: 10432 - DNA, 33 bp, Homo sapien
agcagctcatttccaagtcacaacatccctgtg

SEQ ID NO: 10433 - DNA, 33 bp, Homo sapien
tggaaaggttgagatgcagccactaggcgtgcc

SEQ ID NO: 10434 - DNA, 33 bp, Homo sapien
tggaaaggttgagatgtagccactaggcgtgcc

SEQ ID NO: 10435 - DNA, 33 bp, Homo sapien
aaatgatgaacatcataagctggtgtgattatc

SEQ ID NO: 10436 - DNA, 33 bp, Homo sapien
aaatgatgaacatcatgagctggtgtgattatc

SEQ ID NO: 10437 - DNA, 33 bp, Homo sapien
gtcaccacactcctcccccactgaacttgtttt

SEQ ID NO: 10438 - DNA, 33 bp, Homo sapien
gtcaccacactcctcctccactgaacttgtttt

SEQ ID NO: 10439 - DNA, 33 bp, Homo sapien
taggcatacctctaaccgtgtaacatgttttaa

SEQ ID NO: 10440 - DNA, 33 bp, Homo sapien
taggcatacctctaacggtgtaacatgttttaa

SEQ ID NO: 10441 - DNA, 33 bp, Homo sapien
gacaactttccacagacagtaagggcttaaatg

SEQ ID NO: 10442 - DNA, 33 bp, Homo sapien
gacaactttccacagagagtaagggcttaaatg

SEQ ID NO: 10443 - DNA, 33 bp, Homo sapien
gctgtctagggcaaaaaaatgaaagcatttata

SEQ ID NO: 10444 - DNA, 33 bp, Homo sapien
gctgtctagggcaaaagaatgaaagcatttata

SEQ ID NO: 10445 - DNA, 33 bp, Homo sapien
ttttctgtttcagaatcagggatagatggagtg

SEQ ID NO: 10446 - DNA, 33 bp, Homo sapien
ttttctgtttcagaattagggatagatggagtg

SEQ ID NO: 10447 - DNA, 33 bp, Homo sapien
cagaatgtgcagaaaaatatgtgctgcactaga

SEQ ID NO: 10448 - DNA, 33 bp, Homo sapien
cagaatgtgcagaaaagtatgtgctgcactaga

SEQ ID NO: 10449 - DNA, 33 bp, Homo sapien
gataaaacaacactcacatcatgacagtggtat

SEQ ID NO: 10450 - DNA, 33 bp, Homo sapien
gataaaacaacactcatatcatgacagtggtat

SEQ ID NO: 10451 - DNA, 33 bp, Homo sapien
aactaaaggtacaacacggcataataatctcca

SEQ ID NO: 10452 - DNA, 33 bp, Homo sapien
aactaaaggtacaacatggcataataatctcca

SEQ ID NO: 10453 - DNA, 33 bp, Homo sapien
caaacctagaagtctgcattaacgatctattac

SEQ ID NO: 10454 - DNA, 33 bp, Homo sapien
caaacctagaagtctgtattaacgatctattac

SEQ ID NO: 10455 - DNA, 33 bp, Homo sapien
taacaaagaatactccacatcaagatgggacca

SEQ ID NO: 10456 - DNA, 33 bp, Homo sapien
taacaaagaatactccgcatcaagatgggacca

SEQ ID NO: 10457 - DNA, 33 bp, Homo sapien
cacatattttaaaaacccacagccaatactatg

SEQ ID NO: 10458 - DNA, 33 bp, Homo sapien
cacatattttaaaaacgcacagccaatactatg

SEQ ID NO: 10459 - DNA, 33 bp, Homo sapien
tttggctcgataaccaatatggtctcctaattc

SEQ ID NO: 10460 - DNA, 33 bp, Homo sapien
tttggctcgataaccagtatggtctcctaattc

SEQ ID NO: 10461 - DNA, 33 bp, Homo sapien
gccaaatgggtggataccttttattacagaaga

SEQ ID NO: 10462 - DNA, 33 bp, Homo sapien
gccaaatgggtggatatcttttattacagaaga

SEQ ID NO: 10463 - DNA, 33 bp, Homo sapien
ctcttgtgaaaggactgaaacattcatacagga

SEQ ID NO: 10464 - DNA, 33 bp, Homo sapien
ctcttgtgaaaggacttaaacattcatacagga

SEQ ID NO: 10465 - DNA, 33 bp, Homo sapien
ggtacttgattatatacgcctctgaaatggcaa

SEQ ID NO: 10466 - DNA, 33 bp, Homo sapien
ggtacttgattatatatgcctctgaaatggcaa

SEQ ID NO: 10467 - DNA, 33 bp, Homo sapien
cattttcttcgcttacagacagaaacactggtg

SEQ ID NO: 10468 - DNA, 33 bp, Homo sapien
cattttcttcgcttactgacagaaacactggtg

SEQ ID NO: 10469 - DNA, 33 bp, Homo sapien
aaccctgtaatctctgaactatttggctaaatg

SEQ ID NO: 10470 - DNA, 33 bp, Homo sapien
aaccctgtaatctctgtactatttggctaaatg

SEQ ID NO: 10471 - DNA, 33 bp, Homo sapien
attcagcaacattgtgcagcctttgcataggtt

SEQ ID NO: 10472 - DNA, 33 bp, Homo sapien
attcagcaacattgtgtagcctttgcataggtt

SEQ ID NO: 10473 - DNA, 33 bp, Homo sapien
tgcttaacacaaaaacaaaggtaggctcctgat

SEQ ID NO: 10474 - DNA, 33 bp, Homo sapien
tgcttaacacaaaaacgaaggtaggctcctgat

SEQ ID NO: 10475 - DNA, 33 bp, Homo sapien
cacacctcactataccactcctttttggacaca

SEQ ID NO: 10476 - DNA, 33 bp, Homo sapien
cacacctcactatacccctcctttttggacaca

SEQ ID NO: 10477 - DNA, 33 bp, Homo sapien
taggcaacaagaaataaagatgtgcattgtcag

SEQ ID NO: 10478 - DNA, 33 bp, Homo sapien
taggcaacaagaaatatagatgtgcattgtcag

SEQ ID NO: 10479 - DNA, 33 bp, Homo sapien
agttatgtctgtgtaactctcattttgtagatt

SEQ ID NO: 10480 - DNA, 33 bp, Homo sapien
agttatgtctgtgtaattctcattttgtagatt

SEQ ID NO: 10481 - DNA, 33 bp, Homo sapien
cttcacaattactatgcaaggacctgctaattg

SEQ ID NO: 10482 - DNA, 33 bp, Homo sapien
cttcacaattactatgtaaggacctgctaattg

SEQ ID NO: 10483 - DNA, 33 bp, Homo sapien
taaacagttgacatgacacaattagcaggtcct

SEQ ID NO: 10484 - DNA, 33 bp, Homo sapien
taaacagttgacatgatacaattagcaggtcct

SEQ ID NO: 10485 - DNA, 33 bp, Homo sapien
gtaatttggtttaatgaattctttgtcactgtt

SEQ ID NO: 10486 - DNA, 33 bp, Homo sapien
gtaatttggtttaatggattctttgtcactgtt

SEQ ID NO: 10487 - DNA, 33 bp, Homo sapien
ttttattttgtgttcccaaatgtgttgtctgga

SEQ ID NO: 10488 - DNA, 33 bp, Homo sapien
ttttattttgtgttcctaaatgtgttgtctgga

SEQ ID NO: 10489 - DNA, 33 bp, Homo sapien
gaaggtctcagggtcaggtgttttgtgggagaa

SEQ ID NO: 10490 - DNA, 33 bp, Homo sapien
gaaggtctcagggtcatgtgttttgtgggagaa

SEQ ID NO: 10491 - DNA, 33 bp, Homo sapien
tagcgtatcatcaacacgggctggtggtgccag

SEQ ID NO: 10492 - DNA, 33 bp, Homo sapien
tagcgtatcatcaacatgggctggtggtgccag

SEQ ID NO: 10493 - DNA, 33 bp, Homo sapien
tcagagtacatgagacaaaagtgctcagacagc

SEQ ID NO: 10494 - DNA, 33 bp, Homo sapien
tcagagtacatgagacgaaagtgctcagacagc

SEQ ID NO: 10495 - DNA, 33 bp, Homo sapien
agcatattttcttctgaacacaggattggaaaa

SEQ ID NO: 10496 - DNA, 33 bp, Homo sapien
agcatattttcttctgtacacaggattggaaaa

SEQ ID NO: 10497 - DNA, 33 bp, Homo sapien
tcgatgttgttttgcactattttctgtgatctt

SEQ ID NO: 10498 - DNA, 33 bp, Homo sapien
tcgatgttgttttgcattattttctgtgatctt

SEQ ID NO: 10499 - DNA, 33 bp, Homo sapien
gttaaatgagaagtctaaaagagtccatttgct

SEQ ID NO: 10500 - DNA, 33 bp, Homo sapien
gttaaatgagaagtctgaaagagtccatttgct

SEQ ID NO: 10501 - DNA, 33 bp, Homo sapien
ccattttgttaaccaaaaaacaggcacaggaag

SEQ ID NO: 10502 - DNA, 33 bp, Homo sapien
ccattttgttaaccaagaaacaggcacaggaag

SEQ ID NO: 10503 - DNA, 33 bp, Homo sapien
gcctgctgctctagaacggggtagtagccaagg

SEQ ID NO: 10504 - DNA, 33 bp, Homo sapien
gcctgctgctctagaatggggtagtagccaagg

SEQ ID NO: 10505 - DNA, 33 bp, Homo sapien
tgttgtaagacattccagaactatagaagtgca

SEQ ID NO: 10506 - DNA, 33 bp, Homo sapien
tgttgtaagacattccggaactatagaagtgca

SEQ ID NO: 10507 - DNA, 33 bp, Homo sapien
taatgaaaacactgtgcatgtccctcagaaggg

SEQ ID NO: 10508 - DNA, 33 bp, Homo sapien
taatgaaaacactgtggatgtccctcagaaggg

SEQ ID NO: 10509 - DNA, 33 bp, Homo sapien
atcatgcctggctatacgtattcttttaggata

SEQ ID NO: 10510 - DNA, 33 bp, Homo sapien
atcatgcctggctatatgtattcttttaggata

SEQ ID NO: 10511 - DNA, 33 bp, Homo sapien
ccagttgtcccagcaacatttgttgaaaaaact

SEQ ID NO: 10512 - DNA, 33 bp, Homo sapien
ccagttgtcccagcaagatttgttgaaaaaact

SEQ ID NO: 10513 - DNA, 33 bp, Homo sapien
agaacttttgcaattcaccagtaaatagataaa

SEQ ID NO: 10514 - DNA, 33 bp, Homo sapien
agaacttttgcaattcgccagtaaatagataaa

SEQ ID NO: 10515 - DNA, 33 bp, Homo sapien
ggcttgcctgctaaccaaaacttaccacttccg

SEQ ID NO: 10516 - DNA, 33 bp, Homo sapien
ggcttgcctgctaaccgaaacttaccacttccg

SEQ ID NO: 10517 - DNA, 33 bp, Homo sapien
acatggcatagtctaacagagaagatttactga

SEQ ID NO: 10518 - DNA, 33 bp, Homo sapien
acatggcatagtctaatagagaagatttactga

SEQ ID NO: 10519 - DNA, 33 bp, Homo sapien
catttatcacagcctacgaagtgggaaatgaga

SEQ ID NO: 10520 - DNA, 33 bp, Homo sapien
catttatcacagcctatgaagtgggaaatgaga

SEQ ID NO: 10521 - DNA, 33 bp, Homo sapien
agtactagaacccaggaattctgtcttgcagct

SEQ ID NO: 10522 - DNA, 33 bp, Homo sapien
agtactagaacccaggcattctgtcttgcagct

SEQ ID NO: 10523 - DNA, 33 bp, Homo sapien
aacctcctcattctacacactatctccatgagt

SEQ ID NO: 10524 - DNA, 33 bp, Homo sapien
aacctcctcattctacgcactatctccatgagt

SEQ ID NO: 10525 - DNA, 33 bp, Homo sapien
ataagaaggatgaaagcagtaaaagagctaacg

SEQ ID NO: 10526 - DNA, 33 bp, Homo sapien
ataagaaggatgaaagtagtaaaagagctaacg

SEQ ID NO: 10527 - DNA, 33 bp, Homo sapien
ggatgtgggagaaaccagaatgccacccaggtc

SEQ ID NO: 10528 - DNA, 33 bp, Homo sapien
ggatgtgggagaaaccggaatgccacccaggtc

SEQ ID NO: 10529 - DNA, 33 bp, Homo sapien
tacatctgatctgtcactacattctataaactg

SEQ ID NO: 10530 - DNA, 33 bp, Homo sapien
tacatctgatctgtcattacattctataaactg

SEQ ID NO: 10531 - DNA, 33 bp, Homo sapien
atatacaaataaatacacaaagttctgatgaat

SEQ ID NO: 10532 - DNA, 33 bp, Homo sapien
atatacaaataaatacgcaaagttctgatgaat

SEQ ID NO: 10533 - DNA, 33 bp, Homo sapien
gcaagtgctgccctgacgaattcacgcacacag

SEQ ID NO: 10534 - DNA, 33 bp, Homo sapien
gcaagtgctgccctgaggaattcacgcacacag

SEQ ID NO: 10535 - DNA, 33 bp, Homo sapien
gtctaatggtcacccaacttctgcttgcatacc

SEQ ID NO: 10536 - DNA, 33 bp, Homo sapien
gtctaatggtcacccagcttctgcttgcatacc

SEQ ID NO: 10537 - DNA, 33 bp, Homo sapien
taagaaggcagatttacactgaacaaagaaaga

SEQ ID NO: 10538 - DNA, 33 bp, Homo sapien
taagaaggcagatttatactgaacaaagaaaga

SEQ ID NO: 10539 - DNA, 33 bp, Homo sapien
tttggtgctggtatgaccattagatggtattag

SEQ ID NO: 10540 - DNA, 33 bp, Homo sapien
tttggtgctggtatgatcattagatggtattag

SEQ ID NO: 10541 - DNA, 33 bp, Homo sapien
caaagtttaaattctgcagcatttaggattttg

SEQ ID NO: 10542 - DNA, 33 bp, Homo sapien
caaagtttaaattctggagcatttaggattttg

SEQ ID NO: 10543 - DNA, 33 bp, Homo sapien
acagatgatgtgattacgcttagattgggactt

SEQ ID NO: 10544 - DNA, 33 bp, Homo sapien
acagatgatgtgattatgcttagattgggactt

SEQ ID NO: 10545 - DNA, 33 bp, Homo sapien
tttatacaactcatcaatgaaggaaccagcagg

SEQ ID NO: 10546 - DNA, 33 bp, Homo sapien
tttatacaactcatcagtgaaggaaccagcagg

SEQ ID NO: 10547 - DNA, 33 bp, Homo sapien
gccagtatttttatcaccacaggccataatttt

SEQ ID NO: 10548 - DNA, 33 bp, Homo sapien
gccagtatttttatcatcacaggccataatttt

SEQ ID NO: 10549 - DNA, 33 bp, Homo sapien
tctttactttgcacccactaatccttacctgtc

SEQ ID NO: 10550 - DNA, 33 bp, Homo sapien
tctttactttgcacccgctaatccttacctgtc

SEQ ID NO: 10551 - DNA, 33 bp, Homo sapien
aactctcgttctgcccccgcaatgcgggaaagg

SEQ ID NO: 10552 - DNA, 33 bp, Homo sapien
aactctcgttctgcccgcgcaatgcgggaaagg

SEQ ID NO: 10553 - DNA, 33 bp, Homo sapien
ctcacagttagcaacactggtataagaccccag

SEQ ID NO: 10554 - DNA, 33 bp, Homo sapien
ctcacagttagcaacattggtataagaccccag

SEQ ID NO: 10555 - DNA, 33 bp, Homo sapien
ggaagcaacaggggacaaattactagccactct

SEQ ID NO: 10556 - DNA, 33 bp, Homo sapien
ggaagcaacaggggaccaattactagccactct

SEQ ID NO: 10557 - DNA, 33 bp, Homo sapien
gctttttgtatgcttagcacagcagaagtctgt

SEQ ID NO: 10558 - DNA, 33 bp, Homo sapien
gctttttgtatgcttatcacagcagaagtctgt

SEQ ID NO: 10559 - DNA, 33 bp, Homo sapien
ttttggtaagtattcccgatttacaatgaccat

SEQ ID NO: 10560 - DNA, 33 bp, Homo sapien
ttttggtaagtattcctgatttacaatgaccat

SEQ ID NO: 10561 - DNA, 33 bp, Homo sapien
aatgactgtagaaccaacaaatttatctatatt

SEQ ID NO: 10562 - DNA, 33 bp, Homo sapien
aatgactgtagaaccaccaaatttatctatatt

SEQ ID NO: 10563 - DNA, 33 bp, Homo sapien
aatagctgagaagccaatattcatcctgtcatc

SEQ ID NO: 10564 - DNA, 33 bp, Homo sapien
aatagctgagaagccagtattcatcctgtcatc

SEQ ID NO: 10565 - DNA, 33 bp, Homo sapien
taaagtgagaggaaaaaaaagtgcatcttagaa

SEQ ID NO: 10566 - DNA, 33 bp, Homo sapien
taaagtgagaggaaaagaaagtgcatcttagaa

SEQ ID NO: 10567 - DNA, 33 bp, Homo sapien
tggcctcaagtgatctcactacttcagcctccc

SEQ ID NO: 10568 - DNA, 33 bp, Homo sapien
tggcctcaagtgatcttactacttcagcctccc

SEQ ID NO: 10569 - DNA, 33 bp, Homo sapien
tagtttaagcgtttagcaaatgttttagtgaat

SEQ ID NO: 10570 - DNA, 33 bp, Homo sapien
tagtttaagcgtttagtaaatgttttagtgaat

SEQ ID NO: 10571 - DNA, 33 bp, Homo sapien
tggtctatgtccatataaggcatagtttcacat

SEQ ID NO: 10572 - DNA, 33 bp, Homo sapien
tggtctatgtccatatgaggcatagtttcacat

SEQ ID NO: 10573 - DNA, 33 bp, Homo sapien
caaaaacttgatttaaaagcaacataatattct

SEQ ID NO: 10574 - DNA, 33 bp, Homo sapien
caaaaacttgatttaagagcaacataatattct

SEQ ID NO: 10575 - DNA, 33 bp, Homo sapien
cagcaatactctcccaatctcccaagaaagaaa

SEQ ID NO: 10576 - DNA, 33 bp, Homo sapien
cagcaatactctcccagtctcccaagaaagaaa

SEQ ID NO: 10577 - DNA, 33 bp, Homo sapien
ttcataacataacaccaattcagaaagacctac

SEQ ID NO: 10578 - DNA, 33 bp, Homo sapien
ttcataacataacaccgattcagaaagacctac

SEQ ID NO: 10579 - DNA, 33 bp, Homo sapien
aaatgtggtagaaataacatgaatgtgttctag

SEQ ID NO: 10580 - DNA, 33 bp, Homo sapien
aaatgtggtagaaataccatgaatgtgttctag

SEQ ID NO: 10581 - DNA, 33 bp, Homo sapien
agtctgtagagtcaaaattcatgagttattatt

SEQ ID NO: 10582 - DNA, 33 bp, Homo sapien
agtctgtagagtcaaacttcatgagttattatt

SEQ ID NO: 10583 - DNA, 33 bp, Homo sapien
ggaatgcaatacacaaattaagtcacactgcag

SEQ ID NO: 10584 - DNA, 33 bp, Homo sapien
ggaatgcaatacacaagttaagtcacactgcag

SEQ ID NO: 10585 - DNA, 33 bp, Homo sapien
ttcaccttgtcatgaacgtgtttgcagtgtctt

SEQ ID NO: 10586 - DNA, 33 bp, Homo sapien
ttcaccttgtcatgaatgtgtttgcagtgtctt

SEQ ID NO: 10587 - DNA, 33 bp, Homo sapien
cctcagggtgcaataccagggagccaagactac

SEQ ID NO: 10588 - DNA, 33 bp, Homo sapien
cctcagggtgcaatactagggagccaagactac

SEQ ID NO: 10589 - DNA, 33 bp, Homo sapien
cagagctgggattagaataagctactattgggc

SEQ ID NO: 10590 - DNA, 33 bp, Homo sapien
cagagctgggattagagtaagctactattgggc

SEQ ID NO: 10591 - DNA, 33 bp, Homo sapien
aggtcaaagctctcaacggcctctaccctatct

SEQ ID NO: 10592 - DNA, 33 bp, Homo sapien
aggtcaaagctctcaatggcctctaccctatct

SEQ ID NO: 10593 - DNA, 33 bp, Homo sapien
tcagggttgttaggacaattaaaagagataaca

SEQ ID NO: 10594 - DNA, 33 bp, Homo sapien
tcagggttgttaggacgattaaaagagataaca

SEQ ID NO: 10595 - DNA, 33 bp, Homo sapien
ccagactcctggatgacgagcaaggtcttctcc

SEQ ID NO: 10596 - DNA, 33 bp, Homo sapien
ccagactcctggatgatgagcaaggtcttctcc

SEQ ID NO: 10597 - DNA, 33 bp, Homo sapien
actcttggttttctacactacctttgacaacca

SEQ ID NO: 10598 - DNA, 33 bp, Homo sapien
actcttggttttctacgctacctttgacaacca

SEQ ID NO: 10599 - DNA, 33 bp, Homo sapien
gaaaatgcctttattacatatttgacaattttg

SEQ ID NO: 10600 - DNA, 33 bp, Homo sapien
gaaaatgcctttattagatatttgacaattttg

SEQ ID NO: 10601 - DNA, 33 bp, Homo sapien
aactgtctcaggctaacggaaagaaaaatcagg

SEQ ID NO: 10602 - DNA, 33 bp, Homo sapien
aactgtctcaggctaatggaaagaaaaatcagg

SEQ ID NO: 10603 - DNA, 33 bp, Homo sapien
atgaccataaaaccaacacatttaggagatttg

SEQ ID NO: 10604 - DNA, 33 bp, Homo sapien
atgaccataaaaccaatacatttaggagatttg

SEQ ID NO: 10605 - DNA, 33 bp, Homo sapien
cctacctcagatgtcccaccttttccactctta

SEQ ID NO: 10606 - DNA, 33 bp, Homo sapien
cctacctcagatgtcctaccttttccactctta

SEQ ID NO: 10607 - DNA, 33 bp, Homo sapien
acacgcccagcatggaaggcataactcactgtg

SEQ ID NO: 10608 - DNA, 33 bp, Homo sapien
acacgcccagcatggagggcataactcactgtg

SEQ ID NO: 10609 - DNA, 33 bp, Homo sapien
agcatctgcaaagacactctcagaaataagcag

SEQ ID NO: 10610 - DNA, 33 bp, Homo sapien
agcatctgcaaagacattctcagaaataagcag

SEQ ID NO: 10611 - DNA, 33 bp, Homo sapien
gtgtggccttcagcaacagtaacaacaaccaca

SEQ ID NO: 10612 - DNA, 33 bp, Homo sapien
gtgtggccttcagcaatagtaacaacaaccaca

SEQ ID NO: 10613 - DNA, 33 bp, Homo sapien
ggggaagatttttgtaccctcccaggtgtgact

SEQ ID NO: 10614 - DNA, 33 bp, Homo sapien
ggggaagatttttgtatcctcccaggtgtgact

SEQ ID NO: 10615 - DNA, 33 bp, Homo sapien
atctttgcagacagccaagtcatcatgtgccgg

SEQ ID NO: 10616 - DNA, 33 bp, Homo sapien
atctttgcagacagccgagtcatcatgtgccgg

SEQ ID NO: 10617 - DNA, 33 bp, Homo sapien
ctcctaccccaggagaccattttacagatgagg

SEQ ID NO: 10618 - DNA, 33 bp, Homo sapien
ctcctaccccaggagatcattttacagatgagg

SEQ ID NO: 10619 - DNA, 33 bp, Homo sapien
gtacccactgccagaaaagtgctaatgcagcct

SEQ ID NO: 10620 - DNA, 33 bp, Homo sapien
gtacccactgccagaagagtgctaatgcagcct

SEQ ID NO: 10621 - DNA, 33 bp, Homo sapien
aaccactgctttagacagcgcaatagtttctga

SEQ ID NO: 10622 - DNA, 33 bp, Homo sapien
aaccactgctttagacggcgcaatagtttctga

SEQ ID NO: 10623 - DNA, 33 bp, Homo sapien
ctgtgggaaataaacaataacaagatgtaactg

SEQ ID NO: 10624 - DNA, 33 bp, Homo sapien
ctgtgggaaataaacagtaacaagatgtaactg

SEQ ID NO: 10625 - DNA, 33 bp, Homo sapien
gggtgaaatgagaaaagaagcgaaatctgtggt

SEQ ID NO: 10626 - DNA, 33 bp, Homo sapien
gggtgaaatgagaaaataagcgaaatctgtggt

SEQ ID NO: 10627 - DNA, 33 bp, Homo sapien
acaaatgcaaagaaaaggttatcaagagcacaa

SEQ ID NO: 10628 - DNA, 33 bp, Homo sapien
acaaatgcaaagaaaatgttatcaagagcacaa

SEQ ID NO: 10629 - DNA, 33 bp, Homo sapien
tgtcttagtacctgagaactgatagccggggaa

SEQ ID NO: 10630 - DNA, 33 bp, Homo sapien
tgtcttagtacctgaggactgatagccggggaa

SEQ ID NO: 10631 - DNA, 33 bp, Homo sapien
catttgtgtttgcaagccctgacgcagggccaa

SEQ ID NO: 10632 - DNA, 33 bp, Homo sapien
catttgtgtttgcaagtcctgacgcagggccaa

SEQ ID NO: 10633 - DNA, 33 bp, Homo sapien
cgctcacaagctaagacgtcactagtctgggac

SEQ ID NO: 10634 - DNA, 33 bp, Homo sapien
cgctcacaagctaagatgtcactagtctgggac

SEQ ID NO: 10635 - DNA, 33 bp, Homo sapien
ttaacatgccagggtgcaagcgtttggccaact

SEQ ID NO: 10636 - DNA, 33 bp, Homo sapien
ttaacatgccagggtgtaagcgtttggccaact

SEQ ID NO: 10637 - DNA, 33 bp, Homo sapien
aaagctattgggctgaaagttatggtttattac

SEQ ID NO: 10638 - DNA, 33 bp, Homo sapien
aaagctattgggctgagagttatggtttattac

SEQ ID NO: 10639 - DNA, 33 bp, Homo sapien
aggtcttgtgattcacagcaatatcctgtccct

SEQ ID NO: 10640 - DNA, 33 bp, Homo sapien
aggtcttgtgattcacggcaatatcctgtccct

SEQ ID NO: 10641 - DNA, 33 bp, Homo sapien
acgtttagggatatgactatgatgtatctcatt

SEQ ID NO: 10642 - DNA, 33 bp, Homo sapien
acgtttagggatatgattatgatgtatctcatt

SEQ ID NO: 10643 - DNA, 33 bp, Homo sapien
ttcaggaataactcccaggactaggtcatcaag

SEQ ID NO: 10644 - DNA, 33 bp, Homo sapien
ttcaggaataactcccgggactaggtcatcaag

SEQ ID NO: 10645 - DNA, 33 bp, Homo sapien
ttagtggacatcaagaataagacatgaacacgc

SEQ ID NO: 10646 - DNA, 33 bp, Homo sapien
ttagtggacatcaagattaagacatgaacacgc

SEQ ID NO: 10647 - DNA, 33 bp, Homo sapien
aatttttaattgataactatcattgccatgcat

SEQ ID NO: 10648 - DNA, 33 bp, Homo sapien
aatttttaattgataagtatcattgccatgcat

SEQ ID NO: 10649 - DNA, 33 bp, Homo sapien
attcatgtgcgatggacagagagcaagggttgc

SEQ ID NO: 10650 - DNA, 33 bp, Homo sapien
attcatgtgcgatggatagagagcaagggttgc

SEQ ID NO: 10651 - DNA, 33 bp, Homo sapien
agtgtggcccggacaccaacccatcacattagg

SEQ ID NO: 10652 - DNA, 33 bp, Homo sapien
agtgtggcccggacacgaacccatcacattagg

SEQ ID NO: 10653 - DNA, 33 bp, Homo sapien
agtggttgaaggggacacattagaagctacttc

SEQ ID NO: 10654 - DNA, 33 bp, Homo sapien
agtggttgaaggggacgcattagaagctacttc

SEQ ID NO: 10655 - DNA, 33 bp, Homo sapien
caaggcaagggcatgaataaataaaaagcgggg

SEQ ID NO: 10656 - DNA, 33 bp, Homo sapien
caaggcaagggcatgagtaaataaaaagcgggg

SEQ ID NO: 10657 - DNA, 33 bp, Homo sapien
gaacatcaaatttcccacctgcaaaatggtctt

SEQ ID NO: 10658 - DNA, 33 bp, Homo sapien
gaacatcaaatttcccgcctgcaaaatggtctt

SEQ ID NO: 10659 - DNA, 33 bp, Homo sapien
ctgggatgagtcaggacgcagagcaggtaacca

SEQ ID NO: 10660 - DNA, 33 bp, Homo sapien
ctgggatgagtcaggatgcagagcaggtaacca

SEQ ID NO: 10661 - DNA, 33 bp, Homo sapien
cagacaagcaaagagcaaacaagatgaagaaga

SEQ ID NO: 10662 - DNA, 33 bp, Homo sapien
cagacaagcaaagagcgaacaagatgaagaaga

SEQ ID NO: 10663 - DNA, 33 bp, Homo sapien
tcagaggatggccagaagatgaggagagcagag

SEQ ID NO: 10664 - DNA, 33 bp, Homo sapien
tcagaggatggccagaggatgaggagagcagag

SEQ ID NO: 10665 - DNA, 33 bp, Homo sapien
ctgtgcatctttacaaaagcaatttacagtaca

SEQ ID NO: 10666 - DNA, 33 bp, Homo sapien
ctgtgcatctttacaagagcaatttacagtaca

SEQ ID NO: 10667 - DNA, 33 bp, Homo sapien
ctctgcaaccagactgccaacctttgagcctgt

SEQ ID NO: 10668 - DNA, 33 bp, Homo sapien
ctctgcaaccagactgtcaacctttgagcctgt

SEQ ID NO: 10669 - DNA, 33 bp, Homo sapien
ttgatgatttatctaactgctcttctagccatt

SEQ ID NO: 10670 - DNA, 33 bp, Homo sapien
ttgatgatttatctaattgctcttctagccatt

SEQ ID NO: 10671 - DNA, 33 bp, Homo sapien
aagcagatatagctaaaaaaaatggcggtgctt

SEQ ID NO: 10672 - DNA, 33 bp, Homo sapien
aagcagatatagctaacaaaaatggcggtgctt

SEQ ID NO: 10673 - DNA, 33 bp, Homo sapien
ctggatcgagttactgaaattcttgcatacctc

SEQ ID NO: 10674 - DNA, 33 bp, Homo sapien
ctggatcgagttactggaattcttgcatacctc

SEQ ID NO: 10675 - DNA, 33 bp, Homo sapien
cagcatctgaccatagccaatgggccaggtgca

SEQ ID NO: 10676 - DNA, 33 bp, Homo sapien
cagcatctgaccataggcaatgggccaggtgca

SEQ ID NO: 10677 - DNA, 33 bp, Homo sapien
cagcccaagggtgctgaatgattccttctggcc

SEQ ID NO: 10678 - DNA, 33 bp, Homo sapien
cagcccaagggtgctggatgattccttctggcc

SEQ ID NO: 10679 - DNA, 33 bp, Homo sapien
acccacacgtgtgcaacttaccttccagttggg

SEQ ID NO: 10680 - DNA, 33 bp, Homo sapien
acccacacgtgtgcaatttaccttccagttggg

SEQ ID NO: 10681 - DNA, 33 bp, Homo sapien
atttctgccagtctgacaggagaaaaatggaat

SEQ ID NO: 10682 - DNA, 33 bp, Homo sapien
atttctgccagtctgataggagaaaaatggaat

SEQ ID NO: 10683 - DNA, 33 bp, Homo sapien
gaagctctctaattaccgataaaggtctctaag

SEQ ID NO: 10684 - DNA, 33 bp, Homo sapien
gaagctctctaattactgataaaggtctctaag

SEQ ID NO: 10685 - DNA, 33 bp, Homo sapien
cccatttcacaggcggcaaaactgaatcccaga

SEQ ID NO: 10686 - DNA, 33 bp, Homo sapien
cccatttcacaggcggtaaaactgaatcccaga

SEQ ID NO: 10687 - DNA, 33 bp, Homo sapien
gtgaaatggggatgataataccacatagggttg

SEQ ID NO: 10688 - DNA, 33 bp, Homo sapien
gtgaaatggggatgatcataccacatagggttg

SEQ ID NO: 10689 - DNA, 33 bp, Homo sapien
cttggtgttatcacccacaaacatcttagaaaa

SEQ ID NO: 10690 - DNA, 33 bp, Homo sapien
cttggtgttatcacccgcaaacatcttagaaaa

SEQ ID NO: 10691 - DNA, 33 bp, Homo sapien
ggagggggcaggtagaagaaccaagacagatgg

SEQ ID NO: 10692 - DNA, 33 bp, Homo sapien
ggagggggcaggtagaggaaccaagacagatgg

SEQ ID NO: 10693 - DNA, 33 bp, Homo sapien
atctgggatctattgaacttccgcattatgctg

SEQ ID NO: 10694 - DNA, 33 bp, Homo sapien
atctgggatctattgaccttccgcattatgctg

SEQ ID NO: 10695 - DNA, 33 bp, Homo sapien
tgtttcctattgagacactgtgtgagtgaggat

SEQ ID NO: 10696 - DNA, 33 bp, Homo sapien
tgtttcctattgagaccctgtgtgagtgaggat

SEQ ID NO: 10697 - DNA, 33 bp, Homo sapien
gtgggggtggtatagacagatgacgcacattca

SEQ ID NO: 10698 - DNA, 33 bp, Homo sapien
gtgggggtggtatagagagatgacgcacattca

SEQ ID NO: 10699 - DNA, 33 bp, Homo sapien
agggctttggctgcaacgggaaagatggtggtt

SEQ ID NO: 10700 - DNA, 33 bp, Homo sapien
agggctttggctgcaatgggaaagatggtggtt

SEQ ID NO: 10701 - DNA, 33 bp, Homo sapien
acaggggggcaagagcactttgtgggattgtca

SEQ ID NO: 10702 - DNA, 33 bp, Homo sapien
acaggggggcaagagcgctttgtgggattgtca

SEQ ID NO: 10703 - DNA, 33 bp, Homo sapien
tcagagattttggagacggagcatcggctctgc

SEQ ID NO: 10704 - DNA, 33 bp, Homo sapien
tcagagattttggagatggagcatcggctctgc

SEQ ID NO: 10705 - DNA, 33 bp, Homo sapien
gggaacaaagaaacaaaaggcgctgctcctaat

SEQ ID NO: 10706 - DNA, 33 bp, Homo sapien
gggaacaaagaaacaacaggcgctgctcctaat

SEQ ID NO: 10707 - DNA, 33 bp, Homo sapien
ccctgtcttccatcaaactgacattcttactct

SEQ ID NO: 10708 - DNA, 33 bp, Homo sapien
ccctgtcttccatcaagctgacattcttactct

SEQ ID NO: 10709 - DNA, 33 bp, Homo sapien
gcagtgacaggttagacagaactgtgctagaat

SEQ ID NO: 10710 - DNA, 33 bp, Homo sapien
gcagtgacaggttagagagaactgtgctagaat

SEQ ID NO: 10711 - DNA, 33 bp, Homo sapien
cttttaggatgcacacaaattgtccctaatgct

SEQ ID NO: 10712 - DNA, 33 bp, Homo sapien
cttttaggatgcacaccaattgtccctaatgct

SEQ ID NO: 10713 - DNA, 33 bp, Homo sapien
gaatagacgatgtcaacgtactctacttatgat

SEQ ID NO: 10714 - DNA, 33 bp, Homo sapien
gaatagacgatgtcaatgtactctacttatgat

SEQ ID NO: 10715 - DNA, 33 bp, Homo sapien
caggccccaggaacacaaaacctgacaaacagg

SEQ ID NO: 10716 - DNA, 33 bp, Homo sapien
caggccccaggaacacgaaacctgacaaacagg

SEQ ID NO: 10717 - DNA, 33 bp, Homo sapien
ggctcctgagtcctcacaaattgcaggctggtt

SEQ ID NO: 10718 - DNA, 33 bp, Homo sapien
ggctcctgagtcctcagaaattgcaggctggtt

SEQ ID NO: 10719 - DNA, 33 bp, Homo sapien
ctgggggtttcgttgccacaacctcactgtgat

SEQ ID NO: 10720 - DNA, 33 bp, Homo sapien
ctgggggtttcgttgctacaacctcactgtgat

SEQ ID NO: 10721 - DNA, 33 bp, Homo sapien
gtcctactgcggaagcaaagtgcagccagaatt

SEQ ID NO: 10722 - DNA, 33 bp, Homo sapien
gtcctactgcggaagcgaagtgcagccagaatt

SEQ ID NO: 10723 - DNA, 33 bp, Homo sapien
tccaggggaacctggcactgcttctgtttgtcc

SEQ ID NO: 10724 - DNA, 33 bp, Homo sapien
tccaggggaacctggcgctgcttctgtttgtcc

SEQ ID NO: 10725 - DNA, 33 bp, Homo sapien
ggaaagaagatccgcacggctaaagcagagtaa

SEQ ID NO: 10726 - DNA, 33 bp, Homo sapien
ggaaagaagatccgcatggctaaagcagagtaa

SEQ ID NO: 10727 - DNA, 33 bp, Homo sapien
acaggctttcttccacacagtcctggcttggtg

SEQ ID NO: 10728 - DNA, 33 bp, Homo sapien
acaggctttcttccacgcagtcctggcttggtg

SEQ ID NO: 10729 - DNA, 33 bp, Homo sapien
cacccatgtgtgtgaaatccaaattcccacaag

SEQ ID NO: 10730 - DNA, 33 bp, Homo sapien
cacccatgtgtgtgaagtccaaattcccacaag

SEQ ID NO: 10731 - DNA, 33 bp, Homo sapien
ctcagcctcatgaagaagtctgccatcaagaag

SEQ ID NO: 10732 - DNA, 33 bp, Homo sapien
ctcagcctcatgaagacgtctgccatcaagaag

SEQ ID NO: 10733 - DNA, 33 bp, Homo sapien
ccaggaaccaagctcagcactttaaatgtcctg

SEQ ID NO: 10734 - DNA, 33 bp, Homo sapien
ccaggaaccaagctcatcactttaaatgtcctg

SEQ ID NO: 10735 - DNA, 33 bp, Homo sapien
catttaggccacttcacggaaaaaggtcttatg

SEQ ID NO: 10736 - DNA, 33 bp, Homo sapien
catttaggccacttcatggaaaaaggtcttatg

SEQ ID NO: 10737 - DNA, 33 bp, Homo sapien
ccagaatatgtttccacatgtaatcctgtgccc

SEQ ID NO: 10738 - DNA, 33 bp, Homo sapien
ccagaatatgtttccagatgtaatcctgtgccc

SEQ ID NO: 10739 - DNA, 33 bp, Homo sapien
tccagtgcccaccaaacgcggacacgtgagaga

SEQ ID NO: 10740 - DNA, 33 bp, Homo sapien
tccagtgcccaccaaatgcggacacgtgagaga

SEQ ID NO: 10741 - DNA, 33 bp, Homo sapien
tgagaattcagtgaaaacagagatgtggactgt

SEQ ID NO: 10742 - DNA, 33 bp, Homo sapien
tgagaattcagtgaaaccagagatgtggactgt

SEQ ID NO: 10743 - DNA, 33 bp, Homo sapien
ccccatcttgagggtgacacaacttaaggggca

SEQ ID NO: 10744 - DNA, 33 bp, Homo sapien
ccccatcttgagggtgccacaacttaaggggca

SEQ ID NO: 10745 - DNA, 33 bp, Homo sapien
gaggagcagtgggaacaaagaagaggtttccag

SEQ ID NO: 10746 - DNA, 33 bp, Homo sapien
gaggagcagtgggaacgaagaagaggtttccag

SEQ ID NO: 10747 - DNA, 33 bp, Homo sapien
tggaacccagttcttacatccctgtccatcacc

SEQ ID NO: 10748 - DNA, 33 bp, Homo sapien
tggaacccagttcttatatccctgtccatcacc

SEQ ID NO: 10749 - DNA, 33 bp, Homo sapien
ggtacagaacaagtgacgtcatttaatcctgct

SEQ ID NO: 10750 - DNA, 33 bp, Homo sapien
ggtacagaacaagtgatgtcatttaatcctgct

SEQ ID NO: 10751 - DNA, 33 bp, Homo sapien
gactgcaatgtgatggaattgtgtatgtattta

SEQ ID NO: 10752 - DNA, 33 bp, Homo sapien
gactgcaatgtgatgggattgtgtatgtattta

SEQ ID NO: 10753 - DNA, 33 bp, Homo sapien
gactctgttgtctacaagcaagaatactaataa

SEQ ID NO: 10754 - DNA, 33 bp, Homo sapien
gactctgttgtctacatgcaagaatactaataa

SEQ ID NO: 10755 - DNA, 33 bp, Homo sapien
acaatgatgttgcaaaaccattctacacacaca

SEQ ID NO: 10756 - DNA, 33 bp, Homo sapien
acaatgatgttgcaaacccattctacacacaca

SEQ ID NO: 10757 - DNA, 33 bp, Homo sapien
ccatgacctcaagtcaaacaaggccacaaggct

SEQ ID NO: 10758 - DNA, 33 bp, Homo sapien
ccatgacctcaagtcagacaaggccacaaggct

SEQ ID NO: 10759 - DNA, 33 bp, Homo sapien
ttaacccatttgaaggcattttttaattcaaaa

SEQ ID NO: 10760 - DNA, 33 bp, Homo sapien
ttaacccatttgaagggattttttaattcaaaa

SEQ ID NO: 10761 - DNA, 33 bp, Homo sapien
tgtttctgtatgtaccagacgggcagcccctgc

SEQ ID NO: 10762 - DNA, 33 bp, Homo sapien
tgtttctgtatgtaccggacgggcagcccctgc

SEQ ID NO: 10763 - DNA, 33 bp, Homo sapien
ctgcctcttacgtcatcaggaggttgaataatg

SEQ ID NO: 10764 - DNA, 33 bp, Homo sapien
ctgcctcttacgtcatgaggaggttgaataatg

SEQ ID NO: 10765 - DNA, 33 bp, Homo sapien
aatctcatcgaacccaagagaagaagtaattag

SEQ ID NO: 10766 - DNA, 33 bp, Homo sapien
aatctcatcgaacccaggagaagaagtaattag

SEQ ID NO: 10767 - DNA, 33 bp, Homo sapien
ccaggaaaggcctcatcaagaagatggcattaa

SEQ ID NO: 10768 - DNA, 33 bp, Homo sapien
ccaggaaaggcctcattaagaagatggcattaa

SEQ ID NO: 10769 - DNA, 33 bp, Homo sapien
tacttaaagtagcaacccatcccttctcagtca

SEQ ID NO: 10770 - DNA, 33 bp, Homo sapien
tacttaaagtagcaactcatcccttctcagtca

SEQ ID NO: 10771 - DNA, 33 bp, Homo sapien
tgccatagccgcgtacactgtgtactctgtgac

SEQ ID NO: 10772 - DNA, 33 bp, Homo sapien
tgccatagccgcgtacgctgtgtactctgtgac

SEQ ID NO: 10773 - DNA, 33 bp, Homo sapien
gctgtagagagtagagactagcagcaagaagct

SEQ ID NO: 10774 - DNA, 33 bp, Homo sapien
gctgtagagagtagaggctagcagcaagaagct

SEQ ID NO: 10775 - DNA, 33 bp, Homo sapien
ttcgttcttgaagccaagtttcagaaatacgtt

SEQ ID NO: 10776 - DNA, 33 bp, Homo sapien
ttcgttcttgaagccacgtttcagaaatacgtt

SEQ ID NO: 10777 - DNA, 33 bp, Homo sapien
tggtgaggcattattacagtctcaggctgggcg

SEQ ID NO: 10778 - DNA, 33 bp, Homo sapien
tggtgaggcattattatagtctcaggctgggcg

SEQ ID NO: 10779 - DNA, 33 bp, Homo sapien
tagttccctcttactaccctcttctctgaacaa

SEQ ID NO: 10780 - DNA, 33 bp, Homo sapien
tagttccctcttactatcctcttctctgaacaa

SEQ ID NO: 10781 - DNA, 33 bp, Homo sapien
acattattgctagtcaaatcttgtactaggcac

SEQ ID NO: 10782 - DNA, 33 bp, Homo sapien
acattattgctagtcagatcttgtactaggcac

SEQ ID NO: 10783 - DNA, 33 bp, Homo sapien
cccttcatgctaccgacgagattgagactcaga

SEQ ID NO: 10784 - DNA, 33 bp, Homo sapien
cccttcatgctaccgatgagattgagactcaga

SEQ ID NO: 10785 - DNA, 33 bp, Homo sapien
gagggtaacacagaaaaaaaggctgagagagac

SEQ ID NO: 10786 - DNA, 33 bp, Homo sapien
gagggtaacacagaaacaaaggctgagagagac

SEQ ID NO: 10787 - DNA, 33 bp, Homo sapien
aaggatagatcttacactcccaaagaatcagag

SEQ ID NO: 10788 - DNA, 33 bp, Homo sapien
aaggatagatcttacattcccaaagaatcagag

SEQ ID NO: 10789 - DNA, 33 bp, Homo sapien
tcttcttctaccataccaggctgcctgggccag

SEQ ID NO: 10790 - DNA, 33 bp, Homo sapien
tcttcttctaccatactaggctgcctgggccag

SEQ ID NO: 10791 - DNA, 33 bp, Homo sapien
ccctccataaccctacaaatcaactcagtgagg

SEQ ID NO: 10792 - DNA, 33 bp, Homo sapien
ccctccataaccctacgaatcaactcagtgagg

SEQ ID NO: 10793 - DNA, 33 bp, Homo sapien
tgagaacaggttggaccggtttcccagcctgct

SEQ ID NO: 10794 - DNA, 33 bp, Homo sapien
tgagaacaggttggactggtttcccagcctgct

SEQ ID NO: 10795 - DNA, 33 bp, Homo sapien
acactttcccttccgcagcctcctcgtttggac

SEQ ID NO: 10796 - DNA, 33 bp, Homo sapien
acactttcccttccgcggcctcctcgtttggac

SEQ ID NO: 10797 - DNA, 33 bp, Homo sapien
ctagcatgaaatgcacagaagcttgattttatt

SEQ ID NO: 10798 - DNA, 33 bp, Homo sapien
ctagcatgaaatgcacggaagcttgattttatt

SEQ ID NO: 10799 - DNA, 33 bp, Homo sapien
ttgtgattgtcagcaacgcttcctgtactgcca

SEQ ID NO: 10800 - DNA, 33 bp, Homo sapien
ttgtgattgtcagcaatgcttcctgtactgcca

SEQ ID NO: 10801 - DNA, 33 bp, Homo sapien
ctggtggcaaataagccgagttttatatacagt

SEQ ID NO: 10802 - DNA, 33 bp, Homo sapien
ctggtggcaaataagctgagttttatatacagt

SEQ ID NO: 10803 - DNA, 33 bp, Homo sapien
gggtctccaagcagaaagaacctagcagaaaat

SEQ ID NO: 10804 - DNA, 33 bp, Homo sapien
gggtctccaagcagaaggaacctagcagaaaat

SEQ ID NO: 10805 - DNA, 33 bp, Homo sapien
aggaacagagggttcccccccaacagtgagcat

SEQ ID NO: 10806 - DNA, 33 bp, Homo sapien
aggaacagagggttcctccccaacagtgagcat

SEQ ID NO: 10807 - DNA, 33 bp, Homo sapien
gaaatgcgactataacgagaactcagctggctt

SEQ ID NO: 10808 - DNA, 33 bp, Homo sapien
gaaatgcgactataactagaactcagctggctt

SEQ ID NO: 10809 - DNA, 33 bp, Homo sapien; identical to SEQ ID NO: 10807

SEQ ID NO: 10810 - DNA, 33 bp, Homo sapien; identical to SEQ ID NO: 10808

SEQ ID NO: 10811 - DNA, 33 bp, Homo sapien
tctaactaggtaaagcaacagtgttatgatgcc

SEQ ID NO: 10812 - DNA, 33 bp, Homo sapien
tctaactaggtaaagcgacagtgttatgatgcc

SEQ ID NO: 10813 - DNA, 33 bp, Homo sapien
tacctctatgcctaagcacgtgttcttcctctg

SEQ ID NO: 10814 - DNA, 33 bp, Homo sapien
tacctctatgcctaagtacgtgttcttcctctg

SEQ ID NO: 10815 - DNA, 33 bp, Homo sapien
gatagtgtgatcacatcaaaacacaaggcaagc

SEQ ID NO: 10816 - DNA, 33 bp, Homo sapien
gatagtgtgatcacatgaaaacacaaggcaagc

SEQ ID NO: 10817 - DNA, 33 bp, Homo sapien
tcttggttcttctttacgatttctcgttattgc

SEQ ID NO: 10818 - DNA, 33 bp, Homo sapien
tcttggttcttctttatgatttctcgttattgc

SEQ ID NO: 10819 - DNA, 33 bp, Homo sapien
tggcagaatacttctacagtagagcaatatgtt

SEQ ID NO: 10820 - DNA, 33 bp, Homo sapien
tggcagaatacttctatagtagagcaatatgtt

SEQ ID NO: 10821 - DNA, 33 bp, Homo sapien
gtacatccaacacaccagacacctaatggtttt

SEQ ID NO: 10822 - DNA, 33 bp, Homo sapien
gtacatccaacacacctgacacctaatggtttt

SEQ ID NO: 10823 - DNA, 33 bp, Homo sapien
gcatcccttgtgtctgaaacattcctcacccag

SEQ ID NO: 10824 - DNA, 33 bp, Homo sapien
gcatcccttgtgtctgcaacattcctcacccag

SEQ ID NO: 10825 - DNA, 33 bp, Homo sapien
tattttgacttcaagacattttgacttcaagag

SEQ ID NO: 10826 - DNA, 33 bp, Homo sapien
tattttgacttcaagatattttgacttcaagag

SEQ ID NO: 10827 - DNA, 33 bp, Homo sapien
gccccaattagcccacaatatgcaaaggttctg

SEQ ID NO: 10828 - DNA, 33 bp, Homo sapien
gccccaattagcccacgatatgcaaaggttctg

SEQ ID NO: 10829 - DNA, 33 bp, Homo sapien
atatggtggaggaggacgacataggatttcaat

SEQ ID NO: 10830 - DNA, 33 bp, Homo sapien
atatggtggaggaggatgacataggatttcaat

SEQ ID NO: 10831 - DNA, 33 bp, Homo sapien
aaattggaagtatgtacaaaggttttgttttgt

SEQ ID NO: 10832 - DNA, 33 bp, Homo sapien
aaattggaagtatgtataaaggttttgttttgt

SEQ ID NO: 10833 - DNA, 33 bp, Homo sapien
actccgagtgtttttgaagagctctgtgccaag

SEQ ID NO: 10834 - DNA, 33 bp, Homo sapien
actccgagtgtttttggagagctctgtgccaag

SEQ ID NO: 10835 - DNA, 33 bp, Homo sapien
gttgttgctggaagacaggaggctcatctttcc

SEQ ID NO: 10836 - DNA, 33 bp, Homo sapien
gttgttgctggaagactggaggctcatctttcc

SEQ ID NO: 10837 - DNA, 33 bp, Homo sapien
tgtagtcagcacttcccggaaatcggcaaactg

SEQ ID NO: 10838 - DNA, 33 bp, Homo sapien
tgtagtcagcacttcctggaaatcggcaaactg

SEQ ID NO: 10839 - DNA, 33 bp, Homo sapien
tctgggagatactttacggaagagatgaagttt

SEQ ID NO: 10840 - DNA, 33 bp, Homo sapien
tctgggagatactttatggaagagatgaagttt

SEQ ID NO: 10841 - DNA, 33 bp, Homo sapien
cacaagcgggaccatacgcatgccccccacaca

SEQ ID NO: 10842 - DNA, 33 bp, Homo sapien
cacaagcgggaccatatgcatgccccccacaca

SEQ ID NO: 10843 - DNA, 33 bp, Homo sapien
aagcttgttactcagaacacagcttaaatatca

SEQ ID NO: 10844 - DNA, 33 bp, Homo sapien
aagcttgttactcagagcacagcttaaatatca

SEQ ID NO: 10845 - DNA, 33 bp, Homo sapien
ggcgcctgatgctcccaagtctgaggcttagtg

SEQ ID NO: 10846 - DNA, 33 bp, Homo sapien
ggcgcctgatgctcccgagtctgaggcttagtg

SEQ ID NO: 10847 - DNA, 33 bp, Homo sapien
actagaatttccaggaatcaacccacagattgg

SEQ ID NO: 10848 - DNA, 33 bp, Homo sapien
actagaatttccaggagtcaacccacagattgg

SEQ ID NO: 10849 - DNA, 33 bp, Homo sapien
gccaagactgaagcggcaactgccagaggtgaa

SEQ ID NO: 10850 - DNA, 33 bp, Homo sapien
gccaagactgaagcggtaactgccagaggtgaa

SEQ ID NO: 10851 - DNA, 33 bp, Homo sapien
aattgaatggtgtaagcctccttctaactcaaa

SEQ ID NO: 10852 - DNA, 33 bp, Homo sapien
aattgaatggtgtaaggctccttctaactcaaa

SEQ ID NO: 10853 - DNA, 33 bp, Homo sapien
ttgatggtacccaaagcctccgcgtctatcacc

SEQ ID NO: 10854 - DNA, 33 bp, Homo sapien
ttgatggtacccaaagtctccgcgtctatcacc

SEQ ID NO: 10855 - DNA, 33 bp, Homo sapien
aagatgtcacattactgagcctttaaaacctga

SEQ ID NO: 10856 - DNA, 33 bp, Homo sapien
aagatgtcacattacttagcctttaaaacctga

SEQ ID NO: 10857 - DNA, 33 bp, Homo sapien
aattttctaagcaatgaatgacctgccttatga

SEQ ID NO: 10858 - DNA, 33 bp, Homo sapien
aattttctaagcaatgcatgacctgccttatga

SEQ ID NO: 10859 - DNA, 33 bp, Homo sapien
ggccaataccaaatataagagatatgcagcttt

SEQ ID NO: 10860 - DNA, 33 bp, Homo sapien
ggccaataccaaatatgagagatatgcagcttt

SEQ ID NO: 10861 - DNA, 33 bp, Homo sapien
cactgcacctggttagaaactatttgtgtacag

SEQ ID NO: 10862 - DNA, 33 bp, Homo sapien
cactgcacctggttaggaactatttgtgtacag

SEQ ID NO: 10863 - DNA, 33 bp, Homo sapien
acgacctaacctcagagaattaacttgcctgag

SEQ ID NO: 10864 - DNA, 33 bp, Homo sapien
acgacctaacctcagataattaacttgcctgag

SEQ ID NO: 10865 - DNA, 33 bp, Homo sapien
caatgagtgaccttgcgcgaaggagaaagaccc

SEQ ID NO: 10866 - DNA, 33 bp, Homo sapien
caatgagtgaccttgctcgaaggagaaagaccc

SEQ ID NO: 10867 - DNA, 33 bp, Homo sapien
caaatgaatgtatacccataactgtatgcttca

SEQ ID NO: 10868 - DNA, 33 bp, Homo sapien
caaatgaatgtataccgataactgtatgcttca

SEQ ID NO: 10869 - DNA, 33 bp, Homo sapien
cgttggagaagtgcaactgctatgcctgacgtg

SEQ ID NO: 10870 - DNA, 33 bp, Homo sapien
cgttggagaagtgcaattgctatgcctgacgtg

SEQ ID NO: 10871 - DNA, 33 bp, Homo sapien
atctctcctactctgcccttttagcttaaccaa

SEQ ID NO: 10872 - DNA, 33 bp, Homo sapien
atctctcctactctgctcttttagcttaaccaa

SEQ ID NO: 10873 - DNA, 33 bp, Homo sapien
tgtggataccctagtaatacatgtaactctaga

SEQ ID NO: 10874 - DNA, 33 bp, Homo sapien
tgtggataccctagtactacatgtaactctaga

SEQ ID NO: 10875 - DNA, 33 bp, Homo sapien
gggctagtggaggaaaagaacaagaaataagca

SEQ ID NO: 10876 - DNA, 33 bp, Homo sapien
gggctagtggaggaaacgaacaagaaataagca

SEQ ID NO: 10877 - DNA, 33 bp, Homo sapien
gaagattctatcataactgtgactagatggatg

SEQ ID NO: 10878 - DNA, 33 bp, Homo sapien
gaagattctatcataattgtgactagatggatg

SEQ ID NO: 10879 - DNA, 33 bp, Homo sapien
cactaaggtgttttgaacaggaaaagtgaaaag

SEQ ID NO: 10880 - DNA, 33 bp, Homo sapien
cactaaggtgttttgatcaggaaaagtgaaaag

SEQ ID NO: 10881 - DNA, 33 bp, Homo sapien
aaaacttacaaagtagcagagtgaacacatatg

SEQ ID NO: 10882 - DNA, 33 bp, Homo sapien
aaaacttacaaagtaggagagtgaacacatatg

SEQ ID NO: 10883 - DNA, 33 bp, Homo sapien
tataatacataataaacccatgaggtaggaact

SEQ ID NO: 10884 - DNA, 33 bp, Homo sapien
tataatacataataaatccatgaggtaggaact

SEQ ID NO: 10885 - DNA, 33 bp, Homo sapien
ctctccacttctacagaacttgcagtcaagcgg

SEQ ID NO: 10886 - DNA, 33 bp, Homo sapien
ctctccacttctacagcacttgcagtcaagcgg

SEQ ID NO: 10887 - DNA, 33 bp, Homo sapien
aagtgttttctgtacacgatctcattttattct

SEQ ID NO: 10888 - DNA, 33 bp, Homo sapien
aagtgttttctgtacatgatctcattttattct

SEQ ID NO: 10889 - DNA, 33 bp, Homo sapien
gcaatgatgctgactgacacagtgaaggccgag

SEQ ID NO: 10890 - DNA, 33 bp, Homo sapien
gcaatgatgctgactgccacagtgaaggccgag

SEQ ID NO: 10891 - DNA, 33 bp, Homo sapien
gaaggtacggatacccccagccaggctgaatcc

SEQ ID NO: 10892 - DNA, 33 bp, Homo sapien
gaaggtacggataccctcagccaggctgaatcc

SEQ ID NO: 10893 - DNA, 33 bp, Homo sapien
gggctcagcagggctcaactgggtgtgggaaca

SEQ ID NO: 10894 - DNA, 33 bp, Homo sapien
gggctcagcagggctcgactgggtgtgggaaca

SEQ ID NO: 10895 - DNA, 33 bp, Homo sapien
tcctggacaagggcaacggaggctgtgaggcca

SEQ ID NO: 10896 - DNA, 33 bp, Homo sapien
tcctggacaagggcaagggaggctgtgaggcca

SEQ ID NO: 10897 - DNA, 33 bp, Homo sapien
ggccagacacttcaccacgatagcctcagattt

SEQ ID NO: 10898 - DNA, 33 bp, Homo sapien
ggccagacacttcaccgcgatagcctcagattt

SEQ ID NO: 10899 - DNA, 33 bp, Homo sapien
cacactagaaaacctaacaaagcagccaggtcc

SEQ ID NO: 10900 - DNA, 33 bp, Homo sapien
cacactagaaaacctagcaaagcagccaggtcc

SEQ ID NO: 10901 - DNA, 33 bp, Homo sapien
cactctctcctggaaacgcttcctccaggcttc

SEQ ID NO: 10902 - DNA, 33 bp, Homo sapien
cactctctcctggaaatgcttcctccaggcttc

SEQ ID NO: 10903 - DNA, 33 bp, Homo sapien
caagtggatttcaagccatcagtgtgaagtagt

SEQ ID NO: 10904 - DNA, 33 bp, Homo sapien
caagtggatttcaagctatcagtgtgaagtagt

SEQ ID NO: 10905 - DNA, 33 bp, Homo sapien
atttgcagttagtcgaggaggaagaaacttgaa

SEQ ID NO: 10906 - DNA, 33 bp, Homo sapien
atttgcagttagtcgatgaggaagaaacttgaa

SEQ ID NO: 10907 - DNA, 33 bp, Homo sapien
catctatacctagaaccggatgctcctggtcct

SEQ ID NO: 10908 - DNA, 33 bp, Homo sapien
catctatacctagaactggatgctcctggtcct

SEQ ID NO: 10909 - DNA, 33 bp, Homo sapien
aagaaaccagagccgaaatttgaacctagcccc

SEQ ID NO: 10910 - DNA, 33 bp, Homo sapien
aagaaaccagagccgagatttgaacctagcccc

SEQ ID NO: 10911 - DNA, 33 bp, Homo sapien
tagaactgtatagtaactcctgccatgtttcat

SEQ ID NO: 10912 - DNA, 33 bp, Homo sapien
tagaactgtatagtaattcctgccatgtttcat

SEQ ID NO: 10913 - DNA, 33 bp, Homo sapien
gatggccctgcacaacagttatctagccccaaa

SEQ ID NO: 10914 - DNA, 33 bp, Homo sapien
gatggccctgcacaacggttatctagccccaaa

SEQ ID NO: 10915 - DNA, 33 bp, Homo sapien
gactgagatcaggtccagatactctacaacaag

SEQ ID NO: 10916 - DNA, 33 bp, Homo sapien
gactgagatcaggtccggatactctacaacaag

SEQ ID NO: 10917 - DNA, 33 bp, Homo sapien
gtttgttttcatatcacggctattgtgaataat

SEQ ID NO: 10918 - DNA, 33 bp, Homo sapien
gtttgttttcatatcatggctattgtgaataat

SEQ ID NO: 10919 - DNA, 33 bp, Homo sapien
ttagtttaactagtccgcatttgtctattttgg

SEQ ID NO: 10920 - DNA, 33 bp, Homo sapien
ttagtttaactagtcctcatttgtctattttgg

SEQ ID NO: 10921 - DNA, 33 bp, Homo sapien
ctggcaaattggataaagggttaagacccatcg

SEQ ID NO: 10922 - DNA, 33 bp, Homo sapien
ctggcaaattggataacgggttaagacccatcg

SEQ ID NO: 10923 - DNA, 33 bp, Homo sapien
gagaaatgaaagcgtacgtgcatgcaaagattt

SEQ ID NO: 10924 - DNA, 33 bp, Homo sapien
gagaaatgaaagcgtatgtgcatgcaaagattt

SEQ ID NO: 10925 - DNA, 33 bp, Homo sapien
ccgctgggttgcttcacccagattatagctcca

SEQ ID NO: 10926 - DNA, 33 bp, Homo sapien
ccgctgggttgcttcatccagattatagctcca

SEQ ID NO: 10927 - DNA, 33 bp, Homo sapien
tcatttttcatttcaccaagctggtgtttcaga

SEQ ID NO: 10928 - DNA, 33 bp, Homo sapien
tcatttttcatttcactaagctggtgtttcaga

SEQ ID NO: 10929 - DNA, 33 bp, Homo sapien
atcctgagccttagaacctgccttagtagggct

SEQ ID NO: 10930 - DNA, 33 bp, Homo sapien
atcctgagccttagaagctgccttagtagggct

SEQ ID NO: 10931 - DNA, 33 bp, Homo sapien
aaagattgttatattcacatggcacagagccca

SEQ ID NO: 10932 - DNA, 33 bp, Homo sapien
aaagattgttatattcgcatggcacagagccca

SEQ ID NO: 10933 - DNA, 33 bp, Homo sapien
aagtgtctgttgcaatcaagcctgtccttctgc

SEQ ID NO: 10934 - DNA, 33 bp, Homo sapien
aagtgtctgttgcaatgaagcctgtccttctgc

SEQ ID NO: 10935 - DNA, 33 bp, Homo sapien
ttggaggaggtacacaataaggaacagctatta

SEQ ID NO: 10936 - DNA, 33 bp, Homo sapien
ttggaggaggtacacagtaaggaacagctatta

SEQ ID NO: 10937 - DNA, 33 bp, Homo sapien
agggtctagtctgggtaaactcaggctgccagg

SEQ ID NO: 10938 - DNA, 33 bp, Homo sapien
agggtctagtctgggtgaactcaggctgccagg

SEQ ID NO: 10939 - DNA, 33 bp, Homo sapien
ggaacttgtgaccttcgcagttaccatggcaga

SEQ ID NO: 10940 - DNA, 33 bp, Homo sapien
ggaacttgtgaccttctcagttaccatggcaga

SEQ ID NO: 10941 - DNA, 33 bp, Homo sapien
aggtttgtcttcctgcgaccctagagtaagtca

SEQ ID NO: 10942 - DNA, 33 bp, Homo sapien
aggtttgtcttcctgctaccctagagtaagtca

SEQ ID NO: 10943 - DNA, 33 bp, Homo sapien
tcccagacactggcccagacttgagtgggcgca

SEQ ID NO: 10944 - DNA, 33 bp, Homo sapien
tcccagacactggccctgacttgagtgggcgca

SEQ ID NO: 10945 - DNA, 33 bp, Homo sapien
tgtgttctttgcaatacgtggtccgtagtgtgg

SEQ ID NO: 10946 - DNA, 33 bp, Homo sapien
tgtgttctttgcaatatgtggtccgtagtgtgg

SEQ ID NO: 10947 - DNA, 33 bp, Homo sapien
gagtgcctgatttgtgaaagtgattctagtgat

SEQ ID NO: 10948 - DNA, 33 bp, Homo sapien
gagtgcctgatttgtggaagtgattctagtgat

SEQ ID NO: 10949 - DNA, 33 bp, Homo sapien
tatgctgctataacaggatatcacaaactcagt

SEQ ID NO: 10950 - DNA, 33 bp, Homo sapien
tatgctgctataacagtatatcacaaactcagt

SEQ ID NO: 10951 - DNA, 33 bp, Homo sapien
ttcatgataaattccaatctcatagttctggag

SEQ ID NO: 10952 - DNA, 33 bp, Homo sapien
ttcatgataaattccagtctcatagttctggag

SEQ ID NO: 10953 - DNA, 33 bp, Homo sapien
ttggaaacaacccccagtgcaacagtgttagga

SEQ ID NO: 10954 - DNA, 33 bp, Homo sapien
ttggaaacaacccccattgcaacagtgttagga

SEQ ID NO: 10955 - DNA, 33 bp, Homo sapien
tgttctttccccttagaagttctctgagcctca

SEQ ID NO: 10956 - DNA, 33 bp, Homo sapien
tgttctttccccttagcagttctctgagcctca

SEQ ID NO: 10957 - DNA, 33 bp, Homo sapien
taatgctctttgtgaaccaggagggcggtcagg

SEQ ID NO: 10958 - DNA, 33 bp, Homo sapien
taatgctctttgtgaatcaggagggcggtcagg

SEQ ID NO: 10959 - DNA, 33 bp, Homo sapien
taacatttcttctgtacgtacacagctttggac

SEQ ID NO: 10960 - DNA, 33 bp, Homo sapien
taacatttcttctgtatgtacacagctttggac

SEQ ID NO: 10961 - DNA, 33 bp, Homo sapien
gagggctgaagatagccgaactctagcttggca

SEQ ID NO: 10962 - DNA, 33 bp, Homo sapien
gagggctgaagatagctgaactctagcttggca

SEQ ID NO: 10963 - DNA, 33 bp, Homo sapien
tgaaataaggatcctacgcctaccttagagtgc

SEQ ID NO: 10964 - DNA, 33 bp, Homo sapien
tgaaataaggatcctatgcctaccttagagtgc

SEQ ID NO: 10965 - DNA, 33 bp, Homo sapien
tgagataaggagacacagcttagattggggtca

SEQ ID NO: 10966 - DNA, 33 bp, Homo sapien
tgagataaggagacacggcttagattggggtca

SEQ ID NO: 10967 - DNA, 33 bp, Homo sapien
caaaaaatgtgtgcgcactcgcttgctttctct

SEQ ID NO: 10968 - DNA, 33 bp, Homo sapien
caaaaaatgtgtgcgcgctcgcttgctttctct

SEQ ID NO: 10969 - DNA, 33 bp, Homo sapien
aaacagcctgttgttacagcagatcctccgtgg

SEQ ID NO: 10970 - DNA, 33 bp, Homo sapien
aaacagcctgttgttatagcagatcctccgtgg

SEQ ID NO: 10971 - DNA, 33 bp, Homo sapien
tggcaggtgtaggatcagaaacacaggtttcaa

SEQ ID NO: 10972 - DNA, 33 bp, Homo sapien
tggcaggtgtaggatcggaaacacaggtttcaa

SEQ ID NO: 10973 - DNA, 33 bp, Homo sapien
agtaaaaagttttcacagaattatatgctacca

SEQ ID NO: 10974 - DNA, 33 bp, Homo sapien
agtaaaaagttttcacggaattatatgctacca

SEQ ID NO: 10975 - DNA, 33 bp, Homo sapien
ggttttcagagtattcaaggttgctctgggcgc

SEQ ID NO: 10976 - DNA, 33 bp, Homo sapien
ggttttcagagtattcgaggttgctctgggcgc

SEQ ID NO: 10977 - DNA, 33 bp, Homo sapien
ttgaaagtgaacaccacaggaagtgctgtacca

SEQ ID NO: 10978 - DNA, 33 bp, Homo sapien
ttgaaagtgaacaccataggaagtgctgtacca

SEQ ID NO: 10979 - DNA, 33 bp, Homo sapien
tctagggaggcctgtcaatagaactccagagtg

SEQ ID NO: 10980 - DNA, 33 bp, Homo sapien
tctagggaggcctgtcgatagaactccagagtg

SEQ ID NO: 10981 - DNA, 33 bp, Homo sapien
aatgacattagctatcaattatggagggtttat

SEQ ID NO: 10982 - DNA, 33 bp, Homo sapien
aatgacattagctatcgattatggagggtttat

SEQ ID NO: 10983 - DNA, 33 bp, Homo sapien
cctgacaaaaagataccgcagaatagaacactg

SEQ ID NO: 10984 - DNA, 33 bp, Homo sapien
cctgacaaaaagatactgcagaatagaacactg

SEQ ID NO: 10985 - DNA, 33 bp, Homo sapien
agttcacagagcaaggaatgtggcagagccagg

SEQ ID NO: 10986 - DNA, 33 bp, Homo sapien
agttcacagagcaaggtatgtggcagagccagg

SEQ ID NO: 10987 - DNA, 33 bp, Homo sapien
cctggtctggagtcttaaaaccaaaaagcccta

SEQ ID NO: 10988 - DNA, 33 bp, Homo sapien
cctggtctggagtcttgaaaccaaaaagcccta

SEQ ID NO: 10989 - DNA, 33 bp, Homo sapien
ggtcagggatctttaaccagagagaggaggaaa

SEQ ID NO: 10990 - DNA, 33 bp, Homo sapien
ggtcagggatctttaagcagagagaggaggaaa

SEQ ID NO: 10991 - DNA, 33 bp, Homo sapien
tggagttgggcacttaaggggcttggagcagca

SEQ ID NO: 10992 - DNA, 33 bp, Homo sapien
tggagttgggcacttagggggcttggagcagca

SEQ ID NO: 10993 - DNA, 33 bp, Homo sapien
tctgactggctctgaaatctctgttctttctgt

SEQ ID NO: 10994 - DNA, 33 bp, Homo sapien
tctgactggctctgaagtctctgttctttctgt

SEQ ID NO: 10995 - DNA, 33 bp, Homo sapien
gcaccaagaatgctcacatcctagtgacaagag

SEQ ID NO: 10996 - DNA, 33 bp, Homo sapien
gcaccaagaatgctcatatcctagtgacaagag

SEQ ID NO: 10997 - DNA, 33 bp, Homo sapien
gctcctggtggatgggaatgacaaacctgtaac

SEQ ID NO: 10998 - DNA, 33 bp, Homo sapien
gctcctggtggatggggatgacaaacctgtaac

SEQ ID NO: 10999 - DNA, 33 bp, Homo sapien
gatctccaaaccctcaataaatgtactaaatcc

SEQ ID NO: 11000 - DNA, 33 bp, Homo sapien
gatctccaaaccctcagtaaatgtactaaatcc

SEQ ID NO: 11001 - DNA, 33 bp, Homo sapien
tattcctctcaacaaccgtctcaggaagaggca

SEQ ID NO: 11002 - DNA, 33 bp, Homo sapien
tattcctctcaacaactgtctcaggaagaggca

SEQ ID NO: 11003 - DNA, 33 bp, Homo sapien
aaataaacaatctgaagaggccaatatctatta

SEQ ID NO: 11004 - DNA, 33 bp, Homo sapien
aaataaacaatctgaataggccaatatctatta

SEQ ID NO: 11005 - DNA, 33 bp, Homo sapien
gatgtgcagaattcaaagcaagggataggctgc

SEQ ID NO: 11006 - DNA, 33 bp, Homo sapien
gatgtgcagaattcaaggcaagggataggctgc

SEQ ID NO: 11007 - DNA, 33 bp, Homo sapien
aaggcctgtaccttgcagagaaaccctacaagt

SEQ ID NO: 11008 - DNA, 33 bp, Homo sapien
aaggcctgtaccttgcggagaaaccctacaagt

SEQ ID NO: 11009 - DNA, 33 bp, Homo sapien
gttctcagtggattccgagcaaaacgaattcac

SEQ ID NO: 11010 - DNA, 33 bp, Homo sapien
gttctcagtggattcctagcaaaacgaattcac

SEQ ID NO: 11011 - DNA, 33 bp, Homo sapien
cgtaatactaggaaaaagccctacctgagggag

SEQ ID NO: 11012 - DNA, 33 bp, Homo sapien
cgtaatactaggaaaacgccctacctgagggag

SEQ ID NO: 11013 - DNA, 33 bp, Homo sapien
tccttgatttgttatgaactgagagtggtgagt

SEQ ID NO: 11014 - DNA, 33 bp, Homo sapien
tccttgatttgttatggactgagagtggtgagt

SEQ ID NO: 11015 - DNA, 33 bp, Homo sapien
gttaagaaatctgataacaacctaatttaatct

SEQ ID NO: 11016 - DNA, 33 bp, Homo sapien
gttaagaaatctgatagcaacctaatttaatct

SEQ ID NO: 11017 - DNA, 33 bp, Homo sapien
cagtgctactgtagagattcatcggctcctccc

SEQ ID NO: 11018 - DNA, 33 bp, Homo sapien
cagtgctactgtagagtttcatcggctcctccc

SEQ ID NO: 11019 - DNA, 33 bp, Homo sapien
cagactagaaatactacaggtaaagtgtcaggc

SEQ ID NO: 11020 - DNA, 33 bp, Homo sapien
cagactagaaatactataggtaaagtgtcaggc

SEQ ID NO: 11021 - DNA, 33 bp, Homo sapien
gcccccagacttggcaccctgtctgggccacag

SEQ ID NO: 11022 - DNA, 33 bp, Homo sapien
gcccccagacttggcatcctgtctgggccacag

SEQ ID NO: 11023 - DNA, 33 bp, Homo sapien
tgaacaggaaactttgacaaaggttgagtgggt

SEQ ID NO: 11024 - DNA, 33 bp, Homo sapien
tgaacaggaaactttgtcaaaggttgagtgggt

SEQ ID NO: 11025 - DNA, 33 bp, Homo sapien
cctgggggcctggaaaataggccagctagcaag

SEQ ID NO: 11026 - DNA, 33 bp, Homo sapien
cctgggggcctggaaagtaggccagctagcaag

SEQ ID NO: 11027 - DNA, 33 bp, Homo sapien
acggcctccatgatgaaaagggctagccctgtg

SEQ ID NO: 11028 - DNA, 33 bp, Homo sapien
acggcctccatgatgagaagggctagccctgtg

SEQ ID NO: 11029 - DNA, 33 bp, Homo sapien
agtctgggttgtgacacattgaacagagaaaag

SEQ ID NO: 11030 - DNA, 33 bp, Homo sapien
agtctgggttgtgacatattgaacagagaaaag

SEQ ID NO: 11031 - DNA, 33 bp, Homo sapien
tggatacttcctcttacagggggcactttgaat

SEQ ID NO: 11032 - DNA, 33 bp, Homo sapien
tggatacttcctcttagagggggcactttgaat

SEQ ID NO: 11033 - DNA, 33 bp, Homo sapien
cgggtacaaggacagaacgaagcaacaaagatg

SEQ ID NO: 11034 - DNA, 33 bp, Homo sapien
cgggtacaaggacagagcgaagcaacaaagatg

SEQ ID NO: 11035 - DNA, 33 bp, Homo sapien
aggttgagaagtggaaaagacataaatggcaag

SEQ ID NO: 11036 - DNA, 33 bp, Homo sapien
aggttgagaagtggaagagacataaatggcaag

SEQ ID NO: 11037 - DNA, 33 bp, Homo sapien
cctagccaaatgcgataagctctcttttattaa

SEQ ID NO: 11038 - DNA, 33 bp, Homo sapien
cctagccaaatgcgatgagctctcttttattaa

SEQ ID NO: 11039 - DNA, 33 bp, Homo sapien
ggagaggtaagcataacaggcaagagagaaaac

SEQ ID NO: 11040 - DNA, 33 bp, Homo sapien
ggagaggtaagcataagaggcaagagagaaaac

SEQ ID NO: 11041 - DNA, 33 bp, Homo sapien
ctgtcaacggcctcacccagggtaaccagttta

SEQ ID NO: 11042 - DNA, 33 bp, Homo sapien
ctgtcaacggcctcactcagggtaaccagttta

SEQ ID NO: 11043 - DNA, 33 bp, Homo sapien
ggtccattactttcaccggatttggaaaaggtc

SEQ ID NO: 11044 - DNA, 33 bp, Homo sapien
ggtccattactttcactggatttggaaaaggtc

SEQ ID NO: 11045 - DNA, 33 bp, Homo sapien
aaggcaggctgctagccgaattccctcttcttc

SEQ ID NO: 11046 - DNA, 33 bp, Homo sapien
aaggcaggctgctagctgaattccctcttcttc

SEQ ID NO: 11047 - DNA, 33 bp, Homo sapien
agggcaaggaaattgaatagcagtgtctgccca

SEQ ID NO: 11048 - DNA, 33 bp, Homo sapien
agggcaaggaaattgattagcagtgtctgccca

SEQ ID NO: 11049 - DNA, 33 bp, Homo sapien
agtgctctgttgacaaagagtgtgaggctgctg

SEQ ID NO: 11050 - DNA, 33 bp, Homo sapien
agtgctctgttgacaacgagtgtgaggctgctg

SEQ ID NO: 11051 - DNA, 33 bp, Homo sapien
aaacacggatcaatccccaatacagaaggtcca

SEQ ID NO: 11052 - DNA, 33 bp, Homo sapien
aaacacggatcaatcctcaatacagaaggtcca

SEQ ID NO: 11053 - DNA, 33 bp, Homo sapien
gtatggggatgggtcaactgaagtctggtggag

SEQ ID NO: 11054 - DNA, 33 bp, Homo sapien
gtatggggatgggtcagctgaagtctggtggag

SEQ ID NO: 11055 - DNA, 33 bp, Homo sapien
tctatattctttgtgacgataaacttataattc

SEQ ID NO: 11056 - DNA, 33 bp, Homo sapien
tctatattctttgtgatgataaacttataattc

SEQ ID NO: 11057 - DNA, 33 bp, Homo sapien
aacactgagattgctacgcactacagatcttgt

SEQ ID NO: 11058 - DNA, 33 bp, Homo sapien
aacactgagattgctatgcactacagatcttgt

SEQ ID NO: 11059 - DNA, 33 bp, Homo sapien
actagtcacttccaaacgtgggtttcctctttg

SEQ ID NO: 11060 - DNA, 33 bp, Homo sapien
actagtcacttccaaatgtgggtttcctctttg

SEQ ID NO: 11061 - DNA, 33 bp, Homo sapien
gtgactagtcctgggaaaaacccaagatatgag

SEQ ID NO: 11062 - DNA, 33 bp, Homo sapien
gtgactagtcctgggacaaacccaagatatgag

SEQ ID NO: 11063 - DNA, 33 bp, Homo sapien
agatatgagttggatccgagctaccttgtgacc

SEQ ID NO: 11064 - DNA, 33 bp, Homo sapien
agatatgagttggatctgagctaccttgtgacc

SEQ ID NO: 11065 - DNA, 33 bp, Homo sapien
catgcatcttgaaaaggcatcttgccaaagcac

SEQ ID NO: 11066 - DNA, 33 bp, Homo sapien
catgcatcttgaaaagtcatcttgccaaagcac

SEQ ID NO: 11067 - DNA, 33 bp, Homo sapien
gaggaccacgaggcctaagagaacttaagtatc

SEQ ID NO: 11068 - DNA, 33 bp, Homo sapien
gaggaccacgaggcctgagagaacttaagtatc

SEQ ID NO: 11069 - DNA, 33 bp, Homo sapien
ctttattccagtgtacaatgccttgacagaaat

SEQ ID NO: 11070 - DNA, 33 bp, Homo sapien
ctttattccagtgtaccatgccttgacagaaat

SEQ ID NO: 11071 - DNA, 33 bp, Homo sapien
ctggaagtgggttcaaagtactaatgactggac

SEQ ID NO: 11072 - DNA, 33 bp, Homo sapien
ctggaagtgggttcaaggtactaatgactggac

SEQ ID NO: 11073 - DNA, 33 bp, Homo sapien
tgaattgtattctacacgagtgattctttttat

SEQ ID NO: 11074 - DNA, 33 bp, Homo sapien
tgaattgtattctacatgagtgattctttttat

SEQ ID NO: 11075 - DNA, 33 bp, Homo sapien
tgataggcccaaataactctccctgaccataag

SEQ ID NO: 11076 - DNA, 33 bp, Homo sapien
tgataggcccaaataattctccctgaccataag

SEQ ID NO: 11077 - DNA, 33 bp, Homo sapien
aacaaacaatgaataccgcctaaataaaaatta

SEQ ID NO: 11078 - DNA, 33 bp, Homo sapien
aacaaacaatgaatactgcctaaataaaaatta

SEQ ID NO: 11079 - DNA, 33 bp, Homo sapien
tcacgtccggctaaagcaaggaggctctagaag

SEQ ID NO: 11080 - DNA, 33 bp, Homo sapien
tcacgtccggctaaaggaaggaggctctagaag

SEQ ID NO: 11081 - DNA, 33 bp, Homo sapien
actgacctttaccacaatgaccctgccggcagc

SEQ ID NO: 11082 - DNA, 33 bp, Homo sapien
actgacctttaccacagtgaccctgccggcagc

SEQ ID NO: 11083 - DNA, 33 bp, Homo sapien
caagagataatacttgccaagctcacaaatcaa

SEQ ID NO: 11084 - DNA, 33 bp, Homo sapien
caagagataatacttgtcaagctcacaaatcaa

SEQ ID NO: 11085 - DNA, 33 bp, Homo sapien
aaaccccagtctgacacgaagctgagaaaagca

SEQ ID NO: 11086 - DNA, 33 bp, Homo sapien
aaaccccagtctgacaggaagctgagaaaagca

SEQ ID NO: 11087 - DNA, 33 bp, Homo sapien
actccgtggatgggggaagatgtttggtgtgta

SEQ ID NO: 11088 - DNA, 33 bp, Homo sapien
actccgtggatggggggagatgtttggtgtgta

SEQ ID NO: 11089 - DNA, 33 bp, Homo sapien
gacaaaaagagctaaacgtttgtagaaaatctc

SEQ ID NO: 11090 - DNA, 33 bp, Homo sapien
gacaaaaagagctaaatgtttgtagaaaatctc

SEQ ID NO: 11091 - DNA, 33 bp, Homo sapien
ctacagggctggatttaaaaagtgtgagaccat

SEQ ID NO: 11092 - DNA, 33 bp, Homo sapien
ctacagggctggattttaaaagtgtgagaccat

SEQ ID NO: 11093 - DNA, 33 bp, Homo sapien
actcagcttcagcaacaggagattttctaccag

SEQ ID NO: 11094 - DNA, 33 bp, Homo sapien
actcagcttcagcaacgggagattttctaccag

SEQ ID NO: 11095 - DNA, 33 bp, Homo sapien
cttgcttctgagatcacggtcctcagttctttt

SEQ ID NO: 11096 - DNA, 33 bp, Homo sapien
cttgcttctgagatcatggtcctcagttctttt

SEQ ID NO: 11097 - DNA, 33 bp, Homo sapien
ccaagtttccttcagactaaaagaactgaggac

SEQ ID NO: 11098 - DNA, 33 bp, Homo sapien
ccaagtttccttcagagtaaaagaactgaggac

SEQ ID NO: 11099 - DNA, 33 bp, Homo sapien
caatacaccaagtacccgcgtacctaccgccta

SEQ ID NO: 11100 - DNA, 33 bp, Homo sapien
caatacaccaagtacctgcgtacctaccgccta

SEQ ID NO: 11101 - DNA, 33 bp, Homo sapien
aaatatatgcaacaggcaatggaagttcaaaag

SEQ ID NO: 11102 - DNA, 33 bp, Homo sapien
aaatatatgcaacaggtaatggaagttcaaaag

SEQ ID NO: 11103 - DNA, 33 bp, Homo sapien
gagctctctacactgcaaataaccctggtggac

SEQ ID NO: 11104 - DNA, 33 bp, Homo sapien
gagctctctacactgcgaataaccctggtggac

SEQ ID NO: 11105 - DNA, 33 bp, Homo sapien
aatcaagggagaatgaatacaaatgaagaggag

SEQ ID NO: 11106 - DNA, 33 bp, Homo sapien
aatcaagggagaatgagtacaaatgaagaggag

SEQ ID NO: 11107 - DNA, 33 bp, Homo sapien
tgcaagtggacagaccaaaacagtagcctttat

SEQ ID NO: 11108 - DNA, 33 bp, Homo sapien
tgcaagtggacagaccgaaacagtagcctttat

SEQ ID NO: 11109 - DNA, 33 bp, Homo sapien
gacatatgtaagggaaagaaatgataggacttg

SEQ ID NO: 11110 - DNA, 33 bp, Homo sapien
gacatatgtaagggaaggaaatgataggacttg

SEQ ID NO: 11111 - DNA, 33 bp, Homo sapien
aaacagcacgattgacactttacaaggaccatt

SEQ ID NO: 11112 - DNA, 33 bp, Homo sapien
aaacagcacgattgacgctttacaaggaccatt

SEQ ID NO: 11113 - DNA, 33 bp, Homo sapien
tccagcatgaccctagccctcaagttactgaca

SEQ ID NO: 11114 - DNA, 33 bp, Homo sapien
tccagcatgaccctagtcctcaagttactgaca

SEQ ID NO: 11115 - DNA, 33 bp, Homo sapien
tacatcttgtgttttaccttgtcctaaggctcc

SEQ ID NO: 11116 - DNA, 33 bp, Homo sapien
tacatcttgtgttttatcttgtcctaaggctcc

SEQ ID NO: 11117 - DNA, 33 bp, Homo sapien
attggcaaaatgctgaaaattatatgccacctc

SEQ ID NO: 11118 - DNA, 33 bp, Homo sapien
attggcaaaatgctgataattatatgccacctc

SEQ ID NO: 11119 - DNA, 33 bp, Homo sapien
tctatctctggccaaacgtcaactcatcagaga

SEQ ID NO: 11120 - DNA, 33 bp, Homo sapien
tctatctctggccaaatgtcaactcatcagaga

SEQ ID NO: 11121 - DNA, 33 bp, Homo sapien
tctaagagtgagcaccaccattggattagtaaa

SEQ ID NO: 11122 - DNA, 33 bp, Homo sapien
tctaagagtgagcaccgccattggattagtaaa

SEQ ID NO: 11123 - DNA, 33 bp, Homo sapien
gagactggtagcagaaagagagagcaaatagca

SEQ ID NO: 11124 - DNA, 33 bp, Homo sapien
gagactggtagcagaaggagagagcaaatagca

SEQ ID NO: 11125 - DNA, 33 bp, Homo sapien
accaacccgttcaacaaatgggcacctactatc

SEQ ID NO: 11126 - DNA, 33 bp, Homo sapien
accaacccgttcaacagatgggcacctactatc

SEQ ID NO: 11127 - DNA, 33 bp, Homo sapien
tgtaagctctgggtaacactctctctcaggcat

SEQ ID NO: 11128 - DNA, 33 bp, Homo sapien
tgtaagctctgggtaatactctctctcaggcat

SEQ ID NO: 11129 - DNA, 33 bp, Homo sapien
agtaagagaactgtgacgcccctgctggaggaa

SEQ ID NO: 11130 - DNA, 33 bp, Homo sapien
agtaagagaactgtgatgcccctgctggaggaa

SEQ ID NO: 11131 - DNA, 33 bp, Homo sapien
gacacttggccatggacgattgtttcactgact

SEQ ID NO: 11132 - DNA, 33 bp, Homo sapien
gacacttggccatggaggattgtttcactgact

SEQ ID NO: 11133 - DNA, 33 bp, Homo sapien
tcaccatcctggataaatgtgctccccaggata

SEQ ID NO: 11134 - DNA, 33 bp, Homo sapien
tcaccatcctggataagtgtgctccccaggata

SEQ ID NO: 11135 - DNA, 33 bp, Homo sapien
aagaattggaatttgacagaaagatgtacactc

SEQ ID NO: 11136 - DNA, 33 bp, Homo sapien
aagaattggaatttgatagaaagatgtacactc

SEQ ID NO: 11137 - DNA, 33 bp, Homo sapien
aaacaaaaaacacccaacttggctgggcacagt

SEQ ID NO: 11138 - DNA, 33 bp, Homo sapien
aaacaaaaaacacccatcttggctgggcacagt

SEQ ID NO: 11139 - DNA, 33 bp, Homo sapien
ttcatgtgaactaccaaaacaaaaattcactca

SEQ ID NO: 11140 - DNA, 33 bp, Homo sapien
ttcatgtgaactaccagaacaaaaattcactca

SEQ ID NO: 11141 - DNA, 33 bp, Homo sapien
atcctttctcccatcaaaaaacaatttccctat

SEQ ID NO: 11142 - DNA, 33 bp, Homo sapien
atcctttctcccatcagaaaacaatttccctat

SEQ ID NO: 11143 - DNA, 33 bp, Homo sapien
atacacttaggagttacgtgaggatgaggtgcc

SEQ ID NO: 11144 - DNA, 33 bp, Homo sapien
atacacttaggagttatgtgaggatgaggtgcc

SEQ ID NO: 11145 - DNA, 33 bp, Homo sapien
aaagaccttgccatccaactctcataattttta

SEQ ID NO: 11146 - DNA, 33 bp, Homo sapien
aaagaccttgccatccgactctcataattttta

SEQ ID NO: 11147 - DNA, 33 bp, Homo sapien
cttttaaaaatcatgacagtccagggatctaga

SEQ ID NO: 11148 - DNA, 33 bp, Homo sapien
cttttaaaaatcatgagagtccagggatctaga

SEQ ID NO: 11149 - DNA, 33 bp, Homo sapien
acaatgcattattccaaaggtgtggcaagaatc

SEQ ID NO: 11150 - DNA, 33 bp, Homo sapien
acaatgcattattccagaggtgtggcaagaatc

SEQ ID NO: 11151 - DNA, 33 bp, Homo sapien
actgtgaagtgcccaaggttaagtgccacgaat

SEQ ID NO: 11152 - DNA, 33 bp, Homo sapien
actgtgaagtgcccaatgttaagtgccacgaat

SEQ ID NO: 11153 - DNA, 33 bp, Homo sapien
gtctgcaacacatcacagggccttagaaaatgt

SEQ ID NO: 11154 - DNA, 33 bp, Homo sapien
gtctgcaacacatcaccgggccttagaaaatgt

SEQ ID NO: 11155 - DNA, 33 bp, Homo sapien
agcctgaatttcctaacctgtgaagaggggctg

SEQ ID NO: 11156 - DNA, 33 bp, Homo sapien
agcctgaatttcctaatctgtgaagaggggctg

SEQ ID NO: 11157 - DNA, 33 bp, Homo sapien
cgagcttggttttggacggtattacggactgaa

SEQ ID NO: 11158 - DNA, 33 bp, Homo sapien
cgagcttggttttggatggtattacggactgaa

SEQ ID NO: 11159 - DNA, 33 bp, Homo sapien
agaagaaacaacaccaggctcattctctcattc

SEQ ID NO: 11160 - DNA, 33 bp, Homo sapien
agaagaaacaacaccatgctcattctctcattc

SEQ ID NO: 11161 - DNA, 33 bp, Homo sapien
atgccaatctgagagcattgttaggagagtgaa

SEQ ID NO: 11162 - DNA, 33 bp, Homo sapien
atgccaatctgagagcgttgttaggagagtgaa

SEQ ID NO: 11163 - DNA, 33 bp, Homo sapien
ttctaatgctgaatgaaaaatggccatttagta

SEQ ID NO: 11164 - DNA, 33 bp, Homo sapien
ttctaatgctgaatgagaaatggccatttagta

SEQ ID NO: 11165 - DNA, 33 bp, Homo sapien
ctgtaaagagctagacaataaatattttaggct

SEQ ID NO: 11166 - DNA, 33 bp, Homo sapien
ctgtaaagagctagaccataaatattttaggct

SEQ ID NO: 11167 - DNA, 33 bp, Homo sapien
aattattgtaggcagacgttaatgtcagattaa

SEQ ID NO: 11168 - DNA, 33 bp, Homo sapien
aattattgtaggcagatgttaatgtcagattaa

SEQ ID NO: 11169 - DNA, 33 bp, Homo sapien
ttggagaggcaagttaaggatatgtctgtactc

SEQ ID NO: 11170 - DNA, 33 bp, Homo sapien
ttggagaggcaagttagggatatgtctgtactc

SEQ ID NO: 11171 - DNA, 33 bp, Homo sapien
ctgaactaaagcaataccaggaagatctgagtt

SEQ ID NO: 11172 - DNA, 33 bp, Homo sapien
ctgaactaaagcaatagcaggaagatctgagtt

SEQ ID NO: 11173 - DNA, 33 bp, Homo sapien
ccctgggtctcctcccacctggatcaggatagg

SEQ ID NO: 11174 - DNA, 33 bp, Homo sapien
ccctgggtctcctcccgcctggatcaggatagg

SEQ ID NO: 11175 - DNA, 33 bp, Homo sapien
tgtgaatctttctttgcaaaatgttgtgcagag

SEQ ID NO: 11176 - DNA, 33 bp, Homo sapien
tgtgaatctttctttgtaaaatgttgtgcagag

SEQ ID NO: 11177 - DNA, 33 bp, Homo sapien
gtggttccaggcacccagaccaaacaattttaa

SEQ ID NO: 11178 - DNA, 33 bp, Homo sapien
gtggttccaggcacccggaccaaacaattttaa

SEQ ID NO: 11179 - DNA, 33 bp, Homo sapien
gacctgtctgtttcccaatttgcactccaattc

SEQ ID NO: 11180 - DNA, 33 bp, Homo sapien
gacctgtctgtttcccgatttgcactccaattc

SEQ ID NO: 11181 - DNA, 33 bp, Homo sapien
agcttatccctgaaaccggcttttgactggaag

SEQ ID NO: 11182 - DNA, 33 bp, Homo sapien
agcttatccctgaaactggcttttgactggaag

SEQ ID NO: 11183 - DNA, 33 bp, Homo sapien
aagcctttcttacctccaaatgttgctaatagt

SEQ ID NO: 11184 - DNA, 33 bp, Homo sapien
aagcctttcttacctctaaatgttgctaatagt

SEQ ID NO: 11185 - DNA, 33 bp, Homo sapien
caaagatagacaggcacgaggagtgaggtggaa

SEQ ID NO: 11186 - DNA, 33 bp, Homo sapien
caaagatagacaggcatgaggagtgaggtggaa

SEQ ID NO: 11187 - DNA, 33 bp, Homo sapien
ctttctccctcacttcccatttgaactgcagtc

SEQ ID NO: 11188 - DNA, 33 bp, Homo sapien
ctttctccctcacttcgcatttgaactgcagtc

SEQ ID NO: 11189 - DNA, 33 bp, Homo sapien
atgtctgagatttcaccagacctactgaattca

SEQ ID NO: 11190 - DNA, 33 bp, Homo sapien
atgtctgagatttcactagacctactgaattca

SEQ ID NO: 11191 - DNA, 33 bp, Homo sapien
cagggctgactcagaactgaggtagagaaaaag

SEQ ID NO: 11192 - DNA, 33 bp, Homo sapien
cagggctgactcagaattgaggtagagaaaaag

SEQ ID NO: 11193 - DNA, 33 bp, Homo sapien
atgggcccaaattgtcactactcattgtattct

SEQ ID NO: 11194 - DNA, 33 bp, Homo sapien
atgggcccaaattgtcgctactcattgtattct

SEQ ID NO: 11195 - DNA, 33 bp, Homo sapien
gcctttgaacacatcaaggcctccaaatttccc

SEQ ID NO: 11196 - DNA, 33 bp, Homo sapien
gcctttgaacacatcatggcctccaaatttccc

SEQ ID NO: 11197 - DNA, 33 bp, Homo sapien
tcttctcacggttgcactgaggaaaagtctcct

SEQ ID NO: 11198 - DNA, 33 bp, Homo sapien
tcttctcacggttgcattgaggaaaagtctcct

SEQ ID NO: 11199 - DNA, 33 bp, Homo sapien
gaggacaaagactctacctgtggattctagcat

SEQ ID NO: 11200 - DNA, 33 bp, Homo sapien
gaggacaaagactctatctgtggattctagcat

SEQ ID NO: 11201 - DNA, 33 bp, Homo sapien
ttccctgcgctaacatcatgaggacaaagactc

SEQ ID NO: 11202 - DNA, 33 bp, Homo sapien
ttccctgcgctaacatgatgaggacaaagactc

SEQ ID NO: 11203 - DNA, 33 bp, Homo sapien
tgtgttgttggtatgcagaacccttgcccaaag

SEQ ID NO: 11204 - DNA, 33 bp, Homo sapien
tgtgttgttggtatgcggaacccttgcccaaag

SEQ ID NO: 11205 - DNA, 33 bp, Homo sapien
gtaggttctaccatcaatcagctgggcctgaat

SEQ ID NO: 11206 - DNA, 33 bp, Homo sapien
gtaggttctaccatcagtcagctgggcctgaat

SEQ ID NO: 11207 - DNA, 33 bp, Homo sapien
tatgggagctgattgacgggtcatgtaagatcc

SEQ ID NO: 11208 - DNA, 33 bp, Homo sapien
tatgggagctgattgatgggtcatgtaagatcc

SEQ ID NO: 11209 - DNA, 33 bp, Homo sapien
tcagatgattaaactacgatgagctaaaggatg

SEQ ID NO: 11210 - DNA, 33 bp, Homo sapien
tcagatgattaaactatgatgagctaaaggatg

SEQ ID NO: 11211 - DNA, 33 bp, Homo sapien
taaccagaatataaagaatgaatggagcagcct

SEQ ID NO: 11212 - DNA, 33 bp, Homo sapien
taaccagaatataaaggatgaatggagcagcct

SEQ ID NO: 11213 - DNA, 33 bp, Homo sapien
aatttgctcagccttacacaatttctccaatgt

SEQ ID NO: 11214 - DNA, 33 bp, Homo sapien
aatttgctcagccttatacaatttctccaatgt

SEQ ID NO: 11215 - DNA, 33 bp, Homo sapien
gaaaactctagcaaaaaaggatgagtataggta

SEQ ID NO: 11216 - DNA, 33 bp, Homo sapien
gaaaactctagcaaaagaggatgagtataggta

SEQ ID NO: 11217 - DNA, 33 bp, Homo sapien
ggcttcatctggcaaaagactgtgggtaatgaa

SEQ ID NO: 11218 - DNA, 33 bp, Homo sapien
ggcttcatctggcaaaggactgtgggtaatgaa

SEQ ID NO: 11219 - DNA, 33 bp, Homo sapien
ttgatcaggatgttgccaacacacaaatgaaga

SEQ ID NO: 11220 - DNA, 33 bp, Homo sapien
ttgatcaggatgttgctaacacacaaatgaaga

SEQ ID NO: 11221 - DNA, 33 bp, Homo sapien
actagaagaacatccgacaaaattttggatgca

SEQ ID NO: 11222 - DNA, 33 bp, Homo sapien
actagaagaacatccggcaaaattttggatgca

SEQ ID NO: 11223 - DNA, 33 bp, Homo sapien
aggcacttggcaagtaccatctcctttaatctt

SEQ ID NO: 11224 - DNA, 33 bp, Homo sapien
aggcacttggcaagtagcatctcctttaatctt

SEQ ID NO: 11225 - DNA, 33 bp, Homo sapien
aagtaagaaatcttacacacaaagaatcgaggt

SEQ ID NO: 11226 - DNA, 33 bp, Homo sapien
aagtaagaaatcttacgcacaaagaatcgaggt

SEQ ID NO: 11227 - DNA, 33 bp, Homo sapien
agtttatataagacagacaatgtggagaacaaa

SEQ ID NO: 11228 - DNA, 33 bp, Homo sapien
agtttatataagacagtcaatgtggagaacaaa

SEQ ID NO: 11229 - DNA, 33 bp, Homo sapien
atcagggccactctcccatgctataaaggagta

SEQ ID NO: 11230 - DNA, 33 bp, Homo sapien
atcagggccactctcctatgctataaaggagta

SEQ ID NO: 11231 - DNA, 33 bp, Homo sapien
caaagtgagatggaaaccagagggtatgggatc

SEQ ID NO: 11232 - DNA, 33 bp, Homo sapien
caaagtgagatggaaatcagagggtatgggatc

SEQ ID NO: 11233 - DNA, 33 bp, Homo sapien
ttcattttttccctgacatggtttgacttaggt

SEQ ID NO: 11234 - DNA, 33 bp, Homo sapien
ttcattttttccctgagatggtttgacttaggt

SEQ ID NO: 11235 - DNA, 33 bp, Homo sapien
agcttcaagcaggagaaaaagcttggcccaggg

SEQ ID NO: 11236 - DNA, 33 bp, Homo sapien
agcttcaagcaggagataaagcttggcccaggg

SEQ ID NO: 11237 - DNA, 33 bp, Homo sapien
aaaccatatcatggagaagggacatccttgtta

SEQ ID NO: 11238 - DNA, 33 bp, Homo sapien
aaaccatatcatggaggagggacatccttgtta

SEQ ID NO: 11239 - DNA, 33 bp, Homo sapien
ctttttgcatttcacacatcttcacactgcaga

SEQ ID NO: 11240 - DNA, 33 bp, Homo sapien
ctttttgcatttcacagatcttcacactgcaga

SEQ ID NO: 11241 - DNA, 33 bp, Homo sapien
cagagcatgaaggtccaaaaataacaatacagt

SEQ ID NO: 11242 - DNA, 33 bp, Homo sapien
cagagcatgaaggtccgaaaataacaatacagt

SEQ ID NO: 11243 - DNA, 33 bp, Homo sapien
cattctgtaaacacaccataactatgcatactg

SEQ ID NO: 11244 - DNA, 33 bp, Homo sapien
cattctgtaaacacactataactatgcatactg

SEQ ID NO: 11245 - DNA, 33 bp, Homo sapien
aggatggatgcaggcacagacacaaactgctca

SEQ ID NO: 11246 - DNA, 33 bp, Homo sapien
aggatggatgcaggcatagacacaaactgctca

SEQ ID NO: 11247 - DNA, 33 bp, Homo sapien
acaggtgtacgtgtatcaaaaggcagtgttact

SEQ ID NO: 11248 - DNA, 33 bp, Homo sapien
acaggtgtacgtgtatgaaaaggcagtgttact

SEQ ID NO: 11249 - DNA, 33 bp, Homo sapien
aatacagggaagagacagtagctaataaagggt

SEQ ID NO: 11250 - DNA, 33 bp, Homo sapien
aatacagggaagagactgtagctaataaagggt

SEQ ID NO: 11251 - DNA, 33 bp, Homo sapien
tattcaggccaaaacaatattgtggaaaggtga

SEQ ID NO: 11252 - DNA, 33 bp, Homo sapien
tattcaggccaaaacagtattgtggaaaggtga

SEQ ID NO: 11253 - DNA, 33 bp, Homo sapien
gtgcagacagctacacacagcttctttcagagg

SEQ ID NO: 11254 - DNA, 33 bp, Homo sapien
gtgcagacagctacacgcagcttctttcagagg

SEQ ID NO: 11255 - DNA, 33 bp, Homo sapien
agagttttgtaaacatcaaatgagaccatgcat

SEQ ID NO: 11256 - DNA, 33 bp, Homo sapien
agagttttgtaaacattaaatgagaccatgcat

SEQ ID NO: 11257 - DNA, 33 bp, Homo sapien
taagtgccaagatgcacattaggggcttgtcac

SEQ ID NO: 11258 - DNA, 33 bp, Homo sapien
taagtgccaagatgcatattaggggcttgtcac

SEQ ID NO: 11259 - DNA, 33 bp, Homo sapien
tggagaaacgacactgaaatgggcaacctggag

SEQ ID NO: 11260 - DNA, 33 bp, Homo sapien
tggagaaacgacactggaatgggcaacctggag

SEQ ID NO: 11261 - DNA, 33 bp, Homo sapien
gcccatggataaacaaatgagtcgaaaaggcct

SEQ ID NO: 11262 - DNA, 33 bp, Homo sapien
gcccatggataaacaagtgagtcgaaaaggcct

SEQ ID NO: 11263 - DNA, 33 bp, Homo sapien
ttgatgggttagggagcatatgagttattgaag

SEQ ID NO: 11264 - DNA, 33 bp, Homo sapien
ttgatgggttagggaggatatgagttattgaag

SEQ ID NO: 11265 - DNA, 33 bp, Homo sapien
tttcattaggatgagacgaaaggactctaacag

SEQ ID NO: 11266 - DNA, 33 bp, Homo sapien
tttcattaggatgagatgaaaggactctaacag

SEQ ID NO: 11267 - DNA, 33 bp, Homo sapien
gctcctctactcggcactcaaggaccttcgcag

SEQ ID NO: 11268 - DNA, 33 bp, Homo sapien
gctcctctactcggcattcaaggaccttcgcag

SEQ ID NO: 11269 - DNA, 33 bp, Homo sapien
agcccatatcgtgaaacgttctggtatagtaac

SEQ ID NO: 11270 - DNA, 33 bp, Homo sapien
agcccatatcgtgaaatgttctggtatagtaac

SEQ ID NO: 11271 - DNA, 33 bp, Homo sapien
ggatgccaatgaccaagatggagatgactggca

SEQ ID NO: 11272 - DNA, 33 bp, Homo sapien
ggatgccaatgaccaatatggagatgactggca

SEQ ID NO: 11273 - DNA, 33 bp, Homo sapien
ccaatggccctcataaatcagaggcctgttgct

SEQ ID NO: 11274 - DNA, 33 bp, Homo sapien
ccaatggccctcataagtcagaggcctgttgct

SEQ ID NO: 11275 - DNA, 33 bp, Homo sapien
tgtgtggtgtgaatgccagaagagtggtatctc

SEQ ID NO: 11276 - DNA, 33 bp, Homo sapien
tgtgtggtgtgaatgctagaagagtggtatctc

SEQ ID NO: 11277 - DNA, 33 bp, Homo sapien
atgcatatgtgcaatacgtattggaagaagatg

SEQ ID NO: 11278 - DNA, 33 bp, Homo sapien
atgcatatgtgcaatatgtattggaagaagatg

SEQ ID NO: 11279 - DNA, 33 bp, Homo sapien
atattctcagtgattgcatgacaatgaatctcc

SEQ ID NO: 11280 - DNA, 33 bp, Homo sapien
atattctcagtgattgtatgacaatgaatctcc

SEQ ID NO: 11281 - DNA, 33 bp, Homo sapien
gctgagcataccttaacccaagcactcctcttt

SEQ ID NO: 11282 - DNA, 33 bp, Homo sapien
gctgagcataccttaatccaagcactcctcttt

SEQ ID NO: 11283 - DNA, 33 bp, Homo sapien
actggggcttgggccacggaggtagcacaggag

SEQ ID NO: 11284 - DNA, 33 bp, Homo sapien
actggggcttgggccatggaggtagcacaggag

SEQ ID NO: 11285 - DNA, 33 bp, Homo sapien
ttctcatctgatcctccatagtcttgctagaga

SEQ ID NO: 11286 - DNA, 33 bp, Homo sapien
ttctcatctgatcctctatagtcttgctagaga

SEQ ID NO: 11287 - DNA, 33 bp, Homo sapien
gagtttcctaatccaaagagtccagccttgagc

SEQ ID NO: 11288 - DNA, 33 bp, Homo sapien
gagtttcctaatccaaggagtccagccttgagc

SEQ ID NO: 11289 - DNA, 33 bp, Homo sapien
cctgtctttctttaacactctcctcaaccagat

SEQ ID NO: 11290 - DNA, 33 bp, Homo sapien
cctgtctttctttaaccctctcctcaaccagat

SEQ ID NO: 11291 - DNA, 33 bp, Homo sapien
gcaccctgccctttagcacgtaagagctggctg

SEQ ID NO: 11292 - DNA, 33 bp, Homo sapien
gcaccctgccctttagtacgtaagagctggctg

SEQ ID NO: 11293 - DNA, 33 bp, Homo sapien
cactgcaggagaataccggcaagtgtttgagca

SEQ ID NO: 11294 - DNA, 33 bp, Homo sapien
cactgcaggagaatactggcaagtgtttgagca

SEQ ID NO: 11295 - DNA, 33 bp, Homo sapien
atcggtggacttgggaaatttatgcacttgtgt

SEQ ID NO: 11296 - DNA, 33 bp, Homo sapien
atcggtggacttgggacatttatgcacttgtgt

SEQ ID NO: 11297 - DNA, 33 bp, Homo sapien
cagaccttcaagtgaaattaagtcctagacatt

SEQ ID NO: 11298 - DNA, 33 bp, Homo sapien
cagaccttcaagtgaagttaagtcctagacatt

SEQ ID NO: 11299 - DNA, 33 bp, Homo sapien
catcttattcaaaatacgatctgctaatagcct

SEQ ID NO: 11300 - DNA, 33 bp, Homo sapien
catcttattcaaaatatgatctgctaatagcct

SEQ ID NO: 11301 - DNA, 33 bp, Homo sapien
gtgtatatacaagctaaaactataacacttcca

SEQ ID NO: 11302 - DNA, 33 bp, Homo sapien
gtgtatatacaagctagaactataacacttcca

SEQ ID NO: 11303 - DNA, 33 bp, Homo sapien
gatgttccaattggaaatacaggacacagccat

SEQ ID NO: 11304 - DNA, 33 bp, Homo sapien
gatgttccaattggaagtacaggacacagccat

SEQ ID NO: 11305 - DNA, 33 bp, Homo sapien
acccaaagcatacccccctggatccaatggatt

SEQ ID NO: 11306 - DNA, 33 bp, Homo sapien
acccaaagcataccccgctggatccaatggatt

SEQ ID NO: 11307 - DNA, 33 bp, Homo sapien
aggaaggacttggagaactgcagaggctgggat

SEQ ID NO: 11308 - DNA, 33 bp, Homo sapien
aggaaggacttggagagctgcagaggctgggat

SEQ ID NO: 11309 - DNA, 33 bp, Homo sapien
aaactgacaaaagtccagaaatcagtttggtaa

SEQ ID NO: 11310 - DNA, 33 bp, Homo sapien
aaactgacaaaagtccggaaatcagtttggtaa

SEQ ID NO: 11311 - DNA, 33 bp, Homo sapien
ttcaatacaatctacacgctaaggatgctccaa

SEQ ID NO: 11312 - DNA, 33 bp, Homo sapien
ttcaatacaatctacatgctaaggatgctccaa

SEQ ID NO: 11313 - DNA, 33 bp, Homo sapien
aaaaactgtgaaatacaatatagccctgagggt

SEQ ID NO: 11314 - DNA, 33 bp, Homo sapien
aaaaactgtgaaatactatatagccctgagggt

SEQ ID NO: 11315 - DNA, 33 bp, Homo sapien
agctgcagggtccataacccagggcctctgaga

SEQ ID NO: 11316 - DNA, 33 bp, Homo sapien
agctgcagggtccatagcccagggcctctgaga

SEQ ID NO: 11317 - DNA, 33 bp, Homo sapien
gaccctgcagcttgtacgaggataaaggactgt

SEQ ID NO: 11318 - DNA, 33 bp, Homo sapien
gaccctgcagcttgtatgaggataaaggactgt

SEQ ID NO: 11319 - DNA, 33 bp, Homo sapien
cagctacggtccctaccagagcagcagttgaag

SEQ ID NO: 11320 - DNA, 33 bp, Homo sapien
cagctacggtccctacgagagcagcagttgaag

SEQ ID NO: 11321 - DNA, 33 bp, Homo sapien
caaggaacagaaaatacacgagtgatgcacatg

SEQ ID NO: 11322 - DNA, 33 bp, Homo sapien
caaggaacagaaaatatacgagtgatgcacatg

SEQ ID NO: 11323 - DNA, 33 bp, Homo sapien
tcagcctctcagacaacttcctcattccaaaag

SEQ ID NO: 11324 - DNA, 33 bp, Homo sapien
tcagcctctcagacaatttcctcattccaaaag

SEQ ID NO: 11325 - DNA, 33 bp, Homo sapien
cgtactcacacaaatacaactcttccataagat

SEQ ID NO: 11326 - DNA, 33 bp, Homo sapien
cgtactcacacaaatagaactcttccataagat

SEQ ID NO: 11327 - DNA, 33 bp, Homo sapien
aaagacagaaagggagacacagaaaccaagatc

SEQ ID NO: 11328 - DNA, 33 bp, Homo sapien
aaagacagaaagggagtcacagaaaccaagatc

SEQ ID NO: 11329 - DNA, 33 bp, Homo sapien
tctaggttataaatacaaatcctcctcctgtca

SEQ ID NO: 11330 - DNA, 33 bp, Homo sapien
tctaggttataaatacgaatcctcctcctgtca

SEQ ID NO: 11331 - DNA, 33 bp, Homo sapien
gatctgttttccttagcccttgccaactctaga

SEQ ID NO: 11332 - DNA, 33 bp, Homo sapien
gatctgttttccttagtccttgccaactctaga

SEQ ID NO: 11333 - DNA, 33 bp, Homo sapien
ccttccaagtgggccaacaagcatttctgtcca

SEQ ID NO: 11334 - DNA, 33 bp, Homo sapien
ccttccaagtgggccagcaagcatttctgtcca

SEQ ID NO: 11335 - DNA, 33 bp, Homo sapien
cagagtatgacaaggcacaatcaatggaacctt

SEQ ID NO: 11336 - DNA, 33 bp, Homo sapien
cagagtatgacaaggcgcaatcaatggaacctt

SEQ ID NO: 11337 - DNA, 33 bp, Homo sapien
agaatgggtagtgaaacagttagttataaatac

SEQ ID NO: 11338 - DNA, 33 bp, Homo sapien
agaatgggtagtgaaagagttagttataaatac

SEQ ID NO: 11339 - DNA, 33 bp, Homo sapien
tctcatccttgtttccacacctgcaaaatggag

SEQ ID NO: 11340 - DNA, 33 bp, Homo sapien
tctcatccttgtttccgcacctgcaaaatggag

SEQ ID NO: 11341 - DNA, 33 bp, Homo sapien
actaggaaacagacagaatgattacagatttga

SEQ ID NO: 11342 - DNA, 33 bp, Homo sapien
actaggaaacagacaggatgattacagatttga

SEQ ID NO: 11343 - DNA, 33 bp, Homo sapien
cccccactgtttttgcaatgcctgttcaaccct

SEQ ID NO: 11344 - DNA, 33 bp, Homo sapien
cccccactgtttttgcgatgcctgttcaaccct

SEQ ID NO: 11345 - DNA, 33 bp, Homo sapien
tatggccaaacccttacgggcaagaggagtgta

SEQ ID NO: 11346 - DNA, 33 bp, Homo sapien
tatggccaaacccttatgggcaagaggagtgta

SEQ ID NO: 11347 - DNA, 33 bp, Homo sapien
gtcaaagtaaaggtcactctgaagatgcttttt

SEQ ID NO: 11348 - DNA, 33 bp, Homo sapien
gtcaaagtaaaggtcattctgaagatgcttttt

SEQ ID NO: 11349 - DNA, 33 bp, Homo sapien
aatgtacattccagggaaacaaacttcaagtca

SEQ ID NO: 11350 - DNA, 33 bp, Homo sapien
aatgtacattccaggggaacaaacttcaagtca

SEQ ID NO: 11351 - DNA, 33 bp, Homo sapien
aggaatgccaggtatcagagacacaacagttaa

SEQ ID NO: 11352 - DNA, 33 bp, Homo sapien
aggaatgccaggtatcggagacacaacagttaa

SEQ ID NO: 11353 - DNA, 33 bp, Homo sapien
tacttagataaagagagggaggcatgattccat

SEQ ID NO: 11354 - DNA, 33 bp, Homo sapien
tacttagataaagagatggaggcatgattccat

SEQ ID NO: 11355 - DNA, 33 bp, Homo sapien
aaacaagtaaatcaaaatatgtcattagacaat

SEQ ID NO: 11356 - DNA, 33 bp, Homo sapien
aaacaagtaaatcaaagtatgtcattagacaat

SEQ ID NO: 11357 - DNA, 33 bp, Homo sapien
tagcatttatgcttcaaactacaatatgtatca

SEQ ID NO: 11358 - DNA, 33 bp, Homo sapien
tagcatttatgcttcagactacaatatgtatca

SEQ ID NO: 11359 - DNA, 33 bp, Homo sapien
ataggaatcaaccccacgcaatctggtgccaca

SEQ ID NO: 11360 - DNA, 33 bp, Homo sapien
ataggaatcaaccccaggcaatctggtgccaca

SEQ ID NO: 11361 - DNA, 33 bp, Homo sapien
agaaagacaccgttgaaaagcagacaaattaat

SEQ ID NO: 11362 - DNA, 33 bp, Homo sapien
agaaagacaccgttgacaagcagacaaattaat

SEQ ID NO: 11363 - DNA, 33 bp, Homo sapien
gcctattttctttaggaatgaggccagttccac

SEQ ID NO: 11364 - DNA, 33 bp, Homo sapien
gcctattttctttagggatgaggccagttccac

SEQ ID NO: 11365 - DNA, 33 bp, Homo sapien
cagacaaaatcagccacataaattgtgaaacaa

SEQ ID NO: 11366 - DNA, 33 bp, Homo sapien
cagacaaaatcagccatataaattgtgaaacaa

SEQ ID NO: 11367 - DNA, 33 bp, Homo sapien
gccagaccaaataaagaaggccaactcagggag

SEQ ID NO: 11368 - DNA, 33 bp, Homo sapien
gccagaccaaataaaggaggccaactcagggag

SEQ ID NO: 11369 - DNA, 33 bp, Homo sapien
tgttgttttccagtaaaagcaaaaaggcaagta

SEQ ID NO: 11370 - DNA, 33 bp, Homo sapien
tgttgttttccagtaagagcaaaaaggcaagta

SEQ ID NO: 11371 - DNA, 33 bp, Homo sapien
aaatctcaacccattacagtaatagtctggaga

SEQ ID NO: 11372 - DNA, 33 bp, Homo sapien
aaatctcaacccattatagtaatagtctggaga

SEQ ID NO: 11373 - DNA, 33 bp, Homo sapien
ttaagctgttacatcaaaatcttaattgaagtc

SEQ ID NO: 11374 - DNA, 33 bp, Homo sapien
ttaagctgttacatcagaatcttaattgaagtc

SEQ ID NO: 11375 - DNA, 33 bp, Homo sapien
ttgtataatgtggtacaattttaaggaaacaaa

SEQ ID NO: 11376 - DNA, 33 bp, Homo sapien
ttgtataatgtggtactattttaaggaaacaaa

SEQ ID NO: 11377 - DNA, 33 bp, Homo sapien
cttgcagaggggcagaccgaggttcaatcatgt

SEQ ID NO: 11378 - DNA, 33 bp, Homo sapien
cttgcagaggggcagatcgaggttcaatcatgt

SEQ ID NO: 11379 - DNA, 33 bp, Homo sapien
ttgacttgaataatagacccaaggcaagaggag

SEQ ID NO: 11380 - DNA, 33 bp, Homo sapien
ttgacttgaataataggcccaaggcaagaggag

SEQ ID NO: 11381 - DNA, 33 bp, Homo sapien
cacatatccaaagccacgtcttccaatcagcgt

SEQ ID NO: 11382 - DNA, 33 bp, Homo sapien
cacatatccaaagccatgtcttccaatcagcgt

SEQ ID NO: 11383 - DNA, 33 bp, Homo sapien
atgagttcttcctgctcaccttctgatgaccct

SEQ ID NO: 11384 - DNA, 33 bp, Homo sapien
atgagttcttcctgcttaccttctgatgaccct

SEQ ID NO: 11385 - DNA, 33 bp, Homo sapien
tcaataactgcctgctcaaggagtaatcctgcc

SEQ ID NO: 11386 - DNA, 33 bp, Homo sapien
tcaataactgcctgctgaaggagtaatcctgcc

SEQ ID NO: 11387 - DNA, 33 bp, Homo sapien
gtaattcagaagaaaaaaagttcaaacagctaa

SEQ ID NO: 11388 - DNA, 33 bp, Homo sapien
gtaattcagaagaaaagaagttcaaacagctaa

SEQ ID NO: 11389 - DNA, 33 bp, Homo sapien
gacttggcagtaagaaagagatgacagtttaat

SEQ ID NO: 11390 - DNA, 33 bp, Homo sapien
gacttggcagtaagaaggagatgacagtttaat

SEQ ID NO: 11391 - DNA, 33 bp, Homo sapien
ttagaaagaatacaagacctgatgctctggaga

SEQ ID NO: 11392 - DNA, 33 bp, Homo sapien
ttagaaagaatacaaggcctgatgctctggaga

SEQ ID NO: 11393 - DNA, 33 bp, Homo sapien
agctggacagagattcaaacattagtgaatctg

SEQ ID NO: 11394 - DNA, 33 bp, Homo sapien
agctggacagagattcgaacattagtgaatctg

SEQ ID NO: 11395 - DNA, 33 bp, Homo sapien
taggcttaaaagataactgtctggtacatcttt

SEQ ID NO: 11396 - DNA, 33 bp, Homo sapien
taggcttaaaagataattgtctggtacatcttt

SEQ ID NO: 11397 - DNA, 33 bp, Homo sapien
tgaccttctacaattcacttcccttctctgagc

SEQ ID NO: 11398 - DNA, 33 bp, Homo sapien
tgaccttctacaattcgcttcccttctctgagc

SEQ ID NO: 11399 - DNA, 33 bp, Homo sapien
tccctgtgcctttagaacaaaatgccttagcat

SEQ ID NO: 11400 - DNA, 33 bp, Homo sapien
tccctgtgcctttagaccaaaatgccttagcat

SEQ ID NO: 11401 - DNA, 33 bp, Homo sapien
ggacttagccaggtaacgaatgcaaggaagacc

SEQ ID NO: 11402 - DNA, 33 bp, Homo sapien
ggacttagccaggtaatgaatgcaaggaagacc

SEQ ID NO: 11403 - DNA, 33 bp, Homo sapien
cagcttaaaagacaaaggtgcaaagaagcctct

SEQ ID NO: 11404 - DNA, 33 bp, Homo sapien
cagcttaaaagacaaatgtgcaaagaagcctct

SEQ ID NO: 11405 - DNA, 33 bp, Homo sapien
agagaggcattggaacaagattgcctcagatca

SEQ ID NO: 11406 - DNA, 33 bp, Homo sapien
agagaggcattggaacgagattgcctcagatca

SEQ ID NO: 11407 - DNA, 33 bp, Homo sapien
taatctaaagcaaggaacttttgttttggcttg

SEQ ID NO: 11408 - DNA, 33 bp, Homo sapien
taatctaaagcaaggatcttttgttttggcttg

SEQ ID NO: 11409 - DNA, 33 bp, Homo sapien
cttatctttattcccaatgctaaacagggaaaa

SEQ ID NO: 11410 - DNA, 33 bp, Homo sapien
cttatctttattcccagtgctaaacagggaaaa

SEQ ID NO: 11411 - DNA, 33 bp, Homo sapien
cctcttagagggtgacaagagctatgcctccag

SEQ ID NO: 11412 - DNA, 33 bp, Homo sapien
cctcttagagggtgaccagagctatgcctccag

SEQ ID NO: 11413 - DNA, 33 bp, Homo sapien
ctgtagaaagcagagacgagtgctaacagggat

SEQ ID NO: 11414 - DNA, 33 bp, Homo sapien
ctgtagaaagcagagatgagtgctaacagggat

SEQ ID NO: 11415 - DNA, 33 bp, Homo sapien
gaggaggcaggtcctaaagttcacacagtgtta

SEQ ID NO: 11416 - DNA, 33 bp, Homo sapien
gaggaggcaggtcctagagttcacacagtgtta

SEQ ID NO: 11417 - DNA, 33 bp, Homo sapien
ttctcactagcctctccatgctgtgtcctcttt

SEQ ID NO: 11418 - DNA, 33 bp, Homo sapien
ttctcactagcctctctatgctgtgtcctcttt

SEQ ID NO: 11419 - DNA, 33 bp, Homo sapien
aaaacaatccacaaaggctagcactcattgact

SEQ ID NO: 11420 - DNA, 33 bp, Homo sapien
aaaacaatccacaaagtctagcactcattgact

SEQ ID NO: 11421 - DNA, 33 bp, Homo sapien
gtgagagctctaaggaaattagctggccatgtc

SEQ ID NO: 11422 - DNA, 33 bp, Homo sapien
gtgagagctctaaggagattagctggccatgtc

SEQ ID NO: 11423 - DNA, 33 bp, Homo sapien
aagtggcccgaggacaaaggcagaatccctgca

SEQ ID NO: 11424 - DNA, 33 bp, Homo sapien
aagtggcccgaggacagaggcagaatccctgca

SEQ ID NO: 11425 - DNA, 33 bp, Homo sapien
agttgcctgttgagtacgacgaacatatgtcct

SEQ ID NO: 11426 - DNA, 33 bp, Homo sapien
agttgcctgttgagtaggacgaacatatgtcct

SEQ ID NO: 11427 - DNA, 33 bp, Homo sapien
atctagacagtatgtacgctagagggccaggaa

SEQ ID NO: 11428 - DNA, 33 bp, Homo sapien
atctagacagtatgtatgctagagggccaggaa

SEQ ID NO: 11429 - DNA, 33 bp, Homo sapien
cccagggcctgacacaatgtgggtccctcataa

SEQ ID NO: 11430 - DNA, 33 bp, Homo sapien
cccagggcctgacacagtgtgggtccctcataa

SEQ ID NO: 11431 - DNA, 33 bp, Homo sapien
tcccatcccatatacaaaagcagaaatgggatg

SEQ ID NO: 11432 - DNA, 33 bp, Homo sapien
tcccatcccatatacacaagcagaaatgggatg

SEQ ID NO: 11433 - DNA, 33 bp, Homo sapien
ctggaggaggagcctcgaggagctgatgtctgg

SEQ ID NO: 11434 - DNA, 33 bp, Homo sapien
ctggaggaggagcctctaggagctgatgtctgg

SEQ ID NO: 11435 - DNA, 33 bp, Homo sapien
ggaatttcattgcttacgcagccctaaccagat

SEQ ID NO: 11436 - DNA, 33 bp, Homo sapien
ggaatttcattgcttatgcagccctaaccagat

SEQ ID NO: 11437 - DNA, 33 bp, Homo sapien
ggatactgggctctaaacaatgacagtaatagt

SEQ ID NO: 11438 - DNA, 33 bp, Homo sapien
ggatactgggctctaatcaatgacagtaatagt

SEQ ID NO: 11439 - DNA, 33 bp, Homo sapien
ggggctctctcatccacggatctagtggacatc

SEQ ID NO: 11440 - DNA, 33 bp, Homo sapien
ggggctctctcatccatggatctagtggacatc

SEQ ID NO: 11441 - DNA, 33 bp, Homo sapien
ttggatgcttgagtcacatacctaatctctttt

SEQ ID NO: 11442 - DNA, 33 bp, Homo sapien
ttggatgcttgagtcatatacctaatctctttt

SEQ ID NO: 11443 - DNA, 33 bp, Homo sapien
aaagccactcaggctacctttggttgggcaatc

SEQ ID NO: 11444 - DNA, 33 bp, Homo sapien
aaagccactcaggctatctttggttgggcaatc

SEQ ID NO: 11445 - DNA, 33 bp, Homo sapien
ccttcctagccccaaaaagagatagcctgtcca

SEQ ID NO: 11446 - DNA, 33 bp, Homo sapien
ccttcctagccccaaacagagatagcctgtcca

SEQ ID NO: 11447 - DNA, 33 bp, Homo sapien
gacatggcattaatggccaatagcatatttctt

SEQ ID NO: 11448 - DNA, 33 bp, Homo sapien
gacatggcattaatgggcaatagcatatttctt

SEQ ID NO: 11449 - DNA, 33 bp, Homo sapien
agttagctaacatataagagtgggagaggaggt

SEQ ID NO: 11450 - DNA, 33 bp, Homo sapien
agttagctaacatataggagtgggagaggaggt

SEQ ID NO: 11451 - DNA, 33 bp, Homo sapien
atcttgagatattactcaaaaattcaggtttcc

SEQ ID NO: 11452 - DNA, 33 bp, Homo sapien
atcttgagatattactgaaaaattcaggtttcc

SEQ ID NO: 11453 - DNA, 33 bp, Homo sapien
aaatttgcaatgtttacaccatcacagcacaag

SEQ ID NO: 11454 - DNA, 33 bp, Homo sapien
aaatttgcaatgtttataccatcacagcacaag

SEQ ID NO: 11455 - DNA, 33 bp, Homo sapien
aagaatccaagcaaggacacttgtttagggatg

SEQ ID NO: 11456 - DNA, 33 bp, Homo sapien
aagaatccaagcaagggcacttgtttagggatg

SEQ ID NO: 11457 - DNA, 33 bp, Homo sapien
tcaggggcgatgttcccagagctcactggatgc

SEQ ID NO: 11458 - DNA, 33 bp, Homo sapien
tcaggggcgatgttcctagagctcactggatgc

SEQ ID NO: 11459 - DNA, 33 bp, Homo sapien
aaacaagaaggatgccaatgagtcagaggatgc

SEQ ID NO: 11460 - DNA, 33 bp, Homo sapien
aaacaagaaggatgccgatgagtcagaggatgc

SEQ ID NO: 11461 - DNA, 33 bp, Homo sapien
tttattagatttccacaactgactcatctttct

SEQ ID NO: 11462 - DNA, 33 bp, Homo sapien
tttattagatttccacgactgactcatctttct

SEQ ID NO: 11463 - DNA, 33 bp, Homo sapien
tctgccctggggggtccaataatccaagccagc

SEQ ID NO: 11464 - DNA, 33 bp, Homo sapien
tctgccctggggggtcgaataatccaagccagc

SEQ ID NO: 11465 - DNA, 33 bp, Homo sapien
atgccatggtgagtcacgagttaactgtttctt

SEQ ID NO: 11466 - DNA, 33 bp, Homo sapien
atgccatggtgagtcatgagttaactgtttctt

SEQ ID NO: 11467 - DNA, 33 bp, Homo sapien
gaacttacagatctaccctggactgaaatacaa

SEQ ID NO: 11468 - DNA, 33 bp, Homo sapien
gaacttacagatctactctggactgaaatacaa

SEQ ID NO: 11469 - DNA, 33 bp, Homo sapien
ctgttatcctcaaggaccatcattgtcttcagg

SEQ ID NO: 11470 - DNA, 33 bp, Homo sapien
ctgttatcctcaaggatcatcattgtcttcagg

SEQ ID NO: 11471 - DNA, 33 bp, Homo sapien
agttcatgcttccaaactatgagctcccatgcc

SEQ ID NO: 11472 - DNA, 33 bp, Homo sapien
agttcatgcttccaaattatgagctcccatgcc

SEQ ID NO: 11473 - DNA, 33 bp, Homo sapien
cctcactctctgggaagcgtcatccttagacag

SEQ ID NO: 11474 - DNA, 33 bp, Homo sapien
cctcactctctgggaatcgtcatccttagacag

SEQ ID NO: 11475 - DNA, 33 bp, Homo sapien
cataattctcttgacaaaacaaagagtatcaga

SEQ ID NO: 11476 - DNA, 33 bp, Homo sapien
cataattctcttgacagaacaaagagtatcaga

SEQ ID NO: 11477 - DNA, 33 bp, Homo sapien
tggcactggatattccacacagactgctccaca

SEQ ID NO: 11478 - DNA, 33 bp, Homo sapien
tggcactggatattccgcacagactgctccaca

SEQ ID NO: 11479 - DNA, 33 bp, Homo sapien
acaccttttgcactgacgatttttcttctagaa

SEQ ID NO: 11480 - DNA, 33 bp, Homo sapien
acaccttttgcactgatgatttttcttctagaa

SEQ ID NO: 11481 - DNA, 33 bp, Homo sapien
ggatatgtctatatcagctgtctcatctttttt

SEQ ID NO: 11482 - DNA, 33 bp, Homo sapien
ggatatgtctatatcatctgtctcatctttttt

SEQ ID NO: 11483 - DNA, 33 bp, Homo sapien
acattttaacctggcaatctgtcttctaggaac

SEQ ID NO: 11484 - DNA, 33 bp, Homo sapien
acattttaacctggcactctgtcttctaggaac

SEQ ID NO: 11485 - DNA, 33 bp, Homo sapien
ctactgaagcaggaacggtatccactgagcatc

SEQ ID NO: 11486 - DNA, 33 bp, Homo sapien
ctactgaagcaggaactgtatccactgagcatc

SEQ ID NO: 11487 - DNA, 33 bp, Homo sapien
catgggaaaacctgaacccttggactcatattt

SEQ ID NO: 11488 - DNA, 33 bp, Homo sapien
catgggaaaacctgaatccttggactcatattt

SEQ ID NO: 11489 - DNA, 33 bp, Homo sapien
gagccaggttctgtgaaagataccagaagcact

SEQ ID NO: 11490 - DNA, 33 bp, Homo sapien
gagccaggttctgtgacagataccagaagcact

SEQ ID NO: 11491 - DNA, 33 bp, Homo sapien
ctccagcgttatccctcacatttagaatgaaac

SEQ ID NO: 11492 - DNA, 33 bp, Homo sapien
ctccagcgttatccctgacatttagaatgaaac

SEQ ID NO: 11493 - DNA, 33 bp, Homo sapien
cctctggatgcaaaataagaaatacaatagcgg

SEQ ID NO: 11494 - DNA, 33 bp, Homo sapien
cctctggatgcaaaatgagaaatacaatagcgg

SEQ ID NO: 11495 - DNA, 33 bp, Homo sapien
tcacatagctaggccaagatttttttccattct

SEQ ID NO: 11496 - DNA, 33 bp, Homo sapien
tcacatagctaggccaggatttttttccattct

SEQ ID NO: 11497 - DNA, 33 bp, Homo sapien
ttagcacaattgttgacaaagttgggcttatgt

SEQ ID NO: 11498 - DNA, 33 bp, Homo sapien
ttagcacaattgttgataaagttgggcttatgt

SEQ ID NO: 11499 - DNA, 33 bp, Homo sapien
atggaaaaatacaggccctagtatagataaaat

SEQ ID NO: 11500 - DNA, 33 bp, Homo sapien
atggaaaaatacaggctctagtatagataaaat

SEQ ID NO: 11501 - DNA, 33 bp, Homo sapien
tgttgaactcactagcaaattctagaagttttc

SEQ ID NO: 11502 - DNA, 33 bp, Homo sapien
tgttgaactcactagctaattctagaagttttc

SEQ ID NO: 11503 - DNA, 33 bp, Homo sapien
gacatagaattcagaacgtaaatggcaaagaag

SEQ ID NO: 11504 - DNA, 33 bp, Homo sapien
gacatagaattcagaatgtaaatggcaaagaag

SEQ ID NO: 11505 - DNA, 33 bp, Homo sapien
ggactcagggtaaagacaagctgccctgaaata

SEQ ID NO: 11506 - DNA, 33 bp, Homo sapien
ggactcagggtaaagataagctgccctgaaata

SEQ ID NO: 11507 - DNA, 33 bp, Homo sapien
catatgttgataaaacccagtgaattatctcaa

SEQ ID NO: 11508 - DNA, 33 bp, Homo sapien
catatgttgataaaactcagtgaattatctcaa

SEQ ID NO: 11509 - DNA, 33 bp, Homo sapien
ttttcacaccatccaccaggaatgttgtgcaaa

SEQ ID NO: 11510 - DNA, 33 bp, Homo sapien
ttttcacaccatccacgaggaatgttgtgcaaa

SEQ ID NO: 11511 - DNA, 33 bp, Homo sapien
cagggcacaggatgccgcagggctgaactccag

SEQ ID NO: 11512 - DNA, 33 bp, Homo sapien
cagggcacaggatgcctcagggctgaactccag

SEQ ID NO: 11513 - DNA, 33 bp, Homo sapien
agctattagacagtacaggcaataacccccaaa

SEQ ID NO: 11514 - DNA, 33 bp, Homo sapien
agctattagacagtacgggcaataacccccaaa

SEQ ID NO: 11515 - DNA, 33 bp, Homo sapien
caagtttcctgagaaccagtgaatcctgccctc

SEQ ID NO: 11516 - DNA, 33 bp, Homo sapien
caagtttcctgagaacgagtgaatcctgccctc

SEQ ID NO: 11517 - DNA, 33 bp, Homo sapien
gtgcaggtgaactctagataaggccaggactgt

SEQ ID NO: 11518 - DNA, 33 bp, Homo sapien
gtgcaggtgaactctatataaggccaggactgt

SEQ ID NO: 11519 - DNA, 33 bp, Homo sapien
acatttgtctacaatcaaatttgctgttcaatt

SEQ ID NO: 11520 - DNA, 33 bp, Homo sapien
acatttgtctacaatctaatttgctgttcaatt

SEQ ID NO: 11521 - DNA, 33 bp, Homo sapien
attcagtgtcaggaacaatgaggggaccagaag

SEQ ID NO: 11522 - DNA, 33 bp, Homo sapien
attcagtgtcaggaacgatgaggggaccagaag

SEQ ID NO: 11523 - DNA, 33 bp, Homo sapien
ctgaggactgatagccagagaggaactcacctg

SEQ ID NO: 11524 - DNA, 33 bp, Homo sapien
ctgaggactgatagccggagaggaactcacctg

SEQ ID NO: 11525 - DNA, 33 bp, Homo sapien
ctcaattctgaggacaaggtgagtaatgaaaca

SEQ ID NO: 11526 - DNA, 33 bp, Homo sapien
ctcaattctgaggacacggtgagtaatgaaaca

SEQ ID NO: 11527 - DNA, 33 bp, Homo sapien
gggaaacgtagcaacacgcttggctgatgtgtg

SEQ ID NO: 11528 - DNA, 33 bp, Homo sapien
gggaaacgtagcaacatgcttggctgatgtgtg

SEQ ID NO: 11529 - DNA, 33 bp, Homo sapien
ctgttataaggcataaaagagatttctcactgt

SEQ ID NO: 11530 - DNA, 33 bp, Homo sapien
ctgttataaggcataagagagatttctcactgt

SEQ ID NO: 11531 - DNA, 33 bp, Homo sapien
aactgccaactctagagcaagttaatgccaccc

SEQ ID NO: 11532 - DNA, 33 bp, Homo sapien
aactgccaactctagatcaagttaatgccaccc

SEQ ID NO: 11533 - DNA, 33 bp, Homo sapien
ttgcccattagccagccctgcataagcaatcaa

SEQ ID NO: 11534 - DNA, 33 bp, Homo sapien
ttgcccattagccagctctgcataagcaatcaa

SEQ ID NO: 11535 - DNA, 33 bp, Homo sapien
tctcaaaaggtggccaaatcttcagggtctgga

SEQ ID NO: 11536 - DNA, 33 bp, Homo sapien
tctcaaaaggtggccagatcttcagggtctgga

SEQ ID NO: 11537 - DNA, 33 bp, Homo sapien
aagccagccatagctaaggagagtaagggacat

SEQ ID NO: 11538 - DNA, 33 bp, Homo sapien
aagccagccatagctagggagagtaagggacat

SEQ ID NO: 11539 - DNA, 33 bp, Homo sapien
cccaaagcaggctcaagctcaggagagggaaga

SEQ ID NO: 11540 - DNA, 33 bp, Homo sapien
cccaaagcaggctcaatctcaggagagggaaga

SEQ ID NO: 11541 - DNA, 33 bp, Homo sapien
aagaactgtctggtggcacagcctgggagctct

SEQ ID NO: 11542 - DNA, 33 bp, Homo sapien
aagaactgtctggtggtacagcctgggagctct

SEQ ID NO: 11543 - DNA, 33 bp, Homo sapien
tacaccctgatggaataagatttacaataaaca

SEQ ID NO: 11544 - DNA, 33 bp, Homo sapien
tacaccctgatggaattagatttacaataaaca

SEQ ID NO: 11545 - DNA, 33 bp, Homo sapien
gtgaacacggtactaaacatatggctatatgat

SEQ ID NO: 11546 - DNA, 33 bp, Homo sapien
gtgaacacggtactaagcatatggctatatgat

SEQ ID NO: 11547 - DNA, 33 bp, Homo sapien
tgacccaccttaaaaaagctgtaaagatcactc

SEQ ID NO: 11548 - DNA, 33 bp, Homo sapien
tgacccaccttaaaaatgctgtaaagatcactc

SEQ ID NO: 11549 - DNA, 33 bp, Homo sapien
aaccagacatgaggaacgaaactgaagttcaaa

SEQ ID NO: 11550 - DNA, 33 bp, Homo sapien
aaccagacatgaggaaggaaactgaagttcaaa

SEQ ID NO: 11551 - DNA, 33 bp, Homo sapien
aatcaggcactccagaaaagaaaaatggccacg

SEQ ID NO: 11552 - DNA, 33 bp, Homo sapien
aatcaggcactccagagaagaaaaatggccacg

SEQ ID NO: 11553 - DNA, 33 bp, Homo sapien
actactcatacaaatacgcaaagagaaaaaaaa

SEQ ID NO: 11554 - DNA, 33 bp, Homo sapien
actactcatacaaatatgcaaagagaaaaaaaa

SEQ ID NO: 11555 - DNA, 33 bp, Homo sapien
tcctgctttgctttaacgtttgcataatatatc

SEQ ID NO: 11556 - DNA, 33 bp, Homo sapien
tcctgctttgctttaatgtttgcataatatatc

SEQ ID NO: 11557 - DNA, 33 bp, Homo sapien
ggggctttgctggtggcaatattggtccatata

SEQ ID NO: 11558 - DNA, 33 bp, Homo sapien
ggggctttgctggtggtaatattggtccatata

SEQ ID NO: 11559 - DNA, 33 bp, Homo sapien
ggacaacaggaacaaaaatccaaaggaaatcaa

SEQ ID NO: 11560 - DNA, 33 bp, Homo sapien
ggacaacaggaacaaagatccaaaggaaatcaa

SEQ ID NO: 11561 - DNA, 33 bp, Homo sapien
gacagaaataattacccatgcaagcaactgcat

SEQ ID NO: 11562 - DNA, 33 bp, Homo sapien
gacagaaataattacctatgcaagcaactgcat

SEQ ID NO: 11563 - DNA, 33 bp, Homo sapien
gctctaacaccaaaaccgtatctggacttttca

SEQ ID NO: 11564 - DNA, 33 bp, Homo sapien
gctctaacaccaaaactgtatctggacttttca

SEQ ID NO: 11565 - DNA, 33 bp, Homo sapien
tacaggtaagactcaaagcaggattcatactaa

SEQ ID NO: 11566 - DNA, 33 bp, Homo sapien
tacaggtaagactcaaggcaggattcatactaa

SEQ ID NO: 11567 - DNA, 33 bp, Homo sapien
agggcttgaacatgcaatcctatagtgtgccca

SEQ ID NO: 11568 - DNA, 33 bp, Homo sapien
agggcttgaacatgcagtcctatagtgtgccca

SEQ ID NO: 11569 - DNA, 33 bp, Homo sapien
gtttgaacctagagaaagcaagaccaggcagct

SEQ ID NO: 11570 - DNA, 33 bp, Homo sapien
gtttgaacctagagaaggcaagaccaggcagct

SEQ ID NO: 11571 - DNA, 33 bp, Homo sapien
atcaattctggtaacccgagcagcaggagaaag

SEQ ID NO: 11572 - DNA, 33 bp, Homo sapien
atcaattctggtaacctgagcagcaggagaaag

SEQ ID NO: 11573 - DNA, 33 bp, Homo sapien
tcacttttcctgttgccagttcaatggggggtc

SEQ ID NO: 11574 - DNA, 33 bp, Homo sapien
tcacttttcctgttgctagttcaatggggggtc

SEQ ID NO: 11575 - DNA, 33 bp, Homo sapien
tagttctcaatgccagaagctaaggaggagctg

SEQ ID NO: 11576 - DNA, 33 bp, Homo sapien
tagttctcaatgccagcagctaaggaggagctg

SEQ ID NO: 11577 - DNA, 33 bp, Homo sapien
cttcctccaagtaatgccataatttgtggctgc

SEQ ID NO: 11578 - DNA, 33 bp, Homo sapien
cttcctccaagtaatgtcataatttgtggctgc

SEQ ID NO: 11579 - DNA, 33 bp, Homo sapien
ttatcccactagagccccaagtccattgtcatc

SEQ ID NO: 11580 - DNA, 33 bp, Homo sapien
ttatcccactagagcctcaagtccattgtcatc

SEQ ID NO: 11581 - DNA, 33 bp, Homo sapien
ctgacgggctcgggaaggtctactgcaagggac

SEQ ID NO: 11582 - DNA, 33 bp, Homo sapien
ctgacgggctcgggaatgtctactgcaagggac

SEQ ID NO: 11583 - DNA, 33 bp, Homo sapien
aaatatttgtggcgtgaatgaacacagtaatgc

SEQ ID NO: 11584 - DNA, 33 bp, Homo sapien
aaatatttgtggcgtgcatgaacacagtaatgc

SEQ ID NO: 11585 - DNA, 33 bp, Homo sapien
tcctccacattgtgaacaggtatgctctacaac

SEQ ID NO: 11586 - DNA, 33 bp, Homo sapien
tcctccacattgtgaataggtatgctctacaac

SEQ ID NO: 11587 - DNA, 33 bp, Homo sapien
ccagatattgacttgaactggaaataaatatct

SEQ ID NO: 11588 - DNA, 33 bp, Homo sapien
ccagatattgacttgacctggaaataaatatct

SEQ ID NO: 11589 - DNA, 33 bp, Homo sapien
tggttatgtatgtgtaaagagaaatatgattca

SEQ ID NO: 11590 - DNA, 33 bp, Homo sapien
tggttatgtatgtgtagagagaaatatgattca

SEQ ID NO: 11591 - DNA, 33 bp, Homo sapien
gatctcttgtcacaagacctagggatctcttta

SEQ ID NO: 11592 - DNA, 33 bp, Homo sapien
gatctcttgtcacaaggcctagggatctcttta

SEQ ID NO: 11593 - DNA, 33 bp, Homo sapien
cattgtaaatcacaacaaaacaattgatcaaaa

SEQ ID NO: 11594 - DNA, 33 bp, Homo sapien
cattgtaaatcacaacgaaacaattgatcaaaa

SEQ ID NO: 11595 - DNA, 33 bp, Homo sapien
actcaaggtaacataaagcagagttaagaggta

SEQ ID NO: 11596 - DNA, 33 bp, Homo sapien
actcaaggtaacataatgcagagttaagaggta

SEQ ID NO: 11597 - DNA, 33 bp, Homo sapien
tctcaccactcttcaaacagaagtccctcactc

SEQ ID NO: 11598 - DNA, 33 bp, Homo sapien
tctcaccactcttcaagcagaagtccctcactc

SEQ ID NO: 11599 - DNA, 33 bp, Homo sapien
ttcttattctcaatcaacaattgtactgctttt

SEQ ID NO: 11600 - DNA, 33 bp, Homo sapien
ttcttattctcaatcagcaattgtactgctttt

SEQ ID NO: 11601 - DNA, 33 bp, Homo sapien
gactactaaagctgccagagattgaggacctgc

SEQ ID NO: 11602 - DNA, 33 bp, Homo sapien
gactactaaagctgccggagattgaggacctgc

SEQ ID NO: 11603 - DNA, 33 bp, Homo sapien
attctcaccaagttagcattccactttggggga

SEQ ID NO: 11604 - DNA, 33 bp, Homo sapien
attctcaccaagttagtattccactttggggga

SEQ ID NO: 11605 - DNA, 33 bp, Homo sapien
ttcctccaagggtgcaaaagagcatctgattta

SEQ ID NO: 11606 - DNA, 33 bp, Homo sapien
ttcctccaagggtgcagaagagcatctgattta

SEQ ID NO: 11607 - DNA, 33 bp, Homo sapien
cttgggaggctgatacacagatttgtttgatct

SEQ ID NO: 11608 - DNA, 33 bp, Homo sapien
cttgggaggctgatacgcagatttgtttgatct

SEQ ID NO: 11609 - DNA, 33 bp, Homo sapien
cctttcactgggataggctagaggaacccctct

SEQ ID NO: 11610 - DNA, 33 bp, Homo sapien
cctttcactgggatagtctagaggaacccctct

SEQ ID NO: 11611 - DNA, 33 bp, Homo sapien
tccactagtgtgaatccagtctagtctcatggc

SEQ ID NO: 11612 - DNA, 33 bp, Homo sapien
tccactagtgtgaatctagtctagtctcatggc

SEQ ID NO: 11613 - DNA, 33 bp, Homo sapien
ttgttgccacaggaaacgctggctaatgcagac

SEQ ID NO: 11614 - DNA, 33 bp, Homo sapien
ttgttgccacaggaaatgctggctaatgcagac

SEQ ID NO: 11615 - DNA, 33 bp, Homo sapien
gtcttagggtaaatggcaccttgccaagtgaca

SEQ ID NO: 11616 - DNA, 33 bp, Homo sapien
gtcttagggtaaatgggaccttgccaagtgaca

SEQ ID NO: 11617 - DNA, 33 bp, Homo sapien
agccaagattcaaatgccaatgtgataaggcag

SEQ ID NO: 11618 - DNA, 33 bp, Homo sapien
agccaagattcaaatgtcaatgtgataaggcag

SEQ ID NO: 11619 - DNA, 33 bp, Homo sapien
ccagcacggccccaaaattcaagaatcacaagt

SEQ ID NO: 11620 - DNA, 33 bp, Homo sapien
ccagcacggccccaaagttcaagaatcacaagt

SEQ ID NO: 11621 - DNA, 33 bp, Homo sapien
tgatgatttgaccaggaattatcctccagcacg

SEQ ID NO: 11622 - DNA, 33 bp, Homo sapien
tgatgatttgaccagggattatcctccagcacg

SEQ ID NO: 11623 - DNA, 33 bp, Homo sapien
gaaggtaacaaattcacataaaaggcaaagaga

SEQ ID NO: 11624 - DNA, 33 bp, Homo sapien
gaaggtaacaaattcagataaaaggcaaagaga

SEQ ID NO: 11625 - DNA, 33 bp, Homo sapien
accatgaattcaaaacccttcattctgagcttc

SEQ ID NO: 11626 - DNA, 33 bp, Homo sapien
accatgaattcaaaactcttcattctgagcttc

SEQ ID NO: 11627 - DNA, 33 bp, Homo sapien
tggacagccatgtgacgcaactgaactagcttt

SEQ ID NO: 11628 - DNA, 33 bp, Homo sapien
tggacagccatgtgactcaactgaactagcttt

SEQ ID NO: 11629 - DNA, 33 bp, Homo sapien
gcaaagtcagtaaacccgaggcactagagataa

SEQ ID NO: 11630 - DNA, 33 bp, Homo sapien
gcaaagtcagtaaacctgaggcactagagataa

SEQ ID NO: 11631 - DNA, 33 bp, Homo sapien
tttgagactgaaaataatcatcatctccaaaat

SEQ ID NO: 11632 - DNA, 33 bp, Homo sapien
tttgagactgaaaatagtcatcatctccaaaat

SEQ ID NO: 11633 - DNA, 33 bp, Homo sapien
attagatcagtacctgaagaagtctaaaaagag

SEQ ID NO: 11634 - DNA, 33 bp, Homo sapien
attagatcagtacctggagaagtctaaaaagag

SEQ ID NO: 11635 - DNA, 33 bp, Homo sapien
gaataaaattgcttggccatagttaagtgtatg

SEQ ID NO: 11636 - DNA, 33 bp, Homo sapien
gaataaaattgcttggtcatagttaagtgtatg

SEQ ID NO: 11637 - DNA, 33 bp, Homo sapien
cttttaattgctgagaaatattccactttatgt

SEQ ID NO: 11638 - DNA, 33 bp, Homo sapien
cttttaattgctgagacatattccactttatgt

SEQ ID NO: 11639 - DNA, 33 bp, Homo sapien
ttctgtagatgtgatgaagagctggagattgaa

SEQ ID NO: 11640 - DNA, 33 bp, Homo sapien
ttctgtagatgtgatggagagctggagattgaa

SEQ ID NO: 11641 - DNA, 33 bp, Homo sapien
tgaatgccagtgagtacgtatcttgtgtgaaga

SEQ ID NO: 11642 - DNA, 33 bp, Homo sapien
tgaatgccagtgagtatgtatcttgtgtgaaga

SEQ ID NO: 11643 - DNA, 33 bp, Homo sapien
tccagcaaacctttaagtcctactgtcctcaca

SEQ ID NO: 11644 - DNA, 33 bp, Homo sapien
tccagcaaacctttaattcctactgtcctcaca

SEQ ID NO: 11645 - DNA, 33 bp, Homo sapien
cactcctgtgctgaaactatcaccagcatgaaa

SEQ ID NO: 11646 - DNA, 33 bp, Homo sapien
cactcctgtgctgaaattatcaccagcatgaaa

SEQ ID NO: 11647 - DNA, 33 bp, Homo sapien
ctgtgaccctcgtgaaagtgtagtgacagtggt

SEQ ID NO: 11648 - DNA, 33 bp, Homo sapien
ctgtgaccctcgtgaaggtgtagtgacagtggt

SEQ ID NO: 11649 - DNA, 33 bp, Homo sapien
tccatgtttaggacgcagaaattactctaattg

SEQ ID NO: 11650 - DNA, 33 bp, Homo sapien
tccatgtttaggacgcggaaattactctaattg

SEQ ID NO: 11651 - DNA, 33 bp, Homo sapien
ctgattttgtgttgcaaagtgctttgtttatga

SEQ ID NO: 11652 - DNA, 33 bp, Homo sapien
ctgattttgtgttgcagagtgctttgtttatga

SEQ ID NO: 11653 - DNA, 33 bp, Homo sapien
attacttcactttatcaattacacacgtctttt

SEQ ID NO: 11654 - DNA, 33 bp, Homo sapien
attacttcactttatctattacacacgtctttt

SEQ ID NO: 11655 - DNA, 33 bp, Homo sapien
aaaacttaacaaaaaaatcttctcttgcctagc

SEQ ID NO: 11656 - DNA, 33 bp, Homo sapien
aaaacttaacaaaaaagtcttctcttgcctagc

SEQ ID NO: 11657 - DNA, 33 bp, Homo sapien
tccttccagtcaccccaattcatgtgcacaggc

SEQ ID NO: 11658 - DNA, 33 bp, Homo sapien
tccttccagtcaccccgattcatgtgcacaggc

SEQ ID NO: 11659 - DNA, 33 bp, Homo sapien
tttgtctgagtggaggaaattgtgagagcccca

SEQ ID NO: 11660 - DNA, 33 bp, Homo sapien
tttgtctgagtggagggaattgtgagagcccca

SEQ ID NO: 11661 - DNA, 33 bp, Homo sapien
gtgtatggctagagaggagaagtatcagtggag

SEQ ID NO: 11662 - DNA, 33 bp, Homo sapien
gtgtatggctagagagtagaagtatcagtggag

SEQ ID NO: 11663 - DNA, 33 bp, Homo sapien
aaggcaggcaaccagacgcagaatggatttttg

SEQ ID NO: 11664 - DNA, 33 bp, Homo sapien
aaggcaggcaaccagatgcagaatggatttttg

SEQ ID NO: 11665 - DNA, 33 bp, Homo sapien
gtgaacaacgtgaagccatgataccctaaagaa

SEQ ID NO: 11666 - DNA, 33 bp, Homo sapien
gtgaacaacgtgaagctatgataccctaaagaa

SEQ ID NO: 11667 - DNA, 33 bp, Homo sapien
gagtggatgctgaaagccagttgacaatttcca

SEQ ID NO: 11668 - DNA, 33 bp, Homo sapien
gagtggatgctgaaaggcagttgacaatttcca

SEQ ID NO: 11669 - DNA, 33 bp, Homo sapien
ggttcaggagccttcaactataaagtgtcagaa

SEQ ID NO: 11670 - DNA, 33 bp, Homo sapien
ggttcaggagccttcatctataaagtgtcagaa

SEQ ID NO: 11671 - DNA, 33 bp, Homo sapien
gagggttggatctgtccctaattctcagctgtt

SEQ ID NO: 11672 - DNA, 33 bp, Homo sapien
gagggttggatctgtctctaattctcagctgtt

SEQ ID NO: 11673 - DNA, 33 bp, Homo sapien
attccaacacacatcccattgccagtgggttca

SEQ ID NO: 11674 - DNA, 33 bp, Homo sapien
attccaacacacatcctattgccagtgggttca

SEQ ID NO: 11675 - DNA, 33 bp, Homo sapien
aaagggaggctgaaaaagacagacaatcatggg

SEQ ID NO: 11676 - DNA, 33 bp, Homo sapien
aaagggaggctgaaaacgacagacaatcatggg

SEQ ID NO: 11677 - DNA, 33 bp, Homo sapien
ttaaggtttggaagatgaatcggacacgatcag

SEQ ID NO: 11678 - DNA, 33 bp, Homo sapien
ttaaggtttggaagattaatcggacacgatcag

SEQ ID NO: 11679 - DNA, 33 bp, Homo sapien
ctcaggtcggggaaaacagaaaatagagattag

SEQ ID NO: 11680 - DNA, 33 bp, Homo sapien
ctcaggtcggggaaaagagaaaatagagattag

SEQ ID NO: 11681 - DNA, 33 bp, Homo sapien
ggctagactcttgtgcaagaaaagcccgtctgt

SEQ ID NO: 11682 - DNA, 33 bp, Homo sapien
ggctagactcttgtgcgagaaaagcccgtctgt

SEQ ID NO: 11683 - DNA, 33 bp, Homo sapien
ttaagcaagattttaccgggtccataatcaaag

SEQ ID NO: 11684 - DNA, 33 bp, Homo sapien
ttaagcaagattttactgggtccataatcaaag

SEQ ID NO: 11685 - DNA, 33 bp, Homo sapien
gagtcatgtgctctccactatccaaacaactgt

SEQ ID NO: 11686 - DNA, 33 bp, Homo sapien
gagtcatgtgctctcctctatccaaacaactgt

SEQ ID NO: 11687 - DNA, 33 bp, Homo sapien
ggaattgtcttctaaccagttttgtttggattg

SEQ ID NO: 11688 - DNA, 33 bp, Homo sapien
ggaattgtcttctaactagttttgtttggattg

SEQ ID NO: 11689 - DNA, 33 bp, Homo sapien
gtatgggaggtcctcaaagctgttagtggaatc

SEQ ID NO: 11690 - DNA, 33 bp, Homo sapien
gtatgggaggtcctcagagctgttagtggaatc

SEQ ID NO: 11691 - DNA, 33 bp, Homo sapien
gcccctggttgggagacctggaattcctgagca

SEQ ID NO: 11692 - DNA, 33 bp, Homo sapien
gcccctggttgggagatctggaattcctgagca

SEQ ID NO: 11693 - DNA, 33 bp, Homo sapien
aggtaagcatgagaacaaaaaccatcccaggaa

SEQ ID NO: 11694 - DNA, 33 bp, Homo sapien
aggtaagcatgagaaccaaaaccatcccaggaa

SEQ ID NO: 11695 - DNA, 33 bp, Homo sapien
ggctgtatcgtgtttacctgtctccagcatgac

SEQ ID NO: 11696 - DNA, 33 bp, Homo sapien
ggctgtatcgtgtttatctgtctccagcatgac

SEQ ID NO: 11697 - DNA, 33 bp, Homo sapien
gaggcaagactgaggccactgcagaagtgggca

SEQ ID NO: 11698 - DNA, 33 bp, Homo sapien
gaggcaagactgaggctactgcagaagtgggca

SEQ ID NO: 11699 - DNA, 33 bp, Homo sapien
tctcatgtatacgcaccaaataaatgtgtatgc

SEQ ID NO: 11700 - DNA, 33 bp, Homo sapien
tctcatgtatacgcactaaataaatgtgtatgc

SEQ ID NO: 11701 - DNA, 33 bp, Homo sapien
cctctcccgcaacattcacatctgcatcctcaa

SEQ ID NO: 11702 - DNA, 33 bp, Homo sapien
cctctcccgcaacatttacatctgcatcctcaa

SEQ ID NO: 11703 - DNA, 33 bp, Homo sapien
cgttttattcagagtacctcccctcttatcagt

SEQ ID NO: 11704 - DNA, 33 bp, Homo sapien
cgttttattcagagtagctcccctcttatcagt

SEQ ID NO: 11705 - DNA, 33 bp, Homo sapien
tttctcttggtgaccacggatataacagtgtgt

SEQ ID NO: 11706 - DNA, 33 bp, Homo sapien
tttctcttggtgaccatggatataacagtgtgt

SEQ ID NO: 11707 - DNA, 33 bp, Homo sapien
cacaggtaacagcaaagaacaagtttaaaagag

SEQ ID NO: 11708 - DNA, 33 bp, Homo sapien
cacaggtaacagcaaataacaagtttaaaagag

SEQ ID NO: 11709 - DNA, 33 bp, Homo sapien
cttgtttgttgattcacgtatctgcctcttctg

SEQ ID NO: 11710 - DNA, 33 bp, Homo sapien
cttgtttgttgattcatgtatctgcctcttctg

SEQ ID NO: 11711 - DNA, 33 bp, Homo sapien
tgcaaaggtcctgtggaaggaaagagcttgcca

SEQ ID NO: 11712 - DNA, 33 bp, Homo sapien
tgcaaaggtcctgtggcaggaaagagcttgcca

SEQ ID NO: 11713 - DNA, 33 bp, Homo sapien
cataaagagacaataactcagaggaaggtatcc

SEQ ID NO: 11714 - DNA, 33 bp, Homo sapien
cataaagagacaataagtcagaggaaggtatcc

SEQ ID NO: 11715 - DNA, 33 bp, Homo sapien
tgaagcaggttgtaaaatgttgaaatctgctga

SEQ ID NO: 11716 - DNA, 33 bp, Homo sapien
tgaagcaggttgtaaagtgttgaaatctgctga

SEQ ID NO: 11717 - DNA, 33 bp, Homo sapien
tctcatgatttgattccccttccagctgtggaa

SEQ ID NO: 11718 - DNA, 33 bp, Homo sapien
tctcatgatttgattctccttccagctgtggaa

SEQ ID NO: 11719 - DNA, 33 bp, Homo sapien
agaggccattcgaatccctgagtcagcatgccc

SEQ ID NO: 11720 - DNA, 33 bp, Homo sapien
agaggccattcgaatctctgagtcagcatgccc

SEQ ID NO: 11721 - DNA, 33 bp, Homo sapien
cttacaccccagaaaacaagctggcatatagaa

SEQ ID NO: 11722 - DNA, 33 bp, Homo sapien
cttacaccccagaaaataagctggcatatagaa

SEQ ID NO: 11723 - DNA, 33 bp, Homo sapien
taaatctagtgggaaacgaaaattagtgaacta

SEQ ID NO: 11724 - DNA, 33 bp, Homo sapien
taaatctagtgggaaatgaaaattagtgaacta

SEQ ID NO: 11725 - DNA, 33 bp, Homo sapien
ccacctttccttcagaacacttggcgccagttg

SEQ ID NO: 11726 - DNA, 33 bp, Homo sapien
ccacctttccttcagagcacttggcgccagttg

SEQ ID NO: 11727 - DNA, 33 bp, Homo sapien
tcctggaatctgtcccagaaggaacaacaaaga

SEQ ID NO: 11728 - DNA, 33 bp, Homo sapien
tcctggaatctgtccccgaaggaacaacaaaga

SEQ ID NO: 11729 - DNA, 33 bp, Homo sapien
caaactaatacaatcacggatcagaacgttttc

SEQ ID NO: 11730 - DNA, 33 bp, Homo sapien
caaactaatacaatcatggatcagaacgttttc

SEQ ID NO: 11731 - DNA, 33 bp, Homo sapien
tcagtgctccaagatgaaagattatcacgctta

SEQ ID NO: 11732 - DNA, 33 bp, Homo sapien
tcagtgctccaagatggaagattatcacgctta

SEQ ID NO: 11733 - DNA, 33 bp, Homo sapien
tttggttgtgagtaacagaaccacagtgcaaac

SEQ ID NO: 11734 - DNA, 33 bp, Homo sapien
tttggttgtgagtaacggaaccacagtgcaaac

SEQ ID NO: 11735 - DNA, 33 bp, Homo sapien
agtgtccttttagtagaattgttgtgtggatta

SEQ ID NO: 11736 - DNA, 33 bp, Homo sapien
agtgtccttttagtaggattgttgtgtggatta

SEQ ID NO: 11737 - DNA, 33 bp, Homo sapien
tagaaagcccttcttcactagaattacagtgtc

SEQ ID NO: 11738 - DNA, 33 bp, Homo sapien
tagaaagcccttcttcgctagaattacagtgtc

SEQ ID NO: 11739 - DNA, 33 bp, Homo sapien
actggctttaatgttccactttttctgcctcat

SEQ ID NO: 11740 - DNA, 33 bp, Homo sapien
actggctttaatgttctactttttctgcctcat

SEQ ID NO: 11741 - DNA, 33 bp, Homo sapien
cctgacactctgactaaccttgtcagcatcccc

SEQ ID NO: 11742 - DNA, 33 bp, Homo sapien
cctgacactctgactagccttgtcagcatcccc

SEQ ID NO: 11743 - DNA, 33 bp, Homo sapien
atggaacctgataagcagaaggaaataaattaa

SEQ ID NO: 11744 - DNA, 33 bp, Homo sapien
atggaacctgataagcggaaggaaataaattaa

SEQ ID NO: 11745 - DNA, 33 bp, Homo sapien
aactaatggtgtgacaaggaaagttatttgact

SEQ ID NO: 11746 - DNA, 33 bp, Homo sapien
aactaatggtgtgacagggaaagttatttgact

SEQ ID NO: 11747 - DNA, 33 bp, Homo sapien
gatctggagaataatgcaaagatgggacgcctt

SEQ ID NO: 11748 - DNA, 33 bp, Homo sapien
gatctggagaataatgtaaagatgggacgcctt

SEQ ID NO: 11749 - DNA, 33 bp, Homo sapien
acatttaggaggcataagtgcagtaagctggat

SEQ ID NO: 11750 - DNA, 33 bp, Homo sapien
acatttaggaggcatacgtgcagtaagctggat

SEQ ID NO: 11751 - DNA, 33 bp, Homo sapien
catggaaaatcaatccaagaccccgcagaagtt

SEQ ID NO: 11752 - DNA, 33 bp, Homo sapien
catggaaaatcaatccgagaccccgcagaagtt

SEQ ID NO: 11753 - DNA, 33 bp, Homo sapien
tcttcatgtttactgaacatttattatggtgag

SEQ ID NO: 11754 - DNA, 33 bp, Homo sapien
tcttcatgtttactgatcatttattatggtgag

SEQ ID NO: 11755 - DNA, 33 bp, Homo sapien
agtgtgggttattcacaggccgagcaccgtcca

SEQ ID NO: 11756 - DNA, 33 bp, Homo sapien
agtgtgggttattcaccggccgagcaccgtcca

SEQ ID NO: 11757 - DNA, 33 bp, Homo sapien
ctcatctgggttaacaatagcctgcaaacatac

SEQ ID NO: 11758 - DNA, 33 bp, Homo sapien
ctcatctgggttaacagtagcctgcaaacatac

SEQ ID NO: 11759 - DNA, 33 bp, Homo sapien
gcttgcaaaaattctacgttagccaggcatggt

SEQ ID NO: 11760 - DNA, 33 bp, Homo sapien
gcttgcaaaaattctaggttagccaggcatggt

SEQ ID NO: 11761 - DNA, 33 bp, Homo sapien
ctgttctcagtagctaccaattagtctgcccca

SEQ ID NO: 11762 - DNA, 33 bp, Homo sapien
ctgttctcagtagctagcaattagtctgcccca

SEQ ID NO: 11763 - DNA, 33 bp, Homo sapien
tcgttttttcaatagaagcagagtattcgtttt

SEQ ID NO: 11764 - DNA, 33 bp, Homo sapien
tcgttttttcaatagatgcagagtattcgtttt

SEQ ID NO: 11765 - DNA, 33 bp, Homo sapien
gcttggttcagtgaaagcctctctatccatgca

SEQ ID NO: 11766 - DNA, 33 bp, Homo sapien
gcttggttcagtgaaatcctctctatccatgca

SEQ ID NO: 11767 - DNA, 33 bp, Homo sapien
ctaattcacacaataactcagagtgaatgcacc

SEQ ID NO: 11768 - DNA, 33 bp, Homo sapien
ctaattcacacaataattcagagtgaatgcacc

SEQ ID NO: 11769 - DNA, 33 bp, Homo sapien
aggaatataaaaatgcactggcaagctgtatct

SEQ ID NO: 11770 - DNA, 33 bp, Homo sapien
aggaatataaaaatgcgctggcaagctgtatct

SEQ ID NO: 11771 - DNA, 33 bp, Homo sapien
agtgactttttagcataaggttaggagacagat

SEQ ID NO: 11772 - DNA, 33 bp, Homo sapien
agtgactttttagcatgaggttaggagacagat

SEQ ID NO: 11773 - DNA, 33 bp, Homo sapien
gcaggatctacttttaaatagtttaagtcaaga

SEQ ID NO: 11774 - DNA, 33 bp, Homo sapien
gcaggatctacttttagatagtttaagtcaaga

SEQ ID NO: 11775 - DNA, 33 bp, Homo sapien
caaagcagataaacacagccaaagacaaaatag

SEQ ID NO: 11776 - DNA, 33 bp, Homo sapien
caaagcagataaacacggccaaagacaaaatag

SEQ ID NO: 11777 - DNA, 33 bp, Homo sapien
cagcagagttacaaaaaagaagttccattccta

SEQ ID NO: 11778 - DNA, 33 bp, Homo sapien
cagcagagttacaaaatagaagttccattccta

SEQ ID NO: 11779 - DNA, 33 bp, Homo sapien
gtcctgccaggcctaaatctgtcagcaccccca

SEQ ID NO: 11780 - DNA, 33 bp, Homo sapien
gtcctgccaggcctaagtctgtcagcaccccca

SEQ ID NO: 11781 - DNA, 33 bp, Homo sapien
ctgtgctcgcagagaaatcctctgttatcaggc

SEQ ID NO: 11782 - DNA, 33 bp, Homo sapien
ctgtgctcgcagagaagtcctctgttatcaggc

SEQ ID NO: 11783 - DNA, 33 bp, Homo sapien
agtcatattcctattcactcttctcaactactc

SEQ ID NO: 11784 - DNA, 33 bp, Homo sapien
agtcatattcctattctctcttctcaactactc

SEQ ID NO: 11785 - DNA, 33 bp, Homo sapien
acaaaaatgatcaaacggtttccacataagtta

SEQ ID NO: 11786 - DNA, 33 bp, Homo sapien
acaaaaatgatcaaactgtttccacataagtta

SEQ ID NO: 11787 - DNA, 33 bp, Homo sapien
ttaggcctagagaaaaagtcactccagacttgc

SEQ ID NO: 11788 - DNA, 33 bp, Homo sapien
ttaggcctagagaaaaggtcactccagacttgc

SEQ ID NO: 11789 - DNA, 33 bp, Homo sapien
atgtccaggatctagtcaaaaattattagacat

SEQ ID NO: 11790 - DNA, 33 bp, Homo sapien
atgtccaggatctagtgaaaaattattagacat

SEQ ID NO: 11791 - DNA, 33 bp, Homo sapien
cacatcgcttcacaagcaagtatagtcaaataa

SEQ ID NO: 11792 - DNA, 33 bp, Homo sapien
cacatcgcttcacaagtaagtatagtcaaataa

SEQ ID NO: 11793 - DNA, 33 bp, Homo sapien
ccaataaagttcctgaagtccatatattatata

SEQ ID NO: 11794 - DNA, 33 bp, Homo sapien
ccaataaagttcctgacgtccatatattatata

SEQ ID NO: 11795 - DNA, 33 bp, Homo sapien
gtttagagtatagacacatttagacaagtccca

SEQ ID NO: 11796 - DNA, 33 bp, Homo sapien
gtttagagtatagacatatttagacaagtccca

SEQ ID NO: 11797 - DNA, 33 bp, Homo sapien
catagtaagaattctacaatgtacagatttgaa

SEQ ID NO: 11798 - DNA, 33 bp, Homo sapien
catagtaagaattctataatgtacagatttgaa

SEQ ID NO: 11799 - DNA, 33 bp, Homo sapien
ggattcacattaacaaagttctaataaggtgaa

SEQ ID NO: 11800 - DNA, 33 bp, Homo sapien
ggattcacattaacaaggttctaataaggtgaa

SEQ ID NO: 11801 - DNA, 33 bp, Homo sapien
ttttggcagtttttaaatcaagtgtaaaggtta

SEQ ID NO: 11802 - DNA, 33 bp, Homo sapien
ttttggcagtttttaattcaagtgtaaaggtta

SEQ ID NO: 11803 - DNA, 33 bp, Homo sapien
ctcttaaattgtcataagcctacttcctactcc

SEQ ID NO: 11804 - DNA, 33 bp, Homo sapien
ctcttaaattgtcataggcctacttcctactcc

SEQ ID NO: 11805 - DNA, 33 bp, Homo sapien
tggcactgcagtaaacacagtaaaagagcctcg

SEQ ID NO: 11806 - DNA, 33 bp, Homo sapien
tggcactgcagtaaacgcagtaaaagagcctcg

SEQ ID NO: 11807 - DNA, 33 bp, Homo sapien
tgtctcaaacatgttacggtagttgttactctg

SEQ ID NO: 11808 - DNA, 33 bp, Homo sapien
tgtctcaaacatgttatggtagttgttactctg

SEQ ID NO: 11809 - DNA, 33 bp, Homo sapien
tgttcattaacaaaaacgtggcttcctgaatcc

SEQ ID NO: 11810 - DNA, 33 bp, Homo sapien
tgttcattaacaaaaatgtggcttcctgaatcc

SEQ ID NO: 11811 - DNA, 33 bp, Homo sapien
tgtcctattcagtttcaatcactctatctcggg

SEQ ID NO: 11812 - DNA, 33 bp, Homo sapien
tgtcctattcagtttcgatcactctatctcggg

SEQ ID NO: 11813 - DNA, 33 bp, Homo sapien
caattccagtttaaaccattccttctgtgtaat

SEQ ID NO: 11814 - DNA, 33 bp, Homo sapien
caattccagtttaaactattccttctgtgtaat

SEQ ID NO: 11815 - DNA, 33 bp, Homo sapien
ttattgttactctgtcaccagtagaacaaatag

SEQ ID NO: 11816 - DNA, 33 bp, Homo sapien
ttattgttactctgtctccagtagaacaaatag

SEQ ID NO: 11817 - DNA, 33 bp, Homo sapien
atataagacaggatagcacagaagagaaaatat

SEQ ID NO: 11818 - DNA, 33 bp, Homo sapien
atataagacaggataggacagaagagaaaatat

SEQ ID NO: 11819 - DNA, 33 bp, Homo sapien
aattgctagaaggcataaaacatttaatactta

SEQ ID NO: 11820 - DNA, 33 bp, Homo sapien
aattgctagaaggcattaaacatttaatactta

SEQ ID NO: 11821 - DNA, 33 bp, Homo sapien
acaggcatggaaaaccacttgctaaagaggagg

SEQ ID NO: 11822 - DNA, 33 bp, Homo sapien
acaggcatggaaaaccgcttgctaaagaggagg

SEQ ID NO: 11823 - DNA, 33 bp, Homo sapien
tttagacaacaaattacatctcaaatgaaatga

SEQ ID NO: 11824 - DNA, 33 bp, Homo sapien
tttagacaacaaattatatctcaaatgaaatga

SEQ ID NO: 11825 - DNA, 33 bp, Homo sapien
tccagatatagactcaactgatgaggtatgaat

SEQ ID NO: 11826 - DNA, 33 bp, Homo sapien
tccagatatagactcacctgatgaggtatgaat

SEQ ID NO: 11827 - DNA, 33 bp, Homo sapien
ctgctgttggaaatgtaaaatggtgctgccact

SEQ ID NO: 11828 - DNA, 33 bp, Homo sapien
ctgctgttggaaatgttaaatggtgctgccact

SEQ ID NO: 11829 - DNA, 33 bp, Homo sapien
ctaaaacttcaactcaataccctaggagacttc

SEQ ID NO: 11830 - DNA, 33 bp, Homo sapien
ctaaaacttcaactcagtaccctaggagacttc

SEQ ID NO: 11831 - DNA, 33 bp, Homo sapien
agagatgactgattccaaaagagtaccacaaaa

SEQ ID NO: 11832 - DNA, 33 bp, Homo sapien
agagatgactgattccgaaagagtaccacaaaa

SEQ ID NO: 11833 - DNA, 33 bp, Homo sapien
taacttaatctacacacatggtgacagaggaga

SEQ ID NO: 11834 - DNA, 33 bp, Homo sapien
taacttaatctacacagatggtgacagaggaga

SEQ ID NO: 11835 - DNA, 33 bp, Homo sapien
acttccttgccagaggacacgacctcacagggc

SEQ ID NO: 11836 - DNA, 33 bp, Homo sapien
acttccttgccagaggccacgacctcacagggc

SEQ ID NO: 11837 - DNA, 33 bp, Homo sapien
ggcagagtaggtgcacacttggacaggtctctc

SEQ ID NO: 11838 - DNA, 33 bp, Homo sapien
ggcagagtaggtgcacgcttggacaggtctctc

SEQ ID NO: 11839 - DNA, 33 bp, Homo sapien
catggcttgcagaatcacaggtgtcttcttcga

SEQ ID NO: 11840 - DNA, 33 bp, Homo sapien
catggcttgcagaatcgcaggtgtcttcttcga

SEQ ID NO: 11841 - DNA, 33 bp, Homo sapien
tttaggctgaggatgaacagtaactgaggaagg

SEQ ID NO: 11842 - DNA, 33 bp, Homo sapien
tttaggctgaggatgagcagtaactgaggaagg

SEQ ID NO: 11843 - DNA, 33 bp, Homo sapien
ggcccggagaagtgccacgctgcagaggtgaga

SEQ ID NO: 11844 - DNA, 33 bp, Homo sapien
ggcccggagaagtgccgcgctgcagaggtgaga

SEQ ID NO: 11845 - DNA, 33 bp, Homo sapien
ctgagaagtactgccacagactttctaaaagct

SEQ ID NO: 11846 - DNA, 33 bp, Homo sapien
ctgagaagtactgccatagactttctaaaagct

SEQ ID NO: 11847 - DNA, 33 bp, Homo sapien
ttttttcccagagatacgagataattttctgat

SEQ ID NO: 11848 - DNA, 33 bp, Homo sapien
ttttttcccagagatatgagataattttctgat

SEQ ID NO: 11849 - DNA, 33 bp, Homo sapien
caggttgcacaataacagtcacttgagcagtgg

SEQ ID NO: 11850 - DNA, 33 bp, Homo sapien
caggttgcacaataacggtcacttgagcagtgg

SEQ ID NO: 11851 - DNA, 33 bp, Homo sapien
cattcctcaggcaatacacagatagattggcag

SEQ ID NO: 11852 - DNA, 33 bp, Homo sapien
cattcctcaggcaatatacagatagattggcag

SEQ ID NO: 11853 - DNA, 33 bp, Homo sapien
ataatatatcagcttacaaaaaagcacagataa

SEQ ID NO: 11854 - DNA, 33 bp, Homo sapien
ataatatatcagcttagaaaaaagcacagataa

SEQ ID NO: 11855 - DNA, 33 bp, Homo sapien
tagaatcctacctccaccatgttcttgctgtgt

SEQ ID NO: 11856 - DNA, 33 bp, Homo sapien
tagaatcctacctccatcatgttcttgctgtgt

SEQ ID NO: 11857 - DNA, 33 bp, Homo sapien
gggagatgtgactggaacctcagcgagtacggg

SEQ ID NO: 11858 - DNA, 33 bp, Homo sapien
gggagatgtgactggagcctcagcgagtacggg

SEQ ID NO: 11859 - DNA, 33 bp, Homo sapien
caggaagctgtcaacccaacctggtggtatttg

SEQ ID NO: 11860 - DNA, 33 bp, Homo sapien
caggaagctgtcaacctaacctggtggtatttg

SEQ ID NO: 11861 - DNA, 33 bp, Homo sapien
cttgtacagcagattgccaaactcatgttgatg

SEQ ID NO: 11862 - DNA, 33 bp, Homo sapien
cttgtacagcagattgtcaaactcatgttgatg

SEQ ID NO: 11863 - DNA, 33 bp, Homo sapien
ctccaggagcttgtgaagagtgttcatgtatgt

SEQ ID NO: 11864 - DNA, 33 bp, Homo sapien
ctccaggagcttgtgaggagtgttcatgtatgt

SEQ ID NO: 11865 - DNA, 33 bp, Homo sapien
atcttcaatggttcccactgcattgattttcaa

SEQ ID NO: 11866 - DNA, 33 bp, Homo sapien
atcttcaatggttcccgctgcattgattttcaa

SEQ ID NO: 11867 - DNA, 33 bp, Homo sapien
aaggctgaaattctgaccccatcgtctctttcc

SEQ ID NO: 11868 - DNA, 33 bp, Homo sapien
aaggctgaaattctgatcccatcgtctctttcc

SEQ ID NO: 11869 - DNA, 33 bp, Homo sapien
gtgctaatggggaacacggttctaatagaaggg

SEQ ID NO: 11870 - DNA, 33 bp, Homo sapien
gtgctaatggggaacatggttctaatagaaggg

SEQ ID NO: 11871 - DNA, 33 bp, Homo sapien
gccagtgaagtcatacagtacctactggacttc

SEQ ID NO: 11872 - DNA, 33 bp, Homo sapien
gccagtgaagtcatacggtacctactggacttc

SEQ ID NO: 11873 - DNA, 33 bp, Homo sapien
atactatttttgtgaaggatggaagtaaggctc

SEQ ID NO: 11874 - DNA, 33 bp, Homo sapien
atactatttttgtgaatgatggaagtaaggctc

SEQ ID NO: 11875 - DNA, 33 bp, Homo sapien
ccaaatatttgtgtacagagatactcagtgttg

SEQ ID NO: 11876 - DNA, 33 bp, Homo sapien
ccaaatatttgtgtaccgagatactcagtgttg

SEQ ID NO: 11877 - DNA, 33 bp, Homo sapien
agaaaaacaaattcacaaagaggctcagagatt

SEQ ID NO: 11878 - DNA, 33 bp, Homo sapien
agaaaaacaaattcacgaagaggctcagagatt

SEQ ID NO: 11879 - DNA, 33 bp, Homo sapien
gaatgagttaaatcctaactggcttttagaaac

SEQ ID NO: 11880 - DNA, 33 bp, Homo sapien
gaatgagttaaatcctgactggcttttagaaac

SEQ ID NO: 11881 - DNA, 33 bp, Homo sapien
gaccaggacaacatgagaatgagagtgtgggtc

SEQ ID NO: 11882 - DNA, 33 bp, Homo sapien
gaccaggacaacatgataatgagagtgtgggtc

SEQ ID NO: 11883 - DNA, 33 bp, Homo sapien
tactctgggctacaaaagatattgcctttcagg

SEQ ID NO: 11884 - DNA, 33 bp, Homo sapien
tactctgggctacaaaggatattgcctttcagg

SEQ ID NO: 11885 - DNA, 33 bp, Homo sapien
taccgagctctcactacgtcatatcttttttct

SEQ ID NO: 11886 - DNA, 33 bp, Homo sapien
taccgagctctcactatgtcatatcttttttct

SEQ ID NO: 11887 - DNA, 33 bp, Homo sapien
aaatgaggattgtggtaaagaccatggacagat

SEQ ID NO: 11888 - DNA, 33 bp, Homo sapien
aaatgaggattgtggtcaagaccatggacagat

SEQ ID NO: 11889 - DNA, 33 bp, Homo sapien
ctttgcattaattacccgctgacatggtttgca

SEQ ID NO: 11890 - DNA, 33 bp, Homo sapien
ctttgcattaattacctgctgacatggtttgca

SEQ ID NO: 11891 - DNA, 33 bp, Homo sapien
ttaatcatatacaaagccctctatttccttcaa

SEQ ID NO: 11892 - DNA, 33 bp, Homo sapien
ttaatcatatacaaaggcctctatttccttcaa

SEQ ID NO: 11893 - DNA, 33 bp, Homo sapien
catcttcaaatttaacaatgtccattcagttct

SEQ ID NO: 11894 - DNA, 33 bp, Homo sapien
catcttcaaatttaacgatgtccattcagttct

SEQ ID NO: 11895 - DNA, 33 bp, Homo sapien
aactgaatggtcagaaaaaaagccccaaacaac

SEQ ID NO: 11896 - DNA, 33 bp, Homo sapien
aactgaatggtcagaacaaaagccccaaacaac

SEQ ID NO: 11897 - DNA, 33 bp, Homo sapien
cactgcgcccggcgaaaagactgaatcttgaag

SEQ ID NO: 11898 - DNA, 33 bp, Homo sapien
cactgcgcccggcgaagagactgaatcttgaag

SEQ ID NO: 11899 - DNA, 33 bp, Homo sapien
ggtactgtggtcacctcagcacttcccatgatt

SEQ ID NO: 11900 - DNA, 33 bp, Homo sapien
ggtactgtggtcaccttagcacttcccatgatt

SEQ ID NO: 11901 - DNA, 33 bp, Homo sapien
gtgttcccatctcccaataaaaaactggcacac

SEQ ID NO: 11902 - DNA, 33 bp, Homo sapien
gtgttcccatctcccagtaaaaaactggcacac

SEQ ID NO: 11903 - DNA, 33 bp, Homo sapien
tggggatgaagataaaatgttacacccagtgtt

SEQ ID NO: 11904 - DNA, 33 bp, Homo sapien
tggggatgaagataaagtgttacacccagtgtt

SEQ ID NO: 11905 - DNA, 33 bp, Homo sapien
attagaaaatgcaacaatgaatatactcacaga

SEQ ID NO: 11906 - DNA, 33 bp, Homo sapien
attagaaaatgcaacagtgaatatactcacaga

SEQ ID NO: 11907 - DNA, 33 bp, Homo sapien
caaggtaacaaaacaacgtaattgccagaaacc

SEQ ID NO: 11908 - DNA, 33 bp, Homo sapien
caaggtaacaaaacaatgtaattgccagaaacc

SEQ ID NO: 11909 - DNA, 33 bp, Homo sapien
cctcagctagctgttaactggaaccaatcccta

SEQ ID NO: 11910 - DNA, 33 bp, Homo sapien
cctcagctagctgttacctggaaccaatcccta

SEQ ID NO: 11911 - DNA, 33 bp, Homo sapien
atatttctatatgctacgtgtatatttcttttt

SEQ ID NO: 11912 - DNA, 33 bp, Homo sapien
atatttctatatgctatgtgtatatttcttttt

SEQ ID NO: 11913 - DNA, 33 bp, Homo sapien
gggctggaatagagacggagcgagtgcacctca

SEQ ID NO: 11914 - DNA, 33 bp, Homo sapien
gggctggaatagagactgagcgagtgcacctca

SEQ ID NO: 11915 - DNA, 33 bp, Homo sapien
tcttaggcacaataaactctctttatattttag

SEQ ID NO: 11916 - DNA, 33 bp, Homo sapien
tcttaggcacaataaagtctctttatattttag

SEQ ID NO: 11917 - DNA, 33 bp, Homo sapien
gtgctaggtgctagaaatactaagatgagtaag

SEQ ID NO: 11918 - DNA, 33 bp, Homo sapien
gtgctaggtgctagaattactaagatgagtaag

SEQ ID NO: 11919 - DNA, 33 bp, Homo sapien
acctggctccacactaccatctaagttccttaa

SEQ ID NO: 11920 - DNA, 33 bp, Homo sapien
acctggctccacactatcatctaagttccttaa

SEQ ID NO: 11921 - DNA, 33 bp, Homo sapien
gaattattgtaaccagcctactcaatttatata

SEQ ID NO: 11922 - DNA, 33 bp, Homo sapien
gaattattgtaaccaggctactcaatttatata

SEQ ID NO: 11923 - DNA, 33 bp, Homo sapien
aatcctgtgcagaggacatttaggagaaaggta

SEQ ID NO: 11924 - DNA, 33 bp, Homo sapien
aatcctgtgcagaggagatttaggagaaaggta

SEQ ID NO: 11925 - DNA, 33 bp, Homo sapien
atcatttgcctttgcccggagtatctgcatcct

SEQ ID NO: 11926 - DNA, 33 bp, Homo sapien
atcatttgcctttgcctggagtatctgcatcct

SEQ ID NO: 11927 - DNA, 33 bp, Homo sapien
gggttgaggatataaaagacccttgcacaagag

SEQ ID NO: 11928 - DNA, 33 bp, Homo sapien
gggttgaggatataaacgacccttgcacaagag

SEQ ID NO: 11929 - DNA, 33 bp, Homo sapien
aaattatttaaaaagcaccaggtaaagtaatga

SEQ ID NO: 11930 - DNA, 33 bp, Homo sapien
aaattatttaaaaagctccaggtaaagtaatga

SEQ ID NO: 11931 - DNA, 33 bp, Homo sapien
ttttattcagtgtagacgaaaagagactaaaat

SEQ ID NO: 11932 - DNA, 33 bp, Homo sapien
ttttattcagtgtagatgaaaagagactaaaat

SEQ ID NO: 11933 - DNA, 33 bp, Homo sapien
agtaacaaaagcataacggttgagaagaaccag

SEQ ID NO: 11934 - DNA, 33 bp, Homo sapien
agtaacaaaagcataatggttgagaagaaccag

SEQ ID NO: 11935 - DNA, 33 bp, Homo sapien
tatcttgttgcacaagcatttattggctacctt

SEQ ID NO: 11936 - DNA, 33 bp, Homo sapien
tatcttgttgcacaagtatttattggctacctt

SEQ ID NO: 11937 - DNA, 33 bp, Homo sapien
gaaagaagattgctaaagtataacaaaatgtca

SEQ ID NO: 11938 - DNA, 33 bp, Homo sapien
gaaagaagattgctaaggtataacaaaatgtca

SEQ ID NO: 11939 - DNA, 33 bp, Homo sapien
aattaaacaatcagcactcattaactatacttt

SEQ ID NO: 11940 - DNA, 33 bp, Homo sapien
aattaaacaatcagcattcattaactatacttt

SEQ ID NO: 11941 - DNA, 33 bp, Homo sapien
attttttgtctgttcacaattgagtttttatgg

SEQ ID NO: 11942 - DNA, 33 bp, Homo sapien
attttttgtctgttcagaattgagtttttatgg

SEQ ID NO: 11943 - DNA, 33 bp, Homo sapien
gaaactagaatagtcaaattcatggaagcggaa

SEQ ID NO: 11944 - DNA, 33 bp, Homo sapien
gaaactagaatagtcagattcatggaagcggaa

SEQ ID NO: 11945 - DNA, 33 bp, Homo sapien
caggggtggtggcaaacgggtgtcacctctcat

SEQ ID NO: 11946 - DNA, 33 bp, Homo sapien
caggggtggtggcaaatgggtgtcacctctcat

SEQ ID NO: 11947 - DNA, 33 bp, Homo sapien
ggaggagatctggatccagaaactatcattttc

SEQ ID NO: 11948 - DNA, 33 bp, Homo sapien
ggaggagatctggatctagaaactatcattttc

SEQ ID NO: 11949 - DNA, 33 bp, Homo sapien
attacagttgtggctacggcacccagcctctac

SEQ ID NO: 11950 - DNA, 33 bp, Homo sapien
attacagttgtggctatggcacccagcctctac

SEQ ID NO: 11951 - DNA, 33 bp, Homo sapien
tcagtccctacgtcaaacggagtggataaggct

SEQ ID NO: 11952 - DNA, 33 bp, Homo sapien
tcagtccctacgtcaagcggagtggataaggct

SEQ ID NO: 11953 - DNA, 33 bp, Homo sapien
ggaatattactcggcaatgaaaatgaatgaagt

SEQ ID NO: 11954 - DNA, 33 bp, Homo sapien
ggaatattactcggcagtgaaaatgaatgaagt

SEQ ID NO: 11955 - DNA, 33 bp, Homo sapien
tataattcacacatcaaacaattggcccattca

SEQ ID NO: 11956 - DNA, 33 bp, Homo sapien
tataattcacacatcatacaattggcccattca

SEQ ID NO: 11957 - DNA, 33 bp, Homo sapien
gtgtcccgggttcccacgctggagaagtccctc

SEQ ID NO: 11958 - DNA, 33 bp, Homo sapien
gtgtcccgggttcccatgctggagaagtccctc

SEQ ID NO: 11959 - DNA, 33 bp, Homo sapien
cttctcagtggtgtctcaaaaccctggtcctac

SEQ ID NO: 11960 - DNA, 33 bp, Homo sapien
cttctcagtggtgtctgaaaaccctggtcctac

SEQ ID NO: 11961 - DNA, 33 bp, Homo sapien
attcatgctcaaaccactctagtgccaagccct

SEQ ID NO: 11962 - DNA, 33 bp, Homo sapien
attcatgctcaaaccattctagtgccaagccct

SEQ ID NO: 11963 - DNA, 33 bp, Homo sapien
taagtgactatctagaagaagggagttccaaga

SEQ ID NO: 11964 - DNA, 33 bp, Homo sapien
taagtgactatctagaggaagggagttccaaga

SEQ ID NO: 11965 - DNA, 33 bp, Homo sapien
ggttggaattctgactgacttgattgatcttca

SEQ ID NO: 11966 - DNA, 33 bp, Homo sapien
ggttggaattctgacttacttgattgatcttca

SEQ ID NO: 11967 - DNA, 33 bp, Homo sapien
gaactaatgagtttaacgtgtttagctgtgcct

SEQ ID NO: 11968 - DNA, 33 bp, Homo sapien
gaactaatgagtttaatgtgtttagctgtgcct

SEQ ID NO: 11969 - DNA, 33 bp, Homo sapien
agagttttgaatcccagtaagtctgtttcctct

SEQ ID NO: 11970 - DNA, 33 bp, Homo sapien
agagttttgaatcccattaagtctgtttcctct

SEQ ID NO: 11971 - DNA, 33 bp, Homo sapien
gggcctgcacaatggcaagagacaagacatatt

SEQ ID NO: 11972 - DNA, 33 bp, Homo sapien
gggcctgcacaatggcgagagacaagacatatt

SEQ ID NO: 11973 - DNA, 33 bp, Homo sapien
gactgcctaccagaaacagcatgacataagggt

SEQ ID NO: 11974 - DNA, 33 bp, Homo sapien
gactgcctaccagaaatagcatgacataagggt

SEQ ID NO: 11975 - DNA, 33 bp, Homo sapien
gagaatttactcagacagattaagtggattgtt

SEQ ID NO: 11976 - DNA, 33 bp, Homo sapien
gagaatttactcagacggattaagtggattgtt

SEQ ID NO: 11977 - DNA, 33 bp, Homo sapien
atccttcaaacatctacctaccacctcaggggc

SEQ ID NO: 11978 - DNA, 33 bp, Homo sapien
atccttcaaacatctatctaccacctcaggggc

SEQ ID NO: 11979 - DNA, 33 bp, Homo sapien
ccagagtatggtcaagacaagaacacatgactg

SEQ ID NO: 11980 - DNA, 33 bp, Homo sapien
ccagagtatggtcaaggcaagaacacatgactg

SEQ ID NO: 11981 - DNA, 33 bp, Homo sapien
ccttgcctcacttacacctgtaaaatgcagatt

SEQ ID NO: 11982 - DNA, 33 bp, Homo sapien
ccttgcctcacttacatctgtaaaatgcagatt

SEQ ID NO: 11983 - DNA, 33 bp, Homo sapien
agttggaaatgtcgataatatatccagagtcta

SEQ ID NO: 11984 - DNA, 33 bp, Homo sapien
agttggaaatgtcgatgatatatccagagtcta

SEQ ID NO: 11985 - DNA, 33 bp, Homo sapien
atgtctgcaatgcaaaaggttaccaatgagctg

SEQ ID NO: 11986 - DNA, 33 bp, Homo sapien
atgtctgcaatgcaaacggttaccaatgagctg

SEQ ID NO: 11987 - DNA, 33 bp, Homo sapien
gtgtatgtgtgggtgaaggtgattctcctttaa

SEQ ID NO: 11988 - DNA, 33 bp, Homo sapien
gtgtatgtgtgggtgagggtgattctcctttaa

SEQ ID NO: 11989 - DNA, 33 bp, Homo sapien
tctacaaaaaatacgaaaagttagccagctgta

SEQ ID NO: 11990 - DNA, 33 bp, Homo sapien
tctacaaaaaatacgagaagttagccagctgta

SEQ ID NO: 11991 - DNA, 33 bp, Homo sapien
tttctccttaagatgaagaacaagaccaagaca

SEQ ID NO: 11992 - DNA, 33 bp, Homo sapien
tttctccttaagatgaggaacaagaccaagaca

SEQ ID NO: 11993 - DNA, 33 bp, Homo sapien
ttggctgtattaacacaactttgacttgattaa

SEQ ID NO: 11994 - DNA, 33 bp, Homo sapien
ttggctgtattaacacgactttgacttgattaa

SEQ ID NO: 11995 - DNA, 33 bp, Homo sapien
atttttctcttaattgccaagttcatagaactg

SEQ ID NO: 11996 - DNA, 33 bp, Homo sapien
atttttctcttaattggcaagttcatagaactg

SEQ ID NO: 11997 - DNA, 33 bp, Homo sapien
accaaaggactttctaggcggttacttcgtaat

SEQ ID NO: 11998 - DNA, 33 bp, Homo sapien
accaaaggactttctatgcggttacttcgtaat

SEQ ID NO: 11999 - DNA, 33 bp, Homo sapien
gtgagagaagcgagcaaagtctggattctaacc

SEQ ID NO: 12000 - DNA, 33 bp, Homo sapien
gtgagagaagcgagcagagtctggattctaacc

SEQ ID NO: 12001 - DNA, 33 bp, Homo sapien
tattgagagctccaaaatatctggtactgggcc

SEQ ID NO: 12002 - DNA, 33 bp, Homo sapien
tattgagagctccaaagtatctggtactgggcc

SEQ ID NO: 12003 - DNA, 33 bp, Homo sapien
tatatgaattcaatcaataagtacccagaggac

SEQ ID NO: 12004 - DNA, 33 bp, Homo sapien
tatatgaattcaatcagtaagtacccagaggac

SEQ ID NO: 12005 - DNA, 33 bp, Homo sapien
gtcgaaggatggagaacgcttagcagctgaggt

SEQ ID NO: 12006 - DNA, 33 bp, Homo sapien
gtcgaaggatggagaatgcttagcagctgaggt

SEQ ID NO: 12007 - DNA, 33 bp, Homo sapien
gatgcgtaggagttagccaagcaaagagcagga

SEQ ID NO: 12008 - DNA, 33 bp, Homo sapien
gatgcgtaggagttaggcaagcaaagagcagga

SEQ ID NO: 12009 - DNA, 33 bp, Homo sapien
ctactgaagaattaaaactgttcataacatgcc

SEQ ID NO: 12010 - DNA, 33 bp, Homo sapien
ctactgaagaattaaacctgttcataacatgcc

SEQ ID NO: 12011 - DNA, 33 bp, Homo sapien
catttgtgaatataatcatccctcaatatccat

SEQ ID NO: 12012 - DNA, 33 bp, Homo sapien
catttgtgaatataatgatccctcaatatccat

SEQ ID NO: 12013 - DNA, 33 bp, Homo sapien
ctgccactctggctgaatagggcaaaatacagg

SEQ ID NO: 12014 - DNA, 33 bp, Homo sapien
ctgccactctggctgagtagggcaaaatacagg

SEQ ID NO: 12015 - DNA, 33 bp, Homo sapien
ttaaactgagaagaagcctgtcatttaaaaagc

SEQ ID NO: 12016 - DNA, 33 bp, Homo sapien
ttaaactgagaagaaggctgtcatttaaaaagc

SEQ ID NO: 12017 - DNA, 33 bp, Homo sapien
ttttccagcaagccaacaccagattacaaaaga

SEQ ID NO: 12018 - DNA, 33 bp, Homo sapien
ttttccagcaagccaagaccagattacaaaaga

SEQ ID NO: 12019 - DNA, 33 bp, Homo sapien
ctcagctgtgctctaaccgaggggcttggcaaa

SEQ ID NO: 12020 - DNA, 33 bp, Homo sapien
ctcagctgtgctctaatcgaggggcttggcaaa

SEQ ID NO: 12021 - DNA, 33 bp, Homo sapien
tgtcagtcagtcctctcaactccagttgtcaga

SEQ ID NO: 12022 - DNA, 33 bp, Homo sapien
tgtcagtcagtcctcttaactccagttgtcaga

SEQ ID NO: 12023 - DNA, 33 bp, Homo sapien
ggagaatgggttgcctcaacactatctggaatg

SEQ ID NO: 12024 - DNA, 33 bp, Homo sapien
ggagaatgggttgccttaacactatctggaatg

SEQ ID NO: 12025 - DNA, 33 bp, Homo sapien
gtgcactaaaatttgaaacccgctggcctactc

SEQ ID NO: 12026 - DNA, 33 bp, Homo sapien
gtgcactaaaatttgatacccgctggcctactc

SEQ ID NO: 12027 - DNA, 33 bp, Homo sapien
acactagttttatgaacgtgatgaaaaagtgat

SEQ ID NO: 12028 - DNA, 33 bp, Homo sapien
acactagttttatgaatgtgatgaaaaagtgat

SEQ ID NO: 12029 - DNA, 33 bp, Homo sapien
aaattcaagtattatcagagtttacatcgggag

SEQ ID NO: 12030 - DNA, 33 bp, Homo sapien
aaattcaagtattatcggagtttacatcgggag

SEQ ID NO: 12031 - DNA, 33 bp, Homo sapien
aagctgagaggtcttgaggatatctagaaaact

SEQ ID NO: 12032 - DNA, 33 bp, Homo sapien
aagctgagaggtcttgcggatatctagaaaact

SEQ ID NO: 12033 - DNA, 33 bp, Homo sapien
aagaaactatatttccaagaaactcacaaggta

SEQ ID NO: 12034 - DNA, 33 bp, Homo sapien
aagaaactatatttccgagaaactcacaaggta

SEQ ID NO: 12035 - DNA, 33 bp, Homo sapien
ttggtaatgtaacaggcatcatcatcttatgtc

SEQ ID NO: 12036 - DNA, 33 bp, Homo sapien
ttggtaatgtaacagggatcatcatcttatgtc

SEQ ID NO: 12037 - DNA, 33 bp, Homo sapien
cacttctgagagtcaaagcgggtgcttttaata

SEQ ID NO: 12038 - DNA, 33 bp, Homo sapien
cacttctgagagtcaaggcgggtgcttttaata

SEQ ID NO: 12039 - DNA, 33 bp, Homo sapien
actaagcaaactctgaccaaaaagccacactgt

SEQ ID NO: 12040 - DNA, 33 bp, Homo sapien
actaagcaaactctgatcaaaaagccacactgt

SEQ ID NO: 12041 - DNA, 33 bp, Homo sapien
tatatgtctatctcccgcttgattgtcttattc

SEQ ID NO: 12042 - DNA, 33 bp, Homo sapien
tatatgtctatctccctcttgattgtcttattc

SEQ ID NO: 12043 - DNA, 33 bp, Homo sapien
caattgacatggccgccaattaaaacattctct

SEQ ID NO: 12044 - DNA, 33 bp, Homo sapien
caattgacatggccgctaattaaaacattctct

SEQ ID NO: 12045 - DNA, 33 bp, Homo sapien
cttcccacataagctggagattggtcttactca

SEQ ID NO: 12046 - DNA, 33 bp, Homo sapien
cttcccacataagctgtagattggtcttactca

SEQ ID NO: 12047 - DNA, 33 bp, Homo sapien
aaaaagcataatatgaagactgataaaagaccc

SEQ ID NO: 12048 - DNA, 33 bp, Homo sapien
aaaaagcataatatgatgactgataaaagaccc

SEQ ID NO: 12049 - DNA, 33 bp, Homo sapien
cccaggctctgttctacccctacttcaccttct

SEQ ID NO: 12050 - DNA, 33 bp, Homo sapien
cccaggctctgttctatccctacttcaccttct

SEQ ID NO: 12051 - DNA, 33 bp, Homo sapien
caggctgagacacccaaaaagctctacatcacc

SEQ ID NO: 12052 - DNA, 33 bp, Homo sapien
caggctgagacacccagaaagctctacatcacc

SEQ ID NO: 12053 - DNA, 33 bp, Homo sapien
attcagagaacggggaaaatgagaaataaagct

SEQ ID NO: 12054 - DNA, 33 bp, Homo sapien
attcagagaacggggagaatgagaaataaagct

SEQ ID NO: 12055 - DNA, 33 bp, Homo sapien
tggctcttttcacccactctccaactccagaag

SEQ ID NO: 12056 - DNA, 33 bp, Homo sapien
tggctcttttcacccattctccaactccagaag

SEQ ID NO: 12057 - DNA, 33 bp, Homo sapien
tatggtaggaaggcaacgttccctatacttctg

SEQ ID NO: 12058 - DNA, 33 bp, Homo sapien
tatggtaggaaggcaatgttccctatacttctg

SEQ ID NO: 12059 - DNA, 33 bp, Homo sapien
atgaaatgagaacaacaaaggatcaagaaaggc

SEQ ID NO: 12060 - DNA, 33 bp, Homo sapien
atgaaatgagaacaacgaaggatcaagaaaggc

SEQ ID NO: 12061 - DNA, 33 bp, Homo sapien
tgtgacctgagtaagtcacctcccatccccggc

SEQ ID NO: 12062 - DNA, 33 bp, Homo sapien
tgtgacctgagtaagttacctcccatccccggc

SEQ ID NO: 12063 - DNA, 33 bp, Homo sapien
tgtgacgtgcgttacaatctgtccaaaagctaa

SEQ ID NO: 12064 - DNA, 33 bp, Homo sapien
tgtgacgtgcgttacagtctgtccaaaagctaa

SEQ ID NO: 12065 - DNA, 33 bp, Homo sapien
cctcccgcagtccaaacagatccctacaaaccg

SEQ ID NO: 12066 - DNA, 33 bp, Homo sapien
cctcccgcagtccaaatagatccctacaaaccg

SEQ ID NO: 12067 - DNA, 33 bp, Homo sapien
tcttgaccagcatattaaaatagccagtgctcc

SEQ ID NO: 12068 - DNA, 33 bp, Homo sapien
tcttgaccagcatattgaaatagccagtgctcc

SEQ ID NO: 12069 - DNA, 33 bp, Homo sapien
tgatgctttgtatccccagtacctagagcagtg

SEQ ID NO: 12070 - DNA, 33 bp, Homo sapien
tgatgctttgtatcccgagtacctagagcagtg

SEQ ID NO: 12071 - DNA, 33 bp, Homo sapien
atcttttcacaattcaaatctgattctgctacc

SEQ ID NO: 12072 - DNA, 33 bp, Homo sapien
atcttttcacaattcagatctgattctgctacc

SEQ ID NO: 12073 - DNA, 33 bp, Homo sapien
ggcgcagatcttgtccacaaatctctaccaagc

SEQ ID NO: 12074 - DNA, 33 bp, Homo sapien
ggcgcagatcttgtccgcaaatctctaccaagc

SEQ ID NO: 12075 - DNA, 33 bp, Homo sapien
gaaggagagaaagccaacacaaagttacatcat

SEQ ID NO: 12076 - DNA, 33 bp, Homo sapien
gaaggagagaaagccagcacaaagttacatcat

SEQ ID NO: 12077 - DNA, 33 bp, Homo sapien
tgtagaacacttctcaaagctgtccactggagg

SEQ ID NO: 12078 - DNA, 33 bp, Homo sapien
tgtagaacacttctcagagctgtccactggagg

SEQ ID NO: 12079 - DNA, 33 bp, Homo sapien
agatggaaagatttacccactgactcctgcccc

SEQ ID NO: 12080 - DNA, 33 bp, Homo sapien
agatggaaagatttactcactgactcctgcccc

SEQ ID NO: 12081 - DNA, 33 bp, Homo sapien
agcatctcggagcaacacctaatgcagcctggg

SEQ ID NO: 12082 - DNA, 33 bp, Homo sapien
agcatctcggagcaacgcctaatgcagcctggg

SEQ ID NO: 12083 - DNA, 33 bp, Homo sapien
tccccctcgggatcccagcattaattcactgaa

SEQ ID NO: 12084 - DNA, 33 bp, Homo sapien
tccccctcgggatcccggcattaattcactgaa

SEQ ID NO: 12085 - DNA, 33 bp, Homo sapien
gactgacagagagagcgaggcctacatcattct

SEQ ID NO: 12086 - DNA, 33 bp, Homo sapien
gactgacagagagagctaggcctacatcattct

SEQ ID NO: 12087 - DNA, 33 bp, Homo sapien
tttgggacttttagcccaagagctataattcct

SEQ ID NO: 12088 - DNA, 33 bp, Homo sapien
tttgggacttttagcctaagagctataattcct

SEQ ID NO: 12089 - DNA, 33 bp, Homo sapien
aacagcttccacaaagacagggcactgcttagg

SEQ ID NO: 12090 - DNA, 33 bp, Homo sapien
aacagcttccacaaagtcagggcactgcttagg

SEQ ID NO: 12091 - DNA, 33 bp, Homo sapien
gggcacatggcttaacaagcagaaggcactttt

SEQ ID NO: 12092 - DNA, 33 bp, Homo sapien
gggcacatggcttaacgagcagaaggcactttt

SEQ ID NO: 12093 - DNA, 33 bp, Homo sapien
ggtagaaaacagaccagtatggacatagatcta

SEQ ID NO: 12094 - DNA, 33 bp, Homo sapien
ggtagaaaacagaccattatggacatagatcta

SEQ ID NO: 12095 - DNA, 33 bp, Homo sapien
cccacatgccagattcaccttctcagatcccta

SEQ ID NO: 12096 - DNA, 33 bp, Homo sapien
cccacatgccagattcgccttctcagatcccta

SEQ ID NO: 12097 - DNA, 33 bp, Homo sapien
gcagtctgtatgaaagcctgtgtcaatatgtat

SEQ ID NO: 12098 - DNA, 33 bp, Homo sapien
gcagtctgtatgaaagtctgtgtcaatatgtat

SEQ ID NO: 12099 - DNA, 33 bp, Homo sapien
gccagtgaaaagtgaaacctctgaaggcagact

SEQ ID NO: 12100 - DNA, 33 bp, Homo sapien
gccagtgaaaagtgaagcctctgaaggcagact

SEQ ID NO: 12101 - DNA, 33 bp, Homo sapien
tcacattctatatagcactacctcagtagctct

SEQ ID NO: 12102 - DNA, 33 bp, Homo sapien
tcacattctatatagctctacctcagtagctct

SEQ ID NO: 12103 - DNA, 33 bp, Homo sapien
gcctatggtggtctgaagagtgaagcttccagg

SEQ ID NO: 12104 - DNA, 33 bp, Homo sapien
gcctatggtggtctgaggagtgaagcttccagg

SEQ ID NO: 12105 - DNA, 33 bp, Homo sapien
tgagcactgcttcagaaacttacccataaggga

SEQ ID NO: 12106 - DNA, 33 bp, Homo sapien
tgagcactgcttcagagacttacccataaggga

SEQ ID NO: 12107 - DNA, 33 bp, Homo sapien
gtaggcagtgttattccacccatttacgggcag

SEQ ID NO: 12108 - DNA, 33 bp, Homo sapien
gtaggcagtgttattctacccatttacgggcag

SEQ ID NO: 12109 - DNA, 33 bp, Homo sapien
cacaaagggtatcacccgacagaacatgattaa

SEQ ID NO: 12110 - DNA, 33 bp, Homo sapien
cacaaagggtatcacctgacagaacatgattaa

SEQ ID NO: 12111 - DNA, 33 bp, Homo sapien
cgggagattacagatcacattcaaaccaatcca

SEQ ID NO: 12112 - DNA, 33 bp, Homo sapien
cgggagattacagatcgcattcaaaccaatcca

SEQ ID NO: 12113 - DNA, 33 bp, Homo sapien
tgaggaggatctaaacaggcctcaaaaaagaaa

SEQ ID NO: 12114 - DNA, 33 bp, Homo sapien
tgaggaggatctaaacgggcctcaaaaaagaaa

SEQ ID NO: 12115 - DNA, 33 bp, Homo sapien
aattttcatggggcataaccatctcaaggagaa

SEQ ID NO: 12116 - DNA, 33 bp, Homo sapien
aattttcatggggcatgaccatctcaaggagaa

SEQ ID NO: 12117 - DNA, 33 bp, Homo sapien
ggaaggctgagaataaacagtagcatgtgggta

SEQ ID NO: 12118 - DNA, 33 bp, Homo sapien
ggaaggctgagaataagcagtagcatgtgggta

SEQ ID NO: 12119 - DNA, 33 bp, Homo sapien
tgtcacagggcaatgccacaaaagggaaaccca

SEQ ID NO: 12120 - DNA, 33 bp, Homo sapien
tgtcacagggcaatgctacaaaagggaaaccca

SEQ ID NO: 12121 - DNA, 33 bp, Homo sapien
ttacagactgttcctcactatattcatctattg

SEQ ID NO: 12122 - DNA, 33 bp, Homo sapien
ttacagactgttcctcgctatattcatctattg

SEQ ID NO: 12123 - DNA, 33 bp, Homo sapien
caagctcacacagctaataattgatgagaggga

SEQ ID NO: 12124 - DNA, 33 bp, Homo sapien
caagctcacacagctagtaattgatgagaggga

SEQ ID NO: 12125 - DNA, 33 bp, Homo sapien
taattttctccgagccacgttgaaaaggttaac

SEQ ID NO: 12126 - DNA, 33 bp, Homo sapien
taattttctccgagccgcgttgaaaaggttaac

SEQ ID NO: 12127 - DNA, 33 bp, Homo sapien
agcctttaggtacccacccaatgacctacacaa

SEQ ID NO: 12128 - DNA, 33 bp, Homo sapien
agcctttaggtacccatccaatgacctacacaa

SEQ ID NO: 12129 - DNA, 33 bp, Homo sapien
agaagaaaggcttctcacattcagaggtccgat

SEQ ID NO: 12130 - DNA, 33 bp, Homo sapien
agaagaaaggcttctcgcattcagaggtccgat

SEQ ID NO: 12131 - DNA, 33 bp, Homo sapien
tgatgccaaagctacaagaaccgtgggatcacc

SEQ ID NO: 12132 - DNA, 33 bp, Homo sapien
tgatgccaaagctacaggaaccgtgggatcacc

SEQ ID NO: 12133 - DNA, 33 bp, Homo sapien
tcaaaaaggattcagaaccttccaggagtccag

SEQ ID NO: 12134 - DNA, 33 bp, Homo sapien
tcaaaaaggattcagacccttccaggagtccag

SEQ ID NO: 12135 - DNA, 33 bp, Homo sapien
cagattcatcatctcacaaccatgtactgagcg

SEQ ID NO: 12136 - DNA, 33 bp, Homo sapien
cagattcatcatctcataaccatgtactgagcg

SEQ ID NO: 12137 - DNA, 33 bp, Homo sapien
ctggtcccagggaatacaggtcaaggcttgctg

SEQ ID NO: 12138 - DNA, 33 bp, Homo sapien
ctggtcccagggaatagaggtcaaggcttgctg

SEQ ID NO: 12139 - DNA, 33 bp, Homo sapien
ttgagtttcagctctgccaccaactttacaacc

SEQ ID NO: 12140 - DNA, 33 bp, Homo sapien
ttgagtttcagctctgtcaccaactttacaacc

SEQ ID NO: 12141 - DNA, 33 bp, Homo sapien
ttggacaatagagtgacgtggattgaccaagtg

SEQ ID NO: 12142 - DNA, 33 bp, Homo sapien
ttggacaatagagtgatgtggattgaccaagtg

SEQ ID NO: 12143 - DNA, 33 bp, Homo sapien
tgtataaaaacaaatgacagctcttcaaagcca

SEQ ID NO: 12144 - DNA, 33 bp, Homo sapien
tgtataaaaacaaatgtcagctcttcaaagcca

SEQ ID NO: 12145 - DNA, 33 bp, Homo sapien
caccactctgctcctacccagtttccaatgcat

SEQ ID NO: 12146 - DNA, 33 bp, Homo sapien
caccactctgctcctatccagtttccaatgcat

SEQ ID NO: 12147 - DNA, 33 bp, Homo sapien
aaaatacatctacctccgaagtagaccactccc

SEQ ID NO: 12148 - DNA, 33 bp, Homo sapien
aaaatacatctacctctgaagtagaccactccc

SEQ ID NO: 12149 - DNA, 33 bp, Homo sapien
ctggctttctccttcacctagagcttggctcta

SEQ ID NO: 12150 - DNA, 33 bp, Homo sapien
ctggctttctccttcatctagagcttggctcta

SEQ ID NO: 12151 - DNA, 33 bp, Homo sapien
atccaagtttctacaaatcaaggtgtctcccaa

SEQ ID NO: 12152 - DNA, 33 bp, Homo sapien
atccaagtttctacaattcaaggtgtctcccaa

SEQ ID NO: 12153 - DNA, 33 bp, Homo sapien
cctgactaaactgacccatggaagctgagggag

SEQ ID NO: 12154 - DNA, 33 bp, Homo sapien
cctgactaaactgacctatggaagctgagggag

SEQ ID NO: 12155 - DNA, 33 bp, Homo sapien
gagacaggaaggtgacagagtggtatcagaccc

SEQ ID NO: 12156 - DNA, 33 bp, Homo sapien
gagacaggaaggtgacggagtggtatcagaccc

SEQ ID NO: 12157 - DNA, 33 bp, Homo sapien
ctcccaaccttgaacaatataaggactcaggtt

SEQ ID NO: 12158 - DNA, 33 bp, Homo sapien
ctcccaaccttgaacagtataaggactcaggtt

SEQ ID NO: 12159 - DNA, 33 bp, Homo sapien
ttctattctttgcaaccgaacactgttgattaa

SEQ ID NO: 12160 - DNA, 33 bp, Homo sapien
ttctattctttgcaactgaacactgttgattaa

SEQ ID NO: 12161 - DNA, 33 bp, Homo sapien
taagggtacaagtcaacagattttcacaaagtg

SEQ ID NO: 12162 - DNA, 33 bp, Homo sapien
taagggtacaagtcaatagattttcacaaagtg

SEQ ID NO: 12163 - DNA, 33 bp, Homo sapien
aagtatgctatacaaccaaacattaaataaata

SEQ ID NO: 12164 - DNA, 33 bp, Homo sapien
aagtatgctatacaacgaaacattaaataaata

SEQ ID NO: 12165 - DNA, 33 bp, Homo sapien
aggtccctggacttgaagcatcttttcctgccc

SEQ ID NO: 12166 - DNA, 33 bp, Homo sapien
aggtccctggacttgaggcatcttttcctgccc

SEQ ID NO: 12167 - DNA, 33 bp, Homo sapien
ctccttgagggtggggaaaatatctgatctatt

SEQ ID NO: 12168 - DNA, 33 bp, Homo sapien
ctccttgagggtggggcaaatatctgatctatt

SEQ ID NO: 12169 - DNA, 33 bp, Homo sapien
cactggccttctggaaacagttcccacgtcttt

SEQ ID NO: 12170 - DNA, 33 bp, Homo sapien
cactggccttctggaagcagttcccacgtcttt

SEQ ID NO: 12171 - DNA, 33 bp, Homo sapien
ccctctctgtgaaaggcatctcccccaaatcat

SEQ ID NO: 12172 - DNA, 33 bp, Homo sapien
ccctctctgtgaaaggtatctcccccaaatcat

SEQ ID NO: 12173 - DNA, 33 bp, Homo sapien
gctccaagtttcttcaaggaaaggactgggtta

SEQ ID NO: 12174 - DNA, 33 bp, Homo sapien
gctccaagtttcttcatggaaaggactgggtta

SEQ ID NO: 12175 - DNA, 33 bp, Homo sapien
gtactacaattcctcacgttacagatgaggaag

SEQ ID NO: 12176 - DNA, 33 bp, Homo sapien
gtactacaattcctcatgttacagatgaggaag

SEQ ID NO: 12177 - DNA, 33 bp, Homo sapien
acaaagtcttctcaaactgtgtcagtcattcag

SEQ ID NO: 12178 - DNA, 33 bp, Homo sapien
acaaagtcttctcaaagtgtgtcagtcattcag

SEQ ID NO: 12179 - DNA, 33 bp, Homo sapien
cactggcaacatcaaaagtgaccatgccacctc

SEQ ID NO: 12180 - DNA, 33 bp, Homo sapien
cactggcaacatcaaaggtgaccatgccacctc

SEQ ID NO: 12181 - DNA, 33 bp, Homo sapien
tgttgtcattgtcatcactatgtttgttgtcta

SEQ ID NO: 12182 - DNA, 33 bp, Homo sapien
tgttgtcattgtcatcgctatgtttgttgtcta

SEQ ID NO: 12183 - DNA, 33 bp, Homo sapien
tgagcattacatgaaacgcgcgtgaactgctta

SEQ ID NO: 12184 - DNA, 33 bp, Homo sapien
tgagcattacatgaaatgcgcgtgaactgctta

SEQ ID NO: 12185 - DNA, 33 bp, Homo sapien
agtagatgcttttgaccgccactcaaggtcaaa

SEQ ID NO: 12186 - DNA, 33 bp, Homo sapien
agtagatgcttttgactgccactcaaggtcaaa

SEQ ID NO: 12187 - DNA, 33 bp, Homo sapien
caatttgagagcaaaggcattttggctagagtg

SEQ ID NO: 12188 - DNA, 33 bp, Homo sapien
caatttgagagcaaagtcattttggctagagtg

SEQ ID NO: 12189 - DNA, 33 bp, Homo sapien
gggctcttaggcactgcagtaatagccaatcgc

SEQ ID NO: 12190 - DNA, 33 bp, Homo sapien
gggctcttaggcactgtagtaatagccaatcgc

SEQ ID NO: 12191 - DNA, 33 bp, Homo sapien
tcatggctggaagcaacgttagtatcatcatca

SEQ ID NO: 12192 - DNA, 33 bp, Homo sapien
tcatggctggaagcaatgttagtatcatcatca

SEQ ID NO: 12193 - DNA, 33 bp, Homo sapien
tcttctgacttcctgacagtaggatcttttggt

SEQ ID NO: 12194 - DNA, 33 bp, Homo sapien
tcttctgacttcctgatagtaggatcttttggt

SEQ ID NO: 12195 - DNA, 33 bp, Homo sapien
tttgcttctagcttggcatggccacgaagagag

SEQ ID NO: 12196 - DNA, 33 bp, Homo sapien
tttgcttctagcttggtatggccacgaagagag

SEQ ID NO: 12197 - DNA, 33 bp, Homo sapien
tagagcctggcaactcaaggtttttgtcacaca

SEQ ID NO: 12198 - DNA, 33 bp, Homo sapien
tagagcctggcaactcgaggtttttgtcacaca

SEQ ID NO: 12199 - DNA, 33 bp, Homo sapien
tggacatttgccacctaactagagagtggataa

SEQ ID NO: 12200 - DNA, 33 bp, Homo sapien
tggacatttgccaccttactagagagtggataa

SEQ ID NO: 12201 - DNA, 33 bp, Homo sapien
tggtagcaaaggagtaacaaaacctgatgtgga

SEQ ID NO: 12202 - DNA, 33 bp, Homo sapien
tggtagcaaaggagtagcaaaacctgatgtgga

SEQ ID NO: 12203 - DNA, 33 bp, Homo sapien
ggtggaagtgggcacagaattgagcagtcttat

SEQ ID NO: 12204 - DNA, 33 bp, Homo sapien
ggtggaagtgggcacataattgagcagtcttat

SEQ ID NO: 12205 - DNA, 33 bp, Homo sapien
ggtcacagggtgctccaaaagcactgtggctgg

SEQ ID NO: 12206 - DNA, 33 bp, Homo sapien
ggtcacagggtgctccgaaagcactgtggctgg

SEQ ID NO: 12207 - DNA, 33 bp, Homo sapien
caacattggaggtgggcattgctattcccttga

SEQ ID NO: 12208 - DNA, 33 bp, Homo sapien
caacattggaggtgggtattgctattcccttga

SEQ ID NO: 12209 - DNA, 33 bp, Homo sapien
gggcagagcccgctcccctagtggaaaaaagat

SEQ ID NO: 12210 - DNA, 33 bp, Homo sapien
gggcagagcccgctccgctagtggaaaaaagat

SEQ ID NO: 12211 - DNA, 33 bp, Homo sapien
tttgggctgatttcacgccaacacgtctttgca

SEQ ID NO: 12212 - DNA, 33 bp, Homo sapien
tttgggctgatttcactccaacacgtctttgca

SEQ ID NO: 12213 - DNA, 33 bp, Homo sapien
gggcaatgctggcttccgaaagggaatttatag

SEQ ID NO: 12214 - DNA, 33 bp, Homo sapien
gggcaatgctggcttctgaaagggaatttatag

SEQ ID NO: 12215 - DNA, 33 bp, Homo sapien
caggactcagcccttgcactctgcaaaagctaa

SEQ ID NO: 12216 - DNA, 33 bp, Homo sapien
caggactcagcccttggactctgcaaaagctaa

SEQ ID NO: 12217 - DNA, 33 bp, Homo sapien
agcttctgtttcccaaagaagtgccatcaaagc

SEQ ID NO: 12218 - DNA, 33 bp, Homo sapien
agcttctgtttcccaaggaagtgccatcaaagc

SEQ ID NO: 12219 - DNA, 33 bp, Homo sapien
agatggccttggacaactcataagcctcagttt

SEQ ID NO: 12220 - DNA, 33 bp, Homo sapien
agatggccttggacaattcataagcctcagttt

SEQ ID NO: 12221 - DNA, 33 bp, Homo sapien
tcttctctccttagaacgagaaggtgctgggcg

SEQ ID NO: 12222 - DNA, 33 bp, Homo sapien
tcttctctccttagaatgagaaggtgctgggcg

SEQ ID NO: 12223 - DNA, 33 bp, Homo sapien
tcgtagttgctctaataatacgtgttgagtgga

SEQ ID NO: 12224 - DNA, 33 bp, Homo sapien
tcgtagttgctctaatgatacgtgttgagtgga

SEQ ID NO: 12225 - DNA, 33 bp, Homo sapien
acagccaagcggccacggagtcccatccacagt

SEQ ID NO: 12226 - DNA, 33 bp, Homo sapien
acagccaagcggccactgagtcccatccacagt

SEQ ID NO: 12227 - DNA, 33 bp, Homo sapien
tttcttagctttagacactgagccagctccagc

SEQ ID NO: 12228 - DNA, 33 bp, Homo sapien
tttcttagctttagaccctgagccagctccagc

SEQ ID NO: 12229 - DNA, 33 bp, Homo sapien
aaataaccgcttctagaatgggcttcttggcta

SEQ ID NO: 12230 - DNA, 33 bp, Homo sapien
aaataaccgcttctaggatgggcttcttggcta

SEQ ID NO: 12231 - DNA, 33 bp, Homo sapien
gaccccaacctgtaacagcatttgatagccaag

SEQ ID NO: 12232 - DNA, 33 bp, Homo sapien
gaccccaacctgtaacggcatttgatagccaag

SEQ ID NO: 12233 - DNA, 33 bp, Homo sapien
ctgccttaaccagaaacgcagtggagaactcca

SEQ ID NO: 12234 - DNA, 33 bp, Homo sapien
ctgccttaaccagaaatgcagtggagaactcca

SEQ ID NO: 12235 - DNA, 33 bp, Homo sapien
catgccaggtgttgggacagcagccaagtttag

SEQ ID NO: 12236 - DNA, 33 bp, Homo sapien
catgccaggtgttggggcagcagccaagtttag

SEQ ID NO: 12237 - DNA, 33 bp, Homo sapien
tagagagaaaagaatccatttcccgtggcctgc

SEQ ID NO: 12238 - DNA, 33 bp, Homo sapien
tagagagaaaagaatctatttcccgtggcctgc

SEQ ID NO: 12239 - DNA, 33 bp, Homo sapien
agcatttactgagcaccgggaacttggcgaagc

SEQ ID NO: 12240 - DNA, 33 bp, Homo sapien
agcatttactgagcactgggaacttggcgaagc

SEQ ID NO: 12241 - DNA, 33 bp, Homo sapien
tgggaataatttaaggcacggatgtgagtagaa

SEQ ID NO: 12242 - DNA, 33 bp, Homo sapien
tgggaataatttaaggtacggatgtgagtagaa

SEQ ID NO: 12243 - DNA, 33 bp, Homo sapien
accttgaactatagggacaacaataaacacgat

SEQ ID NO: 12244 - DNA, 33 bp, Homo sapien
accttgaactataggggcaacaataaacacgat

SEQ ID NO: 12245 - DNA, 33 bp, Homo sapien
gttggagaagagtccacgtggggcctgggaaaa

SEQ ID NO: 12246 - DNA, 33 bp, Homo sapien
gttggagaagagtccatgtggggcctgggaaaa

SEQ ID NO: 12247 - DNA, 33 bp, Homo sapien
agtgcatggaccagccaatgtcctccttcctcc

SEQ ID NO: 12248 - DNA, 33 bp, Homo sapien
agtgcatggaccagccgatgtcctccttcctcc

SEQ ID NO: 12249 - DNA, 33 bp, Homo sapien
ttctctctattccccaactgaatagcaccgcct

SEQ ID NO: 12250 - DNA, 33 bp, Homo sapien
ttctctctattccccagctgaatagcaccgcct

SEQ ID NO: 12251 - DNA, 33 bp, Homo sapien
ttgagtactctttccacctgatcccacctgcaa

SEQ ID NO: 12252 - DNA, 33 bp, Homo sapien
ttgagtactctttccatctgatcccacctgcaa

SEQ ID NO: 12253 - DNA, 33 bp, Homo sapien
tcttttctgcctaggactcaaaaagtatggccc

SEQ ID NO: 12254 - DNA, 33 bp, Homo sapien
tcttttctgcctaggattcaaaaagtatggccc

SEQ ID NO: 12255 - DNA, 33 bp, Homo sapien
tgtgtttctcagtcacaagtaatcgcttagtgg

SEQ ID NO: 12256 - DNA, 33 bp, Homo sapien
tgtgtttctcagtcacgagtaatcgcttagtgg

SEQ ID NO: 12257 - DNA, 33 bp, Homo sapien
agcgacaagtgtttcacatcctcctctcagggg

SEQ ID NO: 12258 - DNA, 33 bp, Homo sapien
agcgacaagtgtttcatatcctcctctcagggg

SEQ ID NO: 12259 - DNA, 33 bp, Homo sapien
ttgtgtggaatctgagccagccagaggaggcca

SEQ ID NO: 12260 - DNA, 33 bp, Homo sapien
ttgtgtggaatctgagtcagccagaggaggcca

SEQ ID NO: 12261 - DNA, 33 bp, Homo sapien
tgtccagccccagataactatggtgccccattg

SEQ ID NO: 12262 - DNA, 33 bp, Homo sapien
tgtccagccccagatagctatggtgccccattg

SEQ ID NO: 12263 - DNA, 33 bp, Homo sapien
ctgcataccatgaagaactaacttgcctcttgg

SEQ ID NO: 12264 - DNA, 33 bp, Homo sapien
ctgcataccatgaagagctaacttgcctcttgg

SEQ ID NO: 12265 - DNA, 33 bp, Homo sapien
cctggggccacccctacagcctgaggaagctgc

SEQ ID NO: 12266 - DNA, 33 bp, Homo sapien
cctggggccacccctatagcctgaggaagctgc

SEQ ID NO: 12267 - DNA, 33 bp, Homo sapien
agaccacctctgaacaatgacaatgactgcctg

SEQ ID NO: 12268 - DNA, 33 bp, Homo sapien
agaccacctctgaacagtgacaatgactgcctg

SEQ ID NO: 12269 - DNA, 33 bp, Homo sapien
cacccacatttgggaaagggacgtgggagaagt

SEQ ID NO: 12270 - DNA, 33 bp, Homo sapien
cacccacatttgggaaggggacgtgggagaagt

SEQ ID NO: 12271 - DNA, 33 bp, Homo sapien
tccaaagcaaacacagacaaagcccactgtgga

SEQ ID NO: 12272 - DNA, 33 bp, Homo sapien
tccaaagcaaacacagccaaagcccactgtgga

SEQ ID NO: 12273 - DNA, 33 bp, Homo sapien
tgcaggagagcacataaaacgggggcatggcat

SEQ ID NO: 12274 - DNA, 33 bp, Homo sapien
tgcaggagagcacatacaacgggggcatggcat

SEQ ID NO: 12275 - DNA, 33 bp, Homo sapien
gtgaacctcacagatacagtattgagtgaaaga

SEQ ID NO: 12276 - DNA, 33 bp, Homo sapien
gtgaacctcacagatatagtattgagtgaaaga

SEQ ID NO: 12277 - DNA, 33 bp, Homo sapien
gtgcagcagctttggaaaactgtttagctgaac

SEQ ID NO: 12278 - DNA, 33 bp, Homo sapien
gtgcagcagctttggataactgtttagctgaac

SEQ ID NO: 12279 - DNA, 33 bp, Homo sapien
aaaacattgttgaaggaaattaaataagacatc

SEQ ID NO: 12280 - DNA, 33 bp, Homo sapien
aaaacattgttgaaggtaattaaataagacatc

SEQ ID NO: 12281 - DNA, 33 bp, Homo sapien
tctccatttattcaagacttcttttatgtcctc

SEQ ID NO: 12282 - DNA, 33 bp, Homo sapien
tctccatttattcaagtcttcttttatgtcctc

SEQ ID NO: 12283 - DNA, 33 bp, Homo sapien
caccacttcccagctacgtcaccttgggcaagt

SEQ ID NO: 12284 - DNA, 33 bp, Homo sapien
caccacttcccagctatgtcaccttgggcaagt

SEQ ID NO: 12285 - DNA, 33 bp, Homo sapien
gctgtgttaaaacaaccggtcactgatgcctca

SEQ ID NO: 12286 - DNA, 33 bp, Homo sapien
gctgtgttaaaacaactggtcactgatgcctca

SEQ ID NO: 12287 - DNA, 33 bp, Homo sapien
aaaagctatgaagagacctatgaagggtgagat

SEQ ID NO: 12288 - DNA, 33 bp, Homo sapien
aaaagctatgaagagatctatgaagggtgagat

SEQ ID NO: 12289 - DNA, 33 bp, Homo sapien
aatcatgtgatatgtaccaggcatctactatgt

SEQ ID NO: 12290 - DNA, 33 bp, Homo sapien
aatcatgtgatatgtatcaggcatctactatgt

SEQ ID NO: 12291 - DNA, 33 bp, Homo sapien
gtcttctgaggttaaaataaagcccacgtttca

SEQ ID NO: 12292 - DNA, 33 bp, Homo sapien
gtcttctgaggttaaattaaagcccacgtttca

SEQ ID NO: 12293 - DNA, 33 bp, Homo sapien
cacgtttcatttttgacgcaacctaattcttct

SEQ ID NO: 12294 - DNA, 33 bp, Homo sapien
cacgtttcatttttgatgcaacctaattcttct

SEQ ID NO: 12295 - DNA, 33 bp, Homo sapien
tatgggggaaatattacggaatgggctccttat

SEQ ID NO: 12296 - DNA, 33 bp, Homo sapien
tatgggggaaatattatggaatgggctccttat

SEQ ID NO: 12297 - DNA, 33 bp, Homo sapien
aggtgtaggaaacaccaagcacttccaaggtca

SEQ ID NO: 12298 - DNA, 33 bp, Homo sapien
aggtgtaggaaacaccgagcacttccaaggtca

SEQ ID NO: 12299 - DNA, 33 bp, Homo sapien
catcttggctgcggacccttcattggaaatgga

SEQ ID NO: 12300 - DNA, 33 bp, Homo sapien
catcttggctgcggacgcttcattggaaatgga

SEQ ID NO: 12301 - DNA, 33 bp, Homo sapien
agtggcagtttggaaaataatagcaatcttatt

SEQ ID NO: 12302 - DNA, 33 bp, Homo sapien
agtggcagtttggaaagtaatagcaatcttatt

SEQ ID NO: 12303 - DNA, 33 bp, Homo sapien
acagcaagcaaatagacgcagtacctagcctca

SEQ ID NO: 12304 - DNA, 33 bp, Homo sapien
acagcaagcaaatagatgcagtacctagcctca

SEQ ID NO: 12305 - DNA, 33 bp, Homo sapien
ggtttagcataaggaagatgagattcagaaaag

SEQ ID NO: 12306 - DNA, 33 bp, Homo sapien
ggtttagcataaggaatatgagattcagaaaag

SEQ ID NO: 12307 - DNA, 33 bp, Homo sapien
gcatttgatgataaccaaagaaaattctcaggt

SEQ ID NO: 12308 - DNA, 33 bp, Homo sapien
gcatttgatgataaccgaagaaaattctcaggt

SEQ ID NO: 12309 - DNA, 33 bp, Homo sapien
agaattgggagctggaaacaacaacaggtgcgg

SEQ ID NO: 12310 - DNA, 33 bp, Homo sapien
agaattgggagctggatacaacaacaggtgcgg

SEQ ID NO: 12311 - DNA, 33 bp, Homo sapien
caactggcttaattcacggatgtagtggtccct

SEQ ID NO: 12312 - DNA, 33 bp, Homo sapien
caactggcttaattcatggatgtagtggtccct

SEQ ID NO: 12313 - DNA, 33 bp, Homo sapien
tatccagagaggtccaatgctcttttgggcaac

SEQ ID NO: 12314 - DNA, 33 bp, Homo sapien
tatccagagaggtccagtgctcttttgggcaac

SEQ ID NO: 12315 - DNA, 33 bp, Homo sapien
gctctcctggaattcacgggaggtttggagaga

SEQ ID NO: 12316 - DNA, 33 bp, Homo sapien
gctctcctggaattcatgggaggtttggagaga

SEQ ID NO: 12317 - DNA, 33 bp, Homo sapien
aagatgaagttgagaaaggaaccaggtctgtgt

SEQ ID NO: 12318 - DNA, 33 bp, Homo sapien
aagatgaagttgagaagggaaccaggtctgtgt

SEQ ID NO: 12319 - DNA, 33 bp, Homo sapien
gcacagagtggtcaagaaaccttcccaaaatct

SEQ ID NO: 12320 - DNA, 33 bp, Homo sapien
gcacagagtggtcaagcaaccttcccaaaatct

SEQ ID NO: 12321 - DNA, 33 bp, Homo sapien
tatgtgtgtaccctgaagctagatctggcacac

SEQ ID NO: 12322 - DNA, 33 bp, Homo sapien
tatgtgtgtaccctgaggctagatctggcacac

SEQ ID NO: 12323 - DNA, 33 bp, Homo sapien
ccgagacctgcaggataaaggagttagtgtgcc

SEQ ID NO: 12324 - DNA, 33 bp, Homo sapien
ccgagacctgcaggatgaaggagttagtgtgcc

SEQ ID NO: 12325 - DNA, 33 bp, Homo sapien
taggaagatgaaatgactcagggcagcatctca

SEQ ID NO: 12326 - DNA, 33 bp, Homo sapien
taggaagatgaaatgagtcagggcagcatctca

SEQ ID NO: 12327 - DNA, 33 bp, Homo sapien
acgtgatatgaccagcacagccatcactaatag

SEQ ID NO: 12328 - DNA, 33 bp, Homo sapien
acgtgatatgaccagcgcagccatcactaatag

SEQ ID NO: 12329 - DNA, 33 bp, Homo sapien
gaggttccacagagaacgtttaacctccctggg

SEQ ID NO: 12330 - DNA, 33 bp, Homo sapien
gaggttccacagagaatgtttaacctccctggg

SEQ ID NO: 12331 - DNA, 33 bp, Homo sapien
agaagtgccgtctcagcaccatgcttccctggc

SEQ ID NO: 12332 - DNA, 33 bp, Homo sapien
agaagtgccgtctcagtaccatgcttccctggc

SEQ ID NO: 12333 - DNA, 33 bp, Homo sapien
agatcctgatggaatgcaccaggccttccgtac

SEQ ID NO: 12334 - DNA, 33 bp, Homo sapien
agatcctgatggaatggaccaggccttccgtac

SEQ ID NO: 12335 - DNA, 33 bp, Homo sapien
agttctgagcttgtaccaggtgcccactggcct

SEQ ID NO: 12336 - DNA, 33 bp, Homo sapien
agttctgagcttgtactaggtgcccactggcct

SEQ ID NO: 12337 - DNA, 33 bp, Homo sapien
gaaggcaagactcaaaatatggttggactcaag

SEQ ID NO: 12338 - DNA, 33 bp, Homo sapien
gaaggcaagactcaaactatggttggactcaag

SEQ ID NO: 12339 - DNA, 33 bp, Homo sapien
agaccagctaacccccacagaccacagatacag

SEQ ID NO: 12340 - DNA, 33 bp, Homo sapien
agaccagctaacccccgcagaccacagatacag

SEQ ID NO: 12341 - DNA, 33 bp, Homo sapien
aagcaaaccatgaacccccaacttgttctctac

SEQ ID NO: 12342 - DNA, 33 bp, Homo sapien
aagcaaaccatgaacctccaacttgttctctac

SEQ ID NO: 12343 - DNA, 33 bp, Homo sapien
gaccttgcacaggaaacgtcttgatatttgctg

SEQ ID NO: 12344 - DNA, 33 bp, Homo sapien
gaccttgcacaggaaatgtcttgatatttgctg

SEQ ID NO: 12345 - DNA, 33 bp, Homo sapien
aacccttagagatttacagatggccactcccac

SEQ ID NO: 12346 - DNA, 33 bp, Homo sapien
aacccttagagatttagagatggccactcccac

SEQ ID NO: 12347 - DNA, 33 bp, Homo sapien
gtccacctaactgccccggcatgcagctcaaca

SEQ ID NO: 12348 - DNA, 33 bp, Homo sapien
gtccacctaactgccctggcatgcagctcaaca

SEQ ID NO: 12349 - DNA, 33 bp, Homo sapien
cagttaggtggacttacattcaaatgaccatat

SEQ ID NO: 12350 - DNA, 33 bp, Homo sapien
cagttaggtggacttatattcaaatgaccatat

SEQ ID NO: 12351 - DNA, 33 bp, Homo sapien
taaacacattaaaaagaaaatgagcaatgtcag

SEQ ID NO: 12352 - DNA, 33 bp, Homo sapien
taaacacattaaaaaggaaatgagcaatgtcag

SEQ ID NO: 12353 - DNA, 33 bp, Homo sapien
ccatactataggctaagaaccacttaacctctc

SEQ ID NO: 12354 - DNA, 33 bp, Homo sapien
ccatactataggctaataaccacttaacctctc

SEQ ID NO: 12355 - DNA, 33 bp, Homo sapien
aaaaagaaacgctcaactgtggacagcatgtaa

SEQ ID NO: 12356 - DNA, 33 bp, Homo sapien
aaaaagaaacgctcaagtgtggacagcatgtaa

SEQ ID NO: 12357 - DNA, 33 bp, Homo sapien
aggtgacgcaaccttcactgggcttattgcttg

SEQ ID NO: 12358 - DNA, 33 bp, Homo sapien
aggtgacgcaaccttcgctgggcttattgcttg

SEQ ID NO: 12359 - DNA, 33 bp, Homo sapien
tgtcagtaaaataacacatctccggtggcttgt

SEQ ID NO: 12360 - DNA, 33 bp, Homo sapien
tgtcagtaaaataacatatctccggtggcttgt

SEQ ID NO: 12361 - DNA, 33 bp, Homo sapien
atagggtttgaggggacggatgagaacttgaga

SEQ ID NO: 12362 - DNA, 33 bp, Homo sapien
atagggtttgaggggatggatgagaacttgaga

SEQ ID NO: 12363 - DNA, 33 bp, Homo sapien
ccactcaggccagtcactcaccgtgggtcgttg

SEQ ID NO: 12364 - DNA, 33 bp, Homo sapien
ccactcaggccagtcattcaccgtgggtcgttg

SEQ ID NO: 12365 - DNA, 33 bp, Homo sapien
cgaaccctgactgagacagggagttaggacttg

SEQ ID NO: 12366 - DNA, 33 bp, Homo sapien
cgaaccctgactgagatagggagttaggacttg

SEQ ID NO: 12367 - DNA, 33 bp, Homo sapien
ttcgtaaaggctagaactcatatctttccatat

SEQ ID NO: 12368 - DNA, 33 bp, Homo sapien
ttcgtaaaggctagaattcatatctttccatat

SEQ ID NO: 12369 - DNA, 33 bp, Homo sapien
ggacagtgcttctgcaactacatcattgtatgg

SEQ ID NO: 12370 - DNA, 33 bp, Homo sapien
ggacagtgcttctgcacctacatcattgtatgg

SEQ ID NO: 12371 - DNA, 33 bp, Homo sapien
tcattgtatgggatgacaccctactgtggtcct

SEQ ID NO: 12372 - DNA, 33 bp, Homo sapien
tcattgtatgggatgataccctactgtggtcct

SEQ ID NO: 12373 - DNA, 33 bp, Homo sapien
tgtggtccttctaaggcagggctgcccagtaaa

SEQ ID NO: 12374 - DNA, 33 bp, Homo sapien
tgtggtccttctaaggtagggctgcccagtaaa

SEQ ID NO: 12375 - DNA, 33 bp, Homo sapien
agaatgaagggataaacggatacatacatcatt

SEQ ID NO: 12376 - DNA, 33 bp, Homo sapien
agaatgaagggataaatggatacatacatcatt

SEQ ID NO: 12377 - DNA, 33 bp, Homo sapien
gaagccaaaggtggaaataggaaatgaacttgg

SEQ ID NO: 12378 - DNA, 33 bp, Homo sapien
gaagccaaaggtggaagtaggaaatgaacttgg

SEQ ID NO: 12379 - DNA, 33 bp, Homo sapien
gcatctgctaggcaccaattcttggcatttgtg

SEQ ID NO: 12380 - DNA, 33 bp, Homo sapien
gcatctgctaggcaccgattcttggcatttgtg

SEQ ID NO: 12381 - DNA, 33 bp, Homo sapien
aagcatcaggtgtgccaggatggttttgtcaat

SEQ ID NO: 12382 - DNA, 33 bp, Homo sapien
aagcatcaggtgtgcccggatggttttgtcaat

SEQ ID NO: 12383 - DNA, 33 bp, Homo sapien
cgcagcagcttcattacgtggagagtgagggta

SEQ ID NO: 12384 - DNA, 33 bp, Homo sapien
cgcagcagcttcattatgtggagagtgagggta

SEQ ID NO: 12385 - DNA, 33 bp, Homo sapien
gtgtacaaattgaaaaagactggaaatgggcac

SEQ ID NO: 12386 - DNA, 33 bp, Homo sapien
gtgtacaaattgaaaaggactggaaatgggcac

SEQ ID NO: 12387 - DNA, 33 bp, Homo sapien
aatgccttgattgtacaatggagatccaatatc

SEQ ID NO: 12388 - DNA, 33 bp, Homo sapien
aatgccttgattgtactatggagatccaatatc

SEQ ID NO: 12389 - DNA, 33 bp, Homo sapien
caaaaaacacgacactcaagtttgagagggaat

SEQ ID NO: 12390 - DNA, 33 bp, Homo sapien
caaaaaacacgacactgaagtttgagagggaat

SEQ ID NO: 12391 - DNA, 33 bp, Homo sapien
gaggaatccttcattacccaggagggacaggtt

SEQ ID NO: 12392 - DNA, 33 bp, Homo sapien
gaggaatccttcattatccaggagggacaggtt

SEQ ID NO: 12393 - DNA, 33 bp, Homo sapien
aaccaaacgacctggactccaatcgtatctcca

SEQ ID NO: 12394 - DNA, 33 bp, Homo sapien
aaccaaacgacctggattccaatcgtatctcca

SEQ ID NO: 12395 - DNA, 33 bp, Homo sapien
ctctgagattgtatcaatagaggtctggtatct

SEQ ID NO: 12396 - DNA, 33 bp, Homo sapien
ctctgagattgtatcagtagaggtctggtatct

SEQ ID NO: 12397 - DNA, 33 bp, Homo sapien
tagcatgcacctgttcccattatccaggagcca

SEQ ID NO: 12398 - DNA, 33 bp, Homo sapien
tagcatgcacctgttctcattatccaggagcca

SEQ ID NO: 12399 - DNA, 33 bp, Homo sapien
gcttctgctggcctgacaagagctcccgtttta

SEQ ID NO: 12400 - DNA, 33 bp, Homo sapien
gcttctgctggcctgagaagagctcccgtttta

SEQ ID NO: 12401 - DNA, 33 bp, Homo sapien
gtagaggggctgacaacgataaaacgggagctc

SEQ ID NO: 12402 - DNA, 33 bp, Homo sapien
gtagaggggctgacaatgataaaacgggagctc

SEQ ID NO: 12403 - DNA, 33 bp, Homo sapien
gctgcggctctgcctaagaaacagccactgaga

SEQ ID NO: 12404 - DNA, 33 bp, Homo sapien
gctgcggctctgcctaggaaacagccactgaga

SEQ ID NO: 12405 - DNA, 33 bp, Homo sapien
ctcctgatctagcagacagtaggtgccaacaga

SEQ ID NO: 12406 - DNA, 33 bp, Homo sapien
ctcctgatctagcagagagtaggtgccaacaga

SEQ ID NO: 12407 - DNA, 33 bp, Homo sapien
ctcatttagaagacagaatgccaggattttcct

SEQ ID NO: 12408 - DNA, 33 bp, Homo sapien
ctcatttagaagacaggatgccaggattttcct

SEQ ID NO: 12409 - DNA, 33 bp, Homo sapien
ctgtatcacaatgccacaatggaatgaagacca

SEQ ID NO: 12410 - DNA, 33 bp, Homo sapien
ctgtatcacaatgccagaatggaatgaagacca

SEQ ID NO: 12411 - DNA, 33 bp, Homo sapien
ataatgaattagggaaagcccatgaggccaccc

SEQ ID NO: 12412 - DNA, 33 bp, Homo sapien
ataatgaattagggaatgcccatgaggccaccc

SEQ ID NO: 12413 - DNA, 33 bp, Homo sapien
tgagactcaatctatacagcaggtgcaggtatg

SEQ ID NO: 12414 - DNA, 33 bp, Homo sapien
tgagactcaatctatagagcaggtgcaggtatg

SEQ ID NO: 12415 - DNA, 33 bp, Homo sapien
tgtgtatgtgtgtgtaacctggtgaatagatgt

SEQ ID NO: 12416 - DNA, 33 bp, Homo sapien
tgtgtatgtgtgtgtatcctggtgaatagatgt

SEQ ID NO: 12417 - DNA, 33 bp, Homo sapien
tgcctattgatgggagaagcagctaaaaagtag

SEQ ID NO: 12418 - DNA, 33 bp, Homo sapien
tgcctattgatgggaggagcagctaaaaagtag

SEQ ID NO: 12419 - DNA, 33 bp, Homo sapien
tgctttgcacattgtaaaggttagtaaatatgt

SEQ ID NO: 12420 - DNA, 33 bp, Homo sapien
tgctttgcacattgtacaggttagtaaatatgt

SEQ ID NO: 12421 - DNA, 33 bp, Homo sapien
cctcctagtctgcaagacccataggacaggggt

SEQ ID NO: 12422 - DNA, 33 bp, Homo sapien
cctcctagtctgcaagtcccataggacaggggt

SEQ ID NO: 12423 - DNA, 33 bp, Homo sapien
ggaaaagtaggacttacagggtggcagtgctcc

SEQ ID NO: 12424 - DNA, 33 bp, Homo sapien
ggaaaagtaggacttatagggtggcagtgctcc

SEQ ID NO: 12425 - DNA, 33 bp, Homo sapien
ttgtgcaagggctgacaactcaatggcagattt

SEQ ID NO: 12426 - DNA, 33 bp, Homo sapien
ttgtgcaagggctgacgactcaatggcagattt

SEQ ID NO: 12427 - DNA, 33 bp, Homo sapien
acaggagaacctgaaaaaacaccataatgggag

SEQ ID NO: 12428 - DNA, 33 bp, Homo sapien
acaggagaacctgaaagaacaccataatgggag

SEQ ID NO: 12429 - DNA, 33 bp, Homo sapien
gagacctgcagacggaacaatccttcattagtg

SEQ ID NO: 12430 - DNA, 33 bp, Homo sapien
gagacctgcagacggagcaatccttcattagtg

SEQ ID NO: 12431 - DNA, 33 bp, Homo sapien
tgggaggagaaggctccaggctttattctaatg

SEQ ID NO: 12432 - DNA, 33 bp, Homo sapien
tgggaggagaaggctctaggctttattctaatg

SEQ ID NO: 12433 - DNA, 33 bp, Homo sapien
cacagcaagggttctacgccgacagattaggca

SEQ ID NO: 12434 - DNA, 33 bp, Homo sapien
cacagcaagggttctatgccgacagattaggca

SEQ ID NO: 12435 - DNA, 33 bp, Homo sapien
agggacttaccattccagagaaaactgctacaa

SEQ ID NO: 12436 - DNA, 33 bp, Homo sapien
agggacttaccattccggagaaaactgctacaa

SEQ ID NO: 12437 - DNA, 33 bp, Homo sapien
ttccgtagagttcaagacaacactgctcctcct

SEQ ID NO: 12438 - DNA, 33 bp, Homo sapien
ttccgtagagttcaaggcaacactgctcctcct

SEQ ID NO: 12439 - DNA, 33 bp, Homo sapien
cgtttctactgaactaggtattgtatttgctct

SEQ ID NO: 12440 - DNA, 33 bp, Homo sapien
cgtttctactgaactatgtattgtatttgctct

SEQ ID NO: 12441 - DNA, 33 bp, Homo sapien
aatatctggtttagtccagtgcccctgcccctg

SEQ ID NO: 12442 - DNA, 33 bp, Homo sapien
aatatctggtttagtctagtgcccctgcccctg

SEQ ID NO: 12443 - DNA, 33 bp, Homo sapien
cactttttgactgtcacgaataatgctgccatg

SEQ ID NO: 12444 - DNA, 33 bp, Homo sapien
cactttttgactgtcatgaataatgctgccatg

SEQ ID NO: 12445 - DNA, 33 bp, Homo sapien
atgatgctggacactggatagccacttgccaaa

SEQ ID NO: 12446 - DNA, 33 bp, Homo sapien
atgatgctggacactgtatagccacttgccaaa

SEQ ID NO: 12447 - DNA, 33 bp, Homo sapien
tgcgagtgcctcgaaacggggcctaaagcagct

SEQ ID NO: 12448 - DNA, 33 bp, Homo sapien
tgcgagtgcctcgaaatggggcctaaagcagct

SEQ ID NO: 12449 - DNA, 33 bp, Homo sapien
agaagccttctgtgaccgtacaaacataaattg

SEQ ID NO: 12450 - DNA, 33 bp, Homo sapien
agaagccttctgtgactgtacaaacataaattg

SEQ ID NO: 12451 - DNA, 33 bp, Homo sapien
agagggaggaacttgcaccttcataagagactc

SEQ ID NO: 12452 - DNA, 33 bp, Homo sapien
agagggaggaacttgcgccttcataagagactc

SEQ ID NO: 12453 - DNA, 33 bp, Homo sapien
gttttgcaaaagataacgttcccctgtaatgtg

SEQ ID NO: 12454 - DNA, 33 bp, Homo sapien
gttttgcaaaagataatgttcccctgtaatgtg

SEQ ID NO: 12455 - DNA, 33 bp, Homo sapien
ctccactcaacagatacaggaaagaagcccaga

SEQ ID NO: 12456 - DNA, 33 bp, Homo sapien
ctccactcaacagatataggaaagaagcccaga

SEQ ID NO: 12457 - DNA, 33 bp, Homo sapien
caggtgcactcagccaacttaacaacctccaat

SEQ ID NO: 12458 - DNA, 33 bp, Homo sapien
caggtgcactcagccaccttaacaacctccaat

SEQ ID NO: 12459 - DNA, 33 bp, Homo sapien
cctactaacaatgtaacagaggaatgttccatc

SEQ ID NO: 12460 - DNA, 33 bp, Homo sapien
cctactaacaatgtaatagaggaatgttccatc

SEQ ID NO: 12461 - DNA, 33 bp, Homo sapien
catcagaacctattccacctctcaaactggaac

SEQ ID NO: 12462 - DNA, 33 bp, Homo sapien
catcagaacctattccccctctcaaactggaac

SEQ ID NO: 12463 - DNA, 33 bp, Homo sapien
agtacttgttttttcaatcactgtctgcatata

SEQ ID NO: 12464 - DNA, 33 bp, Homo sapien
agtacttgttttttcagtcactgtctgcatata

SEQ ID NO: 12465 - DNA, 33 bp, Homo sapien
tacttttgtgtttcccagagctcagttgtatta

SEQ ID NO: 12466 - DNA, 33 bp, Homo sapien
tacttttgtgtttcccggagctcagttgtatta

SEQ ID NO: 12467 - DNA, 33 bp, Homo sapien
cagaacaacgtcagtaagcgttttctctatgtt

SEQ ID NO: 12468 - DNA, 33 bp, Homo sapien
cagaacaacgtcagtaggcgttttctctatgtt

SEQ ID NO: 12469 - DNA, 33 bp, Homo sapien
gccaattgactgaaaacacttgggactacttct

SEQ ID NO: 12470 - DNA, 33 bp, Homo sapien
gccaattgactgaaaatacttgggactacttct

SEQ ID NO: 12471 - DNA, 33 bp, Homo sapien
agcccacaacagcaaagtctttaacccataaat

SEQ ID NO: 12472 - DNA, 33 bp, Homo sapien
agcccacaacagcaaattctttaacccataaat

SEQ ID NO: 12473 - DNA, 33 bp, Homo sapien
agaggcaatgttccacggagcttggagaaaatg

SEQ ID NO: 12474 - DNA, 33 bp, Homo sapien
agaggcaatgttccactgagcttggagaaaatg

SEQ ID NO: 12475 - DNA, 33 bp, Homo sapien
ctccagtcgagatgagcacagagtggccatata

SEQ ID NO: 12476 - DNA, 33 bp, Homo sapien
ctccagtcgagatgagtacagagtggccatata

SEQ ID NO: 12477 - DNA, 33 bp, Homo sapien
gaatgatagaacattaacttgagagatgaagtt

SEQ ID NO: 12478 - DNA, 33 bp, Homo sapien
gaatgatagaacattagcttgagagatgaagtt

SEQ ID NO: 12479 - DNA, 33 bp, Homo sapien
attaactgtgccacctaagcgagttatttaact

SEQ ID NO: 12480 - DNA, 33 bp, Homo sapien
attaactgtgccacctgagcgagttatttaact

SEQ ID NO: 12481 - DNA, 33 bp, Homo sapien
gcctagacagagtaacacatggcattgttgagt

SEQ ID NO: 12482 - DNA, 33 bp, Homo sapien
gcctagacagagtaacgcatggcattgttgagt

SEQ ID NO: 12483 - DNA, 33 bp, Homo sapien
cctctctgttctgtacaactcagaaagaatgcc

SEQ ID NO: 12484 - DNA, 33 bp, Homo sapien
cctctctgttctgtacgactcagaaagaatgcc

SEQ ID NO: 12485 - DNA, 33 bp, Homo sapien
tgcttggggaatgcaaaatcactttaatattgg

SEQ ID NO: 12486 - DNA, 33 bp, Homo sapien
tgcttggggaatgcaagatcactttaatattgg

SEQ ID NO: 12487 - DNA, 33 bp, Homo sapien
ctacattccttgggggaaagaatagcagcaaat

SEQ ID NO: 12488 - DNA, 33 bp, Homo sapien
ctacattccttggggggaagaatagcagcaaat

SEQ ID NO: 12489 - DNA, 33 bp, Homo sapien
tctggactatttactacggacaggattttgctt

SEQ ID NO: 12490 - DNA, 33 bp, Homo sapien
tctggactatttactatggacaggattttgctt

SEQ ID NO: 12491 - DNA, 33 bp, Homo sapien
caaaaactggatccagcatttttagtttccagg

SEQ ID NO: 12492 - DNA, 33 bp, Homo sapien
caaaaactggatccaggatttttagtttccagg

SEQ ID NO: 12493 - DNA, 33 bp, Homo sapien
tggaagacaggacaaaactggaaaagctggatg

SEQ ID NO: 12494 - DNA, 33 bp, Homo sapien
tggaagacaggacaaagctggaaaagctggatg

SEQ ID NO: 12495 - DNA, 33 bp, Homo sapien
ttcatcctggtcacaaagcagcaaataacataa

SEQ ID NO: 12496 - DNA, 33 bp, Homo sapien
ttcatcctggtcacaaggcagcaaataacataa

SEQ ID NO: 12497 - DNA, 33 bp, Homo sapien
tcctctgcgtgccttcagaactattagttatcc

SEQ ID NO: 12498 - DNA, 33 bp, Homo sapien
tcctctgcgtgccttctgaactattagttatcc

SEQ ID NO: 12499 - DNA, 33 bp, Homo sapien
ctcactgcaactttccacaaggttcagagtggt

SEQ ID NO: 12500 - DNA, 33 bp, Homo sapien
ctcactgcaactttcctcaaggttcagagtggt

SEQ ID NO: 12501 - DNA, 33 bp, Homo sapien
catgggcagtttatagacacattcaaaatgaga

SEQ ID NO: 12502 - DNA, 33 bp, Homo sapien
catgggcagtttatagtcacattcaaaatgaga

SEQ ID NO: 12503 - DNA, 33 bp, Homo sapien
gtgagggagagtggaagaagatgaggccagaga

SEQ ID NO: 12504 - DNA, 33 bp, Homo sapien
gtgagggagagtggaataagatgaggccagaga

SEQ ID NO: 12505 - DNA, 33 bp, Homo sapien
atagtctacttgcagacgtagactatggtattg

SEQ ID NO: 12506 - DNA, 33 bp, Homo sapien
atagtctacttgcagatgtagactatggtattg

SEQ ID NO: 12507 - DNA, 33 bp, Homo sapien
gtcctgtttactgtaaatccctatctctgggca

SEQ ID NO: 12508 - DNA, 33 bp, Homo sapien
gtcctgtttactgtaagtccctatctctgggca

SEQ ID NO: 12509 - DNA, 33 bp, Homo sapien
agaaagatcagcttagaaaatccaggagaagca

SEQ ID NO: 12510 - DNA, 33 bp, Homo sapien
agaaagatcagcttaggaaatccaggagaagca

SEQ ID NO: 12511 - DNA, 33 bp, Homo sapien
tctcctgggtggttccaagtctatttctaattg

SEQ ID NO: 12512 - DNA, 33 bp, Homo sapien
tctcctgggtggttccgagtctatttctaattg

SEQ ID NO: 12513 - DNA, 33 bp, Homo sapien
gttttgtggctggaagaaaaacaaagaaagttc

SEQ ID NO: 12514 - DNA, 33 bp, Homo sapien
gttttgtggctggaaggaaaacaaagaaagttc

SEQ ID NO: 12515 - DNA, 33 bp, Homo sapien
cctgagcaacagagccactgggttgtatctagg

SEQ ID NO: 12516 - DNA, 33 bp, Homo sapien
cctgagcaacagagccgctgggttgtatctagg

SEQ ID NO: 12517 - DNA, 33 bp, Homo sapien
tgggttgttaaggaacagaaagctggccagcat

SEQ ID NO: 12518 - DNA, 33 bp, Homo sapien
tgggttgttaaggaacggaaagctggccagcat

SEQ ID NO: 12519 - DNA, 33 bp, Homo sapien
accaccagacctcctacctaagaagagaacaat

SEQ ID NO: 12520 - DNA, 33 bp, Homo sapien
accaccagacctcctatctaagaagagaacaat

SEQ ID NO: 12521 - DNA, 33 bp, Homo sapien
ccttctttttctgaccaaggaacaggtgtggag

SEQ ID NO: 12522 - DNA, 33 bp, Homo sapien
ccttctttttctgaccgaggaacaggtgtggag

SEQ ID NO: 12523 - DNA, 33 bp, Homo sapien
tgaacaaaacacataacgtaggcagtgtgattc

SEQ ID NO: 12524 - DNA, 33 bp, Homo sapien
tgaacaaaacacataatgtaggcagtgtgattc

SEQ ID NO: 12525 - DNA, 33 bp, Homo sapien
cccaaacctttctggagaagagcagacctggag

SEQ ID NO: 12526 - DNA, 33 bp, Homo sapien
cccaaacctttctggataagagcagacctggag

SEQ ID NO: 12527 - DNA, 33 bp, Homo sapien
aaaaactccatgtttacgcagatgactgggata

SEQ ID NO: 12528 - DNA, 33 bp, Homo sapien
aaaaactccatgtttatgcagatgactgggata

SEQ ID NO: 12529 - DNA, 33 bp, Homo sapien
gctctgtgtaatcaaaatggggctgagaagagg

SEQ ID NO: 12530 - DNA, 33 bp, Homo sapien
gctctgtgtaatcaaagtggggctgagaagagg

SEQ ID NO: 12531 - DNA, 33 bp, Homo sapien
tggaattcattaaagcacctggagctgcaaggg

SEQ ID NO: 12532 - DNA, 33 bp, Homo sapien
tggaattcattaaagcgcctggagctgcaaggg

SEQ ID NO: 12533 - DNA, 33 bp, Homo sapien
ctccaaatctttctaaactccaccctcttcttc

SEQ ID NO: 12534 - DNA, 33 bp, Homo sapien
ctccaaatctttctaagctccaccctcttcttc

SEQ ID NO: 12535 - DNA, 33 bp, Homo sapien
ctctccttccagactaaattctgggtgcagagt

SEQ ID NO: 12536 - DNA, 33 bp, Homo sapien
ctctccttccagactagattctgggtgcagagt

SEQ ID NO: 12537 - DNA, 33 bp, Homo sapien
ctttaccactctatcacactgtgccataagcct

SEQ ID NO: 12538 - DNA, 33 bp, Homo sapien
ctttaccactctatcatactgtgccataagcct

SEQ ID NO: 12539 - DNA, 33 bp, Homo sapien
ttaaatcattgttgaacgaatgctcagctgtgg

SEQ ID NO: 12540 - DNA, 33 bp, Homo sapien
ttaaatcattgttgaatgaatgctcagctgtgg

SEQ ID NO: 12541 - DNA, 33 bp, Homo sapien
gcctcctcctcacaccaaacagttgtatttaat

SEQ ID NO: 12542 - DNA, 33 bp, Homo sapien
gcctcctcctcacaccgaacagttgtatttaat

SEQ ID NO: 12543 - DNA, 33 bp, Homo sapien
cttgctttcagaagtgcaacgaggcaaaaggaa

SEQ ID NO: 12544 - DNA, 33 bp, Homo sapien
cttgctttcagaagtgtaacgaggcaaaaggaa

SEQ ID NO: 12545 - DNA, 33 bp, Homo sapien
tttggaggatttggagcatgcaaaagatgtgat

SEQ ID NO: 12546 - DNA, 33 bp, Homo sapien
tttggaggatttggagtatgcaaaagatgtgat

SEQ ID NO: 12547 - DNA, 33 bp, Homo sapien
tggctatgagtgaagaaccatgagctaggacat

SEQ ID NO: 12548 - DNA, 33 bp, Homo sapien
tggctatgagtgaagagccatgagctaggacat

SEQ ID NO: 12549 - DNA, 33 bp, Homo sapien
ccagaccaacctgggacgtgcctacctggcttt

SEQ ID NO: 12550 - DNA, 33 bp, Homo sapien
ccagaccaacctgggatgtgcctacctggcttt

SEQ ID NO: 12551 - DNA, 33 bp, Homo sapien
aggcacgaagaggccacgtaatttgccaaagcc

SEQ ID NO: 12552 - DNA, 33 bp, Homo sapien
aggcacgaagaggccatgtaatttgccaaagcc

SEQ ID NO: 12553 - DNA, 33 bp, Homo sapien
tgtgcaggtgtggttacgcattttgaaggagct

SEQ ID NO: 12554 - DNA, 33 bp, Homo sapien
tgtgcaggtgtggttatgcattttgaaggagct

SEQ ID NO: 12555 - DNA, 33 bp, Homo sapien
ctctcgaaggcatcaacagcttttggggctgct

SEQ ID NO: 12556 - DNA, 33 bp, Homo sapien
ctctcgaaggcatcaagagcttttggggctgct

SEQ ID NO: 12557 - DNA, 33 bp, Homo sapien
aaaagctgctgtggacaatcaggctacagagaa

SEQ ID NO: 12558 - DNA, 33 bp, Homo sapien
aaaagctgctgtggacgatcaggctacagagaa

SEQ ID NO: 12559 - DNA, 33 bp, Homo sapien
tgaagccgcagcaaacagatgggccttgccctc

SEQ ID NO: 12560 - DNA, 33 bp, Homo sapien
tgaagccgcagcaaacggatgggccttgccctc

SEQ ID NO: 12561 - DNA, 33 bp, Homo sapien
gagctaggtggcaagacagaaaagagacagtgt

SEQ ID NO: 12562 - DNA, 33 bp, Homo sapien
gagctaggtggcaagatagaaaagagacagtgt

SEQ ID NO: 12563 - DNA, 33 bp, Homo sapien
gctttgcctggtctgcaatgtgggcatggcctg

SEQ ID NO: 12564 - DNA, 33 bp, Homo sapien
gctttgcctggtctgcgatgtgggcatggcctg

SEQ ID NO: 12565 - DNA, 33 bp, Homo sapien
ttatctaaacaacagcacgaggagttccaggaa

SEQ ID NO: 12566 - DNA, 33 bp, Homo sapien
ttatctaaacaacagcgcgaggagttccaggaa

SEQ ID NO: 12567 - DNA, 33 bp, Homo sapien
ttttttgactcttaacaaggaaagtcagaacct

SEQ ID NO: 12568 - DNA, 33 bp, Homo sapien
ttttttgactcttaacgaggaaagtcagaacct

SEQ ID NO: 12569 - DNA, 33 bp, Homo sapien
ggctgcagcttgctcacagcagaaatgtttaca

SEQ ID NO: 12570 - DNA, 33 bp, Homo sapien
ggctgcagcttgctcagagcagaaatgtttaca

SEQ ID NO: 12571 - DNA, 33 bp, Homo sapien
gacacaaaagttacagaaattacaaaagcttct

SEQ ID NO: 12572 - DNA, 33 bp, Homo sapien
gacacaaaagttacaggaattacaaaagcttct

SEQ ID NO: 12573 - DNA, 33 bp, Homo sapien
acatccctccaggaaacactcaatgtccttaca

SEQ ID NO: 12574 - DNA, 33 bp, Homo sapien
acatccctccaggaaagactcaatgtccttaca

SEQ ID NO: 12575 - DNA, 33 bp, Homo sapien
tatgttcaacaaagctaaaagttcaggccctgg

SEQ ID NO: 12576 - DNA, 33 bp, Homo sapien
tatgttcaacaaagctgaaagttcaggccctgg

SEQ ID NO: 12577 - DNA, 33 bp, Homo sapien
tgtctacctaaattaccatttgagaaggattat

SEQ ID NO: 12578 - DNA, 33 bp, Homo sapien
tgtctacctaaattactatttgagaaggattat

SEQ ID NO: 12579 - DNA, 33 bp, Homo sapien
gtttctaatgaaatgacggcaatcagcagagat

SEQ ID NO: 12580 - DNA, 33 bp, Homo sapien
gtttctaatgaaatgatggcaatcagcagagat

SEQ ID NO: 12581 - DNA, 33 bp, Homo sapien
aaccaagcgcaggatacagacttatacacacac

SEQ ID NO: 12582 - DNA, 33 bp, Homo sapien
aaccaagcgcaggatatagacttatacacacac

SEQ ID NO: 12583 - DNA, 33 bp, Homo sapien
taaatgagataatgcaactgaaataggcaacac

SEQ ID NO: 12584 - DNA, 33 bp, Homo sapien
taaatgagataatgcacctgaaataggcaacac

SEQ ID NO: 12585 - DNA, 33 bp, Homo sapien
cactagcttacgctcacatggtcatcaaagtca

SEQ ID NO: 12586 - DNA, 33 bp, Homo sapien
cactagcttacgctcatatggtcatcaaagtca

SEQ ID NO: 12587 - DNA, 33 bp, Homo sapien
gcccaagacactaaccaaggctgtgatcagtgc

SEQ ID NO: 12588 - DNA, 33 bp, Homo sapien
gcccaagacactaaccgaggctgtgatcagtgc

SEQ ID NO: 12589 - DNA, 33 bp, Homo sapien
tttgaaaccaattttacggtccaatattgaacc

SEQ ID NO: 12590 - DNA, 33 bp, Homo sapien
tttgaaaccaattttatggtccaatattgaacc

SEQ ID NO: 12591 - DNA, 33 bp, Homo sapien
ggacttctcttgagggccatgtgcttctggctc

SEQ ID NO: 12592 - DNA, 33 bp, Homo sapien
ggacttctcttgagggtcatgtgcttctggctc

SEQ ID NO: 12593 - DNA, 33 bp, Homo sapien
tcctcccatgcccagccatcttccaacagctgc

SEQ ID NO: 12594 - DNA, 33 bp, Homo sapien
tcctcccatgcccagctatcttccaacagctgc

SEQ ID NO: 12595 - DNA, 33 bp, Homo sapien
accccatctctacgaaatatacagaaattagcc

SEQ ID NO: 12596 - DNA, 33 bp, Homo sapien
accccatctctacgaagtatacagaaattagcc

SEQ ID NO: 12597 - DNA, 33 bp, Homo sapien
tggtagttgctcaccacgtctggaaggaagaaa

SEQ ID NO: 12598 - DNA, 33 bp, Homo sapien
tggtagttgctcaccatgtctggaaggaagaaa

SEQ ID NO: 12599 - DNA, 33 bp, Homo sapien
caaaatcccctaaagcagatgagatgatggact

SEQ ID NO: 12600 - DNA, 33 bp, Homo sapien
caaaatcccctaaagcggatgagatgatggact

SEQ ID NO: 12601 - DNA, 33 bp, Homo sapien
ttctgatctgtatggcacctctggagttgtgca

SEQ ID NO: 12602 - DNA, 33 bp, Homo sapien
ttctgatctgtatggcgcctctggagttgtgca

SEQ ID NO: 12603 - DNA, 33 bp, Homo sapien
gcaacacctgtgcagcaaaacacatcagccctg

SEQ ID NO: 12604 - DNA, 33 bp, Homo sapien
gcaacacctgtgcagccaaacacatcagccctg

SEQ ID NO: 12605 - DNA, 33 bp, Homo sapien
cagttcattatggaaacacagcaagggaggcac

SEQ ID NO: 12606 - DNA, 33 bp, Homo sapien
cagttcattatggaaatacagcaagggaggcac

SEQ ID NO: 12607 - DNA, 33 bp, Homo sapien
agcagttgaagatcaccagcagctgccttgaga

SEQ ID NO: 12608 - DNA, 33 bp, Homo sapien
agcagttgaagatcacgagcagctgccttgaga

SEQ ID NO: 12609 - DNA, 33 bp, Homo sapien
gtgacaacttttaatccacggaagcagtttttc

SEQ ID NO: 12610 - DNA, 33 bp, Homo sapien
gtgacaacttttaatctacggaagcagtttttc

SEQ ID NO: 12611 - DNA, 33 bp, Homo sapien
ataagctataacaaagactatttggttaagaaa

SEQ ID NO: 12612 - DNA, 33 bp, Homo sapien
ataagctataacaaaggctatttggttaagaaa

SEQ ID NO: 12613 - DNA, 33 bp, Homo sapien
tgatcctcacgctcctaaaattcaaacagattc

SEQ ID NO: 12614 - DNA, 33 bp, Homo sapien
tgatcctcacgctcctgaaattcaaacagattc

SEQ ID NO: 12615 - DNA, 33 bp, Homo sapien
catttgtgtgacttcactgaaacacattacctg

SEQ ID NO: 12616 - DNA, 33 bp, Homo sapien
catttgtgtgacttcattgaaacacattacctg

SEQ ID NO: 12617 - DNA, 33 bp, Homo sapien
tgagatgggaagccacaaaagagtttctggcag

SEQ ID NO: 12618 - DNA, 33 bp, Homo sapien
tgagatgggaagccacgaaagagtttctggcag

SEQ ID NO: 12619 - DNA, 33 bp, Homo sapien
cagtaaataactcccaagtgtcttgttggaaat

SEQ ID NO: 12620 - DNA, 33 bp, Homo sapien
cagtaaataactcccaggtgtcttgttggaaat

SEQ ID NO: 12621 - DNA, 33 bp, Homo sapien
gctggatgttacagatgagaacagtactaagag

SEQ ID NO: 12622 - DNA, 33 bp, Homo sapien
gctggatgttacagattagaacagtactaagag

SEQ ID NO: 12623 - DNA, 33 bp, Homo sapien
taaataagaaagcaccccaaatgagcaactgaa

SEQ ID NO: 12624 - DNA, 33 bp, Homo sapien
taaataagaaagcaccgcaaatgagcaactgaa

SEQ ID NO: 12625 - DNA, 33 bp, Homo sapien
tagaagtggtgaccataaagaaaagtttcttgg

SEQ ID NO: 12626 - DNA, 33 bp, Homo sapien
tagaagtggtgaccatgaagaaaagtttcttgg

SEQ ID NO: 12627 - DNA, 33 bp, Homo sapien
atgtaagtccaggaaccagtgggtcaaacaaat

SEQ ID NO: 12628 - DNA, 33 bp, Homo sapien
atgtaagtccaggaacgagtgggtcaaacaaat

SEQ ID NO: 12629 - DNA, 33 bp, Homo sapien
atctggatcctccttacgattttccagctgaga

SEQ ID NO: 12630 - DNA, 33 bp, Homo sapien
atctggatcctccttatgattttccagctgaga

SEQ ID NO: 12631 - DNA, 33 bp, Homo sapien
gtcttcagagagaaagcccagctgcacagagag

SEQ ID NO: 12632 - DNA, 33 bp, Homo sapien
gtcttcagagagaaagtccagctgcacagagag

SEQ ID NO: 12633 - DNA, 33 bp, Homo sapien
gtgtgaagataagaacaaagctggagatgtatt

SEQ ID NO: 12634 - DNA, 33 bp, Homo sapien
gtgtgaagataagaaccaagctggagatgtatt

SEQ ID NO: 12635 - DNA, 33 bp, Homo sapien
aagaaatagtaggataaacgtgttggaaatatg

SEQ ID NO: 12636 - DNA, 33 bp, Homo sapien
aagaaatagtaggatacacgtgttggaaatatg

SEQ ID NO: 12637 - DNA, 33 bp, Homo sapien
aagttcctgcctctgacacaacctgactcttcc

SEQ ID NO: 12638 - DNA, 33 bp, Homo sapien
aagttcctgcctctgatacaacctgactcttcc

SEQ ID NO: 12639 - DNA, 33 bp, Homo sapien
ggctcacagttccaccagggaaagattaatgtg

SEQ ID NO: 12640 - DNA, 33 bp, Homo sapien
ggctcacagttccaccggggaaagattaatgtg

SEQ ID NO: 12641 - DNA, 33 bp, Homo sapien
atctggagaccacgggcaccacagttgaagact

SEQ ID NO: 12642 - DNA, 33 bp, Homo sapien
atctggagaccacgggtaccacagttgaagact

SEQ ID NO: 12643 - DNA, 33 bp, Homo sapien
taactgcacttaattccatgcaggtaggaaact

SEQ ID NO: 12644 - DNA, 33 bp, Homo sapien
taactgcacttaattctatgcaggtaggaaact

SEQ ID NO: 12645 - DNA, 33 bp, Homo sapien
gaaggtccaggcttgccaggacttctatgcttg

SEQ ID NO: 12646 - DNA, 33 bp, Homo sapien
gaaggtccaggcttgctaggacttctatgcttg

SEQ ID NO: 12647 - DNA, 33 bp, Homo sapien
tcttccacagtaagcacctattagttggatctg

SEQ ID NO: 12648 - DNA, 33 bp, Homo sapien
tcttccacagtaagcatctattagttggatctg

SEQ ID NO: 12649 - DNA, 33 bp, Homo sapien
ctctttttaaattagaaatacagaactgcaaat

SEQ ID NO: 12650 - DNA, 33 bp, Homo sapien
ctctttttaaattagacatacagaactgcaaat

SEQ ID NO: 12651 - DNA, 33 bp, Homo sapien
gagagagccattgttaccacaccaagttgagag

SEQ ID NO: 12652 - DNA, 33 bp, Homo sapien
gagagagccattgttagcacaccaagttgagag

SEQ ID NO: 12653 - DNA, 33 bp, Homo sapien
gcctgagactgatacacatagaaaggcctgttt

SEQ ID NO: 12654 - DNA, 33 bp, Homo sapien
gcctgagactgatacatatagaaaggcctgttt

SEQ ID NO: 12655 - DNA, 33 bp, Homo sapien
acaccagtcaattatcacttttgtcattgccat

SEQ ID NO: 12656 - DNA, 33 bp, Homo sapien
acaccagtcaattatctcttttgtcattgccat

SEQ ID NO: 12657 - DNA, 33 bp, Homo sapien
cctaactggtgtgggaatagcacgtctgaattc

SEQ ID NO: 12658 - DNA, 33 bp, Homo sapien
cctaactggtgtgggactagcacgtctgaattc

SEQ ID NO: 12659 - DNA, 33 bp, Homo sapien
ggcctgtctccaagtacggtcaccttctgagtt

SEQ ID NO: 12660 - DNA, 33 bp, Homo sapien
ggcctgtctccaagtatggtcaccttctgagtt

SEQ ID NO: 12661 - DNA, 33 bp, Homo sapien
tatagctgttcacaaacccctctcctgtgagct

SEQ ID NO: 12662 - DNA, 33 bp, Homo sapien
tatagctgttcacaaatccctctcctgtgagct

SEQ ID NO: 12663 - DNA, 33 bp, Homo sapien
acaccatcaccataaactagtcttgacagctga

SEQ ID NO: 12664 - DNA, 33 bp, Homo sapien
acaccatcaccataaattagtcttgacagctga

SEQ ID NO: 12665 - DNA, 33 bp, Homo sapien
gcagtgggactagatcaaaaagtgcaattgtaa

SEQ ID NO: 12666 - DNA, 33 bp, Homo sapien
gcagtgggactagatccaaaagtgcaattgtaa

SEQ ID NO: 12667 - DNA, 33 bp, Homo sapien
actttttgaggaattaccaactttttcaaagca

SEQ ID NO: 12668 - DNA, 33 bp, Homo sapien
actttttgaggaattatcaactttttcaaagca

SEQ ID NO: 12669 - DNA, 33 bp, Homo sapien
gcacctggccctagcagagaattaaagctactt

SEQ ID NO: 12670 - DNA, 33 bp, Homo sapien
gcacctggccctagcatagaattaaagctactt

SEQ ID NO: 12671 - DNA, 33 bp, Homo sapien
gctggcatcggtggcccagagcgctaaacctta

SEQ ID NO: 12672 - DNA, 33 bp, Homo sapien
gctggcatcggtggcctagagcgctaaacctta

SEQ ID NO: 12673 - DNA, 33 bp, Homo sapien
tatcctccacattgtagcccaagctgatgaagc

SEQ ID NO: 12674 - DNA, 33 bp, Homo sapien
tatcctccacattgtatcccaagctgatgaagc

SEQ ID NO: 12675 - DNA, 33 bp, Homo sapien
aacctgacattcaagtaacattggtctcctttc

SEQ ID NO: 12676 - DNA, 33 bp, Homo sapien
aacctgacattcaagttacattggtctcctttc

SEQ ID NO: 12677 - DNA, 33 bp, Homo sapien
ggacacattatttattcaagtgggatgccgcca

SEQ ID NO: 12678 - DNA, 33 bp, Homo sapien
ggacacattatttatttaagtgggatgccgcca

SEQ ID NO: 12679 - DNA, 33 bp, Homo sapien
tggtactcacttaaaccgcactaggaagtgagt

SEQ ID NO: 12680 - DNA, 33 bp, Homo sapien
tggtactcacttaaacggcactaggaagtgagt

SEQ ID NO: 12681 - DNA, 33 bp, Homo sapien
cagtcacatagagatacgatggaaagtccagag

SEQ ID NO: 12682 - DNA, 33 bp, Homo sapien
cagtcacatagagatatgatggaaagtccagag

SEQ ID NO: 12683 - DNA, 33 bp, Homo sapien
gtaacaataattcctcaccagcatatggctagt

SEQ ID NO: 12684 - DNA, 33 bp, Homo sapien
gtaacaataattcctctccagcatatggctagt

SEQ ID NO: 12685 - DNA, 33 bp, Homo sapien
gactgtttcaaagggcagaaagctgtggccatg

SEQ ID NO: 12686 - DNA, 33 bp, Homo sapien
gactgtttcaaagggccgaaagctgtggccatg

SEQ ID NO: 12687 - DNA, 33 bp, Homo sapien
gggagaaaataaagccacttgagcagatcaaaa

SEQ ID NO: 12688 - DNA, 33 bp, Homo sapien
gggagaaaataaagccgcttgagcagatcaaaa

SEQ ID NO: 12689 - DNA, 33 bp, Homo sapien
tttttaaaagtagatacattagccagcctgcct

SEQ ID NO: 12690 - DNA, 33 bp, Homo sapien
tttttaaaagtagatatattagccagcctgcct

SEQ ID NO: 12691 - DNA, 33 bp, Homo sapien
gtgcttcaggtcttaacgcctccatacctcttc

SEQ ID NO: 12692 - DNA, 33 bp, Homo sapien
gtgcttcaggtcttaatgcctccatacctcttc

SEQ ID NO: 12693 - DNA, 33 bp, Homo sapien
gctgagctacatccctcaacactagagcagtcc

SEQ ID NO: 12694 - DNA, 33 bp, Homo sapien
gctgagctacatccctgaacactagagcagtcc

SEQ ID NO: 12695 - DNA, 33 bp, Homo sapien; identical to SEQ ID NO: 12693

SEQ ID NO: 12696 - DNA, 33 bp, Homo sapien; identical to SEQ ID NO: 12694

SEQ ID NO: 12697 - DNA, 33 bp, Homo sapien; identical to SEQ ID NO: 12693

SEQ ID NO: 12698 - DNA, 33 bp, Homo sapien; identical to SEQ ID NO: 12694

SEQ ID NO: 12699 - DNA, 33 bp, Homo sapien
tccactgtggttaaaaattctgcatgggaataa

SEQ ID NO: 12700 - DNA, 33 bp, Homo sapien
tccactgtggttaaaagttctgcatgggaataa

SEQ ID NO: 12701 - DNA, 33 bp, Homo sapien
atccaagatttgagttcaaaaataagttggggc

SEQ ID NO: 12702 - DNA, 33 bp, Homo sapien
atccaagatttgagtttaaaaataagttggggc

SEQ ID NO: 12703 - DNA, 33 bp, Homo sapien
ccccacatattgacaacctattgtgtgctctca

SEQ ID NO: 12704 - DNA, 33 bp, Homo sapien
ccccacatattgacaatctattgtgtgctctca

SEQ ID NO: 12705 - DNA, 33 bp, Homo sapien
cagcctctctgcctcactcctcataactactcc

SEQ ID NO: 12706 - DNA, 33 bp, Homo sapien
cagcctctctgcctcattcctcataactactcc

SEQ ID NO: 12707 - DNA, 33 bp, Homo sapien
ctagcctgacttcaaactgcctgcagctgcatc

SEQ ID NO: 12708 - DNA, 33 bp, Homo sapien
ctagcctgacttcaaattgcctgcagctgcatc

SEQ ID NO: 12709 - DNA, 33 bp, Homo sapien
atgagaagggaaacgacagcaaatagaggaagc

SEQ ID NO: 12710 - DNA, 33 bp, Homo sapien
atgagaagggaaacgatagcaaatagaggaagc

SEQ ID NO: 12711 - DNA, 33 bp, Homo sapien
agataaagaatgaaaacgtaaagcatttaggga

SEQ ID NO: 12712 - DNA, 33 bp, Homo sapien
agataaagaatgaaaaggtaaagcatttaggga

SEQ ID NO: 12713 - DNA, 33 bp, Homo sapien
aacgtacaggctatgacagaataaaacaagaga

SEQ ID NO: 12714 - DNA, 33 bp, Homo sapien
aacgtacaggctatgagagaataaaacaagaga

SEQ ID NO: 12715 - DNA, 33 bp, Homo sapien
gactggactcaggaccagactggtgtccatagt

SEQ ID NO: 12716 - DNA, 33 bp, Homo sapien
gactggactcaggaccggactggtgtccatagt

SEQ ID NO: 12717 - DNA, 33 bp, Homo sapien
catgaaggaggtggtaaaggaatttgagttccc

SEQ ID NO: 12718 - DNA, 33 bp, Homo sapien
catgaaggaggtggtagaggaatttgagttccc

SEQ ID NO: 12719 - DNA, 33 bp, Homo sapien
gaaaggtcccacgatgacagaagggatcgtcgt

SEQ ID NO: 12720 - DNA, 33 bp, Homo sapien
gaaaggtcccacgatgtcagaagggatcgtcgt

SEQ ID NO: 12721 - DNA, 33 bp, Homo sapien
gtaagggcaccagaacccggaataaacttgtac

SEQ ID NO: 12722 - DNA, 33 bp, Homo sapien
gtaagggcaccagaacgcggaataaacttgtac

SEQ ID NO: 12723 - DNA, 33 bp, Homo sapien
caggccacacagcggacgtcaagggcacctgcg

SEQ ID NO: 12724 - DNA, 33 bp, Homo sapien
caggccacacagcggatgtcaagggcacctgcg

SEQ ID NO: 12725 - DNA, 33 bp, Homo sapien
gactccattacctccccactgtgtgatttcagg

SEQ ID NO: 12726 - DNA, 33 bp, Homo sapien
gactccattacctccctactgtgtgatttcagg

SEQ ID NO: 12727 - DNA, 33 bp, Homo sapien
atcagagttcaaagtcaaaagcttcccaagaac

SEQ ID NO: 12728 - DNA, 33 bp, Homo sapien
atcagagttcaaagtcgaaagcttcccaagaac

SEQ ID NO: 12729 - DNA, 33 bp, Homo sapien
tcaggagaggcgccctgaattccatgccgggtc

SEQ ID NO: 12730 - DNA, 33 bp, Homo sapien
tcaggagaggcgcccttaattccatgccgggtc

SEQ ID NO: 12731 - DNA, 33 bp, Homo sapien
tatctccagggagatggagtaccctttgggagg

SEQ ID NO: 12732 - DNA, 33 bp, Homo sapien
tatctccagggagatgtagtaccctttgggagg

SEQ ID NO: 12733 - DNA, 33 bp, Homo sapien
gctggtgttgtgcccaagagcactctccaataa

SEQ ID NO: 12734 - DNA, 33 bp, Homo sapien
gctggtgttgtgcccaggagcactctccaataa

SEQ ID NO: 12735 - DNA, 33 bp, Homo sapien
aggcattggaaaaagacaatgaaatgctgagag

SEQ ID NO: 12736 - DNA, 33 bp, Homo sapien
aggcattggaaaaagataatgaaatgctgagag

SEQ ID NO: 12737 - DNA, 33 bp, Homo sapien
aaactgaggtttggcccaggaatgaattgttag

SEQ ID NO: 12738 - DNA, 33 bp, Homo sapien
aaactgaggtttggccgaggaatgaattgttag

SEQ ID NO: 12739 - DNA, 33 bp, Homo sapien
caacatcgaacccttaacatggtactgagcctt

SEQ ID NO: 12740 - DNA, 33 bp, Homo sapien
caacatcgaacccttagcatggtactgagcctt

SEQ ID NO: 12741 - DNA, 33 bp, Homo sapien
tccaagtaatttggtacataataggaccaatgc

SEQ ID NO: 12742 - DNA, 33 bp, Homo sapien
tccaagtaatttggtatataataggaccaatgc

SEQ ID NO: 12743 - DNA, 33 bp, Homo sapien
ctgtacttttgagagaatacagtaagacagtca

SEQ ID NO: 12744 - DNA, 33 bp, Homo sapien
ctgtacttttgagagattacagtaagacagtca

SEQ ID NO: 12745 - DNA, 33 bp, Homo sapien
gctcagcaggctgtggaatatatttgtatttct

SEQ ID NO: 12746 - DNA, 33 bp, Homo sapien
gctcagcaggctgtgggatatatttgtatttct

SEQ ID NO: 12747 - DNA, 33 bp, Homo sapien
tactttgaagttcaggaaagagatttaggatgc

SEQ ID NO: 12748 - DNA, 33 bp, Homo sapien
tactttgaagttcaggcaagagatttaggatgc

SEQ ID NO: 12749 - DNA, 33 bp, Homo sapien
gctgagttcaaggaacagaaaaaggctgttgga

SEQ ID NO: 12750 - DNA, 33 bp, Homo sapien
gctgagttcaaggaacggaaaaaggctgttgga

SEQ ID NO: 12751 - DNA, 33 bp, Homo sapien
caaagtagatgctccaacttatccacctgctcc

SEQ ID NO: 12752 - DNA, 33 bp, Homo sapien
caaagtagatgctccagcttatccacctgctcc

SEQ ID NO: 12753 - DNA, 33 bp, Homo sapien
atgcttcatctcttcacaggattctggaggagc

SEQ ID NO: 12754 - DNA, 33 bp, Homo sapien
atgcttcatctcttcataggattctggaggagc

SEQ ID NO: 12755 - DNA, 33 bp, Homo sapien
tgtgtgtatgactttaagatggttatccagcca

SEQ ID NO: 12756 - DNA, 33 bp, Homo sapien
tgtgtgtatgactttaggatggttatccagcca

SEQ ID NO: 12757 - DNA, 33 bp, Homo sapien
cccaactccactagaacaacaaaattctcgtat

SEQ ID NO: 12758 - DNA, 33 bp, Homo sapien
cccaactccactagaagaacaaaattctcgtat

SEQ ID NO: 12759 - DNA, 33 bp, Homo sapien
caagtgtaggccataacggtttcccagagtggg

SEQ ID NO: 12760 - DNA, 33 bp, Homo sapien
caagtgtaggccataatggtttcccagagtggg

SEQ ID NO: 12761 - DNA, 33 bp, Homo sapien
acatcacattgtaacacatcaggaacgtattct

SEQ ID NO: 12762 - DNA, 33 bp, Homo sapien
acatcacattgtaacagatcaggaacgtattct

SEQ ID NO: 12763 - DNA, 33 bp, Homo sapien
agctcccgttccactccgaaaaaagattacctt

SEQ ID NO: 12764 - DNA, 33 bp, Homo sapien
agctcccgttccactctgaaaaaagattacctt

SEQ ID NO: 12765 - DNA, 33 bp, Homo sapien
ttcatccattcccatcaccttgatttcaccttc

SEQ ID NO: 12766 - DNA, 33 bp, Homo sapien
ttcatccattcccatcgccttgatttcaccttc

SEQ ID NO: 12767 - DNA, 33 bp, Homo sapien
tttaaacctttgtatcacttagccgttgcgata

SEQ ID NO: 12768 - DNA, 33 bp, Homo sapien
tttaaacctttgtatcgcttagccgttgcgata

SEQ ID NO: 12769 - DNA, 33 bp, Homo sapien
aaggcagtggatttcactcaattacacatccaa

SEQ ID NO: 12770 - DNA, 33 bp, Homo sapien
aaggcagtggatttcattcaattacacatccaa

SEQ ID NO: 12771 - DNA, 33 bp, Homo sapien
tttaggaagcctaaagaactgaaccatgcagtc

SEQ ID NO: 12772 - DNA, 33 bp, Homo sapien
tttaggaagcctaaaggactgaaccatgcagtc

SEQ ID NO: 12773 - DNA, 33 bp, Homo sapien
atcatccctgggtccaatcatttttcaaatata

SEQ ID NO: 12774 - DNA, 33 bp, Homo sapien
atcatccctgggtccagtcatttttcaaatata

SEQ ID NO: 12775 - DNA, 33 bp, Homo sapien
gcaaagaccctaagaccctgaataagttgttta

SEQ ID NO: 12776 - DNA, 33 bp, Homo sapien
gcaaagaccctaagactctgaataagttgttta

SEQ ID NO: 12777 - DNA, 33 bp, Homo sapien
ccaagataggatgaggacagtggggagtcagca

SEQ ID NO: 12778 - DNA, 33 bp, Homo sapien
ccaagataggatgagggcagtggggagtcagca

SEQ ID NO: 12779 - DNA, 33 bp, Homo sapien
gatcttttcaaaagacagatccagtttatcttc

SEQ ID NO: 12780 - DNA, 33 bp, Homo sapien
gatcttttcaaaagacggatccagtttatcttc

SEQ ID NO: 12781 - DNA, 33 bp, Homo sapien
gccagatccctctaccaatactaatttccacac

SEQ ID NO: 12782 - DNA, 33 bp, Homo sapien
gccagatccctctacccatactaatttccacac

SEQ ID NO: 12783 - DNA, 33 bp, Homo sapien
ccatgagggctgtctacattgatagcgagttcc

SEQ ID NO: 12784 - DNA, 33 bp, Homo sapien
ccatgagggctgtctagattgatagcgagttcc

SEQ ID NO: 12785 - DNA, 33 bp, Homo sapien
cattccagtcgaggaaacacacaatgagcaaga

SEQ ID NO: 12786 - DNA, 33 bp, Homo sapien
cattccagtcgaggaagcacacaatgagcaaga

SEQ ID NO: 12787 - DNA, 33 bp, Homo sapien
ctccaaaattggctagaatttcggctcacgcgt

SEQ ID NO: 12788 - DNA, 33 bp, Homo sapien
ctccaaaattggctagcatttcggctcacgcgt

SEQ ID NO: 12789 - DNA, 33 bp, Homo sapien
gagtcacagatggacaagatccagtaagagtca

SEQ ID NO: 12790 - DNA, 33 bp, Homo sapien
gagtcacagatggacaggatccagtaagagtca

SEQ ID NO: 12791 - DNA, 33 bp, Homo sapien
ggtcatattccctgcccgcatgaagctcacagt

SEQ ID NO: 12792 - DNA, 33 bp, Homo sapien
ggtcatattccctgcctgcatgaagctcacagt

SEQ ID NO: 12793 - DNA, 33 bp, Homo sapien
aaacctctaagtgtcacgaaaccattctaggca

SEQ ID NO: 12794 - DNA, 33 bp, Homo sapien
aaacctctaagtgtcatgaaaccattctaggca

SEQ ID NO: 12795 - DNA, 33 bp, Homo sapien
ccctctgctacctttactaaactcctacaacac

SEQ ID NO: 12796 - DNA, 33 bp, Homo sapien
ccctctgctacctttattaaactcctacaacac

SEQ ID NO: 12797 - DNA, 33 bp, Homo sapien
tagggcatggcacagaagaggaactcatgggac

SEQ ID NO: 12798 - DNA, 33 bp, Homo sapien
tagggcatggcacagaggaggaactcatgggac

SEQ ID NO: 12799 - DNA, 33 bp, Homo sapien
ctggtgatggtttggacggtttctgaagccctc

SEQ ID NO: 12800 - DNA, 33 bp, Homo sapien
ctggtgatggtttggatggtttctgaagccctc

SEQ ID NO: 12801 - DNA, 33 bp, Homo sapien
aactgaagctcatagaagttagataacttgccc

SEQ ID NO: 12802 - DNA, 33 bp, Homo sapien
aactgaagctcatagaggttagataacttgccc

SEQ ID NO: 12803 - DNA, 33 bp, Homo sapien
ttcggggatctggcaacgtagacagttggtgtc

SEQ ID NO: 12804 - DNA, 33 bp, Homo sapien
ttcggggatctggcaatgtagacagttggtgtc

SEQ ID NO: 12805 - DNA, 33 bp, Homo sapien
gagtgggataacaagactcattatttaatcctc

SEQ ID NO: 12806 - DNA, 33 bp, Homo sapien
gagtgggataacaagattcattatttaatcctc

SEQ ID NO: 12807 - DNA, 33 bp, Homo sapien
ccacacattccacccacgcaccaaagtcttcct

SEQ ID NO: 12808 - DNA, 33 bp, Homo sapien
ccacacattccacccatgcaccaaagtcttcct

SEQ ID NO: 12809 - DNA, 33 bp, Homo sapien
ccagtaaataacagaaagtgacaattaacatat

SEQ ID NO: 12810 - DNA, 33 bp, Homo sapien
ccagtaaataacagaatgtgacaattaacatat

SEQ ID NO: 12811 - DNA, 33 bp, Homo sapien
gactagacctggcaaccgattctcccagctctc

SEQ ID NO: 12812 - DNA, 33 bp, Homo sapien
gactagacctggcaacggattctcccagctctc

SEQ ID NO: 12813 - DNA, 33 bp, Homo sapien
tactcacttccctacaactgccttcatttgtag

SEQ ID NO: 12814 - DNA, 33 bp, Homo sapien
tactcacttccctacacctgccttcatttgtag

SEQ ID NO: 12815 - DNA, 33 bp, Homo sapien
gggcttatatctcagcaacttctgtttatatct

SEQ ID NO: 12816 - DNA, 33 bp, Homo sapien
gggcttatatctcagcgacttctgtttatatct

SEQ ID NO: 12817 - DNA, 33 bp, Homo sapien
cctggccatgtgttgacaggaggaaatgtatga

SEQ ID NO: 12818 - DNA, 33 bp, Homo sapien
cctggccatgtgttgataggaggaaatgtatga

SEQ ID NO: 12819 - DNA, 33 bp, Homo sapien
cagtgaacccatctaaaactggtgctttctttt

SEQ ID NO: 12820 - DNA, 33 bp, Homo sapien
cagtgaacccatctaatactggtgctttctttt

SEQ ID NO: 12821 - DNA, 33 bp, Homo sapien
taatcactatacatcaactagagcacttctcag

SEQ ID NO: 12822 - DNA, 33 bp, Homo sapien
taatcactatacatcacctagagcacttctcag

SEQ ID NO: 12823 - DNA, 33 bp, Homo sapien
aaaggagaacagactccgagctgggaagacagg

SEQ ID NO: 12824 - DNA, 33 bp, Homo sapien
aaaggagaacagactctgagctgggaagacagg

SEQ ID NO: 12825 - DNA, 33 bp, Homo sapien
tgtatctctattaaaaaggattctctgtaatga

SEQ ID NO: 12826 - DNA, 33 bp, Homo sapien
tgtatctctattaaaagggattctctgtaatga

SEQ ID NO: 12827 - DNA, 33 bp, Homo sapien
accgagacttggggaccgccaagaaaaattaat

SEQ ID NO: 12828 - DNA, 33 bp, Homo sapien
accgagacttggggactgccaagaaaaattaat

SEQ ID NO: 12829 - DNA, 33 bp, Homo sapien
gagtctgggacaccaaaaacatgctctgcccct

SEQ ID NO: 12830 - DNA, 33 bp, Homo sapien
gagtctgggacaccaataacatgctctgcccct

SEQ ID NO: 12831 - DNA, 33 bp, Homo sapien
tgctgggcctcataagactgcacaactaagtcc

SEQ ID NO: 12832 - DNA, 33 bp, Homo sapien
tgctgggcctcataaggctgcacaactaagtcc

SEQ ID NO: 12833 - DNA, 33 bp, Homo sapien
gttgaagatgaaaacaaggtttagaagggacaa

SEQ ID NO: 12834 - DNA, 33 bp, Homo sapien
gttgaagatgaaaacagggtttagaagggacaa

SEQ ID NO: 12835 - DNA, 33 bp, Homo sapien
tctcctaacccgtcacgcttctttatggcattg

SEQ ID NO: 12836 - DNA, 33 bp, Homo sapien
tctcctaacccgtcactcttctttatggcattg

SEQ ID NO: 12837 - DNA, 33 bp, Homo sapien
aactgttccttgacagaacatatgcattttcaa

SEQ ID NO: 12838 - DNA, 33 bp, Homo sapien
aactgttccttgacaggacatatgcattttcaa

SEQ ID NO: 12839 - DNA, 33 bp, Homo sapien
ctcaagctccatcgtgcagaatctttgttgtca

SEQ ID NO: 12840 - DNA, 33 bp, Homo sapien
ctcaagctccatcgtgtagaatctttgttgtca

SEQ ID NO: 12841 - DNA, 33 bp, Homo sapien
ggttgtttaacgtccacctagaatgtaagaccc

SEQ ID NO: 12842 - DNA, 33 bp, Homo sapien
ggttgtttaacgtccatctagaatgtaagaccc

SEQ ID NO: 12843 - DNA, 33 bp, Homo sapien
tcaatggagctgtacaatagactttaaaaggaa

SEQ ID NO: 12844 - DNA, 33 bp, Homo sapien
tcaatggagctgtacagtagactttaaaaggaa

SEQ ID NO: 12845 - DNA, 33 bp, Homo sapien
gtctcactccaaaacaatgtaggtccaagtcct

SEQ ID NO: 12846 - DNA, 33 bp, Homo sapien
gtctcactccaaaacactgtaggtccaagtcct

SEQ ID NO: 12847 - DNA, 33 bp, Homo sapien
agtgttgttgcaaaaacagcatttgactatttg

SEQ ID NO: 12848 - DNA, 33 bp, Homo sapien
agtgttgttgcaaaaagagcatttgactatttg

SEQ ID NO: 12849 - DNA, 33 bp, Homo sapien
ccttatagaaggcacaaaaaaattccattgaaa

SEQ ID NO: 12850 - DNA, 33 bp, Homo sapien
ccttatagaaggcacataaaaattccattgaaa

SEQ ID NO: 12851 - DNA, 33 bp, Homo sapien
caccagagcacacacacagcaagaattcctcct

SEQ ID NO: 12852 - DNA, 33 bp, Homo sapien
caccagagcacacacagagcaagaattcctcct

SEQ ID NO: 12853 - DNA, 33 bp, Homo sapien
gagttgagagcctcagcccttcagcttcaagga

SEQ ID NO: 12854 - DNA, 33 bp, Homo sapien
gagttgagagcctcagtccttcagcttcaagga

SEQ ID NO: 12855 - DNA, 33 bp, Homo sapien
aagtgaaagcctaaaaaccatcctcatgtacca

SEQ ID NO: 12856 - DNA, 33 bp, Homo sapien
aagtgaaagcctaaaagccatcctcatgtacca

SEQ ID NO: 12857 - DNA, 33 bp, Homo sapien
gaagtttgacctctctaaacagagtgaagcatt

SEQ ID NO: 12858 - DNA, 33 bp, Homo sapien
gaagtttgacctctctgaacagagtgaagcatt

SEQ ID NO: 12859 - DNA, 33 bp, Homo sapien
tgcactccagaaagaaagctagacgttatccta

SEQ ID NO: 12860 - DNA, 33 bp, Homo sapien
tgcactccagaaagaacgctagacgttatccta

SEQ ID NO: 12861 - DNA, 33 bp, Homo sapien
gggtagagagggcccaaaagtgtattcagcttc

SEQ ID NO: 12862 - DNA, 33 bp, Homo sapien
gggtagagagggcccagaagtgtattcagcttc

SEQ ID NO: 12863 - DNA, 33 bp, Homo sapien
aagctagaatggtccacgtgataatagattcga

SEQ ID NO: 12864 - DNA, 33 bp, Homo sapien
aagctagaatggtccatgtgataatagattcga

SEQ ID NO: 12865 - DNA, 33 bp, Homo sapien
acaaacaagcaaatgcaagtttatacggatatc

SEQ ID NO: 12866 - DNA, 33 bp, Homo sapien
acaaacaagcaaatgcgagtttatacggatatc

SEQ ID NO: 12867 - DNA, 33 bp, Homo sapien
gtaaacaaatacagaaagttcagatagagacag

SEQ ID NO: 12868 - DNA, 33 bp, Homo sapien
gtaaacaaatacagaaggttcagatagagacag

SEQ ID NO: 12869 - DNA, 33 bp, Homo sapien
ggcaaaaagaggatcacataggctgagcagagt

SEQ ID NO: 12870 - DNA, 33 bp, Homo sapien
ggcaaaaagaggatcagataggctgagcagagt

SEQ ID NO: 12871 - DNA, 33 bp, Homo sapien
gaagaagtgattaaccagagagaaatgtgtagg

SEQ ID NO: 12872 - DNA, 33 bp, Homo sapien
gaagaagtgattaaccggagagaaatgtgtagg

SEQ ID NO: 12873 - DNA, 33 bp, Homo sapien
tcagtttcttctgttcactagtcctcttgcttc

SEQ ID NO: 12874 - DNA, 33 bp, Homo sapien
tcagtttcttctgttcgctagtcctcttgcttc

SEQ ID NO: 12875 - DNA, 33 bp, Homo sapien
tctgtaaacaaaacacaattcatttagaaacca

SEQ ID NO: 12876 - DNA, 33 bp, Homo sapien
tctgtaaacaaaacacgattcatttagaaacca

SEQ ID NO: 12877 - DNA, 33 bp, Homo sapien
tatggcagtaacagtacaaagaatgggaagaag

SEQ ID NO: 12878 - DNA, 33 bp, Homo sapien
tatggcagtaacagtagaaagaatgggaagaag

SEQ ID NO: 12879 - DNA, 33 bp, Homo sapien
ttggtggccagcacaaatattaaggaaagttgt

SEQ ID NO: 12880 - DNA, 33 bp, Homo sapien
ttggtggccagcacaattattaaggaaagttgt

SEQ ID NO: 12881 - DNA, 33 bp, Homo sapien
acattttgttattcccggaccttaccatatttt

SEQ ID NO: 12882 - DNA, 33 bp, Homo sapien
acattttgttattccctgaccttaccatatttt

SEQ ID NO: 12883 - DNA, 33 bp, Homo sapien
ggtagaaggcagttctcaaatatattcctttct

SEQ ID NO: 12884 - DNA, 33 bp, Homo sapien
ggtagaaggcagttctgaaatatattcctttct

SEQ ID NO: 12885 - DNA, 33 bp, Homo sapien
ctctctgcctgactaacggctgcttagcacttt

SEQ ID NO: 12886 - DNA, 33 bp, Homo sapien
ctctctgcctgactaatggctgcttagcacttt

SEQ ID NO: 12887 - DNA, 33 bp, Homo sapien
ctggacatgtttaggacgcttgacctctgccgg

SEQ ID NO: 12888 - DNA, 33 bp, Homo sapien
ctggacatgtttaggatgcttgacctctgccgg

SEQ ID NO: 12889 - DNA, 33 bp, Homo sapien
gtctccaaatcatccccatcacagcacttcctt

SEQ ID NO: 12890 - DNA, 33 bp, Homo sapien
gtctccaaatcatccctatcacagcacttcctt

SEQ ID NO: 12891 - DNA, 33 bp, Homo sapien
ccatggggagcccatccactggtcagggagaga

SEQ ID NO: 12892 - DNA, 33 bp, Homo sapien
ccatggggagcccatcgactggtcagggagaga

SEQ ID NO: 12893 - DNA, 33 bp, Homo sapien
ccaacctgtgcaaaacggttttatgtgtgtgtg

SEQ ID NO: 12894 - DNA, 33 bp, Homo sapien
ccaacctgtgcaaaactgttttatgtgtgtgtg

SEQ ID NO: 12895 - DNA, 33 bp, Homo sapien
gatgaaaggagttctaaggtagtggtgacgttt

SEQ ID NO: 12896 - DNA, 33 bp, Homo sapien
gatgaaaggagttctatggtagtggtgacgttt

SEQ ID NO: 12897 - DNA, 33 bp, Homo sapien
gtctgtatgtggcaaacggctagaaaggacata

SEQ ID NO: 12898 - DNA, 33 bp, Homo sapien
gtctgtatgtggcaaagggctagaaaggacata

SEQ ID NO: 12899 - DNA, 33 bp, Homo sapien
agaaggaggtcggagacatagcctcaggccagt

SEQ ID NO: 12900 - DNA, 33 bp, Homo sapien
agaaggaggtcggagatatagcctcaggccagt

SEQ ID NO: 12901 - DNA, 33 bp, Homo sapien
tctcaggggatcaaccaactgtcagctggggag

SEQ ID NO: 12902 - DNA, 33 bp, Homo sapien
tctcaggggatcaaccgactgtcagctggggag

SEQ ID NO: 12903 - DNA, 33 bp, Homo sapien
ggggaccctggaaagccgatggtgtagttccag

SEQ ID NO: 12904 - DNA, 33 bp, Homo sapien
ggggaccctggaaagctgatggtgtagttccag

SEQ ID NO: 12905 - DNA, 33 bp, Homo sapien
tgcctcttataggtcaactctgatgtcaccagc

SEQ ID NO: 12906 - DNA, 33 bp, Homo sapien
tgcctcttataggtcagctctgatgtcaccagc

SEQ ID NO: 12907 - DNA, 33 bp, Homo sapien
aggccatcttgctggacagaaacaggattggga

SEQ ID NO: 12908 - DNA, 33 bp, Homo sapien
aggccatcttgctggatagaaacaggattggga

SEQ ID NO: 12909 - DNA, 33 bp, Homo sapien
gatgcaaaggccagaggcagtaaaagacaggtt

SEQ ID NO: 12910 - DNA, 33 bp, Homo sapien
gatgcaaaggccagagtcagtaaaagacaggtt

SEQ ID NO: 12911 - DNA, 33 bp, Homo sapien
tcagtggacctatcacagaccaaggacttgtat

SEQ ID NO: 12912 - DNA, 33 bp, Homo sapien
tcagtggacctatcacggaccaaggacttgtat

SEQ ID NO: 12913 - DNA, 33 bp, Homo sapien
gtctgaattcttcatgccaaatacaagtccttg

SEQ ID NO: 12914 - DNA, 33 bp, Homo sapien
gtctgaattcttcatgtcaaatacaagtccttg

SEQ ID NO: 12915 - DNA, 33 bp, Homo sapien
cacatggatagttacacctcttcccagcacaaa

SEQ ID NO: 12916 - DNA, 33 bp, Homo sapien
cacatggatagttacatctcttcccagcacaaa

SEQ ID NO: 12917 - DNA, 33 bp, Homo sapien
gcaggctgggggctcacacccgtgacaacatac

SEQ ID NO: 12918 - DNA, 33 bp, Homo sapien
gcaggctgggggctcatacccgtgacaacatac

SEQ ID NO: 12919 - DNA, 33 bp, Homo sapien
tttaaagtcatccccaaatagtctgcaaatggt

SEQ ID NO: 12920 - DNA, 33 bp, Homo sapien
tttaaagtcatccccagatagtctgcaaatggt

SEQ ID NO: 12921 - DNA, 33 bp, Homo sapien
acctacaccctgcaaacaacgtgttcctctgtg

SEQ ID NO: 12922 - DNA, 33 bp, Homo sapien
acctacaccctgcaaataacgtgttcctctgtg

SEQ ID NO: 12923 - DNA, 33 bp, Homo sapien
tggactctatggtgtgaagatccctagaacatt

SEQ ID NO: 12924 - DNA, 33 bp, Homo sapien
tggactctatggtgtggagatccctagaacatt

SEQ ID NO: 12925 - DNA, 33 bp, Homo sapien
tttcaggtactaggggaaatttgttctggactc

SEQ ID NO: 12926 - DNA, 33 bp, Homo sapien
tttcaggtactaggggcaatttgttctggactc

SEQ ID NO: 12927 - DNA, 33 bp, Homo sapien
tgctctggccctatgaccccaacaatagaattg

SEQ ID NO: 12928 - DNA, 33 bp, Homo sapien
tgctctggccctatgatcccaacaatagaattg

SEQ ID NO: 12929 - DNA, 33 bp, Homo sapien
tgctcgtcaaaggccacagatcaaatgacaggt

SEQ ID NO: 12930 - DNA, 33 bp, Homo sapien
tgctcgtcaaaggccatagatcaaatgacaggt

SEQ ID NO: 12931 - DNA, 33 bp, Homo sapien
gaatgcctttcctcccaattggactcctagcag

SEQ ID NO: 12932 - DNA, 33 bp, Homo sapien
gaatgcctttcctcccgattggactcctagcag

SEQ ID NO: 12933 - DNA, 33 bp, Homo sapien
taaatatgttgggtgacggaatcaggatctcat

SEQ ID NO: 12934 - DNA, 33 bp, Homo sapien
taaatatgttgggtgatggaatcaggatctcat

SEQ ID NO: 12935 - DNA, 33 bp, Homo sapien
tcacatgaaacaaagcaagaatcagagaacaaa

SEQ ID NO: 12936 - DNA, 33 bp, Homo sapien
tcacatgaaacaaagcgagaatcagagaacaaa

SEQ ID NO: 12937 - DNA, 33 bp, Homo sapien
catgggctgaatgtgactcacagatatatttga

SEQ ID NO: 12938 - DNA, 33 bp, Homo sapien
catgggctgaatgtgattcacagatatatttga

SEQ ID NO: 12939 - DNA, 33 bp, Homo sapien
aaagggtcaaaccttacagtgctctcatatcct

SEQ ID NO: 12940 - DNA, 33 bp, Homo sapien
aaagggtcaaaccttatagtgctctcatatcct

SEQ ID NO: 12941 - DNA, 33 bp, Homo sapien
gcacttcttgccacaaactcagtgctttggcct

SEQ ID NO: 12942 - DNA, 33 bp, Homo sapien
gcacttcttgccacaatctcagtgctttggcct

SEQ ID NO: 12943 - DNA, 33 bp, Homo sapien
tgcacctatttatttacgccctgttgtctacgg

SEQ ID NO: 12944 - DNA, 33 bp, Homo sapien
tgcacctatttatttatgccctgttgtctacgg

SEQ ID NO: 12945 - DNA, 33 bp, Homo sapien
gcacatactcttgggagctgttctgcttggccc

SEQ ID NO: 12946 - DNA, 33 bp, Homo sapien
gcacatactcttgggatctgttctgcttggccc

SEQ ID NO: 12947 - DNA, 33 bp, Homo sapien
aatagctaatgggaaccggtgacttcaagaggt

SEQ ID NO: 12948 - DNA, 33 bp, Homo sapien
aatagctaatgggaactggtgacttcaagaggt

SEQ ID NO: 12949 - DNA, 33 bp, Homo sapien
aaatgctgaatgaccccacttcctaatagctaa

SEQ ID NO: 12950 - DNA, 33 bp, Homo sapien
aaatgctgaatgaccctacttcctaatagctaa

SEQ ID NO: 12951 - DNA, 33 bp, Homo sapien
aatgagatggaacaaacgtagctgtgcctgtcc

SEQ ID NO: 12952 - DNA, 33 bp, Homo sapien
aatgagatggaacaaatgtagctgtgcctgtcc

SEQ ID NO: 12953 - DNA, 33 bp, Homo sapien
aggaatgttttggttacaggggaaatgatgtgc

SEQ ID NO: 12954 - DNA, 33 bp, Homo sapien
aggaatgttttggttagaggggaaatgatgtgc

SEQ ID NO: 12955 - DNA, 33 bp, Homo sapien
gcaggaaacatggaaaaaagaaaaccacttgga

SEQ ID NO: 12956 - DNA, 33 bp, Homo sapien
gcaggaaacatggaaacaagaaaaccacttgga

SEQ ID NO: 12957 - DNA, 33 bp, Homo sapien
agcaaacttctcagagcacatgggcaattttcc

SEQ ID NO: 12958 - DNA, 33 bp, Homo sapien
agcaaacttctcagaggacatgggcaattttcc

SEQ ID NO: 12959 - DNA, 33 bp, Homo sapien
tgatacttgatggctacggtctgagagtcaaag

SEQ ID NO: 12960 - DNA, 33 bp, Homo sapien
tgatacttgatggctatggtctgagagtcaaag

SEQ ID NO: 12961 - DNA, 33 bp, Homo sapien
attctggtatttaatacagaggtctcagccatg

SEQ ID NO: 12962 - DNA, 33 bp, Homo sapien
attctggtatttaatatagaggtctcagccatg

SEQ ID NO: 12963 - DNA, 33 bp, Homo sapien
gtctgttacacgagctcaatcaatggatatagg

SEQ ID NO: 12964 - DNA, 33 bp, Homo sapien
gtctgttacacgagctgaatcaatggatatagg

SEQ ID NO: 12965 - DNA, 33 bp, Homo sapien
agagaaacagagaagaagaaggacatctggaca

SEQ ID NO: 12966 - DNA, 33 bp, Homo sapien
agagaaacagagaagaggaaggacatctggaca

SEQ ID NO: 12967 - DNA, 33 bp, Homo sapien
ttttctcacctgtcaactgggagtggtcagtcc

SEQ ID NO: 12968 - DNA, 33 bp, Homo sapien
ttttctcacctgtcaattgggagtggtcagtcc

SEQ ID NO: 12969 - DNA, 33 bp, Homo sapien
gtttattatatgcaagcaagaaattatagtgaa

SEQ ID NO: 12970 - DNA, 33 bp, Homo sapien
gtttattatatgcaagtaagaaattatagtgaa

SEQ ID NO: 12971 - DNA, 33 bp, Homo sapien
tgctgatggagaattcaaagtcttgccataaat

SEQ ID NO: 12972 - DNA, 33 bp, Homo sapien
tgctgatggagaattcgaagtcttgccataaat

SEQ ID NO: 12973 - DNA, 33 bp, Homo sapien
gggctggctaggggctcacagaaatattcttcc

SEQ ID NO: 12974 - DNA, 33 bp, Homo sapien
gggctggctaggggctgacagaaatattcttcc

SEQ ID NO: 12975 - DNA, 33 bp, Homo sapien
gggtatccttctcccccacaaaggaagcaatca

SEQ ID NO: 12976 - DNA, 33 bp, Homo sapien
gggtatccttctccccgacaaaggaagcaatca

SEQ ID NO: 12977 - DNA, 33 bp, Homo sapien
agtgtacaaagatatacgtttccagggaaacta

SEQ ID NO: 12978 - DNA, 33 bp, Homo sapien
agtgtacaaagatatatgtttccagggaaacta

SEQ ID NO: 12979 - DNA, 33 bp, Homo sapien
ctgtgaatagaaggagccagcttgggcagggag

SEQ ID NO: 12980 - DNA, 33 bp, Homo sapien
ctgtgaatagaaggagtcagcttgggcagggag

SEQ ID NO: 12981 - DNA, 33 bp, Homo sapien
tggaagtgaaaattcacgtttgacttcctttcc

SEQ ID NO: 12982 - DNA, 33 bp, Homo sapien
tggaagtgaaaattcatgtttgacttcctttcc

SEQ ID NO: 12983 - DNA, 33 bp, Homo sapien
cacctctcaatgggaagaattcaaagaatctgt

SEQ ID NO: 12984 - DNA, 33 bp, Homo sapien
cacctctcaatgggaataattcaaagaatctgt

SEQ ID NO: 12985 - DNA, 33 bp, Homo sapien
gtaaatctgcaagtaagaggcagatagagatca

SEQ ID NO: 12986 - DNA, 33 bp, Homo sapien
gtaaatctgcaagtaataggcagatagagatca

SEQ ID NO: 12987 - DNA, 33 bp, Homo sapien
agaagtctggtgcagaactcactgggccaaaat

SEQ ID NO: 12988 - DNA, 33 bp, Homo sapien
agaagtctggtgcagagctcactgggccaaaat

SEQ ID NO: 12989 - DNA, 33 bp, Homo sapien
tgagtgttatcactaacgcttcagaatgggaca

SEQ ID NO: 12990 - DNA, 33 bp, Homo sapien
tgagtgttatcactaatgcttcagaatgggaca

SEQ ID NO: 12991 - DNA, 33 bp, Homo sapien
aaagaaagatattagaatcctcatgattaggaa

SEQ ID NO: 12992 - DNA, 33 bp, Homo sapien
aaagaaagatattagagtcctcatgattaggaa

SEQ ID NO: 12993 - DNA, 33 bp, Homo sapien
atccaggagagtgaggcaaatgtatagctgact

SEQ ID NO: 12994 - DNA, 33 bp, Homo sapien
atccaggagagtgagggaaatgtatagctgact

SEQ ID NO: 12995 - DNA, 33 bp, Homo sapien
tctttgtcataaccccaattctggctttcctta

SEQ ID NO: 12996 - DNA, 33 bp, Homo sapien
tctttgtcataaccccgattctggctttcctta

SEQ ID NO: 12997 - DNA, 33 bp, Homo sapien
aaggagatcctatgaaacttgggatttgtgaaa

SEQ ID NO: 12998 - DNA, 33 bp, Homo sapien
aaggagatcctatgaagcttgggatttgtgaaa

SEQ ID NO: 12999 - DNA, 33 bp, Homo sapien
tatatacttacctgtaacttacatgtatatgtg

SEQ ID NO: 13000 - DNA, 33 bp, Homo sapien
tatatacttacctgtagcttacatgtatatgtg

SEQ ID NO: 13001 - DNA, 33 bp, Homo sapien
acataatgcaattacacaaatttttgttgttca

SEQ ID NO: 13002 - DNA, 33 bp, Homo sapien
acataatgcaattacagaaatttttgttgttca

SEQ ID NO: 13003 - DNA, 33 bp, Homo sapien
aattttagatatttgaataaagcaaagcatgaa

SEQ ID NO: 13004 - DNA, 33 bp, Homo sapien
aattttagatatttgagtaaagcaaagcatgaa

SEQ ID NO: 13005 - DNA, 33 bp, Homo sapien
gtgtattggccacatcaccaagacccactccca

SEQ ID NO: 13006 - DNA, 33 bp, Homo sapien
gtgtattggccacatcgccaagacccactccca

SEQ ID NO: 13007 - DNA, 33 bp, Homo sapien
tgtttactacaggccaatgcttctcaaatttca

SEQ ID NO: 13008 - DNA, 33 bp, Homo sapien
tgtttactacaggccagtgcttctcaaatttca

SEQ ID NO: 13009 - DNA, 33 bp, Homo sapien
tcgagatgctgtaacaccacatagaaataatcc

SEQ ID NO: 13010 - DNA, 33 bp, Homo sapien
tcgagatgctgtaacatcacatagaaataatcc

SEQ ID NO: 13011 - DNA, 33 bp, Homo sapien
tttttacagacctttaggattaaaattagctgc

SEQ ID NO: 13012 - DNA, 33 bp, Homo sapien
tttttacagacctttatgattaaaattagctgc

SEQ ID NO: 13013 - DNA, 33 bp, Homo sapien
tgatgagtattcagtaggtgtcaggcatggtgc

SEQ ID NO: 13014 - DNA, 33 bp, Homo sapien
tgatgagtattcagtatgtgtcaggcatggtgc

SEQ ID NO: 13015 - DNA, 33 bp, Homo sapien
ccctctcaattgcgcaccccagagttcctccga

SEQ ID NO: 13016 - DNA, 33 bp, Homo sapien
ccctctcaattgcgcatcccagagttcctccga

SEQ ID NO: 13017 - DNA, 33 bp, Homo sapien
gacgagagggacatgacacagtttctgcttccc

SEQ ID NO: 13018 - DNA, 33 bp, Homo sapien
gacgagagggacatgatacagtttctgcttccc

SEQ ID NO: 13019 - DNA, 33 bp, Homo sapien
gactttgagaggagccaaatattcaagacagag

SEQ ID NO: 13020 - DNA, 33 bp, Homo sapien
gactttgagaggagccgaatattcaagacagag

SEQ ID NO: 13021 - DNA, 33 bp, Homo sapien
gcctatcatttctcaccggaaccactgcaacag

SEQ ID NO: 13022 - DNA, 33 bp, Homo sapien
gcctatcatttctcactggaaccactgcaacag

SEQ ID NO: 13023 - DNA, 33 bp, Homo sapien
cctgtaagagctgtcaaccctttccctactgag

SEQ ID NO: 13024 - DNA, 33 bp, Homo sapien
cctgtaagagctgtcacccctttccctactgag

SEQ ID NO: 13025 - DNA, 33 bp, Homo sapien
ctatctggaagtggaactaaactcatttacatg

SEQ ID NO: 13026 - DNA, 33 bp, Homo sapien
ctatctggaagtggaattaaactcatttacatg

SEQ ID NO: 13027 - DNA, 33 bp, Homo sapien
tgcaggctcccagtgaagctggaactcccaggc

SEQ ID NO: 13028 - DNA, 33 bp, Homo sapien
tgcaggctcccagtgaggctggaactcccaggc

SEQ ID NO: 13029 - DNA, 33 bp, Homo sapien
gaatgatgtgataaataaaaagcccatgtttaa

SEQ ID NO: 13030 - DNA, 33 bp, Homo sapien
gaatgatgtgataaattaaaagcccatgtttaa

SEQ ID NO: 13031 - DNA, 33 bp, Homo sapien
tgaaggagttttagagaccttaagacattaatt

SEQ ID NO: 13032 - DNA, 33 bp, Homo sapien
tgaaggagttttagagcccttaagacattaatt

SEQ ID NO: 13033 - DNA, 33 bp, Homo sapien
cttctgcagctttgcactacaggtgacctttga

SEQ ID NO: 13034 - DNA, 33 bp, Homo sapien
cttctgcagctttgcagtacaggtgacctttga

SEQ ID NO: 13035 - DNA, 33 bp, Homo sapien
aaaagtgaatgcatagacaaccctttccctaaa

SEQ ID NO: 13036 - DNA, 33 bp, Homo sapien
aaaagtgaatgcataggcaaccctttccctaaa

SEQ ID NO: 13037 - DNA, 33 bp, Homo sapien
gagtggtgccccagaacagaaagaatcttttga

SEQ ID NO: 13038 - DNA, 33 bp, Homo sapien
gagtggtgccccagaatagaaagaatcttttga

SEQ ID NO: 13039 - DNA, 33 bp, Homo sapien
ttcgatggacttgaaaaagatgccctagcaact

SEQ ID NO: 13040 - DNA, 33 bp, Homo sapien
ttcgatggacttgaaatagatgccctagcaact

SEQ ID NO: 13041 - DNA, 33 bp, Homo sapien
ccacagaggattcttacgattcagggaacgtct

SEQ ID NO: 13042 - DNA, 33 bp, Homo sapien
ccacagaggattcttatgattcagggaacgtct

SEQ ID NO: 13043 - DNA, 33 bp, Homo sapien
gccttttttgatggacacttgaagggatgctca

SEQ ID NO: 13044 - DNA, 33 bp, Homo sapien
gccttttttgatggacgcttgaagggatgctca

SEQ ID NO: 13045 - DNA, 33 bp, Homo sapien
agcactgaagggcctgacactttcatggcacca

SEQ ID NO: 13046 - DNA, 33 bp, Homo sapien
agcactgaagggcctggcactttcatggcacca

SEQ ID NO: 13047 - DNA, 33 bp, Homo sapien
acagacactaacaaggcaattacatactgagtg

SEQ ID NO: 13048 - DNA, 33 bp, Homo sapien
acagacactaacaagggaattacatactgagtg

SEQ ID NO: 13049 - DNA, 33 bp, Homo sapien
aatcctgctgaagataacacatgtggtaagcat

SEQ ID NO: 13050 - DNA, 33 bp, Homo sapien
aatcctgctgaagatagcacatgtggtaagcat

SEQ ID NO: 13051 - DNA, 33 bp, Homo sapien
tcaaaaaatttttcaaatcaaactgcggctcca

SEQ ID NO: 13052 - DNA, 33 bp, Homo sapien
tcaaaaaatttttcaagtcaaactgcggctcca

SEQ ID NO: 13053 - DNA, 33 bp, Homo sapien
ctggagagtctttaaacgtctaaatccctatac

SEQ ID NO: 13054 - DNA, 33 bp, Homo sapien
ctggagagtctttaaatgtctaaatccctatac

SEQ ID NO: 13055 - DNA, 33 bp, Homo sapien
agaaggctgttacaggaatgacctgggttcagg

SEQ ID NO: 13056 - DNA, 33 bp, Homo sapien
agaaggctgttacaggtatgacctgggttcagg

SEQ ID NO: 13057 - DNA, 33 bp, Homo sapien
ggaagcctcatttttacctctatattctgaccc

SEQ ID NO: 13058 - DNA, 33 bp, Homo sapien
ggaagcctcatttttatctctatattctgaccc

SEQ ID NO: 13059 - DNA, 33 bp, Homo sapien
gctttcccaggtgaacgaaccctagctctgtct

SEQ ID NO: 13060 - DNA, 33 bp, Homo sapien
gctttcccaggtgaactaaccctagctctgtct

SEQ ID NO: 13061 - DNA, 33 bp, Homo sapien
gaaaatgtactgcctccacagctttggaagatg

SEQ ID NO: 13062 - DNA, 33 bp, Homo sapien
gaaaatgtactgcctctacagctttggaagatg

SEQ ID NO: 13063 - DNA, 33 bp, Homo sapien
cttatctccatgcaaactggcatgcaaactttg

SEQ ID NO: 13064 - DNA, 33 bp, Homo sapien
cttatctccatgcaaattggcatgcaaactttg

SEQ ID NO: 13065 - DNA, 33 bp, Homo sapien
ctggcttaaatgagtaaagatactgaggaaatg

SEQ ID NO: 13066 - DNA, 33 bp, Homo sapien
ctggcttaaatgagtagagatactgaggaaatg

SEQ ID NO: 13067 - DNA, 33 bp, Homo sapien
acaatttaaacactgtcaacaattctatctgct

SEQ ID NO: 13068 - DNA, 33 bp, Homo sapien
acaatttaaacactgttaacaattctatctgct

SEQ ID NO: 13069 - DNA, 33 bp, Homo sapien
tgataggctctacagacggtgccttcacgtaca

SEQ ID NO: 13070 - DNA, 33 bp, Homo sapien
tgataggctctacagagggtgccttcacgtaca

SEQ ID NO: 13071 - DNA, 33 bp, Homo sapien
aatgttagctgctcatcaactaggactcaagga

SEQ ID NO: 13072 - DNA, 33 bp, Homo sapien
aatgttagctgctcatgaactaggactcaagga

SEQ ID NO: 13073 - DNA, 33 bp, Homo sapien
tataatggatgtaaaagtgccttgcaaactgta

SEQ ID NO: 13074 - DNA, 33 bp, Homo sapien
tataatggatgtaaaattgccttgcaaactgta

SEQ ID NO: 13075 - DNA, 33 bp, Homo sapien
gggtcctagttgcacaatggcctttctgtgctg

SEQ ID NO: 13076 - DNA, 33 bp, Homo sapien
gggtcctagttgcacactggcctttctgtgctg

SEQ ID NO: 13077 - DNA, 33 bp, Homo sapien
tctttgcaggaggtgaaattttggtacctctgt

SEQ ID NO: 13078 - DNA, 33 bp, Homo sapien
tctttgcaggaggtgagattttggtacctctgt

SEQ ID NO: 13079 - DNA, 33 bp, Homo sapien
tgtccagtgagtagagccgagtccaatccgggc

SEQ ID NO: 13080 - DNA, 33 bp, Homo sapien
tgtccagtgagtagagtcgagtccaatccgggc

SEQ ID NO: 13081 - DNA, 33 bp, Homo sapien
aacagagaagtctcagaaaaggctaacaatttt

SEQ ID NO: 13082 - DNA, 33 bp, Homo sapien
aacagagaagtctcagcaaaggctaacaatttt

SEQ ID NO: 13083 - DNA, 33 bp, Homo sapien
gatccgacttacttgaagactgcctaacttctg

SEQ ID NO: 13084 - DNA, 33 bp, Homo sapien
gatccgacttacttgacgactgcctaacttctg

SEQ ID NO: 13085 - DNA, 33 bp, Homo sapien
agtaagtcggatctgcactgcaaaaggagcttc

SEQ ID NO: 13086 - DNA, 33 bp, Homo sapien
agtaagtcggatctgcgctgcaaaaggagcttc

SEQ ID NO: 13087 - DNA, 33 bp, Homo sapien
cagaattgttgtcacccgagatacggggtcttc

SEQ ID NO: 13088 - DNA, 33 bp, Homo sapien
cagaattgttgtcacctgagatacggggtcttc

SEQ ID NO: 13089 - DNA, 33 bp, Homo sapien
taaagatactaaaagcaaaaatacatcacgtag

SEQ ID NO: 13090 - DNA, 33 bp, Homo sapien
taaagatactaaaagccaaaatacatcacgtag

SEQ ID NO: 13091 - DNA, 33 bp, Homo sapien
atctttactccttgggaagagagttactaattt

SEQ ID NO: 13092 - DNA, 33 bp, Homo sapien
atctttactccttggggagagagttactaattt

SEQ ID NO: 13093 - DNA, 33 bp, Homo sapien
taacaacccagtacacacataaatcaaacaata

SEQ ID NO: 13094 - DNA, 33 bp, Homo sapien
taacaacccagtacacgcataaatcaaacaata

SEQ ID NO: 13095 - DNA, 33 bp, Homo sapien
agcaggaatcaccccaaatttttttcagcgaga

SEQ ID NO: 13096 - DNA, 33 bp, Homo sapien
agcaggaatcaccccatatttttttcagcgaga

SEQ ID NO: 13097 - DNA, 33 bp, Homo sapien
gcctttttgtatctaaatatcatacataatcat

SEQ ID NO: 13098 - DNA, 33 bp, Homo sapien
gcctttttgtatctaagtatcatacataatcat

SEQ ID NO: 13099 - DNA, 33 bp, Homo sapien
ggaataatgtcttcaaatccttcccattcaaag

SEQ ID NO: 13100 - DNA, 33 bp, Homo sapien
ggaataatgtcttcaagtccttcccattcaaag

SEQ ID NO: 13101 - DNA, 33 bp, Homo sapien
caaagatgaataatgcagaagccctgtcctcag

SEQ ID NO: 13102 - DNA, 33 bp, Homo sapien
caaagatgaataatgcggaagccctgtcctcag

SEQ ID NO: 13103 - DNA, 33 bp, Homo sapien
ttattttggagtcacaaagacacttggcttttt

SEQ ID NO: 13104 - DNA, 33 bp, Homo sapien
ttattttggagtcacagagacacttggcttttt

SEQ ID NO: 13105 - DNA, 33 bp, Homo sapien
agcaaaggcagaacaacgaggtagtagcaactg

SEQ ID NO: 13106 - DNA, 33 bp, Homo sapien
agcaaaggcagaacaatgaggtagtagcaactg

SEQ ID NO: 13107 - DNA, 33 bp, Homo sapien
gagtgtcaaaggatcacagagcaaaggcagaac

SEQ ID NO: 13108 - DNA, 33 bp, Homo sapien
gagtgtcaaaggatcatagagcaaaggcagaac

SEQ ID NO: 13109 - DNA, 33 bp, Homo sapien
gccaactctctattcacgctccctcaaaagtaa

SEQ ID NO: 13110 - DNA, 33 bp, Homo sapien
gccaactctctattcatgctccctcaaaagtaa

SEQ ID NO: 13111 - DNA, 33 bp, Homo sapien
acatttgggcgcaaaactaggagtgcctgccct

SEQ ID NO: 13112 - DNA, 33 bp, Homo sapien
acatttgggcgcaaaagtaggagtgcctgccct

SEQ ID NO: 13113 - DNA, 33 bp, Homo sapien
tctcctccgactaccccagccaaatgccacaat

SEQ ID NO: 13114 - DNA, 33 bp, Homo sapien
tctcctccgactaccctagccaaatgccacaat

SEQ ID NO: 13115 - DNA, 33 bp, Homo sapien
cagattcaagtccacaaggtgaccaaactggct

SEQ ID NO: 13116 - DNA, 33 bp, Homo sapien
cagattcaagtccacagggtgaccaaactggct

SEQ ID NO: 13117 - DNA, 33 bp, Homo sapien
atccgtccagatgcacgccttgtagtattagtt

SEQ ID NO: 13118 - DNA, 33 bp, Homo sapien
atccgtccagatgcactccttgtagtattagtt

SEQ ID NO: 13119 - DNA, 33 bp, Homo sapien
tgaggggggcgtctcaataatggatttgggcaa

SEQ ID NO: 13120 - DNA, 33 bp, Homo sapien
tgaggggggcgtctcagtaatggatttgggcaa

SEQ ID NO: 13121 - DNA, 33 bp, Homo sapien
accaaattagtctagacgatagtagtattgaat

SEQ ID NO: 13122 - DNA, 33 bp, Homo sapien
accaaattagtctagaggatagtagtattgaat

SEQ ID NO: 13123 - DNA, 33 bp, Homo sapien
ttaaattcttgtactccctgatggtcttcccct

SEQ ID NO: 13124 - DNA, 33 bp, Homo sapien
ttaaattcttgtactctctgatggtcttcccct

SEQ ID NO: 13125 - DNA, 33 bp, Homo sapien
gtttcttcgcctggaacgatcccacccacttgc

SEQ ID NO: 13126 - DNA, 33 bp, Homo sapien
gtttcttcgcctggaatgatcccacccacttgc

SEQ ID NO: 13127 - DNA, 33 bp, Homo sapien
aaccctgactgcctaaaatgactgaaaggaagc

SEQ ID NO: 13128 - DNA, 33 bp, Homo sapien
aaccctgactgcctaagatgactgaaaggaagc

SEQ ID NO: 13129 - DNA, 33 bp, Homo sapien
acttgttgaccattcaatagtcttggcactctt

SEQ ID NO: 13130 - DNA, 33 bp, Homo sapien
acttgttgaccattcagtagtcttggcactctt

SEQ ID NO: 13131 - DNA, 33 bp, Homo sapien
ttctccataaactcaaagagaattgcctgccag

SEQ ID NO: 13132 - DNA, 33 bp, Homo sapien
ttctccataaactcaaggagaattgcctgccag

SEQ ID NO: 13133 - DNA, 33 bp, Homo sapien
actggccagcaagctaaagacccagggaagagt

SEQ ID NO: 13134 - DNA, 33 bp, Homo sapien
actggccagcaagctagagacccagggaagagt

SEQ ID NO: 13135 - DNA, 33 bp, Homo sapien
gatgagtgctccccaccactctatctcatttca

SEQ ID NO: 13136 - DNA, 33 bp, Homo sapien
gatgagtgctccccactactctatctcatttca

SEQ ID NO: 13137 - DNA, 33 bp, Homo sapien
ccaccatgcgcggcccaatttctttcttttttc

SEQ ID NO: 13138 - DNA, 33 bp, Homo sapien
ccaccatgcgcggcccgatttctttcttttttc

SEQ ID NO: 13139 - DNA, 33 bp, Homo sapien
actcatccgagactcaaagagacaaaagggggc

SEQ ID NO: 13140 - DNA, 33 bp, Homo sapien
actcatccgagactcagagagacaaaagggggc

SEQ ID NO: 13141 - DNA, 33 bp, Homo sapien
gagtaaaacacaaaaacggagggattagatgag

SEQ ID NO: 13142 - DNA, 33 bp, Homo sapien
gagtaaaacacaaaaatggagggattagatgag

SEQ ID NO: 13143 - DNA, 33 bp, Homo sapien
aaatctgattataaaaatagtcactcggaagcc

SEQ ID NO: 13144 - DNA, 33 bp, Homo sapien
aaatctgattataaaagtagtcactcggaagcc

SEQ ID NO: 13145 - DNA, 33 bp, Homo sapien
acagggaaacgtgaaagacttaggatctggcag

SEQ ID NO: 13146 - DNA, 33 bp, Homo sapien
acagggaaacgtgaaatacttaggatctggcag

SEQ ID NO: 13147 - DNA, 33 bp, Homo sapien
ggctcatctgcattataagactcatctttgaaa

SEQ ID NO: 13148 - DNA, 33 bp, Homo sapien
ggctcatctgcattattagactcatctttgaaa

SEQ ID NO: 13149 - DNA, 33 bp, Homo sapien
gacacattaaagcaaccccgaaacaaatcagag

SEQ ID NO: 13150 - DNA, 33 bp, Homo sapien
gacacattaaagcaactccgaaacaaatcagag

SEQ ID NO: 13151 - DNA, 33 bp, Homo sapien
tacagaccctatacaacacacaccataataagt

SEQ ID NO: 13152 - DNA, 33 bp, Homo sapien
tacagaccctatacaatacacaccataataagt

SEQ ID NO: 13153 - DNA, 33 bp, Homo sapien
tacaccccttaaatacagcaccttcagaggctc

SEQ ID NO: 13154 - DNA, 33 bp, Homo sapien
tacaccccttaaatacggcaccttcagaggctc

SEQ ID NO: 13155 - DNA, 33 bp, Homo sapien
tttgtgcagagattaaaaacagcaacaaaatct

SEQ ID NO: 13156 - DNA, 33 bp, Homo sapien
tttgtgcagagattaacaacagcaacaaaatct

SEQ ID NO: 13157 - DNA, 33 bp, Homo sapien
agagtcagctccaagaagtaactgggaaacatc

SEQ ID NO: 13158 - DNA, 33 bp, Homo sapien
agagtcagctccaagaggtaactgggaaacatc

SEQ ID NO: 13159 - DNA, 33 bp, Homo sapien
actaggcctctctagaagagcattttgagttat

SEQ ID NO: 13160 - DNA, 33 bp, Homo sapien
actaggcctctctagaggagcattttgagttat

SEQ ID NO: 13161 - DNA, 33 bp, Homo sapien
acaaaagagtccctacactcagataatttattt

SEQ ID NO: 13162 - DNA, 33 bp, Homo sapien
acaaaagagtccctacgctcagataatttattt

SEQ ID NO: 13163 - DNA, 33 bp, Homo sapien
tgaatggtctgctaggaaagcttgcatttactt

SEQ ID NO: 13164 - DNA, 33 bp, Homo sapien
tgaatggtctgctagggaagcttgcatttactt

SEQ ID NO: 13165 - DNA, 33 bp, Homo sapien
tatcacgccttccatgaacacctcctacctctc

SEQ ID NO: 13166 - DNA, 33 bp, Homo sapien
tatcacgccttccatggacacctcctacctctc

SEQ ID NO: 13167 - DNA, 33 bp, Homo sapien
ctatagttcagtaaaccgtgggtaaggaggtgg

SEQ ID NO: 13168 - DNA, 33 bp, Homo sapien
ctatagttcagtaaactgtgggtaaggaggtgg

SEQ ID NO: 13169 - DNA, 33 bp, Homo sapien
tgagctccttttgccacgtttgtaataaagttg

SEQ ID NO: 13170 - DNA, 33 bp, Homo sapien
tgagctccttttgccatgtttgtaataaagttg

SEQ ID NO: 13171 - DNA, 33 bp, Homo sapien
catcagcagtcacaaacctttaatctggatcca

SEQ ID NO: 13172 - DNA, 33 bp, Homo sapien
catcagcagtcacaaatctttaatctggatcca

SEQ ID NO: 13173 - DNA, 33 bp, Homo sapien
tttcttctgctgcagacgccaacatcccagtaa

SEQ ID NO: 13174 - DNA, 33 bp, Homo sapien
tttcttctgctgcagaggccaacatcccagtaa

SEQ ID NO: 13175 - DNA, 33 bp, Homo sapien
cttgaatttcctttcaactcacacttcccaaag

SEQ ID NO: 13176 - DNA, 33 bp, Homo sapien
cttgaatttcctttcatctcacacttcccaaag

SEQ ID NO: 13177 - DNA, 33 bp, Homo sapien
tgagtatacagaaagaaattgatgaaagccaaa

SEQ ID NO: 13178 - DNA, 33 bp, Homo sapien
tgagtatacagaaagagattgatgaaagccaaa

SEQ ID NO: 13179 - DNA, 33 bp, Homo sapien
caaaacattagaacaccggaatattaactaaga

SEQ ID NO: 13180 - DNA, 33 bp, Homo sapien
caaaacattagaacactggaatattaactaaga

SEQ ID NO: 13181 - DNA, 33 bp, Homo sapien
tggaattgaaaggatcaaaggaaggcaaagggg

SEQ ID NO: 13182 - DNA, 33 bp, Homo sapien
tggaattgaaaggatcgaaggaaggcaaagggg

SEQ ID NO: 13183 - DNA, 33 bp, Homo sapien
ttagcctgtatcaacaacaacctgatagcctca

SEQ ID NO: 13184 - DNA, 33 bp, Homo sapien
ttagcctgtatcaacagcaacctgatagcctca

SEQ ID NO: 13185 - DNA, 33 bp, Homo sapien
acaggctaaaactagacgatgatctgtagtcct

SEQ ID NO: 13186 - DNA, 33 bp, Homo sapien
acaggctaaaactagatgatgatctgtagtcct

SEQ ID NO: 13187 - DNA, 33 bp, Homo sapien
gcagacttggactcccaagagacatagcacaca

SEQ ID NO: 13188 - DNA, 33 bp, Homo sapien
gcagacttggactccctagagacatagcacaca

SEQ ID NO: 13189 - DNA, 33 bp, Homo sapien
atatgatgataacataacttgaaggagatgaga

SEQ ID NO: 13190 - DNA, 33 bp, Homo sapien
atatgatgataacatatcttgaaggagatgaga

SEQ ID NO: 13191 - DNA, 33 bp, Homo sapien
tgatcacagtagattaccagtttgacttgccca

SEQ ID NO: 13192 - DNA, 33 bp, Homo sapien
tgatcacagtagattatcagtttgacttgccca

SEQ ID NO: 13193 - DNA, 33 bp, Homo sapien
aataagaaagtcttgtaaacgccttcatttgat

SEQ ID NO: 13194 - DNA, 33 bp, Homo sapien
aataagaaagtcttgtgaacgccttcatttgat

SEQ ID NO: 13195 - DNA, 33 bp, Homo sapien
gaagacagtaggtcaacaacagagccattcttg

SEQ ID NO: 13196 - DNA, 33 bp, Homo sapien
gaagacagtaggtcaagaacagagccattcttg

SEQ ID NO: 13197 - DNA, 33 bp, Homo sapien
cttctttgccttttcaatccttcaccttcacca

SEQ ID NO: 13198 - DNA, 33 bp, Homo sapien
cttctttgccttttcattccttcaccttcacca

SEQ ID NO: 13199 - DNA, 33 bp, Homo sapien
taacaagcaacgtgtacattttgctctactaca

SEQ ID NO: 13200 - DNA, 33 bp, Homo sapien
taacaagcaacgtgtatattttgctctactaca

SEQ ID NO: 13201 - DNA, 33 bp, Homo sapien
gttaagacaaaatctacgaaaaagccacatcaa

SEQ ID NO: 13202 - DNA, 33 bp, Homo sapien
gttaagacaaaatctatgaaaaagccacatcaa

SEQ ID NO: 13203 - DNA, 33 bp, Homo sapien
tttattttctaccatcaatttttctacatttaa

SEQ ID NO: 13204 - DNA, 33 bp, Homo sapien
tttattttctaccatctatttttctacatttaa

SEQ ID NO: 13205 - DNA, 33 bp, Homo sapien
aagccacagtggaaacagtcaacaaagctggca

SEQ ID NO: 13206 - DNA, 33 bp, Homo sapien
aagccacagtggaaaccgtcaacaaagctggca

SEQ ID NO: 13207 - DNA, 33 bp, Homo sapien
atattgtaatatttagcatggcatagtgggtac

SEQ ID NO: 13208 - DNA, 33 bp, Homo sapien
atattgtaatatttagtatggcatagtgggtac

SEQ ID NO: 13209 - DNA, 33 bp, Homo sapien
cagaaaggagaagaacagaataggaagaagata

SEQ ID NO: 13210 - DNA, 33 bp, Homo sapien
cagaaaggagaagaactgaataggaagaagata

SEQ ID NO: 13211 - DNA, 33 bp, Homo sapien
tttaagttttaagataagagatatttcagagct

SEQ ID NO: 13212 - DNA, 33 bp, Homo sapien
tttaagttttaagataggagatatttcagagct

SEQ ID NO: 13213 - DNA, 33 bp, Homo sapien
aaaatacaaaaattaacggcctggtggtgtaca

SEQ ID NO: 13214 - DNA, 33 bp, Homo sapien
aaaatacaaaaattaatggcctggtggtgtaca

SEQ ID NO: 13215 - DNA, 33 bp, Homo sapien
ctgctatgggtaggaaccttgacaaggctgatg

SEQ ID NO: 13216 - DNA, 33 bp, Homo sapien
ctgctatgggtaggaatcttgacaaggctgatg

SEQ ID NO: 13217 - DNA, 33 bp, Homo sapien
aagactgaaggcaacactgtcttgaggcacaag

SEQ ID NO: 13218 - DNA, 33 bp, Homo sapien
aagactgaaggcaacattgtcttgaggcacaag

SEQ ID NO: 13219 - DNA, 33 bp, Homo sapien
aactcttcttggtcctaagcccagtgtcagcct

SEQ ID NO: 13220 - DNA, 33 bp, Homo sapien
aactcttcttggtcctgagcccagtgtcagcct

SEQ ID NO: 13221 - DNA, 33 bp, Homo sapien
aaggaaatagaaaatcactattccagcctggac

SEQ ID NO: 13222 - DNA, 33 bp, Homo sapien
aaggaaatagaaaatcgctattccagcctggac

SEQ ID NO: 13223 - DNA, 33 bp, Homo sapien
tctcctatctcagtaaatagaatgtccaatcgg

SEQ ID NO: 13224 - DNA, 33 bp, Homo sapien
tctcctatctcagtaagtagaatgtccaatcgg

SEQ ID NO: 13225 - DNA, 33 bp, Homo sapien
agcatgtcttccaatcacaaactcacatctttg

SEQ ID NO: 13226 - DNA, 33 bp, Homo sapien
agcatgtcttccaatcgcaaactcacatctttg

SEQ ID NO: 13227 - DNA, 33 bp, Homo sapien
cacccagggtgacgccaattttggtggccagct

SEQ ID NO: 13228 - DNA, 33 bp, Homo sapien
cacccagggtgacgccgattttggtggccagct

SEQ ID NO: 13229 - DNA, 33 bp, Homo sapien
ttccgtgagcttgacactacataaaataaaaag

SEQ ID NO: 13230 - DNA, 33 bp, Homo sapien
ttccgtgagcttgacattacataaaataaaaag

SEQ ID NO: 13231 - DNA, 33 bp, Homo sapien
caagtacttgagtccaacttagaaagtcaagat

SEQ ID NO: 13232 - DNA, 33 bp, Homo sapien
caagtacttgagtccaccttagaaagtcaagat

SEQ ID NO: 13233 - DNA, 33 bp, Homo sapien
tgagtttgtgtccacacagaaagtcagtagcag

SEQ ID NO: 13234 - DNA, 33 bp, Homo sapien
tgagtttgtgtccacagagaaagtcagtagcag

SEQ ID NO: 13235 - DNA, 33 bp, Homo sapien
tggttgcgatctgctaccgtgacgtcagccctc

SEQ ID NO: 13236 - DNA, 33 bp, Homo sapien
tggttgcgatctgctagcgtgacgtcagccctc

SEQ ID NO: 13237 - DNA, 33 bp, Homo sapien
cctctcctctttcacacagtcagatgttcagat

SEQ ID NO: 13238 - DNA, 33 bp, Homo sapien
cctctcctctttcacatagtcagatgttcagat

SEQ ID NO: 13239 - DNA, 33 bp, Homo sapien
tgtgtgccagttaataccgaggtggggccacgg

SEQ ID NO: 13240 - DNA, 33 bp, Homo sapien
tgtgtgccagttaatagcgaggtggggccacgg

SEQ ID NO: 13241 - DNA, 33 bp, Homo sapien
gccacttttccttaagactatgatggcatctcc

SEQ ID NO: 13242 - DNA, 33 bp, Homo sapien
gccacttttccttaaggctatgatggcatctcc

SEQ ID NO: 13243 - DNA, 33 bp, Homo sapien
ctcctgagaaggagaacgaatgcaaaaagttgg

SEQ ID NO: 13244 - DNA, 33 bp, Homo sapien
ctcctgagaaggagaaggaatgcaaaaagttgg

SEQ ID NO: 13245 - DNA, 33 bp, Homo sapien
atagacccaccaagaacaggttcagtcccagtg

SEQ ID NO: 13246 - DNA, 33 bp, Homo sapien
atagacccaccaagaataggttcagtcccagtg

SEQ ID NO: 13247 - DNA, 33 bp, Homo sapien
ggtatgaacgaggagaatcataactgctattct

SEQ ID NO: 13248 - DNA, 33 bp, Homo sapien
ggtatgaacgaggagattcataactgctattct

SEQ ID NO: 13249 - DNA, 33 bp, Homo sapien
taatatatgttacccagcaattaccaagcactc

SEQ ID NO: 13250 - DNA, 33 bp, Homo sapien
taatatatgttacccatcaattaccaagcactc

SEQ ID NO: 13251 - DNA, 33 bp, Homo sapien
gcactttgaaatgttaggttgctgtatgatatg

SEQ ID NO: 13252 - DNA, 33 bp, Homo sapien
gcactttgaaatgttatgttgctgtatgatatg

SEQ ID NO: 13253 - DNA, 33 bp, Homo sapien
ttcaggggctgaacaacagccttgctccttttg

SEQ ID NO: 13254 - DNA, 33 bp, Homo sapien
ttcaggggctgaacaatagccttgctccttttg

SEQ ID NO: 13255 - DNA, 33 bp, Homo sapien
tgtcatcagcactcaccgtctcgattttctcac

SEQ ID NO: 13256 - DNA, 33 bp, Homo sapien
tgtcatcagcactcactgtctcgattttctcac

SEQ ID NO: 13257 - DNA, 33 bp, Homo sapien
gttcgacaggtttgaaacaggtcagactatcta

SEQ ID NO: 13258 - DNA, 33 bp, Homo sapien
gttcgacaggtttgaagcaggtcagactatcta

SEQ ID NO: 13259 - DNA, 33 bp, Homo sapien
aaaaagctgttattcccagtaggacttagagag

SEQ ID NO: 13260 - DNA, 33 bp, Homo sapien
aaaaagctgttattcctagtaggacttagagag

SEQ ID NO: 13261 - DNA, 33 bp, Homo sapien
taactcaggaagaatacatagagtggttacttg

SEQ ID NO: 13262 - DNA, 33 bp, Homo sapien
taactcaggaagaatatatagagtggttacttg

SEQ ID NO: 13263 - DNA, 33 bp, Homo sapien
tggccagcggaaagaaaggccaagagccagggt

SEQ ID NO: 13264 - DNA, 33 bp, Homo sapien
tggccagcggaaagaagggccaagagccagggt

SEQ ID NO: 13265 - DNA, 33 bp, Homo sapien
ctgtgactaagctgtgcagaggttgacagcagg

SEQ ID NO: 13266 - DNA, 33 bp, Homo sapien
ctgtgactaagctgtggagaggttgacagcagg

SEQ ID NO: 13267 - DNA, 33 bp, Homo sapien
actgaccgtgcagcacgccacagtcttcatcct

SEQ ID NO: 13268 - DNA, 33 bp, Homo sapien
actgaccgtgcagcactccacagtcttcatcct

SEQ ID NO: 13269 - DNA, 33 bp, Homo sapien
tgtctctcacctgaaccgtgtagcaggcccctc

SEQ ID NO: 13270 - DNA, 33 bp, Homo sapien
tgtctctcacctgaactgtgtagcaggcccctc

SEQ ID NO: 13271 - DNA, 33 bp, Homo sapien
ctgggaaaacactaaacagcaaatctgaggttg

SEQ ID NO: 13272 - DNA, 33 bp, Homo sapien
ctgggaaaacactaaatagcaaatctgaggttg

SEQ ID NO: 13273 - DNA, 33 bp, Homo sapien
tctgtgtgtgggagcacgtcaatgtctgaggct

SEQ ID NO: 13274 - DNA, 33 bp, Homo sapien
tctgtgtgtgggagcatgtcaatgtctgaggct

SEQ ID NO: 13275 - DNA, 33 bp, Homo sapien
agcctgggcaagataaggaaaccctgtttctac

SEQ ID NO: 13276 - DNA, 33 bp, Homo sapien
agcctgggcaagataatgaaaccctgtttctac

SEQ ID NO: 13277 - DNA, 33 bp, Homo sapien
ggcccaggcaggtagcacggattcagcctgagt

SEQ ID NO: 13278 - DNA, 33 bp, Homo sapien
ggcccaggcaggtagcgcggattcagcctgagt

SEQ ID NO: 13279 - DNA, 33 bp, Homo sapien
caccaggtgagggtcaaagggctatgaagtcta

SEQ ID NO: 13280 - DNA, 33 bp, Homo sapien
caccaggtgagggtcagagggctatgaagtcta

SEQ ID NO: 13281 - DNA, 33 bp, Homo sapien
ggttcaccccaggtcaactatagcccatcagca

SEQ ID NO: 13282 - DNA, 33 bp, Homo sapien
ggttcaccccaggtcagctatagcccatcagca

SEQ ID NO: 13283 - DNA, 33 bp, Homo sapien
tctatggctgattatgcaaaaacaggatcctga

SEQ ID NO: 13284 - DNA, 33 bp, Homo sapien
tctatggctgattatggaaaaacaggatcctga

SEQ ID NO: 13285 - DNA, 33 bp, Homo sapien
ccaatgattccatttacgaccgtgggcaaaacc

SEQ ID NO: 13286 - DNA, 33 bp, Homo sapien
ccaatgattccatttatgaccgtgggcaaaacc

SEQ ID NO: 13287 - DNA, 33 bp, Homo sapien
gcataaaaggaaggaacccaactctggtgatct

SEQ ID NO: 13288 - DNA, 33 bp, Homo sapien
gcataaaaggaaggaatccaactctggtgatct

SEQ ID NO: 13289 - DNA, 33 bp, Homo sapien
actgaatgttagtatgccagatattaactgctt

SEQ ID NO: 13290 - DNA, 33 bp, Homo sapien
actgaatgttagtatgtcagatattaactgctt

SEQ ID NO: 13291 - DNA, 33 bp, Homo sapien
aattgtttgtctttagaattgtccacttttatt

SEQ ID NO: 13292 - DNA, 33 bp, Homo sapien
aattgtttgtctttaggattgtccacttttatt

SEQ ID NO: 13293 - DNA, 33 bp, Homo sapien
gtctctgagaagaccacattggggctgactctg

SEQ ID NO: 13294 - DNA, 33 bp, Homo sapien
gtctctgagaagaccatattggggctgactctg

SEQ ID NO: 13295 - DNA, 33 bp, Homo sapien
tactcatccaggctcaaagtcaagcagggtgta

SEQ ID NO: 13296 - DNA, 33 bp, Homo sapien
tactcatccaggctcagagtcaagcagggtgta

SEQ ID NO: 13297 - DNA, 33 bp, Homo sapien
gttaatgtggtatatacgccgcagtctaacctg

SEQ ID NO: 13298 - DNA, 33 bp, Homo sapien
gttaatgtggtatatatgccgcagtctaacctg

SEQ ID NO: 13299 - DNA, 33 bp, Homo sapien
aaatcttggcttcctaaggggcaccctcgtgtc

SEQ ID NO: 13300 - DNA, 33 bp, Homo sapien
aaatcttggcttcctagggggcaccctcgtgtc

SEQ ID NO: 13301 - DNA, 33 bp, Homo sapien
gaggagtgctttcaaaatctgggcacttttcaa

SEQ ID NO: 13302 - DNA, 33 bp, Homo sapien
gaggagtgctttcaaagtctgggcacttttcaa

SEQ ID NO: 13303 - DNA, 33 bp, Homo sapien
ccttcctggatatgcaaggtcaagagcggaggg

SEQ ID NO: 13304 - DNA, 33 bp, Homo sapien
ccttcctggatatgcagggtcaagagcggaggg

SEQ ID NO: 13305 - DNA, 33 bp, Homo sapien
tgagattctttataaccgcctggctgaccagca

SEQ ID NO: 13306 - DNA, 33 bp, Homo sapien
tgagattctttataactgcctggctgaccagca

SEQ ID NO: 13307 - DNA, 33 bp, Homo sapien
gcctcgggaaaactctcacctctctgggaagtg

SEQ ID NO: 13308 - DNA, 33 bp, Homo sapien
gcctcgggaaaactctgacctctctgggaagtg

SEQ ID NO: 13309 - DNA, 33 bp, Homo sapien
agataacggataaaaacgttcaagaaggctggg

SEQ ID NO: 13310 - DNA, 33 bp, Homo sapien
agataacggataaaaatgttcaagaaggctggg

SEQ ID NO: 13311 - DNA, 33 bp, Homo sapien
aaattaaacatgatgaacttattagatgagtga

SEQ ID NO: 13312 - DNA, 33 bp, Homo sapien
aaattaaacatgatgatcttattagatgagtga

SEQ ID NO: 13313 - DNA, 33 bp, Homo sapien
agctcatcaccaggtcaagtctaaggggagaac

SEQ ID NO: 13314 - DNA, 33 bp, Homo sapien
agctcatcaccaggtcgagtctaaggggagaac

SEQ ID NO: 13315 - DNA, 33 bp, Homo sapien
cagatcacaaatgcaaaggttaaatgtgtcgct

SEQ ID NO: 13316 - DNA, 33 bp, Homo sapien
cagatcacaaatgcaacggttaaatgtgtcgct

SEQ ID NO: 13317 - DNA, 33 bp, Homo sapien
ccttgacatttgtactcaaatcactctctagaa

SEQ ID NO: 13318 - DNA, 33 bp, Homo sapien
ccttgacatttgtacttaaatcactctctagaa

SEQ ID NO: 13319 - DNA, 33 bp, Homo sapien
gacgcttcgtgagcgaggctggttgtcaccaag

SEQ ID NO: 13320 - DNA, 33 bp, Homo sapien
gacgcttcgtgagcgatgctggttgtcaccaag

SEQ ID NO: 13321 - DNA, 33 bp, Homo sapien
tgggattatcctaacaagcattgcacctgcata

SEQ ID NO: 13322 - DNA, 33 bp, Homo sapien
tgggattatcctaacaggcattgcacctgcata

SEQ ID NO: 13323 - DNA, 33 bp, Homo sapien
attttccatgcttcaagacagagaatagtgtgg

SEQ ID NO: 13324 - DNA, 33 bp, Homo sapien
attttccatgcttcaatacagagaatagtgtgg

SEQ ID NO: 13325 - DNA, 33 bp, Homo sapien
accccctaagtatgccaaaatccatatactcaa

SEQ ID NO: 13326 - DNA, 33 bp, Homo sapien
accccctaagtatgcccaaatccatatactcaa

SEQ ID NO: 13327 - DNA, 33 bp, Homo sapien
acagatttttttcaaccgcagatcacaaataca

SEQ ID NO: 13328 - DNA, 33 bp, Homo sapien
acagatttttttcaactgcagatcacaaataca

SEQ ID NO: 13329 - DNA, 33 bp, Homo sapien
tgttgggcacttaaacaaccctcctagcaccct

SEQ ID NO: 13330 - DNA, 33 bp, Homo sapien
tgttgggcacttaaaccaccctcctagcaccct

SEQ ID NO: 13331 - DNA, 33 bp, Homo sapien
ctgcctcctagcttatgagaccagcggagggcc

SEQ ID NO: 13332 - DNA, 33 bp, Homo sapien
ctgcctcctagcttattagaccagcggagggcc

SEQ ID NO: 13333 - DNA, 33 bp, Homo sapien
gagaagcaacatgatacgaggaatctgtgtccc

SEQ ID NO: 13334 - DNA, 33 bp, Homo sapien
gagaagcaacatgatatgaggaatctgtgtccc

SEQ ID NO: 13335 - DNA, 33 bp, Homo sapien
cctaagaatcaagcaaagtattttcaagtctag

SEQ ID NO: 13336 - DNA, 33 bp, Homo sapien
cctaagaatcaagcaaggtattttcaagtctag

SEQ ID NO: 13337 - DNA, 33 bp, Homo sapien
taaaaatgcatctataacaggaagccccatact

SEQ ID NO: 13338 - DNA, 33 bp, Homo sapien
taaaaatgcatctatagcaggaagccccatact

SEQ ID NO: 13339 - DNA, 33 bp, Homo sapien
atttaaactagttgtccatctctttcagtgttc

SEQ ID NO: 13340 - DNA, 33 bp, Homo sapien
atttaaactagttgtctatctctttcagtgttc

SEQ ID NO: 13341 - DNA, 33 bp, Homo sapien
tctacttctctgagaaccccatgcaaaacagta

SEQ ID NO: 13342 - DNA, 33 bp, Homo sapien
tctacttctctgagaatcccatgcaaaacagta

SEQ ID NO: 13343 - DNA, 33 bp, Homo sapien
gaagctcagtgctgtactacaaatttctaatgc

SEQ ID NO: 13344 - DNA, 33 bp, Homo sapien
gaagctcagtgctgtattacaaatttctaatgc

SEQ ID NO: 13345 - DNA, 33 bp, Homo sapien
acgagtgaacaggtggccacaaaaaaagagaat

SEQ ID NO: 13346 - DNA, 33 bp, Homo sapien
acgagtgaacaggtggtcacaaaaaaagagaat

SEQ ID NO: 13347 - DNA, 33 bp, Homo sapien
ctcccactgaaattagacagcaagaaagagcaa

SEQ ID NO: 13348 - DNA, 33 bp, Homo sapien
ctcccactgaaattagccagcaagaaagagcaa

SEQ ID NO: 13349 - DNA, 33 bp, Homo sapien
tcatcttcctgaaatacatcagactctacaaat

SEQ ID NO: 13350 - DNA, 33 bp, Homo sapien
tcatcttcctgaaatatatcagactctacaaat

SEQ ID NO: 13351 - DNA, 33 bp, Homo sapien
ggtaaacaatgctttgaaaatttgagttgttga

SEQ ID NO: 13352 - DNA, 33 bp, Homo sapien
ggtaaacaatgctttgcaaatttgagttgttga

SEQ ID NO: 13353 - DNA, 33 bp, Homo sapien
acttgaggttgactcactagtatttggtaaaca

SEQ ID NO: 13354 - DNA, 33 bp, Homo sapien
acttgaggttgactcagtagtatttggtaaaca

SEQ ID NO: 13355 - DNA, 33 bp, Homo sapien
ggtcagttagtagccactgaggtatgcaattct

SEQ ID NO: 13356 - DNA, 33 bp, Homo sapien
ggtcagttagtagccagtgaggtatgcaattct

SEQ ID NO: 13357 - DNA, 33 bp, Homo sapien
agtgtgggccatagaacgagacaatatctcaaa

SEQ ID NO: 13358 - DNA, 33 bp, Homo sapien
agtgtgggccatagaaggagacaatatctcaaa

SEQ ID NO: 13359 - DNA, 33 bp, Homo sapien
gaacagctggaactacagggatctactacgtta

SEQ ID NO: 13360 - DNA, 33 bp, Homo sapien
gaacagctggaactacggggatctactacgtta

SEQ ID NO: 13361 - DNA, 33 bp, Homo sapien
ggcttaagattcaccactggtaagacagaggct

SEQ ID NO: 13362 - DNA, 33 bp, Homo sapien
ggcttaagattcaccattggtaagacagaggct

SEQ ID NO: 13363 - DNA, 33 bp, Homo sapien
tcatgaggattagacaaaacatgtatgagagtg

SEQ ID NO: 13364 - DNA, 33 bp, Homo sapien
tcatgaggattagacagaacatgtatgagagtg

SEQ ID NO: 13365 - DNA, 33 bp, Homo sapien
ggcctgaatgagaggaaggagttggccttttag

SEQ ID NO: 13366 - DNA, 33 bp, Homo sapien
ggcctgaatgagaggagggagttggccttttag

SEQ ID NO: 13367 - DNA, 33 bp, Homo sapien
cccccatttttcactccgactaggtgttcttgc

SEQ ID NO: 13368 - DNA, 33 bp, Homo sapien
cccccatttttcactctgactaggtgttcttgc

SEQ ID NO: 13369 - DNA, 33 bp, Homo sapien
gagatctcacgtgccacggatactaacaaggta

SEQ ID NO: 13370 - DNA, 33 bp, Homo sapien
gagatctcacgtgccatggatactaacaaggta

SEQ ID NO: 13371 - DNA, 33 bp, Homo sapien
aacttgaatatttgaacccatcatgtagggtct

SEQ ID NO: 13372 - DNA, 33 bp, Homo sapien
aacttgaatatttgaatccatcatgtagggtct

SEQ ID NO: 13373 - DNA, 33 bp, Homo sapien
tgtcacagatagtatagaattctgacagacagg

SEQ ID NO: 13374 - DNA, 33 bp, Homo sapien
tgtcacagatagtatataattctgacagacagg

SEQ ID NO: 13375 - DNA, 33 bp, Homo sapien
ttcactgccattttccacttgaacttttttctt

SEQ ID NO: 13376 - DNA, 33 bp, Homo sapien
ttcactgccattttccgcttgaacttttttctt

SEQ ID NO: 13377 - DNA, 33 bp, Homo sapien
atgttgacactttagaccttattttgctttctg

SEQ ID NO: 13378 - DNA, 33 bp, Homo sapien
atgttgacactttagatcttattttgctttctg

SEQ ID NO: 13379 - DNA, 33 bp, Homo sapien
actcaccatggatgaaacactgggtactggaca

SEQ ID NO: 13380 - DNA, 33 bp, Homo sapien
actcaccatggatgaagcactgggtactggaca

SEQ ID NO: 13381 - DNA, 33 bp, Homo sapien
aaaagatgccatctaaatctaacccaaatcagg

SEQ ID NO: 13382 - DNA, 33 bp, Homo sapien
aaaagatgccatctaagtctaacccaaatcagg

SEQ ID NO: 13383 - DNA, 33 bp, Homo sapien
catgaagtcatgagaacagacaagcttttggag

SEQ ID NO: 13384 - DNA, 33 bp, Homo sapien
catgaagtcatgagaatagacaagcttttggag

SEQ ID NO: 13385 - DNA, 33 bp, Homo sapien
agtcttgattctttcccaggctttatttctaaa

SEQ ID NO: 13386 - DNA, 33 bp, Homo sapien
agtcttgattctttcctaggctttatttctaaa

SEQ ID NO: 13387 - DNA, 33 bp, Homo sapien
aattattttaagtctcaaaagaatcaacagatt

SEQ ID NO: 13388 - DNA, 33 bp, Homo sapien
aattattttaagtctccaaagaatcaacagatt

SEQ ID NO: 13389 - DNA, 33 bp, Homo sapien
ttttcccctggacttacagtgtggtggattgta

SEQ ID NO: 13390 - DNA, 33 bp, Homo sapien
ttttcccctggacttatagtgtggtggattgta

SEQ ID NO: 13391 - DNA, 33 bp, Homo sapien
tgctgctgcaggccaaggaatggaaaggtttgt

SEQ ID NO: 13392 - DNA, 33 bp, Homo sapien
tgctgctgcaggccaatgaatggaaaggtttgt

SEQ ID NO: 13393 - DNA, 33 bp, Homo sapien
gctgcttatctcttccacagggaggacaatgtg

SEQ ID NO: 13394 - DNA, 33 bp, Homo sapien
gctgcttatctcttccgcagggaggacaatgtg

SEQ ID NO: 13395 - DNA, 33 bp, Homo sapien
tgtgactatcctttgcaaattctaactttctac

SEQ ID NO: 13396 - DNA, 33 bp, Homo sapien
tgtgactatcctttgctaattctaactttctac

SEQ ID NO: 13397 - DNA, 33 bp, Homo sapien
ggggcttagcattcaaataggcaccttggcaaa

SEQ ID NO: 13398 - DNA, 33 bp, Homo sapien
ggggcttagcattcaagtaggcaccttggcaaa

SEQ ID NO: 13399 - DNA, 33 bp, Homo sapien
aatgtttgttgattgacgaaggatggaagaaag

SEQ ID NO: 13400 - DNA, 33 bp, Homo sapien
aatgtttgttgattgatgaaggatggaagaaag

SEQ ID NO: 13401 - DNA, 33 bp, Homo sapien
ctattgacacttaaaaactttctcatgttaacc

SEQ ID NO: 13402 - DNA, 33 bp, Homo sapien
ctattgacacttaaaatctttctcatgttaacc

SEQ ID NO: 13403 - DNA, 33 bp, Homo sapien
ttcctctcttaagcaacttaatttgggtgctac

SEQ ID NO: 13404 - DNA, 33 bp, Homo sapien
ttcctctcttaagcaatttaatttgggtgctac

SEQ ID NO: 13405 - DNA, 33 bp, Homo sapien
cagagggcaacgtactcagagaggaaggcagcc

SEQ ID NO: 13406 - DNA, 33 bp, Homo sapien
cagagggcaacgtactgagagaggaaggcagcc

SEQ ID NO: 13407 - DNA, 33 bp, Homo sapien
cacatgacggtagacaaaagaagagagcttggg

SEQ ID NO: 13408 - DNA, 33 bp, Homo sapien
cacatgacggtagacagaagaagagagcttggg

SEQ ID NO: 13409 - DNA, 33 bp, Homo sapien
ctccatctctgacgtaactggctctgttgggct

SEQ ID NO: 13410 - DNA, 33 bp, Homo sapien
ctccatctctgacgtagctggctctgttgggct

SEQ ID NO: 13411 - DNA, 33 bp, Homo sapien
cctctgctagcttcacactttttttctgcagct

SEQ ID NO: 13412 - DNA, 33 bp, Homo sapien
cctctgctagcttcacgctttttttctgcagct

SEQ ID NO: 13413 - DNA, 33 bp, Homo sapien
aggttagacaataagggataagccaggattcag

SEQ ID NO: 13414 - DNA, 33 bp, Homo sapien
aggttagacaataaggtataagccaggattcag

SEQ ID NO: 13415 - DNA, 33 bp, Homo sapien
cactagtgtgtccttcaaacagtatcctgttgt

SEQ ID NO: 13416 - DNA, 33 bp, Homo sapien
cactagtgtgtccttcgaacagtatcctgttgt

SEQ ID NO: 13417 - DNA, 33 bp, Homo sapien
attattaaagacatcccagtctgtgtgaaatgg

SEQ ID NO: 13418 - DNA, 33 bp, Homo sapien
attattaaagacatcctagtctgtgtgaaatgg

SEQ ID NO: 13419 - DNA, 33 bp, Homo sapien
gctcctgtttatcaaggaataacaagcttcaaa

SEQ ID NO: 13420 - DNA, 33 bp, Homo sapien
gctcctgtttatcaagtaataacaagcttcaaa

SEQ ID NO: 13421 - DNA, 33 bp, Homo sapien
aagtcagtataacgacaactccagaactgccac

SEQ ID NO: 13422 - DNA, 33 bp, Homo sapien
aagtcagtataacgactactccagaactgccac

SEQ ID NO: 13423 - DNA, 33 bp, Homo sapien
gaaaggtcaaatagaacccttaatgtgctttct

SEQ ID NO: 13424 - DNA, 33 bp, Homo sapien
gaaaggtcaaatagaatccttaatgtgctttct

SEQ ID NO: 13425 - DNA, 33 bp, Homo sapien
ctcctcaatattctaccagacctatgttctcat

SEQ ID NO: 13426 - DNA, 33 bp, Homo sapien
ctcctcaatattctactagacctatgttctcat

SEQ ID NO: 13427 - DNA, 33 bp, Homo sapien
ttttttgaggaataccactaaaaaggacaggaa

SEQ ID NO: 13428 - DNA, 33 bp, Homo sapien
ttttttgaggaataccgctaaaaaggacaggaa

SEQ ID NO: 13429 - DNA, 33 bp, Homo sapien
aataaatatttattgacagctacagtatcccaa

SEQ ID NO: 13430 - DNA, 33 bp, Homo sapien
aataaatatttattgagagctacagtatcccaa

SEQ ID NO: 13431 - DNA, 33 bp, Homo sapien
gctttataggccattgcaaggaccttgcgtttt

SEQ ID NO: 13432 - DNA, 33 bp, Homo sapien
gctttataggccattgtaaggaccttgcgtttt

SEQ ID NO: 13433 - DNA, 33 bp, Homo sapien
aatcctctacaaaaaaagattatctatcaaaac

SEQ ID NO: 13434 - DNA, 33 bp, Homo sapien
aatcctctacaaaaaaggattatctatcaaaac

SEQ ID NO: 13435 - DNA, 33 bp, Homo sapien
agacacatgctgttacaatgtccaccttaagat

SEQ ID NO: 13436 - DNA, 33 bp, Homo sapien
agacacatgctgttaccatgtccaccttaagat

SEQ ID NO: 13437 - DNA, 33 bp, Homo sapien
tctttctaagcacatactacaatttataattaa

SEQ ID NO: 13438 - DNA, 33 bp, Homo sapien
tctttctaagcacatattacaatttataattaa

SEQ ID NO: 13439 - DNA, 33 bp, Homo sapien
aaagcagtgattggtacataattagtgatcaat

SEQ ID NO: 13440 - DNA, 33 bp, Homo sapien
aaagcagtgattggtatataattagtgatcaat

SEQ ID NO: 13441 - DNA, 33 bp, Homo sapien
attatctccaatctaaatcatgcctattatttc

SEQ ID NO: 13442 - DNA, 33 bp, Homo sapien
attatctccaatctaattcatgcctattatttc

SEQ ID NO: 13443 - DNA, 33 bp, Homo sapien
ctagattccatgactacatcctgaacaattaag

SEQ ID NO: 13444 - DNA, 33 bp, Homo sapien
ctagattccatgactatatcctgaacaattaag

SEQ ID NO: 13445 - DNA, 33 bp, Homo sapien
taaaatgaggataatacgtgcaaaaaagtttat

SEQ ID NO: 13446 - DNA, 33 bp, Homo sapien
taaaatgaggataatatgtgcaaaaaagtttat

SEQ ID NO: 13447 - DNA, 33 bp, Homo sapien
ttcaccttcgagagcacgaacaagtgcattgtg

SEQ ID NO: 13448 - DNA, 33 bp, Homo sapien
ttcaccttcgagagcatgaacaagtgcattgtg

SEQ ID NO: 13449 - DNA, 33 bp, Homo sapien
aaagtgaagagaaagaagatgattttgatgatt

SEQ ID NO: 13450 - DNA, 33 bp, Homo sapien
aaagtgaagagaaagatgatgattttgatgatt

SEQ ID NO: 13451 - DNA, 33 bp, Homo sapien
gtctcttaagttggcaaaaactaggttatcctt

SEQ ID NO: 13452 - DNA, 33 bp, Homo sapien
gtctcttaagttggcagaaactaggttatcctt

SEQ ID NO: 13453 - DNA, 33 bp, Homo sapien
cttaaagaaatagttaagtcttgttcatcattt

SEQ ID NO: 13454 - DNA, 33 bp, Homo sapien
cttaaagaaatagttaggtcttgttcatcattt

SEQ ID NO: 13455 - DNA, 33 bp, Homo sapien
gggtaaccaaggactacgcaaacagagaggcaa

SEQ ID NO: 13456 - DNA, 33 bp, Homo sapien
gggtaaccaaggactatgcaaacagagaggcaa

SEQ ID NO: 13457 - DNA, 33 bp, Homo sapien
ctttctcagactctcaggtcagatttgagaaat

SEQ ID NO: 13458 - DNA, 33 bp, Homo sapien
ctttctcagactctcatgtcagatttgagaaat

SEQ ID NO: 13459 - DNA, 33 bp, Homo sapien
atcttactcagtgccacgtatccacacaacata

SEQ ID NO: 13460 - DNA, 33 bp, Homo sapien
atcttactcagtgccatgtatccacacaacata

SEQ ID NO: 13461 - DNA, 33 bp, Homo sapien
agaacacacagaggtaccttcctagctgtttct

SEQ ID NO: 13462 - DNA, 33 bp, Homo sapien
agaacacacagaggtatcttcctagctgtttct

SEQ ID NO: 13463 - DNA, 33 bp, Homo sapien
gatggccagtggagaaaggtgcagattaagatg

SEQ ID NO: 13464 - DNA, 33 bp, Homo sapien
gatggccagtggagaatggtgcagattaagatg

SEQ ID NO: 13465 - DNA, 33 bp, Homo sapien
tcgatggagtcgaagcactgaaggaatagggcg

SEQ ID NO: 13466 - DNA, 33 bp, Homo sapien
tcgatggagtcgaagcgctgaaggaatagggcg

SEQ ID NO: 13467 - DNA, 33 bp, Homo sapien
tgggcctttgacttccacaaaacagagcccacg

SEQ ID NO: 13468 - DNA, 33 bp, Homo sapien
tgggcctttgacttccgcaaaacagagcccacg

SEQ ID NO: 13469 - DNA, 33 bp, Homo sapien
tgtgggagctgaacaacagaaggtccagccacg

SEQ ID NO: 13470 - DNA, 33 bp, Homo sapien
tgtgggagctgaacaagagaaggtccagccacg

SEQ ID NO: 13471 - DNA, 33 bp, Homo sapien
ggtccagccacggcatcatgaacttaactgtac

SEQ ID NO: 13472 - DNA, 33 bp, Homo sapien
ggtccagccacggcatgatgaacttaactgtac

SEQ ID NO: 13473 - DNA, 33 bp, Homo sapien
tggatcccagggcttcgcctaaagtctgaattt

SEQ ID NO: 13474 - DNA, 33 bp, Homo sapien
tggatcccagggcttctcctaaagtctgaattt

SEQ ID NO: 13475 - DNA, 33 bp, Homo sapien
cagataccctgggcacaaaggtagagacaggca

SEQ ID NO: 13476 - DNA, 33 bp, Homo sapien
cagataccctgggcacgaaggtagagacaggca

SEQ ID NO: 13477 - DNA, 33 bp, Homo sapien
ggaggatcaggagcccaggaacttgaggctaca

SEQ ID NO: 13478 - DNA, 33 bp, Homo sapien
ggaggatcaggagcccgggaacttgaggctaca

SEQ ID NO: 13479 - DNA, 33 bp, Homo sapien
acacaaaaaaatgtgacccatagacaagagaaa

SEQ ID NO: 13480 - DNA, 33 bp, Homo sapien
acacaaaaaaatgtgatccatagacaagagaaa

SEQ ID NO: 13481 - DNA, 33 bp, Homo sapien
agatatagcctatgaccaggagcaaaataaaaa

SEQ ID NO: 13482 - DNA, 33 bp, Homo sapien
agatatagcctatgactaggagcaaaataaaaa

SEQ ID NO: 13483 - DNA, 33 bp, Homo sapien
cctatccagagctagaaactgtgggaaaacagg

SEQ ID NO: 13484 - DNA, 33 bp, Homo sapien
cctatccagagctagacactgtgggaaaacagg

SEQ ID NO: 13485 - DNA, 33 bp, Homo sapien
tgagcagagtcaagaaaatatcaaccaatttag

SEQ ID NO: 13486 - DNA, 33 bp, Homo sapien
tgagcagagtcaagaatatatcaaccaatttag

SEQ ID NO: 13487 - DNA, 33 bp, Homo sapien
aaaaacaaatcacatgaaaaagaatcaggaatg

SEQ ID NO: 13488 - DNA, 33 bp, Homo sapien
aaaaacaaatcacatgcaaaagaatcaggaatg

SEQ ID NO: 13489 - DNA, 33 bp, Homo sapien
gagataatgcctgtaacataattagaacagccc

SEQ ID NO: 13490 - DNA, 33 bp, Homo sapien
gagataatgcctgtaatataattagaacagccc

SEQ ID NO: 13491 - DNA, 33 bp, Homo sapien
agccaccgttgctacacataatttctcattggc

SEQ ID NO: 13492 - DNA, 33 bp, Homo sapien
agccaccgttgctacagataatttctcattggc

SEQ ID NO: 13493 - DNA, 33 bp, Homo sapien
tcgctgaatagtaagaaaggtctgagcatggtg

SEQ ID NO: 13494 - DNA, 33 bp, Homo sapien
tcgctgaatagtaagacaggtctgagcatggtg

SEQ ID NO: 13495 - DNA, 33 bp, Homo sapien
ttcatcagggaaaaaacaggtcaagtacacaaa

SEQ ID NO: 13496 - DNA, 33 bp, Homo sapien
ttcatcagggaaaaaagaggtcaagtacacaaa

SEQ ID NO: 13497 - DNA, 33 bp, Homo sapien
aaaactctttccctaactgccaaatgccacttg

SEQ ID NO: 13498 - DNA, 33 bp, Homo sapien
aaaactctttccctaattgccaaatgccacttg

SEQ ID NO: 13499 - DNA, 33 bp, Homo sapien
ctaatattgtagtttaagccttgaatgttgtaa

SEQ ID NO: 13500 - DNA, 33 bp, Homo sapien
ctaatattgtagtttaggccttgaatgttgtaa

SEQ ID NO: 13501 - DNA, 33 bp, Homo sapien
tcagtcaaacctggcacaaaggtgaagataaag

SEQ ID NO: 13502 - DNA, 33 bp, Homo sapien
tcagtcaaacctggcataaaggtgaagataaag

SEQ ID NO: 13503 - DNA, 33 bp, Homo sapien
aacaagggtcccattgccaatcagtccaacaca

SEQ ID NO: 13504 - DNA, 33 bp, Homo sapien
aacaagggtcccattggcaatcagtccaacaca

SEQ ID NO: 13505 - DNA, 33 bp, Homo sapien
cctcttttgagaagccccgtccatgctagatgg

SEQ ID NO: 13506 - DNA, 33 bp, Homo sapien
cctcttttgagaagcctcgtccatgctagatgg

SEQ ID NO: 13507 - DNA, 33 bp, Homo sapien
tcacctttctggaacccgaagaagaaggggatg

SEQ ID NO: 13508 - DNA, 33 bp, Homo sapien
tcacctttctggaaccggaagaagaaggggatg

SEQ ID NO: 13509 - DNA, 33 bp, Homo sapien
aatctcatttggtagacagaatactgcaaggtt

SEQ ID NO: 13510 - DNA, 33 bp, Homo sapien
aatctcatttggtagatagaatactgcaaggtt

SEQ ID NO: 13511 - DNA, 33 bp, Homo sapien
agacctgttctcagtacgtctttgatgagggta

SEQ ID NO: 13512 - DNA, 33 bp, Homo sapien
agacctgttctcagtatgtctttgatgagggta

SEQ ID NO: 13513 - DNA, 33 bp, Homo sapien
gagattgtaatggaaacgtgaacagtggtggtg

SEQ ID NO: 13514 - DNA, 33 bp, Homo sapien
gagattgtaatggaaatgtgaacagtggtggtg

SEQ ID NO: 13515 - DNA, 33 bp, Homo sapien
acctcccaaaagctaaaagaattcagaagctgg

SEQ ID NO: 13516 - DNA, 33 bp, Homo sapien
acctcccaaaagctaagagaattcagaagctgg

SEQ ID NO: 13517 - DNA, 33 bp, Homo sapien
ttatgtatgatctacaaaaaataaccgtttgac

SEQ ID NO: 13518 - DNA, 33 bp, Homo sapien
ttatgtatgatctacagaaaataaccgtttgac

SEQ ID NO: 13519 - DNA, 33 bp, Homo sapien
taaaaaagacactgataagaaacactgaaaaag

SEQ ID NO: 13520 - DNA, 33 bp, Homo sapien
taaaaaagacactgatgagaaacactgaaaaag

SEQ ID NO: 13521 - DNA, 33 bp, Homo sapien
atatcagctctctagacggcagaatcacatttg

SEQ ID NO: 13522 - DNA, 33 bp, Homo sapien
atatcagctctctagatggcagaatcacatttg

SEQ ID NO: 13523 - DNA, 33 bp, Homo sapien
caggaacagcctgttacattacgtcagctttat

SEQ ID NO: 13524 - DNA, 33 bp, Homo sapien
caggaacagcctgttatattacgtcagctttat

SEQ ID NO: 13525 - DNA, 33 bp, Homo sapien
cagcccttgagccaaacgaaacctaacagctgt

SEQ ID NO: 13526 - DNA, 33 bp, Homo sapien
cagcccttgagccaaatgaaacctaacagctgt

SEQ ID NO: 13527 - DNA, 33 bp, Homo sapien
attgctaaggaaataacttatggcatatacaca

SEQ ID NO: 13528 - DNA, 33 bp, Homo sapien
attgctaaggaaataatttatggcatatacaca

SEQ ID NO: 13529 - DNA, 33 bp, Homo sapien
ctcctctttctttaacactcttcattcaaccca

SEQ ID NO: 13530 - DNA, 33 bp, Homo sapien
ctcctctttctttaacgctcttcattcaaccca

SEQ ID NO: 13531 - DNA, 33 bp, Homo sapien
taggaggagcccctcaccttaaccaccagagag

SEQ ID NO: 13532 - DNA, 33 bp, Homo sapien
taggaggagcccctcatcttaaccaccagagag

SEQ ID NO: 13533 - DNA, 33 bp, Homo sapien
tgaggatggttcttagacatcagcataaacatt

SEQ ID NO: 13534 - DNA, 33 bp, Homo sapien
tgaggatggttcttagtcatcagcataaacatt

SEQ ID NO: 13535 - DNA, 33 bp, Homo sapien
ccaacccttaaatcaactgtaggcagagatgtc

SEQ ID NO: 13536 - DNA, 33 bp, Homo sapien
ccaacccttaaatcaattgtaggcagagatgtc

SEQ ID NO: 13537 - DNA, 33 bp, Homo sapien
ggtatatggaaagctacgatgaaaaatttggaa

SEQ ID NO: 13538 - DNA, 33 bp, Homo sapien
ggtatatggaaagctaggatgaaaaatttggaa

SEQ ID NO: 13539 - DNA, 33 bp, Homo sapien
gaccagaaagtgacaacgtggggtttaaatttt

SEQ ID NO: 13540 - DNA, 33 bp, Homo sapien
gaccagaaagtgacaatgtggggtttaaatttt

SEQ ID NO: 13541 - DNA, 33 bp, Homo sapien
tggcagagccaggaataagaacagggagccgtc

SEQ ID NO: 13542 - DNA, 33 bp, Homo sapien
tggcagagccaggaatgagaacagggagccgtc

SEQ ID NO: 13543 - DNA, 33 bp, Homo sapien
gtgttttctcctctcacattgacactgcacaga

SEQ ID NO: 13544 - DNA, 33 bp, Homo sapien
gtgttttctcctctcagattgacactgcacaga

SEQ ID NO: 13545 - DNA, 33 bp, Homo sapien
agggagttgacgtggaagaggcttggaagtgcc

SEQ ID NO: 13546 - DNA, 33 bp, Homo sapien
agggagttgacgtggaggaggcttggaagtgcc

SEQ ID NO: 13547 - DNA, 33 bp, Homo sapien
ctcctgggttggttagacattgactttgaagtt

SEQ ID NO: 13548 - DNA, 33 bp, Homo sapien
ctcctgggttggttaggcattgactttgaagtt

SEQ ID NO: 13549 - DNA, 33 bp, Homo sapien
tattgtcaaggttcataaagcagtatgttaggt

SEQ ID NO: 13550 - DNA, 33 bp, Homo sapien
tattgtcaaggttcatgaagcagtatgttaggt

SEQ ID NO: 13551 - DNA, 33 bp, Homo sapien
atgtatagatagttcactactgggaaatgcact

SEQ ID NO: 13552 - DNA, 33 bp, Homo sapien
atgtatagatagttcagtactgggaaatgcact

SEQ ID NO: 13553 - DNA, 33 bp, Homo sapien
ttatttggcaataaaaaaggaatcaagcactgg

SEQ ID NO: 13554 - DNA, 33 bp, Homo sapien
ttatttggcaataaaagaggaatcaagcactgg

SEQ ID NO: 13555 - DNA, 33 bp, Homo sapien
aaaatggtgcagcaacgacgttttttctttttt

SEQ ID NO: 13556 - DNA, 33 bp, Homo sapien
aaaatggtgcagcaactacgttttttctttttt

SEQ ID NO: 13557 - DNA, 33 bp, Homo sapien
ataactgattttctacaaactcaacagtgaaca

SEQ ID NO: 13558 - DNA, 33 bp, Homo sapien
ataactgattttctacgaactcaacagtgaaca

SEQ ID NO: 13559 - DNA, 33 bp, Homo sapien
tcttagaaattcatagaaaatggagcttaaagt

SEQ ID NO: 13560 - DNA, 33 bp, Homo sapien
tcttagaaattcataggaaatggagcttaaagt

SEQ ID NO: 13561 - DNA, 33 bp, Homo sapien
cgaaaacaagaaataacgagtgttggcaaggat

SEQ ID NO: 13562 - DNA, 33 bp, Homo sapien
cgaaaacaagaaataatgagtgttggcaaggat

SEQ ID NO: 13563 - DNA, 33 bp, Homo sapien
tcaaaaggtcaagaagaaaaagatgttggaaag

SEQ ID NO: 13564 - DNA, 33 bp, Homo sapien
tcaaaaggtcaagaagtaaaagatgttggaaag

SEQ ID NO: 13565 - DNA, 33 bp, Homo sapien; identical to SEQ ID NO: 13563

SEQ ID NO: 13566 - DNA, 33 bp, Homo sapien; identical to SEQ ID NO: 13564

SEQ ID NO: 13567 - DNA, 33 bp, Homo sapien
acacagtcttcctcaaaactctttcctctcata

SEQ ID NO: 13568 - DNA, 33 bp, Homo sapien
acacagtcttcctcaatactctttcctctcata

SEQ ID NO: 13569 - DNA, 33 bp, Homo sapien
taaaacactcagtcaaatcaaaaccttctcaaa

SEQ ID NO: 13570 - DNA, 33 bp, Homo sapien
taaaacactcagtcaagtcaaaaccttctcaaa

SEQ ID NO: 13571 - DNA, 33 bp, Homo sapien
attcgctaactgaagaacattgatttgagaagg

SEQ ID NO: 13572 - DNA, 33 bp, Homo sapien
attcgctaactgaagagcattgatttgagaagg

SEQ ID NO: 13573 - DNA, 33 bp, Homo sapien
ttgagcaaagaattgcacaaaacacacaaacaa

SEQ ID NO: 13574 - DNA, 33 bp, Homo sapien
ttgagcaaagaattgcgcaaaacacacaaacaa

SEQ ID NO: 13575 - DNA, 33 bp, Homo sapien
gaaagaaagaaacaccaggatacattcaacctg

SEQ ID NO: 13576 - DNA, 33 bp, Homo sapien
gaaagaaagaaacaccgggatacattcaacctg

SEQ ID NO: 13577 - DNA, 33 bp, Homo sapien
aatagcaaggataaaacgtggtctttatcagcc

SEQ ID NO: 13578 - DNA, 33 bp, Homo sapien
aatagcaaggataaaatgtggtctttatcagcc

SEQ ID NO: 13579 - DNA, 33 bp, Homo sapien
aattaaaagcagggaccgaaagagatatttgga

SEQ ID NO: 13580 - DNA, 33 bp, Homo sapien
aattaaaagcagggactgaaagagatatttgga

SEQ ID NO: 13581 - DNA, 33 bp, Homo sapien
actctcacatgtatcaaaagtgggcatgtatac

SEQ ID NO: 13582 - DNA, 33 bp, Homo sapien
actctcacatgtatcagaagtgggcatgtatac

SEQ ID NO: 13583 - DNA, 33 bp, Homo sapien
caataacaagacaactcaagtaaaaagatttga

SEQ ID NO: 13584 - DNA, 33 bp, Homo sapien
caataacaagacaactgaagtaaaaagatttga

SEQ ID NO: 13585 - DNA, 33 bp, Homo sapien
gtacatttcagaaaaaaagcatgaaagatatgg

SEQ ID NO: 13586 - DNA, 33 bp, Homo sapien
gtacatttcagaaaaagagcatgaaagatatgg

SEQ ID NO: 13587 - DNA, 33 bp, Homo sapien
tcagggctcctggtaacgtaggctaagattgtg

SEQ ID NO: 13588 - DNA, 33 bp, Homo sapien
tcagggctcctggtaatgtaggctaagattgtg

SEQ ID NO: 13589 - DNA, 33 bp, Homo sapien
gaagaacctgaggtcacgtggggataaagcaca

SEQ ID NO: 13590 - DNA, 33 bp, Homo sapien
gaagaacctgaggtcatgtggggataaagcaca

SEQ ID NO: 13591 - DNA, 33 bp, Homo sapien
aagccacagttcctacacattaaattgaaatac

SEQ ID NO: 13592 - DNA, 33 bp, Homo sapien
aagccacagttcctacgcattaaattgaaatac

SEQ ID NO: 13593 - DNA, 33 bp, Homo sapien
acacctactggacctaaaacagcacctggtgta

SEQ ID NO: 13594 - DNA, 33 bp, Homo sapien
acacctactggacctagaacagcacctggtgta

SEQ ID NO: 13595 - DNA, 33 bp, Homo sapien
caaggtcacgcagctacgaagtggtgggactgc

SEQ ID NO: 13596 - DNA, 33 bp, Homo sapien
caaggtcacgcagctaggaagtggtgggactgc

SEQ ID NO: 13597 - DNA, 33 bp, Homo sapien
gacttgttcatactagacagctaagaagaggca

SEQ ID NO: 13598 - DNA, 33 bp, Homo sapien
gacttgttcatactagccagctaagaagaggca

SEQ ID NO: 13599 - DNA, 33 bp, Homo sapien
taaaaggagggccatcaactgcatagcaacccc

SEQ ID NO: 13600 - DNA, 33 bp, Homo sapien
taaaaggagggccatccactgcatagcaacccc

SEQ ID NO: 13601 - DNA, 33 bp, Homo sapien
aggaaggcaatacagactccagacataccttga

SEQ ID NO: 13602 - DNA, 33 bp, Homo sapien
aggaaggcaatacagattccagacataccttga

SEQ ID NO: 13603 - DNA, 33 bp, Homo sapien
aaggaattgtagaggcaaagaagggatgaggaa

SEQ ID NO: 13604 - DNA, 33 bp, Homo sapien
aaggaattgtagaggcgaagaagggatgaggaa

SEQ ID NO: 13605 - DNA, 33 bp, Homo sapien
cctatataaacttccaaatagactcctggagtc

SEQ ID NO: 13606 - DNA, 33 bp, Homo sapien
cctatataaacttccagatagactcctggagtc

SEQ ID NO: 13607 - DNA, 33 bp, Homo sapien
acaggggagttgtaaacattaaatgagaaaaca

SEQ ID NO: 13608 - DNA, 33 bp, Homo sapien
acaggggagttgtaaagattaaatgagaaaaca

SEQ ID NO: 13609 - DNA, 33 bp, Homo sapien
attgtcaggtggcagaaggagttgaagtagaga

SEQ ID NO: 13610 - DNA, 33 bp, Homo sapien
attgtcaggtggcagagggagttgaagtagaga

SEQ ID NO: 13611 - DNA, 33 bp, Homo sapien
gatctgccacctagaggattctagttcttttga

SEQ ID NO: 13612 - DNA, 33 bp, Homo sapien
gatctgccacctagagtattctagttcttttga

SEQ ID NO: 13613 - DNA, 33 bp, Homo sapien
tctcaattaagccacactgagcattaggatttc

SEQ ID NO: 13614 - DNA, 33 bp, Homo sapien
tctcaattaagccacattgagcattaggatttc

SEQ ID NO: 13615 - DNA, 33 bp, Homo sapien
tgaagatgtgcagagccacagctgacacacata

SEQ ID NO: 13616 - DNA, 33 bp, Homo sapien
tgaagatgtgcagagcgacagctgacacacata

SEQ ID NO: 13617 - DNA, 33 bp, Homo sapien
gaaacaccgaaacccaagtgacaggctgagagt

SEQ ID NO: 13618 - DNA, 33 bp, Homo sapien
gaaacaccgaaacccacgtgacaggctgagagt

SEQ ID NO: 13619 - DNA, 33 bp, Homo sapien
ctgagccaaatgaggccgaaatgaccaatgtac

SEQ ID NO: 13620 - DNA, 33 bp, Homo sapien
ctgagccaaatgaggctgaaatgaccaatgtac

SEQ ID NO: 13621 - DNA, 33 bp, Homo sapien
tcaccttgtctagtctcactaaaaacgaaacta

SEQ ID NO: 13622 - DNA, 33 bp, Homo sapien
tcaccttgtctagtcttactaaaaacgaaacta

SEQ ID NO: 13623 - DNA, 33 bp, Homo sapien
ctcttctcttttaaaaggaacagatcatgccag

SEQ ID NO: 13624 - DNA, 33 bp, Homo sapien
ctcttctcttttaaaatgaacagatcatgccag

SEQ ID NO: 13625 - DNA, 33 bp, Homo sapien
atttatttaatgcatacgttgagaccaccagtc

SEQ ID NO: 13626 - DNA, 33 bp, Homo sapien
atttatttaatgcatatgttgagaccaccagtc

SEQ ID NO: 13627 - DNA, 33 bp, Homo sapien
tttaccttgttgtacacgcctggattaagggga

SEQ ID NO: 13628 - DNA, 33 bp, Homo sapien
tttaccttgttgtacatgcctggattaagggga

SEQ ID NO: 13629 - DNA, 33 bp, Homo sapien
tcagtagttctcaacaagggatgatttttgccc

SEQ ID NO: 13630 - DNA, 33 bp, Homo sapien
tcagtagttctcaacaggggatgatttttgccc

SEQ ID NO: 13631 - DNA, 33 bp, Homo sapien
accagaaagaatcaagaactatgtcctctgtgc

SEQ ID NO: 13632 - DNA, 33 bp, Homo sapien
accagaaagaatcaagcactatgtcctctgtgc

SEQ ID NO: 13633 - DNA, 33 bp, Homo sapien
ctgtttccaaacgtaaacaacttctggttggga

SEQ ID NO: 13634 - DNA, 33 bp, Homo sapien
ctgtttccaaacgtaatcaacttctggttggga

SEQ ID NO: 13635 - DNA, 33 bp, Homo sapien
tgtgtcacacaggtcactccggatcagacgccg

SEQ ID NO: 13636 - DNA, 33 bp, Homo sapien
tgtgtcacacaggtcattccggatcagacgccg

SEQ ID NO: 13637 - DNA, 33 bp, Homo sapien
cgtaggggaccatctacgcaagtttggaaagat

SEQ ID NO: 13638 - DNA, 33 bp, Homo sapien
cgtaggggaccatctatgcaagtttggaaagat

SEQ ID NO: 13639 - DNA, 33 bp, Homo sapien
ggtaaagttttcaccactgcagaggcacaagca

SEQ ID NO: 13640 - DNA, 33 bp, Homo sapien
ggtaaagttttcaccattgcagaggcacaagca

SEQ ID NO: 13641 - DNA, 33 bp, Homo sapien
aggttcatttaagacaaagaagagttccacctt

SEQ ID NO: 13642 - DNA, 33 bp, Homo sapien
aggttcatttaagacagagaagagttccacctt

SEQ ID NO: 13643 - DNA, 33 bp, Homo sapien
ctgagccagatattctaagaaaagaaggagagg

SEQ ID NO: 13644 - DNA, 33 bp, Homo sapien
ctgagccagatattctgagaaaagaaggagagg

SEQ ID NO: 13645 - DNA, 33 bp, Homo sapien
tttaaatggcccttgccgagaaacttctaattc

SEQ ID NO: 13646 - DNA, 33 bp, Homo sapien
tttaaatggcccttgctgagaaacttctaattc

SEQ ID NO: 13647 - DNA, 33 bp, Homo sapien
cacctgagtgaattaaaagccatacaaggcaag

SEQ ID NO: 13648 - DNA, 33 bp, Homo sapien
cacctgagtgaattaacagccatacaaggcaag

SEQ ID NO: 13649 - DNA, 33 bp, Homo sapien
atggaatcctttttacagacagaattgtaaggt

SEQ ID NO: 13650 - DNA, 33 bp, Homo sapien
atggaatcctttttaccgacagaattgtaaggt

SEQ ID NO: 13651 - DNA, 33 bp, Homo sapien
ctttgagtgtgacccaaatttttcgtgctgctg

SEQ ID NO: 13652 - DNA, 33 bp, Homo sapien
ctttgagtgtgacccacatttttcgtgctgctg

SEQ ID NO: 13653 - DNA, 33 bp, Homo sapien
tatagccagtatctggacatatcttgccacttc

SEQ ID NO: 13654 - DNA, 33 bp, Homo sapien
tatagccagtatctggtcatatcttgccacttc

SEQ ID NO: 13655 - DNA, 33 bp, Homo sapien
gacttcattccattgactactcactctgtctcc

SEQ ID NO: 13656 - DNA, 33 bp, Homo sapien
gacttcattccattgattactcactctgtctcc

SEQ ID NO: 13657 - DNA, 33 bp, Homo sapien
tccttaaggtcaccacaaaacatgaatataaat

SEQ ID NO: 13658 - DNA, 33 bp, Homo sapien
tccttaaggtcaccacgaaacatgaatataaat

SEQ ID NO: 13659 - DNA, 33 bp, Homo sapien
cacacaaatgaagagaagatggtgcagacaggg

SEQ ID NO: 13660 - DNA, 33 bp, Homo sapien
cacacaaatgaagagaggatggtgcagacaggg

SEQ ID NO: 13661 - DNA, 33 bp, Homo sapien
gtgtatttgactgataactttctctccccctag

SEQ ID NO: 13662 - DNA, 33 bp, Homo sapien
gtgtatttgactgatatctttctctccccctag

SEQ ID NO: 13663 - DNA, 33 bp, Homo sapien
ggcctagtacctgtacactccccacggctcctt

SEQ ID NO: 13664 - DNA, 33 bp, Homo sapien
ggcctagtacctgtacgctccccacggctcctt

SEQ ID NO: 13665 - DNA, 33 bp, Homo sapien
aaaatgcagatgtaaacagggtctgcttccact

SEQ ID NO: 13666 - DNA, 33 bp, Homo sapien
aaaatgcagatgtaaatagggtctgcttccact

SEQ ID NO: 13667 - DNA, 33 bp, Homo sapien
gaactcacttccacaaggactttctttagggcc

SEQ ID NO: 13668 - DNA, 33 bp, Homo sapien
gaactcacttccacaatgactttctttagggcc

SEQ ID NO: 13669 - DNA, 33 bp, Homo sapien
gtggaggacaggagaaagggttgcacggaccgg

SEQ ID NO: 13670 - DNA, 33 bp, Homo sapien
gtggaggacaggagaaggggttgcacggaccgg

SEQ ID NO: 13671 - DNA, 33 bp, Homo sapien
acttttgggaatataggaggtgctcaacaaata

SEQ ID NO: 13672 - DNA, 33 bp, Homo sapien
acttttgggaatatagtaggtgctcaacaaata

SEQ ID NO: 13673 - DNA, 33 bp, Homo sapien
atggtaaccacaggaaactaatacggcggatta

SEQ ID NO: 13674 - DNA, 33 bp, Homo sapien
atggtaaccacaggaagctaatacggcggatta

SEQ ID NO: 13675 - DNA, 33 bp, Homo sapien
ctcccagtgagaatacacccagtccctgttgtg

SEQ ID NO: 13676 - DNA, 33 bp, Homo sapien
ctcccagtgagaatactcccagtccctgttgtg

SEQ ID NO: 13677 - DNA, 33 bp, Homo sapien
tcttttgaagaatgaacgactctatctcgatta

SEQ ID NO: 13678 - DNA, 33 bp, Homo sapien
tcttttgaagaatgaatgactctatctcgatta

SEQ ID NO: 13679 - DNA, 33 bp, Homo sapien
ttaaggtactagctgcaaatttgaaagactttg

SEQ ID NO: 13680 - DNA, 33 bp, Homo sapien
ttaaggtactagctgcgaatttgaaagactttg

SEQ ID NO: 13681 - DNA, 33 bp, Homo sapien
tataagaatacgccgaacccagctacgcgacgc

SEQ ID NO: 13682 - DNA, 33 bp, Homo sapien
tataagaatacgccgagcccagctacgcgacgc

SEQ ID NO: 13683 - DNA, 33 bp, Homo sapien
atatctggaatgctaaatcagagaaggtaagcc

SEQ ID NO: 13684 - DNA, 33 bp, Homo sapien
atatctggaatgctaactcagagaaggtaagcc

SEQ ID NO: 13685 - DNA, 33 bp, Homo sapien
ctcaggtgaagcagacagattttcttcttaaac

SEQ ID NO: 13686 - DNA, 33 bp, Homo sapien
ctcaggtgaagcagacggattttcttcttaaac

SEQ ID NO: 13687 - DNA, 33 bp, Homo sapien
gattgagaggtttaaaagagaccatgcatatag

SEQ ID NO: 13688 - DNA, 33 bp, Homo sapien
gattgagaggtttaaaggagaccatgcatatag

SEQ ID NO: 13689 - DNA, 33 bp, Homo sapien
caaacacagaagaataaagcagatatagtaaaa

SEQ ID NO: 13690 - DNA, 33 bp, Homo sapien
caaacacagaagaatatagcagatatagtaaaa

SEQ ID NO: 13691 - DNA, 33 bp, Homo sapien
caataggcctcacagccattccacctcccgtgg

SEQ ID NO: 13692 - DNA, 33 bp, Homo sapien
caataggcctcacagctattccacctcccgtgg

SEQ ID NO: 13693 - DNA, 33 bp, Homo sapien
atgttgtatttaaccaccatgtctccttactcg

SEQ ID NO: 13694 - DNA, 33 bp, Homo sapien
atgttgtatttaaccatcatgtctccttactcg

SEQ ID NO: 13695 - DNA, 33 bp, Homo sapien
acatcaccagcaacaaattatgctgatctcata

SEQ ID NO: 13696 - DNA, 33 bp, Homo sapien
acatcaccagcaacaagttatgctgatctcata

SEQ ID NO: 13697 - DNA, 33 bp, Homo sapien
aaggtctctagtgggccaatccaaagattcact

SEQ ID NO: 13698 - DNA, 33 bp, Homo sapien
aaggtctctagtgggctaatccaaagattcact

SEQ ID NO: 13699 - DNA, 33 bp, Homo sapien
caacccaaaaattgcccctttctccttaacacc

SEQ ID NO: 13700 - DNA, 33 bp, Homo sapien
caacccaaaaattgcctctttctccttaacacc

SEQ ID NO: 13701 - DNA, 33 bp, Homo sapien
ctgaggttgagggacacgagtggacttggctga

SEQ ID NO: 13702 - DNA, 33 bp, Homo sapien
ctgaggttgagggacatgagtggacttggctga

SEQ ID NO: 13703 - DNA, 33 bp, Homo sapien
tcatgctatcattctgaagccttctttgtttac

SEQ ID NO: 13704 - DNA, 33 bp, Homo sapien
tcatgctatcattctggagccttctttgtttac

SEQ ID NO: 13705 - DNA, 33 bp, Homo sapien
agccttctttgtttaccccagaccacattcatc

SEQ ID NO: 13706 - DNA, 33 bp, Homo sapien
agccttctttgtttactccagaccacattcatc

SEQ ID NO: 13707 - DNA, 33 bp, Homo sapien
tagctatatgcggatacgtgaaacaaaaagatg

SEQ ID NO: 13708 - DNA, 33 bp, Homo sapien
tagctatatgcggatatgtgaaacaaaaagatg

SEQ ID NO: 13709 - DNA, 33 bp, Homo sapien
ttaagtaagtcaaagccacaatcctggaagaac

SEQ ID NO: 13710 - DNA, 33 bp, Homo sapien
ttaagtaagtcaaagctacaatcctggaagaac

SEQ ID NO: 13711 - DNA, 33 bp, Homo sapien
ccatataaagatacataaggctgcacaactcca

SEQ ID NO: 13712 - DNA, 33 bp, Homo sapien
ccatataaagatacatgaggctgcacaactcca

SEQ ID NO: 13713 - DNA, 33 bp, Homo sapien
aacattgcaggaaagaaatttgtttaaccttgt

SEQ ID NO: 13714 - DNA, 33 bp, Homo sapien
aacattgcaggaaagacatttgtttaaccttgt

SEQ ID NO: 13715 - DNA, 33 bp, Homo sapien
gttcccactcaaatgcactggacgttataaagc

SEQ ID NO: 13716 - DNA, 33 bp, Homo sapien
gttcccactcaaatgcgctggacgttataaagc

SEQ ID NO: 13717 - DNA, 33 bp, Homo sapien
actttaaccatgcaaaagttgtctaaatctaat

SEQ ID NO: 13718 - DNA, 33 bp, Homo sapien
actttaaccatgcaaatgttgtctaaatctaat

SEQ ID NO: 13719 - DNA, 33 bp, Homo sapien
gctttaggactcatagaaagggcacctaacaca

SEQ ID NO: 13720 - DNA, 33 bp, Homo sapien
gctttaggactcataggaagggcacctaacaca

SEQ ID NO: 13721 - DNA, 33 bp, Homo sapien
atctctcagagtgtagcatttaattcactgccc

SEQ ID NO: 13722 - DNA, 33 bp, Homo sapien
atctctcagagtgtagtatttaattcactgccc

SEQ ID NO: 13723 - DNA, 33 bp, Homo sapien
agacatataccttactaagactataccctggtc

SEQ ID NO: 13724 - DNA, 33 bp, Homo sapien
agacatataccttactgagactataccctggtc

SEQ ID NO: 13725 - DNA, 33 bp, Homo sapien
gctaccattcagactcaagacccctgcaggcta

SEQ ID NO: 13726 - DNA, 33 bp, Homo sapien
gctaccattcagactccagacccctgcaggcta

SEQ ID NO: 13727 - DNA, 33 bp, Homo sapien
ctttataactaactcacaagaccaggatgacaa

SEQ ID NO: 13728 - DNA, 33 bp, Homo sapien
ctttataactaactcagaagaccaggatgacaa

SEQ ID NO: 13729 - DNA, 33 bp, Homo sapien
cttgcatggtttcttacgagacattagatataa

SEQ ID NO: 13730 - DNA, 33 bp, Homo sapien
cttgcatggtttcttatgagacattagatataa

SEQ ID NO: 13731 - DNA, 33 bp, Homo sapien
acagcaacaaattgaaccagctgggggtggtgg

SEQ ID NO: 13732 - DNA, 33 bp, Homo sapien
acagcaacaaattgaatcagctgggggtggtgg

SEQ ID NO: 13733 - DNA, 33 bp, Homo sapien
tttgcctgtgaaagcaatcatgcaaactctcat

SEQ ID NO: 13734 - DNA, 33 bp, Homo sapien
tttgcctgtgaaagcactcatgcaaactctcat

SEQ ID NO: 13735 - DNA, 33 bp, Homo sapien
aggactgaagtcagtgaaagctaataaacaagc

SEQ ID NO: 13736 - DNA, 33 bp, Homo sapien
aggactgaagtcagtggaagctaataaacaagc

SEQ ID NO: 13737 - DNA, 33 bp, Homo sapien
acaattttactgctacgcactctctaacctaat

SEQ ID NO: 13738 - DNA, 33 bp, Homo sapien
acaattttactgctactcactctctaacctaat

SEQ ID NO: 13739 - DNA, 33 bp, Homo sapien
cattcttttttgagccacattcctttaagcttt

SEQ ID NO: 13740 - DNA, 33 bp, Homo sapien
cattcttttttgagccgcattcctttaagcttt

SEQ ID NO: 13741 - DNA, 33 bp, Homo sapien
ttcatttcttccactcaaataccactgcctcaa

SEQ ID NO: 13742 - DNA, 33 bp, Homo sapien
ttcatttcttccactccaataccactgcctcaa

SEQ ID NO: 13743 - DNA, 33 bp, Homo sapien
acaagataaaaaagagcaagtatctgatgaaaa

SEQ ID NO: 13744 - DNA, 33 bp, Homo sapien
acaagataaaaaagaggaagtatctgatgaaaa

SEQ ID NO: 13745 - DNA, 33 bp, Homo sapien
tggtgataaaagagaactgtaaaagcactttcc

SEQ ID NO: 13746 - DNA, 33 bp, Homo sapien
tggtgataaaagagaattgtaaaagcactttcc

SEQ ID NO: 13747 - DNA, 33 bp, Homo sapien
aagttgaaccaaacttaaagacataatggccat

SEQ ID NO: 13748 - DNA, 33 bp, Homo sapien
aagttgaaccaaacttcaagacataatggccat

SEQ ID NO: 13749 - DNA, 33 bp, Homo sapien
gattctggaagagagacatggaatgggagtttt

SEQ ID NO: 13750 - DNA, 33 bp, Homo sapien
gattctggaagagagatatggaatgggagtttt

SEQ ID NO: 13751 - DNA, 33 bp, Homo sapien
tttttcctgaccaaaacagagcactttcctggc

SEQ ID NO: 13752 - DNA, 33 bp, Homo sapien
tttttcctgaccaaaatagagcactttcctggc

SEQ ID NO: 13753 - DNA, 33 bp, Homo sapien
tgttgtggcttattagaaaaaaaagctgggtgg

SEQ ID NO: 13754 - DNA, 33 bp, Homo sapien
tgttgtggcttattaggaaaaaaagctgggtgg

SEQ ID NO: 13755 - DNA, 33 bp, Homo sapien
gtgaatatctgaataacggctttagatgaggat

SEQ ID NO: 13756 - DNA, 33 bp, Homo sapien
gtgaatatctgaataatggctttagatgaggat

SEQ ID NO: 13757 - DNA, 33 bp, Homo sapien
aggtcacctgatagaccgatcttcctcatccat

SEQ ID NO: 13758 - DNA, 33 bp, Homo sapien
aggtcacctgatagactgatcttcctcatccat

SEQ ID NO: 13759 - DNA, 33 bp, Homo sapien
aataatttgatgcttaaaaacaaaactttcaga

SEQ ID NO: 13760 - DNA, 33 bp, Homo sapien
aataatttgatgcttagaaacaaaactttcaga

SEQ ID NO: 13761 - DNA, 33 bp, Homo sapien
gacaacatgagacccaagctactttatattttt

SEQ ID NO: 13762 - DNA, 33 bp, Homo sapien
gacaacatgagacccaggctactttatattttt

SEQ ID NO: 13763 - DNA, 33 bp, Homo sapien
tgttcatcatctgataaatggataaataaaatg

SEQ ID NO: 13764 - DNA, 33 bp, Homo sapien
tgttcatcatctgatacatggataaataaaatg

SEQ ID NO: 13765 - DNA, 33 bp, Homo sapien
ttttataacatttccagaatcccctcaaaatga

SEQ ID NO: 13766 - DNA, 33 bp, Homo sapien
ttttataacatttccataatcccctcaaaatga

SEQ ID NO: 13767 - DNA, 33 bp, Homo sapien
ttggagcctactgaataagaacttctgaaggtg

SEQ ID NO: 13768 - DNA, 33 bp, Homo sapien
ttggagcctactgaatgagaacttctgaaggtg

SEQ ID NO: 13769 - DNA, 33 bp, Homo sapien
ataatgataaagtttaagaggtagtacaggttg

SEQ ID NO: 13770 - DNA, 33 bp, Homo sapien
ataatgataaagtttacgaggtagtacaggttg

SEQ ID NO: 13771 - DNA, 33 bp, Homo sapien
tctcaattggatatacaagctcttcaagtattt

SEQ ID NO: 13772 - DNA, 33 bp, Homo sapien
tctcaattggatataccagctcttcaagtattt

SEQ ID NO: 13773 - DNA, 33 bp, Homo sapien
aatctcttatctgtccccaaagccatatgagtg

SEQ ID NO: 13774 - DNA, 33 bp, Homo sapien
aatctcttatctgtccgcaaagccatatgagtg

SEQ ID NO: 13775 - DNA, 33 bp, Homo sapien
tatctagggtcttgtacgaatcctacagaatta

SEQ ID NO: 13776 - DNA, 33 bp, Homo sapien
tatctagggtcttgtatgaatcctacagaatta

SEQ ID NO: 13777 - DNA, 33 bp, Homo sapien
gttaagagtggtttaacagaaagttatttcttt

SEQ ID NO: 13778 - DNA, 33 bp, Homo sapien
gttaagagtggtttaatagaaagttatttcttt

SEQ ID NO: 13779 - DNA, 33 bp, Homo sapien
agtactatacaagataaaagtcacttggtcttt

SEQ ID NO: 13780 - DNA, 33 bp, Homo sapien
agtactatacaagatacaagtcacttggtcttt

SEQ ID NO: 13781 - DNA, 33 bp, Homo sapien
ccctttggaaactctccaatgtatgcataaagg

SEQ ID NO: 13782 - DNA, 33 bp, Homo sapien
ccctttggaaactctctaatgtatgcataaagg

SEQ ID NO: 13783 - DNA, 33 bp, Homo sapien
aaaggaagccaggtcaaaataagaataacagta

SEQ ID NO: 13784 - DNA, 33 bp, Homo sapien
aaaggaagccaggtcagaataagaataacagta

SEQ ID NO: 13785 - DNA, 33 bp, Homo sapien
tgctcatgtttgcctcacttactcctacctacc

SEQ ID NO: 13786 - DNA, 33 bp, Homo sapien
tgctcatgtttgcctcgcttactcctacctacc

SEQ ID NO: 13787 - DNA, 33 bp, Homo sapien
tctttgccatactatagaaagtgcctcctctct

SEQ ID NO: 13788 - DNA, 33 bp, Homo sapien
tctttgccatactatataaagtgcctcctctct

SEQ ID NO: 13789 - DNA, 33 bp, Homo sapien
atacaactaagcaaaagtctatcaactgaccaa

SEQ ID NO: 13790 - DNA, 33 bp, Homo sapien
atacaactaagcaaaattctatcaactgaccaa

SEQ ID NO: 13791 - DNA, 33 bp, Homo sapien
tgaatccattgttagcagcattaaatagcaaca

SEQ ID NO: 13792 - DNA, 33 bp, Homo sapien
tgaatccattgttagcggcattaaatagcaaca

SEQ ID NO: 13793 - DNA, 33 bp, Homo sapien
tatacacctgtgaaaccgtcactacaataaaga

SEQ ID NO: 13794 - DNA, 33 bp, Homo sapien
tatacacctgtgaaactgtcactacaataaaga

SEQ ID NO: 13795 - DNA, 33 bp, Homo sapien
tgcacacctccactgacggggcactcactctct

SEQ ID NO: 13796 - DNA, 33 bp, Homo sapien
tgcacacctccactgatggggcactcactctct

SEQ ID NO: 13797 - DNA, 33 bp, Homo sapien
tggctcctgttcctacaacactagacctcctga

SEQ ID NO: 13798 - DNA, 33 bp, Homo sapien
tggctcctgttcctacgacactagacctcctga

SEQ ID NO: 13799 - DNA, 33 bp, Homo sapien
gggctcccgctgggtcaagagcagtgccttctg

SEQ ID NO: 13800 - DNA, 33 bp, Homo sapien
gggctcccgctgggtcgagagcagtgccttctg

SEQ ID NO: 13801 - DNA, 33 bp, Homo sapien
aactgacggtctgcacaggtgaaggtttgtgag

SEQ ID NO: 13802 - DNA, 33 bp, Homo sapien
aactgacggtctgcacgggtgaaggtttgtgag

SEQ ID NO: 13803 - DNA, 33 bp, Homo sapien
tccagctccattcagactcacacttgggttggt

SEQ ID NO: 13804 - DNA, 33 bp, Homo sapien
tccagctccattcagattcacacttgggttggt

SEQ ID NO: 13805 - DNA, 33 bp, Homo sapien
tgcacatatgtgccccaacatgcagacactgct

SEQ ID NO: 13806 - DNA, 33 bp, Homo sapien
tgcacatatgtgccccgacatgcagacactgct

SEQ ID NO: 13807 - DNA, 33 bp, Homo sapien
gcccacatggataaccaagaaatagcacacact

SEQ ID NO: 13808 - DNA, 33 bp, Homo sapien
gcccacatggataacccagaaatagcacacact

SEQ ID NO: 13809 - DNA, 33 bp, Homo sapien
tatatgtacagtatgcacaacagtgccacattt

SEQ ID NO: 13810 - DNA, 33 bp, Homo sapien
tatatgtacagtatgcccaacagtgccacattt

SEQ ID NO: 13811 - DNA, 33 bp, Homo sapien
gcaagcccagaggaacacagcctttccgaagag

SEQ ID NO: 13812 - DNA, 33 bp, Homo sapien
gcaagcccagaggaacgcagcctttccgaagag

SEQ ID NO: 13813 - DNA, 33 bp, Homo sapien
tcctaggtactcagtgaaacagtggtcctctac

SEQ ID NO: 13814 - DNA, 33 bp, Homo sapien
tcctaggtactcagtgcaacagtggtcctctac

SEQ ID NO: 13815 - DNA, 33 bp, Homo sapien
tgtgaaggatcacgtacgattccatttatataa

SEQ ID NO: 13816 - DNA, 33 bp, Homo sapien
tgtgaaggatcacgtatgattccatttatataa

SEQ ID NO: 13817 - DNA, 33 bp, Homo sapien
gagaagcatgctgttggaaggttcttactctgt

SEQ ID NO: 13818 - DNA, 33 bp, Homo sapien
gagaagcatgctgttgtaaggttcttactctgt

SEQ ID NO: 13819 - DNA, 33 bp, Homo sapien
ctcagtcctctgaacacgatagggcagccccat

SEQ ID NO: 13820 - DNA, 33 bp, Homo sapien
ctcagtcctctgaacaggatagggcagccccat

SEQ ID NO: 13821 - DNA, 33 bp, Homo sapien
atagcacaggtcttgacgtagtaggagatgggg

SEQ ID NO: 13822 - DNA, 33 bp, Homo sapien
atagcacaggtcttgatgtagtaggagatgggg

SEQ ID NO: 13823 - DNA, 33 bp, Homo sapien
atcacatacatagtgaactaatgatgaaaccaa

SEQ ID NO: 13824 - DNA, 33 bp, Homo sapien
atcacatacatagtgatctaatgatgaaaccaa

SEQ ID NO: 13825 - DNA, 33 bp, Homo sapien
taatgccaacctctccggattgattaaggatca

SEQ ID NO: 13826 - DNA, 33 bp, Homo sapien
taatgccaacctctcctgattgattaaggatca

SEQ ID NO: 13827 - DNA, 33 bp, Homo sapien
gatgacagtaaaataacgccaacctctcctgat

SEQ ID NO: 13828 - DNA, 33 bp, Homo sapien
gatgacagtaaaataatgccaacctctcctgat

SEQ ID NO: 13829 - DNA, 33 bp, Homo sapien
gggtaagaaacaagacaactcagagaaggccaa

SEQ ID NO: 13830 - DNA, 33 bp, Homo sapien
gggtaagaaacaagacgactcagagaaggccaa

SEQ ID NO: 13831 - DNA, 33 bp, Homo sapien
tcacaaccacctgagaagcagaaagtattattc

SEQ ID NO: 13832 - DNA, 33 bp, Homo sapien
tcacaaccacctgagaggcagaaagtattattc

SEQ ID NO: 13833 - DNA, 33 bp, Homo sapien
tgctccctcacgttcaaatcagacttgggttct

SEQ ID NO: 13834 - DNA, 33 bp, Homo sapien
tgctccctcacgttcagatcagacttgggttct

SEQ ID NO: 13835 - DNA, 33 bp, Homo sapien
ggaaccaatatccaaaagaaggcatgaggctct

SEQ ID NO: 13836 - DNA, 33 bp, Homo sapien
ggaaccaatatccaaaggaaggcatgaggctct

SEQ ID NO: 13837 - DNA, 33 bp, Homo sapien
atgaagtctatgcaaaatttccttgaagtctaa

SEQ ID NO: 13838 - DNA, 33 bp, Homo sapien
atgaagtctatgcaaagtttccttgaagtctaa

SEQ ID NO: 13839 - DNA, 33 bp, Homo sapien
ccatttcatctaaatccccttcccaatgccagt

SEQ ID NO: 13840 - DNA, 33 bp, Homo sapien
ccatttcatctaaatctccttcccaatgccagt

SEQ ID NO: 13841 - DNA, 33 bp, Homo sapien
catgctgccactcaacagtattgacctggctgg

SEQ ID NO: 13842 - DNA, 33 bp, Homo sapien
catgctgccactcaacggtattgacctggctgg

SEQ ID NO: 13843 - DNA, 33 bp, Homo sapien
aaccctatcatttactcaccaagaaacagaggg

SEQ ID NO: 13844 - DNA, 33 bp, Homo sapien
aaccctatcatttacttaccaagaaacagaggg

SEQ ID NO: 13845 - DNA, 33 bp, Homo sapien
ctcaggactcagaaggacatcctggattcccac

SEQ ID NO: 13846 - DNA, 33 bp, Homo sapien
ctcaggactcagaaggccatcctggattcccac

SEQ ID NO: 13847 - DNA, 33 bp, Homo sapien
tgtatcttagtgtgaacgtatatacaagcatat

SEQ ID NO: 13848 - DNA, 33 bp, Homo sapien
tgtatcttagtgtgaatgtatatacaagcatat

SEQ ID NO: 13849 - DNA, 33 bp, Homo sapien
attcttatgcccaaatgacccaggatcagagtc

SEQ ID NO: 13850 - DNA, 33 bp, Homo sapien
attcttatgcccaaattacccaggatcagagtc

SEQ ID NO: 13851 - DNA, 33 bp, Homo sapien
tagctcactaatgtccaacaggtgcccaggcct

SEQ ID NO: 13852 - DNA, 33 bp, Homo sapien
tagctcactaatgtccgacaggtgcccaggcct

SEQ ID NO: 13853 - DNA, 33 bp, Homo sapien
cagagcaggcaaagaccgactgggtttgggtgg

SEQ ID NO: 13854 - DNA, 33 bp, Homo sapien
cagagcaggcaaagactgactgggtttgggtgg

SEQ ID NO: 13855 - DNA, 33 bp, Homo sapien
gtctcaaataggcataacctttccaaacacact

SEQ ID NO: 13856 - DNA, 33 bp, Homo sapien
gtctcaaataggcataccctttccaaacacact

SEQ ID NO: 13857 - DNA, 33 bp, Homo sapien
attgtgccaacctcacggggctgtctcaagggt

SEQ ID NO: 13858 - DNA, 33 bp, Homo sapien
attgtgccaacctcactgggctgtctcaagggt

SEQ ID NO: 13859 - DNA, 33 bp, Homo sapien
ataaaagactccaaagcctgaaagaaggtgaag

SEQ ID NO: 13860 - DNA, 33 bp, Homo sapien
ataaaagactccaaaggctgaaagaaggtgaag

SEQ ID NO: 13861 - DNA, 33 bp, Homo sapien
agtccctagctcaataactgatgtggccttatg

SEQ ID NO: 13862 - DNA, 33 bp, Homo sapien
agtccctagctcaatagctgatgtggccttatg

SEQ ID NO: 13863 - DNA, 33 bp, Homo sapien
cattcccatttgttcccgctaaagagagacaga

SEQ ID NO: 13864 - DNA, 33 bp, Homo sapien
cattcccatttgttcctgctaaagagagacaga

SEQ ID NO: 13865 - DNA, 33 bp, Homo sapien
ccgacttcaagccccacgagaaatccccagccg

SEQ ID NO: 13866 - DNA, 33 bp, Homo sapien
ccgacttcaagccccatgagaaatccccagccg

SEQ ID NO: 13867 - DNA, 33 bp, Homo sapien
catagaacagaattgaaggcagaaggaattcta

SEQ ID NO: 13868 - DNA, 33 bp, Homo sapien
catagaacagaattgagggcagaaggaattcta

SEQ ID NO: 13869 - DNA, 33 bp, Homo sapien
atctagaatagcccacccagtgatatgcctttt

SEQ ID NO: 13870 - DNA, 33 bp, Homo sapien
atctagaatagcccactcagtgatatgcctttt

SEQ ID NO: 13871 - DNA, 33 bp, Homo sapien
gcagattctgaattaaaaggtctcagttgaggt

SEQ ID NO: 13872 - DNA, 33 bp, Homo sapien
gcagattctgaattaagaggtctcagttgaggt

SEQ ID NO: 13873 - DNA, 33 bp, Homo sapien
tgctctgcaagtgtaaccagaatcacctgcctc

SEQ ID NO: 13874 - DNA, 33 bp, Homo sapien
tgctctgcaagtgtaatcagaatcacctgcctc

SEQ ID NO: 13875 - DNA, 33 bp, Homo sapien
aagcttagaagcttcacagtagcacgcaatagg

SEQ ID NO: 13876 - DNA, 33 bp, Homo sapien
aagcttagaagcttcatagtagcacgcaatagg

SEQ ID NO: 13877 - DNA, 33 bp, Homo sapien
gcccaggggccaaggaaggcaattggaagagag

SEQ ID NO: 13878 - DNA, 33 bp, Homo sapien
gcccaggggccaaggacggcaattggaagagag

SEQ ID NO: 13879 - DNA, 33 bp, Homo sapien
caaacaccagcctttacgtatggtagtctcaga

SEQ ID NO: 13880 - DNA, 33 bp, Homo sapien
caaacaccagcctttatgtatggtagtctcaga

SEQ ID NO: 13881 - DNA, 33 bp, Homo sapien
ggactatggtggcccaagacctcatccaggtag

SEQ ID NO: 13882 - DNA, 33 bp, Homo sapien
ggactatggtggcccacgacctcatccaggtag

SEQ ID NO: 13883 - DNA, 33 bp, Homo sapien
catcctcacatcaccaatgagcttcagggaaag

SEQ ID NO: 13884 - DNA, 33 bp, Homo sapien
catcctcacatcaccagtgagcttcagggaaag

SEQ ID NO: 13885 - DNA, 33 bp, Homo sapien
gggactacggatcagacgcatgccactatgcca

SEQ ID NO: 13886 - DNA, 33 bp, Homo sapien
gggactacggatcagatgcatgccactatgcca

SEQ ID NO: 13887 - DNA, 33 bp, Homo sapien
ccccagaggagaagcaaggtctgaattcaggag

SEQ ID NO: 13888 - DNA, 33 bp, Homo sapien
ccccagaggagaagcacggtctgaattcaggag

SEQ ID NO: 13889 - DNA, 33 bp, Homo sapien
gctgtctacaaaccaacaagagaagcctctcca

SEQ ID NO: 13890 - DNA, 33 bp, Homo sapien
gctgtctacaaaccaagaagagaagcctctcca

SEQ ID NO: 13891 - DNA, 33 bp, Homo sapien
tggccaagacaaaaaaacagagtatgtttcctc

SEQ ID NO: 13892 - DNA, 33 bp, Homo sapien
tggccaagacaaaaaaccagagtatgtttcctc

SEQ ID NO: 13893 - DNA, 33 bp, Homo sapien
tctgtgaagaatctaagtgtcagaggtggccag

SEQ ID NO: 13894 - DNA, 33 bp, Homo sapien
tctgtgaagaatctaattgtcagaggtggccag

SEQ ID NO: 13895 - DNA, 33 bp, Homo sapien
cgatggctcttcgtcccatgattctaaagccag

SEQ ID NO: 13896 - DNA, 33 bp, Homo sapien
cgatggctcttcgtcctatgattctaaagccag

SEQ ID NO: 13897 - DNA, 33 bp, Homo sapien
ctagaggaatctggaagctaattcttttaggct

SEQ ID NO: 13898 - DNA, 33 bp, Homo sapien
ctagaggaatctggaatctaattcttttaggct

SEQ ID NO: 13899 - DNA, 33 bp, Homo sapien
aacaggaagcttggaaatgactgggagcagggc

SEQ ID NO: 13900 - DNA, 33 bp, Homo sapien
aacaggaagcttggaagtgactgggagcagggc

SEQ ID NO: 13901 - DNA, 33 bp, Homo sapien
ccttcagttctcccaagtatcagacaaaggtta

SEQ ID NO: 13902 - DNA, 33 bp, Homo sapien
ccttcagttctcccaattatcagacaaaggtta

SEQ ID NO: 13903 - DNA, 33 bp, Homo sapien
agacagaaggatggaaagctagatgagcagata

SEQ ID NO: 13904 - DNA, 33 bp, Homo sapien
agacagaaggatggaacgctagatgagcagata

SEQ ID NO: 13905 - DNA, 33 bp, Homo sapien
ctggccatagtgggagaaaagccataaatttca

SEQ ID NO: 13906 - DNA, 33 bp, Homo sapien
ctggccatagtgggagcaaagccataaatttca

SEQ ID NO: 13907 - DNA, 33 bp, Homo sapien
atcttcctttctgtgagcagttagttccctccc

SEQ ID NO: 13908 - DNA, 33 bp, Homo sapien
atcttcctttctgtgatcagttagttccctccc

SEQ ID NO: 13909 - DNA, 33 bp, Homo sapien
ctctgggaacctcaaacctggacaagcctcggt

SEQ ID NO: 13910 - DNA, 33 bp, Homo sapien
ctctgggaacctcaaagctggacaagcctcggt

SEQ ID NO: 13911 - DNA, 33 bp, Homo sapien
gcagcctcagaacaggaagggaagttggtcact

SEQ ID NO: 13912 - DNA, 33 bp, Homo sapien
gcagcctcagaacaggcagggaagttggtcact

SEQ ID NO: 13913 - DNA, 33 bp, Homo sapien
aagaccctggtctcgccatacccctccccatag

SEQ ID NO: 13914 - DNA, 33 bp, Homo sapien
aagaccctggtctcgctatacccctccccatag

SEQ ID NO: 13915 - DNA, 33 bp, Homo sapien
ctgaatacagaaggaaacagaaacagagaggtt

SEQ ID NO: 13916 - DNA, 33 bp, Homo sapien
ctgaatacagaaggaagcagaaacagagaggtt

SEQ ID NO: 13917 - DNA, 33 bp, Homo sapien
aggtcatatagctagtcaataggggcatgtctg

SEQ ID NO: 13918 - DNA, 33 bp, Homo sapien
aggtcatatagctagttaataggggcatgtctg

SEQ ID NO: 13919 - DNA, 33 bp, Homo sapien
aagcccgtgacttttcactccaccaagctgcat

SEQ ID NO: 13920 - DNA, 33 bp, Homo sapien
aagcccgtgacttttctctccaccaagctgcat

SEQ ID NO: 13921 - DNA, 33 bp, Homo sapien
ccttcatggtgctgacaccttgagctcattgca

SEQ ID NO: 13922 - DNA, 33 bp, Homo sapien
ccttcatggtgctgacgccttgagctcattgca

SEQ ID NO: 13923 - DNA, 33 bp, Homo sapien
tctgcaggcctctcagaagatcaccctgcctgg

SEQ ID NO: 13924 - DNA, 33 bp, Homo sapien
tctgcaggcctctcagcagatcaccctgcctgg

SEQ ID NO: 13925 - DNA, 33 bp, Homo sapien
ttcacggaggtaggcaaggtgaaaaatgtggtt

SEQ ID NO: 13926 - DNA, 33 bp, Homo sapien
ttcacggaggtaggcagggtgaaaaatgtggtt

SEQ ID NO: 13927 - DNA, 33 bp, Homo sapien
acctgccctctgagcacggcatgtgtcccagtt

SEQ ID NO: 13928 - DNA, 33 bp, Homo sapien
acctgccctctgagcatggcatgtgtcccagtt

SEQ ID NO: 13929 - DNA, 33 bp, Homo sapien
tactcccagcactcccaagaagcacctccaccc

SEQ ID NO: 13930 - DNA, 33 bp, Homo sapien
tactcccagcactcccgagaagcacctccaccc

SEQ ID NO: 13931 - DNA, 33 bp, Homo sapien
cacccctgaactgcagacactggttttgatgcc

SEQ ID NO: 13932 - DNA, 33 bp, Homo sapien
cacccctgaactgcaggcactggttttgatgcc

SEQ ID NO: 13933 - DNA, 33 bp, Homo sapien
ttgttcatgtgttcaacattatttaagcctctt

SEQ ID NO: 13934 - DNA, 33 bp, Homo sapien
ttgttcatgtgttcaagattatttaagcctctt

SEQ ID NO: 13935 - DNA, 33 bp, Homo sapien
ctttctgatctataaacaagaactggaccagtt

SEQ ID NO: 13936 - DNA, 33 bp, Homo sapien
ctttctgatctataaataagaactggaccagtt

SEQ ID NO: 13937 - DNA, 33 bp, Homo sapien
tggggcaatctaagaacggcagtcccctttgcc

SEQ ID NO: 13938 - DNA, 33 bp, Homo sapien
tggggcaatctaagaatggcagtcccctttgcc

SEQ ID NO: 13939 - DNA, 33 bp, Homo sapien
aacaagacaagggataaccatataatgaaggag

SEQ ID NO: 13940 - DNA, 33 bp, Homo sapien
aacaagacaagggatatccatataatgaaggag

SEQ ID NO: 13941 - DNA, 33 bp, Homo sapien
gctctcaccaattccccggaaaagtggctcttt

SEQ ID NO: 13942 - DNA, 33 bp, Homo sapien
gctctcaccaattccctggaaaagtggctcttt

SEQ ID NO: 13943 - DNA, 33 bp, Homo sapien
caccaggtgtgctactcactgtcccacctgcag

SEQ ID NO: 13944 - DNA, 33 bp, Homo sapien
caccaggtgtgctacttactgtcccacctgcag

SEQ ID NO: 13945 - DNA, 33 bp, Homo sapien
tattcagtttccagggcttagaatgtggatagt

SEQ ID NO: 13946 - DNA, 33 bp, Homo sapien
tattcagtttccagggtttagaatgtggatagt

SEQ ID NO: 13947 - DNA, 33 bp, Homo sapien
acccattggattagcaaaaaacctcttccttcc

SEQ ID NO: 13948 - DNA, 33 bp, Homo sapien
acccattggattagcagaaaacctcttccttcc

SEQ ID NO: 13949 - DNA, 33 bp, Homo sapien
agtgtggcaagtctcccagtaataaccgtggac

SEQ ID NO: 13950 - DNA, 33 bp, Homo sapien
agtgtggcaagtctcctagtaataaccgtggac

SEQ ID NO: 13951 - DNA, 33 bp, Homo sapien
tgctccctgaacaagacgatgttgtcaagtatg

SEQ ID NO: 13952 - DNA, 33 bp, Homo sapien
tgctccctgaacaagatgatgttgtcaagtatg

SEQ ID NO: 13953 - DNA, 33 bp, Homo sapien
caggctcaagtcaagaacatttaattgaggaaa

SEQ ID NO: 13954 - DNA, 33 bp, Homo sapien
caggctcaagtcaagagcatttaattgaggaaa

SEQ ID NO: 13955 - DNA, 33 bp, Homo sapien
gtgccgtcccatgtgccatctgtttctgaccat

SEQ ID NO: 13956 - DNA, 33 bp, Homo sapien
gtgccgtcccatgtgctatctgtttctgaccat

SEQ ID NO: 13957 - DNA, 33 bp, Homo sapien
tctaaaaatggtatcaccctatgtacattcctc

SEQ ID NO: 13958 - DNA, 33 bp, Homo sapien
tctaaaaatggtatcatcctatgtacattcctc

SEQ ID NO: 13959 - DNA, 33 bp, Homo sapien
agaagtctgaatcctacctacttggttctctcc

SEQ ID NO: 13960 - DNA, 33 bp, Homo sapien
agaagtctgaatcctatctacttggttctctcc

SEQ ID NO: 13961 - DNA, 33 bp, Homo sapien
gggtgtttattccatacggctccaaaaatatag

SEQ ID NO: 13962 - DNA, 33 bp, Homo sapien
gggtgtttattccatatggctccaaaaatatag

SEQ ID NO: 13963 - DNA, 33 bp, Homo sapien
cagacacaggagaagacgacaaaggcttgggag

SEQ ID NO: 13964 - DNA, 33 bp, Homo sapien
cagacacaggagaagaggacaaaggcttgggag

SEQ ID NO: 13965 - DNA, 33 bp, Homo sapien
taacgggaacaggctgaactgggaatgctgagc

SEQ ID NO: 13966 - DNA, 33 bp, Homo sapien
taacgggaacaggctggactgggaatgctgagc

SEQ ID NO: 13967 - DNA, 33 bp, Homo sapien
ccacccatagcttccaacgtctatggcaggaat

SEQ ID NO: 13968 - DNA, 33 bp, Homo sapien
ccacccatagcttccagcgtctatggcaggaat

SEQ ID NO: 13969 - DNA, 33 bp, Homo sapien
caggagctgagtttgcccatcaacaactgctag

SEQ ID NO: 13970 - DNA, 33 bp, Homo sapien
caggagctgagtttgctcatcaacaactgctag

SEQ ID NO: 13971 - DNA, 33 bp, Homo sapien
agctttcagagaagcgaaagagtcactgctcct

SEQ ID NO: 13972 - DNA, 33 bp, Homo sapien
agctttcagagaagcggaagagtcactgctcct

SEQ ID NO: 13973 - DNA, 33 bp, Homo sapien
cacctaacctgtactgaagcctgaacatctagc

SEQ ID NO: 13974 - DNA, 33 bp, Homo sapien
cacctaacctgtactgcagcctgaacatctagc

SEQ ID NO: 13975 - DNA, 33 bp, Homo sapien
tggagggtggctgccgcaggagtggacatgaat

SEQ ID NO: 13976 - DNA, 33 bp, Homo sapien
tggagggtggctgccgtaggagtggacatgaat

SEQ ID NO: 13977 - DNA, 33 bp, Homo sapien
tctaaaaaagttgaccaagaaagttctttgacc

SEQ ID NO: 13978 - DNA, 33 bp, Homo sapien
tctaaaaaagttgaccgagaaagttctttgacc

SEQ ID NO: 13979 - DNA, 33 bp, Homo sapien
gcacacatagggatgaccactgtagcactattt

SEQ ID NO: 13980 - DNA, 33 bp, Homo sapien
gcacacatagggatgatcactgtagcactattt

SEQ ID NO: 13981 - DNA, 33 bp, Homo sapien
tccctccactctgaaccgaacgtctgcagaagg

SEQ ID NO: 13982 - DNA, 33 bp, Homo sapien
tccctccactctgaacggaacgtctgcagaagg

SEQ ID NO: 13983 - DNA, 33 bp, Homo sapien
agtgccttttgtatacggggttcatactcattt

SEQ ID NO: 13984 - DNA, 33 bp, Homo sapien
agtgccttttgtatactgggttcatactcattt

SEQ ID NO: 13985 - DNA, 33 bp, Homo sapien
gagctgcagcacagacagagggatgtcaagtgc

SEQ ID NO: 13986 - DNA, 33 bp, Homo sapien
gagctgcagcacagacggagggatgtcaagtgc

SEQ ID NO: 13987 - DNA, 33 bp, Homo sapien
ttcgtttagcatttgccattgatcatctctgtg

SEQ ID NO: 13988 - DNA, 33 bp, Homo sapien
ttcgtttagcatttgctattgatcatctctgtg

SEQ ID NO: 13989 - DNA, 33 bp, Homo sapien
actgaatatgcatttacaattttcattgatacc

SEQ ID NO: 13990 - DNA, 33 bp, Homo sapien
actgaatatgcatttataattttcattgatacc

SEQ ID NO: 13991 - DNA, 33 bp, Homo sapien
tgaataaacagtgactcaaaacttatttctgca

SEQ ID NO: 13992 - DNA, 33 bp, Homo sapien
tgaataaacagtgacttaaaacttatttctgca

SEQ ID NO: 13993 - DNA, 33 bp, Homo sapien
gttggtgaactttcaccgaatacaaagggcata

SEQ ID NO: 13994 - DNA, 33 bp, Homo sapien
gttggtgaactttcactgaatacaaagggcata

SEQ ID NO: 13995 - DNA, 33 bp, Homo sapien
acagtgtgttgggagcacttttaaggtggggtg

SEQ ID NO: 13996 - DNA, 33 bp, Homo sapien
acagtgtgttgggagcgcttttaaggtggggtg

SEQ ID NO: 13997 - DNA, 33 bp, Homo sapien
ggcaggaaggaatcccaaggcaagacaaatgag

SEQ ID NO: 13998 - DNA, 33 bp, Homo sapien
ggcaggaaggaatcccgaggcaagacaaatgag

SEQ ID NO: 13999 - DNA, 33 bp, Homo sapien
ctaagtatgaataaatcaagtttggttgtgagt

SEQ ID NO: 14000 - DNA, 33 bp, Homo sapien
ctaagtatgaataaattaagtttggttgtgagt

SEQ ID NO: 14001 - DNA, 33 bp, Homo sapien
ccccaactccactctcaattcaggcagggcttc

SEQ ID NO: 14002 - DNA, 33 bp, Homo sapien
ccccaactccactctcgattcaggcagggcttc

SEQ ID NO: 14003 - DNA, 33 bp, Homo sapien
tgactcaatgtcacaccgctggtgcacggcaga

SEQ ID NO: 14004 - DNA, 33 bp, Homo sapien
tgactcaatgtcacactgctggtgcacggcaga

SEQ ID NO: 14005 - DNA, 33 bp, Homo sapien
ccagcatgagaatcacagagcagagcacagggc

SEQ ID NO: 14006 - DNA, 33 bp, Homo sapien
ccagcatgagaatcacggagcagagcacagggc

SEQ ID NO: 14007 - DNA, 33 bp, Homo sapien
acagaaatcactctaggacaaccttgctatcaa

SEQ ID NO: 14008 - DNA, 33 bp, Homo sapien
acagaaatcactctagtacaaccttgctatcaa

SEQ ID NO: 14009 - DNA, 33 bp, Homo sapien
gggagtaatttaccccactgaccagaactgagt

SEQ ID NO: 14010 - DNA, 33 bp, Homo sapien
gggagtaatttaccccgctgaccagaactgagt

SEQ ID NO: 14011 - DNA, 33 bp, Homo sapien
tactgcctttctctgccaggagactggaaaccc

SEQ ID NO: 14012 - DNA, 33 bp, Homo sapien
tactgcctttctctgctaggagactggaaaccc

SEQ ID NO: 14013 - DNA, 33 bp, Homo sapien
ctcatttaagactcaccgaaatctatgaggcag

SEQ ID NO: 14014 - DNA, 33 bp, Homo sapien
ctcatttaagactcactgaaatctatgaggcag

SEQ ID NO: 14015 - DNA, 33 bp, Homo sapien
tacagaaggagctacacctagattcctgagcat

SEQ ID NO: 14016 - DNA, 33 bp, Homo sapien
tacagaaggagctacatctagattcctgagcat

SEQ ID NO: 14017 - DNA, 33 bp, Homo sapien
ttctagacagacccaaagctattcccgatgtgt

SEQ ID NO: 14018 - DNA, 33 bp, Homo sapien
ttctagacagacccaaggctattcccgatgtgt

SEQ ID NO: 14019 - DNA, 33 bp, Homo sapien
ctcctattgttctagaagtctcagtattgcact

SEQ ID NO: 14020 - DNA, 33 bp, Homo sapien
ctcctattgttctagatgtctcagtattgcact

SEQ ID NO: 14021 - DNA, 33 bp, Homo sapien
gaagggccctgaccgaggccaccagcttgtaag

SEQ ID NO: 14022 - DNA, 33 bp, Homo sapien
gaagggccctgaccgatgccaccagcttgtaag

SEQ ID NO: 14023 - DNA, 33 bp, Homo sapien
gggccttgttaagaccaccctctgctagttttc

SEQ ID NO: 14024 - DNA, 33 bp, Homo sapien
gggccttgttaagaccgccctctgctagttttc

SEQ ID NO: 14025 - DNA, 33 bp, Homo sapien
ggaaagggcggagaagacctcgaacattatttg

SEQ ID NO: 14026 - DNA, 33 bp, Homo sapien
ggaaagggcggagaaggcctcgaacattatttg

SEQ ID NO: 14027 - DNA, 33 bp, Homo sapien
agcttttctgagcccacgtagcttgtaagtggc

SEQ ID NO: 14028 - DNA, 33 bp, Homo sapien
agcttttctgagcccatgtagcttgtaagtggc

SEQ ID NO: 14029 - DNA, 33 bp, Homo sapien
accagccctggctctaccattcatccacagatg

SEQ ID NO: 14030 - DNA, 33 bp, Homo sapien
accagccctggctctatcattcatccacagatg

SEQ ID NO: 14031 - DNA, 33 bp, Homo sapien
agtcaggaataggaaaacatttcatttcattgg

SEQ ID NO: 14032 - DNA, 33 bp, Homo sapien
agtcaggaataggaaagcatttcatttcattgg

SEQ ID NO: 14033 - DNA, 33 bp, Homo sapien
gtagaattcagggctaaactacaagtcagaatc

SEQ ID NO: 14034 - DNA, 33 bp, Homo sapien
gtagaattcagggctacactacaagtcagaatc

SEQ ID NO: 14035 - DNA, 33 bp, Homo sapien
cctcactcccctgttacacagattctcaaacca

SEQ ID NO: 14036 - DNA, 33 bp, Homo sapien
cctcactcccctgttatacagattctcaaacca

SEQ ID NO: 14037 - DNA, 33 bp, Homo sapien
atgaaggaatggtcaacgaatgaatggctaagt

SEQ ID NO: 14038 - DNA, 33 bp, Homo sapien
atgaaggaatggtcaatgaatgaatggctaagt

SEQ ID NO: 14039 - DNA, 33 bp, Homo sapien
gctgcctacctccaaaactactggcaactctca

SEQ ID NO: 14040 - DNA, 33 bp, Homo sapien
gctgcctacctccaaagctactggcaactctca

SEQ ID NO: 14041 - DNA, 33 bp, Homo sapien
gagggttctcactccaaacatagtgtccctcac

SEQ ID NO: 14042 - DNA, 33 bp, Homo sapien
gagggttctcactccagacatagtgtccctcac

SEQ ID NO: 14043 - DNA, 33 bp, Homo sapien
ggggcctcactattgtcaagatctcttatgagg

SEQ ID NO: 14044 - DNA, 33 bp, Homo sapien
ggggcctcactattgtgaagatctcttatgagg

SEQ ID NO: 14045 - DNA, 33 bp, Homo sapien
ataaaacgagaggtgccatattagagtagtagg

SEQ ID NO: 14046 - DNA, 33 bp, Homo sapien
ataaaacgagaggtgctatattagagtagtagg

SEQ ID NO: 14047 - DNA, 33 bp, Homo sapien
gactgctcttggttagaaccccttcaccagcaa

SEQ ID NO: 14048 - DNA, 33 bp, Homo sapien
gactgctcttggttaggaccccttcaccagcaa

SEQ ID NO: 14049 - DNA, 33 bp, Homo sapien
cagctttcttcatactcaccttcagtgggtccc

SEQ ID NO: 14050 - DNA, 33 bp, Homo sapien
cagctttcttcatacttaccttcagtgggtccc

SEQ ID NO: 14051 - DNA, 33 bp, Homo sapien
tcatgccaggcactggaaatgtagagaggaacc

SEQ ID NO: 14052 - DNA, 33 bp, Homo sapien
tcatgccaggcactgggaatgtagagaggaacc

SEQ ID NO: 14053 - DNA, 33 bp, Homo sapien
aaagacaagaaaagaccaactgtcacagaatgc

SEQ ID NO: 14054 - DNA, 33 bp, Homo sapien
aaagacaagaaaagactaactgtcacagaatgc

SEQ ID NO: 14055 - DNA, 33 bp, Homo sapien
aatgatgaaaataaaaatggttgagaaatcctg

SEQ ID NO: 14056 - DNA, 33 bp, Homo sapien
aatgatgaaaataaaattggttgagaaatcctg

SEQ ID NO: 14057 - DNA, 33 bp, Homo sapien
cagttcctgagagcaacagtcaaatccaactcc

SEQ ID NO: 14058 - DNA, 33 bp, Homo sapien
cagttcctgagagcaatagtcaaatccaactcc

SEQ ID NO: 14059 - DNA, 33 bp, Homo sapien
cacatctccgtttacacagaaaaatgctctttt

SEQ ID NO: 14060 - DNA, 33 bp, Homo sapien
cacatctccgtttacatagaaaaatgctctttt

SEQ ID NO: 14061 - DNA, 33 bp, Homo sapien
gagcccaaagtcacatgaaatccctttgaggag

SEQ ID NO: 14062 - DNA, 33 bp, Homo sapien
gagcccaaagtcacattaaatccctttgaggag

SEQ ID NO: 14063 - DNA, 33 bp, Homo sapien
ctaccattgtcatgaaaaccaattttagcattt

SEQ ID NO: 14064 - DNA, 33 bp, Homo sapien
ctaccattgtcatgaagaccaattttagcattt

SEQ ID NO: 14065 - DNA, 33 bp, Homo sapien
agtgcacagaatgtgaagattaaatgtgagttt

SEQ ID NO: 14066 - DNA, 33 bp, Homo sapien
agtgcacagaatgtgaggattaaatgtgagttt

SEQ ID NO: 14067 - DNA, 33 bp, Homo sapien
agaaggacctttgaagaagtcagagaaccaggc

SEQ ID NO: 14068 - DNA, 33 bp, Homo sapien
agaaggacctttgaagcagtcagagaaccaggc

SEQ ID NO: 14069 - DNA, 33 bp, Homo sapien
aatagcctctccagtggatcagcttctctgccc

SEQ ID NO: 14070 - DNA, 33 bp, Homo sapien
aatagcctctccagtgtatcagcttctctgccc

SEQ ID NO: 14071 - DNA, 33 bp, Homo sapien
cttactataacctcaaatggacctaagactata

SEQ ID NO: 14072 - DNA, 33 bp, Homo sapien
cttactataacctcaagtggacctaagactata

SEQ ID NO: 14073 - DNA, 33 bp, Homo sapien
ctgaggtcacgtgataccaacaaggtgcattac

SEQ ID NO: 14074 - DNA, 33 bp, Homo sapien
ctgaggtcacgtgatatcaacaaggtgcattac

SEQ ID NO: 14075 - DNA, 33 bp, Homo sapien
ctgggctttggggcagacagggacaagagcatc

SEQ ID NO: 14076 - DNA, 33 bp, Homo sapien
ctgggctttggggcaggcagggacaagagcatc

SEQ ID NO: 14077 - DNA, 33 bp, Homo sapien
ttataaagacattgcaagactttttcgcctgtg

SEQ ID NO: 14078 - DNA, 33 bp, Homo sapien
ttataaagacattgcaggactttttcgcctgtg

SEQ ID NO: 14079 - DNA, 33 bp, Homo sapien
aaggactatgtcacacaaactccccttgttgag

SEQ ID NO: 14080 - DNA, 33 bp, Homo sapien
aaggactatgtcacacgaactccccttgttgag

SEQ ID NO: 14081 - DNA, 33 bp, Homo sapien
aggcaagtgcacatgacccatgaggccaatcat

SEQ ID NO: 14082 - DNA, 33 bp, Homo sapien
aggcaagtgcacatgatccatgaggccaatcat

SEQ ID NO: 14083 - DNA, 33 bp, Homo sapien
gatgataatgacaccacctcttagggttgcagt

SEQ ID NO: 14084 - DNA, 33 bp, Homo sapien
gatgataatgacaccatctcttagggttgcagt

SEQ ID NO: 14085 - DNA, 33 bp, Homo sapien
cccatggtgttagccacggctcaagaatgaagc

SEQ ID NO: 14086 - DNA, 33 bp, Homo sapien
cccatggtgttagccagggctcaagaatgaagc

SEQ ID NO: 14087 - DNA, 33 bp, Homo sapien
cttataacttggaccccagaagtcactgctatt

SEQ ID NO: 14088 - DNA, 33 bp, Homo sapien
cttataacttggaccctagaagtcactgctatt

SEQ ID NO: 14089 - DNA, 33 bp, Homo sapien
gaggacagatcttctacgccaaagggagaaggc

SEQ ID NO: 14090 - DNA, 33 bp, Homo sapien
gaggacagatcttctaggccaaagggagaaggc

SEQ ID NO: 14091 - DNA, 33 bp, Homo sapien
acacataaagataacaaggagaactgttgccag

SEQ ID NO: 14092 - DNA, 33 bp, Homo sapien
acacataaagataacatggagaactgttgccag

SEQ ID NO: 14093 - DNA, 33 bp, Homo sapien
tatctctatgcagtgacctgttttatccccaga

SEQ ID NO: 14094 - DNA, 33 bp, Homo sapien
tatctctatgcagtgatctgttttatccccaga

SEQ ID NO: 14095 - DNA, 33 bp, Homo sapien
ataggcgttggagttacgagcaatttttgcggg

SEQ ID NO: 14096 - DNA, 33 bp, Homo sapien
ataggcgttggagttaggagcaatttttgcggg

SEQ ID NO: 14097 - DNA, 33 bp, Homo sapien
aactgggaacatgaagacaacatttttttttaa

SEQ ID NO: 14098 - DNA, 33 bp, Homo sapien
aactgggaacatgaaggcaacatttttttttaa

SEQ ID NO: 14099 - DNA, 33 bp, Homo sapien
tacctaatctacccaaagtcatcgaactaataa

SEQ ID NO: 14100 - DNA, 33 bp, Homo sapien
tacctaatctacccaacgtcatcgaactaataa

SEQ ID NO: 14101 - DNA, 33 bp, Homo sapien
gaccacctggtgtgaccctagcaaggacctccc

SEQ ID NO: 14102 - DNA, 33 bp, Homo sapien
gaccacctggtgtgactctagcaaggacctccc

SEQ ID NO: 14103 - DNA, 33 bp, Homo sapien
gtggtctctgcagagaaatggagctgatgagac

SEQ ID NO: 14104 - DNA, 33 bp, Homo sapien
gtggtctctgcagagagatggagctgatgagac

SEQ ID NO: 14105 - DNA, 33 bp, Homo sapien
ttcagacaaactgatgcacaaaaccaatggtga

SEQ ID NO: 14106 - DNA, 33 bp, Homo sapien
ttcagacaaactgatggacaaaaccaatggtga

SEQ ID NO: 14107 - DNA, 33 bp, Homo sapien
tttttatgttcctcacactttcaccaaaagaaa

SEQ ID NO: 14108 - DNA, 33 bp, Homo sapien
tttttatgttcctcacgctttcaccaaaagaaa

SEQ ID NO: 14109 - DNA, 33 bp, Homo sapien
gttgaatagtgtccccacaacgttcacatccac

SEQ ID NO: 14110 - DNA, 33 bp, Homo sapien
gttgaatagtgtccccccaacgttcacatccac

SEQ ID NO: 14111 - DNA, 33 bp, Homo sapien
ctgtccggtaataaaacgcaggaaggagctgaa

SEQ ID NO: 14112 - DNA, 33 bp, Homo sapien
ctgtccggtaataaaatgcaggaaggagctgaa

SEQ ID NO: 14113 - DNA, 33 bp, Homo sapien
gaatgaagaaaataaacagggctgttcctggct

SEQ ID NO: 14114 - DNA, 33 bp, Homo sapien
gaatgaagaaaataaatagggctgttcctggct

SEQ ID NO: 14115 - DNA, 33 bp, Homo sapien
gacgtcatccgatgccacttcttaccttaactg

SEQ ID NO: 14116 - DNA, 33 bp, Homo sapien
gacgtcatccgatgccgcttcttaccttaactg

SEQ ID NO: 14117 - DNA, 33 bp, Homo sapien
gggaaactacaaaccagagaggctgaataatgt

SEQ ID NO: 14118 - DNA, 33 bp, Homo sapien
gggaaactacaaaccatagaggctgaataatgt

SEQ ID NO: 14119 - DNA, 33 bp, Homo sapien
gaacaaatccgagacaccagactgagagggaca

SEQ ID NO: 14120 - DNA, 33 bp, Homo sapien
gaacaaatccgagacatcagactgagagggaca

SEQ ID NO: 14121 - DNA, 33 bp, Homo sapien
cttggatttctgacaacgttgctatgatgtaat

SEQ ID NO: 14122 - DNA, 33 bp, Homo sapien
cttggatttctgacaatgttgctatgatgtaat

SEQ ID NO: 14123 - DNA, 33 bp, Homo sapien
ccctaactcttgaagtaaaaaatcgatcttttc

SEQ ID NO: 14124 - DNA, 33 bp, Homo sapien
ccctaactcttgaagtcaaaaatcgatcttttc

SEQ ID NO: 14125 - DNA, 33 bp, Homo sapien
cttggcaacggggtcaacttgagcgtgcccagc

SEQ ID NO: 14126 - DNA, 33 bp, Homo sapien
cttggcaacggggtcaccttgagcgtgcccagc

SEQ ID NO: 14127 - DNA, 33 bp, Homo sapien
tcttttgtcccattccaagaacctatattattt

SEQ ID NO: 14128 - DNA, 33 bp, Homo sapien
tcttttgtcccattcccagaacctatattattt

SEQ ID NO: 14129 - DNA, 33 bp, Homo sapien
tgctgcccgcacctccactggagaaccagaatt

SEQ ID NO: 14130 - DNA, 33 bp, Homo sapien
tgctgcccgcacctccgctggagaaccagaatt

SEQ ID NO: 14131 - DNA, 33 bp, Homo sapien
aggagctctgtgaagagaatctgcttatcaaca

SEQ ID NO: 14132 - DNA, 33 bp, Homo sapien
aggagctctgtgaagataatctgcttatcaaca

SEQ ID NO: 14133 - DNA, 33 bp, Homo sapien
actaacaaggcttttagggtagaagggagcatc

SEQ ID NO: 14134 - DNA, 33 bp, Homo sapien
actaacaaggcttttatggtagaagggagcatc

SEQ ID NO: 14135 - DNA, 33 bp, Homo sapien
ctcaatgcccatgtcccgacttaaaccttgact

SEQ ID NO: 14136 - DNA, 33 bp, Homo sapien
ctcaatgcccatgtcctgacttaaaccttgact

SEQ ID NO: 14137 - DNA, 33 bp, Homo sapien
agaaaaacactgtgcagggagataacagtcatc

SEQ ID NO: 14138 - DNA, 33 bp, Homo sapien
agaaaaacactgtgcatggagataacagtcatc

SEQ ID NO: 14139 - DNA, 33 bp, Homo sapien
taccaggagaattctgaatctacattttcattg

SEQ ID NO: 14140 - DNA, 33 bp, Homo sapien
taccaggagaattctgcatctacattttcattg

SEQ ID NO: 14141 - DNA, 33 bp, Homo sapien
aaaagaggaaacgagacgaaagaaaatgtagtg

SEQ ID NO: 14142 - DNA, 33 bp, Homo sapien
aaaagaggaaacgagatgaaagaaaatgtagtg

SEQ ID NO: 14143 - DNA, 33 bp, Homo sapien
atttcgaaccttagacactgtgaatctcctaga

SEQ ID NO: 14144 - DNA, 33 bp, Homo sapien
atttcgaaccttagacgctgtgaatctcctaga

SEQ ID NO: 14145 - DNA, 33 bp, Homo sapien
taattagcttgcctggaatcatcctctcttttt

SEQ ID NO: 14146 - DNA, 33 bp, Homo sapien
taattagcttgcctgggatcatcctctcttttt

SEQ ID NO: 14147 - DNA, 33 bp, Homo sapien
cagtcatctgaaaaggaagacatgacagaggag

SEQ ID NO: 14148 - DNA, 33 bp, Homo sapien
cagtcatctgaaaagggagacatgacagaggag

SEQ ID NO: 14149 - DNA, 33 bp, Homo sapien
atcatatggcataggaaagtcatgagcagtaag

SEQ ID NO: 14150 - DNA, 33 bp, Homo sapien
atcatatggcataggacagtcatgagcagtaag

SEQ ID NO: 14151 - DNA, 33 bp, Homo sapien
gtttgtctctgtccaactgtagcacgaatccag

SEQ ID NO: 14152 - DNA, 33 bp, Homo sapien
gtttgtctctgtccaattgtagcacgaatccag

SEQ ID NO: 14153 - DNA, 33 bp, Homo sapien
cccccttcttagcatccccacttagatgactca

SEQ ID NO: 14154 - DNA, 33 bp, Homo sapien
cccccttcttagcatctccacttagatgactca

SEQ ID NO: 14155 - DNA, 33 bp, Homo sapien
acagacaattagaatacagtacagtctaagtga

SEQ ID NO: 14156 - DNA, 33 bp, Homo sapien
acagacaattagaatatagtacagtctaagtga

SEQ ID NO: 14157 - DNA, 33 bp, Homo sapien
ctgctagggactagcacaggtggtggcatccaa

SEQ ID NO: 14158 - DNA, 33 bp, Homo sapien
ctgctagggactagcataggtggtggcatccaa

SEQ ID NO: 14159 - DNA, 33 bp, Homo sapien
aaacagaaactctctgaaggtgaaagaaactta

SEQ ID NO: 14160 - DNA, 33 bp, Homo sapien
aaacagaaactctctggaggtgaaagaaactta

SEQ ID NO: 14161 - DNA, 33 bp, Homo sapien
aggtggttgttgaatacgcagaatctggcttaa

SEQ ID NO: 14162 - DNA, 33 bp, Homo sapien
aggtggttgttgaatatgcagaatctggcttaa

SEQ ID NO: 14163 - DNA, 33 bp, Homo sapien
ttttacattaatgtgacgtatcttttaggtatc

SEQ ID NO: 14164 - DNA, 33 bp, Homo sapien
ttttacattaatgtgaggtatcttttaggtatc

SEQ ID NO: 14165 - DNA, 33 bp, Homo sapien
tgagtaaggatgaaaaataaatcactgagccct

SEQ ID NO: 14166 - DNA, 33 bp, Homo sapien
tgagtaaggatgaaaagtaaatcactgagccct

SEQ ID NO: 14167 - DNA, 33 bp, Homo sapien
gggagtccatatatgccaaactctgcttctcca

SEQ ID NO: 14168 - DNA, 33 bp, Homo sapien
gggagtccatatatgctaaactctgcttctcca

SEQ ID NO: 14169 - DNA, 33 bp, Homo sapien
ccatccacatccatgcaaaggacctgatctcat

SEQ ID NO: 14170 - DNA, 33 bp, Homo sapien
ccatccacatccatgcgaaggacctgatctcat

SEQ ID NO: 14171 - DNA, 33 bp, Homo sapien
agtaatcaattgcatgaaaggcagtttaatgtc

SEQ ID NO: 14172 - DNA, 33 bp, Homo sapien
agtaatcaattgcatggaaggcagtttaatgtc

SEQ ID NO: 14173 - DNA, 33 bp, Homo sapien
acccaatggaagaatcagaagaagaggaaacag

SEQ ID NO: 14174 - DNA, 33 bp, Homo sapien
acccaatggaagaatcggaagaagaggaaacag

SEQ ID NO: 14175 - DNA, 33 bp, Homo sapien
atcctaaccaaccaaccgaatgaactataaaaa

SEQ ID NO: 14176 - DNA, 33 bp, Homo sapien
atcctaaccaaccaactgaatgaactataaaaa

SEQ ID NO: 14177 - DNA, 33 bp, Homo sapien
ctgtccattagcaaaaccagatctttctagtag

SEQ ID NO: 14178 - DNA, 33 bp, Homo sapien
ctgtccattagcaaaatcagatctttctagtag

SEQ ID NO: 14179 - DNA, 33 bp, Homo sapien
tgatctttgacaaaaacgccaagaacccacatt

SEQ ID NO: 14180 - DNA, 33 bp, Homo sapien
tgatctttgacaaaaatgccaagaacccacatt

SEQ ID NO: 14181 - DNA, 33 bp, Homo sapien
tctctcaagtggaaagcaagttgctgtcatggc

SEQ ID NO: 14182 - DNA, 33 bp, Homo sapien
tctctcaagtggaaagtaagttgctgtcatggc

SEQ ID NO: 14183 - DNA, 33 bp, Homo sapien
caggccaaaaacctagaagttacccttgagtct

SEQ ID NO: 14184 - DNA, 33 bp, Homo sapien
caggccaaaaacctaggagttacccttgagtct

SEQ ID NO: 14185 - DNA, 33 bp, Homo sapien
cttctgtcagttttcactcttcatttcaaatga

SEQ ID NO: 14186 - DNA, 33 bp, Homo sapien
cttctgtcagttttcattcttcatttcaaatga

SEQ ID NO: 14187 - DNA, 33 bp, Homo sapien
ctgtattttatcaggactattgcatagcctcat

SEQ ID NO: 14188 - DNA, 33 bp, Homo sapien
ctgtattttatcaggattattgcatagcctcat

SEQ ID NO: 14189 - DNA, 33 bp, Homo sapien
cagagttaagaccagaacaagaactcctaactc

SEQ ID NO: 14190 - DNA, 33 bp, Homo sapien
cagagttaagaccagaccaagaactcctaactc

SEQ ID NO: 14191 - DNA, 33 bp, Homo sapien
cacccattacttcagcaagcgttagctctttct

SEQ ID NO: 14192 - DNA, 33 bp, Homo sapien
cacccattacttcagccagcgttagctctttct

SEQ ID NO: 14193 - DNA, 33 bp, Homo sapien
tttgacatgagtcttcccagatcactctcctct

SEQ ID NO: 14194 - DNA, 33 bp, Homo sapien
tttgacatgagtcttctcagatcactctcctct

SEQ ID NO: 14195 - DNA, 33 bp, Homo sapien
agaaccgagaacagccagcaaggtcctactgtt

SEQ ID NO: 14196 - DNA, 33 bp, Homo sapien
agaaccgagaacagccggcaaggtcctactgtt

SEQ ID NO: 14197 - DNA, 33 bp, Homo sapien
tttggggtgataacaaatgatgatgctatagat

SEQ ID NO: 14198 - DNA, 33 bp, Homo sapien
tttggggtgataacaagtgatgatgctatagat

SEQ ID NO: 14199 - DNA, 33 bp, Homo sapien
ggccatatgcacaaaaagccttgggtggagtca

SEQ ID NO: 14200 - DNA, 33 bp, Homo sapien
ggccatatgcacaaaaggccttgggtggagtca

SEQ ID NO: 14201 - DNA, 33 bp, Homo sapien
ctaatttttatgatcaacatgctctggcaatac

SEQ ID NO: 14202 - DNA, 33 bp, Homo sapien
ctaatttttatgatcagcatgctctggcaatac

SEQ ID NO: 14203 - DNA, 33 bp, Homo sapien
tattctttctttcttacattgagtgcctacaat

SEQ ID NO: 14204 - DNA, 33 bp, Homo sapien
tattctttctttcttatattgagtgcctacaat

SEQ ID NO: 14205 - DNA, 33 bp, Homo sapien
tatacaaagtcttgtcaaaaaaggagcattaat

SEQ ID NO: 14206 - DNA, 33 bp, Homo sapien
tatacaaagtcttgtccaaaaaggagcattaat

SEQ ID NO: 14207 - DNA, 33 bp, Homo sapien
aagccactgggtggagaaaatgtttgcaaaaat

SEQ ID NO: 14208 - DNA, 33 bp, Homo sapien
aagccactgggtggaggaaatgtttgcaaaaat

SEQ ID NO: 14209 - DNA, 33 bp, Homo sapien
ttaaataaaagcaaacacaagattaccataaaa

SEQ ID NO: 14210 - DNA, 33 bp, Homo sapien
ttaaataaaagcaaacgcaagattaccataaaa

SEQ ID NO: 14211 - DNA, 33 bp, Homo sapien
gtataaaaatattctcagacatacatggaccaa

SEQ ID NO: 14212 - DNA, 33 bp, Homo sapien
gtataaaaatattctcggacatacatggaccaa

SEQ ID NO: 14213 - DNA, 33 bp, Homo sapien
ctgacatccatcagaagaaaacagataatggaa

SEQ ID NO: 14214 - DNA, 33 bp, Homo sapien
ctgacatccatcagaataaaacagataatggaa

SEQ ID NO: 14215 - DNA, 33 bp, Homo sapien
gctgctttggggaccaactttctgaggagtctt

SEQ ID NO: 14216 - DNA, 33 bp, Homo sapien
gctgctttggggaccacctttctgaggagtctt

SEQ ID NO: 14217 - DNA, 33 bp, Homo sapien
cctggttcacgtgccccacaactactccctcat

SEQ ID NO: 14218 - DNA, 33 bp, Homo sapien
cctggttcacgtgccctacaactactccctcat

SEQ ID NO: 14219 - DNA, 33 bp, Homo sapien
atttaggtatcaagcaacctcataacaacctca

SEQ ID NO: 14220 - DNA, 33 bp, Homo sapien
atttaggtatcaagcagcctcataacaacctca

SEQ ID NO: 14221 - DNA, 33 bp, Homo sapien
aagaagaagctccgccaggcccacagagagcag

SEQ ID NO: 14222 - DNA, 33 bp, Homo sapien
aagaagaagctccgcccggcccacagagagcag

SEQ ID NO: 14223 - DNA, 33 bp, Homo sapien
accacagtattcccgaaccccaccaatcagaga

SEQ ID NO: 14224 - DNA, 33 bp, Homo sapien
accacagtattcccgagccccaccaatcagaga

SEQ ID NO: 14225 - DNA, 33 bp, Homo sapien
tttaaatcgctgccagacaaatgactttcattc

SEQ ID NO: 14226 - DNA, 33 bp, Homo sapien
tttaaatcgctgccaggcaaatgactttcattc

SEQ ID NO: 14227 - DNA, 33 bp, Homo sapien
acattgagagcaaggtcaaatagaagagctata

SEQ ID NO: 14228 - DNA, 33 bp, Homo sapien
acattgagagcaaggtgaaatagaagagctata

SEQ ID NO: 14229 - DNA, 33 bp, Homo sapien
catgtctctatgctgaaaaccaaaaaacactcc

SEQ ID NO: 14230 - DNA, 33 bp, Homo sapien
catgtctctatgctgagaaccaaaaaacactcc

SEQ ID NO: 14231 - DNA, 33 bp, Homo sapien
tacatagtaagcgcaaagccaagttatgttata

SEQ ID NO: 14232 - DNA, 33 bp, Homo sapien
tacatagtaagcgcaaggccaagttatgttata

SEQ ID NO: 14233 - DNA, 33 bp, Homo sapien
atagtcttcacataacccattgcaagaggaaga

SEQ ID NO: 14234 - DNA, 33 bp, Homo sapien
atagtcttcacataacgcattgcaagaggaaga

SEQ ID NO: 14235 - DNA, 33 bp, Homo sapien
ccttaacttgatgagaagcatttatgaaaaatc

SEQ ID NO: 14236 - DNA, 33 bp, Homo sapien
ccttaacttgatgagacgcatttatgaaaaatc

SEQ ID NO: 14237 - DNA, 33 bp, Homo sapien
cctcgccacagcctccactaatgactatagccc

SEQ ID NO: 14238 - DNA, 33 bp, Homo sapien
cctcgccacagcctccgctaatgactatagccc

SEQ ID NO: 14239 - DNA, 33 bp, Homo sapien
gaaaatcaagaggactcaatttactggcagtgc

SEQ ID NO: 14240 - DNA, 33 bp, Homo sapien
gaaaatcaagaggactgaatttactggcagtgc

SEQ ID NO: 14241 - DNA, 33 bp, Homo sapien
agaaatgataaagacaacattacacctgacacc

SEQ ID NO: 14242 - DNA, 33 bp, Homo sapien
agaaatgataaagacagcattacacctgacacc

SEQ ID NO: 14243 - DNA, 33 bp, Homo sapien
ccccacccaatcttgacagaagcaaatgtacgt

SEQ ID NO: 14244 - DNA, 33 bp, Homo sapien
ccccacccaatcttgatagaagcaaatgtacgt

SEQ ID NO: 14245 - DNA, 33 bp, Homo sapien
tccatccaggattctacaaggcaatgatctgag

SEQ ID NO: 14246 - DNA, 33 bp, Homo sapien
tccatccaggattctagaaggcaatgatctgag

SEQ ID NO: 14247 - DNA, 33 bp, Homo sapien
tctgaacttctacaccacatttgaaactgtcaa

SEQ ID NO: 14248 - DNA, 33 bp, Homo sapien
tctgaacttctacaccgcatttgaaactgtcaa

SEQ ID NO: 14249 - DNA, 33 bp, Homo sapien
aacaatttatccctaaactaatgtcataccatc

SEQ ID NO: 14250 - DNA, 33 bp, Homo sapien
aacaatttatccctaagctaatgtcataccatc

SEQ ID NO: 14251 - DNA, 33 bp, Homo sapien
atgactatcacaaaggacatttatccaatgtga

SEQ ID NO: 14252 - DNA, 33 bp, Homo sapien
atgactatcacaaaggccatttatccaatgtga

SEQ ID NO: 14253 - DNA, 33 bp, Homo sapien
accagttgcacagttcgcaagcccctcatcctc

SEQ ID NO: 14254 - DNA, 33 bp, Homo sapien
accagttgcacagttctcaagcccctcatcctc

SEQ ID NO: 14255 - DNA, 33 bp, Homo sapien
ttcacaagtcaggcagaatagagtcttcgcagt

SEQ ID NO: 14256 - DNA, 33 bp, Homo sapien
ttcacaagtcaggcaggatagagtcttcgcagt

SEQ ID NO: 14257 - DNA, 33 bp, Homo sapien
ccaggctgtattagtaaacattcttgttctcac

SEQ ID NO: 14258 - DNA, 33 bp, Homo sapien
ccaggctgtattagtagacattcttgttctcac

SEQ ID NO: 14259 - DNA, 33 bp, Homo sapien
cactttgggaggccgacataggtgaattacttg

SEQ ID NO: 14260 - DNA, 33 bp, Homo sapien
cactttgggaggccgagataggtgaattacttg

SEQ ID NO: 14261 - DNA, 33 bp, Homo sapien
catagctgggtcaaggaatagtactagaagaag

SEQ ID NO: 14262 - DNA, 33 bp, Homo sapien
catagctgggtcaaggtatagtactagaagaag

SEQ ID NO: 14263 - DNA, 33 bp, Homo sapien
caataaaaatcttgtccgaattcaaatctgaac

SEQ ID NO: 14264 - DNA, 33 bp, Homo sapien
caataaaaatcttgtctgaattcaaatctgaac

SEQ ID NO: 14265 - DNA, 33 bp, Homo sapien
aatgtcagagctgtgtcaatgggcaaagattgt

SEQ ID NO: 14266 - DNA, 33 bp, Homo sapien
aatgtcagagctgtgttaatgggcaaagattgt

SEQ ID NO: 14267 - DNA, 33 bp, Homo sapien
aagcaaagtaggacaacttatggagatttttac

SEQ ID NO: 14268 - DNA, 33 bp, Homo sapien
aagcaaagtaggacaatttatggagatttttac

SEQ ID NO: 14269 - DNA, 33 bp, Homo sapien
aatataaggctgggaaaataagagggcactata

SEQ ID NO: 14270 - DNA, 33 bp, Homo sapien
aatataaggctgggaagataagagggcactata

SEQ ID NO: 14271 - DNA, 33 bp, Homo sapien
tattttacagccattaataataataccagctgg

SEQ ID NO: 14272 - DNA, 33 bp, Homo sapien
tattttacagccattactaataataccagctgg

SEQ ID NO: 14273 - DNA, 33 bp, Homo sapien
atcatgtacctggctccatgatttgtattttaa

SEQ ID NO: 14274 - DNA, 33 bp, Homo sapien
atcatgtacctggctctatgatttgtattttaa

SEQ ID NO: 14275 - DNA, 33 bp, Homo sapien
gttcaggctcactttcactagaggtagacccac

SEQ ID NO: 14276 - DNA, 33 bp, Homo sapien
gttcaggctcactttcgctagaggtagacccac

SEQ ID NO: 14277 - DNA, 33 bp, Homo sapien
actctacttttatctaagatccagacacctgtc

SEQ ID NO: 14278 - DNA, 33 bp, Homo sapien
actctacttttatctaggatccagacacctgtc

SEQ ID NO: 14279 - DNA, 33 bp, Homo sapien
gtatgtttattccagtgaagctgaccttacaca

SEQ ID NO: 14280 - DNA, 33 bp, Homo sapien
gtatgtttattccagttaagctgaccttacaca

SEQ ID NO: 14281 - DNA, 33 bp, Homo sapien
ggtcagctgttcaagcagagaaccagaaccagg

SEQ ID NO: 14282 - DNA, 33 bp, Homo sapien
ggtcagctgttcaagcggagaaccagaaccagg

SEQ ID NO: 14283 - DNA, 33 bp, Homo sapien
ttgtttacctctttgaagctgaagtaagtgaga

SEQ ID NO: 14284 - DNA, 33 bp, Homo sapien
ttgtttacctctttgaggctgaagtaagtgaga

SEQ ID NO: 14285 - DNA, 33 bp, Homo sapien
tactagaattccaaatcatcccaattttttatt

SEQ ID NO: 14286 - DNA, 33 bp, Homo sapien
tactagaattccaaatgatcccaattttttatt

SEQ ID NO: 14287 - DNA, 33 bp, Homo sapien
aattggagccaaataaactttcagttagcttgg

SEQ ID NO: 14288 - DNA, 33 bp, Homo sapien
aattggagccaaataagctttcagttagcttgg

SEQ ID NO: 14289 - DNA, 33 bp, Homo sapien
attctcacatacaaccagatggatagccattcc

SEQ ID NO: 14290 - DNA, 33 bp, Homo sapien
attctcacatacaaccggatggatagccattcc

SEQ ID NO: 14291 - DNA, 33 bp, Homo sapien
ccagagccaccgtcaacagggtagggaagccat

SEQ ID NO: 14292 - DNA, 33 bp, Homo sapien
ccagagccaccgtcaagagggtagggaagccat

SEQ ID NO: 14293 - DNA, 33 bp, Homo sapien
tatccagaatcataaaaggagagggatactgag

SEQ ID NO: 14294 - DNA, 33 bp, Homo sapien
tatccagaatcataaagggagagggatactgag

SEQ ID NO: 14295 - DNA, 33 bp, Homo sapien
gcctgcataatggaaactggattgtcttcttcc

SEQ ID NO: 14296 - DNA, 33 bp, Homo sapien
gcctgcataatggaaattggattgtcttcttcc

SEQ ID NO: 14297 - DNA, 33 bp, Homo sapien
gttcagatgctcacgacgtttctcctgtgttga

SEQ ID NO: 14298 - DNA, 33 bp, Homo sapien
gttcagatgctcacgatgtttctcctgtgttga

SEQ ID NO: 14299 - DNA, 33 bp, Homo sapien
atcatcaggtagtaaaacatgaccaggatcttc

SEQ ID NO: 14300 - DNA, 33 bp, Homo sapien
atcatcaggtagtaaagcatgaccaggatcttc

SEQ ID NO: 14301 - DNA, 33 bp, Homo sapien
aaagagatggtaatacaacaagcaggccagacc

SEQ ID NO: 14302 - DNA, 33 bp, Homo sapien
aaagagatggtaataccacaagcaggccagacc

SEQ ID NO: 14303 - DNA, 33 bp, Homo sapien
cctccaggcacagtaaaagagagaacctccagg

SEQ ID NO: 14304 - DNA, 33 bp, Homo sapien
cctccaggcacagtaagagagagaacctccagg

SEQ ID NO: 14305 - DNA, 33 bp, Homo sapien
aactgtcctgagaaggcaaatttgtagaaacag

SEQ ID NO: 14306 - DNA, 33 bp, Homo sapien
aactgtcctgagaaggtaaatttgtagaaacag

SEQ ID NO: 14307 - DNA, 33 bp, Homo sapien
caagacagtgaactaaagaggaggagatcaaaa

SEQ ID NO: 14308 - DNA, 33 bp, Homo sapien
caagacagtgaactaaggaggaggagatcaaaa

SEQ ID NO: 14309 - DNA, 33 bp, Homo sapien
aaagagacaggaagtaaaatggacaacacacgg

SEQ ID NO: 14310 - DNA, 33 bp, Homo sapien
aaagagacaggaagtagaatggacaacacacgg

SEQ ID NO: 14311 - DNA, 33 bp, Homo sapien
aaatattagcaataaaggtggctttcctttctc

SEQ ID NO: 14312 - DNA, 33 bp, Homo sapien
aaatattagcaataaatgtggctttcctttctc

SEQ ID NO: 14313 - DNA, 33 bp, Homo sapien
ggaaatttgtcagaacagaatagaaagccacta

SEQ ID NO: 14314 - DNA, 33 bp, Homo sapien
ggaaatttgtcagaactgaatagaaagccacta

SEQ ID NO: 14315 - DNA, 33 bp, Homo sapien
aaaatgtattcgctaaatcgcaaacgctcgaca

SEQ ID NO: 14316 - DNA, 33 bp, Homo sapien
aaaatgtattcgctaagtcgcaaacgctcgaca

SEQ ID NO: 14317 - DNA, 33 bp, Homo sapien
gtctcacagaagccccaaaaaagcctagccatc

SEQ ID NO: 14318 - DNA, 33 bp, Homo sapien
gtctcacagaagcccccaaaaagcctagccatc

SEQ ID NO: 14319 - DNA, 33 bp, Homo sapien
agactcactgtggagacggctttcagttgatac

SEQ ID NO: 14320 - DNA, 33 bp, Homo sapien
agactcactgtggagatggctttcagttgatac

SEQ ID NO: 14321 - DNA, 33 bp, Homo sapien
aactaaagacagaaccacaatagagtaaatcag

SEQ ID NO: 14322 - DNA, 33 bp, Homo sapien
aactaaagacagaaccgcaatagagtaaatcag

SEQ ID NO: 14323 - DNA, 33 bp, Homo sapien
ggtgaaggtgggataaaaatattcactttgaac

SEQ ID NO: 14324 - DNA, 33 bp, Homo sapien
ggtgaaggtgggataacaatattcactttgaac

SEQ ID NO: 14325 - DNA, 33 bp, Homo sapien
actactttagattctcaccagcaatgcaaaagg

SEQ ID NO: 14326 - DNA, 33 bp, Homo sapien
actactttagattctctccagcaatgcaaaagg

SEQ ID NO: 14327 - DNA, 33 bp, Homo sapien
gagctgtaaaacttcccgcatattgcacataga

SEQ ID NO: 14328 - DNA, 33 bp, Homo sapien
gagctgtaaaacttcctgcatattgcacataga

SEQ ID NO: 14329 - DNA, 33 bp, Homo sapien
tattcaatgtgccacgaattatggtaaatttta

SEQ ID NO: 14330 - DNA, 33 bp, Homo sapien
tattcaatgtgccacgtattatggtaaatttta

SEQ ID NO: 14331 - DNA, 33 bp, Homo sapien
tggagtttagatttgacgttatagcaaactgaa

SEQ ID NO: 14332 - DNA, 33 bp, Homo sapien
tggagtttagatttgatgttatagcaaactgaa

SEQ ID NO: 14333 - DNA, 33 bp, Homo sapien
tctatactcagttctacgtcagtgcctttggcc

SEQ ID NO: 14334 - DNA, 33 bp, Homo sapien
tctatactcagttctatgtcagtgcctttggcc

SEQ ID NO: 14335 - DNA, 33 bp, Homo sapien
gggtcagcactttatgaatgaggaaactgttca

SEQ ID NO: 14336 - DNA, 33 bp, Homo sapien
gggtcagcactttatggatgaggaaactgttca

SEQ ID NO: 14337 - DNA, 33 bp, Homo sapien
ttgtttcttagtctcacaagtatgcctaacatt

SEQ ID NO: 14338 - DNA, 33 bp, Homo sapien
ttgtttcttagtctcataagtatgcctaacatt

SEQ ID NO: 14339 - DNA, 33 bp, Homo sapien
aagactttggagatacaggcagaatcaaggagt

SEQ ID NO: 14340 - DNA, 33 bp, Homo sapien
aagactttggagatacgggcagaatcaaggagt

SEQ ID NO: 14341 - DNA, 33 bp, Homo sapien
gtctagtttcccagaagtccttctgtgtaagtt

SEQ ID NO: 14342 - DNA, 33 bp, Homo sapien
gtctagtttcccagaattccttctgtgtaagtt

SEQ ID NO: 14343 - DNA, 33 bp, Homo sapien
ttctgggaaactagacaagtcaaaatgttacaa

SEQ ID NO: 14344 - DNA, 33 bp, Homo sapien
ttctgggaaactagacgagtcaaaatgttacaa

SEQ ID NO: 14345 - DNA, 33 bp, Homo sapien
tttccttgtctctaaacgttttgttctggccaa

SEQ ID NO: 14346 - DNA, 33 bp, Homo sapien
tttccttgtctctaaatgttttgttctggccaa

SEQ ID NO: 14347 - DNA, 33 bp, Homo sapien
atgataacttacattacatggactgattctttg

SEQ ID NO: 14348 - DNA, 33 bp, Homo sapien
atgataacttacattatatggactgattctttg

SEQ ID NO: 14349 - DNA, 33 bp, Homo sapien
ttggtatcaagaagctaaatagacaatagtatg

SEQ ID NO: 14350 - DNA, 33 bp, Homo sapien
ttggtatcaagaagctcaatagacaatagtatg

SEQ ID NO: 14351 - DNA, 33 bp, Homo sapien
tctttctaaattgcaaactaatcatataacttc

SEQ ID NO: 14352 - DNA, 33 bp, Homo sapien
tctttctaaattgcaacctaatcatataacttc

SEQ ID NO: 14353 - DNA, 33 bp, Homo sapien
tttaattttgacttccaaatttgctttttttct

SEQ ID NO: 14354 - DNA, 33 bp, Homo sapien
tttaattttgacttccgaatttgctttttttct

SEQ ID NO: 14355 - DNA, 33 bp, Homo sapien
aaattttttatacagacgagttctcactatgtt

SEQ ID NO: 14356 - DNA, 33 bp, Homo sapien
aaattttttatacagatgagttctcactatgtt

SEQ ID NO: 14357 - DNA, 33 bp, Homo sapien
aacaaacttaattgtcgaatgtcaggattttac

SEQ ID NO: 14358 - DNA, 33 bp, Homo sapien
aacaaacttaattgtctaatgtcaggattttac

SEQ ID NO: 14359 - DNA, 33 bp, Homo sapien
ccttctttttatacaacgaaatgactgacagct

SEQ ID NO: 14360 - DNA, 33 bp, Homo sapien
ccttctttttatacaatgaaatgactgacagct

SEQ ID NO: 14361 - DNA, 33 bp, Homo sapien
agatggaatcaatctaaaaaaagagttcctgtt

SEQ ID NO: 14362 - DNA, 33 bp, Homo sapien
agatggaatcaatctagaaaaagagttcctgtt

SEQ ID NO: 14363 - DNA, 33 bp, Homo sapien
ttattttgcatcctcaatatgcacctttcttgg

SEQ ID NO: 14364 - DNA, 33 bp, Homo sapien
ttattttgcatcctcagtatgcacctttcttgg

SEQ ID NO: 14365 - DNA, 33 bp, Homo sapien
tagcacatcaaactcaatattccgtatgtgtca

SEQ ID NO: 14366 - DNA, 33 bp, Homo sapien
tagcacatcaaactcagtattccgtatgtgtca

SEQ ID NO: 14367 - DNA, 33 bp, Homo sapien
ggaaacattttcaatcaccatatgatattcaat

SEQ ID NO: 14368 - DNA, 33 bp, Homo sapien
ggaaacattttcaatcgccatatgatattcaat

SEQ ID NO: 14369 - DNA, 33 bp, Homo sapien
cgagcactagagaaacagagataaagaactgcc

SEQ ID NO: 14370 - DNA, 33 bp, Homo sapien
cgagcactagagaaacggagataaagaactgcc

SEQ ID NO: 14371 - DNA, 33 bp, Homo sapien
cctccagattcccagaaaaggaactctagttgg

SEQ ID NO: 14372 - DNA, 33 bp, Homo sapien
cctccagattcccagagaaggaactctagttgg

SEQ ID NO: 14373 - DNA, 33 bp, Homo sapien
gcaggaaagagcaagcagcagggacatgcatgg

SEQ ID NO: 14374 - DNA, 33 bp, Homo sapien
gcaggaaagagcaagcggcagggacatgcatgg

SEQ ID NO: 14375 - DNA, 33 bp, Homo sapien
acaaccaaattgaaaacggctagggtctatttc

SEQ ID NO: 14376 - DNA, 33 bp, Homo sapien
acaaccaaattgaaaatggctagggtctatttc

SEQ ID NO: 14377 - DNA, 33 bp, Homo sapien
actgcacttatcgataaggtaagtgtacatctg

SEQ ID NO: 14378 - DNA, 33 bp, Homo sapien
actgcacttatcgatacggtaagtgtacatctg

SEQ ID NO: 14379 - DNA, 33 bp, Homo sapien
cacgtaactgcatacaataatttacaatcctgt

SEQ ID NO: 14380 - DNA, 33 bp, Homo sapien
cacgtaactgcatacactaatttacaatcctgt

SEQ ID NO: 14381 - DNA, 33 bp, Homo sapien
cctcaaagtatactacagcatggactaaaatat

SEQ ID NO: 14382 - DNA, 33 bp, Homo sapien
cctcaaagtatactacggcatggactaaaatat

SEQ ID NO: 14383 - DNA, 33 bp, Homo sapien
tttgcatctcagattcaccaccaaaaggcaaaa

SEQ ID NO: 14384 - DNA, 33 bp, Homo sapien
tttgcatctcagattcgccaccaaaaggcaaaa

SEQ ID NO: 14385 - DNA, 33 bp, Homo sapien
gtgaaagggcaacggaagaagaaggaggccaaa

SEQ ID NO: 14386 - DNA, 33 bp, Homo sapien
gtgaaagggcaacggaggaagaaggaggccaaa

SEQ ID NO: 14387 - DNA, 33 bp, Homo sapien
tctggattttatctggaagattctggagagcca

SEQ ID NO: 14388 - DNA, 33 bp, Homo sapien
tctggattttatctggcagattctggagagcca

SEQ ID NO: 14389 - DNA, 33 bp, Homo sapien
gccaagtactgcgctacgggctttacacgtggt

SEQ ID NO: 14390 - DNA, 33 bp, Homo sapien
gccaagtactgcgctatgggctttacacgtggt

SEQ ID NO: 14391 - DNA, 33 bp, Homo sapien
aaagcttgggcctctacctggcatgagtagctg

SEQ ID NO: 14392 - DNA, 33 bp, Homo sapien
aaagcttgggcctctatctggcatgagtagctg

SEQ ID NO: 14393 - DNA, 33 bp, Homo sapien
aaacaaatgctcatgacatcataagtggaaaaa

SEQ ID NO: 14394 - DNA, 33 bp, Homo sapien
aaacaaatgctcatgatatcataagtggaaaaa

SEQ ID NO: 14395 - DNA, 33 bp, Homo sapien
gtttcaaggatcattaaaaggttcaggccaggt

SEQ ID NO: 14396 - DNA, 33 bp, Homo sapien
gtttcaaggatcattagaaggttcaggccaggt

SEQ ID NO: 14397 - DNA, 33 bp, Homo sapien
agcttaggctcttaaccacttctacccatagcc

SEQ ID NO: 14398 - DNA, 33 bp, Homo sapien
agcttaggctcttaactacttctacccatagcc

SEQ ID NO: 14399 - DNA, 33 bp, Homo sapien
gtccccaacctatggacaagtgtcaggtctaca

SEQ ID NO: 14400 - DNA, 33 bp, Homo sapien
gtccccaacctatggagaagtgtcaggtctaca

SEQ ID NO: 14401 - DNA, 33 bp, Homo sapien
tcgctgtacctagttaccatcaacaggcagatt

SEQ ID NO: 14402 - DNA, 33 bp, Homo sapien
tcgctgtacctagttatcatcaacaggcagatt

SEQ ID NO: 14403 - DNA, 33 bp, Homo sapien
ttaggcagaaaaattgaacttatcccaaaatga

SEQ ID NO: 14404 - DNA, 33 bp, Homo sapien
ttaggcagaaaaattggacttatcccaaaatga

SEQ ID NO: 14405 - DNA, 33 bp, Homo sapien
tgttattaaggcagcaatccccctggcctttga

SEQ ID NO: 14406 - DNA, 33 bp, Homo sapien
tgttattaaggcagcagtccccctggcctttga

SEQ ID NO: 14407 - DNA, 33 bp, Homo sapien
ggcaccgggcttggaactgacatcacccataac

SEQ ID NO: 14408 - DNA, 33 bp, Homo sapien
ggcaccgggcttggaattgacatcacccataac

SEQ ID NO: 14409 - DNA, 33 bp, Homo sapien
cggtgctggagttgtaagtggccatctgcagga

SEQ ID NO: 14410 - DNA, 33 bp, Homo sapien
cggtgctggagttgtacgtggccatctgcagga

SEQ ID NO: 14411 - DNA, 33 bp, Homo sapien
agataactgtcactacacatatgacctctctga

SEQ ID NO: 14412 - DNA, 33 bp, Homo sapien
agataactgtcactactcatatgacctctctga

SEQ ID NO: 14413 - DNA, 33 bp, Homo sapien
gacatgaaaaaaaaatgacatgacactattgtt

SEQ ID NO: 14414 - DNA, 33 bp, Homo sapien
gacatgaaaaaaaaattacatgacactattgtt

SEQ ID NO: 14415 - DNA, 33 bp, Homo sapien
tcttggccaaaagaaaaagtaaatgtcagcagt

SEQ ID NO: 14416 - DNA, 33 bp, Homo sapien
tcttggccaaaagaaagagtaaatgtcagcagt

SEQ ID NO: 14417 - DNA, 33 bp, Homo sapien
actgcatgttgaaggcaagggatatctgtcttg

SEQ ID NO: 14418 - DNA, 33 bp, Homo sapien
actgcatgttgaaggccagggatatctgtcttg

SEQ ID NO: 14419 - DNA, 33 bp, Homo sapien
gacttttcctccttacactacagagctaccacc

SEQ ID NO: 14420 - DNA, 33 bp, Homo sapien
gacttttcctccttacgctacagagctaccacc

SEQ ID NO: 14421 - DNA, 33 bp, Homo sapien
ttcctctttactgccccaatattgctttgcatt

SEQ ID NO: 14422 - DNA, 33 bp, Homo sapien
ttcctctttactgccctaatattgctttgcatt

SEQ ID NO: 14423 - DNA, 33 bp, Homo sapien
tcttactctctctcaaactgtacctatgggctc

SEQ ID NO: 14424 - DNA, 33 bp, Homo sapien
tcttactctctctcaacctgtacctatgggctc

SEQ ID NO: 14425 - DNA, 33 bp, Homo sapien
actgtgtaatgtttcactcaatgatggaccgca

SEQ ID NO: 14426 - DNA, 33 bp, Homo sapien
actgtgtaatgtttcagtcaatgatggaccgca

SEQ ID NO: 14427 - DNA, 33 bp, Homo sapien
ctgtggctccataaaaccataaaactgtatttt

SEQ ID NO: 14428 - DNA, 33 bp, Homo sapien
ctgtggctccataaaatcataaaactgtatttt

SEQ ID NO: 14429 - DNA, 33 bp, Homo sapien
aggccctagttacccaaaaacggcttcttatgc

SEQ ID NO: 14430 - DNA, 33 bp, Homo sapien
aggccctagttacccagaaacggcttcttatgc

SEQ ID NO: 14431 - DNA, 33 bp, Homo sapien
agggatacctggtgaggaaatggaggaatcgaa

SEQ ID NO: 14432 - DNA, 33 bp, Homo sapien
agggatacctggtgagtaaatggaggaatcgaa

SEQ ID NO: 14433 - DNA, 33 bp, Homo sapien
tccacacctcttttgaaatttgccaagaagtca

SEQ ID NO: 14434 - DNA, 33 bp, Homo sapien
tccacacctcttttgacatttgccaagaagtca

SEQ ID NO: 14435 - DNA, 33 bp, Homo sapien
tctgggaagaagccacgcctggttttccaattc

SEQ ID NO: 14436 - DNA, 33 bp, Homo sapien
tctgggaagaagccactcctggttttccaattc

SEQ ID NO: 14437 - DNA, 33 bp, Homo sapien
agcgtggaaccccatacgaatccccagggagga

SEQ ID NO: 14438 - DNA, 33 bp, Homo sapien
agcgtggaaccccatatgaatccccagggagga

SEQ ID NO: 14439 - DNA, 33 bp, Homo sapien
cataccctgaagtctagaaagctcttccttccc

SEQ ID NO: 14440 - DNA, 33 bp, Homo sapien
cataccctgaagtctataaagctcttccttccc

SEQ ID NO: 14441 - DNA, 33 bp, Homo sapien
gcccttcgatggcttacattatccctctgtctt

SEQ ID NO: 14442 - DNA, 33 bp, Homo sapien
gcccttcgatggcttagattatccctctgtctt

SEQ ID NO: 14443 - DNA, 33 bp, Homo sapien
gcctagctgacttcaagatactgggctggccgg

SEQ ID NO: 14444 - DNA, 33 bp, Homo sapien
gcctagctgacttcaatatactgggctggccgg

SEQ ID NO: 14445 - DNA, 33 bp, Homo sapien
aagtaatatgaaatcacagggcttgtaaaaatt

SEQ ID NO: 14446 - DNA, 33 bp, Homo sapien
aagtaatatgaaatcatagggcttgtaaaaatt

SEQ ID NO: 14447 - DNA, 33 bp, Homo sapien
aaagccacttcttcaacgtcagagtttagtggg

SEQ ID NO: 14448 - DNA, 33 bp, Homo sapien
aaagccacttcttcaaggtcagagtttagtggg

SEQ ID NO: 14449 - DNA, 33 bp, Homo sapien
ctactgtgaatggaaacaaaacactagatgttc

SEQ ID NO: 14450 - DNA, 33 bp, Homo sapien
ctactgtgaatggaaataaaacactagatgttc

SEQ ID NO: 14451 - DNA, 33 bp, Homo sapien
tgaataggaagtagggaacagatggaatcacct

SEQ ID NO: 14452 - DNA, 33 bp, Homo sapien
tgaataggaagtaggggacagatggaatcacct

SEQ ID NO: 14453 - DNA, 33 bp, Homo sapien
caggcagaggagacaaactgagcaaatgtgtgg

SEQ ID NO: 14454 - DNA, 33 bp, Homo sapien
caggcagaggagacaagctgagcaaatgtgtgg

SEQ ID NO: 14455 - DNA, 33 bp, Homo sapien
gtggtacaagttctgcacctgtacagattctta

SEQ ID NO: 14456 - DNA, 33 bp, Homo sapien
gtggtacaagttctgctcctgtacagattctta

SEQ ID NO: 14457 - DNA, 33 bp, Homo sapien
attcaacaaaaatgtaggagacccagtgtgagg

SEQ ID NO: 14458 - DNA, 33 bp, Homo sapien
attcaacaaaaatgtatgagacccagtgtgagg

SEQ ID NO: 14459 - DNA, 33 bp, Homo sapien
ttttgcagagttacaaagttatatcaaagccag

SEQ ID NO: 14460 - DNA, 33 bp, Homo sapien
ttttgcagagttacaaggttatatcaaagccag

SEQ ID NO: 14461 - DNA, 33 bp, Homo sapien
cctgtttgtgttgaaacagagaaataacacaga

SEQ ID NO: 14462 - DNA, 33 bp, Homo sapien
cctgtttgtgttgaaagagagaaataacacaga

SEQ ID NO: 14463 - DNA, 33 bp, Homo sapien
acccaaattgttcctaccagctcctctcatctt

SEQ ID NO: 14464 - DNA, 33 bp, Homo sapien
acccaaattgttcctatcagctcctctcatctt

SEQ ID NO: 14465 - DNA, 33 bp, Homo sapien
tgctgcatctgggccaagctggctgtaactaat

SEQ ID NO: 14466 - DNA, 33 bp, Homo sapien
tgctgcatctgggccaggctggctgtaactaat

SEQ ID NO: 14467 - DNA, 33 bp, Homo sapien
tcactgaggtttaggacatttgcttttctttca

SEQ ID NO: 14468 - DNA, 33 bp, Homo sapien
tcactgaggtttaggatatttgcttttctttca

SEQ ID NO: 14469 - DNA, 33 bp, Homo sapien
gggctgctgtgtcatacgagaaggtactgtgtg

SEQ ID NO: 14470 - DNA, 33 bp, Homo sapien
gggctgctgtgtcatatgagaaggtactgtgtg

SEQ ID NO: 14471 - DNA, 33 bp, Homo sapien
caaaggcagatggcgaaccacatctcagcttct

SEQ ID NO: 14472 - DNA, 33 bp, Homo sapien
caaaggcagatggcgagccacatctcagcttct

SEQ ID NO: 14473 - DNA, 33 bp, Homo sapien
gaaggctgtgcgaataagagggcttgtgtcatg

SEQ ID NO: 14474 - DNA, 33 bp, Homo sapien
gaaggctgtgcgaatacgagggcttgtgtcatg

SEQ ID NO: 14475 - DNA, 33 bp, Homo sapien
gggtaagcaaactgtgacaaaagacaaatacca

SEQ ID NO: 14476 - DNA, 33 bp, Homo sapien
gggtaagcaaactgtgccaaaagacaaatacca

SEQ ID NO: 14477 - DNA, 33 bp, Homo sapien
atctgattttcctttaaatttgggtagattgac

SEQ ID NO: 14478 - DNA, 33 bp, Homo sapien
atctgattttcctttacatttgggtagattgac

SEQ ID NO: 14479 - DNA, 33 bp, Homo sapien
acaggtgaagagtaaccctgagacactgccctt

SEQ ID NO: 14480 - DNA, 33 bp, Homo sapien
acaggtgaagagtaactctgagacactgccctt

SEQ ID NO: 14481 - DNA, 33 bp, Homo sapien
tcagtcctgtaatctgcaagctgaaggtatttt

SEQ ID NO: 14482 - DNA, 33 bp, Homo sapien
tcagtcctgtaatctgtaagctgaaggtatttt

SEQ ID NO: 14483 - DNA, 33 bp, Homo sapien
ggactttattcatcaaagttttccagagaaatg

SEQ ID NO: 14484 - DNA, 33 bp, Homo sapien
ggactttattcatcaaggttttccagagaaatg

SEQ ID NO: 14485 - DNA, 33 bp, Homo sapien
cctgtaataaccaaaaactttgtggtgttacta

SEQ ID NO: 14486 - DNA, 33 bp, Homo sapien
cctgtaataaccaaaagctttgtggtgttacta

SEQ ID NO: 14487 - DNA, 33 bp, Homo sapien
acccagtaatcttttacgccctcacaaagtctt

SEQ ID NO: 14488 - DNA, 33 bp, Homo sapien
acccagtaatcttttatgccctcacaaagtctt

SEQ ID NO: 14489 - DNA, 33 bp, Homo sapien
ctctcttgaatcctcacatggagaaaaagatgg

SEQ ID NO: 14490 - DNA, 33 bp, Homo sapien
ctctcttgaatcctcatatggagaaaaagatgg

SEQ ID NO: 14491 - DNA, 33 bp, Homo sapien
ccagttccgtggctaacacaaatcccacactgg

SEQ ID NO: 14492 - DNA, 33 bp, Homo sapien
ccagttccgtggctaatacaaatcccacactgg

SEQ ID NO: 14493 - DNA, 33 bp, Homo sapien
atgatcccatttactcgcatttccagtgaccca

SEQ ID NO: 14494 - DNA, 33 bp, Homo sapien
atgatcccatttactctcatttccagtgaccca

SEQ ID NO: 14495 - DNA, 33 bp, Homo sapien
ccactgggagcccgagaagtacatgctgtggtg

SEQ ID NO: 14496 - DNA, 33 bp, Homo sapien
ccactgggagcccgaggagtacatgctgtggtg

SEQ ID NO: 14497 - DNA, 33 bp, Homo sapien
aaggacccgggtactccgaagacctggccattt

SEQ ID NO: 14498 - DNA, 33 bp, Homo sapien
aaggacccgggtactctgaagacctggccattt

SEQ ID NO: 14499 - DNA, 33 bp, Homo sapien
ctttcctcactggaaaatggaaaggataatgcc

SEQ ID NO: 14500 - DNA, 33 bp, Homo sapien
ctttcctcactggaaactggaaaggataatgcc

SEQ ID NO: 14501 - DNA, 33 bp, Homo sapien
ctctgctgtgaacataagtcacaaaaagaaaaa

SEQ ID NO: 14502 - DNA, 33 bp, Homo sapien
ctctgctgtgaacataggtcacaaaaagaaaaa

SEQ ID NO: 14503 - DNA, 33 bp, Homo sapien
tcagggttgtcttgggaaagccctaaaggctcc

SEQ ID NO: 14504 - DNA, 33 bp, Homo sapien
tcagggttgtcttgggcaagccctaaaggctcc

SEQ ID NO: 14505 - DNA, 33 bp, Homo sapien
agcctttgttttgcacgcttaaatccagatata

SEQ ID NO: 14506 - DNA, 33 bp, Homo sapien
agcctttgttttgcactcttaaatccagatata

SEQ ID NO: 14507 - DNA, 33 bp, Homo sapien
cagtactgggattataagtgacaaatactcttg

SEQ ID NO: 14508 - DNA, 33 bp, Homo sapien
cagtactgggattataggtgacaaatactcttg

SEQ ID NO: 14509 - DNA, 33 bp, Homo sapien
tcaacagttatgaaacagcagaaccaagatgac

SEQ ID NO: 14510 - DNA, 33 bp, Homo sapien
tcaacagttatgaaacggcagaaccaagatgac

SEQ ID NO: 14511 - DNA, 33 bp, Homo sapien
gttctaggcaggaagaacagtatgggcaaagtg

SEQ ID NO: 14512 - DNA, 33 bp, Homo sapien
gttctaggcaggaagatcagtatgggcaaagtg

SEQ ID NO: 14513 - DNA, 33 bp, Homo sapien
atacatactgggatcacgttgcacaaggtgttt

SEQ ID NO: 14514 - DNA, 33 bp, Homo sapien
atacatactgggatcatgttgcacaaggtgttt

SEQ ID NO: 14515 - DNA, 33 bp, Homo sapien
caagaaatttcactaaagtggtagattccttag

SEQ ID NO: 14516 - DNA, 33 bp, Homo sapien
caagaaatttcactaaggtggtagattccttag

SEQ ID NO: 14517 - DNA, 33 bp, Homo sapien
tgtataaggtatacacaaaacataaatgaattg

SEQ ID NO: 14518 - DNA, 33 bp, Homo sapien
tgtataaggtatacacgaaacataaatgaattg

SEQ ID NO: 14519 - DNA, 33 bp, Homo sapien
gaaggcactagtatatcaacttcctattgccac

SEQ ID NO: 14520 - DNA, 33 bp, Homo sapien
gaaggcactagtatatgaacttcctattgccac

SEQ ID NO: 14521 - DNA, 33 bp, Homo sapien
tcctctagagccttcaaaaggagtatagccctg

SEQ ID NO: 14522 - DNA, 33 bp, Homo sapien
tcctctagagccttcagaaggagtatagccctg

SEQ ID NO: 14523 - DNA, 33 bp, Homo sapien
ctagaagataggaatggattatcctctagagcc

SEQ ID NO: 14524 - DNA, 33 bp, Homo sapien
ctagaagataggaatgtattatcctctagagcc

SEQ ID NO: 14525 - DNA, 33 bp, Homo sapien
aaatactctgaagatcaaaatgccccactatat

SEQ ID NO: 14526 - DNA, 33 bp, Homo sapien
aaatactctgaagatcgaaatgccccactatat

SEQ ID NO: 14527 - DNA, 33 bp, Homo sapien
agcatacctactatacactcgtgtagcaccatg

SEQ ID NO: 14528 - DNA, 33 bp, Homo sapien
agcatacctactatacgctcgtgtagcaccatg

SEQ ID NO: 14529 - DNA, 33 bp, Homo sapien
attactatctgcctcccactcagagtataacct

SEQ ID NO: 14530 - DNA, 33 bp, Homo sapien
attactatctgcctccgactcagagtataacct

SEQ ID NO: 14531 - DNA, 33 bp, Homo sapien
atgtgtgtgtttaatacgggatctggcagtgtg

SEQ ID NO: 14532 - DNA, 33 bp, Homo sapien
atgtgtgtgtttaatatgggatctggcagtgtg

SEQ ID NO: 14533 - DNA, 33 bp, Homo sapien
aatcttgtgaccatcactccattatcacatacc

SEQ ID NO: 14534 - DNA, 33 bp, Homo sapien
aatcttgtgaccatcattccattatcacatacc

SEQ ID NO: 14535 - DNA, 33 bp, Homo sapien
acacttaatgcttgcaacagtcaccttcactgt

SEQ ID NO: 14536 - DNA, 33 bp, Homo sapien
acacttaatgcttgcagcagtcaccttcactgt

SEQ ID NO: 14537 - DNA, 33 bp, Homo sapien
atgaaatggatcataacaatagtagcaaatatt

SEQ ID NO: 14538 - DNA, 33 bp, Homo sapien
atgaaatggatcataagaatagtagcaaatatt

SEQ ID NO: 14539 - DNA, 33 bp, Homo sapien
ctcaaatttctctttcgcaacccatgacttcac

SEQ ID NO: 14540 - DNA, 33 bp, Homo sapien
ctcaaatttctctttctcaacccatgacttcac

SEQ ID NO: 14541 - DNA, 33 bp, Homo sapien
tgattctcaggggttgcactcacttgaatgcag

SEQ ID NO: 14542 - DNA, 33 bp, Homo sapien
tgattctcaggggttgtactcacttgaatgcag

SEQ ID NO: 14543 - DNA, 33 bp, Homo sapien
tcaagacagtcttgccacttcttggccctttgt

SEQ ID NO: 14544 - DNA, 33 bp, Homo sapien
tcaagacagtcttgccgcttcttggccctttgt

SEQ ID NO: 14545 - DNA, 33 bp, Homo sapien
gggcacccatttggcactcactgagtatctggt

SEQ ID NO: 14546 - DNA, 33 bp, Homo sapien
gggcacccatttggcagtcactgagtatctggt

SEQ ID NO: 14547 - DNA, 33 bp, Homo sapien
ctgtcaagccaactaacgttcctattgacttaa

SEQ ID NO: 14548 - DNA, 33 bp, Homo sapien
ctgtcaagccaactaatgttcctattgacttaa

SEQ ID NO: 14549 - DNA, 33 bp, Homo sapien
ttatggataaggaagcagaactcagagatattg

SEQ ID NO: 14550 - DNA, 33 bp, Homo sapien
ttatggataaggaagccgaactcagagatattg

SEQ ID NO: 14551 - DNA, 33 bp, Homo sapien
ggttctggttaaatcaccttagcaggatttttg

SEQ ID NO: 14552 - DNA, 33 bp, Homo sapien
ggttctggttaaatcagcttagcaggatttttg

SEQ ID NO: 14553 - DNA, 33 bp, Homo sapien
ttaacaacatttcacactgataaagccaaaagt

SEQ ID NO: 14554 - DNA, 33 bp, Homo sapien
ttaacaacatttcacattgataaagccaaaagt

SEQ ID NO: 14555 - DNA, 33 bp, Homo sapien
atgtggcctgcctactaaatgtaccacctacgc

SEQ ID NO: 14556 - DNA, 33 bp, Homo sapien
atgtggcctgcctactcaatgtaccacctacgc

SEQ ID NO: 14557 - DNA, 33 bp, Homo sapien
attaatgttgtctgtagaaaaccataatttaat

SEQ ID NO: 14558 - DNA, 33 bp, Homo sapien
attaatgttgtctgtataaaaccataatttaat

SEQ ID NO: 14559 - DNA, 33 bp, Homo sapien
tggaatatctgatttggaaagagtaatggtggg

SEQ ID NO: 14560 - DNA, 33 bp, Homo sapien
tggaatatctgatttgtaaagagtaatggtggg

SEQ ID NO: 14561 - DNA, 33 bp, Homo sapien
gatcattttccttctgcatttactgataatgta

SEQ ID NO: 14562 - DNA, 33 bp, Homo sapien
gatcattttccttctgtatttactgataatgta

SEQ ID NO: 14563 - DNA, 33 bp, Homo sapien
gatccaggaatctcaaataatccctaggaggat

SEQ ID NO: 14564 - DNA, 33 bp, Homo sapien
gatccaggaatctcaagtaatccctaggaggat

SEQ ID NO: 14565 - DNA, 33 bp, Homo sapien
atttggattttttataccttactctctctgtgt

SEQ ID NO: 14566 - DNA, 33 bp, Homo sapien
atttggattttttatatcttactctctctgtgt

SEQ ID NO: 14567 - DNA, 33 bp, Homo sapien
gagtcatgatgaggctcaacatattcatttgtt

SEQ ID NO: 14568 - DNA, 33 bp, Homo sapien
gagtcatgatgaggctgaacatattcatttgtt

SEQ ID NO: 14569 - DNA, 33 bp, Homo sapien
caaagtaaggaatgaaaggcttgcctactttat

SEQ ID NO: 14570 - DNA, 33 bp, Homo sapien
caaagtaaggaatgaagggcttgcctactttat

SEQ ID NO: 14571 - DNA, 33 bp, Homo sapien
gtagggctgccaagagaagcaaaagatggccct

SEQ ID NO: 14572 - DNA, 33 bp, Homo sapien
gtagggctgccaagaggagcaaaagatggccct

SEQ ID NO: 14573 - DNA, 33 bp, Homo sapien
tctgctttgactgctacgcatgggtgcatttca

SEQ ID NO: 14574 - DNA, 33 bp, Homo sapien
tctgctttgactgctatgcatgggtgcatttca

SEQ ID NO: 14575 - DNA, 33 bp, Homo sapien
ccgccattgtcatctcacattctggacgcatga

SEQ ID NO: 14576 - DNA, 33 bp, Homo sapien
ccgccattgtcatctcgcattctggacgcatga

SEQ ID NO: 14577 - DNA, 33 bp, Homo sapien
atgtttgtatctgttaaccaatctctctttagc

SEQ ID NO: 14578 - DNA, 33 bp, Homo sapien
atgtttgtatctgttagccaatctctctttagc

SEQ ID NO: 14579 - DNA, 33 bp, Homo sapien
aagattctggacaaacagcaatgactgtgtagc

SEQ ID NO: 14580 - DNA, 33 bp, Homo sapien
aagattctggacaaacggcaatgactgtgtagc

SEQ ID NO: 14581 - DNA, 33 bp, Homo sapien
cacactctgttccctgaaaacctttctgactcc

SEQ ID NO: 14582 - DNA, 33 bp, Homo sapien
cacactctgttccctgtaaacctttctgactcc

SEQ ID NO: 14583 - DNA, 33 bp, Homo sapien
ttccattatagtctaaataactctcaggccatg

SEQ ID NO: 14584 - DNA, 33 bp, Homo sapien
ttccattatagtctaagtaactctcaggccatg

SEQ ID NO: 14585 - DNA, 33 bp, Homo sapien
actgcatagaccaggcaagagacagacagggtt

SEQ ID NO: 14586 - DNA, 33 bp, Homo sapien
actgcatagaccaggcgagagacagacagggtt

SEQ ID NO: 14587 - DNA, 33 bp, Homo sapien
catgtgatatggcacaagttggatgtataggaa

SEQ ID NO: 14588 - DNA, 33 bp, Homo sapien
catgtgatatggcacaggttggatgtataggaa

SEQ ID NO: 14589 - DNA, 33 bp, Homo sapien
agcgatttgctttcggacagctgagcctgcagc

SEQ ID NO: 14590 - DNA, 33 bp, Homo sapien
agcgatttgctttcggtcagctgagcctgcagc

SEQ ID NO: 14591 - DNA, 33 bp, Homo sapien
aaaatactttagaaggaataatttatggccaac

SEQ ID NO: 14592 - DNA, 33 bp, Homo sapien
aaaatactttagaagggataatttatggccaac

SEQ ID NO: 14593 - DNA, 33 bp, Homo sapien
gctgcagagctataaacgagaactgatacagat

SEQ ID NO: 14594 - DNA, 33 bp, Homo sapien
gctgcagagctataaatgagaactgatacagat

SEQ ID NO: 14595 - DNA, 33 bp, Homo sapien
atattgagaggtagaaaacgatggaacatgtag

SEQ ID NO: 14596 - DNA, 33 bp, Homo sapien
atattgagaggtagaagacgatggaacatgtag

SEQ ID NO: 14597 - DNA, 33 bp, Homo sapien
ttttaaaccttttgaccagcgcttccaagtctc

SEQ ID NO: 14598 - DNA, 33 bp, Homo sapien
ttttaaaccttttgactagcgcttccaagtctc

SEQ ID NO: 14599 - DNA, 33 bp, Homo sapien
gggtctcctctccctcactgagaatctcctggg

SEQ ID NO: 14600 - DNA, 33 bp, Homo sapien
gggtctcctctccctcgctgagaatctcctggg

SEQ ID NO: 14601 - DNA, 33 bp, Homo sapien
gccacacacaggtaccaggagagatagttcttt

SEQ ID NO: 14602 - DNA, 33 bp, Homo sapien
gccacacacaggtaccgggagagatagttcttt

SEQ ID NO: 14603 - DNA, 33 bp, Homo sapien
aggccaatgctaagccactgggagtcaccgcca

SEQ ID NO: 14604 - DNA, 33 bp, Homo sapien
aggccaatgctaagccgctgggagtcaccgcca

SEQ ID NO: 14605 - DNA, 33 bp, Homo sapien
ctatgccaaactctgacgcctcaaactatgtaa

SEQ ID NO: 14606 - DNA, 33 bp, Homo sapien
ctatgccaaactctgatgcctcaaactatgtaa

SEQ ID NO: 14607 - DNA, 33 bp, Homo sapien
acctcactgccaccgacgggagcctctaggtcc

SEQ ID NO: 14608 - DNA, 33 bp, Homo sapien
acctcactgccaccgatgggagcctctaggtcc

SEQ ID NO: 14609 - DNA, 33 bp, Homo sapien
tactgggtacattgacaaagagcaggttggggc

SEQ ID NO: 14610 - DNA, 33 bp, Homo sapien
tactgggtacattgacgaagagcaggttggggc

SEQ ID NO: 14611 - DNA, 33 bp, Homo sapien
gtaggtatcagaaaaacgcaccctggcttctgg

SEQ ID NO: 14612 - DNA, 33 bp, Homo sapien
gtaggtatcagaaaaatgcaccctggcttctgg

SEQ ID NO: 14613 - DNA, 33 bp, Homo sapien
agctgctgcgccactgaaaaggtgctggactga

SEQ ID NO: 14614 - DNA, 33 bp, Homo sapien
agctgctgcgccactggaaaggtgctggactga

SEQ ID NO: 14615 - DNA, 33 bp, Homo sapien
aaactcttcctcactaccatactcactatcagt

SEQ ID NO: 14616 - DNA, 33 bp, Homo sapien
aaactcttcctcactagcatactcactatcagt

SEQ ID NO: 14617 - DNA, 33 bp, Homo sapien
ctgctggcaggtattaaacggtatcgggaagtg

SEQ ID NO: 14618 - DNA, 33 bp, Homo sapien
ctgctggcaggtattagacggtatcgggaagtg

SEQ ID NO: 14619 - DNA, 33 bp, Homo sapien
tgttggggcagaagcacgaagtaggcatgtagt

SEQ ID NO: 14620 - DNA, 33 bp, Homo sapien
tgttggggcagaagcaggaagtaggcatgtagt

SEQ ID NO: 14621 - DNA, 33 bp, Homo sapien
gatcaatcaaacagaactgagaatccagtatgg

SEQ ID NO: 14622 - DNA, 33 bp, Homo sapien
gatcaatcaaacagaattgagaatccagtatgg

SEQ ID NO: 14623 - DNA, 33 bp, Homo sapien
gctattatactgcctccctgtagaagacacagg

SEQ ID NO: 14624 - DNA, 33 bp, Homo sapien
gctattatactgcctctctgtagaagacacagg

SEQ ID NO: 14625 - DNA, 33 bp, Homo sapien
ctttggaatggcagaaactgctcagaaatctga

SEQ ID NO: 14626 - DNA, 33 bp, Homo sapien
ctttggaatggcagaacctgctcagaaatctga

SEQ ID NO: 14627 - DNA, 33 bp, Homo sapien
ggaggcccttcaccacacatagctttctctgtg

SEQ ID NO: 14628 - DNA, 33 bp, Homo sapien
ggaggcccttcaccactcatagctttctctgtg

SEQ ID NO: 14629 - DNA, 33 bp, Homo sapien
tttcttaatgaaagaacgtaggcaacaactagg

SEQ ID NO: 14630 - DNA, 33 bp, Homo sapien
tttcttaatgaaagaatgtaggcaacaactagg

SEQ ID NO: 14631 - DNA, 33 bp, Homo sapien
taccaagagtgcacaacgttaccttttctccac

SEQ ID NO: 14632 - DNA, 33 bp, Homo sapien
taccaagagtgcacaaggttaccttttctccac

SEQ ID NO: 14633 - DNA, 33 bp, Homo sapien
ctgatggttgtcagagccgagggttcctgatac

SEQ ID NO: 14634 - DNA, 33 bp, Homo sapien
ctgatggttgtcagagtcgagggttcctgatac

SEQ ID NO: 14635 - DNA, 33 bp, Homo sapien
caagtctgtagacaaacgtttctgatatctcca

SEQ ID NO: 14636 - DNA, 33 bp, Homo sapien
caagtctgtagacaaatgtttctgatatctcca

SEQ ID NO: 14637 - DNA, 33 bp, Homo sapien
ttgatctttactctcacagcggcgccatcgccc

SEQ ID NO: 14638 - DNA, 33 bp, Homo sapien
ttgatctttactctcatagcggcgccatcgccc

SEQ ID NO: 14639 - DNA, 33 bp, Homo sapien
ggaagaggatactacactccgagaccccgcagg

SEQ ID NO: 14640 - DNA, 33 bp, Homo sapien
ggaagaggatactacattccgagaccccgcagg

SEQ ID NO: 14641 - DNA, 33 bp, Homo sapien
taagaggctatacagacacagaaacccaggaaa

SEQ ID NO: 14642 - DNA, 33 bp, Homo sapien
taagaggctatacagagacagaaacccaggaaa

SEQ ID NO: 14643 - DNA, 33 bp, Homo sapien
gaaaaaaggggtggacaatcgggagttggacac

SEQ ID NO: 14644 - DNA, 33 bp, Homo sapien
gaaaaaaggggtggaccatcgggagttggacac

SEQ ID NO: 14645 - DNA, 33 bp, Homo sapien
gatttccaggaatatgccaggattctttgaggc

SEQ ID NO: 14646 - DNA, 33 bp, Homo sapien
gatttccaggaatatggcaggattctttgaggc

SEQ ID NO: 14647 - DNA, 33 bp, Homo sapien
ctttgaggctcctgtgaacatctaatttcccag

SEQ ID NO: 14648 - DNA, 33 bp, Homo sapien
ctttgaggctcctgtggacatctaatttcccag

SEQ ID NO: 14649 - DNA, 33 bp, Homo sapien
tctcttatggcccgaacgccattctctaggaat

SEQ ID NO: 14650 - DNA, 33 bp, Homo sapien
tctcttatggcccgaatgccattctctaggaat

SEQ ID NO: 14651 - DNA, 33 bp, Homo sapien
agctctttgccagtcaaccacattcatctgggg

SEQ ID NO: 14652 - DNA, 33 bp, Homo sapien
agctctttgccagtcacccacattcatctgggg

SEQ ID NO: 14653 - DNA, 33 bp, Homo sapien
agctagactacatccccgggataattaaagatg

SEQ ID NO: 14654 - DNA, 33 bp, Homo sapien
agctagactacatccctgggataattaaagatg

SEQ ID NO: 14655 - DNA, 33 bp, Homo sapien
cccctcagtacaaatcagactccaaagtgactg

SEQ ID NO: 14656 - DNA, 33 bp, Homo sapien
cccctcagtacaaatccgactccaaagtgactg

SEQ ID NO: 14657 - DNA, 33 bp, Homo sapien
gaaacaggcttgattacgtgattcctaggtatc

SEQ ID NO: 14658 - DNA, 33 bp, Homo sapien
gaaacaggcttgattatgtgattcctaggtatc

SEQ ID NO: 14659 - DNA, 33 bp, Homo sapien
gtgagaggcaggtaacgccagatgtatgtatag

SEQ ID NO: 14660 - DNA, 33 bp, Homo sapien
gtgagaggcaggtaactccagatgtatgtatag

SEQ ID NO: 14661 - DNA, 33 bp, Homo sapien
gttcttttatggaggacggtcctcgacttcctg

SEQ ID NO: 14662 - DNA, 33 bp, Homo sapien
gttcttttatggaggatggtcctcgacttcctg

SEQ ID NO: 14663 - DNA, 33 bp, Homo sapien
ggtgtgtgggtttgcgaatttggtagtgggaga

SEQ ID NO: 14664 - DNA, 33 bp, Homo sapien
ggtgtgtgggtttgcggatttggtagtgggaga

SEQ ID NO: 14665 - DNA, 33 bp, Homo sapien
ttctgcttctccattcaccacgtttctgtagaa

SEQ ID NO: 14666 - DNA, 33 bp, Homo sapien
ttctgcttctccattcgccacgtttctgtagaa

SEQ ID NO: 14667 - DNA, 33 bp, Homo sapien
caataggcctcttaacaagacaaatgaatgggg

SEQ ID NO: 14668 - DNA, 33 bp, Homo sapien
caataggcctcttaacgagacaaatgaatgggg

SEQ ID NO: 14669 - DNA, 33 bp, Homo sapien
tcaaactgggccaccaacaaggctcttctatgg

SEQ ID NO: 14670 - DNA, 33 bp, Homo sapien
tcaaactgggccaccatcaaggctcttctatgg

SEQ ID NO: 14671 - DNA, 33 bp, Homo sapien
caaaccaagctacttgaactactctgccccgtg

SEQ ID NO: 14672 - DNA, 33 bp, Homo sapien
caaaccaagctacttggactactctgccccgtg

SEQ ID NO: 14673 - DNA, 33 bp, Homo sapien
ccaacaatggctccaccgaactaactgttaagg

SEQ ID NO: 14674 - DNA, 33 bp, Homo sapien
ccaacaatggctccacggaactaactgttaagg

SEQ ID NO: 14675 - DNA, 33 bp, Homo sapien
cctaccccggtctcaaattccaattctccagga

SEQ ID NO: 14676 - DNA, 33 bp, Homo sapien
cctaccccggtctcaagttccaattctccagga

SEQ ID NO: 14677 - DNA, 33 bp, Homo sapien
atatccaggcctattaagagatttgagcgggtt

SEQ ID NO: 14678 - DNA, 33 bp, Homo sapien
atatccaggcctattaggagatttgagcgggtt

SEQ ID NO: 14679 - DNA, 33 bp, Homo sapien
ccacagcaccacataaagagcatctccactata

SEQ ID NO: 14680 - DNA, 33 bp, Homo sapien
ccacagcaccacataaggagcatctccactata

SEQ ID NO: 14681 - DNA, 33 bp, Homo sapien
agcatggaacagaatacgagaggagactctgga

SEQ ID NO: 14682 - DNA, 33 bp, Homo sapien
agcatggaacagaatatgagaggagactctgga

SEQ ID NO: 14683 - DNA, 33 bp, Homo sapien
cctctgcaggtctagaaaatgccaagccctgta

SEQ ID NO: 14684 - DNA, 33 bp, Homo sapien
cctctgcaggtctagagaatgccaagccctgta

SEQ ID NO: 14685 - DNA, 33 bp, Homo sapien
tgtcactgtctcagccgggacctcaggttctca

SEQ ID NO: 14686 - DNA, 33 bp, Homo sapien
tgtcactgtctcagcctggacctcaggttctca

SEQ ID NO: 14687 - DNA, 33 bp, Homo sapien
gggctcttttttccaacgtggaaatcatctgaa

SEQ ID NO: 14688 - DNA, 33 bp, Homo sapien
gggctcttttttccaatgtggaaatcatctgaa

SEQ ID NO: 14689 - DNA, 33 bp, Homo sapien
ccctggtgttgaataggaccgacaggcgtgcaa

SEQ ID NO: 14690 - DNA, 33 bp, Homo sapien
ccctggtgttgaatagtaccgacaggcgtgcaa

SEQ ID NO: 14691 - DNA, 33 bp, Homo sapien
aaattctcatacgagacaggttccattattatc

SEQ ID NO: 14692 - DNA, 33 bp, Homo sapien
aaattctcatacgagataggttccattattatc

SEQ ID NO: 14693 - DNA, 33 bp, Homo sapien
ctgccagggtccagcacctgctcttggccagca

SEQ ID NO: 14694 - DNA, 33 bp, Homo sapien
ctgccagggtccagcatctgctcttggccagca

SEQ ID NO: 14695 - DNA, 33 bp, Homo sapien
agtcccaatgccccgacagtgcaacccacagaa

SEQ ID NO: 14696 - DNA, 33 bp, Homo sapien
agtcccaatgccccgatagtgcaacccacagaa

SEQ ID NO: 14697 - DNA, 33 bp, Homo sapien
gatgactgctatgcaagttatttggaatatagt

SEQ ID NO: 14698 - DNA, 33 bp, Homo sapien
gatgactgctatgcaatttatttggaatatagt

SEQ ID NO: 14699 - DNA, 33 bp, Homo sapien
ttcctacctctgatacacacttttttcataagc

SEQ ID NO: 14700 - DNA, 33 bp, Homo sapien
ttcctacctctgatacgcacttttttcataagc

SEQ ID NO: 14701 - DNA, 33 bp, Homo sapien
gatgaattctaccgcaggatttgggttttcttt

SEQ ID NO: 14702 - DNA, 33 bp, Homo sapien
gatgaattctaccgcatgatttgggttttcttt

SEQ ID NO: 14703 - DNA, 33 bp, Homo sapien
tggaaggtgcacttaagagtgggctgtgggcaa

SEQ ID NO: 14704 - DNA, 33 bp, Homo sapien
tggaaggtgcacttaatagtgggctgtgggcaa

SEQ ID NO: 14705 - DNA, 33 bp, Homo sapien
gaaagggagacagctacaacagagccatcctgc

SEQ ID NO: 14706 - DNA, 33 bp, Homo sapien
gaaagggagacagctagaacagagccatcctgc

SEQ ID NO: 14707 - DNA, 33 bp, Homo sapien
cttaactcttaaaacacctaccttgctggccaa

SEQ ID NO: 14708 - DNA, 33 bp, Homo sapien
cttaactcttaaaacatctaccttgctggccaa

SEQ ID NO: 14709 - DNA, 33 bp, Homo sapien
tgggtagatgatactacagctgcattactgaaa

SEQ ID NO: 14710 - DNA, 33 bp, Homo sapien
tgggtagatgatactatagctgcattactgaaa

SEQ ID NO: 14711 - DNA, 33 bp, Homo sapien
tgtatcatcaattaaagagttccgaattgagag

SEQ ID NO: 14712 - DNA, 33 bp, Homo sapien
tgtatcatcaattaaatagttccgaattgagag

SEQ ID NO: 14713 - DNA, 33 bp, Homo sapien
agtaaagggttttttaagtactgcactgatgtt

SEQ ID NO: 14714 - DNA, 33 bp, Homo sapien
agtaaagggttttttaggtactgcactgatgtt

SEQ ID NO: 14715 - DNA, 33 bp, Homo sapien
ccatctgtcatgaccacggatatataaagggcc

SEQ ID NO: 14716 - DNA, 33 bp, Homo sapien
ccatctgtcatgaccagggatatataaagggcc

SEQ ID NO: 14717 - DNA, 33 bp, Homo sapien
gatcctaggtttggaccaagggtgactcctgaa

SEQ ID NO: 14718 - DNA, 33 bp, Homo sapien
gatcctaggtttggacgaagggtgactcctgaa

SEQ ID NO: 14719 - DNA, 33 bp, Homo sapien
agaaagatgtcaaccccagagcctatgccattt

SEQ ID NO: 14720 - DNA, 33 bp, Homo sapien
agaaagatgtcaacccgagagcctatgccattt

SEQ ID NO: 14721 - DNA, 33 bp, Homo sapien
gccagcatagttgacccctctatggactggggc

SEQ ID NO: 14722 - DNA, 33 bp, Homo sapien
gccagcatagttgacctctctatggactggggc

SEQ ID NO: 14723 - DNA, 33 bp, Homo sapien
tactgaggatttaaagaatgtagcagttgttct

SEQ ID NO: 14724 - DNA, 33 bp, Homo sapien
tactgaggatttaaagtatgtagcagttgttct

SEQ ID NO: 14725 - DNA, 33 bp, Homo sapien
ctctagttacatacccacttccactcttaggta

SEQ ID NO: 14726 - DNA, 33 bp, Homo sapien
ctctagttacataccctcttccactcttaggta

SEQ ID NO: 14727 - DNA, 33 bp, Homo sapien
ctatgcatccataaacaaaatgaggtccctcta

SEQ ID NO: 14728 - DNA, 33 bp, Homo sapien
ctatgcatccataaacgaaatgaggtccctcta

SEQ ID NO: 14729 - DNA, 33 bp, Homo sapien
ttatatttgtgaaaaaagaagtaagtgggaaac

SEQ ID NO: 14730 - DNA, 33 bp, Homo sapien
ttatatttgtgaaaaaggaagtaagtgggaaac

SEQ ID NO: 14731 - DNA, 33 bp, Homo sapien
catgtcagtgaaaccactaaatatgtggccttt

SEQ ID NO: 14732 - DNA, 33 bp, Homo sapien
catgtcagtgaaaccattaaatatgtggccttt

SEQ ID NO: 14733 - DNA, 33 bp, Homo sapien
tatctgtgaaggtatcagagacttatttagtct

SEQ ID NO: 14734 - DNA, 33 bp, Homo sapien
tatctgtgaaggtatctgagacttatttagtct

SEQ ID NO: 14735 - DNA, 33 bp, Homo sapien
tagggcctgggggagtcactagatgaagtctgt

SEQ ID NO: 14736 - DNA, 33 bp, Homo sapien
tagggcctgggggagttactagatgaagtctgt

SEQ ID NO: 14737 - DNA, 33 bp, Homo sapien
tcaaaacttgtcaaaacttgtatgatgctacta

SEQ ID NO: 14738 - DNA, 33 bp, Homo sapien
tcaaaacttgtcaaaatttgtatgatgctacta

SEQ ID NO: 14739 - DNA, 33 bp, Homo sapien
gaagttagaaaatgtacagcacattaaacccaa

SEQ ID NO: 14740 - DNA, 33 bp, Homo sapien
gaagttagaaaatgtagagcacattaaacccaa

SEQ ID NO: 14741 - DNA, 33 bp, Homo sapien
gtaggccatgagaggacgttctggattatctga

SEQ ID NO: 14742 - DNA, 33 bp, Homo sapien
gtaggccatgagaggatgttctggattatctga

SEQ ID NO: 14743 - DNA, 33 bp, Homo sapien
tgtatcctttctcaggaaatcagtacaagatgt

SEQ ID NO: 14744 - DNA, 33 bp, Homo sapien
tgtatcctttctcagggaatcagtacaagatgt

SEQ ID NO: 14745 - DNA, 33 bp, Homo sapien
aagaggaacaccaaaagcctagaatacaatggg

SEQ ID NO: 14746 - DNA, 33 bp, Homo sapien
aagaggaacaccaaaatcctagaatacaatggg

SEQ ID NO: 14747 - DNA, 33 bp, Homo sapien
cctgatgtccctgtgaacgctgttgccctaggg

SEQ ID NO: 14748 - DNA, 33 bp, Homo sapien
cctgatgtccctgtgagcgctgttgccctaggg

SEQ ID NO: 14749 - DNA, 33 bp, Homo sapien
gtgggaacagctatggaaaggcactgaagcatg

SEQ ID NO: 14750 - DNA, 33 bp, Homo sapien
gtgggaacagctatgggaaggcactgaagcatg

SEQ ID NO: 14751 - DNA, 33 bp, Homo sapien
cattagttaggcatcaaagcctcaaaatgaata

SEQ ID NO: 14752 - DNA, 33 bp, Homo sapien
cattagttaggcatcagagcctcaaaatgaata

SEQ ID NO: 14753 - DNA, 33 bp, Homo sapien
aatgccataatagaagcacagtgatggcctaaa

SEQ ID NO: 14754 - DNA, 33 bp, Homo sapien
aatgccataatagaagtacagtgatggcctaaa

SEQ ID NO: 14755 - DNA, 33 bp, Homo sapien
atttcatatggaactccgaagacacgaatgata

SEQ ID NO: 14756 - DNA, 33 bp, Homo sapien
atttcatatggaactctgaagacacgaatgata

SEQ ID NO: 14757 - DNA, 33 bp, Homo sapien
ttattgctttattacagtgactagaccttccag

SEQ ID NO: 14758 - DNA, 33 bp, Homo sapien
ttattgctttattacattgactagaccttccag

SEQ ID NO: 14759 - DNA, 33 bp, Homo sapien
gacgcattctaaataccggcgatacagtgatga

SEQ ID NO: 14760 - DNA, 33 bp, Homo sapien
gacgcattctaaatactggcgatacagtgatga

SEQ ID NO: 14761 - DNA, 33 bp, Homo sapien
aacagcatgaatacaaaggaagatgctcaataa

SEQ ID NO: 14762 - DNA, 33 bp, Homo sapien
aacagcatgaatacaagggaagatgctcaataa

SEQ ID NO: 14763 - DNA, 33 bp, Homo sapien
atttttcagtggtttaagatggtagaccaacgg

SEQ ID NO: 14764 - DNA, 33 bp, Homo sapien
atttttcagtggtttatgatggtagaccaacgg

SEQ ID NO: 14765 - DNA, 33 bp, Homo sapien
actaggacacacaactcaatgtaaggcttgcct

SEQ ID NO: 14766 - DNA, 33 bp, Homo sapien
actaggacacacaactgaatgtaaggcttgcct

SEQ ID NO: 14767 - DNA, 33 bp, Homo sapien
aacacctgttttgtgaaggaccaagttcaatgc

SEQ ID NO: 14768 - DNA, 33 bp, Homo sapien
aacacctgttttgtgatggaccaagttcaatgc

SEQ ID NO: 14769 - DNA, 33 bp, Homo sapien
gcatttcacttgcttacggcttatacttgattt

SEQ ID NO: 14770 - DNA, 33 bp, Homo sapien
gcatttcacttgcttatggcttatacttgattt

SEQ ID NO: 14771 - DNA, 33 bp, Homo sapien
aaaaatggaaggaacagtcaccgaagagtttga

SEQ ID NO: 14772 - DNA, 33 bp, Homo sapien
aaaaatggaaggaacattcaccgaagagtttga

SEQ ID NO: 14773 - DNA, 33 bp, Homo sapien
cagatcctggtgtccaagtgtgactttcctgag

SEQ ID NO: 14774 - DNA, 33 bp, Homo sapien
cagatcctggtgtccacgtgtgactttcctgag

SEQ ID NO: 14775 - DNA, 33 bp, Homo sapien
gtttgtgctcagtgaacgttacttctcttgtgt

SEQ ID NO: 14776 - DNA, 33 bp, Homo sapien
gtttgtgctcagtgaatgttacttctcttgtgt

SEQ ID NO: 14777 - DNA, 33 bp, Homo sapien
gttaatgtcagctccacaatcactgatcaaata

SEQ ID NO: 14778 - DNA, 33 bp, Homo sapien
gttaatgtcagctccagaatcactgatcaaata

SEQ ID NO: 14779 - DNA, 33 bp, Homo sapien
tcctctgtggatggaaagagctctgtgtagaga

SEQ ID NO: 14780 - DNA, 33 bp, Homo sapien
tcctctgtggatggaacgagctctgtgtagaga

SEQ ID NO: 14781 - DNA, 33 bp, Homo sapien
tggtgcttggagttcacagaatacagctactca

SEQ ID NO: 14782 - DNA, 33 bp, Homo sapien
tggtgcttggagttcatagaatacagctactca

SEQ ID NO: 14783 - DNA, 33 bp, Homo sapien
aagacatattactggaaggtctccatgagagtt

SEQ ID NO: 14784 - DNA, 33 bp, Homo sapien
aagacatattactggatggtctccatgagagtt

SEQ ID NO: 14785 - DNA, 33 bp, Homo sapien
tctgataagggcccctaaccaaactgcaggcag

SEQ ID NO: 14786 - DNA, 33 bp, Homo sapien
tctgataagggcccctgaccaaactgcaggcag

SEQ ID NO: 14787 - DNA, 33 bp, Homo sapien
catgtgaactgttcccaggagagcctgtgatgg

SEQ ID NO: 14788 - DNA, 33 bp, Homo sapien
catgtgaactgttcccgggagagcctgtgatgg

SEQ ID NO: 14789 - DNA, 33 bp, Homo sapien
agcacctagcatattacaggtaatgaatgaatg

SEQ ID NO: 14790 - DNA, 33 bp, Homo sapien
agcacctagcatattataggtaatgaatgaatg

SEQ ID NO: 14791 - DNA, 33 bp, Homo sapien
ttcattgaagaaaagacagatggaataggttta

SEQ ID NO: 14792 - DNA, 33 bp, Homo sapien
ttcattgaagaaaagagagatggaataggttta

SEQ ID NO: 14793 - DNA, 33 bp, Homo sapien
ttatatcctcatctcaaaatcttactttaggaa

SEQ ID NO: 14794 - DNA, 33 bp, Homo sapien
ttatatcctcatctcagaatcttactttaggaa

SEQ ID NO: 14795 - DNA, 33 bp, Homo sapien
gcctttgtagctatcccatctgagtctcgagtg

SEQ ID NO: 14796 - DNA, 33 bp, Homo sapien
gcctttgtagctatcctatctgagtctcgagtg

SEQ ID NO: 14797 - DNA, 33 bp, Homo sapien
tgatgtatagtgaataacaagggtattggcttt

SEQ ID NO: 14798 - DNA, 33 bp, Homo sapien
tgatgtatagtgaatagcaagggtattggcttt

SEQ ID NO: 14799 - DNA, 33 bp, Homo sapien
tcatctggttttctgacgctctgtagtcaggcc

SEQ ID NO: 14800 - DNA, 33 bp, Homo sapien
tcatctggttttctgaggctctgtagtcaggcc

SEQ ID NO: 14801 - DNA, 33 bp, Homo sapien
gggactcgtcagggtacacgcacagctggtgag

SEQ ID NO: 14802 - DNA, 33 bp, Homo sapien
gggactcgtcagggtatacgcacagctggtgag

SEQ ID NO: 14803 - DNA, 33 bp, Homo sapien
actaatcgccttagccaaagatctggctcatcg

SEQ ID NO: 14804 - DNA, 33 bp, Homo sapien
actaatcgccttagccgaagatctggctcatcg

SEQ ID NO: 14805 - DNA, 33 bp, Homo sapien
cctggggtgtctcacaaggaccattcaacacct

SEQ ID NO: 14806 - DNA, 33 bp, Homo sapien
cctggggtgtctcacatggaccattcaacacct

SEQ ID NO: 14807 - DNA, 33 bp, Homo sapien
tgaaaggagagatgaaatgatcagttgggcctt

SEQ ID NO: 14808 - DNA, 33 bp, Homo sapien
tgaaaggagagatgaagtgatcagttgggcctt

SEQ ID NO: 14809 - DNA, 33 bp, Homo sapien
cggaatcacttctccaatcagtgtttggtgtat

SEQ ID NO: 14810 - DNA, 33 bp, Homo sapien
cggaatcacttctccagtcagtgtttggtgtat

SEQ ID NO: 14811 - DNA, 33 bp, Homo sapien
agtgtttggtgtattaccattttgtgaatttgg

SEQ ID NO: 14812 - DNA, 33 bp, Homo sapien
agtgtttggtgtattatcattttgtgaatttgg

SEQ ID NO: 14813 - DNA, 33 bp, Homo sapien
ctgcggtagtcctatgcatcagctgcagctgtg

SEQ ID NO: 14814 - DNA, 33 bp, Homo sapien
ctgcggtagtcctatggatcagctgcagctgtg

SEQ ID NO: 14815 - DNA, 33 bp, Homo sapien
ataatgaggcataagaaaagaagcggagactaa

SEQ ID NO: 14816 - DNA, 33 bp, Homo sapien
ataatgaggcataagacaagaagcggagactaa

SEQ ID NO: 14817 - DNA, 33 bp, Homo sapien
gttaaggataacaagtcaacatcattccctgct

SEQ ID NO: 14818 - DNA, 33 bp, Homo sapien
gttaaggataacaagtgaacatcattccctgct

SEQ ID NO: 14819 - DNA, 33 bp, Homo sapien
gcctgcttaggggtcaaggtcctggccatactc

SEQ ID NO: 14820 - DNA, 33 bp, Homo sapien
gcctgcttaggggtcagggtcctggccatactc

SEQ ID NO: 14821 - DNA, 33 bp, Homo sapien
gttgaaaaggtttaaacaggataatgtgcacaa

SEQ ID NO: 14822 - DNA, 33 bp, Homo sapien
gttgaaaaggtttaaataggataatgtgcacaa

SEQ ID NO: 14823 - DNA, 33 bp, Homo sapien
ggaagccacactctaacagcggggatcagatgc

SEQ ID NO: 14824 - DNA, 33 bp, Homo sapien
ggaagccacactctaatagcggggatcagatgc

SEQ ID NO: 14825 - DNA, 33 bp, Homo sapien
actgactggatatgagaaaggagaagaataaag

SEQ ID NO: 14826 - DNA, 33 bp, Homo sapien
actgactggatatgaggaaggagaagaataaag

SEQ ID NO: 14827 - DNA, 33 bp, Homo sapien
acctgcatggtgcacactgggcctcactttcta

SEQ ID NO: 14828 - DNA, 33 bp, Homo sapien
acctgcatggtgcacattgggcctcactttcta

SEQ ID NO: 14829 - DNA, 33 bp, Homo sapien
tcaagtcctctacctacaaagcctactattcct

SEQ ID NO: 14830 - DNA, 33 bp, Homo sapien
tcaagtcctctacctagaaagcctactattcct

SEQ ID NO: 14831 - DNA, 33 bp, Homo sapien
gtcagtatagaccaacactgtccaaccaataga

SEQ ID NO: 14832 - DNA, 33 bp, Homo sapien
gtcagtatagaccaacgctgtccaaccaataga

SEQ ID NO: 14833 - DNA, 33 bp, Homo sapien
atgggcgtatgaatgcaaaatgctgggacttca

SEQ ID NO: 14834 - DNA, 33 bp, Homo sapien
atgggcgtatgaatgccaaatgctgggacttca

SEQ ID NO: 14835 - DNA, 33 bp, Homo sapien
ggccctcttctgtgccaatttcacacacattaa

SEQ ID NO: 14836 - DNA, 33 bp, Homo sapien
ggccctcttctgtgccgatttcacacacattaa

SEQ ID NO: 14837 - DNA, 33 bp, Homo sapien
aagttcacgttttggacacaggccaacctgaat

SEQ ID NO: 14838 - DNA, 33 bp, Homo sapien
aagttcacgttttggagacaggccaacctgaat

SEQ ID NO: 14839 - DNA, 33 bp, Homo sapien
atccaatcatacagccacaacagagccacaaaa

SEQ ID NO: 14840 - DNA, 33 bp, Homo sapien
atccaatcatacagccgcaacagagccacaaaa

SEQ ID NO: 14841 - DNA, 33 bp, Homo sapien
atacacccctccacaacacagtcataccgacac

SEQ ID NO: 14842 - DNA, 33 bp, Homo sapien
atacacccctccacaatacagtcataccgacac

SEQ ID NO: 14843 - DNA, 33 bp, Homo sapien
gaggcagtaactacgaagggatccatttttctc

SEQ ID NO: 14844 - DNA, 33 bp, Homo sapien
gaggcagtaactacgacgggatccatttttctc

SEQ ID NO: 14845 - DNA, 33 bp, Homo sapien
tgcctggtcctctaagaacatttgtaaaaatgc

SEQ ID NO: 14846 - DNA, 33 bp, Homo sapien
tgcctggtcctctaagcacatttgtaaaaatgc

SEQ ID NO: 14847 - DNA, 33 bp, Homo sapien
ccttccggttcttttcaaattgctgtcactgag

SEQ ID NO: 14848 - DNA, 33 bp, Homo sapien
ccttccggttcttttcgaattgctgtcactgag

SEQ ID NO: 14849 - DNA, 33 bp, Homo sapien
tatttctcaacttaaccggacatcctgaatcac

SEQ ID NO: 14850 - DNA, 33 bp, Homo sapien
tatttctcaacttaactggacatcctgaatcac

SEQ ID NO: 14851 - DNA, 33 bp, Homo sapien
ccccaaatttagtcaacagaaaatcaaaatgaa

SEQ ID NO: 14852 - DNA, 33 bp, Homo sapien
ccccaaatttagtcaatagaaaatcaaaatgaa

SEQ ID NO: 14853 - DNA, 33 bp, Homo sapien
gagtttgttaagttgaccgtattctttgattta

SEQ ID NO: 14854 - DNA, 33 bp, Homo sapien
gagtttgttaagttgagcgtattctttgattta

SEQ ID NO: 14855 - DNA, 33 bp, Homo sapien
aaacgcattagaagtgccaattcctacttaaag

SEQ ID NO: 14856 - DNA, 33 bp, Homo sapien
aaacgcattagaagtgtcaattcctacttaaag

SEQ ID NO: 14857 - DNA, 33 bp, Homo sapien
cctaatgaatcagataacacattagcttgagat

SEQ ID NO: 14858 - DNA, 33 bp, Homo sapien
cctaatgaatcagataccacattagcttgagat

SEQ ID NO: 14859 - DNA, 33 bp, Homo sapien
tttttatggctgaaaaaccattctaccccacat

SEQ ID NO: 14860 - DNA, 33 bp, Homo sapien
tttttatggctgaaaatccattctaccccacat

SEQ ID NO: 14861 - DNA, 33 bp, Homo sapien
tagattggcttcagcacggaaaatgggttgagg

SEQ ID NO: 14862 - DNA, 33 bp, Homo sapien
tagattggcttcagcatggaaaatgggttgagg

SEQ ID NO: 14863 - DNA, 33 bp, Homo sapien
caatgtaacaatcctcagagaatcctattttgt

SEQ ID NO: 14864 - DNA, 33 bp, Homo sapien
caatgtaacaatcctctgagaatcctattttgt

SEQ ID NO: 14865 - DNA, 33 bp, Homo sapien
gtgatcattacctacaatgcattcatcttacca

SEQ ID NO: 14866 - DNA, 33 bp, Homo sapien
gtgatcattacctacagtgcattcatcttacca

SEQ ID NO: 14867 - DNA, 33 bp, Homo sapien
aatgaataacataaccacactggaggaaaaaat

SEQ ID NO: 14868 - DNA, 33 bp, Homo sapien
aatgaataacataaccgcactggaggaaaaaat

SEQ ID NO: 14869 - DNA, 33 bp, Homo sapien
aagaaagaaagtcataacacgaacaccaggagt

SEQ ID NO: 14870 - DNA, 33 bp, Homo sapien
aagaaagaaagtcatagcacgaacaccaggagt

SEQ ID NO: 14871 - DNA, 33 bp, Homo sapien
cagaggggtgcttggaaactttctgtactttct

SEQ ID NO: 14872 - DNA, 33 bp, Homo sapien
cagaggggtgcttggacactttctgtactttct

SEQ ID NO: 14873 - DNA, 33 bp, Homo sapien
cattttaccacttataaacacatctctcaacaa

SEQ ID NO: 14874 - DNA, 33 bp, Homo sapien
cattttaccacttatatacacatctctcaacaa

SEQ ID NO: 14875 - DNA, 33 bp, Homo sapien
taatcccttataagcaccattcattttaaaaag

SEQ ID NO: 14876 - DNA, 33 bp, Homo sapien
taatcccttataagcatcattcattttaaaaag

SEQ ID NO: 14877 - DNA, 33 bp, Homo sapien
acctggctgcagaggccactttccacttggaaa

SEQ ID NO: 14878 - DNA, 33 bp, Homo sapien
acctggctgcagaggctactttccacttggaaa

SEQ ID NO: 14879 - DNA, 33 bp, Homo sapien
tgtctgccacatgggaaataattaggaaccctt

SEQ ID NO: 14880 - DNA, 33 bp, Homo sapien
tgtctgccacatgggagataattaggaaccctt

SEQ ID NO: 14881 - DNA, 33 bp, Homo sapien
taggccgccatttgaactctcacctggattatc

SEQ ID NO: 14882 - DNA, 33 bp, Homo sapien
taggccgccatttgaattctcacctggattatc

SEQ ID NO: 14883 - DNA, 33 bp, Homo sapien
agagtgaaggatgagaaggacaagattaatttg

SEQ ID NO: 14884 - DNA, 33 bp, Homo sapien
agagtgaaggatgagatggacaagattaatttg

SEQ ID NO: 14885 - DNA, 33 bp, Homo sapien
ttgaggcgccggggcagaatgtgaatgaagggg

SEQ ID NO: 14886 - DNA, 33 bp, Homo sapien
ttgaggcgccggggcataatgtgaatgaagggg

SEQ ID NO: 14887 - DNA, 33 bp, Homo sapien
ctccaggaaattgataaagagaaaggaacttgg

SEQ ID NO: 14888 - DNA, 33 bp, Homo sapien
ctccaggaaattgatagagagaaaggaacttgg

SEQ ID NO: 14889 - DNA, 33 bp, Homo sapien
aaggtccacaacattcacccaggattatgaacc

SEQ ID NO: 14890 - DNA, 33 bp, Homo sapien
aaggtccacaacattcgcccaggattatgaacc

SEQ ID NO: 14891 - DNA, 33 bp, Homo sapien
gtagggcagggacattgaaagtgaacaagaaaa

SEQ ID NO: 14892 - DNA, 33 bp, Homo sapien
gtagggcagggacatttaaagtgaacaagaaaa

SEQ ID NO: 14893 - DNA, 33 bp, Homo sapien
gagagggagagccagaagagacgggagtggtgg

SEQ ID NO: 14894 - DNA, 33 bp, Homo sapien
gagagggagagccagaggagacgggagtggtgg

SEQ ID NO: 14895 - DNA, 33 bp, Homo sapien
accataaggcatcttccatttgaaggaatattt

SEQ ID NO: 14896 - DNA, 33 bp, Homo sapien
accataaggcatcttctatttgaaggaatattt

SEQ ID NO: 14897 - DNA, 33 bp, Homo sapien
tgggctagagtgccggaaatgcagcaacactgc

SEQ ID NO: 14898 - DNA, 33 bp, Homo sapien
tgggctagagtgccggcaatgcagcaacactgc

SEQ ID NO: 14899 - DNA, 33 bp, Homo sapien
gaggcacagagaagccaaaggctgaatttagaa

SEQ ID NO: 14900 - DNA, 33 bp, Homo sapien
gaggcacagagaagccgaaggctgaatttagaa

SEQ ID NO: 14901 - DNA, 33 bp, Homo sapien
gggagaagactaagtcaaggacgatcccccaag

SEQ ID NO: 14902 - DNA, 33 bp, Homo sapien
gggagaagactaagtcgaggacgatcccccaag

SEQ ID NO: 14903 - DNA, 33 bp, Homo sapien
gtgggcgacgctgttacgtaaatagagctgctg

SEQ ID NO: 14904 - DNA, 33 bp, Homo sapien
gtgggcgacgctgttatgtaaatagagctgctg

SEQ ID NO: 14905 - DNA, 33 bp, Homo sapien
ctaccagtttcacccaaattcctgcacctcaga

SEQ ID NO: 14906 - DNA, 33 bp, Homo sapien
ctaccagtttcacccacattcctgcacctcaga

SEQ ID NO: 14907 - DNA, 33 bp, Homo sapien
atgaagaccatgctgaagatgaaagaaaaatgg

SEQ ID NO: 14908 - DNA, 33 bp, Homo sapien
atgaagaccatgctgatgatgaaagaaaaatgg

SEQ ID NO: 14909 - DNA, 33 bp, Homo sapien
cctcctggagctttaagtaccatatattttcca

SEQ ID NO: 14910 - DNA, 33 bp, Homo sapien
cctcctggagctttaattaccatatattttcca

SEQ ID NO: 14911 - DNA, 33 bp, Homo sapien
ctcattctggttccccacttctgatgtaatagc

SEQ ID NO: 14912 - DNA, 33 bp, Homo sapien
ctcattctggttccccccttctgatgtaatagc

SEQ ID NO: 14913 - DNA, 33 bp, Homo sapien
tttatgggctagtcaaaggttagaataccaatc

SEQ ID NO: 14914 - DNA, 33 bp, Homo sapien
tttatgggctagtcaagggttagaataccaatc

SEQ ID NO: 14915 - DNA, 33 bp, Homo sapien
aatattaaaatgtctcactgcatcggcactgtt

SEQ ID NO: 14916 - DNA, 33 bp, Homo sapien
aatattaaaatgtctcgctgcatcggcactgtt

SEQ ID NO: 14917 - DNA, 33 bp, Homo sapien
atataataaacagcaaatggtgattggttgtga

SEQ ID NO: 14918 - DNA, 33 bp, Homo sapien
atataataaacagcaattggtgattggttgtga

SEQ ID NO: 14919 - DNA, 33 bp, Homo sapien
caaactgagccctttacggtcaagagttacatc

SEQ ID NO: 14920 - DNA, 33 bp, Homo sapien
caaactgagccctttatggtcaagagttacatc

SEQ ID NO: 14921 - DNA, 33 bp, Homo sapien
aagccaggaatcgaaactaggtctcttcattct

SEQ ID NO: 14922 - DNA, 33 bp, Homo sapien
aagccaggaatcgaaagtaggtctcttcattct

SEQ ID NO: 14923 - DNA, 33 bp, Homo sapien
cagtgagccaaaatcacagcactgaactctagc

SEQ ID NO: 14924 - DNA, 33 bp, Homo sapien
cagtgagccaaaatcatagcactgaactctagc

SEQ ID NO: 14925 - DNA, 33 bp, Homo sapien
cccagaaagtaaaatgccagaggccctgtctgc

SEQ ID NO: 14926 - DNA, 33 bp, Homo sapien
cccagaaagtaaaatgtcagaggccctgtctgc

SEQ ID NO: 14927 - DNA, 33 bp, Homo sapien
tagggcttagcaaagcagaactgagctacatct

SEQ ID NO: 14928 - DNA, 33 bp, Homo sapien
tagggcttagcaaagcggaactgagctacatct

SEQ ID NO: 14929 - DNA, 33 bp, Homo sapien
acacgaggccgttcacggtctggcctaacctag

SEQ ID NO: 14930 - DNA, 33 bp, Homo sapien
acacgaggccgttcactgtctggcctaacctag

SEQ ID NO: 14931 - DNA, 33 bp, Homo sapien
ccccccagcccttagcagaccatcttttcttct

SEQ ID NO: 14932 - DNA, 33 bp, Homo sapien
ccccccagcccttagcggaccatcttttcttct

SEQ ID NO: 14933 - DNA, 33 bp, Homo sapien
cattttcatttgtggcccagtaaagcatggctc

SEQ ID NO: 14934 - DNA, 33 bp, Homo sapien
cattttcatttgtggctcagtaaagcatggctc

SEQ ID NO: 14935 - DNA, 33 bp, Homo sapien
gctgggcaatatgggaaggtaagaagtacctca

SEQ ID NO: 14936 - DNA, 33 bp, Homo sapien
gctgggcaatatgggatggtaagaagtacctca

SEQ ID NO: 14937 - DNA, 33 bp, Homo sapien
cttctctctcctcaacaaaagatctacagggac

SEQ ID NO: 14938 - DNA, 33 bp, Homo sapien
cttctctctcctcaacgaaagatctacagggac

SEQ ID NO: 14939 - DNA, 33 bp, Homo sapien
tgttctccctgatacgcatcttctactcagagt

SEQ ID NO: 14940 - DNA, 33 bp, Homo sapien
tgttctccctgatacggatcttctactcagagt

SEQ ID NO: 14941 - DNA, 33 bp, Homo sapien
gtgaagttgcaatacaaccaagactcggacaca

SEQ ID NO: 14942 - DNA, 33 bp, Homo sapien
gtgaagttgcaatacagccaagactcggacaca

SEQ ID NO: 14943 - DNA, 33 bp, Homo sapien
ctgtcagaggtctggaacattttagggttgcag

SEQ ID NO: 14944 - DNA, 33 bp, Homo sapien
ctgtcagaggtctggagcattttagggttgcag

SEQ ID NO: 14945 - DNA, 33 bp, Homo sapien
ttttcctacctagtcaaaatacaaccatcaaaa

SEQ ID NO: 14946 - DNA, 33 bp, Homo sapien
ttttcctacctagtcacaatacaaccatcaaaa

SEQ ID NO: 14947 - DNA, 33 bp, Homo sapien
aagaaaaaggtttgaccagagaggctagaaatg

SEQ ID NO: 14948 - DNA, 33 bp, Homo sapien
aagaaaaaggtttgactagagaggctagaaatg

SEQ ID NO: 14949 - DNA, 33 bp, Homo sapien
caaactgccaactgaccggatatgagacttgaa

SEQ ID NO: 14950 - DNA, 33 bp, Homo sapien
caaactgccaactgactggatatgagacttgaa

SEQ ID NO: 14951 - DNA, 33 bp, Homo sapien
tcagtgctcactgataagagacaagcaaaggtt

SEQ ID NO: 14952 - DNA, 33 bp, Homo sapien
tcagtgctcactgataggagacaagcaaaggtt

SEQ ID NO: 14953 - DNA, 33 bp, Homo sapien
ctcaggcttgactttcacgagggaggttaggca

SEQ ID NO: 14954 - DNA, 33 bp, Homo sapien
ctcaggcttgactttcgcgagggaggttaggca

SEQ ID NO: 14955 - DNA, 33 bp, Homo sapien
gagacagacgtagataaacatcttgcatgtacc

SEQ ID NO: 14956 - DNA, 33 bp, Homo sapien
gagacagacgtagatagacatcttgcatgtacc

SEQ ID NO: 14957 - DNA, 33 bp, Homo sapien
gtgaaccagaaaatcacgttttgtcaagagtgc

SEQ ID NO: 14958 - DNA, 33 bp, Homo sapien
gtgaaccagaaaatcatgttttgtcaagagtgc

SEQ ID NO: 14959 - DNA, 33 bp, Homo sapien
tttttattttcccagtcacgttcacacacaaat

SEQ ID NO: 14960 - DNA, 33 bp, Homo sapien
tttttattttcccagttacgttcacacacaaat

SEQ ID NO: 14961 - DNA, 33 bp, Homo sapien
tttcactttaacagtgacaagctcttcagactg

SEQ ID NO: 14962 - DNA, 33 bp, Homo sapien
tttcactttaacagtggcaagctcttcagactg

SEQ ID NO: 14963 - DNA, 33 bp, Homo sapien
aggatgggaaaatggaatcataggagggagagg

SEQ ID NO: 14964 - DNA, 33 bp, Homo sapien
aggatgggaaaatggagtcataggagggagagg

SEQ ID NO: 14965 - DNA, 33 bp, Homo sapien
taaaaacattgaaaaccacatggaaagatgaat

SEQ ID NO: 14966 - DNA, 33 bp, Homo sapien
taaaaacattgaaaacgacatggaaagatgaat

SEQ ID NO: 14967 - DNA, 33 bp, Homo sapien
caaggaagtcttaagaaaggagtgacatttgct

SEQ ID NO: 14968 - DNA, 33 bp, Homo sapien
caaggaagtcttaagagaggagtgacatttgct

SEQ ID NO: 14969 - DNA, 33 bp, Homo sapien
aatccgtagacaagtcaatatggatatggttgt

SEQ ID NO: 14970 - DNA, 33 bp, Homo sapien
aatccgtagacaagtcgatatggatatggttgt

SEQ ID NO: 14971 - DNA, 33 bp, Homo sapien
tgcagccaccttcttcaattatcttagctagat

SEQ ID NO: 14972 - DNA, 33 bp, Homo sapien
tgcagccaccttcttcgattatcttagctagat

SEQ ID NO: 14973 - DNA, 33 bp, Homo sapien
ctaccacatctttaaaggttagagttatccagg

SEQ ID NO: 14974 - DNA, 33 bp, Homo sapien
ctaccacatctttaaatgttagagttatccagg

SEQ ID NO: 14975 - DNA, 33 bp, Homo sapien
ctctcagttgtaacagaagagaacaaggagcag

SEQ ID NO: 14976 - DNA, 33 bp, Homo sapien
ctctcagttgtaacaggagagaacaaggagcag

SEQ ID NO: 14977 - DNA, 33 bp, Homo sapien
taactccagtccgttcaccttttagatactgca

SEQ ID NO: 14978 - DNA, 33 bp, Homo sapien
taactccagtccgttcgccttttagatactgca

SEQ ID NO: 14979 - DNA, 33 bp, Homo sapien
gactcagtacacatgaacaactgaaacaaaagt

SEQ ID NO: 14980 - DNA, 33 bp, Homo sapien
gactcagtacacatgaccaactgaaacaaaagt

SEQ ID NO: 14981 - DNA, 33 bp, Homo sapien
ttgatatcatccttcaataatggatctcacttt

SEQ ID NO: 14982 - DNA, 33 bp, Homo sapien
ttgatatcatccttcattaatggatctcacttt

SEQ ID NO: 14983 - DNA, 33 bp, Homo sapien
tatctctcacctagacaatttcaacagagtcct

SEQ ID NO: 14984 - DNA, 33 bp, Homo sapien
tatctctcacctagacgatttcaacagagtcct

SEQ ID NO: 14985 - DNA, 33 bp, Homo sapien
gaaagtagggaaactcaatcttagtttataatt

SEQ ID NO: 14986 - DNA, 33 bp, Homo sapien
gaaagtagggaaactcgatcttagtttataatt

SEQ ID NO: 14987 - DNA, 33 bp, Homo sapien
accccgggaagatgcgaaagtaaggagagaagt

SEQ ID NO: 14988 - DNA, 33 bp, Homo sapien
accccgggaagatgcgtaagtaaggagagaagt

SEQ ID NO: 14989 - DNA, 33 bp, Homo sapien
ttgttatccttacttccactatttattgagtcc

SEQ ID NO: 14990 - DNA, 33 bp, Homo sapien
ttgttatccttacttctactatttattgagtcc

SEQ ID NO: 14991 - DNA, 33 bp, Homo sapien
cacaggtggatagcaaatagatgactggtgttt

SEQ ID NO: 14992 - DNA, 33 bp, Homo sapien
cacaggtggatagcaagtagatgactggtgttt

SEQ ID NO: 14993 - DNA, 33 bp, Homo sapien
cttccatgaagtggcacccacctccttcttcgg

SEQ ID NO: 14994 - DNA, 33 bp, Homo sapien
cttccatgaagtggcatccacctccttcttcgg

SEQ ID NO: 14995 - DNA, 33 bp, Homo sapien
taaccacacccaaagaatattgatgagagtttg

SEQ ID NO: 14996 - DNA, 33 bp, Homo sapien
taaccacacccaaagagtattgatgagagtttg

SEQ ID NO: 14997 - DNA, 33 bp, Homo sapien
cagcagtaacaacctcggaattgccaaattctg

SEQ ID NO: 14998 - DNA, 33 bp, Homo sapien
cagcagtaacaacctctgaattgccaaattctg

SEQ ID NO: 14999 - DNA, 33 bp, Homo sapien
gggaggaccacaggagacaaccactcccaaaca

SEQ ID NO: 15000 - DNA, 33 bp, Homo sapien
gggaggaccacaggaggcaaccactcccaaaca

SEQ ID NO: 15001 - DNA, 33 bp, Homo sapien
gtctattggacaaagcactgaagatattcacca

SEQ ID NO: 15002 - DNA, 33 bp, Homo sapien
gtctattggacaaagcgctgaagatattcacca

SEQ ID NO: 15003 - DNA, 33 bp, Homo sapien
tgctttccatccttacaagtaggaacctctcta

SEQ ID NO: 15004 - DNA, 33 bp, Homo sapien
tgctttccatccttacgagtaggaacctctcta

SEQ ID NO: 15005 - DNA, 33 bp, Homo sapien
attttgttggagagacagacaagcagggaggca

SEQ ID NO: 15006 - DNA, 33 bp, Homo sapien
attttgttggagagaccgacaagcagggaggca

SEQ ID NO: 15007 - DNA, 33 bp, Homo sapien
tcctgatgtcactaagaacacaattttgttgga

SEQ ID NO: 15008 - DNA, 33 bp, Homo sapien
tcctgatgtcactaagcacacaattttgttgga

SEQ ID NO: 15009 - DNA, 33 bp, Homo sapien
tgcagagagtacaacaatgaaaaagaagtcatc

SEQ ID NO: 15010 - DNA, 33 bp, Homo sapien
tgcagagagtacaacagtgaaaaagaagtcatc

SEQ ID NO: 15011 - DNA, 33 bp, Homo sapien
ggaggagacaattaacaacatcaaggaaggctt

SEQ ID NO: 15012 - DNA, 33 bp, Homo sapien
ggaggagacaattaacgacatcaaggaaggctt

SEQ ID NO: 15013 - DNA, 33 bp, Homo sapien
cagctagaaagtttacagagctagaattcagac

SEQ ID NO: 15014 - DNA, 33 bp, Homo sapien
cagctagaaagtttacggagctagaattcagac

SEQ ID NO: 15015 - DNA, 33 bp, Homo sapien
gcctaaaggaggatcaagagcaagcctggaagg

SEQ ID NO: 15016 - DNA, 33 bp, Homo sapien
gcctaaaggaggatcaggagcaagcctggaagg

SEQ ID NO: 15017 - DNA, 33 bp, Homo sapien
tgagcccctcttgggaaatcagacccctatatc

SEQ ID NO: 15018 - DNA, 33 bp, Homo sapien
tgagcccctcttgggagatcagacccctatatc

SEQ ID NO: 15019 - DNA, 33 bp, Homo sapien
aaactggagcacagaacagtgtaagaaagtata

SEQ ID NO: 15020 - DNA, 33 bp, Homo sapien
aaactggagcacagaagagtgtaagaaagtata

SEQ ID NO: 15021 - DNA, 33 bp, Homo sapien
gcagaggctgatacagcagattcaaatagtcaa

SEQ ID NO: 15022 - DNA, 33 bp, Homo sapien
gcagaggctgatacagtagattcaaatagtcaa

SEQ ID NO: 15023 - DNA, 33 bp, Homo sapien
gcctaatgttctcagcagaatagaactggagtg

SEQ ID NO: 15024 - DNA, 33 bp, Homo sapien
gcctaatgttctcagcggaatagaactggagtg

SEQ ID NO: 15025 - DNA, 33 bp, Homo sapien
tttggaatgagaggcacataccttaaaacacat

SEQ ID NO: 15026 - DNA, 33 bp, Homo sapien
tttggaatgagaggcatataccttaaaacacat

SEQ ID NO: 15027 - DNA, 33 bp, Homo sapien
caggccctgtgtcagacacaatttggaatgaga

SEQ ID NO: 15028 - DNA, 33 bp, Homo sapien
caggccctgtgtcagatacaatttggaatgaga

SEQ ID NO: 15029 - DNA, 33 bp, Homo sapien
tgctttggaatttgacaagggctataaaagagg

SEQ ID NO: 15030 - DNA, 33 bp, Homo sapien
tgctttggaatttgacgagggctataaaagagg

SEQ ID NO: 15031 - DNA, 33 bp, Homo sapien
ggagccaggcttcagacggacatgaggaaatgg

SEQ ID NO: 15032 - DNA, 33 bp, Homo sapien
ggagccaggcttcagatggacatgaggaaatgg

SEQ ID NO: 15033 - DNA, 33 bp, Homo sapien
agaccctgtgcttcctaagacaacggcaatccc

SEQ ID NO: 15034 - DNA, 33 bp, Homo sapien
agaccctgtgcttcctgagacaacggcaatccc

SEQ ID NO: 15035 - DNA, 33 bp, Homo sapien
tctggcactgtctcaccgtatagcttcctgggg

SEQ ID NO: 15036 - DNA, 33 bp, Homo sapien
tctggcactgtctcactgtatagcttcctgggg

SEQ ID NO: 15037 - DNA, 33 bp, Homo sapien
aggctctgttctttcaatccagctccatgccca

SEQ ID NO: 15038 - DNA, 33 bp, Homo sapien
aggctctgttctttcagtccagctccatgccca

SEQ ID NO: 15039 - DNA, 33 bp, Homo sapien
attcaccaaattattacggagcatctgctagct

SEQ ID NO: 15040 - DNA, 33 bp, Homo sapien
attcaccaaattattatggagcatctgctagct

SEQ ID NO: 15041 - DNA, 33 bp, Homo sapien
ctctgattcatcctggaacactcaagaccctag

SEQ ID NO: 15042 - DNA, 33 bp, Homo sapien
ctctgattcatcctgggacactcaagaccctag

SEQ ID NO: 15043 - DNA, 33 bp, Homo sapien
acagctgtttcacacccatgaccttggctattt

SEQ ID NO: 15044 - DNA, 33 bp, Homo sapien
acagctgtttcacacctatgaccttggctattt

SEQ ID NO: 15045 - DNA, 33 bp, Homo sapien
tggcaagggtatgtagccatgaatgtttcacac

SEQ ID NO: 15046 - DNA, 33 bp, Homo sapien
tggcaagggtatgtaggcatgaatgtttcacac

SEQ ID NO: 15047 - DNA, 33 bp, Homo sapien
cactttgggctatgcactctgctacatgctggg

SEQ ID NO: 15048 - DNA, 33 bp, Homo sapien
cactttgggctatgcattctgctacatgctggg

SEQ ID NO: 15049 - DNA, 33 bp, Homo sapien
gccctgggcctgctccgcgtttgcataattccc

SEQ ID NO: 15050 - DNA, 33 bp, Homo sapien
gccctgggcctgctcctcgtttgcataattccc

SEQ ID NO: 15051 - DNA, 33 bp, Homo sapien
aaaactcacagccaaacgaagaattcctccttc

SEQ ID NO: 15052 - DNA, 33 bp, Homo sapien
aaaactcacagccaaatgaagaattcctccttc

SEQ ID NO: 15053 - DNA, 33 bp, Homo sapien
gctggatcaccttttacaacctagcctgaaagt

SEQ ID NO: 15054 - DNA, 33 bp, Homo sapien
gctggatcaccttttataacctagcctgaaagt

SEQ ID NO: 15055 - DNA, 33 bp, Homo sapien
tatattttccaaagacagcatcaaccatatctt

SEQ ID NO: 15056 - DNA, 33 bp, Homo sapien
tatattttccaaagacggcatcaaccatatctt

SEQ ID NO: 15057 - DNA, 33 bp, Homo sapien
gggaagtcagctgccacgtcatagggaaattca

SEQ ID NO: 15058 - DNA, 33 bp, Homo sapien
gggaagtcagctgccatgtcatagggaaattca

SEQ ID NO: 15059 - DNA, 33 bp, Homo sapien
ttgctgctagctccccaaaggaaaaaggccaga

SEQ ID NO: 15060 - DNA, 33 bp, Homo sapien
ttgctgctagctcccctaaggaaaaaggccaga

SEQ ID NO: 15061 - DNA, 33 bp, Homo sapien
actaccacatcactaactactgctgctgttggt

SEQ ID NO: 15062 - DNA, 33 bp, Homo sapien
actaccacatcactaattactgctgctgttggt

SEQ ID NO: 15063 - DNA, 33 bp, Homo sapien
ctcccgggaacaagaaagtcttaaaaggagaaa

SEQ ID NO: 15064 - DNA, 33 bp, Homo sapien
ctcccgggaacaagaaggtcttaaaaggagaaa

SEQ ID NO: 15065 - DNA, 33 bp, Homo sapien
aggaaattgcaagcaactgccaacaaggggagc

SEQ ID NO: 15066 - DNA, 33 bp, Homo sapien
aggaaattgcaagcaagtgccaacaaggggagc

SEQ ID NO: 15067 - DNA, 33 bp, Homo sapien
gagggttcaggcaaggacagaaatatacaataa

SEQ ID NO: 15068 - DNA, 33 bp, Homo sapien
gagggttcaggcaagggcagaaatatacaataa

SEQ ID NO: 15069 - DNA, 33 bp, Homo sapien
gcataggcatgtcaaaatctgttttaaagttta

SEQ ID NO: 15070 - DNA, 33 bp, Homo sapien
gcataggcatgtcaaagtctgttttaaagttta

SEQ ID NO: 15071 - DNA, 33 bp, Homo sapien
gttgaagagcttttaaacctattcatattatat

SEQ ID NO: 15072 - DNA, 33 bp, Homo sapien
gttgaagagcttttaatcctattcatattatat

SEQ ID NO: 15073 - DNA, 33 bp, Homo sapien
gtaagtgaagaggccaaatctccagtgctgggg

SEQ ID NO: 15074 - DNA, 33 bp, Homo sapien
gtaagtgaagaggccagatctccagtgctgggg

SEQ ID NO: 15075 - DNA, 33 bp, Homo sapien
ctcatccatatttaacaacatcgtccttcaact

SEQ ID NO: 15076 - DNA, 33 bp, Homo sapien
ctcatccatatttaactacatcgtccttcaact

SEQ ID NO: 15077 - DNA, 33 bp, Homo sapien
ttacacagccaagaaccgaaggaaactaacaat

SEQ ID NO: 15078 - DNA, 33 bp, Homo sapien
ttacacagccaagaactgaaggaaactaacaat

SEQ ID NO: 15079 - DNA, 33 bp, Homo sapien
aaagtacacaaaattaaacaggcttatgaggct

SEQ ID NO: 15080 - DNA, 33 bp, Homo sapien
aaagtacacaaaattagacaggcttatgaggct

SEQ ID NO: 15081 - DNA, 33 bp, Homo sapien
tcaggattcagagaacaaataattcagaaatgt

SEQ ID NO: 15082 - DNA, 33 bp, Homo sapien
tcaggattcagagaaccaataattcagaaatgt

SEQ ID NO: 15083 - DNA, 33 bp, Homo sapien
agactttttttcaagaccaaattggtgtttccc

SEQ ID NO: 15084 - DNA, 33 bp, Homo sapien
agactttttttcaagatcaaattggtgtttccc

SEQ ID NO: 15085 - DNA, 33 bp, Homo sapien
atgtgctgatagccacagtagcacttcccactc

SEQ ID NO: 15086 - DNA, 33 bp, Homo sapien
atgtgctgatagccacggtagcacttcccactc

SEQ ID NO: 15087 - DNA, 33 bp, Homo sapien
gctactctttctaaaggaggctcttcatttgct

SEQ ID NO: 15088 - DNA, 33 bp, Homo sapien
gctactctttctaaagtaggctcttcatttgct

SEQ ID NO: 15089 - DNA, 33 bp, Homo sapien
ccgttgtgcctgacccagcttgacttctaaagt

SEQ ID NO: 15090 - DNA, 33 bp, Homo sapien
ccgttgtgcctgacccggcttgacttctaaagt

SEQ ID NO: 15091 - DNA, 33 bp, Homo sapien
tctcagagaagcagtacgtttgggtcccagcag

SEQ ID NO: 15092 - DNA, 33 bp, Homo sapien
tctcagagaagcagtaggtttgggtcccagcag

SEQ ID NO: 15093 - DNA, 33 bp, Homo sapien
taatacatatggctgaagaacagtgccaggaaa

SEQ ID NO: 15094 - DNA, 33 bp, Homo sapien
taatacatatggctgaggaacagtgccaggaaa

SEQ ID NO: 15095 - DNA, 33 bp, Homo sapien
aaaccttgaaaacataccaatagatctaatggc

SEQ ID NO: 15096 - DNA, 33 bp, Homo sapien
aaaccttgaaaacatatcaatagatctaatggc

SEQ ID NO: 15097 - DNA, 33 bp, Homo sapien
atctttccattccctgcagcatgaacagataca

SEQ ID NO: 15098 - DNA, 33 bp, Homo sapien
atctttccattccctgtagcatgaacagataca

SEQ ID NO: 15099 - DNA, 33 bp, Homo sapien
agggtttgtttgataaagtcctatctttccatt

SEQ ID NO: 15100 - DNA, 33 bp, Homo sapien
agggtttgtttgataaggtcctatctttccatt

SEQ ID NO: 15101 - DNA, 33 bp, Homo sapien
ttgtctcctccaagacagcaaatgactatgaga

SEQ ID NO: 15102 - DNA, 33 bp, Homo sapien
ttgtctcctccaagacggcaaatgactatgaga

SEQ ID NO: 15103 - DNA, 33 bp, Homo sapien
gtcctagagattgcacaatgtgtcctttacttc

SEQ ID NO: 15104 - DNA, 33 bp, Homo sapien
gtcctagagattgcacgatgtgtcctttacttc

SEQ ID NO: 15105 - DNA, 33 bp, Homo sapien
tgcttttctacataaagaacacagggtagaata

SEQ ID NO: 15106 - DNA, 33 bp, Homo sapien
tgcttttctacataaataacacagggtagaata

SEQ ID NO: 15107 - DNA, 33 bp, Homo sapien
ttccagccaggagtaaagactgtccctcaagta

SEQ ID NO: 15108 - DNA, 33 bp, Homo sapien
ttccagccaggagtaacgactgtccctcaagta

SEQ ID NO: 15109 - DNA, 33 bp, Homo sapien
aactcaagtccggtgacctgccagacacaatct

SEQ ID NO: 15110 - DNA, 33 bp, Homo sapien
aactcaagtccggtgatctgccagacacaatct

SEQ ID NO: 15111 - DNA, 33 bp, Homo sapien
aaagtagcttgttaagcactgtaggtttgactc

SEQ ID NO: 15112 - DNA, 33 bp, Homo sapien
aaagtagcttgttaagtactgtaggtttgactc

SEQ ID NO: 15113 - DNA, 33 bp, Homo sapien
gagtcctgaggaataaataagagtagcaagtta

SEQ ID NO: 15114 - DNA, 33 bp, Homo sapien
gagtcctgaggaataagtaagagtagcaagtta

SEQ ID NO: 15115 - DNA, 33 bp, Homo sapien
cattaagatgggaacaaaagtctgggaacagtg

SEQ ID NO: 15116 - DNA, 33 bp, Homo sapien
cattaagatgggaacagaagtctgggaacagtg

SEQ ID NO: 15117 - DNA, 33 bp, Homo sapien
atgatgatgctgggaacggggaagaagggagca

SEQ ID NO: 15118 - DNA, 33 bp, Homo sapien
atgatgatgctgggaatggggaagaagggagca

SEQ ID NO: 15119 - DNA, 33 bp, Homo sapien
ggttctgcagggtatacaggaagcatacaggag

SEQ ID NO: 15120 - DNA, 33 bp, Homo sapien
ggttctgcagggtatataggaagcatacaggag

SEQ ID NO: 15121 - DNA, 33 bp, Homo sapien
aacaaatttgatcacccatgttttaaacaccat

SEQ ID NO: 15122 - DNA, 33 bp, Homo sapien
aacaaatttgatcacctatgttttaaacaccat

SEQ ID NO: 15123 - DNA, 33 bp, Homo sapien
gaaaatagcaataatacagcagcctgtaagatc

SEQ ID NO: 15124 - DNA, 33 bp, Homo sapien
gaaaatagcaataatatagcagcctgtaagatc

SEQ ID NO: 15125 - DNA, 33 bp, Homo sapien
ggactgttggactgaacctcagtttccaccatg

SEQ ID NO: 15126 - DNA, 33 bp, Homo sapien
ggactgttggactgaatctcagtttccaccatg

SEQ ID NO: 15127 - DNA, 33 bp, Homo sapien
ggaatacttgaaatagaaaatgttctaggaaac

SEQ ID NO: 15128 - DNA, 33 bp, Homo sapien
ggaatacttgaaataggaaatgttctaggaaac

SEQ ID NO: 15129 - DNA, 33 bp, Homo sapien
tgctgtatgcaagagacagacctaaatcagaga

SEQ ID NO: 15130 - DNA, 33 bp, Homo sapien
tgctgtatgcaagagatagacctaaatcagaga

SEQ ID NO: 15131 - DNA, 33 bp, Homo sapien
ggctgatgggacctaaagcctggtacttgaatt

SEQ ID NO: 15132 - DNA, 33 bp, Homo sapien
ggctgatgggacctaaggcctggtacttgaatt

SEQ ID NO: 15133 - DNA, 33 bp, Homo sapien
ccccatgctggagacaacttattagaaagactg

SEQ ID NO: 15134 - DNA, 33 bp, Homo sapien
ccccatgctggagacagcttattagaaagactg

SEQ ID NO: 15135 - DNA, 33 bp, Homo sapien
acattactatatataccatgttcaaggatcaaa

SEQ ID NO: 15136 - DNA, 33 bp, Homo sapien
acattactatatatacgatgttcaaggatcaaa

SEQ ID NO: 15137 - DNA, 33 bp, Homo sapien
tgtgtattcctgatgacgctgacatgggaactg

SEQ ID NO: 15138 - DNA, 33 bp, Homo sapien
tgtgtattcctgatgatgctgacatgggaactg

SEQ ID NO: 15139 - DNA, 33 bp, Homo sapien
ttcttcatatcaaggaaaagtggcatataatat

SEQ ID NO: 15140 - DNA, 33 bp, Homo sapien
ttcttcatatcaaggagaagtggcatataatat

SEQ ID NO: 15141 - DNA, 33 bp, Homo sapien
tcactataaacacaaacgtaggcttgtatctga

SEQ ID NO: 15142 - DNA, 33 bp, Homo sapien
tcactataaacacaaatgtaggcttgtatctga

SEQ ID NO: 15143 - DNA, 33 bp, Homo sapien
ttaaactctaatgggaaagacatacaaacaaag

SEQ ID NO: 15144 - DNA, 33 bp, Homo sapien
ttaaactctaatgggagagacatacaaacaaag

SEQ ID NO: 15145 - DNA, 33 bp, Homo sapien
ccacctttctgctgctaaaaggccacagtgatg

SEQ ID NO: 15146 - DNA, 33 bp, Homo sapien
ccacctttctgctgctgaaaggccacagtgatg

SEQ ID NO: 15147 - DNA, 33 bp, Homo sapien
atctggcatgggtagacagactgcagctaaaga

SEQ ID NO: 15148 - DNA, 33 bp, Homo sapien
atctggcatgggtagatagactgcagctaaaga

SEQ ID NO: 15149 - DNA, 33 bp, Homo sapien
gaacaaattcctcatgacaccgtaagatacatt

SEQ ID NO: 15150 - DNA, 33 bp, Homo sapien
gaacaaattcctcatgtcaccgtaagatacatt

SEQ ID NO: 15151 - DNA, 33 bp, Homo sapien
cttacagaccaaatccaagcctatttctctctc

SEQ ID NO: 15152 - DNA, 33 bp, Homo sapien
cttacagaccaaatcccagcctatttctctctc

SEQ ID NO: 15153 - DNA, 33 bp, Homo sapien
aacacaaatgaacaacagcaacaaaaagtccgg

SEQ ID NO: 15154 - DNA, 33 bp, Homo sapien
aacacaaatgaacaacggcaacaaaaagtccgg

SEQ ID NO: 15155 - DNA, 33 bp, Homo sapien
agataaaaggcagaaacgaccaatatcaggaat

SEQ ID NO: 15156 - DNA, 33 bp, Homo sapien
agataaaaggcagaaatgaccaatatcaggaat

SEQ ID NO: 15157 - DNA, 33 bp, Homo sapien
aggcactcacctcatacagtgtatagtaccata

SEQ ID NO: 15158 - DNA, 33 bp, Homo sapien
aggcactcacctcatatagtgtatagtaccata

SEQ ID NO: 15159 - DNA, 33 bp, Homo sapien
gaaggaggaggaaaagaatgtcataagccaatg

SEQ ID NO: 15160 - DNA, 33 bp, Homo sapien
gaaggaggaggaaaagtatgtcataagccaatg

SEQ ID NO: 15161 - DNA, 33 bp, Homo sapien
atagtattctacaggccctttcctgatctattt

SEQ ID NO: 15162 - DNA, 33 bp, Homo sapien
atagtattctacaggctctttcctgatctattt

SEQ ID NO: 15163 - DNA, 33 bp, Homo sapien
acctcaaataatctaacgaaaaatgcctatgca

SEQ ID NO: 15164 - DNA, 33 bp, Homo sapien
acctcaaataatctaatgaaaaatgcctatgca

SEQ ID NO: 15165 - DNA, 33 bp, Homo sapien
tttcactcatcgtcagcagctgtcttaaatttt

SEQ ID NO: 15166 - DNA, 33 bp, Homo sapien
tttcactcatcgtcagtagctgtcttaaatttt

SEQ ID NO: 15167 - DNA, 33 bp, Homo sapien
gctgatataatatttgaaaatcaactaatgcgc

SEQ ID NO: 15168 - DNA, 33 bp, Homo sapien
gctgatataatatttggaaatcaactaatgcgc

SEQ ID NO: 15169 - DNA, 33 bp, Homo sapien
ataaagctgctttcaacaggtttatgtgttcag

SEQ ID NO: 15170 - DNA, 33 bp, Homo sapien
ataaagctgctttcaagaggtttatgtgttcag

SEQ ID NO: 15171 - DNA, 33 bp, Homo sapien
tgtgacctgggattaggcaaagagtttttatac

SEQ ID NO: 15172 - DNA, 33 bp, Homo sapien
tgtgacctgggattagtcaaagagtttttatac

SEQ ID NO: 15173 - DNA, 33 bp, Homo sapien
gggattaggaaggcccaacaaaatacactgaag

SEQ ID NO: 15174 - DNA, 33 bp, Homo sapien
gggattaggaaggcccgacaaaatacactgaag

SEQ ID NO: 15175 - DNA, 33 bp, Homo sapien
cctacattccgaaaaaaccatctgaaagctaga

SEQ ID NO: 15176 - DNA, 33 bp, Homo sapien
cctacattccgaaaaagccatctgaaagctaga

SEQ ID NO: 15177 - DNA, 33 bp, Homo sapien
accattgacacaatgaactcatgggtttctatt

SEQ ID NO: 15178 - DNA, 33 bp, Homo sapien
accattgacacaatgacctcatgggtttctatt

SEQ ID NO: 15179 - DNA, 33 bp, Homo sapien
gtttagtcacttattacgtgtaaggctcagtaa

SEQ ID NO: 15180 - DNA, 33 bp, Homo sapien
gtttagtcacttattatgtgtaaggctcagtaa

SEQ ID NO: 15181 - DNA, 33 bp, Homo sapien
gctgaaagggacataagggacttttctggaatg

SEQ ID NO: 15182 - DNA, 33 bp, Homo sapien
gctgaaagggacataatggacttttctggaatg

SEQ ID NO: 15183 - DNA, 33 bp, Homo sapien
ttcaccatgctatttccacctaaggcacccact

SEQ ID NO: 15184 - DNA, 33 bp, Homo sapien
ttcaccatgctatttcgacctaaggcacccact

SEQ ID NO: 15185 - DNA, 33 bp, Homo sapien
catgctgacttggggtaaattaaattgtttata

SEQ ID NO: 15186 - DNA, 33 bp, Homo sapien
catgctgacttggggtgaattaaattgtttata

SEQ ID NO: 15187 - DNA, 33 bp, Homo sapien
ataccaagtatcactacaagacggggtttctca

SEQ ID NO: 15188 - DNA, 33 bp, Homo sapien
ataccaagtatcactataagacggggtttctca

SEQ ID NO: 15189 - DNA, 33 bp, Homo sapien
tccagccatcatatcacagttctgggcaggaag

SEQ ID NO: 15190 - DNA, 33 bp, Homo sapien
tccagccatcatatcatagttctgggcaggaag

SEQ ID NO: 15191 - DNA, 33 bp, Homo sapien
ttgcaaagactgacgcaccaggctggatcacag

SEQ ID NO: 15192 - DNA, 33 bp, Homo sapien
ttgcaaagactgacgcgccaggctggatcacag

SEQ ID NO: 15193 - DNA, 33 bp, Homo sapien
tttcagaatgaaggacacaggagtcccgagtac

SEQ ID NO: 15194 - DNA, 33 bp, Homo sapien
tttcagaatgaaggacgcaggagtcccgagtac

SEQ ID NO: 15195 - DNA, 33 bp, Homo sapien
aatatatgaaccacaacaaatgtatgaacgaac

SEQ ID NO: 15196 - DNA, 33 bp, Homo sapien
aatatatgaaccacaataaatgtatgaacgaac

SEQ ID NO: 15197 - DNA, 33 bp, Homo sapien
ggtttgaatcaccagcaacacttactgtctgta

SEQ ID NO: 15198 - DNA, 33 bp, Homo sapien
ggtttgaatcaccagctacacttactgtctgta

SEQ ID NO: 15199 - DNA, 33 bp, Homo sapien
ttagtcagttaactaacgaatgtctgggtgaac

SEQ ID NO: 15200 - DNA, 33 bp, Homo sapien
ttagtcagttaactaatgaatgtctgggtgaac

SEQ ID NO: 15201 - DNA, 33 bp, Homo sapien
taggggaaataggaacaatagagggactgacgg

SEQ ID NO: 15202 - DNA, 33 bp, Homo sapien
taggggaaataggaacgatagagggactgacgg

SEQ ID NO: 15203 - DNA, 33 bp, Homo sapien
ccaaacagaggaaatgaattgtgtgaggcccca

SEQ ID NO: 15204 - DNA, 33 bp, Homo sapien
ccaaacagaggaaatggattgtgtgaggcccca

SEQ ID NO: 15205 - DNA, 33 bp, Homo sapien
gatcaagaggccgtaacggtcatggctgtttcc

SEQ ID NO: 15206 - DNA, 33 bp, Homo sapien
gatcaagaggccgtaatggtcatggctgtttcc

SEQ ID NO: 15207 - DNA, 33 bp, Homo sapien
tttctagcacttaaaactatgcctagcacttag

SEQ ID NO: 15208 - DNA, 33 bp, Homo sapien
tttctagcacttaaaattatgcctagcacttag

SEQ ID NO: 15209 - DNA, 33 bp, Homo sapien
cccttcctccttcctcagaaacacagacccaaa

SEQ ID NO: 15210 - DNA, 33 bp, Homo sapien
cccttcctccttcctcggaaacacagacccaaa

SEQ ID NO: 15211 - DNA, 33 bp, Homo sapien
ccttgccaacttgatacaagcacaagacaagtg

SEQ ID NO: 15212 - DNA, 33 bp, Homo sapien
ccttgccaacttgatataagcacaagacaagtg

SEQ ID NO: 15213 - DNA, 33 bp, Homo sapien
ccatgccacaaaacagacacctcatagccaaat

SEQ ID NO: 15214 - DNA, 33 bp, Homo sapien
ccatgccacaaaacaggcacctcatagccaaat

SEQ ID NO: 15215 - DNA, 33 bp, Homo sapien
acatgaaggctctcaaaatgtatgagttggctg

SEQ ID NO: 15216 - DNA, 33 bp, Homo sapien
acatgaaggctctcaagatgtatgagttggctg

SEQ ID NO: 15217 - DNA, 33 bp, Homo sapien
gaaaattacacttggcaaatctattagaaacat

SEQ ID NO: 15218 - DNA, 33 bp, Homo sapien
gaaaattacacttggcgaatctattagaaacat

SEQ ID NO: 15219 - DNA, 33 bp, Homo sapien
taatttgacttggcagaacaactatatggtaag

SEQ ID NO: 15220 - DNA, 33 bp, Homo sapien
taatttgacttggcagcacaactatatggtaag

SEQ ID NO: 15221 - DNA, 33 bp, Homo sapien
tgccgacagagaagaacatcctttaaaatctgt

SEQ ID NO: 15222 - DNA, 33 bp, Homo sapien
tgccgacagagaagaagatcctttaaaatctgt

SEQ ID NO: 15223 - DNA, 33 bp, Homo sapien
gaagctctgaatcttccatagtgagaaaagttt

SEQ ID NO: 15224 - DNA, 33 bp, Homo sapien
gaagctctgaatcttcgatagtgagaaaagttt

SEQ ID NO: 15225 - DNA, 33 bp, Homo sapien
gctataataggccactaaaagaagcagccagag

SEQ ID NO: 15226 - DNA, 33 bp, Homo sapien
gctataataggccactgaaagaagcagccagag

SEQ ID NO: 15227 - DNA, 33 bp, Homo sapien
attttattccattacaccaaaatctttagatat

SEQ ID NO: 15228 - DNA, 33 bp, Homo sapien
attttattccattacagcaaaatctttagatat

SEQ ID NO: 15229 - DNA, 33 bp, Homo sapien
ttaatgtttcaaattaagagtgcttctgttgag

SEQ ID NO: 15230 - DNA, 33 bp, Homo sapien
ttaatgtttcaaattaggagtgcttctgttgag

SEQ ID NO: 15231 - DNA, 33 bp, Homo sapien
gtaatcacatcgataaagccatctgttaaactc

SEQ ID NO: 15232 - DNA, 33 bp, Homo sapien
gtaatcacatcgataaggccatctgttaaactc

SEQ ID NO: 15233 - DNA, 33 bp, Homo sapien
ggcgtcggttggggtgcacctcgtagtcagcaa

SEQ ID NO: 15234 - DNA, 33 bp, Homo sapien
ggcgtcggttggggtgtacctcgtagtcagcaa

SEQ ID NO: 15235 - DNA, 33 bp, Homo sapien
ttcatttcctttaaatcacaagatcagagctga

SEQ ID NO: 15236 - DNA, 33 bp, Homo sapien
ttcatttcctttaaattacaagatcagagctga

SEQ ID NO: 15237 - DNA, 33 bp, Homo sapien
aagcatggcctaatgccaatgcttaacaatacc

SEQ ID NO: 15238 - DNA, 33 bp, Homo sapien
aagcatggcctaatgctaatgcttaacaatacc

SEQ ID NO: 15239 - DNA, 33 bp, Homo sapien
gaaagaaaatagacgaagaatactgaaaagata

SEQ ID NO: 15240 - DNA, 33 bp, Homo sapien
gaaagaaaatagacgaggaatactgaaaagata

SEQ ID NO: 15241 - DNA, 33 bp, Homo sapien
ggtgagcaaatgaagacagcacaatggaatata

SEQ ID NO: 15242 - DNA, 33 bp, Homo sapien
ggtgagcaaatgaagagagcacaatggaatata

SEQ ID NO: 15243 - DNA, 33 bp, Homo sapien
ccagagtcaacttcctaaaacgtagttcaaata

SEQ ID NO: 15244 - DNA, 33 bp, Homo sapien
ccagagtcaacttcctgaaacgtagttcaaata

SEQ ID NO: 15245 - DNA, 33 bp, Homo sapien
aaaatccatagcgttcaatatcctaaatgggtg

SEQ ID NO: 15246 - DNA, 33 bp, Homo sapien
aaaatccatagcgttccatatcctaaatgggtg

SEQ ID NO: 15247 - DNA, 33 bp, Homo sapien
tcattcgactgaccaacatttaatgatatctac

SEQ ID NO: 15248 - DNA, 33 bp, Homo sapien
tcattcgactgaccaatatttaatgatatctac

SEQ ID NO: 15249 - DNA, 33 bp, Homo sapien
catgtcttcggttatcaccttaggccttgattc

SEQ ID NO: 15250 - DNA, 33 bp, Homo sapien
catgtcttcggttatcgccttaggccttgattc

SEQ ID NO: 15251 - DNA, 33 bp, Homo sapien
tctctgagaatgaaataaatgttcccaggaggt

SEQ ID NO: 15252 - DNA, 33 bp, Homo sapien
tctctgagaatgaaatgaatgttcccaggaggt

SEQ ID NO: 15253 - DNA, 33 bp, Homo sapien
agggaaacagcctccaactcaggcctgaccagg

SEQ ID NO: 15254 - DNA, 33 bp, Homo sapien
agggaaacagcctccatctcaggcctgaccagg

SEQ ID NO: 15255 - DNA, 33 bp, Homo sapien
ttcaaaggagtcccagaagttcaagatgcattc

SEQ ID NO: 15256 - DNA, 33 bp, Homo sapien
ttcaaaggagtcccaggagttcaagatgcattc

SEQ ID NO: 15257 - DNA, 33 bp, Homo sapien
tttttttgagtgagcaataatgttggcatcttt

SEQ ID NO: 15258 - DNA, 33 bp, Homo sapien
tttttttgagtgagcagtaatgttggcatcttt

SEQ ID NO: 15259 - DNA, 33 bp, Homo sapien
tcaatatggtgaaataaggtgttgatatatggc

SEQ ID NO: 15260 - DNA, 33 bp, Homo sapien
tcaatatggtgaaatatggtgttgatatatggc

SEQ ID NO: 15261 - DNA, 33 bp, Homo sapien
aatcttagtctatgggccagaccttcagcaatt

SEQ ID NO: 15262 - DNA, 33 bp, Homo sapien
aatcttagtctatgggtcagaccttcagcaatt

SEQ ID NO: 15263 - DNA, 33 bp, Homo sapien
aagaaaatgataagaccgaagaaatgccaaatg

SEQ ID NO: 15264 - DNA, 33 bp, Homo sapien
aagaaaatgataagactgaagaaatgccaaatg

SEQ ID NO: 15265 - DNA, 33 bp, Homo sapien; identical to SEQ ID NO: 15263

SEQ ID NO: 15266 - DNA, 33 bp, Homo sapien; identical to SEQ ID NO: 15264

SEQ ID NO: 15267 - DNA, 33 bp, Homo sapien
agtgattagtaatggcgcaaaaaagaactgttt

SEQ ID NO: 15268 - DNA, 33 bp, Homo sapien
agtgattagtaatggctcaaaaaagaactgttt

SEQ ID NO: 15269 - DNA, 33 bp, Homo sapien; identical to SEQ ID NO: 15267

SEQ ID NO: 15270 - DNA, 33 bp, Homo sapien; identical to SEQ ID NO: 15268

SEQ ID NO: 15271 - DNA, 33 bp, Homo sapien
gtatttcctcttaaccactgcattacttgatag

SEQ ID NO: 15272 - DNA, 33 bp, Homo sapien
gtatttcctcttaaccgctgcattacttgatag

SEQ ID NO: 15273 - DNA, 33 bp, Homo sapien
tgtcatgactactaaactgaggtggtgatatag

SEQ ID NO: 15274 - DNA, 33 bp, Homo sapien
tgtcatgactactaaattgaggtggtgatatag

SEQ ID NO: 15275 - DNA, 33 bp, Homo sapien
ttggtcaggacagtcacgatgtagtttactccc

SEQ ID NO: 15276 - DNA, 33 bp, Homo sapien
ttggtcaggacagtcatgatgtagtttactccc

SEQ ID NO: 15277 - DNA, 33 bp, Homo sapien
gctagatgcttctagacccaatgtcagaacatg

SEQ ID NO: 15278 - DNA, 33 bp, Homo sapien
gctagatgcttctagatccaatgtcagaacatg

SEQ ID NO: 15279 - DNA, 33 bp, Homo sapien
aacatggagtagtaaacctgtaggtctggaaat

SEQ ID NO: 15280 - DNA, 33 bp, Homo sapien
aacatggagtagtaaagctgtaggtctggaaat

SEQ ID NO: 15281 - DNA, 33 bp, Homo sapien
ggtggataagcctcaactgtggcagagtaccag

SEQ ID NO: 15282 - DNA, 33 bp, Homo sapien
ggtggataagcctcaattgtggcagagtaccag

SEQ ID NO: 15283 - DNA, 33 bp, Homo sapien
tggcaaagcccaaatcaaaacctccttttcaac

SEQ ID NO: 15284 - DNA, 33 bp, Homo sapien
tggcaaagcccaaatcgaaacctccttttcaac

SEQ ID NO: 15285 - DNA, 33 bp, Homo sapien
aaataaggaggcactgaaagttagatgaacaag

SEQ ID NO: 15286 - DNA, 33 bp, Homo sapien
aaataaggaggcactgcaagttagatgaacaag

SEQ ID NO: 15287 - DNA, 33 bp, Homo sapien
ctagcccaaactttacaatctggtaacagggta

SEQ ID NO: 15288 - DNA, 33 bp, Homo sapien
ctagcccaaactttacgatctggtaacagggta

SEQ ID NO: 15289 - DNA, 33 bp, Homo sapien
acttcccctatttggcaattcaacagtacagtt

SEQ ID NO: 15290 - DNA, 33 bp, Homo sapien
acttcccctatttggcgattcaacagtacagtt

SEQ ID NO: 15291 - DNA, 33 bp, Homo sapien
caagctcttcttttaaatatgctgtctggataa

SEQ ID NO: 15292 - DNA, 33 bp, Homo sapien
caagctcttcttttaagtatgctgtctggataa

SEQ ID NO: 15293 - DNA, 33 bp, Homo sapien
tttcaagaattagacaacgaaggaaaatttttt

SEQ ID NO: 15294 - DNA, 33 bp, Homo sapien
tttcaagaattagacagcgaaggaaaatttttt

SEQ ID NO: 15295 - DNA, 33 bp, Homo sapien
aagattatcattttaacaaatcagtatctttaa

SEQ ID NO: 15296 - DNA, 33 bp, Homo sapien
aagattatcattttaagaaatcagtatctttaa

SEQ ID NO: 15297 - DNA, 33 bp, Homo sapien
tgcttgccatctgtggaacttatgttttacttt

SEQ ID NO: 15298 - DNA, 33 bp, Homo sapien
tgcttgccatctgtgggacttatgttttacttt

SEQ ID NO: 15299 - DNA, 33 bp, Homo sapien
caaataactggtttgcccaagcatgttaactct

SEQ ID NO: 15300 - DNA, 33 bp, Homo sapien
caaataactggtttgctcaagcatgttaactct

SEQ ID NO: 15301 - DNA, 33 bp, Homo sapien
tatctttgcctttacccgaaacaaagcaggaac

SEQ ID NO: 15302 - DNA, 33 bp, Homo sapien
tatctttgcctttacctgaaacaaagcaggaac

SEQ ID NO: 15303 - DNA, 33 bp, Homo sapien
gaggtccttgtctccaacatagagcataatcta

SEQ ID NO: 15304 - DNA, 33 bp, Homo sapien
gaggtccttgtctccagcatagagcataatcta

SEQ ID NO: 15305 - DNA, 33 bp, Homo sapien
ttaatctatatactgcaagagagaatccctctc

SEQ ID NO: 15306 - DNA, 33 bp, Homo sapien
ttaatctatatactgcgagagagaatccctctc

SEQ ID NO: 15307 - DNA, 33 bp, Homo sapien
aataaaggaattttcaaagttaggcttgcagag

SEQ ID NO: 15308 - DNA, 33 bp, Homo sapien
aataaaggaattttcagagttaggcttgcagag

SEQ ID NO: 15309 - DNA, 33 bp, Homo sapien
gtagaggaaggacaagaaatggatggagacaag

SEQ ID NO: 15310 - DNA, 33 bp, Homo sapien
gtagaggaaggacaaggaatggatggagacaag

SEQ ID NO: 15311 - DNA, 33 bp, Homo sapien
acaatgcaacagtaaacaaagttcctagatgaa

SEQ ID NO: 15312 - DNA, 33 bp, Homo sapien
acaatgcaacagtaaagaaagttcctagatgaa

SEQ ID NO: 15313 - DNA, 33 bp, Homo sapien
acaaatgatgagtctaaggtggaaatgttaagc

SEQ ID NO: 15314 - DNA, 33 bp, Homo sapien
acaaatgatgagtctacggtggaaatgttaagc

SEQ ID NO: 15315 - DNA, 33 bp, Homo sapien
tcatggatatagttaccaggtgttgctggaaga

SEQ ID NO: 15316 - DNA, 33 bp, Homo sapien
tcatggatatagttactaggtgttgctggaaga

SEQ ID NO: 15317 - DNA, 33 bp, Homo sapien
ttactgtatccctatactacagtttgaagttgg

SEQ ID NO: 15318 - DNA, 33 bp, Homo sapien
ttactgtatccctatagtacagtttgaagttgg

SEQ ID NO: 15319 - DNA, 33 bp, Homo sapien
gcaaacttgtaattaacgtttgaggtcaggcat

SEQ ID NO: 15320 - DNA, 33 bp, Homo sapien
gcaaacttgtaattaatgtttgaggtcaggcat

SEQ ID NO: 15321 - DNA, 33 bp, Homo sapien
aatttacaaacattcaactgtacaaatcttaaa

SEQ ID NO: 15322 - DNA, 33 bp, Homo sapien
aatttacaaacattcatctgtacaaatcttaaa

SEQ ID NO: 15323 - DNA, 33 bp, Homo sapien
gggcagtgggtgataactagaaaatattttaga

SEQ ID NO: 15324 - DNA, 33 bp, Homo sapien
gggcagtgggtgataattagaaaatattttaga

SEQ ID NO: 15325 - DNA, 33 bp, Homo sapien
cagatctatgcccctaccctcaggctggtgtac

SEQ ID NO: 15326 - DNA, 33 bp, Homo sapien
cagatctatgcccctatcctcaggctggtgtac

SEQ ID NO: 15327 - DNA, 33 bp, Homo sapien
acttattccagacccactgaatctctttacttg

SEQ ID NO: 15328 - DNA, 33 bp, Homo sapien
acttattccagacccattgaatctctttacttg

SEQ ID NO: 15329 - DNA, 33 bp, Homo sapien
tgtcaggactcagaaacgttatggataatgagg

SEQ ID NO: 15330 - DNA, 33 bp, Homo sapien
tgtcaggactcagaaatgttatggataatgagg

SEQ ID NO: 15331 - DNA, 33 bp, Homo sapien
tatttaaccgaagtgacggtaaaacatttataa

SEQ ID NO: 15332 - DNA, 33 bp, Homo sapien
tatttaaccgaagtgatggtaaaacatttataa

SEQ ID NO: 15333 - DNA, 33 bp, Homo sapien
atggggaggatgctagcatgactacacaattct

SEQ ID NO: 15334 - DNA, 33 bp, Homo sapien
atggggaggatgctagtatgactacacaattct

SEQ ID NO: 15335 - DNA, 33 bp, Homo sapien
caggctcctgggtggaaagaagctggtccacag

SEQ ID NO: 15336 - DNA, 33 bp, Homo sapien
caggctcctgggtggagagaagctggtccacag

SEQ ID NO: 15337 - DNA, 33 bp, Homo sapien
ttgtacttatttcacacaggaagcgagggtgca

SEQ ID NO: 15338 - DNA, 33 bp, Homo sapien
ttgtacttatttcacataggaagcgagggtgca

SEQ ID NO: 15339 - DNA, 33 bp, Homo sapien
tacattgtgttatggaaaaatctcaaaaatgtt

SEQ ID NO: 15340 - DNA, 33 bp, Homo sapien
tacattgtgttatggacaaatctcaaaaatgtt

SEQ ID NO: 15341 - DNA, 33 bp, Homo sapien
cagtgtatggaagccaatcaatccccaattctg

SEQ ID NO: 15342 - DNA, 33 bp, Homo sapien
cagtgtatggaagccagtcaatccccaattctg

SEQ ID NO: 15343 - DNA, 33 bp, Homo sapien
aatgatgctaactaacgaaaagatgcttatgaa

SEQ ID NO: 15344 - DNA, 33 bp, Homo sapien
aatgatgctaactaactaaaagatgcttatgaa

SEQ ID NO: 15345 - DNA, 33 bp, Homo sapien
tagaaccttgcaattaactgtcattaaaaaatg

SEQ ID NO: 15346 - DNA, 33 bp, Homo sapien
tagaaccttgcaattagctgtcattaaaaaatg

SEQ ID NO: 15347 - DNA, 33 bp, Homo sapien
cagccatgggtagagacgctacataaggaccag

SEQ ID NO: 15348 - DNA, 33 bp, Homo sapien
cagccatgggtagagatgctacataaggaccag

SEQ ID NO: 15349 - DNA, 33 bp, Homo sapien
ctgaagagagtaattggagtcaagagctaaaat

SEQ ID NO: 15350 - DNA, 33 bp, Homo sapien
ctgaagagagtaattgtagtcaagagctaaaat

SEQ ID NO: 15351 - DNA, 33 bp, Homo sapien
gggtcctttaccagatcacttaaaggtacatat

SEQ ID NO: 15352 - DNA, 33 bp, Homo sapien
gggtcctttaccagattacttaaaggtacatat

SEQ ID NO: 15353 - DNA, 33 bp, Homo sapien
accaggatataagggaagtgatcctgagtagct

SEQ ID NO: 15354 - DNA, 33 bp, Homo sapien
accaggatataagggacgtgatcctgagtagct

SEQ ID NO: 15355 - DNA, 33 bp, Homo sapien
tcaaagggcaacaggaaccctaatccaaaagtt

SEQ ID NO: 15356 - DNA, 33 bp, Homo sapien
tcaaagggcaacaggacccctaatccaaaagtt

SEQ ID NO: 15357 - DNA, 33 bp, Homo sapien
taacacagaaacaaacaattcctgatactctgt

SEQ ID NO: 15358 - DNA, 33 bp, Homo sapien
taacacagaaacaaacgattcctgatactctgt

SEQ ID NO: 15359 - DNA, 33 bp, Homo sapien
agaggatcctgagttaaatgaaactctctctca

SEQ ID NO: 15360 - DNA, 33 bp, Homo sapien
agaggatcctgagttagatgaaactctctctca

SEQ ID NO: 15361 - DNA, 33 bp, Homo sapien
tctacgaacttcaagagaatttggagaaacttt

SEQ ID NO: 15362 - DNA, 33 bp, Homo sapien
tctacgaacttcaagataatttggagaaacttt

SEQ ID NO: 15363 - DNA, 33 bp, Homo sapien
ggcttattcagcaaaccgaaggatgagtctaag

SEQ ID NO: 15364 - DNA, 33 bp, Homo sapien
ggcttattcagcaaactgaaggatgagtctaag

SEQ ID NO: 15365 - DNA, 33 bp, Homo sapien
tgtgctagaggctggaaatccattgaaaagcac

SEQ ID NO: 15366 - DNA, 33 bp, Homo sapien
tgtgctagaggctggagatccattgaaaagcac

SEQ ID NO: 15367 - DNA, 33 bp, Homo sapien
gcaactcagccgggccaatgcaatccaggttgg

SEQ ID NO: 15368 - DNA, 33 bp, Homo sapien
gcaactcagccgggccgatgcaatccaggttgg

SEQ ID NO: 15369 - DNA, 33 bp, Homo sapien
atatctttggttagcacacccttccaagactct

SEQ ID NO: 15370 - DNA, 33 bp, Homo sapien
atatctttggttagcagacccttccaagactct

SEQ ID NO: 15371 - DNA, 33 bp, Homo sapien
tcagactcatgaggccaattttggacagtccaa

SEQ ID NO: 15372 - DNA, 33 bp, Homo sapien
tcagactcatgaggcccattttggacagtccaa

SEQ ID NO: 15373 - DNA, 33 bp, Homo sapien
aggtcagcaaatctagcaagaagccagaccttc

SEQ ID NO: 15374 - DNA, 33 bp, Homo sapien
aggtcagcaaatctagtaagaagccagaccttc

SEQ ID NO: 15375 - DNA, 33 bp, Homo sapien
tgcctaggtctgaagaagacgtgttaggaggcc

SEQ ID NO: 15376 - DNA, 33 bp, Homo sapien
tgcctaggtctgaagacgacgtgttaggaggcc

SEQ ID NO: 15377 - DNA, 33 bp, Homo sapien
tcttctgaactctacccgctggctggatgtttc

SEQ ID NO: 15378 - DNA, 33 bp, Homo sapien
tcttctgaactctacctgctggctggatgtttc

SEQ ID NO: 15379 - DNA, 33 bp, Homo sapien
ccactgccaggaactacggatttctcctaatcc

SEQ ID NO: 15380 - DNA, 33 bp, Homo sapien
ccactgccaggaactatggatttctcctaatcc

SEQ ID NO: 15381 - DNA, 33 bp, Homo sapien
atggatgagcgctgcaatatcctatgcaacaag

SEQ ID NO: 15382 - DNA, 33 bp, Homo sapien
atggatgagcgctgcagtatcctatgcaacaag

SEQ ID NO: 15383 - DNA, 33 bp, Homo sapien
ttctctctttccacacaaattgctaaattatga

SEQ ID NO: 15384 - DNA, 33 bp, Homo sapien
ttctctctttccacaccaattgctaaattatga

SEQ ID NO: 15385 - DNA, 33 bp, Homo sapien
acagcagagattcagaggtaggtaggctaattg

SEQ ID NO: 15386 - DNA, 33 bp, Homo sapien
acagcagagattcagatgtaggtaggctaattg

SEQ ID NO: 15387 - DNA, 33 bp, Homo sapien
aggtggtgggtgtggaagcaagaagggattact

SEQ ID NO: 15388 - DNA, 33 bp, Homo sapien
aggtggtgggtgtggaggcaagaagggattact

SEQ ID NO: 15389 - DNA, 33 bp, Homo sapien
agccttattaaagatcaatttccacattgcttg

SEQ ID NO: 15390 - DNA, 33 bp, Homo sapien
agccttattaaagatcgatttccacattgcttg

SEQ ID NO: 15391 - DNA, 33 bp, Homo sapien
tatcaagttttgatggaaaagtttgccttcaca

SEQ ID NO: 15392 - DNA, 33 bp, Homo sapien
tatcaagttttgatgggaaagtttgccttcaca

SEQ ID NO: 15393 - DNA, 33 bp, Homo sapien
cgtctttcctcttcaacagccttacactctttc

SEQ ID NO: 15394 - DNA, 33 bp, Homo sapien
cgtctttcctcttcaatagccttacactctttc

SEQ ID NO: 15395 - DNA, 33 bp, Homo sapien
aacaacgtgggcaaacaatcaagagtcctgtgt

SEQ ID NO: 15396 - DNA, 33 bp, Homo sapien
aacaacgtgggcaaacgatcaagagtcctgtgt

SEQ ID NO: 15397 - DNA, 33 bp, Homo sapien
cgcccacagcatctcaatagagtagtaccccag

SEQ ID NO: 15398 - DNA, 33 bp, Homo sapien
cgcccacagcatctcagtagagtagtaccccag

SEQ ID NO: 15399 - DNA, 33 bp, Homo sapien
acttaagagaatttgcacggtcttttcaatttt

SEQ ID NO: 15400 - DNA, 33 bp, Homo sapien
acttaagagaatttgcgcggtcttttcaatttt

SEQ ID NO: 15401 - DNA, 33 bp, Homo sapien
aaaaaaatacctatgccatcttctgtggagcct

SEQ ID NO: 15402 - DNA, 33 bp, Homo sapien
aaaaaaatacctatgctatcttctgtggagcct

SEQ ID NO: 15403 - DNA, 33 bp, Homo sapien
gggaatggagatacctaaagctaaaacttctct

SEQ ID NO: 15404 - DNA, 33 bp, Homo sapien
gggaatggagatacctgaagctaaaacttctct

SEQ ID NO: 15405 - DNA, 33 bp, Homo sapien
aaagctgcacttaaacacaattttagacttcaa

SEQ ID NO: 15406 - DNA, 33 bp, Homo sapien
aaagctgcacttaaacccaattttagacttcaa

SEQ ID NO: 15407 - DNA, 33 bp, Homo sapien
cagaatattgttactacaaaggttcttaacaat

SEQ ID NO: 15408 - DNA, 33 bp, Homo sapien
cagaatattgttactataaaggttcttaacaat

SEQ ID NO: 15409 - DNA, 33 bp, Homo sapien
aaaaaaaggaatggccaaccttcagggatctgg

SEQ ID NO: 15410 - DNA, 33 bp, Homo sapien
aaaaaaaggaatggccgaccttcagggatctgg

SEQ ID NO: 15411 - DNA, 33 bp, Homo sapien
catagtctaataggaaaaaaagcaagcctgccg

SEQ ID NO: 15412 - DNA, 33 bp, Homo sapien
catagtctaataggaagaaaagcaagcctgccg

SEQ ID NO: 15413 - DNA, 33 bp, Homo sapien
taactttctaactcctaaagtaggaacttgcta

SEQ ID NO: 15414 - DNA, 33 bp, Homo sapien
taactttctaactcctcaagtaggaacttgcta

SEQ ID NO: 15415 - DNA, 33 bp, Homo sapien
aatccttattcagagcacaatgtggcattccct

SEQ ID NO: 15416 - DNA, 33 bp, Homo sapien
aatccttattcagagcgcaatgtggcattccct

SEQ ID NO: 15417 - DNA, 33 bp, Homo sapien
ctggtttaggatctgggagtaagatagacatgg

SEQ ID NO: 15418 - DNA, 33 bp, Homo sapien
ctggtttaggatctggtagtaagatagacatgg

SEQ ID NO: 15419 - DNA, 33 bp, Homo sapien
aaaaggaggtaatcaactggcagctttaatgtc

SEQ ID NO: 15420 - DNA, 33 bp, Homo sapien
aaaaggaggtaatcaattggcagctttaatgtc

SEQ ID NO: 15421 - DNA, 33 bp, Homo sapien
gggcctgcagtccgaaacttcgatgcttcactt

SEQ ID NO: 15422 - DNA, 33 bp, Homo sapien
gggcctgcagtccgaaccttcgatgcttcactt

SEQ ID NO: 15423 - DNA, 33 bp, Homo sapien
gcagacactcaggaccactccagtcatggctcc

SEQ ID NO: 15424 - DNA, 33 bp, Homo sapien
gcagacactcaggaccgctccagtcatggctcc

SEQ ID NO: 15425 - DNA, 33 bp, Homo sapien
ttctccaaatgtaaaacagcaataatattacct

SEQ ID NO: 15426 - DNA, 33 bp, Homo sapien
ttctccaaatgtaaaagagcaataatattacct

SEQ ID NO: 15427 - DNA, 33 bp, Homo sapien
tcagagccctacttcaatctgacttcagagaac

SEQ ID NO: 15428 - DNA, 33 bp, Homo sapien
tcagagccctacttcagtctgacttcagagaac

SEQ ID NO: 15429 - DNA, 33 bp, Homo sapien
tggacgtctgtccttacgacctctgctggccgg

SEQ ID NO: 15430 - DNA, 33 bp, Homo sapien
tggacgtctgtccttatgacctctgctggccgg

SEQ ID NO: 15431 - DNA, 33 bp, Homo sapien
ttttggtcaaatcaccaatgtagaactggccag

SEQ ID NO: 15432 - DNA, 33 bp, Homo sapien
ttttggtcaaatcaccgatgtagaactggccag

SEQ ID NO: 15433 - DNA, 33 bp, Homo sapien
caaaaaagaatttgaaactatttgagtagggga

SEQ ID NO: 15434 - DNA, 33 bp, Homo sapien
caaaaaagaatttgaacctatttgagtagggga

SEQ ID NO: 15435 - DNA, 33 bp, Homo sapien
aataaggaaagtggaaaagccaagaagccttca

SEQ ID NO: 15436 - DNA, 33 bp, Homo sapien
aataaggaaagtggaagagccaagaagccttca

SEQ ID NO: 15437 - DNA, 33 bp, Homo sapien
aatcaagccagacatacgtaactggttagacca

SEQ ID NO: 15438 - DNA, 33 bp, Homo sapien
aatcaagccagacatatgtaactggttagacca

SEQ ID NO: 15439 - DNA, 33 bp, Homo sapien
tgttgctctggccatggaatcaagccagacata

SEQ ID NO: 15440 - DNA, 33 bp, Homo sapien
tgttgctctggccatgtaatcaagccagacata

SEQ ID NO: 15441 - DNA, 33 bp, Homo sapien
catttgagctagcaagaaagcacaagggaaaag

SEQ ID NO: 15442 - DNA, 33 bp, Homo sapien
catttgagctagcaaggaagcacaagggaaaag

SEQ ID NO: 15443 - DNA, 33 bp, Homo sapien
tgctggaggactagaaaccatgtggagaaaagc

SEQ ID NO: 15444 - DNA, 33 bp, Homo sapien
tgctggaggactagaagccatgtggagaaaagc

SEQ ID NO: 15445 - DNA, 33 bp, Homo sapien
gcggtgggatttctaccggaatgccaatgctga

SEQ ID NO: 15446 - DNA, 33 bp, Homo sapien
gcggtgggatttctactggaatgccaatgctga

SEQ ID NO: 15447 - DNA, 33 bp, Homo sapien
ctcagtgcagtaaacaacagtattgtcaccagc

SEQ ID NO: 15448 - DNA, 33 bp, Homo sapien
ctcagtgcagtaaacagcagtattgtcaccagc

SEQ ID NO: 15449 - DNA, 33 bp, Homo sapien
aagtctgcacctccagaagaccaatcagtgaac

SEQ ID NO: 15450 - DNA, 33 bp, Homo sapien
aagtctgcacctccaggagaccaatcagtgaac

SEQ ID NO: 15451 - DNA, 33 bp, Homo sapien
acatctaggtagatgccgcactttgccctgatt

SEQ ID NO: 15452 - DNA, 33 bp, Homo sapien
acatctaggtagatgctgcactttgccctgatt

SEQ ID NO: 15453 - DNA, 33 bp, Homo sapien
gcttctgcacgtggtcaaaagcaaggtctgtgt

SEQ ID NO: 15454 - DNA, 33 bp, Homo sapien
gcttctgcacgtggtcgaaagcaaggtctgtgt

SEQ ID NO: 15455 - DNA, 33 bp, Homo sapien
cacagtgatactctgaatacttggtcaatggga

SEQ ID NO: 15456 - DNA, 33 bp, Homo sapien
cacagtgatactctgagtacttggtcaatggga

SEQ ID NO: 15457 - DNA, 33 bp, Homo sapien
tgatgactgagagggcagactgcatggttccca

SEQ ID NO: 15458 - DNA, 33 bp, Homo sapien
tgatgactgagagggcggactgcatggttccca

SEQ ID NO: 15459 - DNA, 33 bp, Homo sapien
caacaagcaaacaaaacgagaggtgcctgcctc

SEQ ID NO: 15460 - DNA, 33 bp, Homo sapien
caacaagcaaacaaaatgagaggtgcctgcctc

SEQ ID NO: 15461 - DNA, 33 bp, Homo sapien
tcaacaagcctacaccacttcaccaagccctga

SEQ ID NO: 15462 - DNA, 33 bp, Homo sapien
tcaacaagcctacaccgcttcaccaagccctga

SEQ ID NO: 15463 - DNA, 33 bp, Homo sapien
ttgggactgaagttgagattaggttttatttgg

SEQ ID NO: 15464 - DNA, 33 bp, Homo sapien
ttgggactgaagttgatattaggttttatttgg

SEQ ID NO: 15465 - DNA, 33 bp, Homo sapien
tccagtttgagggaaccgaaggaggcagtgctg

SEQ ID NO: 15466 - DNA, 33 bp, Homo sapien
tccagtttgagggaacggaaggaggcagtgctg

SEQ ID NO: 15467 - DNA, 33 bp, Homo sapien
taaatgaaagcaaaacaatgcaaatatgatcat

SEQ ID NO: 15468 - DNA, 33 bp, Homo sapien
taaatgaaagcaaaacgatgcaaatatgatcat

SEQ ID NO: 15469 - DNA, 33 bp, Homo sapien
agccgaccctgatcaaatgccaggtcattccat

SEQ ID NO: 15470 - DNA, 33 bp, Homo sapien
agccgaccctgatcaagtgccaggtcattccat

SEQ ID NO: 15471 - DNA, 33 bp, Homo sapien
gagccggagatcatcacagagacagagagagat

SEQ ID NO: 15472 - DNA, 33 bp, Homo sapien
gagccggagatcatcatagagacagagagagat

SEQ ID NO: 15473 - DNA, 33 bp, Homo sapien
gtctgggacctacaacccccagctgctgaacag

SEQ ID NO: 15474 - DNA, 33 bp, Homo sapien
gtctgggacctacaacgcccagctgctgaacag

SEQ ID NO: 15475 - DNA, 33 bp, Homo sapien
agatacacatcccaaacgcagcaaacacagacg

SEQ ID NO: 15476 - DNA, 33 bp, Homo sapien
agatacacatcccaaatgcagcaaacacagacg

SEQ ID NO: 15477 - DNA, 33 bp, Homo sapien
cgaggaaattgtgcaaattcctacctggctgtg

SEQ ID NO: 15478 - DNA, 33 bp, Homo sapien
cgaggaaattgtgcaagttcctacctggctgtg

SEQ ID NO: 15479 - DNA, 33 bp, Homo sapien
tcgccaccgttaaccccgcattgcctgatccat

SEQ ID NO: 15480 - DNA, 33 bp, Homo sapien
tcgccaccgttaaccctgcattgcctgatccat

SEQ ID NO: 15481 - DNA, 33 bp, Homo sapien
agcaagcttgacatgaggacatccccagctact

SEQ ID NO: 15482 - DNA, 33 bp, Homo sapien
agcaagcttgacatgatgacatccccagctact

SEQ ID NO: 15483 - DNA, 33 bp, Homo sapien
gcaagaatgactgacacgtgaatccaacttcca

SEQ ID NO: 15484 - DNA, 33 bp, Homo sapien
gcaagaatgactgacatgtgaatccaacttcca

SEQ ID NO: 15485 - DNA, 33 bp, Homo sapien
atattccagtccgacagtagtacatatattttt

SEQ ID NO: 15486 - DNA, 33 bp, Homo sapien
atattccagtccgacattagtacatatattttt

SEQ ID NO: 15487 - DNA, 33 bp, Homo sapien
gtgttgctaagtgacccgagtctttttgagccc

SEQ ID NO: 15488 - DNA, 33 bp, Homo sapien
gtgttgctaagtgacctgagtctttttgagccc

SEQ ID NO: 15489 - DNA, 33 bp, Homo sapien
atgctttcaaattctcaaaacaagcctgtgagg

SEQ ID NO: 15490 - DNA, 33 bp, Homo sapien
atgctttcaaattctcgaaacaagcctgtgagg

SEQ ID NO: 15491 - DNA, 33 bp, Homo sapien
agacttgaaatcagcacgggctttcccactcag

SEQ ID NO: 15492 - DNA, 33 bp, Homo sapien
agacttgaaatcagcatgggctttcccactcag

SEQ ID NO: 15493 - DNA, 33 bp, Homo sapien
gtaagtccatatcacaagagttctaagacccta

SEQ ID NO: 15494 - DNA, 33 bp, Homo sapien
gtaagtccatatcacaggagttctaagacccta

SEQ ID NO: 15495 - DNA, 33 bp, Homo sapien
ctcctgcatcagctacactgaacagtaaaacca

SEQ ID NO: 15496 - DNA, 33 bp, Homo sapien
ctcctgcatcagctaccctgaacagtaaaacca

SEQ ID NO: 15497 - DNA, 33 bp, Homo sapien
gcagatagacttataacaacacagacacacccc

SEQ ID NO: 15498 - DNA, 33 bp, Homo sapien
gcagatagacttataataacacagacacacccc

SEQ ID NO: 15499 - DNA, 33 bp, Homo sapien
ctgagcaccaacggcacgctgggcctagaactg

SEQ ID NO: 15500 - DNA, 33 bp, Homo sapien
ctgagcaccaacggcatgctgggcctagaactg

SEQ ID NO: 15501 - DNA, 33 bp, Homo sapien
attctcctgaagagaactccagaacacaggagc

SEQ ID NO: 15502 - DNA, 33 bp, Homo sapien
attctcctgaagagaagtccagaacacaggagc

SEQ ID NO: 15503 - DNA, 33 bp, Homo sapien
ggtcgcctactaaagacccaggcctgttgaagt

SEQ ID NO: 15504 - DNA, 33 bp, Homo sapien
ggtcgcctactaaagagccaggcctgttgaagt

SEQ ID NO: 15505 - DNA, 33 bp, Homo sapien
gaatagacattctcaccggtctctagttcggct

SEQ ID NO: 15506 - DNA, 33 bp, Homo sapien
gaatagacattctcacgggtctctagttcggct

SEQ ID NO: 15507 - DNA, 33 bp, Homo sapien
agaacatgtctattcacgctgttgtggagtgtg

SEQ ID NO: 15508 - DNA, 33 bp, Homo sapien
agaacatgtctattcatgctgttgtggagtgtg

SEQ ID NO: 15509 - DNA, 33 bp, Homo sapien
ggagcagaagggagtccgaagtgcagatgaaga

SEQ ID NO: 15510 - DNA, 33 bp, Homo sapien
ggagcagaagggagtcggaagtgcagatgaaga

SEQ ID NO: 15511 - DNA, 33 bp, Homo sapien
aagcctgtcttggaaacagaaagggaggctggt

SEQ ID NO: 15512 - DNA, 33 bp, Homo sapien
aagcctgtcttggaaagagaaagggaggctggt

SEQ ID NO: 15513 - DNA, 33 bp, Homo sapien
tttaggcaactcactccctcaagtggaagaggc

SEQ ID NO: 15514 - DNA, 33 bp, Homo sapien
tttaggcaactcactctctcaagtggaagaggc

SEQ ID NO: 15515 - DNA, 33 bp, Homo sapien
atcttctcttctgtaacgtggggctaatcatag

SEQ ID NO: 15516 - DNA, 33 bp, Homo sapien
atcttctcttctgtaatgtggggctaatcatag

SEQ ID NO: 15517 - DNA, 33 bp, Homo sapien
gacaagctagaaatcacgtccttcttccaggat

SEQ ID NO: 15518 - DNA, 33 bp, Homo sapien
gacaagctagaaatcatgtccttcttccaggat

SEQ ID NO: 15519 - DNA, 33 bp, Homo sapien
agagaagtcagatcacaaaaagccttgagtggt

SEQ ID NO: 15520 - DNA, 33 bp, Homo sapien
agagaagtcagatcacgaaaagccttgagtggt

SEQ ID NO: 15521 - DNA, 33 bp, Homo sapien
gtgggggcgtccggcgacaccttgctccaggtc

SEQ ID NO: 15522 - DNA, 33 bp, Homo sapien
gtgggggcgtccggcggcaccttgctccaggtc

SEQ ID NO: 15523 - DNA, 33 bp, Homo sapien
cagatcatgtgagaccgaaaggaatgcagtgga

SEQ ID NO: 15524 - DNA, 33 bp, Homo sapien
cagatcatgtgagacctaaaggaatgcagtgga

SEQ ID NO: 15525 - DNA, 33 bp, Homo sapien
acacaggagaccagaaggtactttaatagatgt

SEQ ID NO: 15526 - DNA, 33 bp, Homo sapien
acacaggagaccagaatgtactttaatagatgt

SEQ ID NO: 15527 - DNA, 33 bp, Homo sapien
aatattttctagtccaatgcatctatctttata

SEQ ID NO: 15528 - DNA, 33 bp, Homo sapien
aatattttctagtccagtgcatctatctttata

SEQ ID NO: 15529 - DNA, 33 bp, Homo sapien
ggcctggccaaagtgcagaggttttctcttaaa

SEQ ID NO: 15530 - DNA, 33 bp, Homo sapien
ggcctggccaaagtgcggaggttttctcttaaa

SEQ ID NO: 15531 - DNA, 33 bp, Homo sapien
gctcaacctctgggaaatgaaccggagcagctc

SEQ ID NO: 15532 - DNA, 33 bp, Homo sapien
gctcaacctctgggaagtgaaccggagcagctc

SEQ ID NO: 15533 - DNA, 33 bp, Homo sapien
acagaggcagcttgggaagcagttgtaaatctt

SEQ ID NO: 15534 - DNA, 33 bp, Homo sapien
acagaggcagcttggggagcagttgtaaatctt

SEQ ID NO: 15535 - DNA, 33 bp, Homo sapien
ctattcatcatgctgcagaaggtacagacaccc

SEQ ID NO: 15536 - DNA, 33 bp, Homo sapien
ctattcatcatgctgcggaaggtacagacaccc

SEQ ID NO: 15537 - DNA, 33 bp, Homo sapien
tcactgtactgatcaaactgtaaatttacccag

SEQ ID NO: 15538 - DNA, 33 bp, Homo sapien
tcactgtactgatcaagctgtaaatttacccag

SEQ ID NO: 15539 - DNA, 33 bp, Homo sapien
ctgcaggggagatttacagagaactcatagagc

SEQ ID NO: 15540 - DNA, 33 bp, Homo sapien
ctgcaggggagatttatagagaactcatagagc

SEQ ID NO: 15541 - DNA, 33 bp, Homo sapien
atttacatctttgaagcagtagccggagcagta

SEQ ID NO: 15542 - DNA, 33 bp, Homo sapien
atttacatctttgaagtagtagccggagcagta

SEQ ID NO: 15543 - DNA, 33 bp, Homo sapien
tagctagtaaaagtagccaggcaccaatgagaa

SEQ ID NO: 15544 - DNA, 33 bp, Homo sapien
tagctagtaaaagtagtcaggcaccaatgagaa

SEQ ID NO: 15545 - DNA, 33 bp, Homo sapien
tctctcaattgttcataaatttcttgctgtact

SEQ ID NO: 15546 - DNA, 33 bp, Homo sapien
tctctcaattgttcatgaatttcttgctgtact

SEQ ID NO: 15547 - DNA, 33 bp, Homo sapien
gaattctgcacaagcaagcattcttcattgcag

SEQ ID NO: 15548 - DNA, 33 bp, Homo sapien
gaattctgcacaagcaggcattcttcattgcag

SEQ ID NO: 15549 - DNA, 33 bp, Homo sapien
cccccacaactgtcaacatctgcaaaataccag

SEQ ID NO: 15550 - DNA, 33 bp, Homo sapien
cccccacaactgtcaatatctgcaaaataccag

SEQ ID NO: 15551 - DNA, 33 bp, Homo sapien
tctgaccacaatgcaacataattagaactcaac

SEQ ID NO: 15552 - DNA, 33 bp, Homo sapien
tctgaccacaatgcaatataattagaactcaac

SEQ ID NO: 15553 - DNA, 33 bp, Homo sapien
accagtatgaacatccaagaactagacaaagca

SEQ ID NO: 15554 - DNA, 33 bp, Homo sapien
accagtatgaacatccgagaactagacaaagca

SEQ ID NO: 15555 - DNA, 33 bp, Homo sapien
gccctaccagaaacagaaggatgaattgggggg

SEQ ID NO: 15556 - DNA, 33 bp, Homo sapien
gccctaccagaaacagcaggatgaattgggggg

SEQ ID NO: 15557 - DNA, 33 bp, Homo sapien
ggtgggaaggtaggagaaagttcagctgtgttc

SEQ ID NO: 15558 - DNA, 33 bp, Homo sapien
ggtgggaaggtaggagtaagttcagctgtgttc

SEQ ID NO: 15559 - DNA, 33 bp, Homo sapien
caacactgctgttcaaactattctgtagagtcc

SEQ ID NO: 15560 - DNA, 33 bp, Homo sapien
caacactgctgttcaatctattctgtagagtcc

SEQ ID NO: 15561 - DNA, 33 bp, Homo sapien
gggcaaatgagattagaactgagaatttactga

SEQ ID NO: 15562 - DNA, 33 bp, Homo sapien
gggcaaatgagattaggactgagaatttactga

SEQ ID NO: 15563 - DNA, 33 bp, Homo sapien
attccttgaaacattcaattttagcttccaggg

SEQ ID NO: 15564 - DNA, 33 bp, Homo sapien
attccttgaaacattcgattttagcttccaggg

SEQ ID NO: 15565 - DNA, 33 bp, Homo sapien
aataccttcagtgccacgaggtaaatccaaaga

SEQ ID NO: 15566 - DNA, 33 bp, Homo sapien
aataccttcagtgccatgaggtaaatccaaaga

SEQ ID NO: 15567 - DNA, 33 bp, Homo sapien
ggactctactctgttccattaatctacatgtct

SEQ ID NO: 15568 - DNA, 33 bp, Homo sapien
ggactctactctgttctattaatctacatgtct

SEQ ID NO: 15569 - DNA, 33 bp, Homo sapien
ggctgggaaggcgttaagaatcttacaatcatg

SEQ ID NO: 15570 - DNA, 33 bp, Homo sapien
ggctgggaaggcgttaggaatcttacaatcatg

SEQ ID NO: 15571 - DNA, 33 bp, Homo sapien
gcttcagagtacaggaagaatttgggaggtcag

SEQ ID NO: 15572 - DNA, 33 bp, Homo sapien
gcttcagagtacaggaggaatttgggaggtcag

SEQ ID NO: 15573 - DNA, 33 bp, Homo sapien
ataaaatagaaaagcaactcataggaaaacttc

SEQ ID NO: 15574 - DNA, 33 bp, Homo sapien
ataaaatagaaaagcagctcataggaaaacttc

SEQ ID NO: 15575 - DNA, 33 bp, Homo sapien
taactaagctaggtgaagtacccaatctcatta

SEQ ID NO: 15576 - DNA, 33 bp, Homo sapien
taactaagctaggtgaggtacccaatctcatta

SEQ ID NO: 15577 - DNA, 33 bp, Homo sapien
tggcaggtggagaatgaactctcagtactagta

SEQ ID NO: 15578 - DNA, 33 bp, Homo sapien
tggcaggtggagaatggactctcagtactagta

SEQ ID NO: 15579 - DNA, 33 bp, Homo sapien
aggcatcctcagcagactagagtcattttgagt

SEQ ID NO: 15580 - DNA, 33 bp, Homo sapien
aggcatcctcagcagattagagtcattttgagt

SEQ ID NO: 15581 - DNA, 33 bp, Homo sapien
cttaatttaaatcccccacaacgttcctagcct

SEQ ID NO: 15582 - DNA, 33 bp, Homo sapien
cttaatttaaatcccctacaacgttcctagcct

SEQ ID NO: 15583 - DNA, 33 bp, Homo sapien
ttctaagtaccctgaaagtaagtacctgagaga

SEQ ID NO: 15584 - DNA, 33 bp, Homo sapien
ttctaagtaccctgaatgtaagtacctgagaga

SEQ ID NO: 15585 - DNA, 33 bp, Homo sapien
agccagcggatctccaggtcctcgcggtgcttg

SEQ ID NO: 15586 - DNA, 33 bp, Homo sapien
agccagcggatctccatgtcctcgcggtgcttg

SEQ ID NO: 15587 - DNA, 33 bp, Homo sapien
gaccatagcttcaatgccaagccttttccttca

SEQ ID NO: 15588 - DNA, 33 bp, Homo sapien
gaccatagcttcaatgtcaagccttttccttca

SEQ ID NO: 15589 - DNA, 33 bp, Homo sapien
ttgcctgtgacatagccactgtaaatcaacata

SEQ ID NO: 15590 - DNA, 33 bp, Homo sapien
ttgcctgtgacatagcgactgtaaatcaacata

SEQ ID NO: 15591 - DNA, 33 bp, Homo sapien
ttatctatgatgtatgcagctcttacgtggttg

SEQ ID NO: 15592 - DNA, 33 bp, Homo sapien
ttatctatgatgtatgtagctcttacgtggttg

SEQ ID NO: 15593 - DNA, 33 bp, Homo sapien
tcaatattgccattgaaataaaaaagatacaga

SEQ ID NO: 15594 - DNA, 33 bp, Homo sapien
tcaatattgccattgagataaaaaagatacaga

SEQ ID NO: 15595 - DNA, 33 bp, Homo sapien
tttaagcatttaattgcaatgtgtaggtaactc

SEQ ID NO: 15596 - DNA, 33 bp, Homo sapien
tttaagcatttaattgtaatgtgtaggtaactc

SEQ ID NO: 15597 - DNA, 33 bp, Homo sapien
taaaaataaatattcgcccttctgaaaatcgtt

SEQ ID NO: 15598 - DNA, 33 bp, Homo sapien
taaaaataaatattcgtccttctgaaaatcgtt

SEQ ID NO: 15599 - DNA, 33 bp, Homo sapien
tctgtttcctgacataagcaaaaggttcccctt

SEQ ID NO: 15600 - DNA, 33 bp, Homo sapien
tctgtttcctgacatacgcaaaaggttcccctt

SEQ ID NO: 15601 - DNA, 33 bp, Homo sapien
aaaggacagcaatatgaatccccgagataccaa

SEQ ID NO: 15602 - DNA, 33 bp, Homo sapien
aaaggacagcaatatggatccccgagataccaa

SEQ ID NO: 15603 - DNA, 33 bp, Homo sapien
cactaaacttctttccgcttaacagaatcagca

SEQ ID NO: 15604 - DNA, 33 bp, Homo sapien
cactaaacttctttcctcttaacagaatcagca

SEQ ID NO: 15605 - DNA, 33 bp, Homo sapien
gattaatctgtggatgcattctgggggaggcta

SEQ ID NO: 15606 - DNA, 33 bp, Homo sapien
gattaatctgtggatgtattctgggggaggcta

SEQ ID NO: 15607 - DNA, 33 bp, Homo sapien
acccattccatcctcacgaactgtgtcttatta

SEQ ID NO: 15608 - DNA, 33 bp, Homo sapien
acccattccatcctcaggaactgtgtcttatta

SEQ ID NO: 15609 - DNA, 33 bp, Homo sapien
cagtactatgtttgcaaaagatttggcttttaa

SEQ ID NO: 15610 - DNA, 33 bp, Homo sapien
cagtactatgtttgcacaagatttggcttttaa

SEQ ID NO: 15611 - DNA, 33 bp, Homo sapien
ctaccacttcaaaactgagccacttgaaagaaa

SEQ ID NO: 15612 - DNA, 33 bp, Homo sapien
ctaccacttcaaaacttagccacttgaaagaaa

SEQ ID NO: 15613 - DNA, 33 bp, Homo sapien
gtggctgaaaggtaaccacataattgataagag

SEQ ID NO: 15614 - DNA, 33 bp, Homo sapien
gtggctgaaaggtaactacataattgataagag

SEQ ID NO: 15615 - DNA, 33 bp, Homo sapien
agattaaaaatcttagccctcgtaacagcattc

SEQ ID NO: 15616 - DNA, 33 bp, Homo sapien
agattaaaaatcttagtcctcgtaacagcattc

SEQ ID NO: 15617 - DNA, 33 bp, Homo sapien
tcatttcacttaacaacgtccttcagttccatc

SEQ ID NO: 15618 - DNA, 33 bp, Homo sapien
tcatttcacttaacaatgtccttcagttccatc

SEQ ID NO: 15619 - DNA, 33 bp, Homo sapien
gatcataatatgaacaaccccaaaggagaagat

SEQ ID NO: 15620 - DNA, 33 bp, Homo sapien
gatcataatatgaacatccccaaaggagaagat

SEQ ID NO: 15621 - DNA, 33 bp, Homo sapien
ctgctgaatgcttctggcaactctatggggaag

SEQ ID NO: 15622 - DNA, 33 bp, Homo sapien
ctgctgaatgcttctgtcaactctatggggaag

SEQ ID NO: 15623 - DNA, 33 bp, Homo sapien
aagatggtgtacagcacgataccctttttcata

SEQ ID NO: 15624 - DNA, 33 bp, Homo sapien
aagatggtgtacagcatgataccctttttcata

SEQ ID NO: 15625 - DNA, 33 bp, Homo sapien
cctcatcctccacaacaatgaccaccaggagct

SEQ ID NO: 15626 - DNA, 33 bp, Homo sapien
cctcatcctccacaacgatgaccaccaggagct

SEQ ID NO: 15627 - DNA, 33 bp, Homo sapien
gcagcatccacaaaggaaaggtgattttcttgt

SEQ ID NO: 15628 - DNA, 33 bp, Homo sapien
gcagcatccacaaagggaaggtgattttcttgt

SEQ ID NO: 15629 - DNA, 33 bp, Homo sapien
attccatctcagacctaagctatatgctttctg

SEQ ID NO: 15630 - DNA, 33 bp, Homo sapien
attccatctcagacctgagctatatgctttctg

SEQ ID NO: 15631 - DNA, 33 bp, Homo sapien
gaactgcttattccagacactcttattaacatc

SEQ ID NO: 15632 - DNA, 33 bp, Homo sapien
gaactgcttattccagtcactcttattaacatc

SEQ ID NO: 15633 - DNA, 33 bp, Homo sapien
tagagggaggttcaaacagtcaaacaggaataa

SEQ ID NO: 15634 - DNA, 33 bp, Homo sapien
tagagggaggttcaaatagtcaaacaggaataa

SEQ ID NO: 15635 - DNA, 33 bp, Homo sapien
accagctacttaccaacagtgtgaagttggatg

SEQ ID NO: 15636 - DNA, 33 bp, Homo sapien
accagctacttaccaatagtgtgaagttggatg

SEQ ID NO: 15637 - DNA, 33 bp, Homo sapien
atgcatagaacctataatcaacttttaatcccc

SEQ ID NO: 15638 - DNA, 33 bp, Homo sapien
atgcatagaacctatagtcaacttttaatcccc

SEQ ID NO: 15639 - DNA, 33 bp, Homo sapien
ctccaccaacagacccagaatggtacttatgga

SEQ ID NO: 15640 - DNA, 33 bp, Homo sapien
ctccaccaacagacccggaatggtacttatgga

SEQ ID NO: 15641 - DNA, 33 bp, Homo sapien
ccagacctccacaaacaagctttattggggact

SEQ ID NO: 15642 - DNA, 33 bp, Homo sapien
ccagacctccacaaactagctttattggggact

SEQ ID NO: 15643 - DNA, 33 bp, Homo sapien
attctgaagactttacaggacacatggtgctgg

SEQ ID NO: 15644 - DNA, 33 bp, Homo sapien
attctgaagactttacgggacacatggtgctgg

SEQ ID NO: 15645 - DNA, 33 bp, Homo sapien
aacaactgcaagtgagaatattaagctaaaatg

SEQ ID NO: 15646 - DNA, 33 bp, Homo sapien
aacaactgcaagtgaggatattaagctaaaatg

SEQ ID NO: 15647 - DNA, 33 bp, Homo sapien
cagccattacaaataaagaaatcatgtcctctg

SEQ ID NO: 15648 - DNA, 33 bp, Homo sapien
cagccattacaaataatgaaatcatgtcctctg

SEQ ID NO: 15649 - DNA, 33 bp, Homo sapien
ttgattacaggccttcactgtgcccagttagct

SEQ ID NO: 15650 - DNA, 33 bp, Homo sapien
ttgattacaggccttcgctgtgcccagttagct

SEQ ID NO: 15651 - DNA, 33 bp, Homo sapien
cacggaattctccaaaaccagtactcgaggatc

SEQ ID NO: 15652 - DNA, 33 bp, Homo sapien
cacggaattctccaaatccagtactcgaggatc

SEQ ID NO: 15653 - DNA, 33 bp, Homo sapien
tgaatcctcacaacaactctaagtggtcccatt

SEQ ID NO: 15654 - DNA, 33 bp, Homo sapien
tgaatcctcacaacaattctaagtggtcccatt

SEQ ID NO: 15655 - DNA, 33 bp, Homo sapien
gctcaacatccccaaactagccaacctgcttcc

SEQ ID NO: 15656 - DNA, 33 bp, Homo sapien
gctcaacatccccaaagtagccaacctgcttcc

SEQ ID NO: 15657 - DNA, 33 bp, Homo sapien
gctcagggtacagggccatgcagtagagaaacc

SEQ ID NO: 15658 - DNA, 33 bp, Homo sapien
gctcagggtacagggctatgcagtagagaaacc

SEQ ID NO: 15659 - DNA, 33 bp, Homo sapien
acctcctctctacaacaatgctggtgctcaggg

SEQ ID NO: 15660 - DNA, 33 bp, Homo sapien
acctcctctctacaacgatgctggtgctcaggg

SEQ ID NO: 15661 - DNA, 33 bp, Homo sapien
tatcaggggtgcagaacggaagagaaagagaag

SEQ ID NO: 15662 - DNA, 33 bp, Homo sapien
tatcaggggtgcagaatggaagagaaagagaag

SEQ ID NO: 15663 - DNA, 33 bp, Homo sapien
agcatctattatgatgacacttaaatgggtgct

SEQ ID NO: 15664 - DNA, 33 bp, Homo sapien
agcatctattatgatggcacttaaatgggtgct

SEQ ID NO: 15665 - DNA, 33 bp, Homo sapien
tttaatacttgagaaaacattacaaatttgggt

SEQ ID NO: 15666 - DNA, 33 bp, Homo sapien
tttaatacttgagaaagcattacaaatttgggt

SEQ ID NO: 15667 - DNA, 33 bp, Homo sapien
tgacccaaatgataacacagattcctgggagag

SEQ ID NO: 15668 - DNA, 33 bp, Homo sapien
tgacccaaatgataacgcagattcctgggagag

SEQ ID NO: 15669 - DNA, 33 bp, Homo sapien
aaatgtccaaaagaaagcatgtcatctacctcc

SEQ ID NO: 15670 - DNA, 33 bp, Homo sapien
aaatgtccaaaagaaatcatgtcatctacctcc

SEQ ID NO: 15671 - DNA, 33 bp, Homo sapien; identical to SEQ ID NO: 15669

SEQ ID NO: 15672 - DNA, 33 bp, Homo sapien; identical to SEQ ID NO: 15670

SEQ ID NO: 15673 - DNA, 33 bp, Homo sapien
gggtttgtcgagtaaccgggatatgtttactac

SEQ ID NO: 15674 - DNA, 33 bp, Homo sapien
gggtttgtcgagtaactgggatatgtttactac

SEQ ID NO: 15675 - DNA, 33 bp, Homo sapien
gcacacttaatcagaaaaaaggccactgaaaaa

SEQ ID NO: 15676 - DNA, 33 bp, Homo sapien
gcacacttaatcagaagaaaggccactgaaaaa

SEQ ID NO: 15677 - DNA, 33 bp, Homo sapien
tcatacaccttgatttcaaacttactgcaaagc

SEQ ID NO: 15678 - DNA, 33 bp, Homo sapien
tcatacaccttgatttgaaacttactgcaaagc

SEQ ID NO: 15679 - DNA, 33 bp, Homo sapien
cacatgaatagataaacagttaatcaatggttt

SEQ ID NO: 15680 - DNA, 33 bp, Homo sapien
cacatgaatagataaagagttaatcaatggttt

SEQ ID NO: 15681 - DNA, 33 bp, Homo sapien
gcaggttggaaacagacagaagaccaatcattt

SEQ ID NO: 15682 - DNA, 33 bp, Homo sapien
gcaggttggaaacagagagaagaccaatcattt

SEQ ID NO: 15683 - DNA, 33 bp, Homo sapien
gatgatgaatagacaaccatttatgcaggaatg

SEQ ID NO: 15684 - DNA, 33 bp, Homo sapien
gatgatgaatagacaatcatttatgcaggaatg

SEQ ID NO: 15685 - DNA, 33 bp, Homo sapien
ctcacttccttcttctaacaagaccctcacccc

SEQ ID NO: 15686 - DNA, 33 bp, Homo sapien
ctcacttccttcttctgacaagaccctcacccc

SEQ ID NO: 15687 - DNA, 33 bp, Homo sapien
tggctctcctcccacacacccggactgtgagct

SEQ ID NO: 15688 - DNA, 33 bp, Homo sapien
tggctctcctcccacatacccggactgtgagct

SEQ ID NO: 15689 - DNA, 33 bp, Homo sapien
ccattttagttttctagggctattgtgaaaaaa

SEQ ID NO: 15690 - DNA, 33 bp, Homo sapien
ccattttagttttctatggctattgtgaaaaaa

SEQ ID NO: 15691 - DNA, 33 bp, Homo sapien
gctggcaactctaacagggcacaatggctagat

SEQ ID NO: 15692 - DNA, 33 bp, Homo sapien
gctggcaactctaacatggcacaatggctagat

SEQ ID NO: 15693 - DNA, 33 bp, Homo sapien
tttcttctttgtcatccctcagtcttcttgcct

SEQ ID NO: 15694 - DNA, 33 bp, Homo sapien
tttcttctttgtcatctctcagtcttcttgcct

SEQ ID NO: 15695 - DNA, 33 bp, Homo sapien
agttaaatattagaaactgatagagccagtgcc

SEQ ID NO: 15696 - DNA, 33 bp, Homo sapien
agttaaatattagaaattgatagagccagtgcc

SEQ ID NO: 15697 - DNA, 33 bp, Homo sapien
aaatggcctgagctaactggactgtgggagctc

SEQ ID NO: 15698 - DNA, 33 bp, Homo sapien
aaatggcctgagctaagtggactgtgggagctc

SEQ ID NO: 15699 - DNA, 33 bp, Homo sapien
tgtcttctatgtggacaaagtaggaaagggcat

SEQ ID NO: 15700 - DNA, 33 bp, Homo sapien
tgtcttctatgtggacgaagtaggaaagggcat

SEQ ID NO: 15701 - DNA, 33 bp, Homo sapien
gatacagctccacaaaattctagacttttatcc

SEQ ID NO: 15702 - DNA, 33 bp, Homo sapien
gatacagctccacaaacttctagacttttatcc

SEQ ID NO: 15703 - DNA, 33 bp, Homo sapien
agtggtggataataaacgaacaagcaaaagagt

SEQ ID NO: 15704 - DNA, 33 bp, Homo sapien
agtggtggataataaatgaacaagcaaaagagt

SEQ ID NO: 15705 - DNA, 33 bp, Homo sapien
aggtcagtagacaccacgtattgaggtgtcaat

SEQ ID NO: 15706 - DNA, 33 bp, Homo sapien
aggtcagtagacaccatgtattgaggtgtcaat

SEQ ID NO: 15707 - DNA, 33 bp, Homo sapien
cagttcaagttggtgacggttttctgcatttct

SEQ ID NO: 15708 - DNA, 33 bp, Homo sapien
cagttcaagttggtgatggttttctgcatttct

SEQ ID NO: 15709 - DNA, 33 bp, Homo sapien
aacccactcatcgtaacaacaaatgtatgagat

SEQ ID NO: 15710 - DNA, 33 bp, Homo sapien
aacccactcatcgtaataacaaatgtatgagat

SEQ ID NO: 15711 - DNA, 33 bp, Homo sapien
tttttacgtttatccacgtgaccattttttcat

SEQ ID NO: 15712 - DNA, 33 bp, Homo sapien
tttttacgtttatccatgtgaccattttttcat

SEQ ID NO: 15713 - DNA, 33 bp, Homo sapien
tatgtgattggagttaataacaatttgtatact

SEQ ID NO: 15714 - DNA, 33 bp, Homo sapien
tatgtgattggagttactaacaatttgtatact

SEQ ID NO: 15715 - DNA, 33 bp, Homo sapien
gctctggatatacccaatcatgctttatctgcc

SEQ ID NO: 15716 - DNA, 33 bp, Homo sapien
gctctggatatacccactcatgctttatctgcc

SEQ ID NO: 15717 - DNA, 33 bp, Homo sapien
gagagaagattgcttgaaaatggatcagagaat

SEQ ID NO: 15718 - DNA, 33 bp, Homo sapien
gagagaagattgcttggaaatggatcagagaat

SEQ ID NO: 15719 - DNA, 33 bp, Homo sapien
aattatcttccaacaaatagattaggaggatga

SEQ ID NO: 15720 - DNA, 33 bp, Homo sapien
aattatcttccaacaagtagattaggaggatga

SEQ ID NO: 15721 - DNA, 33 bp, Homo sapien
gaaggacttggcaatcaacagtcactcaatata

SEQ ID NO: 15722 - DNA, 33 bp, Homo sapien
gaaggacttggcaatcgacagtcactcaatata

SEQ ID NO: 15723 - DNA, 33 bp, Homo sapien
agagacataaaggaataagccagaatttatctt

SEQ ID NO: 15724 - DNA, 33 bp, Homo sapien
agagacataaaggaatgagccagaatttatctt

SEQ ID NO: 15725 - DNA, 33 bp, Homo sapien
gccctgtaatccacagaatcttaaaatcccccg

SEQ ID NO: 15726 - DNA, 33 bp, Homo sapien
gccctgtaatccacagcatcttaaaatcccccg

SEQ ID NO: 15727 - DNA, 33 bp, Homo sapien
ctttgtcaatcttcaaatgccagagtcccctaa

SEQ ID NO: 15728 - DNA, 33 bp, Homo sapien
ctttgtcaatcttcaactgccagagtcccctaa

SEQ ID NO: 15729 - DNA, 33 bp, Homo sapien
ttagaatggcaactggaacaccataacagtgct

SEQ ID NO: 15730 - DNA, 33 bp, Homo sapien
ttagaatggcaactgggacaccataacagtgct

SEQ ID NO: 15731 - DNA, 33 bp, Homo sapien; identical to SEQ ID NO: 15729

SEQ ID NO: 15732 - DNA, 33 bp, Homo sapien; identical to SEQ ID NO: 15730

SEQ ID NO: 15733 - DNA, 33 bp, Homo sapien
acatggccagctagctaactgactgaggtaaag

SEQ ID NO: 15734 - DNA, 33 bp, Homo sapien
acatggccagctagcttactgactgaggtaaag

SEQ ID NO: 15735 - DNA, 33 bp, Homo sapien
tcatattccaaaactgaaaagattgttcaatat

SEQ ID NO: 15736 - DNA, 33 bp, Homo sapien
tcatattccaaaactgcaaagattgttcaatat

SEQ ID NO: 15737 - DNA, 33 bp, Homo sapien
agtaagtttccccaagactcacggaatttccac

SEQ ID NO: 15738 - DNA, 33 bp, Homo sapien
agtaagtttccccaaggctcacggaatttccac

SEQ ID NO: 15739 - DNA, 33 bp, Homo sapien; identical to SEQ ID NO: 15737

SEQ ID NO: 15740 - DNA, 33 bp, Homo sapien; identical to SEQ ID NO: 15738

SEQ ID NO: 15741 - DNA, 33 bp, Homo sapien
cccaaatgctattttagctcaacaaatatttac

SEQ ID NO: 15742 - DNA, 33 bp, Homo sapien
cccaaatgctattttatctcaacaaatatttac

SEQ ID NO: 15743 - DNA, 33 bp, Homo sapien
ctccccatatccaataaggacaggcacttggga

SEQ ID NO: 15744 - DNA, 33 bp, Homo sapien
ctccccatatccaatagggacaggcacttggga

SEQ ID NO: 15745 - DNA, 33 bp, Homo sapien
aaggcattcctcatacagcaaaaaaccaggctg

SEQ ID NO: 15746 - DNA, 33 bp, Homo sapien
aaggcattcctcatacggcaaaaaaccaggctg

SEQ ID NO: 15747 - DNA, 33 bp, Homo sapien
caatgattcatctctacgacagactagtgaatt

SEQ ID NO: 15748 - DNA, 33 bp, Homo sapien
caatgattcatctctatgacagactagtgaatt

SEQ ID NO: 15749 - DNA, 33 bp, Homo sapien
ttgtctggctgacaataatgtacataggtaggt

SEQ ID NO: 15750 - DNA, 33 bp, Homo sapien
ttgtctggctgacaatcatgtacataggtaggt

SEQ ID NO: 15751 - DNA, 33 bp, Homo sapien
atggaaatgcgtccggccccagtgtgacgggga

SEQ ID NO: 15752 - DNA, 33 bp, Homo sapien
atggaaatgcgtccggtcccagtgtgacgggga

SEQ ID NO: 15753 - DNA, 33 bp, Homo sapien
gggcccgactgcacacgcatgtgaacacacaca

SEQ ID NO: 15754 - DNA, 33 bp, Homo sapien
gggcccgactgcacactcatgtgaacacacaca

SEQ ID NO: 15755 - DNA, 33 bp, Homo sapien
catggaactgatttcagtcaacattttaattaa

SEQ ID NO: 15756 - DNA, 33 bp, Homo sapien
catggaactgatttcattcaacattttaattaa

SEQ ID NO: 15757 - DNA, 33 bp, Homo sapien
ggacaccccttgctcaatcaagaagccacatcc

SEQ ID NO: 15758 - DNA, 33 bp, Homo sapien
ggacaccccttgctcagtcaagaagccacatcc

SEQ ID NO: 15759 - DNA, 33 bp, Homo sapien
tctgatgtgtcagagtaaaaagactttatgcaa

SEQ ID NO: 15760 - DNA, 33 bp, Homo sapien
tctgatgtgtcagagtgaaaagactttatgcaa

SEQ ID NO: 15761 - DNA, 33 bp, Homo sapien
ggactctctggttagtcaatgtggaaaggccag

SEQ ID NO: 15762 - DNA, 33 bp, Homo sapien
ggactctctggttagttaatgtggaaaggccag

SEQ ID NO: 15763 - DNA, 33 bp, Homo sapien
caaatcccatttccacgaataataacggctgtt

SEQ ID NO: 15764 - DNA, 33 bp, Homo sapien
caaatcccatttccactaataataacggctgtt

SEQ ID NO: 15765 - DNA, 33 bp, Homo sapien
actcaagcgaatccacagtgaagcaaacagcct

SEQ ID NO: 15766 - DNA, 33 bp, Homo sapien
actcaagcgaatccacggtgaagcaaacagcct

SEQ ID NO: 15767 - DNA, 33 bp, Homo sapien
cctgaaattgaatggacagcctgagtgctacaa

SEQ ID NO: 15768 - DNA, 33 bp, Homo sapien
cctgaaattgaatggagagcctgagtgctacaa

SEQ ID NO: 15769 - DNA, 33 bp, Homo sapien
cttatggagcagtggcagataccagcacacatg

SEQ ID NO: 15770 - DNA, 33 bp, Homo sapien
cttatggagcagtggcggataccagcacacatg

SEQ ID NO: 15771 - DNA, 33 bp, Homo sapien
tccaccaaaatcataaactcacttccaatgaag

SEQ ID NO: 15772 - DNA, 33 bp, Homo sapien
tccaccaaaatcataagctcacttccaatgaag

SEQ ID NO: 15773 - DNA, 33 bp, Homo sapien
caaatcaagtgatgcaccttagtcgccaacaac

SEQ ID NO: 15774 - DNA, 33 bp, Homo sapien
caaatcaagtgatgcagcttagtcgccaacaac

SEQ ID NO: 15775 - DNA, 33 bp, Homo sapien
ctactcttcacaaacaatcctgagaagctggat

SEQ ID NO: 15776 - DNA, 33 bp, Homo sapien
ctactcttcacaaacagtcctgagaagctggat

SEQ ID NO: 15777 - DNA, 33 bp, Homo sapien
gccaagatttgaatcagtatattggctgtgtga

SEQ ID NO: 15778 - DNA, 33 bp, Homo sapien
gccaagatttgaatcattatattggctgtgtga

SEQ ID NO: 15779 - DNA, 33 bp, Homo sapien
cctgctatgaagtctcaaagaaggataatatca

SEQ ID NO: 15780 - DNA, 33 bp, Homo sapien
cctgctatgaagtctctaagaaggataatatca

SEQ ID NO: 15781 - DNA, 33 bp, Homo sapien
accttaggtccatacccgaacagcttggtggtc

SEQ ID NO: 15782 - DNA, 33 bp, Homo sapien
accttaggtccatacctgaacagcttggtggtc

SEQ ID NO: 15783 - DNA, 33 bp, Homo sapien
ccctcttgtcagaactcagaaccaacttgtcac

SEQ ID NO: 15784 - DNA, 33 bp, Homo sapien
ccctcttgtcagaactgagaaccaacttgtcac

SEQ ID NO: 15785 - DNA, 33 bp, Homo sapien
atttggatgaaagtgacagtcagggtttctcta

SEQ ID NO: 15786 - DNA, 33 bp, Homo sapien
atttggatgaaagtgagagtcagggtttctcta

SEQ ID NO: 15787 - DNA, 33 bp, Homo sapien
tccacgaattccacaagtccaagacatcttcat

SEQ ID NO: 15788 - DNA, 33 bp, Homo sapien
tccacgaattccacaattccaagacatcttcat

SEQ ID NO: 15789 - DNA, 33 bp, Homo sapien
ttttcttagcaccttgaatagtacttgatgtgt

SEQ ID NO: 15790 - DNA, 33 bp, Homo sapien
ttttcttagcaccttggatagtacttgatgtgt

SEQ ID NO: 15791 - DNA, 33 bp, Homo sapien
ttccaagtataggaaaaatgaggggatagtact

SEQ ID NO: 15792 - DNA, 33 bp, Homo sapien
ttccaagtataggaaacatgaggggatagtact

SEQ ID NO: 15793 - DNA, 33 bp, Homo sapien
tcacatgtatggcaaaattgtatggagttctaa

SEQ ID NO: 15794 - DNA, 33 bp, Homo sapien
tcacatgtatggcaaagttgtatggagttctaa

SEQ ID NO: 15795 - DNA, 33 bp, Homo sapien
taacataatgcctatgccataatgggccctagt

SEQ ID NO: 15796 - DNA, 33 bp, Homo sapien
taacataatgcctatgtcataatgggccctagt

SEQ ID NO: 15797 - DNA, 33 bp, Homo sapien
gggcaggtgtgtattacagagggatgtattaac

SEQ ID NO: 15798 - DNA, 33 bp, Homo sapien
gggcaggtgtgtattatagagggatgtattaac

SEQ ID NO: 15799 - DNA, 33 bp, Homo sapien
atagggtaggctgaccaaagttagagtagccat

SEQ ID NO: 15800 - DNA, 33 bp, Homo sapien
atagggtaggctgaccgaagttagagtagccat

SEQ ID NO: 15801 - DNA, 33 bp, Homo sapien
aatctgaccaaattaacactccagtctgactgc

SEQ ID NO: 15802 - DNA, 33 bp, Homo sapien
aatctgaccaaattaatactccagtctgactgc

SEQ ID NO: 15803 - DNA, 33 bp, Homo sapien
cttggttctctgacagcagacgaaggtaataca

SEQ ID NO: 15804 - DNA, 33 bp, Homo sapien
cttggttctctgacagtagacgaaggtaataca

SEQ ID NO: 15805 - DNA, 33 bp, Homo sapien
taagccaggaataagacactacgaaaaaagacc

SEQ ID NO: 15806 - DNA, 33 bp, Homo sapien
taagccaggaataagatactacgaaaaaagacc

SEQ ID NO: 15807 - DNA, 33 bp, Homo sapien
aagaagggcaaacaaaagcaagtaggtgaggag

SEQ ID NO: 15808 - DNA, 33 bp, Homo sapien
aagaagggcaaacaaaggcaagtaggtgaggag

SEQ ID NO: 15809 - DNA, 33 bp, Homo sapien
aagggggcaggcgaacagagttaaagggcttcc

SEQ ID NO: 15810 - DNA, 33 bp, Homo sapien
aagggggcaggcgaacggagttaaagggcttcc

SEQ ID NO: 15811 - DNA, 33 bp, Homo sapien
actgcctcaatagataaataaagatgtatggat

SEQ ID NO: 15812 - DNA, 33 bp, Homo sapien
actgcctcaatagatagataaagatgtatggat

SEQ ID NO: 15813 - DNA, 33 bp, Homo sapien
tcttcttccaacccccaaaaatatgttttcatt

SEQ ID NO: 15814 - DNA, 33 bp, Homo sapien
tcttcttccaaccccccaaaatatgttttcatt

SEQ ID NO: 15815 - DNA, 33 bp, Homo sapien
agtttcatctgaatatgactcgtccacaaaaag

SEQ ID NO: 15816 - DNA, 33 bp, Homo sapien
agtttcatctgaatattactcgtccacaaaaag

SEQ ID NO: 15817 - DNA, 33 bp, Homo sapien
ggaggtacaagtgaaacgtttgtcagagctgga

SEQ ID NO: 15818 - DNA, 33 bp, Homo sapien
ggaggtacaagtgaaatgtttgtcagagctgga

SEQ ID NO: 15819 - DNA, 33 bp, Homo sapien
tccttttacctggccactccgttctctctcctg

SEQ ID NO: 15820 - DNA, 33 bp, Homo sapien
tccttttacctggccattccgttctctctcctg

SEQ ID NO: 15821 - DNA, 33 bp, Homo sapien
ctactgtgccccaggacgcttggctttgttgca

SEQ ID NO: 15822 - DNA, 33 bp, Homo sapien
ctactgtgccccaggatgcttggctttgttgca

SEQ ID NO: 15823 - DNA, 33 bp, Homo sapien
tggtggagaaggtcagcccgggaagagaaaaga

SEQ ID NO: 15824 - DNA, 33 bp, Homo sapien
tggtggagaaggtcagtccgggaagagaaaaga

SEQ ID NO: 15825 - DNA, 33 bp, Homo sapien
gctagaatccaatatcccttctttacagttttg

SEQ ID NO: 15826 - DNA, 33 bp, Homo sapien
gctagaatccaatatctcttctttacagttttg

SEQ ID NO: 15827 - DNA, 33 bp, Homo sapien
atacctttagctaagcagcccagatcatctcag

SEQ ID NO: 15828 - DNA, 33 bp, Homo sapien
atacctttagctaagcggcccagatcatctcag

SEQ ID NO: 15829 - DNA, 33 bp, Homo sapien
cagctcagccttaaagcatggcattcttagaag

SEQ ID NO: 15830 - DNA, 33 bp, Homo sapien
cagctcagccttaaaggatggcattcttagaag

SEQ ID NO: 15831 - DNA, 33 bp, Homo sapien
taatccaaccatcaacactcagagaaataagat

SEQ ID NO: 15832 - DNA, 33 bp, Homo sapien
taatccaaccatcaacgctcagagaaataagat

SEQ ID NO: 15833 - DNA, 33 bp, Homo sapien
aggatccctgcagctggcaatagtagaaaagaa

SEQ ID NO: 15834 - DNA, 33 bp, Homo sapien
aggatccctgcagctgtcaatagtagaaaagaa

SEQ ID NO: 15835 - DNA, 33 bp, Homo sapien
tgtagaaagggtgtcaaaatcaggattagggtg

SEQ ID NO: 15836 - DNA, 33 bp, Homo sapien
tgtagaaagggtgtcacaatcaggattagggtg

SEQ ID NO: 15837 - DNA, 33 bp, Homo sapien
tgggtcccacgtggaaacctcttagatccagaa

SEQ ID NO: 15838 - DNA, 33 bp, Homo sapien
tgggtcccacgtggaagcctcttagatccagaa

SEQ ID NO: 15839 - DNA, 33 bp, Homo sapien
agccaggagcccctcccagtgtgtcatcatcca

SEQ ID NO: 15840 - DNA, 33 bp, Homo sapien
agccaggagcccctcctagtgtgtcatcatcca

SEQ ID NO: 15841 - DNA, 33 bp, Homo sapien
gcttcaattcaggggcaatacattttgtgagtg

SEQ ID NO: 15842 - DNA, 33 bp, Homo sapien
gcttcaattcaggggcgatacattttgtgagtg

SEQ ID NO: 15843 - DNA, 33 bp, Homo sapien
cctgatcacatttataactggaatgaacttatt

SEQ ID NO: 15844 - DNA, 33 bp, Homo sapien
cctgatcacatttatatctggaatgaacttatt

SEQ ID NO: 15845 - DNA, 33 bp, Homo sapien
aagagagaaagcagagaataaggaaggagaatg

SEQ ID NO: 15846 - DNA, 33 bp, Homo sapien
aagagagaaagcagaggataaggaaggagaatg

SEQ ID NO: 15847 - DNA, 33 bp, Homo sapien
ctgccctctgcataaccatccaagagcaaacac

SEQ ID NO: 15848 - DNA, 33 bp, Homo sapien
ctgccctctgcataactatccaagagcaaacac

SEQ ID NO: 15849 - DNA, 33 bp, Homo sapien
cactgtaggtaccttcgacaaagcatctataac

SEQ ID NO: 15850 - DNA, 33 bp, Homo sapien
cactgtaggtaccttctacaaagcatctataac

SEQ ID NO: 15851 - DNA, 33 bp, Homo sapien
gagagtggcatgtgaactgagtgtcctgaagaa

SEQ ID NO: 15852 - DNA, 33 bp, Homo sapien
gagagtggcatgtgaattgagtgtcctgaagaa

SEQ ID NO: 15853 - DNA, 33 bp, Homo sapien
caatatgaggacttgcaactgtttccctgggcc

SEQ ID NO: 15854 - DNA, 33 bp, Homo sapien
caatatgaggacttgcgactgtttccctgggcc

SEQ ID NO: 15855 - DNA, 33 bp, Homo sapien
actgtgtgcctgccctcaaattgctcactatct

SEQ ID NO: 15856 - DNA, 33 bp, Homo sapien
actgtgtgcctgcccttaaattgctcactatct

SEQ ID NO: 15857 - DNA, 33 bp, Homo sapien
agaaacaactgttctgacaatttgctcctgagc

SEQ ID NO: 15858 - DNA, 33 bp, Homo sapien
agaaacaactgttctggcaatttgctcctgagc

SEQ ID NO: 15859 - DNA, 33 bp, Homo sapien
atctgctgtgagtcaaatgagagcttcccatct

SEQ ID NO: 15860 - DNA, 33 bp, Homo sapien
atctgctgtgagtcaattgagagcttcccatct

SEQ ID NO: 15861 - DNA, 33 bp, Homo sapien
aatgggagagaggacccaaaatacaaggaatat

SEQ ID NO: 15862 - DNA, 33 bp, Homo sapien
aatgggagagaggacctaaaatacaaggaatat

SEQ ID NO: 15863 - DNA, 33 bp, Homo sapien
atagaatacaacaaagaaagactgggccttgca

SEQ ID NO: 15864 - DNA, 33 bp, Homo sapien
atagaatacaacaaagcaagactgggccttgca

SEQ ID NO: 15865 - DNA, 33 bp, Homo sapien
tctccttcttccccaggatcaatcagttggcag

SEQ ID NO: 15866 - DNA, 33 bp, Homo sapien
tctccttcttccccagtatcaatcagttggcag

SEQ ID NO: 15867 - DNA, 33 bp, Homo sapien
attatataaacggtacagaatattgagaggctt

SEQ ID NO: 15868 - DNA, 33 bp, Homo sapien
attatataaacggtacggaatattgagaggctt

SEQ ID NO: 15869 - DNA, 33 bp, Homo sapien
ttttccctgacacctgaaaaataaagttgatcc

SEQ ID NO: 15870 - DNA, 33 bp, Homo sapien
ttttccctgacacctggaaaataaagttgatcc

SEQ ID NO: 15871 - DNA, 33 bp, Homo sapien
gtatctcagtactttaaaagagccccataaata

SEQ ID NO: 15872 - DNA, 33 bp, Homo sapien
gtatctcagtactttagaagagccccataaata

SEQ ID NO: 15873 - DNA, 33 bp, Homo sapien
ccaaggacaaggactacgtctttattcaccagt

SEQ ID NO: 15874 - DNA, 33 bp, Homo sapien
ccaaggacaaggactatgtctttattcaccagt

SEQ ID NO: 15875 - DNA, 33 bp, Homo sapien
ttgcgtagctgaagtacacactgaacttgggtt

SEQ ID NO: 15876 - DNA, 33 bp, Homo sapien
ttgcgtagctgaagtatacactgaacttgggtt

SEQ ID NO: 15877 - DNA, 33 bp, Homo sapien
tgaagagagagaggaaaatttgaaccaccactg

SEQ ID NO: 15878 - DNA, 33 bp, Homo sapien
tgaagagagagaggaagatttgaaccaccactg

SEQ ID NO: 15879 - DNA, 33 bp, Homo sapien
tttgtgttctatttcaacctaacatgaagggag

SEQ ID NO: 15880 - DNA, 33 bp, Homo sapien
tttgtgttctatttcagcctaacatgaagggag

SEQ ID NO: 15881 - DNA, 33 bp, Homo sapien
gtttctacaggcaaagaacagggtggaactgca

SEQ ID NO: 15882 - DNA, 33 bp, Homo sapien
gtttctacaggcaaaggacagggtggaactgca

SEQ ID NO: 15883 - DNA, 33 bp, Homo sapien
caggaagcagtcttcacatagaacagggaccag

SEQ ID NO: 15884 - DNA, 33 bp, Homo sapien
caggaagcagtcttcagatagaacagggaccag

SEQ ID NO: 15885 - DNA, 33 bp, Homo sapien
aagaaaactgaatttgaagagattatttgtgta

SEQ ID NO: 15886 - DNA, 33 bp, Homo sapien
aagaaaactgaatttggagagattatttgtgta

SEQ ID NO: 15887 - DNA, 33 bp, Homo sapien
ttagaaacagatctaacgcagttcaagtcctag

SEQ ID NO: 15888 - DNA, 33 bp, Homo sapien
ttagaaacagatctaatgcagttcaagtcctag

SEQ ID NO: 15889 - DNA, 33 bp, Homo sapien
tcagttgggcttattaggcattgtggcagccag

SEQ ID NO: 15890 - DNA, 33 bp, Homo sapien
tcagttgggcttattatgcattgtggcagccag

SEQ ID NO: 15891 - DNA, 33 bp, Homo sapien
attgtgtgcagttctacggagaggcccacatgg

SEQ ID NO: 15892 - DNA, 33 bp, Homo sapien
attgtgtgcagttctatggagaggcccacatgg

SEQ ID NO: 15893 - DNA, 33 bp, Homo sapien
ttgcccaatagccagacgggaattcaagcctgc

SEQ ID NO: 15894 - DNA, 33 bp, Homo sapien
ttgcccaatagccagatgggaattcaagcctgc

SEQ ID NO: 15895 - DNA, 33 bp, Homo sapien
tagtggccaagaacaacggaaatggcctggggc

SEQ ID NO: 15896 - DNA, 33 bp, Homo sapien
tagtggccaagaacaatggaaatggcctggggc

SEQ ID NO: 15897 - DNA, 33 bp, Homo sapien
tttcaataccagtttcaatccttacagcaatcc

SEQ ID NO: 15898 - DNA, 33 bp, Homo sapien
tttcaataccagtttcgatccttacagcaatcc

SEQ ID NO: 15899 - DNA, 33 bp, Homo sapien
ctattgtttccttacacccagttcccaatccat

SEQ ID NO: 15900 - DNA, 33 bp, Homo sapien
ctattgtttccttacatccagttcccaatccat

SEQ ID NO: 15901 - DNA, 33 bp, Homo sapien
agccttgtgataaaagccaagacccttaaatct

SEQ ID NO: 15902 - DNA, 33 bp, Homo sapien
agccttgtgataaaagtcaagacccttaaatct

SEQ ID NO: 15903 - DNA, 33 bp, Homo sapien
agtccctttacgtggacagtctgtggttgcctg

SEQ ID NO: 15904 - DNA, 33 bp, Homo sapien
agtccctttacgtggatagtctgtggttgcctg

SEQ ID NO: 15905 - DNA, 33 bp, Homo sapien
aatgtatatattggcaagtaactcatctgaatt

SEQ ID NO: 15906 - DNA, 33 bp, Homo sapien
aatgtatatattggcaggtaactcatctgaatt

SEQ ID NO: 15907 - DNA, 33 bp, Homo sapien
cgtctcgccaattgcacgatgattgctcctttg

SEQ ID NO: 15908 - DNA, 33 bp, Homo sapien
cgtctcgccaattgcatgatgattgctcctttg

SEQ ID NO: 15909 - DNA, 33 bp, Homo sapien
tttcaagtacatactggatgccatactgttttt

SEQ ID NO: 15910 - DNA, 33 bp, Homo sapien
tttcaagtacatactgtatgccatactgttttt

SEQ ID NO: 15911 - DNA, 33 bp, Homo sapien
ccacctctcccggaatcattaaacattctgcag

SEQ ID NO: 15912 - DNA, 33 bp, Homo sapien
ccacctctcccggaattattaaacattctgcag

SEQ ID NO: 15913 - DNA, 33 bp, Homo sapien
gctcacagtccaatgaagggggcagaaatgcat

SEQ ID NO: 15914 - DNA, 33 bp, Homo sapien
gctcacagtccaatgaggggggcagaaatgcat

SEQ ID NO: 15915 - DNA, 33 bp, Homo sapien
gaaacagaccaaatgcaaaaaacaggaagtgga

SEQ ID NO: 15916 - DNA, 33 bp, Homo sapien
gaaacagaccaaatgcgaaaaacaggaagtgga

SEQ ID NO: 15917 - DNA, 33 bp, Homo sapien
attgaactggagaagtcactaataagtggatcc

SEQ ID NO: 15918 - DNA, 33 bp, Homo sapien
attgaactggagaagttactaataagtggatcc

SEQ ID NO: 15919 - DNA, 33 bp, Homo sapien
ccatccccatccagaactggcacgtgctccagc

SEQ ID NO: 15920 - DNA, 33 bp, Homo sapien
ccatccccatccagaattggcacgtgctccagc

SEQ ID NO: 15921 - DNA, 33 bp, Homo sapien
tggggtccaattctaacgccacctcctctaaga

SEQ ID NO: 15922 - DNA, 33 bp, Homo sapien
tggggtccaattctaatgccacctcctctaaga

SEQ ID NO: 15923 - DNA, 33 bp, Homo sapien
agccctgttgtgggagaccagagaccaagcttc

SEQ ID NO: 15924 - DNA, 33 bp, Homo sapien
agccctgttgtgggaggccagagaccaagcttc

SEQ ID NO: 15925 - DNA, 33 bp, Homo sapien
tatctgggctagaagaaggatccacttgttgca

SEQ ID NO: 15926 - DNA, 33 bp, Homo sapien
tatctgggctagaagagggatccacttgttgca

SEQ ID NO: 15927 - DNA, 33 bp, Homo sapien
atgcttatactgtacactctccattacctcctc

SEQ ID NO: 15928 - DNA, 33 bp, Homo sapien
atgcttatactgtacagtctccattacctcctc

SEQ ID NO: 15929 - DNA, 33 bp, Homo sapien
tctgtactttcacggaacttccaatccttcttt

SEQ ID NO: 15930 - DNA, 33 bp, Homo sapien
tctgtactttcacggagcttccaatccttcttt

SEQ ID NO: 15931 - DNA, 33 bp, Homo sapien
taaaaataagctggaaccttcccctcatctgcc

SEQ ID NO: 15932 - DNA, 33 bp, Homo sapien
taaaaataagctggaatcttcccctcatctgcc

SEQ ID NO: 15933 - DNA, 33 bp, Homo sapien
gcttcagtgtttggacggagggctgcctgactc

SEQ ID NO: 15934 - DNA, 33 bp, Homo sapien
gcttcagtgtttggactgagggctgcctgactc

SEQ ID NO: 15935 - DNA, 33 bp, Homo sapien
aaagcagccaaggtgaaaaactcccagtgtgtg

SEQ ID NO: 15936 - DNA, 33 bp, Homo sapien
aaagcagccaaggtgagaaactcccagtgtgtg

SEQ ID NO: 15937 - DNA, 33 bp, Homo sapien
gagatggcagttacagaccttctcttatggtgc

SEQ ID NO: 15938 - DNA, 33 bp, Homo sapien
gagatggcagttacagcccttctcttatggtgc

SEQ ID NO: 15939 - DNA, 33 bp, Homo sapien
tccatccattcactcactcttgtgttgctgctg

SEQ ID NO: 15940 - DNA, 33 bp, Homo sapien
tccatccattcactcattcttgtgttgctgctg

SEQ ID NO: 15941 - DNA, 33 bp, Homo sapien
aggtgcagtgcttggcacagaataggcttcagg

SEQ ID NO: 15942 - DNA, 33 bp, Homo sapien
aggtgcagtgcttggcgcagaataggcttcagg

SEQ ID NO: 15943 - DNA, 33 bp, Homo sapien
cagtacaggccttctacgatggcttccaaatcc

SEQ ID NO: 15944 - DNA, 33 bp, Homo sapien
cagtacaggccttctatgatggcttccaaatcc

SEQ ID NO: 15945 - DNA, 33 bp, Homo sapien
gaggtaagagcatgaaaggtggatttggaagcc

SEQ ID NO: 15946 - DNA, 33 bp, Homo sapien
gaggtaagagcatgaacggtggatttggaagcc

SEQ ID NO: 15947 - DNA, 33 bp, Homo sapien
tcagtgagtgatctgaaagggttgtcataggcc

SEQ ID NO: 15948 - DNA, 33 bp, Homo sapien
tcagtgagtgatctgagagggttgtcataggcc

SEQ ID NO: 15949 - DNA, 33 bp, Homo sapien
tctgtaattacttggacgtgcttcatggtcccc

SEQ ID NO: 15950 - DNA, 33 bp, Homo sapien
tctgtaattacttggatgtgcttcatggtcccc

SEQ ID NO: 15951 - DNA, 33 bp, Homo sapien
agggaatgtgatgcaaaaaggaacgctgggtaa

SEQ ID NO: 15952 - DNA, 33 bp, Homo sapien
agggaatgtgatgcaagaaggaacgctgggtaa

SEQ ID NO: 15953 - DNA, 33 bp, Homo sapien
gggaagaataaaaaaaatgagtcattacagtgg

SEQ ID NO: 15954 - DNA, 33 bp, Homo sapien
gggaagaataaaaaaagtgagtcattacagtgg

SEQ ID NO: 15955 - DNA, 33 bp, Homo sapien
tttgtggggattaatacgacaaaatgtgtagag

SEQ ID NO: 15956 - DNA, 33 bp, Homo sapien
tttgtggggattaatatgacaaaatgtgtagag

SEQ ID NO: 15957 - DNA, 33 bp, Homo sapien
aattaggcagagagtacaaaatcaggcctatct

SEQ ID NO: 15958 - DNA, 33 bp, Homo sapien
aattaggcagagagtataaaatcaggcctatct

SEQ ID NO: 15959 - DNA, 33 bp, Homo sapien
tggatgggatggctgacggctcttagaaatgcc

SEQ ID NO: 15960 - DNA, 33 bp, Homo sapien
tggatgggatggctgatggctcttagaaatgcc

SEQ ID NO: 15961 - DNA, 33 bp, Homo sapien
agaaatgccaagaatcacaataatttgagcaca

SEQ ID NO: 15962 - DNA, 33 bp, Homo sapien
agaaatgccaagaatcccaataatttgagcaca

SEQ ID NO: 15963 - DNA, 33 bp, Homo sapien
gttaagtgcaacggaaactcaactctttcacca

SEQ ID NO: 15964 - DNA, 33 bp, Homo sapien
gttaagtgcaacggaacctcaactctttcacca

SEQ ID NO: 15965 - DNA, 33 bp, Homo sapien
gggaagactgcttatacggctctggaatcaata

SEQ ID NO: 15966 - DNA, 33 bp, Homo sapien
gggaagactgcttatatggctctggaatcaata

SEQ ID NO: 15967 - DNA, 33 bp, Homo sapien
aatgcgtagaatttccaagtaatcaactcagag

SEQ ID NO: 15968 - DNA, 33 bp, Homo sapien
aatgcgtagaatttcccagtaatcaactcagag

SEQ ID NO: 15969 - DNA, 33 bp, Homo sapien
ttcagttagtgtttatcaaatcgaactctgccg

SEQ ID NO: 15970 - DNA, 33 bp, Homo sapien
ttcagttagtgtttattaaatcgaactctgccg

SEQ ID NO: 15971 - DNA, 33 bp, Homo sapien
atttttacgacggcaccatctatcttctgtcca

SEQ ID NO: 15972 - DNA, 33 bp, Homo sapien
atttttacgacggcactatctatcttctgtcca

SEQ ID NO: 15973 - DNA, 33 bp, Homo sapien
actgtctggcttgcccgctaattgctttctctg

SEQ ID NO: 15974 - DNA, 33 bp, Homo sapien
actgtctggcttgccctctaattgctttctctg

SEQ ID NO: 15975 - DNA, 33 bp, Homo sapien
atggataaaaatttcacgtgcactaataattag

SEQ ID NO: 15976 - DNA, 33 bp, Homo sapien
atggataaaaatttcatgtgcactaataattag

SEQ ID NO: 15977 - DNA, 33 bp, Homo sapien
tgacctctttcaatcacagaacttgagaatggt

SEQ ID NO: 15978 - DNA, 33 bp, Homo sapien
tgacctctttcaatcatagaacttgagaatggt

SEQ ID NO: 15979 - DNA, 33 bp, Homo sapien
tgattaacatatcagggaaacgaagccttggct

SEQ ID NO: 15980 - DNA, 33 bp, Homo sapien
tgattaacatatcaggtaaacgaagccttggct

SEQ ID NO: 15981 - DNA, 33 bp, Homo sapien
tcctggctagccagaaagagctggtgttttttg

SEQ ID NO: 15982 - DNA, 33 bp, Homo sapien
tcctggctagccagaaggagctggtgttttttg

SEQ ID NO: 15983 - DNA, 33 bp, Homo sapien
ggcccaggagaccctaaatctttgtatcttttc

SEQ ID NO: 15984 - DNA, 33 bp, Homo sapien
ggcccaggagaccctagatctttgtatcttttc

SEQ ID NO: 15985 - DNA, 33 bp, Homo sapien
gcctttctgcccattcaatacacttctgacttc

SEQ ID NO: 15986 - DNA, 33 bp, Homo sapien
gcctttctgcccattcgatacacttctgacttc

SEQ ID NO: 15987 - DNA, 33 bp, Homo sapien
tcactgacttgacctaaagggagagctactagt

SEQ ID NO: 15988 - DNA, 33 bp, Homo sapien
tcactgacttgacctagagggagagctactagt

SEQ ID NO: 15989 - DNA, 33 bp, Homo sapien
tgactggtattctgggcagacagttattttgtg

SEQ ID NO: 15990 - DNA, 33 bp, Homo sapien
tgactggtattctgggtagacagttattttgtg

SEQ ID NO: 15991 - DNA, 33 bp, Homo sapien
ttcagcaagttagcaccggaacagggattagac

SEQ ID NO: 15992 - DNA, 33 bp, Homo sapien
ttcagcaagttagcactggaacagggattagac

SEQ ID NO: 15993 - DNA, 33 bp, Homo sapien
ggaaaattctttatctgaatcctacctcactac

SEQ ID NO: 15994 - DNA, 33 bp, Homo sapien
ggaaaattctttatcttaatcctacctcactac

SEQ ID NO: 15995 - DNA, 33 bp, Homo sapien
agatacagtgtcaacccgagacagaaatatcac

SEQ ID NO: 15996 - DNA, 33 bp, Homo sapien
agatacagtgtcaacctgagacagaaatatcac

SEQ ID NO: 15997 - DNA, 33 bp, Homo sapien
tgggatctgaatacgacgtgggtgtgtgcagtc

SEQ ID NO: 15998 - DNA, 33 bp, Homo sapien
tgggatctgaatacgatgtgggtgtgtgcagtc

SEQ ID NO: 15999 - DNA, 33 bp, Homo sapien
agagaaatctgcagtacgatgtcaggtggtgac

SEQ ID NO: 16000 - DNA, 33 bp, Homo sapien
agagaaatctgcagtatgatgtcaggtggtgac

SEQ ID NO: 16001 - DNA, 33 bp, Homo sapien
ttctactatcagaacacatccagaaacgggcca

SEQ ID NO: 16002 - DNA, 33 bp, Homo sapien
ttctactatcagaacatatccagaaacgggcca

SEQ ID NO: 16003 - DNA, 33 bp, Homo sapien
tctcttacagcacatgacagtctgactaatgta

SEQ ID NO: 16004 - DNA, 33 bp, Homo sapien
tctcttacagcacatggcagtctgactaatgta

SEQ ID NO: 16005 - DNA, 33 bp, Homo sapien
ggtgcgagttctggaaaaggtgactcaccttca

SEQ ID NO: 16006 - DNA, 33 bp, Homo sapien
ggtgcgagttctggaagaggtgactcaccttca

SEQ ID NO: 16007 - DNA, 33 bp, Homo sapien
gttcacatttcccatgaaaaggctggtatgaaa

SEQ ID NO: 16008 - DNA, 33 bp, Homo sapien
gttcacatttcccatgcaaaggctggtatgaaa

SEQ ID NO: 16009 - DNA, 33 bp, Homo sapien
actatgtacttaacacaatcatatttaattgct

SEQ ID NO: 16010 - DNA, 33 bp, Homo sapien
actatgtacttaacacgatcatatttaattgct

SEQ ID NO: 16011 - DNA, 33 bp, Homo sapien
gtttccaaatgtagcccgctattgatccagttg

SEQ ID NO: 16012 - DNA, 33 bp, Homo sapien
gtttccaaatgtagcctgctattgatccagttg

SEQ ID NO: 16013 - DNA, 33 bp, Homo sapien
ttctcttggtgccccaatgagtccaactggatc

SEQ ID NO: 16014 - DNA, 33 bp, Homo sapien
ttctcttggtgccccattgagtccaactggatc

SEQ ID NO: 16015 - DNA, 33 bp, Homo sapien
aagcatggagattcagcagaccttcagctgggg

SEQ ID NO: 16016 - DNA, 33 bp, Homo sapien
aagcatggagattcaggagaccttcagctgggg

SEQ ID NO: 16017 - DNA, 33 bp, Homo sapien
aaagctttcttacatcaaccatctcattaaaac

SEQ ID NO: 16018 - DNA, 33 bp, Homo sapien
aaagctttcttacatccaccatctcattaaaac

SEQ ID NO: 16019 - DNA, 33 bp, Homo sapien
gcccacacctgacatcacggaattgccggataa

SEQ ID NO: 16020 - DNA, 33 bp, Homo sapien
gcccacacctgacatcgcggaattgccggataa

SEQ ID NO: 16021 - DNA, 33 bp, Homo sapien
atctcaatacgtctcacgccatactctgcccca

SEQ ID NO: 16022 - DNA, 33 bp, Homo sapien
atctcaatacgtctcatgccatactctgcccca

SEQ ID NO: 16023 - DNA, 33 bp, Homo sapien
ggcacctgtgtacgtcaatgactgaccacccca

SEQ ID NO: 16024 - DNA, 33 bp, Homo sapien
ggcacctgtgtacgtcgatgactgaccacccca

SEQ ID NO: 16025 - DNA, 33 bp, Homo sapien
tctccccttgcagaccaccaaaacacgcagaaa

SEQ ID NO: 16026 - DNA, 33 bp, Homo sapien
tctccccttgcagaccgccaaaacacgcagaaa

SEQ ID NO: 16027 - DNA, 33 bp, Homo sapien
tttgtaaattcgtgaaagactgcacctctcact

SEQ ID NO: 16028 - DNA, 33 bp, Homo sapien
tttgtaaattcgtgaaggactgcacctctcact

SEQ ID NO: 16029 - DNA, 33 bp, Homo sapien
cactggcccagctctgaatatgccatgcttagc

SEQ ID NO: 16030 - DNA, 33 bp, Homo sapien
cactggcccagctctggatatgccatgcttagc

SEQ ID NO: 16031 - DNA, 33 bp, Homo sapien
aatggacagataggagaaatcatcctaatgcac

SEQ ID NO: 16032 - DNA, 33 bp, Homo sapien
aatggacagataggaggaatcatcctaatgcac

SEQ ID NO: 16033 - DNA, 33 bp, Homo sapien
ggagcgtttctgggaccgagtagaggagacact

SEQ ID NO: 16034 - DNA, 33 bp, Homo sapien
ggagcgtttctgggactgagtagaggagacact

SEQ ID NO: 16035 - DNA, 33 bp, Homo sapien
gtccagtatgtcctcacagaacatctcctaggt

SEQ ID NO: 16036 - DNA, 33 bp, Homo sapien
gtccagtatgtcctcatagaacatctcctaggt

SEQ ID NO: 16037 - DNA, 33 bp, Homo sapien
gtctatgctaggaacacagaggatgctgactgc

SEQ ID NO: 16038 - DNA, 33 bp, Homo sapien
gtctatgctaggaacatagaggatgctgactgc

SEQ ID NO: 16039 - DNA, 33 bp, Homo sapien
gttacttaacttttccaagtcccagctttgtca

SEQ ID NO: 16040 - DNA, 33 bp, Homo sapien
gttacttaacttttccgagtcccagctttgtca

SEQ ID NO: 16041 - DNA, 33 bp, Homo sapien
ccattcattgctctcagggtgaattccaagatg

SEQ ID NO: 16042 - DNA, 33 bp, Homo sapien
ccattcattgctctcatggtgaattccaagatg

SEQ ID NO: 16043 - DNA, 33 bp, Homo sapien
atgcttccttccactacggagtgaacattatat

SEQ ID NO: 16044 - DNA, 33 bp, Homo sapien
atgcttccttccactatggagtgaacattatat

SEQ ID NO: 16045 - DNA, 33 bp, Homo sapien
agcctggcagctctaacctttgaagaaatgtcc

SEQ ID NO: 16046 - DNA, 33 bp, Homo sapien
agcctggcagctctaatctttgaagaaatgtcc

SEQ ID NO: 16047 - DNA, 33 bp, Homo sapien
gaagcagagagagctcaatgcattaagcctggg

SEQ ID NO: 16048 - DNA, 33 bp, Homo sapien
gaagcagagagagctcgatgcattaagcctggg

SEQ ID NO: 16049 - DNA, 33 bp, Homo sapien
gttacttgatcttgtcccaagtcttcctggaac

SEQ ID NO: 16050 - DNA, 33 bp, Homo sapien
gttacttgatcttgtcgcaagtcttcctggaac

SEQ ID NO: 16051 - DNA, 33 bp, Homo sapien
agctgacatagcccccactctcgttacatctgc

SEQ ID NO: 16052 - DNA, 33 bp, Homo sapien
agctgacatagcccccgctctcgttacatctgc

SEQ ID NO: 16053 - DNA, 33 bp, Homo sapien
acataattgaacgaaaatatgagagagaaaagg

SEQ ID NO: 16054 - DNA, 33 bp, Homo sapien
acataattgaacgaaactatgagagagaaaagg

SEQ ID NO: 16055 - DNA, 33 bp, Homo sapien
aaaccagcagggaagacattgaagtccgtgcag

SEQ ID NO: 16056 - DNA, 33 bp, Homo sapien
aaaccagcagggaagatattgaagtccgtgcag

SEQ ID NO: 16057 - DNA, 33 bp, Homo sapien
ggcctggtgtggacacagcaatgaacacagcaa

SEQ ID NO: 16058 - DNA, 33 bp, Homo sapien
ggcctggtgtggacacggcaatgaacacagcaa

SEQ ID NO: 16059 - DNA, 33 bp, Homo sapien
gttagttcctcacttaccatgtttattgtttat

SEQ ID NO: 16060 - DNA, 33 bp, Homo sapien
gttagttcctcacttatcatgtttattgtttat

SEQ ID NO: 16061 - DNA, 33 bp, Homo sapien
caaatctggggtctcaataattctcacaatagc

SEQ ID NO: 16062 - DNA, 33 bp, Homo sapien
caaatctggggtctcactaattctcacaatagc

SEQ ID NO: 16063 - DNA, 33 bp, Homo sapien
aaaagatccagagcctaaaagaagcatttccct

SEQ ID NO: 16064 - DNA, 33 bp, Homo sapien
aaaagatccagagcctgaaagaagcatttccct

SEQ ID NO: 16065 - DNA, 33 bp, Homo sapien
tttaattgtgctagaaagtcactgggatttgac

SEQ ID NO: 16066 - DNA, 33 bp, Homo sapien
tttaattgtgctagaaggtcactgggatttgac

SEQ ID NO: 16067 - DNA, 33 bp, Homo sapien
ctgtgagcggagcccaagtgtttagaagctgca

SEQ ID NO: 16068 - DNA, 33 bp, Homo sapien
ctgtgagcggagcccaggtgtttagaagctgca

SEQ ID NO: 16069 - DNA, 33 bp, Homo sapien
ttataaagagagggggaagtgatcacccagcat

SEQ ID NO: 16070 - DNA, 33 bp, Homo sapien
ttataaagagaggggggagtgatcacccagcat

SEQ ID NO: 16071 - DNA, 33 bp, Homo sapien
ctctcttctgctacaacgaaatctccacacatt

SEQ ID NO: 16072 - DNA, 33 bp, Homo sapien
ctctcttctgctacaatgaaatctccacacatt

SEQ ID NO: 16073 - DNA, 33 bp, Homo sapien
tagatctttttggaaacggaatggccagggctg

SEQ ID NO: 16074 - DNA, 33 bp, Homo sapien
tagatctttttggaaatggaatggccagggctg

SEQ ID NO: 16075 - DNA, 33 bp, Homo sapien
ggagaaaaaagcataaagtgatgtgagtcccgg

SEQ ID NO: 16076 - DNA, 33 bp, Homo sapien
ggagaaaaaagcataaggtgatgtgagtcccgg

SEQ ID NO: 16077 - DNA, 33 bp, Homo sapien
actgacacacacagtacgtttcctctttccagg

SEQ ID NO: 16078 - DNA, 33 bp, Homo sapien
actgacacacacagtaggtttcctctttccagg

SEQ ID NO: 16079 - DNA, 33 bp, Homo sapien
cagagtaccttggcaccgagctgaaacttcaga

SEQ ID NO: 16080 - DNA, 33 bp, Homo sapien
cagagtaccttggcactgagctgaaacttcaga

SEQ ID NO: 16081 - DNA, 33 bp, Homo sapien
ttaactaagatacaaaatgcttggcacagtcct

SEQ ID NO: 16082 - DNA, 33 bp, Homo sapien
ttaactaagatacaaagtgcttggcacagtcct

SEQ ID NO: 16083 - DNA, 33 bp, Homo sapien
cgcagatagtagcaaaacctgtatatgctgttt

SEQ ID NO: 16084 - DNA, 33 bp, Homo sapien
cgcagatagtagcaaaccctgtatatgctgttt

SEQ ID NO: 16085 - DNA, 33 bp, Homo sapien
ggaaagacttataggagaaagcagccttcagct

SEQ ID NO: 16086 - DNA, 33 bp, Homo sapien
ggaaagacttataggataaagcagccttcagct

SEQ ID NO: 16087 - DNA, 33 bp, Homo sapien
ccacattcaaaccataacacagcctcattttac

SEQ ID NO: 16088 - DNA, 33 bp, Homo sapien
ccacattcaaaccatagcacagcctcattttac

SEQ ID NO: 16089 - DNA, 33 bp, Homo sapien
gcgcaatctgcctagaaacataaaggaattttg

SEQ ID NO: 16090 - DNA, 33 bp, Homo sapien
gcgcaatctgcctagacacataaaggaattttg

SEQ ID NO: 16091 - DNA, 33 bp, Homo sapien
agcgctcaaaatcgcactgcctttgagcacagg

SEQ ID NO: 16092 - DNA, 33 bp, Homo sapien
agcgctcaaaatcgcattgcctttgagcacagg

SEQ ID NO: 16093 - DNA, 33 bp, Homo sapien
tgacgataaacaacacagtatgatgatgttctt

SEQ ID NO: 16094 - DNA, 33 bp, Homo sapien
tgacgataaacaacactgtatgatgatgttctt

SEQ ID NO: 16095 - DNA, 33 bp, Homo sapien
gaaatctgacaggaggcaagttggctcagagcc

SEQ ID NO: 16096 - DNA, 33 bp, Homo sapien
gaaatctgacaggaggtaagttggctcagagcc

SEQ ID NO: 16097 - DNA, 33 bp, Homo sapien
cccccccaggaagtgactagctctctacaccag

SEQ ID NO: 16098 - DNA, 33 bp, Homo sapien
cccccccaggaagtgattagctctctacaccag

SEQ ID NO: 16099 - DNA, 33 bp, Homo sapien
tctgccctcacgatagaattaatgctgttaatg

SEQ ID NO: 16100 - DNA, 33 bp, Homo sapien
tctgccctcacgataggattaatgctgttaatg

SEQ ID NO: 16101 - DNA, 33 bp, Homo sapien
aagaagtaaaatcttaccagtaactcacattta

SEQ ID NO: 16102 - DNA, 33 bp, Homo sapien
aagaagtaaaatcttatcagtaactcacattta

SEQ ID NO: 16103 - DNA, 33 bp, Homo sapien
ttgcttcatactctaacccctattaaccaaaat

SEQ ID NO: 16104 - DNA, 33 bp, Homo sapien
ttgcttcatactctaagccctattaaccaaaat

SEQ ID NO: 16105 - DNA, 33 bp, Homo sapien
cctctcggcctggggaatacagtctagattccg

SEQ ID NO: 16106 - DNA, 33 bp, Homo sapien
cctctcggcctggggactacagtctagattccg

SEQ ID NO: 16107 - DNA, 33 bp, Homo sapien
gtagggccaccatatcccagatcctgtattcat

SEQ ID NO: 16108 - DNA, 33 bp, Homo sapien
gtagggccaccatatctcagatcctgtattcat

SEQ ID NO: 16109 - DNA, 33 bp, Homo sapien
cagagacagaaagatacgtaagatgagccctta

SEQ ID NO: 16110 - DNA, 33 bp, Homo sapien
cagagacagaaagatatgtaagatgagccctta

SEQ ID NO: 16111 - DNA, 33 bp, Homo sapien
gagtggttcaggctaacggagcagcataattaa

SEQ ID NO: 16112 - DNA, 33 bp, Homo sapien
gagtggttcaggctaatggagcagcataattaa

SEQ ID NO: 16113 - DNA, 33 bp, Homo sapien
attagggagacaggcacgttggcagtctgtggg

SEQ ID NO: 16114 - DNA, 33 bp, Homo sapien
attagggagacaggcatgttggcagtctgtggg

SEQ ID NO: 16115 - DNA, 33 bp, Homo sapien
tggatttagaaaagaaagcctcctatgtactct

SEQ ID NO: 16116 - DNA, 33 bp, Homo sapien
tggatttagaaaagaacgcctcctatgtactct

SEQ ID NO: 16117 - DNA, 33 bp, Homo sapien
tacaactgtgtagcaaatagatgaataggaaaa

SEQ ID NO: 16118 - DNA, 33 bp, Homo sapien
tacaactgtgtagcaagtagatgaataggaaaa

SEQ ID NO: 16119 - DNA, 33 bp, Homo sapien
gagcactctgcctgcacgaactggggagaccta

SEQ ID NO: 16120 - DNA, 33 bp, Homo sapien
gagcactctgcctgcatgaactggggagaccta

SEQ ID NO: 16121 - DNA, 33 bp, Homo sapien
gctagaaattctgatgcaatgccaggagactct

SEQ ID NO: 16122 - DNA, 33 bp, Homo sapien
gctagaaattctgatgtaatgccaggagactct

SEQ ID NO: 16123 - DNA, 33 bp, Homo sapien
agtctatacaagctcactaatccatacctcaac

SEQ ID NO: 16124 - DNA, 33 bp, Homo sapien
agtctatacaagctcattaatccatacctcaac

SEQ ID NO: 16125 - DNA, 33 bp, Homo sapien
ttgcatcacacttatacgaatgacacagggaaa

SEQ ID NO: 16126 - DNA, 33 bp, Homo sapien
ttgcatcacacttatatgaatgacacagggaaa

SEQ ID NO: 16127 - DNA, 33 bp, Homo sapien
ctatttgtttttgatacgtagaaatctaattga

SEQ ID NO: 16128 - DNA, 33 bp, Homo sapien
ctatttgtttttgatatgtagaaatctaattga

SEQ ID NO: 16129 - DNA, 33 bp, Homo sapien
aatcctaaagcctgtacaggacaagtggcctat

SEQ ID NO: 16130 - DNA, 33 bp, Homo sapien
aatcctaaagcctgtagaggacaagtggcctat

SEQ ID NO: 16131 - DNA, 33 bp, Homo sapien
cagtctcagttctccacgtataaaccaggctag

SEQ ID NO: 16132 - DNA, 33 bp, Homo sapien
cagtctcagttctccatgtataaaccaggctag

SEQ ID NO: 16133 - DNA, 33 bp, Homo sapien
ttactacagagggacacgaattctttggagtgt

SEQ ID NO: 16134 - DNA, 33 bp, Homo sapien
ttactacagagggacatgaattctttggagtgt

SEQ ID NO: 16135 - DNA, 33 bp, Homo sapien
ctttttcttctttcaacagttctcattttaaga

SEQ ID NO: 16136 - DNA, 33 bp, Homo sapien
ctttttcttctttcaagagttctcattttaaga

SEQ ID NO: 16137 - DNA, 33 bp, Homo sapien
tacagagattcatctacgtgccaagcaaggaga

SEQ ID NO: 16138 - DNA, 33 bp, Homo sapien
tacagagattcatctatgtgccaagcaaggaga

SEQ ID NO: 16139 - DNA, 33 bp, Homo sapien
gcaaatagcatccaggaaactggcaagatcagg

SEQ ID NO: 16140 - DNA, 33 bp, Homo sapien
gcaaatagcatccagggaactggcaagatcagg

SEQ ID NO: 16141 - DNA, 33 bp, Homo sapien
cacaaagggacaataactcttagctgtctgggc

SEQ ID NO: 16142 - DNA, 33 bp, Homo sapien
cacaaagggacaataattcttagctgtctgggc

SEQ ID NO: 16143 - DNA, 33 bp, Homo sapien
aattattgaccatgtccacacatcatcgcctga

SEQ ID NO: 16144 - DNA, 33 bp, Homo sapien
aattattgaccatgtctacacatcatcgcctga

SEQ ID NO: 16145 - DNA, 33 bp, Homo sapien
gggagtcccacagcatgaccagagcaagtccct

SEQ ID NO: 16146 - DNA, 33 bp, Homo sapien
gggagtcccacagcattaccagagcaagtccct

SEQ ID NO: 16147 - DNA, 33 bp, Homo sapien
cacaaaatgcaggaaacgttatcctccagcaac

SEQ ID NO: 16148 - DNA, 33 bp, Homo sapien
cacaaaatgcaggaaatgttatcctccagcaac

SEQ ID NO: 16149 - DNA, 33 bp, Homo sapien
attcagtcaccagatcactttcaccaccttgtt

SEQ ID NO: 16150 - DNA, 33 bp, Homo sapien
attcagtcaccagatcgctttcaccaccttgtt

SEQ ID NO: 16151 - DNA, 33 bp, Homo sapien
gtgcatgtaattttacggagaaggctgttgcat

SEQ ID NO: 16152 - DNA, 33 bp, Homo sapien
gtgcatgtaattttactgagaaggctgttgcat

SEQ ID NO: 16153 - DNA, 33 bp, Homo sapien
aaagtgcagaaactaactcagaaaagggcattt

SEQ ID NO: 16154 - DNA, 33 bp, Homo sapien
aaagtgcagaaactaattcagaaaagggcattt

SEQ ID NO: 16155 - DNA, 33 bp, Homo sapien
acttgattcccacaacaaagctgtaagatacac

SEQ ID NO: 16156 - DNA, 33 bp, Homo sapien
acttgattcccacaaccaagctgtaagatacac

SEQ ID NO: 16157 - DNA, 33 bp, Homo sapien
gagagtttgggctggacactctactcccatttt

SEQ ID NO: 16158 - DNA, 33 bp, Homo sapien
gagagtttgggctggatactctactcccatttt

SEQ ID NO: 16159 - DNA, 33 bp, Homo sapien
gaagaaatctggaacacaaccaataatttgcaa

SEQ ID NO: 16160 - DNA, 33 bp, Homo sapien
gaagaaatctggaacataaccaataatttgcaa

SEQ ID NO: 16161 - DNA, 33 bp, Homo sapien
tgaccttttttatctaaggcaagatttcttgct

SEQ ID NO: 16162 - DNA, 33 bp, Homo sapien
tgaccttttttatctatggcaagatttcttgct

SEQ ID NO: 16163 - DNA, 33 bp, Homo sapien
aagcacaaagctaagaagagtcagtcatccctc

SEQ ID NO: 16164 - DNA, 33 bp, Homo sapien
aagcacaaagctaagaggagtcagtcatccctc

SEQ ID NO: 16165 - DNA, 33 bp, Homo sapien
tatgccttcttcataaaggttggtgtgaaaatc

SEQ ID NO: 16166 - DNA, 33 bp, Homo sapien
tatgccttcttcataagggttggtgtgaaaatc

SEQ ID NO: 16167 - DNA, 33 bp, Homo sapien
aacttttgtagcagaaagcttggattcaccttg

SEQ ID NO: 16168 - DNA, 33 bp, Homo sapien
aacttttgtagcagaaggcttggattcaccttg

SEQ ID NO: 16169 - DNA, 33 bp, Homo sapien
tgtgaaaacgatagaacagcagatataacagag

SEQ ID NO: 16170 - DNA, 33 bp, Homo sapien
tgtgaaaacgatagaatagcagatataacagag

SEQ ID NO: 16171 - DNA, 33 bp, Homo sapien
tctgtgcaaagagtcacacccaacgtctgtccc

SEQ ID NO: 16172 - DNA, 33 bp, Homo sapien
tctgtgcaaagagtcatacccaacgtctgtccc

SEQ ID NO: 16173 - DNA, 33 bp, Homo sapien
tcctttcttcctggtcccacattcaggccaaca

SEQ ID NO: 16174 - DNA, 33 bp, Homo sapien
tcctttcttcctggtcgcacattcaggccaaca

SEQ ID NO: 16175 - DNA, 33 bp, Homo sapien
ttaatgtggaagggaaaaaatggagaatgttgt

SEQ ID NO: 16176 - DNA, 33 bp, Homo sapien
ttaatgtggaagggaacaaatggagaatgttgt

SEQ ID NO: 16177 - DNA, 33 bp, Homo sapien
ggaattcaaagagcccagaaccctcttgggaag

SEQ ID NO: 16178 - DNA, 33 bp, Homo sapien
ggaattcaaagagcccggaaccctcttgggaag

SEQ ID NO: 16179 - DNA, 33 bp, Homo sapien
atccagattgcctagaagtgctgagctccctgt

SEQ ID NO: 16180 - DNA, 33 bp, Homo sapien
atccagattgcctagaggtgctgagctccctgt

SEQ ID NO: 16181 - DNA, 33 bp, Homo sapien
cttgttacgatggatactaagagcctatgaagt

SEQ ID NO: 16182 - DNA, 33 bp, Homo sapien
cttgttacgatggatattaagagcctatgaagt

SEQ ID NO: 16183 - DNA, 33 bp, Homo sapien
aattagatgataaataagacctctttccttctt

SEQ ID NO: 16184 - DNA, 33 bp, Homo sapien
aattagatgataaataggacctctttccttctt

SEQ ID NO: 16185 - DNA, 33 bp, Homo sapien
agagcttgatggtaaacgacttggaatgccatg

SEQ ID NO: 16186 - DNA, 33 bp, Homo sapien
agagcttgatggtaaatgacttggaatgccatg

SEQ ID NO: 16187 - DNA, 33 bp, Homo sapien
ggagggagagggaaacaatgtccagttcattta

SEQ ID NO: 16188 - DNA, 33 bp, Homo sapien
ggagggagagggaaacgatgtccagttcattta

SEQ ID NO: 16189 - DNA, 33 bp, Homo sapien
taaacttacacctgaaagattatctgactggcc

SEQ ID NO: 16190 - DNA, 33 bp, Homo sapien
taaacttacacctgaaggattatctgactggcc

SEQ ID NO: 16191 - DNA, 33 bp, Homo sapien
tgtgctctgtgtctggaaccccacccctttgcc

SEQ ID NO: 16192 - DNA, 33 bp, Homo sapien
tgtgctctgtgtctgggaccccacccctttgcc

SEQ ID NO: 16193 - DNA, 33 bp, Homo sapien
ggaattcagctttcgacaggaggaaacaggctc

SEQ ID NO: 16194 - DNA, 33 bp, Homo sapien
ggaattcagctttcgataggaggaaacaggctc

SEQ ID NO: 16195 - DNA, 33 bp, Homo sapien
tccttctaggtgctaaatgatattattcttata

SEQ ID NO: 16196 - DNA, 33 bp, Homo sapien
tccttctaggtgctaagtgatattattcttata

SEQ ID NO: 16197 - DNA, 33 bp, Homo sapien
tgctgataataaataactgattcttccatagtg

SEQ ID NO: 16198 - DNA, 33 bp, Homo sapien
tgctgataataaataattgattcttccatagtg

SEQ ID NO: 16199 - DNA, 33 bp, Homo sapien
gcataagtctgtggtccaccttctgactgctga

SEQ ID NO: 16200 - DNA, 33 bp, Homo sapien
gcataagtctgtggtctaccttctgactgctga

SEQ ID NO: 16201 - DNA, 33 bp, Homo sapien
ggcgttactgtctaggaaggtttgagcttttaa

SEQ ID NO: 16202 - DNA, 33 bp, Homo sapien
ggcgttactgtctaggcaggtttgagcttttaa

SEQ ID NO: 16203 - DNA, 33 bp, Homo sapien
agcagaggattaaaccaagtgcagggtcctatg

SEQ ID NO: 16204 - DNA, 33 bp, Homo sapien
agcagaggattaaaccgagtgcagggtcctatg

SEQ ID NO: 16205 - DNA, 33 bp, Homo sapien
caccaggcaaaagatacggcatttgagtggaca

SEQ ID NO: 16206 - DNA, 33 bp, Homo sapien
caccaggcaaaagatatggcatttgagtggaca

SEQ ID NO: 16207 - DNA, 33 bp, Homo sapien
gcatcaggggtgaataagtgtcccatctgcagg

SEQ ID NO: 16208 - DNA, 33 bp, Homo sapien
gcatcaggggtgaataggtgtcccatctgcagg

SEQ ID NO: 16209 - DNA, 33 bp, Homo sapien
cgggcacccatgtacccgcattcagtcacttac

SEQ ID NO: 16210 - DNA, 33 bp, Homo sapien
cgggcacccatgtaccggcattcagtcacttac

SEQ ID NO: 16211 - DNA, 33 bp, Homo sapien
tgagatccgttgtaacaatcattctggcaaagg

SEQ ID NO: 16212 - DNA, 33 bp, Homo sapien
tgagatccgttgtaaccatcattctggcaaagg

SEQ ID NO: 16213 - DNA, 33 bp, Homo sapien
gcgttccatttaaccaatatctcctgcccaatg

SEQ ID NO: 16214 - DNA, 33 bp, Homo sapien
gcgttccatttaaccagtatctcctgcccaatg

SEQ ID NO: 16215 - DNA, 33 bp, Homo sapien
cacaggagtttcctccagagttttcttaggcca

SEQ ID NO: 16216 - DNA, 33 bp, Homo sapien
cacaggagtttcctccggagttttcttaggcca

SEQ ID NO: 16217 - DNA, 33 bp, Homo sapien
tcttagagagggtgagacatttatacaaggcta

SEQ ID NO: 16218 - DNA, 33 bp, Homo sapien
tcttagagagggtgaggcatttatacaaggcta

SEQ ID NO: 16219 - DNA, 33 bp, Homo sapien
gtcttgcctgggcctcacaatgaaattattggg

SEQ ID NO: 16220 - DNA, 33 bp, Homo sapien
gtcttgcctgggcctcgcaatgaaattattggg

SEQ ID NO: 16221 - DNA, 33 bp, Homo sapien
gttcatttgtttgtaacatctgcctttatcttg

SEQ ID NO: 16222 - DNA, 33 bp, Homo sapien
gttcatttgtttgtaatatctgcctttatcttg

SEQ ID NO: 16223 - DNA, 33 bp, Homo sapien
tgctgggctttaaccccagagagatgtctggcc

SEQ ID NO: 16224 - DNA, 33 bp, Homo sapien
tgctgggctttaacccgagagagatgtctggcc

SEQ ID NO: 16225 - DNA, 33 bp, Homo sapien
caccagagaccagtataagcaaaggcgtgcagg

SEQ ID NO: 16226 - DNA, 33 bp, Homo sapien
caccagagaccagtatgagcaaaggcgtgcagg

SEQ ID NO: 16227 - DNA, 33 bp, Homo sapien
gaactatgaaatcaagaaggcccacatcctgaa

SEQ ID NO: 16228 - DNA, 33 bp, Homo sapien
gaactatgaaatcaaggaggcccacatcctgaa

SEQ ID NO: 16229 - DNA, 33 bp, Homo sapien
ttgtcagaggcacctcagaggctggatgataca

SEQ ID NO: 16230 - DNA, 33 bp, Homo sapien
ttgtcagaggcacctcggaggctggatgataca

SEQ ID NO: 16231 - DNA, 33 bp, Homo sapien
tgggatcctgggaaacaccattatcagacagtg

SEQ ID NO: 16232 - DNA, 33 bp, Homo sapien
tgggatcctgggaaaccccattatcagacagtg

SEQ ID NO: 16233 - DNA, 33 bp, Homo sapien
aaaattagttgggcagacaactaaagctggtcc

SEQ ID NO: 16234 - DNA, 33 bp, Homo sapien
aaaattagttgggcagtcaactaaagctggtcc

SEQ ID NO: 16235 - DNA, 33 bp, Homo sapien
tctcttgtctgtgaaactgtctgtgcaactccc

SEQ ID NO: 16236 - DNA, 33 bp, Homo sapien
tctcttgtctgtgaaattgtctgtgcaactccc

SEQ ID NO: 16237 - DNA, 33 bp, Homo sapien
ttcttccacttgcaatgatatactatgaaatat

SEQ ID NO: 16238 - DNA, 33 bp, Homo sapien
ttcttccacttgcaattatatactatgaaatat

SEQ ID NO: 16239 - DNA, 33 bp, Homo sapien
aagaacaggacagaaccgaagtaacaaccagct

SEQ ID NO: 16240 - DNA, 33 bp, Homo sapien
aagaacaggacagaactgaagtaacaaccagct

SEQ ID NO: 16241 - DNA, 33 bp, Homo sapien
tgacttaatcaatccagatttttaacatttcct

SEQ ID NO: 16242 - DNA, 33 bp, Homo sapien
tgacttaatcaatccatatttttaacatttcct

SEQ ID NO: 16243 - DNA, 33 bp, Homo sapien
tgtattgttatcttacagctaaagttccaaggc

SEQ ID NO: 16244 - DNA, 33 bp, Homo sapien
tgtattgttatcttacggctaaagttccaaggc

SEQ ID NO: 16245 - DNA, 33 bp, Homo sapien
tttccctttcggcgccggcaccttttgattaga

SEQ ID NO: 16246 - DNA, 33 bp, Homo sapien
tttccctttcggcgcctgcaccttttgattaga

SEQ ID NO: 16247 - DNA, 33 bp, Homo sapien
aagattctgtcacaaacaaacaaacagaaaaca

SEQ ID NO: 16248 - DNA, 33 bp, Homo sapien
aagattctgtcacaaagaaacaaacagaaaaca

SEQ ID NO: 16249 - DNA, 33 bp, Homo sapien
tatacctggcctcttcaatgttttttgacattc

SEQ ID NO: 16250 - DNA, 33 bp, Homo sapien
tatacctggcctcttccatgttttttgacattc

SEQ ID NO: 16251 - DNA, 33 bp, Homo sapien
gaaagaaaaattaaggaaagtgaggagagtggg

SEQ ID NO: 16252 - DNA, 33 bp, Homo sapien
gaaagaaaaattaaggtaagtgaggagagtggg

SEQ ID NO: 16253 - DNA, 33 bp, Homo sapien
gcctgcatcaaaatcccattcccaggatagaaa

SEQ ID NO: 16254 - DNA, 33 bp, Homo sapien
gcctgcatcaaaatccgattcccaggatagaaa

SEQ ID NO: 16255 - DNA, 33 bp, Homo sapien
gtcctcatagaatttacggcttaatgttttttt

SEQ ID NO: 16256 - DNA, 33 bp, Homo sapien
gtcctcatagaatttatggcttaatgttttttt

SEQ ID NO: 16257 - DNA, 33 bp, Homo sapien
ataactaacaagtccactgaattataaactggt

SEQ ID NO: 16258 - DNA, 33 bp, Homo sapien
ataactaacaagtccattgaattataaactggt

SEQ ID NO: 16259 - DNA, 33 bp, Homo sapien
atactctgttattggagctgatgtccctgccag

SEQ ID NO: 16260 - DNA, 33 bp, Homo sapien
atactctgttattggatctgatgtccctgccag

SEQ ID NO: 16261 - DNA, 33 bp, Homo sapien
agggacaacagagaacggatttggatcacctgg

SEQ ID NO: 16262 - DNA, 33 bp, Homo sapien
agggacaacagagaactgatttggatcacctgg

SEQ ID NO: 16263 - DNA, 33 bp, Homo sapien
tgatgtatctcaacctaaacctcacatcttaaa

SEQ ID NO: 16264 - DNA, 33 bp, Homo sapien
tgatgtatctcaaccttaacctcacatcttaaa

SEQ ID NO: 16265 - DNA, 33 bp, Homo sapien
aaaagagataatgtgaatagtcatatatagcta

SEQ ID NO: 16266 - DNA, 33 bp, Homo sapien
aaaagagataatgtgagtagtcatatatagcta

SEQ ID NO: 16267 - DNA, 33 bp, Homo sapien
taaaattccaagtcaaaggtcaaacagtgcact

SEQ ID NO: 16268 - DNA, 33 bp, Homo sapien
taaaattccaagtcaatggtcaaacagtgcact

SEQ ID NO: 16269 - DNA, 33 bp, Homo sapien
tgctgtgtccctctgacggctggtcaaagagtc

SEQ ID NO: 16270 - DNA, 33 bp, Homo sapien
tgctgtgtccctctgatggctggtcaaagagtc

SEQ ID NO: 16271 - DNA, 33 bp, Homo sapien
tttcctgaacaggtcaacgcccatttgtccata

SEQ ID NO: 16272 - DNA, 33 bp, Homo sapien
tttcctgaacaggtcatcgcccatttgtccata

SEQ ID NO: 16273 - DNA, 33 bp, Homo sapien
cacgactctggacttaactggtcctgtggccct

SEQ ID NO: 16274 - DNA, 33 bp, Homo sapien
cacgactctggacttatctggtcctgtggccct

SEQ ID NO: 16275 - DNA, 33 bp, Homo sapien
cactgctacatgcttacggtcagtaatagatga

SEQ ID NO: 16276 - DNA, 33 bp, Homo sapien
cactgctacatgcttatggtcagtaatagatga

SEQ ID NO: 16277 - DNA, 33 bp, Homo sapien
acaaatactcccttccagctcactagctcatcc

SEQ ID NO: 16278 - DNA, 33 bp, Homo sapien
acaaatactcccttcccgctcactagctcatcc

SEQ ID NO: 16279 - DNA, 33 bp, Homo sapien
tgggtgtcgggcaaagaaagctgctatttgtga

SEQ ID NO: 16280 - DNA, 33 bp, Homo sapien
tgggtgtcgggcaaaggaagctgctatttgtga

SEQ ID NO: 16281 - DNA, 33 bp, Homo sapien
agagcacgaggtcattaaaagagattaggcctg

SEQ ID NO: 16282 - DNA, 33 bp, Homo sapien
agagcacgaggtcattgaaagagattaggcctg

SEQ ID NO: 16283 - DNA, 33 bp, Homo sapien
ggcagatagtcgcgaaatgtttgttgacggaat

SEQ ID NO: 16284 - DNA, 33 bp, Homo sapien
ggcagatagtcgcgaagtgtttgttgacggaat

SEQ ID NO: 16285 - DNA, 33 bp, Homo sapien
gcatcactaagccttaagaaatgagggctagag

SEQ ID NO: 16286 - DNA, 33 bp, Homo sapien
gcatcactaagccttatgaaatgagggctagag

SEQ ID NO: 16287 - DNA, 33 bp, Homo sapien
aagattcgttgtgtcacggccacggaaatctag

SEQ ID NO: 16288 - DNA, 33 bp, Homo sapien
aagattcgttgtgtcatggccacggaaatctag

SEQ ID NO: 16289 - DNA, 33 bp, Homo sapien
catttggtatcctcagcccataatgctctatgc

SEQ ID NO: 16290 - DNA, 33 bp, Homo sapien
catttggtatcctcagtccataatgctctatgc

SEQ ID NO: 16291 - DNA, 33 bp, Homo sapien
ctgttctcaagctttccatcggctgactgtcca

SEQ ID NO: 16292 - DNA, 33 bp, Homo sapien
ctgttctcaagctttctatcggctgactgtcca

SEQ ID NO: 16293 - DNA, 33 bp, Homo sapien
ttaggattacgtgcccggagtccagtttactcc

SEQ ID NO: 16294 - DNA, 33 bp, Homo sapien
ttaggattacgtgccctgagtccagtttactcc

SEQ ID NO: 16295 - DNA, 33 bp, Homo sapien
cccattccaacctaccgagatgttgctttctct

SEQ ID NO: 16296 - DNA, 33 bp, Homo sapien
cccattccaacctacctagatgttgctttctct

SEQ ID NO: 16297 - DNA, 33 bp, Homo sapien
cgagaggccagccggggagtgccctgcaggagg

SEQ ID NO: 16298 - DNA, 33 bp, Homo sapien
cgagaggccagccgggtagtgccctgcaggagg

SEQ ID NO: 16299 - DNA, 33 bp, Homo sapien
atatggcccatcagccactcgaggagacaccca

SEQ ID NO: 16300 - DNA, 33 bp, Homo sapien
atatggcccatcagccgctcgaggagacaccca

SEQ ID NO: 16301 - DNA, 33 bp, Homo sapien
catatgaatttaaatacgaagctctgtgcatcc

SEQ ID NO: 16302 - DNA, 33 bp, Homo sapien
catatgaatttaaatatgaagctctgtgcatcc

SEQ ID NO: 16303 - DNA, 33 bp, Homo sapien
atacaaagagatctatgaggttatctccagttt

SEQ ID NO: 16304 - DNA, 33 bp, Homo sapien
atacaaagagatctattaggttatctccagttt

SEQ ID NO: 16305 - DNA, 33 bp, Homo sapien
tctgtacaatgtgaatcatgcctcctacagttg

SEQ ID NO: 16306 - DNA, 33 bp, Homo sapien
tctgtacaatgtgaatgatgcctcctacagttg

SEQ ID NO: 16307 - DNA, 33 bp, Homo sapien
gttacgccttacagcacagtagctggtactgtg

SEQ ID NO: 16308 - DNA, 33 bp, Homo sapien
gttacgccttacagcagagtagctggtactgtg

SEQ ID NO: 16309 - DNA, 33 bp, Homo sapien
tttatagagcccttaccgaaatgagaaaagttc

SEQ ID NO: 16310 - DNA, 33 bp, Homo sapien
tttatagagcccttactgaaatgagaaaagttc

SEQ ID NO: 16311 - DNA, 33 bp, Homo sapien
atgtgaagctaaacacaagttcagttagagaat

SEQ ID NO: 16312 - DNA, 33 bp, Homo sapien
atgtgaagctaaacacgagttcagttagagaat

SEQ ID NO: 16313 - DNA, 33 bp, Homo sapien
tggacagtaaaattaaagtttgagatctctagg

SEQ ID NO: 16314 - DNA, 33 bp, Homo sapien
tggacagtaaaattaaggtttgagatctctagg

SEQ ID NO: 16315 - DNA, 33 bp, Homo sapien
taacagtaacttagcaatactctcattaccaag

SEQ ID NO: 16316 - DNA, 33 bp, Homo sapien
taacagtaacttagcattactctcattaccaag

SEQ ID NO: 16317 - DNA, 33 bp, Homo sapien
gagtatgaggtaggaaaaccacttgaatttggg

SEQ ID NO: 16318 - DNA, 33 bp, Homo sapien
gagtatgaggtaggaagaccacttgaatttggg

SEQ ID NO: 16319 - DNA, 33 bp, Homo sapien
attttcttaaagcctcaaacaagctactgttca

SEQ ID NO: 16320 - DNA, 33 bp, Homo sapien
attttcttaaagcctcgaacaagctactgttca

SEQ ID NO: 16321 - DNA, 33 bp, Homo sapien
ttccaggcaatctccaacaagtcaagtaattac

SEQ ID NO: 16322 - DNA, 33 bp, Homo sapien
ttccaggcaatctccagcaagtcaagtaattac

SEQ ID NO: 16323 - DNA, 33 bp, Homo sapien
ggaagttctcatggacaatactgtgaaatatgt

SEQ ID NO: 16324 - DNA, 33 bp, Homo sapien
ggaagttctcatggacgatactgtgaaatatgt

SEQ ID NO: 16325 - DNA, 33 bp, Homo sapien
agtcactggtctgtgaacttcattcagtgtgtt

SEQ ID NO: 16326 - DNA, 33 bp, Homo sapien
agtcactggtctgtgagcttcattcagtgtgtt

SEQ ID NO: 16327 - DNA, 33 bp, Homo sapien
gtctaaattgcaaaaacgcttgaattgaaaaac

SEQ ID NO: 16328 - DNA, 33 bp, Homo sapien
gtctaaattgcaaaaatgcttgaattgaaaaac

SEQ ID NO: 16329 - DNA, 33 bp, Homo sapien
gtgtgttacaggatataaagtaacatgagaagc

SEQ ID NO: 16330 - DNA, 33 bp, Homo sapien
gtgtgttacaggatattaagtaacatgagaagc

SEQ ID NO: 16331 - DNA, 33 bp, Homo sapien
tttctctatgagaacacattcagtcatgtgttc

SEQ ID NO: 16332 - DNA, 33 bp, Homo sapien
tttctctatgagaacatattcagtcatgtgttc

SEQ ID NO: 16333 - DNA, 33 bp, Homo sapien
accaattagtcacaaactatatttcaaatgtaa

SEQ ID NO: 16334 - DNA, 33 bp, Homo sapien
accaattagtcacaaattatatttcaaatgtaa

SEQ ID NO: 16335 - DNA, 33 bp, Homo sapien
tagagattttttttccgccatagccattcatgg

SEQ ID NO: 16336 - DNA, 33 bp, Homo sapien
tagagattttttttcctccatagccattcatgg

SEQ ID NO: 16337 - DNA, 33 bp, Homo sapien
agatgttttaatacagacagcaatgtaaaataa

SEQ ID NO: 16338 - DNA, 33 bp, Homo sapien
agatgttttaatacaggcagcaatgtaaaataa

SEQ ID NO: 16339 - DNA, 33 bp, Homo sapien
ttctaggtacaaataccagaattatacttgaaa

SEQ ID NO: 16340 - DNA, 33 bp, Homo sapien
ttctaggtacaaatacgagaattatacttgaaa

SEQ ID NO: 16341 - DNA, 33 bp, Homo sapien
ttgtaggaacatctataaggtgctgccagggca

SEQ ID NO: 16342 - DNA, 33 bp, Homo sapien
ttgtaggaacatctatgaggtgctgccagggca

SEQ ID NO: 16343 - DNA, 33 bp, Homo sapien
tcaaagtagaaaagggaatgtagtatgctgttg

SEQ ID NO: 16344 - DNA, 33 bp, Homo sapien
tcaaagtagaaaaggggatgtagtatgctgttg

SEQ ID NO: 16345 - DNA, 33 bp, Homo sapien
aatggctgcttttctaactgctattcctatatt

SEQ ID NO: 16346 - DNA, 33 bp, Homo sapien
aatggctgcttttctacctgctattcctatatt

SEQ ID NO: 16347 - DNA, 33 bp, Homo sapien
gatctggcttctttcaatcactactcatctgaa

SEQ ID NO: 16348 - DNA, 33 bp, Homo sapien
gatctggcttctttcagtcactactcatctgaa

SEQ ID NO: 16349 - DNA, 33 bp, Homo sapien
tatgctcccaatattcaaaggttactatggccc

SEQ ID NO: 16350 - DNA, 33 bp, Homo sapien
tatgctcccaatattcgaaggttactatggccc

SEQ ID NO: 16351 - DNA, 33 bp, Homo sapien
agacagccttcactaacgcagtaagaaatgtgc

SEQ ID NO: 16352 - DNA, 33 bp, Homo sapien
agacagccttcactaatgcagtaagaaatgtgc

SEQ ID NO: 16353 - DNA, 33 bp, Homo sapien
taagtgagatggatatacctaacagttgacaga

SEQ ID NO: 16354 - DNA, 33 bp, Homo sapien
taagtgagatggatatgcctaacagttgacaga

SEQ ID NO: 16355 - DNA, 33 bp, Homo sapien
ctgagatacctagtaaagaaatggctatatgaa

SEQ ID NO: 16356 - DNA, 33 bp, Homo sapien
ctgagatacctagtaacgaaatggctatatgaa

SEQ ID NO: 16357 - DNA, 33 bp, Homo sapien
tgcaacaaggaactgacagcgagtagtttatat

SEQ ID NO: 16358 - DNA, 33 bp, Homo sapien
tgcaacaaggaactgagagcgagtagtttatat

SEQ ID NO: 16359 - DNA, 33 bp, Homo sapien
cctctctcatcttatgcaatctgcctcttttca

SEQ ID NO: 16360 - DNA, 33 bp, Homo sapien
cctctctcatcttatgtaatctgcctcttttca

SEQ ID NO: 16361 - DNA, 33 bp, Homo sapien
ccccaggactttgacacgggaactgctggaaat

SEQ ID NO: 16362 - DNA, 33 bp, Homo sapien
ccccaggactttgacatgggaactgctggaaat

SEQ ID NO: 16363 - DNA, 33 bp, Homo sapien
gcacagagctccactaaagcattttttgtttgt

SEQ ID NO: 16364 - DNA, 33 bp, Homo sapien
gcacagagctccactacagcattttttgtttgt

SEQ ID NO: 16365 - DNA, 33 bp, Homo sapien
cctttctatttcatcaatcaaaattccatatgt

SEQ ID NO: 16366 - DNA, 33 bp, Homo sapien
cctttctatttcatcagtcaaaattccatatgt

SEQ ID NO: 16367 - DNA, 33 bp, Homo sapien
gaattcatttttaaagcattactgaccaatcta

SEQ ID NO: 16368 - DNA, 33 bp, Homo sapien
gaattcatttttaaaggattactgaccaatcta

SEQ ID NO: 16369 - DNA, 33 bp, Homo sapien
cacaggcctggaggcaaaagaagctcagtgttt

SEQ ID NO: 16370 - DNA, 33 bp, Homo sapien
cacaggcctggaggcagaagaagctcagtgttt

SEQ ID NO: 16371 - DNA, 33 bp, Homo sapien
gagagtgagaattagaactagagatcatctagt

SEQ ID NO: 16372 - DNA, 33 bp, Homo sapien
gagagtgagaattagagctagagatcatctagt

SEQ ID NO: 16373 - DNA, 33 bp, Homo sapien
tcaaatcctgggctcacaacttaaaaggtccac

SEQ ID NO: 16374 - DNA, 33 bp, Homo sapien
tcaaatcctgggctcagaacttaaaaggtccac

SEQ ID NO: 16375 - DNA, 33 bp, Homo sapien
taagacttggccaggtaaagagagttgaatggc

SEQ ID NO: 16376 - DNA, 33 bp, Homo sapien
taagacttggccaggtgaagagagttgaatggc

SEQ ID NO: 16377 - DNA, 33 bp, Homo sapien
ctctgccagcacccaaatatcatctttcttact

SEQ ID NO: 16378 - DNA, 33 bp, Homo sapien
ctctgccagcacccaagtatcatctttcttact

SEQ ID NO: 16379 - DNA, 33 bp, Homo sapien
tactgaggcatcagaaagggtatgtgtccttga

SEQ ID NO: 16380 - DNA, 33 bp, Homo sapien
tactgaggcatcagaatgggtatgtgtccttga

SEQ ID NO: 16381 - DNA, 33 bp, Homo sapien
atgcttgagtgctgtaaagagaaaagagaagta

SEQ ID NO: 16382 - DNA, 33 bp, Homo sapien
atgcttgagtgctgtagagagaaaagagaagta

SEQ ID NO: 16383 - DNA, 33 bp, Homo sapien
ctcagacagtatattacgaatgcaaaggtacaa

SEQ ID NO: 16384 - DNA, 33 bp, Homo sapien
ctcagacagtatattatgaatgcaaaggtacaa

SEQ ID NO: 16385 - DNA, 33 bp, Homo sapien
tcacaggtgacttgaaaagctcagtttggaagt

SEQ ID NO: 16386 - DNA, 33 bp, Homo sapien
tcacaggtgacttgaacagctcagtttggaagt

SEQ ID NO: 16387 - DNA, 33 bp, Homo sapien
catgactaattcaaagaactttcatcttcaaaa

SEQ ID NO: 16388 - DNA, 33 bp, Homo sapien
catgactaattcaaagcactttcatcttcaaaa

SEQ ID NO: 16389 - DNA, 33 bp, Homo sapien
cgtataagtaggggtcaactacagtcacacttt

SEQ ID NO: 16390 - DNA, 33 bp, Homo sapien
cgtataagtaggggtcgactacagtcacacttt

SEQ ID NO: 16391 - DNA, 33 bp, Homo sapien
gggctgaaagatgtgacagtctcagaggatggt

SEQ ID NO: 16392 - DNA, 33 bp, Homo sapien
gggctgaaagatgtgatagtctcagaggatggt

SEQ ID NO: 16393 - DNA, 33 bp, Homo sapien
tgtcgaatattgataaaatggtgcacaggtcct

SEQ ID NO: 16394 - DNA, 33 bp, Homo sapien
tgtcgaatattgataacatggtgcacaggtcct

SEQ ID NO: 16395 - DNA, 33 bp, Homo sapien
cctcctcaaacctacaccacaagttacaggcaa

SEQ ID NO: 16396 - DNA, 33 bp, Homo sapien
cctcctcaaacctacatcacaagttacaggcaa

SEQ ID NO: 16397 - DNA, 33 bp, Homo sapien
taagattcataagtgaaaaaagcttccatcaga

SEQ ID NO: 16398 - DNA, 33 bp, Homo sapien
taagattcataagtgagaaaagcttccatcaga

SEQ ID NO: 16399 - DNA, 33 bp, Homo sapien
tctgaagcctacatcacacattgaagctatcgt

SEQ ID NO: 16400 - DNA, 33 bp, Homo sapien
tctgaagcctacatcagacattgaagctatcgt

SEQ ID NO: 16401 - DNA, 33 bp, Homo sapien
tggttacaagccaagaagaaatagctctttgac

SEQ ID NO: 16402 - DNA, 33 bp, Homo sapien
tggttacaagccaagaggaaatagctctttgac

SEQ ID NO: 16403 - DNA, 33 bp, Homo sapien
gcttgtaaccagactaaaaacaaatgccagata

SEQ ID NO: 16404 - DNA, 33 bp, Homo sapien
gcttgtaaccagactataaacaaatgccagata

SEQ ID NO: 16405 - DNA, 33 bp, Homo sapien
cctgtcgccactcccaaatagtcaattaccaag

SEQ ID NO: 16406 - DNA, 33 bp, Homo sapien
cctgtcgccactcccagatagtcaattaccaag

SEQ ID NO: 16407 - DNA, 33 bp, Homo sapien
gagacatagatcaacccgaaaacaaaggatcaa

SEQ ID NO: 16408 - DNA, 33 bp, Homo sapien
gagacatagatcaacctgaaaacaaaggatcaa

SEQ ID NO: 16409 - DNA, 33 bp, Homo sapien
agagatggaagcagagcaagatatgggcaggcc

SEQ ID NO: 16410 - DNA, 33 bp, Homo sapien
agagatggaagcagagtaagatatgggcaggcc

SEQ ID NO: 16411 - DNA, 33 bp, Homo sapien
tgggtctcagcttcaccgtctgaagagtgggat

SEQ ID NO: 16412 - DNA, 33 bp, Homo sapien
tgggtctcagcttcactgtctgaagagtgggat

SEQ ID NO: 16413 - DNA, 33 bp, Homo sapien
attaaatgctgggtgaccttatgctgaatactc

SEQ ID NO: 16414 - DNA, 33 bp, Homo sapien
attaaatgctgggtgatcttatgctgaatactc

SEQ ID NO: 16415 - DNA, 33 bp, Homo sapien
tgtttccaggcatagacgtggagaaagggaatg

SEQ ID NO: 16416 - DNA, 33 bp, Homo sapien
tgtttccaggcatagaggtggagaaagggaatg

SEQ ID NO: 16417 - DNA, 33 bp, Homo sapien
tctgagcttcttctgaaaaactaagatcataat

SEQ ID NO: 16418 - DNA, 33 bp, Homo sapien
tctgagcttcttctgagaaactaagatcataat

SEQ ID NO: 16419 - DNA, 33 bp, Homo sapien
agtgggtagggccagaccatgaaggctttttgt

SEQ ID NO: 16420 - DNA, 33 bp, Homo sapien
agtgggtagggccagatcatgaaggctttttgt

SEQ ID NO: 16421 - DNA, 33 bp, Homo sapien
tctcatttgttcaatgaagaggttatacgagct

SEQ ID NO: 16422 - DNA, 33 bp, Homo sapien
tctcatttgttcaatggagaggttatacgagct

SEQ ID NO: 16423 - DNA, 33 bp, Homo sapien
aaacaatatattttacaacccagaaactcatag

SEQ ID NO: 16424 - DNA, 33 bp, Homo sapien
aaacaatatattttaccacccagaaactcatag

SEQ ID NO: 16425 - DNA, 33 bp, Homo sapien
ggctatatgcagatagcaacctgctcagacggg

SEQ ID NO: 16426 - DNA, 33 bp, Homo sapien
ggctatatgcagataggaacctgctcagacggg

SEQ ID NO: 16427 - DNA, 33 bp, Homo sapien
cccatctgctaaaagaaaagaacaatttctgac

SEQ ID NO: 16428 - DNA, 33 bp, Homo sapien
cccatctgctaaaagagaagaacaatttctgac

SEQ ID NO: 16429 - DNA, 33 bp, Homo sapien
tggatcaagagctataaccaacagatatctcta

SEQ ID NO: 16430 - DNA, 33 bp, Homo sapien
tggatcaagagctatacccaacagatatctcta

SEQ ID NO: 16431 - DNA, 33 bp, Homo sapien
cctctatgggtggtacagaaatgattctgcgtt

SEQ ID NO: 16432 - DNA, 33 bp, Homo sapien
cctctatgggtggtacggaaatgattctgcgtt

SEQ ID NO: 16433 - DNA, 33 bp, Homo sapien
gtattccatagagccacgtataagtaaacagtc

SEQ ID NO: 16434 - DNA, 33 bp, Homo sapien
gtattccatagagccatgtataagtaaacagtc

SEQ ID NO: 16435 - DNA, 33 bp, Homo sapien
ctttccatctccgtacaacaatatgaaaccctg

SEQ ID NO: 16436 - DNA, 33 bp, Homo sapien
ctttccatctccgtacgacaatatgaaaccctg

SEQ ID NO: 16437 - DNA, 33 bp, Homo sapien
agtcttgagggatgaacattgtaacttcaggta

SEQ ID NO: 16438 - DNA, 33 bp, Homo sapien
agtcttgagggatgaatattgtaacttcaggta

SEQ ID NO: 16439 - DNA, 33 bp, Homo sapien
aaggtggaaaagcatcactctcaggcctgcaac

SEQ ID NO: 16440 - DNA, 33 bp, Homo sapien
aaggtggaaaagcatcgctctcaggcctgcaac

SEQ ID NO: 16441 - DNA, 33 bp, Homo sapien
tatgtatgaagtgagcaaataaagatcgaccca

SEQ ID NO: 16442 - DNA, 33 bp, Homo sapien
tatgtatgaagtgagcgaataaagatcgaccca

SEQ ID NO: 16443 - DNA, 33 bp, Homo sapien
gtagctgagacaccctcagaaaagaccatgcct

SEQ ID NO: 16444 - DNA, 33 bp, Homo sapien
gtagctgagacacccttagaaaagaccatgcct

SEQ ID NO: 16445 - DNA, 33 bp, Homo sapien
tgagattcaagttcagcaggtagtagttgggta

SEQ ID NO: 16446 - DNA, 33 bp, Homo sapien
tgagattcaagttcagtaggtagtagttgggta

SEQ ID NO: 16447 - DNA, 33 bp, Homo sapien
tgaatgtggtggtctacagtagtttttccctac

SEQ ID NO: 16448 - DNA, 33 bp, Homo sapien
tgaatgtggtggtctagagtagtttttccctac

SEQ ID NO: 16449 - DNA, 33 bp, Homo sapien
caacaattacctgaagaaaatttagaaagaaca

SEQ ID NO: 16450 - DNA, 33 bp, Homo sapien
caacaattacctgaaggaaatttagaaagaaca

SEQ ID NO: 16451 - DNA, 33 bp, Homo sapien
gtgcagtgactgttggaataaagaaccacgttc

SEQ ID NO: 16452 - DNA, 33 bp, Homo sapien
gtgcagtgactgttgggataaagaaccacgttc

SEQ ID NO: 16453 - DNA, 33 bp, Homo sapien
ggaatgtggaatgttacaatgggggaagcattt

SEQ ID NO: 16454 - DNA, 33 bp, Homo sapien
ggaatgtggaatgttataatgggggaagcattt

SEQ ID NO: 16455 - DNA, 33 bp, Homo sapien
cttggagagttaatgacgaggccagtttgaatc

SEQ ID NO: 16456 - DNA, 33 bp, Homo sapien
cttggagagttaatgatgaggccagtttgaatc

SEQ ID NO: 16457 - DNA, 33 bp, Homo sapien
ggcagtggcaacagaaataatctccctgttgag

SEQ ID NO: 16458 - DNA, 33 bp, Homo sapien
ggcagtggcaacagaagtaatctccctgttgag

SEQ ID NO: 16459 - DNA, 33 bp, Homo sapien
cttgttaatccacttaaaatgatggatgtttta

SEQ ID NO: 16460 - DNA, 33 bp, Homo sapien
cttgttaatccacttacaatgatggatgtttta

SEQ ID NO: 16461 - DNA, 33 bp, Homo sapien
gcccaatttgttagtcgcttttccaataagccc

SEQ ID NO: 16462 - DNA, 33 bp, Homo sapien
gcccaatttgttagtctcttttccaataagccc

SEQ ID NO: 16463 - DNA, 33 bp, Homo sapien
caaaccttgtcccttacgttatctcactgggtt

SEQ ID NO: 16464 - DNA, 33 bp, Homo sapien
caaaccttgtcccttatgttatctcactgggtt

SEQ ID NO: 16465 - DNA, 33 bp, Homo sapien
agtggttcctcagacactgccttagcatgatgc

SEQ ID NO: 16466 - DNA, 33 bp, Homo sapien
agtggttcctcagacattgccttagcatgatgc

SEQ ID NO: 16467 - DNA, 33 bp, Homo sapien
ccaggaagacttacccacagtctccttgccctc

SEQ ID NO: 16468 - DNA, 33 bp, Homo sapien
ccaggaagacttacccgcagtctccttgccctc

SEQ ID NO: 16469 - DNA, 33 bp, Homo sapien
tggagtccttatactcagaaagcccagcaacat

SEQ ID NO: 16470 - DNA, 33 bp, Homo sapien
tggagtccttatactcggaaagcccagcaacat

SEQ ID NO: 16471 - DNA, 33 bp, Homo sapien
gactaggatagatttcaaacattgattatgttc

SEQ ID NO: 16472 - DNA, 33 bp, Homo sapien
gactaggatagatttccaacattgattatgttc

SEQ ID NO: 16473 - DNA, 33 bp, Homo sapien
gatgcagctagagaaagatatggtccacagagg

SEQ ID NO: 16474 - DNA, 33 bp, Homo sapien
gatgcagctagagaaatatatggtccacagagg

SEQ ID NO: 16475 - DNA, 33 bp, Homo sapien
ttttcctggtctctcacgcctgcctctaggagg

SEQ ID NO: 16476 - DNA, 33 bp, Homo sapien
ttttcctggtctctcatgcctgcctctaggagg

SEQ ID NO: 16477 - DNA, 33 bp, Homo sapien
tccacatcttgtgacacgggaaggtcttcaggg

SEQ ID NO: 16478 - DNA, 33 bp, Homo sapien
tccacatcttgtgacatgggaaggtcttcaggg

SEQ ID NO: 16479 - DNA, 33 bp, Homo sapien
tattgcattgtactaaccatttcacatacattg

SEQ ID NO: 16480 - DNA, 33 bp, Homo sapien
tattgcattgtactaagcatttcacatacattg

SEQ ID NO: 16481 - DNA, 33 bp, Homo sapien
ggttcatcaagccccaacggctcctctcattca

SEQ ID NO: 16482 - DNA, 33 bp, Homo sapien
ggttcatcaagccccatcggctcctctcattca

SEQ ID NO: 16483 - DNA, 33 bp, Homo sapien
aaaagcctccaaaatacgatagcctctgagagg

SEQ ID NO: 16484 - DNA, 33 bp, Homo sapien
aaaagcctccaaaatatgatagcctctgagagg

SEQ ID NO: 16485 - DNA, 33 bp, Homo sapien
tgttccaatcctccacactgaagccagaatgaa

SEQ ID NO: 16486 - DNA, 33 bp, Homo sapien
tgttccaatcctccacgctgaagccagaatgaa

SEQ ID NO: 16487 - DNA, 33 bp, Homo sapien
tgggcacgatgaatgacataataagaattcatc

SEQ ID NO: 16488 - DNA, 33 bp, Homo sapien
tgggcacgatgaatgatataataagaattcatc

SEQ ID NO: 16489 - DNA, 33 bp, Homo sapien
gagcccgtattgccaacagtcacactggacccc

SEQ ID NO: 16490 - DNA, 33 bp, Homo sapien
gagcccgtattgccaatagtcacactggacccc

SEQ ID NO: 16491 - DNA, 33 bp, Homo sapien
ttcattccttactgaaatgtgctcctcctaacc

SEQ ID NO: 16492 - DNA, 33 bp, Homo sapien
ttcattccttactgaagtgtgctcctcctaacc

SEQ ID NO: 16493 - DNA, 33 bp, Homo sapien
aaatatattttgatcaagttccatcctaccaga

SEQ ID NO: 16494 - DNA, 33 bp, Homo sapien
aaatatattttgatcaggttccatcctaccaga

SEQ ID NO: 16495 - DNA, 33 bp, Homo sapien
gatgaggtagtgttcaacgccaagacaaacagc

SEQ ID NO: 16496 - DNA, 33 bp, Homo sapien
gatgaggtagtgttcagcgccaagacaaacagc

SEQ ID NO: 16497 - DNA, 33 bp, Homo sapien
tgcctatattccctgacaaagcacacacaaaat

SEQ ID NO: 16498 - DNA, 33 bp, Homo sapien
tgcctatattccctgataaagcacacacaaaat

SEQ ID NO: 16499 - DNA, 33 bp, Homo sapien
ctaagaaggcagagaacaaccagaaagcgaatg

SEQ ID NO: 16500 - DNA, 33 bp, Homo sapien
ctaagaaggcagagaataaccagaaagcgaatg

SEQ ID NO: 16501 - DNA, 33 bp, Homo sapien
tgatgaatttttgttacccaaacaggaatcagt

SEQ ID NO: 16502 - DNA, 33 bp, Homo sapien
tgatgaatttttgttatccaaacaggaatcagt

SEQ ID NO: 16503 - DNA, 33 bp, Homo sapien
aatgggttggactcaacataaatcaactggagc

SEQ ID NO: 16504 - DNA, 33 bp, Homo sapien
aatgggttggactcaatataaatcaactggagc

SEQ ID NO: 16505 - DNA, 33 bp, Homo sapien
atctcagcagataaaacgacttacgattttgtc

SEQ ID NO: 16506 - DNA, 33 bp, Homo sapien
atctcagcagataaaatgacttacgattttgtc

SEQ ID NO: 16507 - DNA, 33 bp, Homo sapien
tagatgtcctcaactggagctgtcattcactca

SEQ ID NO: 16508 - DNA, 33 bp, Homo sapien
tagatgtcctcaactgtagctgtcattcactca

SEQ ID NO: 16509 - DNA, 33 bp, Homo sapien
ggctaacaaactcataccaaattaggctctctg

SEQ ID NO: 16510 - DNA, 33 bp, Homo sapien
ggctaacaaactcatagcaaattaggctctctg

SEQ ID NO: 16511 - DNA, 33 bp, Homo sapien
ctttgttcatctggaaaaagtcaacattcttta

SEQ ID NO: 16512 - DNA, 33 bp, Homo sapien
ctttgttcatctggaagaagtcaacattcttta

SEQ ID NO: 16513 - DNA, 33 bp, Homo sapien
tctgaagtcactgtaagcaattctcagagccac

SEQ ID NO: 16514 - DNA, 33 bp, Homo sapien
tctgaagtcactgtaatcaattctcagagccac

SEQ ID NO: 16515 - DNA, 33 bp, Homo sapien
agtttccagttcttccactcttcaacttctgca

SEQ ID NO: 16516 - DNA, 33 bp, Homo sapien
agtttccagttcttccgctcttcaacttctgca

SEQ ID NO: 16517 - DNA, 33 bp, Homo sapien
ttctttccctatcaccaactgaacctcagtacc

SEQ ID NO: 16518 - DNA, 33 bp, Homo sapien
ttctttccctatcaccgactgaacctcagtacc

SEQ ID NO: 16519 - DNA, 33 bp, Homo sapien
tgaaggtgttgtgagacgtgggccaggaatttt

SEQ ID NO: 16520 - DNA, 33 bp, Homo sapien
tgaaggtgttgtgagaggtgggccaggaatttt

SEQ ID NO: 16521 - DNA, 33 bp, Homo sapien
tcctccactcttccccagcagtaagaggtgatt

SEQ ID NO: 16522 - DNA, 33 bp, Homo sapien
tcctccactcttccccggcagtaagaggtgatt

SEQ ID NO: 16523 - DNA, 33 bp, Homo sapien
ggactcaaagtactcacgatttagtggggagaa

SEQ ID NO: 16524 - DNA, 33 bp, Homo sapien
ggactcaaagtactcatgatttagtggggagaa

SEQ ID NO: 16525 - DNA, 33 bp, Homo sapien
ttcatggggatttcctcaactatggaacaggga

SEQ ID NO: 16526 - DNA, 33 bp, Homo sapien
ttcatggggatttccttaactatggaacaggga

SEQ ID NO: 16527 - DNA, 33 bp, Homo sapien
tagctggaaaatcacacagttgtctgcatcctg

SEQ ID NO: 16528 - DNA, 33 bp, Homo sapien
tagctggaaaatcacagagttgtctgcatcctg

SEQ ID NO: 16529 - DNA, 33 bp, Homo sapien
ggtagagaaaactgcaacatcttaatctcctct

SEQ ID NO: 16530 - DNA, 33 bp, Homo sapien
ggtagagaaaactgcatcatcttaatctcctct

SEQ ID NO: 16531 - DNA, 33 bp, Homo sapien
ctcagtttagttgacaaaaaaagcaggagtact

SEQ ID NO: 16532 - DNA, 33 bp, Homo sapien
ctcagtttagttgacagaaaaagcaggagtact

SEQ ID NO: 16533 - DNA, 33 bp, Homo sapien
tgctttcagaaagagacaccacatctgactgag

SEQ ID NO: 16534 - DNA, 33 bp, Homo sapien
tgctttcagaaagagagaccacatctgactgag

SEQ ID NO: 16535 - DNA, 33 bp, Homo sapien
atgaataggaattaacgagatcaacaagtgtga

SEQ ID NO: 16536 - DNA, 33 bp, Homo sapien
atgaataggaattaactagatcaacaagtgtga

SEQ ID NO: 16537 - DNA, 33 bp, Homo sapien
gcttccacagtagcaacaggactggaagcccag

SEQ ID NO: 16538 - DNA, 33 bp, Homo sapien
gcttccacagtagcaataggactggaagcccag

SEQ ID NO: 16539 - DNA, 33 bp, Homo sapien
ccccctctatcaagataaagataagtcaagatc

SEQ ID NO: 16540 - DNA, 33 bp, Homo sapien
ccccctctatcaagatcaagataagtcaagatc

SEQ ID NO: 16541 - DNA, 33 bp, Homo sapien
aatgtttgcttcatagccctgattcaaggtgtc

SEQ ID NO: 16542 - DNA, 33 bp, Homo sapien
aatgtttgcttcatagtcctgattcaaggtgtc

SEQ ID NO: 16543 - DNA, 33 bp, Homo sapien
tcttagtttttgaaaacgctacacagaggacaa

SEQ ID NO: 16544 - DNA, 33 bp, Homo sapien
tcttagtttttgaaaatgctacacagaggacaa

SEQ ID NO: 16545 - DNA, 33 bp, Homo sapien
taatcataagaaactcaaatggaaagtcctgat

SEQ ID NO: 16546 - DNA, 33 bp, Homo sapien
taatcataagaaactcgaatggaaagtcctgat

SEQ ID NO: 16547 - DNA, 33 bp, Homo sapien
attgtagtcagatgggaaagcatggataccaga

SEQ ID NO: 16548 - DNA, 33 bp, Homo sapien
attgtagtcagatggggaagcatggataccaga

SEQ ID NO: 16549 - DNA, 33 bp, Homo sapien
ggattttacctatcaacggattcctaaactcaa

SEQ ID NO: 16550 - DNA, 33 bp, Homo sapien
ggattttacctatcaatggattcctaaactcaa

SEQ ID NO: 16551 - DNA, 33 bp, Homo sapien
acattacaatggacaaagtgatttttcaaccaa

SEQ ID NO: 16552 - DNA, 33 bp, Homo sapien
acattacaatggacaaggtgatttttcaaccaa

SEQ ID NO: 16553 - DNA, 33 bp, Homo sapien
aaatggcccttgatacaaaaaaggaagtcttat

SEQ ID NO: 16554 - DNA, 33 bp, Homo sapien
aaatggcccttgatacgaaaaaggaagtcttat

SEQ ID NO: 16555 - DNA, 33 bp, Homo sapien
tatgtaaagtggctaacgtagtaaagtacatga

SEQ ID NO: 16556 - DNA, 33 bp, Homo sapien
tatgtaaagtggctaatgtagtaaagtacatga

SEQ ID NO: 16557 - DNA, 33 bp, Homo sapien
ctgacccctggcaaccactgttataactttctg

SEQ ID NO: 16558 - DNA, 33 bp, Homo sapien
ctgacccctggcaaccgctgttataactttctg

SEQ ID NO: 16559 - DNA, 33 bp, Homo sapien
atgctagaaagtcgcaataactgtagactttgt

SEQ ID NO: 16560 - DNA, 33 bp, Homo sapien
atgctagaaagtcgcagtaactgtagactttgt

SEQ ID NO: 16561 - DNA, 33 bp, Homo sapien
ttgctacctttcttgcgctgccagtaggaggta

SEQ ID NO: 16562 - DNA, 33 bp, Homo sapien
ttgctacctttcttgctctgccagtaggaggta

SEQ ID NO: 16563 - DNA, 33 bp, Homo sapien
acacctactttgcttgaatttgtgaagtagtaa

SEQ ID NO: 16564 - DNA, 33 bp, Homo sapien
acacctactttgcttgcatttgtgaagtagtaa

SEQ ID NO: 16565 - DNA, 33 bp, Homo sapien
atggcatttcagtctcacttgctcattttagag

SEQ ID NO: 16566 - DNA, 33 bp, Homo sapien
atggcatttcagtctcgcttgctcattttagag

SEQ ID NO: 16567 - DNA, 33 bp, Homo sapien
gtaaaatcagtacatgacacagagtacccctca

SEQ ID NO: 16568 - DNA, 33 bp, Homo sapien
gtaaaatcagtacatgtcacagagtacccctca

SEQ ID NO: 16569 - DNA, 33 bp, Homo sapien
ctatgtatgtgccaggcatcttgctggggatag

SEQ ID NO: 16570 - DNA, 33 bp, Homo sapien
ctatgtatgtgccaggtatcttgctggggatag

SEQ ID NO: 16571 - DNA, 33 bp, Homo sapien
actggaaatcaatgtgacaatatgaacaaagag

SEQ ID NO: 16572 - DNA, 33 bp, Homo sapien
actggaaatcaatgtggcaatatgaacaaagag

SEQ ID NO: 16573 - DNA, 33 bp, Homo sapien
gcccaatgatgctcccagagaagtgtgacgccc

SEQ ID NO: 16574 - DNA, 33 bp, Homo sapien
gcccaatgatgctcccggagaagtgtgacgccc

SEQ ID NO: 16575 - DNA, 33 bp, Homo sapien
cctaaagagaaggactcaggactgtttcttata

SEQ ID NO: 16576 - DNA, 33 bp, Homo sapien
cctaaagagaaggacttaggactgtttcttata

SEQ ID NO: 16577 - DNA, 33 bp, Homo sapien
agctaaaggagccaaaaagaaggatccacatgt

SEQ ID NO: 16578 - DNA, 33 bp, Homo sapien
agctaaaggagccaaagagaaggatccacatgt

SEQ ID NO: 16579 - DNA, 33 bp, Homo sapien
tccagtgatcctaacactcaagatcacagcctg

SEQ ID NO: 16580 - DNA, 33 bp, Homo sapien
tccagtgatcctaacagtcaagatcacagcctg

SEQ ID NO: 16581 - DNA, 33 bp, Homo sapien
tcttaatgtgctttgaaaaacttccttatagct

SEQ ID NO: 16582 - DNA, 33 bp, Homo sapien
tcttaatgtgctttgataaacttccttatagct

SEQ ID NO: 16583 - DNA, 33 bp, Homo sapien
ttaaccaattcccaataattagcatttccattt

SEQ ID NO: 16584 - DNA, 33 bp, Homo sapien
ttaaccaattcccaatcattagcatttccattt

SEQ ID NO: 16585 - DNA, 33 bp, Homo sapien
ttagcctttacctctccagacaaagttcatcca

SEQ ID NO: 16586 - DNA, 33 bp, Homo sapien
ttagcctttacctctctagacaaagttcatcca

SEQ ID NO: 16587 - DNA, 33 bp, Homo sapien
cagctcactgccattgcaccatttctgtacata

SEQ ID NO: 16588 - DNA, 33 bp, Homo sapien
cagctcactgccattggaccatttctgtacata

SEQ ID NO: 16589 - DNA, 33 bp, Homo sapien
gaagatgtaggaaacactggatcatgcaagacc

SEQ ID NO: 16590 - DNA, 33 bp, Homo sapien
gaagatgtaggaaacagtggatcatgcaagacc

SEQ ID NO: 16591 - DNA, 33 bp, Homo sapien
aggctgtggagaacgaaaagagaaggcagccta

SEQ ID NO: 16592 - DNA, 33 bp, Homo sapien
aggctgtggagaacgagaagagaaggcagccta

SEQ ID NO: 16593 - DNA, 33 bp, Homo sapien
ctttctgctttgtggaccaagtgtcacagatga

SEQ ID NO: 16594 - DNA, 33 bp, Homo sapien
ctttctgctttgtggatcaagtgtcacagatga

SEQ ID NO: 16595 - DNA, 33 bp, Homo sapien
tgtttcttgaggaaaaaggggcaaaattacctc

SEQ ID NO: 16596 - DNA, 33 bp, Homo sapien
tgtttcttgaggaaaagggggcaaaattacctc

SEQ ID NO: 16597 - DNA, 33 bp, Homo sapien
caacaaatagctgcccaaaaaatatcaattaat

SEQ ID NO: 16598 - DNA, 33 bp, Homo sapien
caacaaatagctgccccaaaaatatcaattaat

SEQ ID NO: 16599 - DNA, 33 bp, Homo sapien
ttagattcaaatccacattccacttaatatccc

SEQ ID NO: 16600 - DNA, 33 bp, Homo sapien
ttagattcaaatccactttccacttaatatccc

SEQ ID NO: 16601 - DNA, 33 bp, Homo sapien
tgccacccacttcaacaatgctctctaatctag

SEQ ID NO: 16602 - DNA, 33 bp, Homo sapien
tgccacccacttcaacgatgctctctaatctag

SEQ ID NO: 16603 - DNA, 33 bp, Homo sapien
ttcatttcccaaaacactacttgtagcctacaa

SEQ ID NO: 16604 - DNA, 33 bp, Homo sapien
ttcatttcccaaaacagtacttgtagcctacaa

SEQ ID NO: 16605 - DNA, 33 bp, Homo sapien
ccaatcctgtatcccaatgccagaaattaactc

SEQ ID NO: 16606 - DNA, 33 bp, Homo sapien
ccaatcctgtatcccagtgccagaaattaactc

SEQ ID NO: 16607 - DNA, 33 bp, Homo sapien
aaatgagataacatgaaaaaacctaaattcatc

SEQ ID NO: 16608 - DNA, 33 bp, Homo sapien
aaatgagataacatgagaaaacctaaattcatc

SEQ ID NO: 16609 - DNA, 33 bp, Homo sapien
agttacattacaaccaatcaatggctttccatc

SEQ ID NO: 16610 - DNA, 33 bp, Homo sapien
agttacattacaaccagtcaatggctttccatc

SEQ ID NO: 16611 - DNA, 33 bp, Homo sapien
ggtagcaaggcccgaagaatccaggtcttatac

SEQ ID NO: 16612 - DNA, 33 bp, Homo sapien
ggtagcaaggcccgaataatccaggtcttatac

SEQ ID NO: 16613 - DNA, 33 bp, Homo sapien
cctgaacagagacatacatttgattgctcacat

SEQ ID NO: 16614 - DNA, 33 bp, Homo sapien
cctgaacagagacatatatttgattgctcacat

SEQ ID NO: 16615 - DNA, 33 bp, Homo sapien
tgttcaataatatggacggttgacttaaataag

SEQ ID NO: 16616 - DNA, 33 bp, Homo sapien
tgttcaataatatggatggttgacttaaataag

SEQ ID NO: 16617 - DNA, 33 bp, Homo sapien
cctcggtacgaagtgacgtaagtttagagttag

SEQ ID NO: 16618 - DNA, 33 bp, Homo sapien
cctcggtacgaagtgaggtaagtttagagttag

SEQ ID NO: 16619 - DNA, 33 bp, Homo sapien
ttgtgaaataatatgaagtgtgaaatagtcagg

SEQ ID NO: 16620 - DNA, 33 bp, Homo sapien
ttgtgaaataatatgaggtgtgaaatagtcagg

SEQ ID NO: 16621 - DNA, 33 bp, Homo sapien
ttggtctctgctactgacagattcgatattcag

SEQ ID NO: 16622 - DNA, 33 bp, Homo sapien
ttggtctctgctactggcagattcgatattcag

SEQ ID NO: 16623 - DNA, 33 bp, Homo sapien
taatgaggataaattgcagaaatgaggataatg

SEQ ID NO: 16624 - DNA, 33 bp, Homo sapien
taatgaggataaattggagaaatgaggataatg

SEQ ID NO: 16625 - DNA, 33 bp, Homo sapien
gaaaaagctcagggaaagttgctacaatcatga

SEQ ID NO: 16626 - DNA, 33 bp, Homo sapien
gaaaaagctcagggaaggttgctacaatcatga

SEQ ID NO: 16627 - DNA, 33 bp, Homo sapien
tcacttctagctgagaaagaataacagtttgga

SEQ ID NO: 16628 - DNA, 33 bp, Homo sapien
tcacttctagctgagacagaataacagtttgga

SEQ ID NO: 16629 - DNA, 33 bp, Homo sapien
attaggtgacaccagaaaagtatttgctcagct

SEQ ID NO: 16630 - DNA, 33 bp, Homo sapien
attaggtgacaccagagaagtatttgctcagct

SEQ ID NO: 16631 - DNA, 33 bp, Homo sapien
ttcccattttataggcaagaataccaacaaaca

SEQ ID NO: 16632 - DNA, 33 bp, Homo sapien
ttcccattttataggcgagaataccaacaaaca

SEQ ID NO: 16633 - DNA, 33 bp, Homo sapien
gtagccttgctcactgaaagttgaaataattag

SEQ ID NO: 16634 - DNA, 33 bp, Homo sapien
gtagccttgctcactggaagttgaaataattag

SEQ ID NO: 16635 - DNA, 33 bp, Homo sapien
gttggtttttattagacgctagttatagtggaa

SEQ ID NO: 16636 - DNA, 33 bp, Homo sapien
gttggtttttattagatgctagttatagtggaa

SEQ ID NO: 16637 - DNA, 33 bp, Homo sapien
actgcccctttaatgaaaaacagctaccactgg

SEQ ID NO: 16638 - DNA, 33 bp, Homo sapien
actgcccctttaatgacaaacagctaccactgg

SEQ ID NO: 16639 - DNA, 33 bp, Homo sapien
tgatgtttccagccaaaggtctgtgatagtcac

SEQ ID NO: 16640 - DNA, 33 bp, Homo sapien
tgatgtttccagccaatggtctgtgatagtcac

SEQ ID NO: 16641 - DNA, 33 bp, Homo sapien
cattttggaactttaacattcagtgacgaccga

SEQ ID NO: 16642 - DNA, 33 bp, Homo sapien
cattttggaactttaatattcagtgacgaccga

SEQ ID NO: 16643 - DNA, 33 bp, Homo sapien
taaagatttacccctaaaagagatgcagaggat

SEQ ID NO: 16644 - DNA, 33 bp, Homo sapien
taaagatttacccctagaagagatgcagaggat

SEQ ID NO: 16645 - DNA, 33 bp, Homo sapien
tttcttatgcctcaaagaaacaaaatattggta

SEQ ID NO: 16646 - DNA, 33 bp, Homo sapien
tttcttatgcctcaaataaacaaaatattggta

SEQ ID NO: 16647 - DNA, 33 bp, Homo sapien
tgctttcctgggaaaaaaggaggctgcagctgc

SEQ ID NO: 16648 - DNA, 33 bp, Homo sapien
tgctttcctgggaaaagaggaggctgcagctgc

SEQ ID NO: 16649 - DNA, 33 bp, Homo sapien
gcagcatggtgaaatacagcatcttaacttgga

SEQ ID NO: 16650 - DNA, 33 bp, Homo sapien
gcagcatggtgaaatatagcatcttaacttgga

SEQ ID NO: 16651 - DNA, 33 bp, Homo sapien
gtttgggacccaatcactaagggatttgaatgt

SEQ ID NO: 16652 - DNA, 33 bp, Homo sapien
gtttgggacccaatcattaagggatttgaatgt

SEQ ID NO: 16653 - DNA, 33 bp, Homo sapien
gcagagggttgaaagtaaagatccctggtagca

SEQ ID NO: 16654 - DNA, 33 bp, Homo sapien
gcagagggttgaaagtgaagatccctggtagca

SEQ ID NO: 16655 - DNA, 33 bp, Homo sapien
aaaatcaagagtagacagaattgaattgtcact

SEQ ID NO: 16656 - DNA, 33 bp, Homo sapien
aaaatcaagagtagactgaattgaattgtcact

SEQ ID NO: 16657 - DNA, 33 bp, Homo sapien
gaaataatgtaaataaagcagttagcaatgcct

SEQ ID NO: 16658 - DNA, 33 bp, Homo sapien
gaaataatgtaaataaggcagttagcaatgcct

SEQ ID NO: 16659 - DNA, 33 bp, Homo sapien
cacttcaaagagtctacggcaaatgaaatataa

SEQ ID NO: 16660 - DNA, 33 bp, Homo sapien
cacttcaaagagtctatggcaaatgaaatataa

SEQ ID NO: 16661 - DNA, 33 bp, Homo sapien
tgctgcttagaaaataaagaaaattgccaagtg

SEQ ID NO: 16662 - DNA, 33 bp, Homo sapien
tgctgcttagaaaatagagaaaattgccaagtg

SEQ ID NO: 16663 - DNA, 33 bp, Homo sapien
aaaacaataaaagttacgtacaacttgatcatt

SEQ ID NO: 16664 - DNA, 33 bp, Homo sapien
aaaacaataaaagttaggtacaacttgatcatt

SEQ ID NO: 16665 - DNA, 33 bp, Homo sapien
tgacccttgaaaaccaagacagagctttgttga

SEQ ID NO: 16666 - DNA, 33 bp, Homo sapien
tgacccttgaaaaccacgacagagctttgttga

SEQ ID NO: 16667 - DNA, 33 bp, Homo sapien
ggttaatatttaaccacgatgttcaactctctc

SEQ ID NO: 16668 - DNA, 33 bp, Homo sapien
ggttaatatttaaccatgatgttcaactctctc

SEQ ID NO: 16669 - DNA, 33 bp, Homo sapien
atctgccctccagcatcaagtagtcacacttgc

SEQ ID NO: 16670 - DNA, 33 bp, Homo sapien
atctgccctccagcattaagtagtcacacttgc

SEQ ID NO: 16671 - DNA, 33 bp, Homo sapien
aaaaacaacattccataacatccatgtaattgc

SEQ ID NO: 16672 - DNA, 33 bp, Homo sapien
aaaaacaacattccatcacatccatgtaattgc

SEQ ID NO: 16673 - DNA, 33 bp, Homo sapien
gtgccatctagaaacacggatagatggactctt

SEQ ID NO: 16674 - DNA, 33 bp, Homo sapien
gtgccatctagaaacatggatagatggactctt

SEQ ID NO: 16675 - DNA, 33 bp, Homo sapien
atgtggccaaaaatcacggaaaaaagctcagca

SEQ ID NO: 16676 - DNA, 33 bp, Homo sapien
atgtggccaaaaatcatggaaaaaagctcagca

SEQ ID NO: 16677 - DNA, 33 bp, Homo sapien
tgtgtttagggaacaacaaaagactacatatat

SEQ ID NO: 16678 - DNA, 33 bp, Homo sapien
tgtgtttagggaacaataaaagactacatatat

SEQ ID NO: 16679 - DNA, 33 bp, Homo sapien
actatgtgaaaaacgaatccttatctattataa

SEQ ID NO: 16680 - DNA, 33 bp, Homo sapien
actatgtgaaaaacgagtccttatctattataa

SEQ ID NO: 16681 - DNA, 33 bp, Homo sapien
taactggaaattgtcaatcttcacacagatact

SEQ ID NO: 16682 - DNA, 33 bp, Homo sapien
taactggaaattgtcagtcttcacacagatact

SEQ ID NO: 16683 - DNA, 33 bp, Homo sapien
ttaagtaccaatgtaagctagaggttttctgta

SEQ ID NO: 16684 - DNA, 33 bp, Homo sapien
ttaagtaccaatgtaatctagaggttttctgta

SEQ ID NO: 16685 - DNA, 33 bp, Homo sapien
ctgttcaattgctgagcatagacaatcctttac

SEQ ID NO: 16686 - DNA, 33 bp, Homo sapien
ctgttcaattgctgagtatagacaatcctttac

SEQ ID NO: 16687 - DNA, 33 bp, Homo sapien
gatttcttggaaccagaaaatatgcaggtaaag

SEQ ID NO: 16688 - DNA, 33 bp, Homo sapien
gatttcttggaaccaggaaatatgcaggtaaag

SEQ ID NO: 16689 - DNA, 33 bp, Homo sapien
attttctatttcattaaaggctgccatatagtt

SEQ ID NO: 16690 - DNA, 33 bp, Homo sapien
attttctatttcattagaggctgccatatagtt

SEQ ID NO: 16691 - DNA, 33 bp, Homo sapien
caaaagggcattcaaacgtggtcagaggtcagg

SEQ ID NO: 16692 - DNA, 33 bp, Homo sapien
caaaagggcattcaaatgtggtcagaggtcagg

SEQ ID NO: 16693 - DNA, 33 bp, Homo sapien
caaaaaaaccataaaactcaggataattattct

SEQ ID NO: 16694 - DNA, 33 bp, Homo sapien
caaaaaaaccataaaattcaggataattattct

SEQ ID NO: 16695 - DNA, 33 bp, Homo sapien
aagggccataaatagaccaataatgacagtata

SEQ ID NO: 16696 - DNA, 33 bp, Homo sapien
aagggccataaatagatcaataatgacagtata

SEQ ID NO: 16697 - DNA, 33 bp, Homo sapien
gtcatgagtcaatgcgaatgaatattttcaagg

SEQ ID NO: 16698 - DNA, 33 bp, Homo sapien
gtcatgagtcaatgcgtatgaatattttcaagg

SEQ ID NO: 16699 - DNA, 33 bp, Homo sapien
gctgtggttctcaatgcaggcaaagtgggaaat

SEQ ID NO: 16700 - DNA, 33 bp, Homo sapien
gctgtggttctcaatgtaggcaaagtgggaaat

SEQ ID NO: 16701 - DNA, 33 bp, Homo sapien
gcttacctgtgcaaacgcctatctttctacttc

SEQ ID NO: 16702 - DNA, 33 bp, Homo sapien
gcttacctgtgcaaactcctatctttctacttc

SEQ ID NO: 16703 - DNA, 33 bp, Homo sapien
ataccttgtgccactaccctctatttcaattcc

SEQ ID NO: 16704 - DNA, 33 bp, Homo sapien
ataccttgtgccactatcctctatttcaattcc

SEQ ID NO: 16705 - DNA, 33 bp, Homo sapien
tccacatgaacatttcaagtatggataaaaaag

SEQ ID NO: 16706 - DNA, 33 bp, Homo sapien
tccacatgaacatttctagtatggataaaaaag

SEQ ID NO: 16707 - DNA, 33 bp, Homo sapien
ttggcattgtaactgacgcaaaatagtaataat

SEQ ID NO: 16708 - DNA, 33 bp, Homo sapien
ttggcattgtaactgatgcaaaatagtaataat

SEQ ID NO: 16709 - DNA, 33 bp, Homo sapien
cacacctacatgcaacaatggcaaaaaataaat

SEQ ID NO: 16710 - DNA, 33 bp, Homo sapien
cacacctacatgcaacgatggcaaaaaataaat

SEQ ID NO: 16711 - DNA, 33 bp, Homo sapien
gtttgtttcgtcataaccatagacagactctat

SEQ ID NO: 16712 - DNA, 33 bp, Homo sapien
gtttgtttcgtcataagcatagacagactctat

SEQ ID NO: 16713 - DNA, 33 bp, Homo sapien
agagagtgatttatcaccatattcacaaattct

SEQ ID NO: 16714 - DNA, 33 bp, Homo sapien
agagagtgatttatcatcatattcacaaattct

SEQ ID NO: 16715 - DNA, 33 bp, Homo sapien
tctccattgtgagcaacagttgctataattcaa

SEQ ID NO: 16716 - DNA, 33 bp, Homo sapien
tctccattgtgagcaatagttgctataattcaa

SEQ ID NO: 16717 - DNA, 33 bp, Homo sapien
cagtagtttcataccacgtacagaagcaagtgg

SEQ ID NO: 16718 - DNA, 33 bp, Homo sapien
cagtagtttcataccatgtacagaagcaagtgg

SEQ ID NO: 16719 - DNA, 33 bp, Homo sapien
ttagtaactctcactacgactgctcaggaaagc

SEQ ID NO: 16720 - DNA, 33 bp, Homo sapien
ttagtaactctcactatgactgctcaggaaagc

SEQ ID NO: 16721 - DNA, 33 bp, Homo sapien
cttgaaccttaggtaccagaatggccacagtgt

SEQ ID NO: 16722 - DNA, 33 bp, Homo sapien
cttgaaccttaggtactagaatggccacagtgt

SEQ ID NO: 16723 - DNA, 33 bp, Homo sapien
actcacactatcacaaagtacaatttcccaata

SEQ ID NO: 16724 - DNA, 33 bp, Homo sapien
actcacactatcacaaggtacaatttcccaata

SEQ ID NO: 16725 - DNA, 33 bp, Homo sapien
caggtgatccactcaaagtagatgatttctgag

SEQ ID NO: 16726 - DNA, 33 bp, Homo sapien
caggtgatccactcaaggtagatgatttctgag

SEQ ID NO: 16727 - DNA, 33 bp, Homo sapien
gtgtgataggtagttacgattttcctcatatat

SEQ ID NO: 16728 - DNA, 33 bp, Homo sapien
gtgtgataggtagttatgattttcctcatatat

SEQ ID NO: 16729 - DNA, 33 bp, Homo sapien
cctcagtgtacagtcacccaaatacatggtcat

SEQ ID NO: 16730 - DNA, 33 bp, Homo sapien
cctcagtgtacagtcatccaaatacatggtcat

SEQ ID NO: 16731 - DNA, 33 bp, Homo sapien
ctctttctacctcttaccatgcaagctaaggtc

SEQ ID NO: 16732 - DNA, 33 bp, Homo sapien
ctctttctacctcttatcatgcaagctaaggtc

SEQ ID NO: 16733 - DNA, 33 bp, Homo sapien
tgccataggagagtaaataaaaccaaaaagcaa

SEQ ID NO: 16734 - DNA, 33 bp, Homo sapien
tgccataggagagtaagtaaaaccaaaaagcaa

SEQ ID NO: 16735 - DNA, 33 bp, Homo sapien
ggcaccatttggtaaactgccttatccagggct

SEQ ID NO: 16736 - DNA, 33 bp, Homo sapien
ggcaccatttggtaaattgccttatccagggct

SEQ ID NO: 16737 - DNA, 33 bp, Homo sapien
gtatagcagtgtaaaaatgaactaatacagtaa

SEQ ID NO: 16738 - DNA, 33 bp, Homo sapien
gtatagcagtgtaaaagtgaactaatacagtaa

SEQ ID NO: 16739 - DNA, 33 bp, Homo sapien
attggtgtgacattgaaaaattattgcctgatc

SEQ ID NO: 16740 - DNA, 33 bp, Homo sapien
attggtgtgacattgagaaattattgcctgatc

SEQ ID NO: 16741 - DNA, 33 bp, Homo sapien
ctgtgtttgagcctcacgatttgtcaaatgaat

SEQ ID NO: 16742 - DNA, 33 bp, Homo sapien
ctgtgtttgagcctcatgatttgtcaaatgaat

SEQ ID NO: 16743 - DNA, 33 bp, Homo sapien
tagaggcaaaccaaaaaatagcaatagctcaga

SEQ ID NO: 16744 - DNA, 33 bp, Homo sapien
tagaggcaaaccaaaacatagcaatagctcaga

SEQ ID NO: 16745 - DNA, 33 bp, Homo sapien
ttactatgcgagaactaactgatgcatcacttc

SEQ ID NO: 16746 - DNA, 33 bp, Homo sapien
ttactatgcgagaactgactgatgcatcacttc

SEQ ID NO: 16747 - DNA, 33 bp, Homo sapien
gaaacagactaatacaaaagtgaagagacaatc

SEQ ID NO: 16748 - DNA, 33 bp, Homo sapien
gaaacagactaatacacaagtgaagagacaatc

SEQ ID NO: 16749 - DNA, 33 bp, Homo sapien
agagaggttaattaataagtgcaaacatacaca

SEQ ID NO: 16750 - DNA, 33 bp, Homo sapien
agagaggttaattaatgagtgcaaacatacaca

SEQ ID NO: 16751 - DNA, 33 bp, Homo sapien
cacatagttgtttcacccatattttcagattca

SEQ ID NO: 16752 - DNA, 33 bp, Homo sapien
cacatagttgtttcacgcatattttcagattca

SEQ ID NO: 16753 - DNA, 33 bp, Homo sapien
atttttacattgaaaactacttcacacaaatta

SEQ ID NO: 16754 - DNA, 33 bp, Homo sapien
atttttacattgaaaagtacttcacacaaatta

SEQ ID NO: 16755 - DNA, 33 bp, Homo sapien
ctctgtttcttcagaactgatccctagtgcctt

SEQ ID NO: 16756 - DNA, 33 bp, Homo sapien
ctctgtttcttcagaattgatccctagtgcctt

SEQ ID NO: 16757 - DNA, 33 bp, Homo sapien
atatagcaaaggattacactttttgtctttgag

SEQ ID NO: 16758 - DNA, 33 bp, Homo sapien
atatagcaaaggattatactttttgtctttgag

SEQ ID NO: 16759 - DNA, 33 bp, Homo sapien
tgtttgttaagtctaccaacccatatttatcta

SEQ ID NO: 16760 - DNA, 33 bp, Homo sapien
tgtttgttaagtctactaacccatatttatcta

SEQ ID NO: 16761 - DNA, 33 bp, Homo sapien
tcaaatcactacctcaatcctcaagaatacgaa

SEQ ID NO: 16762 - DNA, 33 bp, Homo sapien
tcaaatcactacctcagtcctcaagaatacgaa

SEQ ID NO: 16763 - DNA, 33 bp, Homo sapien
gatgttcagtttctgcaacttttaatttgtaat

SEQ ID NO: 16764 - DNA, 33 bp, Homo sapien
gatgttcagtttctgcgacttttaatttgtaat

SEQ ID NO: 16765 - DNA, 33 bp, Homo sapien
ccaaagatggcaagtccataaaatcatcataaa

SEQ ID NO: 16766 - DNA, 33 bp, Homo sapien
ccaaagatggcaagtctataaaatcatcataaa

SEQ ID NO: 16767 - DNA, 33 bp, Homo sapien
ggatgaatggctcagaaatcagcattttaacat

SEQ ID NO: 16768 - DNA, 33 bp, Homo sapien
ggatgaatggctcagatatcagcattttaacat

SEQ ID NO: 16769 - DNA, 33 bp, Homo sapien
ttttcaaggtactcaaaagcaaagactgttctt

SEQ ID NO: 16770 - DNA, 33 bp, Homo sapien
ttttcaaggtactcaagagcaaagactgttctt

SEQ ID NO: 16771 - DNA, 33 bp, Homo sapien
tcagaacattttaagaccaaccaattttgcttt

SEQ ID NO: 16772 - DNA, 33 bp, Homo sapien
tcagaacattttaagatcaaccaattttgcttt

SEQ ID NO: 16773 - DNA, 33 bp, Homo sapien
gccaataatggcttctaaagtactctgtgtttt

SEQ ID NO: 16774 - DNA, 33 bp, Homo sapien
gccaataatggcttctcaagtactctgtgtttt

SEQ ID NO: 16775 - DNA, 33 bp, Homo sapien
tcagctctttgaggacagggggccatgtctcct

SEQ ID NO: 16776 - DNA, 33 bp, Homo sapien
tcagctctttgaggacggggggccatgtctcct

SEQ ID NO: 16777 - DNA, 33 bp, Homo sapien
catcaggagatcttaaaagccttaattgagaag

SEQ ID NO: 16778 - DNA, 33 bp, Homo sapien
catcaggagatcttaacagccttaattgagaag

SEQ ID NO: 16779 - DNA, 33 bp, Homo sapien
gactttaccaagaccccactacaagtaagtgaa

SEQ ID NO: 16780 - DNA, 33 bp, Homo sapien
gactttaccaagaccctactacaagtaagtgaa

SEQ ID NO: 16781 - DNA, 33 bp, Homo sapien
tataactttcaaaaaaatgagcagataatctca

SEQ ID NO: 16782 - DNA, 33 bp, Homo sapien
tataactttcaaaaaagtgagcagataatctca

SEQ ID NO: 16783 - DNA, 33 bp, Homo sapien
gaaaggtaaagctaacgagccaatattcacatg

SEQ ID NO: 16784 - DNA, 33 bp, Homo sapien
gaaaggtaaagctaactagccaatattcacatg

SEQ ID NO: 16785 - DNA, 33 bp, Homo sapien
tttcttactgtataccccaataagcagctaaac

SEQ ID NO: 16786 - DNA, 33 bp, Homo sapien
tttcttactgtatacctcaataagcagctaaac

SEQ ID NO: 16787 - DNA, 33 bp, Homo sapien
aagaagggatgcctcacgcttacctcattgtta

SEQ ID NO: 16788 - DNA, 33 bp, Homo sapien
aagaagggatgcctcatgcttacctcattgtta

SEQ ID NO: 16789 - DNA, 33 bp, Homo sapien
gtgaggctatatctccaccagaaaaccaggagt

SEQ ID NO: 16790 - DNA, 33 bp, Homo sapien
gtgaggctatatctccgccagaaaaccaggagt

SEQ ID NO: 16791 - DNA, 33 bp, Homo sapien
ctcctgaaggatcccacaggtgaagtctggacc

SEQ ID NO: 16792 - DNA, 33 bp, Homo sapien
ctcctgaaggatcccataggtgaagtctggacc

SEQ ID NO: 16793 - DNA, 33 bp, Homo sapien
aatgatggttcccagtaaacaaatatccatttc

SEQ ID NO: 16794 - DNA, 33 bp, Homo sapien
aatgatggttcccagtcaacaaatatccatttc

SEQ ID NO: 16795 - DNA, 33 bp, Homo sapien
ggctcagggcttctgccatcaacctagggacag

SEQ ID NO: 16796 - DNA, 33 bp, Homo sapien
ggctcagggcttctgctatcaacctagggacag

SEQ ID NO: 16797 - DNA, 33 bp, Homo sapien
ttttctgaatatgtccagaaaatttctatttct

SEQ ID NO: 16798 - DNA, 33 bp, Homo sapien
ttttctgaatatgtcccgaaaatttctatttct

SEQ ID NO: 16799 - DNA, 33 bp, Homo sapien
atctgagccctgaagaagagtaggatttggact

SEQ ID NO: 16800 - DNA, 33 bp, Homo sapien
atctgagccctgaagaggagtaggatttggact

SEQ ID NO: 16801 - DNA, 33 bp, Homo sapien
ggatattgtgtgaggaataagcccacctgtggt

SEQ ID NO: 16802 - DNA, 33 bp, Homo sapien
ggatattgtgtgaggagtaagcccacctgtggt

SEQ ID NO: 16803 - DNA, 33 bp, Homo sapien
ttctaccaaagaatctaaagtttatacagtcac

SEQ ID NO: 16804 - DNA, 33 bp, Homo sapien
ttctaccaaagaatctgaagtttatacagtcac

SEQ ID NO: 16805 - DNA, 33 bp, Homo sapien
ccttgctacattaactaaatcatcttactacac

SEQ ID NO: 16806 - DNA, 33 bp, Homo sapien
ccttgctacattaactgaatcatcttactacac

SEQ ID NO: 16807 - DNA, 33 bp, Homo sapien
actgttgttttcacaccgaaaaggcaaactttg

SEQ ID NO: 16808 - DNA, 33 bp, Homo sapien
actgttgttttcacactgaaaaggcaaactttg

SEQ ID NO: 16809 - DNA, 33 bp, Homo sapien
acagagaaatggttcacaacttggtctgagagg

SEQ ID NO: 16810 - DNA, 33 bp, Homo sapien
acagagaaatggttcataacttggtctgagagg

SEQ ID NO: 16811 - DNA, 33 bp, Homo sapien
gaagctcttcagtaagaagtgtatttttctcaa

SEQ ID NO: 16812 - DNA, 33 bp, Homo sapien
gaagctcttcagtaaggagtgtatttttctcaa

SEQ ID NO: 16813 - DNA, 33 bp, Homo sapien
ctgacatttcagagacaagatttagaatctaga

SEQ ID NO: 16814 - DNA, 33 bp, Homo sapien
ctgacatttcagagacgagatttagaatctaga

SEQ ID NO: 16815 - DNA, 33 bp, Homo sapien
agagtactctctctaccgaggatagacagtctg

SEQ ID NO: 16816 - DNA, 33 bp, Homo sapien
agagtactctctctactgaggatagacagtctg

SEQ ID NO: 16817 - DNA, 33 bp, Homo sapien
tccaagcatcatttagaatctagctcatatccc

SEQ ID NO: 16818 - DNA, 33 bp, Homo sapien
tccaagcatcatttaggatctagctcatatccc

SEQ ID NO: 16819 - DNA, 33 bp, Homo sapien
tgggttattgtgagaacgaatttagttatatat

SEQ ID NO: 16820 - DNA, 33 bp, Homo sapien
tgggttattgtgagaatgaatttagttatatat

SEQ ID NO: 16821 - DNA, 33 bp, Homo sapien
aggcagatatgtgacaacaaagatggcattctt

SEQ ID NO: 16822 - DNA, 33 bp, Homo sapien
aggcagatatgtgacagcaaagatggcattctt

SEQ ID NO: 16823 - DNA, 33 bp, Homo sapien
acaacattttaaaaacagcgaataatggagaat

SEQ ID NO: 16824 - DNA, 33 bp, Homo sapien
acaacattttaaaaacggcgaataatggagaat

SEQ ID NO: 16825 - DNA, 33 bp, Homo sapien
aataaaaagaaagagacacgcttggataaatag

SEQ ID NO: 16826 - DNA, 33 bp, Homo sapien
aataaaaagaaagagatacgcttggataaatag

SEQ ID NO: 16827 - DNA, 33 bp, Homo sapien
attcagcaaggacctacggctgttgctgtcaaa

SEQ ID NO: 16828 - DNA, 33 bp, Homo sapien
attcagcaaggacctatggctgttgctgtcaaa

SEQ ID NO: 16829 - DNA, 33 bp, Homo sapien
ctgcagacactgggaaaccttagtcctcctact

SEQ ID NO: 16830 - DNA, 33 bp, Homo sapien
ctgcagacactgggaagccttagtcctcctact

SEQ ID NO: 16831 - DNA, 33 bp, Homo sapien
tcactgagaaacctcaaacaacttatttaacca

SEQ ID NO: 16832 - DNA, 33 bp, Homo sapien
tcactgagaaacctcagacaacttatttaacca

SEQ ID NO: 16833 - DNA, 33 bp, Homo sapien
ttaatgagataatagaaataatgtacctagcag

SEQ ID NO: 16834 - DNA, 33 bp, Homo sapien
ttaatgagataatagacataatgtacctagcag

SEQ ID NO: 16835 - DNA, 33 bp, Homo sapien
gaaagagtgagccaagcacaggtgtgggtgcgt

SEQ ID NO: 16836 - DNA, 33 bp, Homo sapien
gaaagagtgagccaagtacaggtgtgggtgcgt

SEQ ID NO: 16837 - DNA, 33 bp, Homo sapien
ggaaccacaaagcatccgagagccaatgggatc

SEQ ID NO: 16838 - DNA, 33 bp, Homo sapien
ggaaccacaaagcatctgagagccaatgggatc

SEQ ID NO: 16839 - DNA, 33 bp, Homo sapien
agaggaaggctgtagaaaaaataggcgaggttg

SEQ ID NO: 16840 - DNA, 33 bp, Homo sapien
agaggaaggctgtagagaaaataggcgaggttg

SEQ ID NO: 16841 - DNA, 33 bp, Homo sapien
gctaagggtcattatccaggacattaagtggct

SEQ ID NO: 16842 - DNA, 33 bp, Homo sapien
gctaagggtcattatcgaggacattaagtggct

SEQ ID NO: 16843 - DNA, 33 bp, Homo sapien
ccatagctggggcctcagaaaccagcacagaga

SEQ ID NO: 16844 - DNA, 33 bp, Homo sapien
ccatagctggggcctcggaaaccagcacagaga

SEQ ID NO: 16845 - DNA, 33 bp, Homo sapien
ggccagtgatgccatgaagacagagcagaagca

SEQ ID NO: 16846 - DNA, 33 bp, Homo sapien
ggccagtgatgccatgcagacagagcagaagca

SEQ ID NO: 16847 - DNA, 33 bp, Homo sapien
cctgttttctaccaaacatctgacatggttgag

SEQ ID NO: 16848 - DNA, 33 bp, Homo sapien
cctgttttctaccaaatatctgacatggttgag

SEQ ID NO: 16849 - DNA, 33 bp, Homo sapien
tagacatacacagagaaaaagaaaatacagaaa

SEQ ID NO: 16850 - DNA, 33 bp, Homo sapien
tagacatacacagagagaaagaaaatacagaaa

SEQ ID NO: 16851 - DNA, 33 bp, Homo sapien
gaaagatgtttagctactaatggattctacctg

SEQ ID NO: 16852 - DNA, 33 bp, Homo sapien
gaaagatgtttagctagtaatggattctacctg

SEQ ID NO: 16853 - DNA, 33 bp, Homo sapien
gagtccctgctcagaagttcctctcctctgaag

SEQ ID NO: 16854 - DNA, 33 bp, Homo sapien
gagtccctgctcagaatttcctctcctctgaag

SEQ ID NO: 16855 - DNA, 33 bp, Homo sapien
catcatcctgcctcaacggcctgtagtgtctgc

SEQ ID NO: 16856 - DNA, 33 bp, Homo sapien
catcatcctgcctcaatggcctgtagtgtctgc

SEQ ID NO: 16857 - DNA, 33 bp, Homo sapien
agaagtgggctttcgccaaatgtggcaggtcca

SEQ ID NO: 16858 - DNA, 33 bp, Homo sapien
agaagtgggctttcgctaaatgtggcaggtcca

SEQ ID NO: 16859 - DNA, 33 bp, Homo sapien
tggacaaagagaagagaatccggtcctgctcat

SEQ ID NO: 16860 - DNA, 33 bp, Homo sapien
tggacaaagagaagaggatccggtcctgctcat

SEQ ID NO: 16861 - DNA, 33 bp, Homo sapien
taagtgtcttccttccccttacaaagaacagcc

SEQ ID NO: 16862 - DNA, 33 bp, Homo sapien
taagtgtcttccttcctcttacaaagaacagcc

SEQ ID NO: 16863 - DNA, 33 bp, Homo sapien
gctttcctctgtaagccaagttgatggtaaaga

SEQ ID NO: 16864 - DNA, 33 bp, Homo sapien
gctttcctctgtaagcgaagttgatggtaaaga

SEQ ID NO: 16865 - DNA, 33 bp, Homo sapien
acttcctggaccctgaaagttcagaatctatct

SEQ ID NO: 16866 - DNA, 33 bp, Homo sapien
acttcctggaccctgacagttcagaatctatct

SEQ ID NO: 16867 - DNA, 33 bp, Homo sapien
gagattaaccttacaacgattaatatgtctgtc

SEQ ID NO: 16868 - DNA, 33 bp, Homo sapien
gagattaaccttacaatgattaatatgtctgtc

SEQ ID NO: 16869 - DNA, 33 bp, Homo sapien
tttatagacagtaaaacggctgaagaaagcaaa

SEQ ID NO: 16870 - DNA, 33 bp, Homo sapien
tttatagacagtaaaagggctgaagaaagcaaa

SEQ ID NO: 16871 - DNA, 33 bp, Homo sapien
acagatgacaagattaaccatgtaggaaattcc

SEQ ID NO: 16872 - DNA, 33 bp, Homo sapien
acagatgacaagattatccatgtaggaaattcc

SEQ ID NO: 16873 - DNA, 33 bp, Homo sapien
aaaagctatgttctccaagagacagctaaagaa

SEQ ID NO: 16874 - DNA, 33 bp, Homo sapien
aaaagctatgttctccgagagacagctaaagaa

SEQ ID NO: 16875 - DNA, 33 bp, Homo sapien
actggacacaggcaaactcataagtgaagattc

SEQ ID NO: 16876 - DNA, 33 bp, Homo sapien
actggacacaggcaaattcataagtgaagattc

SEQ ID NO: 16877 - DNA, 33 bp, Homo sapien
gtaaataaaagcttaactcctcataaactgcct

SEQ ID NO: 16878 - DNA, 33 bp, Homo sapien
gtaaataaaagcttaagtcctcataaactgcct

SEQ ID NO: 16879 - DNA, 33 bp, Homo sapien
ttaacaaacagcctgtaaaataataataatgct

SEQ ID NO: 16880 - DNA, 33 bp, Homo sapien
ttaacaaacagcctgtgaaataataataatgct

SEQ ID NO: 16881 - DNA, 33 bp, Homo sapien
cacctgtcttggtatcccccaaagctgacagaa

SEQ ID NO: 16882 - DNA, 33 bp, Homo sapien
cacctgtcttggtatctcccaaagctgacagaa

SEQ ID NO: 16883 - DNA, 33 bp, Homo sapien
gaatggaacaagctcaacagtagtacctttaac

SEQ ID NO: 16884 - DNA, 33 bp, Homo sapien
gaatggaacaagctcagcagtagtacctttaac

SEQ ID NO: 16885 - DNA, 33 bp, Homo sapien
aaaattaacacttcacaacacaagatattcctt

SEQ ID NO: 16886 - DNA, 33 bp, Homo sapien
aaaattaacacttcacgacacaagatattcctt

SEQ ID NO: 16887 - DNA, 33 bp, Homo sapien
catatctgtaaaactacaactctgatcaagtat

SEQ ID NO: 16888 - DNA, 33 bp, Homo sapien
catatctgtaaaactagaactctgatcaagtat

SEQ ID NO: 16889 - DNA, 33 bp, Homo sapien
gcttgctaaaatgtcaagggtacacaattaact

SEQ ID NO: 16890 - DNA, 33 bp, Homo sapien
gcttgctaaaatgtcaggggtacacaattaact

SEQ ID NO: 16891 - DNA, 33 bp, Homo sapien
agccagtatggttgacaatacactaatacacac

SEQ ID NO: 16892 - DNA, 33 bp, Homo sapien
agccagtatggttgacgatacactaatacacac

SEQ ID NO: 16893 - DNA, 33 bp, Homo sapien
aatgatttctttagtacgtcattgaaagcataa

SEQ ID NO: 16894 - DNA, 33 bp, Homo sapien
aatgatttctttagtaggtcattgaaagcataa

SEQ ID NO: 16895 - DNA, 33 bp, Homo sapien
aataagcactatgtaaataaaagtatctattat

SEQ ID NO: 16896 - DNA, 33 bp, Homo sapien
aataagcactatgtaagtaaaagtatctattat

SEQ ID NO: 16897 - DNA, 33 bp, Homo sapien
tttgaagtactgtgagaattagcaaaagatctc

SEQ ID NO: 16898 - DNA, 33 bp, Homo sapien
tttgaagtactgtgagcattagcaaaagatctc

SEQ ID NO: 16899 - DNA, 33 bp, Homo sapien
gaaattcaatctgtagaatgctaccaaattgag

SEQ ID NO: 16900 - DNA, 33 bp, Homo sapien
gaaattcaatctgtaggatgctaccaaattgag

SEQ ID NO: 16901 - DNA, 33 bp, Homo sapien
aacaaaatgaataagcccttcaggagatcacaa

SEQ ID NO: 16902 - DNA, 33 bp, Homo sapien
aacaaaatgaataagctcttcaggagatcacaa

SEQ ID NO: 16903 - DNA, 33 bp, Homo sapien
ctatagaatgtcataaaccctgtgatgttgatg

SEQ ID NO: 16904 - DNA, 33 bp, Homo sapien
ctatagaatgtcataacccctgtgatgttgatg

SEQ ID NO: 16905 - DNA, 33 bp, Homo sapien
gactcttaactgtctaagctgacaagactcagt

SEQ ID NO: 16906 - DNA, 33 bp, Homo sapien
gactcttaactgtctaggctgacaagactcagt

SEQ ID NO: 16907 - DNA, 33 bp, Homo sapien
ttaagagtctgtgacactggcacctgtgtgatc

SEQ ID NO: 16908 - DNA, 33 bp, Homo sapien
ttaagagtctgtgacattggcacctgtgtgatc

SEQ ID NO: 16909 - DNA, 33 bp, Homo sapien
accatcatgactgatcactggctatgtctaaca

SEQ ID NO: 16910 - DNA, 33 bp, Homo sapien
accatcatgactgatctctggctatgtctaaca

SEQ ID NO: 16911 - DNA, 33 bp, Homo sapien
aattaacaaagtgaatcaaatactccagcacaa

SEQ ID NO: 16912 - DNA, 33 bp, Homo sapien
aattaacaaagtgaattaaatactccagcacaa

SEQ ID NO: 16913 - DNA, 33 bp, Homo sapien
accgttattgtgaagccctagaattagtgtttt

SEQ ID NO: 16914 - DNA, 33 bp, Homo sapien
accgttattgtgaagctctagaattagtgtttt

SEQ ID NO: 16915 - DNA, 33 bp, Homo sapien
ttgtgttgattctttacgtgtgggtgaattctt

SEQ ID NO: 16916 - DNA, 33 bp, Homo sapien
ttgtgttgattctttatgtgtgggtgaattctt

SEQ ID NO: 16917 - DNA, 33 bp, Homo sapien
ggtcagctctggcagacattagccatagacacc

SEQ ID NO: 16918 - DNA, 33 bp, Homo sapien
ggtcagctctggcagagattagccatagacacc

SEQ ID NO: 16919 - DNA, 33 bp, Homo sapien
ttcagtaggtacttaaggaatcgataaggtatt

SEQ ID NO: 16920 - DNA, 33 bp, Homo sapien
ttcagtaggtacttaatgaatcgataaggtatt

SEQ ID NO: 16921 - DNA, 33 bp, Homo sapien
attttttatttgttggcattatagcatctatga

SEQ ID NO: 16922 - DNA, 33 bp, Homo sapien
attttttatttgttggtattatagcatctatga

SEQ ID NO: 16923 - DNA, 33 bp, Homo sapien
ctagaaaaataagtgacacagacaaaagagagg

SEQ ID NO: 16924 - DNA, 33 bp, Homo sapien
ctagaaaaataagtgatacagacaaaagagagg

SEQ ID NO: 16925 - DNA, 33 bp, Homo sapien
ggaaggagctaaatcaatcagccaattcagtcc

SEQ ID NO: 16926 - DNA, 33 bp, Homo sapien
ggaaggagctaaatcagtcagccaattcagtcc

SEQ ID NO: 16927 - DNA, 33 bp, Homo sapien
tccttccttaatacaacataagtcacatccatg

SEQ ID NO: 16928 - DNA, 33 bp, Homo sapien
tccttccttaatacaagataagtcacatccatg

SEQ ID NO: 16929 - DNA, 33 bp, Homo sapien
atggagcacacaacaccggtagagacagggact

SEQ ID NO: 16930 - DNA, 33 bp, Homo sapien
atggagcacacaacactggtagagacagggact

SEQ ID NO: 16931 - DNA, 33 bp, Homo sapien
gagtcttggaaagcaaagctgttaaactcttaa

SEQ ID NO: 16932 - DNA, 33 bp, Homo sapien
gagtcttggaaagcaaggctgttaaactcttaa

SEQ ID NO: 16933 - DNA, 33 bp, Homo sapien
ttgagcattcctaatccaaaaatctgatatcca

SEQ ID NO: 16934 - DNA, 33 bp, Homo sapien
ttgagcattcctaatctaaaaatctgatatcca

SEQ ID NO: 16935 - DNA, 33 bp, Homo sapien
atagtgaaaacagaaaatgagacgtgggtcaat

SEQ ID NO: 16936 - DNA, 33 bp, Homo sapien
atagtgaaaacagaaagtgagacgtgggtcaat

SEQ ID NO: 16937 - DNA, 33 bp, Homo sapien
agaacacaaatcctaacagtatagtttgaattt

SEQ ID NO: 16938 - DNA, 33 bp, Homo sapien
agaacacaaatcctaagagtatagtttgaattt

SEQ ID NO: 16939 - DNA, 33 bp, Homo sapien
tgaaactgaacaattaagtcatatttctgattt

SEQ ID NO: 16940 - DNA, 33 bp, Homo sapien
tgaaactgaacaattaggtcatatttctgattt

SEQ ID NO: 16941 - DNA, 33 bp, Homo sapien
agtggtctcttataaaatatcttgtagaacagc

SEQ ID NO: 16942 - DNA, 33 bp, Homo sapien
agtggtctcttataaagtatcttgtagaacagc

SEQ ID NO: 16943 - DNA, 33 bp, Homo sapien
atcatggaaaatcttacagaaggctaatgatat

SEQ ID NO: 16944 - DNA, 33 bp, Homo sapien
atcatggaaaatcttatagaaggctaatgatat

SEQ ID NO: 16945 - DNA, 33 bp, Homo sapien
accgtctgtcacctcaaatctataacttttctc

SEQ ID NO: 16946 - DNA, 33 bp, Homo sapien
accgtctgtcacctcagatctataacttttctc

SEQ ID NO: 16947 - DNA, 33 bp, Homo sapien
aactagtcttgccaaaatgagaggaatgcaagg

SEQ ID NO: 16948 - DNA, 33 bp, Homo sapien
aactagtcttgccaaagtgagaggaatgcaagg

SEQ ID NO: 16949 - DNA, 33 bp, Homo sapien
aaatccaccagattgtaaaactgcatggggaga

SEQ ID NO: 16950 - DNA, 33 bp, Homo sapien
aaatccaccagattgtgaaactgcatggggaga

SEQ ID NO: 16951 - DNA, 33 bp, Homo sapien
ttaaaagagcaacaataagatttccaactgact

SEQ ID NO: 16952 - DNA, 33 bp, Homo sapien
ttaaaagagcaacaatgagatttccaactgact

SEQ ID NO: 16953 - DNA, 33 bp, Homo sapien
atagaaacctgaataaatctttcctctgaggta

SEQ ID NO: 16954 - DNA, 33 bp, Homo sapien
atagaaacctgaataattctttcctctgaggta

SEQ ID NO: 16955 - DNA, 33 bp, Homo sapien
catccctaccttaataataaaggcttccctgac

SEQ ID NO: 16956 - DNA, 33 bp, Homo sapien
catccctaccttaatactaaaggcttccctgac

SEQ ID NO: 16957 - DNA, 33 bp, Homo sapien
aattcaatagcattaaatgtattcacgttgtgc

SEQ ID NO: 16958 - DNA, 33 bp, Homo sapien
aattcaatagcattaagtgtattcacgttgtgc

SEQ ID NO: 16959 - DNA, 33 bp, Homo sapien
tctaacgcaaaagacacgaaactattgcaggat

SEQ ID NO: 16960 - DNA, 33 bp, Homo sapien
tctaacgcaaaagacatgaaactattgcaggat

SEQ ID NO: 16961 - DNA, 33 bp, Homo sapien
cagtgttccagttttacagtctctaaaggcctc

SEQ ID NO: 16962 - DNA, 33 bp, Homo sapien
cagtgttccagttttatagtctctaaaggcctc

SEQ ID NO: 16963 - DNA, 33 bp, Homo sapien
gtaacatctcaggatacagtacacaagtaactt

SEQ ID NO: 16964 - DNA, 33 bp, Homo sapien
gtaacatctcaggatatagtacacaagtaactt

SEQ ID NO: 16965 - DNA, 33 bp, Homo sapien
caaaagtgattaatcccgataaaaaccagtttg

SEQ ID NO: 16966 - DNA, 33 bp, Homo sapien
caaaagtgattaatcctgataaaaaccagtttg

SEQ ID NO: 16967 - DNA, 33 bp, Homo sapien
gagtagttgactggaactctacctgagtgggga

SEQ ID NO: 16968 - DNA, 33 bp, Homo sapien
gagtagttgactggaattctacctgagtgggga

SEQ ID NO: 16969 - DNA, 33 bp, Homo sapien
tacatatgtgaaggacaatgaaaacactgggtt

SEQ ID NO: 16970 - DNA, 33 bp, Homo sapien
tacatatgtgaaggacgatgaaaacactgggtt

SEQ ID NO: 16971 - DNA, 33 bp, Homo sapien
gtattgcttgtggtctcaccagcctcacccttt

SEQ ID NO: 16972 - DNA, 33 bp, Homo sapien
gtattgcttgtggtcttaccagcctcacccttt

SEQ ID NO: 16973 - DNA, 33 bp, Homo sapien
aaagaaactgccaagtaaatgagtatgtgggca

SEQ ID NO: 16974 - DNA, 33 bp, Homo sapien
aaagaaactgccaagtgaatgagtatgtgggca

SEQ ID NO: 16975 - DNA, 33 bp, Homo sapien
tgtatctgaggaaggacgtatcttagcttgaaa

SEQ ID NO: 16976 - DNA, 33 bp, Homo sapien
tgtatctgaggaaggatgtatcttagcttgaaa

SEQ ID NO: 16977 - DNA, 33 bp, Homo sapien
ttctctgatgagctaaatctccaggggtccctg

SEQ ID NO: 16978 - DNA, 33 bp, Homo sapien
ttctctgatgagctaagtctccaggggtccctg

SEQ ID NO: 16979 - DNA, 33 bp, Homo sapien
tgcctagaaggatcttcaactcatgtagaggcc

SEQ ID NO: 16980 - DNA, 33 bp, Homo sapien
tgcctagaaggatctttaactcatgtagaggcc

SEQ ID NO: 16981 - DNA, 33 bp, Homo sapien
ccaggttgtgtcagtacactttctgatgttccc

SEQ ID NO: 16982 - DNA, 33 bp, Homo sapien
ccaggttgtgtcagtatactttctgatgttccc

SEQ ID NO: 16983 - DNA, 33 bp, Homo sapien
ggtaagtgttcagtaaatgttcttactagctgt

SEQ ID NO: 16984 - DNA, 33 bp, Homo sapien
ggtaagtgttcagtaagtgttcttactagctgt

SEQ ID NO: 16985 - DNA, 33 bp, Homo sapien
ctggttttgataccaacactgtctcttaacgtg

SEQ ID NO: 16986 - DNA, 33 bp, Homo sapien
ctggttttgataccaatactgtctcttaacgtg

SEQ ID NO: 16987 - DNA, 33 bp, Homo sapien
attcatcccttttacgcccttctaccatatgag

SEQ ID NO: 16988 - DNA, 33 bp, Homo sapien
attcatcccttttacgtccttctaccatatgag

SEQ ID NO: 16989 - DNA, 33 bp, Homo sapien
gaacaaaagcctacacaaaagttccaagcttga

SEQ ID NO: 16990 - DNA, 33 bp, Homo sapien
gaacaaaagcctacacgaaagttccaagcttga

SEQ ID NO: 16991 - DNA, 33 bp, Homo sapien
acagtgggtgtaatcaatacagcaaaggcttta

SEQ ID NO: 16992 - DNA, 33 bp, Homo sapien
acagtgggtgtaatcattacagcaaaggcttta

SEQ ID NO: 16993 - DNA, 33 bp, Homo sapien
aggaggggaccaatacgccagcctttaaaaagt

SEQ ID NO: 16994 - DNA, 33 bp, Homo sapien
aggaggggaccaatactccagcctttaaaaagt

SEQ ID NO: 16995 - DNA, 33 bp, Homo sapien
cttaggaatcataaaacggctagaacaggctag

SEQ ID NO: 16996 - DNA, 33 bp, Homo sapien
cttaggaatcataaaatggctagaacaggctag

SEQ ID NO: 16997 - DNA, 33 bp, Homo sapien
gagttgtgttcctcaaatgaaagtcagcttctc

SEQ ID NO: 16998 - DNA, 33 bp, Homo sapien
gagttgtgttcctcaactgaaagtcagcttctc

SEQ ID NO: 16999 - DNA, 33 bp, Homo sapien
aaatgttcaatggtacagatactggtgatacaa

SEQ ID NO: 17000 - DNA, 33 bp, Homo sapien
aaatgttcaatggtactgatactggtgatacaa

SEQ ID NO: 17001 - DNA, 33 bp, Homo sapien
taggattttctatatggaaggttatgtcttctt

SEQ ID NO: 17002 - DNA, 33 bp, Homo sapien
taggattttctatatgtaaggttatgtcttctt

SEQ ID NO: 17003 - DNA, 33 bp, Homo sapien
ttctattatttggctacaggtgacttaaacagg

SEQ ID NO: 17004 - DNA, 33 bp, Homo sapien
ttctattatttggctataggtgacttaaacagg

SEQ ID NO: 17005 - DNA, 33 bp, Homo sapien
ttttgtaatttgtttcgatcttgtcaaaaataa

SEQ ID NO: 17006 - DNA, 33 bp, Homo sapien
ttttgtaatttgtttctatcttgtcaaaaataa

SEQ ID NO: 17007 - DNA, 33 bp, Homo sapien
ccatgtgtcagaaaataagtgtgttttcagaag

SEQ ID NO: 17008 - DNA, 33 bp, Homo sapien
ccatgtgtcagaaaatgagtgtgttttcagaag

SEQ ID NO: 17009 - DNA, 33 bp, Homo sapien
aaaacaaaattcctcaccatcaggcattcactg

SEQ ID NO: 17010 - DNA, 33 bp, Homo sapien
aaaacaaaattcctcatcatcaggcattcactg

SEQ ID NO: 17011 - DNA, 33 bp, Homo sapien
atacaatgctcaacataatctcgttctcattta

SEQ ID NO: 17012 - DNA, 33 bp, Homo sapien
atacaatgctcaacatgatctcgttctcattta

SEQ ID NO: 17013 - DNA, 33 bp, Homo sapien
agttccttcccattagaatgcaagctcccccaa

SEQ ID NO: 17014 - DNA, 33 bp, Homo sapien
agttccttcccattaggatgcaagctcccccaa

SEQ ID NO: 17015 - DNA, 33 bp, Homo sapien
acatacttgttcaaaaaccctgagaaagcaagt

SEQ ID NO: 17016 - DNA, 33 bp, Homo sapien
acatacttgttcaaaagccctgagaaagcaagt

SEQ ID NO: 17017 - DNA, 33 bp, Homo sapien
tttgcttccagattagcacactacaatttagcc

SEQ ID NO: 17018 - DNA, 33 bp, Homo sapien
tttgcttccagattagtacactacaatttagcc

SEQ ID NO: 17019 - DNA, 33 bp, Homo sapien
ggttctttatgatctcaaccacggactgctttc

SEQ ID NO: 17020 - DNA, 33 bp, Homo sapien
ggttctttatgatctcgaccacggactgctttc

SEQ ID NO: 17021 - DNA, 33 bp, Homo sapien
atgtattcaggaagtagaattgcccagtattag

SEQ ID NO: 17022 - DNA, 33 bp, Homo sapien
atgtattcaggaagtataattgcccagtattag

SEQ ID NO: 17023 - DNA, 33 bp, Homo sapien
caggtctgaagctcagaaaagagacctaaattg

SEQ ID NO: 17024 - DNA, 33 bp, Homo sapien
caggtctgaagctcaggaaagagacctaaattg

SEQ ID NO: 17025 - DNA, 33 bp, Homo sapien
gccccatttttgactccagggatgtagtgggga

SEQ ID NO: 17026 - DNA, 33 bp, Homo sapien
gccccatttttgactctagggatgtagtgggga

SEQ ID NO: 17027 - DNA, 33 bp, Homo sapien
gtgactttgggatcatcaaaattgcattgtaac

SEQ ID NO: 17028 - DNA, 33 bp, Homo sapien
gtgactttgggatcattaaaattgcattgtaac

SEQ ID NO: 17029 - DNA, 33 bp, Homo sapien
ataggaagaagaaaaaagcatgagaacatctgc

SEQ ID NO: 17030 - DNA, 33 bp, Homo sapien
ataggaagaagaaaaacgcatgagaacatctgc

SEQ ID NO: 17031 - DNA, 33 bp, Homo sapien
taggagatggagcttgaacttactaagtggatc

SEQ ID NO: 17032 - DNA, 33 bp, Homo sapien
taggagatggagcttggacttactaagtggatc

SEQ ID NO: 17033 - DNA, 33 bp, Homo sapien
ggctgagaaataggaacggatgtggagaaagga

SEQ ID NO: 17034 - DNA, 33 bp, Homo sapien
ggctgagaaataggaatggatgtggagaaagga

SEQ ID NO: 17035 - DNA, 33 bp, Homo sapien
aaatcaagactcaaaaatggaaagtaactggcc

SEQ ID NO: 17036 - DNA, 33 bp, Homo sapien
aaatcaagactcaaaagtggaaagtaactggcc

SEQ ID NO: 17037 - DNA, 33 bp, Homo sapien
ccatgtaagtagtagacggcaggccccgtactc

SEQ ID NO: 17038 - DNA, 33 bp, Homo sapien
ccatgtaagtagtagatggcaggccccgtactc

SEQ ID NO: 17039 - DNA, 33 bp, Homo sapien
ttgtttaagctactgacatttgggattgcttgt

SEQ ID NO: 17040 - DNA, 33 bp, Homo sapien
ttgtttaagctactgatatttgggattgcttgt

SEQ ID NO: 17041 - DNA, 33 bp, Homo sapien
ggagtactcactgtcaaaaactctcccttctgc

SEQ ID NO: 17042 - DNA, 33 bp, Homo sapien
ggagtactcactgtcagaaactctcccttctgc

SEQ ID NO: 17043 - DNA, 33 bp, Homo sapien
tttgtgaattatagaacgcaagggcattccagg

SEQ ID NO: 17044 - DNA, 33 bp, Homo sapien
tttgtgaattatagaaggcaagggcattccagg

SEQ ID NO: 17045 - DNA, 33 bp, Homo sapien
cctaatagttagctaaatatgacttgattttag

SEQ ID NO: 17046 - DNA, 33 bp, Homo sapien
cctaatagttagctaagtatgacttgattttag

SEQ ID NO: 17047 - DNA, 33 bp, Homo sapien
tgagtttcttttgctaacattcttttaagttcc

SEQ ID NO: 17048 - DNA, 33 bp, Homo sapien
tgagtttcttttgctagcattcttttaagttcc

SEQ ID NO: 17049 - DNA, 33 bp, Homo sapien
ctgccctcaaggacctaaccagttgctacctaa

SEQ ID NO: 17050 - DNA, 33 bp, Homo sapien
ctgccctcaaggacctgaccagttgctacctaa

SEQ ID NO: 17051 - DNA, 33 bp, Homo sapien
ttgaatacctaagatacgccacatacattgagg

SEQ ID NO: 17052 - DNA, 33 bp, Homo sapien
ttgaatacctaagatatgccacatacattgagg

SEQ ID NO: 17053 - DNA, 33 bp, Homo sapien
aggaggaagaaaaaaacggtgcaggccctcact

SEQ ID NO: 17054 - DNA, 33 bp, Homo sapien
aggaggaagaaaaaaatggtgcaggccctcact

SEQ ID NO: 17055 - DNA, 33 bp, Homo sapien
aacaatcagatgaatacgacaagagcagagagg

SEQ ID NO: 17056 - DNA, 33 bp, Homo sapien
aacaatcagatgaatatgacaagagcagagagg

SEQ ID NO: 17057 - DNA, 33 bp, Homo sapien
ctttcctagaacacccaaatctgaactccataa

SEQ ID NO: 17058 - DNA, 33 bp, Homo sapien
ctttcctagaacacccgaatctgaactccataa

SEQ ID NO: 17059 - DNA, 33 bp, Homo sapien
gcctaagtttacaggaccactgaaagagccagg

SEQ ID NO: 17060 - DNA, 33 bp, Homo sapien
gcctaagtttacaggatcactgaaagagccagg

SEQ ID NO: 17061 - DNA, 33 bp, Homo sapien
cctgatggatgaaaaagaatcaatccattttag

SEQ ID NO: 17062 - DNA, 33 bp, Homo sapien
cctgatggatgaaaaataatcaatccattttag

SEQ ID NO: 17063 - DNA, 33 bp, Homo sapien
gataaaagcgccatcccgatggtggatcttaca

SEQ ID NO: 17064 - DNA, 33 bp, Homo sapien
gataaaagcgccatcctgatggtggatcttaca

SEQ ID NO: 17065 - DNA, 33 bp, Homo sapien
tgaggtgggaggatagcataagcctatgaggtc

SEQ ID NO: 17066 - DNA, 33 bp, Homo sapien
tgaggtgggaggatagtataagcctatgaggtc

SEQ ID NO: 17067 - DNA, 33 bp, Homo sapien
cttcatcttcctaaaactgatttcctaggattc

SEQ ID NO: 17068 - DNA, 33 bp, Homo sapien
cttcatcttcctaaaagtgatttcctaggattc

SEQ ID NO: 17069 - DNA, 33 bp, Homo sapien
gaaaaaagggaaaaaacaggctgatatccttgg

SEQ ID NO: 17070 - DNA, 33 bp, Homo sapien
gaaaaaagggaaaaaataggctgatatccttgg

SEQ ID NO: 17071 - DNA, 33 bp, Homo sapien
ctcttgtgactccggaatcagagaaatctgcaa

SEQ ID NO: 17072 - DNA, 33 bp, Homo sapien
ctcttgtgactccggattcagagaaatctgcaa

SEQ ID NO: 17073 - DNA, 33 bp, Homo sapien
aggcgcctgatccttcccattcagaccttttat

SEQ ID NO: 17074 - DNA, 33 bp, Homo sapien
aggcgcctgatccttctcattcagaccttttat

SEQ ID NO: 17075 - DNA, 33 bp, Homo sapien
agctacctggtatttccctgcttaaagcacata

SEQ ID NO: 17076 - DNA, 33 bp, Homo sapien
agctacctggtatttctctgcttaaagcacata

SEQ ID NO: 17077 - DNA, 33 bp, Homo sapien
tatttaaagttgtaagaactgagagtaacagaa

SEQ ID NO: 17078 - DNA, 33 bp, Homo sapien
tatttaaagttgtaagtactgagagtaacagaa

SEQ ID NO: 17079 - DNA, 33 bp, Homo sapien
cttttctaagtagatgaattgtagcatggatcc

SEQ ID NO: 17080 - DNA, 33 bp, Homo sapien
cttttctaagtagatggattgtagcatggatcc

SEQ ID NO: 17081 - DNA, 33 bp, Homo sapien
ttgtaccactgtccagaaagtccttggcaaaat

SEQ ID NO: 17082 - DNA, 33 bp, Homo sapien
ttgtaccactgtccagtaagtccttggcaaaat

SEQ ID NO: 17083 - DNA, 33 bp, Homo sapien
ataatggtttaaggaacgaattctgcatggtag

SEQ ID NO: 17084 - DNA, 33 bp, Homo sapien
ataatggtttaaggaatgaattctgcatggtag

SEQ ID NO: 17085 - DNA, 33 bp, Homo sapien
tattgtttcacaataacggcaaaaagtgtcttt

SEQ ID NO: 17086 - DNA, 33 bp, Homo sapien
tattgtttcacaataatggcaaaaagtgtcttt

SEQ ID NO: 17087 - DNA, 33 bp, Homo sapien
ccactgtccatggagaacactcagcatctatgc

SEQ ID NO: 17088 - DNA, 33 bp, Homo sapien
ccactgtccatggagaccactcagcatctatgc

SEQ ID NO: 17089 - DNA, 33 bp, Homo sapien
aggatggtccctgtgacatttccatttaacagt

SEQ ID NO: 17090 - DNA, 33 bp, Homo sapien
aggatggtccctgtgatatttccatttaacagt

SEQ ID NO: 17091 - DNA, 33 bp, Homo sapien
tcgccagcacatgtaaaccagatcctacagcca

SEQ ID NO: 17092 - DNA, 33 bp, Homo sapien
tcgccagcacatgtaagccagatcctacagcca

SEQ ID NO: 17093 - DNA, 33 bp, Homo sapien
cttttgagtagaagcaaagaggcaaatctcatt

SEQ ID NO: 17094 - DNA, 33 bp, Homo sapien
cttttgagtagaagcagagaggcaaatctcatt

SEQ ID NO: 17095 - DNA, 33 bp, Homo sapien
gaaattgtggcttgagaagagtacccaaattca

SEQ ID NO: 17096 - DNA, 33 bp, Homo sapien
gaaattgtggcttgaggagagtacccaaattca

SEQ ID NO: 17097 - DNA, 33 bp, Homo sapien
ctttggactgaaggccaagttcaagcctgactc

SEQ ID NO: 17098 - DNA, 33 bp, Homo sapien
ctttggactgaaggccgagttcaagcctgactc

SEQ ID NO: 17099 - DNA, 33 bp, Homo sapien
cccatacctggaataaatgtctaatcctgtgaa

SEQ ID NO: 17100 - DNA, 33 bp, Homo sapien
cccatacctggaataagtgtctaatcctgtgaa

SEQ ID NO: 17101 - DNA, 33 bp, Homo sapien
ttactttgaaatataaaaactgaaaagcaaagg

SEQ ID NO: 17102 - DNA, 33 bp, Homo sapien
ttactttgaaatataagaactgaaaagcaaagg

SEQ ID NO: 17103 - DNA, 33 bp, Homo sapien
taaggaatagatgatgcagagctttgcaggtca

SEQ ID NO: 17104 - DNA, 33 bp, Homo sapien
taaggaatagatgatgtagagctttgcaggtca

SEQ ID NO: 17105 - DNA, 33 bp, Homo sapien
tctgccagaggaagcactgatttaagactcgat

SEQ ID NO: 17106 - DNA, 33 bp, Homo sapien
tctgccagaggaagcattgatttaagactcgat

SEQ ID NO: 17107 - DNA, 33 bp, Homo sapien
tttaaatctgatcctacaaggtagcaagcatta

SEQ ID NO: 17108 - DNA, 33 bp, Homo sapien
tttaaatctgatcctagaaggtagcaagcatta

SEQ ID NO: 17109 - DNA, 33 bp, Homo sapien
agagctaatgaacaaactcggtaaagttgtagg

SEQ ID NO: 17110 - DNA, 33 bp, Homo sapien
agagctaatgaacaaattcggtaaagttgtagg

SEQ ID NO: 17111 - DNA, 33 bp, Homo sapien
ctgcaaaaaggccattaaaattttgatacggct

SEQ ID NO: 17112 - DNA, 33 bp, Homo sapien
ctgcaaaaaggccattgaaattttgatacggct

SEQ ID NO: 17113 - DNA, 33 bp, Homo sapien
gaagttcactcctttgaaagttgaaaaagaaag

SEQ ID NO: 17114 - DNA, 33 bp, Homo sapien
gaagttcactcctttggaagttgaaaaagaaag

SEQ ID NO: 17115 - DNA, 33 bp, Homo sapien
gagtcttagttgggatcacttgaagttatctga

SEQ ID NO: 17116 - DNA, 33 bp, Homo sapien
gagtcttagttgggatgacttgaagttatctga

SEQ ID NO: 17117 - DNA, 33 bp, Homo sapien
acaggataagtgatcacccagaaaagaggataa

SEQ ID NO: 17118 - DNA, 33 bp, Homo sapien
acaggataagtgatcatccagaaaagaggataa

SEQ ID NO: 17119 - DNA, 33 bp, Homo sapien
gaccagggcccgcataagaacaacttccccagg

SEQ ID NO: 17120 - DNA, 33 bp, Homo sapien
gaccagggcccgcatacgaacaacttccccagg

SEQ ID NO: 17121 - DNA, 33 bp, Homo sapien
cagtaaaagaggcatgcaaaccaaaaccatttc

SEQ ID NO: 17122 - DNA, 33 bp, Homo sapien
cagtaaaagaggcatgtaaaccaaaaccatttc

SEQ ID NO: 17123 - DNA, 33 bp, Homo sapien
taagtgttaaattccccgagcgtgataaatttg

SEQ ID NO: 17124 - DNA, 33 bp, Homo sapien
taagtgttaaattccctgagcgtgataaatttg

SEQ ID NO: 17125 - DNA, 33 bp, Homo sapien
ttaagaaagctccccaatacttctgtgacatag

SEQ ID NO: 17126 - DNA, 33 bp, Homo sapien
ttaagaaagctccccagtacttctgtgacatag

SEQ ID NO: 17127 - DNA, 33 bp, Homo sapien
ttactcttggctctcacgggtttctggcacttg

SEQ ID NO: 17128 - DNA, 33 bp, Homo sapien
ttactcttggctctcatgggtttctggcacttg

SEQ ID NO: 17129 - DNA, 33 bp, Homo sapien
gctgcattctacctccacaattgcagctttctt

SEQ ID NO: 17130 - DNA, 33 bp, Homo sapien
gctgcattctacctccgcaattgcagctttctt

SEQ ID NO: 17131 - DNA, 33 bp, Homo sapien
acactgcagcatataaaactactcatttttata

SEQ ID NO: 17132 - DNA, 33 bp, Homo sapien
acactgcagcatataagactactcatttttata

SEQ ID NO: 17133 - DNA, 33 bp, Homo sapien
gccatagggcacaatcaccttttaatactaaga

SEQ ID NO: 17134 - DNA, 33 bp, Homo sapien
gccatagggcacaatcgccttttaatactaaga

SEQ ID NO: 17135 - DNA, 33 bp, Homo sapien
gccatattttgcaacacggaagatatttgaaac

SEQ ID NO: 17136 - DNA, 33 bp, Homo sapien
gccatattttgcaacatggaagatatttgaaac

SEQ ID NO: 17137 - DNA, 33 bp, Homo sapien
tattgcaaactcaaaaattccatctaaatatct

SEQ ID NO: 17138 - DNA, 33 bp, Homo sapien
tattgcaaactcaaaacttccatctaaatatct

SEQ ID NO: 17139 - DNA, 33 bp, Homo sapien
tttttgatggtcagcaatactaagttctttacg

SEQ ID NO: 17140 - DNA, 33 bp, Homo sapien
tttttgatggtcagcagtactaagttctttacg

SEQ ID NO: 17141 - DNA, 33 bp, Homo sapien
atgatgatgaaactcaaacttatgcagattgtt

SEQ ID NO: 17142 - DNA, 33 bp, Homo sapien
atgatgatgaaactcagacttatgcagattgtt

SEQ ID NO: 17143 - DNA, 33 bp, Homo sapien
cttacctctgtaaattaaaatgtgttactcttg

SEQ ID NO: 17144 - DNA, 33 bp, Homo sapien
cttacctctgtaaatttaaatgtgttactcttg

SEQ ID NO: 17145 - DNA, 33 bp, Homo sapien
aatattttaaaggcaacattcaaaatgataaat

SEQ ID NO: 17146 - DNA, 33 bp, Homo sapien
aatattttaaaggcaagattcaaaatgataaat

SEQ ID NO: 17147 - DNA, 33 bp, Homo sapien
cttcaccaaaagtatacgtcctatatggctgca

SEQ ID NO: 17148 - DNA, 33 bp, Homo sapien
cttcaccaaaagtatatgtcctatatggctgca

SEQ ID NO: 17149 - DNA, 33 bp, Homo sapien
gtgccaggtgggagctaaagttaggcctaatgg

SEQ ID NO: 17150 - DNA, 33 bp, Homo sapien
gtgccaggtgggagctgaagttaggcctaatgg

SEQ ID NO: 17151 - DNA, 33 bp, Homo sapien
aagcagagataaatacaatcagacctgctaagc

SEQ ID NO: 17152 - DNA, 33 bp, Homo sapien
aagcagagataaatactatcagacctgctaagc

SEQ ID NO: 17153 - DNA, 33 bp, Homo sapien
ccagcagttgaacaaactgagaaagaatgcctt

SEQ ID NO: 17154 - DNA, 33 bp, Homo sapien
ccagcagttgaacaaattgagaaagaatgcctt

SEQ ID NO: 17155 - DNA, 33 bp, Homo sapien
cagtcgtcataaatggaaaaaactgaccttaaa

SEQ ID NO: 17156 - DNA, 33 bp, Homo sapien
cagtcgtcataaatgggaaaaactgaccttaaa

SEQ ID NO: 17157 - DNA, 33 bp, Homo sapien
gctgccatgaccattaacactgccttctctggg

SEQ ID NO: 17158 - DNA, 33 bp, Homo sapien
gctgccatgaccattaccactgccttctctggg

SEQ ID NO: 17159 - DNA, 33 bp, Homo sapien
tcacactctttgaacactgtgcattggcccaag

SEQ ID NO: 17160 - DNA, 33 bp, Homo sapien
tcacactctttgaacattgtgcattggcccaag

SEQ ID NO: 17161 - DNA, 33 bp, Homo sapien
actaaacatacaaaaacattctggtcatggtgg

SEQ ID NO: 17162 - DNA, 33 bp, Homo sapien
actaaacatacaaaaagattctggtcatggtgg

SEQ ID NO: 17163 - DNA, 33 bp, Homo sapien
aaagaatgtcagagagcaaagtagaagagcagt

SEQ ID NO: 17164 - DNA, 33 bp, Homo sapien
aaagaatgtcagagaggaaagtagaagagcagt

SEQ ID NO: 17165 - DNA, 33 bp, Homo sapien
agagggtagagtagtacggtatagagtaaggag

SEQ ID NO: 17166 - DNA, 33 bp, Homo sapien
agagggtagagtagtatggtatagagtaaggag

SEQ ID NO: 17167 - DNA, 33 bp, Homo sapien
ctctaccctctcccccacttaatgccatgtaaa

SEQ ID NO: 17168 - DNA, 33 bp, Homo sapien
ctctaccctctcccccgcttaatgccatgtaaa

SEQ ID NO: 17169 - DNA, 33 bp, Homo sapien
agtaaatgagaagcaacagtgcagcaaacaaaa

SEQ ID NO: 17170 - DNA, 33 bp, Homo sapien
agtaaatgagaagcaagagtgcagcaaacaaaa

SEQ ID NO: 17171 - DNA, 33 bp, Homo sapien
aagaaacatttgttgacgaatgaaagtccctgc

SEQ ID NO: 17172 - DNA, 33 bp, Homo sapien
aagaaacatttgttgatgaatgaaagtccctgc

SEQ ID NO: 17173 - DNA, 33 bp, Homo sapien
atggccctttcctagaatcagtgtctttaactg

SEQ ID NO: 17174 - DNA, 33 bp, Homo sapien
atggccctttcctagagtcagtgtctttaactg

SEQ ID NO: 17175 - DNA, 33 bp, Homo sapien
accaacgaagacctaaacagaaagtgtggccac

SEQ ID NO: 17176 - DNA, 33 bp, Homo sapien
accaacgaagacctaagcagaaagtgtggccac

SEQ ID NO: 17177 - DNA, 33 bp, Homo sapien
tgtctactactgtctgaatctctcttaacaacc

SEQ ID NO: 17178 - DNA, 33 bp, Homo sapien
tgtctactactgtctggatctctcttaacaacc

SEQ ID NO: 17179 - DNA, 33 bp, Homo sapien
tgacaaatagaattggacaatgcagtggtttta

SEQ ID NO: 17180 - DNA, 33 bp, Homo sapien
tgacaaatagaattgggcaatgcagtggtttta

SEQ ID NO: 17181 - DNA, 33 bp, Homo sapien
ctgagtttgagcaaaaagcagagagagcctaaa

SEQ ID NO: 17182 - DNA, 33 bp, Homo sapien
ctgagtttgagcaaaaggcagagagagcctaaa

SEQ ID NO: 17183 - DNA, 33 bp, Homo sapien
gctgggtgggctgatacgcagacagaaatagtc

SEQ ID NO: 17184 - DNA, 33 bp, Homo sapien
gctgggtgggctgatatgcagacagaaatagtc

SEQ ID NO: 17185 - DNA, 33 bp, Homo sapien
agaccaatgaggggaacagcagatttacctctt

SEQ ID NO: 17186 - DNA, 33 bp, Homo sapien
agaccaatgaggggaatagcagatttacctctt

SEQ ID NO: 17187 - DNA, 33 bp, Homo sapien
gatcacacagccaataaaaagcaaaactcaggt

SEQ ID NO: 17188 - DNA, 33 bp, Homo sapien
gatcacacagccaatagaaagcaaaactcaggt

SEQ ID NO: 17189 - DNA, 33 bp, Homo sapien
ggcccacagtatgtcaaggcttgaatgccaggg

SEQ ID NO: 17190 - DNA, 33 bp, Homo sapien
ggcccacagtatgtcagggcttgaatgccaggg

SEQ ID NO: 17191 - DNA, 33 bp, Homo sapien
gctgtcacggcctttccatatcttggggggatg

SEQ ID NO: 17192 - DNA, 33 bp, Homo sapien
gctgtcacggcctttctatatcttggggggatg

SEQ ID NO: 17193 - DNA, 33 bp, Homo sapien
ttgttgagtgaaaaaactaatctggacttctaa

SEQ ID NO: 17194 - DNA, 33 bp, Homo sapien
ttgttgagtgaaaaaattaatctggacttctaa

SEQ ID NO: 17195 - DNA, 33 bp, Homo sapien
agacccagctactcaaaacactgaagtgggagg

SEQ ID NO: 17196 - DNA, 33 bp, Homo sapien
agacccagctactcaagacactgaagtgggagg

SEQ ID NO: 17197 - DNA, 33 bp, Homo sapien
ttatggtaatcacttcccacaactctgatgtgt

SEQ ID NO: 17198 - DNA, 33 bp, Homo sapien
ttatggtaatcacttctcacaactctgatgtgt

SEQ ID NO: 17199 - DNA, 33 bp, Homo sapien
ataaagattgtgatgactatgtagaatgttttc

SEQ ID NO: 17200 - DNA, 33 bp, Homo sapien
ataaagattgtgatgagtatgtagaatgttttc

SEQ ID NO: 17201 - DNA, 33 bp, Homo sapien
acaagggtcgggcccacactttagcaattattg

SEQ ID NO: 17202 - DNA, 33 bp, Homo sapien
acaagggtcgggcccatactttagcaattattg

SEQ ID NO: 17203 - DNA, 33 bp, Homo sapien
acttggatgtttcacccggtagccagttctttg

SEQ ID NO: 17204 - DNA, 33 bp, Homo sapien
acttggatgtttcacctggtagccagttctttg

SEQ ID NO: 17205 - DNA, 33 bp, Homo sapien
gttcacaagctatagaagttaaccttccttatt

SEQ ID NO: 17206 - DNA, 33 bp, Homo sapien
gttcacaagctatagaggttaaccttccttatt

SEQ ID NO: 17207 - DNA, 33 bp, Homo sapien
gagattaagcacagagccagaatgttagaactg

SEQ ID NO: 17208 - DNA, 33 bp, Homo sapien
gagattaagcacagaggcagaatgttagaactg

SEQ ID NO: 17209 - DNA, 33 bp, Homo sapien
tttgatcatctgtaaaatgtcctgagggagtaa

SEQ ID NO: 17210 - DNA, 33 bp, Homo sapien
tttgatcatctgtaaagtgtcctgagggagtaa

SEQ ID NO: 17211 - DNA, 33 bp, Homo sapien
ttcttgattgcagaacccttatttatttattta

SEQ ID NO: 17212 - DNA, 33 bp, Homo sapien
ttcttgattgcagaactcttatttatttattta

SEQ ID NO: 17213 - DNA, 33 bp, Homo sapien
ggaataataagtaaggaacggttgctacctaga

SEQ ID NO: 17214 - DNA, 33 bp, Homo sapien
ggaataataagtaaggcacggttgctacctaga

SEQ ID NO: 17215 - DNA, 33 bp, Homo sapien
taaatgttctgtccacaaggatttaacaggaag

SEQ ID NO: 17216 - DNA, 33 bp, Homo sapien
taaatgttctgtccacgaggatttaacaggaag

SEQ ID NO: 17217 - DNA, 33 bp, Homo sapien
ttaagtatttatagtccacaatagtgtgcagta

SEQ ID NO: 17218 - DNA, 33 bp, Homo sapien
ttaagtatttatagtctacaatagtgtgcagta

SEQ ID NO: 17219 - DNA, 33 bp, Homo sapien
agtgttatcacaatgggcaaattacctagctct

SEQ ID NO: 17220 - DNA, 33 bp, Homo sapien
agtgttatcacaatggtcaaattacctagctct

SEQ ID NO: 17221 - DNA, 33 bp, Homo sapien
acaacactcaactagaagtattctcagtaattt

SEQ ID NO: 17222 - DNA, 33 bp, Homo sapien
acaacactcaactagaggtattctcagtaattt

SEQ ID NO: 17223 - DNA, 33 bp, Homo sapien
atgaataaatgaactacctataagcagatcctc

SEQ ID NO: 17224 - DNA, 33 bp, Homo sapien
atgaataaatgaactatctataagcagatcctc

SEQ ID NO: 17225 - DNA, 33 bp, Homo sapien
gttgcagctgccttggaaaacagcttagcagtt

SEQ ID NO: 17226 - DNA, 33 bp, Homo sapien
gttgcagctgccttgggaaacagcttagcagtt

SEQ ID NO: 17227 - DNA, 33 bp, Homo sapien
ggagtatttccccagtaaactagtgttcctaac

SEQ ID NO: 17228 - DNA, 33 bp, Homo sapien
ggagtatttccccagttaactagtgttcctaac

SEQ ID NO: 17229 - DNA, 33 bp, Homo sapien
gggaagtatcaatagaatcctagtggggagtca

SEQ ID NO: 17230 - DNA, 33 bp, Homo sapien
gggaagtatcaatagagtcctagtggggagtca

SEQ ID NO: 17231 - DNA, 33 bp, Homo sapien
ctctccaacagttagaagcctggaagatgagga

SEQ ID NO: 17232 - DNA, 33 bp, Homo sapien
ctctccaacagttagaggcctggaagatgagga

SEQ ID NO: 17233 - DNA, 33 bp, Homo sapien
ttaatagtattgaaaactcactggcaaagttga

SEQ ID NO: 17234 - DNA, 33 bp, Homo sapien
ttaatagtattgaaaattcactggcaaagttga

SEQ ID NO: 17235 - DNA, 33 bp, Homo sapien
atctggcatggctaaggaaagaggtgttccatt

SEQ ID NO: 17236 - DNA, 33 bp, Homo sapien
atctggcatggctaagtaaagaggtgttccatt

SEQ ID NO: 17237 - DNA, 33 bp, Homo sapien
gcttacgaaggccgagcatagtggctcaagcct

SEQ ID NO: 17238 - DNA, 33 bp, Homo sapien
gcttacgaaggccgagtatagtggctcaagcct

SEQ ID NO: 17239 - DNA, 33 bp, Homo sapien
acatgctacagcttgacaaataacctctatact

SEQ ID NO: 17240 - DNA, 33 bp, Homo sapien
acatgctacagcttgataaataacctctatact

SEQ ID NO: 17241 - DNA, 33 bp, Homo sapien
ctcaggaagtagccgagcgatttctcagggtga

SEQ ID NO: 17242 - DNA, 33 bp, Homo sapien
ctcaggaagtagccgatcgatttctcagggtga

SEQ ID NO: 17243 - DNA, 33 bp, Homo sapien
ttatgtaacaggcacgaaaggtaatcagacacc

SEQ ID NO: 17244 - DNA, 33 bp, Homo sapien
ttatgtaacaggcacgtaaggtaatcagacacc

SEQ ID NO: 17245 - DNA, 33 bp, Homo sapien
tattctctttctctaacaggatgaaaaaccaga

SEQ ID NO: 17246 - DNA, 33 bp, Homo sapien
tattctctttctctaataggatgaaaaaccaga

SEQ ID NO: 17247 - DNA, 33 bp, Homo sapien
gagtatcttagactacaggcgctcgccaccatg

SEQ ID NO: 17248 - DNA, 33 bp, Homo sapien
gagtatcttagactacgggcgctcgccaccatg

SEQ ID NO: 17249 - DNA, 33 bp, Homo sapien
cgatcccagatgcataataaaacagaatgaatt

SEQ ID NO: 17250 - DNA, 33 bp, Homo sapien
cgatcccagatgcatagtaaaacagaatgaatt

SEQ ID NO: 17251 - DNA, 33 bp, Homo sapien
gctgagctcaaactaccgacccacagattcata

SEQ ID NO: 17252 - DNA, 33 bp, Homo sapien
gctgagctcaaactactgacccacagattcata

SEQ ID NO: 17253 - DNA, 33 bp, Homo sapien
atgcattggaaaaatacggatgcatgaaatatg

SEQ ID NO: 17254 - DNA, 33 bp, Homo sapien
atgcattggaaaaatatggatgcatgaaatatg

SEQ ID NO: 17255 - DNA, 33 bp, Homo sapien
gttagacgtgtacaaacaggtatctgatttaca

SEQ ID NO: 17256 - DNA, 33 bp, Homo sapien
gttagacgtgtacaaataggtatctgatttaca

SEQ ID NO: 17257 - DNA, 33 bp, Homo sapien
aattctttatcattcaagtagagagacaggcat

SEQ ID NO: 17258 - DNA, 33 bp, Homo sapien
aattctttatcattcaggtagagagacaggcat

SEQ ID NO: 17259 - DNA, 33 bp, Homo sapien
atctgcctccctccttcaaaacaaagctgtgca

SEQ ID NO: 17260 - DNA, 33 bp, Homo sapien
atctgcctccctcctttaaaacaaagctgtgca

SEQ ID NO: 17261 - DNA, 33 bp, Homo sapien
gttgggtggtaaaccactcttcactgttcttag

SEQ ID NO: 17262 - DNA, 33 bp, Homo sapien
gttgggtggtaaaccattcttcactgttcttag

SEQ ID NO: 17263 - DNA, 33 bp, Homo sapien
gctgactgcccgaaatcaaccactggtaaagca

SEQ ID NO: 17264 - DNA, 33 bp, Homo sapien
gctgactgcccgaaatgaaccactggtaaagca

SEQ ID NO: 17265 - DNA, 33 bp, Homo sapien
ttattactagtcaatccccagagttaatttcaa

SEQ ID NO: 17266 - DNA, 33 bp, Homo sapien
ttattactagtcaatctccagagttaatttcaa

SEQ ID NO: 17267 - DNA, 33 bp, Homo sapien
tgccaatgagactctaagggtgtaaacgctgaa

SEQ ID NO: 17268 - DNA, 33 bp, Homo sapien
tgccaatgagactctacgggtgtaaacgctgaa

SEQ ID NO: 17269 - DNA, 33 bp, Homo sapien
ggaaaatacaggaatacagggccgagtgtggtg

SEQ ID NO: 17270 - DNA, 33 bp, Homo sapien
ggaaaatacaggaatagagggccgagtgtggtg

SEQ ID NO: 17271 - DNA, 33 bp, Homo sapien
atggaaatcttataaaagcatatcatttgttct

SEQ ID NO: 17272 - DNA, 33 bp, Homo sapien
atggaaatcttataaaggcatatcatttgttct

SEQ ID NO: 17273 - DNA, 33 bp, Homo sapien
tattgaagctaaacaaacatttaaagcaccagc

SEQ ID NO: 17274 - DNA, 33 bp, Homo sapien
tattgaagctaaacaatcatttaaagcaccagc

SEQ ID NO: 17275 - DNA, 33 bp, Homo sapien
tgtagcttctctaaaaatcaaatcctcctcttt

SEQ ID NO: 17276 - DNA, 33 bp, Homo sapien
tgtagcttctctaaaagtcaaatcctcctcttt

SEQ ID NO: 17277 - DNA, 33 bp, Homo sapien
ggagtcctattttgtaacggattatgatccaac

SEQ ID NO: 17278 - DNA, 33 bp, Homo sapien
ggagtcctattttgtagcggattatgatccaac

SEQ ID NO: 17279 - DNA, 33 bp, Homo sapien
gggaaagggaggaattcaatatatgagagaggt

SEQ ID NO: 17280 - DNA, 33 bp, Homo sapien
gggaaagggaggaatttaatatatgagagaggt

SEQ ID NO: 17281 - DNA, 33 bp, Homo sapien
aagtcagaaggattaactgacacacaaaactct

SEQ ID NO: 17282 - DNA, 33 bp, Homo sapien
aagtcagaaggattaattgacacacaaaactct

SEQ ID NO: 17283 - DNA, 33 bp, Homo sapien
taaaaaccagcaaataacctactcagcatatga

SEQ ID NO: 17284 - DNA, 33 bp, Homo sapien
taaaaaccagcaaatatcctactcagcatatga

SEQ ID NO: 17285 - DNA, 33 bp, Homo sapien
gaacaggaaggaattaagagttaggcaagggag

SEQ ID NO: 17286 - DNA, 33 bp, Homo sapien
gaacaggaaggaattaggagttaggcaagggag

SEQ ID NO: 17287 - DNA, 33 bp, Homo sapien
acgaggagactcaagcaaagaaagaggatcaga

SEQ ID NO: 17288 - DNA, 33 bp, Homo sapien
acgaggagactcaagcgaagaaagaggatcaga

SEQ ID NO: 17289 - DNA, 33 bp, Homo sapien
gattgccttagtatgactattacctatcaagaa

SEQ ID NO: 17290 - DNA, 33 bp, Homo sapien
gattgccttagtatgattattacctatcaagaa

SEQ ID NO: 17291 - DNA, 33 bp, Homo sapien
aaagttattctcttcacgcaaaattgatattta

SEQ ID NO: 17292 - DNA, 33 bp, Homo sapien
aaagttattctcttcaggcaaaattgatattta

SEQ ID NO: 17293 - DNA, 33 bp, Homo sapien
tcttaattaaccgtaaagcacacggtccagtgc

SEQ ID NO: 17294 - DNA, 33 bp, Homo sapien
tcttaattaaccgtaaggcacacggtccagtgc

SEQ ID NO: 17295 - DNA, 33 bp, Homo sapien
aaataaaatcaagctacggtgataggatttgaa

SEQ ID NO: 17296 - DNA, 33 bp, Homo sapien
aaataaaatcaagctatggtgataggatttgaa

SEQ ID NO: 17297 - DNA, 33 bp, Homo sapien
gagttttagttcctccacatttttgacagtact

SEQ ID NO: 17298 - DNA, 33 bp, Homo sapien
gagttttagttcctccgcatttttgacagtact

SEQ ID NO: 17299 - DNA, 33 bp, Homo sapien
tcatatagtctgtatacgagttgtttgtcagag

SEQ ID NO: 17300 - DNA, 33 bp, Homo sapien
tcatatagtctgtatatgagttgtttgtcagag

SEQ ID NO: 17301 - DNA, 33 bp, Homo sapien
taacccttgatctagagaaccgtattcattttc

SEQ ID NO: 17302 - DNA, 33 bp, Homo sapien
taacccttgatctagataaccgtattcattttc

SEQ ID NO: 17303 - DNA, 33 bp, Homo sapien
aacactcctactttccacctgggtactaagctc

SEQ ID NO: 17304 - DNA, 33 bp, Homo sapien
aacactcctactttccgcctgggtactaagctc

SEQ ID NO: 17305 - DNA, 33 bp, Homo sapien
gctcagtatatatcaacttgacagaaagctcac

SEQ ID NO: 17306 - DNA, 33 bp, Homo sapien
gctcagtatatatcaagttgacagaaagctcac

SEQ ID NO: 17307 - DNA, 33 bp, Homo sapien
tcttttttattaatggaaagctcagtatatatc

SEQ ID NO: 17308 - DNA, 33 bp, Homo sapien
tcttttttattaatgggaagctcagtatatatc

SEQ ID NO: 17309 - DNA, 33 bp, Homo sapien
gccatgacaagtgagaaatttgcatctgtgatg

SEQ ID NO: 17310 - DNA, 33 bp, Homo sapien
gccatgacaagtgagagatttgcatctgtgatg

SEQ ID NO: 17311 - DNA, 33 bp, Homo sapien
tggaaatcgttaaatgaagtggaaattctaatt

SEQ ID NO: 17312 - DNA, 33 bp, Homo sapien
tggaaatcgttaaatgcagtggaaattctaatt

SEQ ID NO: 17313 - DNA, 33 bp, Homo sapien
acatcatttaaaaatacggaccagtagtacagg

SEQ ID NO: 17314 - DNA, 33 bp, Homo sapien
acatcatttaaaaatatggaccagtagtacagg

SEQ ID NO: 17315 - DNA, 33 bp, Homo sapien
caagagatacctgaaacaggctttaggatgaac

SEQ ID NO: 17316 - DNA, 33 bp, Homo sapien
caagagatacctgaaataggctttaggatgaac

SEQ ID NO: 17317 - DNA, 33 bp, Homo sapien
aacaaaaactggttctgacagtaggattatatt

SEQ ID NO: 17318 - DNA, 33 bp, Homo sapien
aacaaaaactggttcttacagtaggattatatt

SEQ ID NO: 17319 - DNA, 33 bp, Homo sapien
gcttccctgagcagggacatttcagcaggagct

SEQ ID NO: 17320 - DNA, 33 bp, Homo sapien
gcttccctgagcaggggcatttcagcaggagct

SEQ ID NO: 17321 - DNA, 33 bp, Homo sapien
cttactttctcagtaacagtaacccctggtatg

SEQ ID NO: 17322 - DNA, 33 bp, Homo sapien
cttactttctcagtaatagtaacccctggtatg

SEQ ID NO: 17323 - DNA, 33 bp, Homo sapien
gccactttactgctccaagcctctgttaactag

SEQ ID NO: 17324 - DNA, 33 bp, Homo sapien
gccactttactgctccgagcctctgttaactag

SEQ ID NO: 17325 - DNA, 33 bp, Homo sapien
ccatagatctcaaagacgtcgtacaaaaaaata

SEQ ID NO: 17326 - DNA, 33 bp, Homo sapien
ccatagatctcaaagatgtcgtacaaaaaaata

SEQ ID NO: 17327 - DNA, 33 bp, Homo sapien
ccaggtcccaaattcaatcagggcagaaggcca

SEQ ID NO: 17328 - DNA, 33 bp, Homo sapien
ccaggtcccaaattcagtcagggcagaaggcca

SEQ ID NO: 17329 - DNA, 33 bp, Homo sapien
agacctgagtctccataaaccatgtggatctgt

SEQ ID NO: 17330 - DNA, 33 bp, Homo sapien
agacctgagtctccatcaaccatgtggatctgt

SEQ ID NO: 17331 - DNA, 33 bp, Homo sapien
cccagcacagagaaagcatcagcgactacagct

SEQ ID NO: 17332 - DNA, 33 bp, Homo sapien
cccagcacagagaaaggatcagcgactacagct

SEQ ID NO: 17333 - DNA, 33 bp, Homo sapien
atgacctgtaatggaactgatgaatgacttatg

SEQ ID NO: 17334 - DNA, 33 bp, Homo sapien
atgacctgtaatggaattgatgaatgacttatg

SEQ ID NO: 17335 - DNA, 33 bp, Homo sapien
agtgaatgctttaaaaatgtgtgcattgcttat

SEQ ID NO: 17336 - DNA, 33 bp, Homo sapien
agtgaatgctttaaaactgtgtgcattgcttat

SEQ ID NO: 17337 - DNA, 33 bp, Homo sapien
ggcaaccggctgcacacgctgccacctgggctg

SEQ ID NO: 17338 - DNA, 33 bp, Homo sapien
ggcaaccggctgcacatgctgccacctgggctg

SEQ ID NO: 17339 - DNA, 33 bp, Homo sapien
ccgacacgagggcgggaaattttatcatatctt

SEQ ID NO: 17340 - DNA, 33 bp, Homo sapien
ccgacacgagggcggggaattttatcatatctt

SEQ ID NO: 17341 - DNA, 33 bp, Homo sapien
ggaatcagtcattctgcaacggatgaggagacc

SEQ ID NO: 17342 - DNA, 33 bp, Homo sapien
ggaatcagtcattctgtaacggatgaggagacc

SEQ ID NO: 17343 - DNA, 33 bp, Homo sapien
caccgtagtacactcactccacctcattacact

SEQ ID NO: 17344 - DNA, 33 bp, Homo sapien
caccgtagtacactcattccacctcattacact

SEQ ID NO: 17345 - DNA, 33 bp, Homo sapien
cctctcattacacttacactgcctcaaaacact

SEQ ID NO: 17346 - DNA, 33 bp, Homo sapien
cctctcattacacttatactgcctcaaaacact

SEQ ID NO: 17347 - DNA, 33 bp, Homo sapien
agcagggattgctatcaatattttacccaaaga

SEQ ID NO: 17348 - DNA, 33 bp, Homo sapien
agcagggattgctatcgatattttacccaaaga

SEQ ID NO: 17349 - DNA, 33 bp, Homo sapien
gtggtgtggtggtagaagaaggagttgcagctt

SEQ ID NO: 17350 - DNA, 33 bp, Homo sapien
gtggtgtggtggtagaggaaggagttgcagctt

SEQ ID NO: 17351 - DNA, 33 bp, Homo sapien
cctcttcttacttctacacctcatcaccccatc

SEQ ID NO: 17352 - DNA, 33 bp, Homo sapien
cctcttcttacttctatacctcatcaccccatc

SEQ ID NO: 17353 - DNA, 33 bp, Homo sapien
cgcagccttatcacagaccattgtagtaccact

SEQ ID NO: 17354 - DNA, 33 bp, Homo sapien
cgcagccttatcacaggccattgtagtaccact

SEQ ID NO: 17355 - DNA, 33 bp, Homo sapien
tagctgatacagggaacgagagtttctttagac

SEQ ID NO: 17356 - DNA, 33 bp, Homo sapien
tagctgatacagggaatgagagtttctttagac

SEQ ID NO: 17357 - DNA, 33 bp, Homo sapien
aatgcagattagatagaaagggacggtatagca

SEQ ID NO: 17358 - DNA, 33 bp, Homo sapien
aatgcagattagataggaagggacggtatagca

SEQ ID NO: 17359 - DNA, 33 bp, Homo sapien
gagagggccgaaagcaaagtcctgaagctgatc

SEQ ID NO: 17360 - DNA, 33 bp, Homo sapien
gagagggccgaaagcagagtcctgaagctgatc

SEQ ID NO: 17361 - DNA, 33 bp, Homo sapien
gtcagcccctccactaagagctcgtgatgctta

SEQ ID NO: 17362 - DNA, 33 bp, Homo sapien
gtcagcccctccactatgagctcgtgatgctta

SEQ ID NO: 17363 - DNA, 33 bp, Homo sapien
tgtcacaatgaaatccacctccggggaagagca

SEQ ID NO: 17364 - DNA, 33 bp, Homo sapien
tgtcacaatgaaatccgcctccggggaagagca

SEQ ID NO: 17365 - DNA, 33 bp, Homo sapien
actgtggtctcacctcaagttcaccctcttagc

SEQ ID NO: 17366 - DNA, 33 bp, Homo sapien
actgtggtctcacctcgagttcaccctcttagc

SEQ ID NO: 17367 - DNA, 33 bp, Homo sapien
aaagtatcttccacaaaaataaatctgtagcct

SEQ ID NO: 17368 - DNA, 33 bp, Homo sapien
aaagtatcttccacaagaataaatctgtagcct

SEQ ID NO: 17369 - DNA, 33 bp, Homo sapien
tctcttaagttgcccacagagtccaggaggtat

SEQ ID NO: 17370 - DNA, 33 bp, Homo sapien
tctcttaagttgcccatagagtccaggaggtat

SEQ ID NO: 17371 - DNA, 33 bp, Homo sapien
cccttcactcctacaaccaagcagccttcatca

SEQ ID NO: 17372 - DNA, 33 bp, Homo sapien
cccttcactcctacaatcaagcagccttcatca

SEQ ID NO: 17373 - DNA, 33 bp, Homo sapien
ttacagatgagaaaaacacaaaactcagagtgg

SEQ ID NO: 17374 - DNA, 33 bp, Homo sapien
ttacagatgagaaaaatacaaaactcagagtgg

SEQ ID NO: 17375 - DNA, 33 bp, Homo sapien
gcaggttaatccagaccggaatacatttgcatt

SEQ ID NO: 17376 - DNA, 33 bp, Homo sapien
gcaggttaatccagactggaatacatttgcatt

SEQ ID NO: 17377 - DNA, 33 bp, Homo sapien
cattgccagtttaatgcagcagatagttgagcg

SEQ ID NO: 17378 - DNA, 33 bp, Homo sapien
cattgccagtttaatgtagcagatagttgagcg

SEQ ID NO: 17379 - DNA, 33 bp, Homo sapien
aaacagttgagtggacaaggtactggaaggaac

SEQ ID NO: 17380 - DNA, 33 bp, Homo sapien
aaacagttgagtggaccaggtactggaaggaac

SEQ ID NO: 17381 - DNA, 33 bp, Homo sapien
tgcagcatttccaccaactggcaaaaaatgaaa

SEQ ID NO: 17382 - DNA, 33 bp, Homo sapien
tgcagcatttccaccatctggcaaaaaatgaaa

SEQ ID NO: 17383 - DNA, 33 bp, Homo sapien
agaaaactaaaactggaacacagagtaacttgc

SEQ ID NO: 17384 - DNA, 33 bp, Homo sapien
agaaaactaaaactgggacacagagtaacttgc

SEQ ID NO: 17385 - DNA, 33 bp, Homo sapien
caacaaggaacctcgaaccactgaccctaagtt

SEQ ID NO: 17386 - DNA, 33 bp, Homo sapien
caacaaggaacctcgagccactgaccctaagtt

SEQ ID NO: 17387 - DNA, 33 bp, Homo sapien
ttttaattggatcctacaatgatgctcaaaata

SEQ ID NO: 17388 - DNA, 33 bp, Homo sapien
ttttaattggatcctataatgatgctcaaaata

SEQ ID NO: 17389 - DNA, 33 bp, Homo sapien
ctagctacctactgtaacaaaatgatgggccaa

SEQ ID NO: 17390 - DNA, 33 bp, Homo sapien
ctagctacctactgtaccaaaatgatgggccaa

SEQ ID NO: 17391 - DNA, 33 bp, Homo sapien
ttactcccagcctgtcacttatctttctcattt

SEQ ID NO: 17392 - DNA, 33 bp, Homo sapien
ttactcccagcctgtcgcttatctttctcattt

SEQ ID NO: 17393 - DNA, 33 bp, Homo sapien
tgagtatcataaagcaagtctattcaaaggatt

SEQ ID NO: 17394 - DNA, 33 bp, Homo sapien
tgagtatcataaagcacgtctattcaaaggatt

SEQ ID NO: 17395 - DNA, 33 bp, Homo sapien
agtaagttgttcccagaagtaatttgtgaacac

SEQ ID NO: 17396 - DNA, 33 bp, Homo sapien
agtaagttgttcccaggagtaatttgtgaacac

SEQ ID NO: 17397 - DNA, 33 bp, Homo sapien
tctgtatttctttgaccgtaaactacctttttg

SEQ ID NO: 17398 - DNA, 33 bp, Homo sapien
tctgtatttctttgactgtaaactacctttttg

SEQ ID NO: 17399 - DNA, 33 bp, Homo sapien
catgaagaccattaaccgcaacaccaatttatt

SEQ ID NO: 17400 - DNA, 33 bp, Homo sapien
catgaagaccattaacggcaacaccaatttatt

SEQ ID NO: 17401 - DNA, 33 bp, Homo sapien
ctgtggagcagggcagaacaatgagtctggatg

SEQ ID NO: 17402 - DNA, 33 bp, Homo sapien
ctgtggagcagggcaggacaatgagtctggatg

SEQ ID NO: 17403 - DNA, 33 bp, Homo sapien
tgatatttgcattaaaagctaaacattgaataa

SEQ ID NO: 17404 - DNA, 33 bp, Homo sapien
tgatatttgcattaaaggctaaacattgaataa

SEQ ID NO: 17405 - DNA, 33 bp, Homo sapien
ctacttatatgaagtacgtagagtggtggcatt

SEQ ID NO: 17406 - DNA, 33 bp, Homo sapien
ctacttatatgaagtaggtagagtggtggcatt

SEQ ID NO: 17407 - DNA, 33 bp, Homo sapien
aagcagcctgtgcatccgaggaggcctaagcct

SEQ ID NO: 17408 - DNA, 33 bp, Homo sapien
aagcagcctgtgcatctgaggaggcctaagcct

SEQ ID NO: 17409 - DNA, 33 bp, Homo sapien
aagagaggcttggaaaaggattaagtgcaacca

SEQ ID NO: 17410 - DNA, 33 bp, Homo sapien
aagagaggcttggaaacggattaagtgcaacca

SEQ ID NO: 17411 - DNA, 33 bp, Homo sapien
atgctgggctgtgtaaactaaacagaacggaat

SEQ ID NO: 17412 - DNA, 33 bp, Homo sapien
atgctgggctgtgtaagctaaacagaacggaat

SEQ ID NO: 17413 - DNA, 33 bp, Homo sapien
atgcgaggtctacataccagggaaattaattgt

SEQ ID NO: 17414 - DNA, 33 bp, Homo sapien
atgcgaggtctacatagcagggaaattaattgt

SEQ ID NO: 17415 - DNA, 33 bp, Homo sapien
ctgggtgattttctacactagtgataacatgca

SEQ ID NO: 17416 - DNA, 33 bp, Homo sapien
ctgggtgattttctacgctagtgataacatgca

SEQ ID NO: 17417 - DNA, 33 bp, Homo sapien
ccagagtgctcagaaactcaagataggatatgc

SEQ ID NO: 17418 - DNA, 33 bp, Homo sapien
ccagagtgctcagaaagtcaagataggatatgc

SEQ ID NO: 17419 - DNA, 33 bp, Homo sapien
catctaactttccccaactagtcctgatgtaat

SEQ ID NO: 17420 - DNA, 33 bp, Homo sapien
catctaactttccccagctagtcctgatgtaat

SEQ ID NO: 17421 - DNA, 33 bp, Homo sapien
tatctcagaggcaataacttaggcaacaaaatt

SEQ ID NO: 17422 - DNA, 33 bp, Homo sapien
tatctcagaggcaataccttaggcaacaaaatt

SEQ ID NO: 17423 - DNA, 33 bp, Homo sapien
atgagtcattaaaacactgctgtggaattagtt

SEQ ID NO: 17424 - DNA, 33 bp, Homo sapien
atgagtcattaaaacattgctgtggaattagtt

SEQ ID NO: 17425 - DNA, 33 bp, Homo sapien
tctactgcattattaacgatttacaggttcaat

SEQ ID NO: 17426 - DNA, 33 bp, Homo sapien
tctactgcattattaatgatttacaggttcaat

SEQ ID NO: 17427 - DNA, 33 bp, Homo sapien
gcctctttcagttacaactcttggacaggcatt

SEQ ID NO: 17428 - DNA, 33 bp, Homo sapien
gcctctttcagttacatctcttggacaggcatt

SEQ ID NO: 17429 - DNA, 33 bp, Homo sapien
agatctataggtgagcagccatatcctctgcag

SEQ ID NO: 17430 - DNA, 33 bp, Homo sapien
agatctataggtgagcggccatatcctctgcag

SEQ ID NO: 17431 - DNA, 33 bp, Homo sapien
cctgcatgacagctggaaagagcccatccctaa

SEQ ID NO: 17432 - DNA, 33 bp, Homo sapien
cctgcatgacagctggcaagagcccatccctaa

SEQ ID NO: 17433 - DNA, 33 bp, Homo sapien
acaccaaagaggagtacgtacacacgtgcttgt

SEQ ID NO: 17434 - DNA, 33 bp, Homo sapien
acaccaaagaggagtatgtacacacgtgcttgt

SEQ ID NO: 17435 - DNA, 33 bp, Homo sapien
gccatgaaagatgttaagtagagaagggtcaga

SEQ ID NO: 17436 - DNA, 33 bp, Homo sapien
gccatgaaagatgttatgtagagaagggtcaga

SEQ ID NO: 17437 - DNA, 33 bp, Homo sapien
atcctggagtggctcacggcatttaaaggcatt

SEQ ID NO: 17438 - DNA, 33 bp, Homo sapien
atcctggagtggctcatggcatttaaaggcatt

SEQ ID NO: 17439 - DNA, 33 bp, Homo sapien
tctgtttaccaggagcaccctgagtgcgtggca

SEQ ID NO: 17440 - DNA, 33 bp, Homo sapien
tctgtttaccaggagcgccctgagtgcgtggca

SEQ ID NO: 17441 - DNA, 33 bp, Homo sapien
gaggtctggatttgagacactgctgtgctattt

SEQ ID NO: 17442 - DNA, 33 bp, Homo sapien
gaggtctggatttgagtcactgctgtgctattt

SEQ ID NO: 17443 - DNA, 33 bp, Homo sapien
caggccttctactttacacatggagaaaacaag

SEQ ID NO: 17444 - DNA, 33 bp, Homo sapien
caggccttctactttatacatggagaaaacaag

SEQ ID NO: 17445 - DNA, 33 bp, Homo sapien
agggcttcgtaaaccacgagatgaggtgaggtg

SEQ ID NO: 17446 - DNA, 33 bp, Homo sapien
agggcttcgtaaaccaggagatgaggtgaggtg

SEQ ID NO: 17447 - DNA, 33 bp, Homo sapien
tcatttaatcttcccaaccaacagccctttgag

SEQ ID NO: 17448 - DNA, 33 bp, Homo sapien
tcatttaatcttcccagccaacagccctttgag

SEQ ID NO: 17449 - DNA, 33 bp, Homo sapien
cgtcagagctcagcacaaaaataagtaggtgta

SEQ ID NO: 17450 - DNA, 33 bp, Homo sapien
cgtcagagctcagcaccaaaataagtaggtgta

SEQ ID NO: 17451 - DNA, 33 bp, Homo sapien
cctctagagagcagaacggcaatgatgaaaatg

SEQ ID NO: 17452 - DNA, 33 bp, Homo sapien
cctctagagagcagaatggcaatgatgaaaatg

SEQ ID NO: 17453 - DNA, 33 bp, Homo sapien
caattcacatcctttaacttcactactcacaac

SEQ ID NO: 17454 - DNA, 33 bp, Homo sapien
caattcacatcctttagcttcactactcacaac

SEQ ID NO: 17455 - DNA, 33 bp, Homo sapien
gaaagttgtcaagtcgaccaccagcagacaact

SEQ ID NO: 17456 - DNA, 33 bp, Homo sapien
gaaagttgtcaagtcggccaccagcagacaact

SEQ ID NO: 17457 - DNA, 33 bp, Homo sapien
ctccccaggcacagccaagaggaaaggagcaga

SEQ ID NO: 17458 - DNA, 33 bp, Homo sapien
ctccccaggcacagccgagaggaaaggagcaga

SEQ ID NO: 17459 - DNA, 33 bp, Homo sapien
acagaggagtctacacggactttattctctgga

SEQ ID NO: 17460 - DNA, 33 bp, Homo sapien
acagaggagtctacactgactttattctctgga

SEQ ID NO: 17461 - DNA, 33 bp, Homo sapien
ccatagctggtcacccacattcacaccccagca

SEQ ID NO: 17462 - DNA, 33 bp, Homo sapien
ccatagctggtcacccgcattcacaccccagca

SEQ ID NO: 17463 - DNA, 33 bp, Homo sapien
tgtgccaagaatccagaaatgcaggagagcggg

SEQ ID NO: 17464 - DNA, 33 bp, Homo sapien
tgtgccaagaatccaggaatgcaggagagcggg

SEQ ID NO: 17465 - DNA, 33 bp, Homo sapien
agaggataaatacaagacctgacacataacaag

SEQ ID NO: 17466 - DNA, 33 bp, Homo sapien
agaggataaatacaaggcctgacacataacaag

SEQ ID NO: 17467 - DNA, 33 bp, Homo sapien
tggcagtttggatctacgtaaagttcagtaata

SEQ ID NO: 17468 - DNA, 33 bp, Homo sapien
tggcagtttggatctatgtaaagttcagtaata

SEQ ID NO: 17469 - DNA, 33 bp, Homo sapien
accacacagatgtataacaaagctctcttcatc

SEQ ID NO: 17470 - DNA, 33 bp, Homo sapien
accacacagatgtatagcaaagctctcttcatc

SEQ ID NO: 17471 - DNA, 33 bp, Homo sapien
atatcccgccattccaagtcttcttaagtgagg

SEQ ID NO: 17472 - DNA, 33 bp, Homo sapien
atatcccgccattccaggtcttcttaagtgagg

SEQ ID NO: 17473 - DNA, 33 bp, Homo sapien
gacaggagaagtcaaaaagtatgttcagtatgg

SEQ ID NO: 17474 - DNA, 33 bp, Homo sapien
gacaggagaagtcaaagagtatgttcagtatgg

SEQ ID NO: 17475 - DNA, 33 bp, Homo sapien
gctgctgacatcataacgctggaggtaggagaa

SEQ ID NO: 17476 - DNA, 33 bp, Homo sapien
gctgctgacatcataatgctggaggtaggagaa

SEQ ID NO: 17477 - DNA, 33 bp, Homo sapien
gaatctctcctcaggaacctcataccctgcata

SEQ ID NO: 17478 - DNA, 33 bp, Homo sapien
gaatctctcctcaggaccctcataccctgcata

SEQ ID NO: 17479 - DNA, 33 bp, Homo sapien
aacaaggccaagtgaacgcctggtgaccagatg

SEQ ID NO: 17480 - DNA, 33 bp, Homo sapien
aacaaggccaagtgaatgcctggtgaccagatg

SEQ ID NO: 17481 - DNA, 33 bp, Homo sapien
taaataaatgaaaccacgaaagtactgaagcaa

SEQ ID NO: 17482 - DNA, 33 bp, Homo sapien
taaataaatgaaaccatgaaagtactgaagcaa

SEQ ID NO: 17483 - DNA, 33 bp, Homo sapien
tataatatgcctgtgacgacttttgcacttgta

SEQ ID NO: 17484 - DNA, 33 bp, Homo sapien
tataatatgcctgtgatgacttttgcacttgta

SEQ ID NO: 17485 - DNA, 33 bp, Homo sapien
aatatacccacactcaggtaagatgctaatatt

SEQ ID NO: 17486 - DNA, 33 bp, Homo sapien
aatatacccacactcatgtaagatgctaatatt

SEQ ID NO: 17487 - DNA, 33 bp, Homo sapien
gcaaggcgagccaagaagggacctttggaacca

SEQ ID NO: 17488 - DNA, 33 bp, Homo sapien
gcaaggcgagccaagaggggacctttggaacca

SEQ ID NO: 17489 - DNA, 33 bp, Homo sapien
ggtcaatctccaccaccaccctgtgaggctgca

SEQ ID NO: 17490 - DNA, 33 bp, Homo sapien
ggtcaatctccaccactaccctgtgaggctgca

SEQ ID NO: 17491 - DNA, 33 bp, Homo sapien
gcaacaaggacagtcacagtttgctaaacaaaa

SEQ ID NO: 17492 - DNA, 33 bp, Homo sapien
gcaacaaggacagtcatagtttgctaaacaaaa

SEQ ID NO: 17493 - DNA, 33 bp, Homo sapien
gaccaaagaaagatggaagtgagagggaaccaa

SEQ ID NO: 17494 - DNA, 33 bp, Homo sapien
gaccaaagaaagatggtagtgagagggaaccaa

SEQ ID NO: 17495 - DNA, 33 bp, Homo sapien
cttggaaatccgaagaactttgtcatgtattct

SEQ ID NO: 17496 - DNA, 33 bp, Homo sapien
cttggaaatccgaagagctttgtcatgtattct

SEQ ID NO: 17497 - DNA, 33 bp, Homo sapien
aagtgaagcatgaaaaccccttgcccaggtgtg

SEQ ID NO: 17498 - DNA, 33 bp, Homo sapien
aagtgaagcatgaaaatcccttgcccaggtgtg

SEQ ID NO: 17499 - DNA, 33 bp, Homo sapien
gaagttctcagaattagatgaggtccttagcgt

SEQ ID NO: 17500 - DNA, 33 bp, Homo sapien
gaagttctcagaattatatgaggtccttagcgt

SEQ ID NO: 17501 - DNA, 33 bp, Homo sapien
cacctgcagagcctctaaactagtaggagattg

SEQ ID NO: 17502 - DNA, 33 bp, Homo sapien
cacctgcagagcctctgaactagtaggagattg

SEQ ID NO: 17503 - DNA, 33 bp, Homo sapien
actcatggttcctcaaactgtacaagaagcatg

SEQ ID NO: 17504 - DNA, 33 bp, Homo sapien
actcatggttcctcaagctgtacaagaagcatg

SEQ ID NO: 17505 - DNA, 33 bp, Homo sapien
aactccttaaatgcaacggtgaataaagttttt

SEQ ID NO: 17506 - DNA, 33 bp, Homo sapien
aactccttaaatgcaatggtgaataaagttttt

SEQ ID NO: 17507 - DNA, 33 bp, Homo sapien
acacactctcaagaaccagggtgaaatacaaga

SEQ ID NO: 17508 - DNA, 33 bp, Homo sapien
acacactctcaagaactagggtgaaatacaaga

SEQ ID NO: 17509 - DNA, 33 bp, Homo sapien
cttttgaggtatttcaaactcaaactcatcttt

SEQ ID NO: 17510 - DNA, 33 bp, Homo sapien
cttttgaggtatttcacactcaaactcatcttt

SEQ ID NO: 17511 - DNA, 33 bp, Homo sapien
cactggcattgacgccacaacagaagtatgtac

SEQ ID NO: 17512 - DNA, 33 bp, Homo sapien
cactggcattgacgccgcaacagaagtatgtac

SEQ ID NO: 17513 - DNA, 33 bp, Homo sapien
gcatgagtgagtaaacagataacgagcgagagg

SEQ ID NO: 17514 - DNA, 33 bp, Homo sapien
gcatgagtgagtaaacggataacgagcgagagg

SEQ ID NO: 17515 - DNA, 33 bp, Homo sapien
agtgaccttagacaaaatttgtatctcacttcc

SEQ ID NO: 17516 - DNA, 33 bp, Homo sapien
agtgaccttagacaaagtttgtatctcacttcc

SEQ ID NO: 17517 - DNA, 33 bp, Homo sapien
aactcataaccttaacactttgattccttctca

SEQ ID NO: 17518 - DNA, 33 bp, Homo sapien
aactcataaccttaacgctttgattccttctca

SEQ ID NO: 17519 - DNA, 33 bp, Homo sapien
agggatggcctataatcaacaaaaggttgagaa

SEQ ID NO: 17520 - DNA, 33 bp, Homo sapien
agggatggcctataatgaacaaaaggttgagaa

SEQ ID NO: 17521 - DNA, 33 bp, Homo sapien
gcagtcctcacagtagcaagtgagttccatgag

SEQ ID NO: 17522 - DNA, 33 bp, Homo sapien
gcagtcctcacagtaggaagtgagttccatgag

SEQ ID NO: 17523 - DNA, 33 bp, Homo sapien
cctcgcacttcataaacgccctggagtgagaag

SEQ ID NO: 17524 - DNA, 33 bp, Homo sapien
cctcgcacttcataaatgccctggagtgagaag

SEQ ID NO: 17525 - DNA, 33 bp, Homo sapien
tagataaccttcactcacatgaatctctgctct

SEQ ID NO: 17526 - DNA, 33 bp, Homo sapien
tagataaccttcactcgcatgaatctctgctct

SEQ ID NO: 17527 - DNA, 33 bp, Homo sapien
ttctgcttttatatcacgtcactatcttttaaa

SEQ ID NO: 17528 - DNA, 33 bp, Homo sapien
ttctgcttttatatcatgtcactatcttttaaa

SEQ ID NO: 17529 - DNA, 33 bp, Homo sapien
tatggttgtttattaacgttctcaaagcactat

SEQ ID NO: 17530 - DNA, 33 bp, Homo sapien
tatggttgtttattaatgttctcaaagcactat

SEQ ID NO: 17531 - DNA, 33 bp, Homo sapien
gaaactcagctcaggaagtgttgctctgaagca

SEQ ID NO: 17532 - DNA, 33 bp, Homo sapien
gaaactcagctcaggatgtgttgctctgaagca

SEQ ID NO: 17533 - DNA, 33 bp, Homo sapien
tcagtattatttcttacgacatttgtgtgtttc

SEQ ID NO: 17534 - DNA, 33 bp, Homo sapien
tcagtattatttcttaggacatttgtgtgtttc

SEQ ID NO: 17535 - DNA, 33 bp, Homo sapien
aggcaggcactgtcacaagaacttttcagttac

SEQ ID NO: 17536 - DNA, 33 bp, Homo sapien
aggcaggcactgtcacgagaacttttcagttac

SEQ ID NO: 17537 - DNA, 33 bp, Homo sapien
ctctgtaatgtcccagaaaacagagcaaaaatg

SEQ ID NO: 17538 - DNA, 33 bp, Homo sapien
ctctgtaatgtcccagcaaacagagcaaaaatg

SEQ ID NO: 17539 - DNA, 33 bp, Homo sapien
ccttatttaatcctaccaagagacgtttaggtt

SEQ ID NO: 17540 - DNA, 33 bp, Homo sapien
ccttatttaatcctactaagagacgtttaggtt

SEQ ID NO: 17541 - DNA, 33 bp, Homo sapien
gggtctcaaaaccaggcatgttttgcacatcag

SEQ ID NO: 17542 - DNA, 33 bp, Homo sapien
gggtctcaaaaccaggtatgttttgcacatcag

SEQ ID NO: 17543 - DNA, 33 bp, Homo sapien
tccccttgtgtctaaacatgatgggacagtcag

SEQ ID NO: 17544 - DNA, 33 bp, Homo sapien
tccccttgtgtctaaatatgatgggacagtcag

SEQ ID NO: 17545 - DNA, 33 bp, Homo sapien
taagcacccatgaatccattgctccagacaaaa

SEQ ID NO: 17546 - DNA, 33 bp, Homo sapien
taagcacccatgaatctattgctccagacaaaa

SEQ ID NO: 17547 - DNA, 33 bp, Homo sapien
acctctgagcaacaaagtcagcctttctgaggg

SEQ ID NO: 17548 - DNA, 33 bp, Homo sapien
acctctgagcaacaaattcagcctttctgaggg

SEQ ID NO: 17549 - DNA, 33 bp, Homo sapien
gcccaggcctggagcacgggcctgttcctcgtg

SEQ ID NO: 17550 - DNA, 33 bp, Homo sapien
gcccaggcctggagcatgggcctgttcctcgtg

SEQ ID NO: 17551 - DNA, 33 bp, Homo sapien
ctgtttccagaacataccccacctcttccagcc

SEQ ID NO: 17552 - DNA, 33 bp, Homo sapien
ctgtttccagaacatatcccacctcttccagcc

SEQ ID NO: 17553 - DNA, 33 bp, Homo sapien
ggggaagaaatgactacaaacaaaggactaaat

SEQ ID NO: 17554 - DNA, 33 bp, Homo sapien
ggggaagaaatgactagaaacaaaggactaaat

SEQ ID NO: 17555 - DNA, 33 bp, Homo sapien
aaaataatgctagcaacaacagccactgcagta

SEQ ID NO: 17556 - DNA, 33 bp, Homo sapien
aaaataatgctagcaataacagccactgcagta

SEQ ID NO: 17557 - DNA, 33 bp, Homo sapien
cttaaaaccccaaatcaccagctgttcggctca

SEQ ID NO: 17558 - DNA, 33 bp, Homo sapien
cttaaaaccccaaatcgccagctgttcggctca

SEQ ID NO: 17559 - DNA, 33 bp, Homo sapien
cttttctcagtgacacagtcctctcttgcaagt

SEQ ID NO: 17560 - DNA, 33 bp, Homo sapien
cttttctcagtgacacggtcctctcttgcaagt

SEQ ID NO: 17561 - DNA, 33 bp, Homo sapien
cctggcaatgcagacaaattagggtattaggtg

SEQ ID NO: 17562 - DNA, 33 bp, Homo sapien
cctggcaatgcagacagattagggtattaggtg

SEQ ID NO: 17563 - DNA, 33 bp, Homo sapien
agttagctgagtgaataagcgagtgaggaaatg

SEQ ID NO: 17564 - DNA, 33 bp, Homo sapien
agttagctgagtgaatgagcgagtgaggaaatg

SEQ ID NO: 17565 - DNA, 33 bp, Homo sapien
gggtgtctggctatgaacagttagctgagtgaa

SEQ ID NO: 17566 - DNA, 33 bp, Homo sapien
gggtgtctggctatgagcagttagctgagtgaa

SEQ ID NO: 17567 - DNA, 33 bp, Homo sapien
aaaaaatcaagtacctaaacagtaagtatagta

SEQ ID NO: 17568 - DNA, 33 bp, Homo sapien
aaaaaatcaagtacctgaacagtaagtatagta

SEQ ID NO: 17569 - DNA, 33 bp, Homo sapien
tctgcagcgactcacgcaagggcacacgtagca

SEQ ID NO: 17570 - DNA, 33 bp, Homo sapien
tctgcagcgactcacggaagggcacacgtagca

SEQ ID NO: 17571 - DNA, 33 bp, Homo sapien
agggcagagcgggctacaggtgagactgaagac

SEQ ID NO: 17572 - DNA, 33 bp, Homo sapien
agggcagagcgggctataggtgagactgaagac

SEQ ID NO: 17573 - DNA, 33 bp, Homo sapien
gcctcccgagggtgtgaagagattcatatgctc

SEQ ID NO: 17574 - DNA, 33 bp, Homo sapien
gcctcccgagggtgtggagagattcatatgctc

SEQ ID NO: 17575 - DNA, 33 bp, Homo sapien
ccagaccatctcttctcacaaagatgctacaga

SEQ ID NO: 17576 - DNA, 33 bp, Homo sapien
ccagaccatctcttcttacaaagatgctacaga

SEQ ID NO: 17577 - DNA, 33 bp, Homo sapien
tcatcacctccattgacaaatgaggaaatcgag

SEQ ID NO: 17578 - DNA, 33 bp, Homo sapien
tcatcacctccattgagaaatgaggaaatcgag

SEQ ID NO: 17579 - DNA, 33 bp, Homo sapien
gatgaaatgattaagaagcagtgccctaaggtt

SEQ ID NO: 17580 - DNA, 33 bp, Homo sapien
gatgaaatgattaagaggcagtgccctaaggtt

SEQ ID NO: 17581 - DNA, 33 bp, Homo sapien
tttagagcagaaaaaccattgtgtgtggtccta

SEQ ID NO: 17582 - DNA, 33 bp, Homo sapien
tttagagcagaaaaactattgtgtgtggtccta

SEQ ID NO: 17583 - DNA, 33 bp, Homo sapien
tctctctcagatcaagccatttctggagctgac

SEQ ID NO: 17584 - DNA, 33 bp, Homo sapien
tctctctcagatcaagtcatttctggagctgac

SEQ ID NO: 17585 - DNA, 33 bp, Homo sapien
tgccctatctttccaacgcagacactgggactg

SEQ ID NO: 17586 - DNA, 33 bp, Homo sapien
tgccctatctttccaatgcagacactgggactg

SEQ ID NO: 17587 - DNA, 33 bp, Homo sapien
aagggcaggtaagcaactggacacggttatcat

SEQ ID NO: 17588 - DNA, 33 bp, Homo sapien
aagggcaggtaagcaattggacacggttatcat

SEQ ID NO: 17589 - DNA, 33 bp, Homo sapien
cctgatgaataagggaacaggtaaggcctggga

SEQ ID NO: 17590 - DNA, 33 bp, Homo sapien
cctgatgaataagggatcaggtaaggcctggga

SEQ ID NO: 17591 - DNA, 33 bp, Homo sapien
gaaaagcatcccaatgcaagccaagatctgtgg

SEQ ID NO: 17592 - DNA, 33 bp, Homo sapien
gaaaagcatcccaatgtaagccaagatctgtgg

SEQ ID NO: 17593 - DNA, 33 bp, Homo sapien
acctgggtgttcctcaaaatgccagcctcagcc

SEQ ID NO: 17594 - DNA, 33 bp, Homo sapien
acctgggtgttcctcagaatgccagcctcagcc

SEQ ID NO: 17595 - DNA, 33 bp, Homo sapien
aattgtatgacacttcaccccaagcagcctggc

SEQ ID NO: 17596 - DNA, 33 bp, Homo sapien
aattgtatgacacttcgccccaagcagcctggc

SEQ ID NO: 17597 - DNA, 33 bp, Homo sapien
gtgcagagagagacggaagggcctacctgtcac

SEQ ID NO: 17598 - DNA, 33 bp, Homo sapien
gtgcagagagagacggcagggcctacctgtcac

SEQ ID NO: 17599 - DNA, 33 bp, Homo sapien
agacagtggtggtgaacggcgataagagctccc

SEQ ID NO: 17600 - DNA, 33 bp, Homo sapien
agacagtggtggtgaatggcgataagagctccc

SEQ ID NO: 17601 - DNA, 33 bp, Homo sapien
ttactaatatcaaaggaagccagaaggaatcta

SEQ ID NO: 17602 - DNA, 33 bp, Homo sapien
ttactaatatcaaagggagccagaaggaatcta

SEQ ID NO: 17603 - DNA, 33 bp, Homo sapien
tcttcctcttctgaaacgattgattctctgtga

SEQ ID NO: 17604 - DNA, 33 bp, Homo sapien
tcttcctcttctgaaatgattgattctctgtga

SEQ ID NO: 17605 - DNA, 33 bp, Homo sapien
cctcacgttaaccacacggtgctcatgaggcaa

SEQ ID NO: 17606 - DNA, 33 bp, Homo sapien
cctcacgttaaccacatggtgctcatgaggcaa

SEQ ID NO: 17607 - DNA, 33 bp, Homo sapien
agtgacttcacaagacccagatggaggaggtcc

SEQ ID NO: 17608 - DNA, 33 bp, Homo sapien
agtgacttcacaagactcagatggaggaggtcc

SEQ ID NO: 17609 - DNA, 33 bp, Homo sapien
atttgacagtgatttcacaccctcagctccacc

SEQ ID NO: 17610 - DNA, 33 bp, Homo sapien
atttgacagtgatttcgcaccctcagctccacc

SEQ ID NO: 17611 - DNA, 33 bp, Homo sapien
ggcccggattgaagaaaggacttgtcctagtca

SEQ ID NO: 17612 - DNA, 33 bp, Homo sapien
ggcccggattgaagaagggacttgtcctagtca

SEQ ID NO: 17613 - DNA, 33 bp, Homo sapien
ctactatatgccagacactgtgacttaggggag

SEQ ID NO: 17614 - DNA, 33 bp, Homo sapien
ctactatatgccagacgctgtgacttaggggag

SEQ ID NO: 17615 - DNA, 33 bp, Homo sapien
tcttactgctagcaaaatcacacatatttattg

SEQ ID NO: 17616 - DNA, 33 bp, Homo sapien
tcttactgctagcaaattcacacatatttattg

SEQ ID NO: 17617 - DNA, 33 bp, Homo sapien
tattacttaaaccaaaagcatccttattaatat

SEQ ID NO: 17618 - DNA, 33 bp, Homo sapien
tattacttaaaccaaaggcatccttattaatat

SEQ ID NO: 17619 - DNA, 33 bp, Homo sapien
ttctgcttgaggttcacaggaattcttaaatat

SEQ ID NO: 17620 - DNA, 33 bp, Homo sapien
ttctgcttgaggttcataggaattcttaaatat

SEQ ID NO: 17621 - DNA, 33 bp, Homo sapien
tcatcactggaacaccgcatttttggtgcctgg

SEQ ID NO: 17622 - DNA, 33 bp, Homo sapien
tcatcactggaacacctcatttttggtgcctgg

SEQ ID NO: 17623 - DNA, 33 bp, Homo sapien
aacaagaagttagaaaataaagagagacaggac

SEQ ID NO: 17624 - DNA, 33 bp, Homo sapien
aacaagaagttagaaagtaaagagagacaggac

SEQ ID NO: 17625 - DNA, 33 bp, Homo sapien
cactggaaagcagggcacaaccagactcgacag

SEQ ID NO: 17626 - DNA, 33 bp, Homo sapien
cactggaaagcagggcgcaaccagactcgacag

SEQ ID NO: 17627 - DNA, 33 bp, Homo sapien
atagagcttttaacacccctaatcccaaagcca

SEQ ID NO: 17628 - DNA, 33 bp, Homo sapien
atagagcttttaacactcctaatcccaaagcca

SEQ ID NO: 17629 - DNA, 33 bp, Homo sapien
aacacacagatgtcacaagtagcgtggccgagg

SEQ ID NO: 17630 - DNA, 33 bp, Homo sapien
aacacacagatgtcacgagtagcgtggccgagg

SEQ ID NO: 17631 - DNA, 33 bp, Homo sapien
ggaagccttcctagaaacagcggccccactaaa

SEQ ID NO: 17632 - DNA, 33 bp, Homo sapien
ggaagccttcctagaagcagcggccccactaaa

SEQ ID NO: 17633 - DNA, 33 bp, Homo sapien
tgagtacagtgtttgggactagtcaacaagatg

SEQ ID NO: 17634 - DNA, 33 bp, Homo sapien
tgagtacagtgtttggtactagtcaacaagatg

SEQ ID NO: 17635 - DNA, 33 bp, Homo sapien
cactcatcacctagcaagtctaagctcagtctc

SEQ ID NO: 17636 - DNA, 33 bp, Homo sapien
cactcatcacctagcaggtctaagctcagtctc

SEQ ID NO: 17637 - DNA, 33 bp, Homo sapien
cttgtcatcaggatcaccttcctgcaagaggcc

SEQ ID NO: 17638 - DNA, 33 bp, Homo sapien
cttgtcatcaggatcatcttcctgcaagaggcc

SEQ ID NO: 17639 - DNA, 33 bp, Homo sapien
agacactccacatccaacatacaagggtcctgc

SEQ ID NO: 17640 - DNA, 33 bp, Homo sapien
agacactccacatccagcatacaagggtcctgc

SEQ ID NO: 17641 - DNA, 33 bp, Homo sapien
agacaggcgttcattaccaccaacagaacaaac

SEQ ID NO: 17642 - DNA, 33 bp, Homo sapien
agacaggcgttcattagcaccaacagaacaaac

SEQ ID NO: 17643 - DNA, 33 bp, Homo sapien
tggagagaagcggcccaagtgtaaatcaggttt

SEQ ID NO: 17644 - DNA, 33 bp, Homo sapien
tggagagaagcggcccgagtgtaaatcaggttt

SEQ ID NO: 17645 - DNA, 33 bp, Homo sapien
tctcagtggaaaaccagcttgctagagtaggag

SEQ ID NO: 17646 - DNA, 33 bp, Homo sapien
tctcagtggaaaaccatcttgctagagtaggag

SEQ ID NO: 17647 - DNA, 33 bp, Homo sapien
tgaacgaagcaaaggaaaaagaaaaagtggctg

SEQ ID NO: 17648 - DNA, 33 bp, Homo sapien
tgaacgaagcaaaggagaaagaaaaagtggctg

SEQ ID NO: 17649 - DNA, 33 bp, Homo sapien
gcggagggggaaactcagagagcgcagtgtctg

SEQ ID NO: 17650 - DNA, 33 bp, Homo sapien
gcggagggggaaactcggagagcgcagtgtctg

SEQ ID NO: 17651 - DNA, 33 bp, Homo sapien
ggcattcctacatctgaaggtacaggttagcca

SEQ ID NO: 17652 - DNA, 33 bp, Homo sapien
ggcattcctacatctggaggtacaggttagcca

SEQ ID NO: 17653 - DNA, 33 bp, Homo sapien
tttaagtaaggtgtcaagtgagaaaggaacacc

SEQ ID NO: 17654 - DNA, 33 bp, Homo sapien
tttaagtaaggtgtcaggtgagaaaggaacacc

SEQ ID NO: 17655 - DNA, 33 bp, Homo sapien
attatcatcatcattcaaaacaggctttctgaa

SEQ ID NO: 17656 - DNA, 33 bp, Homo sapien
attatcatcatcattcgaaacaggctttctgaa

SEQ ID NO: 17657 - DNA, 33 bp, Homo sapien
tggctccaggcgcctcaagggaaccgggaaaga

SEQ ID NO: 17658 - DNA, 33 bp, Homo sapien
tggctccaggcgcctcgagggaaccgggaaaga

SEQ ID NO: 17659 - DNA, 33 bp, Homo sapien
aggtggcagagaatccaactcagaaaatgaggg

SEQ ID NO: 17660 - DNA, 33 bp, Homo sapien
aggtggcagagaatccgactcagaaaatgaggg

SEQ ID NO: 17661 - DNA, 33 bp, Homo sapien
atttgtactgctacaacaaaacacctaacactg

SEQ ID NO: 17662 - DNA, 33 bp, Homo sapien
atttgtactgctacaataaaacacctaacactg

SEQ ID NO: 17663 - DNA, 33 bp, Homo sapien
tgtcagacaagcagtaaatacttaaagtgggac

SEQ ID NO: 17664 - DNA, 33 bp, Homo sapien
tgtcagacaagcagtagatacttaaagtgggac

SEQ ID NO: 17665 - DNA, 33 bp, Homo sapien
aagatgacatgctaagaagttagagggcttaga

SEQ ID NO: 17666 - DNA, 33 bp, Homo sapien
aagatgacatgctaaggagttagagggcttaga

SEQ ID NO: 17667 - DNA, 33 bp, Homo sapien
ggcaaagaaagggctcaacactgtcaggaagtt

SEQ ID NO: 17668 - DNA, 33 bp, Homo sapien
ggcaaagaaagggctcgacactgtcaggaagtt

SEQ ID NO: 17669 - DNA, 33 bp, Homo sapien
acctgaaggacgtaacaataacaataaacatag

SEQ ID NO: 17670 - DNA, 33 bp, Homo sapien
acctgaaggacgtaacgataacaataaacatag

SEQ ID NO: 17671 - DNA, 33 bp, Homo sapien
tggtaagctagttagacgtcctactgagacatt

SEQ ID NO: 17672 - DNA, 33 bp, Homo sapien
tggtaagctagttagaggtcctactgagacatt

SEQ ID NO: 17673 - DNA, 33 bp, Homo sapien
ccatttaagaccatgaagctgttatctgtgact

SEQ ID NO: 17674 - DNA, 33 bp, Homo sapien
ccatttaagaccatgaggctgttatctgtgact

SEQ ID NO: 17675 - DNA, 33 bp, Homo sapien
cattcaaggcccagcacaatttaagtccaatct

SEQ ID NO: 17676 - DNA, 33 bp, Homo sapien
cattcaaggcccagcagaatttaagtccaatct

SEQ ID NO: 17677 - DNA, 33 bp, Homo sapien
tcgaagcctgagaagcactgctttaggcaaaga

SEQ ID NO: 17678 - DNA, 33 bp, Homo sapien
tcgaagcctgagaagcgctgctttaggcaaaga

SEQ ID NO: 17679 - DNA, 33 bp, Homo sapien
gcccagcatctgaacacacttcttctacgggga

SEQ ID NO: 17680 - DNA, 33 bp, Homo sapien
gcccagcatctgaacatacttcttctacgggga

SEQ ID NO: 17681 - DNA, 33 bp, Homo sapien
cccctttctccacagaagatttggtttttttca

SEQ ID NO: 17682 - DNA, 33 bp, Homo sapien
cccctttctccacagaggatttggtttttttca

SEQ ID NO: 17683 - DNA, 33 bp, Homo sapien
gtattcacataaactacctctgagaggccagac

SEQ ID NO: 17684 - DNA, 33 bp, Homo sapien
gtattcacataaactatctctgagaggccagac

SEQ ID NO: 17685 - DNA, 33 bp, Homo sapien
gtagcatttgagtggccagacctggtgggtggc

SEQ ID NO: 17686 - DNA, 33 bp, Homo sapien
gtagcatttgagtggctagacctggtgggtggc

SEQ ID NO: 17687 - DNA, 33 bp, Homo sapien
ggtagctaccagctagccatgtgtctactgagc

SEQ ID NO: 17688 - DNA, 33 bp, Homo sapien
ggtagctaccagctagtcatgtgtctactgagc

SEQ ID NO: 17689 - DNA, 33 bp, Homo sapien
tcttaaagaatcagtacggtcaatctggtggaa

SEQ ID NO: 17690 - DNA, 33 bp, Homo sapien
tcttaaagaatcagtagggtcaatctggtggaa

SEQ ID NO: 17691 - DNA, 33 bp, Homo sapien
tgttcccagtgactcaagatcctcaggaatctg

SEQ ID NO: 17692 - DNA, 33 bp, Homo sapien
tgttcccagtgactcaggatcctcaggaatctg

SEQ ID NO: 17693 - DNA, 33 bp, Homo sapien
agtttgaagtatttcaatctcctcagctgacaa

SEQ ID NO: 17694 - DNA, 33 bp, Homo sapien
agtttgaagtatttcagtctcctcagctgacaa

SEQ ID NO: 17695 - DNA, 33 bp, Homo sapien
ttacctactttgtgcaagaatctcttctaggtt

SEQ ID NO: 17696 - DNA, 33 bp, Homo sapien
ttacctactttgtgcaggaatctcttctaggtt

SEQ ID NO: 17697 - DNA, 33 bp, Homo sapien
ttttttctcacataaaagaagatccagaaatag

SEQ ID NO: 17698 - DNA, 33 bp, Homo sapien
ttttttctcacataaaggaagatccagaaatag

SEQ ID NO: 17699 - DNA, 33 bp, Homo sapien
cattttaaatcacctacgggtcaaaggagaaat

SEQ ID NO: 17700 - DNA, 33 bp, Homo sapien
cattttaaatcacctatgggtcaaaggagaaat

SEQ ID NO: 17701 - DNA, 33 bp, Homo sapien
ttttacttttcagtatcaataacatcagccatt

SEQ ID NO: 17702 - DNA, 33 bp, Homo sapien
ttttacttttcagtatgaataacatcagccatt

SEQ ID NO: 17703 - DNA, 33 bp, Homo sapien
cttgcaaaactgggatcaaaattagcctttcac

SEQ ID NO: 17704 - DNA, 33 bp, Homo sapien
cttgcaaaactgggatgaaaattagcctttcac

SEQ ID NO: 17705 - DNA, 33 bp, Homo sapien
aatatttcttacatgaagttatcaggtcaagtc

SEQ ID NO: 17706 - DNA, 33 bp, Homo sapien
aatatttcttacatgaggttatcaggtcaagtc

SEQ ID NO: 17707 - DNA, 33 bp, Homo sapien
catgacatctaatacacagcaggagttcaatga

SEQ ID NO: 17708 - DNA, 33 bp, Homo sapien
catgacatctaatacagagcaggagttcaatga

SEQ ID NO: 17709 - DNA, 33 bp, Homo sapien
gatcatagtcacaaaaatagcccaaataaacaa

SEQ ID NO: 17710 - DNA, 33 bp, Homo sapien
gatcatagtcacaaaattagcccaaataaacaa

SEQ ID NO: 17711 - DNA, 33 bp, Homo sapien
tttaacaccacagatacgcagtagagtgcacat

SEQ ID NO: 17712 - DNA, 33 bp, Homo sapien
tttaacaccacagatatgcagtagagtgcacat

SEQ ID NO: 17713 - DNA, 33 bp, Homo sapien
ccacaaaatccagtagcatctcttgtagcaatt

SEQ ID NO: 17714 - DNA, 33 bp, Homo sapien
ccacaaaatccagtagtatctcttgtagcaatt

SEQ ID NO: 17715 - DNA, 33 bp, Homo sapien
ttataatgtcttcaacaacttgtagcttactgc

SEQ ID NO: 17716 - DNA, 33 bp, Homo sapien
ttataatgtcttcaacgacttgtagcttactgc

SEQ ID NO: 17717 - DNA, 33 bp, Homo sapien
gcaaatgagctagggaagcaactatgggtagga

SEQ ID NO: 17718 - DNA, 33 bp, Homo sapien
gcaaatgagctagggaggcaactatgggtagga

SEQ ID NO: 17719 - DNA, 33 bp, Homo sapien
caatgctggctgtgtccaaaatccttacttaaa

SEQ ID NO: 17720 - DNA, 33 bp, Homo sapien
caatgctggctgtgtctaaaatccttacttaaa

SEQ ID NO: 17721 - DNA, 33 bp, Homo sapien
tttggtggggattaaccgggagcttgaaaattt

SEQ ID NO: 17722 - DNA, 33 bp, Homo sapien
tttggtggggattaactgggagcttgaaaattt

SEQ ID NO: 17723 - DNA, 33 bp, Homo sapien
tcgcgcccggcctgacaaaacatttcctagttt

SEQ ID NO: 17724 - DNA, 33 bp, Homo sapien
tcgcgcccggcctgacgaaacatttcctagttt

SEQ ID NO: 17725 - DNA, 33 bp, Homo sapien
cgaaagtggtagactacgacattttacaatagt

SEQ ID NO: 17726 - DNA, 33 bp, Homo sapien
cgaaagtggtagactatgacattttacaatagt

SEQ ID NO: 17727 - DNA, 33 bp, Homo sapien
ctgtgtggtgccataaaacatgggcaggtgtat

SEQ ID NO: 17728 - DNA, 33 bp, Homo sapien
ctgtgtggtgccataagacatgggcaggtgtat

SEQ ID NO: 17729 - DNA, 33 bp, Homo sapien
gtgcctagatccggaccggacatagactaggtg

SEQ ID NO: 17730 - DNA, 33 bp, Homo sapien
gtgcctagatccggactggacatagactaggtg

SEQ ID NO: 17731 - DNA, 33 bp, Homo sapien
ttgagctgaggggcaccggctgaaccagacagc

SEQ ID NO: 17732 - DNA, 33 bp, Homo sapien
ttgagctgaggggcactggctgaaccagacagc

SEQ ID NO: 17733 - DNA, 33 bp, Homo sapien
actcagaagagcgggacgggttggactgtggag

SEQ ID NO: 17734 - DNA, 33 bp, Homo sapien
actcagaagagcgggatgggttggactgtggag

SEQ ID NO: 17735 - DNA, 33 bp, Homo sapien
cccacagctggtacccgggccaaagctgaagtc

SEQ ID NO: 17736 - DNA, 33 bp, Homo sapien
cccacagctggtaccctggccaaagctgaagtc

SEQ ID NO: 17737 - DNA, 33 bp, Homo sapien
atatgttgattttaaacatggactctagggagc

SEQ ID NO: 17738 - DNA, 33 bp, Homo sapien
atatgttgattttaaatatggactctagggagc

SEQ ID NO: 17739 - DNA, 33 bp, Homo sapien
ccagcagtggaagtctaaaacaggattgggccg

SEQ ID NO: 17740 - DNA, 33 bp, Homo sapien
ccagcagtggaagtctgaaacaggattgggccg

SEQ ID NO: 17741 - DNA, 33 bp, Homo sapien
taaaaattcttcaaataactttacaacttgaga

SEQ ID NO: 17742 - DNA, 33 bp, Homo sapien
taaaaattcttcaaatgactttacaacttgaga

SEQ ID NO: 17743 - DNA, 33 bp, Homo sapien
agagtaagtcaaatcacctttgtttgcaagatg

SEQ ID NO: 17744 - DNA, 33 bp, Homo sapien
agagtaagtcaaatcatctttgtttgcaagatg

SEQ ID NO: 17745 - DNA, 33 bp, Homo sapien
cagaacaaaacatcgaataactggcatggtgtg

SEQ ID NO: 17746 - DNA, 33 bp, Homo sapien
cagaacaaaacatcgagtaactggcatggtgtg

SEQ ID NO: 17747 - DNA, 33 bp, Homo sapien
actatgatttctcacccatgtgacaaggaggcc

SEQ ID NO: 17748 - DNA, 33 bp, Homo sapien
actatgatttctcacctatgtgacaaggaggcc

SEQ ID NO: 17749 - DNA, 33 bp, Homo sapien
ggtatgtggacacttaaacaggccatgtcacag

SEQ ID NO: 17750 - DNA, 33 bp, Homo sapien
ggtatgtggacacttacacaggccatgtcacag

SEQ ID NO: 17751 - DNA, 33 bp, Homo sapien
catcacaaactgagaccctacacacagctttct

SEQ ID NO: 17752 - DNA, 33 bp, Homo sapien
catcacaaactgagactctacacacagctttct

SEQ ID NO: 17753 - DNA, 33 bp, Homo sapien
ttgtacagaacccttccctttttgaaagactat

SEQ ID NO: 17754 - DNA, 33 bp, Homo sapien
ttgtacagaacccttctctttttgaaagactat

SEQ ID NO: 17755 - DNA, 33 bp, Homo sapien
aacttggaaatccttaaaagttgggaatgcctg

SEQ ID NO: 17756 - DNA, 33 bp, Homo sapien
aacttggaaatccttacaagttgggaatgcctg

SEQ ID NO: 17757 - DNA, 33 bp, Homo sapien
cctcaattctaggtgaccaacgggagggcttct

SEQ ID NO: 17758 - DNA, 33 bp, Homo sapien
cctcaattctaggtgatcaacgggagggcttct

SEQ ID NO: 17759 - DNA, 33 bp, Homo sapien
aagccagctatactgacaccagtggcaagagca

SEQ ID NO: 17760 - DNA, 33 bp, Homo sapien
aagccagctatactgataccagtggcaagagca

SEQ ID NO: 17761 - DNA, 33 bp, Homo sapien
tcagtgagcacatcaaatacccagattgtgatc

SEQ ID NO: 17762 - DNA, 33 bp, Homo sapien
tcagtgagcacatcaagtacccagattgtgatc

SEQ ID NO: 17763 - DNA, 33 bp, Homo sapien
agtctcttttaaccttcaactgctttctctccc

SEQ ID NO: 17764 - DNA, 33 bp, Homo sapien
agtctcttttaaccttgaactgctttctctccc

SEQ ID NO: 17765 - DNA, 33 bp, Homo sapien
tactccaatgaaaatacagaacatttccgtgac

SEQ ID NO: 17766 - DNA, 33 bp, Homo sapien
tactccaatgaaaatatagaacatttccgtgac

SEQ ID NO: 17767 - DNA, 33 bp, Homo sapien
gatatgaggctgtccaaaatttccaattgatct

SEQ ID NO: 17768 - DNA, 33 bp, Homo sapien
gatatgaggctgtccagaatttccaattgatct

SEQ ID NO: 17769 - DNA, 33 bp, Homo sapien
cccactgatcctaacacaccatcttgctgtgga

SEQ ID NO: 17770 - DNA, 33 bp, Homo sapien
cccactgatcctaacagaccatcttgctgtgga

SEQ ID NO: 17771 - DNA, 33 bp, Homo sapien
ctgtgaagccacgggaaacctcggagcctagag

SEQ ID NO: 17772 - DNA, 33 bp, Homo sapien
ctgtgaagccacgggagacctcggagcctagag

SEQ ID NO: 17773 - DNA, 33 bp, Homo sapien
acaagaagccagtgagaaaagaccacatattgt

SEQ ID NO: 17774 - DNA, 33 bp, Homo sapien
acaagaagccagtgaggaaagaccacatattgt

SEQ ID NO: 17775 - DNA, 33 bp, Homo sapien
ttctttagtatgtccacagagttgtgcaaccat

SEQ ID NO: 17776 - DNA, 33 bp, Homo sapien
ttctttagtatgtccatagagttgtgcaaccat

SEQ ID NO: 17777 - DNA, 33 bp, Homo sapien
acaagccacagactagaagaaatagtgtaaatc

SEQ ID NO: 17778 - DNA, 33 bp, Homo sapien
acaagccacagactaggagaaatagtgtaaatc

SEQ ID NO: 17779 - DNA, 33 bp, Homo sapien
cacctggtactgaatacgtccaatgagatctga

SEQ ID NO: 17780 - DNA, 33 bp, Homo sapien
cacctggtactgaatatgtccaatgagatctga

SEQ ID NO: 17781 - DNA, 33 bp, Homo sapien
gaacaaagtcacagaaatgtgatcgtacagctc

SEQ ID NO: 17782 - DNA, 33 bp, Homo sapien
gaacaaagtcacagaagtgtgatcgtacagctc

SEQ ID NO: 17783 - DNA, 33 bp, Homo sapien
ggaactggaacccaaacacagcctatggcaccc

SEQ ID NO: 17784 - DNA, 33 bp, Homo sapien
ggaactggaacccaaatacagcctatggcaccc

SEQ ID NO: 17785 - DNA, 33 bp, Homo sapien
cttgtccagaatcatacagcaaagtcagcgctg

SEQ ID NO: 17786 - DNA, 33 bp, Homo sapien
cttgtccagaatcatagagcaaagtcagcgctg

SEQ ID NO: 17787 - DNA, 33 bp, Homo sapien
tggtcaatcctcctcccgataaccctcagacag

SEQ ID NO: 17788 - DNA, 33 bp, Homo sapien
tggtcaatcctcctcctgataaccctcagacag

SEQ ID NO: 17789 - DNA, 33 bp, Homo sapien
tgcccatgctatcagcactttccatttcaggac

SEQ ID NO: 17790 - DNA, 33 bp, Homo sapien
tgcccatgctatcagcgctttccatttcaggac

SEQ ID NO: 17791 - DNA, 33 bp, Homo sapien
aactgagcttccaagccccttctcctaaagtaa

SEQ ID NO: 17792 - DNA, 33 bp, Homo sapien
aactgagcttccaagcgccttctcctaaagtaa

SEQ ID NO: 17793 - DNA, 33 bp, Homo sapien
agatccatcagatccacgtccaacccatcaacc

SEQ ID NO: 17794 - DNA, 33 bp, Homo sapien
agatccatcagatccatgtccaacccatcaacc

SEQ ID NO: 17795 - DNA, 33 bp, Homo sapien
gcatggccagatttgacgctagaagagctggat

SEQ ID NO: 17796 - DNA, 33 bp, Homo sapien
gcatggccagatttgatgctagaagagctggat

SEQ ID NO: 17797 - DNA, 33 bp, Homo sapien
taaagcattatacaaaagcaattattcaactga

SEQ ID NO: 17798 - DNA, 33 bp, Homo sapien
taaagcattatacaaaggcaattattcaactga

SEQ ID NO: 17799 - DNA, 33 bp, Homo sapien
gaatcaggcctttgacccagtatttaatagcat

SEQ ID NO: 17800 - DNA, 33 bp, Homo sapien
gaatcaggcctttgactcagtatttaatagcat

SEQ ID NO: 17801 - DNA, 33 bp, Homo sapien
gaagaagtcaggaggccccgcttcgcgctaacg

SEQ ID NO: 17802 - DNA, 33 bp, Homo sapien
gaagaagtcaggaggcgccgcttcgcgctaacg

SEQ ID NO: 17803 - DNA, 33 bp, Homo sapien
gtgcgcctcccgcctacggagaactacatgccc

SEQ ID NO: 17804 - DNA, 33 bp, Homo sapien
gtgcgcctcccgcctatggagaactacatgccc

SEQ ID NO: 17805 - DNA, 33 bp, Homo sapien
aaacttgttatacataaggtacatgatgaatca

SEQ ID NO: 17806 - DNA, 33 bp, Homo sapien
aaacttgttatacatacggtacatgatgaatca

SEQ ID NO: 17807 - DNA, 33 bp, Homo sapien
tgagaagatggggaaaagaatgaataacaccac

SEQ ID NO: 17808 - DNA, 33 bp, Homo sapien
tgagaagatggggaaaggaatgaataacaccac

SEQ ID NO: 17809 - DNA, 33 bp, Homo sapien
ctagccatacacctcacgcttctgtgctttcac

SEQ ID NO: 17810 - DNA, 33 bp, Homo sapien
ctagccatacacctcatgcttctgtgctttcac

SEQ ID NO: 17811 - DNA, 33 bp, Homo sapien
atcatcaaagccccaaccaccaggtagtgaact

SEQ ID NO: 17812 - DNA, 33 bp, Homo sapien
atcatcaaagccccaatcaccaggtagtgaact

SEQ ID NO: 17813 - DNA, 33 bp, Homo sapien
gtcctatgaagaaaaaaaacactgatgtgtcag

SEQ ID NO: 17814 - DNA, 33 bp, Homo sapien
gtcctatgaagaaaaacaacactgatgtgtcag

SEQ ID NO: 17815 - DNA, 33 bp, Homo sapien
tcttggcagttaataaatactccataaatgtta

SEQ ID NO: 17816 - DNA, 33 bp, Homo sapien
tcttggcagttaataagtactccataaatgtta

SEQ ID NO: 17817 - DNA, 33 bp, Homo sapien
agacaaggggttaagaagtcattgcacatttgg

SEQ ID NO: 17818 - DNA, 33 bp, Homo sapien
agacaaggggttaagaggtcattgcacatttgg

SEQ ID NO: 17819 - DNA, 33 bp, Homo sapien
gggtaaaccggaacaacggattacgcctcgctt

SEQ ID NO: 17820 - DNA, 33 bp, Homo sapien
gggtaaaccggaacaatggattacgcctcgctt

SEQ ID NO: 17821 - DNA, 33 bp, Homo sapien
tgtggaagcatgtgcaagagggtatctctccac

SEQ ID NO: 17822 - DNA, 33 bp, Homo sapien
tgtggaagcatgtgcaggagggtatctctccac

SEQ ID NO: 17823 - DNA, 33 bp, Homo sapien
aaaggcccaggaagacaatgtcactggtatcct

SEQ ID NO: 17824 - DNA, 33 bp, Homo sapien
aaaggcccaggaagacgatgtcactggtatcct

SEQ ID NO: 17825 - DNA, 33 bp, Homo sapien
gacagcttaccttcacagtactccttttacaga

SEQ ID NO: 17826 - DNA, 33 bp, Homo sapien
gacagcttaccttcacggtactccttttacaga

SEQ ID NO: 17827 - DNA, 33 bp, Homo sapien
gtccgacttcaacatcagaggccgtggcttcaa

SEQ ID NO: 17828 - DNA, 33 bp, Homo sapien
gtccgacttcaacatcggaggccgtggcttcaa

SEQ ID NO: 17829 - DNA, 33 bp, Homo sapien
ttcccaagggaggaaactgggagccacaaggag

SEQ ID NO: 17830 - DNA, 33 bp, Homo sapien
ttcccaagggaggaaattgggagccacaaggag

SEQ ID NO: 17831 - DNA, 33 bp, Homo sapien
gaccaggctaacaaaccctgaacccactgatgt

SEQ ID NO: 17832 - DNA, 33 bp, Homo sapien
gaccaggctaacaaactctgaacccactgatgt

SEQ ID NO: 17833 - DNA, 33 bp, Homo sapien
aggcacaactgttgtactaaaagagtcaaggcc

SEQ ID NO: 17834 - DNA, 33 bp, Homo sapien
aggcacaactgttgtattaaaagagtcaaggcc

SEQ ID NO: 17835 - DNA, 33 bp, Homo sapien
aaatccctataagagaagacacattcgctaaac

SEQ ID NO: 17836 - DNA, 33 bp, Homo sapien
aaatccctataagagacgacacattcgctaaac

SEQ ID NO: 17837 - DNA, 33 bp, Homo sapien
atggtgagcttcccacagaggggcccattttga

SEQ ID NO: 17838 - DNA, 33 bp, Homo sapien
atggtgagcttcccacggaggggcccattttga

SEQ ID NO: 17839 - DNA, 33 bp, Homo sapien
atatcaccccctctggaaatcttgcccctcctt

SEQ ID NO: 17840 - DNA, 33 bp, Homo sapien
atatcaccccctctgggaatcttgcccctcctt

SEQ ID NO: 17841 - DNA, 33 bp, Homo sapien
aggaggtagcttttcccattttctggccactgg

SEQ ID NO: 17842 - DNA, 33 bp, Homo sapien
aggaggtagcttttcctattttctggccactgg

SEQ ID NO: 17843 - DNA, 33 bp, Homo sapien
aagggatgcaggaaacggaggctcaatacgata

SEQ ID NO: 17844 - DNA, 33 bp, Homo sapien
aagggatgcaggaaactgaggctcaatacgata

SEQ ID NO: 17845 - DNA, 33 bp, Homo sapien
tcaagaagtttctacaagggaagccagaaagca

SEQ ID NO: 17846 - DNA, 33 bp, Homo sapien
tcaagaagtttctacatgggaagccagaaagca

SEQ ID NO: 17847 - DNA, 33 bp, Homo sapien
cgagaatatggaatgcccgctcctttattgatc

SEQ ID NO: 17848 - DNA, 33 bp, Homo sapien
cgagaatatggaatgctcgctcctttattgatc

SEQ ID NO: 17849 - DNA, 33 bp, Homo sapien
caaaacagtggctccaaccctttgagcttcagt

SEQ ID NO: 17850 - DNA, 33 bp, Homo sapien
caaaacagtggctccagccctttgagcttcagt

SEQ ID NO: 17851 - DNA, 33 bp, Homo sapien
tatgaagagacacacacatagttctcgtgatac

SEQ ID NO: 17852 - DNA, 33 bp, Homo sapien
tatgaagagacacacatatagttctcgtgatac

SEQ ID NO: 17853 - DNA, 33 bp, Homo sapien
atgctgtctaccttgacactcattttcattttt

SEQ ID NO: 17854 - DNA, 33 bp, Homo sapien
atgctgtctaccttgatactcattttcattttt

SEQ ID NO: 17855 - DNA, 33 bp, Homo sapien
gctcatcagcatcttccaggagcaagtatgggc

SEQ ID NO: 17856 - DNA, 33 bp, Homo sapien
gctcatcagcatcttcgaggagcaagtatgggc

SEQ ID NO: 17857 - DNA, 33 bp, Homo sapien
cctcaccatgtttaccaacgtcacttctgtgtt

SEQ ID NO: 17858 - DNA, 33 bp, Homo sapien
cctcaccatgtttaccgacgtcacttctgtgtt

SEQ ID NO: 17859 - DNA, 33 bp, Homo sapien
aaagcatccccacaagaactctgcttacatact

SEQ ID NO: 17860 - DNA, 33 bp, Homo sapien
aaagcatccccacaaggactctgcttacatact

SEQ ID NO: 17861 - DNA, 33 bp, Homo sapien
attaggttgacccacacgaagctgatgtttctt

SEQ ID NO: 17862 - DNA, 33 bp, Homo sapien
attaggttgacccacatgaagctgatgtttctt

SEQ ID NO: 17863 - DNA, 33 bp, Homo sapien
ggcaagaggtaggacagggaggagcttatagac

SEQ ID NO: 17864 - DNA, 33 bp, Homo sapien
ggcaagaggtaggacatggaggagcttatagac

SEQ ID NO: 17865 - DNA, 33 bp, Homo sapien
ggcttaggtggaaggacagattaggcctgggag

SEQ ID NO: 17866 - DNA, 33 bp, Homo sapien
ggcttaggtggaaggatagattaggcctgggag

SEQ ID NO: 17867 - DNA, 33 bp, Homo sapien
catgcccaaaaattaacagaaggctgctggctg

SEQ ID NO: 17868 - DNA, 33 bp, Homo sapien
catgcccaaaaattaatagaaggctgctggctg

SEQ ID NO: 17869 - DNA, 33 bp, Homo sapien
tggggtaggtctgagaatatgccttttcaacaa

SEQ ID NO: 17870 - DNA, 33 bp, Homo sapien
tggggtaggtctgagagtatgccttttcaacaa

SEQ ID NO: 17871 - DNA, 33 bp, Homo sapien
ctgaaatttcagaacacggcattatttaatcct

SEQ ID NO: 17872 - DNA, 33 bp, Homo sapien
ctgaaatttcagaacatggcattatttaatcct

SEQ ID NO: 17873 - DNA, 33 bp, Homo sapien
ctgagtgtccatgttaaagagagagtcaagaca

SEQ ID NO: 17874 - DNA, 33 bp, Homo sapien
ctgagtgtccatgttagagagagagtcaagaca

SEQ ID NO: 17875 - DNA, 33 bp, Homo sapien
ggaaggactggcatgacgctcccttttctcctc

SEQ ID NO: 17876 - DNA, 33 bp, Homo sapien
ggaaggactggcatgatgctcccttttctcctc

SEQ ID NO: 17877 - DNA, 33 bp, Homo sapien
cctgtctgatccttccagcattcgtgcttccga

SEQ ID NO: 17878 - DNA, 33 bp, Homo sapien
cctgtctgatccttccggcattcgtgcttccga

SEQ ID NO: 17879 - DNA, 33 bp, Homo sapien
ccttctgcatcactgaaaaaacccaggactttc

SEQ ID NO: 17880 - DNA, 33 bp, Homo sapien
ccttctgcatcactgacaaaacccaggactttc

SEQ ID NO: 17881 - DNA, 33 bp, Homo sapien
ttagtgttaaaagccaaatggttggtcacacca

SEQ ID NO: 17882 - DNA, 33 bp, Homo sapien
ttagtgttaaaagccagatggttggtcacacca

SEQ ID NO: 17883 - DNA, 33 bp, Homo sapien
atgtagcactgggcccagacaaggttgatggtg

SEQ ID NO: 17884 - DNA, 33 bp, Homo sapien
atgtagcactgggcccggacaaggttgatggtg

SEQ ID NO: 17885 - DNA, 33 bp, Homo sapien
aggtgtgttgctttaactgagtgaatacaaaat

SEQ ID NO: 17886 - DNA, 33 bp, Homo sapien
aggtgtgttgctttaattgagtgaatacaaaat

SEQ ID NO: 17887 - DNA, 33 bp, Homo sapien
accactggtaggaagaacacctgacagaggaga

SEQ ID NO: 17888 - DNA, 33 bp, Homo sapien
accactggtaggaagagcacctgacagaggaga

SEQ ID NO: 17889 - DNA, 33 bp, Homo sapien
aggaatgaggactcaacggaaaggggatgtgtc

SEQ ID NO: 17890 - DNA, 33 bp, Homo sapien
aggaatgaggactcaatggaaaggggatgtgtc

SEQ ID NO: 17891 - DNA, 33 bp, Homo sapien
tcccagggaggaaatccaagaggccagcgtgtg

SEQ ID NO: 17892 - DNA, 33 bp, Homo sapien
tcccagggaggaaatcgaagaggccagcgtgtg

SEQ ID NO: 17893 - DNA, 33 bp, Homo sapien
aggctgcagacatattaaagatgggttgagagt

SEQ ID NO: 17894 - DNA, 33 bp, Homo sapien
aggctgcagacatattgaagatgggttgagagt

SEQ ID NO: 17895 - DNA, 33 bp, Homo sapien
gctttcttgagtccaaaaagtggataagcattg

SEQ ID NO: 17896 - DNA, 33 bp, Homo sapien
gctttcttgagtccaagaagtggataagcattg

SEQ ID NO: 17897 - DNA, 33 bp, Homo sapien
atagacagtctcaaacacgggaatggattgtgc

SEQ ID NO: 17898 - DNA, 33 bp, Homo sapien
atagacagtctcaaacccgggaatggattgtgc

SEQ ID NO: 17899 - DNA, 33 bp, Homo sapien
atcttaggacgtcagcacgtggtcctttacctg

SEQ ID NO: 17900 - DNA, 33 bp, Homo sapien
atcttaggacgtcagcgcgtggtcctttacctg

SEQ ID NO: 17901 - DNA, 33 bp, Homo sapien
tgaccttgtgcaagacacttaactgttcgtgtc

SEQ ID NO: 17902 - DNA, 33 bp, Homo sapien
tgaccttgtgcaagacccttaactgttcgtgtc

SEQ ID NO: 17903 - DNA, 33 bp, Homo sapien
tcaaggcagactgcaccgtgagaaatcatttgt

SEQ ID NO: 17904 - DNA, 33 bp, Homo sapien
tcaaggcagactgcactgtgagaaatcatttgt

SEQ ID NO: 17905 - DNA, 33 bp, Homo sapien
ggacctacccacaagaggtcaaaatcgagacaa

SEQ ID NO: 17906 - DNA, 33 bp, Homo sapien
ggacctacccacaagatgtcaaaatcgagacaa

SEQ ID NO: 17907 - DNA, 33 bp, Homo sapien
ccttggctgctgtagacggtcaaggagtcccca

SEQ ID NO: 17908 - DNA, 33 bp, Homo sapien
ccttggctgctgtagatggtcaaggagtcccca

SEQ ID NO: 17909 - DNA, 33 bp, Homo sapien
acctcgggcaaatgacagccccactcaagtcca

SEQ ID NO: 17910 - DNA, 33 bp, Homo sapien
acctcgggcaaatgacggccccactcaagtcca

SEQ ID NO: 17911 - DNA, 33 bp, Homo sapien
agcatcactcacgcaaacatactggagtgtctt

SEQ ID NO: 17912 - DNA, 33 bp, Homo sapien
agcatcactcacgcaagcatactggagtgtctt

SEQ ID NO: 17913 - DNA, 33 bp, Homo sapien
cgcttcctaatgctcaacaggaaagagagggaa

SEQ ID NO: 17914 - DNA, 33 bp, Homo sapien
cgcttcctaatgctcagcaggaaagagagggaa

SEQ ID NO: 17915 - DNA, 33 bp, Homo sapien
cccataataaagctcacgataaatgttatgatc

SEQ ID NO: 17916 - DNA, 33 bp, Homo sapien
cccataataaagctcatgataaatgttatgatc

SEQ ID NO: 17917 - DNA, 33 bp, Homo sapien
catagtagaattttacactcaatgccagaaaga

SEQ ID NO: 17918 - DNA, 33 bp, Homo sapien
catagtagaattttacgctcaatgccagaaaga

SEQ ID NO: 17919 - DNA, 33 bp, Homo sapien
atctgtgtaaaaattacgtgaggtcatgcggaa

SEQ ID NO: 17920 - DNA, 33 bp, Homo sapien
atctgtgtaaaaattatgtgaggtcatgcggaa

SEQ ID NO: 17921 - DNA, 33 bp, Homo sapien
atccttattgacactacgcaatatttgcccttc

SEQ ID NO: 17922 - DNA, 33 bp, Homo sapien
atccttattgacactatgcaatatttgcccttc

SEQ ID NO: 17923 - DNA, 33 bp, Homo sapien
acttactgggacttcaggtggctcactccccct

SEQ ID NO: 17924 - DNA, 33 bp, Homo sapien
acttactgggacttcatgtggctcactccccct

SEQ ID NO: 17925 - DNA, 33 bp, Homo sapien
gaaggacgatgacaacacctcccagtcagggac

SEQ ID NO: 17926 - DNA, 33 bp, Homo sapien
gaaggacgatgacaacgcctcccagtcagggac

SEQ ID NO: 17927 - DNA, 33 bp, Homo sapien
cctacactaaagaagcggcttcactctttccac

SEQ ID NO: 17928 - DNA, 33 bp, Homo sapien
cctacactaaagaagctgcttcactctttccac

SEQ ID NO: 17929 - DNA, 33 bp, Homo sapien
agagctggctatagaccctttattgaaatgtgc

SEQ ID NO: 17930 - DNA, 33 bp, Homo sapien
agagctggctatagactctttattgaaatgtgc

SEQ ID NO: 17931 - DNA, 33 bp, Homo sapien
actagggaatcttcagccaagtcgtctctctat

SEQ ID NO: 17932 - DNA, 33 bp, Homo sapien
actagggaatcttcaggcaagtcgtctctctat

SEQ ID NO: 17933 - DNA, 33 bp, Homo sapien
ttaactctgagcaactcagtcttgtgagaacat

SEQ ID NO: 17934 - DNA, 33 bp, Homo sapien
ttaactctgagcaacttagtcttgtgagaacat

SEQ ID NO: 17935 - DNA, 33 bp, Homo sapien
gttgagaagggttacacgaatccagccaatctg

SEQ ID NO: 17936 - DNA, 33 bp, Homo sapien
gttgagaagggttacaggaatccagccaatctg

SEQ ID NO: 17937 - DNA, 33 bp, Homo sapien
gcaagttcatgctctgcaagtcagttagctcac

SEQ ID NO: 17938 - DNA, 33 bp, Homo sapien
gcaagttcatgctctggaagtcagttagctcac

SEQ ID NO: 17939 - DNA, 33 bp, Homo sapien
tcttatagagtgttacagggattaaatgccatg

SEQ ID NO: 17940 - DNA, 33 bp, Homo sapien
tcttatagagtgttaccgggattaaatgccatg

SEQ ID NO: 17941 - DNA, 33 bp, Homo sapien
gcctttgagccaaagacactagagaatagcaat

SEQ ID NO: 17942 - DNA, 33 bp, Homo sapien
gcctttgagccaaagagactagagaatagcaat

SEQ ID NO: 17943 - DNA, 33 bp, Homo sapien
agcagagagacgagaacgtgggagccccaggag

SEQ ID NO: 17944 - DNA, 33 bp, Homo sapien
agcagagagacgagaatgtgggagccccaggag

SEQ ID NO: 17945 - DNA, 33 bp, Homo sapien
cagcccacagcaaaaccgggcagtcagcaactt

SEQ ID NO: 17946 - DNA, 33 bp, Homo sapien
cagcccacagcaaaactgggcagtcagcaactt

SEQ ID NO: 17947 - DNA, 33 bp, Homo sapien
tggtctcttagctcaagacattcaaaagaatca

SEQ ID NO: 17948 - DNA, 33 bp, Homo sapien
tggtctcttagctcaatacattcaaaagaatca

SEQ ID NO: 17949 - DNA, 33 bp, Homo sapien
gtgggtagtgcttaggacagtgatgggccatag

SEQ ID NO: 17950 - DNA, 33 bp, Homo sapien
gtgggtagtgcttaggtcagtgatgggccatag

SEQ ID NO: 17951 - DNA, 33 bp, Homo sapien
ctttcagcctgcgtgacggaggttctggctgag

SEQ ID NO: 17952 - DNA, 33 bp, Homo sapien
ctttcagcctgcgtgatggaggttctggctgag

SEQ ID NO: 17953 - DNA, 33 bp, Homo sapien
tctgaggcaggttctacggttacctgcattttt

SEQ ID NO: 17954 - DNA, 33 bp, Homo sapien
tctgaggcaggttctatggttacctgcattttt

SEQ ID NO: 17955 - DNA, 33 bp, Homo sapien
gcactgggctgtgcgtcaccgagtgccagctct

SEQ ID NO: 17956 - DNA, 33 bp, Homo sapien
gcactgggctgtgcgttaccgagtgccagctct

SEQ ID NO: 17957 - DNA, 33 bp, Homo sapien
ccagcaggtctgtggccaatattgtttgctttg

SEQ ID NO: 17958 - DNA, 33 bp, Homo sapien
ccagcaggtctgtggctaatattgtttgctttg

SEQ ID NO: 17959 - DNA, 33 bp, Homo sapien
aggatacccgaggccacagcatcagatggagta

SEQ ID NO: 17960 - DNA, 33 bp, Homo sapien
aggatacccgaggccatagcatcagatggagta

SEQ ID NO: 17961 - DNA, 33 bp, Homo sapien
agaaggtaaaaacccaatatgtgttcattttct

SEQ ID NO: 17962 - DNA, 33 bp, Homo sapien
agaaggtaaaaacccagtatgtgttcattttct

SEQ ID NO: 17963 - DNA, 33 bp, Homo sapien
ctgcttcgagaatgacagaattatattgcaccc

SEQ ID NO: 17964 - DNA, 33 bp, Homo sapien
ctgcttcgagaatgacggaattatattgcaccc

SEQ ID NO: 17965 - DNA, 33 bp, Homo sapien
tacaaagcagttccccacaagagaccctgtcct

SEQ ID NO: 17966 - DNA, 33 bp, Homo sapien
tacaaagcagttccccgcaagagaccctgtcct

SEQ ID NO: 17967 - DNA, 33 bp, Homo sapien
agggagtccacaccaacctactaaggagactaa

SEQ ID NO: 17968 - DNA, 33 bp, Homo sapien
agggagtccacaccaatctactaaggagactaa

SEQ ID NO: 17969 - DNA, 33 bp, Homo sapien
accagcctgttggacacacaccacgctgggaag

SEQ ID NO: 17970 - DNA, 33 bp, Homo sapien
accagcctgttggacatacaccacgctgggaag

SEQ ID NO: 17971 - DNA, 33 bp, Homo sapien
tctaaaggcttgaccacacccaaagatgcactt

SEQ ID NO: 17972 - DNA, 33 bp, Homo sapien
tctaaaggcttgaccagacccaaagatgcactt

SEQ ID NO: 17973 - DNA, 33 bp, Homo sapien
atctctctcccaaacaagctttcattctaatcc

SEQ ID NO: 17974 - DNA, 33 bp, Homo sapien
atctctctcccaaacaggctttcattctaatcc

SEQ ID NO: 17975 - DNA, 33 bp, Homo sapien
cattccacagggctgaaaagaaaaattgaatac

SEQ ID NO: 17976 - DNA, 33 bp, Homo sapien
cattccacagggctgagaagaaaaattgaatac

SEQ ID NO: 17977 - DNA, 33 bp, Homo sapien
gcttaaggcaagggagaatattggagcagggag

SEQ ID NO: 17978 - DNA, 33 bp, Homo sapien
gcttaaggcaagggaggatattggagcagggag

SEQ ID NO: 17979 - DNA, 33 bp, Homo sapien
aaagatctctacagtgaagaccagatgcgatgg

SEQ ID NO: 17980 - DNA, 33 bp, Homo sapien
aaagatctctacagtggagaccagatgcgatgg

SEQ ID NO: 17981 - DNA, 33 bp, Homo sapien
gcccccaagaacgagaactggcatacagtaggt

SEQ ID NO: 17982 - DNA, 33 bp, Homo sapien
gcccccaagaacgagacctggcatacagtaggt

SEQ ID NO: 17983 - DNA, 33 bp, Homo sapien
ttcgggttatctagccagacagtctgaagccct

SEQ ID NO: 17984 - DNA, 33 bp, Homo sapien
ttcgggttatctagccggacagtctgaagccct

SEQ ID NO: 17985 - DNA, 33 bp, Homo sapien
gcacacaaaatcacacagccaggaaagggcaga

SEQ ID NO: 17986 - DNA, 33 bp, Homo sapien
gcacacaaaatcacaccgccaggaaagggcaga

SEQ ID NO: 17987 - DNA, 33 bp, Homo sapien
attctcaagatgacccacagagggtaggtgtca

SEQ ID NO: 17988 - DNA, 33 bp, Homo sapien
attctcaagatgacccgcagagggtaggtgtca

SEQ ID NO: 17989 - DNA, 33 bp, Homo sapien
gcctccttccaaagagacaactcaacacaagaa

SEQ ID NO: 17990 - DNA, 33 bp, Homo sapien
gcctccttccaaagaggcaactcaacacaagaa

SEQ ID NO: 17991 - DNA, 33 bp, Homo sapien
accggcttgccctatagcccactttcttatagc

SEQ ID NO: 17992 - DNA, 33 bp, Homo sapien
accggcttgccctatatcccactttcttatagc

SEQ ID NO: 17993 - DNA, 33 bp, Homo sapien
gagatcaggctatacactctgctttctgctttc

SEQ ID NO: 17994 - DNA, 33 bp, Homo sapien
gagatcaggctatacagtctgctttctgctttc

SEQ ID NO: 17995 - DNA, 33 bp, Homo sapien
ggcaaaaatcaagtcaatctgctaatttaaatt

SEQ ID NO: 17996 - DNA, 33 bp, Homo sapien
ggcaaaaatcaagtcagtctgctaatttaaatt

SEQ ID NO: 17997 - DNA, 33 bp, Homo sapien
caaagtgacaaggggaacaaacacattggcctg

SEQ ID NO: 17998 - DNA, 33 bp, Homo sapien
caaagtgacaaggggagcaaacacattggcctg

SEQ ID NO: 17999 - DNA, 33 bp, Homo sapien
ggcttatcactttagggcataccttctccagaa

SEQ ID NO: 18000 - DNA, 33 bp, Homo sapien
ggcttatcactttaggtcataccttctccagaa

SEQ ID NO: 18001 - DNA, 33 bp, Homo sapien
tccacccatccaggtacgtagagcattttccca

SEQ ID NO: 18002 - DNA, 33 bp, Homo sapien
tccacccatccaggtatgtagagcattttccca

SEQ ID NO: 18003 - DNA, 33 bp, Homo sapien
cctcgcagttgctatccccaccactcccctcaa

SEQ ID NO: 18004 - DNA, 33 bp, Homo sapien
cctcgcagttgctatctccaccactcccctcaa

SEQ ID NO: 18005 - DNA, 33 bp, Homo sapien
gtatttccattctgacagggttctagagcttcc

SEQ ID NO: 18006 - DNA, 33 bp, Homo sapien
gtatttccattctgacggggttctagagcttcc

SEQ ID NO: 18007 - DNA, 33 bp, Homo sapien
cctgttggaccctatgccacgggagccaggacc

SEQ ID NO: 18008 - DNA, 33 bp, Homo sapien
cctgttggaccctatgtcacgggagccaggacc

SEQ ID NO: 18009 - DNA, 33 bp, Homo sapien
agcatcttgcccttaccaggcattcaatacatg

SEQ ID NO: 18010 - DNA, 33 bp, Homo sapien
agcatcttgcccttactaggcattcaatacatg

SEQ ID NO: 18011 - DNA, 33 bp, Homo sapien
aagtattccctgtatagctaagcatagcatgta

SEQ ID NO: 18012 - DNA, 33 bp, Homo sapien
aagtattccctgtatatctaagcatagcatgta

SEQ ID NO: 18013 - DNA, 33 bp, Homo sapien
ggctttccatgtggaactgcaccaaatccttac

SEQ ID NO: 18014 - DNA, 33 bp, Homo sapien
ggctttccatgtggaattgcaccaaatccttac

SEQ ID NO: 18015 - DNA, 33 bp, Homo sapien
cacagaggcatagtcgcccccagctgggttgtg

SEQ ID NO: 18016 - DNA, 33 bp, Homo sapien
cacagaggcatagtcgtccccagctgggttgtg

SEQ ID NO: 18017 - DNA, 33 bp, Homo sapien
tgatgtactaaaataaaataccacgctaggctc

SEQ ID NO: 18018 - DNA, 33 bp, Homo sapien
tgatgtactaaaataagataccacgctaggctc

SEQ ID NO: 18019 - DNA, 33 bp, Homo sapien
aaaagcaagactctacagctatctttctaaaga

SEQ ID NO: 18020 - DNA, 33 bp, Homo sapien
aaaagcaagactctacggctatctttctaaaga

SEQ ID NO: 18021 - DNA, 33 bp, Homo sapien
caggagttagggtggaataggaaaaagatcaag

SEQ ID NO: 18022 - DNA, 33 bp, Homo sapien
caggagttagggtggagtaggaaaaagatcaag

SEQ ID NO: 18023 - DNA, 33 bp, Homo sapien
attgaagtttaggtgaatagtcttggggaagtt

SEQ ID NO: 18024 - DNA, 33 bp, Homo sapien
attgaagtttaggtgagtagtcttggggaagtt

SEQ ID NO: 18025 - DNA, 33 bp, Homo sapien
cctctaccaaacagacactgtgcattaggagga

SEQ ID NO: 18026 - DNA, 33 bp, Homo sapien
cctctaccaaacagacgctgtgcattaggagga

SEQ ID NO: 18027 - DNA, 33 bp, Homo sapien
tgctgatggtaagtgaacatttcttgcttccaa

SEQ ID NO: 18028 - DNA, 33 bp, Homo sapien
tgctgatggtaagtgagcatttcttgcttccaa

SEQ ID NO: 18029 - DNA, 33 bp, Homo sapien
tgtgtgtgtgtagtgcagagcttgttaacagac

SEQ ID NO: 18030 - DNA, 33 bp, Homo sapien
tgtgtgtgtgtagtgcggagcttgttaacagac

SEQ ID NO: 18031 - DNA, 33 bp, Homo sapien
caagattggggtgctccaaaccagagacaaact

SEQ ID NO: 18032 - DNA, 33 bp, Homo sapien
caagattggggtgctctaaaccagagacaaact

SEQ ID NO: 18033 - DNA, 33 bp, Homo sapien
cagaccttctctggaacggtgccttataaatgg

SEQ ID NO: 18034 - DNA, 33 bp, Homo sapien
cagaccttctctggaatggtgccttataaatgg

SEQ ID NO: 18035 - DNA, 33 bp, Homo sapien
cctccaagctgaacctcaatgtagctccagatt

SEQ ID NO: 18036 - DNA, 33 bp, Homo sapien
cctccaagctgaacctgaatgtagctccagatt

SEQ ID NO: 18037 - DNA, 33 bp, Homo sapien
cagtgaatgttcttagcattcttgtcaaaaata

SEQ ID NO: 18038 - DNA, 33 bp, Homo sapien
cagtgaatgttcttagtattcttgtcaaaaata

SEQ ID NO: 18039 - DNA, 33 bp, Homo sapien
gctgtgttcactacaactggtgtatctacttct

SEQ ID NO: 18040 - DNA, 33 bp, Homo sapien
gctgtgttcactacaattggtgtatctacttct

SEQ ID NO: 18041 - DNA, 33 bp, Homo sapien
cagcgattggtccaggaatgaaaacttactggg

SEQ ID NO: 18042 - DNA, 33 bp, Homo sapien
cagcgattggtccagggatgaaaacttactggg

SEQ ID NO: 18043 - DNA, 33 bp, Homo sapien
cccggagatgatgaaaataagattggctctttc

SEQ ID NO: 18044 - DNA, 33 bp, Homo sapien
cccggagatgatgaaagtaagattggctctttc

SEQ ID NO: 18045 - DNA, 33 bp, Homo sapien
gggagactcatccttcacattggggatcctgat

SEQ ID NO: 18046 - DNA, 33 bp, Homo sapien
gggagactcatccttcgcattggggatcctgat

SEQ ID NO: 18047 - DNA, 33 bp, Homo sapien
agaaagggccaccaaggcagagtgttcacatag

SEQ ID NO: 18048 - DNA, 33 bp, Homo sapien
agaaagggccaccaagtcagagtgttcacatag

SEQ ID NO: 18049 - DNA, 33 bp, Homo sapien
ccatataatgttgagcagaagaagacagacatc

SEQ ID NO: 18050 - DNA, 33 bp, Homo sapien
ccatataatgttgagcggaagaagacagacatc

SEQ ID NO: 18051 - DNA, 33 bp, Homo sapien
atctcctcttctcagcacccttgatggttttgc

SEQ ID NO: 18052 - DNA, 33 bp, Homo sapien
atctcctcttctcagcccccttgatggttttgc

SEQ ID NO: 18053 - DNA, 33 bp, Homo sapien
cttgcaacagcccaaacggcgcccgtgctgctt

SEQ ID NO: 18054 - DNA, 33 bp, Homo sapien
cttgcaacagcccaaatggcgcccgtgctgctt

SEQ ID NO: 18055 - DNA, 33 bp, Homo sapien
ctattggttcccagaaatgtgtgaagaccctgt

SEQ ID NO: 18056 - DNA, 33 bp, Homo sapien
ctattggttcccagaagtgtgtgaagaccctgt

SEQ ID NO: 18057 - DNA, 33 bp, Homo sapien
ggaaaggattgtgcaaatgaatctccccatttc

SEQ ID NO: 18058 - DNA, 33 bp, Homo sapien
ggaaaggattgtgcaattgaatctccccatttc

SEQ ID NO: 18059 - DNA, 33 bp, Homo sapien
gaataagcttttctaccgagcagatccaattcc

SEQ ID NO: 18060 - DNA, 33 bp, Homo sapien
gaataagcttttctactgagcagatccaattcc

SEQ ID NO: 18061 - DNA, 33 bp, Homo sapien
tctgatggcgctctcgacataaatagggggacc

SEQ ID NO: 18062 - DNA, 33 bp, Homo sapien
tctgatggcgctctcgtcataaatagggggacc

SEQ ID NO: 18063 - DNA, 33 bp, Homo sapien
ttagaaatgtctataacaggcaatctacagaac

SEQ ID NO: 18064 - DNA, 33 bp, Homo sapien
ttagaaatgtctataagaggcaatctacagaac

SEQ ID NO: 18065 - DNA, 33 bp, Homo sapien
atatggttgtacttgtcaagagccttagaaatg

SEQ ID NO: 18066 - DNA, 33 bp, Homo sapien
atatggttgtacttgttaagagccttagaaatg

SEQ ID NO: 18067 - DNA, 33 bp, Homo sapien
tcatggaatgtacttaaacaaactgagatggta

SEQ ID NO: 18068 - DNA, 33 bp, Homo sapien
tcatggaatgtacttacacaaactgagatggta

SEQ ID NO: 18069 - DNA, 33 bp, Homo sapien
agattcagttcaataaacatttacaaagtacat

SEQ ID NO: 18070 - DNA, 33 bp, Homo sapien
agattcagttcaataaccatttacaaagtacat

SEQ ID NO: 18071 - DNA, 33 bp, Homo sapien
ggcttgagggcaggtaaccatgtctagttctct

SEQ ID NO: 18072 - DNA, 33 bp, Homo sapien
ggcttgagggcaggtagccatgtctagttctct

SEQ ID NO: 18073 - DNA, 33 bp, Homo sapien
tcctagcctgggttaaagacagaaacacacaca

SEQ ID NO: 18074 - DNA, 33 bp, Homo sapien
tcctagcctgggttaaggacagaaacacacaca

SEQ ID NO: 18075 - DNA, 33 bp, Homo sapien
aaagaccgtacaaactcagatccttggtacccc

SEQ ID NO: 18076 - DNA, 33 bp, Homo sapien
aaagaccgtacaaactgagatccttggtacccc

SEQ ID NO: 18077 - DNA, 33 bp, Homo sapien
gcagagccagagttcaaaccggtatctgttgga

SEQ ID NO: 18078 - DNA, 33 bp, Homo sapien
gcagagccagagttcagaccggtatctgttgga

SEQ ID NO: 18079 - DNA, 33 bp, Homo sapien
gcagtatttttgcccacatttacagatgatcaa

SEQ ID NO: 18080 - DNA, 33 bp, Homo sapien
gcagtatttttgcccagatttacagatgatcaa

SEQ ID NO: 18081 - DNA, 33 bp, Homo sapien
tcaacagatttctgcaaagctcctttatggata

SEQ ID NO: 18082 - DNA, 33 bp, Homo sapien
tcaacagatttctgcagagctcctttatggata

SEQ ID NO: 18083 - DNA, 33 bp, Homo sapien
caggtcttgagataacaaagttaacggcagaac

SEQ ID NO: 18084 - DNA, 33 bp, Homo sapien
caggtcttgagataacgaagttaacggcagaac

SEQ ID NO: 18085 - DNA, 33 bp, Homo sapien
ccttagtctgcactcagagacacttcccttaca

SEQ ID NO: 18086 - DNA, 33 bp, Homo sapien
ccttagtctgcactcatagacacttcccttaca

SEQ ID NO: 18087 - DNA, 33 bp, Homo sapien
ccccagtaagtgaatccaggattatgtctcttc

SEQ ID NO: 18088 - DNA, 33 bp, Homo sapien
ccccagtaagtgaatctaggattatgtctcttc

SEQ ID NO: 18089 - DNA, 33 bp, Homo sapien
atgggcacctgtttcacgaacttacacagcttt

SEQ ID NO: 18090 - DNA, 33 bp, Homo sapien
atgggcacctgtttcatgaacttacacagcttt

SEQ ID NO: 18091 - DNA, 33 bp, Homo sapien
agggagtgtgtgctgtaaagagggaagaggccc

SEQ ID NO: 18092 - DNA, 33 bp, Homo sapien
agggagtgtgtgctgtgaagagggaagaggccc

SEQ ID NO: 18093 - DNA, 33 bp, Homo sapien
cccaaacttactaaatcagaagctctggagatg

SEQ ID NO: 18094 - DNA, 33 bp, Homo sapien
cccaaacttactaaatgagaagctctggagatg

SEQ ID NO: 18095 - DNA, 33 bp, Homo sapien
agggttctctccttacaatggatgaggggagca

SEQ ID NO: 18096 - DNA, 33 bp, Homo sapien
agggttctctccttacgatggatgaggggagca

SEQ ID NO: 18097 - DNA, 33 bp, Homo sapien
gggatcaggaaggtgggactctgtttttatgag

SEQ ID NO: 18098 - DNA, 33 bp, Homo sapien
gggatcaggaaggtggtactctgtttttatgag

SEQ ID NO: 18099 - DNA, 33 bp, Homo sapien
cagatatttaccaagcactggtcaagtgccaag

SEQ ID NO: 18100 - DNA, 33 bp, Homo sapien
cagatatttaccaagcgctggtcaagtgccaag

SEQ ID NO: 18101 - DNA, 33 bp, Homo sapien
ccggatctggtgagaaatctatcatgtcaacag

SEQ ID NO: 18102 - DNA, 33 bp, Homo sapien
ccggatctggtgagaactctatcatgtcaacag

SEQ ID NO: 18103 - DNA, 33 bp, Homo sapien
ctgtcacccaactggaatatggtggtgccacca

SEQ ID NO: 18104 - DNA, 33 bp, Homo sapien
ctgtcacccaactggagtatggtggtgccacca

SEQ ID NO: 18105 - DNA, 33 bp, Homo sapien
atcaagtgcaaaagctcagagaagagcgagcaa

SEQ ID NO: 18106 - DNA, 33 bp, Homo sapien
atcaagtgcaaaagctgagagaagagcgagcaa

SEQ ID NO: 18107 - DNA, 33 bp, Homo sapien
tggacgctggaccagaaagggaatggccctctc

SEQ ID NO: 18108 - DNA, 33 bp, Homo sapien
tggacgctggaccagatagggaatggccctctc

SEQ ID NO: 18109 - DNA, 33 bp, Homo sapien
gattttagcatcatccagcccaaccacctcttt

SEQ ID NO: 18110 - DNA, 33 bp, Homo sapien
gattttagcatcatccggcccaaccacctcttt

SEQ ID NO: 18111 - DNA, 33 bp, Homo sapien
atttaatttttattcaaacctcacagacacacc

SEQ ID NO: 18112 - DNA, 33 bp, Homo sapien
atttaatttttattcagacctcacagacacacc

SEQ ID NO: 18113 - DNA, 33 bp, Homo sapien
atatgggactcataagcacattggagagctccc

SEQ ID NO: 18114 - DNA, 33 bp, Homo sapien
atatgggactcataaggacattggagagctccc

SEQ ID NO: 18115 - DNA, 33 bp, Homo sapien
ctggcagagcgtctgcactgcaccactgagctg

SEQ ID NO: 18116 - DNA, 33 bp, Homo sapien
ctggcagagcgtctgcgctgcaccactgagctg

SEQ ID NO: 18117 - DNA, 33 bp, Homo sapien
acagctgctaagtgggaaagctgggatgcagac

SEQ ID NO: 18118 - DNA, 33 bp, Homo sapien
acagctgctaagtgggcaagctgggatgcagac

SEQ ID NO: 18119 - DNA, 33 bp, Homo sapien
gctttggggactcaaacaggaatgattaattgg

SEQ ID NO: 18120 - DNA, 33 bp, Homo sapien
gctttggggactcaaagaggaatgattaattgg

SEQ ID NO: 18121 - DNA, 33 bp, Homo sapien
ttaccaagggttttcaacagatcatttcatttg

SEQ ID NO: 18122 - DNA, 33 bp, Homo sapien
ttaccaagggttttcaccagatcatttcatttg

SEQ ID NO: 18123 - DNA, 33 bp, Homo sapien
acataatatggaggaccaagcaccacactgttg

SEQ ID NO: 18124 - DNA, 33 bp, Homo sapien
acataatatggaggactaagcaccacactgttg

SEQ ID NO: 18125 - DNA, 33 bp, Homo sapien
tactcatgatttcagccatgcctggtgccatcc

SEQ ID NO: 18126 - DNA, 33 bp, Homo sapien
tactcatgatttcagctatgcctggtgccatcc

SEQ ID NO: 18127 - DNA, 33 bp, Homo sapien
catttactgagtgccaacaacgtgcaaggaagt

SEQ ID NO: 18128 - DNA, 33 bp, Homo sapien
catttactgagtgccagcaacgtgcaaggaagt

SEQ ID NO: 18129 - DNA, 33 bp, Homo sapien
tggttctcaaaagctggataagagttgggcttg

SEQ ID NO: 18130 - DNA, 33 bp, Homo sapien
tggttctcaaaagctgtataagagttgggcttg

SEQ ID NO: 18131 - DNA, 33 bp, Homo sapien
tccaatcctattttgcaattgtactagacaaag

SEQ ID NO: 18132 - DNA, 33 bp, Homo sapien
tccaatcctattttgcgattgtactagacaaag

SEQ ID NO: 18133 - DNA, 33 bp, Homo sapien
ttgcttcctttccttcactcatgctcttccctc

SEQ ID NO: 18134 - DNA, 33 bp, Homo sapien
ttgcttcctttccttcgctcatgctcttccctc

SEQ ID NO: 18135 - DNA, 33 bp, Homo sapien
atgtttcataaccacccaattccagttcagttt

SEQ ID NO: 18136 - DNA, 33 bp, Homo sapien
atgtttcataaccaccgaattccagttcagttt

SEQ ID NO: 18137 - DNA, 33 bp, Homo sapien
ttttaccttgagttcacaacatccctgggcaca

SEQ ID NO: 18138 - DNA, 33 bp, Homo sapien
ttttaccttgagttcataacatccctgggcaca

SEQ ID NO: 18139 - DNA, 33 bp, Homo sapien
aggaaagccaatgatacagttccagtttgagtc

SEQ ID NO: 18140 - DNA, 33 bp, Homo sapien
aggaaagccaatgatatagttccagtttgagtc

SEQ ID NO: 18141 - DNA, 33 bp, Homo sapien
ctatgtgtccaaagaacggaggaatgcatttta

SEQ ID NO: 18142 - DNA, 33 bp, Homo sapien
ctatgtgtccaaagaatggaggaatgcatttta

SEQ ID NO: 18143 - DNA, 33 bp, Homo sapien
gttctgacattgggcaagtatcttaagcagaat

SEQ ID NO: 18144 - DNA, 33 bp, Homo sapien
gttctgacattgggcaggtatcttaagcagaat

SEQ ID NO: 18145 - DNA, 33 bp, Homo sapien
accggttcctggaaaaacgtcactttcttcaac

SEQ ID NO: 18146 - DNA, 33 bp, Homo sapien
accggttcctggaaaaccgtcactttcttcaac

SEQ ID NO: 18147 - DNA, 33 bp, Homo sapien
aactagccacttcctactaatgttcctgcggcc

SEQ ID NO: 18148 - DNA, 33 bp, Homo sapien
aactagccacttcctagtaatgttcctgcggcc

SEQ ID NO: 18149 - DNA, 33 bp, Homo sapien
tggatactgagagacaactgtatttatttcctc

SEQ ID NO: 18150 - DNA, 33 bp, Homo sapien
tggatactgagagacatctgtatttatttcctc

SEQ ID NO: 18151 - DNA, 33 bp, Homo sapien
tgccagggtcaggatacgggaaccggctcagtc

SEQ ID NO: 18152 - DNA, 33 bp, Homo sapien
tgccagggtcaggataggggaaccggctcagtc

SEQ ID NO: 18153 - DNA, 33 bp, Homo sapien
ctgccaggacagatccaaggttatttaaagtgt

SEQ ID NO: 18154 - DNA, 33 bp, Homo sapien
ctgccaggacagatccgaggttatttaaagtgt

SEQ ID NO: 18155 - DNA, 33 bp, Homo sapien
aagggcgaggttgaacactagctaaccgagagc

SEQ ID NO: 18156 - DNA, 33 bp, Homo sapien
aagggcgaggttgaaccctagctaaccgagagc

SEQ ID NO: 18157 - DNA, 33 bp, Homo sapien
ggatgactttgaatagaatgcggaagcaggttt

SEQ ID NO: 18158 - DNA, 33 bp, Homo sapien
ggatgactttgaataggatgcggaagcaggttt

SEQ ID NO: 18159 - DNA, 33 bp, Homo sapien
acaaaccaaaagcataactcattttctgttttg

SEQ ID NO: 18160 - DNA, 33 bp, Homo sapien
acaaaccaaaagcatatctcattttctgttttg

SEQ ID NO: 18161 - DNA, 33 bp, Homo sapien
atctgtagctatgtcaagtctttcgttcttgat

SEQ ID NO: 18162 - DNA, 33 bp, Homo sapien
atctgtagctatgtcaggtctttcgttcttgat

SEQ ID NO: 18163 - DNA, 33 bp, Homo sapien
tgtttgcactggacttaaaaaataaatagcctg

SEQ ID NO: 18164 - DNA, 33 bp, Homo sapien
tgtttgcactggacttcaaaaataaatagcctg

SEQ ID NO: 18165 - DNA, 33 bp, Homo sapien
gacctgtactgtcttacacaacagctatgagct

SEQ ID NO: 18166 - DNA, 33 bp, Homo sapien
gacctgtactgtcttatacaacagctatgagct

SEQ ID NO: 18167 - DNA, 33 bp, Homo sapien
acccagtcaagttgacactaaaattaatcatca

SEQ ID NO: 18168 - DNA, 33 bp, Homo sapien
acccagtcaagttgacgctaaaattaatcatca

SEQ ID NO: 18169 - DNA, 33 bp, Homo sapien
tacattttggactgaactaactaccacttacta

SEQ ID NO: 18170 - DNA, 33 bp, Homo sapien
tacattttggactgaattaactaccacttacta

SEQ ID NO: 18171 - DNA, 33 bp, Homo sapien
cctgacttactcaccactgcatccctagcacct

SEQ ID NO: 18172 - DNA, 33 bp, Homo sapien
cctgacttactcaccattgcatccctagcacct

SEQ ID NO: 18173 - DNA, 33 bp, Homo sapien
ttctcactaacgccaaaatctgcctctactaac

SEQ ID NO: 18174 - DNA, 33 bp, Homo sapien
ttctcactaacgccaacatctgcctctactaac

SEQ ID NO: 18175 - DNA, 33 bp, Homo sapien
actatgactgttcaaccctatcatcttcataac

SEQ ID NO: 18176 - DNA, 33 bp, Homo sapien
actatgactgttcaactctatcatcttcataac

SEQ ID NO: 18177 - DNA, 33 bp, Homo sapien
aaggctactgtgggtacaggagcaaggaagtgg

SEQ ID NO: 18178 - DNA, 33 bp, Homo sapien
aaggctactgtgggtataggagcaaggaagtgg

SEQ ID NO: 18179 - DNA, 33 bp, Homo sapien
atgtaaagttttcagacagcaatgggcaagaag

SEQ ID NO: 18180 - DNA, 33 bp, Homo sapien
atgtaaagttttcagagagcaatgggcaagaag

SEQ ID NO: 18181 - DNA, 33 bp, Homo sapien
aagaagggagaggagcagaattacacgaaactc

SEQ ID NO: 18182 - DNA, 33 bp, Homo sapien
aagaagggagaggagcggaattacacgaaactc

SEQ ID NO: 18183 - DNA, 33 bp, Homo sapien
gcagctgtgtcatgtacgaattggaacagaata

SEQ ID NO: 18184 - DNA, 33 bp, Homo sapien
gcagctgtgtcatgtatgaattggaacagaata

SEQ ID NO: 18185 - DNA, 33 bp, Homo sapien
tccttactatgccaacaatacctatatataggc

SEQ ID NO: 18186 - DNA, 33 bp, Homo sapien
tccttactatgccaaccatacctatatataggc

SEQ ID NO: 18187 - DNA, 33 bp, Homo sapien
ctgtcaggactctagcaagttagatcatatacc

SEQ ID NO: 18188 - DNA, 33 bp, Homo sapien
ctgtcaggactctagcgagttagatcatatacc

SEQ ID NO: 18189 - DNA, 33 bp, Homo sapien
ttctttgttttctgcccatctaaataagacccc

SEQ ID NO: 18190 - DNA, 33 bp, Homo sapien
ttctttgttttctgcctatctaaataagacccc

SEQ ID NO: 18191 - DNA, 33 bp, Homo sapien
gggcaaggtgaatccaatggacggttgcaaaat

SEQ ID NO: 18192 - DNA, 33 bp, Homo sapien
gggcaaggtgaatccactggacggttgcaaaat

SEQ ID NO: 18193 - DNA, 33 bp, Homo sapien
tctttaaaaactctgacgccgaaatgctcaggg

SEQ ID NO: 18194 - DNA, 33 bp, Homo sapien
tctttaaaaactctgatgccgaaatgctcaggg

SEQ ID NO: 18195 - DNA, 33 bp, Homo sapien
tctctggcttagcagaatcgaggaaaagccagg

SEQ ID NO: 18196 - DNA, 33 bp, Homo sapien
tctctggcttagcagagtcgaggaaaagccagg

SEQ ID NO: 18197 - DNA, 33 bp, Homo sapien
ggatccttccatctaacggccttgccacctttg

SEQ ID NO: 18198 - DNA, 33 bp, Homo sapien
ggatccttccatctaatggccttgccacctttg

SEQ ID NO: 18199 - DNA, 33 bp, Homo sapien
gattacacccaggtaccgagagaaagctcatag

SEQ ID NO: 18200 - DNA, 33 bp, Homo sapien
gattacacccaggtactgagagaaagctcatag

SEQ ID NO: 18201 - DNA, 33 bp, Homo sapien
cccaggccttacctagcagtaaaggaggcgagt

SEQ ID NO: 18202 - DNA, 33 bp, Homo sapien
cccaggccttacctagtagtaaaggaggcgagt

SEQ ID NO: 18203 - DNA, 33 bp, Homo sapien
tgtagtggattaacaacgaaactgcttctttaa

SEQ ID NO: 18204 - DNA, 33 bp, Homo sapien
tgtagtggattaacaatgaaactgcttctttaa

SEQ ID NO: 18205 - DNA, 33 bp, Homo sapien
gcacacaagtcgaccaatcaggcaggtattcaa

SEQ ID NO: 18206 - DNA, 33 bp, Homo sapien
gcacacaagtcgaccagtcaggcaggtattcaa

SEQ ID NO: 18207 - DNA, 33 bp, Homo sapien
tattttgttatgctaactggcacttgtagtcag

SEQ ID NO: 18208 - DNA, 33 bp, Homo sapien
tattttgttatgctaattggcacttgtagtcag

SEQ ID NO: 18209 - DNA, 33 bp, Homo sapien
aaaatctcaatgtgccaaaattggatgggtggg

SEQ ID NO: 18210 - DNA, 33 bp, Homo sapien
aaaatctcaatgtgccgaaattggatgggtggg

SEQ ID NO: 18211 - DNA, 33 bp, Homo sapien
catctaggatgtcaacaggcagagaaagggcag

SEQ ID NO: 18212 - DNA, 33 bp, Homo sapien
catctaggatgtcaacgggcagagaaagggcag

SEQ ID NO: 18213 - DNA, 33 bp, Homo sapien
ggtccatccatcctagccctgagcacactgaca

SEQ ID NO: 18214 - DNA, 33 bp, Homo sapien
ggtccatccatcctaggcctgagcacactgaca

SEQ ID NO: 18215 - DNA, 33 bp, Homo sapien
agagtgagcccaaaaaagtgaaggacctggtcc

SEQ ID NO: 18216 - DNA, 33 bp, Homo sapien
agagtgagcccaaaaaggtgaaggacctggtcc

SEQ ID NO: 18217 - DNA, 33 bp, Homo sapien
actgcaggtaatttacaaatggaatttctctat

SEQ ID NO: 18218 - DNA, 33 bp, Homo sapien
actgcaggtaatttacgaatggaatttctctat

SEQ ID NO: 18219 - DNA, 33 bp, Homo sapien
gggtggattttcacccaaccagcattgatttat

SEQ ID NO: 18220 - DNA, 33 bp, Homo sapien
gggtggattttcacccgaccagcattgatttat

SEQ ID NO: 18221 - DNA, 33 bp, Homo sapien
tttctagctatgcctccccttccttttctgcag

SEQ ID NO: 18222 - DNA, 33 bp, Homo sapien
tttctagctatgcctctccttccttttctgcag

SEQ ID NO: 18223 - DNA, 33 bp, Homo sapien
gtcaaggatggaagtaaagaccagttagggaga

SEQ ID NO: 18224 - DNA, 33 bp, Homo sapien
gtcaaggatggaagtagagaccagttagggaga

SEQ ID NO: 18225 - DNA, 33 bp, Homo sapien
gtgtagggtgcgctggaaatgttcgggtgcagc

SEQ ID NO: 18226 - DNA, 33 bp, Homo sapien
gtgtagggtgcgctgggaatgttcgggtgcagc

SEQ ID NO: 18227 - DNA, 33 bp, Homo sapien
gaaatcgctgcaactcaaggcttcaagggagag

SEQ ID NO: 18228 - DNA, 33 bp, Homo sapien
gaaatcgctgcaactcgaggcttcaagggagag

SEQ ID NO: 18229 - DNA, 33 bp, Homo sapien
gttcagcctaaacacccagacaggcttacacag

SEQ ID NO: 18230 - DNA, 33 bp, Homo sapien
gttcagcctaaacaccgagacaggcttacacag

SEQ ID NO: 18231 - DNA, 33 bp, Homo sapien
taagtgagataatataggcagagtgctaagaac

SEQ ID NO: 18232 - DNA, 33 bp, Homo sapien
taagtgagataatatatgcagagtgctaagaac

SEQ ID NO: 18233 - DNA, 33 bp, Homo sapien
agcagcagttccagacgagaagctacggagcac

SEQ ID NO: 18234 - DNA, 33 bp, Homo sapien
agcagcagttccagactagaagctacggagcac

SEQ ID NO: 18235 - DNA, 33 bp, Homo sapien
actattggaaaaacaacagtccactaatagtca

SEQ ID NO: 18236 - DNA, 33 bp, Homo sapien
actattggaaaaacaagagtccactaatagtca

SEQ ID NO: 18237 - DNA, 33 bp, Homo sapien
tgcttcctgtgttttcaatctctgttgttagat

SEQ ID NO: 18238 - DNA, 33 bp, Homo sapien
tgcttcctgtgttttcgatctctgttgttagat

SEQ ID NO: 18239 - DNA, 33 bp, Homo sapien
ctggtccagcagaagaaattgtcacatagagga

SEQ ID NO: 18240 - DNA, 33 bp, Homo sapien
ctggtccagcagaagagattgtcacatagagga

SEQ ID NO: 18241 - DNA, 33 bp, Homo sapien
tgacagctatgacgtccctaagcgaggtgacag

SEQ ID NO: 18242 - DNA, 33 bp, Homo sapien
tgacagctatgacgtctctaagcgaggtgacag

SEQ ID NO: 18243 - DNA, 33 bp, Homo sapien
ggccaccacagacatcactttcaaggttttccc

SEQ ID NO: 18244 - DNA, 33 bp, Homo sapien
ggccaccacagacatcgctttcaaggttttccc

SEQ ID NO: 18245 - DNA, 33 bp, Homo sapien
gtcaaatgaggcccacaggacaagcaaggtgag

SEQ ID NO: 18246 - DNA, 33 bp, Homo sapien
gtcaaatgaggcccacgggacaagcaaggtgag

SEQ ID NO: 18247 - DNA, 33 bp, Homo sapien
tttaagtttgcaaagacgtcatataggtacatt

SEQ ID NO: 18248 - DNA, 33 bp, Homo sapien
tttaagtttgcaaagatgtcatataggtacatt

SEQ ID NO: 18249 - DNA, 33 bp, Homo sapien
caaaaagcaaattaaaaaactcatataggccaa

SEQ ID NO: 18250 - DNA, 33 bp, Homo sapien
caaaaagcaaattaaagaactcatataggccaa

SEQ ID NO: 18251 - DNA, 33 bp, Homo sapien
acataaagacatcaccagattttaaaaggggag

SEQ ID NO: 18252 - DNA, 33 bp, Homo sapien
acataaagacatcaccggattttaaaaggggag

SEQ ID NO: 18253 - DNA, 33 bp, Homo sapien
acgagcattaagaccccatctcctcaagccaga

SEQ ID NO: 18254 - DNA, 33 bp, Homo sapien
acgagcattaagaccctatctcctcaagccaga

SEQ ID NO: 18255 - DNA, 33 bp, Homo sapien
catagagcagagtaaaagtggctcaggaaacca

SEQ ID NO: 18256 - DNA, 33 bp, Homo sapien
catagagcagagtaaaggtggctcaggaaacca

SEQ ID NO: 18257 - DNA, 33 bp, Homo sapien
ggacgatcctgatgaacctttacagtgaggacg

SEQ ID NO: 18258 - DNA, 33 bp, Homo sapien
ggacgatcctgatgaagctttacagtgaggacg

SEQ ID NO: 18259 - DNA, 33 bp, Homo sapien
ggtttgtggagtctctaacctgtatcctcctgc

SEQ ID NO: 18260 - DNA, 33 bp, Homo sapien
ggtttgtggagtctctgacctgtatcctcctgc

SEQ ID NO: 18261 - DNA, 33 bp, Homo sapien
gtgaacaagctggaacaaatccccctgtgccct

SEQ ID NO: 18262 - DNA, 33 bp, Homo sapien
gtgaacaagctggaacgaatccccctgtgccct

SEQ ID NO: 18263 - DNA, 33 bp, Homo sapien
tgtggcagccgtgtaacatttgtttgtattggg

SEQ ID NO: 18264 - DNA, 33 bp, Homo sapien
tgtggcagccgtgtaatatttgtttgtattggg

SEQ ID NO: 18265 - DNA, 33 bp, Homo sapien
ggagtatcaagaattcaaagggaacccaggccc

SEQ ID NO: 18266 - DNA, 33 bp, Homo sapien
ggagtatcaagaattcgaagggaacccaggccc

SEQ ID NO: 18267 - DNA, 33 bp, Homo sapien
gggcctacagtggagaaggcatcgtgttagcgc

SEQ ID NO: 18268 - DNA, 33 bp, Homo sapien
gggcctacagtggagagggcatcgtgttagcgc

SEQ ID NO: 18269 - DNA, 33 bp, Homo sapien
ctcaactagcaagtagccgaatgagaaacaaga

SEQ ID NO: 18270 - DNA, 33 bp, Homo sapien
ctcaactagcaagtagtcgaatgagaaacaaga

SEQ ID NO: 18271 - DNA, 33 bp, Homo sapien
aaatgtttaaacacacacagaagtaggcagaat

SEQ ID NO: 18272 - DNA, 33 bp, Homo sapien
aaatgtttaaacacacgcagaagtaggcagaat

SEQ ID NO: 18273 - DNA, 33 bp, Homo sapien
tgatctaaagaattcaaactactaacatgaagg

SEQ ID NO: 18274 - DNA, 33 bp, Homo sapien
tgatctaaagaattcagactactaacatgaagg

SEQ ID NO: 18275 - DNA, 33 bp, Homo sapien
actagaaaaatggttaactctaatgcaaactct

SEQ ID NO: 18276 - DNA, 33 bp, Homo sapien
actagaaaaatggttatctctaatgcaaactct

SEQ ID NO: 18277 - DNA, 33 bp, Homo sapien
ggaattcagaaacgcaagtctcttcccacaagg

SEQ ID NO: 18278 - DNA, 33 bp, Homo sapien
ggaattcagaaacgcaggtctcttcccacaagg

SEQ ID NO: 18279 - DNA, 33 bp, Homo sapien
tcaggctgtaatgctcactggcacaccacttac

SEQ ID NO: 18280 - DNA, 33 bp, Homo sapien
tcaggctgtaatgctcgctggcacaccacttac

SEQ ID NO: 18281 - DNA, 33 bp, Homo sapien
acaagacataacttgcaattctttagtagctcc

SEQ ID NO: 18282 - DNA, 33 bp, Homo sapien
acaagacataacttgcgattctttagtagctcc

SEQ ID NO: 18283 - DNA, 33 bp, Homo sapien
agaaacagcagaggagaagaatgagcatttctg

SEQ ID NO: 18284 - DNA, 33 bp, Homo sapien
agaaacagcagaggaggagaatgagcatttctg

SEQ ID NO: 18285 - DNA, 33 bp, Homo sapien
aagggtgattctcatcggaagaggcagccccta

SEQ ID NO: 18286 - DNA, 33 bp, Homo sapien
aagggtgattctcatctgaagaggcagccccta

SEQ ID NO: 18287 - DNA, 33 bp, Homo sapien
agtactggcaataaccaagcactgaagaatctg

SEQ ID NO: 18288 - DNA, 33 bp, Homo sapien
agtactggcaataaccgagcactgaagaatctg

SEQ ID NO: 18289 - DNA, 33 bp, Homo sapien
atacagtaagtggtagacatagggtttctatct

SEQ ID NO: 18290 - DNA, 33 bp, Homo sapien
atacagtaagtggtagtcatagggtttctatct

SEQ ID NO: 18291 - DNA, 33 bp, Homo sapien
agcagaaagcattagacgagagttttaacatat

SEQ ID NO: 18292 - DNA, 33 bp, Homo sapien
agcagaaagcattagatgagagttttaacatat

SEQ ID NO: 18293 - DNA, 33 bp, Homo sapien
ttttcttactcatctgaaaggagagatctctat

SEQ ID NO: 18294 - DNA, 33 bp, Homo sapien
ttttcttactcatctggaaggagagatctctat

SEQ ID NO: 18295 - DNA, 33 bp, Homo sapien
atggatttacagcgataaaattcaccttatttc

SEQ ID NO: 18296 - DNA, 33 bp, Homo sapien
atggatttacagcgatcaaattcaccttatttc

SEQ ID NO: 18297 - DNA, 33 bp, Homo sapien
actcagacatacgcaacgatcagattcaaagag

SEQ ID NO: 18298 - DNA, 33 bp, Homo sapien
actcagacatacgcaatgatcagattcaaagag

SEQ ID NO: 18299 - DNA, 33 bp, Homo sapien
gctcttccagttctgaaacctgatgtcattatt

SEQ ID NO: 18300 - DNA, 33 bp, Homo sapien
gctcttccagttctgacacctgatgtcattatt

SEQ ID NO: 18301 - DNA, 33 bp, Homo sapien
tttcagactgttctcacataaaagttcattgat

SEQ ID NO: 18302 - DNA, 33 bp, Homo sapien
tttcagactgttctcatataaaagttcattgat

SEQ ID NO: 18303 - DNA, 33 bp, Homo sapien
tagtaaagaagctgagacacctaagattaagca

SEQ ID NO: 18304 - DNA, 33 bp, Homo sapien
tagtaaagaagctgaggcacctaagattaagca

SEQ ID NO: 18305 - DNA, 33 bp, Homo sapien
ataggatggctgtttacatatttctccattctg

SEQ ID NO: 18306 - DNA, 33 bp, Homo sapien
ataggatggctgtttatatatttctccattctg

SEQ ID NO: 18307 - DNA, 33 bp, Homo sapien
ttttctaatgctaaaaacctattctgctatcct

SEQ ID NO: 18308 - DNA, 33 bp, Homo sapien
ttttctaatgctaaaagcctattctgctatcct

SEQ ID NO: 18309 - DNA, 33 bp, Homo sapien
ggaacactctctataacagcaaaaacatagaaa

SEQ ID NO: 18310 - DNA, 33 bp, Homo sapien
ggaacactctctataatagcaaaaacatagaaa

SEQ ID NO: 18311 - DNA, 33 bp, Homo sapien
gaatgaaagggaaagacaacaaggcatttccgt

SEQ ID NO: 18312 - DNA, 33 bp, Homo sapien
gaatgaaagggaaagagaacaaggcatttccgt

SEQ ID NO: 18313 - DNA, 33 bp, Homo sapien
aaatccacaggtctagcagaaatgaggacttga

SEQ ID NO: 18314 - DNA, 33 bp, Homo sapien
aaatccacaggtctaggagaaatgaggacttga

SEQ ID NO: 18315 - DNA, 33 bp, Homo sapien
gacaaaaattgtacaccgcataagaaaacaaaa

SEQ ID NO: 18316 - DNA, 33 bp, Homo sapien
gacaaaaattgtacactgcataagaaaacaaaa

SEQ ID NO: 18317 - DNA, 33 bp, Homo sapien
aacaaaaagggaactacattgattcagtgatta

SEQ ID NO: 18318 - DNA, 33 bp, Homo sapien
aacaaaaagggaactatattgattcagtgatta

SEQ ID NO: 18319 - DNA, 33 bp, Homo sapien
cctgcaggaagcaggcactacattcagatggag

SEQ ID NO: 18320 - DNA, 33 bp, Homo sapien
cctgcaggaagcaggcgctacattcagatggag

SEQ ID NO: 18321 - DNA, 33 bp, Homo sapien
aggtcaatatcttttcactgatccctctctgct

SEQ ID NO: 18322 - DNA, 33 bp, Homo sapien
aggtcaatatcttttcgctgatccctctctgct

SEQ ID NO: 18323 - DNA, 33 bp, Homo sapien
agattaagagctagagaagtgtgaggtcaatat

SEQ ID NO: 18324 - DNA, 33 bp, Homo sapien
agattaagagctagaggagtgtgaggtcaatat

SEQ ID NO: 18325 - DNA, 33 bp, Homo sapien
tgggaattactcaggacagatatagacaatttg

SEQ ID NO: 18326 - DNA, 33 bp, Homo sapien
tgggaattactcaggatagatatagacaatttg

SEQ ID NO: 18327 - DNA, 33 bp, Homo sapien
agtgctatttatttcaaaacactcttcttgata

SEQ ID NO: 18328 - DNA, 33 bp, Homo sapien
agtgctatttatttcataacactcttcttgata

SEQ ID NO: 18329 - DNA, 33 bp, Homo sapien
aacccagccttccagggagagggagagccggtg

SEQ ID NO: 18330 - DNA, 33 bp, Homo sapien
aacccagccttccaggtagagggagagccggtg

SEQ ID NO: 18331 - DNA, 33 bp, Homo sapien
ccactgtcaggatcaaactctggcatggagtca

SEQ ID NO: 18332 - DNA, 33 bp, Homo sapien
ccactgtcaggatcaatctctggcatggagtca

SEQ ID NO: 18333 - DNA, 33 bp, Homo sapien
ttttccaattctaaagaaagttgctcattgcta

SEQ ID NO: 18334 - DNA, 33 bp, Homo sapien
ttttccaattctaaaggaagttgctcattgcta

SEQ ID NO: 18335 - DNA, 33 bp, Homo sapien
tgctggtttgaatgcaatataggcaaagtctct

SEQ ID NO: 18336 - DNA, 33 bp, Homo sapien
tgctggtttgaatgcagtataggcaaagtctct

SEQ ID NO: 18337 - DNA, 33 bp, Homo sapien
gtgagatgatcttcgcgctctgactctggatct

SEQ ID NO: 18338 - DNA, 33 bp, Homo sapien
gtgagatgatcttcgctctctgactctggatct

SEQ ID NO: 18339 - DNA, 33 bp, Homo sapien
gccgctgggatcagaactagggactgcgatata

SEQ ID NO: 18340 - DNA, 33 bp, Homo sapien
gccgctgggatcagaattagggactgcgatata

SEQ ID NO: 18341 - DNA, 33 bp, Homo sapien
gcgattaatcactccccgaagatagccatctcc

SEQ ID NO: 18342 - DNA, 33 bp, Homo sapien
gcgattaatcactccctgaagatagccatctcc

SEQ ID NO: 18343 - DNA, 33 bp, Homo sapien
tatgtgatgtattgtgcattaattactagtatt

SEQ ID NO: 18344 - DNA, 33 bp, Homo sapien
tatgtgatgtattgtgtattaattactagtatt

SEQ ID NO: 18345 - DNA, 33 bp, Homo sapien
aagtcatctgagatcacgtatgccaagcaatta

SEQ ID NO: 18346 - DNA, 33 bp, Homo sapien
aagtcatctgagatcatgtatgccaagcaatta

SEQ ID NO: 18347 - DNA, 33 bp, Homo sapien
caagcaattagcacaagacaggtatcagggctc

SEQ ID NO: 18348 - DNA, 33 bp, Homo sapien
caagcaattagcacaatacaggtatcagggctc

SEQ ID NO: 18349 - DNA, 33 bp, Homo sapien
gccatggtagaccccaccaagcttgtgattgca

SEQ ID NO: 18350 - DNA, 33 bp, Homo sapien
gccatggtagaccccatcaagcttgtgattgca

SEQ ID NO: 18351 - DNA, 33 bp, Homo sapien
atgaggaatctgtcacagagaggttaagtaatt

SEQ ID NO: 18352 - DNA, 33 bp, Homo sapien
atgaggaatctgtcacggagaggttaagtaatt

SEQ ID NO: 18353 - DNA, 33 bp, Homo sapien
catttgctgtacctcaactaatccaaccctctc

SEQ ID NO: 18354 - DNA, 33 bp, Homo sapien
catttgctgtacctcagctaatccaaccctctc

SEQ ID NO: 18355 - DNA, 33 bp, Homo sapien
ttattttttcctaacactccacagcatttcaga

SEQ ID NO: 18356 - DNA, 33 bp, Homo sapien
ttattttttcctaacattccacagcatttcaga

SEQ ID NO: 18357 - DNA, 33 bp, Homo sapien
tattggaaggcgctcaaccttggatctgagttt

SEQ ID NO: 18358 - DNA, 33 bp, Homo sapien
tattggaaggcgctcacccttggatctgagttt

SEQ ID NO: 18359 - DNA, 33 bp, Homo sapien
tgacttatctggaagacggaacacagtattgag

SEQ ID NO: 18360 - DNA, 33 bp, Homo sapien
tgacttatctggaagatggaacacagtattgag

SEQ ID NO: 18361 - DNA, 33 bp, Homo sapien
agacaggccaagtaacggccctaaagtcctgca

SEQ ID NO: 18362 - DNA, 33 bp, Homo sapien
agacaggccaagtaactgccctaaagtcctgca

SEQ ID NO: 18363 - DNA, 33 bp, Homo sapien
tggggttaataatctccacttggcagtttgggc

SEQ ID NO: 18364 - DNA, 33 bp, Homo sapien
tggggttaataatctctacttggcagtttgggc

SEQ ID NO: 18365 - DNA, 33 bp, Homo sapien
atgtgtatttttctaggatatgaaagagaggtg

SEQ ID NO: 18366 - DNA, 33 bp, Homo sapien
atgtgtatttttctagtatatgaaagagaggtg

SEQ ID NO: 18367 - DNA, 33 bp, Homo sapien
cacagctaaaaagcgaagaataaggcaccactc

SEQ ID NO: 18368 - DNA, 33 bp, Homo sapien
cacagctaaaaagcgaggaataaggcaccactc

SEQ ID NO: 18369 - DNA, 33 bp, Homo sapien
ttatctaagcatttggcttgtttgaagacatta

SEQ ID NO: 18370 - DNA, 33 bp, Homo sapien
ttatctaagcatttggtttgtttgaagacatta

SEQ ID NO: 18371 - DNA, 33 bp, Homo sapien
ttctcgcaattcaaaacccatgccccttccagc

SEQ ID NO: 18372 - DNA, 33 bp, Homo sapien
ttctcgcaattcaaaatccatgccccttccagc

SEQ ID NO: 18373 - DNA, 33 bp, Homo sapien
agaagttgatgaaaaccgctaaagatgctaaag

SEQ ID NO: 18374 - DNA, 33 bp, Homo sapien
agaagttgatgaaaactgctaaagatgctaaag

SEQ ID NO: 18375 - DNA, 33 bp, Homo sapien
tatcatgcttctcaccaattattagttaccgtc

SEQ ID NO: 18376 - DNA, 33 bp, Homo sapien
tatcatgcttctcaccgattattagttaccgtc

SEQ ID NO: 18377 - DNA, 33 bp, Homo sapien
acagagtcgggaactgcagagttgttccttgtc

SEQ ID NO: 18378 - DNA, 33 bp, Homo sapien
acagagtcgggaactgtagagttgttccttgtc

SEQ ID NO: 18379 - DNA, 33 bp, Homo sapien
attgatatgatatttccgaaaacaactagcaaa

SEQ ID NO: 18380 - DNA, 33 bp, Homo sapien
attgatatgatatttctgaaaacaactagcaaa

SEQ ID NO: 18381 - DNA, 33 bp, Homo sapien
gcaggtaagttcttaacggactggtactgtcat

SEQ ID NO: 18382 - DNA, 33 bp, Homo sapien
gcaggtaagttcttaatggactggtactgtcat

SEQ ID NO: 18383 - DNA, 33 bp, Homo sapien
aagtgtggaagtatcaagtggagaaggagggaa

SEQ ID NO: 18384 - DNA, 33 bp, Homo sapien
aagtgtggaagtatcaggtggagaaggagggaa

SEQ ID NO: 18385 - DNA, 33 bp, Homo sapien
atgcgggtgtctcccactctggtcattgtcatt

SEQ ID NO: 18386 - DNA, 33 bp, Homo sapien
atgcgggtgtctcccattctggtcattgtcatt

SEQ ID NO: 18387 - DNA, 33 bp, Homo sapien
ggaccctgactgatacacttagagaaattcact

SEQ ID NO: 18388 - DNA, 33 bp, Homo sapien
ggaccctgactgatacgcttagagaaattcact

SEQ ID NO: 18389 - DNA, 33 bp, Homo sapien
gttaccaagccatgggcagatataggaaatcta

SEQ ID NO: 18390 - DNA, 33 bp, Homo sapien
gttaccaagccatgggtagatataggaaatcta

SEQ ID NO: 18391 - DNA, 33 bp, Homo sapien
caaaattttacctacaacttcagggtgttcatg

SEQ ID NO: 18392 - DNA, 33 bp, Homo sapien
caaaattttacctacagcttcagggtgttcatg

SEQ ID NO: 18393 - DNA, 33 bp, Homo sapien
catgataggtgcttcaaaggaaaatatttctga

SEQ ID NO: 18394 - DNA, 33 bp, Homo sapien
catgataggtgcttcagaggaaaatatttctga

SEQ ID NO: 18395 - DNA, 33 bp, Homo sapien
ggatttgtcccagacccagaaaaggaagagcag

SEQ ID NO: 18396 - DNA, 33 bp, Homo sapien
ggatttgtcccagacctagaaaaggaagagcag

SEQ ID NO: 18397 - DNA, 33 bp, Homo sapien
tattgtattttctctccccactatgtccatgca

SEQ ID NO: 18398 - DNA, 33 bp, Homo sapien
tattgtattttctctctccactatgtccatgca

SEQ ID NO: 18399 - DNA, 33 bp, Homo sapien
gtgacacaaagataaactgtaacttgtccctgt

SEQ ID NO: 18400 - DNA, 33 bp, Homo sapien
gtgacacaaagataaattgtaacttgtccctgt

SEQ ID NO: 18401 - DNA, 33 bp, Homo sapien
cactggctgggaaaaagttcagagggtcccata

SEQ ID NO: 18402 - DNA, 33 bp, Homo sapien
cactggctgggaaaaatttcagagggtcccata

SEQ ID NO: 18403 - DNA, 33 bp, Homo sapien
ctttaggatattctggaaactttgctgtgctgt

SEQ ID NO: 18404 - DNA, 33 bp, Homo sapien
ctttaggatattctgggaactttgctgtgctgt

SEQ ID NO: 18405 - DNA, 33 bp, Homo sapien
ctagaaatgtgcaaaaagacacagaggtagtta

SEQ ID NO: 18406 - DNA, 33 bp, Homo sapien
ctagaaatgtgcaaaaggacacagaggtagtta

SEQ ID NO: 18407 - DNA, 33 bp, Homo sapien
agacagatctgtattcaaattctgatcagctac

SEQ ID NO: 18408 - DNA, 33 bp, Homo sapien
agacagatctgtattccaattctgatcagctac

SEQ ID NO: 18409 - DNA, 33 bp, Homo sapien
cacatatgtcttaacacagcacttccactctct

SEQ ID NO: 18410 - DNA, 33 bp, Homo sapien
cacatatgtcttaacagagcacttccactctct

SEQ ID NO: 18411 - DNA, 33 bp, Homo sapien
aattattcatgaaaagccattccttccaggctg

SEQ ID NO: 18412 - DNA, 33 bp, Homo sapien
aattattcatgaaaagtcattccttccaggctg

SEQ ID NO: 18413 - DNA, 33 bp, Homo sapien
tttagcaaaatcgttgaactgcctaacaattct

SEQ ID NO: 18414 - DNA, 33 bp, Homo sapien
tttagcaaaatcgttgcactgcctaacaattct

SEQ ID NO: 18415 - DNA, 33 bp, Homo sapien
cttgagccaagcttgaaggagtgctgcctcagt

SEQ ID NO: 18416 - DNA, 33 bp, Homo sapien
cttgagccaagcttgagggagtgctgcctcagt

SEQ ID NO: 18417 - DNA, 33 bp, Homo sapien
caaccaggacaacaacagaaagctttatctgct

SEQ ID NO: 18418 - DNA, 33 bp, Homo sapien
caaccaggacaacaacggaaagctttatctgct

SEQ ID NO: 18419 - DNA, 33 bp, Homo sapien
tctgttcaggctttagccctgtgaaacaaaact

SEQ ID NO: 18420 - DNA, 33 bp, Homo sapien
tctgttcaggctttagtcctgtgaaacaaaact

SEQ ID NO: 18421 - DNA, 33 bp, Homo sapien
cttgtgagctttgcacagaggatgagggagggt

SEQ ID NO: 18422 - DNA, 33 bp, Homo sapien
cttgtgagctttgcacggaggatgagggagggt

SEQ ID NO: 18423 - DNA, 33 bp, Homo sapien; identical to SEQ ID NO: 18421

SEQ ID NO: 18424 - DNA, 33 bp, Homo sapien; identical to SEQ ID NO: 18422

SEQ ID NO: 18425 - DNA, 33 bp, Homo sapien
aggaaaagaatttgcacaaggtcatggccagca

SEQ ID NO: 18426 - DNA, 33 bp, Homo sapien
aggaaaagaatttgcataaggtcatggccagca

SEQ ID NO: 18427 - DNA, 33 bp, Homo sapien
gttgcaatggtgaaaaaaatctgatcaaacaat

SEQ ID NO: 18428 - DNA, 33 bp, Homo sapien
gttgcaatggtgaaaacaatctgatcaaacaat

SEQ ID NO: 18429 - DNA, 33 bp, Homo sapien
gtcagcagtgtaaccactaatcgtacctcaggt

SEQ ID NO: 18430 - DNA, 33 bp, Homo sapien
gtcagcagtgtaaccattaatcgtacctcaggt

SEQ ID NO: 18431 - DNA, 33 bp, Homo sapien
gcttgataagccaaaagcttctcaagtctatca

SEQ ID NO: 18432 - DNA, 33 bp, Homo sapien
gcttgataagccaaaatcttctcaagtctatca

SEQ ID NO: 18433 - DNA, 33 bp, Homo sapien
ataatagcatgaaagcaatgtattcgatagaaa

SEQ ID NO: 18434 - DNA, 33 bp, Homo sapien
ataatagcatgaaagcgatgtattcgatagaaa

SEQ ID NO: 18435 - DNA, 33 bp, Homo sapien
catagccagttaaaaccgatggaccttagagat

SEQ ID NO: 18436 - DNA, 33 bp, Homo sapien
catagccagttaaaactgatggaccttagagat

SEQ ID NO: 18437 - DNA, 33 bp, Homo sapien
aaaggtgttaccaaccagctctgctctgaagaa

SEQ ID NO: 18438 - DNA, 33 bp, Homo sapien
aaaggtgttaccaaccggctctgctctgaagaa

SEQ ID NO: 18439 - DNA, 33 bp, Homo sapien
gcaatataagtgttgacctaatgtagataaaat

SEQ ID NO: 18440 - DNA, 33 bp, Homo sapien
gcaatataagtgttgatctaatgtagataaaat

SEQ ID NO: 18441 - DNA, 33 bp, Homo sapien
ccttcaatagttgaatgaatagacaagctgtgg

SEQ ID NO: 18442 - DNA, 33 bp, Homo sapien
ccttcaatagttgaattaatagacaagctgtgg

SEQ ID NO: 18443 - DNA, 33 bp, Homo sapien
ttagtcactctcaacaagttcattagagtaaca

SEQ ID NO: 18444 - DNA, 33 bp, Homo sapien
ttagtcactctcaacacgttcattagagtaaca

SEQ ID NO: 18445 - DNA, 33 bp, Homo sapien
aaaacagataaggctaccattgattgagcacct

SEQ ID NO: 18446 - DNA, 33 bp, Homo sapien
aaaacagataaggctatcattgattgagcacct

SEQ ID NO: 18447 - DNA, 33 bp, Homo sapien
aacctgtccaaagtacagaatagtctctgaggg

SEQ ID NO: 18448 - DNA, 33 bp, Homo sapien
aacctgtccaaagtactgaatagtctctgaggg

SEQ ID NO: 18449 - DNA, 33 bp, Homo sapien
tacatttctgcatctgcagctgagtggacagca

SEQ ID NO: 18450 - DNA, 33 bp, Homo sapien
tacatttctgcatctgtagctgagtggacagca

SEQ ID NO: 18451 - DNA, 33 bp, Homo sapien
gggtaatagtgtatcacggctagggtttgttga

SEQ ID NO: 18452 - DNA, 33 bp, Homo sapien
gggtaatagtgtatcatggctagggtttgttga

SEQ ID NO: 18453 - DNA, 33 bp, Homo sapien
caatgaaatcacccccaaaaaatatcaggaagc

SEQ ID NO: 18454 - DNA, 33 bp, Homo sapien
caatgaaatcaccccccaaaaatatcaggaagc

SEQ ID NO: 18455 - DNA, 33 bp, Homo sapien
ccaacaatgtggatcacgaattcaacatgagat

SEQ ID NO: 18456 - DNA, 33 bp, Homo sapien
ccaacaatgtggatcatgaattcaacatgagat

SEQ ID NO: 18457 - DNA, 33 bp, Homo sapien
tgataacatacttttacggctccaatgactgga

SEQ ID NO: 18458 - DNA, 33 bp, Homo sapien
tgataacatacttttatggctccaatgactgga

SEQ ID NO: 18459 - DNA, 33 bp, Homo sapien
cctaatttctagtcaccagcatttgcctatcag

SEQ ID NO: 18460 - DNA, 33 bp, Homo sapien
cctaatttctagtcactagcatttgcctatcag

SEQ ID NO: 18461 - DNA, 33 bp, Homo sapien
gccctatctgtctaaaaggatttcttaataact

SEQ ID NO: 18462 - DNA, 33 bp, Homo sapien
gccctatctgtctaaacggatttcttaataact

SEQ ID NO: 18463 - DNA, 33 bp, Homo sapien
gctcactgtaggtaggcactgacgtgtttttga

SEQ ID NO: 18464 - DNA, 33 bp, Homo sapien
gctcactgtaggtaggtactgacgtgtttttga

SEQ ID NO: 18465 - DNA, 33 bp, Homo sapien
aggactctaactcaaccatgtcttattcatctg

SEQ ID NO: 18466 - DNA, 33 bp, Homo sapien
aggactctaactcaactatgtcttattcatctg

SEQ ID NO: 18467 - DNA, 33 bp, Homo sapien
ttcatactgtggtaaacgtgactcgggttcctt

SEQ ID NO: 18468 - DNA, 33 bp, Homo sapien
ttcatactgtggtaaatgtgactcgggttcctt

SEQ ID NO: 18469 - DNA, 33 bp, Homo sapien
aatgggactgatgaaacgtaaatttggagtttt

SEQ ID NO: 18470 - DNA, 33 bp, Homo sapien
aatgggactgatgaaatgtaaatttggagtttt

SEQ ID NO: 18471 - DNA, 33 bp, Homo sapien
ctgtgagaacatgaaaaaaggaggaattatgga

SEQ ID NO: 18472 - DNA, 33 bp, Homo sapien
ctgtgagaacatgaaagaaggaggaattatgga

SEQ ID NO: 18473 - DNA, 33 bp, Homo sapien
tgagaaagctcattagcatataaacctcccaag

SEQ ID NO: 18474 - DNA, 33 bp, Homo sapien
tgagaaagctcattaggatataaacctcccaag

SEQ ID NO: 18475 - DNA, 33 bp, Homo sapien
atatgagagccttcccacagtgaggccaacata

SEQ ID NO: 18476 - DNA, 33 bp, Homo sapien
atatgagagccttcccgcagtgaggccaacata

SEQ ID NO: 18477 - DNA, 33 bp, Homo sapien
tttacaaaaataaggcactgtttgccccaataa

SEQ ID NO: 18478 - DNA, 33 bp, Homo sapien
tttacaaaaataaggcgctgtttgccccaataa

SEQ ID NO: 18479 - DNA, 33 bp, Homo sapien
cagttctccttaaacacagaagagctttggtca

SEQ ID NO: 18480 - DNA, 33 bp, Homo sapien
cagttctccttaaacagagaagagctttggtca

SEQ ID NO: 18481 - DNA, 33 bp, Homo sapien
acaagaagatgaatcaacattctaggaacctgg

SEQ ID NO: 18482 - DNA, 33 bp, Homo sapien
acaagaagatgaatcagcattctaggaacctgg

SEQ ID NO: 18483 - DNA, 33 bp, Homo sapien
caagcttgaacttccactgaatatgtaaagaat

SEQ ID NO: 18484 - DNA, 33 bp, Homo sapien
caagcttgaacttccattgaatatgtaaagaat

SEQ ID NO: 18485 - DNA, 33 bp, Homo sapien
gccctgaagtctttggaagagtctgaaatgatt

SEQ ID NO: 18486 - DNA, 33 bp, Homo sapien
gccctgaagtctttgggagagtctgaaatgatt

SEQ ID NO: 18487 - DNA, 33 bp, Homo sapien
ggtgtggacagagataaggcaatgaataagaaa

SEQ ID NO: 18488 - DNA, 33 bp, Homo sapien
ggtgtggacagagatagggcaatgaataagaaa

SEQ ID NO: 18489 - DNA, 33 bp, Homo sapien
gctgtgtcagggactccaggaagttctgtacag

SEQ ID NO: 18490 - DNA, 33 bp, Homo sapien
gctgtgtcagggactctaggaagttctgtacag

SEQ ID NO: 18491 - DNA, 33 bp, Homo sapien
agcccctggaataccactgatgtaggtccagga

SEQ ID NO: 18492 - DNA, 33 bp, Homo sapien
agcccctggaataccattgatgtaggtccagga

SEQ ID NO: 18493 - DNA, 33 bp, Homo sapien
gaatctagatcaaccacgtacttagagtcacac

SEQ ID NO: 18494 - DNA, 33 bp, Homo sapien
gaatctagatcaaccatgtacttagagtcacac

SEQ ID NO: 18495 - DNA, 33 bp, Homo sapien
gaggaaactgcagtaaaatatacaaatacttga

SEQ ID NO: 18496 - DNA, 33 bp, Homo sapien
gaggaaactgcagtaagatatacaaatacttga

SEQ ID NO: 18497 - DNA, 33 bp, Homo sapien
caaagcgtagcttccccgcaagtcactaaacta

SEQ ID NO: 18498 - DNA, 33 bp, Homo sapien
caaagcgtagcttccctgcaagtcactaaacta

SEQ ID NO: 18499 - DNA, 33 bp, Homo sapien
gcacttatggaattcacagaaataaagtctcta

SEQ ID NO: 18500 - DNA, 33 bp, Homo sapien
gcacttatggaattcatagaaataaagtctcta

SEQ ID NO: 18501 - DNA, 33 bp, Homo sapien
tgcctcaaagaagtataaaaactcctggtctgt

SEQ ID NO: 18502 - DNA, 33 bp, Homo sapien
tgcctcaaagaagtatcaaaactcctggtctgt

SEQ ID NO: 18503 - DNA, 33 bp, Homo sapien
ctatacactccaggacagggtgcttcatctgtg

SEQ ID NO: 18504 - DNA, 33 bp, Homo sapien
ctatacactccaggacggggtgcttcatctgtg

SEQ ID NO: 18505 - DNA, 33 bp, Homo sapien
cttcagcacccccagacagaatgagccctgcca

SEQ ID NO: 18506 - DNA, 33 bp, Homo sapien
cttcagcacccccagagagaatgagccctgcca

SEQ ID NO: 18507 - DNA, 33 bp, Homo sapien
aaaggaatgatctggccgaaagtatcaacagtg

SEQ ID NO: 18508 - DNA, 33 bp, Homo sapien
aaaggaatgatctggctgaaagtatcaacagtg

SEQ ID NO: 18509 - DNA, 33 bp, Homo sapien
actattactagtggcaaaaagtactatttaagg

SEQ ID NO: 18510 - DNA, 33 bp, Homo sapien
actattactagtggcataaagtactatttaagg

SEQ ID NO: 18511 - DNA, 33 bp, Homo sapien
ggagaaagaggagctaagaaaaagccacagcct

SEQ ID NO: 18512 - DNA, 33 bp, Homo sapien
ggagaaagaggagctacgaaaaagccacagcct

SEQ ID NO: 18513 - DNA, 33 bp, Homo sapien
ttaaaaatcttttatgacaccttagtgcagcct

SEQ ID NO: 18514 - DNA, 33 bp, Homo sapien
ttaaaaatcttttatgccaccttagtgcagcct

SEQ ID NO: 18515 - DNA, 33 bp, Homo sapien
aggaattaacaagcccacatatggtatagggta

SEQ ID NO: 18516 - DNA, 33 bp, Homo sapien
aggaattaacaagcccgcatatggtatagggta

SEQ ID NO: 18517 - DNA, 33 bp, Homo sapien
agcctgaactgatcaactaaataaatgaaagcc

SEQ ID NO: 18518 - DNA, 33 bp, Homo sapien
agcctgaactgatcaattaaataaatgaaagcc

SEQ ID NO: 18519 - DNA, 33 bp, Homo sapien
tatgcttactccactacgaccatcactaacaac

SEQ ID NO: 18520 - DNA, 33 bp, Homo sapien
tatgcttactccactatgaccatcactaacaac

SEQ ID NO: 18521 - DNA, 33 bp, Homo sapien
ctcaacaccaacagcaagattatctatgtcata

SEQ ID NO: 18522 - DNA, 33 bp, Homo sapien
ctcaacaccaacagcaggattatctatgtcata

SEQ ID NO: 18523 - DNA, 33 bp, Homo sapien
ctgctggataaaccagactcaagatgatgatgc

SEQ ID NO: 18524 - DNA, 33 bp, Homo sapien
ctgctggataaaccaggctcaagatgatgatgc

SEQ ID NO: 18525 - DNA, 33 bp, Homo sapien
atagtataggagagaaggtgtcaattactccac

SEQ ID NO: 18526 - DNA, 33 bp, Homo sapien
atagtataggagagaatgtgtcaattactccac

SEQ ID NO: 18527 - DNA, 33 bp, Homo sapien
gattcaaactctgtccaattccaaactcagtgc

SEQ ID NO: 18528 - DNA, 33 bp, Homo sapien
gattcaaactctgtccgattccaaactcagtgc

SEQ ID NO: 18529 - DNA, 33 bp, Homo sapien
tgtgatgtcttccccaatcaactcttgagacag

SEQ ID NO: 18530 - DNA, 33 bp, Homo sapien
tgtgatgtcttccccactcaactcttgagacag

SEQ ID NO: 18531 - DNA, 33 bp, Homo sapien
gtttaagagagctgggcattcttcagagccttg

SEQ ID NO: 18532 - DNA, 33 bp, Homo sapien
gtttaagagagctgggtattcttcagagccttg

SEQ ID NO: 18533 - DNA, 33 bp, Homo sapien
aggatagaacataccacgcacagaaagctctgg

SEQ ID NO: 18534 - DNA, 33 bp, Homo sapien
aggatagaacataccatgcacagaaagctctgg

SEQ ID NO: 18535 - DNA, 33 bp, Homo sapien
ggcaggcattccaggcaatttgagtggttccca

SEQ ID NO: 18536 - DNA, 33 bp, Homo sapien
ggcaggcattccaggcgatttgagtggttccca

SEQ ID NO: 18537 - DNA, 33 bp, Homo sapien
atagcctcgtatcttacagtgaagaattgagaa

SEQ ID NO: 18538 - DNA, 33 bp, Homo sapien
atagcctcgtatcttatagtgaagaattgagaa

SEQ ID NO: 18539 - DNA, 33 bp, Homo sapien
tatggtacacagaactcagaacataaattggat

SEQ ID NO: 18540 - DNA, 33 bp, Homo sapien
tatggtacacagaactgagaacataaattggat

SEQ ID NO: 18541 - DNA, 33 bp, Homo sapien
aataaggagacagaaaaatgatttgaatagtga

SEQ ID NO: 18542 - DNA, 33 bp, Homo sapien
aataaggagacagaaacatgatttgaatagtga

SEQ ID NO: 18543 - DNA, 33 bp, Homo sapien
gggtataaaccagaaccaagcagggcaagtcag

SEQ ID NO: 18544 - DNA, 33 bp, Homo sapien
gggtataaaccagaactaagcagggcaagtcag

SEQ ID NO: 18545 - DNA, 33 bp, Homo sapien
tctaagagggaaaggacgtgctattaatattta

SEQ ID NO: 18546 - DNA, 33 bp, Homo sapien
tctaagagggaaaggaggtgctattaatattta

SEQ ID NO: 18547 - DNA, 33 bp, Homo sapien
ggtttggaatcatgaaacatatactaatttaga

SEQ ID NO: 18548 - DNA, 33 bp, Homo sapien
ggtttggaatcatgaaccatatactaatttaga

SEQ ID NO: 18549 - DNA, 33 bp, Homo sapien
caatgtcaaaaatgtccctggtcctaatccagt

SEQ ID NO: 18550 - DNA, 33 bp, Homo sapien
caatgtcaaaaatgtctctggtcctaatccagt

SEQ ID NO: 18551 - DNA, 33 bp, Homo sapien
acagagcttacactccacctgttcagctgttgc

SEQ ID NO: 18552 - DNA, 33 bp, Homo sapien
acagagcttacactccgcctgttcagctgttgc

SEQ ID NO: 18553 - DNA, 33 bp, Homo sapien
tcatgggatttacctacgttgatactggctaca

SEQ ID NO: 18554 - DNA, 33 bp, Homo sapien
tcatgggatttacctatgttgatactggctaca

SEQ ID NO: 18555 - DNA, 33 bp, Homo sapien
atatagacttctacaaccaaaagagatatttga

SEQ ID NO: 18556 - DNA, 33 bp, Homo sapien
atatagacttctacaatcaaaagagatatttga

SEQ ID NO: 18557 - DNA, 33 bp, Homo sapien
ataaataaagcagaaactgttctcttccttttt

SEQ ID NO: 18558 - DNA, 33 bp, Homo sapien
ataaataaagcagaaattgttctcttccttttt

SEQ ID NO: 18559 - DNA, 33 bp, Homo sapien
tccaggatatgccaggcatttttctaagtgctg

SEQ ID NO: 18560 - DNA, 33 bp, Homo sapien
tccaggatatgccaggtatttttctaagtgctg

SEQ ID NO: 18561 - DNA, 33 bp, Homo sapien
tatctgctgctgagaaaaatgttcaaatagaat

SEQ ID NO: 18562 - DNA, 33 bp, Homo sapien
tatctgctgctgagaagaatgttcaaatagaat

SEQ ID NO: 18563 - DNA, 33 bp, Homo sapien
tgtacagggtcctgaactgagaatggcctctga

SEQ ID NO: 18564 - DNA, 33 bp, Homo sapien
tgtacagggtcctgaattgagaatggcctctga

SEQ ID NO: 18565 - DNA, 33 bp, Homo sapien
agatttaacatttccaaaaggcaacagcagatc

SEQ ID NO: 18566 - DNA, 33 bp, Homo sapien
agatttaacatttccagaaggcaacagcagatc

SEQ ID NO: 18567 - DNA, 33 bp, Homo sapien
gaacgcctgcctgggacaaggtgtttggagaca

SEQ ID NO: 18568 - DNA, 33 bp, Homo sapien
gaacgcctgcctgggagaaggtgtttggagaca

SEQ ID NO: 18569 - DNA, 33 bp, Homo sapien
cctaatgggaaaggcaaatctccctgccagagc

SEQ ID NO: 18570 - DNA, 33 bp, Homo sapien
cctaatgggaaaggcacatctccctgccagagc

SEQ ID NO: 18571 - DNA, 33 bp, Homo sapien
ttacactgacacatcactatcatcccaagtcct

SEQ ID NO: 18572 - DNA, 33 bp, Homo sapien
ttacactgacacatcattatcatcccaagtcct

SEQ ID NO: 18573 - DNA, 33 bp, Homo sapien
ggttcagagctaagagcagcaaatgaaagagtt

SEQ ID NO: 18574 - DNA, 33 bp, Homo sapien
ggttcagagctaagagtagcaaatgaaagagtt

SEQ ID NO: 18575 - DNA, 33 bp, Homo sapien
tagaaacatcagaaggaatttcagtttggcctg

SEQ ID NO: 18576 - DNA, 33 bp, Homo sapien
tagaaacatcagaagggatttcagtttggcctg

SEQ ID NO: 18577 - DNA, 33 bp, Homo sapien
tcaacaactcctgacacgtttgtttacttcttg

SEQ ID NO: 18578 - DNA, 33 bp, Homo sapien
tcaacaactcctgacatgtttgtttacttcttg

SEQ ID NO: 18579 - DNA, 33 bp, Homo sapien
cttggtacatcaaagcactttcagcctgaatat

SEQ ID NO: 18580 - DNA, 33 bp, Homo sapien
cttggtacatcaaagccctttcagcctgaatat

SEQ ID NO: 18581 - DNA, 33 bp, Homo sapien
ttaggctgggaaattaacaagtagctgagcctg

SEQ ID NO: 18582 - DNA, 33 bp, Homo sapien
ttaggctgggaaattagcaagtagctgagcctg

SEQ ID NO: 18583 - DNA, 33 bp, Homo sapien
tggctgctggaagttcaagctgggatcttcttc

SEQ ID NO: 18584 - DNA, 33 bp, Homo sapien
tggctgctggaagttcgagctgggatcttcttc

SEQ ID NO: 18585 - DNA, 33 bp, Homo sapien
agagcccgctgctataaaccaacctgtgcctct

SEQ ID NO: 18586 - DNA, 33 bp, Homo sapien
agagcccgctgctatagaccaacctgtgcctct

SEQ ID NO: 18587 - DNA, 33 bp, Homo sapien
catggactgtgtgttacagagtttagggcagga

SEQ ID NO: 18588 - DNA, 33 bp, Homo sapien
catggactgtgtgttagagagtttagggcagga

SEQ ID NO: 18589 - DNA, 33 bp, Homo sapien
tcagctctgcaggtagaaactttctaatcacat

SEQ ID NO: 18590 - DNA, 33 bp, Homo sapien
tcagctctgcaggtaggaactttctaatcacat

SEQ ID NO: 18591 - DNA, 33 bp, Homo sapien
agaggcacttaagaacaatttcatcttgatgta

SEQ ID NO: 18592 - DNA, 33 bp, Homo sapien
agaggcacttaagaaccatttcatcttgatgta

SEQ ID NO: 18593 - DNA, 33 bp, Homo sapien
aattgaggttctattaaggcatcaagctgaggg

SEQ ID NO: 18594 - DNA, 33 bp, Homo sapien
aattgaggttctattatggcatcaagctgaggg

SEQ ID NO: 18595 - DNA, 33 bp, Homo sapien
tatgtcaaccacattagaacccttacttttgcc

SEQ ID NO: 18596 - DNA, 33 bp, Homo sapien
tatgtcaaccacattataacccttacttttgcc

SEQ ID NO: 18597 - DNA, 33 bp, Homo sapien
atgaatatgtccacgaacttgattgtggaaatg

SEQ ID NO: 18598 - DNA, 33 bp, Homo sapien
atgaatatgtccacgatcttgattgtggaaatg

SEQ ID NO: 18599 - DNA, 33 bp, Homo sapien
taaagtagcatgagaaaagctttgagggtgatg

SEQ ID NO: 18600 - DNA, 33 bp, Homo sapien
taaagtagcatgagaagagctttgagggtgatg

SEQ ID NO: 18601 - DNA, 33 bp, Homo sapien
taattatgctagggaaaataagttagactttaa

SEQ ID NO: 18602 - DNA, 33 bp, Homo sapien
taattatgctagggaacataagttagactttaa

SEQ ID NO: 18603 - DNA, 33 bp, Homo sapien
agccacacatcaagagacaccttttggaaatct

SEQ ID NO: 18604 - DNA, 33 bp, Homo sapien
agccacacatcaagaggcaccttttggaaatct

SEQ ID NO: 18605 - DNA, 33 bp, Homo sapien
gagcaacctggaaatacaaggctaacagcagac

SEQ ID NO: 18606 - DNA, 33 bp, Homo sapien
gagcaacctggaaatataaggctaacagcagac

SEQ ID NO: 18607 - DNA, 33 bp, Homo sapien
agcaccttaaaatctacggaattttgtcaaact

SEQ ID NO: 18608 - DNA, 33 bp, Homo sapien
agcaccttaaaatctatggaattttgtcaaact

SEQ ID NO: 18609 - DNA, 33 bp, Homo sapien
agttgatccatataaccgcgagaaatgctaaca

SEQ ID NO: 18610 - DNA, 33 bp, Homo sapien
agttgatccatataactgcgagaaatgctaaca

SEQ ID NO: 18611 - DNA, 33 bp, Homo sapien
ttctaaatctgagttaagtgaacatgacatttt

SEQ ID NO: 18612 - DNA, 33 bp, Homo sapien
ttctaaatctgagttaggtgaacatgacatttt

SEQ ID NO: 18613 - DNA, 33 bp, Homo sapien
catgcttaagattaataaaatgaacggagatgc

SEQ ID NO: 18614 - DNA, 33 bp, Homo sapien
catgcttaagattaatcaaatgaacggagatgc

SEQ ID NO: 18615 - DNA, 33 bp, Homo sapien
agaaatgaggttgatacagtcaaacaacagaaa

SEQ ID NO: 18616 - DNA, 33 bp, Homo sapien
agaaatgaggttgatatagtcaaacaacagaaa

SEQ ID NO: 18617 - DNA, 33 bp, Homo sapien
gattttttataaatgaaagcatgatgtgatcac

SEQ ID NO: 18618 - DNA, 33 bp, Homo sapien
gattttttataaatgacagcatgatgtgatcac

SEQ ID NO: 18619 - DNA, 33 bp, Homo sapien
gagctttgacatttaaagtttcagccagtattc

SEQ ID NO: 18620 - DNA, 33 bp, Homo sapien
gagctttgacatttaacgtttcagccagtattc

SEQ ID NO: 18621 - DNA, 33 bp, Homo sapien
ccatgacttgaatataacaatgtgtctcaagta

SEQ ID NO: 18622 - DNA, 33 bp, Homo sapien
ccatgacttgaatatagcaatgtgtctcaagta

SEQ ID NO: 18623 - DNA, 33 bp, Homo sapien
tcatttggtcttccaacgatgatagagactgtg

SEQ ID NO: 18624 - DNA, 33 bp, Homo sapien
tcatttggtcttccaaggatgatagagactgtg

SEQ ID NO: 18625 - DNA, 33 bp, Homo sapien
tcttggttcctccttacagtgaagtttctatca

SEQ ID NO: 18626 - DNA, 33 bp, Homo sapien
tcttggttcctccttatagtgaagtttctatca

SEQ ID NO: 18627 - DNA, 33 bp, Homo sapien
atgactttataaggaaaggatattagacgtgga

SEQ ID NO: 18628 - DNA, 33 bp, Homo sapien
atgactttataaggaagggatattagacgtgga

SEQ ID NO: 18629 - DNA, 33 bp, Homo sapien
attgccagaatgtcagcaggagcgtttttcctc

SEQ ID NO: 18630 - DNA, 33 bp, Homo sapien
attgccagaatgtcagtaggagcgtttttcctc

SEQ ID NO: 18631 - DNA, 33 bp, Homo sapien
cctgaatctatagacaagagaacatgagtatta

SEQ ID NO: 18632 - DNA, 33 bp, Homo sapien
cctgaatctatagacaggagaacatgagtatta

SEQ ID NO: 18633 - DNA, 33 bp, Homo sapien
ctcagctgccttctcaaacattctccagaagtg

SEQ ID NO: 18634 - DNA, 33 bp, Homo sapien
ctcagctgccttctcagacattctccagaagtg

SEQ ID NO: 18635 - DNA, 33 bp, Homo sapien
gcacacaggactttccagagcttttcaacagca

SEQ ID NO: 18636 - DNA, 33 bp, Homo sapien
gcacacaggactttccggagcttttcaacagca

SEQ ID NO: 18637 - DNA, 33 bp, Homo sapien
gcctctctgcattgcccagaaggagaatacagt

SEQ ID NO: 18638 - DNA, 33 bp, Homo sapien
gcctctctgcattgccgagaaggagaatacagt

SEQ ID NO: 18639 - DNA, 33 bp, Homo sapien
tcactaatttaattccgaaacactctccataca

SEQ ID NO: 18640 - DNA, 33 bp, Homo sapien
tcactaatttaattcctaaacactctccataca

SEQ ID NO: 18641 - DNA, 33 bp, Homo sapien
ttccagctctgggagtaaactgggaatttgtaa

SEQ ID NO: 18642 - DNA, 33 bp, Homo sapien
ttccagctctgggagtgaactgggaatttgtaa

SEQ ID NO: 18643 - DNA, 33 bp, Homo sapien
ggaaactcaaatgctgcaagtactttaaaaatc

SEQ ID NO: 18644 - DNA, 33 bp, Homo sapien
ggaaactcaaatgctggaagtactttaaaaatc

SEQ ID NO: 18645 - DNA, 33 bp, Homo sapien
ctttaaaaaaggagaaactcccatgtgtgaggc

SEQ ID NO: 18646 - DNA, 33 bp, Homo sapien
ctttaaaaaaggagaacctcccatgtgtgaggc

SEQ ID NO: 18647 - DNA, 33 bp, Homo sapien
ggctggagtgaaaggcgaaggagtaggacttca

SEQ ID NO: 18648 - DNA, 33 bp, Homo sapien
ggctggagtgaaaggctaaggagtaggacttca

SEQ ID NO: 18649 - DNA, 33 bp, Homo sapien
atggaatgatattttacgtcacctctgaggcat

SEQ ID NO: 18650 - DNA, 33 bp, Homo sapien
atggaatgatattttatgtcacctctgaggcat

SEQ ID NO: 18651 - DNA, 33 bp, Homo sapien
gccccaaattcctatactacttgatgggctcag

SEQ ID NO: 18652 - DNA, 33 bp, Homo sapien
gccccaaattcctatattacttgatgggctcag

SEQ ID NO: 18653 - DNA, 33 bp, Homo sapien
agacattccaaaaagcactttctcattaagggg

SEQ ID NO: 18654 - DNA, 33 bp, Homo sapien
agacattccaaaaagccctttctcattaagggg

SEQ ID NO: 18655 - DNA, 33 bp, Homo sapien
ttgtttgccttttaaacagcaatggtgctgggg

SEQ ID NO: 18656 - DNA, 33 bp, Homo sapien
ttgtttgccttttaaatagcaatggtgctgggg

SEQ ID NO: 18657 - DNA, 33 bp, Homo sapien
taaagcctgtcacaaaaaattaaagatagaggg

SEQ ID NO: 18658 - DNA, 33 bp, Homo sapien
taaagcctgtcacaaagaattaaagatagaggg

SEQ ID NO: 18659 - DNA, 33 bp, Homo sapien
gagcttgcagggtgtaaggacagaatgccagta

SEQ ID NO: 18660 - DNA, 33 bp, Homo sapien
gagcttgcagggtgtatggacagaatgccagta

SEQ ID NO: 18661 - DNA, 33 bp, Homo sapien
atggtagagttaaggaacgaaatgtcgaaacct

SEQ ID NO: 18662 - DNA, 33 bp, Homo sapien
atggtagagttaaggagcgaaatgtcgaaacct

SEQ ID NO: 18663 - DNA, 33 bp, Homo sapien
gtgacagagtttctatcagaacaataatttcgt

SEQ ID NO: 18664 - DNA, 33 bp, Homo sapien
gtgacagagtttctatgagaacaataatttcgt

SEQ ID NO: 18665 - DNA, 33 bp, Homo sapien
gagctcacctaagtctcagaaagtatgagaaat

SEQ ID NO: 18666 - DNA, 33 bp, Homo sapien
gagctcacctaagtctgagaaagtatgagaaat

SEQ ID NO: 18667 - DNA, 33 bp, Homo sapien
atttatgatacaatgagaggtgtttagaggaac

SEQ ID NO: 18668 - DNA, 33 bp, Homo sapien
atttatgatacaatgataggtgtttagaggaac

SEQ ID NO: 18669 - DNA, 33 bp, Homo sapien
tgtcatgtttccataaccttgaagataccaagt

SEQ ID NO: 18670 - DNA, 33 bp, Homo sapien
tgtcatgtttccataatcttgaagataccaagt

SEQ ID NO: 18671 - DNA, 33 bp, Homo sapien
gaaacaaagaaaataaagagcaattatgataag

SEQ ID NO: 18672 - DNA, 33 bp, Homo sapien
gaaacaaagaaaataatgagcaattatgataag

SEQ ID NO: 18673 - DNA, 33 bp, Homo sapien
agccccagcactaccccatcctttccactctgg

SEQ ID NO: 18674 - DNA, 33 bp, Homo sapien
agccccagcactaccctatcctttccactctgg

SEQ ID NO: 18675 - DNA, 33 bp, Homo sapien
ctatacacagtgataagactactaaacatcatg

SEQ ID NO: 18676 - DNA, 33 bp, Homo sapien
ctatacacagtgataatactactaaacatcatg

SEQ ID NO: 18677 - DNA, 33 bp, Homo sapien
atagaataaaggtaaagttgacataattcttag

SEQ ID NO: 18678 - DNA, 33 bp, Homo sapien
atagaataaaggtaaatttgacataattcttag

SEQ ID NO: 18679 - DNA, 33 bp, Homo sapien
tgatgtgcactatccacgaagaaaagcaagctg

SEQ ID NO: 18680 - DNA, 33 bp, Homo sapien
tgatgtgcactatccatgaagaaaagcaagctg

SEQ ID NO: 18681 - DNA, 33 bp, Homo sapien
gtggagtcatgtttcccagagccttcactgtgc

SEQ ID NO: 18682 - DNA, 33 bp, Homo sapien
gtggagtcatgtttcctagagccttcactgtgc

SEQ ID NO: 18683 - DNA, 33 bp, Homo sapien
tcagggcagctgcaagactcaagataatgactc

SEQ ID NO: 18684 - DNA, 33 bp, Homo sapien
tcagggcagctgcaaggctcaagataatgactc

SEQ ID NO: 18685 - DNA, 33 bp, Homo sapien
gatccaggtaatcataaagtatcatctcctttc

SEQ ID NO: 18686 - DNA, 33 bp, Homo sapien
gatccaggtaatcatacagtatcatctcctttc

SEQ ID NO: 18687 - DNA, 33 bp, Homo sapien
tccagttacagttacaaatcaaacccacaatga

SEQ ID NO: 18688 - DNA, 33 bp, Homo sapien
tccagttacagttacatatcaaacccacaatga

SEQ ID NO: 18689 - DNA, 33 bp, Homo sapien
attttaaaactgattgaattgaaaggagaaata

SEQ ID NO: 18690 - DNA, 33 bp, Homo sapien
attttaaaactgattggattgaaaggagaaata

SEQ ID NO: 18691 - DNA, 33 bp, Homo sapien
tttgaattgatagactaagtaaaacagatcgcc

SEQ ID NO: 18692 - DNA, 33 bp, Homo sapien
tttgaattgatagactgagtaaaacagatcgcc

SEQ ID NO: 18693 - DNA, 33 bp, Homo sapien
aaaagcttttaaacccaaatcagtgctagttgg

SEQ ID NO: 18694 - DNA, 33 bp, Homo sapien
aaaagcttttaaacccgaatcagtgctagttgg

SEQ ID NO: 18695 - DNA, 33 bp, Homo sapien
tgcacagtttgaatataaggttggagggtgaaa

SEQ ID NO: 18696 - DNA, 33 bp, Homo sapien
tgcacagtttgaatatgaggttggagggtgaaa

SEQ ID NO: 18697 - DNA, 33 bp, Homo sapien
aagaatgaatggatgacacctagcagttcattt

SEQ ID NO: 18698 - DNA, 33 bp, Homo sapien
aagaatgaatggatgatacctagcagttcattt

SEQ ID NO: 18699 - DNA, 33 bp, Homo sapien
gccttatatcccaaaaattgatcagtagggatg

SEQ ID NO: 18700 - DNA, 33 bp, Homo sapien
gccttatatcccaaaagttgatcagtagggatg

SEQ ID NO: 18701 - DNA, 33 bp, Homo sapien
gtttccaattggtctgcagccctgagattgctc

SEQ ID NO: 18702 - DNA, 33 bp, Homo sapien
gtttccaattggtctgtagccctgagattgctc

SEQ ID NO: 18703 - DNA, 33 bp, Homo sapien
tccccctgtacatagacgtaaatcctaacagat

SEQ ID NO: 18704 - DNA, 33 bp, Homo sapien
tccccctgtacatagatgtaaatcctaacagat

SEQ ID NO: 18705 - DNA, 33 bp, Homo sapien
ctcagaattatccactcagtaggtggaactggg

SEQ ID NO: 18706 - DNA, 33 bp, Homo sapien
ctcagaattatccacttagtaggtggaactggg

SEQ ID NO: 18707 - DNA, 33 bp, Homo sapien
agtagtatgtatccaactctgaatatcataagc

SEQ ID NO: 18708 - DNA, 33 bp, Homo sapien
agtagtatgtatccaattctgaatatcataagc

SEQ ID NO: 18709 - DNA, 33 bp, Homo sapien
gtactttatactgatacagaaaggcttatgata

SEQ ID NO: 18710 - DNA, 33 bp, Homo sapien
gtactttatactgatatagaaaggcttatgata

SEQ ID NO: 18711 - DNA, 33 bp, Homo sapien
gtttggcagtctcttcccttgttccagactttc

SEQ ID NO: 18712 - DNA, 33 bp, Homo sapien
gtttggcagtctcttctcttgttccagactttc

SEQ ID NO: 18713 - DNA, 33 bp, Homo sapien
caggcttatttgtataaccaatttctagtatag

SEQ ID NO: 18714 - DNA, 33 bp, Homo sapien
caggcttatttgtatacccaatttctagtatag

SEQ ID NO: 18715 - DNA, 33 bp, Homo sapien
ttataagaatttggaacctcatatctcctagca

SEQ ID NO: 18716 - DNA, 33 bp, Homo sapien
ttataagaatttggaatctcatatctcctagca

SEQ ID NO: 18717 - DNA, 33 bp, Homo sapien
tagagagcagagcctgaaacaagagttaaaatg

SEQ ID NO: 18718 - DNA, 33 bp, Homo sapien
tagagagcagagcctgcaacaagagttaaaatg

SEQ ID NO: 18719 - DNA, 33 bp, Homo sapien
agttgtgtcatctggaacctctttcagctactt

SEQ ID NO: 18720 - DNA, 33 bp, Homo sapien
agttgtgtcatctggatcctctttcagctactt

SEQ ID NO: 18721 - DNA, 33 bp, Homo sapien
gaaaagcaactcaaagaatcttagttgaatgtc

SEQ ID NO: 18722 - DNA, 33 bp, Homo sapien
gaaaagcaactcaaagcatcttagttgaatgtc

SEQ ID NO: 18723 - DNA, 33 bp, Homo sapien
gttacatggggttaacagatatagcaaataatt

SEQ ID NO: 18724 - DNA, 33 bp, Homo sapien
gttacatggggttaacggatatagcaaataatt

SEQ ID NO: 18725 - DNA, 33 bp, Homo sapien
ttggtcttcttcactacaatcttttattccgta

SEQ ID NO: 18726 - DNA, 33 bp, Homo sapien
ttggtcttcttcactataatcttttattccgta

SEQ ID NO: 18727 - DNA, 33 bp, Homo sapien
tgaaacatagaatcaacctctcagaagtctttc

SEQ ID NO: 18728 - DNA, 33 bp, Homo sapien
tgaaacatagaatcaagctctcagaagtctttc

SEQ ID NO: 18729 - DNA, 33 bp, Homo sapien
aacagacaagacagaaattaccagcttaagacg

SEQ ID NO: 18730 - DNA, 33 bp, Homo sapien
aacagacaagacagaagttaccagcttaagacg

SEQ ID NO: 18731 - DNA, 33 bp, Homo sapien
tcatctagtctctgaagaatttttctcattact

SEQ ID NO: 18732 - DNA, 33 bp, Homo sapien
tcatctagtctctgaataatttttctcattact

SEQ ID NO: 18733 - DNA, 33 bp, Homo sapien
attggaacaaaagacccgggagatatcactgta

SEQ ID NO: 18734 - DNA, 33 bp, Homo sapien
attggaacaaaagacctgggagatatcactgta

SEQ ID NO: 18735 - DNA, 33 bp, Homo sapien
atataggcagggatagaagactatacatttgtg

SEQ ID NO: 18736 - DNA, 33 bp, Homo sapien
atataggcagggatagcagactatacatttgtg

SEQ ID NO: 18737 - DNA, 33 bp, Homo sapien
ctttctatttgacttgaactccagagtggaaaa

SEQ ID NO: 18738 - DNA, 33 bp, Homo sapien
ctttctatttgacttggactccagagtggaaaa

SEQ ID NO: 18739 - DNA, 33 bp, Homo sapien
gtagccatcacctctacgccaagcctttctgcc

SEQ ID NO: 18740 - DNA, 33 bp, Homo sapien
gtagccatcacctctatgccaagcctttctgcc

SEQ ID NO: 18741 - DNA, 33 bp, Homo sapien
tattgggcctatgagaaaaatataaaggcagaa

SEQ ID NO: 18742 - DNA, 33 bp, Homo sapien
tattgggcctatgagacaaatataaaggcagaa

SEQ ID NO: 18743 - DNA, 33 bp, Homo sapien
attctcacattgctgcgacttaggcccatgaaa

SEQ ID NO: 18744 - DNA, 33 bp, Homo sapien
attctcacattgctgctacttaggcccatgaaa

SEQ ID NO: 18745 - DNA, 33 bp, Homo sapien
taataccacagggaacccaagttctgacaagag

SEQ ID NO: 18746 - DNA, 33 bp, Homo sapien
taataccacagggaactcaagttctgacaagag

SEQ ID NO: 18747 - DNA, 33 bp, Homo sapien
tatcactgaggatgacactggaagactgcattt

SEQ ID NO: 18748 - DNA, 33 bp, Homo sapien
tatcactgaggatgaccctggaagactgcattt

SEQ ID NO: 18749 - DNA, 33 bp, Homo sapien
ctgggcaccatagtgaacaggctagtctgtgtg

SEQ ID NO: 18750 - DNA, 33 bp, Homo sapien
ctgggcaccatagtgagcaggctagtctgtgtg

SEQ ID NO: 18751 - DNA, 33 bp, Homo sapien
aaaggtaagtggagaagacaggtactaaatgaa

SEQ ID NO: 18752 - DNA, 33 bp, Homo sapien
aaaggtaagtggagaatacaggtactaaatgaa

SEQ ID NO: 18753 - DNA, 33 bp, Homo sapien
agaaaagtcacttttgaaaatcaactgcatctc

SEQ ID NO: 18754 - DNA, 33 bp, Homo sapien
agaaaagtcacttttggaaatcaactgcatctc

SEQ ID NO: 18755 - DNA, 33 bp, Homo sapien
aactaccacagccagacattttcctataataat

SEQ ID NO: 18756 - DNA, 33 bp, Homo sapien
aactaccacagccagatattttcctataataat

SEQ ID NO: 18757 - DNA, 33 bp, Homo sapien
tagcagatgacgataaagtactatggagaaaag

SEQ ID NO: 18758 - DNA, 33 bp, Homo sapien
tagcagatgacgataaggtactatggagaaaag

SEQ ID NO: 18759 - DNA, 33 bp, Homo sapien
gtgatatgtttatagccagatctgggaaggcta

SEQ ID NO: 18760 - DNA, 33 bp, Homo sapien
gtgatatgtttatagctagatctgggaaggcta

SEQ ID NO: 18761 - DNA, 33 bp, Homo sapien
tggtttctagccttaaagtctttcttttgtgtg

SEQ ID NO: 18762 - DNA, 33 bp, Homo sapien
tggtttctagccttaaggtctttcttttgtgtg

SEQ ID NO: 18763 - DNA, 33 bp, Homo sapien
atgatgtgaaatccaaagacattttcatgtttt

SEQ ID NO: 18764 - DNA, 33 bp, Homo sapien
atgatgtgaaatccaatgacattttcatgtttt

SEQ ID NO: 18765 - DNA, 33 bp, Homo sapien
aaatgaggagttaccacgtaaggctaagtagct

SEQ ID NO: 18766 - DNA, 33 bp, Homo sapien
aaatgaggagttaccatgtaaggctaagtagct

SEQ ID NO: 18767 - DNA, 33 bp, Homo sapien
atcactacctatatcaagaaattaataatttgg

SEQ ID NO: 18768 - DNA, 33 bp, Homo sapien
atcactacctatatcatgaaattaataatttgg

SEQ ID NO: 18769 - DNA, 33 bp, Homo sapien
ccctcctttatccagaacatcctgtggcctgac

SEQ ID NO: 18770 - DNA, 33 bp, Homo sapien
ccctcctttatccagagcatcctgtggcctgac

SEQ ID NO: 18771 - DNA, 33 bp, Homo sapien
cagagctatgataaaacgtaacaggtgccaata

SEQ ID NO: 18772 - DNA, 33 bp, Homo sapien
cagagctatgataaaatgtaacaggtgccaata

SEQ ID NO: 18773 - DNA, 33 bp, Homo sapien
acattttggaggctgaaaagacttaagatctgc

SEQ ID NO: 18774 - DNA, 33 bp, Homo sapien
acattttggaggctgacaagacttaagatctgc

SEQ ID NO: 18775 - DNA, 33 bp, Homo sapien
ataggttgcactcacactgagatttttaagatg

SEQ ID NO: 18776 - DNA, 33 bp, Homo sapien
ataggttgcactcacattgagatttttaagatg

SEQ ID NO: 18777 - DNA, 33 bp, Homo sapien
agatttggtaactgggaagtgaacactgaatct

SEQ ID NO: 18778 - DNA, 33 bp, Homo sapien
agatttggtaactgggcagtgaacactgaatct

SEQ ID NO: 18779 - DNA, 33 bp, Homo sapien
cagcctctgtttaatagccagtctgaatgtcac

SEQ ID NO: 18780 - DNA, 33 bp, Homo sapien
cagcctctgtttaatatccagtctgaatgtcac

SEQ ID NO: 18781 - DNA, 33 bp, Homo sapien
tactgcctctagtaccaaatgggcaatacctgg

SEQ ID NO: 18782 - DNA, 33 bp, Homo sapien
tactgcctctagtaccgaatgggcaatacctgg

SEQ ID NO: 18783 - DNA, 33 bp, Homo sapien
gagaatcacacaaagacgagtcagataagagtg

SEQ ID NO: 18784 - DNA, 33 bp, Homo sapien
gagaatcacacaaagatgagtcagataagagtg

SEQ ID NO: 18785 - DNA, 33 bp, Homo sapien
gctgcactgttaccaacctgatctcacccactg

SEQ ID NO: 18786 - DNA, 33 bp, Homo sapien
gctgcactgttaccaagctgatctcacccactg

SEQ ID NO: 18787 - DNA, 33 bp, Homo sapien
aagggggtatcagggactagttgtggatccgtt

SEQ ID NO: 18788 - DNA, 33 bp, Homo sapien
aagggggtatcagggattagttgtggatccgtt

SEQ ID NO: 18789 - DNA, 33 bp, Homo sapien
tagctggtcagataaggcatttaaacctgacac

SEQ ID NO: 18790 - DNA, 33 bp, Homo sapien
tagctggtcagataagtcatttaaacctgacac

SEQ ID NO: 18791 - DNA, 33 bp, Homo sapien
ctcacacctttggaaacaaatgattatggttcg

SEQ ID NO: 18792 - DNA, 33 bp, Homo sapien
ctcacacctttggaaataaatgattatggttcg

SEQ ID NO: 18793 - DNA, 33 bp, Homo sapien
ggaaccactatcatcacattgagatttctaaat

SEQ ID NO: 18794 - DNA, 33 bp, Homo sapien
ggaaccactatcatcatattgagatttctaaat

SEQ ID NO: 18795 - DNA, 33 bp, Homo sapien
ctattcccacctttgcacaatgtgtactagaac

SEQ ID NO: 18796 - DNA, 33 bp, Homo sapien
ctattcccacctttgcgcaatgtgtactagaac

SEQ ID NO: 18797 - DNA, 33 bp, Homo sapien
tcttttcgtgatgagacgttatagaaaaggttt

SEQ ID NO: 18798 - DNA, 33 bp, Homo sapien
tcttttcgtgatgagatgttatagaaaaggttt

SEQ ID NO: 18799 - DNA, 33 bp, Homo sapien
tgataaatggtctctagggttctgcagacagag

SEQ ID NO: 18800 - DNA, 33 bp, Homo sapien
tgataaatggtctctatggttctgcagacagag

SEQ ID NO: 18801 - DNA, 33 bp, Homo sapien
atgctcattatgtggacgaggaaactgcagctc

SEQ ID NO: 18802 - DNA, 33 bp, Homo sapien
atgctcattatgtggatgaggaaactgcagctc

SEQ ID NO: 18803 - DNA, 33 bp, Homo sapien
tggcacttctctgccaactggatatgttctgtg

SEQ ID NO: 18804 - DNA, 33 bp, Homo sapien
tggcacttctctgccacctggatatgttctgtg

SEQ ID NO: 18805 - DNA, 33 bp, Homo sapien
cggtcactctcatatcactggttgtagtccata

SEQ ID NO: 18806 - DNA, 33 bp, Homo sapien
cggtcactctcatatcgctggttgtagtccata

SEQ ID NO: 18807 - DNA, 33 bp, Homo sapien
aaaaggagagtacattaaaacaggctgatgcca

SEQ ID NO: 18808 - DNA, 33 bp, Homo sapien
aaaaggagagtacattgaaacaggctgatgcca

SEQ ID NO: 18809 - DNA, 33 bp, Homo sapien
aagataaatatacaaacagacggaacaaatgca

SEQ ID NO: 18810 - DNA, 33 bp, Homo sapien
aagataaatatacaaatagacggaacaaatgca

SEQ ID NO: 18811 - DNA, 33 bp, Homo sapien
tttggtaaagaacctcacccacactgttttgca

SEQ ID NO: 18812 - DNA, 33 bp, Homo sapien
tttggtaaagaacctcgcccacactgttttgca

SEQ ID NO: 18813 - DNA, 33 bp, Homo sapien
ttacagattttcaattaaatcccagaacctcag

SEQ ID NO: 18814 - DNA, 33 bp, Homo sapien
ttacagattttcaattgaatcccagaacctcag

SEQ ID NO: 18815 - DNA, 33 bp, Homo sapien
tgtgcaggcataattcacaactcattccagtgt

SEQ ID NO: 18816 - DNA, 33 bp, Homo sapien
tgtgcaggcataattcgcaactcattccagtgt

SEQ ID NO: 18817 - DNA, 33 bp, Homo sapien
gtgtctctgattagtacagtgtcctgacatctg

SEQ ID NO: 18818 - DNA, 33 bp, Homo sapien
gtgtctctgattagtatagtgtcctgacatctg

SEQ ID NO: 18819 - DNA, 33 bp, Homo sapien
caggagaagacccagaccttgaccccagtgtga

SEQ ID NO: 18820 - DNA, 33 bp, Homo sapien
caggagaagacccagatcttgaccccagtgtga

SEQ ID NO: 18821 - DNA, 33 bp, Homo sapien
gctgtaagagagtagaaaagtcaagtcgttaaa

SEQ ID NO: 18822 - DNA, 33 bp, Homo sapien
gctgtaagagagtagagaagtcaagtcgttaaa

SEQ ID NO: 18823 - DNA, 33 bp, Homo sapien
tacatattttggggaaaacaaatcagtctataa

SEQ ID NO: 18824 - DNA, 33 bp, Homo sapien
tacatattttggggaacacaaatcagtctataa

SEQ ID NO: 18825 - DNA, 33 bp, Homo sapien
cctcttttataaggacaatgatctcattcacga

SEQ ID NO: 18826 - DNA, 33 bp, Homo sapien
cctcttttataaggacgatgatctcattcacga

SEQ ID NO: 18827 - DNA, 33 bp, Homo sapien
atagctcttccaggctaaaattgaatgctggtg

SEQ ID NO: 18828 - DNA, 33 bp, Homo sapien
atagctcttccaggctgaaattgaatgctggtg

SEQ ID NO: 18829 - DNA, 33 bp, Homo sapien
aaggatgcccccggaaacttgaggcccaggcaa

SEQ ID NO: 18830 - DNA, 33 bp, Homo sapien
aaggatgcccccggaaccttgaggcccaggcaa

SEQ ID NO: 18831 - DNA, 33 bp, Homo sapien
aggtgtgtgaccataggcaagttcttcactctc

SEQ ID NO: 18832 - DNA, 33 bp, Homo sapien
aggtgtgtgaccatagtcaagttcttcactctc

SEQ ID NO: 18833 - DNA, 33 bp, Homo sapien
gggttagaagctttgaacatactgtatcttaat

SEQ ID NO: 18834 - DNA, 33 bp, Homo sapien
gggttagaagctttgagcatactgtatcttaat

SEQ ID NO: 18835 - DNA, 33 bp, Homo sapien
atggaattcagactccaagagaagataggcttt

SEQ ID NO: 18836 - DNA, 33 bp, Homo sapien
atggaattcagactccgagagaagataggcttt

SEQ ID NO: 18837 - DNA, 33 bp, Homo sapien
cagtgatgacaacaaagaagcatctagtcccaa

SEQ ID NO: 18838 - DNA, 33 bp, Homo sapien
cagtgatgacaacaaataagcatctagtcccaa

SEQ ID NO: 18839 - DNA, 33 bp, Homo sapien
ggaccatctgcttagccattgcccatttatgtt

SEQ ID NO: 18840 - DNA, 33 bp, Homo sapien
ggaccatctgcttagctattgcccatttatgtt

SEQ ID NO: 18841 - DNA, 33 bp, Homo sapien
agcccaggggatgtaacagccctgtttccaagc

SEQ ID NO: 18842 - DNA, 33 bp, Homo sapien
agcccaggggatgtaagagccctgtttccaagc

SEQ ID NO: 18843 - DNA, 33 bp, Homo sapien
tggtagtttctttaaagcaatgagtggttttca

SEQ ID NO: 18844 - DNA, 33 bp, Homo sapien
tggtagtttctttaaatcaatgagtggttttca

SEQ ID NO: 18845 - DNA, 33 bp, Homo sapien
aaaggtgaccaggcaacaactagcataatgaat

SEQ ID NO: 18846 - DNA, 33 bp, Homo sapien
aaaggtgaccaggcaataactagcataatgaat

SEQ ID NO: 18847 - DNA, 33 bp, Homo sapien
gcaatcatgccaacaaccaaataattacaagct

SEQ ID NO: 18848 - DNA, 33 bp, Homo sapien
gcaatcatgccaacaatcaaataattacaagct

SEQ ID NO: 18849 - DNA, 33 bp, Homo sapien
tagaatgatttagagaagaagaagctacatttt

SEQ ID NO: 18850 - DNA, 33 bp, Homo sapien
tagaatgatttagagaggaagaagctacatttt

SEQ ID NO: 18851 - DNA, 33 bp, Homo sapien
atgaattaaagacttacatgagtgacttcaaac

SEQ ID NO: 18852 - DNA, 33 bp, Homo sapien
atgaattaaagacttatatgagtgacttcaaac

SEQ ID NO: 18853 - DNA, 33 bp, Homo sapien
atttcggtgacaggataaatagaagcccagatt

SEQ ID NO: 18854 - DNA, 33 bp, Homo sapien
atttcggtgacaggatcaatagaagcccagatt

SEQ ID NO: 18855 - DNA, 33 bp, Homo sapien
tccagtttcctatacaactggtggataattgtg

SEQ ID NO: 18856 - DNA, 33 bp, Homo sapien
tccagtttcctatacagctggtggataattgtg

SEQ ID NO: 18857 - DNA, 33 bp, Homo sapien
tttttagcacttagcacaaagttttgtatccaa

SEQ ID NO: 18858 - DNA, 33 bp, Homo sapien
tttttagcacttagcagaaagttttgtatccaa

SEQ ID NO: 18859 - DNA, 33 bp, Homo sapien
tatttccaagataggaataacagatgtaagaca

SEQ ID NO: 18860 - DNA, 33 bp, Homo sapien
tatttccaagataggagtaacagatgtaagaca

SEQ ID NO: 18861 - DNA, 33 bp, Homo sapien
cttcttcatattcttgaaaatagtgacattgtc

SEQ ID NO: 18862 - DNA, 33 bp, Homo sapien
cttcttcatattcttggaaatagtgacattgtc

SEQ ID NO: 18863 - DNA, 33 bp, Homo sapien
tacatagaacataaggaccattattctacaata

SEQ ID NO: 18864 - DNA, 33 bp, Homo sapien
tacatagaacataagggccattattctacaata

SEQ ID NO: 18865 - DNA, 33 bp, Homo sapien
tggttttgccctaaaggatttcactgaggatct

SEQ ID NO: 18866 - DNA, 33 bp, Homo sapien
tggttttgccctaaagtatttcactgaggatct

SEQ ID NO: 18867 - DNA, 33 bp, Homo sapien
aatcatctcctgtaaacggattctcttcacata

SEQ ID NO: 18868 - DNA, 33 bp, Homo sapien
aatcatctcctgtaaatggattctcttcacata

SEQ ID NO: 18869 - DNA, 33 bp, Homo sapien
ataacgtgttttggaaaagggactctcgagctg

SEQ ID NO: 18870 - DNA, 33 bp, Homo sapien
ataacgtgttttggaagagggactctcgagctg

SEQ ID NO: 18871 - DNA, 33 bp, Homo sapien
cacatcaataacacaactactaacaccactatc

SEQ ID NO: 18872 - DNA, 33 bp, Homo sapien
cacatcaataacacaattactaacaccactatc

SEQ ID NO: 18873 - DNA, 33 bp, Homo sapien
gcatagtaaagatgaactaaatttgtggaagtt

SEQ ID NO: 18874 - DNA, 33 bp, Homo sapien
gcatagtaaagatgaattaaatttgtggaagtt

SEQ ID NO: 18875 - DNA, 33 bp, Homo sapien
cagagctctggtataagggttacaactctgtca

SEQ ID NO: 18876 - DNA, 33 bp, Homo sapien
cagagctctggtataatggttacaactctgtca

SEQ ID NO: 18877 - DNA, 33 bp, Homo sapien
tgccactggcagaactaagtggctatgtactcc

SEQ ID NO: 18878 - DNA, 33 bp, Homo sapien
tgccactggcagaactgagtggctatgtactcc

SEQ ID NO: 18879 - DNA, 33 bp, Homo sapien
cttgggcttaaattccagctttgttattggcaa

SEQ ID NO: 18880 - DNA, 33 bp, Homo sapien
cttgggcttaaattccggctttgttattggcaa

SEQ ID NO: 18881 - DNA, 33 bp, Homo sapien
ctctccatcttggtaaatgtcattgccagttgc

SEQ ID NO: 18882 - DNA, 33 bp, Homo sapien
ctctccatcttggtaactgtcattgccagttgc

SEQ ID NO: 18883 - DNA, 33 bp, Homo sapien
tttgtagtcttagaaccaggatgctttacattt

SEQ ID NO: 18884 - DNA, 33 bp, Homo sapien
tttgtagtcttagaactaggatgctttacattt

SEQ ID NO: 18885 - DNA, 33 bp, Homo sapien
tggtgggttccacctcaattgccaactttttag

SEQ ID NO: 18886 - DNA, 33 bp, Homo sapien
tggtgggttccacctcgattgccaactttttag

SEQ ID NO: 18887 - DNA, 33 bp, Homo sapien
gggtaatcagtgccgacgtctttctcccttcaa

SEQ ID NO: 18888 - DNA, 33 bp, Homo sapien
gggtaatcagtgccgaggtctttctcccttcaa

SEQ ID NO: 18889 - DNA, 33 bp, Homo sapien
atgaataggcccataacggtgaactgtttttca

SEQ ID NO: 18890 - DNA, 33 bp, Homo sapien
atgaataggcccataatggtgaactgtttttca

SEQ ID NO: 18891 - DNA, 33 bp, Homo sapien
aattgattccttatgacggctttattcatccaa

SEQ ID NO: 18892 - DNA, 33 bp, Homo sapien
aattgattccttatgatggctttattcatccaa

SEQ ID NO: 18893 - DNA, 33 bp, Homo sapien
ttagctatttccatcacgggagaaaatgacatc

SEQ ID NO: 18894 - DNA, 33 bp, Homo sapien
ttagctatttccatcatgggagaaaatgacatc

SEQ ID NO: 18895 - DNA, 33 bp, Homo sapien
gcagtggtccgtgataaaatcccattcagtgcc

SEQ ID NO: 18896 - DNA, 33 bp, Homo sapien
gcagtggtccgtgatagaatcccattcagtgcc

SEQ ID NO: 18897 - DNA, 33 bp, Homo sapien
atccctggttgggggagtatttaatattgtcag

SEQ ID NO: 18898 - DNA, 33 bp, Homo sapien
atccctggttgggggattatttaatattgtcag

SEQ ID NO: 18899 - DNA, 33 bp, Homo sapien
gcagtctattcaatctaaaattcctacttggtt

SEQ ID NO: 18900 - DNA, 33 bp, Homo sapien
gcagtctattcaatctgaaattcctacttggtt

SEQ ID NO: 18901 - DNA, 33 bp, Homo sapien
tgtacaaaagttcagccaccatggaaaataatt

SEQ ID NO: 18902 - DNA, 33 bp, Homo sapien
tgtacaaaagttcagctaccatggaaaataatt

SEQ ID NO: 18903 - DNA, 33 bp, Homo sapien
tttattgaaaacaatcaagcattttatcaggca

SEQ ID NO: 18904 - DNA, 33 bp, Homo sapien
tttattgaaaacaatcgagcattttatcaggca

SEQ ID NO: 18905 - DNA, 33 bp, Homo sapien
gctattcatcacgaaactgatggtctctgctcc

SEQ ID NO: 18906 - DNA, 33 bp, Homo sapien
gctattcatcacgaaattgatggtctctgctcc

SEQ ID NO: 18907 - DNA, 33 bp, Homo sapien
ctccagagaagctcacaacaatcaatttgagga

SEQ ID NO: 18908 - DNA, 33 bp, Homo sapien
ctccagagaagctcacgacaatcaatttgagga

SEQ ID NO: 18909 - DNA, 33 bp, Homo sapien
aatgttggaaataataacacctaacatttcctg

SEQ ID NO: 18910 - DNA, 33 bp, Homo sapien
aatgttggaaataatagcacctaacatttcctg

SEQ ID NO: 18911 - DNA, 33 bp, Homo sapien
attactgtcccaacgaaacgtgaaggatttcta

SEQ ID NO: 18912 - DNA, 33 bp, Homo sapien
attactgtcccaacgacacgtgaaggatttcta

SEQ ID NO: 18913 - DNA, 33 bp, Homo sapien
gaccgaaagagaatggaagtagaaatccttcac

SEQ ID NO: 18914 - DNA, 33 bp, Homo sapien
gaccgaaagagaatgggagtagaaatccttcac

SEQ ID NO: 18915 - DNA, 33 bp, Homo sapien
gagttagacaagaaggacagagggtcttagcag

SEQ ID NO: 18916 - DNA, 33 bp, Homo sapien
gagttagacaagaagggcagagggtcttagcag

SEQ ID NO: 18917 - DNA, 33 bp, Homo sapien
ctccagttcatagatacggaaactgagactcat

SEQ ID NO: 18918 - DNA, 33 bp, Homo sapien
ctccagttcatagatatggaaactgagactcat

SEQ ID NO: 18919 - DNA, 33 bp, Homo sapien
taaaagtttttcacaagttctcagaaacttcct

SEQ ID NO: 18920 - DNA, 33 bp, Homo sapien
taaaagtttttcacaatttctcagaaacttcct

SEQ ID NO: 18921 - DNA, 33 bp, Homo sapien
aatgctcacaaatgcaataggcgagccttcgtg

SEQ ID NO: 18922 - DNA, 33 bp, Homo sapien
aatgctcacaaatgcagtaggcgagccttcgtg

SEQ ID NO: 18923 - DNA, 33 bp, Homo sapien
atatggtagacaacacaatcatctttttacaga

SEQ ID NO: 18924 - DNA, 33 bp, Homo sapien
atatggtagacaacacgatcatctttttacaga

SEQ ID NO: 18925 - DNA, 33 bp, Homo sapien
tcatctttttacagaaaggacaactgtgactca

SEQ ID NO: 18926 - DNA, 33 bp, Homo sapien
tcatctttttacagaagggacaactgtgactca

SEQ ID NO: 18927 - DNA, 33 bp, Homo sapien
tagagtaaacatcccaaatgaaagttggccgaa

SEQ ID NO: 18928 - DNA, 33 bp, Homo sapien
tagagtaaacatcccagatgaaagttggccgaa

SEQ ID NO: 18929 - DNA, 33 bp, Homo sapien
atgaaagttggccgaaagatacagaagcaagct

SEQ ID NO: 18930 - DNA, 33 bp, Homo sapien
atgaaagttggccgaaggatacagaagcaagct

SEQ ID NO: 18931 - DNA, 33 bp, Homo sapien
agttctgctgtgctgaggtgaaaaagattaata

SEQ ID NO: 18932 - DNA, 33 bp, Homo sapien
agttctgctgtgctgatgtgaaaaagattaata

SEQ ID NO: 18933 - DNA, 33 bp, Homo sapien
tacctgtctgtatctcactaactctgcccattt

SEQ ID NO: 18934 - DNA, 33 bp, Homo sapien
tacctgtctgtatctcgctaactctgcccattt

SEQ ID NO: 18935 - DNA, 33 bp, Homo sapien
catgagtgcctcatgaagtaaatgggcagagtt

SEQ ID NO: 18936 - DNA, 33 bp, Homo sapien
catgagtgcctcatgaggtaaatgggcagagtt

SEQ ID NO: 18937 - DNA, 33 bp, Homo sapien
accagggaaacttccaaagagaaggtgtcatgg

SEQ ID NO: 18938 - DNA, 33 bp, Homo sapien
accagggaaacttccacagagaaggtgtcatgg

SEQ ID NO: 18939 - DNA, 33 bp, Homo sapien
cagggaggaaaattccaaagagactgctaaagt

SEQ ID NO: 18940 - DNA, 33 bp, Homo sapien
cagggaggaaaattccgaagagactgctaaagt

SEQ ID NO: 18941 - DNA, 33 bp, Homo sapien
gaaagaccacatccctcagccagtactgtgagg

SEQ ID NO: 18942 - DNA, 33 bp, Homo sapien
gaaagaccacatccctgagccagtactgtgagg

SEQ ID NO: 18943 - DNA, 33 bp, Homo sapien
tatgcactgttcttaacattttttcatttgatg

SEQ ID NO: 18944 - DNA, 33 bp, Homo sapien
tatgcactgttcttaatattttttcatttgatg

SEQ ID NO: 18945 - DNA, 33 bp, Homo sapien
gcccctcaaaatctgaccatgtcataaaatcca

SEQ ID NO: 18946 - DNA, 33 bp, Homo sapien
gcccctcaaaatctgatcatgtcataaaatcca

SEQ ID NO: 18947 - DNA, 33 bp, Homo sapien
atacccaaagtattgtaaatcattctgtgataa

SEQ ID NO: 18948 - DNA, 33 bp, Homo sapien
atacccaaagtattgtgaatcattctgtgataa

SEQ ID NO: 18949 - DNA, 33 bp, Homo sapien
caagtcacaatttctccctgaaagcacattgaa

SEQ ID NO: 18950 - DNA, 33 bp, Homo sapien
caagtcacaatttctctctgaaagcacattgaa

SEQ ID NO: 18951 - DNA, 33 bp, Homo sapien
gctacatcttccaaaaaataaattgcagcaatt

SEQ ID NO: 18952 - DNA, 33 bp, Homo sapien
gctacatcttccaaaatataaattgcagcaatt

SEQ ID NO: 18953 - DNA, 33 bp, Homo sapien
tgtttggaaagtgcaaatgattatcatgaggcg

SEQ ID NO: 18954 - DNA, 33 bp, Homo sapien
tgtttggaaagtgcaagtgattatcatgaggcg

SEQ ID NO: 18955 - DNA, 33 bp, Homo sapien
gagtcaggtccggcaaaacacttgaatagagag

SEQ ID NO: 18956 - DNA, 33 bp, Homo sapien
gagtcaggtccggcaagacacttgaatagagag

SEQ ID NO: 18957 - DNA, 33 bp, Homo sapien
tgaagaaggagcaagaactgccaggtagacgag

SEQ ID NO: 18958 - DNA, 33 bp, Homo sapien
tgaagaaggagcaagatctgccaggtagacgag

SEQ ID NO: 18959 - DNA, 33 bp, Homo sapien
tgtcaactgcagctacaccctgttggatcagag

SEQ ID NO: 18960 - DNA, 33 bp, Homo sapien
tgtcaactgcagctacgccctgttggatcagag

SEQ ID NO: 18961 - DNA, 33 bp, Homo sapien
ctttgtatggagtggccatctttgtttacactc

SEQ ID NO: 18962 - DNA, 33 bp, Homo sapien
ctttgtatggagtggctatctttgtttacactc

SEQ ID NO: 18963 - DNA, 33 bp, Homo sapien
ttgcaaagcatggagccgaaggacgtctgaaaa

SEQ ID NO: 18964 - DNA, 33 bp, Homo sapien
ttgcaaagcatggagctgaaggacgtctgaaaa

SEQ ID NO: 18965 - DNA, 33 bp, Homo sapien
tgtgtgttcctcaggacggccactctcttgatt

SEQ ID NO: 18966 - DNA, 33 bp, Homo sapien
tgtgtgttcctcaggatggccactctcttgatt

SEQ ID NO: 18967 - DNA, 33 bp, Homo sapien
tattaactattgtaccacctgtataaacccttc

SEQ ID NO: 18968 - DNA, 33 bp, Homo sapien
tattaactattgtaccgcctgtataaacccttc

SEQ ID NO: 18969 - DNA, 33 bp, Homo sapien
aacaaatcctgtctcacattgggggaattttca

SEQ ID NO: 18970 - DNA, 33 bp, Homo sapien
aacaaatcctgtctcatattgggggaattttca

SEQ ID NO: 18971 - DNA, 33 bp, Homo sapien
aggtgccttgcctcccacagtagaaacctgaga

SEQ ID NO: 18972 - DNA, 33 bp, Homo sapien
aggtgccttgcctcccgcagtagaaacctgaga

SEQ ID NO: 18973 - DNA, 33 bp, Homo sapien
cctgctaatggctttgaaggtgaaacaggaaac

SEQ ID NO: 18974 - DNA, 33 bp, Homo sapien
cctgctaatggctttggaggtgaaacaggaaac

SEQ ID NO: 18975 - DNA, 33 bp, Homo sapien
ctgtcttgcggttgaaatccttgtctactctaa

SEQ ID NO: 18976 - DNA, 33 bp, Homo sapien
ctgtcttgcggttgaagtccttgtctactctaa

SEQ ID NO: 18977 - DNA, 33 bp, Homo sapien
caggttgactctttccaacaccctgagtccatc

SEQ ID NO: 18978 - DNA, 33 bp, Homo sapien
caggttgactctttccgacaccctgagtccatc

SEQ ID NO: 18979 - DNA, 33 bp, Homo sapien
aattttgaaccagaggaaagtgaaagttagcta

SEQ ID NO: 18980 - DNA, 33 bp, Homo sapien
aattttgaaccagagggaagtgaaagttagcta

SEQ ID NO: 18981 - DNA, 33 bp, Homo sapien
taatcttaatggctagacccagaattttttttt

SEQ ID NO: 18982 - DNA, 33 bp, Homo sapien
taatcttaatggctagtcccagaattttttttt

SEQ ID NO: 18983 - DNA, 33 bp, Homo sapien
ccagtcatatgtcaccagctagaagtttttcac

SEQ ID NO: 18984 - DNA, 33 bp, Homo sapien
ccagtcatatgtcaccggctagaagtttttcac

SEQ ID NO: 18985 - DNA, 33 bp, Homo sapien
tgttttctcaataagcactctatcagaagcctt

SEQ ID NO: 18986 - DNA, 33 bp, Homo sapien
tgttttctcaataagcgctctatcagaagcctt

SEQ ID NO: 18987 - DNA, 33 bp, Homo sapien
atgatgaactgatacaactccagccaaaaatgg

SEQ ID NO: 18988 - DNA, 33 bp, Homo sapien
atgatgaactgatacatctccagccaaaaatgg

SEQ ID NO: 18989 - DNA, 33 bp, Homo sapien
gggggaagtgatgagaaagaaggttccaagtgg

SEQ ID NO: 18990 - DNA, 33 bp, Homo sapien
gggggaagtgatgagacagaaggttccaagtgg

SEQ ID NO: 18991 - DNA, 33 bp, Homo sapien
ggccaatgtgaaacagaccactaacataagcac

SEQ ID NO: 18992 - DNA, 33 bp, Homo sapien
ggccaatgtgaaacaggccactaacataagcac

SEQ ID NO: 18993 - DNA, 33 bp, Homo sapien
acatttcagaatcctcccaaatactggaatttc

SEQ ID NO: 18994 - DNA, 33 bp, Homo sapien
acatttcagaatcctctcaaatactggaatttc

SEQ ID NO: 18995 - DNA, 33 bp, Homo sapien
ttgtatgtttcacctcactaaattgtaaactcc

SEQ ID NO: 18996 - DNA, 33 bp, Homo sapien
ttgtatgtttcacctcgctaaattgtaaactcc

SEQ ID NO: 18997 - DNA, 33 bp, Homo sapien
tgttaattccttgcaacgaaagatttagcataa

SEQ ID NO: 18998 - DNA, 33 bp, Homo sapien
tgttaattccttgcaatgaaagatttagcataa

SEQ ID NO: 18999 - DNA, 33 bp, Homo sapien
ttcctctatctcaccccaacactcattttcttc

SEQ ID NO: 19000 - DNA, 33 bp, Homo sapien
ttcctctatctcaccctaacactcattttcttc

SEQ ID NO: 19001 - DNA, 33 bp, Homo sapien
ctgttaaagaccattaacaccttattaagaccc

SEQ ID NO: 19002 - DNA, 33 bp, Homo sapien
ctgttaaagaccattagcaccttattaagaccc

SEQ ID NO: 19003 - DNA, 33 bp, Homo sapien
aaagccttgaaaatagaactgagtttttgctcc

SEQ ID NO: 19004 - DNA, 33 bp, Homo sapien
aaagccttgaaaatagcactgagtttttgctcc

SEQ ID NO: 19005 - DNA, 33 bp, Homo sapien
gtgacttgtcaaaggtcacagggttggtactaa

SEQ ID NO: 19006 - DNA, 33 bp, Homo sapien
gtgacttgtcaaaggttacagggttggtactaa

SEQ ID NO: 19007 - DNA, 33 bp, Homo sapien
cctgttagagagttgtaaaatggactctgagaa

SEQ ID NO: 19008 - DNA, 33 bp, Homo sapien
cctgttagagagttgtcaaatggactctgagaa

SEQ ID NO: 19009 - DNA, 33 bp, Homo sapien
caagagcagtaggcacaaactggagcttaaaaa

SEQ ID NO: 19010 - DNA, 33 bp, Homo sapien
caagagcagtaggcaccaactggagcttaaaaa

SEQ ID NO: 19011 - DNA, 33 bp, Homo sapien
atagctttgagttaaaattctggttctgtcact

SEQ ID NO: 19012 - DNA, 33 bp, Homo sapien
atagctttgagttaaatttctggttctgtcact

SEQ ID NO: 19013 - DNA, 33 bp, Homo sapien
ctcagcctggcttccacgtccagagattatatg

SEQ ID NO: 19014 - DNA, 33 bp, Homo sapien
ctcagcctggcttccatgtccagagattatatg

SEQ ID NO: 19015 - DNA, 33 bp, Homo sapien
cagggatattgcagataagatccaactattgaa

SEQ ID NO: 19016 - DNA, 33 bp, Homo sapien
cagggatattgcagatgagatccaactattgaa

SEQ ID NO: 19017 - DNA, 33 bp, Homo sapien
ccaattcatgctttgaactaatacaatttgaat

SEQ ID NO: 19018 - DNA, 33 bp, Homo sapien
ccaattcatgctttgatctaatacaatttgaat

SEQ ID NO: 19019 - DNA, 33 bp, Homo sapien
agatggtacaatccaccgaaaaagatatgcttc

SEQ ID NO: 19020 - DNA, 33 bp, Homo sapien
agatggtacaatccactgaaaaagatatgcttc

SEQ ID NO: 19021 - DNA, 33 bp, Homo sapien
atacgagcagcagggcaaaagaattttccagtt

SEQ ID NO: 19022 - DNA, 33 bp, Homo sapien
atacgagcagcagggcgaaagaattttccagtt

SEQ ID NO: 19023 - DNA, 33 bp, Homo sapien
gaagcagaggtgctgaagaagctcaaaggagaa

SEQ ID NO: 19024 - DNA, 33 bp, Homo sapien
gaagcagaggtgctgaggaagctcaaaggagaa

SEQ ID NO: 19025 - DNA, 33 bp, Homo sapien
gtgagaacctcagctaaggctgtcaattagaac

SEQ ID NO: 19026 - DNA, 33 bp, Homo sapien
gtgagaacctcagctagggctgtcaattagaac

SEQ ID NO: 19027 - DNA, 33 bp, Homo sapien
caaaaatttcaaattcaaagtcaaataaagccc

SEQ ID NO: 19028 - DNA, 33 bp, Homo sapien
caaaaatttcaaattcgaagtcaaataaagccc

SEQ ID NO: 19029 - DNA, 33 bp, Homo sapien
ggggaatagggaaacaatcttttctcttcagaa

SEQ ID NO: 19030 - DNA, 33 bp, Homo sapien
ggggaatagggaaacagtcttttctcttcagaa

SEQ ID NO: 19031 - DNA, 33 bp, Homo sapien
aaatatcccccacacacagaaaagttcaaagac

SEQ ID NO: 19032 - DNA, 33 bp, Homo sapien
aaatatcccccacacagagaaaagttcaaagac

SEQ ID NO: 19033 - DNA, 33 bp, Homo sapien
ctcatggatttccaacaaagtcaatggcaatag

SEQ ID NO: 19034 - DNA, 33 bp, Homo sapien
ctcatggatttccaaccaagtcaatggcaatag

SEQ ID NO: 19035 - DNA, 33 bp, Homo sapien
agcttcacctggaatacagtgactgtcatccca

SEQ ID NO: 19036 - DNA, 33 bp, Homo sapien
agcttcacctggaatatagtgactgtcatccca

SEQ ID NO: 19037 - DNA, 33 bp, Homo sapien
ataaggactcccatagaaccttgaagatgtgac

SEQ ID NO: 19038 - DNA, 33 bp, Homo sapien
ataaggactcccataggaccttgaagatgtgac

SEQ ID NO: 19039 - DNA, 33 bp, Homo sapien
ttgaatataagagaaccgtagagatggaaatct

SEQ ID NO: 19040 - DNA, 33 bp, Homo sapien
ttgaatataagagaactgtagagatggaaatct

SEQ ID NO: 19041 - DNA, 33 bp, Homo sapien
gaagaactttgcaaacggagaagtgcttttcta

SEQ ID NO: 19042 - DNA, 33 bp, Homo sapien
gaagaactttgcaaactgagaagtgcttttcta

SEQ ID NO: 19043 - DNA, 33 bp, Homo sapien
atgtcatcttctcagaaagccttccgtgttcac

SEQ ID NO: 19044 - DNA, 33 bp, Homo sapien
atgtcatcttctcagagagccttccgtgttcac

SEQ ID NO: 19045 - DNA, 33 bp, Homo sapien
cgtggatgttttgtgacaaatgcaagtatgtag

SEQ ID NO: 19046 - DNA, 33 bp, Homo sapien
cgtggatgttttgtgataaatgcaagtatgtag

SEQ ID NO: 19047 - DNA, 33 bp, Homo sapien
gattaaggttagattcaagcccttgttctatag

SEQ ID NO: 19048 - DNA, 33 bp, Homo sapien
gattaaggttagattcgagcccttgttctatag

SEQ ID NO: 19049 - DNA, 33 bp, Homo sapien
tgcctggcagatgcaaacctaaattagggttca

SEQ ID NO: 19050 - DNA, 33 bp, Homo sapien
tgcctggcagatgcaagcctaaattagggttca

SEQ ID NO: 19051 - DNA, 33 bp, Homo sapien
aaatgttcttcaggaaaacctcttggaagatta

SEQ ID NO: 19052 - DNA, 33 bp, Homo sapien
aaatgttcttcaggaagacctcttggaagatta

SEQ ID NO: 19053 - DNA, 33 bp, Homo sapien
actcagcaggctttaactgaagagttctctcaa

SEQ ID NO: 19054 - DNA, 33 bp, Homo sapien
actcagcaggctttaattgaagagttctctcaa

SEQ ID NO: 19055 - DNA, 33 bp, Homo sapien
gtaatgtctctgtggtcacactgctaattggtg

SEQ ID NO: 19056 - DNA, 33 bp, Homo sapien
gtaatgtctctgtggtgacactgctaattggtg

SEQ ID NO: 19057 - DNA, 33 bp, Homo sapien
tactgcacatgtttgagactctcactctacctg

SEQ ID NO: 19058 - DNA, 33 bp, Homo sapien
tactgcacatgtttgatactctcactctacctg

SEQ ID NO: 19059 - DNA, 33 bp, Homo sapien
catcacaccaatcattaaaaagacaggccagac

SEQ ID NO: 19060 - DNA, 33 bp, Homo sapien
catcacaccaatcattgaaaagacaggccagac

SEQ ID NO: 19061 - DNA, 33 bp, Homo sapien
atcaatgatctgttccagagagtggtgtgtctc

SEQ ID NO: 19062 - DNA, 33 bp, Homo sapien
atcaatgatctgttccggagagtggtgtgtctc

SEQ ID NO: 19063 - DNA, 33 bp, Homo sapien
cctccccactcattgaccttagagttgagtgag

SEQ ID NO: 19064 - DNA, 33 bp, Homo sapien
cctccccactcattgatcttagagttgagtgag

SEQ ID NO: 19065 - DNA, 33 bp, Homo sapien
ctcaagttcaaatgtgcacttcaccagacaagc

SEQ ID NO: 19066 - DNA, 33 bp, Homo sapien
ctcaagttcaaatgtggacttcaccagacaagc

SEQ ID NO: 19067 - DNA, 33 bp, Homo sapien
ttgagaggaaacattcaccgccaaaggacatga

SEQ ID NO: 19068 - DNA, 33 bp, Homo sapien
ttgagaggaaacattcgccgccaaaggacatga

SEQ ID NO: 19069 - DNA, 33 bp, Homo sapien
gatatgaaaacagttccataaatggccactaca

SEQ ID NO: 19070 - DNA, 33 bp, Homo sapien
gatatgaaaacagttcgataaatggccactaca

SEQ ID NO: 19071 - DNA, 33 bp, Homo sapien
aatgtagggaggcaaaaggaaagaacaattaag

SEQ ID NO: 19072 - DNA, 33 bp, Homo sapien
aatgtagggaggcaaacggaaagaacaattaag

SEQ ID NO: 19073 - DNA, 33 bp, Homo sapien
tttactggaggaaagaataagtacaccctgatg

SEQ ID NO: 19074 - DNA, 33 bp, Homo sapien
tttactggaggaaagagtaagtacaccctgatg

SEQ ID NO: 19075 - DNA, 33 bp, Homo sapien
aggagagctcactctaaaacattcattaacata

SEQ ID NO: 19076 - DNA, 33 bp, Homo sapien
aggagagctcactctacaacattcattaacata

SEQ ID NO: 19077 - DNA, 33 bp, Homo sapien
cccaagtgaatttccaaggcttaggagagctca

SEQ ID NO: 19078 - DNA, 33 bp, Homo sapien
cccaagtgaatttccagggcttaggagagctca

SEQ ID NO: 19079 - DNA, 33 bp, Homo sapien
ctgattccatctgttaggggctgcattatgttc

SEQ ID NO: 19080 - DNA, 33 bp, Homo sapien
ctgattccatctgttatgggctgcattatgttc

SEQ ID NO: 19081 - DNA, 33 bp, Homo sapien
tgcagaaatgtagaaacctgattccatctgtta

SEQ ID NO: 19082 - DNA, 33 bp, Homo sapien
tgcagaaatgtagaaatctgattccatctgtta

SEQ ID NO: 19083 - DNA, 33 bp, Homo sapien
gttctaatcctgtctcactgcctggatgacctt

SEQ ID NO: 19084 - DNA, 33 bp, Homo sapien
gttctaatcctgtctcgctgcctggatgacctt

SEQ ID NO: 19085 - DNA, 33 bp, Homo sapien
gagaaatcctgataagacccattgtccccggat

SEQ ID NO: 19086 - DNA, 33 bp, Homo sapien
gagaaatcctgataagtcccattgtccccggat

SEQ ID NO: 19087 - DNA, 33 bp, Homo sapien
caggagcaggtgaacacggccagaatatcacct

SEQ ID NO: 19088 - DNA, 33 bp, Homo sapien
caggagcaggtgaacatggccagaatatcacct

SEQ ID NO: 19089 - DNA, 33 bp, Homo sapien
ctctattcatcgaacacacactttgtgtcacaa

SEQ ID NO: 19090 - DNA, 33 bp, Homo sapien
ctctattcatcgaacagacactttgtgtcacaa

SEQ ID NO: 19091 - DNA, 33 bp, Homo sapien
aatccaactgaaaatgcaaatgtgtgtgggtcc

SEQ ID NO: 19092 - DNA, 33 bp, Homo sapien
aatccaactgaaaatgtaaatgtgtgtgggtcc

SEQ ID NO: 19093 - DNA, 33 bp, Homo sapien
taaagtgaggtcctggaaaatatggaatcaaac

SEQ ID NO: 19094 - DNA, 33 bp, Homo sapien
taaagtgaggtcctgggaaatatggaatcaaac

SEQ ID NO: 19095 - DNA, 33 bp, Homo sapien
ttttttatttccggcagcctgcccaggtgctta

SEQ ID NO: 19096 - DNA, 33 bp, Homo sapien
ttttttatttccggcatcctgcccaggtgctta

SEQ ID NO: 19097 - DNA, 33 bp, Homo sapien
gtactgagttttgaagaatcaatagaatttcac

SEQ ID NO: 19098 - DNA, 33 bp, Homo sapien
gtactgagttttgaaggatcaatagaatttcac

SEQ ID NO: 19099 - DNA, 33 bp, Homo sapien
cacgtgttactgcagagaaattggtgaggggag

SEQ ID NO: 19100 - DNA, 33 bp, Homo sapien
cacgtgttactgcagataaattggtgaggggag

SEQ ID NO: 19101 - DNA, 33 bp, Homo sapien
gatccagattcccttacgccatgctgaacaagg

SEQ ID NO: 19102 - DNA, 33 bp, Homo sapien
gatccagattcccttatgccatgctgaacaagg

SEQ ID NO: 19103 - DNA, 33 bp, Homo sapien
ttcctgcctccatttaccgtctgctaagacctc

SEQ ID NO: 19104 - DNA, 33 bp, Homo sapien
ttcctgcctccatttatcgtctgctaagacctc

SEQ ID NO: 19105 - DNA, 33 bp, Homo sapien
cattttggggctcaaacggacatcaccacttat

SEQ ID NO: 19106 - DNA, 33 bp, Homo sapien
cattttggggctcaaatggacatcaccacttat

SEQ ID NO: 19107 - DNA, 33 bp, Homo sapien
aagtaattactgggcccagagaaagccatgctc

SEQ ID NO: 19108 - DNA, 33 bp, Homo sapien
aagtaattactgggcctagagaaagccatgctc

SEQ ID NO: 19109 - DNA, 33 bp, Homo sapien
agggatgactcaacacaatccatgcccttgagt

SEQ ID NO: 19110 - DNA, 33 bp, Homo sapien
agggatgactcaacacgatccatgcccttgagt

SEQ ID NO: 19111 - DNA, 33 bp, Homo sapien
agaaatgcagaacaacaaaacttgggggataat

SEQ ID NO: 19112 - DNA, 33 bp, Homo sapien
agaaatgcagaacaacgaaacttgggggataat

SEQ ID NO: 19113 - DNA, 33 bp, Homo sapien
cctaccaaagatgtgaactttacagttggactc

SEQ ID NO: 19114 - DNA, 33 bp, Homo sapien
cctaccaaagatgtgagctttacagttggactc

SEQ ID NO: 19115 - DNA, 33 bp, Homo sapien
ctgagccaagcctttacggactccctgttaatt

SEQ ID NO: 19116 - DNA, 33 bp, Homo sapien
ctgagccaagcctttatggactccctgttaatt

SEQ ID NO: 19117 - DNA, 33 bp, Homo sapien
ggaatgccaggaaggaccaaagttctcttctta

SEQ ID NO: 19118 - DNA, 33 bp, Homo sapien
ggaatgccaggaaggagcaaagttctcttctta

SEQ ID NO: 19119 - DNA, 33 bp, Homo sapien
ttggagaaaaatgataagtaagattgagtccct

SEQ ID NO: 19120 - DNA, 33 bp, Homo sapien
ttggagaaaaatgataggtaagattgagtccct

SEQ ID NO: 19121 - DNA, 33 bp, Homo sapien
cctttctccagctatacctgcaggcccgcttca

SEQ ID NO: 19122 - DNA, 33 bp, Homo sapien
cctttctccagctatatctgcaggcccgcttca

SEQ ID NO: 19123 - DNA, 33 bp, Homo sapien
tggagttaagacaaagacagcagggtgtgtggt

SEQ ID NO: 19124 - DNA, 33 bp, Homo sapien
tggagttaagacaaaggcagcagggtgtgtggt

SEQ ID NO: 19125 - DNA, 33 bp, Homo sapien
cctggagatgttagtaccatttcaaattaacca

SEQ ID NO: 19126 - DNA, 33 bp, Homo sapien
cctggagatgttagtagcatttcaaattaacca

SEQ ID NO: 19127 - DNA, 33 bp, Homo sapien
cttttgatactgtcatcatcttcatttttagag

SEQ ID NO: 19128 - DNA, 33 bp, Homo sapien
cttttgatactgtcatgatcttcatttttagag

SEQ ID NO: 19129 - DNA, 33 bp, Homo sapien
gatgggaggagacacaggaactctaaagaagct

SEQ ID NO: 19130 - DNA, 33 bp, Homo sapien
gatgggaggagacacatgaactctaaagaagct

SEQ ID NO: 19131 - DNA, 33 bp, Homo sapien
cgttaagaaactactgccaaatggactgttttt

SEQ ID NO: 19132 - DNA, 33 bp, Homo sapien
cgttaagaaactactggcaaatggactgttttt

SEQ ID NO: 19133 - DNA, 33 bp, Homo sapien
ctttaacatctgaattaaaacaactcctattta

SEQ ID NO: 19134 - DNA, 33 bp, Homo sapien
ctttaacatctgaatttaaacaactcctattta

SEQ ID NO: 19135 - DNA, 33 bp, Homo sapien
atatttcatcctcacaacttttcaaagtggata

SEQ ID NO: 19136 - DNA, 33 bp, Homo sapien
atatttcatcctcacagcttttcaaagtggata

SEQ ID NO: 19137 - DNA, 33 bp, Homo sapien
tagtgaagcccctctaccacgtaaagatgctat

SEQ ID NO: 19138 - DNA, 33 bp, Homo sapien
tagtgaagcccctctatcacgtaaagatgctat

SEQ ID NO: 19139 - DNA, 33 bp, Homo sapien
tcttggctctgctgaaatagtaggcatcagcaa

SEQ ID NO: 19140 - DNA, 33 bp, Homo sapien
tcttggctctgctgaagtagtaggcatcagcaa

SEQ ID NO: 19141 - DNA, 33 bp, Homo sapien
cagcccatgttaatcaagcgaacaccagagaaa

SEQ ID NO: 19142 - DNA, 33 bp, Homo sapien
cagcccatgttaatcacgcgaacaccagagaaa

SEQ ID NO: 19143 - DNA, 33 bp, Homo sapien
ttcttagcactccacactggtttaaataaaatg

SEQ ID NO: 19144 - DNA, 33 bp, Homo sapien
ttcttagcactccacattggtttaaataaaatg

SEQ ID NO: 19145 - DNA, 33 bp, Homo sapien
atgatattggttaataagctctgctcaatctct

SEQ ID NO: 19146 - DNA, 33 bp, Homo sapien
atgatattggttaatacgctctgctcaatctct

SEQ ID NO: 19147 - DNA, 33 bp, Homo sapien
aaggaagaatggagaaaagagagcaaattcaga

SEQ ID NO: 19148 - DNA, 33 bp, Homo sapien
aaggaagaatggagaagagagagcaaattcaga

SEQ ID NO: 19149 - DNA, 33 bp, Homo sapien
aaaggtttggagttcacgtctatcctctacgga

SEQ ID NO: 19150 - DNA, 33 bp, Homo sapien
aaaggtttggagttcatgtctatcctctacgga

SEQ ID NO: 19151 - DNA, 33 bp, Homo sapien
gtgtttctgaatcccacgcttttctccactact

SEQ ID NO: 19152 - DNA, 33 bp, Homo sapien
gtgtttctgaatcccatgcttttctccactact

SEQ ID NO: 19153 - DNA, 33 bp, Homo sapien
ctgaataatgagttgagctataaatgcactaaa

SEQ ID NO: 19154 - DNA, 33 bp, Homo sapien
ctgaataatgagttgatctataaatgcactaaa

SEQ ID NO: 19155 - DNA, 33 bp, Homo sapien
ggccaacgtggaacctaaagcttctgactctaa

SEQ ID NO: 19156 - DNA, 33 bp, Homo sapien
ggccaacgtggaacctgaagcttctgactctaa

SEQ ID NO: 19157 - DNA, 33 bp, Homo sapien
gaatacatggtcctgacgccttattgctttttg

SEQ ID NO: 19158 - DNA, 33 bp, Homo sapien
gaatacatggtcctgatgccttattgctttttg

SEQ ID NO: 19159 - DNA, 33 bp, Homo sapien
atcatgaaatgaactaactcagagtccacaagg

SEQ ID NO: 19160 - DNA, 33 bp, Homo sapien
atcatgaaatgaactatctcagagtccacaagg

SEQ ID NO: 19161 - DNA, 33 bp, Homo sapien
gccactgtgcccaaccaagatacagatctatgt

SEQ ID NO: 19162 - DNA, 33 bp, Homo sapien
gccactgtgcccaaccgagatacagatctatgt

SEQ ID NO: 19163 - DNA, 33 bp, Homo sapien
ccatatcagtgtgtcacgttttttgtttttttt

SEQ ID NO: 19164 - DNA, 33 bp, Homo sapien
ccatatcagtgtgtcaggttttttgtttttttt

SEQ ID NO: 19165 - DNA, 33 bp, Homo sapien
acaaccctgtatcaagcaaggctatcaatgtca

SEQ ID NO: 19166 - DNA, 33 bp, Homo sapien
acaaccctgtatcaagtaaggctatcaatgtca

SEQ ID NO: 19167 - DNA, 33 bp, Homo sapien
cattctggtctccctaaaagaaattgccacagc

SEQ ID NO: 19168 - DNA, 33 bp, Homo sapien
cattctggtctccctataagaaattgccacagc

SEQ ID NO: 19169 - DNA, 33 bp, Homo sapien
aaacccacagaagagcagagagatattcaagta

SEQ ID NO: 19170 - DNA, 33 bp, Homo sapien
aaacccacagaagagcggagagatattcaagta

SEQ ID NO: 19171 - DNA, 33 bp, Homo sapien
tgggcttaacagattacatactacagaaggaaa

SEQ ID NO: 19172 - DNA, 33 bp, Homo sapien
tgggcttaacagattagatactacagaaggaaa

SEQ ID NO: 19173 - DNA, 33 bp, Homo sapien
gtttattgccaatagaactgcacaacaagaaat

SEQ ID NO: 19174 - DNA, 33 bp, Homo sapien
gtttattgccaatagacctgcacaacaagaaat

SEQ ID NO: 19175 - DNA, 33 bp, Homo sapien
aatagttagaattgcccagctcaaaaacactta

SEQ ID NO: 19176 - DNA, 33 bp, Homo sapien
aatagttagaattgcctagctcaaaaacactta

SEQ ID NO: 19177 - DNA, 33 bp, Homo sapien
atacacatacaagaaaataatatccatgaagac

SEQ ID NO: 19178 - DNA, 33 bp, Homo sapien
atacacatacaagaaagtaatatccatgaagac

SEQ ID NO: 19179 - DNA, 33 bp, Homo sapien
gtcaggagatcgccacaaacatggtgaaaccct

SEQ ID NO: 19180 - DNA, 33 bp, Homo sapien
gtcaggagatcgccacgaacatggtgaaaccct

SEQ ID NO: 19181 - DNA, 33 bp, Homo sapien
ctgcaacagaggcagaatcctcatgaagaactt

SEQ ID NO: 19182 - DNA, 33 bp, Homo sapien
ctgcaacagaggcagagtcctcatgaagaactt

SEQ ID NO: 19183 - DNA, 33 bp, Homo sapien
agaaatgaaaaatcagaaagcataatgacaagt

SEQ ID NO: 19184 - DNA, 33 bp, Homo sapien
agaaatgaaaaatcagtaagcataatgacaagt

SEQ ID NO: 19185 - DNA, 33 bp, Homo sapien
gtaaacagataagtacaatgatggatttaatta

SEQ ID NO: 19186 - DNA, 33 bp, Homo sapien
gtaaacagataagtacgatgatggatttaatta

SEQ ID NO: 19187 - DNA, 33 bp, Homo sapien
acctgatcactcttgacgtctaaccaaatttct

SEQ ID NO: 19188 - DNA, 33 bp, Homo sapien
acctgatcactcttgatgtctaaccaaatttct

SEQ ID NO: 19189 - DNA, 33 bp, Homo sapien
ttgttttgtttcaccacgggcagaggtgaaagg

SEQ ID NO: 19190 - DNA, 33 bp, Homo sapien
ttgttttgtttcaccatgggcagaggtgaaagg

SEQ ID NO: 19191 - DNA, 33 bp, Homo sapien
tggagtacaataaaaaagttaagaacatttgga

SEQ ID NO: 19192 - DNA, 33 bp, Homo sapien
tggagtacaataaaaacgttaagaacatttgga

SEQ ID NO: 19193 - DNA, 33 bp, Homo sapien
atactggcatcttttacgtaaattctcaataaa

SEQ ID NO: 19194 - DNA, 33 bp, Homo sapien
atactggcatcttttatgtaaattctcaataaa

SEQ ID NO: 19195 - DNA, 33 bp, Homo sapien
tctaaattattttgaacgacaaatgactatatg

SEQ ID NO: 19196 - DNA, 33 bp, Homo sapien
tctaaattattttgaatgacaaatgactatatg

SEQ ID NO: 19197 - DNA, 33 bp, Homo sapien
tacaatgttcccctcacgaccctaaacagtctg

SEQ ID NO: 19198 - DNA, 33 bp, Homo sapien
tacaatgttcccctcatgaccctaaacagtctg

SEQ ID NO: 19199 - DNA, 33 bp, Homo sapien
tggaagagagagaaaagtttagcttcaggtgac

SEQ ID NO: 19200 - DNA, 33 bp, Homo sapien
tggaagagagagaaaattttagcttcaggtgac

SEQ ID NO: 19201 - DNA, 33 bp, Homo sapien
gattagagtgagagataaggtcagagacataaa

SEQ ID NO: 19202 - DNA, 33 bp, Homo sapien
gattagagtgagagatgaggtcagagacataaa

SEQ ID NO: 19203 - DNA, 33 bp, Homo sapien
tttttaaagcaaagaacagtttaacatatatat

SEQ ID NO: 19204 - DNA, 33 bp, Homo sapien
tttttaaagcaaagaagagtttaacatatatat

SEQ ID NO: 19205 - DNA, 33 bp, Homo sapien
aatatttctgcttagcaacaaagacaaacttgt

SEQ ID NO: 19206 - DNA, 33 bp, Homo sapien
aatatttctgcttagcgacaaagacaaacttgt

SEQ ID NO: 19207 - DNA, 33 bp, Homo sapien
gcaatctgttggtaagacacatcctatgtttgg

SEQ ID NO: 19208 - DNA, 33 bp, Homo sapien
gcaatctgttggtaagtcacatcctatgtttgg

SEQ ID NO: 19209 - DNA, 33 bp, Homo sapien
atgcagcttcagtaaacgggacaaagatagagg

SEQ ID NO: 19210 - DNA, 33 bp, Homo sapien
atgcagcttcagtaaaggggacaaagatagagg

SEQ ID NO: 19211 - DNA, 33 bp, Homo sapien
aagcatggtttatataagcactgactttccaaa

SEQ ID NO: 19212 - DNA, 33 bp, Homo sapien
aagcatggtttatatatgcactgactttccaaa

SEQ ID NO: 19213 - DNA, 33 bp, Homo sapien
tttaatctttcagttgaatttcttcccaaatag

SEQ ID NO: 19214 - DNA, 33 bp, Homo sapien
tttaatctttcagttggatttcttcccaaatag

SEQ ID NO: 19215 - DNA, 33 bp, Homo sapien
atgatggggttgtgtcccaataaactcattgca

SEQ ID NO: 19216 - DNA, 33 bp, Homo sapien
atgatggggttgtgtctcaataaactcattgca

SEQ ID NO: 19217 - DNA, 33 bp, Homo sapien
agggggaccctggagacgctttgcaggcaatag

SEQ ID NO: 19218 - DNA, 33 bp, Homo sapien
agggggaccctggagatgctttgcaggcaatag

SEQ ID NO: 19219 - DNA, 33 bp, Homo sapien
aaatgtcttcctatacctaccactacttgaggc

SEQ ID NO: 19220 - DNA, 33 bp, Homo sapien
aaatgtcttcctatacttaccactacttgaggc

SEQ ID NO: 19221 - DNA, 33 bp, Homo sapien
ataatttgaaactacactggacagatggctttg

SEQ ID NO: 19222 - DNA, 33 bp, Homo sapien
ataatttgaaactacagtggacagatggctttg

SEQ ID NO: 19223 - DNA, 33 bp, Homo sapien
agcttttgcaagtacaagaaaggcatgacctga

SEQ ID NO: 19224 - DNA, 33 bp, Homo sapien
agcttttgcaagtacaggaaaggcatgacctga

SEQ ID NO: 19225 - DNA, 33 bp, Homo sapien
tagacttttcactttaccttccatgacttttat

SEQ ID NO: 19226 - DNA, 33 bp, Homo sapien
tagacttttcactttatcttccatgacttttat

SEQ ID NO: 19227 - DNA, 33 bp, Homo sapien
tcaccatttgcacatgaaagtaagtacattttc

SEQ ID NO: 19228 - DNA, 33 bp, Homo sapien
tcaccatttgcacatggaagtaagtacattttc

SEQ ID NO: 19229 - DNA, 33 bp, Homo sapien
atcactgttgcttccaatcaagggtaccgacta

SEQ ID NO: 19230 - DNA, 33 bp, Homo sapien
atcactgttgcttccagtcaagggtaccgacta

SEQ ID NO: 19231 - DNA, 33 bp, Homo sapien
tgatgatgtgagcctaaacaacaggagctagta

SEQ ID NO: 19232 - DNA, 33 bp, Homo sapien
tgatgatgtgagcctagacaacaggagctagta

SEQ ID NO: 19233 - DNA, 33 bp, Homo sapien
aacaaacatttgctgaatacctatcatataata

SEQ ID NO: 19234 - DNA, 33 bp, Homo sapien
aacaaacatttgctgagtacctatcatataata

SEQ ID NO: 19235 - DNA, 33 bp, Homo sapien
aactcaggataatccactccttatgtctattaa

SEQ ID NO: 19236 - DNA, 33 bp, Homo sapien
aactcaggataatccattccttatgtctattaa

SEQ ID NO: 19237 - DNA, 33 bp, Homo sapien
attgaaaaagagcagaccttgtgatttttcatg

SEQ ID NO: 19238 - DNA, 33 bp, Homo sapien
attgaaaaagagcagagcttgtgatttttcatg

SEQ ID NO: 19239 - DNA, 33 bp, Homo sapien
tagttcccttcacaccaaactaccacaagtcag

SEQ ID NO: 19240 - DNA, 33 bp, Homo sapien
tagttcccttcacaccgaactaccacaagtcag

SEQ ID NO: 19241 - DNA, 33 bp, Homo sapien
ttcttctgcaaaggctcaagagcatctcaaaag

SEQ ID NO: 19242 - DNA, 33 bp, Homo sapien
ttcttctgcaaaggcttaagagcatctcaaaag

SEQ ID NO: 19243 - DNA, 33 bp, Homo sapien
tgtctgctagtggtataaaagagaagctctcag

SEQ ID NO: 19244 - DNA, 33 bp, Homo sapien
tgtctgctagtggtatgaaagagaagctctcag

SEQ ID NO: 19245 - DNA, 33 bp, Homo sapien
aatgaattaaaaattaaaagatccagggagtat

SEQ ID NO: 19246 - DNA, 33 bp, Homo sapien
aatgaattaaaaattagaagatccagggagtat

SEQ ID NO: 19247 - DNA, 33 bp, Homo sapien
caataaatgttggctgaagaatagaatggactt

SEQ ID NO: 19248 - DNA, 33 bp, Homo sapien
caataaatgttggctggagaatagaatggactt

SEQ ID NO: 19249 - DNA, 33 bp, Homo sapien
gcttataatgaccttaccaccaacatcctctgt

SEQ ID NO: 19250 - DNA, 33 bp, Homo sapien
gcttataatgaccttatcaccaacatcctctgt

SEQ ID NO: 19251 - DNA, 33 bp, Homo sapien
ttaatgaggattcaaacaacactttacctacaa

SEQ ID NO: 19252 - DNA, 33 bp, Homo sapien
ttaatgaggattcaaagaacactttacctacaa

SEQ ID NO: 19253 - DNA, 33 bp, Homo sapien
taagctgaaactacctaaatgttctgagtctga

SEQ ID NO: 19254 - DNA, 33 bp, Homo sapien
taagctgaaactacctgaatgttctgagtctga

SEQ ID NO: 19255 - DNA, 33 bp, Homo sapien
atttttgaagagactaaagttctgagcatagat

SEQ ID NO: 19256 - DNA, 33 bp, Homo sapien
atttttgaagagactacagttctgagcatagat

SEQ ID NO: 19257 - DNA, 33 bp, Homo sapien
ctgtgggtggagcaataaggaagctttccctcc

SEQ ID NO: 19258 - DNA, 33 bp, Homo sapien
ctgtgggtggagcaattaggaagctttccctcc

SEQ ID NO: 19259 - DNA, 33 bp, Homo sapien
ctcaggccaaaacttacgagccatgctctattt

SEQ ID NO: 19260 - DNA, 33 bp, Homo sapien
ctcaggccaaaacttatgagccatgctctattt

SEQ ID NO: 19261 - DNA, 33 bp, Homo sapien
cctagctcgacttctgacaagctgcatgaattt

SEQ ID NO: 19262 - DNA, 33 bp, Homo sapien
cctagctcgacttctggcaagctgcatgaattt

SEQ ID NO: 19263 - DNA, 33 bp, Homo sapien
gagaaacttgatcttccctctaagtgctttata

SEQ ID NO: 19264 - DNA, 33 bp, Homo sapien
gagaaacttgatcttcgctctaagtgctttata

SEQ ID NO: 19265 - DNA, 33 bp, Homo sapien
tgtcaaacagtagcaggattagggccattataa

SEQ ID NO: 19266 - DNA, 33 bp, Homo sapien
tgtcaaacagtagcagtattagggccattataa

SEQ ID NO: 19267 - DNA, 33 bp, Homo sapien
agcctctaaaagttgcaagcaggagaacacagt

SEQ ID NO: 19268 - DNA, 33 bp, Homo sapien
agcctctaaaagttgcgagcaggagaacacagt

SEQ ID NO: 19269 - DNA, 33 bp, Homo sapien
gcagctagagtaaaaaatgagttgagcagaaga

SEQ ID NO: 19270 - DNA, 33 bp, Homo sapien
gcagctagagtaaaaattgagttgagcagaaga

SEQ ID NO: 19271 - DNA, 33 bp, Homo sapien
ttaatttcatgccaataatgcatctaaagcgca

SEQ ID NO: 19272 - DNA, 33 bp, Homo sapien
ttaatttcatgccaatgatgcatctaaagcgca

SEQ ID NO: 19273 - DNA, 33 bp, Homo sapien
accccatttgtttgcaatgaatagttatctccc

SEQ ID NO: 19274 - DNA, 33 bp, Homo sapien
accccatttgtttgcagtgaatagttatctccc

SEQ ID NO: 19275 - DNA, 33 bp, Homo sapien
tcttaaggtgaaatcccacctctccgaattctg

SEQ ID NO: 19276 - DNA, 33 bp, Homo sapien
tcttaaggtgaaatcctacctctccgaattctg

SEQ ID NO: 19277 - DNA, 33 bp, Homo sapien
aactatcttcaacaaaatatcattatcgtgggt

SEQ ID NO: 19278 - DNA, 33 bp, Homo sapien
aactatcttcaacaaagtatcattatcgtgggt

SEQ ID NO: 19279 - DNA, 33 bp, Homo sapien
ttagcgtgcttgtaagaaaaggaaactgactta

SEQ ID NO: 19280 - DNA, 33 bp, Homo sapien
ttagcgtgcttgtaaggaaaggaaactgactta

SEQ ID NO: 19281 - DNA, 33 bp, Homo sapien
ctcagaggagggagataaagtcataccaacatg

SEQ ID NO: 19282 - DNA, 33 bp, Homo sapien
ctcagaggagggagatgaagtcataccaacatg

SEQ ID NO: 19283 - DNA, 33 bp, Homo sapien
ttccctgccccttggaaggctgagtgctgttgg

SEQ ID NO: 19284 - DNA, 33 bp, Homo sapien
ttccctgccccttggatggctgagtgctgttgg

SEQ ID NO: 19285 - DNA, 33 bp, Homo sapien
agagaagccagcgggcccttcaacggaggatct

SEQ ID NO: 19286 - DNA, 33 bp, Homo sapien
agagaagccagcgggcgcttcaacggaggatct

SEQ ID NO: 19287 - DNA, 33 bp, Homo sapien
tcattgacacaggccaactcctttcccaagagc

SEQ ID NO: 19288 - DNA, 33 bp, Homo sapien
tcattgacacaggccacctcctttcccaagagc

SEQ ID NO: 19289 - DNA, 33 bp, Homo sapien
ctctaggagacaatggaaaacaggatctcattg

SEQ ID NO: 19290 - DNA, 33 bp, Homo sapien
ctctaggagacaatgggaaacaggatctcattg

SEQ ID NO: 19291 - DNA, 33 bp, Homo sapien
ctgttgcttgtttataacactcttctctagacc

SEQ ID NO: 19292 - DNA, 33 bp, Homo sapien
ctgttgcttgtttatagcactcttctctagacc

SEQ ID NO: 19293 - DNA, 33 bp, Homo sapien
ttcctgaatggatgaagagacatggatgtgggc

SEQ ID NO: 19294 - DNA, 33 bp, Homo sapien
ttcctgaatggatgaatagacatggatgtgggc

SEQ ID NO: 19295 - DNA, 33 bp, Homo sapien
tacattcaggaatgaccggacttcatgactgtc

SEQ ID NO: 19296 - DNA, 33 bp, Homo sapien
tacattcaggaatgactggacttcatgactgtc

SEQ ID NO: 19297 - DNA, 33 bp, Homo sapien
tagtttgaggtatctacgaaacacccaagggag

SEQ ID NO: 19298 - DNA, 33 bp, Homo sapien
tagtttgaggtatctatgaaacacccaagggag

SEQ ID NO: 19299 - DNA, 33 bp, Homo sapien
caagtgcagtggactacgcctcactcaacagcg

SEQ ID NO: 19300 - DNA, 33 bp, Homo sapien
caagtgcagtggactatgcctcactcaacagcg

SEQ ID NO: 19301 - DNA, 33 bp, Homo sapien
catttgaggaagcaaactgttggcagaaagaga

SEQ ID NO: 19302 - DNA, 33 bp, Homo sapien
catttgaggaagcaaattgttggcagaaagaga

SEQ ID NO: 19303 - DNA, 33 bp, Homo sapien
ctctctgggcattcaaacagcctcactttctgc

SEQ ID NO: 19304 - DNA, 33 bp, Homo sapien
ctctctgggcattcaaccagcctcactttctgc

SEQ ID NO: 19305 - DNA, 33 bp, Homo sapien
ccaagttgtgataacacaaatatctctgaacat

SEQ ID NO: 19306 - DNA, 33 bp, Homo sapien
ccaagttgtgataacataaatatctctgaacat

SEQ ID NO: 19307 - DNA, 33 bp, Homo sapien
tacggatgagaaaggacggaagttggtagaaag

SEQ ID NO: 19308 - DNA, 33 bp, Homo sapien
tacggatgagaaaggatggaagttggtagaaag

SEQ ID NO: 19309 - DNA, 33 bp, Homo sapien
atgacttgtatgcttaagaaaatgtgtttctga

SEQ ID NO: 19310 - DNA, 33 bp, Homo sapien
atgacttgtatgcttaggaaaatgtgtttctga

SEQ ID NO: 19311 - DNA, 33 bp, Homo sapien
ctcagtttaaatgccacctttacagaaaattcc

SEQ ID NO: 19312 - DNA, 33 bp, Homo sapien
ctcagtttaaatgccatctttacagaaaattcc

SEQ ID NO: 19313 - DNA, 33 bp, Homo sapien
aaccttaggcaccacaatgagaaatttggaatt

SEQ ID NO: 19314 - DNA, 33 bp, Homo sapien
aaccttaggcaccacagtgagaaatttggaatt

SEQ ID NO: 19315 - DNA, 33 bp, Homo sapien
tgctcaataacatattaaaggttcagagagttt

SEQ ID NO: 19316 - DNA, 33 bp, Homo sapien
tgctcaataacatattgaaggttcagagagttt

SEQ ID NO: 19317 - DNA, 33 bp, Homo sapien
tcaaagagtttattcaagttaggagacaagacc

SEQ ID NO: 19318 - DNA, 33 bp, Homo sapien
tcaaagagtttattcacgttaggagacaagacc

SEQ ID NO: 19319 - DNA, 33 bp, Homo sapien
cctgtgcttttgtttcaccaaaggcagctcaca

SEQ ID NO: 19320 - DNA, 33 bp, Homo sapien
cctgtgcttttgtttctccaaaggcagctcaca

SEQ ID NO: 19321 - DNA, 33 bp, Homo sapien
tctgtatcaggcaagacggactaagtgctttgg

SEQ ID NO: 19322 - DNA, 33 bp, Homo sapien
tctgtatcaggcaagatggactaagtgctttgg

SEQ ID NO: 19323 - DNA, 33 bp, Homo sapien
attttttatggttacccggagcatatagggaaa

SEQ ID NO: 19324 - DNA, 33 bp, Homo sapien
attttttatggttacctggagcatatagggaaa

SEQ ID NO: 19325 - DNA, 33 bp, Homo sapien
accatttaggagctgaggcagtaacaagggaaa

SEQ ID NO: 19326 - DNA, 33 bp, Homo sapien
accatttaggagctgatgcagtaacaagggaaa

SEQ ID NO: 19327 - DNA, 33 bp, Homo sapien
ctctctgaaaaggtgacgcttaaggaggcccaa

SEQ ID NO: 19328 - DNA, 33 bp, Homo sapien
ctctctgaaaaggtgatgcttaaggaggcccaa

SEQ ID NO: 19329 - DNA, 33 bp, Homo sapien
gacaataaacaaataaatctatgagtatggggg

SEQ ID NO: 19330 - DNA, 33 bp, Homo sapien
gacaataaacaaataagtctatgagtatggggg

SEQ ID NO: 19331 - DNA, 33 bp, Homo sapien
cttctgaatgttagagcctagattaaaaaaaaa

SEQ ID NO: 19332 - DNA, 33 bp, Homo sapien
cttctgaatgttagagtctagattaaaaaaaaa

SEQ ID NO: 19333 - DNA, 33 bp, Homo sapien
taagtggcagggtccacgtttccaaccactgtg

SEQ ID NO: 19334 - DNA, 33 bp, Homo sapien
taagtggcagggtccatgtttccaaccactgtg

SEQ ID NO: 19335 - DNA, 33 bp, Homo sapien
ttactcatttttttcactcatcaatcatttatt

SEQ ID NO: 19336 - DNA, 33 bp, Homo sapien
ttactcatttttttcattcatcaatcatttatt

SEQ ID NO: 19337 - DNA, 33 bp, Homo sapien
tttggaggtggcaaaactggcaagtgtttagta

SEQ ID NO: 19338 - DNA, 33 bp, Homo sapien
tttggaggtggcaaaattggcaagtgtttagta

SEQ ID NO: 19339 - DNA, 33 bp, Homo sapien
gatcagactgcatagacgctaaataccccaaaa

SEQ ID NO: 19340 - DNA, 33 bp, Homo sapien
gatcagactgcatagatgctaaataccccaaaa

SEQ ID NO: 19341 - DNA, 33 bp, Homo sapien
attcacaaactctaagcacttgctataaataag

SEQ ID NO: 19342 - DNA, 33 bp, Homo sapien
attcacaaactctaagtacttgctataaataag

SEQ ID NO: 19343 - DNA, 33 bp, Homo sapien
tgggacgttagagcttaaaaaggtattggcagt

SEQ ID NO: 19344 - DNA, 33 bp, Homo sapien
tgggacgttagagcttgaaaaggtattggcagt

SEQ ID NO: 19345 - DNA, 33 bp, Homo sapien
attgcctcgactgagaagtagtagatgaagcac

SEQ ID NO: 19346 - DNA, 33 bp, Homo sapien
attgcctcgactgagaggtagtagatgaagcac

SEQ ID NO: 19347 - DNA, 33 bp, Homo sapien
atgcaacccattccagacatgaccgtagttcag

SEQ ID NO: 19348 - DNA, 33 bp, Homo sapien
atgcaacccattccaggcatgaccgtagttcag

SEQ ID NO: 19349 - DNA, 33 bp, Homo sapien
aataaaatccttgacaagtagtgttgttgtcat

SEQ ID NO: 19350 - DNA, 33 bp, Homo sapien
aataaaatccttgacaggtagtgttgttgtcat

SEQ ID NO: 19351 - DNA, 33 bp, Homo sapien
tattaattcctgcattgaaggctgacatttaaa

SEQ ID NO: 19352 - DNA, 33 bp, Homo sapien
tattaattcctgcatttaaggctgacatttaaa

SEQ ID NO: 19353 - DNA, 33 bp, Homo sapien
ctaaatgtggtggagaaggcagatgagttggca

SEQ ID NO: 19354 - DNA, 33 bp, Homo sapien
ctaaatgtggtggagagggcagatgagttggca

SEQ ID NO: 19355 - DNA, 33 bp, Homo sapien
acaagaatcacctactcaactctgaaacctgtg

SEQ ID NO: 19356 - DNA, 33 bp, Homo sapien
acaagaatcacctacttaactctgaaacctgtg

SEQ ID NO: 19357 - DNA, 33 bp, Homo sapien
tgcccctctctaaacccgatcttcattattatt

SEQ ID NO: 19358 - DNA, 33 bp, Homo sapien
tgcccctctctaaacctgatcttcattattatt

SEQ ID NO: 19359 - DNA, 33 bp, Homo sapien
aacaaaagtcaagagcccaggataagattcttc

SEQ ID NO: 19360 - DNA, 33 bp, Homo sapien
aacaaaagtcaagagctcaggataagattcttc

SEQ ID NO: 19361 - DNA, 33 bp, Homo sapien
tgtcagtatccggtgaagtgtggcaccaagaac

SEQ ID NO: 19362 - DNA, 33 bp, Homo sapien
tgtcagtatccggtgaggtgtggcaccaagaac

SEQ ID NO: 19363 - DNA, 33 bp, Homo sapien
tgaggctgtcttgcccaaccatcccttggaaga

SEQ ID NO: 19364 - DNA, 33 bp, Homo sapien
tgaggctgtcttgcccgaccatcccttggaaga

SEQ ID NO: 19365 - DNA, 33 bp, Homo sapien
ggtgagtgaaagccaaagaccttatgaaggagc

SEQ ID NO: 19366 - DNA, 33 bp, Homo sapien
ggtgagtgaaagccaatgaccttatgaaggagc

SEQ ID NO: 19367 - DNA, 33 bp, Homo sapien
ttatgaaggagcatgcagagaatacaaaccaag

SEQ ID NO: 19368 - DNA, 33 bp, Homo sapien
ttatgaaggagcatgcggagaatacaaaccaag

SEQ ID NO: 19369 - DNA, 33 bp, Homo sapien
tgttaggccagattccaatagtgaggtattcag

SEQ ID NO: 19370 - DNA, 33 bp, Homo sapien
tgttaggccagattccgatagtgaggtattcag

SEQ ID NO: 19371 - DNA, 33 bp, Homo sapien
taatggcaacacattaccatagtgcatgttagg

SEQ ID NO: 19372 - DNA, 33 bp, Homo sapien
taatggcaacacattagcatagtgcatgttagg

SEQ ID NO: 19373 - DNA, 33 bp, Homo sapien
cgtggggaagttcagcccacaaataagaatata

SEQ ID NO: 19374 - DNA, 33 bp, Homo sapien
cgtggggaagttcagctcacaaataagaatata

SEQ ID NO: 19375 - DNA, 33 bp, Homo sapien
caaacaagggcccagaaccatcagctgaattgc

SEQ ID NO: 19376 - DNA, 33 bp, Homo sapien
caaacaagggcccagacccatcagctgaattgc

SEQ ID NO: 19377 - DNA, 33 bp, Homo sapien
caatcacttccatcacaatttatcatgtgtcca

SEQ ID NO: 19378 - DNA, 33 bp, Homo sapien
caatcacttccatcacgatttatcatgtgtcca

SEQ ID NO: 19379 - DNA, 33 bp, Homo sapien
aaggtatcattccaaacgctttatatgcctcct

SEQ ID NO: 19380 - DNA, 33 bp, Homo sapien
aaggtatcattccaaatgctttatatgcctcct

SEQ ID NO: 19381 - DNA, 33 bp, Homo sapien
gatacatcaacccaaaatacaatgcacaaagag

SEQ ID NO: 19382 - DNA, 33 bp, Homo sapien
gatacatcaacccaaagtacaatgcacaaagag

SEQ ID NO: 19383 - DNA, 33 bp, Homo sapien
aggctgccattaaccaaaaaggcattttcctac

SEQ ID NO: 19384 - DNA, 33 bp, Homo sapien
aggctgccattaaccacaaaggcattttcctac

SEQ ID NO: 19385 - DNA, 33 bp, Homo sapien
aaatcaaagaacagacaaatgtgctatattaag

SEQ ID NO: 19386 - DNA, 33 bp, Homo sapien
aaatcaaagaacagacgaatgtgctatattaag

SEQ ID NO: 19387 - DNA, 33 bp, Homo sapien
ggcactgagaatgtcaaatgccaagcatgtgat

SEQ ID NO: 19388 - DNA, 33 bp, Homo sapien
ggcactgagaatgtcagatgccaagcatgtgat

SEQ ID NO: 19389 - DNA, 33 bp, Homo sapien
gatagtgcctggcccaatgctaacatcctataa

SEQ ID NO: 19390 - DNA, 33 bp, Homo sapien
gatagtgcctggcccagtgctaacatcctataa

SEQ ID NO: 19391 - DNA, 33 bp, Homo sapien
tcttgctccactgtcagatttcaaagtccagtc

SEQ ID NO: 19392 - DNA, 33 bp, Homo sapien
tcttgctccactgtcatatttcaaagtccagtc

SEQ ID NO: 19393 - DNA, 33 bp, Homo sapien
ctatctggatacaggacgactaattaaaacagg

SEQ ID NO: 19394 - DNA, 33 bp, Homo sapien
ctatctggatacaggatgactaattaaaacagg

SEQ ID NO: 19395 - DNA, 33 bp, Homo sapien
actcaaatgggaaaacagcatccacttaaaagg

SEQ ID NO: 19396 - DNA, 33 bp, Homo sapien
actcaaatgggaaaacggcatccacttaaaagg

SEQ ID NO: 19397 - DNA, 33 bp, Homo sapien
tgctgtaaaatgcagacgtcaaaattaaaaatt

SEQ ID NO: 19398 - DNA, 33 bp, Homo sapien
tgctgtaaaatgcagatgtcaaaattaaaaatt

SEQ ID NO: 19399 - DNA, 33 bp, Homo sapien
tgaatcaacatggataacttcagaaatgcaatg

SEQ ID NO: 19400 - DNA, 33 bp, Homo sapien
tgaatcaacatggatagcttcagaaatgcaatg

SEQ ID NO: 19401 - DNA, 33 bp, Homo sapien
cactcctgtgggaagagggactgtaattccatt

SEQ ID NO: 19402 - DNA, 33 bp, Homo sapien
cactcctgtgggaagatggactgtaattccatt

SEQ ID NO: 19403 - DNA, 33 bp, Homo sapien
ctgtgcaaaggtggaactatgatgactgaggtt

SEQ ID NO: 19404 - DNA, 33 bp, Homo sapien
ctgtgcaaaggtggaattatgatgactgaggtt

SEQ ID NO: 19405 - DNA, 33 bp, Homo sapien
gtgactcctttctagtcaatgcttgccagtttt

SEQ ID NO: 19406 - DNA, 33 bp, Homo sapien
gtgactcctttctagtgaatgcttgccagtttt

SEQ ID NO: 19407 - DNA, 33 bp, Homo sapien
taggatgtgtactaataacggttggtcagcact

SEQ ID NO: 19408 - DNA, 33 bp, Homo sapien
taggatgtgtactaatcacggttggtcagcact

SEQ ID NO: 19409 - DNA, 33 bp, Homo sapien
cctgctgtttgtgaaccatgtgtaggtagccag

SEQ ID NO: 19410 - DNA, 33 bp, Homo sapien
cctgctgtttgtgaacgatgtgtaggtagccag

SEQ ID NO: 19411 - DNA, 33 bp, Homo sapien
ctgcacagtacccaacacttaggagaggatcaa

SEQ ID NO: 19412 - DNA, 33 bp, Homo sapien
ctgcacagtacccaacgcttaggagaggatcaa

SEQ ID NO: 19413 - DNA, 33 bp, Homo sapien
ctaattgctctccaacaaagtgaacagagaact

SEQ ID NO: 19414 - DNA, 33 bp, Homo sapien
ctaattgctctccaaccaagtgaacagagaact

SEQ ID NO: 19415 - DNA, 33 bp, Homo sapien
attactcatcaatgcaagtaagatggaagcaaa

SEQ ID NO: 19416 - DNA, 33 bp, Homo sapien
attactcatcaatgcaggtaagatggaagcaaa

SEQ ID NO: 19417 - DNA, 33 bp, Homo sapien
atgccattttgtgctaaggatctatttgcttcc

SEQ ID NO: 19418 - DNA, 33 bp, Homo sapien
atgccattttgtgctagggatctatttgcttcc

SEQ ID NO: 19419 - DNA, 33 bp, Homo sapien
aagttgcacaagtcagaaaatataaggatttat

SEQ ID NO: 19420 - DNA, 33 bp, Homo sapien
aagttgcacaagtcaggaaatataaggatttat

SEQ ID NO: 19421 - DNA, 33 bp, Homo sapien
ggacacgaggcagctcagagcaaaagaggcaga

SEQ ID NO: 19422 - DNA, 33 bp, Homo sapien
ggacacgaggcagctcggagcaaaagaggcaga

SEQ ID NO: 19423 - DNA, 33 bp, Homo sapien
tctaaaatgtcaagagaaagaattagataaacc

SEQ ID NO: 19424 - DNA, 33 bp, Homo sapien
tctaaaatgtcaagaggaagaattagataaacc

SEQ ID NO: 19425 - DNA, 33 bp, Homo sapien
tgctcatctactctgcccttctaagaccctcct

SEQ ID NO: 19426 - DNA, 33 bp, Homo sapien
tgctcatctactctgctcttctaagaccctcct

SEQ ID NO: 19427 - DNA, 33 bp, Homo sapien
agcctcctaagaggtcaccttgtctttgccctt

SEQ ID NO: 19428 - DNA, 33 bp, Homo sapien
agcctcctaagaggtcgccttgtctttgccctt

SEQ ID NO: 19429 - DNA, 33 bp, Homo sapien
gttaaatatcaataaaatgcctgaggtccagcg

SEQ ID NO: 19430 - DNA, 33 bp, Homo sapien
gttaaatatcaataaagtgcctgaggtccagcg

SEQ ID NO: 19431 - DNA, 33 bp, Homo sapien
agctctgagaagttaactcacccaatgtctcag

SEQ ID NO: 19432 - DNA, 33 bp, Homo sapien
agctctgagaagttaattcacccaatgtctcag

SEQ ID NO: 19433 - DNA, 33 bp, Homo sapien
tcctacaggaaagtacagggattccagttctat

SEQ ID NO: 19434 - DNA, 33 bp, Homo sapien
tcctacaggaaagtacggggattccagttctat

SEQ ID NO: 19435 - DNA, 33 bp, Homo sapien
aaaacaaaataaaaaacttcagtgcacagaata

SEQ ID NO: 19436 - DNA, 33 bp, Homo sapien
aaaacaaaataaaaaatttcagtgcacagaata

SEQ ID NO: 19437 - DNA, 33 bp, Homo sapien
gatagatgttctcagcccattcttctttttgga

SEQ ID NO: 19438 - DNA, 33 bp, Homo sapien
gatagatgttctcagctcattcttctttttgga

SEQ ID NO: 19439 - DNA, 33 bp, Homo sapien
agctattgccaaaacgcataatgcatcacagtg

SEQ ID NO: 19440 - DNA, 33 bp, Homo sapien
agctattgccaaaacgtataatgcatcacagtg

SEQ ID NO: 19441 - DNA, 33 bp, Homo sapien
aacactaagctaggcccgcatgacttagtctcc

SEQ ID NO: 19442 - DNA, 33 bp, Homo sapien
aacactaagctaggcctgcatgacttagtctcc

SEQ ID NO: 19443 - DNA, 33 bp, Homo sapien
ttttcctaggctggtcaagcaccattcttttat

SEQ ID NO: 19444 - DNA, 33 bp, Homo sapien
ttttcctaggctggtccagcaccattcttttat

SEQ ID NO: 19445 - DNA, 33 bp, Homo sapien
cactgtttctagaaccactgcagaaggtaatca

SEQ ID NO: 19446 - DNA, 33 bp, Homo sapien
cactgtttctagaaccgctgcagaaggtaatca

SEQ ID NO: 19447 - DNA, 33 bp, Homo sapien
ttgccaacgatgctctaaaacataacagtagct

SEQ ID NO: 19448 - DNA, 33 bp, Homo sapien
ttgccaacgatgctctgaaacataacagtagct

SEQ ID NO: 19449 - DNA, 33 bp, Homo sapien
catagagcctatatcccagagaagtggtcaggg

SEQ ID NO: 19450 - DNA, 33 bp, Homo sapien
catagagcctatatcctagagaagtggtcaggg

SEQ ID NO: 19451 - DNA, 33 bp, Homo sapien
cttggagactcagttcactatcacctctgttgg

SEQ ID NO: 19452 - DNA, 33 bp, Homo sapien
cttggagactcagttcgctatcacctctgttgg

SEQ ID NO: 19453 - DNA, 33 bp, Homo sapien
ggttatgaaagaagagaccatctcagggtctga

SEQ ID NO: 19454 - DNA, 33 bp, Homo sapien
ggttatgaaagaagaggccatctcagggtctga

SEQ ID NO: 19455 - DNA, 33 bp, Homo sapien
tgttatactacatatactacactaagctaggcg

SEQ ID NO: 19456 - DNA, 33 bp, Homo sapien
tgttatactacatatattacactaagctaggcg

SEQ ID NO: 19457 - DNA, 33 bp, Homo sapien
actgctatgtgccagaccctctaccagctgcag

SEQ ID NO: 19458 - DNA, 33 bp, Homo sapien
actgctatgtgccagagcctctaccagctgcag

SEQ ID NO: 19459 - DNA, 33 bp, Homo sapien
gaccgggtcttggtcacgtcaggccatggatgt

SEQ ID NO: 19460 - DNA, 33 bp, Homo sapien
gaccgggtcttggtcatgtcaggccatggatgt

SEQ ID NO: 19461 - DNA, 33 bp, Homo sapien
tattgtattatataaacaagttcatccatttat

SEQ ID NO: 19462 - DNA, 33 bp, Homo sapien
tattgtattatataaagaagttcatccatttat

SEQ ID NO: 19463 - DNA, 33 bp, Homo sapien
ataacgatatgctgacagaacttctatgatagg

SEQ ID NO: 19464 - DNA, 33 bp, Homo sapien
ataacgatatgctgacggaacttctatgatagg

SEQ ID NO: 19465 - DNA, 33 bp, Homo sapien
attcctcacacagggactcatttgttcatttat

SEQ ID NO: 19466 - DNA, 33 bp, Homo sapien
attcctcacacagggattcatttgttcatttat

SEQ ID NO: 19467 - DNA, 33 bp, Homo sapien
ttctcataggtaggaaaaggagctcagattcca

SEQ ID NO: 19468 - DNA, 33 bp, Homo sapien
ttctcataggtaggaagaggagctcagattcca

SEQ ID NO: 19469 - DNA, 33 bp, Homo sapien
tccagattggaagcacccattagttgttccttt

SEQ ID NO: 19470 - DNA, 33 bp, Homo sapien
tccagattggaagcactcattagttgttccttt

SEQ ID NO: 19471 - DNA, 33 bp, Homo sapien
ttagctagctcaagcccaaaagatacttttcct

SEQ ID NO: 19472 - DNA, 33 bp, Homo sapien
ttagctagctcaagcctaaaagatacttttcct

SEQ ID NO: 19473 - DNA, 33 bp, Homo sapien
agatttcagctttccacatggtcattttccaag

SEQ ID NO: 19474 - DNA, 33 bp, Homo sapien
agatttcagctttccatatggtcattttccaag

SEQ ID NO: 19475 - DNA, 33 bp, Homo sapien
actccgctactgaaaagaaagcacaaatttaat

SEQ ID NO: 19476 - DNA, 33 bp, Homo sapien
actccgctactgaaaataaagcacaaatttaat

SEQ ID NO: 19477 - DNA, 33 bp, Homo sapien
tcacagcgagcattaaagaagcaggcacaagag

SEQ ID NO: 19478 - DNA, 33 bp, Homo sapien
tcacagcgagcattaacgaagcaggcacaagag

SEQ ID NO: 19479 - DNA, 33 bp, Homo sapien
taaatgaggctatgaacgcaaggaaacttattt

SEQ ID NO: 19480 - DNA, 33 bp, Homo sapien
taaatgaggctatgaatgcaaggaaacttattt

SEQ ID NO: 19481 - DNA, 33 bp, Homo sapien
gtggtctagaactacgacgatgaccatcgtgaa

SEQ ID NO: 19482 - DNA, 33 bp, Homo sapien
gtggtctagaactacggcgatgaccatcgtgaa

SEQ ID NO: 19483 - DNA, 33 bp, Homo sapien
ggtcttgcagtggctaaaggatgataagaaaag

SEQ ID NO: 19484 - DNA, 33 bp, Homo sapien
ggtcttgcagtggctagaggatgataagaaaag

SEQ ID NO: 19485 - DNA, 33 bp, Homo sapien
ccaaaaggacatagaaacaatgaaaccccagta

SEQ ID NO: 19486 - DNA, 33 bp, Homo sapien
ccaaaaggacatagaagcaatgaaaccccagta

SEQ ID NO: 19487 - DNA, 33 bp, Homo sapien
tgaaaatgctcaaacaaaaaatgtaaaaggata

SEQ ID NO: 19488 - DNA, 33 bp, Homo sapien
tgaaaatgctcaaacacaaaatgtaaaaggata

SEQ ID NO: 19489 - DNA, 33 bp, Homo sapien
tttccattcaagcgcactcatttacctgctttc

SEQ ID NO: 19490 - DNA, 33 bp, Homo sapien
tttccattcaagcgcattcatttacctgctttc

SEQ ID NO: 19491 - DNA, 33 bp, Homo sapien
aggtctgaagtgactaaattagtaggaactgac

SEQ ID NO: 19492 - DNA, 33 bp, Homo sapien
aggtctgaagtgactagattagtaggaactgac

SEQ ID NO: 19493 - DNA, 33 bp, Homo sapien
actgtagaccaggaagcagggattaggcagtga

SEQ ID NO: 19494 - DNA, 33 bp, Homo sapien
actgtagaccaggaagtagggattaggcagtga

SEQ ID NO: 19495 - DNA, 33 bp, Homo sapien
aattaaacaaagaggcacattgccatcaccact

SEQ ID NO: 19496 - DNA, 33 bp, Homo sapien
aattaaacaaagaggctcattgccatcaccact

SEQ ID NO: 19497 - DNA, 33 bp, Homo sapien
ccttttcttctgggaaggacatgagtaaagacc

SEQ ID NO: 19498 - DNA, 33 bp, Homo sapien
ccttttcttctgggaatgacatgagtaaagacc

SEQ ID NO: 19499 - DNA, 33 bp, Homo sapien
gttaatatatcctcagcacccagattagtatct

SEQ ID NO: 19500 - DNA, 33 bp, Homo sapien
gttaatatatcctcagtacccagattagtatct

SEQ ID NO: 19501 - DNA, 33 bp, Homo sapien
ctgtctggataactataaggctttgggtggtaa

SEQ ID NO: 19502 - DNA, 33 bp, Homo sapien
ctgtctggataactatgaggctttgggtggtaa

SEQ ID NO: 19503 - DNA, 33 bp, Homo sapien
gagtttaagcttatctcaagccatcataatatc

SEQ ID NO: 19504 - DNA, 33 bp, Homo sapien
gagtttaagcttatctgaagccatcataatatc

SEQ ID NO: 19505 - DNA, 33 bp, Homo sapien
aagaagctgaaagtgaacaagacaaggagtaaa

SEQ ID NO: 19506 - DNA, 33 bp, Homo sapien
aagaagctgaaagtgaccaagacaaggagtaaa

SEQ ID NO: 19507 - DNA, 33 bp, Homo sapien
gggtgagggtaggagacgccagcaggtaagatc

SEQ ID NO: 19508 - DNA, 33 bp, Homo sapien
gggtgagggtaggagaggccagcaggtaagatc

SEQ ID NO: 19509 - DNA, 33 bp, Homo sapien
acataaccaaagctgaaactgaatagcagggcc

SEQ ID NO: 19510 - DNA, 33 bp, Homo sapien
acataaccaaagctgacactgaatagcagggcc

SEQ ID NO: 19511 - DNA, 33 bp, Homo sapien
ttcttcctactcatccccacagtactgttctct

SEQ ID NO: 19512 - DNA, 33 bp, Homo sapien
ttcttcctactcatcctcacagtactgttctct

SEQ ID NO: 19513 - DNA, 33 bp, Homo sapien
agaggtcactaaaagagtctgctgggtgttcaa

SEQ ID NO: 19514 - DNA, 33 bp, Homo sapien
agaggtcactaaaagattctgctgggtgttcaa

SEQ ID NO: 19515 - DNA, 33 bp, Homo sapien
acttgcctgaaatcacacatcagaaagttaaga

SEQ ID NO: 19516 - DNA, 33 bp, Homo sapien
acttgcctgaaatcacgcatcagaaagttaaga

SEQ ID NO: 19517 - DNA, 33 bp, Homo sapien
actcactggagatatccaagtcctgcagtaaat

SEQ ID NO: 19518 - DNA, 33 bp, Homo sapien
actcactggagatatctaagtcctgcagtaaat

SEQ ID NO: 19519 - DNA, 33 bp, Homo sapien
catgccaagatgagaaacgtgtccccaacagtt

SEQ ID NO: 19520 - DNA, 33 bp, Homo sapien
catgccaagatgagaagcgtgtccccaacagtt

SEQ ID NO: 19521 - DNA, 33 bp, Homo sapien
aagtgctaagcctatcacagctttgaatgttta

SEQ ID NO: 19522 - DNA, 33 bp, Homo sapien
aagtgctaagcctatcgcagctttgaatgttta

SEQ ID NO: 19523 - DNA, 33 bp, Homo sapien
gctttaatacattttacgcaaccttctactcat

SEQ ID NO: 19524 - DNA, 33 bp, Homo sapien
gctttaatacattttatgcaaccttctactcat

SEQ ID NO: 19525 - DNA, 33 bp, Homo sapien
gactcaaatctgtccagagcaatgttcaagtct

SEQ ID NO: 19526 - DNA, 33 bp, Homo sapien
gactcaaatctgtccatagcaatgttcaagtct

SEQ ID NO: 19527 - DNA, 33 bp, Homo sapien
taaagtatttgcaaaagcctagacttgaacatt

SEQ ID NO: 19528 - DNA, 33 bp, Homo sapien
taaagtatttgcaaaatcctagacttgaacatt

SEQ ID NO: 19529 - DNA, 33 bp, Homo sapien
tggatagaatgaaacacagaagggaggaacagg

SEQ ID NO: 19530 - DNA, 33 bp, Homo sapien
tggatagaatgaaacagagaagggaggaacagg

SEQ ID NO: 19531 - DNA, 33 bp, Homo sapien
tttatcttgagagataataggcatcattgttaa

SEQ ID NO: 19532 - DNA, 33 bp, Homo sapien
tttatcttgagagatagtaggcatcattgttaa

SEQ ID NO: 19533 - DNA, 33 bp, Homo sapien
gacctagtaagtcaccactggaaactggaaacc

SEQ ID NO: 19534 - DNA, 33 bp, Homo sapien
gacctagtaagtcacctctggaaactggaaacc

SEQ ID NO: 19535 - DNA, 33 bp, Homo sapien
aaaatatagctactaccagagatgcaaatgaag

SEQ ID NO: 19536 - DNA, 33 bp, Homo sapien
aaaatatagctactactagagatgcaaatgaag

SEQ ID NO: 19537 - DNA, 33 bp, Homo sapien
ccacacgtttaaggaaaatcacccatatggtca

SEQ ID NO: 19538 - DNA, 33 bp, Homo sapien
ccacacgtttaaggaacatcacccatatggtca

SEQ ID NO: 19539 - DNA, 33 bp, Homo sapien
gtctttaagagtaagacgtctgccagtttatcc

SEQ ID NO: 19540 - DNA, 33 bp, Homo sapien
gtctttaagagtaagatgtctgccagtttatcc

SEQ ID NO: 19541 - DNA, 33 bp, Homo sapien
tacctgttattatgtgcattagccaaagggaag

SEQ ID NO: 19542 - DNA, 33 bp, Homo sapien
tacctgttattatgtgtattagccaaagggaag

SEQ ID NO: 19543 - DNA, 33 bp, Homo sapien
ctacatttacatgttacgatgctggtcactagg

SEQ ID NO: 19544 - DNA, 33 bp, Homo sapien
ctacatttacatgttatgatgctggtcactagg

SEQ ID NO: 19545 - DNA, 33 bp, Homo sapien
ttgtagttcattccccaacatggcttagcattt

SEQ ID NO: 19546 - DNA, 33 bp, Homo sapien
ttgtagttcattcccccacatggcttagcattt

SEQ ID NO: 19547 - DNA, 33 bp, Homo sapien
ggatgtgtgcacagaaaattactgcaggcacta

SEQ ID NO: 19548 - DNA, 33 bp, Homo sapien
ggatgtgtgcacagaagattactgcaggcacta

SEQ ID NO: 19549 - DNA, 33 bp, Homo sapien
atgtgatgagtgcagccattttaaattttagag

SEQ ID NO: 19550 - DNA, 33 bp, Homo sapien
atgtgatgagtgcagctattttaaattttagag

SEQ ID NO: 19551 - DNA, 33 bp, Homo sapien
ttcaagataagtgttcaatgatagtgttgtgaa

SEQ ID NO: 19552 - DNA, 33 bp, Homo sapien
ttcaagataagtgttcgatgatagtgttgtgaa

SEQ ID NO: 19553 - DNA, 33 bp, Homo sapien
gacagagtctgagagaaaatgcaagatgttcaa

SEQ ID NO: 19554 - DNA, 33 bp, Homo sapien
gacagagtctgagagacaatgcaagatgttcaa

SEQ ID NO: 19555 - DNA, 33 bp, Homo sapien
acagctaggaagtaccaggacactgtatctcaa

SEQ ID NO: 19556 - DNA, 33 bp, Homo sapien
acagctaggaagtacccggacactgtatctcaa

SEQ ID NO: 19557 - DNA, 33 bp, Homo sapien
ggttataccctaaactcacatagaacacgtaat

SEQ ID NO: 19558 - DNA, 33 bp, Homo sapien
ggttataccctaaacttacatagaacacgtaat

SEQ ID NO: 19559 - DNA, 33 bp, Homo sapien
aagtccaggattagtacgggaaaaaccaactca

SEQ ID NO: 19560 - DNA, 33 bp, Homo sapien
aagtccaggattagtatgggaaaaaccaactca

SEQ ID NO: 19561 - DNA, 33 bp, Homo sapien
ttccaggagcccatagcacatttacatctttgg

SEQ ID NO: 19562 - DNA, 33 bp, Homo sapien
ttccaggagcccatagtacatttacatctttgg

SEQ ID NO: 19563 - DNA, 33 bp, Homo sapien
gcactgtaagggttcaatcaagggtgaactgct

SEQ ID NO: 19564 - DNA, 33 bp, Homo sapien
gcactgtaagggttcagtcaagggtgaactgct

SEQ ID NO: 19565 - DNA, 33 bp, Homo sapien
gagccagttttatctacgttagctcagtgtagc

SEQ ID NO: 19566 - DNA, 33 bp, Homo sapien
gagccagttttatctatgttagctcagtgtagc

SEQ ID NO: 19567 - DNA, 33 bp, Homo sapien
cagcgtgggtgatttcgaaatgtacagttcata

SEQ ID NO: 19568 - DNA, 33 bp, Homo sapien
cagcgtgggtgatttctaaatgtacagttcata

SEQ ID NO: 19569 - DNA, 33 bp, Homo sapien
ttctccactagataaactcattaatccttcaag

SEQ ID NO: 19570 - DNA, 33 bp, Homo sapien
ttctccactagataaattcattaatccttcaag

SEQ ID NO: 19571 - DNA, 33 bp, Homo sapien
ctttattcttttcaataagcatttgtccaattt

SEQ ID NO: 19572 - DNA, 33 bp, Homo sapien
ctttattcttttcaatgagcatttgtccaattt

SEQ ID NO: 19573 - DNA, 33 bp, Homo sapien
ttctgcaatttagggaactaagagcttgttaga

SEQ ID NO: 19574 - DNA, 33 bp, Homo sapien
ttctgcaatttagggagctaagagcttgttaga

SEQ ID NO: 19575 - DNA, 33 bp, Homo sapien
caaggggcttcatcaacaggcaatatgtagaaa

SEQ ID NO: 19576 - DNA, 33 bp, Homo sapien
caaggggcttcatcaagaggcaatatgtagaaa

SEQ ID NO: 19577 - DNA, 33 bp, Homo sapien
gagaagcaaatggtccaagattaggtggttaga

SEQ ID NO: 19578 - DNA, 33 bp, Homo sapien
gagaagcaaatggtccgagattaggtggttaga

SEQ ID NO: 19579 - DNA, 33 bp, Homo sapien
atcctggttaacgtaaccactgtggcataattt

SEQ ID NO: 19580 - DNA, 33 bp, Homo sapien
atcctggttaacgtaatcactgtggcataattt

SEQ ID NO: 19581 - DNA, 33 bp, Homo sapien
atccaagaagctcctggaacctcattgtcctga

SEQ ID NO: 19582 - DNA, 33 bp, Homo sapien
atccaagaagctcctgtaacctcattgtcctga

SEQ ID NO: 19583 - DNA, 33 bp, Homo sapien
gccaccaaagacacagaatacatcacaaccagg

SEQ ID NO: 19584 - DNA, 33 bp, Homo sapien
gccaccaaagacacagcatacatcacaaccagg

SEQ ID NO: 19585 - DNA, 33 bp, Homo sapien
atggaagaagtagatacgtagcagatgaaaaac

SEQ ID NO: 19586 - DNA, 33 bp, Homo sapien
atggaagaagtagatatgtagcagatgaaaaac

SEQ ID NO: 19587 - DNA, 33 bp, Homo sapien
acctcattgaaatagaaaggaaagtcagtaata

SEQ ID NO: 19588 - DNA, 33 bp, Homo sapien
acctcattgaaatagacaggaaagtcagtaata

SEQ ID NO: 19589 - DNA, 33 bp, Homo sapien
atgcaactactacctgaaggatattctgctaga

SEQ ID NO: 19590 - DNA, 33 bp, Homo sapien
atgcaactactacctgcaggatattctgctaga

SEQ ID NO: 19591 - DNA, 33 bp, Homo sapien
attggatatggacataaaattaatggagaggaa

SEQ ID NO: 19592 - DNA, 33 bp, Homo sapien
attggatatggacatacaattaatggagaggaa

SEQ ID NO: 19593 - DNA, 33 bp, Homo sapien
cacaagtaaatggttacaggtttatggctgaaa

SEQ ID NO: 19594 - DNA, 33 bp, Homo sapien
cacaagtaaatggttataggtttatggctgaaa

SEQ ID NO: 19595 - DNA, 33 bp, Homo sapien
caagtgaggaaaggaacgattaaggaataaact

SEQ ID NO: 19596 - DNA, 33 bp, Homo sapien
caagtgaggaaaggaatgattaaggaataaact

SEQ ID NO: 19597 - DNA, 33 bp, Homo sapien
aagagtaatagtacaaaaaatgctatcctgcat

SEQ ID NO: 19598 - DNA, 33 bp, Homo sapien
aagagtaatagtacaacaaatgctatcctgcat

SEQ ID NO: 19599 - DNA, 33 bp, Homo sapien
gaaggaggacatatcacacactttcaaatggtc

SEQ ID NO: 19600 - DNA, 33 bp, Homo sapien
gaaggaggacatatcatacactttcaaatggtc

SEQ ID NO: 19601 - DNA, 33 bp, Homo sapien
gaggaaaaatgctagcaaaagattcattggagg

SEQ ID NO: 19602 - DNA, 33 bp, Homo sapien
gaggaaaaatgctagcgaaagattcattggagg

SEQ ID NO: 19603 - DNA, 33 bp, Homo sapien
agtctaggcagagaccagcaaacatattaaaag

SEQ ID NO: 19604 - DNA, 33 bp, Homo sapien
agtctaggcagagaccggcaaacatattaaaag

SEQ ID NO: 19605 - DNA, 33 bp, Homo sapien
ttgatttgtggctctacgtttcactgctggatg

SEQ ID NO: 19606 - DNA, 33 bp, Homo sapien
ttgatttgtggctctatgtttcactgctggatg

SEQ ID NO: 19607 - DNA, 33 bp, Homo sapien
tgcttccatgctctacagtagaaaccaactcct

SEQ ID NO: 19608 - DNA, 33 bp, Homo sapien
tgcttccatgctctacggtagaaaccaactcct

SEQ ID NO: 19609 - DNA, 33 bp, Homo sapien
cctggagagtagcaagcactcaataatagttag

SEQ ID NO: 19610 - DNA, 33 bp, Homo sapien
cctggagagtagcaaggactcaataatagttag

SEQ ID NO: 19611 - DNA, 33 bp, Homo sapien
caacctctaaaatgataatcataccatgtgcct

SEQ ID NO: 19612 - DNA, 33 bp, Homo sapien
caacctctaaaatgatcatcataccatgtgcct

SEQ ID NO: 19613 - DNA, 33 bp, Homo sapien
agatgaagtgcggtaaaaaatgtcattgctatt

SEQ ID NO: 19614 - DNA, 33 bp, Homo sapien
agatgaagtgcggtaagaaatgtcattgctatt

SEQ ID NO: 19615 - DNA, 33 bp, Homo sapien
ggtcattgcactacaccgtaggactgaggtcca

SEQ ID NO: 19616 - DNA, 33 bp, Homo sapien
ggtcattgcactacacggtaggactgaggtcca

SEQ ID NO: 19617 - DNA, 33 bp, Homo sapien
caataccataagagtaaaacccatgccctttgg

SEQ ID NO: 19618 - DNA, 33 bp, Homo sapien
caataccataagagtagaacccatgccctttgg

SEQ ID NO: 19619 - DNA, 33 bp, Homo sapien
acaaacacctattctagaccttgcttacatatt

SEQ ID NO: 19620 - DNA, 33 bp, Homo sapien
acaaacacctattctataccttgcttacatatt

SEQ ID NO: 19621 - DNA, 33 bp, Homo sapien
cttctgtaaaggattcaaattttaaacagctaa

SEQ ID NO: 19622 - DNA, 33 bp, Homo sapien
cttctgtaaaggattcgaattttaaacagctaa

SEQ ID NO: 19623 - DNA, 33 bp, Homo sapien
agctacctttcataagaccaacctgatttcagc

SEQ ID NO: 19624 - DNA, 33 bp, Homo sapien
agctacctttcataagtccaacctgatttcagc

SEQ ID NO: 19625 - DNA, 33 bp, Homo sapien
gcagtgaaaacctgaaaaccatttaggagggtg

SEQ ID NO: 19626 - DNA, 33 bp, Homo sapien
gcagtgaaaacctgaagaccatttaggagggtg

SEQ ID NO: 19627 - DNA, 33 bp, Homo sapien
aggcactgcctcaaccgggagatgctacagggt

SEQ ID NO: 19628 - DNA, 33 bp, Homo sapien
aggcactgcctcaacctggagatgctacagggt

SEQ ID NO: 19629 - DNA, 33 bp, Homo sapien
caacccaaggaggccccaagaaaatccactggg

SEQ ID NO: 19630 - DNA, 33 bp, Homo sapien
caacccaaggaggcccgaagaaaatccactggg

SEQ ID NO: 19631 - DNA, 33 bp, Homo sapien
gggttaaaatgaggaacggtatcatggctaaaa

SEQ ID NO: 19632 - DNA, 33 bp, Homo sapien
gggttaaaatgaggaatggtatcatggctaaaa

SEQ ID NO: 19633 - DNA, 33 bp, Homo sapien
gtaagaacatgaatcccatcaccttccaaaggc

SEQ ID NO: 19634 - DNA, 33 bp, Homo sapien
gtaagaacatgaatcctatcaccttccaaaggc

SEQ ID NO: 19635 - DNA, 33 bp, Homo sapien
tcactaagcaatttacccaggtttcccacagaa

SEQ ID NO: 19636 - DNA, 33 bp, Homo sapien
tcactaagcaatttactcaggtttcccacagaa

SEQ ID NO: 19637 - DNA, 33 bp, Homo sapien
ctttaaaaataagcaaaggataagctaggcctg

SEQ ID NO: 19638 - DNA, 33 bp, Homo sapien
ctttaaaaataagcaagggataagctaggcctg

SEQ ID NO: 19639 - DNA, 33 bp, Homo sapien
agaggttaagatagacaatgagcaaacacatta

SEQ ID NO: 19640 - DNA, 33 bp, Homo sapien
agaggttaagatagaccatgagcaaacacatta

SEQ ID NO: 19641 - DNA, 33 bp, Homo sapien
ctcaatgcctgcaaagcacaaagagttgactcc

SEQ ID NO: 19642 - DNA, 33 bp, Homo sapien
ctcaatgcctgcaaaggacaaagagttgactcc

SEQ ID NO: 19643 - DNA, 33 bp, Homo sapien
caagcattgcttaataagatttgttttagcatt

SEQ ID NO: 19644 - DNA, 33 bp, Homo sapien
caagcattgcttaataggatttgttttagcatt

SEQ ID NO: 19645 - DNA, 33 bp, Homo sapien
cagatcttgagtccaaactctgtgccagcgttg

SEQ ID NO: 19646 - DNA, 33 bp, Homo sapien
cagatcttgagtccaacctctgtgccagcgttg

SEQ ID NO: 19647 - DNA, 33 bp, Homo sapien
cttacttccccacttacacgcattgagactgct

SEQ ID NO: 19648 - DNA, 33 bp, Homo sapien
cttacttccccacttatacgcattgagactgct

SEQ ID NO: 19649 - DNA, 33 bp, Homo sapien
tattcttattaatagcaccttcctcacagggtt

SEQ ID NO: 19650 - DNA, 33 bp, Homo sapien
tattcttattaatagcgccttcctcacagggtt

SEQ ID NO: 19651 - DNA, 33 bp, Homo sapien
ttgattcagatgagcaagggtatgccatgtaaa

SEQ ID NO: 19652 - DNA, 33 bp, Homo sapien
ttgattcagatgagcaggggtatgccatgtaaa

SEQ ID NO: 19653 - DNA, 33 bp, Homo sapien
tgctgttggtaaacacaactaatccaagaagaa

SEQ ID NO: 19654 - DNA, 33 bp, Homo sapien
tgctgttggtaaacacgactaatccaagaagaa

SEQ ID NO: 19655 - DNA, 33 bp, Homo sapien
gcacctacctactagaactgttgtgtagattaa

SEQ ID NO: 19656 - DNA, 33 bp, Homo sapien
gcacctacctactagagctgttgtgtagattaa

SEQ ID NO: 19657 - DNA, 33 bp, Homo sapien
agcatttgaatatcaacagcacttgaatgtctc

SEQ ID NO: 19658 - DNA, 33 bp, Homo sapien
agcatttgaatatcaatagcacttgaatgtctc

SEQ ID NO: 19659 - DNA, 33 bp, Homo sapien
tttaggaaagttcgagcaggagcagagactgca

SEQ ID NO: 19660 - DNA, 33 bp, Homo sapien
tttaggaaagttcgaggaggagcagagactgca

SEQ ID NO: 19661 - DNA, 33 bp, Homo sapien
tcggcaaaaacaagcacaagcagtatacgcagt

SEQ ID NO: 19662 - DNA, 33 bp, Homo sapien
tcggcaaaaacaagcagaagcagtatacgcagt

SEQ ID NO: 19663 - DNA, 33 bp, Homo sapien
atcagaagccagtcaacattgctgttgttatta

SEQ ID NO: 19664 - DNA, 33 bp, Homo sapien
atcagaagccagtcaatattgctgttgttatta

SEQ ID NO: 19665 - DNA, 33 bp, Homo sapien
agtagacagaaaaggaatcaaacaggtatgtgt

SEQ ID NO: 19666 - DNA, 33 bp, Homo sapien
agtagacagaaaaggagtcaaacaggtatgtgt

SEQ ID NO: 19667 - DNA, 33 bp, Homo sapien
cctctgtatttagatcaactttgctgggcgcta

SEQ ID NO: 19668 - DNA, 33 bp, Homo sapien
cctctgtatttagatccactttgctgggcgcta

SEQ ID NO: 19669 - DNA, 33 bp, Homo sapien
ggttagcaaagttcaccgtagtctttcattaag

SEQ ID NO: 19670 - DNA, 33 bp, Homo sapien
ggttagcaaagttcactgtagtctttcattaag

SEQ ID NO: 19671 - DNA, 33 bp, Homo sapien
agtcagttggatttcaatcattccagaacaaag

SEQ ID NO: 19672 - DNA, 33 bp, Homo sapien
agtcagttggatttcagtcattccagaacaaag

SEQ ID NO: 19673 - DNA, 33 bp, Homo sapien
acagaacactgagaaacggcatccctcctagcc

SEQ ID NO: 19674 - DNA, 33 bp, Homo sapien
acagaacactgagaaatggcatccctcctagcc

SEQ ID NO: 19675 - DNA, 33 bp, Homo sapien
tcattcatccagacaccgagtacattcatgtat

SEQ ID NO: 19676 - DNA, 33 bp, Homo sapien
tcattcatccagacactgagtacattcatgtat

SEQ ID NO: 19677 - DNA, 33 bp, Homo sapien
tgacggaagtgctaacagtaaagaataaaagat

SEQ ID NO: 19678 - DNA, 33 bp, Homo sapien
tgacggaagtgctaacggtaaagaataaaagat

SEQ ID NO: 19679 - DNA, 33 bp, Homo sapien
tactttgcctcgtttgaaattcagtctccatgc

SEQ ID NO: 19680 - DNA, 33 bp, Homo sapien
tactttgcctcgtttgcaattcagtctccatgc

SEQ ID NO: 19681 - DNA, 33 bp, Homo sapien
ccacagtataaagcataaggctcttgagtattt

SEQ ID NO: 19682 - DNA, 33 bp, Homo sapien
ccacagtataaagcatcaggctcttgagtattt

SEQ ID NO: 19683 - DNA, 33 bp, Homo sapien
tgtgtattgttcattaccagtgatccaagatgg

SEQ ID NO: 19684 - DNA, 33 bp, Homo sapien
tgtgtattgttcattatcagtgatccaagatgg

SEQ ID NO: 19685 - DNA, 33 bp, Homo sapien
gacagcatgacatactcagagaaagagtaaaca

SEQ ID NO: 19686 - DNA, 33 bp, Homo sapien
gacagcatgacatactgagagaaagagtaaaca

SEQ ID NO: 19687 - DNA, 33 bp, Homo sapien
ccccaacagcaacccaatgaggtgggagccatt

SEQ ID NO: 19688 - DNA, 33 bp, Homo sapien
ccccaacagcaacccagtgaggtgggagccatt

SEQ ID NO: 19689 - DNA, 33 bp, Homo sapien
gttcacaaacctgaggcccatgcaacattaagc

SEQ ID NO: 19690 - DNA, 33 bp, Homo sapien
gttcacaaacctgaggtccatgcaacattaagc

SEQ ID NO: 19691 - DNA, 33 bp, Homo sapien
gcatgagtgaaaaaggacatcattaggagggga

SEQ ID NO: 19692 - DNA, 33 bp, Homo sapien
gcatgagtgaaaaaggtcatcattaggagggga

SEQ ID NO: 19693 - DNA, 33 bp, Homo sapien
gacagaaccacctacacgaggactgggaaacac

SEQ ID NO: 19694 - DNA, 33 bp, Homo sapien
gacagaaccacctacatgaggactgggaaacac

SEQ ID NO: 19695 - DNA, 33 bp, Homo sapien
ttatccctcttgtttaccccacattactttatc

SEQ ID NO: 19696 - DNA, 33 bp, Homo sapien
ttatccctcttgtttatcccacattactttatc

SEQ ID NO: 19697 - DNA, 33 bp, Homo sapien
acacccactgcatatacgatgaactcctattgg

SEQ ID NO: 19698 - DNA, 33 bp, Homo sapien
acacccactgcatatatgatgaactcctattgg

SEQ ID NO: 19699 - DNA, 33 bp, Homo sapien
actaaattgttccccaaatgaaatgtatctggc

SEQ ID NO: 19700 - DNA, 33 bp, Homo sapien
actaaattgttccccagatgaaatgtatctggc

SEQ ID NO: 19701 - DNA, 33 bp, Homo sapien
tcttttcatcctgatcaacttctggaagaaggt

SEQ ID NO: 19702 - DNA, 33 bp, Homo sapien
tcttttcatcctgatcgacttctggaagaaggt

SEQ ID NO: 19703 - DNA, 33 bp, Homo sapien
aacaagaagactacaagacagctcacgacccca

SEQ ID NO: 19704 - DNA, 33 bp, Homo sapien
aacaagaagactacaatacagctcacgacccca

SEQ ID NO: 19705 - DNA, 33 bp, Homo sapien
tctggagcaatgttgcactaatccatctgtgca

SEQ ID NO: 19706 - DNA, 33 bp, Homo sapien
tctggagcaatgttgccctaatccatctgtgca

SEQ ID NO: 19707 - DNA, 33 bp, Homo sapien
aaaaaatgaaaatcaaaagaaatagatctgggc

SEQ ID NO: 19708 - DNA, 33 bp, Homo sapien
aaaaaatgaaaatcaagagaaatagatctgggc

SEQ ID NO: 19709 - DNA, 33 bp, Homo sapien
gtaaatatttttgacccggcaggatatatggtc

SEQ ID NO: 19710 - DNA, 33 bp, Homo sapien
gtaaatatttttgacctggcaggatatatggtc

SEQ ID NO: 19711 - DNA, 33 bp, Homo sapien
tcaactatgagaattaaaaggacccttagaaac

SEQ ID NO: 19712 - DNA, 33 bp, Homo sapien
tcaactatgagaattagaaggacccttagaaac

SEQ ID NO: 19713 - DNA, 33 bp, Homo sapien
gaaactgtcatgtggaaatgtggaatgggaatt

SEQ ID NO: 19714 - DNA, 33 bp, Homo sapien
gaaactgtcatgtggagatgtggaatgggaatt

SEQ ID NO: 19715 - DNA, 33 bp, Homo sapien
tctattagtctaccccaagtgatgaggcatcct

SEQ ID NO: 19716 - DNA, 33 bp, Homo sapien
tctattagtctaccccgagtgatgaggcatcct

SEQ ID NO: 19717 - DNA, 33 bp, Homo sapien
tacttggcaacgcaaaaggcttgtccatgtgaa

SEQ ID NO: 19718 - DNA, 33 bp, Homo sapien
tacttggcaacgcaaagggcttgtccatgtgaa

SEQ ID NO: 19719 - DNA, 33 bp, Homo sapien
attaacctgaaaaatcaatgctgcaatatgaat

SEQ ID NO: 19720 - DNA, 33 bp, Homo sapien
attaacctgaaaaatccatgctgcaatatgaat

SEQ ID NO: 19721 - DNA, 33 bp, Homo sapien
tttgcgtggcacataacccacgtggcttatttc

SEQ ID NO: 19722 - DNA, 33 bp, Homo sapien
tttgcgtggcacataatccacgtggcttatttc

SEQ ID NO: 19723 - DNA, 33 bp, Homo sapien
gtttctgcaggatagccgaatggtgcaaattgg

SEQ ID NO: 19724 - DNA, 33 bp, Homo sapien
gtttctgcaggatagctgaatggtgcaaattgg

SEQ ID NO: 19725 - DNA, 33 bp, Homo sapien
tggtgactgttttccccgcgccagtaggatttg

SEQ ID NO: 19726 - DNA, 33 bp, Homo sapien
tggtgactgttttccctgcgccagtaggatttg

SEQ ID NO: 19727 - DNA, 33 bp, Homo sapien
agagagagttagcacaagatggcgttagttcaa

SEQ ID NO: 19728 - DNA, 33 bp, Homo sapien
agagagagttagcacaggatggcgttagttcaa

SEQ ID NO: 19729 - DNA, 33 bp, Homo sapien
gtgacaccccgtaatgaaactcatgaatgcttc

SEQ ID NO: 19730 - DNA, 33 bp, Homo sapien
gtgacaccccgtaatgtaactcatgaatgcttc

SEQ ID NO: 19731 - DNA, 33 bp, Homo sapien
ctgtgtaaaatcgcaccacaaacctttaggcct

SEQ ID NO: 19732 - DNA, 33 bp, Homo sapien
ctgtgtaaaatcgcactacaaacctttaggcct

SEQ ID NO: 19733 - DNA, 33 bp, Homo sapien
catgttaactgtgagacgattagataacagaaa

SEQ ID NO: 19734 - DNA, 33 bp, Homo sapien
catgttaactgtgagatgattagataacagaaa

SEQ ID NO: 19735 - DNA, 33 bp, Homo sapien
gatagttctctagaccaggaggaaaagttacta

SEQ ID NO: 19736 - DNA, 33 bp, Homo sapien
gatagttctctagaccgggaggaaaagttacta

SEQ ID NO: 19737 - DNA, 33 bp, Homo sapien
atatcagtctggtagaaaagggagaatgtaata

SEQ ID NO: 19738 - DNA, 33 bp, Homo sapien
atatcagtctggtagagaagggagaatgtaata

SEQ ID NO: 19739 - DNA, 33 bp, Homo sapien
tcccaagttttcttccaactctaagttctgtgg

SEQ ID NO: 19740 - DNA, 33 bp, Homo sapien
tcccaagttttcttccgactctaagttctgtgg

SEQ ID NO: 19741 - DNA, 33 bp, Homo sapien
tttggtgatctcagtaccttacagagtttaatc

SEQ ID NO: 19742 - DNA, 33 bp, Homo sapien
tttggtgatctcagtatcttacagagtttaatc

SEQ ID NO: 19743 - DNA, 33 bp, Homo sapien
actagtaatatgataacagctaccatctgggaa

SEQ ID NO: 19744 - DNA, 33 bp, Homo sapien
actagtaatatgataatagctaccatctgggaa

SEQ ID NO: 19745 - DNA, 33 bp, Homo sapien
caattcctggcatctaaagctgctcaataaatt

SEQ ID NO: 19746 - DNA, 33 bp, Homo sapien
caattcctggcatctagagctgctcaataaatt

SEQ ID NO: 19747 - DNA, 33 bp, Homo sapien
ggtgcaacatccggaccgatgtcttttattgtt

SEQ ID NO: 19748 - DNA, 33 bp, Homo sapien
ggtgcaacatccggactgatgtcttttattgtt

SEQ ID NO: 19749 - DNA, 33 bp, Homo sapien
atcaagtctttccaaagtattgaacttagagtt

SEQ ID NO: 19750 - DNA, 33 bp, Homo sapien
atcaagtctttccaaattattgaacttagagtt

SEQ ID NO: 19751 - DNA, 33 bp, Homo sapien
ttcattgctgccaagacataaggcggccgttca

SEQ ID NO: 19752 - DNA, 33 bp, Homo sapien
ttcattgctgccaagatataaggcggccgttca

SEQ ID NO: 19753 - DNA, 33 bp, Homo sapien
ctgcactgccagataacataagagagtaacata

SEQ ID NO: 19754 - DNA, 33 bp, Homo sapien
ctgcactgccagataatataagagagtaacata

SEQ ID NO: 19755 - DNA, 33 bp, Homo sapien
atgtgggtcttccatcgatgtgcccttgttttt

SEQ ID NO: 19756 - DNA, 33 bp, Homo sapien
atgtgggtcttccatctatgtgcccttgttttt

SEQ ID NO: 19757 - DNA, 33 bp, Homo sapien
aaaatggggataataacgtcaggatttggggtg

SEQ ID NO: 19758 - DNA, 33 bp, Homo sapien
aaaatggggataataatgtcaggatttggggtg

SEQ ID NO: 19759 - DNA, 33 bp, Homo sapien
agtgagtggtcatggaagtgaattctggaaagc

SEQ ID NO: 19760 - DNA, 33 bp, Homo sapien
agtgagtggtcatggaggtgaattctggaaagc

SEQ ID NO: 19761 - DNA, 33 bp, Homo sapien
ttgttttgaacaaaagaatgttgtagaagtgac

SEQ ID NO: 19762 - DNA, 33 bp, Homo sapien
ttgttttgaacaaaaggatgttgtagaagtgac

SEQ ID NO: 19763 - DNA, 33 bp, Homo sapien
acagctacgataagacacccctgcaacccaggg

SEQ ID NO: 19764 - DNA, 33 bp, Homo sapien
acagctacgataagacccccctgcaacccaggg

SEQ ID NO: 19765 - DNA, 33 bp, Homo sapien
tttcttaacaatgcaacgccaaatcaaatcatt

SEQ ID NO: 19766 - DNA, 33 bp, Homo sapien
tttcttaacaatgcaatgccaaatcaaatcatt

SEQ ID NO: 19767 - DNA, 33 bp, Homo sapien
gagggacagctgagcacgctgttaagtggcagg

SEQ ID NO: 19768 - DNA, 33 bp, Homo sapien
gagggacagctgagcaggctgttaagtggcagg

SEQ ID NO: 19769 - DNA, 33 bp, Homo sapien
gaagaagggagaaagacgtggttgatgcagacc

SEQ ID NO: 19770 - DNA, 33 bp, Homo sapien
gaagaagggagaaagatgtggttgatgcagacc

SEQ ID NO: 19771 - DNA, 33 bp, Homo sapien
cagagtctatttttgcaatgctcttcaggttat

SEQ ID NO: 19772 - DNA, 33 bp, Homo sapien
cagagtctatttttgcgatgctcttcaggttat

SEQ ID NO: 19773 - DNA, 33 bp, Homo sapien
tgcagtgataccaacactcactgtatatcaaaa

SEQ ID NO: 19774 - DNA, 33 bp, Homo sapien
tgcagtgataccaacattcactgtatatcaaaa

SEQ ID NO: 19775 - DNA, 33 bp, Homo sapien
aaatctcttcttcctaacaatagtggtgtctca

SEQ ID NO: 19776 - DNA, 33 bp, Homo sapien
aaatctcttcttcctatcaatagtggtgtctca

SEQ ID NO: 19777 - DNA, 33 bp, Homo sapien
gagggttcaaatggtcaaaccatagcaagtgac

SEQ ID NO: 19778 - DNA, 33 bp, Homo sapien
gagggttcaaatggtccaaccatagcaagtgac

SEQ ID NO: 19779 - DNA, 33 bp, Homo sapien
atattgattcttcccactgcttcctaagaaaac

SEQ ID NO: 19780 - DNA, 33 bp, Homo sapien
atattgattcttcccagtgcttcctaagaaaac

SEQ ID NO: 19781 - DNA, 33 bp, Homo sapien
tgacaaggaagtgagaaagtgggtatcttttgt

SEQ ID NO: 19782 - DNA, 33 bp, Homo sapien
tgacaaggaagtgagacagtgggtatcttttgt

SEQ ID NO: 19783 - DNA, 33 bp, Homo sapien
agcaaacttgggcacactgacaaggtagtccag

SEQ ID NO: 19784 - DNA, 33 bp, Homo sapien
agcaaacttgggcacattgacaaggtagtccag

SEQ ID NO: 19785 - DNA, 33 bp, Homo sapien
aatcctgtcatttgcacatcctgtcatttgcag

SEQ ID NO: 19786 - DNA, 33 bp, Homo sapien
aatcctgtcatttgcatatcctgtcatttgcag

SEQ ID NO: 19787 - DNA, 33 bp, Homo sapien
ttgtgttggaacattccgaatcctctcttctag

SEQ ID NO: 19788 - DNA, 33 bp, Homo sapien
ttgtgttggaacattctgaatcctctcttctag

SEQ ID NO: 19789 - DNA, 33 bp, Homo sapien
gaggcgatggagatccaaaacactctgacttga

SEQ ID NO: 19790 - DNA, 33 bp, Homo sapien
gaggcgatggagatccgaaacactctgacttga

SEQ ID NO: 19791 - DNA, 33 bp, Homo sapien
ctttgtgtttttactcaattttacattatcagc

SEQ ID NO: 19792 - DNA, 33 bp, Homo sapien
ctttgtgtttttactctattttacattatcagc

SEQ ID NO: 19793 - DNA, 33 bp, Homo sapien
aaaattttctcctttaggcttacctgcaggttc

SEQ ID NO: 19794 - DNA, 33 bp, Homo sapien
aaaattttctcctttatgcttacctgcaggttc

SEQ ID NO: 19795 - DNA, 33 bp, Homo sapien
cttcagttattcgaggcattcaactgactgagc

SEQ ID NO: 19796 - DNA, 33 bp, Homo sapien
cttcagttattcgaggtattcaactgactgagc

SEQ ID NO: 19797 - DNA, 33 bp, Homo sapien
gacctcttccattatacaaaggacagaggtttg

SEQ ID NO: 19798 - DNA, 33 bp, Homo sapien
gacctcttccattatagaaaggacagaggtttg

SEQ ID NO: 19799 - DNA, 33 bp, Homo sapien
gccccaggtctggttacggagcaagtcactgtg

SEQ ID NO: 19800 - DNA, 33 bp, Homo sapien
gccccaggtctggttatggagcaagtcactgtg

SEQ ID NO: 19801 - DNA, 33 bp, Homo sapien
gagaaaagtaacttcaaagtaattaagcatttc

SEQ ID NO: 19802 - DNA, 33 bp, Homo sapien
gagaaaagtaacttcagagtaattaagcatttc

SEQ ID NO: 19803 - DNA, 33 bp, Homo sapien
ttgattcgtgtaatagcaaaaattatctgaatg

SEQ ID NO: 19804 - DNA, 33 bp, Homo sapien
ttgattcgtgtaatagtaaaaattatctgaatg

SEQ ID NO: 19805 - DNA, 33 bp, Homo sapien
aatccagagtctgcccgcagaaatttggattca

SEQ ID NO: 19806 - DNA, 33 bp, Homo sapien
aatccagagtctgccctcagaaatttggattca

SEQ ID NO: 19807 - DNA, 33 bp, Homo sapien
gacacttatcttcataaaacttatgttccagag

SEQ ID NO: 19808 - DNA, 33 bp, Homo sapien
gacacttatcttcatagaacttatgttccagag

SEQ ID NO: 19809 - DNA, 33 bp, Homo sapien
gcccagtttcctcttacattaaatgatgggatt

SEQ ID NO: 19810 - DNA, 33 bp, Homo sapien
gcccagtttcctcttatattaaatgatgggatt

SEQ ID NO: 19811 - DNA, 33 bp, Homo sapien
aataggagctcaaaaaatacatacactatttaa

SEQ ID NO: 19812 - DNA, 33 bp, Homo sapien
aataggagctcaaaaattacatacactatttaa

SEQ ID NO: 19813 - DNA, 33 bp, Homo sapien
aatgtttcttggtgaaagagagttaatgaaagg

SEQ ID NO: 19814 - DNA, 33 bp, Homo sapien
aatgtttcttggtgaaggagagttaatgaaagg

SEQ ID NO: 19815 - DNA, 33 bp, Homo sapien
aagcaggaggcgaataacatttactaaacagca

SEQ ID NO: 19816 - DNA, 33 bp, Homo sapien
aagcaggaggcgaatagcatttactaaacagca

SEQ ID NO: 19817 - DNA, 33 bp, Homo sapien
tacttttataaactacagacccacagagccaga

SEQ ID NO: 19818 - DNA, 33 bp, Homo sapien
tacttttataaactacggacccacagagccaga

SEQ ID NO: 19819 - DNA, 33 bp, Homo sapien
gttctttgctctagtaaaaaggggataatagtg

SEQ ID NO: 19820 - DNA, 33 bp, Homo sapien
gttctttgctctagtagaaaggggataatagtg

SEQ ID NO: 19821 - DNA, 33 bp, Homo sapien
ggaagtgtgtcagtaaatgagaaataggaaaga

SEQ ID NO: 19822 - DNA, 33 bp, Homo sapien
ggaagtgtgtcagtaagtgagaaataggaaaga

SEQ ID NO: 19823 - DNA, 33 bp, Homo sapien
ctgcaggacaagtatccattaaacagttagggg

SEQ ID NO: 19824 - DNA, 33 bp, Homo sapien
ctgcaggacaagtatctattaaacagttagggg

SEQ ID NO: 19825 - DNA, 33 bp, Homo sapien
ttgtaatggataataaacaaagaccttagcaca

SEQ ID NO: 19826 - DNA, 33 bp, Homo sapien
ttgtaatggataataagcaaagaccttagcaca

SEQ ID NO: 19827 - DNA, 33 bp, Homo sapien
tgatcactgcagatataaaacctaacctttata

SEQ ID NO: 19828 - DNA, 33 bp, Homo sapien
tgatcactgcagatatgaaacctaacctttata

SEQ ID NO: 19829 - DNA, 33 bp, Homo sapien
caaagttgaaagctaaacaatcagtcaggaggt

SEQ ID NO: 19830 - DNA, 33 bp, Homo sapien
caaagttgaaagctaagcaatcagtcaggaggt

SEQ ID NO: 19831 - DNA, 33 bp, Homo sapien
tggagttctaagttcaaggaagtgataggattg

SEQ ID NO: 19832 - DNA, 33 bp, Homo sapien
tggagttctaagttcagggaagtgataggattg

SEQ ID NO: 19833 - DNA, 33 bp, Homo sapien
taagtcacatagcaaacgacacagagagcaaac

SEQ ID NO: 19834 - DNA, 33 bp, Homo sapien
taagtcacatagcaaatgacacagagagcaaac

SEQ ID NO: 19835 - DNA, 33 bp, Homo sapien
gccctccctggctggaaaatgacctcactgcta

SEQ ID NO: 19836 - DNA, 33 bp, Homo sapien
gccctccctggctggagaatgacctcactgcta

SEQ ID NO: 19837 - DNA, 33 bp, Homo sapien
ggagataaagaagaaaagagagctttgagagtc

SEQ ID NO: 19838 - DNA, 33 bp, Homo sapien
ggagataaagaagaaacgagagctttgagagtc

SEQ ID NO: 19839 - DNA, 33 bp, Homo sapien
taatatctgtgtttaaggcaatgacctgagaag

SEQ ID NO: 19840 - DNA, 33 bp, Homo sapien
taatatctgtgtttaatgcaatgacctgagaag

SEQ ID NO: 19841 - DNA, 33 bp, Homo sapien
tcatgctgaagtcttaaggtttataagcaggca

SEQ ID NO: 19842 - DNA, 33 bp, Homo sapien
tcatgctgaagtcttagggtttataagcaggca

SEQ ID NO: 19843 - DNA, 33 bp, Homo sapien
tttacttttaaagtaactgatgcacaggactta

SEQ ID NO: 19844 - DNA, 33 bp, Homo sapien
tttacttttaaagtaattgatgcacaggactta

SEQ ID NO: 19845 - DNA, 33 bp, Homo sapien
gatagttgtgatatcaaccttgtcctcaaagca

SEQ ID NO: 19846 - DNA, 33 bp, Homo sapien
gatagttgtgatatcatccttgtcctcaaagca

SEQ ID NO: 19847 - DNA, 33 bp, Homo sapien
gccaccactcgtggccgggagttgctattctta

SEQ ID NO: 19848 - DNA, 33 bp, Homo sapien
gccaccactcgtggcctggagttgctattctta

SEQ ID NO: 19849 - DNA, 33 bp, Homo sapien
gaaatgctgactaggagcaaagacctggaatct

SEQ ID NO: 19850 - DNA, 33 bp, Homo sapien
gaaatgctgactaggatcaaagacctggaatct

SEQ ID NO: 19851 - DNA, 33 bp, Homo sapien
cctttgcaaaataatgacagtgagataaatcct

SEQ ID NO: 19852 - DNA, 33 bp, Homo sapien
cctttgcaaaataatggcagtgagataaatcct

SEQ ID NO: 19853 - DNA, 33 bp, Homo sapien
cctttccttctgctcaagtaagcatatcagaag

SEQ ID NO: 19854 - DNA, 33 bp, Homo sapien
cctttccttctgctcaggtaagcatatcagaag

SEQ ID NO: 19855 - DNA, 33 bp, Homo sapien
gaaatgcagattagagaccctggagccaaccca

SEQ ID NO: 19856 - DNA, 33 bp, Homo sapien
gaaatgcagattagaggccctggagccaaccca

SEQ ID NO: 19857 - DNA, 33 bp, Homo sapien
tcttcagctagatgtaataagcctgttctctaa

SEQ ID NO: 19858 - DNA, 33 bp, Homo sapien
tcttcagctagatgtattaagcctgttctctaa

SEQ ID NO: 19859 - DNA, 33 bp, Homo sapien
caaagttagtaactacccatccctgtatctcca

SEQ ID NO: 19860 - DNA, 33 bp, Homo sapien
caaagttagtaactactcatccctgtatctcca

SEQ ID NO: 19861 - DNA, 33 bp, Homo sapien
ggtcccaactgggaaactgacatcacttcctca

SEQ ID NO: 19862 - DNA, 33 bp, Homo sapien
ggtcccaactgggaaattgacatcacttcctca

SEQ ID NO: 19863 - DNA, 33 bp, Homo sapien
cattgtttttgaaacaccatgaaatctactttt

SEQ ID NO: 19864 - DNA, 33 bp, Homo sapien
cattgtttttgaaacatcatgaaatctactttt

SEQ ID NO: 19865 - DNA, 33 bp, Homo sapien
tggtggtctctccacacggatgcgcgtgaaagg

SEQ ID NO: 19866 - DNA, 33 bp, Homo sapien
tggtggtctctccacatggatgcgcgtgaaagg

SEQ ID NO: 19867 - DNA, 33 bp, Homo sapien
gtgcttaaatggagaacacgcctcacacctgcc

SEQ ID NO: 19868 - DNA, 33 bp, Homo sapien
gtgcttaaatggagaatacgcctcacacctgcc

SEQ ID NO: 19869 - DNA, 33 bp, Homo sapien
tgaattccccagattactaaggttgagagtatg

SEQ ID NO: 19870 - DNA, 33 bp, Homo sapien
tgaattccccagattattaaggttgagagtatg

SEQ ID NO: 19871 - DNA, 33 bp, Homo sapien
ggtaatgacttgtagggcactggcttctgacta

SEQ ID NO: 19872 - DNA, 33 bp, Homo sapien
ggtaatgacttgtaggtcactggcttctgacta

SEQ ID NO: 19873 - DNA, 33 bp, Homo sapien
gatttcaaaatgttcaatagcttgcctaagaag

SEQ ID NO: 19874 - DNA, 33 bp, Homo sapien
gatttcaaaatgttcagtagcttgcctaagaag

SEQ ID NO: 19875 - DNA, 33 bp, Homo sapien
tttcaaataacaaaaaagtgttaggtgtctgtg

SEQ ID NO: 19876 - DNA, 33 bp, Homo sapien
tttcaaataacaaaaaggtgttaggtgtctgtg

SEQ ID NO: 19877 - DNA, 33 bp, Homo sapien
catgtcggacctttacaggaaaatatacatata

SEQ ID NO: 19878 - DNA, 33 bp, Homo sapien
catgtcggacctttacgggaaaatatacatata

SEQ ID NO: 19879 - DNA, 33 bp, Homo sapien
ctttctgaacacctcaactgtgattctgggcac

SEQ ID NO: 19880 - DNA, 33 bp, Homo sapien
ctttctgaacacctcatctgtgattctgggcac

SEQ ID NO: 19881 - DNA, 33 bp, Homo sapien
ttatgcacaggaacaacatggctttgaattgct

SEQ ID NO: 19882 - DNA, 33 bp, Homo sapien
ttatgcacaggaacaatatggctttgaattgct

SEQ ID NO: 19883 - DNA, 33 bp, Homo sapien
caaagcaagtctcaaaaccaaggtgcagccacc

SEQ ID NO: 19884 - DNA, 33 bp, Homo sapien
caaagcaagtctcaaagccaaggtgcagccacc

SEQ ID NO: 19885 - DNA, 33 bp, Homo sapien
gacatgagtataaggacggatatagaaccatga

SEQ ID NO: 19886 - DNA, 33 bp, Homo sapien
gacatgagtataaggagggatatagaaccatga

SEQ ID NO: 19887 - DNA, 33 bp, Homo sapien
ttaatattagttaatgccatgtccaagaattca

SEQ ID NO: 19888 - DNA, 33 bp, Homo sapien
ttaatattagttaatgtcatgtccaagaattca

SEQ ID NO: 19889 - DNA, 33 bp, Homo sapien
gaagtgaagactgcaaactggagcaatgaaatt

SEQ ID NO: 19890 - DNA, 33 bp, Homo sapien
gaagtgaagactgcaagctggagcaatgaaatt

SEQ ID NO: 19891 - DNA, 33 bp, Homo sapien
aaaatttgtaggctgagtagaaatttgtactct

SEQ ID NO: 19892 - DNA, 33 bp, Homo sapien
aaaatttgtaggctgattagaaatttgtactct

SEQ ID NO: 19893 - DNA, 33 bp, Homo sapien
caaatagtttgtctatcaggtaagtagataaga

SEQ ID NO: 19894 - DNA, 33 bp, Homo sapien
caaatagtttgtctatgaggtaagtagataaga

SEQ ID NO: 19895 - DNA, 33 bp, Homo sapien
tgagagagttagtggcaactttggtgcgtactc

SEQ ID NO: 19896 - DNA, 33 bp, Homo sapien
tgagagagttagtggcgactttggtgcgtactc

SEQ ID NO: 19897 - DNA, 33 bp, Homo sapien
ctagatgactagagaaacaaagaaatggttggt

SEQ ID NO: 19898 - DNA, 33 bp, Homo sapien
ctagatgactagagaaccaaagaaatggttggt

SEQ ID NO: 19899 - DNA, 33 bp, Homo sapien
caggttagtgaacacactgatgggctgaaaagg

SEQ ID NO: 19900 - DNA, 33 bp, Homo sapien
caggttagtgaacacattgatgggctgaaaagg

SEQ ID NO: 19901 - DNA, 33 bp, Homo sapien
cctacagggagctgtaccttacttgtctcttgc

SEQ ID NO: 19902 - DNA, 33 bp, Homo sapien
cctacagggagctgtatcttacttgtctcttgc

SEQ ID NO: 19903 - DNA, 33 bp, Homo sapien
gcactgaggatgatgacaatttttccacatgaa

SEQ ID NO: 19904 - DNA, 33 bp, Homo sapien
gcactgaggatgatgataatttttccacatgaa

SEQ ID NO: 19905 - DNA, 33 bp, Homo sapien
ttcagtttgacctcaacttaacatgattatatc

SEQ ID NO: 19906 - DNA, 33 bp, Homo sapien
ttcagtttgacctcaatttaacatgattatatc

SEQ ID NO: 19907 - DNA, 33 bp, Homo sapien
aatgtatgtataaacccaggaataccaagaact

SEQ ID NO: 19908 - DNA, 33 bp, Homo sapien
aatgtatgtataaacctaggaataccaagaact

SEQ ID NO: 19909 - DNA, 33 bp, Homo sapien
ctcacctcagagcttgaagttgctgattcttct

SEQ ID NO: 19910 - DNA, 33 bp, Homo sapien
ctcacctcagagcttgcagttgctgattcttct

SEQ ID NO: 19911 - DNA, 33 bp, Homo sapien
gaattcaaacagatagaaaacttacaaagaaat

SEQ ID NO: 19912 - DNA, 33 bp, Homo sapien
gaattcaaacagataggaaacttacaaagaaat

SEQ ID NO: 19913 - DNA, 33 bp, Homo sapien
atagaaaactttagcaaatagagtcttaggatc

SEQ ID NO: 19914 - DNA, 33 bp, Homo sapien
atagaaaactttagcacatagagtcttaggatc

SEQ ID NO: 19915 - DNA, 33 bp, Homo sapien
tggaagtacctagaaaatcatgaagaagagaca

SEQ ID NO: 19916 - DNA, 33 bp, Homo sapien
tggaagtacctagaaagtcatgaagaagagaca

SEQ ID NO: 19917 - DNA, 33 bp, Homo sapien
cctagtgatttacaacaattatctcatgtaatc

SEQ ID NO: 19918 - DNA, 33 bp, Homo sapien
cctagtgatttacaaccattatctcatgtaatc

SEQ ID NO: 19919 - DNA, 33 bp, Homo sapien
cagaatgacccatggcaatagatatctgactta

SEQ ID NO: 19920 - DNA, 33 bp, Homo sapien
cagaatgacccatggctatagatatctgactta

SEQ ID NO: 19921 - DNA, 33 bp, Homo sapien
atgtgttatagaagaacgtgaagagaaagacgg

SEQ ID NO: 19922 - DNA, 33 bp, Homo sapien
atgtgttatagaagaatgtgaagagaaagacgg

SEQ ID NO: 19923 - DNA, 33 bp, Homo sapien
aggtggctaaatagcaagcccaagtcactcagc

SEQ ID NO: 19924 - DNA, 33 bp, Homo sapien
aggtggctaaatagcaggcccaagtcactcagc

SEQ ID NO: 19925 - DNA, 33 bp, Homo sapien
agtgaaaccttggtgaatatcctatgaatttct

SEQ ID NO: 19926 - DNA, 33 bp, Homo sapien
agtgaaaccttggtgactatcctatgaatttct

SEQ ID NO: 19927 - DNA, 33 bp, Homo sapien
cttccaaatttatatcactagtctggactgttt

SEQ ID NO: 19928 - DNA, 33 bp, Homo sapien
cttccaaatttatatccctagtctggactgttt

SEQ ID NO: 19929 - DNA, 33 bp, Homo sapien
tttctgtgaggtagaacttatcctcaaaactac

SEQ ID NO: 19930 - DNA, 33 bp, Homo sapien
tttctgtgaggtagaatttatcctcaaaactac

SEQ ID NO: 19931 - DNA, 33 bp, Homo sapien
ataatcattctacaaaagaaaaagagatgaaga

SEQ ID NO: 19932 - DNA, 33 bp, Homo sapien
ataatcattctacaaaggaaaaagagatgaaga

SEQ ID NO: 19933 - DNA, 33 bp, Homo sapien
ccaccagagagaaggaaataggatgacgagtgg

SEQ ID NO: 19934 - DNA, 33 bp, Homo sapien
ccaccagagagaaggagataggatgacgagtgg

SEQ ID NO: 19935 - DNA, 33 bp, Homo sapien
ctgtctggcctagaccccttcttaacacaacca

SEQ ID NO: 19936 - DNA, 33 bp, Homo sapien
ctgtctggcctagacctcttcttaacacaacca

SEQ ID NO: 19937 - DNA, 33 bp, Homo sapien
acatgtggtctttgtaactattgtcagaccctc

SEQ ID NO: 19938 - DNA, 33 bp, Homo sapien
acatgtggtctttgtagctattgtcagaccctc

SEQ ID NO: 19939 - DNA, 33 bp, Homo sapien
aatcctgatggctcccactggttgctaggtaac

SEQ ID NO: 19940 - DNA, 33 bp, Homo sapien
aatcctgatggctcccgctggttgctaggtaac

SEQ ID NO: 19941 - DNA, 33 bp, Homo sapien
tgaagaggcagtccagaagaaccaaagcacttg

SEQ ID NO: 19942 - DNA, 33 bp, Homo sapien
tgaagaggcagtccagtagaaccaaagcacttg

SEQ ID NO: 19943 - DNA, 33 bp, Homo sapien
agaaatggtccctaaacatctcccaagtatgat

SEQ ID NO: 19944 - DNA, 33 bp, Homo sapien
agaaatggtccctaaatatctcccaagtatgat

SEQ ID NO: 19945 - DNA, 33 bp, Homo sapien
gcccattgcaactatacaaggcagctgtacact

SEQ ID NO: 19946 - DNA, 33 bp, Homo sapien
gcccattgcaactatataaggcagctgtacact

SEQ ID NO: 19947 - DNA, 33 bp, Homo sapien
tggaggacaaacatccaaactatagcaatgagg

SEQ ID NO: 19948 - DNA, 33 bp, Homo sapien
tggaggacaaacatccgaactatagcaatgagg

SEQ ID NO: 19949 - DNA, 33 bp, Homo sapien
taaactgcatgctaaaatacagaataatggggt

SEQ ID NO: 19950 - DNA, 33 bp, Homo sapien
taaactgcatgctaaagtacagaataatggggt

SEQ ID NO: 19951 - DNA, 33 bp, Homo sapien
ttgttcttgctctaaacctttttaataaacatt

SEQ ID NO: 19952 - DNA, 33 bp, Homo sapien
ttgttcttgctctaaagctttttaataaacatt

SEQ ID NO: 19953 - DNA, 33 bp, Homo sapien
gaagtgacatcttaaactgatcccacaaagatg

SEQ ID NO: 19954 - DNA, 33 bp, Homo sapien
gaagtgacatcttaaattgatcccacaaagatg

SEQ ID NO: 19955 - DNA, 33 bp, Homo sapien
ttgtgtgatgtgagtgcatagtttgaatgggct

SEQ ID NO: 19956 - DNA, 33 bp, Homo sapien
ttgtgtgatgtgagtggatagtttgaatgggct

SEQ ID NO: 19957 - DNA, 33 bp, Homo sapien
tttacagcctgtgaaaaagctatcaaaacccag

SEQ ID NO: 19958 - DNA, 33 bp, Homo sapien
tttacagcctgtgaaagagctatcaaaacccag

SEQ ID NO: 19959 - DNA, 33 bp, Homo sapien
tgcatagataatatcacccttggttgacataaa

SEQ ID NO: 19960 - DNA, 33 bp, Homo sapien
tgcatagataatatcatccttggttgacataaa

SEQ ID NO: 19961 - DNA, 33 bp, Homo sapien
gtgaatgaaagtatcacgaggcttctaaagtac

SEQ ID NO: 19962 - DNA, 33 bp, Homo sapien
gtgaatgaaagtatcatgaggcttctaaagtac

SEQ ID NO: 19963 - DNA, 33 bp, Homo sapien
tcctgggatctgtgaccgtacacagtaagtgag

SEQ ID NO: 19964 - DNA, 33 bp, Homo sapien
tcctgggatctgtgactgtacacagtaagtgag

SEQ ID NO: 19965 - DNA, 33 bp, Homo sapien
gaggctgcacacagcacaggtatctggtggcca

SEQ ID NO: 19966 - DNA, 33 bp, Homo sapien
gaggctgcacacagcataggtatctggtggcca

SEQ ID NO: 19967 - DNA, 33 bp, Homo sapien
atcttctatataaatacgtgaggtgctgctgtc

SEQ ID NO: 19968 - DNA, 33 bp, Homo sapien
atcttctatataaatatgtgaggtgctgctgtc

SEQ ID NO: 19969 - DNA, 33 bp, Homo sapien
tggtcctttttgaacacctttactgctgagcag

SEQ ID NO: 19970 - DNA, 33 bp, Homo sapien
tggtcctttttgaacatctttactgctgagcag

SEQ ID NO: 19971 - DNA, 33 bp, Homo sapien
aatgccaagtgttaggaaaaggtcagggggaag

SEQ ID NO: 19972 - DNA, 33 bp, Homo sapien
aatgccaagtgttagggaaaggtcagggggaag

SEQ ID NO: 19973 - DNA, 33 bp, Homo sapien
aagaatggcctttaaacgttggcctgcattatc

SEQ ID NO: 19974 - DNA, 33 bp, Homo sapien
aagaatggcctttaaatgttggcctgcattatc

SEQ ID NO: 19975 - DNA, 33 bp, Homo sapien
cagagttaggtttatgaacaaagacatttaggg

SEQ ID NO: 19976 - DNA, 33 bp, Homo sapien
cagagttaggtttatgcacaaagacatttaggg

SEQ ID NO: 19977 - DNA, 33 bp, Homo sapien
tgttcattcattcaacagacttttttttaagag

SEQ ID NO: 19978 - DNA, 33 bp, Homo sapien
tgttcattcattcaacggacttttttttaagag

SEQ ID NO: 19979 - DNA, 33 bp, Homo sapien
atcaaccaaataagccaaagcgagggcaattat

SEQ ID NO: 19980 - DNA, 33 bp, Homo sapien
atcaaccaaataagccgaagcgagggcaattat

SEQ ID NO: 19981 - DNA, 33 bp, Homo sapien
accaacattgtcaggaagggaatattaccattt

SEQ ID NO: 19982 - DNA, 33 bp, Homo sapien
accaacattgtcaggaggggaatattaccattt

SEQ ID NO: 19983 - DNA, 33 bp, Homo sapien
tcacttctgttacaaaagaaagggaactctcaa

SEQ ID NO: 19984 - DNA, 33 bp, Homo sapien
tcacttctgttacaaatgaaagggaactctcaa

SEQ ID NO: 19985 - DNA, 33 bp, Homo sapien
taccagtgcagtttcacacaaagtagtttcact

SEQ ID NO: 19986 - DNA, 33 bp, Homo sapien
taccagtgcagtttcatacaaagtagtttcact

SEQ ID NO: 19987 - DNA, 33 bp, Homo sapien
cacattttttactagacgatgaaaagccaaact

SEQ ID NO: 19988 - DNA, 33 bp, Homo sapien
cacattttttactagatgatgaaaagccaaact

SEQ ID NO: 19989 - DNA, 33 bp, Homo sapien
tacccaagctaggtcaacaggctgaaggactca

SEQ ID NO: 19990 - DNA, 33 bp, Homo sapien
tacccaagctaggtcagcaggctgaaggactca

SEQ ID NO: 19991 - DNA, 33 bp, Homo sapien
ggaaagtaatgagtaaccaggggacattgaaaa

SEQ ID NO: 19992 - DNA, 33 bp, Homo sapien
ggaaagtaatgagtaatcaggggacattgaaaa

SEQ ID NO: 19993 - DNA, 33 bp, Homo sapien
agcttacctcaaccaccatgttctctctcatct

SEQ ID NO: 19994 - DNA, 33 bp, Homo sapien
agcttacctcaaccacgatgttctctctcatct

SEQ ID NO: 19995 - DNA, 33 bp, Homo sapien
tctaggtttggggcaaagccatggactctgcct

SEQ ID NO: 19996 - DNA, 33 bp, Homo sapien
tctaggtttggggcaaggccatggactctgcct

SEQ ID NO: 19997 - DNA, 33 bp, Homo sapien
gctctgttctgtgccacccagggcctttgttcc

SEQ ID NO: 19998 - DNA, 33 bp, Homo sapien
gctctgttctgtgccatccagggcctttgttcc

SEQ ID NO: 19999 - DNA, 33 bp, Homo sapien
gctctttctgcctgcaaagcactaagtaagagc

SEQ ID NO: 20000 - DNA, 33 bp, Homo sapien
gctctttctgcctgcatagcactaagtaagagc

SEQ ID NO: 20001 - DNA, 33 bp, Homo sapien
tcaatatgagctttaaactgagtgaatagaaac

SEQ ID NO: 20002 - DNA, 33 bp, Homo sapien
tcaatatgagctttaatctgagtgaatagaaac

SEQ ID NO: 20003 - DNA, 33 bp, Homo sapien
aaagatcacttacaggacattctatattggagc

SEQ ID NO: 20004 - DNA, 33 bp, Homo sapien
aaagatcacttacagggcattctatattggagc

SEQ ID NO: 20005 - DNA, 33 bp, Homo sapien
tggccttgcatggaagcatttaggctagagaat

SEQ ID NO: 20006 - DNA, 33 bp, Homo sapien
tggccttgcatggaagtatttaggctagagaat

SEQ ID NO: 20007 - DNA, 33 bp, Homo sapien
agcagttctactgaatcagaggttgataatctt

SEQ ID NO: 20008 - DNA, 33 bp, Homo sapien
agcagttctactgaatgagaggttgataatctt

SEQ ID NO: 20009 - DNA, 33 bp, Homo sapien
atatcagaccgcatcccctctttctactcctct

SEQ ID NO: 20010 - DNA, 33 bp, Homo sapien
atatcagaccgcatcctctctttctactcctct

SEQ ID NO: 20011 - DNA, 33 bp, Homo sapien
acccctgtcaaaatatcaggaaacgagggcata

SEQ ID NO: 20012 - DNA, 33 bp, Homo sapien
acccctgtcaaaatatgaggaaacgagggcata

SEQ ID NO: 20013 - DNA, 33 bp, Homo sapien
acaccctgaagtacacagactgaagtgcagagg

SEQ ID NO: 20014 - DNA, 33 bp, Homo sapien
acaccctgaagtacacggactgaagtgcagagg

SEQ ID NO: 20015 - DNA, 33 bp, Homo sapien
agcacaccttgttgcacgggctgtgagttatac

SEQ ID NO: 20016 - DNA, 33 bp, Homo sapien
agcacaccttgttgcaggggctgtgagttatac

SEQ ID NO: 20017 - DNA, 33 bp, Homo sapien
ggaaatgcaaagatcaggaactaaggccctcag

SEQ ID NO: 20018 - DNA, 33 bp, Homo sapien
ggaaatgcaaagatcatgaactaaggccctcag

SEQ ID NO: 20019 - DNA, 33 bp, Homo sapien
ctgttcaggacatactcacgatctgaactttct

SEQ ID NO: 20020 - DNA, 33 bp, Homo sapien
ctgttcaggacatactgacgatctgaactttct

SEQ ID NO: 20021 - DNA, 33 bp, Homo sapien
tattagaacaatgtaaatctgaagttaccgggg

SEQ ID NO: 20022 - DNA, 33 bp, Homo sapien
tattagaacaatgtaagtctgaagttaccgggg

SEQ ID NO: 20023 - DNA, 33 bp, Homo sapien
gggaccgctggcttaaagtaacactaagaatgg

SEQ ID NO: 20024 - DNA, 33 bp, Homo sapien
gggaccgctggcttaacgtaacactaagaatgg

SEQ ID NO: 20025 - DNA, 33 bp, Homo sapien
tgatagattgaggtaacgctcataactgttagt

SEQ ID NO: 20026 - DNA, 33 bp, Homo sapien
tgatagattgaggtaatgctcataactgttagt

SEQ ID NO: 20027 - DNA, 33 bp, Homo sapien
gactaattcactatcaatcctcttctctatgtg

SEQ ID NO: 20028 - DNA, 33 bp, Homo sapien
gactaattcactatcagtcctcttctctatgtg

SEQ ID NO: 20029 - DNA, 33 bp, Homo sapien
tctctactttgaaatacacagtctgttctattt

SEQ ID NO: 20030 - DNA, 33 bp, Homo sapien
tctctactttgaaatatacagtctgttctattt

SEQ ID NO: 20031 - DNA, 33 bp, Homo sapien
tctatttttacctccagcttgaactctggcact

SEQ ID NO: 20032 - DNA, 33 bp, Homo sapien
tctatttttacctccatcttgaactctggcact

SEQ ID NO: 20033 - DNA, 33 bp, Homo sapien
agagaggctaaaagcaaaaacattgagtgccag

SEQ ID NO: 20034 - DNA, 33 bp, Homo sapien
agagaggctaaaagcagaaacattgagtgccag

SEQ ID NO: 20035 - DNA, 33 bp, Homo sapien
gggccagtgcaagggtcaaatatagcaaaatat

SEQ ID NO: 20036 - DNA, 33 bp, Homo sapien
gggccagtgcaagggtgaaatatagcaaaatat

SEQ ID NO: 20037 - DNA, 33 bp, Homo sapien
agcaagcacatcaaaaatccataaagaattgta

SEQ ID NO: 20038 - DNA, 33 bp, Homo sapien
agcaagcacatcaaaagtccataaagaattgta

SEQ ID NO: 20039 - DNA, 33 bp, Homo sapien
accaacatttcagtgacgagctaggcactagtg

SEQ ID NO: 20040 - DNA, 33 bp, Homo sapien
accaacatttcagtgatgagctaggcactagtg

SEQ ID NO: 20041 - DNA, 33 bp, Homo sapien
ttcattcattcaaccaaaaattaaaatatcaga

SEQ ID NO: 20042 - DNA, 33 bp, Homo sapien
ttcattcattcaaccacaaattaaaatatcaga

SEQ ID NO: 20043 - DNA, 33 bp, Homo sapien
tctccatctgtttgtccctcttgctaatctgtg

SEQ ID NO: 20044 - DNA, 33 bp, Homo sapien
tctccatctgtttgtctctcttgctaatctgtg

SEQ ID NO: 20045 - DNA, 33 bp, Homo sapien
tatcaaagctgtgaagcaatcaatagttactga

SEQ ID NO: 20046 - DNA, 33 bp, Homo sapien
tatcaaagctgtgaaggaatcaatagttactga

SEQ ID NO: 20047 - DNA, 33 bp, Homo sapien
acctaggcctatttcagtacagagagtaaataa

SEQ ID NO: 20048 - DNA, 33 bp, Homo sapien
acctaggcctatttcattacagagagtaaataa

SEQ ID NO: 20049 - DNA, 33 bp, Homo sapien
atcgttggacttttcacctcagctcacctgcta

SEQ ID NO: 20050 - DNA, 33 bp, Homo sapien
atcgttggacttttcatctcagctcacctgcta

SEQ ID NO: 20051 - DNA, 33 bp, Homo sapien
ggcttattcatgcagccacattctgctagcagg

SEQ ID NO: 20052 - DNA, 33 bp, Homo sapien
ggcttattcatgcagctacattctgctagcagg

SEQ ID NO: 20053 - DNA, 33 bp, Homo sapien
acacacaagaatgtcaagagcttttaaagtttc

SEQ ID NO: 20054 - DNA, 33 bp, Homo sapien
acacacaagaatgtcaggagcttttaaagtttc

SEQ ID NO: 20055 - DNA, 33 bp, Homo sapien
ttaattagctgtgaaccgcagggctaagtggca

SEQ ID NO: 20056 - DNA, 33 bp, Homo sapien
ttaattagctgtgaactgcagggctaagtggca

SEQ ID NO: 20057 - DNA, 33 bp, Homo sapien
tagttttaaaatactaccatctggatgtacata

SEQ ID NO: 20058 - DNA, 33 bp, Homo sapien
tagttttaaaatactatcatctggatgtacata

SEQ ID NO: 20059 - DNA, 33 bp, Homo sapien
ctgcattgcctctgaacgctctaggggagaatg

SEQ ID NO: 20060 - DNA, 33 bp, Homo sapien
ctgcattgcctctgaaggctctaggggagaatg

SEQ ID NO: 20061 - DNA, 33 bp, Homo sapien
ggtgggatccgatgaaatgtattataaaacttt

SEQ ID NO: 20062 - DNA, 33 bp, Homo sapien
ggtgggatccgatgaagtgtattataaaacttt

SEQ ID NO: 20063 - DNA, 33 bp, Homo sapien
agtgaacagtgacccaactggagcaaagaagtc

SEQ ID NO: 20064 - DNA, 33 bp, Homo sapien
agtgaacagtgacccagctggagcaaagaagtc

SEQ ID NO: 20065 - DNA, 33 bp, Homo sapien
cctctgttccttcttaagtatctgacgttgtgt

SEQ ID NO: 20066 - DNA, 33 bp, Homo sapien
cctctgttccttcttaggtatctgacgttgtgt

SEQ ID NO: 20067 - DNA, 33 bp, Homo sapien
gctgctttgacctccaaatttagtgaatgtgta

SEQ ID NO: 20068 - DNA, 33 bp, Homo sapien
gctgctttgacctccagatttagtgaatgtgta

SEQ ID NO: 20069 - DNA, 33 bp, Homo sapien
acacacttaccatcacgattgtaattaggggga

SEQ ID NO: 20070 - DNA, 33 bp, Homo sapien
acacacttaccatcactattgtaattaggggga

SEQ ID NO: 20071 - DNA, 33 bp, Homo sapien
cattaaatgagaaaccacaattcaggaagtcct

SEQ ID NO: 20072 - DNA, 33 bp, Homo sapien
cattaaatgagaaaccgcaattcaggaagtcct

SEQ ID NO: 20073 - DNA, 33 bp, Homo sapien
ttaagagaggtccaaacgaatgctaaaggtgct

SEQ ID NO: 20074 - DNA, 33 bp, Homo sapien
ttaagagaggtccaaaggaatgctaaaggtgct

SEQ ID NO: 20075 - DNA, 33 bp, Homo sapien
gttaaggaattggaagcctaaggaatactggct

SEQ ID NO: 20076 - DNA, 33 bp, Homo sapien
gttaaggaattggaaggctaaggaatactggct

SEQ ID NO: 20077 - DNA, 33 bp, Homo sapien
ttatatactgtatgtacgtggaatcatgccgtg

SEQ ID NO: 20078 - DNA, 33 bp, Homo sapien
ttatatactgtatgtatgtggaatcatgccgtg

SEQ ID NO: 20079 - DNA, 33 bp, Homo sapien
aaacgaatcactaaggaagagaaaattctaaga

SEQ ID NO: 20080 - DNA, 33 bp, Homo sapien
aaacgaatcactaaggtagagaaaattctaaga

SEQ ID NO: 20081 - DNA, 33 bp, Homo sapien
tctgtatggacaattaccagactgtaacagccg

SEQ ID NO: 20082 - DNA, 33 bp, Homo sapien
tctgtatggacaattatcagactgtaacagccg

SEQ ID NO: 20083 - DNA, 33 bp, Homo sapien
ctcagtgctgtaaaggaaggagcctcatgtgtt

SEQ ID NO: 20084 - DNA, 33 bp, Homo sapien
ctcagtgctgtaaagggaggagcctcatgtgtt

SEQ ID NO: 20085 - DNA, 33 bp, Homo sapien
ctgtacggtgcatctcagaatgagtgtcaggga

SEQ ID NO: 20086 - DNA, 33 bp, Homo sapien
ctgtacggtgcatctctgaatgagtgtcaggga

SEQ ID NO: 20087 - DNA, 33 bp, Homo sapien
ttattatgtacaccaaaaactcattctacatct

SEQ ID NO: 20088 - DNA, 33 bp, Homo sapien
ttattatgtacaccaataactcattctacatct

SEQ ID NO: 20089 - DNA, 33 bp, Homo sapien
ctgccacatgagaatacgagaagataaccatct

SEQ ID NO: 20090 - DNA, 33 bp, Homo sapien
ctgccacatgagaatatgagaagataaccatct

SEQ ID NO: 20091 - DNA, 33 bp, Homo sapien
taaaaacactctctcacatgctgtggatattaa

SEQ ID NO: 20092 - DNA, 33 bp, Homo sapien
taaaaacactctctcagatgctgtggatattaa

SEQ ID NO: 20093 - DNA, 33 bp, Homo sapien
ctatggactgtttgccaatttcccatttaagta

SEQ ID NO: 20094 - DNA, 33 bp, Homo sapien
ctatggactgtttgccgatttcccatttaagta

SEQ ID NO: 20095 - DNA, 33 bp, Homo sapien
ctttttagtttgagcaactcaaggtgatggtgg

SEQ ID NO: 20096 - DNA, 33 bp, Homo sapien
ctttttagtttgagcagctcaaggtgatggtgg

SEQ ID NO: 20097 - DNA, 33 bp, Homo sapien
ctaaaaagccctgaacaaccttaattgcctcta

SEQ ID NO: 20098 - DNA, 33 bp, Homo sapien
ctaaaaagccctgaacgaccttaattgcctcta

SEQ ID NO: 20099 - DNA, 33 bp, Homo sapien
atcagcacaagggctaggcgattaggcacaggc

SEQ ID NO: 20100 - DNA, 33 bp, Homo sapien
atcagcacaagggctatgcgattaggcacaggc

SEQ ID NO: 20101 - DNA, 33 bp, Homo sapien
ttctcacagagaacaacaaaaatccaagtgcta

SEQ ID NO: 20102 - DNA, 33 bp, Homo sapien
ttctcacagagaacaagaaaaatccaagtgcta

SEQ ID NO: 20103 - DNA, 33 bp, Homo sapien
tctttccaaaatcatgcatggtcaggtaaatat

SEQ ID NO: 20104 - DNA, 33 bp, Homo sapien
tctttccaaaatcatggatggtcaggtaaatat

SEQ ID NO: 20105 - DNA, 33 bp, Homo sapien
tttatctggcaagaaaagggttggggacaagct

SEQ ID NO: 20106 - DNA, 33 bp, Homo sapien
tttatctggcaagaaaggggttggggacaagct

SEQ ID NO: 20107 - DNA, 33 bp, Homo sapien
aagtcttccctgaaaaactcaaagaagtacatt

SEQ ID NO: 20108 - DNA, 33 bp, Homo sapien
aagtcttccctgaaaagctcaaagaagtacatt

SEQ ID NO: 20109 - DNA, 33 bp, Homo sapien
gcccgttgggcatagcacttattgttccaggtg

SEQ ID NO: 20110 - DNA, 33 bp, Homo sapien
gcccgttgggcatagctcttattgttccaggtg

SEQ ID NO: 20111 - DNA, 33 bp, Homo sapien
ggtaatattcattccacgtagttggtgttgtaa

SEQ ID NO: 20112 - DNA, 33 bp, Homo sapien
ggtaatattcattccatgtagttggtgttgtaa

SEQ ID NO: 20113 - DNA, 33 bp, Homo sapien
aaaaaattagtagaaggctgcaggtctagaatt

SEQ ID NO: 20114 - DNA, 33 bp, Homo sapien
aaaaaattagtagaagtctgcaggtctagaatt

SEQ ID NO: 20115 - DNA, 33 bp, Homo sapien
cttctagtcaatggaacatgattctgagcatgg

SEQ ID NO: 20116 - DNA, 33 bp, Homo sapien
cttctagtcaatggaatatgattctgagcatgg

SEQ ID NO: 20117 - DNA, 33 bp, Homo sapien
gcaggcaagggaagctgaaatgggccatgctca

SEQ ID NO: 20118 - DNA, 33 bp, Homo sapien
gcaggcaagggaagcttaaatgggccatgctca

SEQ ID NO: 20119 - DNA, 33 bp, Homo sapien
cccactagaatgaagaccctaggatgcctttgt

SEQ ID NO: 20120 - DNA, 33 bp, Homo sapien
cccactagaatgaagatcctaggatgcctttgt

SEQ ID NO: 20121 - DNA, 33 bp, Homo sapien
cctcatcagaaaaagggagtaagagcatttaag

SEQ ID NO: 20122 - DNA, 33 bp, Homo sapien
cctcatcagaaaaaggtagtaagagcatttaag

SEQ ID NO: 20123 - DNA, 33 bp, Homo sapien
ttcctttgtgttaatcaaccttgcactaccctg

SEQ ID NO: 20124 - DNA, 33 bp, Homo sapien
ttcctttgtgttaatccaccttgcactaccctg

SEQ ID NO: 20125 - DNA, 33 bp, Homo sapien
ccaatgttctcaatccacaggaaactcatttag

SEQ ID NO: 20126 - DNA, 33 bp, Homo sapien
ccaatgttctcaatccgcaggaaactcatttag

SEQ ID NO: 20127 - DNA, 33 bp, Homo sapien
attgctgttttaaaaacgaggccttggagttgg

SEQ ID NO: 20128 - DNA, 33 bp, Homo sapien
attgctgttttaaaaatgaggccttggagttgg

SEQ ID NO: 20129 - DNA, 33 bp, Homo sapien
tggtctcttgtcaagaacctgttggcttacctc

SEQ ID NO: 20130 - DNA, 33 bp, Homo sapien
tggtctcttgtcaagaccctgttggcttacctc

SEQ ID NO: 20131 - DNA, 33 bp, Homo sapien
cagaggaactgtcaggaaaaaaaaagatctcct

SEQ ID NO: 20132 - DNA, 33 bp, Homo sapien
cagaggaactgtcaggtaaaaaaaagatctcct

SEQ ID NO: 20133 - DNA, 33 bp, Homo sapien
agtaagacaagaattacagtgcaagtctcacta

SEQ ID NO: 20134 - DNA, 33 bp, Homo sapien
agtaagacaagaattatagtgcaagtctcacta

SEQ ID NO: 20135 - DNA, 33 bp, Homo sapien
gtgagtcatttcgtgacgcaagaaaaaaaatga

SEQ ID NO: 20136 - DNA, 33 bp, Homo sapien
gtgagtcatttcgtgatgcaagaaaaaaaatga

SEQ ID NO: 20137 - DNA, 33 bp, Homo sapien
caaggctgaggccacagacttgcattccaggca

SEQ ID NO: 20138 - DNA, 33 bp, Homo sapien
caaggctgaggccacatacttgcattccaggca

SEQ ID NO: 20139 - DNA, 33 bp, Homo sapien
caaattcagttcatgacagactctgatttgtac

SEQ ID NO: 20140 - DNA, 33 bp, Homo sapien
caaattcagttcatgatagactctgatttgtac

SEQ ID NO: 20141 - DNA, 33 bp, Homo sapien
cttcatgagtcgatacaaagggtgagaatggaa

SEQ ID NO: 20142 - DNA, 33 bp, Homo sapien
cttcatgagtcgatacgaagggtgagaatggaa

SEQ ID NO: 20143 - DNA, 33 bp, Homo sapien
gtatgtattcttggtaagccgtaaagtacaaag

SEQ ID NO: 20144 - DNA, 33 bp, Homo sapien
gtatgtattcttggtacgccgtaaagtacaaag

SEQ ID NO: 20145 - DNA, 33 bp, Homo sapien
atgattttgccagcacaataactgagacagata

SEQ ID NO: 20146 - DNA, 33 bp, Homo sapien
atgattttgccagcacgataactgagacagata

SEQ ID NO: 20147 - DNA, 33 bp, Homo sapien
tagagcaccctgtgccaacctttatcatagcac

SEQ ID NO: 20148 - DNA, 33 bp, Homo sapien
tagagcaccctgtgcctacctttatcatagcac

SEQ ID NO: 20149 - DNA, 33 bp, Homo sapien
taaagaacagagatgaacagaaaagaaattctc

SEQ ID NO: 20150 - DNA, 33 bp, Homo sapien
taaagaacagagatgagcagaaaagaaattctc

SEQ ID NO: 20151 - DNA, 33 bp, Homo sapien
catggccttgggtgaaatgcaaaaactcttgtg

SEQ ID NO: 20152 - DNA, 33 bp, Homo sapien
catggccttgggtgaagtgcaaaaactcttgtg

SEQ ID NO: 20153 - DNA, 33 bp, Homo sapien
accatagaaagcatgacattgttactggccaag

SEQ ID NO: 20154 - DNA, 33 bp, Homo sapien
accatagaaagcatgagattgttactggccaag

SEQ ID NO: 20155 - DNA, 33 bp, Homo sapien
gactttggtcaagccacctgacttctctgagcc

SEQ ID NO: 20156 - DNA, 33 bp, Homo sapien
gactttggtcaagccatctgacttctctgagcc

SEQ ID NO: 20157 - DNA, 33 bp, Homo sapien
ctctgctaaaattctacgacagtgaggaatgag

SEQ ID NO: 20158 - DNA, 33 bp, Homo sapien
ctctgctaaaattctatgacagtgaggaatgag

SEQ ID NO: 20159 - DNA, 33 bp, Homo sapien
cattgtgcggcatagaagatgaaaccagctctg

SEQ ID NO: 20160 - DNA, 33 bp, Homo sapien
cattgtgcggcatagatgatgaaaccagctctg

SEQ ID NO: 20161 - DNA, 33 bp, Homo sapien
tgaatgttcttacagcaaaatcaacctatgata

SEQ ID NO: 20162 - DNA, 33 bp, Homo sapien
tgaatgttcttacagcgaaatcaacctatgata

SEQ ID NO: 20163 - DNA, 33 bp, Homo sapien
agcataagtgtcataaacagggactttgtctat

SEQ ID NO: 20164 - DNA, 33 bp, Homo sapien
agcataagtgtcataagcagggactttgtctat

SEQ ID NO: 20165 - DNA, 33 bp, Homo sapien
ctaggaaagagacttacatagtttagctgaata

SEQ ID NO: 20166 - DNA, 33 bp, Homo sapien
ctaggaaagagacttatatagtttagctgaata

SEQ ID NO: 20167 - DNA, 33 bp, Homo sapien
acaccctctccacagccatggtcctcagtactt

SEQ ID NO: 20168 - DNA, 33 bp, Homo sapien
acaccctctccacagcgatggtcctcagtactt

SEQ ID NO: 20169 - DNA, 33 bp, Homo sapien
ctgattttatttgagcacctactctctacttag

SEQ ID NO: 20170 - DNA, 33 bp, Homo sapien
ctgattttatttgagcgcctactctctacttag

SEQ ID NO: 20171 - DNA, 33 bp, Homo sapien
attagaagaaaccaaactgggagtagagtgcag

SEQ ID NO: 20172 - DNA, 33 bp, Homo sapien
attagaagaaaccaaattgggagtagagtgcag

SEQ ID NO: 20173 - DNA, 33 bp, Homo sapien
aaggaattcttcctgacggatattgttaagtat

SEQ ID NO: 20174 - DNA, 33 bp, Homo sapien
aaggaattcttcctgatggatattgttaagtat

SEQ ID NO: 20175 - DNA, 33 bp, Homo sapien
tgggtcacaaggaagacgtactgaatgaagatc

SEQ ID NO: 20176 - DNA, 33 bp, Homo sapien
tgggtcacaaggaagatgtactgaatgaagatc

SEQ ID NO: 20177 - DNA, 33 bp, Homo sapien
agcaatgctcttgtccaaagcccttattttcta

SEQ ID NO: 20178 - DNA, 33 bp, Homo sapien
agcaatgctcttgtccgaagcccttattttcta

SEQ ID NO: 20179 - DNA, 33 bp, Homo sapien
actgtactgactgttacaagaaagacacaacct

SEQ ID NO: 20180 - DNA, 33 bp, Homo sapien
actgtactgactgttataagaaagacacaacct

SEQ ID NO: 20181 - DNA, 33 bp, Homo sapien
tttgacatatgacttacggccagtcacttttct

SEQ ID NO: 20182 - DNA, 33 bp, Homo sapien
tttgacatatgacttagggccagtcacttttct

SEQ ID NO: 20183 - DNA, 33 bp, Homo sapien
gtatgtatcatcatcgacatttcataaatgagg

SEQ ID NO: 20184 - DNA, 33 bp, Homo sapien
gtatgtatcatcatcggcatttcataaatgagg

SEQ ID NO: 20185 - DNA, 33 bp, Homo sapien
tttacatcacaccacccacttgacaggatcatg

SEQ ID NO: 20186 - DNA, 33 bp, Homo sapien
tttacatcacaccaccgacttgacaggatcatg

SEQ ID NO: 20187 - DNA, 33 bp, Homo sapien
gaatggtgtccttcccaaattcctccactgact

SEQ ID NO: 20188 - DNA, 33 bp, Homo sapien
gaatggtgtccttcccgaattcctccactgact

SEQ ID NO: 20189 - DNA, 33 bp, Homo sapien
tgttgtcaaaagctgaagcacaaatggcaaaaa

SEQ ID NO: 20190 - DNA, 33 bp, Homo sapien
tgttgtcaaaagctgaggcacaaatggcaaaaa

SEQ ID NO: 20191 - DNA, 33 bp, Homo sapien
aaagaccacatacctcagaaatagcagtgctgg

SEQ ID NO: 20192 - DNA, 33 bp, Homo sapien
aaagaccacatacctcggaaatagcagtgctgg

SEQ ID NO: 20193 - DNA, 33 bp, Homo sapien
aagtcatcattttcaacattggcggctaccctg

SEQ ID NO: 20194 - DNA, 33 bp, Homo sapien
aagtcatcattttcaatattggcggctaccctg

SEQ ID NO: 20195 - DNA, 33 bp, Homo sapien
tggaatcaagcaagaaagttggtcagggaaagg

SEQ ID NO: 20196 - DNA, 33 bp, Homo sapien
tggaatcaagcaagaaggttggtcagggaaagg

SEQ ID NO: 20197 - DNA, 33 bp, Homo sapien
ccatctcaccattcccacatcctccggcaggat

SEQ ID NO: 20198 - DNA, 33 bp, Homo sapien
ccatctcaccattcccgcatcctccggcaggat

SEQ ID NO: 20199 - DNA, 33 bp, Homo sapien
ttctcttagcttgcaaacccttgttgttctgat

SEQ ID NO: 20200 - DNA, 33 bp, Homo sapien
ttctcttagcttgcaaccccttgttgttctgat

SEQ ID NO: 20201 - DNA, 33 bp, Homo sapien
accttggtaccctgaaccttagtgtcctcagct

SEQ ID NO: 20202 - DNA, 33 bp, Homo sapien
accttggtaccctgaatcttagtgtcctcagct

SEQ ID NO: 20203 - DNA, 33 bp, Homo sapien
tagtttctgtttagaaatcttgaatggctgtgt

SEQ ID NO: 20204 - DNA, 33 bp, Homo sapien
tagtttctgtttagaagtcttgaatggctgtgt

SEQ ID NO: 20205 - DNA, 33 bp, Homo sapien
ctggctttggttgacgcaattgggccaagtttc

SEQ ID NO: 20206 - DNA, 33 bp, Homo sapien
ctggctttggttgacggaattgggccaagtttc

SEQ ID NO: 20207 - DNA, 33 bp, Homo sapien
agccatgatgttttaacaacttgtaattcattc

SEQ ID NO: 20208 - DNA, 33 bp, Homo sapien
agccatgatgttttaataacttgtaattcattc

SEQ ID NO: 20209 - DNA, 33 bp, Homo sapien
agatggcataaggtaaagaagattcttggataa

SEQ ID NO: 20210 - DNA, 33 bp, Homo sapien
agatggcataaggtaatgaagattcttggataa

SEQ ID NO: 20211 - DNA, 33 bp, Homo sapien
gtcttggttgaagacaaatcattacttaagagt

SEQ ID NO: 20212 - DNA, 33 bp, Homo sapien
gtcttggttgaagacacatcattacttaagagt

SEQ ID NO: 20213 - DNA, 33 bp, Homo sapien
agttcctatgaaccatcaaaatctaaggtttac

SEQ ID NO: 20214 - DNA, 33 bp, Homo sapien
agttcctatgaaccatgaaaatctaaggtttac

SEQ ID NO: 20215 - DNA, 33 bp, Homo sapien
ctgtcattagaccagaacctgtgagagaaaaaa

SEQ ID NO: 20216 - DNA, 33 bp, Homo sapien
ctgtcattagaccagagcctgtgagagaaaaaa

SEQ ID NO: 20217 - DNA, 33 bp, Homo sapien
aaacctactttaggtcaactttatatatttaac

SEQ ID NO: 20218 - DNA, 33 bp, Homo sapien
aaacctactttaggtccactttatatatttaac

SEQ ID NO: 20219 - DNA, 33 bp, Homo sapien
ctaatacaactacttactaactttgtgatcttg

SEQ ID NO: 20220 - DNA, 33 bp, Homo sapien
ctaatacaactacttagtaactttgtgatcttg

SEQ ID NO: 20221 - DNA, 33 bp, Homo sapien
ctttcccctcattttcactctacactcctcctt

SEQ ID NO: 20222 - DNA, 33 bp, Homo sapien
ctttcccctcattttcgctctacactcctcctt

SEQ ID NO: 20223 - DNA, 33 bp, Homo sapien
cattccattcaaatcaatatggtgatatgtcag

SEQ ID NO: 20224 - DNA, 33 bp, Homo sapien
cattccattcaaatcagtatggtgatatgtcag

SEQ ID NO: 20225 - DNA, 33 bp, Homo sapien
catatgaattcagcccactttgtgttgtgtagg

SEQ ID NO: 20226 - DNA, 33 bp, Homo sapien
catatgaattcagcccgctttgtgttgtgtagg

SEQ ID NO: 20227 - DNA, 33 bp, Homo sapien
ccttgtgaatttagccaagcaacatcatctgtc

SEQ ID NO: 20228 - DNA, 33 bp, Homo sapien
ccttgtgaatttagccgagcaacatcatctgtc

SEQ ID NO: 20229 - DNA, 33 bp, Homo sapien
ttggtccattatctggcagtcagtgatagctca

SEQ ID NO: 20230 - DNA, 33 bp, Homo sapien
ttggtccattatctgggagtcagtgatagctca

SEQ ID NO: 20231 - DNA, 33 bp, Homo sapien
gccactggtggcttcaacatattttggtgtggt

SEQ ID NO: 20232 - DNA, 33 bp, Homo sapien
gccactggtggcttcagcatattttggtgtggt

SEQ ID NO: 20233 - DNA, 33 bp, Homo sapien
cagaaggatctttatcggaactgccccagaagt

SEQ ID NO: 20234 - DNA, 33 bp, Homo sapien
cagaaggatctttatctgaactgccccagaagt

SEQ ID NO: 20235 - DNA, 33 bp, Homo sapien
gtataaggtagacagtaaaaacagctgctacaa

SEQ ID NO: 20236 - DNA, 33 bp, Homo sapien
gtataaggtagacagttaaaacagctgctacaa

SEQ ID NO: 20237 - DNA, 33 bp, Homo sapien
aattgacttgatgctaagtttggagttttgggg

SEQ ID NO: 20238 - DNA, 33 bp, Homo sapien
aattgacttgatgctaggtttggagttttgggg

SEQ ID NO: 20239 - DNA, 33 bp, Homo sapien
taattcagcttctaccaagtgacaggacctggg

SEQ ID NO: 20240 - DNA, 33 bp, Homo sapien
taattcagcttctaccgagtgacaggacctggg

SEQ ID NO: 20241 - DNA, 33 bp, Homo sapien
ttttaatttaaacataagcatccctaaagcagt

SEQ ID NO: 20242 - DNA, 33 bp, Homo sapien
ttttaatttaaacataggcatccctaaagcagt

SEQ ID NO: 20243 - DNA, 33 bp, Homo sapien
tcaagctctttgccaacttattaattacattat

SEQ ID NO: 20244 - DNA, 33 bp, Homo sapien
tcaagctctttgccaatttattaattacattat

SEQ ID NO: 20245 - DNA, 33 bp, Homo sapien
gcagctgcatatttacaaccaaaccatcctcca

SEQ ID NO: 20246 - DNA, 33 bp, Homo sapien
gcagctgcatatttaccaccaaaccatcctcca

SEQ ID NO: 20247 - DNA, 33 bp, Homo sapien
aacatgatgtagctggaaagtgccaggtaggat

SEQ ID NO: 20248 - DNA, 33 bp, Homo sapien
aacatgatgtagctgggaagtgccaggtaggat

SEQ ID NO: 20249 - DNA, 33 bp, Homo sapien
gacaccaacaaagacaaaagggcataaaggaga

SEQ ID NO: 20250 - DNA, 33 bp, Homo sapien
gacaccaacaaagacagaagggcataaaggaga

SEQ ID NO: 20251 - DNA, 33 bp, Homo sapien
gccttcaccgagatcacattctaaaattctatg

SEQ ID NO: 20252 - DNA, 33 bp, Homo sapien
gccttcaccgagatcatattctaaaattctatg

SEQ ID NO: 20253 - DNA, 33 bp, Homo sapien
tatcacagataaaagaaagctaaaccagtggtc

SEQ ID NO: 20254 - DNA, 33 bp, Homo sapien
tatcacagataaaagacagctaaaccagtggtc

SEQ ID NO: 20255 - DNA, 33 bp, Homo sapien
aatttgcactgcagaaaaagctgaatttttcta

SEQ ID NO: 20256 - DNA, 33 bp, Homo sapien
aatttgcactgcagaataagctgaatttttcta

SEQ ID NO: 20257 - DNA, 33 bp, Homo sapien
attaggccatatggtcacttgaattgttctctc

SEQ ID NO: 20258 - DNA, 33 bp, Homo sapien
attaggccatatggtcgcttgaattgttctctc

SEQ ID NO: 20259 - DNA, 33 bp, Homo sapien
tacctttctgagagcaataactaagtctttttt

SEQ ID NO: 20260 - DNA, 33 bp, Homo sapien
tacctttctgagagcagtaactaagtctttttt

SEQ ID NO: 20261 - DNA, 33 bp, Homo sapien
tggctgcagatgaatgccaggttgattgagtgc

SEQ ID NO: 20262 - DNA, 33 bp, Homo sapien
tggctgcagatgaatgtcaggttgattgagtgc

SEQ ID NO: 20263 - DNA, 33 bp, Homo sapien
tgtatcagcaagaatccacagctttaccctcag

SEQ ID NO: 20264 - DNA, 33 bp, Homo sapien
tgtatcagcaagaatcgacagctttaccctcag

SEQ ID NO: 20265 - DNA, 33 bp, Homo sapien
tgcaatttagtagatacgatccagtcggggaaa

SEQ ID NO: 20266 - DNA, 33 bp, Homo sapien
tgcaatttagtagatatgatccagtcggggaaa

SEQ ID NO: 20267 - DNA, 33 bp, Homo sapien
gcattattattttccaagttttaggcactgcat

SEQ ID NO: 20268 - DNA, 33 bp, Homo sapien
gcattattattttccaggttttaggcactgcat

SEQ ID NO: 20269 - DNA, 33 bp, Homo sapien
tcaatgtttttccagacggcagattcaaagggt

SEQ ID NO: 20270 - DNA, 33 bp, Homo sapien
tcaatgtttttccagatggcagattcaaagggt

SEQ ID NO: 20271 - DNA, 33 bp, Homo sapien
ttccatcctcctgttacggcttcagagcagata

SEQ ID NO: 20272 - DNA, 33 bp, Homo sapien
ttccatcctcctgttatggcttcagagcagata

SEQ ID NO: 20273 - DNA, 33 bp, Homo sapien
agccctttgcacttaccaggtgaaacggaaaac

SEQ ID NO: 20274 - DNA, 33 bp, Homo sapien
agccctttgcacttactaggtgaaacggaaaac

SEQ ID NO: 20275 - DNA, 33 bp, Homo sapien
gtgctcccagatctacaagaaaggatggtcaga

SEQ ID NO: 20276 - DNA, 33 bp, Homo sapien
gtgctcccagatctacgagaaaggatggtcaga

SEQ ID NO: 20277 - DNA, 33 bp, Homo sapien
ggcagatgccttctctcacctacaagtctctca

SEQ ID NO: 20278 - DNA, 33 bp, Homo sapien
ggcagatgccttctcttacctacaagtctctca

SEQ ID NO: 20279 - DNA, 33 bp, Homo sapien
ttcatatatgaagaaactaagacactcgaagat

SEQ ID NO: 20280 - DNA, 33 bp, Homo sapien
ttcatatatgaagaaattaagacactcgaagat

SEQ ID NO: 20281 - DNA, 33 bp, Homo sapien
acaatgatggcagtagaatggttatttattcag

SEQ ID NO: 20282 - DNA, 33 bp, Homo sapien
acaatgatggcagtagtatggttatttattcag

SEQ ID NO: 20283 - DNA, 33 bp, Homo sapien
taagtccgttcttgcccccttttcatcttttta

SEQ ID NO: 20284 - DNA, 33 bp, Homo sapien
taagtccgttcttgccgccttttcatcttttta

SEQ ID NO: 20285 - DNA, 33 bp, Homo sapien
atgtgctagcatggagccctcccagtattaaag

SEQ ID NO: 20286 - DNA, 33 bp, Homo sapien
atgtgctagcatggagtcctcccagtattaaag

SEQ ID NO: 20287 - DNA, 33 bp, Homo sapien
ttggaccactaaggacaggctttcattgtgtcc

SEQ ID NO: 20288 - DNA, 33 bp, Homo sapien
ttggaccactaaggaccggctttcattgtgtcc

SEQ ID NO: 20289 - DNA, 33 bp, Homo sapien
cccttttttctgacccggagcagaggttaacaa

SEQ ID NO: 20290 - DNA, 33 bp, Homo sapien
cccttttttctgaccctgagcagaggttaacaa

SEQ ID NO: 20291 - DNA, 33 bp, Homo sapien
cccagaaggaaacggcaagacaaatattcagaa

SEQ ID NO: 20292 - DNA, 33 bp, Homo sapien
cccagaaggaaacggcgagacaaatattcagaa

SEQ ID NO: 20293 - DNA, 33 bp, Homo sapien
aatatatttgaataccaattggtgcaaccatcc

SEQ ID NO: 20294 - DNA, 33 bp, Homo sapien
aatatatttgaatacctattggtgcaaccatcc

SEQ ID NO: 20295 - DNA, 33 bp, Homo sapien
gaagttaaggtatgcacgtgaggcagaggtcac

SEQ ID NO: 20296 - DNA, 33 bp, Homo sapien
gaagttaaggtatgcaggtgaggcagaggtcac

SEQ ID NO: 20297 - DNA, 33 bp, Homo sapien
cttatatttcattagaccaaacataggtacata

SEQ ID NO: 20298 - DNA, 33 bp, Homo sapien
cttatatttcattagatcaaacataggtacata

SEQ ID NO: 20299 - DNA, 33 bp, Homo sapien
acatttacctaagtaacaaatctgcgcatgcta

SEQ ID NO: 20300 - DNA, 33 bp, Homo sapien
acatttacctaagtaagaaatctgcgcatgcta

SEQ ID NO: 20301 - DNA, 33 bp, Homo sapien
tttctgggtatgttaactgggtgataaccatta

SEQ ID NO: 20302 - DNA, 33 bp, Homo sapien
tttctgggtatgttaagtgggtgataaccatta

SEQ ID NO: 20303 - DNA, 33 bp, Homo sapien
acgaaacaggtggtaacactaataaattctatc

SEQ ID NO: 20304 - DNA, 33 bp, Homo sapien
acgaaacaggtggtaatactaataaattctatc

SEQ ID NO: 20305 - DNA, 33 bp, Homo sapien
ttttcaattggttcagaactgagaagcagaagg

SEQ ID NO: 20306 - DNA, 33 bp, Homo sapien
ttttcaattggttcaggactgagaagcagaagg

SEQ ID NO: 20307 - DNA, 33 bp, Homo sapien
ctgactgaggaaagacgctacggaacagatact

SEQ ID NO: 20308 - DNA, 33 bp, Homo sapien
ctgactgaggaaagactctacggaacagatact

SEQ ID NO: 20309 - DNA, 33 bp, Homo sapien
agtttgatacgttctacactcaaggttaatgag

SEQ ID NO: 20310 - DNA, 33 bp, Homo sapien
agtttgatacgttctatactcaaggttaatgag

SEQ ID NO: 20311 - DNA, 33 bp, Homo sapien
tttccgcttttgtaaaatgagaaatatgatgtc

SEQ ID NO: 20312 - DNA, 33 bp, Homo sapien
tttccgcttttgtaaagtgagaaatatgatgtc

SEQ ID NO: 20313 - DNA, 33 bp, Homo sapien
atagccagtaaagaaccgcactgaggagccagc

SEQ ID NO: 20314 - DNA, 33 bp, Homo sapien
atagccagtaaagaactgcactgaggagccagc

SEQ ID NO: 20315 - DNA, 33 bp, Homo sapien
ttaatttacatctgtaaagtgctttgaagtgta

SEQ ID NO: 20316 - DNA, 33 bp, Homo sapien
ttaatttacatctgtatagtgctttgaagtgta

SEQ ID NO: 20317 - DNA, 33 bp, Homo sapien
gtgccattacataactaacctcgtcttctgctc

SEQ ID NO: 20318 - DNA, 33 bp, Homo sapien
gtgccattacataactgacctcgtcttctgctc

SEQ ID NO: 20319 - DNA, 33 bp, Homo sapien
acagcttctgaaacaactacttttcctaaggtc

SEQ ID NO: 20320 - DNA, 33 bp, Homo sapien
acagcttctgaaacaattacttttcctaaggtc

SEQ ID NO: 20321 - DNA, 33 bp, Homo sapien
tatcccctacctgctacagaggactttgtcttt

SEQ ID NO: 20322 - DNA, 33 bp, Homo sapien
tatcccctacctgctagagaggactttgtcttt

SEQ ID NO: 20323 - DNA, 33 bp, Homo sapien
aggtagtgatttctgcaaatagggatattacac

SEQ ID NO: 20324 - DNA, 33 bp, Homo sapien
aggtagtgatttctgcgaatagggatattacac

SEQ ID NO: 20325 - DNA, 33 bp, Homo sapien
actctcaggaccctaactgacactctgagagtt

SEQ ID NO: 20326 - DNA, 33 bp, Homo sapien
actctcaggaccctaattgacactctgagagtt

SEQ ID NO: 20327 - DNA, 33 bp, Homo sapien
ctcaccatcaatactcaaaatttggctatataa

SEQ ID NO: 20328 - DNA, 33 bp, Homo sapien
ctcaccatcaatactccaaatttggctatataa

SEQ ID NO: 20329 - DNA, 33 bp, Homo sapien
agcaacggttcacagaaaatgctcactacaagc

SEQ ID NO: 20330 - DNA, 33 bp, Homo sapien
agcaacggttcacagacaatgctcactacaagc

SEQ ID NO: 20331 - DNA, 33 bp, Homo sapien
cagggacagaatcagaataatccttagtatttt

SEQ ID NO: 20332 - DNA, 33 bp, Homo sapien
cagggacagaatcagagtaatccttagtatttt

SEQ ID NO: 20333 - DNA, 33 bp, Homo sapien
tcctttatttcaatgacgatactctgttgattc

SEQ ID NO: 20334 - DNA, 33 bp, Homo sapien
tcctttatttcaatgatgatactctgttgattc

SEQ ID NO: 20335 - DNA, 33 bp, Homo sapien
aaagacactaggtggacacagtcaacaaaatcc

SEQ ID NO: 20336 - DNA, 33 bp, Homo sapien
aaagacactaggtggatacagtcaacaaaatcc

SEQ ID NO: 20337 - DNA, 33 bp, Homo sapien
gtgtcagccactgttccaggtagtagaggatat

SEQ ID NO: 20338 - DNA, 33 bp, Homo sapien
gtgtcagccactgttctaggtagtagaggatat

SEQ ID NO: 20339 - DNA, 33 bp, Homo sapien
ggtctccacacagtcacattctttctctctcct

SEQ ID NO: 20340 - DNA, 33 bp, Homo sapien
ggtctccacacagtcagattctttctctctcct

SEQ ID NO: 20341 - DNA, 33 bp, Homo sapien
ctccactgtgcctcctaaaaccttcttattctt

SEQ ID NO: 20342 - DNA, 33 bp, Homo sapien
ctccactgtgcctcctgaaaccttcttattctt

SEQ ID NO: 20343 - DNA, 33 bp, Homo sapien
cctccttagtgacaaacggtggaccagctctcc

SEQ ID NO: 20344 - DNA, 33 bp, Homo sapien
cctccttagtgacaaatggtggaccagctctcc

SEQ ID NO: 20345 - DNA, 33 bp, Homo sapien
agagcaaagtataaaacagtgtatgttgtatgt

SEQ ID NO: 20346 - DNA, 33 bp, Homo sapien
agagcaaagtataaaatagtgtatgttgtatgt

SEQ ID NO: 20347 - DNA, 33 bp, Homo sapien
gttgttattactctcactctcctgtcttggttc

SEQ ID NO: 20348 - DNA, 33 bp, Homo sapien
gttgttattactctcattctcctgtcttggttc

SEQ ID NO: 20349 - DNA, 33 bp, Homo sapien
ccattaataatgctcacctaacattagtgctac

SEQ ID NO: 20350 - DNA, 33 bp, Homo sapien
ccattaataatgctcatctaacattagtgctac

SEQ ID NO: 20351 - DNA, 33 bp, Homo sapien
ctccactacttgctaactgtatgattttctagc

SEQ ID NO: 20352 - DNA, 33 bp, Homo sapien
ctccactacttgctaattgtatgattttctagc

SEQ ID NO: 20353 - DNA, 33 bp, Homo sapien
aatcatacatatgtcaatgaatacccctgattt

SEQ ID NO: 20354 - DNA, 33 bp, Homo sapien
aatcatacatatgtcagtgaatacccctgattt

SEQ ID NO: 20355 - DNA, 33 bp, Homo sapien
caatttctgaacctcggaaacagtgagataatt

SEQ ID NO: 20356 - DNA, 33 bp, Homo sapien
caatttctgaacctcgtaaacagtgagataatt

SEQ ID NO: 20357 - DNA, 33 bp, Homo sapien
ttccttcacttggcatcaggttgaatagtgaga

SEQ ID NO: 20358 - DNA, 33 bp, Homo sapien
ttccttcacttggcattaggttgaatagtgaga

SEQ ID NO: 20359 - DNA, 33 bp, Homo sapien
agaaaagattatgaaaaccttctgtaccagata

SEQ ID NO: 20360 - DNA, 33 bp, Homo sapien
agaaaagattatgaaagccttctgtaccagata

SEQ ID NO: 20361 - DNA, 33 bp, Homo sapien
caccctgtctcagaacaaatagaactttgagat

SEQ ID NO: 20362 - DNA, 33 bp, Homo sapien
caccctgtctcagaactaatagaactttgagat

SEQ ID NO: 20363 - DNA, 33 bp, Homo sapien
atgaagatttacacacagccatgcaagggccag

SEQ ID NO: 20364 - DNA, 33 bp, Homo sapien
atgaagatttacacactgccatgcaagggccag

SEQ ID NO: 20365 - DNA, 33 bp, Homo sapien
ctggtcttccttgacccctctggctggatgcaa

SEQ ID NO: 20366 - DNA, 33 bp, Homo sapien
ctggtcttccttgacctctctggctggatgcaa

SEQ ID NO: 20367 - DNA, 33 bp, Homo sapien
gccttccaggctccaaatccttggcttcaggga

SEQ ID NO: 20368 - DNA, 33 bp, Homo sapien
gccttccaggctccaagtccttggcttcaggga

SEQ ID NO: 20369 - DNA, 33 bp, Homo sapien
tggcttttactgcaccaagtagcaattatttat

SEQ ID NO: 20370 - DNA, 33 bp, Homo sapien
tggcttttactgcaccgagtagcaattatttat

SEQ ID NO: 20371 - DNA, 33 bp, Homo sapien
ttgttcattatacctacgctttttatatgcctg

SEQ ID NO: 20372 - DNA, 33 bp, Homo sapien
ttgttcattatacctatgctttttatatgcctg

SEQ ID NO: 20373 - DNA, 33 bp, Homo sapien
cttccctatcccactacgacattattaggggaa

SEQ ID NO: 20374 - DNA, 33 bp, Homo sapien
cttccctatcccactatgacattattaggggaa

SEQ ID NO: 20375 - DNA, 33 bp, Homo sapien
caagtgccttgtaagcgcttgggactgatttag

SEQ ID NO: 20376 - DNA, 33 bp, Homo sapien
caagtgccttgtaagctcttgggactgatttag

SEQ ID NO: 20377 - DNA, 33 bp, Homo sapien
tcatcagatctagttacacacctgttcctagac

SEQ ID NO: 20378 - DNA, 33 bp, Homo sapien
tcatcagatctagttagacacctgttcctagac

SEQ ID NO: 20379 - DNA, 33 bp, Homo sapien
tttgtaaagcatgacaatacagtgtggtgcggg

SEQ ID NO: 20380 - DNA, 33 bp, Homo sapien
tttgtaaagcatgacagtacagtgtggtgcggg

SEQ ID NO: 20381 - DNA, 33 bp, Homo sapien
ataaacttctcttcccagacaagctgtcacatg

SEQ ID NO: 20382 - DNA, 33 bp, Homo sapien
ataaacttctcttcccggacaagctgtcacatg

SEQ ID NO: 20383 - DNA, 33 bp, Homo sapien
gagatccagcaagtaactaagcctctcgaaagc

SEQ ID NO: 20384 - DNA, 33 bp, Homo sapien
gagatccagcaagtaagtaagcctctcgaaagc

SEQ ID NO: 20385 - DNA, 33 bp, Homo sapien
atatgagatttgttcacgtaagtggcagtacat

SEQ ID NO: 20386 - DNA, 33 bp, Homo sapien
atatgagatttgttcatgtaagtggcagtacat

SEQ ID NO: 20387 - DNA, 33 bp, Homo sapien
cagataaaattgtcaacgaatcatcttgtttat

SEQ ID NO: 20388 - DNA, 33 bp, Homo sapien
cagataaaattgtcaaggaatcatcttgtttat

SEQ ID NO: 20389 - DNA, 33 bp, Homo sapien
ccaacattcaagctgaggatgggtatgagtcaa

SEQ ID NO: 20390 - DNA, 33 bp, Homo sapien
ccaacattcaagctgatgatgggtatgagtcaa

SEQ ID NO: 20391 - DNA, 33 bp, Homo sapien
gtcagtttgaggcaacaaattttcttggttggg

SEQ ID NO: 20392 - DNA, 33 bp, Homo sapien
gtcagtttgaggcaacgaattttcttggttggg

SEQ ID NO: 20393 - DNA, 33 bp, Homo sapien
caggaatgtattttaacagcaagaatatatggt

SEQ ID NO: 20394 - DNA, 33 bp, Homo sapien
caggaatgtattttaatagcaagaatatatggt

SEQ ID NO: 20395 - DNA, 33 bp, Homo sapien
catgcaatcatttaacaaatattcactaatcat

SEQ ID NO: 20396 - DNA, 33 bp, Homo sapien
catgcaatcatttaactaatattcactaatcat

SEQ ID NO: 20397 - DNA, 33 bp, Homo sapien
tccatagtacctatgacaagttgagatgattag

SEQ ID NO: 20398 - DNA, 33 bp, Homo sapien
tccatagtacctatgagaagttgagatgattag

SEQ ID NO: 20399 - DNA, 33 bp, Homo sapien
ggcttgttatgaaagcagaacattttttagcaa

SEQ ID NO: 20400 - DNA, 33 bp, Homo sapien
ggcttgttatgaaagcggaacattttttagcaa

SEQ ID NO: 20401 - DNA, 33 bp, Homo sapien
catgcaggctatcaacaaactccatttgctgcc

SEQ ID NO: 20402 - DNA, 33 bp, Homo sapien
catgcaggctatcaacgaactccatttgctgcc

SEQ ID NO: 20403 - DNA, 33 bp, Homo sapien
aatagcttctcagatacgttctgtgcatataca

SEQ ID NO: 20404 - DNA, 33 bp, Homo sapien
aatagcttctcagatatgttctgtgcatataca

SEQ ID NO: 20405 - DNA, 33 bp, Homo sapien
tccagcaggcaaatataagatggaaagttccct

SEQ ID NO: 20406 - DNA, 33 bp, Homo sapien
tccagcaggcaaatatcagatggaaagttccct

SEQ ID NO: 20407 - DNA, 33 bp, Homo sapien
tctgactagtgagaataatgatagtacttccat

SEQ ID NO: 20408 - DNA, 33 bp, Homo sapien
tctgactagtgagaatcatgatagtacttccat

SEQ ID NO: 20409 - DNA, 33 bp, Homo sapien
atcatataatcatctcaatacaggcagaaaatg

SEQ ID NO: 20410 - DNA, 33 bp, Homo sapien
atcatataatcatctccatacaggcagaaaatg

SEQ ID NO: 20411 - DNA, 33 bp, Homo sapien
aatactactgtaaagcagcaaatccagagatgt

SEQ ID NO: 20412 - DNA, 33 bp, Homo sapien
aatactactgtaaagcggcaaatccagagatgt

SEQ ID NO: 20413 - DNA, 33 bp, Homo sapien
tacttccaggtgagtaaaataaaacaccacaaa

SEQ ID NO: 20414 - DNA, 33 bp, Homo sapien
tacttccaggtgagtacaataaaacaccacaaa

SEQ ID NO: 20415 - DNA, 33 bp, Homo sapien
ttgagctttagtgataagtgctggaatgatttt

SEQ ID NO: 20416 - DNA, 33 bp, Homo sapien
ttgagctttagtgatatgtgctggaatgatttt

SEQ ID NO: 20417 - DNA, 33 bp, Homo sapien
tgtattcagcgaaatacatcatacaaattcagg

SEQ ID NO: 20418 - DNA, 33 bp, Homo sapien
tgtattcagcgaaatatatcatacaaattcagg

SEQ ID NO: 20419 - DNA, 33 bp, Homo sapien
cagtacaataaatctacacctggaaccactact

SEQ ID NO: 20420 - DNA, 33 bp, Homo sapien
cagtacaataaatctatacctggaaccactact

SEQ ID NO: 20421 - DNA, 33 bp, Homo sapien
cactatcctctttacaacgtgaaaaaggagaga

SEQ ID NO: 20422 - DNA, 33 bp, Homo sapien
cactatcctctttacagcgtgaaaaaggagaga

SEQ ID NO: 20423 - DNA, 33 bp, Homo sapien
aagcttctaaagtaaacgttgcatagtaaatat

SEQ ID NO: 20424 - DNA, 33 bp, Homo sapien
aagcttctaaagtaaatgttgcatagtaaatat

SEQ ID NO: 20425 - DNA, 33 bp, Homo sapien
aatgcactggacattacgcaatgaagaacagtg

SEQ ID NO: 20426 - DNA, 33 bp, Homo sapien
aatgcactggacattaggcaatgaagaacagtg

SEQ ID NO: 20427 - DNA, 33 bp, Homo sapien
atggtgcttctttagacgtttgagtttgccacc

SEQ ID NO: 20428 - DNA, 33 bp, Homo sapien
atggtgcttctttagatgtttgagtttgccacc

SEQ ID NO: 20429 - DNA, 33 bp, Homo sapien
attttaacgaccttaaccaaacattcagatttt

SEQ ID NO: 20430 - DNA, 33 bp, Homo sapien
attttaacgaccttaatcaaacattcagatttt

SEQ ID NO: 20431 - DNA, 33 bp, Homo sapien
tgcccactaaatgctacgcaccataatggatgc

SEQ ID NO: 20432 - DNA, 33 bp, Homo sapien
tgcccactaaatgctaggcaccataatggatgc

SEQ ID NO: 20433 - DNA, 33 bp, Homo sapien
ggttcgccatatgaaggagtttgtggaagccat

SEQ ID NO: 20434 - DNA, 33 bp, Homo sapien
ggttcgccatatgaagtagtttgtggaagccat

SEQ ID NO: 20435 - DNA, 33 bp, Homo sapien
taaatcaaaggaatacacatcaaaacaacgagg

SEQ ID NO: 20436 - DNA, 33 bp, Homo sapien
taaatcaaaggaatacccatcaaaacaacgagg

SEQ ID NO: 20437 - DNA, 33 bp, Homo sapien
tgaacaggcattacaaaacttggtagtgatata

SEQ ID NO: 20438 - DNA, 33 bp, Homo sapien
tgaacaggcattacaacacttggtagtgatata

SEQ ID NO: 20439 - DNA, 33 bp, Homo sapien
ccatggaaaggtaaacaaatgcctttctttgaa

SEQ ID NO: 20440 - DNA, 33 bp, Homo sapien
ccatggaaaggtaaacgaatgcctttctttgaa

SEQ ID NO: 20441 - DNA, 33 bp, Homo sapien
cagatactctacagaaactggtgctccagggaa

SEQ ID NO: 20442 - DNA, 33 bp, Homo sapien
cagatactctacagaacctggtgctccagggaa

SEQ ID NO: 20443 - DNA, 33 bp, Homo sapien
tccttactaggacagccctcaaccaatgctact

SEQ ID NO: 20444 - DNA, 33 bp, Homo sapien
tccttactaggacagctctcaaccaatgctact

SEQ ID NO: 20445 - DNA, 33 bp, Homo sapien
ctgtaggagcccactcgatgtgcatatgcagga

SEQ ID NO: 20446 - DNA, 33 bp, Homo sapien
ctgtaggagcccactctatgtgcatatgcagga

SEQ ID NO: 20447 - DNA, 33 bp, Homo sapien
gaaatacagggcgttacgagaacatccagcaag

SEQ ID NO: 20448 - DNA, 33 bp, Homo sapien
gaaatacagggcgttatgagaacatccagcaag

SEQ ID NO: 20449 - DNA, 33 bp, Homo sapien
ccaccactaccaagctaaactgttaagatcttc

SEQ ID NO: 20450 - DNA, 33 bp, Homo sapien
ccaccactaccaagctgaactgttaagatcttc

SEQ ID NO: 20451 - DNA, 33 bp, Homo sapien
acacatgaattaggaaacttttagacttcaatc

SEQ ID NO: 20452 - DNA, 33 bp, Homo sapien
acacatgaattaggaatcttttagacttcaatc

SEQ ID NO: 20453 - DNA, 33 bp, Homo sapien
gaggacctgagagtagacaagaatgggtggatt

SEQ ID NO: 20454 - DNA, 33 bp, Homo sapien
gaggacctgagagtaggcaagaatgggtggatt

SEQ ID NO: 20455 - DNA, 33 bp, Homo sapien
aaaggtcctgaagcagcaggaagtgtggattat

SEQ ID NO: 20456 - DNA, 33 bp, Homo sapien
aaaggtcctgaagcaggaggaagtgtggattat

SEQ ID NO: 20457 - DNA, 33 bp, Homo sapien
tatgctgtagtctttacgttcattaaaggcaga

SEQ ID NO: 20458 - DNA, 33 bp, Homo sapien
tatgctgtagtctttatgttcattaaaggcaga

SEQ ID NO: 20459 - DNA, 33 bp, Homo sapien
atgaattgaacagatacggtttctctgctgctc

SEQ ID NO: 20460 - DNA, 33 bp, Homo sapien
atgaattgaacagatatggtttctctgctgctc

SEQ ID NO: 20461 - DNA, 33 bp, Homo sapien
atcactggccttgtgaagaaccctttaatgatc

SEQ ID NO: 20462 - DNA, 33 bp, Homo sapien
atcactggccttgtgaggaaccctttaatgatc

SEQ ID NO: 20463 - DNA, 33 bp, Homo sapien
caggaggaaggatgacaggatagggacgttcca

SEQ ID NO: 20464 - DNA, 33 bp, Homo sapien
caggaggaaggatgacgggatagggacgttcca

SEQ ID NO: 20465 - DNA, 33 bp, Homo sapien
aaacaggcagaagggcacttgtctaagaataca

SEQ ID NO: 20466 - DNA, 33 bp, Homo sapien
aaacaggcagaagggcgcttgtctaagaataca

SEQ ID NO: 20467 - DNA, 33 bp, Homo sapien
atgtgctgacatttataactgttgtttggactc

SEQ ID NO: 20468 - DNA, 33 bp, Homo sapien
atgtgctgacatttatgactgttgtttggactc

SEQ ID NO: 20469 - DNA, 33 bp, Homo sapien
aaaaataagactcaacaattattgaactctctg

SEQ ID NO: 20470 - DNA, 33 bp, Homo sapien
aaaaataagactcaacgattattgaactctctg

SEQ ID NO: 20471 - DNA, 33 bp, Homo sapien
cacacacacacaataaatccatagtatatatat

SEQ ID NO: 20472 - DNA, 33 bp, Homo sapien
cacacacacacaataagtccatagtatatatat

SEQ ID NO: 20473 - DNA, 33 bp, Homo sapien
tttgaaaggtcacataaaaaagaaacattaaca

SEQ ID NO: 20474 - DNA, 33 bp, Homo sapien
tttgaaaggtcacatagaaaagaaacattaaca

SEQ ID NO: 20475 - DNA, 33 bp, Homo sapien
gaggctcttgagcatcgcgttgatcttacgaag

SEQ ID NO: 20476 - DNA, 33 bp, Homo sapien
gaggctcttgagcatctcgttgatcttacgaag

SEQ ID NO: 20477 - DNA, 33 bp, Homo sapien
atggaatcaaattctcagaagggaatgatgctt

SEQ ID NO: 20478 - DNA, 33 bp, Homo sapien
atggaatcaaattctcggaagggaatgatgctt

SEQ ID NO: 20479 - DNA, 33 bp, Homo sapien
agtagggagagggcaaactgttgattgtcaacc

SEQ ID NO: 20480 - DNA, 33 bp, Homo sapien
agtagggagagggcaagctgttgattgtcaacc

SEQ ID NO: 20481 - DNA, 33 bp, Homo sapien
tagaaagtgctattcaaagaaatgaagttgggt

SEQ ID NO: 20482 - DNA, 33 bp, Homo sapien
tagaaagtgctattcagagaaatgaagttgggt

SEQ ID NO: 20483 - DNA, 33 bp, Homo sapien
aaaatatgtaaacaggaattgatataatgtggt

SEQ ID NO: 20484 - DNA, 33 bp, Homo sapien
aaaatatgtaaacaggcattgatataatgtggt

SEQ ID NO: 20485 - DNA, 33 bp, Homo sapien
aactaggcttgtcggacgggagaagatgggcat

SEQ ID NO: 20486 - DNA, 33 bp, Homo sapien
aactaggcttgtcggatgggagaagatgggcat

SEQ ID NO: 20487 - DNA, 33 bp, Homo sapien
ttagagttaaatatcccgagagcacctcccaat

SEQ ID NO: 20488 - DNA, 33 bp, Homo sapien
ttagagttaaatatcctgagagcacctcccaat

SEQ ID NO: 20489 - DNA, 33 bp, Homo sapien
gagcttacaatgggtacgctgtattctgaaggc

SEQ ID NO: 20490 - DNA, 33 bp, Homo sapien
gagcttacaatgggtatgctgtattctgaaggc

SEQ ID NO: 20491 - DNA, 33 bp, Homo sapien
cataggcccaacttcacggtgaaggccaagaca

SEQ ID NO: 20492 - DNA, 33 bp, Homo sapien
cataggcccaacttcatggtgaaggccaagaca

SEQ ID NO: 20493 - DNA, 33 bp, Homo sapien
catgcgaaggtcctgcgaggtggaaggcgtacc

SEQ ID NO: 20494 - DNA, 33 bp, Homo sapien
catgcgaaggtcctgctaggtggaaggcgtacc

SEQ ID NO: 20495 - DNA, 33 bp, Homo sapien
ggagacgactgctccagaattactcctaaatga

SEQ ID NO: 20496 - DNA, 33 bp, Homo sapien
ggagacgactgctccataattactcctaaatga

SEQ ID NO: 20497 - DNA, 33 bp, Homo sapien
ttcatggcttgaagacaaatcccttcccccaag

SEQ ID NO: 20498 - DNA, 33 bp, Homo sapien
ttcatggcttgaagacgaatcccttcccccaag

SEQ ID NO: 20499 - DNA, 33 bp, Homo sapien
atatgctaatcaaaggaaatgtagaaactatag

SEQ ID NO: 20500 - DNA, 33 bp, Homo sapien
atatgctaatcaaagggaatgtagaaactatag

SEQ ID NO: 20501 - DNA, 33 bp, Homo sapien
ggggctagaatgatgacagctggtagaaggtgg

SEQ ID NO: 20502 - DNA, 33 bp, Homo sapien
ggggctagaatgatgatagctggtagaaggtgg

SEQ ID NO: 20503 - DNA, 33 bp, Homo sapien
ttccttagcaggctaccgaccatctcaccccca

SEQ ID NO: 20504 - DNA, 33 bp, Homo sapien
ttccttagcaggctactgaccatctcaccccca

SEQ ID NO: 20505 - DNA, 33 bp, Homo sapien
gaattctgtcagttcacgtctaggttttgcttc

SEQ ID NO: 20506 - DNA, 33 bp, Homo sapien
gaattctgtcagttcatgtctaggttttgcttc

SEQ ID NO: 20507 - DNA, 33 bp, Homo sapien
tctgctaaaatcagccaacactgacaaatttat

SEQ ID NO: 20508 - DNA, 33 bp, Homo sapien
tctgctaaaatcagccgacactgacaaatttat

SEQ ID NO: 20509 - DNA, 33 bp, Homo sapien
ggaaaaaataccaaacaatgagttatcttagca

SEQ ID NO: 20510 - DNA, 33 bp, Homo sapien
ggaaaaaataccaaacgatgagttatcttagca

SEQ ID NO: 20511 - DNA, 33 bp, Homo sapien
gccaatgccttttatagctgatcatgagcaggt

SEQ ID NO: 20512 - DNA, 33 bp, Homo sapien
gccaatgccttttatatctgatcatgagcaggt

SEQ ID NO: 20513 - DNA, 33 bp, Homo sapien
ccaggcagtcaggctcaagagttctgcttttaa

SEQ ID NO: 20514 - DNA, 33 bp, Homo sapien
ccaggcagtcaggctcgagagttctgcttttaa

SEQ ID NO: 20515 - DNA, 33 bp, Homo sapien
tcagaagaaaactgatcactaaatatatttcct

SEQ ID NO: 20516 - DNA, 33 bp, Homo sapien
tcagaagaaaactgatgactaaatatatttcct

SEQ ID NO: 20517 - DNA, 33 bp, Homo sapien
ttgcaagttaaaggcaactgtggtattgttaaa

SEQ ID NO: 20518 - DNA, 33 bp, Homo sapien
ttgcaagttaaaggcacctgtggtattgttaaa

SEQ ID NO: 20519 - DNA, 33 bp, Homo sapien
attctatatgcctagcacctgtttctttttacc

SEQ ID NO: 20520 - DNA, 33 bp, Homo sapien
attctatatgcctagcgcctgtttctttttacc

SEQ ID NO: 20521 - DNA, 33 bp, Homo sapien
tataaacattaactcaatcttcacaataatacc

SEQ ID NO: 20522 - DNA, 33 bp, Homo sapien
tataaacattaactcagtcttcacaataatacc

SEQ ID NO: 20523 - DNA, 33 bp, Homo sapien
agtaacaaagccagtaagtacacattcacacat

SEQ ID NO: 20524 - DNA, 33 bp, Homo sapien
agtaacaaagccagtacgtacacattcacacat

SEQ ID NO: 20525 - DNA, 33 bp, Homo sapien
atgactcttatttcacaatcatacatttgatgt

SEQ ID NO: 20526 - DNA, 33 bp, Homo sapien
atgactcttatttcacgatcatacatttgatgt

SEQ ID NO: 20527 - DNA, 33 bp, Homo sapien
gcagttatagcctagactattgctattcagaga

SEQ ID NO: 20528 - DNA, 33 bp, Homo sapien
gcagttatagcctagattattgctattcagaga

SEQ ID NO: 20529 - DNA, 33 bp, Homo sapien
cttcttcaagctctaggccataatacccaacag

SEQ ID NO: 20530 - DNA, 33 bp, Homo sapien
cttcttcaagctctagtccataatacccaacag

SEQ ID NO: 20531 - DNA, 33 bp, Homo sapien
aaatctgctactcttccattgttcaccatctca

SEQ ID NO: 20532 - DNA, 33 bp, Homo sapien
aaatctgctactcttctattgttcaccatctca

SEQ ID NO: 20533 - DNA, 33 bp, Homo sapien
atttctggcttggataactacggagatggtggt

SEQ ID NO: 20534 - DNA, 33 bp, Homo sapien
atttctggcttggatagctacggagatggtggt

SEQ ID NO: 20535 - DNA, 33 bp, Homo sapien
aagatatttagacagaatcaacagccctaaata

SEQ ID NO: 20536 - DNA, 33 bp, Homo sapien
aagatatttagacagagtcaacagccctaaata

SEQ ID NO: 20537 - DNA, 33 bp, Homo sapien
tttaaactgggagtcaggatatgtaattgggag

SEQ ID NO: 20538 - DNA, 33 bp, Homo sapien
tttaaactgggagtcatgatatgtaattgggag

SEQ ID NO: 20539 - DNA, 33 bp, Homo sapien
atccattacactggaaatatacattattgttaa

SEQ ID NO: 20540 - DNA, 33 bp, Homo sapien
atccattacactggaagtatacattattgttaa

SEQ ID NO: 20541 - DNA, 33 bp, Homo sapien
ggggctttaagcagaaaagtggcatatctagta

SEQ ID NO: 20542 - DNA, 33 bp, Homo sapien
ggggctttaagcagaagagtggcatatctagta

SEQ ID NO: 20543 - DNA, 33 bp, Homo sapien
caggcttgagagagaacgtgacagctgagcata

SEQ ID NO: 20544 - DNA, 33 bp, Homo sapien
caggcttgagagagaaggtgacagctgagcata

SEQ ID NO: 20545 - DNA, 33 bp, Homo sapien
cagtgaggcattcatgacaagactgtgggaaac

SEQ ID NO: 20546 - DNA, 33 bp, Homo sapien
cagtgaggcattcatggcaagactgtgggaaac

SEQ ID NO: 20547 - DNA, 33 bp, Homo sapien
gcttgcaaagaataaaagctcataggataatag

SEQ ID NO: 20548 - DNA, 33 bp, Homo sapien
gcttgcaaagaataaaggctcataggataatag

SEQ ID NO: 20549 - DNA, 33 bp, Homo sapien
atgggtggaacttcaaaggaggcaaatgcaaat

SEQ ID NO: 20550 - DNA, 33 bp, Homo sapien
atgggtggaacttcaagggaggcaaatgcaaat

SEQ ID NO: 20551 - DNA, 33 bp, Homo sapien
ctcccttgtgattaacagcaaattggtttccta

SEQ ID NO: 20552 - DNA, 33 bp, Homo sapien
ctcccttgtgattaacggcaaattggtttccta

SEQ ID NO: 20553 - DNA, 33 bp, Homo sapien
ttgtttcctacaacaaaagatgacatggcatga

SEQ ID NO: 20554 - DNA, 33 bp, Homo sapien
ttgtttcctacaacaagagatgacatggcatga

SEQ ID NO: 20555 - DNA, 33 bp, Homo sapien
cagcctctcaaagtcacggaacaaatgaaagta

SEQ ID NO: 20556 - DNA, 33 bp, Homo sapien
cagcctctcaaagtcatggaacaaatgaaagta

SEQ ID NO: 20557 - DNA, 33 bp, Homo sapien
tagtcctattcctgaggatgaaatcaaacctca

SEQ ID NO: 20558 - DNA, 33 bp, Homo sapien
tagtcctattcctgagtatgaaatcaaacctca

SEQ ID NO: 20559 - DNA, 33 bp, Homo sapien
actcagcttgctctggaaagtgttagcttcatc

SEQ ID NO: 20560 - DNA, 33 bp, Homo sapien
actcagcttgctctgggaagtgttagcttcatc

SEQ ID NO: 20561 - DNA, 33 bp, Homo sapien
cagggttcaaatggtaacatcaggctttgattt

SEQ ID NO: 20562 - DNA, 33 bp, Homo sapien
cagggttcaaatggtatcatcaggctttgattt

SEQ ID NO: 20563 - DNA, 33 bp, Homo sapien
agcatagtggctaagacctgaattctaatatca

SEQ ID NO: 20564 - DNA, 33 bp, Homo sapien
agcatagtggctaagatctgaattctaatatca

SEQ ID NO: 20565 - DNA, 33 bp, Homo sapien
tcgcatgccgaggaaacagcatagtggctaaga

SEQ ID NO: 20566 - DNA, 33 bp, Homo sapien
tcgcatgccgaggaaatagcatagtggctaaga

SEQ ID NO: 20567 - DNA, 33 bp, Homo sapien
acaagaaagtttgccacagtagagaaaatacaa

SEQ ID NO: 20568 - DNA, 33 bp, Homo sapien
acaagaaagtttgccagagtagagaaaatacaa

SEQ ID NO: 20569 - DNA, 33 bp, Homo sapien
agaaaggacctggaagaaactaagctttgaagt

SEQ ID NO: 20570 - DNA, 33 bp, Homo sapien
agaaaggacctggaaggaactaagctttgaagt

SEQ ID NO: 20571 - DNA, 33 bp, Homo sapien
tgatggaatgaggaatcaactttattgcgctga

SEQ ID NO: 20572 - DNA, 33 bp, Homo sapien
tgatggaatgaggaattaactttattgcgctga

SEQ ID NO: 20573 - DNA, 33 bp, Homo sapien
cagatggccatacaaacagcagtaacatagaca

SEQ ID NO: 20574 - DNA, 33 bp, Homo sapien
cagatggccatacaaatagcagtaacatagaca

SEQ ID NO: 20575 - DNA, 33 bp, Homo sapien
cttcaatcacagtagacagaagctgaccaaaaa

SEQ ID NO: 20576 - DNA, 33 bp, Homo sapien
cttcaatcacagtagatagaagctgaccaaaaa

SEQ ID NO: 20577 - DNA, 33 bp, Homo sapien
atttagcaattacatacaccctttgccagagct

SEQ ID NO: 20578 - DNA, 33 bp, Homo sapien
atttagcaattacatagaccctttgccagagct

SEQ ID NO: 20579 - DNA, 33 bp, Homo sapien
gaaactgaagaaagtacacctgcctggtcatcc

SEQ ID NO: 20580 - DNA, 33 bp, Homo sapien
gaaactgaagaaagtatacctgcctggtcatcc

SEQ ID NO: 20581 - DNA, 33 bp, Homo sapien
tgctggcaaacagtaacagttgcaaacatcatc

SEQ ID NO: 20582 - DNA, 33 bp, Homo sapien
tgctggcaaacagtaagagttgcaaacatcatc

SEQ ID NO: 20583 - DNA, 33 bp, Homo sapien
attgaggaacgaagaaattaaatgacttaccca

SEQ ID NO: 20584 - DNA, 33 bp, Homo sapien
attgaggaacgaagaagttaaatgacttaccca

SEQ ID NO: 20585 - DNA, 33 bp, Homo sapien
ggaggtcataggcgatcaagaaaaagagactta

SEQ ID NO: 20586 - DNA, 33 bp, Homo sapien
ggaggtcataggcgattaagaaaaagagactta

SEQ ID NO: 20587 - DNA, 33 bp, Homo sapien
tcaatctttctctggaaaagttttatttcacaa

SEQ ID NO: 20588 - DNA, 33 bp, Homo sapien
tcaatctttctctggagaagttttatttcacaa

SEQ ID NO: 20589 - DNA, 33 bp, Homo sapien
atccattatctgattgcatccatatgaatttgg

SEQ ID NO: 20590 - DNA, 33 bp, Homo sapien
atccattatctgattgtatccatatgaatttgg

SEQ ID NO: 20591 - DNA, 33 bp, Homo sapien
acttcatgcctaaagagatgtctgaaaacacaa

SEQ ID NO: 20592 - DNA, 33 bp, Homo sapien
acttcatgcctaaagatatgtctgaaaacacaa

SEQ ID NO: 20593 - DNA, 33 bp, Homo sapien
gacacagaggtcatgaaatagatccaagagctc

SEQ ID NO: 20594 - DNA, 33 bp, Homo sapien
gacacagaggtcatgagatagatccaagagctc

SEQ ID NO: 20595 - DNA, 33 bp, Homo sapien
gaaggccgttgctctggagctatactatcagct

SEQ ID NO: 20596 - DNA, 33 bp, Homo sapien
gaaggccgttgctctgtagctatactatcagct

SEQ ID NO: 20597 - DNA, 33 bp, Homo sapien
gagccctctttggagaaaaaggagtcatagagt

SEQ ID NO: 20598 - DNA, 33 bp, Homo sapien
gagccctctttggagagaaaggagtcatagagt

SEQ ID NO: 20599 - DNA, 33 bp, Homo sapien
aatcctggaagtaaaccgagctgggttatggta

SEQ ID NO: 20600 - DNA, 33 bp, Homo sapien
aatcctggaagtaaactgagctgggttatggta

SEQ ID NO: 20601 - DNA, 33 bp, Homo sapien
agagaagcaattcagacggacaaaagagctgcc

SEQ ID NO: 20602 - DNA, 33 bp, Homo sapien
agagaagcaattcagatggacaaaagagctgcc

SEQ ID NO: 20603 - DNA, 33 bp, Homo sapien
caacccccatctcacaaagccttgattttctta

SEQ ID NO: 20604 - DNA, 33 bp, Homo sapien
caacccccatctcacagagccttgattttctta

SEQ ID NO: 20605 - DNA, 33 bp, Homo sapien
gtaatgtggatgtcacacaagtaatgaggattt

SEQ ID NO: 20606 - DNA, 33 bp, Homo sapien
gtaatgtggatgtcacccaagtaatgaggattt

SEQ ID NO: 20607 - DNA, 33 bp, Homo sapien
gcagcagacattatcaatcatgtttgccctgga

SEQ ID NO: 20608 - DNA, 33 bp, Homo sapien
gcagcagacattatcagtcatgtttgccctgga

SEQ ID NO: 20609 - DNA, 33 bp, Homo sapien
tcacttgctccatgagaaaataagatgtctgcc

SEQ ID NO: 20610 - DNA, 33 bp, Homo sapien
tcacttgctccatgaggaaataagatgtctgcc

SEQ ID NO: 20611 - DNA, 33 bp, Homo sapien
agactgggctgtgaggcagaaagcaagagcgag

SEQ ID NO: 20612 - DNA, 33 bp, Homo sapien
agactgggctgtgagggagaaagcaagagcgag

SEQ ID NO: 20613 - DNA, 33 bp, Homo sapien
tgtgattgtttcttcacgtctttgttctcctgg

SEQ ID NO: 20614 - DNA, 33 bp, Homo sapien
tgtgattgtttcttcatgtctttgttctcctgg

SEQ ID NO: 20615 - DNA, 33 bp, Homo sapien
gcaaactgaggtactaataggtaattttcttag

SEQ ID NO: 20616 - DNA, 33 bp, Homo sapien
gcaaactgaggtactattaggtaattttcttag

SEQ ID NO: 20617 - DNA, 33 bp, Homo sapien
cacatctcatctcaagaccattggtgttggatc

SEQ ID NO: 20618 - DNA, 33 bp, Homo sapien
cacatctcatctcaaggccattggtgttggatc

SEQ ID NO: 20619 - DNA, 33 bp, Homo sapien
gggaaacagattcagacagagggaggaacaggc

SEQ ID NO: 20620 - DNA, 33 bp, Homo sapien
gggaaacagattcagagagagggaggaacaggc

SEQ ID NO: 20621 - DNA, 33 bp, Homo sapien
aggcatggaagcaagaacaagcttagagtattc

SEQ ID NO: 20622 - DNA, 33 bp, Homo sapien
aggcatggaagcaagagcaagcttagagtattc

SEQ ID NO: 20623 - DNA, 33 bp, Homo sapien
acaattagtgtgcttaccttcctccttcttaac

SEQ ID NO: 20624 - DNA, 33 bp, Homo sapien
acaattagtgtgcttatcttcctccttcttaac

SEQ ID NO: 20625 - DNA, 33 bp, Homo sapien
acttttctggagaaaggagtccacataggcaaa

SEQ ID NO: 20626 - DNA, 33 bp, Homo sapien
acttttctggagaaagtagtccacataggcaaa

SEQ ID NO: 20627 - DNA, 33 bp, Homo sapien
aggcagatgctaagtgcaccaagcttggagaga

SEQ ID NO: 20628 - DNA, 33 bp, Homo sapien
aggcagatgctaagtgtaccaagcttggagaga

SEQ ID NO: 20629 - DNA, 33 bp, Homo sapien
tcattcccaggcgcacaacccttgtatagtgtg

SEQ ID NO: 20630 - DNA, 33 bp, Homo sapien
tcattcccaggcgcacgacccttgtatagtgtg

SEQ ID NO: 20631 - DNA, 33 bp, Homo sapien
tactattaatcaccccagctttagagaccagca

SEQ ID NO: 20632 - DNA, 33 bp, Homo sapien
tactattaatcacccccgctttagagaccagca

SEQ ID NO: 20633 - DNA, 33 bp, Homo sapien
gttgtagagactaaataagtagagactaatgac

SEQ ID NO: 20634 - DNA, 33 bp, Homo sapien
gttgtagagactaaatgagtagagactaatgac

SEQ ID NO: 20635 - DNA, 33 bp, Homo sapien
ctgataaagaggtagagaaggtagttgaatgtt

SEQ ID NO: 20636 - DNA, 33 bp, Homo sapien
ctgataaagaggtagataaggtagttgaatgtt

SEQ ID NO: 20637 - DNA, 33 bp, Homo sapien
caacactcggttagacaagctcctgttggggtc

SEQ ID NO: 20638 - DNA, 33 bp, Homo sapien
caacactcggttagacgagctcctgttggggtc

SEQ ID NO: 20639 - DNA, 33 bp, Homo sapien
gtcatgctgggtggaaagacatgcaaagaccca

SEQ ID NO: 20640 - DNA, 33 bp, Homo sapien
gtcatgctgggtggaaggacatgcaaagaccca

SEQ ID NO: 20641 - DNA, 33 bp, Homo sapien
catgaagtgggagagaacattagtgaatagtga

SEQ ID NO: 20642 - DNA, 33 bp, Homo sapien
catgaagtgggagagagcattagtgaatagtga

SEQ ID NO: 20643 - DNA, 33 bp, Homo sapien
tcagtaacataatggaaatagagtcagtgaact

SEQ ID NO: 20644 - DNA, 33 bp, Homo sapien
tcagtaacataatggagatagagtcagtgaact

SEQ ID NO: 20645 - DNA, 33 bp, Homo sapien
tactcttggtgagtcagtatcgtcatctataaa

SEQ ID NO: 20646 - DNA, 33 bp, Homo sapien
tactcttggtgagtcattatcgtcatctataaa

SEQ ID NO: 20647 - DNA, 33 bp, Homo sapien
gggcaaccaggaatagccctgcttataactctc

SEQ ID NO: 20648 - DNA, 33 bp, Homo sapien
gggcaaccaggaatagtcctgcttataactctc

SEQ ID NO: 20649 - DNA, 33 bp, Homo sapien
caatgtgcttttttacacctgaagtgatgtgat

SEQ ID NO: 20650 - DNA, 33 bp, Homo sapien
caatgtgcttttttacccctgaagtgatgtgat

SEQ ID NO: 20651 - DNA, 33 bp, Homo sapien
accaaacatgtgtccacattggctcggatatat

SEQ ID NO: 20652 - DNA, 33 bp, Homo sapien
accaaacatgtgtccatattggctcggatatat

SEQ ID NO: 20653 - DNA, 33 bp, Homo sapien
acagcctcttcattccagagagaagcttctact

SEQ ID NO: 20654 - DNA, 33 bp, Homo sapien
acagcctcttcattccggagagaagcttctact

SEQ ID NO: 20655 - DNA, 33 bp, Homo sapien
cctcaagcaatagtcacctcataaagatcttaa

SEQ ID NO: 20656 - DNA, 33 bp, Homo sapien
cctcaagcaatagtcagctcataaagatcttaa

SEQ ID NO: 20657 - DNA, 33 bp, Homo sapien
cttggatttgtgaaataagctaacggatgagct

SEQ ID NO: 20658 - DNA, 33 bp, Homo sapien
cttggatttgtgaaattagctaacggatgagct

SEQ ID NO: 20659 - DNA, 33 bp, Homo sapien
tttaccttcacaggacaatgggaaactaggctc

SEQ ID NO: 20660 - DNA, 33 bp, Homo sapien
tttaccttcacaggaccatgggaaactaggctc

SEQ ID NO: 20661 - DNA, 33 bp, Homo sapien
agagaggagacaggcacgaaaccaggtgataga

SEQ ID NO: 20662 - DNA, 33 bp, Homo sapien
agagaggagacaggcatgaaaccaggtgataga

SEQ ID NO: 20663 - DNA, 33 bp, Homo sapien
gcacacacccgatgccaataagtgtttgctagg

SEQ ID NO: 20664 - DNA, 33 bp, Homo sapien
gcacacacccgatgccgataagtgtttgctagg

SEQ ID NO: 20665 - DNA, 33 bp, Homo sapien
gagtatgaactcaaacccagatggctgtggtta

SEQ ID NO: 20666 - DNA, 33 bp, Homo sapien
gagtatgaactcaaactcagatggctgtggtta

SEQ ID NO: 20667 - DNA, 33 bp, Homo sapien
tccttcatttcccagcgaatgcttaacctcttt

SEQ ID NO: 20668 - DNA, 33 bp, Homo sapien
tccttcatttcccagctaatgcttaacctcttt

SEQ ID NO: 20669 - DNA, 33 bp, Homo sapien
agttatggctggttgacaataactatacaaaga

SEQ ID NO: 20670 - DNA, 33 bp, Homo sapien
agttatggctggttgataataactatacaaaga

SEQ ID NO: 20671 - DNA, 33 bp, Homo sapien
cttccttatcaggatgaagtctcggtctgtgaa

SEQ ID NO: 20672 - DNA, 33 bp, Homo sapien
cttccttatcaggatggagtctcggtctgtgaa

SEQ ID NO: 20673 - DNA, 33 bp, Homo sapien
cccataagtgagagcccggagaagtatctccta

SEQ ID NO: 20674 - DNA, 33 bp, Homo sapien
cccataagtgagagcctggagaagtatctccta

SEQ ID NO: 20675 - DNA, 33 bp, Homo sapien
actaaggaaaccaagactcaaactcacatctct

SEQ ID NO: 20676 - DNA, 33 bp, Homo sapien
actaaggaaaccaagattcaaactcacatctct

SEQ ID NO: 20677 - DNA, 33 bp, Homo sapien
aaataaaactttctggaattagagactcacatg

SEQ ID NO: 20678 - DNA, 33 bp, Homo sapien
aaataaaactttctggtattagagactcacatg

SEQ ID NO: 20679 - DNA, 33 bp, Homo sapien
aaataccactctggtccaatgtggcctctggac

SEQ ID NO: 20680 - DNA, 33 bp, Homo sapien
aaataccactctggtctaatgtggcctctggac

SEQ ID NO: 20681 - DNA, 33 bp, Homo sapien
tctgctcaaaaaataaaatgagttaatgagaaa

SEQ ID NO: 20682 - DNA, 33 bp, Homo sapien
tctgctcaaaaaataacatgagttaatgagaaa

SEQ ID NO: 20683 - DNA, 33 bp, Homo sapien
gctgaggtggcttccacggctccagcaagttag

SEQ ID NO: 20684 - DNA, 33 bp, Homo sapien
gctgaggtggcttccatggctccagcaagttag

SEQ ID NO: 20685 - DNA, 33 bp, Homo sapien
tgaatgacgttaaagcacattggcggcaatata

SEQ ID NO: 20686 - DNA, 33 bp, Homo sapien
tgaatgacgttaaagcgcattggcggcaatata

SEQ ID NO: 20687 - DNA, 33 bp, Homo sapien
cccacgtatctttaaaatcattaacttcattaa

SEQ ID NO: 20688 - DNA, 33 bp, Homo sapien
cccacgtatctttaaagtcattaacttcattaa

SEQ ID NO: 20689 - DNA, 33 bp, Homo sapien
accttatctggcatagaaaacttttcaaatcct

SEQ ID NO: 20690 - DNA, 33 bp, Homo sapien
accttatctggcatagtaaacttttcaaatcct

SEQ ID NO: 20691 - DNA, 33 bp, Homo sapien
atacaacgtcacctacagactgtccagattctt

SEQ ID NO: 20692 - DNA, 33 bp, Homo sapien
atacaacgtcacctactgactgtccagattctt

SEQ ID NO: 20693 - DNA, 33 bp, Homo sapien
acaagacttcatcaacacttattcttttctttt

SEQ ID NO: 20694 - DNA, 33 bp, Homo sapien
acaagacttcatcaacgcttattcttttctttt

SEQ ID NO: 20695 - DNA, 33 bp, Homo sapien
tcaacagtaaacagataagtagtttgttcaagg

SEQ ID NO: 20696 - DNA, 33 bp, Homo sapien
tcaacagtaaacagatgagtagtttgttcaagg

SEQ ID NO: 20697 - DNA, 33 bp, Homo sapien
agtgtcccactttgtgaagtacccatcatttcc

SEQ ID NO: 20698 - DNA, 33 bp, Homo sapien
agtgtcccactttgtggagtacccatcatttcc

SEQ ID NO: 20699 - DNA, 33 bp, Homo sapien
ggtcatttagtaataaaagggagagttaagact

SEQ ID NO: 20700 - DNA, 33 bp, Homo sapien
ggtcatttagtaataagagggagagttaagact

SEQ ID NO: 20701 - DNA, 33 bp, Homo sapien
cttcatgagttgtttcaaggactaaaccagaag

SEQ ID NO: 20702 - DNA, 33 bp, Homo sapien
cttcatgagttgtttcgaggactaaaccagaag

SEQ ID NO: 20703 - DNA, 33 bp, Homo sapien
gggcaatgattcaaacacagtctgggtgacaaa

SEQ ID NO: 20704 - DNA, 33 bp, Homo sapien
gggcaatgattcaaacgcagtctgggtgacaaa

SEQ ID NO: 20705 - DNA, 33 bp, Homo sapien
tgcctaagtttgcatcaaaataaagtgggagca

SEQ ID NO: 20706 - DNA, 33 bp, Homo sapien
tgcctaagtttgcatcgaaataaagtgggagca

SEQ ID NO: 20707 - DNA, 33 bp, Homo sapien
cctcaagaagttttcaagtcagtagggaagtca

SEQ ID NO: 20708 - DNA, 33 bp, Homo sapien
cctcaagaagttttcaggtcagtagggaagtca

SEQ ID NO: 20709 - DNA, 33 bp, Homo sapien
aacaacagaaggtccacactgacttgtacatag

SEQ ID NO: 20710 - DNA, 33 bp, Homo sapien
aacaacagaaggtccagactgacttgtacatag

SEQ ID NO: 20711 - DNA, 33 bp, Homo sapien
gagcatccaagtcataaacaggttatcatcagc

SEQ ID NO: 20712 - DNA, 33 bp, Homo sapien
gagcatccaagtcatagacaggttatcatcagc

SEQ ID NO: 20713 - DNA, 33 bp, Homo sapien
atgattagagaaagcacgagtctgtgcaaaccc

SEQ ID NO: 20714 - DNA, 33 bp, Homo sapien
atgattagagaaagcatgagtctgtgcaaaccc

SEQ ID NO: 20715 - DNA, 33 bp, Homo sapien
aataccatgagcaaaaacatggtaacctaaacc

SEQ ID NO: 20716 - DNA, 33 bp, Homo sapien
aataccatgagcaaaagcatggtaacctaaacc

SEQ ID NO: 20717 - DNA, 33 bp, Homo sapien
atgccctctttatttacgaccaagctatggctt

SEQ ID NO: 20718 - DNA, 33 bp, Homo sapien
atgccctctttatttatgaccaagctatggctt

SEQ ID NO: 20719 - DNA, 33 bp, Homo sapien
acttcagagtctttgccgaatattaggtcatgc

SEQ ID NO: 20720 - DNA, 33 bp, Homo sapien
acttcagagtctttgctgaatattaggtcatgc

SEQ ID NO: 20721 - DNA, 33 bp, Homo sapien
agtgagtcatggaatacagattttaaaacaggc

SEQ ID NO: 20722 - DNA, 33 bp, Homo sapien
agtgagtcatggaatagagattttaaaacaggc

SEQ ID NO: 20723 - DNA, 33 bp, Homo sapien
cccaactagagctaaacccaggctgttccttag

SEQ ID NO: 20724 - DNA, 33 bp, Homo sapien
cccaactagagctaaatccaggctgttccttag

SEQ ID NO: 20725 - DNA, 33 bp, Homo sapien
tcttgattgcaataataagggagttcccctcag

SEQ ID NO: 20726 - DNA, 33 bp, Homo sapien
tcttgattgcaataatcagggagttcccctcag

SEQ ID NO: 20727 - DNA, 33 bp, Homo sapien
caactggaaagcagggaattggtcctatcttcc

SEQ ID NO: 20728 - DNA, 33 bp, Homo sapien
caactggaaagcaggggattggtcctatcttcc

SEQ ID NO: 20729 - DNA, 33 bp, Homo sapien
tctagaggttactggaaaaggtgctggcagggt

SEQ ID NO: 20730 - DNA, 33 bp, Homo sapien
tctagaggttactggagaaggtgctggcagggt

SEQ ID NO: 20731 - DNA, 33 bp, Homo sapien
aaaaacatccaggcaactggacagcatttgcaa

SEQ ID NO: 20732 - DNA, 33 bp, Homo sapien
aaaaacatccaggcaagtggacagcatttgcaa

SEQ ID NO: 20733 - DNA, 33 bp, Homo sapien
cagcaaagcagaatcacaggagagatggttggt

SEQ ID NO: 20734 - DNA, 33 bp, Homo sapien
cagcaaagcagaatcataggagagatggttggt

SEQ ID NO: 20735 - DNA, 33 bp, Homo sapien
tgagatagacaggcaaactcaggtagagcggaa

SEQ ID NO: 20736 - DNA, 33 bp, Homo sapien
tgagatagacaggcaacctcaggtagagcggaa

SEQ ID NO: 20737 - DNA, 33 bp, Homo sapien
ggagagccaaacagtcagaaaaatcttcaggtc

SEQ ID NO: 20738 - DNA, 33 bp, Homo sapien
ggagagccaaacagtcggaaaaatcttcaggtc

SEQ ID NO: 20739 - DNA, 33 bp, Homo sapien
ctgtggagatggacagaagcatgagggtaaagg

SEQ ID NO: 20740 - DNA, 33 bp, Homo sapien
ctgtggagatggacaggagcatgagggtaaagg

SEQ ID NO: 20741 - DNA, 33 bp, Homo sapien
ttaatcaacatgagtgcagcacttcacagcttg

SEQ ID NO: 20742 - DNA, 33 bp, Homo sapien
ttaatcaacatgagtgtagcacttcacagcttg

SEQ ID NO: 20743 - DNA, 33 bp, Homo sapien
tcaatgcgtcctccagacaggatccagagtgac

SEQ ID NO: 20744 - DNA, 33 bp, Homo sapien
tcaatgcgtcctccagtcaggatccagagtgac

SEQ ID NO: 20745 - DNA, 33 bp, Homo sapien
aaactcttttaaacaaccaattcagagcagtag

SEQ ID NO: 20746 - DNA, 33 bp, Homo sapien
aaactcttttaaacaatcaattcagagcagtag

SEQ ID NO: 20747 - DNA, 33 bp, Homo sapien
tcagatatctcactgaccttttcaatacaatat

SEQ ID NO: 20748 - DNA, 33 bp, Homo sapien
tcagatatctcactgatcttttcaatacaatat

SEQ ID NO: 20749 - DNA, 33 bp, Homo sapien
gtagtgatgacacatagaaaacctcagggacat

SEQ ID NO: 20750 - DNA, 33 bp, Homo sapien
gtagtgatgacacatataaaacctcagggacat

SEQ ID NO: 20751 - DNA, 33 bp, Homo sapien
actttcttcactggcaccatcaccatttttatt

SEQ ID NO: 20752 - DNA, 33 bp, Homo sapien
actttcttcactggcatcatcaccatttttatt

SEQ ID NO: 20753 - DNA, 33 bp, Homo sapien
tccacattactgaataaaaaatgagaaatacca

SEQ ID NO: 20754 - DNA, 33 bp, Homo sapien
tccacattactgaatacaaaatgagaaatacca

SEQ ID NO: 20755 - DNA, 33 bp, Homo sapien
tgcccaattctggaaacaaacgaaagtcaatta

SEQ ID NO: 20756 - DNA, 33 bp, Homo sapien
tgcccaattctggaaataaacgaaagtcaatta

SEQ ID NO: 20757 - DNA, 33 bp, Homo sapien
ctgagtcttagtagataagtaggagatgatgga

SEQ ID NO: 20758 - DNA, 33 bp, Homo sapien
ctgagtcttagtagatgagtaggagatgatgga

SEQ ID NO: 20759 - DNA, 33 bp, Homo sapien
gttttaaaaagaaataagtgtacctgagagcag

SEQ ID NO: 20760 - DNA, 33 bp, Homo sapien
gttttaaaaagaaataggtgtacctgagagcag

SEQ ID NO: 20761 - DNA, 33 bp, Homo sapien
ataacccagaggtaagacactttacttttgttt

SEQ ID NO: 20762 - DNA, 33 bp, Homo sapien
ataacccagaggtaaggcactttacttttgttt

SEQ ID NO: 20763 - DNA, 33 bp, Homo sapien
ggtcacataatactaaatggcaaagtaatattc

SEQ ID NO: 20764 - DNA, 33 bp, Homo sapien
ggtcacataatactaagtggcaaagtaatattc

SEQ ID NO: 20765 - DNA, 33 bp, Homo sapien
tctcaaagcaccatcccggaatatctattattt

SEQ ID NO: 20766 - DNA, 33 bp, Homo sapien
tctcaaagcaccatcctggaatatctattattt

SEQ ID NO: 20767 - DNA, 33 bp, Homo sapien
tacttgctgatctccagcttgaaccactttgat

SEQ ID NO: 20768 - DNA, 33 bp, Homo sapien
tacttgctgatctccatcttgaaccactttgat

SEQ ID NO: 20769 - DNA, 33 bp, Homo sapien
tccatccaagtgcataagcacacatacacacac

SEQ ID NO: 20770 - DNA, 33 bp, Homo sapien
tccatccaagtgcataggcacacatacacacac

SEQ ID NO: 20771 - DNA, 33 bp, Homo sapien
gctacttgtaagtctccgaccatgccatgctgt

SEQ ID NO: 20772 - DNA, 33 bp, Homo sapien
gctacttgtaagtctctgaccatgccatgctgt

SEQ ID NO: 20773 - DNA, 33 bp, Homo sapien
tccaggattccaggacagggttctttctaatag

SEQ ID NO: 20774 - DNA, 33 bp, Homo sapien
tccaggattccaggacggggttctttctaatag

SEQ ID NO: 20775 - DNA, 33 bp, Homo sapien
gcaatgctaggaggaaaacaggaggctctggag

SEQ ID NO: 20776 - DNA, 33 bp, Homo sapien
gcaatgctaggaggaagacaggaggctctggag

SEQ ID NO: 20777 - DNA, 33 bp, Homo sapien
aacttgtcaaaagtctcacaactagcaagggtt

SEQ ID NO: 20778 - DNA, 33 bp, Homo sapien
aacttgtcaaaagtcttacaactagcaagggtt

SEQ ID NO: 20779 - DNA, 33 bp, Homo sapien
cacaacaacaacaacaacaattccaggtgcttc

SEQ ID NO: 20780 - DNA, 33 bp, Homo sapien
cacaacaacaacaacatcaattccaggtgcttc

SEQ ID NO: 20781 - DNA, 33 bp, Homo sapien
gagcaacaactcgaccaccagttcatgttatac

SEQ ID NO: 20782 - DNA, 33 bp, Homo sapien
gagcaacaactcgaccgccagttcatgttatac

SEQ ID NO: 20783 - DNA, 33 bp, Homo sapien
aaatgtcattaaggcaacaaacagctctgctgg

SEQ ID NO: 20784 - DNA, 33 bp, Homo sapien
aaatgtcattaaggcagcaaacagctctgctgg

SEQ ID NO: 20785 - DNA, 33 bp, Homo sapien
aaggagaagccataagaaaggactaggcctaag

SEQ ID NO: 20786 - DNA, 33 bp, Homo sapien
aaggagaagccataagcaaggactaggcctaag

SEQ ID NO: 20787 - DNA, 33 bp, Homo sapien
ccaaatagctggttacacattatttctggttgt

SEQ ID NO: 20788 - DNA, 33 bp, Homo sapien
ccaaatagctggttacgcattatttctggttgt

SEQ ID NO: 20789 - DNA, 33 bp, Homo sapien
ttatgtgagtaaaaggaccagaatgcacccttt

SEQ ID NO: 20790 - DNA, 33 bp, Homo sapien
ttatgtgagtaaaagggccagaatgcacccttt

SEQ ID NO: 20791 - DNA, 33 bp, Homo sapien
aaaataatgctcagtacctagattttttcagtg

SEQ ID NO: 20792 - DNA, 33 bp, Homo sapien
aaaataatgctcagtatctagattttttcagtg

SEQ ID NO: 20793 - DNA, 33 bp, Homo sapien
ccttcccaggagtgaaaattgcaagcctgccca

SEQ ID NO: 20794 - DNA, 33 bp, Homo sapien
ccttcccaggagtgaacattgcaagcctgccca

SEQ ID NO: 20795 - DNA, 33 bp, Homo sapien
ctactgattcttgggcacaaaccaaattttgtc

SEQ ID NO: 20796 - DNA, 33 bp, Homo sapien
ctactgattcttgggctcaaaccaaattttgtc

SEQ ID NO: 20797 - DNA, 33 bp, Homo sapien
ctgtagatacaaaacagtggactgagttgctat

SEQ ID NO: 20798 - DNA, 33 bp, Homo sapien
ctgtagatacaaaacattggactgagttgctat

SEQ ID NO: 20799 - DNA, 33 bp, Homo sapien
ctgaaggcctgagaaccgaaagcttcaatgttc

SEQ ID NO: 20800 - DNA, 33 bp, Homo sapien
ctgaaggcctgagaactgaaagcttcaatgttc

SEQ ID NO: 20801 - DNA, 33 bp, Homo sapien
ggaagttttccagacaataactgtaacttgcat

SEQ ID NO: 20802 - DNA, 33 bp, Homo sapien
ggaagttttccagacagtaactgtaacttgcat

SEQ ID NO: 20803 - DNA, 33 bp, Homo sapien
gaagggtaaagctacactatcctattctgtact

SEQ ID NO: 20804 - DNA, 33 bp, Homo sapien
gaagggtaaagctacattatcctattctgtact

SEQ ID NO: 20805 - DNA, 33 bp, Homo sapien
ttcagcatgacttcccacaggtagaccttctct

SEQ ID NO: 20806 - DNA, 33 bp, Homo sapien
ttcagcatgacttcccgcaggtagaccttctct

SEQ ID NO: 20807 - DNA, 33 bp, Homo sapien
actgcaaaccatgtaaagagccatggcaatatg

SEQ ID NO: 20808 - DNA, 33 bp, Homo sapien
actgcaaaccatgtaatgagccatggcaatatg

SEQ ID NO: 20809 - DNA, 33 bp, Homo sapien
ctgctcatccacttccagctccaagacctcact

SEQ ID NO: 20810 - DNA, 33 bp, Homo sapien
ctgctcatccacttccggctccaagacctcact

SEQ ID NO: 20811 - DNA, 33 bp, Homo sapien
tatctgccattgctacgatttgaatgtgtcccc

SEQ ID NO: 20812 - DNA, 33 bp, Homo sapien
tatctgccattgctactatttgaatgtgtcccc

SEQ ID NO: 20813 - DNA, 33 bp, Homo sapien
ggggaggagagaaagaatactgaatacagataa

SEQ ID NO: 20814 - DNA, 33 bp, Homo sapien
ggggaggagagaaagagtactgaatacagataa

SEQ ID NO: 20815 - DNA, 33 bp, Homo sapien
gttttatcaatatgtaccttcacatgaatccaa

SEQ ID NO: 20816 - DNA, 33 bp, Homo sapien
gttttatcaatatgtagcttcacatgaatccaa

SEQ ID NO: 20817 - DNA, 33 bp, Homo sapien
atctcacatatcaccactcaagaacttactcat

SEQ ID NO: 20818 - DNA, 33 bp, Homo sapien
atctcacatatcaccattcaagaacttactcat

SEQ ID NO: 20819 - DNA, 33 bp, Homo sapien
gaggagacaagatcagcaattagttagacaatc

SEQ ID NO: 20820 - DNA, 33 bp, Homo sapien
gaggagacaagatcaggaattagttagacaatc

SEQ ID NO: 20821 - DNA, 33 bp, Homo sapien
tatcatctttatcagaagtagattccatctcaa

SEQ ID NO: 20822 - DNA, 33 bp, Homo sapien
tatcatctttatcagaggtagattccatctcaa

SEQ ID NO: 20823 - DNA, 33 bp, Homo sapien
agttttgtactgccaaagaagctgcttatctga

SEQ ID NO: 20824 - DNA, 33 bp, Homo sapien
agttttgtactgccaaggaagctgcttatctga

SEQ ID NO: 20825 - DNA, 33 bp, Homo sapien
cttcaccacactgatcaatctagacttacagtg

SEQ ID NO: 20826 - DNA, 33 bp, Homo sapien
cttcaccacactgatctatctagacttacagtg

SEQ ID NO: 20827 - DNA, 33 bp, Homo sapien
aggtactaccagcagtcacagatgggtcagcag

SEQ ID NO: 20828 - DNA, 33 bp, Homo sapien
aggtactaccagcagttacagatgggtcagcag

SEQ ID NO: 20829 - DNA, 33 bp, Homo sapien
gacaatgcagtcctgaataagtctgagggtgaa

SEQ ID NO: 20830 - DNA, 33 bp, Homo sapien
gacaatgcagtcctgagtaagtctgagggtgaa

SEQ ID NO: 20831 - DNA, 33 bp, Homo sapien
aagcccttaataagccaaactcagactatttac

SEQ ID NO: 20832 - DNA, 33 bp, Homo sapien
aagcccttaataagccgaactcagactatttac

SEQ ID NO: 20833 - DNA, 33 bp, Homo sapien
ttgatacctgtagagaagtcatttcatttcttt

SEQ ID NO: 20834 - DNA, 33 bp, Homo sapien
ttgatacctgtagagatgtcatttcatttcttt

SEQ ID NO: 20835 - DNA, 33 bp, Homo sapien
aatttaaagccaaaagaaccttcattaagatcc

SEQ ID NO: 20836 - DNA, 33 bp, Homo sapien
aatttaaagccaaaaggaccttcattaagatcc

SEQ ID NO: 20837 - DNA, 33 bp, Homo sapien
tagcataagagcatctaactcagcatagggatg

SEQ ID NO: 20838 - DNA, 33 bp, Homo sapien
tagcataagagcatctgactcagcatagggatg

SEQ ID NO: 20839 - DNA, 33 bp, Homo sapien
ctccgggaccttctcacgcccttctcatcagtg

SEQ ID NO: 20840 - DNA, 33 bp, Homo sapien
ctccgggaccttctcatgcccttctcatcagtg

SEQ ID NO: 20841 - DNA, 33 bp, Homo sapien
taaggactcaacattaactattcctgctgctgt

SEQ ID NO: 20842 - DNA, 33 bp, Homo sapien
taaggactcaacattagctattcctgctgctgt

SEQ ID NO: 20843 - DNA, 33 bp, Homo sapien
tccttatcactcaccaacctttcagccacatca

SEQ ID NO: 20844 - DNA, 33 bp, Homo sapien
tccttatcactcaccagcctttcagccacatca

SEQ ID NO: 20845 - DNA, 33 bp, Homo sapien
ggattatttggcaaaaagaagtaagaatcatag

SEQ ID NO: 20846 - DNA, 33 bp, Homo sapien
ggattatttggcaaaacgaagtaagaatcatag

SEQ ID NO: 20847 - DNA, 33 bp, Homo sapien
cttgtcaaagtcagtacagagaaaaatgttacc

SEQ ID NO: 20848 - DNA, 33 bp, Homo sapien
cttgtcaaagtcagtatagagaaaaatgttacc

SEQ ID NO: 20849 - DNA, 33 bp, Homo sapien
tttacgatgttattcaagttctcacaaccaccc

SEQ ID NO: 20850 - DNA, 33 bp, Homo sapien
tttacgatgttattcaggttctcacaaccaccc

SEQ ID NO: 20851 - DNA, 33 bp, Homo sapien
gagctagcctcttaagaactgacgctgtcctgg

SEQ ID NO: 20852 - DNA, 33 bp, Homo sapien
gagctagcctcttaaggactgacgctgtcctgg

SEQ ID NO: 20853 - DNA, 33 bp, Homo sapien
acatttttgaagaaccactgtaccaagtggcat

SEQ ID NO: 20854 - DNA, 33 bp, Homo sapien
acatttttgaagaaccgctgtaccaagtggcat

SEQ ID NO: 20855 - DNA, 33 bp, Homo sapien
ttccaaaaacagcaaaaggtgtctgagcaacat

SEQ ID NO: 20856 - DNA, 33 bp, Homo sapien
ttccaaaaacagcaaagggtgtctgagcaacat

SEQ ID NO: 20857 - DNA, 33 bp, Homo sapien
ggcacacatatgtgtgcacgcatgtatatgtat

SEQ ID NO: 20858 - DNA, 33 bp, Homo sapien
ggcacacatatgtgtgtacgcatgtatatgtat

SEQ ID NO: 20859 - DNA, 33 bp, Homo sapien
ggaacaagagatggtacaatttccctttactgt

SEQ ID NO: 20860 - DNA, 33 bp, Homo sapien
ggaacaagagatggtataatttccctttactgt

SEQ ID NO: 20861 - DNA, 33 bp, Homo sapien
cctcacagcatttggactcaggatgtacagaga

SEQ ID NO: 20862 - DNA, 33 bp, Homo sapien
cctcacagcatttggagtcaggatgtacagaga

SEQ ID NO: 20863 - DNA, 33 bp, Homo sapien
acatatcttgaaaactgactgtatgccaagtgt

SEQ ID NO: 20864 - DNA, 33 bp, Homo sapien
acatatcttgaaaacttactgtatgccaagtgt

SEQ ID NO: 20865 - DNA, 33 bp, Homo sapien
tgagagctttaactccaatgtctataggaacac

SEQ ID NO: 20866 - DNA, 33 bp, Homo sapien
tgagagctttaactccgatgtctataggaacac

SEQ ID NO: 20867 - DNA, 33 bp, Homo sapien
ctctcaccccattctacctgagcttccagcacc

SEQ ID NO: 20868 - DNA, 33 bp, Homo sapien
ctctcaccccattctatctgagcttccagcacc

SEQ ID NO: 20869 - DNA, 33 bp, Homo sapien
tacatgaggagatttaaagtgtatgtggaaaca

SEQ ID NO: 20870 - DNA, 33 bp, Homo sapien
tacatgaggagatttagagtgtatgtggaaaca

SEQ ID NO: 20871 - DNA, 33 bp, Homo sapien
tatcccacttgtcctccgaagatctctgtttcc

SEQ ID NO: 20872 - DNA, 33 bp, Homo sapien
tatcccacttgtcctctgaagatctctgtttcc

SEQ ID NO: 20873 - DNA, 33 bp, Homo sapien
ttcagaagggtgtaacaaaatctgcacctgttg

SEQ ID NO: 20874 - DNA, 33 bp, Homo sapien
ttcagaagggtgtaacgaaatctgcacctgttg

SEQ ID NO: 20875 - DNA, 33 bp, Homo sapien
agcaatagtttaaaaaatcaacacttcacagca

SEQ ID NO: 20876 - DNA, 33 bp, Homo sapien
agcaatagtttaaaaactcaacacttcacagca

SEQ ID NO: 20877 - DNA, 33 bp, Homo sapien
tatggtccagttccaacgtcagctcctctgtga

SEQ ID NO: 20878 - DNA, 33 bp, Homo sapien
tatggtccagttccaatgtcagctcctctgtga

SEQ ID NO: 20879 - DNA, 33 bp, Homo sapien
ggggaagaaagtgtaactgtaatgtcatcatag

SEQ ID NO: 20880 - DNA, 33 bp, Homo sapien
ggggaagaaagtgtaattgtaatgtcatcatag

SEQ ID NO: 20881 - DNA, 33 bp, Homo sapien
gatagctaaggggcaacgtatgtgactttagaa

SEQ ID NO: 20882 - DNA, 33 bp, Homo sapien
gatagctaaggggcaaggtatgtgactttagaa

SEQ ID NO: 20883 - DNA, 33 bp, Homo sapien
gaacacagttggaacaaagtgatgcaggagtga

SEQ ID NO: 20884 - DNA, 33 bp, Homo sapien
gaacacagttggaacagagtgatgcaggagtga

SEQ ID NO: 20885 - DNA, 33 bp, Homo sapien
ctattgtatgctaggaactttacctgcattatt

SEQ ID NO: 20886 - DNA, 33 bp, Homo sapien
ctattgtatgctaggagctttacctgcattatt

SEQ ID NO: 20887 - DNA, 33 bp, Homo sapien
tttcattttctgaagacctattgtatgctagga

SEQ ID NO: 20888 - DNA, 33 bp, Homo sapien
tttcattttctgaagatctattgtatgctagga

SEQ ID NO: 20889 - DNA, 33 bp, Homo sapien
agctgtggctgctgtacgacttttatcttctgc

SEQ ID NO: 20890 - DNA, 33 bp, Homo sapien
agctgtggctgctgtatgacttttatcttctgc

SEQ ID NO: 20891 - DNA, 33 bp, Homo sapien
gtgttttctaggtgaaaagttgagtgaaggaga

SEQ ID NO: 20892 - DNA, 33 bp, Homo sapien
gtgttttctaggtgaagagttgagtgaaggaga

SEQ ID NO: 20893 - DNA, 33 bp, Homo sapien
gtttcttcatatacacaggggtaagataaagtg

SEQ ID NO: 20894 - DNA, 33 bp, Homo sapien
gtttcttcatatacactggggtaagataaagtg

SEQ ID NO: 20895 - DNA, 33 bp, Homo sapien
acgtctcaggaatcccacaggacacatctgctt

SEQ ID NO: 20896 - DNA, 33 bp, Homo sapien
acgtctcaggaatcccgcaggacacatctgctt

SEQ ID NO: 20897 - DNA, 33 bp, Homo sapien
gacaggggagcacagacggtgttccaggaacta

SEQ ID NO: 20898 - DNA, 33 bp, Homo sapien
gacaggggagcacagatggtgttccaggaacta

SEQ ID NO: 20899 - DNA, 33 bp, Homo sapien
gccaagttggcatttaaccaaaatgatggagta

SEQ ID NO: 20900 - DNA, 33 bp, Homo sapien
gccaagttggcatttagccaaaatgatggagta

SEQ ID NO: 20901 - DNA, 33 bp, Homo sapien
acgtggttatcaatgaccttccaccttctatgc

SEQ ID NO: 20902 - DNA, 33 bp, Homo sapien
acgtggttatcaatgagcttccaccttctatgc

SEQ ID NO: 20903 - DNA, 33 bp, Homo sapien
tagaatctgggtgcataatcagcaatttttgag

SEQ ID NO: 20904 - DNA, 33 bp, Homo sapien
tagaatctgggtgcatgatcagcaatttttgag

SEQ ID NO: 20905 - DNA, 33 bp, Homo sapien
gcttctaagggtaaaacttctgccactgaacat

SEQ ID NO: 20906 - DNA, 33 bp, Homo sapien
gcttctaagggtaaaatttctgccactgaacat

SEQ ID NO: 20907 - DNA, 33 bp, Homo sapien
ccagttcaacatctgccaaataatccaatattg

SEQ ID NO: 20908 - DNA, 33 bp, Homo sapien
ccagttcaacatctgctaaataatccaatattg

SEQ ID NO: 20909 - DNA, 33 bp, Homo sapien
gacagcactgggctcaaccacaactctgcccca

SEQ ID NO: 20910 - DNA, 33 bp, Homo sapien
gacagcactgggctcagccacaactctgcccca

SEQ ID NO: 20911 - DNA, 33 bp, Homo sapien
gcgtgaggtcatgtaaatggtgatatctggaag

SEQ ID NO: 20912 - DNA, 33 bp, Homo sapien
gcgtgaggtcatgtaagtggtgatatctggaag

SEQ ID NO: 20913 - DNA, 33 bp, Homo sapien
ttggtggtccttgccactaagcatttgtttact

SEQ ID NO: 20914 - DNA, 33 bp, Homo sapien
ttggtggtccttgccattaagcatttgtttact

SEQ ID NO: 20915 - DNA, 33 bp, Homo sapien
cagatgcttagtatcacgagttcaatttgtatc

SEQ ID NO: 20916 - DNA, 33 bp, Homo sapien
cagatgcttagtatcatgagttcaatttgtatc

SEQ ID NO: 20917 - DNA, 33 bp, Homo sapien
ttctatgtttctcaaacgtcttgaaaaacaagc

SEQ ID NO: 20918 - DNA, 33 bp, Homo sapien
ttctatgtttctcaaatgtcttgaaaaacaagc

SEQ ID NO: 20919 - DNA, 33 bp, Homo sapien
caaggagaccaattaacgctttcaaatgcaaag

SEQ ID NO: 20920 - DNA, 33 bp, Homo sapien
caaggagaccaattaatgctttcaaatgcaaag

SEQ ID NO: 20921 - DNA, 33 bp, Homo sapien
tgctgtaattgtcttgcattactgtttctagtc

SEQ ID NO: 20922 - DNA, 33 bp, Homo sapien
tgctgtaattgtcttgtattactgtttctagtc

SEQ ID NO: 20923 - DNA, 33 bp, Homo sapien
agttatgtttaatatacgttgctgagaaaaata

SEQ ID NO: 20924 - DNA, 33 bp, Homo sapien
agttatgtttaatataggttgctgagaaaaata

SEQ ID NO: 20925 - DNA, 33 bp, Homo sapien
gacataggcaagtgtacgaatagaattgttctt

SEQ ID NO: 20926 - DNA, 33 bp, Homo sapien
gacataggcaagtgtatgaatagaattgttctt

SEQ ID NO: 20927 - DNA, 33 bp, Homo sapien
ctcatattgtgctccaataaatgctgtcagttc

SEQ ID NO: 20928 - DNA, 33 bp, Homo sapien
ctcatattgtgctccagtaaatgctgtcagttc

SEQ ID NO: 20929 - DNA, 33 bp, Homo sapien
agcgtaggacgataaccgtgtgtagaaaaataa

SEQ ID NO: 20930 - DNA, 33 bp, Homo sapien
agcgtaggacgataactgtgtgtagaaaaataa

SEQ ID NO: 20931 - DNA, 33 bp, Homo sapien
ctgatgatggggtaaaatagaagaaaccacaca

SEQ ID NO: 20932 - DNA, 33 bp, Homo sapien
ctgatgatggggtaaagtagaagaaaccacaca

SEQ ID NO: 20933 - DNA, 33 bp, Homo sapien
ttttctaaaaatgttaagtgagcctcatgttaa

SEQ ID NO: 20934 - DNA, 33 bp, Homo sapien
ttttctaaaaatgttacgtgagcctcatgttaa

SEQ ID NO: 20935 - DNA, 33 bp, Homo sapien
aaaaaggtaaaagctacatcagacagtcccata

SEQ ID NO: 20936 - DNA, 33 bp, Homo sapien
aaaaaggtaaaagctagatcagacagtcccata

SEQ ID NO: 20937 - DNA, 33 bp, Homo sapien
agattctctgagtgacacttaagagagtacagg

SEQ ID NO: 20938 - DNA, 33 bp, Homo sapien
agattctctgagtgacgcttaagagagtacagg

SEQ ID NO: 20939 - DNA, 33 bp, Homo sapien
taccttacgtaagatcacctagctgagaattgg

SEQ ID NO: 20940 - DNA, 33 bp, Homo sapien
taccttacgtaagatcgcctagctgagaattgg

SEQ ID NO: 20941 - DNA, 33 bp, Homo sapien
ccacgatgggatttcaactgaggcagatgttga

SEQ ID NO: 20942 - DNA, 33 bp, Homo sapien
ccacgatgggatttcagctgaggcagatgttga

SEQ ID NO: 20943 - DNA, 33 bp, Homo sapien
ctgtaacagaagtacacggtacagagttggcac

SEQ ID NO: 20944 - DNA, 33 bp, Homo sapien
ctgtaacagaagtacatggtacagagttggcac

SEQ ID NO: 20945 - DNA, 33 bp, Homo sapien
taaactggtgaaaataaggatgaataaagaggg

SEQ ID NO: 20946 - DNA, 33 bp, Homo sapien
taaactggtgaaaatatggatgaataaagaggg

SEQ ID NO: 20947 - DNA, 33 bp, Homo sapien
ggtaaatgtttaacaacgcaagaaaagagtcac

SEQ ID NO: 20948 - DNA, 33 bp, Homo sapien
ggtaaatgtttaacaatgcaagaaaagagtcac

SEQ ID NO: 20949 - DNA, 33 bp, Homo sapien
aggtcacaaatcaggacatagtctgtagctcaa

SEQ ID NO: 20950 - DNA, 33 bp, Homo sapien
aggtcacaaatcaggagatagtctgtagctcaa

SEQ ID NO: 20951 - DNA, 33 bp, Homo sapien
gcctatctagataagaagtgaaatcctccatct

SEQ ID NO: 20952 - DNA, 33 bp, Homo sapien
gcctatctagataagaggtgaaatcctccatct

SEQ ID NO: 20953 - DNA, 33 bp, Homo sapien
tattcttggttctatcactgagtcaagtgacat

SEQ ID NO: 20954 - DNA, 33 bp, Homo sapien
tattcttggttctatccctgagtcaagtgacat

SEQ ID NO: 20955 - DNA, 33 bp, Homo sapien
tgcatataatcttgacagcaatgagcagtatcc

SEQ ID NO: 20956 - DNA, 33 bp, Homo sapien
tgcatataatcttgacggcaatgagcagtatcc

SEQ ID NO: 20957 - DNA, 33 bp, Homo sapien
aggaaacttcaacaaactagtgcatgagcttat

SEQ ID NO: 20958 - DNA, 33 bp, Homo sapien
aggaaacttcaacaaagtagtgcatgagcttat

SEQ ID NO: 20959 - DNA, 33 bp, Homo sapien
ttatatagagagaatccgagatgaaatccaggg

SEQ ID NO: 20960 - DNA, 33 bp, Homo sapien
ttatatagagagaatctgagatgaaatccaggg

SEQ ID NO: 20961 - DNA, 33 bp, Homo sapien
cagaagtgtgatattcaatggagaggcaatcct

SEQ ID NO: 20962 - DNA, 33 bp, Homo sapien
cagaagtgtgatattcgatggagaggcaatcct

SEQ ID NO: 20963 - DNA, 33 bp, Homo sapien
caagtcctagtctcaccgctactggcactatgt

SEQ ID NO: 20964 - DNA, 33 bp, Homo sapien
caagtcctagtctcacggctactggcactatgt

SEQ ID NO: 20965 - DNA, 33 bp, Homo sapien
caccctgaaatctgaaaagaaaggacaacccag

SEQ ID NO: 20966 - DNA, 33 bp, Homo sapien
caccctgaaatctgaagagaaaggacaacccag

SEQ ID NO: 20967 - DNA, 33 bp, Homo sapien
actttcccctaaatacactgtgatctcaaaata

SEQ ID NO: 20968 - DNA, 33 bp, Homo sapien
actttcccctaaatacgctgtgatctcaaaata

SEQ ID NO: 20969 - DNA, 33 bp, Homo sapien
gtctatgttgtggcaaactgagcagggtggagt

SEQ ID NO: 20970 - DNA, 33 bp, Homo sapien
gtctatgttgtggcaatctgagcagggtggagt

SEQ ID NO: 20971 - DNA, 33 bp, Homo sapien
tcctgagcatctctcacatctgggtgataagag

SEQ ID NO: 20972 - DNA, 33 bp, Homo sapien
tcctgagcatctctcatatctgggtgataagag

SEQ ID NO: 20973 - DNA, 33 bp, Homo sapien
tggtcagagaatgggacactggaattttcaaca

SEQ ID NO: 20974 - DNA, 33 bp, Homo sapien
tggtcagagaatgggatactggaattttcaaca

SEQ ID NO: 20975 - DNA, 33 bp, Homo sapien
atatagcttgtttccaccacactaagttctgct

SEQ ID NO: 20976 - DNA, 33 bp, Homo sapien
atatagcttgtttccagcacactaagttctgct

SEQ ID NO: 20977 - DNA, 33 bp, Homo sapien
ttagtggtgtaggaaagttcttatctgatcagt

SEQ ID NO: 20978 - DNA, 33 bp, Homo sapien
ttagtggtgtaggaaatttcttatctgatcagt

SEQ ID NO: 20979 - DNA, 33 bp, Homo sapien
tttgtggagggccaaacggtcaaacacatctta

SEQ ID NO: 20980 - DNA, 33 bp, Homo sapien
tttgtggagggccaaatggtcaaacacatctta

SEQ ID NO: 20981 - DNA, 33 bp, Homo sapien
actccttgccctaaccagaatgtaagctacaca

SEQ ID NO: 20982 - DNA, 33 bp, Homo sapien
actccttgccctaaccggaatgtaagctacaca

SEQ ID NO: 20983 - DNA, 33 bp, Homo sapien
gggcataaacaacccaaaaggcaaagcagttct

SEQ ID NO: 20984 - DNA, 33 bp, Homo sapien
gggcataaacaacccagaaggcaaagcagttct

SEQ ID NO: 20985 - DNA, 33 bp, Homo sapien
taaggctgcagaactacgtagggccagagctgg

SEQ ID NO: 20986 - DNA, 33 bp, Homo sapien
taaggctgcagaactatgtagggccagagctgg

SEQ ID NO: 20987 - DNA, 33 bp, Homo sapien
taagttccacaattgaagtattgccaggtgaca

SEQ ID NO: 20988 - DNA, 33 bp, Homo sapien
taagttccacaattgaggtattgccaggtgaca

SEQ ID NO: 20989 - DNA, 33 bp, Homo sapien
caagctaactttaagcacttgtaagaaattggt

SEQ ID NO: 20990 - DNA, 33 bp, Homo sapien
caagctaactttaagctcttgtaagaaattggt

SEQ ID NO: 20991 - DNA, 33 bp, Homo sapien
tatatacaaaaaggccagacttaatggagactc

SEQ ID NO: 20992 - DNA, 33 bp, Homo sapien
tatatacaaaaaggccggacttaatggagactc

SEQ ID NO: 20993 - DNA, 33 bp, Homo sapien
ttccctataattctcccgccaccaacttgggcc

SEQ ID NO: 20994 - DNA, 33 bp, Homo sapien
ttccctataattctccggccaccaacttgggcc

SEQ ID NO: 20995 - DNA, 33 bp, Homo sapien
aaaacacatacaacaacgcaaggttagttatta

SEQ ID NO: 20996 - DNA, 33 bp, Homo sapien
aaaacacatacaacaatgcaaggttagttatta

SEQ ID NO: 20997 - DNA, 33 bp, Homo sapien
acagtagtgagcaacaaataaagtttagtagaa

SEQ ID NO: 20998 - DNA, 33 bp, Homo sapien
acagtagtgagcaacagataaagtttagtagaa

SEQ ID NO: 20999 - DNA, 33 bp, Homo sapien
tgtgaagtagaatgcaactccctcctcttttaa

SEQ ID NO: 21000 - DNA, 33 bp, Homo sapien
tgtgaagtagaatgcacctccctcctcttttaa

SEQ ID NO: 21001 - DNA, 33 bp, Homo sapien
ctatttaaagtgcctaactagggattttctcct

SEQ ID NO: 21002 - DNA, 33 bp, Homo sapien
ctatttaaagtgcctagctagggattttctcct

SEQ ID NO: 21003 - DNA, 33 bp, Homo sapien
agacagtaaacttcaccggaaatcatctaaaga

SEQ ID NO: 21004 - DNA, 33 bp, Homo sapien
agacagtaaacttcactggaaatcatctaaaga

SEQ ID NO: 21005 - DNA, 33 bp, Homo sapien
tccaatgtcacagaacaaagtagcagaattaaa

SEQ ID NO: 21006 - DNA, 33 bp, Homo sapien
tccaatgtcacagaaccaagtagcagaattaaa

SEQ ID NO: 21007 - DNA, 33 bp, Homo sapien
gtttaatatctttggaccttactttcaccaata

SEQ ID NO: 21008 - DNA, 33 bp, Homo sapien
gtttaatatctttggatcttactttcaccaata

SEQ ID NO: 21009 - DNA, 33 bp, Homo sapien
ctttttacaaaattgacacaattcatgatttta

SEQ ID NO: 21010 - DNA, 33 bp, Homo sapien
ctttttacaaaattgagacaattcatgatttta

SEQ ID NO: 21011 - DNA, 33 bp, Homo sapien
ggtatagctgctaaatgatgttgaatgatgatt

SEQ ID NO: 21012 - DNA, 33 bp, Homo sapien
ggtatagctgctaaattatgttgaatgatgatt

SEQ ID NO: 21013 - DNA, 33 bp, Homo sapien
gagccatattgaattcgacatactggccttgaa

SEQ ID NO: 21014 - DNA, 33 bp, Homo sapien
gagccatattgaattctacatactggccttgaa

SEQ ID NO: 21015 - DNA, 33 bp, Homo sapien
agcatttcttcagacaaatctccctacccagtg

SEQ ID NO: 21016 - DNA, 33 bp, Homo sapien
agcatttcttcagacagatctccctacccagtg

SEQ ID NO: 21017 - DNA, 33 bp, Homo sapien
tgtgtctagatgaatacgcacaaattaaatgcc

SEQ ID NO: 21018 - DNA, 33 bp, Homo sapien
tgtgtctagatgaatatgcacaaattaaatgcc

SEQ ID NO: 21019 - DNA, 33 bp, Homo sapien
tttttaagcaaagtatccagctaattttggaca

SEQ ID NO: 21020 - DNA, 33 bp, Homo sapien
tttttaagcaaagtattcagctaattttggaca

SEQ ID NO: 21021 - DNA, 33 bp, Homo sapien
ggaaggaggcacactacagatagaacttttatg

SEQ ID NO: 21022 - DNA, 33 bp, Homo sapien
ggaaggaggcacactatagatagaacttttatg

SEQ ID NO: 21023 - DNA, 33 bp, Homo sapien
ttctttatggaaggaaacattatcctcttttca

SEQ ID NO: 21024 - DNA, 33 bp, Homo sapien
ttctttatggaaggaatcattatcctcttttca

SEQ ID NO: 21025 - DNA, 33 bp, Homo sapien
caaggctaattcggacaagacagtagagctggg

SEQ ID NO: 21026 - DNA, 33 bp, Homo sapien
caaggctaattcggacgagacagtagagctggg

SEQ ID NO: 21027 - DNA, 33 bp, Homo sapien
gaaggccaaagcagtcacaatacagagggccac

SEQ ID NO: 21028 - DNA, 33 bp, Homo sapien
gaaggccaaagcagtcgcaatacagagggccac

SEQ ID NO: 21029 - DNA, 33 bp, Homo sapien
aaaccaggacttttggaaaaaaatggctgattc

SEQ ID NO: 21030 - DNA, 33 bp, Homo sapien
aaaccaggacttttgggaaaaaatggctgattc

SEQ ID NO: 21031 - DNA, 33 bp, Homo sapien
gataataaattatacagctgtcagaagcagtgg

SEQ ID NO: 21032 - DNA, 33 bp, Homo sapien
gataataaattatacatctgtcagaagcagtgg

SEQ ID NO: 21033 - DNA, 33 bp, Homo sapien
attgaagtcactccctcagaagatttgataaga

SEQ ID NO: 21034 - DNA, 33 bp, Homo sapien
attgaagtcactccctgagaagatttgataaga

SEQ ID NO: 21035 - DNA, 33 bp, Homo sapien
atcaacatcaaacactcacctttcgttggccaa

SEQ ID NO: 21036 - DNA, 33 bp, Homo sapien
atcaacatcaaacacttacctttcgttggccaa

SEQ ID NO: 21037 - DNA, 33 bp, Homo sapien
aacatgaactgagtgaacatctatcatgtgtcc

SEQ ID NO: 21038 - DNA, 33 bp, Homo sapien
aacatgaactgagtgagcatctatcatgtgtcc

SEQ ID NO: 21039 - DNA, 33 bp, Homo sapien
catggctaccaagagacataaagtttacagaga

SEQ ID NO: 21040 - DNA, 33 bp, Homo sapien
catggctaccaagagatataaagtttacagaga

SEQ ID NO: 21041 - DNA, 33 bp, Homo sapien
ctccttccaagaataacggtctcacaggtagtt

SEQ ID NO: 21042 - DNA, 33 bp, Homo sapien
ctccttccaagaataatggtctcacaggtagtt

SEQ ID NO: 21043 - DNA, 33 bp, Homo sapien
ctattcctaagctgaaataaagaaactccctgc

SEQ ID NO: 21044 - DNA, 33 bp, Homo sapien
ctattcctaagctgaagtaaagaaactccctgc

SEQ ID NO: 21045 - DNA, 33 bp, Homo sapien
agtacctacttcagaggatggttatgcagttaa

SEQ ID NO: 21046 - DNA, 33 bp, Homo sapien
agtacctacttcagagtatggttatgcagttaa

SEQ ID NO: 21047 - DNA, 33 bp, Homo sapien
aggagaccacttaagaatagtcaaggtgggaaa

SEQ ID NO: 21048 - DNA, 33 bp, Homo sapien
aggagaccacttaagagtagtcaaggtgggaaa

SEQ ID NO: 21049 - DNA, 33 bp, Homo sapien
tcagagataaataaaaaggaagttgtaaagcaa

SEQ ID NO: 21050 - DNA, 33 bp, Homo sapien
tcagagataaataaaagggaagttgtaaagcaa

SEQ ID NO: 21051 - DNA, 33 bp, Homo sapien
tttatgtccaattcccacatggctttcaaggcc

SEQ ID NO: 21052 - DNA, 33 bp, Homo sapien
tttatgtccaattcccgcatggctttcaaggcc

SEQ ID NO: 21053 - DNA, 33 bp, Homo sapien
ccattcactttctccccatatatgtgtgtacct

SEQ ID NO: 21054 - DNA, 33 bp, Homo sapien
ccattcactttctccctatatatgtgtgtacct

SEQ ID NO: 21055 - DNA, 33 bp, Homo sapien
catatgagggataagacagtgtaatttctgagt

SEQ ID NO: 21056 - DNA, 33 bp, Homo sapien
catatgagggataagagagtgtaatttctgagt

SEQ ID NO: 21057 - DNA, 33 bp, Homo sapien
gaaaaaatggacatcgaatggtttaatgtaagg

SEQ ID NO: 21058 - DNA, 33 bp, Homo sapien
gaaaaaatggacatcggatggtttaatgtaagg

SEQ ID NO: 21059 - DNA, 33 bp, Homo sapien
ggatccctttttctccaaaccacacatgaaaca

SEQ ID NO: 21060 - DNA, 33 bp, Homo sapien
ggatccctttttctccgaaccacacatgaaaca

SEQ ID NO: 21061 - DNA, 33 bp, Homo sapien
gggagaaaagctaccaacagaccaattccaggt

SEQ ID NO: 21062 - DNA, 33 bp, Homo sapien
gggagaaaagctaccagcagaccaattccaggt

SEQ ID NO: 21063 - DNA, 33 bp, Homo sapien
aaagagcagagaccacaaatttatcctaggtgt

SEQ ID NO: 21064 - DNA, 33 bp, Homo sapien
aaagagcagagaccacgaatttatcctaggtgt

SEQ ID NO: 21065 - DNA, 33 bp, Homo sapien
atgaaaatctgttcacaatgggaaatagtggtc

SEQ ID NO: 21066 - DNA, 33 bp, Homo sapien
atgaaaatctgttcacgatgggaaatagtggtc

SEQ ID NO: 21067 - DNA, 33 bp, Homo sapien
taatgtctttaggaagaaaagagttgtccatgt

SEQ ID NO: 21068 - DNA, 33 bp, Homo sapien
taatgtctttaggaagcaaagagttgtccatgt

SEQ ID NO: 21069 - DNA, 33 bp, Homo sapien
tggttctgactcacccagattccaaaatactga

SEQ ID NO: 21070 - DNA, 33 bp, Homo sapien
tggttctgactcacccggattccaaaatactga

SEQ ID NO: 21071 - DNA, 33 bp, Homo sapien
agcaccatctgtttgcaattgtcctaccatctg

SEQ ID NO: 21072 - DNA, 33 bp, Homo sapien
agcaccatctgtttgcgattgtcctaccatctg

SEQ ID NO: 21073 - DNA, 33 bp, Homo sapien
tactgttaaaaatagccattagagagtagttga

SEQ ID NO: 21074 - DNA, 33 bp, Homo sapien
tactgttaaaaatagcgattagagagtagttga

SEQ ID NO: 21075 - DNA, 33 bp, Homo sapien
gtcctttcatttatgtaaacctcattctttgag

SEQ ID NO: 21076 - DNA, 33 bp, Homo sapien
gtcctttcatttatgtgaacctcattctttgag

SEQ ID NO: 21077 - DNA, 33 bp, Homo sapien
tttcacttcactgggaaaattccaaatgcaaca

SEQ ID NO: 21078 - DNA, 33 bp, Homo sapien
tttcacttcactgggacaattccaaatgcaaca

SEQ ID NO: 21079 - DNA, 33 bp, Homo sapien
taaatagtgaagaggcaatgagaaaggcatttc

SEQ ID NO: 21080 - DNA, 33 bp, Homo sapien
taaatagtgaagaggccatgagaaaggcatttc

SEQ ID NO: 21081 - DNA, 33 bp, Homo sapien
gagtgcaattaagttgaaaaagactggttttgc

SEQ ID NO: 21082 - DNA, 33 bp, Homo sapien
gagtgcaattaagttggaaaagactggttttgc

SEQ ID NO: 21083 - DNA, 33 bp, Homo sapien
taataatcgtgaataacgtggaattgctgtgat

SEQ ID NO: 21084 - DNA, 33 bp, Homo sapien
taataatcgtgaataatgtggaattgctgtgat

SEQ ID NO: 21085 - DNA, 33 bp, Homo sapien
tgtgacagtgcaatgacggcagtaactctgaac

SEQ ID NO: 21086 - DNA, 33 bp, Homo sapien
tgtgacagtgcaatgatggcagtaactctgaac

SEQ ID NO: 21087 - DNA, 33 bp, Homo sapien
caaatgttgaagaatacggattgtgtaaaaggg

SEQ ID NO: 21088 - DNA, 33 bp, Homo sapien
caaatgttgaagaatatggattgtgtaaaaggg

SEQ ID NO: 21089 - DNA, 33 bp, Homo sapien
gtctcaaagaggccaactgaatcacccaagagt

SEQ ID NO: 21090 - DNA, 33 bp, Homo sapien
gtctcaaagaggccaattgaatcacccaagagt

SEQ ID NO: 21091 - DNA, 33 bp, Homo sapien
agagtaaaacacttaactctaatgccatagctc

SEQ ID NO: 21092 - DNA, 33 bp, Homo sapien
agagtaaaacacttaattctaatgccatagctc

SEQ ID NO: 21093 - DNA, 33 bp, Homo sapien
aagaaatgattgtgtacgggtgcagagctcatc

SEQ ID NO: 21094 - DNA, 33 bp, Homo sapien
aagaaatgattgtgtatgggtgcagagctcatc

SEQ ID NO: 21095 - DNA, 33 bp, Homo sapien
acgaactcactcctgagataatgacattaatgc

SEQ ID NO: 21096 - DNA, 33 bp, Homo sapien
acgaactcactcctgatataatgacattaatgc

SEQ ID NO: 21097 - DNA, 33 bp, Homo sapien
attcatatgggttgcactaataaatcaatattg

SEQ ID NO: 21098 - DNA, 33 bp, Homo sapien
attcatatgggttgcagtaataaatcaatattg

SEQ ID NO: 21099 - DNA, 33 bp, Homo sapien
gagccagaggaaaataacctgaaataggaagaa

SEQ ID NO: 21100 - DNA, 33 bp, Homo sapien
gagccagaggaaaataccctgaaataggaagaa

SEQ ID NO: 21101 - DNA, 33 bp, Homo sapien
gctccctgaatttagtaacacttggactactct

SEQ ID NO: 21102 - DNA, 33 bp, Homo sapien
gctccctgaatttagtgacacttggactactct

SEQ ID NO: 21103 - DNA, 33 bp, Homo sapien
gaatgccatgcacataagataaggactggtctc

SEQ ID NO: 21104 - DNA, 33 bp, Homo sapien
gaatgccatgcacataggataaggactggtctc

SEQ ID NO: 21105 - DNA, 33 bp, Homo sapien
caaaagcacaccaatcagaactctttctagatc

SEQ ID NO: 21106 - DNA, 33 bp, Homo sapien
caaaagcacaccaatcggaactctttctagatc

SEQ ID NO: 21107 - DNA, 33 bp, Homo sapien
cctggatgacactaaactcttcacggcaccccc

SEQ ID NO: 21108 - DNA, 33 bp, Homo sapien
cctggatgacactaaagtcttcacggcaccccc

SEQ ID NO: 21109 - DNA, 33 bp, Homo sapien
aaaactgtaggccaaacaattaaatatattagt

SEQ ID NO: 21110 - DNA, 33 bp, Homo sapien
aaaactgtaggccaaagaattaaatatattagt

SEQ ID NO: 21111 - DNA, 33 bp, Homo sapien
tcctattatagtacaacaattggtattttttta

SEQ ID NO: 21112 - DNA, 33 bp, Homo sapien
tcctattatagtacaagaattggtattttttta

SEQ ID NO: 21113 - DNA, 33 bp, Homo sapien
gatctatttttcagacacgagggaacttctgct

SEQ ID NO: 21114 - DNA, 33 bp, Homo sapien
gatctatttttcagacccgagggaacttctgct

SEQ ID NO: 21115 - DNA, 33 bp, Homo sapien
gttaaattacttcttcaaggtcacttagcagaa

SEQ ID NO: 21116 - DNA, 33 bp, Homo sapien
gttaaattacttcttcgaggtcacttagcagaa

SEQ ID NO: 21117 - DNA, 33 bp, Homo sapien
gagaggcaaatactgacgttaaactgagatgta

SEQ ID NO: 21118 - DNA, 33 bp, Homo sapien
gagaggcaaatactgatgttaaactgagatgta

SEQ ID NO: 21119 - DNA, 33 bp, Homo sapien
gagttagactcctaaaactacggactaattgcc

SEQ ID NO: 21120 - DNA, 33 bp, Homo sapien
gagttagactcctaaagctacggactaattgcc

SEQ ID NO: 21121 - DNA, 33 bp, Homo sapien
gtggattgtaccaatgccaactacctggtttct

SEQ ID NO: 21122 - DNA, 33 bp, Homo sapien
gtggattgtaccaatggcaactacctggtttct

SEQ ID NO: 21123 - DNA, 33 bp, Homo sapien
ataaaatagaatgaagaatagtagctgtcttgc

SEQ ID NO: 21124 - DNA, 33 bp, Homo sapien
ataaaatagaatgaaggatagtagctgtcttgc

SEQ ID NO: 21125 - DNA, 33 bp, Homo sapien
acatattgtatactaccaagtgctatctagata

SEQ ID NO: 21126 - DNA, 33 bp, Homo sapien
acatattgtatactacgaagtgctatctagata

SEQ ID NO: 21127 - DNA, 33 bp, Homo sapien
gttctactctttccaccactgcctttgactgta

SEQ ID NO: 21128 - DNA, 33 bp, Homo sapien
gttctactctttccactactgcctttgactgta

SEQ ID NO: 21129 - DNA, 33 bp, Homo sapien
attcttgtttctattacactttctgagcttcag

SEQ ID NO: 21130 - DNA, 33 bp, Homo sapien
attcttgtttctattatactttctgagcttcag

SEQ ID NO: 21131 - DNA, 33 bp, Homo sapien
ctagattaaatgagaaatatatggatgtgattt

SEQ ID NO: 21132 - DNA, 33 bp, Homo sapien
ctagattaaatgagaactatatggatgtgattt

SEQ ID NO: 21133 - DNA, 33 bp, Homo sapien
caggtttacttttctacggctattaaccacgaa

SEQ ID NO: 21134 - DNA, 33 bp, Homo sapien
caggtttacttttctatggctattaaccacgaa

SEQ ID NO: 21135 - DNA, 33 bp, Homo sapien
ttgattttttcaaaaaatggttgttggtatgtc

SEQ ID NO: 21136 - DNA, 33 bp, Homo sapien
ttgattttttcaaaaattggttgttggtatgtc

SEQ ID NO: 21137 - DNA, 33 bp, Homo sapien
gaaaaattgaactgccccatgcagaagaataaa

SEQ ID NO: 21138 - DNA, 33 bp, Homo sapien
gaaaaattgaactgcctcatgcagaagaataaa

SEQ ID NO: 21139 - DNA, 33 bp, Homo sapien
tatacgtagtggagaactggaaaaagaaaaggt

SEQ ID NO: 21140 - DNA, 33 bp, Homo sapien
tatacgtagtggagaattggaaaaagaaaaggt

SEQ ID NO: 21141 - DNA, 33 bp, Homo sapien
tttaaacaaaattatgaaaactagttatgttat

SEQ ID NO: 21142 - DNA, 33 bp, Homo sapien
tttaaacaaaattatggaaactagttatgttat

SEQ ID NO: 21143 - DNA, 33 bp, Homo sapien
aaagcaaaatacgacaaaatagaacacagaaaa

SEQ ID NO: 21144 - DNA, 33 bp, Homo sapien
aaagcaaaatacgacagaatagaacacagaaaa

SEQ ID NO: 21145 - DNA, 33 bp, Homo sapien
gaaagaaaatgtccaacgtttcacaccattaga

SEQ ID NO: 21146 - DNA, 33 bp, Homo sapien
gaaagaaaatgtccaatgtttcacaccattaga

SEQ ID NO: 21147 - DNA, 33 bp, Homo sapien
tgcctgcatttttcaacaaggaaacaaaggcat

SEQ ID NO: 21148 - DNA, 33 bp, Homo sapien
tgcctgcatttttcaagaaggaaacaaaggcat

SEQ ID NO: 21149 - DNA, 33 bp, Homo sapien
tatcgcattttagacaaacaaaactaattggcg

SEQ ID NO: 21150 - DNA, 33 bp, Homo sapien
tatcgcattttagacacacaaaactaattggcg

SEQ ID NO: 21151 - DNA, 33 bp, Homo sapien
aatggagaatggtaaaaggttcagtgtgcacct

SEQ ID NO: 21152 - DNA, 33 bp, Homo sapien
aatggagaatggtaaagggttcagtgtgcacct

SEQ ID NO: 21153 - DNA, 33 bp, Homo sapien
gactttaaagtacaagaccgaaatgaagagaca

SEQ ID NO: 21154 - DNA, 33 bp, Homo sapien
gactttaaagtacaaggccgaaatgaagagaca

SEQ ID NO: 21155 - DNA, 33 bp, Homo sapien
tgattactcactgtgaacaaaatataaattggt

SEQ ID NO: 21156 - DNA, 33 bp, Homo sapien
tgattactcactgtgaccaaaatataaattggt

SEQ ID NO: 21157 - DNA, 33 bp, Homo sapien
cctccagcaatttatcacttatagttcaggttt

SEQ ID NO: 21158 - DNA, 33 bp, Homo sapien
cctccagcaatttatcccttatagttcaggttt

SEQ ID NO: 21159 - DNA, 33 bp, Homo sapien
ctacttgacttcaaaacatactataaattatag

SEQ ID NO: 21160 - DNA, 33 bp, Homo sapien
ctacttgacttcaaaagatactataaattatag

SEQ ID NO: 21161 - DNA, 33 bp, Homo sapien
aattccagaattatggaaaggcagaaataaaag

SEQ ID NO: 21162 - DNA, 33 bp, Homo sapien
aattccagaattatggcaaggcagaaataaaag

SEQ ID NO: 21163 - DNA, 33 bp, Homo sapien
gaaggtgtggggttaacatttggctgtgtttcc

SEQ ID NO: 21164 - DNA, 33 bp, Homo sapien
gaaggtgtggggttaatatttggctgtgtttcc

SEQ ID NO: 21165 - DNA, 33 bp, Homo sapien
aaacaaaggccaagtaaggaacctagattttca

SEQ ID NO: 21166 - DNA, 33 bp, Homo sapien
aaacaaaggccaagtagggaacctagattttca

SEQ ID NO: 21167 - DNA, 33 bp, Homo sapien
attccagactggaaaccgaagaagctagaaagc

SEQ ID NO: 21168 - DNA, 33 bp, Homo sapien
attccagactggaaactgaagaagctagaaagc

SEQ ID NO: 21169 - DNA, 33 bp, Homo sapien
tatatgatgccaaaaaaaaactcaaggaactca

SEQ ID NO: 21170 - DNA, 33 bp, Homo sapien
tatatgatgccaaaaacaaactcaaggaactca

SEQ ID NO: 21171 - DNA, 33 bp, Homo sapien
atttataaattaaatcgcatactgccaataaaa

SEQ ID NO: 21172 - DNA, 33 bp, Homo sapien
atttataaattaaatctcatactgccaataaaa

SEQ ID NO: 21173 - DNA, 33 bp, Homo sapien
atctcatcaagctaaaacaaatgaccaaacaaa

SEQ ID NO: 21174 - DNA, 33 bp, Homo sapien
atctcatcaagctaaaccaaatgaccaaacaaa

SEQ ID NO: 21175 - DNA, 33 bp, Homo sapien
atgtttttaaactcaagatcccaggctttagtt

SEQ ID NO: 21176 - DNA, 33 bp, Homo sapien
atgtttttaaactcaatatcccaggctttagtt

SEQ ID NO: 21177 - DNA, 33 bp, Homo sapien
ggctgctggtggtcaagctggactaggtagaga

SEQ ID NO: 21178 - DNA, 33 bp, Homo sapien
ggctgctggtggtcaatctggactaggtagaga

SEQ ID NO: 21179 - DNA, 33 bp, Homo sapien
agtttacaatgtacaaacctgacacaacttctt

SEQ ID NO: 21180 - DNA, 33 bp, Homo sapien
agtttacaatgtacaagcctgacacaacttctt

SEQ ID NO: 21181 - DNA, 33 bp, Homo sapien
gtaatgtgtctgtttacaccttctgcccatttt

SEQ ID NO: 21182 - DNA, 33 bp, Homo sapien
gtaatgtgtctgtttagaccttctgcccatttt

SEQ ID NO: 21183 - DNA, 33 bp, Homo sapien
aatagaagctctctaacggtcagtcatatcaaa

SEQ ID NO: 21184 - DNA, 33 bp, Homo sapien
aatagaagctctctaatggtcagtcatatcaaa

SEQ ID NO: 21185 - DNA, 33 bp, Homo sapien
atgtttagagaaaagtaaagaacatctcatgtg

SEQ ID NO: 21186 - DNA, 33 bp, Homo sapien
atgtttagagaaaagtgaagaacatctcatgtg

SEQ ID NO: 21187 - DNA, 33 bp, Homo sapien
caatgtagagcctcaaagataatgtaaaattag

SEQ ID NO: 21188 - DNA, 33 bp, Homo sapien
caatgtagagcctcaaggataatgtaaaattag

SEQ ID NO: 21189 - DNA, 33 bp, Homo sapien
ctgatctgaaaaagtacgttcccaaagggcagt

SEQ ID NO: 21190 - DNA, 33 bp, Homo sapien
ctgatctgaaaaagtatgttcccaaagggcagt

SEQ ID NO: 21191 - DNA, 33 bp, Homo sapien
tcacctaattttccaaacgatgtaccgtgcttt

SEQ ID NO: 21192 - DNA, 33 bp, Homo sapien
tcacctaattttccaagcgatgtaccgtgcttt

SEQ ID NO: 21193 - DNA, 33 bp, Homo sapien
atcaaaagatttttcacgggcctggaagaatag

SEQ ID NO: 21194 - DNA, 33 bp, Homo sapien
atcaaaagatttttcatgggcctggaagaatag

SEQ ID NO: 21195 - DNA, 33 bp, Homo sapien
atgtaggttaaaataactcattagacttttgtt

SEQ ID NO: 21196 - DNA, 33 bp, Homo sapien
atgtaggttaaaataattcattagacttttgtt

SEQ ID NO: 21197 - DNA, 33 bp, Homo sapien
gctggcgccaatggtgaatctttttgactcctt

SEQ ID NO: 21198 - DNA, 33 bp, Homo sapien
gctggcgccaatggtgtatctttttgactcctt

SEQ ID NO: 21199 - DNA, 33 bp, Homo sapien
attttaatgataaaacactcacttttttacagc

SEQ ID NO: 21200 - DNA, 33 bp, Homo sapien
attttaatgataaaactctcacttttttacagc

SEQ ID NO: 21201 - DNA, 33 bp, Homo sapien
agataaagctgtaatgcagaaaatggtttggcc

SEQ ID NO: 21202 - DNA, 33 bp, Homo sapien
agataaagctgtaatggagaaaatggtttggcc

SEQ ID NO: 21203 - DNA, 33 bp, Homo sapien
accaggtgcttatctcagagagaagttataatg

SEQ ID NO: 21204 - DNA, 33 bp, Homo sapien
accaggtgcttatctcggagagaagttataatg

SEQ ID NO: 21205 - DNA, 33 bp, Homo sapien
ttgtcacagggccatgaacgcgtctgctttctc

SEQ ID NO: 21206 - DNA, 33 bp, Homo sapien
ttgtcacagggccatgcacgcgtctgctttctc

SEQ ID NO: 21207 - DNA, 33 bp, Homo sapien
atttggtatagcgcaaaccacgggtatagtggt

SEQ ID NO: 21208 - DNA, 33 bp, Homo sapien
atttggtatagcgcaagccacgggtatagtggt

SEQ ID NO: 21209 - DNA, 33 bp, Homo sapien
tgaaacccagcagtaaagtcattaaatctcaaa

SEQ ID NO: 21210 - DNA, 33 bp, Homo sapien
tgaaacccagcagtaaggtcattaaatctcaaa

SEQ ID NO: 21211 - DNA, 33 bp, Homo sapien
ttttgctctgagtttacgtgagacctggtcgtt

SEQ ID NO: 21212 - DNA, 33 bp, Homo sapien
ttttgctctgagtttatgtgagacctggtcgtt

SEQ ID NO: 21213 - DNA, 33 bp, Homo sapien
aggctgtgctgaccaaaacgaaagacagccaat

SEQ ID NO: 21214 - DNA, 33 bp, Homo sapien
aggctgtgctgaccaagacgaaagacagccaat

SEQ ID NO: 21215 - DNA, 33 bp, Homo sapien
gtggctggactggagaaaatgaaatggagatga

SEQ ID NO: 21216 - DNA, 33 bp, Homo sapien
gtggctggactggagagaatgaaatggagatga

SEQ ID NO: 21217 - DNA, 33 bp, Homo sapien
tatccctttctacaccaacatttactcccttgc

SEQ ID NO: 21218 - DNA, 33 bp, Homo sapien
tatccctttctacacccacatttactcccttgc

SEQ ID NO: 21219 - DNA, 33 bp, Homo sapien
tttcaaagaactgcaacgtcctatccctttcta

SEQ ID NO: 21220 - DNA, 33 bp, Homo sapien
tttcaaagaactgcaatgtcctatccctttcta

SEQ ID NO: 21221 - DNA, 33 bp, Homo sapien
atttgtagggggtaagaagaagtaattgattca

SEQ ID NO: 21222 - DNA, 33 bp, Homo sapien
atttgtagggggtaaggagaagtaattgattca

SEQ ID NO: 21223 - DNA, 33 bp, Homo sapien
cctaacgcttgctagccccttctcaaatcttgc

SEQ ID NO: 21224 - DNA, 33 bp, Homo sapien
cctaacgcttgctagcgccttctcaaatcttgc

SEQ ID NO: 21225 - DNA, 33 bp, Homo sapien
cacatcagtcttatgaagatcttattgataccc

SEQ ID NO: 21226 - DNA, 33 bp, Homo sapien
cacatcagtcttatgaggatcttattgataccc

SEQ ID NO: 21227 - DNA, 33 bp, Homo sapien
ttatgttgtgggagggaagtttgcttaggtagt

SEQ ID NO: 21228 - DNA, 33 bp, Homo sapien
ttatgttgtgggagggcagtttgcttaggtagt

SEQ ID NO: 21229 - DNA, 33 bp, Homo sapien
gtttctaatctttaaaactccaacttcagcatt

SEQ ID NO: 21230 - DNA, 33 bp, Homo sapien
gtttctaatctttaaagctccaacttcagcatt

SEQ ID NO: 21231 - DNA, 33 bp, Homo sapien
tgaaaaagataaatcactattgttggtacttgg

SEQ ID NO: 21232 - DNA, 33 bp, Homo sapien
tgaaaaagataaatcagtattgttggtacttgg

SEQ ID NO: 21233 - DNA, 33 bp, Homo sapien
cccatattcttaccaacctttcagaaacgtcat

SEQ ID NO: 21234 - DNA, 33 bp, Homo sapien
cccatattcttaccaatctttcagaaacgtcat

SEQ ID NO: 21235 - DNA, 33 bp, Homo sapien
cacagaattatcacaccgtataaaagtaatcac

SEQ ID NO: 21236 - DNA, 33 bp, Homo sapien
cacagaattatcacactgtataaaagtaatcac

SEQ ID NO: 21237 - DNA, 33 bp, Homo sapien
gtatagaaaagtatccccaaaataacaaaatat

SEQ ID NO: 21238 - DNA, 33 bp, Homo sapien
gtatagaaaagtatcctcaaaataacaaaatat

SEQ ID NO: 21239 - DNA, 33 bp, Homo sapien
atattggttcttaggaccataggtaaaaacttt

SEQ ID NO: 21240 - DNA, 33 bp, Homo sapien
atattggttcttaggatcataggtaaaaacttt

SEQ ID NO: 21241 - DNA, 33 bp, Homo sapien
tgagaataggcacttacgatatataatgagtgg

SEQ ID NO: 21242 - DNA, 33 bp, Homo sapien
tgagaataggcacttaggatatataatgagtgg

SEQ ID NO: 21243 - DNA, 33 bp, Homo sapien
atgagataggagtgcaataaagacagttgcccc

SEQ ID NO: 21244 - DNA, 33 bp, Homo sapien
atgagataggagtgcagtaaagacagttgcccc

SEQ ID NO: 21245 - DNA, 33 bp, Homo sapien
gagtagaatgactacacctaacatcaatgaatc

SEQ ID NO: 21246 - DNA, 33 bp, Homo sapien
gagtagaatgactacagctaacatcaatgaatc

SEQ ID NO: 21247 - DNA, 33 bp, Homo sapien
tttctctttaaaaaaaagtccatgctcagaatc

SEQ ID NO: 21248 - DNA, 33 bp, Homo sapien
tttctctttaaaaaaaggtccatgctcagaatc

SEQ ID NO: 21249 - DNA, 33 bp, Homo sapien
aacccaggaagcacaactgaaggtataaagaac

SEQ ID NO: 21250 - DNA, 33 bp, Homo sapien
aacccaggaagcacaattgaaggtataaagaac

SEQ ID NO: 21251 - DNA, 33 bp, Homo sapien
cttatatttaaataccaaggcaccaattttgag

SEQ ID NO: 21252 - DNA, 33 bp, Homo sapien
cttatatttaaatacccaggcaccaattttgag

SEQ ID NO: 21253 - DNA, 33 bp, Homo sapien
ttgtagaaaatgacaaaaaatgagagttgaatt

SEQ ID NO: 21254 - DNA, 33 bp, Homo sapien
ttgtagaaaatgacaagaaatgagagttgaatt

SEQ ID NO: 21255 - DNA, 33 bp, Homo sapien
tcacatatgtaagctcactgtgtaaattacaga

SEQ ID NO: 21256 - DNA, 33 bp, Homo sapien
tcacatatgtaagctcgctgtgtaaattacaga

SEQ ID NO: 21257 - DNA, 33 bp, Homo sapien
agatgctgttttcaaacgaatgttaactgttac

SEQ ID NO: 21258 - DNA, 33 bp, Homo sapien
agatgctgttttcaaatgaatgttaactgttac

SEQ ID NO: 21259 - DNA, 33 bp, Homo sapien
tgggtttaacataatcacaatagttcacataaa

SEQ ID NO: 21260 - DNA, 33 bp, Homo sapien
tgggtttaacataatcgcaatagttcacataaa

SEQ ID NO: 21261 - DNA, 33 bp, Homo sapien
gaagtattctgtattagctttgcagtatgaata

SEQ ID NO: 21262 - DNA, 33 bp, Homo sapien
gaagtattctgtattatctttgcagtatgaata

SEQ ID NO: 21263 - DNA, 33 bp, Homo sapien
tttaaagagaagaaaaacaatacaggtggatac

SEQ ID NO: 21264 - DNA, 33 bp, Homo sapien
tttaaagagaagaaaaccaatacaggtggatac

SEQ ID NO: 21265 - DNA, 33 bp, Homo sapien
tgtggacactctggcaatcatctagccacctcc

SEQ ID NO: 21266 - DNA, 33 bp, Homo sapien
tgtggacactctggcagtcatctagccacctcc

SEQ ID NO: 21267 - DNA, 33 bp, Homo sapien
ggacacatttgctagaatatgagatctccaaag

SEQ ID NO: 21268 - DNA, 33 bp, Homo sapien
ggacacatttgctagattatgagatctccaaag

SEQ ID NO: 21269 - DNA, 33 bp, Homo sapien
gcataatagctattacactttctaaacaagtat

SEQ ID NO: 21270 - DNA, 33 bp, Homo sapien
gcataatagctattacgctttctaaacaagtat

SEQ ID NO: 21271 - DNA, 33 bp, Homo sapien
actacacaacatagatcaattttcctttcattt

SEQ ID NO: 21272 - DNA, 33 bp, Homo sapien
actacacaacatagatgaattttcctttcattt

SEQ ID NO: 21273 - DNA, 33 bp, Homo sapien
aattgttgtcatactgcatctgcaatttaaatt

SEQ ID NO: 21274 - DNA, 33 bp, Homo sapien
aattgttgtcatactgtatctgcaatttaaatt

SEQ ID NO: 21275 - DNA, 33 bp, Homo sapien
gagaggctcagaaaagcaatgttgaattctttg

SEQ ID NO: 21276 - DNA, 33 bp, Homo sapien
gagaggctcagaaaagtaatgttgaattctttg

SEQ ID NO: 21277 - DNA, 33 bp, Homo sapien
tgttctgcaaactacacgggctgatgattgcct

SEQ ID NO: 21278 - DNA, 33 bp, Homo sapien
tgttctgcaaactacatgggctgatgattgcct

SEQ ID NO: 21279 - DNA, 33 bp, Homo sapien
tatcccataaagcctaaaatatttactctctga

SEQ ID NO: 21280 - DNA, 33 bp, Homo sapien
tatcccataaagcctagaatatttactctctga

SEQ ID NO: 21281 - DNA, 33 bp, Homo sapien
catatctaataaggaacagaggcagacataatg

SEQ ID NO: 21282 - DNA, 33 bp, Homo sapien
catatctaataaggaagagaggcagacataatg

SEQ ID NO: 21283 - DNA, 33 bp, Homo sapien
ttctagcttttagtgaaagagcatcctcagttc

SEQ ID NO: 21284 - DNA, 33 bp, Homo sapien
ttctagcttttagtgagagagcatcctcagttc

SEQ ID NO: 21285 - DNA, 33 bp, Homo sapien
aatatggcaaaagtgaaggaatggcactcttga

SEQ ID NO: 21286 - DNA, 33 bp, Homo sapien
aatatggcaaaagtgatggaatggcactcttga

SEQ ID NO: 21287 - DNA, 33 bp, Homo sapien
agtttgcttcattgaaattcaagctggggtgcc

SEQ ID NO: 21288 - DNA, 33 bp, Homo sapien
agtttgcttcattgaagttcaagctggggtgcc

SEQ ID NO: 21289 - DNA, 33 bp, Homo sapien
tgtgtggtgtctgttacagaagagagtccagct

SEQ ID NO: 21290 - DNA, 33 bp, Homo sapien
tgtgtggtgtctgttatagaagagagtccagct

SEQ ID NO: 21291 - DNA, 33 bp, Homo sapien
gtctttgaaagaaaaacgaggcttaaatccatt

SEQ ID NO: 21292 - DNA, 33 bp, Homo sapien
gtctttgaaagaaaaatgaggcttaaatccatt

SEQ ID NO: 21293 - DNA, 33 bp, Homo sapien
aggagcttggcataccaggatataagcagggtt

SEQ ID NO: 21294 - DNA, 33 bp, Homo sapien
aggagcttggcataccgggatataagcagggtt

SEQ ID NO: 21295 - DNA, 33 bp, Homo sapien
gccagttccgccactccgagaccttggacaaat

SEQ ID NO: 21296 - DNA, 33 bp, Homo sapien
gccagttccgccactctgagaccttggacaaat

SEQ ID NO: 21297 - DNA, 33 bp, Homo sapien
atctgtgagagagacactattatcgccatgttg

SEQ ID NO: 21298 - DNA, 33 bp, Homo sapien
atctgtgagagagacattattatcgccatgttg

SEQ ID NO: 21299 - DNA, 33 bp, Homo sapien
aggtggagtaccatgacaacttggcccttgcca

SEQ ID NO: 21300 - DNA, 33 bp, Homo sapien
aggtggagtaccatgagaacttggcccttgcca

SEQ ID NO: 21301 - DNA, 33 bp, Homo sapien
cattcacaatttggaacaaaatattcagtgtgg

SEQ ID NO: 21302 - DNA, 33 bp, Homo sapien
cattcacaatttggaagaaaatattcagtgtgg

SEQ ID NO: 21303 - DNA, 33 bp, Homo sapien
gtttataggatcaaatcaggtaatgttggtaaa

SEQ ID NO: 21304 - DNA, 33 bp, Homo sapien
gtttataggatcaaatgaggtaatgttggtaaa

SEQ ID NO: 21305 - DNA, 33 bp, Homo sapien
tcaggaacaagtgcacacaaactcacaaataat

SEQ ID NO: 21306 - DNA, 33 bp, Homo sapien
tcaggaacaagtgcacgcaaactcacaaataat

SEQ ID NO: 21307 - DNA, 33 bp, Homo sapien
ttaagaggatgaaaccaatatcctgactaaggg

SEQ ID NO: 21308 - DNA, 33 bp, Homo sapien
ttaagaggatgaaaccgatatcctgactaaggg

SEQ ID NO: 21309 - DNA, 33 bp, Homo sapien
tcttactaaaaatttaaggttgactacagggat

SEQ ID NO: 21310 - DNA, 33 bp, Homo sapien
tcttactaaaaatttagggttgactacagggat

SEQ ID NO: 21311 - DNA, 33 bp, Homo sapien
gaaatttggttgttcaatattatcttaatctgt

SEQ ID NO: 21312 - DNA, 33 bp, Homo sapien
gaaatttggttgttcagtattatcttaatctgt

SEQ ID NO: 21313 - DNA, 33 bp, Homo sapien
gctccctacagtctccagcatcagtctgttctc

SEQ ID NO: 21314 - DNA, 33 bp, Homo sapien
gctccctacagtctccggcatcagtctgttctc

SEQ ID NO: 21315 - DNA, 33 bp, Homo sapien
gctgtaaatcaaggcaactgtgacatcatggtg

SEQ ID NO: 21316 - DNA, 33 bp, Homo sapien
gctgtaaatcaaggcacctgtgacatcatggtg

SEQ ID NO: 21317 - DNA, 33 bp, Homo sapien
atgaataactgaagaaagagaggagcttaaaaa

SEQ ID NO: 21318 - DNA, 33 bp, Homo sapien
atgaataactgaagaaggagaggagcttaaaaa

SEQ ID NO: 21319 - DNA, 33 bp, Homo sapien
tctccaattccatccacgtgcttgcagaatctc

SEQ ID NO: 21320 - DNA, 33 bp, Homo sapien
tctccaattccatccatgtgcttgcagaatctc

SEQ ID NO: 21321 - DNA, 33 bp, Homo sapien
tgttagcttgtgcaaaacccagccctttggaag

SEQ ID NO: 21322 - DNA, 33 bp, Homo sapien
tgttagcttgtgcaaatcccagccctttggaag

SEQ ID NO: 21323 - DNA, 33 bp, Homo sapien
attttctttctgcacacctctgtctgtttttca

SEQ ID NO: 21324 - DNA, 33 bp, Homo sapien
attttctttctgcacatctctgtctgtttttca

SEQ ID NO: 21325 - DNA, 33 bp, Homo sapien
tcaaacccaaagagtacgaacagagaatgcagc

SEQ ID NO: 21326 - DNA, 33 bp, Homo sapien
tcaaacccaaagagtatgaacagagaatgcagc

SEQ ID NO: 21327 - DNA, 33 bp, Homo sapien
ctagtattgatcttaaaaaatcaacaaagtcca

SEQ ID NO: 21328 - DNA, 33 bp, Homo sapien
ctagtattgatcttaagaaatcaacaaagtcca

SEQ ID NO: 21329 - DNA, 33 bp, Homo sapien
gtttccaatacattgcactgtcttccttcagat

SEQ ID NO: 21330 - DNA, 33 bp, Homo sapien
gtttccaatacattgcgctgtcttccttcagat

SEQ ID NO: 21331 - DNA, 33 bp, Homo sapien
gtgtcatcccagcatactaaagaaactctgaat

SEQ ID NO: 21332 - DNA, 33 bp, Homo sapien
gtgtcatcccagcatattaaagaaactctgaat

SEQ ID NO: 21333 - DNA, 33 bp, Homo sapien
tccttagtctttgatacatggagtggtggtgat

SEQ ID NO: 21334 - DNA, 33 bp, Homo sapien
tccttagtctttgatatatggagtggtggtgat

SEQ ID NO: 21335 - DNA, 33 bp, Homo sapien
cttataaaccatagcccgaatagaagtatgtgt

SEQ ID NO: 21336 - DNA, 33 bp, Homo sapien
cttataaaccatagcctgaatagaagtatgtgt

SEQ ID NO: 21337 - DNA, 33 bp, Homo sapien
aaattatagtgacctacgagattcaaaagtgta

SEQ ID NO: 21338 - DNA, 33 bp, Homo sapien
aaattatagtgacctatgagattcaaaagtgta

SEQ ID NO: 21339 - DNA, 33 bp, Homo sapien
aatgaggtgtttatcacgaatctgttcacctat

SEQ ID NO: 21340 - DNA, 33 bp, Homo sapien
aatgaggtgtttatcaggaatctgttcacctat

SEQ ID NO: 21341 - DNA, 33 bp, Homo sapien
ctaccatagttatcaaagggatgtttcaaataa

SEQ ID NO: 21342 - DNA, 33 bp, Homo sapien
ctaccatagttatcaacgggatgtttcaaataa

SEQ ID NO: 21343 - DNA, 33 bp, Homo sapien
aagtattttataggaactatgtcacaacaaagt

SEQ ID NO: 21344 - DNA, 33 bp, Homo sapien
aagtattttataggaattatgtcacaacaaagt

SEQ ID NO: 21345 - DNA, 33 bp, Homo sapien
ttttcagatgagaaaaatttagcagtgagagta

SEQ ID NO: 21346 - DNA, 33 bp, Homo sapien
ttttcagatgagaaaactttagcagtgagagta

SEQ ID NO: 21347 - DNA, 33 bp, Homo sapien
agtctcatggtcccagcaagatttgagaaaaag

SEQ ID NO: 21348 - DNA, 33 bp, Homo sapien
agtctcatggtcccaggaagatttgagaaaaag

SEQ ID NO: 21349 - DNA, 33 bp, Homo sapien
gtggaaacattgactacatggtctttaaggtct

SEQ ID NO: 21350 - DNA, 33 bp, Homo sapien
gtggaaacattgactatatggtctttaaggtct

SEQ ID NO: 21351 - DNA, 33 bp, Homo sapien
cttaacacgcatacataatactgaaaagtggaa

SEQ ID NO: 21352 - DNA, 33 bp, Homo sapien
cttaacacgcatacatcatactgaaaagtggaa

SEQ ID NO: 21353 - DNA, 33 bp, Homo sapien
gatactgctgaaagtaactaagaatgttctgta

SEQ ID NO: 21354 - DNA, 33 bp, Homo sapien
gatactgctgaaagtagctaagaatgttctgta

SEQ ID NO: 21355 - DNA, 33 bp, Homo sapien
gagtcaaagtacttcacctatcaaatagaacta

SEQ ID NO: 21356 - DNA, 33 bp, Homo sapien
gagtcaaagtacttcatctatcaaatagaacta

SEQ ID NO: 21357 - DNA, 33 bp, Homo sapien
cctgaatgttcatctaaggcaatgttttgagta

SEQ ID NO: 21358 - DNA, 33 bp, Homo sapien
cctgaatgttcatctagggcaatgttttgagta

SEQ ID NO: 21359 - DNA, 33 bp, Homo sapien
gttctgtgagctgcccaataccatctaataaat

SEQ ID NO: 21360 - DNA, 33 bp, Homo sapien
gttctgtgagctgcccgataccatctaataaat

SEQ ID NO: 21361 - DNA, 33 bp, Homo sapien
tgatgtcgatgttcacaagaatttgagaattac

SEQ ID NO: 21362 - DNA, 33 bp, Homo sapien
tgatgtcgatgttcaccagaatttgagaattac

SEQ ID NO: 21363 - DNA, 33 bp, Homo sapien
aaataaatacaaaacaagtgcccaagtactgga

SEQ ID NO: 21364 - DNA, 33 bp, Homo sapien
aaataaatacaaaacaggtgcccaagtactgga

SEQ ID NO: 21365 - DNA, 33 bp, Homo sapien
ctgggaaaatcacccacctctggaattaccatg

SEQ ID NO: 21366 - DNA, 33 bp, Homo sapien
ctgggaaaatcacccatctctggaattaccatg

SEQ ID NO: 21367 - DNA, 33 bp, Homo sapien
tgtggtagccagtaacaacatgtagctattgac

SEQ ID NO: 21368 - DNA, 33 bp, Homo sapien
tgtggtagccagtaaccacatgtagctattgac

SEQ ID NO: 21369 - DNA, 33 bp, Homo sapien
cagattgaagagcatgaaatatgcatccaaagt

SEQ ID NO: 21370 - DNA, 33 bp, Homo sapien
cagattgaagagcatgcaatatgcatccaaagt

SEQ ID NO: 21371 - DNA, 33 bp, Homo sapien
aaagacaaaggaccacagaaagagtgttcttgg

SEQ ID NO: 21372 - DNA, 33 bp, Homo sapien
aaagacaaaggaccacggaaagagtgttcttgg

SEQ ID NO: 21373 - DNA, 33 bp, Homo sapien
gcatgggtctattttacatctttcaaagcactt

SEQ ID NO: 21374 - DNA, 33 bp, Homo sapien
gcatgggtctattttatatctttcaaagcactt

SEQ ID NO: 21375 - DNA, 33 bp, Homo sapien
cctgtcagtttataagccgttactggtctgcga

SEQ ID NO: 21376 - DNA, 33 bp, Homo sapien
cctgtcagtttataagtcgttactggtctgcga

SEQ ID NO: 21377 - DNA, 33 bp, Homo sapien
gtaggatattgtttaacgtcacaaagctagagg

SEQ ID NO: 21378 - DNA, 33 bp, Homo sapien
gtaggatattgtttaatgtcacaaagctagagg

SEQ ID NO: 21379 - DNA, 33 bp, Homo sapien
gttctaggtcaatgtaaagttatttgatgctca

SEQ ID NO: 21380 - DNA, 33 bp, Homo sapien
gttctaggtcaatgtagagttatttgatgctca

SEQ ID NO: 21381 - DNA, 33 bp, Homo sapien
tcactattatatgatacgttttgctccttatct

SEQ ID NO: 21382 - DNA, 33 bp, Homo sapien
tcactattatatgatatgttttgctccttatct

SEQ ID NO: 21383 - DNA, 33 bp, Homo sapien
tagaactgaaggagaaacagacagcaatgcaat

SEQ ID NO: 21384 - DNA, 33 bp, Homo sapien
tagaactgaaggagaatcagacagcaatgcaat

SEQ ID NO: 21385 - DNA, 33 bp, Homo sapien
ctctgttacttgggtacgggcacgtggatgtgg

SEQ ID NO: 21386 - DNA, 33 bp, Homo sapien
ctctgttacttgggtatgggcacgtggatgtgg

SEQ ID NO: 21387 - DNA, 33 bp, Homo sapien
ctaatggccaggtgtaagttcctctcctactct

SEQ ID NO: 21388 - DNA, 33 bp, Homo sapien
ctaatggccaggtgtaggttcctctcctactct

SEQ ID NO: 21389 - DNA, 33 bp, Homo sapien
acctgtacccagagaaatcaaatggcctactta

SEQ ID NO: 21390 - DNA, 33 bp, Homo sapien
acctgtacccagagaactcaaatggcctactta

SEQ ID NO: 21391 - DNA, 33 bp, Homo sapien
ttcgtgactcccagtacaggtcaaccagcctta

SEQ ID NO: 21392 - DNA, 33 bp, Homo sapien
ttcgtgactcccagtagaggtcaaccagcctta

SEQ ID NO: 21393 - DNA, 33 bp, Homo sapien
tacccattgctctaaactgaacatttctgcagc

SEQ ID NO: 21394 - DNA, 33 bp, Homo sapien
tacccattgctctaaattgaacatttctgcagc

SEQ ID NO: 21395 - DNA, 33 bp, Homo sapien
catatgttgctattaaatgggtgaataaatgaa

SEQ ID NO: 21396 - DNA, 33 bp, Homo sapien
catatgttgctattaagtgggtgaataaatgaa

SEQ ID NO: 21397 - DNA, 33 bp, Homo sapien
gagaactcattacataacagggactatgtaccc

SEQ ID NO: 21398 - DNA, 33 bp, Homo sapien
gagaactcattacatatcagggactatgtaccc

SEQ ID NO: 21399 - DNA, 33 bp, Homo sapien
cttcgaggcctttatcagaatgcactgcagcaa

SEQ ID NO: 21400 - DNA, 33 bp, Homo sapien
cttcgaggcctttatcggaatgcactgcagcaa

SEQ ID NO: 21401 - DNA, 33 bp, Homo sapien
gagtaacaatggggaaacattagaaagggaatt

SEQ ID NO: 21402 - DNA, 33 bp, Homo sapien
gagtaacaatggggaagcattagaaagggaatt

SEQ ID NO: 21403 - DNA, 33 bp, Homo sapien
acagcgctctcatcaagaaataagcccatcaaa

SEQ ID NO: 21404 - DNA, 33 bp, Homo sapien
acagcgctctcatcaataaataagcccatcaaa

SEQ ID NO: 21405 - DNA, 33 bp, Homo sapien
aaagaaattcattagacagatgagagagtctga

SEQ ID NO: 21406 - DNA, 33 bp, Homo sapien
aaagaaattcattagatagatgagagagtctga

SEQ ID NO: 21407 - DNA, 33 bp, Homo sapien
acatggggccctcagaaccgggagccggcactt

SEQ ID NO: 21408 - DNA, 33 bp, Homo sapien
acatggggccctcagagccgggagccggcactt

SEQ ID NO: 21409 - DNA, 33 bp, Homo sapien
agaacatttttgttccaagaatgatcccatctg

SEQ ID NO: 21410 - DNA, 33 bp, Homo sapien
agaacatttttgttccgagaatgatcccatctg

SEQ ID NO: 21411 - DNA, 33 bp, Homo sapien
acaataaattatcccaaactgtagaaattctgc

SEQ ID NO: 21412 - DNA, 33 bp, Homo sapien
acaataaattatcccacactgtagaaattctgc

SEQ ID NO: 21413 - DNA, 33 bp, Homo sapien
tttttggaatatccacaaccttttgttccctcg

SEQ ID NO: 21414 - DNA, 33 bp, Homo sapien
tttttggaatatccacgaccttttgttccctcg

SEQ ID NO: 21415 - DNA, 33 bp, Homo sapien
cctcatttaatccacacagcctgtagtagtaaa

SEQ ID NO: 21416 - DNA, 33 bp, Homo sapien
cctcatttaatccacagagcctgtagtagtaaa

SEQ ID NO: 21417 - DNA, 33 bp, Homo sapien
atcaaactcctctccaacctcattgtgctatac

SEQ ID NO: 21418 - DNA, 33 bp, Homo sapien
atcaaactcctctccaccctcattgtgctatac

SEQ ID NO: 21419 - DNA, 33 bp, Homo sapien
ctttcccttatgagtgaatcagtttactagatc

SEQ ID NO: 21420 - DNA, 33 bp, Homo sapien
ctttcccttatgagtggatcagtttactagatc

SEQ ID NO: 21421 - DNA, 33 bp, Homo sapien
aacacagaggaatggcacggtattttctataag

SEQ ID NO: 21422 - DNA, 33 bp, Homo sapien
aacacagaggaatggcgcggtattttctataag

SEQ ID NO: 21423 - DNA, 33 bp, Homo sapien
ggcttagttactcagaaggcaaagacaattatg

SEQ ID NO: 21424 - DNA, 33 bp, Homo sapien
ggcttagttactcagagggcaaagacaattatg

SEQ ID NO: 21425 - DNA, 33 bp, Homo sapien
cctcctagaagtctaactggctgtatcataatt

SEQ ID NO: 21426 - DNA, 33 bp, Homo sapien
cctcctagaagtctaagtggctgtatcataatt

SEQ ID NO: 21427 - DNA, 33 bp, Homo sapien
ttttatgaacgtggtaccagcaaagtgagctct

SEQ ID NO: 21428 - DNA, 33 bp, Homo sapien
ttttatgaacgtggtatcagcaaagtgagctct

SEQ ID NO: 21429 - DNA, 33 bp, Homo sapien
ttgtggttgtgaaaaacaataggaaaatgacag

SEQ ID NO: 21430 - DNA, 33 bp, Homo sapien
ttgtggttgtgaaaaataataggaaaatgacag

SEQ ID NO: 21431 - DNA, 33 bp, Homo sapien
gcagtggaattattggccatttgtggtattagt

SEQ ID NO: 21432 - DNA, 33 bp, Homo sapien
gcagtggaattattggtcatttgtggtattagt

SEQ ID NO: 21433 - DNA, 33 bp, Homo sapien
gtgcaacagtgcaacaatccaataggtccaaga

SEQ ID NO: 21434 - DNA, 33 bp, Homo sapien
gtgcaacagtgcaacagtccaataggtccaaga

SEQ ID NO: 21435 - DNA, 33 bp, Homo sapien
aattcttttcttgccacgtactttgtaaaatgt

SEQ ID NO: 21436 - DNA, 33 bp, Homo sapien
aattcttttcttgccatgtactttgtaaaatgt

SEQ ID NO: 21437 - DNA, 33 bp, Homo sapien
gggaatgctgcaaactaaaattgtgttgtgttt

SEQ ID NO: 21438 - DNA, 33 bp, Homo sapien
gggaatgctgcaaactgaaattgtgttgtgttt

SEQ ID NO: 21439 - DNA, 33 bp, Homo sapien
ccaggaggctattctaaatccataaagtgtggg

SEQ ID NO: 21440 - DNA, 33 bp, Homo sapien
ccaggaggctattctagatccataaagtgtggg

SEQ ID NO: 21441 - DNA, 33 bp, Homo sapien
gccagcaaaaagggaaagtggtgctgctttaga

SEQ ID NO: 21442 - DNA, 33 bp, Homo sapien
gccagcaaaaagggaaggtggtgctgctttaga

SEQ ID NO: 21443 - DNA, 33 bp, Homo sapien
ctatgggaaaaatgacacagtaagagagacagg

SEQ ID NO: 21444 - DNA, 33 bp, Homo sapien
ctatgggaaaaatgacgcagtaagagagacagg

SEQ ID NO: 21445 - DNA, 33 bp, Homo sapien
cttgtacttcagccacagtatgaaccaaagtgg

SEQ ID NO: 21446 - DNA, 33 bp, Homo sapien
cttgtacttcagccacggtatgaaccaaagtgg

SEQ ID NO: 21447 - DNA, 33 bp, Homo sapien
gggtggacaggtcccaagagcactattgtcaag

SEQ ID NO: 21448 - DNA, 33 bp, Homo sapien
gggtggacaggtcccaggagcactattgtcaag

SEQ ID NO: 21449 - DNA, 33 bp, Homo sapien
ggacagctcagcataacactgcctgagacttgt

SEQ ID NO: 21450 - DNA, 33 bp, Homo sapien
ggacagctcagcataagactgcctgagacttgt

SEQ ID NO: 21451 - DNA, 33 bp, Homo sapien
attcattcaacagatacgtgtagaacactcact

SEQ ID NO: 21452 - DNA, 33 bp, Homo sapien
attcattcaacagatatgtgtagaacactcact

SEQ ID NO: 21453 - DNA, 33 bp, Homo sapien
tggctttgttctatcacccgtatctgctaagat

SEQ ID NO: 21454 - DNA, 33 bp, Homo sapien
tggctttgttctatcatccgtatctgctaagat

SEQ ID NO: 21455 - DNA, 33 bp, Homo sapien
ctaaccaggtttcttgaatcctttgatgtgttg

SEQ ID NO: 21456 - DNA, 33 bp, Homo sapien
ctaaccaggtttcttggatcctttgatgtgttg

SEQ ID NO: 21457 - DNA, 33 bp, Homo sapien
ctctgacaaatcatagaagcttaatgaatattc

SEQ ID NO: 21458 - DNA, 33 bp, Homo sapien
ctctgacaaatcatagcagcttaatgaatattc

SEQ ID NO: 21459 - DNA, 33 bp, Homo sapien
ctcctcagttattcaagaaattcttgctgagca

SEQ ID NO: 21460 - DNA, 33 bp, Homo sapien
ctcctcagttattcaataaattcttgctgagca

SEQ ID NO: 21461 - DNA, 33 bp, Homo sapien
agtaaattgtggcaaggattaagtgaatttgca

SEQ ID NO: 21462 - DNA, 33 bp, Homo sapien
agtaaattgtggcaagtattaagtgaatttgca

SEQ ID NO: 21463 - DNA, 33 bp, Homo sapien
catcctctttcatggacagtgttttgtaaatta

SEQ ID NO: 21464 - DNA, 33 bp, Homo sapien
catcctctttcatggagagtgttttgtaaatta

SEQ ID NO: 21465 - DNA, 33 bp, Homo sapien; identical to SEQ ID NO: 21463

SEQ ID NO: 21466 - DNA, 33 bp, Homo sapien; identical to SEQ ID NO: 21464

SEQ ID NO: 21467 - DNA, 33 bp, Homo sapien
agagctgagagatattcaagaagcggaactgag

SEQ ID NO: 21468 - DNA, 33 bp, Homo sapien
agagctgagagatatttaagaagcggaactgag

SEQ ID NO: 21469 - DNA, 33 bp, Homo sapien
cacttatggtgagcagaagtaagactgggagga

SEQ ID NO: 21470 - DNA, 33 bp, Homo sapien
cacttatggtgagcagcagtaagactgggagga

SEQ ID NO: 21471 - DNA, 33 bp, Homo sapien
cgatatgagtagctcaaagtaactcagttatac

SEQ ID NO: 21472 - DNA, 33 bp, Homo sapien
cgatatgagtagctcagagtaactcagttatac

SEQ ID NO: 21473 - DNA, 33 bp, Homo sapien
cagagggaaagagaaacggtgagagtgacttca

SEQ ID NO: 21474 - DNA, 33 bp, Homo sapien
cagagggaaagagaaatggtgagagtgacttca

SEQ ID NO: 21475 - DNA, 33 bp, Homo sapien
gctaatgggaacaaaaaccatacatctttattc

SEQ ID NO: 21476 - DNA, 33 bp, Homo sapien
gctaatgggaacaaaacccatacatctttattc

SEQ ID NO: 21477 - DNA, 33 bp, Homo sapien
acaggattaaattagcaagagcactatatgaca

SEQ ID NO: 21478 - DNA, 33 bp, Homo sapien
acaggattaaattagcgagagcactatatgaca

SEQ ID NO: 21479 - DNA, 33 bp, Homo sapien
tcattttcatcctgccaaaggcttcagctagca

SEQ ID NO: 21480 - DNA, 33 bp, Homo sapien
tcattttcatcctgccgaaggcttcagctagca

SEQ ID NO: 21481 - DNA, 33 bp, Homo sapien
gttccagttcaggccactgaaagagacagagag

SEQ ID NO: 21482 - DNA, 33 bp, Homo sapien
gttccagttcaggccagtgaaagagacagagag

SEQ ID NO: 21483 - DNA, 33 bp, Homo sapien
ttcttattacacacacgaatttcctcaccaaaa

SEQ ID NO: 21484 - DNA, 33 bp, Homo sapien
ttcttattacacacactaatttcctcaccaaaa

SEQ ID NO: 21485 - DNA, 33 bp, Homo sapien
aatagtaccctataagaaccagccctttctctc

SEQ ID NO: 21486 - DNA, 33 bp, Homo sapien
aatagtaccctataagcaccagccctttctctc

SEQ ID NO: 21487 - DNA, 33 bp, Homo sapien
tgttgtcctgctaaagaccttgatgggtttagg

SEQ ID NO: 21488 - DNA, 33 bp, Homo sapien
tgttgtcctgctaaaggccttgatgggtttagg

SEQ ID NO: 21489 - DNA, 33 bp, Homo sapien
gctcttcctgatagggccatgatctttatcttt

SEQ ID NO: 21490 - DNA, 33 bp, Homo sapien
gctcttcctgatagggtcatgatctttatcttt

SEQ ID NO: 21491 - DNA, 33 bp, Homo sapien
tgtgaccatcctatgcagagaaatctgtcattt

SEQ ID NO: 21492 - DNA, 33 bp, Homo sapien
tgtgaccatcctatgcggagaaatctgtcattt

SEQ ID NO: 21493 - DNA, 33 bp, Homo sapien
ctgtcatccagggaagaagttatttttgaaata

SEQ ID NO: 21494 - DNA, 33 bp, Homo sapien
ctgtcatccagggaaggagttatttttgaaata

SEQ ID NO: 21495 - DNA, 33 bp, Homo sapien
aattctcaattgtcctgagacttcagctcaaat

SEQ ID NO: 21496 - DNA, 33 bp, Homo sapien
aattctcaattgtccttagacttcagctcaaat

SEQ ID NO: 21497 - DNA, 33 bp, Homo sapien
agctaagggaaacaaaccagctctttcagtaat

SEQ ID NO: 21498 - DNA, 33 bp, Homo sapien
agctaagggaaacaaatcagctctttcagtaat

SEQ ID NO: 21499 - DNA, 33 bp, Homo sapien
ctcccaaagctctaaacagtgtcttagtctgaa

SEQ ID NO: 21500 - DNA, 33 bp, Homo sapien
ctcccaaagctctaaatagtgtcttagtctgaa

SEQ ID NO: 21501 - DNA, 33 bp, Homo sapien
gtaagagacatgaagcaaacttgatatagttca

SEQ ID NO: 21502 - DNA, 33 bp, Homo sapien
gtaagagacatgaagcgaacttgatatagttca

SEQ ID NO: 21503 - DNA, 33 bp, Homo sapien
gaatctcacacttcagaaacatggaattgcaag

SEQ ID NO: 21504 - DNA, 33 bp, Homo sapien
gaatctcacacttcagtaacatggaattgcaag

SEQ ID NO: 21505 - DNA, 33 bp, Homo sapien
aaataatcttctctcaaatacaaaaacataatc

SEQ ID NO: 21506 - DNA, 33 bp, Homo sapien
aaataatcttctctcagatacaaaaacataatc

SEQ ID NO: 21507 - DNA, 33 bp, Homo sapien
agagataccaaatgtacaacagacagatgtcat

SEQ ID NO: 21508 - DNA, 33 bp, Homo sapien
agagataccaaatgtataacagacagatgtcat

SEQ ID NO: 21509 - DNA, 33 bp, Homo sapien
gttcttacagcttcgcaatttgccactggcgtg

SEQ ID NO: 21510 - DNA, 33 bp, Homo sapien
gttcttacagcttcgcgatttgccactggcgtg

SEQ ID NO: 21511 - DNA, 33 bp, Homo sapien
ggttctactaaaatacccattaaagtcctttac

SEQ ID NO: 21512 - DNA, 33 bp, Homo sapien
ggttctactaaaatactcattaaagtcctttac

SEQ ID NO: 21513 - DNA, 33 bp, Homo sapien
cttttctggtcatcaacctagtcttccttgttc

SEQ ID NO: 21514 - DNA, 33 bp, Homo sapien
cttttctggtcatcaatctagtcttccttgttc

SEQ ID NO: 21515 - DNA, 33 bp, Homo sapien
ctcacatatttataggacagtttgcttgaaacc

SEQ ID NO: 21516 - DNA, 33 bp, Homo sapien
ctcacatatttatagggcagtttgcttgaaacc

SEQ ID NO: 21517 - DNA, 33 bp, Homo sapien
tattgataacaactccacaaggtagttattact

SEQ ID NO: 21518 - DNA, 33 bp, Homo sapien
tattgataacaactccgcaaggtagttattact

SEQ ID NO: 21519 - DNA, 33 bp, Homo sapien
agagagattacatatccccgtaatttatatgac

SEQ ID NO: 21520 - DNA, 33 bp, Homo sapien
agagagattacatatcgccgtaatttatatgac

SEQ ID NO: 21521 - DNA, 33 bp, Homo sapien
tggtgcagccgagcaaatgggcctgtagccgac

SEQ ID NO: 21522 - DNA, 33 bp, Homo sapien
tggtgcagccgagcaagtgggcctgtagccgac

SEQ ID NO: 21523 - DNA, 33 bp, Homo sapien
aagaaggtaactttgccgaaagctagtctgggg

SEQ ID NO: 21524 - DNA, 33 bp, Homo sapien
aagaaggtaactttgctgaaagctagtctgggg

SEQ ID NO: 21525 - DNA, 33 bp, Homo sapien
attggaaaaacagatcagatattgcaaggagat

SEQ ID NO: 21526 - DNA, 33 bp, Homo sapien
attggaaaaacagatctgatattgcaaggagat

SEQ ID NO: 21527 - DNA, 33 bp, Homo sapien
tgtcaccattcttaaccctgtcgtccaaaccag

SEQ ID NO: 21528 - DNA, 33 bp, Homo sapien
tgtcaccattcttaactctgtcgtccaaaccag

SEQ ID NO: 21529 - DNA, 33 bp, Homo sapien
gagtaagaagttctaaatggtagctatgattaa

SEQ ID NO: 21530 - DNA, 33 bp, Homo sapien
gagtaagaagttctaagtggtagctatgattaa

SEQ ID NO: 21531 - DNA, 33 bp, Homo sapien
caaaggccggaaagaacgtggagtatttaacaa

SEQ ID NO: 21532 - DNA, 33 bp, Homo sapien
caaaggccggaaagaatgtggagtatttaacaa

SEQ ID NO: 21533 - DNA, 33 bp, Homo sapien
tgatgctataaatggaagagaatctgctgctaa

SEQ ID NO: 21534 - DNA, 33 bp, Homo sapien
tgatgctataaatggaggagaatctgctgctaa

SEQ ID NO: 21535 - DNA, 33 bp, Homo sapien
atcataggtaagggaaaacgatccaatgtgcag

SEQ ID NO: 21536 - DNA, 33 bp, Homo sapien
atcataggtaagggaagacgatccaatgtgcag

SEQ ID NO: 21537 - DNA, 33 bp, Homo sapien
tctataagcactatcaccatccgccctcagtat

SEQ ID NO: 21538 - DNA, 33 bp, Homo sapien
tctataagcactatcagcatccgccctcagtat

SEQ ID NO: 21539 - DNA, 33 bp, Homo sapien
agtcaaaggcatcaacagctaacctgaatcaga

SEQ ID NO: 21540 - DNA, 33 bp, Homo sapien
agtcaaaggcatcaacggctaacctgaatcaga

SEQ ID NO: 21541 - DNA, 33 bp, Homo sapien
ataggtcacgtctcaacttaagactggtttata

SEQ ID NO: 21542 - DNA, 33 bp, Homo sapien
ataggtcacgtctcaatttaagactggtttata

SEQ ID NO: 21543 - DNA, 33 bp, Homo sapien
taatttaacaggaagaaatagtgtctacattgt

SEQ ID NO: 21544 - DNA, 33 bp, Homo sapien
taatttaacaggaagagatagtgtctacattgt

SEQ ID NO: 21545 - DNA, 33 bp, Homo sapien
gcacatttggaacatacaattgctagaacatac

SEQ ID NO: 21546 - DNA, 33 bp, Homo sapien
gcacatttggaacatagaattgctagaacatac

SEQ ID NO: 21547 - DNA, 33 bp, Homo sapien
aaaataagttttcaacagtgaatatccttcata

SEQ ID NO: 21548 - DNA, 33 bp, Homo sapien
aaaataagttttcaacggtgaatatccttcata

SEQ ID NO: 21549 - DNA, 33 bp, Homo sapien
tcggtagtaaaaggaaggtcttactgatgggat

SEQ ID NO: 21550 - DNA, 33 bp, Homo sapien
tcggtagtaaaaggaatgtcttactgatgggat

SEQ ID NO: 21551 - DNA, 33 bp, Homo sapien
catccaactttgaaatgagatatttaagccttc

SEQ ID NO: 21552 - DNA, 33 bp, Homo sapien
catccaactttgaaattagatatttaagccttc

SEQ ID NO: 21553 - DNA, 33 bp, Homo sapien
ggccagagaggtgagaaaaaacataaaggggaa

SEQ ID NO: 21554 - DNA, 33 bp, Homo sapien
ggccagagaggtgagagaaaacataaaggggaa

SEQ ID NO: 21555 - DNA, 33 bp, Homo sapien
agctgcgtaaccaggaaaagtggtggcttttct

SEQ ID NO: 21556 - DNA, 33 bp, Homo sapien
agctgcgtaaccaggagaagtggtggcttttct

SEQ ID NO: 21557 - DNA, 33 bp, Homo sapien
ttcagcagctttaaaaagaatatttacatttgt

SEQ ID NO: 21558 - DNA, 33 bp, Homo sapien
ttcagcagctttaaaaggaatatttacatttgt

SEQ ID NO: 21559 - DNA, 33 bp, Homo sapien
taaaggttaagctctcacaccaacagaccttgc

SEQ ID NO: 21560 - DNA, 33 bp, Homo sapien
taaaggttaagctctcgcaccaacagaccttgc

SEQ ID NO: 21561 - DNA, 33 bp, Homo sapien
cataaaaaaggggcaaatgagtcctgaaatact

SEQ ID NO: 21562 - DNA, 33 bp, Homo sapien
cataaaaaaggggcaagtgagtcctgaaatact

SEQ ID NO: 21563 - DNA, 33 bp, Homo sapien
aaatgtgaactacccagcaccatgaactgaact

SEQ ID NO: 21564 - DNA, 33 bp, Homo sapien
aaatgtgaactacccatcaccatgaactgaact

SEQ ID NO: 21565 - DNA, 33 bp, Homo sapien
tcttgagcttttcccaaccagatccagctgaag

SEQ ID NO: 21566 - DNA, 33 bp, Homo sapien
tcttgagcttttcccagccagatccagctgaag

SEQ ID NO: 21567 - DNA, 33 bp, Homo sapien
agatctatattgctcaaacatgactgtgtactt

SEQ ID NO: 21568 - DNA, 33 bp, Homo sapien
agatctatattgctcagacatgactgtgtactt

SEQ ID NO: 21569 - DNA, 33 bp, Homo sapien
catctaaatggcttcacagtgtggaaaactcca

SEQ ID NO: 21570 - DNA, 33 bp, Homo sapien
catctaaatggcttcatagtgtggaaaactcca

SEQ ID NO: 21571 - DNA, 33 bp, Homo sapien
cttaatttccaaataaatctatctgtaacacct

SEQ ID NO: 21572 - DNA, 33 bp, Homo sapien
cttaatttccaaataagtctatctgtaacacct

SEQ ID NO: 21573 - DNA, 33 bp, Homo sapien
gagaattgccttccaccgtacactgcttggttt

SEQ ID NO: 21574 - DNA, 33 bp, Homo sapien
gagaattgccttccactgtacactgcttggttt

SEQ ID NO: 21575 - DNA, 33 bp, Homo sapien
taaaggtaatcccaaaacgtttctttgtgaaag

SEQ ID NO: 21576 - DNA, 33 bp, Homo sapien
taaaggtaatcccaaagcgtttctttgtgaaag

SEQ ID NO: 21577 - DNA, 33 bp, Homo sapien
agcagcaaataagcaaatatcactcagtgcctt

SEQ ID NO: 21578 - DNA, 33 bp, Homo sapien
agcagcaaataagcaactatcactcagtgcctt

SEQ ID NO: 21579 - DNA, 33 bp, Homo sapien
ctgatttgtcatggcaatatcttttagtacctc

SEQ ID NO: 21580 - DNA, 33 bp, Homo sapien
ctgatttgtcatggcagtatcttttagtacctc

SEQ ID NO: 21581 - DNA, 33 bp, Homo sapien
aatagataattcatcactcccctacctttcatt

SEQ ID NO: 21582 - DNA, 33 bp, Homo sapien
aatagataattcatcattcccctacctttcatt

SEQ ID NO: 21583 - DNA, 33 bp, Homo sapien
ttttgtttcaaagttacgctttcctagtcaatt

SEQ ID NO: 21584 - DNA, 33 bp, Homo sapien
ttttgtttcaaagttatgctttcctagtcaatt

SEQ ID NO: 21585 - DNA, 33 bp, Homo sapien
gacttgaggtcagggaataacaatggcatatga

SEQ ID NO: 21586 - DNA, 33 bp, Homo sapien
gacttgaggtcagggagtaacaatggcatatga

SEQ ID NO: 21587 - DNA, 33 bp, Homo sapien
gatcagggtgacatcactgagctatgctctctc

SEQ ID NO: 21588 - DNA, 33 bp, Homo sapien
gatcagggtgacatcattgagctatgctctctc

SEQ ID NO: 21589 - DNA, 33 bp, Homo sapien
ataacgagtactgacactggagaaggagtcaag

SEQ ID NO: 21590 - DNA, 33 bp, Homo sapien
ataacgagtactgacattggagaaggagtcaag

SEQ ID NO: 21591 - DNA, 33 bp, Homo sapien
tactttcagaaaacgcaatgcaatactaactaa

SEQ ID NO: 21592 - DNA, 33 bp, Homo sapien
tactttcagaaaacgcgatgcaatactaactaa

SEQ ID NO: 21593 - DNA, 33 bp, Homo sapien
atctggtctgtgactacgctgcaaccttgggag

SEQ ID NO: 21594 - DNA, 33 bp, Homo sapien
atctggtctgtgactatgctgcaaccttgggag

SEQ ID NO: 21595 - DNA, 33 bp, Homo sapien
ttcctacctctaacatcagaaaatcgatcaaat

SEQ ID NO: 21596 - DNA, 33 bp, Homo sapien
ttcctacctctaacattagaaaatcgatcaaat

SEQ ID NO: 21597 - DNA, 33 bp, Homo sapien
gaaagtccaaattgtcaagtttatatttataga

SEQ ID NO: 21598 - DNA, 33 bp, Homo sapien
gaaagtccaaattgtcgagtttatatttataga

SEQ ID NO: 21599 - DNA, 33 bp, Homo sapien
catagttctaatttcaacagctcagtggtccat

SEQ ID NO: 21600 - DNA, 33 bp, Homo sapien
catagttctaatttcagcagctcagtggtccat

SEQ ID NO: 21601 - DNA, 33 bp, Homo sapien
aaacctatattcaagacggcagcatgatattgt

SEQ ID NO: 21602 - DNA, 33 bp, Homo sapien
aaacctatattcaagatggcagcatgatattgt

SEQ ID NO: 21603 - DNA, 33 bp, Homo sapien
gacctgggaacaatcacaaggcaactgatatgg

SEQ ID NO: 21604 - DNA, 33 bp, Homo sapien
gacctgggaacaatcataaggcaactgatatgg

SEQ ID NO: 21605 - DNA, 33 bp, Homo sapien
aaggaccagcaaagtaagggaatgctatcatca

SEQ ID NO: 21606 - DNA, 33 bp, Homo sapien
aaggaccagcaaagtatgggaatgctatcatca

SEQ ID NO: 21607 - DNA, 33 bp, Homo sapien
agatccttcataacctcaccttaaccatccttc

SEQ ID NO: 21608 - DNA, 33 bp, Homo sapien
agatccttcataacctgaccttaaccatccttc

SEQ ID NO: 21609 - DNA, 33 bp, Homo sapien
tgagagcctgctactgccaagaactatgatgag

SEQ ID NO: 21610 - DNA, 33 bp, Homo sapien
tgagagcctgctactggcaagaactatgatgag

SEQ ID NO: 21611 - DNA, 33 bp, Homo sapien
ctttatctgatcctgacagcttctactcatctg

SEQ ID NO: 21612 - DNA, 33 bp, Homo sapien
ctttatctgatcctgatagcttctactcatctg

SEQ ID NO: 21613 - DNA, 33 bp, Homo sapien
atatagaaatgttcaccgatcaatatgtcttcc

SEQ ID NO: 21614 - DNA, 33 bp, Homo sapien
atatagaaatgttcacggatcaatatgtcttcc

SEQ ID NO: 21615 - DNA, 33 bp, Homo sapien
aagagcagtgtaaaaaatgggatacgatacatt

SEQ ID NO: 21616 - DNA, 33 bp, Homo sapien
aagagcagtgtaaaaattgggatacgatacatt

SEQ ID NO: 21617 - DNA, 33 bp, Homo sapien
tgggctactgacttagaaacagccatacaaata

SEQ ID NO: 21618 - DNA, 33 bp, Homo sapien
tgggctactgacttaggaacagccatacaaata

SEQ ID NO: 21619 - DNA, 33 bp, Homo sapien
ggagtcctttataagacgatatacacagcgaat

SEQ ID NO: 21620 - DNA, 33 bp, Homo sapien
ggagtcctttataagaggatatacacagcgaat

SEQ ID NO: 21621 - DNA, 33 bp, Homo sapien
ctccctctctgtcccacattcctccagtttagg

SEQ ID NO: 21622 - DNA, 33 bp, Homo sapien
ctccctctctgtcccatattcctccagtttagg

SEQ ID NO: 21623 - DNA, 33 bp, Homo sapien
aattgctatgttgagccaaaatcagtcctttcc

SEQ ID NO: 21624 - DNA, 33 bp, Homo sapien
aattgctatgttgagctaaaatcagtcctttcc

SEQ ID NO: 21625 - DNA, 33 bp, Homo sapien
gacaaagtcaagaatacaaagtttagtttcaat

SEQ ID NO: 21626 - DNA, 33 bp, Homo sapien
gacaaagtcaagaatagaaagtttagtttcaat

SEQ ID NO: 21627 - DNA, 33 bp, Homo sapien
acactttgaccaagaactccatagtgacaatag

SEQ ID NO: 21628 - DNA, 33 bp, Homo sapien
acactttgaccaagaattccatagtgacaatag

SEQ ID NO: 21629 - DNA, 33 bp, Homo sapien
gagttagcaacttgaaacaacacacagttatta

SEQ ID NO: 21630 - DNA, 33 bp, Homo sapien
gagttagcaacttgaagcaacacacagttatta

SEQ ID NO: 21631 - DNA, 33 bp, Homo sapien
cacatccacaagcaacggaattctgccaacaat

SEQ ID NO: 21632 - DNA, 33 bp, Homo sapien
cacatccacaagcaactgaattctgccaacaat

SEQ ID NO: 21633 - DNA, 33 bp, Homo sapien
taggttatattataccacaaaggtgattatatt

SEQ ID NO: 21634 - DNA, 33 bp, Homo sapien
taggttatattataccgcaaaggtgattatatt

SEQ ID NO: 21635 - DNA, 33 bp, Homo sapien
aatgaaatgttacttcaaagttcaatgcagaaa

SEQ ID NO: 21636 - DNA, 33 bp, Homo sapien
aatgaaatgttacttcgaagttcaatgcagaaa

SEQ ID NO: 21637 - DNA, 33 bp, Homo sapien
tttcttccgtctttaaaccttgcaaagaagatt

SEQ ID NO: 21638 - DNA, 33 bp, Homo sapien
tttcttccgtctttaacccttgcaaagaagatt

SEQ ID NO: 21639 - DNA, 33 bp, Homo sapien
tcagtgcatcctacatcagaactttggtatggt

SEQ ID NO: 21640 - DNA, 33 bp, Homo sapien
tcagtgcatcctacattagaactttggtatggt

SEQ ID NO: 21641 - DNA, 33 bp, Homo sapien
cagagaaagaactggaaggcaatatgcataaac

SEQ ID NO: 21642 - DNA, 33 bp, Homo sapien
cagagaaagaactggagggcaatatgcataaac

SEQ ID NO: 21643 - DNA, 33 bp, Homo sapien
caaaaatctcactggcaaacaaaaaacagattt

SEQ ID NO: 21644 - DNA, 33 bp, Homo sapien
caaaaatctcactggccaacaaaaaacagattt

SEQ ID NO: 21645 - DNA, 33 bp, Homo sapien
cttttctgaggattagaattaatgtacacaggt

SEQ ID NO: 21646 - DNA, 33 bp, Homo sapien
cttttctgaggattagcattaatgtacacaggt

SEQ ID NO: 21647 - DNA, 33 bp, Homo sapien
cagcacttggtcgttacgcaagaagcatctgca

SEQ ID NO: 21648 - DNA, 33 bp, Homo sapien
cagcacttggtcgttatgcaagaagcatctgca

SEQ ID NO: 21649 - DNA, 33 bp, Homo sapien
ggtctctcttctcacaataagcagcttggacta

SEQ ID NO: 21650 - DNA, 33 bp, Homo sapien
ggtctctcttctcacagtaagcagcttggacta

SEQ ID NO: 21651 - DNA, 33 bp, Homo sapien
agacccctgacagtcaataccaattccacctca

SEQ ID NO: 21652 - DNA, 33 bp, Homo sapien
agacccctgacagtcactaccaattccacctca

SEQ ID NO: 21653 - DNA, 33 bp, Homo sapien
atgagtttgccagaccaagaatcaaagtgaaca

SEQ ID NO: 21654 - DNA, 33 bp, Homo sapien
atgagtttgccagaccgagaatcaaagtgaaca

SEQ ID NO: 21655 - DNA, 33 bp, Homo sapien
gtttatgccatgttcagagaatttgattctggg

SEQ ID NO: 21656 - DNA, 33 bp, Homo sapien
gtttatgccatgttcatagaatttgattctggg

SEQ ID NO: 21657 - DNA, 33 bp, Homo sapien
ttcaaatttgcccttcgcaagtagccctcctct

SEQ ID NO: 21658 - DNA, 33 bp, Homo sapien
ttcaaatttgcccttctcaagtagccctcctct

SEQ ID NO: 21659 - DNA, 33 bp, Homo sapien
tttagggtacctcatcacttcctgcatctggaa

SEQ ID NO: 21660 - DNA, 33 bp, Homo sapien
tttagggtacctcatcgcttcctgcatctggaa

SEQ ID NO: 21661 - DNA, 33 bp, Homo sapien
agaacctcaaagctcaccctgccgtatcttttc

SEQ ID NO: 21662 - DNA, 33 bp, Homo sapien
agaacctcaaagctcatcctgccgtatcttttc

SEQ ID NO: 21663 - DNA, 33 bp, Homo sapien
gccttaaacttcttccagatcccccaaagccaa

SEQ ID NO: 21664 - DNA, 33 bp, Homo sapien
gccttaaacttcttccggatcccccaaagccaa

SEQ ID NO: 21665 - DNA, 33 bp, Homo sapien
ccaaggttttccagaacaggaagttggttaggg

SEQ ID NO: 21666 - DNA, 33 bp, Homo sapien
ccaaggttttccagaataggaagttggttaggg

SEQ ID NO: 21667 - DNA, 33 bp, Homo sapien
aaaagagggaagaaaacattctgcgcagaaaaa

SEQ ID NO: 21668 - DNA, 33 bp, Homo sapien
aaaagagggaagaaaatattctgcgcagaaaaa

SEQ ID NO: 21669 - DNA, 33 bp, Homo sapien
tgattccaaaatgtagacataaggcattctttc

SEQ ID NO: 21670 - DNA, 33 bp, Homo sapien
tgattccaaaatgtaggcataaggcattctttc

SEQ ID NO: 21671 - DNA, 33 bp, Homo sapien
catctaacacctgcctcaactaagtaggaggaa

SEQ ID NO: 21672 - DNA, 33 bp, Homo sapien
catctaacacctgccttaactaagtaggaggaa

SEQ ID NO: 21673 - DNA, 33 bp, Homo sapien
gcccacagtttccagaaagtcaggacacaaacc

SEQ ID NO: 21674 - DNA, 33 bp, Homo sapien
gcccacagtttccagagagtcaggacacaaacc

SEQ ID NO: 21675 - DNA, 33 bp, Homo sapien
tgcttcctctactagactccattcttctgggat

SEQ ID NO: 21676 - DNA, 33 bp, Homo sapien
tgcttcctctactagattccattcttctgggat

SEQ ID NO: 21677 - DNA, 33 bp, Homo sapien
tctaggagttcaaggacgaggaagagttcaaga

SEQ ID NO: 21678 - DNA, 33 bp, Homo sapien
tctaggagttcaaggatgaggaagagttcaaga

SEQ ID NO: 21679 - DNA, 33 bp, Homo sapien
tcaaactactgataaacctaaactctggcactg

SEQ ID NO: 21680 - DNA, 33 bp, Homo sapien
tcaaactactgataaagctaaactctggcactg

SEQ ID NO: 21681 - DNA, 33 bp, Homo sapien
agctcctgttgctcaacggccaagtagttaatt

SEQ ID NO: 21682 - DNA, 33 bp, Homo sapien
agctcctgttgctcaatggccaagtagttaatt

SEQ ID NO: 21683 - DNA, 33 bp, Homo sapien
ctggacaatggacaccccaaacggtttcccagg

SEQ ID NO: 21684 - DNA, 33 bp, Homo sapien
ctggacaatggacacctcaaacggtttcccagg

SEQ ID NO: 21685 - DNA, 33 bp, Homo sapien
gcttccacgtttgccactgaagagctgtggtgt

SEQ ID NO: 21686 - DNA, 33 bp, Homo sapien
gcttccacgtttgccattgaagagctgtggtgt

SEQ ID NO: 21687 - DNA, 33 bp, Homo sapien
gctcatgaaaatcaagaaagcttttaggacagc

SEQ ID NO: 21688 - DNA, 33 bp, Homo sapien
gctcatgaaaatcaaggaagcttttaggacagc

SEQ ID NO: 21689 - DNA, 33 bp, Homo sapien
aagagggagtgccaagaagaatgcagaaaacaa

SEQ ID NO: 21690 - DNA, 33 bp, Homo sapien
aagagggagtgccaagcagaatgcagaaaacaa

SEQ ID NO: 21691 - DNA, 33 bp, Homo sapien
tacatatatgtaagcacgttccgttgttagctg

SEQ ID NO: 21692 - DNA, 33 bp, Homo sapien
tacatatatgtaagcatgttccgttgttagctg

SEQ ID NO: 21693 - DNA, 33 bp, Homo sapien
atctatttggttctgacatcaagcggtcagaat

SEQ ID NO: 21694 - DNA, 33 bp, Homo sapien
atctatttggttctgatatcaagcggtcagaat

SEQ ID NO: 21695 - DNA, 33 bp, Homo sapien
taccctttcctcttgtaaaccatgagtaacaaa

SEQ ID NO: 21696 - DNA, 33 bp, Homo sapien
taccctttcctcttgtgaaccatgagtaacaaa

SEQ ID NO: 21697 - DNA, 33 bp, Homo sapien
atcctttatcatgacacgcaagatctgcctgtc

SEQ ID NO: 21698 - DNA, 33 bp, Homo sapien
atcctttatcatgacatgcaagatctgcctgtc

SEQ ID NO: 21699 - DNA, 33 bp, Homo sapien
agtctatgatggaacactgatgttttaaagcct

SEQ ID NO: 21700 - DNA, 33 bp, Homo sapien
agtctatgatggaacattgatgttttaaagcct

SEQ ID NO: 21701 - DNA, 33 bp, Homo sapien
gactgagcactcctcaaaaaagggaagagaatg

SEQ ID NO: 21702 - DNA, 33 bp, Homo sapien
gactgagcactcctcagaaaagggaagagaatg

SEQ ID NO: 21703 - DNA, 33 bp, Homo sapien
ttttgggtttggaccactggctaagtggtgatg

SEQ ID NO: 21704 - DNA, 33 bp, Homo sapien
ttttgggtttggaccattggctaagtggtgatg

SEQ ID NO: 21705 - DNA, 33 bp, Homo sapien
atcagagaagctgcaactggggctaacaactgg

SEQ ID NO: 21706 - DNA, 33 bp, Homo sapien
atcagagaagctgcaattggggctaacaactgg

SEQ ID NO: 21707 - DNA, 33 bp, Homo sapien
gatttactatgtaagaactgagaatatcctgcc

SEQ ID NO: 21708 - DNA, 33 bp, Homo sapien
gatttactatgtaagacctgagaatatcctgcc

SEQ ID NO: 21709 - DNA, 33 bp, Homo sapien
acacatgtcagtaaaaaagaggcaactgtaaaa

SEQ ID NO: 21710 - DNA, 33 bp, Homo sapien
acacatgtcagtaaaagagaggcaactgtaaaa

SEQ ID NO: 21711 - DNA, 33 bp, Homo sapien
gtttgataggataatacctgagatctttgaggg

SEQ ID NO: 21712 - DNA, 33 bp, Homo sapien
gtttgataggataatatctgagatctttgaggg

SEQ ID NO: 21713 - DNA, 33 bp, Homo sapien
cagtgctgccgtgtcacagcagaaaacaacaca

SEQ ID NO: 21714 - DNA, 33 bp, Homo sapien
cagtgctgccgtgtcatagcagaaaacaacaca

SEQ ID NO: 21715 - DNA, 33 bp, Homo sapien
gctacagaaccaataaagcaaggaggggtaaaa

SEQ ID NO: 21716 - DNA, 33 bp, Homo sapien
gctacagaaccaataacgcaaggaggggtaaaa

SEQ ID NO: 21717 - DNA, 33 bp, Homo sapien
gcatttagacttctgcaataaatagctactgac

SEQ ID NO: 21718 - DNA, 33 bp, Homo sapien
gcatttagacttctgccataaatagctactgac

SEQ ID NO: 21719 - DNA, 33 bp, Homo sapien
ccacagctatgttccaatagtggctgttctgtc

SEQ ID NO: 21720 - DNA, 33 bp, Homo sapien
ccacagctatgttccactagtggctgttctgtc

SEQ ID NO: 21721 - DNA, 33 bp, Homo sapien
catttctaatacctccactgcaaccagcctgat

SEQ ID NO: 21722 - DNA, 33 bp, Homo sapien
catttctaatacctccgctgcaaccagcctgat

SEQ ID NO: 21723 - DNA, 33 bp, Homo sapien
catggattaatgtaagacacctacttcagtgat

SEQ ID NO: 21724 - DNA, 33 bp, Homo sapien
catggattaatgtaaggcacctacttcagtgat

SEQ ID NO: 21725 - DNA, 33 bp, Homo sapien
gtgtccctagggaagacagattgcatggagagg

SEQ ID NO: 21726 - DNA, 33 bp, Homo sapien
gtgtccctagggaagagagattgcatggagagg

SEQ ID NO: 21727 - DNA, 33 bp, Homo sapien
tttgctaacagattccaagttttgttgagacag

SEQ ID NO: 21728 - DNA, 33 bp, Homo sapien
tttgctaacagattcccagttttgttgagacag

SEQ ID NO: 21729 - DNA, 33 bp, Homo sapien
cagttaagaaggaaacagatctatccacaaatc

SEQ ID NO: 21730 - DNA, 33 bp, Homo sapien
cagttaagaaggaaacggatctatccacaaatc

SEQ ID NO: 21731 - DNA, 33 bp, Homo sapien
tatcattatcataaaacgtctggacacttgaaa

SEQ ID NO: 21732 - DNA, 33 bp, Homo sapien
tatcattatcataaaatgtctggacacttgaaa

SEQ ID NO: 21733 - DNA, 33 bp, Homo sapien
atgaaagccatgcagcccaacaaagaggagctc

SEQ ID NO: 21734 - DNA, 33 bp, Homo sapien
atgaaagccatgcagctcaacaaagaggagctc

SEQ ID NO: 21735 - DNA, 33 bp, Homo sapien
cccaggtactttagcactctttgccaggtactg

SEQ ID NO: 21736 - DNA, 33 bp, Homo sapien
cccaggtactttagcattctttgccaggtactg

SEQ ID NO: 21737 - DNA, 33 bp, Homo sapien
aaaaaatgtggggtgaccttttcacgtcttact

SEQ ID NO: 21738 - DNA, 33 bp, Homo sapien
aaaaaatgtggggtgatcttttcacgtcttact

SEQ ID NO: 21739 - DNA, 33 bp, Homo sapien
tatatgacaattgaaagcttgaaactgaaacta

SEQ ID NO: 21740 - DNA, 33 bp, Homo sapien
tatatgacaattgaaatcttgaaactgaaacta

SEQ ID NO: 21741 - DNA, 33 bp, Homo sapien
tataagagctattcacaaaaagcttctgggttt

SEQ ID NO: 21742 - DNA, 33 bp, Homo sapien
tataagagctattcaccaaaagcttctgggttt

SEQ ID NO: 21743 - DNA, 33 bp, Homo sapien
gtgcaataactgaaccaaaaaaaaatgtactag

SEQ ID NO: 21744 - DNA, 33 bp, Homo sapien
gtgcaataactgaaccgaaaaaaaatgtactag

SEQ ID NO: 21745 - DNA, 33 bp, Homo sapien
catggatgaaacttgaatacgttatactaagtg

SEQ ID NO: 21746 - DNA, 33 bp, Homo sapien
catggatgaaacttgagtacgttatactaagtg

SEQ ID NO: 21747 - DNA, 33 bp, Homo sapien
ggatggtgctgttgaaacggcaaaagcaagttt

SEQ ID NO: 21748 - DNA, 33 bp, Homo sapien
ggatggtgctgttgaagcggcaaaagcaagttt

SEQ ID NO: 21749 - DNA, 33 bp, Homo sapien
cactggaaatcaaccacgtagaaaagaaacgct

SEQ ID NO: 21750 - DNA, 33 bp, Homo sapien
cactggaaatcaaccatgtagaaaagaaacgct

SEQ ID NO: 21751 - DNA, 33 bp, Homo sapien
tctactgggaggcttacggcatttttcaaagtg

SEQ ID NO: 21752 - DNA, 33 bp, Homo sapien
tctactgggaggcttatggcatttttcaaagtg

SEQ ID NO: 21753 - DNA, 33 bp, Homo sapien
atgagattatatgggacagtttagggcccagcc

SEQ ID NO: 21754 - DNA, 33 bp, Homo sapien
atgagattatatgggatagtttagggcccagcc

SEQ ID NO: 21755 - DNA, 33 bp, Homo sapien
gaaagccaggaccttgaacgtgcaaagatttga

SEQ ID NO: 21756 - DNA, 33 bp, Homo sapien
gaaagccaggaccttggacgtgcaaagatttga

SEQ ID NO: 21757 - DNA, 33 bp, Homo sapien
agttatagacagcagactcaccaacaaggattt

SEQ ID NO: 21758 - DNA, 33 bp, Homo sapien
agttatagacagcagagtcaccaacaaggattt

SEQ ID NO: 21759 - DNA, 33 bp, Homo sapien
tgcaaagagttatttaaactgtcacactgctgg

SEQ ID NO: 21760 - DNA, 33 bp, Homo sapien
tgcaaagagttatttacactgtcacactgctgg

SEQ ID NO: 21761 - DNA, 33 bp, Homo sapien
tccgtattagagtgacaaagactatttccttaa

SEQ ID NO: 21762 - DNA, 33 bp, Homo sapien
tccgtattagagtgacgaagactatttccttaa

SEQ ID NO: 21763 - DNA, 33 bp, Homo sapien
tttagcagtttgaaatcacaatgctgccaggat

SEQ ID NO: 21764 - DNA, 33 bp, Homo sapien
tttagcagtttgaaatgacaatgctgccaggat

SEQ ID NO: 21765 - DNA, 33 bp, Homo sapien
gtaaattgaagaaaaccctgaactgcagttgca

SEQ ID NO: 21766 - DNA, 33 bp, Homo sapien
gtaaattgaagaaaacgctgaactgcagttgca

SEQ ID NO: 21767 - DNA, 33 bp, Homo sapien
aaatgagacttaaggacgtttacgcacatggaa

SEQ ID NO: 21768 - DNA, 33 bp, Homo sapien
aaatgagacttaaggatgtttacgcacatggaa

SEQ ID NO: 21769 - DNA, 33 bp, Homo sapien
aagtagaaaggagaagcatggactgcatttcca

SEQ ID NO: 21770 - DNA, 33 bp, Homo sapien
aagtagaaaggagaagtatggactgcatttcca

SEQ ID NO: 21771 - DNA, 33 bp, Homo sapien
aggagaaaaggtatcacgtcacctcctatgacc

SEQ ID NO: 21772 - DNA, 33 bp, Homo sapien
aggagaaaaggtatcatgtcacctcctatgacc

SEQ ID NO: 21773 - DNA, 33 bp, Homo sapien
gagtgaaaacgggcacaatctgggacatctgaa

SEQ ID NO: 21774 - DNA, 33 bp, Homo sapien
gagtgaaaacgggcacgatctgggacatctgaa

SEQ ID NO: 21775 - DNA, 33 bp, Homo sapien
aatgccaaatgaataacgagttgaattgaacaa

SEQ ID NO: 21776 - DNA, 33 bp, Homo sapien
aatgccaaatgaataatgagttgaattgaacaa

SEQ ID NO: 21777 - DNA, 33 bp, Homo sapien
ggacttagttcatgatcaggactgcggcatgga

SEQ ID NO: 21778 - DNA, 33 bp, Homo sapien
ggacttagttcatgattaggactgcggcatgga

SEQ ID NO: 21779 - DNA, 33 bp, Homo sapien
acttctactataaataagcccatgtctttggct

SEQ ID NO: 21780 - DNA, 33 bp, Homo sapien
acttctactataaataggcccatgtctttggct

SEQ ID NO: 21781 - DNA, 33 bp, Homo sapien
tccagactctcgacaactggtaaggccagcgac

SEQ ID NO: 21782 - DNA, 33 bp, Homo sapien
tccagactctcgacaattggtaaggccagcgac

SEQ ID NO: 21783 - DNA, 33 bp, Homo sapien
ccaatagattcctcacagcactttaccctagcc

SEQ ID NO: 21784 - DNA, 33 bp, Homo sapien
ccaatagattcctcacggcactttaccctagcc

SEQ ID NO: 21785 - DNA, 33 bp, Homo sapien
ggggacatagccaaatcatatcagcaagtcttt

SEQ ID NO: 21786 - DNA, 33 bp, Homo sapien
ggggacatagccaaattatatcagcaagtcttt

SEQ ID NO: 21787 - DNA, 33 bp, Homo sapien
tttatattccttgatacaatgcacattatcctc

SEQ ID NO: 21788 - DNA, 33 bp, Homo sapien
tttatattccttgatagaatgcacattatcctc

SEQ ID NO: 21789 - DNA, 33 bp, Homo sapien
ctcatttattggctgcagaacggtgaagaagag

SEQ ID NO: 21790 - DNA, 33 bp, Homo sapien
ctcatttattggctgcggaacggtgaagaagag

SEQ ID NO: 21791 - DNA, 33 bp, Homo sapien
tgatttgacacttggaaatactatttttggttt

SEQ ID NO: 21792 - DNA, 33 bp, Homo sapien
tgatttgacacttggagatactatttttggttt

SEQ ID NO: 21793 - DNA, 33 bp, Homo sapien
aaatctgaaataaatacggcaaattactaacat

SEQ ID NO: 21794 - DNA, 33 bp, Homo sapien
aaatctgaaataaatatggcaaattactaacat

SEQ ID NO: 21795 - DNA, 33 bp, Homo sapien
accccgtgagacaggacgattagtttcccttcc

SEQ ID NO: 21796 - DNA, 33 bp, Homo sapien
accccgtgagacaggatgattagtttcccttcc

SEQ ID NO: 21797 - DNA, 33 bp, Homo sapien
gaatgggtggtttctaaaggtggttcctgagag

SEQ ID NO: 21798 - DNA, 33 bp, Homo sapien
gaatgggtggtttctagaggtggttcctgagag

SEQ ID NO: 21799 - DNA, 33 bp, Homo sapien
caaagcaaaaaaggaaaaagttcacacctcaga

SEQ ID NO: 21800 - DNA, 33 bp, Homo sapien
caaagcaaaaaaggaagaagttcacacctcaga

SEQ ID NO: 21801 - DNA, 33 bp, Homo sapien
ctataactagctgtagaatcaaataatttattc

SEQ ID NO: 21802 - DNA, 33 bp, Homo sapien
ctataactagctgtaggatcaaataatttattc

SEQ ID NO: 21803 - DNA, 33 bp, Homo sapien
aggtagtctatggtccaattataaaatgctttg

SEQ ID NO: 21804 - DNA, 33 bp, Homo sapien
aggtagtctatggtccgattataaaatgctttg

SEQ ID NO: 21805 - DNA, 33 bp, Homo sapien
gtgtacactgggagatgaggggacaatttagct

SEQ ID NO: 21806 - DNA, 33 bp, Homo sapien
gtgtacactgggagattaggggacaatttagct

SEQ ID NO: 21807 - DNA, 33 bp, Homo sapien
tttggaggggtgagtaacgatgggatgtaccat

SEQ ID NO: 21808 - DNA, 33 bp, Homo sapien
tttggaggggtgagtagcgatgggatgtaccat

SEQ ID NO: 21809 - DNA, 33 bp, Homo sapien
atatacataaagttaacgataaatgggcaacac

SEQ ID NO: 21810 - DNA, 33 bp, Homo sapien
atatacataaagttaatgataaatgggcaacac

SEQ ID NO: 21811 - DNA, 33 bp, Homo sapien
ttactagtgtctagaacggggcctggcatactt

SEQ ID NO: 21812 - DNA, 33 bp, Homo sapien
ttactagtgtctagaatggggcctggcatactt

SEQ ID NO: 21813 - DNA, 33 bp, Homo sapien
gatcagaagaggaagcaccaatgactagtaaaa

SEQ ID NO: 21814 - DNA, 33 bp, Homo sapien
gatcagaagaggaagcgccaatgactagtaaaa

SEQ ID NO: 21815 - DNA, 33 bp, Homo sapien
agacggaactggcctccatcctatgcgaggtcc

SEQ ID NO: 21816 - DNA, 33 bp, Homo sapien
agacggaactggcctctatcctatgcgaggtcc

SEQ ID NO: 21817 - DNA, 33 bp, Homo sapien
atctttatacattggaacttctcattcttaagg

SEQ ID NO: 21818 - DNA, 33 bp, Homo sapien
atctttatacattggatcttctcattcttaagg

SEQ ID NO: 21819 - DNA, 33 bp, Homo sapien
gcatacaggtgcaaaaatgcgtgactttctgtg

SEQ ID NO: 21820 - DNA, 33 bp, Homo sapien
gcatacaggtgcaaaagtgcgtgactttctgtg

SEQ ID NO: 21821 - DNA, 33 bp, Homo sapien
aaaaaaagcaattaaaatgatgaaataggtctg

SEQ ID NO: 21822 - DNA, 33 bp, Homo sapien
aaaaaaagcaattaaagtgatgaaataggtctg

SEQ ID NO: 21823 - DNA, 33 bp, Homo sapien
tgtcttgaagggggtacggtttacacagatgta

SEQ ID NO: 21824 - DNA, 33 bp, Homo sapien
tgtcttgaagggggtatggtttacacagatgta

SEQ ID NO: 21825 - DNA, 33 bp, Homo sapien
ttctttcactgtaataaatatagctgtgggtgt

SEQ ID NO: 21826 - DNA, 33 bp, Homo sapien
ttctttcactgtaatagatatagctgtgggtgt

SEQ ID NO: 21827 - DNA, 33 bp, Homo sapien
tgtgtcctgctgctaacgatgtaaaagaaatga

SEQ ID NO: 21828 - DNA, 33 bp, Homo sapien
tgtgtcctgctgctaatgatgtaaaagaaatga

SEQ ID NO: 21829 - DNA, 33 bp, Homo sapien
gtaaatgctgcagaagacactagaagggactgg

SEQ ID NO: 21830 - DNA, 33 bp, Homo sapien
gtaaatgctgcagaagccactagaagggactgg

SEQ ID NO: 21831 - DNA, 33 bp, Homo sapien
gaggacagaaaggccaaggcctcaagaaggaaa

SEQ ID NO: 21832 - DNA, 33 bp, Homo sapien
gaggacagaaaggccagggcctcaagaaggaaa

SEQ ID NO: 21833 - DNA, 33 bp, Homo sapien
gattcccctaacaaaaggtgtcaaagctttatt

SEQ ID NO: 21834 - DNA, 33 bp, Homo sapien
gattcccctaacaaaatgtgtcaaagctttatt

SEQ ID NO: 21835 - DNA, 33 bp, Homo sapien
gggttttggcttctgaacatgacatagggatcc

SEQ ID NO: 21836 - DNA, 33 bp, Homo sapien
gggttttggcttctgagcatgacatagggatcc

SEQ ID NO: 21837 - DNA, 33 bp, Homo sapien
gcttagtgccaagatacaagaaatggccaataa

SEQ ID NO: 21838 - DNA, 33 bp, Homo sapien
gcttagtgccaagatataagaaatggccaataa

SEQ ID NO: 21839 - DNA, 33 bp, Homo sapien
ttgttaaatgatgctgcagaggaagactaggtg

SEQ ID NO: 21840 - DNA, 33 bp, Homo sapien
ttgttaaatgatgctggagaggaagactaggtg

SEQ ID NO: 21841 - DNA, 33 bp, Homo sapien
ctggtttatttgttcaccctaattgaagataga

SEQ ID NO: 21842 - DNA, 33 bp, Homo sapien
ctggtttatttgttcagcctaattgaagataga

SEQ ID NO: 21843 - DNA, 33 bp, Homo sapien
tctgacttaatatgtgcactattcaaaatataa

SEQ ID NO: 21844 - DNA, 33 bp, Homo sapien
tctgacttaatatgtgtactattcaaaatataa

SEQ ID NO: 21845 - DNA, 33 bp, Homo sapien
attcatgtacagcatacggtatttttgcatggg

SEQ ID NO: 21846 - DNA, 33 bp, Homo sapien
attcatgtacagcatatggtatttttgcatggg

SEQ ID NO: 21847 - DNA, 33 bp, Homo sapien
tgaatcttaaagacatcacactaagtgaaagag

SEQ ID NO: 21848 - DNA, 33 bp, Homo sapien
tgaatcttaaagacattacactaagtgaaagag

SEQ ID NO: 21849 - DNA, 33 bp, Homo sapien
agggcctccattcccacatgacaatcaaagcac

SEQ ID NO: 21850 - DNA, 33 bp, Homo sapien
agggcctccattcccatatgacaatcaaagcac

SEQ ID NO: 21851 - DNA, 33 bp, Homo sapien
ctgcaacattgccaaccgattggaccctgattc

SEQ ID NO: 21852 - DNA, 33 bp, Homo sapien
ctgcaacattgccaactgattggaccctgattc

SEQ ID NO: 21853 - DNA, 33 bp, Homo sapien
aaacagcaatacttaaagcatgaacagaggaag

SEQ ID NO: 21854 - DNA, 33 bp, Homo sapien
aaacagcaatacttaaggcatgaacagaggaag

SEQ ID NO: 21855 - DNA, 33 bp, Homo sapien
tttaaacagccaaaaacaaccgagatgaggaag

SEQ ID NO: 21856 - DNA, 33 bp, Homo sapien
tttaaacagccaaaaataaccgagatgaggaag

SEQ ID NO: 21857 - DNA, 33 bp, Homo sapien
tgttgggagcttaaaacatcacgttaacttagt

SEQ ID NO: 21858 - DNA, 33 bp, Homo sapien
tgttgggagcttaaaatatcacgttaacttagt

SEQ ID NO: 21859 - DNA, 33 bp, Homo sapien
agcttccttaagaaacagaagttcaagccatac

SEQ ID NO: 21860 - DNA, 33 bp, Homo sapien
agcttccttaagaaaccgaagttcaagccatac

SEQ ID NO: 21861 - DNA, 33 bp, Homo sapien
ttcatacctaacgagacataaaacttgtgaaag

SEQ ID NO: 21862 - DNA, 33 bp, Homo sapien
ttcatacctaacgagagataaaacttgtgaaag

SEQ ID NO: 21863 - DNA, 33 bp, Homo sapien
taataatgagtatgccctaaaattgtgtgtatt

SEQ ID NO: 21864 - DNA, 33 bp, Homo sapien
taataatgagtatgccttaaaattgtgtgtatt

SEQ ID NO: 21865 - DNA, 33 bp, Homo sapien
caaaatgaaaccaaaacgtaggccagcttacag

SEQ ID NO: 21866 - DNA, 33 bp, Homo sapien
caaaatgaaaccaaaatgtaggccagcttacag

SEQ ID NO: 21867 - DNA, 33 bp, Homo sapien
aacatttcatattataccacaggcacacacatc

SEQ ID NO: 21868 - DNA, 33 bp, Homo sapien
aacatttcatattatatcacaggcacacacatc

SEQ ID NO: 21869 - DNA, 33 bp, Homo sapien
atgacaaggcgccttcaccataagaggcattca

SEQ ID NO: 21870 - DNA, 33 bp, Homo sapien
atgacaaggcgccttcgccataagaggcattca

SEQ ID NO: 21871 - DNA, 33 bp, Homo sapien
tttaacaagaaattgacgaggaagaagagaaag

SEQ ID NO: 21872 - DNA, 33 bp, Homo sapien
tttaacaagaaattgatgaggaagaagagaaag

SEQ ID NO: 21873 - DNA, 33 bp, Homo sapien
ccactgttgactatccaaggcatataccctctg

SEQ ID NO: 21874 - DNA, 33 bp, Homo sapien
ccactgttgactatccgaggcatataccctctg

SEQ ID NO: 21875 - DNA, 33 bp, Homo sapien
aacagtggggatgtgacgaaaatgcaggtttgc

SEQ ID NO: 21876 - DNA, 33 bp, Homo sapien
aacagtggggatgtgatgaaaatgcaggtttgc

SEQ ID NO: 21877 - DNA, 33 bp, Homo sapien
ggctgttaactatcaaagtgtctcataaatgga

SEQ ID NO: 21878 - DNA, 33 bp, Homo sapien
ggctgttaactatcaatgtgtctcataaatgga

SEQ ID NO: 21879 - DNA, 33 bp, Homo sapien
aagttaactgttcaaacattaccttaacttttt

SEQ ID NO: 21880 - DNA, 33 bp, Homo sapien
aagttaactgttcaaatattaccttaacttttt

SEQ ID NO: 21881 - DNA, 33 bp, Homo sapien
taccatttgtaaaccacgaagatttcccttgaa

SEQ ID NO: 21882 - DNA, 33 bp, Homo sapien
taccatttgtaaaccatgaagatttcccttgaa

SEQ ID NO: 21883 - DNA, 33 bp, Homo sapien
cctttcatgatttgtacagatttggaacagtgc

SEQ ID NO: 21884 - DNA, 33 bp, Homo sapien
cctttcatgatttgtatagatttggaacagtgc

SEQ ID NO: 21885 - DNA, 33 bp, Homo sapien
atgataattttgctgaccatttttctcagtgct

SEQ ID NO: 21886 - DNA, 33 bp, Homo sapien
atgataattttgctgatcatttttctcagtgct

SEQ ID NO: 21887 - DNA, 33 bp, Homo sapien
ctccaactcacccaaaagtactgttccagatat

SEQ ID NO: 21888 - DNA, 33 bp, Homo sapien
ctccaactcacccaaaggtactgttccagatat

SEQ ID NO: 21889 - DNA, 33 bp, Homo sapien
gatagactattctcataaggctataaatataat

SEQ ID NO: 21890 - DNA, 33 bp, Homo sapien
gatagactattctcatgaggctataaatataat

SEQ ID NO: 21891 - DNA, 33 bp, Homo sapien
ctggggattgcctatacgtgttccatgtctcgc

SEQ ID NO: 21892 - DNA, 33 bp, Homo sapien
ctggggattgcctatatgtgttccatgtctcgc

SEQ ID NO: 21893 - DNA, 33 bp, Homo sapien
gatattttaggtagtaagggggagaaagtatta

SEQ ID NO: 21894 - DNA, 33 bp, Homo sapien
gatattttaggtagtatgggggagaaagtatta

SEQ ID NO: 21895 - DNA, 33 bp, Homo sapien
gcctgagttcttatccacacttattcacttagt

SEQ ID NO: 21896 - DNA, 33 bp, Homo sapien
gcctgagttcttatccgcacttattcacttagt

SEQ ID NO: 21897 - DNA, 33 bp, Homo sapien
aatcatctgaaatgtactaaggtattgctatgt

SEQ ID NO: 21898 - DNA, 33 bp, Homo sapien
aatcatctgaaatgtattaaggtattgctatgt

SEQ ID NO: 21899 - DNA, 33 bp, Homo sapien
tttagttcatttatatcaatgcctttgtctctg

SEQ ID NO: 21900 - DNA, 33 bp, Homo sapien
tttagttcatttatattaatgcctttgtctctg

SEQ ID NO: 21901 - DNA, 33 bp, Homo sapien
aattaacagtagttgaaaacctatcacttcatg

SEQ ID NO: 21902 - DNA, 33 bp, Homo sapien
aattaacagtagttgagaacctatcacttcatg

SEQ ID NO: 21903 - DNA, 33 bp, Homo sapien
tcctccgaggccttccgattccaagacacaaca

SEQ ID NO: 21904 - DNA, 33 bp, Homo sapien
tcctccgaggccttcctattccaagacacaaca

SEQ ID NO: 21905 - DNA, 33 bp, Homo sapien
tttctctctcagaataatagtaccatagattct

SEQ ID NO: 21906 - DNA, 33 bp, Homo sapien
tttctctctcagaatagtagtaccatagattct

SEQ ID NO: 21907 - DNA, 33 bp, Homo sapien
tcttttttcctgtttaccaaaactagatctaat

SEQ ID NO: 21908 - DNA, 33 bp, Homo sapien
tcttttttcctgtttatcaaaactagatctaat

SEQ ID NO: 21909 - DNA, 33 bp, Homo sapien
gatcaccaatgcagaaacaggaaacgtagctaa

SEQ ID NO: 21910 - DNA, 33 bp, Homo sapien
gatcaccaatgcagaagcaggaaacgtagctaa

SEQ ID NO: 21911 - DNA, 33 bp, Homo sapien
ttctcataagtaatgacatctgtttgctttata

SEQ ID NO: 21912 - DNA, 33 bp, Homo sapien
ttctcataagtaatgatatctgtttgctttata

SEQ ID NO: 21913 - DNA, 33 bp, Homo sapien
caagcagtggggcctgaatgacatctggagaac

SEQ ID NO: 21914 - DNA, 33 bp, Homo sapien
caagcagtggggcctggatgacatctggagaac

SEQ ID NO: 21915 - DNA, 33 bp, Homo sapien
agtgtgtccagcatcacataatgggaacattat

SEQ ID NO: 21916 - DNA, 33 bp, Homo sapien
agtgtgtccagcatcagataatgggaacattat

SEQ ID NO: 21917 - DNA, 33 bp, Homo sapien
atcctacctttgttaactgtcttgtagaactac

SEQ ID NO: 21918 - DNA, 33 bp, Homo sapien
atcctacctttgttaattgtcttgtagaactac

SEQ ID NO: 21919 - DNA, 33 bp, Homo sapien
aaattgctttttaacactatggactgacctatc

SEQ ID NO: 21920 - DNA, 33 bp, Homo sapien
aaattgctttttaacattatggactgacctatc

SEQ ID NO: 21921 - DNA, 33 bp, Homo sapien
tggactgacctatcaaaatattagtaagaaagg

SEQ ID NO: 21922 - DNA, 33 bp, Homo sapien
tggactgacctatcaagatattagtaagaaagg

SEQ ID NO: 21923 - DNA, 33 bp, Homo sapien
ctagtaaataagctcacgtttggggttagaaga

SEQ ID NO: 21924 - DNA, 33 bp, Homo sapien
ctagtaaataagctcatgtttggggttagaaga

SEQ ID NO: 21925 - DNA, 33 bp, Homo sapien
aacattgactatttcaaagctccacttggccac

SEQ ID NO: 21926 - DNA, 33 bp, Homo sapien
aacattgactatttcagagctccacttggccac

SEQ ID NO: 21927 - DNA, 33 bp, Homo sapien
ttaataccaacttcgacgctgccatcttcctca

SEQ ID NO: 21928 - DNA, 33 bp, Homo sapien
ttaataccaacttcgaggctgccatcttcctca

SEQ ID NO: 21929 - DNA, 33 bp, Homo sapien
ccagatataaaggataaattgcaggccaggcac

SEQ ID NO: 21930 - DNA, 33 bp, Homo sapien
ccagatataaaggatacattgcaggccaggcac

SEQ ID NO: 21931 - DNA, 33 bp, Homo sapien
accatctctcatggaccgccagtgctgcaatca

SEQ ID NO: 21932 - DNA, 33 bp, Homo sapien
accatctctcatggactgccagtgctgcaatca

SEQ ID NO: 21933 - DNA, 33 bp, Homo sapien
ttataaggatcaaatgcatcaaggtggagagta

SEQ ID NO: 21934 - DNA, 33 bp, Homo sapien
ttataaggatcaaatgtatcaaggtggagagta

SEQ ID NO: 21935 - DNA, 33 bp, Homo sapien
tcctcccagcaacacaagcaagattcttagcca

SEQ ID NO: 21936 - DNA, 33 bp, Homo sapien
tcctcccagcaacacacgcaagattcttagcca

SEQ ID NO: 21937 - DNA, 33 bp, Homo sapien
agaacttaactcagacacatcttgctgcagagc

SEQ ID NO: 21938 - DNA, 33 bp, Homo sapien
agaacttaactcagacgcatcttgctgcagagc

SEQ ID NO: 21939 - DNA, 33 bp, Homo sapien
ctgccaaacaccatgaagcaaaaagctgggtca

SEQ ID NO: 21940 - DNA, 33 bp, Homo sapien
ctgccaaacaccatgaggcaaaaagctgggtca

SEQ ID NO: 21941 - DNA, 33 bp, Homo sapien
taccacaaaaatgttacattactgcccaatgtg

SEQ ID NO: 21942 - DNA, 33 bp, Homo sapien
taccacaaaaatgttatattactgcccaatgtg

SEQ ID NO: 21943 - DNA, 33 bp, Homo sapien
cagaatgtagtcaatcaaaattatacttacttt

SEQ ID NO: 21944 - DNA, 33 bp, Homo sapien
cagaatgtagtcaatcgaaattatacttacttt

SEQ ID NO: 21945 - DNA, 33 bp, Homo sapien
tatgatttctaagtccacaagttataatggtca

SEQ ID NO: 21946 - DNA, 33 bp, Homo sapien
tatgatttctaagtccgcaagttataatggtca

SEQ ID NO: 21947 - DNA, 33 bp, Homo sapien
gccgatgcctcatcacacatttgtactcatcag

SEQ ID NO: 21948 - DNA, 33 bp, Homo sapien
gccgatgcctcatcacgcatttgtactcatcag

SEQ ID NO: 21949 - DNA, 33 bp, Homo sapien
gtctcaaaatatcccacgaaaacaggcctgtct

SEQ ID NO: 21950 - DNA, 33 bp, Homo sapien
gtctcaaaatatcccatgaaaacaggcctgtct

SEQ ID NO: 21951 - DNA, 33 bp, Homo sapien
tttaccgtttcccaacaatgctcaggcccaggc

SEQ ID NO: 21952 - DNA, 33 bp, Homo sapien
tttaccgtttcccaacgatgctcaggcccaggc

SEQ ID NO: 21953 - DNA, 33 bp, Homo sapien
atcaacctctgcaaaactccgatcttagtaatt

SEQ ID NO: 21954 - DNA, 33 bp, Homo sapien
atcaacctctgcaaaattccgatcttagtaatt

SEQ ID NO: 21955 - DNA, 33 bp, Homo sapien
ttaatctgctgaagaacgcctacgggcgcatta

SEQ ID NO: 21956 - DNA, 33 bp, Homo sapien
ttaatctgctgaagaatgcctacgggcgcatta

SEQ ID NO: 21957 - DNA, 33 bp, Homo sapien
ttttttaaggtatcgtcaaatgccaagatgtga

SEQ ID NO: 21958 - DNA, 33 bp, Homo sapien
ttttttaaggtatcgttaaatgccaagatgtga

SEQ ID NO: 21959 - DNA, 33 bp, Homo sapien
taaatgtttgttgacaaatctggatggttcatt

SEQ ID NO: 21960 - DNA, 33 bp, Homo sapien
taaatgtttgttgacagatctggatggttcatt

SEQ ID NO: 21961 - DNA, 33 bp, Homo sapien
taatgatttgatggccacaggaggtagctctaa

SEQ ID NO: 21962 - DNA, 33 bp, Homo sapien
taatgatttgatggccgcaggaggtagctctaa

SEQ ID NO: 21963 - DNA, 33 bp, Homo sapien
gcttacttgaagagacaattagcataagtaaat

SEQ ID NO: 21964 - DNA, 33 bp, Homo sapien
gcttacttgaagagacgattagcataagtaaat

SEQ ID NO: 21965 - DNA, 33 bp, Homo sapien
tgactcatcaaaatcaccaatgactagcatata

SEQ ID NO: 21966 - DNA, 33 bp, Homo sapien
tgactcatcaaaatcatcaatgactagcatata

SEQ ID NO: 21967 - DNA, 33 bp, Homo sapien
gtgtaaaatgcttacaggagattgaataatcat

SEQ ID NO: 21968 - DNA, 33 bp, Homo sapien
gtgtaaaatgcttacatgagattgaataatcat

SEQ ID NO: 21969 - DNA, 33 bp, Homo sapien
gagaggagttgaatgacggagtccctttaagac

SEQ ID NO: 21970 - DNA, 33 bp, Homo sapien
gagaggagttgaatgatggagtccctttaagac

SEQ ID NO: 21971 - DNA, 33 bp, Homo sapien
gataagtgcttagtgaaacgagagttaacacga

SEQ ID NO: 21972 - DNA, 33 bp, Homo sapien
gataagtgcttagtgagacgagagttaacacga

SEQ ID NO: 21973 - DNA, 33 bp, Homo sapien
cttaggcctttgcgcacactatccattggcata

SEQ ID NO: 21974 - DNA, 33 bp, Homo sapien
cttaggcctttgcgcatactatccattggcata

SEQ ID NO: 21975 - DNA, 33 bp, Homo sapien
tgactggaacataagacgagagaagtggaaaga

SEQ ID NO: 21976 - DNA, 33 bp, Homo sapien
tgactggaacataagatgagagaagtggaaaga

SEQ ID NO: 21977 - DNA, 33 bp, Homo sapien
tcattctttacagcaaacaatacaataaaggca

SEQ ID NO: 21978 - DNA, 33 bp, Homo sapien
tcattctttacagcaagcaatacaataaaggca

SEQ ID NO: 21979 - DNA, 33 bp, Homo sapien
ttcttcaatttcctccaattgttaggcaaatcg

SEQ ID NO: 21980 - DNA, 33 bp, Homo sapien
ttcttcaatttcctccgattgttaggcaaatcg

SEQ ID NO: 21981 - DNA, 33 bp, Homo sapien
ttagtccttcttggcaactggtttcatcatggt

SEQ ID NO: 21982 - DNA, 33 bp, Homo sapien
ttagtccttcttggcagctggtttcatcatggt

SEQ ID NO: 21983 - DNA, 33 bp, Homo sapien
ttccttatggattctcactttgcagaggttaca

SEQ ID NO: 21984 - DNA, 33 bp, Homo sapien
ttccttatggattctccctttgcagaggttaca

SEQ ID NO: 21985 - DNA, 33 bp, Homo sapien
caagataacctgtcaacgtagtaggaaaacagg

SEQ ID NO: 21986 - DNA, 33 bp, Homo sapien
caagataacctgtcaatgtagtaggaaaacagg

SEQ ID NO: 21987 - DNA, 33 bp, Homo sapien
tgaatgcagtagtcacaaacccaattcacctct

SEQ ID NO: 21988 - DNA, 33 bp, Homo sapien
tgaatgcagtagtcacgaacccaattcacctct

SEQ ID NO: 21989 - DNA, 33 bp, Homo sapien
tctttgctacttggaccgaaccccatcttggga

SEQ ID NO: 21990 - DNA, 33 bp, Homo sapien
tctttgctacttggactgaaccccatcttggga

SEQ ID NO: 21991 - DNA, 33 bp, Homo sapien
tggtcgttagcttacacctgccccccaccaaca

SEQ ID NO: 21992 - DNA, 33 bp, Homo sapien
tggtcgttagcttacatctgccccccaccaaca

SEQ ID NO: 21993 - DNA, 33 bp, Homo sapien
ccagcaaattggcatccgagccaaaatgagagt

SEQ ID NO: 21994 - DNA, 33 bp, Homo sapien
ccagcaaattggcatctgagccaaaatgagagt

SEQ ID NO: 21995 - DNA, 33 bp, Homo sapien
ggttatgtcccatatcaagggcaggagattcaa

SEQ ID NO: 21996 - DNA, 33 bp, Homo sapien
ggttatgtcccatatcgagggcaggagattcaa

SEQ ID NO: 21997 - DNA, 33 bp, Homo sapien
gctgtattgagtcttaagggacaggagttgtag

SEQ ID NO: 21998 - DNA, 33 bp, Homo sapien
gctgtattgagtcttatgggacaggagttgtag

SEQ ID NO: 21999 - DNA, 33 bp, Homo sapien
ctttgccatcgggttaagttactatctgcaatc

SEQ ID NO: 22000 - DNA, 33 bp, Homo sapien
ctttgccatcgggttaggttactatctgcaatc

SEQ ID NO: 22001 - DNA, 33 bp, Homo sapien
ccccacacttcctgaaactgcttgtcaacttgg

SEQ ID NO: 22002 - DNA, 33 bp, Homo sapien
ccccacacttcctgaagctgcttgtcaacttgg

SEQ ID NO: 22003 - DNA, 33 bp, Homo sapien
agagaagaagtgtgacagcccagatcacaagca

SEQ ID NO: 22004 - DNA, 33 bp, Homo sapien
agagaagaagtgtgacggcccagatcacaagca

SEQ ID NO: 22005 - DNA, 33 bp, Homo sapien
taatgctcctccaaaaccaggccagagaaaacc

SEQ ID NO: 22006 - DNA, 33 bp, Homo sapien
taatgctcctccaaaatcaggccagagaaaacc

SEQ ID NO: 22007 - DNA, 33 bp, Homo sapien
tttttggctgtattggaaaatcatcttattaaa

SEQ ID NO: 22008 - DNA, 33 bp, Homo sapien
tttttggctgtattgggaaatcatcttattaaa

SEQ ID NO: 22009 - DNA, 33 bp, Homo sapien
gagggatgagtttacacaaaagtgacataagac

SEQ ID NO: 22010 - DNA, 33 bp, Homo sapien
gagggatgagtttacataaaagtgacataagac

SEQ ID NO: 22011 - DNA, 33 bp, Homo sapien
tgggagatgacagccaggattcaaatccagcca

SEQ ID NO: 22012 - DNA, 33 bp, Homo sapien
tgggagatgacagccatgattcaaatccagcca

SEQ ID NO: 22013 - DNA, 33 bp, Homo sapien
tcaagcacaacacaagaacagactgactccaat

SEQ ID NO: 22014 - DNA, 33 bp, Homo sapien
tcaagcacaacacaaggacagactgactccaat

SEQ ID NO: 22015 - DNA, 33 bp, Homo sapien
atgatctgatatacgacgggctgaattcctaat

SEQ ID NO: 22016 - DNA, 33 bp, Homo sapien
atgatctgatatacgatgggctgaattcctaat

SEQ ID NO: 22017 - DNA, 33 bp, Homo sapien
acactgagcattgcccactggaaggaaactccc

SEQ ID NO: 22018 - DNA, 33 bp, Homo sapien
acactgagcattgcccgctggaaggaaactccc

SEQ ID NO: 22019 - DNA, 33 bp, Homo sapien
gcagtgagctgagatcaaaagaaatggctttat

SEQ ID NO: 22020 - DNA, 33 bp, Homo sapien
gcagtgagctgagatcgaaagaaatggctttat

SEQ ID NO: 22021 - DNA, 33 bp, Homo sapien
ctgaccttcacaagctaacagattagtagggga

SEQ ID NO: 22022 - DNA, 33 bp, Homo sapien
ctgaccttcacaagcttacagattagtagggga

SEQ ID NO: 22023 - DNA, 33 bp, Homo sapien
agtaaggaacttgatccagggcaatgggaagaa

SEQ ID NO: 22024 - DNA, 33 bp, Homo sapien
agtaaggaacttgatctagggcaatgggaagaa

SEQ ID NO: 22025 - DNA, 33 bp, Homo sapien
ttctaaactggctagaaaacagctggaggcacg

SEQ ID NO: 22026 - DNA, 33 bp, Homo sapien
ttctaaactggctagagaacagctggaggcacg

SEQ ID NO: 22027 - DNA, 33 bp, Homo sapien
gctatctgaagaatgcaccttttatctaagcaa

SEQ ID NO: 22028 - DNA, 33 bp, Homo sapien
gctatctgaagaatgcgccttttatctaagcaa

SEQ ID NO: 22029 - DNA, 33 bp, Homo sapien
gacagaaactaaaacccatgtcttcaggcacta

SEQ ID NO: 22030 - DNA, 33 bp, Homo sapien
gacagaaactaaaacctatgtcttcaggcacta

SEQ ID NO: 22031 - DNA, 33 bp, Homo sapien
tgtcagggagctttcagtccagcaagaagcatt

SEQ ID NO: 22032 - DNA, 33 bp, Homo sapien
tgtcagggagctttcattccagcaagaagcatt

SEQ ID NO: 22033 - DNA, 33 bp, Homo sapien
cactaaacaatacagcaaaactcctgtgtatgc

SEQ ID NO: 22034 - DNA, 33 bp, Homo sapien
cactaaacaatacagcgaaactcctgtgtatgc

SEQ ID NO: 22035 - DNA, 33 bp, Homo sapien
agagaatttggtagtaacaaaggattaaaggag

SEQ ID NO: 22036 - DNA, 33 bp, Homo sapien
agagaatttggtagtatcaaaggattaaaggag

SEQ ID NO: 22037 - DNA, 33 bp, Homo sapien
ggcttggaaaccacaacttggagtaaatgtttc

SEQ ID NO: 22038 - DNA, 33 bp, Homo sapien
ggcttggaaaccacaatttggagtaaatgtttc

SEQ ID NO: 22039 - DNA, 33 bp, Homo sapien
catgagatttgtaaagaaaagcactgggttagg

SEQ ID NO: 22040 - DNA, 33 bp, Homo sapien
catgagatttgtaaaggaaagcactgggttagg

SEQ ID NO: 22041 - DNA, 33 bp, Homo sapien
tcacactgaggaccagcacatgagatttgtaaa

SEQ ID NO: 22042 - DNA, 33 bp, Homo sapien
tcacactgaggaccagtacatgagatttgtaaa

SEQ ID NO: 22043 - DNA, 33 bp, Homo sapien
aaactccattattccacatttaaactggggacg

SEQ ID NO: 22044 - DNA, 33 bp, Homo sapien
aaactccattattccatatttaaactggggacg

SEQ ID NO: 22045 - DNA, 33 bp, Homo sapien
tgggtaagtcctttacccatccttactcagtgc

SEQ ID NO: 22046 - DNA, 33 bp, Homo sapien
tgggtaagtcctttactcatccttactcagtgc

SEQ ID NO: 22047 - DNA, 33 bp, Homo sapien
attcttagcacgaagcaaaagtcttaaattttt

SEQ ID NO: 22048 - DNA, 33 bp, Homo sapien
attcttagcacgaagcgaaagtcttaaattttt

SEQ ID NO: 22049 - DNA, 33 bp, Homo sapien
tgctgctggggcagtcactctgctggaaataga

SEQ ID NO: 22050 - DNA, 33 bp, Homo sapien
tgctgctggggcagtcgctctgctggaaataga

SEQ ID NO: 22051 - DNA, 33 bp, Homo sapien
ttacttagaaggctccaaaagcacagaaattat

SEQ ID NO: 22052 - DNA, 33 bp, Homo sapien
ttacttagaaggctccgaaagcacagaaattat

SEQ ID NO: 22053 - DNA, 33 bp, Homo sapien
ctgcccaagctcttaacggcccagactgaagcc

SEQ ID NO: 22054 - DNA, 33 bp, Homo sapien
ctgcccaagctcttaatggcccagactgaagcc

SEQ ID NO: 22055 - DNA, 33 bp, Homo sapien
atttgaaatttgtaggcaggatgttttggagtg

SEQ ID NO: 22056 - DNA, 33 bp, Homo sapien
atttgaaatttgtaggtaggatgttttggagtg

SEQ ID NO: 22057 - DNA, 33 bp, Homo sapien
tacaatgttctcagaacgttaatgtgttacagg

SEQ ID NO: 22058 - DNA, 33 bp, Homo sapien
tacaatgttctcagaatgttaatgtgttacagg

SEQ ID NO: 22059 - DNA, 33 bp, Homo sapien
ttgctcaccccgtatccaccctgtaggatgccc

SEQ ID NO: 22060 - DNA, 33 bp, Homo sapien
ttgctcaccccgtatctaccctgtaggatgccc

SEQ ID NO: 22061 - DNA, 33 bp, Homo sapien
ggcaacgatctgggaaaaatgtcacagggccca

SEQ ID NO: 22062 - DNA, 33 bp, Homo sapien
ggcaacgatctgggaagaatgtcacagggccca

SEQ ID NO: 22063 - DNA, 33 bp, Homo sapien
tgaccagctgtactggaagaatgaccttgaact

SEQ ID NO: 22064 - DNA, 33 bp, Homo sapien
tgaccagctgtactggtagaatgaccttgaact

SEQ ID NO: 22065 - DNA, 33 bp, Homo sapien
acctatggttaatgaaagtccaaaaatattaag

SEQ ID NO: 22066 - DNA, 33 bp, Homo sapien
acctatggttaatgaaggtccaaaaatattaag

SEQ ID NO: 22067 - DNA, 33 bp, Homo sapien
acaaaaactatgtgaacatggtctttctctctc

SEQ ID NO: 22068 - DNA, 33 bp, Homo sapien
acaaaaactatgtgaatatggtctttctctctc

SEQ ID NO: 22069 - DNA, 33 bp, Homo sapien
gtgctgaacatattgaaggtgctcattgcaagg

SEQ ID NO: 22070 - DNA, 33 bp, Homo sapien
gtgctgaacatattgagggtgctcattgcaagg

SEQ ID NO: 22071 - DNA, 33 bp, Homo sapien
cgccactatctcagcactccgagcccacgcaat

SEQ ID NO: 22072 - DNA, 33 bp, Homo sapien
cgccactatctcagcagtccgagcccacgcaat

SEQ ID NO: 22073 - DNA, 33 bp, Homo sapien
caagaacaagcctttcaagagggaacaaatgga

SEQ ID NO: 22074 - DNA, 33 bp, Homo sapien
caagaacaagcctttcgagagggaacaaatgga

SEQ ID NO: 22075 - DNA, 33 bp, Homo sapien
gtgcatgcatcatacccggctttgattcttaat

SEQ ID NO: 22076 - DNA, 33 bp, Homo sapien
gtgcatgcatcatacctggctttgattcttaat

SEQ ID NO: 22077 - DNA, 33 bp, Homo sapien
agttggatcggccacacagtacagctcatcact

SEQ ID NO: 22078 - DNA, 33 bp, Homo sapien
agttggatcggccacatagtacagctcatcact

SEQ ID NO: 22079 - DNA, 33 bp, Homo sapien
ctcagggtcgtaatatcaatagcatctccatcc

SEQ ID NO: 22080 - DNA, 33 bp, Homo sapien
ctcagggtcgtaatattaatagcatctccatcc

SEQ ID NO: 22081 - DNA, 33 bp, Homo sapien
ggatgaagaaatgggaagctgacagcactggac

SEQ ID NO: 22082 - DNA, 33 bp, Homo sapien
ggatgaagaaatgggatgctgacagcactggac

SEQ ID NO: 22083 - DNA, 33 bp, Homo sapien
aagaagagtttattcacagtgcttagatatgtg

SEQ ID NO: 22084 - DNA, 33 bp, Homo sapien
aagaagagtttattcagagtgcttagatatgtg

SEQ ID NO: 22085 - DNA, 33 bp, Homo sapien
tctctgcccttgccacagtcttttgcctgattt

SEQ ID NO: 22086 - DNA, 33 bp, Homo sapien
tctctgcccttgccaccgtcttttgcctgattt

SEQ ID NO: 22087 - DNA, 33 bp, Homo sapien
ttcagctggaaatacaaatctgaagctgaggag

SEQ ID NO: 22088 - DNA, 33 bp, Homo sapien
ttcagctggaaatacagatctgaagctgaggag

SEQ ID NO: 22089 - DNA, 33 bp, Homo sapien
gagctacagccactaacgctggtccctcagtca

SEQ ID NO: 22090 - DNA, 33 bp, Homo sapien
gagctacagccactaatgctggtccctcagtca

SEQ ID NO: 22091 - DNA, 33 bp, Homo sapien
attttttccaaaataacaagcaactcctggtaa

SEQ ID NO: 22092 - DNA, 33 bp, Homo sapien
attttttccaaaataataagcaactcctggtaa

SEQ ID NO: 22093 - DNA, 33 bp, Homo sapien
cgtaataatgcgtttccatggtcctattttaac

SEQ ID NO: 22094 - DNA, 33 bp, Homo sapien
cgtaataatgcgtttctatggtcctattttaac

SEQ ID NO: 22095 - DNA, 33 bp, Homo sapien
aacaataagcggtcaacttcttttaagaatagg

SEQ ID NO: 22096 - DNA, 33 bp, Homo sapien
aacaataagcggtcaatttcttttaagaatagg

SEQ ID NO: 22097 - DNA, 33 bp, Homo sapien
ttgctagtgtccacagaccacaaaacaataagc

SEQ ID NO: 22098 - DNA, 33 bp, Homo sapien
ttgctagtgtccacaggccacaaaacaataagc

SEQ ID NO: 22099 - DNA, 33 bp, Homo sapien
ctgtgccataggctaaacattctatttcttact

SEQ ID NO: 22100 - DNA, 33 bp, Homo sapien
ctgtgccataggctaagcattctatttcttact

SEQ ID NO: 22101 - DNA, 33 bp, Homo sapien
tctgttctcttccccaaacctcacatttacaac

SEQ ID NO: 22102 - DNA, 33 bp, Homo sapien
tctgttctcttccccagacctcacatttacaac

SEQ ID NO: 22103 - DNA, 33 bp, Homo sapien
aaaggagacaatcaaacattatgtatgtacctc

SEQ ID NO: 22104 - DNA, 33 bp, Homo sapien
aaaggagacaatcaaatattatgtatgtacctc

SEQ ID NO: 22105 - DNA, 33 bp, Homo sapien
tgaaaataaaatgagcacctggctccagtgtct

SEQ ID NO: 22106 - DNA, 33 bp, Homo sapien
tgaaaataaaatgagcgcctggctccagtgtct

SEQ ID NO: 22107 - DNA, 33 bp, Homo sapien
cagcaagcaaggaaaacaatttgggtggctttg

SEQ ID NO: 22108 - DNA, 33 bp, Homo sapien
cagcaagcaaggaaaataatttgggtggctttg

SEQ ID NO: 22109 - DNA, 33 bp, Homo sapien
cctcccattgtctacactatcaaaaatagcagc

SEQ ID NO: 22110 - DNA, 33 bp, Homo sapien
cctcccattgtctacattatcaaaaatagcagc

SEQ ID NO: 22111 - DNA, 33 bp, Homo sapien
tccaagactgtttcaaattccaaatacatggat

SEQ ID NO: 22112 - DNA, 33 bp, Homo sapien
tccaagactgtttcaagttccaaatacatggat

SEQ ID NO: 22113 - DNA, 33 bp, Homo sapien
caggactccatgtagaaaaattgtcattggtga

SEQ ID NO: 22114 - DNA, 33 bp, Homo sapien
caggactccatgtagagaaattgtcattggtga

SEQ ID NO: 22115 - DNA, 33 bp, Homo sapien
tcactggggaaaacgcaaataactcagtatatt

SEQ ID NO: 22116 - DNA, 33 bp, Homo sapien
tcactggggaaaacgcgaataactcagtatatt

SEQ ID NO: 22117 - DNA, 33 bp, Homo sapien
tctgaattcttcctctaactataaggatactaa

SEQ ID NO: 22118 - DNA, 33 bp, Homo sapien
tctgaattcttcctcttactataaggatactaa

SEQ ID NO: 22119 - DNA, 33 bp, Homo sapien
aagagtggggaaatgacaattagttgtggtcac

SEQ ID NO: 22120 - DNA, 33 bp, Homo sapien
aagagtggggaaatgataattagttgtggtcac

SEQ ID NO: 22121 - DNA, 33 bp, Homo sapien
ggacttgaccctcagaaagttatagaaatggtt

SEQ ID NO: 22122 - DNA, 33 bp, Homo sapien
ggacttgaccctcagagagttatagaaatggtt

SEQ ID NO: 22123 - DNA, 33 bp, Homo sapien
cccgaaacttttttcccagtttctgtgtgctcc

SEQ ID NO: 22124 - DNA, 33 bp, Homo sapien
cccgaaacttttttcctagtttctgtgtgctcc

SEQ ID NO: 22125 - DNA, 33 bp, Homo sapien
cttttcaaaacaccaaccacattaagcttcagg

SEQ ID NO: 22126 - DNA, 33 bp, Homo sapien
cttttcaaaacaccaagcacattaagcttcagg

SEQ ID NO: 22127 - DNA, 33 bp, Homo sapien
tttcactttatagtaccggaattctggaaagga

SEQ ID NO: 22128 - DNA, 33 bp, Homo sapien
tttcactttatagtactggaattctggaaagga

SEQ ID NO: 22129 - DNA, 33 bp, Homo sapien
taaataaatgtaaagacataagcagaatttcta

SEQ ID NO: 22130 - DNA, 33 bp, Homo sapien
taaataaatgtaaagagataagcagaatttcta

SEQ ID NO: 22131 - DNA, 33 bp, Homo sapien
attctgaaaagacttaaggatgcatagaaataa

SEQ ID NO: 22132 - DNA, 33 bp, Homo sapien
attctgaaaagacttagggatgcatagaaataa

SEQ ID NO: 22133 - DNA, 33 bp, Homo sapien
gtgaaaagcaattggccagaatctaagccttga

SEQ ID NO: 22134 - DNA, 33 bp, Homo sapien
gtgaaaagcaattggcgagaatctaagccttga

SEQ ID NO: 22135 - DNA, 33 bp, Homo sapien
aagtggatagagtttagatagattggagtatga

SEQ ID NO: 22136 - DNA, 33 bp, Homo sapien
aagtggatagagtttatatagattggagtatga

SEQ ID NO: 22137 - DNA, 33 bp, Homo sapien
tgcaaatatgacattcagaaagatgaagataaa

SEQ ID NO: 22138 - DNA, 33 bp, Homo sapien
tgcaaatatgacattcggaaagatgaagataaa

SEQ ID NO: 22139 - DNA, 33 bp, Homo sapien
agtcaagagacagatagacaaggctgaattact

SEQ ID NO: 22140 - DNA, 33 bp, Homo sapien
agtcaagagacagatatacaaggctgaattact

SEQ ID NO: 22141 - DNA, 33 bp, Homo sapien
ctaattaaggatgatgccaattaatctctttat

SEQ ID NO: 22142 - DNA, 33 bp, Homo sapien
ctaattaaggatgatgtcaattaatctctttat

SEQ ID NO: 22143 - DNA, 33 bp, Homo sapien
gaacataacactttgacccaacaaacacacctc

SEQ ID NO: 22144 - DNA, 33 bp, Homo sapien
gaacataacactttgatccaacaaacacacctc

SEQ ID NO: 22145 - DNA, 33 bp, Homo sapien
tctttccagtcttccaactcaattcgtaaaaca

SEQ ID NO: 22146 - DNA, 33 bp, Homo sapien
tctttccagtcttccagctcaattcgtaaaaca

SEQ ID NO: 22147 - DNA, 33 bp, Homo sapien
aataaagactgtttacgcctcatgcttggcctg

SEQ ID NO: 22148 - DNA, 33 bp, Homo sapien
aataaagactgtttactcctcatgcttggcctg

SEQ ID NO: 22149 - DNA, 33 bp, Homo sapien
agtcaattttgtaagacgttaatattgttccct

SEQ ID NO: 22150 - DNA, 33 bp, Homo sapien
agtcaattttgtaagatgttaatattgttccct

SEQ ID NO: 22151 - DNA, 33 bp, Homo sapien
agtcatacaaaaaaataaactactcggccaggc

SEQ ID NO: 22152 - DNA, 33 bp, Homo sapien
agtcatacaaaaaaatgaactactcggccaggc

SEQ ID NO: 22153 - DNA, 33 bp, Homo sapien
caccttatctgttaaaaccttaaatgagatgag

SEQ ID NO: 22154 - DNA, 33 bp, Homo sapien
caccttatctgttaaacccttaaatgagatgag

SEQ ID NO: 22155 - DNA, 33 bp, Homo sapien
ggccataaagataagacgtggtgatcagagagt

SEQ ID NO: 22156 - DNA, 33 bp, Homo sapien
ggccataaagataagaggtggtgatcagagagt

SEQ ID NO: 22157 - DNA, 33 bp, Homo sapien
tcgccaccagatgggacaggacaaaccacaaga

SEQ ID NO: 22158 - DNA, 33 bp, Homo sapien
tcgccaccagatgggataggacaaaccacaaga

SEQ ID NO: 22159 - DNA, 33 bp, Homo sapien
ttcactccatgaactaagagataaggccttgga

SEQ ID NO: 22160 - DNA, 33 bp, Homo sapien
ttcactccatgaactaggagataaggccttgga

SEQ ID NO: 22161 - DNA, 33 bp, Homo sapien
ttaagagtagggggaaaaatcacttcattttat

SEQ ID NO: 22162 - DNA, 33 bp, Homo sapien
ttaagagtagggggaagaatcacttcattttat

SEQ ID NO: 22163 - DNA, 33 bp, Homo sapien
ttgctttgtaagttaaatcacttgttgcagtaa

SEQ ID NO: 22164 - DNA, 33 bp, Homo sapien
ttgctttgtaagttaagtcacttgttgcagtaa

SEQ ID NO: 22165 - DNA, 33 bp, Homo sapien
tgactcttggaagaacggttctgtggagaagag

SEQ ID NO: 22166 - DNA, 33 bp, Homo sapien
tgactcttggaagaactgttctgtggagaagag

SEQ ID NO: 22167 - DNA, 33 bp, Homo sapien
aaataaaagcagacgacatatgtccagcactga

SEQ ID NO: 22168 - DNA, 33 bp, Homo sapien
aaataaaagcagacgatatatgtccagcactga

SEQ ID NO: 22169 - DNA, 33 bp, Homo sapien
ttttttgtggattacccaggatttactttctgt

SEQ ID NO: 22170 - DNA, 33 bp, Homo sapien
ttttttgtggattacctaggatttactttctgt

SEQ ID NO: 22171 - DNA, 33 bp, Homo sapien
ctttcagctcacataccgtaaacaagtgtccct

SEQ ID NO: 22172 - DNA, 33 bp, Homo sapien
ctttcagctcacatacggtaaacaagtgtccct

SEQ ID NO: 22173 - DNA, 33 bp, Homo sapien
atttcagccagttcaaactatacagctaattgg

SEQ ID NO: 22174 - DNA, 33 bp, Homo sapien
atttcagccagttcaagctatacagctaattgg

SEQ ID NO: 22175 - DNA, 33 bp, Homo sapien
acaatccttccagttacataagccaaaaaccta

SEQ ID NO: 22176 - DNA, 33 bp, Homo sapien
acaatccttccagttatataagccaaaaaccta

SEQ ID NO: 22177 - DNA, 33 bp, Homo sapien
aacctggtcctctttcaatgttctctacctcgg

SEQ ID NO: 22178 - DNA, 33 bp, Homo sapien
aacctggtcctctttcgatgttctctacctcgg

SEQ ID NO: 22179 - DNA, 33 bp, Homo sapien
agaaattaaccttaaacactgctaccacaacaa

SEQ ID NO: 22180 - DNA, 33 bp, Homo sapien
agaaattaaccttaaatactgctaccacaacaa

SEQ ID NO: 22181 - DNA, 33 bp, Homo sapien
taatgacaccacatagaataaacaggaattttg

SEQ ID NO: 22182 - DNA, 33 bp, Homo sapien
taatgacaccacataggataaacaggaattttg

SEQ ID NO: 22183 - DNA, 33 bp, Homo sapien
cctttttccagaaaaaatcctcttacatcaagt

SEQ ID NO: 22184 - DNA, 33 bp, Homo sapien
cctttttccagaaaaattcctcttacatcaagt

SEQ ID NO: 22185 - DNA, 33 bp, Homo sapien
atatactatatacctcaacataacagtgcacag

SEQ ID NO: 22186 - DNA, 33 bp, Homo sapien
atatactatatacctcgacataacagtgcacag

SEQ ID NO: 22187 - DNA, 33 bp, Homo sapien
actgtcttaacacttacaaaaatctgacaatat

SEQ ID NO: 22188 - DNA, 33 bp, Homo sapien
actgtcttaacacttataaaaatctgacaatat

SEQ ID NO: 22189 - DNA, 33 bp, Homo sapien
agttattctgaagaaacgtacaggaaaatattt

SEQ ID NO: 22190 - DNA, 33 bp, Homo sapien
agttattctgaagaaatgtacaggaaaatattt

SEQ ID NO: 22191 - DNA, 33 bp, Homo sapien
gaggacctctgtcacaagaagaaagattttaaa

SEQ ID NO: 22192 - DNA, 33 bp, Homo sapien
gaggacctctgtcacaggaagaaagattttaaa

SEQ ID NO: 22193 - DNA, 33 bp, Homo sapien
aaatatacttcaatcacgttttaatacaagggt

SEQ ID NO: 22194 - DNA, 33 bp, Homo sapien
aaatatacttcaatcatgttttaatacaagggt

SEQ ID NO: 22195 - DNA, 33 bp, Homo sapien
gggagttaggtgatgagaagaatttgatagctc

SEQ ID NO: 22196 - DNA, 33 bp, Homo sapien
gggagttaggtgatgataagaatttgatagctc

SEQ ID NO: 22197 - DNA, 33 bp, Homo sapien
ttatagttataggggacaatgaagacagattgt

SEQ ID NO: 22198 - DNA, 33 bp, Homo sapien
ttatagttataggggagaatgaagacagattgt

SEQ ID NO: 22199 - DNA, 33 bp, Homo sapien
aagttagtaaaagctcaagaaaatgttaccttt

SEQ ID NO: 22200 - DNA, 33 bp, Homo sapien
aagttagtaaaagctcgagaaaatgttaccttt

SEQ ID NO: 22201 - DNA, 33 bp, Homo sapien
tgtatgtaatgtagacagatgttaagaaggtgt

SEQ ID NO: 22202 - DNA, 33 bp, Homo sapien
tgtatgtaatgtagaccgatgttaagaaggtgt

SEQ ID NO: 22203 - DNA, 33 bp, Homo sapien
cataaaagttctgggcaaagagcactctaggca

SEQ ID NO: 22204 - DNA, 33 bp, Homo sapien
cataaaagttctgggcgaagagcactctaggca

SEQ ID NO: 22205 - DNA, 33 bp, Homo sapien
tgaatccctttttgtcaatgtgttaaccaccag

SEQ ID NO: 22206 - DNA, 33 bp, Homo sapien
tgaatccctttttgtccatgtgttaaccaccag

SEQ ID NO: 22207 - DNA, 33 bp, Homo sapien
tcagtataaaggctcaaagaaatagcaatattg

SEQ ID NO: 22208 - DNA, 33 bp, Homo sapien
tcagtataaaggctcagagaaatagcaatattg

SEQ ID NO: 22209 - DNA, 33 bp, Homo sapien
tgtgtctgcaataccaactctaaatataatatt

SEQ ID NO: 22210 - DNA, 33 bp, Homo sapien
tgtgtctgcaataccatctctaaatataatatt

SEQ ID NO: 22211 - DNA, 33 bp, Homo sapien
aatgaatagtgttgtcacccttgttgaaagtca

SEQ ID NO: 22212 - DNA, 33 bp, Homo sapien
aatgaatagtgttgtcgcccttgttgaaagtca

SEQ ID NO: 22213 - DNA, 33 bp, Homo sapien
actagtttggaaaaaaatacgaatctttatatt

SEQ ID NO: 22214 - DNA, 33 bp, Homo sapien
actagtttggaaaaaattacgaatctttatatt

SEQ ID NO: 22215 - DNA, 33 bp, Homo sapien
ttcattatgtcttctcaaatgtataacactgga

SEQ ID NO: 22216 - DNA, 33 bp, Homo sapien
ttcattatgtcttctccaatgtataacactgga

SEQ ID NO: 22217 - DNA, 33 bp, Homo sapien
tagaattcatccaaaacgccacctcctccggga

SEQ ID NO: 22218 - DNA, 33 bp, Homo sapien
tagaattcatccaaaatgccacctcctccggga

SEQ ID NO: 22219 - DNA, 33 bp, Homo sapien
gtaattttttcccagacggatgaagaaacccag

SEQ ID NO: 22220 - DNA, 33 bp, Homo sapien
gtaattttttcccagatggatgaagaaacccag

SEQ ID NO: 22221 - DNA, 33 bp, Homo sapien
agatttgttcctggtaagaaaatgagataatgc

SEQ ID NO: 22222 - DNA, 33 bp, Homo sapien
agatttgttcctggtatgaaaatgagataatgc

SEQ ID NO: 22223 - DNA, 33 bp, Homo sapien
tctaattcctgagtaaaacttcttgaaaaagaa

SEQ ID NO: 22224 - DNA, 33 bp, Homo sapien
tctaattcctgagtaagacttcttgaaaaagaa

SEQ ID NO: 22225 - DNA, 33 bp, Homo sapien
ggctgccattagagatcagatgggtggtttaat

SEQ ID NO: 22226 - DNA, 33 bp, Homo sapien
ggctgccattagagattagatgggtggtttaat

SEQ ID NO: 22227 - DNA, 33 bp, Homo sapien
tcacttcaagggtgcaaataaagactgagtgag

SEQ ID NO: 22228 - DNA, 33 bp, Homo sapien
tcacttcaagggtgcagataaagactgagtgag

SEQ ID NO: 22229 - DNA, 33 bp, Homo sapien
tgtttttgatacaggagagccaacaaaagcccc

SEQ ID NO: 22230 - DNA, 33 bp, Homo sapien
tgtttttgatacaggatagccaacaaaagcccc

SEQ ID NO: 22231 - DNA, 33 bp, Homo sapien
ggaattcaaaatcctcactgtggctgacttaca

SEQ ID NO: 22232 - DNA, 33 bp, Homo sapien
ggaattcaaaatcctcgctgtggctgacttaca

SEQ ID NO: 22233 - DNA, 33 bp, Homo sapien
tcctgtactctcatcacgttgcgttgtagaccc

SEQ ID NO: 22234 - DNA, 33 bp, Homo sapien
tcctgtactctcatcatgttgcgttgtagaccc

SEQ ID NO: 22235 - DNA, 33 bp, Homo sapien
tttaattatcacaagacgaatgatcacagtgct

SEQ ID NO: 22236 - DNA, 33 bp, Homo sapien
tttaattatcacaagatgaatgatcacagtgct

SEQ ID NO: 22237 - DNA, 33 bp, Homo sapien
tgcctttgtttgaaaccctcttcttgtctgctt

SEQ ID NO: 22238 - DNA, 33 bp, Homo sapien
tgcctttgtttgaaactctcttcttgtctgctt

SEQ ID NO: 22239 - DNA, 33 bp, Homo sapien
cttgtacgtgtgattcaaaagcatctcctctgg

SEQ ID NO: 22240 - DNA, 33 bp, Homo sapien
cttgtacgtgtgattcgaaagcatctcctctgg

SEQ ID NO: 22241 - DNA, 33 bp, Homo sapien
gccaccaattccataaacatcagaaaagctttg

SEQ ID NO: 22242 - DNA, 33 bp, Homo sapien
gccaccaattccataagcatcagaaaagctttg

SEQ ID NO: 22243 - DNA, 33 bp, Homo sapien
ttgcagctcactgatacaggtttcttttcaaat

SEQ ID NO: 22244 - DNA, 33 bp, Homo sapien
ttgcagctcactgatataggtttcttttcaaat

SEQ ID NO: 22245 - DNA, 33 bp, Homo sapien
agaatgtcattgagaaaattggcactgtctttg

SEQ ID NO: 22246 - DNA, 33 bp, Homo sapien
agaatgtcattgagaagattggcactgtctttg

SEQ ID NO: 22247 - DNA, 33 bp, Homo sapien
ttcctggagttagacgaaatataggctctattc

SEQ ID NO: 22248 - DNA, 33 bp, Homo sapien
ttcctggagttagacggaatataggctctattc

SEQ ID NO: 22249 - DNA, 33 bp, Homo sapien
gattgattccgattccaacaggcgaggcaaaga

SEQ ID NO: 22250 - DNA, 33 bp, Homo sapien
gattgattccgattccgacaggcgaggcaaaga

SEQ ID NO: 22251 - DNA, 33 bp, Homo sapien
tcttgttcatgtaataggtcctggtattcctgg

SEQ ID NO: 22252 - DNA, 33 bp, Homo sapien
tcttgttcatgtaatatgtcctggtattcctgg

SEQ ID NO: 22253 - DNA, 33 bp, Homo sapien
atgcaaggaaagctggaaagtatagtagtgtcc

SEQ ID NO: 22254 - DNA, 33 bp, Homo sapien
atgcaaggaaagctgggaagtatagtagtgtcc

SEQ ID NO: 22255 - DNA, 33 bp, Homo sapien
tctgtatctccagcaacctgaatgtaacaggtc

SEQ ID NO: 22256 - DNA, 33 bp, Homo sapien
tctgtatctccagcaatctgaatgtaacaggtc

SEQ ID NO: 22257 - DNA, 33 bp, Homo sapien
gaaaaatccaataaaaactgcaagtatctatac

SEQ ID NO: 22258 - DNA, 33 bp, Homo sapien
gaaaaatccaataaaatctgcaagtatctatac

SEQ ID NO: 22259 - DNA, 33 bp, Homo sapien
gaattcaatgagaagacaccccggacactgccc

SEQ ID NO: 22260 - DNA, 33 bp, Homo sapien
gaattcaatgagaagataccccggacactgccc

SEQ ID NO: 22261 - DNA, 33 bp, Homo sapien
ccaccagtgaaatgtgaaaccctgggcaaacat

SEQ ID NO: 22262 - DNA, 33 bp, Homo sapien
ccaccagtgaaatgtgcaaccctgggcaaacat

SEQ ID NO: 22263 - DNA, 33 bp, Homo sapien
ccagattgtctctagccctttccctatctttct

SEQ ID NO: 22264 - DNA, 33 bp, Homo sapien
ccagattgtctctagctctttccctatctttct

SEQ ID NO: 22265 - DNA, 33 bp, Homo sapien
atgactggtgtagacaataagtgtggcaggagt

SEQ ID NO: 22266 - DNA, 33 bp, Homo sapien
atgactggtgtagacagtaagtgtggcaggagt

SEQ ID NO: 22267 - DNA, 33 bp, Homo sapien
ctgattgaaacggcatcagtcccagaagagcca

SEQ ID NO: 22268 - DNA, 33 bp, Homo sapien
ctgattgaaacggcattagtcccagaagagcca

SEQ ID NO: 22269 - DNA, 33 bp, Homo sapien
ggaaagtaattttgccaagtgcagagttatcta

SEQ ID NO: 22270 - DNA, 33 bp, Homo sapien
ggaaagtaattttgccgagtgcagagttatcta

SEQ ID NO: 22271 - DNA, 33 bp, Homo sapien
tcatgtatcagtcaaaaaactgtggcctacgag

SEQ ID NO: 22272 - DNA, 33 bp, Homo sapien
tcatgtatcagtcaaacaactgtggcctacgag

SEQ ID NO: 22273 - DNA, 33 bp, Homo sapien
atttttcatgtacaagaatggccaactccgtgg

SEQ ID NO: 22274 - DNA, 33 bp, Homo sapien
atttttcatgtacaagtatggccaactccgtgg

SEQ ID NO: 22275 - DNA, 33 bp, Homo sapien
acttgctaaaaaggtaagcttgctgttagtttt

SEQ ID NO: 22276 - DNA, 33 bp, Homo sapien
acttgctaaaaaggtaggcttgctgttagtttt

SEQ ID NO: 22277 - DNA, 33 bp, Homo sapien
gtctgtctcctcttcaatcttaatacaactcct

SEQ ID NO: 22278 - DNA, 33 bp, Homo sapien
gtctgtctcctcttcagtcttaatacaactcct

SEQ ID NO: 22279 - DNA, 33 bp, Homo sapien
tccacctggctttcaaagtcctgtataatttgg

SEQ ID NO: 22280 - DNA, 33 bp, Homo sapien
tccacctggctttcaaggtcctgtataatttgg

SEQ ID NO: 22281 - DNA, 33 bp, Homo sapien
aaaattagatgcaaaactgtagtggggagagtt

SEQ ID NO: 22282 - DNA, 33 bp, Homo sapien
aaaattagatgcaaaattgtagtggggagagtt

SEQ ID NO: 22283 - DNA, 33 bp, Homo sapien
caaagctgcccttctcgcgtgggagtggagctc

SEQ ID NO: 22284 - DNA, 33 bp, Homo sapien
caaagctgcccttctctcgtgggagtggagctc

SEQ ID NO: 22285 - DNA, 33 bp, Homo sapien
aaacctcaaagccaacaagagaaggtgtttcct

SEQ ID NO: 22286 - DNA, 33 bp, Homo sapien
aaacctcaaagccaacgagagaaggtgtttcct

SEQ ID NO: 22287 - DNA, 33 bp, Homo sapien
gcaataaatcagatgaaggggaaggttgagtgg

SEQ ID NO: 22288 - DNA, 33 bp, Homo sapien
gcaataaatcagatgatggggaaggttgagtgg

SEQ ID NO: 22289 - DNA, 33 bp, Homo sapien
agacccgtagttcttaccgcagccccgagaatt

SEQ ID NO: 22290 - DNA, 33 bp, Homo sapien
agacccgtagttcttatcgcagccccgagaatt

SEQ ID NO: 22291 - DNA, 33 bp, Homo sapien
acatgtaaaatattaaccaatgtgtagcaacag

SEQ ID NO: 22292 - DNA, 33 bp, Homo sapien
acatgtaaaatattaatcaatgtgtagcaacag

SEQ ID NO: 22293 - DNA, 33 bp, Homo sapien
tgggacatgagaattacgcactaaataacaatc

SEQ ID NO: 22294 - DNA, 33 bp, Homo sapien
tgggacatgagaattatgcactaaataacaatc

SEQ ID NO: 22295 - DNA, 33 bp, Homo sapien
attgcttaattggtgacggtaattggtccaggg

SEQ ID NO: 22296 - DNA, 33 bp, Homo sapien
attgcttaattggtgatggtaattggtccaggg

SEQ ID NO: 22297 - DNA, 33 bp, Homo sapien
tttttaaactttaataagaaatgtctgactctt

SEQ ID NO: 22298 - DNA, 33 bp, Homo sapien
tttttaaactttaataggaaatgtctgactctt

SEQ ID NO: 22299 - DNA, 33 bp, Homo sapien
aaggaaaattccctcaagaccccagttgtctca

SEQ ID NO: 22300 - DNA, 33 bp, Homo sapien
aaggaaaattccctcaggaccccagttgtctca

SEQ ID NO: 22301 - DNA, 33 bp, Homo sapien
tggtggcttccaggaaataggttgtccttggat

SEQ ID NO: 22302 - DNA, 33 bp, Homo sapien
tggtggcttccaggaagtaggttgtccttggat

SEQ ID NO: 22303 - DNA, 33 bp, Homo sapien
atttccttcctttgccaccagacttcaatacat

SEQ ID NO: 22304 - DNA, 33 bp, Homo sapien
atttccttcctttgccgccagacttcaatacat

SEQ ID NO: 22305 - DNA, 33 bp, Homo sapien
agggcatgtctccttaaaccttccacactgtat

SEQ ID NO: 22306 - DNA, 33 bp, Homo sapien
agggcatgtctccttacaccttccacactgtat

SEQ ID NO: 22307 - DNA, 33 bp, Homo sapien
ggcagccttgaactggaatctaaaggtggggaa

SEQ ID NO: 22308 - DNA, 33 bp, Homo sapien
ggcagccttgaactgggatctaaaggtggggaa

SEQ ID NO: 22309 - DNA, 33 bp, Homo sapien
gtggggaagaattggcaacttgaaagtctcaaa

SEQ ID NO: 22310 - DNA, 33 bp, Homo sapien
gtggggaagaattggctacttgaaagtctcaaa

SEQ ID NO: 22311 - DNA, 33 bp, Homo sapien
ttatttctgatcaactcagatcaactggaatac

SEQ ID NO: 22312 - DNA, 33 bp, Homo sapien
ttatttctgatcaactgagatcaactggaatac

SEQ ID NO: 22313 - DNA, 33 bp, Homo sapien
ctactttctatctgtaaccctgaagagctagca

SEQ ID NO: 22314 - DNA, 33 bp, Homo sapien
ctactttctatctgtatccctgaagagctagca

SEQ ID NO: 22315 - DNA, 33 bp, Homo sapien
cttcaaggttgatcagacctttattggaggcat

SEQ ID NO: 22316 - DNA, 33 bp, Homo sapien
cttcaaggttgatcaggcctttattggaggcat

SEQ ID NO: 22317 - DNA, 33 bp, Homo sapien
gaatgtaagctcctgaccagtacagcagcctgc

SEQ ID NO: 22318 - DNA, 33 bp, Homo sapien
gaatgtaagctcctgatcagtacagcagcctgc

SEQ ID NO: 22319 - DNA, 33 bp, Homo sapien
ctgctttgtgaagacacagcaacaatgccacat

SEQ ID NO: 22320 - DNA, 33 bp, Homo sapien
ctgctttgtgaagacagagcaacaatgccacat

SEQ ID NO: 22321 - DNA, 33 bp, Homo sapien
caagtgtcatggtcaaacactactctgatttct

SEQ ID NO: 22322 - DNA, 33 bp, Homo sapien
caagtgtcatggtcaatcactactctgatttct

SEQ ID NO: 22323 - DNA, 33 bp, Homo sapien
gtaaaatactcaaaaaacatctggcccattgtg

SEQ ID NO: 22324 - DNA, 33 bp, Homo sapien
gtaaaatactcaaaaagcatctggcccattgtg

SEQ ID NO: 22325 - DNA, 33 bp, Homo sapien
actcttaacatagcaaaccaagaggtaggcgtt

SEQ ID NO: 22326 - DNA, 33 bp, Homo sapien
actcttaacatagcaacccaagaggtaggcgtt

SEQ ID NO: 22327 - DNA, 33 bp, Homo sapien
aaagccacaattcctacgcactgtgactctagt

SEQ ID NO: 22328 - DNA, 33 bp, Homo sapien
aaagccacaattcctatgcactgtgactctagt

SEQ ID NO: 22329 - DNA, 33 bp, Homo sapien
agaaggaatacttgacccagtttcctccagttt

SEQ ID NO: 22330 - DNA, 33 bp, Homo sapien
agaaggaatacttgacgcagtttcctccagttt

SEQ ID NO: 22331 - DNA, 33 bp, Homo sapien
gaaacaacactaacacaagaaggatgaacatag

SEQ ID NO: 22332 - DNA, 33 bp, Homo sapien
gaaacaacactaacacgagaaggatgaacatag

SEQ ID NO: 22333 - DNA, 33 bp, Homo sapien
gcaaaatcagcctcaagttccaaccaggttatg

SEQ ID NO: 22334 - DNA, 33 bp, Homo sapien
gcaaaatcagcctcaatttccaaccaggttatg

SEQ ID NO: 22335 - DNA, 33 bp, Homo sapien
ctgacagaatgcttaacgaaagcctgtcaacac

SEQ ID NO: 22336 - DNA, 33 bp, Homo sapien
ctgacagaatgcttaatgaaagcctgtcaacac

SEQ ID NO: 22337 - DNA, 33 bp, Homo sapien
cttcaggcctctcaaacaacatacgcgagaggt

SEQ ID NO: 22338 - DNA, 33 bp, Homo sapien
cttcaggcctctcaaataacatacgcgagaggt

SEQ ID NO: 22339 - DNA, 33 bp, Homo sapien
aaaagtcaacatcacaacaatttccaccttccc

SEQ ID NO: 22340 - DNA, 33 bp, Homo sapien
aaaagtcaacatcacagcaatttccaccttccc

SEQ ID NO: 22341 - DNA, 33 bp, Homo sapien
taatcatgggaagatgaaatgcatatcttggag

SEQ ID NO: 22342 - DNA, 33 bp, Homo sapien
taatcatgggaagatggaatgcatatcttggag

SEQ ID NO: 22343 - DNA, 33 bp, Homo sapien
cttgtcatacaacctacacttcaactgtactaa

SEQ ID NO: 22344 - DNA, 33 bp, Homo sapien
cttgtcatacaacctatacttcaactgtactaa

SEQ ID NO: 22345 - DNA, 33 bp, Homo sapien
gagtgcatgggagaaactcagcgccccttcccc

SEQ ID NO: 22346 - DNA, 33 bp, Homo sapien
gagtgcatgggagaaattcagcgccccttcccc

SEQ ID NO: 22347 - DNA, 33 bp, Homo sapien
ctcccatgcactctgaactaggagtcaggatac

SEQ ID NO: 22348 - DNA, 33 bp, Homo sapien
ctcccatgcactctgagctaggagtcaggatac

SEQ ID NO: 22349 - DNA, 33 bp, Homo sapien
tgagatgatagaaagaagcaggttttattatca

SEQ ID NO: 22350 - DNA, 33 bp, Homo sapien
tgagatgatagaaagaggcaggttttattatca

SEQ ID NO: 22351 - DNA, 33 bp, Homo sapien
aattccagataactcgaagactgtttttagtga

SEQ ID NO: 22352 - DNA, 33 bp, Homo sapien
aattccagataactcggagactgtttttagtga

SEQ ID NO: 22353 - DNA, 33 bp, Homo sapien
gcccttcctatgatcccgcacaaggaacaaggt

SEQ ID NO: 22354 - DNA, 33 bp, Homo sapien
gcccttcctatgatcctgcacaaggaacaaggt

SEQ ID NO: 22355 - DNA, 33 bp, Homo sapien
tccccatcctcaatacacgtggccatctgagta

SEQ ID NO: 22356 - DNA, 33 bp, Homo sapien
tccccatcctcaatacccgtggccatctgagta

SEQ ID NO: 22357 - DNA, 33 bp, Homo sapien
tgctggcttgataccacgtcagtaacatgagat

SEQ ID NO: 22358 - DNA, 33 bp, Homo sapien
tgctggcttgataccatgtcagtaacatgagat

SEQ ID NO: 22359 - DNA, 33 bp, Homo sapien
gctccagcaaagtcacaggaatgaagacactgg

SEQ ID NO: 22360 - DNA, 33 bp, Homo sapien
gctccagcaaagtcacgggaatgaagacactgg

SEQ ID NO: 22361 - DNA, 33 bp, Homo sapien
tcatcatttaatgagcatcttagttatataacc

SEQ ID NO: 22362 - DNA, 33 bp, Homo sapien
tcatcatttaatgagcgtcttagttatataacc

SEQ ID NO: 22363 - DNA, 33 bp, Homo sapien
cttcagcagttgagaaattcctataattatatt

SEQ ID NO: 22364 - DNA, 33 bp, Homo sapien
cttcagcagttgagaagttcctataattatatt

SEQ ID NO: 22365 - DNA, 33 bp, Homo sapien
catactccctgccatcaagaatcttatcgtctg

SEQ ID NO: 22366 - DNA, 33 bp, Homo sapien
catactccctgccatcgagaatcttatcgtctg

SEQ ID NO: 22367 - DNA, 33 bp, Homo sapien
gctacgattgctcttacataatctcaaatatag

SEQ ID NO: 22368 - DNA, 33 bp, Homo sapien
gctacgattgctcttatataatctcaaatatag

SEQ ID NO: 22369 - DNA, 33 bp, Homo sapien
tttagaattgctactgcatggtgataataagaa

SEQ ID NO: 22370 - DNA, 33 bp, Homo sapien
tttagaattgctactgtatggtgataataagaa

SEQ ID NO: 22371 - DNA, 33 bp, Homo sapien
taattacatttgcaacaaccctttttccaaata

SEQ ID NO: 22372 - DNA, 33 bp, Homo sapien
taattacatttgcaaccaccctttttccaaata

SEQ ID NO: 22373 - DNA, 33 bp, Homo sapien
agagactggaataagacgtctataagccaagaa

SEQ ID NO: 22374 - DNA, 33 bp, Homo sapien
agagactggaataagatgtctataagccaagaa

SEQ ID NO: 22375 - DNA, 33 bp, Homo sapien
ggcatctgcatttctaacaagcttccagtaatg

SEQ ID NO: 22376 - DNA, 33 bp, Homo sapien
ggcatctgcatttctagcaagcttccagtaatg

SEQ ID NO: 22377 - DNA, 33 bp, Homo sapien
ggagctggatctggaaaaatgaatgagatttaa

SEQ ID NO: 22378 - DNA, 33 bp, Homo sapien
ggagctggatctggaagaatgaatgagatttaa

SEQ ID NO: 22379 - DNA, 33 bp, Homo sapien
agagtatgtaactaacaacgggagaaactggga

SEQ ID NO: 22380 - DNA, 33 bp, Homo sapien
agagtatgtaactaacgacgggagaaactggga

SEQ ID NO: 22381 - DNA, 33 bp, Homo sapien
acagttttgattgccacggagaagggggatgct

SEQ ID NO: 22382 - DNA, 33 bp, Homo sapien
acagttttgattgccatggagaagggggatgct

SEQ ID NO: 22383 - DNA, 33 bp, Homo sapien
ctgcttgtcctcagtgcataggaatataatgat

SEQ ID NO: 22384 - DNA, 33 bp, Homo sapien
ctgcttgtcctcagtgtataggaatataatgat

SEQ ID NO: 22385 - DNA, 33 bp, Homo sapien
atgttttgtttctccaactactttctctgaagg

SEQ ID NO: 22386 - DNA, 33 bp, Homo sapien
atgttttgtttctccagctactttctctgaagg

SEQ ID NO: 22387 - DNA, 33 bp, Homo sapien
tggaaaaggtagacttaaaagaagggcaataac

SEQ ID NO: 22388 - DNA, 33 bp, Homo sapien
tggaaaaggtagacttgaaagaagggcaataac

SEQ ID NO: 22389 - DNA, 33 bp, Homo sapien
aaaccatgcagcatcacattaaaaagaaatggc

SEQ ID NO: 22390 - DNA, 33 bp, Homo sapien
aaaccatgcagcatcatattaaaaagaaatggc

SEQ ID NO: 22391 - DNA, 33 bp, Homo sapien
gttttatacctgggccacagatacaaaggaact

SEQ ID NO: 22392 - DNA, 33 bp, Homo sapien
gttttatacctgggccgcagatacaaaggaact

SEQ ID NO: 22393 - DNA, 33 bp, Homo sapien
gaaaattacagaggcaatagaagaaaacggaat

SEQ ID NO: 22394 - DNA, 33 bp, Homo sapien
gaaaattacagaggcagtagaagaaaacggaat

SEQ ID NO: 22395 - DNA, 33 bp, Homo sapien
tattagatattcaataaaagtctaatccaaaag

SEQ ID NO: 22396 - DNA, 33 bp, Homo sapien
tattagatattcaatagaagtctaatccaaaag

SEQ ID NO: 22397 - DNA, 33 bp, Homo sapien
gaccacctcaaggaacacagtactaaatcacca

SEQ ID NO: 22398 - DNA, 33 bp, Homo sapien
gaccacctcaaggaactcagtactaaatcacca

SEQ ID NO: 22399 - DNA, 33 bp, Homo sapien
gggagtattgctcagacgcactgtacaccatgc

SEQ ID NO: 22400 - DNA, 33 bp, Homo sapien
gggagtattgctcagatgcactgtacaccatgc

SEQ ID NO: 22401 - DNA, 33 bp, Homo sapien
tctgcctctcttcatcccacctctatttccttc

SEQ ID NO: 22402 - DNA, 33 bp, Homo sapien
tctgcctctcttcatctcacctctatttccttc

SEQ ID NO: 22403 - DNA, 33 bp, Homo sapien
gcctttcctgtttcacacccttcatagagctcc

SEQ ID NO: 22404 - DNA, 33 bp, Homo sapien
gcctttcctgtttcacgcccttcatagagctcc

SEQ ID NO: 22405 - DNA, 33 bp, Homo sapien
tcagtacaagtttactcactgaaggatactgaa

SEQ ID NO: 22406 - DNA, 33 bp, Homo sapien
tcagtacaagtttactgactgaaggatactgaa

SEQ ID NO: 22407 - DNA, 33 bp, Homo sapien
ccattacacctggaaaaacctgggcattgcagt

SEQ ID NO: 22408 - DNA, 33 bp, Homo sapien
ccattacacctggaaacacctgggcattgcagt

SEQ ID NO: 22409 - DNA, 33 bp, Homo sapien
gtgaaacaaagctgaaccatggcaccccaaacc

SEQ ID NO: 22410 - DNA, 33 bp, Homo sapien
gtgaaacaaagctgaatcatggcaccccaaacc

SEQ ID NO: 22411 - DNA, 33 bp, Homo sapien
aaactcaaacaactcaatagtaagagaacagat

SEQ ID NO: 22412 - DNA, 33 bp, Homo sapien
aaactcaaacaactcagtagtaagagaacagat

SEQ ID NO: 22413 - DNA, 33 bp, Homo sapien
ggggtatatgacttaccaaccaagaaaaagcaa

SEQ ID NO: 22414 - DNA, 33 bp, Homo sapien
ggggtatatgacttacgaaccaagaaaaagcaa

SEQ ID NO: 22415 - DNA, 33 bp, Homo sapien
tctttcctgctctaacacaagccatcatcgtct

SEQ ID NO: 22416 - DNA, 33 bp, Homo sapien
tctttcctgctctaacgcaagccatcatcgtct

SEQ ID NO: 22417 - DNA, 33 bp, Homo sapien
tccagatgggaccatccacttgtggaaaaacaa

SEQ ID NO: 22418 - DNA, 33 bp, Homo sapien
tccagatgggaccatctacttgtggaaaaacaa

SEQ ID NO: 22419 - DNA, 33 bp, Homo sapien
aattttattcaggaaaaaatgctgtttatcaaa

SEQ ID NO: 22420 - DNA, 33 bp, Homo sapien
aattttattcaggaaagaatgctgtttatcaaa

SEQ ID NO: 22421 - DNA, 33 bp, Homo sapien
acctctacatggaaaacattgaatacatagttc

SEQ ID NO: 22422 - DNA, 33 bp, Homo sapien
acctctacatggaaaatattgaatacatagttc

SEQ ID NO: 22423 - DNA, 33 bp, Homo sapien
aaacaacctaaaaacaatggtgtaaatgagaaa

SEQ ID NO: 22424 - DNA, 33 bp, Homo sapien
aaacaacctaaaaacagtggtgtaaatgagaaa

SEQ ID NO: 22425 - DNA, 33 bp, Homo sapien
tttgcaaggaagaatcagaagaatacgttgcca

SEQ ID NO: 22426 - DNA, 33 bp, Homo sapien
tttgcaaggaagaatcggaagaatacgttgcca

SEQ ID NO: 22427 - DNA, 33 bp, Homo sapien
taattatacagttcaacagtgttaaatacattc

SEQ ID NO: 22428 - DNA, 33 bp, Homo sapien
taattatacagttcaatagtgttaaatacattc

SEQ ID NO: 22429 - DNA, 33 bp, Homo sapien
gtcctggtccaatgacgcgattttttttttctt

SEQ ID NO: 22430 - DNA, 33 bp, Homo sapien
gtcctggtccaatgactcgattttttttttctt

SEQ ID NO: 22431 - DNA, 33 bp, Homo sapien
aacaccttgctagagcaaccaaccaagattctg

SEQ ID NO: 22432 - DNA, 33 bp, Homo sapien
aacaccttgctagagcgaccaaccaagattctg

SEQ ID NO: 22433 - DNA, 33 bp, Homo sapien
atttattttggaagcaacagtaaatgatacaac

SEQ ID NO: 22434 - DNA, 33 bp, Homo sapien
atttattttggaagcagcagtaaatgatacaac

SEQ ID NO: 22435 - DNA, 33 bp, Homo sapien
gaataaaacgttaagcaagttattatgctgact

SEQ ID NO: 22436 - DNA, 33 bp, Homo sapien
gaataaaacgttaagcgagttattatgctgact

SEQ ID NO: 22437 - DNA, 33 bp, Homo sapien
ccagggctgaccacacacctttcacagggctat

SEQ ID NO: 22438 - DNA, 33 bp, Homo sapien
ccagggctgaccacacgcctttcacagggctat

SEQ ID NO: 22439 - DNA, 33 bp, Homo sapien; identical to SEQ ID NO: 22437

SEQ ID NO: 22440 - DNA, 33 bp, Homo sapien; identical to SEQ ID NO: 22438

SEQ ID NO: 22441 - DNA, 33 bp, Homo sapien
aatttcttattgactactagctagaaatatgtg

SEQ ID NO: 22442 - DNA, 33 bp, Homo sapien
aatttcttattgactagtagctagaaatatgtg

SEQ ID NO: 22443 - DNA, 33 bp, Homo sapien
tttggaaacgagttagaaggctgaaatacataa

SEQ ID NO: 22444 - DNA, 33 bp, Homo sapien
tttggaaacgagttaggaggctgaaatacataa

SEQ ID NO: 22445 - DNA, 33 bp, Homo sapien
gtacagacatagctaaatcaagccaaaagttat

SEQ ID NO: 22446 - DNA, 33 bp, Homo sapien
gtacagacatagctaagtcaagccaaaagttat

SEQ ID NO: 22447 - DNA, 33 bp, Homo sapien
gcatcgattttctgaaataaaagtgaatgcatc

SEQ ID NO: 22448 - DNA, 33 bp, Homo sapien
gcatcgattttctgaattaaaagtgaatgcatc

SEQ ID NO: 22449 - DNA, 33 bp, Homo sapien
ttatttgcaataaaagaagaaagcgggttgatt

SEQ ID NO: 22450 - DNA, 33 bp, Homo sapien
ttatttgcaataaaaggagaaagcgggttgatt

SEQ ID NO: 22451 - DNA, 33 bp, Homo sapien
atgatctcatttaatccgacaatttgaaatctt

SEQ ID NO: 22452 - DNA, 33 bp, Homo sapien
atgatctcatttaatctgacaatttgaaatctt

SEQ ID NO: 22453 - DNA, 33 bp, Homo sapien
caaagtaggatagatacgtactttcataaaaga

SEQ ID NO: 22454 - DNA, 33 bp, Homo sapien
caaagtaggatagatatgtactttcataaaaga

SEQ ID NO: 22455 - DNA, 33 bp, Homo sapien
atcctttgctccattaacacctgcatatcataa

SEQ ID NO: 22456 - DNA, 33 bp, Homo sapien
atcctttgctccattagcacctgcatatcataa

SEQ ID NO: 22457 - DNA, 33 bp, Homo sapien
tctaaaggctaccatagtaagtaacacttcctt

SEQ ID NO: 22458 - DNA, 33 bp, Homo sapien
tctaaaggctaccatattaagtaacacttcctt

SEQ ID NO: 22459 - DNA, 33 bp, Homo sapien
gtaattatgccagagaaattaggagactttacc

SEQ ID NO: 22460 - DNA, 33 bp, Homo sapien
gtaattatgccagagacattaggagactttacc

SEQ ID NO: 22461 - DNA, 33 bp, Homo sapien
ccatagcaaaattgtaaagcagatcaagtttag

SEQ ID NO: 22462 - DNA, 33 bp, Homo sapien
ccatagcaaaattgtagagcagatcaagtttag

SEQ ID NO: 22463 - DNA, 33 bp, Homo sapien
actgtgaagaaacccccagatggaaaatacaag

SEQ ID NO: 22464 - DNA, 33 bp, Homo sapien
actgtgaagaaaccccgagatggaaaatacaag

SEQ ID NO: 22465 - DNA, 33 bp, Homo sapien
taagcacagctaaaaactaatgaacaggaaacc

SEQ ID NO: 22466 - DNA, 33 bp, Homo sapien
taagcacagctaaaaagtaatgaacaggaaacc

SEQ ID NO: 22467 - DNA, 33 bp, Homo sapien
caaagtggtacctctacgagcctgcaagagtca

SEQ ID NO: 22468 - DNA, 33 bp, Homo sapien
caaagtggtacctctatgagcctgcaagagtca

SEQ ID NO: 22469 - DNA, 33 bp, Homo sapien
atttgttacccaagaccatcaaagtggtacctc

SEQ ID NO: 22470 - DNA, 33 bp, Homo sapien
atttgttacccaagactatcaaagtggtacctc

SEQ ID NO: 22471 - DNA, 33 bp, Homo sapien
ggatagacatttcagaaaaaatcaaattacaat

SEQ ID NO: 22472 - DNA, 33 bp, Homo sapien
ggatagacatttcagataaaatcaaattacaat

SEQ ID NO: 22473 - DNA, 33 bp, Homo sapien
gattttccagtgtccaaagaaaacattgctagg

SEQ ID NO: 22474 - DNA, 33 bp, Homo sapien
gattttccagtgtccagagaaaacattgctagg

SEQ ID NO: 22475 - DNA, 33 bp, Homo sapien
ttccactgaattcccacgtaatctcagtagatg

SEQ ID NO: 22476 - DNA, 33 bp, Homo sapien
ttccactgaattcccatgtaatctcagtagatg

SEQ ID NO: 22477 - DNA, 33 bp, Homo sapien
caaaactaggtttttcacatttcttgctagatg

SEQ ID NO: 22478 - DNA, 33 bp, Homo sapien
caaaactaggtttttcgcatttcttgctagatg

SEQ ID NO: 22479 - DNA, 33 bp, Homo sapien
caaatttttgctgacacacttcaaatctaagat

SEQ ID NO: 22480 - DNA, 33 bp, Homo sapien
caaatttttgctgacatacttcaaatctaagat

SEQ ID NO: 22481 - DNA, 33 bp, Homo sapien
tactaccatatttttacgctagctatgtgttga

SEQ ID NO: 22482 - DNA, 33 bp, Homo sapien
tactaccatatttttatgctagctatgtgttga

SEQ ID NO: 22483 - DNA, 33 bp, Homo sapien
agatacatctgattgactaaatgtgtgaatttg

SEQ ID NO: 22484 - DNA, 33 bp, Homo sapien
agatacatctgattgattaaatgtgtgaatttg

SEQ ID NO: 22485 - DNA, 33 bp, Homo sapien
aagtatataagctccacggaatatttgacaact

SEQ ID NO: 22486 - DNA, 33 bp, Homo sapien
aagtatataagctccatggaatatttgacaact

SEQ ID NO: 22487 - DNA, 33 bp, Homo sapien
tagttggagcaagagaaggtttttgttctgttt

SEQ ID NO: 22488 - DNA, 33 bp, Homo sapien
tagttggagcaagagagggtttttgttctgttt

SEQ ID NO: 22489 - DNA, 33 bp, Homo sapien
gcatctaactaaactaggtaccaaactagattg

SEQ ID NO: 22490 - DNA, 33 bp, Homo sapien
gcatctaactaaactatgtaccaaactagattg

SEQ ID NO: 22491 - DNA, 33 bp, Homo sapien
gaaatcacctttttcccaccttgaaggcaacca

SEQ ID NO: 22492 - DNA, 33 bp, Homo sapien
gaaatcacctttttcctaccttgaaggcaacca

SEQ ID NO: 22493 - DNA, 33 bp, Homo sapien
tatggtttgcatacagacccttggtttttaata

SEQ ID NO: 22494 - DNA, 33 bp, Homo sapien
tatggtttgcatacagtcccttggtttttaata

SEQ ID NO: 22495 - DNA, 33 bp, Homo sapien
gatctgttttactttaccctgcccagacttagc

SEQ ID NO: 22496 - DNA, 33 bp, Homo sapien
gatctgttttactttatcctgcccagacttagc

SEQ ID NO: 22497 - DNA, 33 bp, Homo sapien
tttgagagaagactgaactactaactgagaagt

SEQ ID NO: 22498 - DNA, 33 bp, Homo sapien
tttgagagaagactgagctactaactgagaagt

SEQ ID NO: 22499 - DNA, 33 bp, Homo sapien
acagacatctatagaaacctcccccaacaacag

SEQ ID NO: 22500 - DNA, 33 bp, Homo sapien
acagacatctatagaaccctcccccaacaacag

SEQ ID NO: 22501 - DNA, 33 bp, Homo sapien
attacagacccaaatcacttataaatacagatg

SEQ ID NO: 22502 - DNA, 33 bp, Homo sapien
attacagacccaaatcccttataaatacagatg

SEQ ID NO: 22503 - DNA, 33 bp, Homo sapien
atacctcttctaatgaaggaagcagagatatgg

SEQ ID NO: 22504 - DNA, 33 bp, Homo sapien
atacctcttctaatgagggaagcagagatatgg

SEQ ID NO: 22505 - DNA, 33 bp, Homo sapien
gtgagagtatttttaactgataaatgtggtatt

SEQ ID NO: 22506 - DNA, 33 bp, Homo sapien
gtgagagtatttttaagtgataaatgtggtatt

SEQ ID NO: 22507 - DNA, 33 bp, Homo sapien
taaaaatgaatccacccgcatatgtaacttgcc

SEQ ID NO: 22508 - DNA, 33 bp, Homo sapien
taaaaatgaatccacctgcatatgtaacttgcc

SEQ ID NO: 22509 - DNA, 33 bp, Homo sapien
ttgcccaacagtgaaaaagtcttatctggaatc

SEQ ID NO: 22510 - DNA, 33 bp, Homo sapien
ttgcccaacagtgaaagagtcttatctggaatc

SEQ ID NO: 22511 - DNA, 33 bp, Homo sapien
tcacaggtaatctcggacaccatctctctattt

SEQ ID NO: 22512 - DNA, 33 bp, Homo sapien
tcacaggtaatctcgggcaccatctctctattt

SEQ ID NO: 22513 - DNA, 33 bp, Homo sapien
aattgcttagggtgtacagattcctaaacagtc

SEQ ID NO: 22514 - DNA, 33 bp, Homo sapien
aattgcttagggtgtatagattcctaaacagtc

SEQ ID NO: 22515 - DNA, 33 bp, Homo sapien
cttgaccatcacagaacctaagtaaatggatag

SEQ ID NO: 22516 - DNA, 33 bp, Homo sapien
cttgaccatcacagaatctaagtaaatggatag

SEQ ID NO: 22517 - DNA, 33 bp, Homo sapien
ttacttatactactaccgcaaaacagaaaaact

SEQ ID NO: 22518 - DNA, 33 bp, Homo sapien
ttacttatactactactgcaaaacagaaaaact

SEQ ID NO: 22519 - DNA, 33 bp, Homo sapien
ttaagggcttactacaatatcatatttaatctt

SEQ ID NO: 22520 - DNA, 33 bp, Homo sapien
ttaagggcttactacagtatcatatttaatctt

SEQ ID NO: 22521 - DNA, 33 bp, Homo sapien
taaggtttaaagttaaagtagcaaggtgtctcc

SEQ ID NO: 22522 - DNA, 33 bp, Homo sapien
taaggtttaaagttaaggtagcaaggtgtctcc

SEQ ID NO: 22523 - DNA, 33 bp, Homo sapien
gggggctaaaccgacaagtgtgaggattgtaaa

SEQ ID NO: 22524 - DNA, 33 bp, Homo sapien
gggggctaaaccgacaggtgtgaggattgtaaa

SEQ ID NO: 22525 - DNA, 33 bp, Homo sapien
aagtttcatcttccacccgaactctagaaccca

SEQ ID NO: 22526 - DNA, 33 bp, Homo sapien
aagtttcatcttccactcgaactctagaaccca

SEQ ID NO: 22527 - DNA, 33 bp, Homo sapien
ggactaagactgagcaagggcctgtggtcactg

SEQ ID NO: 22528 - DNA, 33 bp, Homo sapien
ggactaagactgagcaggggcctgtggtcactg

SEQ ID NO: 22529 - DNA, 33 bp, Homo sapien
ggcacttctcacactacattgcaatgcccactt

SEQ ID NO: 22530 - DNA, 33 bp, Homo sapien
ggcacttctcacactatattgcaatgcccactt

SEQ ID NO: 22531 - DNA, 33 bp, Homo sapien
cccagcccctgttcccaattctcaggtctgatg

SEQ ID NO: 22532 - DNA, 33 bp, Homo sapien
cccagcccctgttcccgattctcaggtctgatg

SEQ ID NO: 22533 - DNA, 33 bp, Homo sapien
gaaatacctcgagacacaacattaacacaattc

SEQ ID NO: 22534 - DNA, 33 bp, Homo sapien
gaaatacctcgagacataacattaacacaattc

SEQ ID NO: 22535 - DNA, 33 bp, Homo sapien
accagcaggaataacaagctcacaagcagaaag

SEQ ID NO: 22536 - DNA, 33 bp, Homo sapien
accagcaggaataacaggctcacaagcagaaag

SEQ ID NO: 22537 - DNA, 33 bp, Homo sapien
agcaaatgagaaggaacattgtaccagaacgca

SEQ ID NO: 22538 - DNA, 33 bp, Homo sapien
agcaaatgagaaggaatattgtaccagaacgca

SEQ ID NO: 22539 - DNA, 33 bp, Homo sapien
cagtgggctgcacgaactgttagattatcaaga

SEQ ID NO: 22540 - DNA, 33 bp, Homo sapien
cagtgggctgcacgaattgttagattatcaaga

SEQ ID NO: 22541 - DNA, 33 bp, Homo sapien
tactacattttatctaccaagaatcagaatctc

SEQ ID NO: 22542 - DNA, 33 bp, Homo sapien
tactacattttatctagcaagaatcagaatctc

SEQ ID NO: 22543 - DNA, 33 bp, Homo sapien
gcagaaaggcttctccaaccaggcagatgtatg

SEQ ID NO: 22544 - DNA, 33 bp, Homo sapien
gcagaaaggcttctccgaccaggcagatgtatg

SEQ ID NO: 22545 - DNA, 33 bp, Homo sapien
agctaggacccaagggaagaagtttcaaggatg

SEQ ID NO: 22546 - DNA, 33 bp, Homo sapien
agctaggacccaaggggagaagtttcaaggatg

SEQ ID NO: 22547 - DNA, 33 bp, Homo sapien
ataggctcattgggcactcatgtagtatccctc

SEQ ID NO: 22548 - DNA, 33 bp, Homo sapien
ataggctcattgggcattcatgtagtatccctc

SEQ ID NO: 22549 - DNA, 33 bp, Homo sapien
ctcagtagctatgcaaattagaatgggcagaaa

SEQ ID NO: 22550 - DNA, 33 bp, Homo sapien
ctcagtagctatgcaagttagaatgggcagaaa

SEQ ID NO: 22551 - DNA, 33 bp, Homo sapien
agacagtctgcccaaacaatggccgggccccag

SEQ ID NO: 22552 - DNA, 33 bp, Homo sapien
agacagtctgcccaaagaatggccgggccccag

SEQ ID NO: 22553 - DNA, 33 bp, Homo sapien
ccctactgcacttcccactggtcttattcttct

SEQ ID NO: 22554 - DNA, 33 bp, Homo sapien
ccctactgcacttcccgctggtcttattcttct

SEQ ID NO: 22555 - DNA, 33 bp, Homo sapien
agatcattggcaaaagcatggccggaatttctt

SEQ ID NO: 22556 - DNA, 33 bp, Homo sapien
agatcattggcaaaagtatggccggaatttctt

SEQ ID NO: 22557 - DNA, 33 bp, Homo sapien
tctctcacttacacacaggtctgtttctacctg

SEQ ID NO: 22558 - DNA, 33 bp, Homo sapien
tctctcacttacacaccggtctgtttctacctg

SEQ ID NO: 22559 - DNA, 33 bp, Homo sapien
gtccatgagcaggcctaaatgacttttccccgc

SEQ ID NO: 22560 - DNA, 33 bp, Homo sapien
gtccatgagcaggcctcaatgacttttccccgc

SEQ ID NO: 22561 - DNA, 33 bp, Homo sapien
tctatttcagtggatcaacactacagtctttca

SEQ ID NO: 22562 - DNA, 33 bp, Homo sapien
tctatttcagtggatcgacactacagtctttca

SEQ ID NO: 22563 - DNA, 33 bp, Homo sapien
aggaagtgatggaaaagcttctctctatgtctt

SEQ ID NO: 22564 - DNA, 33 bp, Homo sapien
aggaagtgatggaaaatcttctctctatgtctt

SEQ ID NO: 22565 - DNA, 33 bp, Homo sapien
caaaatgtattcaccaagcattttaggatttga

SEQ ID NO: 22566 - DNA, 33 bp, Homo sapien
caaaatgtattcaccacgcattttaggatttga

SEQ ID NO: 22567 - DNA, 33 bp, Homo sapien
ttcactaaccagttgacgagcagtgcatttaca

SEQ ID NO: 22568 - DNA, 33 bp, Homo sapien
ttcactaaccagttgatgagcagtgcatttaca

SEQ ID NO: 22569 - DNA, 33 bp, Homo sapien
agattgatctaagcccacaggtcctctttccct

SEQ ID NO: 22570 - DNA, 33 bp, Homo sapien
agattgatctaagcccgcaggtcctctttccct

SEQ ID NO: 22571 - DNA, 33 bp, Homo sapien
ttggctctcaagtctacgcttatttaactataa

SEQ ID NO: 22572 - DNA, 33 bp, Homo sapien
ttggctctcaagtctatgcttatttaactataa

SEQ ID NO: 22573 - DNA, 33 bp, Homo sapien
ggaagccctggagagacacagtgatccttacta

SEQ ID NO: 22574 - DNA, 33 bp, Homo sapien
ggaagccctggagagagacagtgatccttacta

SEQ ID NO: 22575 - DNA, 33 bp, Homo sapien
aggcctggggcacatcactgaacaggaaactgc

SEQ ID NO: 22576 - DNA, 33 bp, Homo sapien
aggcctggggcacatcgctgaacaggaaactgc

SEQ ID NO: 22577 - DNA, 33 bp, Homo sapien
taatttggaaatggaaccttcagagaagtagag

SEQ ID NO: 22578 - DNA, 33 bp, Homo sapien
taatttggaaatggaatcttcagagaagtagag

SEQ ID NO: 22579 - DNA, 33 bp, Homo sapien
tggggcaccttctggaccagctaagttgacaca

SEQ ID NO: 22580 - DNA, 33 bp, Homo sapien
tggggcaccttctggagcagctaagttgacaca

SEQ ID NO: 22581 - DNA, 33 bp, Homo sapien
tggggatccatatggcactagggatataggaga

SEQ ID NO: 22582 - DNA, 33 bp, Homo sapien
tggggatccatatggcgctagggatataggaga

SEQ ID NO: 22583 - DNA, 33 bp, Homo sapien
cctttttctcatggcaactgaaggaagtgagtg

SEQ ID NO: 22584 - DNA, 33 bp, Homo sapien
cctttttctcatggcagctgaaggaagtgagtg

SEQ ID NO: 22585 - DNA, 33 bp, Homo sapien
ttctgcagcttgccaccagctgagagacatata

SEQ ID NO: 22586 - DNA, 33 bp, Homo sapien
ttctgcagcttgccacgagctgagagacatata

SEQ ID NO: 22587 - DNA, 33 bp, Homo sapien
tcatgtgttgggataccgaggtttcaaaggcac

SEQ ID NO: 22588 - DNA, 33 bp, Homo sapien
tcatgtgttgggatactgaggtttcaaaggcac

SEQ ID NO: 22589 - DNA, 33 bp, Homo sapien
tgcttataccatggaggctaggtttccttcaag

SEQ ID NO: 22590 - DNA, 33 bp, Homo sapien
tgcttataccatggagtctaggtttccttcaag

SEQ ID NO: 22591 - DNA, 33 bp, Homo sapien
cttctgaagccgtcataaaatctgcttggtcct

SEQ ID NO: 22592 - DNA, 33 bp, Homo sapien
cttctgaagccgtcatgaaatctgcttggtcct

SEQ ID NO: 22593 - DNA, 33 bp, Homo sapien
cctttttggaagtggacgagaatggtgatttca

SEQ ID NO: 22594 - DNA, 33 bp, Homo sapien
cctttttggaagtggatgagaatggtgatttca

SEQ ID NO: 22595 - DNA, 33 bp, Homo sapien
aaatttagagagaaaacagttggctgagagcag

SEQ ID NO: 22596 - DNA, 33 bp, Homo sapien
aaatttagagagaaaagagttggctgagagcag

SEQ ID NO: 22597 - DNA, 33 bp, Homo sapien
aaggtaccactgattcaactgtgtcctacagat

SEQ ID NO: 22598 - DNA, 33 bp, Homo sapien
aaggtaccactgattcgactgtgtcctacagat

SEQ ID NO: 22599 - DNA, 33 bp, Homo sapien
ttctgatggcaaaggaaacaggcatcccattca

SEQ ID NO: 22600 - DNA, 33 bp, Homo sapien
ttctgatggcaaaggagacaggcatcccattca

SEQ ID NO: 22601 - DNA, 33 bp, Homo sapien
aaccagggagccttccacattctcgagtcaagt

SEQ ID NO: 22602 - DNA, 33 bp, Homo sapien
aaccagggagccttccgcattctcgagtcaagt

SEQ ID NO: 22603 - DNA, 33 bp, Homo sapien
gggggtgccgttttataaaggatggccagtgag

SEQ ID NO: 22604 - DNA, 33 bp, Homo sapien
gggggtgccgttttatgaaggatggccagtgag

SEQ ID NO: 22605 - DNA, 33 bp, Homo sapien
gcctttttagcccttaacatcctatgactttaa

SEQ ID NO: 22606 - DNA, 33 bp, Homo sapien
gcctttttagcccttagcatcctatgactttaa

SEQ ID NO: 22607 - DNA, 33 bp, Homo sapien
caattatcatagtaacaataggaatgataagat

SEQ ID NO: 22608 - DNA, 33 bp, Homo sapien
caattatcatagtaaccataggaatgataagat

SEQ ID NO: 22609 - DNA, 33 bp, Homo sapien
gatactcagcatcttcgtcgtctcctatcactc

SEQ ID NO: 22610 - DNA, 33 bp, Homo sapien
gatactcagcatcttcttcgtctcctatcactc

SEQ ID NO: 22611 - DNA, 33 bp, Homo sapien
aacctgcagttccaaacaacaataaattccaag

SEQ ID NO: 22612 - DNA, 33 bp, Homo sapien
aacctgcagttccaaataacaataaattccaag

SEQ ID NO: 22613 - DNA, 33 bp, Homo sapien
tgtctaattttccagcaaaatggaaagggaaca

SEQ ID NO: 22614 - DNA, 33 bp, Homo sapien
tgtctaattttccagcgaaatggaaagggaaca

SEQ ID NO: 22615 - DNA, 33 bp, Homo sapien
gggattagcaatataacaggttggaatgtaatg

SEQ ID NO: 22616 - DNA, 33 bp, Homo sapien
gggattagcaatataagaggttggaatgtaatg

SEQ ID NO: 22617 - DNA, 33 bp, Homo sapien
cttcatctttataccacgtcagtttagctaagc

SEQ ID NO: 22618 - DNA, 33 bp, Homo sapien
cttcatctttataccatgtcagtttagctaagc

SEQ ID NO: 22619 - DNA, 33 bp, Homo sapien
tgctagatctggaagacggaagtgaagcagtag

SEQ ID NO: 22620 - DNA, 33 bp, Homo sapien
tgctagatctggaagatggaagtgaagcagtag

SEQ ID NO: 22621 - DNA, 33 bp, Homo sapien
ggtacgggtggcaagcaaagttcccagatgtgt

SEQ ID NO: 22622 - DNA, 33 bp, Homo sapien
ggtacgggtggcaagcgaagttcccagatgtgt

SEQ ID NO: 22623 - DNA, 33 bp, Homo sapien
attatatttccagcatgagaaaagataaagaca

SEQ ID NO: 22624 - DNA, 33 bp, Homo sapien
attatatttccagcattagaaaagataaagaca

SEQ ID NO: 22625 - DNA, 33 bp, Homo sapien
ccttaactactataaaaccttgtctctctagaa

SEQ ID NO: 22626 - DNA, 33 bp, Homo sapien
ccttaactactataaagccttgtctctctagaa

SEQ ID NO: 22627 - DNA, 33 bp, Homo sapien
cagcttaatccaatgagctgtatctcccaactg

SEQ ID NO: 22628 - DNA, 33 bp, Homo sapien
cagcttaatccaatgatctgtatctcccaactg

SEQ ID NO: 22629 - DNA, 33 bp, Homo sapien
ctcacatggcaactccacggactcttcagggtg

SEQ ID NO: 22630 - DNA, 33 bp, Homo sapien
ctcacatggcaactcctcggactcttcagggtg

SEQ ID NO: 22631 - DNA, 33 bp, Homo sapien
atatacttatgagttacgtgaaatgttttgata

SEQ ID NO: 22632 - DNA, 33 bp, Homo sapien
atatacttatgagttatgtgaaatgttttgata

SEQ ID NO: 22633 - DNA, 33 bp, Homo sapien
agaatagaagtaaggaagagacatttcatgaga

SEQ ID NO: 22634 - DNA, 33 bp, Homo sapien
agaatagaagtaaggaggagacatttcatgaga

SEQ ID NO: 22635 - DNA, 33 bp, Homo sapien
ggctcatttgctcctccatgtcttgcctttcag

SEQ ID NO: 22636 - DNA, 33 bp, Homo sapien
ggctcatttgctcctctatgtcttgcctttcag

SEQ ID NO: 22637 - DNA, 33 bp, Homo sapien
catgcgatctataaaacgaaagaggctttccaa

SEQ ID NO: 22638 - DNA, 33 bp, Homo sapien
catgcgatctataaaatgaaagaggctttccaa

SEQ ID NO: 22639 - DNA, 33 bp, Homo sapien
gtagtaagtttgcatcagaggtagtaagtttgc

SEQ ID NO: 22640 - DNA, 33 bp, Homo sapien
gtagtaagtttgcatcggaggtagtaagtttgc

SEQ ID NO: 22641 - DNA, 33 bp, Homo sapien
tatagcacacttatcacaacagatgggatcaaa

SEQ ID NO: 22642 - DNA, 33 bp, Homo sapien
tatagcacacttatcagaacagatgggatcaaa

SEQ ID NO: 22643 - DNA, 33 bp, Homo sapien
attgtcacctcactcacctttgacttgagattt

SEQ ID NO: 22644 - DNA, 33 bp, Homo sapien
attgtcacctcactcatctttgacttgagattt

SEQ ID NO: 22645 - DNA, 33 bp, Homo sapien
tttgagggctttaaaacacttgcttgagttcct

SEQ ID NO: 22646 - DNA, 33 bp, Homo sapien
tttgagggctttaaaagacttgcttgagttcct

SEQ ID NO: 22647 - DNA, 33 bp, Homo sapien
tactaggatagaaaaacatctaaaaaccatgtc

SEQ ID NO: 22648 - DNA, 33 bp, Homo sapien
tactaggatagaaaaatatctaaaaaccatgtc

SEQ ID NO: 22649 - DNA, 33 bp, Homo sapien
cacataaagtagcatacgtatagatttcaggga

SEQ ID NO: 22650 - DNA, 33 bp, Homo sapien
cacataaagtagcatatgtatagatttcaggga

SEQ ID NO: 22651 - DNA, 33 bp, Homo sapien
cttccaagactgctaactgcattgagcaggcag

SEQ ID NO: 22652 - DNA, 33 bp, Homo sapien
cttccaagactgctaattgcattgagcaggcag

SEQ ID NO: 22653 - DNA, 33 bp, Homo sapien
gaggaatttggaccagaatgacggctaagattc

SEQ ID NO: 22654 - DNA, 33 bp, Homo sapien
gaggaatttggaccagtatgacggctaagattc

SEQ ID NO: 22655 - DNA, 33 bp, Homo sapien
tcctagagtgactacccatcctaatttgcactg

SEQ ID NO: 22656 - DNA, 33 bp, Homo sapien
tcctagagtgactaccgatcctaatttgcactg

SEQ ID NO: 22657 - DNA, 33 bp, Homo sapien
gcatgcattgtcactacagggtttttcatctct

SEQ ID NO: 22658 - DNA, 33 bp, Homo sapien
gcatgcattgtcactatagggtttttcatctct

SEQ ID NO: 22659 - DNA, 33 bp, Homo sapien
acagagaatcaagagcagatgtactccaaggtc

SEQ ID NO: 22660 - DNA, 33 bp, Homo sapien
acagagaatcaagagccgatgtactccaaggtc

SEQ ID NO: 22661 - DNA, 33 bp, Homo sapien
ataaactgcttacatacgcagcctaaagggagt

SEQ ID NO: 22662 - DNA, 33 bp, Homo sapien
ataaactgcttacatatgcagcctaaagggagt

SEQ ID NO: 22663 - DNA, 33 bp, Homo sapien
ctcccaactcctagtccagtgttctgttataaa

SEQ ID NO: 22664 - DNA, 33 bp, Homo sapien
ctcccaactcctagtctagtgttctgttataaa

SEQ ID NO: 22665 - DNA, 33 bp, Homo sapien
catgtgttgcataaggaaagaaagagaaataaa

SEQ ID NO: 22666 - DNA, 33 bp, Homo sapien
catgtgttgcataaggcaagaaagagaaataaa

SEQ ID NO: 22667 - DNA, 33 bp, Homo sapien
tggtttttgtgatgtcaaaaatcttttccaaat

SEQ ID NO: 22668 - DNA, 33 bp, Homo sapien
tggtttttgtgatgtccaaaatcttttccaaat

SEQ ID NO: 22669 - DNA, 33 bp, Homo sapien
agacagataatagaaccaatcatataaagtcat

SEQ ID NO: 22670 - DNA, 33 bp, Homo sapien
agacagataatagaacgaatcatataaagtcat

SEQ ID NO: 22671 - DNA, 33 bp, Homo sapien
caaagctggccagagccaaaactaggacctaga

SEQ ID NO: 22672 - DNA, 33 bp, Homo sapien
caaagctggccagagcgaaaactaggacctaga

SEQ ID NO: 22673 - DNA, 33 bp, Homo sapien
atttagtaagtggccaagtgattattgagagac

SEQ ID NO: 22674 - DNA, 33 bp, Homo sapien
atttagtaagtggccacgtgattattgagagac

SEQ ID NO: 22675 - DNA, 33 bp, Homo sapien
agctttcagattagcacgaccacattataggat

SEQ ID NO: 22676 - DNA, 33 bp, Homo sapien
agctttcagattagcatgaccacattataggat

SEQ ID NO: 22677 - DNA, 33 bp, Homo sapien
tctaggaatttaaaaacgcgtcttcgaacaact

SEQ ID NO: 22678 - DNA, 33 bp, Homo sapien
tctaggaatttaaaaatgcgtcttcgaacaact

SEQ ID NO: 22679 - DNA, 33 bp, Homo sapien
ctcctcagtatcattgcaagggttttgagaatc

SEQ ID NO: 22680 - DNA, 33 bp, Homo sapien
ctcctcagtatcattgtaagggttttgagaatc

SEQ ID NO: 22681 - DNA, 33 bp, Homo sapien
ttgaaagcagtgatgacactttgattttattta

SEQ ID NO: 22682 - DNA, 33 bp, Homo sapien
ttgaaagcagtgatgagactttgattttattta

SEQ ID NO: 22683 - DNA, 33 bp, Homo sapien
tgggatcctgaaaatacctgtgtcagaaaatct

SEQ ID NO: 22684 - DNA, 33 bp, Homo sapien
tgggatcctgaaaatatctgtgtcagaaaatct

SEQ ID NO: 22685 - DNA, 33 bp, Homo sapien
tgcccctaaaattgtcacataggcagctgatta

SEQ ID NO: 22686 - DNA, 33 bp, Homo sapien
tgcccctaaaattgtcgcataggcagctgatta

SEQ ID NO: 22687 - DNA, 33 bp, Homo sapien
cttctggatgctcatacaagtagaataaaggaa

SEQ ID NO: 22688 - DNA, 33 bp, Homo sapien
cttctggatgctcatataagtagaataaaggaa

SEQ ID NO: 22689 - DNA, 33 bp, Homo sapien
gtgagttataatttaacgtgagcgtatctaatt

SEQ ID NO: 22690 - DNA, 33 bp, Homo sapien
gtgagttataatttaatgtgagcgtatctaatt

SEQ ID NO: 22691 - DNA, 33 bp, Homo sapien
aaagcagattgccagaagagtgataaaagatga

SEQ ID NO: 22692 - DNA, 33 bp, Homo sapien
aaagcagattgccagatgagtgataaaagatga

SEQ ID NO: 22693 - DNA, 33 bp, Homo sapien
tgcccacttgccaacacggaaatcttcaaacaa

SEQ ID NO: 22694 - DNA, 33 bp, Homo sapien
tgcccacttgccaacatggaaatcttcaaacaa

SEQ ID NO: 22695 - DNA, 33 bp, Homo sapien
aaaaaagaaaacaaagcacgatggcttagcaat

SEQ ID NO: 22696 - DNA, 33 bp, Homo sapien
aaaaaagaaaacaaaggacgatggcttagcaat

SEQ ID NO: 22697 - DNA, 33 bp, Homo sapien
gagcaacgggaacttacatcctgtaggaaggag

SEQ ID NO: 22698 - DNA, 33 bp, Homo sapien
gagcaacgggaacttatatcctgtaggaaggag

SEQ ID NO: 22699 - DNA, 33 bp, Homo sapien
ttagattagaattttgaaggtgacttcttagca

SEQ ID NO: 22700 - DNA, 33 bp, Homo sapien
ttagattagaattttgcaggtgacttcttagca

SEQ ID NO: 22701 - DNA, 33 bp, Homo sapien
aacagaaaaatagggcaatgaggggaataatca

SEQ ID NO: 22702 - DNA, 33 bp, Homo sapien
aacagaaaaatagggctatgaggggaataatca

SEQ ID NO: 22703 - DNA, 33 bp, Homo sapien
gtctgctccctctttcacacaacagcctttctg

SEQ ID NO: 22704 - DNA, 33 bp, Homo sapien
gtctgctccctctttcgcacaacagcctttctg

SEQ ID NO: 22705 - DNA, 33 bp, Homo sapien
aaaccagttcctttgaatattgatggaaggaaa

SEQ ID NO: 22706 - DNA, 33 bp, Homo sapien
aaaccagttcctttgagtattgatggaaggaaa

SEQ ID NO: 22707 - DNA, 33 bp, Homo sapien
aaagtgtcattgttaactaggccctgggctaag

SEQ ID NO: 22708 - DNA, 33 bp, Homo sapien
aaagtgtcattgttaattaggccctgggctaag

SEQ ID NO: 22709 - DNA, 33 bp, Homo sapien
ctctcagtccattgatcaagtcaaaagaaaaag

SEQ ID NO: 22710 - DNA, 33 bp, Homo sapien
ctctcagtccattgatgaagtcaaaagaaaaag

SEQ ID NO: 22711 - DNA, 33 bp, Homo sapien
ccaggcattgttgtagacactcagcacaaacta

SEQ ID NO: 22712 - DNA, 33 bp, Homo sapien
ccaggcattgttgtaggcactcagcacaaacta

SEQ ID NO: 22713 - DNA, 33 bp, Homo sapien
caactgcttagaaaccaaaaagaacctggcata

SEQ ID NO: 22714 - DNA, 33 bp, Homo sapien
caactgcttagaaaccgaaaagaacctggcata

SEQ ID NO: 22715 - DNA, 33 bp, Homo sapien
agttcaaagtttcaaccgcctgtgatgctattt

SEQ ID NO: 22716 - DNA, 33 bp, Homo sapien
agttcaaagtttcaactgcctgtgatgctattt

SEQ ID NO: 22717 - DNA, 33 bp, Homo sapien
acaaaacttccaaacactgtgtcttctattaat

SEQ ID NO: 22718 - DNA, 33 bp, Homo sapien
acaaaacttccaaacattgtgtcttctattaat

SEQ ID NO: 22719 - DNA, 33 bp, Homo sapien
gtttcagattaagtcacccacaggctcacaaaa

SEQ ID NO: 22720 - DNA, 33 bp, Homo sapien
gtttcagattaagtcatccacaggctcacaaaa

SEQ ID NO: 22721 - DNA, 33 bp, Homo sapien
tttgtaaccaaaatctaactcttgtcacacata

SEQ ID NO: 22722 - DNA, 33 bp, Homo sapien
tttgtaaccaaaatctgactcttgtcacacata

SEQ ID NO: 22723 - DNA, 33 bp, Homo sapien
aaagccagaaggctagcatttcttttttccttc

SEQ ID NO: 22724 - DNA, 33 bp, Homo sapien
aaagccagaaggctagtatttcttttttccttc

SEQ ID NO: 22725 - DNA, 33 bp, Homo sapien
ctagtttcatgaaaggcagttcttccacagtgg

SEQ ID NO: 22726 - DNA, 33 bp, Homo sapien
ctagtttcatgaaaggtagttcttccacagtgg

SEQ ID NO: 22727 - DNA, 33 bp, Homo sapien
ctcacctgtaacatgacggtaataatgctacca

SEQ ID NO: 22728 - DNA, 33 bp, Homo sapien
ctcacctgtaacatgagggtaataatgctacca

SEQ ID NO: 22729 - DNA, 33 bp, Homo sapien
caccttttctgtttcccccagtcatccttagtg

SEQ ID NO: 22730 - DNA, 33 bp, Homo sapien
caccttttctgtttccgccagtcatccttagtg

SEQ ID NO: 22731 - DNA, 33 bp, Homo sapien
ggcgatccaaacgcacactgaatttaataagca

SEQ ID NO: 22732 - DNA, 33 bp, Homo sapien
ggcgatccaaacgcacgctgaatttaataagca

SEQ ID NO: 22733 - DNA, 33 bp, Homo sapien
tattttagagaagaggaaactagagacttagag

SEQ ID NO: 22734 - DNA, 33 bp, Homo sapien
tattttagagaagagggaactagagacttagag

SEQ ID NO: 22735 - DNA, 33 bp, Homo sapien
tgcctcggtcatgacgaccttctttttcttcct

SEQ ID NO: 22736 - DNA, 33 bp, Homo sapien
tgcctcggtcatgacggccttctttttcttcct

SEQ ID NO: 22737 - DNA, 33 bp, Homo sapien
tccaaagtagagggaccaaaattatcactagca

SEQ ID NO: 22738 - DNA, 33 bp, Homo sapien
tccaaagtagagggactaaaattatcactagca

SEQ ID NO: 22739 - DNA, 33 bp, Homo sapien
aaaaagaaaattggtgcagacgagctgtgctta

SEQ ID NO: 22740 - DNA, 33 bp, Homo sapien
aaaaagaaaattggtgtagacgagctgtgctta

SEQ ID NO: 22741 - DNA, 33 bp, Homo sapien
aacagctacactttaccaccccatcgtacccta

SEQ ID NO: 22742 - DNA, 33 bp, Homo sapien
aacagctacactttactaccccatcgtacccta

SEQ ID NO: 22743 - DNA, 33 bp, Homo sapien
ctgtgacatcaaaagcagatagtgatgctaagg

SEQ ID NO: 22744 - DNA, 33 bp, Homo sapien
ctgtgacatcaaaagcggatagtgatgctaagg

SEQ ID NO: 22745 - DNA, 33 bp, Homo sapien
cagactaatgtcatccagagaaacaaaaattta

SEQ ID NO: 22746 - DNA, 33 bp, Homo sapien
cagactaatgtcatccggagaaacaaaaattta

SEQ ID NO: 22747 - DNA, 33 bp, Homo sapien
ggctctatgcatttcccgaagtaacatcagaat

SEQ ID NO: 22748 - DNA, 33 bp, Homo sapien
ggctctatgcatttcctgaagtaacatcagaat

SEQ ID NO: 22749 - DNA, 33 bp, Homo sapien
ccaattttgttgatcacgatagtctgcacagat

SEQ ID NO: 22750 - DNA, 33 bp, Homo sapien
ccaattttgttgatcatgatagtctgcacagat

SEQ ID NO: 22751 - DNA, 33 bp, Homo sapien
aagataagctgacagcacatataccttgaaaaa

SEQ ID NO: 22752 - DNA, 33 bp, Homo sapien
aagataagctgacagcccatataccttgaaaaa

SEQ ID NO: 22753 - DNA, 33 bp, Homo sapien
gagaacataatgtgacaaataggaaaggagaat

SEQ ID NO: 22754 - DNA, 33 bp, Homo sapien
gagaacataatgtgacgaataggaaaggagaat

SEQ ID NO: 22755 - DNA, 33 bp, Homo sapien
gacagacattactacaagtgtttacattctcct

SEQ ID NO: 22756 - DNA, 33 bp, Homo sapien
gacagacattactacaggtgtttacattctcct

SEQ ID NO: 22757 - DNA, 33 bp, Homo sapien
tacactcattagcagaacaatcatactaataac

SEQ ID NO: 22758 - DNA, 33 bp, Homo sapien
tacactcattagcagagcaatcatactaataac

SEQ ID NO: 22759 - DNA, 33 bp, Homo sapien
aagtcagtatcccttgccaacctgagatgttca

SEQ ID NO: 22760 - DNA, 33 bp, Homo sapien
aagtcagtatcccttggcaacctgagatgttca

SEQ ID NO: 22761 - DNA, 33 bp, Homo sapien
gccaaaaaggataacacaaagtggacgccgatg

SEQ ID NO: 22762 - DNA, 33 bp, Homo sapien
gccaaaaaggataacagaaagtggacgccgatg

SEQ ID NO: 22763 - DNA, 33 bp, Homo sapien
agtgcctcaatggagaagcccatagccaggtaa

SEQ ID NO: 22764 - DNA, 33 bp, Homo sapien
agtgcctcaatggagacgcccatagccaggtaa

SEQ ID NO: 22765 - DNA, 33 bp, Homo sapien
actgcctttcttgaccactcactgagtcctaga

SEQ ID NO: 22766 - DNA, 33 bp, Homo sapien
actgcctttcttgaccgctcactgagtcctaga

SEQ ID NO: 22767 - DNA, 33 bp, Homo sapien
aaagtggtgggattaaaatgaaccttgacagca

SEQ ID NO: 22768 - DNA, 33 bp, Homo sapien
aaagtggtgggattaagatgaaccttgacagca

SEQ ID NO: 22769 - DNA, 33 bp, Homo sapien
gtaaatatggaaatacaaaaaatgtgcttatct

SEQ ID NO: 22770 - DNA, 33 bp, Homo sapien
gtaaatatggaaatacgaaaaatgtgcttatct

SEQ ID NO: 22771 - DNA, 33 bp, Homo sapien
atcaaagcaaacatacaaatcaataatctaaag

SEQ ID NO: 22772 - DNA, 33 bp, Homo sapien
atcaaagcaaacatacgaatcaataatctaaag

SEQ ID NO: 22773 - DNA, 33 bp, Homo sapien
gtaaaatcataggtaccatggataggagcaata

SEQ ID NO: 22774 - DNA, 33 bp, Homo sapien
gtaaaatcataggtactatggataggagcaata

SEQ ID NO: 22775 - DNA, 33 bp, Homo sapien
tgatcaaaaccttatcaattcctactctggtct

SEQ ID NO: 22776 - DNA, 33 bp, Homo sapien
tgatcaaaaccttatcgattcctactctggtct

SEQ ID NO: 22777 - DNA, 33 bp, Homo sapien
gtagtgatctgggagacagatttgagataatac

SEQ ID NO: 22778 - DNA, 33 bp, Homo sapien
gtagtgatctgggagatagatttgagataatac

SEQ ID NO: 22779 - DNA, 33 bp, Homo sapien
tgtctgagagcttatccatccttgtgttccagc

SEQ ID NO: 22780 - DNA, 33 bp, Homo sapien
tgtctgagagcttatcgatccttgtgttccagc

SEQ ID NO: 22781 - DNA, 33 bp, Homo sapien
tttcacatacacagaaatactgaaaatcattta

SEQ ID NO: 22782 - DNA, 33 bp, Homo sapien
tttcacatacacagaagtactgaaaatcattta

SEQ ID NO: 22783 - DNA, 33 bp, Homo sapien
tcatttaattccagcaatgataggtgctgcaaa

SEQ ID NO: 22784 - DNA, 33 bp, Homo sapien
tcatttaattccagcagtgataggtgctgcaaa

SEQ ID NO: 22785 - DNA, 33 bp, Homo sapien
catgccagggctcttacggggaaatggggctgt

SEQ ID NO: 22786 - DNA, 33 bp, Homo sapien
catgccagggctcttatggggaaatggggctgt

SEQ ID NO: 22787 - DNA, 33 bp, Homo sapien
ttattaaatgcctatgaagttcacaataacaca

SEQ ID NO: 22788 - DNA, 33 bp, Homo sapien
ttattaaatgcctatggagttcacaataacaca

SEQ ID NO: 22789 - DNA, 33 bp, Homo sapien
gtgtatattctattgacaacatcgctaaattag

SEQ ID NO: 22790 - DNA, 33 bp, Homo sapien
gtgtatattctattgataacatcgctaaattag

SEQ ID NO: 22791 - DNA, 33 bp, Homo sapien
tggctccagggagtgaagtttctccaaattaaa

SEQ ID NO: 22792 - DNA, 33 bp, Homo sapien
tggctccagggagtgaggtttctccaaattaaa

SEQ ID NO: 22793 - DNA, 33 bp, Homo sapien
gaaccaaccccatgaaaacattgatctcatact

SEQ ID NO: 22794 - DNA, 33 bp, Homo sapien
gaaccaaccccatgaacacattgatctcatact

SEQ ID NO: 22795 - DNA, 33 bp, Homo sapien
acagctgggttctcatcatctagggcagtgctt

SEQ ID NO: 22796 - DNA, 33 bp, Homo sapien
acagctgggttctcattatctagggcagtgctt

SEQ ID NO: 22797 - DNA, 33 bp, Homo sapien
tctaaacactgaatgaacaacggaaaacaccag

SEQ ID NO: 22798 - DNA, 33 bp, Homo sapien
tctaaacactgaatgagcaacggaaaacaccag

SEQ ID NO: 22799 - DNA, 33 bp, Homo sapien
tcttgcccaatcagtcagaagatccaactactc

SEQ ID NO: 22800 - DNA, 33 bp, Homo sapien
tcttgcccaatcagtccgaagatccaactactc

SEQ ID NO: 22801 - DNA, 33 bp, Homo sapien
aatgactgcatcaacacaaggcaatgattgtgt

SEQ ID NO: 22802 - DNA, 33 bp, Homo sapien
aatgactgcatcaacataaggcaatgattgtgt

SEQ ID NO: 22803 - DNA, 33 bp, Homo sapien
acactctgtaaaaccccagatgcctacttttat

SEQ ID NO: 22804 - DNA, 33 bp, Homo sapien
acactctgtaaaaccctagatgcctacttttat

SEQ ID NO: 22805 - DNA, 33 bp, Homo sapien
gatggaggacaagctacagatacagccacatgg

SEQ ID NO: 22806 - DNA, 33 bp, Homo sapien
gatggaggacaagctatagatacagccacatgg

SEQ ID NO: 22807 - DNA, 33 bp, Homo sapien
taatttgggacacagaggtgtaggtacatgtta

SEQ ID NO: 22808 - DNA, 33 bp, Homo sapien
taatttgggacacagatgtgtaggtacatgtta

SEQ ID NO: 22809 - DNA, 33 bp, Homo sapien
ttggaacccaagttaacggacatatgggtgaat

SEQ ID NO: 22810 - DNA, 33 bp, Homo sapien
ttggaacccaagttaagggacatatgggtgaat

SEQ ID NO: 22811 - DNA, 33 bp, Homo sapien
atcaaataaacacaagcatccacaggccaccca

SEQ ID NO: 22812 - DNA, 33 bp, Homo sapien
atcaaataaacacaagtatccacaggccaccca

SEQ ID NO: 22813 - DNA, 33 bp, Homo sapien
ctgaactaaaatgtgcccacaggaaaaagatca

SEQ ID NO: 22814 - DNA, 33 bp, Homo sapien
ctgaactaaaatgtgctcacaggaaaaagatca

SEQ ID NO: 22815 - DNA, 33 bp, Homo sapien
ttccactgctcaatccatacagtgagtaaaatt

SEQ ID NO: 22816 - DNA, 33 bp, Homo sapien
ttccactgctcaatccgtacagtgagtaaaatt

SEQ ID NO: 22817 - DNA, 33 bp, Homo sapien
aactaagcttaagcacaaactagggctccagtg

SEQ ID NO: 22818 - DNA, 33 bp, Homo sapien
aactaagcttaagcaccaactagggctccagtg

SEQ ID NO: 22819 - DNA, 33 bp, Homo sapien
atcaagcctacacataactgagtcgtaacaaat

SEQ ID NO: 22820 - DNA, 33 bp, Homo sapien
atcaagcctacacatagctgagtcgtaacaaat

SEQ ID NO: 22821 - DNA, 33 bp, Homo sapien
ctctgtgcagaaagtaaacagggaagagtttta

SEQ ID NO: 22822 - DNA, 33 bp, Homo sapien
ctctgtgcagaaagtacacagggaagagtttta

SEQ ID NO: 22823 - DNA, 33 bp, Homo sapien
atggaacagcaaagacaatgaaaaaggaattta

SEQ ID NO: 22824 - DNA, 33 bp, Homo sapien
atggaacagcaaagacgatgaaaaaggaattta

SEQ ID NO: 22825 - DNA, 33 bp, Homo sapien
taaaaagctgattacaagtaacaaaatcttcct

SEQ ID NO: 22826 - DNA, 33 bp, Homo sapien
taaaaagctgattacaggtaacaaaatcttcct

SEQ ID NO: 22827 - DNA, 33 bp, Homo sapien
tgctaataggtggcccaattcacaagttttaaa

SEQ ID NO: 22828 - DNA, 33 bp, Homo sapien
tgctaataggtggcccgattcacaagttttaaa

SEQ ID NO: 22829 - DNA, 33 bp, Homo sapien
gagaaattgctatccacatgacagaaaataact

SEQ ID NO: 22830 - DNA, 33 bp, Homo sapien
gagaaattgctatccatatgacagaaaataact

SEQ ID NO: 22831 - DNA, 33 bp, Homo sapien
tgaaagggaaatgtacactgaaatagtcttttg

SEQ ID NO: 22832 - DNA, 33 bp, Homo sapien
tgaaagggaaatgtaccctgaaatagtcttttg

SEQ ID NO: 22833 - DNA, 33 bp, Homo sapien
ctgcaggaagggcatcgaaatgaaaacgagtac

SEQ ID NO: 22834 - DNA, 33 bp, Homo sapien
ctgcaggaagggcatctaaatgaaaacgagtac

SEQ ID NO: 22835 - DNA, 33 bp, Homo sapien
agtgtctggtaaaagaacatgagctttgagttt

SEQ ID NO: 22836 - DNA, 33 bp, Homo sapien
agtgtctggtaaaagagcatgagctttgagttt

SEQ ID NO: 22837 - DNA, 33 bp, Homo sapien
tggattacatcatgccaatttccattatatgat

SEQ ID NO: 22838 - DNA, 33 bp, Homo sapien
tggattacatcatgccgatttccattatatgat

SEQ ID NO: 22839 - DNA, 33 bp, Homo sapien
acacaaaaacacatacacaacatacatgcataa

SEQ ID NO: 22840 - DNA, 33 bp, Homo sapien
acacaaaaacacatacgcaacatacatgcataa

SEQ ID NO: 22841 - DNA, 33 bp, Homo sapien
gttgaatactgtgctaagatatctgtgccggca

SEQ ID NO: 22842 - DNA, 33 bp, Homo sapien
gttgaatactgtgctatgatatctgtgccggca

SEQ ID NO: 22843 - DNA, 33 bp, Homo sapien
tctcatttgattctcacgtgaaccaaataagat

SEQ ID NO: 22844 - DNA, 33 bp, Homo sapien
tctcatttgattctcaggtgaaccaaataagat

SEQ ID NO: 22845 - DNA, 33 bp, Homo sapien
aaccagcactgactacaacggcctccagtgatg

SEQ ID NO: 22846 - DNA, 33 bp, Homo sapien
aaccagcactgactacgacggcctccagtgatg

SEQ ID NO: 22847 - DNA, 33 bp, Homo sapien
catcacatttggcaaaacttcagtgttattccc

SEQ ID NO: 22848 - DNA, 33 bp, Homo sapien
catcacatttggcaaagcttcagtgttattccc

SEQ ID NO: 22849 - DNA, 33 bp, Homo sapien
gcctgtggttactctgaagcacaaactgaccaa

SEQ ID NO: 22850 - DNA, 33 bp, Homo sapien
gcctgtggttactctgcagcacaaactgaccaa

SEQ ID NO: 22851 - DNA, 33 bp, Homo sapien
ggcctgcatggcagtcgctgaatgatgtagccc

SEQ ID NO: 22852 - DNA, 33 bp, Homo sapien
ggcctgcatggcagtctctgaatgatgtagccc

SEQ ID NO: 22853 - DNA, 33 bp, Homo sapien
aacccccagcaatggacggaatttcaacaagaa

SEQ ID NO: 22854 - DNA, 33 bp, Homo sapien
aacccccagcaatggatggaatttcaacaagaa

SEQ ID NO: 22855 - DNA, 33 bp, Homo sapien
cccctgggtattcaggccaaacatagcctgctg

SEQ ID NO: 22856 - DNA, 33 bp, Homo sapien
cccctgggtattcaggtcaaacatagcctgctg

SEQ ID NO: 22857 - DNA, 33 bp, Homo sapien
attgttatgagatttaaacaagataattcatgt

SEQ ID NO: 22858 - DNA, 33 bp, Homo sapien
attgttatgagatttagacaagataattcatgt

SEQ ID NO: 22859 - DNA, 33 bp, Homo sapien
agctcccaaaacaagtaaacagctcttgccgag

SEQ ID NO: 22860 - DNA, 33 bp, Homo sapien
agctcccaaaacaagttaacagctcttgccgag

SEQ ID NO: 22861 - DNA, 33 bp, Homo sapien
acacaattcccactctaaaaaggtccttgatgc

SEQ ID NO: 22862 - DNA, 33 bp, Homo sapien
acacaattcccactctgaaaaggtccttgatgc

SEQ ID NO: 22863 - DNA, 33 bp, Homo sapien
ggttgtccttgtctcaaaataaccaggggccag

SEQ ID NO: 22864 - DNA, 33 bp, Homo sapien
ggttgtccttgtctcagaataaccaggggccag

SEQ ID NO: 22865 - DNA, 33 bp, Homo sapien
tgtgacttagaaacaacgttagtgctgggcagc

SEQ ID NO: 22866 - DNA, 33 bp, Homo sapien
tgtgacttagaaacaatgttagtgctgggcagc

SEQ ID NO: 22867 - DNA, 33 bp, Homo sapien
ctacctgctgttaaaacgtaaacccaagaaagc

SEQ ID NO: 22868 - DNA, 33 bp, Homo sapien
ctacctgctgttaaaatgtaaacccaagaaagc

SEQ ID NO: 22869 - DNA, 33 bp, Homo sapien
attaacgcagtggaagaactgaagatggggatt

SEQ ID NO: 22870 - DNA, 33 bp, Homo sapien
attaacgcagtggaaggactgaagatggggatt

SEQ ID NO: 22871 - DNA, 33 bp, Homo sapien
tagacaaaccaactcaactgggaaaataaatcc

SEQ ID NO: 22872 - DNA, 33 bp, Homo sapien
tagacaaaccaactcagctgggaaaataaatcc

SEQ ID NO: 22873 - DNA, 33 bp, Homo sapien
gagtatgtaaactatacagcctgtttctttttc

SEQ ID NO: 22874 - DNA, 33 bp, Homo sapien
gagtatgtaaactatatagcctgtttctttttc

SEQ ID NO: 22875 - DNA, 33 bp, Homo sapien
gccttattagtaaacacgggcactgtatcttta

SEQ ID NO: 22876 - DNA, 33 bp, Homo sapien
gccttattagtaaacatgggcactgtatcttta

SEQ ID NO: 22877 - DNA, 33 bp, Homo sapien
gaattctaatgttagcccctggtacagttgctc

SEQ ID NO: 22878 - DNA, 33 bp, Homo sapien
gaattctaatgttagctcctggtacagttgctc

SEQ ID NO: 22879 - DNA, 33 bp, Homo sapien
caattcctgaacatcaactagattcccccaact

SEQ ID NO: 22880 - DNA, 33 bp, Homo sapien
caattcctgaacatcagctagattcccccaact

SEQ ID NO: 22881 - DNA, 33 bp, Homo sapien
gtgaatttagcaaagactcatggtataagatca

SEQ ID NO: 22882 - DNA, 33 bp, Homo sapien
gtgaatttagcaaagattcatggtataagatca

SEQ ID NO: 22883 - DNA, 33 bp, Homo sapien
gtatagatttgtggcacaagatagggaaaagag

SEQ ID NO: 22884 - DNA, 33 bp, Homo sapien
gtatagatttgtggcataagatagggaaaagag

SEQ ID NO: 22885 - DNA, 33 bp, Homo sapien
ttgtgctaagctcttcaaggagtttacagacaa

SEQ ID NO: 22886 - DNA, 33 bp, Homo sapien
ttgtgctaagctcttcgaggagtttacagacaa

SEQ ID NO: 22887 - DNA, 33 bp, Homo sapien
agcttagcttacagtcaaactatttaaccagct

SEQ ID NO: 22888 - DNA, 33 bp, Homo sapien
agcttagcttacagtcgaactatttaaccagct

SEQ ID NO: 22889 - DNA, 33 bp, Homo sapien
tattgccacatatcaacttaatgagaagtgaat

SEQ ID NO: 22890 - DNA, 33 bp, Homo sapien
tattgccacatatcaagttaatgagaagtgaat

SEQ ID NO: 22891 - DNA, 33 bp, Homo sapien
aatgggaaggatattacgagatttcttcactgc

SEQ ID NO: 22892 - DNA, 33 bp, Homo sapien
aatgggaaggatattatgagatttcttcactgc

SEQ ID NO: 22893 - DNA, 33 bp, Homo sapien
gcttcatcatgttacaacaaagatgccatttca

SEQ ID NO: 22894 - DNA, 33 bp, Homo sapien
gcttcatcatgttacagcaaagatgccatttca

SEQ ID NO: 22895 - DNA, 33 bp, Homo sapien
aaaatgctttccttacactgaaatttcctgttt

SEQ ID NO: 22896 - DNA, 33 bp, Homo sapien
aaaatgctttccttacgctgaaatttcctgttt

SEQ ID NO: 22897 - DNA, 33 bp, Homo sapien
ttgtagcaacactaaacgaactaagacagtttt

SEQ ID NO: 22898 - DNA, 33 bp, Homo sapien
ttgtagcaacactaaatgaactaagacagtttt

SEQ ID NO: 22899 - DNA, 33 bp, Homo sapien
gcaatcctttacattgcatggcttatagctgca

SEQ ID NO: 22900 - DNA, 33 bp, Homo sapien
gcaatcctttacattgtatggcttatagctgca

SEQ ID NO: 22901 - DNA, 33 bp, Homo sapien
ataagtagtaaacatggcatattcatttgcttt

SEQ ID NO: 22902 - DNA, 33 bp, Homo sapien
ataagtagtaaacatgtcatattcatttgcttt

SEQ ID NO: 22903 - DNA, 33 bp, Homo sapien
acaaatagagtgaatcaatttacttagagttgg

SEQ ID NO: 22904 - DNA, 33 bp, Homo sapien
acaaatagagtgaatcgatttacttagagttgg

SEQ ID NO: 22905 - DNA, 33 bp, Homo sapien
ccacgccagcaactcacgtcagccaatcatggt

SEQ ID NO: 22906 - DNA, 33 bp, Homo sapien
ccacgccagcaactcatgtcagccaatcatggt

SEQ ID NO: 22907 - DNA, 33 bp, Homo sapien
gaagatcgctttttcccctggatgttgctgtgt

SEQ ID NO: 22908 - DNA, 33 bp, Homo sapien
gaagatcgctttttcctctggatgttgctgtgt

SEQ ID NO: 22909 - DNA, 33 bp, Homo sapien
cttatctcttgcccatcaattctgcaatgcagt

SEQ ID NO: 22910 - DNA, 33 bp, Homo sapien
cttatctcttgcccatgaattctgcaatgcagt

SEQ ID NO: 22911 - DNA, 33 bp, Homo sapien
tggattccaggttgcgcagaagacttggtgatg

SEQ ID NO: 22912 - DNA, 33 bp, Homo sapien
tggattccaggttgcgtagaagacttggtgatg

SEQ ID NO: 22913 - DNA, 33 bp, Homo sapien
ctgccagggccaaactgaatatccattttaatc

SEQ ID NO: 22914 - DNA, 33 bp, Homo sapien
ctgccagggccaaacttaatatccattttaatc

SEQ ID NO: 22915 - DNA, 33 bp, Homo sapien
ttaactccaataatgacgctgtgaaatattatt

SEQ ID NO: 22916 - DNA, 33 bp, Homo sapien
ttaactccaataatgatgctgtgaaatattatt

SEQ ID NO: 22917 - DNA, 33 bp, Homo sapien
aatcctacattatttcaatttgcacaccctaat

SEQ ID NO: 22918 - DNA, 33 bp, Homo sapien
aatcctacattatttcgatttgcacaccctaat

SEQ ID NO: 22919 - DNA, 33 bp, Homo sapien
ccagggatggataaggaaataaaacagaaattt

SEQ ID NO: 22920 - DNA, 33 bp, Homo sapien
ccagggatggataagggaataaaacagaaattt

SEQ ID NO: 22921 - DNA, 33 bp, Homo sapien
caccatgaggtctgcacgacgttccagtcaatc

SEQ ID NO: 22922 - DNA, 33 bp, Homo sapien
caccatgaggtctgcatgacgttccagtcaatc

SEQ ID NO: 22923 - DNA, 33 bp, Homo sapien
acgattcataaaagaacgggtgtggctatattc

SEQ ID NO: 22924 - DNA, 33 bp, Homo sapien
acgattcataaaagaatgggtgtggctatattc

SEQ ID NO: 22925 - DNA, 33 bp, Homo sapien
gagtagccagagctgacgagttgggaaggggct

SEQ ID NO: 22926 - DNA, 33 bp, Homo sapien
gagtagccagagctgatgagttgggaaggggct

SEQ ID NO: 22927 - DNA, 33 bp, Homo sapien
tcactttttggtgaacccaaggcccctctctca

SEQ ID NO: 22928 - DNA, 33 bp, Homo sapien
tcactttttggtgaactcaaggcccctctctca

SEQ ID NO: 22929 - DNA, 33 bp, Homo sapien
agcagggaagattgacaatgagtctccttctgt

SEQ ID NO: 22930 - DNA, 33 bp, Homo sapien
agcagggaagattgacgatgagtctccttctgt

SEQ ID NO: 22931 - DNA, 33 bp, Homo sapien
gttctggattggtctggacaggactgttagaac

SEQ ID NO: 22932 - DNA, 33 bp, Homo sapien
gttctggattggtctgtacaggactgttagaac

SEQ ID NO: 22933 - DNA, 33 bp, Homo sapien
aacgcccagatcataacgaattttatgagtgtc

SEQ ID NO: 22934 - DNA, 33 bp, Homo sapien
aacgcccagatcataatgaattttatgagtgtc

SEQ ID NO: 22935 - DNA, 33 bp, Homo sapien
ggcaggtggcctctccaaattgttctctctgag

SEQ ID NO: 22936 - DNA, 33 bp, Homo sapien
ggcaggtggcctctccgaattgttctctctgag

SEQ ID NO: 22937 - DNA, 33 bp, Homo sapien
gagaaacaactgggaggaattctgaatgacaat

SEQ ID NO: 22938 - DNA, 33 bp, Homo sapien
gagaaacaactgggagtaattctgaatgacaat

SEQ ID NO: 22939 - DNA, 33 bp, Homo sapien
ttaaactggataccgacacccagattgaggtga

SEQ ID NO: 22940 - DNA, 33 bp, Homo sapien
ttaaactggataccgagacccagattgaggtga

SEQ ID NO: 22941 - DNA, 33 bp, Homo sapien
ccaaagagcaatgaaacgaagcccgtgataaga

SEQ ID NO: 22942 - DNA, 33 bp, Homo sapien
ccaaagagcaatgaaaggaagcccgtgataaga

SEQ ID NO: 22943 - DNA, 33 bp, Homo sapien
tttactaagcattttccatttgtcaaataccat

SEQ ID NO: 22944 - DNA, 33 bp, Homo sapien
tttactaagcattttctatttgtcaaataccat

SEQ ID NO: 22945 - DNA, 33 bp, Homo sapien
catgctgtgtgctttagatgttacctatttaat

SEQ ID NO: 22946 - DNA, 33 bp, Homo sapien
catgctgtgtgctttatatgttacctatttaat

SEQ ID NO: 22947 - DNA, 33 bp, Homo sapien
aatacaaattgcaaaacttatttctacaaatgc

SEQ ID NO: 22948 - DNA, 33 bp, Homo sapien
aatacaaattgcaaaagttatttctacaaatgc

SEQ ID NO: 22949 - DNA, 33 bp, Homo sapien
tatcataataagcaaacgcaagttccctttaag

SEQ ID NO: 22950 - DNA, 33 bp, Homo sapien
tatcataataagcaaatgcaagttccctttaag

SEQ ID NO: 22951 - DNA, 33 bp, Homo sapien
gattgcagaaccaggaagtgatcccagttattt

SEQ ID NO: 22952 - DNA, 33 bp, Homo sapien
gattgcagaaccaggatgtgatcccagttattt

SEQ ID NO: 22953 - DNA, 33 bp, Homo sapien
tgtgacggtgtcagcactagatacggcaatgcc

SEQ ID NO: 22954 - DNA, 33 bp, Homo sapien
tgtgacggtgtcagcattagatacggcaatgcc

SEQ ID NO: 22955 - DNA, 33 bp, Homo sapien
tgtattctcacaatcactctatgagataagtat

SEQ ID NO: 22956 - DNA, 33 bp, Homo sapien
tgtattctcacaatcagtctatgagataagtat

SEQ ID NO: 22957 - DNA, 33 bp, Homo sapien
gctggctgtgtggttacggggtcagaatgtaac

SEQ ID NO: 22958 - DNA, 33 bp, Homo sapien
gctggctgtgtggttatggggtcagaatgtaac

SEQ ID NO: 22959 - DNA, 33 bp, Homo sapien
ctcactggtcatcaagaagttgtttttatttga

SEQ ID NO: 22960 - DNA, 33 bp, Homo sapien
ctcactggtcatcaaggagttgtttttatttga

SEQ ID NO: 22961 - DNA, 33 bp, Homo sapien
ttgatcacaggcgactgaccagacagtggtgtc

SEQ ID NO: 22962 - DNA, 33 bp, Homo sapien
ttgatcacaggcgacttaccagacagtggtgtc

SEQ ID NO: 22963 - DNA, 33 bp, Homo sapien
gaatattcttgagccgcattcttgggctattta

SEQ ID NO: 22964 - DNA, 33 bp, Homo sapien
gaatattcttgagccgtattcttgggctattta

SEQ ID NO: 22965 - DNA, 33 bp, Homo sapien
tatgcttacccatggcacacctagctatgatct

SEQ ID NO: 22966 - DNA, 33 bp, Homo sapien
tatgcttacccatggcgcacctagctatgatct

SEQ ID NO: 22967 - DNA, 33 bp, Homo sapien
ggtaaagagagagcataagacaggaaaccagaa

SEQ ID NO: 22968 - DNA, 33 bp, Homo sapien
ggtaaagagagagcatgagacaggaaaccagaa

SEQ ID NO: 22969 - DNA, 33 bp, Homo sapien
gctggccacatcttccaattgcctataaacaaa

SEQ ID NO: 22970 - DNA, 33 bp, Homo sapien
gctggccacatcttccgattgcctataaacaaa

SEQ ID NO: 22971 - DNA, 33 bp, Homo sapien
aaagatattttgtagggaaagcaaagaccctta

SEQ ID NO: 22972 - DNA, 33 bp, Homo sapien
aaagatattttgtaggtaaagcaaagaccctta

SEQ ID NO: 22973 - DNA, 33 bp, Homo sapien
cattatcactccaggaagtacttttgggatagg

SEQ ID NO: 22974 - DNA, 33 bp, Homo sapien
cattatcactccaggaggtacttttgggatagg

SEQ ID NO: 22975 - DNA, 33 bp, Homo sapien
ggaagacattggacagacctcatcttcatgcat

SEQ ID NO: 22976 - DNA, 33 bp, Homo sapien
ggaagacattggacagccctcatcttcatgcat

SEQ ID NO: 22977 - DNA, 33 bp, Homo sapien
cactgcctttcatctcagaaccaaaaatgcttt

SEQ ID NO: 22978 - DNA, 33 bp, Homo sapien
cactgcctttcatctcggaaccaaaaatgcttt

SEQ ID NO: 22979 - DNA, 33 bp, Homo sapien
ttccttttcttcattcccattggcacaagggca

SEQ ID NO: 22980 - DNA, 33 bp, Homo sapien
ttccttttcttcattctcattggcacaagggca

SEQ ID NO: 22981 - DNA, 33 bp, Homo sapien
tcaattgttataggccaatactgtggcaattca

SEQ ID NO: 22982 - DNA, 33 bp, Homo sapien
tcaattgttataggccgatactgtggcaattca

SEQ ID NO: 22983 - DNA, 33 bp, Homo sapien
aaaacaaaattcaaccagaaatcagacaagatc

SEQ ID NO: 22984 - DNA, 33 bp, Homo sapien
aaaacaaaattcaacccgaaatcagacaagatc

SEQ ID NO: 22985 - DNA, 33 bp, Homo sapien
atccaagcaaaaaccacatccatgccaccaaat

SEQ ID NO: 22986 - DNA, 33 bp, Homo sapien
atccaagcaaaaaccatatccatgccaccaaat

SEQ ID NO: 22987 - DNA, 33 bp, Homo sapien
cccaaaatcattgtgaagaataactgagtgaac

SEQ ID NO: 22988 - DNA, 33 bp, Homo sapien
cccaaaatcattgtgaggaataactgagtgaac

SEQ ID NO: 22989 - DNA, 33 bp, Homo sapien
ccataattccaaaacaacaagatgaacattttg

SEQ ID NO: 22990 - DNA, 33 bp, Homo sapien
ccataattccaaaacagcaagatgaacattttg

SEQ ID NO: 22991 - DNA, 33 bp, Homo sapien
aattgtcctaatcaaccatgaattttctaattt

SEQ ID NO: 22992 - DNA, 33 bp, Homo sapien
aattgtcctaatcaactatgaattttctaattt

SEQ ID NO: 22993 - DNA, 33 bp, Homo sapien
gagtttgacgaatttgcaatcagaaattctgtt

SEQ ID NO: 22994 - DNA, 33 bp, Homo sapien
gagtttgacgaatttggaatcagaaattctgtt

SEQ ID NO: 22995 - DNA, 33 bp, Homo sapien
cgagtcaatccatgaaaggtagtagctggcaac

SEQ ID NO: 22996 - DNA, 33 bp, Homo sapien
cgagtcaatccatgaagggtagtagctggcaac

SEQ ID NO: 22997 - DNA, 33 bp, Homo sapien
tgacattgagagatgaataagctttggctaagt

SEQ ID NO: 22998 - DNA, 33 bp, Homo sapien
tgacattgagagatgagtaagctttggctaagt

SEQ ID NO: 22999 - DNA, 33 bp, Homo sapien
acaaaatggagtaagaccgtgagtattcttaga

SEQ ID NO: 23000 - DNA, 33 bp, Homo sapien
acaaaatggagtaagatcgtgagtattcttaga

SEQ ID NO: 23001 - DNA, 33 bp, Homo sapien
aaatacatttttcttaccaactggttatacaga

SEQ ID NO: 23002 - DNA, 33 bp, Homo sapien
aaatacatttttcttagcaactggttatacaga

SEQ ID NO: 23003 - DNA, 33 bp, Homo sapien
tgtttttggaaagaggacatctgtaactaaatc

SEQ ID NO: 23004 - DNA, 33 bp, Homo sapien
tgtttttggaaagagggcatctgtaactaaatc

SEQ ID NO: 23005 - DNA, 33 bp, Homo sapien
ataataactgtttgagaagaaaaagaaattaaa

SEQ ID NO: 23006 - DNA, 33 bp, Homo sapien
ataataactgtttgaggagaaaaagaaattaaa

SEQ ID NO: 23007 - DNA, 33 bp, Homo sapien
gctcaatcccactgtacagaaccaatctctcta

SEQ ID NO: 23008 - DNA, 33 bp, Homo sapien
gctcaatcccactgtagagaaccaatctctcta

SEQ ID NO: 23009 - DNA, 33 bp, Homo sapien
tgctctggctgtcataagaggtttcttttctgc

SEQ ID NO: 23010 - DNA, 33 bp, Homo sapien
tgctctggctgtcatacgaggtttcttttctgc

SEQ ID NO: 23011 - DNA, 33 bp, Homo sapien
gagtcatgactaatgacacactgaaggaggcag

SEQ ID NO: 23012 - DNA, 33 bp, Homo sapien
gagtcatgactaatgatacactgaaggaggcag

SEQ ID NO: 23013 - DNA, 33 bp, Homo sapien
gaagcctataaggagcagaacctggaaaacaac

SEQ ID NO: 23014 - DNA, 33 bp, Homo sapien
gaagcctataaggagcggaacctggaaaacaac

SEQ ID NO: 23015 - DNA, 33 bp, Homo sapien
gctgaataattctaacccagacactgcaaattg

SEQ ID NO: 23016 - DNA, 33 bp, Homo sapien
gctgaataattctaacgcagacactgcaaattg

SEQ ID NO: 23017 - DNA, 33 bp, Homo sapien
aggagagcttttcctaatacatgagaaaagaat

SEQ ID NO: 23018 - DNA, 33 bp, Homo sapien
aggagagcttttcctagtacatgagaaaagaat

SEQ ID NO: 23019 - DNA, 33 bp, Homo sapien
tcactttcactaccacccatgttctaggatgca

SEQ ID NO: 23020 - DNA, 33 bp, Homo sapien
tcactttcactaccactcatgttctaggatgca

SEQ ID NO: 23021 - DNA, 33 bp, Homo sapien
tcctcatcaagttcaccgactccttgaattctg

SEQ ID NO: 23022 - DNA, 33 bp, Homo sapien
tcctcatcaagttcacggactccttgaattctg

SEQ ID NO: 23023 - DNA, 33 bp, Homo sapien
cagtaaggagtacaacagaggcacgaaagtagg

SEQ ID NO: 23024 - DNA, 33 bp, Homo sapien
cagtaaggagtacaacggaggcacgaaagtagg

SEQ ID NO: 23025 - DNA, 33 bp, Homo sapien
tacactaggccattaaagactgttacctgggac

SEQ ID NO: 23026 - DNA, 33 bp, Homo sapien
tacactaggccattaaggactgttacctgggac

SEQ ID NO: 23027 - DNA, 33 bp, Homo sapien
ggttaggtagttgagaacattgcccaggagatt

SEQ ID NO: 23028 - DNA, 33 bp, Homo sapien
ggttaggtagttgagaccattgcccaggagatt

SEQ ID NO: 23029 - DNA, 33 bp, Homo sapien
ttcctccttttctccaaggcattcgcacagtgc

SEQ ID NO: 23030 - DNA, 33 bp, Homo sapien
ttcctccttttctccatggcattcgcacagtgc

SEQ ID NO: 23031 - DNA, 33 bp, Homo sapien
aatggatccctctcaccgtaaggagatacaaac

SEQ ID NO: 23032 - DNA, 33 bp, Homo sapien
aatggatccctctcactgtaaggagatacaaac

SEQ ID NO: 23033 - DNA, 33 bp, Homo sapien
caagcccacaagggaactgaagtaccagctgcc

SEQ ID NO: 23034 - DNA, 33 bp, Homo sapien
caagcccacaagggaagtgaagtaccagctgcc

SEQ ID NO: 23035 - DNA, 33 bp, Homo sapien
gactttggaaccaagacaggacttggggtttta

SEQ ID NO: 23036 - DNA, 33 bp, Homo sapien
gactttggaaccaagataggacttggggtttta

SEQ ID NO: 23037 - DNA, 33 bp, Homo sapien
tttgtgaggctcaatgaaagtatagcacttatt

SEQ ID NO: 23038 - DNA, 33 bp, Homo sapien
tttgtgaggctcaatgcaagtatagcacttatt

SEQ ID NO: 23039 - DNA, 33 bp, Homo sapien
agtacagaaagtataaatcaaaacatcacaaaa

SEQ ID NO: 23040 - DNA, 33 bp, Homo sapien
agtacagaaagtataagtcaaaacatcacaaaa

SEQ ID NO: 23041 - DNA, 33 bp, Homo sapien
gtgtagagtctagttgcaactttggatgtatgt

SEQ ID NO: 23042 - DNA, 33 bp, Homo sapien
gtgtagagtctagttgtaactttggatgtatgt

SEQ ID NO: 23043 - DNA, 33 bp, Homo sapien
ttggtctgtttagatgcacattgcatgatgaac

SEQ ID NO: 23044 - DNA, 33 bp, Homo sapien
ttggtctgtttagatgtacattgcatgatgaac

SEQ ID NO: 23045 - DNA, 33 bp, Homo sapien
gaataaacaaaaaacactgcatacagggtaaca

SEQ ID NO: 23046 - DNA, 33 bp, Homo sapien
gaataaacaaaaaacattgcatacagggtaaca

SEQ ID NO: 23047 - DNA, 33 bp, Homo sapien
agggatttgtagtaaaatatcaaaagatctagc

SEQ ID NO: 23048 - DNA, 33 bp, Homo sapien
agggatttgtagtaaagtatcaaaagatctagc

SEQ ID NO: 23049 - DNA, 33 bp, Homo sapien
ctcaaggctctagacacgaagaattggaaaagg

SEQ ID NO: 23050 - DNA, 33 bp, Homo sapien
ctcaaggctctagacatgaagaattggaaaagg

SEQ ID NO: 23051 - DNA, 33 bp, Homo sapien
tgggatacagaatcaaagagcctcatcttttga

SEQ ID NO: 23052 - DNA, 33 bp, Homo sapien
tgggatacagaatcaaggagcctcatcttttga

SEQ ID NO: 23053 - DNA, 33 bp, Homo sapien
ggctaaatacctgttaaaaatcaaacagtaaat

SEQ ID NO: 23054 - DNA, 33 bp, Homo sapien
ggctaaatacctgttacaaatcaaacagtaaat

SEQ ID NO: 23055 - DNA, 33 bp, Homo sapien
ccttatattgacattacatcacccttttgtaat

SEQ ID NO: 23056 - DNA, 33 bp, Homo sapien
ccttatattgacattatatcacccttttgtaat

SEQ ID NO: 23057 - DNA, 33 bp, Homo sapien
atttgactaaaccctacccatgtagctcttgaa

SEQ ID NO: 23058 - DNA, 33 bp, Homo sapien
atttgactaaaccctatccatgtagctcttgaa

SEQ ID NO: 23059 - DNA, 33 bp, Homo sapien
ttccttattgctggaaagacaaagcatccttaa

SEQ ID NO: 23060 - DNA, 33 bp, Homo sapien
ttccttattgctggaatgacaaagcatccttaa

SEQ ID NO: 23061 - DNA, 33 bp, Homo sapien
ctcttttcttcacaaactcctcagtctcatgta

SEQ ID NO: 23062 - DNA, 33 bp, Homo sapien
ctcttttcttcacaaattcctcagtctcatgta

SEQ ID NO: 23063 - DNA, 33 bp, Homo sapien
atgcatacaaaaatggcattgatatatggaatc

SEQ ID NO: 23064 - DNA, 33 bp, Homo sapien
atgcatacaaaaatggtattgatatatggaatc

SEQ ID NO: 23065 - DNA, 33 bp, Homo sapien
gcaataacaatgaaagacattcctgtatcctaa

SEQ ID NO: 23066 - DNA, 33 bp, Homo sapien
gcaataacaatgaaaggcattcctgtatcctaa

SEQ ID NO: 23067 - DNA, 33 bp, Homo sapien
gccatatactattctgcaggggccatatatttc

SEQ ID NO: 23068 - DNA, 33 bp, Homo sapien
gccatatactattctggaggggccatatatttc

SEQ ID NO: 23069 - DNA, 33 bp, Homo sapien
gtaatatcataaaatgcaaggaaacagttcttc

SEQ ID NO: 23070 - DNA, 33 bp, Homo sapien
gtaatatcataaaatggaaggaaacagttcttc

SEQ ID NO: 23071 - DNA, 33 bp, Homo sapien
actttggaaacagtgaatatctatatatcttcc

SEQ ID NO: 23072 - DNA, 33 bp, Homo sapien
actttggaaacagtgagtatctatatatcttcc

SEQ ID NO: 23073 - DNA, 33 bp, Homo sapien
aggtcagagaggggccacctgggatgcacagca

SEQ ID NO: 23074 - DNA, 33 bp, Homo sapien
aggtcagagaggggccgcctgggatgcacagca

SEQ ID NO: 23075 - DNA, 33 bp, Homo sapien
tttggctctgggcataagtttctgggagtgggc

SEQ ID NO: 23076 - DNA, 33 bp, Homo sapien
tttggctctgggcatatgtttctgggagtgggc

SEQ ID NO: 23077 - DNA, 33 bp, Homo sapien
tcatgtagatcactctcaagcaataattaaaaa

SEQ ID NO: 23078 - DNA, 33 bp, Homo sapien
tcatgtagatcactcttaagcaataattaaaaa

SEQ ID NO: 23079 - DNA, 33 bp, Homo sapien
gctgattttaacgaagcacctgtgaagaaaagt

SEQ ID NO: 23080 - DNA, 33 bp, Homo sapien
gctgattttaacgaaggacctgtgaagaaaagt

SEQ ID NO: 23081 - DNA, 33 bp, Homo sapien
acatcctttagcaaaacaggtacactgggcaat

SEQ ID NO: 23082 - DNA, 33 bp, Homo sapien
acatcctttagcaaaagaggtacactgggcaat

SEQ ID NO: 23083 - DNA, 33 bp, Homo sapien
caacaatcttgcaataaagttcagccatccatc

SEQ ID NO: 23084 - DNA, 33 bp, Homo sapien
caacaatcttgcaatagagttcagccatccatc

SEQ ID NO: 23085 - DNA, 33 bp, Homo sapien
ttaataaactggacaacgctcattcctgaagtc

SEQ ID NO: 23086 - DNA, 33 bp, Homo sapien
ttaataaactggacaatgctcattcctgaagtc

SEQ ID NO: 23087 - DNA, 33 bp, Homo sapien
aaaaactggatctctacgtcatcctttgtccct

SEQ ID NO: 23088 - DNA, 33 bp, Homo sapien
aaaaactggatctctatgtcatcctttgtccct

SEQ ID NO: 23089 - DNA, 33 bp, Homo sapien
gggcctgtgttatgaaacctgtgcagtggattt

SEQ ID NO: 23090 - DNA, 33 bp, Homo sapien
gggcctgtgttatgaatcctgtgcagtggattt

SEQ ID NO: 23091 - DNA, 33 bp, Homo sapien
cataaatcttaatgccaataaatctaagataac

SEQ ID NO: 23092 - DNA, 33 bp, Homo sapien
cataaatcttaatgccgataaatctaagataac

SEQ ID NO: 23093 - DNA, 33 bp, Homo sapien
agtgaatcacagtgcaaaacaaaaacactaaat

SEQ ID NO: 23094 - DNA, 33 bp, Homo sapien
agtgaatcacagtgcagaacaaaaacactaaat

SEQ ID NO: 23095 - DNA, 33 bp, Homo sapien
ttctaagtacaacagaacaggctgtttgcaata

SEQ ID NO: 23096 - DNA, 33 bp, Homo sapien
ttctaagtacaacagaccaggctgtttgcaata

SEQ ID NO: 23097 - DNA, 33 bp, Homo sapien
atcacagggttaattaaaacactaagtgactta

SEQ ID NO: 23098 - DNA, 33 bp, Homo sapien
atcacagggttaattagaacactaagtgactta

SEQ ID NO: 23099 - DNA, 33 bp, Homo sapien
atcctttgaaccagtacgtgggtcactaaaaat

SEQ ID NO: 23100 - DNA, 33 bp, Homo sapien
atcctttgaaccagtatgtgggtcactaaaaat

SEQ ID NO: 23101 - DNA, 33 bp, Homo sapien
ttttcttgaaagcaccaagtttccactgcactt

SEQ ID NO: 23102 - DNA, 33 bp, Homo sapien
ttttcttgaaagcaccgagtttccactgcactt

SEQ ID NO: 23103 - DNA, 33 bp, Homo sapien
acaatgtgttcacttcaaggcatgactttccca

SEQ ID NO: 23104 - DNA, 33 bp, Homo sapien
acaatgtgttcacttcgaggcatgactttccca

SEQ ID NO: 23105 - DNA, 33 bp, Homo sapien
ccacattatcaacctccaaatacccacaggggt

SEQ ID NO: 23106 - DNA, 33 bp, Homo sapien
ccacattatcaacctctaaatacccacaggggt

SEQ ID NO: 23107 - DNA, 33 bp, Homo sapien
atccagaggggagtaacggttagtaaagtactt

SEQ ID NO: 23108 - DNA, 33 bp, Homo sapien
atccagaggggagtaatggttagtaaagtactt

SEQ ID NO: 23109 - DNA, 33 bp, Homo sapien
acttagggattcactgcaagatttcttgaaaga

SEQ ID NO: 23110 - DNA, 33 bp, Homo sapien
acttagggattcactggaagatttcttgaaaga

SEQ ID NO: 23111 - DNA, 33 bp, Homo sapien
cacaggctcagatagacagaagtattagaatat

SEQ ID NO: 23112 - DNA, 33 bp, Homo sapien
cacaggctcagatagagagaagtattagaatat

SEQ ID NO: 23113 - DNA, 33 bp, Homo sapien
taagcaaaggcatgcgaaaattctacctttatt

SEQ ID NO: 23114 - DNA, 33 bp, Homo sapien
taagcaaaggcatgcgcaaattctacctttatt

SEQ ID NO: 23115 - DNA, 33 bp, Homo sapien
aagtcatattaccaaactcgatttaggcatccg

SEQ ID NO: 23116 - DNA, 33 bp, Homo sapien
aagtcatattaccaaagtcgatttaggcatccg

SEQ ID NO: 23117 - DNA, 33 bp, Homo sapien
aatttcagtcttgcaacagtctaattcagattc

SEQ ID NO: 23118 - DNA, 33 bp, Homo sapien
aatttcagtcttgcaatagtctaattcagattc

SEQ ID NO: 23119 - DNA, 33 bp, Homo sapien
aaaatgccattgcttacctccaaaagttacttt

SEQ ID NO: 23120 - DNA, 33 bp, Homo sapien
aaaatgccattgcttagctccaaaagttacttt

SEQ ID NO: 23121 - DNA, 33 bp, Homo sapien
tttgagggtagcattgcagttatgttggaagtt

SEQ ID NO: 23122 - DNA, 33 bp, Homo sapien
tttgagggtagcattgtagttatgttggaagtt

SEQ ID NO: 23123 - DNA, 33 bp, Homo sapien
atgttcctgctaaagacataaaacttgactcta

SEQ ID NO: 23124 - DNA, 33 bp, Homo sapien
atgttcctgctaaagatataaaacttgactcta

SEQ ID NO: 23125 - DNA, 33 bp, Homo sapien
acatatggtaaaattacaggttagtcaagatac

SEQ ID NO: 23126 - DNA, 33 bp, Homo sapien
acatatggtaaaattataggttagtcaagatac

SEQ ID NO: 23127 - DNA, 33 bp, Homo sapien
ttagaatgccatttataaaaagtttaaaacaga

SEQ ID NO: 23128 - DNA, 33 bp, Homo sapien
ttagaatgccatttatgaaaagtttaaaacaga

SEQ ID NO: 23129 - DNA, 33 bp, Homo sapien
aaacgacgctaaagaaattaaggagaaatcatg

SEQ ID NO: 23130 - DNA, 33 bp, Homo sapien
aaacgacgctaaagaacttaaggagaaatcatg

SEQ ID NO: 23131 - DNA, 33 bp, Homo sapien
ttacacttccttatggacagtttctattaatta

SEQ ID NO: 23132 - DNA, 33 bp, Homo sapien
ttacacttccttatgggcagtttctattaatta

SEQ ID NO: 23133 - DNA, 33 bp, Homo sapien
gaaaagtaacaatatcaaacgaatactaaacag

SEQ ID NO: 23134 - DNA, 33 bp, Homo sapien
gaaaagtaacaatatccaacgaatactaaacag

SEQ ID NO: 23135 - DNA, 33 bp, Homo sapien
ttatttgtgaatctctaaagtcttgctttcaca

SEQ ID NO: 23136 - DNA, 33 bp, Homo sapien
ttatttgtgaatctctcaagtcttgctttcaca

SEQ ID NO: 23137 - DNA, 33 bp, Homo sapien
tggattcaaatgaagagaaaagtaggacttaca

SEQ ID NO: 23138 - DNA, 33 bp, Homo sapien
tggattcaaatgaagataaaagtaggacttaca

SEQ ID NO: 23139 - DNA, 33 bp, Homo sapien
aggacagggactgggagagtgacagtagggttt

SEQ ID NO: 23140 - DNA, 33 bp, Homo sapien
aggacagggactgggatagtgacagtagggttt

SEQ ID NO: 23141 - DNA, 33 bp, Homo sapien
caaccatgtctcagccaggaacactgtccaggg

SEQ ID NO: 23142 - DNA, 33 bp, Homo sapien
caaccatgtctcagccgggaacactgtccaggg

SEQ ID NO: 23143 - DNA, 33 bp, Homo sapien
ttcccaggttagaaggacacacactggctacaa

SEQ ID NO: 23144 - DNA, 33 bp, Homo sapien
ttcccaggttagaaggccacacactggctacaa

SEQ ID NO: 23145 - DNA, 33 bp, Homo sapien
gaatgccctctcctggaaagctaggaatgttga

SEQ ID NO: 23146 - DNA, 33 bp, Homo sapien
gaatgccctctcctgggaagctaggaatgttga

SEQ ID NO: 23147 - DNA, 33 bp, Homo sapien
ctttgatttagacaaccagaaaatgaaataccc

SEQ ID NO: 23148 - DNA, 33 bp, Homo sapien
ctttgatttagacaactagaaaatgaaataccc

SEQ ID NO: 23149 - DNA, 33 bp, Homo sapien
gcactccgtggccttacctgggcgtctgacatg

SEQ ID NO: 23150 - DNA, 33 bp, Homo sapien
gcactccgtggccttatctgggcgtctgacatg

SEQ ID NO: 23151 - DNA, 33 bp, Homo sapien
gtgtggtaaggacatcacttttccggtgcatga

SEQ ID NO: 23152 - DNA, 33 bp, Homo sapien
gtgtggtaaggacatcgcttttccggtgcatga

SEQ ID NO: 23153 - DNA, 33 bp, Homo sapien
gatgggtttctacgcacccccccgtgtgcctga

SEQ ID NO: 23154 - DNA, 33 bp, Homo sapien
gatgggtttctacgcatccccccgtgtgcctga

SEQ ID NO: 23155 - DNA, 33 bp, Homo sapien
atttctggtcatttcccgaatagcaggtgcagg

SEQ ID NO: 23156 - DNA, 33 bp, Homo sapien
atttctggtcatttcctgaatagcaggtgcagg

SEQ ID NO: 23157 - DNA, 33 bp, Homo sapien
agagaagaaattcccacggttacatcatgtctc

SEQ ID NO: 23158 - DNA, 33 bp, Homo sapien
agagaagaaattcccatggttacatcatgtctc

SEQ ID NO: 23159 - DNA, 33 bp, Homo sapien
ggagtttcaccttctacagcaagtctgctatga

SEQ ID NO: 23160 - DNA, 33 bp, Homo sapien
ggagtttcaccttctagagcaagtctgctatga

SEQ ID NO: 23161 - DNA, 33 bp, Homo sapien
ctctcagagctccctacgcttaatctagcaaac

SEQ ID NO: 23162 - DNA, 33 bp, Homo sapien
ctctcagagctccctaggcttaatctagcaaac

SEQ ID NO: 23163 - DNA, 33 bp, Homo sapien
agggagaaaagaagaaatgctgttgatggagca

SEQ ID NO: 23164 - DNA, 33 bp, Homo sapien
agggagaaaagaagaagtgctgttgatggagca

SEQ ID NO: 23165 - DNA, 33 bp, Homo sapien
gtccaaggacaacttaccctttaagcacagtgc

SEQ ID NO: 23166 - DNA, 33 bp, Homo sapien
gtccaaggacaacttatcctttaagcacagtgc

SEQ ID NO: 23167 - DNA, 33 bp, Homo sapien
caaagaacgaaagccaagcacatatgaggcacg

SEQ ID NO: 23168 - DNA, 33 bp, Homo sapien
caaagaacgaaagccaggcacatatgaggcacg

SEQ ID NO: 23169 - DNA, 33 bp, Homo sapien
tgaccatcttgcagacaaagaatctgtggtctc

SEQ ID NO: 23170 - DNA, 33 bp, Homo sapien
tgaccatcttgcagacgaagaatctgtggtctc

SEQ ID NO: 23171 - DNA, 33 bp, Homo sapien
actgattattagttacaaattctgctgctgttt

SEQ ID NO: 23172 - DNA, 33 bp, Homo sapien
actgattattagttacgaattctgctgctgttt

SEQ ID NO: 23173 - DNA, 33 bp, Homo sapien
ggacatgaaattaaaacgctgattcttgccata

SEQ ID NO: 23174 - DNA, 33 bp, Homo sapien
ggacatgaaattaaaatgctgattcttgccata

SEQ ID NO: 23175 - DNA, 33 bp, Homo sapien
tccaaagacagtgttgcaccctctaactctaag

SEQ ID NO: 23176 - DNA, 33 bp, Homo sapien
tccaaagacagtgttgtaccctctaactctaag

SEQ ID NO: 23177 - DNA, 33 bp, Homo sapien
aattatggtcaaaatacgagtgcttactgcatg

SEQ ID NO: 23178 - DNA, 33 bp, Homo sapien
aattatggtcaaaatatgagtgcttactgcatg

SEQ ID NO: 23179 - DNA, 33 bp, Homo sapien
ggaacagagcttgtgcaagagcttcttcccacc

SEQ ID NO: 23180 - DNA, 33 bp, Homo sapien
ggaacagagcttgtgcgagagcttcttcccacc

SEQ ID NO: 23181 - DNA, 33 bp, Homo sapien
ttttattgtcctttctcaatgtacagtgcctat

SEQ ID NO: 23182 - DNA, 33 bp, Homo sapien
ttttattgtcctttcttaatgtacagtgcctat

SEQ ID NO: 23183 - DNA, 33 bp, Homo sapien
atgacaaagagattatcagaacctgattttgac

SEQ ID NO: 23184 - DNA, 33 bp, Homo sapien
atgacaaagagattattagaacctgattttgac

SEQ ID NO: 23185 - DNA, 33 bp, Homo sapien
tgaaaaacagcatgtacaggatgatcctagcta

SEQ ID NO: 23186 - DNA, 33 bp, Homo sapien
tgaaaaacagcatgtataggatgatcctagcta

SEQ ID NO: 23187 - DNA, 33 bp, Homo sapien
tgttacagaagaatcactgacaaactgtgaacc

SEQ ID NO: 23188 - DNA, 33 bp, Homo sapien
tgttacagaagaatcattgacaaactgtgaacc

SEQ ID NO: 23189 - DNA, 33 bp, Homo sapien
tcatttgtgccatagacgttaagacagacagca

SEQ ID NO: 23190 - DNA, 33 bp, Homo sapien
tcatttgtgccatagatgttaagacagacagca

SEQ ID NO: 23191 - DNA, 33 bp, Homo sapien
attagctactagccaaaagtcagaagaggggag

SEQ ID NO: 23192 - DNA, 33 bp, Homo sapien
attagctactagccaagagtcagaagaggggag

SEQ ID NO: 23193 - DNA, 33 bp, Homo sapien
gcttcctttgcggcaagatatgaccatgtgagt

SEQ ID NO: 23194 - DNA, 33 bp, Homo sapien
gcttcctttgcggcaatatatgaccatgtgagt

SEQ ID NO: 23195 - DNA, 33 bp, Homo sapien
ttaccttcaaattgaacgcgatacttcatttct

SEQ ID NO: 23196 - DNA, 33 bp, Homo sapien
ttaccttcaaattgaatgcgatacttcatttct

SEQ ID NO: 23197 - DNA, 33 bp, Homo sapien
tagcagtgtaggtggcaagaaatcgtgggatat

SEQ ID NO: 23198 - DNA, 33 bp, Homo sapien
tagcagtgtaggtggcgagaaatcgtgggatat

SEQ ID NO: 23199 - DNA, 33 bp, Homo sapien
gaagtatgaaggaagaatcaagatacagttaga

SEQ ID NO: 23200 - DNA, 33 bp, Homo sapien
gaagtatgaaggaagactcaagatacagttaga

SEQ ID NO: 23201 - DNA, 33 bp, Homo sapien
atgtgaagtggttacactggtttagtcacagca

SEQ ID NO: 23202 - DNA, 33 bp, Homo sapien
atgtgaagtggttacagtggtttagtcacagca

SEQ ID NO: 23203 - DNA, 33 bp, Homo sapien
tactgatatggttccaatgcatcagaccaacgg

SEQ ID NO: 23204 - DNA, 33 bp, Homo sapien
tactgatatggttccagtgcatcagaccaacgg

SEQ ID NO: 23205 - DNA, 33 bp, Homo sapien
tttaccatttttataaatcacttgccaatgttg

SEQ ID NO: 23206 - DNA, 33 bp, Homo sapien
tttaccatttttataactcacttgccaatgttg

SEQ ID NO: 23207 - DNA, 33 bp, Homo sapien
gatgatctaaaaccagcacagcaaatacacatg

SEQ ID NO: 23208 - DNA, 33 bp, Homo sapien
gatgatctaaaaccaggacagcaaatacacatg

SEQ ID NO: 23209 - DNA, 33 bp, Homo sapien
ttcaaatgacacatcggatgcccttctcatgct

SEQ ID NO: 23210 - DNA, 33 bp, Homo sapien
ttcaaatgacacatcgtatgcccttctcatgct

SEQ ID NO: 23211 - DNA, 33 bp, Homo sapien
aatatgtacctttgcaagttttagcagacaaga

SEQ ID NO: 23212 - DNA, 33 bp, Homo sapien
aatatgtacctttgcacgttttagcagacaaga

SEQ ID NO: 23213 - DNA, 33 bp, Homo sapien
taaatctatttctgtaaaaactttctatgaatt

SEQ ID NO: 23214 - DNA, 33 bp, Homo sapien
taaatctatttctgtataaactttctatgaatt

SEQ ID NO: 23215 - DNA, 33 bp, Homo sapien
gtgggtttggtggaaaacgagcaaagcaccttg

SEQ ID NO: 23216 - DNA, 33 bp, Homo sapien
gtgggtttggtggaaagcgagcaaagcaccttg

SEQ ID NO: 23217 - DNA, 33 bp, Homo sapien
gtcacgaggcccttgaagacaggaaccatctct

SEQ ID NO: 23218 - DNA, 33 bp, Homo sapien
gtcacgaggcccttgaggacaggaaccatctct

SEQ ID NO: 23219 - DNA, 33 bp, Homo sapien
gaaacctctctcaacaaaacaatttaaaaatta

SEQ ID NO: 23220 - DNA, 33 bp, Homo sapien
gaaacctctctcaacagaacaatttaaaaatta

SEQ ID NO: 23221 - DNA, 33 bp, Homo sapien
acaagggctccacgcaagaattagctctcttca

SEQ ID NO: 23222 - DNA, 33 bp, Homo sapien
acaagggctccacgcaggaattagctctcttca

SEQ ID NO: 23223 - DNA, 33 bp, Homo sapien
aagctgcgagagatgacagcctatctaaggcag

SEQ ID NO: 23224 - DNA, 33 bp, Homo sapien
aagctgcgagagatgagagcctatctaaggcag

SEQ ID NO: 23225 - DNA, 33 bp, Homo sapien
gtcttctcctctccataaaattttgtccagtga

SEQ ID NO: 23226 - DNA, 33 bp, Homo sapien
gtcttctcctctccatgaaattttgtccagtga

SEQ ID NO: 23227 - DNA, 33 bp, Homo sapien
cacatgtaatgagcccggaaggaacatatctta

SEQ ID NO: 23228 - DNA, 33 bp, Homo sapien
cacatgtaatgagccctgaaggaacatatctta

SEQ ID NO: 23229 - DNA, 33 bp, Homo sapien
atccagcaggattgtaccttgaatctatataag

SEQ ID NO: 23230 - DNA, 33 bp, Homo sapien
atccagcaggattgtatcttgaatctatataag

SEQ ID NO: 23231 - DNA, 33 bp, Homo sapien
attctgcctttttataccaccagaattatggaa

SEQ ID NO: 23232 - DNA, 33 bp, Homo sapien
attctgcctttttatagcaccagaattatggaa

SEQ ID NO: 23233 - DNA, 33 bp, Homo sapien
ctgctaatcatttacaatcagatcattgactca

SEQ ID NO: 23234 - DNA, 33 bp, Homo sapien
ctgctaatcatttacagtcagatcattgactca

SEQ ID NO: 23235 - DNA, 33 bp, Homo sapien
atgaccttgaaggctccataaatcactttctcc

SEQ ID NO: 23236 - DNA, 33 bp, Homo sapien
atgaccttgaaggctctataaatcactttctcc

SEQ ID NO: 23237 - DNA, 33 bp, Homo sapien
tatttgaacacatacccgggcaccttgtttctg

SEQ ID NO: 23238 - DNA, 33 bp, Homo sapien
tatttgaacacatacctgggcaccttgtttctg

SEQ ID NO: 23239 - DNA, 33 bp, Homo sapien
tttgaggtcagggaaagtgtggagatcattatc

SEQ ID NO: 23240 - DNA, 33 bp, Homo sapien
tttgaggtcagggaaattgtggagatcattatc

SEQ ID NO: 23241 - DNA, 33 bp, Homo sapien
ctgaagtgccgatggaaggaaagaacagaagtg

SEQ ID NO: 23242 - DNA, 33 bp, Homo sapien
ctgaagtgccgatggacggaaagaacagaagtg

SEQ ID NO: 23243 - DNA, 33 bp, Homo sapien
caacatgcttggccaacagatttcgataattgt

SEQ ID NO: 23244 - DNA, 33 bp, Homo sapien
caacatgcttggccaatagatttcgataattgt

SEQ ID NO: 23245 - DNA, 33 bp, Homo sapien
ctattgggaggattaaatcagataacgtatgta

SEQ ID NO: 23246 - DNA, 33 bp, Homo sapien
ctattgggaggattaagtcagataacgtatgta

SEQ ID NO: 23247 - DNA, 33 bp, Homo sapien
agaagccatagtagaacatagtgtaaaagagtc

SEQ ID NO: 23248 - DNA, 33 bp, Homo sapien
agaagccatagtagaatatagtgtaaaagagtc

SEQ ID NO: 23249 - DNA, 33 bp, Homo sapien
ctgactgatggccagacagagaagtgtaaagat

SEQ ID NO: 23250 - DNA, 33 bp, Homo sapien
ctgactgatggccagagagagaagtgtaaagat

SEQ ID NO: 23251 - DNA, 33 bp, Homo sapien
ggctgtttgtagccaacaggccaacggcaaggg

SEQ ID NO: 23252 - DNA, 33 bp, Homo sapien
ggctgtttgtagccaataggccaacggcaaggg

SEQ ID NO: 23253 - DNA, 33 bp, Homo sapien
aatgaatgaatgcttacctaatttagtgaaggg

SEQ ID NO: 23254 - DNA, 33 bp, Homo sapien
aatgaatgaatgcttatctaatttagtgaaggg

SEQ ID NO: 23255 - DNA, 33 bp, Homo sapien
aaaattggtaagccaccatcccagaaagagctc

SEQ ID NO: 23256 - DNA, 33 bp, Homo sapien
aaaattggtaagccactatcccagaaagagctc

SEQ ID NO: 23257 - DNA, 33 bp, Homo sapien
caggatgtcaggaaaacgtctctgaggaatcag

SEQ ID NO: 23258 - DNA, 33 bp, Homo sapien
caggatgtcaggaaaaggtctctgaggaatcag

SEQ ID NO: 23259 - DNA, 33 bp, Homo sapien
acactaaagggaactgcaatcaccagcaaagga

SEQ ID NO: 23260 - DNA, 33 bp, Homo sapien
acactaaagggaactgtaatcaccagcaaagga

SEQ ID NO: 23261 - DNA, 33 bp, Homo sapien
agaatcctgggttctccaataaccacctttcac

SEQ ID NO: 23262 - DNA, 33 bp, Homo sapien
agaatcctgggttctctaataaccacctttcac

SEQ ID NO: 23263 - DNA, 33 bp, Homo sapien
gttgctcaaatgtccaatactgctttgtcacaa

SEQ ID NO: 23264 - DNA, 33 bp, Homo sapien
gttgctcaaatgtccactactgctttgtcacaa

SEQ ID NO: 23265 - DNA, 33 bp, Homo sapien
agtctttggtattggcccctttagctgtccatt

SEQ ID NO: 23266 - DNA, 33 bp, Homo sapien
agtctttggtattggctcctttagctgtccatt

SEQ ID NO: 23267 - DNA, 33 bp, Homo sapien
cccaccaagtgctcaaattataccaagtatttt

SEQ ID NO: 23268 - DNA, 33 bp, Homo sapien
cccaccaagtgctcaagttataccaagtatttt

SEQ ID NO: 23269 - DNA, 33 bp, Homo sapien
atagtgaaagagataccgagcttagtctattga

SEQ ID NO: 23270 - DNA, 33 bp, Homo sapien
atagtgaaagagatactgagcttagtctattga

SEQ ID NO: 23271 - DNA, 33 bp, Homo sapien
aagactagaaagtccaatagcagacttcacact

SEQ ID NO: 23272 - DNA, 33 bp, Homo sapien
aagactagaaagtccagtagcagacttcacact

SEQ ID NO: 23273 - DNA, 33 bp, Homo sapien
attagtcagcagtggagcctctcttttattaag

SEQ ID NO: 23274 - DNA, 33 bp, Homo sapien
attagtcagcagtggatcctctcttttattaag

SEQ ID NO: 23275 - DNA, 33 bp, Homo sapien
taccttctgcactaaccctagaatgacttttat

SEQ ID NO: 23276 - DNA, 33 bp, Homo sapien
taccttctgcactaactctagaatgacttttat

SEQ ID NO: 23277 - DNA, 33 bp, Homo sapien
tccacactcacatatccaatcattttgcacacc

SEQ ID NO: 23278 - DNA, 33 bp, Homo sapien
tccacactcacatatctaatcattttgcacacc

SEQ ID NO: 23279 - DNA, 33 bp, Homo sapien
tttgatggccagaccaagttccttctatctgaa

SEQ ID NO: 23280 - DNA, 33 bp, Homo sapien
tttgatggccagaccatgttccttctatctgaa

SEQ ID NO: 23281 - DNA, 33 bp, Homo sapien
atgtgcatttgtgtcaatccacaaggcttggtc

SEQ ID NO: 23282 - DNA, 33 bp, Homo sapien
atgtgcatttgtgtcattccacaaggcttggtc

SEQ ID NO: 23283 - DNA, 33 bp, Homo sapien
tcagatctgtacactgaaaagtctagtttcttt

SEQ ID NO: 23284 - DNA, 33 bp, Homo sapien
tcagatctgtacactggaaagtctagtttcttt

SEQ ID NO: 23285 - DNA, 33 bp, Homo sapien
agcacttattttacagccctgccctctcagata

SEQ ID NO: 23286 - DNA, 33 bp, Homo sapien
agcacttattttacagtcctgccctctcagata

SEQ ID NO: 23287 - DNA, 33 bp, Homo sapien
tgtttgcttaatattcaccatgtgctgcatttt

SEQ ID NO: 23288 - DNA, 33 bp, Homo sapien
tgtttgcttaatattctccatgtgctgcatttt

SEQ ID NO: 23289 - DNA, 33 bp, Homo sapien
atccatattaagcacaaacttttaccataaatc

SEQ ID NO: 23290 - DNA, 33 bp, Homo sapien
atccatattaagcacatacttttaccataaatc

SEQ ID NO: 23291 - DNA, 33 bp, Homo sapien
atgtcattgtcctatggaaaacccttccttggc

SEQ ID NO: 23292 - DNA, 33 bp, Homo sapien
atgtcattgtcctatgtaaaacccttccttggc

SEQ ID NO: 23293 - DNA, 33 bp, Homo sapien
gcaaaggaggagagaaataaagggatttgggat

SEQ ID NO: 23294 - DNA, 33 bp, Homo sapien
gcaaaggaggagagaagtaaagggatttgggat

SEQ ID NO: 23295 - DNA, 33 bp, Homo sapien
atttgagtaacctggaatagctggtacgttctg

SEQ ID NO: 23296 - DNA, 33 bp, Homo sapien
atttgagtaacctggagtagctggtacgttctg

SEQ ID NO: 23297 - DNA, 33 bp, Homo sapien
aggattgaaagctgagaaacagaaaaagagcag

SEQ ID NO: 23298 - DNA, 33 bp, Homo sapien
aggattgaaagctgaggaacagaaaaagagcag

SEQ ID NO: 23299 - DNA, 33 bp, Homo sapien
tgaactgagaacacctcaagggcaggtcttgtt

SEQ ID NO: 23300 - DNA, 33 bp, Homo sapien
tgaactgagaacaccttaagggcaggtcttgtt

SEQ ID NO: 23301 - DNA, 33 bp, Homo sapien
aatttctctcacaccgaaattctttgttcaacc

SEQ ID NO: 23302 - DNA, 33 bp, Homo sapien
aatttctctcacaccgtaattctttgttcaacc

SEQ ID NO: 23303 - DNA, 33 bp, Homo sapien
cttactctgtaaaaaccatagaacagcctccct

SEQ ID NO: 23304 - DNA, 33 bp, Homo sapien
cttactctgtaaaaacgatagaacagcctccct

SEQ ID NO: 23305 - DNA, 33 bp, Homo sapien
ttccaggtataccaaagggccccacatctctgc

SEQ ID NO: 23306 - DNA, 33 bp, Homo sapien
ttccaggtataccaaatggccccacatctctgc

SEQ ID NO: 23307 - DNA, 33 bp, Homo sapien
gatgctgctgtatcagccatataaaaagtaatt

SEQ ID NO: 23308 - DNA, 33 bp, Homo sapien
gatgctgctgtatcaggcatataaaaagtaatt

SEQ ID NO: 23309 - DNA, 33 bp, Homo sapien
aactaatgttatgttaccttttagagcttcctg

SEQ ID NO: 23310 - DNA, 33 bp, Homo sapien
aactaatgttatgttatcttttagagcttcctg

SEQ ID NO: 23311 - DNA, 33 bp, Homo sapien
ggctataaatttgaaacgcactaaaattccatt

SEQ ID NO: 23312 - DNA, 33 bp, Homo sapien
ggctataaatttgaaatgcactaaaattccatt

SEQ ID NO: 23313 - DNA, 33 bp, Homo sapien
ttgggaggattttacaacttggccccattggct

SEQ ID NO: 23314 - DNA, 33 bp, Homo sapien
ttgggaggattttacaccttggccccattggct

SEQ ID NO: 23315 - DNA, 33 bp, Homo sapien
aagctgactgataaaaccgggcctaagactaat

SEQ ID NO: 23316 - DNA, 33 bp, Homo sapien
aagctgactgataaaatcgggcctaagactaat

SEQ ID NO: 23317 - DNA, 33 bp, Homo sapien
gatgatgttatgaacaataatgcttaccattta

SEQ ID NO: 23318 - DNA, 33 bp, Homo sapien
gatgatgttatgaacagtaatgcttaccattta

SEQ ID NO: 23319 - DNA, 33 bp, Homo sapien
ctgttagtggaggaaaattaaccagatgaccta

SEQ ID NO: 23320 - DNA, 33 bp, Homo sapien
ctgttagtggaggaaacttaaccagatgaccta

SEQ ID NO: 23321 - DNA, 33 bp, Homo sapien
cgcatatttccctgaaacagatacatagataac

SEQ ID NO: 23322 - DNA, 33 bp, Homo sapien
cgcatatttccctgaagcagatacatagataac

SEQ ID NO: 23323 - DNA, 33 bp, Homo sapien
ttctgttccgttgatacgtgtctatttttctgc

SEQ ID NO: 23324 - DNA, 33 bp, Homo sapien
ttctgttccgttgatatgtgtctatttttctgc

SEQ ID NO: 23325 - DNA, 33 bp, Homo sapien
caatttagttaggttacgtatttgagtcagtta

SEQ ID NO: 23326 - DNA, 33 bp, Homo sapien
caatttagttaggttatgtatttgagtcagtta

SEQ ID NO: 23327 - DNA, 33 bp, Homo sapien
gaagaggacctgttcactcctgtttctaagcca

SEQ ID NO: 23328 - DNA, 33 bp, Homo sapien
gaagaggacctgttcattcctgtttctaagcca

SEQ ID NO: 23329 - DNA, 33 bp, Homo sapien
tgcttgaattggaggcccaggttaaggttaata

SEQ ID NO: 23330 - DNA, 33 bp, Homo sapien
tgcttgaattggaggctcaggttaaggttaata

SEQ ID NO: 23331 - DNA, 33 bp, Homo sapien
aaggagtcagggaagacaaaagaaagctaccct

SEQ ID NO: 23332 - DNA, 33 bp, Homo sapien
aaggagtcagggaagataaaagaaagctaccct

SEQ ID NO: 23333 - DNA, 33 bp, Homo sapien
attaggttctaatctcacaacaaccttattagg

SEQ ID NO: 23334 - DNA, 33 bp, Homo sapien
attaggttctaatctcgcaacaaccttattagg

SEQ ID NO: 23335 - DNA, 33 bp, Homo sapien
cagcaattatctctaaaagacgggacaatgaat

SEQ ID NO: 23336 - DNA, 33 bp, Homo sapien
cagcaattatctctaagagacgggacaatgaat

SEQ ID NO: 23337 - DNA, 33 bp, Homo sapien
agaaaaagaatccactcaatttaacagcaatta

SEQ ID NO: 23338 - DNA, 33 bp, Homo sapien
agaaaaagaatccactgaatttaacagcaatta

SEQ ID NO: 23339 - DNA, 33 bp, Homo sapien
tgcacaaaagcatgaacggattttgaattttta

SEQ ID NO: 23340 - DNA, 33 bp, Homo sapien
tgcacaaaagcatgaatggattttgaattttta

SEQ ID NO: 23341 - DNA, 33 bp, Homo sapien
ctattgtcagttcattaaaaaaattgtatacat

SEQ ID NO: 23342 - DNA, 33 bp, Homo sapien
ctattgtcagttcatttaaaaaattgtatacat

SEQ ID NO: 23343 - DNA, 33 bp, Homo sapien
cacttatcaagttatccactatagggcaaggaa

SEQ ID NO: 23344 - DNA, 33 bp, Homo sapien
cacttatcaagttatctactatagggcaaggaa

SEQ ID NO: 23345 - DNA, 33 bp, Homo sapien
tggtagtccatgcgaccagctaaaaatattcct

SEQ ID NO: 23346 - DNA, 33 bp, Homo sapien
tggtagtccatgcgacgagctaaaaatattcct

SEQ ID NO: 23347 - DNA, 33 bp, Homo sapien
ctctgctgagcccagaagagtaataaggccaaa

SEQ ID NO: 23348 - DNA, 33 bp, Homo sapien
ctctgctgagcccagatgagtaataaggccaaa

SEQ ID NO: 23349 - DNA, 33 bp, Homo sapien
gtttctctttatgaacaacaccttagggaggca

SEQ ID NO: 23350 - DNA, 33 bp, Homo sapien
gtttctctttatgaaccacaccttagggaggca

SEQ ID NO: 23351 - DNA, 33 bp, Homo sapien
gccctataatgtacacaccattactatcttgca

SEQ ID NO: 23352 - DNA, 33 bp, Homo sapien
gccctataatgtacacgccattactatcttgca

SEQ ID NO: 23353 - DNA, 33 bp, Homo sapien
cattggtggaacagaaacattcaaatctccacc

SEQ ID NO: 23354 - DNA, 33 bp, Homo sapien
cattggtggaacagaagcattcaaatctccacc

SEQ ID NO: 23355 - DNA, 33 bp, Homo sapien
acggttggtttcttgacggattcaattcagttc

SEQ ID NO: 23356 - DNA, 33 bp, Homo sapien
acggttggtttcttgatggattcaattcagttc

SEQ ID NO: 23357 - DNA, 33 bp, Homo sapien
caagctcctccccttccaccaagattgtcttct

SEQ ID NO: 23358 - DNA, 33 bp, Homo sapien
caagctcctccccttctaccaagattgtcttct

SEQ ID NO: 23359 - DNA, 33 bp, Homo sapien
tgcagttttctttaagcagaccatcagtcctct

SEQ ID NO: 23360 - DNA, 33 bp, Homo sapien
tgcagttttctttaagtagaccatcagtcctct

SEQ ID NO: 23361 - DNA, 33 bp, Homo sapien
ggtctcagacttgaaacttggtttttctgctta

SEQ ID NO: 23362 - DNA, 33 bp, Homo sapien
ggtctcagacttgaaagttggtttttctgctta

SEQ ID NO: 23363 - DNA, 33 bp, Homo sapien
ttgtaatcaaatcagaactttgtttttgtttcc

SEQ ID NO: 23364 - DNA, 33 bp, Homo sapien
ttgtaatcaaatcagacctttgtttttgtttcc

SEQ ID NO: 23365 - DNA, 33 bp, Homo sapien
actaggaatatttctcactctagttcaaaaaac

SEQ ID NO: 23366 - DNA, 33 bp, Homo sapien
actaggaatatttctctctctagttcaaaaaac

SEQ ID NO: 23367 - DNA, 33 bp, Homo sapien
gttaatcaagtagtaaatggtaaatccagagtg

SEQ ID NO: 23368 - DNA, 33 bp, Homo sapien
gttaatcaagtagtaagtggtaaatccagagtg

SEQ ID NO: 23369 - DNA, 33 bp, Homo sapien
gactgaagggccagatcatacagtcttgttaag

SEQ ID NO: 23370 - DNA, 33 bp, Homo sapien
gactgaagggccagattatacagtcttgttaag

SEQ ID NO: 23371 - DNA, 33 bp, Homo sapien
aggttcacaagcctacaactttccaggatcaac

SEQ ID NO: 23372 - DNA, 33 bp, Homo sapien
aggttcacaagcctaccactttccaggatcaac

SEQ ID NO: 23373 - DNA, 33 bp, Homo sapien
ctataacttcaggaagccgttataggaaaacag

SEQ ID NO: 23374 - DNA, 33 bp, Homo sapien
ctataacttcaggaaggcgttataggaaaacag

SEQ ID NO: 23375 - DNA, 33 bp, Homo sapien
ggtttgattagcaacaaggttgaagttctgata

SEQ ID NO: 23376 - DNA, 33 bp, Homo sapien
ggtttgattagcaacagggttgaagttctgata

SEQ ID NO: 23377 - DNA, 33 bp, Homo sapien
tacctccatatccacaagctttgagttatcatt

SEQ ID NO: 23378 - DNA, 33 bp, Homo sapien
tacctccatatccacacgctttgagttatcatt

SEQ ID NO: 23379 - DNA, 33 bp, Homo sapien
aatgcatttcctcacacggttatcatttttgtg

SEQ ID NO: 23380 - DNA, 33 bp, Homo sapien
aatgcatttcctcacatggttatcatttttgtg

SEQ ID NO: 23381 - DNA, 33 bp, Homo sapien
tagcccctacagtagcagatattttacatttga

SEQ ID NO: 23382 - DNA, 33 bp, Homo sapien
tagcccctacagtagcggatattttacatttga

SEQ ID NO: 23383 - DNA, 33 bp, Homo sapien
gctattaggaagagcagaagaattgcctttcca

SEQ ID NO: 23384 - DNA, 33 bp, Homo sapien
gctattaggaagagcataagaattgcctttcca

SEQ ID NO: 23385 - DNA, 33 bp, Homo sapien
aatagcaacgctttaccgaaactagcggggttt

SEQ ID NO: 23386 - DNA, 33 bp, Homo sapien
aatagcaacgctttactgaaactagcggggttt

SEQ ID NO: 23387 - DNA, 33 bp, Homo sapien
ccctctcccatcgattccaacttttcccctcct

SEQ ID NO: 23388 - DNA, 33 bp, Homo sapien
ccctctcccatcgattgcaacttttcccctcct

SEQ ID NO: 23389 - DNA, 33 bp, Homo sapien
actcatctcctacttacgaagtctttcttaaag

SEQ ID NO: 23390 - DNA, 33 bp, Homo sapien
actcatctcctacttatgaagtctttcttaaag

SEQ ID NO: 23391 - DNA, 33 bp, Homo sapien
ctatctaaaaccacaaagacccaaatactactt

SEQ ID NO: 23392 - DNA, 33 bp, Homo sapien
ctatctaaaaccacaatgacccaaatactactt

SEQ ID NO: 23393 - DNA, 33 bp, Homo sapien
tgcccattgccgcctccataactgcctctactt

SEQ ID NO: 23394 - DNA, 33 bp, Homo sapien
tgcccattgccgcctctataactgcctctactt

SEQ ID NO: 23395 - DNA, 33 bp, Homo sapien
attccatgttgttaaactctgtggagataaatt

SEQ ID NO: 23396 - DNA, 33 bp, Homo sapien
attccatgttgttaaattctgtggagataaatt

SEQ ID NO: 23397 - DNA, 33 bp, Homo sapien
tgggaatacaaagatcaaataacagtgcctgca

SEQ ID NO: 23398 - DNA, 33 bp, Homo sapien
tgggaatacaaagatccaataacagtgcctgca

SEQ ID NO: 23399 - DNA, 33 bp, Homo sapien
tttccaactaagaaaagtattgtcatcctattt

SEQ ID NO: 23400 - DNA, 33 bp, Homo sapien
tttccaactaagaaaattattgtcatcctattt

SEQ ID NO: 23401 - DNA, 33 bp, Homo sapien
caaactgattggaaacgactgctattggttaaa

SEQ ID NO: 23402 - DNA, 33 bp, Homo sapien
caaactgattggaaactactgctattggttaaa

SEQ ID NO: 23403 - DNA, 33 bp, Homo sapien
acccctagaaaatgacaatcacatacttcaatt

SEQ ID NO: 23404 - DNA, 33 bp, Homo sapien
acccctagaaaatgacgatcacatacttcaatt

SEQ ID NO: 23405 - DNA, 33 bp, Homo sapien
actagagtgaagctaaaatataatggaagggag

SEQ ID NO: 23406 - DNA, 33 bp, Homo sapien
actagagtgaagctaagatataatggaagggag

SEQ ID NO: 23407 - DNA, 33 bp, Homo sapien
ttaataagacagaaaaatctctagcaaggttag

SEQ ID NO: 23408 - DNA, 33 bp, Homo sapien
ttaataagacagaaaagtctctagcaaggttag

SEQ ID NO: 23409 - DNA, 33 bp, Homo sapien
gtgctcaaatttaccaatctttctctttatggt

SEQ ID NO: 23410 - DNA, 33 bp, Homo sapien
gtgctcaaatttaccagtctttctctttatggt

SEQ ID NO: 23411 - DNA, 33 bp, Homo sapien
ttgtatccgtccactaagctactattgcgatac

SEQ ID NO: 23412 - DNA, 33 bp, Homo sapien
ttgtatccgtccactaggctactattgcgatac

SEQ ID NO: 23413 - DNA, 33 bp, Homo sapien
aagtctcagtgttaaaagaacaactgatgacgc

SEQ ID NO: 23414 - DNA, 33 bp, Homo sapien
aagtctcagtgttaaaggaacaactgatgacgc

SEQ ID NO: 23415 - DNA, 33 bp, Homo sapien
cagatcagaatcctgaatatttcatgcaactga

SEQ ID NO: 23416 - DNA, 33 bp, Homo sapien
cagatcagaatcctgagtatttcatgcaactga

SEQ ID NO: 23417 - DNA, 33 bp, Homo sapien
ttgactcatattctgcacacagataactaaaac

SEQ ID NO: 23418 - DNA, 33 bp, Homo sapien
ttgactcatattctgcgcacagataactaaaac

SEQ ID NO: 23419 - DNA, 33 bp, Homo sapien
tcagggtaacataagcgcgttagattttcctga

SEQ ID NO: 23420 - DNA, 33 bp, Homo sapien
tcagggtaacataagctcgttagattttcctga

SEQ ID NO: 23421 - DNA, 33 bp, Homo sapien
atttcttagtaataccaactattgctaagtgac

SEQ ID NO: 23422 - DNA, 33 bp, Homo sapien
atttcttagtaatacccactattgctaagtgac

SEQ ID NO: 23423 - DNA, 33 bp, Homo sapien
ttcagattccttatcacagcatttaaggacatc

SEQ ID NO: 23424 - DNA, 33 bp, Homo sapien
ttcagattccttatcatagcatttaaggacatc

SEQ ID NO: 23425 - DNA, 33 bp, Homo sapien
ccttaattcatacaaaatgtcctgagctaaatg

SEQ ID NO: 23426 - DNA, 33 bp, Homo sapien
ccttaattcatacaaagtgtcctgagctaaatg

SEQ ID NO: 23427 - DNA, 33 bp, Homo sapien
tctctcccctcaccaacggagaacaaatgtggg

SEQ ID NO: 23428 - DNA, 33 bp, Homo sapien
tctctcccctcaccaatggagaacaaatgtggg

SEQ ID NO: 23429 - DNA, 33 bp, Homo sapien
gtaaaaatgttactgactatccgcaatagagtt

SEQ ID NO: 23430 - DNA, 33 bp, Homo sapien
gtaaaaatgttactgagtatccgcaatagagtt

SEQ ID NO: 23431 - DNA, 33 bp, Homo sapien
gaaagacagtcatgagaaaaatatggtagacta

SEQ ID NO: 23432 - DNA, 33 bp, Homo sapien
gaaagacagtcatgaggaaaatatggtagacta

SEQ ID NO: 23433 - DNA, 33 bp, Homo sapien
cggaatcgtctgttacggaaaaatcaggttaat

SEQ ID NO: 23434 - DNA, 33 bp, Homo sapien
cggaatcgtctgttactgaaaaatcaggttaat

SEQ ID NO: 23435 - DNA, 33 bp, Homo sapien
tatatttgagttctacaattccctgttcactca

SEQ ID NO: 23436 - DNA, 33 bp, Homo sapien
tatatttgagttctacgattccctgttcactca

SEQ ID NO: 23437 - DNA, 33 bp, Homo sapien
gagatttggaggggacaattatccaaactatat

SEQ ID NO: 23438 - DNA, 33 bp, Homo sapien
gagatttggaggggactattatccaaactatat

SEQ ID NO: 23439 - DNA, 33 bp, Homo sapien
cttctgtatgtttctaaagctgcagataaaggt

SEQ ID NO: 23440 - DNA, 33 bp, Homo sapien
cttctgtatgtttctacagctgcagataaaggt

SEQ ID NO: 23441 - DNA, 33 bp, Homo sapien
gtgcaattatataaacaaacattaaagtgctat

SEQ ID NO: 23442 - DNA, 33 bp, Homo sapien
gtgcaattatataaactaacattaaagtgctat

SEQ ID NO: 23443 - DNA, 33 bp, Homo sapien
ataggtaaacatgtaccatagcagtttgttaca

SEQ ID NO: 23444 - DNA, 33 bp, Homo sapien
ataggtaaacatgtactatagcagtttgttaca

SEQ ID NO: 23445 - DNA, 33 bp, Homo sapien
taattcttctatttgacgcttaaagtctcgctt

SEQ ID NO: 23446 - DNA, 33 bp, Homo sapien
taattcttctatttgatgcttaaagtctcgctt

SEQ ID NO: 23447 - DNA, 33 bp, Homo sapien
aggtttcctaaggaaggagatagctgagttgag

SEQ ID NO: 23448 - DNA, 33 bp, Homo sapien
aggtttcctaaggaagtagatagctgagttgag

SEQ ID NO: 23449 - DNA, 33 bp, Homo sapien
catttgtacacaatgaaaaaactcagcaaacag

SEQ ID NO: 23450 - DNA, 33 bp, Homo sapien
catttgtacacaatgacaaaactcagcaaacag

SEQ ID NO: 23451 - DNA, 33 bp, Homo sapien
gatgacttgaaaggaggacgagatgaatatgtc

SEQ ID NO: 23452 - DNA, 33 bp, Homo sapien
gatgacttgaaaggagtacgagatgaatatgtc

SEQ ID NO: 23453 - DNA, 33 bp, Homo sapien
ctgccctgtctccagacgctgcacattgtcaca

SEQ ID NO: 23454 - DNA, 33 bp, Homo sapien
ctgccctgtctccagatgctgcacattgtcaca

SEQ ID NO: 23455 - DNA, 33 bp, Homo sapien
gagccaaacaaaaatacaattaaaggcagaaac

SEQ ID NO: 23456 - DNA, 33 bp, Homo sapien
gagccaaacaaaaatagaattaaaggcagaaac

SEQ ID NO: 23457 - DNA, 33 bp, Homo sapien
attgaccagctctacccattgaattagagtcct

SEQ ID NO: 23458 - DNA, 33 bp, Homo sapien
attgaccagctctacctattgaattagagtcct

SEQ ID NO: 23459 - DNA, 33 bp, Homo sapien
gagaatgaaaagtgcaccccttacagagcctag

SEQ ID NO: 23460 - DNA, 33 bp, Homo sapien
gagaatgaaaagtgcatcccttacagagcctag

SEQ ID NO: 23461 - DNA, 33 bp, Homo sapien
acgtttttatccttaccaatttctgtctatttg

SEQ ID NO: 23462 - DNA, 33 bp, Homo sapien
acgtttttatccttactaatttctgtctatttg

SEQ ID NO: 23463 - DNA, 33 bp, Homo sapien
tgagatagcaggacaggataagaggaatctggg

SEQ ID NO: 23464 - DNA, 33 bp, Homo sapien
tgagatagcaggacagtataagaggaatctggg

SEQ ID NO: 23465 - DNA, 33 bp, Homo sapien
actggagataatttgtaaacttgaggattttaa

SEQ ID NO: 23466 - DNA, 33 bp, Homo sapien
actggagataatttgtgaacttgaggattttaa

SEQ ID NO: 23467 - DNA, 33 bp, Homo sapien
ggactgcatcaatttcaatatgtgtgagtgtga

SEQ ID NO: 23468 - DNA, 33 bp, Homo sapien
ggactgcatcaatttccatatgtgtgagtgtga

SEQ ID NO: 23469 - DNA, 33 bp, Homo sapien
gcagagccaatggttcaatttctaatcaggtac

SEQ ID NO: 23470 - DNA, 33 bp, Homo sapien
gcagagccaatggttcgatttctaatcaggtac

SEQ ID NO: 23471 - DNA, 33 bp, Homo sapien
taagcacttctaattacctagtcatgacaatag

SEQ ID NO: 23472 - DNA, 33 bp, Homo sapien
taagcacttctaattatctagtcatgacaatag

SEQ ID NO: 23473 - DNA, 33 bp, Homo sapien
tgtgtaaaataaccacactggacttctcagcac

SEQ ID NO: 23474 - DNA, 33 bp, Homo sapien
tgtgtaaaataaccacgctggacttctcagcac

SEQ ID NO: 23475 - DNA, 33 bp, Homo sapien
tggcacacagctttcaataagtattggctattt

SEQ ID NO: 23476 - DNA, 33 bp, Homo sapien
tggcacacagctttcagtaagtattggctattt

SEQ ID NO: 23477 - DNA, 33 bp, Homo sapien
cagatagtctcaagcagattctcagtatacagc

SEQ ID NO: 23478 - DNA, 33 bp, Homo sapien
cagatagtctcaagcatattctcagtatacagc

SEQ ID NO: 23479 - DNA, 33 bp, Homo sapien
aaatgaaatgaccaaaataacttgtctaaaaac

SEQ ID NO: 23480 - DNA, 33 bp, Homo sapien
aaatgaaatgaccaaagtaacttgtctaaaaac

SEQ ID NO: 23481 - DNA, 33 bp, Homo sapien
aaccctttgttaaatacgccacgctgatcagca

SEQ ID NO: 23482 - DNA, 33 bp, Homo sapien
aaccctttgttaaatatgccacgctgatcagca

SEQ ID NO: 23483 - DNA, 33 bp, Homo sapien
agaaagaatccttcaacggagaatttttgctag

SEQ ID NO: 23484 - DNA, 33 bp, Homo sapien
agaaagaatccttcaatggagaatttttgctag

SEQ ID NO: 23485 - DNA, 33 bp, Homo sapien
caatatgctgatggatcaagacatactgcaacc

SEQ ID NO: 23486 - DNA, 33 bp, Homo sapien
caatatgctgatggattaagacatactgcaacc

SEQ ID NO: 23487 - DNA, 33 bp, Homo sapien
tgaaagatgaaaagtgaaacaaatttcttttaa

SEQ ID NO: 23488 - DNA, 33 bp, Homo sapien
tgaaagatgaaaagtgcaacaaatttcttttaa

SEQ ID NO: 23489 - DNA, 33 bp, Homo sapien
tgctggcattatagccacttgtgatgaaagatt

SEQ ID NO: 23490 - DNA, 33 bp, Homo sapien
tgctggcattatagccgcttgtgatgaaagatt

SEQ ID NO: 23491 - DNA, 33 bp, Homo sapien
attttttcgtttccacacacttgtgaattttcc

SEQ ID NO: 23492 - DNA, 33 bp, Homo sapien
attttttcgtttccacgcacttgtgaattttcc

SEQ ID NO: 23493 - DNA, 33 bp, Homo sapien
gattatatatcataacaaagcagagtttattcc

SEQ ID NO: 23494 - DNA, 33 bp, Homo sapien
gattatatatcataacgaagcagagtttattcc

SEQ ID NO: 23495 - DNA, 33 bp, Homo sapien
aatacaagcaatgtcaacgcttcgttttcctaa

SEQ ID NO: 23496 - DNA, 33 bp, Homo sapien
aatacaagcaatgtcagcgcttcgttttcctaa

SEQ ID NO: 23497 - DNA, 33 bp, Homo sapien
atttcacaagatagttaaaaatgaattaacgag

SEQ ID NO: 23498 - DNA, 33 bp, Homo sapien
atttcacaagatagttgaaaatgaattaacgag

SEQ ID NO: 23499 - DNA, 33 bp, Homo sapien
aattagaaaagcaggaataaaatcagaacgttc

SEQ ID NO: 23500 - DNA, 33 bp, Homo sapien
aattagaaaagcaggagtaaaatcagaacgttc

SEQ ID NO: 23501 - DNA, 33 bp, Homo sapien
ctgatctttaagctgagcattattgatgtctat

SEQ ID NO: 23502 - DNA, 33 bp, Homo sapien
ctgatctttaagctgatcattattgatgtctat

SEQ ID NO: 23503 - DNA, 33 bp, Homo sapien
atgggccacgtgttaactacatataactgatat

SEQ ID NO: 23504 - DNA, 33 bp, Homo sapien
atgggccacgtgttaattacatataactgatat

SEQ ID NO: 23505 - DNA, 33 bp, Homo sapien
agcagaaaaagaatgaagacaacggtcccactt

SEQ ID NO: 23506 - DNA, 33 bp, Homo sapien
agcagaaaaagaatgaggacaacggtcccactt

SEQ ID NO: 23507 - DNA, 33 bp, Homo sapien
caatcttgatgcccaacatctatactttcttct

SEQ ID NO: 23508 - DNA, 33 bp, Homo sapien
caatcttgatgcccaatatctatactttcttct

SEQ ID NO: 23509 - DNA, 33 bp, Homo sapien
aatgccctgaaccacaataaagacttcagtcca

SEQ ID NO: 23510 - DNA, 33 bp, Homo sapien
aatgccctgaaccacagtaaagacttcagtcca

SEQ ID NO: 23511 - DNA, 33 bp, Homo sapien
catgcaggaaacaacactaatggtcctgtcatc

SEQ ID NO: 23512 - DNA, 33 bp, Homo sapien
catgcaggaaacaacattaatggtcctgtcatc

SEQ ID NO: 23513 - DNA, 33 bp, Homo sapien
tttttcaaatcttatgaaggagataggagagag

SEQ ID NO: 23514 - DNA, 33 bp, Homo sapien
tttttcaaatcttatggaggagataggagagag

SEQ ID NO: 23515 - DNA, 33 bp, Homo sapien
aaaatattttaaatacaatcaacaaagcactct

SEQ ID NO: 23516 - DNA, 33 bp, Homo sapien
aaaatattttaaatacgatcaacaaagcactct

SEQ ID NO: 23517 - DNA, 33 bp, Homo sapien
tatgcatatagatcacaccttaactcttttagt

SEQ ID NO: 23518 - DNA, 33 bp, Homo sapien
tatgcatatagatcacgccttaactcttttagt

SEQ ID NO: 23519 - DNA, 33 bp, Homo sapien
gagaccatctactaggccaatgcaaacgggaac

SEQ ID NO: 23520 - DNA, 33 bp, Homo sapien
gagaccatctactagggcaatgcaaacgggaac

SEQ ID NO: 23521 - DNA, 33 bp, Homo sapien
acaataagattgacaacgagggccactgttgct

SEQ ID NO: 23522 - DNA, 33 bp, Homo sapien
acaataagattgacaatgagggccactgttgct

SEQ ID NO: 23523 - DNA, 33 bp, Homo sapien
tctatcagtatggttcagaaatcacacagtaat

SEQ ID NO: 23524 - DNA, 33 bp, Homo sapien
tctatcagtatggttcggaaatcacacagtaat

SEQ ID NO: 23525 - DNA, 33 bp, Homo sapien
ctgagttccaaattaacggttcagaggggtaga

SEQ ID NO: 23526 - DNA, 33 bp, Homo sapien
ctgagttccaaattaatggttcagaggggtaga

SEQ ID NO: 23527 - DNA, 33 bp, Homo sapien
ggtcaatgaaaccagacgggcattttctcataa

SEQ ID NO: 23528 - DNA, 33 bp, Homo sapien
ggtcaatgaaaccagatgggcattttctcataa

SEQ ID NO: 23529 - DNA, 33 bp, Homo sapien
aacaccgcaacagatacattatacccaggagat

SEQ ID NO: 23530 - DNA, 33 bp, Homo sapien
aacaccgcaacagatatattatacccaggagat

SEQ ID NO: 23531 - DNA, 33 bp, Homo sapien
aaaacctatgtgataaaatcaagtaaactataa

SEQ ID NO: 23532 - DNA, 33 bp, Homo sapien
aaaacctatgtgataacatcaagtaaactataa

SEQ ID NO: 23533 - DNA, 33 bp, Homo sapien
gggaaaagttaaaaagacagattctggacacac

SEQ ID NO: 23534 - DNA, 33 bp, Homo sapien
gggaaaagttaaaaaggcagattctggacacac

SEQ ID NO: 23535 - DNA, 33 bp, Homo sapien
atcacttgaaattcacactgggagccaagaaaa

SEQ ID NO: 23536 - DNA, 33 bp, Homo sapien
atcacttgaaattcactctgggagccaagaaaa

SEQ ID NO: 23537 - DNA, 33 bp, Homo sapien
cttgcccaatcaaaacagtagttatagcctgtt

SEQ ID NO: 23538 - DNA, 33 bp, Homo sapien
cttgcccaatcaaaactgtagttatagcctgtt

SEQ ID NO: 23539 - DNA, 33 bp, Homo sapien
tttaagtctctgaaaggatatccaacaaacaaa

SEQ ID NO: 23540 - DNA, 33 bp, Homo sapien
tttaagtctctgaaagtatatccaacaaacaaa

SEQ ID NO: 23541 - DNA, 33 bp, Homo sapien
ctatctttaacattacacttggcttataagtta

SEQ ID NO: 23542 - DNA, 33 bp, Homo sapien
ctatctttaacattacgcttggcttataagtta

SEQ ID NO: 23543 - DNA, 33 bp, Homo sapien
gaaatgacacaaatcacaaatgttaggaaggga

SEQ ID NO: 23544 - DNA, 33 bp, Homo sapien
gaaatgacacaaatcataaatgttaggaaggga

SEQ ID NO: 23545 - DNA, 33 bp, Homo sapien
aatactgtcaattgtacggcatatcctgatttc

SEQ ID NO: 23546 - DNA, 33 bp, Homo sapien
aatactgtcaattgtagggcatatcctgatttc

SEQ ID NO: 23547 - DNA, 33 bp, Homo sapien
gggattagagggatagaaggaaactagcactac

SEQ ID NO: 23548 - DNA, 33 bp, Homo sapien
gggattagagggataggaggaaactagcactac

SEQ ID NO: 23549 - DNA, 33 bp, Homo sapien
aaattagacatgatgaaggcaaaatcaataaca

SEQ ID NO: 23550 - DNA, 33 bp, Homo sapien
aaattagacatgatgagggcaaaatcaataaca

SEQ ID NO: 23551 - DNA, 33 bp, Homo sapien
ctttttgacacattgaaatctctgtaaggtaag

SEQ ID NO: 23552 - DNA, 33 bp, Homo sapien
ctttttgacacattgatatctctgtaaggtaag

SEQ ID NO: 23553 - DNA, 33 bp, Homo sapien
ccccttaaaaatgaaaacaatcatccattctct

SEQ ID NO: 23554 - DNA, 33 bp, Homo sapien
ccccttaaaaatgaaagcaatcatccattctct

SEQ ID NO: 23555 - DNA, 33 bp, Homo sapien
tcccataggtaggaaacgaaaagctgaaagtcc

SEQ ID NO: 23556 - DNA, 33 bp, Homo sapien
tcccataggtaggaaatgaaaagctgaaagtcc

SEQ ID NO: 23557 - DNA, 33 bp, Homo sapien
caaatcctgtctttcaacacctactgacttaat

SEQ ID NO: 23558 - DNA, 33 bp, Homo sapien
caaatcctgtctttcaccacctactgacttaat

SEQ ID NO: 23559 - DNA, 33 bp, Homo sapien
aaaatttgaggcagcaaaattgtcactaacaca

SEQ ID NO: 23560 - DNA, 33 bp, Homo sapien
aaaatttgaggcagcagaattgtcactaacaca

SEQ ID NO: 23561 - DNA, 33 bp, Homo sapien
cccttaggaacacaaaaggacatttaaatgaga

SEQ ID NO: 23562 - DNA, 33 bp, Homo sapien
cccttaggaacacaaagggacatttaaatgaga

SEQ ID NO: 23563 - DNA, 33 bp, Homo sapien
gagcagagagagcatacggagccatctggaaac

SEQ ID NO: 23564 - DNA, 33 bp, Homo sapien
gagcagagagagcatagggagccatctggaaac

SEQ ID NO: 23565 - DNA, 33 bp, Homo sapien
cagtgaatttttagaaagatgcaatcagcttgg

SEQ ID NO: 23566 - DNA, 33 bp, Homo sapien
cagtgaatttttagaatgatgcaatcagcttgg

SEQ ID NO: 23567 - DNA, 33 bp, Homo sapien
agattctggcctcaaaaaatttacagttcttaa

SEQ ID NO: 23568 - DNA, 33 bp, Homo sapien
agattctggcctcaaataatttacagttcttaa

SEQ ID NO: 23569 - DNA, 33 bp, Homo sapien
acatgagattaatagagcagctttatttcagaa

SEQ ID NO: 23570 - DNA, 33 bp, Homo sapien
acatgagattaatagatcagctttatttcagaa

SEQ ID NO: 23571 - DNA, 33 bp, Homo sapien
ctttgccctaagaatggactcatccatgaaatt

SEQ ID NO: 23572 - DNA, 33 bp, Homo sapien
ctttgccctaagaatgtactcatccatgaaatt

SEQ ID NO: 23573 - DNA, 33 bp, Homo sapien
ttgttttgatagaacacaaaggaacatagaaat

SEQ ID NO: 23574 - DNA, 33 bp, Homo sapien
ttgttttgatagaacataaaggaacatagaaat

SEQ ID NO: 23575 - DNA, 33 bp, Homo sapien
gcaataactgagtgcaatagtcctgaatttctg

SEQ ID NO: 23576 - DNA, 33 bp, Homo sapien
gcaataactgagtgcagtagtcctgaatttctg

SEQ ID NO: 23577 - DNA, 33 bp, Homo sapien
gatatatatagattaacagcatgatgaaattgt

SEQ ID NO: 23578 - DNA, 33 bp, Homo sapien
gatatatatagattaagagcatgatgaaattgt

SEQ ID NO: 23579 - DNA, 33 bp, Homo sapien
actcaaactttacaagacactgtacattttacc

SEQ ID NO: 23580 - DNA, 33 bp, Homo sapien
actcaaactttacaaggcactgtacattttacc

SEQ ID NO: 23581 - DNA, 33 bp, Homo sapien
cggcctagattttctcaaaaagtaggaggttag

SEQ ID NO: 23582 - DNA, 33 bp, Homo sapien
cggcctagattttctccaaaagtaggaggttag

SEQ ID NO: 23583 - DNA, 33 bp, Homo sapien
tcacaagttgacagtcacatgaggctttcaata

SEQ ID NO: 23584 - DNA, 33 bp, Homo sapien
tcacaagttgacagtcgcatgaggctttcaata

SEQ ID NO: 23585 - DNA, 33 bp, Homo sapien
tgtcctcctctaaccactctcactgcttttgtc

SEQ ID NO: 23586 - DNA, 33 bp, Homo sapien
tgtcctcctctaaccattctcactgcttttgtc

SEQ ID NO: 23587 - DNA, 33 bp, Homo sapien
gtttatactacatccactaaagtcaagtgcagt

SEQ ID NO: 23588 - DNA, 33 bp, Homo sapien
gtttatactacatccagtaaagtcaagtgcagt

SEQ ID NO: 23589 - DNA, 33 bp, Homo sapien
cccagtagtaagactgaaactttggcaattata

SEQ ID NO: 23590 - DNA, 33 bp, Homo sapien
cccagtagtaagactgcaactttggcaattata

SEQ ID NO: 23591 - DNA, 33 bp, Homo sapien
ctattaataattacagacgaaaacctccaaatc

SEQ ID NO: 23592 - DNA, 33 bp, Homo sapien
ctattaataattacaggcgaaaacctccaaatc

SEQ ID NO: 23593 - DNA, 33 bp, Homo sapien
tgaaatgagaattctacgcttgtactaatactg

SEQ ID NO: 23594 - DNA, 33 bp, Homo sapien
tgaaatgagaattctatgcttgtactaatactg

SEQ ID NO: 23595 - DNA, 33 bp, Homo sapien
gccgagcgtgcttcaacagtaaaaacagcacag

SEQ ID NO: 23596 - DNA, 33 bp, Homo sapien
gccgagcgtgcttcaagagtaaaaacagcacag

SEQ ID NO: 23597 - DNA, 33 bp, Homo sapien
atcctgcaccaatttcactgaagtttgtaacca

SEQ ID NO: 23598 - DNA, 33 bp, Homo sapien
atcctgcaccaatttctctgaagtttgtaacca

SEQ ID NO: 23599 - DNA, 33 bp, Homo sapien
gaaagtgtctaatgtggatcgcttcatataaaa

SEQ ID NO: 23600 - DNA, 33 bp, Homo sapien
gaaagtgtctaatgtgtatcgcttcatataaaa

SEQ ID NO: 23601 - DNA, 33 bp, Homo sapien
tcatggagttcacactcaactgggggaaataga

SEQ ID NO: 23602 - DNA, 33 bp, Homo sapien
tcatggagttcacacttaactgggggaaataga

SEQ ID NO: 23603 - DNA, 33 bp, Homo sapien
accccaagacctaatcaaatgtcacttccattc

SEQ ID NO: 23604 - DNA, 33 bp, Homo sapien
accccaagacctaatcgaatgtcacttccattc

SEQ ID NO: 23605 - DNA, 33 bp, Homo sapien
tggaaattttagatcacggttgccctcttttcc

SEQ ID NO: 23606 - DNA, 33 bp, Homo sapien
tggaaattttagatcatggttgccctcttttcc

SEQ ID NO: 23607 - DNA, 33 bp, Homo sapien
gctcctgggtgcactaccatttaattttaaatt

SEQ ID NO: 23608 - DNA, 33 bp, Homo sapien
gctcctgggtgcactatcatttaattttaaatt

SEQ ID NO: 23609 - DNA, 33 bp, Homo sapien
gtgaattatttataagcagtctgtgttttgaga

SEQ ID NO: 23610 - DNA, 33 bp, Homo sapien
gtgaattatttataaggagtctgtgttttgaga

SEQ ID NO: 23611 - DNA, 33 bp, Homo sapien
tttgttaaagcagtaacaattatggggataaat

SEQ ID NO: 23612 - DNA, 33 bp, Homo sapien
tttgttaaagcagtaataattatggggataaat

SEQ ID NO: 23613 - DNA, 33 bp, Homo sapien
atacaaatgagttggacggccaaaaatatttgt

SEQ ID NO: 23614 - DNA, 33 bp, Homo sapien
atacaaatgagttggatggccaaaaatatttgt

SEQ ID NO: 23615 - DNA, 33 bp, Homo sapien
actttcaagacagtaacaaaaatgcagggctaa

SEQ ID NO: 23616 - DNA, 33 bp, Homo sapien
actttcaagacagtaagaaaaatgcagggctaa

SEQ ID NO: 23617 - DNA, 33 bp, Homo sapien
agtaattaatattatacgctgacaagtactatg

SEQ ID NO: 23618 - DNA, 33 bp, Homo sapien
agtaattaatattatatgctgacaagtactatg

SEQ ID NO: 23619 - DNA, 33 bp, Homo sapien
gctggcccttgtgacaatcattgccggtataga

SEQ ID NO: 23620 - DNA, 33 bp, Homo sapien
gctggcccttgtgacagtcattgccggtataga

SEQ ID NO: 23621 - DNA, 33 bp, Homo sapien
tcttatagtttgctgaatagtataactgaatag

SEQ ID NO: 23622 - DNA, 33 bp, Homo sapien
tcttatagtttgctgagtagtataactgaatag

SEQ ID NO: 23623 - DNA, 33 bp, Homo sapien
gcctttcacgatcaacaattggtatttttccaa

SEQ ID NO: 23624 - DNA, 33 bp, Homo sapien
gcctttcacgatcaacgattggtatttttccaa

SEQ ID NO: 23625 - DNA, 33 bp, Homo sapien
tttacacagaaaataaacagctgagttgggatt

SEQ ID NO: 23626 - DNA, 33 bp, Homo sapien
tttacacagaaaataaccagctgagttgggatt

SEQ ID NO: 23627 - DNA, 33 bp, Homo sapien
tgatgcaaaaagcacaacatttggtttctaact

SEQ ID NO: 23628 - DNA, 33 bp, Homo sapien
tgatgcaaaaagcacagcatttggtttctaact

SEQ ID NO: 23629 - DNA, 33 bp, Homo sapien
aaagattattctatggacaaaatctgcaatttg

SEQ ID NO: 23630 - DNA, 33 bp, Homo sapien
aaagattattctatggtcaaaatctgcaatttg

SEQ ID NO: 23631 - DNA, 33 bp, Homo sapien
ggagtattttggaggacgaaaggttatgttcca

SEQ ID NO: 23632 - DNA, 33 bp, Homo sapien
ggagtattttggaggatgaaaggttatgttcca

SEQ ID NO: 23633 - DNA, 33 bp, Homo sapien
aaatacagatgtctcacaggaaaaaaaacactc

SEQ ID NO: 23634 - DNA, 33 bp, Homo sapien
aaatacagatgtctcagaggaaaaaaaacactc

SEQ ID NO: 23635 - DNA, 33 bp, Homo sapien
caaggagaactgatatcaatcctaccaaagccc

SEQ ID NO: 23636 - DNA, 33 bp, Homo sapien
caaggagaactgatattaatcctaccaaagccc

SEQ ID NO: 23637 - DNA, 33 bp, Homo sapien
cagacagagccaaataaagttagaaataaaaag

SEQ ID NO: 23638 - DNA, 33 bp, Homo sapien
cagacagagccaaatagagttagaaataaaaag

SEQ ID NO: 23639 - DNA, 33 bp, Homo sapien
atctattgtgtgtccaatattttccaaattctg

SEQ ID NO: 23640 - DNA, 33 bp, Homo sapien
atctattgtgtgtccattattttccaaattctg

SEQ ID NO: 23641 - DNA, 33 bp, Homo sapien
gtactcaaagatgtgcaaaaatgttccagcatt

SEQ ID NO: 23642 - DNA, 33 bp, Homo sapien
gtactcaaagatgtgccaaaatgttccagcatt

SEQ ID NO: 23643 - DNA, 33 bp, Homo sapien
tgttgaatctttgagcaaaactggttgagcagc

SEQ ID NO: 23644 - DNA, 33 bp, Homo sapien
tgttgaatctttgagccaaactggttgagcagc

SEQ ID NO: 23645 - DNA, 33 bp, Homo sapien
tcttttaaagcagtgcagaactcagcagtttgg

SEQ ID NO: 23646 - DNA, 33 bp, Homo sapien
tcttttaaagcagtgccgaactcagcagtttgg

SEQ ID NO: 23647 - DNA, 33 bp, Homo sapien
agactaaaatgggctcagaaataatacattttt

SEQ ID NO: 23648 - DNA, 33 bp, Homo sapien
agactaaaatgggctcggaaataatacattttt

SEQ ID NO: 23649 - DNA, 33 bp, Homo sapien
gttaaataaatgccagccaaaagtaactcacct

SEQ ID NO: 23650 - DNA, 33 bp, Homo sapien
gttaaataaatgccagtcaaaagtaactcacct

SEQ ID NO: 23651 - DNA, 33 bp, Homo sapien
tccatatctttaatcacatccacaaagtttctt

SEQ ID NO: 23652 - DNA, 33 bp, Homo sapien
tccatatctttaatcatatccacaaagtttctt

SEQ ID NO: 23653 - DNA, 33 bp, Homo sapien
agatggctaaagtattcaaccttttgcaaaact

SEQ ID NO: 23654 - DNA, 33 bp, Homo sapien
agatggctaaagtattgaaccttttgcaaaact

SEQ ID NO: 23655 - DNA, 33 bp, Homo sapien
ttcactgcactaaagaaggatgtgaaagagagc

SEQ ID NO: 23656 - DNA, 33 bp, Homo sapien
ttcactgcactaaagagggatgtgaaagagagc

SEQ ID NO: 23657 - DNA, 33 bp, Homo sapien
agaaactagagacaaactcccatctttgcagtg

SEQ ID NO: 23658 - DNA, 33 bp, Homo sapien
agaaactagagacaaattcccatctttgcagtg

SEQ ID NO: 23659 - DNA, 33 bp, Homo sapien
aaaaacttgagcgaaacctaaaatataagtaat

SEQ ID NO: 23660 - DNA, 33 bp, Homo sapien
aaaaacttgagcgaaatctaaaatataagtaat

SEQ ID NO: 23661 - DNA, 33 bp, Homo sapien
cattagcaccgttggaagcaaattctatttttg

SEQ ID NO: 23662 - DNA, 33 bp, Homo sapien
cattagcaccgttggaggcaaattctatttttg

SEQ ID NO: 23663 - DNA, 33 bp, Homo sapien
tgctgaagctaagaaaactataagacacagcaa

SEQ ID NO: 23664 - DNA, 33 bp, Homo sapien
tgctgaagctaagaaacctataagacacagcaa

SEQ ID NO: 23665 - DNA, 33 bp, Homo sapien
tcttcctggcttttcacggaagcgagaacaatt

SEQ ID NO: 23666 - DNA, 33 bp, Homo sapien
tcttcctggcttttcatggaagcgagaacaatt

SEQ ID NO: 23667 - DNA, 33 bp, Homo sapien
ttatcttgggcaatgaaactttatttcttcaaa

SEQ ID NO: 23668 - DNA, 33 bp, Homo sapien
ttatcttgggcaatgagactttatttcttcaaa

SEQ ID NO: 23669 - DNA, 33 bp, Homo sapien
tgtctcattgaattctcaccataataacatgaa

SEQ ID NO: 23670 - DNA, 33 bp, Homo sapien
tgtctcattgaattcttaccataataacatgaa

SEQ ID NO: 23671 - DNA, 33 bp, Homo sapien
catctgagtggtggtacgctcataaagaaaaag

SEQ ID NO: 23672 - DNA, 33 bp, Homo sapien
catctgagtggtggtatgctcataaagaaaaag

SEQ ID NO: 23673 - DNA, 33 bp, Homo sapien
gtgaatgaatgaatggcatactgccctgactat

SEQ ID NO: 23674 - DNA, 33 bp, Homo sapien
gtgaatgaatgaatggtatactgccctgactat

SEQ ID NO: 23675 - DNA, 33 bp, Homo sapien
gctcatccatccaaaactctaagtggcccacac

SEQ ID NO: 23676 - DNA, 33 bp, Homo sapien
gctcatccatccaaaattctaagtggcccacac

SEQ ID NO: 23677 - DNA, 33 bp, Homo sapien
ggattttgccaccagacagcctgcacatctttc

SEQ ID NO: 23678 - DNA, 33 bp, Homo sapien
ggattttgccaccagagagcctgcacatctttc

SEQ ID NO: 23679 - DNA, 33 bp, Homo sapien
ccctggggagtggacaagtatttctagttaaaa

SEQ ID NO: 23680 - DNA, 33 bp, Homo sapien
ccctggggagtggacaggtatttctagttaaaa

SEQ ID NO: 23681 - DNA, 33 bp, Homo sapien
acaaaatgacagagataaagggtccaaatcctc

SEQ ID NO: 23682 - DNA, 33 bp, Homo sapien
acaaaatgacagagatcaagggtccaaatcctc

SEQ ID NO: 23683 - DNA, 33 bp, Homo sapien
cagcaaattaaagaaacttcagagaattcacca

SEQ ID NO: 23684 - DNA, 33 bp, Homo sapien
cagcaaattaaagaaagttcagagaattcacca

SEQ ID NO: 23685 - DNA, 33 bp, Homo sapien
attcacctactgcataggtctcttctgttatca

SEQ ID NO: 23686 - DNA, 33 bp, Homo sapien
attcacctactgcatatgtctcttctgttatca

SEQ ID NO: 23687 - DNA, 33 bp, Homo sapien
gtgggacttaacattcaagtgaagaggacctag

SEQ ID NO: 23688 - DNA, 33 bp, Homo sapien
gtgggacttaacattcgagtgaagaggacctag

SEQ ID NO: 23689 - DNA, 33 bp, Homo sapien
ctcatttgtaaatcaggataataaggtctatga

SEQ ID NO: 23690 - DNA, 33 bp, Homo sapien
ctcatttgtaaatcagtataataaggtctatga

SEQ ID NO: 23691 - DNA, 33 bp, Homo sapien
ccctttctgtactgaccgcatggacccaagaaa

SEQ ID NO: 23692 - DNA, 33 bp, Homo sapien
ccctttctgtactgactgcatggacccaagaaa

SEQ ID NO: 23693 - DNA, 33 bp, Homo sapien
tttgcaagggtgttcacgactttactcaatttc

SEQ ID NO: 23694 - DNA, 33 bp, Homo sapien
tttgcaagggtgttcatgactttactcaatttc

SEQ ID NO: 23695 - DNA, 33 bp, Homo sapien
ttctgaagttactgaaatagttgagccccagta

SEQ ID NO: 23696 - DNA, 33 bp, Homo sapien
ttctgaagttactgaagtagttgagccccagta

SEQ ID NO: 23697 - DNA, 33 bp, Homo sapien
ctattatatgtcttaaacttttgatatgaggcc

SEQ ID NO: 23698 - DNA, 33 bp, Homo sapien
ctattatatgtcttaatcttttgatatgaggcc

SEQ ID NO: 23699 - DNA, 33 bp, Homo sapien
tacatggatatattgaatattggtagtgattgg

SEQ ID NO: 23700 - DNA, 33 bp, Homo sapien
tacatggatatattgagtattggtagtgattgg

SEQ ID NO: 23701 - DNA, 33 bp, Homo sapien
taagtttccagggccacagttatttctaaagta

SEQ ID NO: 23702 - DNA, 33 bp, Homo sapien
taagtttccagggccatagttatttctaaagta

SEQ ID NO: 23703 - DNA, 33 bp, Homo sapien
tagagttgatagcattcaataattgagtaagta

SEQ ID NO: 23704 - DNA, 33 bp, Homo sapien
tagagttgatagcatttaataattgagtaagta

SEQ ID NO: 23705 - DNA, 33 bp, Homo sapien
tcaaggaatcaaagacaaagtgggaagagaggc

SEQ ID NO: 23706 - DNA, 33 bp, Homo sapien
tcaaggaatcaaagacgaagtgggaagagaggc

SEQ ID NO: 23707 - DNA, 33 bp, Homo sapien
tgtccgtgagtaagaactagacaagaaagatgt

SEQ ID NO: 23708 - DNA, 33 bp, Homo sapien
tgtccgtgagtaagaattagacaagaaagatgt

SEQ ID NO: 23709 - DNA, 33 bp, Homo sapien
aacccaaactcagtgaagataaatgtgaaaaaa

SEQ ID NO: 23710 - DNA, 33 bp, Homo sapien
aacccaaactcagtgaggataaatgtgaaaaaa

SEQ ID NO: 23711 - DNA, 33 bp, Homo sapien
aaatcctaaaaatgcaacattggaggagattgc

SEQ ID NO: 23712 - DNA, 33 bp, Homo sapien
aaatcctaaaaatgcagcattggaggagattgc

SEQ ID NO: 23713 - DNA, 33 bp, Homo sapien
tctcaaaggtaccacgaccttttaccacatctc

SEQ ID NO: 23714 - DNA, 33 bp, Homo sapien
tctcaaaggtaccacggccttttaccacatctc

SEQ ID NO: 23715 - DNA, 33 bp, Homo sapien
aggacagagctccttaaaagtctggctttctca

SEQ ID NO: 23716 - DNA, 33 bp, Homo sapien
aggacagagctccttacaagtctggctttctca

SEQ ID NO: 23717 - DNA, 33 bp, Homo sapien
ggcatcaaggaggttcactgatccaaaaatatc

SEQ ID NO: 23718 - DNA, 33 bp, Homo sapien
ggcatcaaggaggttcgctgatccaaaaatatc

SEQ ID NO: 23719 - DNA, 33 bp, Homo sapien
cttctcttctctttgcccttcaattctctttta

SEQ ID NO: 23720 - DNA, 33 bp, Homo sapien
cttctcttctctttgctcttcaattctctttta

SEQ ID NO: 23721 - DNA, 33 bp, Homo sapien
ttacatatagattggaactgaaatcaagatgga

SEQ ID NO: 23722 - DNA, 33 bp, Homo sapien
ttacatatagattggagctgaaatcaagatgga

SEQ ID NO: 23723 - DNA, 33 bp, Homo sapien
ctcatttgcttatgtccatttaattggctattt

SEQ ID NO: 23724 - DNA, 33 bp, Homo sapien
ctcatttgcttatgtctatttaattggctattt

SEQ ID NO: 23725 - DNA, 33 bp, Homo sapien
accttaccaccaaaggacctatgaaatcacaag

SEQ ID NO: 23726 - DNA, 33 bp, Homo sapien
accttaccaccaaagggcctatgaaatcacaag

SEQ ID NO: 23727 - DNA, 33 bp, Homo sapien
ctacagtaatctaatccaattcttcccgagact

SEQ ID NO: 23728 - DNA, 33 bp, Homo sapien
ctacagtaatctaatctaattcttcccgagact

SEQ ID NO: 23729 - DNA, 33 bp, Homo sapien
caatgatcatatgaaaatagactgtcataccat

SEQ ID NO: 23730 - DNA, 33 bp, Homo sapien
caatgatcatatgaaagtagactgtcataccat

SEQ ID NO: 23731 - DNA, 33 bp, Homo sapien
aggaatgaggaccgtacctaccgtcttggagac

SEQ ID NO: 23732 - DNA, 33 bp, Homo sapien
aggaatgaggaccgtatctaccgtcttggagac

SEQ ID NO: 23733 - DNA, 33 bp, Homo sapien
catttcccagagtgacaaattatactccaaagg

SEQ ID NO: 23734 - DNA, 33 bp, Homo sapien
catttcccagagtgacgaattatactccaaagg

SEQ ID NO: 23735 - DNA, 33 bp, Homo sapien
cgacacaacagtattaagttcaaagatcctctg

SEQ ID NO: 23736 - DNA, 33 bp, Homo sapien
cgacacaacagtattaggttcaaagatcctctg

SEQ ID NO: 23737 - DNA, 33 bp, Homo sapien
ggagtttcttttagccaaagttcacagtgatct

SEQ ID NO: 23738 - DNA, 33 bp, Homo sapien
ggagtttcttttagccgaagttcacagtgatct

SEQ ID NO: 23739 - DNA, 33 bp, Homo sapien
ctctctctctctctcaatccacagagtaaatca

SEQ ID NO: 23740 - DNA, 33 bp, Homo sapien
ctctctctctctctcagtccacagagtaaatca

SEQ ID NO: 23741 - DNA, 33 bp, Homo sapien
tgtctagggagctcctaaaacttgtatctagga

SEQ ID NO: 23742 - DNA, 33 bp, Homo sapien
tgtctagggagctcctgaaacttgtatctagga

SEQ ID NO: 23743 - DNA, 33 bp, Homo sapien
ttttttttttgggagactcaacaacttctcttg

SEQ ID NO: 23744 - DNA, 33 bp, Homo sapien
ttttttttttgggagattcaacaacttctcttg

SEQ ID NO: 23745 - DNA, 33 bp, Homo sapien
ttctctgcatagatgacccataaattctaaaac

SEQ ID NO: 23746 - DNA, 33 bp, Homo sapien
ttctctgcatagatgagccataaattctaaaac

SEQ ID NO: 23747 - DNA, 33 bp, Homo sapien
cttaagcattatactccctctcctttcatactt

SEQ ID NO: 23748 - DNA, 33 bp, Homo sapien
cttaagcattatactctctctcctttcatactt

SEQ ID NO: 23749 - DNA, 33 bp, Homo sapien
ttagattatttagaaaaagactcatgggcccaa

SEQ ID NO: 23750 - DNA, 33 bp, Homo sapien
ttagattatttagaaagagactcatgggcccaa

SEQ ID NO: 23751 - DNA, 33 bp, Homo sapien
agagaaaatatccaggcccgagagtgcctagca

SEQ ID NO: 23752 - DNA, 33 bp, Homo sapien
agagaaaatatccaggtccgagagtgcctagca

SEQ ID NO: 23753 - DNA, 33 bp, Homo sapien
agaaatgtgcttgccaataataagttgcaggta

SEQ ID NO: 23754 - DNA, 33 bp, Homo sapien
agaaatgtgcttgccagtaataagttgcaggta

SEQ ID NO: 23755 - DNA, 33 bp, Homo sapien
catttgtctttgaatcactagcatgtaagttaa

SEQ ID NO: 23756 - DNA, 33 bp, Homo sapien
catttgtctttgaatccctagcatgtaagttaa

SEQ ID NO: 23757 - DNA, 33 bp, Homo sapien
ttatgacatggtctggaatgagtctaagtattc

SEQ ID NO: 23758 - DNA, 33 bp, Homo sapien
ttatgacatggtctggcatgagtctaagtattc

SEQ ID NO: 23759 - DNA, 33 bp, Homo sapien
ttttacagtgagtttaaaggagataacacatga

SEQ ID NO: 23760 - DNA, 33 bp, Homo sapien
ttttacagtgagtttagaggagataacacatga

SEQ ID NO: 23761 - DNA, 33 bp, Homo sapien
acagttgcagtaccagaaatgtcagtagataat

SEQ ID NO: 23762 - DNA, 33 bp, Homo sapien
acagttgcagtaccaggaatgtcagtagataat

SEQ ID NO: 23763 - DNA, 33 bp, Homo sapien
agaatggaaacagatagcacatcttcacaactg

SEQ ID NO: 23764 - DNA, 33 bp, Homo sapien
agaatggaaacagatatcacatcttcacaactg

SEQ ID NO: 23765 - DNA, 33 bp, Homo sapien
tgaaaggtgttttaatcatggctgggttgggca

SEQ ID NO: 23766 - DNA, 33 bp, Homo sapien
tgaaaggtgttttaatgatggctgggttgggca

SEQ ID NO: 23767 - DNA, 33 bp, Homo sapien
aagggcaaagaggctaaaaatggctggaatttc

SEQ ID NO: 23768 - DNA, 33 bp, Homo sapien
aagggcaaagaggctagaaatggctggaatttc

SEQ ID NO: 23769 - DNA, 33 bp, Homo sapien
ccaccctctgtcatcactccttgtatctttctt

SEQ ID NO: 23770 - DNA, 33 bp, Homo sapien
ccaccctctgtcatcattccttgtatctttctt

SEQ ID NO: 23771 - DNA, 33 bp, Homo sapien
tgtcattaaaggcaagaaaccttagttcagaaa

SEQ ID NO: 23772 - DNA, 33 bp, Homo sapien
tgtcattaaaggcaagcaaccttagttcagaaa

SEQ ID NO: 23773 - DNA, 33 bp, Homo sapien
gataactgagggaaaactgaatatgaagcaagt

SEQ ID NO: 23774 - DNA, 33 bp, Homo sapien
gataactgagggaaaattgaatatgaagcaagt

SEQ ID NO: 23775 - DNA, 33 bp, Homo sapien
gagttcacttcaaaaacgcaggaattcttagaa

SEQ ID NO: 23776 - DNA, 33 bp, Homo sapien
gagttcacttcaaaaatgcaggaattcttagaa

SEQ ID NO: 23777 - DNA, 33 bp, Homo sapien
ttctagagcccaaatccagttgaattctggctg

SEQ ID NO: 23778 - DNA, 33 bp, Homo sapien
ttctagagcccaaatctagttgaattctggctg

SEQ ID NO: 23779 - DNA, 33 bp, Homo sapien
tggatttgcaaaatagcaatgccttctttaaaa

SEQ ID NO: 23780 - DNA, 33 bp, Homo sapien
tggatttgcaaaatagtaatgccttctttaaaa

SEQ ID NO: 23781 - DNA, 33 bp, Homo sapien
tcttgagctagaaacgaaagtcattttttctat

SEQ ID NO: 23782 - DNA, 33 bp, Homo sapien
tcttgagctagaaacggaagtcattttttctat

SEQ ID NO: 23783 - DNA, 33 bp, Homo sapien
ctgctttgctttgaacagtccctggctggtaga

SEQ ID NO: 23784 - DNA, 33 bp, Homo sapien
ctgctttgctttgaacggtccctggctggtaga

SEQ ID NO: 23785 - DNA, 33 bp, Homo sapien
gattgtaaggtgtaatgaaaagaggtcacacct

SEQ ID NO: 23786 - DNA, 33 bp, Homo sapien
gattgtaaggtgtaattaaaagaggtcacacct

SEQ ID NO: 23787 - DNA, 33 bp, Homo sapien
ttcccttccaatagcaaaagagaacagagtgga

SEQ ID NO: 23788 - DNA, 33 bp, Homo sapien
ttcccttccaatagcagaagagaacagagtgga

SEQ ID NO: 23789 - DNA, 33 bp, Homo sapien
tgccctaaaatatctcaatcattgtgtgggccc

SEQ ID NO: 23790 - DNA, 33 bp, Homo sapien
tgccctaaaatatctccatcattgtgtgggccc

SEQ ID NO: 23791 - DNA, 33 bp, Homo sapien
ctatggagtggggataataaagacacctacctg

SEQ ID NO: 23792 - DNA, 33 bp, Homo sapien
ctatggagtggggatactaaagacacctacctg

SEQ ID NO: 23793 - DNA, 33 bp, Homo sapien
tatttctagatagtgaataccttcaaacaacta

SEQ ID NO: 23794 - DNA, 33 bp, Homo sapien
tatttctagatagtgagtaccttcaaacaacta

SEQ ID NO: 23795 - DNA, 33 bp, Homo sapien
cagttcatactttccaaccctgaatagcacagt

SEQ ID NO: 23796 - DNA, 33 bp, Homo sapien
cagttcatactttccagccctgaatagcacagt

SEQ ID NO: 23797 - DNA, 33 bp, Homo sapien
tatttagagttgtcaaatcagataagcatctct

SEQ ID NO: 23798 - DNA, 33 bp, Homo sapien
tatttagagttgtcaattcagataagcatctct

SEQ ID NO: 23799 - DNA, 33 bp, Homo sapien
tcttctttagcaacaacgatgcaggctgttctt

SEQ ID NO: 23800 - DNA, 33 bp, Homo sapien
tcttctttagcaacaatgatgcaggctgttctt

SEQ ID NO: 23801 - DNA, 33 bp, Homo sapien
cactaaggagtaacagcacatttgcaatgagca

SEQ ID NO: 23802 - DNA, 33 bp, Homo sapien
cactaaggagtaacaggacatttgcaatgagca

SEQ ID NO: 23803 - DNA, 33 bp, Homo sapien
tcccagttcctccatgaaaattctgttccctaa

SEQ ID NO: 23804 - DNA, 33 bp, Homo sapien
tcccagttcctccatgtaaattctgttccctaa

SEQ ID NO: 23805 - DNA, 33 bp, Homo sapien
attgtggctctcaaaactatgtctcttggtgac

SEQ ID NO: 23806 - DNA, 33 bp, Homo sapien
attgtggctctcaaaagtatgtctcttggtgac

SEQ ID NO: 23807 - DNA, 33 bp, Homo sapien
atattttagcagccaacttgatacataaggtgg

SEQ ID NO: 23808 - DNA, 33 bp, Homo sapien
atattttagcagccaatttgatacataaggtgg

SEQ ID NO: 23809 - DNA, 33 bp, Homo sapien
ctggtgttgaaaatcaacataaatcaaggctat

SEQ ID NO: 23810 - DNA, 33 bp, Homo sapien
ctggtgttgaaaatcaccataaatcaaggctat

SEQ ID NO: 23811 - DNA, 33 bp, Homo sapien
cacacgttgtcaagatcagcaagggatgtcagc

SEQ ID NO: 23812 - DNA, 33 bp, Homo sapien
cacacgttgtcaagattagcaagggatgtcagc

SEQ ID NO: 23813 - DNA, 33 bp, Homo sapien
tcggaaccataaagacactcagctagtaagcag

SEQ ID NO: 23814 - DNA, 33 bp, Homo sapien
tcggaaccataaagaccctcagctagtaagcag

SEQ ID NO: 23815 - DNA, 33 bp, Homo sapien
ataacttgatttataacgcagtgtaataagaat

SEQ ID NO: 23816 - DNA, 33 bp, Homo sapien
ataacttgatttataatgcagtgtaataagaat

SEQ ID NO: 23817 - DNA, 33 bp, Homo sapien
agcaagatgaaattacaacaagagcaacaatca

SEQ ID NO: 23818 - DNA, 33 bp, Homo sapien
agcaagatgaaattacgacaagagcaacaatca

SEQ ID NO: 23819 - DNA, 33 bp, Homo sapien
atgatggggctcatgacgagaaaatgtaaaaca

SEQ ID NO: 23820 - DNA, 33 bp, Homo sapien
atgatggggctcatgatgagaaaatgtaaaaca

SEQ ID NO: 23821 - DNA, 33 bp, Homo sapien
aaaaattcacatgaataagagctgctatgaatt

SEQ ID NO: 23822 - DNA, 33 bp, Homo sapien
aaaaattcacatgaatgagagctgctatgaatt

SEQ ID NO: 23823 - DNA, 33 bp, Homo sapien
cgaagagtcaaatgccaatgggcgatgactcaa

SEQ ID NO: 23824 - DNA, 33 bp, Homo sapien
cgaagagtcaaatgccgatgggcgatgactcaa

SEQ ID NO: 23825 - DNA, 33 bp, Homo sapien
ataaatgcatgagaaagtaaaagcaaggtaaaa

SEQ ID NO: 23826 - DNA, 33 bp, Homo sapien
ataaatgcatgagaaattaaaagcaaggtaaaa

SEQ ID NO: 23827 - DNA, 33 bp, Homo sapien
gcacagagaggcttaacgacttgccaggaccct

SEQ ID NO: 23828 - DNA, 33 bp, Homo sapien
gcacagagaggcttaatgacttgccaggaccct

SEQ ID NO: 23829 - DNA, 33 bp, Homo sapien
aggcttcttaccgctaagacaatgctttttttt

SEQ ID NO: 23830 - DNA, 33 bp, Homo sapien
aggcttcttaccgctaggacaatgctttttttt

SEQ ID NO: 23831 - DNA, 33 bp, Homo sapien
ctcaacaaatgaaagccaattttaatatcatct

SEQ ID NO: 23832 - DNA, 33 bp, Homo sapien
ctcaacaaatgaaagctaattttaatatcatct

SEQ ID NO: 23833 - DNA, 33 bp, Homo sapien
aaagtctatgaggtgacagattatattaacaag

SEQ ID NO: 23834 - DNA, 33 bp, Homo sapien
aaagtctatgaggtgagagattatattaacaag

SEQ ID NO: 23835 - DNA, 33 bp, Homo sapien
gggtaaagatgtaaatcagtgaggatagtactg

SEQ ID NO: 23836 - DNA, 33 bp, Homo sapien
gggtaaagatgtaaatgagtgaggatagtactg

SEQ ID NO: 23837 - DNA, 33 bp, Homo sapien
gaggatagtactgaaactggtgaggtcctgcaa

SEQ ID NO: 23838 - DNA, 33 bp, Homo sapien
gaggatagtactgaaattggtgaggtcctgcaa

SEQ ID NO: 23839 - DNA, 33 bp, Homo sapien
attaggtctaccacaaatgcactactttaccct

SEQ ID NO: 23840 - DNA, 33 bp, Homo sapien
attaggtctaccacaagtgcactactttaccct

SEQ ID NO: 23841 - DNA, 33 bp, Homo sapien
ttttcatgttacctcactagcaaacttaactcc

SEQ ID NO: 23842 - DNA, 33 bp, Homo sapien
ttttcatgttacctcattagcaaacttaactcc

SEQ ID NO: 23843 - DNA, 33 bp, Homo sapien
cattttagcacgaaggccatcacagatcataaa

SEQ ID NO: 23844 - DNA, 33 bp, Homo sapien
cattttagcacgaaggtcatcacagatcataaa

SEQ ID NO: 23845 - DNA, 33 bp, Homo sapien
ggagatttctcctcagcatctgtaaggaaccag

SEQ ID NO: 23846 - DNA, 33 bp, Homo sapien
ggagatttctcctcaggatctgtaaggaaccag

SEQ ID NO: 23847 - DNA, 33 bp, Homo sapien
tgcaaacaaagccattaaagttatctccatttt

SEQ ID NO: 23848 - DNA, 33 bp, Homo sapien
tgcaaacaaagccattgaagttatctccatttt

SEQ ID NO: 23849 - DNA, 33 bp, Homo sapien
gtcctggtgaatgtccaatattagttacagaga

SEQ ID NO: 23850 - DNA, 33 bp, Homo sapien
gtcctggtgaatgtccgatattagttacagaga

SEQ ID NO: 23851 - DNA, 33 bp, Homo sapien
accattacgttcaaagcctaggcagtcattcat

SEQ ID NO: 23852 - DNA, 33 bp, Homo sapien
accattacgttcaaagtctaggcagtcattcat

SEQ ID NO: 23853 - DNA, 33 bp, Homo sapien
aagggagtgatgatcacgataaagttttaagat

SEQ ID NO: 23854 - DNA, 33 bp, Homo sapien
aagggagtgatgatcatgataaagttttaagat

SEQ ID NO: 23855 - DNA, 33 bp, Homo sapien
aacacaatttcacctaacgctgttcttaagatc

SEQ ID NO: 23856 - DNA, 33 bp, Homo sapien
aacacaatttcacctatcgctgttcttaagatc

SEQ ID NO: 23857 - DNA, 33 bp, Homo sapien
cacaaccctacctagacgaagtaaagatgaaag

SEQ ID NO: 23858 - DNA, 33 bp, Homo sapien
cacaaccctacctagatgaagtaaagatgaaag

SEQ ID NO: 23859 - DNA, 33 bp, Homo sapien
tttattttgctccctccataatttagtctatat

SEQ ID NO: 23860 - DNA, 33 bp, Homo sapien
tttattttgctccctctataatttagtctatat

SEQ ID NO: 23861 - DNA, 33 bp, Homo sapien
aggtagccagaggtaaaacaatcaaaggcaatg

SEQ ID NO: 23862 - DNA, 33 bp, Homo sapien
aggtagccagaggtaagacaatcaaaggcaatg

SEQ ID NO: 23863 - DNA, 33 bp, Homo sapien
catttattctgctaacaggttgaattctatttt

SEQ ID NO: 23864 - DNA, 33 bp, Homo sapien
catttattctgctaacgggttgaattctatttt

SEQ ID NO: 23865 - DNA, 33 bp, Homo sapien
attctgctcctaggacaccaaactgtggggctt

SEQ ID NO: 23866 - DNA, 33 bp, Homo sapien
attctgctcctaggacgccaaactgtggggctt

SEQ ID NO: 23867 - DNA, 33 bp, Homo sapien
ttgcttttcacttccacccttacaattaaacag

SEQ ID NO: 23868 - DNA, 33 bp, Homo sapien
ttgcttttcacttccatccttacaattaaacag

SEQ ID NO: 23869 - DNA, 33 bp, Homo sapien
atgaatggatagttaccaacagctggatttctc

SEQ ID NO: 23870 - DNA, 33 bp, Homo sapien
atgaatggatagttactaacagctggatttctc

SEQ ID NO: 23871 - DNA, 33 bp, Homo sapien
agttatagagcagctacattcaaatttgtttga

SEQ ID NO: 23872 - DNA, 33 bp, Homo sapien
agttatagagcagctatattcaaatttgtttga

SEQ ID NO: 23873 - DNA, 33 bp, Homo sapien
ccaggcatctctgaataaatcatctcagctagc

SEQ ID NO: 23874 - DNA, 33 bp, Homo sapien
ccaggcatctctgaatcaatcatctcagctagc

SEQ ID NO: 23875 - DNA, 33 bp, Homo sapien
ttctataagcaggtagccactttttttttcact

SEQ ID NO: 23876 - DNA, 33 bp, Homo sapien
ttctataagcaggtaggcactttttttttcact

SEQ ID NO: 23877 - DNA, 33 bp, Homo sapien
ctcttatgctgggtagccattaagaatgccatt

SEQ ID NO: 23878 - DNA, 33 bp, Homo sapien
ctcttatgctgggtagtcattaagaatgccatt

SEQ ID NO: 23879 - DNA, 33 bp, Homo sapien
caattgggttgacttacgcacattctgatagct

SEQ ID NO: 23880 - DNA, 33 bp, Homo sapien
caattgggttgacttatgcacattctgatagct

SEQ ID NO: 23881 - DNA, 33 bp, Homo sapien
tgatgcatgtccaatacaggtcagcaactaaat

SEQ ID NO: 23882 - DNA, 33 bp, Homo sapien
tgatgcatgtccaatataggtcagcaactaaat

SEQ ID NO: 23883 - DNA, 33 bp, Homo sapien
gcaaaacaggtcataactactcacgtctaatgc

SEQ ID NO: 23884 - DNA, 33 bp, Homo sapien
gcaaaacaggtcataattactcacgtctaatgc

SEQ ID NO: 23885 - DNA, 33 bp, Homo sapien
tgactcatctggataactcataagatgcttaca

SEQ ID NO: 23886 - DNA, 33 bp, Homo sapien
tgactcatctggataattcataagatgcttaca

SEQ ID NO: 23887 - DNA, 33 bp, Homo sapien
tccctgtgataattcccatcctggacttctttg

SEQ ID NO: 23888 - DNA, 33 bp, Homo sapien
tccctgtgataattcctatcctggacttctttg

SEQ ID NO: 23889 - DNA, 33 bp, Homo sapien
aacctggcttaatgtagaaagcaacattggggt

SEQ ID NO: 23890 - DNA, 33 bp, Homo sapien
aacctggcttaatgtataaagcaacattggggt

SEQ ID NO: 23891 - DNA, 33 bp, Homo sapien
gtaaatttggagctggaatggtcactttctcca

SEQ ID NO: 23892 - DNA, 33 bp, Homo sapien
gtaaatttggagctggcatggtcactttctcca

SEQ ID NO: 23893 - DNA, 33 bp, Homo sapien
gcctgttatttcctccgcaacagcaatctcttc

SEQ ID NO: 23894 - DNA, 33 bp, Homo sapien
gcctgttatttcctcctcaacagcaatctcttc

SEQ ID NO: 23895 - DNA, 33 bp, Homo sapien
atggataggagagcaaaatagattgtagaaaag

SEQ ID NO: 23896 - DNA, 33 bp, Homo sapien
atggataggagagcaagatagattgtagaaaag

SEQ ID NO: 23897 - DNA, 33 bp, Homo sapien
ctggttttcaagacatgagtgaataaaagagtc

SEQ ID NO: 23898 - DNA, 33 bp, Homo sapien
ctggttttcaagacattagtgaataaaagagtc

SEQ ID NO: 23899 - DNA, 33 bp, Homo sapien
agagtcatttctggggacatgaaacaaatgaca

SEQ ID NO: 23900 - DNA, 33 bp, Homo sapien
agagtcatttctggggccatgaaacaaatgaca

SEQ ID NO: 23901 - DNA, 33 bp, Homo sapien
aagttaacatttttcacacaaaattggccattt

SEQ ID NO: 23902 - DNA, 33 bp, Homo sapien
aagttaacatttttcagacaaaattggccattt

SEQ ID NO: 23903 - DNA, 33 bp, Homo sapien
ggtcaggatttccctaagccagagaaaacaaac

SEQ ID NO: 23904 - DNA, 33 bp, Homo sapien
ggtcaggatttccctatgccagagaaaacaaac

SEQ ID NO: 23905 - DNA, 33 bp, Homo sapien
atgcccatcaatgatcaatgttagactggataa

SEQ ID NO: 23906 - DNA, 33 bp, Homo sapien
atgcccatcaatgatcgatgttagactggataa

SEQ ID NO: 23907 - DNA, 33 bp, Homo sapien
actccatcattttgacccatctttttttattat

SEQ ID NO: 23908 - DNA, 33 bp, Homo sapien
actccatcattttgactcatctttttttattat

SEQ ID NO: 23909 - DNA, 33 bp, Homo sapien
gctttgagactgttctaaaactaggcttgtggt

SEQ ID NO: 23910 - DNA, 33 bp, Homo sapien
gctttgagactgttctgaaactaggcttgtggt

SEQ ID NO: 23911 - DNA, 33 bp, Homo sapien
ctaactctttcaacaaattgtcaatcagaaaat

SEQ ID NO: 23912 - DNA, 33 bp, Homo sapien
ctaactctttcaacaacttgtcaatcagaaaat

SEQ ID NO: 23913 - DNA, 33 bp, Homo sapien
tgagtattcttgtcctcactttacagataagaa

SEQ ID NO: 23914 - DNA, 33 bp, Homo sapien
tgagtattcttgtcctgactttacagataagaa

SEQ ID NO: 23915 - DNA, 33 bp, Homo sapien
tcactggctgtcagagaattgagaggagcaccg

SEQ ID NO: 23916 - DNA, 33 bp, Homo sapien
tcactggctgtcagagcattgagaggagcaccg

SEQ ID NO: 23917 - DNA, 33 bp, Homo sapien
aatcacctaagaataccgggtatgacaaacttt

SEQ ID NO: 23918 - DNA, 33 bp, Homo sapien
aatcacctaagaatactgggtatgacaaacttt

SEQ ID NO: 23919 - DNA, 33 bp, Homo sapien
ctgtgacatatttggcgccctcaccttcaatca

SEQ ID NO: 23920 - DNA, 33 bp, Homo sapien
ctgtgacatatttggctccctcaccttcaatca

SEQ ID NO: 23921 - DNA, 33 bp, Homo sapien
caaatcactcataagcagatgaggtttccgtga

SEQ ID NO: 23922 - DNA, 33 bp, Homo sapien
caaatcactcataagcggatgaggtttccgtga

SEQ ID NO: 23923 - DNA, 33 bp, Homo sapien
acaaataatgaaaagaaatgcactgggtgtcct

SEQ ID NO: 23924 - DNA, 33 bp, Homo sapien
acaaataatgaaaagagatgcactgggtgtcct

SEQ ID NO: 23925 - DNA, 33 bp, Homo sapien
ttcttgttatagagaaaactgttcaagctaccc

SEQ ID NO: 23926 - DNA, 33 bp, Homo sapien
ttcttgttatagagaagactgttcaagctaccc

SEQ ID NO: 23927 - DNA, 33 bp, Homo sapien
agttccttaaaaacaaatatgaagtctgcccac

SEQ ID NO: 23928 - DNA, 33 bp, Homo sapien
agttccttaaaaacaagtatgaagtctgcccac

SEQ ID NO: 23929 - DNA, 33 bp, Homo sapien
atccaggagtctcgaaactttctactctggagg

SEQ ID NO: 23930 - DNA, 33 bp, Homo sapien
atccaggagtctcgaacctttctactctggagg

SEQ ID NO: 23931 - DNA, 33 bp, Homo sapien; identical to SEQ ID NO: 23929

SEQ ID NO: 23932 - DNA, 33 bp, Homo sapien; identical to SEQ ID NO: 23930

SEQ ID NO: 23933 - DNA, 33 bp, Homo sapien
aaatttttatatggtcaagtctaccaaaccttg

SEQ ID NO: 23934 - DNA, 33 bp, Homo sapien
aaatttttatatggtcgagtctaccaaaccttg

SEQ ID NO: 23935 - DNA, 33 bp, Homo sapien
aaatttaaactcctaaacatgacaactatttcc

SEQ ID NO: 23936 - DNA, 33 bp, Homo sapien
aaatttaaactcctaagcatgacaactatttcc

SEQ ID NO: 23937 - DNA, 33 bp, Homo sapien
tacatacatttcacccaaagtttgcaaacacaa

SEQ ID NO: 23938 - DNA, 33 bp, Homo sapien
tacatacatttcacccgaagtttgcaaacacaa

SEQ ID NO: 23939 - DNA, 33 bp, Homo sapien
tcaatttctttctaccacaatagaattttgcag

SEQ ID NO: 23940 - DNA, 33 bp, Homo sapien
tcaatttctttctacctcaatagaattttgcag

SEQ ID NO: 23941 - DNA, 33 bp, Homo sapien
acaatcaaacttgttaactctgtgcttaaaata

SEQ ID NO: 23942 - DNA, 33 bp, Homo sapien
acaatcaaacttgttagctctgtgcttaaaata

SEQ ID NO: 23943 - DNA, 33 bp, Homo sapien
gtgaacagcaaactagaagagagattcaaggat

SEQ ID NO: 23944 - DNA, 33 bp, Homo sapien
gtgaacagcaaactaggagagagattcaaggat

SEQ ID NO: 23945 - DNA, 33 bp, Homo sapien
tgctttagacggaattaaacatttgcaccagag

SEQ ID NO: 23946 - DNA, 33 bp, Homo sapien
tgctttagacggaattcaacatttgcaccagag

SEQ ID NO: 23947 - DNA, 33 bp, Homo sapien
aactgtctgaaaatggaaagcgctccattggga

SEQ ID NO: 23948 - DNA, 33 bp, Homo sapien
aactgtctgaaaatgggaagcgctccattggga

SEQ ID NO: 23949 - DNA, 33 bp, Homo sapien
gctctagctaatgtaaaaactgtctgaaaatgg

SEQ ID NO: 23950 - DNA, 33 bp, Homo sapien
gctctagctaatgtaagaactgtctgaaaatgg

SEQ ID NO: 23951 - DNA, 33 bp, Homo sapien
aacaaaataagacatacgagagatacaaaatta

SEQ ID NO: 23952 - DNA, 33 bp, Homo sapien
aacaaaataagacatatgagagatacaaaatta

SEQ ID NO: 23953 - DNA, 33 bp, Homo sapien
atttctatgacaactcaaaatgactctaatagc

SEQ ID NO: 23954 - DNA, 33 bp, Homo sapien
atttctatgacaactccaaatgactctaatagc

SEQ ID NO: 23955 - DNA, 33 bp, Homo sapien
gtatgttggacaagaacgacttgtgatcatctt

SEQ ID NO: 23956 - DNA, 33 bp, Homo sapien
gtatgttggacaagaatgacttgtgatcatctt

SEQ ID NO: 23957 - DNA, 33 bp, Homo sapien
atattcactttctacaagacactgatatttcga

SEQ ID NO: 23958 - DNA, 33 bp, Homo sapien
atattcactttctacacgacactgatatttcga

SEQ ID NO: 23959 - DNA, 33 bp, Homo sapien
gcccatgaacaggcaaaacaaatttgaagaaac

SEQ ID NO: 23960 - DNA, 33 bp, Homo sapien
gcccatgaacaggcaagacaaatttgaagaaac

SEQ ID NO: 23961 - DNA, 33 bp, Homo sapien
tctaacttcttaaggtaaatgcatggctcatgt

SEQ ID NO: 23962 - DNA, 33 bp, Homo sapien
tctaacttcttaaggtgaatgcatggctcatgt

SEQ ID NO: 23963 - DNA, 33 bp, Homo sapien
atagagtttaaagagcaaatcaatatcagatta

SEQ ID NO: 23964 - DNA, 33 bp, Homo sapien
atagagtttaaagagcgaatcaatatcagatta

SEQ ID NO: 23965 - DNA, 33 bp, Homo sapien
ttttatagtagagaccaacttatactgtaataa

SEQ ID NO: 23966 - DNA, 33 bp, Homo sapien
ttttatagtagagacccacttatactgtaataa

SEQ ID NO: 23967 - DNA, 33 bp, Homo sapien
tgttatgttaaaatgcaacccagtatacctagt

SEQ ID NO: 23968 - DNA, 33 bp, Homo sapien
tgttatgttaaaatgcgacccagtatacctagt

SEQ ID NO: 23969 - DNA, 33 bp, Homo sapien
atgccaacatctattacgttttgatttttttat

SEQ ID NO: 23970 - DNA, 33 bp, Homo sapien
atgccaacatctattatgttttgatttttttat

SEQ ID NO: 23971 - DNA, 33 bp, Homo sapien
atggttccaagttgccaacaacaaatgtcgcac

SEQ ID NO: 23972 - DNA, 33 bp, Homo sapien
atggttccaagttgcccacaacaaatgtcgcac

SEQ ID NO: 23973 - DNA, 33 bp, Homo sapien
ggtacttgactccagaagactacagtgataatt

SEQ ID NO: 23974 - DNA, 33 bp, Homo sapien
ggtacttgactccagatgactacagtgataatt

SEQ ID NO: 23975 - DNA, 33 bp, Homo sapien
ttcacaaccagagaaactgaaactacagatgaa

SEQ ID NO: 23976 - DNA, 33 bp, Homo sapien
ttcacaaccagagaaattgaaactacagatgaa

SEQ ID NO: 23977 - DNA, 33 bp, Homo sapien
ttccttctttaagaaaatgttgtgcccctagtt

SEQ ID NO: 23978 - DNA, 33 bp, Homo sapien
ttccttctttaagaaattgttgtgcccctagtt

SEQ ID NO: 23979 - DNA, 33 bp, Homo sapien
gaacagtatccagtccaactcatttcaaaatct

SEQ ID NO: 23980 - DNA, 33 bp, Homo sapien
gaacagtatccagtcccactcatttcaaaatct

SEQ ID NO: 23981 - DNA, 33 bp, Homo sapien
ttgccatagctaccaagaacttcagtgccttga

SEQ ID NO: 23982 - DNA, 33 bp, Homo sapien
ttgccatagctaccaataacttcagtgccttga

SEQ ID NO: 23983 - DNA, 33 bp, Homo sapien
gattaggagataatcaatctttgacaatgaact

SEQ ID NO: 23984 - DNA, 33 bp, Homo sapien
gattaggagataatcagtctttgacaatgaact

SEQ ID NO: 23985 - DNA, 33 bp, Homo sapien
acccataatatgattggatccagagagaaacca

SEQ ID NO: 23986 - DNA, 33 bp, Homo sapien
acccataatatgattgtatccagagagaaacca

SEQ ID NO: 23987 - DNA, 33 bp, Homo sapien
gtcagttatttacccaatcttttccatatacca

SEQ ID NO: 23988 - DNA, 33 bp, Homo sapien
gtcagttatttacccagtcttttccatatacca

SEQ ID NO: 23989 - DNA, 33 bp, Homo sapien
attgatttttggttaaactcctatttgcctttc

SEQ ID NO: 23990 - DNA, 33 bp, Homo sapien
attgatttttggttaagctcctatttgcctttc

SEQ ID NO: 23991 - DNA, 33 bp, Homo sapien
acttccacaaaattaggatcactgaggaggtag

SEQ ID NO: 23992 - DNA, 33 bp, Homo sapien
acttccacaaaattagtatcactgaggaggtag

SEQ ID NO: 23993 - DNA, 33 bp, Homo sapien
agagactggggaagtgcatttagacttgggaag

SEQ ID NO: 23994 - DNA, 33 bp, Homo sapien
agagactggggaagtgtatttagacttgggaag

SEQ ID NO: 23995 - DNA, 33 bp, Homo sapien
tgtcatctcaaacatacatcctgggctactgag

SEQ ID NO: 23996 - DNA, 33 bp, Homo sapien
tgtcatctcaaacatatatcctgggctactgag

SEQ ID NO: 23997 - DNA, 33 bp, Homo sapien
agttcatttgaaaataagtacttgagcttgaat

SEQ ID NO: 23998 - DNA, 33 bp, Homo sapien
agttcatttgaaaatatgtacttgagcttgaat

SEQ ID NO: 23999 - DNA, 33 bp, Homo sapien
caggactagtggtttaagatttttgaaagcttg

SEQ ID NO: 24000 - DNA, 33 bp, Homo sapien
caggactagtggtttaggatttttgaaagcttg

SEQ ID NO: 24001 - DNA, 33 bp, Homo sapien
aagtaacacccaatagaacaatggaaactgttc

SEQ ID NO: 24002 - DNA, 33 bp, Homo sapien
aagtaacacccaataggacaatggaaactgttc

SEQ ID NO: 24003 - DNA, 33 bp, Homo sapien
tctggtaacaatggccggaaatggtctctaagc

SEQ ID NO: 24004 - DNA, 33 bp, Homo sapien
tctggtaacaatggcctgaaatggtctctaagc

SEQ ID NO: 24005 - DNA, 33 bp, Homo sapien
aggaggaattaggaatgaatccaagcagtgact

SEQ ID NO: 24006 - DNA, 33 bp, Homo sapien
aggaggaattaggaattaatccaagcagtgact

SEQ ID NO: 24007 - DNA, 33 bp, Homo sapien
ggaagcgttttccttaaagtggttgaagtcgtt

SEQ ID NO: 24008 - DNA, 33 bp, Homo sapien
ggaagcgttttccttatagtggttgaagtcgtt

SEQ ID NO: 24009 - DNA, 33 bp, Homo sapien
gttggggagatgggaaatgcaagagttaagaga

SEQ ID NO: 24010 - DNA, 33 bp, Homo sapien
gttggggagatgggaagtgcaagagttaagaga

SEQ ID NO: 24011 - DNA, 33 bp, Homo sapien
cagttcaaccgtgacccaaacatggagctgtcg

SEQ ID NO: 24012 - DNA, 33 bp, Homo sapien
cagttcaaccgtgacctaaacatggagctgtcg

SEQ ID NO: 24013 - DNA, 33 bp, Homo sapien
aatctaacacagctccaagaattttcttctggt

SEQ ID NO: 24014 - DNA, 33 bp, Homo sapien
aatctaacacagctccgagaattttcttctggt

SEQ ID NO: 24015 - DNA, 33 bp, Homo sapien
gaaaaggaggaataatgatcagatttcatgtgg

SEQ ID NO: 24016 - DNA, 33 bp, Homo sapien
gaaaaggaggaataattatcagatttcatgtgg

SEQ ID NO: 24017 - DNA, 33 bp, Homo sapien
caaggggaaagaaaaaattgaattgctctacaa

SEQ ID NO: 24018 - DNA, 33 bp, Homo sapien
caaggggaaagaaaaagttgaattgctctacaa

SEQ ID NO: 24019 - DNA, 33 bp, Homo sapien
gcatgtggtatttataagaaattgaagaaaaaa

SEQ ID NO: 24020 - DNA, 33 bp, Homo sapien
gcatgtggtatttatatgaaattgaagaaaaaa

SEQ ID NO: 24021 - DNA, 33 bp, Homo sapien
gatagtagctttctaacagttaaggaagagaca

SEQ ID NO: 24022 - DNA, 33 bp, Homo sapien
gatagtagctttctaagagttaaggaagagaca

SEQ ID NO: 24023 - DNA, 33 bp, Homo sapien
tttaatttggtttaagaaagggcttctgacctg

SEQ ID NO: 24024 - DNA, 33 bp, Homo sapien
tttaatttggtttaaggaagggcttctgacctg

SEQ ID NO: 24025 - DNA, 33 bp, Homo sapien
agaagcaatttggaaacgactaaactagttcag

SEQ ID NO: 24026 - DNA, 33 bp, Homo sapien
agaagcaatttggaaatgactaaactagttcag

SEQ ID NO: 24027 - DNA, 33 bp, Homo sapien
tgaaaatcaggccatcaaaaataagagcccata

SEQ ID NO: 24028 - DNA, 33 bp, Homo sapien
tgaaaatcaggccatcgaaaataagagcccata

SEQ ID NO: 24029 - DNA, 33 bp, Homo sapien
ctcttgctcattattcacatcgatctttaaaag

SEQ ID NO: 24030 - DNA, 33 bp, Homo sapien
ctcttgctcattattctcatcgatctttaaaag

SEQ ID NO: 24031 - DNA, 33 bp, Homo sapien
ttcttttcttgatggaaaaaataaaaggttttg

SEQ ID NO: 24032 - DNA, 33 bp, Homo sapien
ttcttttcttgatggataaaataaaaggttttg

SEQ ID NO: 24033 - DNA, 33 bp, Homo sapien
tgagatttataggatacgagaaaaacaatgcaa

SEQ ID NO: 24034 - DNA, 33 bp, Homo sapien
tgagatttataggataggagaaaaacaatgcaa

SEQ ID NO: 24035 - DNA, 33 bp, Homo sapien
tggcttcacactagcacatttgtttcctcattc

SEQ ID NO: 24036 - DNA, 33 bp, Homo sapien
tggcttcacactagcatatttgtttcctcattc

SEQ ID NO: 24037 - DNA, 33 bp, Homo sapien
tcatggagataacagcaaatggtcttccaggaa

SEQ ID NO: 24038 - DNA, 33 bp, Homo sapien
tcatggagataacagcgaatggtcttccaggaa

SEQ ID NO: 24039 - DNA, 33 bp, Homo sapien
aatttacttggccttacgtttagatccaacttg

SEQ ID NO: 24040 - DNA, 33 bp, Homo sapien
aatttacttggccttatgtttagatccaacttg

SEQ ID NO: 24041 - DNA, 33 bp, Homo sapien
atttctattcctccatcaaggcctttcttggtc

SEQ ID NO: 24042 - DNA, 33 bp, Homo sapien
atttctattcctccatgaaggcctttcttggtc

SEQ ID NO: 24043 - DNA, 33 bp, Homo sapien
cattctctgcttttaacctaatctaaccctgat

SEQ ID NO: 24044 - DNA, 33 bp, Homo sapien
cattctctgcttttaatctaatctaaccctgat

SEQ ID NO: 24045 - DNA, 33 bp, Homo sapien
tttgcttcactacaaaaaaataccatgtacttt

SEQ ID NO: 24046 - DNA, 33 bp, Homo sapien
tttgcttcactacaaacaaataccatgtacttt

SEQ ID NO: 24047 - DNA, 33 bp, Homo sapien
accccctaattctctcgacttgctgttgtagat

SEQ ID NO: 24048 - DNA, 33 bp, Homo sapien
accccctaattctctctacttgctgttgtagat

SEQ ID NO: 24049 - DNA, 33 bp, Homo sapien
taaacagcaacaataacaagacttggctactcc

SEQ ID NO: 24050 - DNA, 33 bp, Homo sapien
taaacagcaacaataataagacttggctactcc

SEQ ID NO: 24051 - DNA, 33 bp, Homo sapien
acctgtgatctacaaaactctaagtgcagttaa

SEQ ID NO: 24052 - DNA, 33 bp, Homo sapien
acctgtgatctacaaagctctaagtgcagttaa

SEQ ID NO: 24053 - DNA, 33 bp, Homo sapien
gaatgaaaataggacaccgtgaaagttaactgc

SEQ ID NO: 24054 - DNA, 33 bp, Homo sapien
gaatgaaaataggacatcgtgaaagttaactgc

SEQ ID NO: 24055 - DNA, 33 bp, Homo sapien
ttgaggcaggattagactaagacctcaagtgac

SEQ ID NO: 24056 - DNA, 33 bp, Homo sapien
ttgaggcaggattagagtaagacctcaagtgac

SEQ ID NO: 24057 - DNA, 33 bp, Homo sapien
tccttatgtgactgaaggacatcattttgattt

SEQ ID NO: 24058 - DNA, 33 bp, Homo sapien
tccttatgtgactgaatgacatcattttgattt

SEQ ID NO: 24059 - DNA, 33 bp, Homo sapien
actggataatcctactcactttggagataaaaa

SEQ ID NO: 24060 - DNA, 33 bp, Homo sapien
actggataatcctacttactttggagataaaaa

SEQ ID NO: 24061 - DNA, 33 bp, Homo sapien
taccattttgagattcaccttttcaacacaaca

SEQ ID NO: 24062 - DNA, 33 bp, Homo sapien
taccattttgagattcgccttttcaacacaaca

SEQ ID NO: 24063 - DNA, 33 bp, Homo sapien
cacaagatggaacccccgagtcagcatttaggt

SEQ ID NO: 24064 - DNA, 33 bp, Homo sapien
cacaagatggaacccctgagtcagcatttaggt

SEQ ID NO: 24065 - DNA, 33 bp, Homo sapien
gtactctagaaagtcccatactctgagaaggag

SEQ ID NO: 24066 - DNA, 33 bp, Homo sapien
gtactctagaaagtccgatactctgagaaggag

SEQ ID NO: 24067 - DNA, 33 bp, Homo sapien
tggtactactttttcaataatgttgtattttaa

SEQ ID NO: 24068 - DNA, 33 bp, Homo sapien
tggtactactttttcagtaatgttgtattttaa

SEQ ID NO: 24069 - DNA, 33 bp, Homo sapien
gcatttattcagactgaacaaaaatcctcagtc

SEQ ID NO: 24070 - DNA, 33 bp, Homo sapien
gcatttattcagactgcacaaaaatcctcagtc

SEQ ID NO: 24071 - DNA, 33 bp, Homo sapien
aagaaaattcattaccaaagttgtgtgattatg

SEQ ID NO: 24072 - DNA, 33 bp, Homo sapien
aagaaaattcattaccgaagttgtgtgattatg

SEQ ID NO: 24073 - DNA, 33 bp, Homo sapien
ctgtgggtgataaaaccccaagtcctggttcct

SEQ ID NO: 24074 - DNA, 33 bp, Homo sapien
ctgtgggtgataaaactccaagtcctggttcct

SEQ ID NO: 24075 - DNA, 33 bp, Homo sapien
ctcttcatatgctttacaggtgaagcctactta

SEQ ID NO: 24076 - DNA, 33 bp, Homo sapien
ctcttcatatgctttagaggtgaagcctactta

SEQ ID NO: 24077 - DNA, 33 bp, Homo sapien
aagaaaactgagtagaccagacagaacagacca

SEQ ID NO: 24078 - DNA, 33 bp, Homo sapien
aagaaaactgagtagatcagacagaacagacca

SEQ ID NO: 24079 - DNA, 33 bp, Homo sapien
ctgcttaaaattcttcccaattatattcaactg

SEQ ID NO: 24080 - DNA, 33 bp, Homo sapien
ctgcttaaaattcttctcaattatattcaactg

SEQ ID NO: 24081 - DNA, 33 bp, Homo sapien
ttaaagaagatggtcacgaaataggtttgctac

SEQ ID NO: 24082 - DNA, 33 bp, Homo sapien
ttaaagaagatggtcatgaaataggtttgctac

SEQ ID NO: 24083 - DNA, 33 bp, Homo sapien
agatattctgaagtcacgaggagcctggactct

SEQ ID NO: 24084 - DNA, 33 bp, Homo sapien
agatattctgaagtcatgaggagcctggactct

SEQ ID NO: 24085 - DNA, 33 bp, Homo sapien
cacctgatgccaggtcacacaggtgataaatag

SEQ ID NO: 24086 - DNA, 33 bp, Homo sapien
cacctgatgccaggtcgcacaggtgataaatag

SEQ ID NO: 24087 - DNA, 33 bp, Homo sapien
ttcctgaaacatcacaactactcagtacattat

SEQ ID NO: 24088 - DNA, 33 bp, Homo sapien
ttcctgaaacatcacagctactcagtacattat

SEQ ID NO: 24089 - DNA, 33 bp, Homo sapien
ggttctcagtaaacaacagctgcctttccctca

SEQ ID NO: 24090 - DNA, 33 bp, Homo sapien
ggttctcagtaaacaagagctgcctttccctca

SEQ ID NO: 24091 - DNA, 33 bp, Homo sapien
agaagaggagctttaacaagaggaggtaagttg

SEQ ID NO: 24092 - DNA, 33 bp, Homo sapien
agaagaggagctttaagaagaggaggtaagttg

SEQ ID NO: 24093 - DNA, 33 bp, Homo sapien
ttttgccctaacaaaccgccttcacaggcttcc

SEQ ID NO: 24094 - DNA, 33 bp, Homo sapien
ttttgccctaacaaactgccttcacaggcttcc

SEQ ID NO: 24095 - DNA, 33 bp, Homo sapien
agcctgagagtttgccaaagttaggttttatta

SEQ ID NO: 24096 - DNA, 33 bp, Homo sapien
agcctgagagtttgcctaagttaggttttatta

SEQ ID NO: 24097 - DNA, 33 bp, Homo sapien
ctcataggtcaagttacaggaagtaaagcactt

SEQ ID NO: 24098 - DNA, 33 bp, Homo sapien
ctcataggtcaagttataggaagtaaagcactt

SEQ ID NO: 24099 - DNA, 33 bp, Homo sapien
gtggaacaaagggaaaaacaatgacagattcag

SEQ ID NO: 24100 - DNA, 33 bp, Homo sapien
gtggaacaaagggaaagacaatgacagattcag

SEQ ID NO: 24101 - DNA, 33 bp, Homo sapien
tcaaggatgtttgaaacgatggattgctggttc

SEQ ID NO: 24102 - DNA, 33 bp, Homo sapien
tcaaggatgtttgaaaggatggattgctggttc

SEQ ID NO: 24103 - DNA, 33 bp, Homo sapien
tgtgcagcttcttctccagccatgtcatccttg

SEQ ID NO: 24104 - DNA, 33 bp, Homo sapien
tgtgcagcttcttctctagccatgtcatccttg

SEQ ID NO: 24105 - DNA, 33 bp, Homo sapien
agttcagtgtgcaagacgttttttaaggagtga

SEQ ID NO: 24106 - DNA, 33 bp, Homo sapien
agttcagtgtgcaagatgttttttaaggagtga

SEQ ID NO: 24107 - DNA, 33 bp, Homo sapien
ttgttcgttgtgtaaaacagctcaacttctccc

SEQ ID NO: 24108 - DNA, 33 bp, Homo sapien
ttgttcgttgtgtaaagcagctcaacttctccc

SEQ ID NO: 24109 - DNA, 33 bp, Homo sapien
cttaggtaaggtacttaaacctcagtgagagtc

SEQ ID NO: 24110 - DNA, 33 bp, Homo sapien
cttaggtaaggtacttgaacctcagtgagagtc

SEQ ID NO: 24111 - DNA, 33 bp, Homo sapien
gagatagagacagatgaaacacgaacagttctg

SEQ ID NO: 24112 - DNA, 33 bp, Homo sapien
gagatagagacagatgcaacacgaacagttctg

SEQ ID NO: 24113 - DNA, 33 bp, Homo sapien
aaaaccaatcaggaaactgaagtgaagacaggc

SEQ ID NO: 24114 - DNA, 33 bp, Homo sapien
aaaaccaatcaggaaagtgaagtgaagacaggc

SEQ ID NO: 24115 - DNA, 33 bp, Homo sapien
caatattgtgagtacacagccttattcaatgaa

SEQ ID NO: 24116 - DNA, 33 bp, Homo sapien
caatattgtgagtacatagccttattcaatgaa

SEQ ID NO: 24117 - DNA, 33 bp, Homo sapien
tttgtaacctatttgaagcccatctttatttca

SEQ ID NO: 24118 - DNA, 33 bp, Homo sapien
tttgtaacctatttgaggcccatctttatttca

SEQ ID NO: 24119 - DNA, 33 bp, Homo sapien
agtattttagaagacgacaaatgcaattttaaa

SEQ ID NO: 24120 - DNA, 33 bp, Homo sapien
agtattttagaagacggcaaatgcaattttaaa

SEQ ID NO: 24121 - DNA, 33 bp, Homo sapien
ccactgctactaaaaactaacatccaggaggta

SEQ ID NO: 24122 - DNA, 33 bp, Homo sapien
ccactgctactaaaaattaacatccaggaggta

SEQ ID NO: 24123 - DNA, 33 bp, Homo sapien
ttccaaaaataaaataagcagctacaattacga

SEQ ID NO: 24124 - DNA, 33 bp, Homo sapien
ttccaaaaataaaataggcagctacaattacga

SEQ ID NO: 24125 - DNA, 33 bp, Homo sapien
cactcgtgtttatatcagaaagctcctaaagag

SEQ ID NO: 24126 - DNA, 33 bp, Homo sapien
cactcgtgtttatatcggaaagctcctaaagag

SEQ ID NO: 24127 - DNA, 33 bp, Homo sapien
ccagcctgtcctagacaacataatgaattacag

SEQ ID NO: 24128 - DNA, 33 bp, Homo sapien
ccagcctgtcctagacgacataatgaattacag

SEQ ID NO: 24129 - DNA, 33 bp, Homo sapien
atttaaagcctcctataaatatgcttcaaaact

SEQ ID NO: 24130 - DNA, 33 bp, Homo sapien
atttaaagcctcctatgaatatgcttcaaaact

SEQ ID NO: 24131 - DNA, 33 bp, Homo sapien
tgcatagtgaaattagacaactcttaaaaagtc

SEQ ID NO: 24132 - DNA, 33 bp, Homo sapien
tgcatagtgaaattaggcaactcttaaaaagtc

SEQ ID NO: 24133 - DNA, 33 bp, Homo sapien
aaattgttgataatgacgtttttcctatcctgt

SEQ ID NO: 24134 - DNA, 33 bp, Homo sapien
aaattgttgataatgatgtttttcctatcctgt

SEQ ID NO: 24135 - DNA, 33 bp, Homo sapien
caggtagtgagaagcactgctaatctttaaaac

SEQ ID NO: 24136 - DNA, 33 bp, Homo sapien
caggtagtgagaagcattgctaatctttaaaac

SEQ ID NO: 24137 - DNA, 33 bp, Homo sapien
ttgttggcttgcaccacgtttgagggccaggga

SEQ ID NO: 24138 - DNA, 33 bp, Homo sapien
ttgttggcttgcaccatgtttgagggccaggga

SEQ ID NO: 24139 - DNA, 33 bp, Homo sapien
catgtcaatcgttgccaaccttttttaactcac

SEQ ID NO: 24140 - DNA, 33 bp, Homo sapien
catgtcaatcgttgccgaccttttttaactcac

SEQ ID NO: 24141 - DNA, 33 bp, Homo sapien
tttttttaagagaagactagccaaagactaaaa

SEQ ID NO: 24142 - DNA, 33 bp, Homo sapien
tttttttaagagaagattagccaaagactaaaa

SEQ ID NO: 24143 - DNA, 33 bp, Homo sapien
ttgctcaagtctcacaatgccgatgtttatatc

SEQ ID NO: 24144 - DNA, 33 bp, Homo sapien
ttgctcaagtctcacagtgccgatgtttatatc

SEQ ID NO: 24145 - DNA, 33 bp, Homo sapien
tcagagaggaaagtaaaagtaaactgtcactca

SEQ ID NO: 24146 - DNA, 33 bp, Homo sapien
tcagagaggaaagtaagagtaaactgtcactca

SEQ ID NO: 24147 - DNA, 33 bp, Homo sapien
agtggcacgagttccacgatgaacagtaaatat

SEQ ID NO: 24148 - DNA, 33 bp, Homo sapien
agtggcacgagttccatgatgaacagtaaatat

SEQ ID NO: 24149 - DNA, 33 bp, Homo sapien
tagtaatcttgttttccctttgatacataggta

SEQ ID NO: 24150 - DNA, 33 bp, Homo sapien
tagtaatcttgttttctctttgatacataggta

SEQ ID NO: 24151 - DNA, 33 bp, Homo sapien
gcctaaggtgattccaagggaggggatggaaga

SEQ ID NO: 24152 - DNA, 33 bp, Homo sapien
gcctaaggtgattccaggggaggggatggaaga

SEQ ID NO: 24153 - DNA, 33 bp, Homo sapien
agttaaaatatgctgacgcccctgcatggccag

SEQ ID NO: 24154 - DNA, 33 bp, Homo sapien
agttaaaatatgctgatgcccctgcatggccag

SEQ ID NO: 24155 - DNA, 33 bp, Homo sapien
cctaaaggaatgggaacgtgttggtggtcgctt

SEQ ID NO: 24156 - DNA, 33 bp, Homo sapien
cctaaaggaatgggaatgtgttggtggtcgctt

SEQ ID NO: 24157 - DNA, 33 bp, Homo sapien
tgccattagcgtgcagaaaaaagggaaggctgg

SEQ ID NO: 24158 - DNA, 33 bp, Homo sapien
tgccattagcgtgcaggaaaaagggaaggctgg

SEQ ID NO: 24159 - DNA, 33 bp, Homo sapien
tttcaggagacgcagaacaaacttactaataaa

SEQ ID NO: 24160 - DNA, 33 bp, Homo sapien
tttcaggagacgcagatcaaacttactaataaa

SEQ ID NO: 24161 - DNA, 33 bp, Homo sapien
atttctaatgaagacaatcttgtaaaactgctt

SEQ ID NO: 24162 - DNA, 33 bp, Homo sapien
atttctaatgaagacagtcttgtaaaactgctt

SEQ ID NO: 24163 - DNA, 33 bp, Homo sapien
tatgtcctctctagaaacctattccttccattt

SEQ ID NO: 24164 - DNA, 33 bp, Homo sapien
tatgtcctctctagaagcctattccttccattt

SEQ ID NO: 24165 - DNA, 33 bp, Homo sapien
atttgctatgaaactagcagctcaaatagcagg

SEQ ID NO: 24166 - DNA, 33 bp, Homo sapien
atttgctatgaaactatcagctcaaatagcagg

SEQ ID NO: 24167 - DNA, 33 bp, Homo sapien
taccctgtgttaaagacgtttgcccctacatcc

SEQ ID NO: 24168 - DNA, 33 bp, Homo sapien
taccctgtgttaaagatgtttgcccctacatcc

SEQ ID NO: 24169 - DNA, 33 bp, Homo sapien
tgattgtatgttcctgaactgagcagaatttga

SEQ ID NO: 24170 - DNA, 33 bp, Homo sapien
tgattgtatgttcctggactgagcagaatttga

SEQ ID NO: 24171 - DNA, 33 bp, Homo sapien
tttctgagtatgtaaacaggattagagttattt

SEQ ID NO: 24172 - DNA, 33 bp, Homo sapien
tttctgagtatgtaaataggattagagttattt

SEQ ID NO: 24173 - DNA, 33 bp, Homo sapien
ttttttgtcggaggtcaacagactaatggcagc

SEQ ID NO: 24174 - DNA, 33 bp, Homo sapien
ttttttgtcggaggtccacagactaatggcagc

SEQ ID NO: 24175 - DNA, 33 bp, Homo sapien
gtatcattatctctagcccaaagtaactctgct

SEQ ID NO: 24176 - DNA, 33 bp, Homo sapien
gtatcattatctctaggccaaagtaactctgct

SEQ ID NO: 24177 - DNA, 33 bp, Homo sapien
gtgtggaactgagcagacacattttaagaaacc

SEQ ID NO: 24178 - DNA, 33 bp, Homo sapien
gtgtggaactgagcaggcacattttaagaaacc

SEQ ID NO: 24179 - DNA, 33 bp, Homo sapien
gcccttttgaaaaataagagtagtcaggagtga

SEQ ID NO: 24180 - DNA, 33 bp, Homo sapien
gcccttttgaaaaatacgagtagtcaggagtga

SEQ ID NO: 24181 - DNA, 33 bp, Homo sapien
gctgtctttatcgccaatatatctcctgtctag

SEQ ID NO: 24182 - DNA, 33 bp, Homo sapien
gctgtctttatcgccagtatatctcctgtctag

SEQ ID NO: 24183 - DNA, 33 bp, Homo sapien
cacctgttctctggtgcacttggtattatattt

SEQ ID NO: 24184 - DNA, 33 bp, Homo sapien
cacctgttctctggtgtacttggtattatattt

SEQ ID NO: 24185 - DNA, 33 bp, Homo sapien
ctccaatgtctccacacctgactcttgtagtac

SEQ ID NO: 24186 - DNA, 33 bp, Homo sapien
ctccaatgtctccacagctgactcttgtagtac

SEQ ID NO: 24187 - DNA, 33 bp, Homo sapien
tggtcaaaattgtaaaatcagtcatataagtta

SEQ ID NO: 24188 - DNA, 33 bp, Homo sapien
tggtcaaaattgtaaactcagtcatataagtta

SEQ ID NO: 24189 - DNA, 33 bp, Homo sapien
tagaattgcccttatcacaaattattattgata

SEQ ID NO: 24190 - DNA, 33 bp, Homo sapien
tagaattgcccttatctcaaattattattgata

SEQ ID NO: 24191 - DNA, 33 bp, Homo sapien
attgaacaatacagtaaaatatgcagatacata

SEQ ID NO: 24192 - DNA, 33 bp, Homo sapien
attgaacaatacagtagaatatgcagatacata

SEQ ID NO: 24193 - DNA, 33 bp, Homo sapien
agactgtagacatggaaaccaagactgtagggc

SEQ ID NO: 24194 - DNA, 33 bp, Homo sapien
agactgtagacatggagaccaagactgtagggc

SEQ ID NO: 24195 - DNA, 33 bp, Homo sapien
ctgtatccatataaagaagctgacttaattgat

SEQ ID NO: 24196 - DNA, 33 bp, Homo sapien
ctgtatccatataaagcagctgacttaattgat

SEQ ID NO: 24197 - DNA, 33 bp, Homo sapien
ctggccctgtcttgttcaaatctgattcaaacc

SEQ ID NO: 24198 - DNA, 33 bp, Homo sapien
ctggccctgtcttgttgaaatctgattcaaacc

SEQ ID NO: 24199 - DNA, 33 bp, Homo sapien
ctgtttccagtagttcccgttgtacagtgctac

SEQ ID NO: 24200 - DNA, 33 bp, Homo sapien
ctgtttccagtagttctcgttgtacagtgctac

SEQ ID NO: 24201 - DNA, 33 bp, Homo sapien
gtgatgatatggctaacattcctgggatgcagg

SEQ ID NO: 24202 - DNA, 33 bp, Homo sapien
gtgatgatatggctaatattcctgggatgcagg

SEQ ID NO: 24203 - DNA, 33 bp, Homo sapien
gaccacatttcatccacgttcagaggagaagct

SEQ ID NO: 24204 - DNA, 33 bp, Homo sapien
gaccacatttcatccatgttcagaggagaagct

SEQ ID NO: 24205 - DNA, 33 bp, Homo sapien
gttaaaggtcaaagacaaattgtacacatatgg

SEQ ID NO: 24206 - DNA, 33 bp, Homo sapien
gttaaaggtcaaagactaattgtacacatatgg

SEQ ID NO: 24207 - DNA, 33 bp, Homo sapien
ttcagggtcacattcaagtcttaccttttctct

SEQ ID NO: 24208 - DNA, 33 bp, Homo sapien
ttcagggtcacattcaggtcttaccttttctct

SEQ ID NO: 24209 - DNA, 33 bp, Homo sapien
taataaatgttgcgaccatatgtatgattgtta

SEQ ID NO: 24210 - DNA, 33 bp, Homo sapien
taataaatgttgcgactatatgtatgattgtta

SEQ ID NO: 24211 - DNA, 33 bp, Homo sapien
atttgggatatggactcagctttctattatcat

SEQ ID NO: 24212 - DNA, 33 bp, Homo sapien
atttgggatatggacttagctttctattatcat

SEQ ID NO: 24213 - DNA, 33 bp, Homo sapien
aggaatcacagacaagcatttcacagaatcaac

SEQ ID NO: 24214 - DNA, 33 bp, Homo sapien
aggaatcacagacaaggatttcacagaatcaac

SEQ ID NO: 24215 - DNA, 33 bp, Homo sapien
ataagacacataataactgccacatagatagta

SEQ ID NO: 24216 - DNA, 33 bp, Homo sapien
ataagacacataataattgccacatagatagta

SEQ ID NO: 24217 - DNA, 33 bp, Homo sapien
tttgttagagctatccaaaggaaacctgaaata

SEQ ID NO: 24218 - DNA, 33 bp, Homo sapien
tttgttagagctatccgaaggaaacctgaaata

SEQ ID NO: 24219 - DNA, 33 bp, Homo sapien
actataagccagacaccatactagcccatggca

SEQ ID NO: 24220 - DNA, 33 bp, Homo sapien
actataagccagacactatactagcccatggca

SEQ ID NO: 24221 - DNA, 33 bp, Homo sapien
cccatctcactaacgaacttcctctgacttgac

SEQ ID NO: 24222 - DNA, 33 bp, Homo sapien
cccatctcactaacgagcttcctctgacttgac

SEQ ID NO: 24223 - DNA, 33 bp, Homo sapien
tgtcaccactcttactcaatatagtgatagaag

SEQ ID NO: 24224 - DNA, 33 bp, Homo sapien
tgtcaccactcttactgaatatagtgatagaag

SEQ ID NO: 24225 - DNA, 33 bp, Homo sapien
gtgcaagccacattaaggaaagtaattttaggg

SEQ ID NO: 24226 - DNA, 33 bp, Homo sapien
gtgcaagccacattaatgaaagtaattttaggg

SEQ ID NO: 24227 - DNA, 33 bp, Homo sapien
tactaacaattttaagactagcgatttaggctc

SEQ ID NO: 24228 - DNA, 33 bp, Homo sapien
tactaacaattttaaggctagcgatttaggctc

SEQ ID NO: 24229 - DNA, 33 bp, Homo sapien
gaacatctacactcctaaaggttcttcccagag

SEQ ID NO: 24230 - DNA, 33 bp, Homo sapien
gaacatctacactcctgaaggttcttcccagag

SEQ ID NO: 24231 - DNA, 33 bp, Homo sapien
ttggcccaatctgcatcaactttattccttttt

SEQ ID NO: 24232 - DNA, 33 bp, Homo sapien
ttggcccaatctgcatgaactttattccttttt

SEQ ID NO: 24233 - DNA, 33 bp, Homo sapien
tctagagagatagacaatccagagaaatacagt

SEQ ID NO: 24234 - DNA, 33 bp, Homo sapien
tctagagagatagacagtccagagaaatacagt

SEQ ID NO: 24235 - DNA, 33 bp, Homo sapien
ttttgagtaatgtctacgtttaacaactgactc

SEQ ID NO: 24236 - DNA, 33 bp, Homo sapien
ttttgagtaatgtctatgtttaacaactgactc

SEQ ID NO: 24237 - DNA, 33 bp, Homo sapien
ctctgatggctaacaacgtccaccatattttca

SEQ ID NO: 24238 - DNA, 33 bp, Homo sapien
ctctgatggctaacaatgtccaccatattttca

SEQ ID NO: 24239 - DNA, 33 bp, Homo sapien
gtttgcatcaaaagcacatacagagtgaaaaga

SEQ ID NO: 24240 - DNA, 33 bp, Homo sapien
gtttgcatcaaaagcatatacagagtgaaaaga

SEQ ID NO: 24241 - DNA, 33 bp, Homo sapien
aaaaggcatccagttcagaaagtaagaggtaaa

SEQ ID NO: 24242 - DNA, 33 bp, Homo sapien
aaaaggcatccagttcggaaagtaagaggtaaa

SEQ ID NO: 24243 - DNA, 33 bp, Homo sapien
ctatttttccagcttaaataccctctcaaactc

SEQ ID NO: 24244 - DNA, 33 bp, Homo sapien
ctatttttccagcttatataccctctcaaactc

SEQ ID NO: 24245 - DNA, 33 bp, Homo sapien
aggggagggtatccacaatgcccaaaaccccag

SEQ ID NO: 24246 - DNA, 33 bp, Homo sapien
aggggagggtatccacgatgcccaaaaccccag

SEQ ID NO: 24247 - DNA, 33 bp, Homo sapien
tatgcttgagagtaaaatacattaggctttgtg

SEQ ID NO: 24248 - DNA, 33 bp, Homo sapien
tatgcttgagagtaaagtacattaggctttgtg

SEQ ID NO: 24249 - DNA, 33 bp, Homo sapien
ttttttctatgaaaacaatttctgcgtttgaaa

SEQ ID NO: 24250 - DNA, 33 bp, Homo sapien
ttttttctatgaaaaccatttctgcgtttgaaa

SEQ ID NO: 24251 - DNA, 33 bp, Homo sapien
tttgtttatcagtaaacaatgcttttgcaaatc

SEQ ID NO: 24252 - DNA, 33 bp, Homo sapien
tttgtttatcagtaaataatgcttttgcaaatc

SEQ ID NO: 24253 - DNA, 33 bp, Homo sapien
aaaggctgggcatacacagtctgtaaaatattg

SEQ ID NO: 24254 - DNA, 33 bp, Homo sapien
aaaggctgggcatacatagtctgtaaaatattg

SEQ ID NO: 24255 - DNA, 33 bp, Homo sapien
aaatggactataaaaggattctacacggcctca

SEQ ID NO: 24256 - DNA, 33 bp, Homo sapien
aaatggactataaaagtattctacacggcctca

SEQ ID NO: 24257 - DNA, 33 bp, Homo sapien
attatagttgtagcccagagtttgctgcaagat

SEQ ID NO: 24258 - DNA, 33 bp, Homo sapien
attatagttgtagcccggagtttgctgcaagat

SEQ ID NO: 24259 - DNA, 33 bp, Homo sapien
agcattttttctggaactcaaatgaggtgaata

SEQ ID NO: 24260 - DNA, 33 bp, Homo sapien
agcattttttctggaattcaaatgaggtgaata

SEQ ID NO: 24261 - DNA, 33 bp, Homo sapien
tactcctttcccggaccgaccttcccagcctct

SEQ ID NO: 24262 - DNA, 33 bp, Homo sapien
tactcctttcccggactgaccttcccagcctct

SEQ ID NO: 24263 - DNA, 33 bp, Homo sapien
tcaggagattttgtaaccaaaacagatacaagt

SEQ ID NO: 24264 - DNA, 33 bp, Homo sapien
tcaggagattttgtaatcaaaacagatacaagt

SEQ ID NO: 24265 - DNA, 33 bp, Homo sapien
aaaattataggaatctcaagaagccacaaagaa

SEQ ID NO: 24266 - DNA, 33 bp, Homo sapien
aaaattataggaatcttaagaagccacaaagaa

SEQ ID NO: 24267 - DNA, 33 bp, Homo sapien
aatagctgcactttaagtgacttcataaaacat

SEQ ID NO: 24268 - DNA, 33 bp, Homo sapien
aatagctgcactttaattgacttcataaaacat

SEQ ID NO: 24269 - DNA, 33 bp, Homo sapien
gaatggctgagctaaacgggttataactgggat

SEQ ID NO: 24270 - DNA, 33 bp, Homo sapien
gaatggctgagctaaatgggttataactgggat

SEQ ID NO: 24271 - DNA, 33 bp, Homo sapien
tcacatttgcttatcaaactcctattgcaaaaa

SEQ ID NO: 24272 - DNA, 33 bp, Homo sapien
tcacatttgcttatcacactcctattgcaaaaa

SEQ ID NO: 24273 - DNA, 33 bp, Homo sapien
tgataagcaaatgtgacaaacattccacctttt

SEQ ID NO: 24274 - DNA, 33 bp, Homo sapien
tgataagcaaatgtgagaaacattccacctttt

SEQ ID NO: 24275 - DNA, 33 bp, Homo sapien
ctcaccagcactatataagagctcccactgatc

SEQ ID NO: 24276 - DNA, 33 bp, Homo sapien
ctcaccagcactatatgagagctcccactgatc

SEQ ID NO: 24277 - DNA, 33 bp, Homo sapien
aaactcgtgcagctcaataataagacaaataat

SEQ ID NO: 24278 - DNA, 33 bp, Homo sapien
aaactcgtgcagctcagtaataagacaaataat

SEQ ID NO: 24279 - DNA, 33 bp, Homo sapien
ggggcctggcacatgggacttaatagatgtcag

SEQ ID NO: 24280 - DNA, 33 bp, Homo sapien
ggggcctggcacatggtacttaatagatgtcag

SEQ ID NO: 24281 - DNA, 33 bp, Homo sapien
tttttgcggcagtacaaatggaaagactatagg

SEQ ID NO: 24282 - DNA, 33 bp, Homo sapien
tttttgcggcagtacagatggaaagactatagg

SEQ ID NO: 24283 - DNA, 33 bp, Homo sapien
actcctggggtatttaaattatactggcacctg

SEQ ID NO: 24284 - DNA, 33 bp, Homo sapien
actcctggggtatttacattatactggcacctg

SEQ ID NO: 24285 - DNA, 33 bp, Homo sapien
gtgacctacttggcaacctggaatgtgtagttt

SEQ ID NO: 24286 - DNA, 33 bp, Homo sapien
gtgacctacttggcaagctggaatgtgtagttt

SEQ ID NO: 24287 - DNA, 33 bp, Homo sapien
gaggtaagaatggttaaaaacataacagtgtca

SEQ ID NO: 24288 - DNA, 33 bp, Homo sapien
gaggtaagaatggttagaaacataacagtgtca

SEQ ID NO: 24289 - DNA, 33 bp, Homo sapien
gaaagtcattggtcaaatgatgtccactctgcc

SEQ ID NO: 24290 - DNA, 33 bp, Homo sapien
gaaagtcattggtcaagtgatgtccactctgcc

SEQ ID NO: 24291 - DNA, 33 bp, Homo sapien
aagcagcactgaaaaactggaaataaataccca

SEQ ID NO: 24292 - DNA, 33 bp, Homo sapien
aagcagcactgaaaaattggaaataaataccca

SEQ ID NO: 24293 - DNA, 33 bp, Homo sapien
tcaggctgcttacaatcatagtccattgagtat

SEQ ID NO: 24294 - DNA, 33 bp, Homo sapien
tcaggctgcttacaattatagtccattgagtat

SEQ ID NO: 24295 - DNA, 33 bp, Homo sapien
aactgacaaacagcaaaaacttaaatgccaaaa

SEQ ID NO: 24296 - DNA, 33 bp, Homo sapien
aactgacaaacagcaagaacttaaatgccaaaa

SEQ ID NO: 24297 - DNA, 33 bp, Homo sapien
agcaaatagatatgtgaaaagatgcttgacatc

SEQ ID NO: 24298 - DNA, 33 bp, Homo sapien
agcaaatagatatgtgtaaagatgcttgacatc

SEQ ID NO: 24299 - DNA, 33 bp, Homo sapien
gttacagacttttagaacttgtttctgtaggac

SEQ ID NO: 24300 - DNA, 33 bp, Homo sapien
gttacagacttttagagcttgtttctgtaggac

SEQ ID NO: 24301 - DNA, 33 bp, Homo sapien
aaacttatggctgaagcaggatttgaccctaga

SEQ ID NO: 24302 - DNA, 33 bp, Homo sapien
aaacttatggctgaagtaggatttgaccctaga

SEQ ID NO: 24303 - DNA, 33 bp, Homo sapien
cctcacacattctacaatggctgttccaaactt

SEQ ID NO: 24304 - DNA, 33 bp, Homo sapien
cctcacacattctacagtggctgttccaaactt

SEQ ID NO: 24305 - DNA, 33 bp, Homo sapien
ttggatatgctaagaacttagtactctatgtaa

SEQ ID NO: 24306 - DNA, 33 bp, Homo sapien
ttggatatgctaagaagttagtactctatgtaa

SEQ ID NO: 24307 - DNA, 33 bp, Homo sapien
gaaagttttatctgtaaaaacactcataacctc

SEQ ID NO: 24308 - DNA, 33 bp, Homo sapien
gaaagttttatctgtagaaacactcataacctc

SEQ ID NO: 24309 - DNA, 33 bp, Homo sapien
agacaacctcaggcaaatggcctcctgcttatt

SEQ ID NO: 24310 - DNA, 33 bp, Homo sapien
agacaacctcaggcaagtggcctcctgcttatt

SEQ ID NO: 24311 - DNA, 33 bp, Homo sapien
tctcagtatcagaatacaagccaagtctggcct

SEQ ID NO: 24312 - DNA, 33 bp, Homo sapien
tctcagtatcagaatagaagccaagtctggcct

SEQ ID NO: 24313 - DNA, 33 bp, Homo sapien
tcccaaaaataactaacacagaaattctcagta

SEQ ID NO: 24314 - DNA, 33 bp, Homo sapien
tcccaaaaataactaatacagaaattctcagta

SEQ ID NO: 24315 - DNA, 33 bp, Homo sapien
aataagctagtattcaataaaaacagactaagg

SEQ ID NO: 24316 - DNA, 33 bp, Homo sapien
aataagctagtattcagtaaaaacagactaagg

SEQ ID NO: 24317 - DNA, 33 bp, Homo sapien
tctatgcattcttggcaaatccctcaacatttt

SEQ ID NO: 24318 - DNA, 33 bp, Homo sapien
tctatgcattcttggcgaatccctcaacatttt

SEQ ID NO: 24319 - DNA, 33 bp, Homo sapien
aagtcttggacatttacccaatagctttggaag

SEQ ID NO: 24320 - DNA, 33 bp, Homo sapien
aagtcttggacatttatccaatagctttggaag

SEQ ID NO: 24321 - DNA, 33 bp, Homo sapien
ttcctctattcaatctcagaggccacaatcaga

SEQ ID NO: 24322 - DNA, 33 bp, Homo sapien
ttcctctattcaatcttagaggccacaatcaga

SEQ ID NO: 24323 - DNA, 33 bp, Homo sapien
tcacaatacaatagtcacaatgcccaagatcaa

SEQ ID NO: 24324 - DNA, 33 bp, Homo sapien
tcacaatacaatagtcgcaatgcccaagatcaa

SEQ ID NO: 24325 - DNA, 33 bp, Homo sapien
gcagccttcttatgcaacccgtttacatagcat

SEQ ID NO: 24326 - DNA, 33 bp, Homo sapien
gcagccttcttatgcatcccgtttacatagcat

SEQ ID NO: 24327 - DNA, 33 bp, Homo sapien
agtaacctgattgtgacgttatgttgtaataca

SEQ ID NO: 24328 - DNA, 33 bp, Homo sapien
agtaacctgattgtgatgttatgttgtaataca

SEQ ID NO: 24329 - DNA, 33 bp, Homo sapien
tcctctgactacgctaccaacaatatacctctt

SEQ ID NO: 24330 - DNA, 33 bp, Homo sapien
tcctctgactacgctatcaacaatatacctctt

SEQ ID NO: 24331 - DNA, 33 bp, Homo sapien
gattcagggacataaaaacataaagcagcccag

SEQ ID NO: 24332 - DNA, 33 bp, Homo sapien
gattcagggacataaacacataaagcagcccag

SEQ ID NO: 24333 - DNA, 33 bp, Homo sapien
actaggaaatatgaaccattatggcaatgggac

SEQ ID NO: 24334 - DNA, 33 bp, Homo sapien
actaggaaatatgaactattatggcaatgggac

SEQ ID NO: 24335 - DNA, 33 bp, Homo sapien
ggttctttccagctcaaaaaaatctctgatatt

SEQ ID NO: 24336 - DNA, 33 bp, Homo sapien
ggttctttccagctcagaaaaatctctgatatt

SEQ ID NO: 24337 - DNA, 33 bp, Homo sapien
acttcaaaaaaattcacgatctgcacagtgatt

SEQ ID NO: 24338 - DNA, 33 bp, Homo sapien
acttcaaaaaaattcatgatctgcacagtgatt

SEQ ID NO: 24339 - DNA, 33 bp, Homo sapien
ccaaaaacaaacaaacacaatgccatcagagct

SEQ ID NO: 24340 - DNA, 33 bp, Homo sapien
ccaaaaacaaacaaacgcaatgccatcagagct

SEQ ID NO: 24341 - DNA, 33 bp, Homo sapien
acagaaaggggaaggaggaataaactagaaagg

SEQ ID NO: 24342 - DNA, 33 bp, Homo sapien
acagaaaggggaaggatgaataaactagaaagg

SEQ ID NO: 24343 - DNA, 33 bp, Homo sapien
agaaaatgcataatgcagaactaagcacatagg

SEQ ID NO: 24344 - DNA, 33 bp, Homo sapien
agaaaatgcataatgcggaactaagcacatagg

SEQ ID NO: 24345 - DNA, 33 bp, Homo sapien
tgagctgaaggtattacaacaatcttagacaaa

SEQ ID NO: 24346 - DNA, 33 bp, Homo sapien
tgagctgaaggtattataacaatcttagacaaa

SEQ ID NO: 24347 - DNA, 33 bp, Homo sapien
aatgttcctttccataataaatccattaagcca

SEQ ID NO: 24348 - DNA, 33 bp, Homo sapien
aatgttcctttccatattaaatccattaagcca

SEQ ID NO: 24349 - DNA, 33 bp, Homo sapien
tgagccttatgctatgcgagccactatgaagat

SEQ ID NO: 24350 - DNA, 33 bp, Homo sapien
tgagccttatgctatgggagccactatgaagat

SEQ ID NO: 24351 - DNA, 33 bp, Homo sapien
aacatagctcaaaaaccgctacctgaacttgat

SEQ ID NO: 24352 - DNA, 33 bp, Homo sapien
aacatagctcaaaaactgctacctgaacttgat

SEQ ID NO: 24353 - DNA, 33 bp, Homo sapien
gtcacctacagcttcacagaaaaattttttaca

SEQ ID NO: 24354 - DNA, 33 bp, Homo sapien
gtcacctacagcttcatagaaaaattttttaca

SEQ ID NO: 24355 - DNA, 33 bp, Homo sapien
gatggctcattcaaagacctgggagttcatgct

SEQ ID NO: 24356 - DNA, 33 bp, Homo sapien
gatggctcattcaaaggcctgggagttcatgct

SEQ ID NO: 24357 - DNA, 33 bp, Homo sapien
gccatctttaatattccagaccatttgagtaac

SEQ ID NO: 24358 - DNA, 33 bp, Homo sapien
gccatctttaatattctagaccatttgagtaac

SEQ ID NO: 24359 - DNA, 33 bp, Homo sapien
accagtgagactctaaaaagcgtttcatctggg

SEQ ID NO: 24360 - DNA, 33 bp, Homo sapien
accagtgagactctaataagcgtttcatctggg

SEQ ID NO: 24361 - DNA, 33 bp, Homo sapien
ttagtctccagtggtgcagccagagaaatccct

SEQ ID NO: 24362 - DNA, 33 bp, Homo sapien
ttagtctccagtggtgtagccagagaaatccct

SEQ ID NO: 24363 - DNA, 33 bp, Homo sapien
gttctgaattgatggaagccagattaatgggat

SEQ ID NO: 24364 - DNA, 33 bp, Homo sapien
gttctgaattgatggaggccagattaatgggat

SEQ ID NO: 24365 - DNA, 33 bp, Homo sapien
cacctactcatttctccagttgcagaaaggcag

SEQ ID NO: 24366 - DNA, 33 bp, Homo sapien
cacctactcatttctctagttgcagaaaggcag

SEQ ID NO: 24367 - DNA, 33 bp, Homo sapien
acagcactcctgacacaaaatgtgggaagattt

SEQ ID NO: 24368 - DNA, 33 bp, Homo sapien
acagcactcctgacacgaaatgtgggaagattt

SEQ ID NO: 24369 - DNA, 33 bp, Homo sapien
cagagaactgtttcctcaaacgatccacttgcc

SEQ ID NO: 24370 - DNA, 33 bp, Homo sapien
cagagaactgtttccttaaacgatccacttgcc

SEQ ID NO: 24371 - DNA, 33 bp, Homo sapien
tggggataagataagcacttatatcatgtgttt

SEQ ID NO: 24372 - DNA, 33 bp, Homo sapien
tggggataagataagcccttatatcatgtgttt

SEQ ID NO: 24373 - DNA, 33 bp, Homo sapien
tttagtgaacaattacactattccaggcttgta

SEQ ID NO: 24374 - DNA, 33 bp, Homo sapien
tttagtgaacaattacgctattccaggcttgta

SEQ ID NO: 24375 - DNA, 33 bp, Homo sapien
tgattatgtacggccacgttttatataaagaac

SEQ ID NO: 24376 - DNA, 33 bp, Homo sapien
tgattatgtacggccatgttttatataaagaac

SEQ ID NO: 24377 - DNA, 33 bp, Homo sapien
attatgatgtcagccacatttggtagtgtaatt

SEQ ID NO: 24378 - DNA, 33 bp, Homo sapien
attatgatgtcagccatatttggtagtgtaatt

SEQ ID NO: 24379 - DNA, 33 bp, Homo sapien
tgctggtgggtaatgacacctaaactataacaa

SEQ ID NO: 24380 - DNA, 33 bp, Homo sapien
tgctggtgggtaatgagacctaaactataacaa

SEQ ID NO: 24381 - DNA, 33 bp, Homo sapien
aagaattattgcatcaagagttaagcacctttt

SEQ ID NO: 24382 - DNA, 33 bp, Homo sapien
aagaattattgcatcaggagttaagcacctttt

SEQ ID NO: 24383 - DNA, 33 bp, Homo sapien
ttatgctttttcttgaagtcatcatcttctata

SEQ ID NO: 24384 - DNA, 33 bp, Homo sapien
ttatgctttttcttgaggtcatcatcttctata

SEQ ID NO: 24385 - DNA, 33 bp, Homo sapien
atgaaattagtggacacaccttgaagttttaca

SEQ ID NO: 24386 - DNA, 33 bp, Homo sapien
atgaaattagtggacataccttgaagttttaca

SEQ ID NO: 24387 - DNA, 33 bp, Homo sapien
ctaagcacttggcttgcaattgattgataattc

SEQ ID NO: 24388 - DNA, 33 bp, Homo sapien
ctaagcacttggcttgtaattgattgataattc

SEQ ID NO: 24389 - DNA, 33 bp, Homo sapien
tcactctgtggcctaaagtaaaggttaattttg

SEQ ID NO: 24390 - DNA, 33 bp, Homo sapien
tcactctgtggcctaaggtaaaggttaattttg

SEQ ID NO: 24391 - DNA, 33 bp, Homo sapien
tttaacagatcattccaaactgggtaggttttt

SEQ ID NO: 24392 - DNA, 33 bp, Homo sapien
tttaacagatcattccgaactgggtaggttttt

SEQ ID NO: 24393 - DNA, 33 bp, Homo sapien
tgtgtgttcctgataaaccctggccctcgggat

SEQ ID NO: 24394 - DNA, 33 bp, Homo sapien
tgtgtgttcctgataacccctggccctcgggat

SEQ ID NO: 24395 - DNA, 33 bp, Homo sapien
tgtttaagccacccaacccgactaagcattcct

SEQ ID NO: 24396 - DNA, 33 bp, Homo sapien
tgtttaagccacccaagccgactaagcattcct

SEQ ID NO: 24397 - DNA, 33 bp, Homo sapien
ggaactttcttatcacactggcgaaaactggcc

SEQ ID NO: 24398 - DNA, 33 bp, Homo sapien
ggaactttcttatcacgctggcgaaaactggcc

SEQ ID NO: 24399 - DNA, 33 bp, Homo sapien
agggcagtattgctaacgcctatacaatgcacc

SEQ ID NO: 24400 - DNA, 33 bp, Homo sapien
agggcagtattgctaatgcctatacaatgcacc

SEQ ID NO: 24401 - DNA, 33 bp, Homo sapien
aatctcagtgcacaaaaaaaatgtatctgcaat

SEQ ID NO: 24402 - DNA, 33 bp, Homo sapien
aatctcagtgcacaaagaaaatgtatctgcaat

SEQ ID NO: 24403 - DNA, 33 bp, Homo sapien
aaatgttaaactataacaagaaccatctgagga

SEQ ID NO: 24404 - DNA, 33 bp, Homo sapien
aaatgttaaactataagaagaaccatctgagga

SEQ ID NO: 24405 - DNA, 33 bp, Homo sapien
ttataaacagctaatcagaacctctatttgtca

SEQ ID NO: 24406 - DNA, 33 bp, Homo sapien
ttataaacagctaatcggaacctctatttgtca

SEQ ID NO: 24407 - DNA, 33 bp, Homo sapien
actgcacctggcctacaataattttgaagacaa

SEQ ID NO: 24408 - DNA, 33 bp, Homo sapien
actgcacctggcctacgataattttgaagacaa

SEQ ID NO: 24409 - DNA, 33 bp, Homo sapien
cttgtgagtgtgtatacatttaacagaattcaa

SEQ ID NO: 24410 - DNA, 33 bp, Homo sapien
cttgtgagtgtgtatagatttaacagaattcaa

SEQ ID NO: 24411 - DNA, 33 bp, Homo sapien
gaattctatgtattaaaaccgcagaaaaacaca

SEQ ID NO: 24412 - DNA, 33 bp, Homo sapien
gaattctatgtattaacaccgcagaaaaacaca

SEQ ID NO: 24413 - DNA, 33 bp, Homo sapien
atgcttatccatgaaccaaataatcatcgttga

SEQ ID NO: 24414 - DNA, 33 bp, Homo sapien
atgcttatccatgaactaaataatcatcgttga

SEQ ID NO: 24415 - DNA, 33 bp, Homo sapien
tttaaattcttaataactgttgactgatgggcc

SEQ ID NO: 24416 - DNA, 33 bp, Homo sapien
tttaaattcttaataattgttgactgatgggcc

SEQ ID NO: 24417 - DNA, 33 bp, Homo sapien
aacagcacctactggacggacgtggtgactcac

SEQ ID NO: 24418 - DNA, 33 bp, Homo sapien
aacagcacctactggatggacgtggtgactcac

SEQ ID NO: 24419 - DNA, 33 bp, Homo sapien
ctgagtttagatggatcaataagactcacccag

SEQ ID NO: 24420 - DNA, 33 bp, Homo sapien
ctgagtttagatggatgaataagactcacccag

SEQ ID NO: 24421 - DNA, 33 bp, Homo sapien
atgtttccagtctatacgtcttagaggaagctg

SEQ ID NO: 24422 - DNA, 33 bp, Homo sapien
atgtttccagtctatatgtcttagaggaagctg

SEQ ID NO: 24423 - DNA, 33 bp, Homo sapien
gatcatacgatctgtcacaactgctaaatgtgc

SEQ ID NO: 24424 - DNA, 33 bp, Homo sapien
gatcatacgatctgtcgcaactgctaaatgtgc

SEQ ID NO: 24425 - DNA, 33 bp, Homo sapien
tgttttgatttacagccaggagtggaaccagca

SEQ ID NO: 24426 - DNA, 33 bp, Homo sapien
tgttttgatttacagcgaggagtggaaccagca

SEQ ID NO: 24427 - DNA, 33 bp, Homo sapien
ccagaaagtaagcagagaactaattatttgtat

SEQ ID NO: 24428 - DNA, 33 bp, Homo sapien
ccagaaagtaagcagataactaattatttgtat

SEQ ID NO: 24429 - DNA, 33 bp, Homo sapien
gttgatgcagagatcacgtcaggagggaaagaa

SEQ ID NO: 24430 - DNA, 33 bp, Homo sapien
gttgatgcagagatcatgtcaggagggaaagaa

SEQ ID NO: 24431 - DNA, 33 bp, Homo sapien
caaaattattcctttaacctcaatcattcaact

SEQ ID NO: 24432 - DNA, 33 bp, Homo sapien
caaaattattcctttagcctcaatcattcaact

SEQ ID NO: 24433 - DNA, 33 bp, Homo sapien
gagattcctgggcagcaatcacaacaggataac

SEQ ID NO: 24434 - DNA, 33 bp, Homo sapien
gagattcctgggcagcgatcacaacaggataac

SEQ ID NO: 24435 - DNA, 33 bp, Homo sapien
ctcctctctaccctaaacatacatggaggacca

SEQ ID NO: 24436 - DNA, 33 bp, Homo sapien
ctcctctctaccctaagcatacatggaggacca

SEQ ID NO: 24437 - DNA, 33 bp, Homo sapien
ttagtatggtaatccaaagattcctcatgggtg

SEQ ID NO: 24438 - DNA, 33 bp, Homo sapien
ttagtatggtaatccagagattcctcatgggtg

SEQ ID NO: 24439 - DNA, 33 bp, Homo sapien
cacctgggaagctttacgagttggtcttctctc

SEQ ID NO: 24440 - DNA, 33 bp, Homo sapien
cacctgggaagctttatgagttggtcttctctc

SEQ ID NO: 24441 - DNA, 33 bp, Homo sapien
tctgtatcctatactacattcatgacttcttta

SEQ ID NO: 24442 - DNA, 33 bp, Homo sapien
tctgtatcctatactatattcatgacttcttta

SEQ ID NO: 24443 - DNA, 33 bp, Homo sapien
agataaaggcttatgccatactttgctaaaatt

SEQ ID NO: 24444 - DNA, 33 bp, Homo sapien
agataaaggcttatgctatactttgctaaaatt

SEQ ID NO: 24445 - DNA, 33 bp, Homo sapien
gcttcacgttgaagtacctatcacacattagat

SEQ ID NO: 24446 - DNA, 33 bp, Homo sapien
gcttcacgttgaagtatctatcacacattagat

SEQ ID NO: 24447 - DNA, 33 bp, Homo sapien
tttctccaaagaaatacgagcagaagtgtctgt

SEQ ID NO: 24448 - DNA, 33 bp, Homo sapien
tttctccaaagaaatatgagcagaagtgtctgt

SEQ ID NO: 24449 - DNA, 33 bp, Homo sapien
aaaaatcaaagcttatcaaagccaagtctttaa

SEQ ID NO: 24450 - DNA, 33 bp, Homo sapien
aaaaatcaaagcttatgaaagccaagtctttaa

SEQ ID NO: 24451 - DNA, 33 bp, Homo sapien
tcccgtctttttttcaactgttcacataattta

SEQ ID NO: 24452 - DNA, 33 bp, Homo sapien
tcccgtctttttttcagctgttcacataattta

SEQ ID NO: 24453 - DNA, 33 bp, Homo sapien
gctgtcactttttttacatgtctgtaagccatg

SEQ ID NO: 24454 - DNA, 33 bp, Homo sapien
gctgtcactttttttatatgtctgtaagccatg

SEQ ID NO: 24455 - DNA, 33 bp, Homo sapien
agccaaaaatgaatcccagctctcacagaagag

SEQ ID NO: 24456 - DNA, 33 bp, Homo sapien
agccaaaaatgaatccgagctctcacagaagag

SEQ ID NO: 24457 - DNA, 33 bp, Homo sapien
aatcgcttgaacttcaaaatggccaaaatcgcg

SEQ ID NO: 24458 - DNA, 33 bp, Homo sapien
aatcgcttgaacttcagaatggccaaaatcgcg

SEQ ID NO: 24459 - DNA, 33 bp, Homo sapien
aatatatacacataaaccactcttttaagggct

SEQ ID NO: 24460 - DNA, 33 bp, Homo sapien
aatatatacacataaagcactcttttaagggct

SEQ ID NO: 24461 - DNA, 33 bp, Homo sapien
gtaagtgcttgtcaaacgaagaaatgaataaat

SEQ ID NO: 24462 - DNA, 33 bp, Homo sapien
gtaagtgcttgtcaaaggaagaaatgaataaat

SEQ ID NO: 24463 - DNA, 33 bp, Homo sapien
agcaacacatagaaacaggttcatacagccccc

SEQ ID NO: 24464 - DNA, 33 bp, Homo sapien
agcaacacatagaaacgggttcatacagccccc

SEQ ID NO: 24465 - DNA, 33 bp, Homo sapien
tcttttggcttatttccagtaggattaaagata

SEQ ID NO: 24466 - DNA, 33 bp, Homo sapien
tcttttggcttatttctagtaggattaaagata

SEQ ID NO: 24467 - DNA, 33 bp, Homo sapien
attctgtaagtatatcactaggacaaatatata

SEQ ID NO: 24468 - DNA, 33 bp, Homo sapien
attctgtaagtatatctctaggacaaatatata

SEQ ID NO: 24469 - DNA, 33 bp, Homo sapien
gaaaactttttttcacaagagttgctgtgttgt

SEQ ID NO: 24470 - DNA, 33 bp, Homo sapien
gaaaactttttttcacgagagttgctgtgttgt

SEQ ID NO: 24471 - DNA, 33 bp, Homo sapien
ggaccacacccgcttcccattagcccaaagcct

SEQ ID NO: 24472 - DNA, 33 bp, Homo sapien
ggaccacacccgcttctcattagcccaaagcct

SEQ ID NO: 24473 - DNA, 33 bp, Homo sapien
ccttctaggcacttccacctacttcctcctatg

SEQ ID NO: 24474 - DNA, 33 bp, Homo sapien
ccttctaggcacttccgcctacttcctcctatg

SEQ ID NO: 24475 - DNA, 33 bp, Homo sapien
cctctcccaagatacccgaagacccttgcctgg

SEQ ID NO: 24476 - DNA, 33 bp, Homo sapien
cctctcccaagatacctgaagacccttgcctgg

SEQ ID NO: 24477 - DNA, 33 bp, Homo sapien
ttagatttgtctctggccatccatgctaataag

SEQ ID NO: 24478 - DNA, 33 bp, Homo sapien
ttagatttgtctctggtcatccatgctaataag

SEQ ID NO: 24479 - DNA, 33 bp, Homo sapien
cctgaggaaacacatggaattttttggccatat

SEQ ID NO: 24480 - DNA, 33 bp, Homo sapien
cctgaggaaacacatgtaattttttggccatat

SEQ ID NO: 24481 - DNA, 33 bp, Homo sapien
ctgtgccaggcttgtaactatttagtgtagata

SEQ ID NO: 24482 - DNA, 33 bp, Homo sapien
ctgtgccaggcttgtacctatttagtgtagata

SEQ ID NO: 24483 - DNA, 33 bp, Homo sapien
atcttaataaaagttgcaagtatgtttgtgtaa

SEQ ID NO: 24484 - DNA, 33 bp, Homo sapien
atcttaataaaagttgtaagtatgtttgtgtaa

SEQ ID NO: 24485 - DNA, 33 bp, Homo sapien
ccacagtgcaagaaagaaaatcgtactatacac

SEQ ID NO: 24486 - DNA, 33 bp, Homo sapien
ccacagtgcaagaaaggaaatcgtactatacac

SEQ ID NO: 24487 - DNA, 33 bp, Homo sapien
cagcaaattatctggccgataataaacattcaa

SEQ ID NO: 24488 - DNA, 33 bp, Homo sapien
cagcaaattatctggctgataataaacattcaa

SEQ ID NO: 24489 - DNA, 33 bp, Homo sapien
ctgaggcaggctagcacgtgttcatcaagaaag

SEQ ID NO: 24490 - DNA, 33 bp, Homo sapien
ctgaggcaggctagcaggtgttcatcaagaaag

SEQ ID NO: 24491 - DNA, 33 bp, Homo sapien
gtcagtgctggttctgaattggccagacctaca

SEQ ID NO: 24492 - DNA, 33 bp, Homo sapien
gtcagtgctggttctgcattggccagacctaca

SEQ ID NO: 24493 - DNA, 33 bp, Homo sapien
gagaagaggagataagaaagagaattaacattt

SEQ ID NO: 24494 - DNA, 33 bp, Homo sapien
gagaagaggagataaggaagagaattaacattt

SEQ ID NO: 24495 - DNA, 33 bp, Homo sapien
attaggtacacagttacaaaggatgtaattact

SEQ ID NO: 24496 - DNA, 33 bp, Homo sapien
attaggtacacagttataaaggatgtaattact

SEQ ID NO: 24497 - DNA, 33 bp, Homo sapien
ggaaataggtgtgaacagaacagtcaccagggc

SEQ ID NO: 24498 - DNA, 33 bp, Homo sapien
ggaaataggtgtgaacggaacagtcaccagggc

SEQ ID NO: 24499 - DNA, 33 bp, Homo sapien
aaaaaggatggaaaaagatgctgttaaaaaata

SEQ ID NO: 24500 - DNA, 33 bp, Homo sapien
aaaaaggatggaaaaatatgctgttaaaaaata

SEQ ID NO: 24501 - DNA, 33 bp, Homo sapien
ctgtgctccttacaaacagttttatcttggttc

SEQ ID NO: 24502 - DNA, 33 bp, Homo sapien
ctgtgctccttacaaagagttttatcttggttc

SEQ ID NO: 24503 - DNA, 33 bp, Homo sapien
tccagcaggtgaatgcacttatgtccaacagta

SEQ ID NO: 24504 - DNA, 33 bp, Homo sapien
tccagcaggtgaatgcgcttatgtccaacagta

SEQ ID NO: 24505 - DNA, 33 bp, Homo sapien
acactttcttgtgttacaacttttacagtacac

SEQ ID NO: 24506 - DNA, 33 bp, Homo sapien
acactttcttgtgttagaacttttacagtacac

SEQ ID NO: 24507 - DNA, 33 bp, Homo sapien
ggatggcagagggaaacgaaaatttgcatataa

SEQ ID NO: 24508 - DNA, 33 bp, Homo sapien
ggatggcagagggaaaggaaaatttgcatataa

SEQ ID NO: 24509 - DNA, 33 bp, Homo sapien
cattctctagtccaaaatcccagtagtcatcac

SEQ ID NO: 24510 - DNA, 33 bp, Homo sapien
cattctctagtccaaagtcccagtagtcatcac

SEQ ID NO: 24511 - DNA, 33 bp, Homo sapien
ccttcacagatctatccatcaattcttctctct

SEQ ID NO: 24512 - DNA, 33 bp, Homo sapien
ccttcacagatctatctatcaattcttctctct

SEQ ID NO: 24513 - DNA, 33 bp, Homo sapien
gcaggctcctcaagtgaagaaatcatcaaggca

SEQ ID NO: 24514 - DNA, 33 bp, Homo sapien
gcaggctcctcaagtggagaaatcatcaaggca

SEQ ID NO: 24515 - DNA, 33 bp, Homo sapien
gtggagggaggtcacacgtgcttaagaagataa

SEQ ID NO: 24516 - DNA, 33 bp, Homo sapien
gtggagggaggtcacaggtgcttaagaagataa

SEQ ID NO: 24517 - DNA, 33 bp, Homo sapien
gttccttggcttgtggaaacctcaactctaatc

SEQ ID NO: 24518 - DNA, 33 bp, Homo sapien
gttccttggcttgtggcaacctcaactctaatc

SEQ ID NO: 24519 - DNA, 33 bp, Homo sapien
tgcacttcatctaacaatgcctaaatgtttgtt

SEQ ID NO: 24520 - DNA, 33 bp, Homo sapien
tgcacttcatctaacactgcctaaatgtttgtt

SEQ ID NO: 24521 - DNA, 33 bp, Homo sapien
tatatattttaaataaatgcagggttttgtata

SEQ ID NO: 24522 - DNA, 33 bp, Homo sapien
tatatattttaaataagtgcagggttttgtata

SEQ ID NO: 24523 - DNA, 33 bp, Homo sapien
acataactctgtctcacgatcccatagctccaa

SEQ ID NO: 24524 - DNA, 33 bp, Homo sapien
acataactctgtctcatgatcccatagctccaa

SEQ ID NO: 24525 - DNA, 33 bp, Homo sapien
ccagtttcctctttagcaaagtgagacaggaat

SEQ ID NO: 24526 - DNA, 33 bp, Homo sapien
ccagtttcctctttagtaaagtgagacaggaat

SEQ ID NO: 24527 - DNA, 33 bp, Homo sapien
attacaaaggtgataaagctttgaaagatgtag

SEQ ID NO: 24528 - DNA, 33 bp, Homo sapien
attacaaaggtgataaggctttgaaagatgtag

SEQ ID NO: 24529 - DNA, 33 bp, Homo sapien
ccctaaggaagtgtgacagaataaccctgaacg

SEQ ID NO: 24530 - DNA, 33 bp, Homo sapien
ccctaaggaagtgtgagagaataaccctgaacg

SEQ ID NO: 24531 - DNA, 33 bp, Homo sapien
aaggatggaccagcacaaagtaaacaaatgtcc

SEQ ID NO: 24532 - DNA, 33 bp, Homo sapien
aaggatggaccagcacgaagtaaacaaatgtcc

SEQ ID NO: 24533 - DNA, 33 bp, Homo sapien
cctcaatttttcatcaccttaccactggctatg

SEQ ID NO: 24534 - DNA, 33 bp, Homo sapien
cctcaatttttcatcatcttaccactggctatg

SEQ ID NO: 24535 - DNA, 33 bp, Homo sapien
tacattaaaactgacaacattaattgcccagaa

SEQ ID NO: 24536 - DNA, 33 bp, Homo sapien
tacattaaaactgacatcattaattgcccagaa

SEQ ID NO: 24537 - DNA, 33 bp, Homo sapien
gagctcagattccataccatcagagaaatattt

SEQ ID NO: 24538 - DNA, 33 bp, Homo sapien
gagctcagattccatatcatcagagaaatattt

SEQ ID NO: 24539 - DNA, 33 bp, Homo sapien
ggtttgtcatcatcgaactgtcacaggagcacc

SEQ ID NO: 24540 - DNA, 33 bp, Homo sapien
ggtttgtcatcatcgagctgtcacaggagcacc

SEQ ID NO: 24541 - DNA, 33 bp, Homo sapien
cctaaactgagaaatcacaaagtagcaatataa

SEQ ID NO: 24542 - DNA, 33 bp, Homo sapien
cctaaactgagaaatctcaaagtagcaatataa

SEQ ID NO: 24543 - DNA, 33 bp, Homo sapien
acacagaaaatgaagcaactttatttatttatt

SEQ ID NO: 24544 - DNA, 33 bp, Homo sapien
acacagaaaatgaagccactttatttatttatt

SEQ ID NO: 24545 - DNA, 33 bp, Homo sapien
cctcaaacctgtccacagtgacagaaatacttt

SEQ ID NO: 24546 - DNA, 33 bp, Homo sapien
cctcaaacctgtccactgtgacagaaatacttt

SEQ ID NO: 24547 - DNA, 33 bp, Homo sapien
aggctaagaattcctactaaagatcgtaggtta

SEQ ID NO: 24548 - DNA, 33 bp, Homo sapien
aggctaagaattcctattaaagatcgtaggtta

SEQ ID NO: 24549 - DNA, 33 bp, Homo sapien
gcttaataatcctaaacttcaattgcttcatct

SEQ ID NO: 24550 - DNA, 33 bp, Homo sapien
gcttaataatcctaaatttcaattgcttcatct

SEQ ID NO: 24551 - DNA, 33 bp, Homo sapien
tcgagttggtctagtaagatatgtcttgggtca

SEQ ID NO: 24552 - DNA, 33 bp, Homo sapien
tcgagttggtctagtaggatatgtcttgggtca

SEQ ID NO: 24553 - DNA, 33 bp, Homo sapien
ttccctcctgtgagcccctgggtgaacagtgca

SEQ ID NO: 24554 - DNA, 33 bp, Homo sapien
ttccctcctgtgagcctctgggtgaacagtgca

SEQ ID NO: 24555 - DNA, 33 bp, Homo sapien
tgcccatagaaccagaaaaatattaagagatgc

SEQ ID NO: 24556 - DNA, 33 bp, Homo sapien
tgcccatagaaccagacaaatattaagagatgc

SEQ ID NO: 24557 - DNA, 33 bp, Homo sapien
gcagcaactcagaggcacaaagtccgatgacat

SEQ ID NO: 24558 - DNA, 33 bp, Homo sapien
gcagcaactcagaggcgcaaagtccgatgacat

SEQ ID NO: 24559 - DNA, 33 bp, Homo sapien
tctgaaataagaatagcatagtgagtacataaa

SEQ ID NO: 24560 - DNA, 33 bp, Homo sapien
tctgaaataagaatagtatagtgagtacataaa

SEQ ID NO: 24561 - DNA, 33 bp, Homo sapien
ctatttgtctgtcatgccaaatttattcacact

SEQ ID NO: 24562 - DNA, 33 bp, Homo sapien
ctatttgtctgtcatgtcaaatttattcacact

SEQ ID NO: 24563 - DNA, 33 bp, Homo sapien
tgttggattgagctgaacttaaagctaaaaaga

SEQ ID NO: 24564 - DNA, 33 bp, Homo sapien
tgttggattgagctgatcttaaagctaaaaaga

SEQ ID NO: 24565 - DNA, 33 bp, Homo sapien
agtatcagttctagggcccataagcagagaaaa

SEQ ID NO: 24566 - DNA, 33 bp, Homo sapien
agtatcagttctagggtccataagcagagaaaa

SEQ ID NO: 24567 - DNA, 33 bp, Homo sapien
catgaaggacacagtaaaaaaacatcgctgcct

SEQ ID NO: 24568 - DNA, 33 bp, Homo sapien
catgaaggacacagtagaaaaacatcgctgcct

SEQ ID NO: 24569 - DNA, 33 bp, Homo sapien
cagcggtccctctgtcaacgttcctgaattaga

SEQ ID NO: 24570 - DNA, 33 bp, Homo sapien
cagcggtccctctgtctacgttcctgaattaga

SEQ ID NO: 24571 - DNA, 33 bp, Homo sapien
catagctcatatcaaaccaagtcatttattcta

SEQ ID NO: 24572 - DNA, 33 bp, Homo sapien
catagctcatatcaaatcaagtcatttattcta

SEQ ID NO: 24573 - DNA, 33 bp, Homo sapien
ggaagtcaaatggcaacccaagggatgttttag

SEQ ID NO: 24574 - DNA, 33 bp, Homo sapien
ggaagtcaaatggcaatccaagggatgttttag

SEQ ID NO: 24575 - DNA, 33 bp, Homo sapien
tgagttaagtcatggacgtgagtaagccaaagc

SEQ ID NO: 24576 - DNA, 33 bp, Homo sapien
tgagttaagtcatggatgtgagtaagccaaagc

SEQ ID NO: 24577 - DNA, 33 bp, Homo sapien
aagagtgtcctaggccaaacagcgtggcgtgga

SEQ ID NO: 24578 - DNA, 33 bp, Homo sapien
aagagtgtcctaggccgaacagcgtggcgtgga

SEQ ID NO: 24579 - DNA, 33 bp, Homo sapien
tggtcagagaagcagacacagattacagtaaaa

SEQ ID NO: 24580 - DNA, 33 bp, Homo sapien
tggtcagagaagcagagacagattacagtaaaa

SEQ ID NO: 24581 - DNA, 33 bp, Homo sapien
aactgcaagtctggacactttaagcactaactc

SEQ ID NO: 24582 - DNA, 33 bp, Homo sapien
aactgcaagtctggacgctttaagcactaactc

SEQ ID NO: 24583 - DNA, 33 bp, Homo sapien
tctcagcgggtttagaacaaatcttctggtgta

SEQ ID NO: 24584 - DNA, 33 bp, Homo sapien
tctcagcgggtttagagcaaatcttctggtgta

SEQ ID NO: 24585 - DNA, 33 bp, Homo sapien
atgttgctagatgtgacggaagatacaaagaag

SEQ ID NO: 24586 - DNA, 33 bp, Homo sapien
atgttgctagatgtgatggaagatacaaagaag

SEQ ID NO: 24587 - DNA, 33 bp, Homo sapien
gcatgcacaaagggaaaaatgagagaatgcttc

SEQ ID NO: 24588 - DNA, 33 bp, Homo sapien
gcatgcacaaagggaagaatgagagaatgcttc

SEQ ID NO: 24589 - DNA, 33 bp, Homo sapien
tcatacatgagttcagaagttgcttccctaact

SEQ ID NO: 24590 - DNA, 33 bp, Homo sapien
tcatacatgagttcagtagttgcttccctaact

SEQ ID NO: 24591 - DNA, 33 bp, Homo sapien; identical to SEQ ID NO: 24589

SEQ ID NO: 24592 - DNA, 33 bp, Homo sapien; identical to SEQ ID NO: 24590

SEQ ID NO: 24593 - DNA, 33 bp, Homo sapien
gcgaaaagtagcagaaactggattataaggggt

SEQ ID NO: 24594 - DNA, 33 bp, Homo sapien
gcgaaaagtagcagaacctggattataaggggt

SEQ ID NO: 24595 - DNA, 33 bp, Homo sapien
gagttgtaatttgccacgttctgatagtacaaa

SEQ ID NO: 24596 - DNA, 33 bp, Homo sapien
gagttgtaatttgccatgttctgatagtacaaa

SEQ ID NO: 24597 - DNA, 33 bp, Homo sapien
caaacaccatttgctccagtcacatagaatgac

SEQ ID NO: 24598 - DNA, 33 bp, Homo sapien
caaacaccatttgctctagtcacatagaatgac

SEQ ID NO: 24599 - DNA, 33 bp, Homo sapien
caatgatcagtaatcaccttagtagggatgagt

SEQ ID NO: 24600 - DNA, 33 bp, Homo sapien
caatgatcagtaatcatcttagtagggatgagt

SEQ ID NO: 24601 - DNA, 33 bp, Homo sapien
agcccaaagctcaaatcaacactatgattacta

SEQ ID NO: 24602 - DNA, 33 bp, Homo sapien
agcccaaagctcaaattaacactatgattacta

SEQ ID NO: 24603 - DNA, 33 bp, Homo sapien
gttcctgttgataaaaggcttagatcagtgctc

SEQ ID NO: 24604 - DNA, 33 bp, Homo sapien
gttcctgttgataaaatgcttagatcagtgctc

SEQ ID NO: 24605 - DNA, 33 bp, Homo sapien
gaagctgacagacacacataattttcaagccag

SEQ ID NO: 24606 - DNA, 33 bp, Homo sapien
gaagctgacagacacagataattttcaagccag

SEQ ID NO: 24607 - DNA, 33 bp, Homo sapien
aaaagtatattggatacgctttcagaaaaccat

SEQ ID NO: 24608 - DNA, 33 bp, Homo sapien
aaaagtatattggatatgctttcagaaaaccat

SEQ ID NO: 24609 - DNA, 33 bp, Homo sapien
gtaaatgcctgaaatacagcactgtttattctt

SEQ ID NO: 24610 - DNA, 33 bp, Homo sapien
gtaaatgcctgaaatatagcactgtttattctt

SEQ ID NO: 24611 - DNA, 33 bp, Homo sapien
ttttttccatatccaaatcaaaggcgtgctatt

SEQ ID NO: 24612 - DNA, 33 bp, Homo sapien
ttttttccatatccaagtcaaaggcgtgctatt

SEQ ID NO: 24613 - DNA, 33 bp, Homo sapien
tttaaggtcatttagcagataatgccctcctat

SEQ ID NO: 24614 - DNA, 33 bp, Homo sapien
tttaaggtcatttagcggataatgccctcctat

SEQ ID NO: 24615 - DNA, 33 bp, Homo sapien
gacattattacagtaaccaagtccataaaacta

SEQ ID NO: 24616 - DNA, 33 bp, Homo sapien
gacattattacagtaatcaagtccataaaacta

SEQ ID NO: 24617 - DNA, 33 bp, Homo sapien
tcccctaaaattcatacaacctggcaatagcta

SEQ ID NO: 24618 - DNA, 33 bp, Homo sapien
tcccctaaaattcatataacctggcaatagcta

SEQ ID NO: 24619 - DNA, 33 bp, Homo sapien
taaaccagaactggagaatacagtggtggaaaa

SEQ ID NO: 24620 - DNA, 33 bp, Homo sapien
taaaccagaactggaggatacagtggtggaaaa

SEQ ID NO: 24621 - DNA, 33 bp, Homo sapien
atcagatagaggattcaacttaaagactctcat

SEQ ID NO: 24622 - DNA, 33 bp, Homo sapien
atcagatagaggattcgacttaaagactctcat

SEQ ID NO: 24623 - DNA, 33 bp, Homo sapien
ttaaagcaaatcctaacaggtaatacaacaata

SEQ ID NO: 24624 - DNA, 33 bp, Homo sapien
ttaaagcaaatcctaataggtaatacaacaata

SEQ ID NO: 24625 - DNA, 33 bp, Homo sapien
gcaatcagggagaccacgcattgtgactgacag

SEQ ID NO: 24626 - DNA, 33 bp, Homo sapien
gcaatcagggagaccatgcattgtgactgacag

SEQ ID NO: 24627 - DNA, 33 bp, Homo sapien
tgtttgcttctctctgaatagccctcccttgct

SEQ ID NO: 24628 - DNA, 33 bp, Homo sapien
tgtttgcttctctctggatagccctcccttgct

SEQ ID NO: 24629 - DNA, 33 bp, Homo sapien
ggtggtctcagaaacacaactaaagttttgagt

SEQ ID NO: 24630 - DNA, 33 bp, Homo sapien
ggtggtctcagaaacagaactaaagttttgagt

SEQ ID NO: 24631 - DNA, 33 bp, Homo sapien
ttaagtggacattgcacattcattaagtaaata

SEQ ID NO: 24632 - DNA, 33 bp, Homo sapien
ttaagtggacattgcatattcattaagtaaata

SEQ ID NO: 24633 - DNA, 33 bp, Homo sapien
actgaggttcaaattaagtaataagctgtctga

SEQ ID NO: 24634 - DNA, 33 bp, Homo sapien
actgaggttcaaattaggtaataagctgtctga

SEQ ID NO: 24635 - DNA, 33 bp, Homo sapien
ccatgtgctgggcattcaaaggttaagtaagac

SEQ ID NO: 24636 - DNA, 33 bp, Homo sapien
ccatgtgctgggcattgaaaggttaagtaagac

SEQ ID NO: 24637 - DNA, 33 bp, Homo sapien
gcctgagactggaaaacggggagctacttctag

SEQ ID NO: 24638 - DNA, 33 bp, Homo sapien
gcctgagactggaaaatggggagctacttctag

SEQ ID NO: 24639 - DNA, 33 bp, Homo sapien
gacattataaaagtcccaagtgctcttgactca

SEQ ID NO: 24640 - DNA, 33 bp, Homo sapien
gacattataaaagtcctaagtgctcttgactca

SEQ ID NO: 24641 - DNA, 33 bp, Homo sapien
ttagtatctgacagtacagtagaaaaattagag

SEQ ID NO: 24642 - DNA, 33 bp, Homo sapien
ttagtatctgacagtatagtagaaaaattagag

SEQ ID NO: 24643 - DNA, 33 bp, Homo sapien
ctgtccattgcctggaaacagataccgaggtgg

SEQ ID NO: 24644 - DNA, 33 bp, Homo sapien
ctgtccattgcctggagacagataccgaggtgg

SEQ ID NO: 24645 - DNA, 33 bp, Homo sapien
ggtgatttgcactggccattcaaagatctagat

SEQ ID NO: 24646 - DNA, 33 bp, Homo sapien
ggtgatttgcactggcgattcaaagatctagat

SEQ ID NO: 24647 - DNA, 33 bp, Homo sapien
ctagacttttttgcaacaatgtcgtaggaagaa

SEQ ID NO: 24648 - DNA, 33 bp, Homo sapien
ctagacttttttgcaagaatgtcgtaggaagaa

SEQ ID NO: 24649 - DNA, 33 bp, Homo sapien
actttgaacactccccaaagtagatgagagcat

SEQ ID NO: 24650 - DNA, 33 bp, Homo sapien
actttgaacactccccgaagtagatgagagcat

SEQ ID NO: 24651 - DNA, 33 bp, Homo sapien
agccctgaacctgctgaaaatccttccgtggct

SEQ ID NO: 24652 - DNA, 33 bp, Homo sapien
agccctgaacctgctggaaatccttccgtggct

SEQ ID NO: 24653 - DNA, 33 bp, Homo sapien
tcagaatctgattaggaaacataaggttatcag

SEQ ID NO: 24654 - DNA, 33 bp, Homo sapien
tcagaatctgattagggaacataaggttatcag

SEQ ID NO: 24655 - DNA, 33 bp, Homo sapien
acatccttttcttacgacattgacattccagtg

SEQ ID NO: 24656 - DNA, 33 bp, Homo sapien
acatccttttcttacggcattgacattccagtg

SEQ ID NO: 24657 - DNA, 33 bp, Homo sapien
caagacaaagcaaagaaccagaaatgggcagga

SEQ ID NO: 24658 - DNA, 33 bp, Homo sapien
caagacaaagcaaagagccagaaatgggcagga

SEQ ID NO: 24659 - DNA, 33 bp, Homo sapien
ataaagacggtaacatgagtacattcgtgctgt

SEQ ID NO: 24660 - DNA, 33 bp, Homo sapien
ataaagacggtaacattagtacattcgtgctgt

SEQ ID NO: 24661 - DNA, 33 bp, Homo sapien
tcaccatcccgaggcaatagtgtcccaggctac

SEQ ID NO: 24662 - DNA, 33 bp, Homo sapien
tcaccatcccgaggcagtagtgtcccaggctac

SEQ ID NO: 24663 - DNA, 33 bp, Homo sapien
acctgtgcctgtttgactacactacccctagga

SEQ ID NO: 24664 - DNA, 33 bp, Homo sapien
acctgtgcctgtttgagtacactacccctagga

SEQ ID NO: 24665 - DNA, 33 bp, Homo sapien
ggttactgtgtcgaaagggaagcggtgacgttc

SEQ ID NO: 24666 - DNA, 33 bp, Homo sapien
ggttactgtgtcgaaatggaagcggtgacgttc

SEQ ID NO: 24667 - DNA, 33 bp, Homo sapien
cccatctctggacatacgtaaattttctgctgt

SEQ ID NO: 24668 - DNA, 33 bp, Homo sapien
cccatctctggacatatgtaaattttctgctgt

SEQ ID NO: 24669 - DNA, 33 bp, Homo sapien
ccaaaacctggatcataatctttccacacactg

SEQ ID NO: 24670 - DNA, 33 bp, Homo sapien
ccaaaacctggatcatgatctttccacacactg

SEQ ID NO: 24671 - DNA, 33 bp, Homo sapien
cctggttaaatgcagccatcttcagacatactc

SEQ ID NO: 24672 - DNA, 33 bp, Homo sapien
cctggttaaatgcagctatcttcagacatactc

SEQ ID NO: 24673 - DNA, 33 bp, Homo sapien
tcctgtccccaaggaaaaaggcctacggctggt

SEQ ID NO: 24674 - DNA, 33 bp, Homo sapien
tcctgtccccaaggaagaaggcctacggctggt

SEQ ID NO: 24675 - DNA, 33 bp, Homo sapien
ttacaaataaaacaaccactcacaatcagccta

SEQ ID NO: 24676 - DNA, 33 bp, Homo sapien
ttacaaataaaacaacgactcacaatcagccta

SEQ ID NO: 24677 - DNA, 33 bp, Homo sapien
gagaaaagtaagagtaagtacatgaaagcactt

SEQ ID NO: 24678 - DNA, 33 bp, Homo sapien
gagaaaagtaagagtaggtacatgaaagcactt

SEQ ID NO: 24679 - DNA, 33 bp, Homo sapien
aaccttcctgtgactaagtccttaggttgttag

SEQ ID NO: 24680 - DNA, 33 bp, Homo sapien
aaccttcctgtgactacgtccttaggttgttag

SEQ ID NO: 24681 - DNA, 33 bp, Homo sapien
tgagagttgtacacatcatctgaatacctggct

SEQ ID NO: 24682 - DNA, 33 bp, Homo sapien
tgagagttgtacacattatctgaatacctggct

SEQ ID NO: 24683 - DNA, 33 bp, Homo sapien
agacttagaatgtctacgagcaggaaaggaatg

SEQ ID NO: 24684 - DNA, 33 bp, Homo sapien
agacttagaatgtctatgagcaggaaaggaatg

SEQ ID NO: 24685 - DNA, 33 bp, Homo sapien
tctggttatatgggtacggtatcttctcatctc

SEQ ID NO: 24686 - DNA, 33 bp, Homo sapien
tctggttatatgggtatggtatcttctcatctc

SEQ ID NO: 24687 - DNA, 33 bp, Homo sapien
aaataataacgtagtacctagaagctagcaaga

SEQ ID NO: 24688 - DNA, 33 bp, Homo sapien
aaataataacgtagtatctagaagctagcaaga

SEQ ID NO: 24689 - DNA, 33 bp, Homo sapien
tctgtttcctgccagacagtactgagattagac

SEQ ID NO: 24690 - DNA, 33 bp, Homo sapien
tctgtttcctgccagatagtactgagattagac

SEQ ID NO: 24691 - DNA, 33 bp, Homo sapien
gggaaagtggggataaaggtcactgtggaaata

SEQ ID NO: 24692 - DNA, 33 bp, Homo sapien
gggaaagtggggataagggtcactgtggaaata

SEQ ID NO: 24693 - DNA, 33 bp, Homo sapien
ggaatacatgatcataacagatagcaattgtac

SEQ ID NO: 24694 - DNA, 33 bp, Homo sapien
ggaatacatgatcatagcagatagcaattgtac

SEQ ID NO: 24695 - DNA, 33 bp, Homo sapien
tctggttaacataagcaaaagaggatttactgg

SEQ ID NO: 24696 - DNA, 33 bp, Homo sapien
tctggttaacataagcgaaagaggatttactgg

SEQ ID NO: 24697 - DNA, 33 bp, Homo sapien
aaactccttgaaaagcaaagatgtacagacttt

SEQ ID NO: 24698 - DNA, 33 bp, Homo sapien
aaactccttgaaaagcgaagatgtacagacttt

SEQ ID NO: 24699 - DNA, 33 bp, Homo sapien
ctggagcttacacaagacaacaatattcagacc

SEQ ID NO: 24700 - DNA, 33 bp, Homo sapien
ctggagcttacacaaggcaacaatattcagacc

SEQ ID NO: 24701 - DNA, 33 bp, Homo sapien
actctgaccactcaaactaacttctctccccat

SEQ ID NO: 24702 - DNA, 33 bp, Homo sapien
actctgaccactcaaattaacttctctccccat

SEQ ID NO: 24703 - DNA, 33 bp, Homo sapien
atgtctaccagaatgacgtatttaaagcactac

SEQ ID NO: 24704 - DNA, 33 bp, Homo sapien
atgtctaccagaatgatgtatttaaagcactac

SEQ ID NO: 24705 - DNA, 33 bp, Homo sapien
tctttgatttcccatccactattttactgccat

SEQ ID NO: 24706 - DNA, 33 bp, Homo sapien
tctttgatttcccatctactattttactgccat

SEQ ID NO: 24707 - DNA, 33 bp, Homo sapien
taaacatgagagtcacccctcttactacacata

SEQ ID NO: 24708 - DNA, 33 bp, Homo sapien
taaacatgagagtcactcctcttactacacata

SEQ ID NO: 24709 - DNA, 33 bp, Homo sapien
atccttctcaatatacaaacaagcaccaatgta

SEQ ID NO: 24710 - DNA, 33 bp, Homo sapien
atccttctcaatatacgaacaagcaccaatgta

SEQ ID NO: 24711 - DNA, 33 bp, Homo sapien
attgtcattttagctcactttctctggcacccc

SEQ ID NO: 24712 - DNA, 33 bp, Homo sapien
attgtcattttagctcgctttctctggcacccc

SEQ ID NO: 24713 - DNA, 33 bp, Homo sapien
aatcctgtcattgggaatatccttcctggcatc

SEQ ID NO: 24714 - DNA, 33 bp, Homo sapien
aatcctgtcattgggattatccttcctggcatc

SEQ ID NO: 24715 - DNA, 33 bp, Homo sapien
ggtaaacaagccttagaatttcgagattgttta

SEQ ID NO: 24716 - DNA, 33 bp, Homo sapien
ggtaaacaagccttaggatttcgagattgttta

SEQ ID NO: 24717 - DNA, 33 bp, Homo sapien
taatatgaattcagtcaacatgaggccatatta

SEQ ID NO: 24718 - DNA, 33 bp, Homo sapien
taatatgaattcagtctacatgaggccatatta

SEQ ID NO: 24719 - DNA, 33 bp, Homo sapien
ggtgccaaacgcaagccctatctaagtataaca

SEQ ID NO: 24720 - DNA, 33 bp, Homo sapien
ggtgccaaacgcaagctctatctaagtataaca

SEQ ID NO: 24721 - DNA, 33 bp, Homo sapien
agagagagagaaaatacgaacaatgcctccaag

SEQ ID NO: 24722 - DNA, 33 bp, Homo sapien
agagagagagaaaatatgaacaatgcctccaag

SEQ ID NO: 24723 - DNA, 33 bp, Homo sapien
aaaaaaaactgcctcaaaaagtgtgctaaggat

SEQ ID NO: 24724 - DNA, 33 bp, Homo sapien
aaaaaaaactgcctcagaaagtgtgctaaggat

SEQ ID NO: 24725 - DNA, 33 bp, Homo sapien
ttctgcacacatggccacacttaactataaggg

SEQ ID NO: 24726 - DNA, 33 bp, Homo sapien
ttctgcacacatggccgcacttaactataaggg

SEQ ID NO: 24727 - DNA, 33 bp, Homo sapien
ctgtagattaaaagaaacttacgaactaaacga

SEQ ID NO: 24728 - DNA, 33 bp, Homo sapien
ctgtagattaaaagaagcttacgaactaaacga

SEQ ID NO: 24729 - DNA, 33 bp, Homo sapien
cctgtcaatgcacttaccagtaagggatgttat

SEQ ID NO: 24730 - DNA, 33 bp, Homo sapien
cctgtcaatgcacttagcagtaagggatgttat

SEQ ID NO: 24731 - DNA, 33 bp, Homo sapien
gctcctaggccataaaactacacagaatattac

SEQ ID NO: 24732 - DNA, 33 bp, Homo sapien
gctcctaggccataaacctacacagaatattac

SEQ ID NO: 24733 - DNA, 33 bp, Homo sapien
tagcatgtaatcctaaaagtacttctaaatggc

SEQ ID NO: 24734 - DNA, 33 bp, Homo sapien
tagcatgtaatcctaacagtacttctaaatggc

SEQ ID NO: 24735 - DNA, 33 bp, Homo sapien
aagccatacagctcaaagccatcccactcaagg

SEQ ID NO: 24736 - DNA, 33 bp, Homo sapien
aagccatacagctcaaggccatcccactcaagg

SEQ ID NO: 24737 - DNA, 33 bp, Homo sapien
agcaacacatcttgagaaaactaataactccca

SEQ ID NO: 24738 - DNA, 33 bp, Homo sapien
agcaacacatcttgaggaaactaataactccca

SEQ ID NO: 24739 - DNA, 33 bp, Homo sapien
atttgtttacctttccacacattgccagctgta

SEQ ID NO: 24740 - DNA, 33 bp, Homo sapien
atttgtttacctttccgcacattgccagctgta

SEQ ID NO: 24741 - DNA, 33 bp, Homo sapien
acatgctcttgagaaacagaagaatgatctgct

SEQ ID NO: 24742 - DNA, 33 bp, Homo sapien
acatgctcttgagaaatagaagaatgatctgct

SEQ ID NO: 24743 - DNA, 33 bp, Homo sapien
ataaagtacagcattaactacagactgtgtgga

SEQ ID NO: 24744 - DNA, 33 bp, Homo sapien
ataaagtacagcattatctacagactgtgtgga

SEQ ID NO: 24745 - DNA, 33 bp, Homo sapien
atgaagcagtatcaacccagtgcttgtattttc

SEQ ID NO: 24746 - DNA, 33 bp, Homo sapien
atgaagcagtatcaactcagtgcttgtattttc

SEQ ID NO: 24747 - DNA, 33 bp, Homo sapien
aaatgtttgtggttcaagtttaccctagtgact

SEQ ID NO: 24748 - DNA, 33 bp, Homo sapien
aaatgtttgtggttcaggtttaccctagtgact

SEQ ID NO: 24749 - DNA, 33 bp, Homo sapien
cagatttactgtcaaacaagagttgtaaacttc

SEQ ID NO: 24750 - DNA, 33 bp, Homo sapien
cagatttactgtcaaagaagagttgtaaacttc

SEQ ID NO: 24751 - DNA, 33 bp, Homo sapien
cagaaacccattccaggagtctgttttccatca

SEQ ID NO: 24752 - DNA, 33 bp, Homo sapien
cagaaacccattccagtagtctgttttccatca

SEQ ID NO: 24753 - DNA, 33 bp, Homo sapien
aactatgcaaataacaacatgctcatttaactg

SEQ ID NO: 24754 - DNA, 33 bp, Homo sapien
aactatgcaaataacaccatgctcatttaactg

SEQ ID NO: 24755 - DNA, 33 bp, Homo sapien
cgtgtaattgttttaacccttagtggcatcctt

SEQ ID NO: 24756 - DNA, 33 bp, Homo sapien
cgtgtaattgttttaagccttagtggcatcctt

SEQ ID NO: 24757 - DNA, 33 bp, Homo sapien
tgagaaaagtggtcagcagaacgtctggcagaa

SEQ ID NO: 24758 - DNA, 33 bp, Homo sapien
tgagaaaagtggtcaggagaacgtctggcagaa

SEQ ID NO: 24759 - DNA, 33 bp, Homo sapien
agccatcattgaggaacagtaatttttgccagc

SEQ ID NO: 24760 - DNA, 33 bp, Homo sapien
agccatcattgaggaagagtaatttttgccagc

SEQ ID NO: 24761 - DNA, 33 bp, Homo sapien
acagctcccatcaggaagtttaaaagaggcagt

SEQ ID NO: 24762 - DNA, 33 bp, Homo sapien
acagctcccatcaggaggtttaaaagaggcagt

SEQ ID NO: 24763 - DNA, 33 bp, Homo sapien
ctgactagccctatacaactaaagaaatgtatt

SEQ ID NO: 24764 - DNA, 33 bp, Homo sapien
ctgactagccctatacgactaaagaaatgtatt

SEQ ID NO: 24765 - DNA, 33 bp, Homo sapien
cttcaaaatcccaaaaattacaaaacataccaa

SEQ ID NO: 24766 - DNA, 33 bp, Homo sapien
cttcaaaatcccaaaagttacaaaacataccaa

SEQ ID NO: 24767 - DNA, 33 bp, Homo sapien
tgcacttttagcttaacgtctaggctaggaaat

SEQ ID NO: 24768 - DNA, 33 bp, Homo sapien
tgcacttttagcttaaggtctaggctaggaaat

SEQ ID NO: 24769 - DNA, 33 bp, Homo sapien
caagataatgctttaacggtggtattgagaggc

SEQ ID NO: 24770 - DNA, 33 bp, Homo sapien
caagataatgctttaatggtggtattgagaggc

SEQ ID NO: 24771 - DNA, 33 bp, Homo sapien
gaaatatgatgtaagcaatttgttaattattgg

SEQ ID NO: 24772 - DNA, 33 bp, Homo sapien
gaaatatgatgtaagccatttgttaattattgg

SEQ ID NO: 24773 - DNA, 33 bp, Homo sapien
cttccaggggcatcagataccagtaaaagacca

SEQ ID NO: 24774 - DNA, 33 bp, Homo sapien
cttccaggggcatcaggtaccagtaaaagacca

SEQ ID NO: 24775 - DNA, 33 bp, Homo sapien
aggtctaacccccaaaaatccatagatgagaga

SEQ ID NO: 24776 - DNA, 33 bp, Homo sapien
aggtctaacccccaaagatccatagatgagaga

SEQ ID NO: 24777 - DNA, 33 bp, Homo sapien
ggggtatgtggtgcaaccaaggaaaactttgag

SEQ ID NO: 24778 - DNA, 33 bp, Homo sapien
ggggtatgtggtgcaatcaaggaaaactttgag

SEQ ID NO: 24779 - DNA, 33 bp, Homo sapien
atgtcaaattggtggacagatagacacatagat

SEQ ID NO: 24780 - DNA, 33 bp, Homo sapien
atgtcaaattggtggagagatagacacatagat

SEQ ID NO: 24781 - DNA, 33 bp, Homo sapien
caattttttagcttcaagtcagaacaaatcatt

SEQ ID NO: 24782 - DNA, 33 bp, Homo sapien
caattttttagcttcatgtcagaacaaatcatt

SEQ ID NO: 24783 - DNA, 33 bp, Homo sapien
gacaaatcatggtctcaagtctctaatcccagt

SEQ ID NO: 24784 - DNA, 33 bp, Homo sapien
gacaaatcatggtctctagtctctaatcccagt

SEQ ID NO: 24785 - DNA, 33 bp, Homo sapien
cattttgaaaagatcactctagagcctctgtgg

SEQ ID NO: 24786 - DNA, 33 bp, Homo sapien
cattttgaaaagatcattctagagcctctgtgg

SEQ ID NO: 24787 - DNA, 33 bp, Homo sapien
taggaagggatttaggcagacttgattatactt

SEQ ID NO: 24788 - DNA, 33 bp, Homo sapien
taggaagggatttaggtagacttgattatactt

SEQ ID NO: 24789 - DNA, 33 bp, Homo sapien
gtatacgtattgacaacatggatgttacagtcc

SEQ ID NO: 24790 - DNA, 33 bp, Homo sapien
gtatacgtattgacaatatggatgttacagtcc

SEQ ID NO: 24791 - DNA, 33 bp, Homo sapien
tgtccttgagttgccacgttaacaaggtccttt

SEQ ID NO: 24792 - DNA, 33 bp, Homo sapien
tgtccttgagttgccatgttaacaaggtccttt

SEQ ID NO: 24793 - DNA, 33 bp, Homo sapien
taatagcagaattgaaatgtctccaacaataca

SEQ ID NO: 24794 - DNA, 33 bp, Homo sapien
taatagcagaattgaagtgtctccaacaataca

SEQ ID NO: 24795 - DNA, 33 bp, Homo sapien
tagctcaatgaagacaaaactccttagaggacc

SEQ ID NO: 24796 - DNA, 33 bp, Homo sapien
tagctcaatgaagacagaactccttagaggacc

SEQ ID NO: 24797 - DNA, 33 bp, Homo sapien
agctgtatgattcccaacttcatacagtcattt

SEQ ID NO: 24798 - DNA, 33 bp, Homo sapien
agctgtatgattcccagcttcatacagtcattt

SEQ ID NO: 24799 - DNA, 33 bp, Homo sapien
ttttgcctccaataaccgtatactttcccagct

SEQ ID NO: 24800 - DNA, 33 bp, Homo sapien
ttttgcctccaataactgtatactttcccagct

SEQ ID NO: 24801 - DNA, 33 bp, Homo sapien
ttttttgctattaacacaatgtggcaatttatc

SEQ ID NO: 24802 - DNA, 33 bp, Homo sapien
ttttttgctattaacataatgtggcaatttatc

SEQ ID NO: 24803 - DNA, 33 bp, Homo sapien
ctcttagaaatattgccgcaagcctcactgttc

SEQ ID NO: 24804 - DNA, 33 bp, Homo sapien
ctcttagaaatattgctgcaagcctcactgttc

SEQ ID NO: 24805 - DNA, 33 bp, Homo sapien
accttctggcattcccagattcaactttcttgg

SEQ ID NO: 24806 - DNA, 33 bp, Homo sapien
accttctggcattcccggattcaactttcttgg

SEQ ID NO: 24807 - DNA, 33 bp, Homo sapien
gcctgggatcttctcacaatgctggtctgcagc

SEQ ID NO: 24808 - DNA, 33 bp, Homo sapien
gcctgggatcttctcataatgctggtctgcagc

SEQ ID NO: 24809 - DNA, 33 bp, Homo sapien
taaacagttgttgggtgaatgaatctatttctt

SEQ ID NO: 24810 - DNA, 33 bp, Homo sapien
taaacagttgttgggttaatgaatctatttctt

SEQ ID NO: 24811 - DNA, 33 bp, Homo sapien
gtggttttaattttgaaggctaacagaactgtc

SEQ ID NO: 24812 - DNA, 33 bp, Homo sapien
gtggttttaattttgacggctaacagaactgtc

SEQ ID NO: 24813 - DNA, 33 bp, Homo sapien
ctccgggggtaacccaatgacatgatctcccca

SEQ ID NO: 24814 - DNA, 33 bp, Homo sapien
ctccgggggtaacccagtgacatgatctcccca

SEQ ID NO: 24815 - DNA, 33 bp, Homo sapien
aggccaaatcgagaatgacatctataactgagc

SEQ ID NO: 24816 - DNA, 33 bp, Homo sapien
aggccaaatcgagaattacatctataactgagc

SEQ ID NO: 24817 - DNA, 33 bp, Homo sapien
ccaccttctcagtcacagagtagagatcttact

SEQ ID NO: 24818 - DNA, 33 bp, Homo sapien
ccaccttctcagtcacggagtagagatcttact

SEQ ID NO: 24819 - DNA, 33 bp, Homo sapien
atacaggtttatttaaatgattggatctacact

SEQ ID NO: 24820 - DNA, 33 bp, Homo sapien
atacaggtttatttaagtgattggatctacact

SEQ ID NO: 24821 - DNA, 33 bp, Homo sapien
atatcaccaggtagcccactgagttaatattta

SEQ ID NO: 24822 - DNA, 33 bp, Homo sapien
atatcaccaggtagcctactgagttaatattta

SEQ ID NO: 24823 - DNA, 33 bp, Homo sapien
tgctgcctcttcttaaatattcaagtttccagc

SEQ ID NO: 24824 - DNA, 33 bp, Homo sapien
tgctgcctcttcttaagtattcaagtttccagc

SEQ ID NO: 24825 - DNA, 33 bp, Homo sapien
acagctaaaaatatccacatacagccgggtgcg

SEQ ID NO: 24826 - DNA, 33 bp, Homo sapien
acagctaaaaatatccgcatacagccgggtgcg

SEQ ID NO: 24827 - DNA, 33 bp, Homo sapien
tttagtttgcagtaaaattctctccctggttat

SEQ ID NO: 24828 - DNA, 33 bp, Homo sapien
tttagtttgcagtaaatttctctccctggttat

SEQ ID NO: 24829 - DNA, 33 bp, Homo sapien
gcagacatattcttaaacagttctttgcatgaa

SEQ ID NO: 24830 - DNA, 33 bp, Homo sapien
gcagacatattcttaagcagttctttgcatgaa

SEQ ID NO: 24831 - DNA, 33 bp, Homo sapien
ttgttttgcctattgaacaacatttagtagcac

SEQ ID NO: 24832 - DNA, 33 bp, Homo sapien
ttgttttgcctattgagcaacatttagtagcac

SEQ ID NO: 24833 - DNA, 33 bp, Homo sapien
aagtccttttgaactacgaatttctgtggttag

SEQ ID NO: 24834 - DNA, 33 bp, Homo sapien
aagtccttttgaactatgaatttctgtggttag

SEQ ID NO: 24835 - DNA, 33 bp, Homo sapien
caccactgctcccaaacgtaagtgatctcctaa

SEQ ID NO: 24836 - DNA, 33 bp, Homo sapien
caccactgctcccaaatgtaagtgatctcctaa

SEQ ID NO: 24837 - DNA, 33 bp, Homo sapien
cacagtaaaaacaaccaaaagaatttatgtaca

SEQ ID NO: 24838 - DNA, 33 bp, Homo sapien
cacagtaaaaacaaccgaaagaatttatgtaca

SEQ ID NO: 24839 - DNA, 33 bp, Homo sapien
gtgattataagatataaaaaggcagcagcacat

SEQ ID NO: 24840 - DNA, 33 bp, Homo sapien
gtgattataagatatacaaaggcagcagcacat

SEQ ID NO: 24841 - DNA, 33 bp, Homo sapien
accattatacaacacaagggtaggaatgctatc

SEQ ID NO: 24842 - DNA, 33 bp, Homo sapien
accattatacaacacatgggtaggaatgctatc

SEQ ID NO: 24843 - DNA, 33 bp, Homo sapien
ttagtgttgtgctacacggcttgataagttttt

SEQ ID NO: 24844 - DNA, 33 bp, Homo sapien
ttagtgttgtgctacatggcttgataagttttt

SEQ ID NO: 24845 - DNA, 33 bp, Homo sapien
atctctgctggaggacacctcatggagaaagac

SEQ ID NO: 24846 - DNA, 33 bp, Homo sapien
atctctgctggaggacgcctcatggagaaagac

SEQ ID NO: 24847 - DNA, 33 bp, Homo sapien
aaaaaaaagtgaggaacaaaaaatgacctttgg

SEQ ID NO: 24848 - DNA, 33 bp, Homo sapien
aaaaaaaagtgaggaataaaaaatgacctttgg

SEQ ID NO: 24849 - DNA, 33 bp, Homo sapien
atttgtcgttcctaagcctgaatttgcaagacc

SEQ ID NO: 24850 - DNA, 33 bp, Homo sapien
atttgtcgttcctaaggctgaatttgcaagacc

SEQ ID NO: 24851 - DNA, 33 bp, Homo sapien
aaagctgtcctcatgcaaagaagggacacacct

SEQ ID NO: 24852 - DNA, 33 bp, Homo sapien
aaagctgtcctcatgcgaagaagggacacacct

SEQ ID NO: 24853 - DNA, 33 bp, Homo sapien
aaccacaggagcttaacatggagtaattgtaca

SEQ ID NO: 24854 - DNA, 33 bp, Homo sapien
aaccacaggagcttaatatggagtaattgtaca

SEQ ID NO: 24855 - DNA, 33 bp, Homo sapien
cacagtgataggagaaaggcattaccattacca

SEQ ID NO: 24856 - DNA, 33 bp, Homo sapien
cacagtgataggagaagggcattaccattacca

SEQ ID NO: 24857 - DNA, 33 bp, Homo sapien
ctgacgaaaccagctaagtattttgcccagatc

SEQ ID NO: 24858 - DNA, 33 bp, Homo sapien
ctgacgaaaccagctaggtattttgcccagatc

SEQ ID NO: 24859 - DNA, 33 bp, Homo sapien
tcctggagcccaactcaaggaatgtcctggctg

SEQ ID NO: 24860 - DNA, 33 bp, Homo sapien
tcctggagcccaactcgaggaatgtcctggctg

SEQ ID NO: 24861 - DNA, 33 bp, Homo sapien
tgctgctcctccctcaataaaagccacccacaa

SEQ ID NO: 24862 - DNA, 33 bp, Homo sapien
tgctgctcctccctcagtaaaagccacccacaa

SEQ ID NO: 24863 - DNA, 33 bp, Homo sapien
tgtcatatcctttataacgtgcataagttaagt

SEQ ID NO: 24864 - DNA, 33 bp, Homo sapien
tgtcatatcctttatagcgtgcataagttaagt

SEQ ID NO: 24865 - DNA, 33 bp, Homo sapien
acttgcagaggttcccagagcatggcaccctag

SEQ ID NO: 24866 - DNA, 33 bp, Homo sapien
acttgcagaggttcccggagcatggcaccctag

SEQ ID NO: 24867 - DNA, 33 bp, Homo sapien
caagtactgtaatacacagcagttgatctagta

SEQ ID NO: 24868 - DNA, 33 bp, Homo sapien
caagtactgtaatacatagcagttgatctagta

SEQ ID NO: 24869 - DNA, 33 bp, Homo sapien
aacaagtaggccaaaaactacttctacaccaga

SEQ ID NO: 24870 - DNA, 33 bp, Homo sapien
aacaagtaggccaaaagctacttctacaccaga

SEQ ID NO: 24871 - DNA, 33 bp, Homo sapien
tgtcaaagaaatttccaatcagggtgtaattct

SEQ ID NO: 24872 - DNA, 33 bp, Homo sapien
tgtcaaagaaatttccgatcagggtgtaattct

SEQ ID NO: 24873 - DNA, 33 bp, Homo sapien
gtggctcatctgttgacgctattgctcattgct

SEQ ID NO: 24874 - DNA, 33 bp, Homo sapien
gtggctcatctgttgatgctattgctcattgct

SEQ ID NO: 24875 - DNA, 33 bp, Homo sapien
atctcactcaaggtgccaaattaataatgaact

SEQ ID NO: 24876 - DNA, 33 bp, Homo sapien
atctcactcaaggtgctaaattaataatgaact

SEQ ID NO: 24877 - DNA, 33 bp, Homo sapien
actgatacacctgataactcacatttgtatagt

SEQ ID NO: 24878 - DNA, 33 bp, Homo sapien
actgatacacctgatacctcacatttgtatagt

SEQ ID NO: 24879 - DNA, 33 bp, Homo sapien
ggaaaagggaaagttcaaatagaagtctagaca

SEQ ID NO: 24880 - DNA, 33 bp, Homo sapien
ggaaaagggaaagttcgaatagaagtctagaca

SEQ ID NO: 24881 - DNA, 33 bp, Homo sapien
atccttgagtgcttaacaaagaaagcctggaac

SEQ ID NO: 24882 - DNA, 33 bp, Homo sapien
atccttgagtgcttaagaaagaaagcctggaac

SEQ ID NO: 24883 - DNA, 33 bp, Homo sapien
gaaggttttacagaagcctcagagttggtctgt

SEQ ID NO: 24884 - DNA, 33 bp, Homo sapien
gaaggttttacagaaggctcagagttggtctgt

SEQ ID NO: 24885 - DNA, 33 bp, Homo sapien
ggttcatttggacaaaacacaacagaacaatgt

SEQ ID NO: 24886 - DNA, 33 bp, Homo sapien
ggttcatttggacaaagcacaacagaacaatgt

SEQ ID NO: 24887 - DNA, 33 bp, Homo sapien; identical to SEQ ID NO: 24885

SEQ ID NO: 24888 - DNA, 33 bp, Homo sapien; identical to SEQ ID NO: 24886

SEQ ID NO: 24889 - DNA, 33 bp, Homo sapien
tggagatgaactcagaactcaaggctcagctca

SEQ ID NO: 24890 - DNA, 33 bp, Homo sapien
tggagatgaactcagacctcaaggctcagctca

SEQ ID NO: 24891 - DNA, 33 bp, Homo sapien; identical to SEQ ID NO: 24889

SEQ ID NO: 24892 - DNA, 33 bp, Homo sapien; identical to SEQ ID NO: 24890

SEQ ID NO: 24893 - DNA, 33 bp, Homo sapien
ttagcttgatgcacaaagtcctccatgcttggc

SEQ ID NO: 24894 - DNA, 33 bp, Homo sapien
ttagcttgatgcacaaggtcctccatgcttggc

SEQ ID NO: 24895 - DNA, 33 bp, Homo sapien
taaactcatataaccaactgcttcctagacttc

SEQ ID NO: 24896 - DNA, 33 bp, Homo sapien
taaactcatataaccagctgcttcctagacttc

SEQ ID NO: 24897 - DNA, 33 bp, Homo sapien
agttgcccagactagaacatagtggtgtgatca

SEQ ID NO: 24898 - DNA, 33 bp, Homo sapien
agttgcccagactagagcatagtggtgtgatca

SEQ ID NO: 24899 - DNA, 33 bp, Homo sapien
ttgtatactttacaaacgctacacttagactac

SEQ ID NO: 24900 - DNA, 33 bp, Homo sapien
ttgtatactttacaaatgctacacttagactac

SEQ ID NO: 24901 - DNA, 33 bp, Homo sapien
aaggtgaacaaggcccaatcgttattccttctc

SEQ ID NO: 24902 - DNA, 33 bp, Homo sapien
aaggtgaacaaggcccgatcgttattccttctc

SEQ ID NO: 24903 - DNA, 33 bp, Homo sapien
cccagcaagggctatcaattcaggttcttctta

SEQ ID NO: 24904 - DNA, 33 bp, Homo sapien
cccagcaagggctatcgattcaggttcttctta

SEQ ID NO: 24905 - DNA, 33 bp, Homo sapien
tcccctgacacaactcacagttccatgtgaccc

SEQ ID NO: 24906 - DNA, 33 bp, Homo sapien
tcccctgacacaactcgcagttccatgtgaccc

SEQ ID NO: 24907 - DNA, 33 bp, Homo sapien
aacttccccagccagaactagaccagaaactac

SEQ ID NO: 24908 - DNA, 33 bp, Homo sapien
aacttccccagccagagctagaccagaaactac

SEQ ID NO: 24909 - DNA, 33 bp, Homo sapien
aaaatacacaaattcccgcatttctttgagttt

SEQ ID NO: 24910 - DNA, 33 bp, Homo sapien
aaaatacacaaattcctgcatttctttgagttt

SEQ ID NO: 24911 - DNA, 33 bp, Homo sapien
ttgaaaccagaaaatacgattctttacaagtca

SEQ ID NO: 24912 - DNA, 33 bp, Homo sapien
ttgaaaccagaaaatatgattctttacaagtca

SEQ ID NO: 24913 - DNA, 33 bp, Homo sapien
ggctcgtatcttaagcaagttggagatacggcc

SEQ ID NO: 24914 - DNA, 33 bp, Homo sapien
ggctcgtatcttaagctagttggagatacggcc

SEQ ID NO: 24915 - DNA, 33 bp, Homo sapien
gcctcttatagctttaacgtcaatcccgatctt

SEQ ID NO: 24916 - DNA, 33 bp, Homo sapien
gcctcttatagctttaccgtcaatcccgatctt

SEQ ID NO: 24917 - DNA, 33 bp, Homo sapien
actcttacagtgatgcaaagaggtagaaaattg

SEQ ID NO: 24918 - DNA, 33 bp, Homo sapien
actcttacagtgatgcgaagaggtagaaaattg

SEQ ID NO: 24919 - DNA, 33 bp, Homo sapien
ggtccttgatgtgatacaattagtgtctttaaa

SEQ ID NO: 24920 - DNA, 33 bp, Homo sapien
ggtccttgatgtgatataattagtgtctttaaa

SEQ ID NO: 24921 - DNA, 33 bp, Homo sapien
tactgtaaaggagacaactacacagaaggaaag

SEQ ID NO: 24922 - DNA, 33 bp, Homo sapien
tactgtaaaggagacagctacacagaaggaaag

SEQ ID NO: 24923 - DNA, 33 bp, Homo sapien
taattttacactttaccgctgaaggaactgagt

SEQ ID NO: 24924 - DNA, 33 bp, Homo sapien
taattttacactttactgctgaaggaactgagt

SEQ ID NO: 24925 - DNA, 33 bp, Homo sapien
gtgcagtctactgaaaatgaaaaaaaaagccca

SEQ ID NO: 24926 - DNA, 33 bp, Homo sapien
gtgcagtctactgaaagtgaaaaaaaaagccca

SEQ ID NO: 24927 - DNA, 33 bp, Homo sapien
tgtttctcattaacctaagctttctggagggtc

SEQ ID NO: 24928 - DNA, 33 bp, Homo sapien
tgtttctcattaacctgagctttctggagggtc

SEQ ID NO: 24929 - DNA, 33 bp, Homo sapien
ttttgctgtagaagcacatagagtaagaagcta

SEQ ID NO: 24930 - DNA, 33 bp, Homo sapien
ttttgctgtagaagcagatagagtaagaagcta

SEQ ID NO: 24931 - DNA, 33 bp, Homo sapien
ctaatagtggcaactacgcgttttcatttcttt

SEQ ID NO: 24932 - DNA, 33 bp, Homo sapien
ctaatagtggcaactatgcgttttcatttcttt

SEQ ID NO: 24933 - DNA, 33 bp, Homo sapien
tccagcttggccaacaactggatttcagccttt

SEQ ID NO: 24934 - DNA, 33 bp, Homo sapien
tccagcttggccaacatctggatttcagccttt

SEQ ID NO: 24935 - DNA, 33 bp, Homo sapien
actagatggcctgtgaaaagtaaaatttattct

SEQ ID NO: 24936 - DNA, 33 bp, Homo sapien
actagatggcctgtgacaagtaaaatttattct

SEQ ID NO: 24937 - DNA, 33 bp, Homo sapien
cccagaaggctgaaccaagaacccagggtgcag

SEQ ID NO: 24938 - DNA, 33 bp, Homo sapien
cccagaaggctgaaccgagaacccagggtgcag

SEQ ID NO: 24939 - DNA, 33 bp, Homo sapien
gatgaagacccttttccctctttgcctgaagac

SEQ ID NO: 24940 - DNA, 33 bp, Homo sapien
gatgaagacccttttctctctttgcctgaagac

SEQ ID NO: 24941 - DNA, 33 bp, Homo sapien
atagtgcctgtgaggaagaaaatgagactcact

SEQ ID NO: 24942 - DNA, 33 bp, Homo sapien
atagtgcctgtgaggaggaaaatgagactcact

SEQ ID NO: 24943 - DNA, 33 bp, Homo sapien
aatctcaataaaacaaacagttcaacaagtaat

SEQ ID NO: 24944 - DNA, 33 bp, Homo sapien
aatctcaataaaacaatcagttcaacaagtaat

SEQ ID NO: 24945 - DNA, 33 bp, Homo sapien
ctctgatccagttacactgaactactctcagtt

SEQ ID NO: 24946 - DNA, 33 bp, Homo sapien
ctctgatccagttacattgaactactctcagtt

SEQ ID NO: 24947 - DNA, 33 bp, Homo sapien
gtcatctttccgcttaaaactctctagttattt

SEQ ID NO: 24948 - DNA, 33 bp, Homo sapien
gtcatctttccgcttagaactctctagttattt

SEQ ID NO: 24949 - DNA, 33 bp, Homo sapien
aaatagaactactaccactattacttctaccac

SEQ ID NO: 24950 - DNA, 33 bp, Homo sapien
aaatagaactactaccgctattacttctaccac

SEQ ID NO: 24951 - DNA, 33 bp, Homo sapien
ggacaagagacaaaacactatgtaaattcaaat

SEQ ID NO: 24952 - DNA, 33 bp, Homo sapien
ggacaagagacaaaacgctatgtaaattcaaat

SEQ ID NO: 24953 - DNA, 33 bp, Homo sapien
tgtatattgtgacaatcaattatattttgaaat

SEQ ID NO: 24954 - DNA, 33 bp, Homo sapien
tgtatattgtgacaatgaattatattttgaaat

SEQ ID NO: 24955 - DNA, 33 bp, Homo sapien
aactcctagcatggcacataggaagaggtcagt

SEQ ID NO: 24956 - DNA, 33 bp, Homo sapien
aactcctagcatggcatataggaagaggtcagt

SEQ ID NO: 24957 - DNA, 33 bp, Homo sapien
cctatctaaaatttcaaccttctcccaacattt

SEQ ID NO: 24958 - DNA, 33 bp, Homo sapien
cctatctaaaatttcacccttctcccaacattt

SEQ ID NO: 24959 - DNA, 33 bp, Homo sapien
catcttacttacatgaaactaagtacatttata

SEQ ID NO: 24960 - DNA, 33 bp, Homo sapien
catcttacttacatgacactaagtacatttata

SEQ ID NO: 24961 - DNA, 33 bp, Homo sapien
aacttgtctatggcaacgggcaccgtataaccc

SEQ ID NO: 24962 - DNA, 33 bp, Homo sapien
aacttgtctatggcaatgggcaccgtataaccc

SEQ ID NO: 24963 - DNA, 33 bp, Homo sapien
taaattgatttgttaaaagctagtcagatgata

SEQ ID NO: 24964 - DNA, 33 bp, Homo sapien
taaattgatttgttaatagctagtcagatgata

SEQ ID NO: 24965 - DNA, 33 bp, Homo sapien
gagacggatttgatgacgttagacattttttat

SEQ ID NO: 24966 - DNA, 33 bp, Homo sapien
gagacggatttgatgatgttagacattttttat

SEQ ID NO: 24967 - DNA, 33 bp, Homo sapien
actgtatggttatcacggcctgaagaaatatta

SEQ ID NO: 24968 - DNA, 33 bp, Homo sapien
actgtatggttatcactgcctgaagaaatatta

SEQ ID NO: 24969 - DNA, 33 bp, Homo sapien
tgatctctctccatgacctttctttggagctcc

SEQ ID NO: 24970 - DNA, 33 bp, Homo sapien
tgatctctctccatgatctttctttggagctcc

SEQ ID NO: 24971 - DNA, 33 bp, Homo sapien
accaccttgatgatggaattatttgaatgtata

SEQ ID NO: 24972 - DNA, 33 bp, Homo sapien
accaccttgatgatggtattatttgaatgtata

SEQ ID NO: 24973 - DNA, 33 bp, Homo sapien
tatagtacttctatgaaataacagatttgtttg

SEQ ID NO: 24974 - DNA, 33 bp, Homo sapien
tatagtacttctatgagataacagatttgtttg

SEQ ID NO: 24975 - DNA, 33 bp, Homo sapien
ataggacattttagcaaccttatttaaataata

SEQ ID NO: 24976 - DNA, 33 bp, Homo sapien
ataggacattttagcacccttatttaaataata

SEQ ID NO: 24977 - DNA, 33 bp, Homo sapien
tacacacacacttgtacatggttacacacacac

SEQ ID NO: 24978 - DNA, 33 bp, Homo sapien
tacacacacacttgtatatggttacacacacac

SEQ ID NO: 24979 - DNA, 33 bp, Homo sapien
caagcttttaatttcaccctaccctgtgtctca

SEQ ID NO: 24980 - DNA, 33 bp, Homo sapien
caagcttttaatttcatcctaccctgtgtctca

SEQ ID NO: 24981 - DNA, 33 bp, Homo sapien
tggcaagatgttgaccgccaattcttggtttta

SEQ ID NO: 24982 - DNA, 33 bp, Homo sapien
tggcaagatgttgacctccaattcttggtttta

SEQ ID NO: 24983 - DNA, 33 bp, Homo sapien
atcacaccttgggaaacgtggagatgccccaga

SEQ ID NO: 24984 - DNA, 33 bp, Homo sapien
atcacaccttgggaaatgtggagatgccccaga

SEQ ID NO: 24985 - DNA, 33 bp, Homo sapien
agttatagtaaacaaactattcaaccatgtttg

SEQ ID NO: 24986 - DNA, 33 bp, Homo sapien
agttatagtaaacaaagtattcaaccatgtttg

SEQ ID NO: 24987 - DNA, 33 bp, Homo sapien
ttagtgacagaatttacgcttctaaaactaaac

SEQ ID NO: 24988 - DNA, 33 bp, Homo sapien
ttagtgacagaatttatgcttctaaaactaaac

SEQ ID NO: 24989 - DNA, 33 bp, Homo sapien
aattacggacaattgaggagccttattaactat

SEQ ID NO: 24990 - DNA, 33 bp, Homo sapien
aattacggacaattgatgagccttattaactat

SEQ ID NO: 24991 - DNA, 33 bp, Homo sapien
tgccacttgcaactgactattgcagagaatttt

SEQ ID NO: 24992 - DNA, 33 bp, Homo sapien
tgccacttgcaactgagtattgcagagaatttt

SEQ ID NO: 24993 - DNA, 33 bp, Homo sapien
ggagacaggaaaccccaagtgatgtgtaggaat

SEQ ID NO: 24994 - DNA, 33 bp, Homo sapien
ggagacaggaaaccccgagtgatgtgtaggaat

SEQ ID NO: 24995 - DNA, 33 bp, Homo sapien
atgtattctggctcaacccatttaattaggctg

SEQ ID NO: 24996 - DNA, 33 bp, Homo sapien
atgtattctggctcaatccatttaattaggctg

SEQ ID NO: 24997 - DNA, 33 bp, Homo sapien
tagagattgagttcaactgacaacagtgaccaa

SEQ ID NO: 24998 - DNA, 33 bp, Homo sapien
tagagattgagttcaattgacaacagtgaccaa

SEQ ID NO: 24999 - DNA, 33 bp, Homo sapien
gcagtgtaaaataagcacaaggcccaggacttt

SEQ ID NO: 25000 - DNA, 33 bp, Homo sapien
gcagtgtaaaataagcgcaaggcccaggacttt

SEQ ID NO: 25001 - DNA, 33 bp, Homo sapien
aaaaacatgggccgaaagctcaggaaagatatt

SEQ ID NO: 25002 - DNA, 33 bp, Homo sapien
aaaaacatgggccgaacgctcaggaaagatatt

SEQ ID NO: 25003 - DNA, 33 bp, Homo sapien
ttaacttaataatgaaacttctgaactcttttt

SEQ ID NO: 25004 - DNA, 33 bp, Homo sapien
ttaacttaataatgaaccttctgaactcttttt

SEQ ID NO: 25005 - DNA, 33 bp, Homo sapien
acttaagtatgtatgaagtatagtaatcagagt

SEQ ID NO: 25006 - DNA, 33 bp, Homo sapien
acttaagtatgtatgaggtatagtaatcagagt

SEQ ID NO: 25007 - DNA, 33 bp, Homo sapien
gagaagaaatccaaggaaagctaaaaataataa

SEQ ID NO: 25008 - DNA, 33 bp, Homo sapien
gagaagaaatccaagggaagctaaaaataataa

SEQ ID NO: 25009 - DNA, 33 bp, Homo sapien
ctttatgtgggtgttacattagaaactcagtca

SEQ ID NO: 25010 - DNA, 33 bp, Homo sapien
ctttatgtgggtgttatattagaaactcagtca

SEQ ID NO: 25011 - DNA, 33 bp, Homo sapien
gttgatgtgacaacaaatatggccactaagaga

SEQ ID NO: 25012 - DNA, 33 bp, Homo sapien
gttgatgtgacaacaattatggccactaagaga

SEQ ID NO: 25013 - DNA, 33 bp, Homo sapien
ttttcaggatgccttacactattattctaggat

SEQ ID NO: 25014 - DNA, 33 bp, Homo sapien
ttttcaggatgccttatactattattctaggat

SEQ ID NO: 25015 - DNA, 33 bp, Homo sapien
ttaggcctgaaaaatacgctcttatcttctttt

SEQ ID NO: 25016 - DNA, 33 bp, Homo sapien
ttaggcctgaaaaatatgctcttatcttctttt

SEQ ID NO: 25017 - DNA, 33 bp, Homo sapien
aggtgcaaagcacctcacatttattaggtctat

SEQ ID NO: 25018 - DNA, 33 bp, Homo sapien
aggtgcaaagcacctcgcatttattaggtctat

SEQ ID NO: 25019 - DNA, 33 bp, Homo sapien
ttgtaccctgaagaacaacaaagccatctctga

SEQ ID NO: 25020 - DNA, 33 bp, Homo sapien
ttgtaccctgaagaacgacaaagccatctctga

SEQ ID NO: 25021 - DNA, 33 bp, Homo sapien
actttaaatcaacaacaatcaggaaagacaaag

SEQ ID NO: 25022 - DNA, 33 bp, Homo sapien
actttaaatcaacaaccatcaggaaagacaaag

SEQ ID NO: 25023 - DNA, 33 bp, Homo sapien
taaacagttaaatgaaagcagaaatcaagacat

SEQ ID NO: 25024 - DNA, 33 bp, Homo sapien
taaacagttaaatgaaggcagaaatcaagacat

SEQ ID NO: 25025 - DNA, 33 bp, Homo sapien
aagcttcataaagtacaaagtctatctcccagt

SEQ ID NO: 25026 - DNA, 33 bp, Homo sapien
aagcttcataaagtacgaagtctatctcccagt

SEQ ID NO: 25027 - DNA, 33 bp, Homo sapien
tgatggttttatgaacaagagttgccttgcaca

SEQ ID NO: 25028 - DNA, 33 bp, Homo sapien
tgatggttttatgaacgagagttgccttgcaca

SEQ ID NO: 25029 - DNA, 33 bp, Homo sapien
tgaaaccagttccaaacctgtaaatcatgtttc

SEQ ID NO: 25030 - DNA, 33 bp, Homo sapien
tgaaaccagttccaaatctgtaaatcatgtttc

SEQ ID NO: 25031 - DNA, 33 bp, Homo sapien
cttaaaatagggcacacgtataggatccctctt

SEQ ID NO: 25032 - DNA, 33 bp, Homo sapien
cttaaaatagggcacaggtataggatccctctt

SEQ ID NO: 25033 - DNA, 33 bp, Homo sapien
caacttaaaaccagtcaattgcatctgaggtgt

SEQ ID NO: 25034 - DNA, 33 bp, Homo sapien
caacttaaaaccagtcgattgcatctgaggtgt

SEQ ID NO: 25035 - DNA, 33 bp, Homo sapien
ggtttaccaagtacacaatcatgtcactggtga

SEQ ID NO: 25036 - DNA, 33 bp, Homo sapien
ggtttaccaagtacacgatcatgtcactggtga

SEQ ID NO: 25037 - DNA, 33 bp, Homo sapien
tcatttgtctggaggcaaccatcttgttgagag

SEQ ID NO: 25038 - DNA, 33 bp, Homo sapien
tcatttgtctggaggcgaccatcttgttgagag

SEQ ID NO: 25039 - DNA, 33 bp, Homo sapien
ctgatttctggataccacacctgtttttctaca

SEQ ID NO: 25040 - DNA, 33 bp, Homo sapien
ctgatttctggataccgcacctgtttttctaca

SEQ ID NO: 25041 - DNA, 33 bp, Homo sapien
agggcattgaataccacgataaaggctttatac

SEQ ID NO: 25042 - DNA, 33 bp, Homo sapien
agggcattgaataccatgataaaggctttatac

SEQ ID NO: 25043 - DNA, 33 bp, Homo sapien
aactttctgctgccaacagcctaatgtaatagc

SEQ ID NO: 25044 - DNA, 33 bp, Homo sapien
aactttctgctgccaagagcctaatgtaatagc

SEQ ID NO: 25045 - DNA, 33 bp, Homo sapien
acacaagttattctccaactcacattaggtaac

SEQ ID NO: 25046 - DNA, 33 bp, Homo sapien
acacaagttattctccgactcacattaggtaac

SEQ ID NO: 25047 - DNA, 33 bp, Homo sapien
ccaactaaatgccagaaaatctcctgagaagta

SEQ ID NO: 25048 - DNA, 33 bp, Homo sapien
ccaactaaatgccagataatctcctgagaagta

SEQ ID NO: 25049 - DNA, 33 bp, Homo sapien
tatctgcagttagtcgaatccatgaatgtgaaa

SEQ ID NO: 25050 - DNA, 33 bp, Homo sapien
tatctgcagttagtcggatccatgaatgtgaaa

SEQ ID NO: 25051 - DNA, 33 bp, Homo sapien
gaggagatgtctcatccgaatacaaatggagaa

SEQ ID NO: 25052 - DNA, 33 bp, Homo sapien
gaggagatgtctcatctgaatacaaatggagaa

SEQ ID NO: 25053 - DNA, 33 bp, Homo sapien
ggaatttctttagtgaaagcagaagggagcagt

SEQ ID NO: 25054 - DNA, 33 bp, Homo sapien
ggaatttctttagtgagagcagaagggagcagt

SEQ ID NO: 25055 - DNA, 33 bp, Homo sapien
ttgaaattcagcactgacacttgtctactgtga

SEQ ID NO: 25056 - DNA, 33 bp, Homo sapien
ttgaaattcagcactgtcacttgtctactgtga

SEQ ID NO: 25057 - DNA, 33 bp, Homo sapien
atacagtgtttgcaaactaaaaaaataatgtat

SEQ ID NO: 25058 - DNA, 33 bp, Homo sapien
atacagtgtttgcaaattaaaaaaataatgtat

SEQ ID NO: 25059 - DNA, 33 bp, Homo sapien
caatggattgaagctgcactttagataaaataa

SEQ ID NO: 25060 - DNA, 33 bp, Homo sapien
caatggattgaagctgtactttagataaaataa

SEQ ID NO: 25061 - DNA, 33 bp, Homo sapien
catgccaacggcaaaaaagataactagaagaag

SEQ ID NO: 25062 - DNA, 33 bp, Homo sapien
catgccaacggcaaaagagataactagaagaag

SEQ ID NO: 25063 - DNA, 33 bp, Homo sapien
gagacaccaaaaaaaaatacagctagcctctaa

SEQ ID NO: 25064 - DNA, 33 bp, Homo sapien
gagacaccaaaaaaaagtacagctagcctctaa

SEQ ID NO: 25065 - DNA, 33 bp, Homo sapien
accatgtaggaaaggagagaggcagttcctcct

SEQ ID NO: 25066 - DNA, 33 bp, Homo sapien
accatgtaggaaaggatagaggcagttcctcct

SEQ ID NO: 25067 - DNA, 33 bp, Homo sapien
tgattgccttttatgaccttgattcctagaagc

SEQ ID NO: 25068 - DNA, 33 bp, Homo sapien
tgattgccttttatgatcttgattcctagaagc

SEQ ID NO: 25069 - DNA, 33 bp, Homo sapien
aagtatttcttgaccccatccatctctcactct

SEQ ID NO: 25070 - DNA, 33 bp, Homo sapien
aagtatttcttgaccctatccatctctcactct

SEQ ID NO: 25071 - DNA, 33 bp, Homo sapien
cattgaatgtccttacacactgtctactctgaa

SEQ ID NO: 25072 - DNA, 33 bp, Homo sapien
cattgaatgtccttacgcactgtctactctgaa

SEQ ID NO: 25073 - DNA, 33 bp, Homo sapien
ctgaggcccgttttccacttctgacctctagaa

SEQ ID NO: 25074 - DNA, 33 bp, Homo sapien
ctgaggcccgttttccgcttctgacctctagaa

SEQ ID NO: 25075 - DNA, 33 bp, Homo sapien
gtataaactctaaaccaataattttctaggtac

SEQ ID NO: 25076 - DNA, 33 bp, Homo sapien
gtataaactctaaacccataattttctaggtac

SEQ ID NO: 25077 - DNA, 33 bp, Homo sapien
gtcaaattacactgtacctctaagcctcagttt

SEQ ID NO: 25078 - DNA, 33 bp, Homo sapien
gtcaaattacactgtatctctaagcctcagttt

SEQ ID NO: 25079 - DNA, 33 bp, Homo sapien
actccattccttcttccctgctgaaacagccat

SEQ ID NO: 25080 - DNA, 33 bp, Homo sapien
actccattccttcttctctgctgaaacagccat

SEQ ID NO: 25081 - DNA, 33 bp, Homo sapien
gatctcaaattacttgacaaagatggactttta

SEQ ID NO: 25082 - DNA, 33 bp, Homo sapien
gatctcaaattacttggcaaagatggactttta

SEQ ID NO: 25083 - DNA, 33 bp, Homo sapien
cttaaactttgaaaaacggtcttctgcagactt

SEQ ID NO: 25084 - DNA, 33 bp, Homo sapien
cttaaactttgaaaaatggtcttctgcagactt

SEQ ID NO: 25085 - DNA, 33 bp, Homo sapien
tctgtgaaagaatccacaaaaaataaacacagg

SEQ ID NO: 25086 - DNA, 33 bp, Homo sapien
tctgtgaaagaatccataaaaaataaacacagg

SEQ ID NO: 25087 - DNA, 33 bp, Homo sapien
tgcctgtgaacatggaaaacattactaccttag

SEQ ID NO: 25088 - DNA, 33 bp, Homo sapien
tgcctgtgaacatggacaacattactaccttag

SEQ ID NO: 25089 - DNA, 33 bp, Homo sapien
caagccggaatctaggaagacaagatgattatt

SEQ ID NO: 25090 - DNA, 33 bp, Homo sapien
caagccggaatctagggagacaagatgattatt

SEQ ID NO: 25091 - DNA, 33 bp, Homo sapien
aatctggcactggttccaccctcaagtagctta

SEQ ID NO: 25092 - DNA, 33 bp, Homo sapien
aatctggcactggttctaccctcaagtagctta

SEQ ID NO: 25093 - DNA, 33 bp, Homo sapien
aggcgttctcttactaacaaaagtcagagctca

SEQ ID NO: 25094 - DNA, 33 bp, Homo sapien
aggcgttctcttactagcaaaagtcagagctca

SEQ ID NO: 25095 - DNA, 33 bp, Homo sapien
actgtagaatcaccaaaaccatgttgcatttta

SEQ ID NO: 25096 - DNA, 33 bp, Homo sapien
actgtagaatcaccaacaccatgttgcatttta

SEQ ID NO: 25097 - DNA, 33 bp, Homo sapien
ggccatagagctcccaagaatttatgtcttttg

SEQ ID NO: 25098 - DNA, 33 bp, Homo sapien
ggccatagagctcccaggaatttatgtcttttg

SEQ ID NO: 25099 - DNA, 33 bp, Homo sapien
cagctcttatgttccaaatttttccactgaaac

SEQ ID NO: 25100 - DNA, 33 bp, Homo sapien
cagctcttatgttccatatttttccactgaaac

SEQ ID NO: 25101 - DNA, 33 bp, Homo sapien
aaaggaacacttttacactactggcgagaatgt

SEQ ID NO: 25102 - DNA, 33 bp, Homo sapien
aaaggaacacttttacgctactggcgagaatgt

SEQ ID NO: 25103 - DNA, 33 bp, Homo sapien
tcacagacaattctccacttcacgtctgccctt

SEQ ID NO: 25104 - DNA, 33 bp, Homo sapien
tcacagacaattctccgcttcacgtctgccctt

SEQ ID NO: 25105 - DNA, 33 bp, Homo sapien
tttaatgagggagctaacatagtctgaagcttc

SEQ ID NO: 25106 - DNA, 33 bp, Homo sapien
tttaatgagggagctagcatagtctgaagcttc

SEQ ID NO: 25107 - DNA, 33 bp, Homo sapien
attactagattgagcagtagttttatttttaat

SEQ ID NO: 25108 - DNA, 33 bp, Homo sapien
attactagattgagcattagttttatttttaat

SEQ ID NO: 25109 - DNA, 33 bp, Homo sapien
ccttaaagtttcaaaacgatctcctttgagttg

SEQ ID NO: 25110 - DNA, 33 bp, Homo sapien
ccttaaagtttcaaaatgatctcctttgagttg

SEQ ID NO: 25111 - DNA, 33 bp, Homo sapien
tgtggttttcttgggaagactgacctgatttgg

SEQ ID NO: 25112 - DNA, 33 bp, Homo sapien
tgtggttttcttgggatgactgacctgatttgg

SEQ ID NO: 25113 - DNA, 33 bp, Homo sapien
ctacagcaacgcttcacattcatggggactttc

SEQ ID NO: 25114 - DNA, 33 bp, Homo sapien
ctacagcaacgcttcatattcatggggactttc

SEQ ID NO: 25115 - DNA, 33 bp, Homo sapien
tatgtaatatgatgtacgaaattctaggtagta

SEQ ID NO: 25116 - DNA, 33 bp, Homo sapien
tatgtaatatgatgtatgaaattctaggtagta

SEQ ID NO: 25117 - DNA, 33 bp, Homo sapien
aactaggagctttcagaccagattttattcata

SEQ ID NO: 25118 - DNA, 33 bp, Homo sapien
aactaggagctttcaggccagattttattcata

SEQ ID NO: 25119 - DNA, 33 bp, Homo sapien
acctacagttgcctcacgacctatggaagagca

SEQ ID NO: 25120 - DNA, 33 bp, Homo sapien
acctacagttgcctcatgacctatggaagagca

SEQ ID NO: 25121 - DNA, 33 bp, Homo sapien
tgtattagtctgttctcaccttgttcataaaga

SEQ ID NO: 25122 - DNA, 33 bp, Homo sapien
tgtattagtctgttcttaccttgttcataaaga

SEQ ID NO: 25123 - DNA, 33 bp, Homo sapien
tggaaaagacagtcacaaagcagtttctatgac

SEQ ID NO: 25124 - DNA, 33 bp, Homo sapien
tggaaaagacagtcacgaagcagtttctatgac

SEQ ID NO: 25125 - DNA, 33 bp, Homo sapien
tcacatcattgcttaacacaggagtgatgcaga

SEQ ID NO: 25126 - DNA, 33 bp, Homo sapien
tcacatcattgcttaatacaggagtgatgcaga

SEQ ID NO: 25127 - DNA, 33 bp, Homo sapien
ttaggatacaagaaagcagttgatgggagggaa

SEQ ID NO: 25128 - DNA, 33 bp, Homo sapien
ttaggatacaagaaagtagttgatgggagggaa

SEQ ID NO: 25129 - DNA, 33 bp, Homo sapien
tgtttctatttctgtaaaattggtgataatatc

SEQ ID NO: 25130 - DNA, 33 bp, Homo sapien
tgtttctatttctgtagaattggtgataatatc

SEQ ID NO: 25131 - DNA, 33 bp, Homo sapien
atggtttcaattaatcactgtatagcatgataa

SEQ ID NO: 25132 - DNA, 33 bp, Homo sapien
atggtttcaattaatcgctgtatagcatgataa

SEQ ID NO: 25133 - DNA, 33 bp, Homo sapien
tgtgaggtaatgaaagacctacttgttgagatg

SEQ ID NO: 25134 - DNA, 33 bp, Homo sapien
tgtgaggtaatgaaaggcctacttgttgagatg

SEQ ID NO: 25135 - DNA, 33 bp, Homo sapien
gtcacctgaaggctaaggggggagagagtttca

SEQ ID NO: 25136 - DNA, 33 bp, Homo sapien
gtcacctgaaggctaatgggggagagagtttca

SEQ ID NO: 25137 - DNA, 33 bp, Homo sapien
gttattacattacatacaactgtagtacctgtc

SEQ ID NO: 25138 - DNA, 33 bp, Homo sapien
gttattacattacatataactgtagtacctgtc

SEQ ID NO: 25139 - DNA, 33 bp, Homo sapien
cttgcttaagactgtcacagaatcagaagataa

SEQ ID NO: 25140 - DNA, 33 bp, Homo sapien
cttgcttaagactgtcgcagaatcagaagataa

SEQ ID NO: 25141 - DNA, 33 bp, Homo sapien
ttatctcttgtctcaactgggataacagccccc

SEQ ID NO: 25142 - DNA, 33 bp, Homo sapien
ttatctcttgtctcaattgggataacagccccc

SEQ ID NO: 25143 - DNA, 33 bp, Homo sapien
tctgattaagccttcacagggtccaccaggagg

SEQ ID NO: 25144 - DNA, 33 bp, Homo sapien
tctgattaagccttcatagggtccaccaggagg

SEQ ID NO: 25145 - DNA, 33 bp, Homo sapien
attcaaataactagggaatgatttgtgctttct

SEQ ID NO: 25146 - DNA, 33 bp, Homo sapien
attcaaataactaggggatgatttgtgctttct

SEQ ID NO: 25147 - DNA, 33 bp, Homo sapien
attatttgtttctggaacaacacattttatttg

SEQ ID NO: 25148 - DNA, 33 bp, Homo sapien
attatttgtttctggagcaacacattttatttg

SEQ ID NO: 25149 - DNA, 33 bp, Homo sapien
attcttgccttgaaaaatattcatgagtttaag

SEQ ID NO: 25150 - DNA, 33 bp, Homo sapien
attcttgccttgaaaagtattcatgagtttaag

SEQ ID NO: 25151 - DNA, 33 bp, Homo sapien
attattaattatcctcaaaaagactgtcaggtt

SEQ ID NO: 25152 - DNA, 33 bp, Homo sapien
attattaattatcctcgaaaagactgtcaggtt

SEQ ID NO: 25153 - DNA, 33 bp, Homo sapien
gcacagagagaaaaaaatgctgagaaaagatta

SEQ ID NO: 25154 - DNA, 33 bp, Homo sapien
gcacagagagaaaaaattgctgagaaaagatta

SEQ ID NO: 25155 - DNA, 33 bp, Homo sapien
tattgtgtttctaacaatcacatttgcctaaaa

SEQ ID NO: 25156 - DNA, 33 bp, Homo sapien
tattgtgtttctaacagtcacatttgcctaaaa

SEQ ID NO: 25157 - DNA, 33 bp, Homo sapien
actaaaattgaaatcccagagagctttgtgaaa

SEQ ID NO: 25158 - DNA, 33 bp, Homo sapien
actaaaattgaaatcctagagagctttgtgaaa

SEQ ID NO: 25159 - DNA, 33 bp, Homo sapien
ccagggaaaatgtggacgatgataggcaaaatt

SEQ ID NO: 25160 - DNA, 33 bp, Homo sapien
ccagggaaaatgtggatgatgataggcaaaatt

SEQ ID NO: 25161 - DNA, 33 bp, Homo sapien
tggaggaacttactaaggcctgttttttcagat

SEQ ID NO: 25162 - DNA, 33 bp, Homo sapien
tggaggaacttactaatgcctgttttttcagat

SEQ ID NO: 25163 - DNA, 33 bp, Homo sapien
gagctagagagctagactacagcctttgttttt

SEQ ID NO: 25164 - DNA, 33 bp, Homo sapien
gagctagagagctagagtacagcctttgttttt

SEQ ID NO: 25165 - DNA, 33 bp, Homo sapien
ttcatagattcctgtacaagttatgcttttagg

SEQ ID NO: 25166 - DNA, 33 bp, Homo sapien
ttcatagattcctgtataagttatgcttttagg

SEQ ID NO: 25167 - DNA, 33 bp, Homo sapien
ccccagtcttgtaagccaaaagtggaccagagt

SEQ ID NO: 25168 - DNA, 33 bp, Homo sapien
ccccagtcttgtaagctaaaagtggaccagagt

SEQ ID NO: 25169 - DNA, 33 bp, Homo sapien
tgatctcagcctacaccgattcaaatacaatat

SEQ ID NO: 25170 - DNA, 33 bp, Homo sapien
tgatctcagcctacacggattcaaatacaatat

SEQ ID NO: 25171 - DNA, 33 bp, Homo sapien
caaaaacagatacatcaaccaatgaaacagaat

SEQ ID NO: 25172 - DNA, 33 bp, Homo sapien
caaaaacagatacatcgaccaatgaaacagaat

SEQ ID NO: 25173 - DNA, 33 bp, Homo sapien
ttgttctgtgtcctgaaggtttggttttatgat

SEQ ID NO: 25174 - DNA, 33 bp, Homo sapien
ttgttctgtgtcctgagggtttggttttatgat

SEQ ID NO: 25175 - DNA, 33 bp, Homo sapien
ttttcatgcttattaccagactcagatatatgt

SEQ ID NO: 25176 - DNA, 33 bp, Homo sapien
ttttcatgcttattactagactcagatatatgt

SEQ ID NO: 25177 - DNA, 33 bp, Homo sapien
agcctagaacaatgacagtaaacaaggaaggaa

SEQ ID NO: 25178 - DNA, 33 bp, Homo sapien
agcctagaacaatgacggtaaacaaggaaggaa

SEQ ID NO: 25179 - DNA, 33 bp, Homo sapien
tagtaggtaccaggagaaaaatggctccagatt

SEQ ID NO: 25180 - DNA, 33 bp, Homo sapien
tagtaggtaccaggaggaaaatggctccagatt

SEQ ID NO: 25181 - DNA, 33 bp, Homo sapien
aaataaagaaatcacactcagacataaaaatgc

SEQ ID NO: 25182 - DNA, 33 bp, Homo sapien
aaataaagaaatcacattcagacataaaaatgc

SEQ ID NO: 25183 - DNA, 33 bp, Homo sapien
tgtgaggacaacattacataatatggtggagtc

SEQ ID NO: 25184 - DNA, 33 bp, Homo sapien
tgtgaggacaacattagataatatggtggagtc

SEQ ID NO: 25185 - DNA, 33 bp, Homo sapien
aactagtttaggcaacagaagtcactggtggaa

SEQ ID NO: 25186 - DNA, 33 bp, Homo sapien
aactagtttaggcaacggaagtcactggtggaa

SEQ ID NO: 25187 - DNA, 33 bp, Homo sapien
ccttatcagcatttggaatacttttgtttttcc

SEQ ID NO: 25188 - DNA, 33 bp, Homo sapien
ccttatcagcatttggtatacttttgtttttcc

SEQ ID NO: 25189 - DNA, 33 bp, Homo sapien
ttgtattgaatcagcactattttcctaaaatgt

SEQ ID NO: 25190 - DNA, 33 bp, Homo sapien
ttgtattgaatcagcattattttcctaaaatgt

SEQ ID NO: 25191 - DNA, 33 bp, Homo sapien
gagcaataaaatcacacatgagtactaccaaat

SEQ ID NO: 25192 - DNA, 33 bp, Homo sapien
gagcaataaaatcacagatgagtactaccaaat

SEQ ID NO: 25193 - DNA, 33 bp, Homo sapien
gtatctgtggtatccaataaagtagctaccatc

SEQ ID NO: 25194 - DNA, 33 bp, Homo sapien
gtatctgtggtatccagtaaagtagctaccatc

SEQ ID NO: 25195 - DNA, 33 bp, Homo sapien
agagcttacttggtaccgaacattgtactgttt

SEQ ID NO: 25196 - DNA, 33 bp, Homo sapien
agagcttacttggtactgaacattgtactgttt

SEQ ID NO: 25197 - DNA, 33 bp, Homo sapien
gataccaccaaagtgacaggcagaattccatct

SEQ ID NO: 25198 - DNA, 33 bp, Homo sapien
gataccaccaaagtgagaggcagaattccatct

SEQ ID NO: 25199 - DNA, 33 bp, Homo sapien
caagaagcaaaggatcagagttagatgttaaaa

SEQ ID NO: 25200 - DNA, 33 bp, Homo sapien
caagaagcaaaggatcggagttagatgttaaaa

SEQ ID NO: 25201 - DNA, 33 bp, Homo sapien
gtgactagagagtaaacagacaaaggaatatag

SEQ ID NO: 25202 - DNA, 33 bp, Homo sapien
gtgactagagagtaaatagacaaaggaatatag

SEQ ID NO: 25203 - DNA, 33 bp, Homo sapien
aaaaatgagcacaataacaggataagtctcttg

SEQ ID NO: 25204 - DNA, 33 bp, Homo sapien
aaaaatgagcacaataccaggataagtctcttg

SEQ ID NO: 25205 - DNA, 33 bp, Homo sapien
tgttggtttcaggaaagatcattgtcttatcag

SEQ ID NO: 25206 - DNA, 33 bp, Homo sapien
tgttggtttcaggaaatatcattgtcttatcag

SEQ ID NO: 25207 - DNA, 33 bp, Homo sapien
catgatccagcctcagcataaagctttgcctga

SEQ ID NO: 25208 - DNA, 33 bp, Homo sapien
catgatccagcctcaggataaagctttgcctga

SEQ ID NO: 25209 - DNA, 33 bp, Homo sapien
tttgatgcaggtaaaacattcaaatcaagatct

SEQ ID NO: 25210 - DNA, 33 bp, Homo sapien
tttgatgcaggtaaaagattcaaatcaagatct

SEQ ID NO: 25211 - DNA, 33 bp, Homo sapien
aagctttggtcaagtaggtgaatggtggttcca

SEQ ID NO: 25212 - DNA, 33 bp, Homo sapien
aagctttggtcaagtatgtgaatggtggttcca

SEQ ID NO: 25213 - DNA, 33 bp, Homo sapien
gagttgtgtagattaaataagaaaacatataaa

SEQ ID NO: 25214 - DNA, 33 bp, Homo sapien
gagttgtgtagattaagtaagaaaacatataaa

SEQ ID NO: 25215 - DNA, 33 bp, Homo sapien
gtgcaggaacaatgagaaattccactgttacca

SEQ ID NO: 25216 - DNA, 33 bp, Homo sapien
gtgcaggaacaatgaggaattccactgttacca

SEQ ID NO: 25217 - DNA, 33 bp, Homo sapien
tcagtaggtgagaacaactcattccaatttgac

SEQ ID NO: 25218 - DNA, 33 bp, Homo sapien
tcagtaggtgagaacagctcattccaatttgac

SEQ ID NO: 25219 - DNA, 33 bp, Homo sapien
tttgaactggctataaattagtgttgaaaggag

SEQ ID NO: 25220 - DNA, 33 bp, Homo sapien
tttgaactggctataatttagtgttgaaaggag

SEQ ID NO: 25221 - DNA, 33 bp, Homo sapien
ctatcctaaggagacaaaatgctagctaaagct

SEQ ID NO: 25222 - DNA, 33 bp, Homo sapien
ctatcctaaggagacacaatgctagctaaagct

SEQ ID NO: 25223 - DNA, 33 bp, Homo sapien
accaagaggcaaagcccaggccaaaaatggaag

SEQ ID NO: 25224 - DNA, 33 bp, Homo sapien
accaagaggcaaagcctaggccaaaaatggaag

SEQ ID NO: 25225 - DNA, 33 bp, Homo sapien
aatttcctatgcagagcacatttttttctctgt

SEQ ID NO: 25226 - DNA, 33 bp, Homo sapien
aatttcctatgcagagtacatttttttctctgt

SEQ ID NO: 25227 - DNA, 33 bp, Homo sapien
tcccctgtaactagaacagtgcttagcaggaag

SEQ ID NO: 25228 - DNA, 33 bp, Homo sapien
tcccctgtaactagaagagtgcttagcaggaag

SEQ ID NO: 25229 - DNA, 33 bp, Homo sapien
ctgctctcagtaagacaaggagtttgcattttc

SEQ ID NO: 25230 - DNA, 33 bp, Homo sapien
ctgctctcagtaagacgaggagtttgcattttc

SEQ ID NO: 25231 - DNA, 33 bp, Homo sapien
gctcccctaccacatccattggcagaggaatgc

SEQ ID NO: 25232 - DNA, 33 bp, Homo sapien
gctcccctaccacatctattggcagaggaatgc

SEQ ID NO: 25233 - DNA, 33 bp, Homo sapien
acaagaacatgtagaaaatgctagacaggcaag

SEQ ID NO: 25234 - DNA, 33 bp, Homo sapien
acaagaacatgtagaagatgctagacaggcaag

SEQ ID NO: 25235 - DNA, 33 bp, Homo sapien
gaggtgtccagccacaagggtatttggaactgt

SEQ ID NO: 25236 - DNA, 33 bp, Homo sapien
gaggtgtccagccacaggggtatttggaactgt

SEQ ID NO: 25237 - DNA, 33 bp, Homo sapien
cttcaatgaggagctaaaagttgtatgtagtca

SEQ ID NO: 25238 - DNA, 33 bp, Homo sapien
cttcaatgaggagctagaagttgtatgtagtca

SEQ ID NO: 25239 - DNA, 33 bp, Homo sapien
cttctctcttgtggaaattatacttcaatgagg

SEQ ID NO: 25240 - DNA, 33 bp, Homo sapien
cttctctcttgtggaacttatacttcaatgagg

SEQ ID NO: 25241 - DNA, 33 bp, Homo sapien
gctcacagtcacctaaccacttgatctgaattc

SEQ ID NO: 25242 - DNA, 33 bp, Homo sapien
gctcacagtcacctaatcacttgatctgaattc

SEQ ID NO: 25243 - DNA, 33 bp, Homo sapien
ggcactctaagattggaactcacaaggggacgc

SEQ ID NO: 25244 - DNA, 33 bp, Homo sapien
ggcactctaagattgggactcacaaggggacgc

SEQ ID NO: 25245 - DNA, 33 bp, Homo sapien
ccaacagatagctttgaagggtcaagttgttct

SEQ ID NO: 25246 - DNA, 33 bp, Homo sapien
ccaacagatagctttggagggtcaagttgttct

SEQ ID NO: 25247 - DNA, 33 bp, Homo sapien
aactcacagataaaagcatcaggcattgaaact

SEQ ID NO: 25248 - DNA, 33 bp, Homo sapien
aactcacagataaaagtatcaggcattgaaact

SEQ ID NO: 25249 - DNA, 33 bp, Homo sapien
ataatatgtacaatgaactccatgaaacgagtt

SEQ ID NO: 25250 - DNA, 33 bp, Homo sapien
ataatatgtacaatgagctccatgaaacgagtt

SEQ ID NO: 25251 - DNA, 33 bp, Homo sapien
tatcgtttcacctaaggaaaaccaggagaacac

SEQ ID NO: 25252 - DNA, 33 bp, Homo sapien
tatcgtttcacctaagtaaaaccaggagaacac

SEQ ID NO: 25253 - DNA, 33 bp, Homo sapien
attcagtagttcttggaatttttgtgctgaaag

SEQ ID NO: 25254 - DNA, 33 bp, Homo sapien
attcagtagttcttgggatttttgtgctgaaag

SEQ ID NO: 25255 - DNA, 33 bp, Homo sapien
tctctttcataatgagaaaaaacttcatgtaaa

SEQ ID NO: 25256 - DNA, 33 bp, Homo sapien
tctctttcataatgaggaaaaacttcatgtaaa

SEQ ID NO: 25257 - DNA, 33 bp, Homo sapien
ctgaagcctacatgacaaaaaagaagtataagc

SEQ ID NO: 25258 - DNA, 33 bp, Homo sapien
ctgaagcctacatgacgaaaaagaagtataagc

SEQ ID NO: 25259 - DNA, 33 bp, Homo sapien
gatgtgaaaggttaagaatggcttccaaaacca

SEQ ID NO: 25260 - DNA, 33 bp, Homo sapien
gatgtgaaaggttaaggatggcttccaaaacca

SEQ ID NO: 25261 - DNA, 33 bp, Homo sapien
cactcaggtatactaacaagagtcacacgggca

SEQ ID NO: 25262 - DNA, 33 bp, Homo sapien
cactcaggtatactaagaagagtcacacgggca

SEQ ID NO: 25263 - DNA, 33 bp, Homo sapien
aaggaaatctggtgtacgagaaagcgtcttaca

SEQ ID NO: 25264 - DNA, 33 bp, Homo sapien
aaggaaatctggtgtatgagaaagcgtcttaca

SEQ ID NO: 25265 - DNA, 33 bp, Homo sapien
aacacgaagagggtaacggcagatatgggaact

SEQ ID NO: 25266 - DNA, 33 bp, Homo sapien
aacacgaagagggtaatggcagatatgggaact

SEQ ID NO: 25267 - DNA, 33 bp, Homo sapien
tgggacaaggtatttgcaagctatgcatccaac

SEQ ID NO: 25268 - DNA, 33 bp, Homo sapien
tgggacaaggtatttgtaagctatgcatccaac

SEQ ID NO: 25269 - DNA, 33 bp, Homo sapien
gattcaaggctcccagaactctgggtgtacatg

SEQ ID NO: 25270 - DNA, 33 bp, Homo sapien
gattcaaggctcccaggactctgggtgtacatg

SEQ ID NO: 25271 - DNA, 33 bp, Homo sapien
ccccactagtgtaatagatcattatccaaaact

SEQ ID NO: 25272 - DNA, 33 bp, Homo sapien
ccccactagtgtaatatatcattatccaaaact

SEQ ID NO: 25273 - DNA, 33 bp, Homo sapien
cctttgctacatacaacggcatgaattaatctg

SEQ ID NO: 25274 - DNA, 33 bp, Homo sapien
cctttgctacatacaatggcatgaattaatctg

SEQ ID NO: 25275 - DNA, 33 bp, Homo sapien
ctgtgtcctacagttacgtataaagctgaattt

SEQ ID NO: 25276 - DNA, 33 bp, Homo sapien
ctgtgtcctacagttatgtataaagctgaattt

SEQ ID NO: 25277 - DNA, 33 bp, Homo sapien
ggaattgtttacttacactagggacaacaacac

SEQ ID NO: 25278 - DNA, 33 bp, Homo sapien
ggaattgtttacttacgctagggacaacaacac

SEQ ID NO: 25279 - DNA, 33 bp, Homo sapien
tgtcttcatatgtcccaagattaagaacacctt

SEQ ID NO: 25280 - DNA, 33 bp, Homo sapien
tgtcttcatatgtcccgagattaagaacacctt

SEQ ID NO: 25281 - DNA, 33 bp, Homo sapien
accatgagaaaatagacgtcaacttatgttact

SEQ ID NO: 25282 - DNA, 33 bp, Homo sapien
accatgagaaaatagatgtcaacttatgttact

SEQ ID NO: 25283 - DNA, 33 bp, Homo sapien
ctttattgtgttatctcactcctaacatgggaa

SEQ ID NO: 25284 - DNA, 33 bp, Homo sapien
ctttattgtgttatctgactcctaacatgggaa

SEQ ID NO: 25285 - DNA, 33 bp, Homo sapien
gtggcaggggcagagcacaaatctacttcttga

SEQ ID NO: 25286 - DNA, 33 bp, Homo sapien
gtggcaggggcagagcgcaaatctacttcttga

SEQ ID NO: 25287 - DNA, 33 bp, Homo sapien
cattgaacaagtcacaaaactccacacaatccc

SEQ ID NO: 25288 - DNA, 33 bp, Homo sapien
cattgaacaagtcacataactccacacaatccc

SEQ ID NO: 25289 - DNA, 33 bp, Homo sapien
agatgatgaatgcaacggataaaatgtgtgggt

SEQ ID NO: 25290 - DNA, 33 bp, Homo sapien
agatgatgaatgcaactgataaaatgtgtgggt

SEQ ID NO: 25291 - DNA, 33 bp, Homo sapien
gagcgctgaaagctcagcagaattcagaggaca

SEQ ID NO: 25292 - DNA, 33 bp, Homo sapien
gagcgctgaaagctcatcagaattcagaggaca

SEQ ID NO: 25293 - DNA, 33 bp, Homo sapien
caacaagtgtgcaatgccaacctgagagagctg

SEQ ID NO: 25294 - DNA, 33 bp, Homo sapien
caacaagtgtgcaatgtcaacctgagagagctg

SEQ ID NO: 25295 - DNA, 33 bp, Homo sapien
ttttaatattagagtgaaaaacataaagacaga

SEQ ID NO: 25296 - DNA, 33 bp, Homo sapien
ttttaatattagagtgtaaaacataaagacaga

SEQ ID NO: 25297 - DNA, 33 bp, Homo sapien
aagaagtagtgacgtaaatggtagggggaaggg

SEQ ID NO: 25298 - DNA, 33 bp, Homo sapien
aagaagtagtgacgtagatggtagggggaaggg

SEQ ID NO: 25299 - DNA, 33 bp, Homo sapien
gcagctaagccatgcacaaaaatatccaataaa

SEQ ID NO: 25300 - DNA, 33 bp, Homo sapien
gcagctaagccatgcagaaaaatatccaataaa

SEQ ID NO: 25301 - DNA, 33 bp, Homo sapien
agtaaaacctgagtaacagtatcacggcattta

SEQ ID NO: 25302 - DNA, 33 bp, Homo sapien
agtaaaacctgagtaagagtatcacggcattta

SEQ ID NO: 25303 - DNA, 33 bp, Homo sapien
ctcaaatttcttaaaacccataaatctaagtat

SEQ ID NO: 25304 - DNA, 33 bp, Homo sapien
ctcaaatttcttaaaatccataaatctaagtat

SEQ ID NO: 25305 - DNA, 33 bp, Homo sapien
gattacgtctacctgaaatttttaactctcata

SEQ ID NO: 25306 - DNA, 33 bp, Homo sapien
gattacgtctacctgagatttttaactctcata

SEQ ID NO: 25307 - DNA, 33 bp, Homo sapien
actcactaaagcatgaaggctgtcctatgatta

SEQ ID NO: 25308 - DNA, 33 bp, Homo sapien
actcactaaagcatgacggctgtcctatgatta

SEQ ID NO: 25309 - DNA, 33 bp, Homo sapien
attactaagttaaagaagccaatctgaaaaaaa

SEQ ID NO: 25310 - DNA, 33 bp, Homo sapien
attactaagttaaagaggccaatctgaaaaaaa

SEQ ID NO: 25311 - DNA, 33 bp, Homo sapien
aaaacttgtataaagcaaatgatgactcatatt

SEQ ID NO: 25312 - DNA, 33 bp, Homo sapien
aaaacttgtataaagccaatgatgactcatatt

SEQ ID NO: 25313 - DNA, 33 bp, Homo sapien
tttactaatatttggcacacctgtaaggccagt

SEQ ID NO: 25314 - DNA, 33 bp, Homo sapien
tttactaatatttggctcacctgtaaggccagt

SEQ ID NO: 25315 - DNA, 33 bp, Homo sapien
aagtctttcaagggaacaaactattattctgat

SEQ ID NO: 25316 - DNA, 33 bp, Homo sapien
aagtctttcaagggaagaaactattattctgat

SEQ ID NO: 25317 - DNA, 33 bp, Homo sapien
taatagataatgaataaacaaaccattcaaaga

SEQ ID NO: 25318 - DNA, 33 bp, Homo sapien
taatagataatgaatacacaaaccattcaaaga

SEQ ID NO: 25319 - DNA, 33 bp, Homo sapien
aaaaactggtatagtcactgtgttactttctgc

SEQ ID NO: 25320 - DNA, 33 bp, Homo sapien
aaaaactggtatagtccctgtgttactttctgc

SEQ ID NO: 25321 - DNA, 33 bp, Homo sapien
gaacagaagtcttcaacgtgcagtaaaccagat

SEQ ID NO: 25322 - DNA, 33 bp, Homo sapien
gaacagaagtcttcaatgtgcagtaaaccagat

SEQ ID NO: 25323 - DNA, 33 bp, Homo sapien
gttttcagctcatatagagtggagaaaagattt

SEQ ID NO: 25324 - DNA, 33 bp, Homo sapien
gttttcagctcatatatagtggagaaaagattt

SEQ ID NO: 25325 - DNA, 33 bp, Homo sapien
aaggagccaaagtgtacgaaaaagcaattatta

SEQ ID NO: 25326 - DNA, 33 bp, Homo sapien
aaggagccaaagtgtatgaaaaagcaattatta

SEQ ID NO: 25327 - DNA, 33 bp, Homo sapien
taatccagacttttcaaacccaatgcagagctc

SEQ ID NO: 25328 - DNA, 33 bp, Homo sapien
taatccagacttttcagacccaatgcagagctc

SEQ ID NO: 25329 - DNA, 33 bp, Homo sapien
atgtaaaccagatatacaagccatgactttgct

SEQ ID NO: 25330 - DNA, 33 bp, Homo sapien
atgtaaaccagatatataagccatgactttgct

SEQ ID NO: 25331 - DNA, 33 bp, Homo sapien
ctacccagaaaagtgacggtgaattagaaatat

SEQ ID NO: 25332 - DNA, 33 bp, Homo sapien
ctacccagaaaagtgagggtgaattagaaatat

SEQ ID NO: 25333 - DNA, 33 bp, Homo sapien
gccgcattagattctcacaggaacacaaatcct

SEQ ID NO: 25334 - DNA, 33 bp, Homo sapien
gccgcattagattctcgcaggaacacaaatcct

SEQ ID NO: 25335 - DNA, 33 bp, Homo sapien
gtgtattatttccaccactagccagtttctctc

SEQ ID NO: 25336 - DNA, 33 bp, Homo sapien
gtgtattatttccaccgctagccagtttctctc

SEQ ID NO: 25337 - DNA, 33 bp, Homo sapien
tctcagtcagaatggcaattatcaaagtcaaga

SEQ ID NO: 25338 - DNA, 33 bp, Homo sapien
tctcagtcagaatggcgattatcaaagtcaaga

SEQ ID NO: 25339 - DNA, 33 bp, Homo sapien
ttgttttgttttaaggacagctacctcttttct

SEQ ID NO: 25340 - DNA, 33 bp, Homo sapien
ttgttttgttttaaggtcagctacctcttttct

SEQ ID NO: 25341 - DNA, 33 bp, Homo sapien
tgatcagaagaacaccagatagtaactatttaa

SEQ ID NO: 25342 - DNA, 33 bp, Homo sapien
tgatcagaagaacaccggatagtaactatttaa

SEQ ID NO: 25343 - DNA, 33 bp, Homo sapien
agaagaataagtggaaagattcattcattgaaa

SEQ ID NO: 25344 - DNA, 33 bp, Homo sapien
agaagaataagtggaacgattcattcattgaaa

SEQ ID NO: 25345 - DNA, 33 bp, Homo sapien
gagaagaaggaattgaaggaaactgtgctaatg

SEQ ID NO: 25346 - DNA, 33 bp, Homo sapien
gagaagaaggaattgagggaaactgtgctaatg

SEQ ID NO: 25347 - DNA, 33 bp, Homo sapien
atttatccgtgtataactagaacattgacagaa

SEQ ID NO: 25348 - DNA, 33 bp, Homo sapien
atttatccgtgtataattagaacattgacagaa

SEQ ID NO: 25349 - DNA, 33 bp, Homo sapien
ctcagctctctttacccaatcttctcactccag

SEQ ID NO: 25350 - DNA, 33 bp, Homo sapien
ctcagctctctttacctaatcttctcactccag

SEQ ID NO: 25351 - DNA, 33 bp, Homo sapien
ggcatggcaagggaacaaatggttaagcatcca

SEQ ID NO: 25352 - DNA, 33 bp, Homo sapien
ggcatggcaagggaaccaatggttaagcatcca

SEQ ID NO: 25353 - DNA, 33 bp, Homo sapien
aaattcaatatgaagccccaagaggcaggtaat

SEQ ID NO: 25354 - DNA, 33 bp, Homo sapien
aaattcaatatgaagctccaagaggcaggtaat

SEQ ID NO: 25355 - DNA, 33 bp, Homo sapien
cttcatgcacgtgtaacaaaatgttaaaactag

SEQ ID NO: 25356 - DNA, 33 bp, Homo sapien
cttcatgcacgtgtaataaaatgttaaaactag

SEQ ID NO: 25357 - DNA, 33 bp, Homo sapien
gtttgacccacttgtgaactatcttatagattc

SEQ ID NO: 25358 - DNA, 33 bp, Homo sapien
gtttgacccacttgtgtactatcttatagattc

SEQ ID NO: 25359 - DNA, 33 bp, Homo sapien
atttgggaagggtttacacaagttcctcttcag

SEQ ID NO: 25360 - DNA, 33 bp, Homo sapien
atttgggaagggtttatacaagttcctcttcag

SEQ ID NO: 25361 - DNA, 33 bp, Homo sapien
tgattttaaggtgttacgggacactgactggct

SEQ ID NO: 25362 - DNA, 33 bp, Homo sapien
tgattttaaggtgttatgggacactgactggct

SEQ ID NO: 25363 - DNA, 33 bp, Homo sapien
cccattacaagctctcaacacactaaacaaatt

SEQ ID NO: 25364 - DNA, 33 bp, Homo sapien
cccattacaagctctcgacacactaaacaaatt

SEQ ID NO: 25365 - DNA, 33 bp, Homo sapien
taaagacaaacaccagaagcataataaactgtt

SEQ ID NO: 25366 - DNA, 33 bp, Homo sapien
taaagacaaacaccaggagcataataaactgtt

SEQ ID NO: 25367 - DNA, 33 bp, Homo sapien
acatatagataccttcacaacctatcccaccta

SEQ ID NO: 25368 - DNA, 33 bp, Homo sapien
acatatagataccttcgcaacctatcccaccta

SEQ ID NO: 25369 - DNA, 33 bp, Homo sapien
attttgatggattggaacaaagccctcacacat

SEQ ID NO: 25370 - DNA, 33 bp, Homo sapien
attttgatggattggagcaaagccctcacacat

SEQ ID NO: 25371 - DNA, 33 bp, Homo sapien
tcgcttactgtcaaaacaccaccggtttctact

SEQ ID NO: 25372 - DNA, 33 bp, Homo sapien
tcgcttactgtcaaaataccaccggtttctact

SEQ ID NO: 25373 - DNA, 33 bp, Homo sapien
tggaattttctagttaactttatgccaattatt

SEQ ID NO: 25374 - DNA, 33 bp, Homo sapien
tggaattttctagttacctttatgccaattatt

SEQ ID NO: 25375 - DNA, 33 bp, Homo sapien
tatacggaagacatccaaagttgtttgctatta

SEQ ID NO: 25376 - DNA, 33 bp, Homo sapien
tatacggaagacatccgaagttgtttgctatta

SEQ ID NO: 25377 - DNA, 33 bp, Homo sapien
caaaaagaagaagttacagatctggctatataa

SEQ ID NO: 25378 - DNA, 33 bp, Homo sapien
caaaaagaagaagttatagatctggctatataa

SEQ ID NO: 25379 - DNA, 33 bp, Homo sapien
gcgtgtaaagactgaggagtagtcagaaagcaa

SEQ ID NO: 25380 - DNA, 33 bp, Homo sapien
gcgtgtaaagactgagtagtagtcagaaagcaa

SEQ ID NO: 25381 - DNA, 33 bp, Homo sapien
acttaaaattgctattaaagtgctagagcctta

SEQ ID NO: 25382 - DNA, 33 bp, Homo sapien
acttaaaattgctattgaagtgctagagcctta

SEQ ID NO: 25383 - DNA, 33 bp, Homo sapien
gtaatctttagaatgacgtaggccagctctgat

SEQ ID NO: 25384 - DNA, 33 bp, Homo sapien
gtaatctttagaatgatgtaggccagctctgat

SEQ ID NO: 25385 - DNA, 33 bp, Homo sapien
atgaagacagggtccaagtctatttaccttgtt

SEQ ID NO: 25386 - DNA, 33 bp, Homo sapien
atgaagacagggtccacgtctatttaccttgtt

SEQ ID NO: 25387 - DNA, 33 bp, Homo sapien
atgtccttgagtttcaatagaagaaagagtcac

SEQ ID NO: 25388 - DNA, 33 bp, Homo sapien
atgtccttgagtttcattagaagaaagagtcac

SEQ ID NO: 25389 - DNA, 33 bp, Homo sapien
tgactatgagtggcgacgtgacccaatacaagc

SEQ ID NO: 25390 - DNA, 33 bp, Homo sapien
tgactatgagtggcgatgtgacccaatacaagc

SEQ ID NO: 25391 - DNA, 33 bp, Homo sapien
aacatttatgtacaaaattggggctcttttagt

SEQ ID NO: 25392 - DNA, 33 bp, Homo sapien
aacatttatgtacaaagttggggctcttttagt

SEQ ID NO: 25393 - DNA, 33 bp, Homo sapien
ggaatgttagagcatacgtgtacagcctttatg

SEQ ID NO: 25394 - DNA, 33 bp, Homo sapien
ggaatgttagagcatatgtgtacagcctttatg

SEQ ID NO: 25395 - DNA, 33 bp, Homo sapien
atcaaatatgtgaaaacaaaagtggtctccttg

SEQ ID NO: 25396 - DNA, 33 bp, Homo sapien
atcaaatatgtgaaaataaaagtggtctccttg

SEQ ID NO: 25397 - DNA, 33 bp, Homo sapien
cacttggtttcctgtcactgtattatcattatc

SEQ ID NO: 25398 - DNA, 33 bp, Homo sapien
cacttggtttcctgtcgctgtattatcattatc

SEQ ID NO: 25399 - DNA, 33 bp, Homo sapien
aaaagtaccagttttcaagaatggaattgctga

SEQ ID NO: 25400 - DNA, 33 bp, Homo sapien
aaaagtaccagttttctagaatggaattgctga

SEQ ID NO: 25401 - DNA, 33 bp, Homo sapien
aatttggttccttgtgcaggccttcactgtggc

SEQ ID NO: 25402 - DNA, 33 bp, Homo sapien
aatttggttccttgtggaggccttcactgtggc

SEQ ID NO: 25403 - DNA, 33 bp, Homo sapien
aaagaagaggttctaaataaatatcataaagct

SEQ ID NO: 25404 - DNA, 33 bp, Homo sapien
aaagaagaggttctaagtaaatatcataaagct

SEQ ID NO: 25405 - DNA, 33 bp, Homo sapien
caacaatgcaacaaacgcaacaaattcaaaacc

SEQ ID NO: 25406 - DNA, 33 bp, Homo sapien
caacaatgcaacaaactcaacaaattcaaaacc

SEQ ID NO: 25407 - DNA, 33 bp, Homo sapien
caccaggagaatgctacgtactcattggcctca

SEQ ID NO: 25408 - DNA, 33 bp, Homo sapien
caccaggagaatgctatgtactcattggcctca

SEQ ID NO: 25409 - DNA, 33 bp, Homo sapien
taagtgctgaagctgacatataaacctaagttt

SEQ ID NO: 25410 - DNA, 33 bp, Homo sapien
taagtgctgaagctgagatataaacctaagttt

SEQ ID NO: 25411 - DNA, 33 bp, Homo sapien
cctaaagatatctaacagaagctgagaaacaga

SEQ ID NO: 25412 - DNA, 33 bp, Homo sapien
cctaaagatatctaacggaagctgagaaacaga

SEQ ID NO: 25413 - DNA, 33 bp, Homo sapien
gggtttctttgcaaaacgagtactctcttatac

SEQ ID NO: 25414 - DNA, 33 bp, Homo sapien
gggtttctttgcaaaatgagtactctcttatac

SEQ ID NO: 25415 - DNA, 33 bp, Homo sapien
catgactgatctctcaacctacttttgttagcc

SEQ ID NO: 25416 - DNA, 33 bp, Homo sapien
catgactgatctctcagcctacttttgttagcc

SEQ ID NO: 25417 - DNA, 33 bp, Homo sapien
cacataaaacctaagtaaaaacaatgtgtttgc

SEQ ID NO: 25418 - DNA, 33 bp, Homo sapien
cacataaaacctaagtgaaaacaatgtgtttgc

SEQ ID NO: 25419 - DNA, 33 bp, Homo sapien
aattaatttcctaccacagtctacaaggactga

SEQ ID NO: 25420 - DNA, 33 bp, Homo sapien
aattaatttcctaccagagtctacaaggactga

SEQ ID NO: 25421 - DNA, 33 bp, Homo sapien
acatggttttgccttaagcccagtaagaaaaag

SEQ ID NO: 25422 - DNA, 33 bp, Homo sapien
acatggttttgccttacgcccagtaagaaaaag

SEQ ID NO: 25423 - DNA, 33 bp, Homo sapien
ttcaacaaaatgacaagattacagacaacaaga

SEQ ID NO: 25424 - DNA, 33 bp, Homo sapien
ttcaacaaaatgacaatattacagacaacaaga

SEQ ID NO: 25425 - DNA, 33 bp, Homo sapien
tggaatataaatgtgacagcagtttgagagatg

SEQ ID NO: 25426 - DNA, 33 bp, Homo sapien
tggaatataaatgtgagagcagtttgagagatg

SEQ ID NO: 25427 - DNA, 33 bp, Homo sapien
atttcactgtactataagaacttgctattttag

SEQ ID NO: 25428 - DNA, 33 bp, Homo sapien
atttcactgtactataggaacttgctattttag

SEQ ID NO: 25429 - DNA, 33 bp, Homo sapien
aatgttcaatgtccaaagtattaaaaggtgtct

SEQ ID NO: 25430 - DNA, 33 bp, Homo sapien
aatgttcaatgtccaacgtattaaaaggtgtct

SEQ ID NO: 25431 - DNA, 33 bp, Homo sapien
catgcctttgctctaaagatcccttgccttcca

SEQ ID NO: 25432 - DNA, 33 bp, Homo sapien
catgcctttgctctaatgatcccttgccttcca

SEQ ID NO: 25433 - DNA, 33 bp, Homo sapien
ctcttcaccattattacagtcattgtaacacta

SEQ ID NO: 25434 - DNA, 33 bp, Homo sapien
ctcttcaccattattatagtcattgtaacacta

SEQ ID NO: 25435 - DNA, 33 bp, Homo sapien
agaacacattgctttaaatgcagtatttggact

SEQ ID NO: 25436 - DNA, 33 bp, Homo sapien
agaacacattgctttatatgcagtatttggact

SEQ ID NO: 25437 - DNA, 33 bp, Homo sapien
cacatcatagactcaccaaacctaaattagttt

SEQ ID NO: 25438 - DNA, 33 bp, Homo sapien
cacatcatagactcactaaacctaaattagttt

SEQ ID NO: 25439 - DNA, 33 bp, Homo sapien
actatgggctcctatccaggtaactgacaagtc

SEQ ID NO: 25440 - DNA, 33 bp, Homo sapien
actatgggctcctatctaggtaactgacaagtc

SEQ ID NO: 25441 - DNA, 33 bp, Homo sapien
ctactataagatgttacgtaatacaatgggtag

SEQ ID NO: 25442 - DNA, 33 bp, Homo sapien
ctactataagatgttatgtaatacaatgggtag

SEQ ID NO: 25443 - DNA, 33 bp, Homo sapien
taatgtggctaagtatcaatggagtcagaattc

SEQ ID NO: 25444 - DNA, 33 bp, Homo sapien
taatgtggctaagtatgaatggagtcagaattc

SEQ ID NO: 25445 - DNA, 33 bp, Homo sapien
aggtcttaatctgtgacctggaacttgaacaac

SEQ ID NO: 25446 - DNA, 33 bp, Homo sapien
aggtcttaatctgtgatctggaacttgaacaac

SEQ ID NO: 25447 - DNA, 33 bp, Homo sapien
tgaattcaactctctaagtagtgctgaaaggaa

SEQ ID NO: 25448 - DNA, 33 bp, Homo sapien
tgaattcaactctctatgtagtgctgaaaggaa

SEQ ID NO: 25449 - DNA, 33 bp, Homo sapien
attgctcaagtaaggccatttattccatgtctg

SEQ ID NO: 25450 - DNA, 33 bp, Homo sapien
attgctcaagtaaggctatttattccatgtctg

SEQ ID NO: 25451 - DNA, 33 bp, Homo sapien
cctatttttgctggtcaagttttgtcactggaa

SEQ ID NO: 25452 - DNA, 33 bp, Homo sapien
cctatttttgctggtccagttttgtcactggaa

SEQ ID NO: 25453 - DNA, 33 bp, Homo sapien
aggaagataaaccatggaataaaacgcagatat

SEQ ID NO: 25454 - DNA, 33 bp, Homo sapien
aggaagataaaccatgtaataaaacgcagatat

SEQ ID NO: 25455 - DNA, 33 bp, Homo sapien
caatcataaaggctataaactgcatcaaaaaat

SEQ ID NO: 25456 - DNA, 33 bp, Homo sapien
caatcataaaggctatcaactgcatcaaaaaat

SEQ ID NO: 25457 - DNA, 33 bp, Homo sapien
gaccacagccttacaacatactttggatttatc

SEQ ID NO: 25458 - DNA, 33 bp, Homo sapien
gaccacagccttacaatatactttggatttatc

SEQ ID NO: 25459 - DNA, 33 bp, Homo sapien
aagatttgggcaagtgaaaaacataataccaat

SEQ ID NO: 25460 - DNA, 33 bp, Homo sapien
aagatttgggcaagtggaaaacataataccaat

SEQ ID NO: 25461 - DNA, 33 bp, Homo sapien
tgcacctttatatctcgaagcatctttcttgag

SEQ ID NO: 25462 - DNA, 33 bp, Homo sapien
tgcacctttatatctctaagcatctttcttgag

SEQ ID NO: 25463 - DNA, 33 bp, Homo sapien
tgtgacccattttggaagtaggtccttgctgat

SEQ ID NO: 25464 - DNA, 33 bp, Homo sapien
tgtgacccattttggaggtaggtccttgctgat

SEQ ID NO: 25465 - DNA, 33 bp, Homo sapien
ctctgccttcatcttgcattagactctttcacg

SEQ ID NO: 25466 - DNA, 33 bp, Homo sapien
ctctgccttcatcttggattagactctttcacg

SEQ ID NO: 25467 - DNA, 33 bp, Homo sapien
gtctgtgtgtggcggacctggaaatcacaggtg

SEQ ID NO: 25468 - DNA, 33 bp, Homo sapien
gtctgtgtgtggcggagctggaaatcacaggtg

SEQ ID NO: 25469 - DNA, 33 bp, Homo sapien
gaccagagaaagtggacactctttgttttaatc

SEQ ID NO: 25470 - DNA, 33 bp, Homo sapien
gaccagagaaagtggatactctttgttttaatc

SEQ ID NO: 25471 - DNA, 33 bp, Homo sapien
atcatgtattaaggaacgctgaatatttaagcc

SEQ ID NO: 25472 - DNA, 33 bp, Homo sapien
atcatgtattaaggaatgctgaatatttaagcc

SEQ ID NO: 25473 - DNA, 33 bp, Homo sapien
ttttacagattgcaaagattatatctcaagaca

SEQ ID NO: 25474 - DNA, 33 bp, Homo sapien
ttttacagattgcaaatattatatctcaagaca

SEQ ID NO: 25475 - DNA, 33 bp, Homo sapien
tcaagacagtcaaataccttgcctaagttcagc

SEQ ID NO: 25476 - DNA, 33 bp, Homo sapien
tcaagacagtcaaatatcttgcctaagttcagc

SEQ ID NO: 25477 - DNA, 33 bp, Homo sapien
aacaaatctaactttgcacaaagcacttttcta

SEQ ID NO: 25478 - DNA, 33 bp, Homo sapien
aacaaatctaactttggacaaagcacttttcta

SEQ ID NO: 25479 - DNA, 33 bp, Homo sapien
agcataagctgaaacaaaaattagtgtattatc

SEQ ID NO: 25480 - DNA, 33 bp, Homo sapien
agcataagctgaaacagaaattagtgtattatc

SEQ ID NO: 25481 - DNA, 33 bp, Homo sapien
ttatattccagtataacggttagatcaacaaag

SEQ ID NO: 25482 - DNA, 33 bp, Homo sapien
ttatattccagtataatggttagatcaacaaag

SEQ ID NO: 25483 - DNA, 33 bp, Homo sapien
ttctgggattgatccacgttgtaatgtttatca

SEQ ID NO: 25484 - DNA, 33 bp, Homo sapien
ttctgggattgatccatgttgtaatgtttatca

SEQ ID NO: 25485 - DNA, 33 bp, Homo sapien
taataactttttcaataaaatatagccagaaaa

SEQ ID NO: 25486 - DNA, 33 bp, Homo sapien
taataactttttcaatgaaatatagccagaaaa

SEQ ID NO: 25487 - DNA, 33 bp, Homo sapien
ctacttaatactggggacaacacctttcatctt

SEQ ID NO: 25488 - DNA, 33 bp, Homo sapien
ctacttaatactggggtcaacacctttcatctt

SEQ ID NO: 25489 - DNA, 33 bp, Homo sapien
aatattactgcaatccagatgctatcagatact

SEQ ID NO: 25490 - DNA, 33 bp, Homo sapien
aatattactgcaatccggatgctatcagatact

SEQ ID NO: 25491 - DNA, 33 bp, Homo sapien
tacccccagttttgtgcactacgcaatcaggta

SEQ ID NO: 25492 - DNA, 33 bp, Homo sapien
tacccccagttttgtgtactacgcaatcaggta

SEQ ID NO: 25493 - DNA, 33 bp, Homo sapien
cctctaaactcctctacaaagagatctgtactg

SEQ ID NO: 25494 - DNA, 33 bp, Homo sapien
cctctaaactcctctataaagagatctgtactg

SEQ ID NO: 25495 - DNA, 33 bp, Homo sapien
atcttagagcttaaaactgaaattccaaaataa

SEQ ID NO: 25496 - DNA, 33 bp, Homo sapien
atcttagagcttaaaattgaaattccaaaataa

SEQ ID NO: 25497 - DNA, 33 bp, Homo sapien
gacaaagtttttatcaataaggagttctcagta

SEQ ID NO: 25498 - DNA, 33 bp, Homo sapien
gacaaagtttttatcagtaaggagttctcagta

SEQ ID NO: 25499 - DNA, 33 bp, Homo sapien
ctttttatacactaaccggcaaattatttgatc

SEQ ID NO: 25500 - DNA, 33 bp, Homo sapien
ctttttatacactaactggcaaattatttgatc

SEQ ID NO: 25501 - DNA, 33 bp, Homo sapien
aacagcaagatacctacacaaaaaagcttacac

SEQ ID NO: 25502 - DNA, 33 bp, Homo sapien
aacagcaagatacctatacaaaaaagcttacac

SEQ ID NO: 25503 - DNA, 33 bp, Homo sapien
ttgccacaatgtgaaccgtccctttcccaggtg

SEQ ID NO: 25504 - DNA, 33 bp, Homo sapien
ttgccacaatgtgaactgtccctttcccaggtg

SEQ ID NO: 25505 - DNA, 33 bp, Homo sapien
tttcaaaagtcctaaaacagagaagaaggttga

SEQ ID NO: 25506 - DNA, 33 bp, Homo sapien
tttcaaaagtcctaaagcagagaagaaggttga

SEQ ID NO: 25507 - DNA, 33 bp, Homo sapien
agatgaaagtctaacactgccttttaaagataa

SEQ ID NO: 25508 - DNA, 33 bp, Homo sapien
agatgaaagtctaacattgccttttaaagataa

SEQ ID NO: 25509 - DNA, 33 bp, Homo sapien
tattttttagtgaacagatctgcaactgatgag

SEQ ID NO: 25510 - DNA, 33 bp, Homo sapien
tattttttagtgaacatatctgcaactgatgag

SEQ ID NO: 25511 - DNA, 33 bp, Homo sapien
aaagtatgacgaaaacgcattcattagaaacaa

SEQ ID NO: 25512 - DNA, 33 bp, Homo sapien
aaagtatgacgaaaactcattcattagaaacaa

SEQ ID NO: 25513 - DNA, 33 bp, Homo sapien
acttaatttaggctagaaatcaagttttaggtt

SEQ ID NO: 25514 - DNA, 33 bp, Homo sapien
acttaatttaggctaggaatcaagttttaggtt

SEQ ID NO: 25515 - DNA, 33 bp, Homo sapien
ttgtctgtcgaagtgactactaatatatctttg

SEQ ID NO: 25516 - DNA, 33 bp, Homo sapien
ttgtctgtcgaagtgagtactaatatatctttg

SEQ ID NO: 25517 - DNA, 33 bp, Homo sapien
ctgtgttattcttctcaacattttgtcttcctt

SEQ ID NO: 25518 - DNA, 33 bp, Homo sapien
ctgtgttattcttctcgacattttgtcttcctt

SEQ ID NO: 25519 - DNA, 33 bp, Homo sapien
ttggggtctcctcccaacagctgcattgctact

SEQ ID NO: 25520 - DNA, 33 bp, Homo sapien
ttggggtctcctcccatcagctgcattgctact

SEQ ID NO: 25521 - DNA, 33 bp, Homo sapien
gctgaatatgagaacactatgcgtcctactcta

SEQ ID NO: 25522 - DNA, 33 bp, Homo sapien
gctgaatatgagaacattatgcgtcctactcta

SEQ ID NO: 25523 - DNA, 33 bp, Homo sapien
gacagttttaaggtgaaagaagggaggataaaa

SEQ ID NO: 25524 - DNA, 33 bp, Homo sapien
gacagttttaaggtgacagaagggaggataaaa

SEQ ID NO: 25525 - DNA, 33 bp, Homo sapien
agctcatttttcacacgggcttcacagaggaaa

SEQ ID NO: 25526 - DNA, 33 bp, Homo sapien
agctcatttttcacactggcttcacagaggaaa

SEQ ID NO: 25527 - DNA, 33 bp, Homo sapien
agaacacctttgagtaacaaatatagcctcttc

SEQ ID NO: 25528 - DNA, 33 bp, Homo sapien
agaacacctttgagtagcaaatatagcctcttc

SEQ ID NO: 25529 - DNA, 33 bp, Homo sapien
tctgttttccagcatcacttttctagtgtttac

SEQ ID NO: 25530 - DNA, 33 bp, Homo sapien
tctgttttccagcatcgcttttctagtgtttac

SEQ ID NO: 25531 - DNA, 33 bp, Homo sapien
tcttttgggtcaatgaaatgtaagatgaggctt

SEQ ID NO: 25532 - DNA, 33 bp, Homo sapien
tcttttgggtcaatgagatgtaagatgaggctt

SEQ ID NO: 25533 - DNA, 33 bp, Homo sapien
tgtcaaatgatgcacaaaaacgtcaagcaagat

SEQ ID NO: 25534 - DNA, 33 bp, Homo sapien
tgtcaaatgatgcacagaaacgtcaagcaagat

SEQ ID NO: 25535 - DNA, 33 bp, Homo sapien
ccgatagactgtaggaataacagaagtgatgta

SEQ ID NO: 25536 - DNA, 33 bp, Homo sapien
ccgatagactgtaggagtaacagaagtgatgta

SEQ ID NO: 25537 - DNA, 33 bp, Homo sapien
cacctaccaaacaccaataggaggcttttgaga

SEQ ID NO: 25538 - DNA, 33 bp, Homo sapien
cacctaccaaacaccagtaggaggcttttgaga

SEQ ID NO: 25539 - DNA, 33 bp, Homo sapien
tgaatagactctgataaagtttggctgtgtccc

SEQ ID NO: 25540 - DNA, 33 bp, Homo sapien
tgaatagactctgatatagtttggctgtgtccc

SEQ ID NO: 25541 - DNA, 33 bp, Homo sapien
tgaaggggaatttgaacatgaaggtttctgtaa

SEQ ID NO: 25542 - DNA, 33 bp, Homo sapien
tgaaggggaatttgaatatgaaggtttctgtaa

SEQ ID NO: 25543 - DNA, 33 bp, Homo sapien
tcaagaaggatattacaaaatagaggagatgtt

SEQ ID NO: 25544 - DNA, 33 bp, Homo sapien
tcaagaaggatattacgaaatagaggagatgtt

SEQ ID NO: 25545 - DNA, 33 bp, Homo sapien
caatgtaggcgaaaacagatagcattaatctca

SEQ ID NO: 25546 - DNA, 33 bp, Homo sapien
caatgtaggcgaaaaccgatagcattaatctca

SEQ ID NO: 25547 - DNA, 33 bp, Homo sapien
aacaccttttgatgtcccagttttttctgcctt

SEQ ID NO: 25548 - DNA, 33 bp, Homo sapien
aacaccttttgatgtctcagttttttctgcctt

SEQ ID NO: 25549 - DNA, 33 bp, Homo sapien
ggacagggtgatcccaaataattgaaagatttc

SEQ ID NO: 25550 - DNA, 33 bp, Homo sapien
ggacagggtgatcccagataattgaaagatttc

SEQ ID NO: 25551 - DNA, 33 bp, Homo sapien
gagtgatgctttaacaacgttggccaattcagc

SEQ ID NO: 25552 - DNA, 33 bp, Homo sapien
gagtgatgctttaacagcgttggccaattcagc

SEQ ID NO: 25553 - DNA, 33 bp, Homo sapien
cttaaatcatttgaaaggtgatgctgaatcatt

SEQ ID NO: 25554 - DNA, 33 bp, Homo sapien
cttaaatcatttgaaatgtgatgctgaatcatt

SEQ ID NO: 25555 - DNA, 33 bp, Homo sapien
agaaataggttaaaaactatgttgatcaggcac

SEQ ID NO: 25556 - DNA, 33 bp, Homo sapien
agaaataggttaaaaattatgttgatcaggcac

SEQ ID NO: 25557 - DNA, 33 bp, Homo sapien
caattacagctcatcaatctatcataaaacaca

SEQ ID NO: 25558 - DNA, 33 bp, Homo sapien
caattacagctcatcagtctatcataaaacaca

SEQ ID NO: 25559 - DNA, 33 bp, Homo sapien
tataaacacactatcacagatttgaataaaatg

SEQ ID NO: 25560 - DNA, 33 bp, Homo sapien
tataaacacactatcatagatttgaataaaatg

SEQ ID NO: 25561 - DNA, 33 bp, Homo sapien
atatctacattttaaaacccagccttggcaatt

SEQ ID NO: 25562 - DNA, 33 bp, Homo sapien
atatctacattttaaatcccagccttggcaatt

SEQ ID NO: 25563 - DNA, 33 bp, Homo sapien
gttctacagtatggcacggagatgggtaaaaaa

SEQ ID NO: 25564 - DNA, 33 bp, Homo sapien
gttctacagtatggcatggagatgggtaaaaaa

SEQ ID NO: 25565 - DNA, 33 bp, Homo sapien
ttaaactgtgagagaaagtgacaatacagtgtt

SEQ ID NO: 25566 - DNA, 33 bp, Homo sapien
ttaaactgtgagagaaggtgacaatacagtgtt

SEQ ID NO: 25567 - DNA, 33 bp, Homo sapien
gataaaggaaattaaccagcttttgacatttca

SEQ ID NO: 25568 - DNA, 33 bp, Homo sapien
gataaaggaaattaacgagcttttgacatttca

SEQ ID NO: 25569 - DNA, 33 bp, Homo sapien
ggtttacatacactgaatagcacatacactgca

SEQ ID NO: 25570 - DNA, 33 bp, Homo sapien
ggtttacatacactgattagcacatacactgca

SEQ ID NO: 25571 - DNA, 33 bp, Homo sapien
tgtgaacaccctaaaactataggcaaaaatcta

SEQ ID NO: 25572 - DNA, 33 bp, Homo sapien
tgtgaacaccctaaaattataggcaaaaatcta

SEQ ID NO: 25573 - DNA, 33 bp, Homo sapien
gctttccacatgacaaaatttctaagtctctct

SEQ ID NO: 25574 - DNA, 33 bp, Homo sapien
gctttccacatgacaagatttctaagtctctct

SEQ ID NO: 25575 - DNA, 33 bp, Homo sapien
gtccttttaatgcagaatatcccagatcatata

SEQ ID NO: 25576 - DNA, 33 bp, Homo sapien
gtccttttaatgcagagtatcccagatcatata

SEQ ID NO: 25577 - DNA, 33 bp, Homo sapien
cttcctaatggctttcacagagtaagaaagatg

SEQ ID NO: 25578 - DNA, 33 bp, Homo sapien
cttcctaatggctttctcagagtaagaaagatg

SEQ ID NO: 25579 - DNA, 33 bp, Homo sapien
caatgcagaccttttacagatatatacaatttg

SEQ ID NO: 25580 - DNA, 33 bp, Homo sapien
caatgcagaccttttatagatatatacaatttg

SEQ ID NO: 25581 - DNA, 33 bp, Homo sapien
ctaacacgttcccccaaaattcaataggtccat

SEQ ID NO: 25582 - DNA, 33 bp, Homo sapien
ctaacacgttcccccagaattcaataggtccat

SEQ ID NO: 25583 - DNA, 33 bp, Homo sapien
cagactctcacacatcaatttaaaataatgact

SEQ ID NO: 25584 - DNA, 33 bp, Homo sapien
cagactctcacacatcgatttaaaataatgact

SEQ ID NO: 25585 - DNA, 33 bp, Homo sapien
tctctgaaggtgaacaatatcaatttcattata

SEQ ID NO: 25586 - DNA, 33 bp, Homo sapien
tctctgaaggtgaacagtatcaatttcattata

SEQ ID NO: 25587 - DNA, 33 bp, Homo sapien
cctcttaaactcaaccagacacttaagaaaaat

SEQ ID NO: 25588 - DNA, 33 bp, Homo sapien
cctcttaaactcaacctgacacttaagaaaaat

SEQ ID NO: 25589 - DNA, 33 bp, Homo sapien
ttttgcaagatactaagaatacatgttttagaa

SEQ ID NO: 25590 - DNA, 33 bp, Homo sapien
ttttgcaagatactaataatacatgttttagaa

SEQ ID NO: 25591 - DNA, 33 bp, Homo sapien
cttgttttgtgagatacagttctaaggccattt

SEQ ID NO: 25592 - DNA, 33 bp, Homo sapien
cttgttttgtgagatagagttctaaggccattt

SEQ ID NO: 25593 - DNA, 33 bp, Homo sapien
atgaaatacaggttagaattaggtttattctgt

SEQ ID NO: 25594 - DNA, 33 bp, Homo sapien
atgaaatacaggttaggattaggtttattctgt

SEQ ID NO: 25595 - DNA, 33 bp, Homo sapien
ttgtcctctattcatacgtatttttacctgatg

SEQ ID NO: 25596 - DNA, 33 bp, Homo sapien
ttgtcctctattcatatgtatttttacctgatg

SEQ ID NO: 25597 - DNA, 33 bp, Homo sapien
actatatcagatagccaaactatttaaccaaac

SEQ ID NO: 25598 - DNA, 33 bp, Homo sapien
actatatcagatagccgaactatttaaccaaac

SEQ ID NO: 25599 - DNA, 33 bp, Homo sapien
gcccatgctcttcaagacttagatacttattct

SEQ ID NO: 25600 - DNA, 33 bp, Homo sapien
gcccatgctcttcaagtcttagatacttattct

SEQ ID NO: 25601 - DNA, 33 bp, Homo sapien
attcactagggctttaccaaattatgattataa

SEQ ID NO: 25602 - DNA, 33 bp, Homo sapien
attcactagggctttatcaaattatgattataa

SEQ ID NO: 25603 - DNA, 33 bp, Homo sapien
ctccagtatagttaaagattaagccattgtaac

SEQ ID NO: 25604 - DNA, 33 bp, Homo sapien
ctccagtatagttaaatattaagccattgtaac

SEQ ID NO: 25605 - DNA, 33 bp, Homo sapien
ccagggtgctctggatcacctgcaagcaggtgt

SEQ ID NO: 25606 - DNA, 33 bp, Homo sapien
ccagggtgctctggattacctgcaagcaggtgt

SEQ ID NO: 25607 - DNA, 33 bp, Homo sapien
actgtcattatactacaaacactttggctgaca

SEQ ID NO: 25608 - DNA, 33 bp, Homo sapien
actgtcattatactacgaacactttggctgaca

SEQ ID NO: 25609 - DNA, 33 bp, Homo sapien
caaagtgtagtgaccacagatccaggagcacct

SEQ ID NO: 25610 - DNA, 33 bp, Homo sapien
caaagtgtagtgaccagagatccaggagcacct

SEQ ID NO: 25611 - DNA, 33 bp, Homo sapien
cttttatctgaaattaaaactgcaaactttgct

SEQ ID NO: 25612 - DNA, 33 bp, Homo sapien
cttttatctgaaattagaactgcaaactttgct

SEQ ID NO: 25613 - DNA, 33 bp, Homo sapien
ctcaaagatataaaaacgtgggaagacaaccta

SEQ ID NO: 25614 - DNA, 33 bp, Homo sapien
ctcaaagatataaaaatgtgggaagacaaccta

SEQ ID NO: 25615 - DNA, 33 bp, Homo sapien
ttgtgaaaccctgatgaagtccaagacctagaa

SEQ ID NO: 25616 - DNA, 33 bp, Homo sapien
ttgtgaaaccctgatggagtccaagacctagaa

SEQ ID NO: 25617 - DNA, 33 bp, Homo sapien
gttggaaactggacaaatatgtggaaagtaaac

SEQ ID NO: 25618 - DNA, 33 bp, Homo sapien
gttggaaactggacaactatgtggaaagtaaac

SEQ ID NO: 25619 - DNA, 33 bp, Homo sapien
gggatagtttttatagcccttttgctcagctca

SEQ ID NO: 25620 - DNA, 33 bp, Homo sapien
gggatagtttttatagtccttttgctcagctca

SEQ ID NO: 25621 - DNA, 33 bp, Homo sapien
ccaaagcaaagagaaaactttttcagctaccac

SEQ ID NO: 25622 - DNA, 33 bp, Homo sapien
ccaaagcaaagagaaacctttttcagctaccac

SEQ ID NO: 25623 - DNA, 33 bp, Homo sapien
acaaaacacaaaccataaaccttgtgtggtctg

SEQ ID NO: 25624 - DNA, 33 bp, Homo sapien
acaaaacacaaaccatgaaccttgtgtggtctg

SEQ ID NO: 25625 - DNA, 33 bp, Homo sapien
cttttcctgctttttcactgcagggagttcaag

SEQ ID NO: 25626 - DNA, 33 bp, Homo sapien
cttttcctgctttttcgctgcagggagttcaag

SEQ ID NO: 25627 - DNA, 33 bp, Homo sapien; identical to SEQ ID NO: 25625

SEQ ID NO: 25628 - DNA, 33 bp, Homo sapien; identical to SEQ ID NO: 25626

SEQ ID NO: 25629 - DNA, 33 bp, Homo sapien
agcgataaatgctccaaagaagaagtcaggttg

SEQ ID NO: 25630 - DNA, 33 bp, Homo sapien
agcgataaatgctccagagaagaagtcaggttg

SEQ ID NO: 25631 - DNA, 33 bp, Homo sapien
caacttagcagcatataaacttgggttacattt

SEQ ID NO: 25632 - DNA, 33 bp, Homo sapien
caacttagcagcatatgaacttgggttacattt

SEQ ID NO: 25633 - DNA, 33 bp, Homo sapien
gaaattcaatgtctacaaggtctagagaaaatg

SEQ ID NO: 25634 - DNA, 33 bp, Homo sapien
gaaattcaatgtctactaggtctagagaaaatg

SEQ ID NO: 25635 - DNA, 33 bp, Homo sapien
caaatccgccattgacaggtacctaggttgatt

SEQ ID NO: 25636 - DNA, 33 bp, Homo sapien
caaatccgccattgacgggtacctaggttgatt

SEQ ID NO: 25637 - DNA, 33 bp, Homo sapien
tgaaagcactacaagaacataagatgtgtggac

SEQ ID NO: 25638 - DNA, 33 bp, Homo sapien
tgaaagcactacaagagcataagatgtgtggac

SEQ ID NO: 25639 - DNA, 33 bp, Homo sapien
caatgagaaactgacaatgtacgcacaatatga

SEQ ID NO: 25640 - DNA, 33 bp, Homo sapien
caatgagaaactgacagtgtacgcacaatatga

SEQ ID NO: 25641 - DNA, 33 bp, Homo sapien
gctactcctaacttcaagggactctgagagatg

SEQ ID NO: 25642 - DNA, 33 bp, Homo sapien
gctactcctaacttcaggggactctgagagatg

SEQ ID NO: 25643 - DNA, 33 bp, Homo sapien
taagggtaatgtacaaaaaaagaagcacattaa

SEQ ID NO: 25644 - DNA, 33 bp, Homo sapien
taagggtaatgtacaagaaaagaagcacattaa

SEQ ID NO: 25645 - DNA, 33 bp, Homo sapien
atgactaatgaactaactgcgtctaataaacta

SEQ ID NO: 25646 - DNA, 33 bp, Homo sapien
atgactaatgaactaagtgcgtctaataaacta

SEQ ID NO: 25647 - DNA, 33 bp, Homo sapien
aaatatttcatcagaacctaactgactgaggtt

SEQ ID NO: 25648 - DNA, 33 bp, Homo sapien
aaatatttcatcagaatctaactgactgaggtt

SEQ ID NO: 25649 - DNA, 33 bp, Homo sapien
tccacttggaatgctaaagaaggctacagttgg

SEQ ID NO: 25650 - DNA, 33 bp, Homo sapien
tccacttggaatgctagagaaggctacagttgg

SEQ ID NO: 25651 - DNA, 33 bp, Homo sapien
actactttgcagacacagggaactggcaggtga

SEQ ID NO: 25652 - DNA, 33 bp, Homo sapien
actactttgcagacacggggaactggcaggtga

SEQ ID NO: 25653 - DNA, 33 bp, Homo sapien
gtaatgactgggatgacattcctgatagcctat

SEQ ID NO: 25654 - DNA, 33 bp, Homo sapien
gtaatgactgggatgatattcctgatagcctat

SEQ ID NO: 25655 - DNA, 33 bp, Homo sapien
gatcatcatggtaaaagtatcttatcagtcaat

SEQ ID NO: 25656 - DNA, 33 bp, Homo sapien
gatcatcatggtaaaattatcttatcagtcaat

SEQ ID NO: 25657 - DNA, 33 bp, Homo sapien
tgaacttctactatgtaacaaactatgtgcgag

SEQ ID NO: 25658 - DNA, 33 bp, Homo sapien
tgaacttctactatgtgacaaactatgtgcgag

SEQ ID NO: 25659 - DNA, 33 bp, Homo sapien
actgtactgttcactaacatattcctaagtcct

SEQ ID NO: 25660 - DNA, 33 bp, Homo sapien
actgtactgttcactaccatattcctaagtcct

SEQ ID NO: 25661 - DNA, 33 bp, Homo sapien
gtgatcgatatggtaccattcctcagggttatc

SEQ ID NO: 25662 - DNA, 33 bp, Homo sapien
gtgatcgatatggtactattcctcagggttatc

SEQ ID NO: 25663 - DNA, 33 bp, Homo sapien
tatcccttagtattaccatgctgtgtgtttaag

SEQ ID NO: 25664 - DNA, 33 bp, Homo sapien
tatcccttagtattacgatgctgtgtgtttaag

SEQ ID NO: 25665 - DNA, 33 bp, Homo sapien; identical to SEQ ID NO: 25663

SEQ ID NO: 25666 - DNA, 33 bp, Homo sapien; identical to SEQ ID NO: 25664

SEQ ID NO: 25667 - DNA, 33 bp, Homo sapien
tgtatagtgtctaccaaacaattattgtacatg

SEQ ID NO: 25668 - DNA, 33 bp, Homo sapien
tgtatagtgtctaccatacaattattgtacatg

SEQ ID NO: 25669 - DNA, 33 bp, Homo sapien
ttcccaacaaatccctaactttcaggctttcat

SEQ ID NO: 25670 - DNA, 33 bp, Homo sapien
ttcccaacaaatccctgactttcaggctttcat

SEQ ID NO: 25671 - DNA, 33 bp, Homo sapien
ggtatgcagaggtcccagctaaaatgacctaat

SEQ ID NO: 25672 - DNA, 33 bp, Homo sapien
ggtatgcagaggtcccggctaaaatgacctaat

SEQ ID NO: 25673 - DNA, 33 bp, Homo sapien
atccactgtggaggagaccctcagctgttggat

SEQ ID NO: 25674 - DNA, 33 bp, Homo sapien
atccactgtggaggaggccctcagctgttggat

SEQ ID NO: 25675 - DNA, 33 bp, Homo sapien
ggcagtgctttgttcccattggattagacacat

SEQ ID NO: 25676 - DNA, 33 bp, Homo sapien
ggcagtgctttgttcctattggattagacacat

SEQ ID NO: 25677 - DNA, 33 bp, Homo sapien
ccagatattgtagctacgtgactaattccctca

SEQ ID NO: 25678 - DNA, 33 bp, Homo sapien
ccagatattgtagctatgtgactaattccctca

SEQ ID NO: 25679 - DNA, 33 bp, Homo sapien
ttctgtattttttgcacgcccaaatctctttcc

SEQ ID NO: 25680 - DNA, 33 bp, Homo sapien
ttctgtattttttgcatgcccaaatctctttcc

SEQ ID NO: 25681 - DNA, 33 bp, Homo sapien
aaattagtggattataccatttcttcatcacct

SEQ ID NO: 25682 - DNA, 33 bp, Homo sapien
aaattagtggattatatcatttcttcatcacct

SEQ ID NO: 25683 - DNA, 33 bp, Homo sapien
ttctcatttctcttgacccttgaccacgctgag

SEQ ID NO: 25684 - DNA, 33 bp, Homo sapien
ttctcatttctcttgatccttgaccacgctgag

SEQ ID NO: 25685 - DNA, 33 bp, Homo sapien
ctgactgagggcttacagacaatacatagtcct

SEQ ID NO: 25686 - DNA, 33 bp, Homo sapien
ctgactgagggcttacggacaatacatagtcct

SEQ ID NO: 25687 - DNA, 33 bp, Homo sapien
aagtttcaatatctgaaaaaagcaggccttaat

SEQ ID NO: 25688 - DNA, 33 bp, Homo sapien
aagtttcaatatctgataaaagcaggccttaat

SEQ ID NO: 25689 - DNA, 33 bp, Homo sapien
ttcagagactatagtacgtttcaaaaatgtata

SEQ ID NO: 25690 - DNA, 33 bp, Homo sapien
ttcagagactatagtatgtttcaaaaatgtata

SEQ ID NO: 25691 - DNA, 33 bp, Homo sapien
cagcaggtggagttgaaataaagggcaagagag

SEQ ID NO: 25692 - DNA, 33 bp, Homo sapien
cagcaggtggagttgacataaagggcaagagag

SEQ ID NO: 25693 - DNA, 33 bp, Homo sapien
ctctctcttgtcatacaaatggcccaggaagcc

SEQ ID NO: 25694 - DNA, 33 bp, Homo sapien
ctctctcttgtcatacgaatggcccaggaagcc

SEQ ID NO: 25695 - DNA, 33 bp, Homo sapien
tttgagaaataaaatgaatgctgagacttaaca

SEQ ID NO: 25696 - DNA, 33 bp, Homo sapien
tttgagaaataaaatggatgctgagacttaaca

SEQ ID NO: 25697 - DNA, 33 bp, Homo sapien
gtctaagttggagtaagaggatgaggcttacct

SEQ ID NO: 25698 - DNA, 33 bp, Homo sapien
gtctaagttggagtaataggatgaggcttacct

SEQ ID NO: 25699 - DNA, 33 bp, Homo sapien
atcacatggaattggaactttgcttggctttgt

SEQ ID NO: 25700 - DNA, 33 bp, Homo sapien
atcacatggaattggacctttgcttggctttgt

SEQ ID NO: 25701 - DNA, 33 bp, Homo sapien
catagatgtgagttcaagctggagcagtaccag

SEQ ID NO: 25702 - DNA, 33 bp, Homo sapien
catagatgtgagttcaggctggagcagtaccag

SEQ ID NO: 25703 - DNA, 33 bp, Homo sapien
catatcaggaggataacagattgaaagaggtta

SEQ ID NO: 25704 - DNA, 33 bp, Homo sapien
catatcaggaggataatagattgaaagaggtta

SEQ ID NO: 25705 - DNA, 33 bp, Homo sapien
gtactaacttcacataagaagccctggaaatat

SEQ ID NO: 25706 - DNA, 33 bp, Homo sapien
gtactaacttcacatatgaagccctggaaatat

SEQ ID NO: 25707 - DNA, 33 bp, Homo sapien
gtgccttctttaagaacatgatgtggaagttcc

SEQ ID NO: 25708 - DNA, 33 bp, Homo sapien
gtgccttctttaagaatatgatgtggaagttcc

SEQ ID NO: 25709 - DNA, 33 bp, Homo sapien
ttaaatggccttatcacggatgaatggaagtag

SEQ ID NO: 25710 - DNA, 33 bp, Homo sapien
ttaaatggccttatcatggatgaatggaagtag

SEQ ID NO: 25711 - DNA, 33 bp, Homo sapien
gaactaccctaatgtacggaaccaccaagcccc

SEQ ID NO: 25712 - DNA, 33 bp, Homo sapien
gaactaccctaatgtatggaaccaccaagcccc

SEQ ID NO: 25713 - DNA, 33 bp, Homo sapien
aggtgacctgtgaaaacagactccttccagtga

SEQ ID NO: 25714 - DNA, 33 bp, Homo sapien
aggtgacctgtgaaaatagactccttccagtga

SEQ ID NO: 25715 - DNA, 33 bp, Homo sapien
gatctgagatattgaacatggcagtaccatgag

SEQ ID NO: 25716 - DNA, 33 bp, Homo sapien
gatctgagatattgaagatggcagtaccatgag

SEQ ID NO: 25717 - DNA, 33 bp, Homo sapien
ctaagttctgggaaaactgaatgtgaataaaag

SEQ ID NO: 25718 - DNA, 33 bp, Homo sapien
ctaagttctgggaaaattgaatgtgaataaaag

SEQ ID NO: 25719 - DNA, 33 bp, Homo sapien
taagtggaatcatagaagcactggaatggcatc

SEQ ID NO: 25720 - DNA, 33 bp, Homo sapien
taagtggaatcatagaggcactggaatggcatc

SEQ ID NO: 25721 - DNA, 33 bp, Homo sapien
ataaaatggattgtcccgaaatgagtgtatgta

SEQ ID NO: 25722 - DNA, 33 bp, Homo sapien
ataaaatggattgtcctgaaatgagtgtatgta

SEQ ID NO: 25723 - DNA, 33 bp, Homo sapien
acatctaaaatgtccaggtataacatagttgag

SEQ ID NO: 25724 - DNA, 33 bp, Homo sapien
acatctaaaatgtccatgtataacatagttgag

SEQ ID NO: 25725 - DNA, 33 bp, Homo sapien
aggtgacacagagaaaagatgtaatttgattga

SEQ ID NO: 25726 - DNA, 33 bp, Homo sapien
aggtgacacagagaaaggatgtaatttgattga

SEQ ID NO: 25727 - DNA, 33 bp, Homo sapien
ttttctcatggcattcaacatattatttatttg

SEQ ID NO: 25728 - DNA, 33 bp, Homo sapien
ttttctcatggcattccacatattatttatttg

SEQ ID NO: 25729 - DNA, 33 bp, Homo sapien
gcaaagagggataggcaatatcagtataaacac

SEQ ID NO: 25730 - DNA, 33 bp, Homo sapien
gcaaagagggataggcgatatcagtataaacac

SEQ ID NO: 25731 - DNA, 33 bp, Homo sapien
tcccttaccaatagtaagaacatctagccttcc

SEQ ID NO: 25732 - DNA, 33 bp, Homo sapien
tcccttaccaatagtaggaacatctagccttcc

SEQ ID NO: 25733 - DNA, 33 bp, Homo sapien
aatgagctctagaaaactcatcctgatccatga

SEQ ID NO: 25734 - DNA, 33 bp, Homo sapien
aatgagctctagaaaattcatcctgatccatga

SEQ ID NO: 25735 - DNA, 33 bp, Homo sapien
gaaatggcagagactaacagaagtgatttacca

SEQ ID NO: 25736 - DNA, 33 bp, Homo sapien
gaaatggcagagactagcagaagtgatttacca

SEQ ID NO: 25737 - DNA, 33 bp, Homo sapien
atagaaaggtaaggacacatggctctaataatc

SEQ ID NO: 25738 - DNA, 33 bp, Homo sapien
atagaaaggtaaggacccatggctctaataatc

SEQ ID NO: 25739 - DNA, 33 bp, Homo sapien
gattattatagccaaacgtatcatgtaactgca

SEQ ID NO: 25740 - DNA, 33 bp, Homo sapien
gattattatagccaaatgtatcatgtaactgca

SEQ ID NO: 25741 - DNA, 33 bp, Homo sapien
gagtaagcatgggaaaagatataaaagcattgg

SEQ ID NO: 25742 - DNA, 33 bp, Homo sapien
gagtaagcatgggaaaggatataaaagcattgg

SEQ ID NO: 25743 - DNA, 33 bp, Homo sapien
acagaacaaaagaaagcactgtagatcaccaaa

SEQ ID NO: 25744 - DNA, 33 bp, Homo sapien
acagaacaaaagaaagtactgtagatcaccaaa

SEQ ID NO: 25745 - DNA, 33 bp, Homo sapien
acatagaaatctgctggcaaaatttaacctgaa

SEQ ID NO: 25746 - DNA, 33 bp, Homo sapien
acatagaaatctgctgtcaaaatttaacctgaa

SEQ ID NO: 25747 - DNA, 33 bp, Homo sapien
agaggaagctgtttccagcattaaaacatggta

SEQ ID NO: 25748 - DNA, 33 bp, Homo sapien
agaggaagctgtttcccgcattaaaacatggta

SEQ ID NO: 25749 - DNA, 33 bp, Homo sapien
ttctgaaattttacacagacttttaatattagt

SEQ ID NO: 25750 - DNA, 33 bp, Homo sapien
ttctgaaattttacacggacttttaatattagt

SEQ ID NO: 25751 - DNA, 33 bp, Homo sapien
ccaaatgtattttgagacaaatgagtggatgat

SEQ ID NO: 25752 - DNA, 33 bp, Homo sapien
ccaaatgtattttgaggcaaatgagtggatgat

SEQ ID NO: 25753 - DNA, 33 bp, Homo sapien
ttttctcttatgtttgaaaaaatttatttaacc

SEQ ID NO: 25754 - DNA, 33 bp, Homo sapien
ttttctcttatgtttgcaaaaatttatttaacc

SEQ ID NO: 25755 - DNA, 33 bp, Homo sapien
tcctttaatctagttgacaaatacggtacttat

SEQ ID NO: 25756 - DNA, 33 bp, Homo sapien
tcctttaatctagttggcaaatacggtacttat

SEQ ID NO: 25757 - DNA, 33 bp, Homo sapien
atccctaagatcacacagtaaatccattttctt

SEQ ID NO: 25758 - DNA, 33 bp, Homo sapien
atccctaagatcacacggtaaatccattttctt

SEQ ID NO: 25759 - DNA, 33 bp, Homo sapien
aaagttaacattgttacgtgtaaattcgaatct

SEQ ID NO: 25760 - DNA, 33 bp, Homo sapien
aaagttaacattgttatgtgtaaattcgaatct

SEQ ID NO: 25761 - DNA, 33 bp, Homo sapien; identical to SEQ ID NO: 25759

SEQ ID NO: 25762 - DNA, 33 bp, Homo sapien; identical to SEQ ID NO: 25760

SEQ ID NO: 25763 - DNA, 33 bp, Homo sapien
cagtgatggataatgaatactgtgataaagatg

SEQ ID NO: 25764 - DNA, 33 bp, Homo sapien
cagtgatggataatgagtactgtgataaagatg

SEQ ID NO: 25765 - DNA, 33 bp, Homo sapien
tctcaccttcctctaaccactcaggattcatgt

SEQ ID NO: 25766 - DNA, 33 bp, Homo sapien
tctcaccttcctctaatcactcaggattcatgt

SEQ ID NO: 25767 - DNA, 33 bp, Homo sapien
tgactcagggatgacaaattaatcctcacttat

SEQ ID NO: 25768 - DNA, 33 bp, Homo sapien
tgactcagggatgacagattaatcctcacttat

SEQ ID NO: 25769 - DNA, 33 bp, Homo sapien
aagaatcttccaatttcaaatcctggacagttt

SEQ ID NO: 25770 - DNA, 33 bp, Homo sapien
aagaatcttccaatttgaaatcctggacagttt

SEQ ID NO: 25771 - DNA, 33 bp, Homo sapien
caaagctacaaaaggagatattagcaaatagat

SEQ ID NO: 25772 - DNA, 33 bp, Homo sapien
caaagctacaaaaggatatattagcaaatagat

SEQ ID NO: 25773 - DNA, 33 bp, Homo sapien
cactgaatatacttgaacatcggtgtaaaaatt

SEQ ID NO: 25774 - DNA, 33 bp, Homo sapien
cactgaatatacttgagcatcggtgtaaaaatt

SEQ ID NO: 25775 - DNA, 33 bp, Homo sapien
aagagtggtaacacaaacaggctgaaacatacc

SEQ ID NO: 25776 - DNA, 33 bp, Homo sapien
aagagtggtaacacaagcaggctgaaacatacc

SEQ ID NO: 25777 - DNA, 33 bp, Homo sapien
atagcccctgacaacaaagaattaattctttct

SEQ ID NO: 25778 - DNA, 33 bp, Homo sapien
atagcccctgacaacatagaattaattctttct

SEQ ID NO: 25779 - DNA, 33 bp, Homo sapien
aagttcttacagctaccgcagcctctttatgtt

SEQ ID NO: 25780 - DNA, 33 bp, Homo sapien
aagttcttacagctacggcagcctctttatgtt

SEQ ID NO: 25781 - DNA, 33 bp, Homo sapien
gtcttacatttaagagacagtcaaaagaaaagt

SEQ ID NO: 25782 - DNA, 33 bp, Homo sapien
gtcttacatttaagaggcagtcaaaagaaaagt

SEQ ID NO: 25783 - DNA, 33 bp, Homo sapien
tcagccctcttaccaaattcttgaacagtctga

SEQ ID NO: 25784 - DNA, 33 bp, Homo sapien
tcagccctcttaccaagttcttgaacagtctga

SEQ ID NO: 25785 - DNA, 33 bp, Homo sapien
acattcacatctctgacagaccttctaggacaa

SEQ ID NO: 25786 - DNA, 33 bp, Homo sapien
acattcacatctctgatagaccttctaggacaa

SEQ ID NO: 25787 - DNA, 33 bp, Homo sapien
ttaactgctagtgaccaaaagctgcataaaaac

SEQ ID NO: 25788 - DNA, 33 bp, Homo sapien
ttaactgctagtgaccgaaagctgcataaaaac

SEQ ID NO: 25789 - DNA, 33 bp, Homo sapien
aaatattaaatgatgacagtccaacattttatt

SEQ ID NO: 25790 - DNA, 33 bp, Homo sapien
aaatattaaatgatgatagtccaacattttatt

SEQ ID NO: 25791 - DNA, 33 bp, Homo sapien
aatgaaaactaagataggttgttgttagcagac

SEQ ID NO: 25792 - DNA, 33 bp, Homo sapien
aatgaaaactaagatatgttgttgttagcagac

SEQ ID NO: 25793 - DNA, 33 bp, Homo sapien
tagagagttgtttttcaatgggtatagagtttc

SEQ ID NO: 25794 - DNA, 33 bp, Homo sapien
tagagagttgtttttcgatgggtatagagtttc

SEQ ID NO: 25795 - DNA, 33 bp, Homo sapien
taagacacagagatgaacatatcattggtctat

SEQ ID NO: 25796 - DNA, 33 bp, Homo sapien
taagacacagagatgagcatatcattggtctat

SEQ ID NO: 25797 - DNA, 33 bp, Homo sapien
gaatgtacctttattacggcacttatcacacta

SEQ ID NO: 25798 - DNA, 33 bp, Homo sapien
gaatgtacctttattatggcacttatcacacta

SEQ ID NO: 25799 - DNA, 33 bp, Homo sapien
cagcaaccacagggaccgaaccctgcgaagcta

SEQ ID NO: 25800 - DNA, 33 bp, Homo sapien
cagcaaccacagggactgaaccctgcgaagcta

SEQ ID NO: 25801 - DNA, 33 bp, Homo sapien
gcagagactatgtccacgtcggtattcctggta

SEQ ID NO: 25802 - DNA, 33 bp, Homo sapien
gcagagactatgtccatgtcggtattcctggta

SEQ ID NO: 25803 - DNA, 33 bp, Homo sapien
tttggtatttgtaacagcaggtctaaaacaagt

SEQ ID NO: 25804 - DNA, 33 bp, Homo sapien
tttggtatttgtaacatcaggtctaaaacaagt

SEQ ID NO: 25805 - DNA, 33 bp, Homo sapien
taagtttcctagtcaactgattttgagttaatt

SEQ ID NO: 25806 - DNA, 33 bp, Homo sapien
taagtttcctagtcaattgattttgagttaatt

SEQ ID NO: 25807 - DNA, 33 bp, Homo sapien
atccccagtgtgctgacatttggagatagagct

SEQ ID NO: 25808 - DNA, 33 bp, Homo sapien
atccccagtgtgctgatatttggagatagagct

SEQ ID NO: 25809 - DNA, 33 bp, Homo sapien
ttcataagaaaacaaacttatcaggcactcttt

SEQ ID NO: 25810 - DNA, 33 bp, Homo sapien
ttcataagaaaacaaatttatcaggcactcttt

SEQ ID NO: 25811 - DNA, 33 bp, Homo sapien
cctggaggaacactaacgcctagtcaaaaaatt

SEQ ID NO: 25812 - DNA, 33 bp, Homo sapien
cctggaggaacactaatgcctagtcaaaaaatt

SEQ ID NO: 25813 - DNA, 33 bp, Homo sapien
tgaagaaaatctaaccagcaatccattcactca

SEQ ID NO: 25814 - DNA, 33 bp, Homo sapien
tgaagaaaatctaaccggcaatccattcactca

SEQ ID NO: 25815 - DNA, 33 bp, Homo sapien
acatgttcaaatacatcaagtgatatgttcaaa

SEQ ID NO: 25816 - DNA, 33 bp, Homo sapien
acatgttcaaatacattaagtgatatgttcaaa

SEQ ID NO: 25817 - DNA, 33 bp, Homo sapien
ggagaaaaacaggaagaccaagatggacatcag

SEQ ID NO: 25818 - DNA, 33 bp, Homo sapien
ggagaaaaacaggaaggccaagatggacatcag

SEQ ID NO: 25819 - DNA, 33 bp, Homo sapien
gaggagcaggaattaaccaaagggcagggagta

SEQ ID NO: 25820 - DNA, 33 bp, Homo sapien
gaggagcaggaattaatcaaagggcagggagta

SEQ ID NO: 25821 - DNA, 33 bp, Homo sapien
caagacaggcttccaacagtcggcacttgcatt

SEQ ID NO: 25822 - DNA, 33 bp, Homo sapien
caagacaggcttccaatagtcggcacttgcatt

SEQ ID NO: 25823 - DNA, 33 bp, Homo sapien
gaggacttagttcaaaataacaagcagaaattt

SEQ ID NO: 25824 - DNA, 33 bp, Homo sapien
gaggacttagttcaaagtaacaagcagaaattt

SEQ ID NO: 25825 - DNA, 33 bp, Homo sapien
caactgcaaaagctagacacaagattttaagat

SEQ ID NO: 25826 - DNA, 33 bp, Homo sapien
caactgcaaaagctagccacaagattttaagat

SEQ ID NO: 25827 - DNA, 33 bp, Homo sapien
actttgttactggtcaacctggttaatcaaata

SEQ ID NO: 25828 - DNA, 33 bp, Homo sapien
actttgttactggtcaccctggttaatcaaata

SEQ ID NO: 25829 - DNA, 33 bp, Homo sapien
cttttctcatactagacgtttttcatacttcta

SEQ ID NO: 25830 - DNA, 33 bp, Homo sapien
cttttctcatactagatgtttttcatacttcta

SEQ ID NO: 25831 - DNA, 33 bp, Homo sapien
ctttggaactaggtaacaggcggagattggaac

SEQ ID NO: 25832 - DNA, 33 bp, Homo sapien
ctttggaactaggtaataggcggagattggaac

SEQ ID NO: 25833 - DNA, 33 bp, Homo sapien
agaaaacactcataaaacagccattccttctta

SEQ ID NO: 25834 - DNA, 33 bp, Homo sapien
agaaaacactcataaagcagccattccttctta

SEQ ID NO: 25835 - DNA, 33 bp, Homo sapien
cattgtccgatgtgaaagttaattcgaattatt

SEQ ID NO: 25836 - DNA, 33 bp, Homo sapien
cattgtccgatgtgaaggttaattcgaattatt

SEQ ID NO: 25837 - DNA, 33 bp, Homo sapien
aatgtaacctgaaactaagcaacccaaatctac

SEQ ID NO: 25838 - DNA, 33 bp, Homo sapien
aatgtaacctgaaactcagcaacccaaatctac

SEQ ID NO: 25839 - DNA, 33 bp, Homo sapien
caccagtactcaacaacgattcaagaaattcag

SEQ ID NO: 25840 - DNA, 33 bp, Homo sapien
caccagtactcaacaatgattcaagaaattcag

SEQ ID NO: 25841 - DNA, 33 bp, Homo sapien
aaacaagtgtatagaacgtaacaaagtttctaa

SEQ ID NO: 25842 - DNA, 33 bp, Homo sapien
aaacaagtgtatagaatgtaacaaagtttctaa

SEQ ID NO: 25843 - DNA, 33 bp, Homo sapien
caacgtataaatctcaaaggctcatgtctagtt

SEQ ID NO: 25844 - DNA, 33 bp, Homo sapien
caacgtataaatctcagaggctcatgtctagtt

SEQ ID NO: 25845 - DNA, 33 bp, Homo sapien
gacagaaggagtagcaagtttagccttggagtc

SEQ ID NO: 25846 - DNA, 33 bp, Homo sapien
gacagaaggagtagcaggtttagccttggagtc

SEQ ID NO: 25847 - DNA, 33 bp, Homo sapien
tgcagaggtggttttgcagttctgcccatattc

SEQ ID NO: 25848 - DNA, 33 bp, Homo sapien
tgcagaggtggttttggagttctgcccatattc

SEQ ID NO: 25849 - DNA, 33 bp, Homo sapien
atcctacaaatccaaactaaaaggcaaagatat

SEQ ID NO: 25850 - DNA, 33 bp, Homo sapien
atcctacaaatccaaagtaaaaggcaaagatat

SEQ ID NO: 25851 - DNA, 33 bp, Homo sapien
gcttaagtactttctcaaagcattttttcttga

SEQ ID NO: 25852 - DNA, 33 bp, Homo sapien
gcttaagtactttctcgaagcattttttcttga

SEQ ID NO: 25853 - DNA, 33 bp, Homo sapien
tattaaattatagcaaacttatactgttattac

SEQ ID NO: 25854 - DNA, 33 bp, Homo sapien
tattaaattatagcaagcttatactgttattac

SEQ ID NO: 25855 - DNA, 33 bp, Homo sapien
taacagaacaatattagatcatgcagagaagga

SEQ ID NO: 25856 - DNA, 33 bp, Homo sapien
taacagaacaatattatatcatgcagagaagga

SEQ ID NO: 25857 - DNA, 33 bp, Homo sapien
aatgcaaaatcctcggccccatgccagactttc

SEQ ID NO: 25858 - DNA, 33 bp, Homo sapien
aatgcaaaatcctcggtcccatgccagactttc

SEQ ID NO: 25859 - DNA, 33 bp, Homo sapien
tttctaagcttttgatgacaaaggagtgatgca

SEQ ID NO: 25860 - DNA, 33 bp, Homo sapien
tttctaagcttttgattacaaaggagtgatgca

SEQ ID NO: 25861 - DNA, 33 bp, Homo sapien
aatgagtactctaaaaggcagaacttaatccca

SEQ ID NO: 25862 - DNA, 33 bp, Homo sapien
aatgagtactctaaaatgcagaacttaatccca

SEQ ID NO: 25863 - DNA, 33 bp, Homo sapien
ataggaaatagatcaaaacttatgttagcttaa

SEQ ID NO: 25864 - DNA, 33 bp, Homo sapien
ataggaaatagatcaacacttatgttagcttaa

SEQ ID NO: 25865 - DNA, 33 bp, Homo sapien
taaagcaagtgttggaaacccaaactcatcatc

SEQ ID NO: 25866 - DNA, 33 bp, Homo sapien
taaagcaagtgttggatacccaaactcatcatc

SEQ ID NO: 25867 - DNA, 33 bp, Homo sapien
tattgtaaacccggtaggagggcagagcagatt

SEQ ID NO: 25868 - DNA, 33 bp, Homo sapien
tattgtaaacccggtatgagggcagagcagatt

SEQ ID NO: 25869 - DNA, 33 bp, Homo sapien
cttggatttcaatcagcaagtgacatattctaa

SEQ ID NO: 25870 - DNA, 33 bp, Homo sapien
cttggatttcaatcagtaagtgacatattctaa

SEQ ID NO: 25871 - DNA, 33 bp, Homo sapien
gcatttactttgatagcattggccagttatcaa

SEQ ID NO: 25872 - DNA, 33 bp, Homo sapien
gcatttactttgatagtattggccagttatcaa

SEQ ID NO: 25873 - DNA, 33 bp, Homo sapien
tagtggaacacattcaactttaaaccatttgtt

SEQ ID NO: 25874 - DNA, 33 bp, Homo sapien
tagtggaacacattcatctttaaaccatttgtt

SEQ ID NO: 25875 - DNA, 33 bp, Homo sapien
tgtatattagcattaactgtagtcatcctacag

SEQ ID NO: 25876 - DNA, 33 bp, Homo sapien
tgtatattagcattaagtgtagtcatcctacag

SEQ ID NO: 25877 - DNA, 33 bp, Homo sapien
taaagaatcaagattgcagagacaataagatct

SEQ ID NO: 25878 - DNA, 33 bp, Homo sapien
taaagaatcaagattgtagagacaataagatct

SEQ ID NO: 25879 - DNA, 33 bp, Homo sapien
ttaaatctggcatgatcaaacacttacatttac

SEQ ID NO: 25880 - DNA, 33 bp, Homo sapien
ttaaatctggcatgattaaacacttacatttac

SEQ ID NO: 25881 - DNA, 33 bp, Homo sapien
ctgcagaaaaagtagaagcaagaaaggaggaaa

SEQ ID NO: 25882 - DNA, 33 bp, Homo sapien
ctgcagaaaaagtagacgcaagaaaggaggaaa

SEQ ID NO: 25883 - DNA, 33 bp, Homo sapien
ttcaaagccctctacaatactgtccaaactatt

SEQ ID NO: 25884 - DNA, 33 bp, Homo sapien
ttcaaagccctctacagtactgtccaaactatt

SEQ ID NO: 25885 - DNA, 33 bp, Homo sapien
tcagaagtagaaatgacgaggattaaaagtgtt

SEQ ID NO: 25886 - DNA, 33 bp, Homo sapien
tcagaagtagaaatgatgaggattaaaagtgtt

SEQ ID NO: 25887 - DNA, 33 bp, Homo sapien
tgaaattataaaatcaaccagtagctggcacat

SEQ ID NO: 25888 - DNA, 33 bp, Homo sapien
tgaaattataaaatcagccagtagctggcacat

SEQ ID NO: 25889 - DNA, 33 bp, Homo sapien
aagaggacaggaacaactgagagtatatggtct

SEQ ID NO: 25890 - DNA, 33 bp, Homo sapien
aagaggacaggaacaattgagagtatatggtct

SEQ ID NO: 25891 - DNA, 33 bp, Homo sapien
gagtgtgaagagtggaagtggccttatagaaga

SEQ ID NO: 25892 - DNA, 33 bp, Homo sapien
gagtgtgaagagtggaggtggccttatagaaga

SEQ ID NO: 25893 - DNA, 33 bp, Homo sapien
ggcagaccttatgtggcaagcaattatgatagt

SEQ ID NO: 25894 - DNA, 33 bp, Homo sapien
ggcagaccttatgtggtaagcaattatgatagt

SEQ ID NO: 25895 - DNA, 33 bp, Homo sapien
cacactacatggcttcgctttgacttaaaaaca

SEQ ID NO: 25896 - DNA, 33 bp, Homo sapien
cacactacatggcttctctttgacttaaaaaca

SEQ ID NO: 25897 - DNA, 33 bp, Homo sapien
cttccttcctagttggccacctgtacactccat

SEQ ID NO: 25898 - DNA, 33 bp, Homo sapien
cttccttcctagttggtcacctgtacactccat

SEQ ID NO: 25899 - DNA, 33 bp, Homo sapien
cagtgcctaatgcgaaccctggctcttggaagg

SEQ ID NO: 25900 - DNA, 33 bp, Homo sapien
cagtgcctaatgcgaatcctggctcttggaagg

SEQ ID NO: 25901 - DNA, 33 bp, Homo sapien
gattagctgctcttacaaaagggcttgacagag

SEQ ID NO: 25902 - DNA, 33 bp, Homo sapien
gattagctgctcttactaaagggcttgacagag

SEQ ID NO: 25903 - DNA, 33 bp, Homo sapien
caggtgctacatttgcactgagaagaatccaca

SEQ ID NO: 25904 - DNA, 33 bp, Homo sapien
caggtgctacatttgcgctgagaagaatccaca

SEQ ID NO: 25905 - DNA, 33 bp, Homo sapien
aaaggatagcattatacagtatgtgaaattata

SEQ ID NO: 25906 - DNA, 33 bp, Homo sapien
aaaggatagcattatagagtatgtgaaattata

SEQ ID NO: 25907 - DNA, 33 bp, Homo sapien
gagagtttttgaagaacgtaagactgaaggaat

SEQ ID NO: 25908 - DNA, 33 bp, Homo sapien
gagagtttttgaagaaggtaagactgaaggaat

SEQ ID NO: 25909 - DNA, 33 bp, Homo sapien
ttacccacaaaaggaaatcaagtagatacaata

SEQ ID NO: 25910 - DNA, 33 bp, Homo sapien
ttacccacaaaaggaagtcaagtagatacaata

SEQ ID NO: 25911 - DNA, 33 bp, Homo sapien
aatttgaatcttgaacacggtgaaacaaacgtt

SEQ ID NO: 25912 - DNA, 33 bp, Homo sapien
aatttgaatcttgaacgcggtgaaacaaacgtt

SEQ ID NO: 25913 - DNA, 33 bp, Homo sapien
tgcctttggttgcaaacctagtaagtagcatgg

SEQ ID NO: 25914 - DNA, 33 bp, Homo sapien
tgcctttggttgcaaatctagtaagtagcatgg

SEQ ID NO: 25915 - DNA, 33 bp, Homo sapien
actttaagatctcaaaatggaatataagatggt

SEQ ID NO: 25916 - DNA, 33 bp, Homo sapien
actttaagatctcaaagtggaatataagatggt

SEQ ID NO: 25917 - DNA, 33 bp, Homo sapien
tttcataatatgtcacaaactctaccattgcca

SEQ ID NO: 25918 - DNA, 33 bp, Homo sapien
tttcataatatgtcacgaactctaccattgcca

SEQ ID NO: 25919 - DNA, 33 bp, Homo sapien
gaaccaagtgttgcaacagaagtaccatcagtg

SEQ ID NO: 25920 - DNA, 33 bp, Homo sapien
gaaccaagtgttgcaatagaagtaccatcagtg

SEQ ID NO: 25921 - DNA, 33 bp, Homo sapien
tttaaactacagaaccaccttatagctatggat

SEQ ID NO: 25922 - DNA, 33 bp, Homo sapien
tttaaactacagaaccgccttatagctatggat

SEQ ID NO: 25923 - DNA, 33 bp, Homo sapien
tcttcagtgccctaatgatagaggaaagaagaa

SEQ ID NO: 25924 - DNA, 33 bp, Homo sapien
tcttcagtgccctaattatagaggaaagaagaa

SEQ ID NO: 25925 - DNA, 33 bp, Homo sapien
gtttgtgtgaatgtacacgtcaaatttaaaggt

SEQ ID NO: 25926 - DNA, 33 bp, Homo sapien
gtttgtgtgaatgtacgcgtcaaatttaaaggt

SEQ ID NO: 25927 - DNA, 33 bp, Homo sapien
atgaaataatattttacgctgaggttaagtctt

SEQ ID NO: 25928 - DNA, 33 bp, Homo sapien
atgaaataatattttatgctgaggttaagtctt

SEQ ID NO: 25929 - DNA, 33 bp, Homo sapien
tattgggccaaatttaacaataatactgagtaa

SEQ ID NO: 25930 - DNA, 33 bp, Homo sapien
tattgggccaaatttagcaataatactgagtaa

SEQ ID NO: 25931 - DNA, 33 bp, Homo sapien
gtttccacagagttgacataatttgtcttaatt

SEQ ID NO: 25932 - DNA, 33 bp, Homo sapien
gtttccacagagttgatataatttgtcttaatt

SEQ ID NO: 25933 - DNA, 33 bp, Homo sapien
tgtttctcccattgcactgatacaggagaatgt

SEQ ID NO: 25934 - DNA, 33 bp, Homo sapien
tgtttctcccattgcattgatacaggagaatgt

SEQ ID NO: 25935 - DNA, 33 bp, Homo sapien
gtgtccaattaacatcagaatccatttagggaa

SEQ ID NO: 25936 - DNA, 33 bp, Homo sapien
gtgtccaattaacatctgaatccatttagggaa

SEQ ID NO: 25937 - DNA, 33 bp, Homo sapien
gaaaggagagcaaataaggtgtttgaggacagg

SEQ ID NO: 25938 - DNA, 33 bp, Homo sapien
gaaaggagagcaaatagggtgtttgaggacagg

SEQ ID NO: 25939 - DNA, 33 bp, Homo sapien
atttgttcccatccacaaagatcatccattgac

SEQ ID NO: 25940 - DNA, 33 bp, Homo sapien
atttgttcccatccacgaagatcatccattgac

SEQ ID NO: 25941 - DNA, 33 bp, Homo sapien
accactaaaggaaggaagaatgcttgttggaac

SEQ ID NO: 25942 - DNA, 33 bp, Homo sapien
accactaaaggaaggaggaatgcttgttggaac

SEQ ID NO: 25943 - DNA, 33 bp, Homo sapien
aaggctcctttagtaactggtcactggttgaca

SEQ ID NO: 25944 - DNA, 33 bp, Homo sapien
aaggctcctttagtaattggtcactggttgaca

SEQ ID NO: 25945 - DNA, 33 bp, Homo sapien
ggctggagtacagcaaggaaggagggctataga

SEQ ID NO: 25946 - DNA, 33 bp, Homo sapien
ggctggagtacagcaatgaaggagggctataga

SEQ ID NO: 25947 - DNA, 33 bp, Homo sapien
aagcagacacttagacaagagtgcaagtacagg

SEQ ID NO: 25948 - DNA, 33 bp, Homo sapien
aagcagacacttagactagagtgcaagtacagg

SEQ ID NO: 25949 - DNA, 33 bp, Homo sapien
taatccaaatgagaaccatagcaaaatccaaaa

SEQ ID NO: 25950 - DNA, 33 bp, Homo sapien
taatccaaatgagaactatagcaaaatccaaaa

SEQ ID NO: 25951 - DNA, 33 bp, Homo sapien
tgagcatctatctccacggttgagaaacttttg

SEQ ID NO: 25952 - DNA, 33 bp, Homo sapien
tgagcatctatctccatggttgagaaacttttg

SEQ ID NO: 25953 - DNA, 33 bp, Homo sapien
tggatattggttctaacgctgaagactctgata

SEQ ID NO: 25954 - DNA, 33 bp, Homo sapien
tggatattggttctaaggctgaagactctgata

SEQ ID NO: 25955 - DNA, 33 bp, Homo sapien
actgttcataggaatacaaactcatgcaaccac

SEQ ID NO: 25956 - DNA, 33 bp, Homo sapien
actgttcataggaatataaactcatgcaaccac

SEQ ID NO: 25957 - DNA, 33 bp, Homo sapien
attaccttttccacaacttgggtcaggtgctat

SEQ ID NO: 25958 - DNA, 33 bp, Homo sapien
attaccttttccacaatttgggtcaggtgctat

SEQ ID NO: 25959 - DNA, 33 bp, Homo sapien
cagttgacactggagaatatttagccagaatct

SEQ ID NO: 25960 - DNA, 33 bp, Homo sapien
cagttgacactggagagtatttagccagaatct

SEQ ID NO: 25961 - DNA, 33 bp, Homo sapien
tcaagtttgtgttcaaatgtcattcttctggtt

SEQ ID NO: 25962 - DNA, 33 bp, Homo sapien
tcaagtttgtgttcaagtgtcattcttctggtt

SEQ ID NO: 25963 - DNA, 33 bp, Homo sapien
tatgtatttattccacaagtacagtgatttttt

SEQ ID NO: 25964 - DNA, 33 bp, Homo sapien
tatgtatttattccacgagtacagtgatttttt

SEQ ID NO: 25965 - DNA, 33 bp, Homo sapien
catgaaaaagtacagaaaaatcctagaacataa

SEQ ID NO: 25966 - DNA, 33 bp, Homo sapien
catgaaaaagtacagataaatcctagaacataa

SEQ ID NO: 25967 - DNA, 33 bp, Homo sapien
ataacacttcacttaacgtagatcaaattaata

SEQ ID NO: 25968 - DNA, 33 bp, Homo sapien
ataacacttcacttaatgtagatcaaattaata

SEQ ID NO: 25969 - DNA, 33 bp, Homo sapien
tctggcattagtcaggcatttgtttaaagataa

SEQ ID NO: 25970 - DNA, 33 bp, Homo sapien
tctggcattagtcagggatttgtttaaagataa

SEQ ID NO: 25971 - DNA, 33 bp, Homo sapien
cacaatgtgcaagatactacttccagtctcagt

SEQ ID NO: 25972 - DNA, 33 bp, Homo sapien
cacaatgtgcaagatattacttccagtctcagt

SEQ ID NO: 25973 - DNA, 33 bp, Homo sapien
cacaattgtctctgaaatgaagcatgtttctta

SEQ ID NO: 25974 - DNA, 33 bp, Homo sapien
cacaattgtctctgaagtgaagcatgtttctta

SEQ ID NO: 25975 - DNA, 33 bp, Homo sapien
acacacacaaaccacaaataataaatgccagtc

SEQ ID NO: 25976 - DNA, 33 bp, Homo sapien
acacacacaaaccacacataataaatgccagtc

SEQ ID NO: 25977 - DNA, 33 bp, Homo sapien
caaattaagcattaccacctttcccctgtatta

SEQ ID NO: 25978 - DNA, 33 bp, Homo sapien
caaattaagcattaccgcctttcccctgtatta

SEQ ID NO: 25979 - DNA, 33 bp, Homo sapien
ctatgtgctcagaaaacggcttgtatgactaga

SEQ ID NO: 25980 - DNA, 33 bp, Homo sapien
ctatgtgctcagaaaatggcttgtatgactaga

SEQ ID NO: 25981 - DNA, 33 bp, Homo sapien
acactttttttaatgtaaaatatctgagtcgga

SEQ ID NO: 25982 - DNA, 33 bp, Homo sapien
acactttttttaatgtgaaatatctgagtcgga

SEQ ID NO: 25983 - DNA, 33 bp, Homo sapien
aaatatctgagtcggaacacttctcaatgaata

SEQ ID NO: 25984 - DNA, 33 bp, Homo sapien
aaatatctgagtcggagcacttctcaatgaata

SEQ ID NO: 25985 - DNA, 33 bp, Homo sapien
ttcctcacaatgaataagagaatacggcaaatc

SEQ ID NO: 25986 - DNA, 33 bp, Homo sapien
ttcctcacaatgaatacgagaatacggcaaatc

SEQ ID NO: 25987 - DNA, 33 bp, Homo sapien
gcctggccctactacacaacagttgaacctgca

SEQ ID NO: 25988 - DNA, 33 bp, Homo sapien
gcctggccctactacagaacagttgaacctgca

SEQ ID NO: 25989 - DNA, 33 bp, Homo sapien
gcaacaggaactcttaatcattcctggaactct

SEQ ID NO: 25990 - DNA, 33 bp, Homo sapien
gcaacaggaactcttattcattcctggaactct

SEQ ID NO: 25991 - DNA, 33 bp, Homo sapien
tttcttatacctgaaactcttacttgcatttta

SEQ ID NO: 25992 - DNA, 33 bp, Homo sapien
tttcttatacctgaaattcttacttgcatttta

SEQ ID NO: 25993 - DNA, 33 bp, Homo sapien
gcacccccatgttacccatcaaagaagaagaag

SEQ ID NO: 25994 - DNA, 33 bp, Homo sapien
gcacccccatgttacctatcaaagaagaagaag

SEQ ID NO: 25995 - DNA, 33 bp, Homo sapien
tttggtggcaagtaaaagcagggtaacttgtaa

SEQ ID NO: 25996 - DNA, 33 bp, Homo sapien
tttggtggcaagtaaaggcagggtaacttgtaa

SEQ ID NO: 25997 - DNA, 33 bp, Homo sapien
aatcagtctatggaaacaacacttgagagtctt

SEQ ID NO: 25998 - DNA, 33 bp, Homo sapien
aatcagtctatggaaataacacttgagagtctt

SEQ ID NO: 25999 - DNA, 33 bp, Homo sapien
tttctgaaatactgaaccaatgaactctgaata

SEQ ID NO: 26000 - DNA, 33 bp, Homo sapien
tttctgaaatactgaatcaatgaactctgaata

SEQ ID NO: 26001 - DNA, 33 bp, Homo sapien
atcatgttatctctcaacagtctaaaagataac

SEQ ID NO: 26002 - DNA, 33 bp, Homo sapien
atcatgttatctctcagcagtctaaaagataac

SEQ ID NO: 26003 - DNA, 33 bp, Homo sapien
tttactgccaactccaagcaatagtcccttccc

SEQ ID NO: 26004 - DNA, 33 bp, Homo sapien
tttactgccaactccaggcaatagtcccttccc

SEQ ID NO: 26005 - DNA, 33 bp, Homo sapien
ttaggcattgggctccaatctggatttgacttc

SEQ ID NO: 26006 - DNA, 33 bp, Homo sapien
ttaggcattgggctccgatctggatttgacttc

SEQ ID NO: 26007 - DNA, 33 bp, Homo sapien
atattatatgactctccacctctcttcaatcac

SEQ ID NO: 26008 - DNA, 33 bp, Homo sapien
atattatatgactctctacctctcttcaatcac

SEQ ID NO: 26009 - DNA, 33 bp, Homo sapien
tatatatgacattatacattccacactatattc

SEQ ID NO: 26010 - DNA, 33 bp, Homo sapien
tatatatgacattatatattccacactatattc

SEQ ID NO: 26011 - DNA, 33 bp, Homo sapien
atactttgataccagacagatttcaggttcagc

SEQ ID NO: 26012 - DNA, 33 bp, Homo sapien
atactttgataccagagagatttcaggttcagc

SEQ ID NO: 26013 - DNA, 33 bp, Homo sapien
tctcattggactaaataaatctgctcattactt

SEQ ID NO: 26014 - DNA, 33 bp, Homo sapien
tctcattggactaaattaatctgctcattactt

SEQ ID NO: 26015 - DNA, 33 bp, Homo sapien
gaagagtcagctggcactctctgcaggtttttg

SEQ ID NO: 26016 - DNA, 33 bp, Homo sapien
gaagagtcagctggcagtctctgcaggtttttg

SEQ ID NO: 26017 - DNA, 33 bp, Homo sapien
tatttaccactggaaagtcaatactcaaccaga

SEQ ID NO: 26018 - DNA, 33 bp, Homo sapien
tatttaccactggaaattcaatactcaaccaga

SEQ ID NO: 26019 - DNA, 33 bp, Homo sapien
agggtataatctcagacgctttgcagttattga

SEQ ID NO: 26020 - DNA, 33 bp, Homo sapien
agggtataatctcagatgctttgcagttattga

SEQ ID NO: 26021 - DNA, 33 bp, Homo sapien
atccttttcctataataagataaccacaatttt

SEQ ID NO: 26022 - DNA, 33 bp, Homo sapien
atccttttcctataatgagataaccacaatttt

SEQ ID NO: 26023 - DNA, 33 bp, Homo sapien
gcctaccatcttaaaactggttataataggagc

SEQ ID NO: 26024 - DNA, 33 bp, Homo sapien
gcctaccatcttaaaattggttataataggagc

SEQ ID NO: 26025 - DNA, 33 bp, Homo sapien
accaattctttcttacaactgactcttactatg

SEQ ID NO: 26026 - DNA, 33 bp, Homo sapien
accaattctttcttacgactgactcttactatg

SEQ ID NO: 26027 - DNA, 33 bp, Homo sapien
gagaaagagtggcccactgaaatattattgctt

SEQ ID NO: 26028 - DNA, 33 bp, Homo sapien
gagaaagagtggcccattgaaatattattgctt

SEQ ID NO: 26029 - DNA, 33 bp, Homo sapien
caaggctgatcaatgaaaacaccaaataccaaa

SEQ ID NO: 26030 - DNA, 33 bp, Homo sapien
caaggctgatcaatgacaacaccaaataccaaa

SEQ ID NO: 26031 - DNA, 33 bp, Homo sapien
attccttatacatcacacaatccttacacatgg

SEQ ID NO: 26032 - DNA, 33 bp, Homo sapien
attccttatacatcacgcaatccttacacatgg

SEQ ID NO: 26033 - DNA, 33 bp, Homo sapien
acatcaggttgagtttcaaaatgaacgtactcc

SEQ ID NO: 26034 - DNA, 33 bp, Homo sapien
acatcaggttgagttttaaaatgaacgtactcc

SEQ ID NO: 26035 - DNA, 33 bp, Homo sapien
cctgcctggctgatccaagtagcaggggttgga

SEQ ID NO: 26036 - DNA, 33 bp, Homo sapien
cctgcctggctgatccgagtagcaggggttgga

SEQ ID NO: 26037 - DNA, 33 bp, Homo sapien
gctgaagaaatggatgccatatttaactccgag

SEQ ID NO: 26038 - DNA, 33 bp, Homo sapien
gctgaagaaatggatgtcatatttaactccgag

SEQ ID NO: 26039 - DNA, 33 bp, Homo sapien
ttccaagtaggcaccacatagtactgatctatg

SEQ ID NO: 26040 - DNA, 33 bp, Homo sapien
ttccaagtaggcaccatatagtactgatctatg

SEQ ID NO: 26041 - DNA, 33 bp, Homo sapien
attttttagctgcaaccgcatttctttcctatt

SEQ ID NO: 26042 - DNA, 33 bp, Homo sapien
attttttagctgcaactgcatttctttcctatt

SEQ ID NO: 26043 - DNA, 33 bp, Homo sapien
ctgcttgcatcacatacgttcttatcctttgtg

SEQ ID NO: 26044 - DNA, 33 bp, Homo sapien
ctgcttgcatcacatatgttcttatcctttgtg

SEQ ID NO: 26045 - DNA, 33 bp, Homo sapien
aaatctccagcactaactccctaaaccctcaat

SEQ ID NO: 26046 - DNA, 33 bp, Homo sapien
aaatctccagcactaagtccctaaaccctcaat

SEQ ID NO: 26047 - DNA, 33 bp, Homo sapien
accaaaatgacagcaaatgctacacagaccaag

SEQ ID NO: 26048 - DNA, 33 bp, Homo sapien
accaaaatgacagcaagtgctacacagaccaag

SEQ ID NO: 26049 - DNA, 33 bp, Homo sapien
taattttcaatttccaaatacattccctgtgtg

SEQ ID NO: 26050 - DNA, 33 bp, Homo sapien
taattttcaatttccagatacattccctgtgtg

SEQ ID NO: 26051 - DNA, 33 bp, Homo sapien
ttgagtctaaaagtggcaagattggctcaattc

SEQ ID NO: 26052 - DNA, 33 bp, Homo sapien
ttgagtctaaaagtgggaagattggctcaattc

SEQ ID NO: 26053 - DNA, 33 bp, Homo sapien
cagtctcagagaagaacgttattaatatactgt

SEQ ID NO: 26054 - DNA, 33 bp, Homo sapien
cagtctcagagaagaatgttattaatatactgt

SEQ ID NO: 26055 - DNA, 33 bp, Homo sapien
ttaaaagttagggttaaggctcattggataact

SEQ ID NO: 26056 - DNA, 33 bp, Homo sapien
ttaaaagttagggttagggctcattggataact

SEQ ID NO: 26057 - DNA, 33 bp, Homo sapien
aacattgttcattgaaagcaatctcgtctacac

SEQ ID NO: 26058 - DNA, 33 bp, Homo sapien
aacattgttcattgaaggcaatctcgtctacac

SEQ ID NO: 26059 - DNA, 33 bp, Homo sapien
tggtaaaaaaaagaagaagtatgcacacacctc

SEQ ID NO: 26060 - DNA, 33 bp, Homo sapien
tggtaaaaaaaagaagtagtatgcacacacctc

SEQ ID NO: 26061 - DNA, 33 bp, Homo sapien
tgagccaccgcaggccaaggttacttttcttta

SEQ ID NO: 26062 - DNA, 33 bp, Homo sapien
tgagccaccgcaggccgaggttacttttcttta

SEQ ID NO: 26063 - DNA, 33 bp, Homo sapien
ggaaacgaataatatgacagtcacaaataaatt

SEQ ID NO: 26064 - DNA, 33 bp, Homo sapien
ggaaacgaataatatggcagtcacaaataaatt

SEQ ID NO: 26065 - DNA, 33 bp, Homo sapien
ggcccagtaaattatggaccagtaagttatctg

SEQ ID NO: 26066 - DNA, 33 bp, Homo sapien
ggcccagtaaattatgtaccagtaagttatctg

SEQ ID NO: 26067 - DNA, 33 bp, Homo sapien
actggaaactgcccaaatatccttcaatgcatg

SEQ ID NO: 26068 - DNA, 33 bp, Homo sapien
actggaaactgcccaattatccttcaatgcatg

SEQ ID NO: 26069 - DNA, 33 bp, Homo sapien
ccagtgagcaggcagtaactctctatcacatca

SEQ ID NO: 26070 - DNA, 33 bp, Homo sapien
ccagtgagcaggcagtcactctctatcacatca

SEQ ID NO: 26071 - DNA, 33 bp, Homo sapien
cctatttcaatgaccacgtttaacagtcatttt

SEQ ID NO: 26072 - DNA, 33 bp, Homo sapien
cctatttcaatgaccaggtttaacagtcatttt

SEQ ID NO: 26073 - DNA, 33 bp, Homo sapien
ccattttattttggtccacaattatatcactac

SEQ ID NO: 26074 - DNA, 33 bp, Homo sapien
ccattttattttggtctacaattatatcactac

SEQ ID NO: 26075 - DNA, 33 bp, Homo sapien
cttaagccaggatctacggaggatcaaaaaaat

SEQ ID NO: 26076 - DNA, 33 bp, Homo sapien
cttaagccaggatctatggaggatcaaaaaaat

SEQ ID NO: 26077 - DNA, 33 bp, Homo sapien
cctcagaaaacaataactcaaagtgaaggctta

SEQ ID NO: 26078 - DNA, 33 bp, Homo sapien
cctcagaaaacaataagtcaaagtgaaggctta

SEQ ID NO: 26079 - DNA, 33 bp, Homo sapien
atacaggtaaaaccaaaagactgatagattgga

SEQ ID NO: 26080 - DNA, 33 bp, Homo sapien
atacaggtaaaaccaacagactgatagattgga

SEQ ID NO: 26081 - DNA, 33 bp, Homo sapien
gggaaaaatatactaaactctcaccatggcctg

SEQ ID NO: 26082 - DNA, 33 bp, Homo sapien
gggaaaaatatactaacctctcaccatggcctg

SEQ ID NO: 26083 - DNA, 33 bp, Homo sapien
tgataaggcattactaacttaattatcataggc

SEQ ID NO: 26084 - DNA, 33 bp, Homo sapien
tgataaggcattactaccttaattatcataggc

SEQ ID NO: 26085 - DNA, 33 bp, Homo sapien
ctagagataacaaaggccaagatgtatgcaact

SEQ ID NO: 26086 - DNA, 33 bp, Homo sapien
ctagagataacaaaggtcaagatgtatgcaact

SEQ ID NO: 26087 - DNA, 33 bp, Homo sapien
tacttttaataaatagaaccccacctcatttca

SEQ ID NO: 26088 - DNA, 33 bp, Homo sapien
tacttttaataaataggaccccacctcatttca

SEQ ID NO: 26089 - DNA, 33 bp, Homo sapien
taaagttttcttatcaataatgactggcaaaca

SEQ ID NO: 26090 - DNA, 33 bp, Homo sapien
taaagttttcttatcagtaatgactggcaaaca

SEQ ID NO: 26091 - DNA, 33 bp, Homo sapien
caaggggtgtaattgccatttatttatatttgt

SEQ ID NO: 26092 - DNA, 33 bp, Homo sapien
caaggggtgtaattgctatttatttatatttgt

SEQ ID NO: 26093 - DNA, 33 bp, Homo sapien
taacatatatgagtaacgtgagtcaggacaaag

SEQ ID NO: 26094 - DNA, 33 bp, Homo sapien
taacatatatgagtaatgtgagtcaggacaaag

SEQ ID NO: 26095 - DNA, 33 bp, Homo sapien
tataagaaaacaaacaacgtaatgtgaaaatgg

SEQ ID NO: 26096 - DNA, 33 bp, Homo sapien
tataagaaaacaaacagcgtaatgtgaaaatgg

SEQ ID NO: 26097 - DNA, 33 bp, Homo sapien
tcctaccaccctacaacgatgcacattacttaa

SEQ ID NO: 26098 - DNA, 33 bp, Homo sapien
tcctaccaccctacaatgatgcacattacttaa

SEQ ID NO: 26099 - DNA, 33 bp, Homo sapien
tgcactactgtcttccacttttctttcagaacc

SEQ ID NO: 26100 - DNA, 33 bp, Homo sapien
tgcactactgtcttcctcttttctttcagaacc

SEQ ID NO: 26101 - DNA, 33 bp, Homo sapien
tttgaatatcactttcaaggatagtaacacacc

SEQ ID NO: 26102 - DNA, 33 bp, Homo sapien
tttgaatatcactttcgaggatagtaacacacc

SEQ ID NO: 26103 - DNA, 33 bp, Homo sapien
ataattttagagataactggaatgttgtattta

SEQ ID NO: 26104 - DNA, 33 bp, Homo sapien
ataattttagagataattggaatgttgtattta

SEQ ID NO: 26105 - DNA, 33 bp, Homo sapien
aacaacagacattagcacctacttgaggatgga

SEQ ID NO: 26106 - DNA, 33 bp, Homo sapien
aacaacagacattagcgcctacttgaggatgga

SEQ ID NO: 26107 - DNA, 33 bp, Homo sapien
aaagagaagtggcacagaaagtagccaagaggt

SEQ ID NO: 26108 - DNA, 33 bp, Homo sapien
aaagagaagtggcacataaagtagccaagaggt

SEQ ID NO: 26109 - DNA, 33 bp, Homo sapien
ctactgccagctagccactatcattgatttcat

SEQ ID NO: 26110 - DNA, 33 bp, Homo sapien
ctactgccagctagccgctatcattgatttcat

SEQ ID NO: 26111 - DNA, 33 bp, Homo sapien
attgcttctgtagacactcacaaaagatcagct

SEQ ID NO: 26112 - DNA, 33 bp, Homo sapien
attgcttctgtagacattcacaaaagatcagct

SEQ ID NO: 26113 - DNA, 33 bp, Homo sapien
aatgtggaacaaagtccagtagtatcctaatga

SEQ ID NO: 26114 - DNA, 33 bp, Homo sapien
aatgtggaacaaagtcgagtagtatcctaatga

SEQ ID NO: 26115 - DNA, 33 bp, Homo sapien
taagcagacaattacaacacaatgcaatagttg

SEQ ID NO: 26116 - DNA, 33 bp, Homo sapien
taagcagacaattacagcacaatgcaatagttg

SEQ ID NO: 26117 - DNA, 33 bp, Homo sapien
cttccaatgtgaatagcaatcatctttctgaat

SEQ ID NO: 26118 - DNA, 33 bp, Homo sapien
cttccaatgtgaatagtaatcatctttctgaat

SEQ ID NO: 26119 - DNA, 33 bp, Homo sapien
tgcaggaacagaagaagaaacactacaggtcct

SEQ ID NO: 26120 - DNA, 33 bp, Homo sapien
tgcaggaacagaagaataaacactacaggtcct

SEQ ID NO: 26121 - DNA, 33 bp, Homo sapien
ccttccaataagcacacggtaaataaaacatca

SEQ ID NO: 26122 - DNA, 33 bp, Homo sapien
ccttccaataagcacatggtaaataaaacatca

SEQ ID NO: 26123 - DNA, 33 bp, Homo sapien
caaaaatatactgccaatgataaaaaatagaat

SEQ ID NO: 26124 - DNA, 33 bp, Homo sapien
caaaaatatactgccattgataaaaaatagaat

SEQ ID NO: 26125 - DNA, 33 bp, Homo sapien
caacttatccacaaaaaatgttgttgtataaca

SEQ ID NO: 26126 - DNA, 33 bp, Homo sapien
caacttatccacaaaagatgttgttgtataaca

SEQ ID NO: 26127 - DNA, 33 bp, Homo sapien
acaatgaagtagtaacaatggaactaggcctaa

SEQ ID NO: 26128 - DNA, 33 bp, Homo sapien
acaatgaagtagtaacgatggaactaggcctaa

SEQ ID NO: 26129 - DNA, 33 bp, Homo sapien
acttaagctatgcacccaagttaattttaagcc

SEQ ID NO: 26130 - DNA, 33 bp, Homo sapien
acttaagctatgcacctaagttaattttaagcc

SEQ ID NO: 26131 - DNA, 33 bp, Homo sapien
gtgggaggtaaagtcagaaaagcatcaggggac

SEQ ID NO: 26132 - DNA, 33 bp, Homo sapien
gtgggaggtaaagtcataaaagcatcaggggac

SEQ ID NO: 26133 - DNA, 33 bp, Homo sapien
ttgatcttataccaaaatagaagctacttaaca

SEQ ID NO: 26134 - DNA, 33 bp, Homo sapien
ttgatcttataccaaattagaagctacttaaca

SEQ ID NO: 26135 - DNA, 33 bp, Homo sapien
gtcatatttaaccgaccgtagaagaattaaatg

SEQ ID NO: 26136 - DNA, 33 bp, Homo sapien
gtcatatttaaccgactgtagaagaattaaatg

SEQ ID NO: 26137 - DNA, 33 bp, Homo sapien
cagtagctatttgcccagggaaagaagacaagt

SEQ ID NO: 26138 - DNA, 33 bp, Homo sapien
cagtagctatttgcccggggaaagaagacaagt

SEQ ID NO: 26139 - DNA, 33 bp, Homo sapien
tactgcttttctcatgaaatccaaatgtgcaat

SEQ ID NO: 26140 - DNA, 33 bp, Homo sapien
tactgcttttctcatggaatccaaatgtgcaat

SEQ ID NO: 26141 - DNA, 33 bp, Homo sapien
ctctttgtagatcaaactattgcacatttggat

SEQ ID NO: 26142 - DNA, 33 bp, Homo sapien
ctctttgtagatcaaattattgcacatttggat

SEQ ID NO: 26143 - DNA, 33 bp, Homo sapien
tcacatcctctcttcccattcagctttaagagg

SEQ ID NO: 26144 - DNA, 33 bp, Homo sapien
tcacatcctctcttccgattcagctttaagagg

SEQ ID NO: 26145 - DNA, 33 bp, Homo sapien
acacaagacataggtgcaggatggcatagcaag

SEQ ID NO: 26146 - DNA, 33 bp, Homo sapien
acacaagacataggtgtaggatggcatagcaag

SEQ ID NO: 26147 - DNA, 33 bp, Homo sapien
agcaaaacaaaggcaaaagaattgaaatcttac

SEQ ID NO: 26148 - DNA, 33 bp, Homo sapien
agcaaaacaaaggcaagagaattgaaatcttac

SEQ ID NO: 26149 - DNA, 33 bp, Homo sapien
ctggaccacgtaggtaaagcagaaacattccat

SEQ ID NO: 26150 - DNA, 33 bp, Homo sapien
ctggaccacgtaggtatagcagaaacattccat

SEQ ID NO: 26151 - DNA, 33 bp, Homo sapien
tatcttgcttgatctacggcgattacttgtgac

SEQ ID NO: 26152 - DNA, 33 bp, Homo sapien
tatcttgcttgatctatggcgattacttgtgac

SEQ ID NO: 26153 - DNA, 33 bp, Homo sapien
acataaggaactgcctaaagtcacataagtggt

SEQ ID NO: 26154 - DNA, 33 bp, Homo sapien
acataaggaactgcctgaagtcacataagtggt

SEQ ID NO: 26155 - DNA, 33 bp, Homo sapien
gaaaaaaatcttttgacagtcacactaatatga

SEQ ID NO: 26156 - DNA, 33 bp, Homo sapien
gaaaaaaatcttttgagagtcacactaatatga

SEQ ID NO: 26157 - DNA, 33 bp, Homo sapien
tcacaccagcaataagccctttcattcagtatg

SEQ ID NO: 26158 - DNA, 33 bp, Homo sapien
tcacaccagcaataaggcctttcattcagtatg

SEQ ID NO: 26159 - DNA, 33 bp, Homo sapien
ttttttagaagaagtgccacgctaatactttaa

SEQ ID NO: 26160 - DNA, 33 bp, Homo sapien
ttttttagaagaagtgtcacgctaatactttaa

SEQ ID NO: 26161 - DNA, 33 bp, Homo sapien
cccactcacaattgtaccaccttaaaagagtta

SEQ ID NO: 26162 - DNA, 33 bp, Homo sapien
cccactcacaattgtatcaccttaaaagagtta

SEQ ID NO: 26163 - DNA, 33 bp, Homo sapien
agtcaagctattaccccgcaataatggaaagat

SEQ ID NO: 26164 - DNA, 33 bp, Homo sapien
agtcaagctattaccctgcaataatggaaagat

SEQ ID NO: 26165 - DNA, 33 bp, Homo sapien
aattaagtgcttaaaagtaaacagtctatcata

SEQ ID NO: 26166 - DNA, 33 bp, Homo sapien
aattaagtgcttaaaattaaacagtctatcata

SEQ ID NO: 26167 - DNA, 33 bp, Homo sapien
cctgtgtggttttggcgaggaccactatgtatt

SEQ ID NO: 26168 - DNA, 33 bp, Homo sapien
cctgtgtggttttggctaggaccactatgtatt

SEQ ID NO: 26169 - DNA, 33 bp, Homo sapien
ccttgctctgacaacccaaggaagtgcaggaaa

SEQ ID NO: 26170 - DNA, 33 bp, Homo sapien
ccttgctctgacaaccgaaggaagtgcaggaaa

SEQ ID NO: 26171 - DNA, 33 bp, Homo sapien
tgtacaattctgcttgaagagtaatcagttgtg

SEQ ID NO: 26172 - DNA, 33 bp, Homo sapien
tgtacaattctgcttggagagtaatcagttgtg

SEQ ID NO: 26173 - DNA, 33 bp, Homo sapien
ttttatctcccttcaacctaccctcttccccat

SEQ ID NO: 26174 - DNA, 33 bp, Homo sapien
ttttatctcccttcaatctaccctcttccccat

SEQ ID NO: 26175 - DNA, 33 bp, Homo sapien
caactctggaaagttcagaaaccacataagcac

SEQ ID NO: 26176 - DNA, 33 bp, Homo sapien
caactctggaaagttcggaaaccacataagcac

SEQ ID NO: 26177 - DNA, 33 bp, Homo sapien
gctttgaaagtttccaccattttgctgtttagc

SEQ ID NO: 26178 - DNA, 33 bp, Homo sapien
gctttgaaagtttccagcattttgctgtttagc

SEQ ID NO: 26179 - DNA, 33 bp, Homo sapien
aaaatggctgcttatacgggattttaaaaagtc

SEQ ID NO: 26180 - DNA, 33 bp, Homo sapien
aaaatggctgcttatatgggattttaaaaagtc

SEQ ID NO: 26181 - DNA, 33 bp, Homo sapien
gaatgtgtttggtgcaatattttaaaataaaat

SEQ ID NO: 26182 - DNA, 33 bp, Homo sapien
gaatgtgtttggtgcactattttaaaataaaat

SEQ ID NO: 26183 - DNA, 33 bp, Homo sapien
ttcttaattggttaataatgccatgtgggcagt

SEQ ID NO: 26184 - DNA, 33 bp, Homo sapien
ttcttaattggttaatgatgccatgtgggcagt

SEQ ID NO: 26185 - DNA, 33 bp, Homo sapien
ttcataaatcaatggcactaaaactagtgggag

SEQ ID NO: 26186 - DNA, 33 bp, Homo sapien
ttcataaatcaatggctctaaaactagtgggag

SEQ ID NO: 26187 - DNA, 33 bp, Homo sapien
agaagcgttgattttagaagtctcgaatagatt

SEQ ID NO: 26188 - DNA, 33 bp, Homo sapien
agaagcgttgattttataagtctcgaatagatt

SEQ ID NO: 26189 - DNA, 33 bp, Homo sapien
gtagtgcttgatcacaatggctatgtgcttcct

SEQ ID NO: 26190 - DNA, 33 bp, Homo sapien
gtagtgcttgatcacagtggctatgtgcttcct

SEQ ID NO: 26191 - DNA, 33 bp, Homo sapien
tgcttgaatcaggaaaacgaactaagaagtgga

SEQ ID NO: 26192 - DNA, 33 bp, Homo sapien
tgcttgaatcaggaaaccgaactaagaagtgga

SEQ ID NO: 26193 - DNA, 33 bp, Homo sapien
aggaaataactaaagagaaggtagtgcaatcat

SEQ ID NO: 26194 - DNA, 33 bp, Homo sapien
aggaaataactaaagataaggtagtgcaatcat

SEQ ID NO: 26195 - DNA, 33 bp, Homo sapien
aaaatattgctgtaaaagctatgtgctctataa

SEQ ID NO: 26196 - DNA, 33 bp, Homo sapien
aaaatattgctgtaaaggctatgtgctctataa

SEQ ID NO: 26197 - DNA, 33 bp, Homo sapien
aatccaatcttaagtggcaaacattcttatatt

SEQ ID NO: 26198 - DNA, 33 bp, Homo sapien
aatccaatcttaagtgtcaaacattcttatatt

SEQ ID NO: 26199 - DNA, 33 bp, Homo sapien
ttaaaatgcacttgtaaattctgtctgattgat

SEQ ID NO: 26200 - DNA, 33 bp, Homo sapien
ttaaaatgcacttgtagattctgtctgattgat

SEQ ID NO: 26201 - DNA, 33 bp, Homo sapien
gtgtgttgtggctcaaatggcaataattagggc

SEQ ID NO: 26202 - DNA, 33 bp, Homo sapien
gtgtgttgtggctcaagtggcaataattagggc

SEQ ID NO: 26203 - DNA, 33 bp, Homo sapien
caacatctcttaagaactaaatgtctcgggatt

SEQ ID NO: 26204 - DNA, 33 bp, Homo sapien
caacatctcttaagaagtaaatgtctcgggatt

SEQ ID NO: 26205 - DNA, 33 bp, Homo sapien
aattcaagtcatagaaagtatgttctcattcca

SEQ ID NO: 26206 - DNA, 33 bp, Homo sapien
aattcaagtcatagaaggtatgttctcattcca

SEQ ID NO: 26207 - DNA, 33 bp, Homo sapien
tgggaacctccgtctaaatttcaaaggatgtat

SEQ ID NO: 26208 - DNA, 33 bp, Homo sapien
tgggaacctccgtctagatttcaaaggatgtat

SEQ ID NO: 26209 - DNA, 33 bp, Homo sapien
actggtctcatcttaaacttactatataaggat

SEQ ID NO: 26210 - DNA, 33 bp, Homo sapien
actggtctcatcttaagcttactatataaggat

SEQ ID NO: 26211 - DNA, 33 bp, Homo sapien
tgcgttaatttacttaggatttgacccctgact

SEQ ID NO: 26212 - DNA, 33 bp, Homo sapien
tgcgttaatttacttatgatttgacccctgact

SEQ ID NO: 26213 - DNA, 33 bp, Homo sapien
caggaatgtatttcaaacgaattcactagacat

SEQ ID NO: 26214 - DNA, 33 bp, Homo sapien
caggaatgtatttcaaccgaattcactagacat

SEQ ID NO: 26215 - DNA, 33 bp, Homo sapien
tttgaggaatgaaaaaagactatggtagcaaca

SEQ ID NO: 26216 - DNA, 33 bp, Homo sapien
tttgaggaatgaaaaacgactatggtagcaaca

SEQ ID NO: 26217 - DNA, 33 bp, Homo sapien
aaattaaaagaacaaacagccatccaatacaaa

SEQ ID NO: 26218 - DNA, 33 bp, Homo sapien
aaattaaaagaacaaatagccatccaatacaaa

SEQ ID NO: 26219 - DNA, 33 bp, Homo sapien
tacttggagtcttttacggttctatgcaaattt

SEQ ID NO: 26220 - DNA, 33 bp, Homo sapien
tacttggagtcttttatggttctatgcaaattt

SEQ ID NO: 26221 - DNA, 33 bp, Homo sapien
tgtttctattttgtgccagtaaaatactgtttt

SEQ ID NO: 26222 - DNA, 33 bp, Homo sapien
tgtttctattttgtgctagtaaaatactgtttt

SEQ ID NO: 26223 - DNA, 33 bp, Homo sapien
atgagactgaaaagagaagtatgcttattaaag

SEQ ID NO: 26224 - DNA, 33 bp, Homo sapien
atgagactgaaaagaggagtatgcttattaaag

SEQ ID NO: 26225 - DNA, 33 bp, Homo sapien
tctgtcattcttagtgcattgcatgaagcttac

SEQ ID NO: 26226 - DNA, 33 bp, Homo sapien
tctgtcattcttagtgtattgcatgaagcttac

SEQ ID NO: 26227 - DNA, 33 bp, Homo sapien
cttacttctctgtgtacgtgaaaacagtgaccc

SEQ ID NO: 26228 - DNA, 33 bp, Homo sapien
cttacttctctgtgtatgtgaaaacagtgaccc

SEQ ID NO: 26229 - DNA, 33 bp, Homo sapien
ttcctgaccatatccaatagggctttgcagaaa

SEQ ID NO: 26230 - DNA, 33 bp, Homo sapien
ttcctgaccatatccagtagggctttgcagaaa

SEQ ID NO: 26231 - DNA, 33 bp, Homo sapien
tctgagtttcaaaaaaacattatggatgggaat

SEQ ID NO: 26232 - DNA, 33 bp, Homo sapien
tctgagtttcaaaaaagcattatggatgggaat

SEQ ID NO: 26233 - DNA, 33 bp, Homo sapien
gaatggggaaaagggcagaaagatttgcattct

SEQ ID NO: 26234 - DNA, 33 bp, Homo sapien
gaatggggaaaagggcggaaagatttgcattct

SEQ ID NO: 26235 - DNA, 33 bp, Homo sapien
gctagaaatatcaatagccctgaaattcagaaa

SEQ ID NO: 26236 - DNA, 33 bp, Homo sapien
gctagaaatatcaatatccctgaaattcagaaa

SEQ ID NO: 26237 - DNA, 33 bp, Homo sapien
attaggttaaaacaccacatacaggctttctcc

SEQ ID NO: 26238 - DNA, 33 bp, Homo sapien
attaggttaaaacacctcatacaggctttctcc

SEQ ID NO: 26239 - DNA, 33 bp, Homo sapien; identical to SEQ ID NO: 26237

SEQ ID NO: 26240 - DNA, 33 bp, Homo sapien; identical to SEQ ID NO: 26238

SEQ ID NO: 26241 - DNA, 33 bp, Homo sapien
gatctcctttgcgcacaatgtagcagcacaagg

SEQ ID NO: 26242 - DNA, 33 bp, Homo sapien
gatctcctttgcgcacgatgtagcagcacaagg

SEQ ID NO: 26243 - DNA, 33 bp, Homo sapien; identical to SEQ ID NO: 26241

SEQ ID NO: 26244 - DNA, 33 bp, Homo sapien; identical to SEQ ID NO: 26242

SEQ ID NO: 26245 - DNA, 33 bp, Homo sapien
ttggagctcttggaaccaactgagcagaaattt

SEQ ID NO: 26246 - DNA, 33 bp, Homo sapien
ttggagctcttggaacgaactgagcagaaattt

SEQ ID NO: 26247 - DNA, 33 bp, Homo sapien
aaaaatgtaccaataggaggactcaatgacaat

SEQ ID NO: 26248 - DNA, 33 bp, Homo sapien
aaaaatgtaccaatagtaggactcaatgacaat

SEQ ID NO: 26249 - DNA, 33 bp, Homo sapien
cagactggcttacagaagaatccttaactagca

SEQ ID NO: 26250 - DNA, 33 bp, Homo sapien
cagactggcttacagacgaatccttaactagca

SEQ ID NO: 26251 - DNA, 33 bp, Homo sapien
aactggctctagcagaagttgattctaagtagg

SEQ ID NO: 26252 - DNA, 33 bp, Homo sapien
aactggctctagcagacgttgattctaagtagg

SEQ ID NO: 26253 - DNA, 33 bp, Homo sapien
ctcttgacattcaaaaaattttcccctgtagat

SEQ ID NO: 26254 - DNA, 33 bp, Homo sapien
ctcttgacattcaaaagattttcccctgtagat

SEQ ID NO: 26255 - DNA, 33 bp, Homo sapien
aaatgagggtgcaattaaaacagtatttgaaaa

SEQ ID NO: 26256 - DNA, 33 bp, Homo sapien
aaatgagggtgcaattgaaacagtatttgaaaa

SEQ ID NO: 26257 - DNA, 33 bp, Homo sapien
taggggaaggtaggaaagttgagaagaaagttg

SEQ ID NO: 26258 - DNA, 33 bp, Homo sapien
taggggaaggtaggaaggttgagaagaaagttg

SEQ ID NO: 26259 - DNA, 33 bp, Homo sapien
tagaacagtgagaaaacttctgggaaggctagc

SEQ ID NO: 26260 - DNA, 33 bp, Homo sapien
tagaacagtgagaaaatttctgggaaggctagc

SEQ ID NO: 26261 - DNA, 33 bp, Homo sapien
gacccaagagaatcacacatagaaattgggagt

SEQ ID NO: 26262 - DNA, 33 bp, Homo sapien
gacccaagagaatcacgcatagaaattgggagt

SEQ ID NO: 26263 - DNA, 33 bp, Homo sapien
agctatattttaactcaagagaaccaaactatt

SEQ ID NO: 26264 - DNA, 33 bp, Homo sapien
agctatattttaactcgagagaaccaaactatt

SEQ ID NO: 26265 - DNA, 33 bp, Homo sapien
aggtttgggttttaaacagacattgaattagag

SEQ ID NO: 26266 - DNA, 33 bp, Homo sapien
aggtttgggttttaaatagacattgaattagag

SEQ ID NO: 26267 - DNA, 33 bp, Homo sapien
gacagacccacccacacgttgtactgtgcatct

SEQ ID NO: 26268 - DNA, 33 bp, Homo sapien
gacagacccacccacatgttgtactgtgcatct

SEQ ID NO: 26269 - DNA, 33 bp, Homo sapien
gggtgcaagtctcaagccttacatgtggtgttg

SEQ ID NO: 26270 - DNA, 33 bp, Homo sapien
gggtgcaagtctcaaggcttacatgtggtgttg

SEQ ID NO: 26271 - DNA, 33 bp, Homo sapien
acaagaaaaaatcatacagtacctagcaagaac

SEQ ID NO: 26272 - DNA, 33 bp, Homo sapien
acaagaaaaaatcatatagtacctagcaagaac

SEQ ID NO: 26273 - DNA, 33 bp, Homo sapien
caaagaagctcttctacatataatgcaacttgg

SEQ ID NO: 26274 - DNA, 33 bp, Homo sapien
caaagaagctcttctagatataatgcaacttgg

SEQ ID NO: 26275 - DNA, 33 bp, Homo sapien
taatgatatcagtttaccccacatctgtttgtc

SEQ ID NO: 26276 - DNA, 33 bp, Homo sapien
taatgatatcagtttatcccacatctgtttgtc

SEQ ID NO: 26277 - DNA, 33 bp, Homo sapien
cacccacaatgactcaatagtctaaatatgctc

SEQ ID NO: 26278 - DNA, 33 bp, Homo sapien
cacccacaatgactcagtagtctaaatatgctc

SEQ ID NO: 26279 - DNA, 33 bp, Homo sapien
aatgggtttgcctgcacgggtccacaatgacaa

SEQ ID NO: 26280 - DNA, 33 bp, Homo sapien
aatgggtttgcctgcatgggtccacaatgacaa

SEQ ID NO: 26281 - DNA, 33 bp, Homo sapien
tcctcagactcctgtacggtgcaattgaccact

SEQ ID NO: 26282 - DNA, 33 bp, Homo sapien
tcctcagactcctgtatggtgcaattgaccact

SEQ ID NO: 26283 - DNA, 33 bp, Homo sapien
cagggacctagggaataaccaacatcagccacc

SEQ ID NO: 26284 - DNA, 33 bp, Homo sapien
cagggacctagggaatgaccaacatcagccacc

SEQ ID NO: 26285 - DNA, 33 bp, Homo sapien
ttactcgatcaatatacacaaggcattaatttt

SEQ ID NO: 26286 - DNA, 33 bp, Homo sapien
ttactcgatcaatatatacaaggcattaatttt

SEQ ID NO: 26287 - DNA, 33 bp, Homo sapien
caaaatatactaaatcccaaccattatttatat

SEQ ID NO: 26288 - DNA, 33 bp, Homo sapien
caaaatatactaaatctcaaccattatttatat

SEQ ID NO: 26289 - DNA, 33 bp, Homo sapien
gttcaaagccgcttgccattgttctcttgctaa

SEQ ID NO: 26290 - DNA, 33 bp, Homo sapien
gttcaaagccgcttgctattgttctcttgctaa

SEQ ID NO: 26291 - DNA, 33 bp, Homo sapien
taggtggcctaaaaccagatattgtagattttg

SEQ ID NO: 26292 - DNA, 33 bp, Homo sapien
taggtggcctaaaacccgatattgtagattttg

SEQ ID NO: 26293 - DNA, 33 bp, Homo sapien
ctacaagaaaaaatatcaacacagctacacttt

SEQ ID NO: 26294 - DNA, 33 bp, Homo sapien
ctacaagaaaaaatattaacacagctacacttt

SEQ ID NO: 26295 - DNA, 33 bp, Homo sapien
ttgtccatgaagttaaagtgaagctataaaaca

SEQ ID NO: 26296 - DNA, 33 bp, Homo sapien
ttgtccatgaagttaaggtgaagctataaaaca

SEQ ID NO: 26297 - DNA, 33 bp, Homo sapien
cattcaaactttcaaaaaacaagtcatagatac

SEQ ID NO: 26298 - DNA, 33 bp, Homo sapien
cattcaaactttcaaacaacaagtcatagatac

SEQ ID NO: 26299 - DNA, 33 bp, Homo sapien
gagcattgtttctagacgccacagcaataatac

SEQ ID NO: 26300 - DNA, 33 bp, Homo sapien
gagcattgtttctagatgccacagcaataatac

SEQ ID NO: 26301 - DNA, 33 bp, Homo sapien
gatgagctagggtaaacgatggcactgcagaca

SEQ ID NO: 26302 - DNA, 33 bp, Homo sapien
gatgagctagggtaaatgatggcactgcagaca

SEQ ID NO: 26303 - DNA, 33 bp, Homo sapien
gtgctaagactagcaacagagagaacatagaga

SEQ ID NO: 26304 - DNA, 33 bp, Homo sapien
gtgctaagactagcaatagagagaacatagaga

SEQ ID NO: 26305 - DNA, 33 bp, Homo sapien
gctataatgctcaaccgagttatctctttggag

SEQ ID NO: 26306 - DNA, 33 bp, Homo sapien
gctataatgctcaacctagttatctctttggag

SEQ ID NO: 26307 - DNA, 33 bp, Homo sapien
gaaacaaattgagaccacttaagtaaataagga

SEQ ID NO: 26308 - DNA, 33 bp, Homo sapien
gaaacaaattgagaccgcttaagtaaataagga

SEQ ID NO: 26309 - DNA, 33 bp, Homo sapien
cagtcagtatgtaaaaacgttatcagcagcttc

SEQ ID NO: 26310 - DNA, 33 bp, Homo sapien
cagtcagtatgtaaaaccgttatcagcagcttc

SEQ ID NO: 26311 - DNA, 33 bp, Homo sapien
gatttttgttcttgaaaaccatgaagatacata

SEQ ID NO: 26312 - DNA, 33 bp, Homo sapien
gatttttgttcttgaacaccatgaagatacata

SEQ ID NO: 26313 - DNA, 33 bp, Homo sapien
ttttaaattctggtaaactttcagcttgccaat

SEQ ID NO: 26314 - DNA, 33 bp, Homo sapien
ttttaaattctggtaatctttcagcttgccaat

SEQ ID NO: 26315 - DNA, 33 bp, Homo sapien
ctctattttaaatttgaatcatatgacattagc

SEQ ID NO: 26316 - DNA, 33 bp, Homo sapien
ctctattttaaatttgtatcatatgacattagc

SEQ ID NO: 26317 - DNA, 33 bp, Homo sapien
atatcttggatgcagcaacttaagattggtgag

SEQ ID NO: 26318 - DNA, 33 bp, Homo sapien
atatcttggatgcagctacttaagattggtgag

SEQ ID NO: 26319 - DNA, 33 bp, Homo sapien
ctattgctctatgtagccattttgctagacaac

SEQ ID NO: 26320 - DNA, 33 bp, Homo sapien
ctattgctctatgtagtcattttgctagacaac

SEQ ID NO: 26321 - DNA, 33 bp, Homo sapien
gtgtttgatgattagaactataggagaaaaagt

SEQ ID NO: 26322 - DNA, 33 bp, Homo sapien
gtgtttgatgattagagctataggagaaaaagt

SEQ ID NO: 26323 - DNA, 33 bp, Homo sapien
actcttttctaccagaagatatcagagaagttg

SEQ ID NO: 26324 - DNA, 33 bp, Homo sapien
actcttttctaccagaggatatcagagaagttg

SEQ ID NO: 26325 - DNA, 33 bp, Homo sapien
tatgtcaggatcttcacggtttctcagagaatt

SEQ ID NO: 26326 - DNA, 33 bp, Homo sapien
tatgtcaggatcttcatggtttctcagagaatt

SEQ ID NO: 26327 - DNA, 33 bp, Homo sapien
aactgataagaaattaagtcgttccatgaaaaa

SEQ ID NO: 26328 - DNA, 33 bp, Homo sapien
aactgataagaaattatgtcgttccatgaaaaa

SEQ ID NO: 26329 - DNA, 33 bp, Homo sapien
agtttagtctgagaataatgaaaatacagtaga

SEQ ID NO: 26330 - DNA, 33 bp, Homo sapien
agtttagtctgagaatcatgaaaatacagtaga

SEQ ID NO: 26331 - DNA, 33 bp, Homo sapien
tcttcctatagtctgcaaaataatgaaaaaagt

SEQ ID NO: 26332 - DNA, 33 bp, Homo sapien
tcttcctatagtctgcgaaataatgaaaaaagt

SEQ ID NO: 26333 - DNA, 33 bp, Homo sapien
agctcaggaatgcaagcagatttaacattcaga

SEQ ID NO: 26334 - DNA, 33 bp, Homo sapien
agctcaggaatgcaaggagatttaacattcaga

SEQ ID NO: 26335 - DNA, 33 bp, Homo sapien
acagactgaagaagtaagagtcatttaggtcag

SEQ ID NO: 26336 - DNA, 33 bp, Homo sapien
acagactgaagaagtaggagtcatttaggtcag

SEQ ID NO: 26337 - DNA, 33 bp, Homo sapien
ttgagattcagaaatacgtttttgaagatgttg

SEQ ID NO: 26338 - DNA, 33 bp, Homo sapien
ttgagattcagaaatatgtttttgaagatgttg

SEQ ID NO: 26339 - DNA, 33 bp, Homo sapien
taggtattcttgttcaatcagcttaataaaatc

SEQ ID NO: 26340 - DNA, 33 bp, Homo sapien
taggtattcttgttcactcagcttaataaaatc

SEQ ID NO: 26341 - DNA, 33 bp, Homo sapien
gctctgaactgcttcaaaatctgtcttgaactc

SEQ ID NO: 26342 - DNA, 33 bp, Homo sapien
gctctgaactgcttcataatctgtcttgaactc

SEQ ID NO: 26343 - DNA, 33 bp, Homo sapien
gggttaactgtatgacaatctgtggggtgtgtg

SEQ ID NO: 26344 - DNA, 33 bp, Homo sapien
gggttaactgtatgaccatctgtggggtgtgtg

SEQ ID NO: 26345 - DNA, 33 bp, Homo sapien
ctaaatgtaaatcccacgacagcaggaccattg

SEQ ID NO: 26346 - DNA, 33 bp, Homo sapien
ctaaatgtaaatcccatgacagcaggaccattg

SEQ ID NO: 26347 - DNA, 33 bp, Homo sapien
aggagtgcagacttggaaatacaaaaccatttc

SEQ ID NO: 26348 - DNA, 33 bp, Homo sapien
aggagtgcagacttgggaatacaaaaccatttc

SEQ ID NO: 26349 - DNA, 33 bp, Homo sapien
tcacttttatatgcagaatctttcattaacgac

SEQ ID NO: 26350 - DNA, 33 bp, Homo sapien
tcacttttatatgcagtatctttcattaacgac

SEQ ID NO: 26351 - DNA, 33 bp, Homo sapien
atgtttctctcctccaaacgtaggtgtccacgg

SEQ ID NO: 26352 - DNA, 33 bp, Homo sapien
atgtttctctcctccagacgtaggtgtccacgg

SEQ ID NO: 26353 - DNA, 33 bp, Homo sapien
tggtgtactatagcctcaaagtcctgggctcaa

SEQ ID NO: 26354 - DNA, 33 bp, Homo sapien
tggtgtactatagcctgaaagtcctgggctcaa

SEQ ID NO: 26355 - DNA, 33 bp, Homo sapien
ataaaaaatctagagacagtaaaacgatcaggg

SEQ ID NO: 26356 - DNA, 33 bp, Homo sapien
ataaaaaatctagagagagtaaaacgatcaggg

SEQ ID NO: 26357 - DNA, 33 bp, Homo sapien
ttaaatgtgcacttaaccaggtactttttattg

SEQ ID NO: 26358 - DNA, 33 bp, Homo sapien
ttaaatgtgcacttaatcaggtactttttattg

SEQ ID NO: 26359 - DNA, 33 bp, Homo sapien
ccctgaaatcgttacactggagattaggattcc

SEQ ID NO: 26360 - DNA, 33 bp, Homo sapien
ccctgaaatcgttacattggagattaggattcc

SEQ ID NO: 26361 - DNA, 33 bp, Homo sapien
cttgaggagttcatcacataaagcctttgatat

SEQ ID NO: 26362 - DNA, 33 bp, Homo sapien
cttgaggagttcatcatataaagcctttgatat

SEQ ID NO: 26363 - DNA, 33 bp, Homo sapien
attcaatggattccgcaaaatctcactgtattt

SEQ ID NO: 26364 - DNA, 33 bp, Homo sapien
attcaatggattccgcgaaatctcactgtattt

SEQ ID NO: 26365 - DNA, 33 bp, Homo sapien
aaaactctgaaagttggaactgttattttcaca

SEQ ID NO: 26366 - DNA, 33 bp, Homo sapien
aaaactctgaaagttgtaactgttattttcaca

SEQ ID NO: 26367 - DNA, 33 bp, Homo sapien
atacagcttggctgaaccaatagagaaaaaaat

SEQ ID NO: 26368 - DNA, 33 bp, Homo sapien
atacagcttggctgaagcaatagagaaaaaaat

SEQ ID NO: 26369 - DNA, 33 bp, Homo sapien
ttttgtcagttggtaacgtatatatggtgtttt

SEQ ID NO: 26370 - DNA, 33 bp, Homo sapien
ttttgtcagttggtaatgtatatatggtgtttt

SEQ ID NO: 26371 - DNA, 33 bp, Homo sapien
tattcttggcttaaaaaacctcagaagcttagc

SEQ ID NO: 26372 - DNA, 33 bp, Homo sapien
tattcttggcttaaaatacctcagaagcttagc

SEQ ID NO: 26373 - DNA, 33 bp, Homo sapien
aatgtcaagatgccaccgaactttgtgctttcc

SEQ ID NO: 26374 - DNA, 33 bp, Homo sapien
aatgtcaagatgccacggaactttgtgctttcc

SEQ ID NO: 26375 - DNA, 33 bp, Homo sapien
aattgaggtgatacaaccagtgaatagggaatt

SEQ ID NO: 26376 - DNA, 33 bp, Homo sapien
aattgaggtgatacaagcagtgaatagggaatt

SEQ ID NO: 26377 - DNA, 33 bp, Homo sapien
tgatactctcctgcataaatattccaatcagcc

SEQ ID NO: 26378 - DNA, 33 bp, Homo sapien
tgatactctcctgcatcaatattccaatcagcc

SEQ ID NO: 26379 - DNA, 33 bp, Homo sapien
agatggctgatcttagactaacatattaccatt

SEQ ID NO: 26380 - DNA, 33 bp, Homo sapien
agatggctgatcttaggctaacatattaccatt

SEQ ID NO: 26381 - DNA, 33 bp, Homo sapien
gatgtggggataaaaaattgcaaatggcaaaga

SEQ ID NO: 26382 - DNA, 33 bp, Homo sapien
gatgtggggataaaaagttgcaaatggcaaaga

SEQ ID NO: 26383 - DNA, 33 bp, Homo sapien
agcttatataaatcaggcaaagtctagaaatca

SEQ ID NO: 26384 - DNA, 33 bp, Homo sapien
agcttatataaatcagtcaaagtctagaaatca

SEQ ID NO: 26385 - DNA, 33 bp, Homo sapien
ccataaagagtgtgcagatgtagactaaggtac

SEQ ID NO: 26386 - DNA, 33 bp, Homo sapien
ccataaagagtgtgcatatgtagactaaggtac

SEQ ID NO: 26387 - DNA, 33 bp, Homo sapien
caggtaaacaaagctacgattccagtctggtat

SEQ ID NO: 26388 - DNA, 33 bp, Homo sapien
caggtaaacaaagctatgattccagtctggtat

SEQ ID NO: 26389 - DNA, 33 bp, Homo sapien
attttgtatccgcccacatatattagcaaaata

SEQ ID NO: 26390 - DNA, 33 bp, Homo sapien
attttgtatccgcccagatatattagcaaaata

SEQ ID NO: 26391 - DNA, 33 bp, Homo sapien
ttgaactaaccagagagtagcagaaggaacgtt

SEQ ID NO: 26392 - DNA, 33 bp, Homo sapien
ttgaactaaccagagattagcagaaggaacgtt

SEQ ID NO: 26393 - DNA, 33 bp, Homo sapien
gagatatctctgaagacggtatgtaattaaatt

SEQ ID NO: 26394 - DNA, 33 bp, Homo sapien
gagatatctctgaagatggtatgtaattaaatt

SEQ ID NO: 26395 - DNA, 33 bp, Homo sapien
aaaaatattctgaataacaaagaaacagtgaat

SEQ ID NO: 26396 - DNA, 33 bp, Homo sapien
aaaaatattctgaatagcaaagaaacagtgaat

SEQ ID NO: 26397 - DNA, 33 bp, Homo sapien
gatggaacatctactccaatttcctcctctcac

SEQ ID NO: 26398 - DNA, 33 bp, Homo sapien
gatggaacatctactctaatttcctcctctcac

SEQ ID NO: 26399 - DNA, 33 bp, Homo sapien
tttcaagagcgttgaaagtagagagaggtatga

SEQ ID NO: 26400 - DNA, 33 bp, Homo sapien
tttcaagagcgttgaaggtagagagaggtatga

SEQ ID NO: 26401 - DNA, 33 bp, Homo sapien
ataaatttatgaggtacgccatgccagtactat

SEQ ID NO: 26402 - DNA, 33 bp, Homo sapien
ataaatttatgaggtaggccatgccagtactat

SEQ ID NO: 26403 - DNA, 33 bp, Homo sapien
ggtgctggataaaaatcatggaaaagatatttg

SEQ ID NO: 26404 - DNA, 33 bp, Homo sapien
ggtgctggataaaaatgatggaaaagatatttg

SEQ ID NO: 26405 - DNA, 33 bp, Homo sapien
tgctgaaaccttactacccttggcaaaatttct

SEQ ID NO: 26406 - DNA, 33 bp, Homo sapien
tgctgaaaccttactatccttggcaaaatttct

SEQ ID NO: 26407 - DNA, 33 bp, Homo sapien
tatactatatttttcaatcagcccttccttaca

SEQ ID NO: 26408 - DNA, 33 bp, Homo sapien
tatactatatttttcattcagcccttccttaca

SEQ ID NO: 26409 - DNA, 33 bp, Homo sapien
aataacaacttaggaaactgaggagggagcatc

SEQ ID NO: 26410 - DNA, 33 bp, Homo sapien
aataacaacttaggaacctgaggagggagcatc

SEQ ID NO: 26411 - DNA, 33 bp, Homo sapien
ttgaggtcctctgatacagtgtaccatcccctg

SEQ ID NO: 26412 - DNA, 33 bp, Homo sapien
ttgaggtcctctgatatagtgtaccatcccctg

SEQ ID NO: 26413 - DNA, 33 bp, Homo sapien
cttttgttggtcagataagagtggtcaacagat

SEQ ID NO: 26414 - DNA, 33 bp, Homo sapien
cttttgttggtcagattagagtggtcaacagat

SEQ ID NO: 26415 - DNA, 33 bp, Homo sapien
gtgagttgctgaaaaccggttagctgaaataca

SEQ ID NO: 26416 - DNA, 33 bp, Homo sapien
gtgagttgctgaaaacgggttagctgaaataca

SEQ ID NO: 26417 - DNA, 33 bp, Homo sapien
ctctgaacaaagaaggacaaatcagattaataa

SEQ ID NO: 26418 - DNA, 33 bp, Homo sapien
ctctgaacaaagaagggcaaatcagattaataa

SEQ ID NO: 26419 - DNA, 33 bp, Homo sapien
gtaggaaggaactatgaaggactaataagtgaa

SEQ ID NO: 26420 - DNA, 33 bp, Homo sapien
gtaggaaggaactatggaggactaataagtgaa

SEQ ID NO: 26421 - DNA, 33 bp, Homo sapien
aggattatttcaccacaagtctgctgctccaaa

SEQ ID NO: 26422 - DNA, 33 bp, Homo sapien
aggattatttcaccacgagtctgctgctccaaa

SEQ ID NO: 26423 - DNA, 33 bp, Homo sapien
ttgtttctgtgttaggaaatggacatacattgc

SEQ ID NO: 26424 - DNA, 33 bp, Homo sapien
ttgtttctgtgttagggaatggacatacattgc

SEQ ID NO: 26425 - DNA, 33 bp, Homo sapien
tccaaaacacctgaacggaggttgaagtaacca

SEQ ID NO: 26426 - DNA, 33 bp, Homo sapien
tccaaaacacctgaactgaggttgaagtaacca

SEQ ID NO: 26427 - DNA, 33 bp, Homo sapien
ttgtctccaaatgctcacaatgtgtttgaaagt

SEQ ID NO: 26428 - DNA, 33 bp, Homo sapien
ttgtctccaaatgctcgcaatgtgtttgaaagt

SEQ ID NO: 26429 - DNA, 33 bp, Homo sapien
atttaggcatcaagcactgaaaaagaagttaga

SEQ ID NO: 26430 - DNA, 33 bp, Homo sapien
atttaggcatcaagcattgaaaaagaagttaga

SEQ ID NO: 26431 - DNA, 33 bp, Homo sapien
tttttgagtaatgttaagttcacagcaaaattg

SEQ ID NO: 26432 - DNA, 33 bp, Homo sapien
tttttgagtaatgttaggttcacagcaaaattg

SEQ ID NO: 26433 - DNA, 33 bp, Homo sapien
gagggggagatagatgaataagcagagcaaagg

SEQ ID NO: 26434 - DNA, 33 bp, Homo sapien
gagggggagatagatgtataagcagagcaaagg

SEQ ID NO: 26435 - DNA, 33 bp, Homo sapien
gtccaggtgttctctcccagtggagttgcatag

SEQ ID NO: 26436 - DNA, 33 bp, Homo sapien
gtccaggtgttctctcgcagtggagttgcatag

SEQ ID NO: 26437 - DNA, 33 bp, Homo sapien
taatatctcatttatacaacatagctgtgcttt

SEQ ID NO: 26438 - DNA, 33 bp, Homo sapien
taatatctcatttatagaacatagctgtgcttt

SEQ ID NO: 26439 - DNA, 33 bp, Homo sapien
catctcttatgctcctcacaatttgcagtaaat

SEQ ID NO: 26440 - DNA, 33 bp, Homo sapien
catctcttatgctccttacaatttgcagtaaat

SEQ ID NO: 26441 - DNA, 33 bp, Homo sapien
ctaagacagagttacaatattacaacaagcttc

SEQ ID NO: 26442 - DNA, 33 bp, Homo sapien
ctaagacagagttacagtattacaacaagcttc

SEQ ID NO: 26443 - DNA, 33 bp, Homo sapien
gaactaatgtcatagaagaattttctgtagtcc

SEQ ID NO: 26444 - DNA, 33 bp, Homo sapien
gaactaatgtcatagatgaattttctgtagtcc

SEQ ID NO: 26445 - DNA, 33 bp, Homo sapien
gatagattatgttaaccgatttttgagtattga

SEQ ID NO: 26446 - DNA, 33 bp, Homo sapien
gatagattatgttaactgatttttgagtattga

SEQ ID NO: 26447 - DNA, 33 bp, Homo sapien
gaaacaggttactctacatcatgtgttgctaag

SEQ ID NO: 26448 - DNA, 33 bp, Homo sapien
gaaacaggttactctatatcatgtgttgctaag

SEQ ID NO: 26449 - DNA, 33 bp, Homo sapien
tttttgacattttagaagtatgttggttggatg

SEQ ID NO: 26450 - DNA, 33 bp, Homo sapien
tttttgacattttagaggtatgttggttggatg

SEQ ID NO: 26451 - DNA, 33 bp, Homo sapien
ctaagatgttccttggccacttttagcgtggtt

SEQ ID NO: 26452 - DNA, 33 bp, Homo sapien
ctaagatgttccttggtcacttttagcgtggtt

SEQ ID NO: 26453 - DNA, 33 bp, Homo sapien
aagaaaccatcttgacagcctctcactgataca

SEQ ID NO: 26454 - DNA, 33 bp, Homo sapien
aagaaaccatcttgacggcctctcactgataca

SEQ ID NO: 26455 - DNA, 33 bp, Homo sapien
tatgtttgtcttataaatgagccagaaatatcc

SEQ ID NO: 26456 - DNA, 33 bp, Homo sapien
tatgtttgtcttataagtgagccagaaatatcc

SEQ ID NO: 26457 - DNA, 33 bp, Homo sapien
cgttgccctgaagggaagtagtcctggcagaat

SEQ ID NO: 26458 - DNA, 33 bp, Homo sapien
cgttgccctgaagggaggtagtcctggcagaat

SEQ ID NO: 26459 - DNA, 33 bp, Homo sapien
gctcatttatctctcaacatctgttccaaaaat

SEQ ID NO: 26460 - DNA, 33 bp, Homo sapien
gctcatttatctctcaccatctgttccaaaaat

SEQ ID NO: 26461 - DNA, 33 bp, Homo sapien
cagtttagttccagaacccatagtttgcaacta

SEQ ID NO: 26462 - DNA, 33 bp, Homo sapien
cagtttagttccagaatccatagtttgcaacta

SEQ ID NO: 26463 - DNA, 33 bp, Homo sapien
ggttttgttttgatgccgatgttattattgttt

SEQ ID NO: 26464 - DNA, 33 bp, Homo sapien
ggttttgttttgatgctgatgttattattgttt

SEQ ID NO: 26465 - DNA, 33 bp, Homo sapien
tgtcttagctgttttacagacttttgttatctg

SEQ ID NO: 26466 - DNA, 33 bp, Homo sapien
tgtcttagctgttttatagacttttgttatctg

SEQ ID NO: 26467 - DNA, 33 bp, Homo sapien
ccaaaatctaactccaaggttcatatacaaatg

SEQ ID NO: 26468 - DNA, 33 bp, Homo sapien
ccaaaatctaactccacggttcatatacaaatg

SEQ ID NO: 26469 - DNA, 33 bp, Homo sapien
ttgatagacactttgaaagaaacaaggaaaaaa

SEQ ID NO: 26470 - DNA, 33 bp, Homo sapien
ttgatagacactttgacagaaacaaggaaaaaa

SEQ ID NO: 26471 - DNA, 33 bp, Homo sapien
tagttttccttgcagaagtatttcacctccttg

SEQ ID NO: 26472 - DNA, 33 bp, Homo sapien
tagttttccttgcagaggtatttcacctccttg

SEQ ID NO: 26473 - DNA, 33 bp, Homo sapien
gatatttcttcaaaaccctgcttctttgaataa

SEQ ID NO: 26474 - DNA, 33 bp, Homo sapien
gatatttcttcaaaactctgcttctttgaataa

SEQ ID NO: 26475 - DNA, 33 bp, Homo sapien
accaacacatcgctgacattatttcttcctccc

SEQ ID NO: 26476 - DNA, 33 bp, Homo sapien
accaacacatcgctgagattatttcttcctccc

SEQ ID NO: 26477 - DNA, 33 bp, Homo sapien
gttgatattcatggtacaaaaactttcactatg

SEQ ID NO: 26478 - DNA, 33 bp, Homo sapien
gttgatattcatggtataaaaactttcactatg

SEQ ID NO: 26479 - DNA, 33 bp, Homo sapien
tgagataattgtgacacggttcttaaatattag

SEQ ID NO: 26480 - DNA, 33 bp, Homo sapien
tgagataattgtgacatggttcttaaatattag

SEQ ID NO: 26481 - DNA, 33 bp, Homo sapien
agttgcaaagtgctctaacagagacatgtgtga

SEQ ID NO: 26482 - DNA, 33 bp, Homo sapien
agttgcaaagtgctctgacagagacatgtgtga

SEQ ID NO: 26483 - DNA, 33 bp, Homo sapien
gaaatttctaaatggcaaagtgtttaagagaag

SEQ ID NO: 26484 - DNA, 33 bp, Homo sapien
gaaatttctaaatggccaagtgtttaagagaag

SEQ ID NO: 26485 - DNA, 33 bp, Homo sapien
ctgggcagcatatgtcaaaggaacccctagcat

SEQ ID NO: 26486 - DNA, 33 bp, Homo sapien
ctgggcagcatatgtcgaaggaacccctagcat

SEQ ID NO: 26487 - DNA, 33 bp, Homo sapien
cagattaacaccaatgaatcacaattactgtaa

SEQ ID NO: 26488 - DNA, 33 bp, Homo sapien
cagattaacaccaatggatcacaattactgtaa

SEQ ID NO: 26489 - DNA, 33 bp, Homo sapien
agtctggcagagtcccaaattcaaagtatccat

SEQ ID NO: 26490 - DNA, 33 bp, Homo sapien
agtctggcagagtcccgaattcaaagtatccat

SEQ ID NO: 26491 - DNA, 33 bp, Homo sapien
gaacagtttatttaccaagaaattgtggtagtt

SEQ ID NO: 26492 - DNA, 33 bp, Homo sapien
gaacagtttatttacccagaaattgtggtagtt

SEQ ID NO: 26493 - DNA, 33 bp, Homo sapien
tttaaaagttaacaccaattttatgtagcataa

SEQ ID NO: 26494 - DNA, 33 bp, Homo sapien
tttaaaagttaacaccgattttatgtagcataa

SEQ ID NO: 26495 - DNA, 33 bp, Homo sapien
tgtggatagattattgcactttgagcaatgaaa

SEQ ID NO: 26496 - DNA, 33 bp, Homo sapien
tgtggatagattattgtactttgagcaatgaaa

SEQ ID NO: 26497 - DNA, 33 bp, Homo sapien
atcctgtatctctcctaaaaaactaatcatatt

SEQ ID NO: 26498 - DNA, 33 bp, Homo sapien
atcctgtatctctcctcaaaaactaatcatatt

SEQ ID NO: 26499 - DNA, 33 bp, Homo sapien
acataagccatattccagccctagagtttaaag

SEQ ID NO: 26500 - DNA, 33 bp, Homo sapien
acataagccatattccggccctagagtttaaag

SEQ ID NO: 26501 - DNA, 33 bp, Homo sapien
tatgagtgagattcaaagtatgttttatcctaa

SEQ ID NO: 26502 - DNA, 33 bp, Homo sapien
tatgagtgagattcaaggtatgttttatcctaa

SEQ ID NO: 26503 - DNA, 33 bp, Homo sapien
gatgaagtctcttatgaatattaggaacactga

SEQ ID NO: 26504 - DNA, 33 bp, Homo sapien
gatgaagtctcttatggatattaggaacactga

SEQ ID NO: 26505 - DNA, 33 bp, Homo sapien
aatatggatggtagaacctattctgatgaagtc

SEQ ID NO: 26506 - DNA, 33 bp, Homo sapien
aatatggatggtagaagctattctgatgaagtc

SEQ ID NO: 26507 - DNA, 33 bp, Homo sapien
tgttgtttctaagttacccagactatgatatcc

SEQ ID NO: 26508 - DNA, 33 bp, Homo sapien
tgttgtttctaagttatccagactatgatatcc

SEQ ID NO: 26509 - DNA, 33 bp, Homo sapien
ttcttgctggttcataaacaactctcttttcac

SEQ ID NO: 26510 - DNA, 33 bp, Homo sapien
ttcttgctggttcatatacaactctcttttcac

SEQ ID NO: 26511 - DNA, 33 bp, Homo sapien
tttatggatttctcacaaaggaggttggtcttt

SEQ ID NO: 26512 - DNA, 33 bp, Homo sapien
tttatggatttctcacgaaggaggttggtcttt

SEQ ID NO: 26513 - DNA, 33 bp, Homo sapien
aaatgaactaaataggaatacagctaaccaagg

SEQ ID NO: 26514 - DNA, 33 bp, Homo sapien
aaatgaactaaatagggatacagctaaccaagg

SEQ ID NO: 26515 - DNA, 33 bp, Homo sapien
caacaatgccataccaacaatttgggaaaatac

SEQ ID NO: 26516 - DNA, 33 bp, Homo sapien
caacaatgccataccagcaatttgggaaaatac

SEQ ID NO: 26517 - DNA, 33 bp, Homo sapien
tctttaagaagtctcacattgcttagaaaagat

SEQ ID NO: 26518 - DNA, 33 bp, Homo sapien
tctttaagaagtctcatattgcttagaaaagat

SEQ ID NO: 26519 - DNA, 33 bp, Homo sapien
cttgttatcatcagccagaactgtgtactgata

SEQ ID NO: 26520 - DNA, 33 bp, Homo sapien
cttgttatcatcagccggaactgtgtactgata

SEQ ID NO: 26521 - DNA, 33 bp, Homo sapien
attctctattgagtgaaaaatcattgttataat

SEQ ID NO: 26522 - DNA, 33 bp, Homo sapien
attctctattgagtgagaaatcattgttataat

SEQ ID NO: 26523 - DNA, 33 bp, Homo sapien
ctcttgagacttaatcactaccaggagaacagt

SEQ ID NO: 26524 - DNA, 33 bp, Homo sapien
ctcttgagacttaatcgctaccaggagaacagt

SEQ ID NO: 26525 - DNA, 33 bp, Homo sapien
cacccaactccaagatcatcattagcctacaat

SEQ ID NO: 26526 - DNA, 33 bp, Homo sapien
cacccaactccaagattatcattagcctacaat

SEQ ID NO: 26527 - DNA, 33 bp, Homo sapien
aagtagggaagttgtacagaaagcttctatcat

SEQ ID NO: 26528 - DNA, 33 bp, Homo sapien
aagtagggaagttgtagagaaagcttctatcat

SEQ ID NO: 26529 - DNA, 33 bp, Homo sapien
agtagttgattgggtaaagaaatattagtatat

SEQ ID NO: 26530 - DNA, 33 bp, Homo sapien
agtagttgattgggtagagaaatattagtatat

SEQ ID NO: 26531 - DNA, 33 bp, Homo sapien
ccttctgagagtccaacccccacagacctttga

SEQ ID NO: 26532 - DNA, 33 bp, Homo sapien
ccttctgagagtccaatccccacagacctttga

SEQ ID NO: 26533 - DNA, 33 bp, Homo sapien
tcaattcccagcagtcactgcctctgttcctac

SEQ ID NO: 26534 - DNA, 33 bp, Homo sapien
tcaattcccagcagtcgctgcctctgttcctac

SEQ ID NO: 26535 - DNA, 33 bp, Homo sapien
atagcttgacccatgcacctggaatagcagcag

SEQ ID NO: 26536 - DNA, 33 bp, Homo sapien
atagcttgacccatgcgcctggaatagcagcag

SEQ ID NO: 26537 - DNA, 33 bp, Homo sapien
aatattaaagtcttcacgctcaaactcaagaga

SEQ ID NO: 26538 - DNA, 33 bp, Homo sapien
aatattaaagtcttcatgctcaaactcaagaga

SEQ ID NO: 26539 - DNA, 33 bp, Homo sapien
ttagaaagatagaacactgagacttaagacata

SEQ ID NO: 26540 - DNA, 33 bp, Homo sapien
ttagaaagatagaacattgagacttaagacata

SEQ ID NO: 26541 - DNA, 33 bp, Homo sapien
ttatttgaagttaaacaagataggatagatgca

SEQ ID NO: 26542 - DNA, 33 bp, Homo sapien
ttatttgaagttaaacgagataggatagatgca

SEQ ID NO: 26543 - DNA, 33 bp, Homo sapien
tattacacagtgtatacatcaatctttagttta

SEQ ID NO: 26544 - DNA, 33 bp, Homo sapien
tattacacagtgtatatatcaatctttagttta

SEQ ID NO: 26545 - DNA, 33 bp, Homo sapien
gccttggctttccacaatctaaaggcactacta

SEQ ID NO: 26546 - DNA, 33 bp, Homo sapien
gccttggctttccacagtctaaaggcactacta

SEQ ID NO: 26547 - DNA, 33 bp, Homo sapien
ggcaatttctgtaagcagcagtattgacgttaa

SEQ ID NO: 26548 - DNA, 33 bp, Homo sapien
ggcaatttctgtaagcggcagtattgacgttaa

SEQ ID NO: 26549 - DNA, 33 bp, Homo sapien
aaattgctctgattgccccagtatttacttagc

SEQ ID NO: 26550 - DNA, 33 bp, Homo sapien
aaattgctctgattgctccagtatttacttagc

SEQ ID NO: 26551 - DNA, 33 bp, Homo sapien
taaagtcatgataagcaaaaagaatgtagagga

SEQ ID NO: 26552 - DNA, 33 bp, Homo sapien
taaagtcatgataagcgaaaagaatgtagagga

SEQ ID NO: 26553 - DNA, 33 bp, Homo sapien
atttcttatcctgccaatgaagctaccaaccaa

SEQ ID NO: 26554 - DNA, 33 bp, Homo sapien
atttcttatcctgccactgaagctaccaaccaa

SEQ ID NO: 26555 - DNA, 33 bp, Homo sapien
gatataaataactacccacatattttgcttttg

SEQ ID NO: 26556 - DNA, 33 bp, Homo sapien
gatataaataactacctacatattttgcttttg

SEQ ID NO: 26557 - DNA, 33 bp, Homo sapien
agaacttactgtacacgcaaaataaaatttact

SEQ ID NO: 26558 - DNA, 33 bp, Homo sapien
agaacttactgtacactcaaaataaaatttact

SEQ ID NO: 26559 - DNA, 33 bp, Homo sapien
gtaacactgttacaaacatcaaaccagtaagat

SEQ ID NO: 26560 - DNA, 33 bp, Homo sapien
gtaacactgttacaaatatcaaaccagtaagat

SEQ ID NO: 26561 - DNA, 33 bp, Homo sapien
ctgcagccaggtacaaagagaaggcatggaaat

SEQ ID NO: 26562 - DNA, 33 bp, Homo sapien
ctgcagccaggtacaaggagaaggcatggaaat

SEQ ID NO: 26563 - DNA, 33 bp, Homo sapien
ttatttatcaaaaagcagacagattgaaataaa

SEQ ID NO: 26564 - DNA, 33 bp, Homo sapien
ttatttatcaaaaagcggacagattgaaataaa

SEQ ID NO: 26565 - DNA, 33 bp, Homo sapien
tgtttatttgcaaacaacaaccatctcccggag

SEQ ID NO: 26566 - DNA, 33 bp, Homo sapien
tgtttatttgcaaacagcaaccatctcccggag

SEQ ID NO: 26567 - DNA, 33 bp, Homo sapien
ccacagctcattaattaaaaaagtacaagaatt

SEQ ID NO: 26568 - DNA, 33 bp, Homo sapien
ccacagctcattaatttaaaaagtacaagaatt

SEQ ID NO: 26569 - DNA, 33 bp, Homo sapien
tatctgtcatcaaaaaatgattctttcaaattt

SEQ ID NO: 26570 - DNA, 33 bp, Homo sapien
tatctgtcatcaaaaagtgattctttcaaattt

SEQ ID NO: 26571 - DNA, 33 bp, Homo sapien
ttgtcccttaggagtacaaactcattcctctga

SEQ ID NO: 26572 - DNA, 33 bp, Homo sapien
ttgtcccttaggagtataaactcattcctctga

SEQ ID NO: 26573 - DNA, 33 bp, Homo sapien
tattcgagcacattaaacctctccttttcattt

SEQ ID NO: 26574 - DNA, 33 bp, Homo sapien
tattcgagcacattaagcctctccttttcattt

SEQ ID NO: 26575 - DNA, 33 bp, Homo sapien
aaagagagacaaaacacagttcacctttcctct

SEQ ID NO: 26576 - DNA, 33 bp, Homo sapien
aaagagagacaaaacatagttcacctttcctct

SEQ ID NO: 26577 - DNA, 33 bp, Homo sapien
cttctatcctagccacccttttttttctcctgc

SEQ ID NO: 26578 - DNA, 33 bp, Homo sapien
cttctatcctagccacgcttttttttctcctgc

SEQ ID NO: 26579 - DNA, 33 bp, Homo sapien
aaaagttgcaggcataccaaagtaaatgtttga

SEQ ID NO: 26580 - DNA, 33 bp, Homo sapien
aaaagttgcaggcatagcaaagtaaatgtttga

SEQ ID NO: 26581 - DNA, 33 bp, Homo sapien
acactgctatagaaaactacctgagagtgaatg

SEQ ID NO: 26582 - DNA, 33 bp, Homo sapien
acactgctatagaaaagtacctgagagtgaatg

SEQ ID NO: 26583 - DNA, 33 bp, Homo sapien
tggaaatatgacaaccacatttttattgatctt

SEQ ID NO: 26584 - DNA, 33 bp, Homo sapien
tggaaatatgacaaccgcatttttattgatctt

SEQ ID NO: 26585 - DNA, 33 bp, Homo sapien
agatttttagttccagaaaataatgcattatta

SEQ ID NO: 26586 - DNA, 33 bp, Homo sapien
agatttttagttccaggaaataatgcattatta

SEQ ID NO: 26587 - DNA, 33 bp, Homo sapien
ttttgaaagagagaagaacttatggatggaaaa

SEQ ID NO: 26588 - DNA, 33 bp, Homo sapien
ttttgaaagagagaagcacttatggatggaaaa

SEQ ID NO: 26589 - DNA, 33 bp, Homo sapien
attataattgttgattaaaaaaagccaaactct

SEQ ID NO: 26590 - DNA, 33 bp, Homo sapien
attataattgttgatttaaaaaagccaaactct

SEQ ID NO: 26591 - DNA, 33 bp, Homo sapien
agtcaggcatacaaaaagtaggacattacaata

SEQ ID NO: 26592 - DNA, 33 bp, Homo sapien
agtcaggcatacaaaacgtaggacattacaata

SEQ ID NO: 26593 - DNA, 33 bp, Homo sapien
agtcatcactgctgtaagtccacagccaagccc

SEQ ID NO: 26594 - DNA, 33 bp, Homo sapien
agtcatcactgctgtaggtccacagccaagccc

SEQ ID NO: 26595 - DNA, 33 bp, Homo sapien
ccctttgtaaaatagaatcatgaactagaaatt

SEQ ID NO: 26596 - DNA, 33 bp, Homo sapien
ccctttgtaaaatagagtcatgaactagaaatt

SEQ ID NO: 26597 - DNA, 33 bp, Homo sapien
aaagaggacatcttaacagatgatgacatggcc

SEQ ID NO: 26598 - DNA, 33 bp, Homo sapien
aaagaggacatcttaatagatgatgacatggcc

SEQ ID NO: 26599 - DNA, 33 bp, Homo sapien
atggaaacctttatcaccagcctaccataatat

SEQ ID NO: 26600 - DNA, 33 bp, Homo sapien
atggaaacctttatcatcagcctaccataatat

SEQ ID NO: 26601 - DNA, 33 bp, Homo sapien
cccatagtttttcgcaatctcttgggaatctat

SEQ ID NO: 26602 - DNA, 33 bp, Homo sapien
cccatagtttttcgcagtctcttgggaatctat

SEQ ID NO: 26603 - DNA, 33 bp, Homo sapien
gattagatgtcccccaatcttaatagagaaatg

SEQ ID NO: 26604 - DNA, 33 bp, Homo sapien
gattagatgtcccccactcttaatagagaaatg

SEQ ID NO: 26605 - DNA, 33 bp, Homo sapien
aactaatttcatgcaccaaccttatgaggtaag

SEQ ID NO: 26606 - DNA, 33 bp, Homo sapien
aactaatttcatgcacgaaccttatgaggtaag

SEQ ID NO: 26607 - DNA, 33 bp, Homo sapien
cttgactttctggactcagatgattttcctgcc

SEQ ID NO: 26608 - DNA, 33 bp, Homo sapien
cttgactttctggacttagatgattttcctgcc

SEQ ID NO: 26609 - DNA, 33 bp, Homo sapien
gaataatctacagtgacagaaaccagacagatc

SEQ ID NO: 26610 - DNA, 33 bp, Homo sapien
gaataatctacagtgagagaaaccagacagatc

SEQ ID NO: 26611 - DNA, 33 bp, Homo sapien
tataattacatactcacatttgtttcagtagtc

SEQ ID NO: 26612 - DNA, 33 bp, Homo sapien
tataattacatactcatatttgtttcagtagtc

SEQ ID NO: 26613 - DNA, 33 bp, Homo sapien
aaaggaaatatgtcacaaatgcataatattaaa

SEQ ID NO: 26614 - DNA, 33 bp, Homo sapien
aaaggaaatatgtcacgaatgcataatattaaa

SEQ ID NO: 26615 - DNA, 33 bp, Homo sapien
ctgctgttgtgtaaaactaaacacactgcaaac

SEQ ID NO: 26616 - DNA, 33 bp, Homo sapien
ctgctgttgtgtaaaattaaacacactgcaaac

SEQ ID NO: 26617 - DNA, 33 bp, Homo sapien
acagtattgcgtagtccgacaaatcatttttca

SEQ ID NO: 26618 - DNA, 33 bp, Homo sapien
acagtattgcgtagtctgacaaatcatttttca

SEQ ID NO: 26619 - DNA, 33 bp, Homo sapien
gtgtgggcccatgtgcactgttattaggtagtc

SEQ ID NO: 26620 - DNA, 33 bp, Homo sapien
gtgtgggcccatgtgcgctgttattaggtagtc

SEQ ID NO: 26621 - DNA, 33 bp, Homo sapien
cagtgacagttatgtgaaaatctaagctaagct

SEQ ID NO: 26622 - DNA, 33 bp, Homo sapien
cagtgacagttatgtggaaatctaagctaagct

SEQ ID NO: 26623 - DNA, 33 bp, Homo sapien
ttcagagctaattatcaaacatccaacggaact

SEQ ID NO: 26624 - DNA, 33 bp, Homo sapien
ttcagagctaattatccaacatccaacggaact

SEQ ID NO: 26625 - DNA, 33 bp, Homo sapien
caacaacattgctttacgtaggtagaagaaaaa

SEQ ID NO: 26626 - DNA, 33 bp, Homo sapien
caacaacattgctttatgtaggtagaagaaaaa

SEQ ID NO: 26627 - DNA, 33 bp, Homo sapien
gacttctgtgcaccaacaggctaaataccacat

SEQ ID NO: 26628 - DNA, 33 bp, Homo sapien
gacttctgtgcaccaataggctaaataccacat

SEQ ID NO: 26629 - DNA, 33 bp, Homo sapien
aataagagaagaagaaatcttggaatgacaggg

SEQ ID NO: 26630 - DNA, 33 bp, Homo sapien
aataagagaagaagaagtcttggaatgacaggg

SEQ ID NO: 26631 - DNA, 33 bp, Homo sapien
atatacggaatttccaagattgcttagatctag

SEQ ID NO: 26632 - DNA, 33 bp, Homo sapien
atatacggaatttccacgattgcttagatctag

SEQ ID NO: 26633 - DNA, 33 bp, Homo sapien
taatcatggtgaacaaggcccctctaaacatat

SEQ ID NO: 26634 - DNA, 33 bp, Homo sapien
taatcatggtgaacaatgcccctctaaacatat

SEQ ID NO: 26635 - DNA, 33 bp, Homo sapien
tagatatgcttaaatcacatcatataaagactt

SEQ ID NO: 26636 - DNA, 33 bp, Homo sapien
tagatatgcttaaatcgcatcatataaagactt

SEQ ID NO: 26637 - DNA, 33 bp, Homo sapien
atcgttcaaacaaaaaccaaggaattagtacaa

SEQ ID NO: 26638 - DNA, 33 bp, Homo sapien
atcgttcaaacaaaaatcaaggaattagtacaa

SEQ ID NO: 26639 - DNA, 33 bp, Homo sapien
atacaaagaatcaaagaaaggttgaccactagc

SEQ ID NO: 26640 - DNA, 33 bp, Homo sapien
atacaaagaatcaaagcaaggttgaccactagc

SEQ ID NO: 26641 - DNA, 33 bp, Homo sapien
tacccagtgcttctcccagtcttagcatttaaa

SEQ ID NO: 26642 - DNA, 33 bp, Homo sapien
tacccagtgcttctccgagtcttagcatttaaa

SEQ ID NO: 26643 - DNA, 33 bp, Homo sapien
gttggactttttcttagctttctcagagtttct

SEQ ID NO: 26644 - DNA, 33 bp, Homo sapien
gttggactttttcttatctttctcagagtttct

SEQ ID NO: 26645 - DNA, 33 bp, Homo sapien
ctttttatgaatagctcaaggtagatttggaac

SEQ ID NO: 26646 - DNA, 33 bp, Homo sapien
ctttttatgaatagcttaaggtagatttggaac

SEQ ID NO: 26647 - DNA, 33 bp, Homo sapien
attaactcgttagttaagtaaatttccgctggc

SEQ ID NO: 26648 - DNA, 33 bp, Homo sapien
attaactcgttagttatgtaaatttccgctggc

SEQ ID NO: 26649 - DNA, 33 bp, Homo sapien
gatcatggaagtaaaaatttgtttccacagtga

SEQ ID NO: 26650 - DNA, 33 bp, Homo sapien
gatcatggaagtaaaagtttgtttccacagtga

SEQ ID NO: 26651 - DNA, 33 bp, Homo sapien
ggctttacttcttacaacctacattactttaga

SEQ ID NO: 26652 - DNA, 33 bp, Homo sapien
ggctttacttcttacatcctacattactttaga

SEQ ID NO: 26653 - DNA, 33 bp, Homo sapien
gacttagcatcttcaacagcacctgaaaagatc

SEQ ID NO: 26654 - DNA, 33 bp, Homo sapien
gacttagcatcttcaatagcacctgaaaagatc

SEQ ID NO: 26655 - DNA, 33 bp, Homo sapien
gggtccacatggaatgaatataattttgcagct

SEQ ID NO: 26656 - DNA, 33 bp, Homo sapien
gggtccacatggaatggatataattttgcagct

SEQ ID NO: 26657 - DNA, 33 bp, Homo sapien
tcctgaggaaagcactaaatgacgagttaatgg

SEQ ID NO: 26658 - DNA, 33 bp, Homo sapien
tcctgaggaaagcactcaatgacgagttaatgg

SEQ ID NO: 26659 - DNA, 33 bp, Homo sapien
gtttacattcctactaagtagagttagtctaac

SEQ ID NO: 26660 - DNA, 33 bp, Homo sapien
gtttacattcctactaggtagagttagtctaac

SEQ ID NO: 26661 - DNA, 33 bp, Homo sapien
ttctcacttattaaacaaagtccttttccaaac

SEQ ID NO: 26662 - DNA, 33 bp, Homo sapien
ttctcacttattaaaccaagtccttttccaaac

SEQ ID NO: 26663 - DNA, 33 bp, Homo sapien
gtgggagtttggattgaaacttaatgctgccct

SEQ ID NO: 26664 - DNA, 33 bp, Homo sapien
gtgggagtttggattggaacttaatgctgccct

SEQ ID NO: 26665 - DNA, 33 bp, Homo sapien
tatcaactcaaccataataggatggggactggg

SEQ ID NO: 26666 - DNA, 33 bp, Homo sapien
tatcaactcaaccatagtaggatggggactggg

SEQ ID NO: 26667 - DNA, 33 bp, Homo sapien
acattcaacaagtccaaaatgtgacaggattta

SEQ ID NO: 26668 - DNA, 33 bp, Homo sapien
acattcaacaagtccagaatgtgacaggattta

SEQ ID NO: 26669 - DNA, 33 bp, Homo sapien
atgatcttttcacataacaccaaagtagcctta

SEQ ID NO: 26670 - DNA, 33 bp, Homo sapien
atgatcttttcacataccaccaaagtagcctta

SEQ ID NO: 26671 - DNA, 33 bp, Homo sapien
cagaggaaagaaactccaccttgtacagccaga

SEQ ID NO: 26672 - DNA, 33 bp, Homo sapien
cagaggaaagaaactctaccttgtacagccaga

SEQ ID NO: 26673 - DNA, 33 bp, Homo sapien
tgtattggaaaaacaacagcaataacaacaaca

SEQ ID NO: 26674 - DNA, 33 bp, Homo sapien
tgtattggaaaaacaatagcaataacaacaaca

SEQ ID NO: 26675 - DNA, 33 bp, Homo sapien
gtgctgaaaaaaggacagatacttagcagccaa

SEQ ID NO: 26676 - DNA, 33 bp, Homo sapien
gtgctgaaaaaaggacggatacttagcagccaa

SEQ ID NO: 26677 - DNA, 33 bp, Homo sapien
atcctttttaaactggcatttatctgtagacat

SEQ ID NO: 26678 - DNA, 33 bp, Homo sapien
atcctttttaaactggtatttatctgtagacat

SEQ ID NO: 26679 - DNA, 33 bp, Homo sapien
aaaaacattttcaacaatgacacttctagctca

SEQ ID NO: 26680 - DNA, 33 bp, Homo sapien
aaaaacattttcaacagtgacacttctagctca

SEQ ID NO: 26681 - DNA, 33 bp, Homo sapien
tatacagcaaatagcaagactggaccagatttt

SEQ ID NO: 26682 - DNA, 33 bp, Homo sapien
tatacagcaaatagcaggactggaccagatttt

SEQ ID NO: 26683 - DNA, 33 bp, Homo sapien
tatggcctacattacaatctatttactttcaag

SEQ ID NO: 26684 - DNA, 33 bp, Homo sapien
tatggcctacattacagtctatttactttcaag

SEQ ID NO: 26685 - DNA, 33 bp, Homo sapien
gagattgagaaaactgcagaaaaagcagctgtg

SEQ ID NO: 26686 - DNA, 33 bp, Homo sapien
gagattgagaaaactgtagaaaaagcagctgtg

SEQ ID NO: 26687 - DNA, 33 bp, Homo sapien
tcaggagaaatgtagcccaggtctgattatttg

SEQ ID NO: 26688 - DNA, 33 bp, Homo sapien
tcaggagaaatgtagctcaggtctgattatttg

SEQ ID NO: 26689 - DNA, 33 bp, Homo sapien
tgtgacagactttccaatggaaaatattcttaa

SEQ ID NO: 26690 - DNA, 33 bp, Homo sapien
tgtgacagactttccattggaaaatattcttaa

SEQ ID NO: 26691 - DNA, 33 bp, Homo sapien
taagtaaattcagcacaattcaactttatgttc

SEQ ID NO: 26692 - DNA, 33 bp, Homo sapien
taagtaaattcagcacgattcaactttatgttc

SEQ ID NO: 26693 - DNA, 33 bp, Homo sapien
atgactcagatgggaaaagcaaaaacatcctag

SEQ ID NO: 26694 - DNA, 33 bp, Homo sapien
atgactcagatgggaagagcaaaaacatcctag

SEQ ID NO: 26695 - DNA, 33 bp, Homo sapien
gtgtaaaattatggaacgttatattcaaaagta

SEQ ID NO: 26696 - DNA, 33 bp, Homo sapien
gtgtaaaattatggaaggttatattcaaaagta

SEQ ID NO: 26697 - DNA, 33 bp, Homo sapien
taatatcagaataaaaacaatctacacaaatca

SEQ ID NO: 26698 - DNA, 33 bp, Homo sapien
taatatcagaataaaagcaatctacacaaatca

SEQ ID NO: 26699 - DNA, 33 bp, Homo sapien
tgcaaattggtaaatgacaacagctggatttta

SEQ ID NO: 26700 - DNA, 33 bp, Homo sapien
tgcaaattggtaaatgccaacagctggatttta

SEQ ID NO: 26701 - DNA, 33 bp, Homo sapien
ccatgcaagtttcaagacaattatttggacttc

SEQ ID NO: 26702 - DNA, 33 bp, Homo sapien
ccatgcaagtttcaaggcaattatttggacttc

SEQ ID NO: 26703 - DNA, 33 bp, Homo sapien
tcatagaactttttgcaccaattcataataatt

SEQ ID NO: 26704 - DNA, 33 bp, Homo sapien
tcatagaactttttgcgccaattcataataatt

SEQ ID NO: 26705 - DNA, 33 bp, Homo sapien
gtcctcctatcatctccccatcctctactattc

SEQ ID NO: 26706 - DNA, 33 bp, Homo sapien
gtcctcctatcatctctccatcctctactattc

SEQ ID NO: 26707 - DNA, 33 bp, Homo sapien
aaaattcacagaacaaatagtcaacaaatggta

SEQ ID NO: 26708 - DNA, 33 bp, Homo sapien
aaaattcacagaacaattagtcaacaaatggta

SEQ ID NO: 26709 - DNA, 33 bp, Homo sapien
tgttttgggtacttacactattagagaccactt

SEQ ID NO: 26710 - DNA, 33 bp, Homo sapien
tgttttgggtacttacgctattagagaccactt

SEQ ID NO: 26711 - DNA, 33 bp, Homo sapien
tagatctgtgtggttcactcaacagctgcagtg

SEQ ID NO: 26712 - DNA, 33 bp, Homo sapien
tagatctgtgtggttcgctcaacagctgcagtg

SEQ ID NO: 26713 - DNA, 33 bp, Homo sapien
tttctctacaggacaaaagagtgtgaggatatg

SEQ ID NO: 26714 - DNA, 33 bp, Homo sapien
tttctctacaggacaacagagtgtgaggatatg

SEQ ID NO: 26715 - DNA, 33 bp, Homo sapien
atcacatctctatatacgattgccataggatct

SEQ ID NO: 26716 - DNA, 33 bp, Homo sapien
atcacatctctatatatgattgccataggatct

SEQ ID NO: 26717 - DNA, 33 bp, Homo sapien
tggagactgagcatctaacaggtggagtgccac

SEQ ID NO: 26718 - DNA, 33 bp, Homo sapien
tggagactgagcatcttacaggtggagtgccac

SEQ ID NO: 26719 - DNA, 33 bp, Homo sapien
ttaaacctgttaacaactgaagaagagaaaatt

SEQ ID NO: 26720 - DNA, 33 bp, Homo sapien
ttaaacctgttaacaattgaagaagagaaaatt

SEQ ID NO: 26721 - DNA, 33 bp, Homo sapien
gaggttttctgggtgactatagctaaaagaaaa

SEQ ID NO: 26722 - DNA, 33 bp, Homo sapien
gaggttttctgggtgagtatagctaaaagaaaa

SEQ ID NO: 26723 - DNA, 33 bp, Homo sapien
tcctctggtgggtaaacacattcagttagtatt

SEQ ID NO: 26724 - DNA, 33 bp, Homo sapien
tcctctggtgggtaaatacattcagttagtatt

SEQ ID NO: 26725 - DNA, 33 bp, Homo sapien
tttgttagaatcacaacaaaacatcatgcgatt

SEQ ID NO: 26726 - DNA, 33 bp, Homo sapien
tttgttagaatcacaataaaacatcatgcgatt

SEQ ID NO: 26727 - DNA, 33 bp, Homo sapien
aaaatgaggaagctagccgaagtaacatactgc

SEQ ID NO: 26728 - DNA, 33 bp, Homo sapien
aaaatgaggaagctagtcgaagtaacatactgc

SEQ ID NO: 26729 - DNA, 33 bp, Homo sapien
aattggtcatggctagaaaaaggaaattgtgta

SEQ ID NO: 26730 - DNA, 33 bp, Homo sapien
aattggtcatggctaggaaaaggaaattgtgta

SEQ ID NO: 26731 - DNA, 33 bp, Homo sapien
ataattagtgctaagaactgctaagaaatttta

SEQ ID NO: 26732 - DNA, 33 bp, Homo sapien
ataattagtgctaagatctgctaagaaatttta

SEQ ID NO: 26733 - DNA, 33 bp, Homo sapien
agtctttcaatttatgcatactgttgtctgtgg

SEQ ID NO: 26734 - DNA, 33 bp, Homo sapien
agtctttcaatttatgtatactgttgtctgtgg

SEQ ID NO: 26735 - DNA, 33 bp, Homo sapien
acagagttctttaaaacgaccgaagaactgtca

SEQ ID NO: 26736 - DNA, 33 bp, Homo sapien
acagagttctttaaaatgaccgaagaactgtca

SEQ ID NO: 26737 - DNA, 33 bp, Homo sapien
agaatgtggtggtatacgccaaaagagccagat

SEQ ID NO: 26738 - DNA, 33 bp, Homo sapien
agaatgtggtggtatatgccaaaagagccagat

SEQ ID NO: 26739 - DNA, 33 bp, Homo sapien
aaatgatggacttatgaatcttaaacctaaagt

SEQ ID NO: 26740 - DNA, 33 bp, Homo sapien
aaatgatggacttatgcatcttaaacctaaagt

SEQ ID NO: 26741 - DNA, 33 bp, Homo sapien
ggtcttcaaactataccgcgaagatcagtgcat

SEQ ID NO: 26742 - DNA, 33 bp, Homo sapien
ggtcttcaaactatactgcgaagatcagtgcat

SEQ ID NO: 26743 - DNA, 33 bp, Homo sapien
tcatgtttgatggtaccgcacgtacttattacc

SEQ ID NO: 26744 - DNA, 33 bp, Homo sapien
tcatgtttgatggtactgcacgtacttattacc

SEQ ID NO: 26745 - DNA, 33 bp, Homo sapien
ctcatatgaaactccaataaaaccaggctactt

SEQ ID NO: 26746 - DNA, 33 bp, Homo sapien
ctcatatgaaactccagtaaaaccaggctactt

SEQ ID NO: 26747 - DNA, 33 bp, Homo sapien
atcaactgattgataaactaggaaatgatacac

SEQ ID NO: 26748 - DNA, 33 bp, Homo sapien
atcaactgattgataacctaggaaatgatacac

SEQ ID NO: 26749 - DNA, 33 bp, Homo sapien
taaatagaaacagacaagttcaataccctcagc

SEQ ID NO: 26750 - DNA, 33 bp, Homo sapien
taaatagaaacagacacgttcaataccctcagc

SEQ ID NO: 26751 - DNA, 33 bp, Homo sapien
agtcctcactacctgaacgctgtgaacacacat

SEQ ID NO: 26752 - DNA, 33 bp, Homo sapien
agtcctcactacctgagcgctgtgaacacacat

SEQ ID NO: 26753 - DNA, 33 bp, Homo sapien
tctgccttgaacttaacattcatggtgtttacc

SEQ ID NO: 26754 - DNA, 33 bp, Homo sapien
tctgccttgaacttaatattcatggtgtttacc

SEQ ID NO: 26755 - DNA, 33 bp, Homo sapien
gttttgaagacctagaacagccatctcactcag

SEQ ID NO: 26756 - DNA, 33 bp, Homo sapien
gttttgaagacctagatcagccatctcactcag

SEQ ID NO: 26757 - DNA, 33 bp, Homo sapien
atcagctttctctaaactgacctcttacaaact

SEQ ID NO: 26758 - DNA, 33 bp, Homo sapien
atcagctttctctaaattgacctcttacaaact

SEQ ID NO: 26759 - DNA, 33 bp, Homo sapien
taaggccttggaatccaataggaatagccaagt

SEQ ID NO: 26760 - DNA, 33 bp, Homo sapien
taaggccttggaatccgataggaatagccaagt

SEQ ID NO: 26761 - DNA, 33 bp, Homo sapien
atgattacattgccttaaaactatttagcataa

SEQ ID NO: 26762 - DNA, 33 bp, Homo sapien
atgattacattgccttgaaactatttagcataa

SEQ ID NO: 26763 - DNA, 33 bp, Homo sapien
ctctgttatttgcttccacctccagctccagtt

SEQ ID NO: 26764 - DNA, 33 bp, Homo sapien
ctctgttatttgcttcgacctccagctccagtt

SEQ ID NO: 26765 - DNA, 33 bp, Homo sapien
atcttccatcctcagaagtctttcagtctccaa

SEQ ID NO: 26766 - DNA, 33 bp, Homo sapien
atcttccatcctcagaggtctttcagtctccaa

SEQ ID NO: 26767 - DNA, 33 bp, Homo sapien
ctactaaagttcttaccggtgggagagagtagt

SEQ ID NO: 26768 - DNA, 33 bp, Homo sapien
ctactaaagttcttactggtgggagagagtagt

SEQ ID NO: 26769 - DNA, 33 bp, Homo sapien
acaaagaatgttagcacccaagctcaagaacgg

SEQ ID NO: 26770 - DNA, 33 bp, Homo sapien
acaaagaatgttagcatccaagctcaagaacgg

SEQ ID NO: 26771 - DNA, 33 bp, Homo sapien
acaactcaataaaaaacgggctaaagctctgaa

SEQ ID NO: 26772 - DNA, 33 bp, Homo sapien
acaactcaataaaaaatgggctaaagctctgaa

SEQ ID NO: 26773 - DNA, 33 bp, Homo sapien
agctagtccttttaaaatatgcattcagggtga

SEQ ID NO: 26774 - DNA, 33 bp, Homo sapien
agctagtccttttaaagtatgcattcagggtga

SEQ ID NO: 26775 - DNA, 33 bp, Homo sapien
ttttcacccagctgcaacctaaaagtgctatca

SEQ ID NO: 26776 - DNA, 33 bp, Homo sapien
ttttcacccagctgcatcctaaaagtgctatca

SEQ ID NO: 26777 - DNA, 33 bp, Homo sapien
ttctcttattgctacacgagaaaacacacatac

SEQ ID NO: 26778 - DNA, 33 bp, Homo sapien
ttctcttattgctacatgagaaaacacacatac

SEQ ID NO: 26779 - DNA, 33 bp, Homo sapien
gcagtttcaaatgcacagtgaaccaaactgcac

SEQ ID NO: 26780 - DNA, 33 bp, Homo sapien
gcagtttcaaatgcacggtgaaccaaactgcac

SEQ ID NO: 26781 - DNA, 33 bp, Homo sapien
tgtgttaagcacctcagatgtaaaggcaagggt

SEQ ID NO: 26782 - DNA, 33 bp, Homo sapien
tgtgttaagcacctcatatgtaaaggcaagggt

SEQ ID NO: 26783 - DNA, 33 bp, Homo sapien
tactcttaacaaaggacaaaacagatattcaaa

SEQ ID NO: 26784 - DNA, 33 bp, Homo sapien
tactcttaacaaaggagaaaacagatattcaaa

SEQ ID NO: 26785 - DNA, 33 bp, Homo sapien
aaatatggcctaaagacgcattttgttgtatta

SEQ ID NO: 26786 - DNA, 33 bp, Homo sapien
aaatatggcctaaagatgcattttgttgtatta

SEQ ID NO: 26787 - DNA, 33 bp, Homo sapien
tccagcattacctttaaataccactctatacag

SEQ ID NO: 26788 - DNA, 33 bp, Homo sapien
tccagcattacctttagataccactctatacag

SEQ ID NO: 26789 - DNA, 33 bp, Homo sapien
ataatttagataccacaattctctctaggaatc

SEQ ID NO: 26790 - DNA, 33 bp, Homo sapien
ataatttagataccaccattctctctaggaatc

SEQ ID NO: 26791 - DNA, 33 bp, Homo sapien
cattttgggatcataagtgtagcctgagatatg

SEQ ID NO: 26792 - DNA, 33 bp, Homo sapien
cattttgggatcataattgtagcctgagatatg

SEQ ID NO: 26793 - DNA, 33 bp, Homo sapien
cagaattctgaagaccaattcaaatatttctta

SEQ ID NO: 26794 - DNA, 33 bp, Homo sapien
cagaattctgaagaccgattcaaatatttctta

SEQ ID NO: 26795 - DNA, 33 bp, Homo sapien
atctggggaataaaaagatcaggctatgtttga

SEQ ID NO: 26796 - DNA, 33 bp, Homo sapien
atctggggaataaaaatatcaggctatgtttga

SEQ ID NO: 26797 - DNA, 33 bp, Homo sapien
gatgtgatttgggaaactgctaatactagggac

SEQ ID NO: 26798 - DNA, 33 bp, Homo sapien
gatgtgatttgggaaagtgctaatactagggac

SEQ ID NO: 26799 - DNA, 33 bp, Homo sapien
gaaataaagtgttgacaaagttattaatgtttt

SEQ ID NO: 26800 - DNA, 33 bp, Homo sapien
gaaataaagtgttgactaagttattaatgtttt

SEQ ID NO: 26801 - DNA, 33 bp, Homo sapien
taaggtatttcatctaaacattgcaataactac

SEQ ID NO: 26802 - DNA, 33 bp, Homo sapien
taaggtatttcatctatacattgcaataactac

SEQ ID NO: 26803 - DNA, 33 bp, Homo sapien
atatcagaagatgaagaaggaacatgaaggcac

SEQ ID NO: 26804 - DNA, 33 bp, Homo sapien
atatcagaagatgaagcaggaacatgaaggcac

SEQ ID NO: 26805 - DNA, 33 bp, Homo sapien
gatattctttgtagggaagttgcaataggaaga

SEQ ID NO: 26806 - DNA, 33 bp, Homo sapien
gatattctttgtagggcagttgcaataggaaga

SEQ ID NO: 26807 - DNA, 33 bp, Homo sapien
gtaagacatccatgccagaaaaacacagggtat

SEQ ID NO: 26808 - DNA, 33 bp, Homo sapien
gtaagacatccatgccggaaaaacacagggtat

SEQ ID NO: 26809 - DNA, 33 bp, Homo sapien
aaatgtccatactacccgatatgtgtccccaac

SEQ ID NO: 26810 - DNA, 33 bp, Homo sapien
aaatgtccatactacctgatatgtgtccccaac

SEQ ID NO: 26811 - DNA, 33 bp, Homo sapien
agtttcaaagtttcaaatcttacatataagtct

SEQ ID NO: 26812 - DNA, 33 bp, Homo sapien
agtttcaaagtttcaagtcttacatataagtct

SEQ ID NO: 26813 - DNA, 33 bp, Homo sapien
attctgtgaaaataaaataaaagcaatgacaat

SEQ ID NO: 26814 - DNA, 33 bp, Homo sapien
attctgtgaaaataaagtaaaagcaatgacaat

SEQ ID NO: 26815 - DNA, 33 bp, Homo sapien
cccagaaagcctgaagaaagattcagagtaata

SEQ ID NO: 26816 - DNA, 33 bp, Homo sapien
cccagaaagcctgaaggaagattcagagtaata

SEQ ID NO: 26817 - DNA, 33 bp, Homo sapien
gcttctctctttctcaacgaaatgcttaataca

SEQ ID NO: 26818 - DNA, 33 bp, Homo sapien
gcttctctctttctcagcgaaatgcttaataca

SEQ ID NO: 26819 - DNA, 33 bp, Homo sapien
aggactcaagatattacaggctgaagagctggt

SEQ ID NO: 26820 - DNA, 33 bp, Homo sapien
aggactcaagatattataggctgaagagctggt

SEQ ID NO: 26821 - DNA, 33 bp, Homo sapien
taaagtctcattaagaccatccaaatgcccagc

SEQ ID NO: 26822 - DNA, 33 bp, Homo sapien
taaagtctcattaagatcatccaaatgcccagc

SEQ ID NO: 26823 - DNA, 33 bp, Homo sapien
tggatgtttatttgaacatctagttttgcatcg

SEQ ID NO: 26824 - DNA, 33 bp, Homo sapien
tggatgtttatttgaatatctagttttgcatcg

SEQ ID NO: 26825 - DNA, 33 bp, Homo sapien
ctctctgggaaatttacgtaagatggcattata

SEQ ID NO: 26826 - DNA, 33 bp, Homo sapien
ctctctgggaaatttatgtaagatggcattata

SEQ ID NO: 26827 - DNA, 33 bp, Homo sapien
cttcattgttacattgaaagaattttctccatg

SEQ ID NO: 26828 - DNA, 33 bp, Homo sapien
cttcattgttacattgtaagaattttctccatg

SEQ ID NO: 26829 - DNA, 33 bp, Homo sapien
tctgatgtaaactgcaatatgagcttaatgttt

SEQ ID NO: 26830 - DNA, 33 bp, Homo sapien
tctgatgtaaactgcagtatgagcttaatgttt

SEQ ID NO: 26831 - DNA, 33 bp, Homo sapien
acttgatagacttctacgactggaactgcctca

SEQ ID NO: 26832 - DNA, 33 bp, Homo sapien
acttgatagacttctatgactggaactgcctca

SEQ ID NO: 26833 - DNA, 33 bp, Homo sapien
ttactggacaatcaaacatagtgagggcaatga

SEQ ID NO: 26834 - DNA, 33 bp, Homo sapien
ttactggacaatcaaatatagtgagggcaatga

SEQ ID NO: 26835 - DNA, 33 bp, Homo sapien
ttgtggcctctggctaccaataatcacacaaaa

SEQ ID NO: 26836 - DNA, 33 bp, Homo sapien
ttgtggcctctggctatcaataatcacacaaaa

SEQ ID NO: 26837 - DNA, 33 bp, Homo sapien
gacatggtctcagaataaagaatagctttttaa

SEQ ID NO: 26838 - DNA, 33 bp, Homo sapien
gacatggtctcagaatgaagaatagctttttaa

SEQ ID NO: 26839 - DNA, 33 bp, Homo sapien
acttgcagatttttcaaaggatgttatgtcttt

SEQ ID NO: 26840 - DNA, 33 bp, Homo sapien
acttgcagatttttcagaggatgttatgtcttt

SEQ ID NO: 26841 - DNA, 33 bp, Homo sapien
taaatgtacaggcacactgacaaagtcataaat

SEQ ID NO: 26842 - DNA, 33 bp, Homo sapien
taaatgtacaggcacagtgacaaagtcataaat

SEQ ID NO: 26843 - DNA, 33 bp, Homo sapien
tatgatttaataaacccaggcatcagaaacacc

SEQ ID NO: 26844 - DNA, 33 bp, Homo sapien
tatgatttaataaacctaggcatcagaaacacc

SEQ ID NO: 26845 - DNA, 33 bp, Homo sapien
tgagtttgaaaatccaatcagcaactcagttga

SEQ ID NO: 26846 - DNA, 33 bp, Homo sapien
tgagtttgaaaatccactcagcaactcagttga

SEQ ID NO: 26847 - DNA, 33 bp, Homo sapien
tgcttccaaaatgatcagaatgaaacaaaaatc

SEQ ID NO: 26848 - DNA, 33 bp, Homo sapien
tgcttccaaaatgatctgaatgaaacaaaaatc

SEQ ID NO: 26849 - DNA, 33 bp, Homo sapien
ctaattctatgacctgcatcttaaccctgcctt

SEQ ID NO: 26850 - DNA, 33 bp, Homo sapien
ctaattctatgacctgtatcttaaccctgcctt

SEQ ID NO: 26851 - DNA, 33 bp, Homo sapien
tttaccaagaagcctcagaccctgtgtaagtta

SEQ ID NO: 26852 - DNA, 33 bp, Homo sapien
tttaccaagaagcctcggaccctgtgtaagtta

SEQ ID NO: 26853 - DNA, 33 bp, Homo sapien
tactctccataaaagcagaagagattataatga

SEQ ID NO: 26854 - DNA, 33 bp, Homo sapien
tactctccataaaagcggaagagattataatga

SEQ ID NO: 26855 - DNA, 33 bp, Homo sapien
catccaggcccatgtcactgccaaactagcccc

SEQ ID NO: 26856 - DNA, 33 bp, Homo sapien
catccaggcccatgtcgctgccaaactagcccc

SEQ ID NO: 26857 - DNA, 33 bp, Homo sapien
ctttttttgtaggggcaagcctggagcctgggt

SEQ ID NO: 26858 - DNA, 33 bp, Homo sapien
ctttttttgtaggggcgagcctggagcctgggt

SEQ ID NO: 26859 - DNA, 33 bp, Homo sapien
atttcaaactttgtcaatattatatctgtgatg

SEQ ID NO: 26860 - DNA, 33 bp, Homo sapien
atttcaaactttgtcagtattatatctgtgatg

SEQ ID NO: 26861 - DNA, 33 bp, Homo sapien
tacagttctggttcaaatgtagttttctcaggg

SEQ ID NO: 26862 - DNA, 33 bp, Homo sapien
tacagttctggttcaagtgtagttttctcaggg

SEQ ID NO: 26863 - DNA, 33 bp, Homo sapien
gtcccttatcataaaaaggccatccacatttta

SEQ ID NO: 26864 - DNA, 33 bp, Homo sapien
gtcccttatcataaaagggccatccacatttta

SEQ ID NO: 26865 - DNA, 33 bp, Homo sapien
cactgaagtgtcagcaaaaaagtgaattcaagc

SEQ ID NO: 26866 - DNA, 33 bp, Homo sapien
cactgaagtgtcagcacaaaagtgaattcaagc

SEQ ID NO: 26867 - DNA, 33 bp, Homo sapien
ttgtttataataatgccctaaagtagctgcctg

SEQ ID NO: 26868 - DNA, 33 bp, Homo sapien
ttgtttataataatgctctaaagtagctgcctg

SEQ ID NO: 26869 - DNA, 33 bp, Homo sapien
tctttcagtgcaaaagacattgaaatgtgtaat

SEQ ID NO: 26870 - DNA, 33 bp, Homo sapien
tctttcagtgcaaaaggcattgaaatgtgtaat

SEQ ID NO: 26871 - DNA, 33 bp, Homo sapien
tataagaagaatctgggattaagacacaggtga

SEQ ID NO: 26872 - DNA, 33 bp, Homo sapien
tataagaagaatctggtattaagacacaggtga

SEQ ID NO: 26873 - DNA, 33 bp, Homo sapien
aacaccactagttctagatgcttatcaatgatt

SEQ ID NO: 26874 - DNA, 33 bp, Homo sapien
aacaccactagttctatatgcttatcaatgatt

SEQ ID NO: 26875 - DNA, 33 bp, Homo sapien
tattgagactctgttacgtgccaagcacttaaa

SEQ ID NO: 26876 - DNA, 33 bp, Homo sapien
tattgagactctgttatgtgccaagcacttaaa

SEQ ID NO: 26877 - DNA, 33 bp, Homo sapien
agattcaatcgaatccacataactcccaaattt

SEQ ID NO: 26878 - DNA, 33 bp, Homo sapien
agattcaatcgaatccgcataactcccaaattt

SEQ ID NO: 26879 - DNA, 33 bp, Homo sapien
ttggaaaatttcaaaacgctgaggacaaaaaag

SEQ ID NO: 26880 - DNA, 33 bp, Homo sapien
ttggaaaatttcaaaatgctgaggacaaaaaag

SEQ ID NO: 26881 - DNA, 33 bp, Homo sapien
tgatcaagaggaataactgacatcagactaaaa

SEQ ID NO: 26882 - DNA, 33 bp, Homo sapien
tgatcaagaggaataattgacatcagactaaaa

SEQ ID NO: 26883 - DNA, 33 bp, Homo sapien
ttataattaagaaggccgatctggatttgcatg

SEQ ID NO: 26884 - DNA, 33 bp, Homo sapien
ttataattaagaaggctgatctggatttgcatg

SEQ ID NO: 26885 - DNA, 33 bp, Homo sapien
agcacaatagaaaacaagtatcataaattgttt

SEQ ID NO: 26886 - DNA, 33 bp, Homo sapien
agcacaatagaaaacatgtatcataaattgttt

SEQ ID NO: 26887 - DNA, 33 bp, Homo sapien
gctcctgtactaagccactctccataacactgc

SEQ ID NO: 26888 - DNA, 33 bp, Homo sapien
gctcctgtactaagccgctctccataacactgc

SEQ ID NO: 26889 - DNA, 33 bp, Homo sapien
ttttggaacagcagcgaagacattctgcagtga

SEQ ID NO: 26890 - DNA, 33 bp, Homo sapien
ttttggaacagcagcggagacattctgcagtga

SEQ ID NO: 26891 - DNA, 33 bp, Homo sapien
ttggtgaccaggaggccattccatgttaagagt

SEQ ID NO: 26892 - DNA, 33 bp, Homo sapien
ttggtgaccaggaggctattccatgttaagagt

SEQ ID NO: 26893 - DNA, 33 bp, Homo sapien
actcacatgattaaagacacatggctgtgagca

SEQ ID NO: 26894 - DNA, 33 bp, Homo sapien
actcacatgattaaagtcacatggctgtgagca

SEQ ID NO: 26895 - DNA, 33 bp, Homo sapien
ctcttcaaataaggacactgagaggttggccgt

SEQ ID NO: 26896 - DNA, 33 bp, Homo sapien
ctcttcaaataaggacgctgagaggttggccgt

SEQ ID NO: 26897 - DNA, 33 bp, Homo sapien
gcactgtagtccaatactaattgtcactattaa

SEQ ID NO: 26898 - DNA, 33 bp, Homo sapien
gcactgtagtccaatattaattgtcactattaa

SEQ ID NO: 26899 - DNA, 33 bp, Homo sapien
ggactacagtgcataaacaactgattatgaatc

SEQ ID NO: 26900 - DNA, 33 bp, Homo sapien
ggactacagtgcataaccaactgattatgaatc

SEQ ID NO: 26901 - DNA, 33 bp, Homo sapien
gaatcttggaagcaaaatgactttctgactcaa

SEQ ID NO: 26902 - DNA, 33 bp, Homo sapien
gaatcttggaagcaaagtgactttctgactcaa

SEQ ID NO: 26903 - DNA, 33 bp, Homo sapien
tcactctttccttgtaaccacaattgtgttagc

SEQ ID NO: 26904 - DNA, 33 bp, Homo sapien
tcactctttccttgtagccacaattgtgttagc

SEQ ID NO: 26905 - DNA, 33 bp, Homo sapien
aaagtgctggcaaggacgtgaaacaactgaaat

SEQ ID NO: 26906 - DNA, 33 bp, Homo sapien
aaagtgctggcaaggatgtgaaacaactgaaat

SEQ ID NO: 26907 - DNA, 33 bp, Homo sapien
ttaactggaactcatacaaattctggtatatag

SEQ ID NO: 26908 - DNA, 33 bp, Homo sapien
ttaactggaactcatataaattctggtatatag

SEQ ID NO: 26909 - DNA, 33 bp, Homo sapien
aaaatttcatcttgaaaattacatcacataaaa

SEQ ID NO: 26910 - DNA, 33 bp, Homo sapien
aaaatttcatcttgaatattacatcacataaaa

SEQ ID NO: 26911 - DNA, 33 bp, Homo sapien
aagcaaccagaacatacgaaaattcattaggag

SEQ ID NO: 26912 - DNA, 33 bp, Homo sapien
aagcaaccagaacatatgaaaattcattaggag

SEQ ID NO: 26913 - DNA, 33 bp, Homo sapien
ttactttctaggttatcaactgtgcttctcatt

SEQ ID NO: 26914 - DNA, 33 bp, Homo sapien
ttactttctaggttatgaactgtgcttctcatt

SEQ ID NO: 26915 - DNA, 33 bp, Homo sapien
gacaaaaccccaaataccacatcaaattgtgga

SEQ ID NO: 26916 - DNA, 33 bp, Homo sapien
gacaaaaccccaaatatcacatcaaattgtgga

SEQ ID NO: 26917 - DNA, 33 bp, Homo sapien
ttagaccaaaatgaagccttacaacacagagag

SEQ ID NO: 26918 - DNA, 33 bp, Homo sapien
ttagaccaaaatgaaggcttacaacacagagag

SEQ ID NO: 26919 - DNA, 33 bp, Homo sapien
ttttctggaccccacaatggacatgacctttat

SEQ ID NO: 26920 - DNA, 33 bp, Homo sapien
ttttctggaccccacagtggacatgacctttat

SEQ ID NO: 26921 - DNA, 33 bp, Homo sapien
cagcccatttttcttacgttatgactaaaaatt

SEQ ID NO: 26922 - DNA, 33 bp, Homo sapien
cagcccatttttcttatgttatgactaaaaatt

SEQ ID NO: 26923 - DNA, 33 bp, Homo sapien
ggcttgggagaaatagccgaagttattcacaga

SEQ ID NO: 26924 - DNA, 33 bp, Homo sapien
ggcttgggagaaatagtcgaagttattcacaga

SEQ ID NO: 26925 - DNA, 33 bp, Homo sapien
tcccttctcactctaactctgatagtagccact

SEQ ID NO: 26926 - DNA, 33 bp, Homo sapien
tcccttctcactctaattctgatagtagccact

SEQ ID NO: 26927 - DNA, 33 bp, Homo sapien
ctgctatagtgtgagacaagagagctgctctca

SEQ ID NO: 26928 - DNA, 33 bp, Homo sapien
ctgctatagtgtgagataagagagctgctctca

SEQ ID NO: 26929 - DNA, 33 bp, Homo sapien
gtagggaataccaacacggctaaaacaagttct

SEQ ID NO: 26930 - DNA, 33 bp, Homo sapien
gtagggaataccaacatggctaaaacaagttct

SEQ ID NO: 26931 - DNA, 33 bp, Homo sapien
tccatacaaactacttaaaggtagaaatattat

SEQ ID NO: 26932 - DNA, 33 bp, Homo sapien
tccatacaaactactttaaggtagaaatattat

SEQ ID NO: 26933 - DNA, 33 bp, Homo sapien
ttattcagggtctgacagcaaagaatacacaga

SEQ ID NO: 26934 - DNA, 33 bp, Homo sapien
ttattcagggtctgacggcaaagaatacacaga

SEQ ID NO: 26935 - DNA, 33 bp, Homo sapien
tgacgtgagaatgcaacttctacatgtctaata

SEQ ID NO: 26936 - DNA, 33 bp, Homo sapien
tgacgtgagaatgcaatttctacatgtctaata

SEQ ID NO: 26937 - DNA, 33 bp, Homo sapien
caattatctcaataacactttttatagcaaaag

SEQ ID NO: 26938 - DNA, 33 bp, Homo sapien
caattatctcaataacgctttttatagcaaaag

SEQ ID NO: 26939 - DNA, 33 bp, Homo sapien
tcctcctacataaccaaaatacaatcatttgat

SEQ ID NO: 26940 - DNA, 33 bp, Homo sapien
tcctcctacataaccacaatacaatcatttgat

SEQ ID NO: 26941 - DNA, 33 bp, Homo sapien
tgccccacctaacaacccattttatatatgagg

SEQ ID NO: 26942 - DNA, 33 bp, Homo sapien
tgccccacctaacaactcattttatatatgagg

SEQ ID NO: 26943 - DNA, 33 bp, Homo sapien
gattttcttttcttaaggtatccatggtagctc

SEQ ID NO: 26944 - DNA, 33 bp, Homo sapien
gattttcttttcttaatgtatccatggtagctc

SEQ ID NO: 26945 - DNA, 33 bp, Homo sapien
aaggaccagaaccttacaggtagagcatttgta

SEQ ID NO: 26946 - DNA, 33 bp, Homo sapien
aaggaccagaaccttataggtagagcatttgta

SEQ ID NO: 26947 - DNA, 33 bp, Homo sapien
ggaggcagagctaaaaggacttgaattgagtga

SEQ ID NO: 26948 - DNA, 33 bp, Homo sapien
ggaggcagagctaaaatgacttgaattgagtga

SEQ ID NO: 26949 - DNA, 33 bp, Homo sapien
catcatttgtcattctcaaagcaactaccctag

SEQ ID NO: 26950 - DNA, 33 bp, Homo sapien
catcatttgtcattcttaaagcaactaccctag

SEQ ID NO: 26951 - DNA, 33 bp, Homo sapien
agaaggaggagtttgaaaaaggagaaggatcaa

SEQ ID NO: 26952 - DNA, 33 bp, Homo sapien
agaaggaggagtttgagaaaggagaaggatcaa

SEQ ID NO: 26953 - DNA, 33 bp, Homo sapien
taagtaacttgtcatgcaggtttgctaacagct

SEQ ID NO: 26954 - DNA, 33 bp, Homo sapien
taagtaacttgtcatgtaggtttgctaacagct

SEQ ID NO: 26955 - DNA, 33 bp, Homo sapien
tctgaactcttccccaactagttactgttaaga

SEQ ID NO: 26956 - DNA, 33 bp, Homo sapien
tctgaactcttccccagctagttactgttaaga

SEQ ID NO: 26957 - DNA, 33 bp, Homo sapien
gttagaaagctgattacggtcataaaagtatta

SEQ ID NO: 26958 - DNA, 33 bp, Homo sapien
gttagaaagctgattatggtcataaaagtatta

SEQ ID NO: 26959 - DNA, 33 bp, Homo sapien
gctcccctttgatagccgagttttcataaccaa

SEQ ID NO: 26960 - DNA, 33 bp, Homo sapien
gctcccctttgatagctgagttttcataaccaa

SEQ ID NO: 26961 - DNA, 33 bp, Homo sapien
taaaatacactcataaatcaattttctatttca

SEQ ID NO: 26962 - DNA, 33 bp, Homo sapien
taaaatacactcataagtcaattttctatttca

SEQ ID NO: 26963 - DNA, 33 bp, Homo sapien
atgcagcactgagctcactccgaagatgttcaa

SEQ ID NO: 26964 - DNA, 33 bp, Homo sapien
atgcagcactgagctcgctccgaagatgttcaa

SEQ ID NO: 26965 - DNA, 33 bp, Homo sapien
ggaatctgaggtgagaaaaatgaagtaacttgc

SEQ ID NO: 26966 - DNA, 33 bp, Homo sapien
ggaatctgaggtgagagaaatgaagtaacttgc

SEQ ID NO: 26967 - DNA, 33 bp, Homo sapien
cttgatataacatgacggagagaggaatcaacc

SEQ ID NO: 26968 - DNA, 33 bp, Homo sapien
cttgatataacatgactgagagaggaatcaacc

SEQ ID NO: 26969 - DNA, 33 bp, Homo sapien
gataagccctaaagtaagatgctgcaatggagg

SEQ ID NO: 26970 - DNA, 33 bp, Homo sapien
gataagccctaaagtaggatgctgcaatggagg

SEQ ID NO: 26971 - DNA, 33 bp, Homo sapien
ttcttcagtggacaccaattaactgagacagtc

SEQ ID NO: 26972 - DNA, 33 bp, Homo sapien
ttcttcagtggacaccgattaactgagacagtc

SEQ ID NO: 26973 - DNA, 33 bp, Homo sapien
actgctgtatcaaaaaagattattcataacaca

SEQ ID NO: 26974 - DNA, 33 bp, Homo sapien
actgctgtatcaaaaatgattattcataacaca

SEQ ID NO: 26975 - DNA, 33 bp, Homo sapien
accctgccaggtcactcagggatttcataacag

SEQ ID NO: 26976 - DNA, 33 bp, Homo sapien
accctgccaggtcactgagggatttcataacag

SEQ ID NO: 26977 - DNA, 33 bp, Homo sapien
aatagctaggattaccaccactgtgctaggccc

SEQ ID NO: 26978 - DNA, 33 bp, Homo sapien
aatagctaggattaccgccactgtgctaggccc

SEQ ID NO: 26979 - DNA, 33 bp, Homo sapien
taacctgtaaatggaaaccactattacatatca

SEQ ID NO: 26980 - DNA, 33 bp, Homo sapien
taacctgtaaatggaagccactattacatatca

SEQ ID NO: 26981 - DNA, 33 bp, Homo sapien
cacagaggttagaggcactcagtttagagaagt

SEQ ID NO: 26982 - DNA, 33 bp, Homo sapien
cacagaggttagaggcgctcagtttagagaagt

SEQ ID NO: 26983 - DNA, 33 bp, Homo sapien
cttcttccttatagcaacaccaagctggatgac

SEQ ID NO: 26984 - DNA, 33 bp, Homo sapien
cttcttccttatagcatcaccaagctggatgac

SEQ ID NO: 26985 - DNA, 33 bp, Homo sapien
ctcttcacagtggatacgatcggcctccagcag

SEQ ID NO: 26986 - DNA, 33 bp, Homo sapien
ctcttcacagtggatatgatcggcctccagcag

SEQ ID NO: 26987 - DNA, 33 bp, Homo sapien
agtctctgtgtctcatcagtaccaatctcctga

SEQ ID NO: 26988 - DNA, 33 bp, Homo sapien
agtctctgtgtctcattagtaccaatctcctga

SEQ ID NO: 26989 - DNA, 33 bp, Homo sapien
gaaacttggattaaataagtgtgctgctcacct

SEQ ID NO: 26990 - DNA, 33 bp, Homo sapien
gaaacttggattaaatgagtgtgctgctcacct

SEQ ID NO: 26991 - DNA, 33 bp, Homo sapien
tttattttacaatacaaagccccagtcaattcc

SEQ ID NO: 26992 - DNA, 33 bp, Homo sapien
tttattttacaatacagagccccagtcaattcc

SEQ ID NO: 26993 - DNA, 33 bp, Homo sapien
aggggtgtcctgtggaaagctggattgcacctg

SEQ ID NO: 26994 - DNA, 33 bp, Homo sapien
aggggtgtcctgtggagagctggattgcacctg

SEQ ID NO: 26995 - DNA, 33 bp, Homo sapien
tctaaggattcctcaactggaaggtgagacttt

SEQ ID NO: 26996 - DNA, 33 bp, Homo sapien
tctaaggattcctcaattggaaggtgagacttt

SEQ ID NO: 26997 - DNA, 33 bp, Homo sapien
atatagaaattttcaagagatcacatttaacta

SEQ ID NO: 26998 - DNA, 33 bp, Homo sapien
atatagaaattttcaatagatcacatttaacta

SEQ ID NO: 26999 - DNA, 33 bp, Homo sapien
atttccctcatgcgaaaggaggtggataattag

SEQ ID NO: 27000 - DNA, 33 bp, Homo sapien
atttccctcatgcgaacggaggtggataattag

SEQ ID NO: 27001 - DNA, 33 bp, Homo sapien
tgtagttctaataagggcaagcaacaggccagc

SEQ ID NO: 27002 - DNA, 33 bp, Homo sapien
tgtagttctaataaggtcaagcaacaggccagc

SEQ ID NO: 27003 - DNA, 33 bp, Homo sapien
ctgtccaatgccgtaaaaaaacatcccagcatc

SEQ ID NO: 27004 - DNA, 33 bp, Homo sapien
ctgtccaatgccgtaacaaaacatcccagcatc

SEQ ID NO: 27005 - DNA, 33 bp, Homo sapien
aagtcattgtttttgcgaagtatgagccacatc

SEQ ID NO: 27006 - DNA, 33 bp, Homo sapien
aagtcattgtttttgctaagtatgagccacatc

SEQ ID NO: 27007 - DNA, 33 bp, Homo sapien
gactgacctcaatggaataggaagtatcagtct

SEQ ID NO: 27008 - DNA, 33 bp, Homo sapien
gactgacctcaatggagtaggaagtatcagtct

SEQ ID NO: 27009 - DNA, 33 bp, Homo sapien
gcaaatccaaattagaaagaatgacagatagta

SEQ ID NO: 27010 - DNA, 33 bp, Homo sapien
gcaaatccaaattagagagaatgacagatagta

SEQ ID NO: 27011 - DNA, 33 bp, Homo sapien
actttgtagtatctgcagcaaattaaaaattct

SEQ ID NO: 27012 - DNA, 33 bp, Homo sapien
actttgtagtatctgcggcaaattaaaaattct

SEQ ID NO: 27013 - DNA, 33 bp, Homo sapien
tggtgaaatatccaaacggcgatataccatctt

SEQ ID NO: 27014 - DNA, 33 bp, Homo sapien
tggtgaaatatccaaatggcgatataccatctt

SEQ ID NO: 27015 - DNA, 33 bp, Homo sapien
ttagcacccttcaatgcagcaaaatgggaccac

SEQ ID NO: 27016 - DNA, 33 bp, Homo sapien
ttagcacccttcaatgtagcaaaatgggaccac

SEQ ID NO: 27017 - DNA, 33 bp, Homo sapien
gtgatgactgaaattaaaccatgtttttaaaga

SEQ ID NO: 27018 - DNA, 33 bp, Homo sapien
gtgatgactgaaattataccatgtttttaaaga

SEQ ID NO: 27019 - DNA, 33 bp, Homo sapien
atgcagccatcctctaccagatgttggtctgat

SEQ ID NO: 27020 - DNA, 33 bp, Homo sapien
atgcagccatcctctatcagatgttggtctgat

SEQ ID NO: 27021 - DNA, 33 bp, Homo sapien
gtctactcttctccaaccctagcataaatttct

SEQ ID NO: 27022 - DNA, 33 bp, Homo sapien
gtctactcttctccaatcctagcataaatttct

SEQ ID NO: 27023 - DNA, 33 bp, Homo sapien
aaccatgtgacctatactacctttaaaaaaaga

SEQ ID NO: 27024 - DNA, 33 bp, Homo sapien
aaccatgtgacctatattacctttaaaaaaaga

SEQ ID NO: 27025 - DNA, 33 bp, Homo sapien
ttagcaaccattctcaatccctgtgtcacattg

SEQ ID NO: 27026 - DNA, 33 bp, Homo sapien
ttagcaaccattctcagtccctgtgtcacattg

SEQ ID NO: 27027 - DNA, 33 bp, Homo sapien
ttagttgcttggaaacggaatataaggcaattt

SEQ ID NO: 27028 - DNA, 33 bp, Homo sapien
ttagttgcttggaaactgaatataaggcaattt

SEQ ID NO: 27029 - DNA, 33 bp, Homo sapien
ttattacggtcatccaaatttctcaaggacctt

SEQ ID NO: 27030 - DNA, 33 bp, Homo sapien
ttattacggtcatccagatttctcaaggacctt

SEQ ID NO: 27031 - DNA, 33 bp, Homo sapien
tttgattgcacataaaaccagctttttcatact

SEQ ID NO: 27032 - DNA, 33 bp, Homo sapien
tttgattgcacataaagccagctttttcatact

SEQ ID NO: 27033 - DNA, 33 bp, Homo sapien
agagcaatgagatttacagaaactgtgcttagt

SEQ ID NO: 27034 - DNA, 33 bp, Homo sapien
agagcaatgagatttagagaaactgtgcttagt

SEQ ID NO: 27035 - DNA, 33 bp, Homo sapien
atattattttgcttagaaattaacactgtaatt

SEQ ID NO: 27036 - DNA, 33 bp, Homo sapien
atattattttgcttaggaattaacactgtaatt

SEQ ID NO: 27037 - DNA, 33 bp, Homo sapien
aagacagagtgctaagaactacacaaccattat

SEQ ID NO: 27038 - DNA, 33 bp, Homo sapien
aagacagagtgctaagtactacacaaccattat

SEQ ID NO: 27039 - DNA, 33 bp, Homo sapien
aacactgttaagaagtaactgtcaggagctatg

SEQ ID NO: 27040 - DNA, 33 bp, Homo sapien
aacactgttaagaagttactgtcaggagctatg

SEQ ID NO: 27041 - DNA, 33 bp, Homo sapien
cacattattatgttacaagacaaatgcagataa

SEQ ID NO: 27042 - DNA, 33 bp, Homo sapien
cacattattatgttacgagacaaatgcagataa

SEQ ID NO: 27043 - DNA, 33 bp, Homo sapien
gcagaggtactattgaaataaacccacgagaca

SEQ ID NO: 27044 - DNA, 33 bp, Homo sapien
gcagaggtactattgagataaacccacgagaca

SEQ ID NO: 27045 - DNA, 33 bp, Homo sapien
gggcactgctggtactaaggaaggacaaaagat

SEQ ID NO: 27046 - DNA, 33 bp, Homo sapien
gggcactgctggtactgaggaaggacaaaagat

SEQ ID NO: 27047 - DNA, 33 bp, Homo sapien
atttaagtagaagagacaggtatatgggcaaat

SEQ ID NO: 27048 - DNA, 33 bp, Homo sapien
atttaagtagaagagataggtatatgggcaaat

SEQ ID NO: 27049 - DNA, 33 bp, Homo sapien
tgagaaacagtactcaataagtcaaaagttatg

SEQ ID NO: 27050 - DNA, 33 bp, Homo sapien
tgagaaacagtactcagtaagtcaaaagttatg

SEQ ID NO: 27051 - DNA, 33 bp, Homo sapien
gaagcctataaaactcaaaaactccaaatatcc

SEQ ID NO: 27052 - DNA, 33 bp, Homo sapien
gaagcctataaaactccaaaactccaaatatcc

SEQ ID NO: 27053 - DNA, 33 bp, Homo sapien
ccattctcaataggcaagttatggtgtgtatta

SEQ ID NO: 27054 - DNA, 33 bp, Homo sapien
ccattctcaataggcaggttatggtgtgtatta

SEQ ID NO: 27055 - DNA, 33 bp, Homo sapien
tgccaatacaaacaaaatctttaataatgttac

SEQ ID NO: 27056 - DNA, 33 bp, Homo sapien
tgccaatacaaacaaagtctttaataatgttac

SEQ ID NO: 27057 - DNA, 33 bp, Homo sapien
ctttctgtcacagcaaagtattctgagctcatc

SEQ ID NO: 27058 - DNA, 33 bp, Homo sapien
ctttctgtcacagcaaggtattctgagctcatc

SEQ ID NO: 27059 - DNA, 33 bp, Homo sapien
catatgcatttacacccatgtttacatctatat

SEQ ID NO: 27060 - DNA, 33 bp, Homo sapien
catatgcatttacacctatgtttacatctatat

SEQ ID NO: 27061 - DNA, 33 bp, Homo sapien
tcttacacagctccaacgggataagaagggatt

SEQ ID NO: 27062 - DNA, 33 bp, Homo sapien
tcttacacagctccaatgggataagaagggatt

SEQ ID NO: 27063 - DNA, 33 bp, Homo sapien
actttttgatattttgcaaagttcttacaataa

SEQ ID NO: 27064 - DNA, 33 bp, Homo sapien
actttttgatattttggaaagttcttacaataa

SEQ ID NO: 27065 - DNA, 33 bp, Homo sapien
ggggaaaaggatgatgaagtgaggctatagcta

SEQ ID NO: 27066 - DNA, 33 bp, Homo sapien
ggggaaaaggatgatggagtgaggctatagcta

SEQ ID NO: 27067 - DNA, 33 bp, Homo sapien
ttagaaagttgcaaacagatatataaagcataa

SEQ ID NO: 27068 - DNA, 33 bp, Homo sapien
ttagaaagttgcaaacggatatataaagcataa

SEQ ID NO: 27069 - DNA, 33 bp, Homo sapien
ttatgttagcattttggagattataatttcaat

SEQ ID NO: 27070 - DNA, 33 bp, Homo sapien
ttatgttagcattttgtagattataatttcaat

SEQ ID NO: 27071 - DNA, 33 bp, Homo sapien
ctgactgcctttgaaccgggacattggcttttt

SEQ ID NO: 27072 - DNA, 33 bp, Homo sapien
ctgactgcctttgaactgggacattggcttttt

SEQ ID NO: 27073 - DNA, 33 bp, Homo sapien
ataaagcattagaaacaatatcagagttcagtt

SEQ ID NO: 27074 - DNA, 33 bp, Homo sapien
ataaagcattagaaactatatcagagttcagtt

SEQ ID NO: 27075 - DNA, 33 bp, Homo sapien
agagatcacatgaagaaagaggacgcaagagag

SEQ ID NO: 27076 - DNA, 33 bp, Homo sapien
agagatcacatgaagagagaggacgcaagagag

SEQ ID NO: 27077 - DNA, 33 bp, Homo sapien
ttgatttttctaggtgccaacttcctgagctca

SEQ ID NO: 27078 - DNA, 33 bp, Homo sapien
ttgatttttctaggtgtcaacttcctgagctca

SEQ ID NO: 27079 - DNA, 33 bp, Homo sapien
atctgatggatgtatcaacattgacatttgtga

SEQ ID NO: 27080 - DNA, 33 bp, Homo sapien
atctgatggatgtatctacattgacatttgtga

SEQ ID NO: 27081 - DNA, 33 bp, Homo sapien
tttgaaatgctagttcaccatcaactttattta

SEQ ID NO: 27082 - DNA, 33 bp, Homo sapien
tttgaaatgctagttcgccatcaactttattta

SEQ ID NO: 27083 - DNA, 33 bp, Homo sapien
tagcatttctatacacgaatactatgcaagctg

SEQ ID NO: 27084 - DNA, 33 bp, Homo sapien
tagcatttctatacactaatactatgcaagctg

SEQ ID NO: 27085 - DNA, 33 bp, Homo sapien
gcagtgaagataccgggcaaattgtataagttt

SEQ ID NO: 27086 - DNA, 33 bp, Homo sapien
gcagtgaagataccggtcaaattgtataagttt

SEQ ID NO: 27087 - DNA, 33 bp, Homo sapien
aaatgaaccattccttaaaatcaacacagacag

SEQ ID NO: 27088 - DNA, 33 bp, Homo sapien
aaatgaaccattccttcaaatcaacacagacag

SEQ ID NO: 27089 - DNA, 33 bp, Homo sapien
agattatgcagcaaaacaagaagaagactaagt

SEQ ID NO: 27090 - DNA, 33 bp, Homo sapien
agattatgcagcaaaataagaagaagactaagt

SEQ ID NO: 27091 - DNA, 33 bp, Homo sapien
ttctttggtttgttccaatcaagtagtttattt

SEQ ID NO: 27092 - DNA, 33 bp, Homo sapien
ttctttggtttgttccgatcaagtagtttattt

SEQ ID NO: 27093 - DNA, 33 bp, Homo sapien
cttttgtggctaataactaatagaagtttgata

SEQ ID NO: 27094 - DNA, 33 bp, Homo sapien
cttttgtggctaataattaatagaagtttgata

SEQ ID NO: 27095 - DNA, 33 bp, Homo sapien
aaataccacatttagaaaaactgcgccatgcaa

SEQ ID NO: 27096 - DNA, 33 bp, Homo sapien
aaataccacatttagagaaactgcgccatgcaa

SEQ ID NO: 27097 - DNA, 33 bp, Homo sapien
tgttatatgttgaagaaaacaaaaataataata

SEQ ID NO: 27098 - DNA, 33 bp, Homo sapien
tgttatatgttgaagagaacaaaaataataata

SEQ ID NO: 27099 - DNA, 33 bp, Homo sapien
tatccttgttgctataccacgaatttccttata

SEQ ID NO: 27100 - DNA, 33 bp, Homo sapien
tatccttgttgctatatcacgaatttccttata

SEQ ID NO: 27101 - DNA, 33 bp, Homo sapien
tcataagctctaagaaattagcaactgatggtt

SEQ ID NO: 27102 - DNA, 33 bp, Homo sapien
tcataagctctaagaatttagcaactgatggtt

SEQ ID NO: 27103 - DNA, 33 bp, Homo sapien
aatccaaacttaaacaacttgagcatccttttt

SEQ ID NO: 27104 - DNA, 33 bp, Homo sapien
aatccaaacttaaacaccttgagcatccttttt

SEQ ID NO: 27105 - DNA, 33 bp, Homo sapien
gattgctgagctacaaaccaaatctggtttcat

SEQ ID NO: 27106 - DNA, 33 bp, Homo sapien
gattgctgagctacaacccaaatctggtttcat

SEQ ID NO: 27107 - DNA, 33 bp, Homo sapien
ctctttggagcaatgaaagttttggaaatacat

SEQ ID NO: 27108 - DNA, 33 bp, Homo sapien
ctctttggagcaatgacagttttggaaatacat

SEQ ID NO: 27109 - DNA, 33 bp, Homo sapien
ccctttcatttctcaacgctttctccacaattt

SEQ ID NO: 27110 - DNA, 33 bp, Homo sapien
ccctttcatttctcaatgctttctccacaattt

SEQ ID NO: 27111 - DNA, 33 bp, Homo sapien
ttaaaatccacagtcaagtcagatcaagttggg

SEQ ID NO: 27112 - DNA, 33 bp, Homo sapien
ttaaaatccacagtcaggtcagatcaagttggg

SEQ ID NO: 27113 - DNA, 33 bp, Homo sapien
ctttcttgaaagaacactaccaaaaagataaaa

SEQ ID NO: 27114 - DNA, 33 bp, Homo sapien
ctttcttgaaagaacagtaccaaaaagataaaa

SEQ ID NO: 27115 - DNA, 33 bp, Homo sapien
cttaggtgagtcataaagatgaaataggcccag

SEQ ID NO: 27116 - DNA, 33 bp, Homo sapien
cttaggtgagtcataaggatgaaataggcccag

SEQ ID NO: 27117 - DNA, 33 bp, Homo sapien
ccaattgcagttttcagctcctgaatttctgat

SEQ ID NO: 27118 - DNA, 33 bp, Homo sapien
ccaattgcagttttcatctcctgaatttctgat

SEQ ID NO: 27119 - DNA, 33 bp, Homo sapien
ggagaccaacatagaaagagggtgattcctgga

SEQ ID NO: 27120 - DNA, 33 bp, Homo sapien
ggagaccaacatagaaggagggtgattcctgga

SEQ ID NO: 27121 - DNA, 33 bp, Homo sapien
gatagcacaacagggacattacagttaacaata

SEQ ID NO: 27122 - DNA, 33 bp, Homo sapien
gatagcacaacagggagattacagttaacaata

SEQ ID NO: 27123 - DNA, 33 bp, Homo sapien
cttctctgagacccgaactggagtagcaggtat

SEQ ID NO: 27124 - DNA, 33 bp, Homo sapien
cttctctgagacccgagctggagtagcaggtat

SEQ ID NO: 27125 - DNA, 33 bp, Homo sapien
tcagagaagggcaagtaaccctgtgctagctgg

SEQ ID NO: 27126 - DNA, 33 bp, Homo sapien
tcagagaagggcaagtgaccctgtgctagctgg

SEQ ID NO: 27127 - DNA, 33 bp, Homo sapien
ctgccttagttcttaacacctgttcacattctt

SEQ ID NO: 27128 - DNA, 33 bp, Homo sapien
ctgccttagttcttaatacctgttcacattctt

SEQ ID NO: 27129 - DNA, 33 bp, Homo sapien
ttggaagaagtaacaacgtaagtaccaactacc

SEQ ID NO: 27130 - DNA, 33 bp, Homo sapien
ttggaagaagtaacaatgtaagtaccaactacc

SEQ ID NO: 27131 - DNA, 33 bp, Homo sapien
agagaaacagtaactcaattcctttaagtgcaa

SEQ ID NO: 27132 - DNA, 33 bp, Homo sapien
agagaaacagtaactcgattcctttaagtgcaa

SEQ ID NO: 27133 - DNA, 33 bp, Homo sapien
tacagaaccatgaaaaatgagaacaatatgaat

SEQ ID NO: 27134 - DNA, 33 bp, Homo sapien
tacagaaccatgaaaactgagaacaatatgaat

SEQ ID NO: 27135 - DNA, 33 bp, Homo sapien
caaataatggtgacgtgaacatcagcttactat

SEQ ID NO: 27136 - DNA, 33 bp, Homo sapien
caaataatggtgacgttaacatcagcttactat

SEQ ID NO: 27137 - DNA, 33 bp, Homo sapien
gtcatagaatcagttcaactaaaatgttacagg

SEQ ID NO: 27138 - DNA, 33 bp, Homo sapien
gtcatagaatcagttcgactaaaatgttacagg

SEQ ID NO: 27139 - DNA, 33 bp, Homo sapien
agctgcaagttttacacagagtatttccttcag

SEQ ID NO: 27140 - DNA, 33 bp, Homo sapien
agctgcaagttttacatagagtatttccttcag

SEQ ID NO: 27141 - DNA, 33 bp, Homo sapien
tttagtaagattcttaactttgcatagttagta

SEQ ID NO: 27142 - DNA, 33 bp, Homo sapien
tttagtaagattcttagctttgcatagttagta

SEQ ID NO: 27143 - DNA, 33 bp, Homo sapien
agcaattctctgagacaggaaggtgtcgtctag

SEQ ID NO: 27144 - DNA, 33 bp, Homo sapien
agcaattctctgagacgggaaggtgtcgtctag

SEQ ID NO: 27145 - DNA, 33 bp, Homo sapien
tttaaacaattgtaataactagcaatccatgta

SEQ ID NO: 27146 - DNA, 33 bp, Homo sapien
tttaaacaattgtaatgactagcaatccatgta

SEQ ID NO: 27147 - DNA, 33 bp, Homo sapien
acagaagtggtttatacagagataagctatact

SEQ ID NO: 27148 - DNA, 33 bp, Homo sapien
acagaagtggtttatatagagataagctatact

SEQ ID NO: 27149 - DNA, 33 bp, Homo sapien
cggatgcccgagtcggcaagaaaggctggaggg

SEQ ID NO: 27150 - DNA, 33 bp, Homo sapien
cggatgcccgagtcgggaagaaaggctggaggg

SEQ ID NO: 27151 - DNA, 33 bp, Homo sapien
cactgtctcaaaagacgcaaaagtatttaagta

SEQ ID NO: 27152 - DNA, 33 bp, Homo sapien
cactgtctcaaaagactcaaaagtatttaagta

SEQ ID NO: 27153 - DNA, 33 bp, Homo sapien
ctcctagggatacgaaaaataagacattcccct

SEQ ID NO: 27154 - DNA, 33 bp, Homo sapien
ctcctagggatacgaagaataagacattcccct

SEQ ID NO: 27155 - DNA, 33 bp, Homo sapien
ggcttttacctgctcaaaagagaactctgcatt

SEQ ID NO: 27156 - DNA, 33 bp, Homo sapien
ggcttttacctgctcataagagaactctgcatt

SEQ ID NO: 27157 - DNA, 33 bp, Homo sapien
aaacaaattttacttacgttcagatgaaatata

SEQ ID NO: 27158 - DNA, 33 bp, Homo sapien
aaacaaattttacttatgttcagatgaaatata

SEQ ID NO: 27159 - DNA, 33 bp, Homo sapien
atggactggcagatcaatagtatgagttctgaa

SEQ ID NO: 27160 - DNA, 33 bp, Homo sapien
atggactggcagatcagtagtatgagttctgaa

SEQ ID NO: 27161 - DNA, 33 bp, Homo sapien
gctcttaatgcctaacactttattgccttgggt

SEQ ID NO: 27162 - DNA, 33 bp, Homo sapien
gctcttaatgcctaacgctttattgccttgggt

SEQ ID NO: 27163 - DNA, 33 bp, Homo sapien
agtgaactgcacaatagcatactacttaagaaa

SEQ ID NO: 27164 - DNA, 33 bp, Homo sapien
agtgaactgcacaatatcatactacttaagaaa

SEQ ID NO: 27165 - DNA, 33 bp, Homo sapien
taaacatctttcttagacctcaggttaatgcct

SEQ ID NO: 27166 - DNA, 33 bp, Homo sapien
taaacatctttcttaggcctcaggttaatgcct

SEQ ID NO: 27167 - DNA, 33 bp, Homo sapien
actagataatttccacacttcttcttcatttgg

SEQ ID NO: 27168 - DNA, 33 bp, Homo sapien
actagataatttccacgcttcttcttcatttgg

SEQ ID NO: 27169 - DNA, 33 bp, Homo sapien
gtatgaggaacacataagaagaagtaagtaatt

SEQ ID NO: 27170 - DNA, 33 bp, Homo sapien
gtatgaggaacacataggaagaagtaagtaatt

SEQ ID NO: 27171 - DNA, 33 bp, Homo sapien
agataacaaggaggagaagatgtaacattttca

SEQ ID NO: 27172 - DNA, 33 bp, Homo sapien
agataacaaggaggaggagatgtaacattttca

SEQ ID NO: 27173 - DNA, 33 bp, Homo sapien
atttatgtatcgcatacgtagctatgtagcttt

SEQ ID NO: 27174 - DNA, 33 bp, Homo sapien
atttatgtatcgcatatgtagctatgtagcttt

SEQ ID NO: 27175 - DNA, 33 bp, Homo sapien
caacacatcccttccacgtaatgattggtattc

SEQ ID NO: 27176 - DNA, 33 bp, Homo sapien
caacacatcccttccatgtaatgattggtattc

SEQ ID NO: 27177 - DNA, 33 bp, Homo sapien
aaaattaaaatttacactctgccaacagtgggc

SEQ ID NO: 27178 - DNA, 33 bp, Homo sapien
aaaattaaaatttacattctgccaacagtgggc

SEQ ID NO: 27179 - DNA, 33 bp, Homo sapien
gtgttttcacttacataagaatccaataccaag

SEQ ID NO: 27180 - DNA, 33 bp, Homo sapien
gtgttttcacttacatgagaatccaataccaag

SEQ ID NO: 27181 - DNA, 33 bp, Homo sapien
ctagtatgtgttccatcatgccttactgtcagg

SEQ ID NO: 27182 - DNA, 33 bp, Homo sapien
ctagtatgtgttccattatgccttactgtcagg

SEQ ID NO: 27183 - DNA, 33 bp, Homo sapien
ggcctcattttgtccacagtatacagttcataa

SEQ ID NO: 27184 - DNA, 33 bp, Homo sapien
ggcctcattttgtccagagtatacagttcataa

SEQ ID NO: 27185 - DNA, 33 bp, Homo sapien
acttagtaacaagtagaattttatttccaagcc

SEQ ID NO: 27186 - DNA, 33 bp, Homo sapien
acttagtaacaagtaggattttatttccaagcc

SEQ ID NO: 27187 - DNA, 33 bp, Homo sapien
caagtgaatataaaacgggtgagctctgagtaa

SEQ ID NO: 27188 - DNA, 33 bp, Homo sapien
caagtgaatataaaactggtgagctctgagtaa

SEQ ID NO: 27189 - DNA, 33 bp, Homo sapien
catacacaggcacacacaaacaagtgaatataa

SEQ ID NO: 27190 - DNA, 33 bp, Homo sapien
catacacaggcacacagaaacaagtgaatataa

SEQ ID NO: 27191 - DNA, 33 bp, Homo sapien
gagagggagattttaaaagttgtcttctgaatg

SEQ ID NO: 27192 - DNA, 33 bp, Homo sapien
gagagggagattttaacagttgtcttctgaatg

SEQ ID NO: 27193 - DNA, 33 bp, Homo sapien
tcacctggaacttccaagatctctttcccaatc

SEQ ID NO: 27194 - DNA, 33 bp, Homo sapien
tcacctggaacttccaggatctctttcccaatc

SEQ ID NO: 27195 - DNA, 33 bp, Homo sapien
ctatagaatggacaacagtctgtagtatggttg

SEQ ID NO: 27196 - DNA, 33 bp, Homo sapien
ctatagaatggacaacggtctgtagtatggttg

SEQ ID NO: 27197 - DNA, 33 bp, Homo sapien
agaaaaacatacaacaaccatttaaattcagga

SEQ ID NO: 27198 - DNA, 33 bp, Homo sapien
agaaaaacatacaacagccatttaaattcagga

SEQ ID NO: 27199 - DNA, 33 bp, Homo sapien
acaatggaattgagaacgtttatacaggagtga

SEQ ID NO: 27200 - DNA, 33 bp, Homo sapien
acaatggaattgagaatgtttatacaggagtga

SEQ ID NO: 27201 - DNA, 33 bp, Homo sapien
aaatcttctcagagaacgcaatccaggtgaaat

SEQ ID NO: 27202 - DNA, 33 bp, Homo sapien
aaatcttctcagagaatgcaatccaggtgaaat

SEQ ID NO: 27203 - DNA, 33 bp, Homo sapien
atccatgtctctgcgagggacgtgaccttgttc

SEQ ID NO: 27204 - DNA, 33 bp, Homo sapien
atccatgtctctgcgatggacgtgaccttgttc

SEQ ID NO: 27205 - DNA, 33 bp, Homo sapien; identical to SEQ ID NO: 27203

SEQ ID NO: 27206 - DNA, 33 bp, Homo sapien; identical to SEQ ID NO: 27204

SEQ ID NO: 27207 - DNA, 33 bp, Homo sapien
actgtaggtttagcaacacggagggactggtac

SEQ ID NO: 27208 - DNA, 33 bp, Homo sapien
actgtaggtttagcaatacggagggactggtac

SEQ ID NO: 27209 - DNA, 33 bp, Homo sapien
gaagaaatgaaactgaaatcttaaattggacta

SEQ ID NO: 27210 - DNA, 33 bp, Homo sapien
gaagaaatgaaactgagatcttaaattggacta

SEQ ID NO: 27211 - DNA, 33 bp, Homo sapien
aatctctttgattgaacttactaccagtatcca

SEQ ID NO: 27212 - DNA, 33 bp, Homo sapien
aatctctttgattgaatttactaccagtatcca

SEQ ID NO: 27213 - DNA, 33 bp, Homo sapien
gacaaaatggcaaaaacatctcacaaatctctt

SEQ ID NO: 27214 - DNA, 33 bp, Homo sapien
gacaaaatggcaaaaatatctcacaaatctctt

SEQ ID NO: 27215 - DNA, 33 bp, Homo sapien
aggccaaaacgtagccaataaagagggtggtgg

SEQ ID NO: 27216 - DNA, 33 bp, Homo sapien
aggccaaaacgtagccgataaagagggtggtgg

SEQ ID NO: 27217 - DNA, 33 bp, Homo sapien
gccaaatacttaacacccaactgatctttgaca

SEQ ID NO: 27218 - DNA, 33 bp, Homo sapien
gccaaatacttaacactcaactgatctttgaca

SEQ ID NO: 27219 - DNA, 33 bp, Homo sapien
tttttgcagatgttgtaaaaggaattgagttct

SEQ ID NO: 27220 - DNA, 33 bp, Homo sapien
tttttgcagatgttgtgaaaggaattgagttct

SEQ ID NO: 27221 - DNA, 33 bp, Homo sapien
ctgtgcctacattcctaaccatggaaattgtga

SEQ ID NO: 27222 - DNA, 33 bp, Homo sapien
ctgtgcctacattcctgaccatggaaattgtga

SEQ ID NO: 27223 - DNA, 33 bp, Homo sapien
ttactccatagtacaaacattaactgaaggaaa

SEQ ID NO: 27224 - DNA, 33 bp, Homo sapien
ttactccatagtacaagcattaactgaaggaaa

SEQ ID NO: 27225 - DNA, 33 bp, Homo sapien
tctttgcagaagaatacctgcctttcatttatc

SEQ ID NO: 27226 - DNA, 33 bp, Homo sapien
tctttgcagaagaatagctgcctttcatttatc

SEQ ID NO: 27227 - DNA, 33 bp, Homo sapien
cctctgttttgtctacagaagagtggcagtggg

SEQ ID NO: 27228 - DNA, 33 bp, Homo sapien
cctctgttttgtctacggaagagtggcagtggg

SEQ ID NO: 27229 - DNA, 33 bp, Homo sapien
tgtggatgcaacagggaagaaagggatagagca

SEQ ID NO: 27230 - DNA, 33 bp, Homo sapien
tgtggatgcaacaggggagaaagggatagagca

SEQ ID NO: 27231 - DNA, 33 bp, Homo sapien
tggttggtacaattaaatgactgaatagccctc

SEQ ID NO: 27232 - DNA, 33 bp, Homo sapien
tggttggtacaattaagtgactgaatagccctc

SEQ ID NO: 27233 - DNA, 33 bp, Homo sapien
gacagttcatgactcaccttgaaatatactatc

SEQ ID NO: 27234 - DNA, 33 bp, Homo sapien
gacagttcatgactcatcttgaaatatactatc

SEQ ID NO: 27235 - DNA, 33 bp, Homo sapien
cactctgtttctcatccgaaaataggagactga

SEQ ID NO: 27236 - DNA, 33 bp, Homo sapien
cactctgtttctcatctgaaaataggagactga

SEQ ID NO: 27237 - DNA, 33 bp, Homo sapien
tgctacaaattcctgaagaagggctgatgtggc

SEQ ID NO: 27238 - DNA, 33 bp, Homo sapien
tgctacaaattcctgaggaagggctgatgtggc

SEQ ID NO: 27239 - DNA, 33 bp, Homo sapien
ctgtcacccagcttcaatcacctcaagatctcc

SEQ ID NO: 27240 - DNA, 33 bp, Homo sapien
ctgtcacccagcttcagtcacctcaagatctcc

SEQ ID NO: 27241 - DNA, 33 bp, Homo sapien
agatacctaaattacacgaaccaggagatcttg

SEQ ID NO: 27242 - DNA, 33 bp, Homo sapien
agatacctaaattacatgaaccaggagatcttg

SEQ ID NO: 27243 - DNA, 33 bp, Homo sapien
agttaaaatgtaagccaagagagaacgaattat

SEQ ID NO: 27244 - DNA, 33 bp, Homo sapien
agttaaaatgtaagcccagagagaacgaattat

SEQ ID NO: 27245 - DNA, 33 bp, Homo sapien
tatacatttagtcaaaacttttaaagtatggaa

SEQ ID NO: 27246 - DNA, 33 bp, Homo sapien
tatacatttagtcaaaccttttaaagtatggaa

SEQ ID NO: 27247 - DNA, 33 bp, Homo sapien
cctctgtctggtctctaagaagttcctcctgcc

SEQ ID NO: 27248 - DNA, 33 bp, Homo sapien
cctctgtctggtctctgagaagttcctcctgcc

SEQ ID NO: 27249 - DNA, 33 bp, Homo sapien
ttgctctctcctggcccaacagtcagcaggagc

SEQ ID NO: 27250 - DNA, 33 bp, Homo sapien
ttgctctctcctggccgaacagtcagcaggagc

SEQ ID NO: 27251 - DNA, 33 bp, Homo sapien
ccctctagagactataagtgtgactcactggca

SEQ ID NO: 27252 - DNA, 33 bp, Homo sapien
ccctctagagactatacgtgtgactcactggca

SEQ ID NO: 27253 - DNA, 33 bp, Homo sapien
atgccttaatacagccacctgaaatttatttaa

SEQ ID NO: 27254 - DNA, 33 bp, Homo sapien
atgccttaatacagccgcctgaaatttatttaa

SEQ ID NO: 27255 - DNA, 33 bp, Homo sapien
agacctcatgggcagaaattacaatgcttggtt

SEQ ID NO: 27256 - DNA, 33 bp, Homo sapien
agacctcatgggcagagattacaatgcttggtt

SEQ ID NO: 27257 - DNA, 33 bp, Homo sapien
caagtgggagctaaacaaagggaatatgtagac

SEQ ID NO: 27258 - DNA, 33 bp, Homo sapien
caagtgggagctaaaccaagggaatatgtagac

SEQ ID NO: 27259 - DNA, 33 bp, Homo sapien
attcaacaagtacctactaagtgacagtacctg

SEQ ID NO: 27260 - DNA, 33 bp, Homo sapien
attcaacaagtacctattaagtgacagtacctg

SEQ ID NO: 27261 - DNA, 33 bp, Homo sapien
gagtgtctatggtagacagaaaggaagttgtac

SEQ ID NO: 27262 - DNA, 33 bp, Homo sapien
gagtgtctatggtagagagaaaggaagttgtac

SEQ ID NO: 27263 - DNA, 33 bp, Homo sapien
tatatataaagcccaaagtgttataacaattca

SEQ ID NO: 27264 - DNA, 33 bp, Homo sapien
tatatataaagcccaaggtgttataacaattca

SEQ ID NO: 27265 - DNA, 33 bp, Homo sapien
aatgttttgtagtaacaaaaaagcaataggaaa

SEQ ID NO: 27266 - DNA, 33 bp, Homo sapien
aatgttttgtagtaactaaaaagcaataggaaa

SEQ ID NO: 27267 - DNA, 33 bp, Homo sapien
gcatccctggaatgaaaaaccttagaaaagaag

SEQ ID NO: 27268 - DNA, 33 bp, Homo sapien
gcatccctggaatgaacaaccttagaaaagaag

SEQ ID NO: 27269 - DNA, 33 bp, Homo sapien
gctattgtaaacaaaacgattgccctgtcagct

SEQ ID NO: 27270 - DNA, 33 bp, Homo sapien
gctattgtaaacaaaatgattgccctgtcagct

SEQ ID NO: 27271 - DNA, 33 bp, Homo sapien
tctttggcacattatcactcaaccaagaaatta

SEQ ID NO: 27272 - DNA, 33 bp, Homo sapien
tctttggcacattatcgctcaaccaagaaatta

SEQ ID NO: 27273 - DNA, 33 bp, Homo sapien
agagaaactactgcaacgatgttgagaagagat

SEQ ID NO: 27274 - DNA, 33 bp, Homo sapien
agagaaactactgcaatgatgttgagaagagat

SEQ ID NO: 27275 - DNA, 33 bp, Homo sapien
aattatggagaaaaaaatcatcagacgcaacca

SEQ ID NO: 27276 - DNA, 33 bp, Homo sapien
aattatggagaaaaaagtcatcagacgcaacca

SEQ ID NO: 27277 - DNA, 33 bp, Homo sapien
agctaaactgtcatcaggaataaagatatattt

SEQ ID NO: 27278 - DNA, 33 bp, Homo sapien
agctaaactgtcatcatgaataaagatatattt

SEQ ID NO: 27279 - DNA, 33 bp, Homo sapien
tctatgtttcccagtaagtcagatataatggtg

SEQ ID NO: 27280 - DNA, 33 bp, Homo sapien
tctatgtttcccagtaggtcagatataatggtg

SEQ ID NO: 27281 - DNA, 33 bp, Homo sapien
tgagaaaaatctaaaacatgtgtcacttgtggc

SEQ ID NO: 27282 - DNA, 33 bp, Homo sapien
tgagaaaaatctaaaatatgtgtcacttgtggc

SEQ ID NO: 27283 - DNA, 33 bp, Homo sapien
atcctaaatgaaatgacgaaggaacaaaaacca

SEQ ID NO: 27284 - DNA, 33 bp, Homo sapien
atcctaaatgaaatgatgaaggaacaaaaacca

SEQ ID NO: 27285 - DNA, 33 bp, Homo sapien
gtggtcgggactgaaacggcatagtcactgaaa

SEQ ID NO: 27286 - DNA, 33 bp, Homo sapien
gtggtcgggactgaaatggcatagtcactgaaa

SEQ ID NO: 27287 - DNA, 33 bp, Homo sapien
attttcagagtaaacaatgcgcattcttccaaa

SEQ ID NO: 27288 - DNA, 33 bp, Homo sapien
attttcagagtaaacagtgcgcattcttccaaa

SEQ ID NO: 27289 - DNA, 33 bp, Homo sapien
aagtgcaatttgtggcaatgaacaagaagtaga

SEQ ID NO: 27290 - DNA, 33 bp, Homo sapien
aagtgcaatttgtggcgatgaacaagaagtaga

SEQ ID NO: 27291 - DNA, 33 bp, Homo sapien
aaaagaaatggactcaatagaaaagaagccata

SEQ ID NO: 27292 - DNA, 33 bp, Homo sapien
aaaagaaatggactcagtagaaaagaagccata

SEQ ID NO: 27293 - DNA, 33 bp, Homo sapien
attaaattcacctaaccctttgtaacacacttc

SEQ ID NO: 27294 - DNA, 33 bp, Homo sapien
attaaattcacctaactctttgtaacacacttc

SEQ ID NO: 27295 - DNA, 33 bp, Homo sapien
aatgatggcttgataaaaagtacaactgcatct

SEQ ID NO: 27296 - DNA, 33 bp, Homo sapien
aatgatggcttgataagaagtacaactgcatct

SEQ ID NO: 27297 - DNA, 33 bp, Homo sapien
aataatacctggctaacggtaaatgctcaaaat

SEQ ID NO: 27298 - DNA, 33 bp, Homo sapien
aataatacctggctaatggtaaatgctcaaaat

SEQ ID NO: 27299 - DNA, 33 bp, Homo sapien
gcctcaaagagctaaaaagagaaataacatttg

SEQ ID NO: 27300 - DNA, 33 bp, Homo sapien
gcctcaaagagctaaacagagaaataacatttg

SEQ ID NO: 27301 - DNA, 33 bp, Homo sapien
tagtaatgggtatctacgaagggacaaaaagat

SEQ ID NO: 27302 - DNA, 33 bp, Homo sapien
tagtaatgggtatctaggaagggacaaaaagat

SEQ ID NO: 27303 - DNA, 33 bp, Homo sapien
acctttgctttactgaaagagtattggtgacta

SEQ ID NO: 27304 - DNA, 33 bp, Homo sapien
acctttgctttactgagagagtattggtgacta

SEQ ID NO: 27305 - DNA, 33 bp, Homo sapien
atcaacatctcagcccaaaatattgtcgatatt

SEQ ID NO: 27306 - DNA, 33 bp, Homo sapien
atcaacatctcagcccgaaatattgtcgatatt

SEQ ID NO: 27307 - DNA, 33 bp, Homo sapien
acagaaaggggtccacagaaggagaagagtgat

SEQ ID NO: 27308 - DNA, 33 bp, Homo sapien
acagaaaggggtccacggaaggagaagagtgat

SEQ ID NO: 27309 - DNA, 33 bp, Homo sapien
tgctgataagggatgaaaagaagttctgctggc

SEQ ID NO: 27310 - DNA, 33 bp, Homo sapien
tgctgataagggatgagaagaagttctgctggc

SEQ ID NO: 27311 - DNA, 33 bp, Homo sapien
tatgatcagaaataagactgactcaaagttttc

SEQ ID NO: 27312 - DNA, 33 bp, Homo sapien
tatgatcagaaataaggctgactcaaagttttc

SEQ ID NO: 27313 - DNA, 33 bp, Homo sapien
agcaggtcctgtcttccaggttttacagacggt

SEQ ID NO: 27314 - DNA, 33 bp, Homo sapien
agcaggtcctgtcttctaggttttacagacggt

SEQ ID NO: 27315 - DNA, 33 bp, Homo sapien
gctgaaatccaatatcaaaaccttaaactctct

SEQ ID NO: 27316 - DNA, 33 bp, Homo sapien
gctgaaatccaatatcgaaaccttaaactctct

SEQ ID NO: 27317 - DNA, 33 bp, Homo sapien
acaaccttctgtagaagccaagttgtcttttca

SEQ ID NO: 27318 - DNA, 33 bp, Homo sapien
acaaccttctgtagaatccaagttgtcttttca

SEQ ID NO: 27319 - DNA, 33 bp, Homo sapien
tggttggaaaagttaacaaatcaagcagatgtg

SEQ ID NO: 27320 - DNA, 33 bp, Homo sapien
tggttggaaaagttaagaaatcaagcagatgtg

SEQ ID NO: 27321 - DNA, 33 bp, Homo sapien
tgccacacagtaacaaataacttacatatcttt

SEQ ID NO: 27322 - DNA, 33 bp, Homo sapien
tgccacacagtaacaagtaacttacatatcttt

SEQ ID NO: 27323 - DNA, 33 bp, Homo sapien
aacttcatgtgaactacgacaaaatattataaa

SEQ ID NO: 27324 - DNA, 33 bp, Homo sapien
aacttcatgtgaactatgacaaaatattataaa

SEQ ID NO: 27325 - DNA, 33 bp, Homo sapien
acacacaggtctgtgacagcttgtttctgctta

SEQ ID NO: 27326 - DNA, 33 bp, Homo sapien
acacacaggtctgtgagagcttgtttctgctta

SEQ ID NO: 27327 - DNA, 33 bp, Homo sapien
caatggtatctaagaacaaaagagcatttgcca

SEQ ID NO: 27328 - DNA, 33 bp, Homo sapien
caatggtatctaagaataaaagagcatttgcca

SEQ ID NO: 27329 - DNA, 33 bp, Homo sapien
catattcgtggcaggtaaaaagattgctgtatc

SEQ ID NO: 27330 - DNA, 33 bp, Homo sapien
catattcgtggcaggtgaaaagattgctgtatc

SEQ ID NO: 27331 - DNA, 33 bp, Homo sapien
tagacacaaatcttgacgaacacttcagccctg

SEQ ID NO: 27332 - DNA, 33 bp, Homo sapien
tagacacaaatcttgatgaacacttcagccctg

SEQ ID NO: 27333 - DNA, 33 bp, Homo sapien
tgaccatgtatactcacattactgtttcagtct

SEQ ID NO: 27334 - DNA, 33 bp, Homo sapien
tgaccatgtatactcatattactgtttcagtct

SEQ ID NO: 27335 - DNA, 33 bp, Homo sapien
ataatttttagatcacaagctatatcaaatgtg

SEQ ID NO: 27336 - DNA, 33 bp, Homo sapien
ataatttttagatcacgagctatatcaaatgtg

SEQ ID NO: 27337 - DNA, 33 bp, Homo sapien
aggcaagttttagagcagaagcgaaagtttatg

SEQ ID NO: 27338 - DNA, 33 bp, Homo sapien
aggcaagttttagagctgaagcgaaagtttatg

SEQ ID NO: 27339 - DNA, 33 bp, Homo sapien
cagaaactcactcaaaaatgaaaaacaggccgg

SEQ ID NO: 27340 - DNA, 33 bp, Homo sapien
cagaaactcactcaaatatgaaaaacaggccgg

SEQ ID NO: 27341 - DNA, 33 bp, Homo sapien
agcaagctggactttaacatttcaaagaaggca

SEQ ID NO: 27342 - DNA, 33 bp, Homo sapien
agcaagctggactttagcatttcaaagaaggca

SEQ ID NO: 27343 - DNA, 33 bp, Homo sapien
gaagctgtcaggtaaaatcatcttcaccaatat

SEQ ID NO: 27344 - DNA, 33 bp, Homo sapien
gaagctgtcaggtaaagtcatcttcaccaatat

SEQ ID NO: 27345 - DNA, 33 bp, Homo sapien
ttctttgctcatttacacctaaaatcatgaatc

SEQ ID NO: 27346 - DNA, 33 bp, Homo sapien
ttctttgctcatttacgcctaaaatcatgaatc

SEQ ID NO: 27347 - DNA, 33 bp, Homo sapien
gccactgttccatacaaccctttgggccaggcc

SEQ ID NO: 27348 - DNA, 33 bp, Homo sapien
gccactgttccatacatccctttgggccaggcc

SEQ ID NO: 27349 - DNA, 33 bp, Homo sapien
agctccaaaggtcaaaattaaagggaaatcctt

SEQ ID NO: 27350 - DNA, 33 bp, Homo sapien
agctccaaaggtcaaagttaaagggaaatcctt

SEQ ID NO: 27351 - DNA, 33 bp, Homo sapien
ctgagcagtctgttgccagatgtataggaactc

SEQ ID NO: 27352 - DNA, 33 bp, Homo sapien
ctgagcagtctgttgctagatgtataggaactc

SEQ ID NO: 27353 - DNA, 33 bp, Homo sapien
tcattaagacaacaacagaattacctattaaaa

SEQ ID NO: 27354 - DNA, 33 bp, Homo sapien
tcattaagacaacaacggaattacctattaaaa

SEQ ID NO: 27355 - DNA, 33 bp, Homo sapien
tcatagatgaatgaaaaggtttctgccaacact

SEQ ID NO: 27356 - DNA, 33 bp, Homo sapien
tcatagatgaatgaaagggtttctgccaacact

SEQ ID NO: 27357 - DNA, 33 bp, Homo sapien
gaaaacaaaaaagagcagaagtagccatattta

SEQ ID NO: 27358 - DNA, 33 bp, Homo sapien
gaaaacaaaaaagagcggaagtagccatattta

SEQ ID NO: 27359 - DNA, 33 bp, Homo sapien
cacaattatggtggaacgaaaaggaaaagcaaa

SEQ ID NO: 27360 - DNA, 33 bp, Homo sapien
cacaattatggtggaatgaaaaggaaaagcaaa

SEQ ID NO: 27361 - DNA, 33 bp, Homo sapien
aaaggaaaatgatagcaatgagatttttgagtc

SEQ ID NO: 27362 - DNA, 33 bp, Homo sapien
aaaggaaaatgatagcgatgagatttttgagtc

SEQ ID NO: 27363 - DNA, 33 bp, Homo sapien
gagaaactaatgaatcaatgtgttacacctgca

SEQ ID NO: 27364 - DNA, 33 bp, Homo sapien
gagaaactaatgaatcgatgtgttacacctgca

SEQ ID NO: 27365 - DNA, 33 bp, Homo sapien
ctctttgacccaggaagtatgtgaatttcagga

SEQ ID NO: 27366 - DNA, 33 bp, Homo sapien
ctctttgacccaggaattatgtgaatttcagga

SEQ ID NO: 27367 - DNA, 33 bp, Homo sapien
tattgggaggtcaaaagcatagcacagcaacaa

SEQ ID NO: 27368 - DNA, 33 bp, Homo sapien
tattgggaggtcaaaatcatagcacagcaacaa

SEQ ID NO: 27369 - DNA, 33 bp, Homo sapien
tggaaccacagatagaactttttaactttgcag

SEQ ID NO: 27370 - DNA, 33 bp, Homo sapien
tggaaccacagatagacctttttaactttgcag

SEQ ID NO: 27371 - DNA, 33 bp, Homo sapien
actttcactttgaatacagcgcttaattaacat

SEQ ID NO: 27372 - DNA, 33 bp, Homo sapien
actttcactttgaatatagcgcttaattaacat

SEQ ID NO: 27373 - DNA, 33 bp, Homo sapien
ggaggatacggaaaatgaaacgctaggctacgt

SEQ ID NO: 27374 - DNA, 33 bp, Homo sapien
ggaggatacggaaaattaaacgctaggctacgt

SEQ ID NO: 27375 - DNA, 33 bp, Homo sapien
cctttgcactttgttccatgtaacatattttcc

SEQ ID NO: 27376 - DNA, 33 bp, Homo sapien
cctttgcactttgttctatgtaacatattttcc

SEQ ID NO: 27377 - DNA, 33 bp, Homo sapien
cttttgtatccattaaactgtcatgaatataaa

SEQ ID NO: 27378 - DNA, 33 bp, Homo sapien
cttttgtatccattaagctgtcatgaatataaa

SEQ ID NO: 27379 - DNA, 33 bp, Homo sapien
tagtatccacagtacccgccactcttgaattaa

SEQ ID NO: 27380 - DNA, 33 bp, Homo sapien
tagtatccacagtaccggccactcttgaattaa

SEQ ID NO: 27381 - DNA, 33 bp, Homo sapien
cctgttcattttctcccgatgttctgaatgcag

SEQ ID NO: 27382 - DNA, 33 bp, Homo sapien
cctgttcattttctcctgatgttctgaatgcag

SEQ ID NO: 27383 - DNA, 33 bp, Homo sapien
agtgtcttcagtgttcacttcttcagaactaca

SEQ ID NO: 27384 - DNA, 33 bp, Homo sapien
agtgtcttcagtgttcgcttcttcagaactaca

SEQ ID NO: 27385 - DNA, 33 bp, Homo sapien
aggaataatataaaacagagacccggccgccgt

SEQ ID NO: 27386 - DNA, 33 bp, Homo sapien
aggaataatataaaacggagacccggccgccgt

SEQ ID NO: 27387 - DNA, 33 bp, Homo sapien
atatacatttgtcagaactattagaaatgtata

SEQ ID NO: 27388 - DNA, 33 bp, Homo sapien
atatacatttgtcagagctattagaaatgtata

SEQ ID NO: 27389 - DNA, 33 bp, Homo sapien
catatcactgtacctaccaattaaaaatgaaaa

SEQ ID NO: 27390 - DNA, 33 bp, Homo sapien
catatcactgtacctatcaattaaaaatgaaaa

SEQ ID NO: 27391 - DNA, 33 bp, Homo sapien
gatcagataaacagtacagttggccatactctg

SEQ ID NO: 27392 - DNA, 33 bp, Homo sapien
gatcagataaacagtatagttggccatactctg

SEQ ID NO: 27393 - DNA, 33 bp, Homo sapien
agatgcctacatatcactctatttgtgtggatt

SEQ ID NO: 27394 - DNA, 33 bp, Homo sapien
agatgcctacatatcattctatttgtgtggatt

SEQ ID NO: 27395 - DNA, 33 bp, Homo sapien
gtgggtgtgcacttgccagtttgctccaggtcc

SEQ ID NO: 27396 - DNA, 33 bp, Homo sapien
gtgggtgtgcacttgcgagtttgctccaggtcc

SEQ ID NO: 27397 - DNA, 33 bp, Homo sapien
taacctagacatccaagctcccttcataccctg

SEQ ID NO: 27398 - DNA, 33 bp, Homo sapien
taacctagacatccaatctcccttcataccctg

SEQ ID NO: 27399 - DNA, 33 bp, Homo sapien
aggagttgcccaggcactgatgtaagcagggta

SEQ ID NO: 27400 - DNA, 33 bp, Homo sapien
aggagttgcccaggcattgatgtaagcagggta

SEQ ID NO: 27401 - DNA, 33 bp, Homo sapien
gaagatgcctacttccccttcatcttctgccat

SEQ ID NO: 27402 - DNA, 33 bp, Homo sapien
gaagatgcctacttcctcttcatcttctgccat

SEQ ID NO: 27403 - DNA, 33 bp, Homo sapien
aactgtgagtcaattgaacttatttcctttata

SEQ ID NO: 27404 - DNA, 33 bp, Homo sapien
aactgtgagtcaattggacttatttcctttata

SEQ ID NO: 27405 - DNA, 33 bp, Homo sapien
aactattgggtaaaaaatttgcctatattaggc

SEQ ID NO: 27406 - DNA, 33 bp, Homo sapien
aactattgggtaaaaagtttgcctatattaggc

SEQ ID NO: 27407 - DNA, 33 bp, Homo sapien
gactatgggacaagcacatggtcgcaggacttt

SEQ ID NO: 27408 - DNA, 33 bp, Homo sapien
gactatgggacaagcatatggtcgcaggacttt

SEQ ID NO: 27409 - DNA, 33 bp, Homo sapien
gtgcttaaccctactccaccctgtctgctacca

SEQ ID NO: 27410 - DNA, 33 bp, Homo sapien
gtgcttaaccctactctaccctgtctgctacca

SEQ ID NO: 27411 - DNA, 33 bp, Homo sapien
cctctcctgaccttaaaagcactgatcagtagt

SEQ ID NO: 27412 - DNA, 33 bp, Homo sapien
cctctcctgaccttaacagcactgatcagtagt

SEQ ID NO: 27413 - DNA, 33 bp, Homo sapien
tgaccaaatcctgatacagtttcaatttccaac

SEQ ID NO: 27414 - DNA, 33 bp, Homo sapien
tgaccaaatcctgatatagtttcaatttccaac

SEQ ID NO: 27415 - DNA, 33 bp, Homo sapien
tctaaaattacactgaaaccttggagggtaaaa

SEQ ID NO: 27416 - DNA, 33 bp, Homo sapien
tctaaaattacactgagaccttggagggtaaaa

SEQ ID NO: 27417 - DNA, 33 bp, Homo sapien
ttaaggggctgagttaagcattcattgcagata

SEQ ID NO: 27418 - DNA, 33 bp, Homo sapien
ttaaggggctgagttaggcattcattgcagata

SEQ ID NO: 27419 - DNA, 33 bp, Homo sapien
agagatccatggattaaacatgacgaaattatc

SEQ ID NO: 27420 - DNA, 33 bp, Homo sapien
agagatccatggattacacatgacgaaattatc

SEQ ID NO: 27421 - DNA, 33 bp, Homo sapien
cacactagaagttcaaactccagctttgcagtg

SEQ ID NO: 27422 - DNA, 33 bp, Homo sapien
cacactagaagttcaacctccagctttgcagtg

SEQ ID NO: 27423 - DNA, 33 bp, Homo sapien
cattcatgttgctttaaaggaattgcaagtagc

SEQ ID NO: 27424 - DNA, 33 bp, Homo sapien
cattcatgttgctttagaggaattgcaagtagc

SEQ ID NO: 27425 - DNA, 33 bp, Homo sapien
agttgcctgaagagctaagatttcaagaaataa

SEQ ID NO: 27426 - DNA, 33 bp, Homo sapien
agttgcctgaagagctgagatttcaagaaataa

SEQ ID NO: 27427 - DNA, 33 bp, Homo sapien
aggcgagtggcccaaacgaatgatgagtgatat

SEQ ID NO: 27428 - DNA, 33 bp, Homo sapien
aggcgagtggcccaaatgaatgatgagtgatat

SEQ ID NO: 27429 - DNA, 33 bp, Homo sapien
aaactgaacaaagcggaatcagtcagcatcctt

SEQ ID NO: 27430 - DNA, 33 bp, Homo sapien
aaactgaacaaagcgggatcagtcagcatcctt

SEQ ID NO: 27431 - DNA, 33 bp, Homo sapien
ctttgcccaaatgtaaccttatcaatgaggcca

SEQ ID NO: 27432 - DNA, 33 bp, Homo sapien
ctttgcccaaatgtaatcttatcaatgaggcca

SEQ ID NO: 27433 - DNA, 33 bp, Homo sapien
cacactaacagatacccggagttaagacttcac

SEQ ID NO: 27434 - DNA, 33 bp, Homo sapien
cacactaacagatacctggagttaagacttcac

SEQ ID NO: 27435 - DNA, 33 bp, Homo sapien
gtccaggtgtgggccactaggcacgcagaccag

SEQ ID NO: 27436 - DNA, 33 bp, Homo sapien
gtccaggtgtgggccattaggcacgcagaccag

SEQ ID NO: 27437 - DNA, 33 bp, Homo sapien
atttcagctttgtcttaaaagaaggagtaggat

SEQ ID NO: 27438 - DNA, 33 bp, Homo sapien
atttcagctttgtctttaaagaaggagtaggat

SEQ ID NO: 27439 - DNA, 33 bp, Homo sapien
tgaagaatataaccgcaatatattcagcctatt

SEQ ID NO: 27440 - DNA, 33 bp, Homo sapien
tgaagaatataaccgcgatatattcagcctatt

SEQ ID NO: 27441 - DNA, 33 bp, Homo sapien
tggactaagccctgacactgcctgaggccttga

SEQ ID NO: 27442 - DNA, 33 bp, Homo sapien
tggactaagccctgacgctgcctgaggccttga

SEQ ID NO: 27443 - DNA, 33 bp, Homo sapien
tacaacatgaaacttgaaaacgttatgctaagt

SEQ ID NO: 27444 - DNA, 33 bp, Homo sapien
tacaacatgaaacttgtaaacgttatgctaagt

SEQ ID NO: 27445 - DNA, 33 bp, Homo sapien
caaaccactgctcaaacaaataagacaggacac

SEQ ID NO: 27446 - DNA, 33 bp, Homo sapien
caaaccactgctcaaagaaataagacaggacac

SEQ ID NO: 27447 - DNA, 33 bp, Homo sapien
gctcaagtaatcctccaacctttcctgagtagc

SEQ ID NO: 27448 - DNA, 33 bp, Homo sapien
gctcaagtaatcctccgacctttcctgagtagc

SEQ ID NO: 27449 - DNA, 33 bp, Homo sapien
ctcaacttagatgggaaaaaagcctctttatgg

SEQ ID NO: 27450 - DNA, 33 bp, Homo sapien
ctcaacttagatgggacaaaagcctctttatgg

SEQ ID NO: 27451 - DNA, 33 bp, Homo sapien
ccaggtgtgcatttaaggttgcaactcaaagag

SEQ ID NO: 27452 - DNA, 33 bp, Homo sapien
ccaggtgtgcatttaatgttgcaactcaaagag

SEQ ID NO: 27453 - DNA, 33 bp, Homo sapien
tctgtgcacaaacataataaacatatcttcttc

SEQ ID NO: 27454 - DNA, 33 bp, Homo sapien
tctgtgcacaaacatagtaaacatatcttcttc

SEQ ID NO: 27455 - DNA, 33 bp, Homo sapien
actatgatgtagttgcaataatatatccacatt

SEQ ID NO: 27456 - DNA, 33 bp, Homo sapien
actatgatgtagttgccataatatatccacatt

SEQ ID NO: 27457 - DNA, 33 bp, Homo sapien
cccaccctttagaataagtatgagccacagtca

SEQ ID NO: 27458 - DNA, 33 bp, Homo sapien
cccaccctttagaataggtatgagccacagtca

SEQ ID NO: 27459 - DNA, 33 bp, Homo sapien
tataggttatccagaaactacgatttgaaagat

SEQ ID NO: 27460 - DNA, 33 bp, Homo sapien
tataggttatccagaagctacgatttgaaagat

SEQ ID NO: 27461 - DNA, 33 bp, Homo sapien
tcttagctttcacgtaagtcatttctgtccaat

SEQ ID NO: 27462 - DNA, 33 bp, Homo sapien
tcttagctttcacgtatgtcatttctgtccaat

SEQ ID NO: 27463 - DNA, 33 bp, Homo sapien
aaccaaagctgaatccacagttcatgttctttg

SEQ ID NO: 27464 - DNA, 33 bp, Homo sapien
aaccaaagctgaatccgcagttcatgttctttg

SEQ ID NO: 27465 - DNA, 33 bp, Homo sapien
taagatgtactctagcacagatgttatagctat

SEQ ID NO: 27466 - DNA, 33 bp, Homo sapien
taagatgtactctagcgcagatgttatagctat

SEQ ID NO: 27467 - DNA, 33 bp, Homo sapien
cttacttgctgttttgcaacagagagtaagctt

SEQ ID NO: 27468 - DNA, 33 bp, Homo sapien
cttacttgctgttttgtaacagagagtaagctt

SEQ ID NO: 27469 - DNA, 33 bp, Homo sapien
cccatcgtcacgaccacgctgttcttcactcca

SEQ ID NO: 27470 - DNA, 33 bp, Homo sapien
cccatcgtcacgaccatgctgttcttcactcca

SEQ ID NO: 27471 - DNA, 33 bp, Homo sapien
gccctgaggcaggacaaatcatgctttggaagg

SEQ ID NO: 27472 - DNA, 33 bp, Homo sapien
gccctgaggcaggacatatcatgctttggaagg

SEQ ID NO: 27473 - DNA, 33 bp, Homo sapien
gcatgaatttgcaatgaatgggagaggaagtga

SEQ ID NO: 27474 - DNA, 33 bp, Homo sapien
gcatgaatttgcaatggatgggagaggaagtga

SEQ ID NO: 27475 - DNA, 33 bp, Homo sapien
acaaccacagagccccaagtaatgcaaattttt

SEQ ID NO: 27476 - DNA, 33 bp, Homo sapien
acaaccacagagcccccagtaatgcaaattttt

SEQ ID NO: 27477 - DNA, 33 bp, Homo sapien
tttgccattatgcatacgtgtgtctacaaatga

SEQ ID NO: 27478 - DNA, 33 bp, Homo sapien
tttgccattatgcatatgtgtgtctacaaatga

SEQ ID NO: 27479 - DNA, 33 bp, Homo sapien
gtgaagaatcatactccgaattttaaatgcttc

SEQ ID NO: 27480 - DNA, 33 bp, Homo sapien
gtgaagaatcatactctgaattttaaatgcttc

SEQ ID NO: 27481 - DNA, 33 bp, Homo sapien
cagaattttccagcacagaatgttgtgatcagg

SEQ ID NO: 27482 - DNA, 33 bp, Homo sapien
cagaattttccagcactgaatgttgtgatcagg

SEQ ID NO: 27483 - DNA, 33 bp, Homo sapien
tccagtgggaagaatacagatgggtgagctgaa

SEQ ID NO: 27484 - DNA, 33 bp, Homo sapien
tccagtgggaagaatatagatgggtgagctgaa

SEQ ID NO: 27485 - DNA, 33 bp, Homo sapien
ggctatcctgctgttaaaaaatgtaataaggcc

SEQ ID NO: 27486 - DNA, 33 bp, Homo sapien
ggctatcctgctgttataaaatgtaataaggcc

SEQ ID NO: 27487 - DNA, 33 bp, Homo sapien
ctcatcggtagtcttcccctctgacctgctttt

SEQ ID NO: 27488 - DNA, 33 bp, Homo sapien
ctcatcggtagtcttctcctctgacctgctttt

SEQ ID NO: 27489 - DNA, 33 bp, Homo sapien
aagagtcaaattgcccaaggccataccattctg

SEQ ID NO: 27490 - DNA, 33 bp, Homo sapien
aagagtcaaattgcccgaggccataccattctg

SEQ ID NO: 27491 - DNA, 33 bp, Homo sapien
cagacctcatgacctacgtgagaaaaaaagact

SEQ ID NO: 27492 - DNA, 33 bp, Homo sapien
cagacctcatgacctatgtgagaaaaaaagact

SEQ ID NO: 27493 - DNA, 33 bp, Homo sapien
ttatttttgatatgccacaaagaggataagatt

SEQ ID NO: 27494 - DNA, 33 bp, Homo sapien
ttatttttgatatgccgcaaagaggataagatt

SEQ ID NO: 27495 - DNA, 33 bp, Homo sapien
cgtatttttcagtagccgcctgttattaaccta

SEQ ID NO: 27496 - DNA, 33 bp, Homo sapien
cgtatttttcagtagctgcctgttattaaccta

SEQ ID NO: 27497 - DNA, 33 bp, Homo sapien
ttgtccttgagtagctcacaatctattagagtg

SEQ ID NO: 27498 - DNA, 33 bp, Homo sapien
ttgtccttgagtagcttacaatctattagagtg

SEQ ID NO: 27499 - DNA, 33 bp, Homo sapien
tttcaggctgctgaaaaagacatacccaagact

SEQ ID NO: 27500 - DNA, 33 bp, Homo sapien
tttcaggctgctgaaagagacatacccaagact

SEQ ID NO: 27501 - DNA, 33 bp, Homo sapien
tagagacacattgtcaagagctagctgcaaatc

SEQ ID NO: 27502 - DNA, 33 bp, Homo sapien
tagagacacattgtcaggagctagctgcaaatc

SEQ ID NO: 27503 - DNA, 33 bp, Homo sapien
tcagacctctgaagagaagcatgacctagctgt

SEQ ID NO: 27504 - DNA, 33 bp, Homo sapien
tcagacctctgaagaggagcatgacctagctgt

SEQ ID NO: 27505 - DNA, 33 bp, Homo sapien
ctttctacaaaaaagcaactatatcaactatat

SEQ ID NO: 27506 - DNA, 33 bp, Homo sapien
ctttctacaaaaaagcgactatatcaactatat

SEQ ID NO: 27507 - DNA, 33 bp, Homo sapien
ttctatcttcggaatcccttcttggctgtttta

SEQ ID NO: 27508 - DNA, 33 bp, Homo sapien
ttctatcttcggaatctcttcttggctgtttta

SEQ ID NO: 27509 - DNA, 33 bp, Homo sapien
catgacatagctccataagttaaccccatcagc

SEQ ID NO: 27510 - DNA, 33 bp, Homo sapien
catgacatagctccatgagttaaccccatcagc

SEQ ID NO: 27511 - DNA, 33 bp, Homo sapien
tttggagaagagagaaattactataaacagaac

SEQ ID NO: 27512 - DNA, 33 bp, Homo sapien
tttggagaagagagaatttactataaacagaac

SEQ ID NO: 27513 - DNA, 33 bp, Homo sapien
caaggtctgttttgagcaggctgtcagcactga

SEQ ID NO: 27514 - DNA, 33 bp, Homo sapien
caaggtctgttttgagtaggctgtcagcactga

SEQ ID NO: 27515 - DNA, 33 bp, Homo sapien
tgctttgagagcaaaaacaagatagataaaact

SEQ ID NO: 27516 - DNA, 33 bp, Homo sapien
tgctttgagagcaaaatcaagatagataaaact

SEQ ID NO: 27517 - DNA, 33 bp, Homo sapien
aatctgctttgtggctcaaatttttgcttcaag

SEQ ID NO: 27518 - DNA, 33 bp, Homo sapien
aatctgctttgtggcttaaatttttgcttcaag

SEQ ID NO: 27519 - DNA, 33 bp, Homo sapien
cagggaattaagatgacacaaaagccaggcacg

SEQ ID NO: 27520 - DNA, 33 bp, Homo sapien
cagggaattaagatgagacaaaagccaggcacg

SEQ ID NO: 27521 - DNA, 33 bp, Homo sapien
tgactatggatttacaataaatgactgaaatgt

SEQ ID NO: 27522 - DNA, 33 bp, Homo sapien
tgactatggatttacactaaatgactgaaatgt

SEQ ID NO: 27523 - DNA, 33 bp, Homo sapien
atttccattatctttaaccacacagtgtgagct

SEQ ID NO: 27524 - DNA, 33 bp, Homo sapien
atttccattatctttagccacacagtgtgagct

SEQ ID NO: 27525 - DNA, 33 bp, Homo sapien
tggggaaaatttttcacaatctgtgccagacag

SEQ ID NO: 27526 - DNA, 33 bp, Homo sapien
tggggaaaatttttcataatctgtgccagacag

SEQ ID NO: 27527 - DNA, 33 bp, Homo sapien
ggtattttgacttggacgtgcttgtgcagtttt

SEQ ID NO: 27528 - DNA, 33 bp, Homo sapien
ggtattttgacttggatgtgcttgtgcagtttt

SEQ ID NO: 27529 - DNA, 33 bp, Homo sapien
aaattcagaaatagaaagttaccacagtgtgag

SEQ ID NO: 27530 - DNA, 33 bp, Homo sapien
aaattcagaaatagaaggttaccacagtgtgag

SEQ ID NO: 27531 - DNA, 33 bp, Homo sapien
agaaaagcattagttacctctagaagtgctatt

SEQ ID NO: 27532 - DNA, 33 bp, Homo sapien
agaaaagcattagttagctctagaagtgctatt

SEQ ID NO: 27533 - DNA, 33 bp, Homo sapien
ctagtgacaaaaaaaactaactcaagctagttt

SEQ ID NO: 27534 - DNA, 33 bp, Homo sapien
ctagtgacaaaaaaaagtaactcaagctagttt

SEQ ID NO: 27535 - DNA, 33 bp, Homo sapien
tagtaaaaaatggaaacttatcagttcagttgt

SEQ ID NO: 27536 - DNA, 33 bp, Homo sapien
tagtaaaaaatggaaatttatcagttcagttgt

SEQ ID NO: 27537 - DNA, 33 bp, Homo sapien
ccagatggaatgtaagaaaatacaaaatatttt

SEQ ID NO: 27538 - DNA, 33 bp, Homo sapien
ccagatggaatgtaaggaaatacaaaatatttt

SEQ ID NO: 27539 - DNA, 33 bp, Homo sapien
gtaagagaaacatacaccatgtggccttcatgt

SEQ ID NO: 27540 - DNA, 33 bp, Homo sapien
gtaagagaaacatacagcatgtggccttcatgt

SEQ ID NO: 27541 - DNA, 33 bp, Homo sapien
tttgctaccactgaaactacaatagcatacatg

SEQ ID NO: 27542 - DNA, 33 bp, Homo sapien
tttgctaccactgaaattacaatagcatacatg

SEQ ID NO: 27543 - DNA, 33 bp, Homo sapien
atgtttgtgggtagacagattcaagttgaaaca

SEQ ID NO: 27544 - DNA, 33 bp, Homo sapien
atgtttgtgggtagactgattcaagttgaaaca

SEQ ID NO: 27545 - DNA, 33 bp, Homo sapien
ttgagatgcaggctgcagagttagccagacgtg

SEQ ID NO: 27546 - DNA, 33 bp, Homo sapien
ttgagatgcaggctgcggagttagccagacgtg

SEQ ID NO: 27547 - DNA, 33 bp, Homo sapien
tttccaaggtattctaaatgcttaatgaggtct

SEQ ID NO: 27548 - DNA, 33 bp, Homo sapien
tttccaaggtattctagatgcttaatgaggtct

SEQ ID NO: 27549 - DNA, 33 bp, Homo sapien
ttaaatgaatttaatcaacctggatcataaact

SEQ ID NO: 27550 - DNA, 33 bp, Homo sapien
ttaaatgaatttaatctacctggatcataaact

SEQ ID NO: 27551 - DNA, 33 bp, Homo sapien
ttcatttaacaattgcgcatttgtccctttatt

SEQ ID NO: 27552 - DNA, 33 bp, Homo sapien
ttcatttaacaattgctcatttgtccctttatt

SEQ ID NO: 27553 - DNA, 33 bp, Homo sapien
ttattgctgagaagacggtcagttccattgtta

SEQ ID NO: 27554 - DNA, 33 bp, Homo sapien
ttattgctgagaagactgtcagttccattgtta

SEQ ID NO: 27555 - DNA, 33 bp, Homo sapien
ggcacaccatcacctgcaataatggaagaaaat

SEQ ID NO: 27556 - DNA, 33 bp, Homo sapien
ggcacaccatcacctggaataatggaagaaaat

SEQ ID NO: 27557 - DNA, 33 bp, Homo sapien
ttacttttgtttgcaacattgaaatgaagtaga

SEQ ID NO: 27558 - DNA, 33 bp, Homo sapien
ttacttttgtttgcaatattgaaatgaagtaga

SEQ ID NO: 27559 - DNA, 33 bp, Homo sapien
gaactagagttacatacaaaatttctgcctcaa

SEQ ID NO: 27560 - DNA, 33 bp, Homo sapien
gaactagagttacatagaaaatttctgcctcaa

SEQ ID NO: 27561 - DNA, 33 bp, Homo sapien
aggcctaccaaagacactcatccacaaagccat

SEQ ID NO: 27562 - DNA, 33 bp, Homo sapien
aggcctaccaaagacattcatccacaaagccat

SEQ ID NO: 27563 - DNA, 33 bp, Homo sapien
aaaccatcatccagtcgatgcaagtgatgagac

SEQ ID NO: 27564 - DNA, 33 bp, Homo sapien
aaaccatcatccagtctatgcaagtgatgagac

SEQ ID NO: 27565 - DNA, 33 bp, Homo sapien
ttgacagcacgtattcactttcattcaagatga

SEQ ID NO: 27566 - DNA, 33 bp, Homo sapien
ttgacagcacgtattcgctttcattcaagatga

SEQ ID NO: 27567 - DNA, 33 bp, Homo sapien
cggatacatacactcaccctgtatttttcaacc

SEQ ID NO: 27568 - DNA, 33 bp, Homo sapien
cggatacatacactcatcctgtatttttcaacc

SEQ ID NO: 27569 - DNA, 33 bp, Homo sapien
tcatcttctcccacaaatctgtctttagcggaa

SEQ ID NO: 27570 - DNA, 33 bp, Homo sapien
tcatcttctcccacaagtctgtctttagcggaa

SEQ ID NO: 27571 - DNA, 33 bp, Homo sapien
ttaggtctgaggaaaaaagggaagcctattaag

SEQ ID NO: 27572 - DNA, 33 bp, Homo sapien
ttaggtctgaggaaaacagggaagcctattaag

SEQ ID NO: 27573 - DNA, 33 bp, Homo sapien
ggctgtgcatttactacacacgaagtaaaaact

SEQ ID NO: 27574 - DNA, 33 bp, Homo sapien
ggctgtgcatttactagacacgaagtaaaaact

SEQ ID NO: 27575 - DNA, 33 bp, Homo sapien
ctctgataaggcaaacgcttcacaaagagagac

SEQ ID NO: 27576 - DNA, 33 bp, Homo sapien
ctctgataaggcaaactcttcacaaagagagac

SEQ ID NO: 27577 - DNA, 33 bp, Homo sapien
ttgaattgtgcttagaccttttccagtagctga

SEQ ID NO: 27578 - DNA, 33 bp, Homo sapien
ttgaattgtgcttagagcttttccagtagctga

SEQ ID NO: 27579 - DNA, 33 bp, Homo sapien
tcaagggctcatcaaacgctcagatgtgtccct

SEQ ID NO: 27580 - DNA, 33 bp, Homo sapien
tcaagggctcatcaaaggctcagatgtgtccct

SEQ ID NO: 27581 - DNA, 33 bp, Homo sapien
aaatgagataatccacaaatataaagccccaac

SEQ ID NO: 27582 - DNA, 33 bp, Homo sapien
aaatgagataatccacgaatataaagccccaac

SEQ ID NO: 27583 - DNA, 33 bp, Homo sapien
ctactttctaaaaatacgtattaggcaaaacaa

SEQ ID NO: 27584 - DNA, 33 bp, Homo sapien
ctactttctaaaaatatgtattaggcaaaacaa

SEQ ID NO: 27585 - DNA, 33 bp, Homo sapien
aaactttctcttcttacaggttgtgaatatttc

SEQ ID NO: 27586 - DNA, 33 bp, Homo sapien
aaactttctcttcttataggttgtgaatatttc

SEQ ID NO: 27587 - DNA, 33 bp, Homo sapien
tatagcctcaatgccaagaaatataaatgtcta

SEQ ID NO: 27588 - DNA, 33 bp, Homo sapien
tatagcctcaatgccaggaaatataaatgtcta

SEQ ID NO: 27589 - DNA, 33 bp, Homo sapien
ggtaaccatggagctacagaaatggagaagcat

SEQ ID NO: 27590 - DNA, 33 bp, Homo sapien
ggtaaccatggagctagagaaatggagaagcat

SEQ ID NO: 27591 - DNA, 33 bp, Homo sapien
gagtagcttaaaacaacgtggctgcctccatgg

SEQ ID NO: 27592 - DNA, 33 bp, Homo sapien
gagtagcttaaaacaatgtggctgcctccatgg

SEQ ID NO: 27593 - DNA, 33 bp, Homo sapien
aggacaaataactaacacatgcagggcttaaaa

SEQ ID NO: 27594 - DNA, 33 bp, Homo sapien
aggacaaataactaacgcatgcagggcttaaaa

SEQ ID NO: 27595 - DNA, 33 bp, Homo sapien
gctctgcccaaccctgaaaaattgctactcttt

SEQ ID NO: 27596 - DNA, 33 bp, Homo sapien
gctctgcccaaccctgcaaaattgctactcttt

SEQ ID NO: 27597 - DNA, 33 bp, Homo sapien
aggttccttgtaaaaacttgccatcggccaggt

SEQ ID NO: 27598 - DNA, 33 bp, Homo sapien
aggttccttgtaaaaatttgccatcggccaggt

SEQ ID NO: 27599 - DNA, 33 bp, Homo sapien
gcatccccgtgatgaacaaatcatgcgcattct

SEQ ID NO: 27600 - DNA, 33 bp, Homo sapien
gcatccccgtgatgaagaaatcatgcgcattct

SEQ ID NO: 27601 - DNA, 33 bp, Homo sapien
tagtttactgaaggtacgacattcacatccttg

SEQ ID NO: 27602 - DNA, 33 bp, Homo sapien
tagtttactgaaggtatgacattcacatccttg

SEQ ID NO: 27603 - DNA, 33 bp, Homo sapien
tgggtggttgtataaacgaggaagctggcctca

SEQ ID NO: 27604 - DNA, 33 bp, Homo sapien
tgggtggttgtataaatgaggaagctggcctca

SEQ ID NO: 27605 - DNA, 33 bp, Homo sapien
acctgtccgccattccacaggattgcctaatca

SEQ ID NO: 27606 - DNA, 33 bp, Homo sapien
acctgtccgccattcctcaggattgcctaatca

SEQ ID NO: 27607 - DNA, 33 bp, Homo sapien
ttacaatagcttatgaagttgatacttttgtct

SEQ ID NO: 27608 - DNA, 33 bp, Homo sapien
ttacaatagcttatgaggttgatacttttgtct

SEQ ID NO: 27609 - DNA, 33 bp, Homo sapien
taagtagacattctgcacagtcagtgtgttata

SEQ ID NO: 27610 - DNA, 33 bp, Homo sapien
taagtagacattctgcgcagtcagtgtgttata

SEQ ID NO: 27611 - DNA, 33 bp, Homo sapien
aaccaagaaattcaaaatcatatagatatttcc

SEQ ID NO: 27612 - DNA, 33 bp, Homo sapien
aaccaagaaattcaaattcatatagatatttcc

SEQ ID NO: 27613 - DNA, 33 bp, Homo sapien
ctcttgagcagagagaagttttgcattctgcct

SEQ ID NO: 27614 - DNA, 33 bp, Homo sapien
ctcttgagcagagagatgttttgcattctgcct

SEQ ID NO: 27615 - DNA, 33 bp, Homo sapien
tgctccaagctatttacacagatccacttatgt

SEQ ID NO: 27616 - DNA, 33 bp, Homo sapien
tgctccaagctatttatacagatccacttatgt

SEQ ID NO: 27617 - DNA, 33 bp, Homo sapien
acaaattgggaaaagacgatggatttgggagag

SEQ ID NO: 27618 - DNA, 33 bp, Homo sapien
acaaattgggaaaagatgatggatttgggagag

SEQ ID NO: 27619 - DNA, 33 bp, Homo sapien
agaagattcttaaatacagggaacctccctaga

SEQ ID NO: 27620 - DNA, 33 bp, Homo sapien
agaagattcttaaatagagggaacctccctaga

SEQ ID NO: 27621 - DNA, 33 bp, Homo sapien
ctgagtcacactgcagcatgcagaagagctgag

SEQ ID NO: 27622 - DNA, 33 bp, Homo sapien
ctgagtcacactgcagtatgcagaagagctgag

SEQ ID NO: 27623 - DNA, 33 bp, Homo sapien
ccagttctgtacctccaacaaatcgaaaacctc

SEQ ID NO: 27624 - DNA, 33 bp, Homo sapien
ccagttctgtacctccgacaaatcgaaaacctc

SEQ ID NO: 27625 - DNA, 33 bp, Homo sapien
tattatcttcccagcaagtactttaagacatca

SEQ ID NO: 27626 - DNA, 33 bp, Homo sapien
tattatcttcccagcacgtactttaagacatca

SEQ ID NO: 27627 - DNA, 33 bp, Homo sapien
tatttctccatcataaaatagacataataaatt

SEQ ID NO: 27628 - DNA, 33 bp, Homo sapien
tatttctccatcataagatagacataataaatt

SEQ ID NO: 27629 - DNA, 33 bp, Homo sapien
taaaataacagctttgcaatacgtagcctcaaa

SEQ ID NO: 27630 - DNA, 33 bp, Homo sapien
taaaataacagctttgtaatacgtagcctcaaa

SEQ ID NO: 27631 - DNA, 33 bp, Homo sapien
tcttagagtgaaaaccaaagactttatagtgtc

SEQ ID NO: 27632 - DNA, 33 bp, Homo sapien
tcttagagtgaaaaccgaagactttatagtgtc

SEQ ID NO: 27633 - DNA, 33 bp, Homo sapien
actttctttctagaaaagtcacacaggattaaa

SEQ ID NO: 27634 - DNA, 33 bp, Homo sapien
actttctttctagaaatgtcacacaggattaaa

SEQ ID NO: 27635 - DNA, 33 bp, Homo sapien
ttagcaggtagcctacacttttttagaagtaaa

SEQ ID NO: 27636 - DNA, 33 bp, Homo sapien
ttagcaggtagcctacgcttttttagaagtaaa

SEQ ID NO: 27637 - DNA, 33 bp, Homo sapien
ttggatgtaaattttcccattgttcttaagcaa

SEQ ID NO: 27638 - DNA, 33 bp, Homo sapien
ttggatgtaaattttctcattgttcttaagcaa

SEQ ID NO: 27639 - DNA, 33 bp, Homo sapien
taacttcacatgactgaagaagtggggctatgt

SEQ ID NO: 27640 - DNA, 33 bp, Homo sapien
taacttcacatgactgcagaagtggggctatgt

SEQ ID NO: 27641 - DNA, 33 bp, Homo sapien
aaacttttaactcaaaataagacagtctgacac

SEQ ID NO: 27642 - DNA, 33 bp, Homo sapien
aaacttttaactcaaattaagacagtctgacac

SEQ ID NO: 27643 - DNA, 33 bp, Homo sapien
ataattactaagaacccctatgtacacagcatt

SEQ ID NO: 27644 - DNA, 33 bp, Homo sapien
ataattactaagaacctctatgtacacagcatt

SEQ ID NO: 27645 - DNA, 33 bp, Homo sapien
tgtgtccttcagggtacctctgacatctggtca

SEQ ID NO: 27646 - DNA, 33 bp, Homo sapien
tgtgtccttcagggtatctctgacatctggtca

SEQ ID NO: 27647 - DNA, 33 bp, Homo sapien
gatttcaggtttaactcaaaggcagtgatattt

SEQ ID NO: 27648 - DNA, 33 bp, Homo sapien
gatttcaggtttaacttaaaggcagtgatattt

SEQ ID NO: 27649 - DNA, 33 bp, Homo sapien
cttgcttagggttccccgacacacaggtcagcc

SEQ ID NO: 27650 - DNA, 33 bp, Homo sapien
cttgcttagggttccctgacacacaggtcagcc

SEQ ID NO: 27651 - DNA, 33 bp, Homo sapien
tagaaccaagccataacatgaaaagagctcaag

SEQ ID NO: 27652 - DNA, 33 bp, Homo sapien
tagaaccaagccataatatgaaaagagctcaag

SEQ ID NO: 27653 - DNA, 33 bp, Homo sapien
atagaaatgtactataacttcagcatactagtc

SEQ ID NO: 27654 - DNA, 33 bp, Homo sapien
atagaaatgtactatagcttcagcatactagtc

SEQ ID NO: 27655 - DNA, 33 bp, Homo sapien
gcaacaaatactgcaaccaaagtacctatgcca

SEQ ID NO: 27656 - DNA, 33 bp, Homo sapien
gcaacaaatactgcaatcaaagtacctatgcca

SEQ ID NO: 27657 - DNA, 33 bp, Homo sapien
accttattcctattgccaaaatctaaattctgg

SEQ ID NO: 27658 - DNA, 33 bp, Homo sapien
accttattcctattgctaaaatctaaattctgg

SEQ ID NO: 27659 - DNA, 33 bp, Homo sapien
gagaaccactggtttaagctgagggaggtcttg

SEQ ID NO: 27660 - DNA, 33 bp, Homo sapien
gagaaccactggtttaggctgagggaggtcttg

SEQ ID NO: 27661 - DNA, 33 bp, Homo sapien
gtaacttaatagactacgtaaaagtggagcgaa

SEQ ID NO: 27662 - DNA, 33 bp, Homo sapien
gtaacttaatagactatgtaaaagtggagcgaa

SEQ ID NO: 27663 - DNA, 33 bp, Homo sapien
catgggactatgactacgaatgaaggacagaag

SEQ ID NO: 27664 - DNA, 33 bp, Homo sapien
catgggactatgactatgaatgaaggacagaag

SEQ ID NO: 27665 - DNA, 33 bp, Homo sapien
ttactccaactagaccaaaggaagccatgaagg

SEQ ID NO: 27666 - DNA, 33 bp, Homo sapien
ttactccaactagaccgaaggaagccatgaagg

SEQ ID NO: 27667 - DNA, 33 bp, Homo sapien
cagaaccaggctttgacaccatgaagtctggta

SEQ ID NO: 27668 - DNA, 33 bp, Homo sapien
cagaaccaggctttgataccatgaagtctggta

SEQ ID NO: 27669 - DNA, 33 bp, Homo sapien
gcaataatagcaaatcaatcaaatttacattgc

SEQ ID NO: 27670 - DNA, 33 bp, Homo sapien
gcaataatagcaaatctatcaaatttacattgc

SEQ ID NO: 27671 - DNA, 33 bp, Homo sapien
atttacattgcaaagaatccttcacaaaagtac

SEQ ID NO: 27672 - DNA, 33 bp, Homo sapien
atttacattgcaaagagtccttcacaaaagtac

SEQ ID NO: 27673 - DNA, 33 bp, Homo sapien
tccagtgagattttgcagaagaatggtgtgtgc

SEQ ID NO: 27674 - DNA, 33 bp, Homo sapien
tccagtgagattttgcggaagaatggtgtgtgc

SEQ ID NO: 27675 - DNA, 33 bp, Homo sapien
cccgtagcttctaaaacgggccaagattcacag

SEQ ID NO: 27676 - DNA, 33 bp, Homo sapien
cccgtagcttctaaaatgggccaagattcacag

SEQ ID NO: 27677 - DNA, 33 bp, Homo sapien
ggaagtaacttgaaagcccatcaataaaggaat

SEQ ID NO: 27678 - DNA, 33 bp, Homo sapien
ggaagtaacttgaaagtccatcaataaaggaat

SEQ ID NO: 27679 - DNA, 33 bp, Homo sapien
aatctcacttttggtaacaatctaaatatccgc

SEQ ID NO: 27680 - DNA, 33 bp, Homo sapien
aatctcacttttggtagcaatctaaatatccgc

SEQ ID NO: 27681 - DNA, 33 bp, Homo sapien
cataactatagcaaaaattacttatacatctta

SEQ ID NO: 27682 - DNA, 33 bp, Homo sapien
cataactatagcaaaatttacttatacatctta

SEQ ID NO: 27683 - DNA, 33 bp, Homo sapien
gcaagaagaatgttcacaattttctaagcattt

SEQ ID NO: 27684 - DNA, 33 bp, Homo sapien
gcaagaagaatgttcagaattttctaagcattt

SEQ ID NO: 27685 - DNA, 33 bp, Homo sapien
gaaatctcctaaaatacagtagatgctcactga

SEQ ID NO: 27686 - DNA, 33 bp, Homo sapien
gaaatctcctaaaatagagtagatgctcactga

SEQ ID NO: 27687 - DNA, 33 bp, Homo sapien
actgatatttttgtgccgacaccttaattcaag

SEQ ID NO: 27688 - DNA, 33 bp, Homo sapien
actgatatttttgtgctgacaccttaattcaag

SEQ ID NO: 27689 - DNA, 33 bp, Homo sapien
cctatgctacctctcaaagaaaatgtgcccaaa

SEQ ID NO: 27690 - DNA, 33 bp, Homo sapien
cctatgctacctctcagagaaaatgtgcccaaa

SEQ ID NO: 27691 - DNA, 33 bp, Homo sapien
tggaatagttagcttaaatcatgggttcccagc

SEQ ID NO: 27692 - DNA, 33 bp, Homo sapien
tggaatagttagcttacatcatgggttcccagc

SEQ ID NO: 27693 - DNA, 33 bp, Homo sapien
ctgtgcacataaccaaacagtgaatgtgatggc

SEQ ID NO: 27694 - DNA, 33 bp, Homo sapien
ctgtgcacataaccaagcagtgaatgtgatggc

SEQ ID NO: 27695 - DNA, 33 bp, Homo sapien
gttcacatctacccagcattttctgtttttcag

SEQ ID NO: 27696 - DNA, 33 bp, Homo sapien
gttcacatctacccaggattttctgtttttcag

SEQ ID NO: 27697 - DNA, 33 bp, Homo sapien
acactcattatctcacaagcactctttctcttt

SEQ ID NO: 27698 - DNA, 33 bp, Homo sapien
acactcattatctcacgagcactctttctcttt

SEQ ID NO: 27699 - DNA, 33 bp, Homo sapien
agatagatagagaagaaaatttagatatgtagg

SEQ ID NO: 27700 - DNA, 33 bp, Homo sapien
agatagatagagaagacaatttagatatgtagg

SEQ ID NO: 27701 - DNA, 33 bp, Homo sapien
atctgggtatttcgtacgcctgatcaagagctt

SEQ ID NO: 27702 - DNA, 33 bp, Homo sapien
atctgggtatttcgtatgcctgatcaagagctt

SEQ ID NO: 27703 - DNA, 33 bp, Homo sapien
gaaaaaagttcctcagaaaatgttgctacctat

SEQ ID NO: 27704 - DNA, 33 bp, Homo sapien
gaaaaaagttcctcaggaaatgttgctacctat

SEQ ID NO: 27705 - DNA, 33 bp, Homo sapien
atgtatatcatgcatagtagtactttgttcact

SEQ ID NO: 27706 - DNA, 33 bp, Homo sapien
atgtatatcatgcatattagtactttgttcact

SEQ ID NO: 27707 - DNA, 33 bp, Homo sapien
gtactttccagtatggcataaagtgttcagtat

SEQ ID NO: 27708 - DNA, 33 bp, Homo sapien
gtactttccagtatggtataaagtgttcagtat

SEQ ID NO: 27709 - DNA, 33 bp, Homo sapien
agtagttctaggctaaatcgggagaaaataaaa

SEQ ID NO: 27710 - DNA, 33 bp, Homo sapien
agtagttctaggctaactcgggagaaaataaaa

SEQ ID NO: 27711 - DNA, 33 bp, Homo sapien
gcagtaaacccatcatcaacagccatggtgttt

SEQ ID NO: 27712 - DNA, 33 bp, Homo sapien
gcagtaaacccatcattaacagccatggtgttt

SEQ ID NO: 27713 - DNA, 33 bp, Homo sapien
cgtaagtatattgagaacaattatgtgcaaatg

SEQ ID NO: 27714 - DNA, 33 bp, Homo sapien
cgtaagtatattgagagcaattatgtgcaaatg

SEQ ID NO: 27715 - DNA, 33 bp, Homo sapien
agccaagattaaaatgcacagcaggctgagagg

SEQ ID NO: 27716 - DNA, 33 bp, Homo sapien
agccaagattaaaatggacagcaggctgagagg

SEQ ID NO: 27717 - DNA, 33 bp, Homo sapien
cagacccagtgctagacgtagatcccaatcaca

SEQ ID NO: 27718 - DNA, 33 bp, Homo sapien
cagacccagtgctagatgtagatcccaatcaca

SEQ ID NO: 27719 - DNA, 33 bp, Homo sapien
atttcatcatctggcacattagttgctggcaag

SEQ ID NO: 27720 - DNA, 33 bp, Homo sapien
atttcatcatctggcagattagttgctggcaag

SEQ ID NO: 27721 - DNA, 33 bp, Homo sapien
acctcatctcataccacgttgctcttatcttcc

SEQ ID NO: 27722 - DNA, 33 bp, Homo sapien
acctcatctcataccatgttgctcttatcttcc

SEQ ID NO: 27723 - DNA, 33 bp, Homo sapien
atgatgattgatctaaaaggtaaaagatctaaa

SEQ ID NO: 27724 - DNA, 33 bp, Homo sapien
atgatgattgatctaagaggtaaaagatctaaa

SEQ ID NO: 27725 - DNA, 33 bp, Homo sapien
gccttcactcctttaagtagcctctagctcttt

SEQ ID NO: 27726 - DNA, 33 bp, Homo sapien
gccttcactcctttaattagcctctagctcttt

SEQ ID NO: 27727 - DNA, 33 bp, Homo sapien
ctgcccacaaggatccagataaatagatcacta

SEQ ID NO: 27728 - DNA, 33 bp, Homo sapien
ctgcccacaaggatccggataaatagatcacta

SEQ ID NO: 27729 - DNA, 33 bp, Homo sapien
actcaaaatttagtacaatgcttctacttggaa

SEQ ID NO: 27730 - DNA, 33 bp, Homo sapien
actcaaaatttagtacgatgcttctacttggaa

SEQ ID NO: 27731 - DNA, 33 bp, Homo sapien
tgctgtctatgctccaatgcttaacaaaatttt

SEQ ID NO: 27732 - DNA, 33 bp, Homo sapien
tgctgtctatgctccagtgcttaacaaaatttt

SEQ ID NO: 27733 - DNA, 33 bp, Homo sapien
tccctctcagttaatgacaccactgtcctatct

SEQ ID NO: 27734 - DNA, 33 bp, Homo sapien
tccctctcagttaatgccaccactgtcctatct

SEQ ID NO: 27735 - DNA, 33 bp, Homo sapien
agaggcataatttgaacccgagtttgctgggcc

SEQ ID NO: 27736 - DNA, 33 bp, Homo sapien
agaggcataatttgaatccgagtttgctgggcc

SEQ ID NO: 27737 - DNA, 33 bp, Homo sapien
atgctttgagagaatgaaaatacttacagcacc

SEQ ID NO: 27738 - DNA, 33 bp, Homo sapien
atgctttgagagaatggaaatacttacagcacc

SEQ ID NO: 27739 - DNA, 33 bp, Homo sapien
gttgcaaattccaaaaacttgcaaatttcaaga

SEQ ID NO: 27740 - DNA, 33 bp, Homo sapien
gttgcaaattccaaaaccttgcaaatttcaaga

SEQ ID NO: 27741 - DNA, 33 bp, Homo sapien
gctacccctttatggccacagacagctccctcc

SEQ ID NO: 27742 - DNA, 33 bp, Homo sapien
gctacccctttatggctacagacagctccctcc

SEQ ID NO: 27743 - DNA, 33 bp, Homo sapien
aattgataacattgtccctagtagtaagaaata

SEQ ID NO: 27744 - DNA, 33 bp, Homo sapien
aattgataacattgtctctagtagtaagaaata

SEQ ID NO: 27745 - DNA, 33 bp, Homo sapien
gttaaatcccagttcaaacatttgggcaagtca

SEQ ID NO: 27746 - DNA, 33 bp, Homo sapien
gttaaatcccagttcagacatttgggcaagtca

SEQ ID NO: 27747 - DNA, 33 bp, Homo sapien
caagcaatcaggaagacgggctttctggacagc

SEQ ID NO: 27748 - DNA, 33 bp, Homo sapien
caagcaatcaggaagatgggctttctggacagc

SEQ ID NO: 27749 - DNA, 33 bp, Homo sapien
agatgtgggcagataacaaccctactttttact

SEQ ID NO: 27750 - DNA, 33 bp, Homo sapien
agatgtgggcagataataaccctactttttact

SEQ ID NO: 27751 - DNA, 33 bp, Homo sapien
aggtaaattatcctcaaatgaatctataggttc

SEQ ID NO: 27752 - DNA, 33 bp, Homo sapien
aggtaaattatcctcacatgaatctataggttc

SEQ ID NO: 27753 - DNA, 33 bp, Homo sapien
gtacactaataccatacagcaagaatcagtttt

SEQ ID NO: 27754 - DNA, 33 bp, Homo sapien
gtacactaataccatatagcaagaatcagtttt

SEQ ID NO: 27755 - DNA, 33 bp, Homo sapien
agaaggaaactgggaaagacaggtgagccctct

SEQ ID NO: 27756 - DNA, 33 bp, Homo sapien
agaaggaaactgggaaggacaggtgagccctct

SEQ ID NO: 27757 - DNA, 33 bp, Homo sapien
aaaaggaattggcgaaaatttagcataaaagat

SEQ ID NO: 27758 - DNA, 33 bp, Homo sapien
aaaaggaattggcgaagatttagcataaaagat

SEQ ID NO: 27759 - DNA, 33 bp, Homo sapien
gtcaattgttactaaacggaaaaaaatgcagag

SEQ ID NO: 27760 - DNA, 33 bp, Homo sapien
gtcaattgttactaaatggaaaaaaatgcagag

SEQ ID NO: 27761 - DNA, 33 bp, Homo sapien
atggactgtgaatttaaacactccattgtacaa

SEQ ID NO: 27762 - DNA, 33 bp, Homo sapien
atggactgtgaatttacacactccattgtacaa

SEQ ID NO: 27763 - DNA, 33 bp, Homo sapien
taactgcatgaacccaaataaaaaaaactgtag

SEQ ID NO: 27764 - DNA, 33 bp, Homo sapien
taactgcatgaacccagataaaaaaaactgtag

SEQ ID NO: 27765 - DNA, 33 bp, Homo sapien
aaatacaagagtctacagtagaaaagatggcag

SEQ ID NO: 27766 - DNA, 33 bp, Homo sapien
aaatacaagagtctacggtagaaaagatggcag

SEQ ID NO: 27767 - DNA, 33 bp, Homo sapien
gcagaggccaataacccgagtaaagagacgaag

SEQ ID NO: 27768 - DNA, 33 bp, Homo sapien
gcagaggccaataacctgagtaaagagacgaag

SEQ ID NO: 27769 - DNA, 33 bp, Homo sapien
ccacccaagaacattaaagcctcataaactata

SEQ ID NO: 27770 - DNA, 33 bp, Homo sapien
ccacccaagaacattagagcctcataaactata

SEQ ID NO: 27771 - DNA, 33 bp, Homo sapien
agacacactgcccagaagagaccatgctgaaga

SEQ ID NO: 27772 - DNA, 33 bp, Homo sapien
agacacactgcccagaggagaccatgctgaaga

SEQ ID NO: 27773 - DNA, 33 bp, Homo sapien
tatgtggcttggatcacagataagtgccaactg

SEQ ID NO: 27774 - DNA, 33 bp, Homo sapien
tatgtggcttggatcatagataagtgccaactg

SEQ ID NO: 27775 - DNA, 33 bp, Homo sapien
tagtcccagtccttaacctactgtgaaaatgct

SEQ ID NO: 27776 - DNA, 33 bp, Homo sapien
tagtcccagtccttaatctactgtgaaaatgct

SEQ ID NO: 27777 - DNA, 33 bp, Homo sapien
cggccatttcaaacaacaaactcacaaatgaag

SEQ ID NO: 27778 - DNA, 33 bp, Homo sapien
cggccatttcaaacaagaaactcacaaatgaag

SEQ ID NO: 27779 - DNA, 33 bp, Homo sapien
gtgaagccacttaatacgggtatgtgaacgatc

SEQ ID NO: 27780 - DNA, 33 bp, Homo sapien
gtgaagccacttaatatgggtatgtgaacgatc

SEQ ID NO: 27781 - DNA, 33 bp, Homo sapien
ggcgtgtgataactaacaagcagctactactct

SEQ ID NO: 27782 - DNA, 33 bp, Homo sapien
ggcgtgtgataactaataagcagctactactct

SEQ ID NO: 27783 - DNA, 33 bp, Homo sapien
atggtgaatttctaaccggaatactatgcgatc

SEQ ID NO: 27784 - DNA, 33 bp, Homo sapien
atggtgaatttctaactggaatactatgcgatc

SEQ ID NO: 27785 - DNA, 33 bp, Homo sapien
tggtactactgacatacgacagaagtgatattg

SEQ ID NO: 27786 - DNA, 33 bp, Homo sapien
tggtactactgacatatgacagaagtgatattg

SEQ ID NO: 27787 - DNA, 33 bp, Homo sapien
ggagaaaaagcttctgacaatattcaacaccct

SEQ ID NO: 27788 - DNA, 33 bp, Homo sapien
ggagaaaaagcttctggcaatattcaacaccct

SEQ ID NO: 27789 - DNA, 33 bp, Homo sapien
ttccctctctttacacacatatgctcttccttt

SEQ ID NO: 27790 - DNA, 33 bp, Homo sapien
ttccctctctttacacgcatatgctcttccttt

SEQ ID NO: 27791 - DNA, 33 bp, Homo sapien
cactgtcaacaatgaacagatcatacagacaga

SEQ ID NO: 27792 - DNA, 33 bp, Homo sapien
cactgtcaacaatgaagagatcatacagacaga

SEQ ID NO: 27793 - DNA, 33 bp, Homo sapien
gtgccaactgtatgacaaaggcttttaacttct

SEQ ID NO: 27794 - DNA, 33 bp, Homo sapien
gtgccaactgtatgacgaaggcttttaacttct

SEQ ID NO: 27795 - DNA, 33 bp, Homo sapien
gtgctctggtgagaaaacagaaatgtcttatga

SEQ ID NO: 27796 - DNA, 33 bp, Homo sapien
gtgctctggtgagaaaccagaaatgtcttatga

SEQ ID NO: 27797 - DNA, 33 bp, Homo sapien
acattatgaagacagcaaagagttaaaggtggt

SEQ ID NO: 27798 - DNA, 33 bp, Homo sapien
acattatgaagacagcgaagagttaaaggtggt

SEQ ID NO: 27799 - DNA, 33 bp, Homo sapien
aatacaaaataaggaccggagactccatataag

SEQ ID NO: 27800 - DNA, 33 bp, Homo sapien
aatacaaaataaggactggagactccatataag

SEQ ID NO: 27801 - DNA, 33 bp, Homo sapien
aggggcttagtagccacgctgcttgagtttgaa

SEQ ID NO: 27802 - DNA, 33 bp, Homo sapien
aggggcttagtagccatgctgcttgagtttgaa

SEQ ID NO: 27803 - DNA, 33 bp, Homo sapien
cactcacgtattcatacaattactgtgaaatta

SEQ ID NO: 27804 - DNA, 33 bp, Homo sapien
cactcacgtattcatataattactgtgaaatta

SEQ ID NO: 27805 - DNA, 33 bp, Homo sapien
gaagaaaaatgatttaacctatcaaaggagata

SEQ ID NO: 27806 - DNA, 33 bp, Homo sapien
gaagaaaaatgatttagcctatcaaaggagata

SEQ ID NO: 27807 - DNA, 33 bp, Homo sapien
cttgaataatatatgaagagaaggcaggaagat

SEQ ID NO: 27808 - DNA, 33 bp, Homo sapien
cttgaataatatatgaggagaaggcaggaagat

SEQ ID NO: 27809 - DNA, 33 bp, Homo sapien
atggtagccttatggaacaaatactccaatttt

SEQ ID NO: 27810 - DNA, 33 bp, Homo sapien
atggtagccttatggagcaaatactccaatttt

SEQ ID NO: 27811 - DNA, 33 bp, Homo sapien
ctgtaaagaggtagagaagaagcagagagacta

SEQ ID NO: 27812 - DNA, 33 bp, Homo sapien
ctgtaaagaggtagagtagaagcagagagacta

SEQ ID NO: 27813 - DNA, 33 bp, Homo sapien
tgccaatgacatcttacgttgctaaggcttatg

SEQ ID NO: 27814 - DNA, 33 bp, Homo sapien
tgccaatgacatcttatgttgctaaggcttatg

SEQ ID NO: 27815 - DNA, 33 bp, Homo sapien
tggatgaacatctctacaagcatggaatcaaaa

SEQ ID NO: 27816 - DNA, 33 bp, Homo sapien
tggatgaacatctctataagcatggaatcaaaa

SEQ ID NO: 27817 - DNA, 33 bp, Homo sapien
gtagaaacactgcaataaataatgcaaaatgcc

SEQ ID NO: 27818 - DNA, 33 bp, Homo sapien
gtagaaacactgcaatgaataatgcaaaatgcc

SEQ ID NO: 27819 - DNA, 33 bp, Homo sapien
ttgtgcctgaagatttcaaaaagaggctgataa

SEQ ID NO: 27820 - DNA, 33 bp, Homo sapien
ttgtgcctgaagattttaaaaagaggctgataa

SEQ ID NO: 27821 - DNA, 33 bp, Homo sapien
taaaattagaaggttgaaaaatatgaaattgcc

SEQ ID NO: 27822 - DNA, 33 bp, Homo sapien
taaaattagaaggttggaaaatatgaaattgcc

SEQ ID NO: 27823 - DNA, 33 bp, Homo sapien
gcaacatattctgaataaaatggtctagtcaaa

SEQ ID NO: 27824 - DNA, 33 bp, Homo sapien
gcaacatattctgaattaaatggtctagtcaaa

SEQ ID NO: 27825 - DNA, 33 bp, Homo sapien
agtgaattcatggatcaacaggcttacaacata

SEQ ID NO: 27826 - DNA, 33 bp, Homo sapien
agtgaattcatggatcgacaggcttacaacata

SEQ ID NO: 27827 - DNA, 33 bp, Homo sapien
atatcttaaatgctagcagcagcttcagatatg

SEQ ID NO: 27828 - DNA, 33 bp, Homo sapien
atatcttaaatgctagtagcagcttcagatatg

SEQ ID NO: 27829 - DNA, 33 bp, Homo sapien
ggatctggttccagcaagaactgtgcatctact

SEQ ID NO: 27830 - DNA, 33 bp, Homo sapien
ggatctggttccagcatgaactgtgcatctact

SEQ ID NO: 27831 - DNA, 33 bp, Homo sapien
taaaatgaaatcaaaaccctgtacagaaatagg

SEQ ID NO: 27832 - DNA, 33 bp, Homo sapien
taaaatgaaatcaaaatcctgtacagaaatagg

SEQ ID NO: 27833 - DNA, 33 bp, Homo sapien
tataaaaaacagaagccctctacttaggtgtac

SEQ ID NO: 27834 - DNA, 33 bp, Homo sapien
tataaaaaacagaagctctctacttaggtgtac

SEQ ID NO: 27835 - DNA, 33 bp, Homo sapien
aactcaggtgaacctaccctgtcagacttgcac

SEQ ID NO: 27836 - DNA, 33 bp, Homo sapien
aactcaggtgaacctatcctgtcagacttgcac

SEQ ID NO: 27837 - DNA, 33 bp, Homo sapien
gaaaaggaggtccttccaggtgaggtattacta

SEQ ID NO: 27838 - DNA, 33 bp, Homo sapien
gaaaaggaggtccttctaggtgaggtattacta

SEQ ID NO: 27839 - DNA, 33 bp, Homo sapien
tgtggtatgcagcaaaaggttaaaaatcactgt

SEQ ID NO: 27840 - DNA, 33 bp, Homo sapien
tgtggtatgcagcaaagggttaaaaatcactgt

SEQ ID NO: 27841 - DNA, 33 bp, Homo sapien
acttaacctgcagtcaatcctgcattctggggt

SEQ ID NO: 27842 - DNA, 33 bp, Homo sapien
acttaacctgcagtcagtcctgcattctggggt

SEQ ID NO: 27843 - DNA, 33 bp, Homo sapien
ctgcctagaattgttcaacagtgagtaacttcc

SEQ ID NO: 27844 - DNA, 33 bp, Homo sapien
ctgcctagaattgttcgacagtgagtaacttcc

SEQ ID NO: 27845 - DNA, 33 bp, Homo sapien
tccttatattaaacctaaccagagctttttgcc

SEQ ID NO: 27846 - DNA, 33 bp, Homo sapien
tccttatattaaacctgaccagagctttttgcc

SEQ ID NO: 27847 - DNA, 33 bp, Homo sapien
ttgctatacttacaagcctgatttgtgacaact

SEQ ID NO: 27848 - DNA, 33 bp, Homo sapien
ttgctatacttacaagtctgatttgtgacaact

SEQ ID NO: 27849 - DNA, 33 bp, Homo sapien
atcagatgactgatttaaaaaaaaacaacaaca

SEQ ID NO: 27850 - DNA, 33 bp, Homo sapien
atcagatgactgattttaaaaaaaacaacaaca

SEQ ID NO: 27851 - DNA, 33 bp, Homo sapien
agctctaaaagcctgaactacttaaaaaggcta

SEQ ID NO: 27852 - DNA, 33 bp, Homo sapien
agctctaaaagcctgacctacttaaaaaggcta

SEQ ID NO: 27853 - DNA, 33 bp, Homo sapien
ttatctaacacaacataaggatcccatgacagc

SEQ ID NO: 27854 - DNA, 33 bp, Homo sapien
ttatctaacacaacatgaggatcccatgacagc

SEQ ID NO: 27855 - DNA, 33 bp, Homo sapien
ttcattgaacaaatagaacctttcaaagacatt

SEQ ID NO: 27856 - DNA, 33 bp, Homo sapien
ttcattgaacaaatagcacctttcaaagacatt

SEQ ID NO: 27857 - DNA, 33 bp, Homo sapien
ttttacctgttgtccaaagaaaatgtaacatag

SEQ ID NO: 27858 - DNA, 33 bp, Homo sapien
ttttacctgttgtccagagaaaatgtaacatag

SEQ ID NO: 27859 - DNA, 33 bp, Homo sapien
ccacagactggaaaaaatttgcaatacacatag

SEQ ID NO: 27860 - DNA, 33 bp, Homo sapien
ccacagactggaaaaagtttgcaatacacatag

SEQ ID NO: 27861 - DNA, 33 bp, Homo sapien
atcccagcacttattcaattgtttagaaatgcc

SEQ ID NO: 27862 - DNA, 33 bp, Homo sapien
atcccagcacttattccattgtttagaaatgcc

SEQ ID NO: 27863 - DNA, 33 bp, Homo sapien
ctcaacctcttgtctacgttaagactttctcca

SEQ ID NO: 27864 - DNA, 33 bp, Homo sapien
ctcaacctcttgtctatgttaagactttctcca

SEQ ID NO: 27865 - DNA, 33 bp, Homo sapien
taagcaatttaaaatcaagatcagatcacccaa

SEQ ID NO: 27866 - DNA, 33 bp, Homo sapien
taagcaatttaaaatcgagatcagatcacccaa

SEQ ID NO: 27867 - DNA, 33 bp, Homo sapien
ggagagagaattacacaaggccagaagtcaaga

SEQ ID NO: 27868 - DNA, 33 bp, Homo sapien
ggagagagaattacacgaggccagaagtcaaga

SEQ ID NO: 27869 - DNA, 33 bp, Homo sapien
ccagaggcctaggtcacgctcttggatttccca

SEQ ID NO: 27870 - DNA, 33 bp, Homo sapien
ccagaggcctaggtcatgctcttggatttccca

SEQ ID NO: 27871 - DNA, 33 bp, Homo sapien
atacattcattctccaatagccctcaaatctta

SEQ ID NO: 27872 - DNA, 33 bp, Homo sapien
atacattcattctccagtagccctcaaatctta

SEQ ID NO: 27873 - DNA, 33 bp, Homo sapien
actaattctgtaggcacagcttcttccatctgg

SEQ ID NO: 27874 - DNA, 33 bp, Homo sapien
actaattctgtaggcatagcttcttccatctgg

SEQ ID NO: 27875 - DNA, 33 bp, Homo sapien
acactgccaaggtttacagcttgtatcttcttg

SEQ ID NO: 27876 - DNA, 33 bp, Homo sapien
acactgccaaggtttatagcttgtatcttcttg

SEQ ID NO: 27877 - DNA, 33 bp, Homo sapien
cctcaagactttgctccccacattctgatgaag

SEQ ID NO: 27878 - DNA, 33 bp, Homo sapien
cctcaagactttgctctccacattctgatgaag

SEQ ID NO: 27879 - DNA, 33 bp, Homo sapien
aaagtcttgaggtatccctggccagcaagctct

SEQ ID NO: 27880 - DNA, 33 bp, Homo sapien
aaagtcttgaggtatctctggccagcaagctct

SEQ ID NO: 27881 - DNA, 33 bp, Homo sapien
ccccttgtctttacaaatagcacctgacttcct

SEQ ID NO: 27882 - DNA, 33 bp, Homo sapien
ccccttgtctttacaagtagcacctgacttcct

SEQ ID NO: 27883 - DNA, 33 bp, Homo sapien
taaatcaaacttccaaaccatgaatttagggga

SEQ ID NO: 27884 - DNA, 33 bp, Homo sapien
taaatcaaacttccaagccatgaatttagggga

SEQ ID NO: 27885 - DNA, 33 bp, Homo sapien
tgtaataaatcaagtagatagtccgaacagaat

SEQ ID NO: 27886 - DNA, 33 bp, Homo sapien
tgtaataaatcaagtatatagtccgaacagaat

SEQ ID NO: 27887 - DNA, 33 bp, Homo sapien
tccatcacagggaagaaatctgattgtccacgc

SEQ ID NO: 27888 - DNA, 33 bp, Homo sapien
tccatcacagggaagagatctgattgtccacgc

SEQ ID NO: 27889 - DNA, 33 bp, Homo sapien
tctttttacttctttgaagcataggcatttttc

SEQ ID NO: 27890 - DNA, 33 bp, Homo sapien
tctttttacttctttgcagcataggcatttttc

SEQ ID NO: 27891 - DNA, 33 bp, Homo sapien
caataagctcataaaaacagtagacacattgtg

SEQ ID NO: 27892 - DNA, 33 bp, Homo sapien
caataagctcataaaagcagtagacacattgtg

SEQ ID NO: 27893 - DNA, 33 bp, Homo sapien
acaactcagatatcacaagacactaagagccag

SEQ ID NO: 27894 - DNA, 33 bp, Homo sapien
acaactcagatatcaccagacactaagagccag

SEQ ID NO: 27895 - DNA, 33 bp, Homo sapien
gctttgcttacctattgaacattattctcaggt

SEQ ID NO: 27896 - DNA, 33 bp, Homo sapien
gctttgcttacctatttaacattattctcaggt

SEQ ID NO: 27897 - DNA, 33 bp, Homo sapien
gtttatatggaagcaaaagacctagaatagtca

SEQ ID NO: 27898 - DNA, 33 bp, Homo sapien
gtttatatggaagcaagagacctagaatagtca

SEQ ID NO: 27899 - DNA, 33 bp, Homo sapien
gtccagaaataggcccacatgaatatattcaac

SEQ ID NO: 27900 - DNA, 33 bp, Homo sapien
gtccagaaataggcccgcatgaatatattcaac

SEQ ID NO: 27901 - DNA, 33 bp, Homo sapien
gtttatattttctgtcactaactgcctccagag

SEQ ID NO: 27902 - DNA, 33 bp, Homo sapien
gtttatattttctgtctctaactgcctccagag

SEQ ID NO: 27903 - DNA, 33 bp, Homo sapien
tatgcatgctacaatacgggtgaaacttgcaaa

SEQ ID NO: 27904 - DNA, 33 bp, Homo sapien
tatgcatgctacaatatgggtgaaacttgcaaa

SEQ ID NO: 27905 - DNA, 33 bp, Homo sapien
cttatagtctcttttaaaaacgttgtatactta

SEQ ID NO: 27906 - DNA, 33 bp, Homo sapien
cttatagtctcttttagaaacgttgtatactta

SEQ ID NO: 27907 - DNA, 33 bp, Homo sapien
aagcaatcatctgtggccagactgaggtcgggt

SEQ ID NO: 27908 - DNA, 33 bp, Homo sapien
aagcaatcatctgtggtcagactgaggtcgggt

SEQ ID NO: 27909 - DNA, 33 bp, Homo sapien
ccccatggattagccgcaaatactttcttttca

SEQ ID NO: 27910 - DNA, 33 bp, Homo sapien
ccccatggattagccggaaatactttcttttca

SEQ ID NO: 27911 - DNA, 33 bp, Homo sapien
agttagaaacctgaatgaagtgaggaagcaaca

SEQ ID NO: 27912 - DNA, 33 bp, Homo sapien
agttagaaacctgaattaagtgaggaagcaaca

SEQ ID NO: 27913 - DNA, 33 bp, Homo sapien
tataattcatggcagcaaacctgaaactgcaac

SEQ ID NO: 27914 - DNA, 33 bp, Homo sapien
tataattcatggcagcgaacctgaaactgcaac

SEQ ID NO: 27915 - DNA, 33 bp, Homo sapien
tggtaccaaagagtgacgtattgctagaaaggt

SEQ ID NO: 27916 - DNA, 33 bp, Homo sapien
tggtaccaaagagtgatgtattgctagaaaggt

SEQ ID NO: 27917 - DNA, 33 bp, Homo sapien
ataaaatgtaaggtaacgtgtatgtgaattagc

SEQ ID NO: 27918 - DNA, 33 bp, Homo sapien
ataaaatgtaaggtaatgtgtatgtgaattagc

SEQ ID NO: 27919 - DNA, 33 bp, Homo sapien
atttctgatttaaaagactatagctattcccta

SEQ ID NO: 27920 - DNA, 33 bp, Homo sapien
atttctgatttaaaaggctatagctattcccta

SEQ ID NO: 27921 - DNA, 33 bp, Homo sapien
tccgggtatttggagacgaacttgaaaatgcac

SEQ ID NO: 27922 - DNA, 33 bp, Homo sapien
tccgggtatttggagaggaacttgaaaatgcac

SEQ ID NO: 27923 - DNA, 33 bp, Homo sapien
tattcaaaatgatgaacgtttatcaagacttta

SEQ ID NO: 27924 - DNA, 33 bp, Homo sapien
tattcaaaatgatgaatgtttatcaagacttta

SEQ ID NO: 27925 - DNA, 33 bp, Homo sapien
caaccaaagaactaggccattaccaataaattg

SEQ ID NO: 27926 - DNA, 33 bp, Homo sapien
caaccaaagaactaggtcattaccaataaattg

SEQ ID NO: 27927 - DNA, 33 bp, Homo sapien
aaggtaggaatcccgcgcaacatggattcctca

SEQ ID NO: 27928 - DNA, 33 bp, Homo sapien
aaggtaggaatcccgctcaacatggattcctca

SEQ ID NO: 27929 - DNA, 33 bp, Homo sapien
ctctgaagctctatcacatcaacctgttgtttt

SEQ ID NO: 27930 - DNA, 33 bp, Homo sapien
ctctgaagctctatcatatcaacctgttgtttt

SEQ ID NO: 27931 - DNA, 33 bp, Homo sapien
catgggttcaccaggccagacttactcctcagt

SEQ ID NO: 27932 - DNA, 33 bp, Homo sapien
catgggttcaccaggctagacttactcctcagt

SEQ ID NO: 27933 - DNA, 33 bp, Homo sapien
ggagggatgcgacaatgaaataaaatgatgggc

SEQ ID NO: 27934 - DNA, 33 bp, Homo sapien
ggagggatgcgacaattaaataaaatgatgggc

SEQ ID NO: 27935 - DNA, 33 bp, Homo sapien
tgcctgctgtaaccaactctctctattccagac

SEQ ID NO: 27936 - DNA, 33 bp, Homo sapien
tgcctgctgtaaccaattctctctattccagac

SEQ ID NO: 27937 - DNA, 33 bp, Homo sapien
tacttaccattttgtccctagtacacaatacct

SEQ ID NO: 27938 - DNA, 33 bp, Homo sapien
tacttaccattttgtctctagtacacaatacct

SEQ ID NO: 27939 - DNA, 33 bp, Homo sapien
gtgacattgagagttcaaaatagaatttgagca

SEQ ID NO: 27940 - DNA, 33 bp, Homo sapien
gtgacattgagagttccaaatagaatttgagca

SEQ ID NO: 27941 - DNA, 33 bp, Homo sapien
aatcaaccataaagtaccattcactgagctctg

SEQ ID NO: 27942 - DNA, 33 bp, Homo sapien
aatcaaccataaagtatcattcactgagctctg

SEQ ID NO: 27943 - DNA, 33 bp, Homo sapien
tatacacattgtaccagctaagttatcaattac

SEQ ID NO: 27944 - DNA, 33 bp, Homo sapien
tatacacattgtaccatctaagttatcaattac

SEQ ID NO: 27945 - DNA, 33 bp, Homo sapien
gtacttaaaagctaaaatcaacgggtttgagca

SEQ ID NO: 27946 - DNA, 33 bp, Homo sapien
gtacttaaaagctaaagtcaacgggtttgagca

SEQ ID NO: 27947 - DNA, 33 bp, Homo sapien
gaatttgttgtctttcactttaaacatgcttct

SEQ ID NO: 27948 - DNA, 33 bp, Homo sapien
gaatttgttgtctttcgctttaaacatgcttct

SEQ ID NO: 27949 - DNA, 33 bp, Homo sapien
gtacagtatgctaagaatagaccatgtggtctt

SEQ ID NO: 27950 - DNA, 33 bp, Homo sapien
gtacagtatgctaagagtagaccatgtggtctt

SEQ ID NO: 27951 - DNA, 33 bp, Homo sapien
cttaaactacctccaacagataagaatttattt

SEQ ID NO: 27952 - DNA, 33 bp, Homo sapien
cttaaactacctccaatagataagaatttattt

SEQ ID NO: 27953 - DNA, 33 bp, Homo sapien
aaaatgctgaagaaaccatttgcagatttccaa

SEQ ID NO: 27954 - DNA, 33 bp, Homo sapien
aaaatgctgaagaaactatttgcagatttccaa

SEQ ID NO: 27955 - DNA, 33 bp, Homo sapien
tgaagtagctctgaaaataatattgtaaggatc

SEQ ID NO: 27956 - DNA, 33 bp, Homo sapien
tgaagtagctctgaaactaatattgtaaggatc

SEQ ID NO: 27957 - DNA, 33 bp, Homo sapien
ttcctttgttcagtgacataatgctttttatct

SEQ ID NO: 27958 - DNA, 33 bp, Homo sapien
ttcctttgttcagtgagataatgctttttatct

SEQ ID NO: 27959 - DNA, 33 bp, Homo sapien
tggttgacaagtcagcaatgagtccaaggtgag

SEQ ID NO: 27960 - DNA, 33 bp, Homo sapien
tggttgacaagtcagcgatgagtccaaggtgag

SEQ ID NO: 27961 - DNA, 33 bp, Homo sapien
ggttcatcgatcataccagtgtgtttggatttt

SEQ ID NO: 27962 - DNA, 33 bp, Homo sapien
ggttcatcgatcatactagtgtgtttggatttt

SEQ ID NO: 27963 - DNA, 33 bp, Homo sapien
ccagagcctatcttgcagattcaactcccagcc

SEQ ID NO: 27964 - DNA, 33 bp, Homo sapien
ccagagcctatcttgcggattcaactcccagcc

SEQ ID NO: 27965 - DNA, 33 bp, Homo sapien
ctctgcacccactggccagattgtaaacaattc

SEQ ID NO: 27966 - DNA, 33 bp, Homo sapien
ctctgcacccactggctagattgtaaacaattc

SEQ ID NO: 27967 - DNA, 33 bp, Homo sapien
tatttttgctgccaaccccaatagactattttg

SEQ ID NO: 27968 - DNA, 33 bp, Homo sapien
tatttttgctgccaacgccaatagactattttg

SEQ ID NO: 27969 - DNA, 33 bp, Homo sapien
tagaagagaaagaaataaggagttctagggatt

SEQ ID NO: 27970 - DNA, 33 bp, Homo sapien
tagaagagaaagaaatcaggagttctagggatt

SEQ ID NO: 27971 - DNA, 33 bp, Homo sapien
ttatggacacaaacaacgcttctgctttagcct

SEQ ID NO: 27972 - DNA, 33 bp, Homo sapien
ttatggacacaaacaatgcttctgctttagcct

SEQ ID NO: 27973 - DNA, 33 bp, Homo sapien
aataacatgatgcaccaaaagagattaacaggg

SEQ ID NO: 27974 - DNA, 33 bp, Homo sapien
aataacatgatgcacccaaagagattaacaggg

SEQ ID NO: 27975 - DNA, 33 bp, Homo sapien
cttcagtgcttttacaatctagcacatttctct

SEQ ID NO: 27976 - DNA, 33 bp, Homo sapien
cttcagtgcttttacattctagcacatttctct

SEQ ID NO: 27977 - DNA, 33 bp, Homo sapien
aagaactgtgccgagacagaataagtggcaata

SEQ ID NO: 27978 - DNA, 33 bp, Homo sapien
aagaactgtgccgagagagaataagtggcaata

SEQ ID NO: 27979 - DNA, 33 bp, Homo sapien
cagctgtggagacttaggataaagctttatatt

SEQ ID NO: 27980 - DNA, 33 bp, Homo sapien
cagctgtggagacttatgataaagctttatatt

SEQ ID NO: 27981 - DNA, 33 bp, Homo sapien
aaaatgtggaaaacttcaactaccagctgtgga

SEQ ID NO: 27982 - DNA, 33 bp, Homo sapien
aaaatgtggaaaacttgaactaccagctgtgga

SEQ ID NO: 27983 - DNA, 33 bp, Homo sapien
tgactaattagcaatgccagctgtgagagcagg

SEQ ID NO: 27984 - DNA, 33 bp, Homo sapien
tgactaattagcaatgtcagctgtgagagcagg

SEQ ID NO: 27985 - DNA, 33 bp, Homo sapien
gactctgttgaggcaccgccttctttgcaaaac

SEQ ID NO: 27986 - DNA, 33 bp, Homo sapien
gactctgttgaggcactgccttctttgcaaaac

SEQ ID NO: 27987 - DNA, 33 bp, Homo sapien
gctaaggttgcatacaatatacgaagaaccatg

SEQ ID NO: 27988 - DNA, 33 bp, Homo sapien
gctaaggttgcatacagtatacgaagaaccatg

SEQ ID NO: 27989 - DNA, 33 bp, Homo sapien
aaaacagattacaaaacgggctaaggacctgaa

SEQ ID NO: 27990 - DNA, 33 bp, Homo sapien
aaaacagattacaaaatgggctaaggacctgaa

SEQ ID NO: 27991 - DNA, 33 bp, Homo sapien
ataagttctcctgacacagggaagacatgagta

SEQ ID NO: 27992 - DNA, 33 bp, Homo sapien
ataagttctcctgacatagggaagacatgagta

SEQ ID NO: 27993 - DNA, 33 bp, Homo sapien
gagcagagtgatgcacagatggaaacaaagact

SEQ ID NO: 27994 - DNA, 33 bp, Homo sapien
gagcagagtgatgcacggatggaaacaaagact

SEQ ID NO: 27995 - DNA, 33 bp, Homo sapien
gccatctagctgacacaaatgtgaaagaactaa

SEQ ID NO: 27996 - DNA, 33 bp, Homo sapien
gccatctagctgacacgaatgtgaaagaactaa

SEQ ID NO: 27997 - DNA, 33 bp, Homo sapien
cttggttatttcattacagtagcaaaaatgaac

SEQ ID NO: 27998 - DNA, 33 bp, Homo sapien
cttggttatttcattagagtagcaaaaatgaac

SEQ ID NO: 27999 - DNA, 33 bp, Homo sapien
cagcttcagattgttacattgggtcctgcaggg

SEQ ID NO: 28000 - DNA, 33 bp, Homo sapien
cagcttcagattgttatattgggtcctgcaggg

SEQ ID NO: 28001 - DNA, 33 bp, Homo sapien
aaagttaaaatggtgacgatgataataatcatt

SEQ ID NO: 28002 - DNA, 33 bp, Homo sapien
aaagttaaaatggtgatgatgataataatcatt

SEQ ID NO: 28003 - DNA, 33 bp, Homo sapien
gcataccctaggataaagatccatgtgcagtaa

SEQ ID NO: 28004 - DNA, 33 bp, Homo sapien
gcataccctaggataaggatccatgtgcagtaa

SEQ ID NO: 28005 - DNA, 33 bp, Homo sapien
taggtgaatgtcactgaagatagatagtgagaa

SEQ ID NO: 28006 - DNA, 33 bp, Homo sapien
taggtgaatgtcactgcagatagatagtgagaa

SEQ ID NO: 28007 - DNA, 33 bp, Homo sapien
ttgtgagagtggttcacatataatctctggcag

SEQ ID NO: 28008 - DNA, 33 bp, Homo sapien
ttgtgagagtggttcagatataatctctggcag

SEQ ID NO: 28009 - DNA, 33 bp, Homo sapien
cttactcttcctcgcaaccccaacatttagagg

SEQ ID NO: 28010 - DNA, 33 bp, Homo sapien
cttactcttcctcgcatccccaacatttagagg

SEQ ID NO: 28011 - DNA, 33 bp, Homo sapien
ttgcaactctcaaggcgcaggcctgtgacctct

SEQ ID NO: 28012 - DNA, 33 bp, Homo sapien
ttgcaactctcaaggctcaggcctgtgacctct

SEQ ID NO: 28013 - DNA, 33 bp, Homo sapien
tagagatgtgaaatgactatcacaagtggaatg

SEQ ID NO: 28014 - DNA, 33 bp, Homo sapien
tagagatgtgaaatgagtatcacaagtggaatg

SEQ ID NO: 28015 - DNA, 33 bp, Homo sapien
ctgatcctttaacctaaagctttgcatttcaac

SEQ ID NO: 28016 - DNA, 33 bp, Homo sapien
ctgatcctttaacctagagctttgcatttcaac

SEQ ID NO: 28017 - DNA, 33 bp, Homo sapien
gaagttcaaaagttcacatactattttaactgc

SEQ ID NO: 28018 - DNA, 33 bp, Homo sapien
gaagttcaaaagttcagatactattttaactgc

SEQ ID NO: 28019 - DNA, 33 bp, Homo sapien
cacacaattagcccaaaatctttttaatacaat

SEQ ID NO: 28020 - DNA, 33 bp, Homo sapien
cacacaattagcccaacatctttttaatacaat

SEQ ID NO: 28021 - DNA, 33 bp, Homo sapien
taaaaacttggttcaaagcagggtgaaataatg

SEQ ID NO: 28022 - DNA, 33 bp, Homo sapien
taaaaacttggttcaaggcagggtgaaataatg

SEQ ID NO: 28023 - DNA, 33 bp, Homo sapien
ttatcgcttctcttcacgaagtatcaaatattt

SEQ ID NO: 28024 - DNA, 33 bp, Homo sapien
ttatcgcttctcttcatgaagtatcaaatattt

SEQ ID NO: 28025 - DNA, 33 bp, Homo sapien
gggacaaagagttagcaaaggcctgatagtgat

SEQ ID NO: 28026 - DNA, 33 bp, Homo sapien
gggacaaagagttagcgaaggcctgatagtgat

SEQ ID NO: 28027 - DNA, 33 bp, Homo sapien
tgtagctgtccaaatacgtacccaactcatttt

SEQ ID NO: 28028 - DNA, 33 bp, Homo sapien
tgtagctgtccaaatatgtacccaactcatttt

SEQ ID NO: 28029 - DNA, 33 bp, Homo sapien
aagctacctctaagaaatataatgtgtgcagtt

SEQ ID NO: 28030 - DNA, 33 bp, Homo sapien
aagctacctctaagaattataatgtgtgcagtt

SEQ ID NO: 28031 - DNA, 33 bp, Homo sapien
aacctgatgatactaaaactgaaaagacaattc

SEQ ID NO: 28032 - DNA, 33 bp, Homo sapien
aacctgatgatactaagactgaaaagacaattc

SEQ ID NO: 28033 - DNA, 33 bp, Homo sapien
cagtggtttttctcacagtcctaacatcttgct

SEQ ID NO: 28034 - DNA, 33 bp, Homo sapien
cagtggtttttctcacggtcctaacatcttgct

SEQ ID NO: 28035 - DNA, 33 bp, Homo sapien
tccgacaggaaacatacgtgtgtgaaatggata

SEQ ID NO: 28036 - DNA, 33 bp, Homo sapien
tccgacaggaaacatatgtgtgtgaaatggata

SEQ ID NO: 28037 - DNA, 33 bp, Homo sapien
atacagggcttgataaatatctccatagaccaa

SEQ ID NO: 28038 - DNA, 33 bp, Homo sapien
atacagggcttgataagtatctccatagaccaa

SEQ ID NO: 28039 - DNA, 33 bp, Homo sapien
tatgaacttgacacaaaactgaattaaaagtgc

SEQ ID NO: 28040 - DNA, 33 bp, Homo sapien
tatgaacttgacacaatactgaattaaaagtgc

SEQ ID NO: 28041 - DNA, 33 bp, Homo sapien
tcttttgatttgcctgcaatagggcccttgtgt

SEQ ID NO: 28042 - DNA, 33 bp, Homo sapien
tcttttgatttgcctgtaatagggcccttgtgt

SEQ ID NO: 28043 - DNA, 33 bp, Homo sapien
cgaagttgcccataaaccacttttggagaggct

SEQ ID NO: 28044 - DNA, 33 bp, Homo sapien
cgaagttgcccataaagcacttttggagaggct

SEQ ID NO: 28045 - DNA, 33 bp, Homo sapien
gaccgtgtctctttaaatattaggaatcacctt

SEQ ID NO: 28046 - DNA, 33 bp, Homo sapien
gaccgtgtctctttaagtattaggaatcacctt

SEQ ID NO: 28047 - DNA, 33 bp, Homo sapien
acaaagaactttcacaaacatggcctcattata

SEQ ID NO: 28048 - DNA, 33 bp, Homo sapien
acaaagaactttcacagacatggcctcattata

SEQ ID NO: 28049 - DNA, 33 bp, Homo sapien
ttaacaagaagagttcccagaagggtcagtttc

SEQ ID NO: 28050 - DNA, 33 bp, Homo sapien
ttaacaagaagagttctcagaagggtcagtttc

SEQ ID NO: 28051 - DNA, 33 bp, Homo sapien
tactacttgaaagttccatcttccgtaaataac

SEQ ID NO: 28052 - DNA, 33 bp, Homo sapien
tactacttgaaagttctatcttccgtaaataac

SEQ ID NO: 28053 - DNA, 33 bp, Homo sapien
tccctttcatagtcaccagatcttagtaataat

SEQ ID NO: 28054 - DNA, 33 bp, Homo sapien
tccctttcatagtcacgagatcttagtaataat

SEQ ID NO: 28055 - DNA, 33 bp, Homo sapien
ctagagatatatagaaaaaactgaaagcatggg

SEQ ID NO: 28056 - DNA, 33 bp, Homo sapien
ctagagatatatagaacaaactgaaagcatggg

SEQ ID NO: 28057 - DNA, 33 bp, Homo sapien
tttgtaaagcttcaggccacttggatcagcaca

SEQ ID NO: 28058 - DNA, 33 bp, Homo sapien
tttgtaaagcttcaggtcacttggatcagcaca

SEQ ID NO: 28059 - DNA, 33 bp, Homo sapien
ataatgtcccagccaacagaaaaatagactttg

SEQ ID NO: 28060 - DNA, 33 bp, Homo sapien
ataatgtcccagccaatagaaaaatagactttg

SEQ ID NO: 28061 - DNA, 33 bp, Homo sapien
taggaacaaaacatcaatatttaaatgtgacaa

SEQ ID NO: 28062 - DNA, 33 bp, Homo sapien
taggaacaaaacatcagtatttaaatgtgacaa

SEQ ID NO: 28063 - DNA, 33 bp, Homo sapien
aaagaaaatggcagcaaacaggtcaaagatagc

SEQ ID NO: 28064 - DNA, 33 bp, Homo sapien
aaagaaaatggcagcagacaggtcaaagatagc

SEQ ID NO: 28065 - DNA, 33 bp, Homo sapien
tgtaggtgctcccccaagttgatgggagtctgg

SEQ ID NO: 28066 - DNA, 33 bp, Homo sapien
tgtaggtgctcccccaggttgatgggagtctgg

SEQ ID NO: 28067 - DNA, 33 bp, Homo sapien
gctgaacactctttccaagaaggccaagtttcc

SEQ ID NO: 28068 - DNA, 33 bp, Homo sapien
gctgaacactctttccgagaaggccaagtttcc

SEQ ID NO: 28069 - DNA, 33 bp, Homo sapien
ctgggggcaccctcaacgtggactgtatgctct

SEQ ID NO: 28070 - DNA, 33 bp, Homo sapien
ctgggggcaccctcaatgtggactgtatgctct

SEQ ID NO: 28071 - DNA, 33 bp, Homo sapien
ggtgctacagatattacgttagcgcaaaactaa

SEQ ID NO: 28072 - DNA, 33 bp, Homo sapien
ggtgctacagatattatgttagcgcaaaactaa

SEQ ID NO: 28073 - DNA, 33 bp, Homo sapien
aaactgaatatatgcactactaagttggattca

SEQ ID NO: 28074 - DNA, 33 bp, Homo sapien
aaactgaatatatgcagtactaagttggattca

SEQ ID NO: 28075 - DNA, 33 bp, Homo sapien
taacccaaagatccaaaacagcaacaatactaa

SEQ ID NO: 28076 - DNA, 33 bp, Homo sapien
taacccaaagatccaacacagcaacaatactaa

SEQ ID NO: 28077 - DNA, 33 bp, Homo sapien
atttgaaggcaccagcaaatattatgtatgaag

SEQ ID NO: 28078 - DNA, 33 bp, Homo sapien
atttgaaggcaccagcgaatattatgtatgaag

SEQ ID NO: 28079 - DNA, 33 bp, Homo sapien
ggaagaccttaacagcaccaaagactgctggtt

SEQ ID NO: 28080 - DNA, 33 bp, Homo sapien
ggaagaccttaacagcgccaaagactgctggtt

SEQ ID NO: 28081 - DNA, 33 bp, Homo sapien
gatgtcttcagaaatacgtagcaatttcttaga

SEQ ID NO: 28082 - DNA, 33 bp, Homo sapien
gatgtcttcagaaatatgtagcaatttcttaga

SEQ ID NO: 28083 - DNA, 33 bp, Homo sapien
ttcttatgtcggcttaagaggataccaaagggg

SEQ ID NO: 28084 - DNA, 33 bp, Homo sapien
ttcttatgtcggcttaggaggataccaaagggg

SEQ ID NO: 28085 - DNA, 33 bp, Homo sapien
cataagaacagcatgacgggcagcaaatcaagc

SEQ ID NO: 28086 - DNA, 33 bp, Homo sapien
cataagaacagcatgatgggcagcaaatcaagc

SEQ ID NO: 28087 - DNA, 33 bp, Homo sapien
aaacttgtcccattaactgtttgcccatttagg

SEQ ID NO: 28088 - DNA, 33 bp, Homo sapien
aaacttgtcccattaattgtttgcccatttagg

SEQ ID NO: 28089 - DNA, 33 bp, Homo sapien
cttagaatgtatggataaccttaaggtgacaat

SEQ ID NO: 28090 - DNA, 33 bp, Homo sapien
cttagaatgtatggatgaccttaaggtgacaat

SEQ ID NO: 28091 - DNA, 33 bp, Homo sapien
tgtatgttattttatacgtgaattgtctgatct

SEQ ID NO: 28092 - DNA, 33 bp, Homo sapien
tgtatgttattttatatgtgaattgtctgatct

SEQ ID NO: 28093 - DNA, 33 bp, Homo sapien
gatagtatagccaaaaacagaagtcactcactc

SEQ ID NO: 28094 - DNA, 33 bp, Homo sapien
gatagtatagccaaaatcagaagtcactcactc

SEQ ID NO: 28095 - DNA, 33 bp, Homo sapien
gaaatgaaggattacacaaggattacatgataa

SEQ ID NO: 28096 - DNA, 33 bp, Homo sapien
gaaatgaaggattacataaggattacatgataa

SEQ ID NO: 28097 - DNA, 33 bp, Homo sapien
gatactccccaaagtcagaaacatcagataaag

SEQ ID NO: 28098 - DNA, 33 bp, Homo sapien
gatactccccaaagtcggaaacatcagataaag

SEQ ID NO: 28099 - DNA, 33 bp, Homo sapien
ctgagagtggcactaaagccgtaagttttggtc

SEQ ID NO: 28100 - DNA, 33 bp, Homo sapien
ctgagagtggcactaatgccgtaagttttggtc

SEQ ID NO: 28101 - DNA, 33 bp, Homo sapien
tcgaggtcaaatggacaaaagactgatttgaat

SEQ ID NO: 28102 - DNA, 33 bp, Homo sapien
tcgaggtcaaatggacgaaagactgatttgaat

SEQ ID NO: 28103 - DNA, 33 bp, Homo sapien
acatgggtgctgaacccagactttaccaatata

SEQ ID NO: 28104 - DNA, 33 bp, Homo sapien
acatgggtgctgaacctagactttaccaatata

SEQ ID NO: 28105 - DNA, 33 bp, Homo sapien
tgggaaacctctaaccaaacctctcttcaattt

SEQ ID NO: 28106 - DNA, 33 bp, Homo sapien
tgggaaacctctaaccgaacctctcttcaattt

SEQ ID NO: 28107 - DNA, 33 bp, Homo sapien
cattgtttctgataaactgacatgataaatata

SEQ ID NO: 28108 - DNA, 33 bp, Homo sapien
cattgtttctgataaattgacatgataaatata

SEQ ID NO: 28109 - DNA, 33 bp, Homo sapien
tctcattaacttcagactaagccataataacag

SEQ ID NO: 28110 - DNA, 33 bp, Homo sapien
tctcattaacttcagattaagccataataacag

SEQ ID NO: 28111 - DNA, 33 bp, Homo sapien
gttcaaataacatgaacaatggagaataaaagt

SEQ ID NO: 28112 - DNA, 33 bp, Homo sapien
gttcaaataacatgaagaatggagaataaaagt

SEQ ID NO: 28113 - DNA, 33 bp, Homo sapien
ttttgagagccttgagaaatgaggaattcacct

SEQ ID NO: 28114 - DNA, 33 bp, Homo sapien
ttttgagagccttgagcaatgaggaattcacct

SEQ ID NO: 28115 - DNA, 33 bp, Homo sapien
gtgaggtcaagattcaaatgtttacttttatag

SEQ ID NO: 28116 - DNA, 33 bp, Homo sapien
gtgaggtcaagattcagatgtttacttttatag

SEQ ID NO: 28117 - DNA, 33 bp, Homo sapien
gtccttgctatctgaaatcctcttctcctgcta

SEQ ID NO: 28118 - DNA, 33 bp, Homo sapien
gtccttgctatctgaactcctcttctcctgcta

SEQ ID NO: 28119 - DNA, 33 bp, Homo sapien
aatattcctaaatcaacttcctgatcatcccct

SEQ ID NO: 28120 - DNA, 33 bp, Homo sapien
aatattcctaaatcaagttcctgatcatcccct

SEQ ID NO: 28121 - DNA, 33 bp, Homo sapien
ccaagatcttgaaattcaatgtctagaggtgct

SEQ ID NO: 28122 - DNA, 33 bp, Homo sapien
ccaagatcttgaaattgaatgtctagaggtgct

SEQ ID NO: 28123 - DNA, 33 bp, Homo sapien
tgaattgggattaatacggtagagttgttcaca

SEQ ID NO: 28124 - DNA, 33 bp, Homo sapien
tgaattgggattaatatggtagagttgttcaca

SEQ ID NO: 28125 - DNA, 33 bp, Homo sapien
atgaagagtggatttcactgtaatctaatttgc

SEQ ID NO: 28126 - DNA, 33 bp, Homo sapien
atgaagagtggatttcgctgtaatctaatttgc

SEQ ID NO: 28127 - DNA, 33 bp, Homo sapien
gtaattaatatcagtgcatcaaaaacattataa

SEQ ID NO: 28128 - DNA, 33 bp, Homo sapien
gtaattaatatcagtggatcaaaaacattataa

SEQ ID NO: 28129 - DNA, 33 bp, Homo sapien
gagggagagggagtaacggttaatgaggatcag

SEQ ID NO: 28130 - DNA, 33 bp, Homo sapien
gagggagagggagtaatggttaatgaggatcag

SEQ ID NO: 28131 - DNA, 33 bp, Homo sapien
tgtagatatgaaatgccagggtgattgtcccca

SEQ ID NO: 28132 - DNA, 33 bp, Homo sapien
tgtagatatgaaatgctagggtgattgtcccca

SEQ ID NO: 28133 - DNA, 33 bp, Homo sapien
ggtgctcaggataacacagatatacaaaaactt

SEQ ID NO: 28134 - DNA, 33 bp, Homo sapien
ggtgctcaggataacagagatatacaaaaactt

SEQ ID NO: 28135 - DNA, 33 bp, Homo sapien
attgccttcatgattacctctcatgcctgtagc

SEQ ID NO: 28136 - DNA, 33 bp, Homo sapien
attgccttcatgattatctctcatgcctgtagc

SEQ ID NO: 28137 - DNA, 33 bp, Homo sapien
cattgcatagggaagacacactgccttcactac

SEQ ID NO: 28138 - DNA, 33 bp, Homo sapien
cattgcatagggaagagacactgccttcactac

SEQ ID NO: 28139 - DNA, 33 bp, Homo sapien
cacagctccctatagtgaaagatccgtaacctt

SEQ ID NO: 28140 - DNA, 33 bp, Homo sapien
cacagctccctatagttaaagatccgtaacctt

SEQ ID NO: 28141 - DNA, 33 bp, Homo sapien
ttgggcttcacataccacgcttgagttcagtga

SEQ ID NO: 28142 - DNA, 33 bp, Homo sapien
ttgggcttcacataccgcgcttgagttcagtga

SEQ ID NO: 28143 - DNA, 33 bp, Homo sapien
cacctaattattttcacgcaggagtaacacatt

SEQ ID NO: 28144 - DNA, 33 bp, Homo sapien
cacctaattattttcaggcaggagtaacacatt

SEQ ID NO: 28145 - DNA, 33 bp, Homo sapien
cctaccattctgaggaaattacacaggaaataa

SEQ ID NO: 28146 - DNA, 33 bp, Homo sapien
cctaccattctgaggatattacacaggaaataa

SEQ ID NO: 28147 - DNA, 33 bp, Homo sapien
tcaagtctaactgagactcaaaaaaatttaggt

SEQ ID NO: 28148 - DNA, 33 bp, Homo sapien
tcaagtctaactgagagtcaaaaaaatttaggt

SEQ ID NO: 28149 - DNA, 33 bp, Homo sapien
taaattacattagcaaaccatacatacattttc

SEQ ID NO: 28150 - DNA, 33 bp, Homo sapien
taaattacattagcaagccatacatacattttc

SEQ ID NO: 28151 - DNA, 33 bp, Homo sapien
tattcatttatttggagaaatcttgtttgcaat

SEQ ID NO: 28152 - DNA, 33 bp, Homo sapien
tattcatttatttggataaatcttgtttgcaat

SEQ ID NO: 28153 - DNA, 33 bp, Homo sapien
gcaggataagctaaaacaagaatggaaaatgta

SEQ ID NO: 28154 - DNA, 33 bp, Homo sapien
gcaggataagctaaaataagaatggaaaatgta

SEQ ID NO: 28155 - DNA, 33 bp, Homo sapien
aagaaagggatgcttacctcatatttaatgctt

SEQ ID NO: 28156 - DNA, 33 bp, Homo sapien
aagaaagggatgcttatctcatatttaatgctt

SEQ ID NO: 28157 - DNA, 33 bp, Homo sapien
gcaggggccttacctacggtctggagctctgta

SEQ ID NO: 28158 - DNA, 33 bp, Homo sapien
gcaggggccttacctatggtctggagctctgta

SEQ ID NO: 28159 - DNA, 33 bp, Homo sapien
tggctttatggtagccactgttacgccataaac

SEQ ID NO: 28160 - DNA, 33 bp, Homo sapien
tggctttatggtagccgctgttacgccataaac

SEQ ID NO: 28161 - DNA, 33 bp, Homo sapien
gaaaaataatcgggaagtatctcatcattttat

SEQ ID NO: 28162 - DNA, 33 bp, Homo sapien
gaaaaataatcgggaattatctcatcattttat

SEQ ID NO: 28163 - DNA, 33 bp, Homo sapien
gaatgtgttctgtccaagtacaaatctcatcat

SEQ ID NO: 28164 - DNA, 33 bp, Homo sapien
gaatgtgttctgtccacgtacaaatctcatcat

SEQ ID NO: 28165 - DNA, 33 bp, Homo sapien
ttaaaacacaaaatgccatttactcatcaggtt

SEQ ID NO: 28166 - DNA, 33 bp, Homo sapien
ttaaaacacaaaatgctatttactcatcaggtt

SEQ ID NO: 28167 - DNA, 33 bp, Homo sapien
catctgcttgtacctaccaagtttagcacattc

SEQ ID NO: 28168 - DNA, 33 bp, Homo sapien
catctgcttgtacctatcaagtttagcacattc

SEQ ID NO: 28169 - DNA, 33 bp, Homo sapien
aaagacacaatgacacagtagcataatacagaa

SEQ ID NO: 28170 - DNA, 33 bp, Homo sapien
aaagacacaatgacacggtagcataatacagaa

SEQ ID NO: 28171 - DNA, 33 bp, Homo sapien
aggatctatgctcaaaatcttttttaaactttt

SEQ ID NO: 28172 - DNA, 33 bp, Homo sapien
aggatctatgctcaaattcttttttaaactttt

SEQ ID NO: 28173 - DNA, 33 bp, Homo sapien
gtcatggagctcttatcagtttcagctttactg

SEQ ID NO: 28174 - DNA, 33 bp, Homo sapien
gtcatggagctcttattagtttcagctttactg

SEQ ID NO: 28175 - DNA, 33 bp, Homo sapien
aatatattgttaatcacgatcaatttgagtgtt

SEQ ID NO: 28176 - DNA, 33 bp, Homo sapien
aatatattgttaatcatgatcaatttgagtgtt

SEQ ID NO: 28177 - DNA, 33 bp, Homo sapien
aacgtgtagacaggtacataaaactggaaaatt

SEQ ID NO: 28178 - DNA, 33 bp, Homo sapien
aacgtgtagacaggtatataaaactggaaaatt

SEQ ID NO: 28179 - DNA, 33 bp, Homo sapien
taacatgaaatcgttacaaggatgagctaggtc

SEQ ID NO: 28180 - DNA, 33 bp, Homo sapien
taacatgaaatcgttataaggatgagctaggtc

SEQ ID NO: 28181 - DNA, 33 bp, Homo sapien
gaagatttttatgagactatggggaacactttc

SEQ ID NO: 28182 - DNA, 33 bp, Homo sapien
gaagatttttatgagattatggggaacactttc

SEQ ID NO: 28183 - DNA, 33 bp, Homo sapien
gaaagctagtggtctaaagtctgtatgccctcc

SEQ ID NO: 28184 - DNA, 33 bp, Homo sapien
gaaagctagtggtctagagtctgtatgccctcc

SEQ ID NO: 28185 - DNA, 33 bp, Homo sapien
catataaaattagaacaactcttcaattcatat

SEQ ID NO: 28186 - DNA, 33 bp, Homo sapien
catataaaattagaacgactcttcaattcatat

SEQ ID NO: 28187 - DNA, 33 bp, Homo sapien
cctttgagactagatccaccttttttattgctt

SEQ ID NO: 28188 - DNA, 33 bp, Homo sapien
cctttgagactagatcgaccttttttattgctt

SEQ ID NO: 28189 - DNA, 33 bp, Homo sapien
ataataagccttttggaaattaactcaaatata

SEQ ID NO: 28190 - DNA, 33 bp, Homo sapien
ataataagccttttgggaattaactcaaatata

SEQ ID NO: 28191 - DNA, 33 bp, Homo sapien
attctactactaccagaaatataatagttgcat

SEQ ID NO: 28192 - DNA, 33 bp, Homo sapien
attctactactaccagcaatataatagttgcat

SEQ ID NO: 28193 - DNA, 33 bp, Homo sapien
aatagattgctttaaaatagagaaaaacacact

SEQ ID NO: 28194 - DNA, 33 bp, Homo sapien
aatagattgctttaaactagagaaaaacacact

SEQ ID NO: 28195 - DNA, 33 bp, Homo sapien
ctatgtgggattactaaaacaattacaatcatc

SEQ ID NO: 28196 - DNA, 33 bp, Homo sapien
ctatgtgggattactacaacaattacaatcatc

SEQ ID NO: 28197 - DNA, 33 bp, Homo sapien
tgaagcctcagttttacgttcgatttgtaggac

SEQ ID NO: 28198 - DNA, 33 bp, Homo sapien
tgaagcctcagttttatgttcgatttgtaggac

SEQ ID NO: 28199 - DNA, 33 bp, Homo sapien
ctgagagtttacagaacgatcccagagataaag

SEQ ID NO: 28200 - DNA, 33 bp, Homo sapien
ctgagagtttacagaatgatcccagagataaag

SEQ ID NO: 28201 - DNA, 33 bp, Homo sapien
tatttatttggtttcacagtatgtcaaacagct

SEQ ID NO: 28202 - DNA, 33 bp, Homo sapien
tatttatttggtttcatagtatgtcaaacagct

SEQ ID NO: 28203 - DNA, 33 bp, Homo sapien
actcttcttcctctatcagtcctaagatgttgc

SEQ ID NO: 28204 - DNA, 33 bp, Homo sapien
actcttcttcctctatgagtcctaagatgttgc

SEQ ID NO: 28205 - DNA, 33 bp, Homo sapien
ccaagtgcagcactaacatgattcagtttccca

SEQ ID NO: 28206 - DNA, 33 bp, Homo sapien
ccaagtgcagcactaagatgattcagtttccca

SEQ ID NO: 28207 - DNA, 33 bp, Homo sapien
ttatcacagcgtctctaaagagctgcattctat

SEQ ID NO: 28208 - DNA, 33 bp, Homo sapien
ttatcacagcgtctctgaagagctgcattctat

SEQ ID NO: 28209 - DNA, 33 bp, Homo sapien
ctctttatggaagctcaaaacacatataccaga

SEQ ID NO: 28210 - DNA, 33 bp, Homo sapien
ctctttatggaagctcgaaacacatataccaga

SEQ ID NO: 28211 - DNA, 33 bp, Homo sapien
tttctattcagactgacggcagtttgctgtcct

SEQ ID NO: 28212 - DNA, 33 bp, Homo sapien
tttctattcagactgatggcagtttgctgtcct

SEQ ID NO: 28213 - DNA, 33 bp, Homo sapien
agaaagggtaggtaaccgcctcaagtcacacaa

SEQ ID NO: 28214 - DNA, 33 bp, Homo sapien
agaaagggtaggtaactgcctcaagtcacacaa

SEQ ID NO: 28215 - DNA, 33 bp, Homo sapien
aatggcattggcaatgaaaaggaggaatattag

SEQ ID NO: 28216 - DNA, 33 bp, Homo sapien
aatggcattggcaatggaaaggaggaatattag

SEQ ID NO: 28217 - DNA, 33 bp, Homo sapien
ctggaaatcagatttacaataatggaattgaca

SEQ ID NO: 28218 - DNA, 33 bp, Homo sapien
ctggaaatcagatttataataatggaattgaca

SEQ ID NO: 28219 - DNA, 33 bp, Homo sapien
gtcagaaaaggatccacggagatataattgcag

SEQ ID NO: 28220 - DNA, 33 bp, Homo sapien
gtcagaaaaggatccagggagatataattgcag

SEQ ID NO: 28221 - DNA, 33 bp, Homo sapien
catttcacttctacaactccagagtggcatggg

SEQ ID NO: 28222 - DNA, 33 bp, Homo sapien
catttcacttctacaattccagagtggcatggg

SEQ ID NO: 28223 - DNA, 33 bp, Homo sapien
ggtgatccctagtttacggtgtcaaatgcagca

SEQ ID NO: 28224 - DNA, 33 bp, Homo sapien
ggtgatccctagtttatggtgtcaaatgcagca

SEQ ID NO: 28225 - DNA, 33 bp, Homo sapien
ttcttgatcaaactgacgtaggaagagagagaa

SEQ ID NO: 28226 - DNA, 33 bp, Homo sapien
ttcttgatcaaactgatgtaggaagagagagaa

SEQ ID NO: 28227 - DNA, 33 bp, Homo sapien
attcctgcacaggagaactgagtagcttcttga

SEQ ID NO: 28228 - DNA, 33 bp, Homo sapien
attcctgcacaggagatctgagtagcttcttga

SEQ ID NO: 28229 - DNA, 33 bp, Homo sapien
gattttctgaagtttgaatataaaggccttttg

SEQ ID NO: 28230 - DNA, 33 bp, Homo sapien
gattttctgaagtttgtatataaaggccttttg

SEQ ID NO: 28231 - DNA, 33 bp, Homo sapien
ccacaaaaaattctgcaaaaactacaacttcac

SEQ ID NO: 28232 - DNA, 33 bp, Homo sapien
ccacaaaaaattctgcgaaaactacaacttcac

SEQ ID NO: 28233 - DNA, 33 bp, Homo sapien
gcacaagttcttgataacaaaactaccacaaaa

SEQ ID NO: 28234 - DNA, 33 bp, Homo sapien
gcacaagttcttgatagcaaaactaccacaaaa

SEQ ID NO: 28235 - DNA, 33 bp, Homo sapien
gacagttagggagtaacacgagtcagtacacaa

SEQ ID NO: 28236 - DNA, 33 bp, Homo sapien
gacagttagggagtaatacgagtcagtacacaa

SEQ ID NO: 28237 - DNA, 33 bp, Homo sapien
gtcattggtggtctaccgcaaaaataagaacag

SEQ ID NO: 28238 - DNA, 33 bp, Homo sapien
gtcattggtggtctactgcaaaaataagaacag

SEQ ID NO: 28239 - DNA, 33 bp, Homo sapien
actgaagctatgaaggacatttctgacttttta

SEQ ID NO: 28240 - DNA, 33 bp, Homo sapien
actgaagctatgaagggcatttctgacttttta

SEQ ID NO: 28241 - DNA, 33 bp, Homo sapien
tttgcatactacccaacccttttgtaaatacac

SEQ ID NO: 28242 - DNA, 33 bp, Homo sapien
tttgcatactacccaatccttttgtaaatacac

SEQ ID NO: 28243 - DNA, 33 bp, Homo sapien
tagactaggtgagttacaagcaatggaaattta

SEQ ID NO: 28244 - DNA, 33 bp, Homo sapien
tagactaggtgagttataagcaatggaaattta

SEQ ID NO: 28245 - DNA, 33 bp, Homo sapien
atcagttagctagacactagacttcatgaggag

SEQ ID NO: 28246 - DNA, 33 bp, Homo sapien
atcagttagctagacattagacttcatgaggag

SEQ ID NO: 28247 - DNA, 33 bp, Homo sapien
ctgggcacaatacctgacagatcaggacagatc

SEQ ID NO: 28248 - DNA, 33 bp, Homo sapien
ctgggcacaatacctggcagatcaggacagatc

SEQ ID NO: 28249 - DNA, 33 bp, Homo sapien
ctgcagatttggattacagacttgctttggtct

SEQ ID NO: 28250 - DNA, 33 bp, Homo sapien
ctgcagatttggattagagacttgctttggtct

SEQ ID NO: 28251 - DNA, 33 bp, Homo sapien
ttcatgtcagtgcaccacattcctggtgagagt

SEQ ID NO: 28252 - DNA, 33 bp, Homo sapien
ttcatgtcagtgcaccgcattcctggtgagagt

SEQ ID NO: 28253 - DNA, 33 bp, Homo sapien
gttcatttatatgcacaataccacattttgtag

SEQ ID NO: 28254 - DNA, 33 bp, Homo sapien
gttcatttatatgcacgataccacattttgtag

SEQ ID NO: 28255 - DNA, 33 bp, Homo sapien
catctgtatataaaggaagcttagcaaatgttt

SEQ ID NO: 28256 - DNA, 33 bp, Homo sapien
catctgtatataaaggtagcttagcaaatgttt

SEQ ID NO: 28257 - DNA, 33 bp, Homo sapien
gctggcaaagtgcgacaagctcaagcgataata

SEQ ID NO: 28258 - DNA, 33 bp, Homo sapien
gctggcaaagtgcgaccagctcaagcgataata

SEQ ID NO: 28259 - DNA, 33 bp, Homo sapien
tgaaagtatttccagaagagattggcatttgaa

SEQ ID NO: 28260 - DNA, 33 bp, Homo sapien
tgaaagtatttccagacgagattggcatttgaa

SEQ ID NO: 28261 - DNA, 33 bp, Homo sapien
tgtttgtattcactagaagccctgctgcatgtg

SEQ ID NO: 28262 - DNA, 33 bp, Homo sapien
tgtttgtattcactaggagccctgctgcatgtg

SEQ ID NO: 28263 - DNA, 33 bp, Homo sapien
caaatgtaacactcacaaagtatttcctttcca

SEQ ID NO: 28264 - DNA, 33 bp, Homo sapien
caaatgtaacactcacgaagtatttcctttcca

SEQ ID NO: 28265 - DNA, 33 bp, Homo sapien
caacagcaacaaaaaaacaagcaaaggctgaat

SEQ ID NO: 28266 - DNA, 33 bp, Homo sapien
caacagcaacaaaaaatcaagcaaaggctgaat

SEQ ID NO: 28267 - DNA, 33 bp, Homo sapien
ctagaaaagctgagaaccgaggggagtctcaaa

SEQ ID NO: 28268 - DNA, 33 bp, Homo sapien
ctagaaaagctgagaatcgaggggagtctcaaa

SEQ ID NO: 28269 - DNA, 33 bp, Homo sapien
tcctgaactaaaatatcagccccagcactgcac

SEQ ID NO: 28270 - DNA, 33 bp, Homo sapien
tcctgaactaaaatattagccccagcactgcac

SEQ ID NO: 28271 - DNA, 33 bp, Homo sapien
ggaccatgctcaccaaaacaataggaagaagat

SEQ ID NO: 28272 - DNA, 33 bp, Homo sapien
ggaccatgctcaccaagacaataggaagaagat

SEQ ID NO: 28273 - DNA, 33 bp, Homo sapien
agtggctgttaccaacaatgtccatggcagcag

SEQ ID NO: 28274 - DNA, 33 bp, Homo sapien
agtggctgttaccaactatgtccatggcagcag

SEQ ID NO: 28275 - DNA, 33 bp, Homo sapien
gctgcacctcccagagacctacagtttactctc

SEQ ID NO: 28276 - DNA, 33 bp, Homo sapien
gctgcacctcccagaggcctacagtttactctc

SEQ ID NO: 28277 - DNA, 33 bp, Homo sapien
cctctttactccagaaccttttagtgtcatttc

SEQ ID NO: 28278 - DNA, 33 bp, Homo sapien
cctctttactccagaatcttttagtgtcatttc

SEQ ID NO: 28279 - DNA, 33 bp, Homo sapien
tgggttcaatacgtggaagccacaatggttttt

SEQ ID NO: 28280 - DNA, 33 bp, Homo sapien
tgggttcaatacgtggcagccacaatggttttt

SEQ ID NO: 28281 - DNA, 33 bp, Homo sapien
cagtatttgtttaacaatgaggccagttttacc

SEQ ID NO: 28282 - DNA, 33 bp, Homo sapien
cagtatttgtttaacagtgaggccagttttacc

SEQ ID NO: 28283 - DNA, 33 bp, Homo sapien
agcctttctgtgtcaccgagattgatgcgtccg

SEQ ID NO: 28284 - DNA, 33 bp, Homo sapien
agcctttctgtgtcactgagattgatgcgtccg

SEQ ID NO: 28285 - DNA, 33 bp, Homo sapien
tgtagctgagttctccaagatacaaggtccttt

SEQ ID NO: 28286 - DNA, 33 bp, Homo sapien
tgtagctgagttctccgagatacaaggtccttt

SEQ ID NO: 28287 - DNA, 33 bp, Homo sapien
tgtgtggtttctgttaccttcctatcttctatt

SEQ ID NO: 28288 - DNA, 33 bp, Homo sapien
tgtgtggtttctgttatcttcctatcttctatt

SEQ ID NO: 28289 - DNA, 33 bp, Homo sapien
tagaataactgatcgacagctttttatatagga

SEQ ID NO: 28290 - DNA, 33 bp, Homo sapien
tagaataactgatcgatagctttttatatagga

SEQ ID NO: 28291 - DNA, 33 bp, Homo sapien
ctccaaccctggatcaaaggaaaccattactcc

SEQ ID NO: 28292 - DNA, 33 bp, Homo sapien
ctccaaccctggatcagaggaaaccattactcc

SEQ ID NO: 28293 - DNA, 33 bp, Homo sapien
tagttcccatcactcacaggacaattatttgct

SEQ ID NO: 28294 - DNA, 33 bp, Homo sapien
tagttcccatcactcagaggacaattatttgct

SEQ ID NO: 28295 - DNA, 33 bp, Homo sapien
tcaggccacacctgctcactgagaaacagtgct

SEQ ID NO: 28296 - DNA, 33 bp, Homo sapien
tcaggccacacctgctgactgagaaacagtgct

SEQ ID NO: 28297 - DNA, 33 bp, Homo sapien
aaaactttaggcagaacggagaggaagagaaaa

SEQ ID NO: 28298 - DNA, 33 bp, Homo sapien
aaaactttaggcagaatggagaggaagagaaaa

SEQ ID NO: 28299 - DNA, 33 bp, Homo sapien
cagtgaattgcaacaactaaatggccactgtga

SEQ ID NO: 28300 - DNA, 33 bp, Homo sapien
cagtgaattgcaacaagtaaatggccactgtga

SEQ ID NO: 28301 - DNA, 33 bp, Homo sapien
gatccttatctgcacaaccattgaagaaaaaaa

SEQ ID NO: 28302 - DNA, 33 bp, Homo sapien
gatccttatctgcacagccattgaagaaaaaaa

SEQ ID NO: 28303 - DNA, 33 bp, Homo sapien
ttaggcaagatagtaacgcttgatggtaacttc

SEQ ID NO: 28304 - DNA, 33 bp, Homo sapien
ttaggcaagatagtaatgcttgatggtaacttc

SEQ ID NO: 28305 - DNA, 33 bp, Homo sapien
atttacccgtggcttcaaaatctgtatacagtt

SEQ ID NO: 28306 - DNA, 33 bp, Homo sapien
atttacccgtggcttcgaaatctgtatacagtt

SEQ ID NO: 28307 - DNA, 33 bp, Homo sapien
ttttgacagcttaaaacagtagaagatcagagt

SEQ ID NO: 28308 - DNA, 33 bp, Homo sapien
ttttgacagcttaaaagagtagaagatcagagt

SEQ ID NO: 28309 - DNA, 33 bp, Homo sapien
attggaatagaatgtacagtgagaggcagacag

SEQ ID NO: 28310 - DNA, 33 bp, Homo sapien
attggaatagaatgtagagtgagaggcagacag

SEQ ID NO: 28311 - DNA, 33 bp, Homo sapien
aatgtctataatccaactcccaagattagtaga

SEQ ID NO: 28312 - DNA, 33 bp, Homo sapien
aatgtctataatccaattcccaagattagtaga

SEQ ID NO: 28313 - DNA, 33 bp, Homo sapien
aagaaaatctgtgtgacggggtacagtaatcat

SEQ ID NO: 28314 - DNA, 33 bp, Homo sapien
aagaaaatctgtgtgatggggtacagtaatcat

SEQ ID NO: 28315 - DNA, 33 bp, Homo sapien
aagtacagaggcttaaatcacctgaaattttac

SEQ ID NO: 28316 - DNA, 33 bp, Homo sapien
aagtacagaggcttaagtcacctgaaattttac

SEQ ID NO: 28317 - DNA, 33 bp, Homo sapien
atatataaaggcaaaactatcagcatcacttac

SEQ ID NO: 28318 - DNA, 33 bp, Homo sapien
atatataaaggcaaaattatcagcatcacttac

SEQ ID NO: 28319 - DNA, 33 bp, Homo sapien
tcatttactcattgaacgtaaaacaggtaatcc

SEQ ID NO: 28320 - DNA, 33 bp, Homo sapien
tcatttactcattgaatgtaaaacaggtaatcc

SEQ ID NO: 28321 - DNA, 33 bp, Homo sapien
aattaaactttggaaacatcttaatctgtagtg

SEQ ID NO: 28322 - DNA, 33 bp, Homo sapien
aattaaactttggaaagatcttaatctgtagtg

SEQ ID NO: 28323 - DNA, 33 bp, Homo sapien
tagacttaacttatcccaattcaacattgtatt

SEQ ID NO: 28324 - DNA, 33 bp, Homo sapien
tagacttaacttatcctaattcaacattgtatt

SEQ ID NO: 28325 - DNA, 33 bp, Homo sapien
tgactgattacctcataaagatcctcgtggagc

SEQ ID NO: 28326 - DNA, 33 bp, Homo sapien
tgactgattacctcatgaagatcctcgtggagc

SEQ ID NO: 28327 - DNA, 33 bp, Homo sapien
aaggttgccatcggaaccaggaatgacattact

SEQ ID NO: 28328 - DNA, 33 bp, Homo sapien
aaggttgccatcggaatcaggaatgacattact

SEQ ID NO: 28329 - DNA, 33 bp, Homo sapien
tattaccttattttcaatccccacaataaccct

SEQ ID NO: 28330 - DNA, 33 bp, Homo sapien
tattaccttattttcagtccccacaataaccct

SEQ ID NO: 28331 - DNA, 33 bp, Homo sapien
tataggaaatagttcccaagaggtgagacatat

SEQ ID NO: 28332 - DNA, 33 bp, Homo sapien
tataggaaatagttcctaagaggtgagacatat

SEQ ID NO: 28333 - DNA, 33 bp, Homo sapien
ggtacattaaaaagcactgactgcagaatctcc

SEQ ID NO: 28334 - DNA, 33 bp, Homo sapien
ggtacattaaaaagcattgactgcagaatctcc

SEQ ID NO: 28335 - DNA, 33 bp, Homo sapien
gtccttcaatgaaagaccatcttccgcttgcag

SEQ ID NO: 28336 - DNA, 33 bp, Homo sapien
gtccttcaatgaaagatcatcttccgcttgcag

SEQ ID NO: 28337 - DNA, 33 bp, Homo sapien
tgattatcattatgcaaggatattgtataaata

SEQ ID NO: 28338 - DNA, 33 bp, Homo sapien
tgattatcattatgcagggatattgtataaata

SEQ ID NO: 28339 - DNA, 33 bp, Homo sapien
accctaattgtagcaccgaccacaatgtacagt

SEQ ID NO: 28340 - DNA, 33 bp, Homo sapien
accctaattgtagcactgaccacaatgtacagt

SEQ ID NO: 28341 - DNA, 33 bp, Homo sapien
tcaaaatggtgctacaaatttaaggcattattg

SEQ ID NO: 28342 - DNA, 33 bp, Homo sapien
tcaaaatggtgctacagatttaaggcattattg

SEQ ID NO: 28343 - DNA, 33 bp, Homo sapien
cctactgcaaaaatcaaaaatccataatgatat

SEQ ID NO: 28344 - DNA, 33 bp, Homo sapien
cctactgcaaaaatcagaaatccataatgatat

SEQ ID NO: 28345 - DNA, 33 bp, Homo sapien
cctttagcttgtttgcagacagcagtagttccc

SEQ ID NO: 28346 - DNA, 33 bp, Homo sapien
cctttagcttgtttgcggacagcagtagttccc

SEQ ID NO: 28347 - DNA, 33 bp, Homo sapien
ccaacataatatgacagctagtcaactactgat

SEQ ID NO: 28348 - DNA, 33 bp, Homo sapien
ccaacataatatgacatctagtcaactactgat

SEQ ID NO: 28349 - DNA, 33 bp, Homo sapien
atgcttagaaatgaaaaccattgaataactctc

SEQ ID NO: 28350 - DNA, 33 bp, Homo sapien
atgcttagaaatgaaagccattgaataactctc

SEQ ID NO: 28351 - DNA, 33 bp, Homo sapien
tgtactaggcactttgaatacaatttctcactt

SEQ ID NO: 28352 - DNA, 33 bp, Homo sapien
tgtactaggcactttgcatacaatttctcactt

SEQ ID NO: 28353 - DNA, 33 bp, Homo sapien
gaagctgataatagaaagatgtctcggaaggag

SEQ ID NO: 28354 - DNA, 33 bp, Homo sapien
gaagctgataatagaaggatgtctcggaaggag

SEQ ID NO: 28355 - DNA, 33 bp, Homo sapien
tcctcttggatttctaccaggagaagggccagt

SEQ ID NO: 28356 - DNA, 33 bp, Homo sapien
tcctcttggatttctatcaggagaagggccagt

SEQ ID NO: 28357 - DNA, 33 bp, Homo sapien
aaacacagaagagtctcaataatttgtgagata

SEQ ID NO: 28358 - DNA, 33 bp, Homo sapien
aaacacagaagagtcttaataatttgtgagata

SEQ ID NO: 28359 - DNA, 33 bp, Homo sapien
cacttcatgttgaaatcatggtctctgcccagg

SEQ ID NO: 28360 - DNA, 33 bp, Homo sapien
cacttcatgttgaaattatggtctctgcccagg

SEQ ID NO: 28361 - DNA, 33 bp, Homo sapien
tattctccccacttccacacagaacgaggcctt

SEQ ID NO: 28362 - DNA, 33 bp, Homo sapien
tattctccccacttccgcacagaacgaggcctt

SEQ ID NO: 28363 - DNA, 33 bp, Homo sapien
gttttcatgtcgggagcacgagtgccggtttct

SEQ ID NO: 28364 - DNA, 33 bp, Homo sapien
gttttcatgtcgggagtacgagtgccggtttct

SEQ ID NO: 28365 - DNA, 33 bp, Homo sapien
acattaagagtgataaaagaatgtacacttcta

SEQ ID NO: 28366 - DNA, 33 bp, Homo sapien
acattaagagtgataagagaatgtacacttcta

SEQ ID NO: 28367 - DNA, 33 bp, Homo sapien
acacagtgacaaatatgactagatcttgaggag

SEQ ID NO: 28368 - DNA, 33 bp, Homo sapien
acacagtgacaaatattactagatcttgaggag

SEQ ID NO: 28369 - DNA, 33 bp, Homo sapien
actaataaaattaggactcatgctccctgtgaa

SEQ ID NO: 28370 - DNA, 33 bp, Homo sapien
actaataaaattaggattcatgctccctgtgaa

SEQ ID NO: 28371 - DNA, 33 bp, Homo sapien
atgtcccttttatagacgtgaaaattaggattc

SEQ ID NO: 28372 - DNA, 33 bp, Homo sapien
atgtcccttttatagatgtgaaaattaggattc

SEQ ID NO: 28373 - DNA, 33 bp, Homo sapien
aacgaactcactaaacaagtaccaacaagttac

SEQ ID NO: 28374 - DNA, 33 bp, Homo sapien
aacgaactcactaaacgagtaccaacaagttac

SEQ ID NO: 28375 - DNA, 33 bp, Homo sapien
atgttgggctcgatgaagccttgaacatagctg

SEQ ID NO: 28376 - DNA, 33 bp, Homo sapien
atgttgggctcgatgaggccttgaacatagctg

SEQ ID NO: 28377 - DNA, 33 bp, Homo sapien
ctccattttgctactacgttagacaggcaataa

SEQ ID NO: 28378 - DNA, 33 bp, Homo sapien
ctccattttgctactatgttagacaggcaataa

SEQ ID NO: 28379 - DNA, 33 bp, Homo sapien
ccaactgaattaaagacgtcacattcaattttc

SEQ ID NO: 28380 - DNA, 33 bp, Homo sapien
ccaactgaattaaagatgtcacattcaattttc

SEQ ID NO: 28381 - DNA, 33 bp, Homo sapien
gcacaaacagttcaaaacattaaatattgactc

SEQ ID NO: 28382 - DNA, 33 bp, Homo sapien
gcacaaacagttcaaatcattaaatattgactc

SEQ ID NO: 28383 - DNA, 33 bp, Homo sapien
catctttactgaatcacggcaaataatttgggg

SEQ ID NO: 28384 - DNA, 33 bp, Homo sapien
catctttactgaatcatggcaaataatttgggg

SEQ ID NO: 28385 - DNA, 33 bp, Homo sapien
aacattaatgatagtccgacagtactcctcatg

SEQ ID NO: 28386 - DNA, 33 bp, Homo sapien
aacattaatgatagtctgacagtactcctcatg

SEQ ID NO: 28387 - DNA, 33 bp, Homo sapien
ctcaaagctttcagaacaagagcacaattgcta

SEQ ID NO: 28388 - DNA, 33 bp, Homo sapien
ctcaaagctttcagaagaagagcacaattgcta

SEQ ID NO: 28389 - DNA, 33 bp, Homo sapien
ggattatttagctcaccgtactgtaggctgaga

SEQ ID NO: 28390 - DNA, 33 bp, Homo sapien
ggattatttagctcacggtactgtaggctgaga

SEQ ID NO: 28391 - DNA, 33 bp, Homo sapien
gtttggtttagctgaaatatagttgggctgggg

SEQ ID NO: 28392 - DNA, 33 bp, Homo sapien
gtttggtttagctgaagtatagttgggctgggg

SEQ ID NO: 28393 - DNA, 33 bp, Homo sapien
aatggaaatcttatggaagcattttcaatttag

SEQ ID NO: 28394 - DNA, 33 bp, Homo sapien
aatggaaatcttatgggagcattttcaatttag

SEQ ID NO: 28395 - DNA, 33 bp, Homo sapien
agcagtggcgcttcaggattccatggtttaatg

SEQ ID NO: 28396 - DNA, 33 bp, Homo sapien
agcagtggcgcttcagtattccatggtttaatg

SEQ ID NO: 28397 - DNA, 33 bp, Homo sapien
ctcagcaaggcaagtaagccaacggtctaaaaa

SEQ ID NO: 28398 - DNA, 33 bp, Homo sapien
ctcagcaaggcaagtaggccaacggtctaaaaa

SEQ ID NO: 28399 - DNA, 33 bp, Homo sapien
tctctgattgaataggccattcttacaagattc

SEQ ID NO: 28400 - DNA, 33 bp, Homo sapien
tctctgattgaataggtcattcttacaagattc

SEQ ID NO: 28401 - DNA, 33 bp, Homo sapien
agcatcatgttatagacggaacaaattcagcct

SEQ ID NO: 28402 - DNA, 33 bp, Homo sapien
agcatcatgttatagagggaacaaattcagcct

SEQ ID NO: 28403 - DNA, 33 bp, Homo sapien
ctatgacatggctagaacactgaaacaagactt

SEQ ID NO: 28404 - DNA, 33 bp, Homo sapien
ctatgacatggctagagcactgaaacaagactt

SEQ ID NO: 28405 - DNA, 33 bp, Homo sapien
aacaaatatctgctagaaatgaagaagataaaa

SEQ ID NO: 28406 - DNA, 33 bp, Homo sapien
aacaaatatctgctaggaatgaagaagataaaa

SEQ ID NO: 28407 - DNA, 33 bp, Homo sapien
caggtctgcctaactccaatgccaatgctgttt

SEQ ID NO: 28408 - DNA, 33 bp, Homo sapien
caggtctgcctaactctaatgccaatgctgttt

SEQ ID NO: 28409 - DNA, 33 bp, Homo sapien
gagttggaattcatacacaggtctgcctaactc

SEQ ID NO: 28410 - DNA, 33 bp, Homo sapien
gagttggaattcatacccaggtctgcctaactc

SEQ ID NO: 28411 - DNA, 33 bp, Homo sapien
gcatcaacaacacaatcagattttatttgacac

SEQ ID NO: 28412 - DNA, 33 bp, Homo sapien
gcatcaacaacacaatgagattttatttgacac

SEQ ID NO: 28413 - DNA, 33 bp, Homo sapien
ggaaaattcactaatcacctcaatgaagcaata

SEQ ID NO: 28414 - DNA, 33 bp, Homo sapien
ggaaaattcactaatctcctcaatgaagcaata

SEQ ID NO: 28415 - DNA, 33 bp, Homo sapien
tggctctgtgtttctacagtatggccctgacag

SEQ ID NO: 28416 - DNA, 33 bp, Homo sapien
tggctctgtgtttctatagtatggccctgacag

SEQ ID NO: 28417 - DNA, 33 bp, Homo sapien
cactcaatatctttcacactatagcctcaggtt

SEQ ID NO: 28418 - DNA, 33 bp, Homo sapien
cactcaatatctttcatactatagcctcaggtt

SEQ ID NO: 28419 - DNA, 33 bp, Homo sapien
acactgttgttgggcacaaaaacttcccttctt

SEQ ID NO: 28420 - DNA, 33 bp, Homo sapien
acactgttgttgggcagaaaaacttcccttctt

SEQ ID NO: 28421 - DNA, 33 bp, Homo sapien
ggacagaatcaaaccacaggattcatctattgt

SEQ ID NO: 28422 - DNA, 33 bp, Homo sapien
ggacagaatcaaaccataggattcatctattgt

SEQ ID NO: 28423 - DNA, 33 bp, Homo sapien
ggttgctacatcatacagtagttctgtgtagtt

SEQ ID NO: 28424 - DNA, 33 bp, Homo sapien
ggttgctacatcatacggtagttctgtgtagtt

SEQ ID NO: 28425 - DNA, 33 bp, Homo sapien
aataagctacagtgtcacgtaaacataactttt

SEQ ID NO: 28426 - DNA, 33 bp, Homo sapien
aataagctacagtgtcgcgtaaacataactttt

SEQ ID NO: 28427 - DNA, 33 bp, Homo sapien
cttccattgatttaacaagggagtatttttgga

SEQ ID NO: 28428 - DNA, 33 bp, Homo sapien
cttccattgatttaacgagggagtatttttgga

SEQ ID NO: 28429 - DNA, 33 bp, Homo sapien
tattcaaaagtagccacattctctcccatggcc

SEQ ID NO: 28430 - DNA, 33 bp, Homo sapien
tattcaaaagtagccagattctctcccatggcc

SEQ ID NO: 28431 - DNA, 33 bp, Homo sapien
gtacctgtagtcctagaaactggggagcctgat

SEQ ID NO: 28432 - DNA, 33 bp, Homo sapien
gtacctgtagtcctagcaactggggagcctgat

SEQ ID NO: 28433 - DNA, 33 bp, Homo sapien
cagtcactatatatgacgtttcaagagacatat

SEQ ID NO: 28434 - DNA, 33 bp, Homo sapien
cagtcactatatatgatgtttcaagagacatat

SEQ ID NO: 28435 - DNA, 33 bp, Homo sapien
gagtatataagtgctcccttttctccacagcct

SEQ ID NO: 28436 - DNA, 33 bp, Homo sapien
gagtatataagtgctcgcttttctccacagcct

SEQ ID NO: 28437 - DNA, 33 bp, Homo sapien
agacagctgaggtaaacctatgaaacttagtgg

SEQ ID NO: 28438 - DNA, 33 bp, Homo sapien
agacagctgaggtaaagctatgaaacttagtgg

SEQ ID NO: 28439 - DNA, 33 bp, Homo sapien
gtctcctgtgatacaccgggttccaagagggca

SEQ ID NO: 28440 - DNA, 33 bp, Homo sapien
gtctcctgtgatacactgggttccaagagggca

SEQ ID NO: 28441 - DNA, 33 bp, Homo sapien
ggattgtgagctaccccgaatgcctcctctcat

SEQ ID NO: 28442 - DNA, 33 bp, Homo sapien
ggattgtgagctaccctgaatgcctcctctcat

SEQ ID NO: 28443 - DNA, 33 bp, Homo sapien
ttgttctgatgtttccaagtttttatactcatt

SEQ ID NO: 28444 - DNA, 33 bp, Homo sapien
ttgttctgatgtttccgagtttttatactcatt

SEQ ID NO: 28445 - DNA, 33 bp, Homo sapien
ttggaattcttgcaaaatgagattttatctcct

SEQ ID NO: 28446 - DNA, 33 bp, Homo sapien
ttggaattcttgcaaagtgagattttatctcct

SEQ ID NO: 28447 - DNA, 33 bp, Homo sapien
ctaatagcccataatagtaatgacagttagctt

SEQ ID NO: 28448 - DNA, 33 bp, Homo sapien
ctaatagcccataatattaatgacagttagctt

SEQ ID NO: 28449 - DNA, 33 bp, Homo sapien
aaggttaggatttctacacaatgtcttagtttg

SEQ ID NO: 28450 - DNA, 33 bp, Homo sapien
aaggttaggatttctatacaatgtcttagtttg

SEQ ID NO: 28451 - DNA, 33 bp, Homo sapien
aacgtggtcaagataacaataggaattcaagtt

SEQ ID NO: 28452 - DNA, 33 bp, Homo sapien
aacgtggtcaagataagaataggaattcaagtt

SEQ ID NO: 28453 - DNA, 33 bp, Homo sapien
gaaaagttcagccaaccaaaatggggtgctcaa

SEQ ID NO: 28454 - DNA, 33 bp, Homo sapien
gaaaagttcagccaactaaaatggggtgctcaa

SEQ ID NO: 28455 - DNA, 33 bp, Homo sapien
caaggcagccatggtgaagtggacttgacaagg

SEQ ID NO: 28456 - DNA, 33 bp, Homo sapien
caaggcagccatggtggagtggacttgacaagg

SEQ ID NO: 28457 - DNA, 33 bp, Homo sapien
ttcaaattaaggatatcaaggcactaataaggt

SEQ ID NO: 28458 - DNA, 33 bp, Homo sapien
ttcaaattaaggatattaaggcactaataaggt

SEQ ID NO: 28459 - DNA, 33 bp, Homo sapien
aaaacacaatatatacgcaaagtcacaacctag

SEQ ID NO: 28460 - DNA, 33 bp, Homo sapien
aaaacacaatatatactcaaagtcacaacctag

SEQ ID NO: 28461 - DNA, 33 bp, Homo sapien
atttgaaatagctaaaatattgcattcctatga

SEQ ID NO: 28462 - DNA, 33 bp, Homo sapien
atttgaaatagctaaagtattgcattcctatga

SEQ ID NO: 28463 - DNA, 33 bp, Homo sapien
gaaatgaaagtcagaaatactatcaaatataca

SEQ ID NO: 28464 - DNA, 33 bp, Homo sapien
gaaatgaaagtcagaactactatcaaatataca

SEQ ID NO: 28465 - DNA, 33 bp, Homo sapien
acttaactgcgcgctacagcaaagcccaaaaac

SEQ ID NO: 28466 - DNA, 33 bp, Homo sapien
acttaactgcgcgctagagcaaagcccaaaaac

SEQ ID NO: 28467 - DNA, 33 bp, Homo sapien
atgggaactaattgcactaatggagattttgct

SEQ ID NO: 28468 - DNA, 33 bp, Homo sapien
atgggaactaattgcagtaatggagattttgct

SEQ ID NO: 28469 - DNA, 33 bp, Homo sapien
aatctccaggctttcaaatgcttgatataacaa

SEQ ID NO: 28470 - DNA, 33 bp, Homo sapien
aatctccaggctttcatatgcttgatataacaa

SEQ ID NO: 28471 - DNA, 33 bp, Homo sapien
ttggaatgtaggtgcaaatgctgtaaaatgtaa

SEQ ID NO: 28472 - DNA, 33 bp, Homo sapien
ttggaatgtaggtgcagatgctgtaaaatgtaa

SEQ ID NO: 28473 - DNA, 33 bp, Homo sapien
tagctgaagagaacacagatataaataatacca

SEQ ID NO: 28474 - DNA, 33 bp, Homo sapien
tagctgaagagaacacggatataaataatacca

SEQ ID NO: 28475 - DNA, 33 bp, Homo sapien
attaaactttggaagagaattcttaacatataa

SEQ ID NO: 28476 - DNA, 33 bp, Homo sapien
attaaactttggaagataattcttaacatataa

SEQ ID NO: 28477 - DNA, 33 bp, Homo sapien
ctaatgtcatccattaaaggagtcccttcactt

SEQ ID NO: 28478 - DNA, 33 bp, Homo sapien
ctaatgtcatccattagaggagtcccttcactt

SEQ ID NO: 28479 - DNA, 33 bp, Homo sapien
ttgcttttttagacaacttatctggacctgttt

SEQ ID NO: 28480 - DNA, 33 bp, Homo sapien
ttgcttttttagacaatttatctggacctgttt

SEQ ID NO: 28481 - DNA, 33 bp, Homo sapien
catggactgtgttggaaaacaagccttaggtcc

SEQ ID NO: 28482 - DNA, 33 bp, Homo sapien
catggactgtgttggataacaagccttaggtcc

SEQ ID NO: 28483 - DNA, 33 bp, Homo sapien
ttctccttcaggctcccacttctctacccactc

SEQ ID NO: 28484 - DNA, 33 bp, Homo sapien
ttctccttcaggctccgacttctctacccactc

SEQ ID NO: 28485 - DNA, 33 bp, Homo sapien
tcaacacagtgagggacggatgcagaggtgccc

SEQ ID NO: 28486 - DNA, 33 bp, Homo sapien
tcaacacagtgagggatggatgcagaggtgccc

SEQ ID NO: 28487 - DNA, 33 bp, Homo sapien
agacttggaagaaggccgagtgggtaacttgaa

SEQ ID NO: 28488 - DNA, 33 bp, Homo sapien
agacttggaagaaggctgagtgggtaacttgaa

SEQ ID NO: 28489 - DNA, 33 bp, Homo sapien
tctactgcctcttttacgaaggattggggaggg

SEQ ID NO: 28490 - DNA, 33 bp, Homo sapien
tctactgcctcttttatgaaggattggggaggg

SEQ ID NO: 28491 - DNA, 33 bp, Homo sapien
ccgctatatcctcagcacctaatacagtgcctg

SEQ ID NO: 28492 - DNA, 33 bp, Homo sapien
ccgctatatcctcagctcctaatacagtgcctg

SEQ ID NO: 28493 - DNA, 33 bp, Homo sapien
tttctacaacagtggccagaaaagcagaaatat

SEQ ID NO: 28494 - DNA, 33 bp, Homo sapien
tttctacaacagtggcgagaaaagcagaaatat

SEQ ID NO: 28495 - DNA, 33 bp, Homo sapien
cctgggtctttgtgagaaaggcaattggtcatg

SEQ ID NO: 28496 - DNA, 33 bp, Homo sapien
cctgggtctttgtgaggaaggcaattggtcatg

SEQ ID NO: 28497 - DNA, 33 bp, Homo sapien
tctctcccgttccatacgcatcttgaattgtcc

SEQ ID NO: 28498 - DNA, 33 bp, Homo sapien
tctctcccgttccatatgcatcttgaattgtcc

SEQ ID NO: 28499 - DNA, 33 bp, Homo sapien
tctattctagagttcaatgaaagacagcattaa

SEQ ID NO: 28500 - DNA, 33 bp, Homo sapien
tctattctagagttcagtgaaagacagcattaa

SEQ ID NO: 28501 - DNA, 33 bp, Homo sapien
cctcagaactggagaaacaagtatttaagaata

SEQ ID NO: 28502 - DNA, 33 bp, Homo sapien
cctcagaactggagaagcaagtatttaagaata

SEQ ID NO: 28503 - DNA, 33 bp, Homo sapien
agtatcacatcttaccacttctcatatcccact

SEQ ID NO: 28504 - DNA, 33 bp, Homo sapien
agtatcacatcttacctcttctcatatcccact

SEQ ID NO: 28505 - DNA, 33 bp, Homo sapien
tcacatggaatcttatgaaaaccaggttctgaa

SEQ ID NO: 28506 - DNA, 33 bp, Homo sapien
tcacatggaatcttattaaaaccaggttctgaa

SEQ ID NO: 28507 - DNA, 33 bp, Homo sapien
tatatattctggatacaaaactctcattacaca

SEQ ID NO: 28508 - DNA, 33 bp, Homo sapien
tatatattctggataccaaactctcattacaca

SEQ ID NO: 28509 - DNA, 33 bp, Homo sapien
taaaaagcaacataaaatctctcatgttacatc

SEQ ID NO: 28510 - DNA, 33 bp, Homo sapien
taaaaagcaacataaactctctcatgttacatc

SEQ ID NO: 28511 - DNA, 33 bp, Homo sapien
aatgaagacaaagtcacggtagagatgtcttag

SEQ ID NO: 28512 - DNA, 33 bp, Homo sapien
aatgaagacaaagtcatggtagagatgtcttag

SEQ ID NO: 28513 - DNA, 33 bp, Homo sapien
acttggattttacaaactcttctaatggacaac

SEQ ID NO: 28514 - DNA, 33 bp, Homo sapien
acttggattttacaaattcttctaatggacaac

SEQ ID NO: 28515 - DNA, 33 bp, Homo sapien
atcaatgtggagcatacccaaaggattataaat

SEQ ID NO: 28516 - DNA, 33 bp, Homo sapien
atcaatgtggagcatatccaaaggattataaat

SEQ ID NO: 28517 - DNA, 33 bp, Homo sapien
ttggttggttacagaaagtgtttccaacattca

SEQ ID NO: 28518 - DNA, 33 bp, Homo sapien
ttggttggttacagaaggtgtttccaacattca

SEQ ID NO: 28519 - DNA, 33 bp, Homo sapien
cttaataccttttgcacatttgtcccataatat

SEQ ID NO: 28520 - DNA, 33 bp, Homo sapien
cttaataccttttgcatatttgtcccataatat

SEQ ID NO: 28521 - DNA, 33 bp, Homo sapien
ctggtcaggaggtcccacctaatgaggagaagc

SEQ ID NO: 28522 - DNA, 33 bp, Homo sapien
ctggtcaggaggtcccgcctaatgaggagaagc

SEQ ID NO: 28523 - DNA, 33 bp, Homo sapien
caaggaggcttagaaccgctgccagctggaaag

SEQ ID NO: 28524 - DNA, 33 bp, Homo sapien
caaggaggcttagaactgctgccagctggaaag

SEQ ID NO: 28525 - DNA, 33 bp, Homo sapien
tacagggtttgccatgccaaaagataaacaaag

SEQ ID NO: 28526 - DNA, 33 bp, Homo sapien
tacagggtttgccatgtcaaaagataaacaaag

SEQ ID NO: 28527 - DNA, 33 bp, Homo sapien
tagtttcaacatataaacagacatagaaaaaat

SEQ ID NO: 28528 - DNA, 33 bp, Homo sapien
tagtttcaacatataagcagacatagaaaaaat

SEQ ID NO: 28529 - DNA, 33 bp, Homo sapien
attccatccagagtaacgagtcagaaaaagaac

SEQ ID NO: 28530 - DNA, 33 bp, Homo sapien
attccatccagagtaaggagtcagaaaaagaac

SEQ ID NO: 28531 - DNA, 33 bp, Homo sapien
ttcagattggaagtaaaaacaactacatttaca

SEQ ID NO: 28532 - DNA, 33 bp, Homo sapien
ttcagattggaagtaagaacaactacatttaca

SEQ ID NO: 28533 - DNA, 33 bp, Homo sapien
tataatggcatattaaagacagtgttaacactg

SEQ ID NO: 28534 - DNA, 33 bp, Homo sapien
tataatggcatattaacgacagtgttaacactg

SEQ ID NO: 28535 - DNA, 33 bp, Homo sapien
tatttaaggacacttaacaaatgcgttacatga

SEQ ID NO: 28536 - DNA, 33 bp, Homo sapien
tatttaaggacacttagcaaatgcgttacatga

SEQ ID NO: 28537 - DNA, 33 bp, Homo sapien
atgttgccccgcaggcactatgataggagatat

SEQ ID NO: 28538 - DNA, 33 bp, Homo sapien
atgttgccccgcaggctctatgataggagatat

SEQ ID NO: 28539 - DNA, 33 bp, Homo sapien
agcaagttgcagaaaacttacaatccaaaataa

SEQ ID NO: 28540 - DNA, 33 bp, Homo sapien
agcaagttgcagaaaatttacaatccaaaataa

SEQ ID NO: 28541 - DNA, 33 bp, Homo sapien
ggtgagtctctgggaacgttttctggtctagct

SEQ ID NO: 28542 - DNA, 33 bp, Homo sapien
ggtgagtctctgggaaggttttctggtctagct

SEQ ID NO: 28543 - DNA, 33 bp, Homo sapien
caatatttcattctacaaaaattacatccaaac

SEQ ID NO: 28544 - DNA, 33 bp, Homo sapien
caatatttcattctacgaaaattacatccaaac

SEQ ID NO: 28545 - DNA, 33 bp, Homo sapien
atttccatatttaccacagagctttcattttat

SEQ ID NO: 28546 - DNA, 33 bp, Homo sapien
atttccatatttaccatagagctttcattttat

SEQ ID NO: 28547 - DNA, 33 bp, Homo sapien
caatataaaaaatgaactaacattgaaaattca

SEQ ID NO: 28548 - DNA, 33 bp, Homo sapien
caatataaaaaatgaagtaacattgaaaattca

SEQ ID NO: 28549 - DNA, 33 bp, Homo sapien
caaaggaatgacttaacgctggaacttatattt

SEQ ID NO: 28550 - DNA, 33 bp, Homo sapien
caaaggaatgacttaatgctggaacttatattt

SEQ ID NO: 28551 - DNA, 33 bp, Homo sapien
aaagtgggtagctaaaatttacccttcccagtg

SEQ ID NO: 28552 - DNA, 33 bp, Homo sapien
aaagtgggtagctaaagtttacccttcccagtg

SEQ ID NO: 28553 - DNA, 33 bp, Homo sapien
atacagcaaaaggcaacagcactagaacatgtt

SEQ ID NO: 28554 - DNA, 33 bp, Homo sapien
atacagcaaaaggcaagagcactagaacatgtt

SEQ ID NO: 28555 - DNA, 33 bp, Homo sapien
aaaatgttaggatgcccggatgtctgtggctat

SEQ ID NO: 28556 - DNA, 33 bp, Homo sapien
aaaatgttaggatgcctggatgtctgtggctat

SEQ ID NO: 28557 - DNA, 33 bp, Homo sapien
ctaacattttgtcctaaatcttcctgaacctgg

SEQ ID NO: 28558 - DNA, 33 bp, Homo sapien
ctaacattttgtcctagatcttcctgaacctgg

SEQ ID NO: 28559 - DNA, 33 bp, Homo sapien
agatttctgaccaacaatcttttaagaagcatt

SEQ ID NO: 28560 - DNA, 33 bp, Homo sapien
agatttctgaccaacagtcttttaagaagcatt

SEQ ID NO: 28561 - DNA, 33 bp, Homo sapien
tagcatcactctgtggaaagtgaaatgaatgtc

SEQ ID NO: 28562 - DNA, 33 bp, Homo sapien
tagcatcactctgtggtaagtgaaatgaatgtc

SEQ ID NO: 28563 - DNA, 33 bp, Homo sapien
caaataaacaggataactgtacatttttcactt

SEQ ID NO: 28564 - DNA, 33 bp, Homo sapien
caaataaacaggataattgtacatttttcactt

SEQ ID NO: 28565 - DNA, 33 bp, Homo sapien
gggaggtagacacaataaaataatgccatggga

SEQ ID NO: 28566 - DNA, 33 bp, Homo sapien
gggaggtagacacaatgaaataatgccatggga

SEQ ID NO: 28567 - DNA, 33 bp, Homo sapien
gaacaaaagaaacagaatcaatatataaaattc

SEQ ID NO: 28568 - DNA, 33 bp, Homo sapien
gaacaaaagaaacagagtcaatatataaaattc

SEQ ID NO: 28569 - DNA, 33 bp, Homo sapien
tcttctattcttgaaacctgcaagtttttcttc

SEQ ID NO: 28570 - DNA, 33 bp, Homo sapien
tcttctattcttgaaatctgcaagtttttcttc

SEQ ID NO: 28571 - DNA, 33 bp, Homo sapien
ctaaattttgggttcccatggacataaagatag

SEQ ID NO: 28572 - DNA, 33 bp, Homo sapien
ctaaattttgggttcctatggacataaagatag

SEQ ID NO: 28573 - DNA, 33 bp, Homo sapien
aaaattttgtttaaacagcatcaattaagagct

SEQ ID NO: 28574 - DNA, 33 bp, Homo sapien
aaaattttgtttaaacggcatcaattaagagct

SEQ ID NO: 28575 - DNA, 33 bp, Homo sapien
tttttcttctcagctaacttccatgtaacatct

SEQ ID NO: 28576 - DNA, 33 bp, Homo sapien
tttttcttctcagctagcttccatgtaacatct

SEQ ID NO: 28577 - DNA, 33 bp, Homo sapien
ctgggtttatttccagcctattttgtttgctct

SEQ ID NO: 28578 - DNA, 33 bp, Homo sapien
ctgggtttatttccaggctattttgtttgctct

SEQ ID NO: 28579 - DNA, 33 bp, Homo sapien
cctgaataactaaaaacctgaaggaatcattaa

SEQ ID NO: 28580 - DNA, 33 bp, Homo sapien
cctgaataactaaaaatctgaaggaatcattaa

SEQ ID NO: 28581 - DNA, 33 bp, Homo sapien
tcagtaggtgagaatactaaataaggagaatac

SEQ ID NO: 28582 - DNA, 33 bp, Homo sapien
tcagtaggtgagaatattaaataaggagaatac

SEQ ID NO: 28583 - DNA, 33 bp, Homo sapien
aattcattcttaatcaatctgatagcatattac

SEQ ID NO: 28584 - DNA, 33 bp, Homo sapien
aattcattcttaatcagtctgatagcatattac

SEQ ID NO: 28585 - DNA, 33 bp, Homo sapien
ggtagtacaacctaaccgtagtcaattgttaat

SEQ ID NO: 28586 - DNA, 33 bp, Homo sapien
ggtagtacaacctaactgtagtcaattgttaat

SEQ ID NO: 28587 - DNA, 33 bp, Homo sapien
atcaagctgcagcgtaacaggtcaatttcagac

SEQ ID NO: 28588 - DNA, 33 bp, Homo sapien
atcaagctgcagcgtagcaggtcaatttcagac

SEQ ID NO: 28589 - DNA, 33 bp, Homo sapien
ggggtagtgactagaaatggaaacaaggtgaac

SEQ ID NO: 28590 - DNA, 33 bp, Homo sapien
ggggtagtgactagaagtggaaacaaggtgaac

SEQ ID NO: 28591 - DNA, 33 bp, Homo sapien
cttgtcttgtactttaccttagaggaaaagctg

SEQ ID NO: 28592 - DNA, 33 bp, Homo sapien
cttgtcttgtactttatcttagaggaaaagctg

SEQ ID NO: 28593 - DNA, 33 bp, Homo sapien
ttaagaacacacatagaatgaaaatcaagtgat

SEQ ID NO: 28594 - DNA, 33 bp, Homo sapien
ttaagaacacacataggatgaaaatcaagtgat

SEQ ID NO: 28595 - DNA, 33 bp, Homo sapien
gccaatctgggacatacgaagtaaaaagaaaac

SEQ ID NO: 28596 - DNA, 33 bp, Homo sapien
gccaatctgggacatatgaagtaaaaagaaaac

SEQ ID NO: 28597 - DNA, 33 bp, Homo sapien
tacgtgtatatgtgctcacagagtgtatttgca

SEQ ID NO: 28598 - DNA, 33 bp, Homo sapien
tacgtgtatatgtgcttacagagtgtatttgca

SEQ ID NO: 28599 - DNA, 33 bp, Homo sapien
tcattgcagttttaaaatgtgatataaatttga

SEQ ID NO: 28600 - DNA, 33 bp, Homo sapien
tcattgcagttttaaagtgtgatataaatttga

SEQ ID NO: 28601 - DNA, 33 bp, Homo sapien
gtcaattgttaaaaacagtcatgtctaaacagg

SEQ ID NO: 28602 - DNA, 33 bp, Homo sapien
gtcaattgttaaaaacggtcatgtctaaacagg

SEQ ID NO: 28603 - DNA, 33 bp, Homo sapien
tctggaatttctctgacatggggagtcaccttc

SEQ ID NO: 28604 - DNA, 33 bp, Homo sapien
tctggaatttctctgatatggggagtcaccttc

SEQ ID NO: 28605 - DNA, 33 bp, Homo sapien
ctaggttgcatttcctcaaatcagagtatacac

SEQ ID NO: 28606 - DNA, 33 bp, Homo sapien
ctaggttgcatttccttaaatcagagtatacac

SEQ ID NO: 28607 - DNA, 33 bp, Homo sapien
tgagagtcacaatacaaccagctcagctcaagg

SEQ ID NO: 28608 - DNA, 33 bp, Homo sapien
tgagagtcacaatacatccagctcagctcaagg

SEQ ID NO: 28609 - DNA, 33 bp, Homo sapien
atacttacggcattaactaaaaccagctccaac

SEQ ID NO: 28610 - DNA, 33 bp, Homo sapien
atacttacggcattaattaaaaccagctccaac

SEQ ID NO: 28611 - DNA, 33 bp, Homo sapien
ggacagttagcttccacaggtaattagtcaaat

SEQ ID NO: 28612 - DNA, 33 bp, Homo sapien
ggacagttagcttccataggtaattagtcaaat

SEQ ID NO: 28613 - DNA, 33 bp, Homo sapien
tgcatattcaacgccaagatgaaaatattttgc

SEQ ID NO: 28614 - DNA, 33 bp, Homo sapien
tgcatattcaacgccaggatgaaaatattttgc

SEQ ID NO: 28615 - DNA, 33 bp, Homo sapien
ttttttttttcactcaataccaggtttctaaga

SEQ ID NO: 28616 - DNA, 33 bp, Homo sapien
ttttttttttcactcagtaccaggtttctaaga

SEQ ID NO: 28617 - DNA, 33 bp, Homo sapien
attcaatctcttgtcaatattccttatttcttt

SEQ ID NO: 28618 - DNA, 33 bp, Homo sapien
attcaatctcttgtcagtattccttatttcttt

SEQ ID NO: 28619 - DNA, 33 bp, Homo sapien
acaacaaagaagaatgaaccaaacctttgagaa

SEQ ID NO: 28620 - DNA, 33 bp, Homo sapien
acaacaaagaagaatggaccaaacctttgagaa

SEQ ID NO: 28621 - DNA, 33 bp, Homo sapien
tctgttgggccctttacgtcatctgagtttgga

SEQ ID NO: 28622 - DNA, 33 bp, Homo sapien
tctgttgggccctttatgtcatctgagtttgga

SEQ ID NO: 28623 - DNA, 33 bp, Homo sapien
agacacttggtccagtcactaaggcccgttctc

SEQ ID NO: 28624 - DNA, 33 bp, Homo sapien
agacacttggtccagtgactaaggcccgttctc

SEQ ID NO: 28625 - DNA, 33 bp, Homo sapien
gcccagaaatgaattcaaacatatatgctctac

SEQ ID NO: 28626 - DNA, 33 bp, Homo sapien
gcccagaaatgaattccaacatatatgctctac

SEQ ID NO: 28627 - DNA, 33 bp, Homo sapien
tcaaattgtactctacagatagtgcctctggcc

SEQ ID NO: 28628 - DNA, 33 bp, Homo sapien
tcaaattgtactctacggatagtgcctctggcc

SEQ ID NO: 28629 - DNA, 33 bp, Homo sapien
tcctcttttgttatgcacagcaattcagcttta

SEQ ID NO: 28630 - DNA, 33 bp, Homo sapien
tcctcttttgttatgcgcagcaattcagcttta

SEQ ID NO: 28631 - DNA, 33 bp, Homo sapien
atcaccatggctcaaaagtagtctgaaactaaa

SEQ ID NO: 28632 - DNA, 33 bp, Homo sapien
atcaccatggctcaaaggtagtctgaaactaaa

SEQ ID NO: 28633 - DNA, 33 bp, Homo sapien
taacaattcaaaattacgatggaaaaatcaact

SEQ ID NO: 28634 - DNA, 33 bp, Homo sapien
taacaattcaaaattatgatggaaaaatcaact

SEQ ID NO: 28635 - DNA, 33 bp, Homo sapien
tgtaatttctggtataaagtgaatgttggcaat

SEQ ID NO: 28636 - DNA, 33 bp, Homo sapien
tgtaatttctggtatacagtgaatgttggcaat

SEQ ID NO: 28637 - DNA, 33 bp, Homo sapien
attttataatggagtcaagtcagcatttttatg

SEQ ID NO: 28638 - DNA, 33 bp, Homo sapien
attttataatggagtcgagtcagcatttttatg

SEQ ID NO: 28639 - DNA, 33 bp, Homo sapien
ttcagcaacatcttcaaggacaattgatacacc

SEQ ID NO: 28640 - DNA, 33 bp, Homo sapien
ttcagcaacatcttcagggacaattgatacacc

SEQ ID NO: 28641 - DNA, 33 bp, Homo sapien
tccaaagaagttaagtaaattgctcaaatattc

SEQ ID NO: 28642 - DNA, 33 bp, Homo sapien
tccaaagaagttaagtgaattgctcaaatattc

SEQ ID NO: 28643 - DNA, 33 bp, Homo sapien
aaatccagactccatcactttcaggctgaatat

SEQ ID NO: 28644 - DNA, 33 bp, Homo sapien
aaatccagactccatcgctttcaggctgaatat

SEQ ID NO: 28645 - DNA, 33 bp, Homo sapien
tgatattaagccaaaaatttctggcggtgtttg

SEQ ID NO: 28646 - DNA, 33 bp, Homo sapien
tgatattaagccaaaagtttctggcggtgtttg

SEQ ID NO: 28647 - DNA, 33 bp, Homo sapien
ctgaaataccaatgtacgagtgttccttcaaga

SEQ ID NO: 28648 - DNA, 33 bp, Homo sapien
ctgaaataccaatgtaggagtgttccttcaaga

SEQ ID NO: 28649 - DNA, 33 bp, Homo sapien
gtatgcagtctagaaaattgatgccctatgtcc

SEQ ID NO: 28650 - DNA, 33 bp, Homo sapien
gtatgcagtctagaaacttgatgccctatgtcc

SEQ ID NO: 28651 - DNA, 33 bp, Homo sapien
tctgtgacttttctagacacacaatgtaagctg

SEQ ID NO: 28652 - DNA, 33 bp, Homo sapien
tctgtgacttttctaggcacacaatgtaagctg

SEQ ID NO: 28653 - DNA, 33 bp, Homo sapien
taagttattgctctcaagtatgtctgccataca

SEQ ID NO: 28654 - DNA, 33 bp, Homo sapien
taagttattgctctcaggtatgtctgccataca

SEQ ID NO: 28655 - DNA, 33 bp, Homo sapien
gtcattgagaaaaataaagtgagataggactcc

SEQ ID NO: 28656 - DNA, 33 bp, Homo sapien
gtcattgagaaaaatagagtgagataggactcc

SEQ ID NO: 28657 - DNA, 33 bp, Homo sapien
aagcatgaaccagcaacgttgaaaggagagcca

SEQ ID NO: 28658 - DNA, 33 bp, Homo sapien
aagcatgaaccagcaatgttgaaaggagagcca

SEQ ID NO: 28659 - DNA, 33 bp, Homo sapien
tcaattcatttctcaccaggtgggatctcccag

SEQ ID NO: 28660 - DNA, 33 bp, Homo sapien
tcaattcatttctcactaggtgggatctcccag

SEQ ID NO: 28661 - DNA, 33 bp, Homo sapien
atggttcctgtaattaccgtactcagccacgta

SEQ ID NO: 28662 - DNA, 33 bp, Homo sapien
atggttcctgtaattatcgtactcagccacgta

SEQ ID NO: 28663 - DNA, 33 bp, Homo sapien
tggactcttacttctcaccatatgcaaaaatta

SEQ ID NO: 28664 - DNA, 33 bp, Homo sapien
tggactcttacttctcgccatatgcaaaaatta

SEQ ID NO: 28665 - DNA, 33 bp, Homo sapien
tttgtgtcttgcctcaaaaatgaagaatatatt

SEQ ID NO: 28666 - DNA, 33 bp, Homo sapien
tttgtgtcttgcctcagaaatgaagaatatatt

SEQ ID NO: 28667 - DNA, 33 bp, Homo sapien
ttctgaaatctctccgaaagataccaaactcga

SEQ ID NO: 28668 - DNA, 33 bp, Homo sapien
ttctgaaatctctccgtaagataccaaactcga

SEQ ID NO: 28669 - DNA, 33 bp, Homo sapien
aagagagaaagtaaaaagattacagattcagca

SEQ ID NO: 28670 - DNA, 33 bp, Homo sapien
aagagagaaagtaaaaggattacagattcagca

SEQ ID NO: 28671 - DNA, 33 bp, Homo sapien
ccacatgccaccttctaaagagttatttggcct

SEQ ID NO: 28672 - DNA, 33 bp, Homo sapien
ccacatgccaccttctgaagagttatttggcct

SEQ ID NO: 28673 - DNA, 33 bp, Homo sapien
gaatatcttagagaaacagcagagaagaattat

SEQ ID NO: 28674 - DNA, 33 bp, Homo sapien
gaatatcttagagaaatagcagagaagaattat

SEQ ID NO: 28675 - DNA, 33 bp, Homo sapien
tccctgctccgcctctaactaagtgtgtgacca

SEQ ID NO: 28676 - DNA, 33 bp, Homo sapien
tccctgctccgcctcttactaagtgtgtgacca

SEQ ID NO: 28677 - DNA, 33 bp, Homo sapien
gtagtgaaaatccataccttgctgaaatcaatt

SEQ ID NO: 28678 - DNA, 33 bp, Homo sapien
gtagtgaaaatccatatcttgctgaaatcaatt

SEQ ID NO: 28679 - DNA, 33 bp, Homo sapien
cttcactccactttaaaaatctgctccagtagt

SEQ ID NO: 28680 - DNA, 33 bp, Homo sapien
cttcactccactttaataatctgctccagtagt

SEQ ID NO: 28681 - DNA, 33 bp, Homo sapien
gtagtcattcctaacaacacgccatcacctcta

SEQ ID NO: 28682 - DNA, 33 bp, Homo sapien
gtagtcattcctaacatcacgccatcacctcta

SEQ ID NO: 28683 - DNA, 33 bp, Homo sapien
aaaggaaatttaagacactggcaagggtgttgt

SEQ ID NO: 28684 - DNA, 33 bp, Homo sapien
aaaggaaatttaagacgctggcaagggtgttgt

SEQ ID NO: 28685 - DNA, 33 bp, Homo sapien
gcatcattccaaaaaaacttcctcaagcttcca

SEQ ID NO: 28686 - DNA, 33 bp, Homo sapien
gcatcattccaaaaaaccttcctcaagcttcca

SEQ ID NO: 28687 - DNA, 33 bp, Homo sapien
cccctttctcagaaaaactacaacaacaacaac

SEQ ID NO: 28688 - DNA, 33 bp, Homo sapien
cccctttctcagaaaatctacaacaacaacaac

SEQ ID NO: 28689 - DNA, 33 bp, Homo sapien
taatttggcaagcagtaaattttaaataaatta

SEQ ID NO: 28690 - DNA, 33 bp, Homo sapien
taatttggcaagcagttaattttaaataaatta

SEQ ID NO: 28691 - DNA, 33 bp, Homo sapien
gtcagtttgattggctgaactaatagtcttcac

SEQ ID NO: 28692 - DNA, 33 bp, Homo sapien
gtcagtttgattggcttaactaatagtcttcac

SEQ ID NO: 28693 - DNA, 33 bp, Homo sapien
tggacaaatttgaacaacaaaataaggagacac

SEQ ID NO: 28694 - DNA, 33 bp, Homo sapien
tggacaaatttgaacagcaaaataaggagacac

SEQ ID NO: 28695 - DNA, 33 bp, Homo sapien
tgagcctttgttgttcacagttttgattggggc

SEQ ID NO: 28696 - DNA, 33 bp, Homo sapien
tgagcctttgttgttcgcagttttgattggggc

SEQ ID NO: 28697 - DNA, 33 bp, Homo sapien
tggatccttcataaacagcttaacatccccttg

SEQ ID NO: 28698 - DNA, 33 bp, Homo sapien
tggatccttcataaacggcttaacatccccttg

SEQ ID NO: 28699 - DNA, 33 bp, Homo sapien
cagtacactacatgaaaccataactggtgagga

SEQ ID NO: 28700 - DNA, 33 bp, Homo sapien
cagtacactacatgaacccataactggtgagga

SEQ ID NO: 28701 - DNA, 33 bp, Homo sapien
tcctagtgagggatagcaaggccccgactataa

SEQ ID NO: 28702 - DNA, 33 bp, Homo sapien
tcctagtgagggataggaaggccccgactataa

SEQ ID NO: 28703 - DNA, 33 bp, Homo sapien
gcaaattcctaatcaggaggtcattgctatccc

SEQ ID NO: 28704 - DNA, 33 bp, Homo sapien
gcaaattcctaatcagtaggtcattgctatccc

SEQ ID NO: 28705 - DNA, 33 bp, Homo sapien
accagtatctcagaaccaaccactctgccccta

SEQ ID NO: 28706 - DNA, 33 bp, Homo sapien
accagtatctcagaactaaccactctgccccta

SEQ ID NO: 28707 - DNA, 33 bp, Homo sapien
atcccctgatttcgagccaaatgtgaacctaga

SEQ ID NO: 28708 - DNA, 33 bp, Homo sapien
atcccctgatttcgaggcaaatgtgaacctaga

SEQ ID NO: 28709 - DNA, 33 bp, Homo sapien
gtgatgcatattgcaaaagcattgtgaataaag

SEQ ID NO: 28710 - DNA, 33 bp, Homo sapien
gtgatgcatattgcaagagcattgtgaataaag

SEQ ID NO: 28711 - DNA, 33 bp, Homo sapien
gtaattgtgttttccaaataagccattttcaaa

SEQ ID NO: 28712 - DNA, 33 bp, Homo sapien
gtaattgtgttttccagataagccattttcaaa

SEQ ID NO: 28713 - DNA, 33 bp, Homo sapien
catgcaacatagagaaaggtaatgcgctgcttc

SEQ ID NO: 28714 - DNA, 33 bp, Homo sapien
catgcaacatagagaagggtaatgcgctgcttc

SEQ ID NO: 28715 - DNA, 33 bp, Homo sapien
ggcaaagtatatttagaaactgcaatcagtttt

SEQ ID NO: 28716 - DNA, 33 bp, Homo sapien
ggcaaagtatatttagtaactgcaatcagtttt

SEQ ID NO: 28717 - DNA, 33 bp, Homo sapien
gctagtgtgcttcccccatcacagattgaatcc

SEQ ID NO: 28718 - DNA, 33 bp, Homo sapien
gctagtgtgcttccccgatcacagattgaatcc

SEQ ID NO: 28719 - DNA, 33 bp, Homo sapien
tagtatgcgttgtgtacgtgacatctgtaataa

SEQ ID NO: 28720 - DNA, 33 bp, Homo sapien
tagtatgcgttgtgtatgtgacatctgtaataa

SEQ ID NO: 28721 - DNA, 33 bp, Homo sapien
ggagaaagtcctacaacactatgtgacttgttc

SEQ ID NO: 28722 - DNA, 33 bp, Homo sapien
ggagaaagtcctacaatactatgtgacttgttc

SEQ ID NO: 28723 - DNA, 33 bp, Homo sapien
tataagtagtttatagccaggttctggtagtgc

SEQ ID NO: 28724 - DNA, 33 bp, Homo sapien
tataagtagtttatagtcaggttctggtagtgc

SEQ ID NO: 28725 - DNA, 33 bp, Homo sapien
aatattttagcaccaaactcctacctcaatatt

SEQ ID NO: 28726 - DNA, 33 bp, Homo sapien
aatattttagcaccaatctcctacctcaatatt

SEQ ID NO: 28727 - DNA, 33 bp, Homo sapien
aaaagcaggcttacaaagtaaggatttgagtga

SEQ ID NO: 28728 - DNA, 33 bp, Homo sapien
aaaagcaggcttacaaggtaaggatttgagtga

SEQ ID NO: 28729 - DNA, 33 bp, Homo sapien
aaatgagagattatgcaatagttattaacaaat

SEQ ID NO: 28730 - DNA, 33 bp, Homo sapien
aaatgagagattatgcgatagttattaacaaat

SEQ ID NO: 28731 - DNA, 33 bp, Homo sapien
aagatctttgcttaaccagtgtttatgttcagg

SEQ ID NO: 28732 - DNA, 33 bp, Homo sapien
aagatctttgcttaacgagtgtttatgttcagg

SEQ ID NO: 28733 - DNA, 33 bp, Homo sapien
gtgactgctgttaatacataagtcactttgtgg

SEQ ID NO: 28734 - DNA, 33 bp, Homo sapien
gtgactgctgttaatatataagtcactttgtgg

SEQ ID NO: 28735 - DNA, 33 bp, Homo sapien
gagagaaaaaaacatacaaagcagggacatttg

SEQ ID NO: 28736 - DNA, 33 bp, Homo sapien
gagagaaaaaaacatataaagcagggacatttg

SEQ ID NO: 28737 - DNA, 33 bp, Homo sapien
atggttctagaaatcaactgggttgcctggata

SEQ ID NO: 28738 - DNA, 33 bp, Homo sapien
atggttctagaaatcagctgggttgcctggata

SEQ ID NO: 28739 - DNA, 33 bp, Homo sapien
ccaacgtgcccaggtaaattcccagacaactgt

SEQ ID NO: 28740 - DNA, 33 bp, Homo sapien
ccaacgtgcccaggtacattcccagacaactgt

SEQ ID NO: 28741 - DNA, 33 bp, Homo sapien
ctggagatatgcgagaaatgcaatttttagcca

SEQ ID NO: 28742 - DNA, 33 bp, Homo sapien
ctggagatatgcgagatatgcaatttttagcca

SEQ ID NO: 28743 - DNA, 33 bp, Homo sapien
aaagttgtatgcatcaaggtatttatagccact

SEQ ID NO: 28744 - DNA, 33 bp, Homo sapien
aaagttgtatgcatcagggtatttatagccact

SEQ ID NO: 28745 - DNA, 33 bp, Homo sapien
tttgaccaatttcaaaatgccgtatcaatgctg

SEQ ID NO: 28746 - DNA, 33 bp, Homo sapien
tttgaccaatttcaaagtgccgtatcaatgctg

SEQ ID NO: 28747 - DNA, 33 bp, Homo sapien
gtggaatatcttggccaattattgtcagaaaaa

SEQ ID NO: 28748 - DNA, 33 bp, Homo sapien
gtggaatatcttggccgattattgtcagaaaaa

SEQ ID NO: 28749 - DNA, 33 bp, Homo sapien
tttaatctttcaccccaaagtaccagtacccta

SEQ ID NO: 28750 - DNA, 33 bp, Homo sapien
tttaatctttcaccccgaagtaccagtacccta

SEQ ID NO: 28751 - DNA, 33 bp, Homo sapien
ttattgaactgaaagcaagttgttctttatgtg

SEQ ID NO: 28752 - DNA, 33 bp, Homo sapien
ttattgaactgaaagcgagttgttctttatgtg

SEQ ID NO: 28753 - DNA, 33 bp, Homo sapien
caaggatgattttcaaactagaaacagagtaca

SEQ ID NO: 28754 - DNA, 33 bp, Homo sapien
caaggatgattttcaacctagaaacagagtaca

SEQ ID NO: 28755 - DNA, 33 bp, Homo sapien
gggtatggctacaaaaagttaacaaacacagta

SEQ ID NO: 28756 - DNA, 33 bp, Homo sapien
gggtatggctacaaaaggttaacaaacacagta

SEQ ID NO: 28757 - DNA, 33 bp, Homo sapien
gaagcttagctccatcaaatctcaaatgattta

SEQ ID NO: 28758 - DNA, 33 bp, Homo sapien
gaagcttagctccatcgaatctcaaatgattta

SEQ ID NO: 28759 - DNA, 33 bp, Homo sapien
caggaaatttagagaacgcctgctagatactac

SEQ ID NO: 28760 - DNA, 33 bp, Homo sapien
caggaaatttagagaatgcctgctagatactac

SEQ ID NO: 28761 - DNA, 33 bp, Homo sapien
ataggttgtgtctctacgttcatttgaaataat

SEQ ID NO: 28762 - DNA, 33 bp, Homo sapien
ataggttgtgtctctatgttcatttgaaataat

SEQ ID NO: 28763 - DNA, 33 bp, Homo sapien
gaggtgttcgtagcagactctgagaatctttta

SEQ ID NO: 28764 - DNA, 33 bp, Homo sapien
gaggtgttcgtagcagtctctgagaatctttta

SEQ ID NO: 28765 - DNA, 33 bp, Homo sapien
ttatgactaaggctaaaggcaaatgcaacaata

SEQ ID NO: 28766 - DNA, 33 bp, Homo sapien
ttatgactaaggctaacggcaaatgcaacaata

SEQ ID NO: 28767 - DNA, 33 bp, Homo sapien
tgtagagagccaggtgacaatgtggagtcaata

SEQ ID NO: 28768 - DNA, 33 bp, Homo sapien
tgtagagagccaggtgtcaatgtggagtcaata

SEQ ID NO: 28769 - DNA, 33 bp, Homo sapien
tcatcaggagtagttacgaaagatgataatttt

SEQ ID NO: 28770 - DNA, 33 bp, Homo sapien
tcatcaggagtagttatgaaagatgataatttt

SEQ ID NO: 28771 - DNA, 33 bp, Homo sapien
tgatgcacacatgttccaagcccctttcatttc

SEQ ID NO: 28772 - DNA, 33 bp, Homo sapien
tgatgcacacatgttctaagcccctttcatttc

SEQ ID NO: 28773 - DNA, 33 bp, Homo sapien
ctttcatcttcctaccgaattcatcaaggcaga

SEQ ID NO: 28774 - DNA, 33 bp, Homo sapien
ctttcatcttcctacctaattcatcaaggcaga

SEQ ID NO: 28775 - DNA, 33 bp, Homo sapien
acgatgtgtattcaagaaggtagagttggtaaa

SEQ ID NO: 28776 - DNA, 33 bp, Homo sapien
acgatgtgtattcaaggaggtagagttggtaaa

SEQ ID NO: 28777 - DNA, 33 bp, Homo sapien
acactctggtctaatcacatcactaagttttgt

SEQ ID NO: 28778 - DNA, 33 bp, Homo sapien
acactctggtctaatcccatcactaagttttgt

SEQ ID NO: 28779 - DNA, 33 bp, Homo sapien
actattactaggcacaaatgccttgcttaggaa

SEQ ID NO: 28780 - DNA, 33 bp, Homo sapien
actattactaggcacacatgccttgcttaggaa

SEQ ID NO: 28781 - DNA, 33 bp, Homo sapien
taatgatatgaatcttaaacacaacacaattat

SEQ ID NO: 28782 - DNA, 33 bp, Homo sapien
taatgatatgaatcttgaacacaacacaattat

SEQ ID NO: 28783 - DNA, 33 bp, Homo sapien
ataggacacatataagcacttcagtggatagtc

SEQ ID NO: 28784 - DNA, 33 bp, Homo sapien
ataggacacatataagtacttcagtggatagtc

SEQ ID NO: 28785 - DNA, 33 bp, Homo sapien
atcacgagatagaatacgatgattattgttttt

SEQ ID NO: 28786 - DNA, 33 bp, Homo sapien
atcacgagatagaatatgatgattattgttttt

SEQ ID NO: 28787 - DNA, 33 bp, Homo sapien
aagtaatttgttgtatcaaatgccgtgtaaaag

SEQ ID NO: 28788 - DNA, 33 bp, Homo sapien
aagtaatttgttgtattaaatgccgtgtaaaag

SEQ ID NO: 28789 - DNA, 33 bp, Homo sapien
ttttcactggcatataaataaccctgaattaag

SEQ ID NO: 28790 - DNA, 33 bp, Homo sapien
ttttcactggcatatacataaccctgaattaag

SEQ ID NO: 28791 - DNA, 33 bp, Homo sapien
ctgccagccgtccatagtaggacaaaaccagcc

SEQ ID NO: 28792 - DNA, 33 bp, Homo sapien
ctgccagccgtccatattaggacaaaaccagcc

SEQ ID NO: 28793 - DNA, 33 bp, Homo sapien
atatggaactataatacgtggaactttaaatgt

SEQ ID NO: 28794 - DNA, 33 bp, Homo sapien
atatggaactataatatgtggaactttaaatgt

SEQ ID NO: 28795 - DNA, 33 bp, Homo sapien
agatgagtttacagaacgatgtctgcatgagtg

SEQ ID NO: 28796 - DNA, 33 bp, Homo sapien
agatgagtttacagaatgatgtctgcatgagtg

SEQ ID NO: 28797 - DNA, 33 bp, Homo sapien
ggaaatagttaatctacgtttgacagtcatttc

SEQ ID NO: 28798 - DNA, 33 bp, Homo sapien
ggaaatagttaatctatgtttgacagtcatttc

SEQ ID NO: 28799 - DNA, 33 bp, Homo sapien
gtctctactcatttacacttgctaactgatact

SEQ ID NO: 28800 - DNA, 33 bp, Homo sapien
gtctctactcatttacgcttgctaactgatact

SEQ ID NO: 28801 - DNA, 33 bp, Homo sapien
gtagagtagggaggagcagtagttaaatagtta

SEQ ID NO: 28802 - DNA, 33 bp, Homo sapien
gtagagtagggaggaggagtagttaaatagtta

SEQ ID NO: 28803 - DNA, 33 bp, Homo sapien
ggaagagggcatgagaaaactctctggtgtaat

SEQ ID NO: 28804 - DNA, 33 bp, Homo sapien
ggaagagggcatgagagaactctctggtgtaat

SEQ ID NO: 28805 - DNA, 33 bp, Homo sapien
cgagtgaagctcagataaagagaaggctctgca

SEQ ID NO: 28806 - DNA, 33 bp, Homo sapien
cgagtgaagctcagatcaagagaaggctctgca

SEQ ID NO: 28807 - DNA, 33 bp, Homo sapien
aattcaatattcatgaagcatattattggtaaa

SEQ ID NO: 28808 - DNA, 33 bp, Homo sapien
aattcaatattcatgaggcatattattggtaaa

SEQ ID NO: 28809 - DNA, 33 bp, Homo sapien
acatagctgatgataaaacactaggaataatag

SEQ ID NO: 28810 - DNA, 33 bp, Homo sapien
acatagctgatgataacacactaggaataatag

SEQ ID NO: 28811 - DNA, 33 bp, Homo sapien
tttcattttatcatcccgaaatacaagacattc

SEQ ID NO: 28812 - DNA, 33 bp, Homo sapien
tttcattttatcatcctgaaatacaagacattc

SEQ ID NO: 28813 - DNA, 33 bp, Homo sapien
aaaggatgtgattgtcactattgttttatgtat

SEQ ID NO: 28814 - DNA, 33 bp, Homo sapien
aaaggatgtgattgtcgctattgttttatgtat

SEQ ID NO: 28815 - DNA, 33 bp, Homo sapien
taaaagtctttatgtaaaaccaagtatcttcta

SEQ ID NO: 28816 - DNA, 33 bp, Homo sapien
taaaagtctttatgtataaccaagtatcttcta

SEQ ID NO: 28817 - DNA, 33 bp, Homo sapien
tcaagatagtggatgacggagaattcttataag

SEQ ID NO: 28818 - DNA, 33 bp, Homo sapien
tcaagatagtggatgatggagaattcttataag

SEQ ID NO: 28819 - DNA, 33 bp, Homo sapien
aaaatggtcttcagaaattatttgctataaatt

SEQ ID NO: 28820 - DNA, 33 bp, Homo sapien
aaaatggtcttcagaagttatttgctataaatt

SEQ ID NO: 28821 - DNA, 33 bp, Homo sapien
gctgacagattgaagacagtaatagttaatgga

SEQ ID NO: 28822 - DNA, 33 bp, Homo sapien
gctgacagattgaagagagtaatagttaatgga

SEQ ID NO: 28823 - DNA, 33 bp, Homo sapien
gctgattggaagactacaagcatatacgtgcag

SEQ ID NO: 28824 - DNA, 33 bp, Homo sapien
gctgattggaagactataagcatatacgtgcag

SEQ ID NO: 28825 - DNA, 33 bp, Homo sapien
ttcattctcaaaagaaatgtggatagtaaaaca

SEQ ID NO: 28826 - DNA, 33 bp, Homo sapien
ttcattctcaaaagaagtgtggatagtaaaaca

SEQ ID NO: 28827 - DNA, 33 bp, Homo sapien
tcctttcatattaacaactttcaataaactagc

SEQ ID NO: 28828 - DNA, 33 bp, Homo sapien
tcctttcatattaacagctttcaataaactagc

SEQ ID NO: 28829 - DNA, 33 bp, Homo sapien
ttttttgatgtgccaccaattcagtttgccagc

SEQ ID NO: 28830 - DNA, 33 bp, Homo sapien
ttttttgatgtgccactaattcagtttgccagc

SEQ ID NO: 28831 - DNA, 33 bp, Homo sapien
tttaaaggccaaaagacatttggagtattacat

SEQ ID NO: 28832 - DNA, 33 bp, Homo sapien
tttaaaggccaaaagatatttggagtattacat

SEQ ID NO: 28833 - DNA, 33 bp, Homo sapien
atctcaaacattctgcaaaactcagtgctcact

SEQ ID NO: 28834 - DNA, 33 bp, Homo sapien
atctcaaacattctgccaaactcagtgctcact

SEQ ID NO: 28835 - DNA, 33 bp, Homo sapien
aatgagacctaagaataaactggtcatctaggt

SEQ ID NO: 28836 - DNA, 33 bp, Homo sapien
aatgagacctaagaattaactggtcatctaggt

SEQ ID NO: 28837 - DNA, 33 bp, Homo sapien
gaggtttttatatttaaggtgctttgagtgtca

SEQ ID NO: 28838 - DNA, 33 bp, Homo sapien
gaggtttttatatttagggtgctttgagtgtca

SEQ ID NO: 28839 - DNA, 33 bp, Homo sapien
cagaaaaattaaccaacggaaagaataggcata

SEQ ID NO: 28840 - DNA, 33 bp, Homo sapien
cagaaaaattaaccaatggaaagaataggcata

SEQ ID NO: 28841 - DNA, 33 bp, Homo sapien
aaatgtaattgataaaggaagactgaatctcca

SEQ ID NO: 28842 - DNA, 33 bp, Homo sapien
aaatgtaattgataaatgaagactgaatctcca

SEQ ID NO: 28843 - DNA, 33 bp, Homo sapien
agacaccttgcattctcactgtaacattgcttg

SEQ ID NO: 28844 - DNA, 33 bp, Homo sapien
agacaccttgcattctgactgtaacattgcttg

SEQ ID NO: 28845 - DNA, 33 bp, Homo sapien
gaggtattctctaccacgagaactgtgtgaagg

SEQ ID NO: 28846 - DNA, 33 bp, Homo sapien
gaggtattctctaccatgagaactgtgtgaagg

SEQ ID NO: 28847 - DNA, 33 bp, Homo sapien
gtacagtaaaaaccaactgagaaaaatatgcca

SEQ ID NO: 28848 - DNA, 33 bp, Homo sapien
gtacagtaaaaaccaattgagaaaaatatgcca

SEQ ID NO: 28849 - DNA, 33 bp, Homo sapien
ctaactagaatggcaactgtcacttatgttact

SEQ ID NO: 28850 - DNA, 33 bp, Homo sapien
ctaactagaatggcaattgtcacttatgttact

SEQ ID NO: 28851 - DNA, 33 bp, Homo sapien
gaatgcataggggcaaaaggaatgtctaccttt

SEQ ID NO: 28852 - DNA, 33 bp, Homo sapien
gaatgcataggggcaacaggaatgtctaccttt

SEQ ID NO: 28853 - DNA, 33 bp, Homo sapien
tcctgattagaaagtaagactattttgcaagca

SEQ ID NO: 28854 - DNA, 33 bp, Homo sapien
tcctgattagaaagtatgactattttgcaagca

SEQ ID NO: 28855 - DNA, 33 bp, Homo sapien
gcatctccttttgcagactgaagcctcgtttcc

SEQ ID NO: 28856 - DNA, 33 bp, Homo sapien
gcatctccttttgcagcctgaagcctcgtttcc

SEQ ID NO: 28857 - DNA, 33 bp, Homo sapien
ttagatggtagactcaagcatctccttttgcag

SEQ ID NO: 28858 - DNA, 33 bp, Homo sapien
ttagatggtagactcatgcatctccttttgcag

SEQ ID NO: 28859 - DNA, 33 bp, Homo sapien
tttttatgagttgcaaagatgcagaaagtaatt

SEQ ID NO: 28860 - DNA, 33 bp, Homo sapien
tttttatgagttgcaacgatgcagaaagtaatt

SEQ ID NO: 28861 - DNA, 33 bp, Homo sapien
agtgtacatgaagacacggaagtagaaattatt

SEQ ID NO: 28862 - DNA, 33 bp, Homo sapien
agtgtacatgaagacatggaagtagaaattatt

SEQ ID NO: 28863 - DNA, 33 bp, Homo sapien
ctgtaaaaaggaatgacgtactgaaacatacta

SEQ ID NO: 28864 - DNA, 33 bp, Homo sapien
ctgtaaaaaggaatgatgtactgaaacatacta

SEQ ID NO: 28865 - DNA, 33 bp, Homo sapien
agacaaggaacatggaactataatcttatggat

SEQ ID NO: 28866 - DNA, 33 bp, Homo sapien
agacaaggaacatggagctataatcttatggat

SEQ ID NO: 28867 - DNA, 33 bp, Homo sapien
cttacagaagatgaaggccagtatttttatcaa

SEQ ID NO: 28868 - DNA, 33 bp, Homo sapien
cttacagaagatgaagtccagtatttttatcaa

SEQ ID NO: 28869 - DNA, 33 bp, Homo sapien
aaagatgaatgtaaaacggagaagtgcaagagc

SEQ ID NO: 28870 - DNA, 33 bp, Homo sapien
aaagatgaatgtaaaatggagaagtgcaagagc

SEQ ID NO: 28871 - DNA, 33 bp, Homo sapien
ttactgttacaaataacgatcctattcactttt

SEQ ID NO: 28872 - DNA, 33 bp, Homo sapien
ttactgttacaaataatgatcctattcactttt

SEQ ID NO: 28873 - DNA, 33 bp, Homo sapien
cattttataaccgaaacggagttacgcatagga

SEQ ID NO: 28874 - DNA, 33 bp, Homo sapien
cattttataaccgaaatggagttacgcatagga

SEQ ID NO: 28875 - DNA, 33 bp, Homo sapien
ttgtgtatacaattcaaatatgtttagagactc

SEQ ID NO: 28876 - DNA, 33 bp, Homo sapien
ttgtgtatacaattcatatatgtttagagactc

SEQ ID NO: 28877 - DNA, 33 bp, Homo sapien
ttgaagagttttgaaaagaatttagtgtaattg

SEQ ID NO: 28878 - DNA, 33 bp, Homo sapien
ttgaagagttttgaaatgaatttagtgtaattg

SEQ ID NO: 28879 - DNA, 33 bp, Homo sapien
agtagcatttatgttacacttggaagaaggcat

SEQ ID NO: 28880 - DNA, 33 bp, Homo sapien
agtagcatttatgttagacttggaagaaggcat

SEQ ID NO: 28881 - DNA, 33 bp, Homo sapien
aagagagtcagatgaacaacaaataattgaata

SEQ ID NO: 28882 - DNA, 33 bp, Homo sapien
aagagagtcagatgaataacaaataattgaata

SEQ ID NO: 28883 - DNA, 33 bp, Homo sapien
ataaaatggatagaatcataagacaggcattct

SEQ ID NO: 28884 - DNA, 33 bp, Homo sapien
ataaaatggatagaatgataagacaggcattct

SEQ ID NO: 28885 - DNA, 33 bp, Homo sapien
cagatatgtgttcgtccacactggtaaaaacag

SEQ ID NO: 28886 - DNA, 33 bp, Homo sapien
cagatatgtgttcgtctacactggtaaaaacag

SEQ ID NO: 28887 - DNA, 33 bp, Homo sapien
tctagtgtgatttccaccgtttgttagtgatgt

SEQ ID NO: 28888 - DNA, 33 bp, Homo sapien
tctagtgtgatttccatcgtttgttagtgatgt

SEQ ID NO: 28889 - DNA, 33 bp, Homo sapien
ccaattgtattagtcacgttaattctgctcttc

SEQ ID NO: 28890 - DNA, 33 bp, Homo sapien
ccaattgtattagtcatgttaattctgctcttc

SEQ ID NO: 28891 - DNA, 33 bp, Homo sapien
gtgaaaacactgatacaggcatagaggcagatg

SEQ ID NO: 28892 - DNA, 33 bp, Homo sapien
gtgaaaacactgatacgggcatagaggcagatg

SEQ ID NO: 28893 - DNA, 33 bp, Homo sapien
agactgctcacctacaaaaaccatgagaaaata

SEQ ID NO: 28894 - DNA, 33 bp, Homo sapien
agactgctcacctacagaaaccatgagaaaata

SEQ ID NO: 28895 - DNA, 33 bp, Homo sapien
gcccatatttcttaccccacaatctccttcatc

SEQ ID NO: 28896 - DNA, 33 bp, Homo sapien
gcccatatttcttacctcacaatctccttcatc

SEQ ID NO: 28897 - DNA, 33 bp, Homo sapien
ttctaaggtgaccctcaagttcctcctcactgc

SEQ ID NO: 28898 - DNA, 33 bp, Homo sapien
ttctaaggtgaccctcgagttcctcctcactgc

SEQ ID NO: 28899 - DNA, 33 bp, Homo sapien
tgctaagtgaaaggcaataaaagaaggtatgtc

SEQ ID NO: 28900 - DNA, 33 bp, Homo sapien
tgctaagtgaaaggcattaaaagaaggtatgtc

SEQ ID NO: 28901 - DNA, 33 bp, Homo sapien
ttggaattgaataactaacaggaaacaagatat

SEQ ID NO: 28902 - DNA, 33 bp, Homo sapien
ttggaattgaataactcacaggaaacaagatat

SEQ ID NO: 28903 - DNA, 33 bp, Homo sapien
ctgaaagcgaaaggaacataatggctctggcag

SEQ ID NO: 28904 - DNA, 33 bp, Homo sapien
ctgaaagcgaaaggaagataatggctctggcag

SEQ ID NO: 28905 - DNA, 33 bp, Homo sapien
tttttccagtatttagaaaccaattttacagat

SEQ ID NO: 28906 - DNA, 33 bp, Homo sapien
tttttccagtatttagcaaccaattttacagat

SEQ ID NO: 28907 - DNA, 33 bp, Homo sapien
cagcaaactggagacacggaagagctaatatgt

SEQ ID NO: 28908 - DNA, 33 bp, Homo sapien
cagcaaactggagacatggaagagctaatatgt

SEQ ID NO: 28909 - DNA, 33 bp, Homo sapien
aataatccacagtttaacaagacaaggatactc

SEQ ID NO: 28910 - DNA, 33 bp, Homo sapien
aataatccacagtttagcaagacaaggatactc

SEQ ID NO: 28911 - DNA, 33 bp, Homo sapien
cctgttctgagctacgcattgcatctgttcagg

SEQ ID NO: 28912 - DNA, 33 bp, Homo sapien
cctgttctgagctacgtattgcatctgttcagg

SEQ ID NO: 28913 - DNA, 33 bp, Homo sapien
ctctactgaccagcagaaaaaaacaacttgagt

SEQ ID NO: 28914 - DNA, 33 bp, Homo sapien
ctctactgaccagcaggaaaaaacaacttgagt

SEQ ID NO: 28915 - DNA, 33 bp, Homo sapien
agtgaattgcattgtacaggaattctgccttgg

SEQ ID NO: 28916 - DNA, 33 bp, Homo sapien
agtgaattgcattgtataggaattctgccttgg

SEQ ID NO: 28917 - DNA, 33 bp, Homo sapien
ttccctttacttaggacctatttcatgccctta

SEQ ID NO: 28918 - DNA, 33 bp, Homo sapien
ttccctttacttaggatctatttcatgccctta

SEQ ID NO: 28919 - DNA, 33 bp, Homo sapien
gtcatatagccacaaggagaatcatgttggtga

SEQ ID NO: 28920 - DNA, 33 bp, Homo sapien
gtcatatagccacaagtagaatcatgttggtga

SEQ ID NO: 28921 - DNA, 33 bp, Homo sapien
ttatagcaaaggagaacgtagaggcaaagagaa

SEQ ID NO: 28922 - DNA, 33 bp, Homo sapien
ttatagcaaaggagaatgtagaggcaaagagaa

SEQ ID NO: 28923 - DNA, 33 bp, Homo sapien
ttcttatgcattgaaaatgactcagtaggaaaa

SEQ ID NO: 28924 - DNA, 33 bp, Homo sapien
ttcttatgcattgaaagtgactcagtaggaaaa

SEQ ID NO: 28925 - DNA, 33 bp, Homo sapien
attctgtgtcctcttccaaatcttgcttttgaa

SEQ ID NO: 28926 - DNA, 33 bp, Homo sapien
attctgtgtcctcttcgaaatcttgcttttgaa

SEQ ID NO: 28927 - DNA, 33 bp, Homo sapien
ggcttgctttgattcaagtttcagaggaaagtt

SEQ ID NO: 28928 - DNA, 33 bp, Homo sapien
ggcttgctttgattcaggtttcagaggaaagtt

SEQ ID NO: 28929 - DNA, 33 bp, Homo sapien
agtgagtggatgttccagagacattatcccaag

SEQ ID NO: 28930 - DNA, 33 bp, Homo sapien
agtgagtggatgttccggagacattatcccaag

SEQ ID NO: 28931 - DNA, 33 bp, Homo sapien
catacacatatacagaatagcgatttaacatgg

SEQ ID NO: 28932 - DNA, 33 bp, Homo sapien
catacacatatacagagtagcgatttaacatgg

SEQ ID NO: 28933 - DNA, 33 bp, Homo sapien
cacagaagtcattgtacgtttttatttgcattt

SEQ ID NO: 28934 - DNA, 33 bp, Homo sapien
cacagaagtcattgtatgtttttatttgcattt

SEQ ID NO: 28935 - DNA, 33 bp, Homo sapien
acttaattccagacaacaatatgttcttagttt

SEQ ID NO: 28936 - DNA, 33 bp, Homo sapien
acttaattccagacaataatatgttcttagttt

SEQ ID NO: 28937 - DNA, 33 bp, Homo sapien
ggtagctaaaatagtaaaggttctttgagttaa

SEQ ID NO: 28938 - DNA, 33 bp, Homo sapien
ggtagctaaaatagtacaggttctttgagttaa

SEQ ID NO: 28939 - DNA, 33 bp, Homo sapien
aagatggtaaatgtggaagattttattgctgat

SEQ ID NO: 28940 - DNA, 33 bp, Homo sapien
aagatggtaaatgtggtagattttattgctgat

SEQ ID NO: 28941 - DNA, 33 bp, Homo sapien
ctgctacatcgtttgaccacagggtgaattcta

SEQ ID NO: 28942 - DNA, 33 bp, Homo sapien
ctgctacatcgtttgatcacagggtgaattcta

SEQ ID NO: 28943 - DNA, 33 bp, Homo sapien
agctcactgagcccaaattctccattaccctat

SEQ ID NO: 28944 - DNA, 33 bp, Homo sapien
agctcactgagcccaatttctccattaccctat

SEQ ID NO: 28945 - DNA, 33 bp, Homo sapien
gtagatctcttcagacgcaagctcaaagttaca

SEQ ID NO: 28946 - DNA, 33 bp, Homo sapien
gtagatctcttcagactcaagctcaaagttaca

SEQ ID NO: 28947 - DNA, 33 bp, Homo sapien
ccagtgaatgatttataacaacacatagagacc

SEQ ID NO: 28948 - DNA, 33 bp, Homo sapien
ccagtgaatgatttatgacaacacatagagacc

SEQ ID NO: 28949 - DNA, 33 bp, Homo sapien
tcagggccatttggcacaagacactggtataat

SEQ ID NO: 28950 - DNA, 33 bp, Homo sapien
tcagggccatttggcataagacactggtataat

SEQ ID NO: 28951 - DNA, 33 bp, Homo sapien
aacaacacaggttgaaaattgaaagtttctatg

SEQ ID NO: 28952 - DNA, 33 bp, Homo sapien
aacaacacaggttgaagattgaaagtttctatg

SEQ ID NO: 28953 - DNA, 33 bp, Homo sapien
atttctactgaaaaacaggttatacagctacat

SEQ ID NO: 28954 - DNA, 33 bp, Homo sapien
atttctactgaaaaaccggttatacagctacat

SEQ ID NO: 28955 - DNA, 33 bp, Homo sapien
attcagctgaagtggaaactgttggattcctac

SEQ ID NO: 28956 - DNA, 33 bp, Homo sapien
attcagctgaagtggacactgttggattcctac

SEQ ID NO: 28957 - DNA, 33 bp, Homo sapien
cacgggacaaactacaatgtaatttacacccga

SEQ ID NO: 28958 - DNA, 33 bp, Homo sapien
cacgggacaaactacagtgtaatttacacccga

SEQ ID NO: 28959 - DNA, 33 bp, Homo sapien
gaaactctaacttgaacgaaaagaagagagagt

SEQ ID NO: 28960 - DNA, 33 bp, Homo sapien
gaaactctaacttgaatgaaaagaagagagagt

SEQ ID NO: 28961 - DNA, 33 bp, Homo sapien
taaaagactgtaggtcactttgggaaaggctgg

SEQ ID NO: 28962 - DNA, 33 bp, Homo sapien
taaaagactgtaggtcgctttgggaaaggctgg

SEQ ID NO: 28963 - DNA, 33 bp, Homo sapien
atattttccaccataccgaacagctggtttgac

SEQ ID NO: 28964 - DNA, 33 bp, Homo sapien
atattttccaccatactgaacagctggtttgac

SEQ ID NO: 28965 - DNA, 33 bp, Homo sapien
tctattagcaaaattaagtatgcataaaataga

SEQ ID NO: 28966 - DNA, 33 bp, Homo sapien
tctattagcaaaattaggtatgcataaaataga

SEQ ID NO: 28967 - DNA, 33 bp, Homo sapien
taatagcatctgaccacctttgttttgatgtat

SEQ ID NO: 28968 - DNA, 33 bp, Homo sapien
taatagcatctgaccatctttgttttgatgtat

SEQ ID NO: 28969 - DNA, 33 bp, Homo sapien
caagtgatagatattactaagtgaataatgtat

SEQ ID NO: 28970 - DNA, 33 bp, Homo sapien
caagtgatagatattagtaagtgaataatgtat

SEQ ID NO: 28971 - DNA, 33 bp, Homo sapien
aagtcctgagtttacaccctttctgagaatttc

SEQ ID NO: 28972 - DNA, 33 bp, Homo sapien
aagtcctgagtttacatcctttctgagaatttc

SEQ ID NO: 28973 - DNA, 33 bp, Homo sapien
ataaaaaatgaccacaagtatgacaaaaattta

SEQ ID NO: 28974 - DNA, 33 bp, Homo sapien
ataaaaaatgaccacaggtatgacaaaaattta

SEQ ID NO: 28975 - DNA, 33 bp, Homo sapien
tgagcacttatgaaaccgaagtaaccattctaa

SEQ ID NO: 28976 - DNA, 33 bp, Homo sapien
tgagcacttatgaaactgaagtaaccattctaa

SEQ ID NO: 28977 - DNA, 33 bp, Homo sapien
aaatctgattttgtgacactactaattaaagct

SEQ ID NO: 28978 - DNA, 33 bp, Homo sapien
aaatctgattttgtgatactactaattaaagct

SEQ ID NO: 28979 - DNA, 33 bp, Homo sapien
gtcaatacactagacacgagtggggtgcaaccc

SEQ ID NO: 28980 - DNA, 33 bp, Homo sapien
gtcaatacactagacatgagtggggtgcaaccc

SEQ ID NO: 28981 - DNA, 33 bp, Homo sapien
aacattaattgctgaacgtaggttttcaatgta

SEQ ID NO: 28982 - DNA, 33 bp, Homo sapien
aacattaattgctgaatgtaggttttcaatgta

SEQ ID NO: 28983 - DNA, 33 bp, Homo sapien
tgataccaggattggtaaacaagacctgtgatg

SEQ ID NO: 28984 - DNA, 33 bp, Homo sapien
tgataccaggattggttaacaagacctgtgatg

SEQ ID NO: 28985 - DNA, 33 bp, Homo sapien
ccaatcctggtatcacaaaccttagagggattg

SEQ ID NO: 28986 - DNA, 33 bp, Homo sapien
ccaatcctggtatcaccaaccttagagggattg

SEQ ID NO: 28987 - DNA, 33 bp, Homo sapien
ttatccatgaatctaaacaaattgagtttcccc

SEQ ID NO: 28988 - DNA, 33 bp, Homo sapien
ttatccatgaatctaagcaaattgagtttcccc

SEQ ID NO: 28989 - DNA, 33 bp, Homo sapien
ctggctattctcttgcaacatactgtaactttg

SEQ ID NO: 28990 - DNA, 33 bp, Homo sapien
ctggctattctcttgcgacatactgtaactttg

SEQ ID NO: 28991 - DNA, 33 bp, Homo sapien
gagtcaatataaacaaacttctttctgtctaac

SEQ ID NO: 28992 - DNA, 33 bp, Homo sapien
gagtcaatataaacaaccttctttctgtctaac

SEQ ID NO: 28993 - DNA, 33 bp, Homo sapien
gtttctattggtttagcaccatattcctagtgc

SEQ ID NO: 28994 - DNA, 33 bp, Homo sapien
gtttctattggtttagtaccatattcctagtgc

SEQ ID NO: 28995 - DNA, 33 bp, Homo sapien
cattttcccttttcctcagaccctgtttatttc

SEQ ID NO: 28996 - DNA, 33 bp, Homo sapien
cattttcccttttcctgagaccctgtttatttc

SEQ ID NO: 28997 - DNA, 33 bp, Homo sapien
ttatttcatcttttgcaacacttaaaaaatgta

SEQ ID NO: 28998 - DNA, 33 bp, Homo sapien
ttatttcatcttttgcgacacttaaaaaatgta

SEQ ID NO: 28999 - DNA, 33 bp, Homo sapien
aggcttgtatggctaacatttgcactgtgcctg

SEQ ID NO: 29000 - DNA, 33 bp, Homo sapien
aggcttgtatggctaatatttgcactgtgcctg

SEQ ID NO: 29001 - DNA, 33 bp, Homo sapien
tagcttaactacttataagtcaaaggcaaaatg

SEQ ID NO: 29002 - DNA, 33 bp, Homo sapien
tagcttaactacttattagtcaaaggcaaaatg

SEQ ID NO: 29003 - DNA, 33 bp, Homo sapien
taaatggacacacagcaattttctgctttattt

SEQ ID NO: 29004 - DNA, 33 bp, Homo sapien
taaatggacacacagccattttctgctttattt

SEQ ID NO: 29005 - DNA, 33 bp, Homo sapien
gcatagtaaacacttacacagtaatctctttat

SEQ ID NO: 29006 - DNA, 33 bp, Homo sapien
gcatagtaaacacttatacagtaatctctttat

SEQ ID NO: 29007 - DNA, 33 bp, Homo sapien
tctgtccgggcaaaccaagctaaattctgaggt

SEQ ID NO: 29008 - DNA, 33 bp, Homo sapien
tctgtccgggcaaacccagctaaattctgaggt

SEQ ID NO: 29009 - DNA, 33 bp, Homo sapien
catttcatgttgaagtaaaagccaaacacaggg

SEQ ID NO: 29010 - DNA, 33 bp, Homo sapien
catttcatgttgaagtcaaagccaaacacaggg

SEQ ID NO: 29011 - DNA, 33 bp, Homo sapien
gattttaagaactggacagtaaaatcatttgga

SEQ ID NO: 29012 - DNA, 33 bp, Homo sapien
gattttaagaactggatagtaaaatcatttgga

SEQ ID NO: 29013 - DNA, 33 bp, Homo sapien
tttgcaattgtggaagcaaattttaggaagatt

SEQ ID NO: 29014 - DNA, 33 bp, Homo sapien
tttgcaattgtggaagtaaattttaggaagatt

SEQ ID NO: 29015 - DNA, 33 bp, Homo sapien
tttccaatgtcagaagaaaatattcctatatga

SEQ ID NO: 29016 - DNA, 33 bp, Homo sapien
tttccaatgtcagaaggaaatattcctatatga

SEQ ID NO: 29017 - DNA, 33 bp, Homo sapien
gatcctgtttaccatgaagaaaattgtcaccta

SEQ ID NO: 29018 - DNA, 33 bp, Homo sapien
gatcctgtttaccatgcagaaaattgtcaccta

SEQ ID NO: 29019 - DNA, 33 bp, Homo sapien
aaatgtcttaaaaagcacagattgaacaggcca

SEQ ID NO: 29020 - DNA, 33 bp, Homo sapien
aaatgtcttaaaaagcgcagattgaacaggcca

SEQ ID NO: 29021 - DNA, 33 bp, Homo sapien
ttccaactggaaaaaaatcatatatatgtatat

SEQ ID NO: 29022 - DNA, 33 bp, Homo sapien
ttccaactggaaaaaattcatatatatgtatat

SEQ ID NO: 29023 - DNA, 33 bp, Homo sapien
gtctgccaagaccttaaaccatacagatatagc

SEQ ID NO: 29024 - DNA, 33 bp, Homo sapien
gtctgccaagaccttagaccatacagatatagc

SEQ ID NO: 29025 - DNA, 33 bp, Homo sapien
ggaagcagctccttatgagaagtgcatataggc

SEQ ID NO: 29026 - DNA, 33 bp, Homo sapien
ggaagcagctccttattagaagtgcatataggc

SEQ ID NO: 29027 - DNA, 33 bp, Homo sapien
ttgaagaggcaaaacaatggaatacatagagaa

SEQ ID NO: 29028 - DNA, 33 bp, Homo sapien
ttgaagaggcaaaacagtggaatacatagagaa

SEQ ID NO: 29029 - DNA, 33 bp, Homo sapien
tgagttattcaatgtgcatattcacagctgagg

SEQ ID NO: 29030 - DNA, 33 bp, Homo sapien
tgagttattcaatgtggatattcacagctgagg

SEQ ID NO: 29031 - DNA, 33 bp, Homo sapien
tgcctgtattgaattaacttagcaaatacaaag

SEQ ID NO: 29032 - DNA, 33 bp, Homo sapien
tgcctgtattgaattatcttagcaaatacaaag

SEQ ID NO: 29033 - DNA, 33 bp, Homo sapien
gtagttcatcactcaaatacacctctttaagaa

SEQ ID NO: 29034 - DNA, 33 bp, Homo sapien
gtagttcatcactcaagtacacctctttaagaa

SEQ ID NO: 29035 - DNA, 33 bp, Homo sapien
tattgtactatactcaaccttctcttgtgatga

SEQ ID NO: 29036 - DNA, 33 bp, Homo sapien
tattgtactatactcatccttctcttgtgatga

SEQ ID NO: 29037 - DNA, 33 bp, Homo sapien
tatttctcgtgcccaacaacaagatgcaaatga

SEQ ID NO: 29038 - DNA, 33 bp, Homo sapien
tatttctcgtgcccaataacaagatgcaaatga

SEQ ID NO: 29039 - DNA, 33 bp, Homo sapien
agtggagagagggtcaataggaaaacatgtgaa

SEQ ID NO: 29040 - DNA, 33 bp, Homo sapien
agtggagagagggtcagtaggaaaacatgtgaa

SEQ ID NO: 29041 - DNA, 33 bp, Homo sapien
acagtgagacttaaaactgactgatgacagaca

SEQ ID NO: 29042 - DNA, 33 bp, Homo sapien
acagtgagacttaaaagtgactgatgacagaca

SEQ ID NO: 29043 - DNA, 33 bp, Homo sapien
agttcccaacaggatggatatgtgagaggtgag

SEQ ID NO: 29044 - DNA, 33 bp, Homo sapien
agttcccaacaggatgtatatgtgagaggtgag

SEQ ID NO: 29045 - DNA, 33 bp, Homo sapien
ttacgtcttagggtggaatcaagtattgtttct

SEQ ID NO: 29046 - DNA, 33 bp, Homo sapien
ttacgtcttagggtggtatcaagtattgtttct

SEQ ID NO: 29047 - DNA, 33 bp, Homo sapien
caaagccataacaaaactatttgggtccccaac

SEQ ID NO: 29048 - DNA, 33 bp, Homo sapien
caaagccataacaaaattatttgggtccccaac

SEQ ID NO: 29049 - DNA, 33 bp, Homo sapien
tgaagcaacaaattctaaagataggagtcggtt

SEQ ID NO: 29050 - DNA, 33 bp, Homo sapien
tgaagcaacaaattcttaagataggagtcggtt

SEQ ID NO: 29051 - DNA, 33 bp, Homo sapien
aagggacttaaaacaggaatgcttccatttatt

SEQ ID NO: 29052 - DNA, 33 bp, Homo sapien
aagggacttaaaacagtaatgcttccatttatt

SEQ ID NO: 29053 - DNA, 33 bp, Homo sapien
gggttaaattaggataggcttgtatgctaatga

SEQ ID NO: 29054 - DNA, 33 bp, Homo sapien
gggttaaattaggatatgcttgtatgctaatga

SEQ ID NO: 29055 - DNA, 33 bp, Homo sapien
caaccctatcttgttacccttgatttctctttt

SEQ ID NO: 29056 - DNA, 33 bp, Homo sapien
caaccctatcttgttatccttgatttctctttt

SEQ ID NO: 29057 - DNA, 33 bp, Homo sapien
aatgaaagtccttttgcaatgtgaagaagatag

SEQ ID NO: 29058 - DNA, 33 bp, Homo sapien
aatgaaagtccttttggaatgtgaagaagatag

SEQ ID NO: 29059 - DNA, 33 bp, Homo sapien
ggatacactgttcttacgaattctgatggactt

SEQ ID NO: 29060 - DNA, 33 bp, Homo sapien
ggatacactgttcttatgaattctgatggactt

SEQ ID NO: 29061 - DNA, 33 bp, Homo sapien
catgtattaagtatgacgtcaacctctactggt

SEQ ID NO: 29062 - DNA, 33 bp, Homo sapien
catgtattaagtatgatgtcaacctctactggt

SEQ ID NO: 29063 - DNA, 33 bp, Homo sapien
gtctgcatagtgtacaactttataaaaccccta

SEQ ID NO: 29064 - DNA, 33 bp, Homo sapien
gtctgcatagtgtacagctttataaaaccccta

SEQ ID NO: 29065 - DNA, 33 bp, Homo sapien
ccatatttgtatagccaagtgttaaactgatct

SEQ ID NO: 29066 - DNA, 33 bp, Homo sapien
ccatatttgtatagcccagtgttaaactgatct

SEQ ID NO: 29067 - DNA, 33 bp, Homo sapien
tggtggtattgtcaaactgagaagatactgact

SEQ ID NO: 29068 - DNA, 33 bp, Homo sapien
tggtggtattgtcaaattgagaagatactgact

SEQ ID NO: 29069 - DNA, 33 bp, Homo sapien
cactcattctggccaaagggatttaatcagaaa

SEQ ID NO: 29070 - DNA, 33 bp, Homo sapien
cactcattctggccaatgggatttaatcagaaa

SEQ ID NO: 29071 - DNA, 33 bp, Homo sapien
aagcattcattattgacgtaagattcttttggt

SEQ ID NO: 29072 - DNA, 33 bp, Homo sapien
aagcattcattattgatgtaagattcttttggt

SEQ ID NO: 29073 - DNA, 33 bp, Homo sapien
ctccaaacttcttttacgtgagattgaaaataa

SEQ ID NO: 29074 - DNA, 33 bp, Homo sapien
ctccaaacttcttttatgtgagattgaaaataa

SEQ ID NO: 29075 - DNA, 33 bp, Homo sapien
tattcaggtggagtcaccaaccattggcaacgt

SEQ ID NO: 29076 - DNA, 33 bp, Homo sapien
tattcaggtggagtcatcaaccattggcaacgt

SEQ ID NO: 29077 - DNA, 33 bp, Homo sapien
agttgtgagttctcaaagtgagagttaactagg

SEQ ID NO: 29078 - DNA, 33 bp, Homo sapien
agttgtgagttctcaatgtgagagttaactagg

SEQ ID NO: 29079 - DNA, 33 bp, Homo sapien
gaagcgtctaataaaccgcctcaaattcaagtt

SEQ ID NO: 29080 - DNA, 33 bp, Homo sapien
gaagcgtctaataaactgcctcaaattcaagtt

SEQ ID NO: 29081 - DNA, 33 bp, Homo sapien
ttgaaatgaagaaagacggaaatgacatagaat

SEQ ID NO: 29082 - DNA, 33 bp, Homo sapien
ttgaaatgaagaaagatggaaatgacatagaat

SEQ ID NO: 29083 - DNA, 33 bp, Homo sapien
gcctccaaaattgaacgcactaaacatctgtta

SEQ ID NO: 29084 - DNA, 33 bp, Homo sapien
gcctccaaaattgaactcactaaacatctgtta

SEQ ID NO: 29085 - DNA, 33 bp, Homo sapien
gattaaacattttgaacgtaacaggagtacttt

SEQ ID NO: 29086 - DNA, 33 bp, Homo sapien
gattaaacattttgaatgtaacaggagtacttt

SEQ ID NO: 29087 - DNA, 33 bp, Homo sapien
aatccatcatgaataaagcaacaacaacgacag

SEQ ID NO: 29088 - DNA, 33 bp, Homo sapien
aatccatcatgaataaggcaacaacaacgacag

SEQ ID NO: 29089 - DNA, 33 bp, Homo sapien
ttcccaaactggatcaatgagaaccggcataga

SEQ ID NO: 29090 - DNA, 33 bp, Homo sapien
ttcccaaactggatcagtgagaaccggcataga

SEQ ID NO: 29091 - DNA, 33 bp, Homo sapien
gtaaaatctgtactcaacaagtttcaaagaaac

SEQ ID NO: 29092 - DNA, 33 bp, Homo sapien
gtaaaatctgtactcaccaagtttcaaagaaac

SEQ ID NO: 29093 - DNA, 33 bp, Homo sapien
caactgctggggcacaagataattgaatgttta

SEQ ID NO: 29094 - DNA, 33 bp, Homo sapien
caactgctggggcacatgataattgaatgttta

SEQ ID NO: 29095 - DNA, 33 bp, Homo sapien
gccagaaatacatccaatgaaaataacttagta

SEQ ID NO: 29096 - DNA, 33 bp, Homo sapien
gccagaaatacatccagtgaaaataacttagta

SEQ ID NO: 29097 - DNA, 33 bp, Homo sapien
aagagacattctgcacacagataactgcaattg

SEQ ID NO: 29098 - DNA, 33 bp, Homo sapien
aagagacattctgcactcagataactgcaattg

SEQ ID NO: 29099 - DNA, 33 bp, Homo sapien
aattattgcatgaaccaaaagaaaaaagagagt

SEQ ID NO: 29100 - DNA, 33 bp, Homo sapien
aattattgcatgaaccgaaagaaaaaagagagt

SEQ ID NO: 29101 - DNA, 33 bp, Homo sapien
ggaaaagaggcaactcaactggtagaagcaaaa

SEQ ID NO: 29102 - DNA, 33 bp, Homo sapien
ggaaaagaggcaactccactggtagaagcaaaa

SEQ ID NO: 29103 - DNA, 33 bp, Homo sapien
atggtgtctggcactacgtaattccttatttaa

SEQ ID NO: 29104 - DNA, 33 bp, Homo sapien
atggtgtctggcactatgtaattccttatttaa

SEQ ID NO: 29105 - DNA, 33 bp, Homo sapien
tatgtaaaaggaacacacagagaatactttcta

SEQ ID NO: 29106 - DNA, 33 bp, Homo sapien
tatgtaaaaggaacacgcagagaatactttcta

SEQ ID NO: 29107 - DNA, 33 bp, Homo sapien
tactgtctttcaaatgaataacagtgtctattg

SEQ ID NO: 29108 - DNA, 33 bp, Homo sapien
tactgtctttcaaatggataacagtgtctattg

SEQ ID NO: 29109 - DNA, 33 bp, Homo sapien
tcattatcctgaaaaccggcaaatgtatcaaaa

SEQ ID NO: 29110 - DNA, 33 bp, Homo sapien
tcattatcctgaaaactggcaaatgtatcaaaa

SEQ ID NO: 29111 - DNA, 33 bp, Homo sapien
tttaaagccatttaggcatagagaatatcatta

SEQ ID NO: 29112 - DNA, 33 bp, Homo sapien
tttaaagccatttaggtatagagaatatcatta

SEQ ID NO: 29113 - DNA, 33 bp, Homo sapien
aaattaaccacaacaaccaatgagctcttctca

SEQ ID NO: 29114 - DNA, 33 bp, Homo sapien
aaattaaccacaacaatcaatgagctcttctca

SEQ ID NO: 29115 - DNA, 33 bp, Homo sapien
acaaactttaattctacattcagggatcctctc

SEQ ID NO: 29116 - DNA, 33 bp, Homo sapien
acaaactttaattctagattcagggatcctctc

SEQ ID NO: 29117 - DNA, 33 bp, Homo sapien
atacaaaataattccactcaaagtctagactat

SEQ ID NO: 29118 - DNA, 33 bp, Homo sapien
atacaaaataattccattcaaagtctagactat

SEQ ID NO: 29119 - DNA, 33 bp, Homo sapien
tccagtatttttatgaccctgcatttcaaagaa

SEQ ID NO: 29120 - DNA, 33 bp, Homo sapien
tccagtatttttatgatcctgcatttcaaagaa

SEQ ID NO: 29121 - DNA, 33 bp, Homo sapien
tcccagtgggatataaggagtttctaggacctg

SEQ ID NO: 29122 - DNA, 33 bp, Homo sapien
tcccagtgggatataatgagtttctaggacctg

SEQ ID NO: 29123 - DNA, 33 bp, Homo sapien
gtgataataatagctaacttgatgcatttatca

SEQ ID NO: 29124 - DNA, 33 bp, Homo sapien
gtgataataatagctagcttgatgcatttatca

SEQ ID NO: 29125 - DNA, 33 bp, Homo sapien
actctgctgaaaccaaattcttcaaacagccta

SEQ ID NO: 29126 - DNA, 33 bp, Homo sapien
actctgctgaaaccaagttcttcaaacagccta

SEQ ID NO: 29127 - DNA, 33 bp, Homo sapien
gcattaatttcttgcactatttcttgcaattgc

SEQ ID NO: 29128 - DNA, 33 bp, Homo sapien
gcattaatttcttgcattatttcttgcaattgc

SEQ ID NO: 29129 - DNA, 33 bp, Homo sapien
ttactgtcctacctcacggttatatcaactctg

SEQ ID NO: 29130 - DNA, 33 bp, Homo sapien
ttactgtcctacctcagggttatatcaactctg

SEQ ID NO: 29131 - DNA, 33 bp, Homo sapien
agctgtctcaaaagaaaagtagttatctgcaga

SEQ ID NO: 29132 - DNA, 33 bp, Homo sapien
agctgtctcaaaagaagagtagttatctgcaga

SEQ ID NO: 29133 - DNA, 33 bp, Homo sapien
atcatttgttttgtacaacatggggttttatgc

SEQ ID NO: 29134 - DNA, 33 bp, Homo sapien
atcatttgttttgtaccacatggggttttatgc

SEQ ID NO: 29135 - DNA, 33 bp, Homo sapien
agtcagctctgggacaatgataaccaatggatt

SEQ ID NO: 29136 - DNA, 33 bp, Homo sapien
agtcagctctgggacagtgataaccaatggatt

SEQ ID NO: 29137 - DNA, 33 bp, Homo sapien
cacaggagccagagtaagctagaagaccattgc

SEQ ID NO: 29138 - DNA, 33 bp, Homo sapien
cacaggagccagagtaggctagaagaccattgc

SEQ ID NO: 29139 - DNA, 33 bp, Homo sapien
atggtaaagaagcaacagtacccgaagtgacag

SEQ ID NO: 29140 - DNA, 33 bp, Homo sapien
atggtaaagaagcaacggtacccgaagtgacag

SEQ ID NO: 29141 - DNA, 33 bp, Homo sapien
cacattttatttcccactggaagaactcccata

SEQ ID NO: 29142 - DNA, 33 bp, Homo sapien
cacattttatttcccattggaagaactcccata

SEQ ID NO: 29143 - DNA, 33 bp, Homo sapien
aaattttctccactcacctagaccttagtaatc

SEQ ID NO: 29144 - DNA, 33 bp, Homo sapien
aaattttctccactcatctagaccttagtaatc

SEQ ID NO: 29145 - DNA, 33 bp, Homo sapien
agaatcatcgaaacaagaaaaaaacagcacagt

SEQ ID NO: 29146 - DNA, 33 bp, Homo sapien
agaatcatcgaaacaataaaaaaacagcacagt

SEQ ID NO: 29147 - DNA, 33 bp, Homo sapien
tgatgataaaccacaagttcactaaaatcgcca

SEQ ID NO: 29148 - DNA, 33 bp, Homo sapien
tgatgataaaccacaatttcactaaaatcgcca

SEQ ID NO: 29149 - DNA, 33 bp, Homo sapien
gtattaagcatattaaacttttgtgatacaggt

SEQ ID NO: 29150 - DNA, 33 bp, Homo sapien
gtattaagcatattaaccttttgtgatacaggt

SEQ ID NO: 29151 - DNA, 33 bp, Homo sapien
tcttttctctacattacactctaatacaacctg

SEQ ID NO: 29152 - DNA, 33 bp, Homo sapien
tcttttctctacattatactctaatacaacctg

SEQ ID NO: 29153 - DNA, 33 bp, Homo sapien
tactagccaatatggacgtatcaggcacagttc

SEQ ID NO: 29154 - DNA, 33 bp, Homo sapien
tactagccaatatggatgtatcaggcacagttc

SEQ ID NO: 29155 - DNA, 33 bp, Homo sapien
cgccaccctcacttaaatgaaataatttcaaca

SEQ ID NO: 29156 - DNA, 33 bp, Homo sapien
cgccaccctcacttaactgaaataatttcaaca

SEQ ID NO: 29157 - DNA, 33 bp, Homo sapien
ttccagtgacagcaaaaaaaatagaaagaattg

SEQ ID NO: 29158 - DNA, 33 bp, Homo sapien
ttccagtgacagcaaagaaaatagaaagaattg

SEQ ID NO: 29159 - DNA, 33 bp, Homo sapien
cctctgagctccagacgattgtgtccagatacc

SEQ ID NO: 29160 - DNA, 33 bp, Homo sapien
cctctgagctccagactattgtgtccagatacc

SEQ ID NO: 29161 - DNA, 33 bp, Homo sapien
tgtagagtttatcagcacattcatcaggataga

SEQ ID NO: 29162 - DNA, 33 bp, Homo sapien
tgtagagtttatcagcgcattcatcaggataga

SEQ ID NO: 29163 - DNA, 33 bp, Homo sapien
atgctgtgaatgagaaaagactgtaattcaaag

SEQ ID NO: 29164 - DNA, 33 bp, Homo sapien
atgctgtgaatgagaagagactgtaattcaaag

SEQ ID NO: 29165 - DNA, 33 bp, Homo sapien
aagtagttttaacaccactatctggtttatgta

SEQ ID NO: 29166 - DNA, 33 bp, Homo sapien
aagtagttttaacaccgctatctggtttatgta

SEQ ID NO: 29167 - DNA, 33 bp, Homo sapien
cttctgatacaaactccacacaaatggacacaa

SEQ ID NO: 29168 - DNA, 33 bp, Homo sapien
cttctgatacaaactctacacaaatggacacaa

SEQ ID NO: 29169 - DNA, 33 bp, Homo sapien
actgtggagaacaatacggtggttcttccaaaa

SEQ ID NO: 29170 - DNA, 33 bp, Homo sapien
actgtggagaacaatatggtggttcttccaaaa

SEQ ID NO: 29171 - DNA, 33 bp, Homo sapien
tgctggtatttcattacatatcattccacttct

SEQ ID NO: 29172 - DNA, 33 bp, Homo sapien
tgctggtatttcattatatatcattccacttct

SEQ ID NO: 29173 - DNA, 33 bp, Homo sapien
ctattaaggtaagtcccctaagcagtattaacc

SEQ ID NO: 29174 - DNA, 33 bp, Homo sapien
ctattaaggtaagtcctctaagcagtattaacc

SEQ ID NO: 29175 - DNA, 33 bp, Homo sapien
aaacaaggcaaggagacggattagttgtacaga

SEQ ID NO: 29176 - DNA, 33 bp, Homo sapien
aaacaaggcaaggagagggattagttgtacaga

SEQ ID NO: 29177 - DNA, 33 bp, Homo sapien
tgtgacaggtctcatacgttgtattttgattac

SEQ ID NO: 29178 - DNA, 33 bp, Homo sapien
tgtgacaggtctcatatgttgtattttgattac

SEQ ID NO: 29179 - DNA, 33 bp, Homo sapien
cctgtcacaaataccaccacctaaaaatttaca

SEQ ID NO: 29180 - DNA, 33 bp, Homo sapien
cctgtcacaaataccatcacctaaaaatttaca

SEQ ID NO: 29181 - DNA, 33 bp, Homo sapien
cctactcattcatccagactaacctcagatgtc

SEQ ID NO: 29182 - DNA, 33 bp, Homo sapien
cctactcattcatccatactaacctcagatgtc

SEQ ID NO: 29183 - DNA, 33 bp, Homo sapien
cacacagcaggggaaacgtgaatagaagatgag

SEQ ID NO: 29184 - DNA, 33 bp, Homo sapien
cacacagcaggggaaatgtgaatagaagatgag

SEQ ID NO: 29185 - DNA, 33 bp, Homo sapien
tcatactcaatccaagaaagcattttctctaga

SEQ ID NO: 29186 - DNA, 33 bp, Homo sapien
tcatactcaatccaaggaagcattttctctaga

SEQ ID NO: 29187 - DNA, 33 bp, Homo sapien
agtcctgactctaggacgagttgtatgtgtcac

SEQ ID NO: 29188 - DNA, 33 bp, Homo sapien
agtcctgactctaggatgagttgtatgtgtcac

SEQ ID NO: 29189 - DNA, 33 bp, Homo sapien
tctactttgccatggaaagggattataataaat

SEQ ID NO: 29190 - DNA, 33 bp, Homo sapien
tctactttgccatggagagggattataataaat

SEQ ID NO: 29191 - DNA, 33 bp, Homo sapien
cagacactctcaatcaatgatgtggtccacaaa

SEQ ID NO: 29192 - DNA, 33 bp, Homo sapien
cagacactctcaatcagtgatgtggtccacaaa

SEQ ID NO: 29193 - DNA, 33 bp, Homo sapien
gcaagaggatacaatggaggaggaaaagggaag

SEQ ID NO: 29194 - DNA, 33 bp, Homo sapien
gcaagaggatacaatgtaggaggaaaagggaag

SEQ ID NO: 29195 - DNA, 33 bp, Homo sapien
tttatgtattacagaaaaagctgtgcacagatt

SEQ ID NO: 29196 - DNA, 33 bp, Homo sapien
tttatgtattacagaagaagctgtgcacagatt

SEQ ID NO: 29197 - DNA, 33 bp, Homo sapien
ttcatgggaaggcaacagtggactttcacagtg

SEQ ID NO: 29198 - DNA, 33 bp, Homo sapien
ttcatgggaaggcaacggtggactttcacagtg

SEQ ID NO: 29199 - DNA, 33 bp, Homo sapien
tttaaaattcatatccacctattgccttagcat

SEQ ID NO: 29200 - DNA, 33 bp, Homo sapien
tttaaaattcatatccccctattgccttagcat

SEQ ID NO: 29201 - DNA, 33 bp, Homo sapien
tacatagatacagtccaggaaaggaattttaga

SEQ ID NO: 29202 - DNA, 33 bp, Homo sapien
tacatagatacagtccgggaaaggaattttaga

SEQ ID NO: 29203 - DNA, 33 bp, Homo sapien
gcagttagtctgttacacaattattcacaaagg

SEQ ID NO: 29204 - DNA, 33 bp, Homo sapien
gcagttagtctgttactcaattattcacaaagg

SEQ ID NO: 29205 - DNA, 33 bp, Homo sapien
aagatctttttgagacactaacaaagagcaatt

SEQ ID NO: 29206 - DNA, 33 bp, Homo sapien
aagatctttttgagactctaacaaagagcaatt

SEQ ID NO: 29207 - DNA, 33 bp, Homo sapien
catgattgtagaaccaagtgttagctgggaaag

SEQ ID NO: 29208 - DNA, 33 bp, Homo sapien
catgattgtagaaccaggtgttagctgggaaag

SEQ ID NO: 29209 - DNA, 33 bp, Homo sapien
tgactgataaattttcactttgttggattgact

SEQ ID NO: 29210 - DNA, 33 bp, Homo sapien
tgactgataaattttcgctttgttggattgact

SEQ ID NO: 29211 - DNA, 33 bp, Homo sapien
ctttgttggattgactcaaactcttttaaatac

SEQ ID NO: 29212 - DNA, 33 bp, Homo sapien
ctttgttggattgacttaaactcttttaaatac

SEQ ID NO: 29213 - DNA, 33 bp, Homo sapien
atttgttataacaagaagctgaataaactcagt

SEQ ID NO: 29214 - DNA, 33 bp, Homo sapien
atttgttataacaagaggctgaataaactcagt

SEQ ID NO: 29215 - DNA, 33 bp, Homo sapien
tactgtgtaagtgtaaataagccatgttaatat

SEQ ID NO: 29216 - DNA, 33 bp, Homo sapien
tactgtgtaagtgtaagtaagccatgttaatat

SEQ ID NO: 29217 - DNA, 33 bp, Homo sapien
gataaataagcaaaaaacatataatgcaactct

SEQ ID NO: 29218 - DNA, 33 bp, Homo sapien
gataaataagcaaaaatcatataatgcaactct

SEQ ID NO: 29219 - DNA, 33 bp, Homo sapien
atctttacatgactacaaataaagcaatttatt

SEQ ID NO: 29220 - DNA, 33 bp, Homo sapien
atctttacatgactacgaataaagcaatttatt

SEQ ID NO: 29221 - DNA, 33 bp, Homo sapien
tcaagatttaaaagtcaatatgaatatcataca

SEQ ID NO: 29222 - DNA, 33 bp, Homo sapien
tcaagatttaaaagtcgatatgaatatcataca

SEQ ID NO: 29223 - DNA, 33 bp, Homo sapien
ctcatgattaagagtacgggccttgaagtcaga

SEQ ID NO: 29224 - DNA, 33 bp, Homo sapien
ctcatgattaagagtatgggccttgaagtcaga

SEQ ID NO: 29225 - DNA, 33 bp, Homo sapien
acttagggccttaataacactctcagttaccat

SEQ ID NO: 29226 - DNA, 33 bp, Homo sapien
acttagggccttaataccactctcagttaccat

SEQ ID NO: 29227 - DNA, 33 bp, Homo sapien
atacactggtgtggtaacttacaaattactaaa

SEQ ID NO: 29228 - DNA, 33 bp, Homo sapien
atacactggtgtggtagcttacaaattactaaa

SEQ ID NO: 29229 - DNA, 33 bp, Homo sapien
aagtaagaaccagggacgttgagcttttgcaat

SEQ ID NO: 29230 - DNA, 33 bp, Homo sapien
aagtaagaaccagggatgttgagcttttgcaat

SEQ ID NO: 29231 - DNA, 33 bp, Homo sapien
cttcttgcaataatccggcactaatagattcat

SEQ ID NO: 29232 - DNA, 33 bp, Homo sapien
cttcttgcaataatcctgcactaatagattcat

SEQ ID NO: 29233 - DNA, 33 bp, Homo sapien
aaataggaattagaacaaatctctgttgtaaaa

SEQ ID NO: 29234 - DNA, 33 bp, Homo sapien
aaataggaattagaaccaatctctgttgtaaaa

SEQ ID NO: 29235 - DNA, 33 bp, Homo sapien
ttgctcaaggttatgaagaaggtagatttttaa

SEQ ID NO: 29236 - DNA, 33 bp, Homo sapien
ttgctcaaggttatgaggaaggtagatttttaa

SEQ ID NO: 29237 - DNA, 33 bp, Homo sapien
tgagtcttagagaaatcagatggtttgctcaag

SEQ ID NO: 29238 - DNA, 33 bp, Homo sapien
tgagtcttagagaaattagatggtttgctcaag

SEQ ID NO: 29239 - DNA, 33 bp, Homo sapien
gaactttcatgagccccaaggacaaatatgaac

SEQ ID NO: 29240 - DNA, 33 bp, Homo sapien
gaactttcatgagccctaaggacaaatatgaac

SEQ ID NO: 29241 - DNA, 33 bp, Homo sapien
ttaagccaatcaacaaagcactagagaaaggtg

SEQ ID NO: 29242 - DNA, 33 bp, Homo sapien
ttaagccaatcaacaaggcactagagaaaggtg

SEQ ID NO: 29243 - DNA, 33 bp, Homo sapien
cacttcacagcaagacaatatttgaagcagcag

SEQ ID NO: 29244 - DNA, 33 bp, Homo sapien
cacttcacagcaagacgatatttgaagcagcag

SEQ ID NO: 29245 - DNA, 33 bp, Homo sapien
ttagccatacccatccagacaacatgtcatcac

SEQ ID NO: 29246 - DNA, 33 bp, Homo sapien
ttagccatacccatccggacaacatgtcatcac

SEQ ID NO: 29247 - DNA, 33 bp, Homo sapien
atcatgggcaaattcacagttagagagtttcag

SEQ ID NO: 29248 - DNA, 33 bp, Homo sapien
atcatgggcaaattcagagttagagagtttcag

SEQ ID NO: 29249 - DNA, 33 bp, Homo sapien
agatgggctcattcacagagacaccgaggcact

SEQ ID NO: 29250 - DNA, 33 bp, Homo sapien
agatgggctcattcacggagacaccgaggcact

SEQ ID NO: 29251 - DNA, 33 bp, Homo sapien
gaacttgatgcatccaatgaaaatcacctaacc

SEQ ID NO: 29252 - DNA, 33 bp, Homo sapien
gaacttgatgcatccagtgaaaatcacctaacc

SEQ ID NO: 29253 - DNA, 33 bp, Homo sapien
tcagaacccttctaaaactcaccctatgtgtct

SEQ ID NO: 29254 - DNA, 33 bp, Homo sapien
tcagaacccttctaaacctcaccctatgtgtct

SEQ ID NO: 29255 - DNA, 33 bp, Homo sapien
ttggaaaaaaaggctccatgtgtaatccagact

SEQ ID NO: 29256 - DNA, 33 bp, Homo sapien
ttggaaaaaaaggctctatgtgtaatccagact

SEQ ID NO: 29257 - DNA, 33 bp, Homo sapien
gtgctcacacttcctcaccacccttggctatcc

SEQ ID NO: 29258 - DNA, 33 bp, Homo sapien
gtgctcacacttcctcgccacccttggctatcc

SEQ ID NO: 29259 - DNA, 33 bp, Homo sapien
cagagaacaaacaccactgcagtagactttttt

SEQ ID NO: 29260 - DNA, 33 bp, Homo sapien
cagagaacaaacaccattgcagtagactttttt

SEQ ID NO: 29261 - DNA, 33 bp, Homo sapien
tctcatttttaaatagacaccatacttctttat

SEQ ID NO: 29262 - DNA, 33 bp, Homo sapien
tctcatttttaaataggcaccatacttctttat

SEQ ID NO: 29263 - DNA, 33 bp, Homo sapien
ccttcaaccacttggacataatgtctttccaca

SEQ ID NO: 29264 - DNA, 33 bp, Homo sapien
ccttcaaccacttggatataatgtctttccaca

SEQ ID NO: 29265 - DNA, 33 bp, Homo sapien
gtagacatatgtgaaacgcataaatgcagatac

SEQ ID NO: 29266 - DNA, 33 bp, Homo sapien
gtagacatatgtgaaatgcataaatgcagatac

SEQ ID NO: 29267 - DNA, 33 bp, Homo sapien
ttctgtgaatctcaaacgtaaggcattatactg

SEQ ID NO: 29268 - DNA, 33 bp, Homo sapien
ttctgtgaatctcaaatgtaaggcattatactg

SEQ ID NO: 29269 - DNA, 33 bp, Homo sapien
aagttaagatctcgctcaaagccacatggatta

SEQ ID NO: 29270 - DNA, 33 bp, Homo sapien
aagttaagatctcgctgaaagccacatggatta

SEQ ID NO: 29271 - DNA, 33 bp, Homo sapien
ctctaacaaaacagaaatcacagcctttattct

SEQ ID NO: 29272 - DNA, 33 bp, Homo sapien
ctctaacaaaacagaactcacagcctttattct

SEQ ID NO: 29273 - DNA, 33 bp, Homo sapien
aaaagcgactcaccacaagacaaaatgtgtgtt

SEQ ID NO: 29274 - DNA, 33 bp, Homo sapien
aaaagcgactcaccacgagacaaaatgtgtgtt

SEQ ID NO: 29275 - DNA, 33 bp, Homo sapien
ggctaaatgtctccaccaattttttagttgggg

SEQ ID NO: 29276 - DNA, 33 bp, Homo sapien
ggctaaatgtctccactaattttttagttgggg

SEQ ID NO: 29277 - DNA, 33 bp, Homo sapien
atcccagacaaagatcaaaaggatgtaggcatt

SEQ ID NO: 29278 - DNA, 33 bp, Homo sapien
atcccagacaaagatcgaaaggatgtaggcatt

SEQ ID NO: 29279 - DNA, 33 bp, Homo sapien
ataatacaacctaacaccatggtcacaacattt

SEQ ID NO: 29280 - DNA, 33 bp, Homo sapien
ataatacaacctaacatcatggtcacaacattt

SEQ ID NO: 29281 - DNA, 33 bp, Homo sapien
aagtcacagagcctaactcttctccccttgagt

SEQ ID NO: 29282 - DNA, 33 bp, Homo sapien
aagtcacagagcctaattcttctccccttgagt

SEQ ID NO: 29283 - DNA, 33 bp, Homo sapien
ggctaaaactgacataccaatttatggttacca

SEQ ID NO: 29284 - DNA, 33 bp, Homo sapien
ggctaaaactgacatatcaatttatggttacca

SEQ ID NO: 29285 - DNA, 33 bp, Homo sapien
gagagtggcaatgctacgtacctattcaggtga

SEQ ID NO: 29286 - DNA, 33 bp, Homo sapien
gagagtggcaatgctatgtacctattcaggtga

SEQ ID NO: 29287 - DNA, 33 bp, Homo sapien
tccagtacatgacaaagaatttcttaagttcat

SEQ ID NO: 29288 - DNA, 33 bp, Homo sapien
tccagtacatgacaaataatttcttaagttcat

SEQ ID NO: 29289 - DNA, 33 bp, Homo sapien
tggctgatttctgtgacctaaatacacctggct

SEQ ID NO: 29290 - DNA, 33 bp, Homo sapien
tggctgatttctgtgatctaaatacacctggct

SEQ ID NO: 29291 - DNA, 33 bp, Homo sapien
ctcaggtcagctgctaaatggagttttcttccc

SEQ ID NO: 29292 - DNA, 33 bp, Homo sapien
ctcaggtcagctgctagatggagttttcttccc

SEQ ID NO: 29293 - DNA, 33 bp, Homo sapien
cccctaccaacttttcacctcttcatttatttt

SEQ ID NO: 29294 - DNA, 33 bp, Homo sapien
cccctaccaacttttcgcctcttcatttatttt

SEQ ID NO: 29295 - DNA, 33 bp, Homo sapien
ctactaacaatctttcaacaaccactcttctct

SEQ ID NO: 29296 - DNA, 33 bp, Homo sapien
ctactaacaatctttcgacaaccactcttctct

SEQ ID NO: 29297 - DNA, 33 bp, Homo sapien
attcatatatcacataagattcagtttggtgat

SEQ ID NO: 29298 - DNA, 33 bp, Homo sapien
attcatatatcacataggattcagtttggtgat

SEQ ID NO: 29299 - DNA, 33 bp, Homo sapien
tatgcttataatagacgaaagaatggaaagtag

SEQ ID NO: 29300 - DNA, 33 bp, Homo sapien
tatgcttataatagactaaagaatggaaagtag

SEQ ID NO: 29301 - DNA, 33 bp, Homo sapien
tcaaccagcaacatgaggcttccaaaatcttgc

SEQ ID NO: 29302 - DNA, 33 bp, Homo sapien
tcaaccagcaacatgatgcttccaaaatcttgc

SEQ ID NO: 29303 - DNA, 33 bp, Homo sapien
gcaagacaaatctttcccccacagatttgcagc

SEQ ID NO: 29304 - DNA, 33 bp, Homo sapien
gcaagacaaatctttctcccacagatttgcagc

SEQ ID NO: 29305 - DNA, 33 bp, Homo sapien
ttatctggacgagtgtgaatgttgcatttttaa

SEQ ID NO: 29306 - DNA, 33 bp, Homo sapien
ttatctggacgagtgttaatgttgcatttttaa

SEQ ID NO: 29307 - DNA, 33 bp, Homo sapien
atgactttattaatagaagtgtgagaataaact

SEQ ID NO: 29308 - DNA, 33 bp, Homo sapien
atgactttattaatagcagtgtgagaataaact

SEQ ID NO: 29309 - DNA, 33 bp, Homo sapien
aatgaacgactgaccaatgagatggtagacaga

SEQ ID NO: 29310 - DNA, 33 bp, Homo sapien
aatgaacgactgaccactgagatggtagacaga

SEQ ID NO: 29311 - DNA, 33 bp, Homo sapien
agagcattgtctagaacctggtaggcacttaat

SEQ ID NO: 29312 - DNA, 33 bp, Homo sapien
agagcattgtctagaatctggtaggcacttaat

SEQ ID NO: 29313 - DNA, 33 bp, Homo sapien
agctggttctaagccaccttgaatggtattgtg

SEQ ID NO: 29314 - DNA, 33 bp, Homo sapien
agctggttctaagccatcttgaatggtattgtg

SEQ ID NO: 29315 - DNA, 33 bp, Homo sapien
gaaggaaatgacctgacaatcgcaataaatgtg

SEQ ID NO: 29316 - DNA, 33 bp, Homo sapien
gaaggaaatgacctgagaatcgcaataaatgtg

SEQ ID NO: 29317 - DNA, 33 bp, Homo sapien
taaatggagcttgcacaactggaatttgctctg

SEQ ID NO: 29318 - DNA, 33 bp, Homo sapien
taaatggagcttgcacgactggaatttgctctg

SEQ ID NO: 29319 - DNA, 33 bp, Homo sapien
tcaaaaatagtcaaaaacaaattgcctgtgact

SEQ ID NO: 29320 - DNA, 33 bp, Homo sapien
tcaaaaatagtcaaaaccaaattgcctgtgact

SEQ ID NO: 29321 - DNA, 33 bp, Homo sapien
aaaatggatgaatggaggaaattaagttttgta

SEQ ID NO: 29322 - DNA, 33 bp, Homo sapien
aaaatggatgaatggatgaaattaagttttgta

SEQ ID NO: 29323 - DNA, 33 bp, Homo sapien
atctctagtaggagtaaagttaatgagttgtga

SEQ ID NO: 29324 - DNA, 33 bp, Homo sapien
atctctagtaggagtagagttaatgagttgtga

SEQ ID NO: 29325 - DNA, 33 bp, Homo sapien
tcaatagagaatatccaaattgaagtcgagagg

SEQ ID NO: 29326 - DNA, 33 bp, Homo sapien
tcaatagagaatatccgaattgaagtcgagagg

SEQ ID NO: 29327 - DNA, 33 bp, Homo sapien
tccatgagtgtcaaaaaccgatgatgacattac

SEQ ID NO: 29328 - DNA, 33 bp, Homo sapien
tccatgagtgtcaaaacccgatgatgacattac

SEQ ID NO: 29329 - DNA, 33 bp, Homo sapien
catatgtggcagttaacgagatattatcaatag

SEQ ID NO: 29330 - DNA, 33 bp, Homo sapien
catatgtggcagttaaggagatattatcaatag

SEQ ID NO: 29331 - DNA, 33 bp, Homo sapien
cacagagagtctgataataatgatgccctttag

SEQ ID NO: 29332 - DNA, 33 bp, Homo sapien
cacagagagtctgatattaatgatgccctttag

SEQ ID NO: 29333 - DNA, 33 bp, Homo sapien
aattgtgtgcctatcacctgatcatcacacaag

SEQ ID NO: 29334 - DNA, 33 bp, Homo sapien
aattgtgtgcctatcatctgatcatcacacaag

SEQ ID NO: 29335 - DNA, 33 bp, Homo sapien
ttacagcctttatataaccagcataacccattt

SEQ ID NO: 29336 - DNA, 33 bp, Homo sapien
ttacagcctttatatagccagcataacccattt

SEQ ID NO: 29337 - DNA, 33 bp, Homo sapien
tagtggtgtgagtggtaaatcagtactcaatct

SEQ ID NO: 29338 - DNA, 33 bp, Homo sapien
tagtggtgtgagtggtcaatcagtactcaatct

SEQ ID NO: 29339 - DNA, 33 bp, Homo sapien
agacctcagagtaatacggtgattaaatatttt

SEQ ID NO: 29340 - DNA, 33 bp, Homo sapien
agacctcagagtaatatggtgattaaatatttt

SEQ ID NO: 29341 - DNA, 33 bp, Homo sapien
ctggaaaagcagcaaacgatgttgttttgttgt

SEQ ID NO: 29342 - DNA, 33 bp, Homo sapien
ctggaaaagcagcaaatgatgttgttttgttgt

SEQ ID NO: 29343 - DNA, 33 bp, Homo sapien
agagtgtctatggcatcatcaaccctagaacca

SEQ ID NO: 29344 - DNA, 33 bp, Homo sapien
agagtgtctatggcattatcaaccctagaacca

SEQ ID NO: 29345 - DNA, 33 bp, Homo sapien
ttgagcaagttcatctaaaaatatatcaactgc

SEQ ID NO: 29346 - DNA, 33 bp, Homo sapien
ttgagcaagttcatctgaaaatatatcaactgc

SEQ ID NO: 29347 - DNA, 33 bp, Homo sapien
gccttattgaagttaaataaatccatgacaaga

SEQ ID NO: 29348 - DNA, 33 bp, Homo sapien
gccttattgaagttaagtaaatccatgacaaga

SEQ ID NO: 29349 - DNA, 33 bp, Homo sapien
gctacaggatgtctacaaaaagaaagaaattac

SEQ ID NO: 29350 - DNA, 33 bp, Homo sapien
gctacaggatgtctaccaaaagaaagaaattac

SEQ ID NO: 29351 - DNA, 33 bp, Homo sapien
taatgaattttgaggcaccttatgcaattaatg

SEQ ID NO: 29352 - DNA, 33 bp, Homo sapien
taatgaattttgaggcgccttatgcaattaatg

SEQ ID NO: 29353 - DNA, 33 bp, Homo sapien
gaataaatgagtgaaacaatctcttcatcagtc

SEQ ID NO: 29354 - DNA, 33 bp, Homo sapien
gaataaatgagtgaaataatctcttcatcagtc

SEQ ID NO: 29355 - DNA, 33 bp, Homo sapien
agcacctctacattcagcaaaatgtctcccata

SEQ ID NO: 29356 - DNA, 33 bp, Homo sapien
agcacctctacattcatcaaaatgtctcccata

SEQ ID NO: 29357 - DNA, 33 bp, Homo sapien
tgtgctcgctgttaaaatcattcattcatcatt

SEQ ID NO: 29358 - DNA, 33 bp, Homo sapien
tgtgctcgctgttaaattcattcattcatcatt

SEQ ID NO: 29359 - DNA, 33 bp, Homo sapien
cctttccttttaactccacctgcctccctgcct

SEQ ID NO: 29360 - DNA, 33 bp, Homo sapien
cctttccttttaactctacctgcctccctgcct

SEQ ID NO: 29361 - DNA, 33 bp, Homo sapien
aatacaaatgtgaaaaaatatatctcatactca

SEQ ID NO: 29362 - DNA, 33 bp, Homo sapien
aatacaaatgtgaaaagatatatctcatactca

SEQ ID NO: 29363 - DNA, 33 bp, Homo sapien
agactggtcaacccacagaatcatgagaaatac

SEQ ID NO: 29364 - DNA, 33 bp, Homo sapien
agactggtcaacccacggaatcatgagaaatac

SEQ ID NO: 29365 - DNA, 33 bp, Homo sapien
attctcttctagatccaccaaaaagaactcagc

SEQ ID NO: 29366 - DNA, 33 bp, Homo sapien
attctcttctagatcctccaaaaagaactcagc

SEQ ID NO: 29367 - DNA, 33 bp, Homo sapien
acacatcaaaacaaccccacttatcaatacaaa

SEQ ID NO: 29368 - DNA, 33 bp, Homo sapien
acacatcaaaacaacctcacttatcaatacaaa

SEQ ID NO: 29369 - DNA, 33 bp, Homo sapien
tctgttgttcttttcccaagttcttaggtcatt

SEQ ID NO: 29370 - DNA, 33 bp, Homo sapien
tctgttgttcttttccgaagttcttaggtcatt

SEQ ID NO: 29371 - DNA, 33 bp, Homo sapien
aaagtctctatgttaaatatcattgcatttatc

SEQ ID NO: 29372 - DNA, 33 bp, Homo sapien
aaagtctctatgttaagtatcattgcatttatc

SEQ ID NO: 29373 - DNA, 33 bp, Homo sapien
agtgctaatgatatcaagacatggattaaataa

SEQ ID NO: 29374 - DNA, 33 bp, Homo sapien
agtgctaatgatatcaggacatggattaaataa

SEQ ID NO: 29375 - DNA, 33 bp, Homo sapien
tgagtgttaccctaaacgctgtcagtgctaatg

SEQ ID NO: 29376 - DNA, 33 bp, Homo sapien
tgagtgttaccctaaatgctgtcagtgctaatg

SEQ ID NO: 29377 - DNA, 33 bp, Homo sapien
atcaaacatagaatcaaacaacattctctgtgt

SEQ ID NO: 29378 - DNA, 33 bp, Homo sapien
atcaaacatagaatcagacaacattctctgtgt

SEQ ID NO: 29379 - DNA, 33 bp, Homo sapien
ataactaccaaaagcaagatgatcaataaatat

SEQ ID NO: 29380 - DNA, 33 bp, Homo sapien
ataactaccaaaagcaggatgatcaataaatat

SEQ ID NO: 29381 - DNA, 33 bp, Homo sapien
ctgtgtaagaatctaacggagcaagtaagtgtt

SEQ ID NO: 29382 - DNA, 33 bp, Homo sapien
ctgtgtaagaatctaatggagcaagtaagtgtt

SEQ ID NO: 29383 - DNA, 33 bp, Homo sapien
ttactgtttgaaaaggaccgattctaaagcact

SEQ ID NO: 29384 - DNA, 33 bp, Homo sapien
ttactgtttgaaaaggcccgattctaaagcact

SEQ ID NO: 29385 - DNA, 33 bp, Homo sapien
agtgtccctgtaaggaaataatgttacctacac

SEQ ID NO: 29386 - DNA, 33 bp, Homo sapien
agtgtccctgtaaggagataatgttacctacac

SEQ ID NO: 29387 - DNA, 33 bp, Homo sapien
tctattttgttggttccatctcagttataaaat

SEQ ID NO: 29388 - DNA, 33 bp, Homo sapien
tctattttgttggttctatctcagttataaaat

SEQ ID NO: 29389 - DNA, 33 bp, Homo sapien
aatagaacgattctgacgacccactcgctccct

SEQ ID NO: 29390 - DNA, 33 bp, Homo sapien
aatagaacgattctgatgacccactcgctccct

SEQ ID NO: 29391 - DNA, 33 bp, Homo sapien
taactgatacattggggaggagtcaaagataaa

SEQ ID NO: 29392 - DNA, 33 bp, Homo sapien
taactgatacattgggtaggagtcaaagataaa

SEQ ID NO: 29393 - DNA, 33 bp, Homo sapien
agtacagctatgtaaacttatctagcaaaccaa

SEQ ID NO: 29394 - DNA, 33 bp, Homo sapien
agtacagctatgtaaagttatctagcaaaccaa

SEQ ID NO: 29395 - DNA, 33 bp, Homo sapien
agaatttatgaagtaactggatgtaattgaaag

SEQ ID NO: 29396 - DNA, 33 bp, Homo sapien
agaatttatgaagtaattggatgtaattgaaag

SEQ ID NO: 29397 - DNA, 33 bp, Homo sapien
acaaactacgcaatggaatgagtgctaaaatta

SEQ ID NO: 29398 - DNA, 33 bp, Homo sapien
acaaactacgcaatggtatgagtgctaaaatta

SEQ ID NO: 29399 - DNA, 33 bp, Homo sapien
acctgatctccagagccataatgtgtgttgttt

SEQ ID NO: 29400 - DNA, 33 bp, Homo sapien
acctgatctccagagctataatgtgtgttgttt

SEQ ID NO: 29401 - DNA, 33 bp, Homo sapien
attataatagcaacaccgatgatggcaatatct

SEQ ID NO: 29402 - DNA, 33 bp, Homo sapien
attataatagcaacactgatgatggcaatatct

SEQ ID NO: 29403 - DNA, 33 bp, Homo sapien
ccaatgggcctatgaacgaagtggccatggtgg

SEQ ID NO: 29404 - DNA, 33 bp, Homo sapien
ccaatgggcctatgaatgaagtggccatggtgg

SEQ ID NO: 29405 - DNA, 33 bp, Homo sapien
ctagaatagcctagtaaacatgaattaaattgc

SEQ ID NO: 29406 - DNA, 33 bp, Homo sapien
ctagaatagcctagtacacatgaattaaattgc

SEQ ID NO: 29407 - DNA, 33 bp, Homo sapien
tgttttggtctggaacacattcagctcttccca

SEQ ID NO: 29408 - DNA, 33 bp, Homo sapien
tgttttggtctggaacgcattcagctcttccca

SEQ ID NO: 29409 - DNA, 33 bp, Homo sapien
gctaactaaatccaacagtgtatcaaaaagata

SEQ ID NO: 29410 - DNA, 33 bp, Homo sapien
gctaactaaatccaacggtgtatcaaaaagata

SEQ ID NO: 29411 - DNA, 33 bp, Homo sapien
ataatgagatcagcataaaatcacagttgtaaa

SEQ ID NO: 29412 - DNA, 33 bp, Homo sapien
ataatgagatcagcatgaaatcacagttgtaaa

SEQ ID NO: 29413 - DNA, 33 bp, Homo sapien
ctactccttcagtgacaaataacattaatctat

SEQ ID NO: 29414 - DNA, 33 bp, Homo sapien
ctactccttcagtgacgaataacattaatctat

SEQ ID NO: 29415 - DNA, 33 bp, Homo sapien
atggctagaagaaaccaggtgctattcatcaaa

SEQ ID NO: 29416 - DNA, 33 bp, Homo sapien
atggctagaagaaaccgggtgctattcatcaaa

SEQ ID NO: 29417 - DNA, 33 bp, Homo sapien
atgagaaagagaaatcaaacgattggcttattt

SEQ ID NO: 29418 - DNA, 33 bp, Homo sapien
atgagaaagagaaatccaacgattggcttattt

SEQ ID NO: 29419 - DNA, 33 bp, Homo sapien
atgccaagtctgggacaatgcagataatatcag

SEQ ID NO: 29420 - DNA, 33 bp, Homo sapien
atgccaagtctgggacgatgcagataatatcag

SEQ ID NO: 29421 - DNA, 33 bp, Homo sapien
gcttcttccttgctaaaaagattccgttattct

SEQ ID NO: 29422 - DNA, 33 bp, Homo sapien
gcttcttccttgctaacaagattccgttattct

SEQ ID NO: 29423 - DNA, 33 bp, Homo sapien
gcagcctctgagttgacgcagagagagcatatt

SEQ ID NO: 29424 - DNA, 33 bp, Homo sapien
gcagcctctgagttgatgcagagagagcatatt

SEQ ID NO: 29425 - DNA, 33 bp, Homo sapien
cagccctctaagaatagtaaaatgcttagtttc

SEQ ID NO: 29426 - DNA, 33 bp, Homo sapien
cagccctctaagaatattaaaatgcttagtttc

SEQ ID NO: 29427 - DNA, 33 bp, Homo sapien
gagaattggcatttaaatcagacatttgtgttt

SEQ ID NO: 29428 - DNA, 33 bp, Homo sapien
gagaattggcatttaagtcagacatttgtgttt

SEQ ID NO: 29429 - DNA, 33 bp, Homo sapien
ctttggaggtacattgaaacctaatatgataaa

SEQ ID NO: 29430 - DNA, 33 bp, Homo sapien
ctttggaggtacattggaacctaatatgataaa

SEQ ID NO: 29431 - DNA, 33 bp, Homo sapien
accatgtccactaaaaagcacatatattgctca

SEQ ID NO: 29432 - DNA, 33 bp, Homo sapien
accatgtccactaaaatgcacatatattgctca

SEQ ID NO: 29433 - DNA, 33 bp, Homo sapien
ataatccttgtgccaacaaatagaagcttagct

SEQ ID NO: 29434 - DNA, 33 bp, Homo sapien
ataatccttgtgccaataaatagaagcttagct

SEQ ID NO: 29435 - DNA, 33 bp, Homo sapien
gttagtcctgtggtatcaggcaaattacataat

SEQ ID NO: 29436 - DNA, 33 bp, Homo sapien
gttagtcctgtggtattaggcaaattacataat

SEQ ID NO: 29437 - DNA, 33 bp, Homo sapien
agcaaaagaatggctgcactcaatcaaatgtta

SEQ ID NO: 29438 - DNA, 33 bp, Homo sapien
agcaaaagaatggctggactcaatcaaatgtta

SEQ ID NO: 29439 - DNA, 33 bp, Homo sapien
aaaggtctctggaacacctgttgaagtgaacga

SEQ ID NO: 29440 - DNA, 33 bp, Homo sapien
aaaggtctctggaacatctgttgaagtgaacga

SEQ ID NO: 29441 - DNA, 33 bp, Homo sapien
gagatttaaaagctgacgaagctctgaatagct

SEQ ID NO: 29442 - DNA, 33 bp, Homo sapien
gagatttaaaagctgatgaagctctgaatagct

SEQ ID NO: 29443 - DNA, 33 bp, Homo sapien
gtataatcgactacaagtaaaacaaacacaaaa

SEQ ID NO: 29444 - DNA, 33 bp, Homo sapien
gtataatcgactacaattaaaacaaacacaaaa

SEQ ID NO: 29445 - DNA, 33 bp, Homo sapien
tttttgctctccatcccacctaagtggaaccca

SEQ ID NO: 29446 - DNA, 33 bp, Homo sapien
tttttgctctccatcctacctaagtggaaccca

SEQ ID NO: 29447 - DNA, 33 bp, Homo sapien
ccaatcaagatcataaagtttcaagtcatattt

SEQ ID NO: 29448 - DNA, 33 bp, Homo sapien
ccaatcaagatcataatgtttcaagtcatattt

SEQ ID NO: 29449 - DNA, 33 bp, Homo sapien
tttggcataaaagatagaaattaggccacactt

SEQ ID NO: 29450 - DNA, 33 bp, Homo sapien
tttggcataaaagatataaattaggccacactt

SEQ ID NO: 29451 - DNA, 33 bp, Homo sapien
cctcacagattctttcaattaaacaacagggtc

SEQ ID NO: 29452 - DNA, 33 bp, Homo sapien
cctcacagattctttccattaaacaacagggtc

SEQ ID NO: 29453 - DNA, 33 bp, Homo sapien
aagaaatgacatagagacgatactacttcatcc

SEQ ID NO: 29454 - DNA, 33 bp, Homo sapien
aagaaatgacatagaggcgatactacttcatcc

SEQ ID NO: 29455 - DNA, 33 bp, Homo sapien
aaaaatcttcagaacacggtaaccttagaacaa

SEQ ID NO: 29456 - DNA, 33 bp, Homo sapien
aaaaatcttcagaacatggtaaccttagaacaa

SEQ ID NO: 29457 - DNA, 33 bp, Homo sapien
cgaaatctgtgttggaactgtatgggcatttct

SEQ ID NO: 29458 - DNA, 33 bp, Homo sapien
cgaaatctgtgttggatctgtatgggcatttct

SEQ ID NO: 29459 - DNA, 33 bp, Homo sapien
tcatttctgaaaaaaaatctcgtttaatggaca

SEQ ID NO: 29460 - DNA, 33 bp, Homo sapien
tcatttctgaaaaaaagtctcgtttaatggaca

SEQ ID NO: 29461 - DNA, 33 bp, Homo sapien
tgaattctgtgaaatgaattttatctagaactt

SEQ ID NO: 29462 - DNA, 33 bp, Homo sapien
tgaattctgtgaaatggattttatctagaactt

SEQ ID NO: 29463 - DNA, 33 bp, Homo sapien
tcccattggctgtgacccagtatattataagaa

SEQ ID NO: 29464 - DNA, 33 bp, Homo sapien
tcccattggctgtgactcagtatattataagaa

SEQ ID NO: 29465 - DNA, 33 bp, Homo sapien
tgtacccacatcacagacctccattcctgttgc

SEQ ID NO: 29466 - DNA, 33 bp, Homo sapien
tgtacccacatcacaggcctccattcctgttgc

SEQ ID NO: 29467 - DNA, 33 bp, Homo sapien
catgtaaactgctgtacatcatagtttaactta

SEQ ID NO: 29468 - DNA, 33 bp, Homo sapien
catgtaaactgctgtatatcatagtttaactta

SEQ ID NO: 29469 - DNA, 33 bp, Homo sapien
catgtaactgtttcacaagaatgaaagcaaagg

SEQ ID NO: 29470 - DNA, 33 bp, Homo sapien
catgtaactgtttcactagaatgaaagcaaagg

SEQ ID NO: 29471 - DNA, 33 bp, Homo sapien
caagcaagtacccttcaaagtatttattatagc

SEQ ID NO: 29472 - DNA, 33 bp, Homo sapien
caagcaagtacccttcgaagtatttattatagc

SEQ ID NO: 29473 - DNA, 33 bp, Homo sapien
gcaatatatgagcgagaacaacctcgtgatgta

SEQ ID NO: 29474 - DNA, 33 bp, Homo sapien
gcaatatatgagcgagcacaacctcgtgatgta

SEQ ID NO: 29475 - DNA, 33 bp, Homo sapien
gtggaaacataatttccaagcaaactgaagacc

SEQ ID NO: 29476 - DNA, 33 bp, Homo sapien
gtggaaacataatttcgaagcaaactgaagacc

SEQ ID NO: 29477 - DNA, 33 bp, Homo sapien
cctttttctaatcccaccttgtaggaaagttca

SEQ ID NO: 29478 - DNA, 33 bp, Homo sapien
cctttttctaatcccatcttgtaggaaagttca

SEQ ID NO: 29479 - DNA, 33 bp, Homo sapien
gccctaccataagcctcacacagagcaacagac

SEQ ID NO: 29480 - DNA, 33 bp, Homo sapien
gccctaccataagcctgacacagagcaacagac

SEQ ID NO: 29481 - DNA, 33 bp, Homo sapien
gaaccagaaaagttgacaacataagtcaataca

SEQ ID NO: 29482 - DNA, 33 bp, Homo sapien
gaaccagaaaagttgataacataagtcaataca

SEQ ID NO: 29483 - DNA, 33 bp, Homo sapien
aactgtcagtgatatcaatgatgaaagtttttg

SEQ ID NO: 29484 - DNA, 33 bp, Homo sapien
aactgtcagtgatatcgatgatgaaagtttttg

SEQ ID NO: 29485 - DNA, 33 bp, Homo sapien
aggaaattttgtgagacgtagaattttactcag

SEQ ID NO: 29486 - DNA, 33 bp, Homo sapien
aggaaattttgtgagatgtagaattttactcag

SEQ ID NO: 29487 - DNA, 33 bp, Homo sapien
tcattgctagggacataacaatctcttagctga

SEQ ID NO: 29488 - DNA, 33 bp, Homo sapien
tcattgctagggacattacaatctcttagctga

SEQ ID NO: 29489 - DNA, 33 bp, Homo sapien
ttttttttcctgagacaatttgttacaacttag

SEQ ID NO: 29490 - DNA, 33 bp, Homo sapien
ttttttttcctgagacgatttgttacaacttag

SEQ ID NO: 29491 - DNA, 33 bp, Homo sapien
agttcacccttataaccgcctgaaatgttgtgg

SEQ ID NO: 29492 - DNA, 33 bp, Homo sapien
agttcacccttataactgcctgaaatgttgtgg

SEQ ID NO: 29493 - DNA, 33 bp, Homo sapien
ttggctttgcaatatacgtgatagtgaatttcg

SEQ ID NO: 29494 - DNA, 33 bp, Homo sapien
ttggctttgcaatatatgtgatagtgaatttcg

SEQ ID NO: 29495 - DNA, 33 bp, Homo sapien
tattcaatagcatatccaaactactccatttac

SEQ ID NO: 29496 - DNA, 33 bp, Homo sapien
tattcaatagcatatctaaactactccatttac

SEQ ID NO: 29497 - DNA, 33 bp, Homo sapien
cagttgctatggaatgacacaagttttaaaagg

SEQ ID NO: 29498 - DNA, 33 bp, Homo sapien
cagttgctatggaatgtcacaagttttaaaagg

SEQ ID NO: 29499 - DNA, 33 bp, Homo sapien
aatctatgaaacagtcaatgatagagtatttaa

SEQ ID NO: 29500 - DNA, 33 bp, Homo sapien
aatctatgaaacagtcgatgatagagtatttaa

SEQ ID NO: 29501 - DNA, 33 bp, Homo sapien
gagcacagttctctgaaacctggaagacagtga

SEQ ID NO: 29502 - DNA, 33 bp, Homo sapien
gagcacagttctctgacacctggaagacagtga

SEQ ID NO: 29503 - DNA, 33 bp, Homo sapien
agagtaagcaaagagcaaattagaaattagaaa

SEQ ID NO: 29504 - DNA, 33 bp, Homo sapien
agagtaagcaaagagcgaattagaaattagaaa

SEQ ID NO: 29505 - DNA, 33 bp, Homo sapien
ataccagaaggaaataacttagcactggaactc

SEQ ID NO: 29506 - DNA, 33 bp, Homo sapien
ataccagaaggaaatatcttagcactggaactc

SEQ ID NO: 29507 - DNA, 33 bp, Homo sapien
tttcttcttttagagactaagtcaactgtattt

SEQ ID NO: 29508 - DNA, 33 bp, Homo sapien
tttcttcttttagagagtaagtcaactgtattt

SEQ ID NO: 29509 - DNA, 33 bp, Homo sapien
cagtgaaatcacaaaaacctgaaaaggaggaat

SEQ ID NO: 29510 - DNA, 33 bp, Homo sapien
cagtgaaatcacaaaagcctgaaaaggaggaat

SEQ ID NO: 29511 - DNA, 33 bp, Homo sapien
tgcctacagaaatgaccgaaaggaagataatag

SEQ ID NO: 29512 - DNA, 33 bp, Homo sapien
tgcctacagaaatgactgaaaggaagataatag

SEQ ID NO: 29513 - DNA, 33 bp, Homo sapien
cttacagatatcatcaccctttcatcagatcac

SEQ ID NO: 29514 - DNA, 33 bp, Homo sapien
cttacagatatcatcatcctttcatcagatcac

SEQ ID NO: 29515 - DNA, 33 bp, Homo sapien
taatggctggaaaatacaagggcacgtgcagtg

SEQ ID NO: 29516 - DNA, 33 bp, Homo sapien
taatggctggaaaatataagggcacgtgcagtg

SEQ ID NO: 29517 - DNA, 33 bp, Homo sapien
ggggttctgagtgaacagcacaatatctgctgc

SEQ ID NO: 29518 - DNA, 33 bp, Homo sapien
ggggttctgagtgaacggcacaatatctgctgc

SEQ ID NO: 29519 - DNA, 33 bp, Homo sapien
agatgggaattttataactatcttgccccacag

SEQ ID NO: 29520 - DNA, 33 bp, Homo sapien
agatgggaattttatagctatcttgccccacag

SEQ ID NO: 29521 - DNA, 33 bp, Homo sapien
caatgtactaggtgctaaagtgaagagacaaga

SEQ ID NO: 29522 - DNA, 33 bp, Homo sapien
caatgtactaggtgctcaagtgaagagacaaga

SEQ ID NO: 29523 - DNA, 33 bp, Homo sapien
agcaagttcataaaagaaggaagtgatagctct

SEQ ID NO: 29524 - DNA, 33 bp, Homo sapien
agcaagttcataaaaggaggaagtgatagctct

SEQ ID NO: 29525 - DNA, 33 bp, Homo sapien
cagtaaagaatggtaactgatcccagtaagaaa

SEQ ID NO: 29526 - DNA, 33 bp, Homo sapien
cagtaaagaatggtaattgatcccagtaagaaa

SEQ ID NO: 29527 - DNA, 33 bp, Homo sapien
aagcaatagttattgcacacctacgtttcatct

SEQ ID NO: 29528 - DNA, 33 bp, Homo sapien
aagcaatagttattgcgcacctacgtttcatct

SEQ ID NO: 29529 - DNA, 33 bp, Homo sapien
acaacctcgagtgataacttaattgaagtcttg

SEQ ID NO: 29530 - DNA, 33 bp, Homo sapien
acaacctcgagtgataccttaattgaagtcttg

SEQ ID NO: 29531 - DNA, 33 bp, Homo sapien
aaatcttctctcctaaaaacctgtcgattctcc

SEQ ID NO: 29532 - DNA, 33 bp, Homo sapien
aaatcttctctcctaagaacctgtcgattctcc

SEQ ID NO: 29533 - DNA, 33 bp, Homo sapien
tatacaatgattaaacgaccccaaaatttgtac

SEQ ID NO: 29534 - DNA, 33 bp, Homo sapien
tatacaatgattaaactaccccaaaatttgtac

SEQ ID NO: 29535 - DNA, 33 bp, Homo sapien
tcaatttattgtgccaatagtgtttaaaaccag

SEQ ID NO: 29536 - DNA, 33 bp, Homo sapien
tcaatttattgtgccattagtgtttaaaaccag

SEQ ID NO: 29537 - DNA, 33 bp, Homo sapien
aaacgaaacagcggaaacttcacatgattttta

SEQ ID NO: 29538 - DNA, 33 bp, Homo sapien
aaacgaaacagcggaaccttcacatgattttta

SEQ ID NO: 29539 - DNA, 33 bp, Homo sapien
gataaaggtgaggttgaacgattaaggccagag

SEQ ID NO: 29540 - DNA, 33 bp, Homo sapien
gataaaggtgaggttggacgattaaggccagag

SEQ ID NO: 29541 - DNA, 33 bp, Homo sapien
tgctgaatgaatggtgaaaaagatttctaaacc

SEQ ID NO: 29542 - DNA, 33 bp, Homo sapien
tgctgaatgaatggtggaaaagatttctaaacc

SEQ ID NO: 29543 - DNA, 33 bp, Homo sapien
accaatgctatttaaaaagttctgggcaagtaa

SEQ ID NO: 29544 - DNA, 33 bp, Homo sapien
accaatgctatttaaacagttctgggcaagtaa

SEQ ID NO: 29545 - DNA, 33 bp, Homo sapien
ggaaaaggattgattaaagattctctgctattc

SEQ ID NO: 29546 - DNA, 33 bp, Homo sapien
ggaaaaggattgattagagattctctgctattc

SEQ ID NO: 29547 - DNA, 33 bp, Homo sapien
gtttaacctcagtgtgcatgcctttcaaaataa

SEQ ID NO: 29548 - DNA, 33 bp, Homo sapien
gtttaacctcagtgtgtatgcctttcaaaataa

SEQ ID NO: 29549 - DNA, 33 bp, Homo sapien
atttcattaggtctcaagttgaaggatgtagag

SEQ ID NO: 29550 - DNA, 33 bp, Homo sapien
atttcattaggtctcacgttgaaggatgtagag

SEQ ID NO: 29551 - DNA, 33 bp, Homo sapien
tgttttgacacttaaacattagcaacactattc

SEQ ID NO: 29552 - DNA, 33 bp, Homo sapien
tgttttgacacttaaatattagcaacactattc

SEQ ID NO: 29553 - DNA, 33 bp, Homo sapien
ggctataaaataaggcaaaacaaatgtaaaagg

SEQ ID NO: 29554 - DNA, 33 bp, Homo sapien
ggctataaaataaggcgaaacaaatgtaaaagg

SEQ ID NO: 29555 - DNA, 33 bp, Homo sapien
gctgctatagtactaccaccacagacttggtaa

SEQ ID NO: 29556 - DNA, 33 bp, Homo sapien
gctgctatagtactactaccacagacttggtaa

SEQ ID NO: 29557 - DNA, 33 bp, Homo sapien
taatttgacagaatcaatagggagaggagtcac

SEQ ID NO: 29558 - DNA, 33 bp, Homo sapien
taatttgacagaatcagtagggagaggagtcac

SEQ ID NO: 29559 - DNA, 33 bp, Homo sapien
tgggctttgggtacaactaggcagctgtgctca

SEQ ID NO: 29560 - DNA, 33 bp, Homo sapien
tgggctttgggtacaattaggcagctgtgctca

SEQ ID NO: 29561 - DNA, 33 bp, Homo sapien
tatttgctcttctttaccagaactcctaaaaat

SEQ ID NO: 29562 - DNA, 33 bp, Homo sapien
tatttgctcttctttatcagaactcctaaaaat

SEQ ID NO: 29563 - DNA, 33 bp, Homo sapien
aatatatggtctgccaagaaaacagccaagttg

SEQ ID NO: 29564 - DNA, 33 bp, Homo sapien
aatatatggtctgccacgaaaacagccaagttg

SEQ ID NO: 29565 - DNA, 33 bp, Homo sapien
gtaaatatctttcatccggtaaccactcatgac

SEQ ID NO: 29566 - DNA, 33 bp, Homo sapien
gtaaatatctttcatctggtaaccactcatgac

SEQ ID NO: 29567 - DNA, 33 bp, Homo sapien
atcccaaaacgcatcacagaaacaattcttcct

SEQ ID NO: 29568 - DNA, 33 bp, Homo sapien
atcccaaaacgcatcagagaaacaattcttcct

SEQ ID NO: 29569 - DNA, 33 bp, Homo sapien
tattctgctgaccagacctttagtccaaagaca

SEQ ID NO: 29570 - DNA, 33 bp, Homo sapien
tattctgctgaccagagctttagtccaaagaca

SEQ ID NO: 29571 - DNA, 33 bp, Homo sapien
ataattagctacatgcactacaataatacacat

SEQ ID NO: 29572 - DNA, 33 bp, Homo sapien
ataattagctacatgcgctacaataatacacat

SEQ ID NO: 29573 - DNA, 33 bp, Homo sapien
gttaatcaaaatggataagtgtgtattaggagt

SEQ ID NO: 29574 - DNA, 33 bp, Homo sapien
gttaatcaaaatggatgagtgtgtattaggagt

SEQ ID NO: 29575 - DNA, 33 bp, Homo sapien
ttgtttgctttgctacccatcaaacttttaacc

SEQ ID NO: 29576 - DNA, 33 bp, Homo sapien
ttgtttgctttgctactcatcaaacttttaacc

SEQ ID NO: 29577 - DNA, 33 bp, Homo sapien
atggtttggctaggatcaaactcagctttctct

SEQ ID NO: 29578 - DNA, 33 bp, Homo sapien
atggtttggctaggattaaactcagctttctct

SEQ ID NO: 29579 - DNA, 33 bp, Homo sapien
taaatgggcgaagcaaataatttaagcagggta

SEQ ID NO: 29580 - DNA, 33 bp, Homo sapien
taaatgggcgaagcaagtaatttaagcagggta

SEQ ID NO: 29581 - DNA, 33 bp, Homo sapien
tgaaatttctgcttaaacatcgtttcactgtat

SEQ ID NO: 29582 - DNA, 33 bp, Homo sapien
tgaaatttctgcttaatcatcgtttcactgtat

SEQ ID NO: 29583 - DNA, 33 bp, Homo sapien
actagaatagttactacggttatgtagttgcta

SEQ ID NO: 29584 - DNA, 33 bp, Homo sapien
actagaatagttactatggttatgtagttgcta

SEQ ID NO: 29585 - DNA, 33 bp, Homo sapien
ctactcaaaaatcttcaatgaatttccactgac

SEQ ID NO: 29586 - DNA, 33 bp, Homo sapien
ctactcaaaaatcttcgatgaatttccactgac

SEQ ID NO: 29587 - DNA, 33 bp, Homo sapien
tgttaagatcctaacacgaaaggcaatggtatt

SEQ ID NO: 29588 - DNA, 33 bp, Homo sapien
tgttaagatcctaacatgaaaggcaatggtatt

SEQ ID NO: 29589 - DNA, 33 bp, Homo sapien
atctcccacatctaagcctgcactcaccagcaa

SEQ ID NO: 29590 - DNA, 33 bp, Homo sapien
atctcccacatctaaggctgcactcaccagcaa

SEQ ID NO: 29591 - DNA, 33 bp, Homo sapien
cctcacccattgaagaatagtcaacctgatgct

SEQ ID NO: 29592 - DNA, 33 bp, Homo sapien
cctcacccattgaagagtagtcaacctgatgct

SEQ ID NO: 29593 - DNA, 33 bp, Homo sapien
atgaatatcacagttcactagttgctcacttaa

SEQ ID NO: 29594 - DNA, 33 bp, Homo sapien
atgaatatcacagttcgctagttgctcacttaa

SEQ ID NO: 29595 - DNA, 33 bp, Homo sapien
aggatttatgtttagaggtacagggaactaggc

SEQ ID NO: 29596 - DNA, 33 bp, Homo sapien
aggatttatgtttagatgtacagggaactaggc

SEQ ID NO: 29597 - DNA, 33 bp, Homo sapien
tttactggaggaatataaggcttgaagaaggtt

SEQ ID NO: 29598 - DNA, 33 bp, Homo sapien
tttactggaggaatatgaggcttgaagaaggtt

SEQ ID NO: 29599 - DNA, 33 bp, Homo sapien
agcctgatgttcagggacatagatgcttgagaa

SEQ ID NO: 29600 - DNA, 33 bp, Homo sapien
agcctgatgttcaggggcatagatgcttgagaa

SEQ ID NO: 29601 - DNA, 33 bp, Homo sapien
gaaataccttgaaggcagaaaacaataattcca

SEQ ID NO: 29602 - DNA, 33 bp, Homo sapien
gaaataccttgaaggcggaaaacaataattcca

SEQ ID NO: 29603 - DNA, 33 bp, Homo sapien
aggagaaaaaaaaatccatgtgtctattaacat

SEQ ID NO: 29604 - DNA, 33 bp, Homo sapien
aggagaaaaaaaaatcgatgtgtctattaacat

SEQ ID NO: 29605 - DNA, 33 bp, Homo sapien
gtgtcactgctagcgacgtgggtgttaggaggc

SEQ ID NO: 29606 - DNA, 33 bp, Homo sapien
gtgtcactgctagcgatgtgggtgttaggaggc

SEQ ID NO: 29607 - DNA, 33 bp, Homo sapien
caggcacaagacatcactatttccactagaaga

SEQ ID NO: 29608 - DNA, 33 bp, Homo sapien
caggcacaagacatcattatttccactagaaga

SEQ ID NO: 29609 - DNA, 33 bp, Homo sapien
ctttctctgctaatataaaaccacatggctttc

SEQ ID NO: 29610 - DNA, 33 bp, Homo sapien
ctttctctgctaatatgaaaccacatggctttc

SEQ ID NO: 29611 - DNA, 33 bp, Homo sapien
ctcattggaataaagcaccgtttaattacaatt

SEQ ID NO: 29612 - DNA, 33 bp, Homo sapien
ctcattggaataaagcgccgtttaattacaatt

SEQ ID NO: 29613 - DNA, 33 bp, Homo sapien
gggatgctgaattttacgagatgatttttcagc

SEQ ID NO: 29614 - DNA, 33 bp, Homo sapien
gggatgctgaattttatgagatgatttttcagc

SEQ ID NO: 29615 - DNA, 33 bp, Homo sapien
atatctatctgttctccgaatttctcatttaga

SEQ ID NO: 29616 - DNA, 33 bp, Homo sapien
atatctatctgttctctgaatttctcatttaga

SEQ ID NO: 29617 - DNA, 33 bp, Homo sapien
ctgaagaaaactgaaaataatgatcttaaggaa

SEQ ID NO: 29618 - DNA, 33 bp, Homo sapien
ctgaagaaaactgaaagtaatgatcttaaggaa

SEQ ID NO: 29619 - DNA, 33 bp, Homo sapien
accacactgtctctagaacacaatcttcattat

SEQ ID NO: 29620 - DNA, 33 bp, Homo sapien
accacactgtctctagtacacaatcttcattat

SEQ ID NO: 29621 - DNA, 33 bp, Homo sapien
aataataatacagtaccactaaggctcaagttc

SEQ ID NO: 29622 - DNA, 33 bp, Homo sapien
aataataatacagtactactaaggctcaagttc

SEQ ID NO: 29623 - DNA, 33 bp, Homo sapien
cagtgctgtgtcctgacagaactacctccatga

SEQ ID NO: 29624 - DNA, 33 bp, Homo sapien
cagtgctgtgtcctgatagaactacctccatga

SEQ ID NO: 29625 - DNA, 33 bp, Homo sapien
aggactccatgtaagcaatataggtggaactgg

SEQ ID NO: 29626 - DNA, 33 bp, Homo sapien
aggactccatgtaagcgatataggtggaactgg

SEQ ID NO: 29627 - DNA, 33 bp, Homo sapien
gagaattccactggaaatcctttgcctgaacga

SEQ ID NO: 29628 - DNA, 33 bp, Homo sapien
gagaattccactggaagtcctttgcctgaacga

SEQ ID NO: 29629 - DNA, 33 bp, Homo sapien
gtttccagagattgtgaatttcagtgtttccat

SEQ ID NO: 29630 - DNA, 33 bp, Homo sapien
gtttccagagattgtggatttcagtgtttccat

SEQ ID NO: 29631 - DNA, 33 bp, Homo sapien
aatggtaaactcccccaaccagaggcaagtgaa

SEQ ID NO: 29632 - DNA, 33 bp, Homo sapien
aatggtaaactccccccaccagaggcaagtgaa

SEQ ID NO: 29633 - DNA, 33 bp, Homo sapien
agatgacagaagatgaacttgtgtagaacattc

SEQ ID NO: 29634 - DNA, 33 bp, Homo sapien
agatgacagaagatgagcttgtgtagaacattc

SEQ ID NO: 29635 - DNA, 33 bp, Homo sapien
tgtcattgctcaagaaaaactggcagaatgtcc

SEQ ID NO: 29636 - DNA, 33 bp, Homo sapien
tgtcattgctcaagaacaactggcagaatgtcc

SEQ ID NO: 29637 - DNA, 33 bp, Homo sapien
gtattactggtataaacggagcactctataatt

SEQ ID NO: 29638 - DNA, 33 bp, Homo sapien
gtattactggtataaagggagcactctataatt

SEQ ID NO: 29639 - DNA, 33 bp, Homo sapien
ctaaactgtactgtatcacatattgctgctttt

SEQ ID NO: 29640 - DNA, 33 bp, Homo sapien
ctaaactgtactgtattacatattgctgctttt

SEQ ID NO: 29641 - DNA, 33 bp, Homo sapien
catgccagcaaagaaacatcttgtcttaaaact

SEQ ID NO: 29642 - DNA, 33 bp, Homo sapien
catgccagcaaagaaagatcttgtcttaaaact

SEQ ID NO: 29643 - DNA, 33 bp, Homo sapien
tttcctcagtttagacccaggagattccaggca

SEQ ID NO: 29644 - DNA, 33 bp, Homo sapien
tttcctcagtttagacgcaggagattccaggca

SEQ ID NO: 29645 - DNA, 33 bp, Homo sapien
ccagattctatccataaatttctaataacaagc

SEQ ID NO: 29646 - DNA, 33 bp, Homo sapien
ccagattctatccatacatttctaataacaagc

SEQ ID NO: 29647 - DNA, 33 bp, Homo sapien
gctcctgactctggagcctatcccatgcttgtt

SEQ ID NO: 29648 - DNA, 33 bp, Homo sapien
gctcctgactctggaggctatcccatgcttgtt

SEQ ID NO: 29649 - DNA, 33 bp, Homo sapien
ctacagttaattacacaggggattatcgttagt

SEQ ID NO: 29650 - DNA, 33 bp, Homo sapien
ctacagttaattacacgggggattatcgttagt

SEQ ID NO: 29651 - DNA, 33 bp, Homo sapien
tttggaaaagagccagaaaggagagaaagaggg

SEQ ID NO: 29652 - DNA, 33 bp, Homo sapien
tttggaaaagagccagtaaggagagaaagaggg

SEQ ID NO: 29653 - DNA, 33 bp, Homo sapien
gcaaaaattaggatagaaaagtctaggaaatgt

SEQ ID NO: 29654 - DNA, 33 bp, Homo sapien
gcaaaaattaggataggaaagtctaggaaatgt

SEQ ID NO: 29655 - DNA, 33 bp, Homo sapien
gaactaccatagaaataaaactacatcaacatg

SEQ ID NO: 29656 - DNA, 33 bp, Homo sapien
gaactaccatagaaattaaactacatcaacatg

SEQ ID NO: 29657 - DNA, 33 bp, Homo sapien
gaacatagagaaaaacgacttaacatatgacct

SEQ ID NO: 29658 - DNA, 33 bp, Homo sapien
gaacatagagaaaaactacttaacatatgacct

SEQ ID NO: 29659 - DNA, 33 bp, Homo sapien
ttaaccttctaagaaacgccagcttcttcaggt

SEQ ID NO: 29660 - DNA, 33 bp, Homo sapien
ttaaccttctaagaaatgccagcttcttcaggt

SEQ ID NO: 29661 - DNA, 33 bp, Homo sapien
cgctcctgtgtagacactcctttttattaggcc

SEQ ID NO: 29662 - DNA, 33 bp, Homo sapien
cgctcctgtgtagacattcctttttattaggcc

SEQ ID NO: 29663 - DNA, 33 bp, Homo sapien
cagagatcattcctatgactttttcatggaagt

SEQ ID NO: 29664 - DNA, 33 bp, Homo sapien
cagagatcattcctattactttttcatggaagt

SEQ ID NO: 29665 - DNA, 33 bp, Homo sapien
tcatttggttaattgaccagcttatcctgtcat

SEQ ID NO: 29666 - DNA, 33 bp, Homo sapien
tcatttggttaattgagcagcttatcctgtcat

SEQ ID NO: 29667 - DNA, 33 bp, Homo sapien
tttcttaagactgagccagagacaaagacaaat

SEQ ID NO: 29668 - DNA, 33 bp, Homo sapien
tttcttaagactgagctagagacaaagacaaat

SEQ ID NO: 29669 - DNA, 33 bp, Homo sapien
aggcgagtttggagtgacaaccaggatgcaggg

SEQ ID NO: 29670 - DNA, 33 bp, Homo sapien
aggcgagtttggagtggcaaccaggatgcaggg

SEQ ID NO: 29671 - DNA, 33 bp, Homo sapien
aaggctactgcttaaaaatgatgcagaggtctc

SEQ ID NO: 29672 - DNA, 33 bp, Homo sapien
aaggctactgcttaaagatgatgcagaggtctc

SEQ ID NO: 29673 - DNA, 33 bp, Homo sapien
caaatcagctgactataaccatcactgttagtg

SEQ ID NO: 29674 - DNA, 33 bp, Homo sapien
caaatcagctgactatgaccatcactgttagtg

SEQ ID NO: 29675 - DNA, 33 bp, Homo sapien
ttaagggctccataacagcttttttgacgtaaa

SEQ ID NO: 29676 - DNA, 33 bp, Homo sapien
ttaagggctccataacggcttttttgacgtaaa

SEQ ID NO: 29677 - DNA, 33 bp, Homo sapien
gaaaccttctctaaacccccagactcaggaaga

SEQ ID NO: 29678 - DNA, 33 bp, Homo sapien
gaaaccttctctaaactcccagactcaggaaga

SEQ ID NO: 29679 - DNA, 33 bp, Homo sapien
aaagctgggctaggaaatagctttgccaaggcc

SEQ ID NO: 29680 - DNA, 33 bp, Homo sapien
aaagctgggctaggaagtagctttgccaaggcc

SEQ ID NO: 29681 - DNA, 33 bp, Homo sapien
aggcacagattgttaaaatgtggtatgcccaga

SEQ ID NO: 29682 - DNA, 33 bp, Homo sapien
aggcacagattgttaagatgtggtatgcccaga

SEQ ID NO: 29683 - DNA, 33 bp, Homo sapien
caccacaggcagctacacatacatattttttta

SEQ ID NO: 29684 - DNA, 33 bp, Homo sapien
caccacaggcagctacgcatacatattttttta

SEQ ID NO: 29685 - DNA, 33 bp, Homo sapien
aaagatataatggactaaataaagcttcccatc

SEQ ID NO: 29686 - DNA, 33 bp, Homo sapien
aaagatataatggactcaataaagcttcccatc

SEQ ID NO: 29687 - DNA, 33 bp, Homo sapien
tccttcatttggcccaactgcaacaatcttcaa

SEQ ID NO: 29688 - DNA, 33 bp, Homo sapien
tccttcatttggcccatctgcaacaatcttcaa

SEQ ID NO: 29689 - DNA, 33 bp, Homo sapien
ctgctggggaagcaaacaagaggtagaatggta

SEQ ID NO: 29690 - DNA, 33 bp, Homo sapien
ctgctggggaagcaaataagaggtagaatggta

SEQ ID NO: 29691 - DNA, 33 bp, Homo sapien
atttctataacaatacactttggagccaaagag

SEQ ID NO: 29692 - DNA, 33 bp, Homo sapien
atttctataacaatacgctttggagccaaagag

SEQ ID NO: 29693 - DNA, 33 bp, Homo sapien
tttaacactgcacagaagatcaagtatgtcata

SEQ ID NO: 29694 - DNA, 33 bp, Homo sapien
tttaacactgcacagatgatcaagtatgtcata

SEQ ID NO: 29695 - DNA, 33 bp, Homo sapien
tccttaagagagtaaactatctgcccagatatg

SEQ ID NO: 29696 - DNA, 33 bp, Homo sapien
tccttaagagagtaaattatctgcccagatatg

SEQ ID NO: 29697 - DNA, 33 bp, Homo sapien
acaatatggtgaaagaacccagtcatctcagaa

SEQ ID NO: 29698 - DNA, 33 bp, Homo sapien
acaatatggtgaaagaccccagtcatctcagaa

SEQ ID NO: 29699 - DNA, 33 bp, Homo sapien
ccggggtgaatgaacacgaggacggagggcagg

SEQ ID NO: 29700 - DNA, 33 bp, Homo sapien
ccggggtgaatgaacatgaggacggagggcagg

SEQ ID NO: 29701 - DNA, 33 bp, Homo sapien
ccaggtgctatgctaagccttttcctttatttc

SEQ ID NO: 29702 - DNA, 33 bp, Homo sapien
ccaggtgctatgctaatccttttcctttatttc

SEQ ID NO: 29703 - DNA, 33 bp, Homo sapien
tctttctgtttcattaggttttctctgtaaatt

SEQ ID NO: 29704 - DNA, 33 bp, Homo sapien
tctttctgtttcattatgttttctctgtaaatt

SEQ ID NO: 29705 - DNA, 33 bp, Homo sapien
atattgtattccaactgaggtctgtctgtctga

SEQ ID NO: 29706 - DNA, 33 bp, Homo sapien
atattgtattccaacttaggtctgtctgtctga

SEQ ID NO: 29707 - DNA, 33 bp, Homo sapien
gatttatgggacatcaaagcgctgatcctaacc

SEQ ID NO: 29708 - DNA, 33 bp, Homo sapien
gatttatgggacatcagagcgctgatcctaacc

SEQ ID NO: 29709 - DNA, 33 bp, Homo sapien
aattaacattttcacccaattctgcttctcagg

SEQ ID NO: 29710 - DNA, 33 bp, Homo sapien
aattaacattttcacctaattctgcttctcagg

SEQ ID NO: 29711 - DNA, 33 bp, Homo sapien
caggaaatgatcacaacgttataaagtcagaca

SEQ ID NO: 29712 - DNA, 33 bp, Homo sapien
caggaaatgatcacaatgttataaagtcagaca

SEQ ID NO: 29713 - DNA, 33 bp, Homo sapien
ttctgcctggtgcagacgtcaacctccaaaggt

SEQ ID NO: 29714 - DNA, 33 bp, Homo sapien
ttctgcctggtgcagatgtcaacctccaaaggt

SEQ ID NO: 29715 - DNA, 33 bp, Homo sapien
tatgaacgttgctcaaaggatgttttaaagaac

SEQ ID NO: 29716 - DNA, 33 bp, Homo sapien
tatgaacgttgctcaacggatgttttaaagaac

SEQ ID NO: 29717 - DNA, 33 bp, Homo sapien
atctagaagtgaaaaactccctttccatcagct

SEQ ID NO: 29718 - DNA, 33 bp, Homo sapien
atctagaagtgaaaaattccctttccatcagct

SEQ ID NO: 29719 - DNA, 33 bp, Homo sapien
agcaaagcatcacatcaaagaggattaccccca

SEQ ID NO: 29720 - DNA, 33 bp, Homo sapien
agcaaagcatcacatcgaagaggattaccccca

SEQ ID NO: 29721 - DNA, 33 bp, Homo sapien
tactagtgagatgagacgagtaattgtagtttt

SEQ ID NO: 29722 - DNA, 33 bp, Homo sapien
tactagtgagatgagatgagtaattgtagtttt

SEQ ID NO: 29723 - DNA, 33 bp, Homo sapien
aacccgtggctgcctcacaaatacaacgttctg

SEQ ID NO: 29724 - DNA, 33 bp, Homo sapien
aacccgtggctgcctcgcaaatacaacgttctg

SEQ ID NO: 29725 - DNA, 33 bp, Homo sapien
cagaaaatatctgaaaactgtataatctcattg

SEQ ID NO: 29726 - DNA, 33 bp, Homo sapien
cagaaaatatctgaaacctgtataatctcattg

SEQ ID NO: 29727 - DNA, 33 bp, Homo sapien
ttcttcaagtgaaccaaactgcaaatgactttt

SEQ ID NO: 29728 - DNA, 33 bp, Homo sapien
ttcttcaagtgaaccacactgcaaatgactttt

SEQ ID NO: 29729 - DNA, 33 bp, Homo sapien
tgggaaggataacggacgatcatcatttaacaa

SEQ ID NO: 29730 - DNA, 33 bp, Homo sapien
tgggaaggataacggaggatcatcatttaacaa

SEQ ID NO: 29731 - DNA, 33 bp, Homo sapien
cataaagatagcaagaataaagctagaaaacta

SEQ ID NO: 29732 - DNA, 33 bp, Homo sapien
cataaagatagcaagagtaaagctagaaaacta

SEQ ID NO: 29733 - DNA, 33 bp, Homo sapien
cactgacccaggatcacatactccttaatatat

SEQ ID NO: 29734 - DNA, 33 bp, Homo sapien
cactgacccaggatcatatactccttaatatat

SEQ ID NO: 29735 - DNA, 33 bp, Homo sapien
aacaccacatctctcacgattttgtacctaatt

SEQ ID NO: 29736 - DNA, 33 bp, Homo sapien
aacaccacatctctcatgattttgtacctaatt

SEQ ID NO: 29737 - DNA, 33 bp, Homo sapien
aaaaaaagaatgccacaatggttcacaatacct

SEQ ID NO: 29738 - DNA, 33 bp, Homo sapien
aaaaaaagaatgccacgatggttcacaatacct

SEQ ID NO: 29739 - DNA, 33 bp, Homo sapien
gttaccatgtgactaacaaataggggaggaaga

SEQ ID NO: 29740 - DNA, 33 bp, Homo sapien
gttaccatgtgactaataaataggggaggaaga

SEQ ID NO: 29741 - DNA, 33 bp, Homo sapien
cgtcttctgtagagtaagtaacttctgcaggat

SEQ ID NO: 29742 - DNA, 33 bp, Homo sapien
cgtcttctgtagagtaggtaacttctgcaggat

SEQ ID NO: 29743 - DNA, 33 bp, Homo sapien
aaacacgtaataggagaaaaaaatgaggctcta

SEQ ID NO: 29744 - DNA, 33 bp, Homo sapien
aaacacgtaataggaggaaaaaatgaggctcta

SEQ ID NO: 29745 - DNA, 33 bp, Homo sapien
gatagctcaaatactcacgtgggcaagacagat

SEQ ID NO: 29746 - DNA, 33 bp, Homo sapien
gatagctcaaatactcgcgtgggcaagacagat

SEQ ID NO: 29747 - DNA, 33 bp, Homo sapien
ttgcttttttatcacaaggctatatattctggg

SEQ ID NO: 29748 - DNA, 33 bp, Homo sapien
ttgcttttttatcacagggctatatattctggg

SEQ ID NO: 29749 - DNA, 33 bp, Homo sapien
gaggctgtaggaaacacgaaacacaacacagca

SEQ ID NO: 29750 - DNA, 33 bp, Homo sapien
gaggctgtaggaaacatgaaacacaacacagca

SEQ ID NO: 29751 - DNA, 33 bp, Homo sapien
tggataaaacacatggaatgagtagctgcaaaa

SEQ ID NO: 29752 - DNA, 33 bp, Homo sapien
tggataaaacacatgggatgagtagctgcaaaa

SEQ ID NO: 29753 - DNA, 33 bp, Homo sapien
tataaagtactgagaaaaggactgctccatagc

SEQ ID NO: 29754 - DNA, 33 bp, Homo sapien
tataaagtactgagaagaggactgctccatagc

SEQ ID NO: 29755 - DNA, 33 bp, Homo sapien
tacacatgcatgggtacgtgattgtgttgtgtg

SEQ ID NO: 29756 - DNA, 33 bp, Homo sapien
tacacatgcatgggtatgtgattgtgttgtgtg

SEQ ID NO: 29757 - DNA, 33 bp, Homo sapien
gtttgatgaagaatagacagtcatgtagaatta

SEQ ID NO: 29758 - DNA, 33 bp, Homo sapien
gtttgatgaagaataggcagtcatgtagaatta

SEQ ID NO: 29759 - DNA, 33 bp, Homo sapien
tagaattatggttggacaatagggtggtttgac

SEQ ID NO: 29760 - DNA, 33 bp, Homo sapien
tagaattatggttggataatagggtggtttgac

SEQ ID NO: 29761 - DNA, 33 bp, Homo sapien
aatttttcttcactggaagatgggcatcaggct

SEQ ID NO: 29762 - DNA, 33 bp, Homo sapien
aatttttcttcactggtagatgggcatcaggct

SEQ ID NO: 29763 - DNA, 33 bp, Homo sapien
tcagcagaacaggtacaggaaatggggccctcc

SEQ ID NO: 29764 - DNA, 33 bp, Homo sapien
tcagcagaacaggtacgggaaatggggccctcc

SEQ ID NO: 29765 - DNA, 33 bp, Homo sapien
ggttttgcattttaaaccagttccatcataacc

SEQ ID NO: 29766 - DNA, 33 bp, Homo sapien
ggttttgcattttaaatcagttccatcataacc

SEQ ID NO: 29767 - DNA, 33 bp, Homo sapien
gcaaaaagatctaaaacgattcctggaactgaa

SEQ ID NO: 29768 - DNA, 33 bp, Homo sapien
gcaaaaagatctaaaatgattcctggaactgaa

SEQ ID NO: 29769 - DNA, 33 bp, Homo sapien
aggccgtcctctctaaatcccttcagcccacac

SEQ ID NO: 29770 - DNA, 33 bp, Homo sapien
aggccgtcctctctaagtcccttcagcccacac

SEQ ID NO: 29771 - DNA, 33 bp, Homo sapien
tgcaaacatcaattggcatagagtttcaggaag

SEQ ID NO: 29772 - DNA, 33 bp, Homo sapien
tgcaaacatcaattggtatagagtttcaggaag

SEQ ID NO: 29773 - DNA, 33 bp, Homo sapien
agagtaaagtctttcccaatgagctaaatgata

SEQ ID NO: 29774 - DNA, 33 bp, Homo sapien
agagtaaagtctttcctaatgagctaaatgata

SEQ ID NO: 29775 - DNA, 33 bp, Homo sapien
gagagggaatggcgcccggcacgttcttttctg

SEQ ID NO: 29776 - DNA, 33 bp, Homo sapien
gagagggaatggcgcctggcacgttcttttctg

SEQ ID NO: 29777 - DNA, 33 bp, Homo sapien
ttccttctggtggcggaacaagaatccggaact

SEQ ID NO: 29778 - DNA, 33 bp, Homo sapien
ttccttctggtggcgggacaagaatccggaact

SEQ ID NO: 29779 - DNA, 33 bp, Homo sapien
tttgaggtctaaataaggtaagatctgttaagc

SEQ ID NO: 29780 - DNA, 33 bp, Homo sapien
tttgaggtctaaataatgtaagatctgttaagc

SEQ ID NO: 29781 - DNA, 33 bp, Homo sapien
ataaacagataggttcaatgataaatatctaga

SEQ ID NO: 29782 - DNA, 33 bp, Homo sapien
ataaacagataggttcgatgataaatatctaga

SEQ ID NO: 29783 - DNA, 33 bp, Homo sapien
atgaaaactttggtaacgaaaagctagaatttt

SEQ ID NO: 29784 - DNA, 33 bp, Homo sapien
atgaaaactttggtaatgaaaagctagaatttt

SEQ ID NO: 29785 - DNA, 33 bp, Homo sapien
ctcaaatatacaaaaaatgctctcttcagtttt

SEQ ID NO: 29786 - DNA, 33 bp, Homo sapien
ctcaaatatacaaaaagtgctctcttcagtttt

SEQ ID NO: 29787 - DNA, 33 bp, Homo sapien
tgcagctggtgctggcactttcattgtaaattt

SEQ ID NO: 29788 - DNA, 33 bp, Homo sapien
tgcagctggtgctggcgctttcattgtaaattt

SEQ ID NO: 29789 - DNA, 33 bp, Homo sapien
cagtttgtttcaagtccctggtgtttaagcctt

SEQ ID NO: 29790 - DNA, 33 bp, Homo sapien
cagtttgtttcaagtcgctggtgtttaagcctt

SEQ ID NO: 29791 - DNA, 33 bp, Homo sapien
agattcttcttaatgcaattcacattaaggaag

SEQ ID NO: 29792 - DNA, 33 bp, Homo sapien
agattcttcttaatgctattcacattaaggaag

SEQ ID NO: 29793 - DNA, 33 bp, Homo sapien
ataaaaggcacttgtcactctaaaactggaact

SEQ ID NO: 29794 - DNA, 33 bp, Homo sapien
ataaaaggcacttgtcgctctaaaactggaact

SEQ ID NO: 29795 - DNA, 33 bp, Homo sapien
gactacttctagtcacaaagtgcagacgaaatg

SEQ ID NO: 29796 - DNA, 33 bp, Homo sapien
gactacttctagtcacgaagtgcagacgaaatg

SEQ ID NO: 29797 - DNA, 33 bp, Homo sapien
cctggacagacggacaagtccaaactctcaatg

SEQ ID NO: 29798 - DNA, 33 bp, Homo sapien
cctggacagacggacacgtccaaactctcaatg

SEQ ID NO: 29799 - DNA, 33 bp, Homo sapien
ccactatccagagaaacgggaattgttggctat

SEQ ID NO: 29800 - DNA, 33 bp, Homo sapien
ccactatccagagaaatgggaattgttggctat

SEQ ID NO: 29801 - DNA, 33 bp, Homo sapien
aatttaggaacatgaaggtatcacagatttctt

SEQ ID NO: 29802 - DNA, 33 bp, Homo sapien
aatttaggaacatgaatgtatcacagatttctt

SEQ ID NO: 29803 - DNA, 33 bp, Homo sapien
attaaagaagccttaagaatagagaaaagtagg

SEQ ID NO: 29804 - DNA, 33 bp, Homo sapien
attaaagaagccttaataatagagaaaagtagg

SEQ ID NO: 29805 - DNA, 33 bp, Homo sapien
aaggtggcacaaattcaaaagtattcctgtgat

SEQ ID NO: 29806 - DNA, 33 bp, Homo sapien
aaggtggcacaaattcgaaagtattcctgtgat

SEQ ID NO: 29807 - DNA, 33 bp, Homo sapien
atcttcatcatactcaacttcatcatgttcagc

SEQ ID NO: 29808 - DNA, 33 bp, Homo sapien
atcttcatcatactcagcttcatcatgttcagc

SEQ ID NO: 29809 - DNA, 33 bp, Homo sapien
ttttggttagatgacacccacattttaataaac

SEQ ID NO: 29810 - DNA, 33 bp, Homo sapien
ttttggttagatgacatccacattttaataaac

SEQ ID NO: 29811 - DNA, 33 bp, Homo sapien
ctggtagaggatgctgcagataaaatgtatttt

SEQ ID NO: 29812 - DNA, 33 bp, Homo sapien
ctggtagaggatgctgtagataaaatgtatttt

SEQ ID NO: 29813 - DNA, 33 bp, Homo sapien
aaagcatgattatgaaatcgacaatttgaaagg

SEQ ID NO: 29814 - DNA, 33 bp, Homo sapien
aaagcatgattatgaattcgacaatttgaaagg

SEQ ID NO: 29815 - DNA, 33 bp, Homo sapien
tggttgtgcctgaacaactaccatgaataattt

SEQ ID NO: 29816 - DNA, 33 bp, Homo sapien
tggttgtgcctgaacatctaccatgaataattt

SEQ ID NO: 29817 - DNA, 33 bp, Homo sapien
gagtaatttaagtagcaaaactatagccctttt

SEQ ID NO: 29818 - DNA, 33 bp, Homo sapien
gagtaatttaagtagccaaactatagccctttt

SEQ ID NO: 29819 - DNA, 33 bp, Homo sapien
tgagcttcattttctacgcaatgaggatgaaat

SEQ ID NO: 29820 - DNA, 33 bp, Homo sapien
tgagcttcattttctatgcaatgaggatgaaat

SEQ ID NO: 29821 - DNA, 33 bp, Homo sapien
gtaataaagaaatggcaataactggtacataca

SEQ ID NO: 29822 - DNA, 33 bp, Homo sapien
gtaataaagaaatggccataactggtacataca

SEQ ID NO: 29823 - DNA, 33 bp, Homo sapien
cttttcactaataacccctttgcaagaatgcct

SEQ ID NO: 29824 - DNA, 33 bp, Homo sapien
cttttcactaataaccgctttgcaagaatgcct

SEQ ID NO: 29825 - DNA, 33 bp, Homo sapien
gcttggttctcccttgaaggctagtgctttgca

SEQ ID NO: 29826 - DNA, 33 bp, Homo sapien
gcttggttctcccttgtaggctagtgctttgca

SEQ ID NO: 29827 - DNA, 33 bp, Homo sapien
ccagaaaagcacattaacctttcttctttagtg

SEQ ID NO: 29828 - DNA, 33 bp, Homo sapien
ccagaaaagcacattagcctttcttctttagtg

SEQ ID NO: 29829 - DNA, 33 bp, Homo sapien
attgattagaagtagacgactcaaacttgattt

SEQ ID NO: 29830 - DNA, 33 bp, Homo sapien
attgattagaagtagatgactcaaacttgattt

SEQ ID NO: 29831 - DNA, 33 bp, Homo sapien
ggctgaaaacacataacatacctgtaataagta

SEQ ID NO: 29832 - DNA, 33 bp, Homo sapien
ggctgaaaacacataatatacctgtaataagta

SEQ ID NO: 29833 - DNA, 33 bp, Homo sapien
gataaagatgagtaaaacaaactgtagcttcca

SEQ ID NO: 29834 - DNA, 33 bp, Homo sapien
gataaagatgagtaaatcaaactgtagcttcca

SEQ ID NO: 29835 - DNA, 33 bp, Homo sapien
agatcggatgtctcaacggaaagtcataatttc

SEQ ID NO: 29836 - DNA, 33 bp, Homo sapien
agatcggatgtctcaatggaaagtcataatttc

SEQ ID NO: 29837 - DNA, 33 bp, Homo sapien
atagaaaataaggagcaaaaggctgagatcgga

SEQ ID NO: 29838 - DNA, 33 bp, Homo sapien
atagaaaataaggagcgaaaggctgagatcgga

SEQ ID NO: 29839 - DNA, 33 bp, Homo sapien
ttccatggatagcttaagacagttcccacgccc

SEQ ID NO: 29840 - DNA, 33 bp, Homo sapien
ttccatggatagcttaggacagttcccacgccc

SEQ ID NO: 29841 - DNA, 33 bp, Homo sapien
gaaagattgtgaacaaggtgcctatttttacat

SEQ ID NO: 29842 - DNA, 33 bp, Homo sapien
gaaagattgtgaacaatgtgcctatttttacat

SEQ ID NO: 29843 - DNA, 33 bp, Homo sapien
aggttagatttggagacaggaactacatatttt

SEQ ID NO: 29844 - DNA, 33 bp, Homo sapien
aggttagatttggagagaggaactacatatttt

SEQ ID NO: 29845 - DNA, 33 bp, Homo sapien
gaaaagattgactagtgaaaacacattcatttg

SEQ ID NO: 29846 - DNA, 33 bp, Homo sapien
gaaaagattgactagttaaaacacattcatttg

SEQ ID NO: 29847 - DNA, 33 bp, Homo sapien
aagagaggatagataacgaaaaagtacccctgt

SEQ ID NO: 29848 - DNA, 33 bp, Homo sapien
aagagaggatagataatgaaaaagtacccctgt

SEQ ID NO: 29849 - DNA, 33 bp, Homo sapien
attcatcaaaatgtacaacagttgactttgtgc

SEQ ID NO: 29850 - DNA, 33 bp, Homo sapien
attcatcaaaatgtactacagttgactttgtgc

SEQ ID NO: 29851 - DNA, 33 bp, Homo sapien
caaaacatgaaattcacgaggtaagaaagaaca

SEQ ID NO: 29852 - DNA, 33 bp, Homo sapien
caaaacatgaaattcaggaggtaagaaagaaca

SEQ ID NO: 29853 - DNA, 33 bp, Homo sapien
ggactgctagtctagacgactcttggaaaaata

SEQ ID NO: 29854 - DNA, 33 bp, Homo sapien
ggactgctagtctagatgactcttggaaaaata

SEQ ID NO: 29855 - DNA, 33 bp, Homo sapien
tatatagcaaaagcaccatgatatgggggaaaa

SEQ ID NO: 29856 - DNA, 33 bp, Homo sapien
tatatagcaaaagcacgatgatatgggggaaaa

SEQ ID NO: 29857 - DNA, 33 bp, Homo sapien
ttaaaggatgccctgaagccttaggcaccactt

SEQ ID NO: 29858 - DNA, 33 bp, Homo sapien
ttaaaggatgccctgaggccttaggcaccactt

SEQ ID NO: 29859 - DNA, 33 bp, Homo sapien
aatgaattttccaacaacataaatgagcttgga

SEQ ID NO: 29860 - DNA, 33 bp, Homo sapien
aatgaattttccaacagcataaatgagcttgga

SEQ ID NO: 29861 - DNA, 33 bp, Homo sapien
caggtctgccgatgaaaaatccaggcatagttt

SEQ ID NO: 29862 - DNA, 33 bp, Homo sapien
caggtctgccgatgaagaatccaggcatagttt

SEQ ID NO: 29863 - DNA, 33 bp, Homo sapien
tgggcatggagtaggcactcaaaaagtattcga

SEQ ID NO: 29864 - DNA, 33 bp, Homo sapien
tgggcatggagtaggcgctcaaaaagtattcga

SEQ ID NO: 29865 - DNA, 33 bp, Homo sapien
atatgagtgaatggataaggtaatctctccttt

SEQ ID NO: 29866 - DNA, 33 bp, Homo sapien
atatgagtgaatggatgaggtaatctctccttt

SEQ ID NO: 29867 - DNA, 33 bp, Homo sapien
atgtttcatcattaaagagctccctgtcccttt

SEQ ID NO: 29868 - DNA, 33 bp, Homo sapien
atgtttcatcattaaatagctccctgtcccttt

SEQ ID NO: 29869 - DNA, 33 bp, Homo sapien
tcagatatcctgcaaaatgcttttcataggagc

SEQ ID NO: 29870 - DNA, 33 bp, Homo sapien
tcagatatcctgcaaagtgcttttcataggagc

SEQ ID NO: 29871 - DNA, 33 bp, Homo sapien
cactaggtgtatggtacgctgaattttaagtta

SEQ ID NO: 29872 - DNA, 33 bp, Homo sapien
cactaggtgtatggtatgctgaattttaagtta

SEQ ID NO: 29873 - DNA, 33 bp, Homo sapien
aatcttaatgaagtccactttatcaattttttt

SEQ ID NO: 29874 - DNA, 33 bp, Homo sapien
aatcttaatgaagtccgctttatcaattttttt

SEQ ID NO: 29875 - DNA, 33 bp, Homo sapien
cataccctgtctcaaaaatctaacctctcaaca

SEQ ID NO: 29876 - DNA, 33 bp, Homo sapien
cataccctgtctcaaatatctaacctctcaaca

SEQ ID NO: 29877 - DNA, 33 bp, Homo sapien
aactacaggatacatcaaaaaatcaaatttatt

SEQ ID NO: 29878 - DNA, 33 bp, Homo sapien
aactacaggatacatccaaaaatcaaatttatt

SEQ ID NO: 29879 - DNA, 33 bp, Homo sapien
tttcaagtgaaaggaaatgctatcattagttag

SEQ ID NO: 29880 - DNA, 33 bp, Homo sapien
tttcaagtgaaaggaagtgctatcattagttag

SEQ ID NO: 29881 - DNA, 33 bp, Homo sapien
catttattgagtagggaagcagccgaaaatgga

SEQ ID NO: 29882 - DNA, 33 bp, Homo sapien
catttattgagtagggcagcagccgaaaatgga

SEQ ID NO: 29883 - DNA, 33 bp, Homo sapien
ttgtagaatctggacaccttttgtttttagcaa

SEQ ID NO: 29884 - DNA, 33 bp, Homo sapien
ttgtagaatctggacatcttttgtttttagcaa

SEQ ID NO: 29885 - DNA, 33 bp, Homo sapien
atgctacagtgtttctaaacaggggcattctta

SEQ ID NO: 29886 - DNA, 33 bp, Homo sapien
atgctacagtgtttctgaacaggggcattctta

SEQ ID NO: 29887 - DNA, 33 bp, Homo sapien
cacatggattgttcagaaaataggccttctgga

SEQ ID NO: 29888 - DNA, 33 bp, Homo sapien
cacatggattgttcaggaaataggccttctgga

SEQ ID NO: 29889 - DNA, 33 bp, Homo sapien
gtagccatgtctgaaacgacatcttatgtttga

SEQ ID NO: 29890 - DNA, 33 bp, Homo sapien
gtagccatgtctgaaatgacatcttatgtttga

SEQ ID NO: 29891 - DNA, 33 bp, Homo sapien
aacaaatatctctgaaagttcctgttatttatc

SEQ ID NO: 29892 - DNA, 33 bp, Homo sapien
aacaaatatctctgaaggttcctgttatttatc

SEQ ID NO: 29893 - DNA, 33 bp, Homo sapien
ctagattcttatcttgaactctttagaccatta

SEQ ID NO: 29894 - DNA, 33 bp, Homo sapien
ctagattcttatcttggactctttagaccatta

SEQ ID NO: 29895 - DNA, 33 bp, Homo sapien
tcattgtcttctatgactatcagcatgtaggaa

SEQ ID NO: 29896 - DNA, 33 bp, Homo sapien
tcattgtcttctatgattatcagcatgtaggaa

SEQ ID NO: 29897 - DNA, 33 bp, Homo sapien
tagcaagaaaggtgaacacaggcaaagtatgcc

SEQ ID NO: 29898 - DNA, 33 bp, Homo sapien
tagcaagaaaggtgaatacaggcaaagtatgcc

SEQ ID NO: 29899 - DNA, 33 bp, Homo sapien
ctatgagctaatatacaccaaatgctgccagat

SEQ ID NO: 29900 - DNA, 33 bp, Homo sapien
ctatgagctaatatacgccaaatgctgccagat

SEQ ID NO: 29901 - DNA, 33 bp, Homo sapien
tattgactatatttcacaagagcgttttgtttg

SEQ ID NO: 29902 - DNA, 33 bp, Homo sapien
tattgactatatttcataagagcgttttgtttg

SEQ ID NO: 29903 - DNA, 33 bp, Homo sapien
aaatgaaaagcagaaagaaaaaactctgcatct

SEQ ID NO: 29904 - DNA, 33 bp, Homo sapien
aaatgaaaagcagaaataaaaaactctgcatct

SEQ ID NO: 29905 - DNA, 33 bp, Homo sapien
gagaactctgaaaagcacaaaaaagttatatgt

SEQ ID NO: 29906 - DNA, 33 bp, Homo sapien
gagaactctgaaaagcgcaaaaaagttatatgt

SEQ ID NO: 29907 - DNA, 33 bp, Homo sapien
aaagcaggctaatggaatacataaaagacttgg

SEQ ID NO: 29908 - DNA, 33 bp, Homo sapien
aaagcaggctaatggattacataaaagacttgg

SEQ ID NO: 29909 - DNA, 33 bp, Homo sapien
tgacacaaatgcacaaataatgtcacgaattta

SEQ ID NO: 29910 - DNA, 33 bp, Homo sapien
tgacacaaatgcacaagtaatgtcacgaattta

SEQ ID NO: 29911 - DNA, 33 bp, Homo sapien
ttttggccagtttttacaagcatagtacccact

SEQ ID NO: 29912 - DNA, 33 bp, Homo sapien
ttttggccagtttttataagcatagtacccact

SEQ ID NO: 29913 - DNA, 33 bp, Homo sapien
aattgaaacccttctgacaaggtccaaacaaat

SEQ ID NO: 29914 - DNA, 33 bp, Homo sapien
aattgaaacccttctggcaaggtccaaacaaat

SEQ ID NO: 29915 - DNA, 33 bp, Homo sapien
attcctgtttagattacaaaaagcctcctaaag

SEQ ID NO: 29916 - DNA, 33 bp, Homo sapien
attcctgtttagattagaaaaagcctcctaaag

SEQ ID NO: 29917 - DNA, 33 bp, Homo sapien
ctgaagaacatggattaaaatgagcaaatttat

SEQ ID NO: 29918 - DNA, 33 bp, Homo sapien
ctgaagaacatggattgaaatgagcaaatttat

SEQ ID NO: 29919 - DNA, 33 bp, Homo sapien
gaaaactggtaatggactaaaagaccatagctc

SEQ ID NO: 29920 - DNA, 33 bp, Homo sapien
gaaaactggtaatggattaaaagaccatagctc

SEQ ID NO: 29921 - DNA, 33 bp, Homo sapien
ttggaacaaacagcaaaaaggtaattaagagtt

SEQ ID NO: 29922 - DNA, 33 bp, Homo sapien
ttggaacaaacagcaagaaggtaattaagagtt

SEQ ID NO: 29923 - DNA, 33 bp, Homo sapien
aacacactcaactatgccaattcccaaataggt

SEQ ID NO: 29924 - DNA, 33 bp, Homo sapien
aacacactcaactatgtcaattcccaaataggt

SEQ ID NO: 29925 - DNA, 33 bp, Homo sapien
taatattttatagaacagtcaccatttagtact

SEQ ID NO: 29926 - DNA, 33 bp, Homo sapien
taatattttatagaacggtcaccatttagtact

SEQ ID NO: 29927 - DNA, 33 bp, Homo sapien
agattatgtaatttgactacgcaaaacctgcta

SEQ ID NO: 29928 - DNA, 33 bp, Homo sapien
agattatgtaatttgagtacgcaaaacctgcta

SEQ ID NO: 29929 - DNA, 33 bp, Homo sapien
cactccatatgctctcaagtttaaaaagtaaaa

SEQ ID NO: 29930 - DNA, 33 bp, Homo sapien
cactccatatgctctcgagtttaaaaagtaaaa

SEQ ID NO: 29931 - DNA, 33 bp, Homo sapien
tgagcgggtaattaacagaccagaaaagccatt

SEQ ID NO: 29932 - DNA, 33 bp, Homo sapien
tgagcgggtaattaacggaccagaaaagccatt

SEQ ID NO: 29933 - DNA, 33 bp, Homo sapien
ttcctataacccttgccaattatctgcaaagtt

SEQ ID NO: 29934 - DNA, 33 bp, Homo sapien
ttcctataacccttgctaattatctgcaaagtt

SEQ ID NO: 29935 - DNA, 33 bp, Homo sapien
tgctcttaagtgatacaggttgtaatatttttt

SEQ ID NO: 29936 - DNA, 33 bp, Homo sapien
tgctcttaagtgatacgggttgtaatatttttt

SEQ ID NO: 29937 - DNA, 33 bp, Homo sapien
aattagctattcaatacggctgatagaaatctg

SEQ ID NO: 29938 - DNA, 33 bp, Homo sapien
aattagctattcaatatggctgatagaaatctg

SEQ ID NO: 29939 - DNA, 33 bp, Homo sapien
cgaatggataattttacagcacaatttatgcct

SEQ ID NO: 29940 - DNA, 33 bp, Homo sapien
cgaatggataattttatagcacaatttatgcct

SEQ ID NO: 29941 - DNA, 33 bp, Homo sapien
gctccactcccctaaacgaggtctgtttttcct

SEQ ID NO: 29942 - DNA, 33 bp, Homo sapien
gctccactcccctaaatgaggtctgtttttcct

SEQ ID NO: 29943 - DNA, 33 bp, Homo sapien
cagacagattaagtaaatataaagcaatccaga

SEQ ID NO: 29944 - DNA, 33 bp, Homo sapien
cagacagattaagtaactataaagcaatccaga

SEQ ID NO: 29945 - DNA, 33 bp, Homo sapien
ttggaggaaatcacacaaaagttgtatcaacat

SEQ ID NO: 29946 - DNA, 33 bp, Homo sapien
ttggaggaaatcacacgaaagttgtatcaacat

SEQ ID NO: 29947 - DNA, 33 bp, Homo sapien
tcacttcactgtaatacagaacctacttactaa

SEQ ID NO: 29948 - DNA, 33 bp, Homo sapien
tcacttcactgtaatatagaacctacttactaa

SEQ ID NO: 29949 - DNA, 33 bp, Homo sapien
aatccatatattgtgacaagaaaacaaaagaac

SEQ ID NO: 29950 - DNA, 33 bp, Homo sapien
aatccatatattgtgagaagaaaacaaaagaac

SEQ ID NO: 29951 - DNA, 33 bp, Homo sapien
tacaagctgttttgaaactctgaggtttttctc

SEQ ID NO: 29952 - DNA, 33 bp, Homo sapien
tacaagctgttttgaatctctgaggtttttctc

SEQ ID NO: 29953 - DNA, 33 bp, Homo sapien
ttgtaaaattagattcaaacattcaagatggga

SEQ ID NO: 29954 - DNA, 33 bp, Homo sapien
ttgtaaaattagattcgaacattcaagatggga

SEQ ID NO: 29955 - DNA, 33 bp, Homo sapien
tgcttgaagagatgacgcttgacctgtggttct

SEQ ID NO: 29956 - DNA, 33 bp, Homo sapien
tgcttgaagagatgactcttgacctgtggttct

SEQ ID NO: 29957 - DNA, 33 bp, Homo sapien
acgttacttaaaccaaagtgggaatggaccaac

SEQ ID NO: 29958 - DNA, 33 bp, Homo sapien
acgttacttaaaccaaggtgggaatggaccaac

SEQ ID NO: 29959 - DNA, 33 bp, Homo sapien
tgttagttaaatgcaccaagcagaaatttttga

SEQ ID NO: 29960 - DNA, 33 bp, Homo sapien
tgttagttaaatgcacgaagcagaaatttttga

SEQ ID NO: 29961 - DNA, 33 bp, Homo sapien
aacattttcactagtaaaaacaacaggatttaa

SEQ ID NO: 29962 - DNA, 33 bp, Homo sapien
aacattttcactagtagaaacaacaggatttaa

SEQ ID NO: 29963 - DNA, 33 bp, Homo sapien
gtgtataatagagaaaagtgtgaaagattcatg

SEQ ID NO: 29964 - DNA, 33 bp, Homo sapien
gtgtataatagagaaacgtgtgaaagattcatg

SEQ ID NO: 29965 - DNA, 33 bp, Homo sapien
tttttaaagatacctcagactaaatgattttgt

SEQ ID NO: 29966 - DNA, 33 bp, Homo sapien
tttttaaagatacctcggactaaatgattttgt

SEQ ID NO: 29967 - DNA, 33 bp, Homo sapien
tagtatttgaaccaaacttatcaatagtgaaac

SEQ ID NO: 29968 - DNA, 33 bp, Homo sapien
tagtatttgaaccaaatttatcaatagtgaaac

SEQ ID NO: 29969 - DNA, 33 bp, Homo sapien
ccatttcagtgcaacactagctactctgtgaca

SEQ ID NO: 29970 - DNA, 33 bp, Homo sapien
ccatttcagtgcaacattagctactctgtgaca

SEQ ID NO: 29971 - DNA, 33 bp, Homo sapien
tattattaaaaactcaagaggagatacatttaa

SEQ ID NO: 29972 - DNA, 33 bp, Homo sapien
tattattaaaaactcaggaggagatacatttaa

SEQ ID NO: 29973 - DNA, 33 bp, Homo sapien
gataaatgaccttaccaactggagcctcagttt

SEQ ID NO: 29974 - DNA, 33 bp, Homo sapien
gataaatgaccttaccgactggagcctcagttt

SEQ ID NO: 29975 - DNA, 33 bp, Homo sapien
aaagcttatcagcagacgcacagaacccacaat

SEQ ID NO: 29976 - DNA, 33 bp, Homo sapien
aaagcttatcagcagatgcacagaacccacaat

SEQ ID NO: 29977 - DNA, 33 bp, Homo sapien
acttgtgggaaaagaccatgtgcaccctgttta

SEQ ID NO: 29978 - DNA, 33 bp, Homo sapien
acttgtgggaaaagactatgtgcaccctgttta

SEQ ID NO: 29979 - DNA, 33 bp, Homo sapien
gttagcctctacaatccgaagaaagcaaaaaaa

SEQ ID NO: 29980 - DNA, 33 bp, Homo sapien
gttagcctctacaatcggaagaaagcaaaaaaa

SEQ ID NO: 29981 - DNA, 33 bp, Homo sapien
aaggatcctgtaagtcaaacattatatgtttaa

SEQ ID NO: 29982 - DNA, 33 bp, Homo sapien
aaggatcctgtaagtctaacattatatgtttaa

SEQ ID NO: 29983 - DNA, 33 bp, Homo sapien
tcagactggaaatgccgccaagcctaatagcta

SEQ ID NO: 29984 - DNA, 33 bp, Homo sapien
tcagactggaaatgcctccaagcctaatagcta

SEQ ID NO: 29985 - DNA, 33 bp, Homo sapien
tgctatgtattttcacacttacagtttttattt

SEQ ID NO: 29986 - DNA, 33 bp, Homo sapien
tgctatgtattttcactcttacagtttttattt

SEQ ID NO: 29987 - DNA, 33 bp, Homo sapien
atatatgtgttttgaaaatactaacgcacaaaa

SEQ ID NO: 29988 - DNA, 33 bp, Homo sapien
atatatgtgttttgaagatactaacgcacaaaa

SEQ ID NO: 29989 - DNA, 33 bp, Homo sapien
gcctttacatcaagaacatttttgctaaaacaa

SEQ ID NO: 29990 - DNA, 33 bp, Homo sapien
gcctttacatcaagaatatttttgctaaaacaa

SEQ ID NO: 29991 - DNA, 33 bp, Homo sapien
aaactcaatgccattcaaaaatgaaatgcatta

SEQ ID NO: 29992 - DNA, 33 bp, Homo sapien
aaactcaatgccattccaaaatgaaatgcatta

SEQ ID NO: 29993 - DNA, 33 bp, Homo sapien
taaagagaagctgtaacgaagtttcagaatgtc

SEQ ID NO: 29994 - DNA, 33 bp, Homo sapien
taaagagaagctgtaatgaagtttcagaatgtc

SEQ ID NO: 29995 - DNA, 33 bp, Homo sapien
tgactactgttgaaaaacatgaaataccaaaat

SEQ ID NO: 29996 - DNA, 33 bp, Homo sapien
tgactactgttgaaaatcatgaaataccaaaat

SEQ ID NO: 29997 - DNA, 33 bp, Homo sapien
ttgttggcattaaaaagtgacatcatccctgct

SEQ ID NO: 29998 - DNA, 33 bp, Homo sapien
ttgttggcattaaaaattgacatcatccctgct

SEQ ID NO: 29999 - DNA, 33 bp, Homo sapien
gtgaagttttcaatgacgatttttggtggttat

SEQ ID NO: 30000 - DNA, 33 bp, Homo sapien
gtgaagttttcaatgatgatttttggtggttat

SEQ ID NO: 30001 - DNA, 33 bp, Homo sapien
cagtgactagctgctcactctggtcttttgggt

SEQ ID NO: 30002 - DNA, 33 bp, Homo sapien
cagtgactagctgctcgctctggtcttttgggt

SEQ ID NO: 30003 - DNA, 33 bp, Homo sapien
cccctttcttctactaagattgatgtaactgct

SEQ ID NO: 30004 - DNA, 33 bp, Homo sapien
cccctttcttctactaggattgatgtaactgct

SEQ ID NO: 30005 - DNA, 33 bp, Homo sapien
aactacctgagtagaaacttcaaatatgtatat

SEQ ID NO: 30006 - DNA, 33 bp, Homo sapien
aactacctgagtagaagcttcaaatatgtatat

SEQ ID NO: 30007 - DNA, 33 bp, Homo sapien
agcaaataaagtcataaggacagagcttcatca

SEQ ID NO: 30008 - DNA, 33 bp, Homo sapien
agcaaataaagtcatacggacagagcttcatca

SEQ ID NO: 30009 - DNA, 33 bp, Homo sapien
tcttagctgactgacacaggaacaaaactggtt

SEQ ID NO: 30010 - DNA, 33 bp, Homo sapien
tcttagctgactgacataggaacaaaactggtt

SEQ ID NO: 30011 - DNA, 33 bp, Homo sapien
aaaggatggaagttaaccacatgacacaggaaa

SEQ ID NO: 30012 - DNA, 33 bp, Homo sapien
aaaggatggaagttaatcacatgacacaggaaa

SEQ ID NO: 30013 - DNA, 33 bp, Homo sapien
agatttgtgatgagagaataacatacttctgta

SEQ ID NO: 30014 - DNA, 33 bp, Homo sapien
agatttgtgatgagaggataacatacttctgta

SEQ ID NO: 30015 - DNA, 33 bp, Homo sapien
tggctgtgacagttcacggccaggatgcttctt

SEQ ID NO: 30016 - DNA, 33 bp, Homo sapien
tggctgtgacagttcatggccaggatgcttctt

SEQ ID NO: 30017 - DNA, 33 bp, Homo sapien
ttctcctggtccaaaccgtctggtcttgctggc

SEQ ID NO: 30018 - DNA, 33 bp, Homo sapien
ttctcctggtccaaactgtctggtcttgctggc

SEQ ID NO: 30019 - DNA, 33 bp, Homo sapien
gtctgggtttctactacgtgcttcatctatatt

SEQ ID NO: 30020 - DNA, 33 bp, Homo sapien
gtctgggtttctactatgtgcttcatctatatt

SEQ ID NO: 30021 - DNA, 33 bp, Homo sapien
ttttctgactgcacaccctaatctgtaatgacc

SEQ ID NO: 30022 - DNA, 33 bp, Homo sapien
ttttctgactgcacacgctaatctgtaatgacc

SEQ ID NO: 30023 - DNA, 33 bp, Homo sapien
ttaattatggtttaaaatgtgcatatgtgaaat

SEQ ID NO: 30024 - DNA, 33 bp, Homo sapien
ttaattatggtttaaattgtgcatatgtgaaat

SEQ ID NO: 30025 - DNA, 33 bp, Homo sapien
gagtctgagaataaagcctaagtactacaagat

SEQ ID NO: 30026 - DNA, 33 bp, Homo sapien
gagtctgagaataaagtctaagtactacaagat

SEQ ID NO: 30027 - DNA, 33 bp, Homo sapien
gttaacaagtctcaatcaagtaaagtcacacag

SEQ ID NO: 30028 - DNA, 33 bp, Homo sapien
gttaacaagtctcaattaagtaaagtcacacag

SEQ ID NO: 30029 - DNA, 33 bp, Homo sapien
ctgtgatttttaacaacgatttgtggaagtgca

SEQ ID NO: 30030 - DNA, 33 bp, Homo sapien
ctgtgatttttaacaatgatttgtggaagtgca

SEQ ID NO: 30031 - DNA, 33 bp, Homo sapien
tgcataggaagttagtcaaaagttctgaataaa

SEQ ID NO: 30032 - DNA, 33 bp, Homo sapien
tgcataggaagttagtgaaaagttctgaataaa

SEQ ID NO: 30033 - DNA, 33 bp, Homo sapien
aaagtatttgctaaaggccatttgatttttctc

SEQ ID NO: 30034 - DNA, 33 bp, Homo sapien
aaagtatttgctaaagtccatttgatttttctc

SEQ ID NO: 30035 - DNA, 33 bp, Homo sapien
aatactttacaagcacagtataagaaaatgtaa

SEQ ID NO: 30036 - DNA, 33 bp, Homo sapien
aatactttacaagcacggtataagaaaatgtaa

SEQ ID NO: 30037 - DNA, 33 bp, Homo sapien
ctctttttttctgacaatattgctctagttggg

SEQ ID NO: 30038 - DNA, 33 bp, Homo sapien
ctctttttttctgacactattgctctagttggg

SEQ ID NO: 30039 - DNA, 33 bp, Homo sapien
gtgttactcatgaaagaccaattgctacgtttt

SEQ ID NO: 30040 - DNA, 33 bp, Homo sapien
gtgttactcatgaaaggccaattgctacgtttt

SEQ ID NO: 30041 - DNA, 33 bp, Homo sapien
gaaaggaataggttaagatcagtgagaatgtgc

SEQ ID NO: 30042 - DNA, 33 bp, Homo sapien
gaaaggaataggttaatatcagtgagaatgtgc

SEQ ID NO: 30043 - DNA, 33 bp, Homo sapien
ccaaattacattggaaaattgccagcaagacac

SEQ ID NO: 30044 - DNA, 33 bp, Homo sapien
ccaaattacattggaagattgccagcaagacac

SEQ ID NO: 30045 - DNA, 33 bp, Homo sapien
tgtgtgctatagaagaacgcagagaagtggtta

SEQ ID NO: 30046 - DNA, 33 bp, Homo sapien
tgtgtgctatagaagagcgcagagaagtggtta

SEQ ID NO: 30047 - DNA, 33 bp, Homo sapien
ggtaggtgactttcccaggatcaattttccact

SEQ ID NO: 30048 - DNA, 33 bp, Homo sapien
ggtaggtgactttcccgggatcaattttccact

SEQ ID NO: 30049 - DNA, 33 bp, Homo sapien
tgcccttgctcataacagaaacatctttaactt

SEQ ID NO: 30050 - DNA, 33 bp, Homo sapien
tgcccttgctcataacggaaacatctttaactt

SEQ ID NO: 30051 - DNA, 33 bp, Homo sapien
aaccaaagagcttagtcggatttgagggaaaag

SEQ ID NO: 30052 - DNA, 33 bp, Homo sapien
aaccaaagagcttagttggatttgagggaaaag

SEQ ID NO: 30053 - DNA, 33 bp, Homo sapien
ggagcaagtctattaaaaacatgagtgatatga

SEQ ID NO: 30054 - DNA, 33 bp, Homo sapien
ggagcaagtctattaagaacatgagtgatatga

SEQ ID NO: 30055 - DNA, 33 bp, Homo sapien
cttaatatactcatggaattctgggtaaactca

SEQ ID NO: 30056 - DNA, 33 bp, Homo sapien
cttaatatactcatgggattctgggtaaactca

SEQ ID NO: 30057 - DNA, 33 bp, Homo sapien
agtttgagccaaataacaaaccagccctagccc

SEQ ID NO: 30058 - DNA, 33 bp, Homo sapien
agtttgagccaaataataaaccagccctagccc

SEQ ID NO: 30059 - DNA, 33 bp, Homo sapien
tgataggataaattacactgacatatcaaagga

SEQ ID NO: 30060 - DNA, 33 bp, Homo sapien
tgataggataaattacgctgacatatcaaagga

SEQ ID NO: 30061 - DNA, 33 bp, Homo sapien
gcatactggagagatacggcagcagagtcacac

SEQ ID NO: 30062 - DNA, 33 bp, Homo sapien
gcatactggagagatatggcagcagagtcacac

SEQ ID NO: 30063 - DNA, 33 bp, Homo sapien
gaaaaaaaaatgggtccagtatgaaccaaaaaa

SEQ ID NO: 30064 - DNA, 33 bp, Homo sapien
gaaaaaaaaatgggtcgagtatgaaccaaaaaa

SEQ ID NO: 30065 - DNA, 33 bp, Homo sapien
tggtaatctaccattcaccttctttactgcaca

SEQ ID NO: 30066 - DNA, 33 bp, Homo sapien
tggtaatctaccattcgccttctttactgcaca

SEQ ID NO: 30067 - DNA, 33 bp, Homo sapien
gagaaggaatttcacaaggtaatttcatcagtt

SEQ ID NO: 30068 - DNA, 33 bp, Homo sapien
gagaaggaatttcacacggtaatttcatcagtt

SEQ ID NO: 30069 - DNA, 33 bp, Homo sapien
gaagatagctaacccaggattgaaaccagaatt

SEQ ID NO: 30070 - DNA, 33 bp, Homo sapien
gaagatagctaacccatgattgaaaccagaatt

SEQ ID NO: 30071 - DNA, 33 bp, Homo sapien
aggaacttgaaagagacacaactgaaaaattgg

SEQ ID NO: 30072 - DNA, 33 bp, Homo sapien
aggaacttgaaagagatacaactgaaaaattgg

SEQ ID NO: 30073 - DNA, 33 bp, Homo sapien
gtgttgtctcatctaaccagcaatttggtggtt

SEQ ID NO: 30074 - DNA, 33 bp, Homo sapien
gtgttgtctcatctaagcagcaatttggtggtt

SEQ ID NO: 30075 - DNA, 33 bp, Homo sapien
tagcaatgaatgattacgaaataactttttaaa

SEQ ID NO: 30076 - DNA, 33 bp, Homo sapien
tagcaatgaatgattaggaaataactttttaaa

SEQ ID NO: 30077 - DNA, 33 bp, Homo sapien
aacagcactgtaaacagctatcagtttccttcc

SEQ ID NO: 30078 - DNA, 33 bp, Homo sapien
aacagcactgtaaacatctatcagtttccttcc

SEQ ID NO: 30079 - DNA, 33 bp, Homo sapien
tatgcattaagggttacagaggttttgctagca

SEQ ID NO: 30080 - DNA, 33 bp, Homo sapien
tatgcattaagggttatagaggttttgctagca

SEQ ID NO: 30081 - DNA, 33 bp, Homo sapien
taagctcaagaagcaaggtcttttagtcgtctg

SEQ ID NO: 30082 - DNA, 33 bp, Homo sapien
taagctcaagaagcaatgtcttttagtcgtctg

SEQ ID NO: 30083 - DNA, 33 bp, Homo sapien
tctaagtagaaggtaaagtattagcaagactat

SEQ ID NO: 30084 - DNA, 33 bp, Homo sapien
tctaagtagaaggtaacgtattagcaagactat

SEQ ID NO: 30085 - DNA, 33 bp, Homo sapien
tgtgacagagcacaggaagtgtttaatgaacaa

SEQ ID NO: 30086 - DNA, 33 bp, Homo sapien
tgtgacagagcacagggagtgtttaatgaacaa

SEQ ID NO: 30087 - DNA, 33 bp, Homo sapien
tgcttgtgagcattgcacttgggcaggctgaaa

SEQ ID NO: 30088 - DNA, 33 bp, Homo sapien
tgcttgtgagcattgcgcttgggcaggctgaaa

SEQ ID NO: 30089 - DNA, 33 bp, Homo sapien
cttcaggtctttcccaagaaattgcttattcct

SEQ ID NO: 30090 - DNA, 33 bp, Homo sapien
cttcaggtctttcccaggaaattgcttattcct

SEQ ID NO: 30091 - DNA, 33 bp, Homo sapien
tctgtgtacaaaatagaacccacaaaaatattg

SEQ ID NO: 30092 - DNA, 33 bp, Homo sapien
tctgtgtacaaaataggacccacaaaaatattg

SEQ ID NO: 30093 - DNA, 33 bp, Homo sapien
tagtctaatgcaatgaaccctaataagaatcac

SEQ ID NO: 30094 - DNA, 33 bp, Homo sapien
tagtctaatgcaatgatccctaataagaatcac

SEQ ID NO: 30095 - DNA, 33 bp, Homo sapien
tacatgaatggtaaacactggacaactacttgg

SEQ ID NO: 30096 - DNA, 33 bp, Homo sapien
tacatgaatggtaaacgctggacaactacttgg

SEQ ID NO: 30097 - DNA, 33 bp, Homo sapien
tagttttatagtcacaagacagtgcattttccc

SEQ ID NO: 30098 - DNA, 33 bp, Homo sapien
tagttttatagtcacaggacagtgcattttccc

SEQ ID NO: 30099 - DNA, 33 bp, Homo sapien
tgactacctttagtaacggtactccaacaacct

SEQ ID NO: 30100 - DNA, 33 bp, Homo sapien
tgactacctttagtaatggtactccaacaacct

SEQ ID NO: 30101 - DNA, 33 bp, Homo sapien
aaattttgtttgaaaaaatcatgcaaccattaa

SEQ ID NO: 30102 - DNA, 33 bp, Homo sapien
aaattttgtttgaaaacatcatgcaaccattaa

SEQ ID NO: 30103 - DNA, 33 bp, Homo sapien
ctagaacaaacattccactagctcaaagcttag

SEQ ID NO: 30104 - DNA, 33 bp, Homo sapien
ctagaacaaacattccgctagctcaaagcttag

SEQ ID NO: 30105 - DNA, 33 bp, Homo sapien
acactagacacttgaaaaccagcaatgaactaa

SEQ ID NO: 30106 - DNA, 33 bp, Homo sapien
acactagacacttgaataccagcaatgaactaa

SEQ ID NO: 30107 - DNA, 33 bp, Homo sapien
tctggtacttttgtaacggcttcaaaggaactg

SEQ ID NO: 30108 - DNA, 33 bp, Homo sapien
tctggtacttttgtaatggcttcaaaggaactg

SEQ ID NO: 30109 - DNA, 33 bp, Homo sapien
atctacaaaatgtagtcaattgaactggttcct

SEQ ID NO: 30110 - DNA, 33 bp, Homo sapien
atctacaaaatgtagttaattgaactggttcct

SEQ ID NO: 30111 - DNA, 33 bp, Homo sapien
ctcctgagactataccaatttcatcttgtgtca

SEQ ID NO: 30112 - DNA, 33 bp, Homo sapien
ctcctgagactataccgatttcatcttgtgtca

SEQ ID NO: 30113 - DNA, 33 bp, Homo sapien
gcttcctctcaccaaaaggccattgcacacatt

SEQ ID NO: 30114 - DNA, 33 bp, Homo sapien
gcttcctctcaccaaagggccattgcacacatt

SEQ ID NO: 30115 - DNA, 33 bp, Homo sapien
tgttcaggtctcctcacgtattcttgtttctct

SEQ ID NO: 30116 - DNA, 33 bp, Homo sapien
tgttcaggtctcctcatgtattcttgtttctct

SEQ ID NO: 30117 - DNA, 33 bp, Homo sapien
agatcagtagtatccacattgaaagaagttgag

SEQ ID NO: 30118 - DNA, 33 bp, Homo sapien
agatcagtagtatccagattgaaagaagttgag

SEQ ID NO: 30119 - DNA, 33 bp, Homo sapien
ctccctctgatctttcacatctccagtcttctc

SEQ ID NO: 30120 - DNA, 33 bp, Homo sapien
ctccctctgatctttcgcatctccagtcttctc

SEQ ID NO: 30121 - DNA, 33 bp, Homo sapien
ttcttacaacgataaaaaatagtggatgctaga

SEQ ID NO: 30122 - DNA, 33 bp, Homo sapien
ttcttacaacgataaataatagtggatgctaga

SEQ ID NO: 30123 - DNA, 33 bp, Homo sapien
taaaaaggctgtggtcaatagccatattaatca

SEQ ID NO: 30124 - DNA, 33 bp, Homo sapien
taaaaaggctgtggtccatagccatattaatca

SEQ ID NO: 30125 - DNA, 33 bp, Homo sapien
ttgggccacacacaacagatttgccataaatag

SEQ ID NO: 30126 - DNA, 33 bp, Homo sapien
ttgggccacacacaacggatttgccataaatag

SEQ ID NO: 30127 - DNA, 33 bp, Homo sapien
acacacattcacaccaataagccaatttgaaat

SEQ ID NO: 30128 - DNA, 33 bp, Homo sapien
acacacattcacaccagtaagccaatttgaaat

SEQ ID NO: 30129 - DNA, 33 bp, Homo sapien
acagtatgggtgataaactgctaagagatctga

SEQ ID NO: 30130 - DNA, 33 bp, Homo sapien
acagtatgggtgataagctgctaagagatctga

SEQ ID NO: 30131 - DNA, 33 bp, Homo sapien
taggcaggacttataaatagacaattatgtaca

SEQ ID NO: 30132 - DNA, 33 bp, Homo sapien
taggcaggacttataagtagacaattatgtaca

SEQ ID NO: 30133 - DNA, 33 bp, Homo sapien
tgtgtgctaattgatacgtagggaagcagtttc

SEQ ID NO: 30134 - DNA, 33 bp, Homo sapien
tgtgtgctaattgatatgtagggaagcagtttc

SEQ ID NO: 30135 - DNA, 33 bp, Homo sapien
agtcatgatcaaaacaccagtatatgtgccaaa

SEQ ID NO: 30136 - DNA, 33 bp, Homo sapien
agtcatgatcaaaacatcagtatatgtgccaaa

SEQ ID NO: 30137 - DNA, 33 bp, Homo sapien
ctgtttctgaaaaacaatgagtggttctgtaca

SEQ ID NO: 30138 - DNA, 33 bp, Homo sapien
ctgtttctgaaaaacattgagtggttctgtaca

SEQ ID NO: 30139 - DNA, 33 bp, Homo sapien
gagttaactgcttagaactctgggtggactctg

SEQ ID NO: 30140 - DNA, 33 bp, Homo sapien
gagttaactgcttagacctctgggtggactctg

SEQ ID NO: 30141 - DNA, 33 bp, Homo sapien
gtgaacatatttcacacggtgcctggtgacaaa

SEQ ID NO: 30142 - DNA, 33 bp, Homo sapien
gtgaacatatttcacatggtgcctggtgacaaa

SEQ ID NO: 30143 - DNA, 33 bp, Homo sapien
aaaaactgcaaaagacaagttatacaaggttat

SEQ ID NO: 30144 - DNA, 33 bp, Homo sapien
aaaaactgcaaaagacgagttatacaaggttat

SEQ ID NO: 30145 - DNA, 33 bp, Homo sapien
actggtgagttggtcactaaatttcattgcatg

SEQ ID NO: 30146 - DNA, 33 bp, Homo sapien
actggtgagttggtcagtaaatttcattgcatg

SEQ ID NO: 30147 - DNA, 33 bp, Homo sapien
ggttgttttctgaacacaggcatttattctgct

SEQ ID NO: 30148 - DNA, 33 bp, Homo sapien
ggttgttttctgaacataggcatttattctgct

SEQ ID NO: 30149 - DNA, 33 bp, Homo sapien
aatgagaattttcaccagatataatccatacaa

SEQ ID NO: 30150 - DNA, 33 bp, Homo sapien
aatgagaattttcacctgatataatccatacaa

SEQ ID NO: 30151 - DNA, 33 bp, Homo sapien
taccacctcctaatagcattgcctccgaaacag

SEQ ID NO: 30152 - DNA, 33 bp, Homo sapien
taccacctcctaatagtattgcctccgaaacag

SEQ ID NO: 30153 - DNA, 33 bp, Homo sapien
aagcattgtaaaccaacgggaaagataaaggtg

SEQ ID NO: 30154 - DNA, 33 bp, Homo sapien
aagcattgtaaaccaatgggaaagataaaggtg

SEQ ID NO: 30155 - DNA, 33 bp, Homo sapien
attgtaatatagtgtcaaagcattgtaaaccaa

SEQ ID NO: 30156 - DNA, 33 bp, Homo sapien
attgtaatatagtgtcgaagcattgtaaaccaa

SEQ ID NO: 30157 - DNA, 33 bp, Homo sapien
tcctagaacaatttgccattagtaagaggttag

SEQ ID NO: 30158 - DNA, 33 bp, Homo sapien
tcctagaacaatttgctattagtaagaggttag

SEQ ID NO: 30159 - DNA, 33 bp, Homo sapien
tccccctagtagtaaacctttgagcctgatagt

SEQ ID NO: 30160 - DNA, 33 bp, Homo sapien
tccccctagtagtaaagctttgagcctgatagt

SEQ ID NO: 30161 - DNA, 33 bp, Homo sapien
agccataatgtatccccattactatgccatctc

SEQ ID NO: 30162 - DNA, 33 bp, Homo sapien
agccataatgtatccctattactatgccatctc

SEQ ID NO: 30163 - DNA, 33 bp, Homo sapien
catgccctggcatcaaagtacactatccgagcc

SEQ ID NO: 30164 - DNA, 33 bp, Homo sapien
catgccctggcatcaacgtacactatccgagcc

SEQ ID NO: 30165 - DNA, 33 bp, Homo sapien
tcatttgagcagtaaaagaaaagtgatgtatgc

SEQ ID NO: 30166 - DNA, 33 bp, Homo sapien
tcatttgagcagtaaaggaaaagtgatgtatgc

SEQ ID NO: 30167 - DNA, 33 bp, Homo sapien
tttcttcttctaaaccagagtctcctgctgctc

SEQ ID NO: 30168 - DNA, 33 bp, Homo sapien
tttcttcttctaaaccggagtctcctgctgctc

SEQ ID NO: 30169 - DNA, 33 bp, Homo sapien
tcaggttagtggaaaaattcctgggatgctaaa

SEQ ID NO: 30170 - DNA, 33 bp, Homo sapien
tcaggttagtggaaaagttcctgggatgctaaa

SEQ ID NO: 30171 - DNA, 33 bp, Homo sapien
aaaaatagtgtccagaataacggtgatcactac

SEQ ID NO: 30172 - DNA, 33 bp, Homo sapien
aaaaatagtgtccagagtaacggtgatcactac

SEQ ID NO: 30173 - DNA, 33 bp, Homo sapien
ataacctagatagatgaaaaaccattatttctg

SEQ ID NO: 30174 - DNA, 33 bp, Homo sapien
ataacctagatagatggaaaaccattatttctg

SEQ ID NO: 30175 - DNA, 33 bp, Homo sapien
taggtagattctggtaaatagctgggaactatt

SEQ ID NO: 30176 - DNA, 33 bp, Homo sapien
taggtagattctggtagatagctgggaactatt

SEQ ID NO: 30177 - DNA, 33 bp, Homo sapien
aataattgcaacaactaagagaaattgaattgc

SEQ ID NO: 30178 - DNA, 33 bp, Homo sapien
aataattgcaacaactgagagaaattgaattgc

SEQ ID NO: 30179 - DNA, 33 bp, Homo sapien
attgtgaaacatgaaaacatattacaaatataa

SEQ ID NO: 30180 - DNA, 33 bp, Homo sapien
attgtgaaacatgaaagcatattacaaatataa

SEQ ID NO: 30181 - DNA, 33 bp, Homo sapien
ctctcaaatgtggtcactcatttctgttgatat

SEQ ID NO: 30182 - DNA, 33 bp, Homo sapien
ctctcaaatgtggtcattcatttctgttgatat

SEQ ID NO: 30183 - DNA, 33 bp, Homo sapien
ctgcattctcttaccaatgaggcccagtcttca

SEQ ID NO: 30184 - DNA, 33 bp, Homo sapien
ctgcattctcttaccagtgaggcccagtcttca

SEQ ID NO: 30185 - DNA, 33 bp, Homo sapien
aggcacaagcaaattaataatgaccctgacccc

SEQ ID NO: 30186 - DNA, 33 bp, Homo sapien
aggcacaagcaaattagtaatgaccctgacccc

SEQ ID NO: 30187 - DNA, 33 bp, Homo sapien
aatgactccttactgaagctttctgtatgagtg

SEQ ID NO: 30188 - DNA, 33 bp, Homo sapien
aatgactccttactgaggctttctgtatgagtg

SEQ ID NO: 30189 - DNA, 33 bp, Homo sapien
tttgtaagtgctacataaaaaaagagccttaaa

SEQ ID NO: 30190 - DNA, 33 bp, Homo sapien
tttgtaagtgctacattaaaaaagagccttaaa

SEQ ID NO: 30191 - DNA, 33 bp, Homo sapien
aagaaggaggatggcaaaatattacaggattac

SEQ ID NO: 30192 - DNA, 33 bp, Homo sapien
aagaaggaggatggcacaatattacaggattac

SEQ ID NO: 30193 - DNA, 33 bp, Homo sapien
gaaacatcccaaatacaaattaactgttgaatg

SEQ ID NO: 30194 - DNA, 33 bp, Homo sapien
gaaacatcccaaatacgaattaactgttgaatg

SEQ ID NO: 30195 - DNA, 33 bp, Homo sapien
cttgtacacttcaacaagtaaattttaaggtat

SEQ ID NO: 30196 - DNA, 33 bp, Homo sapien
cttgtacacttcaacaggtaaattttaaggtat

SEQ ID NO: 30197 - DNA, 33 bp, Homo sapien
gtttcctcaggtgttaagtttgtttgcttactt

SEQ ID NO: 30198 - DNA, 33 bp, Homo sapien
gtttcctcaggtgttatgtttgtttgcttactt

SEQ ID NO: 30199 - DNA, 33 bp, Homo sapien
ctagggtggagtgaacagtacaacaacacaatg

SEQ ID NO: 30200 - DNA, 33 bp, Homo sapien
ctagggtggagtgaaccgtacaacaacacaatg

SEQ ID NO: 30201 - DNA, 33 bp, Homo sapien
aactttttggcatgaacagaggtacaataagca

SEQ ID NO: 30202 - DNA, 33 bp, Homo sapien
aactttttggcatgaagagaggtacaataagca

SEQ ID NO: 30203 - DNA, 33 bp, Homo sapien
aagttcttaaagcagaaagagtatcacaagaag

SEQ ID NO: 30204 - DNA, 33 bp, Homo sapien
aagttcttaaagcagagagagtatcacaagaag

SEQ ID NO: 30205 - DNA, 33 bp, Homo sapien
tgtgatagtttgaataaggtaaggaagttagaa

SEQ ID NO: 30206 - DNA, 33 bp, Homo sapien
tgtgatagtttgaatacggtaaggaagttagaa

SEQ ID NO: 30207 - DNA, 33 bp, Homo sapien
aaataaaattgtcacaaggaattgcccagaata

SEQ ID NO: 30208 - DNA, 33 bp, Homo sapien
aaataaaattgtcacagggaattgcccagaata

SEQ ID NO: 30209 - DNA, 33 bp, Homo sapien
tccttttctgcaattaagttgggctattctggg

SEQ ID NO: 30210 - DNA, 33 bp, Homo sapien
tccttttctgcaattaggttgggctattctggg

SEQ ID NO: 30211 - DNA, 33 bp, Homo sapien
gaggagttcagaggaaaaactaggtttctattt

SEQ ID NO: 30212 - DNA, 33 bp, Homo sapien
gaggagttcagaggaataactaggtttctattt

SEQ ID NO: 30213 - DNA, 33 bp, Homo sapien
tgaaatatcagatgcccattcagcaactaataa

SEQ ID NO: 30214 - DNA, 33 bp, Homo sapien
tgaaatatcagatgcctattcagcaactaataa

SEQ ID NO: 30215 - DNA, 33 bp, Homo sapien
tgttatcaatcatgaccctagaaatgtaacctt

SEQ ID NO: 30216 - DNA, 33 bp, Homo sapien
tgttatcaatcatgactctagaaatgtaacctt

SEQ ID NO: 30217 - DNA, 33 bp, Homo sapien
ttagacaagtactacactggacttgcattacta

SEQ ID NO: 30218 - DNA, 33 bp, Homo sapien
ttagacaagtactacattggacttgcattacta

SEQ ID NO: 30219 - DNA, 33 bp, Homo sapien
aggtaagttatgttgaatcaaagtgaaacgaaa

SEQ ID NO: 30220 - DNA, 33 bp, Homo sapien
aggtaagttatgttgagtcaaagtgaaacgaaa

SEQ ID NO: 30221 - DNA, 33 bp, Homo sapien
ggcagggacaggagaccagggactcctttttcc

SEQ ID NO: 30222 - DNA, 33 bp, Homo sapien
ggcagggacaggagactagggactcctttttcc

SEQ ID NO: 30223 - DNA, 33 bp, Homo sapien
gtagttttaaccttaacgaagtatcaagaaaag

SEQ ID NO: 30224 - DNA, 33 bp, Homo sapien
gtagttttaaccttaatgaagtatcaagaaaag

SEQ ID NO: 30225 - DNA, 33 bp, Homo sapien
cgcttctatcttcctaccactcctcactcttct

SEQ ID NO: 30226 - DNA, 33 bp, Homo sapien
cgcttctatcttcctagcactcctcactcttct

SEQ ID NO: 30227 - DNA, 33 bp, Homo sapien
tatcttttctgttccaagacaagtgctaattat

SEQ ID NO: 30228 - DNA, 33 bp, Homo sapien
tatcttttctgttccaggacaagtgctaattat

SEQ ID NO: 30229 - DNA, 33 bp, Homo sapien
aatataaccgaggccactaatagcacacgtctc

SEQ ID NO: 30230 - DNA, 33 bp, Homo sapien
aatataaccgaggccagtaatagcacacgtctc

SEQ ID NO: 30231 - DNA, 33 bp, Homo sapien
tctttttctgactgaacaataagaacgaggata

SEQ ID NO: 30232 - DNA, 33 bp, Homo sapien
tctttttctgactgaataataagaacgaggata

SEQ ID NO: 30233 - DNA, 33 bp, Homo sapien
tgcagaatagaggacaataagttcaatacacat

SEQ ID NO: 30234 - DNA, 33 bp, Homo sapien
tgcagaatagaggacagtaagttcaatacacat

SEQ ID NO: 30235 - DNA, 33 bp, Homo sapien
tcaattttctcttctacccttaaacacctcaag

SEQ ID NO: 30236 - DNA, 33 bp, Homo sapien
tcaattttctcttctatccttaaacacctcaag

SEQ ID NO: 30237 - DNA, 33 bp, Homo sapien
tgtgtcgcaactgaaaacacattctcccaagcc

SEQ ID NO: 30238 - DNA, 33 bp, Homo sapien
tgtgtcgcaactgaaagcacattctcccaagcc

SEQ ID NO: 30239 - DNA, 33 bp, Homo sapien
cccacttcctcacagaaataaacacacacctgg

SEQ ID NO: 30240 - DNA, 33 bp, Homo sapien
cccacttcctcacagagataaacacacacctgg

SEQ ID NO: 30241 - DNA, 33 bp, Homo sapien
agagaagcttagaggaacaaagtttacattcta

SEQ ID NO: 30242 - DNA, 33 bp, Homo sapien
agagaagcttagaggagcaaagtttacattcta

SEQ ID NO: 30243 - DNA, 33 bp, Homo sapien
aagacctgttgtacacagatagaaggcaacagc

SEQ ID NO: 30244 - DNA, 33 bp, Homo sapien
aagacctgttgtacacggatagaaggcaacagc

SEQ ID NO: 30245 - DNA, 33 bp, Homo sapien
aatagtaggcaaaatcaacagctgatgaagagg

SEQ ID NO: 30246 - DNA, 33 bp, Homo sapien
aatagtaggcaaaatccacagctgatgaagagg

SEQ ID NO: 30247 - DNA, 33 bp, Homo sapien
aagctagatgttatgaaacaaatatccagttat

SEQ ID NO: 30248 - DNA, 33 bp, Homo sapien
aagctagatgttatgagacaaatatccagttat

SEQ ID NO: 30249 - DNA, 33 bp, Homo sapien
aatagcttcatcctagaataaaaggctttatcc

SEQ ID NO: 30250 - DNA, 33 bp, Homo sapien
aatagcttcatcctagcataaaaggctttatcc

SEQ ID NO: 30251 - DNA, 33 bp, Homo sapien
caggcacagtaattggcattttctcatattgaa

SEQ ID NO: 30252 - DNA, 33 bp, Homo sapien
caggcacagtaattggtattttctcatattgaa

SEQ ID NO: 30253 - DNA, 33 bp, Homo sapien
agtacattgtttctcaagaccctttaaggtcac

SEQ ID NO: 30254 - DNA, 33 bp, Homo sapien
agtacattgtttctcaggaccctttaaggtcac

SEQ ID NO: 30255 - DNA, 33 bp, Homo sapien
tcagtttctaaaccacaatgatacataattatc

SEQ ID NO: 30256 - DNA, 33 bp, Homo sapien
tcagtttctaaaccactatgatacataattatc

SEQ ID NO: 30257 - DNA, 33 bp, Homo sapien
atcctaccaagaatgacgtgaggtatgcagtca

SEQ ID NO: 30258 - DNA, 33 bp, Homo sapien
atcctaccaagaatgatgtgaggtatgcagtca

SEQ ID NO: 30259 - DNA, 33 bp, Homo sapien
gctctgcaatcctgagcagataaaagcatcacc

SEQ ID NO: 30260 - DNA, 33 bp, Homo sapien
gctctgcaatcctgagtagataaaagcatcacc

SEQ ID NO: 30261 - DNA, 33 bp, Homo sapien
gagtgagctatttatgaactcgaggtgagactc

SEQ ID NO: 30262 - DNA, 33 bp, Homo sapien
gagtgagctatttatgtactcgaggtgagactc

SEQ ID NO: 30263 - DNA, 33 bp, Homo sapien
tttttccaacggatgacagtggctggcaatgaa

SEQ ID NO: 30264 - DNA, 33 bp, Homo sapien
tttttccaacggatgatagtggctggcaatgaa

SEQ ID NO: 30265 - DNA, 33 bp, Homo sapien
aaatgagtgccaaagacaagagcttaattctga

SEQ ID NO: 30266 - DNA, 33 bp, Homo sapien
aaatgagtgccaaagataagagcttaattctga

SEQ ID NO: 30267 - DNA, 33 bp, Homo sapien
ggtggttaaatatgaaagatgtttcgactatgt

SEQ ID NO: 30268 - DNA, 33 bp, Homo sapien
ggtggttaaatatgaacgatgtttcgactatgt

SEQ ID NO: 30269 - DNA, 33 bp, Homo sapien
ttttatctgaaagtggacattagagatctatct

SEQ ID NO: 30270 - DNA, 33 bp, Homo sapien
ttttatctgaaagtggccattagagatctatct

SEQ ID NO: 30271 - DNA, 33 bp, Homo sapien
tatttttcactcttggaatcataacacagttgc

SEQ ID NO: 30272 - DNA, 33 bp, Homo sapien
tatttttcactcttggtatcataacacagttgc

SEQ ID NO: 30273 - DNA, 33 bp, Homo sapien
tttttcattttccacaatatcaaagttcctatt

SEQ ID NO: 30274 - DNA, 33 bp, Homo sapien
tttttcattttccacagtatcaaagttcctatt

SEQ ID NO: 30275 - DNA, 33 bp, Homo sapien
aattgtgttaagctgtcaagcctctaaaaattt

SEQ ID NO: 30276 - DNA, 33 bp, Homo sapien
aattgtgttaagctgtgaagcctctaaaaattt

SEQ ID NO: 30277 - DNA, 33 bp, Homo sapien
ttcaaattttgagacaaactcagaaaactgttc

SEQ ID NO: 30278 - DNA, 33 bp, Homo sapien
ttcaaattttgagacagactcagaaaactgttc

SEQ ID NO: 30279 - DNA, 33 bp, Homo sapien
aactatgggtactaagactcagaaaataatcat

SEQ ID NO: 30280 - DNA, 33 bp, Homo sapien
aactatgggtactaaggctcagaaaataatcat

SEQ ID NO: 30281 - DNA, 33 bp, Homo sapien
ctctacagtgtcatacaatctaatgaggatgaa

SEQ ID NO: 30282 - DNA, 33 bp, Homo sapien
ctctacagtgtcatacgatctaatgaggatgaa

SEQ ID NO: 30283 - DNA, 33 bp, Homo sapien
gaccatttagatttgcacaattacacacacaca

SEQ ID NO: 30284 - DNA, 33 bp, Homo sapien
gaccatttagatttgcgcaattacacacacaca

SEQ ID NO: 30285 - DNA, 33 bp, Homo sapien
tttttccatcaacgtacctgattctaaagcaca

SEQ ID NO: 30286 - DNA, 33 bp, Homo sapien
tttttccatcaacgtatctgattctaaagcaca

SEQ ID NO: 30287 - DNA, 33 bp, Homo sapien
tgtcattaattgccaaaatgagtcatgtctcca

SEQ ID NO: 30288 - DNA, 33 bp, Homo sapien
tgtcattaattgccaagatgagtcatgtctcca

SEQ ID NO: 30289 - DNA, 33 bp, Homo sapien
gctctttagggaaaatgacagcattagagtaaa

SEQ ID NO: 30290 - DNA, 33 bp, Homo sapien
gctctttagggaaaattacagcattagagtaaa

SEQ ID NO: 30291 - DNA, 33 bp, Homo sapien
ctcttgagctcttggccgatattcaactgcatc

SEQ ID NO: 30292 - DNA, 33 bp, Homo sapien
ctcttgagctcttggctgatattcaactgcatc

SEQ ID NO: 30293 - DNA, 33 bp, Homo sapien
aacatttccagtgacgcagcatttggacattgc

SEQ ID NO: 30294 - DNA, 33 bp, Homo sapien
aacatttccagtgacgtagcatttggacattgc

SEQ ID NO: 30295 - DNA, 33 bp, Homo sapien
ccttaatgccaccacaatgagttaaactgctat

SEQ ID NO: 30296 - DNA, 33 bp, Homo sapien
ccttaatgccaccacattgagttaaactgctat

SEQ ID NO: 30297 - DNA, 33 bp, Homo sapien
tgtgaggaaattatcacaggatggaaaatgaac

SEQ ID NO: 30298 - DNA, 33 bp, Homo sapien
tgtgaggaaattatcataggatggaaaatgaac

SEQ ID NO: 30299 - DNA, 33 bp, Homo sapien
ttaattaaaactgaagcctgacatttgtttctt

SEQ ID NO: 30300 - DNA, 33 bp, Homo sapien
ttaattaaaactgaaggctgacatttgtttctt

SEQ ID NO: 30301 - DNA, 33 bp, Homo sapien
acagtggattttggccccaaataattaaggtgt

SEQ ID NO: 30302 - DNA, 33 bp, Homo sapien
acagtggattttggcctcaaataattaaggtgt

SEQ ID NO: 30303 - DNA, 33 bp, Homo sapien
aatcataagcacattcaagaattaaattatatt

SEQ ID NO: 30304 - DNA, 33 bp, Homo sapien
aatcataagcacattcgagaattaaattatatt

SEQ ID NO: 30305 - DNA, 33 bp, Homo sapien
ctttcctggccacacaatcaatcttggtccttt

SEQ ID NO: 30306 - DNA, 33 bp, Homo sapien
ctttcctggccacacattcaatcttggtccttt

SEQ ID NO: 30307 - DNA, 33 bp, Homo sapien
ccaaaataaagtctacagcatttctcattaggc

SEQ ID NO: 30308 - DNA, 33 bp, Homo sapien
ccaaaataaagtctacggcatttctcattaggc

SEQ ID NO: 30309 - DNA, 33 bp, Homo sapien
tgcctagcccagccaacaactttcctgaatatg

SEQ ID NO: 30310 - DNA, 33 bp, Homo sapien
tgcctagcccagccaagaactttcctgaatatg

SEQ ID NO: 30311 - DNA, 33 bp, Homo sapien
ggctttctacctcacagaatcttacatagattt

SEQ ID NO: 30312 - DNA, 33 bp, Homo sapien
ggctttctacctcacataatcttacatagattt

SEQ ID NO: 30313 - DNA, 33 bp, Homo sapien
ttacatttgtatagaaaagagactaggtgaatt

SEQ ID NO: 30314 - DNA, 33 bp, Homo sapien
ttacatttgtatagaacagagactaggtgaatt

SEQ ID NO: 30315 - DNA, 33 bp, Homo sapien
cactgaatcaacagcacgtcatatttttactgt

SEQ ID NO: 30316 - DNA, 33 bp, Homo sapien
cactgaatcaacagcatgtcatatttttactgt

SEQ ID NO: 30317 - DNA, 33 bp, Homo sapien
taaaagttcagtagttcaaaccaacaataattt

SEQ ID NO: 30318 - DNA, 33 bp, Homo sapien
taaaagttcagtagttgaaaccaacaataattt

SEQ ID NO: 30319 - DNA, 33 bp, Homo sapien
ctcttagtcctttctcaactaacaccatatcat

SEQ ID NO: 30320 - DNA, 33 bp, Homo sapien
ctcttagtcctttctccactaacaccatatcat

SEQ ID NO: 30321 - DNA, 33 bp, Homo sapien
cagcagcggagacacgaatgaaaagtgtttggg

SEQ ID NO: 30322 - DNA, 33 bp, Homo sapien
cagcagcggagacacggatgaaaagtgtttggg

SEQ ID NO: 30323 - DNA, 33 bp, Homo sapien
aaagtgaaagtaaataacgtcgaaatttacaaa

SEQ ID NO: 30324 - DNA, 33 bp, Homo sapien
aaagtgaaagtaaatagcgtcgaaatttacaaa

SEQ ID NO: 30325 - DNA, 33 bp, Homo sapien
acctctatgtattcagcaatctggaagctctca

SEQ ID NO: 30326 - DNA, 33 bp, Homo sapien
acctctatgtattcaggaatctggaagctctca

SEQ ID NO: 30327 - DNA, 33 bp, Homo sapien
atattcatcttttcccaatcacttcaattttgg

SEQ ID NO: 30328 - DNA, 33 bp, Homo sapien
atattcatcttttcccgatcacttcaattttgg

SEQ ID NO: 30329 - DNA, 33 bp, Homo sapien
atgatctcatctaatacatggccaccttataga

SEQ ID NO: 30330 - DNA, 33 bp, Homo sapien
atgatctcatctaatatatggccaccttataga

SEQ ID NO: 30331 - DNA, 33 bp, Homo sapien
tcagacatcatattcaaagacaatagcagtttt

SEQ ID NO: 30332 - DNA, 33 bp, Homo sapien
tcagacatcatattcacagacaatagcagtttt

SEQ ID NO: 30333 - DNA, 33 bp, Homo sapien
tatttctcccagacacccctctttgttttggtt

SEQ ID NO: 30334 - DNA, 33 bp, Homo sapien
tatttctcccagacactcctctttgttttggtt

SEQ ID NO: 30335 - DNA, 33 bp, Homo sapien
tctcactttgcaaaccaaggacctccagctggc

SEQ ID NO: 30336 - DNA, 33 bp, Homo sapien
tctcactttgcaaaccgaggacctccagctggc

SEQ ID NO: 30337 - DNA, 33 bp, Homo sapien
ggcagtgagaatttcccgactatggcagtgggt

SEQ ID NO: 30338 - DNA, 33 bp, Homo sapien
ggcagtgagaatttcctgactatggcagtgggt

SEQ ID NO: 30339 - DNA, 33 bp, Homo sapien
aactattttacacaaacccagtctttgaaacta

SEQ ID NO: 30340 - DNA, 33 bp, Homo sapien
aactattttacacaaatccagtctttgaaacta

SEQ ID NO: 30341 - DNA, 33 bp, Homo sapien
aactgtaaggagagaaaggaggtttaaacagca

SEQ ID NO: 30342 - DNA, 33 bp, Homo sapien
aactgtaaggagagaatggaggtttaaacagca

SEQ ID NO: 30343 - DNA, 33 bp, Homo sapien
agaattttgtgttccaagaacttaaaggaaacc

SEQ ID NO: 30344 - DNA, 33 bp, Homo sapien
agaattttgtgttccacgaacttaaaggaaacc

SEQ ID NO: 30345 - DNA, 33 bp, Homo sapien
agggcttccatgcataaagaaaagaatggacag

SEQ ID NO: 30346 - DNA, 33 bp, Homo sapien
agggcttccatgcatagagaaaagaatggacag

SEQ ID NO: 30347 - DNA, 33 bp, Homo sapien
tttggaatgtagcaaaatattcaaagcaattgt

SEQ ID NO: 30348 - DNA, 33 bp, Homo sapien
tttggaatgtagcaaactattcaaagcaattgt

SEQ ID NO: 30349 - DNA, 33 bp, Homo sapien
atcaataactgaaaaagatgttcatcaggatcc

SEQ ID NO: 30350 - DNA, 33 bp, Homo sapien
atcaataactgaaaaatatgttcatcaggatcc

SEQ ID NO: 30351 - DNA, 33 bp, Homo sapien
cttcataccttaacgaaagaaaataaccagctt

SEQ ID NO: 30352 - DNA, 33 bp, Homo sapien
cttcataccttaacgatagaaaataaccagctt

SEQ ID NO: 30353 - DNA, 33 bp, Homo sapien
ggactcagtgcaaaaactgtgaatccctgattg

SEQ ID NO: 30354 - DNA, 33 bp, Homo sapien
ggactcagtgcaaaaattgtgaatccctgattg

SEQ ID NO: 30355 - DNA, 33 bp, Homo sapien
gagcataatgttgtcaccttcttgggaacacag

SEQ ID NO: 30356 - DNA, 33 bp, Homo sapien
gagcataatgttgtcagcttcttgggaacacag

SEQ ID NO: 30357 - DNA, 33 bp, Homo sapien
tgcttataaacaaacaaatcagttgcttaaggg

SEQ ID NO: 30358 - DNA, 33 bp, Homo sapien
tgcttataaacaaacagatcagttgcttaaggg

SEQ ID NO: 30359 - DNA, 33 bp, Homo sapien
ttttggaagtcatagaaaaatctcactccaaag

SEQ ID NO: 30360 - DNA, 33 bp, Homo sapien
ttttggaagtcatagagaaatctcactccaaag

SEQ ID NO: 30361 - DNA, 33 bp, Homo sapien
acatgccaggtgagtgccacgtctagagtcatg

SEQ ID NO: 30362 - DNA, 33 bp, Homo sapien
acatgccaggtgagtgtcacgtctagagtcatg

SEQ ID NO: 30363 - DNA, 33 bp, Homo sapien
attcgtgcgtataaaccaggtgctattcatcag

SEQ ID NO: 30364 - DNA, 33 bp, Homo sapien
attcgtgcgtataaactaggtgctattcatcag

SEQ ID NO: 30365 - DNA, 33 bp, Homo sapien
atcattccaaaaatgaggaacttttctcctgcc

SEQ ID NO: 30366 - DNA, 33 bp, Homo sapien
atcattccaaaaatgatgaacttttctcctgcc

SEQ ID NO: 30367 - DNA, 33 bp, Homo sapien
tactaattatgcctcaaagttacttcctctgac

SEQ ID NO: 30368 - DNA, 33 bp, Homo sapien
tactaattatgcctcagagttacttcctctgac

SEQ ID NO: 30369 - DNA, 33 bp, Homo sapien
ttttccaagtcaatacacacatttcagccatac

SEQ ID NO: 30370 - DNA, 33 bp, Homo sapien
ttttccaagtcaatactcacatttcagccatac

SEQ ID NO: 30371 - DNA, 33 bp, Homo sapien
gaacttcaaaattccaaggtgcaaatatattgt

SEQ ID NO: 30372 - DNA, 33 bp, Homo sapien
gaacttcaaaattccagggtgcaaatatattgt

SEQ ID NO: 30373 - DNA, 33 bp, Homo sapien
ggatatgtagaaaaaggatgtgataaagcctta

SEQ ID NO: 30374 - DNA, 33 bp, Homo sapien
ggatatgtagaaaaagtatgtgataaagcctta

SEQ ID NO: 30375 - DNA, 33 bp, Homo sapien
caaacttctaatggtcaaagcatcaattttgtc

SEQ ID NO: 30376 - DNA, 33 bp, Homo sapien
caaacttctaatggtccaagcatcaattttgtc

SEQ ID NO: 30377 - DNA, 33 bp, Homo sapien
aatatgctagaaagaccgggtcccagagttcca

SEQ ID NO: 30378 - DNA, 33 bp, Homo sapien
aatatgctagaaagactgggtcccagagttcca

SEQ ID NO: 30379 - DNA, 33 bp, Homo sapien
aagaagttatctcttacagcccaaatccaaaaa

SEQ ID NO: 30380 - DNA, 33 bp, Homo sapien
aagaagttatctcttatagcccaaatccaaaaa

SEQ ID NO: 30381 - DNA, 33 bp, Homo sapien
aagatgctctcttgatcataggggttttctggc

SEQ ID NO: 30382 - DNA, 33 bp, Homo sapien
aagatgctctcttgattataggggttttctggc

SEQ ID NO: 30383 - DNA, 33 bp, Homo sapien
aggatgctagagccaaacctcaagggagcctag

SEQ ID NO: 30384 - DNA, 33 bp, Homo sapien
aggatgctagagccaagcctcaagggagcctag

SEQ ID NO: 30385 - DNA, 33 bp, Homo sapien
atctgctagatgtcaacaggactatcaccaccc

SEQ ID NO: 30386 - DNA, 33 bp, Homo sapien
atctgctagatgtcaataggactatcaccaccc

SEQ ID NO: 30387 - DNA, 33 bp, Homo sapien
caaggaagaaaggacacggaaatcgaagtttaa

SEQ ID NO: 30388 - DNA, 33 bp, Homo sapien
caaggaagaaaggacatggaaatcgaagtttaa

SEQ ID NO: 30389 - DNA, 33 bp, Homo sapien
ctctactttccttctacgttgattctgtcatga

SEQ ID NO: 30390 - DNA, 33 bp, Homo sapien
ctctactttccttctatgttgattctgtcatga

SEQ ID NO: 30391 - DNA, 33 bp, Homo sapien
agccttctttttcagtcaattagttgaatagtg

SEQ ID NO: 30392 - DNA, 33 bp, Homo sapien
agccttctttttcagtgaattagttgaatagtg

SEQ ID NO: 30393 - DNA, 33 bp, Homo sapien
aaaggctttgatgccaaatgtaaccacatcaca

SEQ ID NO: 30394 - DNA, 33 bp, Homo sapien
aaaggctttgatgccagatgtaaccacatcaca

SEQ ID NO: 30395 - DNA, 33 bp, Homo sapien
aaaaacacactatctcgaacaaatccttaatga

SEQ ID NO: 30396 - DNA, 33 bp, Homo sapien
aaaaacacactatctctaacaaatccttaatga

SEQ ID NO: 30397 - DNA, 33 bp, Homo sapien
taaactgtattctaaaacactgggtgaaaggtt

SEQ ID NO: 30398 - DNA, 33 bp, Homo sapien
taaactgtattctaaagcactgggtgaaaggtt

SEQ ID NO: 30399 - DNA, 33 bp, Homo sapien
catgtgttttatatcaacttatgtagaaacatt

SEQ ID NO: 30400 - DNA, 33 bp, Homo sapien
catgtgttttatatcagcttatgtagaaacatt

SEQ ID NO: 30401 - DNA, 33 bp, Homo sapien
aattcttagtcaagcaatctaaccagaaaaccc

SEQ ID NO: 30402 - DNA, 33 bp, Homo sapien
aattcttagtcaagcagtctaaccagaaaaccc

SEQ ID NO: 30403 - DNA, 33 bp, Homo sapien
tagatggaaaatctcaatctgcattttttctta

SEQ ID NO: 30404 - DNA, 33 bp, Homo sapien
tagatggaaaatctcattctgcattttttctta

SEQ ID NO: 30405 - DNA, 33 bp, Homo sapien
gctattaggctttctacaggaagaggggggttt

SEQ ID NO: 30406 - DNA, 33 bp, Homo sapien
gctattaggctttctagaggaagaggggggttt

SEQ ID NO: 30407 - DNA, 33 bp, Homo sapien
agttgaaatctaattcactggtacaagttcttt

SEQ ID NO: 30408 - DNA, 33 bp, Homo sapien
agttgaaatctaattcgctggtacaagttcttt

SEQ ID NO: 30409 - DNA, 33 bp, Homo sapien
ttatgagactgagcgacagaacttggagaagca

SEQ ID NO: 30410 - DNA, 33 bp, Homo sapien
ttatgagactgagcgatagaacttggagaagca

SEQ ID NO: 30411 - DNA, 33 bp, Homo sapien
tactctgtcagatacactactagaagatgggca

SEQ ID NO: 30412 - DNA, 33 bp, Homo sapien
tactctgtcagatacattactagaagatgggca

SEQ ID NO: 30413 - DNA, 33 bp, Homo sapien
cagacaccaggcactcaaacaatcttttattaa

SEQ ID NO: 30414 - DNA, 33 bp, Homo sapien
cagacaccaggcactcgaacaatcttttattaa

SEQ ID NO: 30415 - DNA, 33 bp, Homo sapien
attttataaattatcacgtgaggacagaggtca

SEQ ID NO: 30416 - DNA, 33 bp, Homo sapien
attttataaattatcatgtgaggacagaggtca

SEQ ID NO: 30417 - DNA, 33 bp, Homo sapien
tttcacttgagccagaactacagctacttaaag

SEQ ID NO: 30418 - DNA, 33 bp, Homo sapien
tttcacttgagccagagctacagctacttaaag

SEQ ID NO: 30419 - DNA, 33 bp, Homo sapien
tccactgctgcattcacgcggaggccttacttc

SEQ ID NO: 30420 - DNA, 33 bp, Homo sapien
tccactgctgcattcatgcggaggccttacttc

SEQ ID NO: 30421 - DNA, 33 bp, Homo sapien
atgcatcttggtcatccatcagtgtctgcattt

SEQ ID NO: 30422 - DNA, 33 bp, Homo sapien
atgcatcttggtcatctatcagtgtctgcattt

SEQ ID NO: 30423 - DNA, 33 bp, Homo sapien
ccacatttcttttccacgtggtatgtggtgaaa

SEQ ID NO: 30424 - DNA, 33 bp, Homo sapien
ccacatttcttttccatgtggtatgtggtgaaa

SEQ ID NO: 30425 - DNA, 33 bp, Homo sapien
cccttcttaaaatgcccaaagagctcaagaata

SEQ ID NO: 30426 - DNA, 33 bp, Homo sapien
cccttcttaaaatgcctaaagagctcaagaata

SEQ ID NO: 30427 - DNA, 33 bp, Homo sapien
agatataacttggatgaaaatctcctgcatttt

SEQ ID NO: 30428 - DNA, 33 bp, Homo sapien
agatataacttggatggaaatctcctgcatttt

SEQ ID NO: 30429 - DNA, 33 bp, Homo sapien
tgtgattattagcagcactcatcatgattcaga

SEQ ID NO: 30430 - DNA, 33 bp, Homo sapien
tgtgattattagcagccctcatcatgattcaga

SEQ ID NO: 30431 - DNA, 33 bp, Homo sapien
aggtacattttcttaacattccactggccaatg

SEQ ID NO: 30432 - DNA, 33 bp, Homo sapien
aggtacattttcttaatattccactggccaatg

SEQ ID NO: 30433 - DNA, 33 bp, Homo sapien
agcacagtgcttcacacaggtcacacagcagtt

SEQ ID NO: 30434 - DNA, 33 bp, Homo sapien
agcacagtgcttcacagaggtcacacagcagtt

SEQ ID NO: 30435 - DNA, 33 bp, Homo sapien
tccaggatgcacacccagcaatctactgtgttt

SEQ ID NO: 30436 - DNA, 33 bp, Homo sapien
tccaggatgcacacccggcaatctactgtgttt

SEQ ID NO: 30437 - DNA, 33 bp, Homo sapien
gcaaatgtgcttgtaacgcacaaaacagaaaag

SEQ ID NO: 30438 - DNA, 33 bp, Homo sapien
gcaaatgtgcttgtaatgcacaaaacagaaaag

SEQ ID NO: 30439 - DNA, 33 bp, Homo sapien
ttgagcctgctgatacacagattgaggctgatt

SEQ ID NO: 30440 - DNA, 33 bp, Homo sapien
ttgagcctgctgatacccagattgaggctgatt

SEQ ID NO: 30441 - DNA, 33 bp, Homo sapien
atctagtgtctagtgaggtcactctttctggtt

SEQ ID NO: 30442 - DNA, 33 bp, Homo sapien
atctagtgtctagtgatgtcactctttctggtt

SEQ ID NO: 30443 - DNA, 33 bp, Homo sapien
gaattattcaccaaaaaaagctgaagcatttat

SEQ ID NO: 30444 - DNA, 33 bp, Homo sapien
gaattattcaccaaaagaagctgaagcatttat

SEQ ID NO: 30445 - DNA, 33 bp, Homo sapien
ttatgttatcttatgaaggtgatcctagagtgt

SEQ ID NO: 30446 - DNA, 33 bp, Homo sapien
ttatgttatcttatgacggtgatcctagagtgt

SEQ ID NO: 30447 - DNA, 33 bp, Homo sapien
gttaagagtatatgaactacgcttcttggttag

SEQ ID NO: 30448 - DNA, 33 bp, Homo sapien
gttaagagtatatgaagtacgcttcttggttag

SEQ ID NO: 30449 - DNA, 33 bp, Homo sapien
cttgaaacatttcttcacgtaattacccatttc

SEQ ID NO: 30450 - DNA, 33 bp, Homo sapien
cttgaaacatttcttcccgtaattacccatttc

SEQ ID NO: 30451 - DNA, 33 bp, Homo sapien
agaaatgtttcaaggacgatttttttaggccac

SEQ ID NO: 30452 - DNA, 33 bp, Homo sapien
agaaatgtttcaaggatgatttttttaggccac

SEQ ID NO: 30453 - DNA, 33 bp, Homo sapien
agaattagatgtatgacggccccactttctgag

SEQ ID NO: 30454 - DNA, 33 bp, Homo sapien
agaattagatgtatgatggccccactttctgag

SEQ ID NO: 30455 - DNA, 33 bp, Homo sapien
ttgttcatttgatcaacaacaggtgttacactc

SEQ ID NO: 30456 - DNA, 33 bp, Homo sapien
ttgttcatttgatcaataacaggtgttacactc

SEQ ID NO: 30457 - DNA, 33 bp, Homo sapien
caatagtgtctagcaaagagtgtaacacctgtt

SEQ ID NO: 30458 - DNA, 33 bp, Homo sapien
caatagtgtctagcaaggagtgtaacacctgtt

SEQ ID NO: 30459 - DNA, 33 bp, Homo sapien
tgagttgacatacactcaaatggaaacgctcag

SEQ ID NO: 30460 - DNA, 33 bp, Homo sapien
tgagttgacatacactgaaatggaaacgctcag

SEQ ID NO: 30461 - DNA, 33 bp, Homo sapien
actctatctctctgacacagaagttacgaatgc

SEQ ID NO: 30462 - DNA, 33 bp, Homo sapien
actctatctctctgacgcagaagttacgaatgc

SEQ ID NO: 30463 - DNA, 33 bp, Homo sapien
gtgttacagagcacgggagcccattgaatacct

SEQ ID NO: 30464 - DNA, 33 bp, Homo sapien
gtgttacagagcacggtagcccattgaatacct

SEQ ID NO: 30465 - DNA, 33 bp, Homo sapien
ttcatcttgattattacccaggaagcagccaaa

SEQ ID NO: 30466 - DNA, 33 bp, Homo sapien
ttcatcttgattattatccaggaagcagccaaa

SEQ ID NO: 30467 - DNA, 33 bp, Homo sapien
ttggaagtgagttatcacaagactaggtctatt

SEQ ID NO: 30468 - DNA, 33 bp, Homo sapien
ttggaagtgagttatctcaagactaggtctatt

SEQ ID NO: 30469 - DNA, 33 bp, Homo sapien
ttcaggtcttattctaggtagttggcatattta

SEQ ID NO: 30470 - DNA, 33 bp, Homo sapien
ttcaggtcttattctatgtagttggcatattta

SEQ ID NO: 30471 - DNA, 33 bp, Homo sapien
gtgtctttccaacagaaccagtaaacatttttg

SEQ ID NO: 30472 - DNA, 33 bp, Homo sapien
gtgtctttccaacagatccagtaaacatttttg

SEQ ID NO: 30473 - DNA, 33 bp, Homo sapien
tgccaattagcatggccgaaaatcgcaggcctc

SEQ ID NO: 30474 - DNA, 33 bp, Homo sapien
tgccaattagcatggctgaaaatcgcaggcctc

SEQ ID NO: 30475 - DNA, 33 bp, Homo sapien
ccaagcaatgcagagaaggattcatctacattg

SEQ ID NO: 30476 - DNA, 33 bp, Homo sapien
ccaagcaatgcagagacggattcatctacattg

SEQ ID NO: 30477 - DNA, 33 bp, Homo sapien
catgtcatatatcatacgctgccaccctcttgt

SEQ ID NO: 30478 - DNA, 33 bp, Homo sapien
catgtcatatatcataggctgccaccctcttgt

SEQ ID NO: 30479 - DNA, 33 bp, Homo sapien
agacagccatgacccacccttggcactgtttca

SEQ ID NO: 30480 - DNA, 33 bp, Homo sapien
agacagccatgacccatccttggcactgtttca

SEQ ID NO: 30481 - DNA, 33 bp, Homo sapien
agcttccagtgtctgcaaccaaaattcaagaca

SEQ ID NO: 30482 - DNA, 33 bp, Homo sapien
agcttccagtgtctgcgaccaaaattcaagaca

SEQ ID NO: 30483 - DNA, 33 bp, Homo sapien
ggtggcttctaagtgacggtaatttatttctca

SEQ ID NO: 30484 - DNA, 33 bp, Homo sapien
ggtggcttctaagtgatggtaatttatttctca

SEQ ID NO: 30485 - DNA, 33 bp, Homo sapien
ggatttataccagtcaactcccctcacctccag

SEQ ID NO: 30486 - DNA, 33 bp, Homo sapien
ggatttataccagtcacctcccctcacctccag

SEQ ID NO: 30487 - DNA, 33 bp, Homo sapien
tttcaagtctacttatcagccttttgaaggcat

SEQ ID NO: 30488 - DNA, 33 bp, Homo sapien
tttcaagtctacttatgagccttttgaaggcat

SEQ ID NO: 30489 - DNA, 33 bp, Homo sapien
atttattggttttgtacaggttgaactaatctt

SEQ ID NO: 30490 - DNA, 33 bp, Homo sapien
atttattggttttgtataggttgaactaatctt

SEQ ID NO: 30491 - DNA, 33 bp, Homo sapien; identical to SEQ ID NO: 30489

SEQ ID NO: 30492 - DNA, 33 bp, Homo sapien; identical to SEQ ID NO: 30490

SEQ ID NO: 30493 - DNA, 33 bp, Homo sapien
ggcaaggtctcaggaacgttataattatggttg

SEQ ID NO: 30494 - DNA, 33 bp, Homo sapien
ggcaaggtctcaggaatgttataattatggttg

SEQ ID NO: 30495 - DNA, 33 bp, Homo sapien
tgtctgtaaattgctacaccaaattcttaatca

SEQ ID NO: 30496 - DNA, 33 bp, Homo sapien
tgtctgtaaattgctataccaaattcttaatca

SEQ ID NO: 30497 - DNA, 33 bp, Homo sapien; identical to SEQ ID NO: 30495

SEQ ID NO: 30498 - DNA, 33 bp, Homo sapien; identical to SEQ ID NO: 30496

SEQ ID NO: 30499 - DNA, 33 bp, Homo sapien
tcactgaagaatccaaatatagtaatgcaaatc

SEQ ID NO: 30500 - DNA, 33 bp, Homo sapien
tcactgaagaatccaactatagtaatgcaaatc

SEQ ID NO: 30501 - DNA, 33 bp, Homo sapien
ttaatttcaaataccacgcacagtgtaaataca

SEQ ID NO: 30502 - DNA, 33 bp, Homo sapien
ttaatttcaaataccatgcacagtgtaaataca

SEQ ID NO: 30503 - DNA, 33 bp, Homo sapien
ccaaacagctcaagcacggcttcattacagtgt

SEQ ID NO: 30504 - DNA, 33 bp, Homo sapien
ccaaacagctcaagcatggcttcattacagtgt

SEQ ID NO: 30505 - DNA, 33 bp, Homo sapien
cctgaagcttggggaaaaaaatgctagcctcta

SEQ ID NO: 30506 - DNA, 33 bp, Homo sapien
cctgaagcttggggaagaaaatgctagcctcta

SEQ ID NO: 30507 - DNA, 33 bp, Homo sapien
ctcatgacctaactaacgaaaagcagaaagtca

SEQ ID NO: 30508 - DNA, 33 bp, Homo sapien
ctcatgacctaactaaggaaaagcagaaagtca

SEQ ID NO: 30509 - DNA, 33 bp, Homo sapien; identical to SEQ ID NO: 30507

SEQ ID NO: 30510 - DNA, 33 bp, Homo sapien; identical to SEQ ID NO: 30508

SEQ ID NO: 30511 - DNA, 33 bp, Homo sapien
aaataaagttggaagagattaacctacatcatc

SEQ ID NO: 30512 - DNA, 33 bp, Homo sapien
aaataaagttggaagatattaacctacatcatc

SEQ ID NO: 30513 - DNA, 33 bp, Homo sapien; identical to SEQ ID NO: 30511

SEQ ID NO: 30514 - DNA, 33 bp, Homo sapien; identical to SEQ ID NO: 30512

SEQ ID NO: 30515 - DNA, 33 bp, Homo sapien
ctaagtatatctttcacgtaatacaactgatgg

SEQ ID NO: 30516 - DNA, 33 bp, Homo sapien
ctaagtatatctttcatgtaatacaactgatgg

SEQ ID NO: 30517 - DNA, 33 bp, Homo sapien
tgagccctcaattttgaacagctgtgaggaagg

SEQ ID NO: 30518 - DNA, 33 bp, Homo sapien
tgagccctcaattttggacagctgtgaggaagg

SEQ ID NO: 30519 - DNA, 33 bp, Homo sapien
ataatctctcatagaacaaaacagatgtgtaaa

SEQ ID NO: 30520 - DNA, 33 bp, Homo sapien
ataatctctcatagaataaaacagatgtgtaaa

SEQ ID NO: 30521 - DNA, 33 bp, Homo sapien
tgtggagataatcattgaagtgataggcatggg

SEQ ID NO: 30522 - DNA, 33 bp, Homo sapien
tgtggagataatcatttaagtgataggcatggg

SEQ ID NO: 30523 - DNA, 33 bp, Homo sapien
tatacctggaggaagaaatgctgatatcatgaa

SEQ ID NO: 30524 - DNA, 33 bp, Homo sapien
tatacctggaggaagacatgctgatatcatgaa

SEQ ID NO: 30525 - DNA, 33 bp, Homo sapien
atatgaatgaactttacatgaaagagataaaat

SEQ ID NO: 30526 - DNA, 33 bp, Homo sapien
atatgaatgaactttagatgaaagagataaaat

SEQ ID NO: 30527 - DNA, 33 bp, Homo sapien
tttcattagccatcataagcttataaagtaagc

SEQ ID NO: 30528 - DNA, 33 bp, Homo sapien
tttcattagccatcatgagcttataaagtaagc

SEQ ID NO: 30529 - DNA, 33 bp, Homo sapien; identical to SEQ ID NO: 30527

SEQ ID NO: 30530 - DNA, 33 bp, Homo sapien; identical to SEQ ID NO: 30528

SEQ ID NO: 30531 - DNA, 33 bp, Homo sapien
aaaaaatgttagcctaagatgatataaactggg

SEQ ID NO: 30532 - DNA, 33 bp, Homo sapien
aaaaaatgttagcctaggatgatataaactggg

SEQ ID NO: 30533 - DNA, 33 bp, Homo sapien
tgggcttcaggccttgcagttacaccttatatg

SEQ ID NO: 30534 - DNA, 33 bp, Homo sapien
tgggcttcaggccttgtagttacaccttatatg

SEQ ID NO: 30535 - DNA, 33 bp, Homo sapien; identical to SEQ ID NO: 30533

SEQ ID NO: 30536 - DNA, 33 bp, Homo sapien; identical to SEQ ID NO: 30534

SEQ ID NO: 30537 - DNA, 33 bp, Homo sapien
aaagagacattgtcaactcagaggtaagaagct

SEQ ID NO: 30538 - DNA, 33 bp, Homo sapien
aaagagacattgtcaagtcagaggtaagaagct

SEQ ID NO: 30539 - DNA, 33 bp, Homo sapien
actatgaaaaagtccacgctgtaagaaaagaga

SEQ ID NO: 30540 - DNA, 33 bp, Homo sapien
actatgaaaaagtccatgctgtaagaaaagaga

SEQ ID NO: 30541 - DNA, 33 bp, Homo sapien; identical to SEQ ID NO: 30539

SEQ ID NO: 30542 - DNA, 33 bp, Homo sapien; identical to SEQ ID NO: 30540

SEQ ID NO: 30543 - DNA, 33 bp, Homo sapien
gccagtaataatgccccaaacatttggagtaca

SEQ ID NO: 30544 - DNA, 33 bp, Homo sapien
gccagtaataatgccctaaacatttggagtaca

SEQ ID NO: 30545 - DNA, 33 bp, Homo sapien
gtaagctcagccagtaataagaatacttgcttc

SEQ ID NO: 30546 - DNA, 33 bp, Homo sapien
gtaagctcagccagtagtaagaatacttgcttc

SEQ ID NO: 30547 - DNA, 33 bp, Homo sapien
agcctaagtgaagaaaagcattgcattaaaact

SEQ ID NO: 30548 - DNA, 33 bp, Homo sapien
agcctaagtgaagaaaggcattgcattaaaact

SEQ ID NO: 30549 - DNA, 33 bp, Homo sapien
tatgcctgttgttgtaacagtaccatgtggttt

SEQ ID NO: 30550 - DNA, 33 bp, Homo sapien
tatgcctgttgttgtaccagtaccatgtggttt

SEQ ID NO: 30551 - DNA, 33 bp, Homo sapien
gcaggtgatgatttgactaaatattttgtagat

SEQ ID NO: 30552 - DNA, 33 bp, Homo sapien
gcaggtgatgatttgagtaaatattttgtagat

SEQ ID NO: 30553 - DNA, 33 bp, Homo sapien
ggtgtggcaaaagtcacatttatcgctaaggct

SEQ ID NO: 30554 - DNA, 33 bp, Homo sapien
ggtgtggcaaaagtcatatttatcgctaaggct

SEQ ID NO: 30555 - DNA, 33 bp, Homo sapien
ccaaagaggccgctgacgacatttcagaaagtg

SEQ ID NO: 30556 - DNA, 33 bp, Homo sapien
ccaaagaggccgctgatgacatttcagaaagtg

SEQ ID NO: 30557 - DNA, 33 bp, Homo sapien; identical to SEQ ID NO: 30555

SEQ ID NO: 30558 - DNA, 33 bp, Homo sapien; identical to SEQ ID NO: 30556

SEQ ID NO: 30559 - DNA, 33 bp, Homo sapien
agagatctcagctagactattgcaacatcttcc

SEQ ID NO: 30560 - DNA, 33 bp, Homo sapien
agagatctcagctagattattgcaacatcttcc

SEQ ID NO: 30561 - DNA, 33 bp, Homo sapien; identical to SEQ ID NO: 30559

SEQ ID NO: 30562 - DNA, 33 bp, Homo sapien; identical to SEQ ID NO: 30560

SEQ ID NO: 30563 - DNA, 33 bp, Homo sapien
tgtgcaactagatcctaaaataataaaagcctc

SEQ ID NO: 30564 - DNA, 33 bp, Homo sapien
tgtgcaactagatcctgaaataataaaagcctc

SEQ ID NO: 30565 - DNA, 33 bp, Homo sapien
gcataatacaaaaatgaagaaacatatttagca

SEQ ID NO: 30566 - DNA, 33 bp, Homo sapien
gcataatacaaaaatgcagaaacatatttagca

SEQ ID NO: 30567 - DNA, 33 bp, Homo sapien
cttagtgagtagagtaagagcaaatcggggcca

SEQ ID NO: 30568 - DNA, 33 bp, Homo sapien
cttagtgagtagagtaggagcaaatcggggcca

SEQ ID NO: 30569 - DNA, 33 bp, Homo sapien
aaacttcattgtgtaacgacttaccactaactc

SEQ ID NO: 30570 - DNA, 33 bp, Homo sapien
aaacttcattgtgtaatgacttaccactaactc

SEQ ID NO: 30571 - DNA, 33 bp, Homo sapien
tcagtttggagaaattcaagaagggaacctaga

SEQ ID NO: 30572 - DNA, 33 bp, Homo sapien
tcagtttggagaaattgaagaagggaacctaga

SEQ ID NO: 30573 - DNA, 33 bp, Homo sapien
taaaaggaaccagagaaatcatgttagttaatg

SEQ ID NO: 30574 - DNA, 33 bp, Homo sapien
taaaaggaaccagagagatcatgttagttaatg

SEQ ID NO: 30575 - DNA, 33 bp, Homo sapien
ttctctctttaaactgcaagctgatggcatttt

SEQ ID NO: 30576 - DNA, 33 bp, Homo sapien
ttctctctttaaactgtaagctgatggcatttt

SEQ ID NO: 30577 - DNA, 33 bp, Homo sapien; identical to SEQ ID NO: 30575

SEQ ID NO: 30578 - DNA, 33 bp, Homo sapien; identical to SEQ ID NO: 30576

SEQ ID NO: 30579 - DNA, 33 bp, Homo sapien
gcttgcatgtaggcaacgtattttgcaagtaat

SEQ ID NO: 30580 - DNA, 33 bp, Homo sapien
gcttgcatgtaggcaatgtattttgcaagtaat

SEQ ID NO: 30581 - DNA, 33 bp, Homo sapien
tataaaagatgactccaattttctcattttcct

SEQ ID NO: 30582 - DNA, 33 bp, Homo sapien
tataaaagatgactcccattttctcattttcct

SEQ ID NO: 30583 - DNA, 33 bp, Homo sapien
tgttacagatactgcactaaacattggggtcac

SEQ ID NO: 30584 - DNA, 33 bp, Homo sapien
tgttacagatactgcattaaacattggggtcac

SEQ ID NO: 30585 - DNA, 33 bp, Homo sapien
ctccaatggctaactcaatcttctcggacttct

SEQ ID NO: 30586 - DNA, 33 bp, Homo sapien
ctccaatggctaactccatcttctcggacttct

SEQ ID NO: 30587 - DNA, 33 bp, Homo sapien
tgctttattgtcttcacagcactctgtcactat

SEQ ID NO: 30588 - DNA, 33 bp, Homo sapien
tgctttattgtcttcatagcactctgtcactat

SEQ ID NO: 30589 - DNA, 33 bp, Homo sapien
aaggcttcgtggagaacggacaaattagttggt

SEQ ID NO: 30590 - DNA, 33 bp, Homo sapien
aaggcttcgtggagaagggacaaattagttggt

SEQ ID NO: 30591 - DNA, 33 bp, Homo sapien
acccatgataggtcctcaaaaatgtcggcatga

SEQ ID NO: 30592 - DNA, 33 bp, Homo sapien
acccatgataggtccttaaaaatgtcggcatga

SEQ ID NO: 30593 - DNA, 33 bp, Homo sapien
atattaaggtttatcaagttacatcaattgaca

SEQ ID NO: 30594 - DNA, 33 bp, Homo sapien
atattaaggtttatcacgttacatcaattgaca

SEQ ID NO: 30595 - DNA, 33 bp, Homo sapien
cagggatgaagaaagacaatacttagttcgaag

SEQ ID NO: 30596 - DNA, 33 bp, Homo sapien
cagggatgaagaaagagaatacttagttcgaag

SEQ ID NO: 30597 - DNA, 33 bp, Homo sapien
gtctccatctaatgcaaggatgagaagaggaga

SEQ ID NO: 30598 - DNA, 33 bp, Homo sapien
gtctccatctaatgcatggatgagaagaggaga

SEQ ID NO: 30599 - DNA, 33 bp, Homo sapien
tggttgtttttctgcacgtgcttcagtttatta

SEQ ID NO: 30600 - DNA, 33 bp, Homo sapien
tggttgtttttctgcatgtgcttcagtttatta

SEQ ID NO: 30601 - DNA, 33 bp, Homo sapien
aggtttccaacaattccagtttgaagtgaccat

SEQ ID NO: 30602 - DNA, 33 bp, Homo sapien
aggtttccaacaattctagtttgaagtgaccat

SEQ ID NO: 30603 - DNA, 33 bp, Homo sapien
tttatctttttcatggccattcaatagccgttt

SEQ ID NO: 30604 - DNA, 33 bp, Homo sapien
tttatctttttcatggtcattcaatagccgttt

SEQ ID NO: 30605 - DNA, 33 bp, Homo sapien
tctgtgttgttggtgaaactagtcttcctattt

SEQ ID NO: 30606 - DNA, 33 bp, Homo sapien
tctgtgttgttggtgacactagtcttcctattt

SEQ ID NO: 30607 - DNA, 33 bp, Homo sapien
aagattatttcttcctcaaaaagtgggatagag

SEQ ID NO: 30608 - DNA, 33 bp, Homo sapien
aagattatttcttccttaaaaagtgggatagag

SEQ ID NO: 30609 - DNA, 33 bp, Homo sapien
tgcaaaacagaattaaatcatggtctttggagt

SEQ ID NO: 30610 - DNA, 33 bp, Homo sapien
tgcaaaacagaattaagtcatggtctttggagt

SEQ ID NO: 30611 - DNA, 33 bp, Homo sapien
gttttcttcaggtttcacttttgctagatttgc

SEQ ID NO: 30612 - DNA, 33 bp, Homo sapien
gttttcttcaggtttcgcttttgctagatttgc

SEQ ID NO: 30613 - DNA, 33 bp, Homo sapien
ataataaaagcaaaaacttctaacacatattta

SEQ ID NO: 30614 - DNA, 33 bp, Homo sapien
ataataaaagcaaaaatttctaacacatattta

SEQ ID NO: 30615 - DNA, 33 bp, Homo sapien
aaagctttaatcaagacggaaacttttatttac

SEQ ID NO: 30616 - DNA, 33 bp, Homo sapien
aaagctttaatcaagatggaaacttttatttac

SEQ ID NO: 30617 - DNA, 33 bp, Homo sapien; identical to SEQ ID NO: 30615

SEQ ID NO: 30618 - DNA, 33 bp, Homo sapien; identical to SEQ ID NO: 30616

SEQ ID NO: 30619 - DNA, 33 bp, Homo sapien
agcagtagatgtgcaaaaatacattcttgaaat

SEQ ID NO: 30620 - DNA, 33 bp, Homo sapien
agcagtagatgtgcaacaatacattcttgaaat

SEQ ID NO: 30621 - DNA, 33 bp, Homo sapien
acaatctaccttcaaacaattcttctaccattt

SEQ ID NO: 30622 - DNA, 33 bp, Homo sapien
acaatctaccttcaaataattcttctaccattt

SEQ ID NO: 30623 - DNA, 33 bp, Homo sapien
aggatagacgcaccaccagcagaccgaattctc

SEQ ID NO: 30624 - DNA, 33 bp, Homo sapien
aggatagacgcaccacgagcagaccgaattctc

SEQ ID NO: 30625 - DNA, 33 bp, Homo sapien
aagagacccctgagtacaggaactgtgtctgtt

SEQ ID NO: 30626 - DNA, 33 bp, Homo sapien
aagagacccctgagtataggaactgtgtctgtt

SEQ ID NO: 30627 - DNA, 33 bp, Homo sapien
ccagaccctatagtgacgcatttagaatacagt

SEQ ID NO: 30628 - DNA, 33 bp, Homo sapien
ccagaccctatagtgatgcatttagaatacagt

SEQ ID NO: 30629 - DNA, 33 bp, Homo sapien
tctttttgcacttgaacatctgaagcttaatcc

SEQ ID NO: 30630 - DNA, 33 bp, Homo sapien
tctttttgcacttgaatatctgaagcttaatcc

SEQ ID NO: 30631 - DNA, 33 bp, Homo sapien
tgaagaatcaaagaaacaggattttatgctaag

SEQ ID NO: 30632 - DNA, 33 bp, Homo sapien
tgaagaatcaaagaaagaggattttatgctaag

SEQ ID NO: 30633 - DNA, 33 bp, Homo sapien
tttcttaccttaaatcactggccagacttctag

SEQ ID NO: 30634 - DNA, 33 bp, Homo sapien
tttcttaccttaaatcgctggccagacttctag

SEQ ID NO: 30635 - DNA, 33 bp, Homo sapien
ctgggaactgttggtaagaggtaatggcggctc

SEQ ID NO: 30636 - DNA, 33 bp, Homo sapien
ctgggaactgttggtaggaggtaatggcggctc

SEQ ID NO: 30637 - DNA, 33 bp, Homo sapien
ttgctataaaatcaagcccatgtgtgggaggtc

SEQ ID NO: 30638 - DNA, 33 bp, Homo sapien
ttgctataaaatcaagtccatgtgtgggaggtc

SEQ ID NO: 30639 - DNA, 33 bp, Homo sapien
gaatcctgaaaatgaacgagcaatgcaatcctt

SEQ ID NO: 30640 - DNA, 33 bp, Homo sapien
gaatcctgaaaatgaatgagcaatgcaatcctt

SEQ ID NO: 30641 - DNA, 33 bp, Homo sapien
gagaaagtgctatttcaaagaaggcagggaata

SEQ ID NO: 30642 - DNA, 33 bp, Homo sapien
gagaaagtgctatttcgaagaaggcagggaata

SEQ ID NO: 30643 - DNA, 33 bp, Homo sapien
gtaacacaactgttaccacctactacttaccaa

SEQ ID NO: 30644 - DNA, 33 bp, Homo sapien
gtaacacaactgttactacctactacttaccaa

SEQ ID NO: 30645 - DNA, 33 bp, Homo sapien
tgatctgattggaagacagaattttaaaccatt

SEQ ID NO: 30646 - DNA, 33 bp, Homo sapien
tgatctgattggaagagagaattttaaaccatt

SEQ ID NO: 30647 - DNA, 33 bp, Homo sapien
gcaaaaaagctggaaacgtcggtggggctaaga

SEQ ID NO: 30648 - DNA, 33 bp, Homo sapien
gcaaaaaagctggaaaggtcggtggggctaaga

SEQ ID NO: 30649 - DNA, 33 bp, Homo sapien
ttgagtattttatttaccatctcaggctctgta

SEQ ID NO: 30650 - DNA, 33 bp, Homo sapien
ttgagtattttatttatcatctcaggctctgta

SEQ ID NO: 30651 - DNA, 33 bp, Homo sapien
gtgaagcacagcacaccatgcgcaacactggtt

SEQ ID NO: 30652 - DNA, 33 bp, Homo sapien
gtgaagcacagcacacgatgcgcaacactggtt

SEQ ID NO: 30653 - DNA, 33 bp, Homo sapien
tgacacctaaagaaggcagagccaaaaaatgca

SEQ ID NO: 30654 - DNA, 33 bp, Homo sapien
tgacacctaaagaaggtagagccaaaaaatgca

SEQ ID NO: 30655 - DNA, 33 bp, Homo sapien
ctttagtatgttaacccagtcagtgtggatatc

SEQ ID NO: 30656 - DNA, 33 bp, Homo sapien
ctttagtatgttaacctagtcagtgtggatatc

SEQ ID NO: 30657 - DNA, 33 bp, Homo sapien
actggtacctccagacacagtgctgcacctctt

SEQ ID NO: 30658 - DNA, 33 bp, Homo sapien
actggtacctccagacgcagtgctgcacctctt

SEQ ID NO: 30659 - DNA, 33 bp, Homo sapien
agtggcaactgtgggcaattgggggcatgactt

SEQ ID NO: 30660 - DNA, 33 bp, Homo sapien
agtggcaactgtgggcgattgggggcatgactt

SEQ ID NO: 30661 - DNA, 33 bp, Homo sapien
agtgccagggaggacaatacattctctcctagg

SEQ ID NO: 30662 - DNA, 33 bp, Homo sapien
agtgccagggaggacagtacattctctcctagg

SEQ ID NO: 30663 - DNA, 33 bp, Homo sapien
aagaggagaggaaatacctgcttcactttggct

SEQ ID NO: 30664 - DNA, 33 bp, Homo sapien
aagaggagaggaaatatctgcttcactttggct

SEQ ID NO: 30665 - DNA, 33 bp, Homo sapien
gggagagagagccttaccaaaatctatcctcta

SEQ ID NO: 30666 - DNA, 33 bp, Homo sapien
gggagagagagccttagcaaaatctatcctcta

SEQ ID NO: 30667 - DNA, 33 bp, Homo sapien
gggtttcataggccagcctaaaaaatagcacat

SEQ ID NO: 30668 - DNA, 33 bp, Homo sapien
gggtttcataggccagtctaaaaaatagcacat

SEQ ID NO: 30669 - DNA, 33 bp, Homo sapien
tatcggatttaaggataaataggaagtcactgc

SEQ ID NO: 30670 - DNA, 33 bp, Homo sapien
tatcggatttaaggatcaataggaagtcactgc

SEQ ID NO: 30671 - DNA, 33 bp, Homo sapien
ttaagtaaacaatttgaatatgagctttgagag

SEQ ID NO: 30672 - DNA, 33 bp, Homo sapien
ttaagtaaacaatttggatatgagctttgagag

SEQ ID NO: 30673 - DNA, 33 bp, Homo sapien
atgcaatttaggctgcagaaaaatccgagttgc

SEQ ID NO: 30674 - DNA, 33 bp, Homo sapien
atgcaatttaggctgcggaaaaatccgagttgc

SEQ ID NO: 30675 - DNA, 33 bp, Homo sapien
ctctgtaaagaagagacgaaatggccagaagga

SEQ ID NO: 30676 - DNA, 33 bp, Homo sapien
ctctgtaaagaagagatgaaatggccagaagga

SEQ ID NO: 30677 - DNA, 33 bp, Homo sapien
aattatagatgtagcactgcagccagagccttg

SEQ ID NO: 30678 - DNA, 33 bp, Homo sapien
aattatagatgtagcattgcagccagagccttg

SEQ ID NO: 30679 - DNA, 33 bp, Homo sapien
gacctgaattgccaagaacgatggggacagtaa

SEQ ID NO: 30680 - DNA, 33 bp, Homo sapien
gacctgaattgccaaggacgatggggacagtaa

SEQ ID NO: 30681 - DNA, 33 bp, Homo sapien
caaaagccagaagaaaaggatcaaaattccagc

SEQ ID NO: 30682 - DNA, 33 bp, Homo sapien
caaaagccagaagaaagggatcaaaattccagc

SEQ ID NO: 30683 - DNA, 33 bp, Homo sapien
ggagcagccagctgcacgttagtttttggttga

SEQ ID NO: 30684 - DNA, 33 bp, Homo sapien
ggagcagccagctgcaggttagtttttggttga

SEQ ID NO: 30685 - DNA, 33 bp, Homo sapien
acctcaacttcctcgaatatgaaatgaaaataa

SEQ ID NO: 30686 - DNA, 33 bp, Homo sapien
acctcaacttcctcgactatgaaatgaaaataa

SEQ ID NO: 30687 - DNA, 33 bp, Homo sapien
aaaaatgttgaactcgcagaaacagagagtaga

SEQ ID NO: 30688 - DNA, 33 bp, Homo sapien
aaaaatgttgaactcgtagaaacagagagtaga

SEQ ID NO: 30689 - DNA, 33 bp, Homo sapien
ctgtgatcccttgcacacaggtgattggaccaa

SEQ ID NO: 30690 - DNA, 33 bp, Homo sapien
ctgtgatcccttgcacgcaggtgattggaccaa

SEQ ID NO: 30691 - DNA, 33 bp, Homo sapien
ctggtaatagctaccactatacatgtcctggtt

SEQ ID NO: 30692 - DNA, 33 bp, Homo sapien
ctggtaatagctaccattatacatgtcctggtt

SEQ ID NO: 30693 - DNA, 33 bp, Homo sapien
gattctttccaaacaaacctctgagctaccttg

SEQ ID NO: 30694 - DNA, 33 bp, Homo sapien
gattctttccaaacaagcctctgagctaccttg

SEQ ID NO: 30695 - DNA, 33 bp, Homo sapien
caacagaatttcctgcactcaactattaggtag

SEQ ID NO: 30696 - DNA, 33 bp, Homo sapien
caacagaatttcctgctctcaactattaggtag

SEQ ID NO: 30697 - DNA, 33 bp, Homo sapien
aggacggggtggtagaaatacaagaaatcatat

SEQ ID NO: 30698 - DNA, 33 bp, Homo sapien
aggacggggtggtagagatacaagaaatcatat

SEQ ID NO: 30699 - DNA, 33 bp, Homo sapien
caaggatatttgcagcaagagaagagcactcaa

SEQ ID NO: 30700 - DNA, 33 bp, Homo sapien
caaggatatttgcagcgagagaagagcactcaa

SEQ ID NO: 30701 - DNA, 33 bp, Homo sapien
atagaagcaaattcaccgacttctggtggaaag

SEQ ID NO: 30702 - DNA, 33 bp, Homo sapien
atagaagcaaattcactgacttctggtggaaag

SEQ ID NO: 30703 - DNA, 33 bp, Homo sapien
taaagagcaatgaagcagactgtgtttttggca

SEQ ID NO: 30704 - DNA, 33 bp, Homo sapien
taaagagcaatgaagcggactgtgtttttggca

SEQ ID NO: 30705 - DNA, 33 bp, Homo sapien
gacatgatggttacacggagtcttgagaaatga

SEQ ID NO: 30706 - DNA, 33 bp, Homo sapien
gacatgatggttacactgagtcttgagaaatga

SEQ ID NO: 30707 - DNA, 33 bp, Homo sapien
tattgagaatattgtagccatctctacttaaca

SEQ ID NO: 30708 - DNA, 33 bp, Homo sapien
tattgagaatattgtatccatctctacttaaca

SEQ ID NO: 30709 - DNA, 33 bp, Homo sapien
taactaaatatcagaaatggcgtctatcatttt

SEQ ID NO: 30710 - DNA, 33 bp, Homo sapien
taactaaatatcagaagtggcgtctatcatttt

SEQ ID NO: 30711 - DNA, 33 bp, Homo sapien
acaaatagactagaacaaaaatgatagacgcca

SEQ ID NO: 30712 - DNA, 33 bp, Homo sapien
acaaatagactagaacgaaaatgatagacgcca

SEQ ID NO: 30713 - DNA, 33 bp, Homo sapien
gaagagcattccaggcagagggagcaatgagtg

SEQ ID NO: 30714 - DNA, 33 bp, Homo sapien
gaagagcattccaggccgagggagcaatgagtg

SEQ ID NO: 30715 - DNA, 33 bp, Homo sapien
tatgaaaggcattgtaagaattaactgaagcta

SEQ ID NO: 30716 - DNA, 33 bp, Homo sapien
tatgaaaggcattgtaggaattaactgaagcta

SEQ ID NO: 30717 - DNA, 33 bp, Homo sapien
ttttaccactaataaacatggtttgctcaccag

SEQ ID NO: 30718 - DNA, 33 bp, Homo sapien
ttttaccactaataaatatggtttgctcaccag

SEQ ID NO: 30719 - DNA, 33 bp, Homo sapien
tttgtgttatcaaacagtcttgggctggcttaa

SEQ ID NO: 30720 - DNA, 33 bp, Homo sapien
tttgtgttatcaaacattcttgggctggcttaa

SEQ ID NO: 30721 - DNA, 33 bp, Homo sapien
tgtaggccccttgaacaatgtcatgtggcggct

SEQ ID NO: 30722 - DNA, 33 bp, Homo sapien
tgtaggccccttgaacgatgtcatgtggcggct

SEQ ID NO: 30723 - DNA, 33 bp, Homo sapien
catgaagctgttgaacacaaaggaaacaaactt

SEQ ID NO: 30724 - DNA, 33 bp, Homo sapien
catgaagctgttgaacgcaaaggaaacaaactt

SEQ ID NO: 30725 - DNA, 33 bp, Homo sapien
catggtactcatcacaactcacttataaccagt

SEQ ID NO: 30726 - DNA, 33 bp, Homo sapien
catggtactcatcacacctcacttataaccagt

SEQ ID NO: 30727 - DNA, 33 bp, Homo sapien
ttgctgacaattgaaaaaggagtgtaattgaat

SEQ ID NO: 30728 - DNA, 33 bp, Homo sapien
ttgctgacaattgaaagaggagtgtaattgaat

SEQ ID NO: 30729 - DNA, 33 bp, Homo sapien
ttgtgcaaaaagcctacatttggaaagttaggc

SEQ ID NO: 30730 - DNA, 33 bp, Homo sapien
ttgtgcaaaaagcctagatttggaaagttaggc

SEQ ID NO: 30731 - DNA, 33 bp, Homo sapien
gagaaacattgggaaaataaacaaactggttgt

SEQ ID NO: 30732 - DNA, 33 bp, Homo sapien
gagaaacattgggaaagtaaacaaactggttgt

SEQ ID NO: 30733 - DNA, 33 bp, Homo sapien
agaaggagcaccaatgcaatgtttgaagaccta

SEQ ID NO: 30734 - DNA, 33 bp, Homo sapien
agaaggagcaccaatgtaatgtttgaagaccta

SEQ ID NO: 30735 - DNA, 33 bp, Homo sapien
tctgctttctctttgcacattatggcaaaaata

SEQ ID NO: 30736 - DNA, 33 bp, Homo sapien
tctgctttctctttgcgcattatggcaaaaata

SEQ ID NO: 30737 - DNA, 33 bp, Homo sapien
atgactcaaatttagcccattagaggcatcttc

SEQ ID NO: 30738 - DNA, 33 bp, Homo sapien
atgactcaaatttagctcattagaggcatcttc

SEQ ID NO: 30739 - DNA, 33 bp, Homo sapien
tcaccttgcaatagtgccacctctgctaaagaa

SEQ ID NO: 30740 - DNA, 33 bp, Homo sapien
tcaccttgcaatagtgtcacctctgctaaagaa

SEQ ID NO: 30741 - DNA, 33 bp, Homo sapien
catctcatcccgttcacaggccctacggattca

SEQ ID NO: 30742 - DNA, 33 bp, Homo sapien
catctcatcccgttcataggccctacggattca

SEQ ID NO: 30743 - DNA, 33 bp, Homo sapien
gcactttggtatacgacagaaaataggtaggac

SEQ ID NO: 30744 - DNA, 33 bp, Homo sapien
gcactttggtatacgatagaaaataggtaggac

SEQ ID NO: 30745 - DNA, 33 bp, Homo sapien
gagtgtgttgacaccaacattctcctgcagtat

SEQ ID NO: 30746 - DNA, 33 bp, Homo sapien
gagtgtgttgacaccaccattctcctgcagtat

SEQ ID NO: 30747 - DNA, 33 bp, Homo sapien
gtaattatgtaactgcacccacaattggaaccc

SEQ ID NO: 30748 - DNA, 33 bp, Homo sapien
gtaattatgtaactgcgcccacaattggaaccc

SEQ ID NO: 30749 - DNA, 33 bp, Homo sapien
taaacatatcctttggacaaataattcaagtca

SEQ ID NO: 30750 - DNA, 33 bp, Homo sapien
taaacatatcctttgggcaaataattcaagtca

SEQ ID NO: 30751 - DNA, 33 bp, Homo sapien
aaaacgttgttatgcaagtcaaaacagataatg

SEQ ID NO: 30752 - DNA, 33 bp, Homo sapien
aaaacgttgttatgcaggtcaaaacagataatg

SEQ ID NO: 30753 - DNA, 33 bp, Homo sapien
cccatttgctgtaaaacgaacttttctttcaat

SEQ ID NO: 30754 - DNA, 33 bp, Homo sapien
cccatttgctgtaaaatgaacttttctttcaat

SEQ ID NO: 30755 - DNA, 33 bp, Homo sapien
ttgaatagattccttacgctcttgtcaaaagta

SEQ ID NO: 30756 - DNA, 33 bp, Homo sapien
ttgaatagattccttatgctcttgtcaaaagta

SEQ ID NO: 30757 - DNA, 33 bp, Homo sapien
ccattgatgaggatctcagaaaggaaactgctt

SEQ ID NO: 30758 - DNA, 33 bp, Homo sapien
ccattgatgaggatctgagaaaggaaactgctt

SEQ ID NO: 30759 - DNA, 33 bp, Homo sapien
ttatagttaggatccaatgaaagaatatgtgta

SEQ ID NO: 30760 - DNA, 33 bp, Homo sapien
ttatagttaggatccagtgaaagaatatgtgta

SEQ ID NO: 30761 - DNA, 33 bp, Homo sapien
gttcagaaaattaggaccttgaaacagggaagc

SEQ ID NO: 30762 - DNA, 33 bp, Homo sapien
gttcagaaaattaggagcttgaaacagggaagc

SEQ ID NO: 30763 - DNA, 33 bp, Homo sapien
actaaaaatataataactgcaaatcctgtccca

SEQ ID NO: 30764 - DNA, 33 bp, Homo sapien
actaaaaatataataattgcaaatcctgtccca

SEQ ID NO: 30765 - DNA, 33 bp, Homo sapien
ggcagcagctagctagcatcaaggcaaagcctg

SEQ ID NO: 30766 - DNA, 33 bp, Homo sapien
ggcagcagctagctaggatcaaggcaaagcctg

SEQ ID NO: 30767 - DNA, 33 bp, Homo sapien
tatatcaaaacttggagaattttaaccagtttt

SEQ ID NO: 30768 - DNA, 33 bp, Homo sapien
tatatcaaaacttggataattttaaccagtttt

SEQ ID NO: 30769 - DNA, 33 bp, Homo sapien
cttctccagtagaaacaacatggacgctcagag

SEQ ID NO: 30770 - DNA, 33 bp, Homo sapien
cttctccagtagaaacgacatggacgctcagag

SEQ ID NO: 30771 - DNA, 33 bp, Homo sapien
cctggtatcatctggaaagttcattggccattt

SEQ ID NO: 30772 - DNA, 33 bp, Homo sapien
cctggtatcatctggagagttcattggccattt

SEQ ID NO: 30773 - DNA, 33 bp, Homo sapien
tatactgtatgtatgacggagaatttcctagtt

SEQ ID NO: 30774 - DNA, 33 bp, Homo sapien
tatactgtatgtatgatggagaatttcctagtt

SEQ ID NO: 30775 - DNA, 33 bp, Homo sapien
cagaagaatatcataaacagatctgtggaccat

SEQ ID NO: 30776 - DNA, 33 bp, Homo sapien
cagaagaatatcataatcagatctgtggaccat

SEQ ID NO: 30777 - DNA, 33 bp, Homo sapien
catgtgtgggccttgtaaaaaggcgaagtctga

SEQ ID NO: 30778 - DNA, 33 bp, Homo sapien
catgtgtgggccttgttaaaaggcgaagtctga

SEQ ID NO: 30779 - DNA, 33 bp, Homo sapien
ttggcagatctacctaccttgaactggaaaaca

SEQ ID NO: 30780 - DNA, 33 bp, Homo sapien
ttggcagatctacctatcttgaactggaaaaca

SEQ ID NO: 30781 - DNA, 33 bp, Homo sapien
catagtgaagttgacactcaggaactgctgaaa

SEQ ID NO: 30782 - DNA, 33 bp, Homo sapien
catagtgaagttgacagtcaggaactgctgaaa

SEQ ID NO: 30783 - DNA, 33 bp, Homo sapien
cacttagacgagcccacgcttttgcttgatttt

SEQ ID NO: 30784 - DNA, 33 bp, Homo sapien
cacttagacgagcccaggcttttgcttgatttt

SEQ ID NO: 30785 - DNA, 33 bp, Homo sapien
caaaggttcgtgaagaaacacataatataaata

SEQ ID NO: 30786 - DNA, 33 bp, Homo sapien
caaaggttcgtgaagagacacataatataaata

SEQ ID NO: 30787 - DNA, 33 bp, Homo sapien
aaacattgaaactagcgcaaaagtgctcttgaa

SEQ ID NO: 30788 - DNA, 33 bp, Homo sapien
aaacattgaaactagctcaaaagtgctcttgaa

SEQ ID NO: 30789 - DNA, 33 bp, Homo sapien
aaaacaacactggcttaaacaaaatacaagtgt

SEQ ID NO: 30790 - DNA, 33 bp, Homo sapien
aaaacaacactggcttcaacaaaatacaagtgt

SEQ ID NO: 30791 - DNA, 33 bp, Homo sapien
caggaatggaaaaaccaaatattgtatgtcctc

SEQ ID NO: 30792 - DNA, 33 bp, Homo sapien
caggaatggaaaaaccgaatattgtatgtcctc

SEQ ID NO: 30793 - DNA, 33 bp, Homo sapien
agtagtggttcagcgcacaactttaggagtcag

SEQ ID NO: 30794 - DNA, 33 bp, Homo sapien
agtagtggttcagcgctcaactttaggagtcag

SEQ ID NO: 30795 - DNA, 33 bp, Homo sapien
gcacacctctcctccaaaacagaaataactggg

SEQ ID NO: 30796 - DNA, 33 bp, Homo sapien
gcacacctctcctccagaacagaaataactggg

SEQ ID NO: 30797 - DNA, 33 bp, Homo sapien
ttctgttagagtaatacctgtttcttgttctcc

SEQ ID NO: 30798 - DNA, 33 bp, Homo sapien
ttctgttagagtaatatctgtttcttgttctcc

SEQ ID NO: 30799 - DNA, 33 bp, Homo sapien
acctaatgatcctaataataggtgacagccact

SEQ ID NO: 30800 - DNA, 33 bp, Homo sapien
acctaatgatcctaatgataggtgacagccact

SEQ ID NO: 30801 - DNA, 33 bp, Homo sapien
aagatggggctgtatacattgaggagaaatatg

SEQ ID NO: 30802 - DNA, 33 bp, Homo sapien
aagatggggctgtatatattgaggagaaatatg

SEQ ID NO: 30803 - DNA, 33 bp, Homo sapien
ggaagggctcatagaaaaacaagaaagctgagg

SEQ ID NO: 30804 - DNA, 33 bp, Homo sapien
ggaagggctcatagaagaacaagaaagctgagg

SEQ ID NO: 30805 - DNA, 33 bp, Homo sapien
tgtttaactggaacaaaaaccctgtgaagaaaa

SEQ ID NO: 30806 - DNA, 33 bp, Homo sapien
tgtttaactggaacaacaaccctgtgaagaaaa

SEQ ID NO: 30807 - DNA, 33 bp, Homo sapien
taatgtttcctgaataaaatagctcactcaatc

SEQ ID NO: 30808 - DNA, 33 bp, Homo sapien
taatgtttcctgaatacaatagctcactcaatc

SEQ ID NO: 30809 - DNA, 33 bp, Homo sapien
gagttatattcatagaacaattactgaagggat

SEQ ID NO: 30810 - DNA, 33 bp, Homo sapien
gagttatattcatagagcaattactgaagggat

SEQ ID NO: 30811 - DNA, 33 bp, Homo sapien
tgatttcaatgccttacgtttctcactgcagcc

SEQ ID NO: 30812 - DNA, 33 bp, Homo sapien
tgatttcaatgccttatgtttctcactgcagcc

SEQ ID NO: 30813 - DNA, 33 bp, Homo sapien
cagaaaatagagccagaaactgtgcgagaaatg

SEQ ID NO: 30814 - DNA, 33 bp, Homo sapien
cagaaaatagagccaggaactgtgcgagaaatg

SEQ ID NO: 30815 - DNA, 33 bp, Homo sapien
ttgatttcgctaagccaaagattattgcttttc

SEQ ID NO: 30816 - DNA, 33 bp, Homo sapien
ttgatttcgctaagcctaagattattgcttttc

SEQ ID NO: 30817 - DNA, 33 bp, Homo sapien
atctgtgctaggagacccaacatcatttcaact

SEQ ID NO: 30818 - DNA, 33 bp, Homo sapien
atctgtgctaggagactcaacatcatttcaact

SEQ ID NO: 30819 - DNA, 33 bp, Homo sapien
tgaaccttcttgttggaatatgattttatttct

SEQ ID NO: 30820 - DNA, 33 bp, Homo sapien
tgaaccttcttgttggcatatgattttatttct

SEQ ID NO: 30821 - DNA, 33 bp, Homo sapien
ttttcttaggataaggcccaaacataccataaa

SEQ ID NO: 30822 - DNA, 33 bp, Homo sapien
ttttcttaggataaggtccaaacataccataaa

SEQ ID NO: 30823 - DNA, 33 bp, Homo sapien
caaagtcaaataaacacgagtatttagagatgc

SEQ ID NO: 30824 - DNA, 33 bp, Homo sapien
caaagtcaaataaacatgagtatttagagatgc

SEQ ID NO: 30825 - DNA, 33 bp, Homo sapien
tcaaaactttctccgaccacatagcatagagag

SEQ ID NO: 30826 - DNA, 33 bp, Homo sapien
tcaaaactttctccgatcacatagcatagagag

SEQ ID NO: 30827 - DNA, 33 bp, Homo sapien
cactacttaatcaaaacaaggttcctgtctttc

SEQ ID NO: 30828 - DNA, 33 bp, Homo sapien
cactacttaatcaaaagaaggttcctgtctttc

SEQ ID NO: 30829 - DNA, 33 bp, Homo sapien
aaacccttacttacaacgactgaaaatttctgt

SEQ ID NO: 30830 - DNA, 33 bp, Homo sapien
aaacccttacttacaatgactgaaaatttctgt

SEQ ID NO: 30831 - DNA, 33 bp, Homo sapien
ttgttatttagccttaagacatttcattagaat

SEQ ID NO: 30832 - DNA, 33 bp, Homo sapien
ttgttatttagccttatgacatttcattagaat

SEQ ID NO: 30833 - DNA, 33 bp, Homo sapien
cagctagtcgataaaaaaaccaggatggaacta

SEQ ID NO: 30834 - DNA, 33 bp, Homo sapien
cagctagtcgataaaagaaccaggatggaacta

SEQ ID NO: 30835 - DNA, 33 bp, Homo sapien
tcacattctgaccacactctcaagcattttgca

SEQ ID NO: 30836 - DNA, 33 bp, Homo sapien
tcacattctgaccacattctcaagcattttgca

SEQ ID NO: 30837 - DNA, 33 bp, Homo sapien
tatatagttttctaacacttgaaattattccaa

SEQ ID NO: 30838 - DNA, 33 bp, Homo sapien
tatatagttttctaacgcttgaaattattccaa

SEQ ID NO: 30839 - DNA, 33 bp, Homo sapien
agttgtaacaggatcaaatatggaaatggcaat

SEQ ID NO: 30840 - DNA, 33 bp, Homo sapien
agttgtaacaggatcacatatggaaatggcaat

SEQ ID NO: 30841 - DNA, 33 bp, Homo sapien
tctagaaatgtctaagaaacaaccttttttatt

SEQ ID NO: 30842 - DNA, 33 bp, Homo sapien
tctagaaatgtctaaggaacaaccttttttatt

SEQ ID NO: 30843 - DNA, 33 bp, Homo sapien
tgatgattgttgaaagaatgaatggaaacaagc

SEQ ID NO: 30844 - DNA, 33 bp, Homo sapien
tgatgattgttgaaagtatgaatggaaacaagc

SEQ ID NO: 30845 - DNA, 33 bp, Homo sapien
gcattcatcacagtgagaaggcatctccatgga

SEQ ID NO: 30846 - DNA, 33 bp, Homo sapien
gcattcatcacagtgataaggcatctccatgga

SEQ ID NO: 30847 - DNA, 33 bp, Homo sapien
gaaaagcatgaaaatacgatagaacaaagctgg

SEQ ID NO: 30848 - DNA, 33 bp, Homo sapien
gaaaagcatgaaaatatgatagaacaaagctgg

SEQ ID NO: 30849 - DNA, 33 bp, Homo sapien
cccaggaaagacaagcagaagaaccactcagct

SEQ ID NO: 30850 - DNA, 33 bp, Homo sapien
cccaggaaagacaagcggaagaaccactcagct

SEQ ID NO: 30851 - DNA, 33 bp, Homo sapien
tttgaaactgtaccacaaaagagttcttagaaa

SEQ ID NO: 30852 - DNA, 33 bp, Homo sapien
tttgaaactgtaccaccaaagagttcttagaaa

SEQ ID NO: 30853 - DNA, 33 bp, Homo sapien
gctatagtataatactcaaaatgttcggatttc

SEQ ID NO: 30854 - DNA, 33 bp, Homo sapien
gctatagtataatactgaaaatgttcggatttc

SEQ ID NO: 30855 - DNA, 33 bp, Homo sapien
gaaccaagaggctagcaaactccagcaagtgca

SEQ ID NO: 30856 - DNA, 33 bp, Homo sapien
gaaccaagaggctagcgaactccagcaagtgca

SEQ ID NO: 30857 - DNA, 33 bp, Homo sapien
accaggcatttcaatacagactgcacaaaagga

SEQ ID NO: 30858 - DNA, 33 bp, Homo sapien
accaggcatttcaatatagactgcacaaaagga

SEQ ID NO: 30859 - DNA, 33 bp, Homo sapien
ctagaatggcatactgaagattttacatattga

SEQ ID NO: 30860 - DNA, 33 bp, Homo sapien
ctagaatggcatactggagattttacatattga

SEQ ID NO: 30861 - DNA, 33 bp, Homo sapien
gaaaaggagaagtaaacgagaatgatagcagag

SEQ ID NO: 30862 - DNA, 33 bp, Homo sapien
gaaaaggagaagtaaatgagaatgatagcagag

SEQ ID NO: 30863 - DNA, 33 bp, Homo sapien
atccttcctgtccaaactaattcagtggggagg

SEQ ID NO: 30864 - DNA, 33 bp, Homo sapien
atccttcctgtccaaagtaattcagtggggagg

SEQ ID NO: 30865 - DNA, 33 bp, Homo sapien
agcaacgcagtgatgacggcaattctccctaaa

SEQ ID NO: 30866 - DNA, 33 bp, Homo sapien
agcaacgcagtgatgatggcaattctccctaaa

SEQ ID NO: 30867 - DNA, 33 bp, Homo sapien
attgttgactcttaacagcagggtaacaacaaa

SEQ ID NO: 30868 - DNA, 33 bp, Homo sapien
attgttgactcttaacggcagggtaacaacaaa

SEQ ID NO: 30869 - DNA, 33 bp, Homo sapien
actggtggccgatacaaggtcaaggtaacttaa

SEQ ID NO: 30870 - DNA, 33 bp, Homo sapien
actggtggccgatacagggtcaaggtaacttaa

SEQ ID NO: 30871 - DNA, 33 bp, Homo sapien
tcacccatctttgtcacggagttcccaggtgtt

SEQ ID NO: 30872 - DNA, 33 bp, Homo sapien
tcacccatctttgtcatggagttcccaggtgtt

SEQ ID NO: 30873 - DNA, 33 bp, Homo sapien
ttactattgctcataaattagttcaagagcttt

SEQ ID NO: 30874 - DNA, 33 bp, Homo sapien
ttactattgctcataagttagttcaagagcttt

SEQ ID NO: 30875 - DNA, 33 bp, Homo sapien
aactgtatccagagtacatatcgatttcagtaa

SEQ ID NO: 30876 - DNA, 33 bp, Homo sapien
aactgtatccagagtatatatcgatttcagtaa

SEQ ID NO: 30877 - DNA, 33 bp, Homo sapien
tatggttaagaccagcaaattctgtgagcatgg

SEQ ID NO: 30878 - DNA, 33 bp, Homo sapien
tatggttaagaccagcgaattctgtgagcatgg

SEQ ID NO: 30879 - DNA, 33 bp, Homo sapien
aaatgagatgggaatactagaaatgctttggaa

SEQ ID NO: 30880 - DNA, 33 bp, Homo sapien
aaatgagatgggaatattagaaatgctttggaa

SEQ ID NO: 30881 - DNA, 33 bp, Homo sapien
tgtaaacaatggatagaaaggccagaataacag

SEQ ID NO: 30882 - DNA, 33 bp, Homo sapien
tgtaaacaatggatagcaaggccagaataacag

SEQ ID NO: 30883 - DNA, 33 bp, Homo sapien
aaatggactttgggaacgcaactggcagtgtct

SEQ ID NO: 30884 - DNA, 33 bp, Homo sapien
aaatggactttgggaatgcaactggcagtgtct

SEQ ID NO: 30885 - DNA, 33 bp, Homo sapien
aaatgaatgaatgaggccaactctatcacatga

SEQ ID NO: 30886 - DNA, 33 bp, Homo sapien
aaatgaatgaatgaggtcaactctatcacatga

SEQ ID NO: 30887 - DNA, 33 bp, Homo sapien
tgttattaatttctaccattgttgcgctgttgt

SEQ ID NO: 30888 - DNA, 33 bp, Homo sapien
tgttattaatttctactattgttgcgctgttgt

SEQ ID NO: 30889 - DNA, 33 bp, Homo sapien
tgtattttgcatgaggcatggatcaaagttctt

SEQ ID NO: 30890 - DNA, 33 bp, Homo sapien
tgtattttgcatgaggtatggatcaaagttctt

SEQ ID NO: 30891 - DNA, 33 bp, Homo sapien
catacatttggatgaagaagttcccttctattc

SEQ ID NO: 30892 - DNA, 33 bp, Homo sapien
catacatttggatgaataagttcccttctattc

SEQ ID NO: 30893 - DNA, 33 bp, Homo sapien
accaaataagaatacagactgcttgagcccatc

SEQ ID NO: 30894 - DNA, 33 bp, Homo sapien
accaaataagaatacatactgcttgagcccatc

SEQ ID NO: 30895 - DNA, 33 bp, Homo sapien
cacacaacaatgtccactacagaggatttattt

SEQ ID NO: 30896 - DNA, 33 bp, Homo sapien
cacacaacaatgtccagtacagaggatttattt

SEQ ID NO: 30897 - DNA, 33 bp, Homo sapien
tggaacagagaagaaacggagtctggtatagta

SEQ ID NO: 30898 - DNA, 33 bp, Homo sapien
tggaacagagaagaaatggagtctggtatagta

SEQ ID NO: 30899 - DNA, 33 bp, Homo sapien
aatttagtataaagatgagagtcaaaaccacaa

SEQ ID NO: 30900 - DNA, 33 bp, Homo sapien
aatttagtataaagattagagtcaaaaccacaa

SEQ ID NO: 30901 - DNA, 33 bp, Homo sapien
ggagtcttaacacttaacaaattctatagatct

SEQ ID NO: 30902 - DNA, 33 bp, Homo sapien
ggagtcttaacacttaccaaattctatagatct

SEQ ID NO: 30903 - DNA, 33 bp, Homo sapien
atgtttgacagatgggcaagatcattgagaact

SEQ ID NO: 30904 - DNA, 33 bp, Homo sapien
atgtttgacagatggggaagatcattgagaact

SEQ ID NO: 30905 - DNA, 33 bp, Homo sapien
ctgggggacacagttacagttactgagtgccta

SEQ ID NO: 30906 - DNA, 33 bp, Homo sapien
ctgggggacacagttatagttactgagtgccta

SEQ ID NO: 30907 - DNA, 33 bp, Homo sapien
cgaatagcttagaggacgcacacttaaattata

SEQ ID NO: 30908 - DNA, 33 bp, Homo sapien
cgaatagcttagaggatgcacacttaaattata

SEQ ID NO: 30909 - DNA, 33 bp, Homo sapien
agattctgcactttgacggaaggagttagaaaa

SEQ ID NO: 30910 - DNA, 33 bp, Homo sapien
agattctgcactttgatggaaggagttagaaaa

SEQ ID NO: 30911 - DNA, 33 bp, Homo sapien
ccacccccttgttatgcagagaaactttcctct

SEQ ID NO: 30912 - DNA, 33 bp, Homo sapien
ccacccccttgttatggagagaaactttcctct

SEQ ID NO: 30913 - DNA, 33 bp, Homo sapien
ttacacacattatctgaagagtgaggttttcag

SEQ ID NO: 30914 - DNA, 33 bp, Homo sapien
ttacacacattatctggagagtgaggttttcag

SEQ ID NO: 30915 - DNA, 33 bp, Homo sapien
aaactgcgaacctcagacatttgactgctagtg

SEQ ID NO: 30916 - DNA, 33 bp, Homo sapien
aaactgcgaacctcaggcatttgactgctagtg

SEQ ID NO: 30917 - DNA, 33 bp, Homo sapien
gggcgttagtagatcaatgaaattttctcatca

SEQ ID NO: 30918 - DNA, 33 bp, Homo sapien
gggcgttagtagatcagtgaaattttctcatca

SEQ ID NO: 30919 - DNA, 33 bp, Homo sapien
ttcctcttctgctgaacgagatcattaataact

SEQ ID NO: 30920 - DNA, 33 bp, Homo sapien
ttcctcttctgctgaatgagatcattaataact

SEQ ID NO: 30921 - DNA, 33 bp, Homo sapien
ggctcccaccatccaccatcaacttatttactt

SEQ ID NO: 30922 - DNA, 33 bp, Homo sapien
ggctcccaccatccactatcaacttatttactt

SEQ ID NO: 30923 - DNA, 33 bp, Homo sapien
cagaagttaaaatgtgaacagtagtgatccaac

SEQ ID NO: 30924 - DNA, 33 bp, Homo sapien
cagaagttaaaatgtgtacagtagtgatccaac

SEQ ID NO: 30925 - DNA, 33 bp, Homo sapien
tggataccttgcattgcaattcttgcttcccaa

SEQ ID NO: 30926 - DNA, 33 bp, Homo sapien
tggataccttgcattgtaattcttgcttcccaa

SEQ ID NO: 30927 - DNA, 33 bp, Homo sapien
agaagtggaaagaaaacgttgctacgagttcag

SEQ ID NO: 30928 - DNA, 33 bp, Homo sapien
agaagtggaaagaaaatgttgctacgagttcag

SEQ ID NO: 30929 - DNA, 33 bp, Homo sapien
aaaaacctgtcatgaaaagaaataagctgaatt

SEQ ID NO: 30930 - DNA, 33 bp, Homo sapien
aaaaacctgtcatgaagagaaataagctgaatt

SEQ ID NO: 30931 - DNA, 33 bp, Homo sapien
gcagagttgggaccagaaatctagtcatgattt

SEQ ID NO: 30932 - DNA, 33 bp, Homo sapien
gcagagttgggaccagtaatctagtcatgattt

SEQ ID NO: 30933 - DNA, 33 bp, Homo sapien
agagttagaaattcagacaacttgaagacttga

SEQ ID NO: 30934 - DNA, 33 bp, Homo sapien
agagttagaaattcaggcaacttgaagacttga

SEQ ID NO: 30935 - DNA, 33 bp, Homo sapien
actcaaaccactactaattccaggtcagactta

SEQ ID NO: 30936 - DNA, 33 bp, Homo sapien
actcaaaccactactacttccaggtcagactta

SEQ ID NO: 30937 - DNA, 33 bp, Homo sapien
ttaatagtcaacaccaatatctttagttctttt

SEQ ID NO: 30938 - DNA, 33 bp, Homo sapien
ttaatagtcaacaccagtatctttagttctttt

SEQ ID NO: 30939 - DNA, 33 bp, Homo sapien
agcagtagcaaaaatgaaacaagcatggacttt

SEQ ID NO: 30940 - DNA, 33 bp, Homo sapien
agcagtagcaaaaatggaacaagcatggacttt

SEQ ID NO: 30941 - DNA, 33 bp, Homo sapien
atgaggaagggcataccagtcagagagaacagc

SEQ ID NO: 30942 - DNA, 33 bp, Homo sapien
atgaggaagggcatacgagtcagagagaacagc

SEQ ID NO: 30943 - DNA, 33 bp, Homo sapien
cacattcagttcataaaacaacctaatctctaa

SEQ ID NO: 30944 - DNA, 33 bp, Homo sapien
cacattcagttcataacacaacctaatctctaa

SEQ ID NO: 30945 - DNA, 33 bp, Homo sapien
atttgatggtatctcactcttgaaaatgggcca

SEQ ID NO: 30946 - DNA, 33 bp, Homo sapien
atttgatggtatctcattcttgaaaatgggcca

SEQ ID NO: 30947 - DNA, 33 bp, Homo sapien
gcacgttcacttgttacatggatggggttctaa

SEQ ID NO: 30948 - DNA, 33 bp, Homo sapien
gcacgttcacttgttatatggatggggttctaa

SEQ ID NO: 30949 - DNA, 33 bp, Homo sapien
gggatgtgggctcccccacaaggctcagaggac

SEQ ID NO: 30950 - DNA, 33 bp, Homo sapien
gggatgtgggctcccctacaaggctcagaggac

SEQ ID NO: 30951 - DNA, 33 bp, Homo sapien
gatgttatgatgtaccgcatggatgcaaggata

SEQ ID NO: 30952 - DNA, 33 bp, Homo sapien
gatgttatgatgtacctcatggatgcaaggata

SEQ ID NO: 30953 - DNA, 33 bp, Homo sapien
ggataaggaagaaggaagaagtctattagttgg

SEQ ID NO: 30954 - DNA, 33 bp, Homo sapien
ggataaggaagaaggacgaagtctattagttgg

SEQ ID NO: 30955 - DNA, 33 bp, Homo sapien
atgttactacaaacaaatatattgacaggcacc

SEQ ID NO: 30956 - DNA, 33 bp, Homo sapien
atgttactacaaacaagtatattgacaggcacc

SEQ ID NO: 30957 - DNA, 33 bp, Homo sapien
agggaggccatagggcactctgaagttgcttgt

SEQ ID NO: 30958 - DNA, 33 bp, Homo sapien
agggaggccatagggcgctctgaagttgcttgt

SEQ ID NO: 30959 - DNA, 33 bp, Homo sapien
catgtggagcctgtacacttgcccaagagtttg

SEQ ID NO: 30960 - DNA, 33 bp, Homo sapien
catgtggagcctgtacgcttgcccaagagtttg

SEQ ID NO: 30961 - DNA, 33 bp, Homo sapien
atcactgagaaggtaaagtttgaataaagtcta

SEQ ID NO: 30962 - DNA, 33 bp, Homo sapien
atcactgagaaggtaaggtttgaataaagtcta

SEQ ID NO: 30963 - DNA, 33 bp, Homo sapien
tgattctgcctctgacgcagtccctttctcctc

SEQ ID NO: 30964 - DNA, 33 bp, Homo sapien
tgattctgcctctgactcagtccctttctcctc

SEQ ID NO: 30965 - DNA, 33 bp, Homo sapien
gagtttcctggttagacggatgtggatggatgc

SEQ ID NO: 30966 - DNA, 33 bp, Homo sapien
gagtttcctggttagatggatgtggatggatgc

SEQ ID NO: 30967 - DNA, 33 bp, Homo sapien
ttcattttacaccttccctaaatattgatttag

SEQ ID NO: 30968 - DNA, 33 bp, Homo sapien
ttcattttacaccttcgctaaatattgatttag

SEQ ID NO: 30969 - DNA, 33 bp, Homo sapien
aagcagttcaatcccaatagtttcttgatctat

SEQ ID NO: 30970 - DNA, 33 bp, Homo sapien
aagcagttcaatcccagtagtttcttgatctat

SEQ ID NO: 30971 - DNA, 33 bp, Homo sapien
ctgttgtcattggctaactctctagagcatatg

SEQ ID NO: 30972 - DNA, 33 bp, Homo sapien
ctgttgtcattggctacctctctagagcatatg

SEQ ID NO: 30973 - DNA, 33 bp, Homo sapien
taactcattagggtagacggttgctgatggttg

SEQ ID NO: 30974 - DNA, 33 bp, Homo sapien
taactcattagggtagtcggttgctgatggttg

SEQ ID NO: 30975 - DNA, 33 bp, Homo sapien
ctaacagattccttaacgcttttggacttgatc

SEQ ID NO: 30976 - DNA, 33 bp, Homo sapien
ctaacagattccttaatgcttttggacttgatc

SEQ ID NO: 30977 - DNA, 33 bp, Homo sapien
cttggtgaggaaaggcaactaactgaagtcaac

SEQ ID NO: 30978 - DNA, 33 bp, Homo sapien
cttggtgaggaaaggcgactaactgaagtcaac

SEQ ID NO: 30979 - DNA, 33 bp, Homo sapien
gtgtgttcgatgggaccctgtgttcactaccag

SEQ ID NO: 30980 - DNA, 33 bp, Homo sapien
gtgtgttcgatgggactctgtgttcactaccag

SEQ ID NO: 30981 - DNA, 33 bp, Homo sapien
gtttttgagactcatgaaaatggctgcacataa

SEQ ID NO: 30982 - DNA, 33 bp, Homo sapien
gtttttgagactcatgcaaatggctgcacataa

SEQ ID NO: 30983 - DNA, 33 bp, Homo sapien
gaggttaggcaaacacaaccaccttaatccagc

SEQ ID NO: 30984 - DNA, 33 bp, Homo sapien
gaggttaggcaaacaccaccaccttaatccagc

SEQ ID NO: 30985 - DNA, 33 bp, Homo sapien
tcttccagttttctcacggttagtggatggtcc

SEQ ID NO: 30986 - DNA, 33 bp, Homo sapien
tcttccagttttctcatggttagtggatggtcc

SEQ ID NO: 30987 - DNA, 33 bp, Homo sapien
agctgagattggtacactgcaaatgtgatgtgt

SEQ ID NO: 30988 - DNA, 33 bp, Homo sapien
agctgagattggtacagtgcaaatgtgatgtgt

SEQ ID NO: 30989 - DNA, 33 bp, Homo sapien
tgtctctcactcctcactctcattaaacccatt

SEQ ID NO: 30990 - DNA, 33 bp, Homo sapien
tgtctctcactcctcattctcattaaacccatt

SEQ ID NO: 30991 - DNA, 33 bp, Homo sapien
ttacataaagacacaaacaatgtcaaagtttta

SEQ ID NO: 30992 - DNA, 33 bp, Homo sapien
ttacataaagacacaatcaatgtcaaagtttta

SEQ ID NO: 30993 - DNA, 33 bp, Homo sapien
tctgaatcctgtctccacaaactgctatgtgac

SEQ ID NO: 30994 - DNA, 33 bp, Homo sapien
tctgaatcctgtctccccaaactgctatgtgac

SEQ ID NO: 30995 - DNA, 33 bp, Homo sapien
tgagagtgtgggagaaatagcagcaggctaggc

SEQ ID NO: 30996 - DNA, 33 bp, Homo sapien
tgagagtgtgggagaattagcagcaggctaggc

SEQ ID NO: 30997 - DNA, 33 bp, Homo sapien
cctttaaatcaattcaatcaatctcctctgcag

SEQ ID NO: 30998 - DNA, 33 bp, Homo sapien
cctttaaatcaattcattcaatctcctctgcag

SEQ ID NO: 30999 - DNA, 33 bp, Homo sapien
gcatcccccaggaataggccctctacacaatca

SEQ ID NO: 31000 - DNA, 33 bp, Homo sapien
gcatcccccaggaatatgccctctacacaatca

SEQ ID NO: 31001 - DNA, 33 bp, Homo sapien
ctttccattactaataataacggttgctaacaa

SEQ ID NO: 31002 - DNA, 33 bp, Homo sapien
ctttccattactaatattaacggttgctaacaa

SEQ ID NO: 31003 - DNA, 33 bp, Homo sapien
tcctcaaagtacagacacaaggacagcttgttc

SEQ ID NO: 31004 - DNA, 33 bp, Homo sapien
tcctcaaagtacagacgcaaggacagcttgttc

SEQ ID NO: 31005 - DNA, 33 bp, Homo sapien
cactcaggtgcctttacgtagagccctgaccca

SEQ ID NO: 31006 - DNA, 33 bp, Homo sapien
cactcaggtgcctttatgtagagccctgaccca

SEQ ID NO: 31007 - DNA, 33 bp, Homo sapien
ttaaaaaggcttcagagtctaattaatggcatt

SEQ ID NO: 31008 - DNA, 33 bp, Homo sapien
ttaaaaaggcttcagattctaattaatggcatt

SEQ ID NO: 31009 - DNA, 33 bp, Homo sapien
ggtagatctgctgattaaatatgtcctgattaa

SEQ ID NO: 31010 - DNA, 33 bp, Homo sapien
ggtagatctgctgattgaatatgtcctgattaa

SEQ ID NO: 31011 - DNA, 33 bp, Homo sapien
tcacatggctagaaaccgtcacaggtggaattt

SEQ ID NO: 31012 - DNA, 33 bp, Homo sapien
tcacatggctagaaactgtcacaggtggaattt

SEQ ID NO: 31013 - DNA, 33 bp, Homo sapien
agaggatgcacataaaaaacttagtagaattgc

SEQ ID NO: 31014 - DNA, 33 bp, Homo sapien
agaggatgcacataaagaacttagtagaattgc

SEQ ID NO: 31015 - DNA, 33 bp, Homo sapien
gaatgacaacagagaaccagagaaagcctctaa

SEQ ID NO: 31016 - DNA, 33 bp, Homo sapien
gaatgacaacagagaatcagagaaagcctctaa

SEQ ID NO: 31017 - DNA, 33 bp, Homo sapien
ggaaggcttgacaaagaaggaaaaaatattcca

SEQ ID NO: 31018 - DNA, 33 bp, Homo sapien
ggaaggcttgacaaaggaggaaaaaatattcca

SEQ ID NO: 31019 - DNA, 33 bp, Homo sapien
agtcccttgtggctcaatatacaccagagtctt

SEQ ID NO: 31020 - DNA, 33 bp, Homo sapien
agtcccttgtggctcagtatacaccagagtctt

SEQ ID NO: 31021 - DNA, 33 bp, Homo sapien
tcagctcaccagcataatatctggccacacgtc

SEQ ID NO: 31022 - DNA, 33 bp, Homo sapien
tcagctcaccagcatagtatctggccacacgtc

SEQ ID NO: 31023 - DNA, 33 bp, Homo sapien
gataaatattctgataaggcaataacaaatatt

SEQ ID NO: 31024 - DNA, 33 bp, Homo sapien
gataaatattctgatagggcaataacaaatatt

SEQ ID NO: 31025 - DNA, 33 bp, Homo sapien
acactgttttgtgctacagatgtacaactaata

SEQ ID NO: 31026 - DNA, 33 bp, Homo sapien
acactgttttgtgctatagatgtacaactaata

SEQ ID NO: 31027 - DNA, 33 bp, Homo sapien
tactaattgtattttaaatgaatcctagctgct

SEQ ID NO: 31028 - DNA, 33 bp, Homo sapien
tactaattgtattttacatgaatcctagctgct

SEQ ID NO: 31029 - DNA, 33 bp, Homo sapien
atattagctttatataacgatttgccctcaatg

SEQ ID NO: 31030 - DNA, 33 bp, Homo sapien
atattagctttatatagcgatttgccctcaatg

SEQ ID NO: 31031 - DNA, 33 bp, Homo sapien
atttggtgtatgtgtacgttcaccaaatgtgtg

SEQ ID NO: 31032 - DNA, 33 bp, Homo sapien
atttggtgtatgtgtatgttcaccaaatgtgtg

SEQ ID NO: 31033 - DNA, 33 bp, Homo sapien
tgaaataaatgaaacacaaaatgatggcaagac

SEQ ID NO: 31034 - DNA, 33 bp, Homo sapien
tgaaataaatgaaacagaaaatgatggcaagac

SEQ ID NO: 31035 - DNA, 33 bp, Homo sapien
ctttgaaagactgacacagtaaagaaggcagat

SEQ ID NO: 31036 - DNA, 33 bp, Homo sapien
ctttgaaagactgacagagtaaagaaggcagat

SEQ ID NO: 31037 - DNA, 33 bp, Homo sapien
accaaattgtgattgacatggaaaatcattttt

SEQ ID NO: 31038 - DNA, 33 bp, Homo sapien
accaaattgtgattgatatggaaaatcattttt

SEQ ID NO: 31039 - DNA, 33 bp, Homo sapien
atcagtaaggcatccaataggctgttagtagat

SEQ ID NO: 31040 - DNA, 33 bp, Homo sapien
atcagtaaggcatccagtaggctgttagtagat

SEQ ID NO: 31041 - DNA, 33 bp, Homo sapien
tcctttccacatcaacaagactgctaggggagg

SEQ ID NO: 31042 - DNA, 33 bp, Homo sapien
tcctttccacatcaacgagactgctaggggagg

SEQ ID NO: 31043 - DNA, 33 bp, Homo sapien
tttatagagagtaaaacgagctcttcttaacat

SEQ ID NO: 31044 - DNA, 33 bp, Homo sapien
tttatagagagtaaaatgagctcttcttaacat

SEQ ID NO: 31045 - DNA, 33 bp, Homo sapien
ggatacattttattgcacttgcagagtattttt

SEQ ID NO: 31046 - DNA, 33 bp, Homo sapien
ggatacattttattgcgcttgcagagtattttt

SEQ ID NO: 31047 - DNA, 33 bp, Homo sapien
gaagtgaggatagtgacgaactggggtgttgac

SEQ ID NO: 31048 - DNA, 33 bp, Homo sapien
gaagtgaggatagtgatgaactggggtgttgac

SEQ ID NO: 31049 - DNA, 33 bp, Homo sapien
gttccttgtaggccacaaacatgacacctctga

SEQ ID NO: 31050 - DNA, 33 bp, Homo sapien
gttccttgtaggccaccaacatgacacctctga

SEQ ID NO: 31051 - DNA, 33 bp, Homo sapien
tatcagtttccctccaatgatattattcccaaa

SEQ ID NO: 31052 - DNA, 33 bp, Homo sapien
tatcagtttccctccagtgatattattcccaaa

SEQ ID NO: 31053 - DNA, 33 bp, Homo sapien
cacccgagtggctgaacaagttgtccctgtgtc

SEQ ID NO: 31054 - DNA, 33 bp, Homo sapien
cacccgagtggctgaataagttgtccctgtgtc

SEQ ID NO: 31055 - DNA, 33 bp, Homo sapien
gttcttctgtctttccaccctgtcatttgtcac

SEQ ID NO: 31056 - DNA, 33 bp, Homo sapien
gttcttctgtctttccgccctgtcatttgtcac

SEQ ID NO: 31057 - DNA, 33 bp, Homo sapien
tcagcaaatatgttacaggaaaatcagtcatgt

SEQ ID NO: 31058 - DNA, 33 bp, Homo sapien
tcagcaaatatgttacgggaaaatcagtcatgt

SEQ ID NO: 31059 - DNA, 33 bp, Homo sapien
catctcaccaggataccgctcttttgtctgctc

SEQ ID NO: 31060 - DNA, 33 bp, Homo sapien
catctcaccaggatactgctcttttgtctgctc

SEQ ID NO: 31061 - DNA, 33 bp, Homo sapien
gggaattcagaggtgacaagttgaaggacagtg

SEQ ID NO: 31062 - DNA, 33 bp, Homo sapien
gggaattcagaggtgagaagttgaaggacagtg

SEQ ID NO: 31063 - DNA, 33 bp, Homo sapien
ctgcatagaacattaacaacaagctggctttct

SEQ ID NO: 31064 - DNA, 33 bp, Homo sapien
ctgcatagaacattaataacaagctggctttct

SEQ ID NO: 31065 - DNA, 33 bp, Homo sapien
agcaaactaccatttacattactactagctaca

SEQ ID NO: 31066 - DNA, 33 bp, Homo sapien
agcaaactaccatttatattactactagctaca

SEQ ID NO: 31067 - DNA, 33 bp, Homo sapien
acaggttctgaaaaaaagagtgttaagtgagtg

SEQ ID NO: 31068 - DNA, 33 bp, Homo sapien
acaggttctgaaaaaatgagtgttaagtgagtg

SEQ ID NO: 31069 - DNA, 33 bp, Homo sapien
actaatcagatatatgacagagagtcccatctc

SEQ ID NO: 31070 - DNA, 33 bp, Homo sapien
actaatcagatatatgtcagagagtcccatctc

SEQ ID NO: 31071 - DNA, 33 bp, Homo sapien
ccttcttaatctcatacggttagcttttgttgg

SEQ ID NO: 31072 - DNA, 33 bp, Homo sapien
ccttcttaatctcatatggttagcttttgttgg

SEQ ID NO: 31073 - DNA, 33 bp, Homo sapien
gaaagccaagcttgaaattaattgctggtacct

SEQ ID NO: 31074 - DNA, 33 bp, Homo sapien
gaaagccaagcttgaagttaattgctggtacct

SEQ ID NO: 31075 - DNA, 33 bp, Homo sapien
cactctagctgtagtagggggaggaccaatagt

SEQ ID NO: 31076 - DNA, 33 bp, Homo sapien
cactctagctgtagtatggggaggaccaatagt

SEQ ID NO: 31077 - DNA, 33 bp, Homo sapien
aatccctacttcttcactctagtatcagtctag

SEQ ID NO: 31078 - DNA, 33 bp, Homo sapien
aatccctacttcttcagtctagtatcagtctag

SEQ ID NO: 31079 - DNA, 33 bp, Homo sapien
tttatcaaatctcttacctcaacaggaagaaat

SEQ ID NO: 31080 - DNA, 33 bp, Homo sapien
tttatcaaatctcttatctcaacaggaagaaat

SEQ ID NO: 31081 - DNA, 33 bp, Homo sapien
gttttgtgattttagtaacgtttcttagccact

SEQ ID NO: 31082 - DNA, 33 bp, Homo sapien
gttttgtgattttagtcacgtttcttagccact

SEQ ID NO: 31083 - DNA, 33 bp, Homo sapien
ttcattatatctgtaccatagtttctcacatgc

SEQ ID NO: 31084 - DNA, 33 bp, Homo sapien
ttcattatatctgtactatagtttctcacatgc

SEQ ID NO: 31085 - DNA, 33 bp, Homo sapien
aaattgaagtttgctagcagcctttcagtcacg

SEQ ID NO: 31086 - DNA, 33 bp, Homo sapien
aaattgaagtttgctatcagcctttcagtcacg

SEQ ID NO: 31087 - DNA, 33 bp, Homo sapien
taccccaagacaaggccaatactaaccagacgc

SEQ ID NO: 31088 - DNA, 33 bp, Homo sapien
taccccaagacaaggctaatactaaccagacgc

SEQ ID NO: 31089 - DNA, 33 bp, Homo sapien
atactaataatgtgtgaagcatttttatccata

SEQ ID NO: 31090 - DNA, 33 bp, Homo sapien
atactaataatgtgtggagcatttttatccata

SEQ ID NO: 31091 - DNA, 33 bp, Homo sapien
gaatcatggaatatataaatctttccctttatc

SEQ ID NO: 31092 - DNA, 33 bp, Homo sapien
gaatcatggaatatatgaatctttccctttatc

SEQ ID NO: 31093 - DNA, 33 bp, Homo sapien
gggcttatttagcctcaagaatgctgcttgtaa

SEQ ID NO: 31094 - DNA, 33 bp, Homo sapien
gggcttatttagcctcgagaatgctgcttgtaa

SEQ ID NO: 31095 - DNA, 33 bp, Homo sapien
ttaacaatggcaaagagtacagaaacgagcctc

SEQ ID NO: 31096 - DNA, 33 bp, Homo sapien
ttaacaatggcaaagattacagaaacgagcctc

SEQ ID NO: 31097 - DNA, 33 bp, Homo sapien
gctcttccacagctcaaaaatctaagtacaaat

SEQ ID NO: 31098 - DNA, 33 bp, Homo sapien
gctcttccacagctcacaaatctaagtacaaat

SEQ ID NO: 31099 - DNA, 33 bp, Homo sapien
cagtccttttcttgcccaatgctgcaaaacatg

SEQ ID NO: 31100 - DNA, 33 bp, Homo sapien
cagtccttttcttgcctaatgctgcaaaacatg

SEQ ID NO: 31101 - DNA, 33 bp, Homo sapien
agtcacaagcatctgcaattccagtataattat

SEQ ID NO: 31102 - DNA, 33 bp, Homo sapien
agtcacaagcatctgcgattccagtataattat

SEQ ID NO: 31103 - DNA, 33 bp, Homo sapien
gacactatatagaagacggccttcaaactcaaa

SEQ ID NO: 31104 - DNA, 33 bp, Homo sapien
gacactatatagaagatggccttcaaactcaaa

SEQ ID NO: 31105 - DNA, 33 bp, Homo sapien
ttgaattccatactgacagatcttccctatttg

SEQ ID NO: 31106 - DNA, 33 bp, Homo sapien
ttgaattccatactgagagatcttccctatttg

SEQ ID NO: 31107 - DNA, 33 bp, Homo sapien
atgggcttttataggccgaacagggaagcaaag

SEQ ID NO: 31108 - DNA, 33 bp, Homo sapien
atgggcttttataggctgaacagggaagcaaag

SEQ ID NO: 31109 - DNA, 33 bp, Homo sapien
cctgactgcccacttcaatgactgaaagcagga

SEQ ID NO: 31110 - DNA, 33 bp, Homo sapien
cctgactgcccacttcgatgactgaaagcagga

SEQ ID NO: 31111 - DNA, 33 bp, Homo sapien
aatataataggacacaaaatcttttcacagaat

SEQ ID NO: 31112 - DNA, 33 bp, Homo sapien
aatataataggacacacaatcttttcacagaat

SEQ ID NO: 31113 - DNA, 33 bp, Homo sapien
cagaaaagaacccagcccagatttttcattaag

SEQ ID NO: 31114 - DNA, 33 bp, Homo sapien
cagaaaagaacccagcgcagatttttcattaag

SEQ ID NO: 31115 - DNA, 33 bp, Homo sapien
gttacataatctctcccgatacccattcatcaa

SEQ ID NO: 31116 - DNA, 33 bp, Homo sapien
gttacataatctctcctgatacccattcatcaa

SEQ ID NO: 31117 - DNA, 33 bp, Homo sapien
catctcaaaataaataaattgtcacttgtagtc

SEQ ID NO: 31118 - DNA, 33 bp, Homo sapien
catctcaaaataaatacattgtcacttgtagtc

SEQ ID NO: 31119 - DNA, 33 bp, Homo sapien
cctaataatttcattcaacaaaccaaaagctgg

SEQ ID NO: 31120 - DNA, 33 bp, Homo sapien
cctaataatttcattcgacaaaccaaaagctgg

SEQ ID NO: 31121 - DNA, 33 bp, Homo sapien
cttcaatacttaactcaagcatcctctctgacc

SEQ ID NO: 31122 - DNA, 33 bp, Homo sapien
cttcaatacttaactccagcatcctctctgacc

SEQ ID NO: 31123 - DNA, 33 bp, Homo sapien
tacatgctgcaaaaacatctctcctggagtccc

SEQ ID NO: 31124 - DNA, 33 bp, Homo sapien
tacatgctgcaaaaacctctctcctggagtccc

SEQ ID NO: 31125 - DNA, 33 bp, Homo sapien
ttagattttaaaagtaagtctcaaggaatcttt

SEQ ID NO: 31126 - DNA, 33 bp, Homo sapien
ttagattttaaaagtacgtctcaaggaatcttt

SEQ ID NO: 31127 - DNA, 33 bp, Homo sapien
gtgatccaggtcttgacgccacactccattttt

SEQ ID NO: 31128 - DNA, 33 bp, Homo sapien
gtgatccaggtcttgatgccacactccattttt

SEQ ID NO: 31129 - DNA, 33 bp, Homo sapien
tcaggttggaggagaacgtacaaatcaaaaatg

SEQ ID NO: 31130 - DNA, 33 bp, Homo sapien
tcaggttggaggagaatgtacaaatcaaaaatg

SEQ ID NO: 31131 - DNA, 33 bp, Homo sapien
agatgctggaaatacaatagtgaacaggtagat

SEQ ID NO: 31132 - DNA, 33 bp, Homo sapien
agatgctggaaatacactagtgaacaggtagat

SEQ ID NO: 31133 - DNA, 33 bp, Homo sapien
tttggtccaaccttaacgtctcatcatcagatt

SEQ ID NO: 31134 - DNA, 33 bp, Homo sapien
tttggtccaaccttaatgtctcatcatcagatt

SEQ ID NO: 31135 - DNA, 33 bp, Homo sapien
ttctagtcagttcttaacattcactaatacttc

SEQ ID NO: 31136 - DNA, 33 bp, Homo sapien
ttctagtcagttcttagcattcactaatacttc

SEQ ID NO: 31137 - DNA, 33 bp, Homo sapien
aacttgctgaaacctaagattttaacttatacg

SEQ ID NO: 31138 - DNA, 33 bp, Homo sapien
aacttgctgaaacctacgattttaacttatacg

SEQ ID NO: 31139 - DNA, 33 bp, Homo sapien
gtaaatcattatgatacgttggtgatctgaggc

SEQ ID NO: 31140 - DNA, 33 bp, Homo sapien
gtaaatcattatgatatgttggtgatctgaggc

SEQ ID NO: 31141 - DNA, 33 bp, Homo sapien
gagcaaagatgtctctaaaccaatccccaagtg

SEQ ID NO: 31142 - DNA, 33 bp, Homo sapien
gagcaaagatgtctctcaaccaatccccaagtg

SEQ ID NO: 31143 - DNA, 33 bp, Homo sapien
aagattgacttaattacatacgtaaagcattta

SEQ ID NO: 31144 - DNA, 33 bp, Homo sapien
aagattgacttaattatatacgtaaagcattta

SEQ ID NO: 31145 - DNA, 33 bp, Homo sapien
ctgagttcacgaatgccatttcttagtctttcc

SEQ ID NO: 31146 - DNA, 33 bp, Homo sapien
ctgagttcacgaatgctatttcttagtctttcc

SEQ ID NO: 31147 - DNA, 33 bp, Homo sapien
ggatctgtgagaagaacgactttttgccaagtg

SEQ ID NO: 31148 - DNA, 33 bp, Homo sapien
ggatctgtgagaagaatgactttttgccaagtg

SEQ ID NO: 31149 - DNA, 33 bp, Homo sapien
attcagaaataacaaaaatgaagccatgattcc

SEQ ID NO: 31150 - DNA, 33 bp, Homo sapien
attcagaaataacaaagatgaagccatgattcc

SEQ ID NO: 31151 - DNA, 33 bp, Homo sapien
gggaccgggaatttggcaacctgctaccattaa

SEQ ID NO: 31152 - DNA, 33 bp, Homo sapien
gggaccgggaatttgggaacctgctaccattaa

SEQ ID NO: 31153 - DNA, 33 bp, Homo sapien
tttgcattttgtttcacatggttgccaaacaga

SEQ ID NO: 31154 - DNA, 33 bp, Homo sapien
tttgcattttgtttcatatggttgccaaacaga

SEQ ID NO: 31155 - DNA, 33 bp, Homo sapien
agaataagcatctctccaactcagaaacagaat

SEQ ID NO: 31156 - DNA, 33 bp, Homo sapien
agaataagcatctctctaactcagaaacagaat

SEQ ID NO: 31157 - DNA, 33 bp, Homo sapien
ttgtctgtaatgagtaagattgccagtgtaaat

SEQ ID NO: 31158 - DNA, 33 bp, Homo sapien
ttgtctgtaatgagtaggattgccagtgtaaat

SEQ ID NO: 31159 - DNA, 33 bp, Homo sapien
ccatcctgaattgaaccaataggataggaaagg

SEQ ID NO: 31160 - DNA, 33 bp, Homo sapien
ccatcctgaattgaactaataggataggaaagg

SEQ ID NO: 31161 - DNA, 33 bp, Homo sapien
tctaaacaaatgaagacatttgaatgattgtat

SEQ ID NO: 31162 - DNA, 33 bp, Homo sapien
tctaaacaaatgaagatatttgaatgattgtat

SEQ ID NO: 31163 - DNA, 33 bp, Homo sapien
aggtttgggaatgttgcagtcaaatccataccc

SEQ ID NO: 31164 - DNA, 33 bp, Homo sapien
aggtttgggaatgttgtagtcaaatccataccc

SEQ ID NO: 31165 - DNA, 33 bp, Homo sapien
gcaagccacacttgataagcacattctgggtat

SEQ ID NO: 31166 - DNA, 33 bp, Homo sapien
gcaagccacacttgatgagcacattctgggtat

SEQ ID NO: 31167 - DNA, 33 bp, Homo sapien
tcaataaaggaaaaaaactgaaagcatagttta

SEQ ID NO: 31168 - DNA, 33 bp, Homo sapien
tcaataaaggaaaaaagctgaaagcatagttta

SEQ ID NO: 31169 - DNA, 33 bp, Homo sapien
gggaggacatctcaccagcgggggacagcgctg

SEQ ID NO: 31170 - DNA, 33 bp, Homo sapien
gggaggacatctcacctgcgggggacagcgctg

SEQ ID NO: 31171 - DNA, 33 bp, Homo sapien
ctagcaaaatgggcaccggggcttcggtcttcg

SEQ ID NO: 31172 - DNA, 33 bp, Homo sapien
ctagcaaaatgggcactggggcttcggtcttcg

SEQ ID NO: 31173 - DNA, 33 bp, Homo sapien
ttaggcgtaaaattccacttaatgatgcaatta

SEQ ID NO: 31174 - DNA, 33 bp, Homo sapien
ttaggcgtaaaattccgcttaatgatgcaatta

SEQ ID NO: 31175 - DNA, 33 bp, Homo sapien
tatagactctgggtgacaatgatgtctcagtgt

SEQ ID NO: 31176 - DNA, 33 bp, Homo sapien
tatagactctgggtgataatgatgtctcagtgt

SEQ ID NO: 31177 - DNA, 33 bp, Homo sapien
tccatcttcaaagtcaataacgtagcatcttca

SEQ ID NO: 31178 - DNA, 33 bp, Homo sapien
tccatcttcaaagtcagtaacgtagcatcttca

SEQ ID NO: 31179 - DNA, 33 bp, Homo sapien
cattaataatcacaaacagaaatcactaaaatt

SEQ ID NO: 31180 - DNA, 33 bp, Homo sapien
cattaataatcacaaagagaaatcactaaaatt

SEQ ID NO: 31181 - DNA, 33 bp, Homo sapien
aactccagtcattaaaactgctttacagatagg

SEQ ID NO: 31182 - DNA, 33 bp, Homo sapien
aactccagtcattaaacctgctttacagatagg

SEQ ID NO: 31183 - DNA, 33 bp, Homo sapien
taaaatcacctttagaataccataagcaagatc

SEQ ID NO: 31184 - DNA, 33 bp, Homo sapien
taaaatcacctttagagtaccataagcaagatc

SEQ ID NO: 31185 - DNA, 33 bp, Homo sapien
taaaaaggaatgcaaaacgtataaaatcacctt

SEQ ID NO: 31186 - DNA, 33 bp, Homo sapien
taaaaaggaatgcaaatcgtataaaatcacctt

SEQ ID NO: 31187 - DNA, 33 bp, Homo sapien
gtggccagaatgggaaaaatttatgcagcaaaa

SEQ ID NO: 31188 - DNA, 33 bp, Homo sapien
gtggccagaatgggaacaatttatgcagcaaaa

SEQ ID NO: 31189 - DNA, 33 bp, Homo sapien
tgacttacctggtcagcccagattgttcaggtg

SEQ ID NO: 31190 - DNA, 33 bp, Homo sapien
tgacttacctggtcagtccagattgttcaggtg

SEQ ID NO: 31191 - DNA, 33 bp, Homo sapien
ttcagtggcctcccacacaagacttcctcttta

SEQ ID NO: 31192 - DNA, 33 bp, Homo sapien
ttcagtggcctcccactcaagacttcctcttta

SEQ ID NO: 31193 - DNA, 33 bp, Homo sapien
gaaacatcagtaaacacaccaaatgcctacatt

SEQ ID NO: 31194 - DNA, 33 bp, Homo sapien
gaaacatcagtaaacagaccaaatgcctacatt

SEQ ID NO: 31195 - DNA, 33 bp, Homo sapien
caaggcagacctcttaaaagtctcgcttggaac

SEQ ID NO: 31196 - DNA, 33 bp, Homo sapien
caaggcagacctcttagaagtctcgcttggaac

SEQ ID NO: 31197 - DNA, 33 bp, Homo sapien
ttcataagacttttccacagagttactgccaga

SEQ ID NO: 31198 - DNA, 33 bp, Homo sapien
ttcataagacttttccgcagagttactgccaga

SEQ ID NO: 31199 - DNA, 33 bp, Homo sapien
gtatctaccatgagcaatgaaatcagcaatgca

SEQ ID NO: 31200 - DNA, 33 bp, Homo sapien
gtatctaccatgagcagtgaaatcagcaatgca

SEQ ID NO: 31201 - DNA, 33 bp, Homo sapien
tctccttcgcctagaacagcagtccattctttt

SEQ ID NO: 31202 - DNA, 33 bp, Homo sapien
tctccttcgcctagaagagcagtccattctttt

SEQ ID NO: 31203 - DNA, 33 bp, Homo sapien
aagatgccaagaaacacgcagagtggggtagaa

SEQ ID NO: 31204 - DNA, 33 bp, Homo sapien
aagatgccaagaaacatgcagagtggggtagaa

SEQ ID NO: 31205 - DNA, 33 bp, Homo sapien
tgtctttacctggtagaaaattatattgtgctt

SEQ ID NO: 31206 - DNA, 33 bp, Homo sapien
tgtctttacctggtaggaaattatattgtgctt

SEQ ID NO: 31207 - DNA, 33 bp, Homo sapien
gcttcatgcattctacccacaaagatttattga

SEQ ID NO: 31208 - DNA, 33 bp, Homo sapien
gcttcatgcattctactcacaaagatttattga

SEQ ID NO: 31209 - DNA, 33 bp, Homo sapien
agtgggtaagtatcacccaaccctaggctgatt

SEQ ID NO: 31210 - DNA, 33 bp, Homo sapien
agtgggtaagtatcactcaaccctaggctgatt

SEQ ID NO: 31211 - DNA, 33 bp, Homo sapien
atatttccatcttctgaatttgttttttaagct

SEQ ID NO: 31212 - DNA, 33 bp, Homo sapien
atatttccatcttctggatttgttttttaagct

SEQ ID NO: 31213 - DNA, 33 bp, Homo sapien
tggggtgtatgaaaaacaaactagcatctgtcc

SEQ ID NO: 31214 - DNA, 33 bp, Homo sapien
tggggtgtatgaaaaataaactagcatctgtcc

SEQ ID NO: 31215 - DNA, 33 bp, Homo sapien
ataagaaaaactacaacatactgacaaaatgaa

SEQ ID NO: 31216 - DNA, 33 bp, Homo sapien
ataagaaaaactacaatatactgacaaaatgaa

SEQ ID NO: 31217 - DNA, 33 bp, Homo sapien
gtatgcttgctcctaaattaacagatggtaagc

SEQ ID NO: 31218 - DNA, 33 bp, Homo sapien
gtatgcttgctcctaagttaacagatggtaagc

SEQ ID NO: 31219 - DNA, 33 bp, Homo sapien
gacctcaccttcattaagtctgctcaaccaatt

SEQ ID NO: 31220 - DNA, 33 bp, Homo sapien
gacctcaccttcattatgtctgctcaaccaatt

SEQ ID NO: 31221 - DNA, 33 bp, Homo sapien
actgagcacacgctcgaccccggttggatggac

SEQ ID NO: 31222 - DNA, 33 bp, Homo sapien
actgagcacacgctcggccccggttggatggac

SEQ ID NO: 31223 - DNA, 33 bp, Homo sapien
agcagttaaacataagacctccccacgcacctc

SEQ ID NO: 31224 - DNA, 33 bp, Homo sapien
agcagttaaacataagtcctccccacgcacctc

SEQ ID NO: 31225 - DNA, 33 bp, Homo sapien
aaatcagtgcaaatcacggtacagttaaaaaac

SEQ ID NO: 31226 - DNA, 33 bp, Homo sapien
aaatcagtgcaaatcatggtacagttaaaaaac

SEQ ID NO: 31227 - DNA, 33 bp, Homo sapien
atctcttatacattcccccagggcactgttcta

SEQ ID NO: 31228 - DNA, 33 bp, Homo sapien
atctcttatacattcctccagggcactgttcta

SEQ ID NO: 31229 - DNA, 33 bp, Homo sapien
agaaggacagcagaggaagtaaccaacactatc

SEQ ID NO: 31230 - DNA, 33 bp, Homo sapien
agaaggacagcagagggagtaaccaacactatc

SEQ ID NO: 31231 - DNA, 33 bp, Homo sapien
tgactaaaggaagctacgagagaaccccacaac

SEQ ID NO: 31232 - DNA, 33 bp, Homo sapien
tgactaaaggaagctatgagagaaccccacaac

SEQ ID NO: 31233 - DNA, 33 bp, Homo sapien
gcaagctcaaatacaacgaccacctgcgctaac

SEQ ID NO: 31234 - DNA, 33 bp, Homo sapien
gcaagctcaaatacaaggaccacctgcgctaac

SEQ ID NO: 31235 - DNA, 33 bp, Homo sapien
ataactgtcataggcaataaatgacacatattg

SEQ ID NO: 31236 - DNA, 33 bp, Homo sapien
ataactgtcataggcagtaaatgacacatattg

SEQ ID NO: 31237 - DNA, 33 bp, Homo sapien
cttttgtgggaggtgaatacagcttgtatctcc

SEQ ID NO: 31238 - DNA, 33 bp, Homo sapien
cttttgtgggaggtgagtacagcttgtatctcc

SEQ ID NO: 31239 - DNA, 33 bp, Homo sapien
tgttttctcctttagaccacaccattaaattgc

SEQ ID NO: 31240 - DNA, 33 bp, Homo sapien
tgttttctcctttagatcacaccattaaattgc

SEQ ID NO: 31241 - DNA, 33 bp, Homo sapien
catgcaaactcaggtacagcctccagaacaacc

SEQ ID NO: 31242 - DNA, 33 bp, Homo sapien
catgcaaactcaggtagagcctccagaacaacc

SEQ ID NO: 31243 - DNA, 33 bp, Homo sapien
gtggacttcattgtcaaatatctaagagagact

SEQ ID NO: 31244 - DNA, 33 bp, Homo sapien
gtggacttcattgtcagatatctaagagagact

SEQ ID NO: 31245 - DNA, 33 bp, Homo sapien
ctaccaataattacccaccatgaggcagacaga

SEQ ID NO: 31246 - DNA, 33 bp, Homo sapien
ctaccaataattacccgccatgaggcagacaga

SEQ ID NO: 31247 - DNA, 33 bp, Homo sapien
cattttctgatgctataaaagagaataccagag

SEQ ID NO: 31248 - DNA, 33 bp, Homo sapien
cattttctgatgctatgaaagagaataccagag

SEQ ID NO: 31249 - DNA, 33 bp, Homo sapien
gaaaaatggaatgagaaagggaatatggtacca

SEQ ID NO: 31250 - DNA, 33 bp, Homo sapien
gaaaaatggaatgagagagggaatatggtacca

SEQ ID NO: 31251 - DNA, 33 bp, Homo sapien
actaccagacagaacacggggtaggagagggag

SEQ ID NO: 31252 - DNA, 33 bp, Homo sapien
actaccagacagaacatggggtaggagagggag

SEQ ID NO: 31253 - DNA, 33 bp, Homo sapien
tgcgtgactaagttctaaccactagaatgtaag

SEQ ID NO: 31254 - DNA, 33 bp, Homo sapien
tgcgtgactaagttcttaccactagaatgtaag

SEQ ID NO: 31255 - DNA, 33 bp, Homo sapien
cttggatgggaagatgaacccatactctgatca

SEQ ID NO: 31256 - DNA, 33 bp, Homo sapien
cttggatgggaagatgcacccatactctgatca

SEQ ID NO: 31257 - DNA, 33 bp, Homo sapien
ggctcatctctctgccgctcttcagtagtgtgt

SEQ ID NO: 31258 - DNA, 33 bp, Homo sapien
ggctcatctctctgcctctcttcagtagtgtgt

SEQ ID NO: 31259 - DNA, 33 bp, Homo sapien
ctgttcagcatatgtaagtcaaagacagaagtg

SEQ ID NO: 31260 - DNA, 33 bp, Homo sapien
ctgttcagcatatgtacgtcaaagacagaagtg

SEQ ID NO: 31261 - DNA, 33 bp, Homo sapien
cttgtctaaacctttcaattgcatttatcaact

SEQ ID NO: 31262 - DNA, 33 bp, Homo sapien
cttgtctaaacctttcgattgcatttatcaact

SEQ ID NO: 31263 - DNA, 33 bp, Homo sapien
gatctggacgtctaaccatttggacaacactta

SEQ ID NO: 31264 - DNA, 33 bp, Homo sapien
gatctggacgtctaactatttggacaacactta

SEQ ID NO: 31265 - DNA, 33 bp, Homo sapien
agcaactcttctcagcaatacaaaagtccatgc

SEQ ID NO: 31266 - DNA, 33 bp, Homo sapien
agcaactcttctcagcgatacaaaagtccatgc

SEQ ID NO: 31267 - DNA, 33 bp, Homo sapien
aggctttactttcacaactactttacctacctt

SEQ ID NO: 31268 - DNA, 33 bp, Homo sapien
aggctttactttcacatctactttacctacctt

SEQ ID NO: 31269 - DNA, 33 bp, Homo sapien
gtgcccggctgaacccactatttttatcactga

SEQ ID NO: 31270 - DNA, 33 bp, Homo sapien
gtgcccggctgaacccgctatttttatcactga

SEQ ID NO: 31271 - DNA, 33 bp, Homo sapien
aagtagatcgctgggacagaatagagtccaaga

SEQ ID NO: 31272 - DNA, 33 bp, Homo sapien
aagtagatcgctgggatagaatagagtccaaga

SEQ ID NO: 31273 - DNA, 33 bp, Homo sapien
acaatcacaaacataacgagaaatttgccttaa

SEQ ID NO: 31274 - DNA, 33 bp, Homo sapien
acaatcacaaacataatgagaaatttgccttaa

SEQ ID NO: 31275 - DNA, 33 bp, Homo sapien
tatcaaagaccattaactcagcatatttttgtt

SEQ ID NO: 31276 - DNA, 33 bp, Homo sapien
tatcaaagaccattaattcagcatatttttgtt

SEQ ID NO: 31277 - DNA, 33 bp, Homo sapien
acatatcatgtagttacctagtgtttcccaaaa

SEQ ID NO: 31278 - DNA, 33 bp, Homo sapien
acatatcatgtagttatctagtgtttcccaaaa

SEQ ID NO: 31279 - DNA, 33 bp, Homo sapien
acacagtgctatgtccaaaaggcgtgattaata

SEQ ID NO: 31280 - DNA, 33 bp, Homo sapien
acacagtgctatgtccgaaaggcgtgattaata

SEQ ID NO: 31281 - DNA, 33 bp, Homo sapien
cctcacttgtgagcccactatgctaggtctaca

SEQ ID NO: 31282 - DNA, 33 bp, Homo sapien
cctcacttgtgagcccgctatgctaggtctaca

SEQ ID NO: 31283 - DNA, 33 bp, Homo sapien
cataggccgtgggagacgagtaatttactgctg

SEQ ID NO: 31284 - DNA, 33 bp, Homo sapien
cataggccgtgggagatgagtaatttactgctg

SEQ ID NO: 31285 - DNA, 33 bp, Homo sapien
aataaaggcaatgtacactgtttgaggtttgag

SEQ ID NO: 31286 - DNA, 33 bp, Homo sapien
aataaaggcaatgtaccctgtttgaggtttgag

SEQ ID NO: 31287 - DNA, 33 bp, Homo sapien
ctcatgcttaatgagacaacctacttcaacact

SEQ ID NO: 31288 - DNA, 33 bp, Homo sapien
ctcatgcttaatgagataacctacttcaacact

SEQ ID NO: 31289 - DNA, 33 bp, Homo sapien
atagagcaggtgaggagaataaattccatgagg

SEQ ID NO: 31290 - DNA, 33 bp, Homo sapien
atagagcaggtgaggataataaattccatgagg

SEQ ID NO: 31291 - DNA, 33 bp, Homo sapien
aactagatacaaacaccgtgccttacactacca

SEQ ID NO: 31292 - DNA, 33 bp, Homo sapien
aactagatacaaacactgtgccttacactacca

SEQ ID NO: 31293 - DNA, 33 bp, Homo sapien
taaatattttccataccctacacaagccttaaa

SEQ ID NO: 31294 - DNA, 33 bp, Homo sapien
taaatattttccatacgctacacaagccttaaa

SEQ ID NO: 31295 - DNA, 33 bp, Homo sapien
ttcaatgaaaccataaactgcaatggcttatgt

SEQ ID NO: 31296 - DNA, 33 bp, Homo sapien
ttcaatgaaaccataacctgcaatggcttatgt

SEQ ID NO: 31297 - DNA, 33 bp, Homo sapien
tccaaaaccagactgacgttctctcccccaact

SEQ ID NO: 31298 - DNA, 33 bp, Homo sapien
tccaaaaccagactgatgttctctcccccaact

SEQ ID NO: 31299 - DNA, 33 bp, Homo sapien
tggctccatattaaaaatggaaatcaaagcaaa

SEQ ID NO: 31300 - DNA, 33 bp, Homo sapien
tggctccatattaaaagtggaaatcaaagcaaa

SEQ ID NO: 31301 - DNA, 33 bp, Homo sapien
gtgaagtctgagagaaactaaggttagattcat

SEQ ID NO: 31302 - DNA, 33 bp, Homo sapien
gtgaagtctgagagaagctaaggttagattcat

SEQ ID NO: 31303 - DNA, 33 bp, Homo sapien
aacttgtacaagatcacaggcacagtaaacaga

SEQ ID NO: 31304 - DNA, 33 bp, Homo sapien
aacttgtacaagatcataggcacagtaaacaga

SEQ ID NO: 31305 - DNA, 33 bp, Homo sapien
tttgttctttctgaaaacattatatgtagctct

SEQ ID NO: 31306 - DNA, 33 bp, Homo sapien
tttgttctttctgaaagcattatatgtagctct

SEQ ID NO: 31307 - DNA, 33 bp, Homo sapien
ccctagaaaatacttaccaattattcaggaaaa

SEQ ID NO: 31308 - DNA, 33 bp, Homo sapien
ccctagaaaatacttagcaattattcaggaaaa

SEQ ID NO: 31309 - DNA, 33 bp, Homo sapien
tttagttgtcatgttacgtcttttcagtctaaa

SEQ ID NO: 31310 - DNA, 33 bp, Homo sapien
tttagttgtcatgttatgtcttttcagtctaaa

SEQ ID NO: 31311 - DNA, 33 bp, Homo sapien
aaaagtgccagacttaccagaaaagttacaaaa

SEQ ID NO: 31312 - DNA, 33 bp, Homo sapien
aaaagtgccagacttatcagaaaagttacaaaa

SEQ ID NO: 31313 - DNA, 33 bp, Homo sapien
caatatttttaaaagacagttgcagagagtgtg

SEQ ID NO: 31314 - DNA, 33 bp, Homo sapien
caatatttttaaaagatagttgcagagagtgtg

SEQ ID NO: 31315 - DNA, 33 bp, Homo sapien
tcttctggtaagagcaaaaatgccctcatgtgc

SEQ ID NO: 31316 - DNA, 33 bp, Homo sapien
tcttctggtaagagcagaaatgccctcatgtgc

SEQ ID NO: 31317 - DNA, 33 bp, Homo sapien
gcaggtgttattccagacattgaggatgcatca

SEQ ID NO: 31318 - DNA, 33 bp, Homo sapien
gcaggtgttattccagtcattgaggatgcatca

SEQ ID NO: 31319 - DNA, 33 bp, Homo sapien
cagctagggttattaacgctaaaacatcacaat

SEQ ID NO: 31320 - DNA, 33 bp, Homo sapien
cagctagggttattaatgctaaaacatcacaat

SEQ ID NO: 31321 - DNA, 33 bp, Homo sapien
atcacaattaaggccacagaatccctgattttt

SEQ ID NO: 31322 - DNA, 33 bp, Homo sapien
atcacaattaaggccagagaatccctgattttt

SEQ ID NO: 31323 - DNA, 33 bp, Homo sapien
gagcagtaatctcttcaaattttatgctacttt

SEQ ID NO: 31324 - DNA, 33 bp, Homo sapien
gagcagtaatctcttctaattttatgctacttt

SEQ ID NO: 31325 - DNA, 33 bp, Homo sapien
atacacaggcagtgacagtagtcaaatctctat

SEQ ID NO: 31326 - DNA, 33 bp, Homo sapien
atacacaggcagtgacggtagtcaaatctctat

SEQ ID NO: 31327 - DNA, 33 bp, Homo sapien
aactatcgcttgagaaggtacacagatgctact

SEQ ID NO: 31328 - DNA, 33 bp, Homo sapien
aactatcgcttgagaatgtacacagatgctact

SEQ ID NO: 31329 - DNA, 33 bp, Homo sapien
ctgatgttttccttagaatagctgagttttagc

SEQ ID NO: 31330 - DNA, 33 bp, Homo sapien
ctgatgttttccttaggatagctgagttttagc

SEQ ID NO: 31331 - DNA, 33 bp, Homo sapien
tgctgggtttccctcacgcagtctattagtgtt

SEQ ID NO: 31332 - DNA, 33 bp, Homo sapien
tgctgggtttccctcatgcagtctattagtgtt

SEQ ID NO: 31333 - DNA, 33 bp, Homo sapien
acattttggcaaacagccatcctagtccataca

SEQ ID NO: 31334 - DNA, 33 bp, Homo sapien
acattttggcaaacagtcatcctagtccataca

SEQ ID NO: 31335 - DNA, 33 bp, Homo sapien
agaatctatagcaagaaatggtttaccctgagc

SEQ ID NO: 31336 - DNA, 33 bp, Homo sapien
agaatctatagcaagagatggtttaccctgagc

SEQ ID NO: 31337 - DNA, 33 bp, Homo sapien
aggcaatgaatctgaacaagccagtgaacattg

SEQ ID NO: 31338 - DNA, 33 bp, Homo sapien
aggcaatgaatctgaataagccagtgaacattg

SEQ ID NO: 31339 - DNA, 33 bp, Homo sapien
ttcactccaattcctacgatgaacaaattttct

SEQ ID NO: 31340 - DNA, 33 bp, Homo sapien
ttcactccaattcctatgatgaacaaattttct

SEQ ID NO: 31341 - DNA, 33 bp, Homo sapien
cacggttgtctgtaggaaaactcctgaagggtt

SEQ ID NO: 31342 - DNA, 33 bp, Homo sapien
cacggttgtctgtagggaaactcctgaagggtt

SEQ ID NO: 31343 - DNA, 33 bp, Homo sapien
ttgatgtcgaaaaatcaaggtgcattaatatct

SEQ ID NO: 31344 - DNA, 33 bp, Homo sapien
ttgatgtcgaaaaatcgaggtgcattaatatct

SEQ ID NO: 31345 - DNA, 33 bp, Homo sapien
agtaagccagtttccaacaagctatcttataat

SEQ ID NO: 31346 - DNA, 33 bp, Homo sapien
agtaagccagtttccagcaagctatcttataat

SEQ ID NO: 31347 - DNA, 33 bp, Homo sapien
gcaaactaggagaaaaatacttgcaagagactt

SEQ ID NO: 31348 - DNA, 33 bp, Homo sapien
gcaaactaggagaaaactacttgcaagagactt

SEQ ID NO: 31349 - DNA, 33 bp, Homo sapien
agagtgggtgtagttaccatttatacagtaatc

SEQ ID NO: 31350 - DNA, 33 bp, Homo sapien
agagtgggtgtagttatcatttatacagtaatc

SEQ ID NO: 31351 - DNA, 33 bp, Homo sapien
atttctacatgtgttacaaacccacaatatatg

SEQ ID NO: 31352 - DNA, 33 bp, Homo sapien
atttctacatgtgttataaacccacaatatatg

SEQ ID NO: 31353 - DNA, 33 bp, Homo sapien
tacagcaaacactcaaatggtacctattattat

SEQ ID NO: 31354 - DNA, 33 bp, Homo sapien
tacagcaaacactcaagtggtacctattattat

SEQ ID NO: 31355 - DNA, 33 bp, Homo sapien
ttgatattgccactgactagccatgtgactttt

SEQ ID NO: 31356 - DNA, 33 bp, Homo sapien
ttgatattgccactgattagccatgtgactttt

SEQ ID NO: 31357 - DNA, 33 bp, Homo sapien
aatagttcttgcagacacatttaccagaggccc

SEQ ID NO: 31358 - DNA, 33 bp, Homo sapien
aatagttcttgcagacgcatttaccagaggccc

SEQ ID NO: 31359 - DNA, 33 bp, Homo sapien
gatccaggctgaagaaacaggccttatttcaca

SEQ ID NO: 31360 - DNA, 33 bp, Homo sapien
gatccaggctgaagaagcaggccttatttcaca

SEQ ID NO: 31361 - DNA, 33 bp, Homo sapien
caaaaaatcccattcaatgaagaaatattccta

SEQ ID NO: 31362 - DNA, 33 bp, Homo sapien
caaaaaatcccattcagtgaagaaatattccta

SEQ ID NO: 31363 - DNA, 33 bp, Homo sapien
ttagatgcgatataataaatgctgtagtaaaca

SEQ ID NO: 31364 - DNA, 33 bp, Homo sapien
ttagatgcgatataatgaatgctgtagtaaaca

SEQ ID NO: 31365 - DNA, 33 bp, Homo sapien
gaacgagaattgactgcactttaacttcaggat

SEQ ID NO: 31366 - DNA, 33 bp, Homo sapien
gaacgagaattgactgtactttaacttcaggat

SEQ ID NO: 31367 - DNA, 33 bp, Homo sapien
tcaattctcgttcgtgaattctatacagtccct

SEQ ID NO: 31368 - DNA, 33 bp, Homo sapien
tcaattctcgttcgtgtattctatacagtccct

SEQ ID NO: 31369 - DNA, 33 bp, Homo sapien
ctggaaatcaggagtccgaaattactttcacca

SEQ ID NO: 31370 - DNA, 33 bp, Homo sapien
ctggaaatcaggagtctgaaattactttcacca

SEQ ID NO: 31371 - DNA, 33 bp, Homo sapien
aaggggccttataagaaggtgacaggaggatca

SEQ ID NO: 31372 - DNA, 33 bp, Homo sapien
aaggggccttataagatggtgacaggaggatca

SEQ ID NO: 31373 - DNA, 33 bp, Homo sapien
tttaatttccacatcaatcttatgaggtagata

SEQ ID NO: 31374 - DNA, 33 bp, Homo sapien
tttaatttccacatcagtcttatgaggtagata

SEQ ID NO: 31375 - DNA, 33 bp, Homo sapien
cctctgtgaaaagcaaagttccatcaatgactt

SEQ ID NO: 31376 - DNA, 33 bp, Homo sapien
cctctgtgaaaagcaaggttccatcaatgactt

SEQ ID NO: 31377 - DNA, 33 bp, Homo sapien
aacaggaagaaaaggacgtaggtaaggaagaat

SEQ ID NO: 31378 - DNA, 33 bp, Homo sapien
aacaggaagaaaaggatgtaggtaaggaagaat

SEQ ID NO: 31379 - DNA, 33 bp, Homo sapien
tggcagtgttcctacacagagggagtaaacaga

SEQ ID NO: 31380 - DNA, 33 bp, Homo sapien
tggcagtgttcctacatagagggagtaaacaga

SEQ ID NO: 31381 - DNA, 33 bp, Homo sapien
gagagttgcctacataacctaaattttcaaata

SEQ ID NO: 31382 - DNA, 33 bp, Homo sapien
gagagttgcctacatagcctaaattttcaaata

SEQ ID NO: 31383 - DNA, 33 bp, Homo sapien
ttataaagtactttgcaataaaaactgctaaag

SEQ ID NO: 31384 - DNA, 33 bp, Homo sapien
ttataaagtactttgcgataaaaactgctaaag

SEQ ID NO: 31385 - DNA, 33 bp, Homo sapien
ggtaggtatggagtaaccttctcaaccctctta

SEQ ID NO: 31386 - DNA, 33 bp, Homo sapien
ggtaggtatggagtaatcttctcaaccctctta

SEQ ID NO: 31387 - DNA, 33 bp, Homo sapien
gagttgtaatacaagtaaaggaacttcatatca

SEQ ID NO: 31388 - DNA, 33 bp, Homo sapien
gagttgtaatacaagtgaaggaacttcatatca

SEQ ID NO: 31389 - DNA, 33 bp, Homo sapien
ttttagcgtagacctactacaaataaagctttt

SEQ ID NO: 31390 - DNA, 33 bp, Homo sapien
ttttagcgtagacctattacaaataaagctttt

SEQ ID NO: 31391 - DNA, 33 bp, Homo sapien
agagataggcaggggacgaatcttataggccat

SEQ ID NO: 31392 - DNA, 33 bp, Homo sapien
agagataggcaggggatgaatcttataggccat

SEQ ID NO: 31393 - DNA, 33 bp, Homo sapien
attatggaacactgcacatattagaaattcctt

SEQ ID NO: 31394 - DNA, 33 bp, Homo sapien
attatggaacactgcatatattagaaattcctt

SEQ ID NO: 31395 - DNA, 33 bp, Homo sapien
ccttggacattaagtcacccttccaccaatgag

SEQ ID NO: 31396 - DNA, 33 bp, Homo sapien
ccttggacattaagtcgcccttccaccaatgag

SEQ ID NO: 31397 - DNA, 33 bp, Homo sapien
gaaaatgtcatttttcccattgtaaccgaagtg

SEQ ID NO: 31398 - DNA, 33 bp, Homo sapien
gaaaatgtcatttttcgcattgtaaccgaagtg

SEQ ID NO: 31399 - DNA, 33 bp, Homo sapien
atgtttcccttcaaaaaccattcctccagcagt

SEQ ID NO: 31400 - DNA, 33 bp, Homo sapien
atgtttcccttcaaaacccattcctccagcagt

SEQ ID NO: 31401 - DNA, 33 bp, Homo sapien
ctcatcccagagaaggaagagacatcactatga

SEQ ID NO: 31402 - DNA, 33 bp, Homo sapien
ctcatcccagagaagggagagacatcactatga

SEQ ID NO: 31403 - DNA, 33 bp, Homo sapien
aaagaacacagctgagcctcaagcgaggatgct

SEQ ID NO: 31404 - DNA, 33 bp, Homo sapien
aaagaacacagctgaggctcaagcgaggatgct

SEQ ID NO: 31405 - DNA, 33 bp, Homo sapien
gaggcataccagttaactctatttgcattcaca

SEQ ID NO: 31406 - DNA, 33 bp, Homo sapien
gaggcataccagttaattctatttgcattcaca

SEQ ID NO: 31407 - DNA, 33 bp, Homo sapien
aagtttacaaattatcaagggaaaaatcaagtt

SEQ ID NO: 31408 - DNA, 33 bp, Homo sapien
aagtttacaaattatccagggaaaaatcaagtt

SEQ ID NO: 31409 - DNA, 33 bp, Homo sapien
tagattcatacatatacggacaactgatttttg

SEQ ID NO: 31410 - DNA, 33 bp, Homo sapien
tagattcatacatatatggacaactgatttttg

SEQ ID NO: 31411 - DNA, 33 bp, Homo sapien
accgacttgtagtcatgaattttcccaagacca

SEQ ID NO: 31412 - DNA, 33 bp, Homo sapien
accgacttgtagtcattaattttcccaagacca

SEQ ID NO: 31413 - DNA, 33 bp, Homo sapien
cagactaattttcaaaaggaacatgacaattac

SEQ ID NO: 31414 - DNA, 33 bp, Homo sapien
cagactaattttcaaacggaacatgacaattac

SEQ ID NO: 31415 - DNA, 33 bp, Homo sapien
taaagttttccgtgaacggcaaataggacaaaa

SEQ ID NO: 31416 - DNA, 33 bp, Homo sapien
taaagttttccgtgaatggcaaataggacaaaa

SEQ ID NO: 31417 - DNA, 33 bp, Homo sapien
gagttagccagtgacaatgatgcttaatgtgtt

SEQ ID NO: 31418 - DNA, 33 bp, Homo sapien
gagttagccagtgacagtgatgcttaatgtgtt

SEQ ID NO: 31419 - DNA, 33 bp, Homo sapien
accagatagtcaataccctctatatcacctaag

SEQ ID NO: 31420 - DNA, 33 bp, Homo sapien
accagatagtcaatacgctctatatcacctaag

SEQ ID NO: 31421 - DNA, 33 bp, Homo sapien
cttccttcacaaacataacttactgtgttattt

SEQ ID NO: 31422 - DNA, 33 bp, Homo sapien
cttccttcacaaacattacttactgtgttattt

SEQ ID NO: 31423 - DNA, 33 bp, Homo sapien
aggtagccagcattaccgaactgatagtgtatt

SEQ ID NO: 31424 - DNA, 33 bp, Homo sapien
aggtagccagcattactgaactgatagtgtatt

SEQ ID NO: 31425 - DNA, 33 bp, Homo sapien
gaaaaaagattctcagaaagacccagaagcaaa

SEQ ID NO: 31426 - DNA, 33 bp, Homo sapien
gaaaaaagattctcaggaagacccagaagcaaa

SEQ ID NO: 31427 - DNA, 33 bp, Homo sapien
ttggagttgatattcaaaaagttgtagagaaag

SEQ ID NO: 31428 - DNA, 33 bp, Homo sapien
ttggagttgatattcagaaagttgtagagaaag

SEQ ID NO: 31429 - DNA, 33 bp, Homo sapien
gactctctcttatgtacgcctgcactccctttt

SEQ ID NO: 31430 - DNA, 33 bp, Homo sapien
gactctctcttatgtatgcctgcactccctttt

SEQ ID NO: 31431 - DNA, 33 bp, Homo sapien
tctctttttttagagacgatgtgttactctgtt

SEQ ID NO: 31432 - DNA, 33 bp, Homo sapien
tctctttttttagagatgatgtgttactctgtt

SEQ ID NO: 31433 - DNA, 33 bp, Homo sapien
cactctacagaagacactaaccctttgaataat

SEQ ID NO: 31434 - DNA, 33 bp, Homo sapien
cactctacagaagacattaaccctttgaataat

SEQ ID NO: 31435 - DNA, 33 bp, Homo sapien
aggaaactatggaagactctctgagaaaaggga

SEQ ID NO: 31436 - DNA, 33 bp, Homo sapien
aggaaactatggaagattctctgagaaaaggga

SEQ ID NO: 31437 - DNA, 33 bp, Homo sapien
agcagttgttctcttgcagttggttctggatga

SEQ ID NO: 31438 - DNA, 33 bp, Homo sapien
agcagttgttctcttgtagttggttctggatga

SEQ ID NO: 31439 - DNA, 33 bp, Homo sapien
tattgactttaatccacgtaaaagatgtttctg

SEQ ID NO: 31440 - DNA, 33 bp, Homo sapien
tattgactttaatccatgtaaaagatgtttctg

SEQ ID NO: 31441 - DNA, 33 bp, Homo sapien
ggcttaacttaaagtgcaggaaacaatcagaag

SEQ ID NO: 31442 - DNA, 33 bp, Homo sapien
ggcttaacttaaagtggaggaaacaatcagaag

SEQ ID NO: 31443 - DNA, 33 bp, Homo sapien
tagattaaaattcataaaagtcattaagagtga

SEQ ID NO: 31444 - DNA, 33 bp, Homo sapien
tagattaaaattcatacaagtcattaagagtga

SEQ ID NO: 31445 - DNA, 33 bp, Homo sapien
aaactctggacaacaaagctcaggtgagtttct

SEQ ID NO: 31446 - DNA, 33 bp, Homo sapien
aaactctggacaacaaggctcaggtgagtttct

SEQ ID NO: 31447 - DNA, 33 bp, Homo sapien
tatttgaacaagtgggccattagccagatttgt

SEQ ID NO: 31448 - DNA, 33 bp, Homo sapien
tatttgaacaagtgggtcattagccagatttgt

SEQ ID NO: 31449 - DNA, 33 bp, Homo sapien
cagttagaagaagaagaaacttgtgcaaactct

SEQ ID NO: 31450 - DNA, 33 bp, Homo sapien
cagttagaagaagaaggaacttgtgcaaactct

SEQ ID NO: 31451 - DNA, 33 bp, Homo sapien
gaacataggaggcctaactcttggaagttcaag

SEQ ID NO: 31452 - DNA, 33 bp, Homo sapien
gaacataggaggcctagctcttggaagttcaag

SEQ ID NO: 31453 - DNA, 33 bp, Homo sapien
ttccatccgatttactgaaccatccttaacttt

SEQ ID NO: 31454 - DNA, 33 bp, Homo sapien
ttccatccgatttacttaaccatccttaacttt

SEQ ID NO: 31455 - DNA, 33 bp, Homo sapien
gatggcagggaacatacgtttcacagacaccca

SEQ ID NO: 31456 - DNA, 33 bp, Homo sapien
gatggcagggaacataggtttcacagacaccca

SEQ ID NO: 31457 - DNA, 33 bp, Homo sapien
aacaggacaaacattaagatgaattaaaggagt

SEQ ID NO: 31458 - DNA, 33 bp, Homo sapien
aacaggacaaacattaggatgaattaaaggagt

SEQ ID NO: 31459 - DNA, 33 bp, Homo sapien
tcacgctcgtggtcaccgtcatcattgtcatac

SEQ ID NO: 31460 - DNA, 33 bp, Homo sapien
tcacgctcgtggtcactgtcatcattgtcatac

SEQ ID NO: 31461 - DNA, 33 bp, Homo sapien
gcctggacacaggtgcacatactacccactgcc

SEQ ID NO: 31462 - DNA, 33 bp, Homo sapien
gcctggacacaggtgctcatactacccactgcc

SEQ ID NO: 31463 - DNA, 33 bp, Homo sapien
agaagtatcacttcaaatcttgctctgctcact

SEQ ID NO: 31464 - DNA, 33 bp, Homo sapien
agaagtatcacttcaagtcttgctctgctcact

SEQ ID NO: 31465 - DNA, 33 bp, Homo sapien
ctaggaagtgtgataacgtgcctggatcagtta

SEQ ID NO: 31466 - DNA, 33 bp, Homo sapien
ctaggaagtgtgataatgtgcctggatcagtta

SEQ ID NO: 31467 - DNA, 33 bp, Homo sapien
attttcttaccaacaccgctggaaaaatttgac

SEQ ID NO: 31468 - DNA, 33 bp, Homo sapien
attttcttaccaacactgctggaaaaatttgac

SEQ ID NO: 31469 - DNA, 33 bp, Homo sapien
gatggtcaacggtatcactgttttctgacagat

SEQ ID NO: 31470 - DNA, 33 bp, Homo sapien
gatggtcaacggtatcgctgttttctgacagat

SEQ ID NO: 31471 - DNA, 33 bp, Homo sapien
cttgtatcctaccacactgccttccttctgttt

SEQ ID NO: 31472 - DNA, 33 bp, Homo sapien
cttgtatcctaccacattgccttccttctgttt

SEQ ID NO: 31473 - DNA, 33 bp, Homo sapien
ctgaaaagtaaaagtaaatgggaccataaaggt

SEQ ID NO: 31474 - DNA, 33 bp, Homo sapien
ctgaaaagtaaaagtagatgggaccataaaggt

SEQ ID NO: 31475 - DNA, 33 bp, Homo sapien
cttccaaaacacaataatagcagcttccattta

SEQ ID NO: 31476 - DNA, 33 bp, Homo sapien
cttccaaaacacaatattagcagcttccattta

SEQ ID NO: 31477 - DNA, 33 bp, Homo sapien
tgcccatctcagaaagcaccacgtgtcactgaa

SEQ ID NO: 31478 - DNA, 33 bp, Homo sapien
tgcccatctcagaaagtaccacgtgtcactgaa

SEQ ID NO: 31479 - DNA, 33 bp, Homo sapien
gatcctgggacaaaggaagctgaagcatgtgtt

SEQ ID NO: 31480 - DNA, 33 bp, Homo sapien
gatcctgggacaaagggagctgaagcatgtgtt

SEQ ID NO: 31481 - DNA, 33 bp, Homo sapien
aaagtattcaaattaaagccatagaaaactaga

SEQ ID NO: 31482 - DNA, 33 bp, Homo sapien
aaagtattcaaattaaggccatagaaaactaga

SEQ ID NO: 31483 - DNA, 33 bp, Homo sapien
tgcatttggaataataacattttaagaccggaa

SEQ ID NO: 31484 - DNA, 33 bp, Homo sapien
tgcatttggaataatagcattttaagaccggaa

SEQ ID NO: 31485 - DNA, 33 bp, Homo sapien
ttcacacaatccctaacaagaatggcgccccca

SEQ ID NO: 31486 - DNA, 33 bp, Homo sapien
ttcacacaatccctaagaagaatggcgccccca

SEQ ID NO: 31487 - DNA, 33 bp, Homo sapien
ttctgtgacatttaagcagttctttgctaagtg

SEQ ID NO: 31488 - DNA, 33 bp, Homo sapien
ttctgtgacatttaagtagttctttgctaagtg

SEQ ID NO: 31489 - DNA, 33 bp, Homo sapien
agttacaaagaaaccacgacaacttaagcaggc

SEQ ID NO: 31490 - DNA, 33 bp, Homo sapien
agttacaaagaaaccaggacaacttaagcaggc

SEQ ID NO: 31491 - DNA, 33 bp, Homo sapien
caggtacatttttagacgtttccatacaattca

SEQ ID NO: 31492 - DNA, 33 bp, Homo sapien
caggtacatttttagaggtttccatacaattca

SEQ ID NO: 31493 - DNA, 33 bp, Homo sapien
tcgtcaacttggattacgcattcttttgctctt

SEQ ID NO: 31494 - DNA, 33 bp, Homo sapien
tcgtcaacttggattatgcattcttttgctctt

SEQ ID NO: 31495 - DNA, 33 bp, Homo sapien
gtctaccctctgataaactccacattgaccacc

SEQ ID NO: 31496 - DNA, 33 bp, Homo sapien
gtctaccctctgataatctccacattgaccacc

SEQ ID NO: 31497 - DNA, 33 bp, Homo sapien
tagttgttaaaataaacggatgtttcagtctat

SEQ ID NO: 31498 - DNA, 33 bp, Homo sapien
tagttgttaaaataaatggatgtttcagtctat

SEQ ID NO: 31499 - DNA, 33 bp, Homo sapien
ctcaagtatttctttaaattccacgtaatagct

SEQ ID NO: 31500 - DNA, 33 bp, Homo sapien
ctcaagtatttctttatattccacgtaatagct

SEQ ID NO: 31501 - DNA, 33 bp, Homo sapien
tcttaaatacaaccaaacctctttaagttggca

SEQ ID NO: 31502 - DNA, 33 bp, Homo sapien
tcttaaatacaaccaaccctctttaagttggca

SEQ ID NO: 31503 - DNA, 33 bp, Homo sapien
acaggcctgccttaatcaggatgctcatttgct

SEQ ID NO: 31504 - DNA, 33 bp, Homo sapien
acaggcctgccttaattaggatgctcatttgct

SEQ ID NO: 31505 - DNA, 33 bp, Homo sapien
gtaatgttaagtaaaagaagtcacacaaaaaca

SEQ ID NO: 31506 - DNA, 33 bp, Homo sapien
gtaatgttaagtaaaataagtcacacaaaaaca

SEQ ID NO: 31507 - DNA, 33 bp, Homo sapien
cagccaaaactaaatacgtgtgttttggaggga

SEQ ID NO: 31508 - DNA, 33 bp, Homo sapien
cagccaaaactaaatatgtgtgttttggaggga

SEQ ID NO: 31509 - DNA, 33 bp, Homo sapien
agacagcttattcaagaattcttttaagaccac

SEQ ID NO: 31510 - DNA, 33 bp, Homo sapien
agacagcttattcaagcattcttttaagaccac

SEQ ID NO: 31511 - DNA, 33 bp, Homo sapien
actaggctgttccttaagctagaatcctcctcc

SEQ ID NO: 31512 - DNA, 33 bp, Homo sapien
actaggctgttccttaggctagaatcctcctcc

SEQ ID NO: 31513 - DNA, 33 bp, Homo sapien
tgctttgaaattaatacaagaggcaggatctca

SEQ ID NO: 31514 - DNA, 33 bp, Homo sapien
tgctttgaaattaatagaagaggcaggatctca

SEQ ID NO: 31515 - DNA, 33 bp, Homo sapien
gtacattctacatagccctttcacaactttcta

SEQ ID NO: 31516 - DNA, 33 bp, Homo sapien
gtacattctacatagcgctttcacaactttcta

SEQ ID NO: 31517 - DNA, 33 bp, Homo sapien
tcaagatagcaagattaaacatcaccacaccgg

SEQ ID NO: 31518 - DNA, 33 bp, Homo sapien
tcaagatagcaagattgaacatcaccacaccgg

SEQ ID NO: 31519 - DNA, 33 bp, Homo sapien
cacaccggaactccttcaaagtgtggcctcttc

SEQ ID NO: 31520 - DNA, 33 bp, Homo sapien
cacaccggaactccttgaaagtgtggcctcttc

SEQ ID NO: 31521 - DNA, 33 bp, Homo sapien
ctggaaattggtcagaaacaatacacacgaaaa

SEQ ID NO: 31522 - DNA, 33 bp, Homo sapien
ctggaaattggtcagacacaatacacacgaaaa

SEQ ID NO: 31523 - DNA, 33 bp, Homo sapien
ccttaatgcaaaacaacgacaactgcaataacg

SEQ ID NO: 31524 - DNA, 33 bp, Homo sapien
ccttaatgcaaaacaatgacaactgcaataacg

SEQ ID NO: 31525 - DNA, 33 bp, Homo sapien
gtttttctttagcttccacagttctagcagaat

SEQ ID NO: 31526 - DNA, 33 bp, Homo sapien
gtttttctttagcttctacagttctagcagaat

SEQ ID NO: 31527 - DNA, 33 bp, Homo sapien
tggaaactgtcaaagtaaaatttaactcaggga

SEQ ID NO: 31528 - DNA, 33 bp, Homo sapien
tggaaactgtcaaagtgaaatttaactcaggga

SEQ ID NO: 31529 - DNA, 33 bp, Homo sapien
cagaattaaagcacacactcaataggatagcaa

SEQ ID NO: 31530 - DNA, 33 bp, Homo sapien
cagaattaaagcacacgctcaataggatagcaa

SEQ ID NO: 31531 - DNA, 33 bp, Homo sapien
tcaagactttcacggcaatgaaatgaaaaaata

SEQ ID NO: 31532 - DNA, 33 bp, Homo sapien
tcaagactttcacggcgatgaaatgaaaaaata

SEQ ID NO: 31533 - DNA, 33 bp, Homo sapien
aagtgtcccttgttcaataggtctgttggtcag

SEQ ID NO: 31534 - DNA, 33 bp, Homo sapien
aagtgtcccttgttcagtaggtctgttggtcag

SEQ ID NO: 31535 - DNA, 33 bp, Homo sapien
actacatgaagcacaacggagatgcatgtgtgg

SEQ ID NO: 31536 - DNA, 33 bp, Homo sapien
actacatgaagcacaatggagatgcatgtgtgg

SEQ ID NO: 31537 - DNA, 33 bp, Homo sapien
gtgttcagaaagcataccacttattaaaatggc

SEQ ID NO: 31538 - DNA, 33 bp, Homo sapien
gtgttcagaaagcatatcacttattaaaatggc

SEQ ID NO: 31539 - DNA, 33 bp, Homo sapien
gtgggagatacagaacagtaaacaggcaattat

SEQ ID NO: 31540 - DNA, 33 bp, Homo sapien
gtgggagatacagaacggtaaacaggcaattat

SEQ ID NO: 31541 - DNA, 33 bp, Homo sapien
gaggaagagtacccggacaaaataaaagcaata

SEQ ID NO: 31542 - DNA, 33 bp, Homo sapien
gaggaagagtacccgggcaaaataaaagcaata

SEQ ID NO: 31543 - DNA, 33 bp, Homo sapien
tgctacaggaaggtaaaggaaagagagatctat

SEQ ID NO: 31544 - DNA, 33 bp, Homo sapien
tgctacaggaaggtaagggaaagagagatctat

SEQ ID NO: 31545 - DNA, 33 bp, Homo sapien
gagaaatgccagtttcacaatgccagggaatca

SEQ ID NO: 31546 - DNA, 33 bp, Homo sapien
gagaaatgccagtttcgcaatgccagggaatca

SEQ ID NO: 31547 - DNA, 33 bp, Homo sapien
acaagaaatggcatcacaactaaagtcctgcaa

SEQ ID NO: 31548 - DNA, 33 bp, Homo sapien
acaagaaatggcatcagaactaaagtcctgcaa

SEQ ID NO: 31549 - DNA, 33 bp, Homo sapien
caagctttctggcatcgaatcttataaaggcac

SEQ ID NO: 31550 - DNA, 33 bp, Homo sapien
caagctttctggcatctaatcttataaaggcac

SEQ ID NO: 31551 - DNA, 33 bp, Homo sapien
tggaattatattctgacgactggtgaaaaagta

SEQ ID NO: 31552 - DNA, 33 bp, Homo sapien
tggaattatattctgatgactggtgaaaaagta

SEQ ID NO: 31553 - DNA, 33 bp, Homo sapien
aaatactccttgaaaccaccaacaaattctttt

SEQ ID NO: 31554 - DNA, 33 bp, Homo sapien
aaatactccttgaaactaccaacaaattctttt

SEQ ID NO: 31555 - DNA, 33 bp, Homo sapien
tgcctggaacgctagacctgctgcctttcacaa

SEQ ID NO: 31556 - DNA, 33 bp, Homo sapien
tgcctggaacgctagagctgctgcctttcacaa

SEQ ID NO: 31557 - DNA, 33 bp, Homo sapien
ttgtgactgcagagtacgattctgtgataaccc

SEQ ID NO: 31558 - DNA, 33 bp, Homo sapien
ttgtgactgcagagtatgattctgtgataaccc

SEQ ID NO: 31559 - DNA, 33 bp, Homo sapien
tattcagactttaccacgtgggtgatgaggaag

SEQ ID NO: 31560 - DNA, 33 bp, Homo sapien
tattcagactttaccatgtgggtgatgaggaag

SEQ ID NO: 31561 - DNA, 33 bp, Homo sapien
atgaaatcaattgagacgacaaggttagagaaa

SEQ ID NO: 31562 - DNA, 33 bp, Homo sapien
atgaaatcaattgagatgacaaggttagagaaa

SEQ ID NO: 31563 - DNA, 33 bp, Homo sapien
attcattagtccatagcaatacccaaaaaagtg

SEQ ID NO: 31564 - DNA, 33 bp, Homo sapien
attcattagtccatagtaatacccaaaaaagtg

SEQ ID NO: 31565 - DNA, 33 bp, Homo sapien
gcttctgtgatagcaaccttttttttttttcag

SEQ ID NO: 31566 - DNA, 33 bp, Homo sapien
gcttctgtgatagcaatcttttttttttttcag

SEQ ID NO: 31567 - DNA, 33 bp, Homo sapien
gctagggttacgtatacgctttctctccattag

SEQ ID NO: 31568 - DNA, 33 bp, Homo sapien
gctagggttacgtatatgctttctctccattag

SEQ ID NO: 31569 - DNA, 33 bp, Homo sapien
tgtccaacccaaatacactttcacacatatgac

SEQ ID NO: 31570 - DNA, 33 bp, Homo sapien
tgtccaacccaaatacgctttcacacatatgac

SEQ ID NO: 31571 - DNA, 33 bp, Homo sapien
aatcgcccagtgttagccaaccaacataggttt

SEQ ID NO: 31572 - DNA, 33 bp, Homo sapien
aatcgcccagtgttagtcaaccaacataggttt

SEQ ID NO: 31573 - DNA, 33 bp, Homo sapien
cttcactcagacacccagaaggcttctcttagg

SEQ ID NO: 31574 - DNA, 33 bp, Homo sapien
cttcactcagacacccggaaggcttctcttagg

SEQ ID NO: 31575 - DNA, 33 bp, Homo sapien
caatgtgtggaggccaagagcagtttcctgata

SEQ ID NO: 31576 - DNA, 33 bp, Homo sapien
caatgtgtggaggccacgagcagtttcctgata

SEQ ID NO: 31577 - DNA, 33 bp, Homo sapien
caatcatctgccaaaaattccttcaagaggcct

SEQ ID NO: 31578 - DNA, 33 bp, Homo sapien
caatcatctgccaaaagttccttcaagaggcct

SEQ ID NO: 31579 - DNA, 33 bp, Homo sapien
ctttgacaataatgagacgagtagatgaggaca

SEQ ID NO: 31580 - DNA, 33 bp, Homo sapien
ctttgacaataatgaggcgagtagatgaggaca

SEQ ID NO: 31581 - DNA, 33 bp, Homo sapien
tctgttctacccgccactcatatctgtgttgca

SEQ ID NO: 31582 - DNA, 33 bp, Homo sapien
tctgttctacccgccattcatatctgtgttgca

SEQ ID NO: 31583 - DNA, 33 bp, Homo sapien
tatatatgttacaaacgccatacttcattgtaa

SEQ ID NO: 31584 - DNA, 33 bp, Homo sapien
tatatatgttacaaactccatacttcattgtaa

SEQ ID NO: 31585 - DNA, 33 bp, Homo sapien
catctttaaagggtgagactcagagttggacat

SEQ ID NO: 31586 - DNA, 33 bp, Homo sapien
catctttaaagggtgatactcagagttggacat

SEQ ID NO: 31587 - DNA, 33 bp, Homo sapien
ttactaaacttctggactatggggactagtatt

SEQ ID NO: 31588 - DNA, 33 bp, Homo sapien
ttactaaacttctggagtatggggactagtatt

SEQ ID NO: 31589 - DNA, 33 bp, Homo sapien
tgagagccaatgtaccaaagtgggtgtatgaga

SEQ ID NO: 31590 - DNA, 33 bp, Homo sapien
tgagagccaatgtaccgaagtgggtgtatgaga

SEQ ID NO: 31591 - DNA, 33 bp, Homo sapien
cctctgattgctccaaacttactaacaccttgt

SEQ ID NO: 31592 - DNA, 33 bp, Homo sapien
cctctgattgctccaaccttactaacaccttgt

SEQ ID NO: 31593 - DNA, 33 bp, Homo sapien
aagatgtgagcaaaaaacttccctctcaaaagt

SEQ ID NO: 31594 - DNA, 33 bp, Homo sapien
aagatgtgagcaaaaatcttccctctcaaaagt

SEQ ID NO: 31595 - DNA, 33 bp, Homo sapien
gcacctttaaaaaaaagtagcggatgatacttt

SEQ ID NO: 31596 - DNA, 33 bp, Homo sapien
gcacctttaaaaaaaattagcggatgatacttt

SEQ ID NO: 31597 - DNA, 33 bp, Homo sapien
gaattttgtatcatgcactcaaatattttactc

SEQ ID NO: 31598 - DNA, 33 bp, Homo sapien
gaattttgtatcatgcgctcaaatattttactc

SEQ ID NO: 31599 - DNA, 33 bp, Homo sapien
tccagacgttactcaccgtcaccaatggtaact

SEQ ID NO: 31600 - DNA, 33 bp, Homo sapien
tccagacgttactcactgtcaccaatggtaact

SEQ ID NO: 31601 - DNA, 33 bp, Homo sapien
tttcactcatccttacacctatgagattcaccc

SEQ ID NO: 31602 - DNA, 33 bp, Homo sapien
tttcactcatccttacgcctatgagattcaccc

SEQ ID NO: 31603 - DNA, 33 bp, Homo sapien
aaatttccaccatatgcatttccatagcaacat

SEQ ID NO: 31604 - DNA, 33 bp, Homo sapien
aaatttccaccatatgtatttccatagcaacat

SEQ ID NO: 31605 - DNA, 33 bp, Homo sapien
gtactgcagtggacaaagattacaccgtgtttg

SEQ ID NO: 31606 - DNA, 33 bp, Homo sapien
gtactgcagtggacaaggattacaccgtgtttg

SEQ ID NO: 31607 - DNA, 33 bp, Homo sapien
ctcccacagaacctagcattaatttgtgattga

SEQ ID NO: 31608 - DNA, 33 bp, Homo sapien
ctcccacagaacctagtattaatttgtgattga

SEQ ID NO: 31609 - DNA, 33 bp, Homo sapien
gaatgagtgaaagtcaatatgaaaacctctcag

SEQ ID NO: 31610 - DNA, 33 bp, Homo sapien
gaatgagtgaaagtcagtatgaaaacctctcag

SEQ ID NO: 31611 - DNA, 33 bp, Homo sapien
aacacatgaaacacagaatttctatgcatttga

SEQ ID NO: 31612 - DNA, 33 bp, Homo sapien
aacacatgaaacacaggatttctatgcatttga

SEQ ID NO: 31613 - DNA, 33 bp, Homo sapien
catgatttatagtaacgcatccactcctgccat

SEQ ID NO: 31614 - DNA, 33 bp, Homo sapien
catgatttatagtaactcatccactcctgccat

SEQ ID NO: 31615 - DNA, 33 bp, Homo sapien
aaagaccactgttaataactatcacgttgacat

SEQ ID NO: 31616 - DNA, 33 bp, Homo sapien
aaagaccactgttaatgactatcacgttgacat

SEQ ID NO: 31617 - DNA, 33 bp, Homo sapien
agaggggcagtgttgtcaaagtaaaattactcc

SEQ ID NO: 31618 - DNA, 33 bp, Homo sapien
agaggggcagtgttgtgaaagtaaaattactcc

SEQ ID NO: 31619 - DNA, 33 bp, Homo sapien
aaagcaatgataaaaccggacattaatgaaatt

SEQ ID NO: 31620 - DNA, 33 bp, Homo sapien
aaagcaatgataaaactggacattaatgaaatt

SEQ ID NO: 31621 - DNA, 33 bp, Homo sapien
tctgtatacagtttgaactcatgtactgaaaaa

SEQ ID NO: 31622 - DNA, 33 bp, Homo sapien
tctgtatacagtttgatctcatgtactgaaaaa

SEQ ID NO: 31623 - DNA, 33 bp, Homo sapien
attactggaattagtgaaaatacctggcatagc

SEQ ID NO: 31624 - DNA, 33 bp, Homo sapien
attactggaattagtggaaatacctggcatagc

SEQ ID NO: 31625 - DNA, 33 bp, Homo sapien
ttacaccattctgagcacttcccactggactga

SEQ ID NO: 31626 - DNA, 33 bp, Homo sapien
ttacaccattctgagcgcttcccactggactga

SEQ ID NO: 31627 - DNA, 33 bp, Homo sapien
aataatgtttaaaagacgtgaagcatttaatcc

SEQ ID NO: 31628 - DNA, 33 bp, Homo sapien
aataatgtttaaaagatgtgaagcatttaatcc

SEQ ID NO: 31629 - DNA, 33 bp, Homo sapien
aacccaaacaaccagtaaaagttattgcttcat

SEQ ID NO: 31630 - DNA, 33 bp, Homo sapien
aacccaaacaaccagtgaaagttattgcttcat

SEQ ID NO: 31631 - DNA, 33 bp, Homo sapien
ttagggcttaaataaacgagtgagcagtttctg

SEQ ID NO: 31632 - DNA, 33 bp, Homo sapien
ttagggcttaaataaatgagtgagcagtttctg

SEQ ID NO: 31633 - DNA, 33 bp, Homo sapien
caaaaaaaaagcagtaagacttggtgatcaagt

SEQ ID NO: 31634 - DNA, 33 bp, Homo sapien
caaaaaaaaagcagtaggacttggtgatcaagt

SEQ ID NO: 31635 - DNA, 33 bp, Homo sapien
acctttttacttccaaaaattgatgaatacttg

SEQ ID NO: 31636 - DNA, 33 bp, Homo sapien
acctttttacttccaataattgatgaatacttg

SEQ ID NO: 31637 - DNA, 33 bp, Homo sapien
atgcagaatagatacccgggcttgaccagcaga

SEQ ID NO: 31638 - DNA, 33 bp, Homo sapien
atgcagaatagatacctgggcttgaccagcaga

SEQ ID NO: 31639 - DNA, 33 bp, Homo sapien
aaatgtaaattctcaacgacgtacccctacaca

SEQ ID NO: 31640 - DNA, 33 bp, Homo sapien
aaatgtaaattctcaatgacgtacccctacaca

SEQ ID NO: 31641 - DNA, 33 bp, Homo sapien
atggccagttggcagacgaaaagatgttcaaca

SEQ ID NO: 31642 - DNA, 33 bp, Homo sapien
atggccagttggcagatgaaaagatgttcaaca

SEQ ID NO: 31643 - DNA, 33 bp, Homo sapien
ttgaccacaaagataaagatttatttctggacc

SEQ ID NO: 31644 - DNA, 33 bp, Homo sapien
ttgaccacaaagataaggatttatttctggacc

SEQ ID NO: 31645 - DNA, 33 bp, Homo sapien
aaatcagccatggtacaagtatttacactatag

SEQ ID NO: 31646 - DNA, 33 bp, Homo sapien
aaatcagccatggtacgagtatttacactatag

SEQ ID NO: 31647 - DNA, 33 bp, Homo sapien
attctctgtgcatcaaagaacacatcaagaaaa

SEQ ID NO: 31648 - DNA, 33 bp, Homo sapien
attctctgtgcatcaaggaacacatcaagaaaa

SEQ ID NO: 31649 - DNA, 33 bp, Homo sapien
tcagttgaggataagaacgaatgaataggtgta

SEQ ID NO: 31650 - DNA, 33 bp, Homo sapien
tcagttgaggataagagcgaatgaataggtgta

SEQ ID NO: 31651 - DNA, 33 bp, Homo sapien
gggatccaggaggaaacgaagaataaacaagtg

SEQ ID NO: 31652 - DNA, 33 bp, Homo sapien
gggatccaggaggaaaggaagaataaacaagtg

SEQ ID NO: 31653 - DNA, 33 bp, Homo sapien
tttgggatggtgtagcaaacagtagatccatgt

SEQ ID NO: 31654 - DNA, 33 bp, Homo sapien
tttgggatggtgtagcgaacagtagatccatgt

SEQ ID NO: 31655 - DNA, 33 bp, Homo sapien
aactaggttttgaataaatttctgtgcagatgt

SEQ ID NO: 31656 - DNA, 33 bp, Homo sapien
aactaggttttgaatagatttctgtgcagatgt

SEQ ID NO: 31657 - DNA, 33 bp, Homo sapien
acgtgcaggttagttaaataagtatgatagact

SEQ ID NO: 31658 - DNA, 33 bp, Homo sapien
acgtgcaggttagttacataagtatgatagact

SEQ ID NO: 31659 - DNA, 33 bp, Homo sapien
cccttatgagtttctaccttaaaagtcatttca

SEQ ID NO: 31660 - DNA, 33 bp, Homo sapien
cccttatgagtttctatcttaaaagtcatttca

SEQ ID NO: 31661 - DNA, 33 bp, Homo sapien
aaactgcttgggaaaaaggatgaaagaaaacaa

SEQ ID NO: 31662 - DNA, 33 bp, Homo sapien
aaactgcttgggaaaagggatgaaagaaaacaa

SEQ ID NO: 31663 - DNA, 33 bp, Homo sapien
aaaagagctgttgaaagaatatagtctgtaact

SEQ ID NO: 31664 - DNA, 33 bp, Homo sapien
aaaagagctgttgaaataatatagtctgtaact

SEQ ID NO: 31665 - DNA, 33 bp, Homo sapien
ttattctacagagcagactgccattgtacaata

SEQ ID NO: 31666 - DNA, 33 bp, Homo sapien
ttattctacagagcaggctgccattgtacaata

SEQ ID NO: 31667 - DNA, 33 bp, Homo sapien
ctgctctgtagaataaatgcttggtgaatttct

SEQ ID NO: 31668 - DNA, 33 bp, Homo sapien
ctgctctgtagaataagtgcttggtgaatttct

SEQ ID NO: 31669 - DNA, 33 bp, Homo sapien
agttaagttatagatgcagatcgtgtgagaatt

SEQ ID NO: 31670 - DNA, 33 bp, Homo sapien
agttaagttatagatgtagatcgtgtgagaatt

SEQ ID NO: 31671 - DNA, 33 bp, Homo sapien
tatctgatggcactgcaagtaaaatgaagttgc

SEQ ID NO: 31672 - DNA, 33 bp, Homo sapien
tatctgatggcactgcgagtaaaatgaagttgc

SEQ ID NO: 31673 - DNA, 33 bp, Homo sapien
ctgttgttcagtgaaacaaggtagtaatggcta

SEQ ID NO: 31674 - DNA, 33 bp, Homo sapien
ctgttgttcagtgaaataaggtagtaatggcta

SEQ ID NO: 31675 - DNA, 33 bp, Homo sapien
ctacacttgggcaactaaatttcatatgcaagg

SEQ ID NO: 31676 - DNA, 33 bp, Homo sapien
ctacacttgggcaactgaatttcatatgcaagg

SEQ ID NO: 31677 - DNA, 33 bp, Homo sapien
ttgtgaataacgccgcaataaacgtacctgtgc

SEQ ID NO: 31678 - DNA, 33 bp, Homo sapien
ttgtgaataacgccgcgataaacgtacctgtgc

SEQ ID NO: 31679 - DNA, 33 bp, Homo sapien
tttagctccaacttaaagagaacatgtggtatt

SEQ ID NO: 31680 - DNA, 33 bp, Homo sapien
tttagctccaacttaaggagaacatgtggtatt

SEQ ID NO: 31681 - DNA, 33 bp, Homo sapien
atctacttgatggccaaatgtatgtcttttttt

SEQ ID NO: 31682 - DNA, 33 bp, Homo sapien
atctacttgatggccagatgtatgtcttttttt

SEQ ID NO: 31683 - DNA, 33 bp, Homo sapien
catgatttataagagcaaaaaagtagaaacaac

SEQ ID NO: 31684 - DNA, 33 bp, Homo sapien
catgatttataagagcgaaaaagtagaaacaac

SEQ ID NO: 31685 - DNA, 33 bp, Homo sapien
cgccaaactggtttacaaagaaactgcagattt

SEQ ID NO: 31686 - DNA, 33 bp, Homo sapien
cgccaaactggtttacgaagaaactgcagattt

SEQ ID NO: 31687 - DNA, 33 bp, Homo sapien
tcattactgatgcttcccttgctttatttttca

SEQ ID NO: 31688 - DNA, 33 bp, Homo sapien
tcattactgatgcttctcttgctttatttttca

SEQ ID NO: 31689 - DNA, 33 bp, Homo sapien
tatgacagctggtgacaagtagagcagagatgg

SEQ ID NO: 31690 - DNA, 33 bp, Homo sapien
tatgacagctggtgacgagtagagcagagatgg

SEQ ID NO: 31691 - DNA, 33 bp, Homo sapien
agtcatcccttttgaccctaccagaaaatggtt

SEQ ID NO: 31692 - DNA, 33 bp, Homo sapien
agtcatcccttttgacgctaccagaaaatggtt

SEQ ID NO: 31693 - DNA, 33 bp, Homo sapien
atgtctgctataattgaaccgtgtttccccaaa

SEQ ID NO: 31694 - DNA, 33 bp, Homo sapien
atgtctgctataattggaccgtgtttccccaaa

SEQ ID NO: 31695 - DNA, 33 bp, Homo sapien
tctcagtgttcattcaataattagttgcaaaaa

SEQ ID NO: 31696 - DNA, 33 bp, Homo sapien
tctcagtgttcattcagtaattagttgcaaaaa

SEQ ID NO: 31697 - DNA, 33 bp, Homo sapien
gcaaattcctgagggaccttcatgcttaaaact

SEQ ID NO: 31698 - DNA, 33 bp, Homo sapien
gcaaattcctgagggatcttcatgcttaaaact

SEQ ID NO: 31699 - DNA, 33 bp, Homo sapien
tcatgagacatgtttaagtttgcactctttctc

SEQ ID NO: 31700 - DNA, 33 bp, Homo sapien
tcatgagacatgtttacgtttgcactctttctc

SEQ ID NO: 31701 - DNA, 33 bp, Homo sapien
tatttgcctttgagaaagtttgtctacatttgc

SEQ ID NO: 31702 - DNA, 33 bp, Homo sapien
tatttgcctttgagaatgtttgtctacatttgc

SEQ ID NO: 31703 - DNA, 33 bp, Homo sapien
aacaaaggtgaacccccatttacaatctagtgt

SEQ ID NO: 31704 - DNA, 33 bp, Homo sapien
aacaaaggtgaacccctatttacaatctagtgt

SEQ ID NO: 31705 - DNA, 33 bp, Homo sapien
atatacttacaggagaagtccaacatgaaaata

SEQ ID NO: 31706 - DNA, 33 bp, Homo sapien
atatacttacaggagatgtccaacatgaaaata

SEQ ID NO: 31707 - DNA, 33 bp, Homo sapien
agataccaatatgtcacgataaccgatactgaa

SEQ ID NO: 31708 - DNA, 33 bp, Homo sapien
agataccaatatgtcatgataaccgatactgaa

SEQ ID NO: 31709 - DNA, 33 bp, Homo sapien
tacaaccttaatccaccggctttttgagtctgt

SEQ ID NO: 31710 - DNA, 33 bp, Homo sapien
tacaaccttaatccactggctttttgagtctgt

SEQ ID NO: 31711 - DNA, 33 bp, Homo sapien
acctggagcgtttgcaaaactgtactgtaagca

SEQ ID NO: 31712 - DNA, 33 bp, Homo sapien
acctggagcgtttgcagaactgtactgtaagca

SEQ ID NO: 31713 - DNA, 33 bp, Homo sapien
tgtccttccttattccaactgcttcacaagaat

SEQ ID NO: 31714 - DNA, 33 bp, Homo sapien
tgtccttccttattccgactgcttcacaagaat

SEQ ID NO: 31715 - DNA, 33 bp, Homo sapien
gagctgccatttcctcaaaagttgtgattaaca

SEQ ID NO: 31716 - DNA, 33 bp, Homo sapien
gagctgccatttcctcgaaagttgtgattaaca

SEQ ID NO: 31717 - DNA, 33 bp, Homo sapien
ttctagcattcagaagacacttactgaacactt

SEQ ID NO: 31718 - DNA, 33 bp, Homo sapien
ttctagcattcagaaggcacttactgaacactt

SEQ ID NO: 31719 - DNA, 33 bp, Homo sapien
taaatgaggtcatccaccctaggactttaaata

SEQ ID NO: 31720 - DNA, 33 bp, Homo sapien
taaatgaggtcatccagcctaggactttaaata

SEQ ID NO: 31721 - DNA, 33 bp, Homo sapien
acaggctacctggagacaaactcagtgctgtta

SEQ ID NO: 31722 - DNA, 33 bp, Homo sapien
acaggctacctggagagaaactcagtgctgtta

SEQ ID NO: 31723 - DNA, 33 bp, Homo sapien
tgatgagtttcaataacggtaataagctaataa

SEQ ID NO: 31724 - DNA, 33 bp, Homo sapien
tgatgagtttcaataatggtaataagctaataa

SEQ ID NO: 31725 - DNA, 33 bp, Homo sapien
cttctactctcttaaactgaactagaggacctc

SEQ ID NO: 31726 - DNA, 33 bp, Homo sapien
cttctactctcttaaagtgaactagaggacctc

SEQ ID NO: 31727 - DNA, 33 bp, Homo sapien
ctataaagctgcaacaaaaaaaggtaattggta

SEQ ID NO: 31728 - DNA, 33 bp, Homo sapien
ctataaagctgcaacagaaaaaggtaattggta

SEQ ID NO: 31729 - DNA, 33 bp, Homo sapien
cctacacagctgaaaacgcactctcctttctcc

SEQ ID NO: 31730 - DNA, 33 bp, Homo sapien
cctacacagctgaaaatgcactctcctttctcc

SEQ ID NO: 31731 - DNA, 33 bp, Homo sapien
gaatgtagccaacagaaaaatgccaggataaga

SEQ ID NO: 31732 - DNA, 33 bp, Homo sapien
gaatgtagccaacagagaaatgccaggataaga

SEQ ID NO: 31733 - DNA, 33 bp, Homo sapien
atgcaagggaccaatgaagaattatctcccagt

SEQ ID NO: 31734 - DNA, 33 bp, Homo sapien
atgcaagggaccaatggagaattatctcccagt

SEQ ID NO: 31735 - DNA, 33 bp, Homo sapien
agaccaacaaagtccacattatgtcaccattcc

SEQ ID NO: 31736 - DNA, 33 bp, Homo sapien
agaccaacaaagtccatattatgtcaccattcc

SEQ ID NO: 31737 - DNA, 33 bp, Homo sapien
aaagttctactagcaccactatctagaggctta

SEQ ID NO: 31738 - DNA, 33 bp, Homo sapien
aaagttctactagcactactatctagaggctta

SEQ ID NO: 31739 - DNA, 33 bp, Homo sapien
atcaacagtctttggacacataaacaaaaatct

SEQ ID NO: 31740 - DNA, 33 bp, Homo sapien
atcaacagtctttggatacataaacaaaaatct

SEQ ID NO: 31741 - DNA, 33 bp, Homo sapien
ttcagcactgtttctccccacagtcttatgttc

SEQ ID NO: 31742 - DNA, 33 bp, Homo sapien
ttcagcactgtttctctccacagtcttatgttc

SEQ ID NO: 31743 - DNA, 33 bp, Homo sapien
aagagctagcacaatcacatatttgaaaggaga

SEQ ID NO: 31744 - DNA, 33 bp, Homo sapien
aagagctagcacaatcccatatttgaaaggaga

SEQ ID NO: 31745 - DNA, 33 bp, Homo sapien
tatctggtctacatgaaaagagaaagaggaaag

SEQ ID NO: 31746 - DNA, 33 bp, Homo sapien
tatctggtctacatgagaagagaaagaggaaag

SEQ ID NO: 31747 - DNA, 33 bp, Homo sapien
tcttttttactacacaaagcataaggtcaaaaa

SEQ ID NO: 31748 - DNA, 33 bp, Homo sapien
tcttttttactacacagagcataaggtcaaaaa

SEQ ID NO: 31749 - DNA, 33 bp, Homo sapien
tcttaggtctgtctcacatttcacaaaagagct

SEQ ID NO: 31750 - DNA, 33 bp, Homo sapien
tcttaggtctgtctcatatttcacaaaagagct

SEQ ID NO: 31751 - DNA, 33 bp, Homo sapien
gttgtgaaatatggaacagtagtgacaaaatac

SEQ ID NO: 31752 - DNA, 33 bp, Homo sapien
gttgtgaaatatggaatagtagtgacaaaatac

SEQ ID NO: 31753 - DNA, 33 bp, Homo sapien
ctcagttcccagattcaagttccggccttgttc

SEQ ID NO: 31754 - DNA, 33 bp, Homo sapien
ctcagttcccagattcgagttccggccttgttc

SEQ ID NO: 31755 - DNA, 33 bp, Homo sapien
ccacagatagagagcaaaaggatgaatcaataa

SEQ ID NO: 31756 - DNA, 33 bp, Homo sapien
ccacagatagagagcacaaggatgaatcaataa

SEQ ID NO: 31757 - DNA, 33 bp, Homo sapien
accagttaattaataaacaacaactatgtacca

SEQ ID NO: 31758 - DNA, 33 bp, Homo sapien
accagttaattaataagcaacaactatgtacca

SEQ ID NO: 31759 - DNA, 33 bp, Homo sapien
ctggcatgtaacaagcacatattatgagtgaat

SEQ ID NO: 31760 - DNA, 33 bp, Homo sapien
ctggcatgtaacaagcgcatattatgagtgaat

SEQ ID NO: 31761 - DNA, 33 bp, Homo sapien
cttacattatacttaaacaacttataccatatt

SEQ ID NO: 31762 - DNA, 33 bp, Homo sapien
cttacattatacttaagcaacttataccatatt

SEQ ID NO: 31763 - DNA, 33 bp, Homo sapien
atgaaagccaaggaaacaaatatagttttggat

SEQ ID NO: 31764 - DNA, 33 bp, Homo sapien
atgaaagccaaggaaataaatatagttttggat

SEQ ID NO: 31765 - DNA, 33 bp, Homo sapien
atttcaacgctattctcaactactgtcaaatca

SEQ ID NO: 31766 - DNA, 33 bp, Homo sapien
atttcaacgctattctgaactactgtcaaatca

SEQ ID NO: 31767 - DNA, 33 bp, Homo sapien
taatatgtttctgttacagttttaaccacagtt

SEQ ID NO: 31768 - DNA, 33 bp, Homo sapien
taatatgtttctgttatagttttaaccacagtt

SEQ ID NO: 31769 - DNA, 33 bp, Homo sapien
ctgtgactatctggaccagaatttccaagagct

SEQ ID NO: 31770 - DNA, 33 bp, Homo sapien
ctgtgactatctggacgagaatttccaagagct

SEQ ID NO: 31771 - DNA, 33 bp, Homo sapien
aagatacataaaacaaaattatgtgagtataca

SEQ ID NO: 31772 - DNA, 33 bp, Homo sapien
aagatacataaaacaacattatgtgagtataca

SEQ ID NO: 31773 - DNA, 33 bp, Homo sapien
tggtgagaagtggtcaaaatctagatacatttt

SEQ ID NO: 31774 - DNA, 33 bp, Homo sapien
tggtgagaagtggtcacaatctagatacatttt

SEQ ID NO: 31775 - DNA, 33 bp, Homo sapien
tcatcttattagcataaactctggtgtggtcag

SEQ ID NO: 31776 - DNA, 33 bp, Homo sapien
tcatcttattagcatagactctggtgtggtcag

SEQ ID NO: 31777 - DNA, 33 bp, Homo sapien
gcaagatctgcctgcaaacacatgcgttagcaa

SEQ ID NO: 31778 - DNA, 33 bp, Homo sapien
gcaagatctgcctgcacacacatgcgttagcaa

SEQ ID NO: 31779 - DNA, 33 bp, Homo sapien
tgcagttaaatcatggccagttttagctagttt

SEQ ID NO: 31780 - DNA, 33 bp, Homo sapien
tgcagttaaatcatggtcagttttagctagttt

SEQ ID NO: 31781 - DNA, 33 bp, Homo sapien
catttttaaatcctagccacaagaacatgaagc

SEQ ID NO: 31782 - DNA, 33 bp, Homo sapien
catttttaaatcctagtcacaagaacatgaagc

SEQ ID NO: 31783 - DNA, 33 bp, Homo sapien
gtctgattcattattggatctcttcagcacctt

SEQ ID NO: 31784 - DNA, 33 bp, Homo sapien
gtctgattcattattgtatctcttcagcacctt

SEQ ID NO: 31785 - DNA, 33 bp, Homo sapien
attgtactcatccccaatcttcagtgaaaattt

SEQ ID NO: 31786 - DNA, 33 bp, Homo sapien
attgtactcatccccagtcttcagtgaaaattt

SEQ ID NO: 31787 - DNA, 33 bp, Homo sapien
cagtgaaaatttacaccgccgaaactagctatg

SEQ ID NO: 31788 - DNA, 33 bp, Homo sapien
cagtgaaaatttacactgccgaaactagctatg

SEQ ID NO: 31789 - DNA, 33 bp, Homo sapien
aataatactcctcccaatgatatttctgtataa

SEQ ID NO: 31790 - DNA, 33 bp, Homo sapien
aataatactcctcccagtgatatttctgtataa

SEQ ID NO: 31791 - DNA, 33 bp, Homo sapien
aaataactaagttgccagaagtaaattgcttgt

SEQ ID NO: 31792 - DNA, 33 bp, Homo sapien
aaataactaagttgccggaagtaaattgcttgt

SEQ ID NO: 31793 - DNA, 33 bp, Homo sapien
ttcttaactgtgaatacaacacttcagtgaact

SEQ ID NO: 31794 - DNA, 33 bp, Homo sapien
ttcttaactgtgaatataacacttcagtgaact

SEQ ID NO: 31795 - DNA, 33 bp, Homo sapien
aactctctgagtataacgaattttggtaagttc

SEQ ID NO: 31796 - DNA, 33 bp, Homo sapien
aactctctgagtataatgaattttggtaagttc

SEQ ID NO: 31797 - DNA, 33 bp, Homo sapien
ctatacacagcttagaacttcatttctcatttt

SEQ ID NO: 31798 - DNA, 33 bp, Homo sapien
ctatacacagcttagagcttcatttctcatttt

SEQ ID NO: 31799 - DNA, 33 bp, Homo sapien
acatgtaacttcatgaaaaactattcttaacca

SEQ ID NO: 31800 - DNA, 33 bp, Homo sapien
acatgtaacttcatgataaactattcttaacca

SEQ ID NO: 31801 - DNA, 33 bp, Homo sapien
catttttctccactgaagtcattggggaagttt

SEQ ID NO: 31802 - DNA, 33 bp, Homo sapien
catttttctccactgaggtcattggggaagttt

SEQ ID NO: 31803 - DNA, 33 bp, Homo sapien
ttttttgagcctttatgaagtgtttgttaccat

SEQ ID NO: 31804 - DNA, 33 bp, Homo sapien
ttttttgagcctttattaagtgtttgttaccat

SEQ ID NO: 31805 - DNA, 33 bp, Homo sapien
cgatcctgcggaactgacagatcttcccgctga

SEQ ID NO: 31806 - DNA, 33 bp, Homo sapien
cgatcctgcggaactggcagatcttcccgctga

SEQ ID NO: 31807 - DNA, 33 bp, Homo sapien
atgtgttatctcaggcagatgactatccacaat

SEQ ID NO: 31808 - DNA, 33 bp, Homo sapien
atgtgttatctcaggccgatgactatccacaat

SEQ ID NO: 31809 - DNA, 33 bp, Homo sapien
aaaattattatagtgaggtcaagattgcttaaa

SEQ ID NO: 31810 - DNA, 33 bp, Homo sapien
aaaattattatagtgatgtcaagattgcttaaa

SEQ ID NO: 31811 - DNA, 33 bp, Homo sapien
ttagatagaaacagacacttttgacatatttgg

SEQ ID NO: 31812 - DNA, 33 bp, Homo sapien
ttagatagaaacagacccttttgacatatttgg

SEQ ID NO: 31813 - DNA, 33 bp, Homo sapien
gatttcactgacatctgaagtcaaaagtaaggg

SEQ ID NO: 31814 - DNA, 33 bp, Homo sapien
gatttcactgacatcttaagtcaaaagtaaggg

SEQ ID NO: 31815 - DNA, 33 bp, Homo sapien
aaagactctcatgagaacagccatcatactgga

SEQ ID NO: 31816 - DNA, 33 bp, Homo sapien
aaagactctcatgagagcagccatcatactgga

SEQ ID NO: 31817 - DNA, 33 bp, Homo sapien
agttttttgactatgagatttgtttgcatgtct

SEQ ID NO: 31818 - DNA, 33 bp, Homo sapien
agttttttgactatgatatttgtttgcatgtct

SEQ ID NO: 31819 - DNA, 33 bp, Homo sapien
tctaagcattagacaacaggcatcacaaaactg

SEQ ID NO: 31820 - DNA, 33 bp, Homo sapien
tctaagcattagacaataggcatcacaaaactg

SEQ ID NO: 31821 - DNA, 33 bp, Homo sapien
accacattgcagaaaacttggaaagtgacaaaa

SEQ ID NO: 31822 - DNA, 33 bp, Homo sapien
accacattgcagaaaatttggaaagtgacaaaa

SEQ ID NO: 31823 - DNA, 33 bp, Homo sapien
agaaaggttgggtaaccgagattagagtttgtg

SEQ ID NO: 31824 - DNA, 33 bp, Homo sapien
agaaaggttgggtaactgagattagagtttgtg

SEQ ID NO: 31825 - DNA, 33 bp, Homo sapien
agagagaacttgagaagccaaacaaaggcaatc

SEQ ID NO: 31826 - DNA, 33 bp, Homo sapien
agagagaacttgagaatccaaacaaaggcaatc

SEQ ID NO: 31827 - DNA, 33 bp, Homo sapien
gttggggacctctgcactaaaccatattcccaa

SEQ ID NO: 31828 - DNA, 33 bp, Homo sapien
gttggggacctctgcagtaaaccatattcccaa

SEQ ID NO: 31829 - DNA, 33 bp, Homo sapien
gcagctgtaaatactacgtaagttatcagtaag

SEQ ID NO: 31830 - DNA, 33 bp, Homo sapien
gcagctgtaaatactatgtaagttatcagtaag

SEQ ID NO: 31831 - DNA, 33 bp, Homo sapien
gggaatgtaagtgactcagtatagttagaactt

SEQ ID NO: 31832 - DNA, 33 bp, Homo sapien
gggaatgtaagtgacttagtatagttagaactt

SEQ ID NO: 31833 - DNA, 33 bp, Homo sapien
gaagcaggagacctggaacttatagatgctgtc

SEQ ID NO: 31834 - DNA, 33 bp, Homo sapien
gaagcaggagacctggcacttatagatgctgtc

SEQ ID NO: 31835 - DNA, 33 bp, Homo sapien
tccctctactgtgacccaaggaaacaatttatt

SEQ ID NO: 31836 - DNA, 33 bp, Homo sapien
tccctctactgtgacctaaggaaacaatttatt

SEQ ID NO: 31837 - DNA, 33 bp, Homo sapien
gctgtgtgaccctgcacgagatagtgaatctca

SEQ ID NO: 31838 - DNA, 33 bp, Homo sapien
gctgtgtgaccctgcatgagatagtgaatctca

SEQ ID NO: 31839 - DNA, 33 bp, Homo sapien
agtgctcaaatattgacggaacatgtttaaaaa

SEQ ID NO: 31840 - DNA, 33 bp, Homo sapien
agtgctcaaatattgatggaacatgtttaaaaa

SEQ ID NO: 31841 - DNA, 33 bp, Homo sapien
atcttagccttcggaaaggtgagactttacatt

SEQ ID NO: 31842 - DNA, 33 bp, Homo sapien
atcttagccttcggaacggtgagactttacatt

SEQ ID NO: 31843 - DNA, 33 bp, Homo sapien
tttccttcttgaatgacccacgacacagggttg

SEQ ID NO: 31844 - DNA, 33 bp, Homo sapien
tttccttcttgaatgatccacgacacagggttg

SEQ ID NO: 31845 - DNA, 33 bp, Homo sapien
taatacaaagacaaacccaagtaagaaatgagc

SEQ ID NO: 31846 - DNA, 33 bp, Homo sapien
taatacaaagacaaactcaagtaagaaatgagc

SEQ ID NO: 31847 - DNA, 33 bp, Homo sapien
ggagaattatctcacaatgcaggctctaacaga

SEQ ID NO: 31848 - DNA, 33 bp, Homo sapien
ggagaattatctcacagtgcaggctctaacaga

SEQ ID NO: 31849 - DNA, 33 bp, Homo sapien
tttcttggttggtatcccactgtgtgtgtcctt

SEQ ID NO: 31850 - DNA, 33 bp, Homo sapien
tttcttggttggtatctcactgtgtgtgtcctt

SEQ ID NO: 31851 - DNA, 33 bp, Homo sapien
atgaatgctcagtgaaatctacactctgcacca

SEQ ID NO: 31852 - DNA, 33 bp, Homo sapien
atgaatgctcagtgaagtctacactctgcacca

SEQ ID NO: 31853 - DNA, 33 bp, Homo sapien
cattcagtctttgtgaagtatcaaacatttgac

SEQ ID NO: 31854 - DNA, 33 bp, Homo sapien
cattcagtctttgtgaggtatcaaacatttgac

SEQ ID NO: 31855 - DNA, 33 bp, Homo sapien
ttgtgggtttatattcactttcatggtttgtac

SEQ ID NO: 31856 - DNA, 33 bp, Homo sapien
ttgtgggtttatattcgctttcatggtttgtac

SEQ ID NO: 31857 - DNA, 33 bp, Homo sapien
gatctgcccgcatacccgcatacctgagtatcc

SEQ ID NO: 31858 - DNA, 33 bp, Homo sapien
gatctgcccgcatacctgcatacctgagtatcc

SEQ ID NO: 31859 - DNA, 33 bp, Homo sapien
acactacactaacccaacttggagtcacttatg

SEQ ID NO: 31860 - DNA, 33 bp, Homo sapien
acactacactaacccagcttggagtcacttatg

SEQ ID NO: 31861 - DNA, 33 bp, Homo sapien
aagcagagcttgaagacagcaaaatttggcatt

SEQ ID NO: 31862 - DNA, 33 bp, Homo sapien
aagcagagcttgaagagagcaaaatttggcatt

SEQ ID NO: 31863 - DNA, 33 bp, Homo sapien
gtaggacacagtaagaagttcaatgaaagccac

SEQ ID NO: 31864 - DNA, 33 bp, Homo sapien
gtaggacacagtaagaggttcaatgaaagccac

SEQ ID NO: 31865 - DNA, 33 bp, Homo sapien
atggggctgtttctcacgaatagtttaacactg

SEQ ID NO: 31866 - DNA, 33 bp, Homo sapien
atggggctgtttctcatgaatagtttaacactg

SEQ ID NO: 31867 - DNA, 33 bp, Homo sapien
attcttgcagaacatgaaatatacaaatatatc

SEQ ID NO: 31868 - DNA, 33 bp, Homo sapien
attcttgcagaacatggaatatacaaatatatc

SEQ ID NO: 31869 - DNA, 33 bp, Homo sapien
tcacaggatgaatacaatgagttttactcaaca

SEQ ID NO: 31870 - DNA, 33 bp, Homo sapien
tcacaggatgaatacagtgagttttactcaaca

SEQ ID NO: 31871 - DNA, 33 bp, Homo sapien
ccatgcttatgaataaaatgaaacaagatcatg

SEQ ID NO: 31872 - DNA, 33 bp, Homo sapien
ccatgcttatgaataagatgaaacaagatcatg

SEQ ID NO: 31873 - DNA, 33 bp, Homo sapien
aataagaacaagcagtaaaatacatcaaacaca

SEQ ID NO: 31874 - DNA, 33 bp, Homo sapien
aataagaacaagcagttaaatacatcaaacaca

SEQ ID NO: 31875 - DNA, 33 bp, Homo sapien
tagaaaaaatggcatccgaacaaaagttgcttc

SEQ ID NO: 31876 - DNA, 33 bp, Homo sapien
tagaaaaaatggcatctgaacaaaagttgcttc

SEQ ID NO: 31877 - DNA, 33 bp, Homo sapien
ctaattggcatgactacctctttggcatacctc

SEQ ID NO: 31878 - DNA, 33 bp, Homo sapien
ctaattggcatgactatctctttggcatacctc

SEQ ID NO: 31879 - DNA, 33 bp, Homo sapien
tttaatcatttcttaacagtagcattttggtaa

SEQ ID NO: 31880 - DNA, 33 bp, Homo sapien
tttaatcatttcttaagagtagcattttggtaa

SEQ ID NO: 31881 - DNA, 33 bp, Homo sapien
ggacacttgcccttcccctttggctgtggcaaa

SEQ ID NO: 31882 - DNA, 33 bp, Homo sapien
ggacacttgcccttcctctttggctgtggcaaa

SEQ ID NO: 31883 - DNA, 33 bp, Homo sapien
ttgctagtttcctacactattaccagcaggaca

SEQ ID NO: 31884 - DNA, 33 bp, Homo sapien
ttgctagtttcctacattattaccagcaggaca

SEQ ID NO: 31885 - DNA, 33 bp, Homo sapien
aataagcattttgtacaagacaccctaagactc

SEQ ID NO: 31886 - DNA, 33 bp, Homo sapien
aataagcattttgtacgagacaccctaagactc

SEQ ID NO: 31887 - DNA, 33 bp, Homo sapien; identical to SEQ ID NO: 31885

SEQ ID NO: 31888 - DNA, 33 bp, Homo sapien; identical to SEQ ID NO: 31886

SEQ ID NO: 31889 - DNA, 33 bp, Homo sapien
cttccagtttttcacaatagagcaggaaataat

SEQ ID NO: 31890 - DNA, 33 bp, Homo sapien
cttccagtttttcacagtagagcaggaaataat

SEQ ID NO: 31891 - DNA, 33 bp, Homo sapien; identical to SEQ ID NO: 31889

SEQ ID NO: 31892 - DNA, 33 bp, Homo sapien; identical to SEQ ID NO: 31890

SEQ ID NO: 31893 - DNA, 33 bp, Homo sapien
cttagtttaagcaggaacttcattagaattttc

SEQ ID NO: 31894 - DNA, 33 bp, Homo sapien
cttagtttaagcaggaccttcattagaattttc

SEQ ID NO: 31895 - DNA, 33 bp, Homo sapien
ggttaacatgctccaactgtattgtggacctat

SEQ ID NO: 31896 - DNA, 33 bp, Homo sapien
ggttaacatgctccaagtgtattgtggacctat

SEQ ID NO: 31897 - DNA, 33 bp, Homo sapien
ccatgattcctacctaaatctcattgtagactt

SEQ ID NO: 31898 - DNA, 33 bp, Homo sapien
ccatgattcctacctacatctcattgtagactt

SEQ ID NO: 31899 - DNA, 33 bp, Homo sapien
aaaaagagttaaacaacgcaaagcaaaaccaga

SEQ ID NO: 31900 - DNA, 33 bp, Homo sapien
aaaaagagttaaacaatgcaaagcaaaaccaga

SEQ ID NO: 31901 - DNA, 33 bp, Homo sapien
cacattctcgcttgtacaggctggtgacaaagt

SEQ ID NO: 31902 - DNA, 33 bp, Homo sapien
cacattctcgcttgtagaggctggtgacaaagt

SEQ ID NO: 31903 - DNA, 33 bp, Homo sapien
acttgagagtatcatccgaaatatgtagaagag

SEQ ID NO: 31904 - DNA, 33 bp, Homo sapien
acttgagagtatcatctgaaatatgtagaagag

SEQ ID NO: 31905 - DNA, 33 bp, Homo sapien
ttctagacttcacgcacatcagaaccaattaag

SEQ ID NO: 31906 - DNA, 33 bp, Homo sapien
ttctagacttcacgcatatcagaaccaattaag

SEQ ID NO: 31907 - DNA, 33 bp, Homo sapien
agcccctgcatttaatcactgcgtatttccaat

SEQ ID NO: 31908 - DNA, 33 bp, Homo sapien
agcccctgcatttaattactgcgtatttccaat

SEQ ID NO: 31909 - DNA, 33 bp, Homo sapien
ttttatcacggttccactcccttggtatgtgac

SEQ ID NO: 31910 - DNA, 33 bp, Homo sapien
ttttatcacggttccattcccttggtatgtgac

SEQ ID NO: 31911 - DNA, 33 bp, Homo sapien
attatttagccattcacaataagccacgtgtgt

SEQ ID NO: 31912 - DNA, 33 bp, Homo sapien
attatttagccattcataataagccacgtgtgt

SEQ ID NO: 31913 - DNA, 33 bp, Homo sapien
ggcagaggaaacagcacatagaaagactcagat

SEQ ID NO: 31914 - DNA, 33 bp, Homo sapien
ggcagaggaaacagcatatagaaagactcagat

SEQ ID NO: 31915 - DNA, 33 bp, Homo sapien
ttacgttctcaccccaaatttccacgaatggac

SEQ ID NO: 31916 - DNA, 33 bp, Homo sapien
ttacgttctcaccccagatttccacgaatggac

SEQ ID NO: 31917 - DNA, 33 bp, Homo sapien
tatatgaagcccctaacgcaaagctctttacct

SEQ ID NO: 31918 - DNA, 33 bp, Homo sapien
tatatgaagcccctaatgcaaagctctttacct

SEQ ID NO: 31919 - DNA, 33 bp, Homo sapien
acttcatataaacagaaatatgctgtatgtact

SEQ ID NO: 31920 - DNA, 33 bp, Homo sapien
acttcatataaacagagatatgctgtatgtact

SEQ ID NO: 31921 - DNA, 33 bp, Homo sapien
agagcagtgagaatgacggaatggggaaatgag

SEQ ID NO: 31922 - DNA, 33 bp, Homo sapien
agagcagtgagaatgagggaatggggaaatgag

SEQ ID NO: 31923 - DNA, 33 bp, Homo sapien
caagaaaatggggggccaatttgaggttccacc

SEQ ID NO: 31924 - DNA, 33 bp, Homo sapien
caagaaaatggggggctaatttgaggttccacc

SEQ ID NO: 31925 - DNA, 33 bp, Homo sapien
tccagctgcacgacacgggcatgtatttttatg

SEQ ID NO: 31926 - DNA, 33 bp, Homo sapien
tccagctgcacgacactggcatgtatttttatg

SEQ ID NO: 31927 - DNA, 33 bp, Homo sapien
ttatcagttgccaacaatatatcactctgagtt

SEQ ID NO: 31928 - DNA, 33 bp, Homo sapien
ttatcagttgccaacagtatatcactctgagtt

SEQ ID NO: 31929 - DNA, 33 bp, Homo sapien
tcagtgacataatccacagcagtacatatcaat

SEQ ID NO: 31930 - DNA, 33 bp, Homo sapien
tcagtgacataatccatagcagtacatatcaat

SEQ ID NO: 31931 - DNA, 33 bp, Homo sapien
agaaacaatcaaaaacccactcaacattttaga

SEQ ID NO: 31932 - DNA, 33 bp, Homo sapien
agaaacaatcaaaaactcactcaacattttaga

SEQ ID NO: 31933 - DNA, 33 bp, Homo sapien
atctttgtctggataactcttattcttctttga

SEQ ID NO: 31934 - DNA, 33 bp, Homo sapien
atctttgtctggataattcttattcttctttga

SEQ ID NO: 31935 - DNA, 33 bp, Homo sapien
tcccatcatagcaaaagtgttaaattgtcatca

SEQ ID NO: 31936 - DNA, 33 bp, Homo sapien
tcccatcatagcaaaattgttaaattgtcatca

SEQ ID NO: 31937 - DNA, 33 bp, Homo sapien
gcacattcaataaagtaacaggactctatgaaa

SEQ ID NO: 31938 - DNA, 33 bp, Homo sapien
gcacattcaataaagttacaggactctatgaaa

SEQ ID NO: 31939 - DNA, 33 bp, Homo sapien
agataatccactgctcactgatgatttctctaa

SEQ ID NO: 31940 - DNA, 33 bp, Homo sapien
agataatccactgctcgctgatgatttctctaa

SEQ ID NO: 31941 - DNA, 33 bp, Homo sapien
ccaacacactatattccaaccttcaactcccaa

SEQ ID NO: 31942 - DNA, 33 bp, Homo sapien
ccaacacactatattctaaccttcaactcccaa

SEQ ID NO: 31943 - DNA, 33 bp, Homo sapien
aggtggtttcttccagaatgttctcgttacagt

SEQ ID NO: 31944 - DNA, 33 bp, Homo sapien
aggtggtttcttccaggatgttctcgttacagt

SEQ ID NO: 31945 - DNA, 33 bp, Homo sapien
gctgcccatgtacaaaatgaactcatacagata

SEQ ID NO: 31946 - DNA, 33 bp, Homo sapien
gctgcccatgtacaaagtgaactcatacagata

SEQ ID NO: 31947 - DNA, 33 bp, Homo sapien
agccacatgaaacagaataggaggttgaaaggg

SEQ ID NO: 31948 - DNA, 33 bp, Homo sapien
agccacatgaaacagagtaggaggttgaaaggg

SEQ ID NO: 31949 - DNA, 33 bp, Homo sapien
acaggggtaataaaacacagatgcacgcaggca

SEQ ID NO: 31950 - DNA, 33 bp, Homo sapien
acaggggtaataaaacgcagatgcacgcaggca

SEQ ID NO: 31951 - DNA, 33 bp, Homo sapien
tggggaaacagcaaagaaggtgttcctagtttc

SEQ ID NO: 31952 - DNA, 33 bp, Homo sapien
tggggaaacagcaaaggaggtgttcctagtttc

SEQ ID NO: 31953 - DNA, 33 bp, Homo sapien
aggaaaggagaaaagaaattctagagggaataa

SEQ ID NO: 31954 - DNA, 33 bp, Homo sapien
aggaaaggagaaaagagattctagagggaataa

SEQ ID NO: 31955 - DNA, 33 bp, Homo sapien
ctcatgtaaaagtgcaagacctttaatatgtag

SEQ ID NO: 31956 - DNA, 33 bp, Homo sapien
ctcatgtaaaagtgcaggacctttaatatgtag

SEQ ID NO: 31957 - DNA, 33 bp, Homo sapien
atttctccaccaggtagagacagaaaacttcca

SEQ ID NO: 31958 - DNA, 33 bp, Homo sapien
atttctccaccaggtatagacagaaaacttcca

SEQ ID NO: 31959 - DNA, 33 bp, Homo sapien
tcttgacaatgggaatcatatagttagttcaaa

SEQ ID NO: 31960 - DNA, 33 bp, Homo sapien
tcttgacaatgggaatgatatagttagttcaaa

SEQ ID NO: 31961 - DNA, 33 bp, Homo sapien
cttcaatgtcacgtacaggaaaaccctctgata

SEQ ID NO: 31962 - DNA, 33 bp, Homo sapien
cttcaatgtcacgtacgggaaaaccctctgata

SEQ ID NO: 31963 - DNA, 33 bp, Homo sapien
ggaagaactggaaatggagcatagatgtctgca

SEQ ID NO: 31964 - DNA, 33 bp, Homo sapien
ggaagaactggaaatgtagcatagatgtctgca

SEQ ID NO: 31965 - DNA, 33 bp, Homo sapien
ttcaagtgaatactaccgctctcatcccaaagg

SEQ ID NO: 31966 - DNA, 33 bp, Homo sapien
ttcaagtgaatactactgctctcatcccaaagg

SEQ ID NO: 31967 - DNA, 33 bp, Homo sapien
taagaaccgcacgaagcccttaataagtgtgag

SEQ ID NO: 31968 - DNA, 33 bp, Homo sapien
taagaaccgcacgaaggccttaataagtgtgag

SEQ ID NO: 31969 - DNA, 33 bp, Homo sapien
ttctgggcgttcactgcaagctataaactctac

SEQ ID NO: 31970 - DNA, 33 bp, Homo sapien
ttctgggcgttcactggaagctataaactctac

SEQ ID NO: 31971 - DNA, 33 bp, Homo sapien
ggaaacagaaaaccgacaaggccagaaaggctg

SEQ ID NO: 31972 - DNA, 33 bp, Homo sapien
ggaaacagaaaaccgagaaggccagaaaggctg

SEQ ID NO: 31973 - DNA, 33 bp, Homo sapien
gcctgttgatccaatccctttagctgtccccag

SEQ ID NO: 31974 - DNA, 33 bp, Homo sapien
gcctgttgatccaatctctttagctgtccccag

SEQ ID NO: 31975 - DNA, 33 bp, Homo sapien; identical to SEQ ID NO: 31973

SEQ ID NO: 31976 - DNA, 33 bp, Homo sapien; identical to SEQ ID NO: 31974

SEQ ID NO: 31977 - DNA, 33 bp, Homo sapien
aggcacttaacaatgcacagatctataaggagc

SEQ ID NO: 31978 - DNA, 33 bp, Homo sapien
aggcacttaacaatgcgcagatctataaggagc

SEQ ID NO: 31979 - DNA, 33 bp, Homo sapien
tcattttcagcacaagcaattggcaaatacagg

SEQ ID NO: 31980 - DNA, 33 bp, Homo sapien
tcattttcagcacaagtaattggcaaatacagg

SEQ ID NO: 31981 - DNA, 33 bp, Homo sapien
tctggtgattaaggaaatagtcatgaaggcaag

SEQ ID NO: 31982 - DNA, 33 bp, Homo sapien
tctggtgattaaggaactagtcatgaaggcaag

SEQ ID NO: 31983 - DNA, 33 bp, Homo sapien
aggcctttcgctgatcaacaaggagtgcagtga

SEQ ID NO: 31984 - DNA, 33 bp, Homo sapien
aggcctttcgctgatcgacaaggagtgcagtga

SEQ ID NO: 31985 - DNA, 33 bp, Homo sapien
aattagatttcccccactgattccccataatca

SEQ ID NO: 31986 - DNA, 33 bp, Homo sapien
aattagatttcccccattgattccccataatca

SEQ ID NO: 31987 - DNA, 33 bp, Homo sapien
ttttggggtaacaagagtcaacccataatagcc

SEQ ID NO: 31988 - DNA, 33 bp, Homo sapien
ttttggggtaacaagattcaacccataatagcc

SEQ ID NO: 31989 - DNA, 33 bp, Homo sapien
acactgggtgtcataaaagacagaagaagaacc

SEQ ID NO: 31990 - DNA, 33 bp, Homo sapien
acactgggtgtcataagagacagaagaagaacc

SEQ ID NO: 31991 - DNA, 33 bp, Homo sapien
tcaataataactttcaacttgcttactttgaag

SEQ ID NO: 31992 - DNA, 33 bp, Homo sapien
tcaataataactttcagcttgcttactttgaag

SEQ ID NO: 31993 - DNA, 33 bp, Homo sapien
atagaatgagttggacacctctgcttctatcct

SEQ ID NO: 31994 - DNA, 33 bp, Homo sapien
atagaatgagttggacccctctgcttctatcct

SEQ ID NO: 31995 - DNA, 33 bp, Homo sapien
agccaagactcacacaagcacaaatggaccatt

SEQ ID NO: 31996 - DNA, 33 bp, Homo sapien
agccaagactcacacaggcacaaatggaccatt

SEQ ID NO: 31997 - DNA, 33 bp, Homo sapien
ccttggttacatcaaacgaattctcacctccat

SEQ ID NO: 31998 - DNA, 33 bp, Homo sapien
ccttggttacatcaaatgaattctcacctccat

SEQ ID NO: 31999 - DNA, 33 bp, Homo sapien
aattctttacagtcctcaatattgcagtcagag

SEQ ID NO: 32000 - DNA, 33 bp, Homo sapien
aattctttacagtccttaatattgcagtcagag

SEQ ID NO: 32001 - DNA, 33 bp, Homo sapien
tgtggttgagtttagagtatgtgccatgtggtg

SEQ ID NO: 32002 - DNA, 33 bp, Homo sapien
tgtggttgagtttagattatgtgccatgtggtg

SEQ ID NO: 32003 - DNA, 33 bp, Homo sapien
ccatttttgccacaaactatttaagagtctttc

SEQ ID NO: 32004 - DNA, 33 bp, Homo sapien
ccatttttgccacaaattatttaagagtctttc

SEQ ID NO: 32005 - DNA, 33 bp, Homo sapien
aactagagaatccagacaaatatactcagtaca

SEQ ID NO: 32006 - DNA, 33 bp, Homo sapien
aactagagaatccagataaatatactcagtaca

SEQ ID NO: 32007 - DNA, 33 bp, Homo sapien
cacacattgtagcagaagagactttatttccaa

SEQ ID NO: 32008 - DNA, 33 bp, Homo sapien
cacacattgtagcagaggagactttatttccaa

SEQ ID NO: 32009 - DNA, 33 bp, Homo sapien
tagtccttcacttgggaaagttttgagagaggg

SEQ ID NO: 32010 - DNA, 33 bp, Homo sapien
tagtccttcacttggggaagttttgagagaggg

SEQ ID NO: 32011 - DNA, 33 bp, Homo sapien
ttttaaatagcaatcaactacttaaagatacac

SEQ ID NO: 32012 - DNA, 33 bp, Homo sapien
ttttaaatagcaatcagctacttaaagatacac

SEQ ID NO: 32013 - DNA, 33 bp, Homo sapien
catgctgtctccactacctgcattgttgtggct

SEQ ID NO: 32014 - DNA, 33 bp, Homo sapien
catgctgtctccactatctgcattgttgtggct

SEQ ID NO: 32015 - DNA, 33 bp, Homo sapien
aagagtatagagagaacttagcccaggatgaca

SEQ ID NO: 32016 - DNA, 33 bp, Homo sapien
aagagtatagagagaagttagcccaggatgaca

SEQ ID NO: 32017 - DNA, 33 bp, Homo sapien
gataacaggtaaaacacgatccatttattccag

SEQ ID NO: 32018 - DNA, 33 bp, Homo sapien
gataacaggtaaaacatgatccatttattccag

SEQ ID NO: 32019 - DNA, 33 bp, Homo sapien
tcttggcaagcattcacggatgttttcctgatg

SEQ ID NO: 32020 - DNA, 33 bp, Homo sapien
tcttggcaagcattcatggatgttttcctgatg

SEQ ID NO: 32021 - DNA, 33 bp, Homo sapien
ataattttaagatgtcagaaaaggatactttga

SEQ ID NO: 32022 - DNA, 33 bp, Homo sapien
ataattttaagatgtcggaaaaggatactttga

SEQ ID NO: 32023 - DNA, 33 bp, Homo sapien
ttcttgggaaccctgaactaccatgttaaaata

SEQ ID NO: 32024 - DNA, 33 bp, Homo sapien
ttcttgggaaccctgacctaccatgttaaaata

SEQ ID NO: 32025 - DNA, 33 bp, Homo sapien
gtaaatggctgctttacacctgcataagcctga

SEQ ID NO: 32026 - DNA, 33 bp, Homo sapien
gtaaatggctgctttatacctgcataagcctga

SEQ ID NO: 32027 - DNA, 33 bp, Homo sapien
agcctattaattctaaatggaaaaagagcagga

SEQ ID NO: 32028 - DNA, 33 bp, Homo sapien
agcctattaattctaagtggaaaaagagcagga

SEQ ID NO: 32029 - DNA, 33 bp, Homo sapien
ggaaataagtctttgcaatgaaaatgtatttga

SEQ ID NO: 32030 - DNA, 33 bp, Homo sapien
ggaaataagtctttgcgatgaaaatgtatttga

SEQ ID NO: 32031 - DNA, 33 bp, Homo sapien
ttatcaatccgttctactactcttcacaaaaac

SEQ ID NO: 32032 - DNA, 33 bp, Homo sapien
ttatcaatccgttctattactcttcacaaaaac

SEQ ID NO: 32033 - DNA, 33 bp, Homo sapien
cttaggttttacaagggcctaaccaacttaggg

SEQ ID NO: 32034 - DNA, 33 bp, Homo sapien
cttaggttttacaaggtcctaaccaacttaggg

SEQ ID NO: 32035 - DNA, 33 bp, Homo sapien
tctgaagtttgcatatgatatccctatgtgtgg

SEQ ID NO: 32036 - DNA, 33 bp, Homo sapien
tctgaagtttgcatattatatccctatgtgtgg

SEQ ID NO: 32037 - DNA, 33 bp, Homo sapien
tcattggtatctaataggccgttagttagtcca

SEQ ID NO: 32038 - DNA, 33 bp, Homo sapien
tcattggtatctaatatgccgttagttagtcca

SEQ ID NO: 32039 - DNA, 33 bp, Homo sapien
ataattacaaggcaccaaacaaagtgatttgca

SEQ ID NO: 32040 - DNA, 33 bp, Homo sapien
ataattacaaggcaccgaacaaagtgatttgca

SEQ ID NO: 32041 - DNA, 33 bp, Homo sapien
acctagaggtatttcaagacaagtgaaaaaatg

SEQ ID NO: 32042 - DNA, 33 bp, Homo sapien
acctagaggtatttcaggacaagtgaaaaaatg

SEQ ID NO: 32043 - DNA, 33 bp, Homo sapien
atttaagttgactatacagctaagaactaacta

SEQ ID NO: 32044 - DNA, 33 bp, Homo sapien
atttaagttgactatagagctaagaactaacta

SEQ ID NO: 32045 - DNA, 33 bp, Homo sapien
ctatctgtaatctatgaaaccatttccaaataa

SEQ ID NO: 32046 - DNA, 33 bp, Homo sapien
ctatctgtaatctatgcaaccatttccaaataa

SEQ ID NO: 32047 - DNA, 33 bp, Homo sapien
gcttacgagaacaagacgaatagctaattggag

SEQ ID NO: 32048 - DNA, 33 bp, Homo sapien
gcttacgagaacaagaggaatagctaattggag

SEQ ID NO: 32049 - DNA, 33 bp, Homo sapien
gctttaaaccatgaccaaaatttaaggtctaga

SEQ ID NO: 32050 - DNA, 33 bp, Homo sapien
gctttaaaccatgacccaaatttaaggtctaga

SEQ ID NO: 32051 - DNA, 33 bp, Homo sapien
tccatcagactgtaaactgagcccatagttgct

SEQ ID NO: 32052 - DNA, 33 bp, Homo sapien
tccatcagactgtaaattgagcccatagttgct

SEQ ID NO: 32053 - DNA, 33 bp, Homo sapien
aaaaataccatctaataagcggcatatatccaa

SEQ ID NO: 32054 - DNA, 33 bp, Homo sapien
aaaaataccatctaatgagcggcatatatccaa

SEQ ID NO: 32055 - DNA, 33 bp, Homo sapien
taggtgatggagttacagcagcaagacggtaga

SEQ ID NO: 32056 - DNA, 33 bp, Homo sapien
taggtgatggagttacggcagcaagacggtaga

SEQ ID NO: 32057 - DNA, 33 bp, Homo sapien
ttttatccttgattcacggatgatttgggccta

SEQ ID NO: 32058 - DNA, 33 bp, Homo sapien
ttttatccttgattcatggatgatttgggccta

SEQ ID NO: 32059 - DNA, 33 bp, Homo sapien
attgttctggtaatgaagtttgaccagaaaaga

SEQ ID NO: 32060 - DNA, 33 bp, Homo sapien
attgttctggtaatgaggtttgaccagaaaaga

SEQ ID NO: 32061 - DNA, 33 bp, Homo sapien
ttggcttagagaaacaaaaaacaactgagctct

SEQ ID NO: 32062 - DNA, 33 bp, Homo sapien
ttggcttagagaaacataaaacaactgagctct

SEQ ID NO: 32063 - DNA, 33 bp, Homo sapien
tgtatatctagttgtaccaaacccctataccct

SEQ ID NO: 32064 - DNA, 33 bp, Homo sapien
tgtatatctagttgtagcaaacccctataccct

SEQ ID NO: 32065 - DNA, 33 bp, Homo sapien
tgccagttctaacaccaagcaacagaaggcagg

SEQ ID NO: 32066 - DNA, 33 bp, Homo sapien
tgccagttctaacaccgagcaacagaaggcagg

SEQ ID NO: 32067 - DNA, 33 bp, Homo sapien
atgctcttaaccactgcatatactgctgcctca

SEQ ID NO: 32068 - DNA, 33 bp, Homo sapien
atgctcttaaccactggatatactgctgcctca

SEQ ID NO: 32069 - DNA, 33 bp, Homo sapien
ttatccttctgcaaacaaaatgctcttaatggg

SEQ ID NO: 32070 - DNA, 33 bp, Homo sapien
ttatccttctgcaaacgaaatgctcttaatggg

SEQ ID NO: 32071 - DNA, 33 bp, Homo sapien
agaccatgccactaagaagcaagcacaaatacg

SEQ ID NO: 32072 - DNA, 33 bp, Homo sapien
agaccatgccactaaggagcaagcacaaatacg

SEQ ID NO: 32073 - DNA, 33 bp, Homo sapien
ctttcagcattgcaccagcagagcataaagaaa

SEQ ID NO: 32074 - DNA, 33 bp, Homo sapien
ctttcagcattgcaccggcagagcataaagaaa

SEQ ID NO: 32075 - DNA, 33 bp, Homo sapien
tggagtatggctccaacgttgccaaagactcta

SEQ ID NO: 32076 - DNA, 33 bp, Homo sapien
tggagtatggctccaatgttgccaaagactcta

SEQ ID NO: 32077 - DNA, 33 bp, Homo sapien
aagaggatacagttcaacccatcttgagaattt

SEQ ID NO: 32078 - DNA, 33 bp, Homo sapien
aagaggatacagttcatcccatcttgagaattt

SEQ ID NO: 32079 - DNA, 33 bp, Homo sapien
gatgcttactgtatgaaaatcactattccagta

SEQ ID NO: 32080 - DNA, 33 bp, Homo sapien
gatgcttactgtatgacaatcactattccagta

SEQ ID NO: 32081 - DNA, 33 bp, Homo sapien
ttataacaacttttcacgggctcagaaaatact

SEQ ID NO: 32082 - DNA, 33 bp, Homo sapien
ttataacaacttttcatgggctcagaaaatact

SEQ ID NO: 32083 - DNA, 33 bp, Homo sapien
actattggatgtcaacccaaagaatataccttc

SEQ ID NO: 32084 - DNA, 33 bp, Homo sapien
actattggatgtcaactcaaagaatataccttc

SEQ ID NO: 32085 - DNA, 33 bp, Homo sapien
tccaacaaacagaataccatatcaacagtattc

SEQ ID NO: 32086 - DNA, 33 bp, Homo sapien
tccaacaaacagaatatcatatcaacagtattc

SEQ ID NO: 32087 - DNA, 33 bp, Homo sapien
tagaactccgaaaatgcacttactgttaaaaac

SEQ ID NO: 32088 - DNA, 33 bp, Homo sapien
tagaactccgaaaatgtacttactgttaaaaac

SEQ ID NO: 32089 - DNA, 33 bp, Homo sapien
gatggtttagttgagacaaggtaaaaatgtaag

SEQ ID NO: 32090 - DNA, 33 bp, Homo sapien
gatggtttagttgagataaggtaaaaatgtaag

SEQ ID NO: 32091 - DNA, 33 bp, Homo sapien
ttggataaataaatcgcacaaagccatagcgtc

SEQ ID NO: 32092 - DNA, 33 bp, Homo sapien
ttggataaataaatcggacaaagccatagcgtc

SEQ ID NO: 32093 - DNA, 33 bp, Homo sapien
gaaatgttatctcgaacgacctaaagatgtgca

SEQ ID NO: 32094 - DNA, 33 bp, Homo sapien
gaaatgttatctcgaatgacctaaagatgtgca

SEQ ID NO: 32095 - DNA, 33 bp, Homo sapien
atgtcacctgaagagaagctgatggctatattc

SEQ ID NO: 32096 - DNA, 33 bp, Homo sapien
atgtcacctgaagagaggctgatggctatattc

SEQ ID NO: 32097 - DNA, 33 bp, Homo sapien
gtctcttcagccaagcagatttcaaagaggggt

SEQ ID NO: 32098 - DNA, 33 bp, Homo sapien
gtctcttcagccaagcggatttcaaagaggggt

SEQ ID NO: 32099 - DNA, 33 bp, Homo sapien
gattccttttcaggcactgaatcaaacacagaa

SEQ ID NO: 32100 - DNA, 33 bp, Homo sapien
gattccttttcaggcattgaatcaaacacagaa

SEQ ID NO: 32101 - DNA, 33 bp, Homo sapien
ttgtagtgtctactaacaccagaagagattttg

SEQ ID NO: 32102 - DNA, 33 bp, Homo sapien
ttgtagtgtctactaataccagaagagattttg

SEQ ID NO: 32103 - DNA, 33 bp, Homo sapien
tagatatacactacaagggactctgttttgttc

SEQ ID NO: 32104 - DNA, 33 bp, Homo sapien
tagatatacactacaatggactctgttttgttc

SEQ ID NO: 32105 - DNA, 33 bp, Homo sapien
gacatacatcgtgaaccccatgacaaaagacat

SEQ ID NO: 32106 - DNA, 33 bp, Homo sapien
gacatacatcgtgaacgccatgacaaaagacat

SEQ ID NO: 32107 - DNA, 33 bp, Homo sapien
ccatttgcagttaataaatttcttgggagacac

SEQ ID NO: 32108 - DNA, 33 bp, Homo sapien
ccatttgcagttaatacatttcttgggagacac

SEQ ID NO: 32109 - DNA, 33 bp, Homo sapien
ggcctaagaaggaacaatggtatcatcagctgg

SEQ ID NO: 32110 - DNA, 33 bp, Homo sapien
ggcctaagaaggaacagtggtatcatcagctgg

SEQ ID NO: 32111 - DNA, 33 bp, Homo sapien
tcaggcatctaataaacggttattactaagttg

SEQ ID NO: 32112 - DNA, 33 bp, Homo sapien
tcaggcatctaataaatggttattactaagttg

SEQ ID NO: 32113 - DNA, 33 bp, Homo sapien
taactaaaatgactgagcttagggctaagccca

SEQ ID NO: 32114 - DNA, 33 bp, Homo sapien
taactaaaatgactgatcttagggctaagccca

SEQ ID NO: 32115 - DNA, 33 bp, Homo sapien
acatttacacatagaacgtttaggccccagaag

SEQ ID NO: 32116 - DNA, 33 bp, Homo sapien
acatttacacatagaatgtttaggccccagaag

SEQ ID NO: 32117 - DNA, 33 bp, Homo sapien
aagaccagaataaatacggagatcacttcatga

SEQ ID NO: 32118 - DNA, 33 bp, Homo sapien
aagaccagaataaatatggagatcacttcatga

SEQ ID NO: 32119 - DNA, 33 bp, Homo sapien
tttatgtacttacaaaaatatggtttggaatca

SEQ ID NO: 32120 - DNA, 33 bp, Homo sapien
tttatgtacttacaaagatatggtttggaatca

SEQ ID NO: 32121 - DNA, 33 bp, Homo sapien
aaagtgaatgaccaaacagtagctgatcagaca

SEQ ID NO: 32122 - DNA, 33 bp, Homo sapien
aaagtgaatgaccaaatagtagctgatcagaca

SEQ ID NO: 32123 - DNA, 33 bp, Homo sapien
acaaattcaaatttcaaagttagtgtaatagca

SEQ ID NO: 32124 - DNA, 33 bp, Homo sapien
acaaattcaaatttcagagttagtgtaatagca

SEQ ID NO: 32125 - DNA, 33 bp, Homo sapien
gttctatggacaaggaagtaaccaagcagattc

SEQ ID NO: 32126 - DNA, 33 bp, Homo sapien
gttctatggacaaggaggtaaccaagcagattc

SEQ ID NO: 32127 - DNA, 33 bp, Homo sapien
cactgattgattttaactattgccacagaagaa

SEQ ID NO: 32128 - DNA, 33 bp, Homo sapien
cactgattgattttaagtattgccacagaagaa

SEQ ID NO: 32129 - DNA, 33 bp, Homo sapien
ctacaacagttcttgactacatagatacatcaa

SEQ ID NO: 32130 - DNA, 33 bp, Homo sapien
ctacaacagttcttgattacatagatacatcaa

SEQ ID NO: 32131 - DNA, 33 bp, Homo sapien
catcaccacgaccaccaagaataactaactgcc

SEQ ID NO: 32132 - DNA, 33 bp, Homo sapien
catcaccacgaccaccgagaataactaactgcc

SEQ ID NO: 32133 - DNA, 33 bp, Homo sapien
catctgccaaatatcgccccgcttctaaataag

SEQ ID NO: 32134 - DNA, 33 bp, Homo sapien
catctgccaaatatcgtcccgcttctaaataag

SEQ ID NO: 32135 - DNA, 33 bp, Homo sapien
gaaatagctgaaataactgaggtaattcactca

SEQ ID NO: 32136 - DNA, 33 bp, Homo sapien
gaaatagctgaaataagtgaggtaattcactca

SEQ ID NO: 32137 - DNA, 33 bp, Homo sapien
gcatccagcacaagagaaagaggaatgccagaa

SEQ ID NO: 32138 - DNA, 33 bp, Homo sapien
gcatccagcacaagaggaagaggaatgccagaa

SEQ ID NO: 32139 - DNA, 33 bp, Homo sapien
ctgagggctgtcagccaatggtactctcagcag

SEQ ID NO: 32140 - DNA, 33 bp, Homo sapien
ctgagggctgtcagccgatggtactctcagcag

SEQ ID NO: 32141 - DNA, 33 bp, Homo sapien
tggtctgacagtaagaagttcatgatgggcagt

SEQ ID NO: 32142 - DNA, 33 bp, Homo sapien
tggtctgacagtaagaggttcatgatgggcagt

SEQ ID NO: 32143 - DNA, 33 bp, Homo sapien
tggcaaattagctacacggctagaaggagcacc

SEQ ID NO: 32144 - DNA, 33 bp, Homo sapien
tggcaaattagctacatggctagaaggagcacc

SEQ ID NO: 32145 - DNA, 33 bp, Homo sapien
aaaaattgcacgatgacgtgagactcctctgag

SEQ ID NO: 32146 - DNA, 33 bp, Homo sapien
aaaaattgcacgatgatgtgagactcctctgag

SEQ ID NO: 32147 - DNA, 33 bp, Homo sapien
atcactcaaaatgtggacatctcaaacaatgtg

SEQ ID NO: 32148 - DNA, 33 bp, Homo sapien
atcactcaaaatgtggccatctcaaacaatgtg

SEQ ID NO: 32149 - DNA, 33 bp, Homo sapien
tccgacctgcacctgactagagtttagaataga

SEQ ID NO: 32150 - DNA, 33 bp, Homo sapien
tccgacctgcacctgagtagagtttagaataga

SEQ ID NO: 32151 - DNA, 33 bp, Homo sapien
caagtcatatttgcccagagatttgaatgcctt

SEQ ID NO: 32152 - DNA, 33 bp, Homo sapien
caagtcatatttgcccggagatttgaatgcctt

SEQ ID NO: 32153 - DNA, 33 bp, Homo sapien
aacaatggacatccaccggtagtattcaaaaat

SEQ ID NO: 32154 - DNA, 33 bp, Homo sapien
aacaatggacatccactggtagtattcaaaaat

SEQ ID NO: 32155 - DNA, 33 bp, Homo sapien
aatcccacatcgaatccactagtatatcctttt

SEQ ID NO: 32156 - DNA, 33 bp, Homo sapien
aatcccacatcgaatcgactagtatatcctttt

SEQ ID NO: 32157 - DNA, 33 bp, Homo sapien
tctttgaaactttcctaacagtcatttcctcag

SEQ ID NO: 32158 - DNA, 33 bp, Homo sapien
tctttgaaactttccttacagtcatttcctcag

SEQ ID NO: 32159 - DNA, 33 bp, Homo sapien
ttataccttcaaggcaatgcccttttccccacc

SEQ ID NO: 32160 - DNA, 33 bp, Homo sapien
ttataccttcaaggcagtgcccttttccccacc

SEQ ID NO: 32161 - DNA, 33 bp, Homo sapien
tccctttgaccttaacactcagaattctcactt

SEQ ID NO: 32162 - DNA, 33 bp, Homo sapien
tccctttgaccttaacgctcagaattctcactt

SEQ ID NO: 32163 - DNA, 33 bp, Homo sapien
tgtggtcccgaagaaaacatctacagagcatta

SEQ ID NO: 32164 - DNA, 33 bp, Homo sapien
tgtggtcccgaagaaaccatctacagagcatta

SEQ ID NO: 32165 - DNA, 33 bp, Homo sapien
ctctctaaaaattctaactgcaggtcaaatcct

SEQ ID NO: 32166 - DNA, 33 bp, Homo sapien
ctctctaaaaattctatctgcaggtcaaatcct

SEQ ID NO: 32167 - DNA, 33 bp, Homo sapien
atttgctctttaaaaacccagacagctgcttgc

SEQ ID NO: 32168 - DNA, 33 bp, Homo sapien
atttgctctttaaaaatccagacagctgcttgc

SEQ ID NO: 32169 - DNA, 33 bp, Homo sapien
atctgggttgaccttacgacttgcttagactca

SEQ ID NO: 32170 - DNA, 33 bp, Homo sapien
atctgggttgaccttatgacttgcttagactca

SEQ ID NO: 32171 - DNA, 33 bp, Homo sapien
ttcattgcatttttgactagtgttggataaata

SEQ ID NO: 32172 - DNA, 33 bp, Homo sapien
ttcattgcatttttgattagtgttggataaata

SEQ ID NO: 32173 - DNA, 33 bp, Homo sapien
tcagggaaactaaaaaccatcaatgcttcttgc

SEQ ID NO: 32174 - DNA, 33 bp, Homo sapien
tcagggaaactaaaaatcatcaatgcttcttgc

SEQ ID NO: 32175 - DNA, 33 bp, Homo sapien
tcataacagcttcttcaagatataatttacata

SEQ ID NO: 32176 - DNA, 33 bp, Homo sapien
tcataacagcttcttcgagatataatttacata

SEQ ID NO: 32177 - DNA, 33 bp, Homo sapien
acagttgcatagtttggacacttatggagccag

SEQ ID NO: 32178 - DNA, 33 bp, Homo sapien
acagttgcatagtttgtacacttatggagccag

SEQ ID NO: 32179 - DNA, 33 bp, Homo sapien
acttttgggtaataaaccaggaatgtcaagtag

SEQ ID NO: 32180 - DNA, 33 bp, Homo sapien
acttttgggtaataaatcaggaatgtcaagtag

SEQ ID NO: 32181 - DNA, 33 bp, Homo sapien
acagcagggtgagttagtaacagagttggtgta

SEQ ID NO: 32182 - DNA, 33 bp, Homo sapien
acagcagggtgagttattaacagagttggtgta

SEQ ID NO: 32183 - DNA, 33 bp, Homo sapien
agagagagcctatgggacagttggattgcgaag

SEQ ID NO: 32184 - DNA, 33 bp, Homo sapien
agagagagcctatggggcagttggattgcgaag

SEQ ID NO: 32185 - DNA, 33 bp, Homo sapien
tagtcagttctactgacgaaccaagcatgcact

SEQ ID NO: 32186 - DNA, 33 bp, Homo sapien
tagtcagttctactgatgaaccaagcatgcact

SEQ ID NO: 32187 - DNA, 33 bp, Homo sapien
tggcatgtggctaatacgtattaaatagctcca

SEQ ID NO: 32188 - DNA, 33 bp, Homo sapien
tggcatgtggctaatatgtattaaatagctcca

SEQ ID NO: 32189 - DNA, 33 bp, Homo sapien
aaacagtctggcatgactcagtaggcctcattc

SEQ ID NO: 32190 - DNA, 33 bp, Homo sapien
aaacagtctggcatgagtcagtaggcctcattc

SEQ ID NO: 32191 - DNA, 33 bp, Homo sapien
cagatgtggagattgaagattagtgaaattaat

SEQ ID NO: 32192 - DNA, 33 bp, Homo sapien
cagatgtggagattgaggattagtgaaattaat

SEQ ID NO: 32193 - DNA, 33 bp, Homo sapien
aaacaaatctcagtataacatggtaacttctaa

SEQ ID NO: 32194 - DNA, 33 bp, Homo sapien
aaacaaatctcagtatgacatggtaacttctaa

SEQ ID NO: 32195 - DNA, 33 bp, Homo sapien
taggtcctctctaagactatagcaaaacaatca

SEQ ID NO: 32196 - DNA, 33 bp, Homo sapien
taggtcctctctaagattatagcaaaacaatca

SEQ ID NO: 32197 - DNA, 33 bp, Homo sapien
gcttaacacaaaaaaaatggttattgcttattt

SEQ ID NO: 32198 - DNA, 33 bp, Homo sapien
gcttaacacaaaaaaattggttattgcttattt

SEQ ID NO: 32199 - DNA, 33 bp, Homo sapien
agacaattctgggttccatacaaacttttccac

SEQ ID NO: 32200 - DNA, 33 bp, Homo sapien
agacaattctgggttctatacaaacttttccac

SEQ ID NO: 32201 - DNA, 33 bp, Homo sapien
tgtaaaatgggaatataataacacttacctcat

SEQ ID NO: 32202 - DNA, 33 bp, Homo sapien
tgtaaaatgggaatatgataacacttacctcat

SEQ ID NO: 32203 - DNA, 33 bp, Homo sapien
gcactaacagtacaggaaaaggacacaacccag

SEQ ID NO: 32204 - DNA, 33 bp, Homo sapien
gcactaacagtacagggaaaggacacaacccag

SEQ ID NO: 32205 - DNA, 33 bp, Homo sapien
ttccatgtcactgctacgaaaacatggccttgg

SEQ ID NO: 32206 - DNA, 33 bp, Homo sapien
ttccatgtcactgctaggaaaacatggccttgg

SEQ ID NO: 32207 - DNA, 33 bp, Homo sapien
atactctctctcctacccgagatcccctaaaag

SEQ ID NO: 32208 - DNA, 33 bp, Homo sapien
atactctctctcctacgcgagatcccctaaaag

SEQ ID NO: 32209 - DNA, 33 bp, Homo sapien
ttgatatttacctctaaatgtatgctcacctcc

SEQ ID NO: 32210 - DNA, 33 bp, Homo sapien
ttgatatttacctctacatgtatgctcacctcc

SEQ ID NO: 32211 - DNA, 33 bp, Homo sapien
tgcatattggtgactaccacagttctgtccatt

SEQ ID NO: 32212 - DNA, 33 bp, Homo sapien
tgcatattggtgactagcacagttctgtccatt

SEQ ID NO: 32213 - DNA, 33 bp, Homo sapien
gggtttggcctaacaaatccttggagcccctcc

SEQ ID NO: 32214 - DNA, 33 bp, Homo sapien
gggtttggcctaacaagtccttggagcccctcc

SEQ ID NO: 32215 - DNA, 33 bp, Homo sapien
tacctagagttcctaaaatgagattttgtaatc

SEQ ID NO: 32216 - DNA, 33 bp, Homo sapien
tacctagagttcctaagatgagattttgtaatc

SEQ ID NO: 32217 - DNA, 33 bp, Homo sapien
tatattaaagacttcaacccaggataaacagca

SEQ ID NO: 32218 - DNA, 33 bp, Homo sapien
tatattaaagacttcaccccaggataaacagca

SEQ ID NO: 32219 - DNA, 33 bp, Homo sapien
taccccaggaataaatgataaacatggtgccag

SEQ ID NO: 32220 - DNA, 33 bp, Homo sapien
taccccaggaataaattataaacatggtgccag

SEQ ID NO: 32221 - DNA, 33 bp, Homo sapien
gggaaaactgcctcacaggtccagatctctgca

SEQ ID NO: 32222 - DNA, 33 bp, Homo sapien
gggaaaactgcctcactggtccagatctctgca

SEQ ID NO: 32223 - DNA, 33 bp, Homo sapien
tctagtttttagcagaatatatagctgtcataa

SEQ ID NO: 32224 - DNA, 33 bp, Homo sapien
tctagtttttagcagactatatagctgtcataa

SEQ ID NO: 32225 - DNA, 33 bp, Homo sapien
agggtcacacgtacaaattctttcttttcttct

SEQ ID NO: 32226 - DNA, 33 bp, Homo sapien
agggtcacacgtacaacttctttcttttcttct

SEQ ID NO: 32227 - DNA, 33 bp, Homo sapien
agtagcgtcaataaataacaaatggcgccatct

SEQ ID NO: 32228 - DNA, 33 bp, Homo sapien
agtagcgtcaataaatgacaaatggcgccatct

SEQ ID NO: 32229 - DNA, 33 bp, Homo sapien
cctattttctgctcttaaaagggaagcctgaat

SEQ ID NO: 32230 - DNA, 33 bp, Homo sapien
cctattttctgctcttgaaagggaagcctgaat

SEQ ID NO: 32231 - DNA, 33 bp, Homo sapien
acaggaaggctgaagaagctcaagaggtggctt

SEQ ID NO: 32232 - DNA, 33 bp, Homo sapien
acaggaaggctgaagatgctcaagaggtggctt

SEQ ID NO: 32233 - DNA, 33 bp, Homo sapien
tttctagcatcctaacagtaaactccaaaactg

SEQ ID NO: 32234 - DNA, 33 bp, Homo sapien
tttctagcatcctaacggtaaactccaaaactg

SEQ ID NO: 32235 - DNA, 33 bp, Homo sapien
gaggacaattatcttacctgtttcacttaaatt

SEQ ID NO: 32236 - DNA, 33 bp, Homo sapien
gaggacaattatcttatctgtttcacttaaatt

SEQ ID NO: 32237 - DNA, 33 bp, Homo sapien
cacccttgtacttgtcaaagtgatactcagaca

SEQ ID NO: 32238 - DNA, 33 bp, Homo sapien
cacccttgtacttgtcgaagtgatactcagaca

SEQ ID NO: 32239 - DNA, 33 bp, Homo sapien
cactaaagtaccaaaaatgtttgcagggcacta

SEQ ID NO: 32240 - DNA, 33 bp, Homo sapien
cactaaagtaccaaaagtgtttgcagggcacta

SEQ ID NO: 32241 - DNA, 33 bp, Homo sapien
tctgaatatcagggaaagtgactcttactggtg

SEQ ID NO: 32242 - DNA, 33 bp, Homo sapien
tctgaatatcagggaaggtgactcttactggtg

SEQ ID NO: 32243 - DNA, 33 bp, Homo sapien
tacagattctttaaaaaaccaagaggtctgaga

SEQ ID NO: 32244 - DNA, 33 bp, Homo sapien
tacagattctttaaaacaccaagaggtctgaga

SEQ ID NO: 32245 - DNA, 33 bp, Homo sapien
atttattaatcattccaaatgtgcattcttcta

SEQ ID NO: 32246 - DNA, 33 bp, Homo sapien
atttattaatcattccgaatgtgcattcttcta

SEQ ID NO: 32247 - DNA, 33 bp, Homo sapien
aacttcactacatggaggttaaatggggatctc

SEQ ID NO: 32248 - DNA, 33 bp, Homo sapien
aacttcactacatggatgttaaatggggatctc

SEQ ID NO: 32249 - DNA, 33 bp, Homo sapien
atatgatttgggcagagactccaaaagtaagat

SEQ ID NO: 32250 - DNA, 33 bp, Homo sapien
atatgatttgggcagatactccaaaagtaagat

SEQ ID NO: 32251 - DNA, 33 bp, Homo sapien
ctctggtaatacactcccatccactccaatcta

SEQ ID NO: 32252 - DNA, 33 bp, Homo sapien
ctctggtaatacactctcatccactccaatcta

SEQ ID NO: 32253 - DNA, 33 bp, Homo sapien
atcaaatgtcttctacaatggacacacacaaca

SEQ ID NO: 32254 - DNA, 33 bp, Homo sapien
atcaaatgtcttctacgatggacacacacaaca

SEQ ID NO: 32255 - DNA, 33 bp, Homo sapien
aaaggcatagagttgaagtgaatagttttgtta

SEQ ID NO: 32256 - DNA, 33 bp, Homo sapien
aaaggcatagagttgaggtgaatagttttgtta

SEQ ID NO: 32257 - DNA, 33 bp, Homo sapien
acttatgtccctgatacgtacaaattcaaagga

SEQ ID NO: 32258 - DNA, 33 bp, Homo sapien
acttatgtccctgatatgtacaaattcaaagga

SEQ ID NO: 32259 - DNA, 33 bp, Homo sapien
ccaaaataagtgcccactaacctcgactctact

SEQ ID NO: 32260 - DNA, 33 bp, Homo sapien
ccaaaataagtgcccagtaacctcgactctact

SEQ ID NO: 32261 - DNA, 33 bp, Homo sapien
aatgcattggcaaatacagctgttgttagtaaa

SEQ ID NO: 32262 - DNA, 33 bp, Homo sapien
aatgcattggcaaatatagctgttgttagtaaa

SEQ ID NO: 32263 - DNA, 33 bp, Homo sapien
gtaattagagcactaacgaggtcatttagcaga

SEQ ID NO: 32264 - DNA, 33 bp, Homo sapien
gtaattagagcactaatgaggtcatttagcaga

SEQ ID NO: 32265 - DNA, 33 bp, Homo sapien
aacttcaaagatttggaaagatgttcctgctaa

SEQ ID NO: 32266 - DNA, 33 bp, Homo sapien
aacttcaaagatttgggaagatgttcctgctaa

SEQ ID NO: 32267 - DNA, 33 bp, Homo sapien
gggactttccacctaaactccattgtgaaccct

SEQ ID NO: 32268 - DNA, 33 bp, Homo sapien
gggactttccacctaatctccattgtgaaccct

SEQ ID NO: 32269 - DNA, 33 bp, Homo sapien
gaactgagaggccaccaacatctggctgtcccc

SEQ ID NO: 32270 - DNA, 33 bp, Homo sapien
gaactgagaggccaccgacatctggctgtcccc

SEQ ID NO: 32271 - DNA, 33 bp, Homo sapien
tattacttttgactcaaaacggttggcaagatc

SEQ ID NO: 32272 - DNA, 33 bp, Homo sapien
tattacttttgactcagaacggttggcaagatc

SEQ ID NO: 32273 - DNA, 33 bp, Homo sapien
tgtaactacagcaaaccgcctgggctgccaggc

SEQ ID NO: 32274 - DNA, 33 bp, Homo sapien
tgtaactacagcaaactgcctgggctgccaggc

SEQ ID NO: 32275 - DNA, 33 bp, Homo sapien
tgttggaaataaatcacatctaacctcttttgt

SEQ ID NO: 32276 - DNA, 33 bp, Homo sapien
tgttggaaataaatcatatctaacctcttttgt

SEQ ID NO: 32277 - DNA, 33 bp, Homo sapien
tctgcagcagttgaaaagaatgattaagaggca

SEQ ID NO: 32278 - DNA, 33 bp, Homo sapien
tctgcagcagttgaaaggaatgattaagaggca

SEQ ID NO: 32279 - DNA, 33 bp, Homo sapien
taacgtaaggatctaacgatttgtgcatccctg

SEQ ID NO: 32280 - DNA, 33 bp, Homo sapien
taacgtaaggatctaaggatttgtgcatccctg

SEQ ID NO: 32281 - DNA, 33 bp, Homo sapien
agcagtcactacatcacgtgcatacttctgtta

SEQ ID NO: 32282 - DNA, 33 bp, Homo sapien
agcagtcactacatcatgtgcatacttctgtta

SEQ ID NO: 32283 - DNA, 33 bp, Homo sapien
gggaccttaatgtgtaactcctgcagttagaaa

SEQ ID NO: 32284 - DNA, 33 bp, Homo sapien
gggaccttaatgtgtatctcctgcagttagaaa

SEQ ID NO: 32285 - DNA, 33 bp, Homo sapien
atccagtgtaccatgacgagatacaaaggatgc

SEQ ID NO: 32286 - DNA, 33 bp, Homo sapien
atccagtgtaccatgatgagatacaaaggatgc

SEQ ID NO: 32287 - DNA, 33 bp, Homo sapien
agcttaggctgtcttaccggttacatttgtaat

SEQ ID NO: 32288 - DNA, 33 bp, Homo sapien
agcttaggctgtcttatcggttacatttgtaat

SEQ ID NO: 32289 - DNA, 33 bp, Homo sapien
gtgtttggagttataaatgtcttatcagtaatc

SEQ ID NO: 32290 - DNA, 33 bp, Homo sapien
gtgtttggagttataagtgtcttatcagtaatc

SEQ ID NO: 32291 - DNA, 33 bp, Homo sapien
cagagaataatgttccagacgagacactgagaa

SEQ ID NO: 32292 - DNA, 33 bp, Homo sapien
cagagaataatgttccggacgagacactgagaa

SEQ ID NO: 32293 - DNA, 33 bp, Homo sapien
ctttggcccaacaaacagaggtaatatctaaaa

SEQ ID NO: 32294 - DNA, 33 bp, Homo sapien
ctttggcccaacaaacggaggtaatatctaaaa

SEQ ID NO: 32295 - DNA, 33 bp, Homo sapien
ttacagaacagtataaatgaggataattttatc

SEQ ID NO: 32296 - DNA, 33 bp, Homo sapien
ttacagaacagtataagtgaggataattttatc

SEQ ID NO: 32297 - DNA, 33 bp, Homo sapien
ggtccgggactttgaacgttgcattgatcagtc

SEQ ID NO: 32298 - DNA, 33 bp, Homo sapien
ggtccgggactttgaatgttgcattgatcagtc

SEQ ID NO: 32299 - DNA, 33 bp, Homo sapien
taaacaagaagcttgacaggacagttgaccctt

SEQ ID NO: 32300 - DNA, 33 bp, Homo sapien
taaacaagaagcttgataggacagttgaccctt

SEQ ID NO: 32301 - DNA, 33 bp, Homo sapien
atcaccagtgctttcaataactgcatatttata

SEQ ID NO: 32302 - DNA, 33 bp, Homo sapien
atcaccagtgctttcagtaactgcatatttata

SEQ ID NO: 32303 - DNA, 33 bp, Homo sapien
aactgaatacaggttgaagtttggctgttgtat

SEQ ID NO: 32304 - DNA, 33 bp, Homo sapien
aactgaatacaggttggagtttggctgttgtat

SEQ ID NO: 32305 - DNA, 33 bp, Homo sapien
aaggttgtatcaatgcaagttatcatatcaagg

SEQ ID NO: 32306 - DNA, 33 bp, Homo sapien
aaggttgtatcaatgctagttatcatatcaagg

SEQ ID NO: 32307 - DNA, 33 bp, Homo sapien; identical to SEQ ID NO: 32305

SEQ ID NO: 32308 - DNA, 33 bp, Homo sapien; identical to SEQ ID NO: 32306

SEQ ID NO: 32309 - DNA, 33 bp, Homo sapien
tggggaggttcaattgcaaaagtctgatcttct

SEQ ID NO: 32310 - DNA, 33 bp, Homo sapien
tggggaggttcaattgtaaaagtctgatcttct

SEQ ID NO: 32311 - DNA, 33 bp, Homo sapien; identical to SEQ ID NO: 32309

SEQ ID NO: 32312 - DNA, 33 bp, Homo sapien; identical to SEQ ID NO: 32310

SEQ ID NO: 32313 - DNA, 33 bp, Homo sapien
tgcttgagtagccctaagagtagaatatttcac

SEQ ID NO: 32314 - DNA, 33 bp, Homo sapien
tgcttgagtagccctaggagtagaatatttcac

SEQ ID NO: 32315 - DNA, 33 bp, Homo sapien; identical to SEQ ID NO: 32313

SEQ ID NO: 32316 - DNA, 33 bp, Homo sapien; identical to SEQ ID NO: 32314

SEQ ID NO: 32317 - DNA, 33 bp, Homo sapien
gatgtggatggctggacagagttaagattctac

SEQ ID NO: 32318 - DNA, 33 bp, Homo sapien
gatgtggatggctggagagagttaagattctac

SEQ ID NO: 32319 - DNA, 33 bp, Homo sapien
gtgatcagaaaggtcactgaacggaagcaaagc

SEQ ID NO: 32320 - DNA, 33 bp, Homo sapien
gtgatcagaaaggtcattgaacggaagcaaagc

SEQ ID NO: 32321 - DNA, 33 bp, Homo sapien
tcactgtgccctgagccactcaattcttcagca

SEQ ID NO: 32322 - DNA, 33 bp, Homo sapien
tcactgtgccctgagctactcaattcttcagca

SEQ ID NO: 32323 - DNA, 33 bp, Homo sapien
ctcaggtgttctagtcaaaagcgcctatcaggc

SEQ ID NO: 32324 - DNA, 33 bp, Homo sapien
ctcaggtgttctagtcgaaagcgcctatcaggc

SEQ ID NO: 32325 - DNA, 33 bp, Homo sapien
ccctgtcctggagatacgtatttccattcaaag

SEQ ID NO: 32326 - DNA, 33 bp, Homo sapien
ccctgtcctggagatatgtatttccattcaaag

SEQ ID NO: 32327 - DNA, 33 bp, Homo sapien
atctgctttattttagacctacttgatttacca

SEQ ID NO: 32328 - DNA, 33 bp, Homo sapien
atctgctttattttaggcctacttgatttacca

SEQ ID NO: 32329 - DNA, 33 bp, Homo sapien
actgcaggacgattccagagtggtatacttttg

SEQ ID NO: 32330 - DNA, 33 bp, Homo sapien
actgcaggacgattccggagtggtatacttttg

SEQ ID NO: 32331 - DNA, 33 bp, Homo sapien
tcctcttttaaatggcccatttagctaggtcag

SEQ ID NO: 32332 - DNA, 33 bp, Homo sapien
tcctcttttaaatggctcatttagctaggtcag

SEQ ID NO: 32333 - DNA, 33 bp, Homo sapien
gaaatgtaagttcctgaatgtttgccctcaccc

SEQ ID NO: 32334 - DNA, 33 bp, Homo sapien
gaaatgtaagttcctggatgtttgccctcaccc

SEQ ID NO: 32335 - DNA, 33 bp, Homo sapien
ggcacaaggaacaatgaagccaatgaaacggag

SEQ ID NO: 32336 - DNA, 33 bp, Homo sapien
ggcacaaggaacaatggagccaatgaaacggag

SEQ ID NO: 32337 - DNA, 33 bp, Homo sapien
ttagggcaatgtcaaacgaaatatgaggttgaa

SEQ ID NO: 32338 - DNA, 33 bp, Homo sapien
ttagggcaatgtcaaatgaaatatgaggttgaa

SEQ ID NO: 32339 - DNA, 33 bp, Homo sapien
tgagtttacagatcaaacagatagttggctaat

SEQ ID NO: 32340 - DNA, 33 bp, Homo sapien
tgagtttacagatcaaccagatagttggctaat

SEQ ID NO: 32341 - DNA, 33 bp, Homo sapien
attcaactaagtcgtacacaaaagtgttaggtc

SEQ ID NO: 32342 - DNA, 33 bp, Homo sapien
attcaactaagtcgtatacaaaagtgttaggtc

SEQ ID NO: 32343 - DNA, 33 bp, Homo sapien
agtttatcccagatcccatattgtacttagatt

SEQ ID NO: 32344 - DNA, 33 bp, Homo sapien
agtttatcccagatcctatattgtacttagatt

SEQ ID NO: 32345 - DNA, 33 bp, Homo sapien
gcataactgcataatgccactaatcagggaaaa

SEQ ID NO: 32346 - DNA, 33 bp, Homo sapien
gcataactgcataatgtcactaatcagggaaaa

SEQ ID NO: 32347 - DNA, 33 bp, Homo sapien
tacaagagcagagcaaagccttttgaaaataat

SEQ ID NO: 32348 - DNA, 33 bp, Homo sapien
tacaagagcagagcaaggccttttgaaaataat

SEQ ID NO: 32349 - DNA, 33 bp, Homo sapien
gacgtgatgatttcaggaacaacttcttttcct

SEQ ID NO: 32350 - DNA, 33 bp, Homo sapien
gacgtgatgatttcagtaacaacttcttttcct

SEQ ID NO: 32351 - DNA, 33 bp, Homo sapien
aaagctgataagagaaacacatgactggagctg

SEQ ID NO: 32352 - DNA, 33 bp, Homo sapien
aaagctgataagagaagcacatgactggagctg

SEQ ID NO: 32353 - DNA, 33 bp, Homo sapien
tatattctctgtgccccagttttcccattagca

SEQ ID NO: 32354 - DNA, 33 bp, Homo sapien
tatattctctgtgccctagttttcccattagca

SEQ ID NO: 32355 - DNA, 33 bp, Homo sapien
tctaaatgctaaatttcaaaatgaaaccatccc

SEQ ID NO: 32356 - DNA, 33 bp, Homo sapien
tctaaatgctaaatttgaaaatgaaaccatccc

SEQ ID NO: 32357 - DNA, 33 bp, Homo sapien
tgtccatatgaaagtagcaaatgccaaaggtca

SEQ ID NO: 32358 - DNA, 33 bp, Homo sapien
tgtccatatgaaagtatcaaatgccaaaggtca

SEQ ID NO: 32359 - DNA, 33 bp, Homo sapien
cagtggtgtttctatacgctaacaacaaactat

SEQ ID NO: 32360 - DNA, 33 bp, Homo sapien
cagtggtgtttctatatgctaacaacaaactat

SEQ ID NO: 32361 - DNA, 33 bp, Homo sapien
cctcaagcaacaacgaataggcaccagggccag

SEQ ID NO: 32362 - DNA, 33 bp, Homo sapien
cctcaagcaacaacgagtaggcaccagggccag

SEQ ID NO: 32363 - DNA, 33 bp, Homo sapien
tgtttcactaccagaacggtgaaaattgaaagg

SEQ ID NO: 32364 - DNA, 33 bp, Homo sapien
tgtttcactaccagaatggtgaaaattgaaagg

SEQ ID NO: 32365 - DNA, 33 bp, Homo sapien
gcctgagtccggaagcccatctggatccagcca

SEQ ID NO: 32366 - DNA, 33 bp, Homo sapien
gcctgagtccggaagcgcatctggatccagcca

SEQ ID NO: 32367 - DNA, 33 bp, Homo sapien
gtgaagagttgccagagcctcaggtataagaat

SEQ ID NO: 32368 - DNA, 33 bp, Homo sapien
gtgaagagttgccagatcctcaggtataagaat

SEQ ID NO: 32369 - DNA, 33 bp, Homo sapien
gctttgaaaaacactgaactgatttatcactcg

SEQ ID NO: 32370 - DNA, 33 bp, Homo sapien
gctttgaaaaacactggactgatttatcactcg

SEQ ID NO: 32371 - DNA, 33 bp, Homo sapien
cctgatgactgttttacgatgcgctaccttgtt

SEQ ID NO: 32372 - DNA, 33 bp, Homo sapien
cctgatgactgttttatgatgcgctaccttgtt

SEQ ID NO: 32373 - DNA, 33 bp, Homo sapien
gtccagcgtccaactaaaatgtatgaagtatgt

SEQ ID NO: 32374 - DNA, 33 bp, Homo sapien
gtccagcgtccaactacaatgtatgaagtatgt

SEQ ID NO: 32375 - DNA, 33 bp, Homo sapien
ttttcccatcaggattaaaatgatcagcacata

SEQ ID NO: 32376 - DNA, 33 bp, Homo sapien
ttttcccatcaggattgaaatgatcagcacata

SEQ ID NO: 32377 - DNA, 33 bp, Homo sapien
gaagttgccagaacaacagcccctgttcatcag

SEQ ID NO: 32378 - DNA, 33 bp, Homo sapien
gaagttgccagaacaatagcccctgttcatcag

SEQ ID NO: 32379 - DNA, 33 bp, Homo sapien
tgataaaactgaaaagaaagtcatgctttttga

SEQ ID NO: 32380 - DNA, 33 bp, Homo sapien
tgataaaactgaaaaggaagtcatgctttttga

SEQ ID NO: 32381 - DNA, 33 bp, Homo sapien
acttgagcctccccacactatacatctcgtgtt

SEQ ID NO: 32382 - DNA, 33 bp, Homo sapien
acttgagcctccccacgctatacatctcgtgtt

SEQ ID NO: 32383 - DNA, 33 bp, Homo sapien
tatgtacagcttgtaccctgcttttttgtattt

SEQ ID NO: 32384 - DNA, 33 bp, Homo sapien
tatgtacagcttgtactctgcttttttgtattt

SEQ ID NO: 32385 - DNA, 33 bp, Homo sapien
atgctctacagaataaaataactgtgcagcaaa

SEQ ID NO: 32386 - DNA, 33 bp, Homo sapien
atgctctacagaataacataactgtgcagcaaa

SEQ ID NO: 32387 - DNA, 33 bp, Homo sapien
aggctgctctctcataacctattaaaaagtttt

SEQ ID NO: 32388 - DNA, 33 bp, Homo sapien
aggctgctctctcatagcctattaaaaagtttt

SEQ ID NO: 32389 - DNA, 33 bp, Homo sapien
cccaaagttgttcagcaaaaatagaccgagaat

SEQ ID NO: 32390 - DNA, 33 bp, Homo sapien
cccaaagttgttcagcgaaaatagaccgagaat

SEQ ID NO: 32391 - DNA, 33 bp, Homo sapien
aatcttccacctaaggaatcctgttagatttta

SEQ ID NO: 32392 - DNA, 33 bp, Homo sapien
aatcttccacctaagggatcctgttagatttta

SEQ ID NO: 32393 - DNA, 33 bp, Homo sapien
atataccctcattcaaatggggaactcaggagg

SEQ ID NO: 32394 - DNA, 33 bp, Homo sapien
atataccctcattcaagtggggaactcaggagg

SEQ ID NO: 32395 - DNA, 33 bp, Homo sapien
tcaggaaccagaattaaaacagatgatgcctaa

SEQ ID NO: 32396 - DNA, 33 bp, Homo sapien
tcaggaaccagaattagaacagatgatgcctaa

SEQ ID NO: 32397 - DNA, 33 bp, Homo sapien
acttctattaacgtaaactgatttcactttgtt

SEQ ID NO: 32398 - DNA, 33 bp, Homo sapien
acttctattaacgtaacctgatttcactttgtt

SEQ ID NO: 32399 - DNA, 33 bp, Homo sapien
gcaacctattcagatccaattggaggctaatta

SEQ ID NO: 32400 - DNA, 33 bp, Homo sapien
gcaacctattcagatctaattggaggctaatta

SEQ ID NO: 32401 - DNA, 33 bp, Homo sapien
ctttatagctttcacaaaactgtagcctgggtc

SEQ ID NO: 32402 - DNA, 33 bp, Homo sapien
ctttatagctttcacagaactgtagcctgggtc

SEQ ID NO: 32403 - DNA, 33 bp, Homo sapien
gtattcttctttaaaaagtgctgagagaatata

SEQ ID NO: 32404 - DNA, 33 bp, Homo sapien
gtattcttctttaaaaggtgctgagagaatata

SEQ ID NO: 32405 - DNA, 33 bp, Homo sapien
gtgacatggggacaaaaaggagcatgccaggga

SEQ ID NO: 32406 - DNA, 33 bp, Homo sapien
gtgacatggggacaaacaggagcatgccaggga

SEQ ID NO: 32407 - DNA, 33 bp, Homo sapien
gatccagaaacaaaaactggcatacaattgaag

SEQ ID NO: 32408 - DNA, 33 bp, Homo sapien
gatccagaaacaaaaattggcatacaattgaag

SEQ ID NO: 32409 - DNA, 33 bp, Homo sapien
gactatggcttaaggaaattatgtaacttgtct

SEQ ID NO: 32410 - DNA, 33 bp, Homo sapien
gactatggcttaaggagattatgtaacttgtct

SEQ ID NO: 32411 - DNA, 33 bp, Homo sapien
aactatccttatctgaacttaatgatttaatca

SEQ ID NO: 32412 - DNA, 33 bp, Homo sapien
aactatccttatctgagcttaatgatttaatca

SEQ ID NO: 32413 - DNA, 33 bp, Homo sapien
aaaaagttaagaattcaaaagctacccaagagg

SEQ ID NO: 32414 - DNA, 33 bp, Homo sapien
aaaaagttaagaattcgaaagctacccaagagg

SEQ ID NO: 32415 - DNA, 33 bp, Homo sapien
aggtccaaagaagtacacaggtcagtaaagtat

SEQ ID NO: 32416 - DNA, 33 bp, Homo sapien
aggtccaaagaagtacgcaggtcagtaaagtat

SEQ ID NO: 32417 - DNA, 33 bp, Homo sapien
gaaatgttatggaaaacgccacaattctctttc

SEQ ID NO: 32418 - DNA, 33 bp, Homo sapien
gaaatgttatggaaaatgccacaattctctttc

SEQ ID NO: 32419 - DNA, 33 bp, Homo sapien
tcaacctgcaatagccactattttatttagccc

SEQ ID NO: 32420 - DNA, 33 bp, Homo sapien
tcaacctgcaatagccgctattttatttagccc

SEQ ID NO: 32421 - DNA, 33 bp, Homo sapien
gcgagaataattaaaccatttactctcagctgt

SEQ ID NO: 32422 - DNA, 33 bp, Homo sapien
gcgagaataattaaacgatttactctcagctgt

SEQ ID NO: 32423 - DNA, 33 bp, Homo sapien
cttgttcctagaatacactaatttgcctcttat

SEQ ID NO: 32424 - DNA, 33 bp, Homo sapien
cttgttcctagaataccctaatttgcctcttat

SEQ ID NO: 32425 - DNA, 33 bp, Homo sapien
ggcaatctctgggaaaatatgtctgatacctct

SEQ ID NO: 32426 - DNA, 33 bp, Homo sapien
ggcaatctctgggaaagtatgtctgatacctct

SEQ ID NO: 32427 - DNA, 33 bp, Homo sapien
cacttataaatactcacgtcattctaaggcatg

SEQ ID NO: 32428 - DNA, 33 bp, Homo sapien
cacttataaatactcatgtcattctaaggcatg

SEQ ID NO: 32429 - DNA, 33 bp, Homo sapien
ccagtggaacaaaacaataatgcaataaaactt

SEQ ID NO: 32430 - DNA, 33 bp, Homo sapien
ccagtggaacaaaacagtaatgcaataaaactt

SEQ ID NO: 32431 - DNA, 33 bp, Homo sapien
tttccaattttctaccacactggatccgtgagc

SEQ ID NO: 32432 - DNA, 33 bp, Homo sapien
tttccaattttctaccgcactggatccgtgagc

SEQ ID NO: 32433 - DNA, 33 bp, Homo sapien
agtgttctaatgttaacaactaccaaatactaa

SEQ ID NO: 32434 - DNA, 33 bp, Homo sapien
agtgttctaatgttaataactaccaaatactaa

SEQ ID NO: 32435 - DNA, 33 bp, Homo sapien
ttctgagctgaaaaaacgttgacctccatctct

SEQ ID NO: 32436 - DNA, 33 bp, Homo sapien
ttctgagctgaaaaaatgttgacctccatctct

SEQ ID NO: 32437 - DNA, 33 bp, Homo sapien
agcttcaaatgctaccaggaggaagttagctag

SEQ ID NO: 32438 - DNA, 33 bp, Homo sapien
agcttcaaatgctaccgggaggaagttagctag

SEQ ID NO: 32439 - DNA, 33 bp, Homo sapien
tcattaactccaatgcaaacccgtgtgttaaga

SEQ ID NO: 32440 - DNA, 33 bp, Homo sapien
tcattaactccaatgcgaacccgtgtgttaaga

SEQ ID NO: 32441 - DNA, 33 bp, Homo sapien
ttttctgtgtttatgacagttaccattaatgat

SEQ ID NO: 32442 - DNA, 33 bp, Homo sapien
ttttctgtgtttatgagagttaccattaatgat

SEQ ID NO: 32443 - DNA, 33 bp, Homo sapien
ataattacttacctggaaacttggttgtaatca

SEQ ID NO: 32444 - DNA, 33 bp, Homo sapien
ataattacttacctgggaacttggttgtaatca

SEQ ID NO: 32445 - DNA, 33 bp, Homo sapien
tgactatatgatttaactggcaggtaggagccg

SEQ ID NO: 32446 - DNA, 33 bp, Homo sapien
tgactatatgatttaattggcaggtaggagccg

SEQ ID NO: 32447 - DNA, 33 bp, Homo sapien
ggtgcatggcatctaggaagtttttctggattc

SEQ ID NO: 32448 - DNA, 33 bp, Homo sapien
ggtgcatggcatctagtaagtttttctggattc

SEQ ID NO: 32449 - DNA, 33 bp, Homo sapien
aatgaacaactttttacagagtaaatgcaggat

SEQ ID NO: 32450 - DNA, 33 bp, Homo sapien
aatgaacaactttttatagagtaaatgcaggat

SEQ ID NO: 32451 - DNA, 33 bp, Homo sapien
ttggtgctgagaactaaagtcagtctttgtcct

SEQ ID NO: 32452 - DNA, 33 bp, Homo sapien
ttggtgctgagaactagagtcagtctttgtcct

SEQ ID NO: 32453 - DNA, 33 bp, Homo sapien
ttgtgcttctctgaaaaatgaatgaacttccac

SEQ ID NO: 32454 - DNA, 33 bp, Homo sapien
ttgtgcttctctgaaagatgaatgaacttccac

SEQ ID NO: 32455 - DNA, 33 bp, Homo sapien
ccaaggtagaagtgaaatctagtctcttggggt

SEQ ID NO: 32456 - DNA, 33 bp, Homo sapien
ccaaggtagaagtgaagtctagtctcttggggt

SEQ ID NO: 32457 - DNA, 33 bp, Homo sapien
ttttaatggccaataaattagtatagtccagct

SEQ ID NO: 32458 - DNA, 33 bp, Homo sapien
ttttaatggccaataagttagtatagtccagct

SEQ ID NO: 32459 - DNA, 33 bp, Homo sapien
ttgtaaattcaataagaccttaggccttcttaa

SEQ ID NO: 32460 - DNA, 33 bp, Homo sapien
ttgtaaattcaataagtccttaggccttcttaa

SEQ ID NO: 32461 - DNA, 33 bp, Homo sapien
ctaatggtcgtgcaatcaaaacgtgttgactca

SEQ ID NO: 32462 - DNA, 33 bp, Homo sapien
ctaatggtcgtgcaatgaaaacgtgttgactca

SEQ ID NO: 32463 - DNA, 33 bp, Homo sapien
cctcatgtcctaaatccattcaatgtcaaatcc

SEQ ID NO: 32464 - DNA, 33 bp, Homo sapien
cctcatgtcctaaatctattcaatgtcaaatcc

SEQ ID NO: 32465 - DNA, 33 bp, Homo sapien
gcctggatgtcttttacggcctttatttatctt

SEQ ID NO: 32466 - DNA, 33 bp, Homo sapien
gcctggatgtcttttatggcctttatttatctt

SEQ ID NO: 32467 - DNA, 33 bp, Homo sapien
gatggtatctgggaaaagtttaatattaagcca

SEQ ID NO: 32468 - DNA, 33 bp, Homo sapien
gatggtatctgggaaaggtttaatattaagcca

SEQ ID NO: 32469 - DNA, 33 bp, Homo sapien
ggtgctattgttttaacgaatgtgttgaattgt

SEQ ID NO: 32470 - DNA, 33 bp, Homo sapien
ggtgctattgttttaatgaatgtgttgaattgt

SEQ ID NO: 32471 - DNA, 33 bp, Homo sapien
cctggcttgggaaaataaggaaattgcagaaat

SEQ ID NO: 32472 - DNA, 33 bp, Homo sapien
cctggcttgggaaaatgaggaaattgcagaaat

SEQ ID NO: 32473 - DNA, 33 bp, Homo sapien
ttctgctttgacatggaaagttgaactgcccca

SEQ ID NO: 32474 - DNA, 33 bp, Homo sapien
ttctgctttgacatgggaagttgaactgcccca

SEQ ID NO: 32475 - DNA, 33 bp, Homo sapien
gtcacacataaagtaggcaatgtagataagcct

SEQ ID NO: 32476 - DNA, 33 bp, Homo sapien
gtcacacataaagtagtcaatgtagataagcct

SEQ ID NO: 32477 - DNA, 33 bp, Homo sapien
aggacctgtcgagagcacctacgggtccttcag

SEQ ID NO: 32478 - DNA, 33 bp, Homo sapien
aggacctgtcgagagcgcctacgggtccttcag

SEQ ID NO: 32479 - DNA, 33 bp, Homo sapien
aacaaggttatcactacaagctgagtgctagta

SEQ ID NO: 32480 - DNA, 33 bp, Homo sapien
aacaaggttatcactagaagctgagtgctagta

SEQ ID NO: 32481 - DNA, 33 bp, Homo sapien
aaaatcgattagaacacaggacagcttccgcat

SEQ ID NO: 32482 - DNA, 33 bp, Homo sapien
aaaatcgattagaacataggacagcttccgcat

SEQ ID NO: 32483 - DNA, 33 bp, Homo sapien
cacttggcttcagggcacagtcataccaggcat

SEQ ID NO: 32484 - DNA, 33 bp, Homo sapien
cacttggcttcagggcgcagtcataccaggcat

SEQ ID NO: 32485 - DNA, 33 bp, Homo sapien
atctatggaacactgacgttgaaattccaagct

SEQ ID NO: 32486 - DNA, 33 bp, Homo sapien
atctatggaacactgatgttgaaattccaagct

SEQ ID NO: 32487 - DNA, 33 bp, Homo sapien
ctacattaattcagacactaaacatatgacaat

SEQ ID NO: 32488 - DNA, 33 bp, Homo sapien
ctacattaattcagacgctaaacatatgacaat

SEQ ID NO: 32489 - DNA, 33 bp, Homo sapien
gactctagtccatgcaccacatttttgtgccac

SEQ ID NO: 32490 - DNA, 33 bp, Homo sapien
gactctagtccatgcatcacatttttgtgccac

SEQ ID NO: 32491 - DNA, 33 bp, Homo sapien
ttcaaaaattttatagaatgctctcatgtcctt

SEQ ID NO: 32492 - DNA, 33 bp, Homo sapien
ttcaaaaattttataggatgctctcatgtcctt

SEQ ID NO: 32493 - DNA, 33 bp, Homo sapien
tgtccaagatgattggaacagattgtatcatga

SEQ ID NO: 32494 - DNA, 33 bp, Homo sapien
tgtccaagatgattgggacagattgtatcatga

SEQ ID NO: 32495 - DNA, 33 bp, Homo sapien
tcaaaatagtcaagaactgtacataattcaaat

SEQ ID NO: 32496 - DNA, 33 bp, Homo sapien
tcaaaatagtcaagaagtgtacataattcaaat

SEQ ID NO: 32497 - DNA, 33 bp, Homo sapien
aactgttagatcacagcaagaacagtaagctct

SEQ ID NO: 32498 - DNA, 33 bp, Homo sapien
aactgttagatcacagtaagaacagtaagctct

SEQ ID NO: 32499 - DNA, 33 bp, Homo sapien
aaggttattgtcatcacgtaacggtcatgtgac

SEQ ID NO: 32500 - DNA, 33 bp, Homo sapien
aaggttattgtcatcatgtaacggtcatgtgac

SEQ ID NO: 32501 - DNA, 33 bp, Homo sapien
acacataatggaagcacgtattaaaatcagatg

SEQ ID NO: 32502 - DNA, 33 bp, Homo sapien
acacataatggaagcaggtattaaaatcagatg

SEQ ID NO: 32503 - DNA, 33 bp, Homo sapien
aaaggtggaagtaccaaaaagtgtcatatgtgt

SEQ ID NO: 32504 - DNA, 33 bp, Homo sapien
aaaggtggaagtaccagaaagtgtcatatgtgt

SEQ ID NO: 32505 - DNA, 33 bp, Homo sapien
gctagcttattagaaacattgtaggtgtggtgg

SEQ ID NO: 32506 - DNA, 33 bp, Homo sapien
gctagcttattagaaatattgtaggtgtggtgg

SEQ ID NO: 32507 - DNA, 33 bp, Homo sapien
aataaatgaaactaagacattgaatgtggaatg

SEQ ID NO: 32508 - DNA, 33 bp, Homo sapien
aataaatgaaactaagccattgaatgtggaatg

SEQ ID NO: 32509 - DNA, 33 bp, Homo sapien
agttaataatgtaagcaatctagaaagagtata

SEQ ID NO: 32510 - DNA, 33 bp, Homo sapien
agttaataatgtaagcgatctagaaagagtata

SEQ ID NO: 32511 - DNA, 33 bp, Homo sapien
tagttcattctctcaaaccattattatacttat

SEQ ID NO: 32512 - DNA, 33 bp, Homo sapien
tagttcattctctcaagccattattatacttat

SEQ ID NO: 32513 - DNA, 33 bp, Homo sapien
tgcataaggatggataaatacaggatgcctaac

SEQ ID NO: 32514 - DNA, 33 bp, Homo sapien
tgcataaggatggatacatacaggatgcctaac

SEQ ID NO: 32515 - DNA, 33 bp, Homo sapien
ggagcaaacagtagaactattgagctgtctcta

SEQ ID NO: 32516 - DNA, 33 bp, Homo sapien
ggagcaaacagtagaagtattgagctgtctcta

SEQ ID NO: 32517 - DNA, 33 bp, Homo sapien
agtaatgattagataacagactgtcctaaattt

SEQ ID NO: 32518 - DNA, 33 bp, Homo sapien
agtaatgattagataatagactgtcctaaattt

SEQ ID NO: 32519 - DNA, 33 bp, Homo sapien
atactgcaaatatgccaaatgtatgaaaaaaat

SEQ ID NO: 32520 - DNA, 33 bp, Homo sapien
atactgcaaatatgccgaatgtatgaaaaaaat

SEQ ID NO: 32521 - DNA, 33 bp, Homo sapien
taacagatttattgctaaacaggttatcttacg

SEQ ID NO: 32522 - DNA, 33 bp, Homo sapien
taacagatttattgctgaacaggttatcttacg

SEQ ID NO: 32523 - DNA, 33 bp, Homo sapien
catcaggaattgcctgccagaaaaatccaccca

SEQ ID NO: 32524 - DNA, 33 bp, Homo sapien
catcaggaattgcctgtcagaaaaatccaccca

SEQ ID NO: 32525 - DNA, 33 bp, Homo sapien
ccacctctgtcaccaaattatagggctgattca

SEQ ID NO: 32526 - DNA, 33 bp, Homo sapien
ccacctctgtcaccaacttatagggctgattca

SEQ ID NO: 32527 - DNA, 33 bp, Homo sapien
cttcttgctgactatcaaatagctaggtggcca

SEQ ID NO: 32528 - DNA, 33 bp, Homo sapien
cttcttgctgactatcgaatagctaggtggcca

SEQ ID NO: 32529 - DNA, 33 bp, Homo sapien
aggctgtatttttcaactgagaggcagtcaggg

SEQ ID NO: 32530 - DNA, 33 bp, Homo sapien
aggctgtatttttcaattgagaggcagtcaggg

SEQ ID NO: 32531 - DNA, 33 bp, Homo sapien
gacaaacaccttggtacgtcaaccttgaagtac

SEQ ID NO: 32532 - DNA, 33 bp, Homo sapien
gacaaacaccttggtatgtcaaccttgaagtac

SEQ ID NO: 32533 - DNA, 33 bp, Homo sapien
aaggtctcaagaagaaagtaccatttgactgtt

SEQ ID NO: 32534 - DNA, 33 bp, Homo sapien
aaggtctcaagaagaacgtaccatttgactgtt

SEQ ID NO: 32535 - DNA, 33 bp, Homo sapien
agcctaccatcagagcagatggaagtgtccttc

SEQ ID NO: 32536 - DNA, 33 bp, Homo sapien
agcctaccatcagagcggatggaagtgtccttc

SEQ ID NO: 32537 - DNA, 33 bp, Homo sapien
tcctataaataatcgaaaattgtgatgactcag

SEQ ID NO: 32538 - DNA, 33 bp, Homo sapien
tcctataaataatcgagaattgtgatgactcag

SEQ ID NO: 32539 - DNA, 33 bp, Homo sapien
agatcagagtagaaaccggtccaacttctctgg

SEQ ID NO: 32540 - DNA, 33 bp, Homo sapien
agatcagagtagaaactggtccaacttctctgg

SEQ ID NO: 32541 - DNA, 33 bp, Homo sapien
acgttgatggtttcaccaaaaacaattatacac

SEQ ID NO: 32542 - DNA, 33 bp, Homo sapien
acgttgatggtttcactaaaaacaattatacac

SEQ ID NO: 32543 - DNA, 33 bp, Homo sapien
aacttcttgtccatccacttttgattccttttg

SEQ ID NO: 32544 - DNA, 33 bp, Homo sapien
aacttcttgtccatccgcttttgattccttttg

SEQ ID NO: 32545 - DNA, 33 bp, Homo sapien
gtaaataacacttggacaatttctttgtttcat

SEQ ID NO: 32546 - DNA, 33 bp, Homo sapien
gtaaataacacttggagaatttctttgtttcat

SEQ ID NO: 32547 - DNA, 33 bp, Homo sapien
cagggtatcctgtaaaatctggaaacatagata

SEQ ID NO: 32548 - DNA, 33 bp, Homo sapien
cagggtatcctgtaaactctggaaacatagata

SEQ ID NO: 32549 - DNA, 33 bp, Homo sapien
gtgtcagagcggcacacgatagctgcttctagt

SEQ ID NO: 32550 - DNA, 33 bp, Homo sapien
gtgtcagagcggcacatgatagctgcttctagt

SEQ ID NO: 32551 - DNA, 33 bp, Homo sapien
ggaacccaagtttggaataatagctgtttactt

SEQ ID NO: 32552 - DNA, 33 bp, Homo sapien
ggaacccaagtttggattaatagctgtttactt

SEQ ID NO: 32553 - DNA, 33 bp, Homo sapien
taaaaatgttttgcacacttagttcagattctg

SEQ ID NO: 32554 - DNA, 33 bp, Homo sapien
taaaaatgttttgcactcttagttcagattctg

SEQ ID NO: 32555 - DNA, 33 bp, Homo sapien
gaattatattaggttcaaaatagcaacttcaca

SEQ ID NO: 32556 - DNA, 33 bp, Homo sapien
gaattatattaggttcgaaatagcaacttcaca

SEQ ID NO: 32557 - DNA, 33 bp, Homo sapien
gtcaagttttcaaccaccttcatcacttactgc

SEQ ID NO: 32558 - DNA, 33 bp, Homo sapien
gtcaagttttcaaccatcttcatcacttactgc

SEQ ID NO: 32559 - DNA, 33 bp, Homo sapien
gcatgtgttgagtccagtattggcttctgtcta

SEQ ID NO: 32560 - DNA, 33 bp, Homo sapien
gcatgtgttgagtccattattggcttctgtcta

SEQ ID NO: 32561 - DNA, 33 bp, Homo sapien
tggctgcaagattaccactcaaagagacctgta

SEQ ID NO: 32562 - DNA, 33 bp, Homo sapien
tggctgcaagattaccgctcaaagagacctgta

SEQ ID NO: 32563 - DNA, 33 bp, Homo sapien
aagatcaagatgccaacggtggaaataaagaac

SEQ ID NO: 32564 - DNA, 33 bp, Homo sapien
aagatcaagatgccaatggtggaaataaagaac

SEQ ID NO: 32565 - DNA, 33 bp, Homo sapien
aggaaggaaataggcacgtagcatcagttctcc

SEQ ID NO: 32566 - DNA, 33 bp, Homo sapien
aggaaggaaataggcatgtagcatcagttctcc

SEQ ID NO: 32567 - DNA, 33 bp, Homo sapien
atgcaatcttcttccaagttgcattttagtgtt

SEQ ID NO: 32568 - DNA, 33 bp, Homo sapien
atgcaatcttcttccacgttgcattttagtgtt

SEQ ID NO: 32569 - DNA, 33 bp, Homo sapien
ccctcttatcatgtcaccatgcatttgtacctt

SEQ ID NO: 32570 - DNA, 33 bp, Homo sapien
ccctcttatcatgtcagcatgcatttgtacctt

SEQ ID NO: 32571 - DNA, 33 bp, Homo sapien
tcaaaatcacatagaaaccataccagaaatcag

SEQ ID NO: 32572 - DNA, 33 bp, Homo sapien
tcaaaatcacatagaacccataccagaaatcag

SEQ ID NO: 32573 - DNA, 33 bp, Homo sapien
gtactagaagcatacaccttcaaatatttagga

SEQ ID NO: 32574 - DNA, 33 bp, Homo sapien
gtactagaagcatacatcttcaaatatttagga

SEQ ID NO: 32575 - DNA, 33 bp, Homo sapien
atgtagcaggcactacaccattttgtctttaca

SEQ ID NO: 32576 - DNA, 33 bp, Homo sapien
atgtagcaggcactacgccattttgtctttaca

SEQ ID NO: 32577 - DNA, 33 bp, Homo sapien
tatagaattaagtccaagtttcttagtttcaca

SEQ ID NO: 32578 - DNA, 33 bp, Homo sapien
tatagaattaagtccacgtttcttagtttcaca

SEQ ID NO: 32579 - DNA, 33 bp, Homo sapien
ctttcctgctgttaaacggcaattttattttct

SEQ ID NO: 32580 - DNA, 33 bp, Homo sapien
ctttcctgctgttaaatggcaattttattttct

SEQ ID NO: 32581 - DNA, 33 bp, Homo sapien
agccacagagacaggcacaaatgaggcctccct

SEQ ID NO: 32582 - DNA, 33 bp, Homo sapien
agccacagagacaggcgcaaatgaggcctccct

SEQ ID NO: 32583 - DNA, 33 bp, Homo sapien
ttcacaatcaggacaactgaacttaaatactca

SEQ ID NO: 32584 - DNA, 33 bp, Homo sapien
ttcacaatcaggacaattgaacttaaatactca

SEQ ID NO: 32585 - DNA, 33 bp, Homo sapien
aataaaatgtgctccactgaggcaggtttgagt

SEQ ID NO: 32586 - DNA, 33 bp, Homo sapien
aataaaatgtgctccattgaggcaggtttgagt

SEQ ID NO: 32587 - DNA, 33 bp, Homo sapien
taagcttgaatcagaaaagttcaagagctcaga

SEQ ID NO: 32588 - DNA, 33 bp, Homo sapien
taagcttgaatcagaagagttcaagagctcaga

SEQ ID NO: 32589 - DNA, 33 bp, Homo sapien
tataggtttcaattaacgttctacctttctgac

SEQ ID NO: 32590 - DNA, 33 bp, Homo sapien
tataggtttcaattaatgttctacctttctgac

SEQ ID NO: 32591 - DNA, 33 bp, Homo sapien
gaagacttcatatctacgggtagcaaatcacat

SEQ ID NO: 32592 - DNA, 33 bp, Homo sapien
gaagacttcatatctatgggtagcaaatcacat

SEQ ID NO: 32593 - DNA, 33 bp, Homo sapien
tcatcagaatggcccacgagtgctcttattgag

SEQ ID NO: 32594 - DNA, 33 bp, Homo sapien
tcatcagaatggcccatgagtgctcttattgag

SEQ ID NO: 32595 - DNA, 33 bp, Homo sapien
tgttagtgtcttacagaatatcttgcacataga

SEQ ID NO: 32596 - DNA, 33 bp, Homo sapien
tgttagtgtcttacaggatatcttgcacataga

SEQ ID NO: 32597 - DNA, 33 bp, Homo sapien
tgtcttcttcctgatacggtttctatctataaa

SEQ ID NO: 32598 - DNA, 33 bp, Homo sapien
tgtcttcttcctgatatggtttctatctataaa

SEQ ID NO: 32599 - DNA, 33 bp, Homo sapien
tcatcataagtcaaagaaggaatatgtgtattt

SEQ ID NO: 32600 - DNA, 33 bp, Homo sapien
tcatcataagtcaaaggaggaatatgtgtattt

SEQ ID NO: 32601 - DNA, 33 bp, Homo sapien
ggggagaagaggggacactggaattcaaagaaa

SEQ ID NO: 32602 - DNA, 33 bp, Homo sapien
ggggagaagaggggacgctggaattcaaagaaa

SEQ ID NO: 32603 - DNA, 33 bp, Homo sapien
attaaaaattggtgagaaaagaatggttactaa

SEQ ID NO: 32604 - DNA, 33 bp, Homo sapien
attaaaaattggtgaggaaagaatggttactaa

SEQ ID NO: 32605 - DNA, 33 bp, Homo sapien
ggagattatagttgccaactttgtgtccttttt

SEQ ID NO: 32606 - DNA, 33 bp, Homo sapien
ggagattatagttgcccactttgtgtccttttt

SEQ ID NO: 32607 - DNA, 33 bp, Homo sapien
ggaatgattttttaacccgtatctggacatttt

SEQ ID NO: 32608 - DNA, 33 bp, Homo sapien
ggaatgattttttaactcgtatctggacatttt

SEQ ID NO: 32609 - DNA, 33 bp, Homo sapien
agggatctgcacgtgaactaagcctggacaatc

SEQ ID NO: 32610 - DNA, 33 bp, Homo sapien
agggatctgcacgtgagctaagcctggacaatc

SEQ ID NO: 32611 - DNA, 33 bp, Homo sapien
acaattgcacggacttaaactagaaagccaaag

SEQ ID NO: 32612 - DNA, 33 bp, Homo sapien
acaattgcacggactttaactagaaagccaaag

SEQ ID NO: 32613 - DNA, 33 bp, Homo sapien
actagaaagccaaagcccttcattggcaaatta

SEQ ID NO: 32614 - DNA, 33 bp, Homo sapien
actagaaagccaaagctcttcattggcaaatta

SEQ ID NO: 32615 - DNA, 33 bp, Homo sapien
ccaagagactatcaaacatgaccagttagattt

SEQ ID NO: 32616 - DNA, 33 bp, Homo sapien
ccaagagactatcaaatatgaccagttagattt

SEQ ID NO: 32617 - DNA, 33 bp, Homo sapien
tggatggcaggactaactaatgcaaagctggct

SEQ ID NO: 32618 - DNA, 33 bp, Homo sapien
tggatggcaggactaagtaatgcaaagctggct

SEQ ID NO: 32619 - DNA, 33 bp, Homo sapien
ttgaggttgttttgaggaatcaatttctatctc

SEQ ID NO: 32620 - DNA, 33 bp, Homo sapien
ttgaggttgttttgagtaatcaatttctatctc

SEQ ID NO: 32621 - DNA, 33 bp, Homo sapien
acacacagatacttgactaaaaataaatattta

SEQ ID NO: 32622 - DNA, 33 bp, Homo sapien
acacacagatacttgagtaaaaataaatattta

SEQ ID NO: 32623 - DNA, 33 bp, Homo sapien
aagtgtgaagattctcagaagtgttgaagacag

SEQ ID NO: 32624 - DNA, 33 bp, Homo sapien
aagtgtgaagattctccgaagtgttgaagacag

SEQ ID NO: 32625 - DNA, 33 bp, Homo sapien
gggtgtttctacacacaataaatgcatcctcca

SEQ ID NO: 32626 - DNA, 33 bp, Homo sapien
gggtgtttctacacacgataaatgcatcctcca

SEQ ID NO: 32627 - DNA, 33 bp, Homo sapien
tataattctgtgtctacgtcttaaattctcctt

SEQ ID NO: 32628 - DNA, 33 bp, Homo sapien
tataattctgtgtctatgtcttaaattctcctt

SEQ ID NO: 32629 - DNA, 33 bp, Homo sapien
gggttccacaacagaaagacaagtagaaaaggc

SEQ ID NO: 32630 - DNA, 33 bp, Homo sapien
gggttccacaacagaaggacaagtagaaaaggc

SEQ ID NO: 32631 - DNA, 33 bp, Homo sapien
ctcagtcagcctaagccatgagcacattttttt

SEQ ID NO: 32632 - DNA, 33 bp, Homo sapien
ctcagtcagcctaagcgatgagcacattttttt

SEQ ID NO: 32633 - DNA, 33 bp, Homo sapien
ttggctatgaatcataacttctgctgtcatgat

SEQ ID NO: 32634 - DNA, 33 bp, Homo sapien
ttggctatgaatcataccttctgctgtcatgat

SEQ ID NO: 32635 - DNA, 33 bp, Homo sapien
aactggtgttgaaagtaacatagactaaaaatg

SEQ ID NO: 32636 - DNA, 33 bp, Homo sapien
aactggtgttgaaagtgacatagactaaaaatg

SEQ ID NO: 32637 - DNA, 33 bp, Homo sapien
gttgccctatctaacagggatcctaacagaacc

SEQ ID NO: 32638 - DNA, 33 bp, Homo sapien
gttgccctatctaacatggatcctaacagaacc

SEQ ID NO: 32639 - DNA, 33 bp, Homo sapien
ttgatctcttcataaactgaaagctgctagact

SEQ ID NO: 32640 - DNA, 33 bp, Homo sapien
ttgatctcttcataaattgaaagctgctagact

SEQ ID NO: 32641 - DNA, 33 bp, Homo sapien
aattcaaagacaaagacgaaagcaagtcaagga

SEQ ID NO: 32642 - DNA, 33 bp, Homo sapien
aattcaaagacaaagaggaaagcaagtcaagga

SEQ ID NO: 32643 - DNA, 33 bp, Homo sapien
ttttccaatcatatcaaactcaaacctcaaaag

SEQ ID NO: 32644 - DNA, 33 bp, Homo sapien
ttttccaatcatatcacactcaaacctcaaaag

SEQ ID NO: 32645 - DNA, 33 bp, Homo sapien
tttatgcctcggacaggccagctttgtttccat

SEQ ID NO: 32646 - DNA, 33 bp, Homo sapien
tttatgcctcggacagtccagctttgtttccat

SEQ ID NO: 32647 - DNA, 33 bp, Homo sapien
agaaagcaaagtgaccaaaatgcagtgggttca

SEQ ID NO: 32648 - DNA, 33 bp, Homo sapien
agaaagcaaagtgaccgaaatgcagtgggttca

SEQ ID NO: 32649 - DNA, 33 bp, Homo sapien
gaaattattgtatctccctacaggcctacaaaa

SEQ ID NO: 32650 - DNA, 33 bp, Homo sapien
gaaattattgtatctctctacaggcctacaaaa

SEQ ID NO: 32651 - DNA, 33 bp, Homo sapien
ggtttctcttgtgataataaggcagatgctgac

SEQ ID NO: 32652 - DNA, 33 bp, Homo sapien
ggtttctcttgtgatagtaaggcagatgctgac

SEQ ID NO: 32653 - DNA, 33 bp, Homo sapien
aatttagatttaaaaccgcaatatcaactctta

SEQ ID NO: 32654 - DNA, 33 bp, Homo sapien
aatttagatttaaaactgcaatatcaactctta

SEQ ID NO: 32655 - DNA, 33 bp, Homo sapien
accttcaaagaaagcacggctgacgtctggatc

SEQ ID NO: 32656 - DNA, 33 bp, Homo sapien
accttcaaagaaagcatggctgacgtctggatc

SEQ ID NO: 32657 - DNA, 33 bp, Homo sapien
acaacgtgcaactgcaacctttctaagattcct

SEQ ID NO: 32658 - DNA, 33 bp, Homo sapien
acaacgtgcaactgcagcctttctaagattcct

SEQ ID NO: 32659 - DNA, 33 bp, Homo sapien
gagtgatgtcaagacacaaaacagcaacagtaa

SEQ ID NO: 32660 - DNA, 33 bp, Homo sapien
gagtgatgtcaagacagaaaacagcaacagtaa

SEQ ID NO: 32661 - DNA, 33 bp, Homo sapien
tgaacactgttgttaaacgtattcctaaatcta

SEQ ID NO: 32662 - DNA, 33 bp, Homo sapien
tgaacactgttgttaagcgtattcctaaatcta

SEQ ID NO: 32663 - DNA, 33 bp, Homo sapien
ttcttttctatgcataagtcacctaaaacaaaa

SEQ ID NO: 32664 - DNA, 33 bp, Homo sapien
ttcttttctatgcatatgtcacctaaaacaaaa

SEQ ID NO: 32665 - DNA, 33 bp, Homo sapien
aatcttacttactcttcaaagcttagttcaaat

SEQ ID NO: 32666 - DNA, 33 bp, Homo sapien
aatcttacttactctttaaagcttagttcaaat

SEQ ID NO: 32667 - DNA, 33 bp, Homo sapien
tttcctaacattgaggaaagcaaaatgtcttca

SEQ ID NO: 32668 - DNA, 33 bp, Homo sapien
tttcctaacattgagggaagcaaaatgtcttca

SEQ ID NO: 32669 - DNA, 33 bp, Homo sapien
tctgtgtcatcatatcgcattcatagtcacatt

SEQ ID NO: 32670 - DNA, 33 bp, Homo sapien
tctgtgtcatcatatctcattcatagtcacatt

SEQ ID NO: 32671 - DNA, 33 bp, Homo sapien
tatgatcaaattgcaggaaggggtacaggtagg

SEQ ID NO: 32672 - DNA, 33 bp, Homo sapien
tatgatcaaattgcagtaaggggtacaggtagg

SEQ ID NO: 32673 - DNA, 33 bp, Homo sapien
tgtttgtttctatcagacattttatttcatggc

SEQ ID NO: 32674 - DNA, 33 bp, Homo sapien
tgtttgtttctatcagccattttatttcatggc

SEQ ID NO: 32675 - DNA, 33 bp, Homo sapien
caaagcagggcacgttaaaaatgtaggcctcag

SEQ ID NO: 32676 - DNA, 33 bp, Homo sapien
caaagcagggcacgtttaaaatgtaggcctcag

SEQ ID NO: 32677 - DNA, 33 bp, Homo sapien
agaaagctgtttcaccaatgacatcatgctact

SEQ ID NO: 32678 - DNA, 33 bp, Homo sapien
agaaagctgtttcaccgatgacatcatgctact

SEQ ID NO: 32679 - DNA, 33 bp, Homo sapien
ctacttaaccaattccacaatttagaatctgtc

SEQ ID NO: 32680 - DNA, 33 bp, Homo sapien
ctacttaaccaattcctcaatttagaatctgtc

SEQ ID NO: 32681 - DNA, 33 bp, Homo sapien
ctcagccctacaaaaccagtccttggatttata

SEQ ID NO: 32682 - DNA, 33 bp, Homo sapien
ctcagccctacaaaactagtccttggatttata

SEQ ID NO: 32683 - DNA, 33 bp, Homo sapien
taagacatatgtatctaaagactcatacttcag

SEQ ID NO: 32684 - DNA, 33 bp, Homo sapien
taagacatatgtatcttaagactcatacttcag

SEQ ID NO: 32685 - DNA, 33 bp, Homo sapien
atattacctgcaccaacaattctgcaatctgtg

SEQ ID NO: 32686 - DNA, 33 bp, Homo sapien
atattacctgcaccaataattctgcaatctgtg

SEQ ID NO: 32687 - DNA, 33 bp, Homo sapien
gtaaaattggttgaaaagtgaaagatttaatcc

SEQ ID NO: 32688 - DNA, 33 bp, Homo sapien
gtaaaattggttgaaaggtgaaagatttaatcc

SEQ ID NO: 32689 - DNA, 33 bp, Homo sapien
tactaattctatcaaaccacagtcacaaaccac

SEQ ID NO: 32690 - DNA, 33 bp, Homo sapien
tactaattctatcaaatcacagtcacaaaccac

SEQ ID NO: 32691 - DNA, 33 bp, Homo sapien
ttgagagaagcttttagcagatacaaagtctgc

SEQ ID NO: 32692 - DNA, 33 bp, Homo sapien
ttgagagaagcttttatcagatacaaagtctgc

SEQ ID NO: 32693 - DNA, 33 bp, Homo sapien
tagcacatattatgagaaaagtgataaaagtga

SEQ ID NO: 32694 - DNA, 33 bp, Homo sapien
tagcacatattatgagtaaagtgataaaagtga

SEQ ID NO: 32695 - DNA, 33 bp, Homo sapien
gcaggaataactattacaatcagcattgcagag

SEQ ID NO: 32696 - DNA, 33 bp, Homo sapien
gcaggaataactattagaatcagcattgcagag

SEQ ID NO: 32697 - DNA, 33 bp, Homo sapien
gaggataaactttctacctcaatgtctttctct

SEQ ID NO: 32698 - DNA, 33 bp, Homo sapien
gaggataaactttctagctcaatgtctttctct

SEQ ID NO: 32699 - DNA, 33 bp, Homo sapien
caatattcaagtagacaaaggttatagaacact

SEQ ID NO: 32700 - DNA, 33 bp, Homo sapien
caatattcaagtagacgaaggttatagaacact

SEQ ID NO: 32701 - DNA, 33 bp, Homo sapien
agtgattttcagcaaccggtacctctactacat

SEQ ID NO: 32702 - DNA, 33 bp, Homo sapien
agtgattttcagcaacgggtacctctactacat

SEQ ID NO: 32703 - DNA, 33 bp, Homo sapien
tttccctattcaggaaacagaaaatcatcacag

SEQ ID NO: 32704 - DNA, 33 bp, Homo sapien
tttccctattcaggaagcagaaaatcatcacag

SEQ ID NO: 32705 - DNA, 33 bp, Homo sapien
atcacaaaattaacaacgaggttatgaattaag

SEQ ID NO: 32706 - DNA, 33 bp, Homo sapien
atcacaaaattaacaaggaggttatgaattaag

SEQ ID NO: 32707 - DNA, 33 bp, Homo sapien
aggattgtccaacaaacatatgatcaatagctg

SEQ ID NO: 32708 - DNA, 33 bp, Homo sapien
aggattgtccaacaaatatatgatcaatagctg

SEQ ID NO: 32709 - DNA, 33 bp, Homo sapien
ccaagtacattccacaactctcccaatcagtat

SEQ ID NO: 32710 - DNA, 33 bp, Homo sapien
ccaagtacattccacagctctcccaatcagtat

SEQ ID NO: 32711 - DNA, 33 bp, Homo sapien
aagtgctcaggaaaccaaaaaacctcagagtcc

SEQ ID NO: 32712 - DNA, 33 bp, Homo sapien
aagtgctcaggaaaccgaaaaacctcagagtcc

SEQ ID NO: 32713 - DNA, 33 bp, Homo sapien
acaagccaattcttaacggaggagtgacatacc

SEQ ID NO: 32714 - DNA, 33 bp, Homo sapien
acaagccaattcttaatggaggagtgacatacc

SEQ ID NO: 32715 - DNA, 33 bp, Homo sapien
tgaagatagtattgcacccatctttgtaataaa

SEQ ID NO: 32716 - DNA, 33 bp, Homo sapien
tgaagatagtattgcatccatctttgtaataaa

SEQ ID NO: 32717 - DNA, 33 bp, Homo sapien
catggtcttgacaccacgttacatgaaatatga

SEQ ID NO: 32718 - DNA, 33 bp, Homo sapien
catggtcttgacaccaggttacatgaaatatga

SEQ ID NO: 32719 - DNA, 33 bp, Homo sapien
ctgtgggtagtttgtccacatacaggactcaac

SEQ ID NO: 32720 - DNA, 33 bp, Homo sapien
ctgtgggtagtttgtctacatacaggactcaac

SEQ ID NO: 32721 - DNA, 33 bp, Homo sapien
gtaacaaaaacaacaacaagaagcaaggatttc

SEQ ID NO: 32722 - DNA, 33 bp, Homo sapien
gtaacaaaaacaacaagaagaagcaaggatttc

SEQ ID NO: 32723 - DNA, 33 bp, Homo sapien
cagtgtaggaaacaaaatctttaaccattccag

SEQ ID NO: 32724 - DNA, 33 bp, Homo sapien
cagtgtaggaaacaaactctttaaccattccag

SEQ ID NO: 32725 - DNA, 33 bp, Homo sapien
caaaatatattactccaaacttaaagtgcaata

SEQ ID NO: 32726 - DNA, 33 bp, Homo sapien
caaaatatattactccgaacttaaagtgcaata

SEQ ID NO: 32727 - DNA, 33 bp, Homo sapien
cgtcaaaactcgccaccaggcaagaccacagtg

SEQ ID NO: 32728 - DNA, 33 bp, Homo sapien
cgtcaaaactcgccactaggcaagaccacagtg

SEQ ID NO: 32729 - DNA, 33 bp, Homo sapien
gacttgtgtggcgttgcacctcggggattgctg

SEQ ID NO: 32730 - DNA, 33 bp, Homo sapien
gacttgtgtggcgttggacctcggggattgctg

SEQ ID NO: 32731 - DNA, 33 bp, Homo sapien
cccatgctgttcttacaacagtgagtgaatgca

SEQ ID NO: 32732 - DNA, 33 bp, Homo sapien
cccatgctgttcttacgacagtgagtgaatgca

SEQ ID NO: 32733 - DNA, 33 bp, Homo sapien
tgctggtatcctgtaaccaatctaatatctaca

SEQ ID NO: 32734 - DNA, 33 bp, Homo sapien
tgctggtatcctgtaatcaatctaatatctaca

SEQ ID NO: 32735 - DNA, 33 bp, Homo sapien
aagtgcaggggaaaaaaaagctcaggaatctca

SEQ ID NO: 32736 - DNA, 33 bp, Homo sapien
aagtgcaggggaaaaagaagctcaggaatctca

SEQ ID NO: 32737 - DNA, 33 bp, Homo sapien
cacctttcccttccacaggcattggtcccttgc

SEQ ID NO: 32738 - DNA, 33 bp, Homo sapien
cacctttcccttccacgggcattggtcccttgc

SEQ ID NO: 32739 - DNA, 33 bp, Homo sapien
attagaattgagtcaaaccctaacacatcttgt

SEQ ID NO: 32740 - DNA, 33 bp, Homo sapien
attagaattgagtcaagccctaacacatcttgt

SEQ ID NO: 32741 - DNA, 33 bp, Homo sapien
ttgtctttgtccatgcgactatggcaacatctt

SEQ ID NO: 32742 - DNA, 33 bp, Homo sapien
ttgtctttgtccatgctactatggcaacatctt

SEQ ID NO: 32743 - DNA, 33 bp, Homo sapien
atgatcccagagctatcacttttggctactttt

SEQ ID NO: 32744 - DNA, 33 bp, Homo sapien
atgatcccagagctatgacttttggctactttt

SEQ ID NO: 32745 - DNA, 33 bp, Homo sapien
ataaaaaccaatcagcccagagttggtccacaa

SEQ ID NO: 32746 - DNA, 33 bp, Homo sapien
ataaaaaccaatcagcgcagagttggtccacaa

SEQ ID NO: 32747 - DNA, 33 bp, Homo sapien
agatttgctcaaagcaaaaaggaaatgagctaa

SEQ ID NO: 32748 - DNA, 33 bp, Homo sapien
agatttgctcaaagcacaaaggaaatgagctaa

SEQ ID NO: 32749 - DNA, 33 bp, Homo sapien
tgtcagtgactgcatccgagaagtttgaaaagt

SEQ ID NO: 32750 - DNA, 33 bp, Homo sapien
tgtcagtgactgcatctgagaagtttgaaaagt

SEQ ID NO: 32751 - DNA, 33 bp, Homo sapien
atgggtaagtgtgccacgataggatagaaagga

SEQ ID NO: 32752 - DNA, 33 bp, Homo sapien
atgggtaagtgtgccatgataggatagaaagga

SEQ ID NO: 32753 - DNA, 33 bp, Homo sapien
tttgtgatgcatctaaatgaattatttcaccct

SEQ ID NO: 32754 - DNA, 33 bp, Homo sapien
tttgtgatgcatctaagtgaattatttcaccct

SEQ ID NO: 32755 - DNA, 33 bp, Homo sapien
tgaaaccaagtcagccaattttcaatatgctgc

SEQ ID NO: 32756 - DNA, 33 bp, Homo sapien
tgaaaccaagtcagccgattttcaatatgctgc

SEQ ID NO: 32757 - DNA, 33 bp, Homo sapien
ccccagcagaattagcaacaatttgtctcttgt

SEQ ID NO: 32758 - DNA, 33 bp, Homo sapien
ccccagcagaattagcgacaatttgtctcttgt

SEQ ID NO: 32759 - DNA, 33 bp, Homo sapien
gatgtcttaactcggaatattttggttcttata

SEQ ID NO: 32760 - DNA, 33 bp, Homo sapien
gatgtcttaactcggagtattttggttcttata

SEQ ID NO: 32761 - DNA, 33 bp, Homo sapien
cttgaattattatttacgctcattactacttta

SEQ ID NO: 32762 - DNA, 33 bp, Homo sapien
cttgaattattatttatgctcattactacttta

SEQ ID NO: 32763 - DNA, 33 bp, Homo sapien
ttaggataaacctagacgggcatccttaaccat

SEQ ID NO: 32764 - DNA, 33 bp, Homo sapien
ttaggataaacctagatgggcatccttaaccat

SEQ ID NO: 32765 - DNA, 33 bp, Homo sapien
ggcaggcagaaggcaggcctcctcagagcctca

SEQ ID NO: 32766 - DNA, 33 bp, Homo sapien
ggcaggcagaaggcagtcctcctcagagcctca

SEQ ID NO: 32767 - DNA, 33 bp, Homo sapien
acaattaggatgggtacaagaataaagcagatg

SEQ ID NO: 32768 - DNA, 33 bp, Homo sapien
acaattaggatgggtagaagaataaagcagatg

SEQ ID NO: 32769 - DNA, 33 bp, Homo sapien
acactcaagattggaacggcagcctggagggtc

SEQ ID NO: 32770 - DNA, 33 bp, Homo sapien
acactcaagattggaatggcagcctggagggtc

SEQ ID NO: 32771 - DNA, 33 bp, Homo sapien
tgctagcattctagagaaaaggcatacaaccag

SEQ ID NO: 32772 - DNA, 33 bp, Homo sapien
tgctagcattctagagcaaaggcatacaaccag

SEQ ID NO: 32773 - DNA, 33 bp, Homo sapien
ttcgcttcaggccagaaacactcattcccccag

SEQ ID NO: 32774 - DNA, 33 bp, Homo sapien
ttcgcttcaggccagacacactcattcccccag

SEQ ID NO: 32775 - DNA, 33 bp, Homo sapien
aatgtgttccttccaaaatccaaataggctcac

SEQ ID NO: 32776 - DNA, 33 bp, Homo sapien
aatgtgttccttccaatatccaaataggctcac

SEQ ID NO: 32777 - DNA, 33 bp, Homo sapien
aggaaggaatatcctcacttggattcatttcat

SEQ ID NO: 32778 - DNA, 33 bp, Homo sapien
aggaaggaatatcctcgcttggattcatttcat

SEQ ID NO: 32779 - DNA, 33 bp, Homo sapien
tatctggaacattgcaaactttaataaatgttt

SEQ ID NO: 32780 - DNA, 33 bp, Homo sapien
tatctggaacattgcagactttaataaatgttt

SEQ ID NO: 32781 - DNA, 33 bp, Homo sapien
attaaatctggaagtcccaactgcttttgaaaa

SEQ ID NO: 32782 - DNA, 33 bp, Homo sapien
attaaatctggaagtctcaactgcttttgaaaa

SEQ ID NO: 32783 - DNA, 33 bp, Homo sapien
ctgcccattctgcaacaaagttgtaccacccct

SEQ ID NO: 32784 - DNA, 33 bp, Homo sapien
ctgcccattctgcaaccaagttgtaccacccct

SEQ ID NO: 32785 - DNA, 33 bp, Homo sapien
cacactctgttaggcaacaatgagttttatgaa

SEQ ID NO: 32786 - DNA, 33 bp, Homo sapien
cacactctgttaggcagcaatgagttttatgaa

SEQ ID NO: 32787 - DNA, 33 bp, Homo sapien
ctctgtacccattaaacgtgactgcccatctcc

SEQ ID NO: 32788 - DNA, 33 bp, Homo sapien
ctctgtacccattaaatgtgactgcccatctcc

SEQ ID NO: 32789 - DNA, 33 bp, Homo sapien
gaatattcaaagtaaacggaacattgcgtccaa

SEQ ID NO: 32790 - DNA, 33 bp, Homo sapien
gaatattcaaagtaaatggaacattgcgtccaa

SEQ ID NO: 32791 - DNA, 33 bp, Homo sapien
attgtattatgctcagaaaatatacttgatatg

SEQ ID NO: 32792 - DNA, 33 bp, Homo sapien
attgtattatgctcagtaaatatacttgatatg

SEQ ID NO: 32793 - DNA, 33 bp, Homo sapien
tgcaagctggtgtttcaaaaaaaagacaacaat

SEQ ID NO: 32794 - DNA, 33 bp, Homo sapien
tgcaagctggtgtttccaaaaaaagacaacaat

SEQ ID NO: 32795 - DNA, 33 bp, Homo sapien
ttaacttccaggtcaactggatcattgttgtgc

SEQ ID NO: 32796 - DNA, 33 bp, Homo sapien
ttaacttccaggtcaattggatcattgttgtgc

SEQ ID NO: 32797 - DNA, 33 bp, Homo sapien
tatgtacctacaggagaactagagagagatttg

SEQ ID NO: 32798 - DNA, 33 bp, Homo sapien
tatgtacctacaggaggactagagagagatttg

SEQ ID NO: 32799 - DNA, 33 bp, Homo sapien
ttaatagggagatcaacccctctgcagttaaga

SEQ ID NO: 32800 - DNA, 33 bp, Homo sapien
ttaatagggagatcaatccctctgcagttaaga

SEQ ID NO: 32801 - DNA, 33 bp, Homo sapien
ctcatttgctatttcaaatctcctaaggacttg

SEQ ID NO: 32802 - DNA, 33 bp, Homo sapien
ctcatttgctatttcagatctcctaaggacttg

SEQ ID NO: 32803 - DNA, 33 bp, Homo sapien
ctgcaacccaagttacaataggaacaccgattg

SEQ ID NO: 32804 - DNA, 33 bp, Homo sapien
ctgcaacccaagttaccataggaacaccgattg

SEQ ID NO: 32805 - DNA, 33 bp, Homo sapien
agggtcgttgggaggacaaactataaagcattt

SEQ ID NO: 32806 - DNA, 33 bp, Homo sapien
agggtcgttgggaggataaactataaagcattt

SEQ ID NO: 32807 - DNA, 33 bp, Homo sapien
atacatacaactcaagcagttagcattcattca

SEQ ID NO: 32808 - DNA, 33 bp, Homo sapien
atacatacaactcaagtagttagcattcattca

SEQ ID NO: 32809 - DNA, 33 bp, Homo sapien
ccatcagagaaagcatcacaccacagttctgcc

SEQ ID NO: 32810 - DNA, 33 bp, Homo sapien
ccatcagagaaagcatgacaccacagttctgcc

SEQ ID NO: 32811 - DNA, 33 bp, Homo sapien
taaccttcaccatgccactataataactttaaa

SEQ ID NO: 32812 - DNA, 33 bp, Homo sapien
taaccttcaccatgccgctataataactttaaa

SEQ ID NO: 32813 - DNA, 33 bp, Homo sapien
actccaaagcctaggaaaccatctggcttttag

SEQ ID NO: 32814 - DNA, 33 bp, Homo sapien
actccaaagcctaggacaccatctggcttttag

SEQ ID NO: 32815 - DNA, 33 bp, Homo sapien
cacacgctccatgtaaatctgttggcctgatgc

SEQ ID NO: 32816 - DNA, 33 bp, Homo sapien
cacacgctccatgtaactctgttggcctgatgc

SEQ ID NO: 32817 - DNA, 33 bp, Homo sapien
gtttaccttctcataccaccaacccccaaacca

SEQ ID NO: 32818 - DNA, 33 bp, Homo sapien
gtttaccttctcatactaccaacccccaaacca

SEQ ID NO: 32819 - DNA, 33 bp, Homo sapien
tgactgagttgctataagtcacaattctaaatt

SEQ ID NO: 32820 - DNA, 33 bp, Homo sapien
tgactgagttgctatatgtcacaattctaaatt

SEQ ID NO: 32821 - DNA, 33 bp, Homo sapien
ctgttcagacagacaaccaatattagtattctt

SEQ ID NO: 32822 - DNA, 33 bp, Homo sapien
ctgttcagacagacaagcaatattagtattctt

SEQ ID NO: 32823 - DNA, 33 bp, Homo sapien
aattttttaaaccaataatgtatcactaaagtt

SEQ ID NO: 32824 - DNA, 33 bp, Homo sapien
aattttttaaaccaatgatgtatcactaaagtt

SEQ ID NO: 32825 - DNA, 33 bp, Homo sapien
gtggaagagaagagtgacaattcctcaaggatc

SEQ ID NO: 32826 - DNA, 33 bp, Homo sapien
gtggaagagaagagtggcaattcctcaaggatc

SEQ ID NO: 32827 - DNA, 33 bp, Homo sapien
ttctcaacaagattgaataggcttatatctctt

SEQ ID NO: 32828 - DNA, 33 bp, Homo sapien
ttctcaacaagattgagtaggcttatatctctt

SEQ ID NO: 32829 - DNA, 33 bp, Homo sapien
ctaccatccatttactaaatcattcaattccag

SEQ ID NO: 32830 - DNA, 33 bp, Homo sapien
ctaccatccatttactgaatcattcaattccag

SEQ ID NO: 32831 - DNA, 33 bp, Homo sapien
aagaaatgtgttctgccaatatccctggcttaa

SEQ ID NO: 32832 - DNA, 33 bp, Homo sapien
aagaaatgtgttctgctaatatccctggcttaa

SEQ ID NO: 32833 - DNA, 33 bp, Homo sapien
aggaaaatttctctaaataaacagctccagtgc

SEQ ID NO: 32834 - DNA, 33 bp, Homo sapien
aggaaaatttctctaactaaacagctccagtgc

SEQ ID NO: 32835 - DNA, 33 bp, Homo sapien
agggaaagctctatgacattggtctaggcagtg

SEQ ID NO: 32836 - DNA, 33 bp, Homo sapien
agggaaagctctatgagattggtctaggcagtg

SEQ ID NO: 32837 - DNA, 33 bp, Homo sapien
gtaacttagagacttacaggaagaagtatgtta

SEQ ID NO: 32838 - DNA, 33 bp, Homo sapien
gtaacttagagacttataggaagaagtatgtta

SEQ ID NO: 32839 - DNA, 33 bp, Homo sapien
atgcactagagttaagcccataaagttgcatct

SEQ ID NO: 32840 - DNA, 33 bp, Homo sapien
atgcactagagttaagtccataaagttgcatct

SEQ ID NO: 32841 - DNA, 33 bp, Homo sapien
acggacaatcatctaactgagtttcagacttaa

SEQ ID NO: 32842 - DNA, 33 bp, Homo sapien
acggacaatcatctaattgagtttcagacttaa

SEQ ID NO: 32843 - DNA, 33 bp, Homo sapien
tccaattgtttttgtaaggccttcaatctattg

SEQ ID NO: 32844 - DNA, 33 bp, Homo sapien
tccaattgtttttgtagggccttcaatctattg

SEQ ID NO: 32845 - DNA, 33 bp, Homo sapien
ggtaataaataggccaatcattcttattttttt

SEQ ID NO: 32846 - DNA, 33 bp, Homo sapien
ggtaataaataggccagtcattcttattttttt

SEQ ID NO: 32847 - DNA, 33 bp, Homo sapien
gacattgatgtgttagcagggtgatatatccta

SEQ ID NO: 32848 - DNA, 33 bp, Homo sapien
gacattgatgtgttaggagggtgatatatccta

SEQ ID NO: 32849 - DNA, 33 bp, Homo sapien
caggacaacaagagaactggtgaaaggctggca

SEQ ID NO: 32850 - DNA, 33 bp, Homo sapien
caggacaacaagagaattggtgaaaggctggca

SEQ ID NO: 32851 - DNA, 33 bp, Homo sapien
cttaaactagaggtaacataggagtgtggttga

SEQ ID NO: 32852 - DNA, 33 bp, Homo sapien
cttaaactagaggtaatataggagtgtggttga

SEQ ID NO: 32853 - DNA, 33 bp, Homo sapien
cacgtgaatccatagaaatacccagaaaacaac

SEQ ID NO: 32854 - DNA, 33 bp, Homo sapien
cacgtgaatccatagacatacccagaaaacaac

SEQ ID NO: 32855 - DNA, 33 bp, Homo sapien
ttagtattagatatcaagaaagcatttattttg

SEQ ID NO: 32856 - DNA, 33 bp, Homo sapien
ttagtattagatatcaggaaagcatttattttg

SEQ ID NO: 32857 - DNA, 33 bp, Homo sapien
tgcattttgagtataaactgtctttaaagctgt

SEQ ID NO: 32858 - DNA, 33 bp, Homo sapien
tgcattttgagtataatctgtctttaaagctgt

SEQ ID NO: 32859 - DNA, 33 bp, Homo sapien
tagatttaaaaatgcaaatgtcttcagtgtaga

SEQ ID NO: 32860 - DNA, 33 bp, Homo sapien
tagatttaaaaatgcatatgtcttcagtgtaga

SEQ ID NO: 32861 - DNA, 33 bp, Homo sapien
agaattattctctctcaacccaggttttttgag

SEQ ID NO: 32862 - DNA, 33 bp, Homo sapien
agaattattctctctcgacccaggttttttgag

SEQ ID NO: 32863 - DNA, 33 bp, Homo sapien
agaaagactaataaaaagaatgtactctgtacc

SEQ ID NO: 32864 - DNA, 33 bp, Homo sapien
agaaagactaataaaaggaatgtactctgtacc

SEQ ID NO: 32865 - DNA, 33 bp, Homo sapien
cgtacattagaattatcagccaggcacaatgac

SEQ ID NO: 32866 - DNA, 33 bp, Homo sapien
cgtacattagaattattagccaggcacaatgac

SEQ ID NO: 32867 - DNA, 33 bp, Homo sapien
attcctttagtttcaacaaatgcctacaatgca

SEQ ID NO: 32868 - DNA, 33 bp, Homo sapien
attcctttagtttcaagaaatgcctacaatgca

SEQ ID NO: 32869 - DNA, 33 bp, Homo sapien
tcagatgtttcagaaccgtgacacctgtttcca

SEQ ID NO: 32870 - DNA, 33 bp, Homo sapien
tcagatgtttcagaactgtgacacctgtttcca

SEQ ID NO: 32871 - DNA, 33 bp, Homo sapien
tgttcgatccttcaaaacagagaaactaagttt

SEQ ID NO: 32872 - DNA, 33 bp, Homo sapien
tgttcgatccttcaaagcagagaaactaagttt

SEQ ID NO: 32873 - DNA, 33 bp, Homo sapien
catatgtatgcacctacgttttcctaaaattta

SEQ ID NO: 32874 - DNA, 33 bp, Homo sapien
catatgtatgcacctatgttttcctaaaattta

SEQ ID NO: 32875 - DNA, 33 bp, Homo sapien
actttttttccttcccaatggctagaatgcaga

SEQ ID NO: 32876 - DNA, 33 bp, Homo sapien
actttttttccttcccgatggctagaatgcaga

SEQ ID NO: 32877 - DNA, 33 bp, Homo sapien
gtattctgctgagtaaggaatattaatagctaa

SEQ ID NO: 32878 - DNA, 33 bp, Homo sapien
gtattctgctgagtaatgaatattaatagctaa

SEQ ID NO: 32879 - DNA, 33 bp, Homo sapien
caagtcaccagtgatagcttaacacaccaagtt

SEQ ID NO: 32880 - DNA, 33 bp, Homo sapien
caagtcaccagtgatatcttaacacaccaagtt

SEQ ID NO: 32881 - DNA, 33 bp, Homo sapien
ccaagcttctactacacagcattaggtgtgtga

SEQ ID NO: 32882 - DNA, 33 bp, Homo sapien
ccaagcttctactacatagcattaggtgtgtga

SEQ ID NO: 32883 - DNA, 33 bp, Homo sapien
tggagcctacttcaaagaactcaactatttctt

SEQ ID NO: 32884 - DNA, 33 bp, Homo sapien
tggagcctacttcaaataactcaactatttctt

SEQ ID NO: 32885 - DNA, 33 bp, Homo sapien
agtaatgcgatatgagccacacttcaagttaat

SEQ ID NO: 32886 - DNA, 33 bp, Homo sapien
agtaatgcgatatgagtcacacttcaagttaat

SEQ ID NO: 32887 - DNA, 33 bp, Homo sapien
ctccttcccacattaacaccttggtcagaagaa

SEQ ID NO: 32888 - DNA, 33 bp, Homo sapien
ctccttcccacattaataccttggtcagaagaa

SEQ ID NO: 32889 - DNA, 33 bp, Homo sapien
atatgaaggtacatctaaaatatgtcaggctaa

SEQ ID NO: 32890 - DNA, 33 bp, Homo sapien
atatgaaggtacatctgaaatatgtcaggctaa

SEQ ID NO: 32891 - DNA, 33 bp, Homo sapien
ggccagatcatgcaggcacttgaagtttgtggt

SEQ ID NO: 32892 - DNA, 33 bp, Homo sapien
ggccagatcatgcagggacttgaagtttgtggt

SEQ ID NO: 32893 - DNA, 33 bp, Homo sapien
gtactataccttctaaacatcataagtccattt

SEQ ID NO: 32894 - DNA, 33 bp, Homo sapien
gtactataccttctaagcatcataagtccattt

SEQ ID NO: 32895 - DNA, 33 bp, Homo sapien
gttcagtctccttatgcagtcccagatgtctta

SEQ ID NO: 32896 - DNA, 33 bp, Homo sapien
gttcagtctccttatgtagtcccagatgtctta

SEQ ID NO: 32897 - DNA, 33 bp, Homo sapien
acagcccagtgttaaactctcaaaatggtgcca

SEQ ID NO: 32898 - DNA, 33 bp, Homo sapien
acagcccagtgttaaagtctcaaaatggtgcca

SEQ ID NO: 32899 - DNA, 33 bp, Homo sapien
tagggataatggattgaaagacataaggtaggg

SEQ ID NO: 32900 - DNA, 33 bp, Homo sapien
tagggataatggattgcaagacataaggtaggg

SEQ ID NO: 32901 - DNA, 33 bp, Homo sapien
ggccaatcagagaccgaagaagaggataatgga

SEQ ID NO: 32902 - DNA, 33 bp, Homo sapien
ggccaatcagagaccgtagaagaggataatgga

SEQ ID NO: 32903 - DNA, 33 bp, Homo sapien
ggatctgggtggctgcaaacagtactggtcaca

SEQ ID NO: 32904 - DNA, 33 bp, Homo sapien
ggatctgggtggctgccaacagtactggtcaca

SEQ ID NO: 32905 - DNA, 33 bp, Homo sapien
agtagcattagacaagcccagggctgcaaaaag

SEQ ID NO: 32906 - DNA, 33 bp, Homo sapien
agtagcattagacaagtccagggctgcaaaaag

SEQ ID NO: 32907 - DNA, 33 bp, Homo sapien
aaagcctaccacagtagcatgattaaatcatag

SEQ ID NO: 32908 - DNA, 33 bp, Homo sapien
aaagcctaccacagtatcatgattaaatcatag

SEQ ID NO: 32909 - DNA, 33 bp, Homo sapien
tggctatgtggagatacaatcttactgatgaat

SEQ ID NO: 32910 - DNA, 33 bp, Homo sapien
tggctatgtggagatataatcttactgatgaat

SEQ ID NO: 32911 - DNA, 33 bp, Homo sapien
ccatgatgttgaaaaacgaaagaagggaataaa

SEQ ID NO: 32912 - DNA, 33 bp, Homo sapien
ccatgatgttgaaaaaggaaagaagggaataaa

SEQ ID NO: 32913 - DNA, 33 bp, Homo sapien
gtgaagaactgagaagaagtcctgaaaattcaa

SEQ ID NO: 32914 - DNA, 33 bp, Homo sapien
gtgaagaactgagaaggagtcctgaaaattcaa

SEQ ID NO: 32915 - DNA, 33 bp, Homo sapien
aaaaaaatctaagttcaaaatatacatcttgca

SEQ ID NO: 32916 - DNA, 33 bp, Homo sapien
aaaaaaatctaagttcgaaatatacatcttgca

SEQ ID NO: 32917 - DNA, 33 bp, Homo sapien
cttaagagcctaagaaaacctaagtcttatgct

SEQ ID NO: 32918 - DNA, 33 bp, Homo sapien
cttaagagcctaagaagacctaagtcttatgct

SEQ ID NO: 32919 - DNA, 33 bp, Homo sapien
tcacacctgttaaatgaaaaaataagccctgtc

SEQ ID NO: 32920 - DNA, 33 bp, Homo sapien
tcacacctgttaaatggaaaaataagccctgtc

SEQ ID NO: 32921 - DNA, 33 bp, Homo sapien
taacataagtaatacactaaggtgagtcacaaa

SEQ ID NO: 32922 - DNA, 33 bp, Homo sapien
taacataagtaatacagtaaggtgagtcacaaa

SEQ ID NO: 32923 - DNA, 33 bp, Homo sapien
tttctttcctgctataaaattgtgttggctgct

SEQ ID NO: 32924 - DNA, 33 bp, Homo sapien
tttctttcctgctatataattgtgttggctgct

SEQ ID NO: 32925 - DNA, 33 bp, Homo sapien
acagagtcacatctcccaccttcatggccatag

SEQ ID NO: 32926 - DNA, 33 bp, Homo sapien
acagagtcacatctcctaccttcatggccatag

SEQ ID NO: 32927 - DNA, 33 bp, Homo sapien
acaaaacatctagccaactaaaatggagagatg

SEQ ID NO: 32928 - DNA, 33 bp, Homo sapien
acaaaacatctagccatctaaaatggagagatg

SEQ ID NO: 32929 - DNA, 33 bp, Homo sapien
tatttgtgcctgatacactgtagctatttaaca

SEQ ID NO: 32930 - DNA, 33 bp, Homo sapien
tatttgtgcctgatacgctgtagctatttaaca

SEQ ID NO: 32931 - DNA, 33 bp, Homo sapien
ctatagatttaaaaacagattgtgacccaaaaa

SEQ ID NO: 32932 - DNA, 33 bp, Homo sapien
ctatagatttaaaaacggattgtgacccaaaaa

SEQ ID NO: 32933 - DNA, 33 bp, Homo sapien
tccagctctggaccaactatctatatttgcaga

SEQ ID NO: 32934 - DNA, 33 bp, Homo sapien
tccagctctggaccaattatctatatttgcaga

SEQ ID NO: 32935 - DNA, 33 bp, Homo sapien
aaagagttaaacaaaactgaagttgatttattt

SEQ ID NO: 32936 - DNA, 33 bp, Homo sapien
aaagagttaaacaaaattgaagttgatttattt

SEQ ID NO: 32937 - DNA, 33 bp, Homo sapien
ggaatgcctttgggaaccaactagaatagtagt

SEQ ID NO: 32938 - DNA, 33 bp, Homo sapien
ggaatgcctttgggaatcaactagaatagtagt

SEQ ID NO: 32939 - DNA, 33 bp, Homo sapien
tagtactaagaaggaccgctctaggaaacaaga

SEQ ID NO: 32940 - DNA, 33 bp, Homo sapien
tagtactaagaaggactgctctaggaaacaaga

SEQ ID NO: 32941 - DNA, 33 bp, Homo sapien
taacaagatagttcacacagctctttagtatgt

SEQ ID NO: 32942 - DNA, 33 bp, Homo sapien
taacaagatagttcacgcagctctttagtatgt

SEQ ID NO: 32943 - DNA, 33 bp, Homo sapien
tctctcttaaagagctaaaagtctatgctgaat

SEQ ID NO: 32944 - DNA, 33 bp, Homo sapien
tctctcttaaagagcttaaagtctatgctgaat

SEQ ID NO: 32945 - DNA, 33 bp, Homo sapien
aatcaggaaaagactaacttatgctttaggatt

SEQ ID NO: 32946 - DNA, 33 bp, Homo sapien
aatcaggaaaagactagcttatgctttaggatt

SEQ ID NO: 32947 - DNA, 33 bp, Homo sapien
ccttaatgtgacacctgagacctttagacagtt

SEQ ID NO: 32948 - DNA, 33 bp, Homo sapien
ccttaatgtgacaccttagacctttagacagtt

SEQ ID NO: 32949 - DNA, 33 bp, Homo sapien
atgattcaattcctacccttgctaatgatttct

SEQ ID NO: 32950 - DNA, 33 bp, Homo sapien
atgattcaattcctactcttgctaatgatttct

SEQ ID NO: 32951 - DNA, 33 bp, Homo sapien
gggatcatgagttgccaccactcagaagtttat

SEQ ID NO: 32952 - DNA, 33 bp, Homo sapien
gggatcatgagttgccgccactcagaagtttat

SEQ ID NO: 32953 - DNA, 33 bp, Homo sapien
ttcctccacagtggaacgtgtaaaagctgaatc

SEQ ID NO: 32954 - DNA, 33 bp, Homo sapien
ttcctccacagtggaatgtgtaaaagctgaatc

SEQ ID NO: 32955 - DNA, 33 bp, Homo sapien
agaattgcatcggtcacagactccttggatttc

SEQ ID NO: 32956 - DNA, 33 bp, Homo sapien
agaattgcatcggtcatagactccttggatttc

SEQ ID NO: 32957 - DNA, 33 bp, Homo sapien; identical to SEQ ID NO: 32955

SEQ ID NO: 32958 - DNA, 33 bp, Homo sapien; identical to SEQ ID NO: 32956

SEQ ID NO: 32959 - DNA, 33 bp, Homo sapien
aatgcatcactactaaagccggtatctttgctt

SEQ ID NO: 32960 - DNA, 33 bp, Homo sapien
aatgcatcactactaaggccggtatctttgctt

SEQ ID NO: 32961 - DNA, 33 bp, Homo sapien
ttcaaatgattatgacaaaagtaacaatgatat

SEQ ID NO: 32962 - DNA, 33 bp, Homo sapien
ttcaaatgattatgacgaaagtaacaatgatat

SEQ ID NO: 32963 - DNA, 33 bp, Homo sapien
tggaacaagtaccatcaactcttgctattgcta

SEQ ID NO: 32964 - DNA, 33 bp, Homo sapien
tggaacaagtaccatcgactcttgctattgcta

SEQ ID NO: 32965 - DNA, 33 bp, Homo sapien
ttcttggccatacccacctgtagtggaacgttt

SEQ ID NO: 32966 - DNA, 33 bp, Homo sapien
ttcttggccatacccagctgtagtggaacgttt

SEQ ID NO: 32967 - DNA, 33 bp, Homo sapien
tgtcagcctaagaacacgggatctcttcactgt

SEQ ID NO: 32968 - DNA, 33 bp, Homo sapien
tgtcagcctaagaacatgggatctcttcactgt

SEQ ID NO: 32969 - DNA, 33 bp, Homo sapien
tcacttttcttcatgacagttgtggttatttga

SEQ ID NO: 32970 - DNA, 33 bp, Homo sapien
tcacttttcttcatgagagttgtggttatttga

SEQ ID NO: 32971 - DNA, 33 bp, Homo sapien
acctggccaggttgcaatagtacctagtcttgg

SEQ ID NO: 32972 - DNA, 33 bp, Homo sapien
acctggccaggttgcagtagtacctagtcttgg

SEQ ID NO: 32973 - DNA, 33 bp, Homo sapien
actttgtcttatgtgtcaaaagtcctaggaaag

SEQ ID NO: 32974 - DNA, 33 bp, Homo sapien
actttgtcttatgtgtgaaaagtcctaggaaag

SEQ ID NO: 32975 - DNA, 33 bp, Homo sapien
acactcatacttgaaaactttctgagtttcccc

SEQ ID NO: 32976 - DNA, 33 bp, Homo sapien
acactcatacttgaaatctttctgagtttcccc

SEQ ID NO: 32977 - DNA, 33 bp, Homo sapien
tgatagtcttttctaactcttaacactcatact

SEQ ID NO: 32978 - DNA, 33 bp, Homo sapien
tgatagtcttttctaattcttaacactcatact

SEQ ID NO: 32979 - DNA, 33 bp, Homo sapien
tgtagtcttgatctaacggataactgtacattg

SEQ ID NO: 32980 - DNA, 33 bp, Homo sapien
tgtagtcttgatctaatggataactgtacattg

SEQ ID NO: 32981 - DNA, 33 bp, Homo sapien
aaactggctttacaggacaggtgggtctaaggt

SEQ ID NO: 32982 - DNA, 33 bp, Homo sapien
aaactggctttacaggtcaggtgggtctaaggt

SEQ ID NO: 32983 - DNA, 33 bp, Homo sapien; identical to SEQ ID NO: 32981

SEQ ID NO: 32984 - DNA, 33 bp, Homo sapien; identical to SEQ ID NO: 32982

SEQ ID NO: 32985 - DNA, 33 bp, Homo sapien
ttatctggaggaaacactcagtatttgcaattt

SEQ ID NO: 32986 - DNA, 33 bp, Homo sapien
ttatctggaggaaacattcagtatttgcaattt

SEQ ID NO: 32987 - DNA, 33 bp, Homo sapien
taatgtcagactccaaaattcctgatagagagg

SEQ ID NO: 32988 - DNA, 33 bp, Homo sapien
taatgtcagactccaagattcctgatagagagg

SEQ ID NO: 32989 - DNA, 33 bp, Homo sapien
tcttccaagtcaggtaaaagtttctgtattaat

SEQ ID NO: 32990 - DNA, 33 bp, Homo sapien
tcttccaagtcaggtagaagtttctgtattaat

SEQ ID NO: 32991 - DNA, 33 bp, Homo sapien
gctagcagaaacagaaataccaccaaagactgc

SEQ ID NO: 32992 - DNA, 33 bp, Homo sapien
gctagcagaaacagaagtaccaccaaagactgc

SEQ ID NO: 32993 - DNA, 33 bp, Homo sapien
cagtgtagcccatgtacaaagctgatctggttg

SEQ ID NO: 32994 - DNA, 33 bp, Homo sapien
cagtgtagcccatgtagaaagctgatctggttg

SEQ ID NO: 32995 - DNA, 33 bp, Homo sapien
tctcatgatccaggtacgaagggaactataaag

SEQ ID NO: 32996 - DNA, 33 bp, Homo sapien
tctcatgatccaggtatgaagggaactataaag

SEQ ID NO: 32997 - DNA, 33 bp, Homo sapien
aaaaatgccagatctgcagtaaggaatattgtc

SEQ ID NO: 32998 - DNA, 33 bp, Homo sapien
aaaaatgccagatctggagtaaggaatattgtc

SEQ ID NO: 32999 - DNA, 33 bp, Homo sapien
ggttttctggttacccaaggcaaaattacaaga

SEQ ID NO: 33000 - DNA, 33 bp, Homo sapien
ggttttctggttacccgaggcaaaattacaaga

SEQ ID NO: 33001 - DNA, 33 bp, Homo sapien
gcacatcatagtaagacattttttacacagtag

SEQ ID NO: 33002 - DNA, 33 bp, Homo sapien
gcacatcatagtaagatattttttacacagtag

SEQ ID NO: 33003 - DNA, 33 bp, Homo sapien
cttttagtgctctgtacagaaaagagcttctca

SEQ ID NO: 33004 - DNA, 33 bp, Homo sapien
cttttagtgctctgtatagaaaagagcttctca

SEQ ID NO: 33005 - DNA, 33 bp, Homo sapien
tatgggtgtttactgaagcctactgtatctcaa

SEQ ID NO: 33006 - DNA, 33 bp, Homo sapien
tatgggtgtttactgaggcctactgtatctcaa

SEQ ID NO: 33007 - DNA, 33 bp, Homo sapien
cacaaattccaaggccaacaagtaattttgctt

SEQ ID NO: 33008 - DNA, 33 bp, Homo sapien
cacaaattccaaggccgacaagtaattttgctt

SEQ ID NO: 33009 - DNA, 33 bp, Homo sapien
aaagacatacaaactacactttaacatcagcct

SEQ ID NO: 33010 - DNA, 33 bp, Homo sapien
aaagacatacaaactatactttaacatcagcct

SEQ ID NO: 33011 - DNA, 33 bp, Homo sapien
ggcccagtgtgcctcactgagaacactaaaggg

SEQ ID NO: 33012 - DNA, 33 bp, Homo sapien
ggcccagtgtgcctcattgagaacactaaaggg

SEQ ID NO: 33013 - DNA, 33 bp, Homo sapien
ataatgaggactctaaatgccctgaaggaatgt

SEQ ID NO: 33014 - DNA, 33 bp, Homo sapien
ataatgaggactctaagtgccctgaaggaatgt

SEQ ID NO: 33015 - DNA, 33 bp, Homo sapien
tacaaaattaaattacccattgcaaccaatatg

SEQ ID NO: 33016 - DNA, 33 bp, Homo sapien
tacaaaattaaattactcattgcaaccaatatg

SEQ ID NO: 33017 - DNA, 33 bp, Homo sapien
tattaattttgtgagacatattaggcctcaaga

SEQ ID NO: 33018 - DNA, 33 bp, Homo sapien
tattaattttgtgagatatattaggcctcaaga

SEQ ID NO: 33019 - DNA, 33 bp, Homo sapien
gcaagtttttcaataacattgtttgcttctgta

SEQ ID NO: 33020 - DNA, 33 bp, Homo sapien
gcaagtttttcaataatattgtttgcttctgta

SEQ ID NO: 33021 - DNA, 33 bp, Homo sapien
ttaaagtgttaggtgcaatcagtccattcttct

SEQ ID NO: 33022 - DNA, 33 bp, Homo sapien
ttaaagtgttaggtgcgatcagtccattcttct

SEQ ID NO: 33023 - DNA, 33 bp, Homo sapien
tataaggtttttatgaacaacaggtgaattact

SEQ ID NO: 33024 - DNA, 33 bp, Homo sapien
tataaggtttttatgagcaacaggtgaattact

SEQ ID NO: 33025 - DNA, 33 bp, Homo sapien
ttcatctacagtagcaataaacagttcctgaat

SEQ ID NO: 33026 - DNA, 33 bp, Homo sapien
ttcatctacagtagcagtaaacagttcctgaat

SEQ ID NO: 33027 - DNA, 33 bp, Homo sapien
aacttctgaaaaactaatacctacaaactggca

SEQ ID NO: 33028 - DNA, 33 bp, Homo sapien
aacttctgaaaaactagtacctacaaactggca

SEQ ID NO: 33029 - DNA, 33 bp, Homo sapien
tcattggaaatcccgaataaaacactgaaatac

SEQ ID NO: 33030 - DNA, 33 bp, Homo sapien
tcattggaaatcccgagtaaaacactgaaatac

SEQ ID NO: 33031 - DNA, 33 bp, Homo sapien
tggctcaagcagtaaccagacaaagatcatcag

SEQ ID NO: 33032 - DNA, 33 bp, Homo sapien
tggctcaagcagtaactagacaaagatcatcag

SEQ ID NO: 33033 - DNA, 33 bp, Homo sapien
aggacctcagactgtacagacttagtctaggca

SEQ ID NO: 33034 - DNA, 33 bp, Homo sapien
aggacctcagactgtagagacttagtctaggca

SEQ ID NO: 33035 - DNA, 33 bp, Homo sapien
tatcacactaccctaagggctctacagattcaa

SEQ ID NO: 33036 - DNA, 33 bp, Homo sapien
tatcacactaccctaatggctctacagattcaa

SEQ ID NO: 33037 - DNA, 33 bp, Homo sapien
tagaataggcagaggacagagtagtgccaggaa

SEQ ID NO: 33038 - DNA, 33 bp, Homo sapien
tagaataggcagaggagagagtagtgccaggaa

SEQ ID NO: 33039 - DNA, 33 bp, Homo sapien
cagtaaataatgtcaacttctaacagacccagg

SEQ ID NO: 33040 - DNA, 33 bp, Homo sapien
cagtaaataatgtcaatttctaacagacccagg

SEQ ID NO: 33041 - DNA, 33 bp, Homo sapien; identical to SEQ ID NO: 33039

SEQ ID NO: 33042 - DNA, 33 bp, Homo sapien; identical to SEQ ID NO: 33040

SEQ ID NO: 33043 - DNA, 33 bp, Homo sapien
ttttatccctatgaataagatttctaactcagc

SEQ ID NO: 33044 - DNA, 33 bp, Homo sapien
ttttatccctatgaatgagatttctaactcagc

SEQ ID NO: 33045 - DNA, 33 bp, Homo sapien
gggaaaacatgacatcaccaaatgaactaaata

SEQ ID NO: 33046 - DNA, 33 bp, Homo sapien
gggaaaacatgacatcgccaaatgaactaaata

SEQ ID NO: 33047 - DNA, 33 bp, Homo sapien
aaccactactctattcaaagctgtcagacaggg

SEQ ID NO: 33048 - DNA, 33 bp, Homo sapien
aaccactactctattcgaagctgtcagacaggg

SEQ ID NO: 33049 - DNA, 33 bp, Homo sapien
tcttgttctatgcaaacaaattcctttaacagg

SEQ ID NO: 33050 - DNA, 33 bp, Homo sapien
tcttgttctatgcaaataaattcctttaacagg

SEQ ID NO: 33051 - DNA, 33 bp, Homo sapien
actatatggaataccaggacagtgattaaggca

SEQ ID NO: 33052 - DNA, 33 bp, Homo sapien
actatatggaataccatgacagtgattaaggca

SEQ ID NO: 33053 - DNA, 33 bp, Homo sapien
gtagagtcagaaaacactaagtgtcagcaaaaa

SEQ ID NO: 33054 - DNA, 33 bp, Homo sapien
gtagagtcagaaaacattaagtgtcagcaaaaa

SEQ ID NO: 33055 - DNA, 33 bp, Homo sapien
attgatttagcctgaacgagtctcttctgcaac

SEQ ID NO: 33056 - DNA, 33 bp, Homo sapien
attgatttagcctgaatgagtctcttctgcaac

SEQ ID NO: 33057 - DNA, 33 bp, Homo sapien
gatttccaagaggcaaaacacagtgagtgcttc

SEQ ID NO: 33058 - DNA, 33 bp, Homo sapien
gatttccaagaggcaacacacagtgagtgcttc

SEQ ID NO: 33059 - DNA, 33 bp, Homo sapien
agtccctggggataagactcaaccaatggaaac

SEQ ID NO: 33060 - DNA, 33 bp, Homo sapien
agtccctggggataagtctcaaccaatggaaac

SEQ ID NO: 33061 - DNA, 33 bp, Homo sapien
tttatcactctcccaaatctgtaatgatattaa

SEQ ID NO: 33062 - DNA, 33 bp, Homo sapien
tttatcactctcccaagtctgtaatgatattaa

SEQ ID NO: 33063 - DNA, 33 bp, Homo sapien
ccatcctttcttcaatataagttctcagcacat

SEQ ID NO: 33064 - DNA, 33 bp, Homo sapien
ccatcctttcttcaatgtaagttctcagcacat

SEQ ID NO: 33065 - DNA, 33 bp, Homo sapien
actttaaagtcgtctaccaaacagtgatatact

SEQ ID NO: 33066 - DNA, 33 bp, Homo sapien
actttaaagtcgtctatcaaacagtgatatact

SEQ ID NO: 33067 - DNA, 33 bp, Homo sapien
cttttgcctatggaagcaagaaaaagcacttag

SEQ ID NO: 33068 - DNA, 33 bp, Homo sapien
cttttgcctatggaaggaagaaaaagcacttag

SEQ ID NO: 33069 - DNA, 33 bp, Homo sapien
ctgagctgagactaaaccaaatctgaaaggcag

SEQ ID NO: 33070 - DNA, 33 bp, Homo sapien
ctgagctgagactaaatcaaatctgaaaggcag

SEQ ID NO: 33071 - DNA, 33 bp, Homo sapien
ttccttgcgactcttaacttgagcctccatctg

SEQ ID NO: 33072 - DNA, 33 bp, Homo sapien
ttccttgcgactcttatcttgagcctccatctg

SEQ ID NO: 33073 - DNA, 33 bp, Homo sapien
gttgtcaccctgtataagtagcctgcccaaatt

SEQ ID NO: 33074 - DNA, 33 bp, Homo sapien
gttgtcaccctgtataggtagcctgcccaaatt

SEQ ID NO: 33075 - DNA, 33 bp, Homo sapien
gtgctgtaactgaagacagttgaatgccccact

SEQ ID NO: 33076 - DNA, 33 bp, Homo sapien
gtgctgtaactgaagatagttgaatgccccact

SEQ ID NO: 33077 - DNA, 33 bp, Homo sapien
ctctttcttataactcaaaatcaagattggaga

SEQ ID NO: 33078 - DNA, 33 bp, Homo sapien
ctctttcttataactctaaatcaagattggaga

SEQ ID NO: 33079 - DNA, 33 bp, Homo sapien
ctgtggcatccttctacgacctgaaccaccatg

SEQ ID NO: 33080 - DNA, 33 bp, Homo sapien
ctgtggcatccttctaggacctgaaccaccatg

SEQ ID NO: 33081 - DNA, 33 bp, Homo sapien
ctgccttgctataggaatcaccttggagcctca

SEQ ID NO: 33082 - DNA, 33 bp, Homo sapien
ctgccttgctataggagtcaccttggagcctca

SEQ ID NO: 33083 - DNA, 33 bp, Homo sapien
caaatgcctcctttcacaatagagcatggtgct

SEQ ID NO: 33084 - DNA, 33 bp, Homo sapien
caaatgcctcctttcataatagagcatggtgct

SEQ ID NO: 33085 - DNA, 33 bp, Homo sapien
gtgtcagttacctaaaccaatgcaggccgtttg

SEQ ID NO: 33086 - DNA, 33 bp, Homo sapien
gtgtcagttacctaaagcaatgcaggccgtttg

SEQ ID NO: 33087 - DNA, 33 bp, Homo sapien
ctttccctctaaaaaacccttgtgcttccttgt

SEQ ID NO: 33088 - DNA, 33 bp, Homo sapien
ctttccctctaaaaaatccttgtgcttccttgt

SEQ ID NO: 33089 - DNA, 33 bp, Homo sapien
tctcaattgaatgaacagacctgattgggaacc

SEQ ID NO: 33090 - DNA, 33 bp, Homo sapien
tctcaattgaatgaacggacctgattgggaacc

SEQ ID NO: 33091 - DNA, 33 bp, Homo sapien
ctgattggtcaacccaactgagtgctaatgggt

SEQ ID NO: 33092 - DNA, 33 bp, Homo sapien
ctgattggtcaacccagctgagtgctaatgggt

SEQ ID NO: 33093 - DNA, 33 bp, Homo sapien
caacaagtttgagccaatctttcaagatgcatc

SEQ ID NO: 33094 - DNA, 33 bp, Homo sapien
caacaagtttgagccagtctttcaagatgcatc

SEQ ID NO: 33095 - DNA, 33 bp, Homo sapien
aaatttactccagacaggaaccagaatcaacat

SEQ ID NO: 33096 - DNA, 33 bp, Homo sapien
aaatttactccagacatgaaccagaatcaacat

SEQ ID NO: 33097 - DNA, 33 bp, Homo sapien
aataaaacacgttaggcaaattccgtgtgctga

SEQ ID NO: 33098 - DNA, 33 bp, Homo sapien
aataaaacacgttaggtaaattccgtgtgctga

SEQ ID NO: 33099 - DNA, 33 bp, Homo sapien
cccagattcagctccacagttttggatgagaag

SEQ ID NO: 33100 - DNA, 33 bp, Homo sapien
cccagattcagctccagagttttggatgagaag

SEQ ID NO: 33101 - DNA, 33 bp, Homo sapien
tttatatagaacaagaataggggtctaatttca

SEQ ID NO: 33102 - DNA, 33 bp, Homo sapien
tttatatagaacaagagtaggggtctaatttca

SEQ ID NO: 33103 - DNA, 33 bp, Homo sapien
atctctgctccgatgaaaatttttatatgttgt

SEQ ID NO: 33104 - DNA, 33 bp, Homo sapien
atctctgctccgatgagaatttttatatgttgt

SEQ ID NO: 33105 - DNA, 33 bp, Homo sapien
aatctttgtctgcataaattattcagattagtc

SEQ ID NO: 33106 - DNA, 33 bp, Homo sapien
aatctttgtctgcatagattattcagattagtc

SEQ ID NO: 33107 - DNA, 33 bp, Homo sapien
gtccaagaggcccagaagtctgaatatccactg

SEQ ID NO: 33108 - DNA, 33 bp, Homo sapien
gtccaagaggcccagatgtctgaatatccactg

SEQ ID NO: 33109 - DNA, 33 bp, Homo sapien
ggcagagactaagtaccgactaattgttgacct

SEQ ID NO: 33110 - DNA, 33 bp, Homo sapien
ggcagagactaagtactgactaattgttgacct

SEQ ID NO: 33111 - DNA, 33 bp, Homo sapien
agaagatgctcaattaggtgaaattagtaaata

SEQ ID NO: 33112 - DNA, 33 bp, Homo sapien
agaagatgctcaattatgtgaaattagtaaata

SEQ ID NO: 33113 - DNA, 33 bp, Homo sapien
taaatgtcagcaaaccaatgctaaacaagaaca

SEQ ID NO: 33114 - DNA, 33 bp, Homo sapien
taaatgtcagcaaaccgatgctaaacaagaaca

SEQ ID NO: 33115 - DNA, 33 bp, Homo sapien
ggttcccttggcaagaacctgggtatttcattt

SEQ ID NO: 33116 - DNA, 33 bp, Homo sapien
ggttcccttggcaagagcctgggtatttcattt

SEQ ID NO: 33117 - DNA, 33 bp, Homo sapien
gctggtaagcacataaagcagataaattcatga

SEQ ID NO: 33118 - DNA, 33 bp, Homo sapien
gctggtaagcacataaggcagataaattcatga

SEQ ID NO: 33119 - DNA, 33 bp, Homo sapien
ctggataaaagcccaaaggaacttgacaaaaaa

SEQ ID NO: 33120 - DNA, 33 bp, Homo sapien
ctggataaaagcccaacggaacttgacaaaaaa

SEQ ID NO: 33121 - DNA, 33 bp, Homo sapien
actcgtggagaggttacagaagcatctttatga

SEQ ID NO: 33122 - DNA, 33 bp, Homo sapien
actcgtggagaggttagagaagcatctttatga

SEQ ID NO: 33123 - DNA, 33 bp, Homo sapien
gaagcaatgtcttgagcagtcactagatggtgg

SEQ ID NO: 33124 - DNA, 33 bp, Homo sapien
gaagcaatgtcttgagtagtcactagatggtgg

SEQ ID NO: 33125 - DNA, 33 bp, Homo sapien
actgaagaaagaggctaacaagtccagtttctc

SEQ ID NO: 33126 - DNA, 33 bp, Homo sapien
actgaagaaagaggctgacaagtccagtttctc

SEQ ID NO: 33127 - DNA, 33 bp, Homo sapien
taaagagagagtaggcacatgctctattcacaa

SEQ ID NO: 33128 - DNA, 33 bp, Homo sapien
taaagagagagtaggcgcatgctctattcacaa

SEQ ID NO: 33129 - DNA, 33 bp, Homo sapien
acatacatttgtgaaaatccactaattgctgct

SEQ ID NO: 33130 - DNA, 33 bp, Homo sapien
acatacatttgtgaaactccactaattgctgct

SEQ ID NO: 33131 - DNA, 33 bp, Homo sapien
gatgcagaaaatgaagaaaaagcaagctatcag

SEQ ID NO: 33132 - DNA, 33 bp, Homo sapien
gatgcagaaaatgaagtaaaagcaagctatcag

SEQ ID NO: 33133 - DNA, 33 bp, Homo sapien
gaagattcaaaagcaactgtatatacagggaaa

SEQ ID NO: 33134 - DNA, 33 bp, Homo sapien
gaagattcaaaagcaattgtatatacagggaaa

SEQ ID NO: 33135 - DNA, 33 bp, Homo sapien
gactttttatttttgaactgtgcttttgtatta

SEQ ID NO: 33136 - DNA, 33 bp, Homo sapien
gactttttatttttgatctgtgcttttgtatta

SEQ ID NO: 33137 - DNA, 33 bp, Homo sapien
aataaccagttgtgaccatttcaaattgggact

SEQ ID NO: 33138 - DNA, 33 bp, Homo sapien
aataaccagttgtgactatttcaaattgggact

SEQ ID NO: 33139 - DNA, 33 bp, Homo sapien
gaatgaccctggagaacgagctcagtggtgaga

SEQ ID NO: 33140 - DNA, 33 bp, Homo sapien
gaatgaccctggagaatgagctcagtggtgaga

SEQ ID NO: 33141 - DNA, 33 bp, Homo sapien
catagcctgtttaacccaatcccggattttcat

SEQ ID NO: 33142 - DNA, 33 bp, Homo sapien
catagcctgtttaacctaatcccggattttcat

SEQ ID NO: 33143 - DNA, 33 bp, Homo sapien
ggaaggaacaaagctaaggaatgaagccatctg

SEQ ID NO: 33144 - DNA, 33 bp, Homo sapien
ggaaggaacaaagctacggaatgaagccatctg

SEQ ID NO: 33145 - DNA, 33 bp, Homo sapien
cacggtatgccatgtacgaagtctggcccagga

SEQ ID NO: 33146 - DNA, 33 bp, Homo sapien
cacggtatgccatgtatgaagtctggcccagga

SEQ ID NO: 33147 - DNA, 33 bp, Homo sapien
acctcctggccttgaaaatgtcttgctttcatg

SEQ ID NO: 33148 - DNA, 33 bp, Homo sapien
acctcctggccttgaacatgtcttgctttcatg

SEQ ID NO: 33149 - DNA, 33 bp, Homo sapien
atgtatcgtttcatccccaatgatttcagtact

SEQ ID NO: 33150 - DNA, 33 bp, Homo sapien
atgtatcgtttcatccgcaatgatttcagtact

SEQ ID NO: 33151 - DNA, 33 bp, Homo sapien
agccttgctttgatataaaagggcaaaattcac

SEQ ID NO: 33152 - DNA, 33 bp, Homo sapien
agccttgctttgatatgaaagggcaaaattcac

SEQ ID NO: 33153 - DNA, 33 bp, Homo sapien
tctgggcctgagttaaatcttgaaaatttttta

SEQ ID NO: 33154 - DNA, 33 bp, Homo sapien
tctgggcctgagttaagtcttgaaaatttttta

SEQ ID NO: 33155 - DNA, 33 bp, Homo sapien
tgttagagagaacaaacgattgatagagtctct

SEQ ID NO: 33156 - DNA, 33 bp, Homo sapien
tgttagagagaacaaatgattgatagagtctct

SEQ ID NO: 33157 - DNA, 33 bp, Homo sapien
ttgtcatctcacgtaacctaattttccttacat

SEQ ID NO: 33158 - DNA, 33 bp, Homo sapien
ttgtcatctcacgtaatctaattttccttacat

SEQ ID NO: 33159 - DNA, 33 bp, Homo sapien
aaaaatgagtttattacgaaagtctcagggata

SEQ ID NO: 33160 - DNA, 33 bp, Homo sapien
aaaaatgagtttattatgaaagtctcagggata

SEQ ID NO: 33161 - DNA, 33 bp, Homo sapien
aggcacttttctcagacagtttattgtctatct

SEQ ID NO: 33162 - DNA, 33 bp, Homo sapien
aggcacttttctcagatagtttattgtctatct

SEQ ID NO: 33163 - DNA, 33 bp, Homo sapien
gaatattagagtaaaacgcttatttgagtactt

SEQ ID NO: 33164 - DNA, 33 bp, Homo sapien
gaatattagagtaaaatgcttatttgagtactt

SEQ ID NO: 33165 - DNA, 33 bp, Homo sapien
gagaagttcgtcaggtaaatggtagcaaatctg

SEQ ID NO: 33166 - DNA, 33 bp, Homo sapien
gagaagttcgtcaggtgaatggtagcaaatctg

SEQ ID NO: 33167 - DNA, 33 bp, Homo sapien
acacagataaatatgtcaaggttaacaaatgct

SEQ ID NO: 33168 - DNA, 33 bp, Homo sapien
acacagataaatatgtgaaggttaacaaatgct

SEQ ID NO: 33169 - DNA, 33 bp, Homo sapien
tgtattctaggatccacgcagctcttttcaggt

SEQ ID NO: 33170 - DNA, 33 bp, Homo sapien
tgtattctaggatccatgcagctcttttcaggt

SEQ ID NO: 33171 - DNA, 33 bp, Homo sapien
ttttatccagtaattcaattttttcacctttga

SEQ ID NO: 33172 - DNA, 33 bp, Homo sapien
ttttatccagtaattccattttttcacctttga

SEQ ID NO: 33173 - DNA, 33 bp, Homo sapien
gctttagcttgttctcaccaaaatacatgtctc

SEQ ID NO: 33174 - DNA, 33 bp, Homo sapien
gctttagcttgttctcgccaaaatacatgtctc

SEQ ID NO: 33175 - DNA, 33 bp, Homo sapien
gaaactaccttctagaaacagagaatcttgata

SEQ ID NO: 33176 - DNA, 33 bp, Homo sapien
gaaactaccttctagacacagagaatcttgata

SEQ ID NO: 33177 - DNA, 33 bp, Homo sapien
aactcaggtttccacaagtaattccttatgtta

SEQ ID NO: 33178 - DNA, 33 bp, Homo sapien
aactcaggtttccacatgtaattccttatgtta

SEQ ID NO: 33179 - DNA, 33 bp, Homo sapien
aagtggatcaaaccacacttttcataatagatt

SEQ ID NO: 33180 - DNA, 33 bp, Homo sapien
aagtggatcaaaccacgcttttcataatagatt

SEQ ID NO: 33181 - DNA, 33 bp, Homo sapien
ggaaagcctaaagaaggagccacgtgaagaatt

SEQ ID NO: 33182 - DNA, 33 bp, Homo sapien
ggaaagcctaaagaagtagccacgtgaagaatt

SEQ ID NO: 33183 - DNA, 33 bp, Homo sapien
ttcttctcattgggaagatctctgaatccagaa

SEQ ID NO: 33184 - DNA, 33 bp, Homo sapien
ttcttctcattgggaatatctctgaatccagaa

SEQ ID NO: 33185 - DNA, 33 bp, Homo sapien
tctgtgtattctctaacaagctgcattcatttt

SEQ ID NO: 33186 - DNA, 33 bp, Homo sapien
tctgtgtattctctaataagctgcattcatttt

SEQ ID NO: 33187 - DNA, 33 bp, Homo sapien
gaaatggcaggatcacaagggctagtgctgaag

SEQ ID NO: 33188 - DNA, 33 bp, Homo sapien
gaaatggcaggatcacgagggctagtgctgaag

SEQ ID NO: 33189 - DNA, 33 bp, Homo sapien
gtgtcagccgcagaaacgtctctgtcaccttgt

SEQ ID NO: 33190 - DNA, 33 bp, Homo sapien
gtgtcagccgcagaaatgtctctgtcaccttgt

SEQ ID NO: 33191 - DNA, 33 bp, Homo sapien
aacagcctggacaaagacatagaggttagaaag

SEQ ID NO: 33192 - DNA, 33 bp, Homo sapien
aacagcctggacaaaggcatagaggttagaaag

SEQ ID NO: 33193 - DNA, 33 bp, Homo sapien
tagaaataagatgcaaaccatagaggtaattta

SEQ ID NO: 33194 - DNA, 33 bp, Homo sapien
tagaaataagatgcaagccatagaggtaattta

SEQ ID NO: 33195 - DNA, 33 bp, Homo sapien
ctatgagagctgacaggctgtaaagggccatgg

SEQ ID NO: 33196 - DNA, 33 bp, Homo sapien
ctatgagagctgacagtctgtaaagggccatgg

SEQ ID NO: 33197 - DNA, 33 bp, Homo sapien
ctctggtttaataaagccaagaaaggttgtctt

SEQ ID NO: 33198 - DNA, 33 bp, Homo sapien
ctctggtttaataaagtcaagaaaggttgtctt

SEQ ID NO: 33199 - DNA, 33 bp, Homo sapien
tccttatggcatgcccaagtcacactctggttt

SEQ ID NO: 33200 - DNA, 33 bp, Homo sapien
tccttatggcatgcccgagtcacactctggttt

SEQ ID NO: 33201 - DNA, 33 bp, Homo sapien
gccataaggaggctcaaagatggaaactaggca

SEQ ID NO: 33202 - DNA, 33 bp, Homo sapien
gccataaggaggctcatagatggaaactaggca

SEQ ID NO: 33203 - DNA, 33 bp, Homo sapien
tggcagtaaaacatagcaacagagggaaaggaa

SEQ ID NO: 33204 - DNA, 33 bp, Homo sapien
tggcagtaaaacataggaacagagggaaaggaa

SEQ ID NO: 33205 - DNA, 33 bp, Homo sapien
ggagagaaagagagtacagtgataaggacaaaa

SEQ ID NO: 33206 - DNA, 33 bp, Homo sapien
ggagagaaagagagtatagtgataaggacaaaa

SEQ ID NO: 33207 - DNA, 33 bp, Homo sapien
actgatttctcttaaacgactgatccagagctt

SEQ ID NO: 33208 - DNA, 33 bp, Homo sapien
actgatttctcttaaatgactgatccagagctt

SEQ ID NO: 33209 - DNA, 33 bp, Homo sapien
gaggtaaaataaaggaagcataactataatacc

SEQ ID NO: 33210 - DNA, 33 bp, Homo sapien
gaggtaaaataaaggaggcataactataatacc

SEQ ID NO: 33211 - DNA, 33 bp, Homo sapien
gaatgccttgatcacacaaaaagatcgtttaaa

SEQ ID NO: 33212 - DNA, 33 bp, Homo sapien
gaatgccttgatcacataaaaagatcgtttaaa

SEQ ID NO: 33213 - DNA, 33 bp, Homo sapien
aactttttaggcagtaaggaatataactatcta

SEQ ID NO: 33214 - DNA, 33 bp, Homo sapien
aactttttaggcagtacggaatataactatcta

SEQ ID NO: 33215 - DNA, 33 bp, Homo sapien
gttatgcttcttgatcactggattatttttttt

SEQ ID NO: 33216 - DNA, 33 bp, Homo sapien
gttatgcttcttgatcgctggattatttttttt

SEQ ID NO: 33217 - DNA, 33 bp, Homo sapien
gaaaatactcagccacaggcttccaaaatagga

SEQ ID NO: 33218 - DNA, 33 bp, Homo sapien
gaaaatactcagccacgggcttccaaaatagga

SEQ ID NO: 33219 - DNA, 33 bp, Homo sapien
tctcccaactctctaaataagatagaattgtcc

SEQ ID NO: 33220 - DNA, 33 bp, Homo sapien
tctcccaactctctaagtaagatagaattgtcc

SEQ ID NO: 33221 - DNA, 33 bp, Homo sapien
ttttggtgagttggtactaatattttcaatagg

SEQ ID NO: 33222 - DNA, 33 bp, Homo sapien
ttttggtgagttggtattaatattttcaatagg

SEQ ID NO: 33223 - DNA, 33 bp, Homo sapien
ttatcatgcttactaactgccagacattaaaca

SEQ ID NO: 33224 - DNA, 33 bp, Homo sapien
ttatcatgcttactaattgccagacattaaaca

SEQ ID NO: 33225 - DNA, 33 bp, Homo sapien
taggttacattttccacgtccaatctctacttt

SEQ ID NO: 33226 - DNA, 33 bp, Homo sapien
taggttacattttccatgtccaatctctacttt

SEQ ID NO: 33227 - DNA, 33 bp, Homo sapien
ttttcactgccaaaagaaaagcaatttgtttta

SEQ ID NO: 33228 - DNA, 33 bp, Homo sapien
ttttcactgccaaaaggaaagcaatttgtttta

SEQ ID NO: 33229 - DNA, 33 bp, Homo sapien
atggactaagaagaggaaagtagcaactacgtc

SEQ ID NO: 33230 - DNA, 33 bp, Homo sapien
atggactaagaagagggaagtagcaactacgtc

SEQ ID NO: 33231 - DNA, 33 bp, Homo sapien
accgtgagaaatgcctaaggaacattaaatgtc

SEQ ID NO: 33232 - DNA, 33 bp, Homo sapien
accgtgagaaatgcctgaggaacattaaatgtc

SEQ ID NO: 33233 - DNA, 33 bp, Homo sapien
tctgtaggatattacaatggatacatgttgtta

SEQ ID NO: 33234 - DNA, 33 bp, Homo sapien
tctgtaggatattacagtggatacatgttgtta

SEQ ID NO: 33235 - DNA, 33 bp, Homo sapien
caaagaacatataaacaaaggcagcttatctat

SEQ ID NO: 33236 - DNA, 33 bp, Homo sapien
caaagaacatataaacgaaggcagcttatctat

SEQ ID NO: 33237 - DNA, 33 bp, Homo sapien
aaaaatgagtaagagacggacaaatatctattt

SEQ ID NO: 33238 - DNA, 33 bp, Homo sapien
aaaaatgagtaagagagggacaaatatctattt

SEQ ID NO: 33239 - DNA, 33 bp, Homo sapien
actctgaacccattaacatggctggtttcttcc

SEQ ID NO: 33240 - DNA, 33 bp, Homo sapien
actctgaacccattaatatggctggtttcttcc

SEQ ID NO: 33241 - DNA, 33 bp, Homo sapien
ctgagattccgtcctgaacattccaggattttg

SEQ ID NO: 33242 - DNA, 33 bp, Homo sapien
ctgagattccgtcctgtacattccaggattttg

SEQ ID NO: 33243 - DNA, 33 bp, Homo sapien
aatccatcaaagagcaaatactggccatttccc

SEQ ID NO: 33244 - DNA, 33 bp, Homo sapien
aatccatcaaagagcagatactggccatttccc

SEQ ID NO: 33245 - DNA, 33 bp, Homo sapien
tggactttgcaactgacctacttttaaagctct

SEQ ID NO: 33246 - DNA, 33 bp, Homo sapien
tggactttgcaactgatctacttttaaagctct

SEQ ID NO: 33247 - DNA, 33 bp, Homo sapien
tggttgaggaggaataaaagtggaatggattgt

SEQ ID NO: 33248 - DNA, 33 bp, Homo sapien
tggttgaggaggaatagaagtggaatggattgt

SEQ ID NO: 33249 - DNA, 33 bp, Homo sapien
ttaccagttgattagacggctgtaaattcaggg

SEQ ID NO: 33250 - DNA, 33 bp, Homo sapien
ttaccagttgattagatggctgtaaattcaggg

SEQ ID NO: 33251 - DNA, 33 bp, Homo sapien
acagggcagctttgcaacactaggattacaaag

SEQ ID NO: 33252 - DNA, 33 bp, Homo sapien
acagggcagctttgcaccactaggattacaaag

SEQ ID NO: 33253 - DNA, 33 bp, Homo sapien
aacaggagtcagcaacggtgtagaatttccctg

SEQ ID NO: 33254 - DNA, 33 bp, Homo sapien
aacaggagtcagcaactgtgtagaatttccctg

SEQ ID NO: 33255 - DNA, 33 bp, Homo sapien
ttaacctgcatttgcccacaagcacaccagtgt

SEQ ID NO: 33256 - DNA, 33 bp, Homo sapien
ttaacctgcatttgcctacaagcacaccagtgt

SEQ ID NO: 33257 - DNA, 33 bp, Homo sapien
gttcatacttttgaaaactttgtctacgtgatt

SEQ ID NO: 33258 - DNA, 33 bp, Homo sapien
gttcatacttttgaaacctttgtctacgtgatt

SEQ ID NO: 33259 - DNA, 33 bp, Homo sapien
acagcgctatgcactgaacattccatgatgagc

SEQ ID NO: 33260 - DNA, 33 bp, Homo sapien
acagcgctatgcactggacattccatgatgagc

SEQ ID NO: 33261 - DNA, 33 bp, Homo sapien
ccagaaagcactttcaccccacagaagatggac

SEQ ID NO: 33262 - DNA, 33 bp, Homo sapien
ccagaaagcactttcatcccacagaagatggac

SEQ ID NO: 33263 - DNA, 33 bp, Homo sapien
gtatgacgccttgataccctgaatagcaccaga

SEQ ID NO: 33264 - DNA, 33 bp, Homo sapien
gtatgacgccttgatatcctgaatagcaccaga

SEQ ID NO: 33265 - DNA, 33 bp, Homo sapien
tcttgttctcccttagacattacaaaattaagt

SEQ ID NO: 33266 - DNA, 33 bp, Homo sapien
tcttgttctcccttaggcattacaaaattaagt

SEQ ID NO: 33267 - DNA, 33 bp, Homo sapien
gagactctctccaccacgaaggcttacacgtaa

SEQ ID NO: 33268 - DNA, 33 bp, Homo sapien
gagactctctccaccatgaaggcttacacgtaa

SEQ ID NO: 33269 - DNA, 33 bp, Homo sapien
catatgagaaaattgacccttagacagattcag

SEQ ID NO: 33270 - DNA, 33 bp, Homo sapien
catatgagaaaattgatccttagacagattcag

SEQ ID NO: 33271 - DNA, 33 bp, Homo sapien
atgttcattttgttaacgatcaggacctataat

SEQ ID NO: 33272 - DNA, 33 bp, Homo sapien
atgttcattttgttaaggatcaggacctataat

SEQ ID NO: 33273 - DNA, 33 bp, Homo sapien
agccccacaagtttcaaccgggcacatgggtca

SEQ ID NO: 33274 - DNA, 33 bp, Homo sapien
agccccacaagtttcagccgggcacatgggtca

SEQ ID NO: 33275 - DNA, 33 bp, Homo sapien
ctggtggcggaatgggaatagagctggaaggag

SEQ ID NO: 33276 - DNA, 33 bp, Homo sapien
ctggtggcggaatgggtatagagctggaaggag

SEQ ID NO: 33277 - DNA, 33 bp, Homo sapien
ttttattattcctccagactggacacaattaac

SEQ ID NO: 33278 - DNA, 33 bp, Homo sapien
ttttattattcctccatactggacacaattaac

SEQ ID NO: 33279 - DNA, 33 bp, Homo sapien
cctccaggactgtaaacagagaaagtatcttct

SEQ ID NO: 33280 - DNA, 33 bp, Homo sapien
cctccaggactgtaaatagagaaagtatcttct

SEQ ID NO: 33281 - DNA, 33 bp, Homo sapien
ttcctagaattaaggacgtgagataaacagcag

SEQ ID NO: 33282 - DNA, 33 bp, Homo sapien
ttcctagaattaaggatgtgagataaacagcag

SEQ ID NO: 33283 - DNA, 33 bp, Homo sapien
ggggatctgatggctacgaaagggaagaatagg

SEQ ID NO: 33284 - DNA, 33 bp, Homo sapien
ggggatctgatggctatgaaagggaagaatagg

SEQ ID NO: 33285 - DNA, 33 bp, Homo sapien
atgaccccctgtgctgaaagctaaagtaggagg

SEQ ID NO: 33286 - DNA, 33 bp, Homo sapien
atgaccccctgtgctgcaagctaaagtaggagg

SEQ ID NO: 33287 - DNA, 33 bp, Homo sapien
tcatctcctgccatgtaaactactaggtgttgt

SEQ ID NO: 33288 - DNA, 33 bp, Homo sapien
tcatctcctgccatgtcaactactaggtgttgt

SEQ ID NO: 33289 - DNA, 33 bp, Homo sapien
taatcaaggagagagacgatggtggatgggacc

SEQ ID NO: 33290 - DNA, 33 bp, Homo sapien
taatcaaggagagagatgatggtggatgggacc

SEQ ID NO: 33291 - DNA, 33 bp, Homo sapien
tggaagtgcatagttacaaagtagagccaacag

SEQ ID NO: 33292 - DNA, 33 bp, Homo sapien
tggaagtgcatagttagaaagtagagccaacag

SEQ ID NO: 33293 - DNA, 33 bp, Homo sapien
attttaccactctctccgaatacattttttatt

SEQ ID NO: 33294 - DNA, 33 bp, Homo sapien
attttaccactctctctgaatacattttttatt

SEQ ID NO: 33295 - DNA, 33 bp, Homo sapien
ctgatctaagagatgaaaggtcttttaaaactt

SEQ ID NO: 33296 - DNA, 33 bp, Homo sapien
ctgatctaagagatgagaggtcttttaaaactt

SEQ ID NO: 33297 - DNA, 33 bp, Homo sapien
ggtgaagccctcaatacgcgagcaatgcaggca

SEQ ID NO: 33298 - DNA, 33 bp, Homo sapien
ggtgaagccctcaatatgcgagcaatgcaggca

SEQ ID NO: 33299 - DNA, 33 bp, Homo sapien
gtttcctgattttgagaaagcaagaaggaaagc

SEQ ID NO: 33300 - DNA, 33 bp, Homo sapien
gtttcctgattttgagcaagcaagaaggaaagc

SEQ ID NO: 33301 - DNA, 33 bp, Homo sapien
ctcaaaatcaggaaaccatcttacaggcatatt

SEQ ID NO: 33302 - DNA, 33 bp, Homo sapien
ctcaaaatcaggaaactatcttacaggcatatt

SEQ ID NO: 33303 - DNA, 33 bp, Homo sapien
ttcaggttttgcagagaccaggaagtgaatgtg

SEQ ID NO: 33304 - DNA, 33 bp, Homo sapien
ttcaggttttgcagaggccaggaagtgaatgtg

SEQ ID NO: 33305 - DNA, 33 bp, Homo sapien
ggattaatatccaccacgcttgtaactgttttc

SEQ ID NO: 33306 - DNA, 33 bp, Homo sapien
ggattaatatccaccatgcttgtaactgttttc

SEQ ID NO: 33307 - DNA, 33 bp, Homo sapien
ccgtttgataatgaacaacctagtaggtcatta

SEQ ID NO: 33308 - DNA, 33 bp, Homo sapien
ccgtttgataatgaacgacctagtaggtcatta

SEQ ID NO: 33309 - DNA, 33 bp, Homo sapien
aattatactccttaaacgccaccttttggctac

SEQ ID NO: 33310 - DNA, 33 bp, Homo sapien
aattatactccttaaatgccaccttttggctac

SEQ ID NO: 33311 - DNA, 33 bp, Homo sapien
tagggtcctaagagacaaacgttcagtgctctg

SEQ ID NO: 33312 - DNA, 33 bp, Homo sapien
tagggtcctaagagacgaacgttcagtgctctg

SEQ ID NO: 33313 - DNA, 33 bp, Homo sapien
gaaacacgctctaacccagctggtttgctttct

SEQ ID NO: 33314 - DNA, 33 bp, Homo sapien
gaaacacgctctaacctagctggtttgctttct

SEQ ID NO: 33315 - DNA, 33 bp, Homo sapien
tctggttataaaagaaaacaatctcacagtaag

SEQ ID NO: 33316 - DNA, 33 bp, Homo sapien
tctggttataaaagaagacaatctcacagtaag

SEQ ID NO: 33317 - DNA, 33 bp, Homo sapien
agagtacacttgataacgtatggcaggaaagcc

SEQ ID NO: 33318 - DNA, 33 bp, Homo sapien
agagtacacttgataatgtatggcaggaaagcc

SEQ ID NO: 33319 - DNA, 33 bp, Homo sapien
gtgctgagtggaaagacctctaaacaggcagcc

SEQ ID NO: 33320 - DNA, 33 bp, Homo sapien
gtgctgagtggaaagagctctaaacaggcagcc

SEQ ID NO: 33321 - DNA, 33 bp, Homo sapien
aaaaggtgatataaaacggcagagaggaaggag

SEQ ID NO: 33322 - DNA, 33 bp, Homo sapien
aaaaggtgatataaaatggcagagaggaaggag

SEQ ID NO: 33323 - DNA, 33 bp, Homo sapien
taaaagtttatctgcactaggaggtcttagtac

SEQ ID NO: 33324 - DNA, 33 bp, Homo sapien
taaaagtttatctgcattaggaggtcttagtac

SEQ ID NO: 33325 - DNA, 33 bp, Homo sapien
gacataaaatgtataaactgttccaggtaagca

SEQ ID NO: 33326 - DNA, 33 bp, Homo sapien
gacataaaatgtataatctgttccaggtaagca

SEQ ID NO: 33327 - DNA, 33 bp, Homo sapien
ccaagtgctaatggaactgaaagcagggccagg

SEQ ID NO: 33328 - DNA, 33 bp, Homo sapien
ccaagtgctaatggaattgaaagcagggccagg

SEQ ID NO: 33329 - DNA, 33 bp, Homo sapien
tgtttggacttttcaaaaaatgatcaccacttc

SEQ ID NO: 33330 - DNA, 33 bp, Homo sapien
tgtttggacttttcaagaaatgatcaccacttc

SEQ ID NO: 33331 - DNA, 33 bp, Homo sapien
gacaagacacaactcaactgtggatatcagagt

SEQ ID NO: 33332 - DNA, 33 bp, Homo sapien
gacaagacacaactcagctgtggatatcagagt

SEQ ID NO: 33333 - DNA, 33 bp, Homo sapien
tgcagattgggaatccaagtgtcagggaggtta

SEQ ID NO: 33334 - DNA, 33 bp, Homo sapien
tgcagattgggaatccgagtgtcagggaggtta

SEQ ID NO: 33335 - DNA, 33 bp, Homo sapien
gactcaaagaaaggaaaagtgtatgcagtgtta

SEQ ID NO: 33336 - DNA, 33 bp, Homo sapien
gactcaaagaaaggaacagtgtatgcagtgtta

SEQ ID NO: 33337 - DNA, 33 bp, Homo sapien
gccctgggtgattccaatgaagagccactatca

SEQ ID NO: 33338 - DNA, 33 bp, Homo sapien
gccctgggtgattccagtgaagagccactatca

SEQ ID NO: 33339 - DNA, 33 bp, Homo sapien
gaggtgctgttccagacgcagatggccataccg

SEQ ID NO: 33340 - DNA, 33 bp, Homo sapien
gaggtgctgttccagaggcagatggccataccg

SEQ ID NO: 33341 - DNA, 33 bp, Homo sapien
tttaaggtgatgattcaatagcaaacagtgaag

SEQ ID NO: 33342 - DNA, 33 bp, Homo sapien
tttaaggtgatgattctatagcaaacagtgaag

SEQ ID NO: 33343 - DNA, 33 bp, Homo sapien
aagctaaccgtagagcaagaactaataaggaat

SEQ ID NO: 33344 - DNA, 33 bp, Homo sapien
aagctaaccgtagagctagaactaataaggaat

SEQ ID NO: 33345 - DNA, 33 bp, Homo sapien
aaagaaaaatctgccagctgtctatttcccaat

SEQ ID NO: 33346 - DNA, 33 bp, Homo sapien
aaagaaaaatctgccatctgtctatttcccaat

SEQ ID NO: 33347 - DNA, 33 bp, Homo sapien
tggaatatacacaggacgactgaacataaggtt

SEQ ID NO: 33348 - DNA, 33 bp, Homo sapien
tggaatatacacaggatgactgaacataaggtt

SEQ ID NO: 33349 - DNA, 33 bp, Homo sapien
tgagccaagagaaacaagaagagcaggtttaca

SEQ ID NO: 33350 - DNA, 33 bp, Homo sapien
tgagccaagagaaacaggaagagcaggtttaca

SEQ ID NO: 33351 - DNA, 33 bp, Homo sapien
gctatgttaaattgcaacttcctcagagaggac

SEQ ID NO: 33352 - DNA, 33 bp, Homo sapien
gctatgttaaattgcagcttcctcagagaggac

SEQ ID NO: 33353 - DNA, 33 bp, Homo sapien
tatcaaagatggaatacgattttttaactagag

SEQ ID NO: 33354 - DNA, 33 bp, Homo sapien
tatcaaagatggaatatgattttttaactagag

SEQ ID NO: 33355 - DNA, 33 bp, Homo sapien
cacaataaacatcagcaaacacgattattgtca

SEQ ID NO: 33356 - DNA, 33 bp, Homo sapien
cacaataaacatcagcgaacacgattattgtca

SEQ ID NO: 33357 - DNA, 33 bp, Homo sapien
tcctaatatcccccaacctcagagcattctttg

SEQ ID NO: 33358 - DNA, 33 bp, Homo sapien
tcctaatatcccccaatctcagagcattctttg

SEQ ID NO: 33359 - DNA, 33 bp, Homo sapien
aggcctgtaatatgaactcacatgaaaacaact

SEQ ID NO: 33360 - DNA, 33 bp, Homo sapien
aggcctgtaatatgaagtcacatgaaaacaact

SEQ ID NO: 33361 - DNA, 33 bp, Homo sapien
taagagtacttcaatgcagagacagggaaggca

SEQ ID NO: 33362 - DNA, 33 bp, Homo sapien
taagagtacttcaatggagagacagggaaggca

SEQ ID NO: 33363 - DNA, 33 bp, Homo sapien
ataaatatttgatagaataaggtctgtgtgaaa

SEQ ID NO: 33364 - DNA, 33 bp, Homo sapien
ataaatatttgatagactaaggtctgtgtgaaa

SEQ ID NO: 33365 - DNA, 33 bp, Homo sapien
gaagaattcagccttagagagtgttggtgtggt

SEQ ID NO: 33366 - DNA, 33 bp, Homo sapien
gaagaattcagccttatagagtgttggtgtggt

SEQ ID NO: 33367 - DNA, 33 bp, Homo sapien
attctttagctagggcaaccattgctaacttgt

SEQ ID NO: 33368 - DNA, 33 bp, Homo sapien
attctttagctagggctaccattgctaacttgt

SEQ ID NO: 33369 - DNA, 33 bp, Homo sapien
ggcagctttttaatggaacatttcctgatagat

SEQ ID NO: 33370 - DNA, 33 bp, Homo sapien
ggcagctttttaatggtacatttcctgatagat

SEQ ID NO: 33371 - DNA, 33 bp, Homo sapien
ctttgaggtggagtgggcagagcaactgatgca

SEQ ID NO: 33372 - DNA, 33 bp, Homo sapien
ctttgaggtggagtggtcagagcaactgatgca

SEQ ID NO: 33373 - DNA, 33 bp, Homo sapien
gctactatcttgaaaggcctccatcctagaagg

SEQ ID NO: 33374 - DNA, 33 bp, Homo sapien
gctactatcttgaaagtcctccatcctagaagg

SEQ ID NO: 33375 - DNA, 33 bp, Homo sapien
ctgcaaagcaagtcagcagtactgtagtatttc

SEQ ID NO: 33376 - DNA, 33 bp, Homo sapien
ctgcaaagcaagtcaggagtactgtagtatttc

SEQ ID NO: 33377 - DNA, 33 bp, Homo sapien
tcagcaactatgcaccaaagtcaggaactatgc

SEQ ID NO: 33378 - DNA, 33 bp, Homo sapien
tcagcaactatgcaccgaagtcaggaactatgc

SEQ ID NO: 33379 - DNA, 33 bp, Homo sapien
cctggcagaaatcatacagtatgggctagaatg

SEQ ID NO: 33380 - DNA, 33 bp, Homo sapien
cctggcagaaatcatagagtatgggctagaatg

SEQ ID NO: 33381 - DNA, 33 bp, Homo sapien
tcaataaataaggaaacttgtccagctgaaaaa

SEQ ID NO: 33382 - DNA, 33 bp, Homo sapien
tcaataaataaggaaagttgtccagctgaaaaa

SEQ ID NO: 33383 - DNA, 33 bp, Homo sapien
ttaatagagtttaaagccttatcaagagcctgg

SEQ ID NO: 33384 - DNA, 33 bp, Homo sapien
ttaatagagtttaaaggcttatcaagagcctgg

SEQ ID NO: 33385 - DNA, 33 bp, Homo sapien
ccttgttataatgcctaacaacgtatcaggcat

SEQ ID NO: 33386 - DNA, 33 bp, Homo sapien
ccttgttataatgcctgacaacgtatcaggcat

SEQ ID NO: 33387 - DNA, 33 bp, Homo sapien
agcattgagtttccaagtccagggagcgataat

SEQ ID NO: 33388 - DNA, 33 bp, Homo sapien
agcattgagtttccaattccagggagcgataat

SEQ ID NO: 33389 - DNA, 33 bp, Homo sapien
cacatccagtcaattacgaaaagccaaaaaggt

SEQ ID NO: 33390 - DNA, 33 bp, Homo sapien
cacatccagtcaattatgaaaagccaaaaaggt

SEQ ID NO: 33391 - DNA, 33 bp, Homo sapien
taaaagtgaggaaatacgtgactgaaaagttgg

SEQ ID NO: 33392 - DNA, 33 bp, Homo sapien
taaaagtgaggaaatatgtgactgaaaagttgg

SEQ ID NO: 33393 - DNA, 33 bp, Homo sapien
gggatgaggaatccatgaagacctgtagctgta

SEQ ID NO: 33394 - DNA, 33 bp, Homo sapien
gggatgaggaatccattaagacctgtagctgta

SEQ ID NO: 33395 - DNA, 33 bp, Homo sapien
cattcttcatactttccaccctgttcccctgtt

SEQ ID NO: 33396 - DNA, 33 bp, Homo sapien
cattcttcatactttctaccctgttcccctgtt

SEQ ID NO: 33397 - DNA, 33 bp, Homo sapien
agttaataccaatagagagtttagagcaacacc

SEQ ID NO: 33398 - DNA, 33 bp, Homo sapien
agttaataccaatagatagtttagagcaacacc

SEQ ID NO: 33399 - DNA, 33 bp, Homo sapien
cttttaggttgcgaaaaaatgagataagcttgt

SEQ ID NO: 33400 - DNA, 33 bp, Homo sapien
cttttaggttgcgaaagaatgagataagcttgt

SEQ ID NO: 33401 - DNA, 33 bp, Homo sapien
tcaaacctacagtcaactctctagtatgagaat

SEQ ID NO: 33402 - DNA, 33 bp, Homo sapien
tcaaacctacagtcaattctctagtatgagaat

SEQ ID NO: 33403 - DNA, 33 bp, Homo sapien
tgaaaactgagccactcaaccatgtaataggca

SEQ ID NO: 33404 - DNA, 33 bp, Homo sapien
tgaaaactgagccacttaaccatgtaataggca

SEQ ID NO: 33405 - DNA, 33 bp, Homo sapien
tgggagattggcagtgaagagaaagggaattag

SEQ ID NO: 33406 - DNA, 33 bp, Homo sapien
tgggagattggcagtgcagagaaagggaattag

SEQ ID NO: 33407 - DNA, 33 bp, Homo sapien
gtaatgtattaattcaacaaacagagtgaacac

SEQ ID NO: 33408 - DNA, 33 bp, Homo sapien
gtaatgtattaattcagcaaacagagtgaacac

SEQ ID NO: 33409 - DNA, 33 bp, Homo sapien
tatatgctatcatatacaaggttttatgctact

SEQ ID NO: 33410 - DNA, 33 bp, Homo sapien
tatatgctatcatatagaaggttttatgctact

SEQ ID NO: 33411 - DNA, 33 bp, Homo sapien
tcaacagtagttgttacggcagacccaccgatg

SEQ ID NO: 33412 - DNA, 33 bp, Homo sapien
tcaacagtagttgttatggcagacccaccgatg

SEQ ID NO: 33413 - DNA, 33 bp, Homo sapien
ctttttgtgtgctagcccttcctctccaaaata

SEQ ID NO: 33414 - DNA, 33 bp, Homo sapien
ctttttgtgtgctagcgcttcctctccaaaata

SEQ ID NO: 33415 - DNA, 33 bp, Homo sapien
taaaccccacttctacacagagctcatgctccc

SEQ ID NO: 33416 - DNA, 33 bp, Homo sapien
taaaccccacttctacccagagctcatgctccc

SEQ ID NO: 33417 - DNA, 33 bp, Homo sapien
tcctgtaggtacagccacatcatgggaagagct

SEQ ID NO: 33418 - DNA, 33 bp, Homo sapien
tcctgtaggtacagccgcatcatgggaagagct

SEQ ID NO: 33419 - DNA, 33 bp, Homo sapien
cctttagacacaaagaccttgaaaccatgactt

SEQ ID NO: 33420 - DNA, 33 bp, Homo sapien
cctttagacacaaagatcttgaaaccatgactt

SEQ ID NO: 33421 - DNA, 33 bp, Homo sapien
attctctccactgatcagagtttcctgaagaag

SEQ ID NO: 33422 - DNA, 33 bp, Homo sapien
attctctccactgatcggagtttcctgaagaag

SEQ ID NO: 33423 - DNA, 33 bp, Homo sapien
ctaataatcaccctccaaatgcaggtcatccat

SEQ ID NO: 33424 - DNA, 33 bp, Homo sapien
ctaataatcaccctccgaatgcaggtcatccat

SEQ ID NO: 33425 - DNA, 33 bp, Homo sapien
gcttagaaggggatgacagagaagttaaggaaa

SEQ ID NO: 33426 - DNA, 33 bp, Homo sapien
gcttagaaggggatgatagagaagttaaggaaa

SEQ ID NO: 33427 - DNA, 33 bp, Homo sapien
cactaatggggggttacgcgcacaaatcctcca

SEQ ID NO: 33428 - DNA, 33 bp, Homo sapien
cactaatggggggttaggcgcacaaatcctcca

SEQ ID NO: 33429 - DNA, 33 bp, Homo sapien
tataagatgagcttcacgaattatttggtcttt

SEQ ID NO: 33430 - DNA, 33 bp, Homo sapien
tataagatgagcttcatgaattatttggtcttt

SEQ ID NO: 33431 - DNA, 33 bp, Homo sapien
cattaaggatataaacccttcagatggagttga

SEQ ID NO: 33432 - DNA, 33 bp, Homo sapien
cattaaggatataaactcttcagatggagttga

SEQ ID NO: 33433 - DNA, 33 bp, Homo sapien
ttgtgttctcattcacaagaattactgtggtgt

SEQ ID NO: 33434 - DNA, 33 bp, Homo sapien
ttgtgttctcattcaccagaattactgtggtgt

SEQ ID NO: 33435 - DNA, 33 bp, Homo sapien
ttaggccaacactctccattatctgttgttgcc

SEQ ID NO: 33436 - DNA, 33 bp, Homo sapien
ttaggccaacactctctattatctgttgttgcc

SEQ ID NO: 33437 - DNA, 33 bp, Homo sapien
gcttagattacatcacaaacttttttctcatga

SEQ ID NO: 33438 - DNA, 33 bp, Homo sapien
gcttagattacatcacgaacttttttctcatga

SEQ ID NO: 33439 - DNA, 33 bp, Homo sapien
cagcaaatcttttcccagatagtgtaaatgcaa

SEQ ID NO: 33440 - DNA, 33 bp, Homo sapien
cagcaaatcttttcccggatagtgtaaatgcaa

SEQ ID NO: 33441 - DNA, 33 bp, Homo sapien
ttctttaccgcagttaccgcttttcccttctag

SEQ ID NO: 33442 - DNA, 33 bp, Homo sapien
ttctttaccgcagttatcgcttttcccttctag

SEQ ID NO: 33443 - DNA, 33 bp, Homo sapien
gtgaactacagtgcccaatatttacttgcaacg

SEQ ID NO: 33444 - DNA, 33 bp, Homo sapien
gtgaactacagtgcccgatatttacttgcaacg

SEQ ID NO: 33445 - DNA, 33 bp, Homo sapien
gcacgattcatcacaacggctgtactttatttc

SEQ ID NO: 33446 - DNA, 33 bp, Homo sapien
gcacgattcatcacaatggctgtactttatttc

SEQ ID NO: 33447 - DNA, 33 bp, Homo sapien
gaatgtctgctcttacaaagaaaccttcactca

SEQ ID NO: 33448 - DNA, 33 bp, Homo sapien
gaatgtctgctcttacgaagaaaccttcactca

SEQ ID NO: 33449 - DNA, 33 bp, Homo sapien
tgaggtgacaaaacccgcattgcagactggttt

SEQ ID NO: 33450 - DNA, 33 bp, Homo sapien
tgaggtgacaaaaccctcattgcagactggttt

SEQ ID NO: 33451 - DNA, 33 bp, Homo sapien
aaatcaagcatgaaaaagaatccaaggcattct

SEQ ID NO: 33452 - DNA, 33 bp, Homo sapien
aaatcaagcatgaaaaggaatccaaggcattct

SEQ ID NO: 33453 - DNA, 33 bp, Homo sapien
tacccacactgtctgaccatcaggatccaaata

SEQ ID NO: 33454 - DNA, 33 bp, Homo sapien
tacccacactgtctgatcatcaggatccaaata

SEQ ID NO: 33455 - DNA, 33 bp, Homo sapien
tctgctgggagatggaataaggtgagtctaggg

SEQ ID NO: 33456 - DNA, 33 bp, Homo sapien
tctgctgggagatggagtaaggtgagtctaggg

SEQ ID NO: 33457 - DNA, 33 bp, Homo sapien
tagttgaaggaataaacgtgtaatggatatgca

SEQ ID NO: 33458 - DNA, 33 bp, Homo sapien
tagttgaaggaataaatgtgtaatggatatgca

SEQ ID NO: 33459 - DNA, 33 bp, Homo sapien
agagctggagctaaaacgaagacctcataacta

SEQ ID NO: 33460 - DNA, 33 bp, Homo sapien
agagctggagctaaaatgaagacctcataacta

SEQ ID NO: 33461 - DNA, 33 bp, Homo sapien
ggctcctttcctcgctcagagcgctgccactgc

SEQ ID NO: 33462 - DNA, 33 bp, Homo sapien
ggctcctttcctcgcttagagcgctgccactgc

SEQ ID NO: 33463 - DNA, 33 bp, Homo sapien
tcttatgtttttaatacgcgaggaaccggaagg

SEQ ID NO: 33464 - DNA, 33 bp, Homo sapien
tcttatgtttttaatatgcgaggaaccggaagg

SEQ ID NO: 33465 - DNA, 33 bp, Homo sapien
atgattacaggataaacagaaaggctaggcctt

SEQ ID NO: 33466 - DNA, 33 bp, Homo sapien
atgattacaggataaagagaaaggctaggcctt

SEQ ID NO: 33467 - DNA, 33 bp, Homo sapien
tatgtacatgtttgaaggttacagactctattc

SEQ ID NO: 33468 - DNA, 33 bp, Homo sapien
tatgtacatgtttgaatgttacagactctattc

SEQ ID NO: 33469 - DNA, 33 bp, Homo sapien
gtccacaaaaatcctacgtatatatggacccct

SEQ ID NO: 33470 - DNA, 33 bp, Homo sapien
gtccacaaaaatcctatgtatatatggacccct

SEQ ID NO: 33471 - DNA, 33 bp, Homo sapien
ttgctttcttgatctacgatgaccacctctaat

SEQ ID NO: 33472 - DNA, 33 bp, Homo sapien
ttgctttcttgatctatgatgaccacctctaat

SEQ ID NO: 33473 - DNA, 33 bp, Homo sapien
tatacataccgtagaagcagaaggatgtggaat

SEQ ID NO: 33474 - DNA, 33 bp, Homo sapien
tatacataccgtagaatcagaaggatgtggaat

SEQ ID NO: 33475 - DNA, 33 bp, Homo sapien
tgagagtgtaggaaacaaagtaggctctgagag

SEQ ID NO: 33476 - DNA, 33 bp, Homo sapien
tgagagtgtaggaaacgaagtaggctctgagag

SEQ ID NO: 33477 - DNA, 33 bp, Homo sapien
cattgctgagaacataagaggcaccccatgaat

SEQ ID NO: 33478 - DNA, 33 bp, Homo sapien
cattgctgagaacatacgaggcaccccatgaat

SEQ ID NO: 33479 - DNA, 33 bp, Homo sapien
acaaaaaatcacaatgaaaacagtagaaccaga

SEQ ID NO: 33480 - DNA, 33 bp, Homo sapien
acaaaaaatcacaatgtaaacagtagaaccaga

SEQ ID NO: 33481 - DNA, 33 bp, Homo sapien
agctcagaacaatccaatgattaccattaaact

SEQ ID NO: 33482 - DNA, 33 bp, Homo sapien
agctcagaacaatccattgattaccattaaact

SEQ ID NO: 33483 - DNA, 33 bp, Homo sapien
ttttccatagggataccaggatttggcaagatg

SEQ ID NO: 33484 - DNA, 33 bp, Homo sapien
ttttccatagggatactaggatttggcaagatg

SEQ ID NO: 33485 - DNA, 33 bp, Homo sapien
ccaagctgctgcctaaaatgcaagactaattcc

SEQ ID NO: 33486 - DNA, 33 bp, Homo sapien
ccaagctgctgcctaagatgcaagactaattcc

SEQ ID NO: 33487 - DNA, 33 bp, Homo sapien
tgtacaataaatatgcacagtttttatctatca

SEQ ID NO: 33488 - DNA, 33 bp, Homo sapien
tgtacaataaatatgcgcagtttttatctatca

SEQ ID NO: 33489 - DNA, 33 bp, Homo sapien
cctgttctgcaataaacgccatgagggtgttca

SEQ ID NO: 33490 - DNA, 33 bp, Homo sapien
cctgttctgcaataaatgccatgagggtgttca

SEQ ID NO: 33491 - DNA, 33 bp, Homo sapien
aattaaatacatctgcaagtaacttaattaata

SEQ ID NO: 33492 - DNA, 33 bp, Homo sapien
aattaaatacatctgcgagtaacttaattaata

SEQ ID NO: 33493 - DNA, 33 bp, Homo sapien
gacaacaacaaaatgaaacactcaacaatgcaa

SEQ ID NO: 33494 - DNA, 33 bp, Homo sapien
gacaacaacaaaatgagacactcaacaatgcaa

SEQ ID NO: 33495 - DNA, 33 bp, Homo sapien
atagccccaacctgaaacattccaaatggataa

SEQ ID NO: 33496 - DNA, 33 bp, Homo sapien
atagccccaacctgaagcattccaaatggataa

SEQ ID NO: 33497 - DNA, 33 bp, Homo sapien
ttgtgagagacgcaaacaaattttttgggatga

SEQ ID NO: 33498 - DNA, 33 bp, Homo sapien
ttgtgagagacgcaaagaaattttttgggatga

SEQ ID NO: 33499 - DNA, 33 bp, Homo sapien
cagtaaacagcacctgaaaactgaacctgcaaa

SEQ ID NO: 33500 - DNA, 33 bp, Homo sapien
cagtaaacagcacctggaaactgaacctgcaaa

SEQ ID NO: 33501 - DNA, 33 bp, Homo sapien
tatccttctaaggggaacagttgctatctgaag

SEQ ID NO: 33502 - DNA, 33 bp, Homo sapien
tatccttctaaggggagcagttgctatctgaag

SEQ ID NO: 33503 - DNA, 33 bp, Homo sapien
tctatttcccaaatcacattttgcatcttatag

SEQ ID NO: 33504 - DNA, 33 bp, Homo sapien
tctatttcccaaatcatattttgcatcttatag

SEQ ID NO: 33505 - DNA, 33 bp, Homo sapien
taacataccattaaaccggagctcagaacttga

SEQ ID NO: 33506 - DNA, 33 bp, Homo sapien
taacataccattaaactggagctcagaacttga

SEQ ID NO: 33507 - DNA, 33 bp, Homo sapien
tcctcccgtagtgtaaaccaaagctgacataaa

SEQ ID NO: 33508 - DNA, 33 bp, Homo sapien
tcctcccgtagtgtaacccaaagctgacataaa

SEQ ID NO: 33509 - DNA, 33 bp, Homo sapien
catataggccgttcaaatctttacaaaaagtga

SEQ ID NO: 33510 - DNA, 33 bp, Homo sapien
catataggccgttcaagtctttacaaaaagtga

SEQ ID NO: 33511 - DNA, 33 bp, Homo sapien
ttcttgcttttaaccacctaacccagtttgctt

SEQ ID NO: 33512 - DNA, 33 bp, Homo sapien
ttcttgcttttaaccatctaacccagtttgctt

SEQ ID NO: 33513 - DNA, 33 bp, Homo sapien
ttgcagcatatttatcaagttctttgtgacttt

SEQ ID NO: 33514 - DNA, 33 bp, Homo sapien
ttgcagcatatttatccagttctttgtgacttt

SEQ ID NO: 33515 - DNA, 33 bp, Homo sapien
cttattgcacatcagtcactccttagcactctt

SEQ ID NO: 33516 - DNA, 33 bp, Homo sapien
cttattgcacatcagttactccttagcactctt

SEQ ID NO: 33517 - DNA, 33 bp, Homo sapien
ccatcttaaccatttcaagtgtacatttcagta

SEQ ID NO: 33518 - DNA, 33 bp, Homo sapien
ccatcttaaccatttcgagtgtacatttcagta

SEQ ID NO: 33519 - DNA, 33 bp, Homo sapien
cagtatttgggaagacagaaggctgctaacgtg

SEQ ID NO: 33520 - DNA, 33 bp, Homo sapien
cagtatttgggaagacggaaggctgctaacgtg

SEQ ID NO: 33521 - DNA, 33 bp, Homo sapien
gcatacaagggacgtaccttaatgtaataaaag

SEQ ID NO: 33522 - DNA, 33 bp, Homo sapien
gcatacaagggacgtatcttaatgtaataaaag

SEQ ID NO: 33523 - DNA, 33 bp, Homo sapien
tgatagattttctgtcacttttacctgggactc

SEQ ID NO: 33524 - DNA, 33 bp, Homo sapien
tgatagattttctgtcgcttttacctgggactc

SEQ ID NO: 33525 - DNA, 33 bp, Homo sapien
acagtgcagtcccttacgttactcagtgcaccc

SEQ ID NO: 33526 - DNA, 33 bp, Homo sapien
acagtgcagtcccttatgttactcagtgcaccc

SEQ ID NO: 33527 - DNA, 33 bp, Homo sapien
tagatgaggtgacctaaagtcatcactgaaatg

SEQ ID NO: 33528 - DNA, 33 bp, Homo sapien
tagatgaggtgacctacagtcatcactgaaatg

SEQ ID NO: 33529 - DNA, 33 bp, Homo sapien
tactagcaggcagaaacggatgattctaacttg

SEQ ID NO: 33530 - DNA, 33 bp, Homo sapien
tactagcaggcagaaatggatgattctaacttg

SEQ ID NO: 33531 - DNA, 33 bp, Homo sapien
tatacccattaaccaaactctcattatctctcc

SEQ ID NO: 33532 - DNA, 33 bp, Homo sapien
tatacccattaaccaagctctcattatctctcc

SEQ ID NO: 33533 - DNA, 33 bp, Homo sapien
tgctttgcgtagaaacccaaaagccaatgtgga

SEQ ID NO: 33534 - DNA, 33 bp, Homo sapien
tgctttgcgtagaaactcaaaagccaatgtgga

SEQ ID NO: 33535 - DNA, 33 bp, Homo sapien
attgcctctaggccaaaaacagtagtcccctag

SEQ ID NO: 33536 - DNA, 33 bp, Homo sapien
attgcctctaggccaagaacagtagtcccctag

SEQ ID NO: 33537 - DNA, 33 bp, Homo sapien
tatatatctgactttcaattctatctaacctca

SEQ ID NO: 33538 - DNA, 33 bp, Homo sapien
tatatatctgactttctattctatctaacctca

SEQ ID NO: 33539 - DNA, 33 bp, Homo sapien
gttttaaaagactcacaatcaattttaaaatgt

SEQ ID NO: 33540 - DNA, 33 bp, Homo sapien
gttttaaaagactcaccatcaattttaaaatgt

SEQ ID NO: 33541 - DNA, 33 bp, Homo sapien
tctgaatcccacatcaccctagcaaagtttttc

SEQ ID NO: 33542 - DNA, 33 bp, Homo sapien
tctgaatcccacatcatcctagcaaagtttttc

SEQ ID NO: 33543 - DNA, 33 bp, Homo sapien
atctaattctgtcaaacggcttctgttataaag

SEQ ID NO: 33544 - DNA, 33 bp, Homo sapien
atctaattctgtcaaatggcttctgttataaag

SEQ ID NO: 33545 - DNA, 33 bp, Homo sapien
acctgactcaaatggaaatgaaacctgtgactg

SEQ ID NO: 33546 - DNA, 33 bp, Homo sapien
acctgactcaaatggagatgaaacctgtgactg

SEQ ID NO: 33547 - DNA, 33 bp, Homo sapien
tcttcctagaatgcaacgtactctcctcagttg

SEQ ID NO: 33548 - DNA, 33 bp, Homo sapien
tcttcctagaatgcaatgtactctcctcagttg

SEQ ID NO: 33549 - DNA, 33 bp, Homo sapien
atggaatcggtagtgacagcctacaaacttctg

SEQ ID NO: 33550 - DNA, 33 bp, Homo sapien
atggaatcggtagtgatagcctacaaacttctg

SEQ ID NO: 33551 - DNA, 33 bp, Homo sapien
aacaaacaaacaaatacaatgagagacacatgg

SEQ ID NO: 33552 - DNA, 33 bp, Homo sapien
aacaaacaaacaaatataatgagagacacatgg

SEQ ID NO: 33553 - DNA, 33 bp, Homo sapien
catttctccagaaaagaacagtgtagattgtat

SEQ ID NO: 33554 - DNA, 33 bp, Homo sapien
catttctccagaaaaggacagtgtagattgtat

SEQ ID NO: 33555 - DNA, 33 bp, Homo sapien
cttcacatcccggtccaaatgcctcatgcactg

SEQ ID NO: 33556 - DNA, 33 bp, Homo sapien
cttcacatcccggtccgaatgcctcatgcactg

SEQ ID NO: 33557 - DNA, 33 bp, Homo sapien
gattcaaatgtcacacacagtttcattgctgct

SEQ ID NO: 33558 - DNA, 33 bp, Homo sapien
gattcaaatgtcacacgcagtttcattgctgct

SEQ ID NO: 33559 - DNA, 33 bp, Homo sapien
atcttccccagctgaaactcaatacccgttaaa

SEQ ID NO: 33560 - DNA, 33 bp, Homo sapien
atcttccccagctgaagctcaatacccgttaaa

SEQ ID NO: 33561 - DNA, 33 bp, Homo sapien
tgaagggatagataccccattccccataatgtg

SEQ ID NO: 33562 - DNA, 33 bp, Homo sapien
tgaagggatagatacctcattccccataatgtg

SEQ ID NO: 33563 - DNA, 33 bp, Homo sapien
cttaatcctaaatgcccaccagtacccgtttcc

SEQ ID NO: 33564 - DNA, 33 bp, Homo sapien
cttaatcctaaatgcctaccagtacccgtttcc

SEQ ID NO: 33565 - DNA, 33 bp, Homo sapien
acagtttgattgcctcccatgaaccaggcatta

SEQ ID NO: 33566 - DNA, 33 bp, Homo sapien
acagtttgattgcctcgcatgaaccaggcatta

SEQ ID NO: 33567 - DNA, 33 bp, Homo sapien
ctgtaattattggctaacaaaaccttgtctctc

SEQ ID NO: 33568 - DNA, 33 bp, Homo sapien
ctgtaattattggctatcaaaaccttgtctctc

SEQ ID NO: 33569 - DNA, 33 bp, Homo sapien
cactcagaagagagtaactagagtaagaagtca

SEQ ID NO: 33570 - DNA, 33 bp, Homo sapien
cactcagaagagagtagctagagtaagaagtca

SEQ ID NO: 33571 - DNA, 33 bp, Homo sapien
ttatcatcattatggcacaacactaatggcaga

SEQ ID NO: 33572 - DNA, 33 bp, Homo sapien
ttatcatcattatggcccaacactaatggcaga

SEQ ID NO: 33573 - DNA, 33 bp, Homo sapien
tagtgactcatttttggaggttaaattcaccga

SEQ ID NO: 33574 - DNA, 33 bp, Homo sapien
tagtgactcatttttgtaggttaaattcaccga

SEQ ID NO: 33575 - DNA, 33 bp, Homo sapien
cctaaaatatggtacaccttcattcttcacaag

SEQ ID NO: 33576 - DNA, 33 bp, Homo sapien
cctaaaatatggtacatcttcattcttcacaag

SEQ ID NO: 33577 - DNA, 33 bp, Homo sapien
tagaatggctatgatcaaaaaggcaagagataa

SEQ ID NO: 33578 - DNA, 33 bp, Homo sapien
tagaatggctatgatccaaaaggcaagagataa

SEQ ID NO: 33579 - DNA, 33 bp, Homo sapien
ggatatatgtccaaagaaattaaaaatcagaat

SEQ ID NO: 33580 - DNA, 33 bp, Homo sapien
ggatatatgtccaaaggaattaaaaatcagaat

SEQ ID NO: 33581 - DNA, 33 bp, Homo sapien
tgatgtatgtagcaaaagcctctggcacccgtg

SEQ ID NO: 33582 - DNA, 33 bp, Homo sapien
tgatgtatgtagcaaacgcctctggcacccgtg

SEQ ID NO: 33583 - DNA, 33 bp, Homo sapien
acatttgaatcccaagaaatgagacacagaagc

SEQ ID NO: 33584 - DNA, 33 bp, Homo sapien
acatttgaatcccaaggaatgagacacagaagc

SEQ ID NO: 33585 - DNA, 33 bp, Homo sapien
agcatagaaagccaacggcaaaagaagagcttg

SEQ ID NO: 33586 - DNA, 33 bp, Homo sapien
agcatagaaagccaactgcaaaagaagagcttg

SEQ ID NO: 33587 - DNA, 33 bp, Homo sapien
attttcttgcagtttacaatggtgtcactttaa

SEQ ID NO: 33588 - DNA, 33 bp, Homo sapien
attttcttgcagtttataatggtgtcactttaa

SEQ ID NO: 33589 - DNA, 33 bp, Homo sapien
tttaaacatcaaacccaacttctcatgcacagt

SEQ ID NO: 33590 - DNA, 33 bp, Homo sapien
tttaaacatcaaacccgacttctcatgcacagt

SEQ ID NO: 33591 - DNA, 33 bp, Homo sapien
ctgaaagctgttaacaatacctaaatctggaga

SEQ ID NO: 33592 - DNA, 33 bp, Homo sapien
ctgaaagctgttaacagtacctaaatctggaga

SEQ ID NO: 33593 - DNA, 33 bp, Homo sapien
ccaattctaaagaaaacgtagagcctccggatg

SEQ ID NO: 33594 - DNA, 33 bp, Homo sapien
ccaattctaaagaaaatgtagagcctccggatg

SEQ ID NO: 33595 - DNA, 33 bp, Homo sapien
tctatctgattgaaaaaccagcttgctgagggt

SEQ ID NO: 33596 - DNA, 33 bp, Homo sapien
tctatctgattgaaaagccagcttgctgagggt

SEQ ID NO: 33597 - DNA, 33 bp, Homo sapien
taatcctgaagtagaaaccttgtcaatgatttc

SEQ ID NO: 33598 - DNA, 33 bp, Homo sapien
taatcctgaagtagaacccttgtcaatgatttc

SEQ ID NO: 33599 - DNA, 33 bp, Homo sapien
gagatccagaaaccaaatataaaagagctgcag

SEQ ID NO: 33600 - DNA, 33 bp, Homo sapien
gagatccagaaaccaagtataaaagagctgcag

SEQ ID NO: 33601 - DNA, 33 bp, Homo sapien
agacaactgaaaaatgcatgttgctttgtgtat

SEQ ID NO: 33602 - DNA, 33 bp, Homo sapien
agacaactgaaaaatgtatgttgctttgtgtat

SEQ ID NO: 33603 - DNA, 33 bp, Homo sapien
ggctgcggctgccaaaactactctaacccagct

SEQ ID NO: 33604 - DNA, 33 bp, Homo sapien
ggctgcggctgccaaacctactctaacccagct

SEQ ID NO: 33605 - DNA, 33 bp, Homo sapien
cccaacacatttacacagggttggcatcaccgt

SEQ ID NO: 33606 - DNA, 33 bp, Homo sapien
cccaacacatttacactgggttggcatcaccgt

SEQ ID NO: 33607 - DNA, 33 bp, Homo sapien
tgaacaaaataggtaaaccctgcattgccagac

SEQ ID NO: 33608 - DNA, 33 bp, Homo sapien
tgaacaaaataggtaagccctgcattgccagac

SEQ ID NO: 33609 - DNA, 33 bp, Homo sapien
atatgggccctgacaccagaacctgagctttat

SEQ ID NO: 33610 - DNA, 33 bp, Homo sapien
atatgggccctgacactagaacctgagctttat

SEQ ID NO: 33611 - DNA, 33 bp, Homo sapien
ggtaatattattagtaacacgaaacagttcact

SEQ ID NO: 33612 - DNA, 33 bp, Homo sapien
ggtaatattattagtaccacgaaacagttcact

SEQ ID NO: 33613 - DNA, 33 bp, Homo sapien
ggcaagggaggaggcaaactttttttgagacag

SEQ ID NO: 33614 - DNA, 33 bp, Homo sapien
ggcaagggaggaggcagactttttttgagacag

SEQ ID NO: 33615 - DNA, 33 bp, Homo sapien
tgagaaaggtttcttcaaacacacggagctttg

SEQ ID NO: 33616 - DNA, 33 bp, Homo sapien
tgagaaaggtttcttcgaacacacggagctttg

SEQ ID NO: 33617 - DNA, 33 bp, Homo sapien
caattgggatccgcagaacactaaacttccccc

SEQ ID NO: 33618 - DNA, 33 bp, Homo sapien
caattgggatccgcagcacactaaacttccccc

SEQ ID NO: 33619 - DNA, 33 bp, Homo sapien
ccaagtccacagaggcaaagaaggttttctctt

SEQ ID NO: 33620 - DNA, 33 bp, Homo sapien
ccaagtccacagaggcgaagaaggttttctctt

SEQ ID NO: 33621 - DNA, 33 bp, Homo sapien
gatttgaagagtgtggcatttcaggggacagtg

SEQ ID NO: 33622 - DNA, 33 bp, Homo sapien
gatttgaagagtgtggtatttcaggggacagtg

SEQ ID NO: 33623 - DNA, 33 bp, Homo sapien
acattgtgcctgtcagaattccccaacctcagc

SEQ ID NO: 33624 - DNA, 33 bp, Homo sapien
acattgtgcctgtcaggattccccaacctcagc

SEQ ID NO: 33625 - DNA, 33 bp, Homo sapien
tgctcctcattgagaaccactggtatacttctt

SEQ ID NO: 33626 - DNA, 33 bp, Homo sapien
tgctcctcattgagaatcactggtatacttctt

SEQ ID NO: 33627 - DNA, 33 bp, Homo sapien
taatatccacagtctacgaagaacttacacaaa

SEQ ID NO: 33628 - DNA, 33 bp, Homo sapien
taatatccacagtctatgaagaacttacacaaa

SEQ ID NO: 33629 - DNA, 33 bp, Homo sapien
taaaggggtctttggacgaaaaagcttgggaac

SEQ ID NO: 33630 - DNA, 33 bp, Homo sapien
taaaggggtctttggatgaaaaagcttgggaac

SEQ ID NO: 33631 - DNA, 33 bp, Homo sapien
ggtcagctggagtcaaacataccttttagtagt

SEQ ID NO: 33632 - DNA, 33 bp, Homo sapien
ggtcagctggagtcaagcataccttttagtagt

SEQ ID NO: 33633 - DNA, 33 bp, Homo sapien
agcaaaaatcattttcaatcagcaacaaagcaa

SEQ ID NO: 33634 - DNA, 33 bp, Homo sapien
agcaaaaatcattttccatcagcaacaaagcaa

SEQ ID NO: 33635 - DNA, 33 bp, Homo sapien
gagaatctgagggttggaagttttcagagtctt

SEQ ID NO: 33636 - DNA, 33 bp, Homo sapien
gagaatctgagggttgtaagttttcagagtctt

SEQ ID NO: 33637 - DNA, 33 bp, Homo sapien
gctagtcattattgtacgcctctgaatgtgact

SEQ ID NO: 33638 - DNA, 33 bp, Homo sapien
gctagtcattattgtaggcctctgaatgtgact

SEQ ID NO: 33639 - DNA, 33 bp, Homo sapien
tatcaccaagagatgccccattaaatcgctggg

SEQ ID NO: 33640 - DNA, 33 bp, Homo sapien
tatcaccaagagatgctccattaaatcgctggg

SEQ ID NO: 33641 - DNA, 33 bp, Homo sapien
gtgtagtggtgaatgcacagaaaatgcctgtga

SEQ ID NO: 33642 - DNA, 33 bp, Homo sapien
gtgtagtggtgaatgcgcagaaaatgcctgtga

SEQ ID NO: 33643 - DNA, 33 bp, Homo sapien
tcctaggcactcaataacagaatataggcttct

SEQ ID NO: 33644 - DNA, 33 bp, Homo sapien
tcctaggcactcaatatcagaatataggcttct

SEQ ID NO: 33645 - DNA, 33 bp, Homo sapien
aacctccttttaacccacaggtatagtgtcagt

SEQ ID NO: 33646 - DNA, 33 bp, Homo sapien
aacctccttttaacccgcaggtatagtgtcagt

SEQ ID NO: 33647 - DNA, 33 bp, Homo sapien
attagcatcagtatcagctgaaaacttgttaga

SEQ ID NO: 33648 - DNA, 33 bp, Homo sapien
attagcatcagtatcatctgaaaacttgttaga

SEQ ID NO: 33649 - DNA, 33 bp, Homo sapien
cacatttggtgctagaaggtcccactcgataat

SEQ ID NO: 33650 - DNA, 33 bp, Homo sapien
cacatttggtgctagacggtcccactcgataat

SEQ ID NO: 33651 - DNA, 33 bp, Homo sapien
gttatatctttctcccaaacacacgtattctca

SEQ ID NO: 33652 - DNA, 33 bp, Homo sapien
gttatatctttctcccgaacacacgtattctca

SEQ ID NO: 33653 - DNA, 33 bp, Homo sapien
ggtatttctccatttccaggatatgagcacatt

SEQ ID NO: 33654 - DNA, 33 bp, Homo sapien
ggtatttctccatttctaggatatgagcacatt

SEQ ID NO: 33655 - DNA, 33 bp, Homo sapien
ggcaaagtaactttcacctgaaatatttgtaaa

SEQ ID NO: 33656 - DNA, 33 bp, Homo sapien
ggcaaagtaactttcatctgaaatatttgtaaa

SEQ ID NO: 33657 - DNA, 33 bp, Homo sapien
acaggagaggcataagactcagaatatccaacc

SEQ ID NO: 33658 - DNA, 33 bp, Homo sapien
acaggagaggcataagtctcagaatatccaacc

SEQ ID NO: 33659 - DNA, 33 bp, Homo sapien
tcatgggagaggacaaaagtgcaaacagaaata

SEQ ID NO: 33660 - DNA, 33 bp, Homo sapien
tcatgggagaggacaagagtgcaaacagaaata

SEQ ID NO: 33661 - DNA, 33 bp, Homo sapien
tgagaaagttgtcctaaggagtcatcacatttc

SEQ ID NO: 33662 - DNA, 33 bp, Homo sapien
tgagaaagttgtcctagggagtcatcacatttc

SEQ ID NO: 33663 - DNA, 33 bp, Homo sapien
ggcccatattgagtgacacctgttaagaaaagt

SEQ ID NO: 33664 - DNA, 33 bp, Homo sapien
ggcccatattgagtgagacctgttaagaaaagt

SEQ ID NO: 33665 - DNA, 33 bp, Homo sapien
gatatttaacaccctcccatgatccagcaacca

SEQ ID NO: 33666 - DNA, 33 bp, Homo sapien
gatatttaacaccctcgcatgatccagcaacca

SEQ ID NO: 33667 - DNA, 33 bp, Homo sapien
atacagttcatgggaaccattgcttttaataat

SEQ ID NO: 33668 - DNA, 33 bp, Homo sapien
atacagttcatgggaagcattgcttttaataat

SEQ ID NO: 33669 - DNA, 33 bp, Homo sapien
ttattcatttgtcctgcagagtttcccacatac

SEQ ID NO: 33670 - DNA, 33 bp, Homo sapien
ttattcatttgtcctgtagagtttcccacatac

SEQ ID NO: 33671 - DNA, 33 bp, Homo sapien
gcatggcagaaaagcaagtttaaagtcttggct

SEQ ID NO: 33672 - DNA, 33 bp, Homo sapien
gcatggcagaaaagcatgtttaaagtcttggct

SEQ ID NO: 33673 - DNA, 33 bp, Homo sapien
aactgtaggcaaacccaaactcaagctcctcac

SEQ ID NO: 33674 - DNA, 33 bp, Homo sapien
aactgtaggcaaacccgaactcaagctcctcac

SEQ ID NO: 33675 - DNA, 33 bp, Homo sapien
gtcccttccatttgcccagtggctttgatacag

SEQ ID NO: 33676 - DNA, 33 bp, Homo sapien
gtcccttccatttgcctagtggctttgatacag

SEQ ID NO: 33677 - DNA, 33 bp, Homo sapien
ttctgtcatgctgtcaaaaatggtttagaaagg

SEQ ID NO: 33678 - DNA, 33 bp, Homo sapien
ttctgtcatgctgtcagaaatggtttagaaagg

SEQ ID NO: 33679 - DNA, 33 bp, Homo sapien
agaaagcagtcccctcaagagtttactgagctt

SEQ ID NO: 33680 - DNA, 33 bp, Homo sapien
agaaagcagtcccctcgagagtttactgagctt

SEQ ID NO: 33681 - DNA, 33 bp, Homo sapien
gtaattgagataagcacaaattctgtctaagtg

SEQ ID NO: 33682 - DNA, 33 bp, Homo sapien
gtaattgagataagcataaattctgtctaagtg

SEQ ID NO: 33683 - DNA, 33 bp, Homo sapien
aagcatgacggtttacaaattagtttctcctaa

SEQ ID NO: 33684 - DNA, 33 bp, Homo sapien
aagcatgacggtttaccaattagtttctcctaa

SEQ ID NO: 33685 - DNA, 33 bp, Homo sapien
tacataagtgaatggacgctttgatttaacaga

SEQ ID NO: 33686 - DNA, 33 bp, Homo sapien
tacataagtgaatggatgctttgatttaacaga

SEQ ID NO: 33687 - DNA, 33 bp, Homo sapien
ctctgaatttccattaagtttaagcagtgaaag

SEQ ID NO: 33688 - DNA, 33 bp, Homo sapien
ctctgaatttccattatgtttaagcagtgaaag

SEQ ID NO: 33689 - DNA, 33 bp, Homo sapien
gaaaaaaattgccaaaagtaaagcatgagatgg

SEQ ID NO: 33690 - DNA, 33 bp, Homo sapien
gaaaaaaattgccaaaggtaaagcatgagatgg

SEQ ID NO: 33691 - DNA, 33 bp, Homo sapien
tcaaatacagctttcaaagtgccttaagattaa

SEQ ID NO: 33692 - DNA, 33 bp, Homo sapien
tcaaatacagctttcagagtgccttaagattaa

SEQ ID NO: 33693 - DNA, 33 bp, Homo sapien
ttatgtttcttgaggcaaattttagttttcctc

SEQ ID NO: 33694 - DNA, 33 bp, Homo sapien
ttatgtttcttgaggccaattttagttttcctc

SEQ ID NO: 33695 - DNA, 33 bp, Homo sapien
ccacaagtactatttacggatagtttgccagat

SEQ ID NO: 33696 - DNA, 33 bp, Homo sapien
ccacaagtactatttatggatagtttgccagat

SEQ ID NO: 33697 - DNA, 33 bp, Homo sapien
ttgctggtttttggaaagcaatggtaagttgtt

SEQ ID NO: 33698 - DNA, 33 bp, Homo sapien
ttgctggtttttggaaggcaatggtaagttgtt

SEQ ID NO: 33699 - DNA, 33 bp, Homo sapien
ttttgaccccaaattacattatcctgacttgac

SEQ ID NO: 33700 - DNA, 33 bp, Homo sapien
ttttgaccccaaattatattatcctgacttgac

SEQ ID NO: 33701 - DNA, 33 bp, Homo sapien
tactagtttgcaagtacgttggtaaaataaatg

SEQ ID NO: 33702 - DNA, 33 bp, Homo sapien
tactagtttgcaagtatgttggtaaaataaatg

SEQ ID NO: 33703 - DNA, 33 bp, Homo sapien
gtagaatagattttcccctgggcctctgaagat

SEQ ID NO: 33704 - DNA, 33 bp, Homo sapien
gtagaatagattttcctctgggcctctgaagat

SEQ ID NO: 33705 - DNA, 33 bp, Homo sapien
gagaaatgcaactggaataaagaatatttcctt

SEQ ID NO: 33706 - DNA, 33 bp, Homo sapien
gagaaatgcaactggagtaaagaatatttcctt

SEQ ID NO: 33707 - DNA, 33 bp, Homo sapien
gattctgcagtcttagcagcagctgcctatgtt

SEQ ID NO: 33708 - DNA, 33 bp, Homo sapien
gattctgcagtcttagtagcagctgcctatgtt

SEQ ID NO: 33709 - DNA, 33 bp, Homo sapien
ggaagcattgtttatacactgaattaccagttg

SEQ ID NO: 33710 - DNA, 33 bp, Homo sapien
ggaagcattgtttatagactgaattaccagttg

SEQ ID NO: 33711 - DNA, 33 bp, Homo sapien
acttgatagcttggtaaggtatagaatgaatag

SEQ ID NO: 33712 - DNA, 33 bp, Homo sapien
acttgatagcttggtagggtatagaatgaatag

SEQ ID NO: 33713 - DNA, 33 bp, Homo sapien
taatcgcacagatgaaagtgatacatgaataac

SEQ ID NO: 33714 - DNA, 33 bp, Homo sapien
taatcgcacagatgaaggtgatacatgaataac

SEQ ID NO: 33715 - DNA, 33 bp, Homo sapien
ttcctgggattcactacacaggctattgcttat

SEQ ID NO: 33716 - DNA, 33 bp, Homo sapien
ttcctgggattcactatacaggctattgcttat

SEQ ID NO: 33717 - DNA, 33 bp, Homo sapien
gtgaaaccttcataacccatcactctaggtcta

SEQ ID NO: 33718 - DNA, 33 bp, Homo sapien
gtgaaaccttcataacgcatcactctaggtcta

SEQ ID NO: 33719 - DNA, 33 bp, Homo sapien
gcctagtgagaagagacacactttacctgcaca

SEQ ID NO: 33720 - DNA, 33 bp, Homo sapien
gcctagtgagaagagatacactttacctgcaca

SEQ ID NO: 33721 - DNA, 33 bp, Homo sapien
ctttacctggggctacagcaccttactcttgaa

SEQ ID NO: 33722 - DNA, 33 bp, Homo sapien
ctttacctggggctacggcaccttactcttgaa

SEQ ID NO: 33723 - DNA, 33 bp, Homo sapien
atctaccaaaggatgaagacaaggcaagagcac

SEQ ID NO: 33724 - DNA, 33 bp, Homo sapien
atctaccaaaggatgacgacaaggcaagagcac

SEQ ID NO: 33725 - DNA, 33 bp, Homo sapien
aatacccaaagtggtaaaagatatttgacatca

SEQ ID NO: 33726 - DNA, 33 bp, Homo sapien
aatacccaaagtggtagaagatatttgacatca

SEQ ID NO: 33727 - DNA, 33 bp, Homo sapien
agcttctattctccaaatatctctctgccaacc

SEQ ID NO: 33728 - DNA, 33 bp, Homo sapien
agcttctattctccaagtatctctctgccaacc

SEQ ID NO: 33729 - DNA, 33 bp, Homo sapien
acaatcaagtaggaaaggttacagaggctaatg

SEQ ID NO: 33730 - DNA, 33 bp, Homo sapien
acaatcaagtaggaaatgttacagaggctaatg

SEQ ID NO: 33731 - DNA, 33 bp, Homo sapien
ggtggatgtctatttacggagagtgaccatttg

SEQ ID NO: 33732 - DNA, 33 bp, Homo sapien
ggtggatgtctatttatggagagtgaccatttg

SEQ ID NO: 33733 - DNA, 33 bp, Homo sapien
ccagttagtggcagaacgtgggccgaaacccag

SEQ ID NO: 33734 - DNA, 33 bp, Homo sapien
ccagttagtggcagaatgtgggccgaaacccag

SEQ ID NO: 33735 - DNA, 33 bp, Homo sapien
ctcttatgggagaaaactgcattctgcaggaaa

SEQ ID NO: 33736 - DNA, 33 bp, Homo sapien
ctcttatgggagaaaattgcattctgcaggaaa

SEQ ID NO: 33737 - DNA, 33 bp, Homo sapien
tggagagttctgagcacaggcgcagatacacat

SEQ ID NO: 33738 - DNA, 33 bp, Homo sapien
tggagagttctgagcataggcgcagatacacat

SEQ ID NO: 33739 - DNA, 33 bp, Homo sapien
caattagctgttatgaaccattaaagcaggctt

SEQ ID NO: 33740 - DNA, 33 bp, Homo sapien
caattagctgttatgagccattaaagcaggctt

SEQ ID NO: 33741 - DNA, 33 bp, Homo sapien
cagatgtgcgattacaatctgcttacggtgaaa

SEQ ID NO: 33742 - DNA, 33 bp, Homo sapien
cagatgtgcgattacattctgcttacggtgaaa

SEQ ID NO: 33743 - DNA, 33 bp, Homo sapien
atgggatcaattagggaaaactgactaaaggtt

SEQ ID NO: 33744 - DNA, 33 bp, Homo sapien
atgggatcaattagggcaaactgactaaaggtt

SEQ ID NO: 33745 - DNA, 33 bp, Homo sapien
aacttgtcttggaataaacttctagaacttgtc

SEQ ID NO: 33746 - DNA, 33 bp, Homo sapien
aacttgtcttggaatagacttctagaacttgtc

SEQ ID NO: 33747 - DNA, 33 bp, Homo sapien
ttcatttttctaagcgcatttagagctatcaga

SEQ ID NO: 33748 - DNA, 33 bp, Homo sapien
ttcatttttctaagcgtatttagagctatcaga

SEQ ID NO: 33749 - DNA, 33 bp, Homo sapien
gactagagcctaaatgcattgagggcagaggtt

SEQ ID NO: 33750 - DNA, 33 bp, Homo sapien
gactagagcctaaatgtattgagggcagaggtt

SEQ ID NO: 33751 - DNA, 33 bp, Homo sapien
cagatcctgctctaaaaggataagcagctcagg

SEQ ID NO: 33752 - DNA, 33 bp, Homo sapien
cagatcctgctctaaagggataagcagctcagg

SEQ ID NO: 33753 - DNA, 33 bp, Homo sapien
gtgtccagtctaaaaaataatgtatatattatt

SEQ ID NO: 33754 - DNA, 33 bp, Homo sapien
gtgtccagtctaaaaattaatgtatatattatt

SEQ ID NO: 33755 - DNA, 33 bp, Homo sapien
tcttaaaaaataattcaatctaatgtctcaaac

SEQ ID NO: 33756 - DNA, 33 bp, Homo sapien
tcttaaaaaataattcgatctaatgtctcaaac

SEQ ID NO: 33757 - DNA, 33 bp, Homo sapien
ttttccatgacattaaatattctttgaaacaac

SEQ ID NO: 33758 - DNA, 33 bp, Homo sapien
ttttccatgacattaagtattctttgaaacaac

SEQ ID NO: 33759 - DNA, 33 bp, Homo sapien
gctagagtcacaaaaaaaggaactgccatttct

SEQ ID NO: 33760 - DNA, 33 bp, Homo sapien
gctagagtcacaaaaagaggaactgccatttct

SEQ ID NO: 33761 - DNA, 33 bp, Homo sapien
tctctgtggtcactagcagaaatcaatatgtaa

SEQ ID NO: 33762 - DNA, 33 bp, Homo sapien
tctctgtggtcactagtagaaatcaatatgtaa

SEQ ID NO: 33763 - DNA, 33 bp, Homo sapien
aagttacctatctgtacataatcctttgtctca

SEQ ID NO: 33764 - DNA, 33 bp, Homo sapien
aagttacctatctgtatataatcctttgtctca

SEQ ID NO: 33765 - DNA, 33 bp, Homo sapien
catttctacaggacaactcaaaacatagggagt

SEQ ID NO: 33766 - DNA, 33 bp, Homo sapien
catttctacaggacaattcaaaacatagggagt

SEQ ID NO: 33767 - DNA, 33 bp, Homo sapien
tctcactacaacaggacgagatagatatactgt

SEQ ID NO: 33768 - DNA, 33 bp, Homo sapien
tctcactacaacaggatgagatagatatactgt

SEQ ID NO: 33769 - DNA, 33 bp, Homo sapien
ggtgctaagaacttaaaatacagtatctcaggt

SEQ ID NO: 33770 - DNA, 33 bp, Homo sapien
ggtgctaagaacttaacatacagtatctcaggt

SEQ ID NO: 33771 - DNA, 33 bp, Homo sapien
ggctgaagtcatgtcaccttgtattattgtgat

SEQ ID NO: 33772 - DNA, 33 bp, Homo sapien
ggctgaagtcatgtcagcttgtattattgtgat

SEQ ID NO: 33773 - DNA, 33 bp, Homo sapien
gaaacagcagcagttacgagcagttacatattc

SEQ ID NO: 33774 - DNA, 33 bp, Homo sapien
gaaacagcagcagttatgagcagttacatattc

SEQ ID NO: 33775 - DNA, 33 bp, Homo sapien
gacggcagaagggttcaaggaagtgcccagaca

SEQ ID NO: 33776 - DNA, 33 bp, Homo sapien
gacggcagaagggttccaggaagtgcccagaca

SEQ ID NO: 33777 - DNA, 33 bp, Homo sapien
actgatggcaccaataccctcaacttgtaggct

SEQ ID NO: 33778 - DNA, 33 bp, Homo sapien
actgatggcaccaatatcctcaacttgtaggct

SEQ ID NO: 33779 - DNA, 33 bp, Homo sapien
ctggtatatgatcttaaggacattcagctggta

SEQ ID NO: 33780 - DNA, 33 bp, Homo sapien
ctggtatatgatcttagggacattcagctggta

SEQ ID NO: 33781 - DNA, 33 bp, Homo sapien
gcgtgagtgaacgcaactgtgcgcattaagagg

SEQ ID NO: 33782 - DNA, 33 bp, Homo sapien
gcgtgagtgaacgcaagtgtgcgcattaagagg

SEQ ID NO: 33783 - DNA, 33 bp, Homo sapien
agagaaaaaaacctgaaaataatcagcagcttc

SEQ ID NO: 33784 - DNA, 33 bp, Homo sapien
agagaaaaaaacctgagaataatcagcagcttc

SEQ ID NO: 33785 - DNA, 33 bp, Homo sapien
agttgtatgaagtggcagatttctcctagggtg

SEQ ID NO: 33786 - DNA, 33 bp, Homo sapien
agttgtatgaagtggcggatttctcctagggtg

SEQ ID NO: 33787 - DNA, 33 bp, Homo sapien
ccgctcctggcaaaaacgagtctcagaagagtt

SEQ ID NO: 33788 - DNA, 33 bp, Homo sapien
ccgctcctggcaaaaatgagtctcagaagagtt

SEQ ID NO: 33789 - DNA, 33 bp, Homo sapien
ttgaatattagtttccaaggaaaagcagagggt

SEQ ID NO: 33790 - DNA, 33 bp, Homo sapien
ttgaatattagtttccgaggaaaagcagagggt

SEQ ID NO: 33791 - DNA, 33 bp, Homo sapien
caggaccatgatacaaatgctggcccttcacca

SEQ ID NO: 33792 - DNA, 33 bp, Homo sapien
caggaccatgatacaagtgctggcccttcacca

SEQ ID NO: 33793 - DNA, 33 bp, Homo sapien
cgttccacatgtgccaccaaatatctatccctc

SEQ ID NO: 33794 - DNA, 33 bp, Homo sapien
cgttccacatgtgccagcaaatatctatccctc

SEQ ID NO: 33795 - DNA, 33 bp, Homo sapien
gaacatgagtcctataacgtggctcctggtctc

SEQ ID NO: 33796 - DNA, 33 bp, Homo sapien
gaacatgagtcctataccgtggctcctggtctc

SEQ ID NO: 33797 - DNA, 33 bp, Homo sapien
attctttagatatccaagtagaaaaggaaagcc

SEQ ID NO: 33798 - DNA, 33 bp, Homo sapien
attctttagatatccatgtagaaaaggaaagcc

SEQ ID NO: 33799 - DNA, 33 bp, Homo sapien
aagttggagtggtgcacataaatacagctgtct

SEQ ID NO: 33800 - DNA, 33 bp, Homo sapien
aagttggagtggtgcatataaatacagctgtct

SEQ ID NO: 33801 - DNA, 33 bp, Homo sapien
ctgaaggaggcagcaaaggactaggcatattct

SEQ ID NO: 33802 - DNA, 33 bp, Homo sapien
ctgaaggaggcagcaagggactaggcatattct

SEQ ID NO: 33803 - DNA, 33 bp, Homo sapien
tcatcacagtacaagacgtcaacacatttaagt

SEQ ID NO: 33804 - DNA, 33 bp, Homo sapien
tcatcacagtacaagatgtcaacacatttaagt

SEQ ID NO: 33805 - DNA, 33 bp, Homo sapien
gatttacagataagcacacgagaagcaggggaa

SEQ ID NO: 33806 - DNA, 33 bp, Homo sapien
gatttacagataagcatacgagaagcaggggaa

SEQ ID NO: 33807 - DNA, 33 bp, Homo sapien
ttcagtctgtcttctagtacggttgataaaaat

SEQ ID NO: 33808 - DNA, 33 bp, Homo sapien
ttcagtctgtcttctattacggttgataaaaat

SEQ ID NO: 33809 - DNA, 33 bp, Homo sapien
aaataaataatgatggaaagcaggatcgtttat

SEQ ID NO: 33810 - DNA, 33 bp, Homo sapien
aaataaataatgatgggaagcaggatcgtttat

SEQ ID NO: 33811 - DNA, 33 bp, Homo sapien
aacgctgcaacggatcacaatggaaccctcaaa

SEQ ID NO: 33812 - DNA, 33 bp, Homo sapien
aacgctgcaacggatcgcaatggaaccctcaaa

SEQ ID NO: 33813 - DNA, 33 bp, Homo sapien
catttgccaggagaacacagtcgatttatctga

SEQ ID NO: 33814 - DNA, 33 bp, Homo sapien
catttgccaggagaacccagtcgatttatctga

SEQ ID NO: 33815 - DNA, 33 bp, Homo sapien
ggacacatctggcctacagatattattattatt

SEQ ID NO: 33816 - DNA, 33 bp, Homo sapien
ggacacatctggcctatagatattattattatt

SEQ ID NO: 33817 - DNA, 33 bp, Homo sapien
agacaagagagaatgaaagccagccgaaaggag

SEQ ID NO: 33818 - DNA, 33 bp, Homo sapien
agacaagagagaatgagagccagccgaaaggag

SEQ ID NO: 33819 - DNA, 33 bp, Homo sapien
tgtggagccaccatacaaagccctggacttccc

SEQ ID NO: 33820 - DNA, 33 bp, Homo sapien
tgtggagccaccatacgaagccctggacttccc

SEQ ID NO: 33821 - DNA, 33 bp, Homo sapien
tctcttcctgatagagaaaatgaaaggttttaa

SEQ ID NO: 33822 - DNA, 33 bp, Homo sapien
tctcttcctgatagaggaaatgaaaggttttaa

SEQ ID NO: 33823 - DNA, 33 bp, Homo sapien
aaatatgaggtgtagaagtcaatgaagttttat

SEQ ID NO: 33824 - DNA, 33 bp, Homo sapien
aaatatgaggtgtagaggtcaatgaagttttat

SEQ ID NO: 33825 - DNA, 33 bp, Homo sapien
tttaaagagctttgagaatttttatgctatatt

SEQ ID NO: 33826 - DNA, 33 bp, Homo sapien
tttaaagagctttgaggatttttatgctatatt

SEQ ID NO: 33827 - DNA, 33 bp, Homo sapien
atctcatatccaataaccacttaagtcctgtgg

SEQ ID NO: 33828 - DNA, 33 bp, Homo sapien
atctcatatccaataatcacttaagtcctgtgg

SEQ ID NO: 33829 - DNA, 33 bp, Homo sapien
tttgaattggagaaaaagagatagagttattgc

SEQ ID NO: 33830 - DNA, 33 bp, Homo sapien
tttgaattggagaaaaggagatagagttattgc

SEQ ID NO: 33831 - DNA, 33 bp, Homo sapien
ttacttgacatatctcacaactaatcacgggtc

SEQ ID NO: 33832 - DNA, 33 bp, Homo sapien
ttacttgacatatctctcaactaatcacgggtc

SEQ ID NO: 33833 - DNA, 33 bp, Homo sapien
tagatgattatttacacggtcctattacttatt

SEQ ID NO: 33834 - DNA, 33 bp, Homo sapien
tagatgattatttacatggtcctattacttatt

SEQ ID NO: 33835 - DNA, 33 bp, Homo sapien
ttgctgtttgcccttaagatcatttccagaggg

SEQ ID NO: 33836 - DNA, 33 bp, Homo sapien
ttgctgtttgcccttaggatcatttccagaggg

SEQ ID NO: 33837 - DNA, 33 bp, Homo sapien
aaaaagtaattggcaggatcttgcagccatatg

SEQ ID NO: 33838 - DNA, 33 bp, Homo sapien
aaaaagtaattggcagtatcttgcagccatatg

SEQ ID NO: 33839 - DNA, 33 bp, Homo sapien
ctagctctcttggtaaatatgacagcaacaagt

SEQ ID NO: 33840 - DNA, 33 bp, Homo sapien
ctagctctcttggtaagtatgacagcaacaagt

SEQ ID NO: 33841 - DNA, 33 bp, Homo sapien
tctgctttggtctcccgggactctaaggcctca

SEQ ID NO: 33842 - DNA, 33 bp, Homo sapien
tctgctttggtctccctggactctaaggcctca

SEQ ID NO: 33843 - DNA, 33 bp, Homo sapien
ggagagggtacaaatacctagtcaacatttgcc

SEQ ID NO: 33844 - DNA, 33 bp, Homo sapien
ggagagggtacaaatatctagtcaacatttgcc

SEQ ID NO: 33845 - DNA, 33 bp, Homo sapien
tgagacatccaaattgaaatgtcctataggcag

SEQ ID NO: 33846 - DNA, 33 bp, Homo sapien
tgagacatccaaattgtaatgtcctataggcag

SEQ ID NO: 33847 - DNA, 33 bp, Homo sapien
tccaatcaatcattcaacttcttagatgtgatt

SEQ ID NO: 33848 - DNA, 33 bp, Homo sapien
tccaatcaatcattcagcttcttagatgtgatt

SEQ ID NO: 33849 - DNA, 33 bp, Homo sapien
gaataaacacccaccaatgatagtagttcactg

SEQ ID NO: 33850 - DNA, 33 bp, Homo sapien
gaataaacacccaccagtgatagtagttcactg

SEQ ID NO: 33851 - DNA, 33 bp, Homo sapien
gactggtggaaaaaaacagaacatctggtatta

SEQ ID NO: 33852 - DNA, 33 bp, Homo sapien
gactggtggaaaaaaatagaacatctggtatta

SEQ ID NO: 33853 - DNA, 33 bp, Homo sapien
aaatccagtttcaaaacccgcaagactgagagc

SEQ ID NO: 33854 - DNA, 33 bp, Homo sapien
aaatccagtttcaaaatccgcaagactgagagc

SEQ ID NO: 33855 - DNA, 33 bp, Homo sapien
ttgtccatgacagacacagtggtacccagcaaa

SEQ ID NO: 33856 - DNA, 33 bp, Homo sapien
ttgtccatgacagacatagtggtacccagcaaa

SEQ ID NO: 33857 - DNA, 33 bp, Homo sapien
ggcactttattgggacccagataagatgctttg

SEQ ID NO: 33858 - DNA, 33 bp, Homo sapien
ggcactttattgggactcagataagatgctttg

SEQ ID NO: 33859 - DNA, 33 bp, Homo sapien
gatatgttttattggccgagtgaagcaaaatca

SEQ ID NO: 33860 - DNA, 33 bp, Homo sapien
gatatgttttattggctgagtgaagcaaaatca

SEQ ID NO: 33861 - DNA, 33 bp, Homo sapien
tggatgaagtgatggaagaaaatgataaactca

SEQ ID NO: 33862 - DNA, 33 bp, Homo sapien
tggatgaagtgatggacgaaaatgataaactca

SEQ ID NO: 33863 - DNA, 33 bp, Homo sapien
aagattgaggctctggaaagatcaaggtaccca

SEQ ID NO: 33864 - DNA, 33 bp, Homo sapien
aagattgaggctctggcaagatcaaggtaccca

SEQ ID NO: 33865 - DNA, 33 bp, Homo sapien
aatattcataccatagcagaaccccactagaat

SEQ ID NO: 33866 - DNA, 33 bp, Homo sapien
aatattcataccataggagaaccccactagaat

SEQ ID NO: 33867 - DNA, 33 bp, Homo sapien
ctttggacttagacctcaagattgatgctggaa

SEQ ID NO: 33868 - DNA, 33 bp, Homo sapien
ctttggacttagaccttaagattgatgctggaa

SEQ ID NO: 33869 - DNA, 33 bp, Homo sapien
agactaaagtcatctaaaagaaaagataaagag

SEQ ID NO: 33870 - DNA, 33 bp, Homo sapien
agactaaagtcatctacaagaaaagataaagag

SEQ ID NO: 33871 - DNA, 33 bp, Homo sapien
aatgcttgttgttagaccaattttatgataaag

SEQ ID NO: 33872 - DNA, 33 bp, Homo sapien
aatgcttgttgttagagcaattttatgataaag

SEQ ID NO: 33873 - DNA, 33 bp, Homo sapien
ctaggatagaaataaaccagaccgggtgtggtg

SEQ ID NO: 33874 - DNA, 33 bp, Homo sapien
ctaggatagaaataaagcagaccgggtgtggtg

SEQ ID NO: 33875 - DNA, 33 bp, Homo sapien
ctcactctgggagaaacggggagtctctggtca

SEQ ID NO: 33876 - DNA, 33 bp, Homo sapien
ctcactctgggagaaatggggagtctctggtca

SEQ ID NO: 33877 - DNA, 33 bp, Homo sapien
ttattagtagacttcaaactacttaggcaccag

SEQ ID NO: 33878 - DNA, 33 bp, Homo sapien
ttattagtagacttcagactacttaggcaccag

SEQ ID NO: 33879 - DNA, 33 bp, Homo sapien
actatgtgaacagccacgtgctaggtattaggg

SEQ ID NO: 33880 - DNA, 33 bp, Homo sapien
actatgtgaacagccatgtgctaggtattaggg

SEQ ID NO: 33881 - DNA, 33 bp, Homo sapien
agagcggcggcgggaaatgttgcgcaggcgcat

SEQ ID NO: 33882 - DNA, 33 bp, Homo sapien
agagcggcggcgggaagtgttgcgcaggcgcat

SEQ ID NO: 33883 - DNA, 33 bp, Homo sapien
gaagccccagaataaccatgactatatgcctag

SEQ ID NO: 33884 - DNA, 33 bp, Homo sapien
gaagccccagaataactatgactatatgcctag

SEQ ID NO: 33885 - DNA, 33 bp, Homo sapien
acaaataaataaatgaaaccatctgttcacact

SEQ ID NO: 33886 - DNA, 33 bp, Homo sapien
acaaataaataaatgagaccatctgttcacact

SEQ ID NO: 33887 - DNA, 33 bp, Homo sapien
aagtctgatgctcagcaaaggagctgggctaga

SEQ ID NO: 33888 - DNA, 33 bp, Homo sapien
aagtctgatgctcagcgaaggagctgggctaga

SEQ ID NO: 33889 - DNA, 33 bp, Homo sapien
tggtagttaaagattacgactagctcaacttga

SEQ ID NO: 33890 - DNA, 33 bp, Homo sapien
tggtagttaaagattatgactagctcaacttga

SEQ ID NO: 33891 - DNA, 33 bp, Homo sapien
cagtaaagtcagtccacgatttgtaactatctt

SEQ ID NO: 33892 - DNA, 33 bp, Homo sapien
cagtaaagtcagtccatgatttgtaactatctt

SEQ ID NO: 33893 - DNA, 33 bp, Homo sapien
atctaaagactatgtacacaatttgtggtgggc

SEQ ID NO: 33894 - DNA, 33 bp, Homo sapien
atctaaagactatgtatacaatttgtggtgggc

SEQ ID NO: 33895 - DNA, 33 bp, Homo sapien
agaaggaccttgcttgcaggaagctgtgcagtt

SEQ ID NO: 33896 - DNA, 33 bp, Homo sapien
agaaggaccttgcttgtaggaagctgtgcagtt

SEQ ID NO: 33897 - DNA, 33 bp, Homo sapien; identical to SEQ ID NO: 33895

SEQ ID NO: 33898 - DNA, 33 bp, Homo sapien; identical to SEQ ID NO: 33896

SEQ ID NO: 33899 - DNA, 33 bp, Homo sapien
acttgtggcattatccacaaccgtcatgtttct

SEQ ID NO: 33900 - DNA, 33 bp, Homo sapien
acttgtggcattatccgcaaccgtcatgtttct

SEQ ID NO: 33901 - DNA, 33 bp, Homo sapien
ttcctcctgcttggacaacggtcttccgcctgg

SEQ ID NO: 33902 - DNA, 33 bp, Homo sapien
ttcctcctgcttggacgacggtcttccgcctgg

SEQ ID NO: 33903 - DNA, 33 bp, Homo sapien
caggtacccactttcaatcttctgatttttcaa

SEQ ID NO: 33904 - DNA, 33 bp, Homo sapien
caggtacccactttcagtcttctgatttttcaa

SEQ ID NO: 33905 - DNA, 33 bp, Homo sapien
ccagggaaaacctataataattacatggtacaa

SEQ ID NO: 33906 - DNA, 33 bp, Homo sapien
ccagggaaaacctatactaattacatggtacaa

SEQ ID NO: 33907 - DNA, 33 bp, Homo sapien
taattcagggccctccgcgtgcgaaggaaactt

SEQ ID NO: 33908 - DNA, 33 bp, Homo sapien
taattcagggccctcctcgtgcgaaggaaactt

SEQ ID NO: 33909 - DNA, 33 bp, Homo sapien
gctggcttgaactgaccggagaaaagcgacttc

SEQ ID NO: 33910 - DNA, 33 bp, Homo sapien
gctggcttgaactgactggagaaaagcgacttc

SEQ ID NO: 33911 - DNA, 33 bp, Homo sapien
cagttgttcacccaacagtgtcttgctgggggg

SEQ ID NO: 33912 - DNA, 33 bp, Homo sapien
cagttgttcacccaactgtgtcttgctgggggg

SEQ ID NO: 33913 - DNA, 33 bp, Homo sapien
gagggaggagtaggtccgaacagtttgcagctg

SEQ ID NO: 33914 - DNA, 33 bp, Homo sapien
gagggaggagtaggtcggaacagtttgcagctg

SEQ ID NO: 33915 - DNA, 33 bp, Homo sapien
catgggtctggtgtgagggggagatccctgtac

SEQ ID NO: 33916 - DNA, 33 bp, Homo sapien
catgggtctggtgtgatggggagatccctgtac

SEQ ID NO: 33917 - DNA, 33 bp, Homo sapien
cagtacttgacctttacggccaagatccaggca

SEQ ID NO: 33918 - DNA, 33 bp, Homo sapien
cagtacttgacctttatggccaagatccaggca

SEQ ID NO: 33919 - DNA, 33 bp, Homo sapien
tcattgcttggtgagaacaaactaaaaaagtaa

SEQ ID NO: 33920 - DNA, 33 bp, Homo sapien
tcattgcttggtgagaccaaactaaaaaagtaa

SEQ ID NO: 33921 - DNA, 33 bp, Homo sapien
cacaacagtttcaatacggtaggtcctatagca

SEQ ID NO: 33922 - DNA, 33 bp, Homo sapien
cacaacagtttcaatagggtaggtcctatagca

SEQ ID NO: 33923 - DNA, 33 bp, Homo sapien
tttgagagtagaaacacaaattcagctagacac

SEQ ID NO: 33924 - DNA, 33 bp, Homo sapien
tttgagagtagaaacataaattcagctagacac

SEQ ID NO: 33925 - DNA, 33 bp, Homo sapien
agccaaattcaagtcacgtgcaagccagggaga

SEQ ID NO: 33926 - DNA, 33 bp, Homo sapien
agccaaattcaagtcatgtgcaagccagggaga

SEQ ID NO: 33927 - DNA, 33 bp, Homo sapien
actgcatcagcccacaatggacatttatgcccc

SEQ ID NO: 33928 - DNA, 33 bp, Homo sapien
actgcatcagcccacagtggacatttatgcccc

SEQ ID NO: 33929 - DNA, 33 bp, Homo sapien
tgcttctggccattcaaatttctccagcagtaa

SEQ ID NO: 33930 - DNA, 33 bp, Homo sapien
tgcttctggccattcagatttctccagcagtaa

SEQ ID NO: 33931 - DNA, 33 bp, Homo sapien
tccactagtccctggtaaccactattctagtca

SEQ ID NO: 33932 - DNA, 33 bp, Homo sapien
tccactagtccctggtgaccactattctagtca

SEQ ID NO: 33933 - DNA, 33 bp, Homo sapien
tccttactgagtctgagtacagcatcaccacat

SEQ ID NO: 33934 - DNA, 33 bp, Homo sapien
tccttactgagtctgattacagcatcaccacat

SEQ ID NO: 33935 - DNA, 33 bp, Homo sapien
aagcatcatttttctcggacctcgtgctgcaat

SEQ ID NO: 33936 - DNA, 33 bp, Homo sapien
aagcatcatttttctctgacctcgtgctgcaat

SEQ ID NO: 33937 - DNA, 33 bp, Homo sapien
tttaaaagacacctgaacaattacgcctaagta

SEQ ID NO: 33938 - DNA, 33 bp, Homo sapien
tttaaaagacacctgaccaattacgcctaagta

SEQ ID NO: 33939 - DNA, 33 bp, Homo sapien
aatgtattgtcaaacacgccagagtctccaggg

SEQ ID NO: 33940 - DNA, 33 bp, Homo sapien
aatgtattgtcaaacatgccagagtctccaggg

SEQ ID NO: 33941 - DNA, 33 bp, Homo sapien
acatgaatgggacagacgacaagccccgggacc

SEQ ID NO: 33942 - DNA, 33 bp, Homo sapien
acatgaatgggacagatgacaagccccgggacc

SEQ ID NO: 33943 - DNA, 33 bp, Homo sapien
aatatttgccgtccaacgaagcatggctgaaat

SEQ ID NO: 33944 - DNA, 33 bp, Homo sapien
aatatttgccgtccaatgaagcatggctgaaat

SEQ ID NO: 33945 - DNA, 33 bp, Homo sapien
ccttctcctaccaagaacattggatttgcaagt

SEQ ID NO: 33946 - DNA, 33 bp, Homo sapien
ccttctcctaccaagagcattggatttgcaagt

SEQ ID NO: 33947 - DNA, 33 bp, Homo sapien
tcagttggacttagtaagctccttgagttcaag

SEQ ID NO: 33948 - DNA, 33 bp, Homo sapien
tcagttggacttagtatgctccttgagttcaag

SEQ ID NO: 33949 - DNA, 33 bp, Homo sapien
ccaatgacaacaaaaccactagcaaaaaaactt

SEQ ID NO: 33950 - DNA, 33 bp, Homo sapien
ccaatgacaacaaaacgactagcaaaaaaactt

SEQ ID NO: 33951 - DNA, 33 bp, Homo sapien
tgaaagtggctggcaaatgcaagggagtaagaa

SEQ ID NO: 33952 - DNA, 33 bp, Homo sapien
tgaaagtggctggcaagtgcaagggagtaagaa

SEQ ID NO: 33953 - DNA, 33 bp, Homo sapien
gtccctgaatatggaccggctacaggcaagctg

SEQ ID NO: 33954 - DNA, 33 bp, Homo sapien
gtccctgaatatggactggctacaggcaagctg

SEQ ID NO: 33955 - DNA, 33 bp, Homo sapien
agagagaaaataactcaatggagagaagcaagc

SEQ ID NO: 33956 - DNA, 33 bp, Homo sapien
agagagaaaataactcgatggagagaagcaagc

SEQ ID NO: 33957 - DNA, 33 bp, Homo sapien
tccttagaactggaagaaactaaaagagatgtc

SEQ ID NO: 33958 - DNA, 33 bp, Homo sapien
tccttagaactggaaggaactaaaagagatgtc

SEQ ID NO: 33959 - DNA, 33 bp, Homo sapien
ttgtgtaactgtcaccacaatctaattttaaaa

SEQ ID NO: 33960 - DNA, 33 bp, Homo sapien
ttgtgtaactgtcaccgcaatctaattttaaaa

SEQ ID NO: 33961 - DNA, 33 bp, Homo sapien
catcaaaggattttgaccagattatcacactga

SEQ ID NO: 33962 - DNA, 33 bp, Homo sapien
catcaaaggattttgagcagattatcacactga

SEQ ID NO: 33963 - DNA, 33 bp, Homo sapien
atctctcctgggaaatcaatcagaatgctgcaa

SEQ ID NO: 33964 - DNA, 33 bp, Homo sapien
atctctcctgggaaattaatcagaatgctgcaa

SEQ ID NO: 33965 - DNA, 33 bp, Homo sapien
cccgtccatcattcaacactaggccaagttctt

SEQ ID NO: 33966 - DNA, 33 bp, Homo sapien
cccgtccatcattcaatactaggccaagttctt

SEQ ID NO: 33967 - DNA, 33 bp, Homo sapien
cttgcatagtaatttgcagagctgtccttgctc

SEQ ID NO: 33968 - DNA, 33 bp, Homo sapien
cttgcatagtaatttgtagagctgtccttgctc

SEQ ID NO: 33969 - DNA, 33 bp, Homo sapien
ttccatcagctaaaacggacatagtctagcttt

SEQ ID NO: 33970 - DNA, 33 bp, Homo sapien
ttccatcagctaaaactgacatagtctagcttt

SEQ ID NO: 33971 - DNA, 33 bp, Homo sapien
gttggggagagatgcgcacctctcaatgttcct

SEQ ID NO: 33972 - DNA, 33 bp, Homo sapien
gttggggagagatgcgtacctctcaatgttcct

SEQ ID NO: 33973 - DNA, 33 bp, Homo sapien
gagtctcggaccagtcccaagtgctgtggaagg

SEQ ID NO: 33974 - DNA, 33 bp, Homo sapien
gagtctcggaccagtctcaagtgctgtggaagg

SEQ ID NO: 33975 - DNA, 33 bp, Homo sapien
aggctgaacctcaagaccagtttcccaagcagg

SEQ ID NO: 33976 - DNA, 33 bp, Homo sapien
aggctgaacctcaagatcagtttcccaagcagg

SEQ ID NO: 33977 - DNA, 33 bp, Homo sapien
tatggaggctgtgacacgaatccaggcacaatg

SEQ ID NO: 33978 - DNA, 33 bp, Homo sapien
tatggaggctgtgacatgaatccaggcacaatg

SEQ ID NO: 33979 - DNA, 33 bp, Homo sapien
tagtcttgtaagccacagcaaggactttggatt

SEQ ID NO: 33980 - DNA, 33 bp, Homo sapien
tagtcttgtaagccacggcaaggactttggatt

SEQ ID NO: 33981 - DNA, 33 bp, Homo sapien
tcagagttctaattccaaaaagaaaatactgta

SEQ ID NO: 33982 - DNA, 33 bp, Homo sapien
tcagagttctaattccgaaaagaaaatactgta

SEQ ID NO: 33983 - DNA, 33 bp, Homo sapien
gatgataaagagccagccatatgaaaatgggca

SEQ ID NO: 33984 - DNA, 33 bp, Homo sapien
gatgataaagagccaggcatatgaaaatgggca

SEQ ID NO: 33985 - DNA, 33 bp, Homo sapien
agcttaacactgttccggctctgtgggtaccca

SEQ ID NO: 33986 - DNA, 33 bp, Homo sapien
agcttaacactgttcctgctctgtgggtaccca

SEQ ID NO: 33987 - DNA, 33 bp, Homo sapien
tgcccaggaagcctgaatatctgctttccgatg

SEQ ID NO: 33988 - DNA, 33 bp, Homo sapien
tgcccaggaagcctgactatctgctttccgatg

SEQ ID NO: 33989 - DNA, 33 bp, Homo sapien
ttttcacttcctctcacgtatatgcctatcctt

SEQ ID NO: 33990 - DNA, 33 bp, Homo sapien
ttttcacttcctctcatgtatatgcctatcctt

SEQ ID NO: 33991 - DNA, 33 bp, Homo sapien
aacacttttccaaccaggatctttctataaggg

SEQ ID NO: 33992 - DNA, 33 bp, Homo sapien
aacacttttccaaccatgatctttctataaggg

SEQ ID NO: 33993 - DNA, 33 bp, Homo sapien
tgctttgatatttggtaaaactttcctcttgaa

SEQ ID NO: 33994 - DNA, 33 bp, Homo sapien
tgctttgatatttggttaaactttcctcttgaa

SEQ ID NO: 33995 - DNA, 33 bp, Homo sapien
actttaggacggccagaaaaatgaattaaagat

SEQ ID NO: 33996 - DNA, 33 bp, Homo sapien
actttaggacggccaggaaaatgaattaaagat

SEQ ID NO: 33997 - DNA, 33 bp, Homo sapien
atgtgacatttggttccacccctcagatgctga

SEQ ID NO: 33998 - DNA, 33 bp, Homo sapien
atgtgacatttggttctacccctcagatgctga

SEQ ID NO: 33999 - DNA, 33 bp, Homo sapien
tcaccttcataatgcaatatagacagtccccat

SEQ ID NO: 34000 - DNA, 33 bp, Homo sapien
tcaccttcataatgcagtatagacagtccccat

SEQ ID NO: 34001 - DNA, 33 bp, Homo sapien
agtaaactgatttccaatcctttcgcagtcata

SEQ ID NO: 34002 - DNA, 33 bp, Homo sapien
agtaaactgatttccagtcctttcgcagtcata

SEQ ID NO: 34003 - DNA, 33 bp, Homo sapien
accttttctgtgtgaaatataaggttgacttgt

SEQ ID NO: 34004 - DNA, 33 bp, Homo sapien
accttttctgtgtgaattataaggttgacttgt

SEQ ID NO: 34005 - DNA, 33 bp, Homo sapien
gtttgcaggccaaaaacacagcaagccgaaagg

SEQ ID NO: 34006 - DNA, 33 bp, Homo sapien
gtttgcaggccaaaaatacagcaagccgaaagg

SEQ ID NO: 34007 - DNA, 33 bp, Homo sapien
aaaactcacagttcccggctaatagtgacttta

SEQ ID NO: 34008 - DNA, 33 bp, Homo sapien
aaaactcacagttccctgctaatagtgacttta

SEQ ID NO: 34009 - DNA, 33 bp, Homo sapien
cagcttgcgggataggaaagtgcactctcttgg

SEQ ID NO: 34010 - DNA, 33 bp, Homo sapien
cagcttgcgggatagggaagtgcactctcttgg

SEQ ID NO: 34011 - DNA, 33 bp, Homo sapien
caaaatgtgtaacagaaggactgcaaatctctt

SEQ ID NO: 34012 - DNA, 33 bp, Homo sapien
caaaatgtgtaacagagggactgcaaatctctt

SEQ ID NO: 34013 - DNA, 33 bp, Homo sapien
gactaaaagacatctacgtatgctgcttgatca

SEQ ID NO: 34014 - DNA, 33 bp, Homo sapien
gactaaaagacatctatgtatgctgcttgatca

SEQ ID NO: 34015 - DNA, 33 bp, Homo sapien
gtattataggtgtgaactattgcacccatccct

SEQ ID NO: 34016 - DNA, 33 bp, Homo sapien
gtattataggtgtgaagtattgcacccatccct

SEQ ID NO: 34017 - DNA, 33 bp, Homo sapien
aagaatatttacacaagaactccagcagggaat

SEQ ID NO: 34018 - DNA, 33 bp, Homo sapien
aagaatatttacacaataactccagcagggaat

SEQ ID NO: 34019 - DNA, 33 bp, Homo sapien
tttagtatctcttctacgggctcaaattttttt

SEQ ID NO: 34020 - DNA, 33 bp, Homo sapien
tttagtatctcttctatgggctcaaattttttt

SEQ ID NO: 34021 - DNA, 33 bp, Homo sapien
ccacgagctcaaaggacggttcttcgtctgtga

SEQ ID NO: 34022 - DNA, 33 bp, Homo sapien
ccacgagctcaaaggatggttcttcgtctgtga

SEQ ID NO: 34023 - DNA, 33 bp, Homo sapien
atatgtgaacactgcacgaagcatccacattag

SEQ ID NO: 34024 - DNA, 33 bp, Homo sapien
atatgtgaacactgcatgaagcatccacattag

SEQ ID NO: 34025 - DNA, 33 bp, Homo sapien
cagccttgtcttggtcaacctctcagggattta

SEQ ID NO: 34026 - DNA, 33 bp, Homo sapien
cagccttgtcttggtcgacctctcagggattta

SEQ ID NO: 34027 - DNA, 33 bp, Homo sapien
aagcctgagtgaagtgcacaagtcccagctaat

SEQ ID NO: 34028 - DNA, 33 bp, Homo sapien
aagcctgagtgaagtgtacaagtcccagctaat

SEQ ID NO: 34029 - DNA, 33 bp, Homo sapien
gagagaggctacaatgcaacctgccaggtggtg

SEQ ID NO: 34030 - DNA, 33 bp, Homo sapien
gagagaggctacaatggaacctgccaggtggtg

SEQ ID NO: 34031 - DNA, 33 bp, Homo sapien
gatcccacttaaacctcaactgagattcttgag

SEQ ID NO: 34032 - DNA, 33 bp, Homo sapien
gatcccacttaaaccttaactgagattcttgag

SEQ ID NO: 34033 - DNA, 33 bp, Homo sapien
gaaggaaattgaagctcacagaagctaaaggat

SEQ ID NO: 34034 - DNA, 33 bp, Homo sapien
gaaggaaattgaagctgacagaagctaaaggat

SEQ ID NO: 34035 - DNA, 33 bp, Homo sapien
cagaccttgcaggagaaaatgctcaagtttgga

SEQ ID NO: 34036 - DNA, 33 bp, Homo sapien
cagaccttgcaggagagaatgctcaagtttgga

SEQ ID NO: 34037 - DNA, 33 bp, Homo sapien
ccacaccttgtgaatacacacagaaacactgaa

SEQ ID NO: 34038 - DNA, 33 bp, Homo sapien
ccacaccttgtgaatatacacagaaacactgaa

SEQ ID NO: 34039 - DNA, 33 bp, Homo sapien
actagatatttcataaatacagatgcaaattca

SEQ ID NO: 34040 - DNA, 33 bp, Homo sapien
actagatatttcataattacagatgcaaattca

SEQ ID NO: 34041 - DNA, 33 bp, Homo sapien
ggcctgagaaaaatccggcttagagaaattaat

SEQ ID NO: 34042 - DNA, 33 bp, Homo sapien
ggcctgagaaaaatcctgcttagagaaattaat

SEQ ID NO: 34043 - DNA, 33 bp, Homo sapien
tttaattctcacgataaccttctacagtaccat

SEQ ID NO: 34044 - DNA, 33 bp, Homo sapien
tttaattctcacgatagccttctacagtaccat

SEQ ID NO: 34045 - DNA, 33 bp, Homo sapien
tgattttcatggaaagccagggctaagatttct

SEQ ID NO: 34046 - DNA, 33 bp, Homo sapien
tgattttcatggaaagtcagggctaagatttct

SEQ ID NO: 34047 - DNA, 33 bp, Homo sapien
tcacacaaacttttgcagacaatgtcagggaat

SEQ ID NO: 34048 - DNA, 33 bp, Homo sapien
tcacacaaacttttgccgacaatgtcagggaat

SEQ ID NO: 34049 - DNA, 33 bp, Homo sapien
ctgatggtgtgagaaaatgcaagcaaatctgat

SEQ ID NO: 34050 - DNA, 33 bp, Homo sapien
ctgatggtgtgagaaagtgcaagcaaatctgat

SEQ ID NO: 34051 - DNA, 33 bp, Homo sapien
agcaaatattccactaccttttagaggcataga

SEQ ID NO: 34052 - DNA, 33 bp, Homo sapien
agcaaatattccactatcttttagaggcataga

SEQ ID NO: 34053 - DNA, 33 bp, Homo sapien
aggggcaggttagggcaccctgttattaacatc

SEQ ID NO: 34054 - DNA, 33 bp, Homo sapien
aggggcaggttagggcgccctgttattaacatc

SEQ ID NO: 34055 - DNA, 33 bp, Homo sapien
cctgtaacagaaagtacggagacgtagaaacat

SEQ ID NO: 34056 - DNA, 33 bp, Homo sapien
cctgtaacagaaagtatggagacgtagaaacat

SEQ ID NO: 34057 - DNA, 33 bp, Homo sapien
gggcatatttatgagacagagtaccatgaaaac

SEQ ID NO: 34058 - DNA, 33 bp, Homo sapien
gggcatatttatgagagagagtaccatgaaaac

SEQ ID NO: 34059 - DNA, 33 bp, Homo sapien
tcaccttttaagaagaaatcgatgcagcttcca

SEQ ID NO: 34060 - DNA, 33 bp, Homo sapien
tcaccttttaagaagacatcgatgcagcttcca

SEQ ID NO: 34061 - DNA, 33 bp, Homo sapien
tgaattgccaaattccccaatgtaagcaaaaag

SEQ ID NO: 34062 - DNA, 33 bp, Homo sapien
tgaattgccaaattcctcaatgtaagcaaaaag

SEQ ID NO: 34063 - DNA, 33 bp, Homo sapien
tgtcaaatcagatggcaaagtctgaatactgaa

SEQ ID NO: 34064 - DNA, 33 bp, Homo sapien
tgtcaaatcagatggcgaagtctgaatactgaa

SEQ ID NO: 34065 - DNA, 33 bp, Homo sapien
aggactccaagcactgcaaagagttattacaaa

SEQ ID NO: 34066 - DNA, 33 bp, Homo sapien
aggactccaagcactggaaagagttattacaaa

SEQ ID NO: 34067 - DNA, 33 bp, Homo sapien
gcaattagataggtcaaaaatagaaaagacaca

SEQ ID NO: 34068 - DNA, 33 bp, Homo sapien
gcaattagataggtcagaaatagaaaagacaca

SEQ ID NO: 34069 - DNA, 33 bp, Homo sapien
cagacacagtgtaggaatcaggggagagggttt

SEQ ID NO: 34070 - DNA, 33 bp, Homo sapien
cagacacagtgtaggagtcaggggagagggttt

SEQ ID NO: 34071 - DNA, 33 bp, Homo sapien
ctgggtacttgatgaacatggagccacgggatc

SEQ ID NO: 34072 - DNA, 33 bp, Homo sapien
ctgggtacttgatgaatatggagccacgggatc

SEQ ID NO: 34073 - DNA, 33 bp, Homo sapien
catagtggttccttccacaatctgtctgcacaa

SEQ ID NO: 34074 - DNA, 33 bp, Homo sapien
catagtggttccttccgcaatctgtctgcacaa

SEQ ID NO: 34075 - DNA, 33 bp, Homo sapien
gtactggaagtgagtcaccacaccgagcactga

SEQ ID NO: 34076 - DNA, 33 bp, Homo sapien
gtactggaagtgagtcgccacaccgagcactga

SEQ ID NO: 34077 - DNA, 33 bp, Homo sapien
aaattcttatcccctcaaaaatgaatgctgtag

SEQ ID NO: 34078 - DNA, 33 bp, Homo sapien
aaattcttatcccctccaaaatgaatgctgtag

SEQ ID NO: 34079 - DNA, 33 bp, Homo sapien
gcatttattgtgtggcagaaaggtggttctttg

SEQ ID NO: 34080 - DNA, 33 bp, Homo sapien
gcatttattgtgtggcggaaaggtggttctttg

SEQ ID NO: 34081 - DNA, 33 bp, Homo sapien
tatctcatgcggcgtgaatacaaagaagcctta

SEQ ID NO: 34082 - DNA, 33 bp, Homo sapien
tatctcatgcggcgtgcatacaaagaagcctta

SEQ ID NO: 34083 - DNA, 33 bp, Homo sapien
gcagtgacagtaatacaggcttaaactagaatt

SEQ ID NO: 34084 - DNA, 33 bp, Homo sapien
gcagtgacagtaatacgggcttaaactagaatt

SEQ ID NO: 34085 - DNA, 33 bp, Homo sapien
agctgccagatacacaagtgatttcaggtgggg

SEQ ID NO: 34086 - DNA, 33 bp, Homo sapien
agctgccagatacacacgtgatttcaggtgggg

SEQ ID NO: 34087 - DNA, 33 bp, Homo sapien
catgaaccaactaaaccactacaaggaaaggaa

SEQ ID NO: 34088 - DNA, 33 bp, Homo sapien
catgaaccaactaaactactacaaggaaaggaa

SEQ ID NO: 34089 - DNA, 33 bp, Homo sapien
aggacaagaaaaagacactgaggcctgtcaaca

SEQ ID NO: 34090 - DNA, 33 bp, Homo sapien
aggacaagaaaaagacgctgaggcctgtcaaca

SEQ ID NO: 34091 - DNA, 33 bp, Homo sapien
cagagcaattttatcaagaccttttccttttgc

SEQ ID NO: 34092 - DNA, 33 bp, Homo sapien
cagagcaattttatcatgaccttttccttttgc

SEQ ID NO: 34093 - DNA, 33 bp, Homo sapien
tgctgtcctaaaataacccaaatcaatcagaaa

SEQ ID NO: 34094 - DNA, 33 bp, Homo sapien
tgctgtcctaaaataatccaaatcaatcagaaa

SEQ ID NO: 34095 - DNA, 33 bp, Homo sapien
ggtgagttcatttctcaaagattcccttgccct

SEQ ID NO: 34096 - DNA, 33 bp, Homo sapien
ggtgagttcatttctcgaagattcccttgccct

SEQ ID NO: 34097 - DNA, 33 bp, Homo sapien
ttagccattccaccaagagcccactggcatcaa

SEQ ID NO: 34098 - DNA, 33 bp, Homo sapien
ttagccattccaccaatagcccactggcatcaa

SEQ ID NO: 34099 - DNA, 33 bp, Homo sapien
ttcagctcatccagaacgcccaaaaaaccattt

SEQ ID NO: 34100 - DNA, 33 bp, Homo sapien
ttcagctcatccagaatgcccaaaaaaccattt

SEQ ID NO: 34101 - DNA, 33 bp, Homo sapien
tgcagtggctaaacagaagctcatcagggcaaa

SEQ ID NO: 34102 - DNA, 33 bp, Homo sapien
tgcagtggctaaacaggagctcatcagggcaaa

SEQ ID NO: 34103 - DNA, 33 bp, Homo sapien
gtgctctgagcaggctaaagtgactggacgaga

SEQ ID NO: 34104 - DNA, 33 bp, Homo sapien
gtgctctgagcaggctgaagtgactggacgaga

SEQ ID NO: 34105 - DNA, 33 bp, Homo sapien
agaaaacaaaaccagcactgattagagactcaa

SEQ ID NO: 34106 - DNA, 33 bp, Homo sapien
agaaaacaaaaccagctctgattagagactcaa

SEQ ID NO: 34107 - DNA, 33 bp, Homo sapien
ctcctcaccttagggaatattgtacccaaccag

SEQ ID NO: 34108 - DNA, 33 bp, Homo sapien
ctcctcaccttagggattattgtacccaaccag

SEQ ID NO: 34109 - DNA, 33 bp, Homo sapien
aaagggaaagagaagacgaataagttcaaggag

SEQ ID NO: 34110 - DNA, 33 bp, Homo sapien
aaagggaaagagaagaggaataagttcaaggag

SEQ ID NO: 34111 - DNA, 33 bp, Homo sapien
ctaaagatttccctcacgctgtacagagaacag

SEQ ID NO: 34112 - DNA, 33 bp, Homo sapien
ctaaagatttccctcatgctgtacagagaacag

SEQ ID NO: 34113 - DNA, 33 bp, Homo sapien
acttggacacctagaacgcagtacaacccttca

SEQ ID NO: 34114 - DNA, 33 bp, Homo sapien
acttggacacctagaatgcagtacaacccttca

SEQ ID NO: 34115 - DNA, 33 bp, Homo sapien
gtctcttttggaatgaagtgaggactattggta

SEQ ID NO: 34116 - DNA, 33 bp, Homo sapien
gtctcttttggaatgaggtgaggactattggta

SEQ ID NO: 34117 - DNA, 33 bp, Homo sapien
ttctagtcagagccaacttggaatgctagaaca

SEQ ID NO: 34118 - DNA, 33 bp, Homo sapien
ttctagtcagagccaatttggaatgctagaaca

SEQ ID NO: 34119 - DNA, 33 bp, Homo sapien
ctcaaaacctgtccacaattcaatctcacatcc

SEQ ID NO: 34120 - DNA, 33 bp, Homo sapien
ctcaaaacctgtccacgattcaatctcacatcc

SEQ ID NO: 34121 - DNA, 33 bp, Homo sapien
agtttacttcaaaggccaagtacagtggctcag

SEQ ID NO: 34122 - DNA, 33 bp, Homo sapien
agtttacttcaaaggctaagtacagtggctcag

SEQ ID NO: 34123 - DNA, 33 bp, Homo sapien
cagtttagagctgaaagaactatatatgtgtat

SEQ ID NO: 34124 - DNA, 33 bp, Homo sapien
cagtttagagctgaaataactatatatgtgtat

SEQ ID NO: 34125 - DNA, 33 bp, Homo sapien
tctgacctgagggaaccgggaccaatttgtcca

SEQ ID NO: 34126 - DNA, 33 bp, Homo sapien
tctgacctgagggaactgggaccaatttgtcca

SEQ ID NO: 34127 - DNA, 33 bp, Homo sapien
ctgtctagaaactgaacaagtatcacaaggagg

SEQ ID NO: 34128 - DNA, 33 bp, Homo sapien
ctgtctagaaactgaataagtatcacaaggagg

SEQ ID NO: 34129 - DNA, 33 bp, Homo sapien
ctcctcccttggtaagaaaaaccagcatcctcc

SEQ ID NO: 34130 - DNA, 33 bp, Homo sapien
ctcctcccttggtaaggaaaaccagcatcctcc

SEQ ID NO: 34131 - DNA, 33 bp, Homo sapien
aatgggcagagagataacctctttagagtaata

SEQ ID NO: 34132 - DNA, 33 bp, Homo sapien
aatgggcagagagataccctctttagagtaata

SEQ ID NO: 34133 - DNA, 33 bp, Homo sapien
caaggtcaacagctagcaatgacaaagcccagg

SEQ ID NO: 34134 - DNA, 33 bp, Homo sapien
caaggtcaacagctagtaatgacaaagcccagg

SEQ ID NO: 34135 - DNA, 33 bp, Homo sapien
tagttgatgatgaattgaatgaagagaaatgga

SEQ ID NO: 34136 - DNA, 33 bp, Homo sapien
tagttgatgatgaatttaatgaagagaaatgga

SEQ ID NO: 34137 - DNA, 33 bp, Homo sapien
aggtactcttctgtacaagtctgctagggctat

SEQ ID NO: 34138 - DNA, 33 bp, Homo sapien
aggtactcttctgtacgagtctgctagggctat

SEQ ID NO: 34139 - DNA, 33 bp, Homo sapien
cgtctcttgcccactcaataactctcaaaataa

SEQ ID NO: 34140 - DNA, 33 bp, Homo sapien
cgtctcttgcccactcgataactctcaaaataa

SEQ ID NO: 34141 - DNA, 33 bp, Homo sapien
tcttcaacaaagtgaactgaacttttcattatc

SEQ ID NO: 34142 - DNA, 33 bp, Homo sapien
tcttcaacaaagtgaattgaacttttcattatc

SEQ ID NO: 34143 - DNA, 33 bp, Homo sapien
ggatgctgtgaaactaaagttgcctgtatgtat

SEQ ID NO: 34144 - DNA, 33 bp, Homo sapien
ggatgctgtgaaactacagttgcctgtatgtat

SEQ ID NO: 34145 - DNA, 33 bp, Homo sapien
gcttgtaatctcgctaagtaaaaaccaaagtgc

SEQ ID NO: 34146 - DNA, 33 bp, Homo sapien
gcttgtaatctcgctatgtaaaaaccaaagtgc

SEQ ID NO: 34147 - DNA, 33 bp, Homo sapien
ttgtgagaagtgtttgaagtctagataggaaga

SEQ ID NO: 34148 - DNA, 33 bp, Homo sapien
ttgtgagaagtgtttggagtctagataggaaga

SEQ ID NO: 34149 - DNA, 33 bp, Homo sapien
aaattctgccaaaggaacaattgtcacgttctt

SEQ ID NO: 34150 - DNA, 33 bp, Homo sapien
aaattctgccaaaggagcaattgtcacgttctt

SEQ ID NO: 34151 - DNA, 33 bp, Homo sapien
ataatctttgccattcaaactagaaagctaaag

SEQ ID NO: 34152 - DNA, 33 bp, Homo sapien
ataatctttgccattcgaactagaaagctaaag

SEQ ID NO: 34153 - DNA, 33 bp, Homo sapien
tcactaccaaactacaaccatatttcaattagt

SEQ ID NO: 34154 - DNA, 33 bp, Homo sapien
tcactaccaaactacagccatatttcaattagt

SEQ ID NO: 34155 - DNA, 33 bp, Homo sapien
cttgaaaatgtatttcaaaaaaagagtagacat

SEQ ID NO: 34156 - DNA, 33 bp, Homo sapien
cttgaaaatgtatttccaaaaaagagtagacat

SEQ ID NO: 34157 - DNA, 33 bp, Homo sapien
tcatcctaacgaagtacatcaattctgccacaa

SEQ ID NO: 34158 - DNA, 33 bp, Homo sapien
tcatcctaacgaagtatatcaattctgccacaa

SEQ ID NO: 34159 - DNA, 33 bp, Homo sapien
ctgtccatctataataaggaaagagggctgtgc

SEQ ID NO: 34160 - DNA, 33 bp, Homo sapien
ctgtccatctataatacggaaagagggctgtgc

SEQ ID NO: 34161 - DNA, 33 bp, Homo sapien
atagaacttaaaggaaaaatctgtgctagacat

SEQ ID NO: 34162 - DNA, 33 bp, Homo sapien
atagaacttaaaggaacaatctgtgctagacat

SEQ ID NO: 34163 - DNA, 33 bp, Homo sapien
ccaggttttcttctaactgaattgtacttacag

SEQ ID NO: 34164 - DNA, 33 bp, Homo sapien
ccaggttttcttctaattgaattgtacttacag

SEQ ID NO: 34165 - DNA, 33 bp, Homo sapien
catattttccaggtggcataactacatgatgga

SEQ ID NO: 34166 - DNA, 33 bp, Homo sapien
catattttccaggtggtataactacatgatgga

SEQ ID NO: 34167 - DNA, 33 bp, Homo sapien
gaaggatatgagtgcaagaggtttaagtttctc

SEQ ID NO: 34168 - DNA, 33 bp, Homo sapien
gaaggatatgagtgcaggaggtttaagtttctc

SEQ ID NO: 34169 - DNA, 33 bp, Homo sapien
aaattggaaaagaggcaaaaatatagctgtttg

SEQ ID NO: 34170 - DNA, 33 bp, Homo sapien
aaattggaaaagaggcgaaaatatagctgtttg

SEQ ID NO: 34171 - DNA, 33 bp, Homo sapien
gggcagatttcagagacacttaagaggtaaaat

SEQ ID NO: 34172 - DNA, 33 bp, Homo sapien
gggcagatttcagagatacttaagaggtaaaat

SEQ ID NO: 34173 - DNA, 33 bp, Homo sapien
cagtttcccagaaataccccttcagcagatgca

SEQ ID NO: 34174 - DNA, 33 bp, Homo sapien
cagtttcccagaaatatcccttcagcagatgca

SEQ ID NO: 34175 - DNA, 33 bp, Homo sapien
caaatgtttaagttgcactactactgtttgaat

SEQ ID NO: 34176 - DNA, 33 bp, Homo sapien
caaatgtttaagttgcgctactactgtttgaat

SEQ ID NO: 34177 - DNA, 33 bp, Homo sapien; identical to SEQ ID NO: 34175

SEQ ID NO: 34178 - DNA, 33 bp, Homo sapien; identical to SEQ ID NO: 34176

SEQ ID NO: 34179 - DNA, 33 bp, Homo sapien
tattgtatgactgttaccatatcccaaacaact

SEQ ID NO: 34180 - DNA, 33 bp, Homo sapien
tattgtatgactgttatcatatcccaaacaact

SEQ ID NO: 34181 - DNA, 33 bp, Homo sapien
ccagagactttcaaataacttgcccagggtcac

SEQ ID NO: 34182 - DNA, 33 bp, Homo sapien
ccagagactttcaaatgacttgcccagggtcac

SEQ ID NO: 34183 - DNA, 33 bp, Homo sapien
ccactaggcatagtcaaataaagtaagaaataa

SEQ ID NO: 34184 - DNA, 33 bp, Homo sapien
ccactaggcatagtcagataaagtaagaaataa

SEQ ID NO: 34185 - DNA, 33 bp, Homo sapien
tcgatggcccagaatacggtctgtgttagtgaa

SEQ ID NO: 34186 - DNA, 33 bp, Homo sapien
tcgatggcccagaatatggtctgtgttagtgaa

SEQ ID NO: 34187 - DNA, 33 bp, Homo sapien
gctctgtgtaggcctactaagtaatgtgtttgc

SEQ ID NO: 34188 - DNA, 33 bp, Homo sapien
gctctgtgtaggcctagtaagtaatgtgtttgc

SEQ ID NO: 34189 - DNA, 33 bp, Homo sapien
tcactggcttctcagacatactccaagctctcc

SEQ ID NO: 34190 - DNA, 33 bp, Homo sapien
tcactggcttctcagatatactccaagctctcc

SEQ ID NO: 34191 - DNA, 33 bp, Homo sapien
tacaaggacctaattacagctataaaatcaaaa

SEQ ID NO: 34192 - DNA, 33 bp, Homo sapien
tacaaggacctaattagagctataaaatcaaaa

SEQ ID NO: 34193 - DNA, 33 bp, Homo sapien
gtgaataattttagagaaagtagcttcccaata

SEQ ID NO: 34194 - DNA, 33 bp, Homo sapien
gtgaataattttagaggaagtagcttcccaata

SEQ ID NO: 34195 - DNA, 33 bp, Homo sapien
ttgtttttggtagagacggaggtgaccaggcag

SEQ ID NO: 34196 - DNA, 33 bp, Homo sapien
ttgtttttggtagagatggaggtgaccaggcag

SEQ ID NO: 34197 - DNA, 33 bp, Homo sapien
atgctatgggtgaatacataaagtttctagttt

SEQ ID NO: 34198 - DNA, 33 bp, Homo sapien
atgctatgggtgaatatataaagtttctagttt

SEQ ID NO: 34199 - DNA, 33 bp, Homo sapien
catttgtaactctaaaatgatggaacacacaaa

SEQ ID NO: 34200 - DNA, 33 bp, Homo sapien
catttgtaactctaaattgatggaacacacaaa

SEQ ID NO: 34201 - DNA, 33 bp, Homo sapien
tttgctagatgatgaaaactgtgatgttaacct

SEQ ID NO: 34202 - DNA, 33 bp, Homo sapien
tttgctagatgatgaacactgtgatgttaacct

SEQ ID NO: 34203 - DNA, 33 bp, Homo sapien
atcatatattattataacatctcttagtcagta

SEQ ID NO: 34204 - DNA, 33 bp, Homo sapien
atcatatattattatagcatctcttagtcagta

SEQ ID NO: 34205 - DNA, 33 bp, Homo sapien
agtcacatggcgttgagcacaaataagagatat

SEQ ID NO: 34206 - DNA, 33 bp, Homo sapien
agtcacatggcgttgatcacaaataagagatat

SEQ ID NO: 34207 - DNA, 33 bp, Homo sapien
atctaaaaaatgtctcgcgtcattactaacagg

SEQ ID NO: 34208 - DNA, 33 bp, Homo sapien
atctaaaaaatgtctctcgtcattactaacagg

SEQ ID NO: 34209 - DNA, 33 bp, Homo sapien
ttatcaattctatggcagaaaaataaagaggtc

SEQ ID NO: 34210 - DNA, 33 bp, Homo sapien
ttatcaattctatggcggaaaaataaagaggtc

SEQ ID NO: 34211 - DNA, 33 bp, Homo sapien
aatttttaagtcacaaattgtagacatttctgg

SEQ ID NO: 34212 - DNA, 33 bp, Homo sapien
aatttttaagtcacaacttgtagacatttctgg

SEQ ID NO: 34213 - DNA, 33 bp, Homo sapien
cccatatgaaaatacaacatgacccattcccac

SEQ ID NO: 34214 - DNA, 33 bp, Homo sapien
cccatatgaaaatacaccatgacccattcccac

SEQ ID NO: 34215 - DNA, 33 bp, Homo sapien
catcaaagattgtggaaagagcctaacatctca

SEQ ID NO: 34216 - DNA, 33 bp, Homo sapien
catcaaagattgtggagagagcctaacatctca

SEQ ID NO: 34217 - DNA, 33 bp, Homo sapien
tactcaaaacttacatcaagggaggatcacttg

SEQ ID NO: 34218 - DNA, 33 bp, Homo sapien
tactcaaaacttacatgaagggaggatcacttg

SEQ ID NO: 34219 - DNA, 33 bp, Homo sapien
aaggttacccacaccacctaattgccaggacca

SEQ ID NO: 34220 - DNA, 33 bp, Homo sapien
aaggttacccacaccatctaattgccaggacca

SEQ ID NO: 34221 - DNA, 33 bp, Homo sapien
agccttgcctgtctaacgtctccttcccctctg

SEQ ID NO: 34222 - DNA, 33 bp, Homo sapien
agccttgcctgtctaatgtctccttcccctctg

SEQ ID NO: 34223 - DNA, 33 bp, Homo sapien
caaacttggaaatcacaatagcttcttaggttt

SEQ ID NO: 34224 - DNA, 33 bp, Homo sapien
caaacttggaaatcacgatagcttcttaggttt

SEQ ID NO: 34225 - DNA, 33 bp, Homo sapien
gcagttctgaaagaggaaagggtttgggatagt

SEQ ID NO: 34226 - DNA, 33 bp, Homo sapien
gcagttctgaaagagggaagggtttgggatagt

SEQ ID NO: 34227 - DNA, 33 bp, Homo sapien
cttggtggcagttgtccacttggatccttagtt

SEQ ID NO: 34228 - DNA, 33 bp, Homo sapien
cttggtggcagttgtctacttggatccttagtt

SEQ ID NO: 34229 - DNA, 33 bp, Homo sapien
gatcaactggtttttggacatgactataagcag

SEQ ID NO: 34230 - DNA, 33 bp, Homo sapien
gatcaactggtttttgtacatgactataagcag

SEQ ID NO: 34231 - DNA, 33 bp, Homo sapien
tacagttgagctggaaacacatggcagggaagt

SEQ ID NO: 34232 - DNA, 33 bp, Homo sapien
tacagttgagctggaaccacatggcagggaagt

SEQ ID NO: 34233 - DNA, 33 bp, Homo sapien
agaactgtagaacctgaattgcctacaataggc

SEQ ID NO: 34234 - DNA, 33 bp, Homo sapien
agaactgtagaacctggattgcctacaataggc

SEQ ID NO: 34235 - DNA, 33 bp, Homo sapien
agtgggatttcacctacgaatgggcactaatgg

SEQ ID NO: 34236 - DNA, 33 bp, Homo sapien
agtgggatttcacctatgaatgggcactaatgg

SEQ ID NO: 34237 - DNA, 33 bp, Homo sapien
ttaaagttgaagtgacaacagtaggctactctt

SEQ ID NO: 34238 - DNA, 33 bp, Homo sapien
ttaaagttgaagtgacgacagtaggctactctt

SEQ ID NO: 34239 - DNA, 33 bp, Homo sapien
taatatgtgagtatagaccttagtgattgtagt

SEQ ID NO: 34240 - DNA, 33 bp, Homo sapien
taatatgtgagtatagtccttagtgattgtagt

SEQ ID NO: 34241 - DNA, 33 bp, Homo sapien
atcctgaataactctgcagattaaaacaaccaa

SEQ ID NO: 34242 - DNA, 33 bp, Homo sapien
atcctgaataactctgtagattaaaacaaccaa

SEQ ID NO: 34243 - DNA, 33 bp, Homo sapien
cttcaaaactctttcaatccaggagctgggcat

SEQ ID NO: 34244 - DNA, 33 bp, Homo sapien
cttcaaaactctttcagtccaggagctgggcat

SEQ ID NO: 34245 - DNA, 33 bp, Homo sapien
cagtgcagtgaggcaagaataagatggaaagaa

SEQ ID NO: 34246 - DNA, 33 bp, Homo sapien
cagtgcagtgaggcaataataagatggaaagaa

SEQ ID NO: 34247 - DNA, 33 bp, Homo sapien
taaatatattctaaacactcactgttatgttag

SEQ ID NO: 34248 - DNA, 33 bp, Homo sapien
taaatatattctaaacgctcactgttatgttag

SEQ ID NO: 34249 - DNA, 33 bp, Homo sapien
acacaagctaatatccagaagagtaaaatccaa

SEQ ID NO: 34250 - DNA, 33 bp, Homo sapien
acacaagctaatatcccgaagagtaaaatccaa

SEQ ID NO: 34251 - DNA, 33 bp, Homo sapien
taacaaacataatgctgaccagaagatctaaaa

SEQ ID NO: 34252 - DNA, 33 bp, Homo sapien
taacaaacataatgcttaccagaagatctaaaa

SEQ ID NO: 34253 - DNA, 33 bp, Homo sapien
aatcatgtgattaaccccataaaattaaggaaa

SEQ ID NO: 34254 - DNA, 33 bp, Homo sapien
aatcatgtgattaacctcataaaattaaggaaa

SEQ ID NO: 34255 - DNA, 33 bp, Homo sapien
ttcttcccagaatccaagaggaaggagggagaa

SEQ ID NO: 34256 - DNA, 33 bp, Homo sapien
ttcttcccagaatccacgaggaaggagggagaa

SEQ ID NO: 34257 - DNA, 33 bp, Homo sapien
ctcagaaatcccaagaatctgtgaagggcaaat

SEQ ID NO: 34258 - DNA, 33 bp, Homo sapien
ctcagaaatcccaagagtctgtgaagggcaaat

SEQ ID NO: 34259 - DNA, 33 bp, Homo sapien
agttctgtattcattaagccgttaactctcttc

SEQ ID NO: 34260 - DNA, 33 bp, Homo sapien
agttctgtattcattatgccgttaactctcttc

SEQ ID NO: 34261 - DNA, 33 bp, Homo sapien
tgaacaatgttctcgacgaattttatttaatta

SEQ ID NO: 34262 - DNA, 33 bp, Homo sapien
tgaacaatgttctcgatgaattttatttaatta

SEQ ID NO: 34263 - DNA, 33 bp, Homo sapien
actaaatcttctttatgacgcagaagttacact

SEQ ID NO: 34264 - DNA, 33 bp, Homo sapien
actaaatcttctttattacgcagaagttacact

SEQ ID NO: 34265 - DNA, 33 bp, Homo sapien
gctcataagtgttgtaactgttcaatatataat

SEQ ID NO: 34266 - DNA, 33 bp, Homo sapien
gctcataagtgttgtacctgttcaatatataat

SEQ ID NO: 34267 - DNA, 33 bp, Homo sapien
cagctacttgcattaacggcactaagctaatga

SEQ ID NO: 34268 - DNA, 33 bp, Homo sapien
cagctacttgcattaatggcactaagctaatga

SEQ ID NO: 34269 - DNA, 33 bp, Homo sapien
aaagaggatcctaaaaggctttgaattaacaag

SEQ ID NO: 34270 - DNA, 33 bp, Homo sapien
aaagaggatcctaaaatgctttgaattaacaag

SEQ ID NO: 34271 - DNA, 33 bp, Homo sapien
ctgtttttgtcatttccatcctcaggaggtttt

SEQ ID NO: 34272 - DNA, 33 bp, Homo sapien
ctgtttttgtcatttctatcctcaggaggtttt

SEQ ID NO: 34273 - DNA, 33 bp, Homo sapien
tagtaacatatgatgaggaactaaataaaatat

SEQ ID NO: 34274 - DNA, 33 bp, Homo sapien
tagtaacatatgatgatgaactaaataaaatat

SEQ ID NO: 34275 - DNA, 33 bp, Homo sapien
aaattatgaaacatgaggtacagagaagttaat

SEQ ID NO: 34276 - DNA, 33 bp, Homo sapien
aaattatgaaacatgatgtacagagaagttaat

SEQ ID NO: 34277 - DNA, 33 bp, Homo sapien
ggcttttcacaggtaacaaaatgaacactgtga

SEQ ID NO: 34278 - DNA, 33 bp, Homo sapien
ggcttttcacaggtaagaaaatgaacactgtga

SEQ ID NO: 34279 - DNA, 33 bp, Homo sapien
aaagtcaacgggaagacgtaacaatcctaaata

SEQ ID NO: 34280 - DNA, 33 bp, Homo sapien
aaagtcaacgggaagatgtaacaatcctaaata

SEQ ID NO: 34281 - DNA, 33 bp, Homo sapien
ggacccttccctgcaacgcccagaaagtgataa

SEQ ID NO: 34282 - DNA, 33 bp, Homo sapien
ggacccttccctgcaatgcccagaaagtgataa

SEQ ID NO: 34283 - DNA, 33 bp, Homo sapien
aggtggcattattaacaaattacagcctatatt

SEQ ID NO: 34284 - DNA, 33 bp, Homo sapien
aggtggcattattaacgaattacagcctatatt

SEQ ID NO: 34285 - DNA, 33 bp, Homo sapien
tcaaaaataaaactaacgagcagagactttatt

SEQ ID NO: 34286 - DNA, 33 bp, Homo sapien
tcaaaaataaaactaatgagcagagactttatt

SEQ ID NO: 34287 - DNA, 33 bp, Homo sapien
ttccatcaacaaaaacaagtcatttgaaataat

SEQ ID NO: 34288 - DNA, 33 bp, Homo sapien
ttccatcaacaaaaacgagtcatttgaaataat

SEQ ID NO: 34289 - DNA, 33 bp, Homo sapien
aaatagggtattataaccttatgggcgcaccat

SEQ ID NO: 34290 - DNA, 33 bp, Homo sapien
aaatagggtattataatcttatgggcgcaccat

SEQ ID NO: 34291 - DNA, 33 bp, Homo sapien
aataggatactcaagaagtttaatatcaactgt

SEQ ID NO: 34292 - DNA, 33 bp, Homo sapien
aataggatactcaagatgtttaatatcaactgt

SEQ ID NO: 34293 - DNA, 33 bp, Homo sapien
ttgttgaaagatgttcagaaaagagattttgac

SEQ ID NO: 34294 - DNA, 33 bp, Homo sapien
ttgttgaaagatgttccgaaaagagattttgac

SEQ ID NO: 34295 - DNA, 33 bp, Homo sapien
gttgaatttatttttacggttgtgatcagtaat

SEQ ID NO: 34296 - DNA, 33 bp, Homo sapien
gttgaatttatttttatggttgtgatcagtaat

SEQ ID NO: 34297 - DNA, 33 bp, Homo sapien
attattttttaactcaacagtcaattatcttta

SEQ ID NO: 34298 - DNA, 33 bp, Homo sapien
attattttttaactcagcagtcaattatcttta

SEQ ID NO: 34299 - DNA, 33 bp, Homo sapien
gccaaaccttttatgaacaaatctagcagggat

SEQ ID NO: 34300 - DNA, 33 bp, Homo sapien
gccaaaccttttatgagcaaatctagcagggat

SEQ ID NO: 34301 - DNA, 33 bp, Homo sapien
atatgccagcaatgaaaaattaaaaatgaagtt

SEQ ID NO: 34302 - DNA, 33 bp, Homo sapien
atatgccagcaatgaacaattaaaaatgaagtt

SEQ ID NO: 34303 - DNA, 33 bp, Homo sapien
cagtcaacagctgacaatactcaacaggaaacg

SEQ ID NO: 34304 - DNA, 33 bp, Homo sapien
cagtcaacagctgacagtactcaacaggaaacg

SEQ ID NO: 34305 - DNA, 33 bp, Homo sapien
catgaaaaaccaaaagccagaaccagtcagcaa

SEQ ID NO: 34306 - DNA, 33 bp, Homo sapien
catgaaaaaccaaaagtcagaaccagtcagcaa

SEQ ID NO: 34307 - DNA, 33 bp, Homo sapien
ttgactcgagtttatcaaaatttcagtcttaag

SEQ ID NO: 34308 - DNA, 33 bp, Homo sapien
ttgactcgagtttatcgaaatttcagtcttaag

SEQ ID NO: 34309 - DNA, 33 bp, Homo sapien
atgcccttggaaccagaaattagaacataaaga

SEQ ID NO: 34310 - DNA, 33 bp, Homo sapien
atgcccttggaaccaggaattagaacataaaga

SEQ ID NO: 34311 - DNA, 33 bp, Homo sapien
tctagcacctcttatcaaacaaagcagattaca

SEQ ID NO: 34312 - DNA, 33 bp, Homo sapien
tctagcacctcttatccaacaaagcagattaca

SEQ ID NO: 34313 - DNA, 33 bp, Homo sapien
ctcccctcatttctacaacatcacgcagaccca

SEQ ID NO: 34314 - DNA, 33 bp, Homo sapien
ctcccctcatttctacgacatcacgcagaccca

SEQ ID NO: 34315 - DNA, 33 bp, Homo sapien
gtgatgtggcagaagcaaagggaaccaggtttg

SEQ ID NO: 34316 - DNA, 33 bp, Homo sapien
gtgatgtggcagaagcgaagggaaccaggtttg

SEQ ID NO: 34317 - DNA, 33 bp, Homo sapien
aatttccaaatttaaacgcaatgacgaaaaaac

SEQ ID NO: 34318 - DNA, 33 bp, Homo sapien
aatttccaaatttaaatgcaatgacgaaaaaac

SEQ ID NO: 34319 - DNA, 33 bp, Homo sapien
gaagatgaatgtaaccaagtatctgccttcaaa

SEQ ID NO: 34320 - DNA, 33 bp, Homo sapien
gaagatgaatgtaaccgagtatctgccttcaaa

SEQ ID NO: 34321 - DNA, 33 bp, Homo sapien
gccattctctacgaaacattgctattacatatg

SEQ ID NO: 34322 - DNA, 33 bp, Homo sapien
gccattctctacgaaatattgctattacatatg

SEQ ID NO: 34323 - DNA, 33 bp, Homo sapien
gccttttttccatcaactacatatcaaacagtt

SEQ ID NO: 34324 - DNA, 33 bp, Homo sapien
gccttttttccatcaattacatatcaaacagtt

SEQ ID NO: 34325 - DNA, 33 bp, Homo sapien
tgctctaagtaaaaagaaagttcagattaaact

SEQ ID NO: 34326 - DNA, 33 bp, Homo sapien
tgctctaagtaaaaaggaagttcagattaaact

SEQ ID NO: 34327 - DNA, 33 bp, Homo sapien
gagaatcacttaagtacaggaatttgagatcag

SEQ ID NO: 34328 - DNA, 33 bp, Homo sapien
gagaatcacttaagtataggaatttgagatcag

SEQ ID NO: 34329 - DNA, 33 bp, Homo sapien
ttaagaatgctaaaacactgaccagtagactca

SEQ ID NO: 34330 - DNA, 33 bp, Homo sapien
ttaagaatgctaaaactctgaccagtagactca

SEQ ID NO: 34331 - DNA, 33 bp, Homo sapien
ctgagggatgatgactaagctaagctctttaag

SEQ ID NO: 34332 - DNA, 33 bp, Homo sapien
ctgagggatgatgactgagctaagctctttaag

SEQ ID NO: 34333 - DNA, 33 bp, Homo sapien
catagagaacggaaggaaacatcatcctccacc

SEQ ID NO: 34334 - DNA, 33 bp, Homo sapien
catagagaacggaaggcaacatcatcctccacc

SEQ ID NO: 34335 - DNA, 33 bp, Homo sapien
caactaaagcacttggccagtccttttattccc

SEQ ID NO: 34336 - DNA, 33 bp, Homo sapien
caactaaagcacttgggcagtccttttattccc

SEQ ID NO: 34337 - DNA, 33 bp, Homo sapien
attaattagggtgaaaatagagttctttgcatg

SEQ ID NO: 34338 - DNA, 33 bp, Homo sapien
attaattagggtgaaagtagagttctttgcatg

SEQ ID NO: 34339 - DNA, 33 bp, Homo sapien
gatatagagatagcacagaggaaagcatgatag

SEQ ID NO: 34340 - DNA, 33 bp, Homo sapien
gatatagagatagcacggaggaaagcatgatag

SEQ ID NO: 34341 - DNA, 33 bp, Homo sapien
cctctggaaggtggataaagaatcaaaaaaatt

SEQ ID NO: 34342 - DNA, 33 bp, Homo sapien
cctctggaaggtggatgaagaatcaaaaaaatt

SEQ ID NO: 34343 - DNA, 33 bp, Homo sapien
cttaggttttcaaagccgcctatttagttaaat

SEQ ID NO: 34344 - DNA, 33 bp, Homo sapien
cttaggttttcaaagctgcctatttagttaaat

SEQ ID NO: 34345 - DNA, 33 bp, Homo sapien
aacatagtccctgtacccactagctaccaagag

SEQ ID NO: 34346 - DNA, 33 bp, Homo sapien
aacatagtccctgtactcactagctaccaagag

SEQ ID NO: 34347 - DNA, 33 bp, Homo sapien
caaatccttgtagtaacgtgctaaataacaagg

SEQ ID NO: 34348 - DNA, 33 bp, Homo sapien
caaatccttgtagtaatgtgctaaataacaagg

SEQ ID NO: 34349 - DNA, 33 bp, Homo sapien
aaaaggtggtaggatcaatgaattgcaagtcct

SEQ ID NO: 34350 - DNA, 33 bp, Homo sapien
aaaaggtggtaggatccatgaattgcaagtcct

SEQ ID NO: 34351 - DNA, 33 bp, Homo sapien
gtaacatcatcagtctcaacgtccaaattaaat

SEQ ID NO: 34352 - DNA, 33 bp, Homo sapien
gtaacatcatcagtcttaacgtccaaattaaat

SEQ ID NO: 34353 - DNA, 33 bp, Homo sapien
gtctggtgtttctcacagtaaaagatataaaca

SEQ ID NO: 34354 - DNA, 33 bp, Homo sapien
gtctggtgtttctcacggtaaaagatataaaca

SEQ ID NO: 34355 - DNA, 33 bp, Homo sapien
agcttcatgtcaatgcacaaaaacatttcagat

SEQ ID NO: 34356 - DNA, 33 bp, Homo sapien
agcttcatgtcaatgcgcaaaaacatttcagat

SEQ ID NO: 34357 - DNA, 33 bp, Homo sapien
gaatatccttagaggacggtgataagacttgca

SEQ ID NO: 34358 - DNA, 33 bp, Homo sapien
gaatatccttagaggatggtgataagacttgca

SEQ ID NO: 34359 - DNA, 33 bp, Homo sapien
ctggcttcttatcccaagagtatcttagaatat

SEQ ID NO: 34360 - DNA, 33 bp, Homo sapien
ctggcttcttatcccatgagtatcttagaatat

SEQ ID NO: 34361 - DNA, 33 bp, Homo sapien
cagggactgaccacaccctcaatggaatctaat

SEQ ID NO: 34362 - DNA, 33 bp, Homo sapien
cagggactgaccacactctcaatggaatctaat

SEQ ID NO: 34363 - DNA, 33 bp, Homo sapien
ggagcaggggtgagggcaaggctctgagattgg

SEQ ID NO: 34364 - DNA, 33 bp, Homo sapien
ggagcaggggtgagggtaaggctctgagattgg

SEQ ID NO: 34365 - DNA, 33 bp, Homo sapien
ggccaagagaggtttaagtgtagcaaaaacaaa

SEQ ID NO: 34366 - DNA, 33 bp, Homo sapien
ggccaagagaggtttaggtgtagcaaaaacaaa

SEQ ID NO: 34367 - DNA, 33 bp, Homo sapien
acagagccttccacagactggtcaaagctaggt

SEQ ID NO: 34368 - DNA, 33 bp, Homo sapien
acagagccttccacagcctggtcaaagctaggt

SEQ ID NO: 34369 - DNA, 33 bp, Homo sapien
gagggcaattttagaacttagggcaatgtggag

SEQ ID NO: 34370 - DNA, 33 bp, Homo sapien
gagggcaattttagaatttagggcaatgtggag

SEQ ID NO: 34371 - DNA, 33 bp, Homo sapien
tgtcgatagtgttcagaaaaagaaaccctggtc

SEQ ID NO: 34372 - DNA, 33 bp, Homo sapien
tgtcgatagtgttcaggaaaagaaaccctggtc

SEQ ID NO: 34373 - DNA, 33 bp, Homo sapien
agagactgatgtttccaaatttctcttgcctcc

SEQ ID NO: 34374 - DNA, 33 bp, Homo sapien
agagactgatgtttcccaatttctcttgcctcc

SEQ ID NO: 34375 - DNA, 33 bp, Homo sapien
tccctttggacttctacgcgcgataaactatct

SEQ ID NO: 34376 - DNA, 33 bp, Homo sapien
tccctttggacttctatgcgcgataaactatct

SEQ ID NO: 34377 - DNA, 33 bp, Homo sapien
aatctgcatttagaccacctacttcctactcaa

SEQ ID NO: 34378 - DNA, 33 bp, Homo sapien
aatctgcatttagaccgcctacttcctactcaa

SEQ ID NO: 34379 - DNA, 33 bp, Homo sapien
caagcaatcagactaactgtggaccaccacttc

SEQ ID NO: 34380 - DNA, 33 bp, Homo sapien
caagcaatcagactaattgtggaccaccacttc

SEQ ID NO: 34381 - DNA, 33 bp, Homo sapien
caaaccatatgaccagaacttcttaatagctgg

SEQ ID NO: 34382 - DNA, 33 bp, Homo sapien
caaaccatatgaccaggacttcttaatagctgg

SEQ ID NO: 34383 - DNA, 33 bp, Homo sapien
taattgaaggcagacccatgtggctggaacaca

SEQ ID NO: 34384 - DNA, 33 bp, Homo sapien
taattgaaggcagacctatgtggctggaacaca

SEQ ID NO: 34385 - DNA, 33 bp, Homo sapien
tctccaactctaaataagtgcttcttgtggtgc

SEQ ID NO: 34386 - DNA, 33 bp, Homo sapien
tctccaactctaaatatgtgcttcttgtggtgc

SEQ ID NO: 34387 - DNA, 33 bp, Homo sapien
caaaattatatcgataaccacctttgtgggcag

SEQ ID NO: 34388 - DNA, 33 bp, Homo sapien
caaaattatatcgatacccacctttgtgggcag

SEQ ID NO: 34389 - DNA, 33 bp, Homo sapien
actaattattatgtaccccaaagaaaggaaatt

SEQ ID NO: 34390 - DNA, 33 bp, Homo sapien
actaattattatgtacgccaaagaaaggaaatt

SEQ ID NO: 34391 - DNA, 33 bp, Homo sapien
gtacctatacacagtgaaggtttgttttttttt

SEQ ID NO: 34392 - DNA, 33 bp, Homo sapien
gtacctatacacagtggaggtttgttttttttt

SEQ ID NO: 34393 - DNA, 33 bp, Homo sapien
ttacatttgagtatagaaaccagttaagaaaag

SEQ ID NO: 34394 - DNA, 33 bp, Homo sapien
ttacatttgagtatagcaaccagttaagaaaag

SEQ ID NO: 34395 - DNA, 33 bp, Homo sapien
agcagtgtgaagcaaaaaaaggaagaagattta

SEQ ID NO: 34396 - DNA, 33 bp, Homo sapien
agcagtgtgaagcaaagaaaggaagaagattta

SEQ ID NO: 34397 - DNA, 33 bp, Homo sapien
gtatttgtcaaagaacaaagttttggccaggca

SEQ ID NO: 34398 - DNA, 33 bp, Homo sapien
gtatttgtcaaagaacgaagttttggccaggca

SEQ ID NO: 34399 - DNA, 33 bp, Homo sapien
catgaactgggcaatacgtaatctacaaaataa

SEQ ID NO: 34400 - DNA, 33 bp, Homo sapien
catgaactgggcaatatgtaatctacaaaataa

SEQ ID NO: 34401 - DNA, 33 bp, Homo sapien
gaaatggtcaatctgccatttgttttttgtttc

SEQ ID NO: 34402 - DNA, 33 bp, Homo sapien
gaaatggtcaatctgctatttgttttttgtttc

SEQ ID NO: 34403 - DNA, 33 bp, Homo sapien
aaatgaatgcgtctgaagtattgaatcactgaa

SEQ ID NO: 34404 - DNA, 33 bp, Homo sapien
aaatgaatgcgtctgaggtattgaatcactgaa

SEQ ID NO: 34405 - DNA, 33 bp, Homo sapien
cccactgtgtagttgaacatatttctctgcatt

SEQ ID NO: 34406 - DNA, 33 bp, Homo sapien
cccactgtgtagttgagcatatttctctgcatt

SEQ ID NO: 34407 - DNA, 33 bp, Homo sapien
atgtttatcctacttacgtttgagttgtgacat

SEQ ID NO: 34408 - DNA, 33 bp, Homo sapien
atgtttatcctacttatgtttgagttgtgacat

SEQ ID NO: 34409 - DNA, 33 bp, Homo sapien
tttccaaactttgatacggttatctttatcgga

SEQ ID NO: 34410 - DNA, 33 bp, Homo sapien
tttccaaactttgatatggttatctttatcgga

SEQ ID NO: 34411 - DNA, 33 bp, Homo sapien
ttttttactttctgacaatcgcaatgaactcta

SEQ ID NO: 34412 - DNA, 33 bp, Homo sapien
ttttttactttctgacgatcgcaatgaactcta

SEQ ID NO: 34413 - DNA, 33 bp, Homo sapien
catgttgtgctactcacgggaatctggatgtag

SEQ ID NO: 34414 - DNA, 33 bp, Homo sapien
catgttgtgctactcatgggaatctggatgtag

SEQ ID NO: 34415 - DNA, 33 bp, Homo sapien
ttatcaaagaaaattaactgccagtcatttgta

SEQ ID NO: 34416 - DNA, 33 bp, Homo sapien
ttatcaaagaaaattacctgccagtcatttgta

SEQ ID NO: 34417 - DNA, 33 bp, Homo sapien
actgatcttaaacctaggattcagtaacttctt

SEQ ID NO: 34418 - DNA, 33 bp, Homo sapien
actgatcttaaacctatgattcagtaacttctt

SEQ ID NO: 34419 - DNA, 33 bp, Homo sapien
cctattcaggagaatgaaacagaaatagaggca

SEQ ID NO: 34420 - DNA, 33 bp, Homo sapien
cctattcaggagaatggaacagaaatagaggca

SEQ ID NO: 34421 - DNA, 33 bp, Homo sapien
aaatgtccaccaccaacaaaatggataataggt

SEQ ID NO: 34422 - DNA, 33 bp, Homo sapien
aaatgtccaccaccaataaaatggataataggt

SEQ ID NO: 34423 - DNA, 33 bp, Homo sapien
tactatctctggacaacgtagctatgaatagtt

SEQ ID NO: 34424 - DNA, 33 bp, Homo sapien
tactatctctggacaatgtagctatgaatagtt

SEQ ID NO: 34425 - DNA, 33 bp, Homo sapien
tgtgcattttctgatgaatttacatagcttttc

SEQ ID NO: 34426 - DNA, 33 bp, Homo sapien
tgtgcattttctgatgcatttacatagcttttc

SEQ ID NO: 34427 - DNA, 33 bp, Homo sapien
cactttgtgaagccaaagtcaatatttagccag

SEQ ID NO: 34428 - DNA, 33 bp, Homo sapien
cactttgtgaagccaacgtcaatatttagccag

SEQ ID NO: 34429 - DNA, 33 bp, Homo sapien
atatgagtgctgaaaaaaaacttaaacattact

SEQ ID NO: 34430 - DNA, 33 bp, Homo sapien
atatgagtgctgaaaagaaacttaaacattact

SEQ ID NO: 34431 - DNA, 33 bp, Homo sapien
tgggattctaattacacctcttgccactaactt

SEQ ID NO: 34432 - DNA, 33 bp, Homo sapien
tgggattctaattacagctcttgccactaactt

SEQ ID NO: 34433 - DNA, 33 bp, Homo sapien
tcagcaaaagaatgaagtatgatgttggatttt

SEQ ID NO: 34434 - DNA, 33 bp, Homo sapien
tcagcaaaagaatgaattatgatgttggatttt

SEQ ID NO: 34435 - DNA, 33 bp, Homo sapien
taagttatttatagcaacaaaatagaagcctga

SEQ ID NO: 34436 - DNA, 33 bp, Homo sapien
taagttatttatagcagcaaaatagaagcctga

SEQ ID NO: 34437 - DNA, 33 bp, Homo sapien
gtctgagataatacaactagctgttaatagtga

SEQ ID NO: 34438 - DNA, 33 bp, Homo sapien
gtctgagataatacaattagctgttaatagtga

SEQ ID NO: 34439 - DNA, 33 bp, Homo sapien
acatgacactgatgccaaaatgttatatttatg

SEQ ID NO: 34440 - DNA, 33 bp, Homo sapien
acatgacactgatgcctaaatgttatatttatg

SEQ ID NO: 34441 - DNA, 33 bp, Homo sapien
cattttcaggtatccacatagctgtgccccatt

SEQ ID NO: 34442 - DNA, 33 bp, Homo sapien
cattttcaggtatccatatagctgtgccccatt

SEQ ID NO: 34443 - DNA, 33 bp, Homo sapien
tttctttacccattcaactggtcatggacactt

SEQ ID NO: 34444 - DNA, 33 bp, Homo sapien
tttctttacccattcagctggtcatggacactt

SEQ ID NO: 34445 - DNA, 33 bp, Homo sapien
aactttttacttgcccggatctagtccattctt

SEQ ID NO: 34446 - DNA, 33 bp, Homo sapien
aactttttacttgccctgatctagtccattctt

SEQ ID NO: 34447 - DNA, 33 bp, Homo sapien
agaacttctgaaaccgaatacagttaaatataa

SEQ ID NO: 34448 - DNA, 33 bp, Homo sapien
agaacttctgaaaccggatacagttaaatataa

SEQ ID NO: 34449 - DNA, 33 bp, Homo sapien
cattctccagtaccttaaacatcacagacaaca

SEQ ID NO: 34450 - DNA, 33 bp, Homo sapien
cattctccagtaccttgaacatcacagacaaca

SEQ ID NO: 34451 - DNA, 33 bp, Homo sapien
aagtgtggcctcagaaaataaaggttacattgg

SEQ ID NO: 34452 - DNA, 33 bp, Homo sapien
aagtgtggcctcagaacataaaggttacattgg

SEQ ID NO: 34453 - DNA, 33 bp, Homo sapien
gccagagaaacgttgaactgtatcataacaaat

SEQ ID NO: 34454 - DNA, 33 bp, Homo sapien
gccagagaaacgttgatctgtatcataacaaat

SEQ ID NO: 34455 - DNA, 33 bp, Homo sapien
ggagggtggagagttacagttgagtagtttcca

SEQ ID NO: 34456 - DNA, 33 bp, Homo sapien
ggagggtggagagttatagttgagtagtttcca

SEQ ID NO: 34457 - DNA, 33 bp, Homo sapien
gaaaaatcttctggaaccacggtatcagttatc

SEQ ID NO: 34458 - DNA, 33 bp, Homo sapien
gaaaaatcttctggaagcacggtatcagttatc

SEQ ID NO: 34459 - DNA, 33 bp, Homo sapien
tcattcagggtcctaaagtacttcagtctttgt

SEQ ID NO: 34460 - DNA, 33 bp, Homo sapien
tcattcagggtcctaaggtacttcagtctttgt

SEQ ID NO: 34461 - DNA, 33 bp, Homo sapien
gtgttaccatgggaacaattaagttttccaagg

SEQ ID NO: 34462 - DNA, 33 bp, Homo sapien
gtgttaccatgggaacgattaagttttccaagg

SEQ ID NO: 34463 - DNA, 33 bp, Homo sapien
atttctaaggatctcacctttccaaaacagaaa

SEQ ID NO: 34464 - DNA, 33 bp, Homo sapien
atttctaaggatctcatctttccaaaacagaaa

SEQ ID NO: 34465 - DNA, 33 bp, Homo sapien
cagtagtgaagtggaaaaagaaaagctattacc

SEQ ID NO: 34466 - DNA, 33 bp, Homo sapien
cagtagtgaagtggaagaagaaaagctattacc

SEQ ID NO: 34467 - DNA, 33 bp, Homo sapien
tacaactttgatacaaacatttttcaatctaaa

SEQ ID NO: 34468 - DNA, 33 bp, Homo sapien
tacaactttgatacaatcatttttcaatctaaa

SEQ ID NO: 34469 - DNA, 33 bp, Homo sapien
cttaatagcagacatccctagaataccaatgac

SEQ ID NO: 34470 - DNA, 33 bp, Homo sapien
cttaatagcagacatctctagaataccaatgac

SEQ ID NO: 34471 - DNA, 33 bp, Homo sapien
cacgattgcccagatacgagaaactgtgagaac

SEQ ID NO: 34472 - DNA, 33 bp, Homo sapien
cacgattgcccagatatgagaaactgtgagaac

SEQ ID NO: 34473 - DNA, 33 bp, Homo sapien
taaaggcacacatacaatgaaaataaagggatg

SEQ ID NO: 34474 - DNA, 33 bp, Homo sapien
taaaggcacacatacagtgaaaataaagggatg

SEQ ID NO: 34475 - DNA, 33 bp, Homo sapien
tatttccccacatccaatcaattctgcagctaa

SEQ ID NO: 34476 - DNA, 33 bp, Homo sapien
tatttccccacatccagtcaattctgcagctaa

SEQ ID NO: 34477 - DNA, 33 bp, Homo sapien
gtagaattttgattcccgactgtggttaatatt

SEQ ID NO: 34478 - DNA, 33 bp, Homo sapien
gtagaattttgattcctgactgtggttaatatt

SEQ ID NO: 34479 - DNA, 33 bp, Homo sapien
tccaatcgactgaaccaaaggataagttagagg

SEQ ID NO: 34480 - DNA, 33 bp, Homo sapien
tccaatcgactgaaccgaaggataagttagagg

SEQ ID NO: 34481 - DNA, 33 bp, Homo sapien
aagccttctcaggctacgcacgtctattctaag

SEQ ID NO: 34482 - DNA, 33 bp, Homo sapien
aagccttctcaggctaggcacgtctattctaag

SEQ ID NO: 34483 - DNA, 33 bp, Homo sapien
ggattaaacgaactaacatggtaagtgtcctgt

SEQ ID NO: 34484 - DNA, 33 bp, Homo sapien
ggattaaacgaactaatatggtaagtgtcctgt

SEQ ID NO: 34485 - DNA, 33 bp, Homo sapien
gtcaggtgctattaaaagtagtaaaaagactga

SEQ ID NO: 34486 - DNA, 33 bp, Homo sapien
gtcaggtgctattaaatgtagtaaaaagactga

SEQ ID NO: 34487 - DNA, 33 bp, Homo sapien
gaggtacaagtaaaaccagaaaagtgtggcata

SEQ ID NO: 34488 - DNA, 33 bp, Homo sapien
gaggtacaagtaaaactagaaaagtgtggcata

SEQ ID NO: 34489 - DNA, 33 bp, Homo sapien
attaattccagacatacgtatttagttgcctac

SEQ ID NO: 34490 - DNA, 33 bp, Homo sapien
attaattccagacatatgtatttagttgcctac

SEQ ID NO: 34491 - DNA, 33 bp, Homo sapien
ggttttaaccattttaacaactgaacttgtaac

SEQ ID NO: 34492 - DNA, 33 bp, Homo sapien
ggttttaaccattttatcaactgaacttgtaac

SEQ ID NO: 34493 - DNA, 33 bp, Homo sapien
ttgaacagaactatgcaaaacaattgaggtaag

SEQ ID NO: 34494 - DNA, 33 bp, Homo sapien
ttgaacagaactatgcgaaacaattgaggtaag

SEQ ID NO: 34495 - DNA, 33 bp, Homo sapien
ataacactgggaaaaaattattaaagcagtcac

SEQ ID NO: 34496 - DNA, 33 bp, Homo sapien
ataacactgggaaaaagttattaaagcagtcac

SEQ ID NO: 34497 - DNA, 33 bp, Homo sapien
gcaggtatatttaatgacagaacaaactatccc

SEQ ID NO: 34498 - DNA, 33 bp, Homo sapien
gcaggtatatttaatggcagaacaaactatccc

SEQ ID NO: 34499 - DNA, 33 bp, Homo sapien
aatacattaccatggacgttgcataagccaata

SEQ ID NO: 34500 - DNA, 33 bp, Homo sapien
aatacattaccatggatgttgcataagccaata

SEQ ID NO: 34501 - DNA, 33 bp, Homo sapien
tagcacttgtaagaaaaatccgtttacgcaaca

SEQ ID NO: 34502 - DNA, 33 bp, Homo sapien
tagcacttgtaagaaagatccgtttacgcaaca

SEQ ID NO: 34503 - DNA, 33 bp, Homo sapien
tctaccctgctttcagacactttgacattttta

SEQ ID NO: 34504 - DNA, 33 bp, Homo sapien
tctaccctgctttcagccactttgacattttta

SEQ ID NO: 34505 - DNA, 33 bp, Homo sapien
attgatcctgttgtcaggcggagaaaagatcac

SEQ ID NO: 34506 - DNA, 33 bp, Homo sapien
attgatcctgttgtcatgcggagaaaagatcac

SEQ ID NO: 34507 - DNA, 33 bp, Homo sapien
gtcggtgtatccaggaagtttcaggcaaatatt

SEQ ID NO: 34508 - DNA, 33 bp, Homo sapien
gtcggtgtatccaggaggtttcaggcaaatatt

SEQ ID NO: 34509 - DNA, 33 bp, Homo sapien
cctggctcagctgtatcactctggacaaattac

SEQ ID NO: 34510 - DNA, 33 bp, Homo sapien
cctggctcagctgtatgactctggacaaattac

SEQ ID NO: 34511 - DNA, 33 bp, Homo sapien
caattctaagaagtggaatttctatgtgaaaac

SEQ ID NO: 34512 - DNA, 33 bp, Homo sapien
caattctaagaagtggcatttctatgtgaaaac

SEQ ID NO: 34513 - DNA, 33 bp, Homo sapien
ccaaatgacgatcacaaagtatattctgggcca

SEQ ID NO: 34514 - DNA, 33 bp, Homo sapien
ccaaatgacgatcacacagtatattctgggcca

SEQ ID NO: 34515 - DNA, 33 bp, Homo sapien
actgcaacacagagtcaaccatgagctcaccct

SEQ ID NO: 34516 - DNA, 33 bp, Homo sapien
actgcaacacagagtcgaccatgagctcaccct

SEQ ID NO: 34517 - DNA, 33 bp, Homo sapien
gcttcaggaaatttgaatagtccttttagaggc

SEQ ID NO: 34518 - DNA, 33 bp, Homo sapien
gcttcaggaaatttgagtagtccttttagaggc

SEQ ID NO: 34519 - DNA, 33 bp, Homo sapien
gaggcctctaaatacaacctaaattctgtaaga

SEQ ID NO: 34520 - DNA, 33 bp, Homo sapien
gaggcctctaaatacatcctaaattctgtaaga

SEQ ID NO: 34521 - DNA, 33 bp, Homo sapien
ctctgtatctgagaaacgctacaaggagccaac

SEQ ID NO: 34522 - DNA, 33 bp, Homo sapien
ctctgtatctgagaaatgctacaaggagccaac

SEQ ID NO: 34523 - DNA, 33 bp, Homo sapien
gctaatgttctgttagaaacaattttgtggtta

SEQ ID NO: 34524 - DNA, 33 bp, Homo sapien
gctaatgttctgttaggaacaattttgtggtta

SEQ ID NO: 34525 - DNA, 33 bp, Homo sapien
aaatccaagaaaccaaatgtgagaatcagactt

SEQ ID NO: 34526 - DNA, 33 bp, Homo sapien
aaatccaagaaaccaagtgtgagaatcagactt

SEQ ID NO: 34527 - DNA, 33 bp, Homo sapien
ctcatttggtggcaaaatgtgacctgaactaca

SEQ ID NO: 34528 - DNA, 33 bp, Homo sapien
ctcatttggtggcaaactgtgacctgaactaca

SEQ ID NO: 34529 - DNA, 33 bp, Homo sapien
actcaccttggtacccccagtgctttgcacatg

SEQ ID NO: 34530 - DNA, 33 bp, Homo sapien
actcaccttggtaccctcagtgctttgcacatg

SEQ ID NO: 34531 - DNA, 33 bp, Homo sapien
tgctgctgccccgaacactgcgcttaggtttat

SEQ ID NO: 34532 - DNA, 33 bp, Homo sapien
tgctgctgccccgaacgctgcgcttaggtttat

SEQ ID NO: 34533 - DNA, 33 bp, Homo sapien
gttctttcatttcaacagcgagttcctactttt

SEQ ID NO: 34534 - DNA, 33 bp, Homo sapien
gttctttcatttcaactgcgagttcctactttt

SEQ ID NO: 34535 - DNA, 33 bp, Homo sapien
gctgtgtaccaaaaagactcactaatccagtgg

SEQ ID NO: 34536 - DNA, 33 bp, Homo sapien
gctgtgtaccaaaaaggctcactaatccagtgg

SEQ ID NO: 34537 - DNA, 33 bp, Homo sapien
caaccgcttgttcctacggcaagacctttgcat

SEQ ID NO: 34538 - DNA, 33 bp, Homo sapien
caaccgcttgttcctatggcaagacctttgcat

SEQ ID NO: 34539 - DNA, 33 bp, Homo sapien
caaggtctttacgttaccctcaataccccctgg

SEQ ID NO: 34540 - DNA, 33 bp, Homo sapien
caaggtctttacgttatcctcaataccccctgg

SEQ ID NO: 34541 - DNA, 33 bp, Homo sapien
gctatcagctcccaaaatgaccttccctcggcc

SEQ ID NO: 34542 - DNA, 33 bp, Homo sapien
gctatcagctcccaaactgaccttccctcggcc

SEQ ID NO: 34543 - DNA, 33 bp, Homo sapien
aagatccattataaagccatagaaatagtagaa

SEQ ID NO: 34544 - DNA, 33 bp, Homo sapien
aagatccattataaagtcatagaaatagtagaa

SEQ ID NO: 34545 - DNA, 33 bp, Homo sapien
agaatagtgtaaccaactccagctttaagagtt

SEQ ID NO: 34546 - DNA, 33 bp, Homo sapien
agaatagtgtaaccaagtccagctttaagagtt

SEQ ID NO: 34547 - DNA, 33 bp, Homo sapien
tggtaagaataatttccagatagtaacacagtc

SEQ ID NO: 34548 - DNA, 33 bp, Homo sapien
tggtaagaataatttcgagatagtaacacagtc

SEQ ID NO: 34549 - DNA, 33 bp, Homo sapien
agccctgtttttgcaagcccgaagcttagaagc

SEQ ID NO: 34550 - DNA, 33 bp, Homo sapien
agccctgtttttgcaatcccgaagcttagaagc

SEQ ID NO: 34551 - DNA, 33 bp, Homo sapien
agttggacgaaatccacgagagaatgaaatatg

SEQ ID NO: 34552 - DNA, 33 bp, Homo sapien
agttggacgaaatccatgagagaatgaaatatg

SEQ ID NO: 34553 - DNA, 33 bp, Homo sapien
cttgttgctcctaatgcaaacttgttaggaaga

SEQ ID NO: 34554 - DNA, 33 bp, Homo sapien
cttgttgctcctaatggaaacttgttaggaaga

SEQ ID NO: 34555 - DNA, 33 bp, Homo sapien
tttgcagttctatcaaaaggtggaatcaatttc

SEQ ID NO: 34556 - DNA, 33 bp, Homo sapien
tttgcagttctatcaacaggtggaatcaatttc

SEQ ID NO: 34557 - DNA, 33 bp, Homo sapien
attggggaatgctctcaaaaaccatacagatga

SEQ ID NO: 34558 - DNA, 33 bp, Homo sapien
attggggaatgctctcgaaaaccatacagatga

SEQ ID NO: 34559 - DNA, 33 bp, Homo sapien
ttgcactgtcaagaagcctaaaaattgtaagtt

SEQ ID NO: 34560 - DNA, 33 bp, Homo sapien
ttgcactgtcaagaagtctaaaaattgtaagtt

SEQ ID NO: 34561 - DNA, 33 bp, Homo sapien
ctcatcacgcttgtaactgctgcttcaaaactg

SEQ ID NO: 34562 - DNA, 33 bp, Homo sapien
ctcatcacgcttgtaattgctgcttcaaaactg

SEQ ID NO: 34563 - DNA, 33 bp, Homo sapien
aacaataactacagaaggagaagcatttgcact

SEQ ID NO: 34564 - DNA, 33 bp, Homo sapien
aacaataactacagaatgagaagcatttgcact

SEQ ID NO: 34565 - DNA, 33 bp, Homo sapien
tgtggggtgaggggaggactaagcagaagacaa

SEQ ID NO: 34566 - DNA, 33 bp, Homo sapien
tgtggggtgaggggagtactaagcagaagacaa

SEQ ID NO: 34567 - DNA, 33 bp, Homo sapien
ctgaggatacgtttcaacaggggtaaataccca

SEQ ID NO: 34568 - DNA, 33 bp, Homo sapien
ctgaggatacgtttcagcaggggtaaataccca

SEQ ID NO: 34569 - DNA, 33 bp, Homo sapien
tgtaaagtgcttctccaatagtagcactttaca

SEQ ID NO: 34570 - DNA, 33 bp, Homo sapien
tgtaaagtgcttctccgatagtagcactttaca

SEQ ID NO: 34571 - DNA, 33 bp, Homo sapien
attgagtgggcattcactaaagaagtgttgaat

SEQ ID NO: 34572 - DNA, 33 bp, Homo sapien
attgagtgggcattcattaaagaagtgttgaat

SEQ ID NO: 34573 - DNA, 33 bp, Homo sapien
gttgcatcctaattgccatatcctttccttcac

SEQ ID NO: 34574 - DNA, 33 bp, Homo sapien
gttgcatcctaattgcgatatcctttccttcac

SEQ ID NO: 34575 - DNA, 33 bp, Homo sapien
tgactgttctgattaccatggctgcatcacaca

SEQ ID NO: 34576 - DNA, 33 bp, Homo sapien
tgactgttctgattacgatggctgcatcacaca

SEQ ID NO: 34577 - DNA, 33 bp, Homo sapien
catcacagtcatgacaagagaccagaaatggcc

SEQ ID NO: 34578 - DNA, 33 bp, Homo sapien
catcacagtcatgacaggagaccagaaatggcc

SEQ ID NO: 34579 - DNA, 33 bp, Homo sapien
gggaaggagaaacctcacagctccctacccatg

SEQ ID NO: 34580 - DNA, 33 bp, Homo sapien
gggaaggagaaacctcgcagctccctacccatg

SEQ ID NO: 34581 - DNA, 33 bp, Homo sapien
atagctataaccagtgcactcttctcttcctaa

SEQ ID NO: 34582 - DNA, 33 bp, Homo sapien
atagctataaccagtgtactcttctcttcctaa

SEQ ID NO: 34583 - DNA, 33 bp, Homo sapien
gggttcttttgcattacgggcttatgggtactt

SEQ ID NO: 34584 - DNA, 33 bp, Homo sapien
gggttcttttgcattatgggcttatgggtactt

SEQ ID NO: 34585 - DNA, 33 bp, Homo sapien
gggagtgctagtcccaacctttagatggccatt

SEQ ID NO: 34586 - DNA, 33 bp, Homo sapien
gggagtgctagtcccaccctttagatggccatt

SEQ ID NO: 34587 - DNA, 33 bp, Homo sapien
tagcactcccacagtcaaagaaatgaaactttt

SEQ ID NO: 34588 - DNA, 33 bp, Homo sapien
tagcactcccacagtcgaagaaatgaaactttt

SEQ ID NO: 34589 - DNA, 33 bp, Homo sapien
aatttcatccagcctcagaaccttgagccaaga

SEQ ID NO: 34590 - DNA, 33 bp, Homo sapien
aatttcatccagcctcggaaccttgagccaaga

SEQ ID NO: 34591 - DNA, 33 bp, Homo sapien
agtaatcagataacaaatgatgaaattatggtt

SEQ ID NO: 34592 - DNA, 33 bp, Homo sapien
agtaatcagataacaagtgatgaaattatggtt

SEQ ID NO: 34593 - DNA, 33 bp, Homo sapien
ccactcctctgtgggagaagagtggtgtggagg

SEQ ID NO: 34594 - DNA, 33 bp, Homo sapien
ccactcctctgtgggataagagtggtgtggagg

SEQ ID NO: 34595 - DNA, 33 bp, Homo sapien
ttcctcctctgggtcactcattcatcaccctcc

SEQ ID NO: 34596 - DNA, 33 bp, Homo sapien
ttcctcctctgggtcattcattcatcaccctcc

SEQ ID NO: 34597 - DNA, 33 bp, Homo sapien
ttgaggcctctagtacaattttgcactactcaa

SEQ ID NO: 34598 - DNA, 33 bp, Homo sapien
ttgaggcctctagtacgattttgcactactcaa

SEQ ID NO: 34599 - DNA, 33 bp, Homo sapien
tctggtctctgacaggaacaaatgctaggcagg

SEQ ID NO: 34600 - DNA, 33 bp, Homo sapien
tctggtctctgacaggtacaaatgctaggcagg

SEQ ID NO: 34601 - DNA, 33 bp, Homo sapien
aggcaagtgttctaggaagccccagactcatct

SEQ ID NO: 34602 - DNA, 33 bp, Homo sapien
aggcaagtgttctaggcagccccagactcatct

SEQ ID NO: 34603 - DNA, 33 bp, Homo sapien
tctcatggtgaaaacaaagaaaagacttcaacc

SEQ ID NO: 34604 - DNA, 33 bp, Homo sapien
tctcatggtgaaaacagagaaaagacttcaacc

SEQ ID NO: 34605 - DNA, 33 bp, Homo sapien
gtcccacagaagcagaatatgtgctctaagtat

SEQ ID NO: 34606 - DNA, 33 bp, Homo sapien
gtcccacagaagcagagtatgtgctctaagtat

SEQ ID NO: 34607 - DNA, 33 bp, Homo sapien
cccaattctatggtcaccatgatggggagcctt

SEQ ID NO: 34608 - DNA, 33 bp, Homo sapien
cccaattctatggtcagcatgatggggagcctt

SEQ ID NO: 34609 - DNA, 33 bp, Homo sapien
aattgggtcagaactcagaaccattctgctgag

SEQ ID NO: 34610 - DNA, 33 bp, Homo sapien
aattgggtcagaactcggaaccattctgctgag

SEQ ID NO: 34611 - DNA, 33 bp, Homo sapien
ctggtacgagactatcaagatccatctttaaca

SEQ ID NO: 34612 - DNA, 33 bp, Homo sapien
ctggtacgagactatcgagatccatctttaaca

SEQ ID NO: 34613 - DNA, 33 bp, Homo sapien
ctgctaaggaaaataagtcataagttagaatgt

SEQ ID NO: 34614 - DNA, 33 bp, Homo sapien
ctgctaaggaaaataattcataagttagaatgt

SEQ ID NO: 34615 - DNA, 33 bp, Homo sapien
gctctaaaacatcacaaaatttagaaaactaaa

SEQ ID NO: 34616 - DNA, 33 bp, Homo sapien
gctctaaaacatcacacaatttagaaaactaaa

SEQ ID NO: 34617 - DNA, 33 bp, Homo sapien
agccaaggaaatgtgacagaagagttttaagag

SEQ ID NO: 34618 - DNA, 33 bp, Homo sapien
agccaaggaaatgtgagagaagagttttaagag

SEQ ID NO: 34619 - DNA, 33 bp, Homo sapien
agtaaaactctatggacactgaaatttgaattt

SEQ ID NO: 34620 - DNA, 33 bp, Homo sapien
agtaaaactctatggatactgaaatttgaattt

SEQ ID NO: 34621 - DNA, 33 bp, Homo sapien
ggaacagggagaaggtaaaagtaagaatctaaa

SEQ ID NO: 34622 - DNA, 33 bp, Homo sapien
ggaacagggagaaggtgaaagtaagaatctaaa

SEQ ID NO: 34623 - DNA, 33 bp, Homo sapien
atgaacactcagattgcatttcctaatgtactc

SEQ ID NO: 34624 - DNA, 33 bp, Homo sapien
atgaacactcagattgtatttcctaatgtactc

SEQ ID NO: 34625 - DNA, 33 bp, Homo sapien
taagggtaaacatcgcaagagagaaaaccagac

SEQ ID NO: 34626 - DNA, 33 bp, Homo sapien
taagggtaaacatcgcgagagagaaaaccagac

SEQ ID NO: 34627 - DNA, 33 bp, Homo sapien
ctcacaaaatggtggacgagttctaagggtaaa

SEQ ID NO: 34628 - DNA, 33 bp, Homo sapien
ctcacaaaatggtggatgagttctaagggtaaa

SEQ ID NO: 34629 - DNA, 33 bp, Homo sapien
actgctcaccctcagcactgctggcacttagga

SEQ ID NO: 34630 - DNA, 33 bp, Homo sapien
actgctcaccctcagcgctgctggcacttagga

SEQ ID NO: 34631 - DNA, 33 bp, Homo sapien
aagattgtggtgttagaaaactttgacgttggt

SEQ ID NO: 34632 - DNA, 33 bp, Homo sapien
aagattgtggtgttaggaaactttgacgttggt

SEQ ID NO: 34633 - DNA, 33 bp, Homo sapien
aagacttttttgacaactagcccttaagttttc

SEQ ID NO: 34634 - DNA, 33 bp, Homo sapien
aagacttttttgacaattagcccttaagttttc

SEQ ID NO: 34635 - DNA, 33 bp, Homo sapien
aacaagcaatagatggcaatactgaaggcattt

SEQ ID NO: 34636 - DNA, 33 bp, Homo sapien
aacaagcaatagatggtaatactgaaggcattt

SEQ ID NO: 34637 - DNA, 33 bp, Homo sapien
caattggttagcaaaggcagtttaaaatgggcg

SEQ ID NO: 34638 - DNA, 33 bp, Homo sapien
caattggttagcaaagtcagtttaaaatgggcg

SEQ ID NO: 34639 - DNA, 33 bp, Homo sapien
aaccttaccattctacaaacgcagttattatac

SEQ ID NO: 34640 - DNA, 33 bp, Homo sapien
aaccttaccattctaccaacgcagttattatac

SEQ ID NO: 34641 - DNA, 33 bp, Homo sapien
gtgatggacagagtaaaaaaataaagagtaggt

SEQ ID NO: 34642 - DNA, 33 bp, Homo sapien
gtgatggacagagtaagaaaataaagagtaggt

SEQ ID NO: 34643 - DNA, 33 bp, Homo sapien
aacaaaacactatagacgctctgaagacaaagt

SEQ ID NO: 34644 - DNA, 33 bp, Homo sapien
aacaaaacactatagatgctctgaagacaaagt

SEQ ID NO: 34645 - DNA, 33 bp, Homo sapien
ccaaacaaacaagaaccatggatatgcaaagtc

SEQ ID NO: 34646 - DNA, 33 bp, Homo sapien
ccaaacaaacaagaactatggatatgcaaagtc

SEQ ID NO: 34647 - DNA, 33 bp, Homo sapien
ctgaactggataataaacagagatgtgggtgta

SEQ ID NO: 34648 - DNA, 33 bp, Homo sapien
ctgaactggataataagcagagatgtgggtgta

SEQ ID NO: 34649 - DNA, 33 bp, Homo sapien
attaatcaactagttacctgcaaggcttctggt

SEQ ID NO: 34650 - DNA, 33 bp, Homo sapien
attaatcaactagttatctgcaaggcttctggt

SEQ ID NO: 34651 - DNA, 33 bp, Homo sapien
gacaacgtgtgaggcaatgagtcctgccaacaa

SEQ ID NO: 34652 - DNA, 33 bp, Homo sapien
gacaacgtgtgaggcactgagtcctgccaacaa

SEQ ID NO: 34653 - DNA, 33 bp, Homo sapien
tacagaattctaaaagcccccaaatacaatatt

SEQ ID NO: 34654 - DNA, 33 bp, Homo sapien
tacagaattctaaaagtccccaaatacaatatt

SEQ ID NO: 34655 - DNA, 33 bp, Homo sapien
tagaaaatttactgtcactaaagacctttggta

SEQ ID NO: 34656 - DNA, 33 bp, Homo sapien
tagaaaatttactgtccctaaagacctttggta

SEQ ID NO: 34657 - DNA, 33 bp, Homo sapien
gtctcatcacccaaataactgtttagatttctg

SEQ ID NO: 34658 - DNA, 33 bp, Homo sapien
gtctcatcacccaaattactgtttagatttctg

SEQ ID NO: 34659 - DNA, 33 bp, Homo sapien
gccttattagataaccaaggacacagtgttttg

SEQ ID NO: 34660 - DNA, 33 bp, Homo sapien
gccttattagataaccgaggacacagtgttttg

SEQ ID NO: 34661 - DNA, 33 bp, Homo sapien
acattaataacattaaaccagctggtcacggta

SEQ ID NO: 34662 - DNA, 33 bp, Homo sapien
acattaataacattaagccagctggtcacggta

SEQ ID NO: 34663 - DNA, 33 bp, Homo sapien
acaagacttaaaatcaatcattacctgttcatc

SEQ ID NO: 34664 - DNA, 33 bp, Homo sapien
acaagacttaaaatcagtcattacctgttcatc

SEQ ID NO: 34665 - DNA, 33 bp, Homo sapien
atgacatttactgccacagaactaattctattc

SEQ ID NO: 34666 - DNA, 33 bp, Homo sapien
atgacatttactgccatagaactaattctattc

SEQ ID NO: 34667 - DNA, 33 bp, Homo sapien
aagttcttctttttgacaagtgagccagccatt

SEQ ID NO: 34668 - DNA, 33 bp, Homo sapien
aagttcttctttttgataagtgagccagccatt

SEQ ID NO: 34669 - DNA, 33 bp, Homo sapien
atactagaggaaaataaggggaatatttgtgtt

SEQ ID NO: 34670 - DNA, 33 bp, Homo sapien
atactagaggaaaatagggggaatatttgtgtt

SEQ ID NO: 34671 - DNA, 33 bp, Homo sapien
aaggctctaccagcaaagtcaaaatggctcaca

SEQ ID NO: 34672 - DNA, 33 bp, Homo sapien
aaggctctaccagcaaggtcaaaatggctcaca

SEQ ID NO: 34673 - DNA, 33 bp, Homo sapien
catcatgataaggtagaccctgttattatcacc

SEQ ID NO: 34674 - DNA, 33 bp, Homo sapien
catcatgataaggtaggccctgttattatcacc

SEQ ID NO: 34675 - DNA, 33 bp, Homo sapien
ttcttcttttgtgggccgacaccatgggataaa

SEQ ID NO: 34676 - DNA, 33 bp, Homo sapien
ttcttcttttgtgggctgacaccatgggataaa

SEQ ID NO: 34677 - DNA, 33 bp, Homo sapien
tcacagaagcttggagaagttcatgggagccag

SEQ ID NO: 34678 - DNA, 33 bp, Homo sapien
tcacagaagcttggaggagttcatgggagccag

SEQ ID NO: 34679 - DNA, 33 bp, Homo sapien
actctcagcttggggacccaactcagaaccaca

SEQ ID NO: 34680 - DNA, 33 bp, Homo sapien
actctcagcttggggatccaactcagaaccaca

SEQ ID NO: 34681 - DNA, 33 bp, Homo sapien
aggatggcccccaataccatcaaggccaaaatc

SEQ ID NO: 34682 - DNA, 33 bp, Homo sapien
aggatggcccccaatatcatcaaggccaaaatc

SEQ ID NO: 34683 - DNA, 33 bp, Homo sapien
gagaaacagccatgtcccttgaacaagacagta

SEQ ID NO: 34684 - DNA, 33 bp, Homo sapien
gagaaacagccatgtctcttgaacaagacagta

SEQ ID NO: 34685 - DNA, 33 bp, Homo sapien
gtaaacccaggtgtcacaggtatggtgtgctgg

SEQ ID NO: 34686 - DNA, 33 bp, Homo sapien
gtaaacccaggtgtcataggtatggtgtgctgg

SEQ ID NO: 34687 - DNA, 33 bp, Homo sapien
ggcaggaactccttgacaagattctccccagtc

SEQ ID NO: 34688 - DNA, 33 bp, Homo sapien
ggcaggaactccttgataagattctccccagtc

SEQ ID NO: 34689 - DNA, 33 bp, Homo sapien
agaccttttaaccttaacctgacaagaagcttg

SEQ ID NO: 34690 - DNA, 33 bp, Homo sapien
agaccttttaaccttagcctgacaagaagcttg

SEQ ID NO: 34691 - DNA, 33 bp, Homo sapien
ccctggatgttatccaatgagtagctggttgga

SEQ ID NO: 34692 - DNA, 33 bp, Homo sapien
ccctggatgttatccagtgagtagctggttgga

SEQ ID NO: 34693 - DNA, 33 bp, Homo sapien
ggatgggctcctcaccaaccattcagatctctg

SEQ ID NO: 34694 - DNA, 33 bp, Homo sapien
ggatgggctcctcaccgaccattcagatctctg

SEQ ID NO: 34695 - DNA, 33 bp, Homo sapien
cattaaagatgtccccagagtgcccagaatcct

SEQ ID NO: 34696 - DNA, 33 bp, Homo sapien
cattaaagatgtccccggagtgcccagaatcct

SEQ ID NO: 34697 - DNA, 33 bp, Homo sapien
aacaaaacaatcccacaaaggcttaatttgtga

SEQ ID NO: 34698 - DNA, 33 bp, Homo sapien
aacaaaacaatcccacgaaggcttaatttgtga

SEQ ID NO: 34699 - DNA, 33 bp, Homo sapien
ttcacataaatgctcaccaagattcagaaaata

SEQ ID NO: 34700 - DNA, 33 bp, Homo sapien
ttcacataaatgctcatcaagattcagaaaata

SEQ ID NO: 34701 - DNA, 33 bp, Homo sapien
tgtgattttcatggaaaaataaaatgcaaatgc

SEQ ID NO: 34702 - DNA, 33 bp, Homo sapien
tgtgattttcatggaagaataaaatgcaaatgc

SEQ ID NO: 34703 - DNA, 33 bp, Homo sapien
aatgcctggatcttagaaccagggagacctgat

SEQ ID NO: 34704 - DNA, 33 bp, Homo sapien
aatgcctggatcttagtaccagggagacctgat

SEQ ID NO: 34705 - DNA, 33 bp, Homo sapien
agtgagttttgataaacgtgcattccatgtgtg

SEQ ID NO: 34706 - DNA, 33 bp, Homo sapien
agtgagttttgataaatgtgcattccatgtgtg

SEQ ID NO: 34707 - DNA, 33 bp, Homo sapien
atgtgtaattaacatacgatgaaacacaggttc

SEQ ID NO: 34708 - DNA, 33 bp, Homo sapien
atgtgtaattaacatatgatgaaacacaggttc

SEQ ID NO: 34709 - DNA, 33 bp, Homo sapien
tatgtgctgttcctcccaccaaccagcttagtg

SEQ ID NO: 34710 - DNA, 33 bp, Homo sapien
tatgtgctgttcctcctaccaaccagcttagtg

SEQ ID NO: 34711 - DNA, 33 bp, Homo sapien
ataggccacaggtccccgatctgttgagataag

SEQ ID NO: 34712 - DNA, 33 bp, Homo sapien
ataggccacaggtcccggatctgttgagataag

SEQ ID NO: 34713 - DNA, 33 bp, Homo sapien
ttgaggcagtggtagcagccctccctcatccca

SEQ ID NO: 34714 - DNA, 33 bp, Homo sapien
ttgaggcagtggtagcggccctccctcatccca

SEQ ID NO: 34715 - DNA, 33 bp, Homo sapien
tgacttgtttttctccagagctgtgtgaaccaa

SEQ ID NO: 34716 - DNA, 33 bp, Homo sapien
tgacttgtttttctccggagctgtgtgaaccaa

SEQ ID NO: 34717 - DNA, 33 bp, Homo sapien
atgttaatgttccacacattcaaaaaaaatcag

SEQ ID NO: 34718 - DNA, 33 bp, Homo sapien
atgttaatgttccacatattcaaaaaaaatcag

SEQ ID NO: 34719 - DNA, 33 bp, Homo sapien
ggctatggaggccaaaaaatcaaattcatcctg

SEQ ID NO: 34720 - DNA, 33 bp, Homo sapien
ggctatggaggccaaagaatcaaattcatcctg

SEQ ID NO: 34721 - DNA, 33 bp, Homo sapien
cttgtaagggaaggcactctctgagccagctgt

SEQ ID NO: 34722 - DNA, 33 bp, Homo sapien
cttgtaagggaaggcattctctgagccagctgt

SEQ ID NO: 34723 - DNA, 33 bp, Homo sapien
tgctgctctgtcacacactgtattatggaggat

SEQ ID NO: 34724 - DNA, 33 bp, Homo sapien
tgctgctctgtcacacgctgtattatggaggat

SEQ ID NO: 34725 - DNA, 33 bp, Homo sapien
atagcagctgtgtatcggataatttacatgaaa

SEQ ID NO: 34726 - DNA, 33 bp, Homo sapien
atagcagctgtgtatctgataatttacatgaaa

SEQ ID NO: 34727 - DNA, 33 bp, Homo sapien
cttagcaaatgttggccaaatgggtgcagcctc

SEQ ID NO: 34728 - DNA, 33 bp, Homo sapien
cttagcaaatgttggctaaatgggtgcagcctc

SEQ ID NO: 34729 - DNA, 33 bp, Homo sapien
agagtatgtgttggtcaagcagagccaggggca

SEQ ID NO: 34730 - DNA, 33 bp, Homo sapien
agagtatgtgttggtcgagcagagccaggggca

SEQ ID NO: 34731 - DNA, 33 bp, Homo sapien
ctgaggccgagatggacgaattactcattcaaa

SEQ ID NO: 34732 - DNA, 33 bp, Homo sapien
ctgaggccgagatggatgaattactcattcaaa

SEQ ID NO: 34733 - DNA, 33 bp, Homo sapien
gtcctgtcagtgacaacgagagaagtcccacat

SEQ ID NO: 34734 - DNA, 33 bp, Homo sapien
gtcctgtcagtgacaatgagagaagtcccacat

SEQ ID NO: 34735 - DNA, 33 bp, Homo sapien
gggcaagaaccagagacgggcttcctcaggggg

SEQ ID NO: 34736 - DNA, 33 bp, Homo sapien
gggcaagaaccagagatgggcttcctcaggggg

SEQ ID NO: 34737 - DNA, 33 bp, Homo sapien
tggctgaaactgtgcaagaagagcctcagcttg

SEQ ID NO: 34738 - DNA, 33 bp, Homo sapien
tggctgaaactgtgcaggaagagcctcagcttg

SEQ ID NO: 34739 - DNA, 33 bp, Homo sapien
cgacatctccaaagtacgctcttctgaggaaat

SEQ ID NO: 34740 - DNA, 33 bp, Homo sapien
cgacatctccaaagtatgctcttctgaggaaat

SEQ ID NO: 34741 - DNA, 33 bp, Homo sapien
cccaacatttatgtggaaagtaagtttacattt

SEQ ID NO: 34742 - DNA, 33 bp, Homo sapien
cccaacatttatgtggcaagtaagtttacattt

SEQ ID NO: 34743 - DNA, 33 bp, Homo sapien
tagtcaggcacatatgaacatccgactttcaaa

SEQ ID NO: 34744 - DNA, 33 bp, Homo sapien
tagtcaggcacatatgcacatccgactttcaaa

SEQ ID NO: 34745 - DNA, 33 bp, Homo sapien
tttttgacttgcttaactaccatgaatgagaaa

SEQ ID NO: 34746 - DNA, 33 bp, Homo sapien
tttttgacttgcttaattaccatgaatgagaaa

SEQ ID NO: 34747 - DNA, 33 bp, Homo sapien
tgtgtacggtctagaacctgcccaggaaagcac

SEQ ID NO: 34748 - DNA, 33 bp, Homo sapien
tgtgtacggtctagaatctgcccaggaaagcac

SEQ ID NO: 34749 - DNA, 33 bp, Homo sapien
cacttacaaacccaacaaaaaaggctatggcta

SEQ ID NO: 34750 - DNA, 33 bp, Homo sapien
cacttacaaacccaacgaaaaaggctatggcta

SEQ ID NO: 34751 - DNA, 33 bp, Homo sapien
ggcccattatcaaccacggacacagccttcttt

SEQ ID NO: 34752 - DNA, 33 bp, Homo sapien
ggcccattatcaaccagggacacagccttcttt

SEQ ID NO: 34753 - DNA, 33 bp, Homo sapien
gatgtacattcaaatgcaaatgtgtttacacac

SEQ ID NO: 34754 - DNA, 33 bp, Homo sapien
gatgtacattcaaatggaaatgtgtttacacac

SEQ ID NO: 34755 - DNA, 33 bp, Homo sapien
aggtagtgaatgtccccgcacacaagtgtggaa

SEQ ID NO: 34756 - DNA, 33 bp, Homo sapien
aggtagtgaatgtccctgcacacaagtgtggaa

SEQ ID NO: 34757 - DNA, 33 bp, Homo sapien
tctattttctttgctaagggaggtccaacttac

SEQ ID NO: 34758 - DNA, 33 bp, Homo sapien
tctattttctttgctaggggaggtccaacttac

SEQ ID NO: 34759 - DNA, 33 bp, Homo sapien
tgttaccaagaatcaaaataagggtttggaaag

SEQ ID NO: 34760 - DNA, 33 bp, Homo sapien
tgttaccaagaatcaagataagggtttggaaag

SEQ ID NO: 34761 - DNA, 33 bp, Homo sapien
gttaggtctagatgggaacactttggatgaatg

SEQ ID NO: 34762 - DNA, 33 bp, Homo sapien
gttaggtctagatggggacactttggatgaatg

SEQ ID NO: 34763 - DNA, 33 bp, Homo sapien
tcttcttcacatggaaaatgaagctaatgacct

SEQ ID NO: 34764 - DNA, 33 bp, Homo sapien
tcttcttcacatggaacatgaagctaatgacct

SEQ ID NO: 34765 - DNA, 33 bp, Homo sapien
accaagtcactgataaacccccttctgagtgta

SEQ ID NO: 34766 - DNA, 33 bp, Homo sapien
accaagtcactgataatcccccttctgagtgta

SEQ ID NO: 34767 - DNA, 33 bp, Homo sapien
attattccattgtatgaatgaactatgtaagcc

SEQ ID NO: 34768 - DNA, 33 bp, Homo sapien
attattccattgtatgcatgaactatgtaagcc

SEQ ID NO: 34769 - DNA, 33 bp, Homo sapien
gtggtggtaattcccaagcctggcttcgatcaa

SEQ ID NO: 34770 - DNA, 33 bp, Homo sapien
gtggtggtaattcccatgcctggcttcgatcaa

SEQ ID NO: 34771 - DNA, 33 bp, Homo sapien
gattatttacttatcaccatcatggtcacctcc

SEQ ID NO: 34772 - DNA, 33 bp, Homo sapien
gattatttacttatcatcatcatggtcacctcc

SEQ ID NO: 34773 - DNA, 33 bp, Homo sapien
ccactagtgggaaaagaagtcaaagggcatctt

SEQ ID NO: 34774 - DNA, 33 bp, Homo sapien
ccactagtgggaaaaggagtcaaagggcatctt

SEQ ID NO: 34775 - DNA, 33 bp, Homo sapien
tatgtcctcttatgccacgtcagcacagggttg

SEQ ID NO: 34776 - DNA, 33 bp, Homo sapien
tatgtcctcttatgcctcgtcagcacagggttg

SEQ ID NO: 34777 - DNA, 33 bp, Homo sapien
tgtggctggctcatagcagcttcaatatcagtc

SEQ ID NO: 34778 - DNA, 33 bp, Homo sapien
tgtggctggctcatagtagcttcaatatcagtc

SEQ ID NO: 34779 - DNA, 33 bp, Homo sapien
cccaaacagaatgtacgcagggaatgtattttt

SEQ ID NO: 34780 - DNA, 33 bp, Homo sapien
cccaaacagaatgtactcagggaatgtattttt

SEQ ID NO: 34781 - DNA, 33 bp, Homo sapien
attaataggctgtaccccaccaataacaagctc

SEQ ID NO: 34782 - DNA, 33 bp, Homo sapien
attaataggctgtacctcaccaataacaagctc

SEQ ID NO: 34783 - DNA, 33 bp, Homo sapien
gaagctgtttctcacagaggtcatcatgttagg

SEQ ID NO: 34784 - DNA, 33 bp, Homo sapien
gaagctgtttctcacataggtcatcatgttagg

SEQ ID NO: 34785 - DNA, 33 bp, Homo sapien
tgttattctgataagaccatttactcacacatc

SEQ ID NO: 34786 - DNA, 33 bp, Homo sapien
tgttattctgataagatcatttactcacacatc

SEQ ID NO: 34787 - DNA, 33 bp, Homo sapien
aagctatgcagacaaaaagcaaccaggtcctag

SEQ ID NO: 34788 - DNA, 33 bp, Homo sapien
aagctatgcagacaaagagcaaccaggtcctag

SEQ ID NO: 34789 - DNA, 33 bp, Homo sapien
ctgatttacttatgcgcagcctccctggagaca

SEQ ID NO: 34790 - DNA, 33 bp, Homo sapien
ctgatttacttatgcgtagcctccctggagaca

SEQ ID NO: 34791 - DNA, 33 bp, Homo sapien
aatctcagtaaaccaccgtgacggcatctaccc

SEQ ID NO: 34792 - DNA, 33 bp, Homo sapien
aatctcagtaaaccactgtgacggcatctaccc

SEQ ID NO: 34793 - DNA, 33 bp, Homo sapien
gaaagctctgccgtagccggcctcagttaacca

SEQ ID NO: 34794 - DNA, 33 bp, Homo sapien
gaaagctctgccgtagtcggcctcagttaacca

SEQ ID NO: 34795 - DNA, 33 bp, Homo sapien
ttgaagttcgaccacacagtggcacagtggctt

SEQ ID NO: 34796 - DNA, 33 bp, Homo sapien
ttgaagttcgaccacagagtggcacagtggctt

SEQ ID NO: 34797 - DNA, 33 bp, Homo sapien
gatctattcagtctcccagttttggcagggtct

SEQ ID NO: 34798 - DNA, 33 bp, Homo sapien
gatctattcagtctcctagttttggcagggtct

SEQ ID NO: 34799 - DNA, 33 bp, Homo sapien
tggatctgcttttggaatcaagagtccttaagc

SEQ ID NO: 34800 - DNA, 33 bp, Homo sapien
tggatctgcttttggagtcaagagtccttaagc

SEQ ID NO: 34801 - DNA, 33 bp, Homo sapien
caggggccaagtattaagagtaatcagaaactc

SEQ ID NO: 34802 - DNA, 33 bp, Homo sapien
caggggccaagtattaggagtaatcagaaactc

SEQ ID NO: 34803 - DNA, 33 bp, Homo sapien
aacaaccagcataaaaaagagcagcatgggaca

SEQ ID NO: 34804 - DNA, 33 bp, Homo sapien
aacaaccagcataaaagagagcagcatgggaca

SEQ ID NO: 34805 - DNA, 33 bp, Homo sapien
agagtctttcaaagagaacacattctgagattt

SEQ ID NO: 34806 - DNA, 33 bp, Homo sapien
agagtctttcaaagagtacacattctgagattt

SEQ ID NO: 34807 - DNA, 33 bp, Homo sapien
ccatagcttttcttccaaatagaaactgtaaaa

SEQ ID NO: 34808 - DNA, 33 bp, Homo sapien
ccatagcttttcttccgaatagaaactgtaaaa

SEQ ID NO: 34809 - DNA, 33 bp, Homo sapien
ttttccttctgttttccccacgctccaggtcaa

SEQ ID NO: 34810 - DNA, 33 bp, Homo sapien
ttttccttctgttttctccacgctccaggtcaa

SEQ ID NO: 34811 - DNA, 33 bp, Homo sapien
tcctggtttatgcagacgttttctgtcatcatt

SEQ ID NO: 34812 - DNA, 33 bp, Homo sapien
tcctggtttatgcagatgttttctgtcatcatt

SEQ ID NO: 34813 - DNA, 33 bp, Homo sapien
aaagaagtgtcttttaaagtatggcctgcctat

SEQ ID NO: 34814 - DNA, 33 bp, Homo sapien
aaagaagtgtcttttatagtatggcctgcctat

SEQ ID NO: 34815 - DNA, 33 bp, Homo sapien
aaatcatgtagcatgcaaatagaaaagttgggg

SEQ ID NO: 34816 - DNA, 33 bp, Homo sapien
aaatcatgtagcatgccaatagaaaagttgggg

SEQ ID NO: 34817 - DNA, 33 bp, Homo sapien
ttttcattctttcccaccacatgagtctttgac

SEQ ID NO: 34818 - DNA, 33 bp, Homo sapien
ttttcattctttcccatcacatgagtctttgac

SEQ ID NO: 34819 - DNA, 33 bp, Homo sapien
tcaactttttgcagaagctgatgacattgtgta

SEQ ID NO: 34820 - DNA, 33 bp, Homo sapien
tcaactttttgcagaatctgatgacattgtgta

SEQ ID NO: 34821 - DNA, 33 bp, Homo sapien
gcctgtctgggttaagccaataatttggtgggc

SEQ ID NO: 34822 - DNA, 33 bp, Homo sapien
gcctgtctgggttaagtcaataatttggtgggc

SEQ ID NO: 34823 - DNA, 33 bp, Homo sapien
ttagtattctcaaaaaacttcacaggtagttgt

SEQ ID NO: 34824 - DNA, 33 bp, Homo sapien
ttagtattctcaaaaagcttcacaggtagttgt

SEQ ID NO: 34825 - DNA, 33 bp, Homo sapien
ggtgaccttaatgcagaaccaaaattaaaaacc

SEQ ID NO: 34826 - DNA, 33 bp, Homo sapien
ggtgaccttaatgcaggaccaaaattaaaaacc

SEQ ID NO: 34827 - DNA, 33 bp, Homo sapien
acttgtgtatgttgtccaggaaaaataaaagac

SEQ ID NO: 34828 - DNA, 33 bp, Homo sapien
acttgtgtatgttgtctaggaaaaataaaagac

SEQ ID NO: 34829 - DNA, 33 bp, Homo sapien
tacatcctgtctagaacagacacgccttaaata

SEQ ID NO: 34830 - DNA, 33 bp, Homo sapien
tacatcctgtctagaagagacacgccttaaata

SEQ ID NO: 34831 - DNA, 33 bp, Homo sapien
agaaagaaaaggatgacgacctctagaaaaggt

SEQ ID NO: 34832 - DNA, 33 bp, Homo sapien
agaaagaaaaggatgatgacctctagaaaaggt

SEQ ID NO: 34833 - DNA, 33 bp, Homo sapien
actgggtgtgatgagaaagcagctggcatgtca

SEQ ID NO: 34834 - DNA, 33 bp, Homo sapien
actgggtgtgatgagacagcagctggcatgtca

SEQ ID NO: 34835 - DNA, 33 bp, Homo sapien
ttatttaggattatggaagtcaggtttctatga

SEQ ID NO: 34836 - DNA, 33 bp, Homo sapien
ttatttaggattatgggagtcaggtttctatga

SEQ ID NO: 34837 - DNA, 33 bp, Homo sapien
atcaaatgtattaaaaccatctaaagccaaata

SEQ ID NO: 34838 - DNA, 33 bp, Homo sapien
atcaaatgtattaaaatcatctaaagccaaata

SEQ ID NO: 34839 - DNA, 33 bp, Homo sapien
aaattgtggaatttcaccttcgaggtcttcaaa

SEQ ID NO: 34840 - DNA, 33 bp, Homo sapien
aaattgtggaatttcatcttcgaggtcttcaaa

SEQ ID NO: 34841 - DNA, 33 bp, Homo sapien
tcatcgtctcatctgaacttcttccacacctgg

SEQ ID NO: 34842 - DNA, 33 bp, Homo sapien
tcatcgtctcatctgaccttcttccacacctgg

SEQ ID NO: 34843 - DNA, 33 bp, Homo sapien
tcgatgggtccctacaaccacaagatgttatgt

SEQ ID NO: 34844 - DNA, 33 bp, Homo sapien
tcgatgggtccctacagccacaagatgttatgt

SEQ ID NO: 34845 - DNA, 33 bp, Homo sapien
tcttttgacctatttacggcaattcaaggtgta

SEQ ID NO: 34846 - DNA, 33 bp, Homo sapien
tcttttgacctatttatggcaattcaaggtgta

SEQ ID NO: 34847 - DNA, 33 bp, Homo sapien
cctccatttttcagctaagagtcctgtaaaatg

SEQ ID NO: 34848 - DNA, 33 bp, Homo sapien
cctccatttttcagctgagagtcctgtaaaatg

SEQ ID NO: 34849 - DNA, 33 bp, Homo sapien
tatattcgccacccagcctaagaatagacgatt

SEQ ID NO: 34850 - DNA, 33 bp, Homo sapien
tatattcgccacccaggctaagaatagacgatt

SEQ ID NO: 34851 - DNA, 33 bp, Homo sapien
aggaaagatggaaccactagaatgcaagaagaa

SEQ ID NO: 34852 - DNA, 33 bp, Homo sapien
aggaaagatggaaccagtagaatgcaagaagaa

SEQ ID NO: 34853 - DNA, 33 bp, Homo sapien
gtcttaaacagataaaaaccaaagattcaacca

SEQ ID NO: 34854 - DNA, 33 bp, Homo sapien
gtcttaaacagataaataccaaagattcaacca

SEQ ID NO: 34855 - DNA, 33 bp, Homo sapien
caaagcaaaaataatcaagacactggggcttta

SEQ ID NO: 34856 - DNA, 33 bp, Homo sapien
caaagcaaaaataatcgagacactggggcttta

SEQ ID NO: 34857 - DNA, 33 bp, Homo sapien
agtccatggaaattcacactagccaatcctaaa

SEQ ID NO: 34858 - DNA, 33 bp, Homo sapien
agtccatggaaattcatactagccaatcctaaa

SEQ ID NO: 34859 - DNA, 33 bp, Homo sapien
cccaatatcccataaccccggtctaatgaggag

SEQ ID NO: 34860 - DNA, 33 bp, Homo sapien
cccaatatcccataactccggtctaatgaggag

SEQ ID NO: 34861 - DNA, 33 bp, Homo sapien
gaatattcattttcgcacatgagaaagtagtgt

SEQ ID NO: 34862 - DNA, 33 bp, Homo sapien
gaatattcattttcgcgcatgagaaagtagtgt

SEQ ID NO: 34863 - DNA, 33 bp, Homo sapien
cacaagcaagtcttgcccaagattagatcagaa

SEQ ID NO: 34864 - DNA, 33 bp, Homo sapien
cacaagcaagtcttgctcaagattagatcagaa

SEQ ID NO: 34865 - DNA, 33 bp, Homo sapien
ccaaagtcaaagcaacaactaatacaggagatc

SEQ ID NO: 34866 - DNA, 33 bp, Homo sapien
ccaaagtcaaagcaacgactaatacaggagatc

SEQ ID NO: 34867 - DNA, 33 bp, Homo sapien
gaagctatgtggatagaatattttaacccctcc

SEQ ID NO: 34868 - DNA, 33 bp, Homo sapien
gaagctatgtggataggatattttaacccctcc

SEQ ID NO: 34869 - DNA, 33 bp, Homo sapien
cttgagatcactatataaaataatccaggaaaa

SEQ ID NO: 34870 - DNA, 33 bp, Homo sapien
cttgagatcactatatgaaataatccaggaaaa

SEQ ID NO: 34871 - DNA, 33 bp, Homo sapien
tgcagactagctcgtgcaaaggaggagagcgtt

SEQ ID NO: 34872 - DNA, 33 bp, Homo sapien
tgcagactagctcgtgtaaaggaggagagcgtt

SEQ ID NO: 34873 - DNA, 33 bp, Homo sapien
atctgagggaaaataacgtctgaactgtctcat

SEQ ID NO: 34874 - DNA, 33 bp, Homo sapien
atctgagggaaaataaggtctgaactgtctcat

SEQ ID NO: 34875 - DNA, 33 bp, Homo sapien
gagagagagagtaagacaaagagctaggatttg

SEQ ID NO: 34876 - DNA, 33 bp, Homo sapien
gagagagagagtaagagaaagagctaggatttg

SEQ ID NO: 34877 - DNA, 33 bp, Homo sapien
tttgtcatgtagctaacaaatctcaagctccag

SEQ ID NO: 34878 - DNA, 33 bp, Homo sapien
tttgtcatgtagctaataaatctcaagctccag

SEQ ID NO: 34879 - DNA, 33 bp, Homo sapien
acgaacaaactctcagaacaaatctagttttaa

SEQ ID NO: 34880 - DNA, 33 bp, Homo sapien
acgaacaaactctcaggacaaatctagttttaa

SEQ ID NO: 34881 - DNA, 33 bp, Homo sapien
aatgaagaaaacagacaagttataggattcaca

SEQ ID NO: 34882 - DNA, 33 bp, Homo sapien
aatgaagaaaacagaccagttataggattcaca

SEQ ID NO: 34883 - DNA, 33 bp, Homo sapien
tctgcctctttgaggacgtaggtctatacaagt

SEQ ID NO: 34884 - DNA, 33 bp, Homo sapien
tctgcctctttgaggatgtaggtctatacaagt

SEQ ID NO: 34885 - DNA, 33 bp, Homo sapien
ctaggaatcccatcaaatgcacagactcatcaa

SEQ ID NO: 34886 - DNA, 33 bp, Homo sapien
ctaggaatcccatcaagtgcacagactcatcaa

SEQ ID NO: 34887 - DNA, 33 bp, Homo sapien
tgcctgctgatttttacgattgaagtaaaagac

SEQ ID NO: 34888 - DNA, 33 bp, Homo sapien
tgcctgctgatttttaggattgaagtaaaagac

SEQ ID NO: 34889 - DNA, 33 bp, Homo sapien
tgtttgctcaatcaacactttgttatagtatca

SEQ ID NO: 34890 - DNA, 33 bp, Homo sapien
tgtttgctcaatcaaccctttgttatagtatca

SEQ ID NO: 34891 - DNA, 33 bp, Homo sapien
ttcaattgccaaaccagccaggtgttccacgca

SEQ ID NO: 34892 - DNA, 33 bp, Homo sapien
ttcaattgccaaaccatccaggtgttccacgca

SEQ ID NO: 34893 - DNA, 33 bp, Homo sapien
tttgcaggttccttcaacactgagcttctcaga

SEQ ID NO: 34894 - DNA, 33 bp, Homo sapien
tttgcaggttccttcagcactgagcttctcaga

SEQ ID NO: 34895 - DNA, 33 bp, Homo sapien
atgtcattaatgtaaccgaactgtacacttcat

SEQ ID NO: 34896 - DNA, 33 bp, Homo sapien
atgtcattaatgtaactgaactgtacacttcat

SEQ ID NO: 34897 - DNA, 33 bp, Homo sapien
tccatggagtactatgaaggcatgaaaagaatg

SEQ ID NO: 34898 - DNA, 33 bp, Homo sapien
tccatggagtactatgcaggcatgaaaagaatg

SEQ ID NO: 34899 - DNA, 33 bp, Homo sapien
tatgaaactgtggcagcataacttagattataa

SEQ ID NO: 34900 - DNA, 33 bp, Homo sapien
tatgaaactgtggcaggataacttagattataa

SEQ ID NO: 34901 - DNA, 33 bp, Homo sapien
ggaagagagcgtgttaccaccttgaaatcactt

SEQ ID NO: 34902 - DNA, 33 bp, Homo sapien
ggaagagagcgtgttagcaccttgaaatcactt

SEQ ID NO: 34903 - DNA, 33 bp, Homo sapien
ttcccaattcattttacgaggttagtattgtct

SEQ ID NO: 34904 - DNA, 33 bp, Homo sapien
ttcccaattcattttaggaggttagtattgtct

SEQ ID NO: 34905 - DNA, 33 bp, Homo sapien
cctcagaaaatacaaaatgccacaaattactta

SEQ ID NO: 34906 - DNA, 33 bp, Homo sapien
cctcagaaaatacaaagtgccacaaattactta

SEQ ID NO: 34907 - DNA, 33 bp, Homo sapien
tctgttttagtgcaccaaatgtaaagagaggtt

SEQ ID NO: 34908 - DNA, 33 bp, Homo sapien
tctgttttagtgcaccgaatgtaaagagaggtt

SEQ ID NO: 34909 - DNA, 33 bp, Homo sapien
tgtgtcagctggtcaacccacagaacaaagttc

SEQ ID NO: 34910 - DNA, 33 bp, Homo sapien
tgtgtcagctggtcaatccacagaacaaagttc

SEQ ID NO: 34911 - DNA, 33 bp, Homo sapien
acctctgcctcctttacctgtctccctctgagc

SEQ ID NO: 34912 - DNA, 33 bp, Homo sapien
acctctgcctcctttatctgtctccctctgagc

SEQ ID NO: 34913 - DNA, 33 bp, Homo sapien
taagcatagttagagcaaaaaggctgggccttt

SEQ ID NO: 34914 - DNA, 33 bp, Homo sapien
taagcatagttagagcgaaaaggctgggccttt

SEQ ID NO: 34915 - DNA, 33 bp, Homo sapien
atgaggttatcttggaactggcattccaggaag

SEQ ID NO: 34916 - DNA, 33 bp, Homo sapien
atgaggttatcttggatctggcattccaggaag

SEQ ID NO: 34917 - DNA, 33 bp, Homo sapien
catgcagaatggtgcccacagtaggtcaacaaa

SEQ ID NO: 34918 - DNA, 33 bp, Homo sapien
catgcagaatggtgcctacagtaggtcaacaaa

SEQ ID NO: 34919 - DNA, 33 bp, Homo sapien
ttattttccacatttaaatctgtgatccatgtg

SEQ ID NO: 34920 - DNA, 33 bp, Homo sapien
ttattttccacatttatatctgtgatccatgtg

SEQ ID NO: 34921 - DNA, 33 bp, Homo sapien
actagctgtgactgaactgtcattgccccagcc

SEQ ID NO: 34922 - DNA, 33 bp, Homo sapien
actagctgtgactgaagtgtcattgccccagcc

SEQ ID NO: 34923 - DNA, 33 bp, Homo sapien
ggaaaaatcgtgttccgcaaaactggtccctgg

SEQ ID NO: 34924 - DNA, 33 bp, Homo sapien
ggaaaaatcgtgttcctcaaaactggtccctgg

SEQ ID NO: 34925 - DNA, 33 bp, Homo sapien
tcttgcctttgtggaaattaaatgctagcagta

SEQ ID NO: 34926 - DNA, 33 bp, Homo sapien
tcttgcctttgtggaacttaaatgctagcagta

SEQ ID NO: 34927 - DNA, 33 bp, Homo sapien
ttatgaaggtcatgtacagggaaatataggaaa

SEQ ID NO: 34928 - DNA, 33 bp, Homo sapien
ttatgaaggtcatgtatagggaaatataggaaa

SEQ ID NO: 34929 - DNA, 33 bp, Homo sapien
tttgccatttgagataccagtttggagttgata

SEQ ID NO: 34930 - DNA, 33 bp, Homo sapien
tttgccatttgagatatcagtttggagttgata

SEQ ID NO: 34931 - DNA, 33 bp, Homo sapien
catgatccatctattccaagtatcccaaccccc

SEQ ID NO: 34932 - DNA, 33 bp, Homo sapien
catgatccatctattctaagtatcccaaccccc

SEQ ID NO: 34933 - DNA, 33 bp, Homo sapien
tttttaccatgagattcaagttcctcggtttgt

SEQ ID NO: 34934 - DNA, 33 bp, Homo sapien
tttttaccatgagattgaagttcctcggtttgt

SEQ ID NO: 34935 - DNA, 33 bp, Homo sapien
cctttctgaatgattaacatttggcttaaaacc

SEQ ID NO: 34936 - DNA, 33 bp, Homo sapien
cctttctgaatgattagcatttggcttaaaacc

SEQ ID NO: 34937 - DNA, 33 bp, Homo sapien
ggaaaagggccaaggaccaaaagacagacctgg

SEQ ID NO: 34938 - DNA, 33 bp, Homo sapien
ggaaaagggccaaggatcaaaagacagacctgg

SEQ ID NO: 34939 - DNA, 33 bp, Homo sapien
tagacgctctctgtcaaggtaacaggagagaaa

SEQ ID NO: 34940 - DNA, 33 bp, Homo sapien
tagacgctctctgtcagggtaacaggagagaaa

SEQ ID NO: 34941 - DNA, 33 bp, Homo sapien
gaaaaccatcaaggaactcataacctttagatt

SEQ ID NO: 34942 - DNA, 33 bp, Homo sapien
gaaaaccatcaaggaagtcataacctttagatt

SEQ ID NO: 34943 - DNA, 33 bp, Homo sapien
aaacactgcttaagggcaatgtatacattggga

SEQ ID NO: 34944 - DNA, 33 bp, Homo sapien
aaacactgcttaagggtaatgtatacattggga

SEQ ID NO: 34945 - DNA, 33 bp, Homo sapien
aggtctggaaatgttgcaggcctaatagagtat

SEQ ID NO: 34946 - DNA, 33 bp, Homo sapien
aggtctggaaatgttgtaggcctaatagagtat

SEQ ID NO: 34947 - DNA, 33 bp, Homo sapien
tatttttagtacatacaggtttatctatgttgg

SEQ ID NO: 34948 - DNA, 33 bp, Homo sapien
tatttttagtacatacgggtttatctatgttgg

SEQ ID NO: 34949 - DNA, 33 bp, Homo sapien
gattttatggtttgaacgattttctgtcagcat

SEQ ID NO: 34950 - DNA, 33 bp, Homo sapien
gattttatggtttgaatgattttctgtcagcat

SEQ ID NO: 34951 - DNA, 33 bp, Homo sapien
aaactttgagagttcagcaatacgttcaaactg

SEQ ID NO: 34952 - DNA, 33 bp, Homo sapien
aaactttgagagttcatcaatacgttcaaactg

SEQ ID NO: 34953 - DNA, 33 bp, Homo sapien
acactgatagcaggtgcagagcctgtcctgcaa

SEQ ID NO: 34954 - DNA, 33 bp, Homo sapien
acactgatagcaggtgtagagcctgtcctgcaa

SEQ ID NO: 34955 - DNA, 33 bp, Homo sapien
attgctgctatgttgaagggaagggagtgcttt

SEQ ID NO: 34956 - DNA, 33 bp, Homo sapien
attgctgctatgttgaggggaagggagtgcttt

SEQ ID NO: 34957 - DNA, 33 bp, Homo sapien
gaatgaatgaacagacagatggttacttacccc

SEQ ID NO: 34958 - DNA, 33 bp, Homo sapien
gaatgaatgaacagacggatggttacttacccc

SEQ ID NO: 34959 - DNA, 33 bp, Homo sapien
cttagcagagagctaacaagtgccagtcaaagc

SEQ ID NO: 34960 - DNA, 33 bp, Homo sapien
cttagcagagagctaagaagtgccagtcaaagc

SEQ ID NO: 34961 - DNA, 33 bp, Homo sapien
tctaactaatcctacacgtgttgctttgctcat

SEQ ID NO: 34962 - DNA, 33 bp, Homo sapien
tctaactaatcctacatgtgttgctttgctcat

SEQ ID NO: 34963 - DNA, 33 bp, Homo sapien
gggcaagtccttcaaaactcacagaggtactac

SEQ ID NO: 34964 - DNA, 33 bp, Homo sapien
gggcaagtccttcaaacctcacagaggtactac

SEQ ID NO: 34965 - DNA, 33 bp, Homo sapien
tcataaaccctttagaggatgcagattattctg

SEQ ID NO: 34966 - DNA, 33 bp, Homo sapien
tcataaaccctttagatgatgcagattattctg

SEQ ID NO: 34967 - DNA, 33 bp, Homo sapien
actcaggaacaggtacaatacttggcccatgaa

SEQ ID NO: 34968 - DNA, 33 bp, Homo sapien
actcaggaacaggtaccatacttggcccatgaa

SEQ ID NO: 34969 - DNA, 33 bp, Homo sapien
tgcaaagatctgggggaaaagggtccaagaagc

SEQ ID NO: 34970 - DNA, 33 bp, Homo sapien
tgcaaagatctggggggaaagggtccaagaagc

SEQ ID NO: 34971 - DNA, 33 bp, Homo sapien
taaggtgacacatgagcagagatctaaataaaa

SEQ ID NO: 34972 - DNA, 33 bp, Homo sapien
taaggtgacacatgaggagagatctaaataaaa

SEQ ID NO: 34973 - DNA, 33 bp, Homo sapien
gggctaaactacccagcaatgctaatgcaactc

SEQ ID NO: 34974 - DNA, 33 bp, Homo sapien
gggctaaactacccagtaatgctaatgcaactc

SEQ ID NO: 34975 - DNA, 33 bp, Homo sapien
cctatggtcagagaagcccttgatgtgagctct

SEQ ID NO: 34976 - DNA, 33 bp, Homo sapien
cctatggtcagagaagtccttgatgtgagctct

SEQ ID NO: 34977 - DNA, 33 bp, Homo sapien
acctcacagatgatagaaaagaactcattttag

SEQ ID NO: 34978 - DNA, 33 bp, Homo sapien
acctcacagatgataggaaagaactcattttag

SEQ ID NO: 34979 - DNA, 33 bp, Homo sapien
agccaggaagcctcggcatgttcccgaaatact

SEQ ID NO: 34980 - DNA, 33 bp, Homo sapien
agccaggaagcctcggtatgttcccgaaatact

SEQ ID NO: 34981 - DNA, 33 bp, Homo sapien
tctggagtgcagccaaagtatggcggggtgagg

SEQ ID NO: 34982 - DNA, 33 bp, Homo sapien
tctggagtgcagccaatgtatggcggggtgagg

SEQ ID NO: 34983 - DNA, 33 bp, Homo sapien
ctctccctttgcagagaatatacgtcctctcct

SEQ ID NO: 34984 - DNA, 33 bp, Homo sapien
ctctccctttgcagaggatatacgtcctctcct

SEQ ID NO: 34985 - DNA, 33 bp, Homo sapien
cctgacttgggtccgacagcactgccgaaggca

SEQ ID NO: 34986 - DNA, 33 bp, Homo sapien
cctgacttgggtccgatagcactgccgaaggca

SEQ ID NO: 34987 - DNA, 33 bp, Homo sapien
tcggacccaagtcaggacatctctgttttgaag

SEQ ID NO: 34988 - DNA, 33 bp, Homo sapien
tcggacccaagtcagggcatctctgttttgaag

SEQ ID NO: 34989 - DNA, 33 bp, Homo sapien
aattcttgggactgaaaaaggaatgccagcaac

SEQ ID NO: 34990 - DNA, 33 bp, Homo sapien
aattcttgggactgaagaaggaatgccagcaac

SEQ ID NO: 34991 - DNA, 33 bp, Homo sapien
ctgaggtgagagatgacggtaagtggattaaag

SEQ ID NO: 34992 - DNA, 33 bp, Homo sapien
ctgaggtgagagatgatggtaagtggattaaag

SEQ ID NO: 34993 - DNA, 33 bp, Homo sapien
ttcaatgagtcatgatcacaaaactgcactcca

SEQ ID NO: 34994 - DNA, 33 bp, Homo sapien
ttcaatgagtcatgattacaaaactgcactcca

SEQ ID NO: 34995 - DNA, 33 bp, Homo sapien
agagagagattagagcaaaagagacagacagga

SEQ ID NO: 34996 - DNA, 33 bp, Homo sapien
agagagagattagagcgaaagagacagacagga

SEQ ID NO: 34997 - DNA, 33 bp, Homo sapien
cctaatgaaaggccgccaaatgctttgagaatc

SEQ ID NO: 34998 - DNA, 33 bp, Homo sapien
cctaatgaaaggccgcgaaatgctttgagaatc

SEQ ID NO: 34999 - DNA, 33 bp, Homo sapien
tcgccatactcatccacatcccagaaaatgcca

SEQ ID NO: 35000 - DNA, 33 bp, Homo sapien
tcgccatactcatccatatcccagaaaatgcca

SEQ ID NO: 35001 - DNA, 33 bp, Homo sapien
agtattttcaactgcaagtatccctatttttaa

SEQ ID NO: 35002 - DNA, 33 bp, Homo sapien
agtattttcaactgcatgtatccctatttttaa

SEQ ID NO: 35003 - DNA, 33 bp, Homo sapien
ctttgcataggctatcacattgactcctcctaa

SEQ ID NO: 35004 - DNA, 33 bp, Homo sapien
ctttgcataggctatcgcattgactcctcctaa

SEQ ID NO: 35005 - DNA, 33 bp, Homo sapien
cttagcgaggacctaagcatccaatgctgccaa

SEQ ID NO: 35006 - DNA, 33 bp, Homo sapien
cttagcgaggacctaatcatccaatgctgccaa

SEQ ID NO: 35007 - DNA, 33 bp, Homo sapien
attaggagagagcagacggaagaaggaaaggta

SEQ ID NO: 35008 - DNA, 33 bp, Homo sapien
attaggagagagcagagggaagaaggaaaggta

SEQ ID NO: 35009 - DNA, 33 bp, Homo sapien
cctcgctctccccctggaatgagttctatccca

SEQ ID NO: 35010 - DNA, 33 bp, Homo sapien
cctcgctctccccctgtaatgagttctatccca

SEQ ID NO: 35011 - DNA, 33 bp, Homo sapien
ggctctcctgctcgggacataagtgggattgaa

SEQ ID NO: 35012 - DNA, 33 bp, Homo sapien
ggctctcctgctcggggcataagtgggattgaa

SEQ ID NO: 35013 - DNA, 33 bp, Homo sapien
ctgttctcggcttcaacataagcctacattcca

SEQ ID NO: 35014 - DNA, 33 bp, Homo sapien
ctgttctcggcttcaagataagcctacattcca

SEQ ID NO: 35015 - DNA, 33 bp, Homo sapien
agatactagacccttaccagacatacgatctgc

SEQ ID NO: 35016 - DNA, 33 bp, Homo sapien
agatactagacccttatcagacatacgatctgc

SEQ ID NO: 35017 - DNA, 33 bp, Homo sapien
aatgaagaacaaagagaactcacacttcccaat

SEQ ID NO: 35018 - DNA, 33 bp, Homo sapien
aatgaagaacaaagaggactcacacttcccaat

SEQ ID NO: 35019 - DNA, 33 bp, Homo sapien
gggacttctgtcaaaccatgattgttggaacag

SEQ ID NO: 35020 - DNA, 33 bp, Homo sapien
gggacttctgtcaaacgatgattgttggaacag

SEQ ID NO: 35021 - DNA, 33 bp, Homo sapien
tcccacttgcaacaccagattccagtccagtgc

SEQ ID NO: 35022 - DNA, 33 bp, Homo sapien
tcccacttgcaacaccggattccagtccagtgc

SEQ ID NO: 35023 - DNA, 33 bp, Homo sapien
tccttctcatcacctacgtttcagttcaagtag

SEQ ID NO: 35024 - DNA, 33 bp, Homo sapien
tccttctcatcacctatgtttcagttcaagtag

SEQ ID NO: 35025 - DNA, 33 bp, Homo sapien
ctttctagtgctctgaactgaggactttgctca

SEQ ID NO: 35026 - DNA, 33 bp, Homo sapien
ctttctagtgctctgagctgaggactttgctca

SEQ ID NO: 35027 - DNA, 33 bp, Homo sapien
tatactctggtataaggcatcaaccacactgga

SEQ ID NO: 35028 - DNA, 33 bp, Homo sapien
tatactctggtataagtcatcaaccacactgga

SEQ ID NO: 35029 - DNA, 33 bp, Homo sapien
actgatcttcctgtcacgtgcaaattaggagcc

SEQ ID NO: 35030 - DNA, 33 bp, Homo sapien
actgatcttcctgtcatgtgcaaattaggagcc

SEQ ID NO: 35031 - DNA, 33 bp, Homo sapien
actgttaggaagaacacacaaagaggtgcacat

SEQ ID NO: 35032 - DNA, 33 bp, Homo sapien
actgttaggaagaacatacaaagaggtgcacat

SEQ ID NO: 35033 - DNA, 33 bp, Homo sapien
ggagttttgtcttgaaaatcctgcttaatgact

SEQ ID NO: 35034 - DNA, 33 bp, Homo sapien
ggagttttgtcttgaagatcctgcttaatgact

SEQ ID NO: 35035 - DNA, 33 bp, Homo sapien
tactgatcatcatatacgtttctgttatattag

SEQ ID NO: 35036 - DNA, 33 bp, Homo sapien
tactgatcatcatataggtttctgttatattag

SEQ ID NO: 35037 - DNA, 33 bp, Homo sapien
aaagtaacaaaactgactcaaacatatcttata

SEQ ID NO: 35038 - DNA, 33 bp, Homo sapien
aaagtaacaaaactgattcaaacatatcttata

SEQ ID NO: 35039 - DNA, 33 bp, Homo sapien
gaatgtcattcatttacgttcagttaaaatatt

SEQ ID NO: 35040 - DNA, 33 bp, Homo sapien
gaatgtcattcatttatgttcagttaaaatatt

SEQ ID NO: 35041 - DNA, 33 bp, Homo sapien
tgttcaaactgtaccacctatacttcatctttt

SEQ ID NO: 35042 - DNA, 33 bp, Homo sapien
tgttcaaactgtaccatctatacttcatctttt

SEQ ID NO: 35043 - DNA, 33 bp, Homo sapien
ctggctaataaaggacccctaaacccagtgtgt

SEQ ID NO: 35044 - DNA, 33 bp, Homo sapien
ctggctaataaaggactcctaaacccagtgtgt

SEQ ID NO: 35045 - DNA, 33 bp, Homo sapien
gtgtgggccccaaagtaaagggctggagtctta

SEQ ID NO: 35046 - DNA, 33 bp, Homo sapien
gtgtgggccccaaagtgaagggctggagtctta

SEQ ID NO: 35047 - DNA, 33 bp, Homo sapien
tttccactggagcaaactgatgggcctggctat

SEQ ID NO: 35048 - DNA, 33 bp, Homo sapien
tttccactggagcaaagtgatgggcctggctat

SEQ ID NO: 35049 - DNA, 33 bp, Homo sapien
ttccaaatgcaagcaaagagccttctcagattt

SEQ ID NO: 35050 - DNA, 33 bp, Homo sapien
ttccaaatgcaagcaaggagccttctcagattt

SEQ ID NO: 35051 - DNA, 33 bp, Homo sapien
ttggccatcctcagtgaaaatctattggcctgt

SEQ ID NO: 35052 - DNA, 33 bp, Homo sapien
ttggccatcctcagtgcaaatctattggcctgt

SEQ ID NO: 35053 - DNA, 33 bp, Homo sapien
caattcaggctaataaaaaataacaggagccgc

SEQ ID NO: 35054 - DNA, 33 bp, Homo sapien
caattcaggctaataagaaataacaggagccgc

SEQ ID NO: 35055 - DNA, 33 bp, Homo sapien
accatttgcagataagaacacatgaatggagac

SEQ ID NO: 35056 - DNA, 33 bp, Homo sapien
accatttgcagataaggacacatgaatggagac

SEQ ID NO: 35057 - DNA, 33 bp, Homo sapien
aatcctctattcttgtataccgagactatatcc

SEQ ID NO: 35058 - DNA, 33 bp, Homo sapien
aatcctctattcttgtgtaccgagactatatcc

SEQ ID NO: 35059 - DNA, 33 bp, Homo sapien
ataattataagaagtccatgtagaaattcagac

SEQ ID NO: 35060 - DNA, 33 bp, Homo sapien
ataattataagaagtctatgtagaaattcagac

SEQ ID NO: 35061 - DNA, 33 bp, Homo sapien
ttacagtgcctgtaacacagtaggtattcaata

SEQ ID NO: 35062 - DNA, 33 bp, Homo sapien
ttacagtgcctgtaactcagtaggtattcaata

SEQ ID NO: 35063 - DNA, 33 bp, Homo sapien
ctgagttttctttgacagacagagtccactgtg

SEQ ID NO: 35064 - DNA, 33 bp, Homo sapien
ctgagttttctttgacggacagagtccactgtg

SEQ ID NO: 35065 - DNA, 33 bp, Homo sapien
acacagggagtaaaagcacttagatattgttaa

SEQ ID NO: 35066 - DNA, 33 bp, Homo sapien
acacagggagtaaaaggacttagatattgttaa

SEQ ID NO: 35067 - DNA, 33 bp, Homo sapien
ataaagatttggcatcacaagcctggtgggagg

SEQ ID NO: 35068 - DNA, 33 bp, Homo sapien
ataaagatttggcatcgcaagcctggtgggagg

SEQ ID NO: 35069 - DNA, 33 bp, Homo sapien
ggtgtcccgtagtcaaaaggttgatgctgatgc

SEQ ID NO: 35070 - DNA, 33 bp, Homo sapien
ggtgtcccgtagtcaagaggttgatgctgatgc

SEQ ID NO: 35071 - DNA, 33 bp, Homo sapien
ttcttccagacagcaaaggattgtattataatg

SEQ ID NO: 35072 - DNA, 33 bp, Homo sapien
ttcttccagacagcaagggattgtattataatg

SEQ ID NO: 35073 - DNA, 33 bp, Homo sapien
ggaataatcagataaagacaccacgtttatgta

SEQ ID NO: 35074 - DNA, 33 bp, Homo sapien
ggaataatcagataaatacaccacgtttatgta

SEQ ID NO: 35075 - DNA, 33 bp, Homo sapien
aaaccacctaagatacccacagacgatcaccag

SEQ ID NO: 35076 - DNA, 33 bp, Homo sapien
aaaccacctaagatacgcacagacgatcaccag

SEQ ID NO: 35077 - DNA, 33 bp, Homo sapien
aatttaaaatacactcgagatttcaatgctggt

SEQ ID NO: 35078 - DNA, 33 bp, Homo sapien
aatttaaaatacactctagatttcaatgctggt

SEQ ID NO: 35079 - DNA, 33 bp, Homo sapien
atcaggggatagagacacctcatatgctgaagc

SEQ ID NO: 35080 - DNA, 33 bp, Homo sapien
atcaggggatagagacgcctcatatgctgaagc

SEQ ID NO: 35081 - DNA, 33 bp, Homo sapien
ggcctctggctcctcaaggaatttagaatccac

SEQ ID NO: 35082 - DNA, 33 bp, Homo sapien
ggcctctggctcctcagggaatttagaatccac

SEQ ID NO: 35083 - DNA, 33 bp, Homo sapien
gttgttaatggatagaataatgggtcctcataa

SEQ ID NO: 35084 - DNA, 33 bp, Homo sapien
gttgttaatggatagattaatgggtcctcataa

SEQ ID NO: 35085 - DNA, 33 bp, Homo sapien
gtcaacttaatctaagcaaagggctttggagct

SEQ ID NO: 35086 - DNA, 33 bp, Homo sapien
gtcaacttaatctaaggaaagggctttggagct

SEQ ID NO: 35087 - DNA, 33 bp, Homo sapien
ggcatcacctattatacgcttctttctgaagtg

SEQ ID NO: 35088 - DNA, 33 bp, Homo sapien
ggcatcacctattatatgcttctttctgaagtg

SEQ ID NO: 35089 - DNA, 33 bp, Homo sapien
ataataggtgatgccacagttacttgaaagagg

SEQ ID NO: 35090 - DNA, 33 bp, Homo sapien
ataataggtgatgccatagttacttgaaagagg

SEQ ID NO: 35091 - DNA, 33 bp, Homo sapien
ctgcataagtgtaagaagaagaaaggatatcta

SEQ ID NO: 35092 - DNA, 33 bp, Homo sapien
ctgcataagtgtaagacgaagaaaggatatcta

SEQ ID NO: 35093 - DNA, 33 bp, Homo sapien
tttttttcagttagtaacatattttcacaggtc

SEQ ID NO: 35094 - DNA, 33 bp, Homo sapien
tttttttcagttagtatcatattttcacaggtc

SEQ ID NO: 35095 - DNA, 33 bp, Homo sapien
gggccaagtataaaaacactgtggaagcggtga

SEQ ID NO: 35096 - DNA, 33 bp, Homo sapien
gggccaagtataaaaagactgtggaagcggtga

SEQ ID NO: 35097 - DNA, 33 bp, Homo sapien
gaggctaagaaaaaaaatacacttgtgcaagaa

SEQ ID NO: 35098 - DNA, 33 bp, Homo sapien
gaggctaagaaaaaaagtacacttgtgcaagaa

SEQ ID NO: 35099 - DNA, 33 bp, Homo sapien
ttttctccaagatgcaaaagctgttattaataa

SEQ ID NO: 35100 - DNA, 33 bp, Homo sapien
ttttctccaagatgcagaagctgttattaataa

SEQ ID NO: 35101 - DNA, 33 bp, Homo sapien
gacaggacgaacagacacaagggcatgcctcca

SEQ ID NO: 35102 - DNA, 33 bp, Homo sapien
gacaggacgaacagacgcaagggcatgcctcca

SEQ ID NO: 35103 - DNA, 33 bp, Homo sapien
tacagctactatgccaaagtcccctaaatccat

SEQ ID NO: 35104 - DNA, 33 bp, Homo sapien
tacagctactatgccagagtcccctaaatccat

SEQ ID NO: 35105 - DNA, 33 bp, Homo sapien
agaagattttgatggacaggggaggtgaagcaa

SEQ ID NO: 35106 - DNA, 33 bp, Homo sapien
agaagattttgatggagaggggaggtgaagcaa

SEQ ID NO: 35107 - DNA, 33 bp, Homo sapien
cggaaagaagcagcccactggggttagggtttg

SEQ ID NO: 35108 - DNA, 33 bp, Homo sapien
cggaaagaagcagcccgctggggttagggtttg

SEQ ID NO: 35109 - DNA, 33 bp, Homo sapien
acttttgtaaatccaaattctctttcttgatga

SEQ ID NO: 35110 - DNA, 33 bp, Homo sapien
acttttgtaaatccaagttctctttcttgatga

SEQ ID NO: 35111 - DNA, 33 bp, Homo sapien
cattcttggccttcacccttcatcgtctttttg

SEQ ID NO: 35112 - DNA, 33 bp, Homo sapien
cattcttggccttcactcttcatcgtctttttg

SEQ ID NO: 35113 - DNA, 33 bp, Homo sapien
attccagtctgggtcaagccaaaaagacgatga

SEQ ID NO: 35114 - DNA, 33 bp, Homo sapien
attccagtctgggtcatgccaaaaagacgatga

SEQ ID NO: 35115 - DNA, 33 bp, Homo sapien
ggtgaatgcaagactacagagctgagactttat

SEQ ID NO: 35116 - DNA, 33 bp, Homo sapien
ggtgaatgcaagactatagagctgagactttat

SEQ ID NO: 35117 - DNA, 33 bp, Homo sapien
tatccttcatgtagacgcattcagacatcccaa

SEQ ID NO: 35118 - DNA, 33 bp, Homo sapien
tatccttcatgtagactcattcagacatcccaa

SEQ ID NO: 35119 - DNA, 33 bp, Homo sapien
tattttggacacattccaagacagccacagtca

SEQ ID NO: 35120 - DNA, 33 bp, Homo sapien
tattttggacacattcgaagacagccacagtca

SEQ ID NO: 35121 - DNA, 33 bp, Homo sapien
agcttaacaatgataaatctagtcttcactttg

SEQ ID NO: 35122 - DNA, 33 bp, Homo sapien
agcttaacaatgataactctagtcttcactttg

SEQ ID NO: 35123 - DNA, 33 bp, Homo sapien
tgcttacttccgtagcacactgagaattctgct

SEQ ID NO: 35124 - DNA, 33 bp, Homo sapien
tgcttacttccgtagcgcactgagaattctgct

SEQ ID NO: 35125 - DNA, 33 bp, Homo sapien
gcacatagtaagcatgccagaaagagtaactag

SEQ ID NO: 35126 - DNA, 33 bp, Homo sapien
gcacatagtaagcatgtcagaaagagtaactag

SEQ ID NO: 35127 - DNA, 33 bp, Homo sapien
agtttgaagcctctacaggaagaacagtatttt

SEQ ID NO: 35128 - DNA, 33 bp, Homo sapien
agtttgaagcctctacgggaagaacagtatttt

SEQ ID NO: 35129 - DNA, 33 bp, Homo sapien
aattgctacgatagggccagcttttcattctcc

SEQ ID NO: 35130 - DNA, 33 bp, Homo sapien
aattgctacgatagggtcagcttttcattctcc

SEQ ID NO: 35131 - DNA, 33 bp, Homo sapien
attttgaaaagagaaaatgcttgatcattgatc

SEQ ID NO: 35132 - DNA, 33 bp, Homo sapien
attttgaaaagagaaagtgcttgatcattgatc

SEQ ID NO: 35133 - DNA, 33 bp, Homo sapien
ctgcaatgtactagagaagaggaaggaccagga

SEQ ID NO: 35134 - DNA, 33 bp, Homo sapien
ctgcaatgtactagaggagaggaaggaccagga

SEQ ID NO: 35135 - DNA, 33 bp, Homo sapien
gtccccacaattcacacacaagatttattacca

SEQ ID NO: 35136 - DNA, 33 bp, Homo sapien
gtccccacaattcacatacaagatttattacca

SEQ ID NO: 35137 - DNA, 33 bp, Homo sapien
taagtcagtgtccaataatcacctaaaagtctg

SEQ ID NO: 35138 - DNA, 33 bp, Homo sapien
taagtcagtgtccaatgatcacctaaaagtctg

SEQ ID NO: 35139 - DNA, 33 bp, Homo sapien
tggactcagagagtcacggtttcctagaattat

SEQ ID NO: 35140 - DNA, 33 bp, Homo sapien
tggactcagagagtcatggtttcctagaattat

SEQ ID NO: 35141 - DNA, 33 bp, Homo sapien
atgctcacactgagaaaaaattggtttgtgttt

SEQ ID NO: 35142 - DNA, 33 bp, Homo sapien
atgctcacactgagaagaaattggtttgtgttt

SEQ ID NO: 35143 - DNA, 33 bp, Homo sapien
tcattcatccagaataaatttcaagccatgatg

SEQ ID NO: 35144 - DNA, 33 bp, Homo sapien
tcattcatccagaatatatttcaagccatgatg

SEQ ID NO: 35145 - DNA, 33 bp, Homo sapien
gttaacctcagttatcgagaactcttgctcacc

SEQ ID NO: 35146 - DNA, 33 bp, Homo sapien
gttaacctcagttatctagaactcttgctcacc

SEQ ID NO: 35147 - DNA, 33 bp, Homo sapien
ttcatattctaggtcaaagttattgcttttttg

SEQ ID NO: 35148 - DNA, 33 bp, Homo sapien
ttcatattctaggtcagagttattgcttttttg

SEQ ID NO: 35149 - DNA, 33 bp, Homo sapien
tgatgctacgtattagcaatgtgcaatagtcta

SEQ ID NO: 35150 - DNA, 33 bp, Homo sapien
tgatgctacgtattagtaatgtgcaatagtcta

SEQ ID NO: 35151 - DNA, 33 bp, Homo sapien
aaactggtgttgccatcagcaggttatgcgcta

SEQ ID NO: 35152 - DNA, 33 bp, Homo sapien
aaactggtgttgccattagcaggttatgcgcta

SEQ ID NO: 35153 - DNA, 33 bp, Homo sapien
tcttcccattagcaaaaccactcaaacttgcag

SEQ ID NO: 35154 - DNA, 33 bp, Homo sapien
tcttcccattagcaaagccactcaaacttgcag

SEQ ID NO: 35155 - DNA, 33 bp, Homo sapien
tatacttacattttccactttttatgcaaaagt

SEQ ID NO: 35156 - DNA, 33 bp, Homo sapien
tatacttacattttcctctttttatgcaaaagt

SEQ ID NO: 35157 - DNA, 33 bp, Homo sapien
gccttgatatactgaccatgttctagtgtctgc

SEQ ID NO: 35158 - DNA, 33 bp, Homo sapien
gccttgatatactgactatgttctagtgtctgc

SEQ ID NO: 35159 - DNA, 33 bp, Homo sapien
cttgacctgtctacaacccaaagcaggtatgtc

SEQ ID NO: 35160 - DNA, 33 bp, Homo sapien
cttgacctgtctacaatccaaagcaggtatgtc

SEQ ID NO: 35161 - DNA, 33 bp, Homo sapien
tgtggagtacttgcaaggtcagggcatcttcca

SEQ ID NO: 35162 - DNA, 33 bp, Homo sapien
tgtggagtacttgcaatgtcagggcatcttcca

SEQ ID NO: 35163 - DNA, 33 bp, Homo sapien
taatagacataatagcaaagaagacacagtccc

SEQ ID NO: 35164 - DNA, 33 bp, Homo sapien
taatagacataatagcgaagaagacacagtccc

SEQ ID NO: 35165 - DNA, 33 bp, Homo sapien
ctgtcagctgagaaacaatgtgcttagtgatgc

SEQ ID NO: 35166 - DNA, 33 bp, Homo sapien
ctgtcagctgagaaacgatgtgcttagtgatgc

SEQ ID NO: 35167 - DNA, 33 bp, Homo sapien
accccatcttagaaaaccataggcatttatcca

SEQ ID NO: 35168 - DNA, 33 bp, Homo sapien
accccatcttagaaaagcataggcatttatcca

SEQ ID NO: 35169 - DNA, 33 bp, Homo sapien
gactcctgaatgacgaacctaaagtcaatttat

SEQ ID NO: 35170 - DNA, 33 bp, Homo sapien
gactcctgaatgacgagcctaaagtcaatttat

SEQ ID NO: 35171 - DNA, 33 bp, Homo sapien
tcaatttatagctatgacaggaaatatgaaaca

SEQ ID NO: 35172 - DNA, 33 bp, Homo sapien
tcaatttatagctatggcaggaaatatgaaaca

SEQ ID NO: 35173 - DNA, 33 bp, Homo sapien
cctttttatctttcaaatctaagcaatatgatc

SEQ ID NO: 35174 - DNA, 33 bp, Homo sapien
cctttttatctttcaagtctaagcaatatgatc

SEQ ID NO: 35175 - DNA, 33 bp, Homo sapien
tctggttgctaataagacactatgaattaaggt

SEQ ID NO: 35176 - DNA, 33 bp, Homo sapien
tctggttgctaataagtcactatgaattaaggt

SEQ ID NO: 35177 - DNA, 33 bp, Homo sapien
gttgcttctcagaaagaccttattttctagaac

SEQ ID NO: 35178 - DNA, 33 bp, Homo sapien
gttgcttctcagaaaggccttattttctagaac

SEQ ID NO: 35179 - DNA, 33 bp, Homo sapien
catcccgtctgtttggcatttacataagaagga

SEQ ID NO: 35180 - DNA, 33 bp, Homo sapien
catcccgtctgtttggtatttacataagaagga

SEQ ID NO: 35181 - DNA, 33 bp, Homo sapien
tttccagataaggaagccagataattttatgtg

SEQ ID NO: 35182 - DNA, 33 bp, Homo sapien
tttccagataaggaagtcagataattttatgtg

SEQ ID NO: 35183 - DNA, 33 bp, Homo sapien
aggctgtggctaaaccagctttgtagtgtcttt

SEQ ID NO: 35184 - DNA, 33 bp, Homo sapien
aggctgtggctaaacctgctttgtagtgtcttt

SEQ ID NO: 35185 - DNA, 33 bp, Homo sapien
tctggaaatcagatttaaaaaggctgaacccta

SEQ ID NO: 35186 - DNA, 33 bp, Homo sapien
tctggaaatcagattttaaaaggctgaacccta

SEQ ID NO: 35187 - DNA, 33 bp, Homo sapien
tactgttgagaatgaccgagctgcctggcattt

SEQ ID NO: 35188 - DNA, 33 bp, Homo sapien
tactgttgagaatgactgagctgcctggcattt

SEQ ID NO: 35189 - DNA, 33 bp, Homo sapien
gatagtttgcattaaggcccatttatagacaat

SEQ ID NO: 35190 - DNA, 33 bp, Homo sapien
gatagtttgcattaagtcccatttatagacaat

SEQ ID NO: 35191 - DNA, 33 bp, Homo sapien
catgttctaggtacaccggaaatatgctgaggg

SEQ ID NO: 35192 - DNA, 33 bp, Homo sapien
catgttctaggtacactggaaatatgctgaggg

SEQ ID NO: 35193 - DNA, 33 bp, Homo sapien
tgaaggaatacatgccactttgatttagcagtc

SEQ ID NO: 35194 - DNA, 33 bp, Homo sapien
tgaaggaatacatgccgctttgatttagcagtc

SEQ ID NO: 35195 - DNA, 33 bp, Homo sapien
accttgcagtgaaaaacgtttataatttaaagg

SEQ ID NO: 35196 - DNA, 33 bp, Homo sapien
accttgcagtgaaaaatgtttataatttaaagg

SEQ ID NO: 35197 - DNA, 33 bp, Homo sapien
aacgtgcccggcagaagattggttctttttttt

SEQ ID NO: 35198 - DNA, 33 bp, Homo sapien
aacgtgcccggcagaatattggttctttttttt

SEQ ID NO: 35199 - DNA, 33 bp, Homo sapien
tactctaacttcctaacgtttcagaagactttt

SEQ ID NO: 35200 - DNA, 33 bp, Homo sapien
tactctaacttcctaatgtttcagaagactttt

SEQ ID NO: 35201 - DNA, 33 bp, Homo sapien
actgagcatgcgctacaataatgaactcatact

SEQ ID NO: 35202 - DNA, 33 bp, Homo sapien
actgagcatgcgctacgataatgaactcatact

SEQ ID NO: 35203 - DNA, 33 bp, Homo sapien
taatgagacgatgatccgagggtgactggccac

SEQ ID NO: 35204 - DNA, 33 bp, Homo sapien
taatgagacgatgatctgagggtgactggccac

SEQ ID NO: 35205 - DNA, 33 bp, Homo sapien
ttcatggaagatggacacaacatctatgacacg

SEQ ID NO: 35206 - DNA, 33 bp, Homo sapien
ttcatggaagatggacgcaacatctatgacacg

SEQ ID NO: 35207 - DNA, 33 bp, Homo sapien
cagtagcctgctggtacgctcatgtctgtggct

SEQ ID NO: 35208 - DNA, 33 bp, Homo sapien
cagtagcctgctggtatgctcatgtctgtggct

SEQ ID NO: 35209 - DNA, 33 bp, Homo sapien
agggagtgagaattggaacataatattgagata

SEQ ID NO: 35210 - DNA, 33 bp, Homo sapien
agggagtgagaattgggacataatattgagata

SEQ ID NO: 35211 - DNA, 33 bp, Homo sapien
acagaactcaggattaacgtgccaaggtaatct

SEQ ID NO: 35212 - DNA, 33 bp, Homo sapien
acagaactcaggattatcgtgccaaggtaatct

SEQ ID NO: 35213 - DNA, 33 bp, Homo sapien
tcagaacaaggacttacgatgaaaatgttagtg

SEQ ID NO: 35214 - DNA, 33 bp, Homo sapien
tcagaacaaggacttatgatgaaaatgttagtg

SEQ ID NO: 35215 - DNA, 33 bp, Homo sapien
gggacttctttttctgaagatcactgcctcgta

SEQ ID NO: 35216 - DNA, 33 bp, Homo sapien
gggacttctttttctgcagatcactgcctcgta

SEQ ID NO: 35217 - DNA, 33 bp, Homo sapien
ttttcttaaatgccaccattgaattaggttgac

SEQ ID NO: 35218 - DNA, 33 bp, Homo sapien
ttttcttaaatgccactattgaattaggttgac

SEQ ID NO: 35219 - DNA, 33 bp, Homo sapien
tagaacatagtataaaagttaaaacagcagcta

SEQ ID NO: 35220 - DNA, 33 bp, Homo sapien
tagaacatagtataaacgttaaaacagcagcta

SEQ ID NO: 35221 - DNA, 33 bp, Homo sapien
ggcccctttgtctatgaacatatcatttctttg

SEQ ID NO: 35222 - DNA, 33 bp, Homo sapien
ggcccctttgtctatggacatatcatttctttg

SEQ ID NO: 35223 - DNA, 33 bp, Homo sapien
aagctattcaggcttacggtatgaagccacatg

SEQ ID NO: 35224 - DNA, 33 bp, Homo sapien
aagctattcaggcttatggtatgaagccacatg

SEQ ID NO: 35225 - DNA, 33 bp, Homo sapien; identical to SEQ ID NO: 35223

SEQ ID NO: 35226 - DNA, 33 bp, Homo sapien; identical to SEQ ID NO: 35224

SEQ ID NO: 35227 - DNA, 33 bp, Homo sapien
cataaggaacttttatcagaaagtaatgcaatt

SEQ ID NO: 35228 - DNA, 33 bp, Homo sapien
cataaggaacttttatgagaaagtaatgcaatt

SEQ ID NO: 35229 - DNA, 33 bp, Homo sapien
tgatgcctaatgtacacataatttctacactca

SEQ ID NO: 35230 - DNA, 33 bp, Homo sapien
tgatgcctaatgtacatataatttctacactca

SEQ ID NO: 35231 - DNA, 33 bp, Homo sapien
attaaaatgactttgaccatacaacaggagcag

SEQ ID NO: 35232 - DNA, 33 bp, Homo sapien
attaaaatgactttgagcatacaacaggagcag

(The sequence listing continues in the following parts.)
